United States Patent Application Publication US 2015/0191722 A1 - sequence listing, part 4

SEQ ID NO: 110066 - DNA, 15 bp, Homo sapiens
ttaaggtaggcgaat

SEQ ID NO: 110067 - DNA, 15 bp, Homo sapiens
cttaaggtaggcgaa

SEQ ID NO: 110068 - DNA, 15 bp, Homo sapiens
tcttaaggtaggcga

SEQ ID NO: 110069 - DNA, 15 bp, Homo sapiens
ctcttaaggtaggcg

SEQ ID NO: 110070 - DNA, 15 bp, Homo sapiens
gctcttaaggtaggc

SEQ ID NO: 110071 - DNA, 15 bp, Homo sapiens
tgctcttaaggtagg

SEQ ID NO: 110072 - DNA, 15 bp, Homo sapiens
atgctcttaaggtag

SEQ ID NO: 110073 - DNA, 15 bp, Homo sapiens
aatgctcttaaggta

SEQ ID NO: 110074 - DNA, 15 bp, Homo sapiens
aaatgctcttaaggt

SEQ ID NO: 110075 - DNA, 15 bp, Homo sapiens
aaaatgctcttaagg

SEQ ID NO: 110076 - DNA, 15 bp, Homo sapiens
gaaaatgctcttaag

SEQ ID NO: 110077 - DNA, 15 bp, Homo sapiens
agaaaatgctcttaa

SEQ ID NO: 110078 - DNA, 15 bp, Homo sapiens
aagaaaatgctctta

SEQ ID NO: 110079 - DNA, 15 bp, Homo sapiens
aaagaaaatgctctt

SEQ ID NO: 110080 - DNA, 15 bp, Homo sapiens
caaagaaaatgctct

SEQ ID NO: 110081 - DNA, 15 bp, Homo sapiens
tcaaagaaaatgctc

SEQ ID NO: 110082 - DNA, 15 bp, Homo sapiens
ctcaaagaaaatgct

SEQ ID NO: 110083 - DNA, 15 bp, Homo sapiens
actcaaagaaaatgc

SEQ ID NO: 110084 - DNA, 15 bp, Homo sapiens
gactcaaagaaaatg

SEQ ID NO: 110085 - DNA, 15 bp, Homo sapiens
tgactcaaagaaaat

SEQ ID NO: 110086 - DNA, 15 bp, Homo sapiens
gtgactcaaagaaaa

SEQ ID NO: 110087 - DNA, 15 bp, Homo sapiens
ggtgactcaaagaaa

SEQ ID NO: 110088 - DNA, 15 bp, Homo sapiens
gggtgactcaaagaa

SEQ ID NO: 110089 - DNA, 15 bp, Homo sapiens
agggtgactcaaaga

SEQ ID NO: 110090 - DNA, 15 bp, Homo sapiens
tagggtgactcaaag

SEQ ID NO: 110091 - DNA, 15 bp, Homo sapiens
ttagggtgactcaaa

SEQ ID NO: 110092 - DNA, 15 bp, Homo sapiens
gttagggtgactcaa

SEQ ID NO: 110093 - DNA, 15 bp, Homo sapiens
tgttagggtgactca

SEQ ID NO: 110094 - DNA, 15 bp, Homo sapiens
ctgttagggtgactc

SEQ ID NO: 110095 - DNA, 15 bp, Homo sapiens
tctgttagggtgact

SEQ ID NO: 110096 - DNA, 15 bp, Homo sapiens
gtctgttagggtgac

SEQ ID NO: 110097 - DNA, 15 bp, Homo sapiens
ggtctgttagggtga

SEQ ID NO: 110098 - DNA, 15 bp, Homo sapiens
tggtctgttagggtg

SEQ ID NO: 110099 - DNA, 15 bp, Homo sapiens
ttggtctgttagggt

SEQ ID NO: 110100 - DNA, 15 bp, Homo sapiens
tttggtctgttaggg

SEQ ID NO: 110101 - DNA, 15 bp, Homo sapiens
gtttggtctgttagg

SEQ ID NO: 110102 - DNA, 15 bp, Homo sapiens
ggtttggtctgttag

SEQ ID NO: 110103 - DNA, 15 bp, Homo sapiens
aggtttggtctgtta

SEQ ID NO: 110104 - DNA, 15 bp, Homo sapiens
aaggtttggtctgtt

SEQ ID NO: 110105 - DNA, 15 bp, Homo sapiens
taaggtttggtctgt

SEQ ID NO: 110106 - DNA, 15 bp, Homo sapiens
ttaaggtttggtctg

SEQ ID NO: 110107 - DNA, 15 bp, Homo sapiens
attaaggtttggtct

SEQ ID NO: 110108 - DNA, 15 bp, Homo sapiens
aattaaggtttggtc

SEQ ID NO: 110109 - DNA, 15 bp, Homo sapiens
gaattaaggtttggt

SEQ ID NO: 110110 - DNA, 15 bp, Homo sapiens
tgaattaaggtttgg

SEQ ID NO: 110111 - DNA, 15 bp, Homo sapiens
ttgaattaaggtttg

SEQ ID NO: 110112 - DNA, 15 bp, Homo sapiens
cttgaattaaggttt

SEQ ID NO: 110113 - DNA, 15 bp, Homo sapiens
acttgaattaaggtt

SEQ ID NO: 110114 - DNA, 15 bp, Homo sapiens
tacttgaattaaggt

SEQ ID NO: 110115 - DNA, 15 bp, Homo sapiens
ctacttgaattaagg

SEQ ID NO: 110116 - DNA, 15 bp, Homo sapiens
tctacttgaattaag

SEQ ID NO: 110117 - DNA, 15 bp, Homo sapiens
ttctacttgaattaa

SEQ ID NO: 110118 - DNA, 15 bp, Homo sapiens
attctacttgaatta

SEQ ID NO: 110119 - DNA, 15 bp, Homo sapiens
gattctacttgaatt

SEQ ID NO: 110120 - DNA, 15 bp, Homo sapiens
agattctacttgaat

SEQ ID NO: 110121 - DNA, 15 bp, Homo sapiens
tagattctacttgaa

SEQ ID NO: 110122 - DNA, 15 bp, Homo sapiens
atagattctacttga

SEQ ID NO: 110123 - DNA, 15 bp, Homo sapiens
catagattctacttg

SEQ ID NO: 110124 - DNA, 15 bp, Homo sapiens
gcatagattctactt

SEQ ID NO: 110125 - DNA, 15 bp, Homo sapiens
agcatagattctact

SEQ ID NO: 110126 - DNA, 15 bp, Homo sapiens
gagcatagattctac

SEQ ID NO: 110127 - DNA, 15 bp, Homo sapiens
ggagcatagattcta

SEQ ID NO: 110128 - DNA, 15 bp, Homo sapiens
tggagcatagattct

SEQ ID NO: 110129 - DNA, 15 bp, Homo sapiens
ttggagcatagattc

SEQ ID NO: 110130 - DNA, 15 bp, Homo sapiens
tttggagcatagatt

SEQ ID NO: 110131 - DNA, 15 bp, Homo sapiens
atttggagcatagat

SEQ ID NO: 110132 - DNA, 15 bp, Homo sapiens
aatttggagcataga

SEQ ID NO: 110133 - DNA, 15 bp, Homo sapiens
aaatttggagcatag

SEQ ID NO: 110134 - DNA, 15 bp, Homo sapiens
aaaatttggagcata

SEQ ID NO: 110135 - DNA, 15 bp, Homo sapiens
taaaatttggagcat

SEQ ID NO: 110136 - DNA, 15 bp, Homo sapiens
ctaaaatttggagca

SEQ ID NO: 110137 - DNA, 15 bp, Homo sapiens
tctaaaatttggagc

SEQ ID NO: 110138 - DNA, 15 bp, Homo sapiens
gtctaaaatttggag

SEQ ID NO: 110139 - DNA, 15 bp, Homo sapiens
ggtctaaaatttgga

SEQ ID NO: 110140 - DNA, 15 bp, Homo sapiens
tggtctaaaatttgg

SEQ ID NO: 110141 - DNA, 15 bp, Homo sapiens
ttggtctaaaatttg

SEQ ID NO: 110142 - DNA, 15 bp, Homo sapiens
tttggtctaaaattt

SEQ ID NO: 110143 - DNA, 15 bp, Homo sapiens
ctttggtctaaaatt

SEQ ID NO: 110144 - DNA, 15 bp, Homo sapiens
tctttggtctaaaat

SEQ ID NO: 110145 - DNA, 15 bp, Homo sapiens
ttctttggtctaaaa

SEQ ID NO: 110146 - DNA, 15 bp, Homo sapiens
attctttggtctaaa

SEQ ID NO: 110147 - DNA, 15 bp, Homo sapiens
gattctttggtctaa

SEQ ID NO: 110148 - DNA, 15 bp, Homo sapiens
tgattctttggtcta

SEQ ID NO: 110149 - DNA, 15 bp, Homo sapiens
ctgattctttggtct

SEQ ID NO: 110150 - DNA, 15 bp, Homo sapiens
tctgattctttggtc

SEQ ID NO: 110151 - DNA, 15 bp, Homo sapiens
ttctgattctttggt

SEQ ID NO: 110152 - DNA, 15 bp, Homo sapiens
tttctgattctttgg

SEQ ID NO: 110153 - DNA, 15 bp, Homo sapiens
atttctgattctttg

SEQ ID NO: 110154 - DNA, 15 bp, Homo sapiens
tatttctgattcttt

SEQ ID NO: 110155 - DNA, 15 bp, Homo sapiens
ctatttctgattctt

SEQ ID NO: 110156 - DNA, 15 bp, Homo sapiens
actatttctgattct

SEQ ID NO: 110157 - DNA, 15 bp, Homo sapiens
aactatttctgattc

SEQ ID NO: 110158 - DNA, 15 bp, Homo sapiens
caactatttctgatt

SEQ ID NO: 110159 - DNA, 15 bp, Homo sapiens
gcaactatttctgat

SEQ ID NO: 110160 - DNA, 15 bp, Homo sapiens
ggcaactatttctga

SEQ ID NO: 110161 - DNA, 15 bp, Homo sapiens
tggcaactatttctg

SEQ ID NO: 110162 - DNA, 15 bp, Homo sapiens
atggcaactatttct

SEQ ID NO: 110163 - DNA, 15 bp, Homo sapiens
gatggcaactatttc

SEQ ID NO: 110164 - DNA, 15 bp, Homo sapiens
agatggcaactattt

SEQ ID NO: 110165 - DNA, 15 bp, Homo sapiens
cagatggcaactatt

SEQ ID NO: 110166 - DNA, 15 bp, Homo sapiens
acagatggcaactat

SEQ ID NO: 110167 - DNA, 15 bp, Homo sapiens
aacagatggcaacta

SEQ ID NO: 110168 - DNA, 15 bp, Homo sapiens
gaacagatggcaact

SEQ ID NO: 110169 - DNA, 15 bp, Homo sapiens
ggaacagatggcaac

SEQ ID NO: 110170 - DNA, 15 bp, Homo sapiens
gggaacagatggcaa

SEQ ID NO: 110171 - DNA, 15 bp, Homo sapiens
agggaacagatggca

SEQ ID NO: 110172 - DNA, 15 bp, Homo sapiens
cagggaacagatggc

SEQ ID NO: 110173 - DNA, 15 bp, Homo sapiens
acagggaacagatgg

SEQ ID NO: 110174 - DNA, 15 bp, Homo sapiens
tacagggaacagatg

SEQ ID NO: 110175 - DNA, 15 bp, Homo sapiens
ctacagggaacagat

SEQ ID NO: 110176 - DNA, 15 bp, Homo sapiens
actacagggaacaga

SEQ ID NO: 110177 - DNA, 15 bp, Homo sapiens
aactacagggaacag

SEQ ID NO: 110178 - DNA, 15 bp, Homo sapiens
aaactacagggaaca

SEQ ID NO: 110179 - DNA, 15 bp, Homo sapiens
aaaactacagggaac

SEQ ID NO: 110180 - DNA, 15 bp, Homo sapiens
caaaactacagggaa

SEQ ID NO: 110181 - DNA, 15 bp, Homo sapiens
ccaaaactacaggga

SEQ ID NO: 110182 - DNA, 15 bp, Homo sapiens
accaaaactacaggg

SEQ ID NO: 110183 - DNA, 15 bp, Homo sapiens
aaccaaaactacagg

SEQ ID NO: 110184 - DNA, 15 bp, Homo sapiens
taaccaaaactacag

SEQ ID NO: 110185 - DNA, 15 bp, Homo sapiens
ataaccaaaactaca

SEQ ID NO: 110186 - DNA, 15 bp, Homo sapiens
aataaccaaaactac

SEQ ID NO: 110187 - DNA, 15 bp, Homo sapiens
taataaccaaaacta

SEQ ID NO: 110188 - DNA, 15 bp, Homo sapiens
ttaataaccaaaact

SEQ ID NO: 110189 - DNA, 15 bp, Homo sapiens
tttaataaccaaaac

SEQ ID NO: 110190 - DNA, 15 bp, Homo sapiens
gtttaataaccaaaa

SEQ ID NO: 110191 - DNA, 15 bp, Homo sapiens
ggtttaataaccaaa

SEQ ID NO: 110192 - DNA, 15 bp, Homo sapiens
aggtttaataaccaa

SEQ ID NO: 110193 - DNA, 15 bp, Homo sapiens
gaggtttaataacca

SEQ ID NO: 110194 - DNA, 15 bp, Homo sapiens
agaggtttaataacc

SEQ ID NO: 110195 - DNA, 15 bp, Homo sapiens
aagaggtttaataac

SEQ ID NO: 110196 - DNA, 15 bp, Homo sapiens
gaagaggtttaataa

SEQ ID NO: 110197 - DNA, 15 bp, Homo sapiens
agaagaggtttaata

SEQ ID NO: 110198 - DNA, 15 bp, Homo sapiens
gagaagaggtttaat

SEQ ID NO: 110199 - DNA, 15 bp, Homo sapiens
tgagaagaggtttaa

SEQ ID NO: 110200 - DNA, 15 bp, Homo sapiens
ctgagaagaggttta

SEQ ID NO: 110201 - DNA, 15 bp, Homo sapiens
actgagaagaggttt

SEQ ID NO: 110202 - DNA, 15 bp, Homo sapiens
gactgagaagaggtt

SEQ ID NO: 110203 - DNA, 15 bp, Homo sapiens
agactgagaagaggt

SEQ ID NO: 110204 - DNA, 15 bp, Homo sapiens
tagactgagaagagg

SEQ ID NO: 110205 - DNA, 15 bp, Homo sapiens
ttagactgagaagag

SEQ ID NO: 110206 - DNA, 15 bp, Homo sapiens
tttagactgagaaga

SEQ ID NO: 110207 - DNA, 15 bp, Homo sapiens
gtttagactgagaag

SEQ ID NO: 110208 - DNA, 15 bp, Homo sapiens
agtttagactgagaa

SEQ ID NO: 110209 - DNA, 15 bp, Homo sapiens
gagtttagactgaga

SEQ ID NO: 110210 - DNA, 15 bp, Homo sapiens
tgagtttagactgag

SEQ ID NO: 110211 - DNA, 15 bp, Homo sapiens
ctgagtttagactga

SEQ ID NO: 110212 - DNA, 15 bp, Homo sapiens
cctgagtttagactg

SEQ ID NO: 110213 - DNA, 15 bp, Homo sapiens
gcctgagtttagact

SEQ ID NO: 110214 - DNA, 15 bp, Homo sapiens
ggcctgagtttagac

SEQ ID NO: 110215 - DNA, 15 bp, Homo sapiens
gggcctgagtttaga

SEQ ID NO: 110216 - DNA, 15 bp, Homo sapiens
ggggcctgagtttag

SEQ ID NO: 110217 - DNA, 15 bp, Homo sapiens
tggggcctgagttta

SEQ ID NO: 110218 - DNA, 15 bp, Homo sapiens
ctggggcctgagttt

SEQ ID NO: 110219 - DNA, 15 bp, Homo sapiens
gctggggcctgagtt

SEQ ID NO: 110220 - DNA, 15 bp, Homo sapiens
tgctggggcctgagt

SEQ ID NO: 110221 - DNA, 15 bp, Homo sapiens
ttgctggggcctgag

SEQ ID NO: 110222 - DNA, 15 bp, Homo sapiens
tttgctggggcctga

SEQ ID NO: 110223 - DNA, 15 bp, Homo sapiens
atttgctggggcctg

SEQ ID NO: 110224 - DNA, 15 bp, Homo sapiens
catttgctggggcct

SEQ ID NO: 110225 - DNA, 15 bp, Homo sapiens
tcatttgctggggcc

SEQ ID NO: 110226 - DNA, 15 bp, Homo sapiens
ctcatttgctggggc

SEQ ID NO: 110227 - DNA, 15 bp, Homo sapiens
gctcatttgctgggg

SEQ ID NO: 110228 - DNA, 15 bp, Homo sapiens
ggctcatttgctggg

SEQ ID NO: 110229 - DNA, 15 bp, Homo sapiens
gggctcatttgctgg

SEQ ID NO: 110230 - DNA, 15 bp, Homo sapiens
tgggctcatttgctg

SEQ ID NO: 110231 - DNA, 15 bp, Homo sapiens
atgggctcatttgct

SEQ ID NO: 110232 - DNA, 15 bp, Homo sapiens
tatgggctcatttgc

SEQ ID NO: 110233 - DNA, 15 bp, Homo sapiens
ctatgggctcatttg

SEQ ID NO: 110234 - DNA, 15 bp, Homo sapiens
cctatgggctcattt

SEQ ID NO: 110235 - DNA, 15 bp, Homo sapiens
gcctatgggctcatt

SEQ ID NO: 110236 - DNA, 15 bp, Homo sapiens
agcctatgggctcat

SEQ ID NO: 110237 - DNA, 15 bp, Homo sapiens
aagcctatgggctca

SEQ ID NO: 110238 - DNA, 15 bp, Homo sapiens
gaagcctatgggctc

SEQ ID NO: 110239 - DNA, 15 bp, Homo sapiens
agaagcctatgggct

SEQ ID NO: 110240 - DNA, 15 bp, Homo sapiens
cagaagcctatgggc

SEQ ID NO: 110241 - DNA, 15 bp, Homo sapiens
ccagaagcctatggg

SEQ ID NO: 110242 - DNA, 15 bp, Homo sapiens
accagaagcctatgg

SEQ ID NO: 110243 - DNA, 15 bp, Homo sapiens
aaccagaagcctatg

SEQ ID NO: 110244 - DNA, 15 bp, Homo sapiens
taaccagaagcctat

SEQ ID NO: 110245 - DNA, 15 bp, Homo sapiens
ataaccagaagccta

SEQ ID NO: 110246 - DNA, 15 bp, Homo sapiens
aataaccagaagcct

SEQ ID NO: 110247 - DNA, 15 bp, Homo sapiens
aaataaccagaagcc

SEQ ID NO: 110248 - DNA, 15 bp, Homo sapiens
aaaataaccagaagc

SEQ ID NO: 110249 - DNA, 15 bp, Homo sapiens
aaaaataaccagaag

SEQ ID NO: 110250 - DNA, 15 bp, Homo sapiens
gaaaaataaccagaa

SEQ ID NO: 110251 - DNA, 15 bp, Homo sapiens
tgaaaaataaccaga

SEQ ID NO: 110252 - DNA, 15 bp, Homo sapiens
ctgaaaaataaccag

SEQ ID NO: 110253 - DNA, 15 bp, Homo sapiens
gctgaaaaataacca

SEQ ID NO: 110254 - DNA, 15 bp, Homo sapiens
tgctgaaaaataacc

SEQ ID NO: 110255 - DNA, 15 bp, Homo sapiens
ctgctgaaaaataac

SEQ ID NO: 110256 - DNA, 15 bp, Homo sapiens
gctgctgaaaaataa

SEQ ID NO: 110257 - DNA, 15 bp, Homo sapiens
agctgctgaaaaata

SEQ ID NO: 110258 - DNA, 15 bp, Homo sapiens
tagctgctgaaaaat

SEQ ID NO: 110259 - DNA, 15 bp, Homo sapiens
gtagctgctgaaaaa

SEQ ID NO: 110260 - DNA, 15 bp, Homo sapiens
tgtagctgctgaaaa

SEQ ID NO: 110261 - DNA, 15 bp, Homo sapiens
atgtagctgctgaaa

SEQ ID NO: 110262 - DNA, 15 bp, Homo sapiens
aatgtagctgctgaa

SEQ ID NO: 110263 - DNA, 15 bp, Homo sapiens
caatgtagctgctga

SEQ ID NO: 110264 - DNA, 15 bp, Homo sapiens
tcaatgtagctgctg

SEQ ID NO: 110265 - DNA, 15 bp, Homo sapiens
ctcaatgtagctgct

SEQ ID NO: 110266 - DNA, 15 bp, Homo sapiens
gctcaatgtagctgc

SEQ ID NO: 110267 - DNA, 15 bp, Homo sapiens
agctcaatgtagctg

SEQ ID NO: 110268 - DNA, 15 bp, Homo sapiens
aagctcaatgtagct

SEQ ID NO: 110269 - DNA, 15 bp, Homo sapiens
taagctcaatgtagc

SEQ ID NO: 110270 - DNA, 15 bp, Homo sapiens
gtaagctcaatgtag

SEQ ID NO: 110271 - DNA, 15 bp, Homo sapiens
agtaagctcaatgta

SEQ ID NO: 110272 - DNA, 15 bp, Homo sapiens
gagtaagctcaatgt

SEQ ID NO: 110273 - DNA, 15 bp, Homo sapiens
tgagtaagctcaatg

SEQ ID NO: 110274 - DNA, 15 bp, Homo sapiens
ctgagtaagctcaat

SEQ ID NO: 110275 - DNA, 15 bp, Homo sapiens
tctgagtaagctcaa

SEQ ID NO: 110276 - DNA, 15 bp, Homo sapiens
atctgagtaagctca

SEQ ID NO: 110277 - DNA, 15 bp, Homo sapiens
gatctgagtaagctc

SEQ ID NO: 110278 - DNA, 15 bp, Homo sapiens
tgatctgagtaagct

SEQ ID NO: 110279 - DNA, 15 bp, Homo sapiens
ctgatctgagtaagc

SEQ ID NO: 110280 - DNA, 15 bp, Homo sapiens
cctgatctgagtaag

SEQ ID NO: 110281 - DNA, 15 bp, Homo sapiens
ccctgatctgagtaa

SEQ ID NO: 110282 - DNA, 15 bp, Homo sapiens
cccctgatctgagta

SEQ ID NO: 110283 - DNA, 15 bp, Homo sapiens
tcccctgatctgagt

SEQ ID NO: 110284 - DNA, 15 bp, Homo sapiens
ctcccctgatctgag

SEQ ID NO: 110285 - DNA, 15 bp, Homo sapiens
gctcccctgatctga

SEQ ID NO: 110286 - DNA, 15 bp, Homo sapiens
agctcccctgatctg

SEQ ID NO: 110287 - DNA, 15 bp, Homo sapiens
cagctcccctgatct

SEQ ID NO: 110288 - DNA, 15 bp, Homo sapiens
ccagctcccctgatc

SEQ ID NO: 110289 - DNA, 15 bp, Homo sapiens
accagctcccctgat

SEQ ID NO: 110290 - DNA, 15 bp, Homo sapiens
caccagctcccctga

SEQ ID NO: 110291 - DNA, 15 bp, Homo sapiens
ccaccagctcccctg

SEQ ID NO: 110292 - DNA, 15 bp, Homo sapiens
cccaccagctcccct

SEQ ID NO: 110293 - DNA, 15 bp, Homo sapiens
gcccaccagctcccc

SEQ ID NO: 110294 - DNA, 15 bp, Homo sapiens
ggcccaccagctccc

SEQ ID NO: 110295 - DNA, 15 bp, Homo sapiens
aggcccaccagctcc

SEQ ID NO: 110296 - DNA, 15 bp, Homo sapiens
gaggcccaccagctc

SEQ ID NO: 110297 - DNA, 15 bp, Homo sapiens
tgaggcccaccagct

SEQ ID NO: 110298 - DNA, 15 bp, Homo sapiens
ctgaggcccaccagc

SEQ ID NO: 110299 - DNA, 15 bp, Homo sapiens
gctgaggcccaccag

SEQ ID NO: 110300 - DNA, 15 bp, Homo sapiens
tgctgaggcccacca

SEQ ID NO: 110301 - DNA, 15 bp, Homo sapiens
ttgctgaggcccacc

SEQ ID NO: 110302 - DNA, 15 bp, Homo sapiens
tttgctgaggcccac

SEQ ID NO: 110303 - DNA, 15 bp, Homo sapiens
ctttgctgaggccca

SEQ ID NO: 110304 - DNA, 15 bp, Homo sapiens
actttgctgaggccc

SEQ ID NO: 110305 - DNA, 15 bp, Homo sapiens
aactttgctgaggcc

SEQ ID NO: 110306 - DNA, 15 bp, Homo sapiens
aaactttgctgaggc

SEQ ID NO: 110307 - DNA, 15 bp, Homo sapiens
aaaactttgctgagg

SEQ ID NO: 110308 - DNA, 15 bp, Homo sapiens
caaaactttgctgag

SEQ ID NO: 110309 - DNA, 15 bp, Homo sapiens
acaaaactttgctga

SEQ ID NO: 110310 - DNA, 15 bp, Homo sapiens
aacaaaactttgctg

SEQ ID NO: 110311 - DNA, 15 bp, Homo sapiens
aaacaaaactttgct

SEQ ID NO: 110312 - DNA, 15 bp, Homo sapiens
aaaacaaaactttgc

SEQ ID NO: 110313 - DNA, 15 bp, Homo sapiens
gaaaacaaaactttg

SEQ ID NO: 110314 - DNA, 15 bp, Homo sapiens
ggaaaacaaaacttt

SEQ ID NO: 110315 - DNA, 15 bp, Homo sapiens
aggaaaacaaaactt

SEQ ID NO: 110316 - DNA, 15 bp, Homo sapiens
taggaaaacaaaact

SEQ ID NO: 110317 - DNA, 15 bp, Homo sapiens
ctaggaaaacaaaac

SEQ ID NO: 110318 - DNA, 15 bp, Homo sapiens
cctaggaaaacaaaa

SEQ ID NO: 110319 - DNA, 15 bp, Homo sapiens
ccctaggaaaacaaa

SEQ ID NO: 110320 - DNA, 15 bp, Homo sapiens
accctaggaaaacaa

SEQ ID NO: 110321 - DNA, 15 bp, Homo sapiens
caccctaggaaaaca

SEQ ID NO: 110322 - DNA, 15 bp, Homo sapiens
ccaccctaggaaaac

SEQ ID NO: 110323 - DNA, 15 bp, Homo sapiens
accaccctaggaaaa

SEQ ID NO: 110324 - DNA, 15 bp, Homo sapiens
caccaccctaggaaa

SEQ ID NO: 110325 - DNA, 15 bp, Homo sapiens
gcaccaccctaggaa

SEQ ID NO: 110326 - DNA, 15 bp, Homo sapiens
agcaccaccctagga

SEQ ID NO: 110327 - DNA, 15 bp, Homo sapiens
tagcaccaccctagg

SEQ ID NO: 110328 - DNA, 15 bp, Homo sapiens
ctagcaccaccctag

SEQ ID NO: 110329 - DNA, 15 bp, Homo sapiens
actagcaccacccta

SEQ ID NO: 110330 - DNA, 15 bp, Homo sapiens
gactagcaccaccct

SEQ ID NO: 110331 - DNA, 15 bp, Homo sapiens
agactagcaccaccc

SEQ ID NO: 110332 - DNA, 15 bp, Homo sapiens
tagactagcaccacc

SEQ ID NO: 110333 - DNA, 15 bp, Homo sapiens
ctagactagcaccac

SEQ ID NO: 110334 - DNA, 15 bp, Homo sapiens
actagactagcacca

SEQ ID NO: 110335 - DNA, 15 bp, Homo sapiens
tactagactagcacc

SEQ ID NO: 110336 - DNA, 15 bp, Homo sapiens
ctactagactagcac

SEQ ID NO: 110337 - DNA, 15 bp, Homo sapiens
gctactagactagca

SEQ ID NO: 110338 - DNA, 15 bp, Homo sapiens
agctactagactagc

SEQ ID NO: 110339 - DNA, 15 bp, Homo sapiens
tagctactagactag

SEQ ID NO: 110340 - DNA, 15 bp, Homo sapiens
ctagctactagacta

SEQ ID NO: 110341 - DNA, 15 bp, Homo sapiens
gctagctactagact

SEQ ID NO: 110342 - DNA, 15 bp, Homo sapiens
ggctagctactagac

SEQ ID NO: 110343 - DNA, 15 bp, Homo sapiens
tggctagctactaga

SEQ ID NO: 110344 - DNA, 15 bp, Homo sapiens
gtggctagctactag

SEQ ID NO: 110345 - DNA, 15 bp, Homo sapiens
tgtggctagctacta

SEQ ID NO: 110346 - DNA, 15 bp, Homo sapiens
atgtggctagctact

SEQ ID NO: 110347 - DNA, 15 bp, Homo sapiens
catgtggctagctac

SEQ ID NO: 110348 - DNA, 15 bp, Homo sapiens
acatgtggctagcta

SEQ ID NO: 110349 - DNA, 15 bp, Homo sapiens
cacatgtggctagct

SEQ ID NO: 110350 - DNA, 15 bp, Homo sapiens
ccacatgtggctagc

SEQ ID NO: 110351 - DNA, 15 bp, Homo sapiens
gccacatgtggctag

SEQ ID NO: 110352 - DNA, 15 bp, Homo sapiens
agccacatgtggcta

SEQ ID NO: 110353 - DNA, 15 bp, Homo sapiens
tagccacatgtggct

SEQ ID NO: 110354 - DNA, 15 bp, Homo sapiens
atagccacatgtggc

SEQ ID NO: 110355 - DNA, 15 bp, Homo sapiens
aatagccacatgtgg

SEQ ID NO: 110356 - DNA, 15 bp, Homo sapiens
gaatagccacatgtg

SEQ ID NO: 110357 - DNA, 15 bp, Homo sapiens
tgaatagccacatgt

SEQ ID NO: 110358 - DNA, 15 bp, Homo sapiens
ttgaatagccacatg

SEQ ID NO: 110359 - DNA, 15 bp, Homo sapiens
tttgaatagccacat

SEQ ID NO: 110360 - DNA, 15 bp, Homo sapiens
atttgaatagccaca

SEQ ID NO: 110361 - DNA, 15 bp, Homo sapiens
gatttgaatagccac

SEQ ID NO: 110362 - DNA, 15 bp, Homo sapiens
agatttgaatagcca

SEQ ID NO: 110363 - DNA, 15 bp, Homo sapiens
tagatttgaatagcc

SEQ ID NO: 110364 - DNA, 15 bp, Homo sapiens
ttagatttgaatagc

SEQ ID NO: 110365 - DNA, 15 bp, Homo sapiens
tttagatttgaatag

SEQ ID NO: 110366 - DNA, 15 bp, Homo sapiens
gtttagatttgaata

SEQ ID NO: 110367 - DNA, 15 bp, Homo sapiens
ggtttagatttgaat

SEQ ID NO: 110368 - DNA, 15 bp, Homo sapiens
tggtttagatttgaa

SEQ ID NO: 110369 - DNA, 15 bp, Homo sapiens
ttggtttagatttga

SEQ ID NO: 110370 - DNA, 15 bp, Homo sapiens
attggtttagatttg

SEQ ID NO: 110371 - DNA, 15 bp, Homo sapiens
aattggtttagattt

SEQ ID NO: 110372 - DNA, 15 bp, Homo sapiens
taattggtttagatt

SEQ ID NO: 110373 - DNA, 15 bp, Homo sapiens
ttaattggtttagat

SEQ ID NO: 110374 - DNA, 15 bp, Homo sapiens
tttaattggtttaga

SEQ ID NO: 110375 - DNA, 15 bp, Homo sapiens
ttttaattggtttag

SEQ ID NO: 110376 - DNA, 15 bp, Homo sapiens
attttaattggttta

SEQ ID NO: 110377 - DNA, 15 bp, Homo sapiens
aattttaattggttt

SEQ ID NO: 110378 - DNA, 15 bp, Homo sapiens
taattttaattggtt

SEQ ID NO: 110379 - DNA, 15 bp, Homo sapiens
ttaattttaattggt

SEQ ID NO: 110380 - DNA, 15 bp, Homo sapiens
tttaattttaattgg

SEQ ID NO: 110381 - DNA, 15 bp, Homo sapiens
ttttaattttaattg

SEQ ID NO: 110382 - DNA, 15 bp, Homo sapiens
tttttaattttaatt

SEQ ID NO: 110383 - DNA, 15 bp, Homo sapiens
gtttttaattttaat

SEQ ID NO: 110384 - DNA, 15 bp, Homo sapiens
tgtttttaattttaa

SEQ ID NO: 110385 - DNA, 15 bp, Homo sapiens
ttgtttttaatttta

SEQ ID NO: 110386 - DNA, 15 bp, Homo sapiens
attgtttttaatttt

SEQ ID NO: 110387 - DNA, 15 bp, Homo sapiens
aattgtttttaattt

SEQ ID NO: 110388 - DNA, 15 bp, Homo sapiens
aaattgtttttaatt

SEQ ID NO: 110389 - DNA, 15 bp, Homo sapiens
taaattgtttttaat

SEQ ID NO: 110390 - DNA, 15 bp, Homo sapiens
ttaaattgtttttaa

SEQ ID NO: 110391 - DNA, 15 bp, Homo sapiens
tttaaattgttttta

SEQ ID NO: 110392 - DNA, 15 bp, Homo sapiens
ttttaaattgttttt

SEQ ID NO: 110393 - DNA, 15 bp, Homo sapiens
attttaaattgtttt

SEQ ID NO: 110394 - DNA, 15 bp, Homo sapiens
aattttaaattgttt

SEQ ID NO: 110395 - DNA, 15 bp, Homo sapiens
gaattttaaattgtt

SEQ ID NO: 110396 - DNA, 15 bp, Homo sapiens
tgaattttaaattgt

SEQ ID NO: 110397 - DNA, 15 bp, Homo sapiens
ctgaattttaaattg

SEQ ID NO: 110398 - DNA, 15 bp, Homo sapiens
actgaattttaaatt

SEQ ID NO: 110399 - DNA, 15 bp, Homo sapiens
aactgaattttaaat

SEQ ID NO: 110400 - DNA, 15 bp, Homo sapiens
gaactgaattttaaa

SEQ ID NO: 110401 - DNA, 15 bp, Homo sapiens
ggaactgaattttaa

SEQ ID NO: 110402 - DNA, 15 bp, Homo sapiens
aggaactgaatttta

SEQ ID NO: 110403 - DNA, 15 bp, Homo sapiens
gaggaactgaatttt

SEQ ID NO: 110404 - DNA, 15 bp, Homo sapiens
tgaggaactgaattt

SEQ ID NO: 110405 - DNA, 15 bp, Homo sapiens
ctgaggaactgaatt

SEQ ID NO: 110406 - DNA, 15 bp, Homo sapiens
actgaggaactgaat

SEQ ID NO: 110407 - DNA, 15 bp, Homo sapiens
gactgaggaactgaa

SEQ ID NO: 110408 - DNA, 15 bp, Homo sapiens
tgactgaggaactga

SEQ ID NO: 110409 - DNA, 15 bp, Homo sapiens
gtgactgaggaactg

SEQ ID NO: 110410 - DNA, 15 bp, Homo sapiens
tgtgactgaggaact

SEQ ID NO: 110411 - DNA, 15 bp, Homo sapiens
gtgtgactgaggaac

SEQ ID NO: 110412 - DNA, 15 bp, Homo sapiens
ggtgtgactgaggaa

SEQ ID NO: 110413 - DNA, 15 bp, Homo sapiens
tggtgtgactgagga

SEQ ID NO: 110414 - DNA, 15 bp, Homo sapiens
ctggtgtgactgagg

SEQ ID NO: 110415 - DNA, 15 bp, Homo sapiens
actggtgtgactgag

SEQ ID NO: 110416 - DNA, 15 bp, Homo sapiens
aactggtgtgactga

SEQ ID NO: 110417 - DNA, 15 bp, Homo sapiens
taactggtgtgactg

SEQ ID NO: 110418 - DNA, 15 bp, Homo sapiens
gtaactggtgtgact

SEQ ID NO: 110419 - DNA, 15 bp, Homo sapiens
tgtaactggtgtgac

SEQ ID NO: 110420 - DNA, 15 bp, Homo sapiens
gtgtaactggtgtga

SEQ ID NO: 110421 - DNA, 15 bp, Homo sapiens
agtgtaactggtgtg

SEQ ID NO: 110422 - DNA, 15 bp, Homo sapiens
aagtgtaactggtgt

SEQ ID NO: 110423 - DNA, 15 bp, Homo sapiens
aaagtgtaactggtg

SEQ ID NO: 110424 - DNA, 15 bp, Homo sapiens
taaagtgtaactggt

SEQ ID NO: 110425 - DNA, 15 bp, Homo sapiens
ataaagtgtaactgg

SEQ ID NO: 110426 - DNA, 15 bp, Homo sapiens
aataaagtgtaactg

SEQ ID NO: 110427 - DNA, 15 bp, Homo sapiens
aaataaagtgtaact

SEQ ID NO: 110428 - DNA, 15 bp, Homo sapiens
aaaataaagtgtaac

SEQ ID NO: 110429 - DNA, 15 bp, Homo sapiens
aaaaataaagtgtaa

SEQ ID NO: 110430 - DNA, 15 bp, Homo sapiens
aaaaaataaagtgta

SEQ ID NO: 110431 - DNA, 15 bp, Homo sapiens
taaaaaataaagtgt

SEQ ID NO: 110432 - DNA, 15 bp, Homo sapiens
ataaaaaataaagtg

SEQ ID NO: 110433 - DNA, 15 bp, Homo sapiens
aataaaaaataaagt

SEQ ID NO: 110434 - DNA, 15 bp, Homo sapiens
taataaaaaataaag

SEQ ID NO: 110435 - DNA, 15 bp, Homo sapiens
ataataaaaaataaa

SEQ ID NO: 110436 - DNA, 15 bp, Homo sapiens
aataataaaaaataa

SEQ ID NO: 110437 - DNA, 15 bp, Homo sapiens
taataataaaaaata

SEQ ID NO: 110438 - DNA, 15 bp, Homo sapiens
ataataataaaaaat

SEQ ID NO: 110439 - DNA, 15 bp, Homo sapiens
aataataataaaaaa

SEQ ID NO: 110440 - DNA, 15 bp, Homo sapiens
taataataataaaaa

SEQ ID NO: 110441 - DNA, 15 bp, Homo sapiens
ataataataataaaa

SEQ ID NO: 110442 - DNA, 15 bp, Homo sapiens
aataataataataaa

SEQ ID NO: 110443 - DNA, 15 bp, Homo sapiens
aaataataataataa

SEQ ID NO: 110444 - DNA, 15 bp, Homo sapiens
aaaataataataata

SEQ ID NO: 110445 - DNA, 15 bp, Homo sapiens
aaaaataataataat

SEQ ID NO: 110446 - DNA, 15 bp, Homo sapiens
aaaaaataataataa

SEQ ID NO: 110447 - DNA, 15 bp, Homo sapiens
caaaaaataataata

SEQ ID NO: 110448 - DNA, 15 bp, Homo sapiens
tcaaaaaataataat

SEQ ID NO: 110449 - DNA, 15 bp, Homo sapiens
ctcaaaaaataataa

SEQ ID NO: 110450 - DNA, 15 bp, Homo sapiens
tctcaaaaaataata

SEQ ID NO: 110451 - DNA, 15 bp, Homo sapiens
gtctcaaaaaataat

SEQ ID NO: 110452 - DNA, 15 bp, Homo sapiens
tgtctcaaaaaataa

SEQ ID NO: 110453 - DNA, 15 bp, Homo sapiens
ctgtctcaaaaaata

SEQ ID NO: 110454 - DNA, 15 bp, Homo sapiens
tctgtctcaaaaaat

SEQ ID NO: 110455 - DNA, 15 bp, Homo sapiens
aagactctgtctcaa

SEQ ID NO: 110456 - DNA, 15 bp, Homo sapiens
caagactctgtctca

SEQ ID NO: 110457 - DNA, 15 bp, Homo sapiens
cctgggtgacagagc

SEQ ID NO: 110458 - DNA, 15 bp, Homo sapiens
acctgggtgacagag

SEQ ID NO: 110459 - DNA, 15 bp, Homo sapiens
aacctgggtgacaga

SEQ ID NO: 110460 - DNA, 15 bp, Homo sapiens
caacctgggtgacag

SEQ ID NO: 110461 - DNA, 15 bp, Homo sapiens
ccaacctgggtgaca

SEQ ID NO: 110462 - DNA, 15 bp, Homo sapiens
tccaacctgggtgac

SEQ ID NO: 110463 - DNA, 15 bp, Homo sapiens
ctccaacctgggtga

SEQ ID NO: 110464 - DNA, 15 bp, Homo sapiens
actccaacctgggtg

SEQ ID NO: 110465 - DNA, 15 bp, Homo sapiens
cactccaacctgggt

SEQ ID NO: 110466 - DNA, 15 bp, Homo sapiens
gcactccaacctggg

SEQ ID NO: 110467 - DNA, 15 bp, Homo sapiens
tgcactccaacctgg

SEQ ID NO: 110468 - DNA, 15 bp, Homo sapiens
ctgcactccaacctg

SEQ ID NO: 110469 - DNA, 15 bp, Homo sapiens
actgcactccaacct

SEQ ID NO: 110470 - DNA, 15 bp, Homo sapiens
cactgcactccaacc

SEQ ID NO: 110471 - DNA, 15 bp, Homo sapiens
ccactgcactccaac

SEQ ID NO: 110472 - DNA, 15 bp, Homo sapiens
gccactgcactccaa

SEQ ID NO: 110473 - DNA, 15 bp, Homo sapiens
gcgccactgcactcc

SEQ ID NO: 110474 - DNA, 15 bp, Homo sapiens
tgcgccactgcactc

SEQ ID NO: 110475 - DNA, 15 bp, Homo sapiens
ttgcgccactgcact

SEQ ID NO: 110476 - DNA, 15 bp, Homo sapiens
attgcgccactgcac

SEQ ID NO: 110477 - DNA, 15 bp, Homo sapiens
gattgcgccactgca

SEQ ID NO: 110478 - DNA, 15 bp, Homo sapiens
agattgcgccactgc

SEQ ID NO: 110479 - DNA, 15 bp, Homo sapiens
gagattgcgccactg

SEQ ID NO: 110480 - DNA, 15 bp, Homo sapiens
cgagattgcgccact

SEQ ID NO: 110481 - DNA, 15 bp, Homo sapiens
ccgagattgcgccac

SEQ ID NO: 110482 - DNA, 15 bp, Homo sapiens
ttgaggcaggagaat

SEQ ID NO: 110483 - DNA, 15 bp, Homo sapiens
gttgaggcaggagaa

SEQ ID NO: 110484 - DNA, 15 bp, Homo sapiens
ggttgaggcaggaga

SEQ ID NO: 110485 - DNA, 15 bp, Homo sapiens
aggttgaggcaggag

SEQ ID NO: 110486 - DNA, 15 bp, Homo sapiens
gaggttgaggcagga

SEQ ID NO: 110487 - DNA, 15 bp, Homo sapiens
ggaggttgaggcagg

SEQ ID NO: 110488 - DNA, 15 bp, Homo sapiens
gggaggttgaggcag

SEQ ID NO: 110489 - DNA, 15 bp, Homo sapiens
cgggaggttgaggca

SEQ ID NO: 110490 - DNA, 15 bp, Homo sapiens
tcgggaggttgaggc

SEQ ID NO: 110491 - DNA, 15 bp, Homo sapiens
ctcgggaggttgagg

SEQ ID NO: 110492 - DNA, 15 bp, Homo sapiens
actcgggaggttgag

SEQ ID NO: 110493 - DNA, 15 bp, Homo sapiens
tactcgggaggttga

SEQ ID NO: 110494 - DNA, 15 bp, Homo sapiens
ctactcgggaggttg

SEQ ID NO: 110495 - DNA, 15 bp, Homo sapiens
gctactcgggaggtt

SEQ ID NO: 110496 - DNA, 15 bp, Homo sapiens
agctactcgggaggt

SEQ ID NO: 110497 - DNA, 15 bp, Homo sapiens
ggtggcgggcgcctg

SEQ ID NO: 110498 - DNA, 15 bp, Homo sapiens
gggtggcgggcgcct

SEQ ID NO: 110499 - DNA, 15 bp, Homo sapiens
agggtggcgggcgcc

SEQ ID NO: 110500 - DNA, 15 bp, Homo sapiens
aagggtggcgggcgc

SEQ ID NO: 110501 - DNA, 15 bp, Homo sapiens
aaagggtggcgggcg

SEQ ID NO: 110502 - DNA, 15 bp, Homo sapiens
aaaagggtggcgggc

SEQ ID NO: 110503 - DNA, 15 bp, Homo sapiens
aaaaagggtggcggg

SEQ ID NO: 110504 - DNA, 15 bp, Homo sapiens
aaaaaagggtggcgg

SEQ ID NO: 110505 - DNA, 15 bp, Homo sapiens
caaaaaagggtggcg

SEQ ID NO: 110506 - DNA, 15 bp, Homo sapiens
acaaaaaagggtggc

SEQ ID NO: 110507 - DNA, 15 bp, Homo sapiens
tacaaaaaagggtgg

SEQ ID NO: 110508 - DNA, 15 bp, Homo sapiens
atacaaaaaagggtg

SEQ ID NO: 110509 - DNA, 15 bp, Homo sapiens
aatacaaaaaagggt

SEQ ID NO: 110510 - DNA, 15 bp, Homo sapiens
aaatacaaaaaaggg

SEQ ID NO: 110511 - DNA, 15 bp, Homo sapiens
aaaatacaaaaaagg

SEQ ID NO: 110512 - DNA, 15 bp, Homo sapiens
aaaaatacaaaaaag

SEQ ID NO: 110513 - DNA, 15 bp, Homo sapiens
gctctactaaaaata

SEQ ID NO: 110514 - DNA, 15 bp, Homo sapiens
agctctactaaaaat

SEQ ID NO: 110515 - DNA, 15 bp, Homo sapiens
tagctctactaaaaa

SEQ ID NO: 110516 - DNA, 15 bp, Homo sapiens
ttagctctactaaaa

SEQ ID NO: 110517 - DNA, 15 bp, Homo sapiens
tttagctctactaaa

SEQ ID NO: 110518 - DNA, 15 bp, Homo sapiens
atttagctctactaa

SEQ ID NO: 110519 - DNA, 15 bp, Homo sapiens
aatttagctctacta

SEQ ID NO: 110520 - DNA, 15 bp, Homo sapiens
aaatttagctctact

SEQ ID NO: 110521 - DNA, 15 bp, Homo sapiens
aaaatttagctctac

SEQ ID NO: 110522 - DNA, 15 bp, Homo sapiens
aaaaatttagctcta

SEQ ID NO: 110523 - DNA, 15 bp, Homo sapiens
aaaaaatttagctct

SEQ ID NO: 110524 - DNA, 15 bp, Homo sapiens
aaaaaaatttagctc

SEQ ID NO: 110525 - DNA, 15 bp, Homo sapiens
taaaaaaatttagct

SEQ ID NO: 110526 - DNA, 15 bp, Homo sapiens
ctaaaaaaatttagc

SEQ ID NO: 110527 - DNA, 15 bp, Homo sapiens
gctaaaaaaatttag

SEQ ID NO: 110528 - DNA, 15 bp, Homo sapiens
ggctaaaaaaattta

SEQ ID NO: 110529 - DNA, 15 bp, Homo sapiens
gggctaaaaaaattt

SEQ ID NO: 110530 - DNA, 15 bp, Homo sapiens
tgggctaaaaaaatt

SEQ ID NO: 110531 - DNA, 15 bp, Homo sapiens
ctgggctaaaaaaat

SEQ ID NO: 110532 - DNA, 15 bp, Homo sapiens
gctgggctaaaaaaa

SEQ ID NO: 110533 - DNA, 15 bp, Homo sapiens
agctgggctaaaaaa

SEQ ID NO: 110534 - DNA, 15 bp, Homo sapiens
tagctgggctaaaaa

SEQ ID NO: 110535 - DNA, 15 bp, Homo sapiens
ttagctgggctaaaa

SEQ ID NO: 110536 - DNA, 15 bp, Homo sapiens
attagctgggctaaa

SEQ ID NO: 110537 - DNA, 15 bp, Homo sapiens
aattagctgggctaa

SEQ ID NO: 110538 - DNA, 15 bp, Homo sapiens
aaattagctgggcta

SEQ ID NO: 110539 - DNA, 15 bp, Homo sapiens
aaaaattagctgggc

SEQ ID NO: 110540 - DNA, 15 bp, Homo sapiens
gaaaaattagctggg

SEQ ID NO: 110541 - DNA, 15 bp, Homo sapiens
cgaaaaattagctgg

SEQ ID NO: 110542 - DNA, 15 bp, Homo sapiens
acgaaaaattagctg

SEQ ID NO: 110543 - DNA, 15 bp, Homo sapiens
tacgaaaaattagct

SEQ ID NO: 110544 - DNA, 15 bp, Homo sapiens
atacgaaaaattagc

SEQ ID NO: 110545 - DNA, 15 bp, Homo sapiens
aatacgaaaaattag

SEQ ID NO: 110546 - DNA, 15 bp, Homo sapiens
aaatacgaaaaatta

SEQ ID NO: 110547 - DNA, 15 bp, Homo sapiens
aaaatacgaaaaatt

SEQ ID NO: 110548 - DNA, 15 bp, Homo sapiens
aaaaatacgaaaaat

SEQ ID NO: 110549 - DNA, 15 bp, Homo sapiens
taaaaatacgaaaaa

SEQ ID NO: 110550 - DNA, 15 bp, Homo sapiens
ctaaaaatacgaaaa

SEQ ID NO: 110551 - DNA, 15 bp, Homo sapiens
actaaaaatacgaaa

SEQ ID NO: 110552 - DNA, 15 bp, Homo sapiens
tactaaaaatacgaa

SEQ ID NO: 110553 - DNA, 15 bp, Homo sapiens
ctactaaaaatacga

SEQ ID NO: 110554 - DNA, 15 bp, Homo sapiens
tctactaaaaatacg

SEQ ID NO: 110555 - DNA, 15 bp, Homo sapiens
cacggtgaaaccccg

SEQ ID NO: 110556 - DNA, 15 bp, Homo sapiens
acacggtgaaacccc

SEQ ID NO: 110557 - DNA, 15 bp, Homo sapiens
aacacggtgaaaccc

SEQ ID NO: 110558 - DNA, 15 bp, Homo sapiens
taacacggtgaaacc

SEQ ID NO: 110559 - DNA, 15 bp, Homo sapiens
ctaacacggtgaaac

SEQ ID NO: 110560 - DNA, 15 bp, Homo sapiens
gctaacacggtgaaa

SEQ ID NO: 110561 - DNA, 15 bp, Homo sapiens
ggctaacacggtgaa

SEQ ID NO: 110562 - DNA, 15 bp, Homo sapiens
tggctaacacggtga

SEQ ID NO: 110563 - DNA, 15 bp, Homo sapiens
ctggctaacacggtg

SEQ ID NO: 110564 - DNA, 15 bp, Homo sapiens
cctggctaacacggt

SEQ ID NO: 110565 - DNA, 15 bp, Homo sapiens
tcctggctaacacgg

SEQ ID NO: 110566 - DNA, 15 bp, Homo sapiens
atcctggctaacacg

SEQ ID NO: 110567 - DNA, 15 bp, Homo sapiens
ccatcctggctaaca

SEQ ID NO: 110568 - DNA, 15 bp, Homo sapiens
accatcctggctaac

SEQ ID NO: 110569 - DNA, 15 bp, Homo sapiens
gaccatcctggctaa

SEQ ID NO: 110570 - DNA, 15 bp, Homo sapiens
agaccatcctggcta

SEQ ID NO: 110571 - DNA, 15 bp, Homo sapiens
gagaccatcctggct

SEQ ID NO: 110572 - DNA, 15 bp, Homo sapiens
cgagaccatcctggc

SEQ ID NO: 110573 - DNA, 15 bp, Homo sapiens
tcgagaccatcctgg

SEQ ID NO: 110574 - DNA, 15 bp, Homo sapiens
atcgagaccatcctg

SEQ ID NO: 110575 - DNA, 15 bp, Homo sapiens
gatcgagaccatcct

SEQ ID NO: 110576 - DNA, 15 bp, Homo sapiens
ggatcatgaggtcag

SEQ ID NO: 110577 - DNA, 15 bp, Homo sapiens
tggatcatgaggtca

SEQ ID NO: 110578 - DNA, 15 bp, Homo sapiens
gtggatcatgaggtc

SEQ ID NO: 110579 - DNA, 15 bp, Homo sapiens
ggtggatcatgaggt

SEQ ID NO: 110580 - DNA, 15 bp, Homo sapiens
tggtggatcatgagg

SEQ ID NO: 110581 - DNA, 15 bp, Homo sapiens
ctggtggatcatgag

SEQ ID NO: 110582 - DNA, 15 bp, Homo sapiens
gctggtggatcatga

SEQ ID NO: 110583 - DNA, 15 bp, Homo sapiens
ggctggtggatcatg

SEQ ID NO: 110584 - DNA, 15 bp, Homo sapiens
aggctggtggatcat

SEQ ID NO: 110585 - DNA, 15 bp, Homo sapiens
gaggctggtggatca

SEQ ID NO: 110586 - DNA, 15 bp, Homo sapiens
tgaggctggtggatc

SEQ ID NO: 110587 - DNA, 15 bp, Homo sapiens
ctgaggctggtggat

SEQ ID NO: 110588 - DNA, 15 bp, Homo sapiens
gctgaggctggtgga

SEQ ID NO: 110589 - DNA, 15 bp, Homo sapiens
ggctgaggctggtgg

SEQ ID NO: 110590 - DNA, 15 bp, Homo sapiens
aggctgaggctggtg

SEQ ID NO: 110591 - DNA, 15 bp, Homo sapiens
gaggctgaggctggt

SEQ ID NO: 110592 - DNA, 15 bp, Homo sapiens
ggaggctgaggctgg

SEQ ID NO: 110593 - DNA, 15 bp, Homo sapiens
gggaggctgaggctg

SEQ ID NO: 110594 - DNA, 15 bp, Homo sapiens
tgggaggctgaggct

SEQ ID NO: 110595 - DNA, 15 bp, Homo sapiens
tttgggaggctgagg

SEQ ID NO: 110596 - DNA, 15 bp, Homo sapiens
ctttgggaggctgag

SEQ ID NO: 110597 - DNA, 15 bp, Homo sapiens
actttgggaggctga

SEQ ID NO: 110598 - DNA, 15 bp, Homo sapiens
cactttgggaggctg

SEQ ID NO: 110599 - DNA, 15 bp, Homo sapiens
gcactttgggaggct

SEQ ID NO: 110600 - DNA, 15 bp, Homo sapiens
tgcctgtaatcccag

SEQ ID NO: 110601 - DNA, 15 bp, Homo sapiens
atgcctgtaatccca

SEQ ID NO: 110602 - DNA, 15 bp, Homo sapiens
tggctcatgcctgta

SEQ ID NO: 110603 - DNA, 15 bp, Homo sapiens
gtggctcatgcctgt

SEQ ID NO: 110604 - DNA, 15 bp, Homo sapiens
ggtggctcatgcctg

SEQ ID NO: 110605 - DNA, 15 bp, Homo sapiens
gggcacggtggctca

SEQ ID NO: 110606 - DNA, 15 bp, Homo sapiens
tgggcacggtggctc

SEQ ID NO: 110607 - DNA, 15 bp, Homo sapiens
ctgggcacggtggct

SEQ ID NO: 110608 - DNA, 15 bp, Homo sapiens
gctgggcacggtggc

SEQ ID NO: 110609 - DNA, 15 bp, Homo sapiens
ggctgggcacggtgg

SEQ ID NO: 110610 - DNA, 15 bp, Homo sapiens
gggctgggcacggtg

SEQ ID NO: 110611 - DNA, 15 bp, Homo sapiens
tgggctgggcacggt

SEQ ID NO: 110612 - DNA, 15 bp, Homo sapiens
ctgggctgggcacgg

SEQ ID NO: 110613 - DNA, 15 bp, Homo sapiens
actgggctgggcacg

SEQ ID NO: 110614 - DNA, 15 bp, Homo sapiens
gactgggctgggcac

SEQ ID NO: 110615 - DNA, 15 bp, Homo sapiens
tgactgggctgggca

SEQ ID NO: 110616 - DNA, 15 bp, Homo sapiens
gtgactgggctgggc

SEQ ID NO: 110617 - DNA, 15 bp, Homo sapiens
tgtgactgggctggg

SEQ ID NO: 110618 - DNA, 15 bp, Homo sapiens
gtgtgactgggctgg

SEQ ID NO: 110619 - DNA, 15 bp, Homo sapiens
agtgtgactgggctg

SEQ ID NO: 110620 - DNA, 15 bp, Homo sapiens
aagtgtgactgggct

SEQ ID NO: 110621 - DNA, 15 bp, Homo sapiens
aaagtgtgactgggc

SEQ ID NO: 110622 - DNA, 15 bp, Homo sapiens
taaagtgtgactggg

SEQ ID NO: 110623 - DNA, 15 bp, Homo sapiens
ttaaagtgtgactgg

SEQ ID NO: 110624 - DNA, 15 bp, Homo sapiens
cttaaagtgtgactg

SEQ ID NO: 110625 - DNA, 15 bp, Homo sapiens
acttaaagtgtgact

SEQ ID NO: 110626 - DNA, 15 bp, Homo sapiens
cacttaaagtgtgac

SEQ ID NO: 110627 - DNA, 15 bp, Homo sapiens
gcacttaaagtgtga

SEQ ID NO: 110628 - DNA, 15 bp, Homo sapiens
agcacttaaagtgtg

SEQ ID NO: 110629 - DNA, 15 bp, Homo sapiens
gagcacttaaagtgt

SEQ ID NO: 110630 - DNA, 15 bp, Homo sapiens
tgagcacttaaagtg

SEQ ID NO: 110631 - DNA, 15 bp, Homo sapiens
ctgagcacttaaagt

SEQ ID NO: 110632 - DNA, 15 bp, Homo sapiens
actgagcacttaaag

SEQ ID NO: 110633 - DNA, 15 bp, Homo sapiens
tactgagcacttaaa

SEQ ID NO: 110634 - DNA, 15 bp, Homo sapiens
ctactgagcacttaa

SEQ ID NO: 110635 - DNA, 15 bp, Homo sapiens
gctactgagcactta

SEQ ID NO: 110636 - DNA, 15 bp, Homo sapiens
ggctactgagcactt

SEQ ID NO: 110637 - DNA, 15 bp, Homo sapiens
tggctactgagcact

SEQ ID NO: 110638 - DNA, 15 bp, Homo sapiens
gtggctactgagcac

SEQ ID NO: 110639 - DNA, 15 bp, Homo sapiens
agtggctactgagca

SEQ ID NO: 110640 - DNA, 15 bp, Homo sapiens
aagtggctactgagc

SEQ ID NO: 110641 - DNA, 15 bp, Homo sapiens
caagtggctactgag

SEQ ID NO: 110642 - DNA, 15 bp, Homo sapiens
acaagtggctactga

SEQ ID NO: 110643 - DNA, 15 bp, Homo sapiens
cacaagtggctactg

SEQ ID NO: 110644 - DNA, 15 bp, Homo sapiens
ccacaagtggctact

SEQ ID NO: 110645 - DNA, 15 bp, Homo sapiens
gccacaagtggctac

SEQ ID NO: 110646 - DNA, 15 bp, Homo sapiens
agccacaagtggcta

SEQ ID NO: 110647 - DNA, 15 bp, Homo sapiens
tagccacaagtggct

SEQ ID NO: 110648 - DNA, 15 bp, Homo sapiens
gtagccacaagtggc

SEQ ID NO: 110649 - DNA, 15 bp, Homo sapiens
agtagccacaagtgg

SEQ ID NO: 110650 - DNA, 15 bp, Homo sapiens
cagtagccacaagtg

SEQ ID NO: 110651 - DNA, 15 bp, Homo sapiens
ccagtagccacaagt

SEQ ID NO: 110652 - DNA, 15 bp, Homo sapiens
accagtagccacaag

SEQ ID NO: 110653 - DNA, 15 bp, Homo sapiens
aaccagtagccacaa

SEQ ID NO: 110654 - DNA, 15 bp, Homo sapiens
taaccagtagccaca

SEQ ID NO: 110655 - DNA, 15 bp, Homo sapiens
gtaaccagtagccac

SEQ ID NO: 110656 - DNA, 15 bp, Homo sapiens
ggtaaccagtagcca

SEQ ID NO: 110657 - DNA, 15 bp, Homo sapiens
tggtaaccagtagcc

SEQ ID NO: 110658 - DNA, 15 bp, Homo sapiens
atggtaaccagtagc

SEQ ID NO: 110659 - DNA, 15 bp, Homo sapiens
tatggtaaccagtag

SEQ ID NO: 110660 - DNA, 15 bp, Homo sapiens
atatggtaaccagta

SEQ ID NO: 110661 - DNA, 15 bp, Homo sapiens
aatatggtaaccagt

SEQ ID NO: 110662 - DNA, 15 bp, Homo sapiens
caatatggtaaccag

SEQ ID NO: 110663 - DNA, 15 bp, Homo sapiens
ccaatatggtaacca

SEQ ID NO: 110664 - DNA, 15 bp, Homo sapiens
tccaatatggtaacc

SEQ ID NO: 110665 - DNA, 15 bp, Homo sapiens
gtccaatatggtaac

SEQ ID NO: 110666 - DNA, 15 bp, Homo sapiens
tgtccaatatggtaa

SEQ ID NO: 110667 - DNA, 15 bp, Homo sapiens
ctgtccaatatggta

SEQ ID NO: 110668 - DNA, 15 bp, Homo sapiens
cctgtccaatatggt

SEQ ID NO: 110669 - DNA, 15 bp, Homo sapiens
tcctgtccaatatgg

SEQ ID NO: 110670 - DNA, 15 bp, Homo sapiens
gtcctgtccaatatg

SEQ ID NO: 110671 - DNA, 15 bp, Homo sapiens
tgtcctgtccaatat

SEQ ID NO: 110672 - DNA, 15 bp, Homo sapiens
ctgtcctgtccaata

SEQ ID NO: 110673 - DNA, 15 bp, Homo sapiens
tctgtcctgtccaat

SEQ ID NO: 110674 - DNA, 15 bp, Homo sapiens
ctctgtcctgtccaa

SEQ ID NO: 110675 - DNA, 15 bp, Homo sapiens
tctctgtcctgtcca

SEQ ID NO: 110676 - DNA, 15 bp, Homo sapiens
ttctctgtcctgtcc

SEQ ID NO: 110677 - DNA, 15 bp, Homo sapiens
gttctctgtcctgtc

SEQ ID NO: 110678 - DNA, 15 bp, Homo sapiens
tgttctctgtcctgt

SEQ ID NO: 110679 - DNA, 15 bp, Homo sapiens
atgttctctgtcctg

SEQ ID NO: 110680 - DNA, 15 bp, Homo sapiens
aatgttctctgtcct

SEQ ID NO: 110681 - DNA, 15 bp, Homo sapiens
aaatgttctctgtcc

SEQ ID NO: 110682 - DNA, 15 bp, Homo sapiens
gaaatgttctctgtc

SEQ ID NO: 110683 - DNA, 15 bp, Homo sapiens
ggaaatgttctctgt

SEQ ID NO: 110684 - DNA, 15 bp, Homo sapiens
tggaaatgttctctg

SEQ ID NO: 110685 - DNA, 15 bp, Homo sapiens
atggaaatgttctct

SEQ ID NO: 110686 - DNA, 15 bp, Homo sapiens
gatggaaatgttctc

SEQ ID NO: 110687 - DNA, 15 bp, Homo sapiens
tgatggaaatgttct

SEQ ID NO: 110688 - DNA, 15 bp, Homo sapiens
gtgatggaaatgttc

SEQ ID NO: 110689 - DNA, 15 bp, Homo sapiens
agtgatggaaatgtt

SEQ ID NO: 110690 - DNA, 15 bp, Homo sapiens
cagtgatggaaatgt

SEQ ID NO: 110691 - DNA, 15 bp, Homo sapiens
gcagtgatggaaatg

SEQ ID NO: 110692 - DNA, 15 bp, Homo sapiens
tgcagtgatggaaat

SEQ ID NO: 110693 - DNA, 15 bp, Homo sapiens
ctgcagtgatggaaa

SEQ ID NO: 110694 - DNA, 15 bp, Homo sapiens
tctgcagtgatggaa

SEQ ID NO: 110695 - DNA, 15 bp, Homo sapiens
ctctgcagtgatgga

SEQ ID NO: 110696 - DNA, 15 bp, Homo sapiens
actctgcagtgatgg

SEQ ID NO: 110697 - DNA, 15 bp, Homo sapiens
cactctgcagtgatg

SEQ ID NO: 110698 - DNA, 15 bp, Homo sapiens
acactctgcagtgat

SEQ ID NO: 110699 - DNA, 15 bp, Homo sapiens
cacactctgcagtga

SEQ ID NO: 110700 - DNA, 15 bp, Homo sapiens
tcacactctgcagtg

SEQ ID NO: 110701 - DNA, 15 bp, Homo sapiens
gtcacactctgcagt

SEQ ID NO: 110702 - DNA, 15 bp, Homo sapiens
agtcacactctgcag

SEQ ID NO: 110703 - DNA, 15 bp, Homo sapiens
cagtcacactctgca

SEQ ID NO: 110704 - DNA, 15 bp, Homo sapiens
ccagtcacactctgc

SEQ ID NO: 110705 - DNA, 15 bp, Homo sapiens
tccagtcacactctg

SEQ ID NO: 110706 - DNA, 15 bp, Homo sapiens
gtccagtcacactct

SEQ ID NO: 110707 - DNA, 15 bp, Homo sapiens
cgtccagtcacactc

SEQ ID NO: 110708 - DNA, 15 bp, Homo sapiens
ccgtccagtcacact

SEQ ID NO: 110709 - DNA, 15 bp, Homo sapiens
accgtccagtcacac

SEQ ID NO: 110710 - DNA, 15 bp, Homo sapiens
caccgtccagtcaca

SEQ ID NO: 110711 - DNA, 15 bp, Homo sapiens
gcaccgtccagtcac

SEQ ID NO: 110712 - DNA, 15 bp, Homo sapiens
tggggaaaggggctg

SEQ ID NO: 110713 - DNA, 15 bp, Homo sapiens
gtggggaaaggggct

SEQ ID NO: 110714 - DNA, 15 bp, Homo sapiens
agtggggaaaggggc

SEQ ID NO: 110715 - DNA, 15 bp, Homo sapiens
cagtggggaaagggg

SEQ ID NO: 110716 - DNA, 15 bp, Homo sapiens
ccagtggggaaaggg

SEQ ID NO: 110717 - DNA, 15 bp, Homo sapiens
accagtggggaaagg

SEQ ID NO: 110718 - DNA, 15 bp, Homo sapiens
gaccagtggggaaag

SEQ ID NO: 110719 - DNA, 15 bp, Homo sapiens
agaccagtggggaaa

SEQ ID NO: 110720 - DNA, 15 bp, Homo sapiens
aagaccagtggggaa

SEQ ID NO: 110721 - DNA, 15 bp, Homo sapiens
gaagaccagtgggga

SEQ ID NO: 110722 - DNA, 15 bp, Homo sapiens
ggaagaccagtgggg

SEQ ID NO: 110723 - DNA, 15 bp, Homo sapiens
gggaagaccagtggg

SEQ ID NO: 110724 - DNA, 15 bp, Homo sapiens
agggaagaccagtgg

SEQ ID NO: 110725 - DNA, 15 bp, Homo sapiens
cagggaagaccagtg

SEQ ID NO: 110726 - DNA, 15 bp, Homo sapiens
tcagggaagaccagt

SEQ ID NO: 110727 - DNA, 15 bp, Homo sapiens
ctcagggaagaccag

SEQ ID NO: 110728 - DNA, 15 bp, Homo sapiens
actcagggaagacca

SEQ ID NO: 110729 - DNA, 15 bp, Homo sapiens
cactcagggaagacc

SEQ ID NO: 110730 - DNA, 15 bp, Homo sapiens
acactcagggaagac

SEQ ID NO: 110731 - DNA, 15 bp, Homo sapiens
cacactcagggaaga

SEQ ID NO: 110732 - DNA, 15 bp, Homo sapiens
ccacactcagggaag

SEQ ID NO: 110733 - DNA, 15 bp, Homo sapiens
cccacactcagggaa

SEQ ID NO: 110734 - DNA, 15 bp, Homo sapiens
acccacactcaggga

SEQ ID NO: 110735 - DNA, 15 bp, Homo sapiens
cacccacactcaggg

SEQ ID NO: 110736 - DNA, 15 bp, Homo sapiens
acacccacactcagg

SEQ ID NO: 110737 - DNA, 15 bp, Homo sapiens
cacacccacactcag

SEQ ID NO: 110738 - DNA, 15 bp, Homo sapiens
acacacccacactca

SEQ ID NO: 110739 - DNA, 15 bp, Homo sapiens
tacacacccacactc

SEQ ID NO: 110740 - DNA, 15 bp, Homo sapiens
ttacacacccacact

SEQ ID NO: 110741 - DNA, 15 bp, Homo sapiens
tttacacacccacac

SEQ ID NO: 110742 - DNA, 15 bp, Homo sapiens
ctttacacacccaca

SEQ ID NO: 110743 - DNA, 15 bp, Homo sapiens
cctttacacacccac

SEQ ID NO: 110744 - DNA, 15 bp, Homo sapiens
tcctttacacaccca

SEQ ID NO: 110745 - DNA, 15 bp, Homo sapiens
ctcctttacacaccc

SEQ ID NO: 110746 - DNA, 15 bp, Homo sapiens
cctcctttacacacc

SEQ ID NO: 110747 - DNA, 15 bp, Homo sapiens
acctcctttacacac

SEQ ID NO: 110748 - DNA, 15 bp, Homo sapiens
cacctcctttacaca

SEQ ID NO: 110749 - DNA, 15 bp, Homo sapiens
acacctcctttacac

SEQ ID NO: 110750 - DNA, 15 bp, Homo sapiens
cacacctcctttaca

SEQ ID NO: 110751 - DNA, 15 bp, Homo sapiens
ccacacctcctttac

SEQ ID NO: 110752 - DNA, 15 bp, Homo sapiens
gccacacctccttta

SEQ ID NO: 110753 - DNA, 15 bp, Homo sapiens
agccacacctccttt

SEQ ID NO: 110754 - DNA, 15 bp, Homo sapiens
aagccacacctcctt

SEQ ID NO: 110755 - DNA, 15 bp, Homo sapiens
gaagccacacctcct

SEQ ID NO: 110756 - DNA, 15 bp, Homo sapiens
agaagccacacctcc

SEQ ID NO: 110757 - DNA, 15 bp, Homo sapiens
cagaagccacacctc

SEQ ID NO: 110758 - DNA, 15 bp, Homo sapiens
ccagaagccacacct

SEQ ID NO: 110759 - DNA, 15 bp, Homo sapiens
gccagaagccacacc

SEQ ID NO: 110760 - DNA, 15 bp, Homo sapiens
ggccagaagccacac

SEQ ID NO: 110761 - DNA, 15 bp, Homo sapiens
tggccagaagccaca

SEQ ID NO: 110762 - DNA, 15 bp, Homo sapiens
ctggccagaagccac

SEQ ID NO: 110763 - DNA, 15 bp, Homo sapiens
tctggccagaagcca

SEQ ID NO: 110764 - DNA, 15 bp, Homo sapiens
atctggccagaagcc

SEQ ID NO: 110765 - DNA, 15 bp, Homo sapiens
catctggccagaagc

SEQ ID NO: 110766 - DNA, 15 bp, Homo sapiens
ccatctggccagaag

SEQ ID NO: 110767 - DNA, 15 bp, Homo sapiens
gccatctggccagaa

SEQ ID NO: 110768 - DNA, 15 bp, Homo sapiens
tgccatctggccaga

SEQ ID NO: 110769 - DNA, 15 bp, Homo sapiens
gtgccatctggccag

SEQ ID NO: 110770 - DNA, 15 bp, Homo sapiens
tgtgccatctggcca

SEQ ID NO: 110771 - DNA, 15 bp, Homo sapiens
ctgtgccatctggcc

SEQ ID NO: 110772 - DNA, 15 bp, Homo sapiens
cctgtgccatctggc

SEQ ID NO: 110773 - DNA, 15 bp, Homo sapiens
ccctgtgccatctgg

SEQ ID NO: 110774 - DNA, 15 bp, Homo sapiens
gccctgtgccatctg

SEQ ID NO: 110775 - DNA, 15 bp, Homo sapiens
agccctgtgccatct

SEQ ID NO: 110776 - DNA, 15 bp, Homo sapiens
gagccctgtgccatc

SEQ ID NO: 110777 - DNA, 15 bp, Homo sapiens
agagccctgtgccat

SEQ ID NO: 110778 - DNA, 15 bp, Homo sapiens
gagagccctgtgcca

SEQ ID NO: 110779 - DNA, 15 bp, Homo sapiens
ggagagccctgtgcc

SEQ ID NO: 110780 - DNA, 15 bp, Homo sapiens
gggagagccctgtgc

SEQ ID NO: 110781 - DNA, 15 bp, Homo sapiens
tgggagagccctgtg

SEQ ID NO: 110782 - DNA, 15 bp, Homo sapiens
atgggagagccctgt

SEQ ID NO: 110783 - DNA, 15 bp, Homo sapiens
aatgggagagccctg

SEQ ID NO: 110784 - DNA, 15 bp, Homo sapiens
gaatgggagagccct

SEQ ID NO: 110785 - DNA, 15 bp, Homo sapiens
ggaatgggagagccc

SEQ ID NO: 110786 - DNA, 15 bp, Homo sapiens
aggaatgggagagcc

SEQ ID NO: 110787 - DNA, 15 bp, Homo sapiens
caggaatgggagagc

SEQ ID NO: 110788 - DNA, 15 bp, Homo sapiens
acaggaatgggagag

SEQ ID NO: 110789 - DNA, 15 bp, Homo sapiens
gacaggaatgggaga

SEQ ID NO: 110790 - DNA, 15 bp, Homo sapiens
agacaggaatgggag

SEQ ID NO: 110791 - DNA, 15 bp, Homo sapiens
gagacaggaatggga

SEQ ID NO: 110792 - DNA, 15 bp, Homo sapiens
agagacaggaatggg

SEQ ID NO: 110793 - DNA, 15 bp, Homo sapiens
gagagacaggaatgg

SEQ ID NO: 110794 - DNA, 15 bp, Homo sapiens
tgagagacaggaatg

SEQ ID NO: 110795 - DNA, 15 bp, Homo sapiens
atgagagacaggaat

SEQ ID NO: 110796 - DNA, 15 bp, Homo sapiens
gatgagagacaggaa

SEQ ID NO: 110797 - DNA, 15 bp, Homo sapiens
agatgagagacagga

SEQ ID NO: 110798 - DNA, 15 bp, Homo sapiens
gagatgagagacagg

SEQ ID NO: 110799 - DNA, 15 bp, Homo sapiens
agagatgagagacag

SEQ ID NO: 110800 - DNA, 15 bp, Homo sapiens
cagagatgagagaca

SEQ ID NO: 110801 - DNA, 15 bp, Homo sapiens
acagagatgagagac

SEQ ID NO: 110802 - DNA, 15 bp, Homo sapiens
cacagagatgagaga

SEQ ID NO: 110803 - DNA, 15 bp, Homo sapiens
tcacagagatgagag

SEQ ID NO: 110804 - DNA, 15 bp, Homo sapiens
atcacagagatgaga

SEQ ID NO: 110805 - DNA, 15 bp, Homo sapiens
catcacagagatgag

SEQ ID NO: 110806 - DNA, 15 bp, Homo sapiens
tcatcacagagatga

SEQ ID NO: 110807 - DNA, 15 bp, Homo sapiens
atcatcacagagatg

SEQ ID NO: 110808 - DNA, 15 bp, Homo sapiens
tatcatcacagagat

SEQ ID NO: 110809 - DNA, 15 bp, Homo sapiens
atatcatcacagaga

SEQ ID NO: 110810 - DNA, 15 bp, Homo sapiens
catatcatcacagag

SEQ ID NO: 110811 - DNA, 15 bp, Homo sapiens
gcatatcatcacaga

SEQ ID NO: 110812 - DNA, 15 bp, Homo sapiens
ggcatatcatcacag

SEQ ID NO: 110813 - DNA, 15 bp, Homo sapiens
aggcatatcatcaca

SEQ ID NO: 110814 - DNA, 15 bp, Homo sapiens
aaggcatatcatcac

SEQ ID NO: 110815 - DNA, 15 bp, Homo sapiens
gaaggcatatcatca

SEQ ID NO: 110816 - DNA, 15 bp, Homo sapiens
tgaaggcatatcatc

SEQ ID NO: 110817 - DNA, 15 bp, Homo sapiens
ttgaaggcatatcat

SEQ ID NO: 110818 - DNA, 15 bp, Homo sapiens
attgaaggcatatca

SEQ ID NO: 110819 - DNA, 15 bp, Homo sapiens
gattgaaggcatatc

SEQ ID NO: 110820 - DNA, 15 bp, Homo sapiens
tgattgaaggcatat

SEQ ID NO: 110821 - DNA, 15 bp, Homo sapiens
gtgattgaaggcata

SEQ ID NO: 110822 - DNA, 15 bp, Homo sapiens
agtgattgaaggcat

SEQ ID NO: 110823 - DNA, 15 bp, Homo sapiens
aagtgattgaaggca

SEQ ID NO: 110824 - DNA, 15 bp, Homo sapiens
aaagtgattgaaggc

SEQ ID NO: 110825 - DNA, 15 bp, Homo sapiens
aaaagtgattgaagg

SEQ ID NO: 110826 - DNA, 15 bp, Homo sapiens
aaaaagtgattgaag

SEQ ID NO: 110827 - DNA, 15 bp, Homo sapiens
gaaaaagtgattgaa

SEQ ID NO: 110828 - DNA, 15 bp, Homo sapiens
ggaaaaagtgattga

SEQ ID NO: 110829 - DNA, 15 bp, Homo sapiens
tggaaaaagtgattg

SEQ ID NO: 110830 - DNA, 15 bp, Homo sapiens
ctggaaaaagtgatt

SEQ ID NO: 110831 - DNA, 15 bp, Homo sapiens
actggaaaaagtgat

SEQ ID NO: 110832 - DNA, 15 bp, Homo sapiens
aactggaaaaagtga

SEQ ID NO: 110833 - DNA, 15 bp, Homo sapiens
gaactggaaaaagtg

SEQ ID NO: 110834 - DNA, 15 bp, Homo sapiens
agaactggaaaaagt

SEQ ID NO: 110835 - DNA, 15 bp, Homo sapiens
cagaactggaaaaag

SEQ ID NO: 110836 - DNA, 15 bp, Homo sapiens
gcagaactggaaaaa

SEQ ID NO: 110837 - DNA, 15 bp, Homo sapiens
agcagaactggaaaa

SEQ ID NO: 110838 - DNA, 15 bp, Homo sapiens
aagcagaactggaaa

SEQ ID NO: 110839 - DNA, 15 bp, Homo sapiens
taagcagaactggaa

SEQ ID NO: 110840 - DNA, 15 bp, Homo sapiens
ctaagcagaactgga

SEQ ID NO: 110841 - DNA, 15 bp, Homo sapiens
tctaagcagaactgg

SEQ ID NO: 110842 - DNA, 15 bp, Homo sapiens
ctctaagcagaactg

SEQ ID NO: 110843 - DNA, 15 bp, Homo sapiens
cctctaagcagaact

SEQ ID NO: 110844 - DNA, 15 bp, Homo sapiens
ccctctaagcagaac

SEQ ID NO: 110845 - DNA, 15 bp, Homo sapiens
gccctctaagcagaa

SEQ ID NO: 110846 - DNA, 15 bp, Homo sapiens
tgccctctaagcaga

SEQ ID NO: 110847 - DNA, 15 bp, Homo sapiens
atgccctctaagcag

SEQ ID NO: 110848 - DNA, 15 bp, Homo sapiens
gatgccctctaagca

SEQ ID NO: 110849 - DNA, 15 bp, Homo sapiens
tgatgccctctaagc

SEQ ID NO: 110850 - DNA, 15 bp, Homo sapiens
ctgatgccctctaag

SEQ ID NO: 110851 - DNA, 15 bp, Homo sapiens
cctgatgccctctaa

SEQ ID NO: 110852 - DNA, 15 bp, Homo sapiens
acctgatgccctcta

SEQ ID NO: 110853 - DNA, 15 bp, Homo sapiens
gacctgatgccctct

SEQ ID NO: 110854 - DNA, 15 bp, Homo sapiens
ggacctgatgccctc

SEQ ID NO: 110855 - DNA, 15 bp, Homo sapiens
aggacctgatgccct

SEQ ID NO: 110856 - DNA, 15 bp, Homo sapiens
taggacctgatgccc

SEQ ID NO: 110857 - DNA, 15 bp, Homo sapiens
ttaggacctgatgcc

SEQ ID NO: 110858 - DNA, 15 bp, Homo sapiens
attaggacctgatgc

SEQ ID NO: 110859 - DNA, 15 bp, Homo sapiens
cattaggacctgatg

SEQ ID NO: 110860 - DNA, 15 bp, Homo sapiens
ccattaggacctgat

SEQ ID NO: 110861 - DNA, 15 bp, Homo sapiens
gccattaggacctga

SEQ ID NO: 110862 - DNA, 15 bp, Homo sapiens
tgccattaggacctg

SEQ ID NO: 110863 - DNA, 15 bp, Homo sapiens
gtgccattaggacct

SEQ ID NO: 110864 - DNA, 15 bp, Homo sapiens
tgtgccattaggacc

SEQ ID NO: 110865 - DNA, 15 bp, Homo sapiens
atgtgccattaggac

SEQ ID NO: 110866 - DNA, 15 bp, Homo sapiens
aatgtgccattagga

SEQ ID NO: 110867 - DNA, 15 bp, Homo sapiens
aaatgtgccattagg

SEQ ID NO: 110868 - DNA, 15 bp, Homo sapiens
gaaatgtgccattag

SEQ ID NO: 110869 - DNA, 15 bp, Homo sapiens
agaaatgtgccatta

SEQ ID NO: 110870 - DNA, 15 bp, Homo sapiens
tagaaatgtgccatt

SEQ ID NO: 110871 - DNA, 15 bp, Homo sapiens
gtagaaatgtgccat

SEQ ID NO: 110872 - DNA, 15 bp, Homo sapiens
ggtagaaatgtgcca

SEQ ID NO: 110873 - DNA, 15 bp, Homo sapiens
aggtagaaatgtgcc

SEQ ID NO: 110874 - DNA, 15 bp, Homo sapiens
gaggtagaaatgtgc

SEQ ID NO: 110875 - DNA, 15 bp, Homo sapiens
agaggtagaaatgtg

SEQ ID NO: 110876 - DNA, 15 bp, Homo sapiens
aagaggtagaaatgt

SEQ ID NO: 110877 - DNA, 15 bp, Homo sapiens
gaagaggtagaaatg

SEQ ID NO: 110878 - DNA, 15 bp, Homo sapiens
agaagaggtagaaat

SEQ ID NO: 110879 - DNA, 15 bp, Homo sapiens
aagaagaggtagaaa

SEQ ID NO: 110880 - DNA, 15 bp, Homo sapiens
caagaagaggtagaa

SEQ ID NO: 110881 - DNA, 15 bp, Homo sapiens
ccaagaagaggtaga

SEQ ID NO: 110882 - DNA, 15 bp, Homo sapiens
tccaagaagaggtag

SEQ ID NO: 110883 - DNA, 15 bp, Homo sapiens
ctccaagaagaggta

SEQ ID NO: 110884 - DNA, 15 bp, Homo sapiens
gctccaagaagaggt

SEQ ID NO: 110885 - DNA, 15 bp, Homo sapiens
ggctccaagaagagg

SEQ ID NO: 110886 - DNA, 15 bp, Homo sapiens
tggctccaagaagag

SEQ ID NO: 110887 - DNA, 15 bp, Homo sapiens
ctggctccaagaaga

SEQ ID NO: 110888 - DNA, 15 bp, Homo sapiens
actggctccaagaag

SEQ ID NO: 110889 - DNA, 15 bp, Homo sapiens
gactggctccaagaa

SEQ ID NO: 110890 - DNA, 15 bp, Homo sapiens
tgactggctccaaga

SEQ ID NO: 110891 - DNA, 15 bp, Homo sapiens
ttgactggctccaag

SEQ ID NO: 110892 - DNA, 15 bp, Homo sapiens
cttgactggctccaa

SEQ ID NO: 110893 - DNA, 15 bp, Homo sapiens
ccttgactggctcca

SEQ ID NO: 110894 - DNA, 15 bp, Homo sapiens
cccttgactggctcc

SEQ ID NO: 110895 - DNA, 15 bp, Homo sapiens
tcccttgactggctc

SEQ ID NO: 110896 - DNA, 15 bp, Homo sapiens
ctcccttgactggct

SEQ ID NO: 110897 - DNA, 15 bp, Homo sapiens
cctcccttgactggc

SEQ ID NO: 110898 - DNA, 15 bp, Homo sapiens
ccctcccttgactgg

SEQ ID NO: 110899 - DNA, 15 bp, Homo sapiens
accctcccttgactg

SEQ ID NO: 110900 - DNA, 15 bp, Homo sapiens
caccctcccttgact

SEQ ID NO: 110901 - DNA, 15 bp, Homo sapiens
acaccctcccttgac

SEQ ID NO: 110902 - DNA, 15 bp, Homo sapiens
gacaccctcccttga

SEQ ID NO: 110903 - DNA, 15 bp, Homo sapiens
tgacaccctcccttg

SEQ ID NO: 110904 - DNA, 15 bp, Homo sapiens
atgacaccctccctt

SEQ ID NO: 110905 - DNA, 15 bp, Homo sapiens
tatgacaccctccct

SEQ ID NO: 110906 - DNA, 15 bp, Homo sapiens
ttatgacaccctccc

SEQ ID NO: 110907 - DNA, 15 bp, Homo sapiens
gttatgacaccctcc

SEQ ID NO: 110908 - DNA, 15 bp, Homo sapiens
tgttatgacaccctc

SEQ ID NO: 110909 - DNA, 15 bp, Homo sapiens
ttgttatgacaccct

SEQ ID NO: 110910 - DNA, 15 bp, Homo sapiens
tttgttatgacaccc

SEQ ID NO: 110911 - DNA, 15 bp, Homo sapiens
atttgttatgacacc

SEQ ID NO: 110912 - DNA, 15 bp, Homo sapiens
tatttgttatgacac

SEQ ID NO: 110913 - DNA, 15 bp, Homo sapiens
ttatttgttatgaca

SEQ ID NO: 110914 - DNA, 15 bp, Homo sapiens
attatttgttatgac

SEQ ID NO: 110915 - DNA, 15 bp, Homo sapiens
tattatttgttatga

SEQ ID NO: 110916 - DNA, 15 bp, Homo sapiens
ctattatttgttatg

SEQ ID NO: 110917 - DNA, 15 bp, Homo sapiens
cctattatttgttat

SEQ ID NO: 110918 - DNA, 15 bp, Homo sapiens
gcctattatttgtta

SEQ ID NO: 110919 - DNA, 15 bp, Homo sapiens
cgcctattatttgtt

SEQ ID NO: 110920 - DNA, 15 bp, Homo sapiens
acgcctattatttgt

SEQ ID NO: 110921 - DNA, 15 bp, Homo sapiens
tacgcctattatttg

SEQ ID NO: 110922 - DNA, 15 bp, Homo sapiens
ctacgcctattattt

SEQ ID NO: 110923 - DNA, 15 bp, Homo sapiens
cctacgcctattatt

SEQ ID NO: 110924 - DNA, 15 bp, Homo sapiens
gcctacgcctattat

SEQ ID NO: 110925 - DNA, 15 bp, Homo sapiens
ggcctacgcctatta

SEQ ID NO: 110926 - DNA, 15 bp, Homo sapiens
aggcctacgcctatt

SEQ ID NO: 110927 - DNA, 15 bp, Homo sapiens
aaggcctacgcctat

SEQ ID NO: 110928 - DNA, 15 bp, Homo sapiens
caaggcctacgccta

SEQ ID NO: 110929 - DNA, 15 bp, Homo sapiens
ccaaggcctacgcct

SEQ ID NO: 110930 - DNA, 15 bp, Homo sapiens
cccaaggcctacgcc

SEQ ID NO: 110931 - DNA, 15 bp, Homo sapiens
gcccaaggcctacgc

SEQ ID NO: 110932 - DNA, 15 bp, Homo sapiens
cgcccaaggcctacg

SEQ ID NO: 110933 - DNA, 15 bp, Homo sapiens
ccgcccaaggcctac

SEQ ID NO: 110934 - DNA, 15 bp, Homo sapiens
cccgcccaaggccta

SEQ ID NO: 110935 - DNA, 15 bp, Homo sapiens
ccccgcccaaggcct

SEQ ID NO: 110936 - DNA, 15 bp, Homo sapiens
gccccgcccaaggcc

SEQ ID NO: 110937 - DNA, 15 bp, Homo sapiens
tgccccgcccaaggc

SEQ ID NO: 110938 - DNA, 15 bp, Homo sapiens
ctgccccgcccaagg

SEQ ID NO: 110939 - DNA, 15 bp, Homo sapiens
cctgccccgcccaag

SEQ ID NO: 110940 - DNA, 15 bp, Homo sapiens
acctgccccgcccaa

SEQ ID NO: 110941 - DNA, 15 bp, Homo sapiens
gacctgccccgccca

SEQ ID NO: 110942 - DNA, 15 bp, Homo sapiens
agacctgccccgccc

SEQ ID NO: 110943 - DNA, 15 bp, Homo sapiens
cagacctgccccgcc

SEQ ID NO: 110944 - DNA, 15 bp, Homo sapiens
gcagacctgccccgc

SEQ ID NO: 110945 - DNA, 15 bp, Homo sapiens
ggcagacctgccccg

SEQ ID NO: 110946 - DNA, 15 bp, Homo sapiens
tggcagacctgcccc

SEQ ID NO: 110947 - DNA, 15 bp, Homo sapiens
gtggcagacctgccc

SEQ ID NO: 110948 - DNA, 15 bp, Homo sapiens
ggtggcagacctgcc

SEQ ID NO: 110949 - DNA, 15 bp, Homo sapiens
tggtggcagacctgc

SEQ ID NO: 110950 - DNA, 15 bp, Homo sapiens
ctggtggcagacctg

SEQ ID NO: 110951 - DNA, 15 bp, Homo sapiens
actggtggcagacct

SEQ ID NO: 110952 - DNA, 15 bp, Homo sapiens
gactggtggcagacc

SEQ ID NO: 110953 - DNA, 15 bp, Homo sapiens
ggactggtggcagac

SEQ ID NO: 110954 - DNA, 15 bp, Homo sapiens
gggactggtggcaga

SEQ ID NO: 110955 - DNA, 15 bp, Homo sapiens
tgggactggtggcag

SEQ ID NO: 110956 - DNA, 15 bp, Homo sapiens
ttgggactggtggca

SEQ ID NO: 110957 - DNA, 15 bp, Homo sapiens
cttgggactggtggc

SEQ ID NO: 110958 - DNA, 15 bp, Homo sapiens
ccttgggactggtgg

SEQ ID NO: 110959 - DNA, 15 bp, Homo sapiens
gccttgggactggtg

SEQ ID NO: 110960 - DNA, 15 bp, Homo sapiens
agccttgggactggt

SEQ ID NO: 110961 - DNA, 15 bp, Homo sapiens
cagccttgggactgg

SEQ ID NO: 110962 - DNA, 15 bp, Homo sapiens
acagccttgggactg

SEQ ID NO: 110963 - DNA, 15 bp, Homo sapiens
gacagccttgggact

SEQ ID NO: 110964 - DNA, 15 bp, Homo sapiens
ggacagccttgggac

SEQ ID NO: 110965 - DNA, 15 bp, Homo sapiens
aggacagccttggga

SEQ ID NO: 110966 - DNA, 15 bp, Homo sapiens
aaggacagccttggg

SEQ ID NO: 110967 - DNA, 15 bp, Homo sapiens
aaaggacagccttgg

SEQ ID NO: 110968 - DNA, 15 bp, Homo sapiens
aaaaggacagccttg

SEQ ID NO: 110969 - DNA, 15 bp, Homo sapiens
gaaaaggacagcctt

SEQ ID NO: 110970 - DNA, 15 bp, Homo sapiens
tgaaaaggacagcct

SEQ ID NO: 110971 - DNA, 15 bp, Homo sapiens
ctgaaaaggacagcc

SEQ ID NO: 110972 - DNA, 15 bp, Homo sapiens
cctgaaaaggacagc

SEQ ID NO: 110973 - DNA, 15 bp, Homo sapiens
gcctgaaaaggacag

SEQ ID NO: 110974 - DNA, 15 bp, Homo sapiens
agcctgaaaaggaca

SEQ ID NO: 110975 - DNA, 15 bp, Homo sapiens
gagcctgaaaaggac

SEQ ID NO: 110976 - DNA, 15 bp, Homo sapiens
agagcctgaaaagga

SEQ ID NO: 110977 - DNA, 15 bp, Homo sapiens
cagagcctgaaaagg

SEQ ID NO: 110978 - DNA, 15 bp, Homo sapiens
gcagagcctgaaaag

SEQ ID NO: 110979 - DNA, 15 bp, Homo sapiens
tgcagagcctgaaaa

SEQ ID NO: 110980 - DNA, 15 bp, Homo sapiens
ctgcagagcctgaaa

SEQ ID NO: 110981 - DNA, 15 bp, Homo sapiens
cctgcagagcctgaa

SEQ ID NO: 110982 - DNA, 15 bp, Homo sapiens
acctgcagagcctga

SEQ ID NO: 110983 - DNA, 15 bp, Homo sapiens
cacctgcagagcctg

SEQ ID NO: 110984 - DNA, 15 bp, Homo sapiens
tcacctgcagagcct

SEQ ID NO: 110985 - DNA, 15 bp, Homo sapiens
ctcacctgcagagcc

SEQ ID NO: 110986 - DNA, 15 bp, Homo sapiens
cctcacctgcagagc

SEQ ID NO: 110987 - DNA, 15 bp, Homo sapiens
gcctcacctgcagag

SEQ ID NO: 110988 - DNA, 15 bp, Homo sapiens
tgcctcacctgcaga

SEQ ID NO: 110989 - DNA, 15 bp, Homo sapiens
gtgcctcacctgcag

SEQ ID NO: 110990 - DNA, 15 bp, Homo sapiens
agtgcctcacctgca

SEQ ID NO: 110991 - DNA, 15 bp, Homo sapiens
aagtgcctcacctgc

SEQ ID NO: 110992 - DNA, 15 bp, Homo sapiens
caagtgcctcacctg

SEQ ID NO: 110993 - DNA, 15 bp, Homo sapiens
ccaagtgcctcacct

SEQ ID NO: 110994 - DNA, 15 bp, Homo sapiens
gccaagtgcctcacc

SEQ ID NO: 110995 - DNA, 15 bp, Homo sapiens
agccaagtgcctcac

SEQ ID NO: 110996 - DNA, 15 bp, Homo sapiens
aagccaagtgcctca

SEQ ID NO: 110997 - DNA, 15 bp, Homo sapiens
aaagccaagtgcctc

SEQ ID NO: 110998 - DNA, 15 bp, Homo sapiens
gaaagccaagtgcct

SEQ ID NO: 110999 - DNA, 15 bp, Homo sapiens
agaaagccaagtgcc

SEQ ID NO: 111000 - DNA, 15 bp, Homo sapiens
cagaaagccaagtgc

SEQ ID NO: 111001 - DNA, 15 bp, Homo sapiens
ccagaaagccaagtg

SEQ ID NO: 111002 - DNA, 15 bp, Homo sapiens
tccagaaagccaagt

SEQ ID NO: 111003 - DNA, 15 bp, Homo sapiens
gtccagaaagccaag

SEQ ID NO: 111004 - DNA, 15 bp, Homo sapiens
ggtccagaaagccaa

SEQ ID NO: 111005 - DNA, 15 bp, Homo sapiens
gggtccagaaagcca

SEQ ID NO: 111006 - DNA, 15 bp, Homo sapiens
ggggtccagaaagcc

SEQ ID NO: 111007 - DNA, 15 bp, Homo sapiens
cggggtccagaaagc

SEQ ID NO: 111008 - DNA, 15 bp, Homo sapiens
tcggggtccagaaag

SEQ ID NO: 111009 - DNA, 15 bp, Homo sapiens
ctcggggtccagaaa

SEQ ID NO: 111010 - DNA, 15 bp, Homo sapiens
tctcggggtccagaa

SEQ ID NO: 111011 - DNA, 15 bp, Homo sapiens
atctcggggtccaga

SEQ ID NO: 111012 - DNA, 15 bp, Homo sapiens
gatctcggggtccag

SEQ ID NO: 111013 - DNA, 15 bp, Homo sapiens
ggatctcggggtcca

SEQ ID NO: 111014 - DNA, 15 bp, Homo sapiens
aggatctcggggtcc

SEQ ID NO: 111015 - DNA, 15 bp, Homo sapiens
gaggatctcggggtc

SEQ ID NO: 111016 - DNA, 15 bp, Homo sapiens
tgaggatctcggggt

SEQ ID NO: 111017 - DNA, 15 bp, Homo sapiens
atgaggatctcgggg

SEQ ID NO: 111018 - DNA, 15 bp, Homo sapiens
gatgaggatctcggg

SEQ ID NO: 111019 - DNA, 15 bp, Homo sapiens
agatgaggatctcgg

SEQ ID NO: 111020 - DNA, 15 bp, Homo sapiens
cagatgaggatctcg

SEQ ID NO: 111021 - DNA, 15 bp, Homo sapiens
acagatgaggatctc

SEQ ID NO: 111022 - DNA, 15 bp, Homo sapiens
tacagatgaggatct

SEQ ID NO: 111023 - DNA, 15 bp, Homo sapiens
ttacagatgaggatc

SEQ ID NO: 111024 - DNA, 15 bp, Homo sapiens
tttacagatgaggat

SEQ ID NO: 111025 - DNA, 15 bp, Homo sapiens
ctttacagatgagga

SEQ ID NO: 111026 - DNA, 15 bp, Homo sapiens
actttacagatgagg

SEQ ID NO: 111027 - DNA, 15 bp, Homo sapiens
cactttacagatgag

SEQ ID NO: 111028 - DNA, 15 bp, Homo sapiens
ccactttacagatga

SEQ ID NO: 111029 - DNA, 15 bp, Homo sapiens
gccactttacagatg

SEQ ID NO: 111030 - DNA, 15 bp, Homo sapiens
tgccactttacagat

SEQ ID NO: 111031 - DNA, 15 bp, Homo sapiens
ttgccactttacaga

SEQ ID NO: 111032 - DNA, 15 bp, Homo sapiens
tttgccactttacag

SEQ ID NO: 111033 - DNA, 15 bp, Homo sapiens
ttttgccactttaca

SEQ ID NO: 111034 - DNA, 15 bp, Homo sapiens
tttttgccactttac

SEQ ID NO: 111035 - DNA, 15 bp, Homo sapiens
gtttttgccacttta

SEQ ID NO: 111036 - DNA, 15 bp, Homo sapiens
cgtttttgccacttt

SEQ ID NO: 111037 - DNA, 15 bp, Homo sapiens
tcgtttttgccactt

SEQ ID NO: 111038 - DNA, 15 bp, Homo sapiens
atcgtttttgccact

SEQ ID NO: 111039 - DNA, 15 bp, Homo sapiens
tatcgtttttgccac

SEQ ID NO: 111040 - DNA, 15 bp, Homo sapiens
ctatcgtttttgcca

SEQ ID NO: 111041 - DNA, 15 bp, Homo sapiens
tctatcgtttttgcc

SEQ ID NO: 111042 - DNA, 15 bp, Homo sapiens
ctctatcgtttttgc

SEQ ID NO: 111043 - DNA, 15 bp, Homo sapiens
gctctatcgtttttg

SEQ ID NO: 111044 - DNA, 15 bp, Homo sapiens
ggctctatcgttttt

SEQ ID NO: 111045 - DNA, 15 bp, Homo sapiens
aggctctatcgtttt

SEQ ID NO: 111046 - DNA, 15 bp, Homo sapiens
aaggctctatcgttt

SEQ ID NO: 111047 - DNA, 15 bp, Homo sapiens
aaaggctctatcgtt

SEQ ID NO: 111048 - DNA, 15 bp, Homo sapiens
taaaggctctatcgt

SEQ ID NO: 111049 - DNA, 15 bp, Homo sapiens
ataaaggctctatcg

SEQ ID NO: 111050 - DNA, 15 bp, Homo sapiens
gataaaggctctatc

SEQ ID NO: 111051 - DNA, 15 bp, Homo sapiens
ggataaaggctctat

SEQ ID NO: 111052 - DNA, 15 bp, Homo sapiens
aggataaaggctcta

SEQ ID NO: 111053 - DNA, 15 bp, Homo sapiens
taggataaaggctct

SEQ ID NO: 111054 - DNA, 15 bp, Homo sapiens
gtaggataaaggctc

SEQ ID NO: 111055 - DNA, 15 bp, Homo sapiens
tgtaggataaaggct

SEQ ID NO: 111056 - DNA, 15 bp, Homo sapiens
atgtaggataaaggc

SEQ ID NO: 111057 - DNA, 15 bp, Homo sapiens
aatgtaggataaagg

SEQ ID NO: 111058 - DNA, 15 bp, Homo sapiens
caatgtaggataaag

SEQ ID NO: 111059 - DNA, 15 bp, Homo sapiens
acaatgtaggataaa

SEQ ID NO: 111060 - DNA, 15 bp, Homo sapiens
cacaatgtaggataa

SEQ ID NO: 111061 - DNA, 15 bp, Homo sapiens
gcacaatgtaggata

SEQ ID NO: 111062 - DNA, 15 bp, Homo sapiens
ggcacaatgtaggat

SEQ ID NO: 111063 - DNA, 15 bp, Homo sapiens
gggcacaatgtagga

SEQ ID NO: 111064 - DNA, 15 bp, Homo sapiens
agggcacaatgtagg

SEQ ID NO: 111065 - DNA, 15 bp, Homo sapiens
cagggcacaatgtag

SEQ ID NO: 111066 - DNA, 15 bp, Homo sapiens
tcagggcacaatgta

SEQ ID NO: 111067 - DNA, 15 bp, Homo sapiens
ctcagggcacaatgt

SEQ ID NO: 111068 - DNA, 15 bp, Homo sapiens
cctcagggcacaatg

SEQ ID NO: 111069 - DNA, 15 bp, Homo sapiens
ccctcagggcacaat

SEQ ID NO: 111070 - DNA, 15 bp, Homo sapiens
gccctcagggcacaa

SEQ ID NO: 111071 - DNA, 15 bp, Homo sapiens
agccctcagggcaca

SEQ ID NO: 111072 - DNA, 15 bp, Homo sapiens
cagccctcagggcac

SEQ ID NO: 111073 - DNA, 15 bp, Homo sapiens
ccagccctcagggca

SEQ ID NO: 111074 - DNA, 15 bp, Homo sapiens
gccagccctcagggc

SEQ ID NO: 111075 - DNA, 15 bp, Homo sapiens
agccagccctcaggg

SEQ ID NO: 111076 - DNA, 15 bp, Homo sapiens
cagccagccctcagg

SEQ ID NO: 111077 - DNA, 15 bp, Homo sapiens
ccagccagccctcag

SEQ ID NO: 111078 - DNA, 15 bp, Homo sapiens
gccagccagccctca

SEQ ID NO: 111079 - DNA, 15 bp, Homo sapiens
agccagccagccctc

SEQ ID NO: 111080 - DNA, 15 bp, Homo sapiens
aagccagccagccct

SEQ ID NO: 111081 - DNA, 15 bp, Homo sapiens
taagccagccagccc

SEQ ID NO: 111082 - DNA, 15 bp, Homo sapiens
ctaagccagccagcc

SEQ ID NO: 111083 - DNA, 15 bp, Homo sapiens
actaagccagccagc

SEQ ID NO: 111084 - DNA, 15 bp, Homo sapiens
cactaagccagccag

SEQ ID NO: 111085 - DNA, 15 bp, Homo sapiens
tcactaagccagcca

SEQ ID NO: 111086 - DNA, 15 bp, Homo sapiens
ctcactaagccagcc

SEQ ID NO: 111087 - DNA, 15 bp, Homo sapiens
actcactaagccagc

SEQ ID NO: 111088 - DNA, 15 bp, Homo sapiens
tactcactaagccag

SEQ ID NO: 111089 - DNA, 15 bp, Homo sapiens
atactcactaagcca

SEQ ID NO: 111090 - DNA, 15 bp, Homo sapiens
gatactcactaagcc

SEQ ID NO: 111091 - DNA, 15 bp, Homo sapiens
tgatactcactaagc

SEQ ID NO: 111092 - DNA, 15 bp, Homo sapiens
ttgatactcactaag

SEQ ID NO: 111093 - DNA, 15 bp, Homo sapiens
cttgatactcactaa

SEQ ID NO: 111094 - DNA, 15 bp, Homo sapiens
acttgatactcacta

SEQ ID NO: 111095 - DNA, 15 bp, Homo sapiens
cacttgatactcact

SEQ ID NO: 111096 - DNA, 15 bp, Homo sapiens
gcacttgatactcac

SEQ ID NO: 111097 - DNA, 15 bp, Homo sapiens
agcacttgatactca

SEQ ID NO: 111098 - DNA, 15 bp, Homo sapiens
aagcacttgatactc

SEQ ID NO: 111099 - DNA, 15 bp, Homo sapiens
taagcacttgatact

SEQ ID NO: 111100 - DNA, 15 bp, Homo sapiens
ctaagcacttgatac

SEQ ID NO: 111101 - DNA, 15 bp, Homo sapiens
gctaagcacttgata

SEQ ID NO: 111102 - DNA, 15 bp, Homo sapiens
tgctaagcacttgat

SEQ ID NO: 111103 - DNA, 15 bp, Homo sapiens
gtgctaagcacttga

SEQ ID NO: 111104 - DNA, 15 bp, Homo sapiens
tgtgctaagcacttg

SEQ ID NO: 111105 - DNA, 15 bp, Homo sapiens
ctgtgctaagcactt

SEQ ID NO: 111106 - DNA, 15 bp, Homo sapiens
actgtgctaagcact

SEQ ID NO: 111107 - DNA, 15 bp, Homo sapiens
cactgtgctaagcac

SEQ ID NO: 111108 - DNA, 15 bp, Homo sapiens
acactgtgctaagca

SEQ ID NO: 111109 - DNA, 15 bp, Homo sapiens
gacactgtgctaagc

SEQ ID NO: 111110 - DNA, 15 bp, Homo sapiens
agacactgtgctaag

SEQ ID NO: 111111 - DNA, 15 bp, Homo sapiens
cagacactgtgctaa

SEQ ID NO: 111112 - DNA, 15 bp, Homo sapiens
ccagacactgtgcta

SEQ ID NO: 111113 - DNA, 15 bp, Homo sapiens
tccagacactgtgct

SEQ ID NO: 111114 - DNA, 15 bp, Homo sapiens
ttccagacactgtgc

SEQ ID NO: 111115 - DNA, 15 bp, Homo sapiens
cttccagacactgtg

SEQ ID NO: 111116 - DNA, 15 bp, Homo sapiens
tcttccagacactgt

SEQ ID NO: 111117 - DNA, 15 bp, Homo sapiens
gtcttccagacactg

SEQ ID NO: 111118 - DNA, 15 bp, Homo sapiens
tgtcttccagacact

SEQ ID NO: 111119 - DNA, 15 bp, Homo sapiens
ctgtcttccagacac

SEQ ID NO: 111120 - DNA, 15 bp, Homo sapiens
tctgtcttccagaca

SEQ ID NO: 111121 - DNA, 15 bp, Homo sapiens
gtctgtcttccagac

SEQ ID NO: 111122 - DNA, 15 bp, Homo sapiens
tgtctgtcttccaga

SEQ ID NO: 111123 - DNA, 15 bp, Homo sapiens
ctgtctgtcttccag

SEQ ID NO: 111124 - DNA, 15 bp, Homo sapiens
actgtctgtcttcca

SEQ ID NO: 111125 - DNA, 15 bp, Homo sapiens
cactgtctgtcttcc

SEQ ID NO: 111126 - DNA, 15 bp, Homo sapiens
gcactgtctgtcttc

SEQ ID NO: 111127 - DNA, 15 bp, Homo sapiens
ggcactgtctgtctt

SEQ ID NO: 111128 - DNA, 15 bp, Homo sapiens
gggcactgtctgtct

SEQ ID NO: 111129 - DNA, 15 bp, Homo sapiens
tgggcactgtctgtc

SEQ ID NO: 111130 - DNA, 15 bp, Homo sapiens
ctgggcactgtctgt

SEQ ID NO: 111131 - DNA, 15 bp, Homo sapiens
cctgggcactgtctg

SEQ ID NO: 111132 - DNA, 15 bp, Homo sapiens
tcctgggcactgtct

SEQ ID NO: 111133 - DNA, 15 bp, Homo sapiens
ttcctgggcactgtc

SEQ ID NO: 111134 - DNA, 15 bp, Homo sapiens
attcctgggcactgt

SEQ ID NO: 111135 - DNA, 15 bp, Homo sapiens
cattcctgggcactg

SEQ ID NO: 111136 - DNA, 15 bp, Homo sapiens
ccattcctgggcact

SEQ ID NO: 111137 - DNA, 15 bp, Homo sapiens
cccattcctgggcac

SEQ ID NO: 111138 - DNA, 15 bp, Homo sapiens
acccattcctgggca

SEQ ID NO: 111139 - DNA, 15 bp, Homo sapiens
cacccattcctgggc

SEQ ID NO: 111140 - DNA, 15 bp, Homo sapiens
gcacccattcctggg

SEQ ID NO: 111141 - DNA, 15 bp, Homo sapiens
ggcacccattcctgg

SEQ ID NO: 111142 - DNA, 15 bp, Homo sapiens
aggcacccattcctg

SEQ ID NO: 111143 - DNA, 15 bp, Homo sapiens
caggcacccattcct

SEQ ID NO: 111144 - DNA, 15 bp, Homo sapiens
gcaggcacccattcc

SEQ ID NO: 111145 - DNA, 15 bp, Homo sapiens
tgcaggcacccattc

SEQ ID NO: 111146 - DNA, 15 bp, Homo sapiens
ctgcaggcacccatt

SEQ ID NO: 111147 - DNA, 15 bp, Homo sapiens
cctgcaggcacccat

SEQ ID NO: 111148 - DNA, 15 bp, Homo sapiens
gcctgcaggcaccca

SEQ ID NO: 111149 - DNA, 15 bp, Homo sapiens
tgcctgcaggcaccc

SEQ ID NO: 111150 - DNA, 15 bp, Homo sapiens
ctgcctgcaggcacc

SEQ ID NO: 111151 - DNA, 15 bp, Homo sapiens
actgcctgcaggcac

SEQ ID NO: 111152 - DNA, 15 bp, Homo sapiens
tactgcctgcaggca

SEQ ID NO: 111153 - DNA, 15 bp, Homo sapiens
ttactgcctgcaggc

SEQ ID NO: 111154 - DNA, 15 bp, Homo sapiens
tttactgcctgcagg

SEQ ID NO: 111155 - DNA, 15 bp, Homo sapiens
ttttactgcctgcag

SEQ ID NO: 111156 - DNA, 15 bp, Homo sapiens
attttactgcctgca

SEQ ID NO: 111157 - DNA, 15 bp, Homo sapiens
aattttactgcctgc

SEQ ID NO: 111158 - DNA, 15 bp, Homo sapiens
taattttactgcctg

SEQ ID NO: 111159 - DNA, 15 bp, Homo sapiens
ataattttactgcct

SEQ ID NO: 111160 - DNA, 15 bp, Homo sapiens
aataattttactgcc

SEQ ID NO: 111161 - DNA, 15 bp, Homo sapiens
gaataattttactgc

SEQ ID NO: 111162 - DNA, 15 bp, Homo sapiens
agaataattttactg

SEQ ID NO: 111163 - DNA, 15 bp, Homo sapiens
gagaataattttact

SEQ ID NO: 111164 - DNA, 15 bp, Homo sapiens
ggagaataattttac

SEQ ID NO: 111165 - DNA, 15 bp, Homo sapiens
gggagaataatttta

SEQ ID NO: 111166 - DNA, 15 bp, Homo sapiens
agggagaataatttt

SEQ ID NO: 111167 - DNA, 15 bp, Homo sapiens
aagggagaataattt

SEQ ID NO: 111168 - DNA, 15 bp, Homo sapiens
aaagggagaataatt

SEQ ID NO: 111169 - DNA, 15 bp, Homo sapiens
gaaagggagaataat

SEQ ID NO: 111170 - DNA, 15 bp, Homo sapiens
tgaaagggagaataa

SEQ ID NO: 111171 - DNA, 15 bp, Homo sapiens
gtgaaagggagaata

SEQ ID NO: 111172 - DNA, 15 bp, Homo sapiens
agtgaaagggagaat

SEQ ID NO: 111173 - DNA, 15 bp, Homo sapiens
gagtgaaagggagaa

SEQ ID NO: 111174 - DNA, 15 bp, Homo sapiens
agagtgaaagggaga

SEQ ID NO: 111175 - DNA, 15 bp, Homo sapiens
aagagtgaaagggag

SEQ ID NO: 111176 - DNA, 15 bp, Homo sapiens
aaagagtgaaaggga

SEQ ID NO: 111177 - DNA, 15 bp, Homo sapiens
taaagagtgaaaggg

SEQ ID NO: 111178 - DNA, 15 bp, Homo sapiens
ttaaagagtgaaagg

SEQ ID NO: 111179 - DNA, 15 bp, Homo sapiens
cttaaagagtgaaag

SEQ ID NO: 111180 - DNA, 15 bp, Homo sapiens
tcttaaagagtgaaa

SEQ ID NO: 111181 - DNA, 15 bp, Homo sapiens
ctcttaaagagtgaa

SEQ ID NO: 111182 - DNA, 15 bp, Homo sapiens
cctcttaaagagtga

SEQ ID NO: 111183 - DNA, 15 bp, Homo sapiens
acctcttaaagagtg

SEQ ID NO: 111184 - DNA, 15 bp, Homo sapiens
cacctcttaaagagt

SEQ ID NO: 111185 - DNA, 15 bp, Homo sapiens
tcacctcttaaagag

SEQ ID NO: 111186 - DNA, 15 bp, Homo sapiens
atcacctcttaaaga

SEQ ID NO: 111187 - DNA, 15 bp, Homo sapiens
gatcacctcttaaag

SEQ ID NO: 111188 - DNA, 15 bp, Homo sapiens
ggatcacctcttaaa

SEQ ID NO: 111189 - DNA, 15 bp, Homo sapiens
aggatcacctcttaa

SEQ ID NO: 111190 - DNA, 15 bp, Homo sapiens
aaggatcacctctta

SEQ ID NO: 111191 - DNA, 15 bp, Homo sapiens
aaaggatcacctctt

SEQ ID NO: 111192 - DNA, 15 bp, Homo sapiens
gaaaggatcacctct

SEQ ID NO: 111193 - DNA, 15 bp, Homo sapiens
agaaaggatcacctc

SEQ ID NO: 111194 - DNA, 15 bp, Homo sapiens
cagaaaggatcacct

SEQ ID NO: 111195 - DNA, 15 bp, Homo sapiens
tcagaaaggatcacc

SEQ ID NO: 111196 - DNA, 15 bp, Homo sapiens
ttcagaaaggatcac

SEQ ID NO: 111197 - DNA, 15 bp, Homo sapiens
cttcagaaaggatca

SEQ ID NO: 111198 - DNA, 15 bp, Homo sapiens
ccttcagaaaggatc

SEQ ID NO: 111199 - DNA, 15 bp, Homo sapiens
tccttcagaaaggat

SEQ ID NO: 111200 - DNA, 15 bp, Homo sapiens
ctccttcagaaagga

SEQ ID NO: 111201 - DNA, 15 bp, Homo sapiens
actccttcagaaagg

SEQ ID NO: 111202 - DNA, 15 bp, Homo sapiens
gactccttcagaaag

SEQ ID NO: 111203 - DNA, 15 bp, Homo sapiens
ggactccttcagaaa

SEQ ID NO: 111204 - DNA, 15 bp, Homo sapiens
aggactccttcagaa

SEQ ID NO: 111205 - DNA, 15 bp, Homo sapiens
gaggactccttcaga

SEQ ID NO: 111206 - DNA, 15 bp, Homo sapiens
agaggactccttcag

SEQ ID NO: 111207 - DNA, 15 bp, Homo sapiens
tagaggactccttca

SEQ ID NO: 111208 - DNA, 15 bp, Homo sapiens
atagaggactccttc

SEQ ID NO: 111209 - DNA, 15 bp, Homo sapiens
gatagaggactcctt

SEQ ID NO: 111210 - DNA, 15 bp, Homo sapiens
agatagaggactcct

SEQ ID NO: 111211 - DNA, 15 bp, Homo sapiens
aagatagaggactcc

SEQ ID NO: 111212 - DNA, 15 bp, Homo sapiens
gaagatagaggactc

SEQ ID NO: 111213 - DNA, 15 bp, Homo sapiens
agaagatagaggact

SEQ ID NO: 111214 - DNA, 15 bp, Homo sapiens
gagaagatagaggac

SEQ ID NO: 111215 - DNA, 15 bp, Homo sapiens
agagaagatagagga

SEQ ID NO: 111216 - DNA, 15 bp, Homo sapiens
gagagaagatagagg

SEQ ID NO: 111217 - DNA, 15 bp, Homo sapiens
tgagagaagatagag

SEQ ID NO: 111218 - DNA, 15 bp, Homo sapiens
gtgagagaagataga

SEQ ID NO: 111219 - DNA, 15 bp, Homo sapiens
tgtgagagaagatag

SEQ ID NO: 111220 - DNA, 15 bp, Homo sapiens
gtgtgagagaagata

SEQ ID NO: 111221 - DNA, 15 bp, Homo sapiens
agtgtgagagaagat

SEQ ID NO: 111222 - DNA, 15 bp, Homo sapiens
tagtgtgagagaaga

SEQ ID NO: 111223 - DNA, 15 bp, Homo sapiens
gtagtgtgagagaag

SEQ ID NO: 111224 - DNA, 15 bp, Homo sapiens
tgtagtgtgagagaa

SEQ ID NO: 111225 - DNA, 15 bp, Homo sapiens
ctgtagtgtgagaga

SEQ ID NO: 111226 - DNA, 15 bp, Homo sapiens
actgtagtgtgagag

SEQ ID NO: 111227 - DNA, 15 bp, Homo sapiens
tactgtagtgtgaga

SEQ ID NO: 111228 - DNA, 15 bp, Homo sapiens
ctactgtagtgtgag

SEQ ID NO: 111229 - DNA, 15 bp, Homo sapiens
actactgtagtgtga

SEQ ID NO: 111230 - DNA, 15 bp, Homo sapiens
aactactgtagtgtg

SEQ ID NO: 111231 - DNA, 15 bp, Homo sapiens
caactactgtagtgt

SEQ ID NO: 111232 - DNA, 15 bp, Homo sapiens
tcaactactgtagtg

SEQ ID NO: 111233 - DNA, 15 bp, Homo sapiens
atcaactactgtagt

SEQ ID NO: 111234 - DNA, 15 bp, Homo sapiens
gatcaactactgtag

SEQ ID NO: 111235 - DNA, 15 bp, Homo sapiens
agatcaactactgta

SEQ ID NO: 111236 - DNA, 15 bp, Homo sapiens
aagatcaactactgt

SEQ ID NO: 111237 - DNA, 15 bp, Homo sapiens
taagatcaactactg

SEQ ID NO: 111238 - DNA, 15 bp, Homo sapiens
gtaagatcaactact

SEQ ID NO: 111239 - DNA, 15 bp, Homo sapiens
ggtaagatcaactac

SEQ ID NO: 111240 - DNA, 15 bp, Homo sapiens
aggtaagatcaacta

SEQ ID NO: 111241 - DNA, 15 bp, Homo sapiens
taggtaagatcaact

SEQ ID NO: 111242 - DNA, 15 bp, Homo sapiens
ttaggtaagatcaac

SEQ ID NO: 111243 - DNA, 15 bp, Homo sapiens
cttaggtaagatcaa

SEQ ID NO: 111244 - DNA, 15 bp, Homo sapiens
ccttaggtaagatca

SEQ ID NO: 111245 - DNA, 15 bp, Homo sapiens
tccttaggtaagatc

SEQ ID NO: 111246 - DNA, 15 bp, Homo sapiens
atccttaggtaagat

SEQ ID NO: 111247 - DNA, 15 bp, Homo sapiens
catccttaggtaaga

SEQ ID NO: 111248 - DNA, 15 bp, Homo sapiens
ccatccttaggtaag

SEQ ID NO: 111249 - DNA, 15 bp, Homo sapiens
cccatccttaggtaa

SEQ ID NO: 111250 - DNA, 15 bp, Homo sapiens
tcccatccttaggta

SEQ ID NO: 111251 - DNA, 15 bp, Homo sapiens
ttcccatccttaggt

SEQ ID NO: 111252 - DNA, 15 bp, Homo sapiens
tttcccatccttagg

SEQ ID NO: 111253 - DNA, 15 bp, Homo sapiens
ctttcccatccttag

SEQ ID NO: 111254 - DNA, 15 bp, Homo sapiens
cctttcccatcctta

SEQ ID NO: 111255 - DNA, 15 bp, Homo sapiens
ccctttcccatcctt

SEQ ID NO: 111256 - DNA, 15 bp, Homo sapiens
accctttcccatcct

SEQ ID NO: 111257 - DNA, 15 bp, Homo sapiens
taccctttcccatcc

SEQ ID NO: 111258 - DNA, 15 bp, Homo sapiens
ttaccctttcccatc

SEQ ID NO: 111259 - DNA, 15 bp, Homo sapiens
tttaccctttcccat

SEQ ID NO: 111260 - DNA, 15 bp, Homo sapiens
ctttaccctttccca

SEQ ID NO: 111261 - DNA, 15 bp, Homo sapiens
cctttaccctttccc

SEQ ID NO: 111262 - DNA, 15 bp, Homo sapiens
tcctttaccctttcc

SEQ ID NO: 111263 - DNA, 15 bp, Homo sapiens
ttcctttaccctttc

SEQ ID NO: 111264 - DNA, 15 bp, Homo sapiens
tttcctttacccttt

SEQ ID NO: 111265 - DNA, 15 bp, Homo sapiens
ttttcctttaccctt

SEQ ID NO: 111266 - DNA, 15 bp, Homo sapiens
cttttcctttaccct

SEQ ID NO: 111267 - DNA, 15 bp, Homo sapiens
ccttttcctttaccc

SEQ ID NO: 111268 - DNA, 15 bp, Homo sapiens
cccttttcctttacc

SEQ ID NO: 111269 - DNA, 15 bp, Homo sapiens
tcccttttcctttac

SEQ ID NO: 111270 - DNA, 15 bp, Homo sapiens
ttcccttttccttta

SEQ ID NO: 111271 - DNA, 15 bp, Homo sapiens
tttcccttttccttt

SEQ ID NO: 111272 - DNA, 15 bp, Homo sapiens
ttttcccttttcctt

SEQ ID NO: 111273 - DNA, 15 bp, Homo sapiens
tttttcccttttcct

SEQ ID NO: 111274 - DNA, 15 bp, Homo sapiens
ttttttcccttttcc

SEQ ID NO: 111275 - DNA, 15 bp, Homo sapiens
cttttttcccttttc

SEQ ID NO: 111276 - DNA, 15 bp, Homo sapiens
gcttttttccctttt

SEQ ID NO: 111277 - DNA, 15 bp, Homo sapiens
tgcttttttcccttt

SEQ ID NO: 111278 - DNA, 15 bp, Homo sapiens
ctgcttttttccctt

SEQ ID NO: 111279 - DNA, 15 bp, Homo sapiens
tctgcttttttccct

SEQ ID NO: 111280 - DNA, 15 bp, Homo sapiens
ttctgcttttttccc

SEQ ID NO: 111281 - DNA, 15 bp, Homo sapiens
gttctgcttttttcc

SEQ ID NO: 111282 - DNA, 15 bp, Homo sapiens
tgttctgcttttttc

SEQ ID NO: 111283 - DNA, 15 bp, Homo sapiens
ctgttctgctttttt

SEQ ID NO: 111284 - DNA, 15 bp, Homo sapiens
cctgttctgcttttt

SEQ ID NO: 111285 - DNA, 15 bp, Homo sapiens
acctgttctgctttt

SEQ ID NO: 111286 - DNA, 15 bp, Homo sapiens
tacctgttctgcttt

SEQ ID NO: 111287 - DNA, 15 bp, Homo sapiens
ctacctgttctgctt

SEQ ID NO: 111288 - DNA, 15 bp, Homo sapiens
tctacctgttctgct

SEQ ID NO: 111289 - DNA, 15 bp, Homo sapiens
ctctacctgttctgc

SEQ ID NO: 111290 - DNA, 15 bp, Homo sapiens
cctctacctgttctg

SEQ ID NO: 111291 - DNA, 15 bp, Homo sapiens
tcctctacctgttct

SEQ ID NO: 111292 - DNA, 15 bp, Homo sapiens
ctcctctacctgttc

SEQ ID NO: 111293 - DNA, 15 bp, Homo sapiens
tctcctctacctgtt

SEQ ID NO: 111294 - DNA, 15 bp, Homo sapiens
ttctcctctacctgt

SEQ ID NO: 111295 - DNA, 15 bp, Homo sapiens
attctcctctacctg

SEQ ID NO: 111296 - DNA, 15 bp, Homo sapiens
tattctcctctacct

SEQ ID NO: 111297 - DNA, 15 bp, Homo sapiens
atattctcctctacc

SEQ ID NO: 111298 - DNA, 15 bp, Homo sapiens
tatattctcctctac

SEQ ID NO: 111299 - DNA, 15 bp, Homo sapiens
ctatattctcctcta

SEQ ID NO: 111300 - DNA, 15 bp, Homo sapiens
cctatattctcctct

SEQ ID NO: 111301 - DNA, 15 bp, Homo sapiens
tcctatattctcctc

SEQ ID NO: 111302 - DNA, 15 bp, Homo sapiens
ttcctatattctcct

SEQ ID NO: 111303 - DNA, 15 bp, Homo sapiens
cttcctatattctcc

SEQ ID NO: 111304 - DNA, 15 bp, Homo sapiens
tcttcctatattctc

SEQ ID NO: 111305 - DNA, 15 bp, Homo sapiens
ttcttcctatattct

SEQ ID NO: 111306 - DNA, 15 bp, Homo sapiens
attcttcctatattc

SEQ ID NO: 111307 - DNA, 15 bp, Homo sapiens
gattcttcctatatt

SEQ ID NO: 111308 - DNA, 15 bp, Homo sapiens
agattcttcctatat

SEQ ID NO: 111309 - DNA, 15 bp, Homo sapiens
aagattcttcctata

SEQ ID NO: 111310 - DNA, 15 bp, Homo sapiens
caagattcttcctat

SEQ ID NO: 111311 - DNA, 15 bp, Homo sapiens
ccaagattcttccta

SEQ ID NO: 111312 - DNA, 15 bp, Homo sapiens
gccaagattcttcct

SEQ ID NO: 111313 - DNA, 15 bp, Homo sapiens
ggccaagattcttcc

SEQ ID NO: 111314 - DNA, 15 bp, Homo sapiens
gggccaagattcttc

SEQ ID NO: 111315 - DNA, 15 bp, Homo sapiens
ggggccaagattctt

SEQ ID NO: 111316 - DNA, 15 bp, Homo sapiens
gggggccaagattct

SEQ ID NO: 111317 - DNA, 15 bp, Homo sapiens
cgggggccaagattc

SEQ ID NO: 111318 - DNA, 15 bp, Homo sapiens
gcgggggccaagatt

SEQ ID NO: 111319 - DNA, 15 bp, Homo sapiens
ggcgggggccaagat

SEQ ID NO: 111320 - DNA, 15 bp, Homo sapiens
gggcgggggccaaga

SEQ ID NO: 111321 - DNA, 15 bp, Homo sapiens
tgggcgggggccaag

SEQ ID NO: 111322 - DNA, 15 bp, Homo sapiens
atgggcgggggccaa

SEQ ID NO: 111323 - DNA, 15 bp, Homo sapiens
gatgggcgggggcca

SEQ ID NO: 111324 - DNA, 15 bp, Homo sapiens
cgatgggcgggggcc

SEQ ID NO: 111325 - DNA, 15 bp, Homo sapiens
acgatgggcgggggc

SEQ ID NO: 111326 - DNA, 15 bp, Homo sapiens
gacgatgggcggggg

SEQ ID NO: 111327 - DNA, 15 bp, Homo sapiens
tgacgatgggcgggg

SEQ ID NO: 111328 - DNA, 15 bp, Homo sapiens
gtgacgatgggcggg

SEQ ID NO: 111329 - DNA, 15 bp, Homo sapiens
agtgacgatgggcgg

SEQ ID NO: 111330 - DNA, 15 bp, Homo sapiens
gagtgacgatgggcg

SEQ ID NO: 111331 - DNA, 15 bp, Homo sapiens
tgagtgacgatgggc

SEQ ID NO: 111332 - DNA, 15 bp, Homo sapiens
ttgagtgacgatggg

SEQ ID NO: 111333 - DNA, 15 bp, Homo sapiens
gttgagtgacgatgg

SEQ ID NO: 111334 - DNA, 15 bp, Homo sapiens
tgttgagtgacgatg

SEQ ID NO: 111335 - DNA, 15 bp, Homo sapiens
gtgttgagtgacgat

SEQ ID NO: 111336 - DNA, 15 bp, Homo sapiens
ggtgttgagtgacga

SEQ ID NO: 111337 - DNA, 15 bp, Homo sapiens
aggtgttgagtgacg

SEQ ID NO: 111338 - DNA, 15 bp, Homo sapiens
aaggtgttgagtgac

SEQ ID NO: 111339 - DNA, 15 bp, Homo sapiens
caaggtgttgagtga

SEQ ID NO: 111340 - DNA, 15 bp, Homo sapiens
tcaaggtgttgagtg

SEQ ID NO: 111341 - DNA, 15 bp, Homo sapiens
ctcaaggtgttgagt

SEQ ID NO: 111342 - DNA, 15 bp, Homo sapiens
cctcaaggtgttgag

SEQ ID NO: 111343 - DNA, 15 bp, Homo sapiens
ccctcaaggtgttga

SEQ ID NO: 111344 - DNA, 15 bp, Homo sapiens
gccctcaaggtgttg

SEQ ID NO: 111345 - DNA, 15 bp, Homo sapiens
ggccctcaaggtgtt

SEQ ID NO: 111346 - DNA, 15 bp, Homo sapiens
aggccctcaaggtgt

SEQ ID NO: 111347 - DNA, 15 bp, Homo sapiens
caggccctcaaggtg

SEQ ID NO: 111348 - DNA, 15 bp, Homo sapiens
gcaggccctcaaggt

SEQ ID NO: 111349 - DNA, 15 bp, Homo sapiens
agcaggccctcaagg

SEQ ID NO: 111350 - DNA, 15 bp, Homo sapiens
cagcaggccctcaag

SEQ ID NO: 111351 - DNA, 15 bp, Homo sapiens
acagcaggccctcaa

SEQ ID NO: 111352 - DNA, 15 bp, Homo sapiens
cacagcaggccctca

SEQ ID NO: 111353 - DNA, 15 bp, Homo sapiens
tcacagcaggccctc

SEQ ID NO: 111354 - DNA, 15 bp, Homo sapiens
ctcacagcaggccct

SEQ ID NO: 111355 - DNA, 15 bp, Homo sapiens
gctcacagcaggccc

SEQ ID NO: 111356 - DNA, 15 bp, Homo sapiens
agctcacagcaggcc

SEQ ID NO: 111357 - DNA, 15 bp, Homo sapiens
tagctcacagcaggc

SEQ ID NO: 111358 - DNA, 15 bp, Homo sapiens
ctagctcacagcagg

SEQ ID NO: 111359 - DNA, 15 bp, Homo sapiens
tctagctcacagcag

SEQ ID NO: 111360 - DNA, 15 bp, Homo sapiens
ttctagctcacagca

SEQ ID NO: 111361 - DNA, 15 bp, Homo sapiens
attctagctcacagc

SEQ ID NO: 111362 - DNA, 15 bp, Homo sapiens
aattctagctcacag

SEQ ID NO: 111363 - DNA, 15 bp, Homo sapiens
gaattctagctcaca

SEQ ID NO: 111364 - DNA, 15 bp, Homo sapiens
tgaattctagctcac

SEQ ID NO: 111365 - DNA, 15 bp, Homo sapiens
ctgaattctagctca

SEQ ID NO: 111366 - DNA, 15 bp, Homo sapiens
cctgaattctagctc

SEQ ID NO: 111367 - DNA, 15 bp, Homo sapiens
ccctgaattctagct

SEQ ID NO: 111368 - DNA, 15 bp, Homo sapiens
gccctgaattctagc

SEQ ID NO: 111369 - DNA, 15 bp, Homo sapiens
agccctgaattctag

SEQ ID NO: 111370 - DNA, 15 bp, Homo sapiens
cagccctgaattcta

SEQ ID NO: 111371 - DNA, 15 bp, Homo sapiens
ccagccctgaattct

SEQ ID NO: 111372 - DNA, 15 bp, Homo sapiens
cccagccctgaattc

SEQ ID NO: 111373 - DNA, 15 bp, Homo sapiens
tcccagccctgaatt

SEQ ID NO: 111374 - DNA, 15 bp, Homo sapiens
ctcccagccctgaat

SEQ ID NO: 111375 - DNA, 15 bp, Homo sapiens
actcccagccctgaa

SEQ ID NO: 111376 - DNA, 15 bp, Homo sapiens
gactcccagccctga

SEQ ID NO: 111377 - DNA, 15 bp, Homo sapiens
tgactcccagccctg

SEQ ID NO: 111378 - DNA, 15 bp, Homo sapiens
ctgactcccagccct

SEQ ID NO: 111379 - DNA, 15 bp, Homo sapiens
cctgactcccagccc

SEQ ID NO: 111380 - DNA, 15 bp, Homo sapiens
gcctgactcccagcc

SEQ ID NO: 111381 - DNA, 15 bp, Homo sapiens
agcctgactcccagc

SEQ ID NO: 111382 - DNA, 15 bp, Homo sapiens
cagcctgactcccag

SEQ ID NO: 111383 - DNA, 15 bp, Homo sapiens
acagcctgactccca

SEQ ID NO: 111384 - DNA, 15 bp, Homo sapiens
cacagcctgactccc

SEQ ID NO: 111385 - DNA, 15 bp, Homo sapiens
ccacagcctgactcc

SEQ ID NO: 111386 - DNA, 15 bp, Homo sapiens
cccacagcctgactc

SEQ ID NO: 111387 - DNA, 15 bp, Homo sapiens
tcccacagcctgact

SEQ ID NO: 111388 - DNA, 15 bp, Homo sapiens
atcccacagcctgac

SEQ ID NO: 111389 - DNA, 15 bp, Homo sapiens
catcccacagcctga

SEQ ID NO: 111390 - DNA, 15 bp, Homo sapiens
gcatcccacagcctg

SEQ ID NO: 111391 - DNA, 15 bp, Homo sapiens
agcatcccacagcct

SEQ ID NO: 111392 - DNA, 15 bp, Homo sapiens
gagcatcccacagcc

SEQ ID NO: 111393 - DNA, 15 bp, Homo sapiens
cgagcatcccacagc

SEQ ID NO: 111394 - DNA, 15 bp, Homo sapiens
tcgagcatcccacag

SEQ ID NO: 111395 - DNA, 15 bp, Homo sapiens
gtcgagcatcccaca

SEQ ID NO: 111396 - DNA, 15 bp, Homo sapiens
tgtcgagcatcccac

SEQ ID NO: 111397 - DNA, 15 bp, Homo sapiens
ctgtcgagcatccca

SEQ ID NO: 111398 - DNA, 15 bp, Homo sapiens
cctgtcgagcatccc

SEQ ID NO: 111399 - DNA, 15 bp, Homo sapiens
acctgtcgagcatcc

SEQ ID NO: 111400 - DNA, 15 bp, Homo sapiens
aacctgtcgagcatc

SEQ ID NO: 111401 - DNA, 15 bp, Homo sapiens
caacctgtcgagcat

SEQ ID NO: 111402 - DNA, 15 bp, Homo sapiens
gcaacctgtcgagca

SEQ ID NO: 111403 - DNA, 15 bp, Homo sapiens
ggcaacctgtcgagc

SEQ ID NO: 111404 - DNA, 15 bp, Homo sapiens
aggcaacctgtcgag

SEQ ID NO: 111405 - DNA, 15 bp, Homo sapiens
aaggcaacctgtcga

SEQ ID NO: 111406 - DNA, 15 bp, Homo sapiens
gaaggcaacctgtcg

SEQ ID NO: 111407 - DNA, 15 bp, Homo sapiens
tgaaggcaacctgtc

SEQ ID NO: 111408 - DNA, 15 bp, Homo sapiens
ttgaaggcaacctgt

SEQ ID NO: 111409 - DNA, 15 bp, Homo sapiens
attgaaggcaacctg

SEQ ID NO: 111410 - DNA, 15 bp, Homo sapiens
aattgaaggcaacct

SEQ ID NO: 111411 - DNA, 15 bp, Homo sapiens
gaattgaaggcaacc

SEQ ID NO: 111412 - DNA, 15 bp, Homo sapiens
ggaattgaaggcaac

SEQ ID NO: 111413 - DNA, 15 bp, Homo sapiens
aggaattgaaggcaa

SEQ ID NO: 111414 - DNA, 15 bp, Homo sapiens
gaggaattgaaggca

SEQ ID NO: 111415 - DNA, 15 bp, Homo sapiens
ggaggaattgaaggc

SEQ ID NO: 111416 - DNA, 15 bp, Homo sapiens
aggaggaattgaagg

SEQ ID NO: 111417 - DNA, 15 bp, Homo sapiens
gaggaggaattgaag

SEQ ID NO: 111418 - DNA, 15 bp, Homo sapiens
agaggaggaattgaa

SEQ ID NO: 111419 - DNA, 15 bp, Homo sapiens
gagaggaggaattga

SEQ ID NO: 111420 - DNA, 15 bp, Homo sapiens
agagaggaggaattg

SEQ ID NO: 111421 - DNA, 15 bp, Homo sapiens
gagagaggaggaatt

SEQ ID NO: 111422 - DNA, 15 bp, Homo sapiens
agagagaggaggaat

SEQ ID NO: 111423 - DNA, 15 bp, Homo sapiens
gagagagaggaggaa

SEQ ID NO: 111424 - DNA, 15 bp, Homo sapiens
ggagagagaggagga

SEQ ID NO: 111425 - DNA, 15 bp, Homo sapiens
gggagagagaggagg

SEQ ID NO: 111426 - DNA, 15 bp, Homo sapiens
ggggagagagaggag

SEQ ID NO: 111427 - DNA, 15 bp, Homo sapiens
gggggagagagagga

SEQ ID NO: 111428 - DNA, 15 bp, Homo sapiens
agggggagagagagg

SEQ ID NO: 111429 - DNA, 15 bp, Homo sapiens
aagggggagagagag

SEQ ID NO: 111430 - DNA, 15 bp, Homo sapiens
caagggggagagaga

SEQ ID NO: 111431 - DNA, 15 bp, Homo sapiens
gcaagggggagagag

SEQ ID NO: 111432 - DNA, 15 bp, Homo sapiens
agcaagggggagaga

SEQ ID NO: 111433 - DNA, 15 bp, Homo sapiens
gagcaagggggagag

SEQ ID NO: 111434 - DNA, 15 bp, Homo sapiens
agagcaagggggaga

SEQ ID NO: 111435 - DNA, 15 bp, Homo sapiens
gagagcaagggggag

SEQ ID NO: 111436 - DNA, 15 bp, Homo sapiens
ggagagcaaggggga

SEQ ID NO: 111437 - DNA, 15 bp, Homo sapiens
aggagagcaaggggg

SEQ ID NO: 111438 - DNA, 15 bp, Homo sapiens
taggagagcaagggg

SEQ ID NO: 111439 - DNA, 15 bp, Homo sapiens
ctaggagagcaaggg

SEQ ID NO: 111440 - DNA, 15 bp, Homo sapiens
actaggagagcaagg

SEQ ID NO: 111441 - DNA, 15 bp, Homo sapiens
gactaggagagcaag

SEQ ID NO: 111442 - DNA, 15 bp, Homo sapiens
ggactaggagagcaa

SEQ ID NO: 111443 - DNA, 15 bp, Homo sapiens
gggactaggagagca

SEQ ID NO: 111444 - DNA, 15 bp, Homo sapiens
ggggactaggagagc

SEQ ID NO: 111445 - DNA, 15 bp, Homo sapiens
gggggactaggagag

SEQ ID NO: 111446 - DNA, 15 bp, Homo sapiens
tgggggactaggaga

SEQ ID NO: 111447 - DNA, 15 bp, Homo sapiens
ctgggggactaggag

SEQ ID NO: 111448 - DNA, 15 bp, Homo sapiens
actgggggactagga

SEQ ID NO: 111449 - DNA, 15 bp, Homo sapiens
aactgggggactagg

SEQ ID NO: 111450 - DNA, 15 bp, Homo sapiens
gaactgggggactag

SEQ ID NO: 111451 - DNA, 15 bp, Homo sapiens
ggaactgggggacta

SEQ ID NO: 111452 - DNA, 15 bp, Homo sapiens
gggaactgggggact

SEQ ID NO: 111453 - DNA, 15 bp, Homo sapiens
agggaactgggggac

SEQ ID NO: 111454 - DNA, 15 bp, Homo sapiens
cagggaactggggga

SEQ ID NO: 111455 - DNA, 15 bp, Homo sapiens
gcagggaactggggg

SEQ ID NO: 111456 - DNA, 15 bp, Homo sapiens
ggcagggaactgggg

SEQ ID NO: 111457 - DNA, 15 bp, Homo sapiens
tggcagggaactggg

SEQ ID NO: 111458 - DNA, 15 bp, Homo sapiens
ttggcagggaactgg

SEQ ID NO: 111459 - DNA, 15 bp, Homo sapiens
gttggcagggaactg

SEQ ID NO: 111460 - DNA, 15 bp, Homo sapiens
ggttggcagggaact

SEQ ID NO: 111461 - DNA, 15 bp, Homo sapiens
aggttggcagggaac

SEQ ID NO: 111462 - DNA, 15 bp, Homo sapiens
gaggttggcagggaa

SEQ ID NO: 111463 - DNA, 15 bp, Homo sapiens
tgaggttggcaggga

SEQ ID NO: 111464 - DNA, 15 bp, Homo sapiens
atgaggttggcaggg

SEQ ID NO: 111465 - DNA, 15 bp, Homo sapiens
tatgaggttggcagg

SEQ ID NO: 111466 - DNA, 15 bp, Homo sapiens
gtatgaggttggcag

SEQ ID NO: 111467 - DNA, 15 bp, Homo sapiens
cgtatgaggttggca

SEQ ID NO: 111468 - DNA, 15 bp, Homo sapiens
acgtatgaggttggc

SEQ ID NO: 111469 - DNA, 15 bp, Homo sapiens
aacgtatgaggttgg

SEQ ID NO: 111470 - DNA, 15 bp, Homo sapiens
gaacgtatgaggttg

SEQ ID NO: 111471 - DNA, 15 bp, Homo sapiens
agaacgtatgaggtt

SEQ ID NO: 111472 - DNA, 15 bp, Homo sapiens
aagaacgtatgaggt

SEQ ID NO: 111473 - DNA, 15 bp, Homo sapiens
aaagaacgtatgagg

SEQ ID NO: 111474 - DNA, 15 bp, Homo sapiens
aaaagaacgtatgag

SEQ ID NO: 111475 - DNA, 15 bp, Homo sapiens
aaaaagaacgtatga

SEQ ID NO: 111476 - DNA, 15 bp, Homo sapiens
caaaaagaacgtatg

SEQ ID NO: 111477 - DNA, 15 bp, Homo sapiens
ccaaaaagaacgtat

SEQ ID NO: 111478 - DNA, 15 bp, Homo sapiens
accaaaaagaacgta

SEQ ID NO: 111479 - DNA, 15 bp, Homo sapiens
gaccaaaaagaacgt

SEQ ID NO: 111480 - DNA, 15 bp, Homo sapiens
agaccaaaaagaacg

SEQ ID NO: 111481 - DNA, 15 bp, Homo sapiens
aagaccaaaaagaac

SEQ ID NO: 111482 - DNA, 15 bp, Homo sapiens
caagaccaaaaagaa

SEQ ID NO: 111483 - DNA, 15 bp, Homo sapiens
gcaagaccaaaaaga

SEQ ID NO: 111484 - DNA, 15 bp, Homo sapiens
tgcaagaccaaaaag

SEQ ID NO: 111485 - DNA, 15 bp, Homo sapiens
ctgcaagaccaaaaa

SEQ ID NO: 111486 - DNA, 15 bp, Homo sapiens
tctgcaagaccaaaa

SEQ ID NO: 111487 - DNA, 15 bp, Homo sapiens
ttctgcaagaccaaa

SEQ ID NO: 111488 - DNA, 15 bp, Homo sapiens
attctgcaagaccaa

SEQ ID NO: 111489 - DNA, 15 bp, Homo sapiens
cattctgcaagacca

SEQ ID NO: 111490 - DNA, 15 bp, Homo sapiens
acattctgcaagacc

SEQ ID NO: 111491 - DNA, 15 bp, Homo sapiens
cacattctgcaagac

SEQ ID NO: 111492 - DNA, 15 bp, Homo sapiens
ccacattctgcaaga

SEQ ID NO: 111493 - DNA, 15 bp, Homo sapiens
cccacattctgcaag

SEQ ID NO: 111494 - DNA, 15 bp, Homo sapiens
ccccacattctgcaa

SEQ ID NO: 111495 - DNA, 15 bp, Homo sapiens
gccccacattctgca

SEQ ID NO: 111496 - DNA, 15 bp, Homo sapiens
tgccccacattctgc

SEQ ID NO: 111497 - DNA, 15 bp, Homo sapiens
ttgccccacattctg

SEQ ID NO: 111498 - DNA, 15 bp, Homo sapiens
cttgccccacattct

SEQ ID NO: 111499 - DNA, 15 bp, Homo sapiens
gcttgccccacattc

SEQ ID NO: 111500 - DNA, 15 bp, Homo sapiens
ggcttgccccacatt

SEQ ID NO: 111501 - DNA, 15 bp, Homo sapiens
aggcttgccccacat

SEQ ID NO: 111502 - DNA, 15 bp, Homo sapiens
caggcttgccccaca

SEQ ID NO: 111503 - DNA, 15 bp, Homo sapiens
ccaggcttgccccac

SEQ ID NO: 111504 - DNA, 15 bp, Homo sapiens
cccaggcttgcccca

SEQ ID NO: 111505 - DNA, 15 bp, Homo sapiens
tcccaggcttgcccc

SEQ ID NO: 111506 - DNA, 15 bp, Homo sapiens
ctcccaggcttgccc

SEQ ID NO: 111507 - DNA, 15 bp, Homo sapiens
cctcccaggcttgcc

SEQ ID NO: 111508 - DNA, 15 bp, Homo sapiens
acctcccaggcttgc

SEQ ID NO: 111509 - DNA, 15 bp, Homo sapiens
gacctcccaggcttg

SEQ ID NO: 111510 - DNA, 15 bp, Homo sapiens
tgacctcccaggctt

SEQ ID NO: 111511 - DNA, 15 bp, Homo sapiens
atgacctcccaggct

SEQ ID NO: 111512 - DNA, 15 bp, Homo sapiens
catgacctcccaggc

SEQ ID NO: 111513 - DNA, 15 bp, Homo sapiens
tcatgacctcccagg

SEQ ID NO: 111514 - DNA, 15 bp, Homo sapiens
ctcatgacctcccag

SEQ ID NO: 111515 - DNA, 15 bp, Homo sapiens
gctcatgacctccca

SEQ ID NO: 111516 - DNA, 15 bp, Homo sapiens
tgctcatgacctccc

SEQ ID NO: 111517 - DNA, 15 bp, Homo sapiens
gtgctcatgacctcc

SEQ ID NO: 111518 - DNA, 15 bp, Homo sapiens
ggtgctcatgacctc

SEQ ID NO: 111519 - DNA, 15 bp, Homo sapiens
gggtgctcatgacct

SEQ ID NO: 111520 - DNA, 15 bp, Homo sapiens
tgggtgctcatgacc

SEQ ID NO: 111521 - DNA, 15 bp, Homo sapiens
ctgggtgctcatgac

SEQ ID NO: 111522 - DNA, 15 bp, Homo sapiens
tctgggtgctcatga

SEQ ID NO: 111523 - DNA, 15 bp, Homo sapiens
gtctgggtgctcatg

SEQ ID NO: 111524 - DNA, 15 bp, Homo sapiens
ggtctgggtgctcat

SEQ ID NO: 111525 - DNA, 15 bp, Homo sapiens
aggtctgggtgctca

SEQ ID NO: 111526 - DNA, 15 bp, Homo sapiens
caggtctgggtgctc

SEQ ID NO: 111527 - DNA, 15 bp, Homo sapiens
tcaggtctgggtgct

SEQ ID NO: 111528 - DNA, 15 bp, Homo sapiens
ctcaggtctgggtgc

SEQ ID NO: 111529 - DNA, 15 bp, Homo sapiens
actcaggtctgggtg

SEQ ID NO: 111530 - DNA, 15 bp, Homo sapiens
cactcaggtctgggt

SEQ ID NO: 111531 - DNA, 15 bp, Homo sapiens
tcactcaggtctggg

SEQ ID NO: 111532 - DNA, 15 bp, Homo sapiens
atcactcaggtctgg

SEQ ID NO: 111533 - DNA, 15 bp, Homo sapiens
catcactcaggtctg

SEQ ID NO: 111534 - DNA, 15 bp, Homo sapiens
ccatcactcaggtct

SEQ ID NO: 111535 - DNA, 15 bp, Homo sapiens
gccatcactcaggtc

SEQ ID NO: 111536 - DNA, 15 bp, Homo sapiens
tgccatcactcaggt

SEQ ID NO: 111537 - DNA, 15 bp, Homo sapiens
ctgccatcactcagg

SEQ ID NO: 111538 - DNA, 15 bp, Homo sapiens
gctgccatcactcag

SEQ ID NO: 111539 - DNA, 15 bp, Homo sapiens
ggctgccatcactca

SEQ ID NO: 111540 - DNA, 15 bp, Homo sapiens
tggctgccatcactc

SEQ ID NO: 111541 - DNA, 15 bp, Homo sapiens
ctggctgccatcact

SEQ ID NO: 111542 - DNA, 15 bp, Homo sapiens
gctggctgccatcac

SEQ ID NO: 111543 - DNA, 15 bp, Homo sapiens
tgctggctgccatca

SEQ ID NO: 111544 - DNA, 15 bp, Homo sapiens
atgctggctgccatc

SEQ ID NO: 111545 - DNA, 15 bp, Homo sapiens
aatgctggctgccat

SEQ ID NO: 111546 - DNA, 15 bp, Homo sapiens
aaatgctggctgcca

SEQ ID NO: 111547 - DNA, 15 bp, Homo sapiens
taaatgctggctgcc

SEQ ID NO: 111548 - DNA, 15 bp, Homo sapiens
ttaaatgctggctgc

SEQ ID NO: 111549 - DNA, 15 bp, Homo sapiens
tttaaatgctggctg

SEQ ID NO: 111550 - DNA, 15 bp, Homo sapiens
gtttaaatgctggct

SEQ ID NO: 111551 - DNA, 15 bp, Homo sapiens
agtttaaatgctggc

SEQ ID NO: 111552 - DNA, 15 bp, Homo sapiens
gagtttaaatgctgg

SEQ ID NO: 111553 - DNA, 15 bp, Homo sapiens
ggagtttaaatgctg

SEQ ID NO: 111554 - DNA, 15 bp, Homo sapiens
aggagtttaaatgct

SEQ ID NO: 111555 - DNA, 15 bp, Homo sapiens
gaggagtttaaatgc

SEQ ID NO: 111556 - DNA, 15 bp, Homo sapiens
agaggagtttaaatg

SEQ ID NO: 111557 - DNA, 15 bp, Homo sapiens
aagaggagtttaaat

SEQ ID NO: 111558 - DNA, 15 bp, Homo sapiens
caagaggagtttaaa

SEQ ID NO: 111559 - DNA, 15 bp, Homo sapiens
gcaagaggagtttaa

SEQ ID NO: 111560 - DNA, 15 bp, Homo sapiens
agcaagaggagttta

SEQ ID NO: 111561 - DNA, 15 bp, Homo sapiens
tagcaagaggagttt

SEQ ID NO: 111562 - DNA, 15 bp, Homo sapiens
atagcaagaggagtt

SEQ ID NO: 111563 - DNA, 15 bp, Homo sapiens
gatagcaagaggagt

SEQ ID NO: 111564 - DNA, 15 bp, Homo sapiens
ggatagcaagaggag

SEQ ID NO: 111565 - DNA, 15 bp, Homo sapiens
tggatagcaagagga

SEQ ID NO: 111566 - DNA, 15 bp, Homo sapiens
atggatagcaagagg

SEQ ID NO: 111567 - DNA, 15 bp, Homo sapiens
gatggatagcaagag

SEQ ID NO: 111568 - DNA, 15 bp, Homo sapiens
agatggatagcaaga

SEQ ID NO: 111569 - DNA, 15 bp, Homo sapiens
tagatggatagcaag

SEQ ID NO: 111570 - DNA, 15 bp, Homo sapiens
gtagatggatagcaa

SEQ ID NO: 111571 - DNA, 15 bp, Homo sapiens
cgtagatggatagca

SEQ ID NO: 111572 - DNA, 15 bp, Homo sapiens
acgtagatggatagc

SEQ ID NO: 111573 - DNA, 15 bp, Homo sapiens
cacgtagatggatag

SEQ ID NO: 111574 - DNA, 15 bp, Homo sapiens
acacgtagatggata

SEQ ID NO: 111575 - DNA, 15 bp, Homo sapiens
tacacgtagatggat

SEQ ID NO: 111576 - DNA, 15 bp, Homo sapiens
atacacgtagatgga

SEQ ID NO: 111577 - DNA, 15 bp, Homo sapiens
aatacacgtagatgg

SEQ ID NO: 111578 - DNA, 15 bp, Homo sapiens
taatacacgtagatg

SEQ ID NO: 111579 - DNA, 15 bp, Homo sapiens
gtaatacacgtagat

SEQ ID NO: 111580 - DNA, 15 bp, Homo sapiens
tgtaatacacgtaga

SEQ ID NO: 111581 - DNA, 15 bp, Homo sapiens
ctgtaatacacgtag

SEQ ID NO: 111582 - DNA, 15 bp, Homo sapiens
tctgtaatacacgta

SEQ ID NO: 111583 - DNA, 15 bp, Homo sapiens
gtctgtaatacacgt

SEQ ID NO: 111584 - DNA, 15 bp, Homo sapiens
tgtctgtaatacacg

SEQ ID NO: 111585 - DNA, 15 bp, Homo sapiens
atgtctgtaatacac

SEQ ID NO: 111586 - DNA, 15 bp, Homo sapiens
aatgtctgtaataca

SEQ ID NO: 111587 - DNA, 15 bp, Homo sapiens
gaatgtctgtaatac

SEQ ID NO: 111588 - DNA, 15 bp, Homo sapiens
agaatgtctgtaata

SEQ ID NO: 111589 - DNA, 15 bp, Homo sapiens
cagaatgtctgtaat

SEQ ID NO: 111590 - DNA, 15 bp, Homo sapiens
gcagaatgtctgtaa

SEQ ID NO: 111591 - DNA, 15 bp, Homo sapiens
agcagaatgtctgta

SEQ ID NO: 111592 - DNA, 15 bp, Homo sapiens
gagcagaatgtctgt

SEQ ID NO: 111593 - DNA, 15 bp, Homo sapiens
tgagcagaatgtctg

SEQ ID NO: 111594 - DNA, 15 bp, Homo sapiens
ctgagcagaatgtct

SEQ ID NO: 111595 - DNA, 15 bp, Homo sapiens
gctgagcagaatgtc

SEQ ID NO: 111596 - DNA, 15 bp, Homo sapiens
agctgagcagaatgt

SEQ ID NO: 111597 - DNA, 15 bp, Homo sapiens
tagctgagcagaatg

SEQ ID NO: 111598 - DNA, 15 bp, Homo sapiens
gtagctgagcagaat

SEQ ID NO: 111599 - DNA, 15 bp, Homo sapiens
tgtagctgagcagaa

SEQ ID NO: 111600 - DNA, 15 bp, Homo sapiens
ttgtagctgagcaga

SEQ ID NO: 111601 - DNA, 15 bp, Homo sapiens
cttgtagctgagcag

SEQ ID NO: 111602 - DNA, 15 bp, Homo sapiens
gcttgtagctgagca

SEQ ID NO: 111603 - DNA, 15 bp, Homo sapiens
tgcttgtagctgagc

SEQ ID NO: 111604 - DNA, 15 bp, Homo sapiens
gtgcttgtagctgag

SEQ ID NO: 111605 - DNA, 15 bp, Homo sapiens
ggtgcttgtagctga

SEQ ID NO: 111606 - DNA, 15 bp, Homo sapiens
gggtgcttgtagctg

SEQ ID NO: 111607 - DNA, 15 bp, Homo sapiens
ggggtgcttgtagct

SEQ ID NO: 111608 - DNA, 15 bp, Homo sapiens
cggggtgcttgtagc

SEQ ID NO: 111609 - DNA, 15 bp, Homo sapiens
tcggggtgcttgtag

SEQ ID NO: 111610 - DNA, 15 bp, Homo sapiens
ttcggggtgcttgta

SEQ ID NO: 111611 - DNA, 15 bp, Homo sapiens
cttcggggtgcttgt

SEQ ID NO: 111612 - DNA, 15 bp, Homo sapiens
acttcggggtgcttg

SEQ ID NO: 111613 - DNA, 15 bp, Homo sapiens
gacttcggggtgctt

SEQ ID NO: 111614 - DNA, 15 bp, Homo sapiens
agacttcggggtgct

SEQ ID NO: 111615 - DNA, 15 bp, Homo sapiens
gagacttcggggtgc

SEQ ID NO: 111616 - DNA, 15 bp, Homo sapiens
ggagacttcggggtg

SEQ ID NO: 111617 - DNA, 15 bp, Homo sapiens
aggagacttcggggt

SEQ ID NO: 111618 - DNA, 15 bp, Homo sapiens
aaggagacttcgggg

SEQ ID NO: 111619 - DNA, 15 bp, Homo sapiens
gaaggagacttcggg

SEQ ID NO: 111620 - DNA, 15 bp, Homo sapiens
tgaaggagacttcgg

SEQ ID NO: 111621 - DNA, 15 bp, Homo sapiens
ctgaaggagacttcg

SEQ ID NO: 111622 - DNA, 15 bp, Homo sapiens
gctgaaggagacttc

SEQ ID NO: 111623 - DNA, 15 bp, Homo sapiens
tgctgaaggagactt

SEQ ID NO: 111624 - DNA, 15 bp, Homo sapiens
atgctgaaggagact

SEQ ID NO: 111625 - DNA, 15 bp, Homo sapiens
catgctgaaggagac

SEQ ID NO: 111626 - DNA, 15 bp, Homo sapiens
ccatgctgaaggaga

SEQ ID NO: 111627 - DNA, 15 bp, Homo sapiens
tccatgctgaaggag

SEQ ID NO: 111628 - DNA, 15 bp, Homo sapiens
ctccatgctgaagga

SEQ ID NO: 111629 - DNA, 15 bp, Homo sapiens
gctccatgctgaagg

SEQ ID NO: 111630 - DNA, 15 bp, Homo sapiens
tgctccatgctgaag

SEQ ID NO: 111631 - DNA, 15 bp, Homo sapiens
cctgctccatgctga

SEQ ID NO: 111632 - DNA, 15 bp, Homo sapiens
gcctgctccatgctg

SEQ ID NO: 111633 - DNA, 15 bp, Homo sapiens
tgcctgctccatgct

SEQ ID NO: 111634 - DNA, 15 bp, Homo sapiens
ctgcctgctccatgc

SEQ ID NO: 111635 - DNA, 15 bp, Homo sapiens
cctgcctgctccatg

SEQ ID NO: 111636 - DNA, 15 bp, Homo sapiens
gcctgcctgctccat

SEQ ID NO: 111637 - DNA, 15 bp, Homo sapiens
cgcctgcctgctcca

SEQ ID NO: 111638 - DNA, 15 bp, Homo sapiens
acgcctgcctgctcc

SEQ ID NO: 111639 - DNA, 15 bp, Homo sapiens
cacgcctgcctgctc

SEQ ID NO: 111640 - DNA, 15 bp, Homo sapiens
acacgcctgcctgct

SEQ ID NO: 111641 - DNA, 15 bp, Homo sapiens
tacacgcctgcctgc

SEQ ID NO: 111642 - DNA, 15 bp, Homo sapiens
ttacacgcctgcctg

SEQ ID NO: 111643 - DNA, 15 bp, Homo sapiens
gttacacgcctgcct

SEQ ID NO: 111644 - DNA, 15 bp, Homo sapiens
tgttacacgcctgcc

SEQ ID NO: 111645 - DNA, 15 bp, Homo sapiens
ttgttacacgcctgc

SEQ ID NO: 111646 - DNA, 15 bp, Homo sapiens
cttgttacacgcctg

SEQ ID NO: 111647 - DNA, 15 bp, Homo sapiens
tcttgttacacgcct

SEQ ID NO: 111648 - DNA, 15 bp, Homo sapiens
ttcttgttacacgcc

SEQ ID NO: 111649 - DNA, 15 bp, Homo sapiens
tttcttgttacacgc

SEQ ID NO: 111650 - DNA, 15 bp, Homo sapiens
gtttcttgttacacg

SEQ ID NO: 111651 - DNA, 15 bp, Homo sapiens
tgtttcttgttacac

SEQ ID NO: 111652 - DNA, 15 bp, Homo sapiens
ctgtttcttgttaca

SEQ ID NO: 111653 - DNA, 15 bp, Homo sapiens
tctgtttcttgttac

SEQ ID NO: 111654 - DNA, 15 bp, Homo sapiens
ctctgtttcttgtta

SEQ ID NO: 111655 - DNA, 15 bp, Homo sapiens
tctctgtttcttgtt

SEQ ID NO: 111656 - DNA, 15 bp, Homo sapiens
ctctctgtttcttgt

SEQ ID NO: 111657 - DNA, 15 bp, Homo sapiens
actctctgtttcttg

SEQ ID NO: 111658 - DNA, 15 bp, Homo sapiens
cactctctgtttctt

SEQ ID NO: 111659 - DNA, 15 bp, Homo sapiens
tcactctctgtttct

SEQ ID NO: 111660 - DNA, 15 bp, Homo sapiens
ctcactctctgtttc

SEQ ID NO: 111661 - DNA, 15 bp, Homo sapiens
actcactctctgttt

SEQ ID NO: 111662 - DNA, 15 bp, Homo sapiens
cactcactctctgtt

SEQ ID NO: 111663 - DNA, 15 bp, Homo sapiens
acactcactctctgt

SEQ ID NO: 111664 - DNA, 15 bp, Homo sapiens
gacactcactctctg

SEQ ID NO: 111665 - DNA, 15 bp, Homo sapiens
tgacactcactctct

SEQ ID NO: 111666 - DNA, 15 bp, Homo sapiens
gtgacactcactctc

SEQ ID NO: 111667 - DNA, 15 bp, Homo sapiens
ggtgacactcactct

SEQ ID NO: 111668 - DNA, 15 bp, Homo sapiens
gggtgacactcactc

SEQ ID NO: 111669 - DNA, 15 bp, Homo sapiens
agggtgacactcact

SEQ ID NO: 111670 - DNA, 15 bp, Homo sapiens
cagggtgacactcac

SEQ ID NO: 111671 - DNA, 15 bp, Homo sapiens
ccagggtgacactca

SEQ ID NO: 111672 - DNA, 15 bp, Homo sapiens
gccagggtgacactc

SEQ ID NO: 111673 - DNA, 15 bp, Homo sapiens
ggccagggtgacact

SEQ ID NO: 111674 - DNA, 15 bp, Homo sapiens
tggccagggtgacac

SEQ ID NO: 111675 - DNA, 15 bp, Homo sapiens
ctggccagggtgaca

SEQ ID NO: 111676 - DNA, 15 bp, Homo sapiens
tctggccagggtgac

SEQ ID NO: 111677 - DNA, 15 bp, Homo sapiens
ctctggccagggtga

SEQ ID NO: 111678 - DNA, 15 bp, Homo sapiens
gctctggccagggtg

SEQ ID NO: 111679 - DNA, 15 bp, Homo sapiens
ggctctggccagggt

SEQ ID NO: 111680 - DNA, 15 bp, Homo sapiens
tggctctggccaggg

SEQ ID NO: 111681 - DNA, 15 bp, Homo sapiens
ttggctctggccagg

SEQ ID NO: 111682 - DNA, 15 bp, Homo sapiens
tttggctctggccag

SEQ ID NO: 111683 - DNA, 15 bp, Homo sapiens
gtttggctctggcca

SEQ ID NO: 111684 - DNA, 15 bp, Homo sapiens
ggtttggctctggcc

SEQ ID NO: 111685 - DNA, 15 bp, Homo sapiens
tggtttggctctggc

SEQ ID NO: 111686 - DNA, 15 bp, Homo sapiens
ctggtttggctctgg

SEQ ID NO: 111687 - DNA, 15 bp, Homo sapiens
gctggtttggctctg

SEQ ID NO: 111688 - DNA, 15 bp, Homo sapiens
ggctggtttggctct

SEQ ID NO: 111689 - DNA, 15 bp, Homo sapiens
gggctggtttggctc

SEQ ID NO: 111690 - DNA, 15 bp, Homo sapiens
agggctggtttggct

SEQ ID NO: 111691 - DNA, 15 bp, Homo sapiens
cagggctggtttggc

SEQ ID NO: 111692 - DNA, 15 bp, Homo sapiens
acagggctggtttgg

SEQ ID NO: 111693 - DNA, 15 bp, Homo sapiens
cacagggctggtttg

SEQ ID NO: 111694 - DNA, 15 bp, Homo sapiens
ccacagggctggttt

SEQ ID NO: 111695 - DNA, 15 bp, Homo sapiens
gccacagggctggtt

SEQ ID NO: 111696 - DNA, 15 bp, Homo sapiens
ggccacagggctggt

SEQ ID NO: 111697 - DNA, 15 bp, Homo sapiens
gggccacagggctgg

SEQ ID NO: 111698 - DNA, 15 bp, Homo sapiens
tgggccacagggctg

SEQ ID NO: 111699 - DNA, 15 bp, Homo sapiens
ctgggccacagggct

SEQ ID NO: 111700 - DNA, 15 bp, Homo sapiens
actgggccacagggc

SEQ ID NO: 111701 - DNA, 15 bp, Homo sapiens
cactgggccacaggg

SEQ ID NO: 111702 - DNA, 15 bp, Homo sapiens
gcactgggccacagg

SEQ ID NO: 111703 - DNA, 15 bp, Homo sapiens
ggcactgggccacag

SEQ ID NO: 111704 - DNA, 15 bp, Homo sapiens
aggcactgggccaca

SEQ ID NO: 111705 - DNA, 15 bp, Homo sapiens
caggcactgggccac

SEQ ID NO: 111706 - DNA, 15 bp, Homo sapiens
gcaggcactgggcca

SEQ ID NO: 111707 - DNA, 15 bp, Homo sapiens
agcaggcactgggcc

SEQ ID NO: 111708 - DNA, 15 bp, Homo sapiens
gagcaggcactgggc

SEQ ID NO: 111709 - DNA, 15 bp, Homo sapiens
ggagcaggcactggg

SEQ ID NO: 111710 - DNA, 15 bp, Homo sapiens
gggagcaggcactgg

SEQ ID NO: 111711 - DNA, 15 bp, Homo sapiens
tgggagcaggcactg

SEQ ID NO: 111712 - DNA, 15 bp, Homo sapiens
ttgggagcaggcact

SEQ ID NO: 111713 - DNA, 15 bp, Homo sapiens
attgggagcaggcac

SEQ ID NO: 111714 - DNA, 15 bp, Homo sapiens
gattgggagcaggca

SEQ ID NO: 111715 - DNA, 15 bp, Homo sapiens
ggattgggagcaggc

SEQ ID NO: 111716 - DNA, 15 bp, Homo sapiens
gggattgggagcagg

SEQ ID NO: 111717 - DNA, 15 bp, Homo sapiens
tgggattgggagcag

SEQ ID NO: 111718 - DNA, 15 bp, Homo sapiens
atgggattgggagca

SEQ ID NO: 111719 - DNA, 15 bp, Homo sapiens
gatgggattgggagc

SEQ ID NO: 111720 - DNA, 15 bp, Homo sapiens
tgatgggattgggag

SEQ ID NO: 111721 - DNA, 15 bp, Homo sapiens
ctgatgggattggga

SEQ ID NO: 111722 - DNA, 15 bp, Homo sapiens
cctgatgggattggg

SEQ ID NO: 111723 - DNA, 15 bp, Homo sapiens
tcctgatgggattgg

SEQ ID NO: 111724 - DNA, 15 bp, Homo sapiens
ctcctgatgggattg

SEQ ID NO: 111725 - DNA, 15 bp, Homo sapiens
gctcctgatgggatt

SEQ ID NO: 111726 - DNA, 15 bp, Homo sapiens
agctcctgatgggat

SEQ ID NO: 111727 - DNA, 15 bp, Homo sapiens
aagctcctgatggga

SEQ ID NO: 111728 - DNA, 15 bp, Homo sapiens
gaagctcctgatggg

SEQ ID NO: 111729 - DNA, 15 bp, Homo sapiens
tgaagctcctgatgg

SEQ ID NO: 111730 - DNA, 15 bp, Homo sapiens
ctgaagctcctgatg

SEQ ID NO: 111731 - DNA, 15 bp, Homo sapiens
gctgaagctcctgat

SEQ ID NO: 111732 - DNA, 15 bp, Homo sapiens
ggctgaagctcctga

SEQ ID NO: 111733 - DNA, 15 bp, Homo sapiens
gggctgaagctcctg

SEQ ID NO: 111734 - DNA, 15 bp, Homo sapiens
tgggctgaagctcct

SEQ ID NO: 111735 - DNA, 15 bp, Homo sapiens
atgggctgaagctcc

SEQ ID NO: 111736 - DNA, 15 bp, Homo sapiens
catgggctgaagctc

SEQ ID NO: 111737 - DNA, 15 bp, Homo sapiens
acatgggctgaagct

SEQ ID NO: 111738 - DNA, 15 bp, Homo sapiens
cacatgggctgaagc

SEQ ID NO: 111739 - DNA, 15 bp, Homo sapiens
acacatgggctgaag

SEQ ID NO: 111740 - DNA, 15 bp, Homo sapiens
aacacatgggctgaa

SEQ ID NO: 111741 - DNA, 15 bp, Homo sapiens
caacacatgggctga

SEQ ID NO: 111742 - DNA, 15 bp, Homo sapiens
acaacacatgggctg

SEQ ID NO: 111743 - DNA, 15 bp, Homo sapiens
cacaacacatgggct

SEQ ID NO: 111744 - DNA, 15 bp, Homo sapiens
ccacaacacatgggc

SEQ ID NO: 111745 - DNA, 15 bp, Homo sapiens
accacaacacatggg

SEQ ID NO: 111746 - DNA, 15 bp, Homo sapiens
caccacaacacatgg

SEQ ID NO: 111747 - DNA, 15 bp, Homo sapiens
ccaccacaacacatg

SEQ ID NO: 111748 - DNA, 15 bp, Homo sapiens
gccaccacaacacat

SEQ ID NO: 111749 - DNA, 15 bp, Homo sapiens
ggccaccacaacaca

SEQ ID NO: 111750 - DNA, 15 bp, Homo sapiens
tggccaccacaacac

SEQ ID NO: 111751 - DNA, 15 bp, Homo sapiens
ctggccaccacaaca

SEQ ID NO: 111752 - DNA, 15 bp, Homo sapiens
actggccaccacaac

SEQ ID NO: 111753 - DNA, 15 bp, Homo sapiens
cactggccaccacaa

SEQ ID NO: 111754 - DNA, 15 bp, Homo sapiens
gcactggccaccaca

SEQ ID NO: 111755 - DNA, 15 bp, Homo sapiens
tgcactggccaccac

SEQ ID NO: 111756 - DNA, 15 bp, Homo sapiens
ctgcactggccacca

SEQ ID NO: 111757 - DNA, 15 bp, Homo sapiens
actgcactggccacc

SEQ ID NO: 111758 - DNA, 15 bp, Homo sapiens
gactgcactggccac

SEQ ID NO: 111759 - DNA, 15 bp, Homo sapiens
cgactgcactggcca

SEQ ID NO: 111760 - DNA, 15 bp, Homo sapiens
tcgactgcactggcc

SEQ ID NO: 111761 - DNA, 15 bp, Homo sapiens
gtcgactgcactggc

SEQ ID NO: 111762 - DNA, 15 bp, Homo sapiens
tgtcgactgcactgg

SEQ ID NO: 111763 - DNA, 15 bp, Homo sapiens
ctgtcgactgcactg

SEQ ID NO: 111764 - DNA, 15 bp, Homo sapiens
actgtcgactgcact

SEQ ID NO: 111765 - DNA, 15 bp, Homo sapiens
tactgtcgactgcac

SEQ ID NO: 111766 - DNA, 15 bp, Homo sapiens
gtactgtcgactgca

SEQ ID NO: 111767 - DNA, 15 bp, Homo sapiens
ggtactgtcgactgc

SEQ ID NO: 111768 - DNA, 15 bp, Homo sapiens
tggtactgtcgactg

SEQ ID NO: 111769 - DNA, 15 bp, Homo sapiens
gtggtactgtcgact

SEQ ID NO: 111770 - DNA, 15 bp, Homo sapiens
cgtggtactgtcgac

SEQ ID NO: 111771 - DNA, 15 bp, Homo sapiens
gcgtggtactgtcga

SEQ ID NO: 111772 - DNA, 15 bp, Homo sapiens
ggcgtggtactgtcg

SEQ ID NO: 111773 - DNA, 15 bp, Homo sapiens
aggcgtggtactgtc

SEQ ID NO: 111774 - DNA, 15 bp, Homo sapiens
gaggcgtggtactgt

SEQ ID NO: 111775 - DNA, 15 bp, Homo sapiens
ggaggcgtggtactg

SEQ ID NO: 111776 - DNA, 15 bp, Homo sapiens
gggaggcgtggtact

SEQ ID NO: 111777 - DNA, 15 bp, Homo sapiens
ggggaggcgtggtac

SEQ ID NO: 111778 - DNA, 15 bp, Homo sapiens
aggggaggcgtggta

SEQ ID NO: 111779 - DNA, 15 bp, Homo sapiens
gaggggaggcgtggt

SEQ ID NO: 111780 - DNA, 15 bp, Homo sapiens
cgaggggaggcgtgg

SEQ ID NO: 111781 - DNA, 15 bp, Homo sapiens
acgaggggaggcgtg

SEQ ID NO: 111782 - DNA, 15 bp, Homo sapiens
cacgaggggaggcgt

SEQ ID NO: 111783 - DNA, 15 bp, Homo sapiens
ccacgaggggaggcg

SEQ ID NO: 111784 - DNA, 15 bp, Homo sapiens
gccacgaggggaggc

SEQ ID NO: 111785 - DNA, 15 bp, Homo sapiens
ggccacgaggggagg

SEQ ID NO: 111786 - DNA, 15 bp, Homo sapiens
aggccacgaggggag

SEQ ID NO: 111787 - DNA, 15 bp, Homo sapiens
aaggccacgagggga

SEQ ID NO: 111788 - DNA, 15 bp, Homo sapiens
gaaggccacgagggg

SEQ ID NO: 111789 - DNA, 15 bp, Homo sapiens
tgaaggccacgaggg

SEQ ID NO: 111790 - DNA, 15 bp, Homo sapiens
gtgaaggccacgagg

SEQ ID NO: 111791 - DNA, 15 bp, Homo sapiens
tgtgaaggccacgag

SEQ ID NO: 111792 - DNA, 15 bp, Homo sapiens
ctgtgaaggccacga

SEQ ID NO: 111793 - DNA, 15 bp, Homo sapiens
actgtgaaggccacg

SEQ ID NO: 111794 - DNA, 15 bp, Homo sapiens
aactgtgaaggccac

SEQ ID NO: 111795 - DNA, 15 bp, Homo sapiens
aaactgtgaaggcca

SEQ ID NO: 111796 - DNA, 15 bp, Homo sapiens
gaaactgtgaaggcc

SEQ ID NO: 111797 - DNA, 15 bp, Homo sapiens
agaaactgtgaaggc

SEQ ID NO: 111798 - DNA, 15 bp, Homo sapiens
aagaaactgtgaagg

SEQ ID NO: 111799 - DNA, 15 bp, Homo sapiens
caagaaactgtgaag

SEQ ID NO: 111800 - DNA, 15 bp, Homo sapiens
gcaagaaactgtgaa

SEQ ID NO: 111801 - DNA, 15 bp, Homo sapiens
agcaagaaactgtga

SEQ ID NO: 111802 - DNA, 15 bp, Homo sapiens
aagcaagaaactgtg

SEQ ID NO: 111803 - DNA, 15 bp, Homo sapiens
aaagcaagaaactgt

SEQ ID NO: 111804 - DNA, 15 bp, Homo sapiens
aaaagcaagaaactg

SEQ ID NO: 111805 - DNA, 15 bp, Homo sapiens
gaaaagcaagaaact

SEQ ID NO: 111806 - DNA, 15 bp, Homo sapiens
tgaaaagcaagaaac

SEQ ID NO: 111807 - DNA, 15 bp, Homo sapiens
atgaaaagcaagaaa

SEQ ID NO: 111808 - DNA, 15 bp, Homo sapiens
aatgaaaagcaagaa

SEQ ID NO: 111809 - DNA, 15 bp, Homo sapiens
taatgaaaagcaaga

SEQ ID NO: 111810 - DNA, 15 bp, Homo sapiens
ttaatgaaaagcaag

SEQ ID NO: 111811 - DNA, 15 bp, Homo sapiens
gttaatgaaaagcaa

SEQ ID NO: 111812 - DNA, 15 bp, Homo sapiens
cgttaatgaaaagca

SEQ ID NO: 111813 - DNA, 15 bp, Homo sapiens
tcgttaatgaaaagc

SEQ ID NO: 111814 - DNA, 15 bp, Homo sapiens
gtcgttaatgaaaag

SEQ ID NO: 111815 - DNA, 15 bp, Homo sapiens
cgtcgttaatgaaaa

SEQ ID NO: 111816 - DNA, 15 bp, Homo sapiens
gcgtcgttaatgaaa

SEQ ID NO: 111817 - DNA, 15 bp, Homo sapiens
agcgtcgttaatgaa

SEQ ID NO: 111818 - DNA, 15 bp, Homo sapiens
cagcgtcgttaatga

SEQ ID NO: 111819 - DNA, 15 bp, Homo sapiens
gcagcgtcgttaatg

SEQ ID NO: 111820 - DNA, 15 bp, Homo sapiens
agcagcgtcgttaat

SEQ ID NO: 111821 - DNA, 15 bp, Homo sapiens
tagcagcgtcgttaa

SEQ ID NO: 111822 - DNA, 15 bp, Homo sapiens
ctagcagcgtcgtta

SEQ ID NO: 111823 - DNA, 15 bp, Homo sapiens
actagcagcgtcgtt

SEQ ID NO: 111824 - DNA, 15 bp, Homo sapiens
aactagcagcgtcgt

SEQ ID NO: 111825 - DNA, 15 bp, Homo sapiens
aaactagcagcgtcg

SEQ ID NO: 111826 - DNA, 15 bp, Homo sapiens
aaaactagcagcgtc

SEQ ID NO: 111827 - DNA, 15 bp, Homo sapiens
taaaactagcagcgt

SEQ ID NO: 111828 - DNA, 15 bp, Homo sapiens
ctaaaactagcagcg

SEQ ID NO: 111829 - DNA, 15 bp, Homo sapiens
cctaaaactagcagc

SEQ ID NO: 111830 - DNA, 15 bp, Homo sapiens
ccctaaaactagcag

SEQ ID NO: 111831 - DNA, 15 bp, Homo sapiens
gccctaaaactagca

SEQ ID NO: 111832 - DNA, 15 bp, Homo sapiens
cgccctaaaactagc

SEQ ID NO: 111833 - DNA, 15 bp, Homo sapiens
gcgccctaaaactag

SEQ ID NO: 111834 - DNA, 15 bp, Homo sapiens
cgcgccctaaaacta

SEQ ID NO: 111835 - DNA, 15 bp, Homo sapiens
tcgcgccctaaaact

SEQ ID NO: 111836 - DNA, 15 bp, Homo sapiens
ctcgcgccctaaaac

SEQ ID NO: 111837 - DNA, 15 bp, Homo sapiens
cctcgcgccctaaaa

SEQ ID NO: 111838 - DNA, 15 bp, Homo sapiens
acctcgcgccctaaa

SEQ ID NO: 111839 - DNA, 15 bp, Homo sapiens
tacctcgcgccctaa

SEQ ID NO: 111840 - DNA, 15 bp, Homo sapiens
ctacctcgcgcccta

SEQ ID NO: 111841 - DNA, 15 bp, Homo sapiens
cctacctcgcgccct

SEQ ID NO: 111842 - DNA, 15 bp, Homo sapiens
ccctacctcgcgccc

SEQ ID NO: 111843 - DNA, 15 bp, Homo sapiens
cccctacctcgcgcc

SEQ ID NO: 111844 - DNA, 15 bp, Homo sapiens
acccctacctcgcgc

SEQ ID NO: 111845 - DNA, 15 bp, Homo sapiens
cacccctacctcgcg

SEQ ID NO: 111846 - DNA, 15 bp, Homo sapiens
ccacccctacctcgc

SEQ ID NO: 111847 - DNA, 15 bp, Homo sapiens
cccacccctacctcg

SEQ ID NO: 111848 - DNA, 15 bp, Homo sapiens
ccccacccctacctc

SEQ ID NO: 111849 - DNA, 15 bp, Homo sapiens
cccccacccctacct

SEQ ID NO: 111850 - DNA, 15 bp, Homo sapiens
acccccacccctacc

SEQ ID NO: 111851 - DNA, 15 bp, Homo sapiens
cacccccacccctac

SEQ ID NO: 111852 - DNA, 15 bp, Homo sapiens
acacccccaccccta

SEQ ID NO: 111853 - DNA, 15 bp, Homo sapiens
cacacccccacccct

SEQ ID NO: 111854 - DNA, 15 bp, Homo sapiens
gcacacccccacccc

SEQ ID NO: 111855 - DNA, 15 bp, Homo sapiens
tgcacacccccaccc

SEQ ID NO: 111856 - DNA, 15 bp, Homo sapiens
ctgcacacccccacc

SEQ ID NO: 111857 - DNA, 15 bp, Homo sapiens
tctgcacacccccac

SEQ ID NO: 111858 - DNA, 15 bp, Homo sapiens
ttctgcacaccccca

SEQ ID NO: 111859 - DNA, 15 bp, Homo sapiens
cttctgcacaccccc

SEQ ID NO: 111860 - DNA, 15 bp, Homo sapiens
tcttctgcacacccc

SEQ ID NO: 111861 - DNA, 15 bp, Homo sapiens
ttcttctgcacaccc

SEQ ID NO: 111862 - DNA, 15 bp, Homo sapiens
tttcttctgcacacc

SEQ ID NO: 111863 - DNA, 15 bp, Homo sapiens
atttcttctgcacac

SEQ ID NO: 111864 - DNA, 15 bp, Homo sapiens
catttcttctgcaca

SEQ ID NO: 111865 - DNA, 15 bp, Homo sapiens
gcatttcttctgcac

SEQ ID NO: 111866 - DNA, 15 bp, Homo sapiens
agcatttcttctgca

SEQ ID NO: 111867 - DNA, 15 bp, Homo sapiens
tagcatttcttctgc

SEQ ID NO: 111868 - DNA, 15 bp, Homo sapiens
ttagcatttcttctg

SEQ ID NO: 111869 - DNA, 15 bp, Homo sapiens
tttagcatttcttct

SEQ ID NO: 111870 - DNA, 15 bp, Homo sapiens
gtttagcatttcttc

SEQ ID NO: 111871 - DNA, 15 bp, Homo sapiens
tgtttagcatttctt

SEQ ID NO: 111872 - DNA, 15 bp, Homo sapiens
gtgtttagcatttct

SEQ ID NO: 111873 - DNA, 15 bp, Homo sapiens
tgtgtttagcatttc

SEQ ID NO: 111874 - DNA, 15 bp, Homo sapiens
ctgtgtttagcattt

SEQ ID NO: 111875 - DNA, 15 bp, Homo sapiens
actgtgtttagcatt

SEQ ID NO: 111876 - DNA, 15 bp, Homo sapiens
gactgtgtttagcat

SEQ ID NO: 111877 - DNA, 15 bp, Homo sapiens
agactgtgtttagca

SEQ ID NO: 111878 - DNA, 15 bp, Homo sapiens
gagactgtgtttagc

SEQ ID NO: 111879 - DNA, 15 bp, Homo sapiens
agagactgtgtttag

SEQ ID NO: 111880 - DNA, 15 bp, Homo sapiens
aagagactgtgttta

SEQ ID NO: 111881 - DNA, 15 bp, Homo sapiens
caagagactgtgttt

SEQ ID NO: 111882 - DNA, 15 bp, Homo sapiens
ccaagagactgtgtt

SEQ ID NO: 111883 - DNA, 15 bp, Homo sapiens
accaagagactgtgt

SEQ ID NO: 111884 - DNA, 15 bp, Homo sapiens
aaccaagagactgtg

SEQ ID NO: 111885 - DNA, 15 bp, Homo sapiens
gaaccaagagactgt

SEQ ID NO: 111886 - DNA, 15 bp, Homo sapiens
cgaaccaagagactg

SEQ ID NO: 111887 - DNA, 15 bp, Homo sapiens
ccgaaccaagagact

SEQ ID NO: 111888 - DNA, 15 bp, Homo sapiens
accgaaccaagagac

SEQ ID NO: 111889 - DNA, 15 bp, Homo sapiens
aaccgaaccaagaga

SEQ ID NO: 111890 - DNA, 15 bp, Homo sapiens
taaccgaaccaagag

SEQ ID NO: 111891 - DNA, 15 bp, Homo sapiens
ataaccgaaccaaga

SEQ ID NO: 111892 - DNA, 15 bp, Homo sapiens
cataaccgaaccaag

SEQ ID NO: 111893 - DNA, 15 bp, Homo sapiens
ccataaccgaaccaa

SEQ ID NO: 111894 - DNA, 15 bp, Homo sapiens
cccataaccgaacca

SEQ ID NO: 111895 - DNA, 15 bp, Homo sapiens
tcccataaccgaacc

SEQ ID NO: 111896 - DNA, 15 bp, Homo sapiens
ttcccataaccgaac

SEQ ID NO: 111897 - DNA, 15 bp, Homo sapiens
attcccataaccgaa

SEQ ID NO: 111898 - DNA, 15 bp, Homo sapiens
tattcccataaccga

SEQ ID NO: 111899 - DNA, 15 bp, Homo sapiens
ttattcccataaccg

SEQ ID NO: 111900 - DNA, 15 bp, Homo sapiens
cttattcccataacc

SEQ ID NO: 111901 - DNA, 15 bp, Homo sapiens
tcttattcccataac

SEQ ID NO: 111902 - DNA, 15 bp, Homo sapiens
gtcttattcccataa

SEQ ID NO: 111903 - DNA, 15 bp, Homo sapiens
tgtcttattcccata

SEQ ID NO: 111904 - DNA, 15 bp, Homo sapiens
gtgtcttattcccat

SEQ ID NO: 111905 - DNA, 15 bp, Homo sapiens
tgtgtcttattccca

SEQ ID NO: 111906 - DNA, 15 bp, Homo sapiens
ttgtgtcttattccc

SEQ ID NO: 111907 - DNA, 15 bp, Homo sapiens
cttgtgtcttattcc

SEQ ID NO: 111908 - DNA, 15 bp, Homo sapiens
tcttgtgtcttattc

SEQ ID NO: 111909 - DNA, 15 bp, Homo sapiens
gtcttgtgtcttatt

SEQ ID NO: 111910 - DNA, 15 bp, Homo sapiens
agtcttgtgtcttat

SEQ ID NO: 111911 - DNA, 15 bp, Homo sapiens
gagtcttgtgtctta

SEQ ID NO: 111912 - DNA, 15 bp, Homo sapiens
cgagtcttgtgtctt

SEQ ID NO: 111913 - DNA, 15 bp, Homo sapiens
gcgagtcttgtgtct

SEQ ID NO: 111914 - DNA, 15 bp, Homo sapiens
ggcgagtcttgtgtc

SEQ ID NO: 111915 - DNA, 15 bp, Homo sapiens
cggcgagtcttgtgt

SEQ ID NO: 111916 - DNA, 15 bp, Homo sapiens
acggcgagtcttgtg

SEQ ID NO: 111917 - DNA, 15 bp, Homo sapiens
cacggcgagtcttgt

SEQ ID NO: 111918 - DNA, 15 bp, Homo sapiens
acacggcgagtcttg

SEQ ID NO: 111919 - DNA, 15 bp, Homo sapiens
cacacggcgagtctt

SEQ ID NO: 111920 - DNA, 15 bp, Homo sapiens
acacacggcgagtct

SEQ ID NO: 111921 - DNA, 15 bp, Homo sapiens
aacacacggcgagtc

SEQ ID NO: 111922 - DNA, 15 bp, Homo sapiens
taacacacggcgagt

SEQ ID NO: 111923 - DNA, 15 bp, Homo sapiens
gtaacacacggcgag

SEQ ID NO: 111924 - DNA, 15 bp, Homo sapiens
tgtaacacacggcga

SEQ ID NO: 111925 - DNA, 15 bp, Homo sapiens
ctgtaacacacggcg

SEQ ID NO: 111926 - DNA, 15 bp, Homo sapiens
cctgtaacacacggc

SEQ ID NO: 111927 - DNA, 15 bp, Homo sapiens
acctgtaacacacgg

SEQ ID NO: 111928 - DNA, 15 bp, Homo sapiens
cacctgtaacacacg

SEQ ID NO: 111929 - DNA, 15 bp, Homo sapiens
gcacctgtaacacac

SEQ ID NO: 111930 - DNA, 15 bp, Homo sapiens
agcacctgtaacaca

SEQ ID NO: 111931 - DNA, 15 bp, Homo sapiens
gagcacctgtaacac

SEQ ID NO: 111932 - DNA, 15 bp, Homo sapiens
agagcacctgtaaca

SEQ ID NO: 111933 - DNA, 15 bp, Homo sapiens
tagagcacctgtaac

SEQ ID NO: 111934 - DNA, 15 bp, Homo sapiens
ctagagcacctgtaa

SEQ ID NO: 111935 - DNA, 15 bp, Homo sapiens
gctagagcacctgta

SEQ ID NO: 111936 - DNA, 15 bp, Homo sapiens
ggctagagcacctgt

SEQ ID NO: 111937 - DNA, 15 bp, Homo sapiens
aggctagagcacctg

SEQ ID NO: 111938 - DNA, 15 bp, Homo sapiens
aaggctagagcacct

SEQ ID NO: 111939 - DNA, 15 bp, Homo sapiens
gaaggctagagcacc

SEQ ID NO: 111940 - DNA, 15 bp, Homo sapiens
tgaaggctagagcac

SEQ ID NO: 111941 - DNA, 15 bp, Homo sapiens
atgaaggctagagca

SEQ ID NO: 111942 - DNA, 15 bp, Homo sapiens
tatgaaggctagagc

SEQ ID NO: 111943 - DNA, 15 bp, Homo sapiens
ctatgaaggctagag

SEQ ID NO: 111944 - DNA, 15 bp, Homo sapiens
gctatgaaggctaga

SEQ ID NO: 111945 - DNA, 15 bp, Homo sapiens
cgctatgaaggctag

SEQ ID NO: 111946 - DNA, 15 bp, Homo sapiens
tcgctatgaaggcta

SEQ ID NO: 111947 - DNA, 15 bp, Homo sapiens
gtcgctatgaaggct

SEQ ID NO: 111948 - DNA, 15 bp, Homo sapiens
tgtcgctatgaaggc

SEQ ID NO: 111949 - DNA, 15 bp, Homo sapiens
ctgtcgctatgaagg

SEQ ID NO: 111950 - DNA, 15 bp, Homo sapiens
tctgtcgctatgaag

SEQ ID NO: 111951 - DNA, 15 bp, Homo sapiens
ttctgtcgctatgaa

SEQ ID NO: 111952 - DNA, 15 bp, Homo sapiens
cttctgtcgctatga

SEQ ID NO: 111953 - DNA, 15 bp, Homo sapiens
acttctgtcgctatg

SEQ ID NO: 111954 - DNA, 15 bp, Homo sapiens
cacttctgtcgctat

SEQ ID NO: 111955 - DNA, 15 bp, Homo sapiens
tcacttctgtcgcta

SEQ ID NO: 111956 - DNA, 15 bp, Homo sapiens
ctcacttctgtcgct

SEQ ID NO: 111957 - DNA, 15 bp, Homo sapiens
gctcacttctgtcgc

SEQ ID NO: 111958 - DNA, 15 bp, Homo sapiens
agctcacttctgtcg

SEQ ID NO: 111959 - DNA, 15 bp, Homo sapiens
tagctcacttctgtc

SEQ ID NO: 111960 - DNA, 15 bp, Homo sapiens
gtagctcacttctgt

SEQ ID NO: 111961 - DNA, 15 bp, Homo sapiens
cgtagctcacttctg

SEQ ID NO: 111962 - DNA, 15 bp, Homo sapiens
ccgtagctcacttct

SEQ ID NO: 111963 - DNA, 15 bp, Homo sapiens
gccgtagctcacttc

SEQ ID NO: 111964 - DNA, 15 bp, Homo sapiens
agccgtagctcactt

SEQ ID NO: 111965 - DNA, 15 bp, Homo sapiens
gagccgtagctcact

SEQ ID NO: 111966 - DNA, 15 bp, Homo sapiens
ggagccgtagctcac

SEQ ID NO: 111967 - DNA, 15 bp, Homo sapiens
tggagccgtagctca

SEQ ID NO: 111968 - DNA, 15 bp, Homo sapiens
ctggagccgtagctc

SEQ ID NO: 111969 - DNA, 15 bp, Homo sapiens
tctggagccgtagct

SEQ ID NO: 111970 - DNA, 15 bp, Homo sapiens
ctctggagccgtagc

SEQ ID NO: 111971 - DNA, 15 bp, Homo sapiens
cctctggagccgtag

SEQ ID NO: 111972 - DNA, 15 bp, Homo sapiens
tcctctggagccgta

SEQ ID NO: 111973 - DNA, 15 bp, Homo sapiens
atcctctggagccgt

SEQ ID NO: 111974 - DNA, 15 bp, Homo sapiens
catcctctggagccg

SEQ ID NO: 111975 - DNA, 15 bp, Homo sapiens
gcatcctctggagcc

SEQ ID NO: 111976 - DNA, 15 bp, Homo sapiens
tgcatcctctggagc

SEQ ID NO: 111977 - DNA, 15 bp, Homo sapiens
ctgcatcctctggag

SEQ ID NO: 111978 - DNA, 15 bp, Homo sapiens
cctgcatcctctgga

SEQ ID NO: 111979 - DNA, 15 bp, Homo sapiens
acctgcatcctctgg

SEQ ID NO: 111980 - DNA, 15 bp, Homo sapiens
cacctgcatcctctg

SEQ ID NO: 111981 - DNA, 15 bp, Homo sapiens
tcacctgcatcctct

SEQ ID NO: 111982 - DNA, 15 bp, Homo sapiens
gtcacctgcatcctc

SEQ ID NO: 111983 - DNA, 15 bp, Homo sapiens
ggtcacctgcatcct

SEQ ID NO: 111984 - DNA, 15 bp, Homo sapiens
aggtcacctgcatcc

SEQ ID NO: 111985 - DNA, 15 bp, Homo sapiens
gaggtcacctgcatc

SEQ ID NO: 111986 - DNA, 15 bp, Homo sapiens
ggaggtcacctgcat

SEQ ID NO: 111987 - DNA, 15 bp, Homo sapiens
cggaggtcacctgca

SEQ ID NO: 111988 - DNA, 15 bp, Homo sapiens
ccggaggtcacctgc

SEQ ID NO: 111989 - DNA, 15 bp, Homo sapiens
accggaggtcacctg

SEQ ID NO: 111990 - DNA, 15 bp, Homo sapiens
gaccggaggtcacct

SEQ ID NO: 111991 - DNA, 15 bp, Homo sapiens
tgaccggaggtcacc

SEQ ID NO: 111992 - DNA, 15 bp, Homo sapiens
ctgaccggaggtcac

SEQ ID NO: 111993 - DNA, 15 bp, Homo sapiens
gctgaccggaggtca

SEQ ID NO: 111994 - DNA, 15 bp, Homo sapiens
tgctgaccggaggtc

SEQ ID NO: 111995 - DNA, 15 bp, Homo sapiens
atgctgaccggaggt

SEQ ID NO: 111996 - DNA, 15 bp, Homo sapiens
tatgctgaccggagg

SEQ ID NO: 111997 - DNA, 15 bp, Homo sapiens
ttatgctgaccggag

SEQ ID NO: 111998 - DNA, 15 bp, Homo sapiens
attatgctgaccgga

SEQ ID NO: 111999 - DNA, 15 bp, Homo sapiens
cattatgctgaccgg

SEQ ID NO: 112000 - DNA, 15 bp, Homo sapiens
tcattatgctgaccg

SEQ ID NO: 112001 - DNA, 15 bp, Homo sapiens
ctcattatgctgacc

SEQ ID NO: 112002 - DNA, 15 bp, Homo sapiens
cctcattatgctgac

SEQ ID NO: 112003 - DNA, 15 bp, Homo sapiens
tcctcattatgctga

SEQ ID NO: 112004 - DNA, 15 bp, Homo sapiens
ttcctcattatgctg

SEQ ID NO: 112005 - DNA, 15 bp, Homo sapiens
tttcctcattatgct

SEQ ID NO: 112006 - DNA, 15 bp, Homo sapiens
ctttcctcattatgc

SEQ ID NO: 112007 - DNA, 15 bp, Homo sapiens
cctttcctcattatg

SEQ ID NO: 112008 - DNA, 15 bp, Homo sapiens
tcctttcctcattat

SEQ ID NO: 112009 - DNA, 15 bp, Homo sapiens
ctcctttcctcatta

SEQ ID NO: 112010 - DNA, 15 bp, Homo sapiens
cctcctttcctcatt

SEQ ID NO: 112011 - DNA, 15 bp, Homo sapiens
tcctcctttcctcat

SEQ ID NO: 112012 - DNA, 15 bp, Homo sapiens
ttcctcctttcctca

SEQ ID NO: 112013 - DNA, 15 bp, Homo sapiens
cttcctcctttcctc

SEQ ID NO: 112014 - DNA, 15 bp, Homo sapiens
acttcctcctttcct

SEQ ID NO: 112015 - DNA, 15 bp, Homo sapiens
gacttcctcctttcc

SEQ ID NO: 112016 - DNA, 15 bp, Homo sapiens
ggacttcctcctttc

SEQ ID NO: 112017 - DNA, 15 bp, Homo sapiens
aggacttcctccttt

SEQ ID NO: 112018 - DNA, 15 bp, Homo sapiens
aaggacttcctcctt

SEQ ID NO: 112019 - DNA, 15 bp, Homo sapiens
taaggacttcctcct

SEQ ID NO: 112020 - DNA, 15 bp, Homo sapiens
ttaaggacttcctcc

SEQ ID NO: 112021 - DNA, 15 bp, Homo sapiens
tttaaggacttcctc

SEQ ID NO: 112022 - DNA, 15 bp, Homo sapiens
gtttaaggacttcct

SEQ ID NO: 112023 - DNA, 15 bp, Homo sapiens
agtttaaggacttcc

SEQ ID NO: 112024 - DNA, 15 bp, Homo sapiens
gagtttaaggacttc

SEQ ID NO: 112025 - DNA, 15 bp, Homo sapiens
tgagtttaaggactt

SEQ ID NO: 112026 - DNA, 15 bp, Homo sapiens
ctgagtttaaggact

SEQ ID NO: 112027 - DNA, 15 bp, Homo sapiens
actgagtttaaggac

SEQ ID NO: 112028 - DNA, 15 bp, Homo sapiens
gactgagtttaagga

SEQ ID NO: 112029 - DNA, 15 bp, Homo sapiens
ggactgagtttaagg

SEQ ID NO: 112030 - DNA, 15 bp, Homo sapiens
aggactgagtttaag

SEQ ID NO: 112031 - DNA, 15 bp, Homo sapiens
taggactgagtttaa

SEQ ID NO: 112032 - DNA, 15 bp, Homo sapiens
ttaggactgagttta

SEQ ID NO: 112033 - DNA, 15 bp, Homo sapiens
tttaggactgagttt

SEQ ID NO: 112034 - DNA, 15 bp, Homo sapiens
ttttaggactgagtt

SEQ ID NO: 112035 - DNA, 15 bp, Homo sapiens
cttttaggactgagt

SEQ ID NO: 112036 - DNA, 15 bp, Homo sapiens
tcttttaggactgag

SEQ ID NO: 112037 - DNA, 15 bp, Homo sapiens
gtcttttaggactga

SEQ ID NO: 112038 - DNA, 15 bp, Homo sapiens
tgtcttttaggactg

SEQ ID NO: 112039 - DNA, 15 bp, Homo sapiens
ttgtcttttaggact

SEQ ID NO: 112040 - DNA, 15 bp, Homo sapiens
tttgtcttttaggac

SEQ ID NO: 112041 - DNA, 15 bp, Homo sapiens
ttttgtcttttagga

SEQ ID NO: 112042 - DNA, 15 bp, Homo sapiens
gttttgtcttttagg

SEQ ID NO: 112043 - DNA, 15 bp, Homo sapiens
ggttttgtcttttag

SEQ ID NO: 112044 - DNA, 15 bp, Homo sapiens
aggttttgtctttta

SEQ ID NO: 112045 - DNA, 15 bp, Homo sapiens
caggttttgtctttt

SEQ ID NO: 112046 - DNA, 15 bp, Homo sapiens
ccaggttttgtcttt

SEQ ID NO: 112047 - DNA, 15 bp, Homo sapiens
gccaggttttgtctt

SEQ ID NO: 112048 - DNA, 15 bp, Homo sapiens
tgccaggttttgtct

SEQ ID NO: 112049 - DNA, 15 bp, Homo sapiens
ctgccaggttttgtc

SEQ ID NO: 112050 - DNA, 15 bp, Homo sapiens
cctgccaggttttgt

SEQ ID NO: 112051 - DNA, 15 bp, Homo sapiens
tcctgccaggttttg

SEQ ID NO: 112052 - DNA, 15 bp, Homo sapiens
ttcctgccaggtttt

SEQ ID NO: 112053 - DNA, 15 bp, Homo sapiens
tttcctgccaggttt

SEQ ID NO: 112054 - DNA, 15 bp, Homo sapiens
ttttcctgccaggtt

SEQ ID NO: 112055 - DNA, 15 bp, Homo sapiens
attttcctgccaggt

SEQ ID NO: 112056 - DNA, 15 bp, Homo sapiens
tattttcctgccagg

SEQ ID NO: 112057 - DNA, 15 bp, Homo sapiens
atattttcctgccag

SEQ ID NO: 112058 - DNA, 15 bp, Homo sapiens
catattttcctgcca

SEQ ID NO: 112059 - DNA, 15 bp, Homo sapiens
acatattttcctgcc

SEQ ID NO: 112060 - DNA, 15 bp, Homo sapiens
gacatattttcctgc

SEQ ID NO: 112061 - DNA, 15 bp, Homo sapiens
ggacatattttcctg

SEQ ID NO: 112062 - DNA, 15 bp, Homo sapiens
tggacatattttcct

SEQ ID NO: 112063 - DNA, 15 bp, Homo sapiens
ctggacatattttcc

SEQ ID NO: 112064 - DNA, 15 bp, Homo sapiens
gctggacatattttc

SEQ ID NO: 112065 - DNA, 15 bp, Homo sapiens
ggctggacatatttt

SEQ ID NO: 112066 - DNA, 15 bp, Homo sapiens
tggctggacatattt

SEQ ID NO: 112067 - DNA, 15 bp, Homo sapiens
atggctggacatatt

SEQ ID NO: 112068 - DNA, 15 bp, Homo sapiens
tatggctggacatat

SEQ ID NO: 112069 - DNA, 15 bp, Homo sapiens
atatggctggacata

SEQ ID NO: 112070 - DNA, 15 bp, Homo sapiens
aatatggctggacat

SEQ ID NO: 112071 - DNA, 15 bp, Homo sapiens
aaatatggctggaca

SEQ ID NO: 112072 - DNA, 15 bp, Homo sapiens
aaaatatggctggac

SEQ ID NO: 112073 - DNA, 15 bp, Homo sapiens
aaaaatatggctgga

SEQ ID NO: 112074 - DNA, 15 bp, Homo sapiens
aaaaaatatggctgg

SEQ ID NO: 112075 - DNA, 15 bp, Homo sapiens
taaaaaatatggctg

SEQ ID NO: 112076 - DNA, 15 bp, Homo sapiens
ttaaaaaatatggct

SEQ ID NO: 112077 - DNA, 15 bp, Homo sapiens
cttaaaaaatatggc

SEQ ID NO: 112078 - DNA, 15 bp, Homo sapiens
ccttaaaaaatatgg

SEQ ID NO: 112079 - DNA, 15 bp, Homo sapiens
gccttaaaaaatatg

SEQ ID NO: 112080 - DNA, 15 bp, Homo sapiens
ggccttaaaaaatat

SEQ ID NO: 112081 - DNA, 15 bp, Homo sapiens
tggccttaaaaaata

SEQ ID NO: 112082 - DNA, 15 bp, Homo sapiens
atggccttaaaaaat

SEQ ID NO: 112083 - DNA, 15 bp, Homo sapiens
tatggccttaaaaaa

SEQ ID NO: 112084 - DNA, 15 bp, Homo sapiens
gtatggccttaaaaa

SEQ ID NO: 112085 - DNA, 15 bp, Homo sapiens
tgtatggccttaaaa

SEQ ID NO: 112086 - DNA, 15 bp, Homo sapiens
ctgtatggccttaaa

SEQ ID NO: 112087 - DNA, 15 bp, Homo sapiens
tctgtatggccttaa

SEQ ID NO: 112088 - DNA, 15 bp, Homo sapiens
ttctgtatggcctta

SEQ ID NO: 112089 - DNA, 15 bp, Homo sapiens
cttctgtatggcctt

SEQ ID NO: 112090 - DNA, 15 bp, Homo sapiens
gcttctgtatggcct

SEQ ID NO: 112091 - DNA, 15 bp, Homo sapiens
tgcttctgtatggcc

SEQ ID NO: 112092 - DNA, 15 bp, Homo sapiens
ttgcttctgtatggc

SEQ ID NO: 112093 - DNA, 15 bp, Homo sapiens
cttgcttctgtatgg

SEQ ID NO: 112094 - DNA, 15 bp, Homo sapiens
acttgcttctgtatg

SEQ ID NO: 112095 - DNA, 15 bp, Homo sapiens
cacttgcttctgtat

SEQ ID NO: 112096 - DNA, 15 bp, Homo sapiens
ccacttgcttctgta

SEQ ID NO: 112097 - DNA, 15 bp, Homo sapiens
gccacttgcttctgt

SEQ ID NO: 112098 - DNA, 15 bp, Homo sapiens
tgccacttgcttctg

SEQ ID NO: 112099 - DNA, 15 bp, Homo sapiens
ctgccacttgcttct

SEQ ID NO: 112100 - DNA, 15 bp, Homo sapiens
cctgccacttgcttc

SEQ ID NO: 112101 - DNA, 15 bp, Homo sapiens
tcctgccacttgctt

SEQ ID NO: 112102 - DNA, 15 bp, Homo sapiens
atcctgccacttgct

SEQ ID NO: 112103 - DNA, 15 bp, Homo sapiens
tatcctgccacttgc

SEQ ID NO: 112104 - DNA, 15 bp, Homo sapiens
atatcctgccacttg

SEQ ID NO: 112105 - DNA, 15 bp, Homo sapiens
aatatcctgccactt

SEQ ID NO: 112106 - DNA, 15 bp, Homo sapiens
gaatatcctgccact

SEQ ID NO: 112107 - DNA, 15 bp, Homo sapiens
ggaatatcctgccac

SEQ ID NO: 112108 - DNA, 15 bp, Homo sapiens
tggaatatcctgcca

SEQ ID NO: 112109 - DNA, 15 bp, Homo sapiens
ctggaatatcctgcc

SEQ ID NO: 112110 - DNA, 15 bp, Homo sapiens
tctggaatatcctgc

SEQ ID NO: 112111 - DNA, 15 bp, Homo sapiens
atctggaatatcctg

SEQ ID NO: 112112 - DNA, 15 bp, Homo sapiens
aatctggaatatcct

SEQ ID NO: 112113 - DNA, 15 bp, Homo sapiens
taatctggaatatcc

SEQ ID NO: 112114 - DNA, 15 bp, Homo sapiens
ctaatctggaatatc

SEQ ID NO: 112115 - DNA, 15 bp, Homo sapiens
cctaatctggaatat

SEQ ID NO: 112116 - DNA, 15 bp, Homo sapiens
ccctaatctggaata

SEQ ID NO: 112117 - DNA, 15 bp, Homo sapiens
tccctaatctggaat

SEQ ID NO: 112118 - DNA, 15 bp, Homo sapiens
ttccctaatctggaa

SEQ ID NO: 112119 - DNA, 15 bp, Homo sapiens
tttccctaatctgga

SEQ ID NO: 112120 - DNA, 15 bp, Homo sapiens
atttccctaatctgg

SEQ ID NO: 112121 - DNA, 15 bp, Homo sapiens
catttccctaatctg

SEQ ID NO: 112122 - DNA, 15 bp, Homo sapiens
acatttccctaatct

SEQ ID NO: 112123 - DNA, 15 bp, Homo sapiens
cacatttccctaatc

SEQ ID NO: 112124 - DNA, 15 bp, Homo sapiens
acacatttccctaat

SEQ ID NO: 112125 - DNA, 15 bp, Homo sapiens
cacacatttccctaa

SEQ ID NO: 112126 - DNA, 15 bp, Homo sapiens
tcacacatttcccta

SEQ ID NO: 112127 - DNA, 15 bp, Homo sapiens
atcacacatttccct

SEQ ID NO: 112128 - DNA, 15 bp, Homo sapiens
catcacacatttccc

SEQ ID NO: 112129 - DNA, 15 bp, Homo sapiens
tcatcacacatttcc

SEQ ID NO: 112130 - DNA, 15 bp, Homo sapiens
ctcatcacacatttc

SEQ ID NO: 112131 - DNA, 15 bp, Homo sapiens
tctcatcacacattt

SEQ ID NO: 112132 - DNA, 15 bp, Homo sapiens
ctctcatcacacatt

SEQ ID NO: 112133 - DNA, 15 bp, Homo sapiens
cctctcatcacacat

SEQ ID NO: 112134 - DNA, 15 bp, Homo sapiens
gcctctcatcacaca

SEQ ID NO: 112135 - DNA, 15 bp, Homo sapiens
ggcctctcatcacac

SEQ ID NO: 112136 - DNA, 15 bp, Homo sapiens
gggcctctcatcaca

SEQ ID NO: 112137 - DNA, 15 bp, Homo sapiens
tgggcctctcatcac

SEQ ID NO: 112138 - DNA, 15 bp, Homo sapiens
atgggcctctcatca

SEQ ID NO: 112139 - DNA, 15 bp, Homo sapiens
catgggcctctcatc

SEQ ID NO: 112140 - DNA, 15 bp, Homo sapiens
ccatgggcctctcat

SEQ ID NO: 112141 - DNA, 15 bp, Homo sapiens
accatgggcctctca

SEQ ID NO: 112142 - DNA, 15 bp, Homo sapiens
taccatgggcctctc

SEQ ID NO: 112143 - DNA, 15 bp, Homo sapiens
ctaccatgggcctct

SEQ ID NO: 112144 - DNA, 15 bp, Homo sapiens
tctaccatgggcctc

SEQ ID NO: 112145 - DNA, 15 bp, Homo sapiens
ttctaccatgggcct

SEQ ID NO: 112146 - DNA, 15 bp, Homo sapiens
tttctaccatgggcc

SEQ ID NO: 112147 - DNA, 15 bp, Homo sapiens
ctttctaccatgggc

SEQ ID NO: 112148 - DNA, 15 bp, Homo sapiens
tctttctaccatggg

SEQ ID NO: 112149 - DNA, 15 bp, Homo sapiens
ttctttctaccatgg

SEQ ID NO: 112150 - DNA, 15 bp, Homo sapiens
attctttctaccatg

SEQ ID NO: 112151 - DNA, 15 bp, Homo sapiens
cattctttctaccat

SEQ ID NO: 112152 - DNA, 15 bp, Homo sapiens
ccattctttctacca

SEQ ID NO: 112153 - DNA, 15 bp, Homo sapiens
cccattctttctacc

SEQ ID NO: 112154 - DNA, 15 bp, Homo sapiens
ccccattctttctac

SEQ ID NO: 112155 - DNA, 15 bp, Homo sapiens
tccccattctttcta

SEQ ID NO: 112156 - DNA, 15 bp, Homo sapiens
ttccccattctttct

SEQ ID NO: 112157 - DNA, 15 bp, Homo sapiens
tttccccattctttc

SEQ ID NO: 112158 - DNA, 15 bp, Homo sapiens
atttccccattcttt

SEQ ID NO: 112159 - DNA, 15 bp, Homo sapiens
aatttccccattctt

SEQ ID NO: 112160 - DNA, 15 bp, Homo sapiens
caatttccccattct

SEQ ID NO: 112161 - DNA, 15 bp, Homo sapiens
ccaatttccccattc

SEQ ID NO: 112162 - DNA, 15 bp, Homo sapiens
gccaatttccccatt

SEQ ID NO: 112163 - DNA, 15 bp, Homo sapiens
agccaatttccccat

SEQ ID NO: 112164 - DNA, 15 bp, Homo sapiens
aagccaatttcccca

SEQ ID NO: 112165 - DNA, 15 bp, Homo sapiens
caagccaatttcccc

SEQ ID NO: 112166 - DNA, 15 bp, Homo sapiens
acaagccaatttccc

SEQ ID NO: 112167 - DNA, 15 bp, Homo sapiens
aacaagccaatttcc

SEQ ID NO: 112168 - DNA, 15 bp, Homo sapiens
aaacaagccaatttc

SEQ ID NO: 112169 - DNA, 15 bp, Homo sapiens
caaacaagccaattt

SEQ ID NO: 112170 - DNA, 15 bp, Homo sapiens
ccaaacaagccaatt

SEQ ID NO: 112171 - DNA, 15 bp, Homo sapiens
gccaaacaagccaat

SEQ ID NO: 112172 - DNA, 15 bp, Homo sapiens
agccaaacaagccaa

SEQ ID NO: 112173 - DNA, 15 bp, Homo sapiens
cagccaaacaagcca

SEQ ID NO: 112174 - DNA, 15 bp, Homo sapiens
ccagccaaacaagcc

SEQ ID NO: 112175 - DNA, 15 bp, Homo sapiens
tccagccaaacaagc

SEQ ID NO: 112176 - DNA, 15 bp, Homo sapiens
ctccagccaaacaag

SEQ ID NO: 112177 - DNA, 15 bp, Homo sapiens
actccagccaaacaa

SEQ ID NO: 112178 - DNA, 15 bp, Homo sapiens
tactccagccaaaca

SEQ ID NO: 112179 - DNA, 15 bp, Homo sapiens
ttactccagccaaac

SEQ ID NO: 112180 - DNA, 15 bp, Homo sapiens
attactccagccaaa

SEQ ID NO: 112181 - DNA, 15 bp, Homo sapiens
cattactccagccaa

SEQ ID NO: 112182 - DNA, 15 bp, Homo sapiens
gcattactccagcca

SEQ ID NO: 112183 - DNA, 15 bp, Homo sapiens
tgcattactccagcc

SEQ ID NO: 112184 - DNA, 15 bp, Homo sapiens
ttgcattactccagc

SEQ ID NO: 112185 - DNA, 15 bp, Homo sapiens
tttgcattactccag

SEQ ID NO: 112186 - DNA, 15 bp, Homo sapiens
ctttgcattactcca

SEQ ID NO: 112187 - DNA, 15 bp, Homo sapiens
tctttgcattactcc

SEQ ID NO: 112188 - DNA, 15 bp, Homo sapiens
ctctttgcattactc

SEQ ID NO: 112189 - DNA, 15 bp, Homo sapiens
actctttgcattact

SEQ ID NO: 112190 - DNA, 15 bp, Homo sapiens
tactctttgcattac

SEQ ID NO: 112191 - DNA, 15 bp, Homo sapiens
gtactctttgcatta

SEQ ID NO: 112192 - DNA, 15 bp, Homo sapiens
tgtactctttgcatt

SEQ ID NO: 112193 - DNA, 15 bp, Homo sapiens
gtgtactctttgcat

SEQ ID NO: 112194 - DNA, 15 bp, Homo sapiens
tgtgtactctttgca

SEQ ID NO: 112195 - DNA, 15 bp, Homo sapiens
ctgtgtactctttgc

SEQ ID NO: 112196 - DNA, 15 bp, Homo sapiens
gctgtgtactctttg

SEQ ID NO: 112197 - DNA, 15 bp, Homo sapiens
tgctgtgtactcttt

SEQ ID NO: 112198 - DNA, 15 bp, Homo sapiens
ctgctgtgtactctt

SEQ ID NO: 112199 - DNA, 15 bp, Homo sapiens
cctgctgtgtactct

SEQ ID NO: 112200 - DNA, 15 bp, Homo sapiens
gcctgctgtgtactc

SEQ ID NO: 112201 - DNA, 15 bp, Homo sapiens
tgcctgctgtgtact

SEQ ID NO: 112202 - DNA, 15 bp, Homo sapiens
gtgcctgctgtgtac

SEQ ID NO: 112203 - DNA, 15 bp, Homo sapiens
ggtgcctgctgtgta

SEQ ID NO: 112204 - DNA, 15 bp, Homo sapiens
tggtgcctgctgtgt

SEQ ID NO: 112205 - DNA, 15 bp, Homo sapiens
atggtgcctgctgtg

SEQ ID NO: 112206 - DNA, 15 bp, Homo sapiens
aatggtgcctgctgt

SEQ ID NO: 112207 - DNA, 15 bp, Homo sapiens
caatggtgcctgctg

SEQ ID NO: 112208 - DNA, 15 bp, Homo sapiens
ccaatggtgcctgct

SEQ ID NO: 112209 - DNA, 15 bp, Homo sapiens
accaatggtgcctgc

SEQ ID NO: 112210 - DNA, 15 bp, Homo sapiens
aaccaatggtgcctg

SEQ ID NO: 112211 - DNA, 15 bp, Homo sapiens
caaccaatggtgcct

SEQ ID NO: 112212 - DNA, 15 bp, Homo sapiens
acaaccaatggtgcc

SEQ ID NO: 112213 - DNA, 15 bp, Homo sapiens
tacaaccaatggtgc

SEQ ID NO: 112214 - DNA, 15 bp, Homo sapiens
atacaaccaatggtg

SEQ ID NO: 112215 - DNA, 15 bp, Homo sapiens
gatacaaccaatggt

SEQ ID NO: 112216 - DNA, 15 bp, Homo sapiens
agatacaaccaatgg

SEQ ID NO: 112217 - DNA, 15 bp, Homo sapiens
cagatacaaccaatg

SEQ ID NO: 112218 - DNA, 15 bp, Homo sapiens
ccagatacaaccaat

SEQ ID NO: 112219 - DNA, 15 bp, Homo sapiens
tccagatacaaccaa

SEQ ID NO: 112220 - DNA, 15 bp, Homo sapiens
ttccagatacaacca

SEQ ID NO: 112221 - DNA, 15 bp, Homo sapiens
tttccagatacaacc

SEQ ID NO: 112222 - DNA, 15 bp, Homo sapiens
ttttccagatacaac

SEQ ID NO: 112223 - DNA, 15 bp, Homo sapiens
attttccagatacaa

SEQ ID NO: 112224 - DNA, 15 bp, Homo sapiens
gattttccagataca

SEQ ID NO: 112225 - DNA, 15 bp, Homo sapiens
ggattttccagatac

SEQ ID NO: 112226 - DNA, 15 bp, Homo sapiens
aggattttccagata

SEQ ID NO: 112227 - DNA, 15 bp, Homo sapiens
aaggattttccagat

SEQ ID NO: 112228 - DNA, 15 bp, Homo sapiens
caaggattttccaga

SEQ ID NO: 112229 - DNA, 15 bp, Homo sapiens
tcaaggattttccag

SEQ ID NO: 112230 - DNA, 15 bp, Homo sapiens
gtcaaggattttcca

SEQ ID NO: 112231 - DNA, 15 bp, Homo sapiens
tgtcaaggattttcc

SEQ ID NO: 112232 - DNA, 15 bp, Homo sapiens
ctgtcaaggattttc

SEQ ID NO: 112233 - DNA, 15 bp, Homo sapiens
tctgtcaaggatttt

SEQ ID NO: 112234 - DNA, 15 bp, Homo sapiens
ttctgtcaaggattt

SEQ ID NO: 112235 - DNA, 15 bp, Homo sapiens
cttctgtcaaggatt

SEQ ID NO: 112236 - DNA, 15 bp, Homo sapiens
tcttctgtcaaggat

SEQ ID NO: 112237 - DNA, 15 bp, Homo sapiens
ctcttctgtcaagga

SEQ ID NO: 112238 - DNA, 15 bp, Homo sapiens
cctcttctgtcaagg

SEQ ID NO: 112239 - DNA, 15 bp, Homo sapiens
gcctcttctgtcaag

SEQ ID NO: 112240 - DNA, 15 bp, Homo sapiens
ggcctcttctgtcaa

SEQ ID NO: 112241 - DNA, 15 bp, Homo sapiens
aggcctcttctgtca

SEQ ID NO: 112242 - DNA, 15 bp, Homo sapiens
caggcctcttctgtc

SEQ ID NO: 112243 - DNA, 15 bp, Homo sapiens
tcaggcctcttctgt

SEQ ID NO: 112244 - DNA, 15 bp, Homo sapiens
atcaggcctcttctg

SEQ ID NO: 112245 - DNA, 15 bp, Homo sapiens
catcaggcctcttct

SEQ ID NO: 112246 - DNA, 15 bp, Homo sapiens
tcatcaggcctcttc

SEQ ID NO: 112247 - DNA, 15 bp, Homo sapiens
ttcatcaggcctctt

SEQ ID NO: 112248 - DNA, 15 bp, Homo sapiens
tttcatcaggcctct

SEQ ID NO: 112249 - DNA, 15 bp, Homo sapiens
ctttcatcaggcctc

SEQ ID NO: 112250 - DNA, 15 bp, Homo sapiens
cctttcatcaggcct

SEQ ID NO: 112251 - DNA, 15 bp, Homo sapiens
ccctttcatcaggcc

SEQ ID NO: 112252 - DNA, 15 bp, Homo sapiens
tccctttcatcaggc

SEQ ID NO: 112253 - DNA, 15 bp, Homo sapiens
ttccctttcatcagg

SEQ ID NO: 112254 - DNA, 15 bp, Homo sapiens
cttccctttcatcag

SEQ ID NO: 112255 - DNA, 15 bp, Homo sapiens
gcttccctttcatca

SEQ ID NO: 112256 - DNA, 15 bp, Homo sapiens
ggcttccctttcatc

SEQ ID NO: 112257 - DNA, 15 bp, Homo sapiens
tggcttccctttcat

SEQ ID NO: 112258 - DNA, 15 bp, Homo sapiens
gtggcttccctttca

SEQ ID NO: 112259 - DNA, 15 bp, Homo sapiens
agtggcttccctttc

SEQ ID NO: 112260 - DNA, 15 bp, Homo sapiens
aagtggcttcccttt

SEQ ID NO: 112261 - DNA, 15 bp, Homo sapiens
caagtggcttccctt

SEQ ID NO: 112262 - DNA, 15 bp, Homo sapiens
ccaagtggcttccct

SEQ ID NO: 112263 - DNA, 15 bp, Homo sapiens
gccaagtggcttccc

SEQ ID NO: 112264 - DNA, 15 bp, Homo sapiens
tgccaagtggcttcc

SEQ ID NO: 112265 - DNA, 15 bp, Homo sapiens
ttgccaagtggcttc

SEQ ID NO: 112266 - DNA, 15 bp, Homo sapiens
tttgccaagtggctt

SEQ ID NO: 112267 - DNA, 15 bp, Homo sapiens
atttgccaagtggct

SEQ ID NO: 112268 - DNA, 15 bp, Homo sapiens
gatttgccaagtggc

SEQ ID NO: 112269 - DNA, 15 bp, Homo sapiens
ggatttgccaagtgg

SEQ ID NO: 112270 - DNA, 15 bp, Homo sapiens
tggatttgccaagtg

SEQ ID NO: 112271 - DNA, 15 bp, Homo sapiens
gtggatttgccaagt

SEQ ID NO: 112272 - DNA, 15 bp, Homo sapiens
tgtggatttgccaag

SEQ ID NO: 112273 - DNA, 15 bp, Homo sapiens
atgtggatttgccaa

SEQ ID NO: 112274 - DNA, 15 bp, Homo sapiens
gatgtggatttgcca

SEQ ID NO: 112275 - DNA, 15 bp, Homo sapiens
tgatgtggatttgcc

SEQ ID NO: 112276 - DNA, 15 bp, Homo sapiens
ctgatgtggatttgc

SEQ ID NO: 112277 - DNA, 15 bp, Homo sapiens
tctgatgtggatttg

SEQ ID NO: 112278 - DNA, 15 bp, Homo sapiens
ctctgatgtggattt

SEQ ID NO: 112279 - DNA, 15 bp, Homo sapiens
gctctgatgtggatt

SEQ ID NO: 112280 - DNA, 15 bp, Homo sapiens
ggctctgatgtggat

SEQ ID NO: 112281 - DNA, 15 bp, Homo sapiens
aggctctgatgtgga

SEQ ID NO: 112282 - DNA, 15 bp, Homo sapiens
gaggctctgatgtgg

SEQ ID NO: 112283 - DNA, 15 bp, Homo sapiens
tgaggctctgatgtg

SEQ ID NO: 112284 - DNA, 15 bp, Homo sapiens
ctgaggctctgatgt

SEQ ID NO: 112285 - DNA, 15 bp, Homo sapiens
actgaggctctgatg

SEQ ID NO: 112286 - DNA, 15 bp, Homo sapiens
tactgaggctctgat

SEQ ID NO: 112287 - DNA, 15 bp, Homo sapiens
atactgaggctctga

SEQ ID NO: 112288 - DNA, 15 bp, Homo sapiens
catactgaggctctg

SEQ ID NO: 112289 - DNA, 15 bp, Homo sapiens
ccatactgaggctct

SEQ ID NO: 112290 - DNA, 15 bp, Homo sapiens
gccatactgaggctc

SEQ ID NO: 112291 - DNA, 15 bp, Homo sapiens
tgccatactgaggct

SEQ ID NO: 112292 - DNA, 15 bp, Homo sapiens
ttgccatactgaggc

SEQ ID NO: 112293 - DNA, 15 bp, Homo sapiens
cttgccatactgagg

SEQ ID NO: 112294 - DNA, 15 bp, Homo sapiens
gcttgccatactgag

SEQ ID NO: 112295 - DNA, 15 bp, Homo sapiens
agcttgccatactga

SEQ ID NO: 112296 - DNA, 15 bp, Homo sapiens
tagcttgccatactg

SEQ ID NO: 112297 - DNA, 15 bp, Homo sapiens
gtagcttgccatact

SEQ ID NO: 112298 - DNA, 15 bp, Homo sapiens
ggtagcttgccatac

SEQ ID NO: 112299 - DNA, 15 bp, Homo sapiens
aggtagcttgccata

SEQ ID NO: 112300 - DNA, 15 bp, Homo sapiens
caggtagcttgccat

SEQ ID NO: 112301 - DNA, 15 bp, Homo sapiens
tcaggtagcttgcca

SEQ ID NO: 112302 - DNA, 15 bp, Homo sapiens
ttcaggtagcttgcc

SEQ ID NO: 112303 - DNA, 15 bp, Homo sapiens
gttcaggtagcttgc

SEQ ID NO: 112304 - DNA, 15 bp, Homo sapiens
tgttcaggtagcttg

SEQ ID NO: 112305 - DNA, 15 bp, Homo sapiens
gtgttcaggtagctt

SEQ ID NO: 112306 - DNA, 15 bp, Homo sapiens
ggtgttcaggtagct

SEQ ID NO: 112307 - DNA, 15 bp, Homo sapiens
aggtgttcaggtagc

SEQ ID NO: 112308 - DNA, 15 bp, Homo sapiens
caggtgttcaggtag

SEQ ID NO: 112309 - DNA, 15 bp, Homo sapiens
tcaggtgttcaggta

SEQ ID NO: 112310 - DNA, 15 bp, Homo sapiens
ctcaggtgttcaggt

SEQ ID NO: 112311 - DNA, 15 bp, Homo sapiens
cctcaggtgttcagg

SEQ ID NO: 112312 - DNA, 15 bp, Homo sapiens
ccctcaggtgttcag

SEQ ID NO: 112313 - DNA, 15 bp, Homo sapiens
tccctcaggtgttca

SEQ ID NO: 112314 - DNA, 15 bp, Homo sapiens
ttccctcaggtgttc

SEQ ID NO: 112315 - DNA, 15 bp, Homo sapiens
tttccctcaggtgtt

SEQ ID NO: 112316 - DNA, 15 bp, Homo sapiens
ctttccctcaggtgt

SEQ ID NO: 112317 - DNA, 15 bp, Homo sapiens
actttccctcaggtg

SEQ ID NO: 112318 - DNA, 15 bp, Homo sapiens
tactttccctcaggt

SEQ ID NO: 112319 - DNA, 15 bp, Homo sapiens
ttactttccctcagg

SEQ ID NO: 112320 - DNA, 15 bp, Homo sapiens
tttactttccctcag

SEQ ID NO: 112321 - DNA, 15 bp, Homo sapiens
gtttactttccctca

SEQ ID NO: 112322 - DNA, 15 bp, Homo sapiens
ggtttactttccctc

SEQ ID NO: 112323 - DNA, 15 bp, Homo sapiens
gggtttactttccct

SEQ ID NO: 112324 - DNA, 15 bp, Homo sapiens
cgggtttactttccc

SEQ ID NO: 112325 - DNA, 15 bp, Homo sapiens
acgggtttactttcc

SEQ ID NO: 112326 - DNA, 15 bp, Homo sapiens
aacgggtttactttc

SEQ ID NO: 112327 - DNA, 15 bp, Homo sapiens
caacgggtttacttt

SEQ ID NO: 112328 - DNA, 15 bp, Homo sapiens
gcaacgggtttactt

SEQ ID NO: 112329 - DNA, 15 bp, Homo sapiens
tgcaacgggtttact

SEQ ID NO: 112330 - DNA, 15 bp, Homo sapiens
atgcaacgggtttac

SEQ ID NO: 112331 - DNA, 15 bp, Homo sapiens
aatgcaacgggttta

SEQ ID NO: 112332 - DNA, 15 bp, Homo sapiens
aaatgcaacgggttt

SEQ ID NO: 112333 - DNA, 15 bp, Homo sapiens
aaaatgcaacgggtt

SEQ ID NO: 112334 - DNA, 15 bp, Homo sapiens
aaaaatgcaacgggt

SEQ ID NO: 112335 - DNA, 15 bp, Homo sapiens
aaaaaatgcaacggg

SEQ ID NO: 112336 - DNA, 15 bp, Homo sapiens
taaaaaatgcaacgg

SEQ ID NO: 112337 - DNA, 15 bp, Homo sapiens
ttaaaaaatgcaacg

SEQ ID NO: 112338 - DNA, 15 bp, Homo sapiens
tttaaaaaatgcaac

SEQ ID NO: 112339 - DNA, 15 bp, Homo sapiens
ttttaaaaaatgcaa

SEQ ID NO: 112340 - DNA, 15 bp, Homo sapiens
cttttaaaaaatgca

SEQ ID NO: 112341 - DNA, 15 bp, Homo sapiens
ccttttaaaaaatgc

SEQ ID NO: 112342 - DNA, 15 bp, Homo sapiens
accttttaaaaaatg

SEQ ID NO: 112343 - DNA, 15 bp, Homo sapiens
aaccttttaaaaaat

SEQ ID NO: 112344 - DNA, 15 bp, Homo sapiens
aaaccttttaaaaaa

SEQ ID NO: 112345 - DNA, 15 bp, Homo sapiens
aaaaccttttaaaaa

SEQ ID NO: 112346 - DNA, 15 bp, Homo sapiens
taaaaccttttaaaa

SEQ ID NO: 112347 - DNA, 15 bp, Homo sapiens
ttaaaaccttttaaa

SEQ ID NO: 112348 - DNA, 15 bp, Homo sapiens
tttaaaaccttttaa

SEQ ID NO: 112349 - DNA, 15 bp, Homo sapiens
atttaaaacctttta

SEQ ID NO: 112350 - DNA, 15 bp, Homo sapiens
catttaaaacctttt

SEQ ID NO: 112351 - DNA, 15 bp, Homo sapiens
ccatttaaaaccttt

SEQ ID NO: 112352 - DNA, 15 bp, Homo sapiens
tccatttaaaacctt

SEQ ID NO: 112353 - DNA, 15 bp, Homo sapiens
ttccatttaaaacct

SEQ ID NO: 112354 - DNA, 15 bp, Homo sapiens
attccatttaaaacc

SEQ ID NO: 112355 - DNA, 15 bp, Homo sapiens
tattccatttaaaac

SEQ ID NO: 112356 - DNA, 15 bp, Homo sapiens
atattccatttaaaa

SEQ ID NO: 112357 - DNA, 15 bp, Homo sapiens
aatattccatttaaa

SEQ ID NO: 112358 - DNA, 15 bp, Homo sapiens
aaatattccatttaa

SEQ ID NO: 112359 - DNA, 15 bp, Homo sapiens
caaatattccattta

SEQ ID NO: 112360 - DNA, 15 bp, Homo sapiens
tcaaatattccattt

SEQ ID NO: 112361 - DNA, 15 bp, Homo sapiens
ctcaaatattccatt

SEQ ID NO: 112362 - DNA, 15 bp, Homo sapiens
gctcaaatattccat

SEQ ID NO: 112363 - DNA, 15 bp, Homo sapiens
ggctcaaatattcca

SEQ ID NO: 112364 - DNA, 15 bp, Homo sapiens
aggctcaaatattcc

SEQ ID NO: 112365 - DNA, 15 bp, Homo sapiens
aaggctcaaatattc

SEQ ID NO: 112366 - DNA, 15 bp, Homo sapiens
aaaggctcaaatatt

SEQ ID NO: 112367 - DNA, 15 bp, Homo sapiens
gaaaggctcaaatat

SEQ ID NO: 112368 - DNA, 15 bp, Homo sapiens
agaaaggctcaaata

SEQ ID NO: 112369 - DNA, 15 bp, Homo sapiens
gagaaaggctcaaat

SEQ ID NO: 112370 - DNA, 15 bp, Homo sapiens
agagaaaggctcaaa

SEQ ID NO: 112371 - DNA, 15 bp, Homo sapiens
aagagaaaggctcaa

SEQ ID NO: 112372 - DNA, 15 bp, Homo sapiens
aaagagaaaggctca

SEQ ID NO: 112373 - DNA, 15 bp, Homo sapiens
aaaagagaaaggctc

SEQ ID NO: 112374 - DNA, 15 bp, Homo sapiens
gaaaagagaaaggct

SEQ ID NO: 112375 - DNA, 15 bp, Homo sapiens
tgaaaagagaaaggc

SEQ ID NO: 112376 - DNA, 15 bp, Homo sapiens
ttgaaaagagaaagg

SEQ ID NO: 112377 - DNA, 15 bp, Homo sapiens
tttgaaaagagaaag

SEQ ID NO: 112378 - DNA, 15 bp, Homo sapiens
gtttgaaaagagaaa

SEQ ID NO: 112379 - DNA, 15 bp, Homo sapiens
agtttgaaaagagaa

SEQ ID NO: 112380 - DNA, 15 bp, Homo sapiens
tagtttgaaaagaga

SEQ ID NO: 112381 - DNA, 15 bp, Homo sapiens
ttagtttgaaaagag

SEQ ID NO: 112382 - DNA, 15 bp, Homo sapiens
attagtttgaaaaga

SEQ ID NO: 112383 - DNA, 15 bp, Homo sapiens
aattagtttgaaaag

SEQ ID NO: 112384 - DNA, 15 bp, Homo sapiens
gaattagtttgaaaa

SEQ ID NO: 112385 - DNA, 15 bp, Homo sapiens
agaattagtttgaaa

SEQ ID NO: 112386 - DNA, 15 bp, Homo sapiens
gagaattagtttgaa

SEQ ID NO: 112387 - DNA, 15 bp, Homo sapiens
ggagaattagtttga

SEQ ID NO: 112388 - DNA, 15 bp, Homo sapiens
aggagaattagtttg

SEQ ID NO: 112389 - DNA, 15 bp, Homo sapiens
gaggagaattagttt

SEQ ID NO: 112390 - DNA, 15 bp, Homo sapiens
agaggagaattagtt

SEQ ID NO: 112391 - DNA, 15 bp, Homo sapiens
cagaggagaattagt

SEQ ID NO: 112392 - DNA, 15 bp, Homo sapiens
acagaggagaattag

SEQ ID NO: 112393 - DNA, 15 bp, Homo sapiens
cacagaggagaatta

SEQ ID NO: 112394 - DNA, 15 bp, Homo sapiens
acacagaggagaatt

SEQ ID NO: 112395 - DNA, 15 bp, Homo sapiens
gacacagaggagaat

SEQ ID NO: 112396 - DNA, 15 bp, Homo sapiens
agacacagaggagaa

SEQ ID NO: 112397 - DNA, 15 bp, Homo sapiens
cagacacagaggaga

SEQ ID NO: 112398 - DNA, 15 bp, Homo sapiens
gcagacacagaggag

SEQ ID NO: 112399 - DNA, 15 bp, Homo sapiens
agcagacacagagga

SEQ ID NO: 112400 - DNA, 15 bp, Homo sapiens
aagcagacacagagg

SEQ ID NO: 112401 - DNA, 15 bp, Homo sapiens
aaagcagacacagag

SEQ ID NO: 112402 - DNA, 15 bp, Homo sapiens
taaagcagacacaga

SEQ ID NO: 112403 - DNA, 15 bp, Homo sapiens
ataaagcagacacag

SEQ ID NO: 112404 - DNA, 15 bp, Homo sapiens
aataaagcagacaca

SEQ ID NO: 112405 - DNA, 15 bp, Homo sapiens
gaataaagcagacac

SEQ ID NO: 112406 - DNA, 15 bp, Homo sapiens
ggaataaagcagaca

SEQ ID NO: 112407 - DNA, 15 bp, Homo sapiens
tggaataaagcagac

SEQ ID NO: 112408 - DNA, 15 bp, Homo sapiens
ctggaataaagcaga

SEQ ID NO: 112409 - DNA, 15 bp, Homo sapiens
cctggaataaagcag

SEQ ID NO: 112410 - DNA, 15 bp, Homo sapiens
acctggaataaagca

SEQ ID NO: 112411 - DNA, 15 bp, Homo sapiens
aacctggaataaagc

SEQ ID NO: 112412 - DNA, 15 bp, Homo sapiens
aaacctggaataaag

SEQ ID NO: 112413 - DNA, 15 bp, Homo sapiens
aaaacctggaataaa

SEQ ID NO: 112414 - DNA, 15 bp, Homo sapiens
caaaacctggaataa

SEQ ID NO: 112415 - DNA, 15 bp, Homo sapiens
acaaaacctggaata

SEQ ID NO: 112416 - DNA, 15 bp, Homo sapiens
cacaaaacctggaat

SEQ ID NO: 112417 - DNA, 15 bp, Homo sapiens
acacaaaacctggaa

SEQ ID NO: 112418 - DNA, 15 bp, Homo sapiens
tacacaaaacctgga

SEQ ID NO: 112419 - DNA, 15 bp, Homo sapiens
gtacacaaaacctgg

SEQ ID NO: 112420 - DNA, 15 bp, Homo sapiens
tgtacacaaaacctg

SEQ ID NO: 112421 - DNA, 15 bp, Homo sapiens
ctgtacacaaaacct

SEQ ID NO: 112422 - DNA, 15 bp, Homo sapiens
gctgtacacaaaacc

SEQ ID NO: 112423 - DNA, 15 bp, Homo sapiens
agctgtacacaaaac

SEQ ID NO: 112424 - DNA, 15 bp, Homo sapiens
aagctgtacacaaaa

SEQ ID NO: 112425 - DNA, 15 bp, Homo sapiens
caagctgtacacaaa

SEQ ID NO: 112426 - DNA, 15 bp, Homo sapiens
ccaagctgtacacaa

SEQ ID NO: 112427 - DNA, 15 bp, Homo sapiens
cccaagctgtacaca

SEQ ID NO: 112428 - DNA, 15 bp, Homo sapiens
tcccaagctgtacac

SEQ ID NO: 112429 - DNA, 15 bp, Homo sapiens
ttcccaagctgtaca

SEQ ID NO: 112430 - DNA, 15 bp, Homo sapiens
attcccaagctgtac

SEQ ID NO: 112431 - DNA, 15 bp, Homo sapiens
cattcccaagctgta

SEQ ID NO: 112432 - DNA, 15 bp, Homo sapiens
tcattcccaagctgt

SEQ ID NO: 112433 - DNA, 15 bp, Homo sapiens
ttcattcccaagctg

SEQ ID NO: 112434 - DNA, 15 bp, Homo sapiens
tttcattcccaagct

SEQ ID NO: 112435 - DNA, 15 bp, Homo sapiens
ttttcattcccaagc

SEQ ID NO: 112436 - DNA, 15 bp, Homo sapiens
cttttcattcccaag

SEQ ID NO: 112437 - DNA, 15 bp, Homo sapiens
ccttttcattcccaa

SEQ ID NO: 112438 - DNA, 15 bp, Homo sapiens
accttttcattccca

SEQ ID NO: 112439 - DNA, 15 bp, Homo sapiens
aaccttttcattccc

SEQ ID NO: 112440 - DNA, 15 bp, Homo sapiens
caaccttttcattcc

SEQ ID NO: 112441 - DNA, 15 bp, Homo sapiens
tcaaccttttcattc

SEQ ID NO: 112442 - DNA, 15 bp, Homo sapiens
atcaaccttttcatt

SEQ ID NO: 112443 - DNA, 15 bp, Homo sapiens
aatcaaccttttcat

SEQ ID NO: 112444 - DNA, 15 bp, Homo sapiens
caatcaaccttttca

SEQ ID NO: 112445 - DNA, 15 bp, Homo sapiens
acaatcaaccttttc

SEQ ID NO: 112446 - DNA, 15 bp, Homo sapiens
tacaatcaacctttt

SEQ ID NO: 112447 - DNA, 15 bp, Homo sapiens
ttacaatcaaccttt

SEQ ID NO: 112448 - DNA, 15 bp, Homo sapiens
tttacaatcaacctt

SEQ ID NO: 112449 - DNA, 15 bp, Homo sapiens
gtttacaatcaacct

SEQ ID NO: 112450 - DNA, 15 bp, Homo sapiens
ggtttacaatcaacc

SEQ ID NO: 112451 - DNA, 15 bp, Homo sapiens
gggtttacaatcaac

SEQ ID NO: 112452 - DNA, 15 bp, Homo sapiens
tgggtttacaatcaa

SEQ ID NO: 112453 - DNA, 15 bp, Homo sapiens
gtgggtttacaatca

SEQ ID NO: 112454 - DNA, 15 bp, Homo sapiens
tgtgggtttacaatc

SEQ ID NO: 112455 - DNA, 15 bp, Homo sapiens
ctgtgggtttacaat

SEQ ID NO: 112456 - DNA, 15 bp, Homo sapiens
actgtgggtttacaa

SEQ ID NO: 112457 - DNA, 15 bp, Homo sapiens
tactgtgggtttaca

SEQ ID NO: 112458 - DNA, 15 bp, Homo sapiens
atactgtgggtttac

SEQ ID NO: 112459 - DNA, 15 bp, Homo sapiens
gatactgtgggttta

SEQ ID NO: 112460 - DNA, 15 bp, Homo sapiens
agatactgtgggttt

SEQ ID NO: 112461 - DNA, 15 bp, Homo sapiens
tagatactgtgggtt

SEQ ID NO: 112462 - DNA, 15 bp, Homo sapiens
ctagatactgtgggt

SEQ ID NO: 112463 - DNA, 15 bp, Homo sapiens
gctagatactgtggg

SEQ ID NO: 112464 - DNA, 15 bp, Homo sapiens
tgctagatactgtgg

SEQ ID NO: 112465 - DNA, 15 bp, Homo sapiens
ctgctagatactgtg

SEQ ID NO: 112466 - DNA, 15 bp, Homo sapiens
gctgctagatactgt

SEQ ID NO: 112467 - DNA, 15 bp, Homo sapiens
cgctgctagatactg

SEQ ID NO: 112468 - DNA, 15 bp, Homo sapiens
acgctgctagatact

SEQ ID NO: 112469 - DNA, 15 bp, Homo sapiens
aacgctgctagatac

SEQ ID NO: 112470 - DNA, 15 bp, Homo sapiens
caacgctgctagata

SEQ ID NO: 112471 - DNA, 15 bp, Homo sapiens
acaacgctgctagat

SEQ ID NO: 112472 - DNA, 15 bp, Homo sapiens
cacaacgctgctaga

SEQ ID NO: 112473 - DNA, 15 bp, Homo sapiens
gcacaacgctgctag

SEQ ID NO: 112474 - DNA, 15 bp, Homo sapiens
ggcacaacgctgcta

SEQ ID NO: 112475 - DNA, 15 bp, Homo sapiens
tggcacaacgctgct

SEQ ID NO: 112476 - DNA, 15 bp, Homo sapiens
ttggcacaacgctgc

SEQ ID NO: 112477 - DNA, 15 bp, Homo sapiens
tttggcacaacgctg

SEQ ID NO: 112478 - DNA, 15 bp, Homo sapiens
atttggcacaacgct

SEQ ID NO: 112479 - DNA, 15 bp, Homo sapiens
aatttggcacaacgc

SEQ ID NO: 112480 - DNA, 15 bp, Homo sapiens
caatttggcacaacg

SEQ ID NO: 112481 - DNA, 15 bp, Homo sapiens
gcaatttggcacaac

SEQ ID NO: 112482 - DNA, 15 bp, Homo sapiens
ggcaatttggcacaa

SEQ ID NO: 112483 - DNA, 15 bp, Homo sapiens
gggcaatttggcaca

SEQ ID NO: 112484 - DNA, 15 bp, Homo sapiens
agggcaatttggcac

SEQ ID NO: 112485 - DNA, 15 bp, Homo sapiens
aagggcaatttggca

SEQ ID NO: 112486 - DNA, 15 bp, Homo sapiens
caagggcaatttggc

SEQ ID NO: 112487 - DNA, 15 bp, Homo sapiens
acaagggcaatttgg

SEQ ID NO: 112488 - DNA, 15 bp, Homo sapiens
cacaagggcaatttg

SEQ ID NO: 112489 - DNA, 15 bp, Homo sapiens
acacaagggcaattt

SEQ ID NO: 112490 - DNA, 15 bp, Homo sapiens
aacacaagggcaatt

SEQ ID NO: 112491 - DNA, 15 bp, Homo sapiens
aaacacaagggcaat

SEQ ID NO: 112492 - DNA, 15 bp, Homo sapiens
gaaacacaagggcaa

SEQ ID NO: 112493 - DNA, 15 bp, Homo sapiens
agaaacacaagggca

SEQ ID NO: 112494 - DNA, 15 bp, Homo sapiens
gagaaacacaagggc

SEQ ID NO: 112495 - DNA, 15 bp, Homo sapiens
agagaaacacaaggg

SEQ ID NO: 112496 - DNA, 15 bp, Homo sapiens
gagagaaacacaagg

SEQ ID NO: 112497 - DNA, 15 bp, Homo sapiens
ggagagaaacacaag

SEQ ID NO: 112498 - DNA, 15 bp, Homo sapiens
tggagagaaacacaa

SEQ ID NO: 112499 - DNA, 15 bp, Homo sapiens
gtggagagaaacaca

SEQ ID NO: 112500 - DNA, 15 bp, Homo sapiens
ggtggagagaaacac

SEQ ID NO: 112501 - DNA, 15 bp, Homo sapiens
gggtggagagaaaca

SEQ ID NO: 112502 - DNA, 15 bp, Homo sapiens
tgggtggagagaaac

SEQ ID NO: 112503 - DNA, 15 bp, Homo sapiens
ttgggtggagagaaa

SEQ ID NO: 112504 - DNA, 15 bp, Homo sapiens
tttgggtggagagaa

SEQ ID NO: 112505 - DNA, 15 bp, Homo sapiens
ttttgggtggagaga

SEQ ID NO: 112506 - DNA, 15 bp, Homo sapiens
attttgggtggagag

SEQ ID NO: 112507 - DNA, 15 bp, Homo sapiens
tattttgggtggaga

SEQ ID NO: 112508 - DNA, 15 bp, Homo sapiens
atattttgggtggag

SEQ ID NO: 112509 - DNA, 15 bp, Homo sapiens
gatattttgggtgga

SEQ ID NO: 112510 - DNA, 15 bp, Homo sapiens
tgatattttgggtgg

SEQ ID NO: 112511 - DNA, 15 bp, Homo sapiens
gtgatattttgggtg

SEQ ID NO: 112512 - DNA, 15 bp, Homo sapiens
tgtgatattttgggt

SEQ ID NO: 112513 - DNA, 15 bp, Homo sapiens
ctgtgatattttggg

SEQ ID NO: 112514 - DNA, 15 bp, Homo sapiens
gctgtgatattttgg

SEQ ID NO: 112515 - DNA, 15 bp, Homo sapiens
agctgtgatattttg

SEQ ID NO: 112516 - DNA, 15 bp, Homo sapiens
cagctgtgatatttt

SEQ ID NO: 112517 - DNA, 15 bp, Homo sapiens
gcagctgtgatattt

SEQ ID NO: 112518 - DNA, 15 bp, Homo sapiens
agcagctgtgatatt

SEQ ID NO: 112519 - DNA, 15 bp, Homo sapiens
aagcagctgtgatat

SEQ ID NO: 112520 - DNA, 15 bp, Homo sapiens
aaagcagctgtgata

SEQ ID NO: 112521 - DNA, 15 bp, Homo sapiens
gaaagcagctgtgat

SEQ ID NO: 112522 - DNA, 15 bp, Homo sapiens
ggaaagcagctgtga

SEQ ID NO: 112523 - DNA, 15 bp, Homo sapiens
aggaaagcagctgtg

SEQ ID NO: 112524 - DNA, 15 bp, Homo sapiens
gaggaaagcagctgt

SEQ ID NO: 112525 - DNA, 15 bp, Homo sapiens
tgaggaaagcagctg

SEQ ID NO: 112526 - DNA, 15 bp, Homo sapiens
gtgaggaaagcagct

SEQ ID NO: 112527 - DNA, 15 bp, Homo sapiens
tgtgaggaaagcagc

SEQ ID NO: 112528 - DNA, 15 bp, Homo sapiens
atgtgaggaaagcag

SEQ ID NO: 112529 - DNA, 15 bp, Homo sapiens
aatgtgaggaaagca

SEQ ID NO: 112530 - DNA, 15 bp, Homo sapiens
aaatgtgaggaaagc

SEQ ID NO: 112531 - DNA, 15 bp, Homo sapiens
caaatgtgaggaaag

SEQ ID NO: 112532 - DNA, 15 bp, Homo sapiens
ccaaatgtgaggaaa

SEQ ID NO: 112533 - DNA, 15 bp, Homo sapiens
accaaatgtgaggaa

SEQ ID NO: 112534 - DNA, 15 bp, Homo sapiens
aaccaaatgtgagga

SEQ ID NO: 112535 - DNA, 15 bp, Homo sapiens
gaaccaaatgtgagg

SEQ ID NO: 112536 - DNA, 15 bp, Homo sapiens
tgaaccaaatgtgag

SEQ ID NO: 112537 - DNA, 15 bp, Homo sapiens
atgaaccaaatgtga

SEQ ID NO: 112538 - DNA, 15 bp, Homo sapiens
gatgaaccaaatgtg

SEQ ID NO: 112539 - DNA, 15 bp, Homo sapiens
ggatgaaccaaatgt

SEQ ID NO: 112540 - DNA, 15 bp, Homo sapiens
cggatgaaccaaatg

SEQ ID NO: 112541 - DNA, 15 bp, Homo sapiens
acggatgaaccaaat

SEQ ID NO: 112542 - DNA, 15 bp, Homo sapiens
cacggatgaaccaaa

SEQ ID NO: 112543 - DNA, 15 bp, Homo sapiens
acacggatgaaccaa

SEQ ID NO: 112544 - DNA, 15 bp, Homo sapiens
cacacggatgaacca

SEQ ID NO: 112545 - DNA, 15 bp, Homo sapiens
gcacacggatgaacc

SEQ ID NO: 112546 - DNA, 15 bp, Homo sapiens
agcacacggatgaac

SEQ ID NO: 112547 - DNA, 15 bp, Homo sapiens
cagcacacggatgaa

SEQ ID NO: 112548 - DNA, 15 bp, Homo sapiens
acagcacacggatga

SEQ ID NO: 112549 - DNA, 15 bp, Homo sapiens
aacagcacacggatg

SEQ ID NO: 112550 - DNA, 15 bp, Homo sapiens
gaacagcacacggat

SEQ ID NO: 112551 - DNA, 15 bp, Homo sapiens
agaacagcacacgga

SEQ ID NO: 112552 - DNA, 15 bp, Homo sapiens
aagaacagcacacgg

SEQ ID NO: 112553 - DNA, 15 bp, Homo sapiens
aaagaacagcacacg

SEQ ID NO: 112554 - DNA, 15 bp, Homo sapiens
aaaagaacagcacac

SEQ ID NO: 112555 - DNA, 15 bp, Homo sapiens
caaaagaacagcaca

SEQ ID NO: 112556 - DNA, 15 bp, Homo sapiens
ccaaaagaacagcac

SEQ ID NO: 112557 - DNA, 15 bp, Homo sapiens
cccaaaagaacagca

SEQ ID NO: 112558 - DNA, 15 bp, Homo sapiens
acccaaaagaacagc

SEQ ID NO: 112559 - DNA, 15 bp, Homo sapiens
aacccaaaagaacag

SEQ ID NO: 112560 - DNA, 15 bp, Homo sapiens
gaacccaaaagaaca

SEQ ID NO: 112561 - DNA, 15 bp, Homo sapiens
agaacccaaaagaac

SEQ ID NO: 112562 - DNA, 15 bp, Homo sapiens
cagaacccaaaagaa

SEQ ID NO: 112563 - DNA, 15 bp, Homo sapiens
tcagaacccaaaaga

SEQ ID NO: 112564 - DNA, 15 bp, Homo sapiens
ctcagaacccaaaag

SEQ ID NO: 112565 - DNA, 15 bp, Homo sapiens
tctcagaacccaaaa

SEQ ID NO: 112566 - DNA, 15 bp, Homo sapiens
ctctcagaacccaaa

SEQ ID NO: 112567 - DNA, 15 bp, Homo sapiens
cctctcagaacccaa

SEQ ID NO: 112568 - DNA, 15 bp, Homo sapiens
ccctctcagaaccca

SEQ ID NO: 112569 - DNA, 15 bp, Homo sapiens
accctctcagaaccc

SEQ ID NO: 112570 - DNA, 15 bp, Homo sapiens
aaccctctcagaacc

SEQ ID NO: 112571 - DNA, 15 bp, Homo sapiens
aaaccctctcagaac

SEQ ID NO: 112572 - DNA, 15 bp, Homo sapiens
aaaaccctctcagaa

SEQ ID NO: 112573 - DNA, 15 bp, Homo sapiens
caaaaccctctcaga

SEQ ID NO: 112574 - DNA, 15 bp, Homo sapiens
gcaaaaccctctcag

SEQ ID NO: 112575 - DNA, 15 bp, Homo sapiens
ggcaaaaccctctca

SEQ ID NO: 112576 - DNA, 15 bp, Homo sapiens
tggcaaaaccctctc

SEQ ID NO: 112577 - DNA, 15 bp, Homo sapiens
atggcaaaaccctct

SEQ ID NO: 112578 - DNA, 15 bp, Homo sapiens
catggcaaaaccctc

SEQ ID NO: 112579 - DNA, 15 bp, Homo sapiens
aaacatggcaaaacc

SEQ ID NO: 112580 - DNA, 15 bp, Homo sapiens
caaacatggcaaaac

SEQ ID NO: 112581 - DNA, 15 bp, Homo sapiens
gcaaacatggcaaaa

SEQ ID NO: 112582 - DNA, 15 bp, Homo sapiens
agcaaacatggcaaa

SEQ ID NO: 112583 - DNA, 15 bp, Homo sapiens
aagcaaacatggcaa

SEQ ID NO: 112584 - DNA, 15 bp, Homo sapiens
caagcaaacatggca

SEQ ID NO: 112585 - DNA, 15 bp, Homo sapiens
acaagcaaacatggc

SEQ ID NO: 112586 - DNA, 15 bp, Homo sapiens
tacaagcaaacatgg

SEQ ID NO: 112587 - DNA, 15 bp, Homo sapiens
atacaagcaaacatg

SEQ ID NO: 112588 - DNA, 15 bp, Homo sapiens
catacaagcaaacat

SEQ ID NO: 112589 - DNA, 15 bp, Homo sapiens
tcatacaagcaaaca

SEQ ID NO: 112590 - DNA, 15 bp, Homo sapiens
gtcatacaagcaaac

SEQ ID NO: 112591 - DNA, 15 bp, Homo sapiens
ggtcatacaagcaaa

SEQ ID NO: 112592 - DNA, 15 bp, Homo sapiens
tggtcatacaagcaa

SEQ ID NO: 112593 - DNA, 15 bp, Homo sapiens
ttggtcatacaagca

SEQ ID NO: 112594 - DNA, 15 bp, Homo sapiens
cttggtcatacaagc

SEQ ID NO: 112595 - DNA, 15 bp, Homo sapiens
acttggtcatacaag

SEQ ID NO: 112596 - DNA, 15 bp, Homo sapiens
gacttggtcatacaa

SEQ ID NO: 112597 - DNA, 15 bp, Homo sapiens
tgacttggtcataca

SEQ ID NO: 112598 - DNA, 15 bp, Homo sapiens
gtgacttggtcatac

SEQ ID NO: 112599 - DNA, 15 bp, Homo sapiens
ggtgacttggtcata

SEQ ID NO: 112600 - DNA, 15 bp, Homo sapiens
tggtgacttggtcat

SEQ ID NO: 112601 - DNA, 15 bp, Homo sapiens
ttggtgacttggtca

SEQ ID NO: 112602 - DNA, 15 bp, Homo sapiens
cttggtgacttggtc

SEQ ID NO: 112603 - DNA, 15 bp, Homo sapiens
ccttggtgacttggt

SEQ ID NO: 112604 - DNA, 15 bp, Homo sapiens
tccttggtgacttgg

SEQ ID NO: 112605 - DNA, 15 bp, Homo sapiens
ttccttggtgacttg

SEQ ID NO: 112606 - DNA, 15 bp, Homo sapiens
tttccttggtgactt

SEQ ID NO: 112607 - DNA, 15 bp, Homo sapiens
atttccttggtgact

SEQ ID NO: 112608 - DNA, 15 bp, Homo sapiens
tatttccttggtgac

SEQ ID NO: 112609 - DNA, 15 bp, Homo sapiens
ttatttccttggtga

SEQ ID NO: 112610 - DNA, 15 bp, Homo sapiens
tttatttccttggtg

SEQ ID NO: 112611 - DNA, 15 bp, Homo sapiens
gtttatttccttggt

SEQ ID NO: 112612 - DNA, 15 bp, Homo sapiens
tgtttatttccttgg

SEQ ID NO: 112613 - DNA, 15 bp, Homo sapiens
ctgtttatttccttg

SEQ ID NO: 112614 - DNA, 15 bp, Homo sapiens
cctgtttatttcctt

SEQ ID NO: 112615 - DNA, 15 bp, Homo sapiens
tcctgtttatttcct

SEQ ID NO: 112616 - DNA, 15 bp, Homo sapiens
ttcctgtttatttcc

SEQ ID NO: 112617 - DNA, 15 bp, Homo sapiens
cttcctgtttatttc

SEQ ID NO: 112618 - DNA, 15 bp, Homo sapiens
ccttcctgtttattt

SEQ ID NO: 112619 - DNA, 15 bp, Homo sapiens
tccttcctgtttatt

SEQ ID NO: 112620 - DNA, 15 bp, Homo sapiens
ttccttcctgtttat

SEQ ID NO: 112621 - DNA, 15 bp, Homo sapiens
tttccttcctgttta

SEQ ID NO: 112622 - DNA, 15 bp, Homo sapiens
atttccttcctgttt

SEQ ID NO: 112623 - DNA, 15 bp, Homo sapiens
gatttccttcctgtt

SEQ ID NO: 112624 - DNA, 15 bp, Homo sapiens
ggatttccttcctgt

SEQ ID NO: 112625 - DNA, 15 bp, Homo sapiens
tggatttccttcctg

SEQ ID NO: 112626 - DNA, 15 bp, Homo sapiens
atggatttccttcct

SEQ ID NO: 112627 - DNA, 15 bp, Homo sapiens
catggatttccttcc

SEQ ID NO: 112628 - DNA, 15 bp, Homo sapiens
acatggatttccttc

SEQ ID NO: 112629 - DNA, 15 bp, Homo sapiens
aacatggatttcctt

SEQ ID NO: 112630 - DNA, 15 bp, Homo sapiens
gaacatggatttcct

SEQ ID NO: 112631 - DNA, 15 bp, Homo sapiens
agaacatggatttcc

SEQ ID NO: 112632 - DNA, 15 bp, Homo sapiens
gagaacatggatttc

SEQ ID NO: 112633 - DNA, 15 bp, Homo sapiens
ggagaacatggattt

SEQ ID NO: 112634 - DNA, 15 bp, Homo sapiens
tggagaacatggatt

SEQ ID NO: 112635 - DNA, 15 bp, Homo sapiens
atggagaacatggat

SEQ ID NO: 112636 - DNA, 15 bp, Homo sapiens
gatggagaacatgga

SEQ ID NO: 112637 - DNA, 15 bp, Homo sapiens
agatggagaacatgg

SEQ ID NO: 112638 - DNA, 15 bp, Homo sapiens
aagatggagaacatg

SEQ ID NO: 112639 - DNA, 15 bp, Homo sapiens
aaagatggagaacat

SEQ ID NO: 112640 - DNA, 15 bp, Homo sapiens
aaaagatggagaaca

SEQ ID NO: 112641 - DNA, 15 bp, Homo sapiens
caaaagatggagaac

SEQ ID NO: 112642 - DNA, 15 bp, Homo sapiens
acaaaagatggagaa

SEQ ID NO: 112643 - DNA, 15 bp, Homo sapiens
cacaaaagatggaga

SEQ ID NO: 112644 - DNA, 15 bp, Homo sapiens
tcacaaaagatggag

SEQ ID NO: 112645 - DNA, 15 bp, Homo sapiens
ttcacaaaagatgga

SEQ ID NO: 112646 - DNA, 15 bp, Homo sapiens
tttcacaaaagatgg

SEQ ID NO: 112647 - DNA, 15 bp, Homo sapiens
ctttcacaaaagatg

SEQ ID NO: 112648 - DNA, 15 bp, Homo sapiens
actttcacaaaagat

SEQ ID NO: 112649 - DNA, 15 bp, Homo sapiens
tactttcacaaaaga

SEQ ID NO: 112650 - DNA, 15 bp, Homo sapiens
atactttcacaaaag

SEQ ID NO: 112651 - DNA, 15 bp, Homo sapiens
tatactttcacaaaa

SEQ ID NO: 112652 - DNA, 15 bp, Homo sapiens
atatactttcacaaa

SEQ ID NO: 112653 - DNA, 15 bp, Homo sapiens
aatatactttcacaa

SEQ ID NO: 112654 - DNA, 15 bp, Homo sapiens
aaatatactttcaca

SEQ ID NO: 112655 - DNA, 15 bp, Homo sapiens
caaatatactttcac

SEQ ID NO: 112656 - DNA, 15 bp, Homo sapiens
tcaaatatactttca

SEQ ID NO: 112657 - DNA, 15 bp, Homo sapiens
ctcaaatatactttc

SEQ ID NO: 112658 - DNA, 15 bp, Homo sapiens
actcaaatatacttt

SEQ ID NO: 112659 - DNA, 15 bp, Homo sapiens
aactcaaatatactt

SEQ ID NO: 112660 - DNA, 15 bp, Homo sapiens
caactcaaatatact

SEQ ID NO: 112661 - DNA, 15 bp, Homo sapiens
ccaactcaaatatac

SEQ ID NO: 112662 - DNA, 15 bp, Homo sapiens
accaactcaaatata

SEQ ID NO: 112663 - DNA, 15 bp, Homo sapiens
caccaactcaaatat

SEQ ID NO: 112664 - DNA, 15 bp, Homo sapiens
ccaccaactcaaata

SEQ ID NO: 112665 - DNA, 15 bp, Homo sapiens
accaccaactcaaat

SEQ ID NO: 112666 - DNA, 15 bp, Homo sapiens
aaccaccaactcaaa

SEQ ID NO: 112667 - DNA, 15 bp, Homo sapiens
aaaccaccaactcaa

SEQ ID NO: 112668 - DNA, 15 bp, Homo sapiens
aaaaccaccaactca

SEQ ID NO: 112669 - DNA, 15 bp, Homo sapiens
aaaaaccaccaactc

SEQ ID NO: 112670 - DNA, 15 bp, Homo sapiens
aaaaaaccaccaact

SEQ ID NO: 112671 - DNA, 15 bp, Homo sapiens
caaaaaaccaccaac

SEQ ID NO: 112672 - DNA, 15 bp, Homo sapiens
acaaaaaaccaccaa

SEQ ID NO: 112673 - DNA, 15 bp, Homo sapiens
aacaaaaaaccacca

SEQ ID NO: 112674 - DNA, 15 bp, Homo sapiens
aaacaaaaaaccacc

SEQ ID NO: 112675 - DNA, 15 bp, Homo sapiens
aaaacaaaaaaccac

SEQ ID NO: 112676 - DNA, 15 bp, Homo sapiens
caaaacaaaaaacca

SEQ ID NO: 112677 - DNA, 15 bp, Homo sapiens
acaaaacaaaaaacc

SEQ ID NO: 112678 - DNA, 15 bp, Homo sapiens
aacaaaacaaaaaac

SEQ ID NO: 112679 - DNA, 15 bp, Homo sapiens
aaacaaaacaaaaaa

SEQ ID NO: 112680 - DNA, 15 bp, Homo sapiens
caaacaaaacaaaaa

SEQ ID NO: 112681 - DNA, 15 bp, Homo sapiens
ccaaacaaaacaaaa

SEQ ID NO: 112682 - DNA, 15 bp, Homo sapiens
cccaaacaaaacaaa

SEQ ID NO: 112683 - DNA, 15 bp, Homo sapiens
ccccaaacaaaacaa

SEQ ID NO: 112684 - DNA, 15 bp, Homo sapiens
cccccaaacaaaaca

SEQ ID NO: 112685 - DNA, 15 bp, Homo sapiens
acccccaaacaaaac

SEQ ID NO: 112686 - DNA, 15 bp, Homo sapiens
aacccccaaacaaaa

SEQ ID NO: 112687 - DNA, 15 bp, Homo sapiens
aaacccccaaacaaa

SEQ ID NO: 112688 - DNA, 15 bp, Homo sapiens
caaacccccaaacaa

SEQ ID NO: 112689 - DNA, 15 bp, Homo sapiens
acaaacccccaaaca

SEQ ID NO: 112690 - DNA, 15 bp, Homo sapiens
cacaaacccccaaac

SEQ ID NO: 112691 - DNA, 15 bp, Homo sapiens
acacaaacccccaaa

SEQ ID NO: 112692 - DNA, 15 bp, Homo sapiens
aacacaaacccccaa

SEQ ID NO: 112693 - DNA, 15 bp, Homo sapiens
aaacacaaaccccca

SEQ ID NO: 112694 - DNA, 15 bp, Homo sapiens
aaaacacaaaccccc

SEQ ID NO: 112695 - DNA, 15 bp, Homo sapiens
caaaacacaaacccc

SEQ ID NO: 112696 - DNA, 15 bp, Homo sapiens
acaaaacacaaaccc

SEQ ID NO: 112697 - DNA, 15 bp, Homo sapiens
aacaaaacacaaacc

SEQ ID NO: 112698 - DNA, 15 bp, Homo sapiens
aaacaaaacacaaac

SEQ ID NO: 112699 - DNA, 15 bp, Homo sapiens
aaaacaaaacacaaa

SEQ ID NO: 112700 - DNA, 15 bp, Homo sapiens
caaaacaaaacacaa

SEQ ID NO: 112701 - DNA, 15 bp, Homo sapiens
acaaaacaaaacaca

SEQ ID NO: 112702 - DNA, 15 bp, Homo sapiens
aacaaaacaaaacac

SEQ ID NO: 112703 - DNA, 15 bp, Homo sapiens
aaacaaaacaaaaca

SEQ ID NO: 112704 - DNA, 15 bp, Homo sapiens
aaaacaaaacaaaac

SEQ ID NO: 112705 - DNA, 15 bp, Homo sapiens
aaaaacaaaacaaaa

SEQ ID NO: 112706 - DNA, 15 bp, Homo sapiens
caaaaacaaaacaaa

SEQ ID NO: 112707 - DNA, 15 bp, Homo sapiens
ccaaaaacaaaacaa

SEQ ID NO: 112708 - DNA, 15 bp, Homo sapiens
accaaaaacaaaaca

SEQ ID NO: 112709 - DNA, 15 bp, Homo sapiens
taccaaaaacaaaac

SEQ ID NO: 112710 - DNA, 15 bp, Homo sapiens
ataccaaaaacaaaa

SEQ ID NO: 112711 - DNA, 15 bp, Homo sapiens
cataccaaaaacaaa

SEQ ID NO: 112712 - DNA, 15 bp, Homo sapiens
acataccaaaaacaa

SEQ ID NO: 112713 - DNA, 15 bp, Homo sapiens
aacataccaaaaaca

SEQ ID NO: 112714 - DNA, 15 bp, Homo sapiens
aaacataccaaaaac

SEQ ID NO: 112715 - DNA, 15 bp, Homo sapiens
aaaacataccaaaaa

SEQ ID NO: 112716 - DNA, 15 bp, Homo sapiens
gaaaacataccaaaa

SEQ ID NO: 112717 - DNA, 15 bp, Homo sapiens
agaaaacataccaaa

SEQ ID NO: 112718 - DNA, 15 bp, Homo sapiens
aagaaaacataccaa

SEQ ID NO: 112719 - DNA, 15 bp, Homo sapiens
gaagaaaacatacca

SEQ ID NO: 112720 - DNA, 15 bp, Homo sapiens
ggaagaaaacatacc

SEQ ID NO: 112721 - DNA, 15 bp, Homo sapiens
tggaagaaaacatac

SEQ ID NO: 112722 - DNA, 15 bp, Homo sapiens
ctggaagaaaacata

SEQ ID NO: 112723 - DNA, 15 bp, Homo sapiens
tctggaagaaaacat

SEQ ID NO: 112724 - DNA, 15 bp, Homo sapiens
ctctggaagaaaaca

SEQ ID NO: 112725 - DNA, 15 bp, Homo sapiens
cctctggaagaaaac

SEQ ID NO: 112726 - DNA, 15 bp, Homo sapiens
acctctggaagaaaa

SEQ ID NO: 112727 - DNA, 15 bp, Homo sapiens
cacctctggaagaaa

SEQ ID NO: 112728 - DNA, 15 bp, Homo sapiens
tcacctctggaagaa

SEQ ID NO: 112729 - DNA, 15 bp, Homo sapiens
atcacctctggaaga

SEQ ID NO: 112730 - DNA, 15 bp, Homo sapiens
tatcacctctggaag

SEQ ID NO: 112731 - DNA, 15 bp, Homo sapiens
atatcacctctggaa

SEQ ID NO: 112732 - DNA, 15 bp, Homo sapiens
tatatcacctctgga

SEQ ID NO: 112733 - DNA, 15 bp, Homo sapiens
gtatatcacctctgg

SEQ ID NO: 112734 - DNA, 15 bp, Homo sapiens
agtatatcacctctg

SEQ ID NO: 112735 - DNA, 15 bp, Homo sapiens
aagtatatcacctct

SEQ ID NO: 112736 - DNA, 15 bp, Homo sapiens
aaagtatatcacctc

SEQ ID NO: 112737 - DNA, 15 bp, Homo sapiens
gaaagtatatcacct

SEQ ID NO: 112738 - DNA, 15 bp, Homo sapiens
agaaagtatatcacc

SEQ ID NO: 112739 - DNA, 15 bp, Homo sapiens
aagaaagtatatcac

SEQ ID NO: 112740 - DNA, 15 bp, Homo sapiens
aaagaaagtatatca

SEQ ID NO: 112741 - DNA, 15 bp, Homo sapiens
aaaagaaagtatatc

SEQ ID NO: 112742 - DNA, 15 bp, Homo sapiens
aaaaagaaagtatat

SEQ ID NO: 112743 - DNA, 15 bp, Homo sapiens
aaaaaagaaagtata

SEQ ID NO: 112744 - DNA, 15 bp, Homo sapiens
aaaaaaagaaagtat

SEQ ID NO: 112745 - DNA, 15 bp, Homo sapiens
aaaaaaaagaaagta

SEQ ID NO: 112746 - DNA, 15 bp, Homo sapiens
gaaaaaaaagaaagt

SEQ ID NO: 112747 - DNA, 15 bp, Homo sapiens
agaaaaaaaagaaag

SEQ ID NO: 112748 - DNA, 15 bp, Homo sapiens
gaagaaaaaaaagaa

SEQ ID NO: 112749 - DNA, 15 bp, Homo sapiens
ggaagaaaaaaaaga

SEQ ID NO: 112750 - DNA, 15 bp, Homo sapiens
aggaagaaaaaaaag

SEQ ID NO: 112751 - DNA, 15 bp, Homo sapiens
aaggaagaaaaaaaa

SEQ ID NO: 112752 - DNA, 15 bp, Homo sapiens
aaaggaagaaaaaaa

SEQ ID NO: 112753 - DNA, 15 bp, Homo sapiens
gaaaggaagaaaaaa

SEQ ID NO: 112754 - DNA, 15 bp, Homo sapiens
agaaaggaagaaaaa

SEQ ID NO: 112755 - DNA, 15 bp, Homo sapiens
aagaaaggaagaaaa

SEQ ID NO: 112756 - DNA, 15 bp, Homo sapiens
aaagaaaggaagaaa

SEQ ID NO: 112757 - DNA, 15 bp, Homo sapiens
aaaagaaaggaagaa

SEQ ID NO: 112758 - DNA, 15 bp, Homo sapiens
aaaaagaaaggaaga

SEQ ID NO: 112759 - DNA, 15 bp, Homo sapiens
aaaaaagaaaggaag

SEQ ID NO: 112760 - DNA, 15 bp, Homo sapiens
aaaaaaagaaaggaa

SEQ ID NO: 112761 - DNA, 15 bp, Homo sapiens
aaaaaaaagaaagga

SEQ ID NO: 112762 - DNA, 15 bp, Homo sapiens
gaaaaaaaagaaagg

SEQ ID NO: 112763 - DNA, 15 bp, Homo sapiens
cgaaagaaaaaaaag

SEQ ID NO: 112764 - DNA, 15 bp, Homo sapiens
acgaaagaaaaaaaa

SEQ ID NO: 112765 - DNA, 15 bp, Homo sapiens
aacgaaagaaaaaaa

SEQ ID NO: 112766 - DNA, 15 bp, Homo sapiens
gaacgaaagaaaaaa

SEQ ID NO: 112767 - DNA, 15 bp, Homo sapiens
ggaacgaaagaaaaa

SEQ ID NO: 112768 - DNA, 15 bp, Homo sapiens
aggaacgaaagaaaa

SEQ ID NO: 112769 - DNA, 15 bp, Homo sapiens
aaggaacgaaagaaa

SEQ ID NO: 112770 - DNA, 15 bp, Homo sapiens
aaaggaacgaaagaa

SEQ ID NO: 112771 - DNA, 15 bp, Homo sapiens
aaaaggaacgaaaga

SEQ ID NO: 112772 - DNA, 15 bp, Homo sapiens
aaaaaggaacgaaag

SEQ ID NO: 112773 - DNA, 15 bp, Homo sapiens
aaaaaaggaacgaaa

SEQ ID NO: 112774 - DNA, 15 bp, Homo sapiens
caaaaaaggaacgaa

SEQ ID NO: 112775 - DNA, 15 bp, Homo sapiens
tcaaaaaaggaacga

SEQ ID NO: 112776 - DNA, 15 bp, Homo sapiens
ttcaaaaaaggaacg

SEQ ID NO: 112777 - DNA, 15 bp, Homo sapiens
tttcaaaaaaggaac

SEQ ID NO: 112778 - DNA, 15 bp, Homo sapiens
gtttcaaaaaaggaa

SEQ ID NO: 112779 - DNA, 15 bp, Homo sapiens
tgtttcaaaaaagga

SEQ ID NO: 112780 - DNA, 15 bp, Homo sapiens
ctgtttcaaaaaagg

SEQ ID NO: 112781 - DNA, 15 bp, Homo sapiens
cctgtttcaaaaaag

SEQ ID NO: 112782 - DNA, 15 bp, Homo sapiens
tcctgtttcaaaaaa

SEQ ID NO: 112783 - DNA, 15 bp, Homo sapiens
ctcctgtttcaaaaa

SEQ ID NO: 112784 - DNA, 15 bp, Homo sapiens
tctcctgtttcaaaa

SEQ ID NO: 112785 - DNA, 15 bp, Homo sapiens
ctctcctgtttcaaa

SEQ ID NO: 112786 - DNA, 15 bp, Homo sapiens
gctctcctgtttcaa

SEQ ID NO: 112787 - DNA, 15 bp, Homo sapiens
tgctctcctgtttca

SEQ ID NO: 112788 - DNA, 15 bp, Homo sapiens
ttgctctcctgtttc

SEQ ID NO: 112789 - DNA, 15 bp, Homo sapiens
tttgctctcctgttt

SEQ ID NO: 112790 - DNA, 15 bp, Homo sapiens
ctttgctctcctgtt

SEQ ID NO: 112791 - DNA, 15 bp, Homo sapiens
gctttgctctcctgt

SEQ ID NO: 112792 - DNA, 15 bp, Homo sapiens
tgctttgctctcctg

SEQ ID NO: 112793 - DNA, 15 bp, Homo sapiens
ctgctttgctctcct

SEQ ID NO: 112794 - DNA, 15 bp, Homo sapiens
actgctttgctctcc

SEQ ID NO: 112795 - DNA, 15 bp, Homo sapiens
aactgctttgctctc

SEQ ID NO: 112796 - DNA, 15 bp, Homo sapiens
taactgctttgctct

SEQ ID NO: 112797 - DNA, 15 bp, Homo sapiens
ctaactgctttgctc

SEQ ID NO: 112798 - DNA, 15 bp, Homo sapiens
tctaactgctttgct

SEQ ID NO: 112799 - DNA, 15 bp, Homo sapiens
ctctaactgctttgc

SEQ ID NO: 112800 - DNA, 15 bp, Homo sapiens
actctaactgctttg

SEQ ID NO: 112801 - DNA, 15 bp, Homo sapiens
aactctaactgcttt

SEQ ID NO: 112802 - DNA, 15 bp, Homo sapiens
gaactctaactgctt

SEQ ID NO: 112803 - DNA, 15 bp, Homo sapiens
tgaactctaactgct

SEQ ID NO: 112804 - DNA, 15 bp, Homo sapiens
ctgaactctaactgc

SEQ ID NO: 112805 - DNA, 15 bp, Homo sapiens
tctgaactctaactg

SEQ ID NO: 112806 - DNA, 15 bp, Homo sapiens
ctctgaactctaact

SEQ ID NO: 112807 - DNA, 15 bp, Homo sapiens
cctctgaactctaac

SEQ ID NO: 112808 - DNA, 15 bp, Homo sapiens
gcctctgaactctaa

SEQ ID NO: 112809 - DNA, 15 bp, Homo sapiens
ggcctctgaactcta

SEQ ID NO: 112810 - DNA, 15 bp, Homo sapiens
tggcctctgaactct

SEQ ID NO: 112811 - DNA, 15 bp, Homo sapiens
ctggcctctgaactc

SEQ ID NO: 112812 - DNA, 15 bp, Homo sapiens
gctggcctctgaact

SEQ ID NO: 112813 - DNA, 15 bp, Homo sapiens
cgctggcctctgaac

SEQ ID NO: 112814 - DNA, 15 bp, Homo sapiens
ccgctggcctctgaa

SEQ ID NO: 112815 - DNA, 15 bp, Homo sapiens
gccgctggcctctga

SEQ ID NO: 112816 - DNA, 15 bp, Homo sapiens
ggccgctggcctctg

SEQ ID NO: 112817 - DNA, 15 bp, Homo sapiens
aggccgctggcctct

SEQ ID NO: 112818 - DNA, 15 bp, Homo sapiens
gaggccgctggcctc

SEQ ID NO: 112819 - DNA, 15 bp, Homo sapiens
tgaggccgctggcct

SEQ ID NO: 112820 - DNA, 15 bp, Homo sapiens
ctgaggccgctggcc

SEQ ID NO: 112821 - DNA, 15 bp, Homo sapiens
cctgaggccgctggc

SEQ ID NO: 112822 - DNA, 15 bp, Homo sapiens
ccctgaggccgctgg

SEQ ID NO: 112823 - DNA, 15 bp, Homo sapiens
gccctgaggccgctg

SEQ ID NO: 112824 - DNA, 15 bp, Homo sapiens
ggccctgaggccgct

SEQ ID NO: 112825 - DNA, 15 bp, Homo sapiens
tggccctgaggccgc

SEQ ID NO: 112826 - DNA, 15 bp, Homo sapiens
gtggccctgaggccg

SEQ ID NO: 112827 - DNA, 15 bp, Homo sapiens
agtggccctgaggcc

SEQ ID NO: 112828 - DNA, 15 bp, Homo sapiens
gagtggccctgaggc

SEQ ID NO: 112829 - DNA, 15 bp, Homo sapiens
ggagtggccctgagg

SEQ ID NO: 112830 - DNA, 15 bp, Homo sapiens
gggagtggccctgag

SEQ ID NO: 112831 - DNA, 15 bp, Homo sapiens
agggagtggccctga

SEQ ID NO: 112832 - DNA, 15 bp, Homo sapiens
gagggagtggccctg

SEQ ID NO: 112833 - DNA, 15 bp, Homo sapiens
ggagggagtggccct

SEQ ID NO: 112834 - DNA, 15 bp, Homo sapiens
gggagggagtggccc

SEQ ID NO: 112835 - DNA, 15 bp, Homo sapiens
agggagggagtggcc

SEQ ID NO: 112836 - DNA, 15 bp, Homo sapiens
tagggagggagtggc

SEQ ID NO: 112837 - DNA, 15 bp, Homo sapiens
ctagggagggagtgg

SEQ ID NO: 112838 - DNA, 15 bp, Homo sapiens
gctagggagggagtg

SEQ ID NO: 112839 - DNA, 15 bp, Homo sapiens
ggctagggagggagt

SEQ ID NO: 112840 - DNA, 15 bp, Homo sapiens
aggctagggagggag

SEQ ID NO: 112841 - DNA, 15 bp, Homo sapiens
aaggctagggaggga

SEQ ID NO: 112842 - DNA, 15 bp, Homo sapiens
gaaggctagggaggg

SEQ ID NO: 112843 - DNA, 15 bp, Homo sapiens
tgaaggctagggagg

SEQ ID NO: 112844 - DNA, 15 bp, Homo sapiens
atgaaggctagggag

SEQ ID NO: 112845 - DNA, 15 bp, Homo sapiens
gatgaaggctaggga

SEQ ID NO: 112846 - DNA, 15 bp, Homo sapiens
tgatgaaggctaggg

SEQ ID NO: 112847 - DNA, 15 bp, Homo sapiens
ctgatgaaggctagg

SEQ ID NO: 112848 - DNA, 15 bp, Homo sapiens
gctgatgaaggctag

SEQ ID NO: 112849 - DNA, 15 bp, Homo sapiens
tgctgatgaaggcta

SEQ ID NO: 112850 - DNA, 15 bp, Homo sapiens
ctgctgatgaaggct

SEQ ID NO: 112851 - DNA, 15 bp, Homo sapiens
tctgctgatgaaggc

SEQ ID NO: 112852 - DNA, 15 bp, Homo sapiens
ctctgctgatgaagg

SEQ ID NO: 112853 - DNA, 15 bp, Homo sapiens
gctctgctgatgaag

SEQ ID NO: 112854 - DNA, 15 bp, Homo sapiens
tgctctgctgatgaa

SEQ ID NO: 112855 - DNA, 15 bp, Homo sapiens
gtgctctgctgatga

SEQ ID NO: 112856 - DNA, 15 bp, Homo sapiens
ggtgctctgctgatg

SEQ ID NO: 112857 - DNA, 15 bp, Homo sapiens
gggtgctctgctgat

SEQ ID NO: 112858 - DNA, 15 bp, Homo sapiens
agggtgctctgctga

SEQ ID NO: 112859 - DNA, 15 bp, Homo sapiens
gagggtgctctgctg

SEQ ID NO: 112860 - DNA, 15 bp, Homo sapiens
ggagggtgctctgct

SEQ ID NO: 112861 - DNA, 15 bp, Homo sapiens
tggagggtgctctgc

SEQ ID NO: 112862 - DNA, 15 bp, Homo sapiens
atggagggtgctctg

SEQ ID NO: 112863 - DNA, 15 bp, Homo sapiens
gatggagggtgctct

SEQ ID NO: 112864 - DNA, 15 bp, Homo sapiens
ggatggagggtgctc

SEQ ID NO: 112865 - DNA, 15 bp, Homo sapiens
gggatggagggtgct

SEQ ID NO: 112866 - DNA, 15 bp, Homo sapiens
ggggatggagggtgc

SEQ ID NO: 112867 - DNA, 15 bp, Homo sapiens
gggggatggagggtg

SEQ ID NO: 112868 - DNA, 15 bp, Homo sapiens
agggggatggagggt

SEQ ID NO: 112869 - DNA, 15 bp, Homo sapiens
cagggggatggaggg

SEQ ID NO: 112870 - DNA, 15 bp, Homo sapiens
gcagggggatggagg

SEQ ID NO: 112871 - DNA, 15 bp, Homo sapiens
tgcagggggatggag

SEQ ID NO: 112872 - DNA, 15 bp, Homo sapiens
atgcagggggatgga

SEQ ID NO: 112873 - DNA, 15 bp, Homo sapiens
aatgcagggggatgg

SEQ ID NO: 112874 - DNA, 15 bp, Homo sapiens
caatgcagggggatg

SEQ ID NO: 112875 - DNA, 15 bp, Homo sapiens
gcaatgcagggggat

SEQ ID NO: 112876 - DNA, 15 bp, Homo sapiens
agcaatgcaggggga

SEQ ID NO: 112877 - DNA, 15 bp, Homo sapiens
gagcaatgcaggggg

SEQ ID NO: 112878 - DNA, 15 bp, Homo sapiens
agagcaatgcagggg

SEQ ID NO: 112879 - DNA, 15 bp, Homo sapiens
aagagcaatgcaggg

SEQ ID NO: 112880 - DNA, 15 bp, Homo sapiens
gaagagcaatgcagg

SEQ ID NO: 112881 - DNA, 15 bp, Homo sapiens
agaagagcaatgcag

SEQ ID NO: 112882 - DNA, 15 bp, Homo sapiens
cagaagagcaatgca

SEQ ID NO: 112883 - DNA, 15 bp, Homo sapiens
acagaagagcaatgc

SEQ ID NO: 112884 - DNA, 15 bp, Homo sapiens
cacagaagagcaatg

SEQ ID NO: 112885 - DNA, 15 bp, Homo sapiens
tcacagaagagcaat

SEQ ID NO: 112886 - DNA, 15 bp, Homo sapiens
ttcacagaagagcaa

SEQ ID NO: 112887 - DNA, 15 bp, Homo sapiens
tttcacagaagagca

SEQ ID NO: 112888 - DNA, 15 bp, Homo sapiens
ctttcacagaagagc

SEQ ID NO: 112889 - DNA, 15 bp, Homo sapiens
gctttcacagaagag

SEQ ID NO: 112890 - DNA, 15 bp, Homo sapiens
tgctttcacagaaga

SEQ ID NO: 112891 - DNA, 15 bp, Homo sapiens
ttgctttcacagaag

SEQ ID NO: 112892 - DNA, 15 bp, Homo sapiens
tttgctttcacagaa

SEQ ID NO: 112893 - DNA, 15 bp, Homo sapiens
atttgctttcacaga

SEQ ID NO: 112894 - DNA, 15 bp, Homo sapiens
tatttgctttcacag

SEQ ID NO: 112895 - DNA, 15 bp, Homo sapiens
gtatttgctttcaca

SEQ ID NO: 112896 - DNA, 15 bp, Homo sapiens
agtatttgctttcac

SEQ ID NO: 112897 - DNA, 15 bp, Homo sapiens
tagtatttgctttca

SEQ ID NO: 112898 - DNA, 15 bp, Homo sapiens
ttagtatttgctttc

SEQ ID NO: 112899 - DNA, 15 bp, Homo sapiens
tttagtatttgcttt

SEQ ID NO: 112900 - DNA, 15 bp, Homo sapiens
ctttagtatttgctt

SEQ ID NO: 112901 - DNA, 15 bp, Homo sapiens
cctttagtatttgct

SEQ ID NO: 112902 - DNA, 15 bp, Homo sapiens
tcctttagtatttgc

SEQ ID NO: 112903 - DNA, 15 bp, Homo sapiens
atcctttagtatttg

SEQ ID NO: 112904 - DNA, 15 bp, Homo sapiens
catcctttagtattt

SEQ ID NO: 112905 - DNA, 15 bp, Homo sapiens
gcatcctttagtatt

SEQ ID NO: 112906 - DNA, 15 bp, Homo sapiens
ggcatcctttagtat

SEQ ID NO: 112907 - DNA, 15 bp, Homo sapiens
tggcatcctttagta

SEQ ID NO: 112908 - DNA, 15 bp, Homo sapiens
atggcatcctttagt

SEQ ID NO: 112909 - DNA, 15 bp, Homo sapiens
gatggcatcctttag

SEQ ID NO: 112910 - DNA, 15 bp, Homo sapiens
ggatggcatccttta

SEQ ID NO: 112911 - DNA, 15 bp, Homo sapiens
aggatggcatccttt

SEQ ID NO: 112912 - DNA, 15 bp, Homo sapiens
gaggatggcatcctt

SEQ ID NO: 112913 - DNA, 15 bp, Homo sapiens
agaggatggcatcct

SEQ ID NO: 112914 - DNA, 15 bp, Homo sapiens
cagaggatggcatcc

SEQ ID NO: 112915 - DNA, 15 bp, Homo sapiens
ccagaggatggcatc

SEQ ID NO: 112916 - DNA, 15 bp, Homo sapiens
tccagaggatggcat

SEQ ID NO: 112917 - DNA, 15 bp, Homo sapiens
ttccagaggatggca

SEQ ID NO: 112918 - DNA, 15 bp, Homo sapiens
attccagaggatggc

SEQ ID NO: 112919 - DNA, 15 bp, Homo sapiens
gattccagaggatgg

SEQ ID NO: 112920 - DNA, 15 bp, Homo sapiens
ggattccagaggatg

SEQ ID NO: 112921 - DNA, 15 bp, Homo sapiens
aggattccagaggat

SEQ ID NO: 112922 - DNA, 15 bp, Homo sapiens
taggattccagagga

SEQ ID NO: 112923 - DNA, 15 bp, Homo sapiens
ttaggattccagagg

SEQ ID NO: 112924 - DNA, 15 bp, Homo sapiens
attaggattccagag

SEQ ID NO: 112925 - DNA, 15 bp, Homo sapiens
cattaggattccaga

SEQ ID NO: 112926 - DNA, 15 bp, Homo sapiens
ccattaggattccag

SEQ ID NO: 112927 - DNA, 15 bp, Homo sapiens
gccattaggattcca

SEQ ID NO: 112928 - DNA, 15 bp, Homo sapiens
tgccattaggattcc

SEQ ID NO: 112929 - DNA, 15 bp, Homo sapiens
ctgccattaggattc

SEQ ID NO: 112930 - DNA, 15 bp, Homo sapiens
cctgccattaggatt

SEQ ID NO: 112931 - DNA, 15 bp, Homo sapiens
gcctgccattaggat

SEQ ID NO: 112932 - DNA, 15 bp, Homo sapiens
tgcctgccattagga

SEQ ID NO: 112933 - DNA, 15 bp, Homo sapiens
ttgcctgccattagg

SEQ ID NO: 112934 - DNA, 15 bp, Homo sapiens
tttgcctgccattag

SEQ ID NO: 112935 - DNA, 15 bp, Homo sapiens
ctttgcctgccatta

SEQ ID NO: 112936 - DNA, 15 bp, Homo sapiens
cctttgcctgccatt

SEQ ID NO: 112937 - DNA, 15 bp, Homo sapiens
ccctttgcctgccat

SEQ ID NO: 112938 - DNA, 15 bp, Homo sapiens
tccctttgcctgcca

SEQ ID NO: 112939 - DNA, 15 bp, Homo sapiens
ctccctttgcctgcc

SEQ ID NO: 112940 - DNA, 15 bp, Homo sapiens
tctccctttgcctgc

SEQ ID NO: 112941 - DNA, 15 bp, Homo sapiens
ctctccctttgcctg

SEQ ID NO: 112942 - DNA, 15 bp, Homo sapiens
tctctccctttgcct

SEQ ID NO: 112943 - DNA, 15 bp, Homo sapiens
ctctctccctttgcc

SEQ ID NO: 112944 - DNA, 15 bp, Homo sapiens
cctctctccctttgc

SEQ ID NO: 112945 - DNA, 15 bp, Homo sapiens
tcctctctccctttg

SEQ ID NO: 112946 - DNA, 15 bp, Homo sapiens
ttcctctctcccttt

SEQ ID NO: 112947 - DNA, 15 bp, Homo sapiens
cttcctctctccctt

SEQ ID NO: 112948 - DNA, 15 bp, Homo sapiens
ccttcctctctccct

SEQ ID NO: 112949 - DNA, 15 bp, Homo sapiens
cccttcctctctccc

SEQ ID NO: 112950 - DNA, 15 bp, Homo sapiens
acccttcctctctcc

SEQ ID NO: 112951 - DNA, 15 bp, Homo sapiens
cacccttcctctctc

SEQ ID NO: 112952 - DNA, 15 bp, Homo sapiens
tcacccttcctctct

SEQ ID NO: 112953 - DNA, 15 bp, Homo sapiens
gtcacccttcctctc

SEQ ID NO: 112954 - DNA, 15 bp, Homo sapiens
cgtcacccttcctct

SEQ ID NO: 112955 - DNA, 15 bp, Homo sapiens
ccgtcacccttcctc

SEQ ID NO: 112956 - DNA, 15 bp, Homo sapiens
gccgtcacccttcct

SEQ ID NO: 112957 - DNA, 15 bp, Homo sapiens
agccgtcacccttcc

SEQ ID NO: 112958 - DNA, 15 bp, Homo sapiens
aagccgtcacccttc

SEQ ID NO: 112959 - DNA, 15 bp, Homo sapiens
gaagccgtcaccctt

SEQ ID NO: 112960 - DNA, 15 bp, Homo sapiens
agaagccgtcaccct

SEQ ID NO: 112961 - DNA, 15 bp, Homo sapiens
cagaagccgtcaccc

SEQ ID NO: 112962 - DNA, 15 bp, Homo sapiens
ccagaagccgtcacc

SEQ ID NO: 112963 - DNA, 15 bp, Homo sapiens
gccagaagccgtcac

SEQ ID NO: 112964 - DNA, 15 bp, Homo sapiens
tgccagaagccgtca

SEQ ID NO: 112965 - DNA, 15 bp, Homo sapiens
gtgccagaagccgtc

SEQ ID NO: 112966 - DNA, 15 bp, Homo sapiens
agtgccagaagccgt

SEQ ID NO: 112967 - DNA, 15 bp, Homo sapiens
aagtgccagaagccg

SEQ ID NO: 112968 - DNA, 15 bp, Homo sapiens
taagtgccagaagcc

SEQ ID NO: 112969 - DNA, 15 bp, Homo sapiens
ctaagtgccagaagc

SEQ ID NO: 112970 - DNA, 15 bp, Homo sapiens
tctaagtgccagaag

SEQ ID NO: 112971 - DNA, 15 bp, Homo sapiens
ttctaagtgccagaa

SEQ ID NO: 112972 - DNA, 15 bp, Homo sapiens
tttctaagtgccaga

SEQ ID NO: 112973 - DNA, 15 bp, Homo sapiens
ttttctaagtgccag

SEQ ID NO: 112974 - DNA, 15 bp, Homo sapiens
gttttctaagtgcca

SEQ ID NO: 112975 - DNA, 15 bp, Homo sapiens
tgttttctaagtgcc

SEQ ID NO: 112976 - DNA, 15 bp, Homo sapiens
ttgttttctaagtgc

SEQ ID NO: 112977 - DNA, 15 bp, Homo sapiens
tttgttttctaagtg

SEQ ID NO: 112978 - DNA, 15 bp, Homo sapiens
ttttgttttctaagt

SEQ ID NO: 112979 - DNA, 15 bp, Homo sapiens
tttttgttttctaag

SEQ ID NO: 112980 - DNA, 15 bp, Homo sapiens
ctttttgttttctaa

SEQ ID NO: 112981 - DNA, 15 bp, Homo sapiens
tctttttgttttcta

SEQ ID NO: 112982 - DNA, 15 bp, Homo sapiens
ttctttttgttttct

SEQ ID NO: 112983 - DNA, 15 bp, Homo sapiens
gttctttttgttttc

SEQ ID NO: 112984 - DNA, 15 bp, Homo sapiens
tgttctttttgtttt

SEQ ID NO: 112985 - DNA, 15 bp, Homo sapiens
ttgttctttttgttt

SEQ ID NO: 112986 - DNA, 15 bp, Homo sapiens
tttgttctttttgtt

SEQ ID NO: 112987 - DNA, 15 bp, Homo sapiens
ttttgttctttttgt

SEQ ID NO: 112988 - DNA, 15 bp, Homo sapiens
tttttgttctttttg

SEQ ID NO: 112989 - DNA, 15 bp, Homo sapiens
tttttttgttctttt

SEQ ID NO: 112990 - DNA, 15 bp, Homo sapiens
ctttttttgttcttt

SEQ ID NO: 112991 - DNA, 15 bp, Homo sapiens
tctttttttgttctt

SEQ ID NO: 112992 - DNA, 15 bp, Homo sapiens
ctctttttttgttct

SEQ ID NO: 112993 - DNA, 15 bp, Homo sapiens
tctctttttttgttc

SEQ ID NO: 112994 - DNA, 15 bp, Homo sapiens
ttctctttttttgtt

SEQ ID NO: 112995 - DNA, 15 bp, Homo sapiens
tttctctttttttgt

SEQ ID NO: 112996 - DNA, 15 bp, Homo sapiens
gtttctctttttttg

SEQ ID NO: 112997 - DNA, 15 bp, Homo sapiens
ggtttctcttttttt

SEQ ID NO: 112998 - DNA, 15 bp, Homo sapiens
gggtttctctttttt

SEQ ID NO: 112999 - DNA, 15 bp, Homo sapiens
ggggtttctcttttt

SEQ ID NO: 113000 - DNA, 15 bp, Homo sapiens
gggggtttctctttt

SEQ ID NO: 113001 - DNA, 15 bp, Homo sapiens
tgggggtttctcttt

SEQ ID NO: 113002 - DNA, 15 bp, Homo sapiens
ttgggggtttctctt

SEQ ID NO: 113003 - DNA, 15 bp, Homo sapiens
cttgggggtttctct

SEQ ID NO: 113004 - DNA, 15 bp, Homo sapiens
gcttgggggtttctc

SEQ ID NO: 113005 - DNA, 15 bp, Homo sapiens
ggcttgggggtttct

SEQ ID NO: 113006 - DNA, 15 bp, Homo sapiens
aggcttgggggtttc

SEQ ID NO: 113007 - DNA, 15 bp, Homo sapiens
caggcttgggggttt

SEQ ID NO: 113008 - DNA, 15 bp, Homo sapiens
ccaggcttgggggtt

SEQ ID NO: 113009 - DNA, 15 bp, Homo sapiens
tccaggcttgggggt

SEQ ID NO: 113010 - DNA, 15 bp, Homo sapiens
ttccaggcttggggg

SEQ ID NO: 113011 - DNA, 15 bp, Homo sapiens
gttccaggcttgggg

SEQ ID NO: 113012 - DNA, 15 bp, Homo sapiens
cgttccaggcttggg

SEQ ID NO: 113013 - DNA, 15 bp, Homo sapiens
gcgttccaggcttgg

SEQ ID NO: 113014 - DNA, 15 bp, Homo sapiens
tgcgttccaggcttg

SEQ ID NO: 113015 - DNA, 15 bp, Homo sapiens
ctgcgttccaggctt

SEQ ID NO: 113016 - DNA, 15 bp, Homo sapiens
tctgcgttccaggct

SEQ ID NO: 113017 - DNA, 15 bp, Homo sapiens
ctctgcgttccaggc

SEQ ID NO: 113018 - DNA, 15 bp, Homo sapiens
tctctgcgttccagg

SEQ ID NO: 113019 - DNA, 15 bp, Homo sapiens
ctctctgcgttccag

SEQ ID NO: 113020 - DNA, 15 bp, Homo sapiens
cctctctgcgttcca

SEQ ID NO: 113021 - DNA, 15 bp, Homo sapiens
acctctctgcgttcc

SEQ ID NO: 113022 - DNA, 15 bp, Homo sapiens
gacctctctgcgttc

SEQ ID NO: 113023 - DNA, 15 bp, Homo sapiens
agacctctctgcgtt

SEQ ID NO: 113024 - DNA, 15 bp, Homo sapiens
aagacctctctgcgt

SEQ ID NO: 113025 - DNA, 15 bp, Homo sapiens
aaagacctctctgcg

SEQ ID NO: 113026 - DNA, 15 bp, Homo sapiens
taaagacctctctgc

SEQ ID NO: 113027 - DNA, 15 bp, Homo sapiens
gtaaagacctctctg

SEQ ID NO: 113028 - DNA, 15 bp, Homo sapiens
agtaaagacctctct

SEQ ID NO: 113029 - DNA, 15 bp, Homo sapiens
cagtaaagacctctc

SEQ ID NO: 113030 - DNA, 15 bp, Homo sapiens
gcagtaaagacctct

SEQ ID NO: 113031 - DNA, 15 bp, Homo sapiens
agcagtaaagacctc

SEQ ID NO: 113032 - DNA, 15 bp, Homo sapiens
cagcagtaaagacct

SEQ ID NO: 113033 - DNA, 15 bp, Homo sapiens
ccagcagtaaagacc

SEQ ID NO: 113034 - DNA, 15 bp, Homo sapiens
cccagcagtaaagac

SEQ ID NO: 113035 - DNA, 15 bp, Homo sapiens
tcccagcagtaaaga

SEQ ID NO: 113036 - DNA, 15 bp, Homo sapiens
atcccagcagtaaag

SEQ ID NO: 113037 - DNA, 15 bp, Homo sapiens
gatcccagcagtaaa

SEQ ID NO: 113038 - DNA, 15 bp, Homo sapiens
ggatcccagcagtaa

SEQ ID NO: 113039 - DNA, 15 bp, Homo sapiens
tggatcccagcagta

SEQ ID NO: 113040 - DNA, 15 bp, Homo sapiens
gtggatcccagcagt

SEQ ID NO: 113041 - DNA, 15 bp, Homo sapiens
cgtggatcccagcag

SEQ ID NO: 113042 - DNA, 15 bp, Homo sapiens
ccgtggatcccagca

SEQ ID NO: 113043 - DNA, 15 bp, Homo sapiens
tccgtggatcccagc

SEQ ID NO: 113044 - DNA, 15 bp, Homo sapiens
ttccgtggatcccag

SEQ ID NO: 113045 - DNA, 15 bp, Homo sapiens
tttccgtggatccca

SEQ ID NO: 113046 - DNA, 15 bp, Homo sapiens
ttttccgtggatccc

SEQ ID NO: 113047 - DNA, 15 bp, Homo sapiens
gttttccgtggatcc

SEQ ID NO: 113048 - DNA, 15 bp, Homo sapiens
tgttttccgtggatc

SEQ ID NO: 113049 - DNA, 15 bp, Homo sapiens
atgttttccgtggat

SEQ ID NO: 113050 - DNA, 15 bp, Homo sapiens
catgttttccgtgga

SEQ ID NO: 113051 - DNA, 15 bp, Homo sapiens
acatgttttccgtgg

SEQ ID NO: 113052 - DNA, 15 bp, Homo sapiens
gacatgttttccgtg

SEQ ID NO: 113053 - DNA, 15 bp, Homo sapiens
agacatgttttccgt

SEQ ID NO: 113054 - DNA, 15 bp, Homo sapiens
cagacatgttttccg

SEQ ID NO: 113055 - DNA, 15 bp, Homo sapiens
acagacatgttttcc

SEQ ID NO: 113056 - DNA, 15 bp, Homo sapiens
gacagacatgttttc

SEQ ID NO: 113057 - DNA, 15 bp, Homo sapiens
ggacagacatgtttt

SEQ ID NO: 113058 - DNA, 15 bp, Homo sapiens
aggacagacatgttt

SEQ ID NO: 113059 - DNA, 15 bp, Homo sapiens
taggacagacatgtt

SEQ ID NO: 113060 - DNA, 15 bp, Homo sapiens
ctaggacagacatgt

SEQ ID NO: 113061 - DNA, 15 bp, Homo sapiens
gctaggacagacatg

SEQ ID NO: 113062 - DNA, 15 bp, Homo sapiens
ggctaggacagacat

SEQ ID NO: 113063 - DNA, 15 bp, Homo sapiens
tggctaggacagaca

SEQ ID NO: 113064 - DNA, 15 bp, Homo sapiens
ttggctaggacagac

SEQ ID NO: 113065 - DNA, 15 bp, Homo sapiens
cttggctaggacaga

SEQ ID NO: 113066 - DNA, 15 bp, Homo sapiens
tcttggctaggacag

SEQ ID NO: 113067 - DNA, 15 bp, Homo sapiens
atcttggctaggaca

SEQ ID NO: 113068 - DNA, 15 bp, Homo sapiens
gatcttggctaggac

SEQ ID NO: 113069 - DNA, 15 bp, Homo sapiens
tgatcttggctagga

SEQ ID NO: 113070 - DNA, 15 bp, Homo sapiens
atgatcttggctagg

SEQ ID NO: 113071 - DNA, 15 bp, Homo sapiens
tatgatcttggctag

SEQ ID NO: 113072 - DNA, 15 bp, Homo sapiens
atatgatcttggcta

SEQ ID NO: 113073 - DNA, 15 bp, Homo sapiens
catatgatcttggct

SEQ ID NO: 113074 - DNA, 15 bp, Homo sapiens
tcatatgatcttggc

SEQ ID NO: 113075 - DNA, 15 bp, Homo sapiens
ttcatatgatcttgg

SEQ ID NO: 113076 - DNA, 15 bp, Homo sapiens
cttcatatgatcttg

SEQ ID NO: 113077 - DNA, 15 bp, Homo sapiens
tcttcatatgatctt

SEQ ID NO: 113078 - DNA, 15 bp, Homo sapiens
ctcttcatatgatct

SEQ ID NO: 113079 - DNA, 15 bp, Homo sapiens
actcttcatatgatc

SEQ ID NO: 113080 - DNA, 15 bp, Homo sapiens
aactcttcatatgat

SEQ ID NO: 113081 - DNA, 15 bp, Homo sapiens
aaactcttcatatga

SEQ ID NO: 113082 - DNA, 15 bp, Homo sapiens
caaactcttcatatg

SEQ ID NO: 113083 - DNA, 15 bp, Homo sapiens
ccaaactcttcatat

SEQ ID NO: 113084 - DNA, 15 bp, Homo sapiens
gccaaactcttcata

SEQ ID NO: 113085 - DNA, 15 bp, Homo sapiens
tgccaaactcttcat

SEQ ID NO: 113086 - DNA, 15 bp, Homo sapiens
gtgccaaactcttca

SEQ ID NO: 113087 - DNA, 15 bp, Homo sapiens
cgtgccaaactcttc

SEQ ID NO: 113088 - DNA, 15 bp, Homo sapiens
ccgtgccaaactctt

SEQ ID NO: 113089 - DNA, 15 bp, Homo sapiens
tccgtgccaaactct

SEQ ID NO: 113090 - DNA, 15 bp, Homo sapiens
ctccgtgccaaactc

SEQ ID NO: 113091 - DNA, 15 bp, Homo sapiens
cctccgtgccaaact

SEQ ID NO: 113092 - DNA, 15 bp, Homo sapiens
gcctccgtgccaaac

SEQ ID NO: 113093 - DNA, 15 bp, Homo sapiens
agcctccgtgccaaa

SEQ ID NO: 113094 - DNA, 15 bp, Homo sapiens
cagcctccgtgccaa

SEQ ID NO: 113095 - DNA, 15 bp, Homo sapiens
tcagcctccgtgcca

SEQ ID NO: 113096 - DNA, 15 bp, Homo sapiens
ctcagcctccgtgcc

SEQ ID NO: 113097 - DNA, 15 bp, Homo sapiens
tctcagcctccgtgc

SEQ ID NO: 113098 - DNA, 15 bp, Homo sapiens
ttctcagcctccgtg

SEQ ID NO: 113099 - DNA, 15 bp, Homo sapiens
attctcagcctccgt

SEQ ID NO: 113100 - DNA, 15 bp, Homo sapiens
cattctcagcctccg

SEQ ID NO: 113101 - DNA, 15 bp, Homo sapiens
tcattctcagcctcc

SEQ ID NO: 113102 - DNA, 15 bp, Homo sapiens
gtcattctcagcctc

SEQ ID NO: 113103 - DNA, 15 bp, Homo sapiens
ggtcattctcagcct

SEQ ID NO: 113104 - DNA, 15 bp, Homo sapiens
aggtcattctcagcc

SEQ ID NO: 113105 - DNA, 15 bp, Homo sapiens
caggtcattctcagc

SEQ ID NO: 113106 - DNA, 15 bp, Homo sapiens
ccaggtcattctcag

SEQ ID NO: 113107 - DNA, 15 bp, Homo sapiens
gccaggtcattctca

SEQ ID NO: 113108 - DNA, 15 bp, Homo sapiens
tgccaggtcattctc

SEQ ID NO: 113109 - DNA, 15 bp, Homo sapiens
atgccaggtcattct

SEQ ID NO: 113110 - DNA, 15 bp, Homo sapiens
tatgccaggtcattc

SEQ ID NO: 113111 - DNA, 15 bp, Homo sapiens
ctatgccaggtcatt

SEQ ID NO: 113112 - DNA, 15 bp, Homo sapiens
tctatgccaggtcat

SEQ ID NO: 113113 - DNA, 15 bp, Homo sapiens
atctatgccaggtca

SEQ ID NO: 113114 - DNA, 15 bp, Homo sapiens
catctatgccaggtc

SEQ ID NO: 113115 - DNA, 15 bp, Homo sapiens
ccatctatgccaggt

SEQ ID NO: 113116 - DNA, 15 bp, Homo sapiens
accatctatgccagg

SEQ ID NO: 113117 - DNA, 15 bp, Homo sapiens
aaccatctatgccag

SEQ ID NO: 113118 - DNA, 15 bp, Homo sapiens
aaaccatctatgcca

SEQ ID NO: 113119 - DNA, 15 bp, Homo sapiens
caaaccatctatgcc

SEQ ID NO: 113120 - DNA, 15 bp, Homo sapiens
gcaaaccatctatgc

SEQ ID NO: 113121 - DNA, 15 bp, Homo sapiens
ggcaaaccatctatg

SEQ ID NO: 113122 - DNA, 15 bp, Homo sapiens
tggcaaaccatctat

SEQ ID NO: 113123 - DNA, 15 bp, Homo sapiens
ctggcaaaccatcta

SEQ ID NO: 113124 - DNA, 15 bp, Homo sapiens
actggcaaaccatct

SEQ ID NO: 113125 - DNA, 15 bp, Homo sapiens
aactggcaaaccatc

SEQ ID NO: 113126 - DNA, 15 bp, Homo sapiens
taactggcaaaccat

SEQ ID NO: 113127 - DNA, 15 bp, Homo sapiens
ctaactggcaaacca

SEQ ID NO: 113128 - DNA, 15 bp, Homo sapiens
cctaactggcaaacc

SEQ ID NO: 113129 - DNA, 15 bp, Homo sapiens
tcctaactggcaaac

SEQ ID NO: 113130 - DNA, 15 bp, Homo sapiens
atcctaactggcaaa

SEQ ID NO: 113131 - DNA, 15 bp, Homo sapiens
catcctaactggcaa

SEQ ID NO: 113132 - DNA, 15 bp, Homo sapiens
acatcctaactggca

SEQ ID NO: 113133 - DNA, 15 bp, Homo sapiens
gacatcctaactggc

SEQ ID NO: 113134 - DNA, 15 bp, Homo sapiens
agacatcctaactgg

SEQ ID NO: 113135 - DNA, 15 bp, Homo sapiens
gagacatcctaactg

SEQ ID NO: 113136 - DNA, 15 bp, Homo sapiens
tgagacatcctaact

SEQ ID NO: 113137 - DNA, 15 bp, Homo sapiens
ttgagacatcctaac

SEQ ID NO: 113138 - DNA, 15 bp, Homo sapiens
attgagacatcctaa

SEQ ID NO: 113139 - DNA, 15 bp, Homo sapiens
aattgagacatccta

SEQ ID NO: 113140 - DNA, 15 bp, Homo sapiens
aaattgagacatcct

SEQ ID NO: 113141 - DNA, 15 bp, Homo sapiens
caaattgagacatcc

SEQ ID NO: 113142 - DNA, 15 bp, Homo sapiens
tcaaattgagacatc

SEQ ID NO: 113143 - DNA, 15 bp, Homo sapiens
ctcaaattgagacat

SEQ ID NO: 113144 - DNA, 15 bp, Homo sapiens
gctcaaattgagaca

SEQ ID NO: 113145 - DNA, 15 bp, Homo sapiens
ggctcaaattgagac

SEQ ID NO: 113146 - DNA, 15 bp, Homo sapiens
aggctcaaattgaga

SEQ ID NO: 113147 - DNA, 15 bp, Homo sapiens
aaggctcaaattgag

SEQ ID NO: 113148 - DNA, 15 bp, Homo sapiens
aaaggctcaaattga

SEQ ID NO: 113149 - DNA, 15 bp, Homo sapiens
caaaggctcaaattg

SEQ ID NO: 113150 - DNA, 15 bp, Homo sapiens
gcaaaggctcaaatt

SEQ ID NO: 113151 - DNA, 15 bp, Homo sapiens
agcaaaggctcaaat

SEQ ID NO: 113152 - DNA, 15 bp, Homo sapiens
aagcaaaggctcaaa

SEQ ID NO: 113153 - DNA, 15 bp, Homo sapiens
aaagcaaaggctcaa

SEQ ID NO: 113154 - DNA, 15 bp, Homo sapiens
aaaagcaaaggctca

SEQ ID NO: 113155 - DNA, 15 bp, Homo sapiens
caaaagcaaaggctc

SEQ ID NO: 113156 - DNA, 15 bp, Homo sapiens
ccaaaagcaaaggct

SEQ ID NO: 113157 - DNA, 15 bp, Homo sapiens
accaaaagcaaaggc

SEQ ID NO: 113158 - DNA, 15 bp, Homo sapiens
caccaaaagcaaagg

SEQ ID NO: 113159 - DNA, 15 bp, Homo sapiens
ccaccaaaagcaaag

SEQ ID NO: 113160 - DNA, 15 bp, Homo sapiens
tccaccaaaagcaaa

SEQ ID NO: 113161 - DNA, 15 bp, Homo sapiens
atccaccaaaagcaa

SEQ ID NO: 113162 - DNA, 15 bp, Homo sapiens
tatccaccaaaagca

SEQ ID NO: 113163 - DNA, 15 bp, Homo sapiens
ttatccaccaaaagc

SEQ ID NO: 113164 - DNA, 15 bp, Homo sapiens
gttatccaccaaaag

SEQ ID NO: 113165 - DNA, 15 bp, Homo sapiens
agttatccaccaaaa

SEQ ID NO: 113166 - DNA, 15 bp, Homo sapiens
gagttatccaccaaa

SEQ ID NO: 113167 - DNA, 15 bp, Homo sapiens
tgagttatccaccaa

SEQ ID NO: 113168 - DNA, 15 bp, Homo sapiens
ctgagttatccacca

SEQ ID NO: 113169 - DNA, 15 bp, Homo sapiens
gctgagttatccacc

SEQ ID NO: 113170 - DNA, 15 bp, Homo sapiens
agctgagttatccac

SEQ ID NO: 113171 - DNA, 15 bp, Homo sapiens
gagctgagttatcca

SEQ ID NO: 113172 - DNA, 15 bp, Homo sapiens
ggagctgagttatcc

SEQ ID NO: 113173 - DNA, 15 bp, Homo sapiens
gggagctgagttatc

SEQ ID NO: 113174 - DNA, 15 bp, Homo sapiens
ggggagctgagttat

SEQ ID NO: 113175 - DNA, 15 bp, Homo sapiens
aggggagctgagtta

SEQ ID NO: 113176 - DNA, 15 bp, Homo sapiens
gaggggagctgagtt

SEQ ID NO: 113177 - DNA, 15 bp, Homo sapiens
agaggggagctgagt

SEQ ID NO: 113178 - DNA, 15 bp, Homo sapiens
aagaggggagctgag

SEQ ID NO: 113179 - DNA, 15 bp, Homo sapiens
caagaggggagctga

SEQ ID NO: 113180 - DNA, 15 bp, Homo sapiens
acaagaggggagctg

SEQ ID NO: 113181 - DNA, 15 bp, Homo sapiens
tacaagaggggagct

SEQ ID NO: 113182 - DNA, 15 bp, Homo sapiens
ttacaagaggggagc

SEQ ID NO: 113183 - DNA, 15 bp, Homo sapiens
gttacaagaggggag

SEQ ID NO: 113184 - DNA, 15 bp, Homo sapiens
ggttacaagagggga

SEQ ID NO: 113185 - DNA, 15 bp, Homo sapiens
aggttacaagagggg

SEQ ID NO: 113186 - DNA, 15 bp, Homo sapiens
caggttacaagaggg

SEQ ID NO: 113187 - DNA, 15 bp, Homo sapiens
ccaggttacaagagg

SEQ ID NO: 113188 - DNA, 15 bp, Homo sapiens
tccaggttacaagag

SEQ ID NO: 113189 - DNA, 15 bp, Homo sapiens
ttccaggttacaaga

SEQ ID NO: 113190 - DNA, 15 bp, Homo sapiens
tttccaggttacaag

SEQ ID NO: 113191 - DNA, 15 bp, Homo sapiens
ctttccaggttacaa

SEQ ID NO: 113192 - DNA, 15 bp, Homo sapiens
actttccaggttaca

SEQ ID NO: 113193 - DNA, 15 bp, Homo sapiens
aactttccaggttac

SEQ ID NO: 113194 - DNA, 15 bp, Homo sapiens
caactttccaggtta

SEQ ID NO: 113195 - DNA, 15 bp, Homo sapiens
ccaactttccaggtt

SEQ ID NO: 113196 - DNA, 15 bp, Homo sapiens
accaactttccaggt

SEQ ID NO: 113197 - DNA, 15 bp, Homo sapiens
aaccaactttccagg

SEQ ID NO: 113198 - DNA, 15 bp, Homo sapiens
caaccaactttccag

SEQ ID NO: 113199 - DNA, 15 bp, Homo sapiens
gcaaccaactttcca

SEQ ID NO: 113200 - DNA, 15 bp, Homo sapiens
ggcaaccaactttcc

SEQ ID NO: 113201 - DNA, 15 bp, Homo sapiens
aggcaaccaactttc

SEQ ID NO: 113202 - DNA, 15 bp, Homo sapiens
aaggcaaccaacttt

SEQ ID NO: 113203 - DNA, 15 bp, Homo sapiens
aaaggcaaccaactt

SEQ ID NO: 113204 - DNA, 15 bp, Homo sapiens
taaaggcaaccaact

SEQ ID NO: 113205 - DNA, 15 bp, Homo sapiens
ataaaggcaaccaac

SEQ ID NO: 113206 - DNA, 15 bp, Homo sapiens
gataaaggcaaccaa

SEQ ID NO: 113207 - DNA, 15 bp, Homo sapiens
tgataaaggcaacca

SEQ ID NO: 113208 - DNA, 15 bp, Homo sapiens
atgataaaggcaacc

SEQ ID NO: 113209 - DNA, 15 bp, Homo sapiens
gatgataaaggcaac

SEQ ID NO: 113210 - DNA, 15 bp, Homo sapiens
ggatgataaaggcaa

SEQ ID NO: 113211 - DNA, 15 bp, Homo sapiens
aggatgataaaggca

SEQ ID NO: 113212 - DNA, 15 bp, Homo sapiens
caggatgataaaggc

SEQ ID NO: 113213 - DNA, 15 bp, Homo sapiens
gcaggatgataaagg

SEQ ID NO: 113214 - DNA, 15 bp, Homo sapiens
agcaggatgataaag

SEQ ID NO: 113215 - DNA, 15 bp, Homo sapiens
cagcaggatgataaa

SEQ ID NO: 113216 - DNA, 15 bp, Homo sapiens
ccagcaggatgataa

SEQ ID NO: 113217 - DNA, 15 bp, Homo sapiens
accagcaggatgata

SEQ ID NO: 113218 - DNA, 15 bp, Homo sapiens
aaccagcaggatgat

SEQ ID NO: 113219 - DNA, 15 bp, Homo sapiens
aaaccagcaggatga

SEQ ID NO: 113220 - DNA, 15 bp, Homo sapiens
aaaaccagcaggatg

SEQ ID NO: 113221 - DNA, 15 bp, Homo sapiens
taaaaccagcaggat

SEQ ID NO: 113222 - DNA, 15 bp, Homo sapiens
ataaaaccagcagga

SEQ ID NO: 113223 - DNA, 15 bp, Homo sapiens
gataaaaccagcagg

SEQ ID NO: 113224 - DNA, 15 bp, Homo sapiens
ggataaaaccagcag

SEQ ID NO: 113225 - DNA, 15 bp, Homo sapiens
tggataaaaccagca

SEQ ID NO: 113226 - DNA, 15 bp, Homo sapiens
atggataaaaccagc

SEQ ID NO: 113227 - DNA, 15 bp, Homo sapiens
catggataaaaccag

SEQ ID NO: 113228 - DNA, 15 bp, Homo sapiens
ccatggataaaacca

SEQ ID NO: 113229 - DNA, 15 bp, Homo sapiens
tccatggataaaacc

SEQ ID NO: 113230 - DNA, 15 bp, Homo sapiens
gtccatggataaaac

SEQ ID NO: 113231 - DNA, 15 bp, Homo sapiens
agtccatggataaaa

SEQ ID NO: 113232 - DNA, 15 bp, Homo sapiens
cagtccatggataaa

SEQ ID NO: 113233 - DNA, 15 bp, Homo sapiens
tcagtccatggataa

SEQ ID NO: 113234 - DNA, 15 bp, Homo sapiens
ttcagtccatggata

SEQ ID NO: 113235 - DNA, 15 bp, Homo sapiens
gttcagtccatggat

SEQ ID NO: 113236 - DNA, 15 bp, Homo sapiens
tgttcagtccatgga

SEQ ID NO: 113237 - DNA, 15 bp, Homo sapiens
gtgttcagtccatgg

SEQ ID NO: 113238 - DNA, 15 bp, Homo sapiens
ggtgttcagtccatg

SEQ ID NO: 113239 - DNA, 15 bp, Homo sapiens
gggtgttcagtccat

SEQ ID NO: 113240 - DNA, 15 bp, Homo sapiens
tgggtgttcagtcca

SEQ ID NO: 113241 - DNA, 15 bp, Homo sapiens
ttgggtgttcagtcc

SEQ ID NO: 113242 - DNA, 15 bp, Homo sapiens
gttgggtgttcagtc

SEQ ID NO: 113243 - DNA, 15 bp, Homo sapiens
tgttgggtgttcagt

SEQ ID NO: 113244 - DNA, 15 bp, Homo sapiens
ctgttgggtgttcag

SEQ ID NO: 113245 - DNA, 15 bp, Homo sapiens
gctgttgggtgttca

SEQ ID NO: 113246 - DNA, 15 bp, Homo sapiens
tgctgttgggtgttc

SEQ ID NO: 113247 - DNA, 15 bp, Homo sapiens
ctgctgttgggtgtt

SEQ ID NO: 113248 - DNA, 15 bp, Homo sapiens
actgctgttgggtgt

SEQ ID NO: 113249 - DNA, 15 bp, Homo sapiens
cactgctgttgggtg

SEQ ID NO: 113250 - DNA, 15 bp, Homo sapiens
gcactgctgttgggt

SEQ ID NO: 113251 - DNA, 15 bp, Homo sapiens
tgcactgctgttggg

SEQ ID NO: 113252 - DNA, 15 bp, Homo sapiens
gtgcactgctgttgg

SEQ ID NO: 113253 - DNA, 15 bp, Homo sapiens
agtgcactgctgttg

SEQ ID NO: 113254 - DNA, 15 bp, Homo sapiens
tagtgcactgctgtt

SEQ ID NO: 113255 - DNA, 15 bp, Homo sapiens
atagtgcactgctgt

SEQ ID NO: 113256 - DNA, 15 bp, Homo sapiens
catagtgcactgctg

SEQ ID NO: 113257 - DNA, 15 bp, Homo sapiens
gcatagtgcactgct

SEQ ID NO: 113258 - DNA, 15 bp, Homo sapiens
agcatagtgcactgc

SEQ ID NO: 113259 - DNA, 15 bp, Homo sapiens
aagcatagtgcactg

SEQ ID NO: 113260 - DNA, 15 bp, Homo sapiens
aaagcatagtgcact

SEQ ID NO: 113261 - DNA, 15 bp, Homo sapiens
gaaagcatagtgcac

SEQ ID NO: 113262 - DNA, 15 bp, Homo sapiens
agaaagcatagtgca

SEQ ID NO: 113263 - DNA, 15 bp, Homo sapiens
tagaaagcatagtgc

SEQ ID NO: 113264 - DNA, 15 bp, Homo sapiens
atagaaagcatagtg

SEQ ID NO: 113265 - DNA, 15 bp, Homo sapiens
catagaaagcatagt

SEQ ID NO: 113266 - DNA, 15 bp, Homo sapiens
ccatagaaagcatag

SEQ ID NO: 113267 - DNA, 15 bp, Homo sapiens
gccatagaaagcata

SEQ ID NO: 113268 - DNA, 15 bp, Homo sapiens
tgccatagaaagcat

SEQ ID NO: 113269 - DNA, 15 bp, Homo sapiens
atgccatagaaagca

SEQ ID NO: 113270 - DNA, 15 bp, Homo sapiens
gatgccatagaaagc

SEQ ID NO: 113271 - DNA, 15 bp, Homo sapiens
agatgccatagaaag

SEQ ID NO: 113272 - DNA, 15 bp, Homo sapiens
aagatgccatagaaa

SEQ ID NO: 113273 - DNA, 15 bp, Homo sapiens
aaagatgccatagaa

SEQ ID NO: 113274 - DNA, 15 bp, Homo sapiens
gaaagatgccataga

SEQ ID NO: 113275 - DNA, 15 bp, Homo sapiens
tgaaagatgccatag

SEQ ID NO: 113276 - DNA, 15 bp, Homo sapiens
atgaaagatgccata

SEQ ID NO: 113277 - DNA, 15 bp, Homo sapiens
aatgaaagatgccat

SEQ ID NO: 113278 - DNA, 15 bp, Homo sapiens
gaatgaaagatgcca

SEQ ID NO: 113279 - DNA, 15 bp, Homo sapiens
agaatgaaagatgcc

SEQ ID NO: 113280 - DNA, 15 bp, Homo sapiens
gagaatgaaagatgc

SEQ ID NO: 113281 - DNA, 15 bp, Homo sapiens
tgagaatgaaagatg

SEQ ID NO: 113282 - DNA, 15 bp, Homo sapiens
atgagaatgaaagat

SEQ ID NO: 113283 - DNA, 15 bp, Homo sapiens
aatgagaatgaaaga

SEQ ID NO: 113284 - DNA, 15 bp, Homo sapiens
aaatgagaatgaaag

SEQ ID NO: 113285 - DNA, 15 bp, Homo sapiens
aaaatgagaatgaaa

SEQ ID NO: 113286 - DNA, 15 bp, Homo sapiens
taaaatgagaatgaa

SEQ ID NO: 113287 - DNA, 15 bp, Homo sapiens
ataaaatgagaatga

SEQ ID NO: 113288 - DNA, 15 bp, Homo sapiens
tataaaatgagaatg

SEQ ID NO: 113289 - DNA, 15 bp, Homo sapiens
atataaaatgagaat

SEQ ID NO: 113290 - DNA, 15 bp, Homo sapiens
aatataaaatgagaa

SEQ ID NO: 113291 - DNA, 15 bp, Homo sapiens
caatataaaatgaga

SEQ ID NO: 113292 - DNA, 15 bp, Homo sapiens
acaatataaaatgag

SEQ ID NO: 113293 - DNA, 15 bp, Homo sapiens
cacaatataaaatga

SEQ ID NO: 113294 - DNA, 15 bp, Homo sapiens
gcacaatataaaatg

SEQ ID NO: 113295 - DNA, 15 bp, Homo sapiens
agcacaatataaaat

SEQ ID NO: 113296 - DNA, 15 bp, Homo sapiens
tagcacaatataaaa

SEQ ID NO: 113297 - DNA, 15 bp, Homo sapiens
atagcacaatataaa

SEQ ID NO: 113298 - DNA, 15 bp, Homo sapiens
tatagcacaatataa

SEQ ID NO: 113299 - DNA, 15 bp, Homo sapiens
ttatagcacaatata

SEQ ID NO: 113300 - DNA, 15 bp, Homo sapiens
tttatagcacaatat

SEQ ID NO: 113301 - DNA, 15 bp, Homo sapiens
ttttatagcacaata

SEQ ID NO: 113302 - DNA, 15 bp, Homo sapiens
tttttatagcacaat

SEQ ID NO: 113303 - DNA, 15 bp, Homo sapiens
ctttttatagcacaa

SEQ ID NO: 113304 - DNA, 15 bp, Homo sapiens
cctttttatagcaca

SEQ ID NO: 113305 - DNA, 15 bp, Homo sapiens
tcctttttatagcac

SEQ ID NO: 113306 - DNA, 15 bp, Homo sapiens
atcctttttatagca

SEQ ID NO: 113307 - DNA, 15 bp, Homo sapiens
aatcctttttatagc

SEQ ID NO: 113308 - DNA, 15 bp, Homo sapiens
caatcctttttatag

SEQ ID NO: 113309 - DNA, 15 bp, Homo sapiens
acaatcctttttata

SEQ ID NO: 113310 - DNA, 15 bp, Homo sapiens
aacaatcctttttat

SEQ ID NO: 113311 - DNA, 15 bp, Homo sapiens
aaacaatccttttta

SEQ ID NO: 113312 - DNA, 15 bp, Homo sapiens
gaaacaatccttttt

SEQ ID NO: 113313 - DNA, 15 bp, Homo sapiens
agaaacaatcctttt

SEQ ID NO: 113314 - DNA, 15 bp, Homo sapiens
gagaaacaatccttt

SEQ ID NO: 113315 - DNA, 15 bp, Homo sapiens
ggagaaacaatcctt

SEQ ID NO: 113316 - DNA, 15 bp, Homo sapiens
tggagaaacaatcct

SEQ ID NO: 113317 - DNA, 15 bp, Homo sapiens
atggagaaacaatcc

SEQ ID NO: 113318 - DNA, 15 bp, Homo sapiens
tatggagaaacaatc

SEQ ID NO: 113319 - DNA, 15 bp, Homo sapiens
atatggagaaacaat

SEQ ID NO: 113320 - DNA, 15 bp, Homo sapiens
tatatggagaaacaa

SEQ ID NO: 113321 - DNA, 15 bp, Homo sapiens
atatatggagaaaca

SEQ ID NO: 113322 - DNA, 15 bp, Homo sapiens
tatatatggagaaac

SEQ ID NO: 113323 - DNA, 15 bp, Homo sapiens
atatatatggagaaa

SEQ ID NO: 113324 - DNA, 15 bp, Homo sapiens
tatatatatggagaa

SEQ ID NO: 113325 - DNA, 15 bp, Homo sapiens
atatatatatggaga

SEQ ID NO: 113326 - DNA, 15 bp, Homo sapiens
aatatatatatggag

SEQ ID NO: 113327 - DNA, 15 bp, Homo sapiens
taatatatatatgga

SEQ ID NO: 113328 - DNA, 15 bp, Homo sapiens
ataatatatatatgg

SEQ ID NO: 113329 - DNA, 15 bp, Homo sapiens
tataatatatatatg

SEQ ID NO: 113330 - DNA, 15 bp, Homo sapiens
catatataatatata

SEQ ID NO: 113331 - DNA, 15 bp, Homo sapiens
acatatataatatat

SEQ ID NO: 113332 - DNA, 15 bp, Homo sapiens
cacatatataatata

SEQ ID NO: 113333 - DNA, 15 bp, Homo sapiens
acacatatataatat

SEQ ID NO: 113334 - DNA, 15 bp, Homo sapiens
cacacatatataata

SEQ ID NO: 113335 - DNA, 15 bp, Homo sapiens
acacacatatataat

SEQ ID NO: 113336 - DNA, 15 bp, Homo sapiens
tacacacatatataa

SEQ ID NO: 113337 - DNA, 15 bp, Homo sapiens
atacacacatatata

SEQ ID NO: 113338 - DNA, 15 bp, Homo sapiens
tatacacacatatat

SEQ ID NO: 113339 - DNA, 15 bp, Homo sapiens
atatacacacatata

SEQ ID NO: 113340 - DNA, 15 bp, Homo sapiens
tatatacacacatat

SEQ ID NO: 113341 - DNA, 15 bp, Homo sapiens
atatatacacacata

SEQ ID NO: 113342 - DNA, 15 bp, Homo sapiens
tatatatacacacat

SEQ ID NO: 113343 - DNA, 15 bp, Homo sapiens
ttatatatatacaca

SEQ ID NO: 113344 - DNA, 15 bp, Homo sapiens
attatatatatacac

SEQ ID NO: 113345 - DNA, 15 bp, Homo sapiens
tattatatatataca

SEQ ID NO: 113346 - DNA, 15 bp, Homo sapiens
atattatatatatac

SEQ ID NO: 113347 - DNA, 15 bp, Homo sapiens
ttatattatatatat

SEQ ID NO: 113348 - DNA, 15 bp, Homo sapiens
attatattatatata

SEQ ID NO: 113349 - DNA, 15 bp, Homo sapiens
tattatattatatat

SEQ ID NO: 113350 - DNA, 15 bp, Homo sapiens
atattatattatata

SEQ ID NO: 113351 - DNA, 15 bp, Homo sapiens
tatattatattatat

SEQ ID NO: 113352 - DNA, 15 bp, Homo sapiens
atatattatattata

SEQ ID NO: 113353 - DNA, 15 bp, Homo sapiens
catatattatattat

SEQ ID NO: 113354 - DNA, 15 bp, Homo sapiens
acatatattatatta

SEQ ID NO: 113355 - DNA, 15 bp, Homo sapiens
cacatatattatatt

SEQ ID NO: 113356 - DNA, 15 bp, Homo sapiens
acacatatattatat

SEQ ID NO: 113357 - DNA, 15 bp, Homo sapiens
tacacatatattata

SEQ ID NO: 113358 - DNA, 15 bp, Homo sapiens
atacacatatattat

SEQ ID NO: 113359 - DNA, 15 bp, Homo sapiens
tatacacatatatta

SEQ ID NO: 113360 - DNA, 15 bp, Homo sapiens
atatacacatatatt

SEQ ID NO: 113361 - DNA, 15 bp, Homo sapiens
tatatacacatatat

SEQ ID NO: 113362 - DNA, 15 bp, Homo sapiens
atatatacacatata

SEQ ID NO: 113363 - DNA, 15 bp, Homo sapiens
tatatatacacatat

SEQ ID NO: 113364 - DNA, 15 bp, Homo sapiens
atatatatacacata

SEQ ID NO: 113365 - DNA, 15 bp, Homo sapiens
tatatatatacacat

SEQ ID NO: 113366 - DNA, 15 bp, Homo sapiens
aatatatatatacac

SEQ ID NO: 113367 - DNA, 15 bp, Homo sapiens
taatatatatataca

SEQ ID NO: 113368 - DNA, 15 bp, Homo sapiens
ataatatatatatac

SEQ ID NO: 113369 - DNA, 15 bp, Homo sapiens
ttatatattatatat

SEQ ID NO: 113370 - DNA, 15 bp, Homo sapiens
attatatattatata

SEQ ID NO: 113371 - DNA, 15 bp, Homo sapiens
tattatatattatat

SEQ ID NO: 113372 - DNA, 15 bp, Homo sapiens
atattatatattata

SEQ ID NO: 113373 - DNA, 15 bp, Homo sapiens
tatattatatattat

SEQ ID NO: 113374 - DNA, 15 bp, Homo sapiens
ttatattatatatta

SEQ ID NO: 113375 - DNA, 15 bp, Homo sapiens
attatattatatatt

SEQ ID NO: 113376 - DNA, 15 bp, Homo sapiens
aatatattatattat

SEQ ID NO: 113377 - DNA, 15 bp, Homo sapiens
taatatattatatta

SEQ ID NO: 113378 - DNA, 15 bp, Homo sapiens
ataatatattatatt

SEQ ID NO: 113379 - DNA, 15 bp, Homo sapiens
tatataatatattat

SEQ ID NO: 113380 - DNA, 15 bp, Homo sapiens
atatataatatatta

SEQ ID NO: 113381 - DNA, 15 bp, Homo sapiens
tatatataatatatt

SEQ ID NO: 113382 - DNA, 15 bp, Homo sapiens
atatatatataatat

SEQ ID NO: 113383 - DNA, 15 bp, Homo sapiens
aatatatatataata

SEQ ID NO: 113384 - DNA, 15 bp, Homo sapiens
taatatatatataat

SEQ ID NO: 113385 - DNA, 15 bp, Homo sapiens
tttatatatatatta

SEQ ID NO: 113386 - DNA, 15 bp, Homo sapiens
ttttatatatatatt

SEQ ID NO: 113387 - DNA, 15 bp, Homo sapiens
attttatatatatat

SEQ ID NO: 113388 - DNA, 15 bp, Homo sapiens
tattttatatatata

SEQ ID NO: 113389 - DNA, 15 bp, Homo sapiens
atattttatatatat

SEQ ID NO: 113390 - DNA, 15 bp, Homo sapiens
tatattttatatata

SEQ ID NO: 113391 - DNA, 15 bp, Homo sapiens
atatattttatatat

SEQ ID NO: 113392 - DNA, 15 bp, Homo sapiens
tatatattttatata

SEQ ID NO: 113393 - DNA, 15 bp, Homo sapiens
atatatattttatat

SEQ ID NO: 113394 - DNA, 15 bp, Homo sapiens
tatatatattttata

SEQ ID NO: 113395 - DNA, 15 bp, Homo sapiens
atatatatattttat

SEQ ID NO: 113396 - DNA, 15 bp, Homo sapiens
tatatatatatttta

SEQ ID NO: 113397 - DNA, 15 bp, Homo sapiens
atatatatatatttt

SEQ ID NO: 113398 - DNA, 15 bp, Homo sapiens
tatatatatatattt

SEQ ID NO: 113399 - DNA, 15 bp, Homo sapiens
atatatatatatatt

SEQ ID NO: 113400 - DNA, 15 bp, Homo sapiens
gcatatatatatata

SEQ ID NO: 113401 - DNA, 15 bp, Homo sapiens
agcatatatatatat

SEQ ID NO: 113402 - DNA, 15 bp, Homo sapiens
gagcatatatatata

SEQ ID NO: 113403 - DNA, 15 bp, Homo sapiens
agagcatatatatat

SEQ ID NO: 113404 - DNA, 15 bp, Homo sapiens
gagagcatatatata

SEQ ID NO: 113405 - DNA, 15 bp, Homo sapiens
ggagagcatatatat

SEQ ID NO: 113406 - DNA, 15 bp, Homo sapiens
aggagagcatatata

SEQ ID NO: 113407 - DNA, 15 bp, Homo sapiens
gaggagagcatatat

SEQ ID NO: 113408 - DNA, 15 bp, Homo sapiens
agaggagagcatata

SEQ ID NO: 113409 - DNA, 15 bp, Homo sapiens
aagaggagagcatat

SEQ ID NO: 113410 - DNA, 15 bp, Homo sapiens
aaagaggagagcata

SEQ ID NO: 113411 - DNA, 15 bp, Homo sapiens
gaaagaggagagcat

SEQ ID NO: 113412 - DNA, 15 bp, Homo sapiens
tgaaagaggagagca

SEQ ID NO: 113413 - DNA, 15 bp, Homo sapiens
ctgaaagaggagagc

SEQ ID NO: 113414 - DNA, 15 bp, Homo sapiens
gctgaaagaggagag

SEQ ID NO: 113415 - DNA, 15 bp, Homo sapiens
ggctgaaagaggaga

SEQ ID NO: 113416 - DNA, 15 bp, Homo sapiens
aggctgaaagaggag

SEQ ID NO: 113417 - DNA, 15 bp, Homo sapiens
gaggctgaaagagga

SEQ ID NO: 113418 - DNA, 15 bp, Homo sapiens
agaggctgaaagagg

SEQ ID NO: 113419 - DNA, 15 bp, Homo sapiens
aagaggctgaaagag

SEQ ID NO: 113420 - DNA, 15 bp, Homo sapiens
aaagaggctgaaaga

SEQ ID NO: 113421 - DNA, 15 bp, Homo sapiens
caaagaggctgaaag

SEQ ID NO: 113422 - DNA, 15 bp, Homo sapiens
acaaagaggctgaaa

SEQ ID NO: 113423 - DNA, 15 bp, Homo sapiens
gacaaagaggctgaa

SEQ ID NO: 113424 - DNA, 15 bp, Homo sapiens
tgacaaagaggctga

SEQ ID NO: 113425 - DNA, 15 bp, Homo sapiens
gtgacaaagaggctg

SEQ ID NO: 113426 - DNA, 15 bp, Homo sapiens
tgtgacaaagaggct

SEQ ID NO: 113427 - DNA, 15 bp, Homo sapiens
ctgtgacaaagaggc

SEQ ID NO: 113428 - DNA, 15 bp, Homo sapiens
cctgtgacaaagagg

SEQ ID NO: 113429 - DNA, 15 bp, Homo sapiens
ccctgtgacaaagag

SEQ ID NO: 113430 - DNA, 15 bp, Homo sapiens
tccctgtgacaaaga

SEQ ID NO: 113431 - DNA, 15 bp, Homo sapiens
ttccctgtgacaaag

SEQ ID NO: 113432 - DNA, 15 bp, Homo sapiens
cttccctgtgacaaa

SEQ ID NO: 113433 - DNA, 15 bp, Homo sapiens
tcttccctgtgacaa

SEQ ID NO: 113434 - DNA, 15 bp, Homo sapiens
ttcttccctgtgaca

SEQ ID NO: 113435 - DNA, 15 bp, Homo sapiens
cttcttccctgtgac

SEQ ID NO: 113436 - DNA, 15 bp, Homo sapiens
acttcttccctgtga

SEQ ID NO: 113437 - DNA, 15 bp, Homo sapiens
cacttcttccctgtg

SEQ ID NO: 113438 - DNA, 15 bp, Homo sapiens
acacttcttccctgt

SEQ ID NO: 113439 - DNA, 15 bp, Homo sapiens
tacacttcttccctg

SEQ ID NO: 113440 - DNA, 15 bp, Homo sapiens
ctacacttcttccct

SEQ ID NO: 113441 - DNA, 15 bp, Homo sapiens
cctacacttcttccc

SEQ ID NO: 113442 - DNA, 15 bp, Homo sapiens
tcctacacttcttcc

SEQ ID NO: 113443 - DNA, 15 bp, Homo sapiens
ctcctacacttcttc

SEQ ID NO: 113444 - DNA, 15 bp, Homo sapiens
cctcctacacttctt

SEQ ID NO: 113445 - DNA, 15 bp, Homo sapiens
acctcctacacttct

SEQ ID NO: 113446 - DNA, 15 bp, Homo sapiens
aacctcctacacttc

SEQ ID NO: 113447 - DNA, 15 bp, Homo sapiens
caacctcctacactt

SEQ ID NO: 113448 - DNA, 15 bp, Homo sapiens
gcaacctcctacact

SEQ ID NO: 113449 - DNA, 15 bp, Homo sapiens
ggcaacctcctacac

SEQ ID NO: 113450 - DNA, 15 bp, Homo sapiens
aggcaacctcctaca

SEQ ID NO: 113451 - DNA, 15 bp, Homo sapiens
aaggcaacctcctac

SEQ ID NO: 113452 - DNA, 15 bp, Homo sapiens
caaggcaacctccta

SEQ ID NO: 113453 - DNA, 15 bp, Homo sapiens
ccaaggcaacctcct

SEQ ID NO: 113454 - DNA, 15 bp, Homo sapiens
cccaaggcaacctcc

SEQ ID NO: 113455 - DNA, 15 bp, Homo sapiens
gcccaaggcaacctc

SEQ ID NO: 113456 - DNA, 15 bp, Homo sapiens
ggcccaaggcaacct

SEQ ID NO: 113457 - DNA, 15 bp, Homo sapiens
gggcccaaggcaacc

SEQ ID NO: 113458 - DNA, 15 bp, Homo sapiens
agggcccaaggcaac

SEQ ID NO: 113459 - DNA, 15 bp, Homo sapiens
cagggcccaaggcaa

SEQ ID NO: 113460 - DNA, 15 bp, Homo sapiens
gcagggcccaaggca

SEQ ID NO: 113461 - DNA, 15 bp, Homo sapiens
ggcagggcccaaggc

SEQ ID NO: 113462 - DNA, 15 bp, Homo sapiens
aggcagggcccaagg

SEQ ID NO: 113463 - DNA, 15 bp, Homo sapiens
gaggcagggcccaag

SEQ ID NO: 113464 - DNA, 15 bp, Homo sapiens
agaggcagggcccaa

SEQ ID NO: 113465 - DNA, 15 bp, Homo sapiens
gagaggcagggccca

SEQ ID NO: 113466 - DNA, 15 bp, Homo sapiens
agagaggcagggccc

SEQ ID NO: 113467 - DNA, 15 bp, Homo sapiens
gagagaggcagggcc

SEQ ID NO: 113468 - DNA, 15 bp, Homo sapiens
ggagagaggcagggc

SEQ ID NO: 113469 - DNA, 15 bp, Homo sapiens
aggagagaggcaggg

SEQ ID NO: 113470 - DNA, 15 bp, Homo sapiens
taggagagaggcagg

SEQ ID NO: 113471 - DNA, 15 bp, Homo sapiens
ttaggagagaggcag

SEQ ID NO: 113472 - DNA, 15 bp, Homo sapiens
gttaggagagaggca

SEQ ID NO: 113473 - DNA, 15 bp, Homo sapiens
ggttaggagagaggc

SEQ ID NO: 113474 - DNA, 15 bp, Homo sapiens
aggttaggagagagg

SEQ ID NO: 113475 - DNA, 15 bp, Homo sapiens
gaggttaggagagag

SEQ ID NO: 113476 - DNA, 15 bp, Homo sapiens
ggaggttaggagaga

SEQ ID NO: 113477 - DNA, 15 bp, Homo sapiens
aggaggttaggagag

SEQ ID NO: 113478 - DNA, 15 bp, Homo sapiens
gaggaggttaggaga

SEQ ID NO: 113479 - DNA, 15 bp, Homo sapiens
agaggaggttaggag

SEQ ID NO: 113480 - DNA, 15 bp, Homo sapiens
aagaggaggttagga

SEQ ID NO: 113481 - DNA, 15 bp, Homo sapiens
gaagaggaggttagg

SEQ ID NO: 113482 - DNA, 15 bp, Homo sapiens
ggaagaggaggttag

SEQ ID NO: 113483 - DNA, 15 bp, Homo sapiens
gggaagaggaggtta

SEQ ID NO: 113484 - DNA, 15 bp, Homo sapiens
ggggaagaggaggtt

SEQ ID NO: 113485 - DNA, 15 bp, Homo sapiens
tggggaagaggaggt

SEQ ID NO: 113486 - DNA, 15 bp, Homo sapiens
gtggggaagaggagg

SEQ ID NO: 113487 - DNA, 15 bp, Homo sapiens
agtggggaagaggag

SEQ ID NO: 113488 - DNA, 15 bp, Homo sapiens
cagtggggaagagga

SEQ ID NO: 113489 - DNA, 15 bp, Homo sapiens
ccagtggggaagagg

SEQ ID NO: 113490 - DNA, 15 bp, Homo sapiens
cccagtggggaagag

SEQ ID NO: 113491 - DNA, 15 bp, Homo sapiens
acccagtggggaaga

SEQ ID NO: 113492 - DNA, 15 bp, Homo sapiens
tacccagtggggaag

SEQ ID NO: 113493 - DNA, 15 bp, Homo sapiens
gtacccagtggggaa

SEQ ID NO: 113494 - DNA, 15 bp, Homo sapiens
ggtacccagtgggga

SEQ ID NO: 113495 - DNA, 15 bp, Homo sapiens
gggtacccagtgggg

SEQ ID NO: 113496 - DNA, 15 bp, Homo sapiens
agggtacccagtggg

SEQ ID NO: 113497 - DNA, 15 bp, Homo sapiens
gagggtacccagtgg

SEQ ID NO: 113498 - DNA, 15 bp, Homo sapiens
tgagggtacccagtg

SEQ ID NO: 113499 - DNA, 15 bp, Homo sapiens
ctgagggtacccagt

SEQ ID NO: 113500 - DNA, 15 bp, Homo sapiens
gctgagggtacccag

SEQ ID NO: 113501 - DNA, 15 bp, Homo sapiens
ggctgagggtaccca

SEQ ID NO: 113502 - DNA, 15 bp, Homo sapiens
gggctgagggtaccc

SEQ ID NO: 113503 - DNA, 15 bp, Homo sapiens
ggggctgagggtacc

SEQ ID NO: 113504 - DNA, 15 bp, Homo sapiens
aggggctgagggtac

SEQ ID NO: 113505 - DNA, 15 bp, Homo sapiens
taggggctgagggta

SEQ ID NO: 113506 - DNA, 15 bp, Homo sapiens
ataggggctgagggt

SEQ ID NO: 113507 - DNA, 15 bp, Homo sapiens
tataggggctgaggg

SEQ ID NO: 113508 - DNA, 15 bp, Homo sapiens
atataggggctgagg

SEQ ID NO: 113509 - DNA, 15 bp, Homo sapiens
aatataggggctgag

SEQ ID NO: 113510 - DNA, 15 bp, Homo sapiens
aaatataggggctga

SEQ ID NO: 113511 - DNA, 15 bp, Homo sapiens
aaaatataggggctg

SEQ ID NO: 113512 - DNA, 15 bp, Homo sapiens
taaaatataggggct

SEQ ID NO: 113513 - DNA, 15 bp, Homo sapiens
ttaaaatataggggc

SEQ ID NO: 113514 - DNA, 15 bp, Homo sapiens
attaaaatatagggg

SEQ ID NO: 113515 - DNA, 15 bp, Homo sapiens
aattaaaatataggg

SEQ ID NO: 113516 - DNA, 15 bp, Homo sapiens
gaattaaaatatagg

SEQ ID NO: 113517 - DNA, 15 bp, Homo sapiens
agaattaaaatatag

SEQ ID NO: 113518 - DNA, 15 bp, Homo sapiens
aagaattaaaatata

SEQ ID NO: 113519 - DNA, 15 bp, Homo sapiens
caagaattaaaatat

SEQ ID NO: 113520 - DNA, 15 bp, Homo sapiens
tcaagaattaaaata

SEQ ID NO: 113521 - DNA, 15 bp, Homo sapiens
atcaagaattaaaat

SEQ ID NO: 113522 - DNA, 15 bp, Homo sapiens
gatcaagaattaaaa

SEQ ID NO: 113523 - DNA, 15 bp, Homo sapiens
tgatcaagaattaaa

SEQ ID NO: 113524 - DNA, 15 bp, Homo sapiens
atgatcaagaattaa

SEQ ID NO: 113525 - DNA, 15 bp, Homo sapiens
catgatcaagaatta

SEQ ID NO: 113526 - DNA, 15 bp, Homo sapiens
acatgatcaagaatt

SEQ ID NO: 113527 - DNA, 15 bp, Homo sapiens
tacatgatcaagaat

SEQ ID NO: 113528 - DNA, 15 bp, Homo sapiens
ctacatgatcaagaa

SEQ ID NO: 113529 - DNA, 15 bp, Homo sapiens
tctacatgatcaaga

SEQ ID NO: 113530 - DNA, 15 bp, Homo sapiens
ttctacatgatcaag

SEQ ID NO: 113531 - DNA, 15 bp, Homo sapiens
tttctacatgatcaa

SEQ ID NO: 113532 - DNA, 15 bp, Homo sapiens
atttctacatgatca

SEQ ID NO: 113533 - DNA, 15 bp, Homo sapiens
aatttctacatgatc

SEQ ID NO: 113534 - DNA, 15 bp, Homo sapiens
caatttctacatgat

SEQ ID NO: 113535 - DNA, 15 bp, Homo sapiens
acaatttctacatga

SEQ ID NO: 113536 - DNA, 15 bp, Homo sapiens
aacaatttctacatg

SEQ ID NO: 113537 - DNA, 15 bp, Homo sapiens
aaacaatttctacat

SEQ ID NO: 113538 - DNA, 15 bp, Homo sapiens
aaaacaatttctaca

SEQ ID NO: 113539 - DNA, 15 bp, Homo sapiens
aaaaacaatttctac

SEQ ID NO: 113540 - DNA, 15 bp, Homo sapiens
caaaaacaatttcta

SEQ ID NO: 113541 - DNA, 15 bp, Homo sapiens
ccaaaaacaatttct

SEQ ID NO: 113542 - DNA, 15 bp, Homo sapiens
accaaaaacaatttc

SEQ ID NO: 113543 - DNA, 15 bp, Homo sapiens
taccaaaaacaattt

SEQ ID NO: 113544 - DNA, 15 bp, Homo sapiens
ttaccaaaaacaatt

SEQ ID NO: 113545 - DNA, 15 bp, Homo sapiens
tttaccaaaaacaat

SEQ ID NO: 113546 - DNA, 15 bp, Homo sapiens
atttaccaaaaacaa

SEQ ID NO: 113547 - DNA, 15 bp, Homo sapiens
catttaccaaaaaca

SEQ ID NO: 113548 - DNA, 15 bp, Homo sapiens
acatttaccaaaaac

SEQ ID NO: 113549 - DNA, 15 bp, Homo sapiens
aacatttaccaaaaa

SEQ ID NO: 113550 - DNA, 15 bp, Homo sapiens
caacatttaccaaaa

SEQ ID NO: 113551 - DNA, 15 bp, Homo sapiens
tcaacatttaccaaa

SEQ ID NO: 113552 - DNA, 15 bp, Homo sapiens
atcaacatttaccaa

SEQ ID NO: 113553 - DNA, 15 bp, Homo sapiens
tatcaacatttacca

SEQ ID NO: 113554 - DNA, 15 bp, Homo sapiens
atatcaacatttacc

SEQ ID NO: 113555 - DNA, 15 bp, Homo sapiens
aatatcaacatttac

SEQ ID NO: 113556 - DNA, 15 bp, Homo sapiens
taatatcaacattta

SEQ ID NO: 113557 - DNA, 15 bp, Homo sapiens
ataatatcaacattt

SEQ ID NO: 113558 - DNA, 15 bp, Homo sapiens
aataatatcaacatt

SEQ ID NO: 113559 - DNA, 15 bp, Homo sapiens
caataatatcaacat

SEQ ID NO: 113560 - DNA, 15 bp, Homo sapiens
acaataatatcaaca

SEQ ID NO: 113561 - DNA, 15 bp, Homo sapiens
aacaataatatcaac

SEQ ID NO: 113562 - DNA, 15 bp, Homo sapiens
taacaataatatcaa

SEQ ID NO: 113563 - DNA, 15 bp, Homo sapiens
ataacaataatatca

SEQ ID NO: 113564 - DNA, 15 bp, Homo sapiens
aataacaataatatc

SEQ ID NO: 113565 - DNA, 15 bp, Homo sapiens
taataacaataatat

SEQ ID NO: 113566 - DNA, 15 bp, Homo sapiens
ataataacaataata

SEQ ID NO: 113567 - DNA, 15 bp, Homo sapiens
gataataacaataat

SEQ ID NO: 113568 - DNA, 15 bp, Homo sapiens
tgataataacaataa

SEQ ID NO: 113569 - DNA, 15 bp, Homo sapiens
atgataataacaata

SEQ ID NO: 113570 - DNA, 15 bp, Homo sapiens
aatgataataacaat

SEQ ID NO: 113571 - DNA, 15 bp, Homo sapiens
taatgataataacaa

SEQ ID NO: 113572 - DNA, 15 bp, Homo sapiens
ataatgataataaca

SEQ ID NO: 113573 - DNA, 15 bp, Homo sapiens
aataatgataataac

SEQ ID NO: 113574 - DNA, 15 bp, Homo sapiens
taataatgataataa

SEQ ID NO: 113575 - DNA, 15 bp, Homo sapiens
ttaataatgataata

SEQ ID NO: 113576 - DNA, 15 bp, Homo sapiens
attaataatgataat

SEQ ID NO: 113577 - DNA, 15 bp, Homo sapiens
tattaataatgataa

SEQ ID NO: 113578 - DNA, 15 bp, Homo sapiens
ttattaataatgata

SEQ ID NO: 113579 - DNA, 15 bp, Homo sapiens
tttattaataatgat

SEQ ID NO: 113580 - DNA, 15 bp, Homo sapiens
atttattaataatga

SEQ ID NO: 113581 - DNA, 15 bp, Homo sapiens
tatttattaataatg

SEQ ID NO: 113582 - DNA, 15 bp, Homo sapiens
ttatttattaataat

SEQ ID NO: 113583 - DNA, 15 bp, Homo sapiens
tttatttattaataa

SEQ ID NO: 113584 - DNA, 15 bp, Homo sapiens
ctttatttattaata

SEQ ID NO: 113585 - DNA, 15 bp, Homo sapiens
tctttatttattaat

SEQ ID NO: 113586 - DNA, 15 bp, Homo sapiens
ctctttatttattaa

SEQ ID NO: 113587 - DNA, 15 bp, Homo sapiens
tctctttatttatta

SEQ ID NO: 113588 - DNA, 15 bp, Homo sapiens
ttctctttatttatt

SEQ ID NO: 113589 - DNA, 15 bp, Homo sapiens
tttctctttatttat

SEQ ID NO: 113590 - DNA, 15 bp, Homo sapiens
ttttctctttattta

SEQ ID NO: 113591 - DNA, 15 bp, Homo sapiens
cttttctctttattt

SEQ ID NO: 113592 - DNA, 15 bp, Homo sapiens
ccttttctctttatt

SEQ ID NO: 113593 - DNA, 15 bp, Homo sapiens
tccttttctctttat

SEQ ID NO: 113594 - DNA, 15 bp, Homo sapiens
ttccttttctcttta

SEQ ID NO: 113595 - DNA, 15 bp, Homo sapiens
attccttttctcttt

SEQ ID NO: 113596 - DNA, 15 bp, Homo sapiens
aattccttttctctt

SEQ ID NO: 113597 - DNA, 15 bp, Homo sapiens
aaattccttttctct

SEQ ID NO: 113598 - DNA, 15 bp, Homo sapiens
aaaattccttttctc

SEQ ID NO: 113599 - DNA, 15 bp, Homo sapiens
aaaaattccttttct

SEQ ID NO: 113600 - DNA, 15 bp, Homo sapiens
caaaaattccttttc

SEQ ID NO: 113601 - DNA, 15 bp, Homo sapiens
acaaaaattcctttt

SEQ ID NO: 113602 - DNA, 15 bp, Homo sapiens
aacaaaaattccttt

SEQ ID NO: 113603 - DNA, 15 bp, Homo sapiens
aaacaaaaattcctt

SEQ ID NO: 113604 - DNA, 15 bp, Homo sapiens
taaacaaaaattcct

SEQ ID NO: 113605 - DNA, 15 bp, Homo sapiens
ttaaacaaaaattcc

SEQ ID NO: 113606 - DNA, 15 bp, Homo sapiens
tttaaacaaaaattc

SEQ ID NO: 113607 - DNA, 15 bp, Homo sapiens
atttaaacaaaaatt

SEQ ID NO: 113608 - DNA, 15 bp, Homo sapiens
catttaaacaaaaat

SEQ ID NO: 113609 - DNA, 15 bp, Homo sapiens
tcatttaaacaaaaa

SEQ ID NO: 113610 - DNA, 15 bp, Homo sapiens
ctcatttaaacaaaa

SEQ ID NO: 113611 - DNA, 15 bp, Homo sapiens
tctcatttaaacaaa

SEQ ID NO: 113612 - DNA, 15 bp, Homo sapiens
ttctcatttaaacaa

SEQ ID NO: 113613 - DNA, 15 bp, Homo sapiens
tttctcatttaaaca

SEQ ID NO: 113614 - DNA, 15 bp, Homo sapiens
atttctcatttaaac

SEQ ID NO: 113615 - DNA, 15 bp, Homo sapiens
catttctcatttaaa

SEQ ID NO: 113616 - DNA, 15 bp, Homo sapiens
acatttctcatttaa

SEQ ID NO: 113617 - DNA, 15 bp, Homo sapiens
aacatttctcattta

SEQ ID NO: 113618 - DNA, 15 bp, Homo sapiens
aaacatttctcattt

SEQ ID NO: 113619 - DNA, 15 bp, Homo sapiens
taaacatttctcatt

SEQ ID NO: 113620 - DNA, 15 bp, Homo sapiens
ttaaacatttctcat

SEQ ID NO: 113621 - DNA, 15 bp, Homo sapiens
gttaaacatttctca

SEQ ID NO: 113622 - DNA, 15 bp, Homo sapiens
ggttaaacatttctc

SEQ ID NO: 113623 - DNA, 15 bp, Homo sapiens
tggttaaacatttct

SEQ ID NO: 113624 - DNA, 15 bp, Homo sapiens
ctggttaaacatttc

SEQ ID NO: 113625 - DNA, 15 bp, Homo sapiens
tctggttaaacattt

SEQ ID NO: 113626 - DNA, 15 bp, Homo sapiens
atctggttaaacatt

SEQ ID NO: 113627 - DNA, 15 bp, Homo sapiens
aatctggttaaacat

SEQ ID NO: 113628 - DNA, 15 bp, Homo sapiens
gaatctggttaaaca

SEQ ID NO: 113629 - DNA, 15 bp, Homo sapiens
agaatctggttaaac

SEQ ID NO: 113630 - DNA, 15 bp, Homo sapiens
cagaatctggttaaa

SEQ ID NO: 113631 - DNA, 15 bp, Homo sapiens
acagaatctggttaa

SEQ ID NO: 113632 - DNA, 15 bp, Homo sapiens
aacagaatctggtta

SEQ ID NO: 113633 - DNA, 15 bp, Homo sapiens
gaacagaatctggtt

SEQ ID NO: 113634 - DNA, 15 bp, Homo sapiens
agaacagaatctggt

SEQ ID NO: 113635 - DNA, 15 bp, Homo sapiens
tagaacagaatctgg

SEQ ID NO: 113636 - DNA, 15 bp, Homo sapiens
atagaacagaatctg

SEQ ID NO: 113637 - DNA, 15 bp, Homo sapiens
aatagaacagaatct

SEQ ID NO: 113638 - DNA, 15 bp, Homo sapiens
aaatagaacagaatc

SEQ ID NO: 113639 - DNA, 15 bp, Homo sapiens
caaatagaacagaat

SEQ ID NO: 113640 - DNA, 15 bp, Homo sapiens
tcaaatagaacagaa

SEQ ID NO: 113641 - DNA, 15 bp, Homo sapiens
ttcaaatagaacaga

SEQ ID NO: 113642 - DNA, 15 bp, Homo sapiens
attcaaatagaacag

SEQ ID NO: 113643 - DNA, 15 bp, Homo sapiens
aattcaaatagaaca

SEQ ID NO: 113644 - DNA, 15 bp, Homo sapiens
caattcaaatagaac

SEQ ID NO: 113645 - DNA, 15 bp, Homo sapiens
acaattcaaatagaa

SEQ ID NO: 113646 - DNA, 15 bp, Homo sapiens
cacaattcaaataga

SEQ ID NO: 113647 - DNA, 15 bp, Homo sapiens
tcacaattcaaatag

SEQ ID NO: 113648 - DNA, 15 bp, Homo sapiens
gtcacaattcaaata

SEQ ID NO: 113649 - DNA, 15 bp, Homo sapiens
agtcacaattcaaat

SEQ ID NO: 113650 - DNA, 15 bp, Homo sapiens
aagtcacaattcaaa

SEQ ID NO: 113651 - DNA, 15 bp, Homo sapiens
caagtcacaattcaa

SEQ ID NO: 113652 - DNA, 15 bp, Homo sapiens
gcaagtcacaattca

SEQ ID NO: 113653 - DNA, 15 bp, Homo sapiens
tgcaagtcacaattc

SEQ ID NO: 113654 - DNA, 15 bp, Homo sapiens
gtgcaagtcacaatt

SEQ ID NO: 113655 - DNA, 15 bp, Homo sapiens
ggtgcaagtcacaat

SEQ ID NO: 113656 - DNA, 15 bp, Homo sapiens
aggtgcaagtcacaa

SEQ ID NO: 113657 - DNA, 15 bp, Homo sapiens
aaggtgcaagtcaca

SEQ ID NO: 113658 - DNA, 15 bp, Homo sapiens
aaaggtgcaagtcac

SEQ ID NO: 113659 - DNA, 15 bp, Homo sapiens
aaaaggtgcaagtca

SEQ ID NO: 113660 - DNA, 15 bp, Homo sapiens
caaaaggtgcaagtc

SEQ ID NO: 113661 - DNA, 15 bp, Homo sapiens
acaaaaggtgcaagt

SEQ ID NO: 113662 - DNA, 15 bp, Homo sapiens
aacaaaaggtgcaag

SEQ ID NO: 113663 - DNA, 15 bp, Homo sapiens
gaacaaaaggtgcaa

SEQ ID NO: 113664 - DNA, 15 bp, Homo sapiens
tgaacaaaaggtgca

SEQ ID NO: 113665 - DNA, 15 bp, Homo sapiens
ttgaacaaaaggtgc

SEQ ID NO: 113666 - DNA, 15 bp, Homo sapiens
tttgaacaaaaggtg

SEQ ID NO: 113667 - DNA, 15 bp, Homo sapiens
ctttgaacaaaaggt

SEQ ID NO: 113668 - DNA, 15 bp, Homo sapiens
actttgaacaaaagg

SEQ ID NO: 113669 - DNA, 15 bp, Homo sapiens
tactttgaacaaaag

SEQ ID NO: 113670 - DNA, 15 bp, Homo sapiens
atactttgaacaaaa

SEQ ID NO: 113671 - DNA, 15 bp, Homo sapiens
aatactttgaacaaa

SEQ ID NO: 113672 - DNA, 15 bp, Homo sapiens
aaatactttgaacaa

SEQ ID NO: 113673 - DNA, 15 bp, Homo sapiens
gaaatactttgaaca

SEQ ID NO: 113674 - DNA, 15 bp, Homo sapiens
ggaaatactttgaac

SEQ ID NO: 113675 - DNA, 15 bp, Homo sapiens
aggaaatactttgaa

SEQ ID NO: 113676 - DNA, 15 bp, Homo sapiens
aaggaaatactttga

SEQ ID NO: 113677 - DNA, 15 bp, Homo sapiens
aaaggaaatactttg

SEQ ID NO: 113678 - DNA, 15 bp, Homo sapiens
taaaggaaatacttt

SEQ ID NO: 113679 - DNA, 15 bp, Homo sapiens
ctaaaggaaatactt

SEQ ID NO: 113680 - DNA, 15 bp, Homo sapiens
cctaaaggaaatact

SEQ ID NO: 113681 - DNA, 15 bp, Homo sapiens
gcctaaaggaaatac

SEQ ID NO: 113682 - DNA, 15 bp, Homo sapiens
tgcctaaaggaaata

SEQ ID NO: 113683 - DNA, 15 bp, Homo sapiens
atgcctaaaggaaat

SEQ ID NO: 113684 - DNA, 15 bp, Homo sapiens
aatgcctaaaggaaa

SEQ ID NO: 113685 - DNA, 15 bp, Homo sapiens
caatgcctaaaggaa

SEQ ID NO: 113686 - DNA, 15 bp, Homo sapiens
acaatgcctaaagga

SEQ ID NO: 113687 - DNA, 15 bp, Homo sapiens
tacaatgcctaaagg

SEQ ID NO: 113688 - DNA, 15 bp, Homo sapiens
ttacaatgcctaaag

SEQ ID NO: 113689 - DNA, 15 bp, Homo sapiens
attacaatgcctaaa

SEQ ID NO: 113690 - DNA, 15 bp, Homo sapiens
aattacaatgcctaa

SEQ ID NO: 113691 - DNA, 15 bp, Homo sapiens
caattacaatgccta

SEQ ID NO: 113692 - DNA, 15 bp, Homo sapiens
acaattacaatgcct

SEQ ID NO: 113693 - DNA, 15 bp, Homo sapiens
cacaattacaatgcc

SEQ ID NO: 113694 - DNA, 15 bp, Homo sapiens
tcacaattacaatgc

SEQ ID NO: 113695 - DNA, 15 bp, Homo sapiens
ttcacaattacaatg

SEQ ID NO: 113696 - DNA, 15 bp, Homo sapiens
gttcacaattacaat

SEQ ID NO: 113697 - DNA, 15 bp, Homo sapiens
tgttcacaattacaa

SEQ ID NO: 113698 - DNA, 15 bp, Homo sapiens
ctgttcacaattaca

SEQ ID NO: 113699 - DNA, 15 bp, Homo sapiens
gctgttcacaattac

SEQ ID NO: 113700 - DNA, 15 bp, Homo sapiens
agctgttcacaatta

SEQ ID NO: 113701 - DNA, 15 bp, Homo sapiens
gagctgttcacaatt

SEQ ID NO: 113702 - DNA, 15 bp, Homo sapiens
agagctgttcacaat

SEQ ID NO: 113703 - DNA, 15 bp, Homo sapiens
aagagctgttcacaa

SEQ ID NO: 113704 - DNA, 15 bp, Homo sapiens
taagagctgttcaca

SEQ ID NO: 113705 - DNA, 15 bp, Homo sapiens
gtaagagctgttcac

SEQ ID NO: 113706 - DNA, 15 bp, Homo sapiens
agtaagagctgttca

SEQ ID NO: 113707 - DNA, 15 bp, Homo sapiens
aagtaagagctgttc

SEQ ID NO: 113708 - DNA, 15 bp, Homo sapiens
caagtaagagctgtt

SEQ ID NO: 113709 - DNA, 15 bp, Homo sapiens
acaagtaagagctgt

SEQ ID NO: 113710 - DNA, 15 bp, Homo sapiens
cacaagtaagagctg

SEQ ID NO: 113711 - DNA, 15 bp, Homo sapiens
gcacaagtaagagct

SEQ ID NO: 113712 - DNA, 15 bp, Homo sapiens
ggcacaagtaagagc

SEQ ID NO: 113713 - DNA, 15 bp, Homo sapiens
tggcacaagtaagag

SEQ ID NO: 113714 - DNA, 15 bp, Homo sapiens
ctggcacaagtaaga

SEQ ID NO: 113715 - DNA, 15 bp, Homo sapiens
actggcacaagtaag

SEQ ID NO: 113716 - DNA, 15 bp, Homo sapiens
cactggcacaagtaa

SEQ ID NO: 113717 - DNA, 15 bp, Homo sapiens
tcactggcacaagta

SEQ ID NO: 113718 - DNA, 15 bp, Homo sapiens
gtcactggcacaagt

SEQ ID NO: 113719 - DNA, 15 bp, Homo sapiens
tgtcactggcacaag

SEQ ID NO: 113720 - DNA, 15 bp, Homo sapiens
ctgtcactggcacaa

SEQ ID NO: 113721 - DNA, 15 bp, Homo sapiens
tctgtcactggcaca

SEQ ID NO: 113722 - DNA, 15 bp, Homo sapiens
atctgtcactggcac

SEQ ID NO: 113723 - DNA, 15 bp, Homo sapiens
catctgtcactggca

SEQ ID NO: 113724 - DNA, 15 bp, Homo sapiens
gcatctgtcactggc

SEQ ID NO: 113725 - DNA, 15 bp, Homo sapiens
tgcatctgtcactgg

SEQ ID NO: 113726 - DNA, 15 bp, Homo sapiens
ctgcatctgtcactg

SEQ ID NO: 113727 - DNA, 15 bp, Homo sapiens
actgcatctgtcact

SEQ ID NO: 113728 - DNA, 15 bp, Homo sapiens
cactgcatctgtcac

SEQ ID NO: 113729 - DNA, 15 bp, Homo sapiens
ccactgcatctgtca

SEQ ID NO: 113730 - DNA, 15 bp, Homo sapiens
accactgcatctgtc

SEQ ID NO: 113731 - DNA, 15 bp, Homo sapiens
gaccactgcatctgt

SEQ ID NO: 113732 - DNA, 15 bp, Homo sapiens
agaccactgcatctg

SEQ ID NO: 113733 - DNA, 15 bp, Homo sapiens
gagaccactgcatct

SEQ ID NO: 113734 - DNA, 15 bp, Homo sapiens
ggagaccactgcatc

SEQ ID NO: 113735 - DNA, 15 bp, Homo sapiens
aggagaccactgcat

SEQ ID NO: 113736 - DNA, 15 bp, Homo sapiens
aaggagaccactgca

SEQ ID NO: 113737 - DNA, 15 bp, Homo sapiens
aaaggagaccactgc

SEQ ID NO: 113738 - DNA, 15 bp, Homo sapiens
gaaaggagaccactg

SEQ ID NO: 113739 - DNA, 15 bp, Homo sapiens
ggaaaggagaccact

SEQ ID NO: 113740 - DNA, 15 bp, Homo sapiens
gggaaaggagaccac

SEQ ID NO: 113741 - DNA, 15 bp, Homo sapiens
ggggaaaggagacca

SEQ ID NO: 113742 - DNA, 15 bp, Homo sapiens
tggggaaaggagacc

SEQ ID NO: 113743 - DNA, 15 bp, Homo sapiens
ctggggaaaggagac

SEQ ID NO: 113744 - DNA, 15 bp, Homo sapiens
actggggaaaggaga

SEQ ID NO: 113745 - DNA, 15 bp, Homo sapiens
aactggggaaaggag

SEQ ID NO: 113746 - DNA, 15 bp, Homo sapiens
caactggggaaagga

SEQ ID NO: 113747 - DNA, 15 bp, Homo sapiens
tcaactggggaaagg

SEQ ID NO: 113748 - DNA, 15 bp, Homo sapiens
ttcaactggggaaag

SEQ ID NO: 113749 - DNA, 15 bp, Homo sapiens
cttcaactggggaaa

SEQ ID NO: 113750 - DNA, 15 bp, Homo sapiens
gcttcaactggggaa

SEQ ID NO: 113751 - DNA, 15 bp, Homo sapiens
tgcttcaactgggga

SEQ ID NO: 113752 - DNA, 15 bp, Homo sapiens
ctgcttcaactgggg

SEQ ID NO: 113753 - DNA, 15 bp, Homo sapiens
actgcttcaactggg

SEQ ID NO: 113754 - DNA, 15 bp, Homo sapiens
cactgcttcaactgg

SEQ ID NO: 113755 - DNA, 15 bp, Homo sapiens
gcactgcttcaactg

SEQ ID NO: 113756 - DNA, 15 bp, Homo sapiens
tgcactgcttcaact

SEQ ID NO: 113757 - DNA, 15 bp, Homo sapiens
atgcactgcttcaac

SEQ ID NO: 113758 - DNA, 15 bp, Homo sapiens
tatgcactgcttcaa

SEQ ID NO: 113759 - DNA, 15 bp, Homo sapiens
gtatgcactgcttca

SEQ ID NO: 113760 - DNA, 15 bp, Homo sapiens
cgtatgcactgcttc

SEQ ID NO: 113761 - DNA, 15 bp, Homo sapiens
gcgtatgcactgctt

SEQ ID NO: 113762 - DNA, 15 bp, Homo sapiens
tgcgtatgcactgct

SEQ ID NO: 113763 - DNA, 15 bp, Homo sapiens
ctgcgtatgcactgc

SEQ ID NO: 113764 - DNA, 15 bp, Homo sapiens
actgcgtatgcactg

SEQ ID NO: 113765 - DNA, 15 bp, Homo sapiens
tactgcgtatgcact

SEQ ID NO: 113766 - DNA, 15 bp, Homo sapiens
ctactgcgtatgcac

SEQ ID NO: 113767 - DNA, 15 bp, Homo sapiens
gctactgcgtatgca

SEQ ID NO: 113768 - DNA, 15 bp, Homo sapiens
agctactgcgtatgc

SEQ ID NO: 113769 - DNA, 15 bp, Homo sapiens
tagctactgcgtatg

SEQ ID NO: 113770 - DNA, 15 bp, Homo sapiens
atagctactgcgtat

SEQ ID NO: 113771 - DNA, 15 bp, Homo sapiens
aatagctactgcgta

SEQ ID NO: 113772 - DNA, 15 bp, Homo sapiens
taatagctactgcgt

SEQ ID NO: 113773 - DNA, 15 bp, Homo sapiens
ataatagctactgcg

SEQ ID NO: 113774 - DNA, 15 bp, Homo sapiens
aataatagctactgc

SEQ ID NO: 113775 - DNA, 15 bp, Homo sapiens
aaataatagctactg

SEQ ID NO: 113776 - DNA, 15 bp, Homo sapiens
caaataatagctact

SEQ ID NO: 113777 - DNA, 15 bp, Homo sapiens
acaaataatagctac

SEQ ID NO: 113778 - DNA, 15 bp, Homo sapiens
cacaaataatagcta

SEQ ID NO: 113779 - DNA, 15 bp, Homo sapiens
acacaaataatagct

SEQ ID NO: 113780 - DNA, 15 bp, Homo sapiens
aacacaaataatagc

SEQ ID NO: 113781 - DNA, 15 bp, Homo sapiens
taacacaaataatag

SEQ ID NO: 113782 - DNA, 15 bp, Homo sapiens
ataacacaaataata

SEQ ID NO: 113783 - DNA, 15 bp, Homo sapiens
gataacacaaataat

SEQ ID NO: 113784 - DNA, 15 bp, Homo sapiens
agataacacaaataa

SEQ ID NO: 113785 - DNA, 15 bp, Homo sapiens
aagataacacaaata

SEQ ID NO: 113786 - DNA, 15 bp, Homo sapiens
aaagataacacaaat

SEQ ID NO: 113787 - DNA, 15 bp, Homo sapiens
taaagataacacaaa

SEQ ID NO: 113788 - DNA, 15 bp, Homo sapiens
ataaagataacacaa

SEQ ID NO: 113789 - DNA, 15 bp, Homo sapiens
aataaagataacaca

SEQ ID NO: 113790 - DNA, 15 bp, Homo sapiens
aaataaagataacac

SEQ ID NO: 113791 - DNA, 15 bp, Homo sapiens
gaaataaagataaca

SEQ ID NO: 113792 - DNA, 15 bp, Homo sapiens
agaaataaagataac

SEQ ID NO: 113793 - DNA, 15 bp, Homo sapiens
gagaaataaagataa

SEQ ID NO: 113794 - DNA, 15 bp, Homo sapiens
agagaaataaagata

SEQ ID NO: 113795 - DNA, 15 bp, Homo sapiens
aagagaaataaagat

SEQ ID NO: 113796 - DNA, 15 bp, Homo sapiens
gaagagaaataaaga

SEQ ID NO: 113797 - DNA, 15 bp, Homo sapiens
tgaagagaaataaag

SEQ ID NO: 113798 - DNA, 15 bp, Homo sapiens
atgaagagaaataaa

SEQ ID NO: 113799 - DNA, 15 bp, Homo sapiens
aatgaagagaaataa

SEQ ID NO: 113800 - DNA, 15 bp, Homo sapiens
caatgaagagaaata

SEQ ID NO: 113801 - DNA, 15 bp, Homo sapiens
acaatgaagagaaat

SEQ ID NO: 113802 - DNA, 15 bp, Homo sapiens
aacaatgaagagaaa

SEQ ID NO: 113803 - DNA, 15 bp, Homo sapiens
taacaatgaagagaa

SEQ ID NO: 113804 - DNA, 15 bp, Homo sapiens
ctaacaatgaagaga

SEQ ID NO: 113805 - DNA, 15 bp, Homo sapiens
tctaacaatgaagag

SEQ ID NO: 113806 - DNA, 15 bp, Homo sapiens
ttctaacaatgaaga

SEQ ID NO: 113807 - DNA, 15 bp, Homo sapiens
tttctaacaatgaag

SEQ ID NO: 113808 - DNA, 15 bp, Homo sapiens
gtttctaacaatgaa

SEQ ID NO: 113809 - DNA, 15 bp, Homo sapiens
ggtttctaacaatga

SEQ ID NO: 113810 - DNA, 15 bp, Homo sapiens
tggtttctaacaatg

SEQ ID NO: 113811 - DNA, 15 bp, Homo sapiens
ttggtttctaacaat

SEQ ID NO: 113812 - DNA, 15 bp, Homo sapiens
tttggtttctaacaa

SEQ ID NO: 113813 - DNA, 15 bp, Homo sapiens
ctttggtttctaaca

SEQ ID NO: 113814 - DNA, 15 bp, Homo sapiens
actttggtttctaac

SEQ ID NO: 113815 - DNA, 15 bp, Homo sapiens
gactttggtttctaa

SEQ ID NO: 113816 - DNA, 15 bp, Homo sapiens
agactttggtttcta

SEQ ID NO: 113817 - DNA, 15 bp, Homo sapiens
aagactttggtttct

SEQ ID NO: 113818 - DNA, 15 bp, Homo sapiens
gaagactttggtttc

SEQ ID NO: 113819 - DNA, 15 bp, Homo sapiens
agaagactttggttt

SEQ ID NO: 113820 - DNA, 15 bp, Homo sapiens
gagaagactttggtt

SEQ ID NO: 113821 - DNA, 15 bp, Homo sapiens
agagaagactttggt

SEQ ID NO: 113822 - DNA, 15 bp, Homo sapiens
cagagaagactttgg

SEQ ID NO: 113823 - DNA, 15 bp, Homo sapiens
gcagagaagactttg

SEQ ID NO: 113824 - DNA, 15 bp, Homo sapiens
agcagagaagacttt

SEQ ID NO: 113825 - DNA, 15 bp, Homo sapiens
cagcagagaagactt

SEQ ID NO: 113826 - DNA, 15 bp, Homo sapiens
ccagcagagaagact

SEQ ID NO: 113827 - DNA, 15 bp, Homo sapiens
gccagcagagaagac

SEQ ID NO: 113828 - DNA, 15 bp, Homo sapiens
agccagcagagaaga

SEQ ID NO: 113829 - DNA, 15 bp, Homo sapiens
cagccagcagagaag

SEQ ID NO: 113830 - DNA, 15 bp, Homo sapiens
ccagccagcagagaa

SEQ ID NO: 113831 - DNA, 15 bp, Homo sapiens
cccagccagcagaga

SEQ ID NO: 113832 - DNA, 15 bp, Homo sapiens
ccccagccagcagag

SEQ ID NO: 113833 - DNA, 15 bp, Homo sapiens
gccccagccagcaga

SEQ ID NO: 113834 - DNA, 15 bp, Homo sapiens
agccccagccagcag

SEQ ID NO: 113835 - DNA, 15 bp, Homo sapiens
cagccccagccagca

SEQ ID NO: 113836 - DNA, 15 bp, Homo sapiens
tcagccccagccagc

SEQ ID NO: 113837 - DNA, 15 bp, Homo sapiens
ctcagccccagccag

SEQ ID NO: 113838 - DNA, 15 bp, Homo sapiens
tctcagccccagcca

SEQ ID NO: 113839 - DNA, 15 bp, Homo sapiens
ctctcagccccagcc

SEQ ID NO: 113840 - DNA, 15 bp, Homo sapiens
tctctcagccccagc

SEQ ID NO: 113841 - DNA, 15 bp, Homo sapiens
ctctctcagccccag

SEQ ID NO: 113842 - DNA, 15 bp, Homo sapiens
cctctctcagcccca

SEQ ID NO: 113843 - DNA, 15 bp, Homo sapiens
ccctctctcagcccc

SEQ ID NO: 113844 - DNA, 15 bp, Homo sapiens
accctctctcagccc

SEQ ID NO: 113845 - DNA, 15 bp, Homo sapiens
gaccctctctcagcc

SEQ ID NO: 113846 - DNA, 15 bp, Homo sapiens
agaccctctctcagc

SEQ ID NO: 113847 - DNA, 15 bp, Homo sapiens
cagaccctctctcag

SEQ ID NO: 113848 - DNA, 15 bp, Homo sapiens
ccagaccctctctca

SEQ ID NO: 113849 - DNA, 15 bp, Homo sapiens
cccagaccctctctc

SEQ ID NO: 113850 - DNA, 15 bp, Homo sapiens
acccagaccctctct

SEQ ID NO: 113851 - DNA, 15 bp, Homo sapiens
aacccagaccctctc

SEQ ID NO: 113852 - DNA, 15 bp, Homo sapiens
taacccagaccctct

SEQ ID NO: 113853 - DNA, 15 bp, Homo sapiens
ataacccagaccctc

SEQ ID NO: 113854 - DNA, 15 bp, Homo sapiens
gataacccagaccct

SEQ ID NO: 113855 - DNA, 15 bp, Homo sapiens
agataacccagaccc

SEQ ID NO: 113856 - DNA, 15 bp, Homo sapiens
gagataacccagacc

SEQ ID NO: 113857 - DNA, 15 bp, Homo sapiens
ggagataacccagac

SEQ ID NO: 113858 - DNA, 15 bp, Homo sapiens
aggagataacccaga

SEQ ID NO: 113859 - DNA, 15 bp, Homo sapiens
aaggagataacccag

SEQ ID NO: 113860 - DNA, 15 bp, Homo sapiens
gaaggagataaccca

SEQ ID NO: 113861 - DNA, 15 bp, Homo sapiens
agaaggagataaccc

SEQ ID NO: 113862 - DNA, 15 bp, Homo sapiens
cagaaggagataacc

SEQ ID NO: 113863 - DNA, 15 bp, Homo sapiens
tcagaaggagataac

SEQ ID NO: 113864 - DNA, 15 bp, Homo sapiens
atcagaaggagataa

SEQ ID NO: 113865 - DNA, 15 bp, Homo sapiens
gatcagaaggagata

SEQ ID NO: 113866 - DNA, 15 bp, Homo sapiens
agatcagaaggagat

SEQ ID NO: 113867 - DNA, 15 bp, Homo sapiens
aagatcagaaggaga

SEQ ID NO: 113868 - DNA, 15 bp, Homo sapiens
gaagatcagaaggag

SEQ ID NO: 113869 - DNA, 15 bp, Homo sapiens
tgaagatcagaagga

SEQ ID NO: 113870 - DNA, 15 bp, Homo sapiens
ttgaagatcagaagg

SEQ ID NO: 113871 - DNA, 15 bp, Homo sapiens
tttgaagatcagaag

SEQ ID NO: 113872 - DNA, 15 bp, Homo sapiens
ttttgaagatcagaa

SEQ ID NO: 113873 - DNA, 15 bp, Homo sapiens
gttttgaagatcaga

SEQ ID NO: 113874 - DNA, 15 bp, Homo sapiens
tgttttgaagatcag

SEQ ID NO: 113875 - DNA, 15 bp, Homo sapiens
ttgttttgaagatca

SEQ ID NO: 113876 - DNA, 15 bp, Homo sapiens
cttgttttgaagatc

SEQ ID NO: 113877 - DNA, 15 bp, Homo sapiens
tcttgttttgaagat

SEQ ID NO: 113878 - DNA, 15 bp, Homo sapiens
ctcttgttttgaaga

SEQ ID NO: 113879 - DNA, 15 bp, Homo sapiens
tctcttgttttgaag

SEQ ID NO: 113880 - DNA, 15 bp, Homo sapiens
ctctcttgttttgaa

SEQ ID NO: 113881 - DNA, 15 bp, Homo sapiens
tctctcttgttttga

SEQ ID NO: 113882 - DNA, 15 bp, Homo sapiens
ctctctcttgttttg

SEQ ID NO: 113883 - DNA, 15 bp, Homo sapiens
tctctctcttgtttt

SEQ ID NO: 113884 - DNA, 15 bp, Homo sapiens
gtctctctcttgttt

SEQ ID NO: 113885 - DNA, 15 bp, Homo sapiens
ggtctctctcttgtt

SEQ ID NO: 113886 - DNA, 15 bp, Homo sapiens
aggtctctctcttgt

SEQ ID NO: 113887 - DNA, 15 bp, Homo sapiens
aaggtctctctcttg

SEQ ID NO: 113888 - DNA, 15 bp, Homo sapiens
caaggtctctctctt

SEQ ID NO: 113889 - DNA, 15 bp, Homo sapiens
tcaaggtctctctct

SEQ ID NO: 113890 - DNA, 15 bp, Homo sapiens
ttcaaggtctctctc

SEQ ID NO: 113891 - DNA, 15 bp, Homo sapiens
attcaaggtctctct

SEQ ID NO: 113892 - DNA, 15 bp, Homo sapiens
tattcaaggtctctc

SEQ ID NO: 113893 - DNA, 15 bp, Homo sapiens
gtattcaaggtctct

SEQ ID NO: 113894 - DNA, 15 bp, Homo sapiens
tgtattcaaggtctc

SEQ ID NO: 113895 - DNA, 15 bp, Homo sapiens
gtgtattcaaggtct

SEQ ID NO: 113896 - DNA, 15 bp, Homo sapiens
agtgtattcaaggtc

SEQ ID NO: 113897 - DNA, 15 bp, Homo sapiens
cagtgtattcaaggt

SEQ ID NO: 113898 - DNA, 15 bp, Homo sapiens
tcagtgtattcaagg

SEQ ID NO: 113899 - DNA, 15 bp, Homo sapiens
gtcagtgtattcaag

SEQ ID NO: 113900 - DNA, 15 bp, Homo sapiens
agtcagtgtattcaa

SEQ ID NO: 113901 - DNA, 15 bp, Homo sapiens
gagtcagtgtattca

SEQ ID NO: 113902 - DNA, 15 bp, Homo sapiens
agagtcagtgtattc

SEQ ID NO: 113903 - DNA, 15 bp, Homo sapiens
aagagtcagtgtatt

SEQ ID NO: 113904 - DNA, 15 bp, Homo sapiens
gaagagtcagtgtat

SEQ ID NO: 113905 - DNA, 15 bp, Homo sapiens
ggaagagtcagtgta

SEQ ID NO: 113906 - DNA, 15 bp, Homo sapiens
tggaagagtcagtgt

SEQ ID NO: 113907 - DNA, 15 bp, Homo sapiens
gtggaagagtcagtg

SEQ ID NO: 113908 - DNA, 15 bp, Homo sapiens
ggtggaagagtcagt

SEQ ID NO: 113909 - DNA, 15 bp, Homo sapiens
gggtggaagagtcag

SEQ ID NO: 113910 - DNA, 15 bp, Homo sapiens
agggtggaagagtca

SEQ ID NO: 113911 - DNA, 15 bp, Homo sapiens
aagggtggaagagtc

SEQ ID NO: 113912 - DNA, 15 bp, Homo sapiens
aaagggtggaagagt

SEQ ID NO: 113913 - DNA, 15 bp, Homo sapiens
aaaagggtggaagag

SEQ ID NO: 113914 - DNA, 15 bp, Homo sapiens
aaaaagggtggaaga

SEQ ID NO: 113915 - DNA, 15 bp, Homo sapiens
aaaaaagggtggaag

SEQ ID NO: 113916 - DNA, 15 bp, Homo sapiens
aaaaaaagggtggaa

SEQ ID NO: 113917 - DNA, 15 bp, Homo sapiens
aaaaaaaagggtgga

SEQ ID NO: 113918 - DNA, 15 bp, Homo sapiens
aaaaaaaaagggtgg

SEQ ID NO: 113919 - DNA, 15 bp, Homo sapiens
gaaaaaaaaagggtg

SEQ ID NO: 113920 - DNA, 15 bp, Homo sapiens
agaaaaaaaaagggt

SEQ ID NO: 113921 - DNA, 15 bp, Homo sapiens
cagaaaaaaaaaggg

SEQ ID NO: 113922 - DNA, 15 bp, Homo sapiens
ccagaaaaaaaaagg

SEQ ID NO: 113923 - DNA, 15 bp, Homo sapiens
cccagaaaaaaaaag

SEQ ID NO: 113924 - DNA, 15 bp, Homo sapiens
tcccagaaaaaaaaa

SEQ ID NO: 113925 - DNA, 15 bp, Homo sapiens
ttcccagaaaaaaaa

SEQ ID NO: 113926 - DNA, 15 bp, Homo sapiens
tttcccagaaaaaaa

SEQ ID NO: 113927 - DNA, 15 bp, Homo sapiens
ctttcccagaaaaaa

SEQ ID NO: 113928 - DNA, 15 bp, Homo sapiens
cctttcccagaaaaa

SEQ ID NO: 113929 - DNA, 15 bp, Homo sapiens
tcctttcccagaaaa

SEQ ID NO: 113930 - DNA, 15 bp, Homo sapiens
ctcctttcccagaaa

SEQ ID NO: 113931 - DNA, 15 bp, Homo sapiens
tctcctttcccagaa

SEQ ID NO: 113932 - DNA, 15 bp, Homo sapiens
ctctcctttcccaga

SEQ ID NO: 113933 - DNA, 15 bp, Homo sapiens
gctctcctttcccag

SEQ ID NO: 113934 - DNA, 15 bp, Homo sapiens
tgctctcctttccca

SEQ ID NO: 113935 - DNA, 15 bp, Homo sapiens
ttgctctcctttccc

SEQ ID NO: 113936 - DNA, 15 bp, Homo sapiens
cttgctctcctttcc

SEQ ID NO: 113937 - DNA, 15 bp, Homo sapiens
tcttgctctcctttc

SEQ ID NO: 113938 - DNA, 15 bp, Homo sapiens
ctcttgctctccttt

SEQ ID NO: 113939 - DNA, 15 bp, Homo sapiens
cctcttgctctcctt

SEQ ID NO: 113940 - DNA, 15 bp, Homo sapiens
acctcttgctctcct

SEQ ID NO: 113941 - DNA, 15 bp, Homo sapiens
gacctcttgctctcc

SEQ ID NO: 113942 - DNA, 15 bp, Homo sapiens
ggacctcttgctctc

SEQ ID NO: 113943 - DNA, 15 bp, Homo sapiens
gggacctcttgctct

SEQ ID NO: 113944 - DNA, 15 bp, Homo sapiens
cgggacctcttgctc

SEQ ID NO: 113945 - DNA, 15 bp, Homo sapiens
tcgggacctcttgct

SEQ ID NO: 113946 - DNA, 15 bp, Homo sapiens
ctcgggacctcttgc

SEQ ID NO: 113947 - DNA, 15 bp, Homo sapiens
actcgggacctcttg

SEQ ID NO: 113948 - DNA, 15 bp, Homo sapiens
gactcgggacctctt

SEQ ID NO: 113949 - DNA, 15 bp, Homo sapiens
ggactcgggacctct

SEQ ID NO: 113950 - DNA, 15 bp, Homo sapiens
gggactcgggacctc

SEQ ID NO: 113951 - DNA, 15 bp, Homo sapiens
ggggactcgggacct

SEQ ID NO: 113952 - DNA, 15 bp, Homo sapiens
aggggactcgggacc

SEQ ID NO: 113953 - DNA, 15 bp, Homo sapiens
gaggggactcgggac

SEQ ID NO: 113954 - DNA, 15 bp, Homo sapiens
ggaggggactcggga

SEQ ID NO: 113955 - DNA, 15 bp, Homo sapiens
aggaggggactcggg

SEQ ID NO: 113956 - DNA, 15 bp, Homo sapiens
taggaggggactcgg

SEQ ID NO: 113957 - DNA, 15 bp, Homo sapiens
ctaggaggggactcg

SEQ ID NO: 113958 - DNA, 15 bp, Homo sapiens
actaggaggggactc

SEQ ID NO: 113959 - DNA, 15 bp, Homo sapiens
gactaggaggggact

SEQ ID NO: 113960 - DNA, 15 bp, Homo sapiens
agactaggaggggac

SEQ ID NO: 113961 - DNA, 15 bp, Homo sapiens
aagactaggagggga

SEQ ID NO: 113962 - DNA, 15 bp, Homo sapiens
aaagactaggagggg

SEQ ID NO: 113963 - DNA, 15 bp, Homo sapiens
gaaagactaggaggg

SEQ ID NO: 113964 - DNA, 15 bp, Homo sapiens
tgaaagactaggagg

SEQ ID NO: 113965 - DNA, 15 bp, Homo sapiens
atgaaagactaggag

SEQ ID NO: 113966 - DNA, 15 bp, Homo sapiens
gatgaaagactagga

SEQ ID NO: 113967 - DNA, 15 bp, Homo sapiens
ggatgaaagactagg

SEQ ID NO: 113968 - DNA, 15 bp, Homo sapiens
aggatgaaagactag

SEQ ID NO: 113969 - DNA, 15 bp, Homo sapiens
caggatgaaagacta

SEQ ID NO: 113970 - DNA, 15 bp, Homo sapiens
tcaggatgaaagact

SEQ ID NO: 113971 - DNA, 15 bp, Homo sapiens
ttcaggatgaaagac

SEQ ID NO: 113972 - DNA, 15 bp, Homo sapiens
attcaggatgaaaga

SEQ ID NO: 113973 - DNA, 15 bp, Homo sapiens
aattcaggatgaaag

SEQ ID NO: 113974 - DNA, 15 bp, Homo sapiens
aaattcaggatgaaa

SEQ ID NO: 113975 - DNA, 15 bp, Homo sapiens
caaattcaggatgaa

SEQ ID NO: 113976 - DNA, 15 bp, Homo sapiens
gcaaattcaggatga

SEQ ID NO: 113977 - DNA, 15 bp, Homo sapiens
tgcaaattcaggatg

SEQ ID NO: 113978 - DNA, 15 bp, Homo sapiens
gtgcaaattcaggat

SEQ ID NO: 113979 - DNA, 15 bp, Homo sapiens
tgtgcaaattcagga

SEQ ID NO: 113980 - DNA, 15 bp, Homo sapiens
ctgtgcaaattcagg

SEQ ID NO: 113981 - DNA, 15 bp, Homo sapiens
tctgtgcaaattcag

SEQ ID NO: 113982 - DNA, 15 bp, Homo sapiens
ctctgtgcaaattca

SEQ ID NO: 113983 - DNA, 15 bp, Homo sapiens
cctctgtgcaaattc

SEQ ID NO: 113984 - DNA, 15 bp, Homo sapiens
tcctctgtgcaaatt

SEQ ID NO: 113985 - DNA, 15 bp, Homo sapiens
ttcctctgtgcaaat

SEQ ID NO: 113986 - DNA, 15 bp, Homo sapiens
tttcctctgtgcaaa

SEQ ID NO: 113987 - DNA, 15 bp, Homo sapiens
ctttcctctgtgcaa

SEQ ID NO: 113988 - DNA, 15 bp, Homo sapiens
gctttcctctgtgca

SEQ ID NO: 113989 - DNA, 15 bp, Homo sapiens
cgctttcctctgtgc

SEQ ID NO: 113990 - DNA, 15 bp, Homo sapiens
ccgctttcctctgtg

SEQ ID NO: 113991 - DNA, 15 bp, Homo sapiens
cccgctttcctctgt

SEQ ID NO: 113992 - DNA, 15 bp, Homo sapiens
acccgctttcctctg

SEQ ID NO: 113993 - DNA, 15 bp, Homo sapiens
cacccgctttcctct

SEQ ID NO: 113994 - DNA, 15 bp, Homo sapiens
gcacccgctttcctc

SEQ ID NO: 113995 - DNA, 15 bp, Homo sapiens
ggcacccgctttcct

SEQ ID NO: 113996 - DNA, 15 bp, Homo sapiens
gggcacccgctttcc

SEQ ID NO: 113997 - DNA, 15 bp, Homo sapiens
cgggcacccgctttc

SEQ ID NO: 113998 - DNA, 15 bp, Homo sapiens
ccgggcacccgcttt

SEQ ID NO: 113999 - DNA, 15 bp, Homo sapiens
gccgggcacccgctt

SEQ ID NO: 114000 - DNA, 15 bp, Homo sapiens
tgccgggcacccgct

SEQ ID NO: 114001 - DNA, 15 bp, Homo sapiens
atgccgggcacccgc

SEQ ID NO: 114002 - DNA, 15 bp, Homo sapiens
catgccgggcacccg

SEQ ID NO: 114003 - DNA, 15 bp, Homo sapiens
ccatgccgggcaccc

SEQ ID NO: 114004 - DNA, 15 bp, Homo sapiens
gccatgccgggcacc

SEQ ID NO: 114005 - DNA, 15 bp, Homo sapiens
ggccatgccgggcac

SEQ ID NO: 114006 - DNA, 15 bp, Homo sapiens
tggccatgccgggca

SEQ ID NO: 114007 - DNA, 15 bp, Homo sapiens
atggccatgccgggc

SEQ ID NO: 114008 - DNA, 15 bp, Homo sapiens
gatggccatgccggg

SEQ ID NO: 114009 - DNA, 15 bp, Homo sapiens
ggatggccatgccgg

SEQ ID NO: 114010 - DNA, 15 bp, Homo sapiens
aggatggccatgccg

SEQ ID NO: 114011 - DNA, 15 bp, Homo sapiens
caggatggccatgcc

SEQ ID NO: 114012 - DNA, 15 bp, Homo sapiens
tcaggatggccatgc

SEQ ID NO: 114013 - DNA, 15 bp, Homo sapiens
atcaggatggccatg

SEQ ID NO: 114014 - DNA, 15 bp, Homo sapiens
catcaggatggccat

SEQ ID NO: 114015 - DNA, 15 bp, Homo sapiens
acatcaggatggcca

SEQ ID NO: 114016 - DNA, 15 bp, Homo sapiens
aacatcaggatggcc

SEQ ID NO: 114017 - DNA, 15 bp, Homo sapiens
caacatcaggatggc

SEQ ID NO: 114018 - DNA, 15 bp, Homo sapiens
gcaacatcaggatgg

SEQ ID NO: 114019 - DNA, 15 bp, Homo sapiens
agcaacatcaggatg

SEQ ID NO: 114020 - DNA, 15 bp, Homo sapiens
cagcaacatcaggat

SEQ ID NO: 114021 - DNA, 15 bp, Homo sapiens
ccagcaacatcagga

SEQ ID NO: 114022 - DNA, 15 bp, Homo sapiens
gccagcaacatcagg

SEQ ID NO: 114023 - DNA, 15 bp, Homo sapiens
cgccagcaacatcag

SEQ ID NO: 114024 - DNA, 15 bp, Homo sapiens
ccgccagcaacatca

SEQ ID NO: 114025 - DNA, 15 bp, Homo sapiens
cccgccagcaacatc

SEQ ID NO: 114026 - DNA, 15 bp, Homo sapiens
tcccgccagcaacat

SEQ ID NO: 114027 - DNA, 15 bp, Homo sapiens
atcccgccagcaaca

SEQ ID NO: 114028 - DNA, 15 bp, Homo sapiens
gatcccgccagcaac

SEQ ID NO: 114029 - DNA, 15 bp, Homo sapiens
ggatcccgccagcaa

SEQ ID NO: 114030 - DNA, 15 bp, Homo sapiens
gggatcccgccagca

SEQ ID NO: 114031 - DNA, 15 bp, Homo sapiens
ggggatcccgccagc

SEQ ID NO: 114032 - DNA, 15 bp, Homo sapiens
tggggatcccgccag

SEQ ID NO: 114033 - DNA, 15 bp, Homo sapiens
atggggatcccgcca

SEQ ID NO: 114034 - DNA, 15 bp, Homo sapiens
catggggatcccgcc

SEQ ID NO: 114035 - DNA, 15 bp, Homo sapiens
gcatggggatcccgc

SEQ ID NO: 114036 - DNA, 15 bp, Homo sapiens
tgcatggggatcccg

SEQ ID NO: 114037 - DNA, 15 bp, Homo sapiens
gtgcatggggatccc

SEQ ID NO: 114038 - DNA, 15 bp, Homo sapiens
ggtgcatggggatcc

SEQ ID NO: 114039 - DNA, 15 bp, Homo sapiens
aggtgcatggggatc

SEQ ID NO: 114040 - DNA, 15 bp, Homo sapiens
aaggtgcatggggat

SEQ ID NO: 114041 - DNA, 15 bp, Homo sapiens
caaggtgcatgggga

SEQ ID NO: 114042 - DNA, 15 bp, Homo sapiens
acaaggtgcatgggg

SEQ ID NO: 114043 - DNA, 15 bp, Homo sapiens
gacaaggtgcatggg

SEQ ID NO: 114044 - DNA, 15 bp, Homo sapiens
ggacaaggtgcatgg

SEQ ID NO: 114045 - DNA, 15 bp, Homo sapiens
aggacaaggtgcatg

SEQ ID NO: 114046 - DNA, 15 bp, Homo sapiens
aaggacaaggtgcat

SEQ ID NO: 114047 - DNA, 15 bp, Homo sapiens
gaaggacaaggtgca

SEQ ID NO: 114048 - DNA, 15 bp, Homo sapiens
agaaggacaaggtgc

SEQ ID NO: 114049 - DNA, 15 bp, Homo sapiens
gagaaggacaaggtg

SEQ ID NO: 114050 - DNA, 15 bp, Homo sapiens
ggagaaggacaaggt

SEQ ID NO: 114051 - DNA, 15 bp, Homo sapiens
tggagaaggacaagg

SEQ ID NO: 114052 - DNA, 15 bp, Homo sapiens
gtggagaaggacaag

SEQ ID NO: 114053 - DNA, 15 bp, Homo sapiens
agtggagaaggacaa

SEQ ID NO: 114054 - DNA, 15 bp, Homo sapiens
cagtggagaaggaca

SEQ ID NO: 114055 - DNA, 15 bp, Homo sapiens
tcagtggagaaggac

SEQ ID NO: 114056 - DNA, 15 bp, Homo sapiens
atcagtggagaagga

SEQ ID NO: 114057 - DNA, 15 bp, Homo sapiens
tatcagtggagaagg

SEQ ID NO: 114058 - DNA, 15 bp, Homo sapiens
gtatcagtggagaag

SEQ ID NO: 114059 - DNA, 15 bp, Homo sapiens
agtatcagtggagaa

SEQ ID NO: 114060 - DNA, 15 bp, Homo sapiens
cagtatcagtggaga

SEQ ID NO: 114061 - DNA, 15 bp, Homo sapiens
ccagtatcagtggag

SEQ ID NO: 114062 - DNA, 15 bp, Homo sapiens
gccagtatcagtgga

SEQ ID NO: 114063 - DNA, 15 bp, Homo sapiens
tgccagtatcagtgg

SEQ ID NO: 114064 - DNA, 15 bp, Homo sapiens
ctgccagtatcagtg

SEQ ID NO: 114065 - DNA, 15 bp, Homo sapiens
gctgccagtatcagt

SEQ ID NO: 114066 - DNA, 15 bp, Homo sapiens
agctgccagtatcag

SEQ ID NO: 114067 - DNA, 15 bp, Homo sapiens
gagctgccagtatca

SEQ ID NO: 114068 - DNA, 15 bp, Homo sapiens
cgagctgccagtatc

SEQ ID NO: 114069 - DNA, 15 bp, Homo sapiens
ccgagctgccagtat

SEQ ID NO: 114070 - DNA, 15 bp, Homo sapiens
gccgagctgccagta

SEQ ID NO: 114071 - DNA, 15 bp, Homo sapiens
agccgagctgccagt

SEQ ID NO: 114072 - DNA, 15 bp, Homo sapiens
gagccgagctgccag

SEQ ID NO: 114073 - DNA, 15 bp, Homo sapiens
ggagccgagctgcca

SEQ ID NO: 114074 - DNA, 15 bp, Homo sapiens
aggagccgagctgcc

SEQ ID NO: 114075 - DNA, 15 bp, Homo sapiens
caggagccgagctgc

SEQ ID NO: 114076 - DNA, 15 bp, Homo sapiens
ccaggagccgagctg

SEQ ID NO: 114077 - DNA, 15 bp, Homo sapiens
tccaggagccgagct

SEQ ID NO: 114078 - DNA, 15 bp, Homo sapiens
gtccaggagccgagc

SEQ ID NO: 114079 - DNA, 15 bp, Homo sapiens
ggtccaggagccgag

SEQ ID NO: 114080 - DNA, 15 bp, Homo sapiens
gggtccaggagccga

SEQ ID NO: 114081 - DNA, 15 bp, Homo sapiens
tgggtccaggagccg

SEQ ID NO: 114082 - DNA, 15 bp, Homo sapiens
ttgggtccaggagcc

SEQ ID NO: 114083 - DNA, 15 bp, Homo sapiens
cttgggtccaggagc

SEQ ID NO: 114084 - DNA, 15 bp, Homo sapiens
tcttgggtccaggag

SEQ ID NO: 114085 - DNA, 15 bp, Homo sapiens
atcttgggtccagga

SEQ ID NO: 114086 - DNA, 15 bp, Homo sapiens
gatcttgggtccagg

SEQ ID NO: 114087 - DNA, 15 bp, Homo sapiens
ggatcttgggtccag

SEQ ID NO: 114088 - DNA, 15 bp, Homo sapiens
gggatcttgggtcca

SEQ ID NO: 114089 - DNA, 15 bp, Homo sapiens
agggatcttgggtcc

SEQ ID NO: 114090 - DNA, 15 bp, Homo sapiens
aagggatcttgggtc

SEQ ID NO: 114091 - DNA, 15 bp, Homo sapiens
caagggatcttgggt

SEQ ID NO: 114092 - DNA, 15 bp, Homo sapiens
tcaagggatcttggg

SEQ ID NO: 114093 - DNA, 15 bp, Homo sapiens
ctcaagggatcttgg

SEQ ID NO: 114094 - DNA, 15 bp, Homo sapiens
actcaagggatcttg

SEQ ID NO: 114095 - DNA, 15 bp, Homo sapiens
cactcaagggatctt

SEQ ID NO: 114096 - DNA, 15 bp, Homo sapiens
ccactcaagggatct

SEQ ID NO: 114097 - DNA, 15 bp, Homo sapiens
tccactcaagggatc

SEQ ID NO: 114098 - DNA, 15 bp, Homo sapiens
ttccactcaagggat

SEQ ID NO: 114099 - DNA, 15 bp, Homo sapiens
attccactcaaggga

SEQ ID NO: 114100 - DNA, 15 bp, Homo sapiens
aattccactcaaggg

SEQ ID NO: 114101 - DNA, 15 bp, Homo sapiens
gaattccactcaagg

SEQ ID NO: 114102 - DNA, 15 bp, Homo sapiens
agaattccactcaag

SEQ ID NO: 114103 - DNA, 15 bp, Homo sapiens
cagaattccactcaa

SEQ ID NO: 114104 - DNA, 15 bp, Homo sapiens
gcagaattccactca

SEQ ID NO: 114105 - DNA, 15 bp, Homo sapiens
tgcagaattccactc

SEQ ID NO: 114106 - DNA, 15 bp, Homo sapiens
ctgcagaattccact

SEQ ID NO: 114107 - DNA, 15 bp, Homo sapiens
actgcagaattccac

SEQ ID NO: 114108 - DNA, 15 bp, Homo sapiens
cactgcagaattcca

SEQ ID NO: 114109 - DNA, 15 bp, Homo sapiens
gcactgcagaattcc

SEQ ID NO: 114110 - DNA, 15 bp, Homo sapiens
tgcactgcagaattc

SEQ ID NO: 114111 - DNA, 15 bp, Homo sapiens
ttgcactgcagaatt

SEQ ID NO: 114112 - DNA, 15 bp, Homo sapiens
cttgcactgcagaat

SEQ ID NO: 114113 - DNA, 15 bp, Homo sapiens
tcttgcactgcagaa

SEQ ID NO: 114114 - DNA, 15 bp, Homo sapiens
ctcttgcactgcaga

SEQ ID NO: 114115 - DNA, 15 bp, Homo sapiens
gctcttgcactgcag

SEQ ID NO: 114116 - DNA, 15 bp, Homo sapiens
ggctcttgcactgca

SEQ ID NO: 114117 - DNA, 15 bp, Homo sapiens
gggctcttgcactgc

SEQ ID NO: 114118 - DNA, 15 bp, Homo sapiens
agggctcttgcactg

SEQ ID NO: 114119 - DNA, 15 bp, Homo sapiens
aagggctcttgcact

SEQ ID NO: 114120 - DNA, 15 bp, Homo sapiens
gaagggctcttgcac

SEQ ID NO: 114121 - DNA, 15 bp, Homo sapiens
cgaagggctcttgca

SEQ ID NO: 114122 - DNA, 15 bp, Homo sapiens
acgaagggctcttgc

SEQ ID NO: 114123 - DNA, 15 bp, Homo sapiens
cacgaagggctcttg

SEQ ID NO: 114124 - DNA, 15 bp, Homo sapiens
ccacgaagggctctt

SEQ ID NO: 114125 - DNA, 15 bp, Homo sapiens
cccacgaagggctct

SEQ ID NO: 114126 - DNA, 15 bp, Homo sapiens
tcccacgaagggctc

SEQ ID NO: 114127 - DNA, 15 bp, Homo sapiens
ctcccacgaagggct

SEQ ID NO: 114128 - DNA, 15 bp, Homo sapiens
gctcccacgaagggc

SEQ ID NO: 114129 - DNA, 15 bp, Homo sapiens
agctcccacgaaggg

SEQ ID NO: 114130 - DNA, 15 bp, Homo sapiens
cagctcccacgaagg

SEQ ID NO: 114131 - DNA, 15 bp, Homo sapiens
acagctcccacgaag

SEQ ID NO: 114132 - DNA, 15 bp, Homo sapiens
gacagctcccacgaa

SEQ ID NO: 114133 - DNA, 15 bp, Homo sapiens
ggacagctcccacga

SEQ ID NO: 114134 - DNA, 15 bp, Homo sapiens
gggacagctcccacg

SEQ ID NO: 114135 - DNA, 15 bp, Homo sapiens
tgggacagctcccac

SEQ ID NO: 114136 - DNA, 15 bp, Homo sapiens
atgggacagctccca

SEQ ID NO: 114137 - DNA, 15 bp, Homo sapiens
catgggacagctccc

SEQ ID NO: 114138 - DNA, 15 bp, Homo sapiens
acatgggacagctcc

SEQ ID NO: 114139 - DNA, 15 bp, Homo sapiens
aacatgggacagctc

SEQ ID NO: 114140 - DNA, 15 bp, Homo sapiens
aaacatgggacagct

SEQ ID NO: 114141 - DNA, 15 bp, Homo sapiens
gaaacatgggacagc

SEQ ID NO: 114142 - DNA, 15 bp, Homo sapiens
ggaaacatgggacag

SEQ ID NO: 114143 - DNA, 15 bp, Homo sapiens
tggaaacatgggaca

SEQ ID NO: 114144 - DNA, 15 bp, Homo sapiens
atggaaacatgggac

SEQ ID NO: 114145 - DNA, 15 bp, Homo sapiens
catggaaacatggga

SEQ ID NO: 114146 - DNA, 15 bp, Homo sapiens
ccatggaaacatggg

SEQ ID NO: 114147 - DNA, 15 bp, Homo sapiens
accatggaaacatgg

SEQ ID NO: 114148 - DNA, 15 bp, Homo sapiens
gaccatggaaacatg

SEQ ID NO: 114149 - DNA, 15 bp, Homo sapiens
ggaccatggaaacat

SEQ ID NO: 114150 - DNA, 15 bp, Homo sapiens
gggaccatggaaaca

SEQ ID NO: 114151 - DNA, 15 bp, Homo sapiens
ggggaccatggaaac

SEQ ID NO: 114152 - DNA, 15 bp, Homo sapiens
tggggaccatggaaa

SEQ ID NO: 114153 - DNA, 15 bp, Homo sapiens
ctggggaccatggaa

SEQ ID NO: 114154 - DNA, 15 bp, Homo sapiens
actggggaccatgga

SEQ ID NO: 114155 - DNA, 15 bp, Homo sapiens
gactggggaccatgg

SEQ ID NO: 114156 - DNA, 15 bp, Homo sapiens
agactggggaccatg

SEQ ID NO: 114157 - DNA, 15 bp, Homo sapiens
gagactggggaccat

SEQ ID NO: 114158 - DNA, 15 bp, Homo sapiens
ggagactggggacca

SEQ ID NO: 114159 - DNA, 15 bp, Homo sapiens
gggagactggggacc

SEQ ID NO: 114160 - DNA, 15 bp, Homo sapiens
ggggagactggggac

SEQ ID NO: 114161 - DNA, 15 bp, Homo sapiens
aggggagactgggga

SEQ ID NO: 114162 - DNA, 15 bp, Homo sapiens
gaggggagactgggg

SEQ ID NO: 114163 - DNA, 15 bp, Homo sapiens
ggaggggagactggg

SEQ ID NO: 114164 - DNA, 15 bp, Homo sapiens
tggaggggagactgg

SEQ ID NO: 114165 - DNA, 15 bp, Homo sapiens
gtggaggggagactg

SEQ ID NO: 114166 - DNA, 15 bp, Homo sapiens
agtggaggggagact

SEQ ID NO: 114167 - DNA, 15 bp, Homo sapiens
aagtggaggggagac

SEQ ID NO: 114168 - DNA, 15 bp, Homo sapiens
caagtggaggggaga

SEQ ID NO: 114169 - DNA, 15 bp, Homo sapiens
ccaagtggaggggag

SEQ ID NO: 114170 - DNA, 15 bp, Homo sapiens
accaagtggagggga

SEQ ID NO: 114171 - DNA, 15 bp, Homo sapiens
caccaagtggagggg

SEQ ID NO: 114172 - DNA, 15 bp, Homo sapiens
ccaccaagtggaggg

SEQ ID NO: 114173 - DNA, 15 bp, Homo sapiens
cccaccaagtggagg

SEQ ID NO: 114174 - DNA, 15 bp, Homo sapiens
ccccaccaagtggag

SEQ ID NO: 114175 - DNA, 15 bp, Homo sapiens
accccaccaagtgga

SEQ ID NO: 114176 - DNA, 15 bp, Homo sapiens
gaccccaccaagtgg

SEQ ID NO: 114177 - DNA, 15 bp, Homo sapiens
tgaccccaccaagtg

SEQ ID NO: 114178 - DNA, 15 bp, Homo sapiens
gtgaccccaccaagt

SEQ ID NO: 114179 - DNA, 15 bp, Homo sapiens
ggtgaccccaccaag

SEQ ID NO: 114180 - DNA, 15 bp, Homo sapiens
tggtgaccccaccaa

SEQ ID NO: 114181 - DNA, 15 bp, Homo sapiens
ttggtgaccccacca

SEQ ID NO: 114182 - DNA, 15 bp, Homo sapiens
gttggtgaccccacc

SEQ ID NO: 114183 - DNA, 15 bp, Homo sapiens
agttggtgaccccac

SEQ ID NO: 114184 - DNA, 15 bp, Homo sapiens
tagttggtgacccca

SEQ ID NO: 114185 - DNA, 15 bp, Homo sapiens
gtagttggtgacccc

SEQ ID NO: 114186 - DNA, 15 bp, Homo sapiens
agtagttggtgaccc

SEQ ID NO: 114187 - DNA, 15 bp, Homo sapiens
gagtagttggtgacc

SEQ ID NO: 114188 - DNA, 15 bp, Homo sapiens
tgagtagttggtgac

SEQ ID NO: 114189 - DNA, 15 bp, Homo sapiens
gtgagtagttggtga

SEQ ID NO: 114190 - DNA, 15 bp, Homo sapiens
ggtgagtagttggtg

SEQ ID NO: 114191 - DNA, 15 bp, Homo sapiens
tggtgagtagttggt

SEQ ID NO: 114192 - DNA, 15 bp, Homo sapiens
ctggtgagtagttgg

SEQ ID NO: 114193 - DNA, 15 bp, Homo sapiens
tctggtgagtagttg

SEQ ID NO: 114194 - DNA, 15 bp, Homo sapiens
ttctggtgagtagtt

SEQ ID NO: 114195 - DNA, 15 bp, Homo sapiens
cttctggtgagtagt

SEQ ID NO: 114196 - DNA, 15 bp, Homo sapiens
ccttctggtgagtag

SEQ ID NO: 114197 - DNA, 15 bp, Homo sapiens
cccttctggtgagta

SEQ ID NO: 114198 - DNA, 15 bp, Homo sapiens
ccccttctggtgagt

SEQ ID NO: 114199 - DNA, 15 bp, Homo sapiens
cccccttctggtgag

SEQ ID NO: 114200 - DNA, 15 bp, Homo sapiens
gcccccttctggtga

SEQ ID NO: 114201 - DNA, 15 bp, Homo sapiens
agcccccttctggtg

SEQ ID NO: 114202 - DNA, 15 bp, Homo sapiens
aagcccccttctggt

SEQ ID NO: 114203 - DNA, 15 bp, Homo sapiens
taagcccccttctgg

SEQ ID NO: 114204 - DNA, 15 bp, Homo sapiens
gtaagcccccttctg

SEQ ID NO: 114205 - DNA, 15 bp, Homo sapiens
ggtaagcccccttct

SEQ ID NO: 114206 - DNA, 15 bp, Homo sapiens
tggtaagcccccttc

SEQ ID NO: 114207 - DNA, 15 bp, Homo sapiens
ttggtaagccccctt

SEQ ID NO: 114208 - DNA, 15 bp, Homo sapiens
cttggtaagccccct

SEQ ID NO: 114209 - DNA, 15 bp, Homo sapiens
tcttggtaagccccc

SEQ ID NO: 114210 - DNA, 15 bp, Homo sapiens
ttcttggtaagcccc

SEQ ID NO: 114211 - DNA, 15 bp, Homo sapiens
tttcttggtaagccc

SEQ ID NO: 114212 - DNA, 15 bp, Homo sapiens
ctttcttggtaagcc

SEQ ID NO: 114213 - DNA, 15 bp, Homo sapiens
gctttcttggtaagc

SEQ ID NO: 114214 - DNA, 15 bp, Homo sapiens
ggctttcttggtaag

SEQ ID NO: 114215 - DNA, 15 bp, Homo sapiens
gggctttcttggtaa

SEQ ID NO: 114216 - DNA, 15 bp, Homo sapiens
agggctttcttggta

SEQ ID NO: 114217 - DNA, 15 bp, Homo sapiens
tagggctttcttggt

SEQ ID NO: 114218 - DNA, 15 bp, Homo sapiens
ttagggctttcttgg

SEQ ID NO: 114219 - DNA, 15 bp, Homo sapiens
tttagggctttcttg

SEQ ID NO: 114220 - DNA, 15 bp, Homo sapiens
ttttagggctttctt

SEQ ID NO: 114221 - DNA, 15 bp, Homo sapiens
tttttagggctttct

SEQ ID NO: 114222 - DNA, 15 bp, Homo sapiens
ctttttagggctttc

SEQ ID NO: 114223 - DNA, 15 bp, Homo sapiens
gctttttagggcttt

SEQ ID NO: 114224 - DNA, 15 bp, Homo sapiens
agctttttagggctt

SEQ ID NO: 114225 - DNA, 15 bp, Homo sapiens
cagctttttagggct

SEQ ID NO: 114226 - DNA, 15 bp, Homo sapiens
acagctttttagggc

SEQ ID NO: 114227 - DNA, 15 bp, Homo sapiens
aacagctttttaggg

SEQ ID NO: 114228 - DNA, 15 bp, Homo sapiens
caacagctttttagg

SEQ ID NO: 114229 - DNA, 15 bp, Homo sapiens
tcaacagctttttag

SEQ ID NO: 114230 - DNA, 15 bp, Homo sapiens
gtcaacagcttttta

SEQ ID NO: 114231 - DNA, 15 bp, Homo sapiens
agtcaacagcttttt

SEQ ID NO: 114232 - DNA, 15 bp, Homo sapiens
aagtcaacagctttt

SEQ ID NO: 114233 - DNA, 15 bp, Homo sapiens
taagtcaacagcttt

SEQ ID NO: 114234 - DNA, 15 bp, Homo sapiens
ataagtcaacagctt

SEQ ID NO: 114235 - DNA, 15 bp, Homo sapiens
gataagtcaacagct

SEQ ID NO: 114236 - DNA, 15 bp, Homo sapiens
agataagtcaacagc

SEQ ID NO: 114237 - DNA, 15 bp, Homo sapiens
cagataagtcaacag

SEQ ID NO: 114238 - DNA, 15 bp, Homo sapiens
gcagataagtcaaca

SEQ ID NO: 114239 - DNA, 15 bp, Homo sapiens
cgcagataagtcaac

SEQ ID NO: 114240 - DNA, 15 bp, Homo sapiens
gcgcagataagtcaa

SEQ ID NO: 114241 - DNA, 15 bp, Homo sapiens
agcgcagataagtca

SEQ ID NO: 114242 - DNA, 15 bp, Homo sapiens
aagcgcagataagtc

SEQ ID NO: 114243 - DNA, 15 bp, Homo sapiens
caagcgcagataagt

SEQ ID NO: 114244 - DNA, 15 bp, Homo sapiens
acaagcgcagataag

SEQ ID NO: 114245 - DNA, 15 bp, Homo sapiens
aacaagcgcagataa

SEQ ID NO: 114246 - DNA, 15 bp, Homo sapiens
gaacaagcgcagata

SEQ ID NO: 114247 - DNA, 15 bp, Homo sapiens
ggaacaagcgcagat

SEQ ID NO: 114248 - DNA, 15 bp, Homo sapiens
tggaacaagcgcaga

SEQ ID NO: 114249 - DNA, 15 bp, Homo sapiens
ttggaacaagcgcag

SEQ ID NO: 114250 - DNA, 15 bp, Homo sapiens
gttggaacaagcgca

SEQ ID NO: 114251 - DNA, 15 bp, Homo sapiens
agttggaacaagcgc

SEQ ID NO: 114252 - DNA, 15 bp, Homo sapiens
gagttggaacaagcg

SEQ ID NO: 114253 - DNA, 15 bp, Homo sapiens
agagttggaacaagc

SEQ ID NO: 114254 - DNA, 15 bp, Homo sapiens
aagagttggaacaag

SEQ ID NO: 114255 - DNA, 15 bp, Homo sapiens
taagagttggaacaa

SEQ ID NO: 114256 - DNA, 15 bp, Homo sapiens
ataagagttggaaca

SEQ ID NO: 114257 - DNA, 15 bp, Homo sapiens
cataagagttggaac

SEQ ID NO: 114258 - DNA, 15 bp, Homo sapiens
gcataagagttggaa

SEQ ID NO: 114259 - DNA, 15 bp, Homo sapiens
ggcataagagttgga

SEQ ID NO: 114260 - DNA, 15 bp, Homo sapiens
gggcataagagttgg

SEQ ID NO: 114261 - DNA, 15 bp, Homo sapiens
ggggcataagagttg

SEQ ID NO: 114262 - DNA, 15 bp, Homo sapiens
gggggcataagagtt

SEQ ID NO: 114263 - DNA, 15 bp, Homo sapiens
tgggggcataagagt

SEQ ID NO: 114264 - DNA, 15 bp, Homo sapiens
ttgggggcataagag

SEQ ID NO: 114265 - DNA, 15 bp, Homo sapiens
gttgggggcataaga

SEQ ID NO: 114266 - DNA, 15 bp, Homo sapiens
ggttgggggcataag

SEQ ID NO: 114267 - DNA, 15 bp, Homo sapiens
aggttgggggcataa

SEQ ID NO: 114268 - DNA, 15 bp, Homo sapiens
caggttgggggcata

SEQ ID NO: 114269 - DNA, 15 bp, Homo sapiens
gcaggttgggggcat

SEQ ID NO: 114270 - DNA, 15 bp, Homo sapiens
ggcaggttgggggca

SEQ ID NO: 114271 - DNA, 15 bp, Homo sapiens
gggcaggttgggggc

SEQ ID NO: 114272 - DNA, 15 bp, Homo sapiens
agggcaggttggggg

SEQ ID NO: 114273 - DNA, 15 bp, Homo sapiens
tagggcaggttgggg

SEQ ID NO: 114274 - DNA, 15 bp, Homo sapiens
gtagggcaggttggg

SEQ ID NO: 114275 - DNA, 15 bp, Homo sapiens
ggtagggcaggttgg

SEQ ID NO: 114276 - DNA, 15 bp, Homo sapiens
tggtagggcaggttg

SEQ ID NO: 114277 - DNA, 15 bp, Homo sapiens
gtggtagggcaggtt

SEQ ID NO: 114278 - DNA, 15 bp, Homo sapiens
ggtggtagggcaggt

SEQ ID NO: 114279 - DNA, 15 bp, Homo sapiens
tggtggtagggcagg

SEQ ID NO: 114280 - DNA, 15 bp, Homo sapiens
gtggtggtagggcag

SEQ ID NO: 114281 - DNA, 15 bp, Homo sapiens
ggtggtggtagggca

SEQ ID NO: 114282 - DNA, 15 bp, Homo sapiens
tggtggtggtagggc

SEQ ID NO: 114283 - DNA, 15 bp, Homo sapiens
gtggtggtggtaggg

SEQ ID NO: 114284 - DNA, 15 bp, Homo sapiens
cgtggtggtggtagg

SEQ ID NO: 114285 - DNA, 15 bp, Homo sapiens
gcgtggtggtggtag

SEQ ID NO: 114286 - DNA, 15 bp, Homo sapiens
cgcgtggtggtggta

SEQ ID NO: 114287 - DNA, 15 bp, Homo sapiens
gcgcgtggtggtggt

SEQ ID NO: 114288 - DNA, 15 bp, Homo sapiens
agcgcgtggtggtgg

SEQ ID NO: 114289 - DNA, 15 bp, Homo sapiens
gagcgcgtggtggtg

SEQ ID NO: 114290 - DNA, 15 bp, Homo sapiens
tgagcgcgtggtggt

SEQ ID NO: 114291 - DNA, 15 bp, Homo sapiens
ctgagcgcgtggtgg

SEQ ID NO: 114292 - DNA, 15 bp, Homo sapiens
gctgagcgcgtggtg

SEQ ID NO: 114293 - DNA, 15 bp, Homo sapiens
ggctgagcgcgtggt

SEQ ID NO: 114294 - DNA, 15 bp, Homo sapiens
aggctgagcgcgtgg

SEQ ID NO: 114295 - DNA, 15 bp, Homo sapiens
caggctgagcgcgtg

SEQ ID NO: 114296 - DNA, 15 bp, Homo sapiens
tcaggctgagcgcgt

SEQ ID NO: 114297 - DNA, 15 bp, Homo sapiens
atcaggctgagcgcg

SEQ ID NO: 114298 - DNA, 15 bp, Homo sapiens
catcaggctgagcgc

SEQ ID NO: 114299 - DNA, 15 bp, Homo sapiens
acatcaggctgagcg

SEQ ID NO: 114300 - DNA, 15 bp, Homo sapiens
cacatcaggctgagc

SEQ ID NO: 114301 - DNA, 15 bp, Homo sapiens
acacatcaggctgag

SEQ ID NO: 114302 - DNA, 15 bp, Homo sapiens
aacacatcaggctga

SEQ ID NO: 114303 - DNA, 15 bp, Homo sapiens
aaacacatcaggctg

SEQ ID NO: 114304 - DNA, 15 bp, Homo sapiens
taaacacatcaggct

SEQ ID NO: 114305 - DNA, 15 bp, Homo sapiens
gtaaacacatcaggc

SEQ ID NO: 114306 - DNA, 15 bp, Homo sapiens
tgtaaacacatcagg

SEQ ID NO: 114307 - DNA, 15 bp, Homo sapiens
atgtaaacacatcag

SEQ ID NO: 114308 - DNA, 15 bp, Homo sapiens
catgtaaacacatca

SEQ ID NO: 114309 - DNA, 15 bp, Homo sapiens
ccatgtaaacacatc

SEQ ID NO: 114310 - DNA, 15 bp, Homo sapiens
accatgtaaacacat

SEQ ID NO: 114311 - DNA, 15 bp, Homo sapiens
taccatgtaaacaca

SEQ ID NO: 114312 - DNA, 15 bp, Homo sapiens
gtaccatgtaaacac

SEQ ID NO: 114313 - DNA, 15 bp, Homo sapiens
agtaccatgtaaaca

SEQ ID NO: 114314 - DNA, 15 bp, Homo sapiens
cagtaccatgtaaac

SEQ ID NO: 114315 - DNA, 15 bp, Homo sapiens
acagtaccatgtaaa

SEQ ID NO: 114316 - DNA, 15 bp, Homo sapiens
tacagtaccatgtaa

SEQ ID NO: 114317 - DNA, 15 bp, Homo sapiens
atacagtaccatgta

SEQ ID NO: 114318 - DNA, 15 bp, Homo sapiens
catacagtaccatgt

SEQ ID NO: 114319 - DNA, 15 bp, Homo sapiens
acatacagtaccatg

SEQ ID NO: 114320 - DNA, 15 bp, Homo sapiens
tacatacagtaccat

SEQ ID NO: 114321 - DNA, 15 bp, Homo sapiens
atacatacagtacca

SEQ ID NO: 114322 - DNA, 15 bp, Homo sapiens
catacatacagtacc

SEQ ID NO: 114323 - DNA, 15 bp, Homo sapiens
ccatacatacagtac

SEQ ID NO: 114324 - DNA, 15 bp, Homo sapiens
cccatacatacagta

SEQ ID NO: 114325 - DNA, 15 bp, Homo sapiens
tcccatacatacagt

SEQ ID NO: 114326 - DNA, 15 bp, Homo sapiens
ctcccatacatacag

SEQ ID NO: 114327 - DNA, 15 bp, Homo sapiens
tctcccatacataca

SEQ ID NO: 114328 - DNA, 15 bp, Homo sapiens
ctctcccatacatac

SEQ ID NO: 114329 - DNA, 15 bp, Homo sapiens
gctctcccatacata

SEQ ID NO: 114330 - DNA, 15 bp, Homo sapiens
tgctctcccatacat

SEQ ID NO: 114331 - DNA, 15 bp, Homo sapiens
ctgctctcccataca

SEQ ID NO: 114332 - DNA, 15 bp, Homo sapiens
tctgctctcccatac

SEQ ID NO: 114333 - DNA, 15 bp, Homo sapiens
gtctgctctcccata

SEQ ID NO: 114334 - DNA, 15 bp, Homo sapiens
agtctgctctcccat

SEQ ID NO: 114335 - DNA, 15 bp, Homo sapiens
cagtctgctctccca

SEQ ID NO: 114336 - DNA, 15 bp, Homo sapiens
gcagtctgctctccc

SEQ ID NO: 114337 - DNA, 15 bp, Homo sapiens
tgcagtctgctctcc

SEQ ID NO: 114338 - DNA, 15 bp, Homo sapiens
gtgcagtctgctctc

SEQ ID NO: 114339 - DNA, 15 bp, Homo sapiens
ggtgcagtctgctct

SEQ ID NO: 114340 - DNA, 15 bp, Homo sapiens
gggtgcagtctgctc

SEQ ID NO: 114341 - DNA, 15 bp, Homo sapiens
agggtgcagtctgct

SEQ ID NO: 114342 - DNA, 15 bp, Homo sapiens
gagggtgcagtctgc

SEQ ID NO: 114343 - DNA, 15 bp, Homo sapiens
ggagggtgcagtctg

SEQ ID NO: 114344 - DNA, 15 bp, Homo sapiens
tggagggtgcagtct

SEQ ID NO: 114345 - DNA, 15 bp, Homo sapiens
ctggagggtgcagtc

SEQ ID NO: 114346 - DNA, 15 bp, Homo sapiens
gctggagggtgcagt

SEQ ID NO: 114347 - DNA, 15 bp, Homo sapiens
tgctggagggtgcag

SEQ ID NO: 114348 - DNA, 15 bp, Homo sapiens
ttgctggagggtgca

SEQ ID NO: 114349 - DNA, 15 bp, Homo sapiens
gttgctggagggtgc

SEQ ID NO: 114350 - DNA, 15 bp, Homo sapiens
tgttgctggagggtg

SEQ ID NO: 114351 - DNA, 15 bp, Homo sapiens
ttgttgctggagggt

SEQ ID NO: 114352 - DNA, 15 bp, Homo sapiens
gttgttgctggaggg

SEQ ID NO: 114353 - DNA, 15 bp, Homo sapiens
tgttgttgctggagg

SEQ ID NO: 114354 - DNA, 15 bp, Homo sapiens
ctgttgttgctggag

SEQ ID NO: 114355 - DNA, 15 bp, Homo sapiens
tctgttgttgctgga

SEQ ID NO: 114356 - DNA, 15 bp, Homo sapiens
atctgttgttgctgg

SEQ ID NO: 114357 - DNA, 15 bp, Homo sapiens
catctgttgttgctg

SEQ ID NO: 114358 - DNA, 15 bp, Homo sapiens
tcatctgttgttgct

SEQ ID NO: 114359 - DNA, 15 bp, Homo sapiens
ttcatctgttgttgc

SEQ ID NO: 114360 - DNA, 15 bp, Homo sapiens
tttcatctgttgttg

SEQ ID NO: 114361 - DNA, 15 bp, Homo sapiens
ctttcatctgttgtt

SEQ ID NO: 114362 - DNA, 15 bp, Homo sapiens
gctttcatctgttgt

SEQ ID NO: 114363 - DNA, 15 bp, Homo sapiens
ggctttcatctgttg

SEQ ID NO: 114364 - DNA, 15 bp, Homo sapiens
tggctttcatctgtt

SEQ ID NO: 114365 - DNA, 15 bp, Homo sapiens
ctggctttcatctgt

SEQ ID NO: 114366 - DNA, 15 bp, Homo sapiens
actggctttcatctg

SEQ ID NO: 114367 - DNA, 15 bp, Homo sapiens
cactggctttcatct

SEQ ID NO: 114368 - DNA, 15 bp, Homo sapiens
tcactggctttcatc

SEQ ID NO: 114369 - DNA, 15 bp, Homo sapiens
ctcactggctttcat

SEQ ID NO: 114370 - DNA, 15 bp, Homo sapiens
gctcactggctttca

SEQ ID NO: 114371 - DNA, 15 bp, Homo sapiens
ggctcactggctttc

SEQ ID NO: 114372 - DNA, 15 bp, Homo sapiens
aggctcactggcttt

SEQ ID NO: 114373 - DNA, 15 bp, Homo sapiens
taggctcactggctt

SEQ ID NO: 114374 - DNA, 15 bp, Homo sapiens
gtaggctcactggct

SEQ ID NO: 114375 - DNA, 15 bp, Homo sapiens
agtaggctcactggc

SEQ ID NO: 114376 - DNA, 15 bp, Homo sapiens
tagtaggctcactgg

SEQ ID NO: 114377 - DNA, 15 bp, Homo sapiens
ttagtaggctcactg

SEQ ID NO: 114378 - DNA, 15 bp, Homo sapiens
gttagtaggctcact

SEQ ID NO: 114379 - DNA, 15 bp, Homo sapiens
ggttagtaggctcac

SEQ ID NO: 114380 - DNA, 15 bp, Homo sapiens
cggttagtaggctca

SEQ ID NO: 114381 - DNA, 15 bp, Homo sapiens
acggttagtaggctc

SEQ ID NO: 114382 - DNA, 15 bp, Homo sapiens
cacggttagtaggct

SEQ ID NO: 114383 - DNA, 15 bp, Homo sapiens
gcacggttagtaggc

SEQ ID NO: 114384 - DNA, 15 bp, Homo sapiens
ggcacggttagtagg

SEQ ID NO: 114385 - DNA, 15 bp, Homo sapiens
tggcacggttagtag

SEQ ID NO: 114386 - DNA, 15 bp, Homo sapiens
atggcacggttagta

SEQ ID NO: 114387 - DNA, 15 bp, Homo sapiens
gatggcacggttagt

SEQ ID NO: 114388 - DNA, 15 bp, Homo sapiens
agatggcacggttag

SEQ ID NO: 114389 - DNA, 15 bp, Homo sapiens
aagatggcacggtta

SEQ ID NO: 114390 - DNA, 15 bp, Homo sapiens
caagatggcacggtt

SEQ ID NO: 114391 - DNA, 15 bp, Homo sapiens
gcaagatggcacggt

SEQ ID NO: 114392 - DNA, 15 bp, Homo sapiens
tgcaagatggcacgg

SEQ ID NO: 114393 - DNA, 15 bp, Homo sapiens
ttgcaagatggcacg

SEQ ID NO: 114394 - DNA, 15 bp, Homo sapiens
tttgcaagatggcac

SEQ ID NO: 114395 - DNA, 15 bp, Homo sapiens
gtttgcaagatggca

SEQ ID NO: 114396 - DNA, 15 bp, Homo sapiens
agtttgcaagatggc

SEQ ID NO: 114397 - DNA, 15 bp, Homo sapiens
tagtttgcaagatgg

SEQ ID NO: 114398 - DNA, 15 bp, Homo sapiens
gtagtttgcaagatg

SEQ ID NO: 114399 - DNA, 15 bp, Homo sapiens
tgtagtttgcaagat

SEQ ID NO: 114400 - DNA, 15 bp, Homo sapiens
gtgtagtttgcaaga

SEQ ID NO: 114401 - DNA, 15 bp, Homo sapiens
agtgtagtttgcaag

SEQ ID NO: 114402 - DNA, 15 bp, Homo sapiens
aagtgtagtttgcaa

SEQ ID NO: 114403 - DNA, 15 bp, Homo sapiens
aaagtgtagtttgca

SEQ ID NO: 114404 - DNA, 15 bp, Homo sapiens
taaagtgtagtttgc

SEQ ID NO: 114405 - DNA, 15 bp, Homo sapiens
ttaaagtgtagtttg

SEQ ID NO: 114406 - DNA, 15 bp, Homo sapiens
tttaaagtgtagttt

SEQ ID NO: 114407 - DNA, 15 bp, Homo sapiens
ttttaaagtgtagtt

SEQ ID NO: 114408 - DNA, 15 bp, Homo sapiens
tttttaaagtgtagt

SEQ ID NO: 114409 - DNA, 15 bp, Homo sapiens
ttttttaaagtgtag

SEQ ID NO: 114410 - DNA, 15 bp, Homo sapiens
tttttttaaagtgta

SEQ ID NO: 114411 - DNA, 15 bp, Homo sapiens
ttttttttaaagtgt

SEQ ID NO: 114412 - DNA, 15 bp, Homo sapiens
gttttttttaaagtg

SEQ ID NO: 114413 - DNA, 15 bp, Homo sapiens
agttttttttaaagt

SEQ ID NO: 114414 - DNA, 15 bp, Homo sapiens
gagttttttttaaag

SEQ ID NO: 114415 - DNA, 15 bp, Homo sapiens
tgagttttttttaaa

SEQ ID NO: 114416 - DNA, 15 bp, Homo sapiens
atgagttttttttaa

SEQ ID NO: 114417 - DNA, 15 bp, Homo sapiens
aatgagtttttttta

SEQ ID NO: 114418 - DNA, 15 bp, Homo sapiens
caatgagtttttttt

SEQ ID NO: 114419 - DNA, 15 bp, Homo sapiens
gcaatgagttttttt

SEQ ID NO: 114420 - DNA, 15 bp, Homo sapiens
agcaatgagtttttt

SEQ ID NO: 114421 - DNA, 15 bp, Homo sapiens
aagcaatgagttttt

SEQ ID NO: 114422 - DNA, 15 bp, Homo sapiens
aaagcaatgagtttt

SEQ ID NO: 114423 - DNA, 15 bp, Homo sapiens
caaagcaatgagttt

SEQ ID NO: 114424 - DNA, 15 bp, Homo sapiens
acaaagcaatgagtt

SEQ ID NO: 114425 - DNA, 15 bp, Homo sapiens
tacaaagcaatgagt

SEQ ID NO: 114426 - DNA, 15 bp, Homo sapiens
atacaaagcaatgag

SEQ ID NO: 114427 - DNA, 15 bp, Homo sapiens
aatacaaagcaatga

SEQ ID NO: 114428 - DNA, 15 bp, Homo sapiens
caatacaaagcaatg

SEQ ID NO: 114429 - DNA, 15 bp, Homo sapiens
acaatacaaagcaat

SEQ ID NO: 114430 - DNA, 15 bp, Homo sapiens
tacaatacaaagcaa

SEQ ID NO: 114431 - DNA, 15 bp, Homo sapiens
ctacaatacaaagca

SEQ ID NO: 114432 - DNA, 15 bp, Homo sapiens
actacaatacaaagc

SEQ ID NO: 114433 - DNA, 15 bp, Homo sapiens
tactacaatacaaag

SEQ ID NO: 114434 - DNA, 15 bp, Homo sapiens
ttactacaatacaaa

SEQ ID NO: 114435 - DNA, 15 bp, Homo sapiens
gttactacaatacaa

SEQ ID NO: 114436 - DNA, 15 bp, Homo sapiens
ggttactacaataca

SEQ ID NO: 114437 - DNA, 15 bp, Homo sapiens
tggttactacaatac

SEQ ID NO: 114438 - DNA, 15 bp, Homo sapiens
ttggttactacaata

SEQ ID NO: 114439 - DNA, 15 bp, Homo sapiens
attggttactacaat

SEQ ID NO: 114440 - DNA, 15 bp, Homo sapiens
tattggttactacaa

SEQ ID NO: 114441 - DNA, 15 bp, Homo sapiens
atattggttactaca

SEQ ID NO: 114442 - DNA, 15 bp, Homo sapiens
catattggttactac

SEQ ID NO: 114443 - DNA, 15 bp, Homo sapiens
acatattggttacta

SEQ ID NO: 114444 - DNA, 15 bp, Homo sapiens
cacatattggttact

SEQ ID NO: 114445 - DNA, 15 bp, Homo sapiens
gcacatattggttac

SEQ ID NO: 114446 - DNA, 15 bp, Homo sapiens
tgcacatattggtta

SEQ ID NO: 114447 - DNA, 15 bp, Homo sapiens
ctgcacatattggtt

SEQ ID NO: 114448 - DNA, 15 bp, Homo sapiens
actgcacatattggt

SEQ ID NO: 114449 - DNA, 15 bp, Homo sapiens
tactgcacatattgg

SEQ ID NO: 114450 - DNA, 15 bp, Homo sapiens
atactgcacatattg

SEQ ID NO: 114451 - DNA, 15 bp, Homo sapiens
tatactgcacatatt

SEQ ID NO: 114452 - DNA, 15 bp, Homo sapiens
gtatactgcacatat

SEQ ID NO: 114453 - DNA, 15 bp, Homo sapiens
cgtatactgcacata

SEQ ID NO: 114454 - DNA, 15 bp, Homo sapiens
acgtatactgcacat

SEQ ID NO: 114455 - DNA, 15 bp, Homo sapiens
aacgtatactgcaca

SEQ ID NO: 114456 - DNA, 15 bp, Homo sapiens
caacgtatactgcac

SEQ ID NO: 114457 - DNA, 15 bp, Homo sapiens
tcaacgtatactgca

SEQ ID NO: 114458 - DNA, 15 bp, Homo sapiens
ttcaacgtatactgc

SEQ ID NO: 114459 - DNA, 15 bp, Homo sapiens
attcaacgtatactg

SEQ ID NO: 114460 - DNA, 15 bp, Homo sapiens
cattcaacgtatact

SEQ ID NO: 114461 - DNA, 15 bp, Homo sapiens
acattcaacgtatac

SEQ ID NO: 114462 - DNA, 15 bp, Homo sapiens
tacattcaacgtata

SEQ ID NO: 114463 - DNA, 15 bp, Homo sapiens
atacattcaacgtat

SEQ ID NO: 114464 - DNA, 15 bp, Homo sapiens
tatacattcaacgta

SEQ ID NO: 114465 - DNA, 15 bp, Homo sapiens
atatacattcaacgt

SEQ ID NO: 114466 - DNA, 15 bp, Homo sapiens
catatacattcaacg

SEQ ID NO: 114467 - DNA, 15 bp, Homo sapiens
tcatatacattcaac

SEQ ID NO: 114468 - DNA, 15 bp, Homo sapiens
ttcatatacattcaa

SEQ ID NO: 114469 - DNA, 15 bp, Homo sapiens
gttcatatacattca

SEQ ID NO: 114470 - DNA, 15 bp, Homo sapiens
tgttcatatacattc

SEQ ID NO: 114471 - DNA, 15 bp, Homo sapiens
atgttcatatacatt

SEQ ID NO: 114472 - DNA, 15 bp, Homo sapiens
tatgttcatatacat

SEQ ID NO: 114473 - DNA, 15 bp, Homo sapiens
gtatgttcatataca

SEQ ID NO: 114474 - DNA, 15 bp, Homo sapiens
agtatgttcatatac

SEQ ID NO: 114475 - DNA, 15 bp, Homo sapiens
aagtatgttcatata

SEQ ID NO: 114476 - DNA, 15 bp, Homo sapiens
aaagtatgttcatat

SEQ ID NO: 114477 - DNA, 15 bp, Homo sapiens
gaaagtatgttcata

SEQ ID NO: 114478 - DNA, 15 bp, Homo sapiens
ggaaagtatgttcat

SEQ ID NO: 114479 - DNA, 15 bp, Homo sapiens
aggaaagtatgttca

SEQ ID NO: 114480 - DNA, 15 bp, Homo sapiens
taggaaagtatgttc

SEQ ID NO: 114481 - DNA, 15 bp, Homo sapiens
ataggaaagtatgtt

SEQ ID NO: 114482 - DNA, 15 bp, Homo sapiens
aataggaaagtatgt

SEQ ID NO: 114483 - DNA, 15 bp, Homo sapiens
aaataggaaagtatg

SEQ ID NO: 114484 - DNA, 15 bp, Homo sapiens
gaaataggaaagtat

SEQ ID NO: 114485 - DNA, 15 bp, Homo sapiens
agaaataggaaagta

SEQ ID NO: 114486 - DNA, 15 bp, Homo sapiens
cagaaataggaaagt

SEQ ID NO: 114487 - DNA, 15 bp, Homo sapiens
acagaaataggaaag

SEQ ID NO: 114488 - DNA, 15 bp, Homo sapiens
aacagaaataggaaa

SEQ ID NO: 114489 - DNA, 15 bp, Homo sapiens
gaacagaaataggaa

SEQ ID NO: 114490 - DNA, 15 bp, Homo sapiens
agaacagaaatagga

SEQ ID NO: 114491 - DNA, 15 bp, Homo sapiens
aagaacagaaatagg

SEQ ID NO: 114492 - DNA, 15 bp, Homo sapiens
aaagaacagaaatag

SEQ ID NO: 114493 - DNA, 15 bp, Homo sapiens
caaagaacagaaata

SEQ ID NO: 114494 - DNA, 15 bp, Homo sapiens
tcaaagaacagaaat

SEQ ID NO: 114495 - DNA, 15 bp, Homo sapiens
ttcaaagaacagaaa

SEQ ID NO: 114496 - DNA, 15 bp, Homo sapiens
tttcaaagaacagaa

SEQ ID NO: 114497 - DNA, 15 bp, Homo sapiens
ttttcaaagaacaga

SEQ ID NO: 114498 - DNA, 15 bp, Homo sapiens
attttcaaagaacag

SEQ ID NO: 114499 - DNA, 15 bp, Homo sapiens
cattttcaaagaaca

SEQ ID NO: 114500 - DNA, 15 bp, Homo sapiens
acattttcaaagaac

SEQ ID NO: 114501 - DNA, 15 bp, Homo sapiens
gacattttcaaagaa

SEQ ID NO: 114502 - DNA, 15 bp, Homo sapiens
tgacattttcaaaga

SEQ ID NO: 114503 - DNA, 15 bp, Homo sapiens
ctgacattttcaaag

SEQ ID NO: 114504 - DNA, 15 bp, Homo sapiens
tctgacattttcaaa

SEQ ID NO: 114505 - DNA, 15 bp, Homo sapiens
ttctgacattttcaa

SEQ ID NO: 114506 - DNA, 15 bp, Homo sapiens
tttctgacattttca

SEQ ID NO: 114507 - DNA, 15 bp, Homo sapiens
atttctgacattttc

SEQ ID NO: 114508 - DNA, 15 bp, Homo sapiens
tatttctgacatttt

SEQ ID NO: 114509 - DNA, 15 bp, Homo sapiens
atatttctgacattt

SEQ ID NO: 114510 - DNA, 15 bp, Homo sapiens
aatatttctgacatt

SEQ ID NO: 114511 - DNA, 15 bp, Homo sapiens
aaatatttctgacat

SEQ ID NO: 114512 - DNA, 15 bp, Homo sapiens
aaaatatttctgaca

SEQ ID NO: 114513 - DNA, 15 bp, Homo sapiens
aaaaatatttctgac

SEQ ID NO: 114514 - DNA, 15 bp, Homo sapiens
aaaaaatatttctga

SEQ ID NO: 114515 - DNA, 15 bp, Homo sapiens
aaaaaaatatttctg

SEQ ID NO: 114516 - DNA, 15 bp, Homo sapiens
gaaaaaaatatttct

SEQ ID NO: 114517 - DNA, 15 bp, Homo sapiens
agaaaaaaatatttc

SEQ ID NO: 114518 - DNA, 15 bp, Homo sapiens
aagaaaaaaatattt

SEQ ID NO: 114519 - DNA, 15 bp, Homo sapiens
aaagaaaaaaatatt

SEQ ID NO: 114520 - DNA, 15 bp, Homo sapiens
gaaagaaaaaaatat

SEQ ID NO: 114521 - DNA, 15 bp, Homo sapiens
agaaagaaaaaaata

SEQ ID NO: 114522 - DNA, 15 bp, Homo sapiens
gagaaagaaaaaaat

SEQ ID NO: 114523 - DNA, 15 bp, Homo sapiens
tgagaaagaaaaaaa

SEQ ID NO: 114524 - DNA, 15 bp, Homo sapiens
atgagaaagaaaaaa

SEQ ID NO: 114525 - DNA, 15 bp, Homo sapiens
aatgagaaagaaaaa

SEQ ID NO: 114526 - DNA, 15 bp, Homo sapiens
aaatgagaaagaaaa

SEQ ID NO: 114527 - DNA, 15 bp, Homo sapiens
aaaatgagaaagaaa

SEQ ID NO: 114528 - DNA, 15 bp, Homo sapiens
taaaatgagaaagaa

SEQ ID NO: 114529 - DNA, 15 bp, Homo sapiens
ataaaatgagaaaga

SEQ ID NO: 114530 - DNA, 15 bp, Homo sapiens
cataaaatgagaaag

SEQ ID NO: 114531 - DNA, 15 bp, Homo sapiens
acataaaatgagaaa

SEQ ID NO: 114532 - DNA, 15 bp, Homo sapiens
aacataaaatgagaa

SEQ ID NO: 114533 - DNA, 15 bp, Homo sapiens
caacataaaatgaga

SEQ ID NO: 114534 - DNA, 15 bp, Homo sapiens
tcaacataaaatgag

SEQ ID NO: 114535 - DNA, 15 bp, Homo sapiens
ttcaacataaaatga

SEQ ID NO: 114536 - DNA, 15 bp, Homo sapiens
gttcaacataaaatg

SEQ ID NO: 114537 - DNA, 15 bp, Homo sapiens
agttcaacataaaat

SEQ ID NO: 114538 - DNA, 15 bp, Homo sapiens
tagttcaacataaaa

SEQ ID NO: 114539 - DNA, 15 bp, Homo sapiens
ttagttcaacataaa

SEQ ID NO: 114540 - DNA, 15 bp, Homo sapiens
tttagttcaacataa

SEQ ID NO: 114541 - DNA, 15 bp, Homo sapiens
ttttagttcaacata

SEQ ID NO: 114542 - DNA, 15 bp, Homo sapiens
tttttagttcaacat

SEQ ID NO: 114543 - DNA, 15 bp, Homo sapiens
ctttttagttcaaca

SEQ ID NO: 114544 - DNA, 15 bp, Homo sapiens
cctttttagttcaac

SEQ ID NO: 114545 - DNA, 15 bp, Homo sapiens
tcctttttagttcaa

SEQ ID NO: 114546 - DNA, 15 bp, Homo sapiens
atcctttttagttca

SEQ ID NO: 114547 - DNA, 15 bp, Homo sapiens
aatcctttttagttc

SEQ ID NO: 114548 - DNA, 15 bp, Homo sapiens
taatcctttttagtt

SEQ ID NO: 114549 - DNA, 15 bp, Homo sapiens
ttaatcctttttagt

SEQ ID NO: 114550 - DNA, 15 bp, Homo sapiens
tttaatcctttttag

SEQ ID NO: 114551 - DNA, 15 bp, Homo sapiens
ttttaatccttttta

SEQ ID NO: 114552 - DNA, 15 bp, Homo sapiens
tttttaatccttttt

SEQ ID NO: 114553 - DNA, 15 bp, Homo sapiens
ttttttaatcctttt

SEQ ID NO: 114554 - DNA, 15 bp, Homo sapiens
tttttttaatccttt

SEQ ID NO: 114555 - DNA, 15 bp, Homo sapiens
ttttttttaatcctt

SEQ ID NO: 114556 - DNA, 15 bp, Homo sapiens
tttttttttaatcct

SEQ ID NO: 114557 - DNA, 15 bp, Homo sapiens
ttttttttttaatcc

SEQ ID NO: 114558 - DNA, 15 bp, Homo sapiens
attttttttttaatc

SEQ ID NO: 114559 - DNA, 15 bp, Homo sapiens
gattttttttttaat

SEQ ID NO: 114560 - DNA, 15 bp, Homo sapiens
agattttttttttaa

SEQ ID NO: 114561 - DNA, 15 bp, Homo sapiens
gagatttttttttta

SEQ ID NO: 114562 - DNA, 15 bp, Homo sapiens
ggagatttttttttt

SEQ ID NO: 114563 - DNA, 15 bp, Homo sapiens
tggagattttttttt

SEQ ID NO: 114564 - DNA, 15 bp, Homo sapiens
ctggagatttttttt

SEQ ID NO: 114565 - DNA, 15 bp, Homo sapiens
tctggagattttttt

SEQ ID NO: 114566 - DNA, 15 bp, Homo sapiens
gtctggagatttttt

SEQ ID NO: 114567 - DNA, 15 bp, Homo sapiens
agtctggagattttt

SEQ ID NO: 114568 - DNA, 15 bp, Homo sapiens
gagtctggagatttt

SEQ ID NO: 114569 - DNA, 15 bp, Homo sapiens
tgagtctggagattt

SEQ ID NO: 114570 - DNA, 15 bp, Homo sapiens
ttgagtctggagatt

SEQ ID NO: 114571 - DNA, 15 bp, Homo sapiens
cttgagtctggagat

SEQ ID NO: 114572 - DNA, 15 bp, Homo sapiens
acttgagtctggaga

SEQ ID NO: 114573 - DNA, 15 bp, Homo sapiens
aacttgagtctggag

SEQ ID NO: 114574 - DNA, 15 bp, Homo sapiens
caacttgagtctgga

SEQ ID NO: 114575 - DNA, 15 bp, Homo sapiens
gcaacttgagtctgg

SEQ ID NO: 114576 - DNA, 15 bp, Homo sapiens
agcaacttgagtctg

SEQ ID NO: 114577 - DNA, 15 bp, Homo sapiens
tagcaacttgagtct

SEQ ID NO: 114578 - DNA, 15 bp, Homo sapiens
ttagcaacttgagtc

SEQ ID NO: 114579 - DNA, 15 bp, Homo sapiens
cttagcaacttgagt

SEQ ID NO: 114580 - DNA, 15 bp, Homo sapiens
tcttagcaacttgag

SEQ ID NO: 114581 - DNA, 15 bp, Homo sapiens
gtcttagcaacttga

SEQ ID NO: 114582 - DNA, 15 bp, Homo sapiens
ggtcttagcaacttg

SEQ ID NO: 114583 - DNA, 15 bp, Homo sapiens
aggtcttagcaactt

SEQ ID NO: 114584 - DNA, 15 bp, Homo sapiens
aaggtcttagcaact

SEQ ID NO: 114585 - DNA, 15 bp, Homo sapiens
aaaggtcttagcaac

SEQ ID NO: 114586 - DNA, 15 bp, Homo sapiens
aaaaggtcttagcaa

SEQ ID NO: 114587 - DNA, 15 bp, Homo sapiens
caaaaggtcttagca

SEQ ID NO: 114588 - DNA, 15 bp, Homo sapiens
acaaaaggtcttagc

SEQ ID NO: 114589 - DNA, 15 bp, Homo sapiens
gacaaaaggtcttag

SEQ ID NO: 114590 - DNA, 15 bp, Homo sapiens
ggacaaaaggtctta

SEQ ID NO: 114591 - DNA, 15 bp, Homo sapiens
aggacaaaaggtctt

SEQ ID NO: 114592 - DNA, 15 bp, Homo sapiens
caggacaaaaggtct

SEQ ID NO: 114593 - DNA, 15 bp, Homo sapiens
gcaggacaaaaggtc

SEQ ID NO: 114594 - DNA, 15 bp, Homo sapiens
ggcaggacaaaaggt

SEQ ID NO: 114595 - DNA, 15 bp, Homo sapiens
aggcaggacaaaagg

SEQ ID NO: 114596 - DNA, 15 bp, Homo sapiens
aaggcaggacaaaag

SEQ ID NO: 114597 - DNA, 15 bp, Homo sapiens
aaaggcaggacaaaa

SEQ ID NO: 114598 - DNA, 15 bp, Homo sapiens
aaaaggcaggacaaa

SEQ ID NO: 114599 - DNA, 15 bp, Homo sapiens
caaaaggcaggacaa

SEQ ID NO: 114600 - DNA, 15 bp, Homo sapiens
acaaaaggcaggaca

SEQ ID NO: 114601 - DNA, 15 bp, Homo sapiens
gacaaaaggcaggac

SEQ ID NO: 114602 - DNA, 15 bp, Homo sapiens
ggacaaaaggcagga

SEQ ID NO: 114603 - DNA, 15 bp, Homo sapiens
aggacaaaaggcagg

SEQ ID NO: 114604 - DNA, 15 bp, Homo sapiens
aaggacaaaaggcag

SEQ ID NO: 114605 - DNA, 15 bp, Homo sapiens
gaaggacaaaaggca

SEQ ID NO: 114606 - DNA, 15 bp, Homo sapiens
ggaaggacaaaaggc

SEQ ID NO: 114607 - DNA, 15 bp, Homo sapiens
aggaaggacaaaagg

SEQ ID NO: 114608 - DNA, 15 bp, Homo sapiens
aaggaaggacaaaag

SEQ ID NO: 114609 - DNA, 15 bp, Homo sapiens
aaaggaaggacaaaa

SEQ ID NO: 114610 - DNA, 15 bp, Homo sapiens
aaaaggaaggacaaa

SEQ ID NO: 114611 - DNA, 15 bp, Homo sapiens
caaaaggaaggacaa

SEQ ID NO: 114612 - DNA, 15 bp, Homo sapiens
acaaaaggaaggaca

SEQ ID NO: 114613 - DNA, 15 bp, Homo sapiens
cacaaaaggaaggac

SEQ ID NO: 114614 - DNA, 15 bp, Homo sapiens
tcacaaaaggaagga

SEQ ID NO: 114615 - DNA, 15 bp, Homo sapiens
ctcacaaaaggaagg

SEQ ID NO: 114616 - DNA, 15 bp, Homo sapiens
cctcacaaaaggaag

SEQ ID NO: 114617 - DNA, 15 bp, Homo sapiens
gcctcacaaaaggaa

SEQ ID NO: 114618 - DNA, 15 bp, Homo sapiens
tgcctcacaaaagga

SEQ ID NO: 114619 - DNA, 15 bp, Homo sapiens
gtgcctcacaaaagg

SEQ ID NO: 114620 - DNA, 15 bp, Homo sapiens
agtgcctcacaaaag

SEQ ID NO: 114621 - DNA, 15 bp, Homo sapiens
aagtgcctcacaaaa

SEQ ID NO: 114622 - DNA, 15 bp, Homo sapiens
taagtgcctcacaaa

SEQ ID NO: 114623 - DNA, 15 bp, Homo sapiens
gtaagtgcctcacaa

SEQ ID NO: 114624 - DNA, 15 bp, Homo sapiens
agtaagtgcctcaca

SEQ ID NO: 114625 - DNA, 15 bp, Homo sapiens
aagtaagtgcctcac

SEQ ID NO: 114626 - DNA, 15 bp, Homo sapiens
taagtaagtgcctca

SEQ ID NO: 114627 - DNA, 15 bp, Homo sapiens
gtaagtaagtgcctc

SEQ ID NO: 114628 - DNA, 15 bp, Homo sapiens
tgtaagtaagtgcct

SEQ ID NO: 114629 - DNA, 15 bp, Homo sapiens
ttgtaagtaagtgcc

SEQ ID NO: 114630 - DNA, 15 bp, Homo sapiens
gttgtaagtaagtgc

SEQ ID NO: 114631 - DNA, 15 bp, Homo sapiens
agttgtaagtaagtg

SEQ ID NO: 114632 - DNA, 15 bp, Homo sapiens
aagttgtaagtaagt

SEQ ID NO: 114633 - DNA, 15 bp, Homo sapiens
caagttgtaagtaag

SEQ ID NO: 114634 - DNA, 15 bp, Homo sapiens
ccaagttgtaagtaa

SEQ ID NO: 114635 - DNA, 15 bp, Homo sapiens
accaagttgtaagta

SEQ ID NO: 114636 - DNA, 15 bp, Homo sapiens
aaccaagttgtaagt

SEQ ID NO: 114637 - DNA, 15 bp, Homo sapiens
taaccaagttgtaag

SEQ ID NO: 114638 - DNA, 15 bp, Homo sapiens
gtaaccaagttgtaa

SEQ ID NO: 114639 - DNA, 15 bp, Homo sapiens
agtaaccaagttgta

SEQ ID NO: 114640 - DNA, 15 bp, Homo sapiens
aagtaaccaagttgt

SEQ ID NO: 114641 - DNA, 15 bp, Homo sapiens
taagtaaccaagttg

SEQ ID NO: 114642 - DNA, 15 bp, Homo sapiens
ctaagtaaccaagtt

SEQ ID NO: 114643 - DNA, 15 bp, Homo sapiens
actaagtaaccaagt

SEQ ID NO: 114644 - DNA, 15 bp, Homo sapiens
aactaagtaaccaag

SEQ ID NO: 114645 - DNA, 15 bp, Homo sapiens
caactaagtaaccaa

SEQ ID NO: 114646 - DNA, 15 bp, Homo sapiens
ccaactaagtaacca

SEQ ID NO: 114647 - DNA, 15 bp, Homo sapiens
tccaactaagtaacc

SEQ ID NO: 114648 - DNA, 15 bp, Homo sapiens
gtccaactaagtaac

SEQ ID NO: 114649 - DNA, 15 bp, Homo sapiens
tgtccaactaagtaa

SEQ ID NO: 114650 - DNA, 15 bp, Homo sapiens
ctgtccaactaagta

SEQ ID NO: 114651 - DNA, 15 bp, Homo sapiens
gctgtccaactaagt

SEQ ID NO: 114652 - DNA, 15 bp, Homo sapiens
tgctgtccaactaag

SEQ ID NO: 114653 - DNA, 15 bp, Homo sapiens
ctgctgtccaactaa

SEQ ID NO: 114654 - DNA, 15 bp, Homo sapiens
cctgctgtccaacta

SEQ ID NO: 114655 - DNA, 15 bp, Homo sapiens
tcctgctgtccaact

SEQ ID NO: 114656 - DNA, 15 bp, Homo sapiens
ttcctgctgtccaac

SEQ ID NO: 114657 - DNA, 15 bp, Homo sapiens
cttcctgctgtccaa

SEQ ID NO: 114658 - DNA, 15 bp, Homo sapiens
acttcctgctgtcca

SEQ ID NO: 114659 - DNA, 15 bp, Homo sapiens
aacttcctgctgtcc

SEQ ID NO: 114660 - DNA, 15 bp, Homo sapiens
caacttcctgctgtc

SEQ ID NO: 114661 - DNA, 15 bp, Homo sapiens
acaacttcctgctgt

SEQ ID NO: 114662 - DNA, 15 bp, Homo sapiens
cacaacttcctgctg

SEQ ID NO: 114663 - DNA, 15 bp, Homo sapiens
acacaacttcctgct

SEQ ID NO: 114664 - DNA, 15 bp, Homo sapiens
tacacaacttcctgc

SEQ ID NO: 114665 - DNA, 15 bp, Homo sapiens
ctacacaacttcctg

SEQ ID NO: 114666 - DNA, 15 bp, Homo sapiens
tctacacaacttcct

SEQ ID NO: 114667 - DNA, 15 bp, Homo sapiens
atctacacaacttcc

SEQ ID NO: 114668 - DNA, 15 bp, Homo sapiens
tatctacacaacttc

SEQ ID NO: 114669 - DNA, 15 bp, Homo sapiens
ctatctacacaactt

SEQ ID NO: 114670 - DNA, 15 bp, Homo sapiens
cctatctacacaact

SEQ ID NO: 114671 - DNA, 15 bp, Homo sapiens
tcctatctacacaac

SEQ ID NO: 114672 - DNA, 15 bp, Homo sapiens
ctcctatctacacaa

SEQ ID NO: 114673 - DNA, 15 bp, Homo sapiens
gctcctatctacaca

SEQ ID NO: 114674 - DNA, 15 bp, Homo sapiens
ggctcctatctacac

SEQ ID NO: 114675 - DNA, 15 bp, Homo sapiens
aggctcctatctaca

SEQ ID NO: 114676 - DNA, 15 bp, Homo sapiens
caggctcctatctac

SEQ ID NO: 114677 - DNA, 15 bp, Homo sapiens
tcaggctcctatcta

SEQ ID NO: 114678 - DNA, 15 bp, Homo sapiens
atcaggctcctatct

SEQ ID NO: 114679 - DNA, 15 bp, Homo sapiens
aatcaggctcctatc

SEQ ID NO: 114680 - DNA, 15 bp, Homo sapiens
caatcaggctcctat

SEQ ID NO: 114681 - DNA, 15 bp, Homo sapiens
acaatcaggctccta

SEQ ID NO: 114682 - DNA, 15 bp, Homo sapiens
cacaatcaggctcct

SEQ ID NO: 114683 - DNA, 15 bp, Homo sapiens
acacaatcaggctcc

SEQ ID NO: 114684 - DNA, 15 bp, Homo sapiens
aacacaatcaggctc

SEQ ID NO: 114685 - DNA, 15 bp, Homo sapiens
gaacacaatcaggct

SEQ ID NO: 114686 - DNA, 15 bp, Homo sapiens
agaacacaatcaggc

SEQ ID NO: 114687 - DNA, 15 bp, Homo sapiens
aagaacacaatcagg

SEQ ID NO: 114688 - DNA, 15 bp, Homo sapiens
taagaacacaatcag

SEQ ID NO: 114689 - DNA, 15 bp, Homo sapiens
ctaagaacacaatca

SEQ ID NO: 114690 - DNA, 15 bp, Homo sapiens
cctaagaacacaatc

SEQ ID NO: 114691 - DNA, 15 bp, Homo sapiens
gcctaagaacacaat

SEQ ID NO: 114692 - DNA, 15 bp, Homo sapiens
agcctaagaacacaa

SEQ ID NO: 114693 - DNA, 15 bp, Homo sapiens
cagcctaagaacaca

SEQ ID NO: 114694 - DNA, 15 bp, Homo sapiens
tcagcctaagaacac

SEQ ID NO: 114695 - DNA, 15 bp, Homo sapiens
atcagcctaagaaca

SEQ ID NO: 114696 - DNA, 15 bp, Homo sapiens
tatcagcctaagaac

SEQ ID NO: 114697 - DNA, 15 bp, Homo sapiens
ctatcagcctaagaa

SEQ ID NO: 114698 - DNA, 15 bp, Homo sapiens
tctatcagcctaaga

SEQ ID NO: 114699 - DNA, 15 bp, Homo sapiens
atctatcagcctaag

SEQ ID NO: 114700 - DNA, 15 bp, Homo sapiens
aatctatcagcctaa

SEQ ID NO: 114701 - DNA, 15 bp, Homo sapiens
taatctatcagccta

SEQ ID NO: 114702 - DNA, 15 bp, Homo sapiens
ataatctatcagcct

SEQ ID NO: 114703 - DNA, 15 bp, Homo sapiens
aataatctatcagcc

SEQ ID NO: 114704 - DNA, 15 bp, Homo sapiens
aaataatctatcagc

SEQ ID NO: 114705 - DNA, 15 bp, Homo sapiens
ggcttgagccaccgc

SEQ ID NO: 114706 - DNA, 15 bp, Homo sapiens
aggcttgagccaccg

SEQ ID NO: 114707 - DNA, 15 bp, Homo sapiens
caggcttgagccacc

SEQ ID NO: 114708 - DNA, 15 bp, Homo sapiens
acaggcttgagccac

SEQ ID NO: 114709 - DNA, 15 bp, Homo sapiens
tacaggcttgagcca

SEQ ID NO: 114710 - DNA, 15 bp, Homo sapiens
ttacaggcttgagcc

SEQ ID NO: 114711 - DNA, 15 bp, Homo sapiens
attacaggcttgagc

SEQ ID NO: 114712 - DNA, 15 bp, Homo sapiens
gattacaggcttgag

SEQ ID NO: 114713 - DNA, 15 bp, Homo sapiens
ggattacaggcttga

SEQ ID NO: 114714 - DNA, 15 bp, Homo sapiens
gggattacaggcttg

SEQ ID NO: 114715 - DNA, 15 bp, Homo sapiens
tgggattacaggctt

SEQ ID NO: 114716 - DNA, 15 bp, Homo sapiens
ctgggattacaggct

SEQ ID NO: 114717 - DNA, 15 bp, Homo sapiens
agcctcccaaagtgc

SEQ ID NO: 114718 - DNA, 15 bp, Homo sapiens
cagcctcccaaagtg

SEQ ID NO: 114719 - DNA, 15 bp, Homo sapiens
tcagcctcccaaagt

SEQ ID NO: 114720 - DNA, 15 bp, Homo sapiens
ctcagcctcccaaag

SEQ ID NO: 114721 - DNA, 15 bp, Homo sapiens
cctcagcctcccaaa

SEQ ID NO: 114722 - DNA, 15 bp, Homo sapiens
acctcagcctcccaa

SEQ ID NO: 114723 - DNA, 15 bp, Homo sapiens
cacctcagcctccca

SEQ ID NO: 114724 - DNA, 15 bp, Homo sapiens
ccacctcagcctccc

SEQ ID NO: 114725 - DNA, 15 bp, Homo sapiens
cccacctcagcctcc

SEQ ID NO: 114726 - DNA, 15 bp, Homo sapiens
gcccacctcagcctc

SEQ ID NO: 114727 - DNA, 15 bp, Homo sapiens
cgcccacctcagcct

SEQ ID NO: 114728 - DNA, 15 bp, Homo sapiens
acgcccacctcagcc

SEQ ID NO: 114729 - DNA, 15 bp, Homo sapiens
tacgcccacctcagc

SEQ ID NO: 114730 - DNA, 15 bp, Homo sapiens
atacgcccacctcag

SEQ ID NO: 114731 - DNA, 15 bp, Homo sapiens
gatacgcccacctca

SEQ ID NO: 114732 - DNA, 15 bp, Homo sapiens
tgatacgcccacctc

SEQ ID NO: 114733 - DNA, 15 bp, Homo sapiens
gtgatacgcccacct

SEQ ID NO: 114734 - DNA, 15 bp, Homo sapiens
agtgatacgcccacc

SEQ ID NO: 114735 - DNA, 15 bp, Homo sapiens
aagtgatacgcccac

SEQ ID NO: 114736 - DNA, 15 bp, Homo sapiens
gaagtgatacgccca

SEQ ID NO: 114737 - DNA, 15 bp, Homo sapiens
tgaagtgatacgccc

SEQ ID NO: 114738 - DNA, 15 bp, Homo sapiens
ctgaagtgatacgcc

SEQ ID NO: 114739 - DNA, 15 bp, Homo sapiens
cctgaagtgatacgc

SEQ ID NO: 114740 - DNA, 15 bp, Homo sapiens
gcctgaagtgatacg

SEQ ID NO: 114741 - DNA, 15 bp, Homo sapiens
ggcctgaagtgatac

SEQ ID NO: 114742 - DNA, 15 bp, Homo sapiens
tggcctgaagtgata

SEQ ID NO: 114743 - DNA, 15 bp, Homo sapiens
ctggcctgaagtgat

SEQ ID NO: 114744 - DNA, 15 bp, Homo sapiens
cctggcctgaagtga

SEQ ID NO: 114745 - DNA, 15 bp, Homo sapiens
tcctggcctgaagtg

SEQ ID NO: 114746 - DNA, 15 bp, Homo sapiens
ctcctggcctgaagt

SEQ ID NO: 114747 - DNA, 15 bp, Homo sapiens
actcctggcctgaag

SEQ ID NO: 114748 - DNA, 15 bp, Homo sapiens
aactcctggcctgaa

SEQ ID NO: 114749 - DNA, 15 bp, Homo sapiens
aaactcctggcctga

SEQ ID NO: 114750 - DNA, 15 bp, Homo sapiens
caaactcctggcctg

SEQ ID NO: 114751 - DNA, 15 bp, Homo sapiens
tcaaactcctggcct

SEQ ID NO: 114752 - DNA, 15 bp, Homo sapiens
ctcaaactcctggcc

SEQ ID NO: 114753 - DNA, 15 bp, Homo sapiens
tctcaaactcctggc

SEQ ID NO: 114754 - DNA, 15 bp, Homo sapiens
gtctcaaactcctgg

SEQ ID NO: 114755 - DNA, 15 bp, Homo sapiens
tattggccaggctgg

SEQ ID NO: 114756 - DNA, 15 bp, Homo sapiens
atattggccaggctg

SEQ ID NO: 114757 - DNA, 15 bp, Homo sapiens
catattggccaggct

SEQ ID NO: 114758 - DNA, 15 bp, Homo sapiens
ccatattggccaggc

SEQ ID NO: 114759 - DNA, 15 bp, Homo sapiens
accatattggccagg

SEQ ID NO: 114760 - DNA, 15 bp, Homo sapiens
caccatattggccag

SEQ ID NO: 114761 - DNA, 15 bp, Homo sapiens
tcaccatattggcca

SEQ ID NO: 114762 - DNA, 15 bp, Homo sapiens
ttcaccatattggcc

SEQ ID NO: 114763 - DNA, 15 bp, Homo sapiens
tttcaccatattggc

SEQ ID NO: 114764 - DNA, 15 bp, Homo sapiens
gtttcaccatattgg

SEQ ID NO: 114765 - DNA, 15 bp, Homo sapiens
ggtttcaccatattg

SEQ ID NO: 114766 - DNA, 15 bp, Homo sapiens
gggtttcaccatatt

SEQ ID NO: 114767 - DNA, 15 bp, Homo sapiens
agggtttcaccatat

SEQ ID NO: 114768 - DNA, 15 bp, Homo sapiens
cagggtttcaccata

SEQ ID NO: 114769 - DNA, 15 bp, Homo sapiens
acagggtttcaccat

SEQ ID NO: 114770 - DNA, 15 bp, Homo sapiens
gacagggtttcacca

SEQ ID NO: 114771 - DNA, 15 bp, Homo sapiens
agacagggtttcacc

SEQ ID NO: 114772 - DNA, 15 bp, Homo sapiens
gagacagggtttcac

SEQ ID NO: 114773 - DNA, 15 bp, Homo sapiens
agagacagggtttca

SEQ ID NO: 114774 - DNA, 15 bp, Homo sapiens
tagagacagggtttc

SEQ ID NO: 114775 - DNA, 15 bp, Homo sapiens
gtagagacagggttt

SEQ ID NO: 114776 - DNA, 15 bp, Homo sapiens
attttttttgtattt

SEQ ID NO: 114777 - DNA, 15 bp, Homo sapiens
gattttttttgtatt

SEQ ID NO: 114778 - DNA, 15 bp, Homo sapiens
tgattttttttgtat

SEQ ID NO: 114779 - DNA, 15 bp, Homo sapiens
ctgattttttttgta

SEQ ID NO: 114780 - DNA, 15 bp, Homo sapiens
gctgattttttttgt

SEQ ID NO: 114781 - DNA, 15 bp, Homo sapiens
agctgattttttttg

SEQ ID NO: 114782 - DNA, 15 bp, Homo sapiens
cagctgatttttttt

SEQ ID NO: 114783 - DNA, 15 bp, Homo sapiens
ccagctgattttttt

SEQ ID NO: 114784 - DNA, 15 bp, Homo sapiens
cccagctgatttttt

SEQ ID NO: 114785 - DNA, 15 bp, Homo sapiens
gcccagctgattttt

SEQ ID NO: 114786 - DNA, 15 bp, Homo sapiens
tgcccagctgatttt

SEQ ID NO: 114787 - DNA, 15 bp, Homo sapiens
atgcccagctgattt

SEQ ID NO: 114788 - DNA, 15 bp, Homo sapiens
catgcccagctgatt

SEQ ID NO: 114789 - DNA, 15 bp, Homo sapiens
ccatgcccagctgat

SEQ ID NO: 114790 - DNA, 15 bp, Homo sapiens
accatgcccagctga

SEQ ID NO: 114791 - DNA, 15 bp, Homo sapiens
caccatgcccagctg

SEQ ID NO: 114792 - DNA, 15 bp, Homo sapiens
agccaccatgcccag

SEQ ID NO: 114793 - DNA, 15 bp, Homo sapiens
aagccaccatgccca

SEQ ID NO: 114794 - DNA, 15 bp, Homo sapiens
caagccaccatgccc

SEQ ID NO: 114795 - DNA, 15 bp, Homo sapiens
gcaagccaccatgcc

SEQ ID NO: 114796 - DNA, 15 bp, Homo sapiens
tgcaagccaccatgc

SEQ ID NO: 114797 - DNA, 15 bp, Homo sapiens
gtgcaagccaccatg

SEQ ID NO: 114798 - DNA, 15 bp, Homo sapiens
ggtgcaagccaccat

SEQ ID NO: 114799 - DNA, 15 bp, Homo sapiens
gggtgcaagccacca

SEQ ID NO: 114800 - DNA, 15 bp, Homo sapiens
cgggtgcaagccacc

SEQ ID NO: 114801 - DNA, 15 bp, Homo sapiens
acgggtgcaagccac

SEQ ID NO: 114802 - DNA, 15 bp, Homo sapiens
tacgggtgcaagcca

SEQ ID NO: 114803 - DNA, 15 bp, Homo sapiens
ttacgggtgcaagcc

SEQ ID NO: 114804 - DNA, 15 bp, Homo sapiens
attacgggtgcaagc

SEQ ID NO: 114805 - DNA, 15 bp, Homo sapiens
gattacgggtgcaag

SEQ ID NO: 114806 - DNA, 15 bp, Homo sapiens
ggattacgggtgcaa

SEQ ID NO: 114807 - DNA, 15 bp, Homo sapiens
gggattacgggtgca

SEQ ID NO: 114808 - DNA, 15 bp, Homo sapiens
tgggattacgggtgc

SEQ ID NO: 114809 - DNA, 15 bp, Homo sapiens
ctgggattacgggtg

SEQ ID NO: 114810 - DNA, 15 bp, Homo sapiens
gctgggattacgggt

SEQ ID NO: 114811 - DNA, 15 bp, Homo sapiens
agctgggattacggg

SEQ ID NO: 114812 - DNA, 15 bp, Homo sapiens
tagctgggattacgg

SEQ ID NO: 114813 - DNA, 15 bp, Homo sapiens
gtagctgggattacg

SEQ ID NO: 114814 - DNA, 15 bp, Homo sapiens
agtagctgggattac

SEQ ID NO: 114815 - DNA, 15 bp, Homo sapiens
tagtagctgggatta

SEQ ID NO: 114816 - DNA, 15 bp, Homo sapiens
ctagtagctgggatt

SEQ ID NO: 114817 - DNA, 15 bp, Homo sapiens
cctagtagctgggat

SEQ ID NO: 114818 - DNA, 15 bp, Homo sapiens
tcctagtagctggga

SEQ ID NO: 114819 - DNA, 15 bp, Homo sapiens
ttcctagtagctggg

SEQ ID NO: 114820 - DNA, 15 bp, Homo sapiens
cttcctagtagctgg

SEQ ID NO: 114821 - DNA, 15 bp, Homo sapiens
ccttcctagtagctg

SEQ ID NO: 114822 - DNA, 15 bp, Homo sapiens
gccttcctagtagct

SEQ ID NO: 114823 - DNA, 15 bp, Homo sapiens
agccttcctagtagc

SEQ ID NO: 114824 - DNA, 15 bp, Homo sapiens
cagccttcctagtag

SEQ ID NO: 114825 - DNA, 15 bp, Homo sapiens
tcagccttcctagta

SEQ ID NO: 114826 - DNA, 15 bp, Homo sapiens
ctcagccttcctagt

SEQ ID NO: 114827 - DNA, 15 bp, Homo sapiens
cctcagccttcctag

SEQ ID NO: 114828 - DNA, 15 bp, Homo sapiens
gcctcagccttccta

SEQ ID NO: 114829 - DNA, 15 bp, Homo sapiens
tgcctcagccttcct

SEQ ID NO: 114830 - DNA, 15 bp, Homo sapiens
ctgcctcagccttcc

SEQ ID NO: 114831 - DNA, 15 bp, Homo sapiens
cctgcctcagccttc

SEQ ID NO: 114832 - DNA, 15 bp, Homo sapiens
tcctgcctcagcctt

SEQ ID NO: 114833 - DNA, 15 bp, Homo sapiens
gattctcctgcctca

SEQ ID NO: 114834 - DNA, 15 bp, Homo sapiens
cgattctcctgcctc

SEQ ID NO: 114835 - DNA, 15 bp, Homo sapiens
gcgattctcctgcct

SEQ ID NO: 114836 - DNA, 15 bp, Homo sapiens
agcgattctcctgcc

SEQ ID NO: 114837 - DNA, 15 bp, Homo sapiens
aagcgattctcctgc

SEQ ID NO: 114838 - DNA, 15 bp, Homo sapiens
caagcgattctcctg

SEQ ID NO: 114839 - DNA, 15 bp, Homo sapiens
tcaagcgattctcct

SEQ ID NO: 114840 - DNA, 15 bp, Homo sapiens
ttcaagcgattctcc

SEQ ID NO: 114841 - DNA, 15 bp, Homo sapiens
gttcaagcgattctc

SEQ ID NO: 114842 - DNA, 15 bp, Homo sapiens
ggttcaagcgattct

SEQ ID NO: 114843 - DNA, 15 bp, Homo sapiens
aggttcaagcgattc

SEQ ID NO: 114844 - DNA, 15 bp, Homo sapiens
caggttcaagcgatt

SEQ ID NO: 114845 - DNA, 15 bp, Homo sapiens
ccaggttcaagcgat

SEQ ID NO: 114846 - DNA, 15 bp, Homo sapiens
cccaggttcaagcga

SEQ ID NO: 114847 - DNA, 15 bp, Homo sapiens
tcccaggttcaagcg

SEQ ID NO: 114848 - DNA, 15 bp, Homo sapiens
ctcccaggttcaagc

SEQ ID NO: 114849 - DNA, 15 bp, Homo sapiens
cctcccaggttcaag

SEQ ID NO: 114850 - DNA, 15 bp, Homo sapiens
gcctcccaggttcaa

SEQ ID NO: 114851 - DNA, 15 bp, Homo sapiens
acctctgcctcccag

SEQ ID NO: 114852 - DNA, 15 bp, Homo sapiens
gacctctgcctccca

SEQ ID NO: 114853 - DNA, 15 bp, Homo sapiens
tgacctctgcctccc

SEQ ID NO: 114854 - DNA, 15 bp, Homo sapiens
gtgacctctgcctcc

SEQ ID NO: 114855 - DNA, 15 bp, Homo sapiens
tgtgacctctgcctc

SEQ ID NO: 114856 - DNA, 15 bp, Homo sapiens
ctgtgacctctgcct

SEQ ID NO: 114857 - DNA, 15 bp, Homo sapiens
actgtgacctctgcc

SEQ ID NO: 114858 - DNA, 15 bp, Homo sapiens
cactgtgacctctgc

SEQ ID NO: 114859 - DNA, 15 bp, Homo sapiens
tcactgtgacctctg

SEQ ID NO: 114860 - DNA, 15 bp, Homo sapiens
ctcactgtgacctct

SEQ ID NO: 114861 - DNA, 15 bp, Homo sapiens
gctcactgtgacctc

SEQ ID NO: 114862 - DNA, 15 bp, Homo sapiens
ggctcactgtgacct

SEQ ID NO: 114863 - DNA, 15 bp, Homo sapiens
cggctcactgtgacc

SEQ ID NO: 114864 - DNA, 15 bp, Homo sapiens
tcggctcactgtgac

SEQ ID NO: 114865 - DNA, 15 bp, Homo sapiens
ttcggctcactgtga

SEQ ID NO: 114866 - DNA, 15 bp, Homo sapiens
tttcggctcactgtg

SEQ ID NO: 114867 - DNA, 15 bp, Homo sapiens
atttcggctcactgt

SEQ ID NO: 114868 - DNA, 15 bp, Homo sapiens
gatttcggctcactg

SEQ ID NO: 114869 - DNA, 15 bp, Homo sapiens
tgatttcggctcact

SEQ ID NO: 114870 - DNA, 15 bp, Homo sapiens
atgatttcggctcac

SEQ ID NO: 114871 - DNA, 15 bp, Homo sapiens
catgatttcggctca

SEQ ID NO: 114872 - DNA, 15 bp, Homo sapiens
gcatgatttcggctc

SEQ ID NO: 114873 - DNA, 15 bp, Homo sapiens
ggcatgatttcggct

SEQ ID NO: 114874 - DNA, 15 bp, Homo sapiens
tggcatgatttcggc

SEQ ID NO: 114875 - DNA, 15 bp, Homo sapiens
gtggcatgatttcgg

SEQ ID NO: 114876 - DNA, 15 bp, Homo sapiens
agtggcatgatttcg

SEQ ID NO: 114877 - DNA, 15 bp, Homo sapiens
cagtggcatgatttc

SEQ ID NO: 114878 - DNA, 15 bp, Homo sapiens
gcagtggcatgattt

SEQ ID NO: 114879 - DNA, 15 bp, Homo sapiens
tgcagtggcatgatt

SEQ ID NO: 114880 - DNA, 15 bp, Homo sapiens
gtgcagtggcatgat

SEQ ID NO: 114881 - DNA, 15 bp, Homo sapiens
agtgcagtggcatga

SEQ ID NO: 114882 - DNA, 15 bp, Homo sapiens
gagtgcagtggcatg

SEQ ID NO: 114883 - DNA, 15 bp, Homo sapiens
ggagtgcagtggcat

SEQ ID NO: 114884 - DNA, 15 bp, Homo sapiens
tggagtgcagtggca

SEQ ID NO: 114885 - DNA, 15 bp, Homo sapiens
cgtcgcccaggctgg

SEQ ID NO: 114886 - DNA, 15 bp, Homo sapiens
ccgtcgcccaggctg

SEQ ID NO: 114887 - DNA, 15 bp, Homo sapiens
tccgtcgcccaggct

SEQ ID NO: 114888 - DNA, 15 bp, Homo sapiens
ctccgtcgcccaggc

SEQ ID NO: 114889 - DNA, 15 bp, Homo sapiens
gctccgtcgcccagg

SEQ ID NO: 114890 - DNA, 15 bp, Homo sapiens
tgctccgtcgcccag

SEQ ID NO: 114891 - DNA, 15 bp, Homo sapiens
ttgctccgtcgccca

SEQ ID NO: 114892 - DNA, 15 bp, Homo sapiens
cttgctccgtcgccc

SEQ ID NO: 114893 - DNA, 15 bp, Homo sapiens
tcttgctccgtcgcc

SEQ ID NO: 114894 - DNA, 15 bp, Homo sapiens
gtcttgctccgtcgc

SEQ ID NO: 114895 - DNA, 15 bp, Homo sapiens
agtcttgctccgtcg

SEQ ID NO: 114896 - DNA, 15 bp, Homo sapiens
gagtcttgctccgtc

SEQ ID NO: 114897 - DNA, 15 bp, Homo sapiens
ggagtcttgctccgt

SEQ ID NO: 114898 - DNA, 15 bp, Homo sapiens
tggagtcttgctccg

SEQ ID NO: 114899 - DNA, 15 bp, Homo sapiens
ctggagtcttgctcc

SEQ ID NO: 114900 - DNA, 15 bp, Homo sapiens
gctggagtcttgctc

SEQ ID NO: 114901 - DNA, 15 bp, Homo sapiens
agctggagtcttgct

SEQ ID NO: 114902 - DNA, 15 bp, Homo sapiens
tagctggagtcttgc

SEQ ID NO: 114903 - DNA, 15 bp, Homo sapiens
ttagctggagtcttg

SEQ ID NO: 114904 - DNA, 15 bp, Homo sapiens
tttagctggagtctt

SEQ ID NO: 114905 - DNA, 15 bp, Homo sapiens
ttttagctggagtct

SEQ ID NO: 114906 - DNA, 15 bp, Homo sapiens
tttttagctggagtc

SEQ ID NO: 114907 - DNA, 15 bp, Homo sapiens
ttttttagctggagt

SEQ ID NO: 114908 - DNA, 15 bp, Homo sapiens
tttttttagctggag

SEQ ID NO: 114909 - DNA, 15 bp, Homo sapiens
ttttttttagctgga

SEQ ID NO: 114910 - DNA, 15 bp, Homo sapiens
tttttttttagctgg

SEQ ID NO: 114911 - DNA, 15 bp, Homo sapiens
ttttttttttagctg

SEQ ID NO: 114912 - DNA, 15 bp, Homo sapiens
tttttttttttagct

SEQ ID NO: 114913 - DNA, 15 bp, Homo sapiens
ttttttttttttagc

SEQ ID NO: 114914 - DNA, 15 bp, Homo sapiens
tttttttttttttag

SEQ ID NO: 114915 - DNA, 15 bp, Homo sapiens
tttttttttttttta

SEQ ID NO: 114916 - DNA, 15 bp, Homo sapiens
ctctttttttttttt

SEQ ID NO: 114917 - DNA, 15 bp, Homo sapiens
actcttttttttttt

SEQ ID NO: 114918 - DNA, 15 bp, Homo sapiens
cactctttttttttt

SEQ ID NO: 114919 - DNA, 15 bp, Homo sapiens
acactcttttttttt

SEQ ID NO: 114920 - DNA, 15 bp, Homo sapiens
cacactctttttttt

SEQ ID NO: 114921 - DNA, 15 bp, Homo sapiens
acacactcttttttt

SEQ ID NO: 114922 - DNA, 15 bp, Homo sapiens
cacacactctttttt

SEQ ID NO: 114923 - DNA, 15 bp, Homo sapiens
ccacacactcttttt

SEQ ID NO: 114924 - DNA, 15 bp, Homo sapiens
gccacacactctttt

SEQ ID NO: 114925 - DNA, 15 bp, Homo sapiens
ggccacacactcttt

SEQ ID NO: 114926 - DNA, 15 bp, Homo sapiens
aggccacacactctt

SEQ ID NO: 114927 - DNA, 15 bp, Homo sapiens
caggccacacactct

SEQ ID NO: 114928 - DNA, 15 bp, Homo sapiens
ccaggccacacactc

SEQ ID NO: 114929 - DNA, 15 bp, Homo sapiens
gccaggccacacact

SEQ ID NO: 114930 - DNA, 15 bp, Homo sapiens
tgccaggccacacac

SEQ ID NO: 114931 - DNA, 15 bp, Homo sapiens
gtgccaggccacaca

SEQ ID NO: 114932 - DNA, 15 bp, Homo sapiens
agtgccaggccacac

SEQ ID NO: 114933 - DNA, 15 bp, Homo sapiens
gagtgccaggccaca

SEQ ID NO: 114934 - DNA, 15 bp, Homo sapiens
tgagtgccaggccac

SEQ ID NO: 114935 - DNA, 15 bp, Homo sapiens
ttgagtgccaggcca

SEQ ID NO: 114936 - DNA, 15 bp, Homo sapiens
cttgagtgccaggcc

SEQ ID NO: 114937 - DNA, 15 bp, Homo sapiens
acttgagtgccaggc

SEQ ID NO: 114938 - DNA, 15 bp, Homo sapiens
aacttgagtgccagg

SEQ ID NO: 114939 - DNA, 15 bp, Homo sapiens
gaacttgagtgccag

SEQ ID NO: 114940 - DNA, 15 bp, Homo sapiens
tgaacttgagtgcca

SEQ ID NO: 114941 - DNA, 15 bp, Homo sapiens
gtgaacttgagtgcc

SEQ ID NO: 114942 - DNA, 15 bp, Homo sapiens
tgtgaacttgagtgc

SEQ ID NO: 114943 - DNA, 15 bp, Homo sapiens
atgtgaacttgagtg

SEQ ID NO: 114944 - DNA, 15 bp, Homo sapiens
catgtgaacttgagt

SEQ ID NO: 114945 - DNA, 15 bp, Homo sapiens
ccatgtgaacttgag

SEQ ID NO: 114946 - DNA, 15 bp, Homo sapiens
cccatgtgaacttga

SEQ ID NO: 114947 - DNA, 15 bp, Homo sapiens
acccatgtgaacttg

SEQ ID NO: 114948 - DNA, 15 bp, Homo sapiens
cacccatgtgaactt

SEQ ID NO: 114949 - DNA, 15 bp, Homo sapiens
acacccatgtgaact

SEQ ID NO: 114950 - DNA, 15 bp, Homo sapiens
cacacccatgtgaac

SEQ ID NO: 114951 - DNA, 15 bp, Homo sapiens
gcacacccatgtgaa

SEQ ID NO: 114952 - DNA, 15 bp, Homo sapiens
tgcacacccatgtga

SEQ ID NO: 114953 - DNA, 15 bp, Homo sapiens
ctgcacacccatgtg

SEQ ID NO: 114954 - DNA, 15 bp, Homo sapiens
cctgcacacccatgt

SEQ ID NO: 114955 - DNA, 15 bp, Homo sapiens
gcctgcacacccatg

SEQ ID NO: 114956 - DNA, 15 bp, Homo sapiens
tgcctgcacacccat

SEQ ID NO: 114957 - DNA, 15 bp, Homo sapiens
atgcctgcacaccca

SEQ ID NO: 114958 - DNA, 15 bp, Homo sapiens
catgcctgcacaccc

SEQ ID NO: 114959 - DNA, 15 bp, Homo sapiens
gcatgcctgcacacc

SEQ ID NO: 114960 - DNA, 15 bp, Homo sapiens
ggcatgcctgcacac

SEQ ID NO: 114961 - DNA, 15 bp, Homo sapiens
aggcatgcctgcaca

SEQ ID NO: 114962 - DNA, 15 bp, Homo sapiens
caggcatgcctgcac

SEQ ID NO: 114963 - DNA, 15 bp, Homo sapiens
acaggcatgcctgca

SEQ ID NO: 114964 - DNA, 15 bp, Homo sapiens
cacaggcatgcctgc

SEQ ID NO: 114965 - DNA, 15 bp, Homo sapiens
acacaggcatgcctg

SEQ ID NO: 114966 - DNA, 15 bp, Homo sapiens
tacacaggcatgcct

SEQ ID NO: 114967 - DNA, 15 bp, Homo sapiens
atacacaggcatgcc

SEQ ID NO: 114968 - DNA, 15 bp, Homo sapiens
aatacacaggcatgc

SEQ ID NO: 114969 - DNA, 15 bp, Homo sapiens
gaatacacaggcatg

SEQ ID NO: 114970 - DNA, 15 bp, Homo sapiens
agaatacacaggcat

SEQ ID NO: 114971 - DNA, 15 bp, Homo sapiens
gagaatacacaggca

SEQ ID NO: 114972 - DNA, 15 bp, Homo sapiens
tgagaatacacaggc

SEQ ID NO: 114973 - DNA, 15 bp, Homo sapiens
gtgagaatacacagg

SEQ ID NO: 114974 - DNA, 15 bp, Homo sapiens
tgtgagaatacacag

SEQ ID NO: 114975 - DNA, 15 bp, Homo sapiens
atgtgagaatacaca

SEQ ID NO: 114976 - DNA, 15 bp, Homo sapiens
catgtgagaatacac

SEQ ID NO: 114977 - DNA, 15 bp, Homo sapiens
tcatgtgagaataca

SEQ ID NO: 114978 - DNA, 15 bp, Homo sapiens
gtcatgtgagaatac

SEQ ID NO: 114979 - DNA, 15 bp, Homo sapiens
ggtcatgtgagaata

SEQ ID NO: 114980 - DNA, 15 bp, Homo sapiens
aggtcatgtgagaat

SEQ ID NO: 114981 - DNA, 15 bp, Homo sapiens
gaggtcatgtgagaa

SEQ ID NO: 114982 - DNA, 15 bp, Homo sapiens
ggaggtcatgtgaga

SEQ ID NO: 114983 - DNA, 15 bp, Homo sapiens
gggaggtcatgtgag

SEQ ID NO: 114984 - DNA, 15 bp, Homo sapiens
agggaggtcatgtga

SEQ ID NO: 114985 - DNA, 15 bp, Homo sapiens
cagggaggtcatgtg

SEQ ID NO: 114986 - DNA, 15 bp, Homo sapiens
gcagggaggtcatgt

SEQ ID NO: 114987 - DNA, 15 bp, Homo sapiens
agcagggaggtcatg

SEQ ID NO: 114988 - DNA, 15 bp, Homo sapiens
gagcagggaggtcat

SEQ ID NO: 114989 - DNA, 15 bp, Homo sapiens
tgagcagggaggtca

SEQ ID NO: 114990 - DNA, 15 bp, Homo sapiens
gtgagcagggaggtc

SEQ ID NO: 114991 - DNA, 15 bp, Homo sapiens
cgtgagcagggaggt

SEQ ID NO: 114992 - DNA, 15 bp, Homo sapiens
ccgtgagcagggagg

SEQ ID NO: 114993 - DNA, 15 bp, Homo sapiens
accgtgagcagggag

SEQ ID NO: 114994 - DNA, 15 bp, Homo sapiens
gaccgtgagcaggga

SEQ ID NO: 114995 - DNA, 15 bp, Homo sapiens
ggaccgtgagcaggg

SEQ ID NO: 114996 - DNA, 15 bp, Homo sapiens
gggaccgtgagcagg

SEQ ID NO: 114997 - DNA, 15 bp, Homo sapiens
agggaccgtgagcag

SEQ ID NO: 114998 - DNA, 15 bp, Homo sapiens
gagggaccgtgagca

SEQ ID NO: 114999 - DNA, 15 bp, Homo sapiens
ggagggaccgtgagc

SEQ ID NO: 115000 - DNA, 15 bp, Homo sapiens
aggagggaccgtgag

SEQ ID NO: 115001 - DNA, 15 bp, Homo sapiens
aaggagggaccgtga

SEQ ID NO: 115002 - DNA, 15 bp, Homo sapiens
caaggagggaccgtg

SEQ ID NO: 115003 - DNA, 15 bp, Homo sapiens
gcaaggagggaccgt

SEQ ID NO: 115004 - DNA, 15 bp, Homo sapiens
tgcaaggagggaccg

SEQ ID NO: 115005 - DNA, 15 bp, Homo sapiens
gtgcaaggagggacc

SEQ ID NO: 115006 - DNA, 15 bp, Homo sapiens
agtgcaaggagggac

SEQ ID NO: 115007 - DNA, 15 bp, Homo sapiens
gagtgcaaggaggga

SEQ ID NO: 115008 - DNA, 15 bp, Homo sapiens
tgagtgcaaggaggg

SEQ ID NO: 115009 - DNA, 15 bp, Homo sapiens
atgagtgcaaggagg

SEQ ID NO: 115010 - DNA, 15 bp, Homo sapiens
catgagtgcaaggag

SEQ ID NO: 115011 - DNA, 15 bp, Homo sapiens
acatgagtgcaagga

SEQ ID NO: 115012 - DNA, 15 bp, Homo sapiens
gacatgagtgcaagg

SEQ ID NO: 115013 - DNA, 15 bp, Homo sapiens
agacatgagtgcaag

SEQ ID NO: 115014 - DNA, 15 bp, Homo sapiens
cagacatgagtgcaa

SEQ ID NO: 115015 - DNA, 15 bp, Homo sapiens
tcagacatgagtgca

SEQ ID NO: 115016 - DNA, 15 bp, Homo sapiens
ttcagacatgagtgc

SEQ ID NO: 115017 - DNA, 15 bp, Homo sapiens
attcagacatgagtg

SEQ ID NO: 115018 - DNA, 15 bp, Homo sapiens
cattcagacatgagt

SEQ ID NO: 115019 - DNA, 15 bp, Homo sapiens
acattcagacatgag

SEQ ID NO: 115020 - DNA, 15 bp, Homo sapiens
gacattcagacatga

SEQ ID NO: 115021 - DNA, 15 bp, Homo sapiens
ggacattcagacatg

SEQ ID NO: 115022 - DNA, 15 bp, Homo sapiens
gggacattcagacat

SEQ ID NO: 115023 - DNA, 15 bp, Homo sapiens
ggggacattcagaca

SEQ ID NO: 115024 - DNA, 15 bp, Homo sapiens
cggggacattcagac

SEQ ID NO: 115025 - DNA, 15 bp, Homo sapiens
gcggggacattcaga

SEQ ID NO: 115026 - DNA, 15 bp, Homo sapiens
cgcggggacattcag

SEQ ID NO: 115027 - DNA, 15 bp, Homo sapiens
acgcggggacattca

SEQ ID NO: 115028 - DNA, 15 bp, Homo sapiens
cacgcggggacattc

SEQ ID NO: 115029 - DNA, 15 bp, Homo sapiens
gcacgcggggacatt

SEQ ID NO: 115030 - DNA, 15 bp, Homo sapiens
tgcacgcggggacat

SEQ ID NO: 115031 - DNA, 15 bp, Homo sapiens
gtgcacgcggggaca

SEQ ID NO: 115032 - DNA, 15 bp, Homo sapiens
cgtgcacgcggggac

SEQ ID NO: 115033 - DNA, 15 bp, Homo sapiens
gcgtgcacgcgggga

SEQ ID NO: 115034 - DNA, 15 bp, Homo sapiens
tgcgtgcacgcgggg

SEQ ID NO: 115035 - DNA, 15 bp, Homo sapiens
gtgcgtgcacgcggg

SEQ ID NO: 115036 - DNA, 15 bp, Homo sapiens
tgtgcgtgcacgcgg

SEQ ID NO: 115037 - DNA, 15 bp, Homo sapiens
atgtgcgtgcacgcg

SEQ ID NO: 115038 - DNA, 15 bp, Homo sapiens
catgtgcgtgcacgc

SEQ ID NO: 115039 - DNA, 15 bp, Homo sapiens
ccatgtgcgtgcacg

SEQ ID NO: 115040 - DNA, 15 bp, Homo sapiens
gccatgtgcgtgcac

SEQ ID NO: 115041 - DNA, 15 bp, Homo sapiens
agccatgtgcgtgca

SEQ ID NO: 115042 - DNA, 15 bp, Homo sapiens
aagccatgtgcgtgc

SEQ ID NO: 115043 - DNA, 15 bp, Homo sapiens
gaagccatgtgcgtg

SEQ ID NO: 115044 - DNA, 15 bp, Homo sapiens
tgaagccatgtgcgt

SEQ ID NO: 115045 - DNA, 15 bp, Homo sapiens
gtgaagccatgtgcg

SEQ ID NO: 115046 - DNA, 15 bp, Homo sapiens
tgtgaagccatgtgc

SEQ ID NO: 115047 - DNA, 15 bp, Homo sapiens
ctgtgaagccatgtg

SEQ ID NO: 115048 - DNA, 15 bp, Homo sapiens
tctgtgaagccatgt

SEQ ID NO: 115049 - DNA, 15 bp, Homo sapiens
atctgtgaagccatg

SEQ ID NO: 115050 - DNA, 15 bp, Homo sapiens
gatctgtgaagccat

SEQ ID NO: 115051 - DNA, 15 bp, Homo sapiens
agatctgtgaagcca

SEQ ID NO: 115052 - DNA, 15 bp, Homo sapiens
cagatctgtgaagcc

SEQ ID NO: 115053 - DNA, 15 bp, Homo sapiens
ccagatctgtgaagc

SEQ ID NO: 115054 - DNA, 15 bp, Homo sapiens
cccagatctgtgaag

SEQ ID NO: 115055 - DNA, 15 bp, Homo sapiens
gcccagatctgtgaa

SEQ ID NO: 115056 - DNA, 15 bp, Homo sapiens
tgcccagatctgtga

SEQ ID NO: 115057 - DNA, 15 bp, Homo sapiens
ctgcccagatctgtg

SEQ ID NO: 115058 - DNA, 15 bp, Homo sapiens
actgcccagatctgt

SEQ ID NO: 115059 - DNA, 15 bp, Homo sapiens
cactgcccagatctg

SEQ ID NO: 115060 - DNA, 15 bp, Homo sapiens
gcactgcccagatct

SEQ ID NO: 115061 - DNA, 15 bp, Homo sapiens
ggcactgcccagatc

SEQ ID NO: 115062 - DNA, 15 bp, Homo sapiens
aggcactgcccagat

SEQ ID NO: 115063 - DNA, 15 bp, Homo sapiens
aaggcactgcccaga

SEQ ID NO: 115064 - DNA, 15 bp, Homo sapiens
gaaggcactgcccag

SEQ ID NO: 115065 - DNA, 15 bp, Homo sapiens
ggaaggcactgccca

SEQ ID NO: 115066 - DNA, 15 bp, Homo sapiens
gggaaggcactgccc

SEQ ID NO: 115067 - DNA, 15 bp, Homo sapiens
agggaaggcactgcc

SEQ ID NO: 115068 - DNA, 15 bp, Homo sapiens
tagggaaggcactgc

SEQ ID NO: 115069 - DNA, 15 bp, Homo sapiens
gtagggaaggcactg

SEQ ID NO: 115070 - DNA, 15 bp, Homo sapiens
ggtagggaaggcact

SEQ ID NO: 115071 - DNA, 15 bp, Homo sapiens
gggtagggaaggcac

SEQ ID NO: 115072 - DNA, 15 bp, Homo sapiens
agggtagggaaggca

SEQ ID NO: 115073 - DNA, 15 bp, Homo sapiens
gagggtagggaaggc

SEQ ID NO: 115074 - DNA, 15 bp, Homo sapiens
agagggtagggaagg

SEQ ID NO: 115075 - DNA, 15 bp, Homo sapiens
gagagggtagggaag

SEQ ID NO: 115076 - DNA, 15 bp, Homo sapiens
agagagggtagggaa

SEQ ID NO: 115077 - DNA, 15 bp, Homo sapiens
gagagagggtaggga

SEQ ID NO: 115078 - DNA, 15 bp, Homo sapiens
agagagagggtaggg

SEQ ID NO: 115079 - DNA, 15 bp, Homo sapiens
cagagagagggtagg

SEQ ID NO: 115080 - DNA, 15 bp, Homo sapiens
gcagagagagggtag

SEQ ID NO: 115081 - DNA, 15 bp, Homo sapiens
tgcagagagagggta

SEQ ID NO: 115082 - DNA, 15 bp, Homo sapiens
ctgcagagagagggt

SEQ ID NO: 115083 - DNA, 15 bp, Homo sapiens
cctgcagagagaggg

SEQ ID NO: 115084 - DNA, 15 bp, Homo sapiens
ccctgcagagagagg

SEQ ID NO: 115085 - DNA, 15 bp, Homo sapiens
gccctgcagagagag

SEQ ID NO: 115086 - DNA, 15 bp, Homo sapiens
ggccctgcagagaga

SEQ ID NO: 115087 - DNA, 15 bp, Homo sapiens
aggccctgcagagag

SEQ ID NO: 115088 - DNA, 15 bp, Homo sapiens
aaggccctgcagaga

SEQ ID NO: 115089 - DNA, 15 bp, Homo sapiens
aaaggccctgcagag

SEQ ID NO: 115090 - DNA, 15 bp, Homo sapiens
aaaaggccctgcaga

SEQ ID NO: 115091 - DNA, 15 bp, Homo sapiens
caaaaggccctgcag

SEQ ID NO: 115092 - DNA, 15 bp, Homo sapiens
gcaaaaggccctgca

SEQ ID NO: 115093 - DNA, 15 bp, Homo sapiens
ggcaaaaggccctgc

SEQ ID NO: 115094 - DNA, 15 bp, Homo sapiens
gggcaaaaggccctg

SEQ ID NO: 115095 - DNA, 15 bp, Homo sapiens
ggggcaaaaggccct

SEQ ID NO: 115096 - DNA, 15 bp, Homo sapiens
gggggcaaaaggccc

SEQ ID NO: 115097 - DNA, 15 bp, Homo sapiens
agggggcaaaaggcc

SEQ ID NO: 115098 - DNA, 15 bp, Homo sapiens
gagggggcaaaaggc

SEQ ID NO: 115099 - DNA, 15 bp, Homo sapiens
tgagggggcaaaagg

SEQ ID NO: 115100 - DNA, 15 bp, Homo sapiens
atgagggggcaaaag

SEQ ID NO: 115101 - DNA, 15 bp, Homo sapiens
catgagggggcaaaa

SEQ ID NO: 115102 - DNA, 15 bp, Homo sapiens
gcatgagggggcaaa

SEQ ID NO: 115103 - DNA, 15 bp, Homo sapiens
tgcatgagggggcaa

SEQ ID NO: 115104 - DNA, 15 bp, Homo sapiens
ctgcatgagggggca

SEQ ID NO: 115105 - DNA, 15 bp, Homo sapiens
cctgcatgagggggc

SEQ ID NO: 115106 - DNA, 15 bp, Homo sapiens
gcctgcatgaggggg

SEQ ID NO: 115107 - DNA, 15 bp, Homo sapiens
ggcctgcatgagggg

SEQ ID NO: 115108 - DNA, 15 bp, Homo sapiens
gggcctgcatgaggg

SEQ ID NO: 115109 - DNA, 15 bp, Homo sapiens
ggggcctgcatgagg

SEQ ID NO: 115110 - DNA, 15 bp, Homo sapiens
aggggcctgcatgag

SEQ ID NO: 115111 - DNA, 15 bp, Homo sapiens
caggggcctgcatga

SEQ ID NO: 115112 - DNA, 15 bp, Homo sapiens
ccaggggcctgcatg

SEQ ID NO: 115113 - DNA, 15 bp, Homo sapiens
tccaggggcctgcat

SEQ ID NO: 115114 - DNA, 15 bp, Homo sapiens
atccaggggcctgca

SEQ ID NO: 115115 - DNA, 15 bp, Homo sapiens
tatccaggggcctgc

SEQ ID NO: 115116 - DNA, 15 bp, Homo sapiens
ttatccaggggcctg

SEQ ID NO: 115117 - DNA, 15 bp, Homo sapiens
attatccaggggcct

SEQ ID NO: 115118 - DNA, 15 bp, Homo sapiens
gattatccaggggcc

SEQ ID NO: 115119 - DNA, 15 bp, Homo sapiens
cgattatccaggggc

SEQ ID NO: 115120 - DNA, 15 bp, Homo sapiens
ccgattatccagggg

SEQ ID NO: 115121 - DNA, 15 bp, Homo sapiens
gccgattatccaggg

SEQ ID NO: 115122 - DNA, 15 bp, Homo sapiens
ggccgattatccagg

SEQ ID NO: 115123 - DNA, 15 bp, Homo sapiens
gggccgattatccag

SEQ ID NO: 115124 - DNA, 15 bp, Homo sapiens
ggggccgattatcca

SEQ ID NO: 115125 - DNA, 15 bp, Homo sapiens
tggggccgattatcc

SEQ ID NO: 115126 - DNA, 15 bp, Homo sapiens
atggggccgattatc

SEQ ID NO: 115127 - DNA, 15 bp, Homo sapiens
gatggggccgattat

SEQ ID NO: 115128 - DNA, 15 bp, Homo sapiens
ggatggggccgatta

SEQ ID NO: 115129 - DNA, 15 bp, Homo sapiens
gggatggggccgatt

SEQ ID NO: 115130 - DNA, 15 bp, Homo sapiens
ggggatggggccgat

SEQ ID NO: 115131 - DNA, 15 bp, Homo sapiens
tggggatggggccga

SEQ ID NO: 115132 - DNA, 15 bp, Homo sapiens
atggggatggggccg

SEQ ID NO: 115133 - DNA, 15 bp, Homo sapiens
catggggatggggcc

SEQ ID NO: 115134 - DNA, 15 bp, Homo sapiens
acatggggatggggc

SEQ ID NO: 115135 - DNA, 15 bp, Homo sapiens
gacatggggatgggg

SEQ ID NO: 115136 - DNA, 15 bp, Homo sapiens
ggacatggggatggg

SEQ ID NO: 115137 - DNA, 15 bp, Homo sapiens
gggacatggggatgg

SEQ ID NO: 115138 - DNA, 15 bp, Homo sapiens
ggggacatggggatg

SEQ ID NO: 115139 - DNA, 15 bp, Homo sapiens
tggggacatggggat

SEQ ID NO: 115140 - DNA, 15 bp, Homo sapiens
atggggacatgggga

SEQ ID NO: 115141 - DNA, 15 bp, Homo sapiens
gatggggacatgggg

SEQ ID NO: 115142 - DNA, 15 bp, Homo sapiens
agatggggacatggg

SEQ ID NO: 115143 - DNA, 15 bp, Homo sapiens
gagatggggacatgg

SEQ ID NO: 115144 - DNA, 15 bp, Homo sapiens
ggagatggggacatg

SEQ ID NO: 115145 - DNA, 15 bp, Homo sapiens
tggagatggggacat

SEQ ID NO: 115146 - DNA, 15 bp, Homo sapiens
ctggagatggggaca

SEQ ID NO: 115147 - DNA, 15 bp, Homo sapiens
actggagatggggac

SEQ ID NO: 115148 - DNA, 15 bp, Homo sapiens
cactggagatgggga

SEQ ID NO: 115149 - DNA, 15 bp, Homo sapiens
acactggagatgggg

SEQ ID NO: 115150 - DNA, 15 bp, Homo sapiens
tacactggagatggg

SEQ ID NO: 115151 - DNA, 15 bp, Homo sapiens
atacactggagatgg

SEQ ID NO: 115152 - DNA, 15 bp, Homo sapiens
gatacactggagatg

SEQ ID NO: 115153 - DNA, 15 bp, Homo sapiens
agatacactggagat

SEQ ID NO: 115154 - DNA, 15 bp, Homo sapiens
aagatacactggaga

SEQ ID NO: 115155 - DNA, 15 bp, Homo sapiens
taagatacactggag

SEQ ID NO: 115156 - DNA, 15 bp, Homo sapiens
ctaagatacactgga

SEQ ID NO: 115157 - DNA, 15 bp, Homo sapiens
gctaagatacactgg

SEQ ID NO: 115158 - DNA, 15 bp, Homo sapiens
agctaagatacactg

SEQ ID NO: 115159 - DNA, 15 bp, Homo sapiens
tagctaagatacact

SEQ ID NO: 115160 - DNA, 15 bp, Homo sapiens
gtagctaagatacac

SEQ ID NO: 115161 - DNA, 15 bp, Homo sapiens
ggtagctaagataca

SEQ ID NO: 115162 - DNA, 15 bp, Homo sapiens
gggtagctaagatac

SEQ ID NO: 115163 - DNA, 15 bp, Homo sapiens
agggtagctaagata

SEQ ID NO: 115164 - DNA, 15 bp, Homo sapiens
tagggtagctaagat

SEQ ID NO: 115165 - DNA, 15 bp, Homo sapiens
ctagggtagctaaga

SEQ ID NO: 115166 - DNA, 15 bp, Homo sapiens
cctagggtagctaag

SEQ ID NO: 115167 - DNA, 15 bp, Homo sapiens
acctagggtagctaa

SEQ ID NO: 115168 - DNA, 15 bp, Homo sapiens
tacctagggtagcta

SEQ ID NO: 115169 - DNA, 15 bp, Homo sapiens
ttacctagggtagct

SEQ ID NO: 115170 - DNA, 15 bp, Homo sapiens
tttacctagggtagc

SEQ ID NO: 115171 - DNA, 15 bp, Homo sapiens
ctttacctagggtag

SEQ ID NO: 115172 - DNA, 15 bp, Homo sapiens
cctttacctagggta

SEQ ID NO: 115173 - DNA, 15 bp, Homo sapiens
tcctttacctagggt

SEQ ID NO: 115174 - DNA, 15 bp, Homo sapiens
ctcctttacctaggg

SEQ ID NO: 115175 - DNA, 15 bp, Homo sapiens
actcctttacctagg

SEQ ID NO: 115176 - DNA, 15 bp, Homo sapiens
cactcctttacctag

SEQ ID NO: 115177 - DNA, 15 bp, Homo sapiens
ccactcctttaccta

SEQ ID NO: 115178 - DNA, 15 bp, Homo sapiens
cccactcctttacct

SEQ ID NO: 115179 - DNA, 15 bp, Homo sapiens
gcccactcctttacc

SEQ ID NO: 115180 - DNA, 15 bp, Homo sapiens
agcccactcctttac

SEQ ID NO: 115181 - DNA, 15 bp, Homo sapiens
aagcccactccttta

SEQ ID NO: 115182 - DNA, 15 bp, Homo sapiens
aaagcccactccttt

SEQ ID NO: 115183 - DNA, 15 bp, Homo sapiens
aaaagcccactcctt

SEQ ID NO: 115184 - DNA, 15 bp, Homo sapiens
aaaaagcccactcct

SEQ ID NO: 115185 - DNA, 15 bp, Homo sapiens
taaaaagcccactcc

SEQ ID NO: 115186 - DNA, 15 bp, Homo sapiens
ctaaaaagcccactc

SEQ ID NO: 115187 - DNA, 15 bp, Homo sapiens
actaaaaagcccact

SEQ ID NO: 115188 - DNA, 15 bp, Homo sapiens
aactaaaaagcccac

SEQ ID NO: 115189 - DNA, 15 bp, Homo sapiens
gaactaaaaagccca

SEQ ID NO: 115190 - DNA, 15 bp, Homo sapiens
ggaactaaaaagccc

SEQ ID NO: 115191 - DNA, 15 bp, Homo sapiens
aggaactaaaaagcc

SEQ ID NO: 115192 - DNA, 15 bp, Homo sapiens
taggaactaaaaagc

SEQ ID NO: 115193 - DNA, 15 bp, Homo sapiens
ttaggaactaaaaag

SEQ ID NO: 115194 - DNA, 15 bp, Homo sapiens
gttaggaactaaaaa

SEQ ID NO: 115195 - DNA, 15 bp, Homo sapiens
ggttaggaactaaaa

SEQ ID NO: 115196 - DNA, 15 bp, Homo sapiens
aggttaggaactaaa

SEQ ID NO: 115197 - DNA, 15 bp, Homo sapiens
aaggttaggaactaa

SEQ ID NO: 115198 - DNA, 15 bp, Homo sapiens
gaaggttaggaacta

SEQ ID NO: 115199 - DNA, 15 bp, Homo sapiens
ggaaggttaggaact

SEQ ID NO: 115200 - DNA, 15 bp, Homo sapiens
tggaaggttaggaac

SEQ ID NO: 115201 - DNA, 15 bp, Homo sapiens
ctggaaggttaggaa

SEQ ID NO: 115202 - DNA, 15 bp, Homo sapiens
tctggaaggttagga

SEQ ID NO: 115203 - DNA, 15 bp, Homo sapiens
ctctggaaggttagg

SEQ ID NO: 115204 - DNA, 15 bp, Homo sapiens
gctctggaaggttag

SEQ ID NO: 115205 - DNA, 15 bp, Homo sapiens
agctctggaaggtta

SEQ ID NO: 115206 - DNA, 15 bp, Homo sapiens
tagctctggaaggtt

SEQ ID NO: 115207 - DNA, 15 bp, Homo sapiens
gtagctctggaaggt

SEQ ID NO: 115208 - DNA, 15 bp, Homo sapiens
tgtagctctggaagg

SEQ ID NO: 115209 - DNA, 15 bp, Homo sapiens
ttgtagctctggaag

SEQ ID NO: 115210 - DNA, 15 bp, Homo sapiens
gttgtagctctggaa

SEQ ID NO: 115211 - DNA, 15 bp, Homo sapiens
tgttgtagctctgga

SEQ ID NO: 115212 - DNA, 15 bp, Homo sapiens
ctgttgtagctctgg

SEQ ID NO: 115213 - DNA, 15 bp, Homo sapiens
gctgttgtagctctg

SEQ ID NO: 115214 - DNA, 15 bp, Homo sapiens
tgctgttgtagctct

SEQ ID NO: 115215 - DNA, 15 bp, Homo sapiens
ctgctgttgtagctc

SEQ ID NO: 115216 - DNA, 15 bp, Homo sapiens
actgctgttgtagct

SEQ ID NO: 115217 - DNA, 15 bp, Homo sapiens
gactgctgttgtagc

SEQ ID NO: 115218 - DNA, 15 bp, Homo sapiens
tgactgctgttgtag

SEQ ID NO: 115219 - DNA, 15 bp, Homo sapiens
atgactgctgttgta

SEQ ID NO: 115220 - DNA, 15 bp, Homo sapiens
gatgactgctgttgt

SEQ ID NO: 115221 - DNA, 15 bp, Homo sapiens
ggatgactgctgttg

SEQ ID NO: 115222 - DNA, 15 bp, Homo sapiens
tggatgactgctgtt

SEQ ID NO: 115223 - DNA, 15 bp, Homo sapiens
ctggatgactgctgt

SEQ ID NO: 115224 - DNA, 15 bp, Homo sapiens
gctggatgactgctg

SEQ ID NO: 115225 - DNA, 15 bp, Homo sapiens
ggctggatgactgct

SEQ ID NO: 115226 - DNA, 15 bp, Homo sapiens
tggctggatgactgc

SEQ ID NO: 115227 - DNA, 15 bp, Homo sapiens
ctggctggatgactg

SEQ ID NO: 115228 - DNA, 15 bp, Homo sapiens
cctggctggatgact

SEQ ID NO: 115229 - DNA, 15 bp, Homo sapiens
acctggctggatgac

SEQ ID NO: 115230 - DNA, 15 bp, Homo sapiens
gacctggctggatga

SEQ ID NO: 115231 - DNA, 15 bp, Homo sapiens
agacctggctggatg

SEQ ID NO: 115232 - DNA, 15 bp, Homo sapiens
cagacctggctggat

SEQ ID NO: 115233 - DNA, 15 bp, Homo sapiens
ccagacctggctgga

SEQ ID NO: 115234 - DNA, 15 bp, Homo sapiens
cccagacctggctgg

SEQ ID NO: 115235 - DNA, 15 bp, Homo sapiens
acccagacctggctg

SEQ ID NO: 115236 - DNA, 15 bp, Homo sapiens
cacccagacctggct

SEQ ID NO: 115237 - DNA, 15 bp, Homo sapiens
ccacccagacctggc

SEQ ID NO: 115238 - DNA, 15 bp, Homo sapiens
cccacccagacctgg

SEQ ID NO: 115239 - DNA, 15 bp, Homo sapiens
tcccacccagacctg

SEQ ID NO: 115240 - DNA, 15 bp, Homo sapiens
ttcccacccagacct

SEQ ID NO: 115241 - DNA, 15 bp, Homo sapiens
gttcccacccagacc

SEQ ID NO: 115242 - DNA, 15 bp, Homo sapiens
tgttcccacccagac

SEQ ID NO: 115243 - DNA, 15 bp, Homo sapiens
atgttcccacccaga

SEQ ID NO: 115244 - DNA, 15 bp, Homo sapiens
aatgttcccacccag

SEQ ID NO: 115245 - DNA, 15 bp, Homo sapiens
aaatgttcccaccca

SEQ ID NO: 115246 - DNA, 15 bp, Homo sapiens
aaaatgttcccaccc

SEQ ID NO: 115247 - DNA, 15 bp, Homo sapiens
gaaaatgttcccacc

SEQ ID NO: 115248 - DNA, 15 bp, Homo sapiens
agaaaatgttcccac

SEQ ID NO: 115249 - DNA, 15 bp, Homo sapiens
tagaaaatgttccca

SEQ ID NO: 115250 - DNA, 15 bp, Homo sapiens
ctagaaaatgttccc

SEQ ID NO: 115251 - DNA, 15 bp, Homo sapiens
tctagaaaatgttcc

SEQ ID NO: 115252 - DNA, 15 bp, Homo sapiens
atctagaaaatgttc

SEQ ID NO: 115253 - DNA, 15 bp, Homo sapiens
tatctagaaaatgtt

SEQ ID NO: 115254 - DNA, 15 bp, Homo sapiens
gtatctagaaaatgt

SEQ ID NO: 115255 - DNA, 15 bp, Homo sapiens
cgtatctagaaaatg

SEQ ID NO: 115256 - DNA, 15 bp, Homo sapiens
ccgtatctagaaaat

SEQ ID NO: 115257 - DNA, 15 bp, Homo sapiens
cccgtatctagaaaa

SEQ ID NO: 115258 - DNA, 15 bp, Homo sapiens
acccgtatctagaaa

SEQ ID NO: 115259 - DNA, 15 bp, Homo sapiens
cacccgtatctagaa

SEQ ID NO: 115260 - DNA, 15 bp, Homo sapiens
gcacccgtatctaga

SEQ ID NO: 115261 - DNA, 15 bp, Homo sapiens
agcacccgtatctag

SEQ ID NO: 115262 - DNA, 15 bp, Homo sapiens
cagcacccgtatcta

SEQ ID NO: 115263 - DNA, 15 bp, Homo sapiens
tcagcacccgtatct

SEQ ID NO: 115264 - DNA, 15 bp, Homo sapiens
ctcagcacccgtatc

SEQ ID NO: 115265 - DNA, 15 bp, Homo sapiens
tctcagcacccgtat

SEQ ID NO: 115266 - DNA, 15 bp, Homo sapiens
atctcagcacccgta

SEQ ID NO: 115267 - DNA, 15 bp, Homo sapiens
gatctcagcacccgt

SEQ ID NO: 115268 - DNA, 15 bp, Homo sapiens
agatctcagcacccg

SEQ ID NO: 115269 - DNA, 15 bp, Homo sapiens
gagatctcagcaccc

SEQ ID NO: 115270 - DNA, 15 bp, Homo sapiens
agagatctcagcacc

SEQ ID NO: 115271 - DNA, 15 bp, Homo sapiens
gagagatctcagcac

SEQ ID NO: 115272 - DNA, 15 bp, Homo sapiens
tgagagatctcagca

SEQ ID NO: 115273 - DNA, 15 bp, Homo sapiens
ctgagagatctcagc

SEQ ID NO: 115274 - DNA, 15 bp, Homo sapiens
gctgagagatctcag

SEQ ID NO: 115275 - DNA, 15 bp, Homo sapiens
ggctgagagatctca

SEQ ID NO: 115276 - DNA, 15 bp, Homo sapiens
gggctgagagatctc

SEQ ID NO: 115277 - DNA, 15 bp, Homo sapiens
tgggctgagagatct

SEQ ID NO: 115278 - DNA, 15 bp, Homo sapiens
ctgggctgagagatc

SEQ ID NO: 115279 - DNA, 15 bp, Homo sapiens
tctgggctgagagat

SEQ ID NO: 115280 - DNA, 15 bp, Homo sapiens
ctctgggctgagaga

SEQ ID NO: 115281 - DNA, 15 bp, Homo sapiens
tctctgggctgagag

SEQ ID NO: 115282 - DNA, 15 bp, Homo sapiens
ctctctgggctgaga

SEQ ID NO: 115283 - DNA, 15 bp, Homo sapiens
tctctctgggctgag

SEQ ID NO: 115284 - DNA, 15 bp, Homo sapiens
ttctctctgggctga

SEQ ID NO: 115285 - DNA, 15 bp, Homo sapiens
cttctctctgggctg

SEQ ID NO: 115286 - DNA, 15 bp, Homo sapiens
gcttctctctgggct

SEQ ID NO: 115287 - DNA, 15 bp, Homo sapiens
ggcttctctctgggc

SEQ ID NO: 115288 - DNA, 15 bp, Homo sapiens
gggcttctctctggg

SEQ ID NO: 115289 - DNA, 15 bp, Homo sapiens
agggcttctctctgg

SEQ ID NO: 115290 - DNA, 15 bp, Homo sapiens
cagggcttctctctg

SEQ ID NO: 115291 - DNA, 15 bp, Homo sapiens
ccagggcttctctct

SEQ ID NO: 115292 - DNA, 15 bp, Homo sapiens
cccagggcttctctc

SEQ ID NO: 115293 - DNA, 15 bp, Homo sapiens
ccccagggcttctct

SEQ ID NO: 115294 - DNA, 15 bp, Homo sapiens
tccccagggcttctc

SEQ ID NO: 115295 - DNA, 15 bp, Homo sapiens
ttccccagggcttct

SEQ ID NO: 115296 - DNA, 15 bp, Homo sapiens
attccccagggcttc

SEQ ID NO: 115297 - DNA, 15 bp, Homo sapiens
aattccccagggctt

SEQ ID NO: 115298 - DNA, 15 bp, Homo sapiens
aaattccccagggct

SEQ ID NO: 115299 - DNA, 15 bp, Homo sapiens
aaaattccccagggc

SEQ ID NO: 115300 - DNA, 15 bp, Homo sapiens
gaaaattccccaggg

SEQ ID NO: 115301 - DNA, 15 bp, Homo sapiens
tgaaaattccccagg

SEQ ID NO: 115302 - DNA, 15 bp, Homo sapiens
ctgaaaattccccag

SEQ ID NO: 115303 - DNA, 15 bp, Homo sapiens
tctgaaaattcccca

SEQ ID NO: 115304 - DNA, 15 bp, Homo sapiens
ctctgaaaattcccc

SEQ ID NO: 115305 - DNA, 15 bp, Homo sapiens
tctctgaaaattccc

SEQ ID NO: 115306 - DNA, 15 bp, Homo sapiens
ctctctgaaaattcc

SEQ ID NO: 115307 - DNA, 15 bp, Homo sapiens
tctctctgaaaattc

SEQ ID NO: 115308 - DNA, 15 bp, Homo sapiens
ttctctctgaaaatt

SEQ ID NO: 115309 - DNA, 15 bp, Homo sapiens
tttctctctgaaaat

SEQ ID NO: 115310 - DNA, 15 bp, Homo sapiens
ctttctctctgaaaa

SEQ ID NO: 115311 - DNA, 15 bp, Homo sapiens
gctttctctctgaaa

SEQ ID NO: 115312 - DNA, 15 bp, Homo sapiens
tgctttctctctgaa

SEQ ID NO: 115313 - DNA, 15 bp, Homo sapiens
ctgctttctctctga

SEQ ID NO: 115314 - DNA, 15 bp, Homo sapiens
actgctttctctctg

SEQ ID NO: 115315 - DNA, 15 bp, Homo sapiens
gactgctttctctct

SEQ ID NO: 115316 - DNA, 15 bp, Homo sapiens
agactgctttctctc

SEQ ID NO: 115317 - DNA, 15 bp, Homo sapiens
gagactgctttctct

SEQ ID NO: 115318 - DNA, 15 bp, Homo sapiens
ggagactgctttctc

SEQ ID NO: 115319 - DNA, 15 bp, Homo sapiens
tggagactgctttct

SEQ ID NO: 115320 - DNA, 15 bp, Homo sapiens
ctggagactgctttc

SEQ ID NO: 115321 - DNA, 15 bp, Homo sapiens
cctggagactgcttt

SEQ ID NO: 115322 - DNA, 15 bp, Homo sapiens
acctggagactgctt

SEQ ID NO: 115323 - DNA, 15 bp, Homo sapiens
cacctggagactgct

SEQ ID NO: 115324 - DNA, 15 bp, Homo sapiens
ccacctggagactgc

SEQ ID NO: 115325 - DNA, 15 bp, Homo sapiens
cccacctggagactg

SEQ ID NO: 115326 - DNA, 15 bp, Homo sapiens
ccccacctggagact

SEQ ID NO: 115327 - DNA, 15 bp, Homo sapiens
gccccacctggagac

SEQ ID NO: 115328 - DNA, 15 bp, Homo sapiens
agccccacctggaga

SEQ ID NO: 115329 - DNA, 15 bp, Homo sapiens
cagccccacctggag

SEQ ID NO: 115330 - DNA, 15 bp, Homo sapiens
ccagccccacctgga

SEQ ID NO: 115331 - DNA, 15 bp, Homo sapiens
tccagccccacctgg

SEQ ID NO: 115332 - DNA, 15 bp, Homo sapiens
atccagccccacctg

SEQ ID NO: 115333 - DNA, 15 bp, Homo sapiens
catccagccccacct

SEQ ID NO: 115334 - DNA, 15 bp, Homo sapiens
acatccagccccacc

SEQ ID NO: 115335 - DNA, 15 bp, Homo sapiens
tacatccagccccac

SEQ ID NO: 115336 - DNA, 15 bp, Homo sapiens
gtacatccagcccca

SEQ ID NO: 115337 - DNA, 15 bp, Homo sapiens
agtacatccagcccc

SEQ ID NO: 115338 - DNA, 15 bp, Homo sapiens
cagtacatccagccc

SEQ ID NO: 115339 - DNA, 15 bp, Homo sapiens
tcagtacatccagcc

SEQ ID NO: 115340 - DNA, 15 bp, Homo sapiens
atcagtacatccagc

SEQ ID NO: 115341 - DNA, 15 bp, Homo sapiens
catcagtacatccag

SEQ ID NO: 115342 - DNA, 15 bp, Homo sapiens
gcatcagtacatcca

SEQ ID NO: 115343 - DNA, 15 bp, Homo sapiens
ggcatcagtacatcc

SEQ ID NO: 115344 - DNA, 15 bp, Homo sapiens
tggcatcagtacatc

SEQ ID NO: 115345 - DNA, 15 bp, Homo sapiens
gtggcatcagtacat

SEQ ID NO: 115346 - DNA, 15 bp, Homo sapiens
agtggcatcagtaca

SEQ ID NO: 115347 - DNA, 15 bp, Homo sapiens
cagtggcatcagtac

SEQ ID NO: 115348 - DNA, 15 bp, Homo sapiens
tcagtggcatcagta

SEQ ID NO: 115349 - DNA, 15 bp, Homo sapiens
ctcagtggcatcagt

SEQ ID NO: 115350 - DNA, 15 bp, Homo sapiens
tctcagtggcatcag

SEQ ID NO: 115351 - DNA, 15 bp, Homo sapiens
atctcagtggcatca

SEQ ID NO: 115352 - DNA, 15 bp, Homo sapiens
gatctcagtggcatc

SEQ ID NO: 115353 - DNA, 15 bp, Homo sapiens
agatctcagtggcat

SEQ ID NO: 115354 - DNA, 15 bp, Homo sapiens
cagatctcagtggca

SEQ ID NO: 115355 - DNA, 15 bp, Homo sapiens
acagatctcagtggc

SEQ ID NO: 115356 - DNA, 15 bp, Homo sapiens
tacagatctcagtgg

SEQ ID NO: 115357 - DNA, 15 bp, Homo sapiens
ttacagatctcagtg

SEQ ID NO: 115358 - DNA, 15 bp, Homo sapiens
tttacagatctcagt

SEQ ID NO: 115359 - DNA, 15 bp, Homo sapiens
ctttacagatctcag

SEQ ID NO: 115360 - DNA, 15 bp, Homo sapiens
cctttacagatctca

SEQ ID NO: 115361 - DNA, 15 bp, Homo sapiens
tcctttacagatctc

SEQ ID NO: 115362 - DNA, 15 bp, Homo sapiens
ctcctttacagatct

SEQ ID NO: 115363 - DNA, 15 bp, Homo sapiens
actcctttacagatc

SEQ ID NO: 115364 - DNA, 15 bp, Homo sapiens
gactcctttacagat

SEQ ID NO: 115365 - DNA, 15 bp, Homo sapiens
ggactcctttacaga

SEQ ID NO: 115366 - DNA, 15 bp, Homo sapiens
gggactcctttacag

SEQ ID NO: 115367 - DNA, 15 bp, Homo sapiens
agggactcctttaca

SEQ ID NO: 115368 - DNA, 15 bp, Homo sapiens
tagggactcctttac

SEQ ID NO: 115369 - DNA, 15 bp, Homo sapiens
ttagggactccttta

SEQ ID NO: 115370 - DNA, 15 bp, Homo sapiens
gttagggactccttt

SEQ ID NO: 115371 - DNA, 15 bp, Homo sapiens
tgttagggactcctt

SEQ ID NO: 115372 - DNA, 15 bp, Homo sapiens
gtgttagggactcct

SEQ ID NO: 115373 - DNA, 15 bp, Homo sapiens
ggtgttagggactcc

SEQ ID NO: 115374 - DNA, 15 bp, Homo sapiens
aggtgttagggactc

SEQ ID NO: 115375 - DNA, 15 bp, Homo sapiens
caggtgttagggact

SEQ ID NO: 115376 - DNA, 15 bp, Homo sapiens
tcaggtgttagggac

SEQ ID NO: 115377 - DNA, 15 bp, Homo sapiens
gtcaggtgttaggga

SEQ ID NO: 115378 - DNA, 15 bp, Homo sapiens
tgtcaggtgttaggg

SEQ ID NO: 115379 - DNA, 15 bp, Homo sapiens
atgtcaggtgttagg

SEQ ID NO: 115380 - DNA, 15 bp, Homo sapiens
tatgtcaggtgttag

SEQ ID NO: 115381 - DNA, 15 bp, Homo sapiens
ctatgtcaggtgtta

SEQ ID NO: 115382 - DNA, 15 bp, Homo sapiens
cctatgtcaggtgtt

SEQ ID NO: 115383 - DNA, 15 bp, Homo sapiens
tcctatgtcaggtgt

SEQ ID NO: 115384 - DNA, 15 bp, Homo sapiens
ctcctatgtcaggtg

SEQ ID NO: 115385 - DNA, 15 bp, Homo sapiens
actcctatgtcaggt

SEQ ID NO: 115386 - DNA, 15 bp, Homo sapiens
cactcctatgtcagg

SEQ ID NO: 115387 - DNA, 15 bp, Homo sapiens
tcactcctatgtcag

SEQ ID NO: 115388 - DNA, 15 bp, Homo sapiens
gtcactcctatgtca

SEQ ID NO: 115389 - DNA, 15 bp, Homo sapiens
tgtcactcctatgtc

SEQ ID NO: 115390 - DNA, 15 bp, Homo sapiens
ttgtcactcctatgt

SEQ ID NO: 115391 - DNA, 15 bp, Homo sapiens
tttgtcactcctatg

SEQ ID NO: 115392 - DNA, 15 bp, Homo sapiens
ttttgtcactcctat

SEQ ID NO: 115393 - DNA, 15 bp, Homo sapiens
gttttgtcactccta

SEQ ID NO: 115394 - DNA, 15 bp, Homo sapiens
agttttgtcactcct

SEQ ID NO: 115395 - DNA, 15 bp, Homo sapiens
cagttttgtcactcc

SEQ ID NO: 115396 - DNA, 15 bp, Homo sapiens
acagttttgtcactc

SEQ ID NO: 115397 - DNA, 15 bp, Homo sapiens
aacagttttgtcact

SEQ ID NO: 115398 - DNA, 15 bp, Homo sapiens
aaacagttttgtcac

SEQ ID NO: 115399 - DNA, 15 bp, Homo sapiens
aaaacagttttgtca

SEQ ID NO: 115400 - DNA, 15 bp, Homo sapiens
gaaaacagttttgtc

SEQ ID NO: 115401 - DNA, 15 bp, Homo sapiens
agaaaacagttttgt

SEQ ID NO: 115402 - DNA, 15 bp, Homo sapiens
cagaaaacagttttg

SEQ ID NO: 115403 - DNA, 15 bp, Homo sapiens
gcagaaaacagtttt

SEQ ID NO: 115404 - DNA, 15 bp, Homo sapiens
tgcagaaaacagttt

SEQ ID NO: 115405 - DNA, 15 bp, Homo sapiens
gtgcagaaaacagtt

SEQ ID NO: 115406 - DNA, 15 bp, Homo sapiens
ggtgcagaaaacagt

SEQ ID NO: 115407 - DNA, 15 bp, Homo sapiens
tggtgcagaaaacag

SEQ ID NO: 115408 - DNA, 15 bp, Homo sapiens
ttggtgcagaaaaca

SEQ ID NO: 115409 - DNA, 15 bp, Homo sapiens
gttggtgcagaaaac

SEQ ID NO: 115410 - DNA, 15 bp, Homo sapiens
agttggtgcagaaaa

SEQ ID NO: 115411 - DNA, 15 bp, Homo sapiens
cagttggtgcagaaa

SEQ ID NO: 115412 - DNA, 15 bp, Homo sapiens
tcagttggtgcagaa

SEQ ID NO: 115413 - DNA, 15 bp, Homo sapiens
ctcagttggtgcaga

SEQ ID NO: 115414 - DNA, 15 bp, Homo sapiens
gctcagttggtgcag

SEQ ID NO: 115415 - DNA, 15 bp, Homo sapiens
tgctcagttggtgca

SEQ ID NO: 115416 - DNA, 15 bp, Homo sapiens
ctgctcagttggtgc

SEQ ID NO: 115417 - DNA, 15 bp, Homo sapiens
tctgctcagttggtg

SEQ ID NO: 115418 - DNA, 15 bp, Homo sapiens
ttctgctcagttggt

SEQ ID NO: 115419 - DNA, 15 bp, Homo sapiens
attctgctcagttgg

SEQ ID NO: 115420 - DNA, 15 bp, Homo sapiens
tattctgctcagttg

SEQ ID NO: 115421 - DNA, 15 bp, Homo sapiens
gtattctgctcagtt

SEQ ID NO: 115422 - DNA, 15 bp, Homo sapiens
tgtattctgctcagt

SEQ ID NO: 115423 - DNA, 15 bp, Homo sapiens
gtgtattctgctcag

SEQ ID NO: 115424 - DNA, 15 bp, Homo sapiens
cgtgtattctgctca

SEQ ID NO: 115425 - DNA, 15 bp, Homo sapiens
gcgtgtattctgctc

SEQ ID NO: 115426 - DNA, 15 bp, Homo sapiens
tgcgtgtattctgct

SEQ ID NO: 115427 - DNA, 15 bp, Homo sapiens
ctgcgtgtattctgc

SEQ ID NO: 115428 - DNA, 15 bp, Homo sapiens
gctgcgtgtattctg

SEQ ID NO: 115429 - DNA, 15 bp, Homo sapiens
agctgcgtgtattct

SEQ ID NO: 115430 - DNA, 15 bp, Homo sapiens
cagctgcgtgtattc

SEQ ID NO: 115431 - DNA, 15 bp, Homo sapiens
tcagctgcgtgtatt

SEQ ID NO: 115432 - DNA, 15 bp, Homo sapiens
gtcagctgcgtgtat

SEQ ID NO: 115433 - DNA, 15 bp, Homo sapiens
ggtcagctgcgtgta

SEQ ID NO: 115434 - DNA, 15 bp, Homo sapiens
aggtcagctgcgtgt

SEQ ID NO: 115435 - DNA, 15 bp, Homo sapiens
caggtcagctgcgtg

SEQ ID NO: 115436 - DNA, 15 bp, Homo sapiens
ccaggtcagctgcgt

SEQ ID NO: 115437 - DNA, 15 bp, Homo sapiens
cccaggtcagctgcg

SEQ ID NO: 115438 - DNA, 15 bp, Homo sapiens
gcccaggtcagctgc

SEQ ID NO: 115439 - DNA, 15 bp, Homo sapiens
agcccaggtcagctg

SEQ ID NO: 115440 - DNA, 15 bp, Homo sapiens
gagcccaggtcagct

SEQ ID NO: 115441 - DNA, 15 bp, Homo sapiens
tgagcccaggtcagc

SEQ ID NO: 115442 - DNA, 15 bp, Homo sapiens
ttgagcccaggtcag

SEQ ID NO: 115443 - DNA, 15 bp, Homo sapiens
cttgagcccaggtca

SEQ ID NO: 115444 - DNA, 15 bp, Homo sapiens
ccttgagcccaggtc

SEQ ID NO: 115445 - DNA, 15 bp, Homo sapiens
accttgagcccaggt

SEQ ID NO: 115446 - DNA, 15 bp, Homo sapiens
gaccttgagcccagg

SEQ ID NO: 115447 - DNA, 15 bp, Homo sapiens
agaccttgagcccag

SEQ ID NO: 115448 - DNA, 15 bp, Homo sapiens
cagaccttgagccca

SEQ ID NO: 115449 - DNA, 15 bp, Homo sapiens
ccagaccttgagccc

SEQ ID NO: 115450 - DNA, 15 bp, Homo sapiens
gccagaccttgagcc

SEQ ID NO: 115451 - DNA, 15 bp, Homo sapiens
ggccagaccttgagc

SEQ ID NO: 115452 - DNA, 15 bp, Homo sapiens
gggccagaccttgag

SEQ ID NO: 115453 - DNA, 15 bp, Homo sapiens
agggccagaccttga

SEQ ID NO: 115454 - DNA, 15 bp, Homo sapiens
cagggccagaccttg

SEQ ID NO: 115455 - DNA, 15 bp, Homo sapiens
gcagggccagacctt

SEQ ID NO: 115456 - DNA, 15 bp, Homo sapiens
ggcagggccagacct

SEQ ID NO: 115457 - DNA, 15 bp, Homo sapiens
tggcagggccagacc

SEQ ID NO: 115458 - DNA, 15 bp, Homo sapiens
gtggcagggccagac

SEQ ID NO: 115459 - DNA, 15 bp, Homo sapiens
cgtggcagggccaga

SEQ ID NO: 115460 - DNA, 15 bp, Homo sapiens
acgtggcagggccag

SEQ ID NO: 115461 - DNA, 15 bp, Homo sapiens
cacgtggcagggcca

SEQ ID NO: 115462 - DNA, 15 bp, Homo sapiens
gcacgtggcagggcc

SEQ ID NO: 115463 - DNA, 15 bp, Homo sapiens
agcacgtggcagggc

SEQ ID NO: 115464 - DNA, 15 bp, Homo sapiens
cagcacgtggcaggg

SEQ ID NO: 115465 - DNA, 15 bp, Homo sapiens
ccagcacgtggcagg

SEQ ID NO: 115466 - DNA, 15 bp, Homo sapiens
gccagcacgtggcag

SEQ ID NO: 115467 - DNA, 15 bp, Homo sapiens
agccagcacgtggca

SEQ ID NO: 115468 - DNA, 15 bp, Homo sapiens
gagccagcacgtggc

SEQ ID NO: 115469 - DNA, 15 bp, Homo sapiens
agagccagcacgtgg

SEQ ID NO: 115470 - DNA, 15 bp, Homo sapiens
cagagccagcacgtg

SEQ ID NO: 115471 - DNA, 15 bp, Homo sapiens
acagagccagcacgt

SEQ ID NO: 115472 - DNA, 15 bp, Homo sapiens
cacagagccagcacg

SEQ ID NO: 115473 - DNA, 15 bp, Homo sapiens
tcacagagccagcac

SEQ ID NO: 115474 - DNA, 15 bp, Homo sapiens
atcacagagccagca

SEQ ID NO: 115475 - DNA, 15 bp, Homo sapiens
catcacagagccagc

SEQ ID NO: 115476 - DNA, 15 bp, Homo sapiens
gcatcacagagccag

SEQ ID NO: 115477 - DNA, 15 bp, Homo sapiens
agcatcacagagcca

SEQ ID NO: 115478 - DNA, 15 bp, Homo sapiens
cagcatcacagagcc

SEQ ID NO: 115479 - DNA, 15 bp, Homo sapiens
ccagcatcacagagc

SEQ ID NO: 115480 - DNA, 15 bp, Homo sapiens
gccagcatcacagag

SEQ ID NO: 115481 - DNA, 15 bp, Homo sapiens
ggccagcatcacaga

SEQ ID NO: 115482 - DNA, 15 bp, Homo sapiens
tggccagcatcacag

SEQ ID NO: 115483 - DNA, 15 bp, Homo sapiens
ttggccagcatcaca

SEQ ID NO: 115484 - DNA, 15 bp, Homo sapiens
cttggccagcatcac

SEQ ID NO: 115485 - DNA, 15 bp, Homo sapiens
acttggccagcatca

SEQ ID NO: 115486 - DNA, 15 bp, Homo sapiens
cacttggccagcatc

SEQ ID NO: 115487 - DNA, 15 bp, Homo sapiens
gcacttggccagcat

SEQ ID NO: 115488 - DNA, 15 bp, Homo sapiens
ggcacttggccagca

SEQ ID NO: 115489 - DNA, 15 bp, Homo sapiens
aggcacttggccagc

SEQ ID NO: 115490 - DNA, 15 bp, Homo sapiens
aaggcacttggccag

SEQ ID NO: 115491 - DNA, 15 bp, Homo sapiens
gaaggcacttggcca

SEQ ID NO: 115492 - DNA, 15 bp, Homo sapiens
cgaaggcacttggcc

SEQ ID NO: 115493 - DNA, 15 bp, Homo sapiens
gcgaaggcacttggc

SEQ ID NO: 115494 - DNA, 15 bp, Homo sapiens
ggcgaaggcacttgg

SEQ ID NO: 115495 - DNA, 15 bp, Homo sapiens
aggcgaaggcacttg

SEQ ID NO: 115496 - DNA, 15 bp, Homo sapiens
gaggcgaaggcactt

SEQ ID NO: 115497 - DNA, 15 bp, Homo sapiens
agaggcgaaggcact

SEQ ID NO: 115498 - DNA, 15 bp, Homo sapiens
gagaggcgaaggcac

SEQ ID NO: 115499 - DNA, 15 bp, Homo sapiens
ggagaggcgaaggca

SEQ ID NO: 115500 - DNA, 15 bp, Homo sapiens
cggagaggcgaaggc

SEQ ID NO: 115501 - DNA, 15 bp, Homo sapiens
ccggagaggcgaagg

SEQ ID NO: 115502 - DNA, 15 bp, Homo sapiens
cccggagaggcgaag

SEQ ID NO: 115503 - DNA, 15 bp, Homo sapiens
gcccggagaggcgaa

SEQ ID NO: 115504 - DNA, 15 bp, Homo sapiens
ggcccggagaggcga

SEQ ID NO: 115505 - DNA, 15 bp, Homo sapiens
tggcccggagaggcg

SEQ ID NO: 115506 - DNA, 15 bp, Homo sapiens
gtggcccggagaggc

SEQ ID NO: 115507 - DNA, 15 bp, Homo sapiens
tgtggcccggagagg

SEQ ID NO: 115508 - DNA, 15 bp, Homo sapiens
ctgtggcccggagag

SEQ ID NO: 115509 - DNA, 15 bp, Homo sapiens
actgtggcccggaga

SEQ ID NO: 115510 - DNA, 15 bp, Homo sapiens
aactgtggcccggag

SEQ ID NO: 115511 - DNA, 15 bp, Homo sapiens
aaactgtggcccgga

SEQ ID NO: 115512 - DNA, 15 bp, Homo sapiens
aaaactgtggcccgg

SEQ ID NO: 115513 - DNA, 15 bp, Homo sapiens
aaaaactgtggcccg

SEQ ID NO: 115514 - DNA, 15 bp, Homo sapiens
aaaaaactgtggccc

SEQ ID NO: 115515 - DNA, 15 bp, Homo sapiens
caaaaaactgtggcc

SEQ ID NO: 115516 - DNA, 15 bp, Homo sapiens
tcaaaaaactgtggc

SEQ ID NO: 115517 - DNA, 15 bp, Homo sapiens
atcaaaaaactgtgg

SEQ ID NO: 115518 - DNA, 15 bp, Homo sapiens
gatcaaaaaactgtg

SEQ ID NO: 115519 - DNA, 15 bp, Homo sapiens
agatcaaaaaactgt

SEQ ID NO: 115520 - DNA, 15 bp, Homo sapiens
cagatcaaaaaactg

SEQ ID NO: 115521 - DNA, 15 bp, Homo sapiens
tcagatcaaaaaact

SEQ ID NO: 115522 - DNA, 15 bp, Homo sapiens
ttcagatcaaaaaac

SEQ ID NO: 115523 - DNA, 15 bp, Homo sapiens
cttcagatcaaaaaa

SEQ ID NO: 115524 - DNA, 15 bp, Homo sapiens
tcttcagatcaaaaa

SEQ ID NO: 115525 - DNA, 15 bp, Homo sapiens
ctcttcagatcaaaa

SEQ ID NO: 115526 - DNA, 15 bp, Homo sapiens
actcttcagatcaaa

SEQ ID NO: 115527 - DNA, 15 bp, Homo sapiens
cactcttcagatcaa

SEQ ID NO: 115528 - DNA, 15 bp, Homo sapiens
ccactcttcagatca

SEQ ID NO: 115529 - DNA, 15 bp, Homo sapiens
tccactcttcagatc

SEQ ID NO: 115530 - DNA, 15 bp, Homo sapiens
ctccactcttcagat

SEQ ID NO: 115531 - DNA, 15 bp, Homo sapiens
gctccactcttcaga

SEQ ID NO: 115532 - DNA, 15 bp, Homo sapiens
ggctccactcttcag

SEQ ID NO: 115533 - DNA, 15 bp, Homo sapiens
gggctccactcttca

SEQ ID NO: 115534 - DNA, 15 bp, Homo sapiens
agggctccactcttc

SEQ ID NO: 115535 - DNA, 15 bp, Homo sapiens
tagggctccactctt

SEQ ID NO: 115536 - DNA, 15 bp, Homo sapiens
gtagggctccactct

SEQ ID NO: 115537 - DNA, 15 bp, Homo sapiens
agtagggctccactc

SEQ ID NO: 115538 - DNA, 15 bp, Homo sapiens
gagtagggctccact

SEQ ID NO: 115539 - DNA, 15 bp, Homo sapiens
tgagtagggctccac

SEQ ID NO: 115540 - DNA, 15 bp, Homo sapiens
ttgagtagggctcca

SEQ ID NO: 115541 - DNA, 15 bp, Homo sapiens
cttgagtagggctcc

SEQ ID NO: 115542 - DNA, 15 bp, Homo sapiens
gcttgagtagggctc

SEQ ID NO: 115543 - DNA, 15 bp, Homo sapiens
ggcttgagtagggct

SEQ ID NO: 115544 - DNA, 15 bp, Homo sapiens
tggcttgagtagggc

SEQ ID NO: 115545 - DNA, 15 bp, Homo sapiens
atggcttgagtaggg

SEQ ID NO: 115546 - DNA, 15 bp, Homo sapiens
gatggcttgagtagg

SEQ ID NO: 115547 - DNA, 15 bp, Homo sapiens
agatggcttgagtag

SEQ ID NO: 115548 - DNA, 15 bp, Homo sapiens
cagatggcttgagta

SEQ ID NO: 115549 - DNA, 15 bp, Homo sapiens
gcagatggcttgagt

SEQ ID NO: 115550 - DNA, 15 bp, Homo sapiens
tgcagatggcttgag

SEQ ID NO: 115551 - DNA, 15 bp, Homo sapiens
ctgcagatggcttga

SEQ ID NO: 115552 - DNA, 15 bp, Homo sapiens
gctgcagatggcttg

SEQ ID NO: 115553 - DNA, 15 bp, Homo sapiens
agctgcagatggctt

SEQ ID NO: 115554 - DNA, 15 bp, Homo sapiens
gagctgcagatggct

SEQ ID NO: 115555 - DNA, 15 bp, Homo sapiens
agagctgcagatggc

SEQ ID NO: 115556 - DNA, 15 bp, Homo sapiens
gagagctgcagatgg

SEQ ID NO: 115557 - DNA, 15 bp, Homo sapiens
cgagagctgcagatg

SEQ ID NO: 115558 - DNA, 15 bp, Homo sapiens
ccgagagctgcagat

SEQ ID NO: 115559 - DNA, 15 bp, Homo sapiens
cccgagagctgcaga

SEQ ID NO: 115560 - DNA, 15 bp, Homo sapiens
gcccgagagctgcag

SEQ ID NO: 115561 - DNA, 15 bp, Homo sapiens
agcccgagagctgca

SEQ ID NO: 115562 - DNA, 15 bp, Homo sapiens
gagcccgagagctgc

SEQ ID NO: 115563 - DNA, 15 bp, Homo sapiens
agagcccgagagctg

SEQ ID NO: 115564 - DNA, 15 bp, Homo sapiens
gagagcccgagagct

SEQ ID NO: 115565 - DNA, 15 bp, Homo sapiens
agagagcccgagagc

SEQ ID NO: 115566 - DNA, 15 bp, Homo sapiens
cagagagcccgagag

SEQ ID NO: 115567 - DNA, 15 bp, Homo sapiens
tcagagagcccgaga

SEQ ID NO: 115568 - DNA, 15 bp, Homo sapiens
gtcagagagcccgag

SEQ ID NO: 115569 - DNA, 15 bp, Homo sapiens
ggtcagagagcccga

SEQ ID NO: 115570 - DNA, 15 bp, Homo sapiens
aggtcagagagcccg

SEQ ID NO: 115571 - DNA, 15 bp, Homo sapiens
caggtcagagagccc

SEQ ID NO: 115572 - DNA, 15 bp, Homo sapiens
tcaggtcagagagcc

SEQ ID NO: 115573 - DNA, 15 bp, Homo sapiens
gtcaggtcagagagc

SEQ ID NO: 115574 - DNA, 15 bp, Homo sapiens
tgtcaggtcagagag

SEQ ID NO: 115575 - DNA, 15 bp, Homo sapiens
atgtcaggtcagaga

SEQ ID NO: 115576 - DNA, 15 bp, Homo sapiens
gatgtcaggtcagag

SEQ ID NO: 115577 - DNA, 15 bp, Homo sapiens
agatgtcaggtcaga

SEQ ID NO: 115578 - DNA, 15 bp, Homo sapiens
aagatgtcaggtcag

SEQ ID NO: 115579 - DNA, 15 bp, Homo sapiens
aaagatgtcaggtca

SEQ ID NO: 115580 - DNA, 15 bp, Homo sapiens
gaaagatgtcaggtc

SEQ ID NO: 115581 - DNA, 15 bp, Homo sapiens
cgaaagatgtcaggt

SEQ ID NO: 115582 - DNA, 15 bp, Homo sapiens
ccgaaagatgtcagg

SEQ ID NO: 115583 - DNA, 15 bp, Homo sapiens
cccgaaagatgtcag

SEQ ID NO: 115584 - DNA, 15 bp, Homo sapiens
acccgaaagatgtca

SEQ ID NO: 115585 - DNA, 15 bp, Homo sapiens
cacccgaaagatgtc

SEQ ID NO: 115586 - DNA, 15 bp, Homo sapiens
ccacccgaaagatgt

SEQ ID NO: 115587 - DNA, 15 bp, Homo sapiens
accacccgaaagatg

SEQ ID NO: 115588 - DNA, 15 bp, Homo sapiens
caccacccgaaagat

SEQ ID NO: 115589 - DNA, 15 bp, Homo sapiens
ccaccacccgaaaga

SEQ ID NO: 115590 - DNA, 15 bp, Homo sapiens
cccaccacccgaaag

SEQ ID NO: 115591 - DNA, 15 bp, Homo sapiens
ccccaccacccgaaa

SEQ ID NO: 115592 - DNA, 15 bp, Homo sapiens
tccccaccacccgaa

SEQ ID NO: 115593 - DNA, 15 bp, Homo sapiens
gtccccaccacccga

SEQ ID NO: 115594 - DNA, 15 bp, Homo sapiens
tgtccccaccacccg

SEQ ID NO: 115595 - DNA, 15 bp, Homo sapiens
gtgtccccaccaccc

SEQ ID NO: 115596 - DNA, 15 bp, Homo sapiens
tgtgtccccaccacc

SEQ ID NO: 115597 - DNA, 15 bp, Homo sapiens
ttgtgtccccaccac

SEQ ID NO: 115598 - DNA, 15 bp, Homo sapiens
tttgtgtccccacca

SEQ ID NO: 115599 - DNA, 15 bp, Homo sapiens
ctttgtgtccccacc

SEQ ID NO: 115600 - DNA, 15 bp, Homo sapiens
cctttgtgtccccac

SEQ ID NO: 115601 - DNA, 15 bp, Homo sapiens
tcctttgtgtcccca

SEQ ID NO: 115602 - DNA, 15 bp, Homo sapiens
ttcctttgtgtcccc

SEQ ID NO: 115603 - DNA, 15 bp, Homo sapiens
cttcctttgtgtccc

SEQ ID NO: 115604 - DNA, 15 bp, Homo sapiens
gcttcctttgtgtcc

SEQ ID NO: 115605 - DNA, 15 bp, Homo sapiens
tgcttcctttgtgtc

SEQ ID NO: 115606 - DNA, 15 bp, Homo sapiens
ctgcttcctttgtgt

SEQ ID NO: 115607 - DNA, 15 bp, Homo sapiens
gctgcttcctttgtg

SEQ ID NO: 115608 - DNA, 15 bp, Homo sapiens
ggctgcttcctttgt

SEQ ID NO: 115609 - DNA, 15 bp, Homo sapiens
aggctgcttcctttg

SEQ ID NO: 115610 - DNA, 15 bp, Homo sapiens
gaggctgcttccttt

SEQ ID NO: 115611 - DNA, 15 bp, Homo sapiens
agaggctgcttcctt

SEQ ID NO: 115612 - DNA, 15 bp, Homo sapiens
tagaggctgcttcct

SEQ ID NO: 115613 - DNA, 15 bp, Homo sapiens
atagaggctgcttcc

SEQ ID NO: 115614 - DNA, 15 bp, Homo sapiens
aatagaggctgcttc

SEQ ID NO: 115615 - DNA, 15 bp, Homo sapiens
caatagaggctgctt

SEQ ID NO: 115616 - DNA, 15 bp, Homo sapiens
ccaatagaggctgct

SEQ ID NO: 115617 - DNA, 15 bp, Homo sapiens
cccaatagaggctgc

SEQ ID NO: 115618 - DNA, 15 bp, Homo sapiens
tcccaatagaggctg

SEQ ID NO: 115619 - DNA, 15 bp, Homo sapiens
ctcccaatagaggct

SEQ ID NO: 115620 - DNA, 15 bp, Homo sapiens
tctcccaatagaggc

SEQ ID NO: 115621 - DNA, 15 bp, Homo sapiens
gtctcccaatagagg

SEQ ID NO: 115622 - DNA, 15 bp, Homo sapiens
ggtctcccaatagag

SEQ ID NO: 115623 - DNA, 15 bp, Homo sapiens
aggtctcccaataga

SEQ ID NO: 115624 - DNA, 15 bp, Homo sapiens
aaggtctcccaatag

SEQ ID NO: 115625 - DNA, 15 bp, Homo sapiens
caaggtctcccaata

SEQ ID NO: 115626 - DNA, 15 bp, Homo sapiens
acaaggtctcccaat

SEQ ID NO: 115627 - DNA, 15 bp, Homo sapiens
cacaaggtctcccaa

SEQ ID NO: 115628 - DNA, 15 bp, Homo sapiens
gcacaaggtctccca

SEQ ID NO: 115629 - DNA, 15 bp, Homo sapiens
agcacaaggtctccc

SEQ ID NO: 115630 - DNA, 15 bp, Homo sapiens
aagcacaaggtctcc

SEQ ID NO: 115631 - DNA, 15 bp, Homo sapiens
gaagcacaaggtctc

SEQ ID NO: 115632 - DNA, 15 bp, Homo sapiens
agaagcacaaggtct

SEQ ID NO: 115633 - DNA, 15 bp, Homo sapiens
aagaagcacaaggtc

SEQ ID NO: 115634 - DNA, 15 bp, Homo sapiens
aaagaagcacaaggt

SEQ ID NO: 115635 - DNA, 15 bp, Homo sapiens
aaaagaagcacaagg

SEQ ID NO: 115636 - DNA, 15 bp, Homo sapiens
aaaaagaagcacaag

SEQ ID NO: 115637 - DNA, 15 bp, Homo sapiens
caaaaagaagcacaa

SEQ ID NO: 115638 - DNA, 15 bp, Homo sapiens
ccaaaaagaagcaca

SEQ ID NO: 115639 - DNA, 15 bp, Homo sapiens
accaaaaagaagcac

SEQ ID NO: 115640 - DNA, 15 bp, Homo sapiens
gaccaaaaagaagca

SEQ ID NO: 115641 - DNA, 15 bp, Homo sapiens
ggaccaaaaagaagc

SEQ ID NO: 115642 - DNA, 15 bp, Homo sapiens
gggaccaaaaagaag

SEQ ID NO: 115643 - DNA, 15 bp, Homo sapiens
tgggaccaaaaagaa

SEQ ID NO: 115644 - DNA, 15 bp, Homo sapiens
ctgggaccaaaaaga

SEQ ID NO: 115645 - DNA, 15 bp, Homo sapiens
cctgggaccaaaaag

SEQ ID NO: 115646 - DNA, 15 bp, Homo sapiens
tcctgggaccaaaaa

SEQ ID NO: 115647 - DNA, 15 bp, Homo sapiens
gtcctgggaccaaaa

SEQ ID NO: 115648 - DNA, 15 bp, Homo sapiens
tgtcctgggaccaaa

SEQ ID NO: 115649 - DNA, 15 bp, Homo sapiens
gtgtcctgggaccaa

SEQ ID NO: 115650 - DNA, 15 bp, Homo sapiens
agtgtcctgggacca

SEQ ID NO: 115651 - DNA, 15 bp, Homo sapiens
cagtgtcctgggacc

SEQ ID NO: 115652 - DNA, 15 bp, Homo sapiens
gcagtgtcctgggac

SEQ ID NO: 115653 - DNA, 15 bp, Homo sapiens
ggcagtgtcctggga

SEQ ID NO: 115654 - DNA, 15 bp, Homo sapiens
gggcagtgtcctggg

SEQ ID NO: 115655 - DNA, 15 bp, Homo sapiens
ggggcagtgtcctgg

SEQ ID NO: 115656 - DNA, 15 bp, Homo sapiens
gggggcagtgtcctg

SEQ ID NO: 115657 - DNA, 15 bp, Homo sapiens
ggggggcagtgtcct

SEQ ID NO: 115658 - DNA, 15 bp, Homo sapiens
tggggggcagtgtcc

SEQ ID NO: 115659 - DNA, 15 bp, Homo sapiens
gtggggggcagtgtc

SEQ ID NO: 115660 - DNA, 15 bp, Homo sapiens
ggtggggggcagtgt

SEQ ID NO: 115661 - DNA, 15 bp, Homo sapiens
tggtggggggcagtg

SEQ ID NO: 115662 - DNA, 15 bp, Homo sapiens
gtggtggggggcagt

SEQ ID NO: 115663 - DNA, 15 bp, Homo sapiens
agtggtggggggcag

SEQ ID NO: 115664 - DNA, 15 bp, Homo sapiens
gagtggtggggggca

SEQ ID NO: 115665 - DNA, 15 bp, Homo sapiens
ggagtggtggggggc

SEQ ID NO: 115666 - DNA, 15 bp, Homo sapiens
tggagtggtgggggg

SEQ ID NO: 115667 - DNA, 15 bp, Homo sapiens
ctggagtggtggggg

SEQ ID NO: 115668 - DNA, 15 bp, Homo sapiens
actggagtggtgggg

SEQ ID NO: 115669 - DNA, 15 bp, Homo sapiens
gactggagtggtggg

SEQ ID NO: 115670 - DNA, 15 bp, Homo sapiens
ggactggagtggtgg

SEQ ID NO: 115671 - DNA, 15 bp, Homo sapiens
cggactggagtggtg

SEQ ID NO: 115672 - DNA, 15 bp, Homo sapiens
ccggactggagtggt

SEQ ID NO: 115673 - DNA, 15 bp, Homo sapiens
cccggactggagtgg

SEQ ID NO: 115674 - DNA, 15 bp, Homo sapiens
acccggactggagtg

SEQ ID NO: 115675 - DNA, 15 bp, Homo sapiens
gacccggactggagt

SEQ ID NO: 115676 - DNA, 15 bp, Homo sapiens
ggacccggactggag

SEQ ID NO: 115677 - DNA, 15 bp, Homo sapiens
gggacccggactgga

SEQ ID NO: 115678 - DNA, 15 bp, Homo sapiens
tgggacccggactgg

SEQ ID NO: 115679 - DNA, 15 bp, Homo sapiens
ttgggacccggactg

SEQ ID NO: 115680 - DNA, 15 bp, Homo sapiens
cttgggacccggact

SEQ ID NO: 115681 - DNA, 15 bp, Homo sapiens
ccttgggacccggac

SEQ ID NO: 115682 - DNA, 15 bp, Homo sapiens
cccttgggacccgga

SEQ ID NO: 115683 - DNA, 15 bp, Homo sapiens
gcccttgggacccgg

SEQ ID NO: 115684 - DNA, 15 bp, Homo sapiens
ggcccttgggacccg

SEQ ID NO: 115685 - DNA, 15 bp, Homo sapiens
gggcccttgggaccc

SEQ ID NO: 115686 - DNA, 15 bp, Homo sapiens
tgggcccttgggacc

SEQ ID NO: 115687 - DNA, 15 bp, Homo sapiens
ctgggcccttgggac

SEQ ID NO: 115688 - DNA, 15 bp, Homo sapiens
actgggcccttggga

SEQ ID NO: 115689 - DNA, 15 bp, Homo sapiens
gactgggcccttggg

SEQ ID NO: 115690 - DNA, 15 bp, Homo sapiens
tgactgggcccttgg

SEQ ID NO: 115691 - DNA, 15 bp, Homo sapiens
ctgactgggcccttg

SEQ ID NO: 115692 - DNA, 15 bp, Homo sapiens
gctgactgggccctt

SEQ ID NO: 115693 - DNA, 15 bp, Homo sapiens
agctgactgggccct

SEQ ID NO: 115694 - DNA, 15 bp, Homo sapiens
gagctgactgggccc

SEQ ID NO: 115695 - DNA, 15 bp, Homo sapiens
tgagctgactgggcc

SEQ ID NO: 115696 - DNA, 15 bp, Homo sapiens
ttgagctgactgggc

SEQ ID NO: 115697 - DNA, 15 bp, Homo sapiens
gttgagctgactggg

SEQ ID NO: 115698 - DNA, 15 bp, Homo sapiens
agttgagctgactgg

SEQ ID NO: 115699 - DNA, 15 bp, Homo sapiens
cagttgagctgactg

SEQ ID NO: 115700 - DNA, 15 bp, Homo sapiens
acagttgagctgact

SEQ ID NO: 115701 - DNA, 15 bp, Homo sapiens
tacagttgagctgac

SEQ ID NO: 115702 - DNA, 15 bp, Homo sapiens
ttacagttgagctga

SEQ ID NO: 115703 - DNA, 15 bp, Homo sapiens
attacagttgagctg

SEQ ID NO: 115704 - DNA, 15 bp, Homo sapiens
gattacagttgagct

SEQ ID NO: 115705 - DNA, 15 bp, Homo sapiens
tgattacagttgagc

SEQ ID NO: 115706 - DNA, 15 bp, Homo sapiens
atgattacagttgag

SEQ ID NO: 115707 - DNA, 15 bp, Homo sapiens
catgattacagttga

SEQ ID NO: 115708 - DNA, 15 bp, Homo sapiens
tcatgattacagttg

SEQ ID NO: 115709 - DNA, 15 bp, Homo sapiens
gtcatgattacagtt

SEQ ID NO: 115710 - DNA, 15 bp, Homo sapiens
tgtcatgattacagt

SEQ ID NO: 115711 - DNA, 15 bp, Homo sapiens
ttgtcatgattacag

SEQ ID NO: 115712 - DNA, 15 bp, Homo sapiens
gttgtcatgattaca

SEQ ID NO: 115713 - DNA, 15 bp, Homo sapiens
tgttgtcatgattac

SEQ ID NO: 115714 - DNA, 15 bp, Homo sapiens
atgttgtcatgatta

SEQ ID NO: 115715 - DNA, 15 bp, Homo sapiens
aatgttgtcatgatt

SEQ ID NO: 115716 - DNA, 15 bp, Homo sapiens
caatgttgtcatgat

SEQ ID NO: 115717 - DNA, 15 bp, Homo sapiens
tcaatgttgtcatga

SEQ ID NO: 115718 - DNA, 15 bp, Homo sapiens
atcaatgttgtcatg

SEQ ID NO: 115719 - DNA, 15 bp, Homo sapiens
gatcaatgttgtcat

SEQ ID NO: 115720 - DNA, 15 bp, Homo sapiens
tgatcaatgttgtca

SEQ ID NO: 115721 - DNA, 15 bp, Homo sapiens
ttgatcaatgttgtc

SEQ ID NO: 115722 - DNA, 15 bp, Homo sapiens
cttgatcaatgttgt

SEQ ID NO: 115723 - DNA, 15 bp, Homo sapiens
gcttgatcaatgttg

SEQ ID NO: 115724 - DNA, 15 bp, Homo sapiens
tgcttgatcaatgtt

SEQ ID NO: 115725 - DNA, 15 bp, Homo sapiens
atgcttgatcaatgt

SEQ ID NO: 115726 - DNA, 15 bp, Homo sapiens
gatgcttgatcaatg

SEQ ID NO: 115727 - DNA, 15 bp, Homo sapiens
agatgcttgatcaat

SEQ ID NO: 115728 - DNA, 15 bp, Homo sapiens
aagatgcttgatcaa

SEQ ID NO: 115729 - DNA, 15 bp, Homo sapiens
aaagatgcttgatca

SEQ ID NO: 115730 - DNA, 15 bp, Homo sapiens
taaagatgcttgatc

SEQ ID NO: 115731 - DNA, 15 bp, Homo sapiens
gtaaagatgcttgat

SEQ ID NO: 115732 - DNA, 15 bp, Homo sapiens
cgtaaagatgcttga

SEQ ID NO: 115733 - DNA, 15 bp, Homo sapiens
acgtaaagatgcttg

SEQ ID NO: 115734 - DNA, 15 bp, Homo sapiens
cacgtaaagatgctt

SEQ ID NO: 115735 - DNA, 15 bp, Homo sapiens
gcacgtaaagatgct

SEQ ID NO: 115736 - DNA, 15 bp, Homo sapiens
tgcacgtaaagatgc

SEQ ID NO: 115737 - DNA, 15 bp, Homo sapiens
ctgcacgtaaagatg

SEQ ID NO: 115738 - DNA, 15 bp, Homo sapiens
cctgcacgtaaagat

SEQ ID NO: 115739 - DNA, 15 bp, Homo sapiens
acctgcacgtaaaga

SEQ ID NO: 115740 - DNA, 15 bp, Homo sapiens
cacctgcacgtaaag

SEQ ID NO: 115741 - DNA, 15 bp, Homo sapiens
gcacctgcacgtaaa

SEQ ID NO: 115742 - DNA, 15 bp, Homo sapiens
agcacctgcacgtaa

SEQ ID NO: 115743 - DNA, 15 bp, Homo sapiens
cagcacctgcacgta

SEQ ID NO: 115744 - DNA, 15 bp, Homo sapiens
acagcacctgcacgt

SEQ ID NO: 115745 - DNA, 15 bp, Homo sapiens
cacagcacctgcacg

SEQ ID NO: 115746 - DNA, 15 bp, Homo sapiens
gcacagcacctgcac

SEQ ID NO: 115747 - DNA, 15 bp, Homo sapiens
ggcacagcacctgca

SEQ ID NO: 115748 - DNA, 15 bp, Homo sapiens
tggcacagcacctgc

SEQ ID NO: 115749 - DNA, 15 bp, Homo sapiens
ttggcacagcacctg

SEQ ID NO: 115750 - DNA, 15 bp, Homo sapiens
tttggcacagcacct

SEQ ID NO: 115751 - DNA, 15 bp, Homo sapiens
gtttggcacagcacc

SEQ ID NO: 115752 - DNA, 15 bp, Homo sapiens
cgtttggcacagcac

SEQ ID NO: 115753 - DNA, 15 bp, Homo sapiens
ccgtttggcacagca

SEQ ID NO: 115754 - DNA, 15 bp, Homo sapiens
accgtttggcacagc

SEQ ID NO: 115755 - DNA, 15 bp, Homo sapiens
aaccgtttggcacag

SEQ ID NO: 115756 - DNA, 15 bp, Homo sapiens
gaaccgtttggcaca

SEQ ID NO: 115757 - DNA, 15 bp, Homo sapiens
cgaaccgtttggcac

SEQ ID NO: 115758 - DNA, 15 bp, Homo sapiens
tcgaaccgtttggca

SEQ ID NO: 115759 - DNA, 15 bp, Homo sapiens
ttcgaaccgtttggc

SEQ ID NO: 115760 - DNA, 15 bp, Homo sapiens
gttcgaaccgtttgg

SEQ ID NO: 115761 - DNA, 15 bp, Homo sapiens
cgttcgaaccgtttg

SEQ ID NO: 115762 - DNA, 15 bp, Homo sapiens
gcgttcgaaccgttt

SEQ ID NO: 115763 - DNA, 15 bp, Homo sapiens
agcgttcgaaccgtt

SEQ ID NO: 115764 - DNA, 15 bp, Homo sapiens
gagcgttcgaaccgt

SEQ ID NO: 115765 - DNA, 15 bp, Homo sapiens
agagcgttcgaaccg

SEQ ID NO: 115766 - DNA, 15 bp, Homo sapiens
gagagcgttcgaacc

SEQ ID NO: 115767 - DNA, 15 bp, Homo sapiens
agagagcgttcgaac

SEQ ID NO: 115768 - DNA, 15 bp, Homo sapiens
gagagagcgttcgaa

SEQ ID NO: 115769 - DNA, 15 bp, Homo sapiens
tgagagagcgttcga

SEQ ID NO: 115770 - DNA, 15 bp, Homo sapiens
atgagagagcgttcg

SEQ ID NO: 115771 - DNA, 15 bp, Homo sapiens
aatgagagagcgttc

SEQ ID NO: 115772 - DNA, 15 bp, Homo sapiens
aaatgagagagcgtt

SEQ ID NO: 115773 - DNA, 15 bp, Homo sapiens
gaaatgagagagcgt

SEQ ID NO: 115774 - DNA, 15 bp, Homo sapiens
tgaaatgagagagcg

SEQ ID NO: 115775 - DNA, 15 bp, Homo sapiens
ttgaaatgagagagc

SEQ ID NO: 115776 - DNA, 15 bp, Homo sapiens
attgaaatgagagag

SEQ ID NO: 115777 - DNA, 15 bp, Homo sapiens
gattgaaatgagaga

SEQ ID NO: 115778 - DNA, 15 bp, Homo sapiens
agattgaaatgagag

SEQ ID NO: 115779 - DNA, 15 bp, Homo sapiens
gagattgaaatgaga

SEQ ID NO: 115780 - DNA, 15 bp, Homo sapiens
tgagattgaaatgag

SEQ ID NO: 115781 - DNA, 15 bp, Homo sapiens
gtgagattgaaatga

SEQ ID NO: 115782 - DNA, 15 bp, Homo sapiens
cgtgagattgaaatg

SEQ ID NO: 115783 - DNA, 15 bp, Homo sapiens
ccgtgagattgaaat

SEQ ID NO: 115784 - DNA, 15 bp, Homo sapiens
gccgtgagattgaaa

SEQ ID NO: 115785 - DNA, 15 bp, Homo sapiens
tgccgtgagattgaa

SEQ ID NO: 115786 - DNA, 15 bp, Homo sapiens
ttgccgtgagattga

SEQ ID NO: 115787 - DNA, 15 bp, Homo sapiens
tttgccgtgagattg

SEQ ID NO: 115788 - DNA, 15 bp, Homo sapiens
gtttgccgtgagatt

SEQ ID NO: 115789 - DNA, 15 bp, Homo sapiens
ggtttgccgtgagat

SEQ ID NO: 115790 - DNA, 15 bp, Homo sapiens
aggtttgccgtgaga

SEQ ID NO: 115791 - DNA, 15 bp, Homo sapiens
taggtttgccgtgag

SEQ ID NO: 115792 - DNA, 15 bp, Homo sapiens
gtaggtttgccgtga

SEQ ID NO: 115793 - DNA, 15 bp, Homo sapiens
cgtaggtttgccgtg

SEQ ID NO: 115794 - DNA, 15 bp, Homo sapiens
ccgtaggtttgccgt

SEQ ID NO: 115795 - DNA, 15 bp, Homo sapiens
accgtaggtttgccg

SEQ ID NO: 115796 - DNA, 15 bp, Homo sapiens
caccgtaggtttgcc

SEQ ID NO: 115797 - DNA, 15 bp, Homo sapiens
ccaccgtaggtttgc

SEQ ID NO: 115798 - DNA, 15 bp, Homo sapiens
tccaccgtaggtttg

SEQ ID NO: 115799 - DNA, 15 bp, Homo sapiens
ctccaccgtaggttt

SEQ ID NO: 115800 - DNA, 15 bp, Homo sapiens
cctccaccgtaggtt

SEQ ID NO: 115801 - DNA, 15 bp, Homo sapiens
ccctccaccgtaggt

SEQ ID NO: 115802 - DNA, 15 bp, Homo sapiens
cccctccaccgtagg

SEQ ID NO: 115803 - DNA, 15 bp, Homo sapiens
ccccctccaccgtag

SEQ ID NO: 115804 - DNA, 15 bp, Homo sapiens
accccctccaccgta

SEQ ID NO: 115805 - DNA, 15 bp, Homo sapiens
taccccctccaccgt

SEQ ID NO: 115806 - DNA, 15 bp, Homo sapiens
gtaccccctccaccg

SEQ ID NO: 115807 - DNA, 15 bp, Homo sapiens
cgtaccccctccacc

SEQ ID NO: 115808 - DNA, 15 bp, Homo sapiens
ccgtaccccctccac

SEQ ID NO: 115809 - DNA, 15 bp, Homo sapiens
accgtaccccctcca

SEQ ID NO: 115810 - DNA, 15 bp, Homo sapiens
aaccgtaccccctcc

SEQ ID NO: 115811 - DNA, 15 bp, Homo sapiens
caaccgtaccccctc

SEQ ID NO: 115812 - DNA, 15 bp, Homo sapiens
acaaccgtaccccct

SEQ ID NO: 115813 - DNA, 15 bp, Homo sapiens
tacaaccgtaccccc

SEQ ID NO: 115814 - DNA, 15 bp, Homo sapiens
atacaaccgtacccc

SEQ ID NO: 115815 - DNA, 15 bp, Homo sapiens
gatacaaccgtaccc

SEQ ID NO: 115816 - DNA, 15 bp, Homo sapiens
ggatacaaccgtacc

SEQ ID NO: 115817 - DNA, 15 bp, Homo sapiens
tggatacaaccgtac

SEQ ID NO: 115818 - DNA, 15 bp, Homo sapiens
gtggatacaaccgta

SEQ ID NO: 115819 - DNA, 15 bp, Homo sapiens
agtggatacaaccgt

SEQ ID NO: 115820 - DNA, 15 bp, Homo sapiens
aagtggatacaaccg

SEQ ID NO: 115821 - DNA, 15 bp, Homo sapiens
aaagtggatacaacc

SEQ ID NO: 115822 - DNA, 15 bp, Homo sapiens
taaagtggatacaac

SEQ ID NO: 115823 - DNA, 15 bp, Homo sapiens
gtaaagtggatacaa

SEQ ID NO: 115824 - DNA, 15 bp, Homo sapiens
tgtaaagtggataca

SEQ ID NO: 115825 - DNA, 15 bp, Homo sapiens
atgtaaagtggatac

SEQ ID NO: 115826 - DNA, 15 bp, Homo sapiens
catgtaaagtggata

SEQ ID NO: 115827 - DNA, 15 bp, Homo sapiens
acatgtaaagtggat

SEQ ID NO: 115828 - DNA, 15 bp, Homo sapiens
tacatgtaaagtgga

SEQ ID NO: 115829 - DNA, 15 bp, Homo sapiens
ttacatgtaaagtgg

SEQ ID NO: 115830 - DNA, 15 bp, Homo sapiens
cttacatgtaaagtg

SEQ ID NO: 115831 - DNA, 15 bp, Homo sapiens
tcttacatgtaaagt

SEQ ID NO: 115832 - DNA, 15 bp, Homo sapiens
ttcttacatgtaaag

SEQ ID NO: 115833 - DNA, 15 bp, Homo sapiens
tttcttacatgtaaa

SEQ ID NO: 115834 - DNA, 15 bp, Homo sapiens
gtttcttacatgtaa

SEQ ID NO: 115835 - DNA, 15 bp, Homo sapiens
agtttcttacatgta

SEQ ID NO: 115836 - DNA, 15 bp, Homo sapiens
cagtttcttacatgt

SEQ ID NO: 115837 - DNA, 15 bp, Homo sapiens
tcagtttcttacatg

SEQ ID NO: 115838 - DNA, 15 bp, Homo sapiens
ctcagtttcttacat

SEQ ID NO: 115839 - DNA, 15 bp, Homo sapiens
cctcagtttcttaca

SEQ ID NO: 115840 - DNA, 15 bp, Homo sapiens
gcctcagtttcttac

SEQ ID NO: 115841 - DNA, 15 bp, Homo sapiens
agcctcagtttctta

SEQ ID NO: 115842 - DNA, 15 bp, Homo sapiens
cagcctcagtttctt

SEQ ID NO: 115843 - DNA, 15 bp, Homo sapiens
tcagcctcagtttct

SEQ ID NO: 115844 - DNA, 15 bp, Homo sapiens
atcagcctcagtttc

SEQ ID NO: 115845 - DNA, 15 bp, Homo sapiens
tatcagcctcagttt

SEQ ID NO: 115846 - DNA, 15 bp, Homo sapiens
atatcagcctcagtt

SEQ ID NO: 115847 - DNA, 15 bp, Homo sapiens
gatatcagcctcagt

SEQ ID NO: 115848 - DNA, 15 bp, Homo sapiens
tgatatcagcctcag

SEQ ID NO: 115849 - DNA, 15 bp, Homo sapiens
ttgatatcagcctca

SEQ ID NO: 115850 - DNA, 15 bp, Homo sapiens
cttgatatcagcctc

SEQ ID NO: 115851 - DNA, 15 bp, Homo sapiens
acttgatatcagcct

SEQ ID NO: 115852 - DNA, 15 bp, Homo sapiens
cacttgatatcagcc

SEQ ID NO: 115853 - DNA, 15 bp, Homo sapiens
ccacttgatatcagc

SEQ ID NO: 115854 - DNA, 15 bp, Homo sapiens
accacttgatatcag

SEQ ID NO: 115855 - DNA, 15 bp, Homo sapiens
caccacttgatatca

SEQ ID NO: 115856 - DNA, 15 bp, Homo sapiens
ccaccacttgatatc

SEQ ID NO: 115857 - DNA, 15 bp, Homo sapiens
tccaccacttgatat

SEQ ID NO: 115858 - DNA, 15 bp, Homo sapiens
ctccaccacttgata

SEQ ID NO: 115859 - DNA, 15 bp, Homo sapiens
gctccaccacttgat

SEQ ID NO: 115860 - DNA, 15 bp, Homo sapiens
ggctccaccacttga

SEQ ID NO: 115861 - DNA, 15 bp, Homo sapiens
tggctccaccacttg

SEQ ID NO: 115862 - DNA, 15 bp, Homo sapiens
ttggctccaccactt

SEQ ID NO: 115863 - DNA, 15 bp, Homo sapiens
cttggctccaccact

SEQ ID NO: 115864 - DNA, 15 bp, Homo sapiens
tcttggctccaccac

SEQ ID NO: 115865 - DNA, 15 bp, Homo sapiens
ttcttggctccacca

SEQ ID NO: 115866 - DNA, 15 bp, Homo sapiens
attcttggctccacc

SEQ ID NO: 115867 - DNA, 15 bp, Homo sapiens
tattcttggctccac

SEQ ID NO: 115868 - DNA, 15 bp, Homo sapiens
ctattcttggctcca

SEQ ID NO: 115869 - DNA, 15 bp, Homo sapiens
actattcttggctcc

SEQ ID NO: 115870 - DNA, 15 bp, Homo sapiens
cactattcttggctc

SEQ ID NO: 115871 - DNA, 15 bp, Homo sapiens
gcactattcttggct

SEQ ID NO: 115872 - DNA, 15 bp, Homo sapiens
ggcactattcttggc

SEQ ID NO: 115873 - DNA, 15 bp, Homo sapiens
aggcactattcttgg

SEQ ID NO: 115874 - DNA, 15 bp, Homo sapiens
gaggcactattcttg

SEQ ID NO: 115875 - DNA, 15 bp, Homo sapiens
cgaggcactattctt

SEQ ID NO: 115876 - DNA, 15 bp, Homo sapiens
acgaggcactattct

SEQ ID NO: 115877 - DNA, 15 bp, Homo sapiens
aacgaggcactattc

SEQ ID NO: 115878 - DNA, 15 bp, Homo sapiens
caacgaggcactatt

SEQ ID NO: 115879 - DNA, 15 bp, Homo sapiens
gcaacgaggcactat

SEQ ID NO: 115880 - DNA, 15 bp, Homo sapiens
tgcaacgaggcacta

SEQ ID NO: 115881 - DNA, 15 bp, Homo sapiens
atgcaacgaggcact

SEQ ID NO: 115882 - DNA, 15 bp, Homo sapiens
gatgcaacgaggcac

SEQ ID NO: 115883 - DNA, 15 bp, Homo sapiens
agatgcaacgaggca

SEQ ID NO: 115884 - DNA, 15 bp, Homo sapiens
aagatgcaacgaggc

SEQ ID NO: 115885 - DNA, 15 bp, Homo sapiens
taagatgcaacgagg

SEQ ID NO: 115886 - DNA, 15 bp, Homo sapiens
gtaagatgcaacgag

SEQ ID NO: 115887 - DNA, 15 bp, Homo sapiens
agtaagatgcaacga

SEQ ID NO: 115888 - DNA, 15 bp, Homo sapiens
gagtaagatgcaacg

SEQ ID NO: 115889 - DNA, 15 bp, Homo sapiens
ggagtaagatgcaac

SEQ ID NO: 115890 - DNA, 15 bp, Homo sapiens
tggagtaagatgcaa

SEQ ID NO: 115891 - DNA, 15 bp, Homo sapiens
ttggagtaagatgca

SEQ ID NO: 115892 - DNA, 15 bp, Homo sapiens
gttggagtaagatgc

SEQ ID NO: 115893 - DNA, 15 bp, Homo sapiens
ggttggagtaagatg

SEQ ID NO: 115894 - DNA, 15 bp, Homo sapiens
aggttggagtaagat

SEQ ID NO: 115895 - DNA, 15 bp, Homo sapiens
gaggttggagtaaga

SEQ ID NO: 115896 - DNA, 15 bp, Homo sapiens
agaggttggagtaag

SEQ ID NO: 115897 - DNA, 15 bp, Homo sapiens
tagaggttggagtaa

SEQ ID NO: 115898 - DNA, 15 bp, Homo sapiens
ctagaggttggagta

SEQ ID NO: 115899 - DNA, 15 bp, Homo sapiens
gctagaggttggagt

SEQ ID NO: 115900 - DNA, 15 bp, Homo sapiens
ggctagaggttggag

SEQ ID NO: 115901 - DNA, 15 bp, Homo sapiens
gggctagaggttgga

SEQ ID NO: 115902 - DNA, 15 bp, Homo sapiens
tgggctagaggttgg

SEQ ID NO: 115903 - DNA, 15 bp, Homo sapiens
atgggctagaggttg

SEQ ID NO: 115904 - DNA, 15 bp, Homo sapiens
gatgggctagaggtt

SEQ ID NO: 115905 - DNA, 15 bp, Homo sapiens
ggatgggctagaggt

SEQ ID NO: 115906 - DNA, 15 bp, Homo sapiens
cggatgggctagagg

SEQ ID NO: 115907 - DNA, 15 bp, Homo sapiens
ccggatgggctagag

SEQ ID NO: 115908 - DNA, 15 bp, Homo sapiens
gccggatgggctaga

SEQ ID NO: 115909 - DNA, 15 bp, Homo sapiens
ggccggatgggctag

SEQ ID NO: 115910 - DNA, 15 bp, Homo sapiens
aggccggatgggcta

SEQ ID NO: 115911 - DNA, 15 bp, Homo sapiens
gaggccggatgggct

SEQ ID NO: 115912 - DNA, 15 bp, Homo sapiens
ggaggccggatgggc

SEQ ID NO: 115913 - DNA, 15 bp, Homo sapiens
aggaggccggatggg

SEQ ID NO: 115914 - DNA, 15 bp, Homo sapiens
gaggaggccggatgg

SEQ ID NO: 115915 - DNA, 15 bp, Homo sapiens
ggaggaggccggatg

SEQ ID NO: 115916 - DNA, 15 bp, Homo sapiens
gggaggaggccggat

SEQ ID NO: 115917 - DNA, 15 bp, Homo sapiens
agggaggaggccgga

SEQ ID NO: 115918 - DNA, 15 bp, Homo sapiens
aagggaggaggccgg

SEQ ID NO: 115919 - DNA, 15 bp, Homo sapiens
gaagggaggaggccg

SEQ ID NO: 115920 - DNA, 15 bp, Homo sapiens
tgaagggaggaggcc

SEQ ID NO: 115921 - DNA, 15 bp, Homo sapiens
gtgaagggaggaggc

SEQ ID NO: 115922 - DNA, 15 bp, Homo sapiens
cgtgaagggaggagg

SEQ ID NO: 115923 - DNA, 15 bp, Homo sapiens
acgtgaagggaggag

SEQ ID NO: 115924 - DNA, 15 bp, Homo sapiens
cacgtgaagggagga

SEQ ID NO: 115925 - DNA, 15 bp, Homo sapiens
gcacgtgaagggagg

SEQ ID NO: 115926 - DNA, 15 bp, Homo sapiens
cgcacgtgaagggag

SEQ ID NO: 115927 - DNA, 15 bp, Homo sapiens
gcgcacgtgaaggga

SEQ ID NO: 115928 - DNA, 15 bp, Homo sapiens
ggcgcacgtgaaggg

SEQ ID NO: 115929 - DNA, 15 bp, Homo sapiens
aggcgcacgtgaagg

SEQ ID NO: 115930 - DNA, 15 bp, Homo sapiens
taggcgcacgtgaag

SEQ ID NO: 115931 - DNA, 15 bp, Homo sapiens
ttaggcgcacgtgaa

SEQ ID NO: 115932 - DNA, 15 bp, Homo sapiens
cttaggcgcacgtga

SEQ ID NO: 115933 - DNA, 15 bp, Homo sapiens
tcttaggcgcacgtg

SEQ ID NO: 115934 - DNA, 15 bp, Homo sapiens
ctcttaggcgcacgt

SEQ ID NO: 115935 - DNA, 15 bp, Homo sapiens
cctcttaggcgcacg

SEQ ID NO: 115936 - DNA, 15 bp, Homo sapiens
ccctcttaggcgcac

SEQ ID NO: 115937 - DNA, 15 bp, Homo sapiens
gccctcttaggcgca

SEQ ID NO: 115938 - DNA, 15 bp, Homo sapiens
agccctcttaggcgc

SEQ ID NO: 115939 - DNA, 15 bp, Homo sapiens
tagccctcttaggcg

SEQ ID NO: 115940 - DNA, 15 bp, Homo sapiens
ctagccctcttaggc

SEQ ID NO: 115941 - DNA, 15 bp, Homo sapiens
cctagccctcttagg

SEQ ID NO: 115942 - DNA, 15 bp, Homo sapiens
ccctagccctcttag

SEQ ID NO: 115943 - DNA, 15 bp, Homo sapiens
cccctagccctctta

SEQ ID NO: 115944 - DNA, 15 bp, Homo sapiens
ccccctagccctctt

SEQ ID NO: 115945 - DNA, 15 bp, Homo sapiens
gccccctagccctct

SEQ ID NO: 115946 - DNA, 15 bp, Homo sapiens
ggccccctagccctc

SEQ ID NO: 115947 - DNA, 15 bp, Homo sapiens
aggccccctagccct

SEQ ID NO: 115948 - DNA, 15 bp, Homo sapiens
caggccccctagccc

SEQ ID NO: 115949 - DNA, 15 bp, Homo sapiens
ccaggccccctagcc

SEQ ID NO: 115950 - DNA, 15 bp, Homo sapiens
tccaggccccctagc

SEQ ID NO: 115951 - DNA, 15 bp, Homo sapiens
atccaggccccctag

SEQ ID NO: 115952 - DNA, 15 bp, Homo sapiens
tatccaggcccccta

SEQ ID NO: 115953 - DNA, 15 bp, Homo sapiens
ctatccaggccccct

SEQ ID NO: 115954 - DNA, 15 bp, Homo sapiens
cctatccaggccccc

SEQ ID NO: 115955 - DNA, 15 bp, Homo sapiens
ccctatccaggcccc

SEQ ID NO: 115956 - DNA, 15 bp, Homo sapiens
cccctatccaggccc

SEQ ID NO: 115957 - DNA, 15 bp, Homo sapiens
tcccctatccaggcc

SEQ ID NO: 115958 - DNA, 15 bp, Homo sapiens
ctcccctatccaggc

SEQ ID NO: 115959 - DNA, 15 bp, Homo sapiens
cctcccctatccagg

SEQ ID NO: 115960 - DNA, 15 bp, Homo sapiens
acctcccctatccag

SEQ ID NO: 115961 - DNA, 15 bp, Homo sapiens
gacctcccctatcca

SEQ ID NO: 115962 - DNA, 15 bp, Homo sapiens
tgacctcccctatcc

SEQ ID NO: 115963 - DNA, 15 bp, Homo sapiens
ctgacctcccctatc

SEQ ID NO: 115964 - DNA, 15 bp, Homo sapiens
gctgacctcccctat

SEQ ID NO: 115965 - DNA, 15 bp, Homo sapiens
agctgacctccccta

SEQ ID NO: 115966 - DNA, 15 bp, Homo sapiens
gagctgacctcccct

SEQ ID NO: 115967 - DNA, 15 bp, Homo sapiens
ggagctgacctcccc

SEQ ID NO: 115968 - DNA, 15 bp, Homo sapiens
tggagctgacctccc

SEQ ID NO: 115969 - DNA, 15 bp, Homo sapiens
gtggagctgacctcc

SEQ ID NO: 115970 - DNA, 15 bp, Homo sapiens
tgtggagctgacctc

SEQ ID NO: 115971 - DNA, 15 bp, Homo sapiens
ctgtggagctgacct

SEQ ID NO: 115972 - DNA, 15 bp, Homo sapiens
actgtggagctgacc

SEQ ID NO: 115973 - DNA, 15 bp, Homo sapiens
aactgtggagctgac

SEQ ID NO: 115974 - DNA, 15 bp, Homo sapiens
aaactgtggagctga

SEQ ID NO: 115975 - DNA, 15 bp, Homo sapiens
aaaactgtggagctg

SEQ ID NO: 115976 - DNA, 15 bp, Homo sapiens
caaaactgtggagct

SEQ ID NO: 115977 - DNA, 15 bp, Homo sapiens
tcaaaactgtggagc

SEQ ID NO: 115978 - DNA, 15 bp, Homo sapiens
ctcaaaactgtggag

SEQ ID NO: 115979 - DNA, 15 bp, Homo sapiens
actcaaaactgtgga

SEQ ID NO: 115980 - DNA, 15 bp, Homo sapiens
tactcaaaactgtgg

SEQ ID NO: 115981 - DNA, 15 bp, Homo sapiens
ttactcaaaactgtg

SEQ ID NO: 115982 - DNA, 15 bp, Homo sapiens
tttactcaaaactgt

SEQ ID NO: 115983 - DNA, 15 bp, Homo sapiens
gtttactcaaaactg

SEQ ID NO: 115984 - DNA, 15 bp, Homo sapiens
tgtttactcaaaact

SEQ ID NO: 115985 - DNA, 15 bp, Homo sapiens
gtgtttactcaaaac

SEQ ID NO: 115986 - DNA, 15 bp, Homo sapiens
tgtgtttactcaaaa

SEQ ID NO: 115987 - DNA, 15 bp, Homo sapiens
gtgtgtttactcaaa

SEQ ID NO: 115988 - DNA, 15 bp, Homo sapiens
tgtgtgtttactcaa

SEQ ID NO: 115989 - DNA, 15 bp, Homo sapiens
gtgtgtgtttactca

SEQ ID NO: 115990 - DNA, 15 bp, Homo sapiens
tgtgtgtgtttactc

SEQ ID NO: 115991 - DNA, 15 bp, Homo sapiens
ctgtgtgtgtttact

SEQ ID NO: 115992 - DNA, 15 bp, Homo sapiens
actgtgtgtgtttac

SEQ ID NO: 115993 - DNA, 15 bp, Homo sapiens
gactgtgtgtgttta

SEQ ID NO: 115994 - DNA, 15 bp, Homo sapiens
agactgtgtgtgttt

SEQ ID NO: 115995 - DNA, 15 bp, Homo sapiens
gagactgtgtgtgtt

SEQ ID NO: 115996 - DNA, 15 bp, Homo sapiens
tgagactgtgtgtgt

SEQ ID NO: 115997 - DNA, 15 bp, Homo sapiens
ttgagactgtgtgtg

SEQ ID NO: 115998 - DNA, 15 bp, Homo sapiens
gttgagactgtgtgt

SEQ ID NO: 115999 - DNA, 15 bp, Homo sapiens
agttgagactgtgtg

SEQ ID NO: 116000 - DNA, 15 bp, Homo sapiens
gagttgagactgtgt

SEQ ID NO: 116001 - DNA, 15 bp, Homo sapiens
agagttgagactgtg

SEQ ID NO: 116002 - DNA, 15 bp, Homo sapiens
cagagttgagactgt

SEQ ID NO: 116003 - DNA, 15 bp, Homo sapiens
tcagagttgagactg

SEQ ID NO: 116004 - DNA, 15 bp, Homo sapiens
atcagagttgagact

SEQ ID NO: 116005 - DNA, 15 bp, Homo sapiens
catcagagttgagac

SEQ ID NO: 116006 - DNA, 15 bp, Homo sapiens
tcatcagagttgaga

SEQ ID NO: 116007 - DNA, 15 bp, Homo sapiens
gtcatcagagttgag

SEQ ID NO: 116008 - DNA, 15 bp, Homo sapiens
tgtcatcagagttga

SEQ ID NO: 116009 - DNA, 15 bp, Homo sapiens
ttgtcatcagagttg

SEQ ID NO: 116010 - DNA, 15 bp, Homo sapiens
gttgtcatcagagtt

SEQ ID NO: 116011 - DNA, 15 bp, Homo sapiens
agttgtcatcagagt

SEQ ID NO: 116012 - DNA, 15 bp, Homo sapiens
aagttgtcatcagag

SEQ ID NO: 116013 - DNA, 15 bp, Homo sapiens
taagttgtcatcaga

SEQ ID NO: 116014 - DNA, 15 bp, Homo sapiens
ttaagttgtcatcag

SEQ ID NO: 116015 - DNA, 15 bp, Homo sapiens
cttaagttgtcatca

SEQ ID NO: 116016 - DNA, 15 bp, Homo sapiens
acttaagttgtcatc

SEQ ID NO: 116017 - DNA, 15 bp, Homo sapiens
cacttaagttgtcat

SEQ ID NO: 116018 - DNA, 15 bp, Homo sapiens
gcacttaagttgtca

SEQ ID NO: 116019 - DNA, 15 bp, Homo sapiens
ggcacttaagttgtc

SEQ ID NO: 116020 - DNA, 15 bp, Homo sapiens
tggcacttaagttgt

SEQ ID NO: 116021 - DNA, 15 bp, Homo sapiens
ctggcacttaagttg

SEQ ID NO: 116022 - DNA, 15 bp, Homo sapiens
cctggcacttaagtt

SEQ ID NO: 116023 - DNA, 15 bp, Homo sapiens
gcctggcacttaagt

SEQ ID NO: 116024 - DNA, 15 bp, Homo sapiens
tgcctggcacttaag

SEQ ID NO: 116025 - DNA, 15 bp, Homo sapiens
atgcctggcacttaa

SEQ ID NO: 116026 - DNA, 15 bp, Homo sapiens
tatgcctggcactta

SEQ ID NO: 116027 - DNA, 15 bp, Homo sapiens
ctatgcctggcactt

SEQ ID NO: 116028 - DNA, 15 bp, Homo sapiens
actatgcctggcact

SEQ ID NO: 116029 - DNA, 15 bp, Homo sapiens
cactatgcctggcac

SEQ ID NO: 116030 - DNA, 15 bp, Homo sapiens
ccactatgcctggca

SEQ ID NO: 116031 - DNA, 15 bp, Homo sapiens
gccactatgcctggc

SEQ ID NO: 116032 - DNA, 15 bp, Homo sapiens
agccactatgcctgg

SEQ ID NO: 116033 - DNA, 15 bp, Homo sapiens
cagccactatgcctg

SEQ ID NO: 116034 - DNA, 15 bp, Homo sapiens
ccagccactatgcct

SEQ ID NO: 116035 - DNA, 15 bp, Homo sapiens
gccagccactatgcc

SEQ ID NO: 116036 - DNA, 15 bp, Homo sapiens
tgccagccactatgc

SEQ ID NO: 116037 - DNA, 15 bp, Homo sapiens
atgccagccactatg

SEQ ID NO: 116038 - DNA, 15 bp, Homo sapiens
catgccagccactat

SEQ ID NO: 116039 - DNA, 15 bp, Homo sapiens
ccatgccagccacta

SEQ ID NO: 116040 - DNA, 15 bp, Homo sapiens
cccatgccagccact

SEQ ID NO: 116041 - DNA, 15 bp, Homo sapiens
ccccatgccagccac

SEQ ID NO: 116042 - DNA, 15 bp, Homo sapiens
gccccatgccagcca

SEQ ID NO: 116043 - DNA, 15 bp, Homo sapiens
tgccccatgccagcc

SEQ ID NO: 116044 - DNA, 15 bp, Homo sapiens
gtgccccatgccagc

SEQ ID NO: 116045 - DNA, 15 bp, Homo sapiens
tgtgccccatgccag

SEQ ID NO: 116046 - DNA, 15 bp, Homo sapiens
gtgtgccccatgcca

SEQ ID NO: 116047 - DNA, 15 bp, Homo sapiens
tgtgtgccccatgcc

SEQ ID NO: 116048 - DNA, 15 bp, Homo sapiens
gtgtgtgccccatgc

SEQ ID NO: 116049 - DNA, 15 bp, Homo sapiens
agtgtgtgccccatg

SEQ ID NO: 116050 - DNA, 15 bp, Homo sapiens
gagtgtgtgccccat

SEQ ID NO: 116051 - DNA, 15 bp, Homo sapiens
tgagtgtgtgcccca

SEQ ID NO: 116052 - DNA, 15 bp, Homo sapiens
ttgagtgtgtgcccc

SEQ ID NO: 116053 - DNA, 15 bp, Homo sapiens
cttgagtgtgtgccc

SEQ ID NO: 116054 - DNA, 15 bp, Homo sapiens
acttgagtgtgtgcc

SEQ ID NO: 116055 - DNA, 15 bp, Homo sapiens
gacttgagtgtgtgc

SEQ ID NO: 116056 - DNA, 15 bp, Homo sapiens
tgacttgagtgtgtg

SEQ ID NO: 116057 - DNA, 15 bp, Homo sapiens
atgacttgagtgtgt

SEQ ID NO: 116058 - DNA, 15 bp, Homo sapiens
catgacttgagtgtg

SEQ ID NO: 116059 - DNA, 15 bp, Homo sapiens
acatgacttgagtgt

SEQ ID NO: 116060 - DNA, 15 bp, Homo sapiens
aacatgacttgagtg

SEQ ID NO: 116061 - DNA, 15 bp, Homo sapiens
caacatgacttgagt

SEQ ID NO: 116062 - DNA, 15 bp, Homo sapiens
acaacatgacttgag

SEQ ID NO: 116063 - DNA, 15 bp, Homo sapiens
cacaacatgacttga

SEQ ID NO: 116064 - DNA, 15 bp, Homo sapiens
gcacaacatgacttg

SEQ ID NO: 116065 - DNA, 15 bp, Homo sapiens
tgcacaacatgactt

SEQ ID NO: 116066 - DNA, 15 bp, Homo sapiens
ctgcacaacatgact

SEQ ID NO: 116067 - DNA, 15 bp, Homo sapiens
gctgcacaacatgac

SEQ ID NO: 116068 - DNA, 15 bp, Homo sapiens
tgctgcacaacatga

SEQ ID NO: 116069 - DNA, 15 bp, Homo sapiens
gtgctgcacaacatg

SEQ ID NO: 116070 - DNA, 15 bp, Homo sapiens
ggtgctgcacaacat

SEQ ID NO: 116071 - DNA, 15 bp, Homo sapiens
aggtgctgcacaaca

SEQ ID NO: 116072 - DNA, 15 bp, Homo sapiens
taggtgctgcacaac

SEQ ID NO: 116073 - DNA, 15 bp, Homo sapiens
ttaggtgctgcacaa

SEQ ID NO: 116074 - DNA, 15 bp, Homo sapiens
gttaggtgctgcaca

SEQ ID NO: 116075 - DNA, 15 bp, Homo sapiens
tgttaggtgctgcac

SEQ ID NO: 116076 - DNA, 15 bp, Homo sapiens
ctgttaggtgctgca

SEQ ID NO: 116077 - DNA, 15 bp, Homo sapiens
actgttaggtgctgc

SEQ ID NO: 116078 - DNA, 15 bp, Homo sapiens
aactgttaggtgctg

SEQ ID NO: 116079 - DNA, 15 bp, Homo sapiens
aaactgttaggtgct

SEQ ID NO: 116080 - DNA, 15 bp, Homo sapiens
taaactgttaggtgc

SEQ ID NO: 116081 - DNA, 15 bp, Homo sapiens
ataaactgttaggtg

SEQ ID NO: 116082 - DNA, 15 bp, Homo sapiens
gataaactgttaggt

SEQ ID NO: 116083 - DNA, 15 bp, Homo sapiens
tgataaactgttagg

SEQ ID NO: 116084 - DNA, 15 bp, Homo sapiens
ttgataaactgttag

SEQ ID NO: 116085 - DNA, 15 bp, Homo sapiens
tttgataaactgtta

SEQ ID NO: 116086 - DNA, 15 bp, Homo sapiens
ctttgataaactgtt

SEQ ID NO: 116087 - DNA, 15 bp, Homo sapiens
actttgataaactgt

SEQ ID NO: 116088 - DNA, 15 bp, Homo sapiens
tactttgataaactg

SEQ ID NO: 116089 - DNA, 15 bp, Homo sapiens
atactttgataaact

SEQ ID NO: 116090 - DNA, 15 bp, Homo sapiens
gatactttgataaac

SEQ ID NO: 116091 - DNA, 15 bp, Homo sapiens
tgatactttgataaa

SEQ ID NO: 116092 - DNA, 15 bp, Homo sapiens
ctgatactttgataa

SEQ ID NO: 116093 - DNA, 15 bp, Homo sapiens
gctgatactttgata

SEQ ID NO: 116094 - DNA, 15 bp, Homo sapiens
tgctgatactttgat

SEQ ID NO: 116095 - DNA, 15 bp, Homo sapiens
ttgctgatactttga

SEQ ID NO: 116096 - DNA, 15 bp, Homo sapiens
tttgctgatactttg

SEQ ID NO: 116097 - DNA, 15 bp, Homo sapiens
gtttgctgatacttt

SEQ ID NO: 116098 - DNA, 15 bp, Homo sapiens
agtttgctgatactt

SEQ ID NO: 116099 - DNA, 15 bp, Homo sapiens
aagtttgctgatact

SEQ ID NO: 116100 - DNA, 15 bp, Homo sapiens
taagtttgctgatac

SEQ ID NO: 116101 - DNA, 15 bp, Homo sapiens
ataagtttgctgata

SEQ ID NO: 116102 - DNA, 15 bp, Homo sapiens
aataagtttgctgat

SEQ ID NO: 116103 - DNA, 15 bp, Homo sapiens
caataagtttgctga

SEQ ID NO: 116104 - DNA, 15 bp, Homo sapiens
acaataagtttgctg

SEQ ID NO: 116105 - DNA, 15 bp, Homo sapiens
gacaataagtttgct

SEQ ID NO: 116106 - DNA, 15 bp, Homo sapiens
ggacaataagtttgc

SEQ ID NO: 116107 - DNA, 15 bp, Homo sapiens
aggacaataagtttg

SEQ ID NO: 116108 - DNA, 15 bp, Homo sapiens
caggacaataagttt

SEQ ID NO: 116109 - DNA, 15 bp, Homo sapiens
acaggacaataagtt

SEQ ID NO: 116110 - DNA, 15 bp, Homo sapiens
aacaggacaataagt

SEQ ID NO: 116111 - DNA, 15 bp, Homo sapiens
aaacaggacaataag

SEQ ID NO: 116112 - DNA, 15 bp, Homo sapiens
caaacaggacaataa

SEQ ID NO: 116113 - DNA, 15 bp, Homo sapiens
tcaaacaggacaata

SEQ ID NO: 116114 - DNA, 15 bp, Homo sapiens
gtcaaacaggacaat

SEQ ID NO: 116115 - DNA, 15 bp, Homo sapiens
ggtcaaacaggacaa

SEQ ID NO: 116116 - DNA, 15 bp, Homo sapiens
aggtcaaacaggaca

SEQ ID NO: 116117 - DNA, 15 bp, Homo sapiens
aaggtcaaacaggac

SEQ ID NO: 116118 - DNA, 15 bp, Homo sapiens
gaaggtcaaacagga

SEQ ID NO: 116119 - DNA, 15 bp, Homo sapiens
ggaaggtcaaacagg

SEQ ID NO: 116120 - DNA, 15 bp, Homo sapiens
cggaaggtcaaacag

SEQ ID NO: 116121 - DNA, 15 bp, Homo sapiens
gcggaaggtcaaaca

SEQ ID NO: 116122 - DNA, 15 bp, Homo sapiens
tgcggaaggtcaaac

SEQ ID NO: 116123 - DNA, 15 bp, Homo sapiens
gtgcggaaggtcaaa

SEQ ID NO: 116124 - DNA, 15 bp, Homo sapiens
tgtgcggaaggtcaa

SEQ ID NO: 116125 - DNA, 15 bp, Homo sapiens
ttgtgcggaaggtca

SEQ ID NO: 116126 - DNA, 15 bp, Homo sapiens
tttgtgcggaaggtc

SEQ ID NO: 116127 - DNA, 15 bp, Homo sapiens
ctttgtgcggaaggt

SEQ ID NO: 116128 - DNA, 15 bp, Homo sapiens
gctttgtgcggaagg

SEQ ID NO: 116129 - DNA, 15 bp, Homo sapiens
agctttgtgcggaag

SEQ ID NO: 116130 - DNA, 15 bp, Homo sapiens
cagctttgtgcggaa

SEQ ID NO: 116131 - DNA, 15 bp, Homo sapiens
acagctttgtgcgga

SEQ ID NO: 116132 - DNA, 15 bp, Homo sapiens
gacagctttgtgcgg

SEQ ID NO: 116133 - DNA, 15 bp, Homo sapiens
tgacagctttgtgcg

SEQ ID NO: 116134 - DNA, 15 bp, Homo sapiens
ttgacagctttgtgc

SEQ ID NO: 116135 - DNA, 15 bp, Homo sapiens
cttgacagctttgtg

SEQ ID NO: 116136 - DNA, 15 bp, Homo sapiens
ccttgacagctttgt

SEQ ID NO: 116137 - DNA, 15 bp, Homo sapiens
tccttgacagctttg

SEQ ID NO: 116138 - DNA, 15 bp, Homo sapiens
ttccttgacagcttt

SEQ ID NO: 116139 - DNA, 15 bp, Homo sapiens
cttccttgacagctt

SEQ ID NO: 116140 - DNA, 15 bp, Homo sapiens
ccttccttgacagct

SEQ ID NO: 116141 - DNA, 15 bp, Homo sapiens
gccttccttgacagc

SEQ ID NO: 116142 - DNA, 15 bp, Homo sapiens
tgccttccttgacag

SEQ ID NO: 116143 - DNA, 15 bp, Homo sapiens
ctgccttccttgaca

SEQ ID NO: 116144 - DNA, 15 bp, Homo sapiens
cctgccttccttgac

SEQ ID NO: 116145 - DNA, 15 bp, Homo sapiens
ccctgccttccttga

SEQ ID NO: 116146 - DNA, 15 bp, Homo sapiens
accctgccttccttg

SEQ ID NO: 116147 - DNA, 15 bp, Homo sapiens
taccctgccttcctt

SEQ ID NO: 116148 - DNA, 15 bp, Homo sapiens
gtaccctgccttcct

SEQ ID NO: 116149 - DNA, 15 bp, Homo sapiens
cgtaccctgccttcc

SEQ ID NO: 116150 - DNA, 15 bp, Homo sapiens
ccgtaccctgccttc

SEQ ID NO: 116151 - DNA, 15 bp, Homo sapiens
tccgtaccctgcctt

SEQ ID NO: 116152 - DNA, 15 bp, Homo sapiens
ctccgtaccctgcct

SEQ ID NO: 116153 - DNA, 15 bp, Homo sapiens
cctccgtaccctgcc

SEQ ID NO: 116154 - DNA, 15 bp, Homo sapiens
ccctccgtaccctgc

SEQ ID NO: 116155 - DNA, 15 bp, Homo sapiens
accctccgtaccctg

SEQ ID NO: 116156 - DNA, 15 bp, Homo sapiens
caccctccgtaccct

SEQ ID NO: 116157 - DNA, 15 bp, Homo sapiens
tcaccctccgtaccc

SEQ ID NO: 116158 - DNA, 15 bp, Homo sapiens
atcaccctccgtacc

SEQ ID NO: 116159 - DNA, 15 bp, Homo sapiens
aatcaccctccgtac

SEQ ID NO: 116160 - DNA, 15 bp, Homo sapiens
gaatcaccctccgta

SEQ ID NO: 116161 - DNA, 15 bp, Homo sapiens
ggaatcaccctccgt

SEQ ID NO: 116162 - DNA, 15 bp, Homo sapiens
aggaatcaccctccg

SEQ ID NO: 116163 - DNA, 15 bp, Homo sapiens
taggaatcaccctcc

SEQ ID NO: 116164 - DNA, 15 bp, Homo sapiens
gtaggaatcaccctc

SEQ ID NO: 116165 - DNA, 15 bp, Homo sapiens
ggtaggaatcaccct

SEQ ID NO: 116166 - DNA, 15 bp, Homo sapiens
aggtaggaatcaccc

SEQ ID NO: 116167 - DNA, 15 bp, Homo sapiens
aaggtaggaatcacc

SEQ ID NO: 116168 - DNA, 15 bp, Homo sapiens
taaggtaggaatcac

SEQ ID NO: 116169 - DNA, 15 bp, Homo sapiens
ctaaggtaggaatca

SEQ ID NO: 116170 - DNA, 15 bp, Homo sapiens
tctaaggtaggaatc

SEQ ID NO: 116171 - DNA, 15 bp, Homo sapiens
ctctaaggtaggaat

SEQ ID NO: 116172 - DNA, 15 bp, Homo sapiens
tctctaaggtaggaa

SEQ ID NO: 116173 - DNA, 15 bp, Homo sapiens
atctctaaggtagga

SEQ ID NO: 116174 - DNA, 15 bp, Homo sapiens
catctctaaggtagg

SEQ ID NO: 116175 - DNA, 15 bp, Homo sapiens
tcatctctaaggtag

SEQ ID NO: 116176 - DNA, 15 bp, Homo sapiens
ttcatctctaaggta

SEQ ID NO: 116177 - DNA, 15 bp, Homo sapiens
cttcatctctaaggt

SEQ ID NO: 116178 - DNA, 15 bp, Homo sapiens
tcttcatctctaagg

SEQ ID NO: 116179 - DNA, 15 bp, Homo sapiens
ttcttcatctctaag

SEQ ID NO: 116180 - DNA, 15 bp, Homo sapiens
tttcttcatctctaa

SEQ ID NO: 116181 - DNA, 15 bp, Homo sapiens
gtttcttcatctcta

SEQ ID NO: 116182 - DNA, 15 bp, Homo sapiens
agtttcttcatctct

SEQ ID NO: 116183 - DNA, 15 bp, Homo sapiens
cagtttcttcatctc

SEQ ID NO: 116184 - DNA, 15 bp, Homo sapiens
tcagtttcttcatct

SEQ ID NO: 116185 - DNA, 15 bp, Homo sapiens
ctcagtttcttcatc

SEQ ID NO: 116186 - DNA, 15 bp, Homo sapiens
cctcagtttcttcat

SEQ ID NO: 116187 - DNA, 15 bp, Homo sapiens
gcctcagtttcttca

SEQ ID NO: 116188 - DNA, 15 bp, Homo sapiens
ggcctcagtttcttc

SEQ ID NO: 116189 - DNA, 15 bp, Homo sapiens
gggcctcagtttctt

SEQ ID NO: 116190 - DNA, 15 bp, Homo sapiens
tctgggcctcagttt

SEQ ID NO: 116191 - DNA, 15 bp, Homo sapiens
ctctgggcctcagtt

SEQ ID NO: 116192 - DNA, 15 bp, Homo sapiens
tctctgggcctcagt

SEQ ID NO: 116193 - DNA, 15 bp, Homo sapiens
gtctctgggcctcag

SEQ ID NO: 116194 - DNA, 15 bp, Homo sapiens
agtctctgggcctca

SEQ ID NO: 116195 - DNA, 15 bp, Homo sapiens
cagtctctgggcctc

SEQ ID NO: 116196 - DNA, 15 bp, Homo sapiens
gcagtctctgggcct

SEQ ID NO: 116197 - DNA, 15 bp, Homo sapiens
ggcagtctctgggcc

SEQ ID NO: 116198 - DNA, 15 bp, Homo sapiens
gggcagtctctgggc

SEQ ID NO: 116199 - DNA, 15 bp, Homo sapiens
tgggcagtctctggg

SEQ ID NO: 116200 - DNA, 15 bp, Homo sapiens
ctgggcagtctctgg

SEQ ID NO: 116201 - DNA, 15 bp, Homo sapiens
gctgggcagtctctg

SEQ ID NO: 116202 - DNA, 15 bp, Homo sapiens
agctgggcagtctct

SEQ ID NO: 116203 - DNA, 15 bp, Homo sapiens
tagctgggcagtctc

SEQ ID NO: 116204 - DNA, 15 bp, Homo sapiens
gtagctgggcagtct

SEQ ID NO: 116205 - DNA, 15 bp, Homo sapiens
ggtagctgggcagtc

SEQ ID NO: 116206 - DNA, 15 bp, Homo sapiens
tggtagctgggcagt

SEQ ID NO: 116207 - DNA, 15 bp, Homo sapiens
ctggtagctgggcag

SEQ ID NO: 116208 - DNA, 15 bp, Homo sapiens
tctggtagctgggca

SEQ ID NO: 116209 - DNA, 15 bp, Homo sapiens
ttctggtagctgggc

SEQ ID NO: 116210 - DNA, 15 bp, Homo sapiens
cttctggtagctggg

SEQ ID NO: 116211 - DNA, 15 bp, Homo sapiens
ccttctggtagctgg

SEQ ID NO: 116212 - DNA, 15 bp, Homo sapiens
accttctggtagctg

SEQ ID NO: 116213 - DNA, 15 bp, Homo sapiens
caccttctggtagct

SEQ ID NO: 116214 - DNA, 15 bp, Homo sapiens
ccaccttctggtagc

SEQ ID NO: 116215 - DNA, 15 bp, Homo sapiens
tccaccttctggtag

SEQ ID NO: 116216 - DNA, 15 bp, Homo sapiens
atccaccttctggta

SEQ ID NO: 116217 - DNA, 15 bp, Homo sapiens
tatccaccttctggt

SEQ ID NO: 116218 - DNA, 15 bp, Homo sapiens
ctatccaccttctgg

SEQ ID NO: 116219 - DNA, 15 bp, Homo sapiens
tctatccaccttctg

SEQ ID NO: 116220 - DNA, 15 bp, Homo sapiens
ctctatccaccttct

SEQ ID NO: 116221 - DNA, 15 bp, Homo sapiens
gctctatccaccttc

SEQ ID NO: 116222 - DNA, 15 bp, Homo sapiens
cgctctatccacctt

SEQ ID NO: 116223 - DNA, 15 bp, Homo sapiens
gcgctctatccacct

SEQ ID NO: 116224 - DNA, 15 bp, Homo sapiens
agcgctctatccacc

SEQ ID NO: 116225 - DNA, 15 bp, Homo sapiens
cagcgctctatccac

SEQ ID NO: 116226 - DNA, 15 bp, Homo sapiens
ccagcgctctatcca

SEQ ID NO: 116227 - DNA, 15 bp, Homo sapiens
gccagcgctctatcc

SEQ ID NO: 116228 - DNA, 15 bp, Homo sapiens
ggccagcgctctatc

SEQ ID NO: 116229 - DNA, 15 bp, Homo sapiens
aggccagcgctctat

SEQ ID NO: 116230 - DNA, 15 bp, Homo sapiens
gaggccagcgctcta

SEQ ID NO: 116231 - DNA, 15 bp, Homo sapiens
ggaggccagcgctct

SEQ ID NO: 116232 - DNA, 15 bp, Homo sapiens
tggaggccagcgctc

SEQ ID NO: 116233 - DNA, 15 bp, Homo sapiens
atggaggccagcgct

SEQ ID NO: 116234 - DNA, 15 bp, Homo sapiens
catggaggccagcgc

SEQ ID NO: 116235 - DNA, 15 bp, Homo sapiens
gcatggaggccagcg

SEQ ID NO: 116236 - DNA, 15 bp, Homo sapiens
ggcatggaggccagc

SEQ ID NO: 116237 - DNA, 15 bp, Homo sapiens
aggcatggaggccag

SEQ ID NO: 116238 - DNA, 15 bp, Homo sapiens
caggcatggaggcca

SEQ ID NO: 116239 - DNA, 15 bp, Homo sapiens
gcaggcatggaggcc

SEQ ID NO: 116240 - DNA, 15 bp, Homo sapiens
ggcaggcatggaggc

SEQ ID NO: 116241 - DNA, 15 bp, Homo sapiens
aggcaggcatggagg

SEQ ID NO: 116242 - DNA, 15 bp, Homo sapiens
caggcaggcatggag

SEQ ID NO: 116243 - DNA, 15 bp, Homo sapiens
tcaggcaggcatgga

SEQ ID NO: 116244 - DNA, 15 bp, Homo sapiens
gtcaggcaggcatgg

SEQ ID NO: 116245 - DNA, 15 bp, Homo sapiens
ggtcaggcaggcatg

SEQ ID NO: 116246 - DNA, 15 bp, Homo sapiens
aggtcaggcaggcat

SEQ ID NO: 116247 - DNA, 15 bp, Homo sapiens
caggtcaggcaggca

SEQ ID NO: 116248 - DNA, 15 bp, Homo sapiens
ccaggtcaggcaggc

SEQ ID NO: 116249 - DNA, 15 bp, Homo sapiens
tccaggtcaggcagg

SEQ ID NO: 116250 - DNA, 15 bp, Homo sapiens
ctccaggtcaggcag

SEQ ID NO: 116251 - DNA, 15 bp, Homo sapiens
actccaggtcaggca

SEQ ID NO: 116252 - DNA, 15 bp, Homo sapiens
gactccaggtcaggc

SEQ ID NO: 116253 - DNA, 15 bp, Homo sapiens
agactccaggtcagg

SEQ ID NO: 116254 - DNA, 15 bp, Homo sapiens
cagactccaggtcag

SEQ ID NO: 116255 - DNA, 15 bp, Homo sapiens
acagactccaggtca

SEQ ID NO: 116256 - DNA, 15 bp, Homo sapiens
gacagactccaggtc

SEQ ID NO: 116257 - DNA, 15 bp, Homo sapiens
ggacagactccaggt

SEQ ID NO: 116258 - DNA, 15 bp, Homo sapiens
tggacagactccagg

SEQ ID NO: 116259 - DNA, 15 bp, Homo sapiens
ctggacagactccag

SEQ ID NO: 116260 - DNA, 15 bp, Homo sapiens
actggacagactcca

SEQ ID NO: 116261 - DNA, 15 bp, Homo sapiens
cactggacagactcc

SEQ ID NO: 116262 - DNA, 15 bp, Homo sapiens
gcactggacagactc

SEQ ID NO: 116263 - DNA, 15 bp, Homo sapiens
ggcactggacagact

SEQ ID NO: 116264 - DNA, 15 bp, Homo sapiens
gggcactggacagac

SEQ ID NO: 116265 - DNA, 15 bp, Homo sapiens
tgggcactggacaga

SEQ ID NO: 116266 - DNA, 15 bp, Homo sapiens
gtgggcactggacag

SEQ ID NO: 116267 - DNA, 15 bp, Homo sapiens
ggtgggcactggaca

SEQ ID NO: 116268 - DNA, 15 bp, Homo sapiens
gggtgggcactggac

SEQ ID NO: 116269 - DNA, 15 bp, Homo sapiens
tgggtgggcactgga

SEQ ID NO: 116270 - DNA, 15 bp, Homo sapiens
gtgggtgggcactgg

SEQ ID NO: 116271 - DNA, 15 bp, Homo sapiens
tgtgggtgggcactg

SEQ ID NO: 116272 - DNA, 15 bp, Homo sapiens
ctgtgggtgggcact

SEQ ID NO: 116273 - DNA, 15 bp, Homo sapiens
tctgtgggtgggcac

SEQ ID NO: 116274 - DNA, 15 bp, Homo sapiens
ttctgtgggtgggca

SEQ ID NO: 116275 - DNA, 15 bp, Homo sapiens
gttctgtgggtgggc

SEQ ID NO: 116276 - DNA, 15 bp, Homo sapiens
tgttctgtgggtggg

SEQ ID NO: 116277 - DNA, 15 bp, Homo sapiens
ctgttctgtgggtgg

SEQ ID NO: 116278 - DNA, 15 bp, Homo sapiens
gctgttctgtgggtg

SEQ ID NO: 116279 - DNA, 15 bp, Homo sapiens
ggctgttctgtgggt

SEQ ID NO: 116280 - DNA, 15 bp, Homo sapiens
aggctgttctgtggg

SEQ ID NO: 116281 - DNA, 15 bp, Homo sapiens
gaggctgttctgtgg

SEQ ID NO: 116282 - DNA, 15 bp, Homo sapiens
cgaggctgttctgtg

SEQ ID NO: 116283 - DNA, 15 bp, Homo sapiens
ccgaggctgttctgt

SEQ ID NO: 116284 - DNA, 15 bp, Homo sapiens
gccgaggctgttctg

SEQ ID NO: 116285 - DNA, 15 bp, Homo sapiens
ggccgaggctgttct

SEQ ID NO: 116286 - DNA, 15 bp, Homo sapiens
gggccgaggctgttc

SEQ ID NO: 116287 - DNA, 15 bp, Homo sapiens
agggccgaggctgtt

SEQ ID NO: 116288 - DNA, 15 bp, Homo sapiens
aagggccgaggctgt

SEQ ID NO: 116289 - DNA, 15 bp, Homo sapiens
aaagggccgaggctg

SEQ ID NO: 116290 - DNA, 15 bp, Homo sapiens
gaaagggccgaggct

SEQ ID NO: 116291 - DNA, 15 bp, Homo sapiens
ggaaagggccgaggc

SEQ ID NO: 116292 - DNA, 15 bp, Homo sapiens
gggaaagggccgagg

SEQ ID NO: 116293 - DNA, 15 bp, Homo sapiens
tgggaaagggccgag

SEQ ID NO: 116294 - DNA, 15 bp, Homo sapiens
atgggaaagggccga

SEQ ID NO: 116295 - DNA, 15 bp, Homo sapiens
catgggaaagggccg

SEQ ID NO: 116296 - DNA, 15 bp, Homo sapiens
gcatgggaaagggcc

SEQ ID NO: 116297 - DNA, 15 bp, Homo sapiens
ggcatgggaaagggc

SEQ ID NO: 116298 - DNA, 15 bp, Homo sapiens
gggcatgggaaaggg

SEQ ID NO: 116299 - DNA, 15 bp, Homo sapiens
tgggcatgggaaagg

SEQ ID NO: 116300 - DNA, 15 bp, Homo sapiens
ctgggcatgggaaag

SEQ ID NO: 116301 - DNA, 15 bp, Homo sapiens
tctgggcatgggaaa

SEQ ID NO: 116302 - DNA, 15 bp, Homo sapiens
gtctgggcatgggaa

SEQ ID NO: 116303 - DNA, 15 bp, Homo sapiens
tgtctgggcatggga

SEQ ID NO: 116304 - DNA, 15 bp, Homo sapiens
gtgtctgggcatggg

SEQ ID NO: 116305 - DNA, 15 bp, Homo sapiens
tgtgtctgggcatgg

SEQ ID NO: 116306 - DNA, 15 bp, Homo sapiens
ctgtgtctgggcatg

SEQ ID NO: 116307 - DNA, 15 bp, Homo sapiens
tctgtgtctgggcat

SEQ ID NO: 116308 - DNA, 15 bp, Homo sapiens
atctgtgtctgggca

SEQ ID NO: 116309 - DNA, 15 bp, Homo sapiens
catctgtgtctgggc

SEQ ID NO: 116310 - DNA, 15 bp, Homo sapiens
ccatctgtgtctggg

SEQ ID NO: 116311 - DNA, 15 bp, Homo sapiens
gccatctgtgtctgg

SEQ ID NO: 116312 - DNA, 15 bp, Homo sapiens
tgccatctgtgtctg

SEQ ID NO: 116313 - DNA, 15 bp, Homo sapiens
gtgccatctgtgtct

SEQ ID NO: 116314 - DNA, 15 bp, Homo sapiens
tgtgccatctgtgtc

SEQ ID NO: 116315 - DNA, 15 bp, Homo sapiens
gtgtgccatctgtgt

SEQ ID NO: 116316 - DNA, 15 bp, Homo sapiens
agtgtgccatctgtg

SEQ ID NO: 116317 - DNA, 15 bp, Homo sapiens
aagtgtgccatctgt

SEQ ID NO: 116318 - DNA, 15 bp, Homo sapiens
caagtgtgccatctg

SEQ ID NO: 116319 - DNA, 15 bp, Homo sapiens
gcaagtgtgccatct

SEQ ID NO: 116320 - DNA, 15 bp, Homo sapiens
cgcaagtgtgccatc

SEQ ID NO: 116321 - DNA, 15 bp, Homo sapiens
tcgcaagtgtgccat

SEQ ID NO: 116322 - DNA, 15 bp, Homo sapiens
gtcgcaagtgtgcca

SEQ ID NO: 116323 - DNA, 15 bp, Homo sapiens
cgtcgcaagtgtgcc

SEQ ID NO: 116324 - DNA, 15 bp, Homo sapiens
ccgtcgcaagtgtgc

SEQ ID NO: 116325 - DNA, 15 bp, Homo sapiens
gccgtcgcaagtgtg

SEQ ID NO: 116326 - DNA, 15 bp, Homo sapiens
ggccgtcgcaagtgt

SEQ ID NO: 116327 - DNA, 15 bp, Homo sapiens
gggccgtcgcaagtg

SEQ ID NO: 116328 - DNA, 15 bp, Homo sapiens
tgggccgtcgcaagt

SEQ ID NO: 116329 - DNA, 15 bp, Homo sapiens
gtgggccgtcgcaag

SEQ ID NO: 116330 - DNA, 15 bp, Homo sapiens
agtgggccgtcgcaa

SEQ ID NO: 116331 - DNA, 15 bp, Homo sapiens
gagtgggccgtcgca

SEQ ID NO: 116332 - DNA, 15 bp, Homo sapiens
tgagtgggccgtcgc

SEQ ID NO: 116333 - DNA, 15 bp, Homo sapiens
atgagtgggccgtcg

SEQ ID NO: 116334 - DNA, 15 bp, Homo sapiens
tatgagtgggccgtc

SEQ ID NO: 116335 - DNA, 15 bp, Homo sapiens
ctatgagtgggccgt

SEQ ID NO: 116336 - DNA, 15 bp, Homo sapiens
gctatgagtgggccg

SEQ ID NO: 116337 - DNA, 15 bp, Homo sapiens
tgctatgagtgggcc

SEQ ID NO: 116338 - DNA, 15 bp, Homo sapiens
ctgctatgagtgggc

SEQ ID NO: 116339 - DNA, 15 bp, Homo sapiens
gctgctatgagtggg

SEQ ID NO: 116340 - DNA, 15 bp, Homo sapiens
agctgctatgagtgg

SEQ ID NO: 116341 - DNA, 15 bp, Homo sapiens
aagctgctatgagtg

SEQ ID NO: 116342 - DNA, 15 bp, Homo sapiens
gaagctgctatgagt

SEQ ID NO: 116343 - DNA, 15 bp, Homo sapiens
agaagctgctatgag

SEQ ID NO: 116344 - DNA, 15 bp, Homo sapiens
aagaagctgctatga

SEQ ID NO: 116345 - DNA, 15 bp, Homo sapiens
caagaagctgctatg

SEQ ID NO: 116346 - DNA, 15 bp, Homo sapiens
acaagaagctgctat

SEQ ID NO: 116347 - DNA, 15 bp, Homo sapiens
gacaagaagctgcta

SEQ ID NO: 116348 - DNA, 15 bp, Homo sapiens
ggacaagaagctgct

SEQ ID NO: 116349 - DNA, 15 bp, Homo sapiens
tggacaagaagctgc

SEQ ID NO: 116350 - DNA, 15 bp, Homo sapiens
ctggacaagaagctg

SEQ ID NO: 116351 - DNA, 15 bp, Homo sapiens
gctggacaagaagct

SEQ ID NO: 116352 - DNA, 15 bp, Homo sapiens
agctggacaagaagc

SEQ ID NO: 116353 - DNA, 15 bp, Homo sapiens
aagctggacaagaag

SEQ ID NO: 116354 - DNA, 15 bp, Homo sapiens
aaagctggacaagaa

SEQ ID NO: 116355 - DNA, 15 bp, Homo sapiens
taaagctggacaaga

SEQ ID NO: 116356 - DNA, 15 bp, Homo sapiens
ataaagctggacaag

SEQ ID NO: 116357 - DNA, 15 bp, Homo sapiens
aataaagctggacaa

SEQ ID NO: 116358 - DNA, 15 bp, Homo sapiens
caataaagctggaca

SEQ ID NO: 116359 - DNA, 15 bp, Homo sapiens
ccaataaagctggac

SEQ ID NO: 116360 - DNA, 15 bp, Homo sapiens
cccaataaagctgga

SEQ ID NO: 116361 - DNA, 15 bp, Homo sapiens
tcccaataaagctgg

SEQ ID NO: 116362 - DNA, 15 bp, Homo sapiens
ctcccaataaagctg

SEQ ID NO: 116363 - DNA, 15 bp, Homo sapiens
cctcccaataaagct

SEQ ID NO: 116364 - DNA, 15 bp, Homo sapiens
gcctcccaataaagc

SEQ ID NO: 116365 - DNA, 15 bp, Homo sapiens
ggcctcccaataaag

SEQ ID NO: 116366 - DNA, 15 bp, Homo sapiens
tggcctcccaataaa

SEQ ID NO: 116367 - DNA, 15 bp, Homo sapiens
ctggcctcccaataa

SEQ ID NO: 116368 - DNA, 15 bp, Homo sapiens
gctggcctcccaata

SEQ ID NO: 116369 - DNA, 15 bp, Homo sapiens
tgctggcctcccaat

SEQ ID NO: 116370 - DNA, 15 bp, Homo sapiens
atgctggcctcccaa

SEQ ID NO: 116371 - DNA, 15 bp, Homo sapiens
catgctggcctccca

SEQ ID NO: 116372 - DNA, 15 bp, Homo sapiens
gcatgctggcctccc

SEQ ID NO: 116373 - DNA, 15 bp, Homo sapiens
ggcatgctggcctcc

SEQ ID NO: 116374 - DNA, 15 bp, Homo sapiens
aggcatgctggcctc

SEQ ID NO: 116375 - DNA, 15 bp, Homo sapiens
caggcatgctggcct

SEQ ID NO: 116376 - DNA, 15 bp, Homo sapiens
ccaggcatgctggcc

SEQ ID NO: 116377 - DNA, 15 bp, Homo sapiens
tccaggcatgctggc

SEQ ID NO: 116378 - DNA, 15 bp, Homo sapiens
ctccaggcatgctgg

SEQ ID NO: 116379 - DNA, 15 bp, Homo sapiens
cctccaggcatgctg

SEQ ID NO: 116380 - DNA, 15 bp, Homo sapiens
ccctccaggcatgct

SEQ ID NO: 116381 - DNA, 15 bp, Homo sapiens
cccctccaggcatgc

SEQ ID NO: 116382 - DNA, 15 bp, Homo sapiens
ccccctccaggcatg

SEQ ID NO: 116383 - DNA, 15 bp, Homo sapiens
cccccctccaggcat

SEQ ID NO: 116384 - DNA, 15 bp, Homo sapiens
gcccccctccaggca

SEQ ID NO: 116385 - DNA, 15 bp, Homo sapiens
ggcccccctccaggc

SEQ ID NO: 116386 - DNA, 15 bp, Homo sapiens
tggcccccctccagg

SEQ ID NO: 116387 - DNA, 15 bp, Homo sapiens
ctggcccccctccag

SEQ ID NO: 116388 - DNA, 15 bp, Homo sapiens
cctggcccccctcca

SEQ ID NO: 116389 - DNA, 15 bp, Homo sapiens
gcctggcccccctcc

SEQ ID NO: 116390 - DNA, 15 bp, Homo sapiens
tgcctggcccccctc

SEQ ID NO: 116391 - DNA, 15 bp, Homo sapiens
atgcctggcccccct

SEQ ID NO: 116392 - DNA, 15 bp, Homo sapiens
catgcctggcccccc

SEQ ID NO: 116393 - DNA, 15 bp, Homo sapiens
tcatgcctggccccc

SEQ ID NO: 116394 - DNA, 15 bp, Homo sapiens
ctcatgcctggcccc

SEQ ID NO: 116395 - DNA, 15 bp, Homo sapiens
cctcatgcctggccc

SEQ ID NO: 116396 - DNA, 15 bp, Homo sapiens
acctcatgcctggcc

SEQ ID NO: 116397 - DNA, 15 bp, Homo sapiens
cacctcatgcctggc

SEQ ID NO: 116398 - DNA, 15 bp, Homo sapiens
ccacctcatgcctgg

SEQ ID NO: 116399 - DNA, 15 bp, Homo sapiens
cccacctcatgcctg

SEQ ID NO: 116400 - DNA, 15 bp, Homo sapiens
ccccacctcatgcct

SEQ ID NO: 116401 - DNA, 15 bp, Homo sapiens
accccacctcatgcc

SEQ ID NO: 116402 - DNA, 15 bp, Homo sapiens
taccccacctcatgc

SEQ ID NO: 116403 - DNA, 15 bp, Homo sapiens
ctaccccacctcatg

SEQ ID NO: 116404 - DNA, 15 bp, Homo sapiens
cctaccccacctcat

SEQ ID NO: 116405 - DNA, 15 bp, Homo sapiens
tcctaccccacctca

SEQ ID NO: 116406 - DNA, 15 bp, Homo sapiens
ctcctaccccacctc

SEQ ID NO: 116407 - DNA, 15 bp, Homo sapiens
tctcctaccccacct

SEQ ID NO: 116408 - DNA, 15 bp, Homo sapiens
ctctcctaccccacc

SEQ ID NO: 116409 - DNA, 15 bp, Homo sapiens
gctctcctaccccac

SEQ ID NO: 116410 - DNA, 15 bp, Homo sapiens
tgctctcctacccca

SEQ ID NO: 116411 - DNA, 15 bp, Homo sapiens
gtgctctcctacccc

SEQ ID NO: 116412 - DNA, 15 bp, Homo sapiens
agtgctctcctaccc

SEQ ID NO: 116413 - DNA, 15 bp, Homo sapiens
cagtgctctcctacc

SEQ ID NO: 116414 - DNA, 15 bp, Homo sapiens
tcagtgctctcctac

SEQ ID NO: 116415 - DNA, 15 bp, Homo sapiens
ctcagtgctctccta

SEQ ID NO: 116416 - DNA, 15 bp, Homo sapiens
tctcagtgctctcct

SEQ ID NO: 116417 - DNA, 15 bp, Homo sapiens
ttctcagtgctctcc

SEQ ID NO: 116418 - DNA, 15 bp, Homo sapiens
attctcagtgctctc

SEQ ID NO: 116419 - DNA, 15 bp, Homo sapiens
tattctcagtgctct

SEQ ID NO: 116420 - DNA, 15 bp, Homo sapiens
gtattctcagtgctc

SEQ ID NO: 116421 - DNA, 15 bp, Homo sapiens
agtattctcagtgct

SEQ ID NO: 116422 - DNA, 15 bp, Homo sapiens
cagtattctcagtgc

SEQ ID NO: 116423 - DNA, 15 bp, Homo sapiens
acagtattctcagtg

SEQ ID NO: 116424 - DNA, 15 bp, Homo sapiens
gacagtattctcagt

SEQ ID NO: 116425 - DNA, 15 bp, Homo sapiens
ggacagtattctcag

SEQ ID NO: 116426 - DNA, 15 bp, Homo sapiens
gggacagtattctca

SEQ ID NO: 116427 - DNA, 15 bp, Homo sapiens
agggacagtattctc

SEQ ID NO: 116428 - DNA, 15 bp, Homo sapiens
aagggacagtattct

SEQ ID NO: 116429 - DNA, 15 bp, Homo sapiens
aaagggacagtattc

SEQ ID NO: 116430 - DNA, 15 bp, Homo sapiens
aaaagggacagtatt

SEQ ID NO: 116431 - DNA, 15 bp, Homo sapiens
taaaagggacagtat

SEQ ID NO: 116432 - DNA, 15 bp, Homo sapiens
ttaaaagggacagta

SEQ ID NO: 116433 - DNA, 15 bp, Homo sapiens
cttaaaagggacagt

SEQ ID NO: 116434 - DNA, 15 bp, Homo sapiens
gcttaaaagggacag

SEQ ID NO: 116435 - DNA, 15 bp, Homo sapiens
tgcttaaaagggaca

SEQ ID NO: 116436 - DNA, 15 bp, Homo sapiens
ttgcttaaaagggac

SEQ ID NO: 116437 - DNA, 15 bp, Homo sapiens
gttgcttaaaaggga

SEQ ID NO: 116438 - DNA, 15 bp, Homo sapiens
ggttgcttaaaaggg

SEQ ID NO: 116439 - DNA, 15 bp, Homo sapiens
aggttgcttaaaagg

SEQ ID NO: 116440 - DNA, 15 bp, Homo sapiens
taggttgcttaaaag

SEQ ID NO: 116441 - DNA, 15 bp, Homo sapiens
gtaggttgcttaaaa

SEQ ID NO: 116442 - DNA, 15 bp, Homo sapiens
tgtaggttgcttaaa

SEQ ID NO: 116443 - DNA, 15 bp, Homo sapiens
ctgtaggttgcttaa

SEQ ID NO: 116444 - DNA, 15 bp, Homo sapiens
cctgtaggttgctta

SEQ ID NO: 116445 - DNA, 15 bp, Homo sapiens
ccctgtaggttgctt

SEQ ID NO: 116446 - DNA, 15 bp, Homo sapiens
cccctgtaggttgct

SEQ ID NO: 116447 - DNA, 15 bp, Homo sapiens
gcccctgtaggttgc

SEQ ID NO: 116448 - DNA, 15 bp, Homo sapiens
tgcccctgtaggttg

SEQ ID NO: 116449 - DNA, 15 bp, Homo sapiens
ctgcccctgtaggtt

SEQ ID NO: 116450 - DNA, 15 bp, Homo sapiens
gctgcccctgtaggt

SEQ ID NO: 116451 - DNA, 15 bp, Homo sapiens
ggctgcccctgtagg

SEQ ID NO: 116452 - DNA, 15 bp, Homo sapiens
gggctgcccctgtag

SEQ ID NO: 116453 - DNA, 15 bp, Homo sapiens
agggctgcccctgta

SEQ ID NO: 116454 - DNA, 15 bp, Homo sapiens
cagggctgcccctgt

SEQ ID NO: 116455 - DNA, 15 bp, Homo sapiens
ccagggctgcccctg

SEQ ID NO: 116456 - DNA, 15 bp, Homo sapiens
tccagggctgcccct

SEQ ID NO: 116457 - DNA, 15 bp, Homo sapiens
ctccagggctgcccc

SEQ ID NO: 116458 - DNA, 15 bp, Homo sapiens
tctccagggctgccc

SEQ ID NO: 116459 - DNA, 15 bp, Homo sapiens
atctccagggctgcc

SEQ ID NO: 116460 - DNA, 15 bp, Homo sapiens
aatctccagggctgc

SEQ ID NO: 116461 - DNA, 15 bp, Homo sapiens
caatctccagggctg

SEQ ID NO: 116462 - DNA, 15 bp, Homo sapiens
gcaatctccagggct

SEQ ID NO: 116463 - DNA, 15 bp, Homo sapiens
tgcaatctccagggc

SEQ ID NO: 116464 - DNA, 15 bp, Homo sapiens
ctgcaatctccaggg

SEQ ID NO: 116465 - DNA, 15 bp, Homo sapiens
cctgcaatctccagg

SEQ ID NO: 116466 - DNA, 15 bp, Homo sapiens
tcctgcaatctccag

SEQ ID NO: 116467 - DNA, 15 bp, Homo sapiens
gtcctgcaatctcca

SEQ ID NO: 116468 - DNA, 15 bp, Homo sapiens
ggtcctgcaatctcc

SEQ ID NO: 116469 - DNA, 15 bp, Homo sapiens
gggtcctgcaatctc

SEQ ID NO: 116470 - DNA, 15 bp, Homo sapiens
tgggtcctgcaatct

SEQ ID NO: 116471 - DNA, 15 bp, Homo sapiens
ttgggtcctgcaatc

SEQ ID NO: 116472 - DNA, 15 bp, Homo sapiens
cttgggtcctgcaat

SEQ ID NO: 116473 - DNA, 15 bp, Homo sapiens
ccttgggtcctgcaa

SEQ ID NO: 116474 - DNA, 15 bp, Homo sapiens
tccttgggtcctgca

SEQ ID NO: 116475 - DNA, 15 bp, Homo sapiens
ctccttgggtcctgc

SEQ ID NO: 116476 - DNA, 15 bp, Homo sapiens
gctccttgggtcctg

SEQ ID NO: 116477 - DNA, 15 bp, Homo sapiens
agctccttgggtcct

SEQ ID NO: 116478 - DNA, 15 bp, Homo sapiens
gagctccttgggtcc

SEQ ID NO: 116479 - DNA, 15 bp, Homo sapiens
cgagctccttgggtc

SEQ ID NO: 116480 - DNA, 15 bp, Homo sapiens
gcgagctccttgggt

SEQ ID NO: 116481 - DNA, 15 bp, Homo sapiens
tgcgagctccttggg

SEQ ID NO: 116482 - DNA, 15 bp, Homo sapiens
ctgcgagctccttgg

SEQ ID NO: 116483 - DNA, 15 bp, Homo sapiens
cctgcgagctccttg

SEQ ID NO: 116484 - DNA, 15 bp, Homo sapiens
tcctgcgagctcctt

SEQ ID NO: 116485 - DNA, 15 bp, Homo sapiens
atcctgcgagctcct

SEQ ID NO: 116486 - DNA, 15 bp, Homo sapiens
catcctgcgagctcc

SEQ ID NO: 116487 - DNA, 15 bp, Homo sapiens
ccatcctgcgagctc

SEQ ID NO: 116488 - DNA, 15 bp, Homo sapiens
tccatcctgcgagct

SEQ ID NO: 116489 - DNA, 15 bp, Homo sapiens
atccatcctgcgagc

SEQ ID NO: 116490 - DNA, 15 bp, Homo sapiens
tatccatcctgcgag

SEQ ID NO: 116491 - DNA, 15 bp, Homo sapiens
ctatccatcctgcga

SEQ ID NO: 116492 - DNA, 15 bp, Homo sapiens
cctatccatcctgcg

SEQ ID NO: 116493 - DNA, 15 bp, Homo sapiens
gcctatccatcctgc

SEQ ID NO: 116494 - DNA, 15 bp, Homo sapiens
tgcctatccatcctg

SEQ ID NO: 116495 - DNA, 15 bp, Homo sapiens
ctgcctatccatcct

SEQ ID NO: 116496 - DNA, 15 bp, Homo sapiens
cctgcctatccatcc

SEQ ID NO: 116497 - DNA, 15 bp, Homo sapiens
acctgcctatccatc

SEQ ID NO: 116498 - DNA, 15 bp, Homo sapiens
cacctgcctatccat

SEQ ID NO: 116499 - DNA, 15 bp, Homo sapiens
ccacctgcctatcca

SEQ ID NO: 116500 - DNA, 15 bp, Homo sapiens
tccacctgcctatcc

SEQ ID NO: 116501 - DNA, 15 bp, Homo sapiens
gtccacctgcctatc

SEQ ID NO: 116502 - DNA, 15 bp, Homo sapiens
agtccacctgcctat

SEQ ID NO: 116503 - DNA, 15 bp, Homo sapiens
aagtccacctgccta

SEQ ID NO: 116504 - DNA, 15 bp, Homo sapiens
caagtccacctgcct

SEQ ID NO: 116505 - DNA, 15 bp, Homo sapiens
ccaagtccacctgcc

SEQ ID NO: 116506 - DNA, 15 bp, Homo sapiens
cccaagtccacctgc

SEQ ID NO: 116507 - DNA, 15 bp, Homo sapiens
ccccaagtccacctg

SEQ ID NO: 116508 - DNA, 15 bp, Homo sapiens
accccaagtccacct

SEQ ID NO: 116509 - DNA, 15 bp, Homo sapiens
taccccaagtccacc

SEQ ID NO: 116510 - DNA, 15 bp, Homo sapiens
ataccccaagtccac

SEQ ID NO: 116511 - DNA, 15 bp, Homo sapiens
aataccccaagtcca

SEQ ID NO: 116512 - DNA, 15 bp, Homo sapiens
caataccccaagtcc

SEQ ID NO: 116513 - DNA, 15 bp, Homo sapiens
tcaataccccaagtc

SEQ ID NO: 116514 - DNA, 15 bp, Homo sapiens
ctcaataccccaagt

SEQ ID NO: 116515 - DNA, 15 bp, Homo sapiens
cctcaataccccaag

SEQ ID NO: 116516 - DNA, 15 bp, Homo sapiens
acctcaataccccaa

SEQ ID NO: 116517 - DNA, 15 bp, Homo sapiens
gacctcaatacccca

SEQ ID NO: 116518 - DNA, 15 bp, Homo sapiens
agacctcaatacccc

SEQ ID NO: 116519 - DNA, 15 bp, Homo sapiens
gagacctcaataccc

SEQ ID NO: 116520 - DNA, 15 bp, Homo sapiens
tgagacctcaatacc

SEQ ID NO: 116521 - DNA, 15 bp, Homo sapiens
ctgagacctcaatac

SEQ ID NO: 116522 - DNA, 15 bp, Homo sapiens
cctgagacctcaata

SEQ ID NO: 116523 - DNA, 15 bp, Homo sapiens
gcctgagacctcaat

SEQ ID NO: 116524 - DNA, 15 bp, Homo sapiens
tgcctgagacctcaa

SEQ ID NO: 116525 - DNA, 15 bp, Homo sapiens
ctgcctgagacctca

SEQ ID NO: 116526 - DNA, 15 bp, Homo sapiens
gctgcctgagacctc

SEQ ID NO: 116527 - DNA, 15 bp, Homo sapiens
ggctgcctgagacct

SEQ ID NO: 116528 - DNA, 15 bp, Homo sapiens
tggctgcctgagacc

SEQ ID NO: 116529 - DNA, 15 bp, Homo sapiens
gtggctgcctgagac

SEQ ID NO: 116530 - DNA, 15 bp, Homo sapiens
cgtggctgcctgaga

SEQ ID NO: 116531 - DNA, 15 bp, Homo sapiens
ccgtggctgcctgag

SEQ ID NO: 116532 - DNA, 15 bp, Homo sapiens
gccgtggctgcctga

SEQ ID NO: 116533 - DNA, 15 bp, Homo sapiens
agccgtggctgcctg

SEQ ID NO: 116534 - DNA, 15 bp, Homo sapiens
cagccgtggctgcct

SEQ ID NO: 116535 - DNA, 15 bp, Homo sapiens
tcagccgtggctgcc

SEQ ID NO: 116536 - DNA, 15 bp, Homo sapiens
ttcagccgtggctgc

SEQ ID NO: 116537 - DNA, 15 bp, Homo sapiens
cttcagccgtggctg

SEQ ID NO: 116538 - DNA, 15 bp, Homo sapiens
acttcagccgtggct

SEQ ID NO: 116539 - DNA, 15 bp, Homo sapiens
aacttcagccgtggc

SEQ ID NO: 116540 - DNA, 15 bp, Homo sapiens
caacttcagccgtgg

SEQ ID NO: 116541 - DNA, 15 bp, Homo sapiens
ccaacttcagccgtg

SEQ ID NO: 116542 - DNA, 15 bp, Homo sapiens
accaacttcagccgt

SEQ ID NO: 116543 - DNA, 15 bp, Homo sapiens
gaccaacttcagccg

SEQ ID NO: 116544 - DNA, 15 bp, Homo sapiens
agaccaacttcagcc

SEQ ID NO: 116545 - DNA, 15 bp, Homo sapiens
cagaccaacttcagc

SEQ ID NO: 116546 - DNA, 15 bp, Homo sapiens
tcagaccaacttcag

SEQ ID NO: 116547 - DNA, 15 bp, Homo sapiens
gtcagaccaacttca

SEQ ID NO: 116548 - DNA, 15 bp, Homo sapiens
ggtcagaccaacttc

SEQ ID NO: 116549 - DNA, 15 bp, Homo sapiens
aggtcagaccaactt

SEQ ID NO: 116550 - DNA, 15 bp, Homo sapiens
gaggtcagaccaact

SEQ ID NO: 116551 - DNA, 15 bp, Homo sapiens
tgaggtcagaccaac

SEQ ID NO: 116552 - DNA, 15 bp, Homo sapiens
ctgaggtcagaccaa

SEQ ID NO: 116553 - DNA, 15 bp, Homo sapiens
cctgaggtcagacca

SEQ ID NO: 116554 - DNA, 15 bp, Homo sapiens
ccctgaggtcagacc

SEQ ID NO: 116555 - DNA, 15 bp, Homo sapiens
accctgaggtcagac

SEQ ID NO: 116556 - DNA, 15 bp, Homo sapiens
gaccctgaggtcaga

SEQ ID NO: 116557 - DNA, 15 bp, Homo sapiens
ggaccctgaggtcag

SEQ ID NO: 116558 - DNA, 15 bp, Homo sapiens
tggaccctgaggtca

SEQ ID NO: 116559 - DNA, 15 bp, Homo sapiens
ttggaccctgaggtc

SEQ ID NO: 116560 - DNA, 15 bp, Homo sapiens
tttggaccctgaggt

SEQ ID NO: 116561 - DNA, 15 bp, Homo sapiens
atttggaccctgagg

SEQ ID NO: 116562 - DNA, 15 bp, Homo sapiens
gatttggaccctgag

SEQ ID NO: 116563 - DNA, 15 bp, Homo sapiens
ggatttggaccctga

SEQ ID NO: 116564 - DNA, 15 bp, Homo sapiens
gggatttggaccctg

SEQ ID NO: 116565 - DNA, 15 bp, Homo sapiens
tgggatttggaccct

SEQ ID NO: 116566 - DNA, 15 bp, Homo sapiens
ctgggatttggaccc

SEQ ID NO: 116567 - DNA, 15 bp, Homo sapiens
tctgggatttggacc

SEQ ID NO: 116568 - DNA, 15 bp, Homo sapiens
ttctgggatttggac

SEQ ID NO: 116569 - DNA, 15 bp, Homo sapiens
gttctgggatttgga

SEQ ID NO: 116570 - DNA, 15 bp, Homo sapiens
agttctgggatttgg

SEQ ID NO: 116571 - DNA, 15 bp, Homo sapiens
gagttctgggatttg

SEQ ID NO: 116572 - DNA, 15 bp, Homo sapiens
tgagttctgggattt

SEQ ID NO: 116573 - DNA, 15 bp, Homo sapiens
ctgagttctgggatt

SEQ ID NO: 116574 - DNA, 15 bp, Homo sapiens
tctgagttctgggat

SEQ ID NO: 116575 - DNA, 15 bp, Homo sapiens
ctctgagttctggga

SEQ ID NO: 116576 - DNA, 15 bp, Homo sapiens
tctctgagttctggg

SEQ ID NO: 116577 - DNA, 15 bp, Homo sapiens
ttctctgagttctgg

SEQ ID NO: 116578 - DNA, 15 bp, Homo sapiens
gttctctgagttctg

SEQ ID NO: 116579 - DNA, 15 bp, Homo sapiens
agttctctgagttct

SEQ ID NO: 116580 - DNA, 15 bp, Homo sapiens
aagttctctgagttc

SEQ ID NO: 116581 - DNA, 15 bp, Homo sapiens
caagttctctgagtt

SEQ ID NO: 116582 - DNA, 15 bp, Homo sapiens
acaagttctctgagt

SEQ ID NO: 116583 - DNA, 15 bp, Homo sapiens
gacaagttctctgag

SEQ ID NO: 116584 - DNA, 15 bp, Homo sapiens
ggacaagttctctga

SEQ ID NO: 116585 - DNA, 15 bp, Homo sapiens
aggacaagttctctg

SEQ ID NO: 116586 - DNA, 15 bp, Homo sapiens
aaggacaagttctct

SEQ ID NO: 116587 - DNA, 15 bp, Homo sapiens
taaggacaagttctc

SEQ ID NO: 116588 - DNA, 15 bp, Homo sapiens
ttaaggacaagttct

SEQ ID NO: 116589 - DNA, 15 bp, Homo sapiens
gttaaggacaagttc

SEQ ID NO: 116590 - DNA, 15 bp, Homo sapiens
cgttaaggacaagtt

SEQ ID NO: 116591 - DNA, 15 bp, Homo sapiens
ccgttaaggacaagt

SEQ ID NO: 116592 - DNA, 15 bp, Homo sapiens
accgttaaggacaag

SEQ ID NO: 116593 - DNA, 15 bp, Homo sapiens
caccgttaaggacaa

SEQ ID NO: 116594 - DNA, 15 bp, Homo sapiens
gcaccgttaaggaca

SEQ ID NO: 116595 - DNA, 15 bp, Homo sapiens
agcaccgttaaggac

SEQ ID NO: 116596 - DNA, 15 bp, Homo sapiens
gagcaccgttaagga

SEQ ID NO: 116597 - DNA, 15 bp, Homo sapiens
ggagcaccgttaagg

SEQ ID NO: 116598 - DNA, 15 bp, Homo sapiens
tggagcaccgttaag

SEQ ID NO: 116599 - DNA, 15 bp, Homo sapiens
ctggagcaccgttaa

SEQ ID NO: 116600 - DNA, 15 bp, Homo sapiens
actggagcaccgtta

SEQ ID NO: 116601 - DNA, 15 bp, Homo sapiens
tactggagcaccgtt

SEQ ID NO: 116602 - DNA, 15 bp, Homo sapiens
ctactggagcaccgt

SEQ ID NO: 116603 - DNA, 15 bp, Homo sapiens
actactggagcaccg

SEQ ID NO: 116604 - DNA, 15 bp, Homo sapiens
gactactggagcacc

SEQ ID NO: 116605 - DNA, 15 bp, Homo sapiens
agactactggagcac

SEQ ID NO: 116606 - DNA, 15 bp, Homo sapiens
aagactactggagca

SEQ ID NO: 116607 - DNA, 15 bp, Homo sapiens
aaagactactggagc

SEQ ID NO: 116608 - DNA, 15 bp, Homo sapiens
gaaagactactggag

SEQ ID NO: 116609 - DNA, 15 bp, Homo sapiens
tgaaagactactgga

SEQ ID NO: 116610 - DNA, 15 bp, Homo sapiens
ctgaaagactactgg

SEQ ID NO: 116611 - DNA, 15 bp, Homo sapiens
cctgaaagactactg

SEQ ID NO: 116612 - DNA, 15 bp, Homo sapiens
ccctgaaagactact

SEQ ID NO: 116613 - DNA, 15 bp, Homo sapiens
tccctgaaagactac

SEQ ID NO: 116614 - DNA, 15 bp, Homo sapiens
ttccctgaaagacta

SEQ ID NO: 116615 - DNA, 15 bp, Homo sapiens
gttccctgaaagact

SEQ ID NO: 116616 - DNA, 15 bp, Homo sapiens
agttccctgaaagac

SEQ ID NO: 116617 - DNA, 15 bp, Homo sapiens
cagttccctgaaaga

SEQ ID NO: 116618 - DNA, 15 bp, Homo sapiens
tcagttccctgaaag

SEQ ID NO: 116619 - DNA, 15 bp, Homo sapiens
ttcagttccctgaaa

SEQ ID NO: 116620 - DNA, 15 bp, Homo sapiens
cttcagttccctgaa

SEQ ID NO: 116621 - DNA, 15 bp, Homo sapiens
gcttcagttccctga

SEQ ID NO: 116622 - DNA, 15 bp, Homo sapiens
ggcttcagttccctg

SEQ ID NO: 116623 - DNA, 15 bp, Homo sapiens
tggcttcagttccct

SEQ ID NO: 116624 - DNA, 15 bp, Homo sapiens
atggcttcagttccc

SEQ ID NO: 116625 - DNA, 15 bp, Homo sapiens
gatggcttcagttcc

SEQ ID NO: 116626 - DNA, 15 bp, Homo sapiens
cgatggcttcagttc

SEQ ID NO: 116627 - DNA, 15 bp, Homo sapiens
ccgatggcttcagtt

SEQ ID NO: 116628 - DNA, 15 bp, Homo sapiens
accgatggcttcagt

SEQ ID NO: 116629 - DNA, 15 bp, Homo sapiens
gaccgatggcttcag

SEQ ID NO: 116630 - DNA, 15 bp, Homo sapiens
tgaccgatggcttca

SEQ ID NO: 116631 - DNA, 15 bp, Homo sapiens
gtgaccgatggcttc

SEQ ID NO: 116632 - DNA, 15 bp, Homo sapiens
ggtgaccgatggctt

SEQ ID NO: 116633 - DNA, 15 bp, Homo sapiens
gggtgaccgatggct

SEQ ID NO: 116634 - DNA, 15 bp, Homo sapiens
tgggtgaccgatggc

SEQ ID NO: 116635 - DNA, 15 bp, Homo sapiens
ctgggtgaccgatgg

SEQ ID NO: 116636 - DNA, 15 bp, Homo sapiens
gctgggtgaccgatg

SEQ ID NO: 116637 - DNA, 15 bp, Homo sapiens
ggctgggtgaccgat

SEQ ID NO: 116638 - DNA, 15 bp, Homo sapiens
gggctgggtgaccga

SEQ ID NO: 116639 - DNA, 15 bp, Homo sapiens
ggggctgggtgaccg

SEQ ID NO: 116640 - DNA, 15 bp, Homo sapiens
aggggctgggtgacc

SEQ ID NO: 116641 - DNA, 15 bp, Homo sapiens
taggggctgggtgac

SEQ ID NO: 116642 - DNA, 15 bp, Homo sapiens
ttaggggctgggtga

SEQ ID NO: 116643 - DNA, 15 bp, Homo sapiens
tttaggggctgggtg

SEQ ID NO: 116644 - DNA, 15 bp, Homo sapiens
atttaggggctgggt

SEQ ID NO: 116645 - DNA, 15 bp, Homo sapiens
gatttaggggctggg

SEQ ID NO: 116646 - DNA, 15 bp, Homo sapiens
tgatttaggggctgg

SEQ ID NO: 116647 - DNA, 15 bp, Homo sapiens
ctgatttaggggctg

SEQ ID NO: 116648 - DNA, 15 bp, Homo sapiens
actgatttaggggct

SEQ ID NO: 116649 - DNA, 15 bp, Homo sapiens
gactgatttaggggc

SEQ ID NO: 116650 - DNA, 15 bp, Homo sapiens
tgactgatttagggg

SEQ ID NO: 116651 - DNA, 15 bp, Homo sapiens
ctgactgatttaggg

SEQ ID NO: 116652 - DNA, 15 bp, Homo sapiens
cctgactgatttagg

SEQ ID NO: 116653 - DNA, 15 bp, Homo sapiens
ccctgactgatttag

SEQ ID NO: 116654 - DNA, 15 bp, Homo sapiens
cccctgactgattta

SEQ ID NO: 116655 - DNA, 15 bp, Homo sapiens
tcccctgactgattt

SEQ ID NO: 116656 - DNA, 15 bp, Homo sapiens
ttcccctgactgatt

SEQ ID NO: 116657 - DNA, 15 bp, Homo sapiens
cttcccctgactgat

SEQ ID NO: 116658 - DNA, 15 bp, Homo sapiens
gcttcccctgactga

SEQ ID NO: 116659 - DNA, 15 bp, Homo sapiens
tgcttcccctgactg

SEQ ID NO: 116660 - DNA, 15 bp, Homo sapiens
ttgcttcccctgact

SEQ ID NO: 116661 - DNA, 15 bp, Homo sapiens
gttgcttcccctgac

SEQ ID NO: 116662 - DNA, 15 bp, Homo sapiens
tgttgcttcccctga

SEQ ID NO: 116663 - DNA, 15 bp, Homo sapiens
ctgttgcttcccctg

SEQ ID NO: 116664 - DNA, 15 bp, Homo sapiens
tctgttgcttcccct

SEQ ID NO: 116665 - DNA, 15 bp, Homo sapiens
ctctgttgcttcccc

SEQ ID NO: 116666 - DNA, 15 bp, Homo sapiens
gctctgttgcttccc

SEQ ID NO: 116667 - DNA, 15 bp, Homo sapiens
tgctctgttgcttcc

SEQ ID NO: 116668 - DNA, 15 bp, Homo sapiens
ctgctctgttgcttc

SEQ ID NO: 116669 - DNA, 15 bp, Homo sapiens
cctgctctgttgctt

SEQ ID NO: 116670 - DNA, 15 bp, Homo sapiens
ccctgctctgttgct

SEQ ID NO: 116671 - DNA, 15 bp, Homo sapiens
gccctgctctgttgc

SEQ ID NO: 116672 - DNA, 15 bp, Homo sapiens
tgccctgctctgttg

SEQ ID NO: 116673 - DNA, 15 bp, Homo sapiens
atgccctgctctgtt

SEQ ID NO: 116674 - DNA, 15 bp, Homo sapiens
catgccctgctctgt

SEQ ID NO: 116675 - DNA, 15 bp, Homo sapiens
tcatgccctgctctg

SEQ ID NO: 116676 - DNA, 15 bp, Homo sapiens
ctcatgccctgctct

SEQ ID NO: 116677 - DNA, 15 bp, Homo sapiens
tctcatgccctgctc

SEQ ID NO: 116678 - DNA, 15 bp, Homo sapiens
ttctcatgccctgct

SEQ ID NO: 116679 - DNA, 15 bp, Homo sapiens
gttctcatgccctgc

SEQ ID NO: 116680 - DNA, 15 bp, Homo sapiens
agttctcatgccctg

SEQ ID NO: 116681 - DNA, 15 bp, Homo sapiens
gagttctcatgccct

SEQ ID NO: 116682 - DNA, 15 bp, Homo sapiens
ggagttctcatgccc

SEQ ID NO: 116683 - DNA, 15 bp, Homo sapiens
aggagttctcatgcc

SEQ ID NO: 116684 - DNA, 15 bp, Homo sapiens
gaggagttctcatgc

SEQ ID NO: 116685 - DNA, 15 bp, Homo sapiens
agaggagttctcatg

SEQ ID NO: 116686 - DNA, 15 bp, Homo sapiens
cagaggagttctcat

SEQ ID NO: 116687 - DNA, 15 bp, Homo sapiens
acagaggagttctca

SEQ ID NO: 116688 - DNA, 15 bp, Homo sapiens
tacagaggagttctc

SEQ ID NO: 116689 - DNA, 15 bp, Homo sapiens
ctacagaggagttct

SEQ ID NO: 116690 - DNA, 15 bp, Homo sapiens
cctacagaggagttc

SEQ ID NO: 116691 - DNA, 15 bp, Homo sapiens
gcctacagaggagtt

SEQ ID NO: 116692 - DNA, 15 bp, Homo sapiens
tgcctacagaggagt

SEQ ID NO: 116693 - DNA, 15 bp, Homo sapiens
ttgcctacagaggag

SEQ ID NO: 116694 - DNA, 15 bp, Homo sapiens
gttgcctacagagga

SEQ ID NO: 116695 - DNA, 15 bp, Homo sapiens
ggttgcctacagagg

SEQ ID NO: 116696 - DNA, 15 bp, Homo sapiens
tggttgcctacagag

SEQ ID NO: 116697 - DNA, 15 bp, Homo sapiens
atggttgcctacaga

SEQ ID NO: 116698 - DNA, 15 bp, Homo sapiens
catggttgcctacag

SEQ ID NO: 116699 - DNA, 15 bp, Homo sapiens
ccatggttgcctaca

SEQ ID NO: 116700 - DNA, 15 bp, Homo sapiens
cccatggttgcctac

SEQ ID NO: 116701 - DNA, 15 bp, Homo sapiens
tcccatggttgccta

SEQ ID NO: 116702 - DNA, 15 bp, Homo sapiens
gtcccatggttgcct

SEQ ID NO: 116703 - DNA, 15 bp, Homo sapiens
ggtcccatggttgcc

SEQ ID NO: 116704 - DNA, 15 bp, Homo sapiens
gggtcccatggttgc

SEQ ID NO: 116705 - DNA, 15 bp, Homo sapiens
tgggtcccatggttg

SEQ ID NO: 116706 - DNA, 15 bp, Homo sapiens
gtgggtcccatggtt

SEQ ID NO: 116707 - DNA, 15 bp, Homo sapiens
tgtgggtcccatggt

SEQ ID NO: 116708 - DNA, 15 bp, Homo sapiens
gtgtgggtcccatgg

SEQ ID NO: 116709 - DNA, 15 bp, Homo sapiens
ggtgtgggtcccatg

SEQ ID NO: 116710 - DNA, 15 bp, Homo sapiens
gggtgtgggtcccat

SEQ ID NO: 116711 - DNA, 15 bp, Homo sapiens
tgggtgtgggtccca

SEQ ID NO: 116712 - DNA, 15 bp, Homo sapiens
atgggtgtgggtccc

SEQ ID NO: 116713 - DNA, 15 bp, Homo sapiens
catgggtgtgggtcc

SEQ ID NO: 116714 - DNA, 15 bp, Homo sapiens
acatgggtgtgggtc

SEQ ID NO: 116715 - DNA, 15 bp, Homo sapiens
gacatgggtgtgggt

SEQ ID NO: 116716 - DNA, 15 bp, Homo sapiens
ggacatgggtgtggg

SEQ ID NO: 116717 - DNA, 15 bp, Homo sapiens
gggacatgggtgtgg

SEQ ID NO: 116718 - DNA, 15 bp, Homo sapiens
ggggacatgggtgtg

SEQ ID NO: 116719 - DNA, 15 bp, Homo sapiens
tggggacatgggtgt

SEQ ID NO: 116720 - DNA, 15 bp, Homo sapiens
gtggggacatgggtg

SEQ ID NO: 116721 - DNA, 15 bp, Homo sapiens
agtggggacatgggt

SEQ ID NO: 116722 - DNA, 15 bp, Homo sapiens
cagtggggacatggg

SEQ ID NO: 116723 - DNA, 15 bp, Homo sapiens
ccagtggggacatgg

SEQ ID NO: 116724 - DNA, 15 bp, Homo sapiens
tccagtggggacatg

SEQ ID NO: 116725 - DNA, 15 bp, Homo sapiens
gtccagtggggacat

SEQ ID NO: 116726 - DNA, 15 bp, Homo sapiens
cgtccagtggggaca

SEQ ID NO: 116727 - DNA, 15 bp, Homo sapiens
tcgtccagtggggac

SEQ ID NO: 116728 - DNA, 15 bp, Homo sapiens
gtcgtccagtgggga

SEQ ID NO: 116729 - DNA, 15 bp, Homo sapiens
tgtcgtccagtgggg

SEQ ID NO: 116730 - DNA, 15 bp, Homo sapiens
gtgtcgtccagtggg

SEQ ID NO: 116731 - DNA, 15 bp, Homo sapiens
ggtgtcgtccagtgg

SEQ ID NO: 116732 - DNA, 15 bp, Homo sapiens
tggtgtcgtccagtg

SEQ ID NO: 116733 - DNA, 15 bp, Homo sapiens
ctggtgtcgtccagt

SEQ ID NO: 116734 - DNA, 15 bp, Homo sapiens
actggtgtcgtccag

SEQ ID NO: 116735 - DNA, 15 bp, Homo sapiens
gactggtgtcgtcca

SEQ ID NO: 116736 - DNA, 15 bp, Homo sapiens
tgactggtgtcgtcc

SEQ ID NO: 116737 - DNA, 15 bp, Homo sapiens
ctgactggtgtcgtc

SEQ ID NO: 116738 - DNA, 15 bp, Homo sapiens
cctgactggtgtcgt

SEQ ID NO: 116739 - DNA, 15 bp, Homo sapiens
tcctgactggtgtcg

SEQ ID NO: 116740 - DNA, 15 bp, Homo sapiens
gtcctgactggtgtc

SEQ ID NO: 116741 - DNA, 15 bp, Homo sapiens
ggtcctgactggtgt

SEQ ID NO: 116742 - DNA, 15 bp, Homo sapiens
tggtcctgactggtg

SEQ ID NO: 116743 - DNA, 15 bp, Homo sapiens
gtggtcctgactggt

SEQ ID NO: 116744 - DNA, 15 bp, Homo sapiens
tgtggtcctgactgg

SEQ ID NO: 116745 - DNA, 15 bp, Homo sapiens
gtgtggtcctgactg

SEQ ID NO: 116746 - DNA, 15 bp, Homo sapiens
ggtgtggtcctgact

SEQ ID NO: 116747 - DNA, 15 bp, Homo sapiens
tggtgtggtcctgac

SEQ ID NO: 116748 - DNA, 15 bp, Homo sapiens
gtggtgtggtcctga

SEQ ID NO: 116749 - DNA, 15 bp, Homo sapiens
ggtggtgtggtcctg

SEQ ID NO: 116750 - DNA, 15 bp, Homo sapiens
gggtggtgtggtcct

SEQ ID NO: 116751 - DNA, 15 bp, Homo sapiens
agggtggtgtggtcc

SEQ ID NO: 116752 - DNA, 15 bp, Homo sapiens
gagggtggtgtggtc

SEQ ID NO: 116753 - DNA, 15 bp, Homo sapiens
agagggtggtgtggt

SEQ ID NO: 116754 - DNA, 15 bp, Homo sapiens
gagagggtggtgtgg

SEQ ID NO: 116755 - DNA, 15 bp, Homo sapiens
tgagagggtggtgtg

SEQ ID NO: 116756 - DNA, 15 bp, Homo sapiens
ttgagagggtggtgt

SEQ ID NO: 116757 - DNA, 15 bp, Homo sapiens
gttgagagggtggtg

SEQ ID NO: 116758 - DNA, 15 bp, Homo sapiens
agttgagagggtggt

SEQ ID NO: 116759 - DNA, 15 bp, Homo sapiens
aagttgagagggtgg

SEQ ID NO: 116760 - DNA, 15 bp, Homo sapiens
gaagttgagagggtg

SEQ ID NO: 116761 - DNA, 15 bp, Homo sapiens
tgaagttgagagggt

SEQ ID NO: 116762 - DNA, 15 bp, Homo sapiens
gtgaagttgagaggg

SEQ ID NO: 116763 - DNA, 15 bp, Homo sapiens
agtgaagttgagagg

SEQ ID NO: 116764 - DNA, 15 bp, Homo sapiens
cagtgaagttgagag

SEQ ID NO: 116765 - DNA, 15 bp, Homo sapiens
ccagtgaagttgaga

SEQ ID NO: 116766 - DNA, 15 bp, Homo sapiens
tccagtgaagttgag

SEQ ID NO: 116767 - DNA, 15 bp, Homo sapiens
gtccagtgaagttga

SEQ ID NO: 116768 - DNA, 15 bp, Homo sapiens
cgtccagtgaagttg

SEQ ID NO: 116769 - DNA, 15 bp, Homo sapiens
tcgtccagtgaagtt

SEQ ID NO: 116770 - DNA, 15 bp, Homo sapiens
gtcgtccagtgaagt

SEQ ID NO: 116771 - DNA, 15 bp, Homo sapiens
tgtcgtccagtgaag

SEQ ID NO: 116772 - DNA, 15 bp, Homo sapiens
ctgtcgtccagtgaa

SEQ ID NO: 116773 - DNA, 15 bp, Homo sapiens
gctgtcgtccagtga

SEQ ID NO: 116774 - DNA, 15 bp, Homo sapiens
ggctgtcgtccagtg

SEQ ID NO: 116775 - DNA, 15 bp, Homo sapiens
gggctgtcgtccagt

SEQ ID NO: 116776 - DNA, 15 bp, Homo sapiens
agggctgtcgtccag

SEQ ID NO: 116777 - DNA, 15 bp, Homo sapiens
cagggctgtcgtcca

SEQ ID NO: 116778 - DNA, 15 bp, Homo sapiens
tcagggctgtcgtcc

SEQ ID NO: 116779 - DNA, 15 bp, Homo sapiens
ctcagggctgtcgtc

SEQ ID NO: 116780 - DNA, 15 bp, Homo sapiens
tctcagggctgtcgt

SEQ ID NO: 116781 - DNA, 15 bp, Homo sapiens
gtctcagggctgtcg

SEQ ID NO: 116782 - DNA, 15 bp, Homo sapiens
ggtctcagggctgtc

SEQ ID NO: 116783 - DNA, 15 bp, Homo sapiens
aggtctcagggctgt

SEQ ID NO: 116784 - DNA, 15 bp, Homo sapiens
gaggtctcagggctg

SEQ ID NO: 116785 - DNA, 15 bp, Homo sapiens
tgaggtctcagggct

SEQ ID NO: 116786 - DNA, 15 bp, Homo sapiens
ctgaggtctcagggc

SEQ ID NO: 116787 - DNA, 15 bp, Homo sapiens
cctgaggtctcaggg

SEQ ID NO: 116788 - DNA, 15 bp, Homo sapiens
gcctgaggtctcagg

SEQ ID NO: 116789 - DNA, 15 bp, Homo sapiens
tgcctgaggtctcag

SEQ ID NO: 116790 - DNA, 15 bp, Homo sapiens
ctgcctgaggtctca

SEQ ID NO: 116791 - DNA, 15 bp, Homo sapiens
cctgcctgaggtctc

SEQ ID NO: 116792 - DNA, 15 bp, Homo sapiens
tcctgcctgaggtct

SEQ ID NO: 116793 - DNA, 15 bp, Homo sapiens
ttcctgcctgaggtc

SEQ ID NO: 116794 - DNA, 15 bp, Homo sapiens
attcctgcctgaggt

SEQ ID NO: 116795 - DNA, 15 bp, Homo sapiens
gattcctgcctgagg

SEQ ID NO: 116796 - DNA, 15 bp, Homo sapiens
ggattcctgcctgag

SEQ ID NO: 116797 - DNA, 15 bp, Homo sapiens
gggattcctgcctga

SEQ ID NO: 116798 - DNA, 15 bp, Homo sapiens
ggggattcctgcctg

SEQ ID NO: 116799 - DNA, 15 bp, Homo sapiens
gggggattcctgcct

SEQ ID NO: 116800 - DNA, 15 bp, Homo sapiens
tgggggattcctgcc

SEQ ID NO: 116801 - DNA, 15 bp, Homo sapiens
gtgggggattcctgc

SEQ ID NO: 116802 - DNA, 15 bp, Homo sapiens
tgtgggggattcctg

SEQ ID NO: 116803 - DNA, 15 bp, Homo sapiens
ctgtgggggattcct

SEQ ID NO: 116804 - DNA, 15 bp, Homo sapiens
gctgtgggggattcc

SEQ ID NO: 116805 - DNA, 15 bp, Homo sapiens
agctgtgggggattc

SEQ ID NO: 116806 - DNA, 15 bp, Homo sapiens
cagctgtgggggatt

SEQ ID NO: 116807 - DNA, 15 bp, Homo sapiens
gcagctgtgggggat

SEQ ID NO: 116808 - DNA, 15 bp, Homo sapiens
ggcagctgtggggga

SEQ ID NO: 116809 - DNA, 15 bp, Homo sapiens
tggcagctgtggggg

SEQ ID NO: 116810 - DNA, 15 bp, Homo sapiens
gtggcagctgtgggg

SEQ ID NO: 116811 - DNA, 15 bp, Homo sapiens
ggtggcagctgtggg

SEQ ID NO: 116812 - DNA, 15 bp, Homo sapiens
gggtggcagctgtgg

SEQ ID NO: 116813 - DNA, 15 bp, Homo sapiens
agggtggcagctgtg

SEQ ID NO: 116814 - DNA, 15 bp, Homo sapiens
cagggtggcagctgt

SEQ ID NO: 116815 - DNA, 15 bp, Homo sapiens
ccagggtggcagctg

SEQ ID NO: 116816 - DNA, 15 bp, Homo sapiens
cccagggtggcagct

SEQ ID NO: 116817 - DNA, 15 bp, Homo sapiens
tcccagggtggcagc

SEQ ID NO: 116818 - DNA, 15 bp, Homo sapiens
ctcccagggtggcag

SEQ ID NO: 116819 - DNA, 15 bp, Homo sapiens
tctcccagggtggca

SEQ ID NO: 116820 - DNA, 15 bp, Homo sapiens
ttctcccagggtggc

SEQ ID NO: 116821 - DNA, 15 bp, Homo sapiens
cttctcccagggtgg

SEQ ID NO: 116822 - DNA, 15 bp, Homo sapiens
tcttctcccagggtg

SEQ ID NO: 116823 - DNA, 15 bp, Homo sapiens
ctcttctcccagggt

SEQ ID NO: 116824 - DNA, 15 bp, Homo sapiens
tctcttctcccaggg

SEQ ID NO: 116825 - DNA, 15 bp, Homo sapiens
atctcttctcccagg

SEQ ID NO: 116826 - DNA, 15 bp, Homo sapiens
tatctcttctcccag

SEQ ID NO: 116827 - DNA, 15 bp, Homo sapiens
atatctcttctccca

SEQ ID NO: 116828 - DNA, 15 bp, Homo sapiens
gatatctcttctccc

SEQ ID NO: 116829 - DNA, 15 bp, Homo sapiens
ggatatctcttctcc

SEQ ID NO: 116830 - DNA, 15 bp, Homo sapiens
aggatatctcttctc

SEQ ID NO: 116831 - DNA, 15 bp, Homo sapiens
aaggatatctcttct

SEQ ID NO: 116832 - DNA, 15 bp, Homo sapiens
caaggatatctcttc

SEQ ID NO: 116833 - DNA, 15 bp, Homo sapiens
gcaaggatatctctt

SEQ ID NO: 116834 - DNA, 15 bp, Homo sapiens
tgcaaggatatctct

SEQ ID NO: 116835 - DNA, 15 bp, Homo sapiens
ctgcaaggatatctc

SEQ ID NO: 116836 - DNA, 15 bp, Homo sapiens
cctgcaaggatatct

SEQ ID NO: 116837 - DNA, 15 bp, Homo sapiens
tcctgcaaggatatc

SEQ ID NO: 116838 - DNA, 15 bp, Homo sapiens
ttcctgcaaggatat

SEQ ID NO: 116839 - DNA, 15 bp, Homo sapiens
gttcctgcaaggata

SEQ ID NO: 116840 - DNA, 15 bp, Homo sapiens
ggttcctgcaaggat

SEQ ID NO: 116841 - DNA, 15 bp, Homo sapiens
gggttcctgcaagga

SEQ ID NO: 116842 - DNA, 15 bp, Homo sapiens
ggggttcctgcaagg

SEQ ID NO: 116843 - DNA, 15 bp, Homo sapiens
tggggttcctgcaag

SEQ ID NO: 116844 - DNA, 15 bp, Homo sapiens
ctggggttcctgcaa

SEQ ID NO: 116845 - DNA, 15 bp, Homo sapiens
gctggggttcctgca

SEQ ID NO: 116846 - DNA, 15 bp, Homo sapiens
tgctggggttcctgc

SEQ ID NO: 116847 - DNA, 15 bp, Homo sapiens
gtgctggggttcctg

SEQ ID NO: 116848 - DNA, 15 bp, Homo sapiens
tgtgctggggttcct

SEQ ID NO: 116849 - DNA, 15 bp, Homo sapiens
ttgtgctggggttcc

SEQ ID NO: 116850 - DNA, 15 bp, Homo sapiens
cttgtgctggggttc

SEQ ID NO: 116851 - DNA, 15 bp, Homo sapiens
acttgtgctggggtt

SEQ ID NO: 116852 - DNA, 15 bp, Homo sapiens
gacttgtgctggggt

SEQ ID NO: 116853 - DNA, 15 bp, Homo sapiens
tgacttgtgctgggg

SEQ ID NO: 116854 - DNA, 15 bp, Homo sapiens
ttgacttgtgctggg

SEQ ID NO: 116855 - DNA, 15 bp, Homo sapiens
tttgacttgtgctgg

SEQ ID NO: 116856 - DNA, 15 bp, Homo sapiens
gtttgacttgtgctg

SEQ ID NO: 116857 - DNA, 15 bp, Homo sapiens
ggtttgacttgtgct

SEQ ID NO: 116858 - DNA, 15 bp, Homo sapiens
gggtttgacttgtgc

SEQ ID NO: 116859 - DNA, 15 bp, Homo sapiens
agggtttgacttgtg

SEQ ID NO: 116860 - DNA, 15 bp, Homo sapiens
cagggtttgacttgt

SEQ ID NO: 116861 - DNA, 15 bp, Homo sapiens
gcagggtttgacttg

SEQ ID NO: 116862 - DNA, 15 bp, Homo sapiens
ggcagggtttgactt

SEQ ID NO: 116863 - DNA, 15 bp, Homo sapiens
tggcagggtttgact

SEQ ID NO: 116864 - DNA, 15 bp, Homo sapiens
atggcagggtttgac

SEQ ID NO: 116865 - DNA, 15 bp, Homo sapiens
gatggcagggtttga

SEQ ID NO: 116866 - DNA, 15 bp, Homo sapiens
agatggcagggtttg

SEQ ID NO: 116867 - DNA, 15 bp, Homo sapiens
gagatggcagggttt

SEQ ID NO: 116868 - DNA, 15 bp, Homo sapiens
ggagatggcagggtt

SEQ ID NO: 116869 - DNA, 15 bp, Homo sapiens
tggagatggcagggt

SEQ ID NO: 116870 - DNA, 15 bp, Homo sapiens
ctggagatggcaggg

SEQ ID NO: 116871 - DNA, 15 bp, Homo sapiens
cctggagatggcagg

SEQ ID NO: 116872 - DNA, 15 bp, Homo sapiens
acctggagatggcag

SEQ ID NO: 116873 - DNA, 15 bp, Homo sapiens
gacctggagatggca

SEQ ID NO: 116874 - DNA, 15 bp, Homo sapiens
tgacctggagatggc

SEQ ID NO: 116875 - DNA, 15 bp, Homo sapiens
gtgacctggagatgg

SEQ ID NO: 116876 - DNA, 15 bp, Homo sapiens
ggtgacctggagatg

SEQ ID NO: 116877 - DNA, 15 bp, Homo sapiens
aggtgacctggagat

SEQ ID NO: 116878 - DNA, 15 bp, Homo sapiens
gaggtgacctggaga

SEQ ID NO: 116879 - DNA, 15 bp, Homo sapiens
tgaggtgacctggag

SEQ ID NO: 116880 - DNA, 15 bp, Homo sapiens
ctgaggtgacctgga

SEQ ID NO: 116881 - DNA, 15 bp, Homo sapiens
tctgaggtgacctgg

SEQ ID NO: 116882 - DNA, 15 bp, Homo sapiens
atctgaggtgacctg

SEQ ID NO: 116883 - DNA, 15 bp, Homo sapiens
catctgaggtgacct

SEQ ID NO: 116884 - DNA, 15 bp, Homo sapiens
acatctgaggtgacc

SEQ ID NO: 116885 - DNA, 15 bp, Homo sapiens
aacatctgaggtgac

SEQ ID NO: 116886 - DNA, 15 bp, Homo sapiens
aaacatctgaggtga

SEQ ID NO: 116887 - DNA, 15 bp, Homo sapiens
taaacatctgaggtg

SEQ ID NO: 116888 - DNA, 15 bp, Homo sapiens
ataaacatctgaggt

SEQ ID NO: 116889 - DNA, 15 bp, Homo sapiens
cataaacatctgagg

SEQ ID NO: 116890 - DNA, 15 bp, Homo sapiens
gcataaacatctgag

SEQ ID NO: 116891 - DNA, 15 bp, Homo sapiens
ggcataaacatctga

SEQ ID NO: 116892 - DNA, 15 bp, Homo sapiens
gggcataaacatctg

SEQ ID NO: 116893 - DNA, 15 bp, Homo sapiens
ggggcataaacatct

SEQ ID NO: 116894 - DNA, 15 bp, Homo sapiens
aggggcataaacatc

SEQ ID NO: 116895 - DNA, 15 bp, Homo sapiens
caggggcataaacat

SEQ ID NO: 116896 - DNA, 15 bp, Homo sapiens
ccaggggcataaaca

SEQ ID NO: 116897 - DNA, 15 bp, Homo sapiens
cccaggggcataaac

SEQ ID NO: 116898 - DNA, 15 bp, Homo sapiens
gcccaggggcataaa

SEQ ID NO: 116899 - DNA, 15 bp, Homo sapiens
ggcccaggggcataa

SEQ ID NO: 116900 - DNA, 15 bp, Homo sapiens
aggcccaggggcata

SEQ ID NO: 116901 - DNA, 15 bp, Homo sapiens
caggcccaggggcat

SEQ ID NO: 116902 - DNA, 15 bp, Homo sapiens
tcaggcccaggggca

SEQ ID NO: 116903 - DNA, 15 bp, Homo sapiens
ctcaggcccaggggc

SEQ ID NO: 116904 - DNA, 15 bp, Homo sapiens
cctcaggcccagggg

SEQ ID NO: 116905 - DNA, 15 bp, Homo sapiens
gcctcaggcccaggg

SEQ ID NO: 116906 - DNA, 15 bp, Homo sapiens
tgcctcaggcccagg

SEQ ID NO: 116907 - DNA, 15 bp, Homo sapiens
gtgcctcaggcccag

SEQ ID NO: 116908 - DNA, 15 bp, Homo sapiens
tgtgcctcaggccca

SEQ ID NO: 116909 - DNA, 15 bp, Homo sapiens
ttgtgcctcaggccc

SEQ ID NO: 116910 - DNA, 15 bp, Homo sapiens
tttgtgcctcaggcc

SEQ ID NO: 116911 - DNA, 15 bp, Homo sapiens
ctttgtgcctcaggc

SEQ ID NO: 116912 - DNA, 15 bp, Homo sapiens
actttgtgcctcagg

SEQ ID NO: 116913 - DNA, 15 bp, Homo sapiens
cactttgtgcctcag

SEQ ID NO: 116914 - DNA, 15 bp, Homo sapiens
tcactttgtgcctca

SEQ ID NO: 116915 - DNA, 15 bp, Homo sapiens
gtcactttgtgcctc

SEQ ID NO: 116916 - DNA, 15 bp, Homo sapiens
tgtcactttgtgcct

SEQ ID NO: 116917 - DNA, 15 bp, Homo sapiens
ctgtcactttgtgcc

SEQ ID NO: 116918 - DNA, 15 bp, Homo sapiens
cctgtcactttgtgc

SEQ ID NO: 116919 - DNA, 15 bp, Homo sapiens
ccctgtcactttgtg

SEQ ID NO: 116920 - DNA, 15 bp, Homo sapiens
accctgtcactttgt

SEQ ID NO: 116921 - DNA, 15 bp, Homo sapiens
caccctgtcactttg

SEQ ID NO: 116922 - DNA, 15 bp, Homo sapiens
ccaccctgtcacttt

SEQ ID NO: 116923 - DNA, 15 bp, Homo sapiens
cccaccctgtcactt

SEQ ID NO: 116924 - DNA, 15 bp, Homo sapiens
ccccaccctgtcact

SEQ ID NO: 116925 - DNA, 15 bp, Homo sapiens
tccccaccctgtcac

SEQ ID NO: 116926 - DNA, 15 bp, Homo sapiens
ctccccaccctgtca

SEQ ID NO: 116927 - DNA, 15 bp, Homo sapiens
tctccccaccctgtc

SEQ ID NO: 116928 - DNA, 15 bp, Homo sapiens
atctccccaccctgt

SEQ ID NO: 116929 - DNA, 15 bp, Homo sapiens
catctccccaccctg

SEQ ID NO: 116930 - DNA, 15 bp, Homo sapiens
acatctccccaccct

SEQ ID NO: 116931 - DNA, 15 bp, Homo sapiens
cacatctccccaccc

SEQ ID NO: 116932 - DNA, 15 bp, Homo sapiens
tcacatctccccacc

SEQ ID NO: 116933 - DNA, 15 bp, Homo sapiens
ttcacatctccccac

SEQ ID NO: 116934 - DNA, 15 bp, Homo sapiens
tttcacatctcccca

SEQ ID NO: 116935 - DNA, 15 bp, Homo sapiens
ctttcacatctcccc

SEQ ID NO: 116936 - DNA, 15 bp, Homo sapiens
cctttcacatctccc

SEQ ID NO: 116937 - DNA, 15 bp, Homo sapiens
acctttcacatctcc

SEQ ID NO: 116938 - DNA, 15 bp, Homo sapiens
gacctttcacatctc

SEQ ID NO: 116939 - DNA, 15 bp, Homo sapiens
tgacctttcacatct

SEQ ID NO: 116940 - DNA, 15 bp, Homo sapiens
ttgacctttcacatc

SEQ ID NO: 116941 - DNA, 15 bp, Homo sapiens
cttgacctttcacat

SEQ ID NO: 116942 - DNA, 15 bp, Homo sapiens
ccttgacctttcaca

SEQ ID NO: 116943 - DNA, 15 bp, Homo sapiens
gccttgacctttcac

SEQ ID NO: 116944 - DNA, 15 bp, Homo sapiens
agccttgacctttca

SEQ ID NO: 116945 - DNA, 15 bp, Homo sapiens
cagccttgacctttc

SEQ ID NO: 116946 - DNA, 15 bp, Homo sapiens
acagccttgaccttt

SEQ ID NO: 116947 - DNA, 15 bp, Homo sapiens
gacagccttgacctt

SEQ ID NO: 116948 - DNA, 15 bp, Homo sapiens
tgacagccttgacct

SEQ ID NO: 116949 - DNA, 15 bp, Homo sapiens
atgacagccttgacc

SEQ ID NO: 116950 - DNA, 15 bp, Homo sapiens
aatgacagccttgac

SEQ ID NO: 116951 - DNA, 15 bp, Homo sapiens
caatgacagccttga

SEQ ID NO: 116952 - DNA, 15 bp, Homo sapiens
acaatgacagccttg

SEQ ID NO: 116953 - DNA, 15 bp, Homo sapiens
aacaatgacagcctt

SEQ ID NO: 116954 - DNA, 15 bp, Homo sapiens
aaacaatgacagcct

SEQ ID NO: 116955 - DNA, 15 bp, Homo sapiens
aaaacaatgacagcc

SEQ ID NO: 116956 - DNA, 15 bp, Homo sapiens
gaaaacaatgacagc

SEQ ID NO: 116957 - DNA, 15 bp, Homo sapiens
agaaaacaatgacag

SEQ ID NO: 116958 - DNA, 15 bp, Homo sapiens
cagaaaacaatgaca

SEQ ID NO: 116959 - DNA, 15 bp, Homo sapiens
acagaaaacaatgac

SEQ ID NO: 116960 - DNA, 15 bp, Homo sapiens
cacagaaaacaatga

SEQ ID NO: 116961 - DNA, 15 bp, Homo sapiens
gcacagaaaacaatg

SEQ ID NO: 116962 - DNA, 15 bp, Homo sapiens
tgcacagaaaacaat

SEQ ID NO: 116963 - DNA, 15 bp, Homo sapiens
ttgcacagaaaacaa

SEQ ID NO: 116964 - DNA, 15 bp, Homo sapiens
tttgcacagaaaaca

SEQ ID NO: 116965 - DNA, 15 bp, Homo sapiens
gtttgcacagaaaac

SEQ ID NO: 116966 - DNA, 15 bp, Homo sapiens
tgtttgcacagaaaa

SEQ ID NO: 116967 - DNA, 15 bp, Homo sapiens
ctgtttgcacagaaa

SEQ ID NO: 116968 - DNA, 15 bp, Homo sapiens
gctgtttgcacagaa

SEQ ID NO: 116969 - DNA, 15 bp, Homo sapiens
tgctgtttgcacaga

SEQ ID NO: 116970 - DNA, 15 bp, Homo sapiens
gtgctgtttgcacag

SEQ ID NO: 116971 - DNA, 15 bp, Homo sapiens
ggtgctgtttgcaca

SEQ ID NO: 116972 - DNA, 15 bp, Homo sapiens
cggtgctgtttgcac

SEQ ID NO: 116973 - DNA, 15 bp, Homo sapiens
gcggtgctgtttgca

SEQ ID NO: 116974 - DNA, 15 bp, Homo sapiens
ggcggtgctgtttgc

SEQ ID NO: 116975 - DNA, 15 bp, Homo sapiens
aggcggtgctgtttg

SEQ ID NO: 116976 - DNA, 15 bp, Homo sapiens
caggcggtgctgttt

SEQ ID NO: 116977 - DNA, 15 bp, Homo sapiens
ccaggcggtgctgtt

SEQ ID NO: 116978 - DNA, 15 bp, Homo sapiens
tccaggcggtgctgt

SEQ ID NO: 116979 - DNA, 15 bp, Homo sapiens
ctccaggcggtgctg

SEQ ID NO: 116980 - DNA, 15 bp, Homo sapiens
actccaggcggtgct

SEQ ID NO: 116981 - DNA, 15 bp, Homo sapiens
aactccaggcggtgc

SEQ ID NO: 116982 - DNA, 15 bp, Homo sapiens
caactccaggcggtg

SEQ ID NO: 116983 - DNA, 15 bp, Homo sapiens
gcaactccaggcggt

SEQ ID NO: 116984 - DNA, 15 bp, Homo sapiens
tgcaactccaggcgg

SEQ ID NO: 116985 - DNA, 15 bp, Homo sapiens
gtgcaactccaggcg

SEQ ID NO: 116986 - DNA, 15 bp, Homo sapiens
tgtgcaactccaggc

SEQ ID NO: 116987 - DNA, 15 bp, Homo sapiens
ttgtgcaactccagg

SEQ ID NO: 116988 - DNA, 15 bp, Homo sapiens
gttgtgcaactccag

SEQ ID NO: 116989 - DNA, 15 bp, Homo sapiens
ggttgtgcaactcca

SEQ ID NO: 116990 - DNA, 15 bp, Homo sapiens
aggttgtgcaactcc

SEQ ID NO: 116991 - DNA, 15 bp, Homo sapiens
caggttgtgcaactc

SEQ ID NO: 116992 - DNA, 15 bp, Homo sapiens
ccaggttgtgcaact

SEQ ID NO: 116993 - DNA, 15 bp, Homo sapiens
accaggttgtgcaac

SEQ ID NO: 116994 - DNA, 15 bp, Homo sapiens
caccaggttgtgcaa

SEQ ID NO: 116995 - DNA, 15 bp, Homo sapiens
ccaccaggttgtgca

SEQ ID NO: 116996 - DNA, 15 bp, Homo sapiens
gccaccaggttgtgc

SEQ ID NO: 116997 - DNA, 15 bp, Homo sapiens
agccaccaggttgtg

SEQ ID NO: 116998 - DNA, 15 bp, Homo sapiens
gagccaccaggttgt

SEQ ID NO: 116999 - DNA, 15 bp, Homo sapiens
agagccaccaggttg

SEQ ID NO: 117000 - DNA, 15 bp, Homo sapiens
cagagccaccaggtt

SEQ ID NO: 117001 - DNA, 15 bp, Homo sapiens
tcagagccaccaggt

SEQ ID NO: 117002 - DNA, 15 bp, Homo sapiens
ctcagagccaccagg

SEQ ID NO: 117003 - DNA, 15 bp, Homo sapiens
gctcagagccaccag

SEQ ID NO: 117004 - DNA, 15 bp, Homo sapiens
tgctcagagccacca

SEQ ID NO: 117005 - DNA, 15 bp, Homo sapiens
ctgctcagagccacc

SEQ ID NO: 117006 - DNA, 15 bp, Homo sapiens
cctgctcagagccac

SEQ ID NO: 117007 - DNA, 15 bp, Homo sapiens
ccctgctcagagcca

SEQ ID NO: 117008 - DNA, 15 bp, Homo sapiens
accctgctcagagcc

SEQ ID NO: 117009 - DNA, 15 bp, Homo sapiens
taccctgctcagagc

SEQ ID NO: 117010 - DNA, 15 bp, Homo sapiens
ctaccctgctcagag

SEQ ID NO: 117011 - DNA, 15 bp, Homo sapiens
cctaccctgctcaga

SEQ ID NO: 117012 - DNA, 15 bp, Homo sapiens
tcctaccctgctcag

SEQ ID NO: 117013 - DNA, 15 bp, Homo sapiens
gtcctaccctgctca

SEQ ID NO: 117014 - DNA, 15 bp, Homo sapiens
tgtcctaccctgctc

SEQ ID NO: 117015 - DNA, 15 bp, Homo sapiens
ctgtcctaccctgct

SEQ ID NO: 117016 - DNA, 15 bp, Homo sapiens
tctgtcctaccctgc

SEQ ID NO: 117017 - DNA, 15 bp, Homo sapiens
ctctgtcctaccctg

SEQ ID NO: 117018 - DNA, 15 bp, Homo sapiens
cctctgtcctaccct

SEQ ID NO: 117019 - DNA, 15 bp, Homo sapiens
ccctctgtcctaccc

SEQ ID NO: 117020 - DNA, 15 bp, Homo sapiens
tccctctgtcctacc

SEQ ID NO: 117021 - DNA, 15 bp, Homo sapiens
ctccctctgtcctac

SEQ ID NO: 117022 - DNA, 15 bp, Homo sapiens
cctccctctgtccta

SEQ ID NO: 117023 - DNA, 15 bp, Homo sapiens
gcctccctctgtcct

SEQ ID NO: 117024 - DNA, 15 bp, Homo sapiens
tgcctccctctgtcc

SEQ ID NO: 117025 - DNA, 15 bp, Homo sapiens
ctgcctccctctgtc

SEQ ID NO: 117026 - DNA, 15 bp, Homo sapiens
gctgcctccctctgt

SEQ ID NO: 117027 - DNA, 15 bp, Homo sapiens
ggctgcctccctctg

SEQ ID NO: 117028 - DNA, 15 bp, Homo sapiens
aggctgcctccctct

SEQ ID NO: 117029 - DNA, 15 bp, Homo sapiens
gaggctgcctccctc

SEQ ID NO: 117030 - DNA, 15 bp, Homo sapiens
agaggctgcctccct

SEQ ID NO: 117031 - DNA, 15 bp, Homo sapiens
gagaggctgcctccc

SEQ ID NO: 117032 - DNA, 15 bp, Homo sapiens
tgagaggctgcctcc

SEQ ID NO: 117033 - DNA, 15 bp, Homo sapiens
atgagaggctgcctc

SEQ ID NO: 117034 - DNA, 15 bp, Homo sapiens
aatgagaggctgcct

SEQ ID NO: 117035 - DNA, 15 bp, Homo sapiens
aaatgagaggctgcc

SEQ ID NO: 117036 - DNA, 15 bp, Homo sapiens
caaatgagaggctgc

SEQ ID NO: 117037 - DNA, 15 bp, Homo sapiens
ccaaatgagaggctg

SEQ ID NO: 117038 - DNA, 15 bp, Homo sapiens
tccaaatgagaggct

SEQ ID NO: 117039 - DNA, 15 bp, Homo sapiens
ttccaaatgagaggc

SEQ ID NO: 117040 - DNA, 15 bp, Homo sapiens
tttccaaatgagagg

SEQ ID NO: 117041 - DNA, 15 bp, Homo sapiens
ctttccaaatgagag

SEQ ID NO: 117042 - DNA, 15 bp, Homo sapiens
actttccaaatgaga

SEQ ID NO: 117043 - DNA, 15 bp, Homo sapiens
gactttccaaatgag

SEQ ID NO: 117044 - DNA, 15 bp, Homo sapiens
tgactttccaaatga

SEQ ID NO: 117045 - DNA, 15 bp, Homo sapiens
atgactttccaaatg

SEQ ID NO: 117046 - DNA, 15 bp, Homo sapiens
aatgactttccaaat

SEQ ID NO: 117047 - DNA, 15 bp, Homo sapiens
caatgactttccaaa

SEQ ID NO: 117048 - DNA, 15 bp, Homo sapiens
ccaatgactttccaa

SEQ ID NO: 117049 - DNA, 15 bp, Homo sapiens
tccaatgactttcca

SEQ ID NO: 117050 - DNA, 15 bp, Homo sapiens
ctccaatgactttcc

SEQ ID NO: 117051 - DNA, 15 bp, Homo sapiens
cctccaatgactttc

SEQ ID NO: 117052 - DNA, 15 bp, Homo sapiens
tcctccaatgacttt

SEQ ID NO: 117053 - DNA, 15 bp, Homo sapiens
atcctccaatgactt

SEQ ID NO: 117054 - DNA, 15 bp, Homo sapiens
aatcctccaatgact

SEQ ID NO: 117055 - DNA, 15 bp, Homo sapiens
caatcctccaatgac

SEQ ID NO: 117056 - DNA, 15 bp, Homo sapiens
tcaatcctccaatga

SEQ ID NO: 117057 - DNA, 15 bp, Homo sapiens
atcaatcctccaatg

SEQ ID NO: 117058 - DNA, 15 bp, Homo sapiens
aatcaatcctccaat

SEQ ID NO: 117059 - DNA, 15 bp, Homo sapiens
taatcaatcctccaa

SEQ ID NO: 117060 - DNA, 15 bp, Homo sapiens
ctaatcaatcctcca

SEQ ID NO: 117061 - DNA, 15 bp, Homo sapiens
actaatcaatcctcc

SEQ ID NO: 117062 - DNA, 15 bp, Homo sapiens
aactaatcaatcctc

SEQ ID NO: 117063 - DNA, 15 bp, Homo sapiens
caactaatcaatcct

SEQ ID NO: 117064 - DNA, 15 bp, Homo sapiens
acaactaatcaatcc

SEQ ID NO: 117065 - DNA, 15 bp, Homo sapiens
cacaactaatcaatc

SEQ ID NO: 117066 - DNA, 15 bp, Homo sapiens
acacaactaatcaat

SEQ ID NO: 117067 - DNA, 15 bp, Homo sapiens
cacacaactaatcaa

SEQ ID NO: 117068 - DNA, 15 bp, Homo sapiens
tcacacaactaatca

SEQ ID NO: 117069 - DNA, 15 bp, Homo sapiens
atcacacaactaatc

SEQ ID NO: 117070 - DNA, 15 bp, Homo sapiens
gatcacacaactaat

SEQ ID NO: 117071 - DNA, 15 bp, Homo sapiens
agatcacacaactaa

SEQ ID NO: 117072 - DNA, 15 bp, Homo sapiens
cagatcacacaacta

SEQ ID NO: 117073 - DNA, 15 bp, Homo sapiens
ccagatcacacaact

SEQ ID NO: 117074 - DNA, 15 bp, Homo sapiens
cccagatcacacaac

SEQ ID NO: 117075 - DNA, 15 bp, Homo sapiens
ccccagatcacacaa

SEQ ID NO: 117076 - DNA, 15 bp, Homo sapiens
gccccagatcacaca

SEQ ID NO: 117077 - DNA, 15 bp, Homo sapiens
tgccccagatcacac

SEQ ID NO: 117078 - DNA, 15 bp, Homo sapiens
ctgccccagatcaca

SEQ ID NO: 117079 - DNA, 15 bp, Homo sapiens
cctgccccagatcac

SEQ ID NO: 117080 - DNA, 15 bp, Homo sapiens
acctgccccagatca

SEQ ID NO: 117081 - DNA, 15 bp, Homo sapiens
gacctgccccagatc

SEQ ID NO: 117082 - DNA, 15 bp, Homo sapiens
tgacctgccccagat

SEQ ID NO: 117083 - DNA, 15 bp, Homo sapiens
gtgacctgccccaga

SEQ ID NO: 117084 - DNA, 15 bp, Homo sapiens
ggtgacctgccccag

SEQ ID NO: 117085 - DNA, 15 bp, Homo sapiens
aggtgacctgcccca

SEQ ID NO: 117086 - DNA, 15 bp, Homo sapiens
taggtgacctgcccc

SEQ ID NO: 117087 - DNA, 15 bp, Homo sapiens
ttaggtgacctgccc

SEQ ID NO: 117088 - DNA, 15 bp, Homo sapiens
attaggtgacctgcc

SEQ ID NO: 117089 - DNA, 15 bp, Homo sapiens
gattaggtgacctgc

SEQ ID NO: 117090 - DNA, 15 bp, Homo sapiens
cgattaggtgacctg

SEQ ID NO: 117091 - DNA, 15 bp, Homo sapiens
gcgattaggtgacct

SEQ ID NO: 117092 - DNA, 15 bp, Homo sapiens
agcgattaggtgacc

SEQ ID NO: 117093 - DNA, 15 bp, Homo sapiens
gagcgattaggtgac

SEQ ID NO: 117094 - DNA, 15 bp, Homo sapiens
agagcgattaggtga

SEQ ID NO: 117095 - DNA, 15 bp, Homo sapiens
cagagcgattaggtg

SEQ ID NO: 117096 - DNA, 15 bp, Homo sapiens
tcagagcgattaggt

SEQ ID NO: 117097 - DNA, 15 bp, Homo sapiens
ctcagagcgattagg

SEQ ID NO: 117098 - DNA, 15 bp, Homo sapiens
gctcagagcgattag

SEQ ID NO: 117099 - DNA, 15 bp, Homo sapiens
ggctcagagcgatta

SEQ ID NO: 117100 - DNA, 15 bp, Homo sapiens
aggctcagagcgatt

SEQ ID NO: 117101 - DNA, 15 bp, Homo sapiens
gaggctcagagcgat

SEQ ID NO: 117102 - DNA, 15 bp, Homo sapiens
tgaggctcagagcga

SEQ ID NO: 117103 - DNA, 15 bp, Homo sapiens
ttgaggctcagagcg

SEQ ID NO: 117104 - DNA, 15 bp, Homo sapiens
attgaggctcagagc

SEQ ID NO: 117105 - DNA, 15 bp, Homo sapiens
aattgaggctcagag

SEQ ID NO: 117106 - DNA, 15 bp, Homo sapiens
aaattgaggctcaga

SEQ ID NO: 117107 - DNA, 15 bp, Homo sapiens
aaaattgaggctcag

SEQ ID NO: 117108 - DNA, 15 bp, Homo sapiens
gaaaattgaggctca

SEQ ID NO: 117109 - DNA, 15 bp, Homo sapiens
agaaaattgaggctc

SEQ ID NO: 117110 - DNA, 15 bp, Homo sapiens
gagaaaattgaggct

SEQ ID NO: 117111 - DNA, 15 bp, Homo sapiens
tgagaaaattgaggc

SEQ ID NO: 117112 - DNA, 15 bp, Homo sapiens
atgagaaaattgagg

SEQ ID NO: 117113 - DNA, 15 bp, Homo sapiens
gatgagaaaattgag

SEQ ID NO: 117114 - DNA, 15 bp, Homo sapiens
agatgagaaaattga

SEQ ID NO: 117115 - DNA, 15 bp, Homo sapiens
cagatgagaaaattg

SEQ ID NO: 117116 - DNA, 15 bp, Homo sapiens
gcagatgagaaaatt

SEQ ID NO: 117117 - DNA, 15 bp, Homo sapiens
tgcagatgagaaaat

SEQ ID NO: 117118 - DNA, 15 bp, Homo sapiens
ttgcagatgagaaaa

SEQ ID NO: 117119 - DNA, 15 bp, Homo sapiens
tttgcagatgagaaa

SEQ ID NO: 117120 - DNA, 15 bp, Homo sapiens
ctttgcagatgagaa

SEQ ID NO: 117121 - DNA, 15 bp, Homo sapiens
actttgcagatgaga

SEQ ID NO: 117122 - DNA, 15 bp, Homo sapiens
cactttgcagatgag

SEQ ID NO: 117123 - DNA, 15 bp, Homo sapiens
tcactttgcagatga

SEQ ID NO: 117124 - DNA, 15 bp, Homo sapiens
ctcactttgcagatg

SEQ ID NO: 117125 - DNA, 15 bp, Homo sapiens
tctcactttgcagat

SEQ ID NO: 117126 - DNA, 15 bp, Homo sapiens
ttctcactttgcaga

SEQ ID NO: 117127 - DNA, 15 bp, Homo sapiens
tttctcactttgcag

SEQ ID NO: 117128 - DNA, 15 bp, Homo sapiens
ttttctcactttgca

SEQ ID NO: 117129 - DNA, 15 bp, Homo sapiens
attttctcactttgc

SEQ ID NO: 117130 - DNA, 15 bp, Homo sapiens
tattttctcactttg

SEQ ID NO: 117131 - DNA, 15 bp, Homo sapiens
ttattttctcacttt

SEQ ID NO: 117132 - DNA, 15 bp, Homo sapiens
gttattttctcactt

SEQ ID NO: 117133 - DNA, 15 bp, Homo sapiens
tgttattttctcact

SEQ ID NO: 117134 - DNA, 15 bp, Homo sapiens
gtgttattttctcac

SEQ ID NO: 117135 - DNA, 15 bp, Homo sapiens
ggtgttattttctca

SEQ ID NO: 117136 - DNA, 15 bp, Homo sapiens
aggtgttattttctc

SEQ ID NO: 117137 - DNA, 15 bp, Homo sapiens
taggtgttattttct

SEQ ID NO: 117138 - DNA, 15 bp, Homo sapiens
gtaggtgttattttc

SEQ ID NO: 117139 - DNA, 15 bp, Homo sapiens
ggtaggtgttatttt

SEQ ID NO: 117140 - DNA, 15 bp, Homo sapiens
gggtaggtgttattt

SEQ ID NO: 117141 - DNA, 15 bp, Homo sapiens
ggggtaggtgttatt

SEQ ID NO: 117142 - DNA, 15 bp, Homo sapiens
tggggtaggtgttat

SEQ ID NO: 117143 - DNA, 15 bp, Homo sapiens
ttggggtaggtgtta

SEQ ID NO: 117144 - DNA, 15 bp, Homo sapiens
tttggggtaggtgtt

SEQ ID NO: 117145 - DNA, 15 bp, Homo sapiens
ctttggggtaggtgt

SEQ ID NO: 117146 - DNA, 15 bp, Homo sapiens
gctttggggtaggtg

SEQ ID NO: 117147 - DNA, 15 bp, Homo sapiens
ggctttggggtaggt

SEQ ID NO: 117148 - DNA, 15 bp, Homo sapiens
cggctttggggtagg

SEQ ID NO: 117149 - DNA, 15 bp, Homo sapiens
ccggctttggggtag

SEQ ID NO: 117150 - DNA, 15 bp, Homo sapiens
accggctttggggta

SEQ ID NO: 117151 - DNA, 15 bp, Homo sapiens
aaccggctttggggt

SEQ ID NO: 117152 - DNA, 15 bp, Homo sapiens
gaaccggctttgggg

SEQ ID NO: 117153 - DNA, 15 bp, Homo sapiens
agaaccggctttggg

SEQ ID NO: 117154 - DNA, 15 bp, Homo sapiens
cagaaccggctttgg

SEQ ID NO: 117155 - DNA, 15 bp, Homo sapiens
ccagaaccggctttg

SEQ ID NO: 117156 - DNA, 15 bp, Homo sapiens
cccagaaccggcttt

SEQ ID NO: 117157 - DNA, 15 bp, Homo sapiens
ccccagaaccggctt

SEQ ID NO: 117158 - DNA, 15 bp, Homo sapiens
tccccagaaccggct

SEQ ID NO: 117159 - DNA, 15 bp, Homo sapiens
gtccccagaaccggc

SEQ ID NO: 117160 - DNA, 15 bp, Homo sapiens
agtccccagaaccgg

SEQ ID NO: 117161 - DNA, 15 bp, Homo sapiens
tagtccccagaaccg

SEQ ID NO: 117162 - DNA, 15 bp, Homo sapiens
ttagtccccagaacc

SEQ ID NO: 117163 - DNA, 15 bp, Homo sapiens
cttagtccccagaac

SEQ ID NO: 117164 - DNA, 15 bp, Homo sapiens
tcttagtccccagaa

SEQ ID NO: 117165 - DNA, 15 bp, Homo sapiens
ttcttagtccccaga

SEQ ID NO: 117166 - DNA, 15 bp, Homo sapiens
attcttagtccccag

SEQ ID NO: 117167 - DNA, 15 bp, Homo sapiens
cattcttagtcccca

SEQ ID NO: 117168 - DNA, 15 bp, Homo sapiens
acattcttagtcccc

SEQ ID NO: 117169 - DNA, 15 bp, Homo sapiens
aacattcttagtccc

SEQ ID NO: 117170 - DNA, 15 bp, Homo sapiens
aaacattcttagtcc

SEQ ID NO: 117171 - DNA, 15 bp, Homo sapiens
taaacattcttagtc

SEQ ID NO: 117172 - DNA, 15 bp, Homo sapiens
ataaacattcttagt

SEQ ID NO: 117173 - DNA, 15 bp, Homo sapiens
cataaacattcttag

SEQ ID NO: 117174 - DNA, 15 bp, Homo sapiens
tcataaacattctta

SEQ ID NO: 117175 - DNA, 15 bp, Homo sapiens
ttcataaacattctt

SEQ ID NO: 117176 - DNA, 15 bp, Homo sapiens
gttcataaacattct

SEQ ID NO: 117177 - DNA, 15 bp, Homo sapiens
tgttcataaacattc

SEQ ID NO: 117178 - DNA, 15 bp, Homo sapiens
gtgttcataaacatt

SEQ ID NO: 117179 - DNA, 15 bp, Homo sapiens
ggtgttcataaacat

SEQ ID NO: 117180 - DNA, 15 bp, Homo sapiens
aggtgttcataaaca

SEQ ID NO: 117181 - DNA, 15 bp, Homo sapiens
gaggtgttcataaac

SEQ ID NO: 117182 - DNA, 15 bp, Homo sapiens
agaggtgttcataaa

SEQ ID NO: 117183 - DNA, 15 bp, Homo sapiens
cagaggtgttcataa

SEQ ID NO: 117184 - DNA, 15 bp, Homo sapiens
gcagaggtgttcata

SEQ ID NO: 117185 - DNA, 15 bp, Homo sapiens
agcagaggtgttcat

SEQ ID NO: 117186 - DNA, 15 bp, Homo sapiens
tagcagaggtgttca

SEQ ID NO: 117187 - DNA, 15 bp, Homo sapiens
atagcagaggtgttc

SEQ ID NO: 117188 - DNA, 15 bp, Homo sapiens
catagcagaggtgtt

SEQ ID NO: 117189 - DNA, 15 bp, Homo sapiens
gcatagcagaggtgt

SEQ ID NO: 117190 - DNA, 15 bp, Homo sapiens
ggcatagcagaggtg

SEQ ID NO: 117191 - DNA, 15 bp, Homo sapiens
tggcatagcagaggt

SEQ ID NO: 117192 - DNA, 15 bp, Homo sapiens
ctggcatagcagagg

SEQ ID NO: 117193 - DNA, 15 bp, Homo sapiens
gctggcatagcagag

SEQ ID NO: 117194 - DNA, 15 bp, Homo sapiens
agctggcatagcaga

SEQ ID NO: 117195 - DNA, 15 bp, Homo sapiens
tagctggcatagcag

SEQ ID NO: 117196 - DNA, 15 bp, Homo sapiens
ttagctggcatagca

SEQ ID NO: 117197 - DNA, 15 bp, Homo sapiens
attagctggcatagc

SEQ ID NO: 117198 - DNA, 15 bp, Homo sapiens
cattagctggcatag

SEQ ID NO: 117199 - DNA, 15 bp, Homo sapiens
gcattagctggcata

SEQ ID NO: 117200 - DNA, 15 bp, Homo sapiens
ggcattagctggcat

SEQ ID NO: 117201 - DNA, 15 bp, Homo sapiens
tggcattagctggca

SEQ ID NO: 117202 - DNA, 15 bp, Homo sapiens
ctggcattagctggc

SEQ ID NO: 117203 - DNA, 15 bp, Homo sapiens
actggcattagctgg

SEQ ID NO: 117204 - DNA, 15 bp, Homo sapiens
gactggcattagctg

SEQ ID NO: 117205 - DNA, 15 bp, Homo sapiens
tgactggcattagct

SEQ ID NO: 117206 - DNA, 15 bp, Homo sapiens
ctgactggcattagc

SEQ ID NO: 117207 - DNA, 15 bp, Homo sapiens
cctgactggcattag

SEQ ID NO: 117208 - DNA, 15 bp, Homo sapiens
ccctgactggcatta

SEQ ID NO: 117209 - DNA, 15 bp, Homo sapiens
accctgactggcatt

SEQ ID NO: 117210 - DNA, 15 bp, Homo sapiens
caccctgactggcat

SEQ ID NO: 117211 - DNA, 15 bp, Homo sapiens
tcaccctgactggca

SEQ ID NO: 117212 - DNA, 15 bp, Homo sapiens
ctcaccctgactggc

SEQ ID NO: 117213 - DNA, 15 bp, Homo sapiens
cctcaccctgactgg

SEQ ID NO: 117214 - DNA, 15 bp, Homo sapiens
acctcaccctgactg

SEQ ID NO: 117215 - DNA, 15 bp, Homo sapiens
cacctcaccctgact

SEQ ID NO: 117216 - DNA, 15 bp, Homo sapiens
ccacctcaccctgac

SEQ ID NO: 117217 - DNA, 15 bp, Homo sapiens
tccacctcaccctga

SEQ ID NO: 117218 - DNA, 15 bp, Homo sapiens
ctccacctcaccctg

SEQ ID NO: 117219 - DNA, 15 bp, Homo sapiens
tctccacctcaccct

SEQ ID NO: 117220 - DNA, 15 bp, Homo sapiens
ttctccacctcaccc

SEQ ID NO: 117221 - DNA, 15 bp, Homo sapiens
cttctccacctcacc

SEQ ID NO: 117222 - DNA, 15 bp, Homo sapiens
ccttctccacctcac

SEQ ID NO: 117223 - DNA, 15 bp, Homo sapiens
cccttctccacctca

SEQ ID NO: 117224 - DNA, 15 bp, Homo sapiens
tcccttctccacctc

SEQ ID NO: 117225 - DNA, 15 bp, Homo sapiens
ctcccttctccacct

SEQ ID NO: 117226 - DNA, 15 bp, Homo sapiens
actcccttctccacc

SEQ ID NO: 117227 - DNA, 15 bp, Homo sapiens
tactcccttctccac

SEQ ID NO: 117228 - DNA, 15 bp, Homo sapiens
ctactcccttctcca

SEQ ID NO: 117229 - DNA, 15 bp, Homo sapiens
cctactcccttctcc

SEQ ID NO: 117230 - DNA, 15 bp, Homo sapiens
ccctactcccttctc

SEQ ID NO: 117231 - DNA, 15 bp, Homo sapiens
cccctactcccttct

SEQ ID NO: 117232 - DNA, 15 bp, Homo sapiens
tcccctactcccttc

SEQ ID NO: 117233 - DNA, 15 bp, Homo sapiens
ctcccctactccctt

SEQ ID NO: 117234 - DNA, 15 bp, Homo sapiens
tctcccctactccct

SEQ ID NO: 117235 - DNA, 15 bp, Homo sapiens
ctctcccctactccc

SEQ ID NO: 117236 - DNA, 15 bp, Homo sapiens
cctctcccctactcc

SEQ ID NO: 117237 - DNA, 15 bp, Homo sapiens
tcctctcccctactc

SEQ ID NO: 117238 - DNA, 15 bp, Homo sapiens
ctcctctcccctact

SEQ ID NO: 117239 - DNA, 15 bp, Homo sapiens
tctcctctcccctac

SEQ ID NO: 117240 - DNA, 15 bp, Homo sapiens
ctctcctctccccta

SEQ ID NO: 117241 - DNA, 15 bp, Homo sapiens
actctcctctcccct

SEQ ID NO: 117242 - DNA, 15 bp, Homo sapiens
tactctcctctcccc

SEQ ID NO: 117243 - DNA, 15 bp, Homo sapiens
gtactctcctctccc

SEQ ID NO: 117244 - DNA, 15 bp, Homo sapiens
agtactctcctctcc

SEQ ID NO: 117245 - DNA, 15 bp, Homo sapiens
cagtactctcctctc

SEQ ID NO: 117246 - DNA, 15 bp, Homo sapiens
tcagtactctcctct

SEQ ID NO: 117247 - DNA, 15 bp, Homo sapiens
atcagtactctcctc

SEQ ID NO: 117248 - DNA, 15 bp, Homo sapiens
catcagtactctcct

SEQ ID NO: 117249 - DNA, 15 bp, Homo sapiens
ccatcagtactctcc

SEQ ID NO: 117250 - DNA, 15 bp, Homo sapiens
cccatcagtactctc

SEQ ID NO: 117251 - DNA, 15 bp, Homo sapiens
gcccatcagtactct

SEQ ID NO: 117252 - DNA, 15 bp, Homo sapiens
tgcccatcagtactc

SEQ ID NO: 117253 - DNA, 15 bp, Homo sapiens
ctgcccatcagtact

SEQ ID NO: 117254 - DNA, 15 bp, Homo sapiens
cctgcccatcagtac

SEQ ID NO: 117255 - DNA, 15 bp, Homo sapiens
ccctgcccatcagta

SEQ ID NO: 117256 - DNA, 15 bp, Homo sapiens
cccctgcccatcagt

SEQ ID NO: 117257 - DNA, 15 bp, Homo sapiens
gcccctgcccatcag

SEQ ID NO: 117258 - DNA, 15 bp, Homo sapiens
tgcccctgcccatca

SEQ ID NO: 117259 - DNA, 15 bp, Homo sapiens
ctgcccctgcccatc

SEQ ID NO: 117260 - DNA, 15 bp, Homo sapiens
cctgcccctgcccat

SEQ ID NO: 117261 - DNA, 15 bp, Homo sapiens
tcctgcccctgccca

SEQ ID NO: 117262 - DNA, 15 bp, Homo sapiens
atcctgcccctgccc

SEQ ID NO: 117263 - DNA, 15 bp, Homo sapiens
catcctgcccctgcc

SEQ ID NO: 117264 - DNA, 15 bp, Homo sapiens
ccatcctgcccctgc

SEQ ID NO: 117265 - DNA, 15 bp, Homo sapiens
cccatcctgcccctg

SEQ ID NO: 117266 - DNA, 15 bp, Homo sapiens
tcccatcctgcccct

SEQ ID NO: 117267 - DNA, 15 bp, Homo sapiens
ctcccatcctgcccc

SEQ ID NO: 117268 - DNA, 15 bp, Homo sapiens
tctcccatcctgccc

SEQ ID NO: 117269 - DNA, 15 bp, Homo sapiens
ctctcccatcctgcc

SEQ ID NO: 117270 - DNA, 15 bp, Homo sapiens
cctctcccatcctgc

SEQ ID NO: 117271 - DNA, 15 bp, Homo sapiens
tcctctcccatcctg

SEQ ID NO: 117272 - DNA, 15 bp, Homo sapiens
ttcctctcccatcct

SEQ ID NO: 117273 - DNA, 15 bp, Homo sapiens
cttcctctcccatcc

SEQ ID NO: 117274 - DNA, 15 bp, Homo sapiens
ccttcctctcccatc

SEQ ID NO: 117275 - DNA, 15 bp, Homo sapiens
tccttcctctcccat

SEQ ID NO: 117276 - DNA, 15 bp, Homo sapiens
gtccttcctctccca

SEQ ID NO: 117277 - DNA, 15 bp, Homo sapiens
tgtccttcctctccc

SEQ ID NO: 117278 - DNA, 15 bp, Homo sapiens
gtgtccttcctctcc

SEQ ID NO: 117279 - DNA, 15 bp, Homo sapiens
tgtgtccttcctctc

SEQ ID NO: 117280 - DNA, 15 bp, Homo sapiens
gtgtgtccttcctct

SEQ ID NO: 117281 - DNA, 15 bp, Homo sapiens
agtgtgtccttcctc

SEQ ID NO: 117282 - DNA, 15 bp, Homo sapiens
aagtgtgtccttcct

SEQ ID NO: 117283 - DNA, 15 bp, Homo sapiens
gaagtgtgtccttcc

SEQ ID NO: 117284 - DNA, 15 bp, Homo sapiens
agaagtgtgtccttc

SEQ ID NO: 117285 - DNA, 15 bp, Homo sapiens
cagaagtgtgtcctt

SEQ ID NO: 117286 - DNA, 15 bp, Homo sapiens
gcagaagtgtgtcct

SEQ ID NO: 117287 - DNA, 15 bp, Homo sapiens
agcagaagtgtgtcc

SEQ ID NO: 117288 - DNA, 15 bp, Homo sapiens
gagcagaagtgtgtc

SEQ ID NO: 117289 - DNA, 15 bp, Homo sapiens
tgagcagaagtgtgt

SEQ ID NO: 117290 - DNA, 15 bp, Homo sapiens
gtgagcagaagtgtg

SEQ ID NO: 117291 - DNA, 15 bp, Homo sapiens
tgtgagcagaagtgt

SEQ ID NO: 117292 - DNA, 15 bp, Homo sapiens
gtgtgagcagaagtg

SEQ ID NO: 117293 - DNA, 15 bp, Homo sapiens
agtgtgagcagaagt

SEQ ID NO: 117294 - DNA, 15 bp, Homo sapiens
cagtgtgagcagaag

SEQ ID NO: 117295 - DNA, 15 bp, Homo sapiens
ccagtgtgagcagaa

SEQ ID NO: 117296 - DNA, 15 bp, Homo sapiens
gccagtgtgagcaga

SEQ ID NO: 117297 - DNA, 15 bp, Homo sapiens
ggccagtgtgagcag

SEQ ID NO: 117298 - DNA, 15 bp, Homo sapiens
gggccagtgtgagca

SEQ ID NO: 117299 - DNA, 15 bp, Homo sapiens
ggggccagtgtgagc

SEQ ID NO: 117300 - DNA, 15 bp, Homo sapiens
tggggccagtgtgag

SEQ ID NO: 117301 - DNA, 15 bp, Homo sapiens
ctggggccagtgtga

SEQ ID NO: 117302 - DNA, 15 bp, Homo sapiens
cctggggccagtgtg

SEQ ID NO: 117303 - DNA, 15 bp, Homo sapiens
acctggggccagtgt

SEQ ID NO: 117304 - DNA, 15 bp, Homo sapiens
gacctggggccagtg

SEQ ID NO: 117305 - DNA, 15 bp, Homo sapiens
agacctggggccagt

SEQ ID NO: 117306 - DNA, 15 bp, Homo sapiens
aagacctggggccag

SEQ ID NO: 117307 - DNA, 15 bp, Homo sapiens
taagacctggggcca

SEQ ID NO: 117308 - DNA, 15 bp, Homo sapiens
ctaagacctggggcc

SEQ ID NO: 117309 - DNA, 15 bp, Homo sapiens
tctaagacctggggc

SEQ ID NO: 117310 - DNA, 15 bp, Homo sapiens
ttctaagacctgggg

SEQ ID NO: 117311 - DNA, 15 bp, Homo sapiens
gttctaagacctggg

SEQ ID NO: 117312 - DNA, 15 bp, Homo sapiens
tgttctaagacctgg

SEQ ID NO: 117313 - DNA, 15 bp, Homo sapiens
ttgttctaagacctg

SEQ ID NO: 117314 - DNA, 15 bp, Homo sapiens
tttgttctaagacct

SEQ ID NO: 117315 - DNA, 15 bp, Homo sapiens
ctttgttctaagacc

SEQ ID NO: 117316 - DNA, 15 bp, Homo sapiens
gctttgttctaagac

SEQ ID NO: 117317 - DNA, 15 bp, Homo sapiens
tgctttgttctaaga

SEQ ID NO: 117318 - DNA, 15 bp, Homo sapiens
ctgctttgttctaag

SEQ ID NO: 117319 - DNA, 15 bp, Homo sapiens
tctgctttgttctaa

SEQ ID NO: 117320 - DNA, 15 bp, Homo sapiens
ttctgctttgttcta

SEQ ID NO: 117321 - DNA, 15 bp, Homo sapiens
cttctgctttgttct

SEQ ID NO: 117322 - DNA, 15 bp, Homo sapiens
gcttctgctttgttc

SEQ ID NO: 117323 - DNA, 15 bp, Homo sapiens
tgcttctgctttgtt

SEQ ID NO: 117324 - DNA, 15 bp, Homo sapiens
gtgcttctgctttgt

SEQ ID NO: 117325 - DNA, 15 bp, Homo sapiens
agtgcttctgctttg

SEQ ID NO: 117326 - DNA, 15 bp, Homo sapiens
gagtgcttctgcttt

SEQ ID NO: 117327 - DNA, 15 bp, Homo sapiens
tgagtgcttctgctt

SEQ ID NO: 117328 - DNA, 15 bp, Homo sapiens
gtgagtgcttctgct

SEQ ID NO: 117329 - DNA, 15 bp, Homo sapiens
cgtgagtgcttctgc

SEQ ID NO: 117330 - DNA, 15 bp, Homo sapiens
ccgtgagtgcttctg

SEQ ID NO: 117331 - DNA, 15 bp, Homo sapiens
cccgtgagtgcttct

SEQ ID NO: 117332 - DNA, 15 bp, Homo sapiens
gcccgtgagtgcttc

SEQ ID NO: 117333 - DNA, 15 bp, Homo sapiens
agcccgtgagtgctt

SEQ ID NO: 117334 - DNA, 15 bp, Homo sapiens
aagcccgtgagtgct

SEQ ID NO: 117335 - DNA, 15 bp, Homo sapiens
caagcccgtgagtgc

SEQ ID NO: 117336 - DNA, 15 bp, Homo sapiens
tcaagcccgtgagtg

SEQ ID NO: 117337 - DNA, 15 bp, Homo sapiens
ttcaagcccgtgagt

SEQ ID NO: 117338 - DNA, 15 bp, Homo sapiens
attcaagcccgtgag

SEQ ID NO: 117339 - DNA, 15 bp, Homo sapiens
aattcaagcccgtga

SEQ ID NO: 117340 - DNA, 15 bp, Homo sapiens
caattcaagcccgtg

SEQ ID NO: 117341 - DNA, 15 bp, Homo sapiens
ccaattcaagcccgt

SEQ ID NO: 117342 - DNA, 15 bp, Homo sapiens
cccaattcaagcccg

SEQ ID NO: 117343 - DNA, 15 bp, Homo sapiens
acccaattcaagccc

SEQ ID NO: 117344 - DNA, 15 bp, Homo sapiens
gacccaattcaagcc

SEQ ID NO: 117345 - DNA, 15 bp, Homo sapiens
tgacccaattcaagc

SEQ ID NO: 117346 - DNA, 15 bp, Homo sapiens
ctgacccaattcaag

SEQ ID NO: 117347 - DNA, 15 bp, Homo sapiens
cctgacccaattcaa

SEQ ID NO: 117348 - DNA, 15 bp, Homo sapiens
acctgacccaattca

SEQ ID NO: 117349 - DNA, 15 bp, Homo sapiens
cacctgacccaattc

SEQ ID NO: 117350 - DNA, 15 bp, Homo sapiens
ccacctgacccaatt

SEQ ID NO: 117351 - DNA, 15 bp, Homo sapiens
cccacctgacccaat

SEQ ID NO: 117352 - DNA, 15 bp, Homo sapiens
ccccacctgacccaa

SEQ ID NO: 117353 - DNA, 15 bp, Homo sapiens
gccccacctgaccca

SEQ ID NO: 117354 - DNA, 15 bp, Homo sapiens
ggccccacctgaccc

SEQ ID NO: 117355 - DNA, 15 bp, Homo sapiens
aggccccacctgacc

SEQ ID NO: 117356 - DNA, 15 bp, Homo sapiens
gaggccccacctgac

SEQ ID NO: 117357 - DNA, 15 bp, Homo sapiens
ggaggccccacctga

SEQ ID NO: 117358 - DNA, 15 bp, Homo sapiens
gggaggccccacctg

SEQ ID NO: 117359 - DNA, 15 bp, Homo sapiens
tgggaggccccacct

SEQ ID NO: 117360 - DNA, 15 bp, Homo sapiens
ttgggaggccccacc

SEQ ID NO: 117361 - DNA, 15 bp, Homo sapiens
cttgggaggccccac

SEQ ID NO: 117362 - DNA, 15 bp, Homo sapiens
ccttgggaggcccca

SEQ ID NO: 117363 - DNA, 15 bp, Homo sapiens
gccttgggaggcccc

SEQ ID NO: 117364 - DNA, 15 bp, Homo sapiens
tgccttgggaggccc

SEQ ID NO: 117365 - DNA, 15 bp, Homo sapiens
ttgccttgggaggcc

SEQ ID NO: 117366 - DNA, 15 bp, Homo sapiens
tttgccttgggaggc

SEQ ID NO: 117367 - DNA, 15 bp, Homo sapiens
gtttgccttgggagg

SEQ ID NO: 117368 - DNA, 15 bp, Homo sapiens
ggtttgccttgggag

SEQ ID NO: 117369 - DNA, 15 bp, Homo sapiens
gggtttgccttggga

SEQ ID NO: 117370 - DNA, 15 bp, Homo sapiens
ggggtttgccttggg

SEQ ID NO: 117371 - DNA, 15 bp, Homo sapiens
aggggtttgccttgg

SEQ ID NO: 117372 - DNA, 15 bp, Homo sapiens
taggggtttgccttg

SEQ ID NO: 117373 - DNA, 15 bp, Homo sapiens
ctaggggtttgcctt

SEQ ID NO: 117374 - DNA, 15 bp, Homo sapiens
gctaggggtttgcct

SEQ ID NO: 117375 - DNA, 15 bp, Homo sapiens
ggctaggggtttgcc

SEQ ID NO: 117376 - DNA, 15 bp, Homo sapiens
gggctaggggtttgc

SEQ ID NO: 117377 - DNA, 15 bp, Homo sapiens
tgggctaggggtttg

SEQ ID NO: 117378 - DNA, 15 bp, Homo sapiens
ctgggctaggggttt

SEQ ID NO: 117379 - DNA, 15 bp, Homo sapiens
cctgggctaggggtt

SEQ ID NO: 117380 - DNA, 15 bp, Homo sapiens
ccctgggctaggggt

SEQ ID NO: 117381 - DNA, 15 bp, Homo sapiens
cccctgggctagggg

SEQ ID NO: 117382 - DNA, 15 bp, Homo sapiens
acccctgggctaggg

SEQ ID NO: 117383 - DNA, 15 bp, Homo sapiens
gacccctgggctagg

SEQ ID NO: 117384 - DNA, 15 bp, Homo sapiens
ggacccctgggctag

SEQ ID NO: 117385 - DNA, 15 bp, Homo sapiens
gggacccctgggcta

SEQ ID NO: 117386 - DNA, 15 bp, Homo sapiens
ggggacccctgggct

SEQ ID NO: 117387 - DNA, 15 bp, Homo sapiens
tggggacccctgggc

SEQ ID NO: 117388 - DNA, 15 bp, Homo sapiens
ttggggacccctggg

SEQ ID NO: 117389 - DNA, 15 bp, Homo sapiens
gttggggacccctgg

SEQ ID NO: 117390 - DNA, 15 bp, Homo sapiens
ggttggggacccctg

SEQ ID NO: 117391 - DNA, 15 bp, Homo sapiens
gggttggggacccct

SEQ ID NO: 117392 - DNA, 15 bp, Homo sapiens
ggggttggggacccc

SEQ ID NO: 117393 - DNA, 15 bp, Homo sapiens
gggggttggggaccc

SEQ ID NO: 117394 - DNA, 15 bp, Homo sapiens
tgggggttggggacc

SEQ ID NO: 117395 - DNA, 15 bp, Homo sapiens
ttgggggttggggac

SEQ ID NO: 117396 - DNA, 15 bp, Homo sapiens
cttgggggttgggga

SEQ ID NO: 117397 - DNA, 15 bp, Homo sapiens
acttgggggttgggg

SEQ ID NO: 117398 - DNA, 15 bp, Homo sapiens
gacttgggggttggg

SEQ ID NO: 117399 - DNA, 15 bp, Homo sapiens
tgacttgggggttgg

SEQ ID NO: 117400 - DNA, 15 bp, Homo sapiens
atgacttgggggttg

SEQ ID NO: 117401 - DNA, 15 bp, Homo sapiens
tatgacttgggggtt

SEQ ID NO: 117402 - DNA, 15 bp, Homo sapiens
ctatgacttgggggt

SEQ ID NO: 117403 - DNA, 15 bp, Homo sapiens
tctatgacttggggg

SEQ ID NO: 117404 - DNA, 15 bp, Homo sapiens
atctatgacttgggg

SEQ ID NO: 117405 - DNA, 15 bp, Homo sapiens
tatctatgacttggg

SEQ ID NO: 117406 - DNA, 15 bp, Homo sapiens
ctatctatgacttgg

SEQ ID NO: 117407 - DNA, 15 bp, Homo sapiens
cctatctatgacttg

SEQ ID NO: 117408 - DNA, 15 bp, Homo sapiens
acctatctatgactt

SEQ ID NO: 117409 - DNA, 15 bp, Homo sapiens
tacctatctatgact

SEQ ID NO: 117410 - DNA, 15 bp, Homo sapiens
gtacctatctatgac

SEQ ID NO: 117411 - DNA, 15 bp, Homo sapiens
agtacctatctatga

SEQ ID NO: 117412 - DNA, 15 bp, Homo sapiens
cagtacctatctatg

SEQ ID NO: 117413 - DNA, 15 bp, Homo sapiens
ccagtacctatctat

SEQ ID NO: 117414 - DNA, 15 bp, Homo sapiens
accagtacctatcta

SEQ ID NO: 117415 - DNA, 15 bp, Homo sapiens
gaccagtacctatct

SEQ ID NO: 117416 - DNA, 15 bp, Homo sapiens
ggaccagtacctatc

SEQ ID NO: 117417 - DNA, 15 bp, Homo sapiens
tggaccagtacctat

SEQ ID NO: 117418 - DNA, 15 bp, Homo sapiens
atggaccagtaccta

SEQ ID NO: 117419 - DNA, 15 bp, Homo sapiens
catggaccagtacct

SEQ ID NO: 117420 - DNA, 15 bp, Homo sapiens
ccatggaccagtacc

SEQ ID NO: 117421 - DNA, 15 bp, Homo sapiens
tccatggaccagtac

SEQ ID NO: 117422 - DNA, 15 bp, Homo sapiens
gtccatggaccagta

SEQ ID NO: 117423 - DNA, 15 bp, Homo sapiens
agtccatggaccagt

SEQ ID NO: 117424 - DNA, 15 bp, Homo sapiens
cagtccatggaccag

SEQ ID NO: 117425 - DNA, 15 bp, Homo sapiens
acagtccatggacca

SEQ ID NO: 117426 - DNA, 15 bp, Homo sapiens
aacagtccatggacc

SEQ ID NO: 117427 - DNA, 15 bp, Homo sapiens
taacagtccatggac

SEQ ID NO: 117428 - DNA, 15 bp, Homo sapiens
cctaacagtccatgg

SEQ ID NO: 117429 - DNA, 15 bp, Homo sapiens
tcctaacagtccatg

SEQ ID NO: 117430 - DNA, 15 bp, Homo sapiens
ctcctaacagtccat

SEQ ID NO: 117431 - DNA, 15 bp, Homo sapiens
gctcctaacagtcca

SEQ ID NO: 117432 - DNA, 15 bp, Homo sapiens
ggctcctaacagtcc

SEQ ID NO: 117433 - DNA, 15 bp, Homo sapiens
cggctcctaacagtc

SEQ ID NO: 117434 - DNA, 15 bp, Homo sapiens
ccggctcctaacagt

SEQ ID NO: 117435 - DNA, 15 bp, Homo sapiens
cccggctcctaacag

SEQ ID NO: 117436 - DNA, 15 bp, Homo sapiens
gcccggctcctaaca

SEQ ID NO: 117437 - DNA, 15 bp, Homo sapiens
agcccggctcctaac

SEQ ID NO: 117438 - DNA, 15 bp, Homo sapiens
cagcccggctcctaa

SEQ ID NO: 117439 - DNA, 15 bp, Homo sapiens
gcagcccggctccta

SEQ ID NO: 117440 - DNA, 15 bp, Homo sapiens
tgcagcccggctcct

SEQ ID NO: 117441 - DNA, 15 bp, Homo sapiens
gtgcagcccggctcc

SEQ ID NO: 117442 - DNA, 15 bp, Homo sapiens
tgtgcagcccggctc

SEQ ID NO: 117443 - DNA, 15 bp, Homo sapiens
ctgtgcagcccggct

SEQ ID NO: 117444 - DNA, 15 bp, Homo sapiens
gctgtgcagcccggc

SEQ ID NO: 117445 - DNA, 15 bp, Homo sapiens
tgctgtgcagcccgg

SEQ ID NO: 117446 - DNA, 15 bp, Homo sapiens
gtgctgtgcagcccg

SEQ ID NO: 117447 - DNA, 15 bp, Homo sapiens
cgtgctgtgcagccc

SEQ ID NO: 117448 - DNA, 15 bp, Homo sapiens
tcgtgctgtgcagcc

SEQ ID NO: 117449 - DNA, 15 bp, Homo sapiens
ttcgtgctgtgcagc

SEQ ID NO: 117450 - DNA, 15 bp, Homo sapiens
cttcgtgctgtgcag

SEQ ID NO: 117451 - DNA, 15 bp, Homo sapiens
acttcgtgctgtgca

SEQ ID NO: 117452 - DNA, 15 bp, Homo sapiens
cacttcgtgctgtgc

SEQ ID NO: 117453 - DNA, 15 bp, Homo sapiens
tcacttcgtgctgtg

SEQ ID NO: 117454 - DNA, 15 bp, Homo sapiens
ctcacttcgtgctgt

SEQ ID NO: 117455 - DNA, 15 bp, Homo sapiens
actcacttcgtgctg

SEQ ID NO: 117456 - DNA, 15 bp, Homo sapiens
cactcacttcgtgct

SEQ ID NO: 117457 - DNA, 15 bp, Homo sapiens
ccactcacttcgtgc

SEQ ID NO: 117458 - DNA, 15 bp, Homo sapiens
accactcacttcgtg

SEQ ID NO: 117459 - DNA, 15 bp, Homo sapiens
caccactcacttcgt

SEQ ID NO: 117460 - DNA, 15 bp, Homo sapiens
ccaccactcacttcg

SEQ ID NO: 117461 - DNA, 15 bp, Homo sapiens
cccaccactcacttc

SEQ ID NO: 117462 - DNA, 15 bp, Homo sapiens
acccaccactcactt

SEQ ID NO: 117463 - DNA, 15 bp, Homo sapiens
cacccaccactcact

SEQ ID NO: 117464 - DNA, 15 bp, Homo sapiens
tcacccaccactcac

SEQ ID NO: 117465 - DNA, 15 bp, Homo sapiens
ctcacccaccactca

SEQ ID NO: 117466 - DNA, 15 bp, Homo sapiens
actcacccaccactc

SEQ ID NO: 117467 - DNA, 15 bp, Homo sapiens
cactcacccaccact

SEQ ID NO: 117468 - DNA, 15 bp, Homo sapiens
tcactcacccaccac

SEQ ID NO: 117469 - DNA, 15 bp, Homo sapiens
ctcactcacccacca

SEQ ID NO: 117470 - DNA, 15 bp, Homo sapiens
gctcactcacccacc

SEQ ID NO: 117471 - DNA, 15 bp, Homo sapiens
tgctcactcacccac

SEQ ID NO: 117472 - DNA, 15 bp, Homo sapiens
ttgctcactcaccca

SEQ ID NO: 117473 - DNA, 15 bp, Homo sapiens
attgctcactcaccc

SEQ ID NO: 117474 - DNA, 15 bp, Homo sapiens
tattgctcactcacc

SEQ ID NO: 117475 - DNA, 15 bp, Homo sapiens
gtattgctcactcac

SEQ ID NO: 117476 - DNA, 15 bp, Homo sapiens
ggtattgctcactca

SEQ ID NO: 117477 - DNA, 15 bp, Homo sapiens
cggtattgctcactc

SEQ ID NO: 117478 - DNA, 15 bp, Homo sapiens
gcggtattgctcact

SEQ ID NO: 117479 - DNA, 15 bp, Homo sapiens
ggcggtattgctcac

SEQ ID NO: 117480 - DNA, 15 bp, Homo sapiens
aggcggtattgctca

SEQ ID NO: 117481 - DNA, 15 bp, Homo sapiens
caggcggtattgctc

SEQ ID NO: 117482 - DNA, 15 bp, Homo sapiens
tcaggcggtattgct

SEQ ID NO: 117483 - DNA, 15 bp, Homo sapiens
ctcaggcggtattgc

SEQ ID NO: 117484 - DNA, 15 bp, Homo sapiens
gctcaggcggtattg

SEQ ID NO: 117485 - DNA, 15 bp, Homo sapiens
agctcaggcggtatt

SEQ ID NO: 117486 - DNA, 15 bp, Homo sapiens
gagctcaggcggtat

SEQ ID NO: 117487 - DNA, 15 bp, Homo sapiens
ggagctcaggcggta

SEQ ID NO: 117488 - DNA, 15 bp, Homo sapiens
cggagctcaggcggt

SEQ ID NO: 117489 - DNA, 15 bp, Homo sapiens
gcggagctcaggcgg

SEQ ID NO: 117490 - DNA, 15 bp, Homo sapiens
ggcggagctcaggcg

SEQ ID NO: 117491 - DNA, 15 bp, Homo sapiens
aggcggagctcaggc

SEQ ID NO: 117492 - DNA, 15 bp, Homo sapiens
gaggcggagctcagg

SEQ ID NO: 117493 - DNA, 15 bp, Homo sapiens
ggaggcggagctcag

SEQ ID NO: 117494 - DNA, 15 bp, Homo sapiens
aggaggcggagctca

SEQ ID NO: 117495 - DNA, 15 bp, Homo sapiens
caggaggcggagctc

SEQ ID NO: 117496 - DNA, 15 bp, Homo sapiens
acaggaggcggagct

SEQ ID NO: 117497 - DNA, 15 bp, Homo sapiens
gacaggaggcggagc

SEQ ID NO: 117498 - DNA, 15 bp, Homo sapiens
tgacaggaggcggag

SEQ ID NO: 117499 - DNA, 15 bp, Homo sapiens
ctgacaggaggcgga

SEQ ID NO: 117500 - DNA, 15 bp, Homo sapiens
tctgacaggaggcgg

SEQ ID NO: 117501 - DNA, 15 bp, Homo sapiens
atctgacaggaggcg

SEQ ID NO: 117502 - DNA, 15 bp, Homo sapiens
gatctgacaggaggc

SEQ ID NO: 117503 - DNA, 15 bp, Homo sapiens
tgatctgacaggagg

SEQ ID NO: 117504 - DNA, 15 bp, Homo sapiens
ttgatctgacaggag

SEQ ID NO: 117505 - DNA, 15 bp, Homo sapiens
cttgatctgacagga

SEQ ID NO: 117506 - DNA, 15 bp, Homo sapiens
acttgatctgacagg

SEQ ID NO: 117507 - DNA, 15 bp, Homo sapiens
cacttgatctgacag

SEQ ID NO: 117508 - DNA, 15 bp, Homo sapiens
ccacttgatctgaca

SEQ ID NO: 117509 - DNA, 15 bp, Homo sapiens
gccacttgatctgac

SEQ ID NO: 117510 - DNA, 15 bp, Homo sapiens
ggccacttgatctga

SEQ ID NO: 117511 - DNA, 15 bp, Homo sapiens
aggccacttgatctg

SEQ ID NO: 117512 - DNA, 15 bp, Homo sapiens
aaggccacttgatct

SEQ ID NO: 117513 - DNA, 15 bp, Homo sapiens
taaggccacttgatc

SEQ ID NO: 117514 - DNA, 15 bp, Homo sapiens
gtaaggccacttgat

SEQ ID NO: 117515 - DNA, 15 bp, Homo sapiens
tgtaaggccacttga

SEQ ID NO: 117516 - DNA, 15 bp, Homo sapiens
atgtaaggccacttg

SEQ ID NO: 117517 - DNA, 15 bp, Homo sapiens
aatgtaaggccactt

SEQ ID NO: 117518 - DNA, 15 bp, Homo sapiens
gaatgtaaggccact

SEQ ID NO: 117519 - DNA, 15 bp, Homo sapiens
agaatgtaaggccac

SEQ ID NO: 117520 - DNA, 15 bp, Homo sapiens
gagaatgtaaggcca

SEQ ID NO: 117521 - DNA, 15 bp, Homo sapiens
tgagaatgtaaggcc

SEQ ID NO: 117522 - DNA, 15 bp, Homo sapiens
atgagaatgtaaggc

SEQ ID NO: 117523 - DNA, 15 bp, Homo sapiens
tatgagaatgtaagg

SEQ ID NO: 117524 - DNA, 15 bp, Homo sapiens
ctatgagaatgtaag

SEQ ID NO: 117525 - DNA, 15 bp, Homo sapiens
cctatgagaatgtaa

SEQ ID NO: 117526 - DNA, 15 bp, Homo sapiens
tcctatgagaatgta

SEQ ID NO: 117527 - DNA, 15 bp, Homo sapiens
ctcctatgagaatgt

SEQ ID NO: 117528 - DNA, 15 bp, Homo sapiens
actcctatgagaatg

SEQ ID NO: 117529 - DNA, 15 bp, Homo sapiens
cactcctatgagaat

SEQ ID NO: 117530 - DNA, 15 bp, Homo sapiens
acactcctatgagaa

SEQ ID NO: 117531 - DNA, 15 bp, Homo sapiens
cacactcctatgaga

SEQ ID NO: 117532 - DNA, 15 bp, Homo sapiens
tcacactcctatgag

SEQ ID NO: 117533 - DNA, 15 bp, Homo sapiens
ttcacactcctatga

SEQ ID NO: 117534 - DNA, 15 bp, Homo sapiens
gttcacactcctatg

SEQ ID NO: 117535 - DNA, 15 bp, Homo sapiens
ggttcacactcctat

SEQ ID NO: 117536 - DNA, 15 bp, Homo sapiens
gggttcacactccta

SEQ ID NO: 117537 - DNA, 15 bp, Homo sapiens
agggttcacactcct

SEQ ID NO: 117538 - DNA, 15 bp, Homo sapiens
tagggttcacactcc

SEQ ID NO: 117539 - DNA, 15 bp, Homo sapiens
atagggttcacactc

SEQ ID NO: 117540 - DNA, 15 bp, Homo sapiens
aatagggttcacact

SEQ ID NO: 117541 - DNA, 15 bp, Homo sapiens
caatagggttcacac

SEQ ID NO: 117542 - DNA, 15 bp, Homo sapiens
acaatagggttcaca

SEQ ID NO: 117543 - DNA, 15 bp, Homo sapiens
cacaatagggttcac

SEQ ID NO: 117544 - DNA, 15 bp, Homo sapiens
tcacaatagggttca

SEQ ID NO: 117545 - DNA, 15 bp, Homo sapiens
ttcacaatagggttc

SEQ ID NO: 117546 - DNA, 15 bp, Homo sapiens
gttcacaatagggtt

SEQ ID NO: 117547 - DNA, 15 bp, Homo sapiens
agttcacaatagggt

SEQ ID NO: 117548 - DNA, 15 bp, Homo sapiens
cagttcacaataggg

SEQ ID NO: 117549 - DNA, 15 bp, Homo sapiens
gcagttcacaatagg

SEQ ID NO: 117550 - DNA, 15 bp, Homo sapiens
tgcagttcacaatag

SEQ ID NO: 117551 - DNA, 15 bp, Homo sapiens
gtgcagttcacaata

SEQ ID NO: 117552 - DNA, 15 bp, Homo sapiens
tgtgcagttcacaat

SEQ ID NO: 117553 - DNA, 15 bp, Homo sapiens
atgtgcagttcacaa

SEQ ID NO: 117554 - DNA, 15 bp, Homo sapiens
catgtgcagttcaca

SEQ ID NO: 117555 - DNA, 15 bp, Homo sapiens
gcatgtgcagttcac

SEQ ID NO: 117556 - DNA, 15 bp, Homo sapiens
ggcatgtgcagttca

SEQ ID NO: 117557 - DNA, 15 bp, Homo sapiens
tggcatgtgcagttc

SEQ ID NO: 117558 - DNA, 15 bp, Homo sapiens
ctggcatgtgcagtt

SEQ ID NO: 117559 - DNA, 15 bp, Homo sapiens
cctggcatgtgcagt

SEQ ID NO: 117560 - DNA, 15 bp, Homo sapiens
ccctggcatgtgcag

SEQ ID NO: 117561 - DNA, 15 bp, Homo sapiens
tccctggcatgtgca

SEQ ID NO: 117562 - DNA, 15 bp, Homo sapiens
atccctggcatgtgc

SEQ ID NO: 117563 - DNA, 15 bp, Homo sapiens
gatccctggcatgtg

SEQ ID NO: 117564 - DNA, 15 bp, Homo sapiens
agatccctggcatgt

SEQ ID NO: 117565 - DNA, 15 bp, Homo sapiens
tagatccctggcatg

SEQ ID NO: 117566 - DNA, 15 bp, Homo sapiens
ctagatccctggcat

SEQ ID NO: 117567 - DNA, 15 bp, Homo sapiens
cctagatccctggca

SEQ ID NO: 117568 - DNA, 15 bp, Homo sapiens
acctagatccctggc

SEQ ID NO: 117569 - DNA, 15 bp, Homo sapiens
cacctagatccctgg

SEQ ID NO: 117570 - DNA, 15 bp, Homo sapiens
ccacctagatccctg

SEQ ID NO: 117571 - DNA, 15 bp, Homo sapiens
tccacctagatccct

SEQ ID NO: 117572 - DNA, 15 bp, Homo sapiens
ctccacctagatccc

SEQ ID NO: 117573 - DNA, 15 bp, Homo sapiens
cctccacctagatcc

SEQ ID NO: 117574 - DNA, 15 bp, Homo sapiens
ccctccacctagatc

SEQ ID NO: 117575 - DNA, 15 bp, Homo sapiens
gccctccacctagat

SEQ ID NO: 117576 - DNA, 15 bp, Homo sapiens
agccctccacctaga

SEQ ID NO: 117577 - DNA, 15 bp, Homo sapiens
gagccctccacctag

SEQ ID NO: 117578 - DNA, 15 bp, Homo sapiens
ggagccctccaccta

SEQ ID NO: 117579 - DNA, 15 bp, Homo sapiens
aggagccctccacct

SEQ ID NO: 117580 - DNA, 15 bp, Homo sapiens
aaggagccctccacc

SEQ ID NO: 117581 - DNA, 15 bp, Homo sapiens
taaggagccctccac

SEQ ID NO: 117582 - DNA, 15 bp, Homo sapiens
ataaggagccctcca

SEQ ID NO: 117583 - DNA, 15 bp, Homo sapiens
cataaggagccctcc

SEQ ID NO: 117584 - DNA, 15 bp, Homo sapiens
tcataaggagccctc

SEQ ID NO: 117585 - DNA, 15 bp, Homo sapiens
ctcataaggagccct

SEQ ID NO: 117586 - DNA, 15 bp, Homo sapiens
tctcataaggagccc

SEQ ID NO: 117587 - DNA, 15 bp, Homo sapiens
ttctcataaggagcc

SEQ ID NO: 117588 - DNA, 15 bp, Homo sapiens
attctcataaggagc

SEQ ID NO: 117589 - DNA, 15 bp, Homo sapiens
gattctcataaggag

SEQ ID NO: 117590 - DNA, 15 bp, Homo sapiens
agattctcataagga

SEQ ID NO: 117591 - DNA, 15 bp, Homo sapiens
tagattctcataagg

SEQ ID NO: 117592 - DNA, 15 bp, Homo sapiens
ttagattctcataag

SEQ ID NO: 117593 - DNA, 15 bp, Homo sapiens
attagattctcataa

SEQ ID NO: 117594 - DNA, 15 bp, Homo sapiens
cattagattctcata

SEQ ID NO: 117595 - DNA, 15 bp, Homo sapiens
gcattagattctcat

SEQ ID NO: 117596 - DNA, 15 bp, Homo sapiens
ggcattagattctca

SEQ ID NO: 117597 - DNA, 15 bp, Homo sapiens
aggcattagattctc

SEQ ID NO: 117598 - DNA, 15 bp, Homo sapiens
caggcattagattct

SEQ ID NO: 117599 - DNA, 15 bp, Homo sapiens
tcaggcattagattc

SEQ ID NO: 117600 - DNA, 15 bp, Homo sapiens
atcaggcattagatt

SEQ ID NO: 117601 - DNA, 15 bp, Homo sapiens
catcaggcattagat

SEQ ID NO: 117602 - DNA, 15 bp, Homo sapiens
tcatcaggcattaga

SEQ ID NO: 117603 - DNA, 15 bp, Homo sapiens
atcatcaggcattag

SEQ ID NO: 117604 - DNA, 15 bp, Homo sapiens
gatcatcaggcatta

SEQ ID NO: 117605 - DNA, 15 bp, Homo sapiens
agatcatcaggcatt

SEQ ID NO: 117606 - DNA, 15 bp, Homo sapiens
cagatcatcaggcat

SEQ ID NO: 117607 - DNA, 15 bp, Homo sapiens
tcagatcatcaggca

SEQ ID NO: 117608 - DNA, 15 bp, Homo sapiens
ctcagatcatcaggc

SEQ ID NO: 117609 - DNA, 15 bp, Homo sapiens
cctcagatcatcagg

SEQ ID NO: 117610 - DNA, 15 bp, Homo sapiens
acctcagatcatcag

SEQ ID NO: 117611 - DNA, 15 bp, Homo sapiens
cacctcagatcatca

SEQ ID NO: 117612 - DNA, 15 bp, Homo sapiens
ccacctcagatcatc

SEQ ID NO: 117613 - DNA, 15 bp, Homo sapiens
tccacctcagatcat

SEQ ID NO: 117614 - DNA, 15 bp, Homo sapiens
ttccacctcagatca

SEQ ID NO: 117615 - DNA, 15 bp, Homo sapiens
gttccacctcagatc

SEQ ID NO: 117616 - DNA, 15 bp, Homo sapiens
tgttccacctcagat

SEQ ID NO: 117617 - DNA, 15 bp, Homo sapiens
ctgttccacctcaga

SEQ ID NO: 117618 - DNA, 15 bp, Homo sapiens
gctgttccacctcag

SEQ ID NO: 117619 - DNA, 15 bp, Homo sapiens
agctgttccacctca

SEQ ID NO: 117620 - DNA, 15 bp, Homo sapiens
aagctgttccacctc

SEQ ID NO: 117621 - DNA, 15 bp, Homo sapiens
gaagctgttccacct

SEQ ID NO: 117622 - DNA, 15 bp, Homo sapiens
tgaagctgttccacc

SEQ ID NO: 117623 - DNA, 15 bp, Homo sapiens
atgaagctgttccac

SEQ ID NO: 117624 - DNA, 15 bp, Homo sapiens
gatgaagctgttcca

SEQ ID NO: 117625 - DNA, 15 bp, Homo sapiens
ggatgaagctgttcc

SEQ ID NO: 117626 - DNA, 15 bp, Homo sapiens
gggatgaagctgttc

SEQ ID NO: 117627 - DNA, 15 bp, Homo sapiens
tgggatgaagctgtt

SEQ ID NO: 117628 - DNA, 15 bp, Homo sapiens
ttgggatgaagctgt

SEQ ID NO: 117629 - DNA, 15 bp, Homo sapiens
tttgggatgaagctg

SEQ ID NO: 117630 - DNA, 15 bp, Homo sapiens
ttttgggatgaagct

SEQ ID NO: 117631 - DNA, 15 bp, Homo sapiens
gttttgggatgaagc

SEQ ID NO: 117632 - DNA, 15 bp, Homo sapiens
ggttttgggatgaag

SEQ ID NO: 117633 - DNA, 15 bp, Homo sapiens
tggttttgggatgaa

SEQ ID NO: 117634 - DNA, 15 bp, Homo sapiens
atggttttgggatga

SEQ ID NO: 117635 - DNA, 15 bp, Homo sapiens
gatggttttgggatg

SEQ ID NO: 117636 - DNA, 15 bp, Homo sapiens
ggatggttttgggat

SEQ ID NO: 117637 - DNA, 15 bp, Homo sapiens
gggatggttttggga

SEQ ID NO: 117638 - DNA, 15 bp, Homo sapiens
ggggatggttttggg

SEQ ID NO: 117639 - DNA, 15 bp, Homo sapiens
cggggatggttttgg

SEQ ID NO: 117640 - DNA, 15 bp, Homo sapiens
gcggggatggttttg

SEQ ID NO: 117641 - DNA, 15 bp, Homo sapiens
agcggggatggtttt

SEQ ID NO: 117642 - DNA, 15 bp, Homo sapiens
cagcggggatggttt

SEQ ID NO: 117643 - DNA, 15 bp, Homo sapiens
ccagcggggatggtt

SEQ ID NO: 117644 - DNA, 15 bp, Homo sapiens
gccagcggggatggt

SEQ ID NO: 117645 - DNA, 15 bp, Homo sapiens
ggccagcggggatgg

SEQ ID NO: 117646 - DNA, 15 bp, Homo sapiens
gggccagcggggatg

SEQ ID NO: 117647 - DNA, 15 bp, Homo sapiens
tgggccagcggggat

SEQ ID NO: 117648 - DNA, 15 bp, Homo sapiens
atgggccagcgggga

SEQ ID NO: 117649 - DNA, 15 bp, Homo sapiens
catgggccagcgggg

SEQ ID NO: 117650 - DNA, 15 bp, Homo sapiens
ccatgggccagcggg

SEQ ID NO: 117651 - DNA, 15 bp, Homo sapiens
tccatgggccagcgg

SEQ ID NO: 117652 - DNA, 15 bp, Homo sapiens
ttccatgggccagcg

SEQ ID NO: 117653 - DNA, 15 bp, Homo sapiens
tttccatgggccagc

SEQ ID NO: 117654 - DNA, 15 bp, Homo sapiens
ttttccatgggccag

SEQ ID NO: 117655 - DNA, 15 bp, Homo sapiens
tttttccatgggcca

SEQ ID NO: 117656 - DNA, 15 bp, Homo sapiens
atttttccatgggcc

SEQ ID NO: 117657 - DNA, 15 bp, Homo sapiens
aatttttccatgggc

SEQ ID NO: 117658 - DNA, 15 bp, Homo sapiens
caatttttccatggg

SEQ ID NO: 117659 - DNA, 15 bp, Homo sapiens
acaatttttccatgg

SEQ ID NO: 117660 - DNA, 15 bp, Homo sapiens
gacaatttttccatg

SEQ ID NO: 117661 - DNA, 15 bp, Homo sapiens
ggacaatttttccat

SEQ ID NO: 117662 - DNA, 15 bp, Homo sapiens
tggacaatttttcca

SEQ ID NO: 117663 - DNA, 15 bp, Homo sapiens
gtggacaatttttcc

SEQ ID NO: 117664 - DNA, 15 bp, Homo sapiens
ggtggacaatttttc

SEQ ID NO: 117665 - DNA, 15 bp, Homo sapiens
tggtggacaattttt

SEQ ID NO: 117666 - DNA, 15 bp, Homo sapiens
gtggtggacaatttt

SEQ ID NO: 117667 - DNA, 15 bp, Homo sapiens
tgtggtggacaattt

SEQ ID NO: 117668 - DNA, 15 bp, Homo sapiens
ttgtggtggacaatt

SEQ ID NO: 117669 - DNA, 15 bp, Homo sapiens
tttgtggtggacaat

SEQ ID NO: 117670 - DNA, 15 bp, Homo sapiens
ttttgtggtggacaa

SEQ ID NO: 117671 - DNA, 15 bp, Homo sapiens
gttttgtggtggaca

SEQ ID NO: 117672 - DNA, 15 bp, Homo sapiens
agttttgtggtggac

SEQ ID NO: 117673 - DNA, 15 bp, Homo sapiens
cagttttgtggtgga

SEQ ID NO: 117674 - DNA, 15 bp, Homo sapiens
ccagttttgtggtgg

SEQ ID NO: 117675 - DNA, 15 bp, Homo sapiens
accagttttgtggtg

SEQ ID NO: 117676 - DNA, 15 bp, Homo sapiens
gaccagttttgtggt

SEQ ID NO: 117677 - DNA, 15 bp, Homo sapiens
ggaccagttttgtgg

SEQ ID NO: 117678 - DNA, 15 bp, Homo sapiens
gggaccagttttgtg

SEQ ID NO: 117679 - DNA, 15 bp, Homo sapiens
agggaccagttttgt

SEQ ID NO: 117680 - DNA, 15 bp, Homo sapiens
cagggaccagttttg

SEQ ID NO: 117681 - DNA, 15 bp, Homo sapiens
ccagggaccagtttt

SEQ ID NO: 117682 - DNA, 15 bp, Homo sapiens
accagggaccagttt

SEQ ID NO: 117683 - DNA, 15 bp, Homo sapiens
caccagggaccagtt

SEQ ID NO: 117684 - DNA, 15 bp, Homo sapiens
gcaccagggaccagt

SEQ ID NO: 117685 - DNA, 15 bp, Homo sapiens
ggcaccagggaccag

SEQ ID NO: 117686 - DNA, 15 bp, Homo sapiens
tggcaccagggacca

SEQ ID NO: 117687 - DNA, 15 bp, Homo sapiens
ttggcaccagggacc

SEQ ID NO: 117688 - DNA, 15 bp, Homo sapiens
tttggcaccagggac

SEQ ID NO: 117689 - DNA, 15 bp, Homo sapiens
ttttggcaccaggga

SEQ ID NO: 117690 - DNA, 15 bp, Homo sapiens
tttttggcaccaggg

SEQ ID NO: 117691 - DNA, 15 bp, Homo sapiens
ctttttggcaccagg

SEQ ID NO: 117692 - DNA, 15 bp, Homo sapiens
cctttttggcaccag

SEQ ID NO: 117693 - DNA, 15 bp, Homo sapiens
gcctttttggcacca

SEQ ID NO: 117694 - DNA, 15 bp, Homo sapiens
agcctttttggcacc

SEQ ID NO: 117695 - DNA, 15 bp, Homo sapiens
cagcctttttggcac

SEQ ID NO: 117696 - DNA, 15 bp, Homo sapiens
tcagcctttttggca

SEQ ID NO: 117697 - DNA, 15 bp, Homo sapiens
ctcagcctttttggc

SEQ ID NO: 117698 - DNA, 15 bp, Homo sapiens
cctcagcctttttgg

SEQ ID NO: 117699 - DNA, 15 bp, Homo sapiens
tcctcagcctttttg

SEQ ID NO: 117700 - DNA, 15 bp, Homo sapiens
gtcctcagccttttt

SEQ ID NO: 117701 - DNA, 15 bp, Homo sapiens
ggtcctcagcctttt

SEQ ID NO: 117702 - DNA, 15 bp, Homo sapiens
tggtcctcagccttt

SEQ ID NO: 117703 - DNA, 15 bp, Homo sapiens
gtggtcctcagcctt

SEQ ID NO: 117704 - DNA, 15 bp, Homo sapiens
agtggtcctcagcct

SEQ ID NO: 117705 - DNA, 15 bp, Homo sapiens
cagtggtcctcagcc

SEQ ID NO: 117706 - DNA, 15 bp, Homo sapiens
gcagtggtcctcagc

SEQ ID NO: 117707 - DNA, 15 bp, Homo sapiens
agcagtggtcctcag

SEQ ID NO: 117708 - DNA, 15 bp, Homo sapiens
gagcagtggtcctca

SEQ ID NO: 117709 - DNA, 15 bp, Homo sapiens
agagcagtggtcctc

SEQ ID NO: 117710 - DNA, 15 bp, Homo sapiens
tagagcagtggtcct

SEQ ID NO: 117711 - DNA, 15 bp, Homo sapiens
ctagagcagtggtcc

SEQ ID NO: 117712 - DNA, 15 bp, Homo sapiens
gctagagcagtggtc

SEQ ID NO: 117713 - DNA, 15 bp, Homo sapiens
ggctagagcagtggt

SEQ ID NO: 117714 - DNA, 15 bp, Homo sapiens
tggctagagcagtgg

SEQ ID NO: 117715 - DNA, 15 bp, Homo sapiens
ctggctagagcagtg

SEQ ID NO: 117716 - DNA, 15 bp, Homo sapiens
tctggctagagcagt

SEQ ID NO: 117717 - DNA, 15 bp, Homo sapiens
gtctggctagagcag

SEQ ID NO: 117718 - DNA, 15 bp, Homo sapiens
ggtctggctagagca

SEQ ID NO: 117719 - DNA, 15 bp, Homo sapiens
aggtctggctagagc

SEQ ID NO: 117720 - DNA, 15 bp, Homo sapiens
aaggtctggctagag

SEQ ID NO: 117721 - DNA, 15 bp, Homo sapiens
gaaggtctggctaga

SEQ ID NO: 117722 - DNA, 15 bp, Homo sapiens
tgaaggtctggctag

SEQ ID NO: 117723 - DNA, 15 bp, Homo sapiens
ctgaaggtctggcta

SEQ ID NO: 117724 - DNA, 15 bp, Homo sapiens
tctgaaggtctggct

SEQ ID NO: 117725 - DNA, 15 bp, Homo sapiens
ttctgaaggtctggc

SEQ ID NO: 117726 - DNA, 15 bp, Homo sapiens
tttctgaaggtctgg

SEQ ID NO: 117727 - DNA, 15 bp, Homo sapiens
ttttctgaaggtctg

SEQ ID NO: 117728 - DNA, 15 bp, Homo sapiens
cttttctgaaggtct

SEQ ID NO: 117729 - DNA, 15 bp, Homo sapiens
ccttttctgaaggtc

SEQ ID NO: 117730 - DNA, 15 bp, Homo sapiens
tccttttctgaaggt

SEQ ID NO: 117731 - DNA, 15 bp, Homo sapiens
ttccttttctgaagg

SEQ ID NO: 117732 - DNA, 15 bp, Homo sapiens
tttccttttctgaag

SEQ ID NO: 117733 - DNA, 15 bp, Homo sapiens
ttttccttttctgaa

SEQ ID NO: 117734 - DNA, 15 bp, Homo sapiens
attttccttttctga

SEQ ID NO: 117735 - DNA, 15 bp, Homo sapiens
cattttccttttctg

SEQ ID NO: 117736 - DNA, 15 bp, Homo sapiens
ccattttccttttct

SEQ ID NO: 117737 - DNA, 15 bp, Homo sapiens
cccattttccttttc

SEQ ID NO: 117738 - DNA, 15 bp, Homo sapiens
ccccattttcctttt

SEQ ID NO: 117739 - DNA, 15 bp, Homo sapiens
gccccattttccttt

SEQ ID NO: 117740 - DNA, 15 bp, Homo sapiens
ggccccattttcctt

SEQ ID NO: 117741 - DNA, 15 bp, Homo sapiens
tggccccattttcct

SEQ ID NO: 117742 - DNA, 15 bp, Homo sapiens
ctggccccattttcc

SEQ ID NO: 117743 - DNA, 15 bp, Homo sapiens
cctggccccattttc

SEQ ID NO: 117744 - DNA, 15 bp, Homo sapiens
gcctggccccatttt

SEQ ID NO: 117745 - DNA, 15 bp, Homo sapiens
cgcctggccccattt

SEQ ID NO: 117746 - DNA, 15 bp, Homo sapiens
gcgcctggccccatt

SEQ ID NO: 117747 - DNA, 15 bp, Homo sapiens
tgcgcctggccccat

SEQ ID NO: 117748 - DNA, 15 bp, Homo sapiens
ctgcgcctggcccca

SEQ ID NO: 117749 - DNA, 15 bp, Homo sapiens
actgcgcctggcccc

SEQ ID NO: 117750 - DNA, 15 bp, Homo sapiens
cactgcgcctggccc

SEQ ID NO: 117751 - DNA, 15 bp, Homo sapiens
ccactgcgcctggcc

SEQ ID NO: 117752 - DNA, 15 bp, Homo sapiens
gccactgcgcctggc

SEQ ID NO: 117753 - DNA, 15 bp, Homo sapiens
agccactgcgcctgg

SEQ ID NO: 117754 - DNA, 15 bp, Homo sapiens
gagccactgcgcctg

SEQ ID NO: 117755 - DNA, 15 bp, Homo sapiens
tgagccactgcgcct

SEQ ID NO: 117756 - DNA, 15 bp, Homo sapiens
atgagccactgcgcc

SEQ ID NO: 117757 - DNA, 15 bp, Homo sapiens
catgagccactgcgc

SEQ ID NO: 117758 - DNA, 15 bp, Homo sapiens
gcatgagccactgcg

SEQ ID NO: 117759 - DNA, 15 bp, Homo sapiens
ggcatgagccactgc

SEQ ID NO: 117760 - DNA, 15 bp, Homo sapiens
aggcatgagccactg

SEQ ID NO: 117761 - DNA, 15 bp, Homo sapiens
caggcatgagccact

SEQ ID NO: 117762 - DNA, 15 bp, Homo sapiens
acaggcatgagccac

SEQ ID NO: 117763 - DNA, 15 bp, Homo sapiens
tacaggcatgagcca

SEQ ID NO: 117764 - DNA, 15 bp, Homo sapiens
tgggattacaggcat

SEQ ID NO: 117765 - DNA, 15 bp, Homo sapiens
ctgggattacaggca

SEQ ID NO: 117766 - DNA, 15 bp, Homo sapiens
tgcctcggcctccca

SEQ ID NO: 117767 - DNA, 15 bp, Homo sapiens
tcctgcctcggcctc

SEQ ID NO: 117768 - DNA, 15 bp, Homo sapiens
ctcctgcctcggcct

SEQ ID NO: 117769 - DNA, 15 bp, Homo sapiens
cctcctgcctcggcc

SEQ ID NO: 117770 - DNA, 15 bp, Homo sapiens
tcctcctgcctcggc

SEQ ID NO: 117771 - DNA, 15 bp, Homo sapiens
atcctcctgcctcgg

SEQ ID NO: 117772 - DNA, 15 bp, Homo sapiens
gatcctcctgcctcg

SEQ ID NO: 117773 - DNA, 15 bp, Homo sapiens
ggatcctcctgcctc

SEQ ID NO: 117774 - DNA, 15 bp, Homo sapiens
gggatcctcctgcct

SEQ ID NO: 117775 - DNA, 15 bp, Homo sapiens
ggggatcctcctgcc

SEQ ID NO: 117776 - DNA, 15 bp, Homo sapiens
aggggatcctcctgc

SEQ ID NO: 117777 - DNA, 15 bp, Homo sapiens
caggggatcctcctg

SEQ ID NO: 117778 - DNA, 15 bp, Homo sapiens
tcaggggatcctcct

SEQ ID NO: 117779 - DNA, 15 bp, Homo sapiens
ctcaggggatcctcc

SEQ ID NO: 117780 - DNA, 15 bp, Homo sapiens
cctcaggggatcctc

SEQ ID NO: 117781 - DNA, 15 bp, Homo sapiens
acctcaggggatcct

SEQ ID NO: 117782 - DNA, 15 bp, Homo sapiens
gacctcaggggatcc

SEQ ID NO: 117783 - DNA, 15 bp, Homo sapiens
tgacctcaggggatc

SEQ ID NO: 117784 - DNA, 15 bp, Homo sapiens
ctgacctcaggggat

SEQ ID NO: 117785 - DNA, 15 bp, Homo sapiens
cctgacctcagggga

SEQ ID NO: 117786 - DNA, 15 bp, Homo sapiens
tcctgacctcagggg

SEQ ID NO: 117787 - DNA, 15 bp, Homo sapiens
ttcctgacctcaggg

SEQ ID NO: 117788 - DNA, 15 bp, Homo sapiens
attcctgacctcagg

SEQ ID NO: 117789 - DNA, 15 bp, Homo sapiens
aattcctgacctcag

SEQ ID NO: 117790 - DNA, 15 bp, Homo sapiens
gaattcctgacctca

SEQ ID NO: 117791 - DNA, 15 bp, Homo sapiens
tgaattcctgacctc

SEQ ID NO: 117792 - DNA, 15 bp, Homo sapiens
ttgaattcctgacct

SEQ ID NO: 117793 - DNA, 15 bp, Homo sapiens
cttgaattcctgacc

SEQ ID NO: 117794 - DNA, 15 bp, Homo sapiens
tcttgaattcctgac

SEQ ID NO: 117795 - DNA, 15 bp, Homo sapiens
gtcttgaattcctga

SEQ ID NO: 117796 - DNA, 15 bp, Homo sapiens
ggtcttgaattcctg

SEQ ID NO: 117797 - DNA, 15 bp, Homo sapiens
tggtcttgaattcct

SEQ ID NO: 117798 - DNA, 15 bp, Homo sapiens
ttggtcttgaattcc

SEQ ID NO: 117799 - DNA, 15 bp, Homo sapiens
gttggtcttgaattc

SEQ ID NO: 117800 - DNA, 15 bp, Homo sapiens
ggttggtcttgaatt

SEQ ID NO: 117801 - DNA, 15 bp, Homo sapiens
aggttggtcttgaat

SEQ ID NO: 117802 - DNA, 15 bp, Homo sapiens
caggttggtcttgaa

SEQ ID NO: 117803 - DNA, 15 bp, Homo sapiens
ccaggttggtcttga

SEQ ID NO: 117804 - DNA, 15 bp, Homo sapiens
gccaggttggtcttg

SEQ ID NO: 117805 - DNA, 15 bp, Homo sapiens
ggccaggttggtctt

SEQ ID NO: 117806 - DNA, 15 bp, Homo sapiens
tggccaggttggtct

SEQ ID NO: 117807 - DNA, 15 bp, Homo sapiens
ttggccaggttggtc

SEQ ID NO: 117808 - DNA, 15 bp, Homo sapiens
gttggccaggttggt

SEQ ID NO: 117809 - DNA, 15 bp, Homo sapiens
tgttggccaggttgg

SEQ ID NO: 117810 - DNA, 15 bp, Homo sapiens
atgttggccaggttg

SEQ ID NO: 117811 - DNA, 15 bp, Homo sapiens
catgttggccaggtt

SEQ ID NO: 117812 - DNA, 15 bp, Homo sapiens
ccatgttggccaggt

SEQ ID NO: 117813 - DNA, 15 bp, Homo sapiens
accatgttggccagg

SEQ ID NO: 117814 - DNA, 15 bp, Homo sapiens
caccatgttggccag

SEQ ID NO: 117815 - DNA, 15 bp, Homo sapiens
tcaccatgttggcca

SEQ ID NO: 117816 - DNA, 15 bp, Homo sapiens
ttcaccatgttggcc

SEQ ID NO: 117817 - DNA, 15 bp, Homo sapiens
tttcaccatgttggc

SEQ ID NO: 117818 - DNA, 15 bp, Homo sapiens
gtttcaccatgttgg

SEQ ID NO: 117819 - DNA, 15 bp, Homo sapiens
ggtttcaccatgttg

SEQ ID NO: 117820 - DNA, 15 bp, Homo sapiens
gggtttcaccatgtt

SEQ ID NO: 117821 - DNA, 15 bp, Homo sapiens
cagagatggggtttc

SEQ ID NO: 117822 - DNA, 15 bp, Homo sapiens
gcagagatggggttt

SEQ ID NO: 117823 - DNA, 15 bp, Homo sapiens
agcagagatggggtt

SEQ ID NO: 117824 - DNA, 15 bp, Homo sapiens
tagcagagatggggt

SEQ ID NO: 117825 - DNA, 15 bp, Homo sapiens
ttagcagagatgggg

SEQ ID NO: 117826 - DNA, 15 bp, Homo sapiens
tttagcagagatggg

SEQ ID NO: 117827 - DNA, 15 bp, Homo sapiens
ttttagcagagatgg

SEQ ID NO: 117828 - DNA, 15 bp, Homo sapiens
tttttagcagagatg

SEQ ID NO: 117829 - DNA, 15 bp, Homo sapiens
atttttagcagagat

SEQ ID NO: 117830 - DNA, 15 bp, Homo sapiens
tatttttagcagaga

SEQ ID NO: 117831 - DNA, 15 bp, Homo sapiens
gtatttttagcagag

SEQ ID NO: 117832 - DNA, 15 bp, Homo sapiens
tgtatttttagcaga

SEQ ID NO: 117833 - DNA, 15 bp, Homo sapiens
ttgtatttttagcag

SEQ ID NO: 117834 - DNA, 15 bp, Homo sapiens
tttgtatttttagca

SEQ ID NO: 117835 - DNA, 15 bp, Homo sapiens
ttttgtatttttagc

SEQ ID NO: 117836 - DNA, 15 bp, Homo sapiens
agctaatttttgtat

SEQ ID NO: 117837 - DNA, 15 bp, Homo sapiens
cagctaatttttgta

SEQ ID NO: 117838 - DNA, 15 bp, Homo sapiens
ccagctaatttttgt

SEQ ID NO: 117839 - DNA, 15 bp, Homo sapiens
cccagctaatttttg

SEQ ID NO: 117840 - DNA, 15 bp, Homo sapiens
cgccaccacacccag

SEQ ID NO: 117841 - DNA, 15 bp, Homo sapiens
gcgccaccacaccca

SEQ ID NO: 117842 - DNA, 15 bp, Homo sapiens
cgcgccaccacaccc

SEQ ID NO: 117843 - DNA, 15 bp, Homo sapiens
acgcgccaccacacc

SEQ ID NO: 117844 - DNA, 15 bp, Homo sapiens
cacgcgccaccacac

SEQ ID NO: 117845 - DNA, 15 bp, Homo sapiens
gcacgcgccaccaca

SEQ ID NO: 117846 - DNA, 15 bp, Homo sapiens
ggcacgcgccaccac

SEQ ID NO: 117847 - DNA, 15 bp, Homo sapiens
aggcacgcgccacca

SEQ ID NO: 117848 - DNA, 15 bp, Homo sapiens
caggcacgcgccacc

SEQ ID NO: 117849 - DNA, 15 bp, Homo sapiens
acaggcacgcgccac

SEQ ID NO: 117850 - DNA, 15 bp, Homo sapiens
tacaggcacgcgcca

SEQ ID NO: 117851 - DNA, 15 bp, Homo sapiens
ttacaggcacgcgcc

SEQ ID NO: 117852 - DNA, 15 bp, Homo sapiens
attacaggcacgcgc

SEQ ID NO: 117853 - DNA, 15 bp, Homo sapiens
gattacaggcacgcg

SEQ ID NO: 117854 - DNA, 15 bp, Homo sapiens
ggattacaggcacgc

SEQ ID NO: 117855 - DNA, 15 bp, Homo sapiens
gggattacaggcacg

SEQ ID NO: 117856 - DNA, 15 bp, Homo sapiens
tgggattacaggcac

SEQ ID NO: 117857 - DNA, 15 bp, Homo sapiens
tagctgggattacag

SEQ ID NO: 117858 - DNA, 15 bp, Homo sapiens
gtagctgggattaca

SEQ ID NO: 117859 - DNA, 15 bp, Homo sapiens
aagtagctgggatta

SEQ ID NO: 117860 - DNA, 15 bp, Homo sapiens
cccattctcctgcct

SEQ ID NO: 117861 - DNA, 15 bp, Homo sapiens
acccattctcctgcc

SEQ ID NO: 117862 - DNA, 15 bp, Homo sapiens
aacccattctcctgc

SEQ ID NO: 117863 - DNA, 15 bp, Homo sapiens
caacccattctcctg

SEQ ID NO: 117864 - DNA, 15 bp, Homo sapiens
tcaacccattctcct

SEQ ID NO: 117865 - DNA, 15 bp, Homo sapiens
ttcaacccattctcc

SEQ ID NO: 117866 - DNA, 15 bp, Homo sapiens
gttcaacccattctc

SEQ ID NO: 117867 - DNA, 15 bp, Homo sapiens
ggttcaacccattct

SEQ ID NO: 117868 - DNA, 15 bp, Homo sapiens
gggttcaacccattc

SEQ ID NO: 117869 - DNA, 15 bp, Homo sapiens
cgggttcaacccatt

SEQ ID NO: 117870 - DNA, 15 bp, Homo sapiens
ccgggttcaacccat

SEQ ID NO: 117871 - DNA, 15 bp, Homo sapiens
cccgggttcaaccca

SEQ ID NO: 117872 - DNA, 15 bp, Homo sapiens
tcccgggttcaaccc

SEQ ID NO: 117873 - DNA, 15 bp, Homo sapiens
ctcccgggttcaacc

SEQ ID NO: 117874 - DNA, 15 bp, Homo sapiens
tctcccgggttcaac

SEQ ID NO: 117875 - DNA, 15 bp, Homo sapiens
gtctcccgggttcaa

SEQ ID NO: 117876 - DNA, 15 bp, Homo sapiens
cgtctcccgggttca

SEQ ID NO: 117877 - DNA, 15 bp, Homo sapiens
ccgtctcccgggttc

SEQ ID NO: 117878 - DNA, 15 bp, Homo sapiens
tccgtctcccgggtt

SEQ ID NO: 117879 - DNA, 15 bp, Homo sapiens
ctccgtctcccgggt

SEQ ID NO: 117880 - DNA, 15 bp, Homo sapiens
cctccgtctcccggg

SEQ ID NO: 117881 - DNA, 15 bp, Homo sapiens
acctccgtctcccgg

SEQ ID NO: 117882 - DNA, 15 bp, Homo sapiens
aacctccgtctcccg

SEQ ID NO: 117883 - DNA, 15 bp, Homo sapiens
caacctccgtctccc

SEQ ID NO: 117884 - DNA, 15 bp, Homo sapiens
gcaacctccgtctcc

SEQ ID NO: 117885 - DNA, 15 bp, Homo sapiens
tgcaacctccgtctc

SEQ ID NO: 117886 - DNA, 15 bp, Homo sapiens
ctgcaacctccgtct

SEQ ID NO: 117887 - DNA, 15 bp, Homo sapiens
actgcaacctccgtc

SEQ ID NO: 117888 - DNA, 15 bp, Homo sapiens
cactgcaacctccgt

SEQ ID NO: 117889 - DNA, 15 bp, Homo sapiens
ctcactgcaacctcc

SEQ ID NO: 117890 - DNA, 15 bp, Homo sapiens
gctcactgcaacctc

SEQ ID NO: 117891 - DNA, 15 bp, Homo sapiens
ggctcactgcaacct

SEQ ID NO: 117892 - DNA, 15 bp, Homo sapiens
cggctcactgcaacc

SEQ ID NO: 117893 - DNA, 15 bp, Homo sapiens
tcggctcactgcaac

SEQ ID NO: 117894 - DNA, 15 bp, Homo sapiens
tgccatctcggctca

SEQ ID NO: 117895 - DNA, 15 bp, Homo sapiens
gtgccatctcggctc

SEQ ID NO: 117896 - DNA, 15 bp, Homo sapiens
ggtgccatctcggct

SEQ ID NO: 117897 - DNA, 15 bp, Homo sapiens
tggtgccatctcggc

SEQ ID NO: 117898 - DNA, 15 bp, Homo sapiens
gtggtgccatctcgg

SEQ ID NO: 117899 - DNA, 15 bp, Homo sapiens
agtggtgccatctcg

SEQ ID NO: 117900 - DNA, 15 bp, Homo sapiens
cagtggtgccatctc

SEQ ID NO: 117901 - DNA, 15 bp, Homo sapiens
gcagtggtgccatct

SEQ ID NO: 117902 - DNA, 15 bp, Homo sapiens
tgcagtggtgccatc

SEQ ID NO: 117903 - DNA, 15 bp, Homo sapiens
gtgcagtggtgccat

SEQ ID NO: 117904 - DNA, 15 bp, Homo sapiens
agtgcagtggtgcca

SEQ ID NO: 117905 - DNA, 15 bp, Homo sapiens
gagtgcagtggtgcc

SEQ ID NO: 117906 - DNA, 15 bp, Homo sapiens
tggagtgcagtggtg

SEQ ID NO: 117907 - DNA, 15 bp, Homo sapiens
taggctggagtgcag

SEQ ID NO: 117908 - DNA, 15 bp, Homo sapiens
ctaggctggagtgca

SEQ ID NO: 117909 - DNA, 15 bp, Homo sapiens
cctaggctggagtgc

SEQ ID NO: 117910 - DNA, 15 bp, Homo sapiens
acctaggctggagtg

SEQ ID NO: 117911 - DNA, 15 bp, Homo sapiens
cacctaggctggagt

SEQ ID NO: 117912 - DNA, 15 bp, Homo sapiens
tcacctaggctggag

SEQ ID NO: 117913 - DNA, 15 bp, Homo sapiens
gtcacctaggctgga

SEQ ID NO: 117914 - DNA, 15 bp, Homo sapiens
tgtcacctaggctgg

SEQ ID NO: 117915 - DNA, 15 bp, Homo sapiens
ctgtcacctaggctg

SEQ ID NO: 117916 - DNA, 15 bp, Homo sapiens
tctgtcacctaggct

SEQ ID NO: 117917 - DNA, 15 bp, Homo sapiens
ctctgtcacctaggc

SEQ ID NO: 117918 - DNA, 15 bp, Homo sapiens
cctctgtcacctagg

SEQ ID NO: 117919 - DNA, 15 bp, Homo sapiens
ccctctgtcacctag

SEQ ID NO: 117920 - DNA, 15 bp, Homo sapiens
tccctctgtcaccta

SEQ ID NO: 117921 - DNA, 15 bp, Homo sapiens
ctccctctgtcacct

SEQ ID NO: 117922 - DNA, 15 bp, Homo sapiens
tctccctctgtcacc

SEQ ID NO: 117923 - DNA, 15 bp, Homo sapiens
gtctccctctgtcac

SEQ ID NO: 117924 - DNA, 15 bp, Homo sapiens
agtctccctctgtca

SEQ ID NO: 117925 - DNA, 15 bp, Homo sapiens
gagtctccctctgtc

SEQ ID NO: 117926 - DNA, 15 bp, Homo sapiens
ggagtctccctctgt

SEQ ID NO: 117927 - DNA, 15 bp, Homo sapiens
tggagtctccctctg

SEQ ID NO: 117928 - DNA, 15 bp, Homo sapiens
atggagtctccctct

SEQ ID NO: 117929 - DNA, 15 bp, Homo sapiens
aatggagtctccctc

SEQ ID NO: 117930 - DNA, 15 bp, Homo sapiens
taatggagtctccct

SEQ ID NO: 117931 - DNA, 15 bp, Homo sapiens
ttaatggagtctccc

SEQ ID NO: 117932 - DNA, 15 bp, Homo sapiens
tttaatggagtctcc

SEQ ID NO: 117933 - DNA, 15 bp, Homo sapiens
ttttaatggagtctc

SEQ ID NO: 117934 - DNA, 15 bp, Homo sapiens
tttttaatggagtct

SEQ ID NO: 117935 - DNA, 15 bp, Homo sapiens
ttttttaatggagtc

SEQ ID NO: 117936 - DNA, 15 bp, Homo sapiens
tttttttaatggagt

SEQ ID NO: 117937 - DNA, 15 bp, Homo sapiens
ttttttttaatggag

SEQ ID NO: 117938 - DNA, 15 bp, Homo sapiens
tttttttttaatgga

SEQ ID NO: 117939 - DNA, 15 bp, Homo sapiens
ttttttttttaatgg

SEQ ID NO: 117940 - DNA, 15 bp, Homo sapiens
cttttttttttaatg

SEQ ID NO: 117941 - DNA, 15 bp, Homo sapiens
tcttttttttttaat

SEQ ID NO: 117942 - DNA, 15 bp, Homo sapiens
ttcttttttttttaa

SEQ ID NO: 117943 - DNA, 15 bp, Homo sapiens
cttctttttttttta

SEQ ID NO: 117944 - DNA, 15 bp, Homo sapiens
tcttctttttttttt

SEQ ID NO: 117945 - DNA, 15 bp, Homo sapiens
ttcttcttttttttt

SEQ ID NO: 117946 - DNA, 15 bp, Homo sapiens
cttcttctttttttt

SEQ ID NO: 117947 - DNA, 15 bp, Homo sapiens
tcttcttcttttttt

SEQ ID NO: 117948 - DNA, 15 bp, Homo sapiens
ttcttcttctttttt

SEQ ID NO: 117949 - DNA, 15 bp, Homo sapiens
tttcttcttcttttt

SEQ ID NO: 117950 - DNA, 15 bp, Homo sapiens
ctttcttcttctttt

SEQ ID NO: 117951 - DNA, 15 bp, Homo sapiens
tctttcttcttcttt

SEQ ID NO: 117952 - DNA, 15 bp, Homo sapiens
ttctttcttcttctt

SEQ ID NO: 117953 - DNA, 15 bp, Homo sapiens
tttctttcttcttct

SEQ ID NO: 117954 - DNA, 15 bp, Homo sapiens
ctttctttcttcttc

SEQ ID NO: 117955 - DNA, 15 bp, Homo sapiens
tctttctttcttctt

SEQ ID NO: 117956 - DNA, 15 bp, Homo sapiens
ctctttctttcttct

SEQ ID NO: 117957 - DNA, 15 bp, Homo sapiens
tctctttctttcttc

SEQ ID NO: 117958 - DNA, 15 bp, Homo sapiens
ctctctttctttctt

SEQ ID NO: 117959 - DNA, 15 bp, Homo sapiens
tctctctttctttct

SEQ ID NO: 117960 - DNA, 15 bp, Homo sapiens
ttctctctttctttc

SEQ ID NO: 117961 - DNA, 15 bp, Homo sapiens
tttctctctttcttt

SEQ ID NO: 117962 - DNA, 15 bp, Homo sapiens
ctttctctctttctt

SEQ ID NO: 117963 - DNA, 15 bp, Homo sapiens
cctttctctctttct

SEQ ID NO: 117964 - DNA, 15 bp, Homo sapiens
tcctttctctctttc

SEQ ID NO: 117965 - DNA, 15 bp, Homo sapiens
ttcctttctctcttt

SEQ ID NO: 117966 - DNA, 15 bp, Homo sapiens
cttcctttctctctt

SEQ ID NO: 117967 - DNA, 15 bp, Homo sapiens
tcttcctttctctct

SEQ ID NO: 117968 - DNA, 15 bp, Homo sapiens
ctcttcctttctctc

SEQ ID NO: 117969 - DNA, 15 bp, Homo sapiens
tctcttcctttctct

SEQ ID NO: 117970 - DNA, 15 bp, Homo sapiens
ctctcttcctttctc

SEQ ID NO: 117971 - DNA, 15 bp, Homo sapiens
cctctcttcctttct

SEQ ID NO: 117972 - DNA, 15 bp, Homo sapiens
ccctctcttcctttc

SEQ ID NO: 117973 - DNA, 15 bp, Homo sapiens
tccctctcttccttt

SEQ ID NO: 117974 - DNA, 15 bp, Homo sapiens
ttccctctcttcctt

SEQ ID NO: 117975 - DNA, 15 bp, Homo sapiens
tttccctctcttcct

SEQ ID NO: 117976 - DNA, 15 bp, Homo sapiens
ctttccctctcttcc

SEQ ID NO: 117977 - DNA, 15 bp, Homo sapiens
tctttccctctcttc

SEQ ID NO: 117978 - DNA, 15 bp, Homo sapiens
ttctttccctctctt

SEQ ID NO: 117979 - DNA, 15 bp, Homo sapiens
tttctttccctctct

SEQ ID NO: 117980 - DNA, 15 bp, Homo sapiens
ctttctttccctctc

SEQ ID NO: 117981 - DNA, 15 bp, Homo sapiens
tctttctttccctct

SEQ ID NO: 117982 - DNA, 15 bp, Homo sapiens
ttctttctttccctc

SEQ ID NO: 117983 - DNA, 15 bp, Homo sapiens
tttctttctttccct

SEQ ID NO: 117984 - DNA, 15 bp, Homo sapiens
ttttctttctttccc

SEQ ID NO: 117985 - DNA, 15 bp, Homo sapiens
tttttctttctttcc

SEQ ID NO: 117986 - DNA, 15 bp, Homo sapiens
ctttttctttctttc

SEQ ID NO: 117987 - DNA, 15 bp, Homo sapiens
cctttttctttcttt

SEQ ID NO: 117988 - DNA, 15 bp, Homo sapiens
tcctttttctttctt

SEQ ID NO: 117989 - DNA, 15 bp, Homo sapiens
ttcctttttctttct

SEQ ID NO: 117990 - DNA, 15 bp, Homo sapiens
tttcctttttctttc

SEQ ID NO: 117991 - DNA, 15 bp, Homo sapiens
ctttcctttttcttt

SEQ ID NO: 117992 - DNA, 15 bp, Homo sapiens
ctttctttccttttt

SEQ ID NO: 117993 - DNA, 15 bp, Homo sapiens
tctttctttcctttt

SEQ ID NO: 117994 - DNA, 15 bp, Homo sapiens
ttctttctttccttt

SEQ ID NO: 117995 - DNA, 15 bp, Homo sapiens
tttctttctttcctt

SEQ ID NO: 117996 - DNA, 15 bp, Homo sapiens
ctttctttctttcct

SEQ ID NO: 117997 - DNA, 15 bp, Homo sapiens
tctttctttctttcc

SEQ ID NO: 117998 - DNA, 15 bp, Homo sapiens
ttctttctttctttc

SEQ ID NO: 117999 - DNA, 15 bp, Homo sapiens
tttctttctttcttt

SEQ ID NO: 118000 - DNA, 15 bp, Homo sapiens
ctttctttctttctt

SEQ ID NO: 118001 - DNA, 15 bp, Homo sapiens
tctttctttctttct

SEQ ID NO: 118002 - DNA, 15 bp, Homo sapiens
ctctttctttctttc

SEQ ID NO: 118003 - DNA, 15 bp, Homo sapiens
tctctttctttcttt

SEQ ID NO: 118004 - DNA, 15 bp, Homo sapiens
ttctctttctttctt

SEQ ID NO: 118005 - DNA, 15 bp, Homo sapiens
tttctctttctttct

SEQ ID NO: 118006 - DNA, 15 bp, Homo sapiens
ctttctctttctttc

SEQ ID NO: 118007 - DNA, 15 bp, Homo sapiens
tctttctctttcttt

SEQ ID NO: 118008 - DNA, 15 bp, Homo sapiens
ttctttctctttctt

SEQ ID NO: 118009 - DNA, 15 bp, Homo sapiens
tttctttctctttct

SEQ ID NO: 118010 - DNA, 15 bp, Homo sapiens
ctttctttctctttc

SEQ ID NO: 118011 - DNA, 15 bp, Homo sapiens
cctttctttctcttt

SEQ ID NO: 118012 - DNA, 15 bp, Homo sapiens
tcctttctttctctt

SEQ ID NO: 118013 - DNA, 15 bp, Homo sapiens
ctttcctttctttct

SEQ ID NO: 118014 - DNA, 15 bp, Homo sapiens
tctttcctttctttc

SEQ ID NO: 118015 - DNA, 15 bp, Homo sapiens
ttctttcctttcttt

SEQ ID NO: 118016 - DNA, 15 bp, Homo sapiens
tttctttcctttctt

SEQ ID NO: 118017 - DNA, 15 bp, Homo sapiens
ctttctttcctttct

SEQ ID NO: 118018 - DNA, 15 bp, Homo sapiens
tctttctttcctttc

SEQ ID NO: 118019 - DNA, 15 bp, Homo sapiens
cctttctttctttct

SEQ ID NO: 118020 - DNA, 15 bp, Homo sapiens
tcctttctttctttc

SEQ ID NO: 118021 - DNA, 15 bp, Homo sapiens
ttcctttctttcttt

SEQ ID NO: 118022 - DNA, 15 bp, Homo sapiens
tttcctttctttctt

SEQ ID NO: 118023 - DNA, 15 bp, Homo sapiens
cctttctttctttcc

SEQ ID NO: 118024 - DNA, 15 bp, Homo sapiens
atttctttctttctt

SEQ ID NO: 118025 - DNA, 15 bp, Homo sapiens
tatttctttctttct

SEQ ID NO: 118026 - DNA, 15 bp, Homo sapiens
ctatttctttctttc

SEQ ID NO: 118027 - DNA, 15 bp, Homo sapiens
tctatttctttcttt

SEQ ID NO: 118028 - DNA, 15 bp, Homo sapiens
ttctatttctttctt

SEQ ID NO: 118029 - DNA, 15 bp, Homo sapiens
tttctatttctttct

SEQ ID NO: 118030 - DNA, 15 bp, Homo sapiens
ctttctatttctttc

SEQ ID NO: 118031 - DNA, 15 bp, Homo sapiens
tctttctatttcttt

SEQ ID NO: 118032 - DNA, 15 bp, Homo sapiens
ctctttctatttctt

SEQ ID NO: 118033 - DNA, 15 bp, Homo sapiens
tctctttctatttct

SEQ ID NO: 118034 - DNA, 15 bp, Homo sapiens
ttctctttctatttc

SEQ ID NO: 118035 - DNA, 15 bp, Homo sapiens
tttctctttctattt

SEQ ID NO: 118036 - DNA, 15 bp, Homo sapiens
ctttctctttctatt

SEQ ID NO: 118037 - DNA, 15 bp, Homo sapiens
tctttctctttctat

SEQ ID NO: 118038 - DNA, 15 bp, Homo sapiens
ttctttctctttcta

SEQ ID NO: 118039 - DNA, 15 bp, Homo sapiens
ccctttctttctctt

SEQ ID NO: 118040 - DNA, 15 bp, Homo sapiens
tccctttctttctct

SEQ ID NO: 118041 - DNA, 15 bp, Homo sapiens
ttccctttctttctc

SEQ ID NO: 118042 - DNA, 15 bp, Homo sapiens
tttccctttctttct

SEQ ID NO: 118043 - DNA, 15 bp, Homo sapiens
ctttccctttctttc

SEQ ID NO: 118044 - DNA, 15 bp, Homo sapiens
cctttccctttcttt

SEQ ID NO: 118045 - DNA, 15 bp, Homo sapiens
tcctttccctttctt

SEQ ID NO: 118046 - DNA, 15 bp, Homo sapiens
ttcctttccctttct

SEQ ID NO: 118047 - DNA, 15 bp, Homo sapiens
tttcctttccctttc

SEQ ID NO: 118048 - DNA, 15 bp, Homo sapiens
ctttcctttcccttt

SEQ ID NO: 118049 - DNA, 15 bp, Homo sapiens
cctttcctttccctt

SEQ ID NO: 118050 - DNA, 15 bp, Homo sapiens
tcctttcctttccct

SEQ ID NO: 118051 - DNA, 15 bp, Homo sapiens
ttcctttcctttccc

SEQ ID NO: 118052 - DNA, 15 bp, Homo sapiens
tttcctttcctttcc

SEQ ID NO: 118053 - DNA, 15 bp, Homo sapiens
ttttcctttcctttc

SEQ ID NO: 118054 - DNA, 15 bp, Homo sapiens
attttcctttccttt

SEQ ID NO: 118055 - DNA, 15 bp, Homo sapiens
cattttcctttcctt

SEQ ID NO: 118056 - DNA, 15 bp, Homo sapiens
ccattttcctttcct

SEQ ID NO: 118057 - DNA, 15 bp, Homo sapiens
tccattttcctttcc

SEQ ID NO: 118058 - DNA, 15 bp, Homo sapiens
ttccattttcctttc

SEQ ID NO: 118059 - DNA, 15 bp, Homo sapiens
tttccattttccttt

SEQ ID NO: 118060 - DNA, 15 bp, Homo sapiens
atttccattttcctt

SEQ ID NO: 118061 - DNA, 15 bp, Homo sapiens
catttccattttcct

SEQ ID NO: 118062 - DNA, 15 bp, Homo sapiens
tcatttccattttcc

SEQ ID NO: 118063 - DNA, 15 bp, Homo sapiens
ctcatttccattttc

SEQ ID NO: 118064 - DNA, 15 bp, Homo sapiens
cctcatttccatttt

SEQ ID NO: 118065 - DNA, 15 bp, Homo sapiens
ccctcatttccattt

SEQ ID NO: 118066 - DNA, 15 bp, Homo sapiens
gccctcatttccatt

SEQ ID NO: 118067 - DNA, 15 bp, Homo sapiens
agccctcatttccat

SEQ ID NO: 118068 - DNA, 15 bp, Homo sapiens
tagccctcatttcca

SEQ ID NO: 118069 - DNA, 15 bp, Homo sapiens
ttagccctcatttcc

SEQ ID NO: 118070 - DNA, 15 bp, Homo sapiens
tttagccctcatttc

SEQ ID NO: 118071 - DNA, 15 bp, Homo sapiens
ttttagccctcattt

SEQ ID NO: 118072 - DNA, 15 bp, Homo sapiens
gttttagccctcatt

SEQ ID NO: 118073 - DNA, 15 bp, Homo sapiens
cgttttagccctcat

SEQ ID NO: 118074 - DNA, 15 bp, Homo sapiens
ccgttttagccctca

SEQ ID NO: 118075 - DNA, 15 bp, Homo sapiens
gccgttttagccctc

SEQ ID NO: 118076 - DNA, 15 bp, Homo sapiens
tgccgttttagccct

SEQ ID NO: 118077 - DNA, 15 bp, Homo sapiens
gtgccgttttagccc

SEQ ID NO: 118078 - DNA, 15 bp, Homo sapiens
cgtgccgttttagcc

SEQ ID NO: 118079 - DNA, 15 bp, Homo sapiens
gcgtgccgttttagc

SEQ ID NO: 118080 - DNA, 15 bp, Homo sapiens
ggcgtgccgttttag

SEQ ID NO: 118081 - DNA, 15 bp, Homo sapiens
gggcgtgccgtttta

SEQ ID NO: 118082 - DNA, 15 bp, Homo sapiens
agggcgtgccgtttt

SEQ ID NO: 118083 - DNA, 15 bp, Homo sapiens
tagggcgtgccgttt

SEQ ID NO: 118084 - DNA, 15 bp, Homo sapiens
ctagggcgtgccgtt

SEQ ID NO: 118085 - DNA, 15 bp, Homo sapiens
cctagggcgtgccgt

SEQ ID NO: 118086 - DNA, 15 bp, Homo sapiens
tcctagggcgtgccg

SEQ ID NO: 118087 - DNA, 15 bp, Homo sapiens
gtcctagggcgtgcc

SEQ ID NO: 118088 - DNA, 15 bp, Homo sapiens
agtcctagggcgtgc

SEQ ID NO: 118089 - DNA, 15 bp, Homo sapiens
cagtcctagggcgtg

SEQ ID NO: 118090 - DNA, 15 bp, Homo sapiens
gcagtcctagggcgt

SEQ ID NO: 118091 - DNA, 15 bp, Homo sapiens
agcagtcctagggcg

SEQ ID NO: 118092 - DNA, 15 bp, Homo sapiens
gagcagtcctagggc

SEQ ID NO: 118093 - DNA, 15 bp, Homo sapiens
ggagcagtcctaggg

SEQ ID NO: 118094 - DNA, 15 bp, Homo sapiens
cggagcagtcctagg

SEQ ID NO: 118095 - DNA, 15 bp, Homo sapiens
ccggagcagtcctag

SEQ ID NO: 118096 - DNA, 15 bp, Homo sapiens
cccggagcagtccta

SEQ ID NO: 118097 - DNA, 15 bp, Homo sapiens
ccccggagcagtcct

SEQ ID NO: 118098 - DNA, 15 bp, Homo sapiens
tccccggagcagtcc

SEQ ID NO: 118099 - DNA, 15 bp, Homo sapiens
ctccccggagcagtc

SEQ ID NO: 118100 - DNA, 15 bp, Homo sapiens
tctccccggagcagt

SEQ ID NO: 118101 - DNA, 15 bp, Homo sapiens
ttctccccggagcag

SEQ ID NO: 118102 - DNA, 15 bp, Homo sapiens
tttctccccggagca

SEQ ID NO: 118103 - DNA, 15 bp, Homo sapiens
ctttctccccggagc

SEQ ID NO: 118104 - DNA, 15 bp, Homo sapiens
cctttctccccggag

SEQ ID NO: 118105 - DNA, 15 bp, Homo sapiens
tcctttctccccgga

SEQ ID NO: 118106 - DNA, 15 bp, Homo sapiens
ctcctttctccccgg

SEQ ID NO: 118107 - DNA, 15 bp, Homo sapiens
cctcctttctccccg

SEQ ID NO: 118108 - DNA, 15 bp, Homo sapiens
ccctcctttctcccc

SEQ ID NO: 118109 - DNA, 15 bp, Homo sapiens
tccctcctttctccc

SEQ ID NO: 118110 - DNA, 15 bp, Homo sapiens
gtccctcctttctcc

SEQ ID NO: 118111 - DNA, 15 bp, Homo sapiens
ggtccctcctttctc

SEQ ID NO: 118112 - DNA, 15 bp, Homo sapiens
aggtccctcctttct

SEQ ID NO: 118113 - DNA, 15 bp, Homo sapiens
caggtccctcctttc

SEQ ID NO: 118114 - DNA, 15 bp, Homo sapiens
ccaggtccctccttt

SEQ ID NO: 118115 - DNA, 15 bp, Homo sapiens
cccaggtccctcctt

SEQ ID NO: 118116 - DNA, 15 bp, Homo sapiens
tcccaggtccctcct

SEQ ID NO: 118117 - DNA, 15 bp, Homo sapiens
ctcccaggtccctcc

SEQ ID NO: 118118 - DNA, 15 bp, Homo sapiens
cctcccaggtccctc

SEQ ID NO: 118119 - DNA, 15 bp, Homo sapiens
tcctcccaggtccct

SEQ ID NO: 118120 - DNA, 15 bp, Homo sapiens
ttcctcccaggtccc

SEQ ID NO: 118121 - DNA, 15 bp, Homo sapiens
attcctcccaggtcc

SEQ ID NO: 118122 - DNA, 15 bp, Homo sapiens
cattcctcccaggtc

SEQ ID NO: 118123 - DNA, 15 bp, Homo sapiens
gcattcctcccaggt

SEQ ID NO: 118124 - DNA, 15 bp, Homo sapiens
tgcattcctcccagg

SEQ ID NO: 118125 - DNA, 15 bp, Homo sapiens
ctgcattcctcccag

SEQ ID NO: 118126 - DNA, 15 bp, Homo sapiens
actgcattcctccca

SEQ ID NO: 118127 - DNA, 15 bp, Homo sapiens
gactgcattcctccc

SEQ ID NO: 118128 - DNA, 15 bp, Homo sapiens
agactgcattcctcc

SEQ ID NO: 118129 - DNA, 15 bp, Homo sapiens
gagactgcattcctc

SEQ ID NO: 118130 - DNA, 15 bp, Homo sapiens
tgagactgcattcct

SEQ ID NO: 118131 - DNA, 15 bp, Homo sapiens
ttgagactgcattcc

SEQ ID NO: 118132 - DNA, 15 bp, Homo sapiens
gttgagactgcattc

SEQ ID NO: 118133 - DNA, 15 bp, Homo sapiens
agttgagactgcatt

SEQ ID NO: 118134 - DNA, 15 bp, Homo sapiens
gagttgagactgcat

SEQ ID NO: 118135 - DNA, 15 bp, Homo sapiens
agagttgagactgca

SEQ ID NO: 118136 - DNA, 15 bp, Homo sapiens
cagagttgagactgc

SEQ ID NO: 118137 - DNA, 15 bp, Homo sapiens
acagagttgagactg

SEQ ID NO: 118138 - DNA, 15 bp, Homo sapiens
gacagagttgagact

SEQ ID NO: 118139 - DNA, 15 bp, Homo sapiens
tgacagagttgagac

SEQ ID NO: 118140 - DNA, 15 bp, Homo sapiens
atgacagagttgaga

SEQ ID NO: 118141 - DNA, 15 bp, Homo sapiens
gatgacagagttgag

SEQ ID NO: 118142 - DNA, 15 bp, Homo sapiens
agatgacagagttga

SEQ ID NO: 118143 - DNA, 15 bp, Homo sapiens
gagatgacagagttg

SEQ ID NO: 118144 - DNA, 15 bp, Homo sapiens
agagatgacagagtt

SEQ ID NO: 118145 - DNA, 15 bp, Homo sapiens
gagagatgacagagt

SEQ ID NO: 118146 - DNA, 15 bp, Homo sapiens
ggagagatgacagag

SEQ ID NO: 118147 - DNA, 15 bp, Homo sapiens
gggagagatgacaga

SEQ ID NO: 118148 - DNA, 15 bp, Homo sapiens
cgggagagatgacag

SEQ ID NO: 118149 - DNA, 15 bp, Homo sapiens
gcgggagagatgaca

SEQ ID NO: 118150 - DNA, 15 bp, Homo sapiens
tgcgggagagatgac

SEQ ID NO: 118151 - DNA, 15 bp, Homo sapiens
ctgcgggagagatga

SEQ ID NO: 118152 - DNA, 15 bp, Homo sapiens
gctgcgggagagatg

SEQ ID NO: 118153 - DNA, 15 bp, Homo sapiens
tgctgcgggagagat

SEQ ID NO: 118154 - DNA, 15 bp, Homo sapiens
ctgctgcgggagaga

SEQ ID NO: 118155 - DNA, 15 bp, Homo sapiens
gctgctgcgggagag

SEQ ID NO: 118156 - DNA, 15 bp, Homo sapiens
ggctgctgcgggaga

SEQ ID NO: 118157 - DNA, 15 bp, Homo sapiens
aggctgctgcgggag

SEQ ID NO: 118158 - DNA, 15 bp, Homo sapiens
caggctgctgcggga

SEQ ID NO: 118159 - DNA, 15 bp, Homo sapiens
tcaggctgctgcggg

SEQ ID NO: 118160 - DNA, 15 bp, Homo sapiens
gtcaggctgctgcgg

SEQ ID NO: 118161 - DNA, 15 bp, Homo sapiens
tgtcaggctgctgcg

SEQ ID NO: 118162 - DNA, 15 bp, Homo sapiens
ttgtcaggctgctgc

SEQ ID NO: 118163 - DNA, 15 bp, Homo sapiens
tttgtcaggctgctg

SEQ ID NO: 118164 - DNA, 15 bp, Homo sapiens
ctttgtcaggctgct

SEQ ID NO: 118165 - DNA, 15 bp, Homo sapiens
cctttgtcaggctgc

SEQ ID NO: 118166 - DNA, 15 bp, Homo sapiens
gcctttgtcaggctg

SEQ ID NO: 118167 - DNA, 15 bp, Homo sapiens
ggcctttgtcaggct

SEQ ID NO: 118168 - DNA, 15 bp, Homo sapiens
gggcctttgtcaggc

SEQ ID NO: 118169 - DNA, 15 bp, Homo sapiens
agggcctttgtcagg

SEQ ID NO: 118170 - DNA, 15 bp, Homo sapiens
cagggcctttgtcag

SEQ ID NO: 118171 - DNA, 15 bp, Homo sapiens
acagggcctttgtca

SEQ ID NO: 118172 - DNA, 15 bp, Homo sapiens
cacagggcctttgtc

SEQ ID NO: 118173 - DNA, 15 bp, Homo sapiens
tcacagggcctttgt

SEQ ID NO: 118174 - DNA, 15 bp, Homo sapiens
ctcacagggcctttg

SEQ ID NO: 118175 - DNA, 15 bp, Homo sapiens
cctcacagggccttt

SEQ ID NO: 118176 - DNA, 15 bp, Homo sapiens
tcctcacagggcctt

SEQ ID NO: 118177 - DNA, 15 bp, Homo sapiens
ttcctcacagggcct

SEQ ID NO: 118178 - DNA, 15 bp, Homo sapiens
tttcctcacagggcc

SEQ ID NO: 118179 - DNA, 15 bp, Homo sapiens
ctttcctcacagggc

SEQ ID NO: 118180 - DNA, 15 bp, Homo sapiens
tctttcctcacaggg

SEQ ID NO: 118181 - DNA, 15 bp, Homo sapiens
ctctttcctcacagg

SEQ ID NO: 118182 - DNA, 15 bp, Homo sapiens
cctctttcctcacag

SEQ ID NO: 118183 - DNA, 15 bp, Homo sapiens
tcctctttcctcaca

SEQ ID NO: 118184 - DNA, 15 bp, Homo sapiens
ctcctctttcctcac

SEQ ID NO: 118185 - DNA, 15 bp, Homo sapiens
cctcctctttcctca

SEQ ID NO: 118186 - DNA, 15 bp, Homo sapiens
gcctcctctttcctc

SEQ ID NO: 118187 - DNA, 15 bp, Homo sapiens
agcctcctctttcct

SEQ ID NO: 118188 - DNA, 15 bp, Homo sapiens
cagcctcctctttcc

SEQ ID NO: 118189 - DNA, 15 bp, Homo sapiens
tcagcctcctctttc

SEQ ID NO: 118190 - DNA, 15 bp, Homo sapiens
ttcagcctcctcttt

SEQ ID NO: 118191 - DNA, 15 bp, Homo sapiens
cttcagcctcctctt

SEQ ID NO: 118192 - DNA, 15 bp, Homo sapiens
tcttcagcctcctct

SEQ ID NO: 118193 - DNA, 15 bp, Homo sapiens
ctcttcagcctcctc

SEQ ID NO: 118194 - DNA, 15 bp, Homo sapiens
cctcttcagcctcct

SEQ ID NO: 118195 - DNA, 15 bp, Homo sapiens
gcctcttcagcctcc

SEQ ID NO: 118196 - DNA, 15 bp, Homo sapiens
tgcctcttcagcctc

SEQ ID NO: 118197 - DNA, 15 bp, Homo sapiens
gtgcctcttcagcct

SEQ ID NO: 118198 - DNA, 15 bp, Homo sapiens
tgtgcctcttcagcc

SEQ ID NO: 118199 - DNA, 15 bp, Homo sapiens
ctgtgcctcttcagc

SEQ ID NO: 118200 - DNA, 15 bp, Homo sapiens
cctgtgcctcttcag

SEQ ID NO: 118201 - DNA, 15 bp, Homo sapiens
gcctgtgcctcttca

SEQ ID NO: 118202 - DNA, 15 bp, Homo sapiens
ggcctgtgcctcttc

SEQ ID NO: 118203 - DNA, 15 bp, Homo sapiens
gggcctgtgcctctt

SEQ ID NO: 118204 - DNA, 15 bp, Homo sapiens
tgggcctgtgcctct

SEQ ID NO: 118205 - DNA, 15 bp, Homo sapiens
ctgggcctgtgcctc

SEQ ID NO: 118206 - DNA, 15 bp, Homo sapiens
cctgggcctgtgcct

SEQ ID NO: 118207 - DNA, 15 bp, Homo sapiens
ccctgggcctgtgcc

SEQ ID NO: 118208 - DNA, 15 bp, Homo sapiens
cccctgggcctgtgc

SEQ ID NO: 118209 - DNA, 15 bp, Homo sapiens
tcccctgggcctgtg

SEQ ID NO: 118210 - DNA, 15 bp, Homo sapiens
ctcccctgggcctgt

SEQ ID NO: 118211 - DNA, 15 bp, Homo sapiens
cctcccctgggcctg

SEQ ID NO: 118212 - DNA, 15 bp, Homo sapiens
gcctcccctgggcct

SEQ ID NO: 118213 - DNA, 15 bp, Homo sapiens
agcctcccctgggcc

SEQ ID NO: 118214 - DNA, 15 bp, Homo sapiens
cagcctcccctgggc

SEQ ID NO: 118215 - DNA, 15 bp, Homo sapiens
ccagcctcccctggg

SEQ ID NO: 118216 - DNA, 15 bp, Homo sapiens
tccagcctcccctgg

SEQ ID NO: 118217 - DNA, 15 bp, Homo sapiens
ctccagcctcccctg

SEQ ID NO: 118218 - DNA, 15 bp, Homo sapiens
gctccagcctcccct

SEQ ID NO: 118219 - DNA, 15 bp, Homo sapiens
tgctccagcctcccc

SEQ ID NO: 118220 - DNA, 15 bp, Homo sapiens
gtgctccagcctccc

SEQ ID NO: 118221 - DNA, 15 bp, Homo sapiens
ggtgctccagcctcc

SEQ ID NO: 118222 - DNA, 15 bp, Homo sapiens
aggtgctccagcctc

SEQ ID NO: 118223 - DNA, 15 bp, Homo sapiens
gaggtgctccagcct

SEQ ID NO: 118224 - DNA, 15 bp, Homo sapiens
ggaggtgctccagcc

SEQ ID NO: 118225 - DNA, 15 bp, Homo sapiens
tggaggtgctccagc

SEQ ID NO: 118226 - DNA, 15 bp, Homo sapiens
atggaggtgctccag

SEQ ID NO: 118227 - DNA, 15 bp, Homo sapiens
aatggaggtgctcca

SEQ ID NO: 118228 - DNA, 15 bp, Homo sapiens
gaatggaggtgctcc

SEQ ID NO: 118229 - DNA, 15 bp, Homo sapiens
ggaatggaggtgctc

SEQ ID NO: 118230 - DNA, 15 bp, Homo sapiens
tggaatggaggtgct

SEQ ID NO: 118231 - DNA, 15 bp, Homo sapiens
atggaatggaggtgc

SEQ ID NO: 118232 - DNA, 15 bp, Homo sapiens
aatggaatggaggtg

SEQ ID NO: 118233 - DNA, 15 bp, Homo sapiens
caatggaatggaggt

SEQ ID NO: 118234 - DNA, 15 bp, Homo sapiens
acaatggaatggagg

SEQ ID NO: 118235 - DNA, 15 bp, Homo sapiens
aacaatggaatggag

SEQ ID NO: 118236 - DNA, 15 bp, Homo sapiens
caacaatggaatgga

SEQ ID NO: 118237 - DNA, 15 bp, Homo sapiens
ccaacaatggaatgg

SEQ ID NO: 118238 - DNA, 15 bp, Homo sapiens
cccaacaatggaatg

SEQ ID NO: 118239 - DNA, 15 bp, Homo sapiens
tcccaacaatggaat

SEQ ID NO: 118240 - DNA, 15 bp, Homo sapiens
atcccaacaatggaa

SEQ ID NO: 118241 - DNA, 15 bp, Homo sapiens
gatcccaacaatgga

SEQ ID NO: 118242 - DNA, 15 bp, Homo sapiens
agatcccaacaatgg

SEQ ID NO: 118243 - DNA, 15 bp, Homo sapiens
gagatcccaacaatg

SEQ ID NO: 118244 - DNA, 15 bp, Homo sapiens
tgagatcccaacaat

SEQ ID NO: 118245 - DNA, 15 bp, Homo sapiens
gtgagatcccaacaa

SEQ ID NO: 118246 - DNA, 15 bp, Homo sapiens
ggtgagatcccaaca

SEQ ID NO: 118247 - DNA, 15 bp, Homo sapiens
tggtgagatcccaac

SEQ ID NO: 118248 - DNA, 15 bp, Homo sapiens
ctggtgagatcccaa

SEQ ID NO: 118249 - DNA, 15 bp, Homo sapiens
cctggtgagatccca

SEQ ID NO: 118250 - DNA, 15 bp, Homo sapiens
ccctggtgagatccc

SEQ ID NO: 118251 - DNA, 15 bp, Homo sapiens
gccctggtgagatcc

SEQ ID NO: 118252 - DNA, 15 bp, Homo sapiens
tgccctggtgagatc

SEQ ID NO: 118253 - DNA, 15 bp, Homo sapiens
ctgccctggtgagat

SEQ ID NO: 118254 - DNA, 15 bp, Homo sapiens
cctgccctggtgaga

SEQ ID NO: 118255 - DNA, 15 bp, Homo sapiens
ccctgccctggtgag

SEQ ID NO: 118256 - DNA, 15 bp, Homo sapiens
cccctgccctggtga

SEQ ID NO: 118257 - DNA, 15 bp, Homo sapiens
gcccctgccctggtg

SEQ ID NO: 118258 - DNA, 15 bp, Homo sapiens
cgcccctgccctggt

SEQ ID NO: 118259 - DNA, 15 bp, Homo sapiens
ccgcccctgccctgg

SEQ ID NO: 118260 - DNA, 15 bp, Homo sapiens
cccgcccctgccctg

SEQ ID NO: 118261 - DNA, 15 bp, Homo sapiens
acccgcccctgccct

SEQ ID NO: 118262 - DNA, 15 bp, Homo sapiens
cacccgcccctgccc

SEQ ID NO: 118263 - DNA, 15 bp, Homo sapiens
ccacccgcccctgcc

SEQ ID NO: 118264 - DNA, 15 bp, Homo sapiens
cccacccgcccctgc

SEQ ID NO: 118265 - DNA, 15 bp, Homo sapiens
tcccacccgcccctg

SEQ ID NO: 118266 - DNA, 15 bp, Homo sapiens
ttcccacccgcccct

SEQ ID NO: 118267 - DNA, 15 bp, Homo sapiens
attcccacccgcccc

SEQ ID NO: 118268 - DNA, 15 bp, Homo sapiens
cattcccacccgccc

SEQ ID NO: 118269 - DNA, 15 bp, Homo sapiens
ccattcccacccgcc

SEQ ID NO: 118270 - DNA, 15 bp, Homo sapiens
tccattcccacccgc

SEQ ID NO: 118271 - DNA, 15 bp, Homo sapiens
ctccattcccacccg

SEQ ID NO: 118272 - DNA, 15 bp, Homo sapiens
cctccattcccaccc

SEQ ID NO: 118273 - DNA, 15 bp, Homo sapiens
gcctccattcccacc

SEQ ID NO: 118274 - DNA, 15 bp, Homo sapiens
tgcctccattcccac

SEQ ID NO: 118275 - DNA, 15 bp, Homo sapiens
ctgcctccattccca

SEQ ID NO: 118276 - DNA, 15 bp, Homo sapiens
gctgcctccattccc

SEQ ID NO: 118277 - DNA, 15 bp, Homo sapiens
agctgcctccattcc

SEQ ID NO: 118278 - DNA, 15 bp, Homo sapiens
cagctgcctccattc

SEQ ID NO: 118279 - DNA, 15 bp, Homo sapiens
ccagctgcctccatt

SEQ ID NO: 118280 - DNA, 15 bp, Homo sapiens
gccagctgcctccat

SEQ ID NO: 118281 - DNA, 15 bp, Homo sapiens
tgccagctgcctcca

SEQ ID NO: 118282 - DNA, 15 bp, Homo sapiens
ctgccagctgcctcc

SEQ ID NO: 118283 - DNA, 15 bp, Homo sapiens
cctgccagctgcctc

SEQ ID NO: 118284 - DNA, 15 bp, Homo sapiens
ccctgccagctgcct

SEQ ID NO: 118285 - DNA, 15 bp, Homo sapiens
cccctgccagctgcc

SEQ ID NO: 118286 - DNA, 15 bp, Homo sapiens
ccccctgccagctgc

SEQ ID NO: 118287 - DNA, 15 bp, Homo sapiens
cccccctgccagctg

SEQ ID NO: 118288 - DNA, 15 bp, Homo sapiens
tcccccctgccagct

SEQ ID NO: 118289 - DNA, 15 bp, Homo sapiens
atcccccctgccagc

SEQ ID NO: 118290 - DNA, 15 bp, Homo sapiens
catcccccctgccag

SEQ ID NO: 118291 - DNA, 15 bp, Homo sapiens
ccatcccccctgcca

SEQ ID NO: 118292 - DNA, 15 bp, Homo sapiens
cccatcccccctgcc

SEQ ID NO: 118293 - DNA, 15 bp, Homo sapiens
ccccatcccccctgc

SEQ ID NO: 118294 - DNA, 15 bp, Homo sapiens
tccccatcccccctg

SEQ ID NO: 118295 - DNA, 15 bp, Homo sapiens
ctccccatcccccct

SEQ ID NO: 118296 - DNA, 15 bp, Homo sapiens
cctccccatcccccc

SEQ ID NO: 118297 - DNA, 15 bp, Homo sapiens
ccctccccatccccc

SEQ ID NO: 118298 - DNA, 15 bp, Homo sapiens
tccctccccatcccc

SEQ ID NO: 118299 - DNA, 15 bp, Homo sapiens
ctccctccccatccc

SEQ ID NO: 118300 - DNA, 15 bp, Homo sapiens
cctccctccccatcc

SEQ ID NO: 118301 - DNA, 15 bp, Homo sapiens
gcctccctccccatc

SEQ ID NO: 118302 - DNA, 15 bp, Homo sapiens
ggcctccctccccat

SEQ ID NO: 118303 - DNA, 15 bp, Homo sapiens
tggcctccctcccca

SEQ ID NO: 118304 - DNA, 15 bp, Homo sapiens
ctggcctccctcccc

SEQ ID NO: 118305 - DNA, 15 bp, Homo sapiens
gctggcctccctccc

SEQ ID NO: 118306 - DNA, 15 bp, Homo sapiens
cgctggcctccctcc

SEQ ID NO: 118307 - DNA, 15 bp, Homo sapiens
ccgctggcctccctc

SEQ ID NO: 118308 - DNA, 15 bp, Homo sapiens
cccgctggcctccct

SEQ ID NO: 118309 - DNA, 15 bp, Homo sapiens
acccgctggcctccc

SEQ ID NO: 118310 - DNA, 15 bp, Homo sapiens
cacccgctggcctcc

SEQ ID NO: 118311 - DNA, 15 bp, Homo sapiens
acacccgctggcctc

SEQ ID NO: 118312 - DNA, 15 bp, Homo sapiens
tacacccgctggcct

SEQ ID NO: 118313 - DNA, 15 bp, Homo sapiens
gtacacccgctggcc

SEQ ID NO: 118314 - DNA, 15 bp, Homo sapiens
ggtacacccgctggc

SEQ ID NO: 118315 - DNA, 15 bp, Homo sapiens
aggtacacccgctgg

SEQ ID NO: 118316 - DNA, 15 bp, Homo sapiens
caggtacacccgctg

SEQ ID NO: 118317 - DNA, 15 bp, Homo sapiens
ccaggtacacccgct

SEQ ID NO: 118318 - DNA, 15 bp, Homo sapiens
gccaggtacacccgc

SEQ ID NO: 118319 - DNA, 15 bp, Homo sapiens
ggccaggtacacccg

SEQ ID NO: 118320 - DNA, 15 bp, Homo sapiens
aggccaggtacaccc

SEQ ID NO: 118321 - DNA, 15 bp, Homo sapiens
caggccaggtacacc

SEQ ID NO: 118322 - DNA, 15 bp, Homo sapiens
gcaggccaggtacac

SEQ ID NO: 118323 - DNA, 15 bp, Homo sapiens
agcaggccaggtaca

SEQ ID NO: 118324 - DNA, 15 bp, Homo sapiens
cagcaggccaggtac

SEQ ID NO: 118325 - DNA, 15 bp, Homo sapiens
ccagcaggccaggta

SEQ ID NO: 118326 - DNA, 15 bp, Homo sapiens
cccagcaggccaggt

SEQ ID NO: 118327 - DNA, 15 bp, Homo sapiens
gcccagcaggccagg

SEQ ID NO: 118328 - DNA, 15 bp, Homo sapiens
ggcccagcaggccag

SEQ ID NO: 118329 - DNA, 15 bp, Homo sapiens
tggcccagcaggcca

SEQ ID NO: 118330 - DNA, 15 bp, Homo sapiens
gtggcccagcaggcc

SEQ ID NO: 118331 - DNA, 15 bp, Homo sapiens
ggtggcccagcaggc

SEQ ID NO: 118332 - DNA, 15 bp, Homo sapiens
aggtggcccagcagg

SEQ ID NO: 118333 - DNA, 15 bp, Homo sapiens
caggtggcccagcag

SEQ ID NO: 118334 - DNA, 15 bp, Homo sapiens
ccaggtggcccagca

SEQ ID NO: 118335 - DNA, 15 bp, Homo sapiens
cccaggtggcccagc

SEQ ID NO: 118336 - DNA, 15 bp, Homo sapiens
tcccaggtggcccag

SEQ ID NO: 118337 - DNA, 15 bp, Homo sapiens
gtcccaggtggccca

SEQ ID NO: 118338 - DNA, 15 bp, Homo sapiens
agtcccaggtggccc

SEQ ID NO: 118339 - DNA, 15 bp, Homo sapiens
gagtcccaggtggcc

SEQ ID NO: 118340 - DNA, 15 bp, Homo sapiens
ggagtcccaggtggc

SEQ ID NO: 118341 - DNA, 15 bp, Homo sapiens
aggagtcccaggtgg

SEQ ID NO: 118342 - DNA, 15 bp, Homo sapiens
caggagtcccaggtg

SEQ ID NO: 118343 - DNA, 15 bp, Homo sapiens
gcaggagtcccaggt

SEQ ID NO: 118344 - DNA, 15 bp, Homo sapiens
tgcaggagtcccagg

SEQ ID NO: 118345 - DNA, 15 bp, Homo sapiens
gtgcaggagtcccag

SEQ ID NO: 118346 - DNA, 15 bp, Homo sapiens
cgtgcaggagtccca

SEQ ID NO: 118347 - DNA, 15 bp, Homo sapiens
gcgtgcaggagtccc

SEQ ID NO: 118348 - DNA, 15 bp, Homo sapiens
agcgtgcaggagtcc

SEQ ID NO: 118349 - DNA, 15 bp, Homo sapiens
cagcgtgcaggagtc

SEQ ID NO: 118350 - DNA, 15 bp, Homo sapiens
gcagcgtgcaggagt

SEQ ID NO: 118351 - DNA, 15 bp, Homo sapiens
agcagcgtgcaggag

SEQ ID NO: 118352 - DNA, 15 bp, Homo sapiens
gagcagcgtgcagga

SEQ ID NO: 118353 - DNA, 15 bp, Homo sapiens
tgagcagcgtgcagg

SEQ ID NO: 118354 - DNA, 15 bp, Homo sapiens
ctgagcagcgtgcag

SEQ ID NO: 118355 - DNA, 15 bp, Homo sapiens
actgagcagcgtgca

SEQ ID NO: 118356 - DNA, 15 bp, Homo sapiens
cactgagcagcgtgc

SEQ ID NO: 118357 - DNA, 15 bp, Homo sapiens
gcactgagcagcgtg

SEQ ID NO: 118358 - DNA, 15 bp, Homo sapiens
tgcactgagcagcgt

SEQ ID NO: 118359 - DNA, 15 bp, Homo sapiens
atgcactgagcagcg

SEQ ID NO: 118360 - DNA, 15 bp, Homo sapiens
gatgcactgagcagc

SEQ ID NO: 118361 - DNA, 15 bp, Homo sapiens
ggatgcactgagcag

SEQ ID NO: 118362 - DNA, 15 bp, Homo sapiens
aggatgcactgagca

SEQ ID NO: 118363 - DNA, 15 bp, Homo sapiens
aaggatgcactgagc

SEQ ID NO: 118364 - DNA, 15 bp, Homo sapiens
caaggatgcactgag

SEQ ID NO: 118365 - DNA, 15 bp, Homo sapiens
ccaaggatgcactga

SEQ ID NO: 118366 - DNA, 15 bp, Homo sapiens
gccaaggatgcactg

SEQ ID NO: 118367 - DNA, 15 bp, Homo sapiens
cgccaaggatgcact

SEQ ID NO: 118368 - DNA, 15 bp, Homo sapiens
ccgccaaggatgcac

SEQ ID NO: 118369 - DNA, 15 bp, Homo sapiens
accgccaaggatgca

SEQ ID NO: 118370 - DNA, 15 bp, Homo sapiens
gaccgccaaggatgc

SEQ ID NO: 118371 - DNA, 15 bp, Homo sapiens
agaccgccaaggatg

SEQ ID NO: 118372 - DNA, 15 bp, Homo sapiens
aagaccgccaaggat

SEQ ID NO: 118373 - DNA, 15 bp, Homo sapiens
caagaccgccaagga

SEQ ID NO: 118374 - DNA, 15 bp, Homo sapiens
ccaagaccgccaagg

SEQ ID NO: 118375 - DNA, 15 bp, Homo sapiens
accaagaccgccaag

SEQ ID NO: 118376 - DNA, 15 bp, Homo sapiens
caccaagaccgccaa

SEQ ID NO: 118377 - DNA, 15 bp, Homo sapiens
ccaccaagaccgcca

SEQ ID NO: 118378 - DNA, 15 bp, Homo sapiens
gccaccaagaccgcc

SEQ ID NO: 118379 - DNA, 15 bp, Homo sapiens
cgccaccaagaccgc

SEQ ID NO: 118380 - DNA, 15 bp, Homo sapiens
acgccaccaagaccg

SEQ ID NO: 118381 - DNA, 15 bp, Homo sapiens
cacgccaccaagacc

SEQ ID NO: 118382 - DNA, 15 bp, Homo sapiens
gcacgccaccaagac

SEQ ID NO: 118383 - DNA, 15 bp, Homo sapiens
agcacgccaccaaga

SEQ ID NO: 118384 - DNA, 15 bp, Homo sapiens
aagcacgccaccaag

SEQ ID NO: 118385 - DNA, 15 bp, Homo sapiens
gaagcacgccaccaa

SEQ ID NO: 118386 - DNA, 15 bp, Homo sapiens
tgaagcacgccacca

SEQ ID NO: 118387 - DNA, 15 bp, Homo sapiens
atgaagcacgccacc

SEQ ID NO: 118388 - DNA, 15 bp, Homo sapiens
catgaagcacgccac

SEQ ID NO: 118389 - DNA, 15 bp, Homo sapiens
acatgaagcacgcca

SEQ ID NO: 118390 - DNA, 15 bp, Homo sapiens
tacatgaagcacgcc

SEQ ID NO: 118391 - DNA, 15 bp, Homo sapiens
ttacatgaagcacgc

SEQ ID NO: 118392 - DNA, 15 bp, Homo sapiens
gttacatgaagcacg

SEQ ID NO: 118393 - DNA, 15 bp, Homo sapiens
ggttacatgaagcac

SEQ ID NO: 118394 - DNA, 15 bp, Homo sapiens
gggttacatgaagca

SEQ ID NO: 118395 - DNA, 15 bp, Homo sapiens
agggttacatgaagc

SEQ ID NO: 118396 - DNA, 15 bp, Homo sapiens
cagggttacatgaag

SEQ ID NO: 118397 - DNA, 15 bp, Homo sapiens
gcagggttacatgaa

SEQ ID NO: 118398 - DNA, 15 bp, Homo sapiens
tgcagggttacatga

SEQ ID NO: 118399 - DNA, 15 bp, Homo sapiens
atgcagggttacatg

SEQ ID NO: 118400 - DNA, 15 bp, Homo sapiens
catgcagggttacat

SEQ ID NO: 118401 - DNA, 15 bp, Homo sapiens
tcatgcagggttaca

SEQ ID NO: 118402 - DNA, 15 bp, Homo sapiens
ttcatgcagggttac

SEQ ID NO: 118403 - DNA, 15 bp, Homo sapiens
cttcatgcagggtta

SEQ ID NO: 118404 - DNA, 15 bp, Homo sapiens
gcttcatgcagggtt

SEQ ID NO: 118405 - DNA, 15 bp, Homo sapiens
agcttcatgcagggt

SEQ ID NO: 118406 - DNA, 15 bp, Homo sapiens
cagcttcatgcaggg

SEQ ID NO: 118407 - DNA, 15 bp, Homo sapiens
tcagcttcatgcagg

SEQ ID NO: 118408 - DNA, 15 bp, Homo sapiens
ctcagcttcatgcag

SEQ ID NO: 118409 - DNA, 15 bp, Homo sapiens
tctcagcttcatgca

SEQ ID NO: 118410 - DNA, 15 bp, Homo sapiens
ttctcagcttcatgc

SEQ ID NO: 118411 - DNA, 15 bp, Homo sapiens
cttctcagcttcatg

SEQ ID NO: 118412 - DNA, 15 bp, Homo sapiens
ccttctcagcttcat

SEQ ID NO: 118413 - DNA, 15 bp, Homo sapiens
cccttctcagcttca

SEQ ID NO: 118414 - DNA, 15 bp, Homo sapiens
tcccttctcagcttc

SEQ ID NO: 118415 - DNA, 15 bp, Homo sapiens
ctcccttctcagctt

SEQ ID NO: 118416 - DNA, 15 bp, Homo sapiens
cctcccttctcagct

SEQ ID NO: 118417 - DNA, 15 bp, Homo sapiens
gcctcccttctcagc

SEQ ID NO: 118418 - DNA, 15 bp, Homo sapiens
tgcctcccttctcag

SEQ ID NO: 118419 - DNA, 15 bp, Homo sapiens
atgcctcccttctca

SEQ ID NO: 118420 - DNA, 15 bp, Homo sapiens
gatgcctcccttctc

SEQ ID NO: 118421 - DNA, 15 bp, Homo sapiens
ggatgcctcccttct

SEQ ID NO: 118422 - DNA, 15 bp, Homo sapiens
aggatgcctcccttc

SEQ ID NO: 118423 - DNA, 15 bp, Homo sapiens
gaggatgcctccctt

SEQ ID NO: 118424 - DNA, 15 bp, Homo sapiens
cgaggatgcctccct

SEQ ID NO: 118425 - DNA, 15 bp, Homo sapiens
ccgaggatgcctccc

SEQ ID NO: 118426 - DNA, 15 bp, Homo sapiens
gccgaggatgcctcc

SEQ ID NO: 118427 - DNA, 15 bp, Homo sapiens
ggccgaggatgcctc

SEQ ID NO: 118428 - DNA, 15 bp, Homo sapiens
aggccgaggatgcct

SEQ ID NO: 118429 - DNA, 15 bp, Homo sapiens
gaggccgaggatgcc

SEQ ID NO: 118430 - DNA, 15 bp, Homo sapiens
agaggccgaggatgc

SEQ ID NO: 118431 - DNA, 15 bp, Homo sapiens
cagaggccgaggatg

SEQ ID NO: 118432 - DNA, 15 bp, Homo sapiens
tcagaggccgaggat

SEQ ID NO: 118433 - DNA, 15 bp, Homo sapiens
ttcagaggccgagga

SEQ ID NO: 118434 - DNA, 15 bp, Homo sapiens
cttcagaggccgagg

SEQ ID NO: 118435 - DNA, 15 bp, Homo sapiens
gcttcagaggccgag

SEQ ID NO: 118436 - DNA, 15 bp, Homo sapiens
agcttcagaggccga

SEQ ID NO: 118437 - DNA, 15 bp, Homo sapiens
gagcttcagaggccg

SEQ ID NO: 118438 - DNA, 15 bp, Homo sapiens
ggagcttcagaggcc

SEQ ID NO: 118439 - DNA, 15 bp, Homo sapiens
aggagcttcagaggc

SEQ ID NO: 118440 - DNA, 15 bp, Homo sapiens
caggagcttcagagg

SEQ ID NO: 118441 - DNA, 15 bp, Homo sapiens
tcaggagcttcagag

SEQ ID NO: 118442 - DNA, 15 bp, Homo sapiens
ctcaggagcttcaga

SEQ ID NO: 118443 - DNA, 15 bp, Homo sapiens
cctcaggagcttcag

SEQ ID NO: 118444 - DNA, 15 bp, Homo sapiens
tcctcaggagcttca

SEQ ID NO: 118445 - DNA, 15 bp, Homo sapiens
ttcctcaggagcttc

SEQ ID NO: 118446 - DNA, 15 bp, Homo sapiens
tttcctcaggagctt

SEQ ID NO: 118447 - DNA, 15 bp, Homo sapiens
ctttcctcaggagct

SEQ ID NO: 118448 - DNA, 15 bp, Homo sapiens
tctttcctcaggagc

SEQ ID NO: 118449 - DNA, 15 bp, Homo sapiens
ctctttcctcaggag

SEQ ID NO: 118450 - DNA, 15 bp, Homo sapiens
gctctttcctcagga

SEQ ID NO: 118451 - DNA, 15 bp, Homo sapiens
tgctctttcctcagg

SEQ ID NO: 118452 - DNA, 15 bp, Homo sapiens
ctgctctttcctcag

SEQ ID NO: 118453 - DNA, 15 bp, Homo sapiens
cctgctctttcctca

SEQ ID NO: 118454 - DNA, 15 bp, Homo sapiens
ccctgctctttcctc

SEQ ID NO: 118455 - DNA, 15 bp, Homo sapiens
gccctgctctttcct

SEQ ID NO: 118456 - DNA, 15 bp, Homo sapiens
agccctgctctttcc

SEQ ID NO: 118457 - DNA, 15 bp, Homo sapiens
cagccctgctctttc

SEQ ID NO: 118458 - DNA, 15 bp, Homo sapiens
tcagccctgctcttt

SEQ ID NO: 118459 - DNA, 15 bp, Homo sapiens
ctcagccctgctctt

SEQ ID NO: 118460 - DNA, 15 bp, Homo sapiens
actcagccctgctct

SEQ ID NO: 118461 - DNA, 15 bp, Homo sapiens
cactcagccctgctc

SEQ ID NO: 118462 - DNA, 15 bp, Homo sapiens
ccactcagccctgct

SEQ ID NO: 118463 - DNA, 15 bp, Homo sapiens
cccactcagccctgc

SEQ ID NO: 118464 - DNA, 15 bp, Homo sapiens
ccccactcagccctg

SEQ ID NO: 118465 - DNA, 15 bp, Homo sapiens
accccactcagccct

SEQ ID NO: 118466 - DNA, 15 bp, Homo sapiens
caccccactcagccc

SEQ ID NO: 118467 - DNA, 15 bp, Homo sapiens
ccaccccactcagcc

SEQ ID NO: 118468 - DNA, 15 bp, Homo sapiens
tccaccccactcagc

SEQ ID NO: 118469 - DNA, 15 bp, Homo sapiens
atccaccccactcag

SEQ ID NO: 118470 - DNA, 15 bp, Homo sapiens
gatccaccccactca

SEQ ID NO: 118471 - DNA, 15 bp, Homo sapiens
cgatccaccccactc

SEQ ID NO: 118472 - DNA, 15 bp, Homo sapiens
ccgatccaccccact

SEQ ID NO: 118473 - DNA, 15 bp, Homo sapiens
gccgatccaccccac

SEQ ID NO: 118474 - DNA, 15 bp, Homo sapiens
ggccgatccacccca

SEQ ID NO: 118475 - DNA, 15 bp, Homo sapiens
aggccgatccacccc

SEQ ID NO: 118476 - DNA, 15 bp, Homo sapiens
gaggccgatccaccc

SEQ ID NO: 118477 - DNA, 15 bp, Homo sapiens
agaggccgatccacc

SEQ ID NO: 118478 - DNA, 15 bp, Homo sapiens
cagaggccgatccac

SEQ ID NO: 118479 - DNA, 15 bp, Homo sapiens
ccagaggccgatcca

SEQ ID NO: 118480 - DNA, 15 bp, Homo sapiens
tccagaggccgatcc

SEQ ID NO: 118481 - DNA, 15 bp, Homo sapiens
gtccagaggccgatc

SEQ ID NO: 118482 - DNA, 15 bp, Homo sapiens
cgtccagaggccgat

SEQ ID NO: 118483 - DNA, 15 bp, Homo sapiens
tcgtccagaggccga

SEQ ID NO: 118484 - DNA, 15 bp, Homo sapiens
ctcgtccagaggccg

SEQ ID NO: 118485 - DNA, 15 bp, Homo sapiens
gctcgtccagaggcc

SEQ ID NO: 118486 - DNA, 15 bp, Homo sapiens
ggctcgtccagaggc

SEQ ID NO: 118487 - DNA, 15 bp, Homo sapiens
gggctcgtccagagg

SEQ ID NO: 118488 - DNA, 15 bp, Homo sapiens
agggctcgtccagag

SEQ ID NO: 118489 - DNA, 15 bp, Homo sapiens
aatcatactgtgttc

SEQ ID NO: 118490 - DNA, 15 bp, Homo sapiens
taatcatactgtgtt

SEQ ID NO: 118491 - DNA, 15 bp, Homo sapiens
ataatcatactgtgt

SEQ ID NO: 118492 - DNA, 15 bp, Homo sapiens
aataatcatactgtg

SEQ ID NO: 118493 - DNA, 15 bp, Homo sapiens
taataatcatactgt

SEQ ID NO: 118494 - DNA, 15 bp, Homo sapiens
ataataatcatactg

SEQ ID NO: 118495 - DNA, 15 bp, Homo sapiens
tataataatcatact

SEQ ID NO: 118496 - DNA, 15 bp, Homo sapiens
gtataataatcatac

SEQ ID NO: 118497 - DNA, 15 bp, Homo sapiens
tgtataataatcata

SEQ ID NO: 118498 - DNA, 15 bp, Homo sapiens
ctgtataataatcat

SEQ ID NO: 118499 - DNA, 15 bp, Homo sapiens
actgtataataatca

SEQ ID NO: 118500 - DNA, 15 bp, Homo sapiens
tactgtataataatc

SEQ ID NO: 118501 - DNA, 15 bp, Homo sapiens
atactgtataataat

SEQ ID NO: 118502 - DNA, 15 bp, Homo sapiens
catactgtataataa

SEQ ID NO: 118503 - DNA, 15 bp, Homo sapiens
tcatactgtataata

SEQ ID NO: 118504 - DNA, 15 bp, Homo sapiens
atcatactgtataat

SEQ ID NO: 118505 - DNA, 15 bp, Homo sapiens
aatcatactgtataa

SEQ ID NO: 118506 - DNA, 15 bp, Homo sapiens
taatcatactgtata

SEQ ID NO: 118507 - DNA, 15 bp, Homo sapiens
ataatcatactgtat

SEQ ID NO: 118508 - DNA, 15 bp, Homo sapiens
aataatcatactgta

SEQ ID NO: 118509 - DNA, 15 bp, Homo sapiens
ttataataatcatac

SEQ ID NO: 118510 - DNA, 15 bp, Homo sapiens
attataataatcata

SEQ ID NO: 118511 - DNA, 15 bp, Homo sapiens
tattataataatcat

SEQ ID NO: 118512 - DNA, 15 bp, Homo sapiens
ttattataataatca

SEQ ID NO: 118513 - DNA, 15 bp, Homo sapiens
gttattataataatc

SEQ ID NO: 118514 - DNA, 15 bp, Homo sapiens
tgttattataataat

SEQ ID NO: 118515 - DNA, 15 bp, Homo sapiens
ctgttattataataa

SEQ ID NO: 118516 - DNA, 15 bp, Homo sapiens
gctgttattataata

SEQ ID NO: 118517 - DNA, 15 bp, Homo sapiens
tgctgttattataat

SEQ ID NO: 118518 - DNA, 15 bp, Homo sapiens
ttgctgttattataa

SEQ ID NO: 118519 - DNA, 15 bp, Homo sapiens
gttgctgttattata

SEQ ID NO: 118520 - DNA, 15 bp, Homo sapiens
agttgctgttattat

SEQ ID NO: 118521 - DNA, 15 bp, Homo sapiens
tagttgctgttatta

SEQ ID NO: 118522 - DNA, 15 bp, Homo sapiens
atagttgctgttatt

SEQ ID NO: 118523 - DNA, 15 bp, Homo sapiens
aatagttgctgttat

SEQ ID NO: 118524 - DNA, 15 bp, Homo sapiens
aaatagttgctgtta

SEQ ID NO: 118525 - DNA, 15 bp, Homo sapiens
aaaatagttgctgtt

SEQ ID NO: 118526 - DNA, 15 bp, Homo sapiens
aaaaatagttgctgt

SEQ ID NO: 118527 - DNA, 15 bp, Homo sapiens
gaaaaatagttgctg

SEQ ID NO: 118528 - DNA, 15 bp, Homo sapiens
tgaaaaatagttgct

SEQ ID NO: 118529 - DNA, 15 bp, Homo sapiens
ctgaaaaatagttgc

SEQ ID NO: 118530 - DNA, 15 bp, Homo sapiens
tctgaaaaatagttg

SEQ ID NO: 118531 - DNA, 15 bp, Homo sapiens
ctctgaaaaatagtt

SEQ ID NO: 118532 - DNA, 15 bp, Homo sapiens
gctctgaaaaatagt

SEQ ID NO: 118533 - DNA, 15 bp, Homo sapiens
agctctgaaaaatag

SEQ ID NO: 118534 - DNA, 15 bp, Homo sapiens
aagctctgaaaaata

SEQ ID NO: 118535 - DNA, 15 bp, Homo sapiens
taagctctgaaaaat

SEQ ID NO: 118536 - DNA, 15 bp, Homo sapiens
gtaagctctgaaaaa

SEQ ID NO: 118537 - DNA, 15 bp, Homo sapiens
agtaagctctgaaaa

SEQ ID NO: 118538 - DNA, 15 bp, Homo sapiens
gagtaagctctgaaa

SEQ ID NO: 118539 - DNA, 15 bp, Homo sapiens
agagtaagctctgaa

SEQ ID NO: 118540 - DNA, 15 bp, Homo sapiens
cagagtaagctctga

SEQ ID NO: 118541 - DNA, 15 bp, Homo sapiens
acagagtaagctctg

SEQ ID NO: 118542 - DNA, 15 bp, Homo sapiens
cacagagtaagctct

SEQ ID NO: 118543 - DNA, 15 bp, Homo sapiens
gcacagagtaagctc

SEQ ID NO: 118544 - DNA, 15 bp, Homo sapiens
ggcacagagtaagct

SEQ ID NO: 118545 - DNA, 15 bp, Homo sapiens
tggcacagagtaagc

SEQ ID NO: 118546 - DNA, 15 bp, Homo sapiens
ctggcacagagtaag

SEQ ID NO: 118547 - DNA, 15 bp, Homo sapiens
cctggcacagagtaa

SEQ ID NO: 118548 - DNA, 15 bp, Homo sapiens
tcctggcacagagta

SEQ ID NO: 118549 - DNA, 15 bp, Homo sapiens
ctcctggcacagagt

SEQ ID NO: 118550 - DNA, 15 bp, Homo sapiens
gctcctggcacagag

SEQ ID NO: 118551 - DNA, 15 bp, Homo sapiens
agctcctggcacaga

SEQ ID NO: 118552 - DNA, 15 bp, Homo sapiens
gagctcctggcacag

SEQ ID NO: 118553 - DNA, 15 bp, Homo sapiens
agagctcctggcaca

SEQ ID NO: 118554 - DNA, 15 bp, Homo sapiens
tagagctcctggcac

SEQ ID NO: 118555 - DNA, 15 bp, Homo sapiens
atagagctcctggca

SEQ ID NO: 118556 - DNA, 15 bp, Homo sapiens
tatagagctcctggc

SEQ ID NO: 118557 - DNA, 15 bp, Homo sapiens
ctatagagctcctgg

SEQ ID NO: 118558 - DNA, 15 bp, Homo sapiens
cctatagagctcctg

SEQ ID NO: 118559 - DNA, 15 bp, Homo sapiens
gcctatagagctcct

SEQ ID NO: 118560 - DNA, 15 bp, Homo sapiens
tgcctatagagctcc

SEQ ID NO: 118561 - DNA, 15 bp, Homo sapiens
ctgcctatagagctc

SEQ ID NO: 118562 - DNA, 15 bp, Homo sapiens
gctgcctatagagct

SEQ ID NO: 118563 - DNA, 15 bp, Homo sapiens
ggctgcctatagagc

SEQ ID NO: 118564 - DNA, 15 bp, Homo sapiens
gggctgcctatagag

SEQ ID NO: 118565 - DNA, 15 bp, Homo sapiens
agggctgcctataga

SEQ ID NO: 118566 - DNA, 15 bp, Homo sapiens
gagggctgcctatag

SEQ ID NO: 118567 - DNA, 15 bp, Homo sapiens
agagggctgcctata

SEQ ID NO: 118568 - DNA, 15 bp, Homo sapiens
cagagggctgcctat

SEQ ID NO: 118569 - DNA, 15 bp, Homo sapiens
acagagggctgccta

SEQ ID NO: 118570 - DNA, 15 bp, Homo sapiens
tacagagggctgcct

SEQ ID NO: 118571 - DNA, 15 bp, Homo sapiens
atacagagggctgcc

SEQ ID NO: 118572 - DNA, 15 bp, Homo sapiens
gatacagagggctgc

SEQ ID NO: 118573 - DNA, 15 bp, Homo sapiens
ggatacagagggctg

SEQ ID NO: 118574 - DNA, 15 bp, Homo sapiens
aggatacagagggct

SEQ ID NO: 118575 - DNA, 15 bp, Homo sapiens
aaggatacagagggc

SEQ ID NO: 118576 - DNA, 15 bp, Homo sapiens
caaggatacagaggg

SEQ ID NO: 118577 - DNA, 15 bp, Homo sapiens
ccaaggatacagagg

SEQ ID NO: 118578 - DNA, 15 bp, Homo sapiens
accaaggatacagag

SEQ ID NO: 118579 - DNA, 15 bp, Homo sapiens
aaccaaggatacaga

SEQ ID NO: 118580 - DNA, 15 bp, Homo sapiens
aaaccaaggatacag

SEQ ID NO: 118581 - DNA, 15 bp, Homo sapiens
gaaaccaaggataca

SEQ ID NO: 118582 - DNA, 15 bp, Homo sapiens
agaaaccaaggatac

SEQ ID NO: 118583 - DNA, 15 bp, Homo sapiens
cagaaaccaaggata

SEQ ID NO: 118584 - DNA, 15 bp, Homo sapiens
acagaaaccaaggat

SEQ ID NO: 118585 - DNA, 15 bp, Homo sapiens
cacagaaaccaagga

SEQ ID NO: 118586 - DNA, 15 bp, Homo sapiens
acacagaaaccaagg

SEQ ID NO: 118587 - DNA, 15 bp, Homo sapiens
gacacagaaaccaag

SEQ ID NO: 118588 - DNA, 15 bp, Homo sapiens
ggacacagaaaccaa

SEQ ID NO: 118589 - DNA, 15 bp, Homo sapiens
tggacacagaaacca

SEQ ID NO: 118590 - DNA, 15 bp, Homo sapiens
atggacacagaaacc

SEQ ID NO: 118591 - DNA, 15 bp, Homo sapiens
catggacacagaaac

SEQ ID NO: 118592 - DNA, 15 bp, Homo sapiens
ccatggacacagaaa

SEQ ID NO: 118593 - DNA, 15 bp, Homo sapiens
tccatggacacagaa

SEQ ID NO: 118594 - DNA, 15 bp, Homo sapiens
atccatggacacaga

SEQ ID NO: 118595 - DNA, 15 bp, Homo sapiens
aatccatggacacag

SEQ ID NO: 118596 - DNA, 15 bp, Homo sapiens
gaatccatggacaca

SEQ ID NO: 118597 - DNA, 15 bp, Homo sapiens
tgaatccatggacac

SEQ ID NO: 118598 - DNA, 15 bp, Homo sapiens
ttgaatccatggaca

SEQ ID NO: 118599 - DNA, 15 bp, Homo sapiens
gttgaatccatggac

SEQ ID NO: 118600 - DNA, 15 bp, Homo sapiens
ggttgaatccatgga

SEQ ID NO: 118601 - DNA, 15 bp, Homo sapiens
tggttgaatccatgg

SEQ ID NO: 118602 - DNA, 15 bp, Homo sapiens
ttggttgaatccatg

SEQ ID NO: 118603 - DNA, 15 bp, Homo sapiens
gttggttgaatccat

SEQ ID NO: 118604 - DNA, 15 bp, Homo sapiens
ggttggttgaatcca

SEQ ID NO: 118605 - DNA, 15 bp, Homo sapiens
aggttggttgaatcc

SEQ ID NO: 118606 - DNA, 15 bp, Homo sapiens
aaggttggttgaatc

SEQ ID NO: 118607 - DNA, 15 bp, Homo sapiens
caaggttggttgaat

SEQ ID NO: 118608 - DNA, 15 bp, Homo sapiens
ccaaggttggttgaa

SEQ ID NO: 118609 - DNA, 15 bp, Homo sapiens
tccaaggttggttga

SEQ ID NO: 118610 - DNA, 15 bp, Homo sapiens
atccaaggttggttg

SEQ ID NO: 118611 - DNA, 15 bp, Homo sapiens
aatccaaggttggtt

SEQ ID NO: 118612 - DNA, 15 bp, Homo sapiens
caatccaaggttggt

SEQ ID NO: 118613 - DNA, 15 bp, Homo sapiens
tcaatccaaggttgg

SEQ ID NO: 118614 - DNA, 15 bp, Homo sapiens
ttcaatccaaggttg

SEQ ID NO: 118615 - DNA, 15 bp, Homo sapiens
tttcaatccaaggtt

SEQ ID NO: 118616 - DNA, 15 bp, Homo sapiens
ttttcaatccaaggt

SEQ ID NO: 118617 - DNA, 15 bp, Homo sapiens
attttcaatccaagg

SEQ ID NO: 118618 - DNA, 15 bp, Homo sapiens
tattttcaatccaag

SEQ ID NO: 118619 - DNA, 15 bp, Homo sapiens
ttattttcaatccaa

SEQ ID NO: 118620 - DNA, 15 bp, Homo sapiens
attattttcaatcca

SEQ ID NO: 118621 - DNA, 15 bp, Homo sapiens
aattattttcaatcc

SEQ ID NO: 118622 - DNA, 15 bp, Homo sapiens
aaattattttcaatc

SEQ ID NO: 118623 - DNA, 15 bp, Homo sapiens
aaaattattttcaat

SEQ ID NO: 118624 - DNA, 15 bp, Homo sapiens
aaaaattattttcaa

SEQ ID NO: 118625 - DNA, 15 bp, Homo sapiens
aaaaaattattttca

SEQ ID NO: 118626 - DNA, 15 bp, Homo sapiens
taaaaaattattttc

SEQ ID NO: 118627 - DNA, 15 bp, Homo sapiens
ctaaaaaattatttt

SEQ ID NO: 118628 - DNA, 15 bp, Homo sapiens
cctaaaaaattattt

SEQ ID NO: 118629 - DNA, 15 bp, Homo sapiens
gcctaaaaaattatt

SEQ ID NO: 118630 - DNA, 15 bp, Homo sapiens
ggcctaaaaaattat

SEQ ID NO: 118631 - DNA, 15 bp, Homo sapiens
cggcctaaaaaatta

SEQ ID NO: 118632 - DNA, 15 bp, Homo sapiens
ccggcctaaaaaatt

SEQ ID NO: 118633 - DNA, 15 bp, Homo sapiens
cccggcctaaaaaat

SEQ ID NO: 118634 - DNA, 15 bp, Homo sapiens
gcccggcctaaaaaa

SEQ ID NO: 118635 - DNA, 15 bp, Homo sapiens
cgcccggcctaaaaa

SEQ ID NO: 118636 - DNA, 15 bp, Homo sapiens
acgcccggcctaaaa

SEQ ID NO: 118637 - DNA, 15 bp, Homo sapiens
cacgcccggcctaaa

SEQ ID NO: 118638 - DNA, 15 bp, Homo sapiens
ccacgcccggcctaa

SEQ ID NO: 118639 - DNA, 15 bp, Homo sapiens
accacgcccggccta

SEQ ID NO: 118640 - DNA, 15 bp, Homo sapiens
caccacgcccggcct

SEQ ID NO: 118641 - DNA, 15 bp, Homo sapiens
gtgagccaccacgcc

SEQ ID NO: 118642 - DNA, 15 bp, Homo sapiens
cgtgagccaccacgc

SEQ ID NO: 118643 - DNA, 15 bp, Homo sapiens
gcgtgagccaccacg

SEQ ID NO: 118644 - DNA, 15 bp, Homo sapiens
agattacaggcgtga

SEQ ID NO: 118645 - DNA, 15 bp, Homo sapiens
gagattacaggcgtg

SEQ ID NO: 118646 - DNA, 15 bp, Homo sapiens
tgagattacaggcgt

SEQ ID NO: 118647 - DNA, 15 bp, Homo sapiens
ctgagattacaggcg

SEQ ID NO: 118648 - DNA, 15 bp, Homo sapiens
gctgagattacaggc

SEQ ID NO: 118649 - DNA, 15 bp, Homo sapiens
tgctgagattacagg

SEQ ID NO: 118650 - DNA, 15 bp, Homo sapiens
gtgctgagattacag

SEQ ID NO: 118651 - DNA, 15 bp, Homo sapiens
agtgctgagattaca

SEQ ID NO: 118652 - DNA, 15 bp, Homo sapiens
aagtgctgagattac

SEQ ID NO: 118653 - DNA, 15 bp, Homo sapiens
cccaaagtgctgaga

SEQ ID NO: 118654 - DNA, 15 bp, Homo sapiens
tcccaaagtgctgag

SEQ ID NO: 118655 - DNA, 15 bp, Homo sapiens
acctcccaaagtgct

SEQ ID NO: 118656 - DNA, 15 bp, Homo sapiens
aacctcccaaagtgc

SEQ ID NO: 118657 - DNA, 15 bp, Homo sapiens
caacctcccaaagtg

SEQ ID NO: 118658 - DNA, 15 bp, Homo sapiens
tcaacctcccaaagt

SEQ ID NO: 118659 - DNA, 15 bp, Homo sapiens
ctcaacctcccaaag

SEQ ID NO: 118660 - DNA, 15 bp, Homo sapiens
cctcaacctcccaaa

SEQ ID NO: 118661 - DNA, 15 bp, Homo sapiens
gcctcaacctcccaa

SEQ ID NO: 118662 - DNA, 15 bp, Homo sapiens
cgcctcaacctccca

SEQ ID NO: 118663 - DNA, 15 bp, Homo sapiens
ccgcctcaacctccc

SEQ ID NO: 118664 - DNA, 15 bp, Homo sapiens
cccgcctcaacctcc

SEQ ID NO: 118665 - DNA, 15 bp, Homo sapiens
gcccgcctcaacctc

SEQ ID NO: 118666 - DNA, 15 bp, Homo sapiens
cgcccgcctcaacct

SEQ ID NO: 118667 - DNA, 15 bp, Homo sapiens
ccgcccgcctcaacc

SEQ ID NO: 118668 - DNA, 15 bp, Homo sapiens
tccgcccgcctcaac

SEQ ID NO: 118669 - DNA, 15 bp, Homo sapiens
atccgcccgcctcaa

SEQ ID NO: 118670 - DNA, 15 bp, Homo sapiens
gatccgcccgcctca

SEQ ID NO: 118671 - DNA, 15 bp, Homo sapiens
tgatccgcccgcctc

SEQ ID NO: 118672 - DNA, 15 bp, Homo sapiens
gtgatccgcccgcct

SEQ ID NO: 118673 - DNA, 15 bp, Homo sapiens
cgtgatccgcccgcc

SEQ ID NO: 118674 - DNA, 15 bp, Homo sapiens
tcgtgatccgcccgc

SEQ ID NO: 118675 - DNA, 15 bp, Homo sapiens
ctcgtgatccgcccg

SEQ ID NO: 118676 - DNA, 15 bp, Homo sapiens
aggatggtctcgatc

SEQ ID NO: 118677 - DNA, 15 bp, Homo sapiens
caggatggtctcgat

SEQ ID NO: 118678 - DNA, 15 bp, Homo sapiens
ccaggatggtctcga

SEQ ID NO: 118679 - DNA, 15 bp, Homo sapiens
gccaggatggtctcg

SEQ ID NO: 118680 - DNA, 15 bp, Homo sapiens
agccaggatggtctc

SEQ ID NO: 118681 - DNA, 15 bp, Homo sapiens
tagccaggatggtct

SEQ ID NO: 118682 - DNA, 15 bp, Homo sapiens
ttagccaggatggtc

SEQ ID NO: 118683 - DNA, 15 bp, Homo sapiens
gttagccaggatggt

SEQ ID NO: 118684 - DNA, 15 bp, Homo sapiens
tgttagccaggatgg

SEQ ID NO: 118685 - DNA, 15 bp, Homo sapiens
cgtgttagccaggat

SEQ ID NO: 118686 - DNA, 15 bp, Homo sapiens
ccgtgttagccagga

SEQ ID NO: 118687 - DNA, 15 bp, Homo sapiens
gccgtgttagccagg

SEQ ID NO: 118688 - DNA, 15 bp, Homo sapiens
cgccgtgttagccag

SEQ ID NO: 118689 - DNA, 15 bp, Homo sapiens
tcgccgtgttagcca

SEQ ID NO: 118690 - DNA, 15 bp, Homo sapiens
ttcgccgtgttagcc

SEQ ID NO: 118691 - DNA, 15 bp, Homo sapiens
tttcgccgtgttagc

SEQ ID NO: 118692 - DNA, 15 bp, Homo sapiens
gtttcgccgtgttag

SEQ ID NO: 118693 - DNA, 15 bp, Homo sapiens
ggtttcgccgtgtta

SEQ ID NO: 118694 - DNA, 15 bp, Homo sapiens
gggtttcgccgtgtt

SEQ ID NO: 118695 - DNA, 15 bp, Homo sapiens
ggggtttcgccgtgt

SEQ ID NO: 118696 - DNA, 15 bp, Homo sapiens
tggggtttcgccgtg

SEQ ID NO: 118697 - DNA, 15 bp, Homo sapiens
atggggtttcgccgt

SEQ ID NO: 118698 - DNA, 15 bp, Homo sapiens
gatggggtttcgccg

SEQ ID NO: 118699 - DNA, 15 bp, Homo sapiens
agatggggtttcgcc

SEQ ID NO: 118700 - DNA, 15 bp, Homo sapiens
gagatggggtttcgc

SEQ ID NO: 118701 - DNA, 15 bp, Homo sapiens
agagatggggtttcg

SEQ ID NO: 118702 - DNA, 15 bp, Homo sapiens
ttagtagagatgggg

SEQ ID NO: 118703 - DNA, 15 bp, Homo sapiens
tttagtagagatggg

SEQ ID NO: 118704 - DNA, 15 bp, Homo sapiens
ttttagtagagatgg

SEQ ID NO: 118705 - DNA, 15 bp, Homo sapiens
tttttagtagagatg

SEQ ID NO: 118706 - DNA, 15 bp, Homo sapiens
atttttagtagagat

SEQ ID NO: 118707 - DNA, 15 bp, Homo sapiens
tttttttttttttgt

SEQ ID NO: 118708 - DNA, 15 bp, Homo sapiens
atttttttttttttt

SEQ ID NO: 118709 - DNA, 15 bp, Homo sapiens
ggctaattttttttt

SEQ ID NO: 118710 - DNA, 15 bp, Homo sapiens
cggctaatttttttt

SEQ ID NO: 118711 - DNA, 15 bp, Homo sapiens
ccggctaattttttt

SEQ ID NO: 118712 - DNA, 15 bp, Homo sapiens
cacgcccggctaatt

SEQ ID NO: 118713 - DNA, 15 bp, Homo sapiens
ccacgcccggctaat

SEQ ID NO: 118714 - DNA, 15 bp, Homo sapiens
accacgcccggctaa

SEQ ID NO: 118715 - DNA, 15 bp, Homo sapiens
caccacgcccggcta

SEQ ID NO: 118716 - DNA, 15 bp, Homo sapiens
ccaccacgcccggct

SEQ ID NO: 118717 - DNA, 15 bp, Homo sapiens
cgccaccacgcccgg

SEQ ID NO: 118718 - DNA, 15 bp, Homo sapiens
ccgccaccacgcccg

SEQ ID NO: 118719 - DNA, 15 bp, Homo sapiens
cccgccaccacgccc

SEQ ID NO: 118720 - DNA, 15 bp, Homo sapiens
gcccgccaccacgcc

SEQ ID NO: 118721 - DNA, 15 bp, Homo sapiens
cgcccgccaccacgc

SEQ ID NO: 118722 - DNA, 15 bp, Homo sapiens
gcgcccgccaccacg

SEQ ID NO: 118723 - DNA, 15 bp, Homo sapiens
ggcgcccgccaccac

SEQ ID NO: 118724 - DNA, 15 bp, Homo sapiens
aggcgcccgccacca

SEQ ID NO: 118725 - DNA, 15 bp, Homo sapiens
taggcgcccgccacc

SEQ ID NO: 118726 - DNA, 15 bp, Homo sapiens
ataggcgcccgccac

SEQ ID NO: 118727 - DNA, 15 bp, Homo sapiens
cataggcgcccgcca

SEQ ID NO: 118728 - DNA, 15 bp, Homo sapiens
ccataggcgcccgcc

SEQ ID NO: 118729 - DNA, 15 bp, Homo sapiens
accataggcgcccgc

SEQ ID NO: 118730 - DNA, 15 bp, Homo sapiens
gaccataggcgcccg

SEQ ID NO: 118731 - DNA, 15 bp, Homo sapiens
ggaccataggcgccc

SEQ ID NO: 118732 - DNA, 15 bp, Homo sapiens
gggaccataggcgcc

SEQ ID NO: 118733 - DNA, 15 bp, Homo sapiens
tgggaccataggcgc

SEQ ID NO: 118734 - DNA, 15 bp, Homo sapiens
ctgggaccataggcg

SEQ ID NO: 118735 - DNA, 15 bp, Homo sapiens
gctgggaccataggc

SEQ ID NO: 118736 - DNA, 15 bp, Homo sapiens
agctgggaccatagg

SEQ ID NO: 118737 - DNA, 15 bp, Homo sapiens
tagctgggaccatag

SEQ ID NO: 118738 - DNA, 15 bp, Homo sapiens
gtagctgggaccata

SEQ ID NO: 118739 - DNA, 15 bp, Homo sapiens
agtagctgggaccat

SEQ ID NO: 118740 - DNA, 15 bp, Homo sapiens
aagtagctgggacca

SEQ ID NO: 118741 - DNA, 15 bp, Homo sapiens
caagtagctgggacc

SEQ ID NO: 118742 - DNA, 15 bp, Homo sapiens
tgcctcccgggttca

SEQ ID NO: 118743 - DNA, 15 bp, Homo sapiens
ctgcctcccgggttc

SEQ ID NO: 118744 - DNA, 15 bp, Homo sapiens
tctgcctcccgggtt

SEQ ID NO: 118745 - DNA, 15 bp, Homo sapiens
ctctgcctcccgggt

SEQ ID NO: 118746 - DNA, 15 bp, Homo sapiens
gctctgcctcccggg

SEQ ID NO: 118747 - DNA, 15 bp, Homo sapiens
agctctgcctcccgg

SEQ ID NO: 118748 - DNA, 15 bp, Homo sapiens
aagctctgcctcccg

SEQ ID NO: 118749 - DNA, 15 bp, Homo sapiens
caagctctgcctccc

SEQ ID NO: 118750 - DNA, 15 bp, Homo sapiens
gcaagctctgcctcc

SEQ ID NO: 118751 - DNA, 15 bp, Homo sapiens
tgcaagctctgcctc

SEQ ID NO: 118752 - DNA, 15 bp, Homo sapiens
ctgcaagctctgcct

SEQ ID NO: 118753 - DNA, 15 bp, Homo sapiens
actgcaagctctgcc

SEQ ID NO: 118754 - DNA, 15 bp, Homo sapiens
cactgcaagctctgc

SEQ ID NO: 118755 - DNA, 15 bp, Homo sapiens
tcactgcaagctctg

SEQ ID NO: 118756 - DNA, 15 bp, Homo sapiens
ctcactgcaagctct

SEQ ID NO: 118757 - DNA, 15 bp, Homo sapiens
cgatctcggctcact

SEQ ID NO: 118758 - DNA, 15 bp, Homo sapiens
acgatctcggctcac

SEQ ID NO: 118759 - DNA, 15 bp, Homo sapiens
cacgatctcggctca

SEQ ID NO: 118760 - DNA, 15 bp, Homo sapiens
gcacgatctcggctc

SEQ ID NO: 118761 - DNA, 15 bp, Homo sapiens
ggcacgatctcggct

SEQ ID NO: 118762 - DNA, 15 bp, Homo sapiens
tggcacgatctcggc

SEQ ID NO: 118763 - DNA, 15 bp, Homo sapiens
gtggcacgatctcgg

SEQ ID NO: 118764 - DNA, 15 bp, Homo sapiens
agtggcacgatctcg

SEQ ID NO: 118765 - DNA, 15 bp, Homo sapiens
cagtggcacgatctc

SEQ ID NO: 118766 - DNA, 15 bp, Homo sapiens
gcagtggcacgatct

SEQ ID NO: 118767 - DNA, 15 bp, Homo sapiens
tgcagtggcacgatc

SEQ ID NO: 118768 - DNA, 15 bp, Homo sapiens
gtgcagtggcacgat

SEQ ID NO: 118769 - DNA, 15 bp, Homo sapiens
agtgcagtggcacga

SEQ ID NO: 118770 - DNA, 15 bp, Homo sapiens
gagtgcagtggcacg

SEQ ID NO: 118771 - DNA, 15 bp, Homo sapiens
ggagtgcagtggcac

SEQ ID NO: 118772 - DNA, 15 bp, Homo sapiens
acccaggctggagtg

SEQ ID NO: 118773 - DNA, 15 bp, Homo sapiens
cacccaggctggagt

SEQ ID NO: 118774 - DNA, 15 bp, Homo sapiens
tcacccaggctggag

SEQ ID NO: 118775 - DNA, 15 bp, Homo sapiens
gtcacccaggctgga

SEQ ID NO: 118776 - DNA, 15 bp, Homo sapiens
tgtcacccaggctgg

SEQ ID NO: 118777 - DNA, 15 bp, Homo sapiens
ctgtcacccaggctg

SEQ ID NO: 118778 - DNA, 15 bp, Homo sapiens
tctgtcacccaggct

SEQ ID NO: 118779 - DNA, 15 bp, Homo sapiens
ctctgtcacccaggc

SEQ ID NO: 118780 - DNA, 15 bp, Homo sapiens
gctctgtcacccagg

SEQ ID NO: 118781 - DNA, 15 bp, Homo sapiens
gtcttgctctgtcac

SEQ ID NO: 118782 - DNA, 15 bp, Homo sapiens
agtcttgctctgtca

SEQ ID NO: 118783 - DNA, 15 bp, Homo sapiens
agatggagtcttgct

SEQ ID NO: 118784 - DNA, 15 bp, Homo sapiens
gagatggagtcttgc

SEQ ID NO: 118785 - DNA, 15 bp, Homo sapiens
tttgagatggagtct

SEQ ID NO: 118786 - DNA, 15 bp, Homo sapiens
ttttgagatggagtc

SEQ ID NO: 118787 - DNA, 15 bp, Homo sapiens
tttttgagatggagt

SEQ ID NO: 118788 - DNA, 15 bp, Homo sapiens
ttttttgagatggag

SEQ ID NO: 118789 - DNA, 15 bp, Homo sapiens
tttttttgagatgga

SEQ ID NO: 118790 - DNA, 15 bp, Homo sapiens
ttttttttgagatgg

SEQ ID NO: 118791 - DNA, 15 bp, Homo sapiens
tattttttttttttt

SEQ ID NO: 118792 - DNA, 15 bp, Homo sapiens
atatttttttttttt

SEQ ID NO: 118793 - DNA, 15 bp, Homo sapiens
tatattttttttttt

SEQ ID NO: 118794 - DNA, 15 bp, Homo sapiens
atatatttttttttt

SEQ ID NO: 118795 - DNA, 15 bp, Homo sapiens
tatatattttttttt

SEQ ID NO: 118796 - DNA, 15 bp, Homo sapiens
atatatatttttttt

SEQ ID NO: 118797 - DNA, 15 bp, Homo sapiens
tatatatattttttt

SEQ ID NO: 118798 - DNA, 15 bp, Homo sapiens
atatatatatttttt

SEQ ID NO: 118799 - DNA, 15 bp, Homo sapiens
tatatatatattttt

SEQ ID NO: 118800 - DNA, 15 bp, Homo sapiens
tatatatatatatat

SEQ ID NO: 118801 - DNA, 15 bp, Homo sapiens
atatatatatatata

SEQ ID NO: 118802 - DNA, 15 bp, Homo sapiens
aaaaatatatatata

SEQ ID NO: 118803 - DNA, 15 bp, Homo sapiens
aaaaaatatatatat

SEQ ID NO: 118804 - DNA, 15 bp, Homo sapiens
aaaaaaatatatata

SEQ ID NO: 118805 - DNA, 15 bp, Homo sapiens
aaaaaaaatatatat

SEQ ID NO: 118806 - DNA, 15 bp, Homo sapiens
aaaaaaaaatatata

SEQ ID NO: 118807 - DNA, 15 bp, Homo sapiens
aaaaaaaaaatatat

SEQ ID NO: 118808 - DNA, 15 bp, Homo sapiens
aaaaaaaaaaatata

SEQ ID NO: 118809 - DNA, 15 bp, Homo sapiens
taaaaaaaaaaatat

SEQ ID NO: 118810 - DNA, 15 bp, Homo sapiens
ttaaaaaaaaaaata

SEQ ID NO: 118811 - DNA, 15 bp, Homo sapiens
tttaaaaaaaaaaat

SEQ ID NO: 118812 - DNA, 15 bp, Homo sapiens
atttaaaaaaaaaaa

SEQ ID NO: 118813 - DNA, 15 bp, Homo sapiens
aatttaaaaaaaaaa

SEQ ID NO: 118814 - DNA, 15 bp, Homo sapiens
caatttaaaaaaaaa

SEQ ID NO: 118815 - DNA, 15 bp, Homo sapiens
gcaatttaaaaaaaa

SEQ ID NO: 118816 - DNA, 15 bp, Homo sapiens
tgcaatttaaaaaaa

SEQ ID NO: 118817 - DNA, 15 bp, Homo sapiens
atgcaatttaaaaaa

SEQ ID NO: 118818 - DNA, 15 bp, Homo sapiens
gatgcaatttaaaaa

SEQ ID NO: 118819 - DNA, 15 bp, Homo sapiens
agatgcaatttaaaa

SEQ ID NO: 118820 - DNA, 15 bp, Homo sapiens
cagatgcaatttaaa

SEQ ID NO: 118821 - DNA, 15 bp, Homo sapiens
acagatgcaatttaa

SEQ ID NO: 118822 - DNA, 15 bp, Homo sapiens
cacagatgcaattta

SEQ ID NO: 118823 - DNA, 15 bp, Homo sapiens
ccacagatgcaattt

SEQ ID NO: 118824 - DNA, 15 bp, Homo sapiens
cccacagatgcaatt

SEQ ID NO: 118825 - DNA, 15 bp, Homo sapiens
gcccacagatgcaat

SEQ ID NO: 118826 - DNA, 15 bp, Homo sapiens
ggcccacagatgcaa

SEQ ID NO: 118827 - DNA, 15 bp, Homo sapiens
cggcccacagatgca

SEQ ID NO: 118828 - DNA, 15 bp, Homo sapiens
ccggcccacagatgc

SEQ ID NO: 118829 - DNA, 15 bp, Homo sapiens
cccggcccacagatg

SEQ ID NO: 118830 - DNA, 15 bp, Homo sapiens
acccggcccacagat

SEQ ID NO: 118831 - DNA, 15 bp, Homo sapiens
cacccggcccacaga

SEQ ID NO: 118832 - DNA, 15 bp, Homo sapiens
gcacccggcccacag

SEQ ID NO: 118833 - DNA, 15 bp, Homo sapiens
tgcacccggcccaca

SEQ ID NO: 118834 - DNA, 15 bp, Homo sapiens
ctgcacccggcccac

SEQ ID NO: 118835 - DNA, 15 bp, Homo sapiens
actgcacccggccca

SEQ ID NO: 118836 - DNA, 15 bp, Homo sapiens
cactgcacccggccc

SEQ ID NO: 118837 - DNA, 15 bp, Homo sapiens
gccactgcacccggc

SEQ ID NO: 118838 - DNA, 15 bp, Homo sapiens
agccactgcacccgg

SEQ ID NO: 118839 - DNA, 15 bp, Homo sapiens
gagccactgcacccg

SEQ ID NO: 118840 - DNA, 15 bp, Homo sapiens
tgagccactgcaccc

SEQ ID NO: 118841 - DNA, 15 bp, Homo sapiens
atgagccactgcacc

SEQ ID NO: 118842 - DNA, 15 bp, Homo sapiens
catgagccactgcac

SEQ ID NO: 118843 - DNA, 15 bp, Homo sapiens
gcatgagccactgca

SEQ ID NO: 118844 - DNA, 15 bp, Homo sapiens
cttacaggcatgagc

SEQ ID NO: 118845 - DNA, 15 bp, Homo sapiens
gcttacaggcatgag

SEQ ID NO: 118846 - DNA, 15 bp, Homo sapiens
ggcttacaggcatga

SEQ ID NO: 118847 - DNA, 15 bp, Homo sapiens
gggcttacaggcatg

SEQ ID NO: 118848 - DNA, 15 bp, Homo sapiens
tgggcttacaggcat

SEQ ID NO: 118849 - DNA, 15 bp, Homo sapiens
ctgggcttacaggca

SEQ ID NO: 118850 - DNA, 15 bp, Homo sapiens
gctgggcttacaggc

SEQ ID NO: 118851 - DNA, 15 bp, Homo sapiens
tgctgggcttacagg

SEQ ID NO: 118852 - DNA, 15 bp, Homo sapiens
atgctgggcttacag

SEQ ID NO: 118853 - DNA, 15 bp, Homo sapiens
aatgctgggcttaca

SEQ ID NO: 118854 - DNA, 15 bp, Homo sapiens
aaatgctgggcttac

SEQ ID NO: 118855 - DNA, 15 bp, Homo sapiens
aaaatgctgggctta

SEQ ID NO: 118856 - DNA, 15 bp, Homo sapiens
taaaatgctgggctt

SEQ ID NO: 118857 - DNA, 15 bp, Homo sapiens
ctaaaatgctgggct

SEQ ID NO: 118858 - DNA, 15 bp, Homo sapiens
cctaaaatgctgggc

SEQ ID NO: 118859 - DNA, 15 bp, Homo sapiens
tcctaaaatgctggg

SEQ ID NO: 118860 - DNA, 15 bp, Homo sapiens
ctcctaaaatgctgg

SEQ ID NO: 118861 - DNA, 15 bp, Homo sapiens
cctcctaaaatgctg

SEQ ID NO: 118862 - DNA, 15 bp, Homo sapiens
gcctcctaaaatgct

SEQ ID NO: 118863 - DNA, 15 bp, Homo sapiens
tgcctcctaaaatgc

SEQ ID NO: 118864 - DNA, 15 bp, Homo sapiens
ctgcctcctaaaatg

SEQ ID NO: 118865 - DNA, 15 bp, Homo sapiens
tctgcctcctaaaat

SEQ ID NO: 118866 - DNA, 15 bp, Homo sapiens
ctctgcctcctaaaa

SEQ ID NO: 118867 - DNA, 15 bp, Homo sapiens
tctctgcctcctaaa

SEQ ID NO: 118868 - DNA, 15 bp, Homo sapiens
atctctgcctcctaa

SEQ ID NO: 118869 - DNA, 15 bp, Homo sapiens
aatctctgcctccta

SEQ ID NO: 118870 - DNA, 15 bp, Homo sapiens
caatctctgcctcct

SEQ ID NO: 118871 - DNA, 15 bp, Homo sapiens
ccaatctctgcctcc

SEQ ID NO: 118872 - DNA, 15 bp, Homo sapiens
tccaatctctgcctc

SEQ ID NO: 118873 - DNA, 15 bp, Homo sapiens
ctccaatctctgcct

SEQ ID NO: 118874 - DNA, 15 bp, Homo sapiens
cctccaatctctgcc

SEQ ID NO: 118875 - DNA, 15 bp, Homo sapiens
tcctccaatctctgc

SEQ ID NO: 118876 - DNA, 15 bp, Homo sapiens
atcctccaatctctg

SEQ ID NO: 118877 - DNA, 15 bp, Homo sapiens
gatcctccaatctct

SEQ ID NO: 118878 - DNA, 15 bp, Homo sapiens
tgatcctccaatctc

SEQ ID NO: 118879 - DNA, 15 bp, Homo sapiens
gtgatcctccaatct

SEQ ID NO: 118880 - DNA, 15 bp, Homo sapiens
agtgatcctccaatc

SEQ ID NO: 118881 - DNA, 15 bp, Homo sapiens
aagtgatcctccaat

SEQ ID NO: 118882 - DNA, 15 bp, Homo sapiens
taagtgatcctccaa

SEQ ID NO: 118883 - DNA, 15 bp, Homo sapiens
ttaagtgatcctcca

SEQ ID NO: 118884 - DNA, 15 bp, Homo sapiens
cttaagtgatcctcc

SEQ ID NO: 118885 - DNA, 15 bp, Homo sapiens
ccttaagtgatcctc

SEQ ID NO: 118886 - DNA, 15 bp, Homo sapiens
gccttaagtgatcct

SEQ ID NO: 118887 - DNA, 15 bp, Homo sapiens
ggccttaagtgatcc

SEQ ID NO: 118888 - DNA, 15 bp, Homo sapiens
tggccttaagtgatc

SEQ ID NO: 118889 - DNA, 15 bp, Homo sapiens
ctggccttaagtgat

SEQ ID NO: 118890 - DNA, 15 bp, Homo sapiens
cctggccttaagtga

SEQ ID NO: 118891 - DNA, 15 bp, Homo sapiens
tcctggccttaagtg

SEQ ID NO: 118892 - DNA, 15 bp, Homo sapiens
ctcctggccttaagt

SEQ ID NO: 118893 - DNA, 15 bp, Homo sapiens
actcctggccttaag

SEQ ID NO: 118894 - DNA, 15 bp, Homo sapiens
aactcctggccttaa

SEQ ID NO: 118895 - DNA, 15 bp, Homo sapiens
caactcctggcctta

SEQ ID NO: 118896 - DNA, 15 bp, Homo sapiens
ccaactcctggcctt

SEQ ID NO: 118897 - DNA, 15 bp, Homo sapiens
tccaactcctggcct

SEQ ID NO: 118898 - DNA, 15 bp, Homo sapiens
ctccaactcctggcc

SEQ ID NO: 118899 - DNA, 15 bp, Homo sapiens
tctccaactcctggc

SEQ ID NO: 118900 - DNA, 15 bp, Homo sapiens
gtctccaactcctgg

SEQ ID NO: 118901 - DNA, 15 bp, Homo sapiens
ggctggtctccaact

SEQ ID NO: 118902 - DNA, 15 bp, Homo sapiens
aggctggtctccaac

SEQ ID NO: 118903 - DNA, 15 bp, Homo sapiens
caggctggtctccaa

SEQ ID NO: 118904 - DNA, 15 bp, Homo sapiens
tcaggctggtctcca

SEQ ID NO: 118905 - DNA, 15 bp, Homo sapiens
ctcaggctggtctcc

SEQ ID NO: 118906 - DNA, 15 bp, Homo sapiens
gctcaggctggtctc

SEQ ID NO: 118907 - DNA, 15 bp, Homo sapiens
tgctcaggctggtct

SEQ ID NO: 118908 - DNA, 15 bp, Homo sapiens
ttgctcaggctggtc

SEQ ID NO: 118909 - DNA, 15 bp, Homo sapiens
gttgctcaggctggt

SEQ ID NO: 118910 - DNA, 15 bp, Homo sapiens
atgttgctcaggctg

SEQ ID NO: 118911 - DNA, 15 bp, Homo sapiens
tatgttgctcaggct

SEQ ID NO: 118912 - DNA, 15 bp, Homo sapiens
ctatgttgctcaggc

SEQ ID NO: 118913 - DNA, 15 bp, Homo sapiens
gctatgttgctcagg

SEQ ID NO: 118914 - DNA, 15 bp, Homo sapiens
cgctatgttgctcag

SEQ ID NO: 118915 - DNA, 15 bp, Homo sapiens
tcgctatgttgctca

SEQ ID NO: 118916 - DNA, 15 bp, Homo sapiens
gtcgctatgttgctc

SEQ ID NO: 118917 - DNA, 15 bp, Homo sapiens
tgtcgctatgttgct

SEQ ID NO: 118918 - DNA, 15 bp, Homo sapiens
gtgtcgctatgttgc

SEQ ID NO: 118919 - DNA, 15 bp, Homo sapiens
ggtgtcgctatgttg

SEQ ID NO: 118920 - DNA, 15 bp, Homo sapiens
gggtgtcgctatgtt

SEQ ID NO: 118921 - DNA, 15 bp, Homo sapiens
ggggtgtcgctatgt

SEQ ID NO: 118922 - DNA, 15 bp, Homo sapiens
tggggtgtcgctatg

SEQ ID NO: 118923 - DNA, 15 bp, Homo sapiens
atggggtgtcgctat

SEQ ID NO: 118924 - DNA, 15 bp, Homo sapiens
gatggggtgtcgcta

SEQ ID NO: 118925 - DNA, 15 bp, Homo sapiens
agatggggtgtcgct

SEQ ID NO: 118926 - DNA, 15 bp, Homo sapiens
gagatggggtgtcgc

SEQ ID NO: 118927 - DNA, 15 bp, Homo sapiens
ggagatggggtgtcg

SEQ ID NO: 118928 - DNA, 15 bp, Homo sapiens
tggagatggggtgtc

SEQ ID NO: 118929 - DNA, 15 bp, Homo sapiens
atggagatggggtgt

SEQ ID NO: 118930 - DNA, 15 bp, Homo sapiens
aatggagatggggtg

SEQ ID NO: 118931 - DNA, 15 bp, Homo sapiens
taatggagatggggt

SEQ ID NO: 118932 - DNA, 15 bp, Homo sapiens
ttaatggagatgggg

SEQ ID NO: 118933 - DNA, 15 bp, Homo sapiens
tttaatggagatggg

SEQ ID NO: 118934 - DNA, 15 bp, Homo sapiens
ttttaatggagatgg

SEQ ID NO: 118935 - DNA, 15 bp, Homo sapiens
tttttaatggagatg

SEQ ID NO: 118936 - DNA, 15 bp, Homo sapiens
gtttttaatggagat

SEQ ID NO: 118937 - DNA, 15 bp, Homo sapiens
tgtttttaatggaga

SEQ ID NO: 118938 - DNA, 15 bp, Homo sapiens
ttgtttttaatggag

SEQ ID NO: 118939 - DNA, 15 bp, Homo sapiens
attgtttttaatgga

SEQ ID NO: 118940 - DNA, 15 bp, Homo sapiens
cattgtttttaatgg

SEQ ID NO: 118941 - DNA, 15 bp, Homo sapiens
acattgtttttaatg

SEQ ID NO: 118942 - DNA, 15 bp, Homo sapiens
aacattgtttttaat

SEQ ID NO: 118943 - DNA, 15 bp, Homo sapiens
aaaacattgttttta

SEQ ID NO: 118944 - DNA, 15 bp, Homo sapiens
taaaacattgttttt

SEQ ID NO: 118945 - DNA, 15 bp, Homo sapiens
ttaaaacattgtttt

SEQ ID NO: 118946 - DNA, 15 bp, Homo sapiens
tttaaaacattgttt

SEQ ID NO: 118947 - DNA, 15 bp, Homo sapiens
ttttaaaacattgtt

SEQ ID NO: 118948 - DNA, 15 bp, Homo sapiens
tttttaaaacattgt

SEQ ID NO: 118949 - DNA, 15 bp, Homo sapiens
ttttttaaaacattg

SEQ ID NO: 118950 - DNA, 15 bp, Homo sapiens
tttttttaaaacatt

SEQ ID NO: 118951 - DNA, 15 bp, Homo sapiens
atttttttaaaacat

SEQ ID NO: 118952 - DNA, 15 bp, Homo sapiens
aatttttttaaaaca

SEQ ID NO: 118953 - DNA, 15 bp, Homo sapiens
caatttttttaaaac

SEQ ID NO: 118954 - DNA, 15 bp, Homo sapiens
gcaatttttttaaaa

SEQ ID NO: 118955 - DNA, 15 bp, Homo sapiens
tgcaatttttttaaa

SEQ ID NO: 118956 - DNA, 15 bp, Homo sapiens
atgcaatttttttaa

SEQ ID NO: 118957 - DNA, 15 bp, Homo sapiens
gatgcaattttttta

SEQ ID NO: 118958 - DNA, 15 bp, Homo sapiens
agatgcaattttttt

SEQ ID NO: 118959 - DNA, 15 bp, Homo sapiens
cagatgcaatttttt

SEQ ID NO: 118960 - DNA, 15 bp, Homo sapiens
ccagatgcaattttt

SEQ ID NO: 118961 - DNA, 15 bp, Homo sapiens
cccagatgcaatttt

SEQ ID NO: 118962 - DNA, 15 bp, Homo sapiens
gcccagatgcaattt

SEQ ID NO: 118963 - DNA, 15 bp, Homo sapiens
tgcccagatgcaatt

SEQ ID NO: 118964 - DNA, 15 bp, Homo sapiens
ctgcccagatgcaat

SEQ ID NO: 118965 - DNA, 15 bp, Homo sapiens
cctgcccagatgcaa

SEQ ID NO: 118966 - DNA, 15 bp, Homo sapiens
ccctgcccagatgca

SEQ ID NO: 118967 - DNA, 15 bp, Homo sapiens
gccctgcccagatgc

SEQ ID NO: 118968 - DNA, 15 bp, Homo sapiens
cgccctgcccagatg

SEQ ID NO: 118969 - DNA, 15 bp, Homo sapiens
gcgccctgcccagat

SEQ ID NO: 118970 - DNA, 15 bp, Homo sapiens
tgcgccctgcccaga

SEQ ID NO: 118971 - DNA, 15 bp, Homo sapiens
ctgcgccctgcccag

SEQ ID NO: 118972 - DNA, 15 bp, Homo sapiens
actgcgccctgccca

SEQ ID NO: 118973 - DNA, 15 bp, Homo sapiens
cactgcgccctgccc

SEQ ID NO: 118974 - DNA, 15 bp, Homo sapiens
ccactgcgccctgcc

SEQ ID NO: 118975 - DNA, 15 bp, Homo sapiens
gccactgcgccctgc

SEQ ID NO: 118976 - DNA, 15 bp, Homo sapiens
agccactgcgccctg

SEQ ID NO: 118977 - DNA, 15 bp, Homo sapiens
gagccactgcgccct

SEQ ID NO: 118978 - DNA, 15 bp, Homo sapiens
tgagccactgcgccc

SEQ ID NO: 118979 - DNA, 15 bp, Homo sapiens
gtgagccactgcgcc

SEQ ID NO: 118980 - DNA, 15 bp, Homo sapiens
cgtgagccactgcgc

SEQ ID NO: 118981 - DNA, 15 bp, Homo sapiens
gcgtgagccactgcg

SEQ ID NO: 118982 - DNA, 15 bp, Homo sapiens
taggcgtgagccact

SEQ ID NO: 118983 - DNA, 15 bp, Homo sapiens
ataggcgtgagccac

SEQ ID NO: 118984 - DNA, 15 bp, Homo sapiens
tataggcgtgagcca

SEQ ID NO: 118985 - DNA, 15 bp, Homo sapiens
ttataggcgtgagcc

SEQ ID NO: 118986 - DNA, 15 bp, Homo sapiens
cttataggcgtgagc

SEQ ID NO: 118987 - DNA, 15 bp, Homo sapiens
gcttataggcgtgag

SEQ ID NO: 118988 - DNA, 15 bp, Homo sapiens
ggcttataggcgtga

SEQ ID NO: 118989 - DNA, 15 bp, Homo sapiens
gggcttataggcgtg

SEQ ID NO: 118990 - DNA, 15 bp, Homo sapiens
tgggcttataggcgt

SEQ ID NO: 118991 - DNA, 15 bp, Homo sapiens
ctgggcttataggcg

SEQ ID NO: 118992 - DNA, 15 bp, Homo sapiens
gctgggcttataggc

SEQ ID NO: 118993 - DNA, 15 bp, Homo sapiens
tgctgggcttatagg

SEQ ID NO: 118994 - DNA, 15 bp, Homo sapiens
gtgctgggcttatag

SEQ ID NO: 118995 - DNA, 15 bp, Homo sapiens
agtgctgggcttata

SEQ ID NO: 118996 - DNA, 15 bp, Homo sapiens
aagtgctgggcttat

SEQ ID NO: 118997 - DNA, 15 bp, Homo sapiens
aaagtgctgggctta

SEQ ID NO: 118998 - DNA, 15 bp, Homo sapiens
caaagtgctgggctt

SEQ ID NO: 118999 - DNA, 15 bp, Homo sapiens
ccaaagtgctgggct

SEQ ID NO: 119000 - DNA, 15 bp, Homo sapiens
cccaaagtgctgggc

SEQ ID NO: 119001 - DNA, 15 bp, Homo sapiens
gggcctcccaaagtg

SEQ ID NO: 119002 - DNA, 15 bp, Homo sapiens
tgggcctcccaaagt

SEQ ID NO: 119003 - DNA, 15 bp, Homo sapiens
gtgggcctcccaaag

SEQ ID NO: 119004 - DNA, 15 bp, Homo sapiens
tgtgggcctcccaaa

SEQ ID NO: 119005 - DNA, 15 bp, Homo sapiens
atgtgggcctcccaa

SEQ ID NO: 119006 - DNA, 15 bp, Homo sapiens
catgtgggcctccca

SEQ ID NO: 119007 - DNA, 15 bp, Homo sapiens
ccatgtgggcctccc

SEQ ID NO: 119008 - DNA, 15 bp, Homo sapiens
cccatgtgggcctcc

SEQ ID NO: 119009 - DNA, 15 bp, Homo sapiens
tcccatgtgggcctc

SEQ ID NO: 119010 - DNA, 15 bp, Homo sapiens
ctcccatgtgggcct

SEQ ID NO: 119011 - DNA, 15 bp, Homo sapiens
cctcccatgtgggcc

SEQ ID NO: 119012 - DNA, 15 bp, Homo sapiens
tcctcccatgtgggc

SEQ ID NO: 119013 - DNA, 15 bp, Homo sapiens
atcctcccatgtggg

SEQ ID NO: 119014 - DNA, 15 bp, Homo sapiens
aatcctcccatgtgg

SEQ ID NO: 119015 - DNA, 15 bp, Homo sapiens
caatcctcccatgtg

SEQ ID NO: 119016 - DNA, 15 bp, Homo sapiens
gcaatcctcccatgt

SEQ ID NO: 119017 - DNA, 15 bp, Homo sapiens
agcaatcctcccatg

SEQ ID NO: 119018 - DNA, 15 bp, Homo sapiens
aagcaatcctcccat

SEQ ID NO: 119019 - DNA, 15 bp, Homo sapiens
caagcaatcctccca

SEQ ID NO: 119020 - DNA, 15 bp, Homo sapiens
tcaagcaatcctccc

SEQ ID NO: 119021 - DNA, 15 bp, Homo sapiens
ctcaagcaatcctcc

SEQ ID NO: 119022 - DNA, 15 bp, Homo sapiens
cctcaagcaatcctc

SEQ ID NO: 119023 - DNA, 15 bp, Homo sapiens
gcctcaagcaatcct

SEQ ID NO: 119024 - DNA, 15 bp, Homo sapiens
ggcctcaagcaatcc

SEQ ID NO: 119025 - DNA, 15 bp, Homo sapiens
tggcctcaagcaatc

SEQ ID NO: 119026 - DNA, 15 bp, Homo sapiens
ctggcctcaagcaat

SEQ ID NO: 119027 - DNA, 15 bp, Homo sapiens
cctggcctcaagcaa

SEQ ID NO: 119028 - DNA, 15 bp, Homo sapiens
tcctggcctcaagca

SEQ ID NO: 119029 - DNA, 15 bp, Homo sapiens
ctcctggcctcaagc

SEQ ID NO: 119030 - DNA, 15 bp, Homo sapiens
actcctggcctcaag

SEQ ID NO: 119031 - DNA, 15 bp, Homo sapiens
aactcctggcctcaa

SEQ ID NO: 119032 - DNA, 15 bp, Homo sapiens
caactcctggcctca

SEQ ID NO: 119033 - DNA, 15 bp, Homo sapiens
ccaactcctggcctc

SEQ ID NO: 119034 - DNA, 15 bp, Homo sapiens
catgttgctcaggct

SEQ ID NO: 119035 - DNA, 15 bp, Homo sapiens
ccatgttgctcaggc

SEQ ID NO: 119036 - DNA, 15 bp, Homo sapiens
accatgttgctcagg

SEQ ID NO: 119037 - DNA, 15 bp, Homo sapiens
caccatgttgctcag

SEQ ID NO: 119038 - DNA, 15 bp, Homo sapiens
tcaccatgttgctca

SEQ ID NO: 119039 - DNA, 15 bp, Homo sapiens
ttcaccatgttgctc

SEQ ID NO: 119040 - DNA, 15 bp, Homo sapiens
tttcaccatgttgct

SEQ ID NO: 119041 - DNA, 15 bp, Homo sapiens
gtttcaccatgttgc

SEQ ID NO: 119042 - DNA, 15 bp, Homo sapiens
cagagacggggtttc

SEQ ID NO: 119043 - DNA, 15 bp, Homo sapiens
gcagagacggggttt

SEQ ID NO: 119044 - DNA, 15 bp, Homo sapiens
agcagagacggggtt

SEQ ID NO: 119045 - DNA, 15 bp, Homo sapiens
cagcagagacggggt

SEQ ID NO: 119046 - DNA, 15 bp, Homo sapiens
acagcagagacgggg

SEQ ID NO: 119047 - DNA, 15 bp, Homo sapiens
tacagcagagacggg

SEQ ID NO: 119048 - DNA, 15 bp, Homo sapiens
ttacagcagagacgg

SEQ ID NO: 119049 - DNA, 15 bp, Homo sapiens
tttacagcagagacg

SEQ ID NO: 119050 - DNA, 15 bp, Homo sapiens
atttacagcagagac

SEQ ID NO: 119051 - DNA, 15 bp, Homo sapiens
tatttacagcagaga

SEQ ID NO: 119052 - DNA, 15 bp, Homo sapiens
gtatttacagcagag

SEQ ID NO: 119053 - DNA, 15 bp, Homo sapiens
tgtatttacagcaga

SEQ ID NO: 119054 - DNA, 15 bp, Homo sapiens
gtgtatttacagcag

SEQ ID NO: 119055 - DNA, 15 bp, Homo sapiens
tgtgtatttacagca

SEQ ID NO: 119056 - DNA, 15 bp, Homo sapiens
ttgtgtatttacagc

SEQ ID NO: 119057 - DNA, 15 bp, Homo sapiens
tttgtgtatttacag

SEQ ID NO: 119058 - DNA, 15 bp, Homo sapiens
atttgtgtatttaca

SEQ ID NO: 119059 - DNA, 15 bp, Homo sapiens
aatttgtgtatttac

SEQ ID NO: 119060 - DNA, 15 bp, Homo sapiens
taatttgtgtattta

SEQ ID NO: 119061 - DNA, 15 bp, Homo sapiens
ctaatttgtgtattt

SEQ ID NO: 119062 - DNA, 15 bp, Homo sapiens
gctaatttgtgtatt

SEQ ID NO: 119063 - DNA, 15 bp, Homo sapiens
agctaatttgtgtat

SEQ ID NO: 119064 - DNA, 15 bp, Homo sapiens
cagctaatttgtgta

SEQ ID NO: 119065 - DNA, 15 bp, Homo sapiens
ccagctaatttgtgt

SEQ ID NO: 119066 - DNA, 15 bp, Homo sapiens
cccagctaatttgtg

SEQ ID NO: 119067 - DNA, 15 bp, Homo sapiens
gcccagctaatttgt

SEQ ID NO: 119068 - DNA, 15 bp, Homo sapiens
cgcccagctaatttg

SEQ ID NO: 119069 - DNA, 15 bp, Homo sapiens
acgcccagctaattt

SEQ ID NO: 119070 - DNA, 15 bp, Homo sapiens
cacgcccagctaatt

SEQ ID NO: 119071 - DNA, 15 bp, Homo sapiens
ccacgcccagctaat

SEQ ID NO: 119072 - DNA, 15 bp, Homo sapiens
accacgcccagctaa

SEQ ID NO: 119073 - DNA, 15 bp, Homo sapiens
caccacgcccagcta

SEQ ID NO: 119074 - DNA, 15 bp, Homo sapiens
ccaccacgcccagct

SEQ ID NO: 119075 - DNA, 15 bp, Homo sapiens
accaccacgcccagc

SEQ ID NO: 119076 - DNA, 15 bp, Homo sapiens
caccaccacgcccag

SEQ ID NO: 119077 - DNA, 15 bp, Homo sapiens
ccaccaccacgccca

SEQ ID NO: 119078 - DNA, 15 bp, Homo sapiens
cccaccaccacgccc

SEQ ID NO: 119079 - DNA, 15 bp, Homo sapiens
acccaccaccacgcc

SEQ ID NO: 119080 - DNA, 15 bp, Homo sapiens
cacccaccaccacgc

SEQ ID NO: 119081 - DNA, 15 bp, Homo sapiens
gcacccaccaccacg

SEQ ID NO: 119082 - DNA, 15 bp, Homo sapiens
ggcacccaccaccac

SEQ ID NO: 119083 - DNA, 15 bp, Homo sapiens
aggcacccaccacca

SEQ ID NO: 119084 - DNA, 15 bp, Homo sapiens
caggcacccaccacc

SEQ ID NO: 119085 - DNA, 15 bp, Homo sapiens
acaggcacccaccac

SEQ ID NO: 119086 - DNA, 15 bp, Homo sapiens
tacaggcacccacca

SEQ ID NO: 119087 - DNA, 15 bp, Homo sapiens
ttacaggcacccacc

SEQ ID NO: 119088 - DNA, 15 bp, Homo sapiens
attacaggcacccac

SEQ ID NO: 119089 - DNA, 15 bp, Homo sapiens
gattacaggcaccca

SEQ ID NO: 119090 - DNA, 15 bp, Homo sapiens
ggattacaggcaccc

SEQ ID NO: 119091 - DNA, 15 bp, Homo sapiens
gggattacaggcacc

SEQ ID NO: 119092 - DNA, 15 bp, Homo sapiens
gagtagctgggatta

SEQ ID NO: 119093 - DNA, 15 bp, Homo sapiens
tgagtagctgggatt

SEQ ID NO: 119094 - DNA, 15 bp, Homo sapiens
ctgagtagctgggat

SEQ ID NO: 119095 - DNA, 15 bp, Homo sapiens
tgattctcctgcctc

SEQ ID NO: 119096 - DNA, 15 bp, Homo sapiens
gtgattctcctgcct

SEQ ID NO: 119097 - DNA, 15 bp, Homo sapiens
agtgattctcctgcc

SEQ ID NO: 119098 - DNA, 15 bp, Homo sapiens
aagtgattctcctgc

SEQ ID NO: 119099 - DNA, 15 bp, Homo sapiens
caagtgattctcctg

SEQ ID NO: 119100 - DNA, 15 bp, Homo sapiens
tcaagtgattctcct

SEQ ID NO: 119101 - DNA, 15 bp, Homo sapiens
ttcaagtgattctcc

SEQ ID NO: 119102 - DNA, 15 bp, Homo sapiens
gttcaagtgattctc

SEQ ID NO: 119103 - DNA, 15 bp, Homo sapiens
ggttcaagtgattct

SEQ ID NO: 119104 - DNA, 15 bp, Homo sapiens
ccccaggttcaagtg

SEQ ID NO: 119105 - DNA, 15 bp, Homo sapiens
cccccaggttcaagt

SEQ ID NO: 119106 - DNA, 15 bp, Homo sapiens
ccccccaggttcaag

SEQ ID NO: 119107 - DNA, 15 bp, Homo sapiens
gccccccaggttcaa

SEQ ID NO: 119108 - DNA, 15 bp, Homo sapiens
tgccccccaggttca

SEQ ID NO: 119109 - DNA, 15 bp, Homo sapiens
ctgccccccaggttc

SEQ ID NO: 119110 - DNA, 15 bp, Homo sapiens
tctgccccccaggtt

SEQ ID NO: 119111 - DNA, 15 bp, Homo sapiens
ctctgccccccaggt

SEQ ID NO: 119112 - DNA, 15 bp, Homo sapiens
tctctgccccccagg

SEQ ID NO: 119113 - DNA, 15 bp, Homo sapiens
atctctgccccccag

SEQ ID NO: 119114 - DNA, 15 bp, Homo sapiens
aatctctgcccccca

SEQ ID NO: 119115 - DNA, 15 bp, Homo sapiens
caatctctgcccccc

SEQ ID NO: 119116 - DNA, 15 bp, Homo sapiens
gcaatctctgccccc

SEQ ID NO: 119117 - DNA, 15 bp, Homo sapiens
tgcaatctctgcccc

SEQ ID NO: 119118 - DNA, 15 bp, Homo sapiens
ctgcaatctctgccc

SEQ ID NO: 119119 - DNA, 15 bp, Homo sapiens
actgcaatctctgcc

SEQ ID NO: 119120 - DNA, 15 bp, Homo sapiens
cactgcaatctctgc

SEQ ID NO: 119121 - DNA, 15 bp, Homo sapiens
tcactgcaatctctg

SEQ ID NO: 119122 - DNA, 15 bp, Homo sapiens
ctcactgcaatctct

SEQ ID NO: 119123 - DNA, 15 bp, Homo sapiens
gctcactgcaatctc

SEQ ID NO: 119124 - DNA, 15 bp, Homo sapiens
agctcactgcaatct

SEQ ID NO: 119125 - DNA, 15 bp, Homo sapiens
tagctcactgcaatc

SEQ ID NO: 119126 - DNA, 15 bp, Homo sapiens
ttagctcactgcaat

SEQ ID NO: 119127 - DNA, 15 bp, Homo sapiens
acgatcttagctcac

SEQ ID NO: 119128 - DNA, 15 bp, Homo sapiens
cacgatcttagctca

SEQ ID NO: 119129 - DNA, 15 bp, Homo sapiens
gcacgatcttagctc

SEQ ID NO: 119130 - DNA, 15 bp, Homo sapiens
ggcacgatcttagct

SEQ ID NO: 119131 - DNA, 15 bp, Homo sapiens
tggcacgatcttagc

SEQ ID NO: 119132 - DNA, 15 bp, Homo sapiens
gtggcacgatcttag

SEQ ID NO: 119133 - DNA, 15 bp, Homo sapiens
agtggcacgatctta

SEQ ID NO: 119134 - DNA, 15 bp, Homo sapiens
cagtggcacgatctt

SEQ ID NO: 119135 - DNA, 15 bp, Homo sapiens
tactctgtcacccag

SEQ ID NO: 119136 - DNA, 15 bp, Homo sapiens
ttactctgtcaccca

SEQ ID NO: 119137 - DNA, 15 bp, Homo sapiens
cttactctgtcaccc

SEQ ID NO: 119138 - DNA, 15 bp, Homo sapiens
tcttactctgtcacc

SEQ ID NO: 119139 - DNA, 15 bp, Homo sapiens
gtcttactctgtcac

SEQ ID NO: 119140 - DNA, 15 bp, Homo sapiens
agtcttactctgtca

SEQ ID NO: 119141 - DNA, 15 bp, Homo sapiens
gagtcttactctgtc

SEQ ID NO: 119142 - DNA, 15 bp, Homo sapiens
ggagtcttactctgt

SEQ ID NO: 119143 - DNA, 15 bp, Homo sapiens
tggagtcttactctg

SEQ ID NO: 119144 - DNA, 15 bp, Homo sapiens
atggagtcttactct

SEQ ID NO: 119145 - DNA, 15 bp, Homo sapiens
gatggagtcttactc

SEQ ID NO: 119146 - DNA, 15 bp, Homo sapiens
agatggagtcttact

SEQ ID NO: 119147 - DNA, 15 bp, Homo sapiens
gagatggagtcttac

SEQ ID NO: 119148 - DNA, 15 bp, Homo sapiens
tgagatggagtctta

SEQ ID NO: 119149 - DNA, 15 bp, Homo sapiens
caatttttttttttt

SEQ ID NO: 119150 - DNA, 15 bp, Homo sapiens
gcaattttttttttt

SEQ ID NO: 119151 - DNA, 15 bp, Homo sapiens
tgcaatttttttttt

SEQ ID NO: 119152 - DNA, 15 bp, Homo sapiens
gtgcaattttttttt

SEQ ID NO: 119153 - DNA, 15 bp, Homo sapiens
ggtgcaatttttttt

SEQ ID NO: 119154 - DNA, 15 bp, Homo sapiens
aggtgcaattttttt

SEQ ID NO: 119155 - DNA, 15 bp, Homo sapiens
caggtgcaatttttt

SEQ ID NO: 119156 - DNA, 15 bp, Homo sapiens
acaggtgcaattttt

SEQ ID NO: 119157 - DNA, 15 bp, Homo sapiens
tacaggtgcaatttt

SEQ ID NO: 119158 - DNA, 15 bp, Homo sapiens
gtacaggtgcaattt

SEQ ID NO: 119159 - DNA, 15 bp, Homo sapiens
agtacaggtgcaatt

SEQ ID NO: 119160 - DNA, 15 bp, Homo sapiens
tagtacaggtgcaat

SEQ ID NO: 119161 - DNA, 15 bp, Homo sapiens
ttagtacaggtgcaa

SEQ ID NO: 119162 - DNA, 15 bp, Homo sapiens
tttagtacaggtgca

SEQ ID NO: 119163 - DNA, 15 bp, Homo sapiens
gtttagtacaggtgc

SEQ ID NO: 119164 - DNA, 15 bp, Homo sapiens
tgtttagtacaggtg

SEQ ID NO: 119165 - DNA, 15 bp, Homo sapiens
atgtttagtacaggt

SEQ ID NO: 119166 - DNA, 15 bp, Homo sapiens
tatgtttagtacagg

SEQ ID NO: 119167 - DNA, 15 bp, Homo sapiens
atatgtttagtacag

SEQ ID NO: 119168 - DNA, 15 bp, Homo sapiens
tatatgtttagtaca

SEQ ID NO: 119169 - DNA, 15 bp, Homo sapiens
gtatatgtttagtac

SEQ ID NO: 119170 - DNA, 15 bp, Homo sapiens
tgtatatgtttagta

SEQ ID NO: 119171 - DNA, 15 bp, Homo sapiens
ctgtatatgtttagt

SEQ ID NO: 119172 - DNA, 15 bp, Homo sapiens
tctgtatatgtttag

SEQ ID NO: 119173 - DNA, 15 bp, Homo sapiens
gtctgtatatgttta

SEQ ID NO: 119174 - DNA, 15 bp, Homo sapiens
agtctgtatatgttt

SEQ ID NO: 119175 - DNA, 15 bp, Homo sapiens
aagtctgtatatgtt

SEQ ID NO: 119176 - DNA, 15 bp, Homo sapiens
aaagtctgtatatgt

SEQ ID NO: 119177 - DNA, 15 bp, Homo sapiens
aaaagtctgtatatg

SEQ ID NO: 119178 - DNA, 15 bp, Homo sapiens
aaaaagtctgtatat

SEQ ID NO: 119179 - DNA, 15 bp, Homo sapiens
aaaaaagtctgtata

SEQ ID NO: 119180 - DNA, 15 bp, Homo sapiens
caaaaaagtctgtat

SEQ ID NO: 119181 - DNA, 15 bp, Homo sapiens
ccaaaaaagtctgta

SEQ ID NO: 119182 - DNA, 15 bp, Homo sapiens
accaaaaaagtctgt

SEQ ID NO: 119183 - DNA, 15 bp, Homo sapiens
caccaaaaaagtctg

SEQ ID NO: 119184 - DNA, 15 bp, Homo sapiens
tcaccaaaaaagtct

SEQ ID NO: 119185 - DNA, 15 bp, Homo sapiens
atcaccaaaaaagtc

SEQ ID NO: 119186 - DNA, 15 bp, Homo sapiens
aatcaccaaaaaagt

SEQ ID NO: 119187 - DNA, 15 bp, Homo sapiens
taatcaccaaaaaag

SEQ ID NO: 119188 - DNA, 15 bp, Homo sapiens
gtaatcaccaaaaaa

SEQ ID NO: 119189 - DNA, 15 bp, Homo sapiens
ggtaatcaccaaaaa

SEQ ID NO: 119190 - DNA, 15 bp, Homo sapiens
aggtaatcaccaaaa

SEQ ID NO: 119191 - DNA, 15 bp, Homo sapiens
gaggtaatcaccaaa

SEQ ID NO: 119192 - DNA, 15 bp, Homo sapiens
ggaggtaatcaccaa

SEQ ID NO: 119193 - DNA, 15 bp, Homo sapiens
aggaggtaatcacca

SEQ ID NO: 119194 - DNA, 15 bp, Homo sapiens
taggaggtaatcacc

SEQ ID NO: 119195 - DNA, 15 bp, Homo sapiens
ttaggaggtaatcac

SEQ ID NO: 119196 - DNA, 15 bp, Homo sapiens
tttaggaggtaatca

SEQ ID NO: 119197 - DNA, 15 bp, Homo sapiens
gtttaggaggtaatc

SEQ ID NO: 119198 - DNA, 15 bp, Homo sapiens
tgtttaggaggtaat

SEQ ID NO: 119199 - DNA, 15 bp, Homo sapiens
ttgtttaggaggtaa

SEQ ID NO: 119200 - DNA, 15 bp, Homo sapiens
attgtttaggaggta

SEQ ID NO: 119201 - DNA, 15 bp, Homo sapiens
tattgtttaggaggt

SEQ ID NO: 119202 - DNA, 15 bp, Homo sapiens
gtattgtttaggagg

SEQ ID NO: 119203 - DNA, 15 bp, Homo sapiens
tgtattgtttaggag

SEQ ID NO: 119204 - DNA, 15 bp, Homo sapiens
ctgtattgtttagga

SEQ ID NO: 119205 - DNA, 15 bp, Homo sapiens
actgtattgtttagg

SEQ ID NO: 119206 - DNA, 15 bp, Homo sapiens
tactgtattgtttag

SEQ ID NO: 119207 - DNA, 15 bp, Homo sapiens
atactgtattgttta

SEQ ID NO: 119208 - DNA, 15 bp, Homo sapiens
tatactgtattgttt

SEQ ID NO: 119209 - DNA, 15 bp, Homo sapiens
ttatactgtattgtt

SEQ ID NO: 119210 - DNA, 15 bp, Homo sapiens
gttatactgtattgt

SEQ ID NO: 119211 - DNA, 15 bp, Homo sapiens
tgttatactgtattg

SEQ ID NO: 119212 - DNA, 15 bp, Homo sapiens
ttgttatactgtatt

SEQ ID NO: 119213 - DNA, 15 bp, Homo sapiens
gttgttatactgtat

SEQ ID NO: 119214 - DNA, 15 bp, Homo sapiens
ggttgttatactgta

SEQ ID NO: 119215 - DNA, 15 bp, Homo sapiens
tggttgttatactgt

SEQ ID NO: 119216 - DNA, 15 bp, Homo sapiens
atggttgttatactg

SEQ ID NO: 119217 - DNA, 15 bp, Homo sapiens
aatggttgttatact

SEQ ID NO: 119218 - DNA, 15 bp, Homo sapiens
gaatggttgttatac

SEQ ID NO: 119219 - DNA, 15 bp, Homo sapiens
tgaatggttgttata

SEQ ID NO: 119220 - DNA, 15 bp, Homo sapiens
gtgaatggttgttat

SEQ ID NO: 119221 - DNA, 15 bp, Homo sapiens
tgtgaatggttgtta

SEQ ID NO: 119222 - DNA, 15 bp, Homo sapiens
gtgtgaatggttgtt

SEQ ID NO: 119223 - DNA, 15 bp, Homo sapiens
tgtgtgaatggttgt

SEQ ID NO: 119224 - DNA, 15 bp, Homo sapiens
ctgtgtgaatggttg

SEQ ID NO: 119225 - DNA, 15 bp, Homo sapiens
gctgtgtgaatggtt

SEQ ID NO: 119226 - DNA, 15 bp, Homo sapiens
tgctgtgtgaatggt

SEQ ID NO: 119227 - DNA, 15 bp, Homo sapiens
atgctgtgtgaatgg

SEQ ID NO: 119228 - DNA, 15 bp, Homo sapiens
aatgctgtgtgaatg

SEQ ID NO: 119229 - DNA, 15 bp, Homo sapiens
aaatgctgtgtgaat

SEQ ID NO: 119230 - DNA, 15 bp, Homo sapiens
gaaatgctgtgtgaa

SEQ ID NO: 119231 - DNA, 15 bp, Homo sapiens
ggaaatgctgtgtga

SEQ ID NO: 119232 - DNA, 15 bp, Homo sapiens
cggaaatgctgtgtg

SEQ ID NO: 119233 - DNA, 15 bp, Homo sapiens
acggaaatgctgtgt

SEQ ID NO: 119234 - DNA, 15 bp, Homo sapiens
gacggaaatgctgtg

SEQ ID NO: 119235 - DNA, 15 bp, Homo sapiens
cgacggaaatgctgt

SEQ ID NO: 119236 - DNA, 15 bp, Homo sapiens
acgacggaaatgctg

SEQ ID NO: 119237 - DNA, 15 bp, Homo sapiens
tacgacggaaatgct

SEQ ID NO: 119238 - DNA, 15 bp, Homo sapiens
atacgacggaaatgc

SEQ ID NO: 119239 - DNA, 15 bp, Homo sapiens
aatacgacggaaatg

SEQ ID NO: 119240 - DNA, 15 bp, Homo sapiens
taatacgacggaaat

SEQ ID NO: 119241 - DNA, 15 bp, Homo sapiens
ctaatacgacggaaa

SEQ ID NO: 119242 - DNA, 15 bp, Homo sapiens
cctaatacgacggaa

SEQ ID NO: 119243 - DNA, 15 bp, Homo sapiens
acctaatacgacgga

SEQ ID NO: 119244 - DNA, 15 bp, Homo sapiens
tacctaatacgacgg

SEQ ID NO: 119245 - DNA, 15 bp, Homo sapiens
atacctaatacgacg

SEQ ID NO: 119246 - DNA, 15 bp, Homo sapiens
aatacctaatacgac

SEQ ID NO: 119247 - DNA, 15 bp, Homo sapiens
taatacctaatacga

SEQ ID NO: 119248 - DNA, 15 bp, Homo sapiens
ataatacctaatacg

SEQ ID NO: 119249 - DNA, 15 bp, Homo sapiens
tataatacctaatac

SEQ ID NO: 119250 - DNA, 15 bp, Homo sapiens
ttataatacctaata

SEQ ID NO: 119251 - DNA, 15 bp, Homo sapiens
cttataatacctaat

SEQ ID NO: 119252 - DNA, 15 bp, Homo sapiens
acttataatacctaa

SEQ ID NO: 119253 - DNA, 15 bp, Homo sapiens
tacttataataccta

SEQ ID NO: 119254 - DNA, 15 bp, Homo sapiens
ttacttataatacct

SEQ ID NO: 119255 - DNA, 15 bp, Homo sapiens
attacttataatacc

SEQ ID NO: 119256 - DNA, 15 bp, Homo sapiens
gattacttataatac

SEQ ID NO: 119257 - DNA, 15 bp, Homo sapiens
agattacttataata

SEQ ID NO: 119258 - DNA, 15 bp, Homo sapiens
tagattacttataat

SEQ ID NO: 119259 - DNA, 15 bp, Homo sapiens
ctagattacttataa

SEQ ID NO: 119260 - DNA, 15 bp, Homo sapiens
tctagattacttata

SEQ ID NO: 119261 - DNA, 15 bp, Homo sapiens
ctctagattacttat

SEQ ID NO: 119262 - DNA, 15 bp, Homo sapiens
tctctagattactta

SEQ ID NO: 119263 - DNA, 15 bp, Homo sapiens
atctctagattactt

SEQ ID NO: 119264 - DNA, 15 bp, Homo sapiens
aatctctagattact

SEQ ID NO: 119265 - DNA, 15 bp, Homo sapiens
aaatctctagattac

SEQ ID NO: 119266 - DNA, 15 bp, Homo sapiens
taaatctctagatta

SEQ ID NO: 119267 - DNA, 15 bp, Homo sapiens
ttaaatctctagatt

SEQ ID NO: 119268 - DNA, 15 bp, Homo sapiens
tttaaatctctagat

SEQ ID NO: 119269 - DNA, 15 bp, Homo sapiens
ctttaaatctctaga

SEQ ID NO: 119270 - DNA, 15 bp, Homo sapiens
actttaaatctctag

SEQ ID NO: 119271 - DNA, 15 bp, Homo sapiens
tactttaaatctcta

SEQ ID NO: 119272 - DNA, 15 bp, Homo sapiens
atactttaaatctct

SEQ ID NO: 119273 - DNA, 15 bp, Homo sapiens
catactttaaatctc

SEQ ID NO: 119274 - DNA, 15 bp, Homo sapiens
acatactttaaatct

SEQ ID NO: 119275 - DNA, 15 bp, Homo sapiens
cacatactttaaatc

SEQ ID NO: 119276 - DNA, 15 bp, Homo sapiens
ccacatactttaaat

SEQ ID NO: 119277 - DNA, 15 bp, Homo sapiens
cccacatactttaaa

SEQ ID NO: 119278 - DNA, 15 bp, Homo sapiens
tcccacatactttaa

SEQ ID NO: 119279 - DNA, 15 bp, Homo sapiens
ctcccacatacttta

SEQ ID NO: 119280 - DNA, 15 bp, Homo sapiens
cctcccacatacttt

SEQ ID NO: 119281 - DNA, 15 bp, Homo sapiens
gcctcccacatactt

SEQ ID NO: 119282 - DNA, 15 bp, Homo sapiens
agcctcccacatact

SEQ ID NO: 119283 - DNA, 15 bp, Homo sapiens
cagcctcccacatac

SEQ ID NO: 119284 - DNA, 15 bp, Homo sapiens
acagcctcccacata

SEQ ID NO: 119285 - DNA, 15 bp, Homo sapiens
cacagcctcccacat

SEQ ID NO: 119286 - DNA, 15 bp, Homo sapiens
gcacagcctcccaca

SEQ ID NO: 119287 - DNA, 15 bp, Homo sapiens
agcacagcctcccac

SEQ ID NO: 119288 - DNA, 15 bp, Homo sapiens
aagcacagcctccca

SEQ ID NO: 119289 - DNA, 15 bp, Homo sapiens
taagcacagcctccc

SEQ ID NO: 119290 - DNA, 15 bp, Homo sapiens
ctaagcacagcctcc

SEQ ID NO: 119291 - DNA, 15 bp, Homo sapiens
cctaagcacagcctc

SEQ ID NO: 119292 - DNA, 15 bp, Homo sapiens
acctaagcacagcct

SEQ ID NO: 119293 - DNA, 15 bp, Homo sapiens
aacctaagcacagcc

SEQ ID NO: 119294 - DNA, 15 bp, Homo sapiens
taacctaagcacagc

SEQ ID NO: 119295 - DNA, 15 bp, Homo sapiens
ataacctaagcacag

SEQ ID NO: 119296 - DNA, 15 bp, Homo sapiens
tataacctaagcaca

SEQ ID NO: 119297 - DNA, 15 bp, Homo sapiens
atataacctaagcac

SEQ ID NO: 119298 - DNA, 15 bp, Homo sapiens
catataacctaagca

SEQ ID NO: 119299 - DNA, 15 bp, Homo sapiens
gcatataacctaagc

SEQ ID NO: 119300 - DNA, 15 bp, Homo sapiens
tgcatataacctaag

SEQ ID NO: 119301 - DNA, 15 bp, Homo sapiens
ttgcatataacctaa

SEQ ID NO: 119302 - DNA, 15 bp, Homo sapiens
tttgcatataaccta

SEQ ID NO: 119303 - DNA, 15 bp, Homo sapiens
atttgcatataacct

SEQ ID NO: 119304 - DNA, 15 bp, Homo sapiens
tatttgcatataacc

SEQ ID NO: 119305 - DNA, 15 bp, Homo sapiens
gtatttgcatataac

SEQ ID NO: 119306 - DNA, 15 bp, Homo sapiens
agtatttgcatataa

SEQ ID NO: 119307 - DNA, 15 bp, Homo sapiens
tagtatttgcatata

SEQ ID NO: 119308 - DNA, 15 bp, Homo sapiens
atagtatttgcatat

SEQ ID NO: 119309 - DNA, 15 bp, Homo sapiens
catagtatttgcata

SEQ ID NO: 119310 - DNA, 15 bp, Homo sapiens
gcatagtatttgcat

SEQ ID NO: 119311 - DNA, 15 bp, Homo sapiens
ggcatagtatttgca

SEQ ID NO: 119312 - DNA, 15 bp, Homo sapiens
tggcatagtatttgc

SEQ ID NO: 119313 - DNA, 15 bp, Homo sapiens
atggcatagtatttg

SEQ ID NO: 119314 - DNA, 15 bp, Homo sapiens
aatggcatagtattt

SEQ ID NO: 119315 - DNA, 15 bp, Homo sapiens
aaatggcatagtatt

SEQ ID NO: 119316 - DNA, 15 bp, Homo sapiens
aaaatggcatagtat

SEQ ID NO: 119317 - DNA, 15 bp, Homo sapiens
taaaatggcatagta

SEQ ID NO: 119318 - DNA, 15 bp, Homo sapiens
ataaaatggcatagt

SEQ ID NO: 119319 - DNA, 15 bp, Homo sapiens
tataaaatggcatag

SEQ ID NO: 119320 - DNA, 15 bp, Homo sapiens
atataaaatggcata

SEQ ID NO: 119321 - DNA, 15 bp, Homo sapiens
gatataaaatggcat

SEQ ID NO: 119322 - DNA, 15 bp, Homo sapiens
tgatataaaatggca

SEQ ID NO: 119323 - DNA, 15 bp, Homo sapiens
ttgatataaaatggc

SEQ ID NO: 119324 - DNA, 15 bp, Homo sapiens
cttgatataaaatgg

SEQ ID NO: 119325 - DNA, 15 bp, Homo sapiens
ccttgatataaaatg

SEQ ID NO: 119326 - DNA, 15 bp, Homo sapiens
tccttgatataaaat

SEQ ID NO: 119327 - DNA, 15 bp, Homo sapiens
gtccttgatataaaa

SEQ ID NO: 119328 - DNA, 15 bp, Homo sapiens
agtccttgatataaa

SEQ ID NO: 119329 - DNA, 15 bp, Homo sapiens
aagtccttgatataa

SEQ ID NO: 119330 - DNA, 15 bp, Homo sapiens
caagtccttgatata

SEQ ID NO: 119331 - DNA, 15 bp, Homo sapiens
tcaagtccttgatat

SEQ ID NO: 119332 - DNA, 15 bp, Homo sapiens
ttcaagtccttgata

SEQ ID NO: 119333 - DNA, 15 bp, Homo sapiens
gttcaagtccttgat

SEQ ID NO: 119334 - DNA, 15 bp, Homo sapiens
tgttcaagtccttga

SEQ ID NO: 119335 - DNA, 15 bp, Homo sapiens
atgttcaagtccttg

SEQ ID NO: 119336 - DNA, 15 bp, Homo sapiens
gatgttcaagtcctt

SEQ ID NO: 119337 - DNA, 15 bp, Homo sapiens
ggatgttcaagtcct

SEQ ID NO: 119338 - DNA, 15 bp, Homo sapiens
tggatgttcaagtcc

SEQ ID NO: 119339 - DNA, 15 bp, Homo sapiens
atggatgttcaagtc

SEQ ID NO: 119340 - DNA, 15 bp, Homo sapiens
catggatgttcaagt

SEQ ID NO: 119341 - DNA, 15 bp, Homo sapiens
ccatggatgttcaag

SEQ ID NO: 119342 - DNA, 15 bp, Homo sapiens
tccatggatgttcaa

SEQ ID NO: 119343 - DNA, 15 bp, Homo sapiens
atccatggatgttca

SEQ ID NO: 119344 - DNA, 15 bp, Homo sapiens
aatccatggatgttc

SEQ ID NO: 119345 - DNA, 15 bp, Homo sapiens
aaatccatggatgtt

SEQ ID NO: 119346 - DNA, 15 bp, Homo sapiens
aaaatccatggatgt

SEQ ID NO: 119347 - DNA, 15 bp, Homo sapiens
caaaatccatggatg

SEQ ID NO: 119348 - DNA, 15 bp, Homo sapiens
ccaaaatccatggat

SEQ ID NO: 119349 - DNA, 15 bp, Homo sapiens
accaaaatccatgga

SEQ ID NO: 119350 - DNA, 15 bp, Homo sapiens
taccaaaatccatgg

SEQ ID NO: 119351 - DNA, 15 bp, Homo sapiens
ataccaaaatccatg

SEQ ID NO: 119352 - DNA, 15 bp, Homo sapiens
gataccaaaatccat

SEQ ID NO: 119353 - DNA, 15 bp, Homo sapiens
agataccaaaatcca

SEQ ID NO: 119354 - DNA, 15 bp, Homo sapiens
cagataccaaaatcc

SEQ ID NO: 119355 - DNA, 15 bp, Homo sapiens
gcagataccaaaatc

SEQ ID NO: 119356 - DNA, 15 bp, Homo sapiens
tgcagataccaaaat

SEQ ID NO: 119357 - DNA, 15 bp, Homo sapiens
ctgcagataccaaaa

SEQ ID NO: 119358 - DNA, 15 bp, Homo sapiens
tctgcagataccaaa

SEQ ID NO: 119359 - DNA, 15 bp, Homo sapiens
ctctgcagataccaa

SEQ ID NO: 119360 - DNA, 15 bp, Homo sapiens
cctctgcagatacca

SEQ ID NO: 119361 - DNA, 15 bp, Homo sapiens
ccctctgcagatacc

SEQ ID NO: 119362 - DNA, 15 bp, Homo sapiens
accctctgcagatac

SEQ ID NO: 119363 - DNA, 15 bp, Homo sapiens
gaccctctgcagata

SEQ ID NO: 119364 - DNA, 15 bp, Homo sapiens
ggaccctctgcagat

SEQ ID NO: 119365 - DNA, 15 bp, Homo sapiens
aggaccctctgcaga

SEQ ID NO: 119366 - DNA, 15 bp, Homo sapiens
caggaccctctgcag

SEQ ID NO: 119367 - DNA, 15 bp, Homo sapiens
ccaggaccctctgca

SEQ ID NO: 119368 - DNA, 15 bp, Homo sapiens
tccaggaccctctgc

SEQ ID NO: 119369 - DNA, 15 bp, Homo sapiens
ttccaggaccctctg

SEQ ID NO: 119370 - DNA, 15 bp, Homo sapiens
attccaggaccctct

SEQ ID NO: 119371 - DNA, 15 bp, Homo sapiens
gattccaggaccctc

SEQ ID NO: 119372 - DNA, 15 bp, Homo sapiens
tgattccaggaccct

SEQ ID NO: 119373 - DNA, 15 bp, Homo sapiens
ttgattccaggaccc

SEQ ID NO: 119374 - DNA, 15 bp, Homo sapiens
attgattccaggacc

SEQ ID NO: 119375 - DNA, 15 bp, Homo sapiens
aattgattccaggac

SEQ ID NO: 119376 - DNA, 15 bp, Homo sapiens
aaattgattccagga

SEQ ID NO: 119377 - DNA, 15 bp, Homo sapiens
gaaattgattccagg

SEQ ID NO: 119378 - DNA, 15 bp, Homo sapiens
ggaaattgattccag

SEQ ID NO: 119379 - DNA, 15 bp, Homo sapiens
gggaaattgattcca

SEQ ID NO: 119380 - DNA, 15 bp, Homo sapiens
tgggaaattgattcc

SEQ ID NO: 119381 - DNA, 15 bp, Homo sapiens
atgggaaattgattc

SEQ ID NO: 119382 - DNA, 15 bp, Homo sapiens
catgggaaattgatt

SEQ ID NO: 119383 - DNA, 15 bp, Homo sapiens
ccatgggaaattgat

SEQ ID NO: 119384 - DNA, 15 bp, Homo sapiens
tccatgggaaattga

SEQ ID NO: 119385 - DNA, 15 bp, Homo sapiens
ctccatgggaaattg

SEQ ID NO: 119386 - DNA, 15 bp, Homo sapiens
tctccatgggaaatt

SEQ ID NO: 119387 - DNA, 15 bp, Homo sapiens
gtctccatgggaaat

SEQ ID NO: 119388 - DNA, 15 bp, Homo sapiens
agtctccatgggaaa

SEQ ID NO: 119389 - DNA, 15 bp, Homo sapiens
cagtctccatgggaa

SEQ ID NO: 119390 - DNA, 15 bp, Homo sapiens
tcagtctccatggga

SEQ ID NO: 119391 - DNA, 15 bp, Homo sapiens
ctcagtctccatggg

SEQ ID NO: 119392 - DNA, 15 bp, Homo sapiens
tctcagtctccatgg

SEQ ID NO: 119393 - DNA, 15 bp, Homo sapiens
ctctcagtctccatg

SEQ ID NO: 119394 - DNA, 15 bp, Homo sapiens
tctctcagtctccat

SEQ ID NO: 119395 - DNA, 15 bp, Homo sapiens
atctctcagtctcca

SEQ ID NO: 119396 - DNA, 15 bp, Homo sapiens
catctctcagtctcc

SEQ ID NO: 119397 - DNA, 15 bp, Homo sapiens
tcatctctcagtctc

SEQ ID NO: 119398 - DNA, 15 bp, Homo sapiens
gtcatctctcagtct

SEQ ID NO: 119399 - DNA, 15 bp, Homo sapiens
ggtcatctctcagtc

SEQ ID NO: 119400 - DNA, 15 bp, Homo sapiens
cggtcatctctcagt

SEQ ID NO: 119401 - DNA, 15 bp, Homo sapiens
acggtcatctctcag

SEQ ID NO: 119402 - DNA, 15 bp, Homo sapiens
tacggtcatctctca

SEQ ID NO: 119403 - DNA, 15 bp, Homo sapiens
gtacggtcatctctc

SEQ ID NO: 119404 - DNA, 15 bp, Homo sapiens
agtacggtcatctct

SEQ ID NO: 119405 - DNA, 15 bp, Homo sapiens
tagtacggtcatctc

SEQ ID NO: 119406 - DNA, 15 bp, Homo sapiens
gtagtacggtcatct

SEQ ID NO: 119407 - DNA, 15 bp, Homo sapiens
ggtagtacggtcatc

SEQ ID NO: 119408 - DNA, 15 bp, Homo sapiens
gggtagtacggtcat

SEQ ID NO: 119409 - DNA, 15 bp, Homo sapiens
tgggtagtacggtca

SEQ ID NO: 119410 - DNA, 15 bp, Homo sapiens
gtgggtagtacggtc

SEQ ID NO: 119411 - DNA, 15 bp, Homo sapiens
agtgggtagtacggt

SEQ ID NO: 119412 - DNA, 15 bp, Homo sapiens
aagtgggtagtacgg

SEQ ID NO: 119413 - DNA, 15 bp, Homo sapiens
gaagtgggtagtacg

SEQ ID NO: 119414 - DNA, 15 bp, Homo sapiens
cgaagtgggtagtac

SEQ ID NO: 119415 - DNA, 15 bp, Homo sapiens
gcgaagtgggtagta

SEQ ID NO: 119416 - DNA, 15 bp, Homo sapiens
tgcgaagtgggtagt

SEQ ID NO: 119417 - DNA, 15 bp, Homo sapiens
ttgcgaagtgggtag

SEQ ID NO: 119418 - DNA, 15 bp, Homo sapiens
cttgcgaagtgggta

SEQ ID NO: 119419 - DNA, 15 bp, Homo sapiens
gcttgcgaagtgggt

SEQ ID NO: 119420 - DNA, 15 bp, Homo sapiens
tgcttgcgaagtggg

SEQ ID NO: 119421 - DNA, 15 bp, Homo sapiens
ttgcttgcgaagtgg

SEQ ID NO: 119422 - DNA, 15 bp, Homo sapiens
attgcttgcgaagtg

SEQ ID NO: 119423 - DNA, 15 bp, Homo sapiens
cattgcttgcgaagt

SEQ ID NO: 119424 - DNA, 15 bp, Homo sapiens
acattgcttgcgaag

SEQ ID NO: 119425 - DNA, 15 bp, Homo sapiens
gacattgcttgcgaa

SEQ ID NO: 119426 - DNA, 15 bp, Homo sapiens
agacattgcttgcga

SEQ ID NO: 119427 - DNA, 15 bp, Homo sapiens
aagacattgcttgcg

SEQ ID NO: 119428 - DNA, 15 bp, Homo sapiens
gaagacattgcttgc

SEQ ID NO: 119429 - DNA, 15 bp, Homo sapiens
agaagacattgcttg

SEQ ID NO: 119430 - DNA, 15 bp, Homo sapiens
aagaagacattgctt

SEQ ID NO: 119431 - DNA, 15 bp, Homo sapiens
aaagaagacattgct

SEQ ID NO: 119432 - DNA, 15 bp, Homo sapiens
taaagaagacattgc

SEQ ID NO: 119433 - DNA, 15 bp, Homo sapiens
ttaaagaagacattg

SEQ ID NO: 119434 - DNA, 15 bp, Homo sapiens
attaaagaagacatt

SEQ ID NO: 119435 - DNA, 15 bp, Homo sapiens
cattaaagaagacat

SEQ ID NO: 119436 - DNA, 15 bp, Homo sapiens
acattaaagaagaca

SEQ ID NO: 119437 - DNA, 15 bp, Homo sapiens
tacattaaagaagac

SEQ ID NO: 119438 - DNA, 15 bp, Homo sapiens
gtacattaaagaaga

SEQ ID NO: 119439 - DNA, 15 bp, Homo sapiens
agtacattaaagaag

SEQ ID NO: 119440 - DNA, 15 bp, Homo sapiens
cagtacattaaagaa

SEQ ID NO: 119441 - DNA, 15 bp, Homo sapiens
tcagtacattaaaga

SEQ ID NO: 119442 - DNA, 15 bp, Homo sapiens
ttcagtacattaaag

SEQ ID NO: 119443 - DNA, 15 bp, Homo sapiens
gttcagtacattaaa

SEQ ID NO: 119444 - DNA, 15 bp, Homo sapiens
ggttcagtacattaa

SEQ ID NO: 119445 - DNA, 15 bp, Homo sapiens
tggttcagtacatta

SEQ ID NO: 119446 - DNA, 15 bp, Homo sapiens
atggttcagtacatt

SEQ ID NO: 119447 - DNA, 15 bp, Homo sapiens
gatggttcagtacat

SEQ ID NO: 119448 - DNA, 15 bp, Homo sapiens
ggatggttcagtaca

SEQ ID NO: 119449 - DNA, 15 bp, Homo sapiens
gggatggttcagtac

SEQ ID NO: 119450 - DNA, 15 bp, Homo sapiens
tgggatggttcagta

SEQ ID NO: 119451 - DNA, 15 bp, Homo sapiens
atgggatggttcagt

SEQ ID NO: 119452 - DNA, 15 bp, Homo sapiens
aatgggatggttcag

SEQ ID NO: 119453 - DNA, 15 bp, Homo sapiens
caatgggatggttca

SEQ ID NO: 119454 - DNA, 15 bp, Homo sapiens
acaatgggatggttc

SEQ ID NO: 119455 - DNA, 15 bp, Homo sapiens
aacaatgggatggtt

SEQ ID NO: 119456 - DNA, 15 bp, Homo sapiens
gaacaatgggatggt

SEQ ID NO: 119457 - DNA, 15 bp, Homo sapiens
tgaacaatgggatgg

SEQ ID NO: 119458 - DNA, 15 bp, Homo sapiens
ctgaacaatgggatg

SEQ ID NO: 119459 - DNA, 15 bp, Homo sapiens
tctgaacaatgggat

SEQ ID NO: 119460 - DNA, 15 bp, Homo sapiens
ctctgaacaatggga

SEQ ID NO: 119461 - DNA, 15 bp, Homo sapiens
cctctgaacaatggg

SEQ ID NO: 119462 - DNA, 15 bp, Homo sapiens
tcctctgaacaatgg

SEQ ID NO: 119463 - DNA, 15 bp, Homo sapiens
ctcctctgaacaatg

SEQ ID NO: 119464 - DNA, 15 bp, Homo sapiens
tctcctctgaacaat

SEQ ID NO: 119465 - DNA, 15 bp, Homo sapiens
ttctcctctgaacaa

SEQ ID NO: 119466 - DNA, 15 bp, Homo sapiens
tttctcctctgaaca

SEQ ID NO: 119467 - DNA, 15 bp, Homo sapiens
gtttctcctctgaac

SEQ ID NO: 119468 - DNA, 15 bp, Homo sapiens
agtttctcctctgaa

SEQ ID NO: 119469 - DNA, 15 bp, Homo sapiens
cagtttctcctctga

SEQ ID NO: 119470 - DNA, 15 bp, Homo sapiens
tcagtttctcctctg

SEQ ID NO: 119471 - DNA, 15 bp, Homo sapiens
ttcagtttctcctct

SEQ ID NO: 119472 - DNA, 15 bp, Homo sapiens
cttcagtttctcctc

SEQ ID NO: 119473 - DNA, 15 bp, Homo sapiens
gcttcagtttctcct

SEQ ID NO: 119474 - DNA, 15 bp, Homo sapiens
agcttcagtttctcc

SEQ ID NO: 119475 - DNA, 15 bp, Homo sapiens
gagcttcagtttctc

SEQ ID NO: 119476 - DNA, 15 bp, Homo sapiens
tgagcttcagtttct

SEQ ID NO: 119477 - DNA, 15 bp, Homo sapiens
ctgagcttcagtttc

SEQ ID NO: 119478 - DNA, 15 bp, Homo sapiens
cctgagcttcagttt

SEQ ID NO: 119479 - DNA, 15 bp, Homo sapiens
ccctgagcttcagtt

SEQ ID NO: 119480 - DNA, 15 bp, Homo sapiens
gccctgagcttcagt

SEQ ID NO: 119481 - DNA, 15 bp, Homo sapiens
agccctgagcttcag

SEQ ID NO: 119482 - DNA, 15 bp, Homo sapiens
aagccctgagcttca

SEQ ID NO: 119483 - DNA, 15 bp, Homo sapiens
aaagccctgagcttc

SEQ ID NO: 119484 - DNA, 15 bp, Homo sapiens
caaagccctgagctt

SEQ ID NO: 119485 - DNA, 15 bp, Homo sapiens
tcaaagccctgagct

SEQ ID NO: 119486 - DNA, 15 bp, Homo sapiens
ttcaaagccctgagc

SEQ ID NO: 119487 - DNA, 15 bp, Homo sapiens
attcaaagccctgag

SEQ ID NO: 119488 - DNA, 15 bp, Homo sapiens
tattcaaagccctga

SEQ ID NO: 119489 - DNA, 15 bp, Homo sapiens
ttattcaaagccctg

SEQ ID NO: 119490 - DNA, 15 bp, Homo sapiens
gttattcaaagccct

SEQ ID NO: 119491 - DNA, 15 bp, Homo sapiens
agttattcaaagccc

SEQ ID NO: 119492 - DNA, 15 bp, Homo sapiens
tagttattcaaagcc

SEQ ID NO: 119493 - DNA, 15 bp, Homo sapiens
ctagttattcaaagc

SEQ ID NO: 119494 - DNA, 15 bp, Homo sapiens
tctagttattcaaag

SEQ ID NO: 119495 - DNA, 15 bp, Homo sapiens
gtctagttattcaaa

SEQ ID NO: 119496 - DNA, 15 bp, Homo sapiens
ggtctagttattcaa

SEQ ID NO: 119497 - DNA, 15 bp, Homo sapiens
tggtctagttattca

SEQ ID NO: 119498 - DNA, 15 bp, Homo sapiens
ttggtctagttattc

SEQ ID NO: 119499 - DNA, 15 bp, Homo sapiens
cttggtctagttatt

SEQ ID NO: 119500 - DNA, 15 bp, Homo sapiens
ccttggtctagttat

SEQ ID NO: 119501 - DNA, 15 bp, Homo sapiens
tccttggtctagtta

SEQ ID NO: 119502 - DNA, 15 bp, Homo sapiens
ctccttggtctagtt

SEQ ID NO: 119503 - DNA, 15 bp, Homo sapiens
cctccttggtctagt

SEQ ID NO: 119504 - DNA, 15 bp, Homo sapiens
gcctccttggtctag

SEQ ID NO: 119505 - DNA, 15 bp, Homo sapiens
tgcctccttggtcta

SEQ ID NO: 119506 - DNA, 15 bp, Homo sapiens
gtgcctccttggtct

SEQ ID NO: 119507 - DNA, 15 bp, Homo sapiens
tgtgcctccttggtc

SEQ ID NO: 119508 - DNA, 15 bp, Homo sapiens
ctgtgcctccttggt

SEQ ID NO: 119509 - DNA, 15 bp, Homo sapiens
gctgtgcctccttgg

SEQ ID NO: 119510 - DNA, 15 bp, Homo sapiens
tgctgtgcctccttg

SEQ ID NO: 119511 - DNA, 15 bp, Homo sapiens
atgctgtgcctcctt

SEQ ID NO: 119512 - DNA, 15 bp, Homo sapiens
catgctgtgcctcct

SEQ ID NO: 119513 - DNA, 15 bp, Homo sapiens
ccatgctgtgcctcc

SEQ ID NO: 119514 - DNA, 15 bp, Homo sapiens
cccatgctgtgcctc

SEQ ID NO: 119515 - DNA, 15 bp, Homo sapiens
tcccatgctgtgcct

SEQ ID NO: 119516 - DNA, 15 bp, Homo sapiens
ctcccatgctgtgcc

SEQ ID NO: 119517 - DNA, 15 bp, Homo sapiens
actcccatgctgtgc

SEQ ID NO: 119518 - DNA, 15 bp, Homo sapiens
cactcccatgctgtg

SEQ ID NO: 119519 - DNA, 15 bp, Homo sapiens
ccactcccatgctgt

SEQ ID NO: 119520 - DNA, 15 bp, Homo sapiens
cccactcccatgctg

SEQ ID NO: 119521 - DNA, 15 bp, Homo sapiens
tcccactcccatgct

SEQ ID NO: 119522 - DNA, 15 bp, Homo sapiens
gtcccactcccatgc

SEQ ID NO: 119523 - DNA, 15 bp, Homo sapiens
tgtcccactcccatg

SEQ ID NO: 119524 - DNA, 15 bp, Homo sapiens
atgtcccactcccat

SEQ ID NO: 119525 - DNA, 15 bp, Homo sapiens
catgtcccactccca

SEQ ID NO: 119526 - DNA, 15 bp, Homo sapiens
tcatgtcccactccc

SEQ ID NO: 119527 - DNA, 15 bp, Homo sapiens
ttcatgtcccactcc

SEQ ID NO: 119528 - DNA, 15 bp, Homo sapiens
cttcatgtcccactc

SEQ ID NO: 119529 - DNA, 15 bp, Homo sapiens
gcttcatgtcccact

SEQ ID NO: 119530 - DNA, 15 bp, Homo sapiens
tgcttcatgtcccac

SEQ ID NO: 119531 - DNA, 15 bp, Homo sapiens
gtgcttcatgtccca

SEQ ID NO: 119532 - DNA, 15 bp, Homo sapiens
agtgcttcatgtccc

SEQ ID NO: 119533 - DNA, 15 bp, Homo sapiens
gagtgcttcatgtcc

SEQ ID NO: 119534 - DNA, 15 bp, Homo sapiens
agagtgcttcatgtc

SEQ ID NO: 119535 - DNA, 15 bp, Homo sapiens
tagagtgcttcatgt

SEQ ID NO: 119536 - DNA, 15 bp, Homo sapiens
gtagagtgcttcatg

SEQ ID NO: 119537 - DNA, 15 bp, Homo sapiens
tgtagagtgcttcat

SEQ ID NO: 119538 - DNA, 15 bp, Homo sapiens
ttgtagagtgcttca

SEQ ID NO: 119539 - DNA, 15 bp, Homo sapiens
attgtagagtgcttc

SEQ ID NO: 119540 - DNA, 15 bp, Homo sapiens
aattgtagagtgctt

SEQ ID NO: 119541 - DNA, 15 bp, Homo sapiens
taattgtagagtgct

SEQ ID NO: 119542 - DNA, 15 bp, Homo sapiens
ttaattgtagagtgc

SEQ ID NO: 119543 - DNA, 15 bp, Homo sapiens
gttaattgtagagtg

SEQ ID NO: 119544 - DNA, 15 bp, Homo sapiens
ggttaattgtagagt

SEQ ID NO: 119545 - DNA, 15 bp, Homo sapiens
gggttaattgtagag

SEQ ID NO: 119546 - DNA, 15 bp, Homo sapiens
agggttaattgtaga

SEQ ID NO: 119547 - DNA, 15 bp, Homo sapiens
aagggttaattgtag

SEQ ID NO: 119548 - DNA, 15 bp, Homo sapiens
aaagggttaattgta

SEQ ID NO: 119549 - DNA, 15 bp, Homo sapiens
gaaagggttaattgt

SEQ ID NO: 119550 - DNA, 15 bp, Homo sapiens
tgaaagggttaattg

SEQ ID NO: 119551 - DNA, 15 bp, Homo sapiens
ctgaaagggttaatt

SEQ ID NO: 119552 - DNA, 15 bp, Homo sapiens
cctgaaagggttaat

SEQ ID NO: 119553 - DNA, 15 bp, Homo sapiens
tcctgaaagggttaa

SEQ ID NO: 119554 - DNA, 15 bp, Homo sapiens
gtcctgaaagggtta

SEQ ID NO: 119555 - DNA, 15 bp, Homo sapiens
tgtcctgaaagggtt

SEQ ID NO: 119556 - DNA, 15 bp, Homo sapiens
ttgtcctgaaagggt

SEQ ID NO: 119557 - DNA, 15 bp, Homo sapiens
cttgtcctgaaaggg

SEQ ID NO: 119558 - DNA, 15 bp, Homo sapiens
ccttgtcctgaaagg

SEQ ID NO: 119559 - DNA, 15 bp, Homo sapiens
gccttgtcctgaaag

SEQ ID NO: 119560 - DNA, 15 bp, Homo sapiens
ggccttgtcctgaaa

SEQ ID NO: 119561 - DNA, 15 bp, Homo sapiens
gggccttgtcctgaa

SEQ ID NO: 119562 - DNA, 15 bp, Homo sapiens
agggccttgtcctga

SEQ ID NO: 119563 - DNA, 15 bp, Homo sapiens
cagggccttgtcctg

SEQ ID NO: 119564 - DNA, 15 bp, Homo sapiens
acagggccttgtcct

SEQ ID NO: 119565 - DNA, 15 bp, Homo sapiens
gacagggccttgtcc

SEQ ID NO: 119566 - DNA, 15 bp, Homo sapiens
agacagggccttgtc

SEQ ID NO: 119567 - DNA, 15 bp, Homo sapiens
gagacagggccttgt

SEQ ID NO: 119568 - DNA, 15 bp, Homo sapiens
ggagacagggccttg

SEQ ID NO: 119569 - DNA, 15 bp, Homo sapiens
gggagacagggcctt

SEQ ID NO: 119570 - DNA, 15 bp, Homo sapiens
tgggagacagggcct

SEQ ID NO: 119571 - DNA, 15 bp, Homo sapiens
gtgggagacagggcc

SEQ ID NO: 119572 - DNA, 15 bp, Homo sapiens
tgtgggagacagggc

SEQ ID NO: 119573 - DNA, 15 bp, Homo sapiens
gtgtgggagacaggg

SEQ ID NO: 119574 - DNA, 15 bp, Homo sapiens
ggtgtgggagacagg

SEQ ID NO: 119575 - DNA, 15 bp, Homo sapiens
gggtgtgggagacag

SEQ ID NO: 119576 - DNA, 15 bp, Homo sapiens
tgggtgtgggagaca

SEQ ID NO: 119577 - DNA, 15 bp, Homo sapiens
atgggtgtgggagac

SEQ ID NO: 119578 - DNA, 15 bp, Homo sapiens
gatgggtgtgggaga

SEQ ID NO: 119579 - DNA, 15 bp, Homo sapiens
agatgggtgtgggag

SEQ ID NO: 119580 - DNA, 15 bp, Homo sapiens
cagatgggtgtggga

SEQ ID NO: 119581 - DNA, 15 bp, Homo sapiens
gcagatgggtgtggg

SEQ ID NO: 119582 - DNA, 15 bp, Homo sapiens
ggcagatgggtgtgg

SEQ ID NO: 119583 - DNA, 15 bp, Homo sapiens
gggcagatgggtgtg

SEQ ID NO: 119584 - DNA, 15 bp, Homo sapiens
tgggcagatgggtgt

SEQ ID NO: 119585 - DNA, 15 bp, Homo sapiens
ttgggcagatgggtg

SEQ ID NO: 119586 - DNA, 15 bp, Homo sapiens
tttgggcagatgggt

SEQ ID NO: 119587 - DNA, 15 bp, Homo sapiens
ctttgggcagatggg

SEQ ID NO: 119588 - DNA, 15 bp, Homo sapiens
cctttgggcagatgg

SEQ ID NO: 119589 - DNA, 15 bp, Homo sapiens
gcctttgggcagatg

SEQ ID NO: 119590 - DNA, 15 bp, Homo sapiens
agcctttgggcagat

SEQ ID NO: 119591 - DNA, 15 bp, Homo sapiens
gagcctttgggcaga

SEQ ID NO: 119592 - DNA, 15 bp, Homo sapiens
agagcctttgggcag

SEQ ID NO: 119593 - DNA, 15 bp, Homo sapiens
gagagcctttgggca

SEQ ID NO: 119594 - DNA, 15 bp, Homo sapiens
ggagagcctttgggc

SEQ ID NO: 119595 - DNA, 15 bp, Homo sapiens
tggagagcctttggg

SEQ ID NO: 119596 - DNA, 15 bp, Homo sapiens
ctggagagcctttgg

SEQ ID NO: 119597 - DNA, 15 bp, Homo sapiens
cctggagagcctttg

SEQ ID NO: 119598 - DNA, 15 bp, Homo sapiens
ccctggagagccttt

SEQ ID NO: 119599 - DNA, 15 bp, Homo sapiens
gccctggagagcctt

SEQ ID NO: 119600 - DNA, 15 bp, Homo sapiens
ggccctggagagcct

SEQ ID NO: 119601 - DNA, 15 bp, Homo sapiens
gggccctggagagcc

SEQ ID NO: 119602 - DNA, 15 bp, Homo sapiens
ggggccctggagagc

SEQ ID NO: 119603 - DNA, 15 bp, Homo sapiens
gggggccctggagag

SEQ ID NO: 119604 - DNA, 15 bp, Homo sapiens
agggggccctggaga

SEQ ID NO: 119605 - DNA, 15 bp, Homo sapiens
gagggggccctggag

SEQ ID NO: 119606 - DNA, 15 bp, Homo sapiens
ggagggggccctgga

SEQ ID NO: 119607 - DNA, 15 bp, Homo sapiens
aggagggggccctgg

SEQ ID NO: 119608 - DNA, 15 bp, Homo sapiens
gaggagggggccctg

SEQ ID NO: 119609 - DNA, 15 bp, Homo sapiens
agaggagggggccct

SEQ ID NO: 119610 - DNA, 15 bp, Homo sapiens
aagaggagggggccc

SEQ ID NO: 119611 - DNA, 15 bp, Homo sapiens
caagaggagggggcc

SEQ ID NO: 119612 - DNA, 15 bp, Homo sapiens
ccaagaggagggggc

SEQ ID NO: 119613 - DNA, 15 bp, Homo sapiens
cccaagaggaggggg

SEQ ID NO: 119614 - DNA, 15 bp, Homo sapiens
acccaagaggagggg

SEQ ID NO: 119615 - DNA, 15 bp, Homo sapiens
cacccaagaggaggg

SEQ ID NO: 119616 - DNA, 15 bp, Homo sapiens
acacccaagaggagg

SEQ ID NO: 119617 - DNA, 15 bp, Homo sapiens
tacacccaagaggag

SEQ ID NO: 119618 - DNA, 15 bp, Homo sapiens
gtacacccaagagga

SEQ ID NO: 119619 - DNA, 15 bp, Homo sapiens
ggtacacccaagagg

SEQ ID NO: 119620 - DNA, 15 bp, Homo sapiens
aggtacacccaagag

SEQ ID NO: 119621 - DNA, 15 bp, Homo sapiens
aaggtacacccaaga

SEQ ID NO: 119622 - DNA, 15 bp, Homo sapiens
caaggtacacccaag

SEQ ID NO: 119623 - DNA, 15 bp, Homo sapiens
tcaaggtacacccaa

SEQ ID NO: 119624 - DNA, 15 bp, Homo sapiens
gtcaaggtacaccca

SEQ ID NO: 119625 - DNA, 15 bp, Homo sapiens
tgtcaaggtacaccc

SEQ ID NO: 119626 - DNA, 15 bp, Homo sapiens
ttgtcaaggtacacc

SEQ ID NO: 119627 - DNA, 15 bp, Homo sapiens
cttgtcaaggtacac

SEQ ID NO: 119628 - DNA, 15 bp, Homo sapiens
tcttgtcaaggtaca

SEQ ID NO: 119629 - DNA, 15 bp, Homo sapiens
ctcttgtcaaggtac

SEQ ID NO: 119630 - DNA, 15 bp, Homo sapiens
tctcttgtcaaggta

SEQ ID NO: 119631 - DNA, 15 bp, Homo sapiens
gtctcttgtcaaggt

SEQ ID NO: 119632 - DNA, 15 bp, Homo sapiens
ggtctcttgtcaagg

SEQ ID NO: 119633 - DNA, 15 bp, Homo sapiens
aggtctcttgtcaag

SEQ ID NO: 119634 - DNA, 15 bp, Homo sapiens
taggtctcttgtcaa

SEQ ID NO: 119635 - DNA, 15 bp, Homo sapiens
ctaggtctcttgtca

SEQ ID NO: 119636 - DNA, 15 bp, Homo sapiens
tctaggtctcttgtc

SEQ ID NO: 119637 - DNA, 15 bp, Homo sapiens
atctaggtctcttgt

SEQ ID NO: 119638 - DNA, 15 bp, Homo sapiens
aatctaggtctcttg

SEQ ID NO: 119639 - DNA, 15 bp, Homo sapiens
aaatctaggtctctt

SEQ ID NO: 119640 - DNA, 15 bp, Homo sapiens
aaaatctaggtctct

SEQ ID NO: 119641 - DNA, 15 bp, Homo sapiens
taaaatctaggtctc

SEQ ID NO: 119642 - DNA, 15 bp, Homo sapiens
ctaaaatctaggtct

SEQ ID NO: 119643 - DNA, 15 bp, Homo sapiens
gctaaaatctaggtc

SEQ ID NO: 119644 - DNA, 15 bp, Homo sapiens
agctaaaatctaggt

SEQ ID NO: 119645 - DNA, 15 bp, Homo sapiens
gagctaaaatctagg

SEQ ID NO: 119646 - DNA, 15 bp, Homo sapiens
tgagctaaaatctag

SEQ ID NO: 119647 - DNA, 15 bp, Homo sapiens
gtgagctaaaatcta

SEQ ID NO: 119648 - DNA, 15 bp, Homo sapiens
agtgagctaaaatct

SEQ ID NO: 119649 - DNA, 15 bp, Homo sapiens
tagtgagctaaaatc

SEQ ID NO: 119650 - DNA, 15 bp, Homo sapiens
atagtgagctaaaat

SEQ ID NO: 119651 - DNA, 15 bp, Homo sapiens
catagtgagctaaaa

SEQ ID NO: 119652 - DNA, 15 bp, Homo sapiens
gcatagtgagctaaa

SEQ ID NO: 119653 - DNA, 15 bp, Homo sapiens
agcatagtgagctaa

SEQ ID NO: 119654 - DNA, 15 bp, Homo sapiens
cagcatagtgagcta

SEQ ID NO: 119655 - DNA, 15 bp, Homo sapiens
acagcatagtgagct

SEQ ID NO: 119656 - DNA, 15 bp, Homo sapiens
gacagcatagtgagc

SEQ ID NO: 119657 - DNA, 15 bp, Homo sapiens
agacagcatagtgag

SEQ ID NO: 119658 - DNA, 15 bp, Homo sapiens
cagacagcatagtga

SEQ ID NO: 119659 - DNA, 15 bp, Homo sapiens
gcagacagcatagtg

SEQ ID NO: 119660 - DNA, 15 bp, Homo sapiens
tgcagacagcatagt

SEQ ID NO: 119661 - DNA, 15 bp, Homo sapiens
ctgcagacagcatag

SEQ ID NO: 119662 - DNA, 15 bp, Homo sapiens
actgcagacagcata

SEQ ID NO: 119663 - DNA, 15 bp, Homo sapiens
gactgcagacagcat

SEQ ID NO: 119664 - DNA, 15 bp, Homo sapiens
ggactgcagacagca

SEQ ID NO: 119665 - DNA, 15 bp, Homo sapiens
aggactgcagacagc

SEQ ID NO: 119666 - DNA, 15 bp, Homo sapiens
caggactgcagacag

SEQ ID NO: 119667 - DNA, 15 bp, Homo sapiens
ccaggactgcagaca

SEQ ID NO: 119668 - DNA, 15 bp, Homo sapiens
tccaggactgcagac

SEQ ID NO: 119669 - DNA, 15 bp, Homo sapiens
atccaggactgcaga

SEQ ID NO: 119670 - DNA, 15 bp, Homo sapiens
catccaggactgcag

SEQ ID NO: 119671 - DNA, 15 bp, Homo sapiens
ccatccaggactgca

SEQ ID NO: 119672 - DNA, 15 bp, Homo sapiens
accatccaggactgc

SEQ ID NO: 119673 - DNA, 15 bp, Homo sapiens
gaccatccaggactg

SEQ ID NO: 119674 - DNA, 15 bp, Homo sapiens
ggaccatccaggact

SEQ ID NO: 119675 - DNA, 15 bp, Homo sapiens
gggaccatccaggac

SEQ ID NO: 119676 - DNA, 15 bp, Homo sapiens
tgggaccatccagga

SEQ ID NO: 119677 - DNA, 15 bp, Homo sapiens
gtgggaccatccagg

SEQ ID NO: 119678 - DNA, 15 bp, Homo sapiens
agtgggaccatccag

SEQ ID NO: 119679 - DNA, 15 bp, Homo sapiens
gagtgggaccatcca

SEQ ID NO: 119680 - DNA, 15 bp, Homo sapiens
ggagtgggaccatcc

SEQ ID NO: 119681 - DNA, 15 bp, Homo sapiens
tggagtgggaccatc

SEQ ID NO: 119682 - DNA, 15 bp, Homo sapiens
ctggagtgggaccat

SEQ ID NO: 119683 - DNA, 15 bp, Homo sapiens
actggagtgggacca

SEQ ID NO: 119684 - DNA, 15 bp, Homo sapiens
cactggagtgggacc

SEQ ID NO: 119685 - DNA, 15 bp, Homo sapiens
acactggagtgggac

SEQ ID NO: 119686 - DNA, 15 bp, Homo sapiens
gacactggagtggga

SEQ ID NO: 119687 - DNA, 15 bp, Homo sapiens
agacactggagtggg

SEQ ID NO: 119688 - DNA, 15 bp, Homo sapiens
cagacactggagtgg

SEQ ID NO: 119689 - DNA, 15 bp, Homo sapiens
ccagacactggagtg

SEQ ID NO: 119690 - DNA, 15 bp, Homo sapiens
accagacactggagt

SEQ ID NO: 119691 - DNA, 15 bp, Homo sapiens
caccagacactggag

SEQ ID NO: 119692 - DNA, 15 bp, Homo sapiens
gcaccagacactgga

SEQ ID NO: 119693 - DNA, 15 bp, Homo sapiens
agcaccagacactgg

SEQ ID NO: 119694 - DNA, 15 bp, Homo sapiens
gagcaccagacactg

SEQ ID NO: 119695 - DNA, 15 bp, Homo sapiens
agagcaccagacact

SEQ ID NO: 119696 - DNA, 15 bp, Homo sapiens
cagagcaccagacac

SEQ ID NO: 119697 - DNA, 15 bp, Homo sapiens
ggaggcagaggttac

SEQ ID NO: 119698 - DNA, 15 bp, Homo sapiens
ttgaacccgggaggc

SEQ ID NO: 119699 - DNA, 15 bp, Homo sapiens
acaaaaattagccag

SEQ ID NO: 119700 - DNA, 15 bp, Homo sapiens
tacaaaaattagcca

SEQ ID NO: 119701 - DNA, 15 bp, Homo sapiens
atacaaaaattagcc

SEQ ID NO: 119702 - DNA, 15 bp, Homo sapiens
aacatgatgaaaccc

SEQ ID NO: 119703 - DNA, 15 bp, Homo sapiens
caacatgatgaaacc

SEQ ID NO: 119704 - DNA, 15 bp, Homo sapiens
ccaacatgatgaaac

SEQ ID NO: 119705 - DNA, 15 bp, Homo sapiens
gccaacatgatgaaa

SEQ ID NO: 119706 - DNA, 15 bp, Homo sapiens
ggccaacatgatgaa

SEQ ID NO: 119707 - DNA, 15 bp, Homo sapiens
tggccaacatgatga

SEQ ID NO: 119708 - DNA, 15 bp, Homo sapiens
ctggccaacatgatg

SEQ ID NO: 119709 - DNA, 15 bp, Homo sapiens
cctggccaacatgat

SEQ ID NO: 119710 - DNA, 15 bp, Homo sapiens
aggagttcgaaacca

SEQ ID NO: 119711 - DNA, 15 bp, Homo sapiens
caggagttcgaaacc

SEQ ID NO: 119712 - DNA, 15 bp, Homo sapiens
tcaggagttcgaaac

SEQ ID NO: 119713 - DNA, 15 bp, Homo sapiens
gtcaggagttcgaaa

SEQ ID NO: 119714 - DNA, 15 bp, Homo sapiens
ggtcaggagttcgaa

SEQ ID NO: 119715 - DNA, 15 bp, Homo sapiens
aaaaagaaaaggaaa

SEQ ID NO: 119716 - DNA, 15 bp, Homo sapiens
agcctgggcgacaga

SEQ ID NO: 119717 - DNA, 15 bp, Homo sapiens
cagcctgggcgacag

SEQ ID NO: 119718 - DNA, 15 bp, Homo sapiens
ccagcctgggcgaca

SEQ ID NO: 119719 - DNA, 15 bp, Homo sapiens
tccagcctgggcgac

SEQ ID NO: 119720 - DNA, 15 bp, Homo sapiens
ctccagcctgggcga

SEQ ID NO: 119721 - DNA, 15 bp, Homo sapiens
actccagcctgggcg

SEQ ID NO: 119722 - DNA, 15 bp, Homo sapiens
cggaggttgcagtga

SEQ ID NO: 119723 - DNA, 15 bp, Homo sapiens
gcggaggttgcagtg

SEQ ID NO: 119724 - DNA, 15 bp, Homo sapiens
ggcggaggttgcagt

SEQ ID NO: 119725 - DNA, 15 bp, Homo sapiens
aggcggaggttgcag

SEQ ID NO: 119726 - DNA, 15 bp, Homo sapiens
cgggaggcggaggtt

SEQ ID NO: 119727 - DNA, 15 bp, Homo sapiens
ccgggaggcggaggt

SEQ ID NO: 119728 - DNA, 15 bp, Homo sapiens
cccgggaggcggagg

SEQ ID NO: 119729 - DNA, 15 bp, Homo sapiens
acccgggaggcggag

SEQ ID NO: 119730 - DNA, 15 bp, Homo sapiens
aacccgggaggcgga

SEQ ID NO: 119731 - DNA, 15 bp, Homo sapiens
gaacccgggaggcgg

SEQ ID NO: 119732 - DNA, 15 bp, Homo sapiens
tgaacccgggaggcg

SEQ ID NO: 119733 - DNA, 15 bp, Homo sapiens
gcgcctgtaatccca

SEQ ID NO: 119734 - DNA, 15 bp, Homo sapiens
gaccagcctggccaa

SEQ ID NO: 119735 - DNA, 15 bp, Homo sapiens
agaccagcctggcca

SEQ ID NO: 119736 - DNA, 15 bp, Homo sapiens
gagaccagcctggcc

SEQ ID NO: 119737 - DNA, 15 bp, Homo sapiens
aaaaaaaaaacaaaa

SEQ ID NO: 119738 - DNA, 15 bp, Homo sapiens
aaaaaaaaaaacaaa

SEQ ID NO: 119739 - DNA, 15 bp, Homo sapiens
aaaacaaaaaaaaaa

SEQ ID NO: 119740 - DNA, 15 bp, Homo sapiens
aaaaacaaaaaaaaa

SEQ ID NO: 119741 - DNA, 15 bp, Homo sapiens
aaaaaacaaaaaaaa

SEQ ID NO: 119742 - DNA, 15 bp, Homo sapiens
aaaaaaacaaaaaaa

SEQ ID NO: 119743 - DNA, 15 bp, Homo sapiens
atctcaaaaaaaaaa

SEQ ID NO: 119744 - DNA, 15 bp, Homo sapiens
catctcaaaaaaaaa

SEQ ID NO: 119745 - DNA, 15 bp, Homo sapiens
ggttgcagtgagcca

SEQ ID NO: 119746 - DNA, 15 bp, Homo sapiens
caggaggtggaggtt

SEQ ID NO: 119747 - DNA, 15 bp, Homo sapiens
ccaggaggtggaggt

SEQ ID NO: 119748 - DNA, 15 bp, Homo sapiens
cccaggaggtggagg

SEQ ID NO: 119749 - DNA, 15 bp, Homo sapiens
acccaggaggtggag

SEQ ID NO: 119750 - DNA, 15 bp, Homo sapiens
cttgaacccaggagg

SEQ ID NO: 119751 - DNA, 15 bp, Homo sapiens
gaatctcttgaaccc

SEQ ID NO: 119752 - DNA, 15 bp, Homo sapiens
agaatctcttgaacc

SEQ ID NO: 119753 - DNA, 15 bp, Homo sapiens
gagaatctcttgaac

SEQ ID NO: 119754 - DNA, 15 bp, Homo sapiens
ggagaatctcttgaa

SEQ ID NO: 119755 - DNA, 15 bp, Homo sapiens
aggagaatctcttga

SEQ ID NO: 119756 - DNA, 15 bp, Homo sapiens
caggagaatctcttg

SEQ ID NO: 119757 - DNA, 15 bp, Homo sapiens
gcaggagaatctctt

SEQ ID NO: 119758 - DNA, 15 bp, Homo sapiens
ggcaggagaatctct

SEQ ID NO: 119759 - DNA, 15 bp, Homo sapiens
aggcaggagaatctc

SEQ ID NO: 119760 - DNA, 15 bp, Homo sapiens
gaggcaggagaatct

SEQ ID NO: 119761 - DNA, 15 bp, Homo sapiens
tggtggcgtgcgcct

SEQ ID NO: 119762 - DNA, 15 bp, Homo sapiens
atggtggcgtgcgcc

SEQ ID NO: 119763 - DNA, 15 bp, Homo sapiens
catggtggcgtgcgc

SEQ ID NO: 119764 - DNA, 15 bp, Homo sapiens
gcatggtggcgtgcg

SEQ ID NO: 119765 - DNA, 15 bp, Homo sapiens
ggcatggtggcgtgc

SEQ ID NO: 119766 - DNA, 15 bp, Homo sapiens
aggcatggtggcgtg

SEQ ID NO: 119767 - DNA, 15 bp, Homo sapiens
caggcatggtggcgt

SEQ ID NO: 119768 - DNA, 15 bp, Homo sapiens
ccaggcatggtggcg

SEQ ID NO: 119769 - DNA, 15 bp, Homo sapiens
gccaggcatggtggc

SEQ ID NO: 119770 - DNA, 15 bp, Homo sapiens
agccaggcatggtgg

SEQ ID NO: 119771 - DNA, 15 bp, Homo sapiens
tagccaggcatggtg

SEQ ID NO: 119772 - DNA, 15 bp, Homo sapiens
tcctggccaacatgg

SEQ ID NO: 119773 - DNA, 15 bp, Homo sapiens
atcctggccaacatg

SEQ ID NO: 119774 - DNA, 15 bp, Homo sapiens
catcctggccaacat

SEQ ID NO: 119775 - DNA, 15 bp, Homo sapiens
ccatcctggccaaca

SEQ ID NO: 119776 - DNA, 15 bp, Homo sapiens
accatcctggccaac

SEQ ID NO: 119777 - DNA, 15 bp, Homo sapiens
gaccatcctggccaa

SEQ ID NO: 119778 - DNA, 15 bp, Homo sapiens
agaccatcctggcca

SEQ ID NO: 119779 - DNA, 15 bp, Homo sapiens
gagaccatcctggcc

SEQ ID NO: 119780 - DNA, 15 bp, Homo sapiens
gaggcgggtggatca

SEQ ID NO: 119781 - DNA, 15 bp, Homo sapiens
cgaggcgggtggatc

SEQ ID NO: 119782 - DNA, 15 bp, Homo sapiens
ccgaggcgggtggat

SEQ ID NO: 119783 - DNA, 15 bp, Homo sapiens
gccgaggcgggtgga

SEQ ID NO: 119784 - DNA, 15 bp, Homo sapiens
ggccgaggcgggtgg

SEQ ID NO: 119785 - DNA, 15 bp, Homo sapiens
aggccgaggcgggtg

SEQ ID NO: 119786 - DNA, 15 bp, Homo sapiens
gaggccgaggcgggt

SEQ ID NO: 119787 - DNA, 15 bp, Homo sapiens
ggtgacagagtgaga

SEQ ID NO: 119788 - DNA, 15 bp, Homo sapiens
gggtgacagagtgag

SEQ ID NO: 119789 - DNA, 15 bp, Homo sapiens
tgggtgacagagtga

SEQ ID NO: 119790 - DNA, 15 bp, Homo sapiens
ctgggtgacagagtg

SEQ ID NO: 119791 - DNA, 15 bp, Homo sapiens
cctgggtgacagagt

SEQ ID NO: 119792 - DNA, 15 bp, Homo sapiens
ggtgcctgtaatccc

SEQ ID NO: 119793 - DNA, 15 bp, Homo sapiens
gggtgcctgtaatcc

SEQ ID NO: 119794 - DNA, 15 bp, Homo sapiens
ctctactaaaaatat

SEQ ID NO: 119795 - DNA, 15 bp, Homo sapiens
accccatctctacta

SEQ ID NO: 119796 - DNA, 15 bp, Homo sapiens
aaccccatctctact

SEQ ID NO: 119797 - DNA, 15 bp, Homo sapiens
aaaccccatctctac

SEQ ID NO: 119798 - DNA, 15 bp, Homo sapiens
gaaaccccatctcta

SEQ ID NO: 119799 - DNA, 15 bp, Homo sapiens
tgaaaccccatctct

SEQ ID NO: 119800 - DNA, 15 bp, Homo sapiens
gtgaaaccccatctc

SEQ ID NO: 119801 - DNA, 15 bp, Homo sapiens
ggtgaaaccccatct

SEQ ID NO: 119802 - DNA, 15 bp, Homo sapiens
tggtgaaaccccatc

SEQ ID NO: 119803 - DNA, 15 bp, Homo sapiens
atggtgaaaccccat

SEQ ID NO: 119804 - DNA, 15 bp, Homo sapiens
catggtgaaacccca

SEQ ID NO: 119805 - DNA, 15 bp, Homo sapiens
acatggtgaaacccc

SEQ ID NO: 119806 - DNA, 15 bp, Homo sapiens
gaggtgggcggatca

SEQ ID NO: 119807 - DNA, 15 bp, Homo sapiens
cctagcactttggga

SEQ ID NO: 119808 - DNA, 15 bp, Homo sapiens
tcctagcactttggg

SEQ ID NO: 119809 - DNA, 15 bp, Homo sapiens
atcctagcactttgg

SEQ ID NO: 119810 - DNA, 15 bp, Homo sapiens
aatcctagcactttg

SEQ ID NO: 119811 - DNA, 15 bp, Homo sapiens
taatcctagcacttt

SEQ ID NO: 119812 - DNA, 15 bp, Homo sapiens
gtaatcctagcactt

SEQ ID NO: 119813 - DNA, 15 bp, Homo sapiens
tgtaatcctagcact

SEQ ID NO: 119814 - DNA, 15 bp, Homo sapiens
ctgtaatcctagcac

SEQ ID NO: 119815 - DNA, 15 bp, Homo sapiens
cctgtaatcctagca

SEQ ID NO: 119816 - DNA, 15 bp, Homo sapiens
gcctgtaatcctagc

SEQ ID NO: 119817 - DNA, 15 bp, Homo sapiens
tgcctgtaatcctag

SEQ ID NO: 119818 - DNA, 15 bp, Homo sapiens
aaaaaaaaaaaagca

SEQ ID NO: 119819 - DNA, 15 bp, Homo sapiens
aaaaaaaaaaaaagc

SEQ ID NO: 119820 - DNA, 15 bp, Homo sapiens
tctgtctcaaaaaaa

SEQ ID NO: 119821 - DNA, 15 bp, Homo sapiens
cgacagagcgagact

SEQ ID NO: 119822 - DNA, 15 bp, Homo sapiens
gcgacagagcgagac

SEQ ID NO: 119823 - DNA, 15 bp, Homo sapiens
ggcgacagagcgaga

SEQ ID NO: 119824 - DNA, 15 bp, Homo sapiens
cccagctacttggga

SEQ ID NO: 119825 - DNA, 15 bp, Homo sapiens
tcccagctacttggg

SEQ ID NO: 119826 - DNA, 15 bp, Homo sapiens
gtcccagctacttgg

SEQ ID NO: 119827 - DNA, 15 bp, Homo sapiens
agtcccagctacttg

SEQ ID NO: 119828 - DNA, 15 bp, Homo sapiens
tagtcccagctactt

SEQ ID NO: 119829 - DNA, 15 bp, Homo sapiens
cggtgaaaccccgtc

SEQ ID NO: 119830 - DNA, 15 bp, Homo sapiens
acggtgaaaccccgt

SEQ ID NO: 119831 - DNA, 15 bp, Homo sapiens
cggatcacgaggtca

SEQ ID NO: 119832 - DNA, 15 bp, Homo sapiens
gcggatcacgaggtc

SEQ ID NO: 119833 - DNA, 15 bp, Homo sapiens
ggcggatcacgaggt

SEQ ID NO: 119834 - DNA, 15 bp, Homo sapiens
gccaggcgtggtggc

SEQ ID NO: 119835 - DNA, 15 bp, Homo sapiens
taaaaaaaaaaaaat

SEQ ID NO: 119836 - DNA, 15 bp, Homo sapiens
tttaaaaaaaaaaaa

SEQ ID NO: 119837 - DNA, 15 bp, Homo sapiens
tagccaggcgtggtg

SEQ ID NO: 119838 - DNA, 15 bp, Homo sapiens
caaaaattagccagg

SEQ ID NO: 119839 - DNA, 15 bp, Homo sapiens
aagaccagcctggcc

SEQ ID NO: 119840 - DNA, 15 bp, Homo sapiens
tggatcacttgaggt

SEQ ID NO: 119841 - DNA, 15 bp, Homo sapiens
gtggatcacttgagg

SEQ ID NO: 119842 - DNA, 15 bp, Homo sapiens
ggtggatcacttgag

SEQ ID NO: 119843 - DNA, 15 bp, Homo sapiens
gggtggatcacttga

SEQ ID NO: 119844 - DNA, 15 bp, Homo sapiens
tgggtggatcacttg

SEQ ID NO: 119845 - DNA, 15 bp, Homo sapiens
gtgggtggatcactt

SEQ ID NO: 119846 - DNA, 15 bp, Homo sapiens
ggtgggtggatcact

SEQ ID NO: 119847 - DNA, 15 bp, Homo sapiens
caacagagtgagact

SEQ ID NO: 119848 - DNA, 15 bp, Homo sapiens
gtgagccaagatcgc

SEQ ID NO: 119849 - DNA, 15 bp, Homo sapiens
atcccagctactcgg

SEQ ID NO: 119850 - DNA, 15 bp, Homo sapiens
aatcccagctactcg

SEQ ID NO: 119851 - DNA, 15 bp, Homo sapiens
ctgggcatggtggcg

SEQ ID NO: 119852 - DNA, 15 bp, Homo sapiens
aaaatacaaaaaaat

SEQ ID NO: 119853 - DNA, 15 bp, Homo sapiens
ctactgaaaatacaa

SEQ ID NO: 119854 - DNA, 15 bp, Homo sapiens
tctactgaaaataca

SEQ ID NO: 119855 - DNA, 15 bp, Homo sapiens
ctctactgaaaatac

SEQ ID NO: 119856 - DNA, 15 bp, Homo sapiens
gggcgtggtggctca

SEQ ID NO: 119857 - DNA, 15 bp, Homo sapiens
cgggcgtggtggctc

SEQ ID NO: 119858 - DNA, 15 bp, Homo sapiens
ccgggcgtggtggct

SEQ ID NO: 119859 - DNA, 15 bp, Homo sapiens
gccgggcgtggtggc

SEQ ID NO: 119860 - DNA, 15 bp, Homo sapiens
ggccgggcgtggtgg

SEQ ID NO: 119861 - DNA, 15 bp, Homo sapiens
ggggtgggggtgggg

SEQ ID NO: 119862 - DNA, 15 bp, Homo sapiens
gggggtgggggtggg

SEQ ID NO: 119863 - DNA, 15 bp, Homo sapiens
tgggggtgggggtgg

SEQ ID NO: 119864 - DNA, 15 bp, Homo sapiens
ctgggggtgggggtg

SEQ ID NO: 119865 - DNA, 15 bp, Homo sapiens
aatttttatttgtca

SEQ ID NO: 119866 - DNA, 15 bp, Homo sapiens
caatttttatttgtc

SEQ ID NO: 119867 - DNA, 15 bp, Homo sapiens
acaatttttatttgt

SEQ ID NO: 119868 - DNA, 15 bp, Homo sapiens
tacaatttttatttg

SEQ ID NO: 119869 - DNA, 15 bp, Homo sapiens
atacaatttttattt

SEQ ID NO: 119870 - DNA, 15 bp, Homo sapiens
tatacaatttttatt

SEQ ID NO: 119871 - DNA, 15 bp, Homo sapiens
atatacaatttttat

SEQ ID NO: 119872 - DNA, 15 bp, Homo sapiens
cctgggcgacagagc

SEQ ID NO: 119873 - DNA, 15 bp, Homo sapiens
gcctgggcgacagag

SEQ ID NO: 119874 - DNA, 15 bp, Homo sapiens
aaattagccgggcgt

SEQ ID NO: 119875 - DNA, 15 bp, Homo sapiens
aaaattagccgggcg

SEQ ID NO: 119876 - DNA, 15 bp, Homo sapiens
ttgaacccaggaggc

SEQ ID NO: 119877 - DNA, 15 bp, Homo sapiens
tgggaggccaaggca

SEQ ID NO: 119878 - DNA, 15 bp, Homo sapiens
aatcccagctacttg

SEQ ID NO: 119879 - DNA, 15 bp, Homo sapiens
gtctactaaaaatac

SEQ ID NO: 119880 - DNA, 15 bp, Homo sapiens
tgtctactaaaaata

SEQ ID NO: 119881 - DNA, 15 bp, Homo sapiens
gtgtctactaaaaat

SEQ ID NO: 119882 - DNA, 15 bp, Homo sapiens
tttttttttgagaca

SEQ ID NO: 119883 - DNA, 15 bp, Homo sapiens
ccactgtactccagc

SEQ ID NO: 119884 - DNA, 15 bp, Homo sapiens
gccactgtactccag

SEQ ID NO: 119885 - DNA, 15 bp, Homo sapiens
cccaggaggcagagg

SEQ ID NO: 119886 - DNA, 15 bp, Homo sapiens
acccaggaggcagag

SEQ ID NO: 119887 - DNA, 15 bp, Homo sapiens
aacccaggaggcaga

SEQ ID NO: 119888 - DNA, 15 bp, Homo sapiens
gaacccaggaggcag

SEQ ID NO: 119889 - DNA, 15 bp, Homo sapiens
tgaacccaggaggca

SEQ ID NO: 119890 - DNA, 15 bp, Homo sapiens
tttttaaaaaaagca

SEQ ID NO: 119891 - DNA, 15 bp, Homo sapiens
ttttttaaaaaaagc

SEQ ID NO: 119892 - DNA, 15 bp, Homo sapiens
tttttttaaaaaaag

SEQ ID NO: 119893 - DNA, 15 bp, Homo sapiens
ctttttttaaaaaaa

SEQ ID NO: 119894 - DNA, 15 bp, Homo sapiens
gccaccacgcctggc

SEQ ID NO: 119895 - DNA, 15 bp, Homo sapiens
tttttttgagacaga

SEQ ID NO: 119896 - DNA, 15 bp, Homo sapiens
gcttttttttttttt

SEQ ID NO: 119897 - DNA, 15 bp, Homo sapiens
tgctttttttttttt

SEQ ID NO: 119898 - DNA, 15 bp, Homo sapiens
cacatgcctgtagtc

SEQ ID NO: 119899 - DNA, 15 bp, Homo sapiens
gcacatgcctgtagt

SEQ ID NO: 119900 - DNA, 15 bp, Homo sapiens
ggcacatgcctgtag

SEQ ID NO: 119901 - DNA, 15 bp, Homo sapiens
tggcacatgcctgta

SEQ ID NO: 119902 - DNA, 15 bp, Homo sapiens
gtggcacatgcctgt

SEQ ID NO: 119903 - DNA, 15 bp, Homo sapiens
ggtggcacatgcctg

SEQ ID NO: 119904 - DNA, 15 bp, Homo sapiens
tggtggcacatgcct

SEQ ID NO: 119905 - DNA, 15 bp, Homo sapiens
tcatctgtaaaatgg

SEQ ID NO: 119906 - DNA, 15 bp, Homo sapiens
ctcatctgtaaaatg

SEQ ID NO: 119907 - DNA, 15 bp, Homo sapiens
agtccctgcagcttg

SEQ ID NO: 119908 - DNA, 15 bp, Homo sapiens
cagtccctgcagctt

SEQ ID NO: 119909 - DNA, 15 bp, Homo sapiens
gctttggagtcaaac

SEQ ID NO: 119910 - DNA, 15 bp, Homo sapiens
tcactccagcctggg

SEQ ID NO: 119911 - DNA, 15 bp, Homo sapiens
ttcactccagcctgg

SEQ ID NO: 119912 - DNA, 15 bp, Homo sapiens
agtgagccaagatcg

SEQ ID NO: 119913 - DNA, 15 bp, Homo sapiens
gggaggttgcagtga

SEQ ID NO: 119914 - DNA, 15 bp, Homo sapiens
ggggaggttgcagtg

SEQ ID NO: 119915 - DNA, 15 bp, Homo sapiens
gggggaggttgcagt

SEQ ID NO: 119916 - DNA, 15 bp, Homo sapiens
agggggaggttgcag

SEQ ID NO: 119917 - DNA, 15 bp, Homo sapiens
gagggggaggttgca

SEQ ID NO: 119918 - DNA, 15 bp, Homo sapiens
ggagggggaggttgc

SEQ ID NO: 119919 - DNA, 15 bp, Homo sapiens
aggagggggaggttg

SEQ ID NO: 119920 - DNA, 15 bp, Homo sapiens
caggagggggaggtt

SEQ ID NO: 119921 - DNA, 15 bp, Homo sapiens
cgaaaccctgtctct

SEQ ID NO: 119922 - DNA, 15 bp, Homo sapiens
gcgaaaccctgtctc

SEQ ID NO: 119923 - DNA, 15 bp, Homo sapiens
ggcgaaaccctgtct

SEQ ID NO: 119924 - DNA, 15 bp, Homo sapiens
tggcgaaaccctgtc

SEQ ID NO: 119925 - DNA, 15 bp, Homo sapiens
cctggccaacatggc

SEQ ID NO: 119926 - DNA, 15 bp, Homo sapiens
cctcctctgtgccag

SEQ ID NO: 119927 - DNA, 15 bp, Homo sapiens
aaaaaagaaagaaaa

SEQ ID NO: 119928 - DNA, 15 bp, Homo sapiens
ttaaaaaaaaaaaag

SEQ ID NO: 119929 - DNA, 15 bp, Homo sapiens
aggagagggaagaga

SEQ ID NO: 119930 - DNA, 15 bp, Homo sapiens
gaggagagggaagag

SEQ ID NO: 119931 - DNA, 15 bp, Homo sapiens
aaaaagaacaaaaaa

SEQ ID NO: 119932 - DNA, 15 bp, Homo sapiens
gggcaacaagagcga

SEQ ID NO: 119933 - DNA, 15 bp, Homo sapiens
tgggcaacaagagcg

SEQ ID NO: 119934 - DNA, 15 bp, Homo sapiens
ctgggcaacaagagc

SEQ ID NO: 119935 - DNA, 15 bp, Homo sapiens
cctgggcaacaagag

SEQ ID NO: 119936 - DNA, 15 bp, Homo sapiens
gcctgggcaacaaga

SEQ ID NO: 119937 - DNA, 15 bp, Homo sapiens
agcctgggcaacaag

SEQ ID NO: 119938 - DNA, 15 bp, Homo sapiens
aaaacagaaaaagca

SEQ ID NO: 119939 - DNA, 15 bp, Homo sapiens
ctgccttggcctccc

SEQ ID NO: 119940 - DNA, 15 bp, Homo sapiens
aattttttttttttt

SEQ ID NO: 119941 - DNA, 15 bp, Homo sapiens
acacacatacacaca

SEQ ID NO: 119942 - DNA, 15 bp, Homo sapiens
cacacacatacacac

SEQ ID NO: 119943 - DNA, 15 bp, Homo sapiens
tcaattttattttaa

SEQ ID NO: 119944 - DNA, 15 bp, Homo sapiens
aagctgcagggactg

SEQ ID NO: 119945 - DNA, 15 bp, Homo sapiens
caagctgcagggact

SEQ ID NO: 119946 - DNA, 15 bp, Homo sapiens
tgacctcaagtgatt

SEQ ID NO: 119947 - DNA, 15 bp, Homo sapiens
gccatgttggccagg

SEQ ID NO: 119948 - DNA, 15 bp, Homo sapiens
tcctgtctcagcctc

SEQ ID NO: 119949 - DNA, 15 bp, Homo sapiens
ctcctgtctcagcct

SEQ ID NO: 119950 - DNA, 15 bp, Homo sapiens
tctcctgtctcagcc

SEQ ID NO: 119951 - DNA, 15 bp, Homo sapiens
ttctcctgtctcagc

SEQ ID NO: 119952 - DNA, 15 bp, Homo sapiens
attctcctgtctcag

SEQ ID NO: 119953 - DNA, 15 bp, Homo sapiens
gaggttgtagtgagc

SEQ ID NO: 119954 - DNA, 15 bp, Homo sapiens
agaggttgtagtgag

SEQ ID NO: 119955 - DNA, 15 bp, Homo sapiens
agccaggtgtggtgg

SEQ ID NO: 119956 - DNA, 15 bp, Homo sapiens
tagccaggtgtggtg

SEQ ID NO: 119957 - DNA, 15 bp, Homo sapiens
ttagccaggtgtggt

SEQ ID NO: 119958 - DNA, 15 bp, Homo sapiens
attagccaggtgtgg

SEQ ID NO: 119959 - DNA, 15 bp, Homo sapiens
aattagccaggtgtg

SEQ ID NO: 119960 - DNA, 15 bp, Homo sapiens
gggaggccaaggcag

SEQ ID NO: 119961 - DNA, 15 bp, Homo sapiens
tgcctgtagtcccag

SEQ ID NO: 119962 - DNA, 15 bp, Homo sapiens
ggtgcctgtagtccc

SEQ ID NO: 119963 - DNA, 15 bp, Homo sapiens
aggtgcctgtagtcc

SEQ ID NO: 119964 - DNA, 15 bp, Homo sapiens
caggtgcctgtagtc

SEQ ID NO: 119965 - DNA, 15 bp, Homo sapiens
gcaggtgcctgtagt

SEQ ID NO: 119966 - DNA, 15 bp, Homo sapiens
ggcaggtgcctgtag

SEQ ID NO: 119967 - DNA, 15 bp, Homo sapiens
tggcaggtgcctgta

SEQ ID NO: 119968 - DNA, 15 bp, Homo sapiens
gtggcaggtgcctgt

SEQ ID NO: 119969 - DNA, 15 bp, Homo sapiens
ggtggcaggtgcctg

SEQ ID NO: 119970 - DNA, 15 bp, Homo sapiens
tggtggcaggtgcct

SEQ ID NO: 119971 - DNA, 15 bp, Homo sapiens
gtggtggcaggtgcc

SEQ ID NO: 119972 - DNA, 15 bp, Homo sapiens
acatagtgaaaccct

SEQ ID NO: 119973 - DNA, 15 bp, Homo sapiens
gaggccgaggtgggc

SEQ ID NO: 119974 - DNA, 15 bp, Homo sapiens
ttgaaacctgagctg

SEQ ID NO: 119975 - DNA, 15 bp, Homo sapiens
ctcttccctctcctc

SEQ ID NO: 119976 - DNA, 15 bp, Homo sapiens
tctcttccctctcct

SEQ ID NO: 119977 - DNA, 15 bp, Homo sapiens
gctgggattgcaggc

SEQ ID NO: 119978 - DNA, 15 bp, Homo sapiens
tgctgggattgcagg

SEQ ID NO: 119979 - DNA, 15 bp, Homo sapiens
gtgctgggattgcag

SEQ ID NO: 119980 - DNA, 15 bp, Homo sapiens
agtgctgggattgca

SEQ ID NO: 119981 - DNA, 15 bp, Homo sapiens
aagtgctgggattgc

SEQ ID NO: 119982 - DNA, 15 bp, Homo sapiens
aaagtgctgggattg

SEQ ID NO: 119983 - DNA, 15 bp, Homo sapiens
aacctccccctcctg

SEQ ID NO: 119984 - DNA, 15 bp, Homo sapiens
caacctccccctcct

SEQ ID NO: 119985 - DNA, 15 bp, Homo sapiens
gcaacctccccctcc

SEQ ID NO: 119986 - DNA, 15 bp, Homo sapiens
tgcaacctccccctc

SEQ ID NO: 119987 - DNA, 15 bp, Homo sapiens
ctgcaacctccccct

SEQ ID NO: 119988 - DNA, 15 bp, Homo sapiens
actgcaacctccccc

SEQ ID NO: 119989 - DNA, 15 bp, Homo sapiens
cactgcaacctcccc

SEQ ID NO: 119990 - DNA, 15 bp, Homo sapiens
tcactgcaacctccc

SEQ ID NO: 119991 - DNA, 15 bp, Homo sapiens
ggggaggctgaggca

SEQ ID NO: 119992 - DNA, 15 bp, Homo sapiens
tggggaggctgaggc

SEQ ID NO: 119993 - DNA, 15 bp, Homo sapiens
ctggggaggctgagg

SEQ ID NO: 119994 - DNA, 15 bp, Homo sapiens
actggggaggctgag

SEQ ID NO: 119995 - DNA, 15 bp, Homo sapiens
tactggggaggctga

SEQ ID NO: 119996 - DNA, 15 bp, Homo sapiens
ctactggggaggctg

SEQ ID NO: 119997 - DNA, 15 bp, Homo sapiens
gctactggggaggct

SEQ ID NO: 119998 - DNA, 15 bp, Homo sapiens
agctactggggaggc

SEQ ID NO: 119999 - DNA, 15 bp, Homo sapiens
cagctactggggagg

SEQ ID NO: 120000 - DNA, 15 bp, Homo sapiens
ccagctactggggag

SEQ ID NO: 120001 - DNA, 15 bp, Homo sapiens
cccagctactgggga

SEQ ID NO: 120002 - DNA, 15 bp, Homo sapiens
tcccagctactgggg

SEQ ID NO: 120003 - DNA, 15 bp, Homo sapiens
aggcgggtggatcac

SEQ ID NO: 120004 - DNA, 15 bp, Homo sapiens
gaatttttttttttt

SEQ ID NO: 120005 - DNA, 15 bp, Homo sapiens
agaattttttttttt

SEQ ID NO: 120006 - DNA, 15 bp, Homo sapiens
aaaaaaaaaaattct

SEQ ID NO: 120007 - DNA, 15 bp, Homo sapiens
aaaaaaaaaaaattc

SEQ ID NO: 120008 - DNA, 15 bp, Homo sapiens
aaaaaaaaaaaaatt

SEQ ID NO: 120009 - DNA, 15 bp, Homo sapiens
cttgcagtgagccga

SEQ ID NO: 120010 - DNA, 15 bp, Homo sapiens
gcttgcagtgagccg

SEQ ID NO: 120011 - DNA, 15 bp, Homo sapiens
agcttgcagtgagcc

SEQ ID NO: 120012 - DNA, 15 bp, Homo sapiens
gagcttgcagtgagc

SEQ ID NO: 120013 - DNA, 15 bp, Homo sapiens
ggagcttgcagtgag

SEQ ID NO: 120014 - DNA, 15 bp, Homo sapiens
cggagcttgcagtga

SEQ ID NO: 120015 - DNA, 15 bp, Homo sapiens
gcggagcttgcagtg

SEQ ID NO: 120016 - DNA, 15 bp, Homo sapiens
ggcggagcttgcagt

SEQ ID NO: 120017 - DNA, 15 bp, Homo sapiens
aggcggagcttgcag

SEQ ID NO: 120018 - DNA, 15 bp, Homo sapiens
gaggcggagcttgca

SEQ ID NO: 120019 - DNA, 15 bp, Homo sapiens
ggaggcggagcttgc

SEQ ID NO: 120020 - DNA, 15 bp, Homo sapiens
gggaggcggagcttg

SEQ ID NO: 120021 - DNA, 15 bp, Homo sapiens
cgggaggcggagctt

SEQ ID NO: 120022 - DNA, 15 bp, Homo sapiens
ccgggaggcggagct

SEQ ID NO: 120023 - DNA, 15 bp, Homo sapiens
cccgggaggcggagc

SEQ ID NO: 120024 - DNA, 15 bp, Homo sapiens
gtgaacccgggaggc

SEQ ID NO: 120025 - DNA, 15 bp, Homo sapiens
cgtgaacccgggagg

SEQ ID NO: 120026 - DNA, 15 bp, Homo sapiens
gcgtgaacccgggag

SEQ ID NO: 120027 - DNA, 15 bp, Homo sapiens
ggcgtgaacccggga

SEQ ID NO: 120028 - DNA, 15 bp, Homo sapiens
tggcgtgaacccggg

SEQ ID NO: 120029 - DNA, 15 bp, Homo sapiens
atggcgtgaacccgg

SEQ ID NO: 120030 - DNA, 15 bp, Homo sapiens
aatggcgtgaacccg

SEQ ID NO: 120031 - DNA, 15 bp, Homo sapiens
gaatggcgtgaaccc

SEQ ID NO: 120032 - DNA, 15 bp, Homo sapiens
agaatggcgtgaacc

SEQ ID NO: 120033 - DNA, 15 bp, Homo sapiens
gagaatggcgtgaac

SEQ ID NO: 120034 - DNA, 15 bp, Homo sapiens
ggagaatggcgtgaa

SEQ ID NO: 120035 - DNA, 15 bp, Homo sapiens
aggagaatggcgtga

SEQ ID NO: 120036 - DNA, 15 bp, Homo sapiens
caggagaatggcgtg

SEQ ID NO: 120037 - DNA, 15 bp, Homo sapiens
gcaggagaatggcgt

SEQ ID NO: 120038 - DNA, 15 bp, Homo sapiens
ggcaggagaatggcg

SEQ ID NO: 120039 - DNA, 15 bp, Homo sapiens
aggcaggagaatggc

SEQ ID NO: 120040 - DNA, 15 bp, Homo sapiens
gaggcaggagaatgg

SEQ ID NO: 120041 - DNA, 15 bp, Homo sapiens
tgaggcaggagaatg

SEQ ID NO: 120042 - DNA, 15 bp, Homo sapiens
aaaaaaattagctgg

SEQ ID NO: 120043 - DNA, 15 bp, Homo sapiens
gtcaggagatcgaga

SEQ ID NO: 120044 - DNA, 15 bp, Homo sapiens
ggtcaggagatcgag

SEQ ID NO: 120045 - DNA, 15 bp, Homo sapiens
aggtcaggagatcga

SEQ ID NO: 120046 - DNA, 15 bp, Homo sapiens
gaggtcaggagatcg

SEQ ID NO: 120047 - DNA, 15 bp, Homo sapiens
cgaggtcaggagatc

SEQ ID NO: 120048 - DNA, 15 bp, Homo sapiens
acgaggtcaggagat

SEQ ID NO: 120049 - DNA, 15 bp, Homo sapiens
cacgaggtcaggaga

SEQ ID NO: 120050 - DNA, 15 bp, Homo sapiens
tcacgaggtcaggag

SEQ ID NO: 120051 - DNA, 15 bp, Homo sapiens
atcacgaggtcagga

SEQ ID NO: 120052 - DNA, 15 bp, Homo sapiens
gatcacgaggtcagg

SEQ ID NO: 120053 - DNA, 15 bp, Homo sapiens
ggatcacgaggtcag

SEQ ID NO: 120054 - DNA, 15 bp, Homo sapiens
caacaagagcgaaac

SEQ ID NO: 120055 - DNA, 15 bp, Homo sapiens
gcaacaagagcgaaa

SEQ ID NO: 120056 - DNA, 15 bp, Homo sapiens
ggcaacaagagcgaa

SEQ ID NO: 120057 - DNA, 15 bp, Homo sapiens
caatcccagcacttt

SEQ ID NO: 120058 - DNA, 15 bp, Homo sapiens
gcaatcccagcactt

SEQ ID NO: 120059 - DNA, 15 bp, Homo sapiens
tgcaatcccagcact

SEQ ID NO: 120060 - DNA, 15 bp, Homo sapiens
ctgcaatcccagcac

SEQ ID NO: 120061 - DNA, 15 bp, Homo sapiens
cctgcaatcccagca

SEQ ID NO: 120062 - DNA, 15 bp, Homo sapiens
gcctgcaatcccagc

SEQ ID NO: 120063 - DNA, 15 bp, Homo sapiens
gggctgggcgcagtg

SEQ ID NO: 120064 - DNA, 15 bp, Homo sapiens
ggggctgggcgcagt

SEQ ID NO: 120065 - DNA, 15 bp, Homo sapiens
tggggctgggcgcag

SEQ ID NO: 120066 - DNA, 15 bp, Homo sapiens
ctgagacaggagaat

SEQ ID NO: 120067 - DNA, 15 bp, Homo sapiens
gctgagacaggagaa

SEQ ID NO: 120068 - DNA, 15 bp, Homo sapiens
ggctgagacaggaga

SEQ ID NO: 120069 - DNA, 15 bp, Homo sapiens
aggctgagacaggag

SEQ ID NO: 120070 - DNA, 15 bp, Homo sapiens
gaggctgagacagga

SEQ ID NO: 120071 - DNA, 15 bp, Homo sapiens
ggaggctgagacagg

SEQ ID NO: 120072 - DNA, 15 bp, Homo sapiens
aaaaattagccgggc

SEQ ID NO: 120073 - DNA, 15 bp, Homo sapiens
cctgtaatcccaaca

SEQ ID NO: 120074 - DNA, 15 bp, Homo sapiens
gcctgtaatcccaac

SEQ ID NO: 120075 - DNA, 15 bp, Homo sapiens
tgcctgtaatcccaa

SEQ ID NO: 120076 - DNA, 15 bp, Homo sapiens
gcggtggctcatgcc

SEQ ID NO: 120077 - DNA, 15 bp, Homo sapiens
cgcggtggctcatgc

SEQ ID NO: 120078 - DNA, 15 bp, Homo sapiens
gcgcggtggctcatg

SEQ ID NO: 120079 - DNA, 15 bp, Homo sapiens
ggcgcggtggctcat

SEQ ID NO: 120080 - DNA, 15 bp, Homo sapiens
tcagagaggttaagt

SEQ ID NO: 120081 - DNA, 15 bp, Homo sapiens
cacacctggctaatt

SEQ ID NO: 120082 - DNA, 15 bp, Homo sapiens
ccacacctggctaat

SEQ ID NO: 120083 - DNA, 15 bp, Homo sapiens
accacacctggctaa

SEQ ID NO: 120084 - DNA, 15 bp, Homo sapiens
caccacacctggcta

SEQ ID NO: 120085 - DNA, 15 bp, Homo sapiens
ccaccacacctggct

SEQ ID NO: 120086 - DNA, 15 bp, Homo sapiens
accaccacacctggc

SEQ ID NO: 120087 - DNA, 15 bp, Homo sapiens
caccaccacacctgg

SEQ ID NO: 120088 - DNA, 15 bp, Homo sapiens
aggtgcctgccacca

SEQ ID NO: 120089 - DNA, 15 bp, Homo sapiens
caggtgcctgccacc

SEQ ID NO: 120090 - DNA, 15 bp, Homo sapiens
acaggtgcctgccac

SEQ ID NO: 120091 - DNA, 15 bp, Homo sapiens
tacaggtgcctgcca

SEQ ID NO: 120092 - DNA, 15 bp, Homo sapiens
ataaaaaaaaaaaaa

SEQ ID NO: 120093 - DNA, 15 bp, Homo sapiens
aataaaaaaaaaaaa

SEQ ID NO: 120094 - DNA, 15 bp, Homo sapiens
tcgtctctactaaaa

SEQ ID NO: 120095 - DNA, 15 bp, Homo sapiens
ctcgtctctactaaa

SEQ ID NO: 120096 - DNA, 15 bp, Homo sapiens
cctcgtctctactaa

SEQ ID NO: 120097 - DNA, 15 bp, Homo sapiens
acctcgtctctacta

SEQ ID NO: 120098 - DNA, 15 bp, Homo sapiens
aacctcgtctctact

SEQ ID NO: 120099 - DNA, 15 bp, Homo sapiens
tgagaccatcctggc

SEQ ID NO: 120100 - DNA, 15 bp, Homo sapiens
ttgagaccatcctgg

SEQ ID NO: 120101 - DNA, 15 bp, Homo sapiens
attgagaccatcctg

SEQ ID NO: 120102 - DNA, 15 bp, Homo sapiens
gggcggatcacgagg

SEQ ID NO: 120103 - DNA, 15 bp, Homo sapiens
tgggcggatcacgag

SEQ ID NO: 120104 - DNA, 15 bp, Homo sapiens
gtgggcggatcacga

SEQ ID NO: 120105 - DNA, 15 bp, Homo sapiens
ggtgggcggatcacg

SEQ ID NO: 120106 - DNA, 15 bp, Homo sapiens
cgaggtgggcggatc

SEQ ID NO: 120107 - DNA, 15 bp, Homo sapiens
ccgaggtgggcggat

SEQ ID NO: 120108 - DNA, 15 bp, Homo sapiens
ggtggcgggggagag

SEQ ID NO: 120109 - DNA, 15 bp, Homo sapiens
gggtggcgggggaga

SEQ ID NO: 120110 - DNA, 15 bp, Homo sapiens
agggtggcgggggag

SEQ ID NO: 120111 - DNA, 15 bp, Homo sapiens
aaaaagatgaataaa

SEQ ID NO: 120112 - DNA, 15 bp, Homo sapiens
actagagagatatta

SEQ ID NO: 120113 - DNA, 15 bp, Homo sapiens
gactagagagatatt

SEQ ID NO: 120114 - DNA, 15 bp, Homo sapiens
gcttcagacacatgc

SEQ ID NO: 120115 - DNA, 15 bp, Homo sapiens
aagagcaaaactcca

SEQ ID NO: 120116 - DNA, 15 bp, Homo sapiens
gcaccactgcactcc

SEQ ID NO: 120117 - DNA, 15 bp, Homo sapiens
cgcaccactgcactc

SEQ ID NO: 120118 - DNA, 15 bp, Homo sapiens
tcgcaccactgcact

SEQ ID NO: 120119 - DNA, 15 bp, Homo sapiens
atcgcaccactgcac

SEQ ID NO: 120120 - DNA, 15 bp, Homo sapiens
ctgggaggtggaggt

SEQ ID NO: 120121 - DNA, 15 bp, Homo sapiens
cctgggaggtggagg

SEQ ID NO: 120122 - DNA, 15 bp, Homo sapiens
acctgggaggtggag

SEQ ID NO: 120123 - DNA, 15 bp, Homo sapiens
aacctgggaggtgga

SEQ ID NO: 120124 - DNA, 15 bp, Homo sapiens
gaacctgggaggtgg

SEQ ID NO: 120125 - DNA, 15 bp, Homo sapiens
tgaacctgggaggtg

SEQ ID NO: 120126 - DNA, 15 bp, Homo sapiens
ttgaacctgggaggt

SEQ ID NO: 120127 - DNA, 15 bp, Homo sapiens
atgagccaccatgcc

SEQ ID NO: 120128 - DNA, 15 bp, Homo sapiens
catgagccaccatgc

SEQ ID NO: 120129 - DNA, 15 bp, Homo sapiens
gcatgagccaccatg

SEQ ID NO: 120130 - DNA, 15 bp, Homo sapiens
ggcatgtgccaccac

SEQ ID NO: 120131 - DNA, 15 bp, Homo sapiens
aggcatgtgccacca

SEQ ID NO: 120132 - DNA, 15 bp, Homo sapiens
caggcatgtgccacc

SEQ ID NO: 120133 - DNA, 15 bp, Homo sapiens
acaggcatgtgccac

SEQ ID NO: 120134 - DNA, 15 bp, Homo sapiens
cattttacagatgag

SEQ ID NO: 120135 - DNA, 15 bp, Homo sapiens
ccattttacagatga

SEQ ID NO: 120136 - DNA, 15 bp, Homo sapiens
catatatatattata

SEQ ID NO: 120137 - DNA, 15 bp, Homo sapiens
aaatatatatatata

SEQ ID NO: 120138 - DNA, 15 bp, Homo sapiens
aaaatatatatatat

SEQ ID NO: 120139 - DNA, 15 bp, Homo sapiens
taaaatatatatata

SEQ ID NO: 120140 - DNA, 15 bp, Homo sapiens
ataaaatatatatat

SEQ ID NO: 120141 - DNA, 15 bp, Homo sapiens
taaaattagaaaaat

SEQ ID NO: 120142 - DNA, 15 bp, Homo sapiens
ggcgggtggatcact

SEQ ID NO: 120143 - DNA, 15 bp, Homo sapiens
aaggcgggtggatca

SEQ ID NO: 120144 - DNA, 15 bp, Homo sapiens
aaaaaaaacaaaaaa

SEQ ID NO: 120145 - DNA, 15 bp, Homo sapiens
aaaaaaaaacaaaaa

SEQ ID NO: 120146 - DNA, 15 bp, Homo sapiens
gacagggtttcgcca

SEQ ID NO: 120147 - DNA, 15 bp, Homo sapiens
agacagggtttcgcc

SEQ ID NO: 120148 - DNA, 15 bp, Homo sapiens
gagacagggtttcgc

SEQ ID NO: 120149 - DNA, 15 bp, Homo sapiens
agagacagggtttcg

SEQ ID NO: 120150 - DNA, 15 bp, Homo sapiens
tacaggcatgtgcca

SEQ ID NO: 120151 - DNA, 15 bp, Homo sapiens
cttgttgcccaggct

SEQ ID NO: 120152 - DNA, 15 bp, Homo sapiens
tcttgttgcccaggc

SEQ ID NO: 120153 - DNA, 15 bp, Homo sapiens
ctcttgttgcccagg

SEQ ID NO: 120154 - DNA, 15 bp, Homo sapiens
gctcttgttgcccag

SEQ ID NO: 120155 - DNA, 15 bp, Homo sapiens
cgctcttgttgccca

SEQ ID NO: 120156 - DNA, 15 bp, Homo sapiens
tcgctcttgttgccc

SEQ ID NO: 120157 - DNA, 15 bp, Homo sapiens
ttcgctcttgttgcc

SEQ ID NO: 120158 - DNA, 15 bp, Homo sapiens
tttcgctcttgttgc

SEQ ID NO: 120159 - DNA, 15 bp, Homo sapiens
gtttcgctcttgttg

SEQ ID NO: 120160 - DNA, 15 bp, Homo sapiens
ccagctaattttttt

SEQ ID NO: 120161 - DNA, 15 bp, Homo sapiens
ctcactacaacctct

SEQ ID NO: 120162 - DNA, 15 bp, Homo sapiens
gctcactacaacctc

SEQ ID NO: 120163 - DNA, 15 bp, Homo sapiens
cgatcttggctcact

SEQ ID NO: 120164 - DNA, 15 bp, Homo sapiens
gtgaacagctccagc

SEQ ID NO: 120165 - DNA, 15 bp, Homo sapiens
aaaaaaaactgtcaa

SEQ ID NO: 120166 - DNA, 15 bp, Homo sapiens
tcaaagttatggttt

SEQ ID NO: 120167 - DNA, 15 bp, Homo sapiens
ttaaaataaaattga

SEQ ID NO: 120168 - DNA, 15 bp, Homo sapiens
ctgcgcccagcccca

SEQ ID NO: 120169 - DNA, 15 bp, Homo sapiens
actgcgcccagcccc

SEQ ID NO: 120170 - DNA, 15 bp, Homo sapiens
cactgcgcccagccc

SEQ ID NO: 120171 - DNA, 15 bp, Homo sapiens
acctcgtgatccgcc

SEQ ID NO: 120172 - DNA, 15 bp, Homo sapiens
gacctcgtgatccgc

SEQ ID NO: 120173 - DNA, 15 bp, Homo sapiens
tgacctcgtgatccg

SEQ ID NO: 120174 - DNA, 15 bp, Homo sapiens
tgctttttctgtttt

SEQ ID NO: 120175 - DNA, 15 bp, Homo sapiens
cagtgagccaaggtc

SEQ ID NO: 120176 - DNA, 15 bp, Homo sapiens
atacaaaaaaattag

SEQ ID NO: 120177 - DNA, 15 bp, Homo sapiens
aatacaaaaaaatta

SEQ ID NO: 120178 - DNA, 15 bp, Homo sapiens
aaatacaaaaaaatt

SEQ ID NO: 120179 - DNA, 15 bp, Homo sapiens
tttttttttttaatt

SEQ ID NO: 120180 - DNA, 15 bp, Homo sapiens
gtttgactccaaagc

SEQ ID NO: 120181 - DNA, 15 bp, Homo sapiens
aagtagctgggacta

SEQ ID NO: 120182 - DNA, 15 bp, Homo sapiens
agtgcagtggcgaga

SEQ ID NO: 120183 - DNA, 15 bp, Homo sapiens
gagtgcagtggcgag

SEQ ID NO: 120184 - DNA, 15 bp, Homo sapiens
ggagtgcagtggcga

SEQ ID NO: 120185 - DNA, 15 bp, Homo sapiens
attaaaaaaaaaaaa

SEQ ID NO: 120186 - DNA, 15 bp, Homo sapiens
aattaaaaaaaaaaa

SEQ ID NO: 120187 - DNA, 15 bp, Homo sapiens
aaaccataactttga

SEQ ID NO: 120188 - DNA, 15 bp, Homo sapiens
gggcgacagagcgag

SEQ ID NO: 120189 - DNA, 15 bp, Homo sapiens
tgggcgacagagcga

SEQ ID NO: 120190 - DNA, 15 bp, Homo sapiens
ctgggcgacagagcg

SEQ ID NO: 120191 - DNA, 15 bp, Homo sapiens
tcgccactgcactcc

SEQ ID NO: 120192 - DNA, 15 bp, Homo sapiens
ctcgccactgcactc

SEQ ID NO: 120193 - DNA, 15 bp, Homo sapiens
tctcgccactgcact

SEQ ID NO: 120194 - DNA, 15 bp, Homo sapiens
atgcctgtagtccca

SEQ ID NO: 120195 - DNA, 15 bp, Homo sapiens
catgcctgtagtccc

SEQ ID NO: 120196 - DNA, 15 bp, Homo sapiens
aatcacttgaggtca

SEQ ID NO: 120197 - DNA, 15 bp, Homo sapiens
gtagtcccagctact

SEQ ID NO: 120198 - DNA, 15 bp, Homo sapiens
tgtagtcccagctac

SEQ ID NO: 120199 - DNA, 15 bp, Homo sapiens
ctgtagtcccagcta

SEQ ID NO: 120200 - DNA, 15 bp, Homo sapiens
cctgtagtcccagct

SEQ ID NO: 120201 - DNA, 15 bp, Homo sapiens
aggtgtggtggcagg

SEQ ID NO: 120202 - DNA, 15 bp, Homo sapiens
caggtgtggtggcag

SEQ ID NO: 120203 - DNA, 15 bp, Homo sapiens
ccaggtgtggtggca

SEQ ID NO: 120204 - DNA, 15 bp, Homo sapiens
gccaggtgtggtggc

SEQ ID NO: 120205 - DNA, 15 bp, Homo sapiens
aaattagccaggtgt

SEQ ID NO: 120206 - DNA, 15 bp, Homo sapiens
aaaattagccaggtg

SEQ ID NO: 120207 - DNA, 15 bp, Homo sapiens
aaaaattagccaggt

SEQ ID NO: 120208 - DNA, 15 bp, Homo sapiens
aatacaaaaattagc

SEQ ID NO: 120209 - DNA, 15 bp, Homo sapiens
aaatacaaaaattag

SEQ ID NO: 120210 - DNA, 15 bp, Homo sapiens
aaaatacaaaaatta

SEQ ID NO: 120211 - DNA, 15 bp, Homo sapiens
aaaaatacaaaaatt

SEQ ID NO: 120212 - DNA, 15 bp, Homo sapiens
taaaaatacaaaaat

SEQ ID NO: 120213 - DNA, 15 bp, Homo sapiens
ctaaaaatacaaaaa

SEQ ID NO: 120214 - DNA, 15 bp, Homo sapiens
actaaaaatacaaaa

SEQ ID NO: 120215 - DNA, 15 bp, Homo sapiens
tactaaaaatacaaa

SEQ ID NO: 120216 - DNA, 15 bp, Homo sapiens
ctactaaaaatacaa

SEQ ID NO: 120217 - DNA, 15 bp, Homo sapiens
cgccactgcactcca

SEQ ID NO: 120218 - DNA, 15 bp, Homo sapiens
gccgagattgcgcca

SEQ ID NO: 120219 - DNA, 15 bp, Homo sapiens
agccgagattgcgcc

SEQ ID NO: 120220 - DNA, 15 bp, Homo sapiens
gagccgagattgcgc

SEQ ID NO: 120221 - DNA, 15 bp, Homo sapiens
tgagccgagattgcg

SEQ ID NO: 120222 - DNA, 15 bp, Homo sapiens
gtgagccgagattgc

SEQ ID NO: 120223 - DNA, 15 bp, Homo sapiens
agtgagccgagattg

SEQ ID NO: 120224 - DNA, 15 bp, Homo sapiens
cagtgagccgagatt

SEQ ID NO: 120225 - DNA, 15 bp, Homo sapiens
gcagtgagccgagat

SEQ ID NO: 120226 - DNA, 15 bp, Homo sapiens
tgcagtgagccgaga

SEQ ID NO: 120227 - DNA, 15 bp, Homo sapiens
ttgcagtgagccgag

SEQ ID NO: 120228 - DNA, 15 bp, Homo sapiens
gcctgtagtcccagc

SEQ ID NO: 120229 - DNA, 15 bp, Homo sapiens
cgcctgtagtcccag

SEQ ID NO: 120230 - DNA, 15 bp, Homo sapiens
gcgcctgtagtccca

SEQ ID NO: 120231 - DNA, 15 bp, Homo sapiens
ggcgcctgtagtccc

SEQ ID NO: 120232 - DNA, 15 bp, Homo sapiens
gggcgcctgtagtcc

SEQ ID NO: 120233 - DNA, 15 bp, Homo sapiens
cgggcgcctgtagtc

SEQ ID NO: 120234 - DNA, 15 bp, Homo sapiens
gcgggcgcctgtagt

SEQ ID NO: 120235 - DNA, 15 bp, Homo sapiens
ggcgggcgcctgtag

SEQ ID NO: 120236 - DNA, 15 bp, Homo sapiens
tggcgggcgcctgta

SEQ ID NO: 120237 - DNA, 15 bp, Homo sapiens
gtggcgggcgcctgt

SEQ ID NO: 120238 - DNA, 15 bp, Homo sapiens
taaaaatacaaaaaa

SEQ ID NO: 120239 - DNA, 15 bp, Homo sapiens
tctactaaaaataca

SEQ ID NO: 120240 - DNA, 15 bp, Homo sapiens
ctctactaaaaatac

SEQ ID NO: 120241 - DNA, 15 bp, Homo sapiens
aaaattagctgggct

SEQ ID NO: 120242 - DNA, 15 bp, Homo sapiens
tctctactaaaaata

SEQ ID NO: 120243 - DNA, 15 bp, Homo sapiens
gtctctactaaaaat

SEQ ID NO: 120244 - DNA, 15 bp, Homo sapiens
cgtctctactaaaaa

SEQ ID NO: 120245 - DNA, 15 bp, Homo sapiens
ccgtctctactaaaa

SEQ ID NO: 120246 - DNA, 15 bp, Homo sapiens
cccgtctctactaaa

SEQ ID NO: 120247 - DNA, 15 bp, Homo sapiens
ccccgtctctactaa

SEQ ID NO: 120248 - DNA, 15 bp, Homo sapiens
accccgtctctacta

SEQ ID NO: 120249 - DNA, 15 bp, Homo sapiens
aaccccgtctctact

SEQ ID NO: 120250 - DNA, 15 bp, Homo sapiens
aaaccccgtctctac

SEQ ID NO: 120251 - DNA, 15 bp, Homo sapiens
gaaaccccgtctcta

SEQ ID NO: 120252 - DNA, 15 bp, Homo sapiens
tgaaaccccgtctct

SEQ ID NO: 120253 - DNA, 15 bp, Homo sapiens
gtgaaaccccgtctc

SEQ ID NO: 120254 - DNA, 15 bp, Homo sapiens
ggtgaaaccccgtct

SEQ ID NO: 120255 - DNA, 15 bp, Homo sapiens
agatcgagaccatcc

SEQ ID NO: 120256 - DNA, 15 bp, Homo sapiens
gagatcgagaccatc

SEQ ID NO: 120257 - DNA, 15 bp, Homo sapiens
ggagatcgagaccat

SEQ ID NO: 120258 - DNA, 15 bp, Homo sapiens
aggagatcgagacca

SEQ ID NO: 120259 - DNA, 15 bp, Homo sapiens
caggagatcgagacc

SEQ ID NO: 120260 - DNA, 15 bp, Homo sapiens
tcaggagatcgagac

SEQ ID NO: 120261 - DNA, 15 bp, Homo sapiens
tgaggtcaggagatc

SEQ ID NO: 120262 - DNA, 15 bp, Homo sapiens
atgaggtcaggagat

SEQ ID NO: 120263 - DNA, 15 bp, Homo sapiens
catgaggtcaggaga

SEQ ID NO: 120264 - DNA, 15 bp, Homo sapiens
ttgggaggctgaggc

SEQ ID NO: 120265 - DNA, 15 bp, Homo sapiens
agcactttgggaggc

SEQ ID NO: 120266 - DNA, 15 bp, Homo sapiens
cagcactttgggagg

SEQ ID NO: 120267 - DNA, 15 bp, Homo sapiens
ccagcactttgggag

SEQ ID NO: 120268 - DNA, 15 bp, Homo sapiens
cccagcactttggga

SEQ ID NO: 120269 - DNA, 15 bp, Homo sapiens
tcccagcactttggg

SEQ ID NO: 120270 - DNA, 15 bp, Homo sapiens
atcccagcactttgg

SEQ ID NO: 120271 - DNA, 15 bp, Homo sapiens
aatcccagcactttg

SEQ ID NO: 120272 - DNA, 15 bp, Homo sapiens
taatcccagcacttt

SEQ ID NO: 120273 - DNA, 15 bp, Homo sapiens
gtaatcccagcactt

SEQ ID NO: 120274 - DNA, 15 bp, Homo sapiens
tgtaatcccagcact

SEQ ID NO: 120275 - DNA, 15 bp, Homo sapiens
ctgtaatcccagcac

SEQ ID NO: 120276 - DNA, 15 bp, Homo sapiens
cctgtaatcccagca

SEQ ID NO: 120277 - DNA, 15 bp, Homo sapiens
gcctgtaatcccagc

SEQ ID NO: 120278 - DNA, 15 bp, Homo sapiens
catgcctgtaatccc

SEQ ID NO: 120279 - DNA, 15 bp, Homo sapiens
tcatgcctgtaatcc

SEQ ID NO: 120280 - DNA, 15 bp, Homo sapiens
ctcatgcctgtaatc

SEQ ID NO: 120281 - DNA, 15 bp, Homo sapiens
gctcatgcctgtaat

SEQ ID NO: 120282 - DNA, 15 bp, Homo sapiens
ggctcatgcctgtaa

SEQ ID NO: 120283 - DNA, 15 bp, Homo sapiens
cggtggctcatgcct

SEQ ID NO: 120284 - DNA, 15 bp, Homo sapiens
acggtggctcatgcc

SEQ ID NO: 120285 - DNA, 15 bp, Homo sapiens
cacggtggctcatgc

SEQ ID NO: 120286 - DNA, 15 bp, Homo sapiens
gcacggtggctcatg

SEQ ID NO: 120287 - DNA, 15 bp, Homo sapiens
ggcacggtggctcat

SEQ ID NO: 120288 - DNA, 15 bp, Homo sapiens
ttttttgttcttttt

SEQ ID NO: 120289 - DNA, 15 bp, Homo sapiens
atataatatatatat

SEQ ID NO: 120290 - DNA, 15 bp, Homo sapiens
tatataatatatata

SEQ ID NO: 120291 - DNA, 15 bp, Homo sapiens
atatataatatatat

SEQ ID NO: 120292 - DNA, 15 bp, Homo sapiens
tatattatatatata

SEQ ID NO: 120293 - DNA, 15 bp, Homo sapiens
tataatatatatata

SEQ ID NO: 120294 - DNA, 15 bp, Homo sapiens
tatatataatatata

SEQ ID NO: 120295 - DNA, 15 bp, Homo sapiens
atatatataatatat

SEQ ID NO: 120296 - DNA, 15 bp, Homo sapiens
tatatatataatata

SEQ ID NO: 120297 - DNA, 15 bp, Homo sapiens
ttatatatataatat

SEQ ID NO: 120298 - DNA, 15 bp, Homo sapiens
attatatatataata

SEQ ID NO: 120299 - DNA, 15 bp, Homo sapiens
tattatatatataat

SEQ ID NO: 120300 - DNA, 15 bp, Homo sapiens
atattatatatataa

SEQ ID NO: 120301 - DNA, 15 bp, Homo sapiens
atatattatatatat

SEQ ID NO: 120302 - DNA, 15 bp, Homo sapiens
tatatattatatata

SEQ ID NO: 120303 - DNA, 15 bp, Homo sapiens
tataatatattatat

SEQ ID NO: 120304 - DNA, 15 bp, Homo sapiens
atataatatattata

SEQ ID NO: 120305 - DNA, 15 bp, Homo sapiens
ataatatatatataa

SEQ ID NO: 120306 - DNA, 15 bp, Homo sapiens
atatatattatatat

SEQ ID NO: 120307 - DNA, 15 bp, Homo sapiens
tatatatattatata

SEQ ID NO: 120308 - DNA, 15 bp, Homo sapiens
atatatatattatat

SEQ ID NO: 120309 - DNA, 15 bp, Homo sapiens
tatatatatattata

SEQ ID NO: 120310 - DNA, 15 bp, Homo sapiens
ttatatatatattat

SEQ ID NO: 120311 - DNA, 15 bp, Homo sapiens
ttttttttgtatttt

SEQ ID NO: 120312 - DNA, 15 bp, Homo sapiens
tgcctcccaggttca

SEQ ID NO: 120313 - DNA, 15 bp, Homo sapiens
ctgcctcccaggttc

SEQ ID NO: 120314 - DNA, 15 bp, Homo sapiens
tctgcctcccaggtt

SEQ ID NO: 120315 - DNA, 15 bp, Homo sapiens
ctctgcctcccaggt

SEQ ID NO: 120316 - DNA, 15 bp, Homo sapiens
cctctgcctcccagg

SEQ ID NO: 120317 - DNA, 15 bp, Homo sapiens
tgggcctcagtttct

SEQ ID NO: 120318 - DNA, 15 bp, Homo sapiens
ctgggcctcagtttc

SEQ ID NO: 120319 - DNA, 15 bp, Homo sapiens
ctgcctcggcctccc

SEQ ID NO: 120320 - DNA, 15 bp, Homo sapiens
cctgcctcggcctcc

SEQ ID NO: 120321 - DNA, 15 bp, Homo sapiens
acccagctaattttt

SEQ ID NO: 120322 - DNA, 15 bp, Homo sapiens
cacccagctaatttt

SEQ ID NO: 120323 - DNA, 15 bp, Homo sapiens
acacccagctaattt

SEQ ID NO: 120324 - DNA, 15 bp, Homo sapiens
cacacccagctaatt

SEQ ID NO: 120325 - DNA, 15 bp, Homo sapiens
ccacacccagctaat

SEQ ID NO: 120326 - DNA, 15 bp, Homo sapiens
accacacccagctaa

SEQ ID NO: 120327 - DNA, 15 bp, Homo sapiens
caccacacccagcta

SEQ ID NO: 120328 - DNA, 15 bp, Homo sapiens
ccaccacacccagct

SEQ ID NO: 120329 - DNA, 15 bp, Homo sapiens
catctcggctcactg

SEQ ID NO: 120330 - DNA, 15 bp, Homo sapiens
ccatctcggctcact

SEQ ID NO: 120331 - DNA, 15 bp, Homo sapiens
gccatctcggctcac

SEQ ID NO: 120332 - DNA, 15 bp, Homo sapiens
ttcctttctttctct

SEQ ID NO: 120333 - DNA, 15 bp, Homo sapiens
tttcctttctttctc

SEQ ID NO: 120334 - DNA, 15 bp, Homo sapiens
aaagtgctgagatta

SEQ ID NO: 120335 - DNA, 15 bp, Homo sapiens
caaagtgctgagatt

SEQ ID NO: 120336 - DNA, 15 bp, Homo sapiens
ccaaagtgctgagat

SEQ ID NO: 120337 - DNA, 15 bp, Homo sapiens
gtgttagccaggatg

SEQ ID NO: 120338 - DNA, 15 bp, Homo sapiens
tttttttttgtattt

SEQ ID NO: 120339 - DNA, 15 bp, Homo sapiens
ttttttttttgtatt

SEQ ID NO: 120340 - DNA, 15 bp, Homo sapiens
tttttttttttgtat

SEQ ID NO: 120341 - DNA, 15 bp, Homo sapiens
ttttttttttttgta

SEQ ID NO: 120342 - DNA, 15 bp, Homo sapiens
taatttttttttttt

SEQ ID NO: 120343 - DNA, 15 bp, Homo sapiens
ctaattttttttttt

SEQ ID NO: 120344 - DNA, 15 bp, Homo sapiens
gctaatttttttttt

SEQ ID NO: 120345 - DNA, 15 bp, Homo sapiens
tgctctgtcacccag

SEQ ID NO: 120346 - DNA, 15 bp, Homo sapiens
ttgctctgtcaccca

SEQ ID NO: 120347 - DNA, 15 bp, Homo sapiens
cttgctctgtcaccc

SEQ ID NO: 120348 - DNA, 15 bp, Homo sapiens
tcttgctctgtcacc

SEQ ID NO: 120349 - DNA, 15 bp, Homo sapiens
aatatatatatatat

SEQ ID NO: 120350 - DNA, 15 bp, Homo sapiens
ccactgcacccggcc

SEQ ID NO: 120351 - DNA, 15 bp, Homo sapiens
cggggtttcaccatg

SEQ ID NO: 120352 - DNA, 15 bp, Homo sapiens
acggggtttcaccat

SEQ ID NO: 120353 - DNA, 15 bp, Homo sapiens
gacggggtttcacca

SEQ ID NO: 120354 - DNA, 15 bp, Homo sapiens
aggttcaagtgattc

SEQ ID NO: 120355 - DNA, 15 bp, Homo sapiens
caggttcaagtgatt

SEQ ID NO: 120356 - DNA, 15 bp, Homo sapiens
ccaggttcaagtgat

SEQ ID NO: 120357 - DNA, 15 bp, Homo sapiens
cccaggttcaagtga

SEQ ID NO: 120358 - DNA, 15 bp, Homo sapiens
catgtagcttctaaa

SEQ ID NO: 120359 - DNA, 15 bp, Homo sapiens
atgtagcttctaaat

SEQ ID NO: 120360 - DNA, 15 bp, Homo sapiens
tgtagcttctaaatc

SEQ ID NO: 120361 - DNA, 15 bp, Homo sapiens
gtagcttctaaatca

SEQ ID NO: 120362 - DNA, 15 bp, Homo sapiens
tagcttctaaatcaa

SEQ ID NO: 120363 - DNA, 15 bp, Homo sapiens
agcttctaaatcaac

SEQ ID NO: 120364 - DNA, 15 bp, Homo sapiens
gcttctaaatcaacg

SEQ ID NO: 120365 - DNA, 15 bp, Homo sapiens
cttctaaatcaacga

SEQ ID NO: 120366 - DNA, 15 bp, Homo sapiens
ttctaaatcaacgaa

SEQ ID NO: 120367 - DNA, 15 bp, Homo sapiens
tctaaatcaacgaac

SEQ ID NO: 120368 - DNA, 15 bp, Homo sapiens
ctaaatcaacgaact

SEQ ID NO: 120369 - DNA, 15 bp, Homo sapiens
taaatcaacgaactg

SEQ ID NO: 120370 - DNA, 15 bp, Homo sapiens
aaatcaacgaactga

SEQ ID NO: 120371 - DNA, 15 bp, Homo sapiens
aatcaacgaactgat

SEQ ID NO: 120372 - DNA, 15 bp, Homo sapiens
atcaacgaactgatt

SEQ ID NO: 120373 - DNA, 15 bp, Homo sapiens
tcaacgaactgattc

SEQ ID NO: 120374 - DNA, 15 bp, Homo sapiens
caacgaactgattcc

SEQ ID NO: 120375 - DNA, 15 bp, Homo sapiens
aacgaactgattcct

SEQ ID NO: 120376 - DNA, 15 bp, Homo sapiens
acgaactgattcctg

SEQ ID NO: 120377 - DNA, 15 bp, Homo sapiens
cgaactgattcctgg

SEQ ID NO: 120378 - DNA, 15 bp, Homo sapiens
gaactgattcctgga

SEQ ID NO: 120379 - DNA, 15 bp, Homo sapiens
aactgattcctggag

SEQ ID NO: 120380 - DNA, 15 bp, Homo sapiens
actgattcctggaga

SEQ ID NO: 120381 - DNA, 15 bp, Homo sapiens
ctgattcctggagag

SEQ ID NO: 120382 - DNA, 15 bp, Homo sapiens
tgattcctggagagc

SEQ ID NO: 120383 - DNA, 15 bp, Homo sapiens
gattcctggagagca

SEQ ID NO: 120384 - DNA, 15 bp, Homo sapiens
attcctggagagcag

SEQ ID NO: 120385 - DNA, 15 bp, Homo sapiens
ttcctggagagcagc

SEQ ID NO: 120386 - DNA, 15 bp, Homo sapiens
tcctggagagcagct

SEQ ID NO: 120387 - DNA, 15 bp, Homo sapiens
cctggagagcagctt

SEQ ID NO: 120388 - DNA, 15 bp, Homo sapiens
ctggagagcagcttc

SEQ ID NO: 120389 - DNA, 15 bp, Homo sapiens
tggagagcagcttct

SEQ ID NO: 120390 - DNA, 15 bp, Homo sapiens
ggagagcagcttctg

SEQ ID NO: 120391 - DNA, 15 bp, Homo sapiens
gagagcagcttctgt

SEQ ID NO: 120392 - DNA, 15 bp, Homo sapiens
agagcagcttctgta

SEQ ID NO: 120393 - DNA, 15 bp, Homo sapiens
gagcagcttctgtat

SEQ ID NO: 120394 - DNA, 15 bp, Homo sapiens
agcagcttctgtatg

SEQ ID NO: 120395 - DNA, 15 bp, Homo sapiens
gcagcttctgtatga

SEQ ID NO: 120396 - DNA, 15 bp, Homo sapiens
cagcttctgtatgag

SEQ ID NO: 120397 - DNA, 15 bp, Homo sapiens
agcttctgtatgaga

SEQ ID NO: 120398 - DNA, 15 bp, Homo sapiens
gcttctgtatgagaa

SEQ ID NO: 120399 - DNA, 15 bp, Homo sapiens
cttctgtatgagaaa

SEQ ID NO: 120400 - DNA, 15 bp, Homo sapiens
ttctgtatgagaaaa

SEQ ID NO: 120401 - DNA, 15 bp, Homo sapiens
tctgtatgagaaaaa

SEQ ID NO: 120402 - DNA, 15 bp, Homo sapiens
ctgtatgagaaaaat

SEQ ID NO: 120403 - DNA, 15 bp, Homo sapiens
tgtatgagaaaaatc

SEQ ID NO: 120404 - DNA, 15 bp, Homo sapiens
gtatgagaaaaatct

SEQ ID NO: 120405 - DNA, 15 bp, Homo sapiens
tatgagaaaaatcta

SEQ ID NO: 120406 - DNA, 15 bp, Homo sapiens
atgagaaaaatctag

SEQ ID NO: 120407 - DNA, 15 bp, Homo sapiens
tgagaaaaatctagc

SEQ ID NO: 120408 - DNA, 15 bp, Homo sapiens
gagaaaaatctagct

SEQ ID NO: 120409 - DNA, 15 bp, Homo sapiens
agaaaaatctagcta

SEQ ID NO: 120410 - DNA, 15 bp, Homo sapiens
gaaaaatctagctaa

SEQ ID NO: 120411 - DNA, 15 bp, Homo sapiens
aaaaatctagctaat

SEQ ID NO: 120412 - DNA, 15 bp, Homo sapiens
aaaatctagctaatt

SEQ ID NO: 120413 - DNA, 15 bp, Homo sapiens
aaatctagctaatta

SEQ ID NO: 120414 - DNA, 15 bp, Homo sapiens
aatctagctaattat

SEQ ID NO: 120415 - DNA, 15 bp, Homo sapiens
atctagctaattatt

SEQ ID NO: 120416 - DNA, 15 bp, Homo sapiens
tctagctaattattt

SEQ ID NO: 120417 - DNA, 15 bp, Homo sapiens
ctagctaattattta

SEQ ID NO: 120418 - DNA, 15 bp, Homo sapiens
tagctaattatttat

SEQ ID NO: 120419 - DNA, 15 bp, Homo sapiens
agctaattatttatt

SEQ ID NO: 120420 - DNA, 15 bp, Homo sapiens
gctaattatttattt

SEQ ID NO: 120421 - DNA, 15 bp, Homo sapiens
ctaattatttatttc

SEQ ID NO: 120422 - DNA, 15 bp, Homo sapiens
taattatttatttca

SEQ ID NO: 120423 - DNA, 15 bp, Homo sapiens
aattatttatttcag

SEQ ID NO: 120424 - DNA, 15 bp, Homo sapiens
attatttatttcagt

SEQ ID NO: 120425 - DNA, 15 bp, Homo sapiens
ttatttatttcagtg

SEQ ID NO: 120426 - DNA, 15 bp, Homo sapiens
tatttatttcagtgt

SEQ ID NO: 120427 - DNA, 15 bp, Homo sapiens
atttatttcagtgtc

SEQ ID NO: 120428 - DNA, 15 bp, Homo sapiens
tttatttcagtgtct

SEQ ID NO: 120429 - DNA, 15 bp, Homo sapiens
ttatttcagtgtctc

SEQ ID NO: 120430 - DNA, 15 bp, Homo sapiens
tatttcagtgtctct

SEQ ID NO: 120431 - DNA, 15 bp, Homo sapiens
atttcagtgtctctg

SEQ ID NO: 120432 - DNA, 15 bp, Homo sapiens
tttcagtgtctctgg

SEQ ID NO: 120433 - DNA, 15 bp, Homo sapiens
ttcagtgtctctgga

SEQ ID NO: 120434 - DNA, 15 bp, Homo sapiens
tcagtgtctctggaa

SEQ ID NO: 120435 - DNA, 15 bp, Homo sapiens
cagtgtctctggaat

SEQ ID NO: 120436 - DNA, 15 bp, Homo sapiens
agtgtctctggaatg

SEQ ID NO: 120437 - DNA, 15 bp, Homo sapiens
gtgtctctggaatgc

SEQ ID NO: 120438 - DNA, 15 bp, Homo sapiens
tgtctctggaatgca

SEQ ID NO: 120439 - DNA, 15 bp, Homo sapiens
gtctctggaatgcaa

SEQ ID NO: 120440 - DNA, 15 bp, Homo sapiens
tctctggaatgcaag

SEQ ID NO: 120441 - DNA, 15 bp, Homo sapiens
ctctggaatgcaagc

SEQ ID NO: 120442 - DNA, 15 bp, Homo sapiens
tctggaatgcaagct

SEQ ID NO: 120443 - DNA, 15 bp, Homo sapiens
ctggaatgcaagctc

SEQ ID NO: 120444 - DNA, 15 bp, Homo sapiens
tggaatgcaagctct

SEQ ID NO: 120445 - DNA, 15 bp, Homo sapiens
ggaatgcaagctctg

SEQ ID NO: 120446 - DNA, 15 bp, Homo sapiens
gaatgcaagctctgt

SEQ ID NO: 120447 - DNA, 15 bp, Homo sapiens
aatgcaagctctgtc

SEQ ID NO: 120448 - DNA, 15 bp, Homo sapiens
atgcaagctctgtcc

SEQ ID NO: 120449 - DNA, 15 bp, Homo sapiens
tgcaagctctgtcct

SEQ ID NO: 120450 - DNA, 15 bp, Homo sapiens
gcaagctctgtcctg

SEQ ID NO: 120451 - DNA, 15 bp, Homo sapiens
caagctctgtcctga

SEQ ID NO: 120452 - DNA, 15 bp, Homo sapiens
aagctctgtcctgag

SEQ ID NO: 120453 - DNA, 15 bp, Homo sapiens
agctctgtcctgagc

SEQ ID NO: 120454 - DNA, 15 bp, Homo sapiens
gctctgtcctgagcc

SEQ ID NO: 120455 - DNA, 15 bp, Homo sapiens
ctctgtcctgagcca

SEQ ID NO: 120456 - DNA, 15 bp, Homo sapiens
tctgtcctgagccac

SEQ ID NO: 120457 - DNA, 15 bp, Homo sapiens
ctgtcctgagccact

SEQ ID NO: 120458 - DNA, 15 bp, Homo sapiens
tgtcctgagccactt

SEQ ID NO: 120459 - DNA, 15 bp, Homo sapiens
gtcctgagccactta

SEQ ID NO: 120460 - DNA, 15 bp, Homo sapiens
tcctgagccacttag

SEQ ID NO: 120461 - DNA, 15 bp, Homo sapiens
cctgagccacttaga

SEQ ID NO: 120462 - DNA, 15 bp, Homo sapiens
ctgagccacttagaa

SEQ ID NO: 120463 - DNA, 15 bp, Homo sapiens
tgagccacttagaaa

SEQ ID NO: 120464 - DNA, 15 bp, Homo sapiens
gagccacttagaaaa

SEQ ID NO: 120465 - DNA, 15 bp, Homo sapiens
agccacttagaaaac

SEQ ID NO: 120466 - DNA, 15 bp, Homo sapiens
gccacttagaaaaca

SEQ ID NO: 120467 - DNA, 15 bp, Homo sapiens
ccacttagaaaacaa

SEQ ID NO: 120468 - DNA, 15 bp, Homo sapiens
cacttagaaaacaat

SEQ ID NO: 120469 - DNA, 15 bp, Homo sapiens
acttagaaaacaatt

SEQ ID NO: 120470 - DNA, 15 bp, Homo sapiens
cttagaaaacaattt

SEQ ID NO: 120471 - DNA, 15 bp, Homo sapiens
ttagaaaacaatttg

SEQ ID NO: 120472 - DNA, 15 bp, Homo sapiens
tagaaaacaatttgg

SEQ ID NO: 120473 - DNA, 15 bp, Homo sapiens
agaaaacaatttggg

SEQ ID NO: 120474 - DNA, 15 bp, Homo sapiens
gaaaacaatttggga

SEQ ID NO: 120475 - DNA, 15 bp, Homo sapiens
aaaacaatttgggat

SEQ ID NO: 120476 - DNA, 15 bp, Homo sapiens
aaacaatttgggatg

SEQ ID NO: 120477 - DNA, 15 bp, Homo sapiens
aacaatttgggatga

SEQ ID NO: 120478 - DNA, 15 bp, Homo sapiens
acaatttgggatgac

SEQ ID NO: 120479 - DNA, 15 bp, Homo sapiens
caatttgggatgaca

SEQ ID NO: 120480 - DNA, 15 bp, Homo sapiens
aatttgggatgacaa

SEQ ID NO: 120481 - DNA, 15 bp, Homo sapiens
atttgggatgacaag

SEQ ID NO: 120482 - DNA, 15 bp, Homo sapiens
tttgggatgacaagc

SEQ ID NO: 120483 - DNA, 15 bp, Homo sapiens
ttgggatgacaagca

SEQ ID NO: 120484 - DNA, 15 bp, Homo sapiens
tgggatgacaagcat

SEQ ID NO: 120485 - DNA, 15 bp, Homo sapiens
gggatgacaagcatg

SEQ ID NO: 120486 - DNA, 15 bp, Homo sapiens
ggatgacaagcatgt

SEQ ID NO: 120487 - DNA, 15 bp, Homo sapiens
gatgacaagcatgtg

SEQ ID NO: 120488 - DNA, 15 bp, Homo sapiens
atgacaagcatgtgt

SEQ ID NO: 120489 - DNA, 15 bp, Homo sapiens
tgacaagcatgtgtc

SEQ ID NO: 120490 - DNA, 15 bp, Homo sapiens
gacaagcatgtgtct

SEQ ID NO: 120491 - DNA, 15 bp, Homo sapiens
acaagcatgtgtctc

SEQ ID NO: 120492 - DNA, 15 bp, Homo sapiens
caagcatgtgtctca

SEQ ID NO: 120493 - DNA, 15 bp, Homo sapiens
aagcatgtgtctcac

SEQ ID NO: 120494 - DNA, 15 bp, Homo sapiens
agcatgtgtctcaca

SEQ ID NO: 120495 - DNA, 15 bp, Homo sapiens
gcatgtgtctcacaa

SEQ ID NO: 120496 - DNA, 15 bp, Homo sapiens
catgtgtctcacaat

SEQ ID NO: 120497 - DNA, 15 bp, Homo sapiens
atgtgtctcacaatg

SEQ ID NO: 120498 - DNA, 15 bp, Homo sapiens
tgtgtctcacaatgc

SEQ ID NO: 120499 - DNA, 15 bp, Homo sapiens
gtgtctcacaatgct

SEQ ID NO: 120500 - DNA, 15 bp, Homo sapiens
tgtctcacaatgctg

SEQ ID NO: 120501 - DNA, 15 bp, Homo sapiens
gtctcacaatgctgc

SEQ ID NO: 120502 - DNA, 15 bp, Homo sapiens
tctcacaatgctgct

SEQ ID NO: 120503 - DNA, 15 bp, Homo sapiens
ctcacaatgctgctc

SEQ ID NO: 120504 - DNA, 15 bp, Homo sapiens
tcacaatgctgctct

SEQ ID NO: 120505 - DNA, 15 bp, Homo sapiens
cacaatgctgctctg

SEQ ID NO: 120506 - DNA, 15 bp, Homo sapiens
acaatgctgctctgg

SEQ ID NO: 120507 - DNA, 15 bp, Homo sapiens
caatgctgctctggt

SEQ ID NO: 120508 - DNA, 15 bp, Homo sapiens
aatgctgctctggtt

SEQ ID NO: 120509 - DNA, 15 bp, Homo sapiens
atgctgctctggttg

SEQ ID NO: 120510 - DNA, 15 bp, Homo sapiens
tgctgctctggttgc

SEQ ID NO: 120511 - DNA, 15 bp, Homo sapiens
gctgctctggttgcc

SEQ ID NO: 120512 - DNA, 15 bp, Homo sapiens
ctgctctggttgcca

SEQ ID NO: 120513 - DNA, 15 bp, Homo sapiens
tgctctggttgccag

SEQ ID NO: 120514 - DNA, 15 bp, Homo sapiens
gctctggttgccagt

SEQ ID NO: 120515 - DNA, 15 bp, Homo sapiens
ctctggttgccagtg

SEQ ID NO: 120516 - DNA, 15 bp, Homo sapiens
tctggttgccagtgc

SEQ ID NO: 120517 - DNA, 15 bp, Homo sapiens
ctggttgccagtgct

SEQ ID NO: 120518 - DNA, 15 bp, Homo sapiens
tggttgccagtgctg

SEQ ID NO: 120519 - DNA, 15 bp, Homo sapiens
ggttgccagtgctgt

SEQ ID NO: 120520 - DNA, 15 bp, Homo sapiens
gttgccagtgctgtg

SEQ ID NO: 120521 - DNA, 15 bp, Homo sapiens
ttgccagtgctgtgc

SEQ ID NO: 120522 - DNA, 15 bp, Homo sapiens
tgccagtgctgtgct

SEQ ID NO: 120523 - DNA, 15 bp, Homo sapiens
gccagtgctgtgctg

SEQ ID NO: 120524 - DNA, 15 bp, Homo sapiens
ccagtgctgtgctgc

SEQ ID NO: 120525 - DNA, 15 bp, Homo sapiens
cagtgctgtgctgcc

SEQ ID NO: 120526 - DNA, 15 bp, Homo sapiens
agtgctgtgctgcca

SEQ ID NO: 120527 - DNA, 15 bp, Homo sapiens
gtgctgtgctgccag

SEQ ID NO: 120528 - DNA, 15 bp, Homo sapiens
tgctgtgctgccagt

SEQ ID NO: 120529 - DNA, 15 bp, Homo sapiens
gctgtgctgccagtt

SEQ ID NO: 120530 - DNA, 15 bp, Homo sapiens
ctgtgctgccagttg

SEQ ID NO: 120531 - DNA, 15 bp, Homo sapiens
tgtgctgccagttgt

SEQ ID NO: 120532 - DNA, 15 bp, Homo sapiens
gtgctgccagttgtc

SEQ ID NO: 120533 - DNA, 15 bp, Homo sapiens
tgctgccagttgtca

SEQ ID NO: 120534 - DNA, 15 bp, Homo sapiens
gctgccagttgtcat

SEQ ID NO: 120535 - DNA, 15 bp, Homo sapiens
ctgccagttgtcatc

SEQ ID NO: 120536 - DNA, 15 bp, Homo sapiens
tgccagttgtcatct

SEQ ID NO: 120537 - DNA, 15 bp, Homo sapiens
gccagttgtcatctt

SEQ ID NO: 120538 - DNA, 15 bp, Homo sapiens
ccagttgtcatcttt

SEQ ID NO: 120539 - DNA, 15 bp, Homo sapiens
cagttgtcatctttg

SEQ ID NO: 120540 - DNA, 15 bp, Homo sapiens
agttgtcatctttga

SEQ ID NO: 120541 - DNA, 15 bp, Homo sapiens
gttgtcatctttgaa

SEQ ID NO: 120542 - DNA, 15 bp, Homo sapiens
ttgtcatctttgaac

SEQ ID NO: 120543 - DNA, 15 bp, Homo sapiens
tgtcatctttgaaca

SEQ ID NO: 120544 - DNA, 15 bp, Homo sapiens
gtcatctttgaacaa

SEQ ID NO: 120545 - DNA, 15 bp, Homo sapiens
tcatctttgaacaaa

SEQ ID NO: 120546 - DNA, 15 bp, Homo sapiens
catctttgaacaaac

SEQ ID NO: 120547 - DNA, 15 bp, Homo sapiens
atctttgaacaaact

SEQ ID NO: 120548 - DNA, 15 bp, Homo sapiens
tctttgaacaaactg

SEQ ID NO: 120549 - DNA, 15 bp, Homo sapiens
ctttgaacaaactga

SEQ ID NO: 120550 - DNA, 15 bp, Homo sapiens
tttgaacaaactgat

SEQ ID NO: 120551 - DNA, 15 bp, Homo sapiens
ttgaacaaactgatg

SEQ ID NO: 120552 - DNA, 15 bp, Homo sapiens
tgaacaaactgatgc

SEQ ID NO: 120553 - DNA, 15 bp, Homo sapiens
gaacaaactgatgca

SEQ ID NO: 120554 - DNA, 15 bp, Homo sapiens
aacaaactgatgcag

SEQ ID NO: 120555 - DNA, 15 bp, Homo sapiens
acaaactgatgcagt

SEQ ID NO: 120556 - DNA, 15 bp, Homo sapiens
caaactgatgcagtg

SEQ ID NO: 120557 - DNA, 15 bp, Homo sapiens
aaactgatgcagtgc

SEQ ID NO: 120558 - DNA, 15 bp, Homo sapiens
aactgatgcagtgct

SEQ ID NO: 120559 - DNA, 15 bp, Homo sapiens
actgatgcagtgctg

SEQ ID NO: 120560 - DNA, 15 bp, Homo sapiens
ctgatgcagtgctgg

SEQ ID NO: 120561 - DNA, 15 bp, Homo sapiens
tgatgcagtgctggt

SEQ ID NO: 120562 - DNA, 15 bp, Homo sapiens
gatgcagtgctggtt

SEQ ID NO: 120563 - DNA, 15 bp, Homo sapiens
atgcagtgctggttt

SEQ ID NO: 120564 - DNA, 15 bp, Homo sapiens
tgcagtgctggttta

SEQ ID NO: 120565 - DNA, 15 bp, Homo sapiens
gcagtgctggtttaa

SEQ ID NO: 120566 - DNA, 15 bp, Homo sapiens
cagtgctggtttaac

SEQ ID NO: 120567 - DNA, 15 bp, Homo sapiens
agtgctggtttaact

SEQ ID NO: 120568 - DNA, 15 bp, Homo sapiens
gtgctggtttaactc

SEQ ID NO: 120569 - DNA, 15 bp, Homo sapiens
tgctggtttaactct

SEQ ID NO: 120570 - DNA, 15 bp, Homo sapiens
gctggtttaactctt

SEQ ID NO: 120571 - DNA, 15 bp, Homo sapiens
ctggtttaactcttc

SEQ ID NO: 120572 - DNA, 15 bp, Homo sapiens
tggtttaactcttcc

SEQ ID NO: 120573 - DNA, 15 bp, Homo sapiens
ggtttaactcttcct

SEQ ID NO: 120574 - DNA, 15 bp, Homo sapiens
gtttaactcttcctc

SEQ ID NO: 120575 - DNA, 15 bp, Homo sapiens
tttaactcttcctct

SEQ ID NO: 120576 - DNA, 15 bp, Homo sapiens
ttaactcttcctctt

SEQ ID NO: 120577 - DNA, 15 bp, Homo sapiens
taactcttcctcttt

SEQ ID NO: 120578 - DNA, 15 bp, Homo sapiens
aactcttcctctttt

SEQ ID NO: 120579 - DNA, 15 bp, Homo sapiens
actcttcctcttttt

SEQ ID NO: 120580 - DNA, 15 bp, Homo sapiens
ctcttcctctttttg

SEQ ID NO: 120581 - DNA, 15 bp, Homo sapiens
tcttcctctttttgg

SEQ ID NO: 120582 - DNA, 15 bp, Homo sapiens
cttcctctttttgga

SEQ ID NO: 120583 - DNA, 15 bp, Homo sapiens
ttcctctttttggag

SEQ ID NO: 120584 - DNA, 15 bp, Homo sapiens
tcctctttttggagt

SEQ ID NO: 120585 - DNA, 15 bp, Homo sapiens
cctctttttggagta

SEQ ID NO: 120586 - DNA, 15 bp, Homo sapiens
ctctttttggagtaa

SEQ ID NO: 120587 - DNA, 15 bp, Homo sapiens
tctttttggagtaag

SEQ ID NO: 120588 - DNA, 15 bp, Homo sapiens
ctttttggagtaaga

SEQ ID NO: 120589 - DNA, 15 bp, Homo sapiens
tttttggagtaagaa

SEQ ID NO: 120590 - DNA, 15 bp, Homo sapiens
ttttggagtaagaaa

SEQ ID NO: 120591 - DNA, 15 bp, Homo sapiens
tttggagtaagaaac

SEQ ID NO: 120592 - DNA, 15 bp, Homo sapiens
ttggagtaagaaact

SEQ ID NO: 120593 - DNA, 15 bp, Homo sapiens
tggagtaagaaactt

SEQ ID NO: 120594 - DNA, 15 bp, Homo sapiens
ggagtaagaaacttt

SEQ ID NO: 120595 - DNA, 15 bp, Homo sapiens
gagtaagaaactttg

SEQ ID NO: 120596 - DNA, 15 bp, Homo sapiens
agtaagaaactttgg

SEQ ID NO: 120597 - DNA, 15 bp, Homo sapiens
gtaagaaactttgga

SEQ ID NO: 120598 - DNA, 15 bp, Homo sapiens
taagaaactttggag

SEQ ID NO: 120599 - DNA, 15 bp, Homo sapiens
aagaaactttggagg

SEQ ID NO: 120600 - DNA, 15 bp, Homo sapiens
agaaactttggaggc

SEQ ID NO: 120601 - DNA, 15 bp, Homo sapiens
gaaactttggaggcc

SEQ ID NO: 120602 - DNA, 15 bp, Homo sapiens
aaactttggaggcct

SEQ ID NO: 120603 - DNA, 15 bp, Homo sapiens
aactttggaggcctg

SEQ ID NO: 120604 - DNA, 15 bp, Homo sapiens
actttggaggcctgt

SEQ ID NO: 120605 - DNA, 15 bp, Homo sapiens
ctttggaggcctgtg

SEQ ID NO: 120606 - DNA, 15 bp, Homo sapiens
tttggaggcctgtgt

SEQ ID NO: 120607 - DNA, 15 bp, Homo sapiens
ttggaggcctgtgtc

SEQ ID NO: 120608 - DNA, 15 bp, Homo sapiens
tggaggcctgtgtcc

SEQ ID NO: 120609 - DNA, 15 bp, Homo sapiens
ggaggcctgtgtcct

SEQ ID NO: 120610 - DNA, 15 bp, Homo sapiens
gaggcctgtgtcctt

SEQ ID NO: 120611 - DNA, 15 bp, Homo sapiens
aggcctgtgtccttc

SEQ ID NO: 120612 - DNA, 15 bp, Homo sapiens
ggcctgtgtccttct

SEQ ID NO: 120613 - DNA, 15 bp, Homo sapiens
gcctgtgtccttcta

SEQ ID NO: 120614 - DNA, 15 bp, Homo sapiens
cctgtgtccttctag

SEQ ID NO: 120615 - DNA, 15 bp, Homo sapiens
ctgtgtccttctaga

SEQ ID NO: 120616 - DNA, 15 bp, Homo sapiens
tgtgtccttctagaa

SEQ ID NO: 120617 - DNA, 15 bp, Homo sapiens
gtgtccttctagaag

SEQ ID NO: 120618 - DNA, 15 bp, Homo sapiens
tgtccttctagaagt

SEQ ID NO: 120619 - DNA, 15 bp, Homo sapiens
gtccttctagaagtt

SEQ ID NO: 120620 - DNA, 15 bp, Homo sapiens
tccttctagaagttt

SEQ ID NO: 120621 - DNA, 15 bp, Homo sapiens
ccttctagaagtttg

SEQ ID NO: 120622 - DNA, 15 bp, Homo sapiens
cttctagaagtttgc

SEQ ID NO: 120623 - DNA, 15 bp, Homo sapiens
ttctagaagtttgct

SEQ ID NO: 120624 - DNA, 15 bp, Homo sapiens
tctagaagtttgctg

SEQ ID NO: 120625 - DNA, 15 bp, Homo sapiens
ctagaagtttgctga

SEQ ID NO: 120626 - DNA, 15 bp, Homo sapiens
tagaagtttgctgag

SEQ ID NO: 120627 - DNA, 15 bp, Homo sapiens
agaagtttgctgagc

SEQ ID NO: 120628 - DNA, 15 bp, Homo sapiens
gaagtttgctgagca

SEQ ID NO: 120629 - DNA, 15 bp, Homo sapiens
aagtttgctgagcaa

SEQ ID NO: 120630 - DNA, 15 bp, Homo sapiens
agtttgctgagcaaa

SEQ ID NO: 120631 - DNA, 15 bp, Homo sapiens
gtttgctgagcaaat

SEQ ID NO: 120632 - DNA, 15 bp, Homo sapiens
tttgctgagcaaatg

SEQ ID NO: 120633 - DNA, 15 bp, Homo sapiens
ttgctgagcaaatgg

SEQ ID NO: 120634 - DNA, 15 bp, Homo sapiens
tgctgagcaaatggt

SEQ ID NO: 120635 - DNA, 15 bp, Homo sapiens
gctgagcaaatggta

SEQ ID NO: 120636 - DNA, 15 bp, Homo sapiens
ctgagcaaatggtaa

SEQ ID NO: 120637 - DNA, 15 bp, Homo sapiens
tgagcaaatggtaag

SEQ ID NO: 120638 - DNA, 15 bp, Homo sapiens
gagcaaatggtaagg

SEQ ID NO: 120639 - DNA, 15 bp, Homo sapiens
agcaaatggtaagga

SEQ ID NO: 120640 - DNA, 15 bp, Homo sapiens
gcaaatggtaaggaa

SEQ ID NO: 120641 - DNA, 15 bp, Homo sapiens
caaatggtaaggaaa

SEQ ID NO: 120642 - DNA, 15 bp, Homo sapiens
aaatggtaaggaaaa

SEQ ID NO: 120643 - DNA, 15 bp, Homo sapiens
aatggtaaggaaaag

SEQ ID NO: 120644 - DNA, 15 bp, Homo sapiens
atggtaaggaaaaga

SEQ ID NO: 120645 - DNA, 15 bp, Homo sapiens
tggtaaggaaaagaa

SEQ ID NO: 120646 - DNA, 15 bp, Homo sapiens
ggtaaggaaaagaaa

SEQ ID NO: 120647 - DNA, 15 bp, Homo sapiens
gtaaggaaaagaaat

SEQ ID NO: 120648 - DNA, 15 bp, Homo sapiens
taaggaaaagaaata

SEQ ID NO: 120649 - DNA, 15 bp, Homo sapiens
aaggaaaagaaatag

SEQ ID NO: 120650 - DNA, 15 bp, Homo sapiens
aggaaaagaaatagg

SEQ ID NO: 120651 - DNA, 15 bp, Homo sapiens
ggaaaagaaataggt

SEQ ID NO: 120652 - DNA, 15 bp, Homo sapiens
gaaaagaaataggtc

SEQ ID NO: 120653 - DNA, 15 bp, Homo sapiens
aaaagaaataggtcc

SEQ ID NO: 120654 - DNA, 15 bp, Homo sapiens
aaagaaataggtcct

SEQ ID NO: 120655 - DNA, 15 bp, Homo sapiens
aagaaataggtccta

SEQ ID NO: 120656 - DNA, 15 bp, Homo sapiens
agaaataggtcctaa

SEQ ID NO: 120657 - DNA, 15 bp, Homo sapiens
gaaataggtcctaag

SEQ ID NO: 120658 - DNA, 15 bp, Homo sapiens
aaataggtcctaagg

SEQ ID NO: 120659 - DNA, 15 bp, Homo sapiens
aataggtcctaaggc

SEQ ID NO: 120660 - DNA, 15 bp, Homo sapiens
ataggtcctaaggct

SEQ ID NO: 120661 - DNA, 15 bp, Homo sapiens
taggtcctaaggctt

SEQ ID NO: 120662 - DNA, 15 bp, Homo sapiens
aggtcctaaggcttg

SEQ ID NO: 120663 - DNA, 15 bp, Homo sapiens
ggtcctaaggcttga

SEQ ID NO: 120664 - DNA, 15 bp, Homo sapiens
gtcctaaggcttgac

SEQ ID NO: 120665 - DNA, 15 bp, Homo sapiens
tcctaaggcttgact

SEQ ID NO: 120666 - DNA, 15 bp, Homo sapiens
cctaaggcttgacta

SEQ ID NO: 120667 - DNA, 15 bp, Homo sapiens
ctaaggcttgactat

SEQ ID NO: 120668 - DNA, 15 bp, Homo sapiens
taaggcttgactatt

SEQ ID NO: 120669 - DNA, 15 bp, Homo sapiens
aaggcttgactattt

SEQ ID NO: 120670 - DNA, 15 bp, Homo sapiens
aggcttgactatttc

SEQ ID NO: 120671 - DNA, 15 bp, Homo sapiens
ggcttgactatttca

SEQ ID NO: 120672 - DNA, 15 bp, Homo sapiens
gcttgactatttcag

SEQ ID NO: 120673 - DNA, 15 bp, Homo sapiens
cttgactatttcaga

SEQ ID NO: 120674 - DNA, 15 bp, Homo sapiens
ttgactatttcagag

SEQ ID NO: 120675 - DNA, 15 bp, Homo sapiens
tgactatttcagaga

SEQ ID NO: 120676 - DNA, 15 bp, Homo sapiens
gactatttcagagaa

SEQ ID NO: 120677 - DNA, 15 bp, Homo sapiens
actatttcagagaat

SEQ ID NO: 120678 - DNA, 15 bp, Homo sapiens
ctatttcagagaatt

SEQ ID NO: 120679 - DNA, 15 bp, Homo sapiens
tatttcagagaattt

SEQ ID NO: 120680 - DNA, 15 bp, Homo sapiens
atttcagagaatttc

SEQ ID NO: 120681 - DNA, 15 bp, Homo sapiens
tttcagagaatttct

SEQ ID NO: 120682 - DNA, 15 bp, Homo sapiens
ttcagagaatttctt

SEQ ID NO: 120683 - DNA, 15 bp, Homo sapiens
tcagagaatttcttg

SEQ ID NO: 120684 - DNA, 15 bp, Homo sapiens
cagagaatttcttga

SEQ ID NO: 120685 - DNA, 15 bp, Homo sapiens
agagaatttcttgat

SEQ ID NO: 120686 - DNA, 15 bp, Homo sapiens
gagaatttcttgatt

SEQ ID NO: 120687 - DNA, 15 bp, Homo sapiens
agaatttcttgattt

SEQ ID NO: 120688 - DNA, 15 bp, Homo sapiens
gaatttcttgattta

SEQ ID NO: 120689 - DNA, 15 bp, Homo sapiens
aatttcttgatttat

SEQ ID NO: 120690 - DNA, 15 bp, Homo sapiens
atttcttgatttatt

SEQ ID NO: 120691 - DNA, 15 bp, Homo sapiens
tttcttgatttattg

SEQ ID NO: 120692 - DNA, 15 bp, Homo sapiens
ttcttgatttattgg

SEQ ID NO: 120693 - DNA, 15 bp, Homo sapiens
tcttgatttattgga

SEQ ID NO: 120694 - DNA, 15 bp, Homo sapiens
cttgatttattggac

SEQ ID NO: 120695 - DNA, 15 bp, Homo sapiens
ttgatttattggact

SEQ ID NO: 120696 - DNA, 15 bp, Homo sapiens
tgatttattggactg

SEQ ID NO: 120697 - DNA, 15 bp, Homo sapiens
gatttattggactgt

SEQ ID NO: 120698 - DNA, 15 bp, Homo sapiens
atttattggactgtc

SEQ ID NO: 120699 - DNA, 15 bp, Homo sapiens
tttattggactgtca

SEQ ID NO: 120700 - DNA, 15 bp, Homo sapiens
ttattggactgtcaa

SEQ ID NO: 120701 - DNA, 15 bp, Homo sapiens
tattggactgtcaat

SEQ ID NO: 120702 - DNA, 15 bp, Homo sapiens
attggactgtcaatg

SEQ ID NO: 120703 - DNA, 15 bp, Homo sapiens
ttggactgtcaatga

SEQ ID NO: 120704 - DNA, 15 bp, Homo sapiens
tggactgtcaatgaa

SEQ ID NO: 120705 - DNA, 15 bp, Homo sapiens
ggactgtcaatgaat

SEQ ID NO: 120706 - DNA, 15 bp, Homo sapiens
gactgtcaatgaatg

SEQ ID NO: 120707 - DNA, 15 bp, Homo sapiens
actgtcaatgaatga

SEQ ID NO: 120708 - DNA, 15 bp, Homo sapiens
ctgtcaatgaatgaa

SEQ ID NO: 120709 - DNA, 15 bp, Homo sapiens
tgtcaatgaatgaat

SEQ ID NO: 120710 - DNA, 15 bp, Homo sapiens
gtcaatgaatgaatt

SEQ ID NO: 120711 - DNA, 15 bp, Homo sapiens
tcaatgaatgaattg

SEQ ID NO: 120712 - DNA, 15 bp, Homo sapiens
caatgaatgaattgg

SEQ ID NO: 120713 - DNA, 15 bp, Homo sapiens
aatgaatgaattgga

SEQ ID NO: 120714 - DNA, 15 bp, Homo sapiens
atgaatgaattggaa

SEQ ID NO: 120715 - DNA, 15 bp, Homo sapiens
tgaatgaattggaat

SEQ ID NO: 120716 - DNA, 15 bp, Homo sapiens
gaatgaattggaata

SEQ ID NO: 120717 - DNA, 15 bp, Homo sapiens
aatgaattggaatac

SEQ ID NO: 120718 - DNA, 15 bp, Homo sapiens
atgaattggaataca

SEQ ID NO: 120719 - DNA, 15 bp, Homo sapiens
tgaattggaatacat

SEQ ID NO: 120720 - DNA, 15 bp, Homo sapiens
gaattggaatacata

SEQ ID NO: 120721 - DNA, 15 bp, Homo sapiens
aattggaatacatag

SEQ ID NO: 120722 - DNA, 15 bp, Homo sapiens
attggaatacatagt

SEQ ID NO: 120723 - DNA, 15 bp, Homo sapiens
ttggaatacatagtg

SEQ ID NO: 120724 - DNA, 15 bp, Homo sapiens
tggaatacatagtgg

SEQ ID NO: 120725 - DNA, 15 bp, Homo sapiens
ggaatacatagtggt

SEQ ID NO: 120726 - DNA, 15 bp, Homo sapiens
gaatacatagtggta

SEQ ID NO: 120727 - DNA, 15 bp, Homo sapiens
aatacatagtggtag

SEQ ID NO: 120728 - DNA, 15 bp, Homo sapiens
atacatagtggtagg

SEQ ID NO: 120729 - DNA, 15 bp, Homo sapiens
tacatagtggtaggc

SEQ ID NO: 120730 - DNA, 15 bp, Homo sapiens
acatagtggtaggct

SEQ ID NO: 120731 - DNA, 15 bp, Homo sapiens
catagtggtaggctg

SEQ ID NO: 120732 - DNA, 15 bp, Homo sapiens
atagtggtaggctgt

SEQ ID NO: 120733 - DNA, 15 bp, Homo sapiens
tagtggtaggctgtc

SEQ ID NO: 120734 - DNA, 15 bp, Homo sapiens
agtggtaggctgtct

SEQ ID NO: 120735 - DNA, 15 bp, Homo sapiens
gtggtaggctgtctt

SEQ ID NO: 120736 - DNA, 15 bp, Homo sapiens
tggtaggctgtcttt

SEQ ID NO: 120737 - DNA, 15 bp, Homo sapiens
ggtaggctgtctttt

SEQ ID NO: 120738 - DNA, 15 bp, Homo sapiens
gtaggctgtcttttc

SEQ ID NO: 120739 - DNA, 15 bp, Homo sapiens
taggctgtcttttct

SEQ ID NO: 120740 - DNA, 15 bp, Homo sapiens
aggctgtcttttctt

SEQ ID NO: 120741 - DNA, 15 bp, Homo sapiens
ggctgtcttttcttc

SEQ ID NO: 120742 - DNA, 15 bp, Homo sapiens
gctgtcttttcttct

SEQ ID NO: 120743 - DNA, 15 bp, Homo sapiens
ctgtcttttcttctc

SEQ ID NO: 120744 - DNA, 15 bp, Homo sapiens
tgtcttttcttctca

SEQ ID NO: 120745 - DNA, 15 bp, Homo sapiens
gtcttttcttctcag

SEQ ID NO: 120746 - DNA, 15 bp, Homo sapiens
tcttttcttctcaga

SEQ ID NO: 120747 - DNA, 15 bp, Homo sapiens
cttttcttctcagac

SEQ ID NO: 120748 - DNA, 15 bp, Homo sapiens
ttttcttctcagaca

SEQ ID NO: 120749 - DNA, 15 bp, Homo sapiens
tttcttctcagacac

SEQ ID NO: 120750 - DNA, 15 bp, Homo sapiens
ttcttctcagacact

SEQ ID NO: 120751 - DNA, 15 bp, Homo sapiens
tcttctcagacactg

SEQ ID NO: 120752 - DNA, 15 bp, Homo sapiens
cttctcagacactgc

SEQ ID NO: 120753 - DNA, 15 bp, Homo sapiens
ttctcagacactgca

SEQ ID NO: 120754 - DNA, 15 bp, Homo sapiens
tctcagacactgcaa

SEQ ID NO: 120755 - DNA, 15 bp, Homo sapiens
ctcagacactgcaat

SEQ ID NO: 120756 - DNA, 15 bp, Homo sapiens
tcagacactgcaatt

SEQ ID NO: 120757 - DNA, 15 bp, Homo sapiens
cagacactgcaattt

SEQ ID NO: 120758 - DNA, 15 bp, Homo sapiens
agacactgcaatttc

SEQ ID NO: 120759 - DNA, 15 bp, Homo sapiens
gacactgcaatttcc

SEQ ID NO: 120760 - DNA, 15 bp, Homo sapiens
acactgcaatttcct

SEQ ID NO: 120761 - DNA, 15 bp, Homo sapiens
cactgcaatttcctc

SEQ ID NO: 120762 - DNA, 15 bp, Homo sapiens
actgcaatttcctcc

SEQ ID NO: 120763 - DNA, 15 bp, Homo sapiens
ctgcaatttcctcca

SEQ ID NO: 120764 - DNA, 15 bp, Homo sapiens
tgcaatttcctccaa

SEQ ID NO: 120765 - DNA, 15 bp, Homo sapiens
gcaatttcctccaat

SEQ ID NO: 120766 - DNA, 15 bp, Homo sapiens
caatttcctccaatc

SEQ ID NO: 120767 - DNA, 15 bp, Homo sapiens
aatttcctccaatct

SEQ ID NO: 120768 - DNA, 15 bp, Homo sapiens
atttcctccaatctc

SEQ ID NO: 120769 - DNA, 15 bp, Homo sapiens
tttcctccaatctct

SEQ ID NO: 120770 - DNA, 15 bp, Homo sapiens
ttcctccaatctctt

SEQ ID NO: 120771 - DNA, 15 bp, Homo sapiens
tcctccaatctcttg

SEQ ID NO: 120772 - DNA, 15 bp, Homo sapiens
cctccaatctcttga

SEQ ID NO: 120773 - DNA, 15 bp, Homo sapiens
ctccaatctcttgac

SEQ ID NO: 120774 - DNA, 15 bp, Homo sapiens
tccaatctcttgact

SEQ ID NO: 120775 - DNA, 15 bp, Homo sapiens
ccaatctcttgactt

SEQ ID NO: 120776 - DNA, 15 bp, Homo sapiens
caatctcttgacttt

SEQ ID NO: 120777 - DNA, 15 bp, Homo sapiens
aatctcttgactttt

SEQ ID NO: 120778 - DNA, 15 bp, Homo sapiens
atctcttgacttttc

SEQ ID NO: 120779 - DNA, 15 bp, Homo sapiens
tctcttgacttttct

SEQ ID NO: 120780 - DNA, 15 bp, Homo sapiens
ctcttgacttttcta

SEQ ID NO: 120781 - DNA, 15 bp, Homo sapiens
tcttgacttttctag

SEQ ID NO: 120782 - DNA, 15 bp, Homo sapiens
cttgacttttctaga

SEQ ID NO: 120783 - DNA, 15 bp, Homo sapiens
ttgacttttctagaa

SEQ ID NO: 120784 - DNA, 15 bp, Homo sapiens
tgacttttctagaag

SEQ ID NO: 120785 - DNA, 15 bp, Homo sapiens
gacttttctagaagt

SEQ ID NO: 120786 - DNA, 15 bp, Homo sapiens
acttttctagaagtt

SEQ ID NO: 120787 - DNA, 15 bp, Homo sapiens
cttttctagaagttt

SEQ ID NO: 120788 - DNA, 15 bp, Homo sapiens
ttttctagaagtttt

SEQ ID NO: 120789 - DNA, 15 bp, Homo sapiens
tttctagaagtttta

SEQ ID NO: 120790 - DNA, 15 bp, Homo sapiens
ttctagaagttttaa

SEQ ID NO: 120791 - DNA, 15 bp, Homo sapiens
tctagaagttttaat

SEQ ID NO: 120792 - DNA, 15 bp, Homo sapiens
ctagaagttttaatc

SEQ ID NO: 120793 - DNA, 15 bp, Homo sapiens
tagaagttttaatcc

SEQ ID NO: 120794 - DNA, 15 bp, Homo sapiens
agaagttttaatcca

SEQ ID NO: 120795 - DNA, 15 bp, Homo sapiens
gaagttttaatccaa

SEQ ID NO: 120796 - DNA, 15 bp, Homo sapiens
aagttttaatccaag

SEQ ID NO: 120797 - DNA, 15 bp, Homo sapiens
agttttaatccaagt

SEQ ID NO: 120798 - DNA, 15 bp, Homo sapiens
gttttaatccaagtc

SEQ ID NO: 120799 - DNA, 15 bp, Homo sapiens
ttttaatccaagtcc

SEQ ID NO: 120800 - DNA, 15 bp, Homo sapiens
tttaatccaagtcct

SEQ ID NO: 120801 - DNA, 15 bp, Homo sapiens
ttaatccaagtcctt

SEQ ID NO: 120802 - DNA, 15 bp, Homo sapiens
taatccaagtccttg

SEQ ID NO: 120803 - DNA, 15 bp, Homo sapiens
aatccaagtccttgt

SEQ ID NO: 120804 - DNA, 15 bp, Homo sapiens
atccaagtccttgtt

SEQ ID NO: 120805 - DNA, 15 bp, Homo sapiens
tccaagtccttgttg

SEQ ID NO: 120806 - DNA, 15 bp, Homo sapiens
ccaagtccttgttgg

SEQ ID NO: 120807 - DNA, 15 bp, Homo sapiens
caagtccttgttggg

SEQ ID NO: 120808 - DNA, 15 bp, Homo sapiens
aagtccttgttgggt

SEQ ID NO: 120809 - DNA, 15 bp, Homo sapiens
agtccttgttgggtg

SEQ ID NO: 120810 - DNA, 15 bp, Homo sapiens
gtccttgttgggtgg

SEQ ID NO: 120811 - DNA, 15 bp, Homo sapiens
tccttgttgggtggt

SEQ ID NO: 120812 - DNA, 15 bp, Homo sapiens
ccttgttgggtggta

SEQ ID NO: 120813 - DNA, 15 bp, Homo sapiens
cttgttgggtggtag

SEQ ID NO: 120814 - DNA, 15 bp, Homo sapiens
ttgttgggtggtaga

SEQ ID NO: 120815 - DNA, 15 bp, Homo sapiens
tgttgggtggtagat

SEQ ID NO: 120816 - DNA, 15 bp, Homo sapiens
gttgggtggtagata

SEQ ID NO: 120817 - DNA, 15 bp, Homo sapiens
ttgggtggtagataa

SEQ ID NO: 120818 - DNA, 15 bp, Homo sapiens
tgggtggtagataaa

SEQ ID NO: 120819 - DNA, 15 bp, Homo sapiens
gggtggtagataaaa

SEQ ID NO: 120820 - DNA, 15 bp, Homo sapiens
ggtggtagataaaag

SEQ ID NO: 120821 - DNA, 15 bp, Homo sapiens
gtggtagataaaagg

SEQ ID NO: 120822 - DNA, 15 bp, Homo sapiens
tggtagataaaaggg

SEQ ID NO: 120823 - DNA, 15 bp, Homo sapiens
ggtagataaaagggt

SEQ ID NO: 120824 - DNA, 15 bp, Homo sapiens
gtagataaaagggta

SEQ ID NO: 120825 - DNA, 15 bp, Homo sapiens
tagataaaagggtat

SEQ ID NO: 120826 - DNA, 15 bp, Homo sapiens
agataaaagggtatt

SEQ ID NO: 120827 - DNA, 15 bp, Homo sapiens
gataaaagggtattg

SEQ ID NO: 120828 - DNA, 15 bp, Homo sapiens
ataaaagggtattgt

SEQ ID NO: 120829 - DNA, 15 bp, Homo sapiens
taaaagggtattgtt

SEQ ID NO: 120830 - DNA, 15 bp, Homo sapiens
aaaagggtattgttc

SEQ ID NO: 120831 - DNA, 15 bp, Homo sapiens
aaagggtattgttct

SEQ ID NO: 120832 - DNA, 15 bp, Homo sapiens
aagggtattgttcta

SEQ ID NO: 120833 - DNA, 15 bp, Homo sapiens
agggtattgttctac

SEQ ID NO: 120834 - DNA, 15 bp, Homo sapiens
gggtattgttctact

SEQ ID NO: 120835 - DNA, 15 bp, Homo sapiens
ggtattgttctacta

SEQ ID NO: 120836 - DNA, 15 bp, Homo sapiens
gtattgttctactag

SEQ ID NO: 120837 - DNA, 15 bp, Homo sapiens
tattgttctactaga

SEQ ID NO: 120838 - DNA, 15 bp, Homo sapiens
attgttctactagag

SEQ ID NO: 120839 - DNA, 15 bp, Homo sapiens
ttgttctactagaga

SEQ ID NO: 120840 - DNA, 15 bp, Homo sapiens
tgttctactagagac

SEQ ID NO: 120841 - DNA, 15 bp, Homo sapiens
gttctactagagact

SEQ ID NO: 120842 - DNA, 15 bp, Homo sapiens
ttctactagagactg

SEQ ID NO: 120843 - DNA, 15 bp, Homo sapiens
tctactagagactga

SEQ ID NO: 120844 - DNA, 15 bp, Homo sapiens
ctactagagactgac

SEQ ID NO: 120845 - DNA, 15 bp, Homo sapiens
tactagagactgacc

SEQ ID NO: 120846 - DNA, 15 bp, Homo sapiens
actagagactgacct

SEQ ID NO: 120847 - DNA, 15 bp, Homo sapiens
ctagagactgacctt

SEQ ID NO: 120848 - DNA, 15 bp, Homo sapiens
tagagactgaccttg

SEQ ID NO: 120849 - DNA, 15 bp, Homo sapiens
agagactgaccttgg

SEQ ID NO: 120850 - DNA, 15 bp, Homo sapiens
gagactgaccttggc

SEQ ID NO: 120851 - DNA, 15 bp, Homo sapiens
agactgaccttggca

SEQ ID NO: 120852 - DNA, 15 bp, Homo sapiens
gactgaccttggcat

SEQ ID NO: 120853 - DNA, 15 bp, Homo sapiens
actgaccttggcatg

SEQ ID NO: 120854 - DNA, 15 bp, Homo sapiens
ctgaccttggcatgg

SEQ ID NO: 120855 - DNA, 15 bp, Homo sapiens
tgaccttggcatgga

SEQ ID NO: 120856 - DNA, 15 bp, Homo sapiens
gaccttggcatggag

SEQ ID NO: 120857 - DNA, 15 bp, Homo sapiens
accttggcatggaga

SEQ ID NO: 120858 - DNA, 15 bp, Homo sapiens
ccttggcatggagat

SEQ ID NO: 120859 - DNA, 15 bp, Homo sapiens
cttggcatggagatc

SEQ ID NO: 120860 - DNA, 15 bp, Homo sapiens
ttggcatggagatct

SEQ ID NO: 120861 - DNA, 15 bp, Homo sapiens
tggcatggagatctc

SEQ ID NO: 120862 - DNA, 15 bp, Homo sapiens
ggcatggagatctca

SEQ ID NO: 120863 - DNA, 15 bp, Homo sapiens
gcatggagatctcat

SEQ ID NO: 120864 - DNA, 15 bp, Homo sapiens
catggagatctcatt

SEQ ID NO: 120865 - DNA, 15 bp, Homo sapiens
atggagatctcattt

SEQ ID NO: 120866 - DNA, 15 bp, Homo sapiens
tggagatctcatttg

SEQ ID NO: 120867 - DNA, 15 bp, Homo sapiens
ggagatctcatttgg

SEQ ID NO: 120868 - DNA, 15 bp, Homo sapiens
gagatctcatttgga

SEQ ID NO: 120869 - DNA, 15 bp, Homo sapiens
agatctcatttggac

SEQ ID NO: 120870 - DNA, 15 bp, Homo sapiens
gatctcatttggact

SEQ ID NO: 120871 - DNA, 15 bp, Homo sapiens
atctcatttggactc

SEQ ID NO: 120872 - DNA, 15 bp, Homo sapiens
tctcatttggactca

SEQ ID NO: 120873 - DNA, 15 bp, Homo sapiens
ctcatttggactcac

SEQ ID NO: 120874 - DNA, 15 bp, Homo sapiens
tcatttggactcaca

SEQ ID NO: 120875 - DNA, 15 bp, Homo sapiens
catttggactcacag

SEQ ID NO: 120876 - DNA, 15 bp, Homo sapiens
atttggactcacaga

SEQ ID NO: 120877 - DNA, 15 bp, Homo sapiens
tttggactcacagat

SEQ ID NO: 120878 - DNA, 15 bp, Homo sapiens
ttggactcacagatt

SEQ ID NO: 120879 - DNA, 15 bp, Homo sapiens
tggactcacagattt

SEQ ID NO: 120880 - DNA, 15 bp, Homo sapiens
ggactcacagatttc

SEQ ID NO: 120881 - DNA, 15 bp, Homo sapiens
gactcacagatttct

SEQ ID NO: 120882 - DNA, 15 bp, Homo sapiens
actcacagatttcta

SEQ ID NO: 120883 - DNA, 15 bp, Homo sapiens
ctcacagatttctag

SEQ ID NO: 120884 - DNA, 15 bp, Homo sapiens
tcacagatttctagt

SEQ ID NO: 120885 - DNA, 15 bp, Homo sapiens
cacagatttctagtc

SEQ ID NO: 120886 - DNA, 15 bp, Homo sapiens
acagatttctagtct

SEQ ID NO: 120887 - DNA, 15 bp, Homo sapiens
cagatttctagtcta

SEQ ID NO: 120888 - DNA, 15 bp, Homo sapiens
agatttctagtctag

SEQ ID NO: 120889 - DNA, 15 bp, Homo sapiens
gatttctagtctagc

SEQ ID NO: 120890 - DNA, 15 bp, Homo sapiens
atttctagtctagcg

SEQ ID NO: 120891 - DNA, 15 bp, Homo sapiens
tttctagtctagcgc

SEQ ID NO: 120892 - DNA, 15 bp, Homo sapiens
ttctagtctagcgct

SEQ ID NO: 120893 - DNA, 15 bp, Homo sapiens
tctagtctagcgctt

SEQ ID NO: 120894 - DNA, 15 bp, Homo sapiens
ctagtctagcgcttg

SEQ ID NO: 120895 - DNA, 15 bp, Homo sapiens
tagtctagcgcttgg

SEQ ID NO: 120896 - DNA, 15 bp, Homo sapiens
agtctagcgcttggt

SEQ ID NO: 120897 - DNA, 15 bp, Homo sapiens
gtctagcgcttggtt

SEQ ID NO: 120898 - DNA, 15 bp, Homo sapiens
tctagcgcttggttt

SEQ ID NO: 120899 - DNA, 15 bp, Homo sapiens
ctagcgcttggtttt

SEQ ID NO: 120900 - DNA, 15 bp, Homo sapiens
tagcgcttggttttg

SEQ ID NO: 120901 - DNA, 15 bp, Homo sapiens
agcgcttggttttgt

SEQ ID NO: 120902 - DNA, 15 bp, Homo sapiens
gcgcttggttttgta

SEQ ID NO: 120903 - DNA, 15 bp, Homo sapiens
cgcttggttttgtat

SEQ ID NO: 120904 - DNA, 15 bp, Homo sapiens
gcttggttttgtatc

SEQ ID NO: 120905 - DNA, 15 bp, Homo sapiens
cttggttttgtatcc

SEQ ID NO: 120906 - DNA, 15 bp, Homo sapiens
ttggttttgtatcca

SEQ ID NO: 120907 - DNA, 15 bp, Homo sapiens
tggttttgtatccat

SEQ ID NO: 120908 - DNA, 15 bp, Homo sapiens
ggttttgtatccata

SEQ ID NO: 120909 - DNA, 15 bp, Homo sapiens
gttttgtatccatac

SEQ ID NO: 120910 - DNA, 15 bp, Homo sapiens
ttttgtatccatacc

SEQ ID NO: 120911 - DNA, 15 bp, Homo sapiens
tttgtatccatacct

SEQ ID NO: 120912 - DNA, 15 bp, Homo sapiens
ttgtatccatacctc

SEQ ID NO: 120913 - DNA, 15 bp, Homo sapiens
tgtatccatacctcg

SEQ ID NO: 120914 - DNA, 15 bp, Homo sapiens
gtatccatacctcgc

SEQ ID NO: 120915 - DNA, 15 bp, Homo sapiens
tatccatacctcgct

SEQ ID NO: 120916 - DNA, 15 bp, Homo sapiens
atccatacctcgcta

SEQ ID NO: 120917 - DNA, 15 bp, Homo sapiens
tccatacctcgctac

SEQ ID NO: 120918 - DNA, 15 bp, Homo sapiens
ccatacctcgctact

SEQ ID NO: 120919 - DNA, 15 bp, Homo sapiens
catacctcgctactg

SEQ ID NO: 120920 - DNA, 15 bp, Homo sapiens
atacctcgctactgc

SEQ ID NO: 120921 - DNA, 15 bp, Homo sapiens
tacctcgctactgca

SEQ ID NO: 120922 - DNA, 15 bp, Homo sapiens
acctcgctactgcat

SEQ ID NO: 120923 - DNA, 15 bp, Homo sapiens
cctcgctactgcatt

SEQ ID NO: 120924 - DNA, 15 bp, Homo sapiens
ctcgctactgcattc

SEQ ID NO: 120925 - DNA, 15 bp, Homo sapiens
tcgctactgcattct

SEQ ID NO: 120926 - DNA, 15 bp, Homo sapiens
cgctactgcattctt

SEQ ID NO: 120927 - DNA, 15 bp, Homo sapiens
gctactgcattctta

SEQ ID NO: 120928 - DNA, 15 bp, Homo sapiens
ctactgcattcttag

SEQ ID NO: 120929 - DNA, 15 bp, Homo sapiens
tactgcattcttagt

SEQ ID NO: 120930 - DNA, 15 bp, Homo sapiens
actgcattcttagtt

SEQ ID NO: 120931 - DNA, 15 bp, Homo sapiens
ctgcattcttagttc

SEQ ID NO: 120932 - DNA, 15 bp, Homo sapiens
tgcattcttagttcc

SEQ ID NO: 120933 - DNA, 15 bp, Homo sapiens
gcattcttagttcct

SEQ ID NO: 120934 - DNA, 15 bp, Homo sapiens
cattcttagttcctt

SEQ ID NO: 120935 - DNA, 15 bp, Homo sapiens
attcttagttccttc

SEQ ID NO: 120936 - DNA, 15 bp, Homo sapiens
ttcttagttccttct

SEQ ID NO: 120937 - DNA, 15 bp, Homo sapiens
tcttagttccttctg

SEQ ID NO: 120938 - DNA, 15 bp, Homo sapiens
cttagttccttctgc

SEQ ID NO: 120939 - DNA, 15 bp, Homo sapiens
ttagttccttctgct

SEQ ID NO: 120940 - DNA, 15 bp, Homo sapiens
tagttccttctgctc

SEQ ID NO: 120941 - DNA, 15 bp, Homo sapiens
agttccttctgctcc

SEQ ID NO: 120942 - DNA, 15 bp, Homo sapiens
gttccttctgctcct

SEQ ID NO: 120943 - DNA, 15 bp, Homo sapiens
ttccttctgctcctt

SEQ ID NO: 120944 - DNA, 15 bp, Homo sapiens
tccttctgctccttg

SEQ ID NO: 120945 - DNA, 15 bp, Homo sapiens
ccttctgctccttgt

SEQ ID NO: 120946 - DNA, 15 bp, Homo sapiens
cttctgctccttgtt

SEQ ID NO: 120947 - DNA, 15 bp, Homo sapiens
ttctgctccttgttc

SEQ ID NO: 120948 - DNA, 15 bp, Homo sapiens
tctgctccttgttcc

SEQ ID NO: 120949 - DNA, 15 bp, Homo sapiens
ctgctccttgttcct

SEQ ID NO: 120950 - DNA, 15 bp, Homo sapiens
tgctccttgttcctc

SEQ ID NO: 120951 - DNA, 15 bp, Homo sapiens
gctccttgttcctca

SEQ ID NO: 120952 - DNA, 15 bp, Homo sapiens
ctccttgttcctcat

SEQ ID NO: 120953 - DNA, 15 bp, Homo sapiens
tccttgttcctcatg

SEQ ID NO: 120954 - DNA, 15 bp, Homo sapiens
ccttgttcctcatgc

SEQ ID NO: 120955 - DNA, 15 bp, Homo sapiens
cttgttcctcatgcc

SEQ ID NO: 120956 - DNA, 15 bp, Homo sapiens
ttgttcctcatgccc

SEQ ID NO: 120957 - DNA, 15 bp, Homo sapiens
tgttcctcatgccca

SEQ ID NO: 120958 - DNA, 15 bp, Homo sapiens
gttcctcatgcccag

SEQ ID NO: 120959 - DNA, 15 bp, Homo sapiens
ttcctcatgcccagt

SEQ ID NO: 120960 - DNA, 15 bp, Homo sapiens
tcctcatgcccagtg

SEQ ID NO: 120961 - DNA, 15 bp, Homo sapiens
cctcatgcccagtgt

SEQ ID NO: 120962 - DNA, 15 bp, Homo sapiens
ctcatgcccagtgtc

SEQ ID NO: 120963 - DNA, 15 bp, Homo sapiens
tcatgcccagtgtcc

SEQ ID NO: 120964 - DNA, 15 bp, Homo sapiens
catgcccagtgtccc

SEQ ID NO: 120965 - DNA, 15 bp, Homo sapiens
atgcccagtgtccca

SEQ ID NO: 120966 - DNA, 15 bp, Homo sapiens
tgcccagtgtcccac

SEQ ID NO: 120967 - DNA, 15 bp, Homo sapiens
gcccagtgtcccacc

SEQ ID NO: 120968 - DNA, 15 bp, Homo sapiens
cccagtgtcccaccc

SEQ ID NO: 120969 - DNA, 15 bp, Homo sapiens
ccagtgtcccaccct

SEQ ID NO: 120970 - DNA, 15 bp, Homo sapiens
cagtgtcccacccta

SEQ ID NO: 120971 - DNA, 15 bp, Homo sapiens
agtgtcccaccctac

SEQ ID NO: 120972 - DNA, 15 bp, Homo sapiens
gtgtcccaccctacc

SEQ ID NO: 120973 - DNA, 15 bp, Homo sapiens
tgtcccaccctaccc

SEQ ID NO: 120974 - DNA, 15 bp, Homo sapiens
gtcccaccctaccct

SEQ ID NO: 120975 - DNA, 15 bp, Homo sapiens
tcccaccctaccctt

SEQ ID NO: 120976 - DNA, 15 bp, Homo sapiens
cccaccctacccttg

SEQ ID NO: 120977 - DNA, 15 bp, Homo sapiens
ccaccctacccttgc

SEQ ID NO: 120978 - DNA, 15 bp, Homo sapiens
caccctacccttgcc

SEQ ID NO: 120979 - DNA, 15 bp, Homo sapiens
accctacccttgccc

SEQ ID NO: 120980 - DNA, 15 bp, Homo sapiens
ccctacccttgcccc

SEQ ID NO: 120981 - DNA, 15 bp, Homo sapiens
cctacccttgcccct

SEQ ID NO: 120982 - DNA, 15 bp, Homo sapiens
ctacccttgccccta

SEQ ID NO: 120983 - DNA, 15 bp, Homo sapiens
tacccttgcccctac

SEQ ID NO: 120984 - DNA, 15 bp, Homo sapiens
acccttgcccctact

SEQ ID NO: 120985 - DNA, 15 bp, Homo sapiens
cccttgcccctactc

SEQ ID NO: 120986 - DNA, 15 bp, Homo sapiens
ccttgcccctactcc

SEQ ID NO: 120987 - DNA, 15 bp, Homo sapiens
cttgcccctactcct

SEQ ID NO: 120988 - DNA, 15 bp, Homo sapiens
ttgcccctactcctc

SEQ ID NO: 120989 - DNA, 15 bp, Homo sapiens
tgcccctactcctct

SEQ ID NO: 120990 - DNA, 15 bp, Homo sapiens
gcccctactcctcta

SEQ ID NO: 120991 - DNA, 15 bp, Homo sapiens
cccctactcctctag

SEQ ID NO: 120992 - DNA, 15 bp, Homo sapiens
ccctactcctctaga

SEQ ID NO: 120993 - DNA, 15 bp, Homo sapiens
cctactcctctagag

SEQ ID NO: 120994 - DNA, 15 bp, Homo sapiens
ctactcctctagagg

SEQ ID NO: 120995 - DNA, 15 bp, Homo sapiens
tactcctctagaggc

SEQ ID NO: 120996 - DNA, 15 bp, Homo sapiens
actcctctagaggcc

SEQ ID NO: 120997 - DNA, 15 bp, Homo sapiens
ctcctctagaggcca

SEQ ID NO: 120998 - DNA, 15 bp, Homo sapiens
tcctctagaggccac

SEQ ID NO: 120999 - DNA, 15 bp, Homo sapiens
cctctagaggccaca

SEQ ID NO: 121000 - DNA, 15 bp, Homo sapiens
ctctagaggccacag

SEQ ID NO: 121001 - DNA, 15 bp, Homo sapiens
tctagaggccacagt

SEQ ID NO: 121002 - DNA, 15 bp, Homo sapiens
ctagaggccacagtg

SEQ ID NO: 121003 - DNA, 15 bp, Homo sapiens
tagaggccacagtga

SEQ ID NO: 121004 - DNA, 15 bp, Homo sapiens
agaggccacagtgat

SEQ ID NO: 121005 - DNA, 15 bp, Homo sapiens
gaggccacagtgatt

SEQ ID NO: 121006 - DNA, 15 bp, Homo sapiens
aggccacagtgattc

SEQ ID NO: 121007 - DNA, 15 bp, Homo sapiens
ggccacagtgattca

SEQ ID NO: 121008 - DNA, 15 bp, Homo sapiens
gccacagtgattcac

SEQ ID NO: 121009 - DNA, 15 bp, Homo sapiens
ccacagtgattcact

SEQ ID NO: 121010 - DNA, 15 bp, Homo sapiens
cacagtgattcactg

SEQ ID NO: 121011 - DNA, 15 bp, Homo sapiens
acagtgattcactga

SEQ ID NO: 121012 - DNA, 15 bp, Homo sapiens
cagtgattcactgag

SEQ ID NO: 121013 - DNA, 15 bp, Homo sapiens
agtgattcactgagc

SEQ ID NO: 121014 - DNA, 15 bp, Homo sapiens
gtgattcactgagcc

SEQ ID NO: 121015 - DNA, 15 bp, Homo sapiens
tgattcactgagcca

SEQ ID NO: 121016 - DNA, 15 bp, Homo sapiens
gattcactgagccat

SEQ ID NO: 121017 - DNA, 15 bp, Homo sapiens
attcactgagccatt

SEQ ID NO: 121018 - DNA, 15 bp, Homo sapiens
ttcactgagccattt

SEQ ID NO: 121019 - DNA, 15 bp, Homo sapiens
tcactgagccatttc

SEQ ID NO: 121020 - DNA, 15 bp, Homo sapiens
cactgagccatttca

SEQ ID NO: 121021 - DNA, 15 bp, Homo sapiens
actgagccatttcat

SEQ ID NO: 121022 - DNA, 15 bp, Homo sapiens
ctgagccatttcata

SEQ ID NO: 121023 - DNA, 15 bp, Homo sapiens
tgagccatttcataa

SEQ ID NO: 121024 - DNA, 15 bp, Homo sapiens
gagccatttcataag

SEQ ID NO: 121025 - DNA, 15 bp, Homo sapiens
agccatttcataagc

SEQ ID NO: 121026 - DNA, 15 bp, Homo sapiens
gccatttcataagca

SEQ ID NO: 121027 - DNA, 15 bp, Homo sapiens
ccatttcataagcac

SEQ ID NO: 121028 - DNA, 15 bp, Homo sapiens
catttcataagcaca

SEQ ID NO: 121029 - DNA, 15 bp, Homo sapiens
atttcataagcacag

SEQ ID NO: 121030 - DNA, 15 bp, Homo sapiens
tttcataagcacagc

SEQ ID NO: 121031 - DNA, 15 bp, Homo sapiens
ttcataagcacagct

SEQ ID NO: 121032 - DNA, 15 bp, Homo sapiens
tcataagcacagcta

SEQ ID NO: 121033 - DNA, 15 bp, Homo sapiens
cataagcacagctag

SEQ ID NO: 121034 - DNA, 15 bp, Homo sapiens
ataagcacagctagg

SEQ ID NO: 121035 - DNA, 15 bp, Homo sapiens
taagcacagctagga

SEQ ID NO: 121036 - DNA, 15 bp, Homo sapiens
aagcacagctaggag

SEQ ID NO: 121037 - DNA, 15 bp, Homo sapiens
agcacagctaggaga

SEQ ID NO: 121038 - DNA, 15 bp, Homo sapiens
gcacagctaggagag

SEQ ID NO: 121039 - DNA, 15 bp, Homo sapiens
cacagctaggagagt

SEQ ID NO: 121040 - DNA, 15 bp, Homo sapiens
acagctaggagagtt

SEQ ID NO: 121041 - DNA, 15 bp, Homo sapiens
cagctaggagagttc

SEQ ID NO: 121042 - DNA, 15 bp, Homo sapiens
agctaggagagttca

SEQ ID NO: 121043 - DNA, 15 bp, Homo sapiens
gctaggagagttcat

SEQ ID NO: 121044 - DNA, 15 bp, Homo sapiens
ctaggagagttcatg

SEQ ID NO: 121045 - DNA, 15 bp, Homo sapiens
taggagagttcatgg

SEQ ID NO: 121046 - DNA, 15 bp, Homo sapiens
aggagagttcatggc

SEQ ID NO: 121047 - DNA, 15 bp, Homo sapiens
ggagagttcatggct

SEQ ID NO: 121048 - DNA, 15 bp, Homo sapiens
gagagttcatggcta

SEQ ID NO: 121049 - DNA, 15 bp, Homo sapiens
agagttcatggctac

SEQ ID NO: 121050 - DNA, 15 bp, Homo sapiens
gagttcatggctacc

SEQ ID NO: 121051 - DNA, 15 bp, Homo sapiens
agttcatggctacca

SEQ ID NO: 121052 - DNA, 15 bp, Homo sapiens
gttcatggctaccaa

SEQ ID NO: 121053 - DNA, 15 bp, Homo sapiens
ttcatggctaccaag

SEQ ID NO: 121054 - DNA, 15 bp, Homo sapiens
tcatggctaccaagt

SEQ ID NO: 121055 - DNA, 15 bp, Homo sapiens
catggctaccaagtg

SEQ ID NO: 121056 - DNA, 15 bp, Homo sapiens
atggctaccaagtgc

SEQ ID NO: 121057 - DNA, 15 bp, Homo sapiens
tggctaccaagtgcc

SEQ ID NO: 121058 - DNA, 15 bp, Homo sapiens
ggctaccaagtgcca

SEQ ID NO: 121059 - DNA, 15 bp, Homo sapiens
gctaccaagtgccag

SEQ ID NO: 121060 - DNA, 15 bp, Homo sapiens
ctaccaagtgccagc

SEQ ID NO: 121061 - DNA, 15 bp, Homo sapiens
taccaagtgccagca

SEQ ID NO: 121062 - DNA, 15 bp, Homo sapiens
accaagtgccagcag

SEQ ID NO: 121063 - DNA, 15 bp, Homo sapiens
ccaagtgccagcagg

SEQ ID NO: 121064 - DNA, 15 bp, Homo sapiens
caagtgccagcaggg

SEQ ID NO: 121065 - DNA, 15 bp, Homo sapiens
aagtgccagcagggc

SEQ ID NO: 121066 - DNA, 15 bp, Homo sapiens
agtgccagcagggcc

SEQ ID NO: 121067 - DNA, 15 bp, Homo sapiens
gtgccagcagggccg

SEQ ID NO: 121068 - DNA, 15 bp, Homo sapiens
tgccagcagggccga

SEQ ID NO: 121069 - DNA, 15 bp, Homo sapiens
gccagcagggccgaa

SEQ ID NO: 121070 - DNA, 15 bp, Homo sapiens
ccagcagggccgaat

SEQ ID NO: 121071 - DNA, 15 bp, Homo sapiens
cagcagggccgaatt

SEQ ID NO: 121072 - DNA, 15 bp, Homo sapiens
agcagggccgaattt

SEQ ID NO: 121073 - DNA, 15 bp, Homo sapiens
gcagggccgaatttt

SEQ ID NO: 121074 - DNA, 15 bp, Homo sapiens
cagggccgaattttc

SEQ ID NO: 121075 - DNA, 15 bp, Homo sapiens
agggccgaattttca

SEQ ID NO: 121076 - DNA, 15 bp, Homo sapiens
gggccgaattttcac

SEQ ID NO: 121077 - DNA, 15 bp, Homo sapiens
ggccgaattttcacc

SEQ ID NO: 121078 - DNA, 15 bp, Homo sapiens
gccgaattttcacct

SEQ ID NO: 121079 - DNA, 15 bp, Homo sapiens
ccgaattttcacctg

SEQ ID NO: 121080 - DNA, 15 bp, Homo sapiens
cgaattttcacctgt

SEQ ID NO: 121081 - DNA, 15 bp, Homo sapiens
gaattttcacctgtg

SEQ ID NO: 121082 - DNA, 15 bp, Homo sapiens
aattttcacctgtgt

SEQ ID NO: 121083 - DNA, 15 bp, Homo sapiens
attttcacctgtgtg

SEQ ID NO: 121084 - DNA, 15 bp, Homo sapiens
ttttcacctgtgtgt

SEQ ID NO: 121085 - DNA, 15 bp, Homo sapiens
tttcacctgtgtgtc

SEQ ID NO: 121086 - DNA, 15 bp, Homo sapiens
ttcacctgtgtgtcc

SEQ ID NO: 121087 - DNA, 15 bp, Homo sapiens
tcacctgtgtgtcct

SEQ ID NO: 121088 - DNA, 15 bp, Homo sapiens
cacctgtgtgtcctc

SEQ ID NO: 121089 - DNA, 15 bp, Homo sapiens
acctgtgtgtcctcc

SEQ ID NO: 121090 - DNA, 15 bp, Homo sapiens
cctgtgtgtcctccc

SEQ ID NO: 121091 - DNA, 15 bp, Homo sapiens
ctgtgtgtcctccct

SEQ ID NO: 121092 - DNA, 15 bp, Homo sapiens
tgtgtgtcctccctt

SEQ ID NO: 121093 - DNA, 15 bp, Homo sapiens
gtgtgtcctcccttc

SEQ ID NO: 121094 - DNA, 15 bp, Homo sapiens
tgtgtcctcccttcc

SEQ ID NO: 121095 - DNA, 15 bp, Homo sapiens
gtgtcctcccttcca

SEQ ID NO: 121096 - DNA, 15 bp, Homo sapiens
tgtcctcccttccat

SEQ ID NO: 121097 - DNA, 15 bp, Homo sapiens
gtcctcccttccatt

SEQ ID NO: 121098 - DNA, 15 bp, Homo sapiens
tcctcccttccattt

SEQ ID NO: 121099 - DNA, 15 bp, Homo sapiens
cctcccttccatttt

SEQ ID NO: 121100 - DNA, 15 bp, Homo sapiens
ctcccttccattttt

SEQ ID NO: 121101 - DNA, 15 bp, Homo sapiens
tcccttccatttttc

SEQ ID NO: 121102 - DNA, 15 bp, Homo sapiens
cccttccatttttca

SEQ ID NO: 121103 - DNA, 15 bp, Homo sapiens
ccttccatttttcat

SEQ ID NO: 121104 - DNA, 15 bp, Homo sapiens
cttccatttttcatc

SEQ ID NO: 121105 - DNA, 15 bp, Homo sapiens
ttccatttttcatct

SEQ ID NO: 121106 - DNA, 15 bp, Homo sapiens
tccatttttcatctt

SEQ ID NO: 121107 - DNA, 15 bp, Homo sapiens
ccatttttcatcttc

SEQ ID NO: 121108 - DNA, 15 bp, Homo sapiens
catttttcatcttct

SEQ ID NO: 121109 - DNA, 15 bp, Homo sapiens
atttttcatcttctg

SEQ ID NO: 121110 - DNA, 15 bp, Homo sapiens
tttttcatcttctgc

SEQ ID NO: 121111 - DNA, 15 bp, Homo sapiens
ttttcatcttctgcc

SEQ ID NO: 121112 - DNA, 15 bp, Homo sapiens
tttcatcttctgccc

SEQ ID NO: 121113 - DNA, 15 bp, Homo sapiens
ttcatcttctgcccc

SEQ ID NO: 121114 - DNA, 15 bp, Homo sapiens
tcatcttctgccccc

SEQ ID NO: 121115 - DNA, 15 bp, Homo sapiens
catcttctgccccct

SEQ ID NO: 121116 - DNA, 15 bp, Homo sapiens
atcttctgccccctc

SEQ ID NO: 121117 - DNA, 15 bp, Homo sapiens
tcttctgccccctcc

SEQ ID NO: 121118 - DNA, 15 bp, Homo sapiens
cttctgccccctccc

SEQ ID NO: 121119 - DNA, 15 bp, Homo sapiens
ttctgccccctcccc

SEQ ID NO: 121120 - DNA, 15 bp, Homo sapiens
tctgccccctcccca

SEQ ID NO: 121121 - DNA, 15 bp, Homo sapiens
ctgccccctccccag

SEQ ID NO: 121122 - DNA, 15 bp, Homo sapiens
tgccccctccccagc

SEQ ID NO: 121123 - DNA, 15 bp, Homo sapiens
gccccctccccagct

SEQ ID NO: 121124 - DNA, 15 bp, Homo sapiens
ccccctccccagctt

SEQ ID NO: 121125 - DNA, 15 bp, Homo sapiens
cccctccccagcttt

SEQ ID NO: 121126 - DNA, 15 bp, Homo sapiens
ccctccccagcttta

SEQ ID NO: 121127 - DNA, 15 bp, Homo sapiens
cctccccagctttaa

SEQ ID NO: 121128 - DNA, 15 bp, Homo sapiens
ctccccagctttaac

SEQ ID NO: 121129 - DNA, 15 bp, Homo sapiens
tccccagctttaact

SEQ ID NO: 121130 - DNA, 15 bp, Homo sapiens
ccccagctttaactt

SEQ ID NO: 121131 - DNA, 15 bp, Homo sapiens
cccagctttaacttt

SEQ ID NO: 121132 - DNA, 15 bp, Homo sapiens
ccagctttaacttta

SEQ ID NO: 121133 - DNA, 15 bp, Homo sapiens
cagctttaactttaa

SEQ ID NO: 121134 - DNA, 15 bp, Homo sapiens
agctttaactttaat

SEQ ID NO: 121135 - DNA, 15 bp, Homo sapiens
gctttaactttaata

SEQ ID NO: 121136 - DNA, 15 bp, Homo sapiens
ctttaactttaatat

SEQ ID NO: 121137 - DNA, 15 bp, Homo sapiens
tttaactttaatata

SEQ ID NO: 121138 - DNA, 15 bp, Homo sapiens
ttaactttaatataa

SEQ ID NO: 121139 - DNA, 15 bp, Homo sapiens
taactttaatataac

SEQ ID NO: 121140 - DNA, 15 bp, Homo sapiens
aactttaatataact

SEQ ID NO: 121141 - DNA, 15 bp, Homo sapiens
actttaatataacta

SEQ ID NO: 121142 - DNA, 15 bp, Homo sapiens
ctttaatataactac

SEQ ID NO: 121143 - DNA, 15 bp, Homo sapiens
tttaatataactact

SEQ ID NO: 121144 - DNA, 15 bp, Homo sapiens
ttaatataactactt

SEQ ID NO: 121145 - DNA, 15 bp, Homo sapiens
taatataactacttg

SEQ ID NO: 121146 - DNA, 15 bp, Homo sapiens
aatataactacttgg

SEQ ID NO: 121147 - DNA, 15 bp, Homo sapiens
atataactacttggg

SEQ ID NO: 121148 - DNA, 15 bp, Homo sapiens
tataactacttggga

SEQ ID NO: 121149 - DNA, 15 bp, Homo sapiens
ataactacttgggac

SEQ ID NO: 121150 - DNA, 15 bp, Homo sapiens
taactacttgggact

SEQ ID NO: 121151 - DNA, 15 bp, Homo sapiens
aactacttgggacta

SEQ ID NO: 121152 - DNA, 15 bp, Homo sapiens
actacttgggactat

SEQ ID NO: 121153 - DNA, 15 bp, Homo sapiens
ctacttgggactatt

SEQ ID NO: 121154 - DNA, 15 bp, Homo sapiens
tacttgggactattc

SEQ ID NO: 121155 - DNA, 15 bp, Homo sapiens
acttgggactattcc

SEQ ID NO: 121156 - DNA, 15 bp, Homo sapiens
cttgggactattcca

SEQ ID NO: 121157 - DNA, 15 bp, Homo sapiens
ttgggactattccag

SEQ ID NO: 121158 - DNA, 15 bp, Homo sapiens
tgggactattccagc

SEQ ID NO: 121159 - DNA, 15 bp, Homo sapiens
gggactattccagca

SEQ ID NO: 121160 - DNA, 15 bp, Homo sapiens
ggactattccagcat

SEQ ID NO: 121161 - DNA, 15 bp, Homo sapiens
gactattccagcatt

SEQ ID NO: 121162 - DNA, 15 bp, Homo sapiens
actattccagcatta

SEQ ID NO: 121163 - DNA, 15 bp, Homo sapiens
ctattccagcattaa

SEQ ID NO: 121164 - DNA, 15 bp, Homo sapiens
tattccagcattaaa

SEQ ID NO: 121165 - DNA, 15 bp, Homo sapiens
attccagcattaaat

SEQ ID NO: 121166 - DNA, 15 bp, Homo sapiens
ttccagcattaaata

SEQ ID NO: 121167 - DNA, 15 bp, Homo sapiens
tccagcattaaataa

SEQ ID NO: 121168 - DNA, 15 bp, Homo sapiens
ccagcattaaataag

SEQ ID NO: 121169 - DNA, 15 bp, Homo sapiens
cagcattaaataagg

SEQ ID NO: 121170 - DNA, 15 bp, Homo sapiens
agcattaaataaggg

SEQ ID NO: 121171 - DNA, 15 bp, Homo sapiens
gcattaaataagggt

SEQ ID NO: 121172 - DNA, 15 bp, Homo sapiens
cattaaataagggta

SEQ ID NO: 121173 - DNA, 15 bp, Homo sapiens
attaaataagggtaa

SEQ ID NO: 121174 - DNA, 15 bp, Homo sapiens
ttaaataagggtaac

SEQ ID NO: 121175 - DNA, 15 bp, Homo sapiens
taaataagggtaact

SEQ ID NO: 121176 - DNA, 15 bp, Homo sapiens
aaataagggtaactg

SEQ ID NO: 121177 - DNA, 15 bp, Homo sapiens
aataagggtaactgc

SEQ ID NO: 121178 - DNA, 15 bp, Homo sapiens
ataagggtaactgct

SEQ ID NO: 121179 - DNA, 15 bp, Homo sapiens
taagggtaactgctg

SEQ ID NO: 121180 - DNA, 15 bp, Homo sapiens
aagggtaactgctgg

SEQ ID NO: 121181 - DNA, 15 bp, Homo sapiens
agggtaactgctgga

SEQ ID NO: 121182 - DNA, 15 bp, Homo sapiens
gggtaactgctggat

SEQ ID NO: 121183 - DNA, 15 bp, Homo sapiens
ggtaactgctggatg

SEQ ID NO: 121184 - DNA, 15 bp, Homo sapiens
gtaactgctggatgg

SEQ ID NO: 121185 - DNA, 15 bp, Homo sapiens
taactgctggatggg

SEQ ID NO: 121186 - DNA, 15 bp, Homo sapiens
aactgctggatgggt

SEQ ID NO: 121187 - DNA, 15 bp, Homo sapiens
actgctggatgggtg

SEQ ID NO: 121188 - DNA, 15 bp, Homo sapiens
ctgctggatgggtgg

SEQ ID NO: 121189 - DNA, 15 bp, Homo sapiens
tgctggatgggtggc

SEQ ID NO: 121190 - DNA, 15 bp, Homo sapiens
gctggatgggtggct

SEQ ID NO: 121191 - DNA, 15 bp, Homo sapiens
ctggatgggtggctg

SEQ ID NO: 121192 - DNA, 15 bp, Homo sapiens
tggatgggtggctgg

SEQ ID NO: 121193 - DNA, 15 bp, Homo sapiens
ggatgggtggctggg

SEQ ID NO: 121194 - DNA, 15 bp, Homo sapiens
gatgggtggctggga

SEQ ID NO: 121195 - DNA, 15 bp, Homo sapiens
atgggtggctgggat

SEQ ID NO: 121196 - DNA, 15 bp, Homo sapiens
tgggtggctgggata

SEQ ID NO: 121197 - DNA, 15 bp, Homo sapiens
gggtggctgggatac

SEQ ID NO: 121198 - DNA, 15 bp, Homo sapiens
ggtggctgggataca

SEQ ID NO: 121199 - DNA, 15 bp, Homo sapiens
gtggctgggatacac

SEQ ID NO: 121200 - DNA, 15 bp, Homo sapiens
tggctgggatacaca

SEQ ID NO: 121201 - DNA, 15 bp, Homo sapiens
ggctgggatacacag

SEQ ID NO: 121202 - DNA, 15 bp, Homo sapiens
gctgggatacacaga

SEQ ID NO: 121203 - DNA, 15 bp, Homo sapiens
ctgggatacacagaa

SEQ ID NO: 121204 - DNA, 15 bp, Homo sapiens
tgggatacacagaat

SEQ ID NO: 121205 - DNA, 15 bp, Homo sapiens
gggatacacagaatg

SEQ ID NO: 121206 - DNA, 15 bp, Homo sapiens
ggatacacagaatgt

SEQ ID NO: 121207 - DNA, 15 bp, Homo sapiens
gatacacagaatgta

SEQ ID NO: 121208 - DNA, 15 bp, Homo sapiens
atacacagaatgtag

SEQ ID NO: 121209 - DNA, 15 bp, Homo sapiens
tacacagaatgtagt

SEQ ID NO: 121210 - DNA, 15 bp, Homo sapiens
acacagaatgtagta

SEQ ID NO: 121211 - DNA, 15 bp, Homo sapiens
cacagaatgtagtat

SEQ ID NO: 121212 - DNA, 15 bp, Homo sapiens
acagaatgtagtatc

SEQ ID NO: 121213 - DNA, 15 bp, Homo sapiens
cagaatgtagtatcc

SEQ ID NO: 121214 - DNA, 15 bp, Homo sapiens
agaatgtagtatccc

SEQ ID NO: 121215 - DNA, 15 bp, Homo sapiens
gaatgtagtatccct

SEQ ID NO: 121216 - DNA, 15 bp, Homo sapiens
aatgtagtatccctt

SEQ ID NO: 121217 - DNA, 15 bp, Homo sapiens
atgtagtatcccttg

SEQ ID NO: 121218 - DNA, 15 bp, Homo sapiens
tgtagtatcccttgt

SEQ ID NO: 121219 - DNA, 15 bp, Homo sapiens
gtagtatcccttgtt

SEQ ID NO: 121220 - DNA, 15 bp, Homo sapiens
tagtatcccttgttc

SEQ ID NO: 121221 - DNA, 15 bp, Homo sapiens
agtatcccttgttca

SEQ ID NO: 121222 - DNA, 15 bp, Homo sapiens
gtatcccttgttcac

SEQ ID NO: 121223 - DNA, 15 bp, Homo sapiens
tatcccttgttcacg

SEQ ID NO: 121224 - DNA, 15 bp, Homo sapiens
atcccttgttcacga

SEQ ID NO: 121225 - DNA, 15 bp, Homo sapiens
tcccttgttcacgag

SEQ ID NO: 121226 - DNA, 15 bp, Homo sapiens
cccttgttcacgaga

SEQ ID NO: 121227 - DNA, 15 bp, Homo sapiens
ccttgttcacgagaa

SEQ ID NO: 121228 - DNA, 15 bp, Homo sapiens
cttgttcacgagaag

SEQ ID NO: 121229 - DNA, 15 bp, Homo sapiens
ttgttcacgagaaga

SEQ ID NO: 121230 - DNA, 15 bp, Homo sapiens
tgttcacgagaagac

SEQ ID NO: 121231 - DNA, 15 bp, Homo sapiens
gttcacgagaagacc

SEQ ID NO: 121232 - DNA, 15 bp, Homo sapiens
ttcacgagaagacct

SEQ ID NO: 121233 - DNA, 15 bp, Homo sapiens
tcacgagaagacctt

SEQ ID NO: 121234 - DNA, 15 bp, Homo sapiens
cacgagaagaccttc

SEQ ID NO: 121235 - DNA, 15 bp, Homo sapiens
acgagaagaccttct

SEQ ID NO: 121236 - DNA, 15 bp, Homo sapiens
cgagaagaccttctt

SEQ ID NO: 121237 - DNA, 15 bp, Homo sapiens
gagaagaccttcttg

SEQ ID NO: 121238 - DNA, 15 bp, Homo sapiens
agaagaccttcttgc

SEQ ID NO: 121239 - DNA, 15 bp, Homo sapiens
gaagaccttcttgcc

SEQ ID NO: 121240 - DNA, 15 bp, Homo sapiens
aagaccttcttgccc

SEQ ID NO: 121241 - DNA, 15 bp, Homo sapiens
agaccttcttgccct

SEQ ID NO: 121242 - DNA, 15 bp, Homo sapiens
gaccttcttgcccta

SEQ ID NO: 121243 - DNA, 15 bp, Homo sapiens
accttcttgccctag

SEQ ID NO: 121244 - DNA, 15 bp, Homo sapiens
ccttcttgccctagc

SEQ ID NO: 121245 - DNA, 15 bp, Homo sapiens
cttcttgccctagca

SEQ ID NO: 121246 - DNA, 15 bp, Homo sapiens
ttcttgccctagcat

SEQ ID NO: 121247 - DNA, 15 bp, Homo sapiens
tcttgccctagcatg

SEQ ID NO: 121248 - DNA, 15 bp, Homo sapiens
cttgccctagcatgg

SEQ ID NO: 121249 - DNA, 15 bp, Homo sapiens
ttgccctagcatggc

SEQ ID NO: 121250 - DNA, 15 bp, Homo sapiens
tgccctagcatggca

SEQ ID NO: 121251 - DNA, 15 bp, Homo sapiens
gccctagcatggcaa

SEQ ID NO: 121252 - DNA, 15 bp, Homo sapiens
ccctagcatggcaaa

SEQ ID NO: 121253 - DNA, 15 bp, Homo sapiens
cctagcatggcaaac

SEQ ID NO: 121254 - DNA, 15 bp, Homo sapiens
ctagcatggcaaaca

SEQ ID NO: 121255 - DNA, 15 bp, Homo sapiens
tagcatggcaaacag

SEQ ID NO: 121256 - DNA, 15 bp, Homo sapiens
agcatggcaaacagt

SEQ ID NO: 121257 - DNA, 15 bp, Homo sapiens
gcatggcaaacagtc

SEQ ID NO: 121258 - DNA, 15 bp, Homo sapiens
catggcaaacagtcc

SEQ ID NO: 121259 - DNA, 15 bp, Homo sapiens
atggcaaacagtcct

SEQ ID NO: 121260 - DNA, 15 bp, Homo sapiens
tggcaaacagtcctc

SEQ ID NO: 121261 - DNA, 15 bp, Homo sapiens
ggcaaacagtcctcc

SEQ ID NO: 121262 - DNA, 15 bp, Homo sapiens
gcaaacagtcctcca

SEQ ID NO: 121263 - DNA, 15 bp, Homo sapiens
caaacagtcctccaa

SEQ ID NO: 121264 - DNA, 15 bp, Homo sapiens
aaacagtcctccaag

SEQ ID NO: 121265 - DNA, 15 bp, Homo sapiens
aacagtcctccaagg

SEQ ID NO: 121266 - DNA, 15 bp, Homo sapiens
acagtcctccaagga

SEQ ID NO: 121267 - DNA, 15 bp, Homo sapiens
cagtcctccaaggag

SEQ ID NO: 121268 - DNA, 15 bp, Homo sapiens
agtcctccaaggagg

SEQ ID NO: 121269 - DNA, 15 bp, Homo sapiens
gtcctccaaggaggc

SEQ ID NO: 121270 - DNA, 15 bp, Homo sapiens
tcctccaaggaggca

SEQ ID NO: 121271 - DNA, 15 bp, Homo sapiens
cctccaaggaggcac

SEQ ID NO: 121272 - DNA, 15 bp, Homo sapiens
ctccaaggaggcacc

SEQ ID NO: 121273 - DNA, 15 bp, Homo sapiens
tccaaggaggcacct

SEQ ID NO: 121274 - DNA, 15 bp, Homo sapiens
ccaaggaggcacctg

SEQ ID NO: 121275 - DNA, 15 bp, Homo sapiens
caaggaggcacctgt

SEQ ID NO: 121276 - DNA, 15 bp, Homo sapiens
aaggaggcacctgtg

SEQ ID NO: 121277 - DNA, 15 bp, Homo sapiens
aggaggcacctgtga

SEQ ID NO: 121278 - DNA, 15 bp, Homo sapiens
ggaggcacctgtgac

SEQ ID NO: 121279 - DNA, 15 bp, Homo sapiens
gaggcacctgtgaca

SEQ ID NO: 121280 - DNA, 15 bp, Homo sapiens
aggcacctgtgacac

SEQ ID NO: 121281 - DNA, 15 bp, Homo sapiens
ggcacctgtgacacc

SEQ ID NO: 121282 - DNA, 15 bp, Homo sapiens
gcacctgtgacaccc

SEQ ID NO: 121283 - DNA, 15 bp, Homo sapiens
cacctgtgacaccca

SEQ ID NO: 121284 - DNA, 15 bp, Homo sapiens
acctgtgacacccaa

SEQ ID NO: 121285 - DNA, 15 bp, Homo sapiens
cctgtgacacccaac

SEQ ID NO: 121286 - DNA, 15 bp, Homo sapiens
ctgtgacacccaacg

SEQ ID NO: 121287 - DNA, 15 bp, Homo sapiens
tgtgacacccaacgg

SEQ ID NO: 121288 - DNA, 15 bp, Homo sapiens
gtgacacccaacgga

SEQ ID NO: 121289 - DNA, 15 bp, Homo sapiens
tgacacccaacggag

SEQ ID NO: 121290 - DNA, 15 bp, Homo sapiens
gacacccaacggagt

SEQ ID NO: 121291 - DNA, 15 bp, Homo sapiens
acacccaacggagta

SEQ ID NO: 121292 - DNA, 15 bp, Homo sapiens
cacccaacggagtag

SEQ ID NO: 121293 - DNA, 15 bp, Homo sapiens
acccaacggagtagg

SEQ ID NO: 121294 - DNA, 15 bp, Homo sapiens
cccaacggagtaggg

SEQ ID NO: 121295 - DNA, 15 bp, Homo sapiens
ccaacggagtagggg

SEQ ID NO: 121296 - DNA, 15 bp, Homo sapiens
caacggagtaggggg

SEQ ID NO: 121297 - DNA, 15 bp, Homo sapiens
aacggagtagggggg

SEQ ID NO: 121298 - DNA, 15 bp, Homo sapiens
acggagtaggggggc

SEQ ID NO: 121299 - DNA, 15 bp, Homo sapiens
cggagtaggggggcg

SEQ ID NO: 121300 - DNA, 15 bp, Homo sapiens
ggagtaggggggcgg

SEQ ID NO: 121301 - DNA, 15 bp, Homo sapiens
gagtaggggggcggt

SEQ ID NO: 121302 - DNA, 15 bp, Homo sapiens
agtaggggggcggtg

SEQ ID NO: 121303 - DNA, 15 bp, Homo sapiens
gtaggggggcggtgt

SEQ ID NO: 121304 - DNA, 15 bp, Homo sapiens
taggggggcggtgtg

SEQ ID NO: 121305 - DNA, 15 bp, Homo sapiens
aggggggcggtgtgt

SEQ ID NO: 121306 - DNA, 15 bp, Homo sapiens
ggggggcggtgtgtt

SEQ ID NO: 121307 - DNA, 15 bp, Homo sapiens
gggggcggtgtgttc

SEQ ID NO: 121308 - DNA, 15 bp, Homo sapiens
ggggcggtgtgttca

SEQ ID NO: 121309 - DNA, 15 bp, Homo sapiens
gggcggtgtgttcag

SEQ ID NO: 121310 - DNA, 15 bp, Homo sapiens
ggcggtgtgttcagg

SEQ ID NO: 121311 - DNA, 15 bp, Homo sapiens
gcggtgtgttcaggt

SEQ ID NO: 121312 - DNA, 15 bp, Homo sapiens
cggtgtgttcaggtg

SEQ ID NO: 121313 - DNA, 15 bp, Homo sapiens
ggtgtgttcaggtgc

SEQ ID NO: 121314 - DNA, 15 bp, Homo sapiens
gtgtgttcaggtgca

SEQ ID NO: 121315 - DNA, 15 bp, Homo sapiens
tgtgttcaggtgcag

SEQ ID NO: 121316 - DNA, 15 bp, Homo sapiens
gtgttcaggtgcagg

SEQ ID NO: 121317 - DNA, 15 bp, Homo sapiens
tgttcaggtgcaggt

SEQ ID NO: 121318 - DNA, 15 bp, Homo sapiens
gttcaggtgcaggtg

SEQ ID NO: 121319 - DNA, 15 bp, Homo sapiens
ttcaggtgcaggtgg

SEQ ID NO: 121320 - DNA, 15 bp, Homo sapiens
tcaggtgcaggtgga

SEQ ID NO: 121321 - DNA, 15 bp, Homo sapiens
caggtgcaggtggaa

SEQ ID NO: 121322 - DNA, 15 bp, Homo sapiens
aggtgcaggtggaac

SEQ ID NO: 121323 - DNA, 15 bp, Homo sapiens
ggtgcaggtggaaca

SEQ ID NO: 121324 - DNA, 15 bp, Homo sapiens
gtgcaggtggaacaa

SEQ ID NO: 121325 - DNA, 15 bp, Homo sapiens
tgcaggtggaacaag

SEQ ID NO: 121326 - DNA, 15 bp, Homo sapiens
gcaggtggaacaagg

SEQ ID NO: 121327 - DNA, 15 bp, Homo sapiens
caggtggaacaaggc

SEQ ID NO: 121328 - DNA, 15 bp, Homo sapiens
aggtggaacaaggcc

SEQ ID NO: 121329 - DNA, 15 bp, Homo sapiens
ggtggaacaaggcca

SEQ ID NO: 121330 - DNA, 15 bp, Homo sapiens
gtggaacaaggccag

SEQ ID NO: 121331 - DNA, 15 bp, Homo sapiens
tggaacaaggccaga

SEQ ID NO: 121332 - DNA, 15 bp, Homo sapiens
ggaacaaggccagaa

SEQ ID NO: 121333 - DNA, 15 bp, Homo sapiens
gaacaaggccagaag

SEQ ID NO: 121334 - DNA, 15 bp, Homo sapiens
aacaaggccagaagt

SEQ ID NO: 121335 - DNA, 15 bp, Homo sapiens
acaaggccagaagtg

SEQ ID NO: 121336 - DNA, 15 bp, Homo sapiens
caaggccagaagtgt

SEQ ID NO: 121337 - DNA, 15 bp, Homo sapiens
aaggccagaagtgtg

SEQ ID NO: 121338 - DNA, 15 bp, Homo sapiens
aggccagaagtgtgc

SEQ ID NO: 121339 - DNA, 15 bp, Homo sapiens
ggccagaagtgtgca

SEQ ID NO: 121340 - DNA, 15 bp, Homo sapiens
gccagaagtgtgcat

SEQ ID NO: 121341 - DNA, 15 bp, Homo sapiens
ccagaagtgtgcata

SEQ ID NO: 121342 - DNA, 15 bp, Homo sapiens
cagaagtgtgcatat

SEQ ID NO: 121343 - DNA, 15 bp, Homo sapiens
agaagtgtgcatatg

SEQ ID NO: 121344 - DNA, 15 bp, Homo sapiens
gaagtgtgcatatgt

SEQ ID NO: 121345 - DNA, 15 bp, Homo sapiens
aagtgtgcatatgtg

SEQ ID NO: 121346 - DNA, 15 bp, Homo sapiens
agtgtgcatatgtgc

SEQ ID NO: 121347 - DNA, 15 bp, Homo sapiens
gtgtgcatatgtgct

SEQ ID NO: 121348 - DNA, 15 bp, Homo sapiens
tgtgcatatgtgctg

SEQ ID NO: 121349 - DNA, 15 bp, Homo sapiens
gtgcatatgtgctga

SEQ ID NO: 121350 - DNA, 15 bp, Homo sapiens
tgcatatgtgctgac

SEQ ID NO: 121351 - DNA, 15 bp, Homo sapiens
gcatatgtgctgacc

SEQ ID NO: 121352 - DNA, 15 bp, Homo sapiens
catatgtgctgacca

SEQ ID NO: 121353 - DNA, 15 bp, Homo sapiens
atatgtgctgaccat

SEQ ID NO: 121354 - DNA, 15 bp, Homo sapiens
tatgtgctgaccatg

SEQ ID NO: 121355 - DNA, 15 bp, Homo sapiens
atgtgctgaccatgg

SEQ ID NO: 121356 - DNA, 15 bp, Homo sapiens
tgtgctgaccatggg

SEQ ID NO: 121357 - DNA, 15 bp, Homo sapiens
gtgctgaccatggga

SEQ ID NO: 121358 - DNA, 15 bp, Homo sapiens
tgctgaccatgggag

SEQ ID NO: 121359 - DNA, 15 bp, Homo sapiens
gctgaccatgggagc

SEQ ID NO: 121360 - DNA, 15 bp, Homo sapiens
ctgaccatgggagct

SEQ ID NO: 121361 - DNA, 15 bp, Homo sapiens
tgaccatgggagctt

SEQ ID NO: 121362 - DNA, 15 bp, Homo sapiens
gaccatgggagcttg

SEQ ID NO: 121363 - DNA, 15 bp, Homo sapiens
accatgggagcttgt

SEQ ID NO: 121364 - DNA, 15 bp, Homo sapiens
ccatgggagcttgtt

SEQ ID NO: 121365 - DNA, 15 bp, Homo sapiens
catgggagcttgttt

SEQ ID NO: 121366 - DNA, 15 bp, Homo sapiens
atgggagcttgtttg

SEQ ID NO: 121367 - DNA, 15 bp, Homo sapiens
tgggagcttgtttgt

SEQ ID NO: 121368 - DNA, 15 bp, Homo sapiens
gggagcttgtttgtc

SEQ ID NO: 121369 - DNA, 15 bp, Homo sapiens
ggagcttgtttgtcg

SEQ ID NO: 121370 - DNA, 15 bp, Homo sapiens
gagcttgtttgtcgg

SEQ ID NO: 121371 - DNA, 15 bp, Homo sapiens
agcttgtttgtcggt

SEQ ID NO: 121372 - DNA, 15 bp, Homo sapiens
gcttgtttgtcggtt

SEQ ID NO: 121373 - DNA, 15 bp, Homo sapiens
cttgtttgtcggttt

SEQ ID NO: 121374 - DNA, 15 bp, Homo sapiens
ttgtttgtcggtttc

SEQ ID NO: 121375 - DNA, 15 bp, Homo sapiens
tgtttgtcggtttca

SEQ ID NO: 121376 - DNA, 15 bp, Homo sapiens
gtttgtcggtttcac

SEQ ID NO: 121377 - DNA, 15 bp, Homo sapiens
tttgtcggtttcaca

SEQ ID NO: 121378 - DNA, 15 bp, Homo sapiens
ttgtcggtttcacag

SEQ ID NO: 121379 - DNA, 15 bp, Homo sapiens
tgtcggtttcacagt

SEQ ID NO: 121380 - DNA, 15 bp, Homo sapiens
gtcggtttcacagtt

SEQ ID NO: 121381 - DNA, 15 bp, Homo sapiens
tcggtttcacagttg

SEQ ID NO: 121382 - DNA, 15 bp, Homo sapiens
cggtttcacagttga

SEQ ID NO: 121383 - DNA, 15 bp, Homo sapiens
ggtttcacagttgat

SEQ ID NO: 121384 - DNA, 15 bp, Homo sapiens
gtttcacagttgatg

SEQ ID NO: 121385 - DNA, 15 bp, Homo sapiens
tttcacagttgatgc

SEQ ID NO: 121386 - DNA, 15 bp, Homo sapiens
ttcacagttgatgcc

SEQ ID NO: 121387 - DNA, 15 bp, Homo sapiens
tcacagttgatgccc

SEQ ID NO: 121388 - DNA, 15 bp, Homo sapiens
cacagttgatgccct

SEQ ID NO: 121389 - DNA, 15 bp, Homo sapiens
acagttgatgccctg

SEQ ID NO: 121390 - DNA, 15 bp, Homo sapiens
cagttgatgccctga

SEQ ID NO: 121391 - DNA, 15 bp, Homo sapiens
agttgatgccctgag

SEQ ID NO: 121392 - DNA, 15 bp, Homo sapiens
gttgatgccctgagc

SEQ ID NO: 121393 - DNA, 15 bp, Homo sapiens
ttgatgccctgagcc

SEQ ID NO: 121394 - DNA, 15 bp, Homo sapiens
tgatgccctgagcct

SEQ ID NO: 121395 - DNA, 15 bp, Homo sapiens
gatgccctgagcctg

SEQ ID NO: 121396 - DNA, 15 bp, Homo sapiens
atgccctgagcctgc

SEQ ID NO: 121397 - DNA, 15 bp, Homo sapiens
tgccctgagcctgcc

SEQ ID NO: 121398 - DNA, 15 bp, Homo sapiens
gccctgagcctgcca

SEQ ID NO: 121399 - DNA, 15 bp, Homo sapiens
ccctgagcctgccat

SEQ ID NO: 121400 - DNA, 15 bp, Homo sapiens
cctgagcctgccata

SEQ ID NO: 121401 - DNA, 15 bp, Homo sapiens
ctgagcctgccatag

SEQ ID NO: 121402 - DNA, 15 bp, Homo sapiens
tgagcctgccatagc

SEQ ID NO: 121403 - DNA, 15 bp, Homo sapiens
gagcctgccatagca

SEQ ID NO: 121404 - DNA, 15 bp, Homo sapiens
agcctgccatagcag

SEQ ID NO: 121405 - DNA, 15 bp, Homo sapiens
gcctgccatagcaga

SEQ ID NO: 121406 - DNA, 15 bp, Homo sapiens
cctgccatagcagac

SEQ ID NO: 121407 - DNA, 15 bp, Homo sapiens
ctgccatagcagact

SEQ ID NO: 121408 - DNA, 15 bp, Homo sapiens
tgccatagcagactt

SEQ ID NO: 121409 - DNA, 15 bp, Homo sapiens
gccatagcagacttg

SEQ ID NO: 121410 - DNA, 15 bp, Homo sapiens
ccatagcagacttgt

SEQ ID NO: 121411 - DNA, 15 bp, Homo sapiens
catagcagacttgtt

SEQ ID NO: 121412 - DNA, 15 bp, Homo sapiens
atagcagacttgttt

SEQ ID NO: 121413 - DNA, 15 bp, Homo sapiens
tagcagacttgtttc

SEQ ID NO: 121414 - DNA, 15 bp, Homo sapiens
agcagacttgtttct

SEQ ID NO: 121415 - DNA, 15 bp, Homo sapiens
gcagacttgtttctc

SEQ ID NO: 121416 - DNA, 15 bp, Homo sapiens
cagacttgtttctcc

SEQ ID NO: 121417 - DNA, 15 bp, Homo sapiens
agacttgtttctcca

SEQ ID NO: 121418 - DNA, 15 bp, Homo sapiens
gacttgtttctccat

SEQ ID NO: 121419 - DNA, 15 bp, Homo sapiens
acttgtttctccatg

SEQ ID NO: 121420 - DNA, 15 bp, Homo sapiens
cttgtttctccatgg

SEQ ID NO: 121421 - DNA, 15 bp, Homo sapiens
ttgtttctccatggg

SEQ ID NO: 121422 - DNA, 15 bp, Homo sapiens
tgtttctccatggga

SEQ ID NO: 121423 - DNA, 15 bp, Homo sapiens
gtttctccatgggat

SEQ ID NO: 121424 - DNA, 15 bp, Homo sapiens
tttctccatgggatg

SEQ ID NO: 121425 - DNA, 15 bp, Homo sapiens
ttctccatgggatgc

SEQ ID NO: 121426 - DNA, 15 bp, Homo sapiens
tctccatgggatgct

SEQ ID NO: 121427 - DNA, 15 bp, Homo sapiens
ctccatgggatgctg

SEQ ID NO: 121428 - DNA, 15 bp, Homo sapiens
tccatgggatgctgt

SEQ ID NO: 121429 - DNA, 15 bp, Homo sapiens
ccatgggatgctgtt

SEQ ID NO: 121430 - DNA, 15 bp, Homo sapiens
catgggatgctgttt

SEQ ID NO: 121431 - DNA, 15 bp, Homo sapiens
atgggatgctgtttt

SEQ ID NO: 121432 - DNA, 15 bp, Homo sapiens
tgggatgctgttttc

SEQ ID NO: 121433 - DNA, 15 bp, Homo sapiens
gggatgctgttttct

SEQ ID NO: 121434 - DNA, 15 bp, Homo sapiens
ggatgctgttttctt

SEQ ID NO: 121435 - DNA, 15 bp, Homo sapiens
gatgctgttttcttt

SEQ ID NO: 121436 - DNA, 15 bp, Homo sapiens
atgctgttttctttc

SEQ ID NO: 121437 - DNA, 15 bp, Homo sapiens
tgctgttttctttcc

SEQ ID NO: 121438 - DNA, 15 bp, Homo sapiens
gctgttttctttcca

SEQ ID NO: 121439 - DNA, 15 bp, Homo sapiens
ctgttttctttccag

SEQ ID NO: 121440 - DNA, 15 bp, Homo sapiens
tgttttctttccaga

SEQ ID NO: 121441 - DNA, 15 bp, Homo sapiens
gttttctttccagag

SEQ ID NO: 121442 - DNA, 15 bp, Homo sapiens
ttttctttccagaga

SEQ ID NO: 121443 - DNA, 15 bp, Homo sapiens
tttctttccagagac

SEQ ID NO: 121444 - DNA, 15 bp, Homo sapiens
ttctttccagagaca

SEQ ID NO: 121445 - DNA, 15 bp, Homo sapiens
tctttccagagacac

SEQ ID NO: 121446 - DNA, 15 bp, Homo sapiens
ctttccagagacaca

SEQ ID NO: 121447 - DNA, 15 bp, Homo sapiens
tttccagagacacag

SEQ ID NO: 121448 - DNA, 15 bp, Homo sapiens
ttccagagacacagc

SEQ ID NO: 121449 - DNA, 15 bp, Homo sapiens
tccagagacacagcg

SEQ ID NO: 121450 - DNA, 15 bp, Homo sapiens
ccagagacacagcgc

SEQ ID NO: 121451 - DNA, 15 bp, Homo sapiens
cagagacacagcgct

SEQ ID NO: 121452 - DNA, 15 bp, Homo sapiens
agagacacagcgcta

SEQ ID NO: 121453 - DNA, 15 bp, Homo sapiens
gagacacagcgctag

SEQ ID NO: 121454 - DNA, 15 bp, Homo sapiens
agacacagcgctagg

SEQ ID NO: 121455 - DNA, 15 bp, Homo sapiens
gacacagcgctaggg

SEQ ID NO: 121456 - DNA, 15 bp, Homo sapiens
acacagcgctagggt

SEQ ID NO: 121457 - DNA, 15 bp, Homo sapiens
cacagcgctagggtt

SEQ ID NO: 121458 - DNA, 15 bp, Homo sapiens
acagcgctagggttg

SEQ ID NO: 121459 - DNA, 15 bp, Homo sapiens
cagcgctagggttgt

SEQ ID NO: 121460 - DNA, 15 bp, Homo sapiens
agcgctagggttgtc

SEQ ID NO: 121461 - DNA, 15 bp, Homo sapiens
gcgctagggttgtcc

SEQ ID NO: 121462 - DNA, 15 bp, Homo sapiens
cgctagggttgtcct

SEQ ID NO: 121463 - DNA, 15 bp, Homo sapiens
gctagggttgtcctc

SEQ ID NO: 121464 - DNA, 15 bp, Homo sapiens
ctagggttgtcctca

SEQ ID NO: 121465 - DNA, 15 bp, Homo sapiens
tagggttgtcctcat

SEQ ID NO: 121466 - DNA, 15 bp, Homo sapiens
agggttgtcctcatt

SEQ ID NO: 121467 - DNA, 15 bp, Homo sapiens
gggttgtcctcatta

SEQ ID NO: 121468 - DNA, 15 bp, Homo sapiens
ggttgtcctcattac

SEQ ID NO: 121469 - DNA, 15 bp, Homo sapiens
gttgtcctcattacc

SEQ ID NO: 121470 - DNA, 15 bp, Homo sapiens
ttgtcctcattacct

SEQ ID NO: 121471 - DNA, 15 bp, Homo sapiens
tgtcctcattacctg

SEQ ID NO: 121472 - DNA, 15 bp, Homo sapiens
gtcctcattacctga

SEQ ID NO: 121473 - DNA, 15 bp, Homo sapiens
tcctcattacctgag

SEQ ID NO: 121474 - DNA, 15 bp, Homo sapiens
cctcattacctgaga

SEQ ID NO: 121475 - DNA, 15 bp, Homo sapiens
ctcattacctgagag

SEQ ID NO: 121476 - DNA, 15 bp, Homo sapiens
tcattacctgagagc

SEQ ID NO: 121477 - DNA, 15 bp, Homo sapiens
cattacctgagagcc

SEQ ID NO: 121478 - DNA, 15 bp, Homo sapiens
attacctgagagcca

SEQ ID NO: 121479 - DNA, 15 bp, Homo sapiens
ttacctgagagccag

SEQ ID NO: 121480 - DNA, 15 bp, Homo sapiens
tacctgagagccagg

SEQ ID NO: 121481 - DNA, 15 bp, Homo sapiens
acctgagagccaggt

SEQ ID NO: 121482 - DNA, 15 bp, Homo sapiens
cctgagagccaggtg

SEQ ID NO: 121483 - DNA, 15 bp, Homo sapiens
ctgagagccaggtgt

SEQ ID NO: 121484 - DNA, 15 bp, Homo sapiens
tgagagccaggtgtc

SEQ ID NO: 121485 - DNA, 15 bp, Homo sapiens
gagagccaggtgtcg

SEQ ID NO: 121486 - DNA, 15 bp, Homo sapiens
agagccaggtgtcgg

SEQ ID NO: 121487 - DNA, 15 bp, Homo sapiens
gagccaggtgtcggt

SEQ ID NO: 121488 - DNA, 15 bp, Homo sapiens
agccaggtgtcggta

SEQ ID NO: 121489 - DNA, 15 bp, Homo sapiens
gccaggtgtcggtag

SEQ ID NO: 121490 - DNA, 15 bp, Homo sapiens
ccaggtgtcggtagc

SEQ ID NO: 121491 - DNA, 15 bp, Homo sapiens
caggtgtcggtagca

SEQ ID NO: 121492 - DNA, 15 bp, Homo sapiens
aggtgtcggtagcat

SEQ ID NO: 121493 - DNA, 15 bp, Homo sapiens
ggtgtcggtagcatt

SEQ ID NO: 121494 - DNA, 15 bp, Homo sapiens
gtgtcggtagcattt

SEQ ID NO: 121495 - DNA, 15 bp, Homo sapiens
tgtcggtagcatttt

SEQ ID NO: 121496 - DNA, 15 bp, Homo sapiens
gtcggtagcattttc

SEQ ID NO: 121497 - DNA, 15 bp, Homo sapiens
tcggtagcattttct

SEQ ID NO: 121498 - DNA, 15 bp, Homo sapiens
cggtagcattttctt

SEQ ID NO: 121499 - DNA, 15 bp, Homo sapiens
ggtagcattttcttg

SEQ ID NO: 121500 - DNA, 15 bp, Homo sapiens
gtagcattttcttgg

SEQ ID NO: 121501 - DNA, 15 bp, Homo sapiens
tagcattttcttggt

SEQ ID NO: 121502 - DNA, 15 bp, Homo sapiens
agcattttcttggtg

SEQ ID NO: 121503 - DNA, 15 bp, Homo sapiens
gcattttcttggtgt

SEQ ID NO: 121504 - DNA, 15 bp, Homo sapiens
cattttcttggtgtt

SEQ ID NO: 121505 - DNA, 15 bp, Homo sapiens
attttcttggtgttt

SEQ ID NO: 121506 - DNA, 15 bp, Homo sapiens
ttttcttggtgttta

SEQ ID NO: 121507 - DNA, 15 bp, Homo sapiens
tttcttggtgtttac

SEQ ID NO: 121508 - DNA, 15 bp, Homo sapiens
ttcttggtgtttact

SEQ ID NO: 121509 - DNA, 15 bp, Homo sapiens
tcttggtgtttactc

SEQ ID NO: 121510 - DNA, 15 bp, Homo sapiens
cttggtgtttactca

SEQ ID NO: 121511 - DNA, 15 bp, Homo sapiens
ttggtgtttactcac

SEQ ID NO: 121512 - DNA, 15 bp, Homo sapiens
tggtgtttactcaca

SEQ ID NO: 121513 - DNA, 15 bp, Homo sapiens
ggtgtttactcacac

SEQ ID NO: 121514 - DNA, 15 bp, Homo sapiens
gtgtttactcacact

SEQ ID NO: 121515 - DNA, 15 bp, Homo sapiens
tgtttactcacactc

SEQ ID NO: 121516 - DNA, 15 bp, Homo sapiens
gtttactcacactca

SEQ ID NO: 121517 - DNA, 15 bp, Homo sapiens
tttactcacactcat

SEQ ID NO: 121518 - DNA, 15 bp, Homo sapiens
ttactcacactcatc

SEQ ID NO: 121519 - DNA, 15 bp, Homo sapiens
tactcacactcatct

SEQ ID NO: 121520 - DNA, 15 bp, Homo sapiens
actcacactcatcta

SEQ ID NO: 121521 - DNA, 15 bp, Homo sapiens
ctcacactcatctaa

SEQ ID NO: 121522 - DNA, 15 bp, Homo sapiens
tcacactcatctaag

SEQ ID NO: 121523 - DNA, 15 bp, Homo sapiens
cacactcatctaagg

SEQ ID NO: 121524 - DNA, 15 bp, Homo sapiens
acactcatctaaggc

SEQ ID NO: 121525 - DNA, 15 bp, Homo sapiens
cactcatctaaggca

SEQ ID NO: 121526 - DNA, 15 bp, Homo sapiens
actcatctaaggcac

SEQ ID NO: 121527 - DNA, 15 bp, Homo sapiens
ctcatctaaggcacg

SEQ ID NO: 121528 - DNA, 15 bp, Homo sapiens
tcatctaaggcacgt

SEQ ID NO: 121529 - DNA, 15 bp, Homo sapiens
catctaaggcacgtt

SEQ ID NO: 121530 - DNA, 15 bp, Homo sapiens
atctaaggcacgttg

SEQ ID NO: 121531 - DNA, 15 bp, Homo sapiens
tctaaggcacgttgt

SEQ ID NO: 121532 - DNA, 15 bp, Homo sapiens
ctaaggcacgttgtg

SEQ ID NO: 121533 - DNA, 15 bp, Homo sapiens
taaggcacgttgtgg

SEQ ID NO: 121534 - DNA, 15 bp, Homo sapiens
aaggcacgttgtggt

SEQ ID NO: 121535 - DNA, 15 bp, Homo sapiens
aggcacgttgtggtt

SEQ ID NO: 121536 - DNA, 15 bp, Homo sapiens
ggcacgttgtggttt

SEQ ID NO: 121537 - DNA, 15 bp, Homo sapiens
gcacgttgtggtttt

SEQ ID NO: 121538 - DNA, 15 bp, Homo sapiens
cacgttgtggttttc

SEQ ID NO: 121539 - DNA, 15 bp, Homo sapiens
acgttgtggttttcc

SEQ ID NO: 121540 - DNA, 15 bp, Homo sapiens
cgttgtggttttcca

SEQ ID NO: 121541 - DNA, 15 bp, Homo sapiens
gttgtggttttccag

SEQ ID NO: 121542 - DNA, 15 bp, Homo sapiens
ttgtggttttccaga

SEQ ID NO: 121543 - DNA, 15 bp, Homo sapiens
tgtggttttccagat

SEQ ID NO: 121544 - DNA, 15 bp, Homo sapiens
gtggttttccagatt

SEQ ID NO: 121545 - DNA, 15 bp, Homo sapiens
tggttttccagatta

SEQ ID NO: 121546 - DNA, 15 bp, Homo sapiens
ggttttccagattag

SEQ ID NO: 121547 - DNA, 15 bp, Homo sapiens
gttttccagattagg

SEQ ID NO: 121548 - DNA, 15 bp, Homo sapiens
ttttccagattagga

SEQ ID NO: 121549 - DNA, 15 bp, Homo sapiens
tttccagattaggaa

SEQ ID NO: 121550 - DNA, 15 bp, Homo sapiens
ttccagattaggaaa

SEQ ID NO: 121551 - DNA, 15 bp, Homo sapiens
tccagattaggaaac

SEQ ID NO: 121552 - DNA, 15 bp, Homo sapiens
ccagattaggaaact

SEQ ID NO: 121553 - DNA, 15 bp, Homo sapiens
cagattaggaaactg

SEQ ID NO: 121554 - DNA, 15 bp, Homo sapiens
agattaggaaactgc

SEQ ID NO: 121555 - DNA, 15 bp, Homo sapiens
gattaggaaactgct

SEQ ID NO: 121556 - DNA, 15 bp, Homo sapiens
attaggaaactgctt

SEQ ID NO: 121557 - DNA, 15 bp, Homo sapiens
ttaggaaactgcttt

SEQ ID NO: 121558 - DNA, 15 bp, Homo sapiens
taggaaactgcttta

SEQ ID NO: 121559 - DNA, 15 bp, Homo sapiens
aggaaactgctttat

SEQ ID NO: 121560 - DNA, 15 bp, Homo sapiens
ggaaactgctttatt

SEQ ID NO: 121561 - DNA, 15 bp, Homo sapiens
gaaactgctttattg

SEQ ID NO: 121562 - DNA, 15 bp, Homo sapiens
aaactgctttattga

SEQ ID NO: 121563 - DNA, 15 bp, Homo sapiens
aactgctttattgat

SEQ ID NO: 121564 - DNA, 15 bp, Homo sapiens
actgctttattgatg

SEQ ID NO: 121565 - DNA, 15 bp, Homo sapiens
ctgctttattgatgg

SEQ ID NO: 121566 - DNA, 15 bp, Homo sapiens
tgctttattgatggt

SEQ ID NO: 121567 - DNA, 15 bp, Homo sapiens
gctttattgatggtg

SEQ ID NO: 121568 - DNA, 15 bp, Homo sapiens
ctttattgatggtgc

SEQ ID NO: 121569 - DNA, 15 bp, Homo sapiens
tttattgatggtgct

SEQ ID NO: 121570 - DNA, 15 bp, Homo sapiens
ttattgatggtgctt

SEQ ID NO: 121571 - DNA, 15 bp, Homo sapiens
tattgatggtgcttt

SEQ ID NO: 121572 - DNA, 15 bp, Homo sapiens
attgatggtgctttt

SEQ ID NO: 121573 - DNA, 15 bp, Homo sapiens
ttgatggtgcttttt

SEQ ID NO: 121574 - DNA, 15 bp, Homo sapiens
tgatggtgctttttt

SEQ ID NO: 121575 - DNA, 15 bp, Homo sapiens
gatggtgcttttttt

SEQ ID NO: 121576 - DNA, 15 bp, Homo sapiens
atggtgctttttttt

SEQ ID NO: 121577 - DNA, 15 bp, Homo sapiens
tggtgcttttttttt

SEQ ID NO: 121578 - DNA, 15 bp, Homo sapiens
ggtgctttttttttt

SEQ ID NO: 121579 - DNA, 15 bp, Homo sapiens
gtgcttttttttttt

SEQ ID NO: 121580 - DNA, 15 bp, Homo sapiens
ttttttttgagacag

SEQ ID NO: 121581 - DNA, 15 bp, Homo sapiens
ttttttgagacagag

SEQ ID NO: 121582 - DNA, 15 bp, Homo sapiens
tttttgagacagagt

SEQ ID NO: 121583 - DNA, 15 bp, Homo sapiens
ttttgagacagagtc

SEQ ID NO: 121584 - DNA, 15 bp, Homo sapiens
tttgagacagagtct

SEQ ID NO: 121585 - DNA, 15 bp, Homo sapiens
ttgagacagagtctc

SEQ ID NO: 121586 - DNA, 15 bp, Homo sapiens
tgagacagagtctcg

SEQ ID NO: 121587 - DNA, 15 bp, Homo sapiens
gagacagagtctcgc

SEQ ID NO: 121588 - DNA, 15 bp, Homo sapiens
agacagagtctcgct

SEQ ID NO: 121589 - DNA, 15 bp, Homo sapiens
gacagagtctcgctc

SEQ ID NO: 121590 - DNA, 15 bp, Homo sapiens
acagagtctcgctct

SEQ ID NO: 121591 - DNA, 15 bp, Homo sapiens
cagagtctcgctctg

SEQ ID NO: 121592 - DNA, 15 bp, Homo sapiens
agagtctcgctctgt

SEQ ID NO: 121593 - DNA, 15 bp, Homo sapiens
agtctcgctctgtcg

SEQ ID NO: 121594 - DNA, 15 bp, Homo sapiens
gtctcgctctgtcgc

SEQ ID NO: 121595 - DNA, 15 bp, Homo sapiens
tctcgctctgtcgcc

SEQ ID NO: 121596 - DNA, 15 bp, Homo sapiens
ctcgctctgtcgcca

SEQ ID NO: 121597 - DNA, 15 bp, Homo sapiens
tcgctctgtcgccat

SEQ ID NO: 121598 - DNA, 15 bp, Homo sapiens
cgctctgtcgccatg

SEQ ID NO: 121599 - DNA, 15 bp, Homo sapiens
gctctgtcgccatgc

SEQ ID NO: 121600 - DNA, 15 bp, Homo sapiens
ctctgtcgccatgct

SEQ ID NO: 121601 - DNA, 15 bp, Homo sapiens
tctgtcgccatgctg

SEQ ID NO: 121602 - DNA, 15 bp, Homo sapiens
ctgtcgccatgctgg

SEQ ID NO: 121603 - DNA, 15 bp, Homo sapiens
tgtcgccatgctgga

SEQ ID NO: 121604 - DNA, 15 bp, Homo sapiens
gtcgccatgctggag

SEQ ID NO: 121605 - DNA, 15 bp, Homo sapiens
tcgccatgctggagt

SEQ ID NO: 121606 - DNA, 15 bp, Homo sapiens
cgccatgctggagtg

SEQ ID NO: 121607 - DNA, 15 bp, Homo sapiens
gccatgctggagtgt

SEQ ID NO: 121608 - DNA, 15 bp, Homo sapiens
ccatgctggagtgta

SEQ ID NO: 121609 - DNA, 15 bp, Homo sapiens
catgctggagtgtag

SEQ ID NO: 121610 - DNA, 15 bp, Homo sapiens
atgctggagtgtagt

SEQ ID NO: 121611 - DNA, 15 bp, Homo sapiens
tgctggagtgtagtg

SEQ ID NO: 121612 - DNA, 15 bp, Homo sapiens
gctggagtgtagtgg

SEQ ID NO: 121613 - DNA, 15 bp, Homo sapiens
ctggagtgtagtggc

SEQ ID NO: 121614 - DNA, 15 bp, Homo sapiens
tggagtgtagtggca

SEQ ID NO: 121615 - DNA, 15 bp, Homo sapiens
ggagtgtagtggcac

SEQ ID NO: 121616 - DNA, 15 bp, Homo sapiens
gagtgtagtggcaca

SEQ ID NO: 121617 - DNA, 15 bp, Homo sapiens
agtgtagtggcacaa

SEQ ID NO: 121618 - DNA, 15 bp, Homo sapiens
gtgtagtggcacaat

SEQ ID NO: 121619 - DNA, 15 bp, Homo sapiens
tgtagtggcacaatc

SEQ ID NO: 121620 - DNA, 15 bp, Homo sapiens
gtagtggcacaatct

SEQ ID NO: 121621 - DNA, 15 bp, Homo sapiens
tagtggcacaatctt

SEQ ID NO: 121622 - DNA, 15 bp, Homo sapiens
agtggcacaatcttg

SEQ ID NO: 121623 - DNA, 15 bp, Homo sapiens
gtggcacaatcttgg

SEQ ID NO: 121624 - DNA, 15 bp, Homo sapiens
tggcacaatcttggc

SEQ ID NO: 121625 - DNA, 15 bp, Homo sapiens
ggcacaatcttggct

SEQ ID NO: 121626 - DNA, 15 bp, Homo sapiens
gcacaatcttggctc

SEQ ID NO: 121627 - DNA, 15 bp, Homo sapiens
cacaatcttggctca

SEQ ID NO: 121628 - DNA, 15 bp, Homo sapiens
acaatcttggctcac

SEQ ID NO: 121629 - DNA, 15 bp, Homo sapiens
caatcttggctcact

SEQ ID NO: 121630 - DNA, 15 bp, Homo sapiens
aatcttggctcactg

SEQ ID NO: 121631 - DNA, 15 bp, Homo sapiens
cttggctcactgcac

SEQ ID NO: 121632 - DNA, 15 bp, Homo sapiens
ttggctcactgcacc

SEQ ID NO: 121633 - DNA, 15 bp, Homo sapiens
tggctcactgcacct

SEQ ID NO: 121634 - DNA, 15 bp, Homo sapiens
ggctcactgcacctc

SEQ ID NO: 121635 - DNA, 15 bp, Homo sapiens
gctcactgcacctcc

SEQ ID NO: 121636 - DNA, 15 bp, Homo sapiens
ctcactgcacctccg

SEQ ID NO: 121637 - DNA, 15 bp, Homo sapiens
tcactgcacctccgc

SEQ ID NO: 121638 - DNA, 15 bp, Homo sapiens
cactgcacctccgcc

SEQ ID NO: 121639 - DNA, 15 bp, Homo sapiens
actgcacctccgcct

SEQ ID NO: 121640 - DNA, 15 bp, Homo sapiens
ctgcacctccgcctg

SEQ ID NO: 121641 - DNA, 15 bp, Homo sapiens
tgcacctccgcctgc

SEQ ID NO: 121642 - DNA, 15 bp, Homo sapiens
gcacctccgcctgcc

SEQ ID NO: 121643 - DNA, 15 bp, Homo sapiens
cacctccgcctgcca

SEQ ID NO: 121644 - DNA, 15 bp, Homo sapiens
acctccgcctgccag

SEQ ID NO: 121645 - DNA, 15 bp, Homo sapiens
cctccgcctgccagg

SEQ ID NO: 121646 - DNA, 15 bp, Homo sapiens
ctccgcctgccaggt

SEQ ID NO: 121647 - DNA, 15 bp, Homo sapiens
tccgcctgccaggtt

SEQ ID NO: 121648 - DNA, 15 bp, Homo sapiens
ccgcctgccaggttc

SEQ ID NO: 121649 - DNA, 15 bp, Homo sapiens
cgcctgccaggttca

SEQ ID NO: 121650 - DNA, 15 bp, Homo sapiens
gcctgccaggttcag

SEQ ID NO: 121651 - DNA, 15 bp, Homo sapiens
cctgccaggttcagc

SEQ ID NO: 121652 - DNA, 15 bp, Homo sapiens
ctgccaggttcagcg

SEQ ID NO: 121653 - DNA, 15 bp, Homo sapiens
tgccaggttcagcga

SEQ ID NO: 121654 - DNA, 15 bp, Homo sapiens
gccaggttcagcgat

SEQ ID NO: 121655 - DNA, 15 bp, Homo sapiens
ccaggttcagcgatt

SEQ ID NO: 121656 - DNA, 15 bp, Homo sapiens
caggttcagcgattc

SEQ ID NO: 121657 - DNA, 15 bp, Homo sapiens
aggttcagcgattct

SEQ ID NO: 121658 - DNA, 15 bp, Homo sapiens
ggttcagcgattctc

SEQ ID NO: 121659 - DNA, 15 bp, Homo sapiens
gttcagcgattctcc

SEQ ID NO: 121660 - DNA, 15 bp, Homo sapiens
ttcagcgattctcct

SEQ ID NO: 121661 - DNA, 15 bp, Homo sapiens
tcagcgattctcctg

SEQ ID NO: 121662 - DNA, 15 bp, Homo sapiens
cagcgattctcctgc

SEQ ID NO: 121663 - DNA, 15 bp, Homo sapiens
tcccaagtagctggg

SEQ ID NO: 121664 - DNA, 15 bp, Homo sapiens
cccaagtagctggga

SEQ ID NO: 121665 - DNA, 15 bp, Homo sapiens
ccaagtagctgggac

SEQ ID NO: 121666 - DNA, 15 bp, Homo sapiens
caagtagctgggact

SEQ ID NO: 121667 - DNA, 15 bp, Homo sapiens
gctgggactacaggt

SEQ ID NO: 121668 - DNA, 15 bp, Homo sapiens
ctgggactacaggtg

SEQ ID NO: 121669 - DNA, 15 bp, Homo sapiens
tgggactacaggtgc

SEQ ID NO: 121670 - DNA, 15 bp, Homo sapiens
gggactacaggtgcc

SEQ ID NO: 121671 - DNA, 15 bp, Homo sapiens
ggactacaggtgcct

SEQ ID NO: 121672 - DNA, 15 bp, Homo sapiens
gactacaggtgcctg

SEQ ID NO: 121673 - DNA, 15 bp, Homo sapiens
actacaggtgcctgc

SEQ ID NO: 121674 - DNA, 15 bp, Homo sapiens
ctacaggtgcctgcc

SEQ ID NO: 121675 - DNA, 15 bp, Homo sapiens
ggtgcctgccaccat

SEQ ID NO: 121676 - DNA, 15 bp, Homo sapiens
gtgcctgccaccatg

SEQ ID NO: 121677 - DNA, 15 bp, Homo sapiens
tgcctgccaccatgc

SEQ ID NO: 121678 - DNA, 15 bp, Homo sapiens
gacggggtttcaccg

SEQ ID NO: 121679 - DNA, 15 bp, Homo sapiens
acggggtttcaccgt

SEQ ID NO: 121680 - DNA, 15 bp, Homo sapiens
cggggtttcaccgta

SEQ ID NO: 121681 - DNA, 15 bp, Homo sapiens
ggggtttcaccgtat

SEQ ID NO: 121682 - DNA, 15 bp, Homo sapiens
gggtttcaccgtatt

SEQ ID NO: 121683 - DNA, 15 bp, Homo sapiens
ggtttcaccgtattg

SEQ ID NO: 121684 - DNA, 15 bp, Homo sapiens
gtttcaccgtattgg

SEQ ID NO: 121685 - DNA, 15 bp, Homo sapiens
tttcaccgtattggc

SEQ ID NO: 121686 - DNA, 15 bp, Homo sapiens
ttcaccgtattggct

SEQ ID NO: 121687 - DNA, 15 bp, Homo sapiens
tcaccgtattggcta

SEQ ID NO: 121688 - DNA, 15 bp, Homo sapiens
caccgtattggctag

SEQ ID NO: 121689 - DNA, 15 bp, Homo sapiens
accgtattggctagg

SEQ ID NO: 121690 - DNA, 15 bp, Homo sapiens
ccgtattggctagga

SEQ ID NO: 121691 - DNA, 15 bp, Homo sapiens
cgtattggctaggat

SEQ ID NO: 121692 - DNA, 15 bp, Homo sapiens
gtattggctaggatg

SEQ ID NO: 121693 - DNA, 15 bp, Homo sapiens
tattggctaggatgg

SEQ ID NO: 121694 - DNA, 15 bp, Homo sapiens
attggctaggatggt

SEQ ID NO: 121695 - DNA, 15 bp, Homo sapiens
ttggctaggatggtc

SEQ ID NO: 121696 - DNA, 15 bp, Homo sapiens
tggctaggatggtct

SEQ ID NO: 121697 - DNA, 15 bp, Homo sapiens
ggctaggatggtctc

SEQ ID NO: 121698 - DNA, 15 bp, Homo sapiens
gctaggatggtctcg

SEQ ID NO: 121699 - DNA, 15 bp, Homo sapiens
ctaggatggtctcga

SEQ ID NO: 121700 - DNA, 15 bp, Homo sapiens
taggatggtctcgat

SEQ ID NO: 121701 - DNA, 15 bp, Homo sapiens
atggtctcgatttct

SEQ ID NO: 121702 - DNA, 15 bp, Homo sapiens
tggtctcgatttctt

SEQ ID NO: 121703 - DNA, 15 bp, Homo sapiens
ggtctcgatttcttg

SEQ ID NO: 121704 - DNA, 15 bp, Homo sapiens
gtctcgatttcttga

SEQ ID NO: 121705 - DNA, 15 bp, Homo sapiens
tctcgatttcttgac

SEQ ID NO: 121706 - DNA, 15 bp, Homo sapiens
ctcgatttcttgacc

SEQ ID NO: 121707 - DNA, 15 bp, Homo sapiens
tcgatttcttgacct

SEQ ID NO: 121708 - DNA, 15 bp, Homo sapiens
cgatttcttgacctc

SEQ ID NO: 121709 - DNA, 15 bp, Homo sapiens
gatttcttgacctcg

SEQ ID NO: 121710 - DNA, 15 bp, Homo sapiens
atttcttgacctcgt

SEQ ID NO: 121711 - DNA, 15 bp, Homo sapiens
tttcttgacctcgtg

SEQ ID NO: 121712 - DNA, 15 bp, Homo sapiens
ttcttgacctcgtga

SEQ ID NO: 121713 - DNA, 15 bp, Homo sapiens
tcttgacctcgtgat

SEQ ID NO: 121714 - DNA, 15 bp, Homo sapiens
cttgacctcgtgatc

SEQ ID NO: 121715 - DNA, 15 bp, Homo sapiens
ttgacctcgtgatcc

SEQ ID NO: 121716 - DNA, 15 bp, Homo sapiens
cctcgtgatccgcct

SEQ ID NO: 121717 - DNA, 15 bp, Homo sapiens
ctcgtgatccgcctg

SEQ ID NO: 121718 - DNA, 15 bp, Homo sapiens
tcgtgatccgcctgc

SEQ ID NO: 121719 - DNA, 15 bp, Homo sapiens
cgtgatccgcctgcc

SEQ ID NO: 121720 - DNA, 15 bp, Homo sapiens
gtgatccgcctgcct

SEQ ID NO: 121721 - DNA, 15 bp, Homo sapiens
tgatccgcctgcctc

SEQ ID NO: 121722 - DNA, 15 bp, Homo sapiens
gatccgcctgcctcg

SEQ ID NO: 121723 - DNA, 15 bp, Homo sapiens
atccgcctgcctcgg

SEQ ID NO: 121724 - DNA, 15 bp, Homo sapiens
tccgcctgcctcggc

SEQ ID NO: 121725 - DNA, 15 bp, Homo sapiens
ccgcctgcctcggcc

SEQ ID NO: 121726 - DNA, 15 bp, Homo sapiens
cgcctgcctcggcct

SEQ ID NO: 121727 - DNA, 15 bp, Homo sapiens
gcctgcctcggcctc

SEQ ID NO: 121728 - DNA, 15 bp, Homo sapiens
ctgggattataggct

SEQ ID NO: 121729 - DNA, 15 bp, Homo sapiens
tgggattataggctt

SEQ ID NO: 121730 - DNA, 15 bp, Homo sapiens
gggattataggcttg

SEQ ID NO: 121731 - DNA, 15 bp, Homo sapiens
ggattataggcttga

SEQ ID NO: 121732 - DNA, 15 bp, Homo sapiens
gattataggcttgag

SEQ ID NO: 121733 - DNA, 15 bp, Homo sapiens
attataggcttgagc

SEQ ID NO: 121734 - DNA, 15 bp, Homo sapiens
ttataggcttgagcc

SEQ ID NO: 121735 - DNA, 15 bp, Homo sapiens
tataggcttgagcca

SEQ ID NO: 121736 - DNA, 15 bp, Homo sapiens
ataggcttgagccac

SEQ ID NO: 121737 - DNA, 15 bp, Homo sapiens
taggcttgagccacc

SEQ ID NO: 121738 - DNA, 15 bp, Homo sapiens
aggcttgagccacca

SEQ ID NO: 121739 - DNA, 15 bp, Homo sapiens
ggcttgagccaccac

SEQ ID NO: 121740 - DNA, 15 bp, Homo sapiens
gcttgagccaccacg

SEQ ID NO: 121741 - DNA, 15 bp, Homo sapiens
cttgagccaccacgc

SEQ ID NO: 121742 - DNA, 15 bp, Homo sapiens
ttgagccaccacgcc

SEQ ID NO: 121743 - DNA, 15 bp, Homo sapiens
tgagccaccacgcct

SEQ ID NO: 121744 - DNA, 15 bp, Homo sapiens
gagccaccacgcctg

SEQ ID NO: 121745 - DNA, 15 bp, Homo sapiens
agccaccacgcctgg

SEQ ID NO: 121746 - DNA, 15 bp, Homo sapiens
ccaccacgcctggcc

SEQ ID NO: 121747 - DNA, 15 bp, Homo sapiens
caccacgcctggccg

SEQ ID NO: 121748 - DNA, 15 bp, Homo sapiens
accacgcctggccga

SEQ ID NO: 121749 - DNA, 15 bp, Homo sapiens
ccacgcctggccgat

SEQ ID NO: 121750 - DNA, 15 bp, Homo sapiens
cacgcctggccgatg

SEQ ID NO: 121751 - DNA, 15 bp, Homo sapiens
acgcctggccgatgg

SEQ ID NO: 121752 - DNA, 15 bp, Homo sapiens
cgcctggccgatggt

SEQ ID NO: 121753 - DNA, 15 bp, Homo sapiens
gcctggccgatggtg

SEQ ID NO: 121754 - DNA, 15 bp, Homo sapiens
cctggccgatggtgc

SEQ ID NO: 121755 - DNA, 15 bp, Homo sapiens
ctggccgatggtgct

SEQ ID NO: 121756 - DNA, 15 bp, Homo sapiens
tggccgatggtgctt

SEQ ID NO: 121757 - DNA, 15 bp, Homo sapiens
ggccgatggtgcttt

SEQ ID NO: 121758 - DNA, 15 bp, Homo sapiens
gccgatggtgctttt

SEQ ID NO: 121759 - DNA, 15 bp, Homo sapiens
ccgatggtgcttttt

SEQ ID NO: 121760 - DNA, 15 bp, Homo sapiens
cgatggtgcttttta

SEQ ID NO: 121761 - DNA, 15 bp, Homo sapiens
gatggtgctttttat

SEQ ID NO: 121762 - DNA, 15 bp, Homo sapiens
atggtgctttttatc

SEQ ID NO: 121763 - DNA, 15 bp, Homo sapiens
tggtgctttttatca

SEQ ID NO: 121764 - DNA, 15 bp, Homo sapiens
ggtgctttttatcat

SEQ ID NO: 121765 - DNA, 15 bp, Homo sapiens
gtgctttttatcatt

SEQ ID NO: 121766 - DNA, 15 bp, Homo sapiens
tgctttttatcattt

SEQ ID NO: 121767 - DNA, 15 bp, Homo sapiens
gctttttatcatttg

SEQ ID NO: 121768 - DNA, 15 bp, Homo sapiens
ctttttatcatttga

SEQ ID NO: 121769 - DNA, 15 bp, Homo sapiens
tttttatcatttgaa

SEQ ID NO: 121770 - DNA, 15 bp, Homo sapiens
ttttatcatttgaag

SEQ ID NO: 121771 - DNA, 15 bp, Homo sapiens
tttatcatttgaagg

SEQ ID NO: 121772 - DNA, 15 bp, Homo sapiens
ttatcatttgaagga

SEQ ID NO: 121773 - DNA, 15 bp, Homo sapiens
tatcatttgaaggac

SEQ ID NO: 121774 - DNA, 15 bp, Homo sapiens
atcatttgaaggact

SEQ ID NO: 121775 - DNA, 15 bp, Homo sapiens
tcatttgaaggactc

SEQ ID NO: 121776 - DNA, 15 bp, Homo sapiens
catttgaaggactca

SEQ ID NO: 121777 - DNA, 15 bp, Homo sapiens
atttgaaggactcag

SEQ ID NO: 121778 - DNA, 15 bp, Homo sapiens
tttgaaggactcagt

SEQ ID NO: 121779 - DNA, 15 bp, Homo sapiens
ttgaaggactcagtt

SEQ ID NO: 121780 - DNA, 15 bp, Homo sapiens
tgaaggactcagttg

SEQ ID NO: 121781 - DNA, 15 bp, Homo sapiens
gaaggactcagttgt

SEQ ID NO: 121782 - DNA, 15 bp, Homo sapiens
aaggactcagttgta

SEQ ID NO: 121783 - DNA, 15 bp, Homo sapiens
aggactcagttgtat

SEQ ID NO: 121784 - DNA, 15 bp, Homo sapiens
ggactcagttgtata

SEQ ID NO: 121785 - DNA, 15 bp, Homo sapiens
gactcagttgtataa

SEQ ID NO: 121786 - DNA, 15 bp, Homo sapiens
actcagttgtataac

SEQ ID NO: 121787 - DNA, 15 bp, Homo sapiens
ctcagttgtataacc

SEQ ID NO: 121788 - DNA, 15 bp, Homo sapiens
tcagttgtataaccc

SEQ ID NO: 121789 - DNA, 15 bp, Homo sapiens
cagttgtataaccca

SEQ ID NO: 121790 - DNA, 15 bp, Homo sapiens
agttgtataacccac

SEQ ID NO: 121791 - DNA, 15 bp, Homo sapiens
gttgtataacccact

SEQ ID NO: 121792 - DNA, 15 bp, Homo sapiens
ttgtataacccactg

SEQ ID NO: 121793 - DNA, 15 bp, Homo sapiens
tgtataacccactga

SEQ ID NO: 121794 - DNA, 15 bp, Homo sapiens
gtataacccactgaa

SEQ ID NO: 121795 - DNA, 15 bp, Homo sapiens
tataacccactgaaa

SEQ ID NO: 121796 - DNA, 15 bp, Homo sapiens
ataacccactgaaaa

SEQ ID NO: 121797 - DNA, 15 bp, Homo sapiens
taacccactgaaaat

SEQ ID NO: 121798 - DNA, 15 bp, Homo sapiens
aacccactgaaaatt

SEQ ID NO: 121799 - DNA, 15 bp, Homo sapiens
acccactgaaaatta

SEQ ID NO: 121800 - DNA, 15 bp, Homo sapiens
cccactgaaaattag

SEQ ID NO: 121801 - DNA, 15 bp, Homo sapiens
ccactgaaaattagt

SEQ ID NO: 121802 - DNA, 15 bp, Homo sapiens
cactgaaaattagta

SEQ ID NO: 121803 - DNA, 15 bp, Homo sapiens
actgaaaattagtat

SEQ ID NO: 121804 - DNA, 15 bp, Homo sapiens
ctgaaaattagtatg

SEQ ID NO: 121805 - DNA, 15 bp, Homo sapiens
tgaaaattagtatgt

SEQ ID NO: 121806 - DNA, 15 bp, Homo sapiens
gaaaattagtatgta

SEQ ID NO: 121807 - DNA, 15 bp, Homo sapiens
aaaattagtatgtaa

SEQ ID NO: 121808 - DNA, 15 bp, Homo sapiens
aaattagtatgtaag

SEQ ID NO: 121809 - DNA, 15 bp, Homo sapiens
aattagtatgtaagg

SEQ ID NO: 121810 - DNA, 15 bp, Homo sapiens
attagtatgtaagga

SEQ ID NO: 121811 - DNA, 15 bp, Homo sapiens
ttagtatgtaaggaa

SEQ ID NO: 121812 - DNA, 15 bp, Homo sapiens
tagtatgtaaggaag

SEQ ID NO: 121813 - DNA, 15 bp, Homo sapiens
agtatgtaaggaagt

SEQ ID NO: 121814 - DNA, 15 bp, Homo sapiens
gtatgtaaggaagtt

SEQ ID NO: 121815 - DNA, 15 bp, Homo sapiens
tatgtaaggaagttc

SEQ ID NO: 121816 - DNA, 15 bp, Homo sapiens
atgtaaggaagttca

SEQ ID NO: 121817 - DNA, 15 bp, Homo sapiens
tgtaaggaagttcag

SEQ ID NO: 121818 - DNA, 15 bp, Homo sapiens
gtaaggaagttcagg

SEQ ID NO: 121819 - DNA, 15 bp, Homo sapiens
taaggaagttcaggg

SEQ ID NO: 121820 - DNA, 15 bp, Homo sapiens
aaggaagttcaggga

SEQ ID NO: 121821 - DNA, 15 bp, Homo sapiens
aggaagttcagggaa

SEQ ID NO: 121822 - DNA, 15 bp, Homo sapiens
ggaagttcagggaat

SEQ ID NO: 121823 - DNA, 15 bp, Homo sapiens
gaagttcagggaata

SEQ ID NO: 121824 - DNA, 15 bp, Homo sapiens
aagttcagggaatag

SEQ ID NO: 121825 - DNA, 15 bp, Homo sapiens
agttcagggaatagt

SEQ ID NO: 121826 - DNA, 15 bp, Homo sapiens
gttcagggaatagta

SEQ ID NO: 121827 - DNA, 15 bp, Homo sapiens
ttcagggaatagtat

SEQ ID NO: 121828 - DNA, 15 bp, Homo sapiens
tcagggaatagtata

SEQ ID NO: 121829 - DNA, 15 bp, Homo sapiens
cagggaatagtataa

SEQ ID NO: 121830 - DNA, 15 bp, Homo sapiens
agggaatagtataag

SEQ ID NO: 121831 - DNA, 15 bp, Homo sapiens
gggaatagtataagt

SEQ ID NO: 121832 - DNA, 15 bp, Homo sapiens
ggaatagtataagtc

SEQ ID NO: 121833 - DNA, 15 bp, Homo sapiens
gaatagtataagtca

SEQ ID NO: 121834 - DNA, 15 bp, Homo sapiens
aatagtataagtcac

SEQ ID NO: 121835 - DNA, 15 bp, Homo sapiens
atagtataagtcact

SEQ ID NO: 121836 - DNA, 15 bp, Homo sapiens
tagtataagtcactc

SEQ ID NO: 121837 - DNA, 15 bp, Homo sapiens
agtataagtcactcc

SEQ ID NO: 121838 - DNA, 15 bp, Homo sapiens
gtataagtcactcca

SEQ ID NO: 121839 - DNA, 15 bp, Homo sapiens
tataagtcactccag

SEQ ID NO: 121840 - DNA, 15 bp, Homo sapiens
ataagtcactccagg

SEQ ID NO: 121841 - DNA, 15 bp, Homo sapiens
taagtcactccaggc

SEQ ID NO: 121842 - DNA, 15 bp, Homo sapiens
aagtcactccaggct

SEQ ID NO: 121843 - DNA, 15 bp, Homo sapiens
agtcactccaggctt

SEQ ID NO: 121844 - DNA, 15 bp, Homo sapiens
gtcactccaggcttg

SEQ ID NO: 121845 - DNA, 15 bp, Homo sapiens
tcactccaggcttga

SEQ ID NO: 121846 - DNA, 15 bp, Homo sapiens
cactccaggcttgag

SEQ ID NO: 121847 - DNA, 15 bp, Homo sapiens
actccaggcttgagg

SEQ ID NO: 121848 - DNA, 15 bp, Homo sapiens
ctccaggcttgaggc

SEQ ID NO: 121849 - DNA, 15 bp, Homo sapiens
tccaggcttgaggca

SEQ ID NO: 121850 - DNA, 15 bp, Homo sapiens
ccaggcttgaggcaa

SEQ ID NO: 121851 - DNA, 15 bp, Homo sapiens
caggcttgaggcaaa

SEQ ID NO: 121852 - DNA, 15 bp, Homo sapiens
aggcttgaggcaaaa

SEQ ID NO: 121853 - DNA, 15 bp, Homo sapiens
ggcttgaggcaaaat

SEQ ID NO: 121854 - DNA, 15 bp, Homo sapiens
gcttgaggcaaaatt

SEQ ID NO: 121855 - DNA, 15 bp, Homo sapiens
cttgaggcaaaattt

SEQ ID NO: 121856 - DNA, 15 bp, Homo sapiens
ttgaggcaaaattta

SEQ ID NO: 121857 - DNA, 15 bp, Homo sapiens
tgaggcaaaatttac

SEQ ID NO: 121858 - DNA, 15 bp, Homo sapiens
gaggcaaaatttaca

SEQ ID NO: 121859 - DNA, 15 bp, Homo sapiens
aggcaaaatttacaa

SEQ ID NO: 121860 - DNA, 15 bp, Homo sapiens
ggcaaaatttacaaa

SEQ ID NO: 121861 - DNA, 15 bp, Homo sapiens
gcaaaatttacaaat

SEQ ID NO: 121862 - DNA, 15 bp, Homo sapiens
caaaatttacaaatg

SEQ ID NO: 121863 - DNA, 15 bp, Homo sapiens
aaaatttacaaatgc

SEQ ID NO: 121864 - DNA, 15 bp, Homo sapiens
aaatttacaaatgct

SEQ ID NO: 121865 - DNA, 15 bp, Homo sapiens
aatttacaaatgctg

SEQ ID NO: 121866 - DNA, 15 bp, Homo sapiens
atttacaaatgctgc

SEQ ID NO: 121867 - DNA, 15 bp, Homo sapiens
tttacaaatgctgct

SEQ ID NO: 121868 - DNA, 15 bp, Homo sapiens
ttacaaatgctgctg

SEQ ID NO: 121869 - DNA, 15 bp, Homo sapiens
tacaaatgctgctga

SEQ ID NO: 121870 - DNA, 15 bp, Homo sapiens
acaaatgctgctgac

SEQ ID NO: 121871 - DNA, 15 bp, Homo sapiens
caaatgctgctgact

SEQ ID NO: 121872 - DNA, 15 bp, Homo sapiens
aaatgctgctgactt

SEQ ID NO: 121873 - DNA, 15 bp, Homo sapiens
aatgctgctgacttt

SEQ ID NO: 121874 - DNA, 15 bp, Homo sapiens
atgctgctgactttg

SEQ ID NO: 121875 - DNA, 15 bp, Homo sapiens
tgctgctgactttgt

SEQ ID NO: 121876 - DNA, 15 bp, Homo sapiens
gctgctgactttgta

SEQ ID NO: 121877 - DNA, 15 bp, Homo sapiens
ctgctgactttgtat

SEQ ID NO: 121878 - DNA, 15 bp, Homo sapiens
tgctgactttgtatg

SEQ ID NO: 121879 - DNA, 15 bp, Homo sapiens
gctgactttgtatgt

SEQ ID NO: 121880 - DNA, 15 bp, Homo sapiens
ctgactttgtatgta

SEQ ID NO: 121881 - DNA, 15 bp, Homo sapiens
tgactttgtatgtaa

SEQ ID NO: 121882 - DNA, 15 bp, Homo sapiens
gactttgtatgtaag

SEQ ID NO: 121883 - DNA, 15 bp, Homo sapiens
actttgtatgtaagg

SEQ ID NO: 121884 - DNA, 15 bp, Homo sapiens
ctttgtatgtaaggg

SEQ ID NO: 121885 - DNA, 15 bp, Homo sapiens
tttgtatgtaagggg

SEQ ID NO: 121886 - DNA, 15 bp, Homo sapiens
ttgtatgtaagggga

SEQ ID NO: 121887 - DNA, 15 bp, Homo sapiens
tgtatgtaaggggag

SEQ ID NO: 121888 - DNA, 15 bp, Homo sapiens
gtatgtaaggggagg

SEQ ID NO: 121889 - DNA, 15 bp, Homo sapiens
tatgtaaggggaggc

SEQ ID NO: 121890 - DNA, 15 bp, Homo sapiens
atgtaaggggaggca

SEQ ID NO: 121891 - DNA, 15 bp, Homo sapiens
tgtaaggggaggcat

SEQ ID NO: 121892 - DNA, 15 bp, Homo sapiens
gtaaggggaggcatt

SEQ ID NO: 121893 - DNA, 15 bp, Homo sapiens
taaggggaggcattt

SEQ ID NO: 121894 - DNA, 15 bp, Homo sapiens
aaggggaggcatttt

SEQ ID NO: 121895 - DNA, 15 bp, Homo sapiens
aggggaggcattttc

SEQ ID NO: 121896 - DNA, 15 bp, Homo sapiens
ggggaggcattttct

SEQ ID NO: 121897 - DNA, 15 bp, Homo sapiens
gggaggcattttctt

SEQ ID NO: 121898 - DNA, 15 bp, Homo sapiens
ggaggcattttctta

SEQ ID NO: 121899 - DNA, 15 bp, Homo sapiens
gaggcattttcttag

SEQ ID NO: 121900 - DNA, 15 bp, Homo sapiens
aggcattttcttaga

SEQ ID NO: 121901 - DNA, 15 bp, Homo sapiens
ggcattttcttagaa

SEQ ID NO: 121902 - DNA, 15 bp, Homo sapiens
gcattttcttagaaa

SEQ ID NO: 121903 - DNA, 15 bp, Homo sapiens
cattttcttagaaaa

SEQ ID NO: 121904 - DNA, 15 bp, Homo sapiens
attttcttagaaaag

SEQ ID NO: 121905 - DNA, 15 bp, Homo sapiens
ttttcttagaaaaga

SEQ ID NO: 121906 - DNA, 15 bp, Homo sapiens
tttcttagaaaagag

SEQ ID NO: 121907 - DNA, 15 bp, Homo sapiens
ttcttagaaaagaga

SEQ ID NO: 121908 - DNA, 15 bp, Homo sapiens
tcttagaaaagagag

SEQ ID NO: 121909 - DNA, 15 bp, Homo sapiens
cttagaaaagagagg

SEQ ID NO: 121910 - DNA, 15 bp, Homo sapiens
ttagaaaagagaggt

SEQ ID NO: 121911 - DNA, 15 bp, Homo sapiens
tagaaaagagaggta

SEQ ID NO: 121912 - DNA, 15 bp, Homo sapiens
agaaaagagaggtag

SEQ ID NO: 121913 - DNA, 15 bp, Homo sapiens
gaaaagagaggtagg

SEQ ID NO: 121914 - DNA, 15 bp, Homo sapiens
aaaagagaggtaggt

SEQ ID NO: 121915 - DNA, 15 bp, Homo sapiens
aaagagaggtaggtc

SEQ ID NO: 121916 - DNA, 15 bp, Homo sapiens
aagagaggtaggtct

SEQ ID NO: 121917 - DNA, 15 bp, Homo sapiens
agagaggtaggtctc

SEQ ID NO: 121918 - DNA, 15 bp, Homo sapiens
gagaggtaggtctct

SEQ ID NO: 121919 - DNA, 15 bp, Homo sapiens
agaggtaggtctctg

SEQ ID NO: 121920 - DNA, 15 bp, Homo sapiens
gaggtaggtctctgg

SEQ ID NO: 121921 - DNA, 15 bp, Homo sapiens
aggtaggtctctggg

SEQ ID NO: 121922 - DNA, 15 bp, Homo sapiens
ggtaggtctctggga

SEQ ID NO: 121923 - DNA, 15 bp, Homo sapiens
gtaggtctctgggat

SEQ ID NO: 121924 - DNA, 15 bp, Homo sapiens
taggtctctgggatt

SEQ ID NO: 121925 - DNA, 15 bp, Homo sapiens
aggtctctgggattc

SEQ ID NO: 121926 - DNA, 15 bp, Homo sapiens
ggtctctgggattcc

SEQ ID NO: 121927 - DNA, 15 bp, Homo sapiens
gtctctgggattcca

SEQ ID NO: 121928 - DNA, 15 bp, Homo sapiens
tctctgggattccag

SEQ ID NO: 121929 - DNA, 15 bp, Homo sapiens
ctctgggattccagt

SEQ ID NO: 121930 - DNA, 15 bp, Homo sapiens
tctgggattccagta

SEQ ID NO: 121931 - DNA, 15 bp, Homo sapiens
ctgggattccagtat

SEQ ID NO: 121932 - DNA, 15 bp, Homo sapiens
tgggattccagtatg

SEQ ID NO: 121933 - DNA, 15 bp, Homo sapiens
gggattccagtatgc

SEQ ID NO: 121934 - DNA, 15 bp, Homo sapiens
ggattccagtatgcc

SEQ ID NO: 121935 - DNA, 15 bp, Homo sapiens
gattccagtatgcca

SEQ ID NO: 121936 - DNA, 15 bp, Homo sapiens
attccagtatgccat

SEQ ID NO: 121937 - DNA, 15 bp, Homo sapiens
ttccagtatgccatt

SEQ ID NO: 121938 - DNA, 15 bp, Homo sapiens
tccagtatgccattt

SEQ ID NO: 121939 - DNA, 15 bp, Homo sapiens
ccagtatgccatttc

SEQ ID NO: 121940 - DNA, 15 bp, Homo sapiens
cagtatgccatttcc

SEQ ID NO: 121941 - DNA, 15 bp, Homo sapiens
agtatgccatttcca

SEQ ID NO: 121942 - DNA, 15 bp, Homo sapiens
gtatgccatttccat

SEQ ID NO: 121943 - DNA, 15 bp, Homo sapiens
tatgccatttccatc

SEQ ID NO: 121944 - DNA, 15 bp, Homo sapiens
atgccatttccatcc

SEQ ID NO: 121945 - DNA, 15 bp, Homo sapiens
tgccatttccatcct

SEQ ID NO: 121946 - DNA, 15 bp, Homo sapiens
gccatttccatcctc

SEQ ID NO: 121947 - DNA, 15 bp, Homo sapiens
ccatttccatcctca

SEQ ID NO: 121948 - DNA, 15 bp, Homo sapiens
catttccatcctcag

SEQ ID NO: 121949 - DNA, 15 bp, Homo sapiens
atttccatcctcagt

SEQ ID NO: 121950 - DNA, 15 bp, Homo sapiens
tttccatcctcagtg

SEQ ID NO: 121951 - DNA, 15 bp, Homo sapiens
ttccatcctcagtgt

SEQ ID NO: 121952 - DNA, 15 bp, Homo sapiens
tccatcctcagtgtt

SEQ ID NO: 121953 - DNA, 15 bp, Homo sapiens
ccatcctcagtgttt

SEQ ID NO: 121954 - DNA, 15 bp, Homo sapiens
catcctcagtgtttt

SEQ ID NO: 121955 - DNA, 15 bp, Homo sapiens
atcctcagtgttttt

SEQ ID NO: 121956 - DNA, 15 bp, Homo sapiens
tcctcagtgtttttg

SEQ ID NO: 121957 - DNA, 15 bp, Homo sapiens
cctcagtgtttttgg

SEQ ID NO: 121958 - DNA, 15 bp, Homo sapiens
ctcagtgtttttggc

SEQ ID NO: 121959 - DNA, 15 bp, Homo sapiens
tcagtgtttttggcc

SEQ ID NO: 121960 - DNA, 15 bp, Homo sapiens
cagtgtttttggcca

SEQ ID NO: 121961 - DNA, 15 bp, Homo sapiens
agtgtttttggccac

SEQ ID NO: 121962 - DNA, 15 bp, Homo sapiens
gtgtttttggccacc

SEQ ID NO: 121963 - DNA, 15 bp, Homo sapiens
tgtttttggccacct

SEQ ID NO: 121964 - DNA, 15 bp, Homo sapiens
gtttttggccacctg

SEQ ID NO: 121965 - DNA, 15 bp, Homo sapiens
tttttggccacctga

SEQ ID NO: 121966 - DNA, 15 bp, Homo sapiens
ttttggccacctgag

SEQ ID NO: 121967 - DNA, 15 bp, Homo sapiens
tttggccacctgaga

SEQ ID NO: 121968 - DNA, 15 bp, Homo sapiens
ttggccacctgagag

SEQ ID NO: 121969 - DNA, 15 bp, Homo sapiens
tggccacctgagaga

SEQ ID NO: 121970 - DNA, 15 bp, Homo sapiens
ggccacctgagagag

SEQ ID NO: 121971 - DNA, 15 bp, Homo sapiens
gccacctgagagagg

SEQ ID NO: 121972 - DNA, 15 bp, Homo sapiens
ccacctgagagaggt

SEQ ID NO: 121973 - DNA, 15 bp, Homo sapiens
cacctgagagaggtc

SEQ ID NO: 121974 - DNA, 15 bp, Homo sapiens
acctgagagaggtct

SEQ ID NO: 121975 - DNA, 15 bp, Homo sapiens
cctgagagaggtcta

SEQ ID NO: 121976 - DNA, 15 bp, Homo sapiens
ctgagagaggtctat

SEQ ID NO: 121977 - DNA, 15 bp, Homo sapiens
tgagagaggtctatt

SEQ ID NO: 121978 - DNA, 15 bp, Homo sapiens
gagagaggtctattt

SEQ ID NO: 121979 - DNA, 15 bp, Homo sapiens
agagaggtctatttt

SEQ ID NO: 121980 - DNA, 15 bp, Homo sapiens
gagaggtctattttc

SEQ ID NO: 121981 - DNA, 15 bp, Homo sapiens
agaggtctattttca

SEQ ID NO: 121982 - DNA, 15 bp, Homo sapiens
gaggtctattttcag

SEQ ID NO: 121983 - DNA, 15 bp, Homo sapiens
aggtctattttcaga

SEQ ID NO: 121984 - DNA, 15 bp, Homo sapiens
ggtctattttcagaa

SEQ ID NO: 121985 - DNA, 15 bp, Homo sapiens
gtctattttcagaaa

SEQ ID NO: 121986 - DNA, 15 bp, Homo sapiens
tctattttcagaaat

SEQ ID NO: 121987 - DNA, 15 bp, Homo sapiens
ctattttcagaaatg

SEQ ID NO: 121988 - DNA, 15 bp, Homo sapiens
tattttcagaaatgc

SEQ ID NO: 121989 - DNA, 15 bp, Homo sapiens
attttcagaaatgca

SEQ ID NO: 121990 - DNA, 15 bp, Homo sapiens
ttttcagaaatgcat

SEQ ID NO: 121991 - DNA, 15 bp, Homo sapiens
tttcagaaatgcatt

SEQ ID NO: 121992 - DNA, 15 bp, Homo sapiens
ttcagaaatgcattc

SEQ ID NO: 121993 - DNA, 15 bp, Homo sapiens
tcagaaatgcattct

SEQ ID NO: 121994 - DNA, 15 bp, Homo sapiens
cagaaatgcattctt

SEQ ID NO: 121995 - DNA, 15 bp, Homo sapiens
agaaatgcattcttc

SEQ ID NO: 121996 - DNA, 15 bp, Homo sapiens
gaaatgcattcttca

SEQ ID NO: 121997 - DNA, 15 bp, Homo sapiens
aaatgcattcttcat

SEQ ID NO: 121998 - DNA, 15 bp, Homo sapiens
aatgcattcttcatt

SEQ ID NO: 121999 - DNA, 15 bp, Homo sapiens
atgcattcttcattc

SEQ ID NO: 122000 - DNA, 15 bp, Homo sapiens
tgcattcttcattcc

SEQ ID NO: 122001 - DNA, 15 bp, Homo sapiens
gcattcttcattccc

SEQ ID NO: 122002 - DNA, 15 bp, Homo sapiens
cattcttcattccca

SEQ ID NO: 122003 - DNA, 15 bp, Homo sapiens
attcttcattcccag

SEQ ID NO: 122004 - DNA, 15 bp, Homo sapiens
ttcttcattcccaga

SEQ ID NO: 122005 - DNA, 15 bp, Homo sapiens
tcttcattcccagat

SEQ ID NO: 122006 - DNA, 15 bp, Homo sapiens
cttcattcccagatg

SEQ ID NO: 122007 - DNA, 15 bp, Homo sapiens
ttcattcccagatga

SEQ ID NO: 122008 - DNA, 15 bp, Homo sapiens
tcattcccagatgat

SEQ ID NO: 122009 - DNA, 15 bp, Homo sapiens
cattcccagatgata

SEQ ID NO: 122010 - DNA, 15 bp, Homo sapiens
attcccagatgataa

SEQ ID NO: 122011 - DNA, 15 bp, Homo sapiens
ttcccagatgataac

SEQ ID NO: 122012 - DNA, 15 bp, Homo sapiens
tcccagatgataaca

SEQ ID NO: 122013 - DNA, 15 bp, Homo sapiens
cccagatgataacat

SEQ ID NO: 122014 - DNA, 15 bp, Homo sapiens
ccagatgataacatc

SEQ ID NO: 122015 - DNA, 15 bp, Homo sapiens
cagatgataacatct

SEQ ID NO: 122016 - DNA, 15 bp, Homo sapiens
agatgataacatcta

SEQ ID NO: 122017 - DNA, 15 bp, Homo sapiens
gatgataacatctat

SEQ ID NO: 122018 - DNA, 15 bp, Homo sapiens
atgataacatctata

SEQ ID NO: 122019 - DNA, 15 bp, Homo sapiens
tgataacatctatag

SEQ ID NO: 122020 - DNA, 15 bp, Homo sapiens
gataacatctataga

SEQ ID NO: 122021 - DNA, 15 bp, Homo sapiens
ataacatctatagaa

SEQ ID NO: 122022 - DNA, 15 bp, Homo sapiens
taacatctatagaac

SEQ ID NO: 122023 - DNA, 15 bp, Homo sapiens
aacatctatagaact

SEQ ID NO: 122024 - DNA, 15 bp, Homo sapiens
acatctatagaacta

SEQ ID NO: 122025 - DNA, 15 bp, Homo sapiens
catctatagaactaa

SEQ ID NO: 122026 - DNA, 15 bp, Homo sapiens
atctatagaactaaa

SEQ ID NO: 122027 - DNA, 15 bp, Homo sapiens
tctatagaactaaaa

SEQ ID NO: 122028 - DNA, 15 bp, Homo sapiens
ctatagaactaaaat

SEQ ID NO: 122029 - DNA, 15 bp, Homo sapiens
tatagaactaaaatg

SEQ ID NO: 122030 - DNA, 15 bp, Homo sapiens
atagaactaaaatga

SEQ ID NO: 122031 - DNA, 15 bp, Homo sapiens
tagaactaaaatgat

SEQ ID NO: 122032 - DNA, 15 bp, Homo sapiens
agaactaaaatgatt

SEQ ID NO: 122033 - DNA, 15 bp, Homo sapiens
gaactaaaatgatta

SEQ ID NO: 122034 - DNA, 15 bp, Homo sapiens
aactaaaatgattag

SEQ ID NO: 122035 - DNA, 15 bp, Homo sapiens
actaaaatgattagg

SEQ ID NO: 122036 - DNA, 15 bp, Homo sapiens
ctaaaatgattagga

SEQ ID NO: 122037 - DNA, 15 bp, Homo sapiens
taaaatgattaggac

SEQ ID NO: 122038 - DNA, 15 bp, Homo sapiens
aaaatgattaggacc

SEQ ID NO: 122039 - DNA, 15 bp, Homo sapiens
aaatgattaggacca

SEQ ID NO: 122040 - DNA, 15 bp, Homo sapiens
aatgattaggaccat

SEQ ID NO: 122041 - DNA, 15 bp, Homo sapiens
atgattaggaccata

SEQ ID NO: 122042 - DNA, 15 bp, Homo sapiens
tgattaggaccataa

SEQ ID NO: 122043 - DNA, 15 bp, Homo sapiens
gattaggaccataac

SEQ ID NO: 122044 - DNA, 15 bp, Homo sapiens
attaggaccataaca

SEQ ID NO: 122045 - DNA, 15 bp, Homo sapiens
ttaggaccataacac

SEQ ID NO: 122046 - DNA, 15 bp, Homo sapiens
taggaccataacacg

SEQ ID NO: 122047 - DNA, 15 bp, Homo sapiens
aggaccataacacgt

SEQ ID NO: 122048 - DNA, 15 bp, Homo sapiens
ggaccataacacgta

SEQ ID NO: 122049 - DNA, 15 bp, Homo sapiens
gaccataacacgtag

SEQ ID NO: 122050 - DNA, 15 bp, Homo sapiens
accataacacgtagc

SEQ ID NO: 122051 - DNA, 15 bp, Homo sapiens
ccataacacgtagct

SEQ ID NO: 122052 - DNA, 15 bp, Homo sapiens
cataacacgtagctc

SEQ ID NO: 122053 - DNA, 15 bp, Homo sapiens
ataacacgtagctcc

SEQ ID NO: 122054 - DNA, 15 bp, Homo sapiens
taacacgtagctcct

SEQ ID NO: 122055 - DNA, 15 bp, Homo sapiens
aacacgtagctccta

SEQ ID NO: 122056 - DNA, 15 bp, Homo sapiens
acacgtagctcctag

SEQ ID NO: 122057 - DNA, 15 bp, Homo sapiens
cacgtagctcctagc

SEQ ID NO: 122058 - DNA, 15 bp, Homo sapiens
acgtagctcctagcc

SEQ ID NO: 122059 - DNA, 15 bp, Homo sapiens
cgtagctcctagcct

SEQ ID NO: 122060 - DNA, 15 bp, Homo sapiens
gtagctcctagcctg

SEQ ID NO: 122061 - DNA, 15 bp, Homo sapiens
tagctcctagcctgc

SEQ ID NO: 122062 - DNA, 15 bp, Homo sapiens
agctcctagcctgct

SEQ ID NO: 122063 - DNA, 15 bp, Homo sapiens
gctcctagcctgctg

SEQ ID NO: 122064 - DNA, 15 bp, Homo sapiens
ctcctagcctgctgt

SEQ ID NO: 122065 - DNA, 15 bp, Homo sapiens
tcctagcctgctgtc

SEQ ID NO: 122066 - DNA, 15 bp, Homo sapiens
cctagcctgctgtcg

SEQ ID NO: 122067 - DNA, 15 bp, Homo sapiens
ctagcctgctgtcgg

SEQ ID NO: 122068 - DNA, 15 bp, Homo sapiens
tagcctgctgtcgga

SEQ ID NO: 122069 - DNA, 15 bp, Homo sapiens
agcctgctgtcggaa

SEQ ID NO: 122070 - DNA, 15 bp, Homo sapiens
gcctgctgtcggaac

SEQ ID NO: 122071 - DNA, 15 bp, Homo sapiens
cctgctgtcggaaca

SEQ ID NO: 122072 - DNA, 15 bp, Homo sapiens
ctgctgtcggaacac

SEQ ID NO: 122073 - DNA, 15 bp, Homo sapiens
tgctgtcggaacacc

SEQ ID NO: 122074 - DNA, 15 bp, Homo sapiens
gctgtcggaacacct

SEQ ID NO: 122075 - DNA, 15 bp, Homo sapiens
ctgtcggaacacctc

SEQ ID NO: 122076 - DNA, 15 bp, Homo sapiens
tgtcggaacacctcc

SEQ ID NO: 122077 - DNA, 15 bp, Homo sapiens
gtcggaacacctccc

SEQ ID NO: 122078 - DNA, 15 bp, Homo sapiens
tcggaacacctcccg

SEQ ID NO: 122079 - DNA, 15 bp, Homo sapiens
cggaacacctcccga

SEQ ID NO: 122080 - DNA, 15 bp, Homo sapiens
ggaacacctcccgag

SEQ ID NO: 122081 - DNA, 15 bp, Homo sapiens
gaacacctcccgagt

SEQ ID NO: 122082 - DNA, 15 bp, Homo sapiens
aacacctcccgagtc

SEQ ID NO: 122083 - DNA, 15 bp, Homo sapiens
acacctcccgagtcc

SEQ ID NO: 122084 - DNA, 15 bp, Homo sapiens
cacctcccgagtccc

SEQ ID NO: 122085 - DNA, 15 bp, Homo sapiens
acctcccgagtccct

SEQ ID NO: 122086 - DNA, 15 bp, Homo sapiens
cctcccgagtccctc

SEQ ID NO: 122087 - DNA, 15 bp, Homo sapiens
ctcccgagtccctct

SEQ ID NO: 122088 - DNA, 15 bp, Homo sapiens
tcccgagtccctctt

SEQ ID NO: 122089 - DNA, 15 bp, Homo sapiens
cccgagtccctcttt

SEQ ID NO: 122090 - DNA, 15 bp, Homo sapiens
ccgagtccctctttg

SEQ ID NO: 122091 - DNA, 15 bp, Homo sapiens
cgagtccctctttgt

SEQ ID NO: 122092 - DNA, 15 bp, Homo sapiens
gagtccctctttgtg

SEQ ID NO: 122093 - DNA, 15 bp, Homo sapiens
agtccctctttgtgg

SEQ ID NO: 122094 - DNA, 15 bp, Homo sapiens
gtccctctttgtggg

SEQ ID NO: 122095 - DNA, 15 bp, Homo sapiens
tccctctttgtgggt

SEQ ID NO: 122096 - DNA, 15 bp, Homo sapiens
ccctctttgtgggtg

SEQ ID NO: 122097 - DNA, 15 bp, Homo sapiens
cctctttgtgggtga

SEQ ID NO: 122098 - DNA, 15 bp, Homo sapiens
ctctttgtgggtgaa

SEQ ID NO: 122099 - DNA, 15 bp, Homo sapiens
tctttgtgggtgaac

SEQ ID NO: 122100 - DNA, 15 bp, Homo sapiens
ctttgtgggtgaacc

SEQ ID NO: 122101 - DNA, 15 bp, Homo sapiens
tttgtgggtgaaccc

SEQ ID NO: 122102 - DNA, 15 bp, Homo sapiens
ttgtgggtgaaccca

SEQ ID NO: 122103 - DNA, 15 bp, Homo sapiens
tgtgggtgaacccag

SEQ ID NO: 122104 - DNA, 15 bp, Homo sapiens
gtgggtgaacccaga

SEQ ID NO: 122105 - DNA, 15 bp, Homo sapiens
tgggtgaacccagag

SEQ ID NO: 122106 - DNA, 15 bp, Homo sapiens
gggtgaacccagagg

SEQ ID NO: 122107 - DNA, 15 bp, Homo sapiens
ggtgaacccagaggc

SEQ ID NO: 122108 - DNA, 15 bp, Homo sapiens
gtgaacccagaggct

SEQ ID NO: 122109 - DNA, 15 bp, Homo sapiens
tgaacccagaggctg

SEQ ID NO: 122110 - DNA, 15 bp, Homo sapiens
gaacccagaggctgg

SEQ ID NO: 122111 - DNA, 15 bp, Homo sapiens
aacccagaggctggg

SEQ ID NO: 122112 - DNA, 15 bp, Homo sapiens
acccagaggctggga

SEQ ID NO: 122113 - DNA, 15 bp, Homo sapiens
cccagaggctgggag

SEQ ID NO: 122114 - DNA, 15 bp, Homo sapiens
ccagaggctgggagc

SEQ ID NO: 122115 - DNA, 15 bp, Homo sapiens
cagaggctgggagct

SEQ ID NO: 122116 - DNA, 15 bp, Homo sapiens
agaggctgggagctg

SEQ ID NO: 122117 - DNA, 15 bp, Homo sapiens
gaggctgggagctgg

SEQ ID NO: 122118 - DNA, 15 bp, Homo sapiens
aggctgggagctggt

SEQ ID NO: 122119 - DNA, 15 bp, Homo sapiens
ggctgggagctggtg

SEQ ID NO: 122120 - DNA, 15 bp, Homo sapiens
gctgggagctggtga

SEQ ID NO: 122121 - DNA, 15 bp, Homo sapiens
ctgggagctggtgac

SEQ ID NO: 122122 - DNA, 15 bp, Homo sapiens
tgggagctggtgact

SEQ ID NO: 122123 - DNA, 15 bp, Homo sapiens
gggagctggtgactc

SEQ ID NO: 122124 - DNA, 15 bp, Homo sapiens
ggagctggtgactca

SEQ ID NO: 122125 - DNA, 15 bp, Homo sapiens
gagctggtgactcat

SEQ ID NO: 122126 - DNA, 15 bp, Homo sapiens
agctggtgactcatg

SEQ ID NO: 122127 - DNA, 15 bp, Homo sapiens
gctggtgactcatga

SEQ ID NO: 122128 - DNA, 15 bp, Homo sapiens
ctggtgactcatgat

SEQ ID NO: 122129 - DNA, 15 bp, Homo sapiens
tggtgactcatgatc

SEQ ID NO: 122130 - DNA, 15 bp, Homo sapiens
ggtgactcatgatcc

SEQ ID NO: 122131 - DNA, 15 bp, Homo sapiens
gtgactcatgatcca

SEQ ID NO: 122132 - DNA, 15 bp, Homo sapiens
tgactcatgatccat

SEQ ID NO: 122133 - DNA, 15 bp, Homo sapiens
gactcatgatccatt

SEQ ID NO: 122134 - DNA, 15 bp, Homo sapiens
actcatgatccattg

SEQ ID NO: 122135 - DNA, 15 bp, Homo sapiens
ctcatgatccattga

SEQ ID NO: 122136 - DNA, 15 bp, Homo sapiens
tcatgatccattgag

SEQ ID NO: 122137 - DNA, 15 bp, Homo sapiens
catgatccattgaga

SEQ ID NO: 122138 - DNA, 15 bp, Homo sapiens
atgatccattgagaa

SEQ ID NO: 122139 - DNA, 15 bp, Homo sapiens
tgatccattgagaag

SEQ ID NO: 122140 - DNA, 15 bp, Homo sapiens
gatccattgagaagc

SEQ ID NO: 122141 - DNA, 15 bp, Homo sapiens
atccattgagaagca

SEQ ID NO: 122142 - DNA, 15 bp, Homo sapiens
tccattgagaagcag

SEQ ID NO: 122143 - DNA, 15 bp, Homo sapiens
ccattgagaagcagt

SEQ ID NO: 122144 - DNA, 15 bp, Homo sapiens
cattgagaagcagtc

SEQ ID NO: 122145 - DNA, 15 bp, Homo sapiens
attgagaagcagtca

SEQ ID NO: 122146 - DNA, 15 bp, Homo sapiens
ttgagaagcagtcat

SEQ ID NO: 122147 - DNA, 15 bp, Homo sapiens
tgagaagcagtcatg

SEQ ID NO: 122148 - DNA, 15 bp, Homo sapiens
gagaagcagtcatga

SEQ ID NO: 122149 - DNA, 15 bp, Homo sapiens
agaagcagtcatgat

SEQ ID NO: 122150 - DNA, 15 bp, Homo sapiens
gaagcagtcatgatg

SEQ ID NO: 122151 - DNA, 15 bp, Homo sapiens
aagcagtcatgatgc

SEQ ID NO: 122152 - DNA, 15 bp, Homo sapiens
agcagtcatgatgca

SEQ ID NO: 122153 - DNA, 15 bp, Homo sapiens
gcagtcatgatgcag

SEQ ID NO: 122154 - DNA, 15 bp, Homo sapiens
cagtcatgatgcaga

SEQ ID NO: 122155 - DNA, 15 bp, Homo sapiens
agtcatgatgcagag

SEQ ID NO: 122156 - DNA, 15 bp, Homo sapiens
gtcatgatgcagagc

SEQ ID NO: 122157 - DNA, 15 bp, Homo sapiens
tcatgatgcagagct

SEQ ID NO: 122158 - DNA, 15 bp, Homo sapiens
catgatgcagagctg

SEQ ID NO: 122159 - DNA, 15 bp, Homo sapiens
atgatgcagagctgt

SEQ ID NO: 122160 - DNA, 15 bp, Homo sapiens
tgatgcagagctgtg

SEQ ID NO: 122161 - DNA, 15 bp, Homo sapiens
gatgcagagctgtgt

SEQ ID NO: 122162 - DNA, 15 bp, Homo sapiens
atgcagagctgtgtg

SEQ ID NO: 122163 - DNA, 15 bp, Homo sapiens
tgcagagctgtgtgt

SEQ ID NO: 122164 - DNA, 15 bp, Homo sapiens
gcagagctgtgtgtt

SEQ ID NO: 122165 - DNA, 15 bp, Homo sapiens
cagagctgtgtgttg

SEQ ID NO: 122166 - DNA, 15 bp, Homo sapiens
agagctgtgtgttgg

SEQ ID NO: 122167 - DNA, 15 bp, Homo sapiens
gagctgtgtgttgga

SEQ ID NO: 122168 - DNA, 15 bp, Homo sapiens
agctgtgtgttggag

SEQ ID NO: 122169 - DNA, 15 bp, Homo sapiens
gctgtgtgttggagg

SEQ ID NO: 122170 - DNA, 15 bp, Homo sapiens
ctgtgtgttggaggt

SEQ ID NO: 122171 - DNA, 15 bp, Homo sapiens
tgtgtgttggaggtc

SEQ ID NO: 122172 - DNA, 15 bp, Homo sapiens
gtgtgttggaggtct

SEQ ID NO: 122173 - DNA, 15 bp, Homo sapiens
tgtgttggaggtctc

SEQ ID NO: 122174 - DNA, 15 bp, Homo sapiens
gtgttggaggtctca

SEQ ID NO: 122175 - DNA, 15 bp, Homo sapiens
tgttggaggtctcag

SEQ ID NO: 122176 - DNA, 15 bp, Homo sapiens
gttggaggtctcagc

SEQ ID NO: 122177 - DNA, 15 bp, Homo sapiens
ttggaggtctcagct

SEQ ID NO: 122178 - DNA, 15 bp, Homo sapiens
tggaggtctcagctg

SEQ ID NO: 122179 - DNA, 15 bp, Homo sapiens
ggaggtctcagctga

SEQ ID NO: 122180 - DNA, 15 bp, Homo sapiens
gaggtctcagctgag

SEQ ID NO: 122181 - DNA, 15 bp, Homo sapiens
aggtctcagctgaga

SEQ ID NO: 122182 - DNA, 15 bp, Homo sapiens
ggtctcagctgagag

SEQ ID NO: 122183 - DNA, 15 bp, Homo sapiens
gtctcagctgagagg

SEQ ID NO: 122184 - DNA, 15 bp, Homo sapiens
tctcagctgagaggg

SEQ ID NO: 122185 - DNA, 15 bp, Homo sapiens
ctcagctgagagggc

SEQ ID NO: 122186 - DNA, 15 bp, Homo sapiens
tcagctgagagggct

SEQ ID NO: 122187 - DNA, 15 bp, Homo sapiens
cagctgagagggctg

SEQ ID NO: 122188 - DNA, 15 bp, Homo sapiens
agctgagagggctgg

SEQ ID NO: 122189 - DNA, 15 bp, Homo sapiens
gctgagagggctgga

SEQ ID NO: 122190 - DNA, 15 bp, Homo sapiens
ctgagagggctggat

SEQ ID NO: 122191 - DNA, 15 bp, Homo sapiens
tgagagggctggatt

SEQ ID NO: 122192 - DNA, 15 bp, Homo sapiens
gagagggctggatta

SEQ ID NO: 122193 - DNA, 15 bp, Homo sapiens
agagggctggattag

SEQ ID NO: 122194 - DNA, 15 bp, Homo sapiens
gagggctggattagc

SEQ ID NO: 122195 - DNA, 15 bp, Homo sapiens
agggctggattagca

SEQ ID NO: 122196 - DNA, 15 bp, Homo sapiens
gggctggattagcag

SEQ ID NO: 122197 - DNA, 15 bp, Homo sapiens
ggctggattagcagt

SEQ ID NO: 122198 - DNA, 15 bp, Homo sapiens
gctggattagcagtc

SEQ ID NO: 122199 - DNA, 15 bp, Homo sapiens
ctggattagcagtcc

SEQ ID NO: 122200 - DNA, 15 bp, Homo sapiens
tggattagcagtcct

SEQ ID NO: 122201 - DNA, 15 bp, Homo sapiens
ggattagcagtcctc

SEQ ID NO: 122202 - DNA, 15 bp, Homo sapiens
gattagcagtcctca

SEQ ID NO: 122203 - DNA, 15 bp, Homo sapiens
attagcagtcctcat

SEQ ID NO: 122204 - DNA, 15 bp, Homo sapiens
ttagcagtcctcatt

SEQ ID NO: 122205 - DNA, 15 bp, Homo sapiens
tagcagtcctcattg

SEQ ID NO: 122206 - DNA, 15 bp, Homo sapiens
agcagtcctcattgg

SEQ ID NO: 122207 - DNA, 15 bp, Homo sapiens
gcagtcctcattggt

SEQ ID NO: 122208 - DNA, 15 bp, Homo sapiens
cagtcctcattggtg

SEQ ID NO: 122209 - DNA, 15 bp, Homo sapiens
agtcctcattggtgt

SEQ ID NO: 122210 - DNA, 15 bp, Homo sapiens
gtcctcattggtgta

SEQ ID NO: 122211 - DNA, 15 bp, Homo sapiens
tcctcattggtgtat

SEQ ID NO: 122212 - DNA, 15 bp, Homo sapiens
cctcattggtgtatg

SEQ ID NO: 122213 - DNA, 15 bp, Homo sapiens
ctcattggtgtatgg

SEQ ID NO: 122214 - DNA, 15 bp, Homo sapiens
tcattggtgtatggc

SEQ ID NO: 122215 - DNA, 15 bp, Homo sapiens
cattggtgtatggct

SEQ ID NO: 122216 - DNA, 15 bp, Homo sapiens
attggtgtatggctt

SEQ ID NO: 122217 - DNA, 15 bp, Homo sapiens
ttggtgtatggcttt

SEQ ID NO: 122218 - DNA, 15 bp, Homo sapiens
tggtgtatggctttg

SEQ ID NO: 122219 - DNA, 15 bp, Homo sapiens
ggtgtatggctttgc

SEQ ID NO: 122220 - DNA, 15 bp, Homo sapiens
gtgtatggctttgca

SEQ ID NO: 122221 - DNA, 15 bp, Homo sapiens
tgtatggctttgcag

SEQ ID NO: 122222 - DNA, 15 bp, Homo sapiens
gtatggctttgcagc

SEQ ID NO: 122223 - DNA, 15 bp, Homo sapiens
tatggctttgcagca

SEQ ID NO: 122224 - DNA, 15 bp, Homo sapiens
atggctttgcagcaa

SEQ ID NO: 122225 - DNA, 15 bp, Homo sapiens
tggctttgcagcaat

SEQ ID NO: 122226 - DNA, 15 bp, Homo sapiens
ggctttgcagcaata

SEQ ID NO: 122227 - DNA, 15 bp, Homo sapiens
gctttgcagcaataa

SEQ ID NO: 122228 - DNA, 15 bp, Homo sapiens
ctttgcagcaataac

SEQ ID NO: 122229 - DNA, 15 bp, Homo sapiens
tttgcagcaataact

SEQ ID NO: 122230 - DNA, 15 bp, Homo sapiens
ttgcagcaataactg

SEQ ID NO: 122231 - DNA, 15 bp, Homo sapiens
tgcagcaataactga

SEQ ID NO: 122232 - DNA, 15 bp, Homo sapiens
gcagcaataactgat

SEQ ID NO: 122233 - DNA, 15 bp, Homo sapiens
cagcaataactgatg

SEQ ID NO: 122234 - DNA, 15 bp, Homo sapiens
agcaataactgatgg

SEQ ID NO: 122235 - DNA, 15 bp, Homo sapiens
gcaataactgatggc

SEQ ID NO: 122236 - DNA, 15 bp, Homo sapiens
caataactgatggct

SEQ ID NO: 122237 - DNA, 15 bp, Homo sapiens
aataactgatggctg

SEQ ID NO: 122238 - DNA, 15 bp, Homo sapiens
ataactgatggctgt

SEQ ID NO: 122239 - DNA, 15 bp, Homo sapiens
taactgatggctgtt

SEQ ID NO: 122240 - DNA, 15 bp, Homo sapiens
aactgatggctgttt

SEQ ID NO: 122241 - DNA, 15 bp, Homo sapiens
actgatggctgtttc

SEQ ID NO: 122242 - DNA, 15 bp, Homo sapiens
ctgatggctgtttcc

SEQ ID NO: 122243 - DNA, 15 bp, Homo sapiens
tgatggctgtttccc

SEQ ID NO: 122244 - DNA, 15 bp, Homo sapiens
gatggctgtttcccc

SEQ ID NO: 122245 - DNA, 15 bp, Homo sapiens
atggctgtttcccct

SEQ ID NO: 122246 - DNA, 15 bp, Homo sapiens
tggctgtttcccctc

SEQ ID NO: 122247 - DNA, 15 bp, Homo sapiens
ggctgtttcccctcc

SEQ ID NO: 122248 - DNA, 15 bp, Homo sapiens
gctgtttcccctcct

SEQ ID NO: 122249 - DNA, 15 bp, Homo sapiens
ctgtttcccctcctg

SEQ ID NO: 122250 - DNA, 15 bp, Homo sapiens
tgtttcccctcctgc

SEQ ID NO: 122251 - DNA, 15 bp, Homo sapiens
gtttcccctcctgct

SEQ ID NO: 122252 - DNA, 15 bp, Homo sapiens
tttcccctcctgctt

SEQ ID NO: 122253 - DNA, 15 bp, Homo sapiens
ttcccctcctgcttt

SEQ ID NO: 122254 - DNA, 15 bp, Homo sapiens
tcccctcctgcttta

SEQ ID NO: 122255 - DNA, 15 bp, Homo sapiens
cccctcctgctttat

SEQ ID NO: 122256 - DNA, 15 bp, Homo sapiens
ccctcctgctttatc

SEQ ID NO: 122257 - DNA, 15 bp, Homo sapiens
cctcctgctttatct

SEQ ID NO: 122258 - DNA, 15 bp, Homo sapiens
ctcctgctttatctt

SEQ ID NO: 122259 - DNA, 15 bp, Homo sapiens
tcctgctttatcttt

SEQ ID NO: 122260 - DNA, 15 bp, Homo sapiens
cctgctttatctttc

SEQ ID NO: 122261 - DNA, 15 bp, Homo sapiens
ctgctttatctttca

SEQ ID NO: 122262 - DNA, 15 bp, Homo sapiens
tgctttatctttcag

SEQ ID NO: 122263 - DNA, 15 bp, Homo sapiens
gctttatctttcagt

SEQ ID NO: 122264 - DNA, 15 bp, Homo sapiens
ctttatctttcagtt

SEQ ID NO: 122265 - DNA, 15 bp, Homo sapiens
tttatctttcagtta

SEQ ID NO: 122266 - DNA, 15 bp, Homo sapiens
ttatctttcagttaa

SEQ ID NO: 122267 - DNA, 15 bp, Homo sapiens
tatctttcagttaat

SEQ ID NO: 122268 - DNA, 15 bp, Homo sapiens
atctttcagttaatg

SEQ ID NO: 122269 - DNA, 15 bp, Homo sapiens
tctttcagttaatga

SEQ ID NO: 122270 - DNA, 15 bp, Homo sapiens
ctttcagttaatgac

SEQ ID NO: 122271 - DNA, 15 bp, Homo sapiens
tttcagttaatgacc

SEQ ID NO: 122272 - DNA, 15 bp, Homo sapiens
ttcagttaatgacca

SEQ ID NO: 122273 - DNA, 15 bp, Homo sapiens
tcagttaatgaccag

SEQ ID NO: 122274 - DNA, 15 bp, Homo sapiens
cagttaatgaccagc

SEQ ID NO: 122275 - DNA, 15 bp, Homo sapiens
agttaatgaccagcc

SEQ ID NO: 122276 - DNA, 15 bp, Homo sapiens
gttaatgaccagcca

SEQ ID NO: 122277 - DNA, 15 bp, Homo sapiens
ttaatgaccagccac

SEQ ID NO: 122278 - DNA, 15 bp, Homo sapiens
taatgaccagccacg

SEQ ID NO: 122279 - DNA, 15 bp, Homo sapiens
aatgaccagccacgg

SEQ ID NO: 122280 - DNA, 15 bp, Homo sapiens
atgaccagccacggc

SEQ ID NO: 122281 - DNA, 15 bp, Homo sapiens
tgaccagccacggcg

SEQ ID NO: 122282 - DNA, 15 bp, Homo sapiens
gaccagccacggcgt

SEQ ID NO: 122283 - DNA, 15 bp, Homo sapiens
accagccacggcgtc

SEQ ID NO: 122284 - DNA, 15 bp, Homo sapiens
ccagccacggcgtcc

SEQ ID NO: 122285 - DNA, 15 bp, Homo sapiens
cagccacggcgtccc

SEQ ID NO: 122286 - DNA, 15 bp, Homo sapiens
agccacggcgtccct

SEQ ID NO: 122287 - DNA, 15 bp, Homo sapiens
gccacggcgtccctg

SEQ ID NO: 122288 - DNA, 15 bp, Homo sapiens
ccacggcgtccctgc

SEQ ID NO: 122289 - DNA, 15 bp, Homo sapiens
cacggcgtccctgct

SEQ ID NO: 122290 - DNA, 15 bp, Homo sapiens
acggcgtccctgctg

SEQ ID NO: 122291 - DNA, 15 bp, Homo sapiens
cggcgtccctgctgt

SEQ ID NO: 122292 - DNA, 15 bp, Homo sapiens
ggcgtccctgctgtg

SEQ ID NO: 122293 - DNA, 15 bp, Homo sapiens
gcgtccctgctgtga

SEQ ID NO: 122294 - DNA, 15 bp, Homo sapiens
cgtccctgctgtgag

SEQ ID NO: 122295 - DNA, 15 bp, Homo sapiens
gtccctgctgtgagc

SEQ ID NO: 122296 - DNA, 15 bp, Homo sapiens
tccctgctgtgagct

SEQ ID NO: 122297 - DNA, 15 bp, Homo sapiens
ccctgctgtgagctc

SEQ ID NO: 122298 - DNA, 15 bp, Homo sapiens
cctgctgtgagctct

SEQ ID NO: 122299 - DNA, 15 bp, Homo sapiens
ctgctgtgagctctg

SEQ ID NO: 122300 - DNA, 15 bp, Homo sapiens
tgctgtgagctctgg

SEQ ID NO: 122301 - DNA, 15 bp, Homo sapiens
gctgtgagctctggc

SEQ ID NO: 122302 - DNA, 15 bp, Homo sapiens
ctgtgagctctggcc

SEQ ID NO: 122303 - DNA, 15 bp, Homo sapiens
tgtgagctctggccg

SEQ ID NO: 122304 - DNA, 15 bp, Homo sapiens
gtgagctctggccgc

SEQ ID NO: 122305 - DNA, 15 bp, Homo sapiens
tgagctctggccgct

SEQ ID NO: 122306 - DNA, 15 bp, Homo sapiens
gagctctggccgctg

SEQ ID NO: 122307 - DNA, 15 bp, Homo sapiens
agctctggccgctgc

SEQ ID NO: 122308 - DNA, 15 bp, Homo sapiens
gctctggccgctgcc

SEQ ID NO: 122309 - DNA, 15 bp, Homo sapiens
ctctggccgctgcct

SEQ ID NO: 122310 - DNA, 15 bp, Homo sapiens
tctggccgctgcctt

SEQ ID NO: 122311 - DNA, 15 bp, Homo sapiens
ctggccgctgccttc

SEQ ID NO: 122312 - DNA, 15 bp, Homo sapiens
tggccgctgccttcc

SEQ ID NO: 122313 - DNA, 15 bp, Homo sapiens
ggccgctgccttcca

SEQ ID NO: 122314 - DNA, 15 bp, Homo sapiens
gccgctgccttccag

SEQ ID NO: 122315 - DNA, 15 bp, Homo sapiens
ccgctgccttccagg

SEQ ID NO: 122316 - DNA, 15 bp, Homo sapiens
cgctgccttccaggg

SEQ ID NO: 122317 - DNA, 15 bp, Homo sapiens
gctgccttccagggc

SEQ ID NO: 122318 - DNA, 15 bp, Homo sapiens
ctgccttccagggct

SEQ ID NO: 122319 - DNA, 15 bp, Homo sapiens
tgccttccagggctc

SEQ ID NO: 122320 - DNA, 15 bp, Homo sapiens
gccttccagggctcc

SEQ ID NO: 122321 - DNA, 15 bp, Homo sapiens
ccttccagggctccc

SEQ ID NO: 122322 - DNA, 15 bp, Homo sapiens
cttccagggctcccg

SEQ ID NO: 122323 - DNA, 15 bp, Homo sapiens
ttccagggctcccga

SEQ ID NO: 122324 - DNA, 15 bp, Homo sapiens
tccagggctcccgag

SEQ ID NO: 122325 - DNA, 15 bp, Homo sapiens
ccagggctcccgagc

SEQ ID NO: 122326 - DNA, 15 bp, Homo sapiens
cagggctcccgagcc

SEQ ID NO: 122327 - DNA, 15 bp, Homo sapiens
agggctcccgagcca

SEQ ID NO: 122328 - DNA, 15 bp, Homo sapiens
gggctcccgagccac

SEQ ID NO: 122329 - DNA, 15 bp, Homo sapiens
ggctcccgagccaca

SEQ ID NO: 122330 - DNA, 15 bp, Homo sapiens
gctcccgagccacac

SEQ ID NO: 122331 - DNA, 15 bp, Homo sapiens
ctcccgagccacacg

SEQ ID NO: 122332 - DNA, 15 bp, Homo sapiens
tcccgagccacacgc

SEQ ID NO: 122333 - DNA, 15 bp, Homo sapiens
cccgagccacacgct

SEQ ID NO: 122334 - DNA, 15 bp, Homo sapiens
ccgagccacacgctg

SEQ ID NO: 122335 - DNA, 15 bp, Homo sapiens
cgagccacacgctgg

SEQ ID NO: 122336 - DNA, 15 bp, Homo sapiens
gagccacacgctggg

SEQ ID NO: 122337 - DNA, 15 bp, Homo sapiens
agccacacgctgggg

SEQ ID NO: 122338 - DNA, 15 bp, Homo sapiens
gccacacgctggggg

SEQ ID NO: 122339 - DNA, 15 bp, Homo sapiens
ccacacgctgggggt

SEQ ID NO: 122340 - DNA, 15 bp, Homo sapiens
cacacgctgggggtg

SEQ ID NO: 122341 - DNA, 15 bp, Homo sapiens
acacgctgggggtgc

SEQ ID NO: 122342 - DNA, 15 bp, Homo sapiens
cacgctgggggtgct

SEQ ID NO: 122343 - DNA, 15 bp, Homo sapiens
acgctgggggtgctg

SEQ ID NO: 122344 - DNA, 15 bp, Homo sapiens
cgctgggggtgctgg

SEQ ID NO: 122345 - DNA, 15 bp, Homo sapiens
gctgggggtgctggc

SEQ ID NO: 122346 - DNA, 15 bp, Homo sapiens
ctgggggtgctggct

SEQ ID NO: 122347 - DNA, 15 bp, Homo sapiens
tgggggtgctggctg

SEQ ID NO: 122348 - DNA, 15 bp, Homo sapiens
gggggtgctggctga

SEQ ID NO: 122349 - DNA, 15 bp, Homo sapiens
ggggtgctggctgag

SEQ ID NO: 122350 - DNA, 15 bp, Homo sapiens
gggtgctggctgagg

SEQ ID NO: 122351 - DNA, 15 bp, Homo sapiens
ggtgctggctgaggg

SEQ ID NO: 122352 - DNA, 15 bp, Homo sapiens
gtgctggctgaggga

SEQ ID NO: 122353 - DNA, 15 bp, Homo sapiens
tgctggctgagggaa

SEQ ID NO: 122354 - DNA, 15 bp, Homo sapiens
gctggctgagggaac

SEQ ID NO: 122355 - DNA, 15 bp, Homo sapiens
ctggctgagggaaca

SEQ ID NO: 122356 - DNA, 15 bp, Homo sapiens
tggctgagggaacat

SEQ ID NO: 122357 - DNA, 15 bp, Homo sapiens
ggctgagggaacatg

SEQ ID NO: 122358 - DNA, 15 bp, Homo sapiens
gctgagggaacatgg

SEQ ID NO: 122359 - DNA, 15 bp, Homo sapiens
ctgagggaacatggc

SEQ ID NO: 122360 - DNA, 15 bp, Homo sapiens
tgagggaacatggct

SEQ ID NO: 122361 - DNA, 15 bp, Homo sapiens
gagggaacatggctt

SEQ ID NO: 122362 - DNA, 15 bp, Homo sapiens
agggaacatggcttg

SEQ ID NO: 122363 - DNA, 15 bp, Homo sapiens
gggaacatggcttgt

SEQ ID NO: 122364 - DNA, 15 bp, Homo sapiens
ggaacatggcttgtt

SEQ ID NO: 122365 - DNA, 15 bp, Homo sapiens
gaacatggcttgttg

SEQ ID NO: 122366 - DNA, 15 bp, Homo sapiens
aacatggcttgttgg

SEQ ID NO: 122367 - DNA, 15 bp, Homo sapiens
acatggcttgttggc

SEQ ID NO: 122368 - DNA, 15 bp, Homo sapiens
catggcttgttggcc

SEQ ID NO: 122369 - DNA, 15 bp, Homo sapiens
atggcttgttggcct

SEQ ID NO: 122370 - DNA, 15 bp, Homo sapiens
tggcttgttggcctc

SEQ ID NO: 122371 - DNA, 15 bp, Homo sapiens
ggcttgttggcctca

SEQ ID NO: 122372 - DNA, 15 bp, Homo sapiens
gcttgttggcctcag

SEQ ID NO: 122373 - DNA, 15 bp, Homo sapiens
cttgttggcctcagc

SEQ ID NO: 122374 - DNA, 15 bp, Homo sapiens
ttgttggcctcagct

SEQ ID NO: 122375 - DNA, 15 bp, Homo sapiens
tgttggcctcagctg

SEQ ID NO: 122376 - DNA, 15 bp, Homo sapiens
gttggcctcagctga

SEQ ID NO: 122377 - DNA, 15 bp, Homo sapiens
ttggcctcagctgag

SEQ ID NO: 122378 - DNA, 15 bp, Homo sapiens
tggcctcagctgagg

SEQ ID NO: 122379 - DNA, 15 bp, Homo sapiens
ggcctcagctgaggt

SEQ ID NO: 122380 - DNA, 15 bp, Homo sapiens
gcctcagctgaggtt

SEQ ID NO: 122381 - DNA, 15 bp, Homo sapiens
cctcagctgaggttg

SEQ ID NO: 122382 - DNA, 15 bp, Homo sapiens
ctcagctgaggttgc

SEQ ID NO: 122383 - DNA, 15 bp, Homo sapiens
tcagctgaggttgct

SEQ ID NO: 122384 - DNA, 15 bp, Homo sapiens
cagctgaggttgctg

SEQ ID NO: 122385 - DNA, 15 bp, Homo sapiens
agctgaggttgctgc

SEQ ID NO: 122386 - DNA, 15 bp, Homo sapiens
gctgaggttgctgct

SEQ ID NO: 122387 - DNA, 15 bp, Homo sapiens
ctgaggttgctgctg

SEQ ID NO: 122388 - DNA, 15 bp, Homo sapiens
tgaggttgctgctgt

SEQ ID NO: 122389 - DNA, 15 bp, Homo sapiens
gaggttgctgctgtg

SEQ ID NO: 122390 - DNA, 15 bp, Homo sapiens
aggttgctgctgtgg

SEQ ID NO: 122391 - DNA, 15 bp, Homo sapiens
ggttgctgctgtgga

SEQ ID NO: 122392 - DNA, 15 bp, Homo sapiens
gttgctgctgtggaa

SEQ ID NO: 122393 - DNA, 15 bp, Homo sapiens
ttgctgctgtggaag

SEQ ID NO: 122394 - DNA, 15 bp, Homo sapiens
tgctgctgtggaaga

SEQ ID NO: 122395 - DNA, 15 bp, Homo sapiens
gctgctgtggaagaa

SEQ ID NO: 122396 - DNA, 15 bp, Homo sapiens
ctgctgtggaagaac

SEQ ID NO: 122397 - DNA, 15 bp, Homo sapiens
tgctgtggaagaacc

SEQ ID NO: 122398 - DNA, 15 bp, Homo sapiens
gctgtggaagaacct

SEQ ID NO: 122399 - DNA, 15 bp, Homo sapiens
ctgtggaagaacctc

SEQ ID NO: 122400 - DNA, 15 bp, Homo sapiens
tgtggaagaacctca

SEQ ID NO: 122401 - DNA, 15 bp, Homo sapiens
gtggaagaacctcac

SEQ ID NO: 122402 - DNA, 15 bp, Homo sapiens
tggaagaacctcact

SEQ ID NO: 122403 - DNA, 15 bp, Homo sapiens
ggaagaacctcactt

SEQ ID NO: 122404 - DNA, 15 bp, Homo sapiens
gaagaacctcacttt

SEQ ID NO: 122405 - DNA, 15 bp, Homo sapiens
aagaacctcactttc

SEQ ID NO: 122406 - DNA, 15 bp, Homo sapiens
agaacctcactttca

SEQ ID NO: 122407 - DNA, 15 bp, Homo sapiens
gaacctcactttcag

SEQ ID NO: 122408 - DNA, 15 bp, Homo sapiens
aacctcactttcaga

SEQ ID NO: 122409 - DNA, 15 bp, Homo sapiens
acctcactttcagaa

SEQ ID NO: 122410 - DNA, 15 bp, Homo sapiens
cctcactttcagaag

SEQ ID NO: 122411 - DNA, 15 bp, Homo sapiens
ctcactttcagaaga

SEQ ID NO: 122412 - DNA, 15 bp, Homo sapiens
tcactttcagaagaa

SEQ ID NO: 122413 - DNA, 15 bp, Homo sapiens
cactttcagaagaag

SEQ ID NO: 122414 - DNA, 15 bp, Homo sapiens
actttcagaagaaga

SEQ ID NO: 122415 - DNA, 15 bp, Homo sapiens
ctttcagaagaagac

SEQ ID NO: 122416 - DNA, 15 bp, Homo sapiens
tttcagaagaagaca

SEQ ID NO: 122417 - DNA, 15 bp, Homo sapiens
ttcagaagaagacaa

SEQ ID NO: 122418 - DNA, 15 bp, Homo sapiens
tcagaagaagacaaa

SEQ ID NO: 122419 - DNA, 15 bp, Homo sapiens
cagaagaagacaaac

SEQ ID NO: 122420 - DNA, 15 bp, Homo sapiens
agaagaagacaaaca

SEQ ID NO: 122421 - DNA, 15 bp, Homo sapiens
gaagaagacaaacag

SEQ ID NO: 122422 - DNA, 15 bp, Homo sapiens
aagaagacaaacagt

SEQ ID NO: 122423 - DNA, 15 bp, Homo sapiens
agaagacaaacagta

SEQ ID NO: 122424 - DNA, 15 bp, Homo sapiens
gaagacaaacagtaa

SEQ ID NO: 122425 - DNA, 15 bp, Homo sapiens
aagacaaacagtaag

SEQ ID NO: 122426 - DNA, 15 bp, Homo sapiens
agacaaacagtaagc

SEQ ID NO: 122427 - DNA, 15 bp, Homo sapiens
gacaaacagtaagct

SEQ ID NO: 122428 - DNA, 15 bp, Homo sapiens
acaaacagtaagctt

SEQ ID NO: 122429 - DNA, 15 bp, Homo sapiens
caaacagtaagcttg

SEQ ID NO: 122430 - DNA, 15 bp, Homo sapiens
aaacagtaagcttgg

SEQ ID NO: 122431 - DNA, 15 bp, Homo sapiens
aacagtaagcttggg

SEQ ID NO: 122432 - DNA, 15 bp, Homo sapiens
acagtaagcttgggt

SEQ ID NO: 122433 - DNA, 15 bp, Homo sapiens
cagtaagcttgggtt

SEQ ID NO: 122434 - DNA, 15 bp, Homo sapiens
agtaagcttgggttt

SEQ ID NO: 122435 - DNA, 15 bp, Homo sapiens
gtaagcttgggtttt

SEQ ID NO: 122436 - DNA, 15 bp, Homo sapiens
taagcttgggttttt

SEQ ID NO: 122437 - DNA, 15 bp, Homo sapiens
aagcttgggtttttc

SEQ ID NO: 122438 - DNA, 15 bp, Homo sapiens
agcttgggtttttca

SEQ ID NO: 122439 - DNA, 15 bp, Homo sapiens
gcttgggtttttcag

SEQ ID NO: 122440 - DNA, 15 bp, Homo sapiens
cttgggtttttcagc

SEQ ID NO: 122441 - DNA, 15 bp, Homo sapiens
ttgggtttttcagca

SEQ ID NO: 122442 - DNA, 15 bp, Homo sapiens
tgggtttttcagcag

SEQ ID NO: 122443 - DNA, 15 bp, Homo sapiens
gggtttttcagcagc

SEQ ID NO: 122444 - DNA, 15 bp, Homo sapiens
ggtttttcagcagcg

SEQ ID NO: 122445 - DNA, 15 bp, Homo sapiens
gtttttcagcagcgg

SEQ ID NO: 122446 - DNA, 15 bp, Homo sapiens
tttttcagcagcggg

SEQ ID NO: 122447 - DNA, 15 bp, Homo sapiens
ttttcagcagcgggg

SEQ ID NO: 122448 - DNA, 15 bp, Homo sapiens
tttcagcagcggggg

SEQ ID NO: 122449 - DNA, 15 bp, Homo sapiens
ttcagcagcgggggg

SEQ ID NO: 122450 - DNA, 15 bp, Homo sapiens
tcagcagcggggggt

SEQ ID NO: 122451 - DNA, 15 bp, Homo sapiens
cagcagcggggggtt

SEQ ID NO: 122452 - DNA, 15 bp, Homo sapiens
agcagcggggggttc

SEQ ID NO: 122453 - DNA, 15 bp, Homo sapiens
gcagcggggggttct

SEQ ID NO: 122454 - DNA, 15 bp, Homo sapiens
cagcggggggttctc

SEQ ID NO: 122455 - DNA, 15 bp, Homo sapiens
agcggggggttctct

SEQ ID NO: 122456 - DNA, 15 bp, Homo sapiens
gcggggggttctctc

SEQ ID NO: 122457 - DNA, 15 bp, Homo sapiens
cggggggttctctca

SEQ ID NO: 122458 - DNA, 15 bp, Homo sapiens
ggggggttctctcat

SEQ ID NO: 122459 - DNA, 15 bp, Homo sapiens
gggggttctctcatt

SEQ ID NO: 122460 - DNA, 15 bp, Homo sapiens
ggggttctctcattt

SEQ ID NO: 122461 - DNA, 15 bp, Homo sapiens
gggttctctcatttt

SEQ ID NO: 122462 - DNA, 15 bp, Homo sapiens
ggttctctcattttt

SEQ ID NO: 122463 - DNA, 15 bp, Homo sapiens
gttctctcatttttt

SEQ ID NO: 122464 - DNA, 15 bp, Homo sapiens
ttctctcattttttc

SEQ ID NO: 122465 - DNA, 15 bp, Homo sapiens
tctctcattttttct

SEQ ID NO: 122466 - DNA, 15 bp, Homo sapiens
ctctcattttttctt

SEQ ID NO: 122467 - DNA, 15 bp, Homo sapiens
tctcattttttcttt

SEQ ID NO: 122468 - DNA, 15 bp, Homo sapiens
ctcattttttctttg

SEQ ID NO: 122469 - DNA, 15 bp, Homo sapiens
tcattttttctttgt

SEQ ID NO: 122470 - DNA, 15 bp, Homo sapiens
cattttttctttgtg

SEQ ID NO: 122471 - DNA, 15 bp, Homo sapiens
attttttctttgtgg

SEQ ID NO: 122472 - DNA, 15 bp, Homo sapiens
ttttttctttgtggt

SEQ ID NO: 122473 - DNA, 15 bp, Homo sapiens
tttttctttgtggtt

SEQ ID NO: 122474 - DNA, 15 bp, Homo sapiens
ttttctttgtggttt

SEQ ID NO: 122475 - DNA, 15 bp, Homo sapiens
tttctttgtggtttt

SEQ ID NO: 122476 - DNA, 15 bp, Homo sapiens
ttctttgtggttttg

SEQ ID NO: 122477 - DNA, 15 bp, Homo sapiens
tctttgtggttttga

SEQ ID NO: 122478 - DNA, 15 bp, Homo sapiens
ctttgtggttttgag

SEQ ID NO: 122479 - DNA, 15 bp, Homo sapiens
tttgtggttttgagt

SEQ ID NO: 122480 - DNA, 15 bp, Homo sapiens
ttgtggttttgagtt

SEQ ID NO: 122481 - DNA, 15 bp, Homo sapiens
tgtggttttgagttg

SEQ ID NO: 122482 - DNA, 15 bp, Homo sapiens
gtggttttgagttgg

SEQ ID NO: 122483 - DNA, 15 bp, Homo sapiens
tggttttgagttggg

SEQ ID NO: 122484 - DNA, 15 bp, Homo sapiens
ggttttgagttgggg

SEQ ID NO: 122485 - DNA, 15 bp, Homo sapiens
gttttgagttgggga

SEQ ID NO: 122486 - DNA, 15 bp, Homo sapiens
ttttgagttggggat

SEQ ID NO: 122487 - DNA, 15 bp, Homo sapiens
tttgagttggggatt

SEQ ID NO: 122488 - DNA, 15 bp, Homo sapiens
ttgagttggggattg

SEQ ID NO: 122489 - DNA, 15 bp, Homo sapiens
tgagttggggattgg

SEQ ID NO: 122490 - DNA, 15 bp, Homo sapiens
gagttggggattgga

SEQ ID NO: 122491 - DNA, 15 bp, Homo sapiens
agttggggattggag

SEQ ID NO: 122492 - DNA, 15 bp, Homo sapiens
gttggggattggagg

SEQ ID NO: 122493 - DNA, 15 bp, Homo sapiens
ttggggattggagga

SEQ ID NO: 122494 - DNA, 15 bp, Homo sapiens
tggggattggaggag

SEQ ID NO: 122495 - DNA, 15 bp, Homo sapiens
ggggattggaggagg

SEQ ID NO: 122496 - DNA, 15 bp, Homo sapiens
gggattggaggaggg

SEQ ID NO: 122497 - DNA, 15 bp, Homo sapiens
ggattggaggaggga

SEQ ID NO: 122498 - DNA, 15 bp, Homo sapiens
gattggaggagggag

SEQ ID NO: 122499 - DNA, 15 bp, Homo sapiens
attggaggagggagg

SEQ ID NO: 122500 - DNA, 15 bp, Homo sapiens
ttggaggagggaggg

SEQ ID NO: 122501 - DNA, 15 bp, Homo sapiens
tggaggagggaggga

SEQ ID NO: 122502 - DNA, 15 bp, Homo sapiens
ggaggagggagggag

SEQ ID NO: 122503 - DNA, 15 bp, Homo sapiens
gaggagggagggagg

SEQ ID NO: 122504 - DNA, 15 bp, Homo sapiens
aggagggagggaggg

SEQ ID NO: 122505 - DNA, 15 bp, Homo sapiens
ggagggagggaggga

SEQ ID NO: 122506 - DNA, 15 bp, Homo sapiens
gagggagggagggaa

SEQ ID NO: 122507 - DNA, 15 bp, Homo sapiens
agggagggagggaag

SEQ ID NO: 122508 - DNA, 15 bp, Homo sapiens
gggagggagggaagg

SEQ ID NO: 122509 - DNA, 15 bp, Homo sapiens
ggagggagggaagga

SEQ ID NO: 122510 - DNA, 15 bp, Homo sapiens
gagggagggaaggaa

SEQ ID NO: 122511 - DNA, 15 bp, Homo sapiens
agggagggaaggaag

SEQ ID NO: 122512 - DNA, 15 bp, Homo sapiens
gggagggaaggaagc

SEQ ID NO: 122513 - DNA, 15 bp, Homo sapiens
ggagggaaggaagct

SEQ ID NO: 122514 - DNA, 15 bp, Homo sapiens
gagggaaggaagctg

SEQ ID NO: 122515 - DNA, 15 bp, Homo sapiens
agggaaggaagctgt

SEQ ID NO: 122516 - DNA, 15 bp, Homo sapiens
gggaaggaagctgtg

SEQ ID NO: 122517 - DNA, 15 bp, Homo sapiens
ggaaggaagctgtgt

SEQ ID NO: 122518 - DNA, 15 bp, Homo sapiens
gaaggaagctgtgtt

SEQ ID NO: 122519 - DNA, 15 bp, Homo sapiens
aaggaagctgtgttg

SEQ ID NO: 122520 - DNA, 15 bp, Homo sapiens
aggaagctgtgttgg

SEQ ID NO: 122521 - DNA, 15 bp, Homo sapiens
ggaagctgtgttggt

SEQ ID NO: 122522 - DNA, 15 bp, Homo sapiens
gaagctgtgttggtt

SEQ ID NO: 122523 - DNA, 15 bp, Homo sapiens
aagctgtgttggttt

SEQ ID NO: 122524 - DNA, 15 bp, Homo sapiens
agctgtgttggtttt

SEQ ID NO: 122525 - DNA, 15 bp, Homo sapiens
gctgtgttggttttc

SEQ ID NO: 122526 - DNA, 15 bp, Homo sapiens
ctgtgttggttttca

SEQ ID NO: 122527 - DNA, 15 bp, Homo sapiens
tgtgttggttttcac

SEQ ID NO: 122528 - DNA, 15 bp, Homo sapiens
gtgttggttttcaca

SEQ ID NO: 122529 - DNA, 15 bp, Homo sapiens
tgttggttttcacac

SEQ ID NO: 122530 - DNA, 15 bp, Homo sapiens
gttggttttcacaca

SEQ ID NO: 122531 - DNA, 15 bp, Homo sapiens
ttggttttcacacag

SEQ ID NO: 122532 - DNA, 15 bp, Homo sapiens
tggttttcacacagg

SEQ ID NO: 122533 - DNA, 15 bp, Homo sapiens
ggttttcacacaggg

SEQ ID NO: 122534 - DNA, 15 bp, Homo sapiens
gttttcacacaggga

SEQ ID NO: 122535 - DNA, 15 bp, Homo sapiens
ttttcacacagggat

SEQ ID NO: 122536 - DNA, 15 bp, Homo sapiens
tttcacacagggatt

SEQ ID NO: 122537 - DNA, 15 bp, Homo sapiens
ttcacacagggattg

SEQ ID NO: 122538 - DNA, 15 bp, Homo sapiens
tcacacagggattga

SEQ ID NO: 122539 - DNA, 15 bp, Homo sapiens
cacacagggattgat

SEQ ID NO: 122540 - DNA, 15 bp, Homo sapiens
acacagggattgatg

SEQ ID NO: 122541 - DNA, 15 bp, Homo sapiens
cacagggattgatgg

SEQ ID NO: 122542 - DNA, 15 bp, Homo sapiens
acagggattgatgga

SEQ ID NO: 122543 - DNA, 15 bp, Homo sapiens
cagggattgatggaa

SEQ ID NO: 122544 - DNA, 15 bp, Homo sapiens
agggattgatggaat

SEQ ID NO: 122545 - DNA, 15 bp, Homo sapiens
gggattgatggaatc

SEQ ID NO: 122546 - DNA, 15 bp, Homo sapiens
ggattgatggaatct

SEQ ID NO: 122547 - DNA, 15 bp, Homo sapiens
gattgatggaatctg

SEQ ID NO: 122548 - DNA, 15 bp, Homo sapiens
attgatggaatctgg

SEQ ID NO: 122549 - DNA, 15 bp, Homo sapiens
ttgatggaatctggc

SEQ ID NO: 122550 - DNA, 15 bp, Homo sapiens
tgatggaatctggct

SEQ ID NO: 122551 - DNA, 15 bp, Homo sapiens
gatggaatctggctc

SEQ ID NO: 122552 - DNA, 15 bp, Homo sapiens
atggaatctggctct

SEQ ID NO: 122553 - DNA, 15 bp, Homo sapiens
tggaatctggctctt

SEQ ID NO: 122554 - DNA, 15 bp, Homo sapiens
ggaatctggctctta

SEQ ID NO: 122555 - DNA, 15 bp, Homo sapiens
gaatctggctcttat

SEQ ID NO: 122556 - DNA, 15 bp, Homo sapiens
aatctggctcttatg

SEQ ID NO: 122557 - DNA, 15 bp, Homo sapiens
atctggctcttatgg

SEQ ID NO: 122558 - DNA, 15 bp, Homo sapiens
tctggctcttatgga

SEQ ID NO: 122559 - DNA, 15 bp, Homo sapiens
ctggctcttatggac

SEQ ID NO: 122560 - DNA, 15 bp, Homo sapiens
tggctcttatggaca

SEQ ID NO: 122561 - DNA, 15 bp, Homo sapiens
ggctcttatggacac

SEQ ID NO: 122562 - DNA, 15 bp, Homo sapiens
gctcttatggacaca

SEQ ID NO: 122563 - DNA, 15 bp, Homo sapiens
ctcttatggacacag

SEQ ID NO: 122564 - DNA, 15 bp, Homo sapiens
tcttatggacacagg

SEQ ID NO: 122565 - DNA, 15 bp, Homo sapiens
cttatggacacagga

SEQ ID NO: 122566 - DNA, 15 bp, Homo sapiens
ttatggacacaggac

SEQ ID NO: 122567 - DNA, 15 bp, Homo sapiens
tatggacacaggact

SEQ ID NO: 122568 - DNA, 15 bp, Homo sapiens
atggacacaggactg

SEQ ID NO: 122569 - DNA, 15 bp, Homo sapiens
tggacacaggactgt

SEQ ID NO: 122570 - DNA, 15 bp, Homo sapiens
ggacacaggactgtg

SEQ ID NO: 122571 - DNA, 15 bp, Homo sapiens
gacacaggactgtgt

SEQ ID NO: 122572 - DNA, 15 bp, Homo sapiens
acacaggactgtgtg

SEQ ID NO: 122573 - DNA, 15 bp, Homo sapiens
cacaggactgtgtgg

SEQ ID NO: 122574 - DNA, 15 bp, Homo sapiens
acaggactgtgtggt

SEQ ID NO: 122575 - DNA, 15 bp, Homo sapiens
caggactgtgtggtc

SEQ ID NO: 122576 - DNA, 15 bp, Homo sapiens
aggactgtgtggtcc

SEQ ID NO: 122577 - DNA, 15 bp, Homo sapiens
ggactgtgtggtccg

SEQ ID NO: 122578 - DNA, 15 bp, Homo sapiens
gactgtgtggtccgg

SEQ ID NO: 122579 - DNA, 15 bp, Homo sapiens
actgtgtggtccgga

SEQ ID NO: 122580 - DNA, 15 bp, Homo sapiens
ctgtgtggtccggat

SEQ ID NO: 122581 - DNA, 15 bp, Homo sapiens
tgtgtggtccggata

SEQ ID NO: 122582 - DNA, 15 bp, Homo sapiens
gtgtggtccggatat

SEQ ID NO: 122583 - DNA, 15 bp, Homo sapiens
tgtggtccggatatg

SEQ ID NO: 122584 - DNA, 15 bp, Homo sapiens
gtggtccggatatgg

SEQ ID NO: 122585 - DNA, 15 bp, Homo sapiens
tggtccggatatggc

SEQ ID NO: 122586 - DNA, 15 bp, Homo sapiens
ggtccggatatggca

SEQ ID NO: 122587 - DNA, 15 bp, Homo sapiens
gtccggatatggcat

SEQ ID NO: 122588 - DNA, 15 bp, Homo sapiens
tccggatatggcatg

SEQ ID NO: 122589 - DNA, 15 bp, Homo sapiens
ccggatatggcatgt

SEQ ID NO: 122590 - DNA, 15 bp, Homo sapiens
cggatatggcatgtg

SEQ ID NO: 122591 - DNA, 15 bp, Homo sapiens
ggatatggcatgtgg

SEQ ID NO: 122592 - DNA, 15 bp, Homo sapiens
gatatggcatgtggc

SEQ ID NO: 122593 - DNA, 15 bp, Homo sapiens
atatggcatgtggct

SEQ ID NO: 122594 - DNA, 15 bp, Homo sapiens
tatggcatgtggctt

SEQ ID NO: 122595 - DNA, 15 bp, Homo sapiens
atggcatgtggctta

SEQ ID NO: 122596 - DNA, 15 bp, Homo sapiens
tggcatgtggcttat

SEQ ID NO: 122597 - DNA, 15 bp, Homo sapiens
ggcatgtggcttatc

SEQ ID NO: 122598 - DNA, 15 bp, Homo sapiens
gcatgtggcttatca

SEQ ID NO: 122599 - DNA, 15 bp, Homo sapiens
catgtggcttatcat

SEQ ID NO: 122600 - DNA, 15 bp, Homo sapiens
atgtggcttatcata

SEQ ID NO: 122601 - DNA, 15 bp, Homo sapiens
tgtggcttatcatag

SEQ ID NO: 122602 - DNA, 15 bp, Homo sapiens
gtggcttatcataga

SEQ ID NO: 122603 - DNA, 15 bp, Homo sapiens
tggcttatcatagag

SEQ ID NO: 122604 - DNA, 15 bp, Homo sapiens
ggcttatcatagagg

SEQ ID NO: 122605 - DNA, 15 bp, Homo sapiens
gcttatcatagaggg

SEQ ID NO: 122606 - DNA, 15 bp, Homo sapiens
cttatcatagagggc

SEQ ID NO: 122607 - DNA, 15 bp, Homo sapiens
ttatcatagagggca

SEQ ID NO: 122608 - DNA, 15 bp, Homo sapiens
tatcatagagggcag

SEQ ID NO: 122609 - DNA, 15 bp, Homo sapiens
atcatagagggcaga

SEQ ID NO: 122610 - DNA, 15 bp, Homo sapiens
tcatagagggcagat

SEQ ID NO: 122611 - DNA, 15 bp, Homo sapiens
catagagggcagatt

SEQ ID NO: 122612 - DNA, 15 bp, Homo sapiens
atagagggcagattt

SEQ ID NO: 122613 - DNA, 15 bp, Homo sapiens
tagagggcagatttg

SEQ ID NO: 122614 - DNA, 15 bp, Homo sapiens
agagggcagatttgc

SEQ ID NO: 122615 - DNA, 15 bp, Homo sapiens
gagggcagatttgca

SEQ ID NO: 122616 - DNA, 15 bp, Homo sapiens
agggcagatttgcag

SEQ ID NO: 122617 - DNA, 15 bp, Homo sapiens
gggcagatttgcagc

SEQ ID NO: 122618 - DNA, 15 bp, Homo sapiens
ggcagatttgcagcc

SEQ ID NO: 122619 - DNA, 15 bp, Homo sapiens
gcagatttgcagcca

SEQ ID NO: 122620 - DNA, 15 bp, Homo sapiens
cagatttgcagccag

SEQ ID NO: 122621 - DNA, 15 bp, Homo sapiens
agatttgcagccagg

SEQ ID NO: 122622 - DNA, 15 bp, Homo sapiens
gatttgcagccaggt

SEQ ID NO: 122623 - DNA, 15 bp, Homo sapiens
atttgcagccaggta

SEQ ID NO: 122624 - DNA, 15 bp, Homo sapiens
tttgcagccaggtag

SEQ ID NO: 122625 - DNA, 15 bp, Homo sapiens
ttgcagccaggtaga

SEQ ID NO: 122626 - DNA, 15 bp, Homo sapiens
tgcagccaggtagaa

SEQ ID NO: 122627 - DNA, 15 bp, Homo sapiens
gcagccaggtagaaa

SEQ ID NO: 122628 - DNA, 15 bp, Homo sapiens
cagccaggtagaaat

SEQ ID NO: 122629 - DNA, 15 bp, Homo sapiens
agccaggtagaaata

SEQ ID NO: 122630 - DNA, 15 bp, Homo sapiens
gccaggtagaaatag

SEQ ID NO: 122631 - DNA, 15 bp, Homo sapiens
ccaggtagaaatagt

SEQ ID NO: 122632 - DNA, 15 bp, Homo sapiens
caggtagaaatagta

SEQ ID NO: 122633 - DNA, 15 bp, Homo sapiens
aggtagaaatagtag

SEQ ID NO: 122634 - DNA, 15 bp, Homo sapiens
ggtagaaatagtagc

SEQ ID NO: 122635 - DNA, 15 bp, Homo sapiens
gtagaaatagtagct

SEQ ID NO: 122636 - DNA, 15 bp, Homo sapiens
tagaaatagtagctt

SEQ ID NO: 122637 - DNA, 15 bp, Homo sapiens
agaaatagtagcttt

SEQ ID NO: 122638 - DNA, 15 bp, Homo sapiens
gaaatagtagctttg

SEQ ID NO: 122639 - DNA, 15 bp, Homo sapiens
aaatagtagctttgg

SEQ ID NO: 122640 - DNA, 15 bp, Homo sapiens
aatagtagctttggt

SEQ ID NO: 122641 - DNA, 15 bp, Homo sapiens
atagtagctttggtt

SEQ ID NO: 122642 - DNA, 15 bp, Homo sapiens
tagtagctttggttt

SEQ ID NO: 122643 - DNA, 15 bp, Homo sapiens
agtagctttggtttg

SEQ ID NO: 122644 - DNA, 15 bp, Homo sapiens
gtagctttggtttgt

SEQ ID NO: 122645 - DNA, 15 bp, Homo sapiens
tagctttggtttgtg

SEQ ID NO: 122646 - DNA, 15 bp, Homo sapiens
agctttggtttgtgc

SEQ ID NO: 122647 - DNA, 15 bp, Homo sapiens
gctttggtttgtgct

SEQ ID NO: 122648 - DNA, 15 bp, Homo sapiens
ctttggtttgtgcta

SEQ ID NO: 122649 - DNA, 15 bp, Homo sapiens
tttggtttgtgctac

SEQ ID NO: 122650 - DNA, 15 bp, Homo sapiens
ttggtttgtgctact

SEQ ID NO: 122651 - DNA, 15 bp, Homo sapiens
tggtttgtgctactg

SEQ ID NO: 122652 - DNA, 15 bp, Homo sapiens
ggtttgtgctactgc

SEQ ID NO: 122653 - DNA, 15 bp, Homo sapiens
gtttgtgctactgcc

SEQ ID NO: 122654 - DNA, 15 bp, Homo sapiens
tttgtgctactgccc

SEQ ID NO: 122655 - DNA, 15 bp, Homo sapiens
ttgtgctactgccca

SEQ ID NO: 122656 - DNA, 15 bp, Homo sapiens
tgtgctactgcccag

SEQ ID NO: 122657 - DNA, 15 bp, Homo sapiens
gtgctactgcccagg

SEQ ID NO: 122658 - DNA, 15 bp, Homo sapiens
tgctactgcccaggc

SEQ ID NO: 122659 - DNA, 15 bp, Homo sapiens
gctactgcccaggca

SEQ ID NO: 122660 - DNA, 15 bp, Homo sapiens
ctactgcccaggcat

SEQ ID NO: 122661 - DNA, 15 bp, Homo sapiens
tactgcccaggcatg

SEQ ID NO: 122662 - DNA, 15 bp, Homo sapiens
actgcccaggcatga

SEQ ID NO: 122663 - DNA, 15 bp, Homo sapiens
ctgcccaggcatgag

SEQ ID NO: 122664 - DNA, 15 bp, Homo sapiens
tgcccaggcatgagt

SEQ ID NO: 122665 - DNA, 15 bp, Homo sapiens
gcccaggcatgagtt

SEQ ID NO: 122666 - DNA, 15 bp, Homo sapiens
cccaggcatgagttc

SEQ ID NO: 122667 - DNA, 15 bp, Homo sapiens
ccaggcatgagttct

SEQ ID NO: 122668 - DNA, 15 bp, Homo sapiens
caggcatgagttctg

SEQ ID NO: 122669 - DNA, 15 bp, Homo sapiens
aggcatgagttctga

SEQ ID NO: 122670 - DNA, 15 bp, Homo sapiens
ggcatgagttctgat

SEQ ID NO: 122671 - DNA, 15 bp, Homo sapiens
gcatgagttctgatc

SEQ ID NO: 122672 - DNA, 15 bp, Homo sapiens
catgagttctgatcc

SEQ ID NO: 122673 - DNA, 15 bp, Homo sapiens
atgagttctgatccc

SEQ ID NO: 122674 - DNA, 15 bp, Homo sapiens
tgagttctgatccct

SEQ ID NO: 122675 - DNA, 15 bp, Homo sapiens
gagttctgatcccta

SEQ ID NO: 122676 - DNA, 15 bp, Homo sapiens
agttctgatccctag

SEQ ID NO: 122677 - DNA, 15 bp, Homo sapiens
gttctgatccctagg

SEQ ID NO: 122678 - DNA, 15 bp, Homo sapiens
ttctgatccctagga

SEQ ID NO: 122679 - DNA, 15 bp, Homo sapiens
tctgatccctaggac

SEQ ID NO: 122680 - DNA, 15 bp, Homo sapiens
ctgatccctaggacc

SEQ ID NO: 122681 - DNA, 15 bp, Homo sapiens
tgatccctaggacct

SEQ ID NO: 122682 - DNA, 15 bp, Homo sapiens
gatccctaggacctg

SEQ ID NO: 122683 - DNA, 15 bp, Homo sapiens
atccctaggacctgg

SEQ ID NO: 122684 - DNA, 15 bp, Homo sapiens
tccctaggacctggc

SEQ ID NO: 122685 - DNA, 15 bp, Homo sapiens
ccctaggacctggct

SEQ ID NO: 122686 - DNA, 15 bp, Homo sapiens
cctaggacctggctc

SEQ ID NO: 122687 - DNA, 15 bp, Homo sapiens
ctaggacctggctcc

SEQ ID NO: 122688 - DNA, 15 bp, Homo sapiens
taggacctggctccg

SEQ ID NO: 122689 - DNA, 15 bp, Homo sapiens
aggacctggctccga

SEQ ID NO: 122690 - DNA, 15 bp, Homo sapiens
ggacctggctccgaa

SEQ ID NO: 122691 - DNA, 15 bp, Homo sapiens
gacctggctccgaat

SEQ ID NO: 122692 - DNA, 15 bp, Homo sapiens
acctggctccgaatc

SEQ ID NO: 122693 - DNA, 15 bp, Homo sapiens
cctggctccgaatcg

SEQ ID NO: 122694 - DNA, 15 bp, Homo sapiens
ctggctccgaatcgc

SEQ ID NO: 122695 - DNA, 15 bp, Homo sapiens
tggctccgaatcgcc

SEQ ID NO: 122696 - DNA, 15 bp, Homo sapiens
ggctccgaatcgccc

SEQ ID NO: 122697 - DNA, 15 bp, Homo sapiens
gctccgaatcgcccc

SEQ ID NO: 122698 - DNA, 15 bp, Homo sapiens
ctccgaatcgcccct

SEQ ID NO: 122699 - DNA, 15 bp, Homo sapiens
tccgaatcgcccctg

SEQ ID NO: 122700 - DNA, 15 bp, Homo sapiens
ccgaatcgcccctga

SEQ ID NO: 122701 - DNA, 15 bp, Homo sapiens
cgaatcgcccctgag

SEQ ID NO: 122702 - DNA, 15 bp, Homo sapiens
gaatcgcccctgagc

SEQ ID NO: 122703 - DNA, 15 bp, Homo sapiens
aatcgcccctgagca

SEQ ID NO: 122704 - DNA, 15 bp, Homo sapiens
atcgcccctgagcac

SEQ ID NO: 122705 - DNA, 15 bp, Homo sapiens
tcgcccctgagcacc

SEQ ID NO: 122706 - DNA, 15 bp, Homo sapiens
cgcccctgagcaccc

SEQ ID NO: 122707 - DNA, 15 bp, Homo sapiens
gcccctgagcacccc

SEQ ID NO: 122708 - DNA, 15 bp, Homo sapiens
cccctgagcacccca

SEQ ID NO: 122709 - DNA, 15 bp, Homo sapiens
ccctgagcaccccac

SEQ ID NO: 122710 - DNA, 15 bp, Homo sapiens
cctgagcaccccact

SEQ ID NO: 122711 - DNA, 15 bp, Homo sapiens
ctgagcaccccactt

SEQ ID NO: 122712 - DNA, 15 bp, Homo sapiens
tgagcaccccacttt

SEQ ID NO: 122713 - DNA, 15 bp, Homo sapiens
gagcaccccactttt

SEQ ID NO: 122714 - DNA, 15 bp, Homo sapiens
agcaccccacttttt

SEQ ID NO: 122715 - DNA, 15 bp, Homo sapiens
gcaccccactttttc

SEQ ID NO: 122716 - DNA, 15 bp, Homo sapiens
caccccactttttcc

SEQ ID NO: 122717 - DNA, 15 bp, Homo sapiens
accccactttttcct

SEQ ID NO: 122718 - DNA, 15 bp, Homo sapiens
ccccactttttcctt

SEQ ID NO: 122719 - DNA, 15 bp, Homo sapiens
cccactttttccttt

SEQ ID NO: 122720 - DNA, 15 bp, Homo sapiens
ccactttttcctttt

SEQ ID NO: 122721 - DNA, 15 bp, Homo sapiens
cactttttccttttg

SEQ ID NO: 122722 - DNA, 15 bp, Homo sapiens
actttttccttttgc

SEQ ID NO: 122723 - DNA, 15 bp, Homo sapiens
ctttttccttttgct

SEQ ID NO: 122724 - DNA, 15 bp, Homo sapiens
tttttccttttgctg

SEQ ID NO: 122725 - DNA, 15 bp, Homo sapiens
ttttccttttgctgc

SEQ ID NO: 122726 - DNA, 15 bp, Homo sapiens
tttccttttgctgca

SEQ ID NO: 122727 - DNA, 15 bp, Homo sapiens
ttccttttgctgcag

SEQ ID NO: 122728 - DNA, 15 bp, Homo sapiens
tccttttgctgcagc

SEQ ID NO: 122729 - DNA, 15 bp, Homo sapiens
ccttttgctgcagcc

SEQ ID NO: 122730 - DNA, 15 bp, Homo sapiens
cttttgctgcagccc

SEQ ID NO: 122731 - DNA, 15 bp, Homo sapiens
ttttgctgcagccct

SEQ ID NO: 122732 - DNA, 15 bp, Homo sapiens
tttgctgcagccctg

SEQ ID NO: 122733 - DNA, 15 bp, Homo sapiens
ttgctgcagccctgg

SEQ ID NO: 122734 - DNA, 15 bp, Homo sapiens
tgctgcagccctggg

SEQ ID NO: 122735 - DNA, 15 bp, Homo sapiens
gctgcagccctggga

SEQ ID NO: 122736 - DNA, 15 bp, Homo sapiens
ctgcagccctgggag

SEQ ID NO: 122737 - DNA, 15 bp, Homo sapiens
tgcagccctgggagc

SEQ ID NO: 122738 - DNA, 15 bp, Homo sapiens
gcagccctgggagcc

SEQ ID NO: 122739 - DNA, 15 bp, Homo sapiens
cagccctgggagcca

SEQ ID NO: 122740 - DNA, 15 bp, Homo sapiens
agccctgggagccac

SEQ ID NO: 122741 - DNA, 15 bp, Homo sapiens
gccctgggagccacc

SEQ ID NO: 122742 - DNA, 15 bp, Homo sapiens
ccctgggagccacct

SEQ ID NO: 122743 - DNA, 15 bp, Homo sapiens
cctgggagccacctg

SEQ ID NO: 122744 - DNA, 15 bp, Homo sapiens
ctgggagccacctgg

SEQ ID NO: 122745 - DNA, 15 bp, Homo sapiens
tgggagccacctggc

SEQ ID NO: 122746 - DNA, 15 bp, Homo sapiens
gggagccacctggct

SEQ ID NO: 122747 - DNA, 15 bp, Homo sapiens
ggagccacctggctc

SEQ ID NO: 122748 - DNA, 15 bp, Homo sapiens
gagccacctggctct

SEQ ID NO: 122749 - DNA, 15 bp, Homo sapiens
agccacctggctctc

SEQ ID NO: 122750 - DNA, 15 bp, Homo sapiens
gccacctggctctcc

SEQ ID NO: 122751 - DNA, 15 bp, Homo sapiens
ccacctggctctcca

SEQ ID NO: 122752 - DNA, 15 bp, Homo sapiens
cacctggctctccaa

SEQ ID NO: 122753 - DNA, 15 bp, Homo sapiens
acctggctctccaaa

SEQ ID NO: 122754 - DNA, 15 bp, Homo sapiens
cctggctctccaaaa

SEQ ID NO: 122755 - DNA, 15 bp, Homo sapiens
ctggctctccaaaag

SEQ ID NO: 122756 - DNA, 15 bp, Homo sapiens
tggctctccaaaagc

SEQ ID NO: 122757 - DNA, 15 bp, Homo sapiens
ggctctccaaaagcc

SEQ ID NO: 122758 - DNA, 15 bp, Homo sapiens
gctctccaaaagccc

SEQ ID NO: 122759 - DNA, 15 bp, Homo sapiens
ctctccaaaagcccc

SEQ ID NO: 122760 - DNA, 15 bp, Homo sapiens
tctccaaaagcccct

SEQ ID NO: 122761 - DNA, 15 bp, Homo sapiens
ctccaaaagccccta

SEQ ID NO: 122762 - DNA, 15 bp, Homo sapiens
tccaaaagcccctaa

SEQ ID NO: 122763 - DNA, 15 bp, Homo sapiens
ccaaaagcccctaat

SEQ ID NO: 122764 - DNA, 15 bp, Homo sapiens
caaaagcccctaatg

SEQ ID NO: 122765 - DNA, 15 bp, Homo sapiens
aaaagcccctaatgg

SEQ ID NO: 122766 - DNA, 15 bp, Homo sapiens
aaagcccctaatggg

SEQ ID NO: 122767 - DNA, 15 bp, Homo sapiens
aagcccctaatgggc

SEQ ID NO: 122768 - DNA, 15 bp, Homo sapiens
agcccctaatgggcc

SEQ ID NO: 122769 - DNA, 15 bp, Homo sapiens
gcccctaatgggccc

SEQ ID NO: 122770 - DNA, 15 bp, Homo sapiens
cccctaatgggcccc

SEQ ID NO: 122771 - DNA, 15 bp, Homo sapiens
ccctaatgggcccct

SEQ ID NO: 122772 - DNA, 15 bp, Homo sapiens
cctaatgggcccctg

SEQ ID NO: 122773 - DNA, 15 bp, Homo sapiens
ctaatgggcccctgt

SEQ ID NO: 122774 - DNA, 15 bp, Homo sapiens
taatgggcccctgta

SEQ ID NO: 122775 - DNA, 15 bp, Homo sapiens
aatgggcccctgtat

SEQ ID NO: 122776 - DNA, 15 bp, Homo sapiens
atgggcccctgtatt

SEQ ID NO: 122777 - DNA, 15 bp, Homo sapiens
tgggcccctgtattt

SEQ ID NO: 122778 - DNA, 15 bp, Homo sapiens
gggcccctgtatttc

SEQ ID NO: 122779 - DNA, 15 bp, Homo sapiens
ggcccctgtatttct

SEQ ID NO: 122780 - DNA, 15 bp, Homo sapiens
gcccctgtatttctg

SEQ ID NO: 122781 - DNA, 15 bp, Homo sapiens
cccctgtatttctgg

SEQ ID NO: 122782 - DNA, 15 bp, Homo sapiens
ccctgtatttctgga

SEQ ID NO: 122783 - DNA, 15 bp, Homo sapiens
cctgtatttctggaa

SEQ ID NO: 122784 - DNA, 15 bp, Homo sapiens
ctgtatttctggaag

SEQ ID NO: 122785 - DNA, 15 bp, Homo sapiens
tgtatttctggaagc

SEQ ID NO: 122786 - DNA, 15 bp, Homo sapiens
gtatttctggaagct

SEQ ID NO: 122787 - DNA, 15 bp, Homo sapiens
tatttctggaagctg

SEQ ID NO: 122788 - DNA, 15 bp, Homo sapiens
atttctggaagctgt

SEQ ID NO: 122789 - DNA, 15 bp, Homo sapiens
tttctggaagctgtg

SEQ ID NO: 122790 - DNA, 15 bp, Homo sapiens
ttctggaagctgtgg

SEQ ID NO: 122791 - DNA, 15 bp, Homo sapiens
tctggaagctgtggg

SEQ ID NO: 122792 - DNA, 15 bp, Homo sapiens
ctggaagctgtgggt

SEQ ID NO: 122793 - DNA, 15 bp, Homo sapiens
tggaagctgtgggtg

SEQ ID NO: 122794 - DNA, 15 bp, Homo sapiens
ggaagctgtgggtga

SEQ ID NO: 122795 - DNA, 15 bp, Homo sapiens
gaagctgtgggtgaa

SEQ ID NO: 122796 - DNA, 15 bp, Homo sapiens
aagctgtgggtgaag

SEQ ID NO: 122797 - DNA, 15 bp, Homo sapiens
agctgtgggtgaagt

SEQ ID NO: 122798 - DNA, 15 bp, Homo sapiens
gctgtgggtgaagtg

SEQ ID NO: 122799 - DNA, 15 bp, Homo sapiens
ctgtgggtgaagtga

SEQ ID NO: 122800 - DNA, 15 bp, Homo sapiens
tgtgggtgaagtgag

SEQ ID NO: 122801 - DNA, 15 bp, Homo sapiens
gtgggtgaagtgagt

SEQ ID NO: 122802 - DNA, 15 bp, Homo sapiens
tgggtgaagtgagtt

SEQ ID NO: 122803 - DNA, 15 bp, Homo sapiens
gggtgaagtgagtta

SEQ ID NO: 122804 - DNA, 15 bp, Homo sapiens
ggtgaagtgagttag

SEQ ID NO: 122805 - DNA, 15 bp, Homo sapiens
gtgaagtgagttagt

SEQ ID NO: 122806 - DNA, 15 bp, Homo sapiens
tgaagtgagttagtg

SEQ ID NO: 122807 - DNA, 15 bp, Homo sapiens
gaagtgagttagtgg

SEQ ID NO: 122808 - DNA, 15 bp, Homo sapiens
aagtgagttagtggc

SEQ ID NO: 122809 - DNA, 15 bp, Homo sapiens
agtgagttagtggcc

SEQ ID NO: 122810 - DNA, 15 bp, Homo sapiens
gtgagttagtggccc

SEQ ID NO: 122811 - DNA, 15 bp, Homo sapiens
tgagttagtggcccc

SEQ ID NO: 122812 - DNA, 15 bp, Homo sapiens
gagttagtggcccca

SEQ ID NO: 122813 - DNA, 15 bp, Homo sapiens
agttagtggccccac

SEQ ID NO: 122814 - DNA, 15 bp, Homo sapiens
gttagtggccccact

SEQ ID NO: 122815 - DNA, 15 bp, Homo sapiens
ttagtggccccactc

SEQ ID NO: 122816 - DNA, 15 bp, Homo sapiens
tagtggccccactct

SEQ ID NO: 122817 - DNA, 15 bp, Homo sapiens
agtggccccactctt

SEQ ID NO: 122818 - DNA, 15 bp, Homo sapiens
gtggccccactctta

SEQ ID NO: 122819 - DNA, 15 bp, Homo sapiens
tggccccactcttag

SEQ ID NO: 122820 - DNA, 15 bp, Homo sapiens
ggccccactcttaga

SEQ ID NO: 122821 - DNA, 15 bp, Homo sapiens
gccccactcttagag

SEQ ID NO: 122822 - DNA, 15 bp, Homo sapiens
ccccactcttagaga

SEQ ID NO: 122823 - DNA, 15 bp, Homo sapiens
cccactcttagagat

SEQ ID NO: 122824 - DNA, 15 bp, Homo sapiens
ccactcttagagatc

SEQ ID NO: 122825 - DNA, 15 bp, Homo sapiens
cactcttagagatca

SEQ ID NO: 122826 - DNA, 15 bp, Homo sapiens
actcttagagatcaa

SEQ ID NO: 122827 - DNA, 15 bp, Homo sapiens
ctcttagagatcaat

SEQ ID NO: 122828 - DNA, 15 bp, Homo sapiens
tcttagagatcaata

SEQ ID NO: 122829 - DNA, 15 bp, Homo sapiens
cttagagatcaatac

SEQ ID NO: 122830 - DNA, 15 bp, Homo sapiens
ttagagatcaatact

SEQ ID NO: 122831 - DNA, 15 bp, Homo sapiens
tagagatcaatactg

SEQ ID NO: 122832 - DNA, 15 bp, Homo sapiens
agagatcaatactgg

SEQ ID NO: 122833 - DNA, 15 bp, Homo sapiens
gagatcaatactggg

SEQ ID NO: 122834 - DNA, 15 bp, Homo sapiens
agatcaatactgggt

SEQ ID NO: 122835 - DNA, 15 bp, Homo sapiens
gatcaatactgggta

SEQ ID NO: 122836 - DNA, 15 bp, Homo sapiens
atcaatactgggtat

SEQ ID NO: 122837 - DNA, 15 bp, Homo sapiens
tcaatactgggtatc

SEQ ID NO: 122838 - DNA, 15 bp, Homo sapiens
caatactgggtatct

SEQ ID NO: 122839 - DNA, 15 bp, Homo sapiens
aatactgggtatctt

SEQ ID NO: 122840 - DNA, 15 bp, Homo sapiens
atactgggtatcttg

SEQ ID NO: 122841 - DNA, 15 bp, Homo sapiens
tactgggtatcttgg

SEQ ID NO: 122842 - DNA, 15 bp, Homo sapiens
actgggtatcttggt

SEQ ID NO: 122843 - DNA, 15 bp, Homo sapiens
ctgggtatcttggtg

SEQ ID NO: 122844 - DNA, 15 bp, Homo sapiens
tgggtatcttggtgt

SEQ ID NO: 122845 - DNA, 15 bp, Homo sapiens
gggtatcttggtgtc

SEQ ID NO: 122846 - DNA, 15 bp, Homo sapiens
ggtatcttggtgtca

SEQ ID NO: 122847 - DNA, 15 bp, Homo sapiens
gtatcttggtgtcaa

SEQ ID NO: 122848 - DNA, 15 bp, Homo sapiens
tatcttggtgtcaat

SEQ ID NO: 122849 - DNA, 15 bp, Homo sapiens
atcttggtgtcaatc

SEQ ID NO: 122850 - DNA, 15 bp, Homo sapiens
tcttggtgtcaatct

SEQ ID NO: 122851 - DNA, 15 bp, Homo sapiens
cttggtgtcaatctg

SEQ ID NO: 122852 - DNA, 15 bp, Homo sapiens
ttggtgtcaatctgg

SEQ ID NO: 122853 - DNA, 15 bp, Homo sapiens
tggtgtcaatctgga

SEQ ID NO: 122854 - DNA, 15 bp, Homo sapiens
ggtgtcaatctggat

SEQ ID NO: 122855 - DNA, 15 bp, Homo sapiens
gtgtcaatctggatt

SEQ ID NO: 122856 - DNA, 15 bp, Homo sapiens
tgtcaatctggattc

SEQ ID NO: 122857 - DNA, 15 bp, Homo sapiens
gtcaatctggattct

SEQ ID NO: 122858 - DNA, 15 bp, Homo sapiens
tcaatctggattctt

SEQ ID NO: 122859 - DNA, 15 bp, Homo sapiens
caatctggattcttt

SEQ ID NO: 122860 - DNA, 15 bp, Homo sapiens
aatctggattctttc

SEQ ID NO: 122861 - DNA, 15 bp, Homo sapiens
atctggattctttcc

SEQ ID NO: 122862 - DNA, 15 bp, Homo sapiens
tctggattctttcct

SEQ ID NO: 122863 - DNA, 15 bp, Homo sapiens
ctggattctttcctt

SEQ ID NO: 122864 - DNA, 15 bp, Homo sapiens
tggattctttccttc

SEQ ID NO: 122865 - DNA, 15 bp, Homo sapiens
ggattctttccttca

SEQ ID NO: 122866 - DNA, 15 bp, Homo sapiens
gattctttccttcag

SEQ ID NO: 122867 - DNA, 15 bp, Homo sapiens
attctttccttcagg

SEQ ID NO: 122868 - DNA, 15 bp, Homo sapiens
ttctttccttcaggc

SEQ ID NO: 122869 - DNA, 15 bp, Homo sapiens
tctttccttcaggcc

SEQ ID NO: 122870 - DNA, 15 bp, Homo sapiens
ctttccttcaggcct

SEQ ID NO: 122871 - DNA, 15 bp, Homo sapiens
tttccttcaggcctg

SEQ ID NO: 122872 - DNA, 15 bp, Homo sapiens
ttccttcaggcctgg

SEQ ID NO: 122873 - DNA, 15 bp, Homo sapiens
tccttcaggcctgga

SEQ ID NO: 122874 - DNA, 15 bp, Homo sapiens
ccttcaggcctggag

SEQ ID NO: 122875 - DNA, 15 bp, Homo sapiens
cttcaggcctggagg

SEQ ID NO: 122876 - DNA, 15 bp, Homo sapiens
ttcaggcctggagga

SEQ ID NO: 122877 - DNA, 15 bp, Homo sapiens
tcaggcctggaggaa

SEQ ID NO: 122878 - DNA, 15 bp, Homo sapiens
caggcctggaggaat

SEQ ID NO: 122879 - DNA, 15 bp, Homo sapiens
aggcctggaggaata

SEQ ID NO: 122880 - DNA, 15 bp, Homo sapiens
ggcctggaggaatat

SEQ ID NO: 122881 - DNA, 15 bp, Homo sapiens
gcctggaggaatata

SEQ ID NO: 122882 - DNA, 15 bp, Homo sapiens
cctggaggaatataa

SEQ ID NO: 122883 - DNA, 15 bp, Homo sapiens
ctggaggaatataat

SEQ ID NO: 122884 - DNA, 15 bp, Homo sapiens
tggaggaatataata

SEQ ID NO: 122885 - DNA, 15 bp, Homo sapiens
ggaggaatataataa

SEQ ID NO: 122886 - DNA, 15 bp, Homo sapiens
gaggaatataataac

SEQ ID NO: 122887 - DNA, 15 bp, Homo sapiens
aggaatataataact

SEQ ID NO: 122888 - DNA, 15 bp, Homo sapiens
ggaatataataactg

SEQ ID NO: 122889 - DNA, 15 bp, Homo sapiens
gaatataataactga

SEQ ID NO: 122890 - DNA, 15 bp, Homo sapiens
aatataataactgag

SEQ ID NO: 122891 - DNA, 15 bp, Homo sapiens
atataataactgaga

SEQ ID NO: 122892 - DNA, 15 bp, Homo sapiens
tataataactgagac

SEQ ID NO: 122893 - DNA, 15 bp, Homo sapiens
ataataactgagact

SEQ ID NO: 122894 - DNA, 15 bp, Homo sapiens
taataactgagactt

SEQ ID NO: 122895 - DNA, 15 bp, Homo sapiens
aataactgagacttg

SEQ ID NO: 122896 - DNA, 15 bp, Homo sapiens
ataactgagacttgt

SEQ ID NO: 122897 - DNA, 15 bp, Homo sapiens
taactgagacttgtt

SEQ ID NO: 122898 - DNA, 15 bp, Homo sapiens
aactgagacttgttt

SEQ ID NO: 122899 - DNA, 15 bp, Homo sapiens
actgagacttgtttt

SEQ ID NO: 122900 - DNA, 15 bp, Homo sapiens
ctgagacttgtttta

SEQ ID NO: 122901 - DNA, 15 bp, Homo sapiens
tgagacttgttttat

SEQ ID NO: 122902 - DNA, 15 bp, Homo sapiens
gagacttgttttatt

SEQ ID NO: 122903 - DNA, 15 bp, Homo sapiens
agacttgttttattt

SEQ ID NO: 122904 - DNA, 15 bp, Homo sapiens
gacttgttttatttc

SEQ ID NO: 122905 - DNA, 15 bp, Homo sapiens
acttgttttatttct

SEQ ID NO: 122906 - DNA, 15 bp, Homo sapiens
cttgttttatttctg

SEQ ID NO: 122907 - DNA, 15 bp, Homo sapiens
ttgttttatttctgc

SEQ ID NO: 122908 - DNA, 15 bp, Homo sapiens
tgttttatttctgca

SEQ ID NO: 122909 - DNA, 15 bp, Homo sapiens
gttttatttctgcag

SEQ ID NO: 122910 - DNA, 15 bp, Homo sapiens
ttttatttctgcaga

SEQ ID NO: 122911 - DNA, 15 bp, Homo sapiens
tttatttctgcagag

SEQ ID NO: 122912 - DNA, 15 bp, Homo sapiens
ttatttctgcagagg

SEQ ID NO: 122913 - DNA, 15 bp, Homo sapiens
tatttctgcagaggg

SEQ ID NO: 122914 - DNA, 15 bp, Homo sapiens
atttctgcagagggt

SEQ ID NO: 122915 - DNA, 15 bp, Homo sapiens
tttctgcagagggtt

SEQ ID NO: 122916 - DNA, 15 bp, Homo sapiens
ttctgcagagggttc

SEQ ID NO: 122917 - DNA, 15 bp, Homo sapiens
tctgcagagggttct

SEQ ID NO: 122918 - DNA, 15 bp, Homo sapiens
ctgcagagggttcta

SEQ ID NO: 122919 - DNA, 15 bp, Homo sapiens
tgcagagggttctaa

SEQ ID NO: 122920 - DNA, 15 bp, Homo sapiens
gcagagggttctaag

SEQ ID NO: 122921 - DNA, 15 bp, Homo sapiens
cagagggttctaagc

SEQ ID NO: 122922 - DNA, 15 bp, Homo sapiens
agagggttctaagcc

SEQ ID NO: 122923 - DNA, 15 bp, Homo sapiens
gagggttctaagcca

SEQ ID NO: 122924 - DNA, 15 bp, Homo sapiens
agggttctaagccat

SEQ ID NO: 122925 - DNA, 15 bp, Homo sapiens
gggttctaagccatt

SEQ ID NO: 122926 - DNA, 15 bp, Homo sapiens
ggttctaagccattc

SEQ ID NO: 122927 - DNA, 15 bp, Homo sapiens
gttctaagccattca

SEQ ID NO: 122928 - DNA, 15 bp, Homo sapiens
ttctaagccattcac

SEQ ID NO: 122929 - DNA, 15 bp, Homo sapiens
tctaagccattcact

SEQ ID NO: 122930 - DNA, 15 bp, Homo sapiens
ctaagccattcactt

SEQ ID NO: 122931 - DNA, 15 bp, Homo sapiens
taagccattcacttc

SEQ ID NO: 122932 - DNA, 15 bp, Homo sapiens
aagccattcacttcc

SEQ ID NO: 122933 - DNA, 15 bp, Homo sapiens
agccattcacttccc

SEQ ID NO: 122934 - DNA, 15 bp, Homo sapiens
gccattcacttccca

SEQ ID NO: 122935 - DNA, 15 bp, Homo sapiens
ccattcacttcccag

SEQ ID NO: 122936 - DNA, 15 bp, Homo sapiens
cattcacttcccaga

SEQ ID NO: 122937 - DNA, 15 bp, Homo sapiens
attcacttcccagat

SEQ ID NO: 122938 - DNA, 15 bp, Homo sapiens
ttcacttcccagatg

SEQ ID NO: 122939 - DNA, 15 bp, Homo sapiens
tcacttcccagatgg

SEQ ID NO: 122940 - DNA, 15 bp, Homo sapiens
cacttcccagatggg

SEQ ID NO: 122941 - DNA, 15 bp, Homo sapiens
acttcccagatgggc

SEQ ID NO: 122942 - DNA, 15 bp, Homo sapiens
cttcccagatgggcc

SEQ ID NO: 122943 - DNA, 15 bp, Homo sapiens
ttcccagatgggcca

SEQ ID NO: 122944 - DNA, 15 bp, Homo sapiens
tcccagatgggccaa

SEQ ID NO: 122945 - DNA, 15 bp, Homo sapiens
cccagatgggccaat

SEQ ID NO: 122946 - DNA, 15 bp, Homo sapiens
ccagatgggccaata

SEQ ID NO: 122947 - DNA, 15 bp, Homo sapiens
cagatgggccaataa

SEQ ID NO: 122948 - DNA, 15 bp, Homo sapiens
agatgggccaataat

SEQ ID NO: 122949 - DNA, 15 bp, Homo sapiens
gatgggccaataatg

SEQ ID NO: 122950 - DNA, 15 bp, Homo sapiens
atgggccaataatgc

SEQ ID NO: 122951 - DNA, 15 bp, Homo sapiens
tgggccaataatgct

SEQ ID NO: 122952 - DNA, 15 bp, Homo sapiens
gggccaataatgctt

SEQ ID NO: 122953 - DNA, 15 bp, Homo sapiens
ggccaataatgcttt

SEQ ID NO: 122954 - DNA, 15 bp, Homo sapiens
gccaataatgctttg

SEQ ID NO: 122955 - DNA, 15 bp, Homo sapiens
ccaataatgctttga

SEQ ID NO: 122956 - DNA, 15 bp, Homo sapiens
caataatgctttgag

SEQ ID NO: 122957 - DNA, 15 bp, Homo sapiens
aataatgctttgagt

SEQ ID NO: 122958 - DNA, 15 bp, Homo sapiens
ataatgctttgagta

SEQ ID NO: 122959 - DNA, 15 bp, Homo sapiens
taatgctttgagtaa

SEQ ID NO: 122960 - DNA, 15 bp, Homo sapiens
aatgctttgagtaat

SEQ ID NO: 122961 - DNA, 15 bp, Homo sapiens
atgctttgagtaatc

SEQ ID NO: 122962 - DNA, 15 bp, Homo sapiens
tgctttgagtaatct

SEQ ID NO: 122963 - DNA, 15 bp, Homo sapiens
gctttgagtaatctg

SEQ ID NO: 122964 - DNA, 15 bp, Homo sapiens
ctttgagtaatctgg

SEQ ID NO: 122965 - DNA, 15 bp, Homo sapiens
tttgagtaatctgga

SEQ ID NO: 122966 - DNA, 15 bp, Homo sapiens
ttgagtaatctggag

SEQ ID NO: 122967 - DNA, 15 bp, Homo sapiens
tgagtaatctggaga

SEQ ID NO: 122968 - DNA, 15 bp, Homo sapiens
gagtaatctggagat

SEQ ID NO: 122969 - DNA, 15 bp, Homo sapiens
agtaatctggagatc

SEQ ID NO: 122970 - DNA, 15 bp, Homo sapiens
gtaatctggagatca

SEQ ID NO: 122971 - DNA, 15 bp, Homo sapiens
taatctggagatcat

SEQ ID NO: 122972 - DNA, 15 bp, Homo sapiens
aatctggagatcatc

SEQ ID NO: 122973 - DNA, 15 bp, Homo sapiens
atctggagatcatct

SEQ ID NO: 122974 - DNA, 15 bp, Homo sapiens
tctggagatcatctt

SEQ ID NO: 122975 - DNA, 15 bp, Homo sapiens
ctggagatcatcttt

SEQ ID NO: 122976 - DNA, 15 bp, Homo sapiens
tggagatcatcttta

SEQ ID NO: 122977 - DNA, 15 bp, Homo sapiens
ggagatcatctttaa

SEQ ID NO: 122978 - DNA, 15 bp, Homo sapiens
gagatcatctttaat

SEQ ID NO: 122979 - DNA, 15 bp, Homo sapiens
agatcatctttaatg

SEQ ID NO: 122980 - DNA, 15 bp, Homo sapiens
gatcatctttaatgc

SEQ ID NO: 122981 - DNA, 15 bp, Homo sapiens
atcatctttaatgcg

SEQ ID NO: 122982 - DNA, 15 bp, Homo sapiens
tcatctttaatgcgc

SEQ ID NO: 122983 - DNA, 15 bp, Homo sapiens
catctttaatgcgca

SEQ ID NO: 122984 - DNA, 15 bp, Homo sapiens
atctttaatgcgcag

SEQ ID NO: 122985 - DNA, 15 bp, Homo sapiens
tctttaatgcgcagg

SEQ ID NO: 122986 - DNA, 15 bp, Homo sapiens
ctttaatgcgcaggt

SEQ ID NO: 122987 - DNA, 15 bp, Homo sapiens
tttaatgcgcaggtg

SEQ ID NO: 122988 - DNA, 15 bp, Homo sapiens
ttaatgcgcaggtga

SEQ ID NO: 122989 - DNA, 15 bp, Homo sapiens
taatgcgcaggtgaa

SEQ ID NO: 122990 - DNA, 15 bp, Homo sapiens
aatgcgcaggtgaat

SEQ ID NO: 122991 - DNA, 15 bp, Homo sapiens
atgcgcaggtgaatg

SEQ ID NO: 122992 - DNA, 15 bp, Homo sapiens
tgcgcaggtgaatgg

SEQ ID NO: 122993 - DNA, 15 bp, Homo sapiens
gcgcaggtgaatgga

SEQ ID NO: 122994 - DNA, 15 bp, Homo sapiens
cgcaggtgaatggaa

SEQ ID NO: 122995 - DNA, 15 bp, Homo sapiens
gcaggtgaatggaac

SEQ ID NO: 122996 - DNA, 15 bp, Homo sapiens
caggtgaatggaact

SEQ ID NO: 122997 - DNA, 15 bp, Homo sapiens
aggtgaatggaactc

SEQ ID NO: 122998 - DNA, 15 bp, Homo sapiens
ggtgaatggaactct

SEQ ID NO: 122999 - DNA, 15 bp, Homo sapiens
gtgaatggaactctt

SEQ ID NO: 123000 - DNA, 15 bp, Homo sapiens
tgaatggaactcttc

SEQ ID NO: 123001 - DNA, 15 bp, Homo sapiens
gaatggaactcttcc

SEQ ID NO: 123002 - DNA, 15 bp, Homo sapiens
aatggaactcttcca

SEQ ID NO: 123003 - DNA, 15 bp, Homo sapiens
atggaactcttccac

SEQ ID NO: 123004 - DNA, 15 bp, Homo sapiens
tggaactcttccaca

SEQ ID NO: 123005 - DNA, 15 bp, Homo sapiens
ggaactcttccacag

SEQ ID NO: 123006 - DNA, 15 bp, Homo sapiens
gaactcttccacaga

SEQ ID NO: 123007 - DNA, 15 bp, Homo sapiens
aactcttccacagag

SEQ ID NO: 123008 - DNA, 15 bp, Homo sapiens
actcttccacagagg

SEQ ID NO: 123009 - DNA, 15 bp, Homo sapiens
ctcttccacagaggg

SEQ ID NO: 123010 - DNA, 15 bp, Homo sapiens
tcttccacagaggga

SEQ ID NO: 123011 - DNA, 15 bp, Homo sapiens
cttccacagagggat

SEQ ID NO: 123012 - DNA, 15 bp, Homo sapiens
ttccacagagggatg

SEQ ID NO: 123013 - DNA, 15 bp, Homo sapiens
tccacagagggatgt

SEQ ID NO: 123014 - DNA, 15 bp, Homo sapiens
ccacagagggatgtg

SEQ ID NO: 123015 - DNA, 15 bp, Homo sapiens
cacagagggatgtga

SEQ ID NO: 123016 - DNA, 15 bp, Homo sapiens
acagagggatgtgag

SEQ ID NO: 123017 - DNA, 15 bp, Homo sapiens
cagagggatgtgagg

SEQ ID NO: 123018 - DNA, 15 bp, Homo sapiens
agagggatgtgaggg

SEQ ID NO: 123019 - DNA, 15 bp, Homo sapiens
gagggatgtgagggc

SEQ ID NO: 123020 - DNA, 15 bp, Homo sapiens
agggatgtgagggct

SEQ ID NO: 123021 - DNA, 15 bp, Homo sapiens
gggatgtgagggctg

SEQ ID NO: 123022 - DNA, 15 bp, Homo sapiens
ggatgtgagggctgt

SEQ ID NO: 123023 - DNA, 15 bp, Homo sapiens
gatgtgagggctgta

SEQ ID NO: 123024 - DNA, 15 bp, Homo sapiens
atgtgagggctgtag

SEQ ID NO: 123025 - DNA, 15 bp, Homo sapiens
tgtgagggctgtaga

SEQ ID NO: 123026 - DNA, 15 bp, Homo sapiens
gtgagggctgtagag

SEQ ID NO: 123027 - DNA, 15 bp, Homo sapiens
tgagggctgtagagc

SEQ ID NO: 123028 - DNA, 15 bp, Homo sapiens
gagggctgtagagca

SEQ ID NO: 123029 - DNA, 15 bp, Homo sapiens
agggctgtagagcag

SEQ ID NO: 123030 - DNA, 15 bp, Homo sapiens
gggctgtagagcaga

SEQ ID NO: 123031 - DNA, 15 bp, Homo sapiens
ggctgtagagcagag

SEQ ID NO: 123032 - DNA, 15 bp, Homo sapiens
gctgtagagcagagt

SEQ ID NO: 123033 - DNA, 15 bp, Homo sapiens
ctgtagagcagagtg

SEQ ID NO: 123034 - DNA, 15 bp, Homo sapiens
tgtagagcagagtga

SEQ ID NO: 123035 - DNA, 15 bp, Homo sapiens
gtagagcagagtgaa

SEQ ID NO: 123036 - DNA, 15 bp, Homo sapiens
tagagcagagtgaac

SEQ ID NO: 123037 - DNA, 15 bp, Homo sapiens
agagcagagtgaact

SEQ ID NO: 123038 - DNA, 15 bp, Homo sapiens
gagcagagtgaactc

SEQ ID NO: 123039 - DNA, 15 bp, Homo sapiens
agcagagtgaactcc

SEQ ID NO: 123040 - DNA, 15 bp, Homo sapiens
gcagagtgaactccc

SEQ ID NO: 123041 - DNA, 15 bp, Homo sapiens
cagagtgaactccct

SEQ ID NO: 123042 - DNA, 15 bp, Homo sapiens
agagtgaactccctg

SEQ ID NO: 123043 - DNA, 15 bp, Homo sapiens
gagtgaactccctga

SEQ ID NO: 123044 - DNA, 15 bp, Homo sapiens
agtgaactccctgaa

SEQ ID NO: 123045 - DNA, 15 bp, Homo sapiens
gtgaactccctgaaa

SEQ ID NO: 123046 - DNA, 15 bp, Homo sapiens
tgaactccctgaaac

SEQ ID NO: 123047 - DNA, 15 bp, Homo sapiens
gaactccctgaaact

SEQ ID NO: 123048 - DNA, 15 bp, Homo sapiens
aactccctgaaactc

SEQ ID NO: 123049 - DNA, 15 bp, Homo sapiens
actccctgaaactca

SEQ ID NO: 123050 - DNA, 15 bp, Homo sapiens
ctccctgaaactcag

SEQ ID NO: 123051 - DNA, 15 bp, Homo sapiens
tccctgaaactcaga

SEQ ID NO: 123052 - DNA, 15 bp, Homo sapiens
ccctgaaactcagac

SEQ ID NO: 123053 - DNA, 15 bp, Homo sapiens
cctgaaactcagacg

SEQ ID NO: 123054 - DNA, 15 bp, Homo sapiens
ctgaaactcagacgt

SEQ ID NO: 123055 - DNA, 15 bp, Homo sapiens
tgaaactcagacgtc

SEQ ID NO: 123056 - DNA, 15 bp, Homo sapiens
gaaactcagacgtca

SEQ ID NO: 123057 - DNA, 15 bp, Homo sapiens
aaactcagacgtcag

SEQ ID NO: 123058 - DNA, 15 bp, Homo sapiens
aactcagacgtcagc

SEQ ID NO: 123059 - DNA, 15 bp, Homo sapiens
actcagacgtcagct

SEQ ID NO: 123060 - DNA, 15 bp, Homo sapiens
ctcagacgtcagctc

SEQ ID NO: 123061 - DNA, 15 bp, Homo sapiens
tcagacgtcagctct

SEQ ID NO: 123062 - DNA, 15 bp, Homo sapiens
cagacgtcagctctt

SEQ ID NO: 123063 - DNA, 15 bp, Homo sapiens
agacgtcagctcttt

SEQ ID NO: 123064 - DNA, 15 bp, Homo sapiens
gacgtcagctctttg

SEQ ID NO: 123065 - DNA, 15 bp, Homo sapiens
acgtcagctctttgt

SEQ ID NO: 123066 - DNA, 15 bp, Homo sapiens
cgtcagctctttgtc

SEQ ID NO: 123067 - DNA, 15 bp, Homo sapiens
gtcagctctttgtct

SEQ ID NO: 123068 - DNA, 15 bp, Homo sapiens
tcagctctttgtctc

SEQ ID NO: 123069 - DNA, 15 bp, Homo sapiens
cagctctttgtctct

SEQ ID NO: 123070 - DNA, 15 bp, Homo sapiens
agctctttgtctctc

SEQ ID NO: 123071 - DNA, 15 bp, Homo sapiens
gctctttgtctctct

SEQ ID NO: 123072 - DNA, 15 bp, Homo sapiens
ctctttgtctctcta

SEQ ID NO: 123073 - DNA, 15 bp, Homo sapiens
tctttgtctctctat

SEQ ID NO: 123074 - DNA, 15 bp, Homo sapiens
ctttgtctctctatc

SEQ ID NO: 123075 - DNA, 15 bp, Homo sapiens
tttgtctctctatct

SEQ ID NO: 123076 - DNA, 15 bp, Homo sapiens
ttgtctctctatctc

SEQ ID NO: 123077 - DNA, 15 bp, Homo sapiens
tgtctctctatctct

SEQ ID NO: 123078 - DNA, 15 bp, Homo sapiens
gtctctctatctctg

SEQ ID NO: 123079 - DNA, 15 bp, Homo sapiens
tctctctatctctga

SEQ ID NO: 123080 - DNA, 15 bp, Homo sapiens
ctctctatctctgaa

SEQ ID NO: 123081 - DNA, 15 bp, Homo sapiens
tctctatctctgaac

SEQ ID NO: 123082 - DNA, 15 bp, Homo sapiens
ctctatctctgaaca

SEQ ID NO: 123083 - DNA, 15 bp, Homo sapiens
tctatctctgaacac

SEQ ID NO: 123084 - DNA, 15 bp, Homo sapiens
ctatctctgaacacc

SEQ ID NO: 123085 - DNA, 15 bp, Homo sapiens
tatctctgaacaccc

SEQ ID NO: 123086 - DNA, 15 bp, Homo sapiens
atctctgaacaccct

SEQ ID NO: 123087 - DNA, 15 bp, Homo sapiens
tctctgaacaccctt

SEQ ID NO: 123088 - DNA, 15 bp, Homo sapiens
ctctgaacacccttc

SEQ ID NO: 123089 - DNA, 15 bp, Homo sapiens
tctgaacacccttcc

SEQ ID NO: 123090 - DNA, 15 bp, Homo sapiens
ctgaacacccttcct

SEQ ID NO: 123091 - DNA, 15 bp, Homo sapiens
tgaacacccttcctt

SEQ ID NO: 123092 - DNA, 15 bp, Homo sapiens
gaacacccttcctta

SEQ ID NO: 123093 - DNA, 15 bp, Homo sapiens
aacacccttccttag

SEQ ID NO: 123094 - DNA, 15 bp, Homo sapiens
acacccttccttaga

SEQ ID NO: 123095 - DNA, 15 bp, Homo sapiens
cacccttccttagag

SEQ ID NO: 123096 - DNA, 15 bp, Homo sapiens
acccttccttagaga

SEQ ID NO: 123097 - DNA, 15 bp, Homo sapiens
cccttccttagagat

SEQ ID NO: 123098 - DNA, 15 bp, Homo sapiens
ccttccttagagatc

SEQ ID NO: 123099 - DNA, 15 bp, Homo sapiens
cttccttagagatcc

SEQ ID NO: 123100 - DNA, 15 bp, Homo sapiens
ttccttagagatccc

SEQ ID NO: 123101 - DNA, 15 bp, Homo sapiens
tccttagagatccca

SEQ ID NO: 123102 - DNA, 15 bp, Homo sapiens
ccttagagatcccat

SEQ ID NO: 123103 - DNA, 15 bp, Homo sapiens
cttagagatcccatc

SEQ ID NO: 123104 - DNA, 15 bp, Homo sapiens
ttagagatcccatct

SEQ ID NO: 123105 - DNA, 15 bp, Homo sapiens
tagagatcccatctc

SEQ ID NO: 123106 - DNA, 15 bp, Homo sapiens
agagatcccatctct

SEQ ID NO: 123107 - DNA, 15 bp, Homo sapiens
gagatcccatctcta

SEQ ID NO: 123108 - DNA, 15 bp, Homo sapiens
agatcccatctctag

SEQ ID NO: 123109 - DNA, 15 bp, Homo sapiens
gatcccatctctagg

SEQ ID NO: 123110 - DNA, 15 bp, Homo sapiens
atcccatctctagga

SEQ ID NO: 123111 - DNA, 15 bp, Homo sapiens
tcccatctctaggat

SEQ ID NO: 123112 - DNA, 15 bp, Homo sapiens
cccatctctaggatg

SEQ ID NO: 123113 - DNA, 15 bp, Homo sapiens
ccatctctaggatgc

SEQ ID NO: 123114 - DNA, 15 bp, Homo sapiens
catctctaggatgca

SEQ ID NO: 123115 - DNA, 15 bp, Homo sapiens
atctctaggatgcat

SEQ ID NO: 123116 - DNA, 15 bp, Homo sapiens
tctctaggatgcatt

SEQ ID NO: 123117 - DNA, 15 bp, Homo sapiens
ctctaggatgcattt

SEQ ID NO: 123118 - DNA, 15 bp, Homo sapiens
tctaggatgcatttc

SEQ ID NO: 123119 - DNA, 15 bp, Homo sapiens
ctaggatgcatttct

SEQ ID NO: 123120 - DNA, 15 bp, Homo sapiens
taggatgcatttctc

SEQ ID NO: 123121 - DNA, 15 bp, Homo sapiens
aggatgcatttctct

SEQ ID NO: 123122 - DNA, 15 bp, Homo sapiens
ggatgcatttctctg

SEQ ID NO: 123123 - DNA, 15 bp, Homo sapiens
gatgcatttctctgt

SEQ ID NO: 123124 - DNA, 15 bp, Homo sapiens
atgcatttctctgta

SEQ ID NO: 123125 - DNA, 15 bp, Homo sapiens
tgcatttctctgtag

SEQ ID NO: 123126 - DNA, 15 bp, Homo sapiens
gcatttctctgtagt

SEQ ID NO: 123127 - DNA, 15 bp, Homo sapiens
catttctctgtagtt

SEQ ID NO: 123128 - DNA, 15 bp, Homo sapiens
atttctctgtagtta

SEQ ID NO: 123129 - DNA, 15 bp, Homo sapiens
tttctctgtagttag

SEQ ID NO: 123130 - DNA, 15 bp, Homo sapiens
ttctctgtagttagt

SEQ ID NO: 123131 - DNA, 15 bp, Homo sapiens
tctctgtagttagtt

SEQ ID NO: 123132 - DNA, 15 bp, Homo sapiens
ctctgtagttagttt

SEQ ID NO: 123133 - DNA, 15 bp, Homo sapiens
tctgtagttagtttc

SEQ ID NO: 123134 - DNA, 15 bp, Homo sapiens
ctgtagttagtttct

SEQ ID NO: 123135 - DNA, 15 bp, Homo sapiens
tgtagttagtttcta

SEQ ID NO: 123136 - DNA, 15 bp, Homo sapiens
gtagttagtttctaa

SEQ ID NO: 123137 - DNA, 15 bp, Homo sapiens
tagttagtttctaag

SEQ ID NO: 123138 - DNA, 15 bp, Homo sapiens
agttagtttctaagt

SEQ ID NO: 123139 - DNA, 15 bp, Homo sapiens
gttagtttctaagtc

SEQ ID NO: 123140 - DNA, 15 bp, Homo sapiens
ttagtttctaagtct

SEQ ID NO: 123141 - DNA, 15 bp, Homo sapiens
tagtttctaagtctc

SEQ ID NO: 123142 - DNA, 15 bp, Homo sapiens
agtttctaagtctct

SEQ ID NO: 123143 - DNA, 15 bp, Homo sapiens
gtttctaagtctctt

SEQ ID NO: 123144 - DNA, 15 bp, Homo sapiens
tttctaagtctcttg

SEQ ID NO: 123145 - DNA, 15 bp, Homo sapiens
ttctaagtctcttgt

SEQ ID NO: 123146 - DNA, 15 bp, Homo sapiens
tctaagtctcttgtt

SEQ ID NO: 123147 - DNA, 15 bp, Homo sapiens
ctaagtctcttgttc

SEQ ID NO: 123148 - DNA, 15 bp, Homo sapiens
taagtctcttgttcc

SEQ ID NO: 123149 - DNA, 15 bp, Homo sapiens
aagtctcttgttcct

SEQ ID NO: 123150 - DNA, 15 bp, Homo sapiens
agtctcttgttcctg

SEQ ID NO: 123151 - DNA, 15 bp, Homo sapiens
gtctcttgttcctgt

SEQ ID NO: 123152 - DNA, 15 bp, Homo sapiens
tctcttgttcctgtt

SEQ ID NO: 123153 - DNA, 15 bp, Homo sapiens
ctcttgttcctgttc

SEQ ID NO: 123154 - DNA, 15 bp, Homo sapiens
tcttgttcctgttct

SEQ ID NO: 123155 - DNA, 15 bp, Homo sapiens
cttgttcctgttctg

SEQ ID NO: 123156 - DNA, 15 bp, Homo sapiens
ttgttcctgttctgc

SEQ ID NO: 123157 - DNA, 15 bp, Homo sapiens
tgttcctgttctgcc

SEQ ID NO: 123158 - DNA, 15 bp, Homo sapiens
gttcctgttctgcct

SEQ ID NO: 123159 - DNA, 15 bp, Homo sapiens
ttcctgttctgcctt

SEQ ID NO: 123160 - DNA, 15 bp, Homo sapiens
tcctgttctgccttt

SEQ ID NO: 123161 - DNA, 15 bp, Homo sapiens
cctgttctgccttta

SEQ ID NO: 123162 - DNA, 15 bp, Homo sapiens
ctgttctgcctttat

SEQ ID NO: 123163 - DNA, 15 bp, Homo sapiens
tgttctgcctttatt

SEQ ID NO: 123164 - DNA, 15 bp, Homo sapiens
gttctgcctttattt

SEQ ID NO: 123165 - DNA, 15 bp, Homo sapiens
ttctgcctttatttt

SEQ ID NO: 123166 - DNA, 15 bp, Homo sapiens
tctgcctttattttt

SEQ ID NO: 123167 - DNA, 15 bp, Homo sapiens
ctgcctttatttttt

SEQ ID NO: 123168 - DNA, 15 bp, Homo sapiens
tgcctttattttttt

SEQ ID NO: 123169 - DNA, 15 bp, Homo sapiens
gcctttatttttttt

SEQ ID NO: 123170 - DNA, 15 bp, Homo sapiens
cctttattttttttt

SEQ ID NO: 123171 - DNA, 15 bp, Homo sapiens
ctttatttttttttc

SEQ ID NO: 123172 - DNA, 15 bp, Homo sapiens
tttatttttttttcc

SEQ ID NO: 123173 - DNA, 15 bp, Homo sapiens
ttatttttttttcct

SEQ ID NO: 123174 - DNA, 15 bp, Homo sapiens
tatttttttttcctg

SEQ ID NO: 123175 - DNA, 15 bp, Homo sapiens
atttttttttcctgg

SEQ ID NO: 123176 - DNA, 15 bp, Homo sapiens
tttttttttcctgga

SEQ ID NO: 123177 - DNA, 15 bp, Homo sapiens
ttttttttcctggat

SEQ ID NO: 123178 - DNA, 15 bp, Homo sapiens
tttttttcctggatt

SEQ ID NO: 123179 - DNA, 15 bp, Homo sapiens
ttttttcctggattc

SEQ ID NO: 123180 - DNA, 15 bp, Homo sapiens
tttttcctggattct

SEQ ID NO: 123181 - DNA, 15 bp, Homo sapiens
ttttcctggattcta

SEQ ID NO: 123182 - DNA, 15 bp, Homo sapiens
tttcctggattctaa

SEQ ID NO: 123183 - DNA, 15 bp, Homo sapiens
ttcctggattctaag

SEQ ID NO: 123184 - DNA, 15 bp, Homo sapiens
tcctggattctaagc

SEQ ID NO: 123185 - DNA, 15 bp, Homo sapiens
cctggattctaagcc

SEQ ID NO: 123186 - DNA, 15 bp, Homo sapiens
ctggattctaagcca

SEQ ID NO: 123187 - DNA, 15 bp, Homo sapiens
tggattctaagccag

SEQ ID NO: 123188 - DNA, 15 bp, Homo sapiens
ggattctaagccagt

SEQ ID NO: 123189 - DNA, 15 bp, Homo sapiens
gattctaagccagta

SEQ ID NO: 123190 - DNA, 15 bp, Homo sapiens
attctaagccagtat

SEQ ID NO: 123191 - DNA, 15 bp, Homo sapiens
ttctaagccagtatc

SEQ ID NO: 123192 - DNA, 15 bp, Homo sapiens
tctaagccagtatcc

SEQ ID NO: 123193 - DNA, 15 bp, Homo sapiens
ctaagccagtatccc

SEQ ID NO: 123194 - DNA, 15 bp, Homo sapiens
taagccagtatcccc

SEQ ID NO: 123195 - DNA, 15 bp, Homo sapiens
aagccagtatcccca

SEQ ID NO: 123196 - DNA, 15 bp, Homo sapiens
agccagtatccccac

SEQ ID NO: 123197 - DNA, 15 bp, Homo sapiens
gccagtatccccact

SEQ ID NO: 123198 - DNA, 15 bp, Homo sapiens
ccagtatccccactt

SEQ ID NO: 123199 - DNA, 15 bp, Homo sapiens
cagtatccccacttg

SEQ ID NO: 123200 - DNA, 15 bp, Homo sapiens
agtatccccacttgg

SEQ ID NO: 123201 - DNA, 15 bp, Homo sapiens
gtatccccacttggc

SEQ ID NO: 123202 - DNA, 15 bp, Homo sapiens
tatccccacttggct

SEQ ID NO: 123203 - DNA, 15 bp, Homo sapiens
atccccacttggctg

SEQ ID NO: 123204 - DNA, 15 bp, Homo sapiens
tccccacttggctgt

SEQ ID NO: 123205 - DNA, 15 bp, Homo sapiens
ccccacttggctgtc

SEQ ID NO: 123206 - DNA, 15 bp, Homo sapiens
cccacttggctgtct

SEQ ID NO: 123207 - DNA, 15 bp, Homo sapiens
ccacttggctgtctt

SEQ ID NO: 123208 - DNA, 15 bp, Homo sapiens
cacttggctgtctta

SEQ ID NO: 123209 - DNA, 15 bp, Homo sapiens
acttggctgtcttaa

SEQ ID NO: 123210 - DNA, 15 bp, Homo sapiens
cttggctgtcttaat

SEQ ID NO: 123211 - DNA, 15 bp, Homo sapiens
ttggctgtcttaatg

SEQ ID NO: 123212 - DNA, 15 bp, Homo sapiens
tggctgtcttaatgt

SEQ ID NO: 123213 - DNA, 15 bp, Homo sapiens
ggctgtcttaatgta

SEQ ID NO: 123214 - DNA, 15 bp, Homo sapiens
gctgtcttaatgtag

SEQ ID NO: 123215 - DNA, 15 bp, Homo sapiens
ctgtcttaatgtagc

SEQ ID NO: 123216 - DNA, 15 bp, Homo sapiens
tgtcttaatgtagct

SEQ ID NO: 123217 - DNA, 15 bp, Homo sapiens
gtcttaatgtagctt

SEQ ID NO: 123218 - DNA, 15 bp, Homo sapiens
tcttaatgtagctta

SEQ ID NO: 123219 - DNA, 15 bp, Homo sapiens
cttaatgtagcttaa

SEQ ID NO: 123220 - DNA, 15 bp, Homo sapiens
ttaatgtagcttaac

SEQ ID NO: 123221 - DNA, 15 bp, Homo sapiens
taatgtagcttaaca

SEQ ID NO: 123222 - DNA, 15 bp, Homo sapiens
aatgtagcttaacat

SEQ ID NO: 123223 - DNA, 15 bp, Homo sapiens
atgtagcttaacatg

SEQ ID NO: 123224 - DNA, 15 bp, Homo sapiens
tgtagcttaacatgt

SEQ ID NO: 123225 - DNA, 15 bp, Homo sapiens
gtagcttaacatgtc

SEQ ID NO: 123226 - DNA, 15 bp, Homo sapiens
tagcttaacatgtct

SEQ ID NO: 123227 - DNA, 15 bp, Homo sapiens
agcttaacatgtctg

SEQ ID NO: 123228 - DNA, 15 bp, Homo sapiens
gcttaacatgtctgt

SEQ ID NO: 123229 - DNA, 15 bp, Homo sapiens
cttaacatgtctgta

SEQ ID NO: 123230 - DNA, 15 bp, Homo sapiens
ttaacatgtctgtaa

SEQ ID NO: 123231 - DNA, 15 bp, Homo sapiens
taacatgtctgtaat

SEQ ID NO: 123232 - DNA, 15 bp, Homo sapiens
aacatgtctgtaatc

SEQ ID NO: 123233 - DNA, 15 bp, Homo sapiens
acatgtctgtaatca

SEQ ID NO: 123234 - DNA, 15 bp, Homo sapiens
catgtctgtaatcaa

SEQ ID NO: 123235 - DNA, 15 bp, Homo sapiens
atgtctgtaatcaaa

SEQ ID NO: 123236 - DNA, 15 bp, Homo sapiens
tgtctgtaatcaaaa

SEQ ID NO: 123237 - DNA, 15 bp, Homo sapiens
gtctgtaatcaaaat

SEQ ID NO: 123238 - DNA, 15 bp, Homo sapiens
tctgtaatcaaaatg

SEQ ID NO: 123239 - DNA, 15 bp, Homo sapiens
ctgtaatcaaaatga

SEQ ID NO: 123240 - DNA, 15 bp, Homo sapiens
tgtaatcaaaatgat

SEQ ID NO: 123241 - DNA, 15 bp, Homo sapiens
gtaatcaaaatgatc

SEQ ID NO: 123242 - DNA, 15 bp, Homo sapiens
taatcaaaatgatca

SEQ ID NO: 123243 - DNA, 15 bp, Homo sapiens
aatcaaaatgatcat

SEQ ID NO: 123244 - DNA, 15 bp, Homo sapiens
atcaaaatgatcatc

SEQ ID NO: 123245 - DNA, 15 bp, Homo sapiens
tcaaaatgatcatct

SEQ ID NO: 123246 - DNA, 15 bp, Homo sapiens
caaaatgatcatctt

SEQ ID NO: 123247 - DNA, 15 bp, Homo sapiens
aaaatgatcatcttt

SEQ ID NO: 123248 - DNA, 15 bp, Homo sapiens
aaatgatcatctttc

SEQ ID NO: 123249 - DNA, 15 bp, Homo sapiens
aatgatcatctttct

SEQ ID NO: 123250 - DNA, 15 bp, Homo sapiens
atgatcatctttctg

SEQ ID NO: 123251 - DNA, 15 bp, Homo sapiens
tgatcatctttctga

SEQ ID NO: 123252 - DNA, 15 bp, Homo sapiens
gatcatctttctgag

SEQ ID NO: 123253 - DNA, 15 bp, Homo sapiens
atcatctttctgaga

SEQ ID NO: 123254 - DNA, 15 bp, Homo sapiens
tcatctttctgagat

SEQ ID NO: 123255 - DNA, 15 bp, Homo sapiens
catctttctgagatt

SEQ ID NO: 123256 - DNA, 15 bp, Homo sapiens
atctttctgagattc

SEQ ID NO: 123257 - DNA, 15 bp, Homo sapiens
tctttctgagattca

SEQ ID NO: 123258 - DNA, 15 bp, Homo sapiens
ctttctgagattcaa

SEQ ID NO: 123259 - DNA, 15 bp, Homo sapiens
tttctgagattcaaa

SEQ ID NO: 123260 - DNA, 15 bp, Homo sapiens
ttctgagattcaaag

SEQ ID NO: 123261 - DNA, 15 bp, Homo sapiens
tctgagattcaaagg

SEQ ID NO: 123262 - DNA, 15 bp, Homo sapiens
ctgagattcaaaggg

SEQ ID NO: 123263 - DNA, 15 bp, Homo sapiens
tgagattcaaagggc

SEQ ID NO: 123264 - DNA, 15 bp, Homo sapiens
gagattcaaagggct

SEQ ID NO: 123265 - DNA, 15 bp, Homo sapiens
agattcaaagggcta

SEQ ID NO: 123266 - DNA, 15 bp, Homo sapiens
gattcaaagggctat

SEQ ID NO: 123267 - DNA, 15 bp, Homo sapiens
attcaaagggctata

SEQ ID NO: 123268 - DNA, 15 bp, Homo sapiens
ttcaaagggctataa

SEQ ID NO: 123269 - DNA, 15 bp, Homo sapiens
tcaaagggctataag

SEQ ID NO: 123270 - DNA, 15 bp, Homo sapiens
caaagggctataagg

SEQ ID NO: 123271 - DNA, 15 bp, Homo sapiens
aaagggctataaggg

SEQ ID NO: 123272 - DNA, 15 bp, Homo sapiens
aagggctataaggga

SEQ ID NO: 123273 - DNA, 15 bp, Homo sapiens
agggctataagggac

SEQ ID NO: 123274 - DNA, 15 bp, Homo sapiens
gggctataagggact

SEQ ID NO: 123275 - DNA, 15 bp, Homo sapiens
ggctataagggactt

SEQ ID NO: 123276 - DNA, 15 bp, Homo sapiens
gctataagggacttt

SEQ ID NO: 123277 - DNA, 15 bp, Homo sapiens
ctataagggactttg

SEQ ID NO: 123278 - DNA, 15 bp, Homo sapiens
tataagggactttgg

SEQ ID NO: 123279 - DNA, 15 bp, Homo sapiens
ataagggactttgga

SEQ ID NO: 123280 - DNA, 15 bp, Homo sapiens
taagggactttggag

SEQ ID NO: 123281 - DNA, 15 bp, Homo sapiens
aagggactttggaga

SEQ ID NO: 123282 - DNA, 15 bp, Homo sapiens
agggactttggagag

SEQ ID NO: 123283 - DNA, 15 bp, Homo sapiens
gggactttggagaga

SEQ ID NO: 123284 - DNA, 15 bp, Homo sapiens
ggactttggagagaa

SEQ ID NO: 123285 - DNA, 15 bp, Homo sapiens
gactttggagagaat

SEQ ID NO: 123286 - DNA, 15 bp, Homo sapiens
actttggagagaatt

SEQ ID NO: 123287 - DNA, 15 bp, Homo sapiens
ctttggagagaattt

SEQ ID NO: 123288 - DNA, 15 bp, Homo sapiens
tttggagagaatttc

SEQ ID NO: 123289 - DNA, 15 bp, Homo sapiens
ttggagagaatttca

SEQ ID NO: 123290 - DNA, 15 bp, Homo sapiens
tggagagaatttcat

SEQ ID NO: 123291 - DNA, 15 bp, Homo sapiens
ggagagaatttcatt

SEQ ID NO: 123292 - DNA, 15 bp, Homo sapiens
gagagaatttcattc

SEQ ID NO: 123293 - DNA, 15 bp, Homo sapiens
agagaatttcattca

SEQ ID NO: 123294 - DNA, 15 bp, Homo sapiens
gagaatttcattcag

SEQ ID NO: 123295 - DNA, 15 bp, Homo sapiens
agaatttcattcagt

SEQ ID NO: 123296 - DNA, 15 bp, Homo sapiens
gaatttcattcagtt

SEQ ID NO: 123297 - DNA, 15 bp, Homo sapiens
aatttcattcagttt

SEQ ID NO: 123298 - DNA, 15 bp, Homo sapiens
atttcattcagtttt

SEQ ID NO: 123299 - DNA, 15 bp, Homo sapiens
tttcattcagttttc

SEQ ID NO: 123300 - DNA, 15 bp, Homo sapiens
ttcattcagttttcc

SEQ ID NO: 123301 - DNA, 15 bp, Homo sapiens
tcattcagttttcct

SEQ ID NO: 123302 - DNA, 15 bp, Homo sapiens
cattcagttttcctc

SEQ ID NO: 123303 - DNA, 15 bp, Homo sapiens
attcagttttcctca

SEQ ID NO: 123304 - DNA, 15 bp, Homo sapiens
ttcagttttcctcaa

SEQ ID NO: 123305 - DNA, 15 bp, Homo sapiens
tcagttttcctcaaa

SEQ ID NO: 123306 - DNA, 15 bp, Homo sapiens
cagttttcctcaaac

SEQ ID NO: 123307 - DNA, 15 bp, Homo sapiens
agttttcctcaaact

SEQ ID NO: 123308 - DNA, 15 bp, Homo sapiens
gttttcctcaaacta

SEQ ID NO: 123309 - DNA, 15 bp, Homo sapiens
ttttcctcaaactag

SEQ ID NO: 123310 - DNA, 15 bp, Homo sapiens
tttcctcaaactaga

SEQ ID NO: 123311 - DNA, 15 bp, Homo sapiens
ttcctcaaactagaa

SEQ ID NO: 123312 - DNA, 15 bp, Homo sapiens
tcctcaaactagaat

SEQ ID NO: 123313 - DNA, 15 bp, Homo sapiens
cctcaaactagaata

SEQ ID NO: 123314 - DNA, 15 bp, Homo sapiens
ctcaaactagaataa

SEQ ID NO: 123315 - DNA, 15 bp, Homo sapiens
tcaaactagaataat

SEQ ID NO: 123316 - DNA, 15 bp, Homo sapiens
caaactagaataatg

SEQ ID NO: 123317 - DNA, 15 bp, Homo sapiens
aaactagaataatgc

SEQ ID NO: 123318 - DNA, 15 bp, Homo sapiens
aactagaataatgct

SEQ ID NO: 123319 - DNA, 15 bp, Homo sapiens
actagaataatgctt

SEQ ID NO: 123320 - DNA, 15 bp, Homo sapiens
ctagaataatgcttg

SEQ ID NO: 123321 - DNA, 15 bp, Homo sapiens
tagaataatgcttgc

SEQ ID NO: 123322 - DNA, 15 bp, Homo sapiens
agaataatgcttgca

SEQ ID NO: 123323 - DNA, 15 bp, Homo sapiens
gaataatgcttgcac

SEQ ID NO: 123324 - DNA, 15 bp, Homo sapiens
aataatgcttgcact

SEQ ID NO: 123325 - DNA, 15 bp, Homo sapiens
ataatgcttgcactg

SEQ ID NO: 123326 - DNA, 15 bp, Homo sapiens
taatgcttgcactgt

SEQ ID NO: 123327 - DNA, 15 bp, Homo sapiens
aatgcttgcactgtc

SEQ ID NO: 123328 - DNA, 15 bp, Homo sapiens
atgcttgcactgtct

SEQ ID NO: 123329 - DNA, 15 bp, Homo sapiens
tgcttgcactgtctg

SEQ ID NO: 123330 - DNA, 15 bp, Homo sapiens
gcttgcactgtctgt

SEQ ID NO: 123331 - DNA, 15 bp, Homo sapiens
cttgcactgtctgta

SEQ ID NO: 123332 - DNA, 15 bp, Homo sapiens
ttgcactgtctgtaa

SEQ ID NO: 123333 - DNA, 15 bp, Homo sapiens
tgcactgtctgtaaa

SEQ ID NO: 123334 - DNA, 15 bp, Homo sapiens
gcactgtctgtaaaa

SEQ ID NO: 123335 - DNA, 15 bp, Homo sapiens
cactgtctgtaaaag

SEQ ID NO: 123336 - DNA, 15 bp, Homo sapiens
actgtctgtaaaaga

SEQ ID NO: 123337 - DNA, 15 bp, Homo sapiens
ctgtctgtaaaagaa

SEQ ID NO: 123338 - DNA, 15 bp, Homo sapiens
tgtctgtaaaagaac

SEQ ID NO: 123339 - DNA, 15 bp, Homo sapiens
gtctgtaaaagaaca

SEQ ID NO: 123340 - DNA, 15 bp, Homo sapiens
tctgtaaaagaacaa

SEQ ID NO: 123341 - DNA, 15 bp, Homo sapiens
ctgtaaaagaacaaa

SEQ ID NO: 123342 - DNA, 15 bp, Homo sapiens
tgtaaaagaacaaaa

SEQ ID NO: 123343 - DNA, 15 bp, Homo sapiens
gtaaaagaacaaaag

SEQ ID NO: 123344 - DNA, 15 bp, Homo sapiens
taaaagaacaaaagt

SEQ ID NO: 123345 - DNA, 15 bp, Homo sapiens
aaaagaacaaaagtg

SEQ ID NO: 123346 - DNA, 15 bp, Homo sapiens
aaagaacaaaagtgt

SEQ ID NO: 123347 - DNA, 15 bp, Homo sapiens
aagaacaaaagtgtc

SEQ ID NO: 123348 - DNA, 15 bp, Homo sapiens
agaacaaaagtgtca

SEQ ID NO: 123349 - DNA, 15 bp, Homo sapiens
gaacaaaagtgtcaa

SEQ ID NO: 123350 - DNA, 15 bp, Homo sapiens
aacaaaagtgtcaaa

SEQ ID NO: 123351 - DNA, 15 bp, Homo sapiens
acaaaagtgtcaaag

SEQ ID NO: 123352 - DNA, 15 bp, Homo sapiens
caaaagtgtcaaagc

SEQ ID NO: 123353 - DNA, 15 bp, Homo sapiens
aaaagtgtcaaagca

SEQ ID NO: 123354 - DNA, 15 bp, Homo sapiens
aaagtgtcaaagcat

SEQ ID NO: 123355 - DNA, 15 bp, Homo sapiens
aagtgtcaaagcatc

SEQ ID NO: 123356 - DNA, 15 bp, Homo sapiens
agtgtcaaagcatcc

SEQ ID NO: 123357 - DNA, 15 bp, Homo sapiens
gtgtcaaagcatcct

SEQ ID NO: 123358 - DNA, 15 bp, Homo sapiens
tgtcaaagcatcctt

SEQ ID NO: 123359 - DNA, 15 bp, Homo sapiens
gtcaaagcatccttt

SEQ ID NO: 123360 - DNA, 15 bp, Homo sapiens
tcaaagcatcctttt

SEQ ID NO: 123361 - DNA, 15 bp, Homo sapiens
caaagcatccttttg

SEQ ID NO: 123362 - DNA, 15 bp, Homo sapiens
aaagcatccttttgt

SEQ ID NO: 123363 - DNA, 15 bp, Homo sapiens
aagcatccttttgtt

SEQ ID NO: 123364 - DNA, 15 bp, Homo sapiens
agcatccttttgttc

SEQ ID NO: 123365 - DNA, 15 bp, Homo sapiens
gcatccttttgttca

SEQ ID NO: 123366 - DNA, 15 bp, Homo sapiens
catccttttgttcac

SEQ ID NO: 123367 - DNA, 15 bp, Homo sapiens
atccttttgttcact

SEQ ID NO: 123368 - DNA, 15 bp, Homo sapiens
tccttttgttcacta

SEQ ID NO: 123369 - DNA, 15 bp, Homo sapiens
ccttttgttcactaa

SEQ ID NO: 123370 - DNA, 15 bp, Homo sapiens
cttttgttcactaaa

SEQ ID NO: 123371 - DNA, 15 bp, Homo sapiens
ttttgttcactaaat

SEQ ID NO: 123372 - DNA, 15 bp, Homo sapiens
tttgttcactaaatt

SEQ ID NO: 123373 - DNA, 15 bp, Homo sapiens
ttgttcactaaattt

SEQ ID NO: 123374 - DNA, 15 bp, Homo sapiens
tgttcactaaatttc

SEQ ID NO: 123375 - DNA, 15 bp, Homo sapiens
gttcactaaatttcc

SEQ ID NO: 123376 - DNA, 15 bp, Homo sapiens
ttcactaaatttcct

SEQ ID NO: 123377 - DNA, 15 bp, Homo sapiens
tcactaaatttcctt

SEQ ID NO: 123378 - DNA, 15 bp, Homo sapiens
cactaaatttccttt

SEQ ID NO: 123379 - DNA, 15 bp, Homo sapiens
actaaatttcctttt

SEQ ID NO: 123380 - DNA, 15 bp, Homo sapiens
ctaaatttccttttt

SEQ ID NO: 123381 - DNA, 15 bp, Homo sapiens
taaatttcctttttt

SEQ ID NO: 123382 - DNA, 15 bp, Homo sapiens
aaatttcctttttta

SEQ ID NO: 123383 - DNA, 15 bp, Homo sapiens
aatttccttttttat

SEQ ID NO: 123384 - DNA, 15 bp, Homo sapiens
atttccttttttatt

SEQ ID NO: 123385 - DNA, 15 bp, Homo sapiens
tttccttttttatta

SEQ ID NO: 123386 - DNA, 15 bp, Homo sapiens
ttccttttttattat

SEQ ID NO: 123387 - DNA, 15 bp, Homo sapiens
tccttttttattata

SEQ ID NO: 123388 - DNA, 15 bp, Homo sapiens
ccttttttattatag

SEQ ID NO: 123389 - DNA, 15 bp, Homo sapiens
cttttttattatagt

SEQ ID NO: 123390 - DNA, 15 bp, Homo sapiens
ttttttattatagtg

SEQ ID NO: 123391 - DNA, 15 bp, Homo sapiens
tttttattatagtgt

SEQ ID NO: 123392 - DNA, 15 bp, Homo sapiens
ttttattatagtgtt

SEQ ID NO: 123393 - DNA, 15 bp, Homo sapiens
tttattatagtgtta

SEQ ID NO: 123394 - DNA, 15 bp, Homo sapiens
ttattatagtgttac

SEQ ID NO: 123395 - DNA, 15 bp, Homo sapiens
tattatagtgttact

SEQ ID NO: 123396 - DNA, 15 bp, Homo sapiens
attatagtgttactt

SEQ ID NO: 123397 - DNA, 15 bp, Homo sapiens
ttatagtgttactta

SEQ ID NO: 123398 - DNA, 15 bp, Homo sapiens
tatagtgttacttaa

SEQ ID NO: 123399 - DNA, 15 bp, Homo sapiens
atagtgttacttaaa

SEQ ID NO: 123400 - DNA, 15 bp, Homo sapiens
tagtgttacttaaat

SEQ ID NO: 123401 - DNA, 15 bp, Homo sapiens
agtgttacttaaata

SEQ ID NO: 123402 - DNA, 15 bp, Homo sapiens
gtgttacttaaatat

SEQ ID NO: 123403 - DNA, 15 bp, Homo sapiens
tgttacttaaatatt

SEQ ID NO: 123404 - DNA, 15 bp, Homo sapiens
gttacttaaatatta

SEQ ID NO: 123405 - DNA, 15 bp, Homo sapiens
ttacttaaatattag

SEQ ID NO: 123406 - DNA, 15 bp, Homo sapiens
tacttaaatattagg

SEQ ID NO: 123407 - DNA, 15 bp, Homo sapiens
acttaaatattagga

SEQ ID NO: 123408 - DNA, 15 bp, Homo sapiens
cttaaatattaggaa

SEQ ID NO: 123409 - DNA, 15 bp, Homo sapiens
ttaaatattaggaag

SEQ ID NO: 123410 - DNA, 15 bp, Homo sapiens
taaatattaggaagt

SEQ ID NO: 123411 - DNA, 15 bp, Homo sapiens
aaatattaggaagta

SEQ ID NO: 123412 - DNA, 15 bp, Homo sapiens
aatattaggaagtaa

SEQ ID NO: 123413 - DNA, 15 bp, Homo sapiens
atattaggaagtaaa

SEQ ID NO: 123414 - DNA, 15 bp, Homo sapiens
tattaggaagtaaaa

SEQ ID NO: 123415 - DNA, 15 bp, Homo sapiens
attaggaagtaaaag

SEQ ID NO: 123416 - DNA, 15 bp, Homo sapiens
ttaggaagtaaaagt

SEQ ID NO: 123417 - DNA, 15 bp, Homo sapiens
taggaagtaaaagta

SEQ ID NO: 123418 - DNA, 15 bp, Homo sapiens
aggaagtaaaagtag

SEQ ID NO: 123419 - DNA, 15 bp, Homo sapiens
ggaagtaaaagtagg

SEQ ID NO: 123420 - DNA, 15 bp, Homo sapiens
gaagtaaaagtaggt

SEQ ID NO: 123421 - DNA, 15 bp, Homo sapiens
aagtaaaagtaggta

SEQ ID NO: 123422 - DNA, 15 bp, Homo sapiens
agtaaaagtaggtat

SEQ ID NO: 123423 - DNA, 15 bp, Homo sapiens
gtaaaagtaggtata

SEQ ID NO: 123424 - DNA, 15 bp, Homo sapiens
taaaagtaggtataa

SEQ ID NO: 123425 - DNA, 15 bp, Homo sapiens
aaaagtaggtataaa

SEQ ID NO: 123426 - DNA, 15 bp, Homo sapiens
aaagtaggtataaac

SEQ ID NO: 123427 - DNA, 15 bp, Homo sapiens
aagtaggtataaact

SEQ ID NO: 123428 - DNA, 15 bp, Homo sapiens
agtaggtataaactt

SEQ ID NO: 123429 - DNA, 15 bp, Homo sapiens
gtaggtataaacttc

SEQ ID NO: 123430 - DNA, 15 bp, Homo sapiens
taggtataaacttct

SEQ ID NO: 123431 - DNA, 15 bp, Homo sapiens
aggtataaacttctt

SEQ ID NO: 123432 - DNA, 15 bp, Homo sapiens
ggtataaacttctta

SEQ ID NO: 123433 - DNA, 15 bp, Homo sapiens
gtataaacttcttat

SEQ ID NO: 123434 - DNA, 15 bp, Homo sapiens
tataaacttcttata

SEQ ID NO: 123435 - DNA, 15 bp, Homo sapiens
ataaacttcttatag

SEQ ID NO: 123436 - DNA, 15 bp, Homo sapiens
taaacttcttatagg

SEQ ID NO: 123437 - DNA, 15 bp, Homo sapiens
aaacttcttataggc

SEQ ID NO: 123438 - DNA, 15 bp, Homo sapiens
aacttcttataggct

SEQ ID NO: 123439 - DNA, 15 bp, Homo sapiens
acttcttataggctg

SEQ ID NO: 123440 - DNA, 15 bp, Homo sapiens
cttcttataggctgt

SEQ ID NO: 123441 - DNA, 15 bp, Homo sapiens
ttcttataggctgtt

SEQ ID NO: 123442 - DNA, 15 bp, Homo sapiens
tcttataggctgtta

SEQ ID NO: 123443 - DNA, 15 bp, Homo sapiens
cttataggctgttat

SEQ ID NO: 123444 - DNA, 15 bp, Homo sapiens
ttataggctgttatt

SEQ ID NO: 123445 - DNA, 15 bp, Homo sapiens
tataggctgttatta

SEQ ID NO: 123446 - DNA, 15 bp, Homo sapiens
ataggctgttattat

SEQ ID NO: 123447 - DNA, 15 bp, Homo sapiens
taggctgttattata

SEQ ID NO: 123448 - DNA, 15 bp, Homo sapiens
aggctgttattatac

SEQ ID NO: 123449 - DNA, 15 bp, Homo sapiens
ggctgttattataca

SEQ ID NO: 123450 - DNA, 15 bp, Homo sapiens
gctgttattatacaa

SEQ ID NO: 123451 - DNA, 15 bp, Homo sapiens
ctgttattatacaac

SEQ ID NO: 123452 - DNA, 15 bp, Homo sapiens
tgttattatacaact

SEQ ID NO: 123453 - DNA, 15 bp, Homo sapiens
gttattatacaacta

SEQ ID NO: 123454 - DNA, 15 bp, Homo sapiens
ttattatacaactat

SEQ ID NO: 123455 - DNA, 15 bp, Homo sapiens
tattatacaactata

SEQ ID NO: 123456 - DNA, 15 bp, Homo sapiens
attatacaactatat

SEQ ID NO: 123457 - DNA, 15 bp, Homo sapiens
ttatacaactatatg

SEQ ID NO: 123458 - DNA, 15 bp, Homo sapiens
tatacaactatatga

SEQ ID NO: 123459 - DNA, 15 bp, Homo sapiens
atacaactatatgac

SEQ ID NO: 123460 - DNA, 15 bp, Homo sapiens
tacaactatatgacc

SEQ ID NO: 123461 - DNA, 15 bp, Homo sapiens
acaactatatgaccc

SEQ ID NO: 123462 - DNA, 15 bp, Homo sapiens
caactatatgaccca

SEQ ID NO: 123463 - DNA, 15 bp, Homo sapiens
aactatatgacccat

SEQ ID NO: 123464 - DNA, 15 bp, Homo sapiens
actatatgacccata

SEQ ID NO: 123465 - DNA, 15 bp, Homo sapiens
ctatatgacccatac

SEQ ID NO: 123466 - DNA, 15 bp, Homo sapiens
tatatgacccataca

SEQ ID NO: 123467 - DNA, 15 bp, Homo sapiens
atatgacccatacat

SEQ ID NO: 123468 - DNA, 15 bp, Homo sapiens
tatgacccatacata

SEQ ID NO: 123469 - DNA, 15 bp, Homo sapiens
atgacccatacatat

SEQ ID NO: 123470 - DNA, 15 bp, Homo sapiens
tgacccatacatatt

SEQ ID NO: 123471 - DNA, 15 bp, Homo sapiens
gacccatacatattt

SEQ ID NO: 123472 - DNA, 15 bp, Homo sapiens
acccatacatattta

SEQ ID NO: 123473 - DNA, 15 bp, Homo sapiens
cccatacatatttac

SEQ ID NO: 123474 - DNA, 15 bp, Homo sapiens
ccatacatatttaca

SEQ ID NO: 123475 - DNA, 15 bp, Homo sapiens
catacatatttacaa

SEQ ID NO: 123476 - DNA, 15 bp, Homo sapiens
atacatatttacaaa

SEQ ID NO: 123477 - DNA, 15 bp, Homo sapiens
tacatatttacaaat

SEQ ID NO: 123478 - DNA, 15 bp, Homo sapiens
acatatttacaaatt

SEQ ID NO: 123479 - DNA, 15 bp, Homo sapiens
catatttacaaatta

SEQ ID NO: 123480 - DNA, 15 bp, Homo sapiens
atatttacaaattaa

SEQ ID NO: 123481 - DNA, 15 bp, Homo sapiens
tatttacaaattaag

SEQ ID NO: 123482 - DNA, 15 bp, Homo sapiens
atttacaaattaagt

SEQ ID NO: 123483 - DNA, 15 bp, Homo sapiens
tttacaaattaagtg

SEQ ID NO: 123484 - DNA, 15 bp, Homo sapiens
ttacaaattaagtgc

SEQ ID NO: 123485 - DNA, 15 bp, Homo sapiens
tacaaattaagtgca

SEQ ID NO: 123486 - DNA, 15 bp, Homo sapiens
acaaattaagtgcag

SEQ ID NO: 123487 - DNA, 15 bp, Homo sapiens
caaattaagtgcagc

SEQ ID NO: 123488 - DNA, 15 bp, Homo sapiens
aaattaagtgcagcc

SEQ ID NO: 123489 - DNA, 15 bp, Homo sapiens
aattaagtgcagcca

SEQ ID NO: 123490 - DNA, 15 bp, Homo sapiens
attaagtgcagccaa

SEQ ID NO: 123491 - DNA, 15 bp, Homo sapiens
ttaagtgcagccaaa

SEQ ID NO: 123492 - DNA, 15 bp, Homo sapiens
taagtgcagccaaaa

SEQ ID NO: 123493 - DNA, 15 bp, Homo sapiens
aagtgcagccaaaat

SEQ ID NO: 123494 - DNA, 15 bp, Homo sapiens
agtgcagccaaaatt

SEQ ID NO: 123495 - DNA, 15 bp, Homo sapiens
gtgcagccaaaattg

SEQ ID NO: 123496 - DNA, 15 bp, Homo sapiens
tgcagccaaaattgc

SEQ ID NO: 123497 - DNA, 15 bp, Homo sapiens
gcagccaaaattgca

SEQ ID NO: 123498 - DNA, 15 bp, Homo sapiens
cagccaaaattgcaa

SEQ ID NO: 123499 - DNA, 15 bp, Homo sapiens
agccaaaattgcaaa

SEQ ID NO: 123500 - DNA, 15 bp, Homo sapiens
gccaaaattgcaaaa

SEQ ID NO: 123501 - DNA, 15 bp, Homo sapiens
ccaaaattgcaaaat

SEQ ID NO: 123502 - DNA, 15 bp, Homo sapiens
caaaattgcaaaatc

SEQ ID NO: 123503 - DNA, 15 bp, Homo sapiens
aaaattgcaaaatca

SEQ ID NO: 123504 - DNA, 15 bp, Homo sapiens
aaattgcaaaatcaa

SEQ ID NO: 123505 - DNA, 15 bp, Homo sapiens
aattgcaaaatcaat

SEQ ID NO: 123506 - DNA, 15 bp, Homo sapiens
attgcaaaatcaata

SEQ ID NO: 123507 - DNA, 15 bp, Homo sapiens
ttgcaaaatcaatac

SEQ ID NO: 123508 - DNA, 15 bp, Homo sapiens
tgcaaaatcaatacc

SEQ ID NO: 123509 - DNA, 15 bp, Homo sapiens
gcaaaatcaatacca

SEQ ID NO: 123510 - DNA, 15 bp, Homo sapiens
caaaatcaataccat

SEQ ID NO: 123511 - DNA, 15 bp, Homo sapiens
aaaatcaataccatt

SEQ ID NO: 123512 - DNA, 15 bp, Homo sapiens
aaatcaataccattc

SEQ ID NO: 123513 - DNA, 15 bp, Homo sapiens
aatcaataccattca

SEQ ID NO: 123514 - DNA, 15 bp, Homo sapiens
atcaataccattcaa

SEQ ID NO: 123515 - DNA, 15 bp, Homo sapiens
tcaataccattcaaa

SEQ ID NO: 123516 - DNA, 15 bp, Homo sapiens
caataccattcaaat

SEQ ID NO: 123517 - DNA, 15 bp, Homo sapiens
aataccattcaaatt

SEQ ID NO: 123518 - DNA, 15 bp, Homo sapiens
ataccattcaaatta

SEQ ID NO: 123519 - DNA, 15 bp, Homo sapiens
taccattcaaattaa

SEQ ID NO: 123520 - DNA, 15 bp, Homo sapiens
accattcaaattaat

SEQ ID NO: 123521 - DNA, 15 bp, Homo sapiens
ccattcaaattaata

SEQ ID NO: 123522 - DNA, 15 bp, Homo sapiens
cattcaaattaatac

SEQ ID NO: 123523 - DNA, 15 bp, Homo sapiens
attcaaattaatacc

SEQ ID NO: 123524 - DNA, 15 bp, Homo sapiens
ttcaaattaatacct

SEQ ID NO: 123525 - DNA, 15 bp, Homo sapiens
tcaaattaatacctt

SEQ ID NO: 123526 - DNA, 15 bp, Homo sapiens
caaattaatacctta

SEQ ID NO: 123527 - DNA, 15 bp, Homo sapiens
aaattaataccttaa

SEQ ID NO: 123528 - DNA, 15 bp, Homo sapiens
aattaataccttaaa

SEQ ID NO: 123529 - DNA, 15 bp, Homo sapiens
attaataccttaaat

SEQ ID NO: 123530 - DNA, 15 bp, Homo sapiens
ttaataccttaaatg

SEQ ID NO: 123531 - DNA, 15 bp, Homo sapiens
taataccttaaatgt

SEQ ID NO: 123532 - DNA, 15 bp, Homo sapiens
aataccttaaatgtg

SEQ ID NO: 123533 - DNA, 15 bp, Homo sapiens
ataccttaaatgtgg

SEQ ID NO: 123534 - DNA, 15 bp, Homo sapiens
taccttaaatgtggt

SEQ ID NO: 123535 - DNA, 15 bp, Homo sapiens
accttaaatgtggtg

SEQ ID NO: 123536 - DNA, 15 bp, Homo sapiens
ccttaaatgtggtga

SEQ ID NO: 123537 - DNA, 15 bp, Homo sapiens
cttaaatgtggtgag

SEQ ID NO: 123538 - DNA, 15 bp, Homo sapiens
ttaaatgtggtgagg

SEQ ID NO: 123539 - DNA, 15 bp, Homo sapiens
taaatgtggtgaggc

SEQ ID NO: 123540 - DNA, 15 bp, Homo sapiens
aaatgtggtgaggca

SEQ ID NO: 123541 - DNA, 15 bp, Homo sapiens
aatgtggtgaggcag

SEQ ID NO: 123542 - DNA, 15 bp, Homo sapiens
atgtggtgaggcagc

SEQ ID NO: 123543 - DNA, 15 bp, Homo sapiens
tgtggtgaggcagct

SEQ ID NO: 123544 - DNA, 15 bp, Homo sapiens
gtggtgaggcagctg

SEQ ID NO: 123545 - DNA, 15 bp, Homo sapiens
tggtgaggcagctgt

SEQ ID NO: 123546 - DNA, 15 bp, Homo sapiens
ggtgaggcagctgtt

SEQ ID NO: 123547 - DNA, 15 bp, Homo sapiens
gtgaggcagctgttg

SEQ ID NO: 123548 - DNA, 15 bp, Homo sapiens
tgaggcagctgttgt

SEQ ID NO: 123549 - DNA, 15 bp, Homo sapiens
gaggcagctgttgtt

SEQ ID NO: 123550 - DNA, 15 bp, Homo sapiens
aggcagctgttgttc

SEQ ID NO: 123551 - DNA, 15 bp, Homo sapiens
ggcagctgttgttca

SEQ ID NO: 123552 - DNA, 15 bp, Homo sapiens
gcagctgttgttcaa

SEQ ID NO: 123553 - DNA, 15 bp, Homo sapiens
cagctgttgttcaac

SEQ ID NO: 123554 - DNA, 15 bp, Homo sapiens
agctgttgttcaact

SEQ ID NO: 123555 - DNA, 15 bp, Homo sapiens
gctgttgttcaactg

SEQ ID NO: 123556 - DNA, 15 bp, Homo sapiens
ctgttgttcaactga

SEQ ID NO: 123557 - DNA, 15 bp, Homo sapiens
tgttgttcaactgaa

SEQ ID NO: 123558 - DNA, 15 bp, Homo sapiens
gttgttcaactgaaa

SEQ ID NO: 123559 - DNA, 15 bp, Homo sapiens
ttgttcaactgaaac

SEQ ID NO: 123560 - DNA, 15 bp, Homo sapiens
tgttcaactgaaacc

SEQ ID NO: 123561 - DNA, 15 bp, Homo sapiens
gttcaactgaaacca

SEQ ID NO: 123562 - DNA, 15 bp, Homo sapiens
ttcaactgaaaccaa

SEQ ID NO: 123563 - DNA, 15 bp, Homo sapiens
tcaactgaaaccaaa

SEQ ID NO: 123564 - DNA, 15 bp, Homo sapiens
caactgaaaccaaat

SEQ ID NO: 123565 - DNA, 15 bp, Homo sapiens
aactgaaaccaaatt

SEQ ID NO: 123566 - DNA, 15 bp, Homo sapiens
actgaaaccaaatta

SEQ ID NO: 123567 - DNA, 15 bp, Homo sapiens
ctgaaaccaaattat

SEQ ID NO: 123568 - DNA, 15 bp, Homo sapiens
tgaaaccaaattata

SEQ ID NO: 123569 - DNA, 15 bp, Homo sapiens
gaaaccaaattataa

SEQ ID NO: 123570 - DNA, 15 bp, Homo sapiens
aaaccaaattataag

SEQ ID NO: 123571 - DNA, 15 bp, Homo sapiens
aaccaaattataagt

SEQ ID NO: 123572 - DNA, 15 bp, Homo sapiens
accaaattataagtt

SEQ ID NO: 123573 - DNA, 15 bp, Homo sapiens
ccaaattataagttg

SEQ ID NO: 123574 - DNA, 15 bp, Homo sapiens
caaattataagttgc

SEQ ID NO: 123575 - DNA, 15 bp, Homo sapiens
aaattataagttgca

SEQ ID NO: 123576 - DNA, 15 bp, Homo sapiens
aattataagttgcat

SEQ ID NO: 123577 - DNA, 15 bp, Homo sapiens
attataagttgcatg

SEQ ID NO: 123578 - DNA, 15 bp, Homo sapiens
ttataagttgcatgg

SEQ ID NO: 123579 - DNA, 15 bp, Homo sapiens
tataagttgcatggc

SEQ ID NO: 123580 - DNA, 15 bp, Homo sapiens
ataagttgcatggca

SEQ ID NO: 123581 - DNA, 15 bp, Homo sapiens
taagttgcatggcag

SEQ ID NO: 123582 - DNA, 15 bp, Homo sapiens
aagttgcatggcagt

SEQ ID NO: 123583 - DNA, 15 bp, Homo sapiens
agttgcatggcagta

SEQ ID NO: 123584 - DNA, 15 bp, Homo sapiens
gttgcatggcagtaa

SEQ ID NO: 123585 - DNA, 15 bp, Homo sapiens
ttgcatggcagtaaa

SEQ ID NO: 123586 - DNA, 15 bp, Homo sapiens
tgcatggcagtaaat

SEQ ID NO: 123587 - DNA, 15 bp, Homo sapiens
gcatggcagtaaatg

SEQ ID NO: 123588 - DNA, 15 bp, Homo sapiens
catggcagtaaatgc

SEQ ID NO: 123589 - DNA, 15 bp, Homo sapiens
atggcagtaaatgct

SEQ ID NO: 123590 - DNA, 15 bp, Homo sapiens
tggcagtaaatgcta

SEQ ID NO: 123591 - DNA, 15 bp, Homo sapiens
ggcagtaaatgctat

SEQ ID NO: 123592 - DNA, 15 bp, Homo sapiens
gcagtaaatgctatc

SEQ ID NO: 123593 - DNA, 15 bp, Homo sapiens
cagtaaatgctatca

SEQ ID NO: 123594 - DNA, 15 bp, Homo sapiens
agtaaatgctatcat

SEQ ID NO: 123595 - DNA, 15 bp, Homo sapiens
gtaaatgctatcatg

SEQ ID NO: 123596 - DNA, 15 bp, Homo sapiens
taaatgctatcatgc

SEQ ID NO: 123597 - DNA, 15 bp, Homo sapiens
aaatgctatcatgct

SEQ ID NO: 123598 - DNA, 15 bp, Homo sapiens
aatgctatcatgctg

SEQ ID NO: 123599 - DNA, 15 bp, Homo sapiens
atgctatcatgctga

SEQ ID NO: 123600 - DNA, 15 bp, Homo sapiens
tgctatcatgctgat

SEQ ID NO: 123601 - DNA, 15 bp, Homo sapiens
gctatcatgctgatc

SEQ ID NO: 123602 - DNA, 15 bp, Homo sapiens
ctatcatgctgatca

SEQ ID NO: 123603 - DNA, 15 bp, Homo sapiens
tatcatgctgatcat

SEQ ID NO: 123604 - DNA, 15 bp, Homo sapiens
atcatgctgatcatt

SEQ ID NO: 123605 - DNA, 15 bp, Homo sapiens
tcatgctgatcattt

SEQ ID NO: 123606 - DNA, 15 bp, Homo sapiens
catgctgatcatttt

SEQ ID NO: 123607 - DNA, 15 bp, Homo sapiens
atgctgatcattttg

SEQ ID NO: 123608 - DNA, 15 bp, Homo sapiens
tgctgatcattttga

SEQ ID NO: 123609 - DNA, 15 bp, Homo sapiens
gctgatcattttgag

SEQ ID NO: 123610 - DNA, 15 bp, Homo sapiens
ctgatcattttgagt

SEQ ID NO: 123611 - DNA, 15 bp, Homo sapiens
tgatcattttgagtt

SEQ ID NO: 123612 - DNA, 15 bp, Homo sapiens
gatcattttgagttt

SEQ ID NO: 123613 - DNA, 15 bp, Homo sapiens
atcattttgagtttg

SEQ ID NO: 123614 - DNA, 15 bp, Homo sapiens
tcattttgagtttgg

SEQ ID NO: 123615 - DNA, 15 bp, Homo sapiens
cattttgagtttggc

SEQ ID NO: 123616 - DNA, 15 bp, Homo sapiens
attttgagtttggcc

SEQ ID NO: 123617 - DNA, 15 bp, Homo sapiens
ttttgagtttggcca

SEQ ID NO: 123618 - DNA, 15 bp, Homo sapiens
tttgagtttggccag

SEQ ID NO: 123619 - DNA, 15 bp, Homo sapiens
ttgagtttggccagt

SEQ ID NO: 123620 - DNA, 15 bp, Homo sapiens
tgagtttggccagtc

SEQ ID NO: 123621 - DNA, 15 bp, Homo sapiens
gagtttggccagtct

SEQ ID NO: 123622 - DNA, 15 bp, Homo sapiens
agtttggccagtcta

SEQ ID NO: 123623 - DNA, 15 bp, Homo sapiens
gtttggccagtctat

SEQ ID NO: 123624 - DNA, 15 bp, Homo sapiens
tttggccagtctata

SEQ ID NO: 123625 - DNA, 15 bp, Homo sapiens
ttggccagtctatat

SEQ ID NO: 123626 - DNA, 15 bp, Homo sapiens
tggccagtctatatt

SEQ ID NO: 123627 - DNA, 15 bp, Homo sapiens
ggccagtctatatta

SEQ ID NO: 123628 - DNA, 15 bp, Homo sapiens
gccagtctatattat

SEQ ID NO: 123629 - DNA, 15 bp, Homo sapiens
ccagtctatattatc

SEQ ID NO: 123630 - DNA, 15 bp, Homo sapiens
cagtctatattatca

SEQ ID NO: 123631 - DNA, 15 bp, Homo sapiens
agtctatattatcat

SEQ ID NO: 123632 - DNA, 15 bp, Homo sapiens
gtctatattatcatg

SEQ ID NO: 123633 - DNA, 15 bp, Homo sapiens
tctatattatcatgt

SEQ ID NO: 123634 - DNA, 15 bp, Homo sapiens
ctatattatcatgtg

SEQ ID NO: 123635 - DNA, 15 bp, Homo sapiens
tatattatcatgtgc

SEQ ID NO: 123636 - DNA, 15 bp, Homo sapiens
atattatcatgtgct

SEQ ID NO: 123637 - DNA, 15 bp, Homo sapiens
tattatcatgtgcta

SEQ ID NO: 123638 - DNA, 15 bp, Homo sapiens
attatcatgtgctaa

SEQ ID NO: 123639 - DNA, 15 bp, Homo sapiens
ttatcatgtgctaat

SEQ ID NO: 123640 - DNA, 15 bp, Homo sapiens
tatcatgtgctaatg

SEQ ID NO: 123641 - DNA, 15 bp, Homo sapiens
atcatgtgctaatga

SEQ ID NO: 123642 - DNA, 15 bp, Homo sapiens
tcatgtgctaatgat

SEQ ID NO: 123643 - DNA, 15 bp, Homo sapiens
catgtgctaatgatt

SEQ ID NO: 123644 - DNA, 15 bp, Homo sapiens
atgtgctaatgattg

SEQ ID NO: 123645 - DNA, 15 bp, Homo sapiens
tgtgctaatgattga

SEQ ID NO: 123646 - DNA, 15 bp, Homo sapiens
gtgctaatgattgaa

SEQ ID NO: 123647 - DNA, 15 bp, Homo sapiens
tgctaatgattgaat

SEQ ID NO: 123648 - DNA, 15 bp, Homo sapiens
gctaatgattgaatt

SEQ ID NO: 123649 - DNA, 15 bp, Homo sapiens
ctaatgattgaattc

SEQ ID NO: 123650 - DNA, 15 bp, Homo sapiens
taatgattgaattct

SEQ ID NO: 123651 - DNA, 15 bp, Homo sapiens
aatgattgaattctc

SEQ ID NO: 123652 - DNA, 15 bp, Homo sapiens
atgattgaattctcc

SEQ ID NO: 123653 - DNA, 15 bp, Homo sapiens
tgattgaattctcca

SEQ ID NO: 123654 - DNA, 15 bp, Homo sapiens
gattgaattctccac

SEQ ID NO: 123655 - DNA, 15 bp, Homo sapiens
attgaattctccacc

SEQ ID NO: 123656 - DNA, 15 bp, Homo sapiens
ttgaattctccaccc

SEQ ID NO: 123657 - DNA, 15 bp, Homo sapiens
tgaattctccaccca

SEQ ID NO: 123658 - DNA, 15 bp, Homo sapiens
gaattctccacccat

SEQ ID NO: 123659 - DNA, 15 bp, Homo sapiens
aattctccacccatt

SEQ ID NO: 123660 - DNA, 15 bp, Homo sapiens
attctccacccattt

SEQ ID NO: 123661 - DNA, 15 bp, Homo sapiens
ttctccacccatttt

SEQ ID NO: 123662 - DNA, 15 bp, Homo sapiens
tctccacccattttt

SEQ ID NO: 123663 - DNA, 15 bp, Homo sapiens
ctccacccatttttc

SEQ ID NO: 123664 - DNA, 15 bp, Homo sapiens
tccacccatttttct

SEQ ID NO: 123665 - DNA, 15 bp, Homo sapiens
ccacccatttttcta

SEQ ID NO: 123666 - DNA, 15 bp, Homo sapiens
cacccatttttctac

SEQ ID NO: 123667 - DNA, 15 bp, Homo sapiens
acccatttttctact

SEQ ID NO: 123668 - DNA, 15 bp, Homo sapiens
cccatttttctactt

SEQ ID NO: 123669 - DNA, 15 bp, Homo sapiens
ccatttttctacttg

SEQ ID NO: 123670 - DNA, 15 bp, Homo sapiens
catttttctacttgt

SEQ ID NO: 123671 - DNA, 15 bp, Homo sapiens
atttttctacttgta

SEQ ID NO: 123672 - DNA, 15 bp, Homo sapiens
tttttctacttgtat

SEQ ID NO: 123673 - DNA, 15 bp, Homo sapiens
ttttctacttgtatg

SEQ ID NO: 123674 - DNA, 15 bp, Homo sapiens
tttctacttgtatga

SEQ ID NO: 123675 - DNA, 15 bp, Homo sapiens
ttctacttgtatgac

SEQ ID NO: 123676 - DNA, 15 bp, Homo sapiens
tctacttgtatgacc

SEQ ID NO: 123677 - DNA, 15 bp, Homo sapiens
ctacttgtatgacct

SEQ ID NO: 123678 - DNA, 15 bp, Homo sapiens
tacttgtatgacctt

SEQ ID NO: 123679 - DNA, 15 bp, Homo sapiens
acttgtatgacctta

SEQ ID NO: 123680 - DNA, 15 bp, Homo sapiens
cttgtatgaccttaa

SEQ ID NO: 123681 - DNA, 15 bp, Homo sapiens
ttgtatgaccttaat

SEQ ID NO: 123682 - DNA, 15 bp, Homo sapiens
tgtatgaccttaatt

SEQ ID NO: 123683 - DNA, 15 bp, Homo sapiens
gtatgaccttaattt

SEQ ID NO: 123684 - DNA, 15 bp, Homo sapiens
tatgaccttaatttg

SEQ ID NO: 123685 - DNA, 15 bp, Homo sapiens
atgaccttaatttga

SEQ ID NO: 123686 - DNA, 15 bp, Homo sapiens
tgaccttaatttgat

SEQ ID NO: 123687 - DNA, 15 bp, Homo sapiens
gaccttaatttgatg

SEQ ID NO: 123688 - DNA, 15 bp, Homo sapiens
accttaatttgatgg

SEQ ID NO: 123689 - DNA, 15 bp, Homo sapiens
ccttaatttgatggc

SEQ ID NO: 123690 - DNA, 15 bp, Homo sapiens
cttaatttgatggca

SEQ ID NO: 123691 - DNA, 15 bp, Homo sapiens
ttaatttgatggcac

SEQ ID NO: 123692 - DNA, 15 bp, Homo sapiens
taatttgatggcacc

SEQ ID NO: 123693 - DNA, 15 bp, Homo sapiens
aatttgatggcacct

SEQ ID NO: 123694 - DNA, 15 bp, Homo sapiens
atttgatggcacctg

SEQ ID NO: 123695 - DNA, 15 bp, Homo sapiens
tttgatggcacctgt

SEQ ID NO: 123696 - DNA, 15 bp, Homo sapiens
ttgatggcacctgtt

SEQ ID NO: 123697 - DNA, 15 bp, Homo sapiens
tgatggcacctgttc

SEQ ID NO: 123698 - DNA, 15 bp, Homo sapiens
gatggcacctgttcc

SEQ ID NO: 123699 - DNA, 15 bp, Homo sapiens
atggcacctgttcca

SEQ ID NO: 123700 - DNA, 15 bp, Homo sapiens
tggcacctgttccat

SEQ ID NO: 123701 - DNA, 15 bp, Homo sapiens
ggcacctgttccatc

SEQ ID NO: 123702 - DNA, 15 bp, Homo sapiens
gcacctgttccatcc

SEQ ID NO: 123703 - DNA, 15 bp, Homo sapiens
cacctgttccatcct

SEQ ID NO: 123704 - DNA, 15 bp, Homo sapiens
acctgttccatcctc

SEQ ID NO: 123705 - DNA, 15 bp, Homo sapiens
cctgttccatcctca

SEQ ID NO: 123706 - DNA, 15 bp, Homo sapiens
ctgttccatcctcat

SEQ ID NO: 123707 - DNA, 15 bp, Homo sapiens
tgttccatcctcatg

SEQ ID NO: 123708 - DNA, 15 bp, Homo sapiens
gttccatcctcatga

SEQ ID NO: 123709 - DNA, 15 bp, Homo sapiens
ttccatcctcatgag

SEQ ID NO: 123710 - DNA, 15 bp, Homo sapiens
tccatcctcatgagt

SEQ ID NO: 123711 - DNA, 15 bp, Homo sapiens
ccatcctcatgagtt

SEQ ID NO: 123712 - DNA, 15 bp, Homo sapiens
catcctcatgagttt

SEQ ID NO: 123713 - DNA, 15 bp, Homo sapiens
atcctcatgagtttg

SEQ ID NO: 123714 - DNA, 15 bp, Homo sapiens
tcctcatgagtttgc

SEQ ID NO: 123715 - DNA, 15 bp, Homo sapiens
cctcatgagtttgct

SEQ ID NO: 123716 - DNA, 15 bp, Homo sapiens
ctcatgagtttgcta

SEQ ID NO: 123717 - DNA, 15 bp, Homo sapiens
tcatgagtttgctac

SEQ ID NO: 123718 - DNA, 15 bp, Homo sapiens
catgagtttgctaca

SEQ ID NO: 123719 - DNA, 15 bp, Homo sapiens
atgagtttgctacaa

SEQ ID NO: 123720 - DNA, 15 bp, Homo sapiens
tgagtttgctacaat

SEQ ID NO: 123721 - DNA, 15 bp, Homo sapiens
gagtttgctacaatt

SEQ ID NO: 123722 - DNA, 15 bp, Homo sapiens
agtttgctacaatta

SEQ ID NO: 123723 - DNA, 15 bp, Homo sapiens
gtttgctacaattat

SEQ ID NO: 123724 - DNA, 15 bp, Homo sapiens
tttgctacaattata

SEQ ID NO: 123725 - DNA, 15 bp, Homo sapiens
ttgctacaattatac

SEQ ID NO: 123726 - DNA, 15 bp, Homo sapiens
tgctacaattatact

SEQ ID NO: 123727 - DNA, 15 bp, Homo sapiens
gctacaattatactg

SEQ ID NO: 123728 - DNA, 15 bp, Homo sapiens
ctacaattatactgg

SEQ ID NO: 123729 - DNA, 15 bp, Homo sapiens
tacaattatactggt

SEQ ID NO: 123730 - DNA, 15 bp, Homo sapiens
acaattatactggtg

SEQ ID NO: 123731 - DNA, 15 bp, Homo sapiens
caattatactggtgc

SEQ ID NO: 123732 - DNA, 15 bp, Homo sapiens
aattatactggtgcc

SEQ ID NO: 123733 - DNA, 15 bp, Homo sapiens
attatactggtgcca

SEQ ID NO: 123734 - DNA, 15 bp, Homo sapiens
ttatactggtgccaa

SEQ ID NO: 123735 - DNA, 15 bp, Homo sapiens
tatactggtgccaac

SEQ ID NO: 123736 - DNA, 15 bp, Homo sapiens
atactggtgccaaca

SEQ ID NO: 123737 - DNA, 15 bp, Homo sapiens
tactggtgccaacac

SEQ ID NO: 123738 - DNA, 15 bp, Homo sapiens
actggtgccaacaca

SEQ ID NO: 123739 - DNA, 15 bp, Homo sapiens
ctggtgccaacacaa

SEQ ID NO: 123740 - DNA, 15 bp, Homo sapiens
tggtgccaacacaat

SEQ ID NO: 123741 - DNA, 15 bp, Homo sapiens
ggtgccaacacaatc

SEQ ID NO: 123742 - DNA, 15 bp, Homo sapiens
gtgccaacacaatca

SEQ ID NO: 123743 - DNA, 15 bp, Homo sapiens
tgccaacacaatcat

SEQ ID NO: 123744 - DNA, 15 bp, Homo sapiens
gccaacacaatcata

SEQ ID NO: 123745 - DNA, 15 bp, Homo sapiens
ccaacacaatcataa

SEQ ID NO: 123746 - DNA, 15 bp, Homo sapiens
caacacaatcataaa

SEQ ID NO: 123747 - DNA, 15 bp, Homo sapiens
aacacaatcataaac

SEQ ID NO: 123748 - DNA, 15 bp, Homo sapiens
acacaatcataaaca

SEQ ID NO: 123749 - DNA, 15 bp, Homo sapiens
cacaatcataaacac

SEQ ID NO: 123750 - DNA, 15 bp, Homo sapiens
acaatcataaacaca

SEQ ID NO: 123751 - DNA, 15 bp, Homo sapiens
caatcataaacacaa

SEQ ID NO: 123752 - DNA, 15 bp, Homo sapiens
aatcataaacacaaa

SEQ ID NO: 123753 - DNA, 15 bp, Homo sapiens
atcataaacacaaat

SEQ ID NO: 123754 - DNA, 15 bp, Homo sapiens
tcataaacacaaata

SEQ ID NO: 123755 - DNA, 15 bp, Homo sapiens
cataaacacaaatat

SEQ ID NO: 123756 - DNA, 15 bp, Homo sapiens
ataaacacaaatata

SEQ ID NO: 123757 - DNA, 15 bp, Homo sapiens
taaacacaaatataa

SEQ ID NO: 123758 - DNA, 15 bp, Homo sapiens
aaacacaaatataaa

SEQ ID NO: 123759 - DNA, 15 bp, Homo sapiens
aacacaaatataaac

SEQ ID NO: 123760 - DNA, 15 bp, Homo sapiens
acacaaatataaact

SEQ ID NO: 123761 - DNA, 15 bp, Homo sapiens
cacaaatataaactt

SEQ ID NO: 123762 - DNA, 15 bp, Homo sapiens
acaaatataaacttg

SEQ ID NO: 123763 - DNA, 15 bp, Homo sapiens
caaatataaacttgg

SEQ ID NO: 123764 - DNA, 15 bp, Homo sapiens
aaatataaacttggg

SEQ ID NO: 123765 - DNA, 15 bp, Homo sapiens
aatataaacttgggc

SEQ ID NO: 123766 - DNA, 15 bp, Homo sapiens
atataaacttgggct

SEQ ID NO: 123767 - DNA, 15 bp, Homo sapiens
tataaacttgggctt

SEQ ID NO: 123768 - DNA, 15 bp, Homo sapiens
ataaacttgggcttt

SEQ ID NO: 123769 - DNA, 15 bp, Homo sapiens
taaacttgggctttg

SEQ ID NO: 123770 - DNA, 15 bp, Homo sapiens
aaacttgggctttga

SEQ ID NO: 123771 - DNA, 15 bp, Homo sapiens
aacttgggctttgaa

SEQ ID NO: 123772 - DNA, 15 bp, Homo sapiens
acttgggctttgaaa

SEQ ID NO: 123773 - DNA, 15 bp, Homo sapiens
cttgggctttgaaat

SEQ ID NO: 123774 - DNA, 15 bp, Homo sapiens
ttgggctttgaaatc

SEQ ID NO: 123775 - DNA, 15 bp, Homo sapiens
tgggctttgaaatct

SEQ ID NO: 123776 - DNA, 15 bp, Homo sapiens
gggctttgaaatctt

SEQ ID NO: 123777 - DNA, 15 bp, Homo sapiens
ggctttgaaatcttg

SEQ ID NO: 123778 - DNA, 15 bp, Homo sapiens
gctttgaaatcttgt

SEQ ID NO: 123779 - DNA, 15 bp, Homo sapiens
ctttgaaatcttgtg

SEQ ID NO: 123780 - DNA, 15 bp, Homo sapiens
tttgaaatcttgtgc

SEQ ID NO: 123781 - DNA, 15 bp, Homo sapiens
ttgaaatcttgtgcc

SEQ ID NO: 123782 - DNA, 15 bp, Homo sapiens
tgaaatcttgtgcca

SEQ ID NO: 123783 - DNA, 15 bp, Homo sapiens
gaaatcttgtgccag

SEQ ID NO: 123784 - DNA, 15 bp, Homo sapiens
aaatcttgtgccaga

SEQ ID NO: 123785 - DNA, 15 bp, Homo sapiens
aatcttgtgccagaa

SEQ ID NO: 123786 - DNA, 15 bp, Homo sapiens
atcttgtgccagaac

SEQ ID NO: 123787 - DNA, 15 bp, Homo sapiens
tcttgtgccagaact

SEQ ID NO: 123788 - DNA, 15 bp, Homo sapiens
cttgtgccagaactt

SEQ ID NO: 123789 - DNA, 15 bp, Homo sapiens
ttgtgccagaacttg

SEQ ID NO: 123790 - DNA, 15 bp, Homo sapiens
tgtgccagaacttgg

SEQ ID NO: 123791 - DNA, 15 bp, Homo sapiens
gtgccagaacttggc

SEQ ID NO: 123792 - DNA, 15 bp, Homo sapiens
tgccagaacttggct

SEQ ID NO: 123793 - DNA, 15 bp, Homo sapiens
gccagaacttggctt

SEQ ID NO: 123794 - DNA, 15 bp, Homo sapiens
ccagaacttggcttt

SEQ ID NO: 123795 - DNA, 15 bp, Homo sapiens
cagaacttggcttta

SEQ ID NO: 123796 - DNA, 15 bp, Homo sapiens
agaacttggctttaa

SEQ ID NO: 123797 - DNA, 15 bp, Homo sapiens
gaacttggctttaaa

SEQ ID NO: 123798 - DNA, 15 bp, Homo sapiens
aacttggctttaaag

SEQ ID NO: 123799 - DNA, 15 bp, Homo sapiens
acttggctttaaagt

SEQ ID NO: 123800 - DNA, 15 bp, Homo sapiens
cttggctttaaagta

SEQ ID NO: 123801 - DNA, 15 bp, Homo sapiens
ttggctttaaagtaa

SEQ ID NO: 123802 - DNA, 15 bp, Homo sapiens
tggctttaaagtaag

SEQ ID NO: 123803 - DNA, 15 bp, Homo sapiens
ggctttaaagtaagc

SEQ ID NO: 123804 - DNA, 15 bp, Homo sapiens
gctttaaagtaagca

SEQ ID NO: 123805 - DNA, 15 bp, Homo sapiens
ctttaaagtaagcat

SEQ ID NO: 123806 - DNA, 15 bp, Homo sapiens
tttaaagtaagcatt

SEQ ID NO: 123807 - DNA, 15 bp, Homo sapiens
ttaaagtaagcattt

SEQ ID NO: 123808 - DNA, 15 bp, Homo sapiens
taaagtaagcattta

SEQ ID NO: 123809 - DNA, 15 bp, Homo sapiens
aaagtaagcatttaa

SEQ ID NO: 123810 - DNA, 15 bp, Homo sapiens
aagtaagcatttaaa

SEQ ID NO: 123811 - DNA, 15 bp, Homo sapiens
agtaagcatttaaaa

SEQ ID NO: 123812 - DNA, 15 bp, Homo sapiens
gtaagcatttaaaaa

SEQ ID NO: 123813 - DNA, 15 bp, Homo sapiens
taagcatttaaaaaa

SEQ ID NO: 123814 - DNA, 15 bp, Homo sapiens
aagcatttaaaaaat

SEQ ID NO: 123815 - DNA, 15 bp, Homo sapiens
agcatttaaaaaatc

SEQ ID NO: 123816 - DNA, 15 bp, Homo sapiens
gcatttaaaaaatcc

SEQ ID NO: 123817 - DNA, 15 bp, Homo sapiens
catttaaaaaatcca

SEQ ID NO: 123818 - DNA, 15 bp, Homo sapiens
atttaaaaaatccat

SEQ ID NO: 123819 - DNA, 15 bp, Homo sapiens
tttaaaaaatccata

SEQ ID NO: 123820 - DNA, 15 bp, Homo sapiens
ttaaaaaatccatat

SEQ ID NO: 123821 - DNA, 15 bp, Homo sapiens
taaaaaatccatatg

SEQ ID NO: 123822 - DNA, 15 bp, Homo sapiens
aaaaaatccatatgt

SEQ ID NO: 123823 - DNA, 15 bp, Homo sapiens
aaaaatccatatgtg

SEQ ID NO: 123824 - DNA, 15 bp, Homo sapiens
aaaatccatatgtgt

SEQ ID NO: 123825 - DNA, 15 bp, Homo sapiens
aaatccatatgtgtt

SEQ ID NO: 123826 - DNA, 15 bp, Homo sapiens
aatccatatgtgttt

SEQ ID NO: 123827 - DNA, 15 bp, Homo sapiens
atccatatgtgttta

SEQ ID NO: 123828 - DNA, 15 bp, Homo sapiens
tccatatgtgtttat

SEQ ID NO: 123829 - DNA, 15 bp, Homo sapiens
ccatatgtgtttatt

SEQ ID NO: 123830 - DNA, 15 bp, Homo sapiens
catatgtgtttatta

SEQ ID NO: 123831 - DNA, 15 bp, Homo sapiens
atatgtgtttattag

SEQ ID NO: 123832 - DNA, 15 bp, Homo sapiens
tatgtgtttattaga

SEQ ID NO: 123833 - DNA, 15 bp, Homo sapiens
atgtgtttattagac

SEQ ID NO: 123834 - DNA, 15 bp, Homo sapiens
tgtgtttattagact

SEQ ID NO: 123835 - DNA, 15 bp, Homo sapiens
gtgtttattagactt

SEQ ID NO: 123836 - DNA, 15 bp, Homo sapiens
tgtttattagacttt

SEQ ID NO: 123837 - DNA, 15 bp, Homo sapiens
gtttattagactttg

SEQ ID NO: 123838 - DNA, 15 bp, Homo sapiens
tttattagactttgt

SEQ ID NO: 123839 - DNA, 15 bp, Homo sapiens
ttattagactttgtt

SEQ ID NO: 123840 - DNA, 15 bp, Homo sapiens
tattagactttgttt

SEQ ID NO: 123841 - DNA, 15 bp, Homo sapiens
attagactttgttta

SEQ ID NO: 123842 - DNA, 15 bp, Homo sapiens
ttagactttgtttag

SEQ ID NO: 123843 - DNA, 15 bp, Homo sapiens
tagactttgtttaga

SEQ ID NO: 123844 - DNA, 15 bp, Homo sapiens
agactttgtttagat

SEQ ID NO: 123845 - DNA, 15 bp, Homo sapiens
gactttgtttagatg

SEQ ID NO: 123846 - DNA, 15 bp, Homo sapiens
actttgtttagatga

SEQ ID NO: 123847 - DNA, 15 bp, Homo sapiens
ctttgtttagatgac

SEQ ID NO: 123848 - DNA, 15 bp, Homo sapiens
tttgtttagatgact

SEQ ID NO: 123849 - DNA, 15 bp, Homo sapiens
ttgtttagatgactg

SEQ ID NO: 123850 - DNA, 15 bp, Homo sapiens
tgtttagatgactgt

SEQ ID NO: 123851 - DNA, 15 bp, Homo sapiens
gtttagatgactgtt

SEQ ID NO: 123852 - DNA, 15 bp, Homo sapiens
tttagatgactgttg

SEQ ID NO: 123853 - DNA, 15 bp, Homo sapiens
ttagatgactgttga

SEQ ID NO: 123854 - DNA, 15 bp, Homo sapiens
tagatgactgttgaa

SEQ ID NO: 123855 - DNA, 15 bp, Homo sapiens
agatgactgttgaaa

SEQ ID NO: 123856 - DNA, 15 bp, Homo sapiens
gatgactgttgaaat

SEQ ID NO: 123857 - DNA, 15 bp, Homo sapiens
atgactgttgaaatg

SEQ ID NO: 123858 - DNA, 15 bp, Homo sapiens
tgactgttgaaatga

SEQ ID NO: 123859 - DNA, 15 bp, Homo sapiens
gactgttgaaatgaa

SEQ ID NO: 123860 - DNA, 15 bp, Homo sapiens
actgttgaaatgaaa

SEQ ID NO: 123861 - DNA, 15 bp, Homo sapiens
ctgttgaaatgaaaa

SEQ ID NO: 123862 - DNA, 15 bp, Homo sapiens
tgttgaaatgaaaac

SEQ ID NO: 123863 - DNA, 15 bp, Homo sapiens
gttgaaatgaaaaca

SEQ ID NO: 123864 - DNA, 15 bp, Homo sapiens
ttgaaatgaaaacaa

SEQ ID NO: 123865 - DNA, 15 bp, Homo sapiens
tgaaatgaaaacaaa

SEQ ID NO: 123866 - DNA, 15 bp, Homo sapiens
gaaatgaaaacaaag

SEQ ID NO: 123867 - DNA, 15 bp, Homo sapiens
aaatgaaaacaaagt

SEQ ID NO: 123868 - DNA, 15 bp, Homo sapiens
aatgaaaacaaagtg

SEQ ID NO: 123869 - DNA, 15 bp, Homo sapiens
atgaaaacaaagtgt

SEQ ID NO: 123870 - DNA, 15 bp, Homo sapiens
tgaaaacaaagtgtt

SEQ ID NO: 123871 - DNA, 15 bp, Homo sapiens
gaaaacaaagtgttt

SEQ ID NO: 123872 - DNA, 15 bp, Homo sapiens
aaaacaaagtgttta

SEQ ID NO: 123873 - DNA, 15 bp, Homo sapiens
aaacaaagtgtttaa

SEQ ID NO: 123874 - DNA, 15 bp, Homo sapiens
aacaaagtgtttaaa

SEQ ID NO: 123875 - DNA, 15 bp, Homo sapiens
acaaagtgtttaaaa

SEQ ID NO: 123876 - DNA, 15 bp, Homo sapiens
caaagtgtttaaaat

SEQ ID NO: 123877 - DNA, 15 bp, Homo sapiens
aaagtgtttaaaatc

SEQ ID NO: 123878 - DNA, 15 bp, Homo sapiens
aagtgtttaaaatcc

SEQ ID NO: 123879 - DNA, 15 bp, Homo sapiens
agtgtttaaaatcct

SEQ ID NO: 123880 - DNA, 15 bp, Homo sapiens
gtgtttaaaatcctc

SEQ ID NO: 123881 - DNA, 15 bp, Homo sapiens
tgtttaaaatcctct

SEQ ID NO: 123882 - DNA, 15 bp, Homo sapiens
gtttaaaatcctctt

SEQ ID NO: 123883 - DNA, 15 bp, Homo sapiens
tttaaaatcctctta

SEQ ID NO: 123884 - DNA, 15 bp, Homo sapiens
ttaaaatcctcttag

SEQ ID NO: 123885 - DNA, 15 bp, Homo sapiens
taaaatcctcttaga

SEQ ID NO: 123886 - DNA, 15 bp, Homo sapiens
aaaatcctcttagag

SEQ ID NO: 123887 - DNA, 15 bp, Homo sapiens
aaatcctcttagaga

SEQ ID NO: 123888 - DNA, 15 bp, Homo sapiens
aatcctcttagagaa

SEQ ID NO: 123889 - DNA, 15 bp, Homo sapiens
atcctcttagagaac

SEQ ID NO: 123890 - DNA, 15 bp, Homo sapiens
tcctcttagagaact

SEQ ID NO: 123891 - DNA, 15 bp, Homo sapiens
cctcttagagaactt

SEQ ID NO: 123892 - DNA, 15 bp, Homo sapiens
ctcttagagaactta

SEQ ID NO: 123893 - DNA, 15 bp, Homo sapiens
tcttagagaacttaa

SEQ ID NO: 123894 - DNA, 15 bp, Homo sapiens
cttagagaacttaaa

SEQ ID NO: 123895 - DNA, 15 bp, Homo sapiens
ttagagaacttaaat

SEQ ID NO: 123896 - DNA, 15 bp, Homo sapiens
tagagaacttaaata

SEQ ID NO: 123897 - DNA, 15 bp, Homo sapiens
agagaacttaaatat

SEQ ID NO: 123898 - DNA, 15 bp, Homo sapiens
gagaacttaaatata

SEQ ID NO: 123899 - DNA, 15 bp, Homo sapiens
agaacttaaatataa

SEQ ID NO: 123900 - DNA, 15 bp, Homo sapiens
gaacttaaatataat

SEQ ID NO: 123901 - DNA, 15 bp, Homo sapiens
aacttaaatataatc

SEQ ID NO: 123902 - DNA, 15 bp, Homo sapiens
acttaaatataatcc

SEQ ID NO: 123903 - DNA, 15 bp, Homo sapiens
cttaaatataatccc

SEQ ID NO: 123904 - DNA, 15 bp, Homo sapiens
ttaaatataatccct

SEQ ID NO: 123905 - DNA, 15 bp, Homo sapiens
taaatataatccctc

SEQ ID NO: 123906 - DNA, 15 bp, Homo sapiens
aaatataatccctca

SEQ ID NO: 123907 - DNA, 15 bp, Homo sapiens
aatataatccctcag

SEQ ID NO: 123908 - DNA, 15 bp, Homo sapiens
atataatccctcagc

SEQ ID NO: 123909 - DNA, 15 bp, Homo sapiens
tataatccctcagca

SEQ ID NO: 123910 - DNA, 15 bp, Homo sapiens
ataatccctcagcaa

SEQ ID NO: 123911 - DNA, 15 bp, Homo sapiens
taatccctcagcaat

SEQ ID NO: 123912 - DNA, 15 bp, Homo sapiens
aatccctcagcaata

SEQ ID NO: 123913 - DNA, 15 bp, Homo sapiens
atccctcagcaatat

SEQ ID NO: 123914 - DNA, 15 bp, Homo sapiens
tccctcagcaatatg

SEQ ID NO: 123915 - DNA, 15 bp, Homo sapiens
ccctcagcaatatgt

SEQ ID NO: 123916 - DNA, 15 bp, Homo sapiens
cctcagcaatatgta

SEQ ID NO: 123917 - DNA, 15 bp, Homo sapiens
ctcagcaatatgtat

SEQ ID NO: 123918 - DNA, 15 bp, Homo sapiens
tcagcaatatgtata

SEQ ID NO: 123919 - DNA, 15 bp, Homo sapiens
cagcaatatgtatac

SEQ ID NO: 123920 - DNA, 15 bp, Homo sapiens
agcaatatgtataca

SEQ ID NO: 123921 - DNA, 15 bp, Homo sapiens
gcaatatgtatacag

SEQ ID NO: 123922 - DNA, 15 bp, Homo sapiens
caatatgtatacaga

SEQ ID NO: 123923 - DNA, 15 bp, Homo sapiens
aatatgtatacagat

SEQ ID NO: 123924 - DNA, 15 bp, Homo sapiens
atatgtatacagatc

SEQ ID NO: 123925 - DNA, 15 bp, Homo sapiens
tatgtatacagatct

SEQ ID NO: 123926 - DNA, 15 bp, Homo sapiens
atgtatacagatctt

SEQ ID NO: 123927 - DNA, 15 bp, Homo sapiens
tgtatacagatcttc

SEQ ID NO: 123928 - DNA, 15 bp, Homo sapiens
gtatacagatcttcc

SEQ ID NO: 123929 - DNA, 15 bp, Homo sapiens
tatacagatcttcct

SEQ ID NO: 123930 - DNA, 15 bp, Homo sapiens
atacagatcttcctt

SEQ ID NO: 123931 - DNA, 15 bp, Homo sapiens
tacagatcttccttt

SEQ ID NO: 123932 - DNA, 15 bp, Homo sapiens
acagatcttcctttg

SEQ ID NO: 123933 - DNA, 15 bp, Homo sapiens
cagatcttcctttga

SEQ ID NO: 123934 - DNA, 15 bp, Homo sapiens
agatcttcctttgag

SEQ ID NO: 123935 - DNA, 15 bp, Homo sapiens
gatcttcctttgaga

SEQ ID NO: 123936 - DNA, 15 bp, Homo sapiens
atcttcctttgagaa

SEQ ID NO: 123937 - DNA, 15 bp, Homo sapiens
tcttcctttgagaaa

SEQ ID NO: 123938 - DNA, 15 bp, Homo sapiens
cttcctttgagaaaa

SEQ ID NO: 123939 - DNA, 15 bp, Homo sapiens
ttcctttgagaaaaa

SEQ ID NO: 123940 - DNA, 15 bp, Homo sapiens
tcctttgagaaaaac

SEQ ID NO: 123941 - DNA, 15 bp, Homo sapiens
cctttgagaaaaact

SEQ ID NO: 123942 - DNA, 15 bp, Homo sapiens
ctttgagaaaaactg

SEQ ID NO: 123943 - DNA, 15 bp, Homo sapiens
tttgagaaaaactga

SEQ ID NO: 123944 - DNA, 15 bp, Homo sapiens
ttgagaaaaactgat

SEQ ID NO: 123945 - DNA, 15 bp, Homo sapiens
tgagaaaaactgatt

SEQ ID NO: 123946 - DNA, 15 bp, Homo sapiens
gagaaaaactgattg

SEQ ID NO: 123947 - DNA, 15 bp, Homo sapiens
agaaaaactgattgt

SEQ ID NO: 123948 - DNA, 15 bp, Homo sapiens
gaaaaactgattgtg

SEQ ID NO: 123949 - DNA, 15 bp, Homo sapiens
aaaaactgattgtgt

SEQ ID NO: 123950 - DNA, 15 bp, Homo sapiens
aaaactgattgtgtt

SEQ ID NO: 123951 - DNA, 15 bp, Homo sapiens
aaactgattgtgttc

SEQ ID NO: 123952 - DNA, 15 bp, Homo sapiens
aactgattgtgttca

SEQ ID NO: 123953 - DNA, 15 bp, Homo sapiens
actgattgtgttcag

SEQ ID NO: 123954 - DNA, 15 bp, Homo sapiens
ctgattgtgttcagc

SEQ ID NO: 123955 - DNA, 15 bp, Homo sapiens
tgattgtgttcagcc

SEQ ID NO: 123956 - DNA, 15 bp, Homo sapiens
gattgtgttcagcct

SEQ ID NO: 123957 - DNA, 15 bp, Homo sapiens
attgtgttcagcctc

SEQ ID NO: 123958 - DNA, 15 bp, Homo sapiens
ttgtgttcagcctct

SEQ ID NO: 123959 - DNA, 15 bp, Homo sapiens
tgtgttcagcctctc

SEQ ID NO: 123960 - DNA, 15 bp, Homo sapiens
gtgttcagcctctca

SEQ ID NO: 123961 - DNA, 15 bp, Homo sapiens
tgttcagcctctcat

SEQ ID NO: 123962 - DNA, 15 bp, Homo sapiens
gttcagcctctcatg

SEQ ID NO: 123963 - DNA, 15 bp, Homo sapiens
ttcagcctctcatgt

SEQ ID NO: 123964 - DNA, 15 bp, Homo sapiens
tcagcctctcatgtt

SEQ ID NO: 123965 - DNA, 15 bp, Homo sapiens
cagcctctcatgtta

SEQ ID NO: 123966 - DNA, 15 bp, Homo sapiens
agcctctcatgttac

SEQ ID NO: 123967 - DNA, 15 bp, Homo sapiens
gcctctcatgttaca

SEQ ID NO: 123968 - DNA, 15 bp, Homo sapiens
cctctcatgttacaa

SEQ ID NO: 123969 - DNA, 15 bp, Homo sapiens
ctctcatgttacaaa

SEQ ID NO: 123970 - DNA, 15 bp, Homo sapiens
tctcatgttacaaat

SEQ ID NO: 123971 - DNA, 15 bp, Homo sapiens
ctcatgttacaaatg

SEQ ID NO: 123972 - DNA, 15 bp, Homo sapiens
tcatgttacaaatgg

SEQ ID NO: 123973 - DNA, 15 bp, Homo sapiens
catgttacaaatggg

SEQ ID NO: 123974 - DNA, 15 bp, Homo sapiens
atgttacaaatgggg

SEQ ID NO: 123975 - DNA, 15 bp, Homo sapiens
tgttacaaatgggga

SEQ ID NO: 123976 - DNA, 15 bp, Homo sapiens
gttacaaatggggaa

SEQ ID NO: 123977 - DNA, 15 bp, Homo sapiens
ttacaaatggggaac

SEQ ID NO: 123978 - DNA, 15 bp, Homo sapiens
tacaaatggggaacc

SEQ ID NO: 123979 - DNA, 15 bp, Homo sapiens
acaaatggggaacct

SEQ ID NO: 123980 - DNA, 15 bp, Homo sapiens
caaatggggaacctg

SEQ ID NO: 123981 - DNA, 15 bp, Homo sapiens
aaatggggaacctga

SEQ ID NO: 123982 - DNA, 15 bp, Homo sapiens
aatggggaacctgaa

SEQ ID NO: 123983 - DNA, 15 bp, Homo sapiens
atggggaacctgaat

SEQ ID NO: 123984 - DNA, 15 bp, Homo sapiens
tggggaacctgaatt

SEQ ID NO: 123985 - DNA, 15 bp, Homo sapiens
ggggaacctgaattc

SEQ ID NO: 123986 - DNA, 15 bp, Homo sapiens
gggaacctgaattct

SEQ ID NO: 123987 - DNA, 15 bp, Homo sapiens
ggaacctgaattctg

SEQ ID NO: 123988 - DNA, 15 bp, Homo sapiens
gaacctgaattctga

SEQ ID NO: 123989 - DNA, 15 bp, Homo sapiens
aacctgaattctgag

SEQ ID NO: 123990 - DNA, 15 bp, Homo sapiens
acctgaattctgagg

SEQ ID NO: 123991 - DNA, 15 bp, Homo sapiens
cctgaattctgaggt

SEQ ID NO: 123992 - DNA, 15 bp, Homo sapiens
ctgaattctgaggtc

SEQ ID NO: 123993 - DNA, 15 bp, Homo sapiens
tgaattctgaggtct

SEQ ID NO: 123994 - DNA, 15 bp, Homo sapiens
gaattctgaggtctc

SEQ ID NO: 123995 - DNA, 15 bp, Homo sapiens
aattctgaggtctct

SEQ ID NO: 123996 - DNA, 15 bp, Homo sapiens
attctgaggtctcta

SEQ ID NO: 123997 - DNA, 15 bp, Homo sapiens
ttctgaggtctctag

SEQ ID NO: 123998 - DNA, 15 bp, Homo sapiens
tctgaggtctctagt

SEQ ID NO: 123999 - DNA, 15 bp, Homo sapiens
ctgaggtctctagtg

SEQ ID NO: 124000 - DNA, 15 bp, Homo sapiens
tgaggtctctagtga

SEQ ID NO: 124001 - DNA, 15 bp, Homo sapiens
gaggtctctagtgag

SEQ ID NO: 124002 - DNA, 15 bp, Homo sapiens
aggtctctagtgaga

SEQ ID NO: 124003 - DNA, 15 bp, Homo sapiens
ggtctctagtgagag

SEQ ID NO: 124004 - DNA, 15 bp, Homo sapiens
gtctctagtgagaga

SEQ ID NO: 124005 - DNA, 15 bp, Homo sapiens
tctctagtgagagaa

SEQ ID NO: 124006 - DNA, 15 bp, Homo sapiens
ctctagtgagagaac

SEQ ID NO: 124007 - DNA, 15 bp, Homo sapiens
tctagtgagagaaca

SEQ ID NO: 124008 - DNA, 15 bp, Homo sapiens
ctagtgagagaacag

SEQ ID NO: 124009 - DNA, 15 bp, Homo sapiens
tagtgagagaacagg

SEQ ID NO: 124010 - DNA, 15 bp, Homo sapiens
agtgagagaacaggg

SEQ ID NO: 124011 - DNA, 15 bp, Homo sapiens
gtgagagaacaggga

SEQ ID NO: 124012 - DNA, 15 bp, Homo sapiens
tgagagaacagggac

SEQ ID NO: 124013 - DNA, 15 bp, Homo sapiens
gagagaacagggact

SEQ ID NO: 124014 - DNA, 15 bp, Homo sapiens
agagaacagggactg

SEQ ID NO: 124015 - DNA, 15 bp, Homo sapiens
gagaacagggactgg

SEQ ID NO: 124016 - DNA, 15 bp, Homo sapiens
agaacagggactgga

SEQ ID NO: 124017 - DNA, 15 bp, Homo sapiens
gaacagggactggaa

SEQ ID NO: 124018 - DNA, 15 bp, Homo sapiens
aacagggactggaat

SEQ ID NO: 124019 - DNA, 15 bp, Homo sapiens
acagggactggaatc

SEQ ID NO: 124020 - DNA, 15 bp, Homo sapiens
cagggactggaatct

SEQ ID NO: 124021 - DNA, 15 bp, Homo sapiens
agggactggaatctg

SEQ ID NO: 124022 - DNA, 15 bp, Homo sapiens
gggactggaatctgt

SEQ ID NO: 124023 - DNA, 15 bp, Homo sapiens
ggactggaatctgtg

SEQ ID NO: 124024 - DNA, 15 bp, Homo sapiens
gactggaatctgtgg

SEQ ID NO: 124025 - DNA, 15 bp, Homo sapiens
actggaatctgtgga

SEQ ID NO: 124026 - DNA, 15 bp, Homo sapiens
ctggaatctgtggat

SEQ ID NO: 124027 - DNA, 15 bp, Homo sapiens
tggaatctgtggatc

SEQ ID NO: 124028 - DNA, 15 bp, Homo sapiens
ggaatctgtggatcc

SEQ ID NO: 124029 - DNA, 15 bp, Homo sapiens
gaatctgtggatcct

SEQ ID NO: 124030 - DNA, 15 bp, Homo sapiens
aatctgtggatccta

SEQ ID NO: 124031 - DNA, 15 bp, Homo sapiens
atctgtggatcctat

SEQ ID NO: 124032 - DNA, 15 bp, Homo sapiens
tctgtggatcctatc

SEQ ID NO: 124033 - DNA, 15 bp, Homo sapiens
ctgtggatcctatct

SEQ ID NO: 124034 - DNA, 15 bp, Homo sapiens
tgtggatcctatctg

SEQ ID NO: 124035 - DNA, 15 bp, Homo sapiens
gtggatcctatctgt

SEQ ID NO: 124036 - DNA, 15 bp, Homo sapiens
tggatcctatctgtt

SEQ ID NO: 124037 - DNA, 15 bp, Homo sapiens
ggatcctatctgttt

SEQ ID NO: 124038 - DNA, 15 bp, Homo sapiens
gatcctatctgtttt

SEQ ID NO: 124039 - DNA, 15 bp, Homo sapiens
atcctatctgtttta

SEQ ID NO: 124040 - DNA, 15 bp, Homo sapiens
tcctatctgttttaa

SEQ ID NO: 124041 - DNA, 15 bp, Homo sapiens
cctatctgttttaat

SEQ ID NO: 124042 - DNA, 15 bp, Homo sapiens
ctatctgttttaata

SEQ ID NO: 124043 - DNA, 15 bp, Homo sapiens
tatctgttttaataa

SEQ ID NO: 124044 - DNA, 15 bp, Homo sapiens
atctgttttaataat

SEQ ID NO: 124045 - DNA, 15 bp, Homo sapiens
tctgttttaataata

SEQ ID NO: 124046 - DNA, 15 bp, Homo sapiens
ctgttttaataataa

SEQ ID NO: 124047 - DNA, 15 bp, Homo sapiens
tgttttaataataat

SEQ ID NO: 124048 - DNA, 15 bp, Homo sapiens
gttttaataataatt

SEQ ID NO: 124049 - DNA, 15 bp, Homo sapiens
ttttaataataattg

SEQ ID NO: 124050 - DNA, 15 bp, Homo sapiens
tttaataataattgt

SEQ ID NO: 124051 - DNA, 15 bp, Homo sapiens
ttaataataattgta

SEQ ID NO: 124052 - DNA, 15 bp, Homo sapiens
taataataattgtaa

SEQ ID NO: 124053 - DNA, 15 bp, Homo sapiens
aataataattgtaaa

SEQ ID NO: 124054 - DNA, 15 bp, Homo sapiens
ataataattgtaaag

SEQ ID NO: 124055 - DNA, 15 bp, Homo sapiens
taataattgtaaagt

SEQ ID NO: 124056 - DNA, 15 bp, Homo sapiens
aataattgtaaagta

SEQ ID NO: 124057 - DNA, 15 bp, Homo sapiens
ataattgtaaagtat

SEQ ID NO: 124058 - DNA, 15 bp, Homo sapiens
taattgtaaagtata

SEQ ID NO: 124059 - DNA, 15 bp, Homo sapiens
aattgtaaagtataa

SEQ ID NO: 124060 - DNA, 15 bp, Homo sapiens
attgtaaagtataat

SEQ ID NO: 124061 - DNA, 15 bp, Homo sapiens
ttgtaaagtataata

SEQ ID NO: 124062 - DNA, 15 bp, Homo sapiens
tgtaaagtataatag

SEQ ID NO: 124063 - DNA, 15 bp, Homo sapiens
gtaaagtataataga

SEQ ID NO: 124064 - DNA, 15 bp, Homo sapiens
taaagtataatagat

SEQ ID NO: 124065 - DNA, 15 bp, Homo sapiens
aaagtataatagata

SEQ ID NO: 124066 - DNA, 15 bp, Homo sapiens
aagtataatagataa

SEQ ID NO: 124067 - DNA, 15 bp, Homo sapiens
agtataatagataat

SEQ ID NO: 124068 - DNA, 15 bp, Homo sapiens
gtataatagataata

SEQ ID NO: 124069 - DNA, 15 bp, Homo sapiens
tataatagataatat

SEQ ID NO: 124070 - DNA, 15 bp, Homo sapiens
ataatagataatatt

SEQ ID NO: 124071 - DNA, 15 bp, Homo sapiens
taatagataatatta

SEQ ID NO: 124072 - DNA, 15 bp, Homo sapiens
aatagataatattat

SEQ ID NO: 124073 - DNA, 15 bp, Homo sapiens
atagataatattata

SEQ ID NO: 124074 - DNA, 15 bp, Homo sapiens
tagataatattatat

SEQ ID NO: 124075 - DNA, 15 bp, Homo sapiens
agataatattatatt

SEQ ID NO: 124076 - DNA, 15 bp, Homo sapiens
gataatattatatta

SEQ ID NO: 124077 - DNA, 15 bp, Homo sapiens
ataatattatattaa

SEQ ID NO: 124078 - DNA, 15 bp, Homo sapiens
taatattatattaat

SEQ ID NO: 124079 - DNA, 15 bp, Homo sapiens
aatattatattaata

SEQ ID NO: 124080 - DNA, 15 bp, Homo sapiens
atattatattaataa

SEQ ID NO: 124081 - DNA, 15 bp, Homo sapiens
tattatattaataaa

SEQ ID NO: 124082 - DNA, 15 bp, Homo sapiens
attatattaataaaa

SEQ ID NO: 124083 - DNA, 15 bp, Homo sapiens
ttatattaataaaat

SEQ ID NO: 124084 - DNA, 15 bp, Homo sapiens
tatattaataaaata

SEQ ID NO: 124085 - DNA, 15 bp, Homo sapiens
atattaataaaataa

SEQ ID NO: 124086 - DNA, 15 bp, Homo sapiens
tattaataaaataaa

SEQ ID NO: 124087 - DNA, 15 bp, Homo sapiens
attaataaaataaaa

SEQ ID NO: 124088 - DNA, 15 bp, Homo sapiens
ttaataaaataaaag

SEQ ID NO: 124089 - DNA, 15 bp, Homo sapiens
taataaaataaaagc

SEQ ID NO: 124090 - DNA, 15 bp, Homo sapiens
aataaaataaaagca

SEQ ID NO: 124091 - DNA, 15 bp, Homo sapiens
ataaaataaaagcaa

SEQ ID NO: 124092 - DNA, 15 bp, Homo sapiens
taaaataaaagcaaa

SEQ ID NO: 124093 - DNA, 15 bp, Homo sapiens
aaaataaaagcaaac

SEQ ID NO: 124094 - DNA, 15 bp, Homo sapiens
aaataaaagcaaaca

SEQ ID NO: 124095 - DNA, 15 bp, Homo sapiens
aataaaagcaaacac

SEQ ID NO: 124096 - DNA, 15 bp, Homo sapiens
ataaaagcaaacact

SEQ ID NO: 124097 - DNA, 15 bp, Homo sapiens
taaaagcaaacactt

SEQ ID NO: 124098 - DNA, 15 bp, Homo sapiens
aaaagcaaacactta

SEQ ID NO: 124099 - DNA, 15 bp, Homo sapiens
aaagcaaacacttag

SEQ ID NO: 124100 - DNA, 15 bp, Homo sapiens
aagcaaacacttaga

SEQ ID NO: 124101 - DNA, 15 bp, Homo sapiens
agcaaacacttagaa

SEQ ID NO: 124102 - DNA, 15 bp, Homo sapiens
gcaaacacttagaat

SEQ ID NO: 124103 - DNA, 15 bp, Homo sapiens
caaacacttagaatg

SEQ ID NO: 124104 - DNA, 15 bp, Homo sapiens
aaacacttagaatga

SEQ ID NO: 124105 - DNA, 15 bp, Homo sapiens
aacacttagaatgag

SEQ ID NO: 124106 - DNA, 15 bp, Homo sapiens
acacttagaatgagc

SEQ ID NO: 124107 - DNA, 15 bp, Homo sapiens
cacttagaatgagct

SEQ ID NO: 124108 - DNA, 15 bp, Homo sapiens
acttagaatgagctt

SEQ ID NO: 124109 - DNA, 15 bp, Homo sapiens
cttagaatgagcttc

SEQ ID NO: 124110 - DNA, 15 bp, Homo sapiens
ttagaatgagcttcc

SEQ ID NO: 124111 - DNA, 15 bp, Homo sapiens
tagaatgagcttcca

SEQ ID NO: 124112 - DNA, 15 bp, Homo sapiens
agaatgagcttccat

SEQ ID NO: 124113 - DNA, 15 bp, Homo sapiens
gaatgagcttccatg

SEQ ID NO: 124114 - DNA, 15 bp, Homo sapiens
aatgagcttccatgt

SEQ ID NO: 124115 - DNA, 15 bp, Homo sapiens
atgagcttccatgtg

SEQ ID NO: 124116 - DNA, 15 bp, Homo sapiens
tgagcttccatgtgt

SEQ ID NO: 124117 - DNA, 15 bp, Homo sapiens
gagcttccatgtgtg

SEQ ID NO: 124118 - DNA, 15 bp, Homo sapiens
agcttccatgtgtga

SEQ ID NO: 124119 - DNA, 15 bp, Homo sapiens
gcttccatgtgtgag

SEQ ID NO: 124120 - DNA, 15 bp, Homo sapiens
cttccatgtgtgagg

SEQ ID NO: 124121 - DNA, 15 bp, Homo sapiens
ttccatgtgtgaggc

SEQ ID NO: 124122 - DNA, 15 bp, Homo sapiens
tccatgtgtgaggca

SEQ ID NO: 124123 - DNA, 15 bp, Homo sapiens
ccatgtgtgaggcac

SEQ ID NO: 124124 - DNA, 15 bp, Homo sapiens
catgtgtgaggcact

SEQ ID NO: 124125 - DNA, 15 bp, Homo sapiens
atgtgtgaggcacta

SEQ ID NO: 124126 - DNA, 15 bp, Homo sapiens
tgtgtgaggcactaa

SEQ ID NO: 124127 - DNA, 15 bp, Homo sapiens
gtgtgaggcactaac

SEQ ID NO: 124128 - DNA, 15 bp, Homo sapiens
tgtgaggcactaact

SEQ ID NO: 124129 - DNA, 15 bp, Homo sapiens
gtgaggcactaactg

SEQ ID NO: 124130 - DNA, 15 bp, Homo sapiens
tgaggcactaactga

SEQ ID NO: 124131 - DNA, 15 bp, Homo sapiens
gaggcactaactgat

SEQ ID NO: 124132 - DNA, 15 bp, Homo sapiens
aggcactaactgatt

SEQ ID NO: 124133 - DNA, 15 bp, Homo sapiens
ggcactaactgatta

SEQ ID NO: 124134 - DNA, 15 bp, Homo sapiens
gcactaactgattag

SEQ ID NO: 124135 - DNA, 15 bp, Homo sapiens
cactaactgattagg

SEQ ID NO: 124136 - DNA, 15 bp, Homo sapiens
actaactgattaggc

SEQ ID NO: 124137 - DNA, 15 bp, Homo sapiens
ctaactgattaggca

SEQ ID NO: 124138 - DNA, 15 bp, Homo sapiens
taactgattaggcat

SEQ ID NO: 124139 - DNA, 15 bp, Homo sapiens
aactgattaggcatt

SEQ ID NO: 124140 - DNA, 15 bp, Homo sapiens
actgattaggcatta

SEQ ID NO: 124141 - DNA, 15 bp, Homo sapiens
ctgattaggcattat

SEQ ID NO: 124142 - DNA, 15 bp, Homo sapiens
tgattaggcattatt

SEQ ID NO: 124143 - DNA, 15 bp, Homo sapiens
gattaggcattatta

SEQ ID NO: 124144 - DNA, 15 bp, Homo sapiens
attaggcattattaa

SEQ ID NO: 124145 - DNA, 15 bp, Homo sapiens
ttaggcattattaac

SEQ ID NO: 124146 - DNA, 15 bp, Homo sapiens
taggcattattaact

SEQ ID NO: 124147 - DNA, 15 bp, Homo sapiens
aggcattattaacta

SEQ ID NO: 124148 - DNA, 15 bp, Homo sapiens
ggcattattaactag

SEQ ID NO: 124149 - DNA, 15 bp, Homo sapiens
gcattattaactaga

SEQ ID NO: 124150 - DNA, 15 bp, Homo sapiens
cattattaactagat

SEQ ID NO: 124151 - DNA, 15 bp, Homo sapiens
attattaactagatt

SEQ ID NO: 124152 - DNA, 15 bp, Homo sapiens
ttattaactagattt

SEQ ID NO: 124153 - DNA, 15 bp, Homo sapiens
tattaactagattta

SEQ ID NO: 124154 - DNA, 15 bp, Homo sapiens
attaactagatttat

SEQ ID NO: 124155 - DNA, 15 bp, Homo sapiens
ttaactagatttatt

SEQ ID NO: 124156 - DNA, 15 bp, Homo sapiens
taactagatttattc

SEQ ID NO: 124157 - DNA, 15 bp, Homo sapiens
aactagatttattcc

SEQ ID NO: 124158 - DNA, 15 bp, Homo sapiens
actagatttattcct

SEQ ID NO: 124159 - DNA, 15 bp, Homo sapiens
ctagatttattcctt

SEQ ID NO: 124160 - DNA, 15 bp, Homo sapiens
tagatttattccttt

SEQ ID NO: 124161 - DNA, 15 bp, Homo sapiens
agatttattcctttt

SEQ ID NO: 124162 - DNA, 15 bp, Homo sapiens
gatttattcctttta

SEQ ID NO: 124163 - DNA, 15 bp, Homo sapiens
atttattccttttaa

SEQ ID NO: 124164 - DNA, 15 bp, Homo sapiens
tttattccttttaag

SEQ ID NO: 124165 - DNA, 15 bp, Homo sapiens
ttattccttttaagg

SEQ ID NO: 124166 - DNA, 15 bp, Homo sapiens
tattccttttaaggc

SEQ ID NO: 124167 - DNA, 15 bp, Homo sapiens
attccttttaaggcc

SEQ ID NO: 124168 - DNA, 15 bp, Homo sapiens
ttccttttaaggccc

SEQ ID NO: 124169 - DNA, 15 bp, Homo sapiens
tccttttaaggcccc

SEQ ID NO: 124170 - DNA, 15 bp, Homo sapiens
ccttttaaggccccg

SEQ ID NO: 124171 - DNA, 15 bp, Homo sapiens
cttttaaggccccgc

SEQ ID NO: 124172 - DNA, 15 bp, Homo sapiens
ttttaaggccccgcg

SEQ ID NO: 124173 - DNA, 15 bp, Homo sapiens
tttaaggccccgcga

SEQ ID NO: 124174 - DNA, 15 bp, Homo sapiens
ttaaggccccgcgat

SEQ ID NO: 124175 - DNA, 15 bp, Homo sapiens
taaggccccgcgatg

SEQ ID NO: 124176 - DNA, 15 bp, Homo sapiens
aaggccccgcgatgt

SEQ ID NO: 124177 - DNA, 15 bp, Homo sapiens
aggccccgcgatgta

SEQ ID NO: 124178 - DNA, 15 bp, Homo sapiens
ggccccgcgatgtac

SEQ ID NO: 124179 - DNA, 15 bp, Homo sapiens
gccccgcgatgtact

SEQ ID NO: 124180 - DNA, 15 bp, Homo sapiens
ccccgcgatgtactg

SEQ ID NO: 124181 - DNA, 15 bp, Homo sapiens
cccgcgatgtactgt

SEQ ID NO: 124182 - DNA, 15 bp, Homo sapiens
ccgcgatgtactgtt

SEQ ID NO: 124183 - DNA, 15 bp, Homo sapiens
cgcgatgtactgtta

SEQ ID NO: 124184 - DNA, 15 bp, Homo sapiens
gcgatgtactgttat

SEQ ID NO: 124185 - DNA, 15 bp, Homo sapiens
cgatgtactgttatt

SEQ ID NO: 124186 - DNA, 15 bp, Homo sapiens
gatgtactgttattt

SEQ ID NO: 124187 - DNA, 15 bp, Homo sapiens
atgtactgttatttc

SEQ ID NO: 124188 - DNA, 15 bp, Homo sapiens
tgtactgttatttcc

SEQ ID NO: 124189 - DNA, 15 bp, Homo sapiens
gtactgttatttcca

SEQ ID NO: 124190 - DNA, 15 bp, Homo sapiens
tactgttatttccac

SEQ ID NO: 124191 - DNA, 15 bp, Homo sapiens
actgttatttccaca

SEQ ID NO: 124192 - DNA, 15 bp, Homo sapiens
ctgttatttccacat

SEQ ID NO: 124193 - DNA, 15 bp, Homo sapiens
tgttatttccacatg

SEQ ID NO: 124194 - DNA, 15 bp, Homo sapiens
gttatttccacatgt

SEQ ID NO: 124195 - DNA, 15 bp, Homo sapiens
ttatttccacatgtt

SEQ ID NO: 124196 - DNA, 15 bp, Homo sapiens
tatttccacatgttg

SEQ ID NO: 124197 - DNA, 15 bp, Homo sapiens
atttccacatgttgt

SEQ ID NO: 124198 - DNA, 15 bp, Homo sapiens
tttccacatgttgta

SEQ ID NO: 124199 - DNA, 15 bp, Homo sapiens
ttccacatgttgtag

SEQ ID NO: 124200 - DNA, 15 bp, Homo sapiens
tccacatgttgtagc

SEQ ID NO: 124201 - DNA, 15 bp, Homo sapiens
ccacatgttgtagct

SEQ ID NO: 124202 - DNA, 15 bp, Homo sapiens
cacatgttgtagctg

SEQ ID NO: 124203 - DNA, 15 bp, Homo sapiens
acatgttgtagctgg

SEQ ID NO: 124204 - DNA, 15 bp, Homo sapiens
catgttgtagctggg

SEQ ID NO: 124205 - DNA, 15 bp, Homo sapiens
atgttgtagctgggg

SEQ ID NO: 124206 - DNA, 15 bp, Homo sapiens
tgttgtagctgggga

SEQ ID NO: 124207 - DNA, 15 bp, Homo sapiens
gttgtagctggggaa

SEQ ID NO: 124208 - DNA, 15 bp, Homo sapiens
ttgtagctggggaac

SEQ ID NO: 124209 - DNA, 15 bp, Homo sapiens
tgtagctggggaacg

SEQ ID NO: 124210 - DNA, 15 bp, Homo sapiens
gtagctggggaacgt

SEQ ID NO: 124211 - DNA, 15 bp, Homo sapiens
tagctggggaacgtg

SEQ ID NO: 124212 - DNA, 15 bp, Homo sapiens
agctggggaacgtgc

SEQ ID NO: 124213 - DNA, 15 bp, Homo sapiens
gctggggaacgtgct

SEQ ID NO: 124214 - DNA, 15 bp, Homo sapiens
ctggggaacgtgcta

SEQ ID NO: 124215 - DNA, 15 bp, Homo sapiens
tggggaacgtgctac

SEQ ID NO: 124216 - DNA, 15 bp, Homo sapiens
ggggaacgtgctact

SEQ ID NO: 124217 - DNA, 15 bp, Homo sapiens
gggaacgtgctactc

SEQ ID NO: 124218 - DNA, 15 bp, Homo sapiens
ggaacgtgctactca

SEQ ID NO: 124219 - DNA, 15 bp, Homo sapiens
gaacgtgctactcag

SEQ ID NO: 124220 - DNA, 15 bp, Homo sapiens
aacgtgctactcaga

SEQ ID NO: 124221 - DNA, 15 bp, Homo sapiens
acgtgctactcagag

SEQ ID NO: 124222 - DNA, 15 bp, Homo sapiens
cgtgctactcagaga

SEQ ID NO: 124223 - DNA, 15 bp, Homo sapiens
gtgctactcagagag

SEQ ID NO: 124224 - DNA, 15 bp, Homo sapiens
tgctactcagagagg

SEQ ID NO: 124225 - DNA, 15 bp, Homo sapiens
gctactcagagaggt

SEQ ID NO: 124226 - DNA, 15 bp, Homo sapiens
ctactcagagaggtt

SEQ ID NO: 124227 - DNA, 15 bp, Homo sapiens
tactcagagaggtta

SEQ ID NO: 124228 - DNA, 15 bp, Homo sapiens
actcagagaggttaa

SEQ ID NO: 124229 - DNA, 15 bp, Homo sapiens
ctcagagaggttaag

SEQ ID NO: 124230 - DNA, 15 bp, Homo sapiens
cagagaggttaagta

SEQ ID NO: 124231 - DNA, 15 bp, Homo sapiens
agagaggttaagtaa

SEQ ID NO: 124232 - DNA, 15 bp, Homo sapiens
gagaggttaagtaac

SEQ ID NO: 124233 - DNA, 15 bp, Homo sapiens
agaggttaagtaact

SEQ ID NO: 124234 - DNA, 15 bp, Homo sapiens
gaggttaagtaactt

SEQ ID NO: 124235 - DNA, 15 bp, Homo sapiens
aggttaagtaacttg

SEQ ID NO: 124236 - DNA, 15 bp, Homo sapiens
ggttaagtaacttgt

SEQ ID NO: 124237 - DNA, 15 bp, Homo sapiens
gttaagtaacttgtc

SEQ ID NO: 124238 - DNA, 15 bp, Homo sapiens
ttaagtaacttgtct

SEQ ID NO: 124239 - DNA, 15 bp, Homo sapiens
taagtaacttgtctg

SEQ ID NO: 124240 - DNA, 15 bp, Homo sapiens
aagtaacttgtctga

SEQ ID NO: 124241 - DNA, 15 bp, Homo sapiens
agtaacttgtctgag

SEQ ID NO: 124242 - DNA, 15 bp, Homo sapiens
gtaacttgtctgagg

SEQ ID NO: 124243 - DNA, 15 bp, Homo sapiens
taacttgtctgaggt

SEQ ID NO: 124244 - DNA, 15 bp, Homo sapiens
aacttgtctgaggtc

SEQ ID NO: 124245 - DNA, 15 bp, Homo sapiens
acttgtctgaggtcc

SEQ ID NO: 124246 - DNA, 15 bp, Homo sapiens
cttgtctgaggtcca

SEQ ID NO: 124247 - DNA, 15 bp, Homo sapiens
ttgtctgaggtccac

SEQ ID NO: 124248 - DNA, 15 bp, Homo sapiens
tgtctgaggtccaca

SEQ ID NO: 124249 - DNA, 15 bp, Homo sapiens
gtctgaggtccacac

SEQ ID NO: 124250 - DNA, 15 bp, Homo sapiens
tctgaggtccacacc

SEQ ID NO: 124251 - DNA, 15 bp, Homo sapiens
ctgaggtccacacca

SEQ ID NO: 124252 - DNA, 15 bp, Homo sapiens
tgaggtccacaccac

SEQ ID NO: 124253 - DNA, 15 bp, Homo sapiens
gaggtccacaccact

SEQ ID NO: 124254 - DNA, 15 bp, Homo sapiens
aggtccacaccacta

SEQ ID NO: 124255 - DNA, 15 bp, Homo sapiens
ggtccacaccactaa

SEQ ID NO: 124256 - DNA, 15 bp, Homo sapiens
gtccacaccactaac

SEQ ID NO: 124257 - DNA, 15 bp, Homo sapiens
tccacaccactaaca

SEQ ID NO: 124258 - DNA, 15 bp, Homo sapiens
ccacaccactaacaa

SEQ ID NO: 124259 - DNA, 15 bp, Homo sapiens
cacaccactaacaag

SEQ ID NO: 124260 - DNA, 15 bp, Homo sapiens
acaccactaacaagg

SEQ ID NO: 124261 - DNA, 15 bp, Homo sapiens
caccactaacaagga

SEQ ID NO: 124262 - DNA, 15 bp, Homo sapiens
accactaacaaggag

SEQ ID NO: 124263 - DNA, 15 bp, Homo sapiens
ccactaacaaggagc

SEQ ID NO: 124264 - DNA, 15 bp, Homo sapiens
cactaacaaggagca

SEQ ID NO: 124265 - DNA, 15 bp, Homo sapiens
actaacaaggagcac

SEQ ID NO: 124266 - DNA, 15 bp, Homo sapiens
ctaacaaggagcaca

SEQ ID NO: 124267 - DNA, 15 bp, Homo sapiens
taacaaggagcacag

SEQ ID NO: 124268 - DNA, 15 bp, Homo sapiens
aacaaggagcacagg

SEQ ID NO: 124269 - DNA, 15 bp, Homo sapiens
acaaggagcacaggt

SEQ ID NO: 124270 - DNA, 15 bp, Homo sapiens
caaggagcacaggta

SEQ ID NO: 124271 - DNA, 15 bp, Homo sapiens
aaggagcacaggtag

SEQ ID NO: 124272 - DNA, 15 bp, Homo sapiens
aggagcacaggtagg

SEQ ID NO: 124273 - DNA, 15 bp, Homo sapiens
ggagcacaggtaggg

SEQ ID NO: 124274 - DNA, 15 bp, Homo sapiens
gagcacaggtagggt

SEQ ID NO: 124275 - DNA, 15 bp, Homo sapiens
agcacaggtagggtt

SEQ ID NO: 124276 - DNA, 15 bp, Homo sapiens
gcacaggtagggttc

SEQ ID NO: 124277 - DNA, 15 bp, Homo sapiens
cacaggtagggttca

SEQ ID NO: 124278 - DNA, 15 bp, Homo sapiens
acaggtagggttcaa

SEQ ID NO: 124279 - DNA, 15 bp, Homo sapiens
caggtagggttcaaa

SEQ ID NO: 124280 - DNA, 15 bp, Homo sapiens
aggtagggttcaaat

SEQ ID NO: 124281 - DNA, 15 bp, Homo sapiens
ggtagggttcaaatc

SEQ ID NO: 124282 - DNA, 15 bp, Homo sapiens
gtagggttcaaatcc

SEQ ID NO: 124283 - DNA, 15 bp, Homo sapiens
tagggttcaaatcca

SEQ ID NO: 124284 - DNA, 15 bp, Homo sapiens
agggttcaaatccag

SEQ ID NO: 124285 - DNA, 15 bp, Homo sapiens
gggttcaaatccaga

SEQ ID NO: 124286 - DNA, 15 bp, Homo sapiens
ggttcaaatccagat

SEQ ID NO: 124287 - DNA, 15 bp, Homo sapiens
gttcaaatccagata

SEQ ID NO: 124288 - DNA, 15 bp, Homo sapiens
ttcaaatccagataa

SEQ ID NO: 124289 - DNA, 15 bp, Homo sapiens
tcaaatccagataat

SEQ ID NO: 124290 - DNA, 15 bp, Homo sapiens
caaatccagataatc

SEQ ID NO: 124291 - DNA, 15 bp, Homo sapiens
aaatccagataatct

SEQ ID NO: 124292 - DNA, 15 bp, Homo sapiens
aatccagataatctg

SEQ ID NO: 124293 - DNA, 15 bp, Homo sapiens
atccagataatctga

SEQ ID NO: 124294 - DNA, 15 bp, Homo sapiens
tccagataatctgac

SEQ ID NO: 124295 - DNA, 15 bp, Homo sapiens
ccagataatctgact

SEQ ID NO: 124296 - DNA, 15 bp, Homo sapiens
cagataatctgactt

SEQ ID NO: 124297 - DNA, 15 bp, Homo sapiens
agataatctgacttt

SEQ ID NO: 124298 - DNA, 15 bp, Homo sapiens
gataatctgactttg

SEQ ID NO: 124299 - DNA, 15 bp, Homo sapiens
ataatctgactttgg

SEQ ID NO: 124300 - DNA, 15 bp, Homo sapiens
taatctgactttgga

SEQ ID NO: 124301 - DNA, 15 bp, Homo sapiens
aatctgactttggag

SEQ ID NO: 124302 - DNA, 15 bp, Homo sapiens
atctgactttggagc

SEQ ID NO: 124303 - DNA, 15 bp, Homo sapiens
tctgactttggagct

SEQ ID NO: 124304 - DNA, 15 bp, Homo sapiens
ctgactttggagctg

SEQ ID NO: 124305 - DNA, 15 bp, Homo sapiens
tgactttggagctgg

SEQ ID NO: 124306 - DNA, 15 bp, Homo sapiens
gactttggagctggc

SEQ ID NO: 124307 - DNA, 15 bp, Homo sapiens
actttggagctggca

SEQ ID NO: 124308 - DNA, 15 bp, Homo sapiens
ctttggagctggcac

SEQ ID NO: 124309 - DNA, 15 bp, Homo sapiens
tttggagctggcact

SEQ ID NO: 124310 - DNA, 15 bp, Homo sapiens
ttggagctggcactc

SEQ ID NO: 124311 - DNA, 15 bp, Homo sapiens
tggagctggcactct

SEQ ID NO: 124312 - DNA, 15 bp, Homo sapiens
ggagctggcactcta

SEQ ID NO: 124313 - DNA, 15 bp, Homo sapiens
gagctggcactctaa

SEQ ID NO: 124314 - DNA, 15 bp, Homo sapiens
agctggcactctaac

SEQ ID NO: 124315 - DNA, 15 bp, Homo sapiens
gctggcactctaact

SEQ ID NO: 124316 - DNA, 15 bp, Homo sapiens
ctggcactctaactc

SEQ ID NO: 124317 - DNA, 15 bp, Homo sapiens
tggcactctaactca

SEQ ID NO: 124318 - DNA, 15 bp, Homo sapiens
ggcactctaactcaa

SEQ ID NO: 124319 - DNA, 15 bp, Homo sapiens
gcactctaactcaat

SEQ ID NO: 124320 - DNA, 15 bp, Homo sapiens
cactctaactcaatg

SEQ ID NO: 124321 - DNA, 15 bp, Homo sapiens
actctaactcaatgt

SEQ ID NO: 124322 - DNA, 15 bp, Homo sapiens
ctctaactcaatgtg

SEQ ID NO: 124323 - DNA, 15 bp, Homo sapiens
tctaactcaatgtgc

SEQ ID NO: 124324 - DNA, 15 bp, Homo sapiens
ctaactcaatgtgcc

SEQ ID NO: 124325 - DNA, 15 bp, Homo sapiens
taactcaatgtgcct

SEQ ID NO: 124326 - DNA, 15 bp, Homo sapiens
aactcaatgtgccta

SEQ ID NO: 124327 - DNA, 15 bp, Homo sapiens
actcaatgtgcctaa

SEQ ID NO: 124328 - DNA, 15 bp, Homo sapiens
ctcaatgtgcctaat

SEQ ID NO: 124329 - DNA, 15 bp, Homo sapiens
tcaatgtgcctaatc

SEQ ID NO: 124330 - DNA, 15 bp, Homo sapiens
caatgtgcctaatcg

SEQ ID NO: 124331 - DNA, 15 bp, Homo sapiens
aatgtgcctaatcgc

SEQ ID NO: 124332 - DNA, 15 bp, Homo sapiens
atgtgcctaatcgct

SEQ ID NO: 124333 - DNA, 15 bp, Homo sapiens
tgtgcctaatcgctt

SEQ ID NO: 124334 - DNA, 15 bp, Homo sapiens
gtgcctaatcgcttt

SEQ ID NO: 124335 - DNA, 15 bp, Homo sapiens
tgcctaatcgctttt

SEQ ID NO: 124336 - DNA, 15 bp, Homo sapiens
gcctaatcgcttttc

SEQ ID NO: 124337 - DNA, 15 bp, Homo sapiens
cctaatcgcttttca

SEQ ID NO: 124338 - DNA, 15 bp, Homo sapiens
ctaatcgcttttcag

SEQ ID NO: 124339 - DNA, 15 bp, Homo sapiens
taatcgcttttcagt

SEQ ID NO: 124340 - DNA, 15 bp, Homo sapiens
aatcgcttttcagtg

SEQ ID NO: 124341 - DNA, 15 bp, Homo sapiens
atcgcttttcagtgg

SEQ ID NO: 124342 - DNA, 15 bp, Homo sapiens
tcgcttttcagtggt

SEQ ID NO: 124343 - DNA, 15 bp, Homo sapiens
cgcttttcagtggtg

SEQ ID NO: 124344 - DNA, 15 bp, Homo sapiens
gcttttcagtggtgt

SEQ ID NO: 124345 - DNA, 15 bp, Homo sapiens
cttttcagtggtgtc

SEQ ID NO: 124346 - DNA, 15 bp, Homo sapiens
ttttcagtggtgtca

SEQ ID NO: 124347 - DNA, 15 bp, Homo sapiens
tttcagtggtgtcat

SEQ ID NO: 124348 - DNA, 15 bp, Homo sapiens
ttcagtggtgtcatt

SEQ ID NO: 124349 - DNA, 15 bp, Homo sapiens
tcagtggtgtcatta

SEQ ID NO: 124350 - DNA, 15 bp, Homo sapiens
cagtggtgtcattat

SEQ ID NO: 124351 - DNA, 15 bp, Homo sapiens
agtggtgtcattatt

SEQ ID NO: 124352 - DNA, 15 bp, Homo sapiens
gtggtgtcattattt

SEQ ID NO: 124353 - DNA, 15 bp, Homo sapiens
tggtgtcattatttt

SEQ ID NO: 124354 - DNA, 15 bp, Homo sapiens
ggtgtcattattttg

SEQ ID NO: 124355 - DNA, 15 bp, Homo sapiens
gtgtcattattttgc

SEQ ID NO: 124356 - DNA, 15 bp, Homo sapiens
tgtcattattttgcc

SEQ ID NO: 124357 - DNA, 15 bp, Homo sapiens
gtcattattttgcct

SEQ ID NO: 124358 - DNA, 15 bp, Homo sapiens
tcattattttgccta

SEQ ID NO: 124359 - DNA, 15 bp, Homo sapiens
cattattttgcctat

SEQ ID NO: 124360 - DNA, 15 bp, Homo sapiens
attattttgcctatt

SEQ ID NO: 124361 - DNA, 15 bp, Homo sapiens
ttattttgcctattc

SEQ ID NO: 124362 - DNA, 15 bp, Homo sapiens
tattttgcctattct

SEQ ID NO: 124363 - DNA, 15 bp, Homo sapiens
attttgcctattctc

SEQ ID NO: 124364 - DNA, 15 bp, Homo sapiens
ttttgcctattctcc

SEQ ID NO: 124365 - DNA, 15 bp, Homo sapiens
tttgcctattctcca

SEQ ID NO: 124366 - DNA, 15 bp, Homo sapiens
ttgcctattctccat

SEQ ID NO: 124367 - DNA, 15 bp, Homo sapiens
tgcctattctccatc

SEQ ID NO: 124368 - DNA, 15 bp, Homo sapiens
gcctattctccatct

SEQ ID NO: 124369 - DNA, 15 bp, Homo sapiens
cctattctccatctg

SEQ ID NO: 124370 - DNA, 15 bp, Homo sapiens
ctattctccatctga

SEQ ID NO: 124371 - DNA, 15 bp, Homo sapiens
tattctccatctgag

SEQ ID NO: 124372 - DNA, 15 bp, Homo sapiens
attctccatctgaga

SEQ ID NO: 124373 - DNA, 15 bp, Homo sapiens
ttctccatctgagaa

SEQ ID NO: 124374 - DNA, 15 bp, Homo sapiens
tctccatctgagaat

SEQ ID NO: 124375 - DNA, 15 bp, Homo sapiens
ctccatctgagaata

SEQ ID NO: 124376 - DNA, 15 bp, Homo sapiens
tccatctgagaatat

SEQ ID NO: 124377 - DNA, 15 bp, Homo sapiens
ccatctgagaatatt

SEQ ID NO: 124378 - DNA, 15 bp, Homo sapiens
catctgagaatattg

SEQ ID NO: 124379 - DNA, 15 bp, Homo sapiens
atctgagaatattga

SEQ ID NO: 124380 - DNA, 15 bp, Homo sapiens
tctgagaatattgaa

SEQ ID NO: 124381 - DNA, 15 bp, Homo sapiens
ctgagaatattgaag

SEQ ID NO: 124382 - DNA, 15 bp, Homo sapiens
tgagaatattgaagt

SEQ ID NO: 124383 - DNA, 15 bp, Homo sapiens
gagaatattgaagtt

SEQ ID NO: 124384 - DNA, 15 bp, Homo sapiens
agaatattgaagttt

SEQ ID NO: 124385 - DNA, 15 bp, Homo sapiens
gaatattgaagtttc

SEQ ID NO: 124386 - DNA, 15 bp, Homo sapiens
aatattgaagtttct

SEQ ID NO: 124387 - DNA, 15 bp, Homo sapiens
atattgaagtttctg

SEQ ID NO: 124388 - DNA, 15 bp, Homo sapiens
tattgaagtttctga

SEQ ID NO: 124389 - DNA, 15 bp, Homo sapiens
attgaagtttctgac

SEQ ID NO: 124390 - DNA, 15 bp, Homo sapiens
ttgaagtttctgact

SEQ ID NO: 124391 - DNA, 15 bp, Homo sapiens
tgaagtttctgactc

SEQ ID NO: 124392 - DNA, 15 bp, Homo sapiens
gaagtttctgactcc

SEQ ID NO: 124393 - DNA, 15 bp, Homo sapiens
aagtttctgactcct

SEQ ID NO: 124394 - DNA, 15 bp, Homo sapiens
agtttctgactcctt

SEQ ID NO: 124395 - DNA, 15 bp, Homo sapiens
gtttctgactccttc

SEQ ID NO: 124396 - DNA, 15 bp, Homo sapiens
tttctgactccttcc

SEQ ID NO: 124397 - DNA, 15 bp, Homo sapiens
ttctgactccttcct

SEQ ID NO: 124398 - DNA, 15 bp, Homo sapiens
tctgactccttcctt

SEQ ID NO: 124399 - DNA, 15 bp, Homo sapiens
ctgactccttccttg

SEQ ID NO: 124400 - DNA, 15 bp, Homo sapiens
tgactccttccttgc

SEQ ID NO: 124401 - DNA, 15 bp, Homo sapiens
gactccttccttgcc

SEQ ID NO: 124402 - DNA, 15 bp, Homo sapiens
actccttccttgcct

SEQ ID NO: 124403 - DNA, 15 bp, Homo sapiens
ctccttccttgcctt

SEQ ID NO: 124404 - DNA, 15 bp, Homo sapiens
tccttccttgccttt

SEQ ID NO: 124405 - DNA, 15 bp, Homo sapiens
ccttccttgcctttc

SEQ ID NO: 124406 - DNA, 15 bp, Homo sapiens
cttccttgcctttct

SEQ ID NO: 124407 - DNA, 15 bp, Homo sapiens
ttccttgcctttctc

SEQ ID NO: 124408 - DNA, 15 bp, Homo sapiens
tccttgcctttctcc

SEQ ID NO: 124409 - DNA, 15 bp, Homo sapiens
ccttgcctttctccc

SEQ ID NO: 124410 - DNA, 15 bp, Homo sapiens
cttgcctttctccct

SEQ ID NO: 124411 - DNA, 15 bp, Homo sapiens
ttgcctttctccctg

SEQ ID NO: 124412 - DNA, 15 bp, Homo sapiens
tgcctttctccctgc

SEQ ID NO: 124413 - DNA, 15 bp, Homo sapiens
gcctttctccctgcc

SEQ ID NO: 124414 - DNA, 15 bp, Homo sapiens
cctttctccctgcct

SEQ ID NO: 124415 - DNA, 15 bp, Homo sapiens
ctttctccctgcctc

SEQ ID NO: 124416 - DNA, 15 bp, Homo sapiens
tttctccctgcctcc

SEQ ID NO: 124417 - DNA, 15 bp, Homo sapiens
ttctccctgcctccc

SEQ ID NO: 124418 - DNA, 15 bp, Homo sapiens
tctccctgcctcccg

SEQ ID NO: 124419 - DNA, 15 bp, Homo sapiens
ctccctgcctcccgt

SEQ ID NO: 124420 - DNA, 15 bp, Homo sapiens
tccctgcctcccgtg

SEQ ID NO: 124421 - DNA, 15 bp, Homo sapiens
ccctgcctcccgtgg

SEQ ID NO: 124422 - DNA, 15 bp, Homo sapiens
cctgcctcccgtggt

SEQ ID NO: 124423 - DNA, 15 bp, Homo sapiens
ctgcctcccgtggtt

SEQ ID NO: 124424 - DNA, 15 bp, Homo sapiens
tgcctcccgtggtta

SEQ ID NO: 124425 - DNA, 15 bp, Homo sapiens
gcctcccgtggttat

SEQ ID NO: 124426 - DNA, 15 bp, Homo sapiens
cctcccgtggttatc

SEQ ID NO: 124427 - DNA, 15 bp, Homo sapiens
ctcccgtggttatcc

SEQ ID NO: 124428 - DNA, 15 bp, Homo sapiens
tcccgtggttatccc

SEQ ID NO: 124429 - DNA, 15 bp, Homo sapiens
cccgtggttatcccc

SEQ ID NO: 124430 - DNA, 15 bp, Homo sapiens
ccgtggttatcccca

SEQ ID NO: 124431 - DNA, 15 bp, Homo sapiens
cgtggttatccccag

SEQ ID NO: 124432 - DNA, 15 bp, Homo sapiens
gtggttatccccagg

SEQ ID NO: 124433 - DNA, 15 bp, Homo sapiens
tggttatccccaggt

SEQ ID NO: 124434 - DNA, 15 bp, Homo sapiens
ggttatccccaggtc

SEQ ID NO: 124435 - DNA, 15 bp, Homo sapiens
gttatccccaggtct

SEQ ID NO: 124436 - DNA, 15 bp, Homo sapiens
ttatccccaggtctt

SEQ ID NO: 124437 - DNA, 15 bp, Homo sapiens
tatccccaggtcttg

SEQ ID NO: 124438 - DNA, 15 bp, Homo sapiens
atccccaggtcttgg

SEQ ID NO: 124439 - DNA, 15 bp, Homo sapiens
tccccaggtcttggt

SEQ ID NO: 124440 - DNA, 15 bp, Homo sapiens
ccccaggtcttggtg

SEQ ID NO: 124441 - DNA, 15 bp, Homo sapiens
cccaggtcttggtgt

SEQ ID NO: 124442 - DNA, 15 bp, Homo sapiens
ccaggtcttggtgtt

SEQ ID NO: 124443 - DNA, 15 bp, Homo sapiens
caggtcttggtgttc

SEQ ID NO: 124444 - DNA, 15 bp, Homo sapiens
aggtcttggtgttcc

SEQ ID NO: 124445 - DNA, 15 bp, Homo sapiens
ggtcttggtgttcca

SEQ ID NO: 124446 - DNA, 15 bp, Homo sapiens
gtcttggtgttccag

SEQ ID NO: 124447 - DNA, 15 bp, Homo sapiens
tcttggtgttccagt

SEQ ID NO: 124448 - DNA, 15 bp, Homo sapiens
cttggtgttccagtc

SEQ ID NO: 124449 - DNA, 15 bp, Homo sapiens
ttggtgttccagtcc

SEQ ID NO: 124450 - DNA, 15 bp, Homo sapiens
tggtgttccagtcct

SEQ ID NO: 124451 - DNA, 15 bp, Homo sapiens
ggtgttccagtcctc

SEQ ID NO: 124452 - DNA, 15 bp, Homo sapiens
gtgttccagtcctct

SEQ ID NO: 124453 - DNA, 15 bp, Homo sapiens
tgttccagtcctcta

SEQ ID NO: 124454 - DNA, 15 bp, Homo sapiens
gttccagtcctctat

SEQ ID NO: 124455 - DNA, 15 bp, Homo sapiens
ttccagtcctctatg

SEQ ID NO: 124456 - DNA, 15 bp, Homo sapiens
tccagtcctctatgt

SEQ ID NO: 124457 - DNA, 15 bp, Homo sapiens
ccagtcctctatgtc

SEQ ID NO: 124458 - DNA, 15 bp, Homo sapiens
cagtcctctatgtcc

SEQ ID NO: 124459 - DNA, 15 bp, Homo sapiens
agtcctctatgtccg

SEQ ID NO: 124460 - DNA, 15 bp, Homo sapiens
gtcctctatgtccgt

SEQ ID NO: 124461 - DNA, 15 bp, Homo sapiens
tcctctatgtccgtc

SEQ ID NO: 124462 - DNA, 15 bp, Homo sapiens
cctctatgtccgtcc

SEQ ID NO: 124463 - DNA, 15 bp, Homo sapiens
ctctatgtccgtcct

SEQ ID NO: 124464 - DNA, 15 bp, Homo sapiens
tctatgtccgtcctt

SEQ ID NO: 124465 - DNA, 15 bp, Homo sapiens
ctatgtccgtcctta

SEQ ID NO: 124466 - DNA, 15 bp, Homo sapiens
tatgtccgtccttac

SEQ ID NO: 124467 - DNA, 15 bp, Homo sapiens
atgtccgtccttact

SEQ ID NO: 124468 - DNA, 15 bp, Homo sapiens
tgtccgtccttactc

SEQ ID NO: 124469 - DNA, 15 bp, Homo sapiens
gtccgtccttactct

SEQ ID NO: 124470 - DNA, 15 bp, Homo sapiens
tccgtccttactctt

SEQ ID NO: 124471 - DNA, 15 bp, Homo sapiens
ccgtccttactctta

SEQ ID NO: 124472 - DNA, 15 bp, Homo sapiens
cgtccttactcttat

SEQ ID NO: 124473 - DNA, 15 bp, Homo sapiens
gtccttactcttatt

SEQ ID NO: 124474 - DNA, 15 bp, Homo sapiens
tccttactcttattc

SEQ ID NO: 124475 - DNA, 15 bp, Homo sapiens
ccttactcttattcc

SEQ ID NO: 124476 - DNA, 15 bp, Homo sapiens
cttactcttattcct

SEQ ID NO: 124477 - DNA, 15 bp, Homo sapiens
ttactcttattcctt

SEQ ID NO: 124478 - DNA, 15 bp, Homo sapiens
tactcttattccttt

SEQ ID NO: 124479 - DNA, 15 bp, Homo sapiens
actcttattcctttg

SEQ ID NO: 124480 - DNA, 15 bp, Homo sapiens
ctcttattcctttgc

SEQ ID NO: 124481 - DNA, 15 bp, Homo sapiens
tcttattcctttgct

SEQ ID NO: 124482 - DNA, 15 bp, Homo sapiens
cttattcctttgcta

SEQ ID NO: 124483 - DNA, 15 bp, Homo sapiens
ttattcctttgctac

SEQ ID NO: 124484 - DNA, 15 bp, Homo sapiens
tattcctttgctaca

SEQ ID NO: 124485 - DNA, 15 bp, Homo sapiens
attcctttgctacag

SEQ ID NO: 124486 - DNA, 15 bp, Homo sapiens
ttcctttgctacagt

SEQ ID NO: 124487 - DNA, 15 bp, Homo sapiens
tcctttgctacagtg

SEQ ID NO: 124488 - DNA, 15 bp, Homo sapiens
cctttgctacagtgt

SEQ ID NO: 124489 - DNA, 15 bp, Homo sapiens
ctttgctacagtgtg

SEQ ID NO: 124490 - DNA, 15 bp, Homo sapiens
tttgctacagtgtga

SEQ ID NO: 124491 - DNA, 15 bp, Homo sapiens
ttgctacagtgtgat

SEQ ID NO: 124492 - DNA, 15 bp, Homo sapiens
tgctacagtgtgatc

SEQ ID NO: 124493 - DNA, 15 bp, Homo sapiens
gctacagtgtgatcc

SEQ ID NO: 124494 - DNA, 15 bp, Homo sapiens
ctacagtgtgatcca

SEQ ID NO: 124495 - DNA, 15 bp, Homo sapiens
tacagtgtgatccag

SEQ ID NO: 124496 - DNA, 15 bp, Homo sapiens
acagtgtgatccagg

SEQ ID NO: 124497 - DNA, 15 bp, Homo sapiens
cagtgtgatccaggg

SEQ ID NO: 124498 - DNA, 15 bp, Homo sapiens
agtgtgatccagggc

SEQ ID NO: 124499 - DNA, 15 bp, Homo sapiens
gtgtgatccagggct

SEQ ID NO: 124500 - DNA, 15 bp, Homo sapiens
tgtgatccagggctc

SEQ ID NO: 124501 - DNA, 15 bp, Homo sapiens
gtgatccagggctcc

SEQ ID NO: 124502 - DNA, 15 bp, Homo sapiens
tgatccagggctcct

SEQ ID NO: 124503 - DNA, 15 bp, Homo sapiens
gatccagggctcctg

SEQ ID NO: 124504 - DNA, 15 bp, Homo sapiens
atccagggctcctgc

SEQ ID NO: 124505 - DNA, 15 bp, Homo sapiens
tccagggctcctgcc

SEQ ID NO: 124506 - DNA, 15 bp, Homo sapiens
ccagggctcctgccc

SEQ ID NO: 124507 - DNA, 15 bp, Homo sapiens
cagggctcctgcccc

SEQ ID NO: 124508 - DNA, 15 bp, Homo sapiens
agggctcctgcccct

SEQ ID NO: 124509 - DNA, 15 bp, Homo sapiens
gggctcctgcccctt

SEQ ID NO: 124510 - DNA, 15 bp, Homo sapiens
ggctcctgccccttc

SEQ ID NO: 124511 - DNA, 15 bp, Homo sapiens
gctcctgccccttct

SEQ ID NO: 124512 - DNA, 15 bp, Homo sapiens
ctcctgccccttctt

SEQ ID NO: 124513 - DNA, 15 bp, Homo sapiens
tcctgccccttctta

SEQ ID NO: 124514 - DNA, 15 bp, Homo sapiens
cctgccccttcttat

SEQ ID NO: 124515 - DNA, 15 bp, Homo sapiens
ctgccccttcttatc

SEQ ID NO: 124516 - DNA, 15 bp, Homo sapiens
tgccccttcttatcc

SEQ ID NO: 124517 - DNA, 15 bp, Homo sapiens
gccccttcttatcct

SEQ ID NO: 124518 - DNA, 15 bp, Homo sapiens
ccccttcttatcctg

SEQ ID NO: 124519 - DNA, 15 bp, Homo sapiens
cccttcttatcctgg

SEQ ID NO: 124520 - DNA, 15 bp, Homo sapiens
ccttcttatcctggt

SEQ ID NO: 124521 - DNA, 15 bp, Homo sapiens
cttcttatcctggta

SEQ ID NO: 124522 - DNA, 15 bp, Homo sapiens
ttcttatcctggtag

SEQ ID NO: 124523 - DNA, 15 bp, Homo sapiens
tcttatcctggtaga

SEQ ID NO: 124524 - DNA, 15 bp, Homo sapiens
cttatcctggtagag

SEQ ID NO: 124525 - DNA, 15 bp, Homo sapiens
ttatcctggtagagg

SEQ ID NO: 124526 - DNA, 15 bp, Homo sapiens
tatcctggtagaggg

SEQ ID NO: 124527 - DNA, 15 bp, Homo sapiens
atcctggtagagggg

SEQ ID NO: 124528 - DNA, 15 bp, Homo sapiens
tcctggtagaggggg

SEQ ID NO: 124529 - DNA, 15 bp, Homo sapiens
cctggtagagggggc

SEQ ID NO: 124530 - DNA, 15 bp, Homo sapiens
ctggtagagggggcc

SEQ ID NO: 124531 - DNA, 15 bp, Homo sapiens
tggtagagggggccc

SEQ ID NO: 124532 - DNA, 15 bp, Homo sapiens
ggtagagggggccca

SEQ ID NO: 124533 - DNA, 15 bp, Homo sapiens
gtagagggggcccac

SEQ ID NO: 124534 - DNA, 15 bp, Homo sapiens
tagagggggcccact

SEQ ID NO: 124535 - DNA, 15 bp, Homo sapiens
agagggggcccactt

SEQ ID NO: 124536 - DNA, 15 bp, Homo sapiens
gagggggcccacttg

SEQ ID NO: 124537 - DNA, 15 bp, Homo sapiens
agggggcccacttgc

SEQ ID NO: 124538 - DNA, 15 bp, Homo sapiens
gggggcccacttgct

SEQ ID NO: 124539 - DNA, 15 bp, Homo sapiens
ggggcccacttgctg

SEQ ID NO: 124540 - DNA, 15 bp, Homo sapiens
gggcccacttgctgg

SEQ ID NO: 124541 - DNA, 15 bp, Homo sapiens
ggcccacttgctggg

SEQ ID NO: 124542 - DNA, 15 bp, Homo sapiens
gcccacttgctggga

SEQ ID NO: 124543 - DNA, 15 bp, Homo sapiens
cccacttgctgggaa

SEQ ID NO: 124544 - DNA, 15 bp, Homo sapiens
ccacttgctgggaaa

SEQ ID NO: 124545 - DNA, 15 bp, Homo sapiens
cacttgctgggaaat

SEQ ID NO: 124546 - DNA, 15 bp, Homo sapiens
acttgctgggaaatt

SEQ ID NO: 124547 - DNA, 15 bp, Homo sapiens
cttgctgggaaattg

SEQ ID NO: 124548 - DNA, 15 bp, Homo sapiens
ttgctgggaaattgt

SEQ ID NO: 124549 - DNA, 15 bp, Homo sapiens
tgctgggaaattgtc

SEQ ID NO: 124550 - DNA, 15 bp, Homo sapiens
gctgggaaattgtct

SEQ ID NO: 124551 - DNA, 15 bp, Homo sapiens
ctgggaaattgtctc

SEQ ID NO: 124552 - DNA, 15 bp, Homo sapiens
tgggaaattgtctcc

SEQ ID NO: 124553 - DNA, 15 bp, Homo sapiens
gggaaattgtctccg

SEQ ID NO: 124554 - DNA, 15 bp, Homo sapiens
ggaaattgtctccgc

SEQ ID NO: 124555 - DNA, 15 bp, Homo sapiens
gaaattgtctccgcc

SEQ ID NO: 124556 - DNA, 15 bp, Homo sapiens
aaattgtctccgcca

SEQ ID NO: 124557 - DNA, 15 bp, Homo sapiens
aattgtctccgccat

SEQ ID NO: 124558 - DNA, 15 bp, Homo sapiens
attgtctccgccatg

SEQ ID NO: 124559 - DNA, 15 bp, Homo sapiens
ttgtctccgccatgg

SEQ ID NO: 124560 - DNA, 15 bp, Homo sapiens
tgtctccgccatggt

SEQ ID NO: 124561 - DNA, 15 bp, Homo sapiens
gtctccgccatggtt

SEQ ID NO: 124562 - DNA, 15 bp, Homo sapiens
tctccgccatggttt

SEQ ID NO: 124563 - DNA, 15 bp, Homo sapiens
ctccgccatggttta

SEQ ID NO: 124564 - DNA, 15 bp, Homo sapiens
tccgccatggtttat

SEQ ID NO: 124565 - DNA, 15 bp, Homo sapiens
ccgccatggtttatc

SEQ ID NO: 124566 - DNA, 15 bp, Homo sapiens
cgccatggtttatcc

SEQ ID NO: 124567 - DNA, 15 bp, Homo sapiens
gccatggtttatcca

SEQ ID NO: 124568 - DNA, 15 bp, Homo sapiens
ccatggtttatccat

SEQ ID NO: 124569 - DNA, 15 bp, Homo sapiens
catggtttatccatg

SEQ ID NO: 124570 - DNA, 15 bp, Homo sapiens
atggtttatccatgt

SEQ ID NO: 124571 - DNA, 15 bp, Homo sapiens
tggtttatccatgtt

SEQ ID NO: 124572 - DNA, 15 bp, Homo sapiens
ggtttatccatgttg

SEQ ID NO: 124573 - DNA, 15 bp, Homo sapiens
gtttatccatgttgt

SEQ ID NO: 124574 - DNA, 15 bp, Homo sapiens
tttatccatgttgtg

SEQ ID NO: 124575 - DNA, 15 bp, Homo sapiens
ttatccatgttgtgt

SEQ ID NO: 124576 - DNA, 15 bp, Homo sapiens
tatccatgttgtgtg

SEQ ID NO: 124577 - DNA, 15 bp, Homo sapiens
atccatgttgtgtgt

SEQ ID NO: 124578 - DNA, 15 bp, Homo sapiens
tccatgttgtgtgtc

SEQ ID NO: 124579 - DNA, 15 bp, Homo sapiens
ccatgttgtgtgtcc

SEQ ID NO: 124580 - DNA, 15 bp, Homo sapiens
catgttgtgtgtcca

SEQ ID NO: 124581 - DNA, 15 bp, Homo sapiens
atgttgtgtgtccat

SEQ ID NO: 124582 - DNA, 15 bp, Homo sapiens
tgttgtgtgtccatt

SEQ ID NO: 124583 - DNA, 15 bp, Homo sapiens
gttgtgtgtccatta

SEQ ID NO: 124584 - DNA, 15 bp, Homo sapiens
ttgtgtgtccattag

SEQ ID NO: 124585 - DNA, 15 bp, Homo sapiens
tgtgtgtccattagt

SEQ ID NO: 124586 - DNA, 15 bp, Homo sapiens
gtgtgtccattagtg

SEQ ID NO: 124587 - DNA, 15 bp, Homo sapiens
tgtgtccattagtga

SEQ ID NO: 124588 - DNA, 15 bp, Homo sapiens
gtgtccattagtgag

SEQ ID NO: 124589 - DNA, 15 bp, Homo sapiens
tgtccattagtgagt

SEQ ID NO: 124590 - DNA, 15 bp, Homo sapiens
gtccattagtgagta

SEQ ID NO: 124591 - DNA, 15 bp, Homo sapiens
tccattagtgagtag

SEQ ID NO: 124592 - DNA, 15 bp, Homo sapiens
ccattagtgagtagt

SEQ ID NO: 124593 - DNA, 15 bp, Homo sapiens
cattagtgagtagtg

SEQ ID NO: 124594 - DNA, 15 bp, Homo sapiens
attagtgagtagtgg

SEQ ID NO: 124595 - DNA, 15 bp, Homo sapiens
ttagtgagtagtggg

SEQ ID NO: 124596 - DNA, 15 bp, Homo sapiens
tagtgagtagtggga

SEQ ID NO: 124597 - DNA, 15 bp, Homo sapiens
agtgagtagtgggaa

SEQ ID NO: 124598 - DNA, 15 bp, Homo sapiens
gtgagtagtgggaag

SEQ ID NO: 124599 - DNA, 15 bp, Homo sapiens
tgagtagtgggaaga

SEQ ID NO: 124600 - DNA, 15 bp, Homo sapiens
gagtagtgggaagaa

SEQ ID NO: 124601 - DNA, 15 bp, Homo sapiens
agtagtgggaagaat

SEQ ID NO: 124602 - DNA, 15 bp, Homo sapiens
gtagtgggaagaatc

SEQ ID NO: 124603 - DNA, 15 bp, Homo sapiens
tagtgggaagaatca

SEQ ID NO: 124604 - DNA, 15 bp, Homo sapiens
agtgggaagaatcat

SEQ ID NO: 124605 - DNA, 15 bp, Homo sapiens
gtgggaagaatcata

SEQ ID NO: 124606 - DNA, 15 bp, Homo sapiens
tgggaagaatcatat

SEQ ID NO: 124607 - DNA, 15 bp, Homo sapiens
gggaagaatcatatc

SEQ ID NO: 124608 - DNA, 15 bp, Homo sapiens
ggaagaatcatatca

SEQ ID NO: 124609 - DNA, 15 bp, Homo sapiens
gaagaatcatatcat

SEQ ID NO: 124610 - DNA, 15 bp, Homo sapiens
aagaatcatatcatg

SEQ ID NO: 124611 - DNA, 15 bp, Homo sapiens
agaatcatatcatgt

SEQ ID NO: 124612 - DNA, 15 bp, Homo sapiens
gaatcatatcatgtt

SEQ ID NO: 124613 - DNA, 15 bp, Homo sapiens
aatcatatcatgttg

SEQ ID NO: 124614 - DNA, 15 bp, Homo sapiens
atcatatcatgttgg

SEQ ID NO: 124615 - DNA, 15 bp, Homo sapiens
tcatatcatgttggc

SEQ ID NO: 124616 - DNA, 15 bp, Homo sapiens
catatcatgttggca

SEQ ID NO: 124617 - DNA, 15 bp, Homo sapiens
atatcatgttggcaa

SEQ ID NO: 124618 - DNA, 15 bp, Homo sapiens
tatcatgttggcaat

SEQ ID NO: 124619 - DNA, 15 bp, Homo sapiens
atcatgttggcaatg

SEQ ID NO: 124620 - DNA, 15 bp, Homo sapiens
tcatgttggcaatga

SEQ ID NO: 124621 - DNA, 15 bp, Homo sapiens
catgttggcaatgaa

SEQ ID NO: 124622 - DNA, 15 bp, Homo sapiens
atgttggcaatgaaa

SEQ ID NO: 124623 - DNA, 15 bp, Homo sapiens
tgttggcaatgaaag

SEQ ID NO: 124624 - DNA, 15 bp, Homo sapiens
gttggcaatgaaagg

SEQ ID NO: 124625 - DNA, 15 bp, Homo sapiens
ttggcaatgaaaggg

SEQ ID NO: 124626 - DNA, 15 bp, Homo sapiens
tggcaatgaaagggg

SEQ ID NO: 124627 - DNA, 15 bp, Homo sapiens
ggcaatgaaaggggg

SEQ ID NO: 124628 - DNA, 15 bp, Homo sapiens
gcaatgaaagggggg

SEQ ID NO: 124629 - DNA, 15 bp, Homo sapiens
caatgaaaggggggc

SEQ ID NO: 124630 - DNA, 15 bp, Homo sapiens
aatgaaaggggggct

SEQ ID NO: 124631 - DNA, 15 bp, Homo sapiens
atgaaaggggggcta

SEQ ID NO: 124632 - DNA, 15 bp, Homo sapiens
tgaaaggggggctat

SEQ ID NO: 124633 - DNA, 15 bp, Homo sapiens
gaaaggggggctatg

SEQ ID NO: 124634 - DNA, 15 bp, Homo sapiens
aaaggggggctatgg

SEQ ID NO: 124635 - DNA, 15 bp, Homo sapiens
aaggggggctatggc

SEQ ID NO: 124636 - DNA, 15 bp, Homo sapiens
aggggggctatggct

SEQ ID NO: 124637 - DNA, 15 bp, Homo sapiens
ggggggctatggctc

SEQ ID NO: 124638 - DNA, 15 bp, Homo sapiens
gggggctatggctct

SEQ ID NO: 124639 - DNA, 15 bp, Homo sapiens
ggggctatggctctg

SEQ ID NO: 124640 - DNA, 15 bp, Homo sapiens
gggctatggctctgg

SEQ ID NO: 124641 - DNA, 15 bp, Homo sapiens
ggctatggctctggg

SEQ ID NO: 124642 - DNA, 15 bp, Homo sapiens
gctatggctctgggg

SEQ ID NO: 124643 - DNA, 15 bp, Homo sapiens
ctatggctctggggt

SEQ ID NO: 124644 - DNA, 15 bp, Homo sapiens
tatggctctggggta

SEQ ID NO: 124645 - DNA, 15 bp, Homo sapiens
atggctctggggtag

SEQ ID NO: 124646 - DNA, 15 bp, Homo sapiens
tggctctggggtagt

SEQ ID NO: 124647 - DNA, 15 bp, Homo sapiens
ggctctggggtagtc

SEQ ID NO: 124648 - DNA, 15 bp, Homo sapiens
gctctggggtagtct

SEQ ID NO: 124649 - DNA, 15 bp, Homo sapiens
ctctggggtagtcta

SEQ ID NO: 124650 - DNA, 15 bp, Homo sapiens
tctggggtagtctag

SEQ ID NO: 124651 - DNA, 15 bp, Homo sapiens
ctggggtagtctagt

SEQ ID NO: 124652 - DNA, 15 bp, Homo sapiens
tggggtagtctagtc

SEQ ID NO: 124653 - DNA, 15 bp, Homo sapiens
ggggtagtctagtct

SEQ ID NO: 124654 - DNA, 15 bp, Homo sapiens
gggtagtctagtctg

SEQ ID NO: 124655 - DNA, 15 bp, Homo sapiens
ggtagtctagtctga

SEQ ID NO: 124656 - DNA, 15 bp, Homo sapiens
gtagtctagtctgaa

SEQ ID NO: 124657 - DNA, 15 bp, Homo sapiens
tagtctagtctgaac

SEQ ID NO: 124658 - DNA, 15 bp, Homo sapiens
agtctagtctgaacc

SEQ ID NO: 124659 - DNA, 15 bp, Homo sapiens
gtctagtctgaacct

SEQ ID NO: 124660 - DNA, 15 bp, Homo sapiens
tctagtctgaacctc

SEQ ID NO: 124661 - DNA, 15 bp, Homo sapiens
ctagtctgaacctct

SEQ ID NO: 124662 - DNA, 15 bp, Homo sapiens
tagtctgaacctctt

SEQ ID NO: 124663 - DNA, 15 bp, Homo sapiens
agtctgaacctctta

SEQ ID NO: 124664 - DNA, 15 bp, Homo sapiens
gtctgaacctcttat

SEQ ID NO: 124665 - DNA, 15 bp, Homo sapiens
tctgaacctcttatt

SEQ ID NO: 124666 - DNA, 15 bp, Homo sapiens
ctgaacctcttattt

SEQ ID NO: 124667 - DNA, 15 bp, Homo sapiens
tgaacctcttatttt

SEQ ID NO: 124668 - DNA, 15 bp, Homo sapiens
gaacctcttatttta

SEQ ID NO: 124669 - DNA, 15 bp, Homo sapiens
aacctcttattttac

SEQ ID NO: 124670 - DNA, 15 bp, Homo sapiens
acctcttattttacg

SEQ ID NO: 124671 - DNA, 15 bp, Homo sapiens
cctcttattttacgg

SEQ ID NO: 124672 - DNA, 15 bp, Homo sapiens
ctcttattttacgga

SEQ ID NO: 124673 - DNA, 15 bp, Homo sapiens
tcttattttacggat

SEQ ID NO: 124674 - DNA, 15 bp, Homo sapiens
cttattttacggatg

SEQ ID NO: 124675 - DNA, 15 bp, Homo sapiens
ttattttacggatga

SEQ ID NO: 124676 - DNA, 15 bp, Homo sapiens
tattttacggatgag

SEQ ID NO: 124677 - DNA, 15 bp, Homo sapiens
attttacggatgaga

SEQ ID NO: 124678 - DNA, 15 bp, Homo sapiens
ttttacggatgagaa

SEQ ID NO: 124679 - DNA, 15 bp, Homo sapiens
tttacggatgagaaa

SEQ ID NO: 124680 - DNA, 15 bp, Homo sapiens
ttacggatgagaaag

SEQ ID NO: 124681 - DNA, 15 bp, Homo sapiens
tacggatgagaaagc

SEQ ID NO: 124682 - DNA, 15 bp, Homo sapiens
acggatgagaaagct

SEQ ID NO: 124683 - DNA, 15 bp, Homo sapiens
cggatgagaaagctg

SEQ ID NO: 124684 - DNA, 15 bp, Homo sapiens
ggatgagaaagctga

SEQ ID NO: 124685 - DNA, 15 bp, Homo sapiens
gatgagaaagctgag

SEQ ID NO: 124686 - DNA, 15 bp, Homo sapiens
atgagaaagctgagg

SEQ ID NO: 124687 - DNA, 15 bp, Homo sapiens
tgagaaagctgaggt

SEQ ID NO: 124688 - DNA, 15 bp, Homo sapiens
gagaaagctgaggta

SEQ ID NO: 124689 - DNA, 15 bp, Homo sapiens
agaaagctgaggtac

SEQ ID NO: 124690 - DNA, 15 bp, Homo sapiens
gaaagctgaggtaca

SEQ ID NO: 124691 - DNA, 15 bp, Homo sapiens
aaagctgaggtacaa

SEQ ID NO: 124692 - DNA, 15 bp, Homo sapiens
aagctgaggtacaaa

SEQ ID NO: 124693 - DNA, 15 bp, Homo sapiens
agctgaggtacaaag

SEQ ID NO: 124694 - DNA, 15 bp, Homo sapiens
gctgaggtacaaagc

SEQ ID NO: 124695 - DNA, 15 bp, Homo sapiens
ctgaggtacaaagca

SEQ ID NO: 124696 - DNA, 15 bp, Homo sapiens
tgaggtacaaagcag

SEQ ID NO: 124697 - DNA, 15 bp, Homo sapiens
gaggtacaaagcagg

SEQ ID NO: 124698 - DNA, 15 bp, Homo sapiens
aggtacaaagcaggg

SEQ ID NO: 124699 - DNA, 15 bp, Homo sapiens
ggtacaaagcaggga

SEQ ID NO: 124700 - DNA, 15 bp, Homo sapiens
gtacaaagcagggaa

SEQ ID NO: 124701 - DNA, 15 bp, Homo sapiens
tacaaagcagggaag

SEQ ID NO: 124702 - DNA, 15 bp, Homo sapiens
acaaagcagggaagg

SEQ ID NO: 124703 - DNA, 15 bp, Homo sapiens
caaagcagggaaggg

SEQ ID NO: 124704 - DNA, 15 bp, Homo sapiens
aaagcagggaaggga

SEQ ID NO: 124705 - DNA, 15 bp, Homo sapiens
aagcagggaagggat

SEQ ID NO: 124706 - DNA, 15 bp, Homo sapiens
agcagggaagggatt

SEQ ID NO: 124707 - DNA, 15 bp, Homo sapiens
gcagggaagggattt

SEQ ID NO: 124708 - DNA, 15 bp, Homo sapiens
cagggaagggatttc

SEQ ID NO: 124709 - DNA, 15 bp, Homo sapiens
agggaagggatttct

SEQ ID NO: 124710 - DNA, 15 bp, Homo sapiens
gggaagggatttctt

SEQ ID NO: 124711 - DNA, 15 bp, Homo sapiens
ggaagggatttcttg

SEQ ID NO: 124712 - DNA, 15 bp, Homo sapiens
gaagggatttcttga

SEQ ID NO: 124713 - DNA, 15 bp, Homo sapiens
aagggatttcttgag

SEQ ID NO: 124714 - DNA, 15 bp, Homo sapiens
agggatttcttgagg

SEQ ID NO: 124715 - DNA, 15 bp, Homo sapiens
gggatttcttgaggt

SEQ ID NO: 124716 - DNA, 15 bp, Homo sapiens
ggatttcttgaggtc

SEQ ID NO: 124717 - DNA, 15 bp, Homo sapiens
gatttcttgaggtca

SEQ ID NO: 124718 - DNA, 15 bp, Homo sapiens
atttcttgaggtcac

SEQ ID NO: 124719 - DNA, 15 bp, Homo sapiens
tttcttgaggtcacc

SEQ ID NO: 124720 - DNA, 15 bp, Homo sapiens
ttcttgaggtcaccc

SEQ ID NO: 124721 - DNA, 15 bp, Homo sapiens
tcttgaggtcaccca

SEQ ID NO: 124722 - DNA, 15 bp, Homo sapiens
cttgaggtcacccag

SEQ ID NO: 124723 - DNA, 15 bp, Homo sapiens
ttgaggtcacccagc

SEQ ID NO: 124724 - DNA, 15 bp, Homo sapiens
tgaggtcacccagcc

SEQ ID NO: 124725 - DNA, 15 bp, Homo sapiens
gaggtcacccagcca

SEQ ID NO: 124726 - DNA, 15 bp, Homo sapiens
aggtcacccagccag

SEQ ID NO: 124727 - DNA, 15 bp, Homo sapiens
ggtcacccagccagc

SEQ ID NO: 124728 - DNA, 15 bp, Homo sapiens
gtcacccagccagca

SEQ ID NO: 124729 - DNA, 15 bp, Homo sapiens
tcacccagccagcaa

SEQ ID NO: 124730 - DNA, 15 bp, Homo sapiens
cacccagccagcaac

SEQ ID NO: 124731 - DNA, 15 bp, Homo sapiens
acccagccagcaact

SEQ ID NO: 124732 - DNA, 15 bp, Homo sapiens
cccagccagcaactg

SEQ ID NO: 124733 - DNA, 15 bp, Homo sapiens
ccagccagcaactga

SEQ ID NO: 124734 - DNA, 15 bp, Homo sapiens
cagccagcaactgag

SEQ ID NO: 124735 - DNA, 15 bp, Homo sapiens
agccagcaactgagc

SEQ ID NO: 124736 - DNA, 15 bp, Homo sapiens
gccagcaactgagct

SEQ ID NO: 124737 - DNA, 15 bp, Homo sapiens
ccagcaactgagctg

SEQ ID NO: 124738 - DNA, 15 bp, Homo sapiens
cagcaactgagctgc

SEQ ID NO: 124739 - DNA, 15 bp, Homo sapiens
agcaactgagctgca

SEQ ID NO: 124740 - DNA, 15 bp, Homo sapiens
gcaactgagctgcaa

SEQ ID NO: 124741 - DNA, 15 bp, Homo sapiens
caactgagctgcaac

SEQ ID NO: 124742 - DNA, 15 bp, Homo sapiens
aactgagctgcaacc

SEQ ID NO: 124743 - DNA, 15 bp, Homo sapiens
actgagctgcaacca

SEQ ID NO: 124744 - DNA, 15 bp, Homo sapiens
ctgagctgcaaccag

SEQ ID NO: 124745 - DNA, 15 bp, Homo sapiens
tgagctgcaaccaga

SEQ ID NO: 124746 - DNA, 15 bp, Homo sapiens
gagctgcaaccagaa

SEQ ID NO: 124747 - DNA, 15 bp, Homo sapiens
agctgcaaccagaag

SEQ ID NO: 124748 - DNA, 15 bp, Homo sapiens
gctgcaaccagaagc

SEQ ID NO: 124749 - DNA, 15 bp, Homo sapiens
ctgcaaccagaagct

SEQ ID NO: 124750 - DNA, 15 bp, Homo sapiens
tgcaaccagaagctg

SEQ ID NO: 124751 - DNA, 15 bp, Homo sapiens
gcaaccagaagctga

SEQ ID NO: 124752 - DNA, 15 bp, Homo sapiens
caaccagaagctgag

SEQ ID NO: 124753 - DNA, 15 bp, Homo sapiens
aaccagaagctgaga

SEQ ID NO: 124754 - DNA, 15 bp, Homo sapiens
accagaagctgagat

SEQ ID NO: 124755 - DNA, 15 bp, Homo sapiens
ccagaagctgagatc

SEQ ID NO: 124756 - DNA, 15 bp, Homo sapiens
cagaagctgagatcc

SEQ ID NO: 124757 - DNA, 15 bp, Homo sapiens
agaagctgagatccc

SEQ ID NO: 124758 - DNA, 15 bp, Homo sapiens
gaagctgagatcccc

SEQ ID NO: 124759 - DNA, 15 bp, Homo sapiens
aagctgagatcccca

SEQ ID NO: 124760 - DNA, 15 bp, Homo sapiens
agctgagatccccag

SEQ ID NO: 124761 - DNA, 15 bp, Homo sapiens
gctgagatccccagg

SEQ ID NO: 124762 - DNA, 15 bp, Homo sapiens
ctgagatccccagga

SEQ ID NO: 124763 - DNA, 15 bp, Homo sapiens
tgagatccccaggac

SEQ ID NO: 124764 - DNA, 15 bp, Homo sapiens
gagatccccaggact

SEQ ID NO: 124765 - DNA, 15 bp, Homo sapiens
agatccccaggacta

SEQ ID NO: 124766 - DNA, 15 bp, Homo sapiens
gatccccaggactag

SEQ ID NO: 124767 - DNA, 15 bp, Homo sapiens
atccccaggactagg

SEQ ID NO: 124768 - DNA, 15 bp, Homo sapiens
tccccaggactaggg

SEQ ID NO: 124769 - DNA, 15 bp, Homo sapiens
ccccaggactagggc

SEQ ID NO: 124770 - DNA, 15 bp, Homo sapiens
cccaggactagggcc

SEQ ID NO: 124771 - DNA, 15 bp, Homo sapiens
ccaggactagggccg

SEQ ID NO: 124772 - DNA, 15 bp, Homo sapiens
caggactagggccga

SEQ ID NO: 124773 - DNA, 15 bp, Homo sapiens
aggactagggccgag

SEQ ID NO: 124774 - DNA, 15 bp, Homo sapiens
ggactagggccgagc

SEQ ID NO: 124775 - DNA, 15 bp, Homo sapiens
gactagggccgagcc

SEQ ID NO: 124776 - DNA, 15 bp, Homo sapiens
actagggccgagcct

SEQ ID NO: 124777 - DNA, 15 bp, Homo sapiens
ctagggccgagcctc

SEQ ID NO: 124778 - DNA, 15 bp, Homo sapiens
tagggccgagcctca

SEQ ID NO: 124779 - DNA, 15 bp, Homo sapiens
tttgctttttttaaa

SEQ ID NO: 124780 - DNA, 15 bp, Homo sapiens
ttgctttttttaaaa

SEQ ID NO: 124781 - DNA, 15 bp, Homo sapiens
tgctttttttaaaaa

SEQ ID NO: 124782 - DNA, 15 bp, Homo sapiens
gctttttttaaaaaa

SEQ ID NO: 124783 - DNA, 15 bp, Homo sapiens
ttttttaaaaaaaga

SEQ ID NO: 124784 - DNA, 15 bp, Homo sapiens
tttttaaaaaaagaa

SEQ ID NO: 124785 - DNA, 15 bp, Homo sapiens
ttttaaaaaaagaag

SEQ ID NO: 124786 - DNA, 15 bp, Homo sapiens
tttaaaaaaagaaga

SEQ ID NO: 124787 - DNA, 15 bp, Homo sapiens
ttaaaaaaagaagac

SEQ ID NO: 124788 - DNA, 15 bp, Homo sapiens
taaaaaaagaagaca

SEQ ID NO: 124789 - DNA, 15 bp, Homo sapiens
aaaaaaagaagacaa

SEQ ID NO: 124790 - DNA, 15 bp, Homo sapiens
aaaaaagaagacaaa

SEQ ID NO: 124791 - DNA, 15 bp, Homo sapiens
aaaaagaagacaaaa

SEQ ID NO: 124792 - DNA, 15 bp, Homo sapiens
aaaagaagacaaaaa

SEQ ID NO: 124793 - DNA, 15 bp, Homo sapiens
aaagaagacaaaaag

SEQ ID NO: 124794 - DNA, 15 bp, Homo sapiens
aagaagacaaaaagg

SEQ ID NO: 124795 - DNA, 15 bp, Homo sapiens
agaagacaaaaaggg

SEQ ID NO: 124796 - DNA, 15 bp, Homo sapiens
gaagacaaaaaggga

SEQ ID NO: 124797 - DNA, 15 bp, Homo sapiens
aagacaaaaagggat

SEQ ID NO: 124798 - DNA, 15 bp, Homo sapiens
agacaaaaagggatt

SEQ ID NO: 124799 - DNA, 15 bp, Homo sapiens
gacaaaaagggattt

SEQ ID NO: 124800 - DNA, 15 bp, Homo sapiens
acaaaaagggatttt

SEQ ID NO: 124801 - DNA, 15 bp, Homo sapiens
caaaaagggatttta

SEQ ID NO: 124802 - DNA, 15 bp, Homo sapiens
aaaaagggattttat

SEQ ID NO: 124803 - DNA, 15 bp, Homo sapiens
aaaagggattttata

SEQ ID NO: 124804 - DNA, 15 bp, Homo sapiens
aaagggattttatac

SEQ ID NO: 124805 - DNA, 15 bp, Homo sapiens
aagggattttatacc

SEQ ID NO: 124806 - DNA, 15 bp, Homo sapiens
agggattttatacca

SEQ ID NO: 124807 - DNA, 15 bp, Homo sapiens
gggattttataccag

SEQ ID NO: 124808 - DNA, 15 bp, Homo sapiens
ggattttataccagt

SEQ ID NO: 124809 - DNA, 15 bp, Homo sapiens
gattttataccagta

SEQ ID NO: 124810 - DNA, 15 bp, Homo sapiens
attttataccagtat

SEQ ID NO: 124811 - DNA, 15 bp, Homo sapiens
ttttataccagtatt

SEQ ID NO: 124812 - DNA, 15 bp, Homo sapiens
tttataccagtatta

SEQ ID NO: 124813 - DNA, 15 bp, Homo sapiens
ttataccagtattat

SEQ ID NO: 124814 - DNA, 15 bp, Homo sapiens
tataccagtattatc

SEQ ID NO: 124815 - DNA, 15 bp, Homo sapiens
ataccagtattatct

SEQ ID NO: 124816 - DNA, 15 bp, Homo sapiens
taccagtattatctt

SEQ ID NO: 124817 - DNA, 15 bp, Homo sapiens
accagtattatcttg

SEQ ID NO: 124818 - DNA, 15 bp, Homo sapiens
ccagtattatcttgg

SEQ ID NO: 124819 - DNA, 15 bp, Homo sapiens
cagtattatcttggc

SEQ ID NO: 124820 - DNA, 15 bp, Homo sapiens
agtattatcttggct

SEQ ID NO: 124821 - DNA, 15 bp, Homo sapiens
gtattatcttggctg

SEQ ID NO: 124822 - DNA, 15 bp, Homo sapiens
tattatcttggctgt

SEQ ID NO: 124823 - DNA, 15 bp, Homo sapiens
attatcttggctgtg

SEQ ID NO: 124824 - DNA, 15 bp, Homo sapiens
ttatcttggctgtgt

SEQ ID NO: 124825 - DNA, 15 bp, Homo sapiens
tatcttggctgtgtg

SEQ ID NO: 124826 - DNA, 15 bp, Homo sapiens
atcttggctgtgtga

SEQ ID NO: 124827 - DNA, 15 bp, Homo sapiens
tcttggctgtgtgac

SEQ ID NO: 124828 - DNA, 15 bp, Homo sapiens
cttggctgtgtgact

SEQ ID NO: 124829 - DNA, 15 bp, Homo sapiens
ttggctgtgtgactc

SEQ ID NO: 124830 - DNA, 15 bp, Homo sapiens
tggctgtgtgactct

SEQ ID NO: 124831 - DNA, 15 bp, Homo sapiens
ggctgtgtgactctg

SEQ ID NO: 124832 - DNA, 15 bp, Homo sapiens
gctgtgtgactctga

SEQ ID NO: 124833 - DNA, 15 bp, Homo sapiens
ctgtgtgactctgaa

SEQ ID NO: 124834 - DNA, 15 bp, Homo sapiens
tgtgtgactctgaag

SEQ ID NO: 124835 - DNA, 15 bp, Homo sapiens
gtgtgactctgaagc

SEQ ID NO: 124836 - DNA, 15 bp, Homo sapiens
tgtgactctgaagcc

SEQ ID NO: 124837 - DNA, 15 bp, Homo sapiens
gtgactctgaagcca

SEQ ID NO: 124838 - DNA, 15 bp, Homo sapiens
tgactctgaagccac

SEQ ID NO: 124839 - DNA, 15 bp, Homo sapiens
gactctgaagccaca

SEQ ID NO: 124840 - DNA, 15 bp, Homo sapiens
actctgaagccacag

SEQ ID NO: 124841 - DNA, 15 bp, Homo sapiens
ctctgaagccacagt

SEQ ID NO: 124842 - DNA, 15 bp, Homo sapiens
tctgaagccacagtt

SEQ ID NO: 124843 - DNA, 15 bp, Homo sapiens
ctgaagccacagttg

SEQ ID NO: 124844 - DNA, 15 bp, Homo sapiens
tgaagccacagttgt

SEQ ID NO: 124845 - DNA, 15 bp, Homo sapiens
gaagccacagttgta

SEQ ID NO: 124846 - DNA, 15 bp, Homo sapiens
aagccacagttgtaa

SEQ ID NO: 124847 - DNA, 15 bp, Homo sapiens
agccacagttgtaag

SEQ ID NO: 124848 - DNA, 15 bp, Homo sapiens
gccacagttgtaagt

SEQ ID NO: 124849 - DNA, 15 bp, Homo sapiens
ccacagttgtaagtt

SEQ ID NO: 124850 - DNA, 15 bp, Homo sapiens
cacagttgtaagtta

SEQ ID NO: 124851 - DNA, 15 bp, Homo sapiens
acagttgtaagttat

SEQ ID NO: 124852 - DNA, 15 bp, Homo sapiens
cagttgtaagttata

SEQ ID NO: 124853 - DNA, 15 bp, Homo sapiens
agttgtaagttataa

SEQ ID NO: 124854 - DNA, 15 bp, Homo sapiens
gttgtaagttataat

SEQ ID NO: 124855 - DNA, 15 bp, Homo sapiens
ttgtaagttataatt

SEQ ID NO: 124856 - DNA, 15 bp, Homo sapiens
tgtaagttataatta

SEQ ID NO: 124857 - DNA, 15 bp, Homo sapiens
gtaagttataattac

SEQ ID NO: 124858 - DNA, 15 bp, Homo sapiens
taagttataattact

SEQ ID NO: 124859 - DNA, 15 bp, Homo sapiens
aagttataattactc

SEQ ID NO: 124860 - DNA, 15 bp, Homo sapiens
agttataattactct

SEQ ID NO: 124861 - DNA, 15 bp, Homo sapiens
gttataattactctg

SEQ ID NO: 124862 - DNA, 15 bp, Homo sapiens
ttataattactctga

SEQ ID NO: 124863 - DNA, 15 bp, Homo sapiens
tataattactctgaa

SEQ ID NO: 124864 - DNA, 15 bp, Homo sapiens
ataattactctgaaa

SEQ ID NO: 124865 - DNA, 15 bp, Homo sapiens
taattactctgaaac

SEQ ID NO: 124866 - DNA, 15 bp, Homo sapiens
aattactctgaaaca

SEQ ID NO: 124867 - DNA, 15 bp, Homo sapiens
attactctgaaacac

SEQ ID NO: 124868 - DNA, 15 bp, Homo sapiens
ttactctgaaacaca

SEQ ID NO: 124869 - DNA, 15 bp, Homo sapiens
tactctgaaacacaa

SEQ ID NO: 124870 - DNA, 15 bp, Homo sapiens
actctgaaacacaag

SEQ ID NO: 124871 - DNA, 15 bp, Homo sapiens
ctctgaaacacaagg

SEQ ID NO: 124872 - DNA, 15 bp, Homo sapiens
tctgaaacacaaggc

SEQ ID NO: 124873 - DNA, 15 bp, Homo sapiens
ctgaaacacaaggcc

SEQ ID NO: 124874 - DNA, 15 bp, Homo sapiens
tgaaacacaaggccc

SEQ ID NO: 124875 - DNA, 15 bp, Homo sapiens
gaaacacaaggccct

SEQ ID NO: 124876 - DNA, 15 bp, Homo sapiens
aaacacaaggccctg

SEQ ID NO: 124877 - DNA, 15 bp, Homo sapiens
aacacaaggccctgt

SEQ ID NO: 124878 - DNA, 15 bp, Homo sapiens
acacaaggccctgtg

SEQ ID NO: 124879 - DNA, 15 bp, Homo sapiens
cacaaggccctgtga

SEQ ID NO: 124880 - DNA, 15 bp, Homo sapiens
acaaggccctgtgac

SEQ ID NO: 124881 - DNA, 15 bp, Homo sapiens
caaggccctgtgact

SEQ ID NO: 124882 - DNA, 15 bp, Homo sapiens
aaggccctgtgactc

SEQ ID NO: 124883 - DNA, 15 bp, Homo sapiens
aggccctgtgactct

SEQ ID NO: 124884 - DNA, 15 bp, Homo sapiens
ggccctgtgactctt

SEQ ID NO: 124885 - DNA, 15 bp, Homo sapiens
gccctgtgactcttt

SEQ ID NO: 124886 - DNA, 15 bp, Homo sapiens
ccctgtgactctttt

SEQ ID NO: 124887 - DNA, 15 bp, Homo sapiens
cctgtgactcttttg

SEQ ID NO: 124888 - DNA, 15 bp, Homo sapiens
ctgtgactcttttgg

SEQ ID NO: 124889 - DNA, 15 bp, Homo sapiens
tgtgactcttttggg

SEQ ID NO: 124890 - DNA, 15 bp, Homo sapiens
gtgactcttttgggc

SEQ ID NO: 124891 - DNA, 15 bp, Homo sapiens
tgactcttttgggct

SEQ ID NO: 124892 - DNA, 15 bp, Homo sapiens
gactcttttgggctc

SEQ ID NO: 124893 - DNA, 15 bp, Homo sapiens
actcttttgggctct

SEQ ID NO: 124894 - DNA, 15 bp, Homo sapiens
ctcttttgggctctt

SEQ ID NO: 124895 - DNA, 15 bp, Homo sapiens
tcttttgggctcttt

SEQ ID NO: 124896 - DNA, 15 bp, Homo sapiens
cttttgggctctttg

SEQ ID NO: 124897 - DNA, 15 bp, Homo sapiens
ttttgggctctttgg

SEQ ID NO: 124898 - DNA, 15 bp, Homo sapiens
tttgggctctttggt

SEQ ID NO: 124899 - DNA, 15 bp, Homo sapiens
ttgggctctttggtg

SEQ ID NO: 124900 - DNA, 15 bp, Homo sapiens
tgggctctttggtgt

SEQ ID NO: 124901 - DNA, 15 bp, Homo sapiens
gggctctttggtgtt

SEQ ID NO: 124902 - DNA, 15 bp, Homo sapiens
ggctctttggtgttt

SEQ ID NO: 124903 - DNA, 15 bp, Homo sapiens
gctctttggtgttta

SEQ ID NO: 124904 - DNA, 15 bp, Homo sapiens
ctctttggtgtttat

SEQ ID NO: 124905 - DNA, 15 bp, Homo sapiens
tctttggtgtttatc

SEQ ID NO: 124906 - DNA, 15 bp, Homo sapiens
ctttggtgtttatct

SEQ ID NO: 124907 - DNA, 15 bp, Homo sapiens
tttggtgtttatctt

SEQ ID NO: 124908 - DNA, 15 bp, Homo sapiens
ttggtgtttatcttg

SEQ ID NO: 124909 - DNA, 15 bp, Homo sapiens
tggtgtttatcttga

SEQ ID NO: 124910 - DNA, 15 bp, Homo sapiens
ggtgtttatcttgat

SEQ ID NO: 124911 - DNA, 15 bp, Homo sapiens
gtgtttatcttgatt

SEQ ID NO: 124912 - DNA, 15 bp, Homo sapiens
tgtttatcttgatta

SEQ ID NO: 124913 - DNA, 15 bp, Homo sapiens
gtttatcttgattac

SEQ ID NO: 124914 - DNA, 15 bp, Homo sapiens
tttatcttgattaca

SEQ ID NO: 124915 - DNA, 15 bp, Homo sapiens
ttatcttgattacaa

SEQ ID NO: 124916 - DNA, 15 bp, Homo sapiens
tatcttgattacaac

SEQ ID NO: 124917 - DNA, 15 bp, Homo sapiens
atcttgattacaacg

SEQ ID NO: 124918 - DNA, 15 bp, Homo sapiens
tcttgattacaacgt

SEQ ID NO: 124919 - DNA, 15 bp, Homo sapiens
cttgattacaacgtt

SEQ ID NO: 124920 - DNA, 15 bp, Homo sapiens
ttgattacaacgttg

SEQ ID NO: 124921 - DNA, 15 bp, Homo sapiens
tgattacaacgttgg

SEQ ID NO: 124922 - DNA, 15 bp, Homo sapiens
gattacaacgttgga

SEQ ID NO: 124923 - DNA, 15 bp, Homo sapiens
attacaacgttggaa

SEQ ID NO: 124924 - DNA, 15 bp, Homo sapiens
ttacaacgttggaat

SEQ ID NO: 124925 - DNA, 15 bp, Homo sapiens
tacaacgttggaata

SEQ ID NO: 124926 - DNA, 15 bp, Homo sapiens
acaacgttggaatat

SEQ ID NO: 124927 - DNA, 15 bp, Homo sapiens
caacgttggaatata

SEQ ID NO: 124928 - DNA, 15 bp, Homo sapiens
aacgttggaatatag

SEQ ID NO: 124929 - DNA, 15 bp, Homo sapiens
acgttggaatataga

SEQ ID NO: 124930 - DNA, 15 bp, Homo sapiens
cgttggaatatagaa

SEQ ID NO: 124931 - DNA, 15 bp, Homo sapiens
gttggaatatagaaa

SEQ ID NO: 124932 - DNA, 15 bp, Homo sapiens
ttggaatatagaaat

SEQ ID NO: 124933 - DNA, 15 bp, Homo sapiens
tggaatatagaaatg

SEQ ID NO: 124934 - DNA, 15 bp, Homo sapiens
ggaatatagaaatga

SEQ ID NO: 124935 - DNA, 15 bp, Homo sapiens
gaatatagaaatgaa

SEQ ID NO: 124936 - DNA, 15 bp, Homo sapiens
aatatagaaatgaaa

SEQ ID NO: 124937 - DNA, 15 bp, Homo sapiens
atatagaaatgaaag

SEQ ID NO: 124938 - DNA, 15 bp, Homo sapiens
tatagaaatgaaagg

SEQ ID NO: 124939 - DNA, 15 bp, Homo sapiens
atagaaatgaaagga

SEQ ID NO: 124940 - DNA, 15 bp, Homo sapiens
tagaaatgaaaggaa

SEQ ID NO: 124941 - DNA, 15 bp, Homo sapiens
agaaatgaaaggaat

SEQ ID NO: 124942 - DNA, 15 bp, Homo sapiens
gaaatgaaaggaatg

SEQ ID NO: 124943 - DNA, 15 bp, Homo sapiens
aaatgaaaggaatgg

SEQ ID NO: 124944 - DNA, 15 bp, Homo sapiens
aatgaaaggaatggg

SEQ ID NO: 124945 - DNA, 15 bp, Homo sapiens
atgaaaggaatggga

SEQ ID NO: 124946 - DNA, 15 bp, Homo sapiens
tgaaaggaatgggag

SEQ ID NO: 124947 - DNA, 15 bp, Homo sapiens
gaaaggaatgggaga

SEQ ID NO: 124948 - DNA, 15 bp, Homo sapiens
aaaggaatgggagag

SEQ ID NO: 124949 - DNA, 15 bp, Homo sapiens
aaggaatgggagagg

SEQ ID NO: 124950 - DNA, 15 bp, Homo sapiens
aggaatgggagaggt

SEQ ID NO: 124951 - DNA, 15 bp, Homo sapiens
ggaatgggagaggtg

SEQ ID NO: 124952 - DNA, 15 bp, Homo sapiens
gaatgggagaggtga

SEQ ID NO: 124953 - DNA, 15 bp, Homo sapiens
aatgggagaggtgat

SEQ ID NO: 124954 - DNA, 15 bp, Homo sapiens
atgggagaggtgata

SEQ ID NO: 124955 - DNA, 15 bp, Homo sapiens
tgggagaggtgatag

SEQ ID NO: 124956 - DNA, 15 bp, Homo sapiens
gggagaggtgataga

SEQ ID NO: 124957 - DNA, 15 bp, Homo sapiens
ggagaggtgatagac

SEQ ID NO: 124958 - DNA, 15 bp, Homo sapiens
gagaggtgatagact

SEQ ID NO: 124959 - DNA, 15 bp, Homo sapiens
agaggtgatagactt

SEQ ID NO: 124960 - DNA, 15 bp, Homo sapiens
gaggtgatagacttc

SEQ ID NO: 124961 - DNA, 15 bp, Homo sapiens
aggtgatagacttca

SEQ ID NO: 124962 - DNA, 15 bp, Homo sapiens
ggtgatagacttcag

SEQ ID NO: 124963 - DNA, 15 bp, Homo sapiens
gtgatagacttcagg

SEQ ID NO: 124964 - DNA, 15 bp, Homo sapiens
tgatagacttcaggc

SEQ ID NO: 124965 - DNA, 15 bp, Homo sapiens
gatagacttcaggca

SEQ ID NO: 124966 - DNA, 15 bp, Homo sapiens
atagacttcaggcag

SEQ ID NO: 124967 - DNA, 15 bp, Homo sapiens
tagacttcaggcagt

SEQ ID NO: 124968 - DNA, 15 bp, Homo sapiens
agacttcaggcagtg

SEQ ID NO: 124969 - DNA, 15 bp, Homo sapiens
gacttcaggcagtgt

SEQ ID NO: 124970 - DNA, 15 bp, Homo sapiens
acttcaggcagtgta

SEQ ID NO: 124971 - DNA, 15 bp, Homo sapiens
cttcaggcagtgtaa

SEQ ID NO: 124972 - DNA, 15 bp, Homo sapiens
ttcaggcagtgtaac

SEQ ID NO: 124973 - DNA, 15 bp, Homo sapiens
tcaggcagtgtaact

SEQ ID NO: 124974 - DNA, 15 bp, Homo sapiens
caggcagtgtaacta

SEQ ID NO: 124975 - DNA, 15 bp, Homo sapiens
aggcagtgtaactag

SEQ ID NO: 124976 - DNA, 15 bp, Homo sapiens
ggcagtgtaactagt

SEQ ID NO: 124977 - DNA, 15 bp, Homo sapiens
gcagtgtaactagtt

SEQ ID NO: 124978 - DNA, 15 bp, Homo sapiens
cagtgtaactagttg

SEQ ID NO: 124979 - DNA, 15 bp, Homo sapiens
agtgtaactagttgt

SEQ ID NO: 124980 - DNA, 15 bp, Homo sapiens
gtgtaactagttgtc

SEQ ID NO: 124981 - DNA, 15 bp, Homo sapiens
tgtaactagttgtct

SEQ ID NO: 124982 - DNA, 15 bp, Homo sapiens
gtaactagttgtctg

SEQ ID NO: 124983 - DNA, 15 bp, Homo sapiens
taactagttgtctga

SEQ ID NO: 124984 - DNA, 15 bp, Homo sapiens
aactagttgtctgaa

SEQ ID NO: 124985 - DNA, 15 bp, Homo sapiens
actagttgtctgaac

SEQ ID NO: 124986 - DNA, 15 bp, Homo sapiens
ctagttgtctgaaca

SEQ ID NO: 124987 - DNA, 15 bp, Homo sapiens
tagttgtctgaacac

SEQ ID NO: 124988 - DNA, 15 bp, Homo sapiens
agttgtctgaacact

SEQ ID NO: 124989 - DNA, 15 bp, Homo sapiens
gttgtctgaacacta

SEQ ID NO: 124990 - DNA, 15 bp, Homo sapiens
ttgtctgaacactac

SEQ ID NO: 124991 - DNA, 15 bp, Homo sapiens
tgtctgaacactact

SEQ ID NO: 124992 - DNA, 15 bp, Homo sapiens
gtctgaacactactg

SEQ ID NO: 124993 - DNA, 15 bp, Homo sapiens
tctgaacactactgg

SEQ ID NO: 124994 - DNA, 15 bp, Homo sapiens
ctgaacactactggc

SEQ ID NO: 124995 - DNA, 15 bp, Homo sapiens
tgaacactactggct

SEQ ID NO: 124996 - DNA, 15 bp, Homo sapiens
gaacactactggctc

SEQ ID NO: 124997 - DNA, 15 bp, Homo sapiens
aacactactggctca

SEQ ID NO: 124998 - DNA, 15 bp, Homo sapiens
acactactggctcaa

SEQ ID NO: 124999 - DNA, 15 bp, Homo sapiens
cactactggctcaat

SEQ ID NO: 125000 - DNA, 15 bp, Homo sapiens
actactggctcaatt

SEQ ID NO: 125001 - DNA, 15 bp, Homo sapiens
ctactggctcaatta

SEQ ID NO: 125002 - DNA, 15 bp, Homo sapiens
tactggctcaattat

SEQ ID NO: 125003 - DNA, 15 bp, Homo sapiens
actggctcaattata

SEQ ID NO: 125004 - DNA, 15 bp, Homo sapiens
ctggctcaattatat

SEQ ID NO: 125005 - DNA, 15 bp, Homo sapiens
tggctcaattatatt

SEQ ID NO: 125006 - DNA, 15 bp, Homo sapiens
ggctcaattatattg

SEQ ID NO: 125007 - DNA, 15 bp, Homo sapiens
gctcaattatattgt

SEQ ID NO: 125008 - DNA, 15 bp, Homo sapiens
ctcaattatattgtg

SEQ ID NO: 125009 - DNA, 15 bp, Homo sapiens
tcaattatattgtgt

SEQ ID NO: 125010 - DNA, 15 bp, Homo sapiens
caattatattgtgtc

SEQ ID NO: 125011 - DNA, 15 bp, Homo sapiens
aattatattgtgtct

SEQ ID NO: 125012 - DNA, 15 bp, Homo sapiens
attatattgtgtcta

SEQ ID NO: 125013 - DNA, 15 bp, Homo sapiens
ttatattgtgtctag

SEQ ID NO: 125014 - DNA, 15 bp, Homo sapiens
tatattgtgtctagt

SEQ ID NO: 125015 - DNA, 15 bp, Homo sapiens
atattgtgtctagtg

SEQ ID NO: 125016 - DNA, 15 bp, Homo sapiens
tattgtgtctagtga

SEQ ID NO: 125017 - DNA, 15 bp, Homo sapiens
attgtgtctagtgat

SEQ ID NO: 125018 - DNA, 15 bp, Homo sapiens
ttgtgtctagtgatt

SEQ ID NO: 125019 - DNA, 15 bp, Homo sapiens
tgtgtctagtgattt

SEQ ID NO: 125020 - DNA, 15 bp, Homo sapiens
gtgtctagtgatttc

SEQ ID NO: 125021 - DNA, 15 bp, Homo sapiens
tgtctagtgatttcc

SEQ ID NO: 125022 - DNA, 15 bp, Homo sapiens
gtctagtgatttcca

SEQ ID NO: 125023 - DNA, 15 bp, Homo sapiens
tctagtgatttccat

SEQ ID NO: 125024 - DNA, 15 bp, Homo sapiens
ctagtgatttccatc

SEQ ID NO: 125025 - DNA, 15 bp, Homo sapiens
tagtgatttccatct

SEQ ID NO: 125026 - DNA, 15 bp, Homo sapiens
agtgatttccatctt

SEQ ID NO: 125027 - DNA, 15 bp, Homo sapiens
gtgatttccatcttg

SEQ ID NO: 125028 - DNA, 15 bp, Homo sapiens
tgatttccatcttgt

SEQ ID NO: 125029 - DNA, 15 bp, Homo sapiens
gatttccatcttgtc

SEQ ID NO: 125030 - DNA, 15 bp, Homo sapiens
atttccatcttgtcc

SEQ ID NO: 125031 - DNA, 15 bp, Homo sapiens
tttccatcttgtccg

SEQ ID NO: 125032 - DNA, 15 bp, Homo sapiens
ttccatcttgtccgt

SEQ ID NO: 125033 - DNA, 15 bp, Homo sapiens
tccatcttgtccgtc

SEQ ID NO: 125034 - DNA, 15 bp, Homo sapiens
ccatcttgtccgtct

SEQ ID NO: 125035 - DNA, 15 bp, Homo sapiens
catcttgtccgtctg

SEQ ID NO: 125036 - DNA, 15 bp, Homo sapiens
atcttgtccgtctgc

SEQ ID NO: 125037 - DNA, 15 bp, Homo sapiens
tcttgtccgtctgct

SEQ ID NO: 125038 - DNA, 15 bp, Homo sapiens
cttgtccgtctgcta

SEQ ID NO: 125039 - DNA, 15 bp, Homo sapiens
ttgtccgtctgctaa

SEQ ID NO: 125040 - DNA, 15 bp, Homo sapiens
tgtccgtctgctaat

SEQ ID NO: 125041 - DNA, 15 bp, Homo sapiens
gtccgtctgctaatt

SEQ ID NO: 125042 - DNA, 15 bp, Homo sapiens
tccgtctgctaattt

SEQ ID NO: 125043 - DNA, 15 bp, Homo sapiens
ccgtctgctaattta

SEQ ID NO: 125044 - DNA, 15 bp, Homo sapiens
cgtctgctaatttat

SEQ ID NO: 125045 - DNA, 15 bp, Homo sapiens
gtctgctaatttatc

SEQ ID NO: 125046 - DNA, 15 bp, Homo sapiens
tctgctaatttatcg

SEQ ID NO: 125047 - DNA, 15 bp, Homo sapiens
ctgctaatttatcgc

SEQ ID NO: 125048 - DNA, 15 bp, Homo sapiens
tgctaatttatcgcc

SEQ ID NO: 125049 - DNA, 15 bp, Homo sapiens
gctaatttatcgcct

SEQ ID NO: 125050 - DNA, 15 bp, Homo sapiens
ctaatttatcgcctg

SEQ ID NO: 125051 - DNA, 15 bp, Homo sapiens
taatttatcgcctgg

SEQ ID NO: 125052 - DNA, 15 bp, Homo sapiens
aatttatcgcctggt

SEQ ID NO: 125053 - DNA, 15 bp, Homo sapiens
atttatcgcctggta

SEQ ID NO: 125054 - DNA, 15 bp, Homo sapiens
tttatcgcctggtaa

SEQ ID NO: 125055 - DNA, 15 bp, Homo sapiens
ttatcgcctggtaac

SEQ ID NO: 125056 - DNA, 15 bp, Homo sapiens
tatcgcctggtaact

SEQ ID NO: 125057 - DNA, 15 bp, Homo sapiens
atcgcctggtaactc

SEQ ID NO: 125058 - DNA, 15 bp, Homo sapiens
tcgcctggtaactca

SEQ ID NO: 125059 - DNA, 15 bp, Homo sapiens
cgcctggtaactcac

SEQ ID NO: 125060 - DNA, 15 bp, Homo sapiens
gcctggtaactcact

SEQ ID NO: 125061 - DNA, 15 bp, Homo sapiens
cctggtaactcactg

SEQ ID NO: 125062 - DNA, 15 bp, Homo sapiens
ctggtaactcactga

SEQ ID NO: 125063 - DNA, 15 bp, Homo sapiens
tggtaactcactgag

SEQ ID NO: 125064 - DNA, 15 bp, Homo sapiens
ggtaactcactgagg

SEQ ID NO: 125065 - DNA, 15 bp, Homo sapiens
gtaactcactgaggc

SEQ ID NO: 125066 - DNA, 15 bp, Homo sapiens
taactcactgaggca

SEQ ID NO: 125067 - DNA, 15 bp, Homo sapiens
aactcactgaggcag

SEQ ID NO: 125068 - DNA, 15 bp, Homo sapiens
actcactgaggcagg

SEQ ID NO: 125069 - DNA, 15 bp, Homo sapiens
ctcactgaggcaggg

SEQ ID NO: 125070 - DNA, 15 bp, Homo sapiens
tcactgaggcagggt

SEQ ID NO: 125071 - DNA, 15 bp, Homo sapiens
cactgaggcagggtt

SEQ ID NO: 125072 - DNA, 15 bp, Homo sapiens
actgaggcagggttt

SEQ ID NO: 125073 - DNA, 15 bp, Homo sapiens
ctgaggcagggtttt

SEQ ID NO: 125074 - DNA, 15 bp, Homo sapiens
tgaggcagggttttc

SEQ ID NO: 125075 - DNA, 15 bp, Homo sapiens
gaggcagggttttcc

SEQ ID NO: 125076 - DNA, 15 bp, Homo sapiens
aggcagggttttcct

SEQ ID NO: 125077 - DNA, 15 bp, Homo sapiens
ggcagggttttcctt

SEQ ID NO: 125078 - DNA, 15 bp, Homo sapiens
gcagggttttccttt

SEQ ID NO: 125079 - DNA, 15 bp, Homo sapiens
cagggttttcctttg

SEQ ID NO: 125080 - DNA, 15 bp, Homo sapiens
agggttttcctttgg

SEQ ID NO: 125081 - DNA, 15 bp, Homo sapiens
gggttttcctttgga

SEQ ID NO: 125082 - DNA, 15 bp, Homo sapiens
ggttttcctttggag

SEQ ID NO: 125083 - DNA, 15 bp, Homo sapiens
gttttcctttggaga

SEQ ID NO: 125084 - DNA, 15 bp, Homo sapiens
ttttcctttggagaa

SEQ ID NO: 125085 - DNA, 15 bp, Homo sapiens
tttcctttggagaaa

SEQ ID NO: 125086 - DNA, 15 bp, Homo sapiens
ttcctttggagaaac

SEQ ID NO: 125087 - DNA, 15 bp, Homo sapiens
tcctttggagaaacc

SEQ ID NO: 125088 - DNA, 15 bp, Homo sapiens
cctttggagaaacct

SEQ ID NO: 125089 - DNA, 15 bp, Homo sapiens
ctttggagaaacctc

SEQ ID NO: 125090 - DNA, 15 bp, Homo sapiens
tttggagaaacctca

SEQ ID NO: 125091 - DNA, 15 bp, Homo sapiens
ttggagaaacctcat

SEQ ID NO: 125092 - DNA, 15 bp, Homo sapiens
tggagaaacctcatt

SEQ ID NO: 125093 - DNA, 15 bp, Homo sapiens
ggagaaacctcattg

SEQ ID NO: 125094 - DNA, 15 bp, Homo sapiens
gagaaacctcattgt

SEQ ID NO: 125095 - DNA, 15 bp, Homo sapiens
agaaacctcattgtt

SEQ ID NO: 125096 - DNA, 15 bp, Homo sapiens
gaaacctcattgttt

SEQ ID NO: 125097 - DNA, 15 bp, Homo sapiens
aaacctcattgtttt

SEQ ID NO: 125098 - DNA, 15 bp, Homo sapiens
aacctcattgtttta

SEQ ID NO: 125099 - DNA, 15 bp, Homo sapiens
acctcattgttttaa

SEQ ID NO: 125100 - DNA, 15 bp, Homo sapiens
cctcattgttttaac

SEQ ID NO: 125101 - DNA, 15 bp, Homo sapiens
ctcattgttttaacc

SEQ ID NO: 125102 - DNA, 15 bp, Homo sapiens
tcattgttttaacca

SEQ ID NO: 125103 - DNA, 15 bp, Homo sapiens
cattgttttaaccag

SEQ ID NO: 125104 - DNA, 15 bp, Homo sapiens
attgttttaaccagt

SEQ ID NO: 125105 - DNA, 15 bp, Homo sapiens
ttgttttaaccagtg

SEQ ID NO: 125106 - DNA, 15 bp, Homo sapiens
tgttttaaccagtgt

SEQ ID NO: 125107 - DNA, 15 bp, Homo sapiens
gttttaaccagtgta

SEQ ID NO: 125108 - DNA, 15 bp, Homo sapiens
ttttaaccagtgtat

SEQ ID NO: 125109 - DNA, 15 bp, Homo sapiens
tttaaccagtgtatc

SEQ ID NO: 125110 - DNA, 15 bp, Homo sapiens
ttaaccagtgtatca

SEQ ID NO: 125111 - DNA, 15 bp, Homo sapiens
taaccagtgtatcat

SEQ ID NO: 125112 - DNA, 15 bp, Homo sapiens
aaccagtgtatcatg

SEQ ID NO: 125113 - DNA, 15 bp, Homo sapiens
accagtgtatcatgc

SEQ ID NO: 125114 - DNA, 15 bp, Homo sapiens
ccagtgtatcatgct

SEQ ID NO: 125115 - DNA, 15 bp, Homo sapiens
cagtgtatcatgctt

SEQ ID NO: 125116 - DNA, 15 bp, Homo sapiens
agtgtatcatgcttg

SEQ ID NO: 125117 - DNA, 15 bp, Homo sapiens
gtgtatcatgcttgt

SEQ ID NO: 125118 - DNA, 15 bp, Homo sapiens
tgtatcatgcttgtt

SEQ ID NO: 125119 - DNA, 15 bp, Homo sapiens
gtatcatgcttgttt

SEQ ID NO: 125120 - DNA, 15 bp, Homo sapiens
tatcatgcttgttta

SEQ ID NO: 125121 - DNA, 15 bp, Homo sapiens
atcatgcttgtttag

SEQ ID NO: 125122 - DNA, 15 bp, Homo sapiens
tcatgcttgtttaga

SEQ ID NO: 125123 - DNA, 15 bp, Homo sapiens
catgcttgtttagaa

SEQ ID NO: 125124 - DNA, 15 bp, Homo sapiens
atgcttgtttagaag

SEQ ID NO: 125125 - DNA, 15 bp, Homo sapiens
tgcttgtttagaagt

SEQ ID NO: 125126 - DNA, 15 bp, Homo sapiens
gcttgtttagaagtt

SEQ ID NO: 125127 - DNA, 15 bp, Homo sapiens
cttgtttagaagttc

SEQ ID NO: 125128 - DNA, 15 bp, Homo sapiens
ttgtttagaagttca

SEQ ID NO: 125129 - DNA, 15 bp, Homo sapiens
tgtttagaagttcaa

SEQ ID NO: 125130 - DNA, 15 bp, Homo sapiens
gtttagaagttcaat

SEQ ID NO: 125131 - DNA, 15 bp, Homo sapiens
tttagaagttcaatg

SEQ ID NO: 125132 - DNA, 15 bp, Homo sapiens
ttagaagttcaatga

SEQ ID NO: 125133 - DNA, 15 bp, Homo sapiens
tagaagttcaatgat

SEQ ID NO: 125134 - DNA, 15 bp, Homo sapiens
agaagttcaatgatc

SEQ ID NO: 125135 - DNA, 15 bp, Homo sapiens
gaagttcaatgatct

SEQ ID NO: 125136 - DNA, 15 bp, Homo sapiens
aagttcaatgatctt

SEQ ID NO: 125137 - DNA, 15 bp, Homo sapiens
agttcaatgatcttt

SEQ ID NO: 125138 - DNA, 15 bp, Homo sapiens
gttcaatgatctttt

SEQ ID NO: 125139 - DNA, 15 bp, Homo sapiens
ttcaatgatcttttt

SEQ ID NO: 125140 - DNA, 15 bp, Homo sapiens
tcaatgatcttttta

SEQ ID NO: 125141 - DNA, 15 bp, Homo sapiens
caatgatctttttaa

SEQ ID NO: 125142 - DNA, 15 bp, Homo sapiens
aatgatctttttaac

SEQ ID NO: 125143 - DNA, 15 bp, Homo sapiens
atgatctttttaact

SEQ ID NO: 125144 - DNA, 15 bp, Homo sapiens
tgatctttttaactc

SEQ ID NO: 125145 - DNA, 15 bp, Homo sapiens
gatctttttaactca

SEQ ID NO: 125146 - DNA, 15 bp, Homo sapiens
atctttttaactcat

SEQ ID NO: 125147 - DNA, 15 bp, Homo sapiens
tctttttaactcatc

SEQ ID NO: 125148 - DNA, 15 bp, Homo sapiens
ctttttaactcatcg

SEQ ID NO: 125149 - DNA, 15 bp, Homo sapiens
tttttaactcatcgg

SEQ ID NO: 125150 - DNA, 15 bp, Homo sapiens
ttttaactcatcgga

SEQ ID NO: 125151 - DNA, 15 bp, Homo sapiens
tttaactcatcggag

SEQ ID NO: 125152 - DNA, 15 bp, Homo sapiens
ttaactcatcggaga

SEQ ID NO: 125153 - DNA, 15 bp, Homo sapiens
taactcatcggagaa

SEQ ID NO: 125154 - DNA, 15 bp, Homo sapiens
aactcatcggagaag

SEQ ID NO: 125155 - DNA, 15 bp, Homo sapiens
actcatcggagaaga

SEQ ID NO: 125156 - DNA, 15 bp, Homo sapiens
ctcatcggagaagat

SEQ ID NO: 125157 - DNA, 15 bp, Homo sapiens
tcatcggagaagatg

SEQ ID NO: 125158 - DNA, 15 bp, Homo sapiens
catcggagaagatga

SEQ ID NO: 125159 - DNA, 15 bp, Homo sapiens
atcggagaagatgat

SEQ ID NO: 125160 - DNA, 15 bp, Homo sapiens
tcggagaagatgatg

SEQ ID NO: 125161 - DNA, 15 bp, Homo sapiens
cggagaagatgatga

SEQ ID NO: 125162 - DNA, 15 bp, Homo sapiens
ggagaagatgatgac

SEQ ID NO: 125163 - DNA, 15 bp, Homo sapiens
gagaagatgatgacc

SEQ ID NO: 125164 - DNA, 15 bp, Homo sapiens
agaagatgatgacca

SEQ ID NO: 125165 - DNA, 15 bp, Homo sapiens
gaagatgatgaccag

SEQ ID NO: 125166 - DNA, 15 bp, Homo sapiens
aagatgatgaccaga

SEQ ID NO: 125167 - DNA, 15 bp, Homo sapiens
agatgatgaccagac

SEQ ID NO: 125168 - DNA, 15 bp, Homo sapiens
gatgatgaccagacc

SEQ ID NO: 125169 - DNA, 15 bp, Homo sapiens
atgatgaccagacct

SEQ ID NO: 125170 - DNA, 15 bp, Homo sapiens
tgatgaccagacctg

SEQ ID NO: 125171 - DNA, 15 bp, Homo sapiens
gatgaccagacctgg

SEQ ID NO: 125172 - DNA, 15 bp, Homo sapiens
atgaccagacctgga

SEQ ID NO: 125173 - DNA, 15 bp, Homo sapiens
tgaccagacctggac

SEQ ID NO: 125174 - DNA, 15 bp, Homo sapiens
gaccagacctggaca

SEQ ID NO: 125175 - DNA, 15 bp, Homo sapiens
accagacctggacag

SEQ ID NO: 125176 - DNA, 15 bp, Homo sapiens
ccagacctggacaga

SEQ ID NO: 125177 - DNA, 15 bp, Homo sapiens
cagacctggacagat

SEQ ID NO: 125178 - DNA, 15 bp, Homo sapiens
agacctggacagatg

SEQ ID NO: 125179 - DNA, 15 bp, Homo sapiens
gacctggacagatgg

SEQ ID NO: 125180 - DNA, 15 bp, Homo sapiens
acctggacagatggg

SEQ ID NO: 125181 - DNA, 15 bp, Homo sapiens
cctggacagatgggg

SEQ ID NO: 125182 - DNA, 15 bp, Homo sapiens
ctggacagatgggga

SEQ ID NO: 125183 - DNA, 15 bp, Homo sapiens
tggacagatggggaa

SEQ ID NO: 125184 - DNA, 15 bp, Homo sapiens
ggacagatggggaag

SEQ ID NO: 125185 - DNA, 15 bp, Homo sapiens
gacagatggggaagg

SEQ ID NO: 125186 - DNA, 15 bp, Homo sapiens
acagatggggaagga

SEQ ID NO: 125187 - DNA, 15 bp, Homo sapiens
cagatggggaaggac

SEQ ID NO: 125188 - DNA, 15 bp, Homo sapiens
agatggggaaggact

SEQ ID NO: 125189 - DNA, 15 bp, Homo sapiens
gatggggaaggactt

SEQ ID NO: 125190 - DNA, 15 bp, Homo sapiens
atggggaaggacttt

SEQ ID NO: 125191 - DNA, 15 bp, Homo sapiens
tggggaaggactttg

SEQ ID NO: 125192 - DNA, 15 bp, Homo sapiens
ggggaaggactttgc

SEQ ID NO: 125193 - DNA, 15 bp, Homo sapiens
gggaaggactttgca

SEQ ID NO: 125194 - DNA, 15 bp, Homo sapiens
ggaaggactttgcac

SEQ ID NO: 125195 - DNA, 15 bp, Homo sapiens
gaaggactttgcact

SEQ ID NO: 125196 - DNA, 15 bp, Homo sapiens
aaggactttgcactc

SEQ ID NO: 125197 - DNA, 15 bp, Homo sapiens
aggactttgcactct

SEQ ID NO: 125198 - DNA, 15 bp, Homo sapiens
ggactttgcactctc

SEQ ID NO: 125199 - DNA, 15 bp, Homo sapiens
gactttgcactctct

SEQ ID NO: 125200 - DNA, 15 bp, Homo sapiens
actttgcactctctc

SEQ ID NO: 125201 - DNA, 15 bp, Homo sapiens
ctttgcactctctct

SEQ ID NO: 125202 - DNA, 15 bp, Homo sapiens
tttgcactctctctt

SEQ ID NO: 125203 - DNA, 15 bp, Homo sapiens
ttgcactctctcttt

SEQ ID NO: 125204 - DNA, 15 bp, Homo sapiens
tgcactctctcttta

SEQ ID NO: 125205 - DNA, 15 bp, Homo sapiens
gcactctctctttac

SEQ ID NO: 125206 - DNA, 15 bp, Homo sapiens
cactctctctttaca

SEQ ID NO: 125207 - DNA, 15 bp, Homo sapiens
actctctctttacag

SEQ ID NO: 125208 - DNA, 15 bp, Homo sapiens
ctctctctttacagt

SEQ ID NO: 125209 - DNA, 15 bp, Homo sapiens
tctctctttacagtc

SEQ ID NO: 125210 - DNA, 15 bp, Homo sapiens
ctctctttacagtcc

SEQ ID NO: 125211 - DNA, 15 bp, Homo sapiens
tctctttacagtcct

SEQ ID NO: 125212 - DNA, 15 bp, Homo sapiens
ctctttacagtcctg

SEQ ID NO: 125213 - DNA, 15 bp, Homo sapiens
tctttacagtcctga

SEQ ID NO: 125214 - DNA, 15 bp, Homo sapiens
ctttacagtcctgag

SEQ ID NO: 125215 - DNA, 15 bp, Homo sapiens
tttacagtcctgagt

SEQ ID NO: 125216 - DNA, 15 bp, Homo sapiens
ttacagtcctgagtg

SEQ ID NO: 125217 - DNA, 15 bp, Homo sapiens
tacagtcctgagtgc

SEQ ID NO: 125218 - DNA, 15 bp, Homo sapiens
acagtcctgagtgca

SEQ ID NO: 125219 - DNA, 15 bp, Homo sapiens
cagtcctgagtgcac

SEQ ID NO: 125220 - DNA, 15 bp, Homo sapiens
agtcctgagtgcaca

SEQ ID NO: 125221 - DNA, 15 bp, Homo sapiens
gtcctgagtgcacac

SEQ ID NO: 125222 - DNA, 15 bp, Homo sapiens
tcctgagtgcacaca

SEQ ID NO: 125223 - DNA, 15 bp, Homo sapiens
cctgagtgcacacag

SEQ ID NO: 125224 - DNA, 15 bp, Homo sapiens
ctgagtgcacacagg

SEQ ID NO: 125225 - DNA, 15 bp, Homo sapiens
tgagtgcacacaggt

SEQ ID NO: 125226 - DNA, 15 bp, Homo sapiens
gagtgcacacaggtc

SEQ ID NO: 125227 - DNA, 15 bp, Homo sapiens
agtgcacacaggtca

SEQ ID NO: 125228 - DNA, 15 bp, Homo sapiens
gtgcacacaggtcaa

SEQ ID NO: 125229 - DNA, 15 bp, Homo sapiens
tgcacacaggtcaat

SEQ ID NO: 125230 - DNA, 15 bp, Homo sapiens
gcacacaggtcaata

SEQ ID NO: 125231 - DNA, 15 bp, Homo sapiens
cacacaggtcaatat

SEQ ID NO: 125232 - DNA, 15 bp, Homo sapiens
acacaggtcaatatg

SEQ ID NO: 125233 - DNA, 15 bp, Homo sapiens
cacaggtcaatatgg

SEQ ID NO: 125234 - DNA, 15 bp, Homo sapiens
acaggtcaatatgga

SEQ ID NO: 125235 - DNA, 15 bp, Homo sapiens
caggtcaatatggaa

SEQ ID NO: 125236 - DNA, 15 bp, Homo sapiens
aggtcaatatggaac

SEQ ID NO: 125237 - DNA, 15 bp, Homo sapiens
ggtcaatatggaact

SEQ ID NO: 125238 - DNA, 15 bp, Homo sapiens
gtcaatatggaacta

SEQ ID NO: 125239 - DNA, 15 bp, Homo sapiens
tcaatatggaactat

SEQ ID NO: 125240 - DNA, 15 bp, Homo sapiens
caatatggaactatg

SEQ ID NO: 125241 - DNA, 15 bp, Homo sapiens
aatatggaactatgt

SEQ ID NO: 125242 - DNA, 15 bp, Homo sapiens
atatggaactatgtg

SEQ ID NO: 125243 - DNA, 15 bp, Homo sapiens
tatggaactatgtgt

SEQ ID NO: 125244 - DNA, 15 bp, Homo sapiens
atggaactatgtgtg

SEQ ID NO: 125245 - DNA, 15 bp, Homo sapiens
tggaactatgtgtga

SEQ ID NO: 125246 - DNA, 15 bp, Homo sapiens
ggaactatgtgtgaa

SEQ ID NO: 125247 - DNA, 15 bp, Homo sapiens
gaactatgtgtgaat

SEQ ID NO: 125248 - DNA, 15 bp, Homo sapiens
aactatgtgtgaatt

SEQ ID NO: 125249 - DNA, 15 bp, Homo sapiens
actatgtgtgaattt

SEQ ID NO: 125250 - DNA, 15 bp, Homo sapiens
ctatgtgtgaatttt

SEQ ID NO: 125251 - DNA, 15 bp, Homo sapiens
tatgtgtgaattttc

SEQ ID NO: 125252 - DNA, 15 bp, Homo sapiens
atgtgtgaattttca

SEQ ID NO: 125253 - DNA, 15 bp, Homo sapiens
tgtgtgaattttcat

SEQ ID NO: 125254 - DNA, 15 bp, Homo sapiens
gtgtgaattttcatt

SEQ ID NO: 125255 - DNA, 15 bp, Homo sapiens
tgtgaattttcattg

SEQ ID NO: 125256 - DNA, 15 bp, Homo sapiens
gtgaattttcattgt

SEQ ID NO: 125257 - DNA, 15 bp, Homo sapiens
tgaattttcattgtc

SEQ ID NO: 125258 - DNA, 15 bp, Homo sapiens
gaattttcattgtct

SEQ ID NO: 125259 - DNA, 15 bp, Homo sapiens
aattttcattgtctt

SEQ ID NO: 125260 - DNA, 15 bp, Homo sapiens
attttcattgtcttt

SEQ ID NO: 125261 - DNA, 15 bp, Homo sapiens
ttttcattgtctttg

SEQ ID NO: 125262 - DNA, 15 bp, Homo sapiens
tttcattgtctttga

SEQ ID NO: 125263 - DNA, 15 bp, Homo sapiens
ttcattgtctttgag

SEQ ID NO: 125264 - DNA, 15 bp, Homo sapiens
tcattgtctttgaga

SEQ ID NO: 125265 - DNA, 15 bp, Homo sapiens
cattgtctttgagag

SEQ ID NO: 125266 - DNA, 15 bp, Homo sapiens
attgtctttgagagc

SEQ ID NO: 125267 - DNA, 15 bp, Homo sapiens
ttgtctttgagagcc

SEQ ID NO: 125268 - DNA, 15 bp, Homo sapiens
tgtctttgagagccc

SEQ ID NO: 125269 - DNA, 15 bp, Homo sapiens
gtctttgagagccct

SEQ ID NO: 125270 - DNA, 15 bp, Homo sapiens
tctttgagagccctc

SEQ ID NO: 125271 - DNA, 15 bp, Homo sapiens
ctttgagagccctct

SEQ ID NO: 125272 - DNA, 15 bp, Homo sapiens
tttgagagccctctt

SEQ ID NO: 125273 - DNA, 15 bp, Homo sapiens
ttgagagccctcttc

SEQ ID NO: 125274 - DNA, 15 bp, Homo sapiens
tgagagccctcttct

SEQ ID NO: 125275 - DNA, 15 bp, Homo sapiens
gagagccctcttctc

SEQ ID NO: 125276 - DNA, 15 bp, Homo sapiens
agagccctcttctct

SEQ ID NO: 125277 - DNA, 15 bp, Homo sapiens
gagccctcttctctg

SEQ ID NO: 125278 - DNA, 15 bp, Homo sapiens
agccctcttctctgc

SEQ ID NO: 125279 - DNA, 15 bp, Homo sapiens
gccctcttctctgcc

SEQ ID NO: 125280 - DNA, 15 bp, Homo sapiens
ccctcttctctgccc

SEQ ID NO: 125281 - DNA, 15 bp, Homo sapiens
cctcttctctgcccc

SEQ ID NO: 125282 - DNA, 15 bp, Homo sapiens
ctcttctctgcccca

SEQ ID NO: 125283 - DNA, 15 bp, Homo sapiens
tcttctctgccccat

SEQ ID NO: 125284 - DNA, 15 bp, Homo sapiens
cttctctgccccata

SEQ ID NO: 125285 - DNA, 15 bp, Homo sapiens
ttctctgccccatag

SEQ ID NO: 125286 - DNA, 15 bp, Homo sapiens
tctctgccccatagg

SEQ ID NO: 125287 - DNA, 15 bp, Homo sapiens
ctctgccccataggg

SEQ ID NO: 125288 - DNA, 15 bp, Homo sapiens
tctgccccataggga

SEQ ID NO: 125289 - DNA, 15 bp, Homo sapiens
ctgccccatagggag

SEQ ID NO: 125290 - DNA, 15 bp, Homo sapiens
tgccccatagggagc

SEQ ID NO: 125291 - DNA, 15 bp, Homo sapiens
gccccatagggagca

SEQ ID NO: 125292 - DNA, 15 bp, Homo sapiens
ccccatagggagcag

SEQ ID NO: 125293 - DNA, 15 bp, Homo sapiens
cccatagggagcagc

SEQ ID NO: 125294 - DNA, 15 bp, Homo sapiens
ccatagggagcagct

SEQ ID NO: 125295 - DNA, 15 bp, Homo sapiens
catagggagcagctt

SEQ ID NO: 125296 - DNA, 15 bp, Homo sapiens
atagggagcagcttt

SEQ ID NO: 125297 - DNA, 15 bp, Homo sapiens
tagggagcagctttg

SEQ ID NO: 125298 - DNA, 15 bp, Homo sapiens
agggagcagctttgt

SEQ ID NO: 125299 - DNA, 15 bp, Homo sapiens
gggagcagctttgtg

SEQ ID NO: 125300 - DNA, 15 bp, Homo sapiens
ggagcagctttgtgt

SEQ ID NO: 125301 - DNA, 15 bp, Homo sapiens
gagcagctttgtgtg

SEQ ID NO: 125302 - DNA, 15 bp, Homo sapiens
agcagctttgtgtgc

SEQ ID NO: 125303 - DNA, 15 bp, Homo sapiens
gcagctttgtgtgca

SEQ ID NO: 125304 - DNA, 15 bp, Homo sapiens
cagctttgtgtgcaa

SEQ ID NO: 125305 - DNA, 15 bp, Homo sapiens
agctttgtgtgcaat

SEQ ID NO: 125306 - DNA, 15 bp, Homo sapiens
gctttgtgtgcaatt

SEQ ID NO: 125307 - DNA, 15 bp, Homo sapiens
ctttgtgtgcaatta

SEQ ID NO: 125308 - DNA, 15 bp, Homo sapiens
tttgtgtgcaattag

SEQ ID NO: 125309 - DNA, 15 bp, Homo sapiens
ttgtgtgcaattaga

SEQ ID NO: 125310 - DNA, 15 bp, Homo sapiens
tgtgtgcaattagag

SEQ ID NO: 125311 - DNA, 15 bp, Homo sapiens
gtgtgcaattagagg

SEQ ID NO: 125312 - DNA, 15 bp, Homo sapiens
tgtgcaattagagga

SEQ ID NO: 125313 - DNA, 15 bp, Homo sapiens
gtgcaattagaggag

SEQ ID NO: 125314 - DNA, 15 bp, Homo sapiens
tgcaattagaggagc

SEQ ID NO: 125315 - DNA, 15 bp, Homo sapiens
gcaattagaggagca

SEQ ID NO: 125316 - DNA, 15 bp, Homo sapiens
caattagaggagcaa

SEQ ID NO: 125317 - DNA, 15 bp, Homo sapiens
aattagaggagcaag

SEQ ID NO: 125318 - DNA, 15 bp, Homo sapiens
attagaggagcaagg

SEQ ID NO: 125319 - DNA, 15 bp, Homo sapiens
ttagaggagcaaggg

SEQ ID NO: 125320 - DNA, 15 bp, Homo sapiens
tagaggagcaagggt

SEQ ID NO: 125321 - DNA, 15 bp, Homo sapiens
agaggagcaagggtt

SEQ ID NO: 125322 - DNA, 15 bp, Homo sapiens
gaggagcaagggttg

SEQ ID NO: 125323 - DNA, 15 bp, Homo sapiens
aggagcaagggttgt

SEQ ID NO: 125324 - DNA, 15 bp, Homo sapiens
ggagcaagggttgtg

SEQ ID NO: 125325 - DNA, 15 bp, Homo sapiens
gagcaagggttgtgt

SEQ ID NO: 125326 - DNA, 15 bp, Homo sapiens
agcaagggttgtgtg

SEQ ID NO: 125327 - DNA, 15 bp, Homo sapiens
gcaagggttgtgtgt

SEQ ID NO: 125328 - DNA, 15 bp, Homo sapiens
caagggttgtgtgta

SEQ ID NO: 125329 - DNA, 15 bp, Homo sapiens
aagggttgtgtgtat

SEQ ID NO: 125330 - DNA, 15 bp, Homo sapiens
agggttgtgtgtatt

SEQ ID NO: 125331 - DNA, 15 bp, Homo sapiens
gggttgtgtgtattt

SEQ ID NO: 125332 - DNA, 15 bp, Homo sapiens
ggttgtgtgtattta

SEQ ID NO: 125333 - DNA, 15 bp, Homo sapiens
gttgtgtgtatttag

SEQ ID NO: 125334 - DNA, 15 bp, Homo sapiens
ttgtgtgtatttagc

SEQ ID NO: 125335 - DNA, 15 bp, Homo sapiens
tgtgtgtatttagca

SEQ ID NO: 125336 - DNA, 15 bp, Homo sapiens
gtgtgtatttagcac

SEQ ID NO: 125337 - DNA, 15 bp, Homo sapiens
tgtgtatttagcaca

SEQ ID NO: 125338 - DNA, 15 bp, Homo sapiens
gtgtatttagcacag

SEQ ID NO: 125339 - DNA, 15 bp, Homo sapiens
tgtatttagcacagc

SEQ ID NO: 125340 - DNA, 15 bp, Homo sapiens
gtatttagcacagca

SEQ ID NO: 125341 - DNA, 15 bp, Homo sapiens
tatttagcacagcag

SEQ ID NO: 125342 - DNA, 15 bp, Homo sapiens
atttagcacagcagg

SEQ ID NO: 125343 - DNA, 15 bp, Homo sapiens
tttagcacagcaggt

SEQ ID NO: 125344 - DNA, 15 bp, Homo sapiens
ttagcacagcaggtt

SEQ ID NO: 125345 - DNA, 15 bp, Homo sapiens
tagcacagcaggttg

SEQ ID NO: 125346 - DNA, 15 bp, Homo sapiens
agcacagcaggttgg

SEQ ID NO: 125347 - DNA, 15 bp, Homo sapiens
gcacagcaggttggc

SEQ ID NO: 125348 - DNA, 15 bp, Homo sapiens
cacagcaggttggcc

SEQ ID NO: 125349 - DNA, 15 bp, Homo sapiens
acagcaggttggcct

SEQ ID NO: 125350 - DNA, 15 bp, Homo sapiens
cagcaggttggcctg

SEQ ID NO: 125351 - DNA, 15 bp, Homo sapiens
agcaggttggcctgg

SEQ ID NO: 125352 - DNA, 15 bp, Homo sapiens
gcaggttggcctggt

SEQ ID NO: 125353 - DNA, 15 bp, Homo sapiens
caggttggcctggtc

SEQ ID NO: 125354 - DNA, 15 bp, Homo sapiens
aggttggcctggtcc

SEQ ID NO: 125355 - DNA, 15 bp, Homo sapiens
ggttggcctggtcct

SEQ ID NO: 125356 - DNA, 15 bp, Homo sapiens
gttggcctggtcctc

SEQ ID NO: 125357 - DNA, 15 bp, Homo sapiens
ttggcctggtcctct

SEQ ID NO: 125358 - DNA, 15 bp, Homo sapiens
tggcctggtcctctc

SEQ ID NO: 125359 - DNA, 15 bp, Homo sapiens
ggcctggtcctctcc

SEQ ID NO: 125360 - DNA, 15 bp, Homo sapiens
gcctggtcctctcct

SEQ ID NO: 125361 - DNA, 15 bp, Homo sapiens
cctggtcctctcctc

SEQ ID NO: 125362 - DNA, 15 bp, Homo sapiens
ctggtcctctcctct

SEQ ID NO: 125363 - DNA, 15 bp, Homo sapiens
tggtcctctcctctc

SEQ ID NO: 125364 - DNA, 15 bp, Homo sapiens
ggtcctctcctctca

SEQ ID NO: 125365 - DNA, 15 bp, Homo sapiens
gtcctctcctctcaa

SEQ ID NO: 125366 - DNA, 15 bp, Homo sapiens
tcctctcctctcaac

SEQ ID NO: 125367 - DNA, 15 bp, Homo sapiens
cctctcctctcaaca

SEQ ID NO: 125368 - DNA, 15 bp, Homo sapiens
ctctcctctcaacat

SEQ ID NO: 125369 - DNA, 15 bp, Homo sapiens
tctcctctcaacata

SEQ ID NO: 125370 - DNA, 15 bp, Homo sapiens
ctcctctcaacatag

SEQ ID NO: 125371 - DNA, 15 bp, Homo sapiens
tcctctcaacatagt

SEQ ID NO: 125372 - DNA, 15 bp, Homo sapiens
cctctcaacatagtc

SEQ ID NO: 125373 - DNA, 15 bp, Homo sapiens
ctctcaacatagtca

SEQ ID NO: 125374 - DNA, 15 bp, Homo sapiens
tctcaacatagtcac

SEQ ID NO: 125375 - DNA, 15 bp, Homo sapiens
ctcaacatagtcacc

SEQ ID NO: 125376 - DNA, 15 bp, Homo sapiens
tcaacatagtcacca

SEQ ID NO: 125377 - DNA, 15 bp, Homo sapiens
caacatagtcaccac

SEQ ID NO: 125378 - DNA, 15 bp, Homo sapiens
aacatagtcaccaca

SEQ ID NO: 125379 - DNA, 15 bp, Homo sapiens
acatagtcaccacat

SEQ ID NO: 125380 - DNA, 15 bp, Homo sapiens
catagtcaccacata

SEQ ID NO: 125381 - DNA, 15 bp, Homo sapiens
atagtcaccacatac

SEQ ID NO: 125382 - DNA, 15 bp, Homo sapiens
tagtcaccacatacc

SEQ ID NO: 125383 - DNA, 15 bp, Homo sapiens
agtcaccacatacct

SEQ ID NO: 125384 - DNA, 15 bp, Homo sapiens
gtcaccacatacctg

SEQ ID NO: 125385 - DNA, 15 bp, Homo sapiens
tcaccacatacctgg

SEQ ID NO: 125386 - DNA, 15 bp, Homo sapiens
caccacatacctggc

SEQ ID NO: 125387 - DNA, 15 bp, Homo sapiens
accacatacctggca

SEQ ID NO: 125388 - DNA, 15 bp, Homo sapiens
ccacatacctggcac

SEQ ID NO: 125389 - DNA, 15 bp, Homo sapiens
cacatacctggcact

SEQ ID NO: 125390 - DNA, 15 bp, Homo sapiens
acatacctggcacta

SEQ ID NO: 125391 - DNA, 15 bp, Homo sapiens
catacctggcactat

SEQ ID NO: 125392 - DNA, 15 bp, Homo sapiens
atacctggcactatg

SEQ ID NO: 125393 - DNA, 15 bp, Homo sapiens
tacctggcactatgc

SEQ ID NO: 125394 - DNA, 15 bp, Homo sapiens
acctggcactatgct

SEQ ID NO: 125395 - DNA, 15 bp, Homo sapiens
cctggcactatgcta

SEQ ID NO: 125396 - DNA, 15 bp, Homo sapiens
ctggcactatgctaa

SEQ ID NO: 125397 - DNA, 15 bp, Homo sapiens
tggcactatgctaag

SEQ ID NO: 125398 - DNA, 15 bp, Homo sapiens
ggcactatgctaagg

SEQ ID NO: 125399 - DNA, 15 bp, Homo sapiens
gcactatgctaaggc

SEQ ID NO: 125400 - DNA, 15 bp, Homo sapiens
cactatgctaaggct

SEQ ID NO: 125401 - DNA, 15 bp, Homo sapiens
actatgctaaggctg

SEQ ID NO: 125402 - DNA, 15 bp, Homo sapiens
ctatgctaaggctgg

SEQ ID NO: 125403 - DNA, 15 bp, Homo sapiens
tatgctaaggctggg

SEQ ID NO: 125404 - DNA, 15 bp, Homo sapiens
atgctaaggctggga

SEQ ID NO: 125405 - DNA, 15 bp, Homo sapiens
tgctaaggctgggaa

SEQ ID NO: 125406 - DNA, 15 bp, Homo sapiens
gctaaggctgggaat

SEQ ID NO: 125407 - DNA, 15 bp, Homo sapiens
ctaaggctgggaatg

SEQ ID NO: 125408 - DNA, 15 bp, Homo sapiens
taaggctgggaatgc

SEQ ID NO: 125409 - DNA, 15 bp, Homo sapiens
aaggctgggaatgca

SEQ ID NO: 125410 - DNA, 15 bp, Homo sapiens
aggctgggaatgcag

SEQ ID NO: 125411 - DNA, 15 bp, Homo sapiens
ggctgggaatgcaga

SEQ ID NO: 125412 - DNA, 15 bp, Homo sapiens
gctgggaatgcagac

SEQ ID NO: 125413 - DNA, 15 bp, Homo sapiens
ctgggaatgcagaca

SEQ ID NO: 125414 - DNA, 15 bp, Homo sapiens
tgggaatgcagacag

SEQ ID NO: 125415 - DNA, 15 bp, Homo sapiens
gggaatgcagacaga

SEQ ID NO: 125416 - DNA, 15 bp, Homo sapiens
ggaatgcagacagat

SEQ ID NO: 125417 - DNA, 15 bp, Homo sapiens
gaatgcagacagatg

SEQ ID NO: 125418 - DNA, 15 bp, Homo sapiens
aatgcagacagatgg

SEQ ID NO: 125419 - DNA, 15 bp, Homo sapiens
atgcagacagatggg

SEQ ID NO: 125420 - DNA, 15 bp, Homo sapiens
tgcagacagatgggt

SEQ ID NO: 125421 - DNA, 15 bp, Homo sapiens
gcagacagatgggtg

SEQ ID NO: 125422 - DNA, 15 bp, Homo sapiens
cagacagatgggtgc

SEQ ID NO: 125423 - DNA, 15 bp, Homo sapiens
agacagatgggtgcc

SEQ ID NO: 125424 - DNA, 15 bp, Homo sapiens
gacagatgggtgcct

SEQ ID NO: 125425 - DNA, 15 bp, Homo sapiens
acagatgggtgcctg

SEQ ID NO: 125426 - DNA, 15 bp, Homo sapiens
cagatgggtgcctgc

SEQ ID NO: 125427 - DNA, 15 bp, Homo sapiens
agatgggtgcctgct

SEQ ID NO: 125428 - DNA, 15 bp, Homo sapiens
gatgggtgcctgctt

SEQ ID NO: 125429 - DNA, 15 bp, Homo sapiens
atgggtgcctgcttt

SEQ ID NO: 125430 - DNA, 15 bp, Homo sapiens
tgggtgcctgctttc

SEQ ID NO: 125431 - DNA, 15 bp, Homo sapiens
gggtgcctgctttca

SEQ ID NO: 125432 - DNA, 15 bp, Homo sapiens
ggtgcctgctttcag

SEQ ID NO: 125433 - DNA, 15 bp, Homo sapiens
gtgcctgctttcaga

SEQ ID NO: 125434 - DNA, 15 bp, Homo sapiens
tgcctgctttcagag

SEQ ID NO: 125435 - DNA, 15 bp, Homo sapiens
gcctgctttcagagt

SEQ ID NO: 125436 - DNA, 15 bp, Homo sapiens
cctgctttcagagtg

SEQ ID NO: 125437 - DNA, 15 bp, Homo sapiens
ctgctttcagagtgc

SEQ ID NO: 125438 - DNA, 15 bp, Homo sapiens
tgctttcagagtgct

SEQ ID NO: 125439 - DNA, 15 bp, Homo sapiens
gctttcagagtgctc

SEQ ID NO: 125440 - DNA, 15 bp, Homo sapiens
ctttcagagtgctca

SEQ ID NO: 125441 - DNA, 15 bp, Homo sapiens
tttcagagtgctcaa

SEQ ID NO: 125442 - DNA, 15 bp, Homo sapiens
ttcagagtgctcaat

SEQ ID NO: 125443 - DNA, 15 bp, Homo sapiens
tcagagtgctcaatg

SEQ ID NO: 125444 - DNA, 15 bp, Homo sapiens
cagagtgctcaatgt

SEQ ID NO: 125445 - DNA, 15 bp, Homo sapiens
agagtgctcaatgtg

SEQ ID NO: 125446 - DNA, 15 bp, Homo sapiens
gagtgctcaatgtgc

SEQ ID NO: 125447 - DNA, 15 bp, Homo sapiens
agtgctcaatgtgct

SEQ ID NO: 125448 - DNA, 15 bp, Homo sapiens
gtgctcaatgtgctg

SEQ ID NO: 125449 - DNA, 15 bp, Homo sapiens
tgctcaatgtgctga

SEQ ID NO: 125450 - DNA, 15 bp, Homo sapiens
gctcaatgtgctgag

SEQ ID NO: 125451 - DNA, 15 bp, Homo sapiens
ctcaatgtgctgagg

SEQ ID NO: 125452 - DNA, 15 bp, Homo sapiens
tcaatgtgctgagga

SEQ ID NO: 125453 - DNA, 15 bp, Homo sapiens
caatgtgctgaggaa

SEQ ID NO: 125454 - DNA, 15 bp, Homo sapiens
aatgtgctgaggaag

SEQ ID NO: 125455 - DNA, 15 bp, Homo sapiens
atgtgctgaggaagc

SEQ ID NO: 125456 - DNA, 15 bp, Homo sapiens
tgtgctgaggaagcc

SEQ ID NO: 125457 - DNA, 15 bp, Homo sapiens
gtgctgaggaagcca

SEQ ID NO: 125458 - DNA, 15 bp, Homo sapiens
tgctgaggaagccag

SEQ ID NO: 125459 - DNA, 15 bp, Homo sapiens
gctgaggaagccagc

SEQ ID NO: 125460 - DNA, 15 bp, Homo sapiens
ctgaggaagccagca

SEQ ID NO: 125461 - DNA, 15 bp, Homo sapiens
tgaggaagccagcaa

SEQ ID NO: 125462 - DNA, 15 bp, Homo sapiens
gaggaagccagcaac

SEQ ID NO: 125463 - DNA, 15 bp, Homo sapiens
aggaagccagcaaca

SEQ ID NO: 125464 - DNA, 15 bp, Homo sapiens
ggaagccagcaacag

SEQ ID NO: 125465 - DNA, 15 bp, Homo sapiens
gaagccagcaacaga

SEQ ID NO: 125466 - DNA, 15 bp, Homo sapiens
aagccagcaacagaa

SEQ ID NO: 125467 - DNA, 15 bp, Homo sapiens
agccagcaacagaaa

SEQ ID NO: 125468 - DNA, 15 bp, Homo sapiens
gccagcaacagaaac

SEQ ID NO: 125469 - DNA, 15 bp, Homo sapiens
ccagcaacagaaaca

SEQ ID NO: 125470 - DNA, 15 bp, Homo sapiens
cagcaacagaaacag

SEQ ID NO: 125471 - DNA, 15 bp, Homo sapiens
agcaacagaaacaga

SEQ ID NO: 125472 - DNA, 15 bp, Homo sapiens
gcaacagaaacagat

SEQ ID NO: 125473 - DNA, 15 bp, Homo sapiens
caacagaaacagatg

SEQ ID NO: 125474 - DNA, 15 bp, Homo sapiens
aacagaaacagatga

SEQ ID NO: 125475 - DNA, 15 bp, Homo sapiens
acagaaacagatgat

SEQ ID NO: 125476 - DNA, 15 bp, Homo sapiens
cagaaacagatgatt

SEQ ID NO: 125477 - DNA, 15 bp, Homo sapiens
agaaacagatgattt

SEQ ID NO: 125478 - DNA, 15 bp, Homo sapiens
gaaacagatgatttc

SEQ ID NO: 125479 - DNA, 15 bp, Homo sapiens
aaacagatgatttca

SEQ ID NO: 125480 - DNA, 15 bp, Homo sapiens
aacagatgatttcag

SEQ ID NO: 125481 - DNA, 15 bp, Homo sapiens
acagatgatttcagg

SEQ ID NO: 125482 - DNA, 15 bp, Homo sapiens
cagatgatttcagga

SEQ ID NO: 125483 - DNA, 15 bp, Homo sapiens
agatgatttcaggag

SEQ ID NO: 125484 - DNA, 15 bp, Homo sapiens
gatgatttcaggagc

SEQ ID NO: 125485 - DNA, 15 bp, Homo sapiens
atgatttcaggagct

SEQ ID NO: 125486 - DNA, 15 bp, Homo sapiens
tgatttcaggagctc

SEQ ID NO: 125487 - DNA, 15 bp, Homo sapiens
gatttcaggagctcc

SEQ ID NO: 125488 - DNA, 15 bp, Homo sapiens
atttcaggagctcca

SEQ ID NO: 125489 - DNA, 15 bp, Homo sapiens
tttcaggagctccag

SEQ ID NO: 125490 - DNA, 15 bp, Homo sapiens
ttcaggagctccagg

SEQ ID NO: 125491 - DNA, 15 bp, Homo sapiens
tcaggagctccagga

SEQ ID NO: 125492 - DNA, 15 bp, Homo sapiens
caggagctccaggaa

SEQ ID NO: 125493 - DNA, 15 bp, Homo sapiens
aggagctccaggaaa

SEQ ID NO: 125494 - DNA, 15 bp, Homo sapiens
ggagctccaggaaaa

SEQ ID NO: 125495 - DNA, 15 bp, Homo sapiens
gagctccaggaaaat

SEQ ID NO: 125496 - DNA, 15 bp, Homo sapiens
agctccaggaaaatg

SEQ ID NO: 125497 - DNA, 15 bp, Homo sapiens
gctccaggaaaatgc

SEQ ID NO: 125498 - DNA, 15 bp, Homo sapiens
ctccaggaaaatgct

SEQ ID NO: 125499 - DNA, 15 bp, Homo sapiens
tccaggaaaatgcta

SEQ ID NO: 125500 - DNA, 15 bp, Homo sapiens
ccaggaaaatgctac

SEQ ID NO: 125501 - DNA, 15 bp, Homo sapiens
caggaaaatgctaca

SEQ ID NO: 125502 - DNA, 15 bp, Homo sapiens
aggaaaatgctacag

SEQ ID NO: 125503 - DNA, 15 bp, Homo sapiens
ggaaaatgctacagg

SEQ ID NO: 125504 - DNA, 15 bp, Homo sapiens
gaaaatgctacagga

SEQ ID NO: 125505 - DNA, 15 bp, Homo sapiens
aaaatgctacaggag

SEQ ID NO: 125506 - DNA, 15 bp, Homo sapiens
aaatgctacaggagg

SEQ ID NO: 125507 - DNA, 15 bp, Homo sapiens
aatgctacaggagga

SEQ ID NO: 125508 - DNA, 15 bp, Homo sapiens
atgctacaggaggag

SEQ ID NO: 125509 - DNA, 15 bp, Homo sapiens
tgctacaggaggagt

SEQ ID NO: 125510 - DNA, 15 bp, Homo sapiens
gctacaggaggagtg

SEQ ID NO: 125511 - DNA, 15 bp, Homo sapiens
ctacaggaggagtgt

SEQ ID NO: 125512 - DNA, 15 bp, Homo sapiens
tacaggaggagtgtg

SEQ ID NO: 125513 - DNA, 15 bp, Homo sapiens
acaggaggagtgtgc

SEQ ID NO: 125514 - DNA, 15 bp, Homo sapiens
caggaggagtgtgcc

SEQ ID NO: 125515 - DNA, 15 bp, Homo sapiens
aggaggagtgtgcct

SEQ ID NO: 125516 - DNA, 15 bp, Homo sapiens
ggaggagtgtgcctg

SEQ ID NO: 125517 - DNA, 15 bp, Homo sapiens
gaggagtgtgcctgg

SEQ ID NO: 125518 - DNA, 15 bp, Homo sapiens
aggagtgtgcctggg

SEQ ID NO: 125519 - DNA, 15 bp, Homo sapiens
ggagtgtgcctgggt

SEQ ID NO: 125520 - DNA, 15 bp, Homo sapiens
gagtgtgcctgggtt

SEQ ID NO: 125521 - DNA, 15 bp, Homo sapiens
agtgtgcctgggtta

SEQ ID NO: 125522 - DNA, 15 bp, Homo sapiens
gtgtgcctgggttac

SEQ ID NO: 125523 - DNA, 15 bp, Homo sapiens
tgtgcctgggttact

SEQ ID NO: 125524 - DNA, 15 bp, Homo sapiens
gtgcctgggttactg

SEQ ID NO: 125525 - DNA, 15 bp, Homo sapiens
tgcctgggttactgg

SEQ ID NO: 125526 - DNA, 15 bp, Homo sapiens
gcctgggttactgga

SEQ ID NO: 125527 - DNA, 15 bp, Homo sapiens
cctgggttactggag

SEQ ID NO: 125528 - DNA, 15 bp, Homo sapiens
ctgggttactggagt

SEQ ID NO: 125529 - DNA, 15 bp, Homo sapiens
tgggttactggagta

SEQ ID NO: 125530 - DNA, 15 bp, Homo sapiens
gggttactggagtag

SEQ ID NO: 125531 - DNA, 15 bp, Homo sapiens
ggttactggagtagc

SEQ ID NO: 125532 - DNA, 15 bp, Homo sapiens
gttactggagtagca

SEQ ID NO: 125533 - DNA, 15 bp, Homo sapiens
ttactggagtagcac

SEQ ID NO: 125534 - DNA, 15 bp, Homo sapiens
tactggagtagcaca

SEQ ID NO: 125535 - DNA, 15 bp, Homo sapiens
actggagtagcacag

SEQ ID NO: 125536 - DNA, 15 bp, Homo sapiens
ctggagtagcacagg

SEQ ID NO: 125537 - DNA, 15 bp, Homo sapiens
tggagtagcacagga

SEQ ID NO: 125538 - DNA, 15 bp, Homo sapiens
ggagtagcacaggag

SEQ ID NO: 125539 - DNA, 15 bp, Homo sapiens
gagtagcacaggagg

SEQ ID NO: 125540 - DNA, 15 bp, Homo sapiens
agtagcacaggagga

SEQ ID NO: 125541 - DNA, 15 bp, Homo sapiens
gtagcacaggaggag

SEQ ID NO: 125542 - DNA, 15 bp, Homo sapiens
tagcacaggaggagg

SEQ ID NO: 125543 - DNA, 15 bp, Homo sapiens
agcacaggaggaggg

SEQ ID NO: 125544 - DNA, 15 bp, Homo sapiens
gcacaggaggagggc

SEQ ID NO: 125545 - DNA, 15 bp, Homo sapiens
cacaggaggagggct

SEQ ID NO: 125546 - DNA, 15 bp, Homo sapiens
acaggaggagggctt

SEQ ID NO: 125547 - DNA, 15 bp, Homo sapiens
caggaggagggcttc

SEQ ID NO: 125548 - DNA, 15 bp, Homo sapiens
aggaggagggcttct

SEQ ID NO: 125549 - DNA, 15 bp, Homo sapiens
ggaggagggcttcta

SEQ ID NO: 125550 - DNA, 15 bp, Homo sapiens
gaggagggcttctag

SEQ ID NO: 125551 - DNA, 15 bp, Homo sapiens
aggagggcttctagc

SEQ ID NO: 125552 - DNA, 15 bp, Homo sapiens
ggagggcttctagct

SEQ ID NO: 125553 - DNA, 15 bp, Homo sapiens
gagggcttctagctc

SEQ ID NO: 125554 - DNA, 15 bp, Homo sapiens
agggcttctagctca

SEQ ID NO: 125555 - DNA, 15 bp, Homo sapiens
gggcttctagctcag

SEQ ID NO: 125556 - DNA, 15 bp, Homo sapiens
ggcttctagctcagg

SEQ ID NO: 125557 - DNA, 15 bp, Homo sapiens
gcttctagctcaggc

SEQ ID NO: 125558 - DNA, 15 bp, Homo sapiens
cttctagctcaggct

SEQ ID NO: 125559 - DNA, 15 bp, Homo sapiens
ttctagctcaggctg

SEQ ID NO: 125560 - DNA, 15 bp, Homo sapiens
tctagctcaggctga

SEQ ID NO: 125561 - DNA, 15 bp, Homo sapiens
ctagctcaggctgag

SEQ ID NO: 125562 - DNA, 15 bp, Homo sapiens
tagctcaggctgaga

SEQ ID NO: 125563 - DNA, 15 bp, Homo sapiens
agctcaggctgagat

SEQ ID NO: 125564 - DNA, 15 bp, Homo sapiens
gctcaggctgagatt

SEQ ID NO: 125565 - DNA, 15 bp, Homo sapiens
ctcaggctgagattt

SEQ ID NO: 125566 - DNA, 15 bp, Homo sapiens
tcaggctgagatttt

SEQ ID NO: 125567 - DNA, 15 bp, Homo sapiens
caggctgagatttta

SEQ ID NO: 125568 - DNA, 15 bp, Homo sapiens
aggctgagattttag

SEQ ID NO: 125569 - DNA, 15 bp, Homo sapiens
ggctgagattttagt

SEQ ID NO: 125570 - DNA, 15 bp, Homo sapiens
gctgagattttagta

SEQ ID NO: 125571 - DNA, 15 bp, Homo sapiens
ctgagattttagtaa

SEQ ID NO: 125572 - DNA, 15 bp, Homo sapiens
tgagattttagtaaa

SEQ ID NO: 125573 - DNA, 15 bp, Homo sapiens
gagattttagtaaag

SEQ ID NO: 125574 - DNA, 15 bp, Homo sapiens
agattttagtaaagg

SEQ ID NO: 125575 - DNA, 15 bp, Homo sapiens
gattttagtaaagga

SEQ ID NO: 125576 - DNA, 15 bp, Homo sapiens
attttagtaaaggaa

SEQ ID NO: 125577 - DNA, 15 bp, Homo sapiens
ttttagtaaaggaaa

SEQ ID NO: 125578 - DNA, 15 bp, Homo sapiens
tttagtaaaggaaat

SEQ ID NO: 125579 - DNA, 15 bp, Homo sapiens
ttagtaaaggaaatt

SEQ ID NO: 125580 - DNA, 15 bp, Homo sapiens
tagtaaaggaaatta

SEQ ID NO: 125581 - DNA, 15 bp, Homo sapiens
agtaaaggaaattat

SEQ ID NO: 125582 - DNA, 15 bp, Homo sapiens
gtaaaggaaattatg

SEQ ID NO: 125583 - DNA, 15 bp, Homo sapiens
taaaggaaattatgc

SEQ ID NO: 125584 - DNA, 15 bp, Homo sapiens
aaaggaaattatgcc

SEQ ID NO: 125585 - DNA, 15 bp, Homo sapiens
aaggaaattatgcca

SEQ ID NO: 125586 - DNA, 15 bp, Homo sapiens
aggaaattatgccac

SEQ ID NO: 125587 - DNA, 15 bp, Homo sapiens
ggaaattatgccacg

SEQ ID NO: 125588 - DNA, 15 bp, Homo sapiens
gaaattatgccacga

SEQ ID NO: 125589 - DNA, 15 bp, Homo sapiens
aaattatgccacgat

SEQ ID NO: 125590 - DNA, 15 bp, Homo sapiens
aattatgccacgatg

SEQ ID NO: 125591 - DNA, 15 bp, Homo sapiens
attatgccacgatga

SEQ ID NO: 125592 - DNA, 15 bp, Homo sapiens
ttatgccacgatgaa

SEQ ID NO: 125593 - DNA, 15 bp, Homo sapiens
tatgccacgatgaat

SEQ ID NO: 125594 - DNA, 15 bp, Homo sapiens
atgccacgatgaatc

SEQ ID NO: 125595 - DNA, 15 bp, Homo sapiens
tgccacgatgaatcc

SEQ ID NO: 125596 - DNA, 15 bp, Homo sapiens
gccacgatgaatcct

SEQ ID NO: 125597 - DNA, 15 bp, Homo sapiens
ccacgatgaatcctg

SEQ ID NO: 125598 - DNA, 15 bp, Homo sapiens
cacgatgaatcctga

SEQ ID NO: 125599 - DNA, 15 bp, Homo sapiens
acgatgaatcctgaa

SEQ ID NO: 125600 - DNA, 15 bp, Homo sapiens
cgatgaatcctgaag

SEQ ID NO: 125601 - DNA, 15 bp, Homo sapiens
gatgaatcctgaaga

SEQ ID NO: 125602 - DNA, 15 bp, Homo sapiens
atgaatcctgaagaa

SEQ ID NO: 125603 - DNA, 15 bp, Homo sapiens
tgaatcctgaagaat

SEQ ID NO: 125604 - DNA, 15 bp, Homo sapiens
gaatcctgaagaatg

SEQ ID NO: 125605 - DNA, 15 bp, Homo sapiens
aatcctgaagaatga

SEQ ID NO: 125606 - DNA, 15 bp, Homo sapiens
atcctgaagaatgaa

SEQ ID NO: 125607 - DNA, 15 bp, Homo sapiens
tcctgaagaatgaat

SEQ ID NO: 125608 - DNA, 15 bp, Homo sapiens
cctgaagaatgaata

SEQ ID NO: 125609 - DNA, 15 bp, Homo sapiens
ctgaagaatgaatag

SEQ ID NO: 125610 - DNA, 15 bp, Homo sapiens
tgaagaatgaataga

SEQ ID NO: 125611 - DNA, 15 bp, Homo sapiens
gaagaatgaatagaa

SEQ ID NO: 125612 - DNA, 15 bp, Homo sapiens
aagaatgaatagaag

SEQ ID NO: 125613 - DNA, 15 bp, Homo sapiens
agaatgaatagaagt

SEQ ID NO: 125614 - DNA, 15 bp, Homo sapiens
gaatgaatagaagtg

SEQ ID NO: 125615 - DNA, 15 bp, Homo sapiens
aatgaatagaagtga

SEQ ID NO: 125616 - DNA, 15 bp, Homo sapiens
atgaatagaagtgaa

SEQ ID NO: 125617 - DNA, 15 bp, Homo sapiens
tgaatagaagtgaac

SEQ ID NO: 125618 - DNA, 15 bp, Homo sapiens
gaatagaagtgaacc

SEQ ID NO: 125619 - DNA, 15 bp, Homo sapiens
aatagaagtgaacca

SEQ ID NO: 125620 - DNA, 15 bp, Homo sapiens
atagaagtgaaccag

SEQ ID NO: 125621 - DNA, 15 bp, Homo sapiens
tagaagtgaaccaga

SEQ ID NO: 125622 - DNA, 15 bp, Homo sapiens
agaagtgaaccagat

SEQ ID NO: 125623 - DNA, 15 bp, Homo sapiens
gaagtgaaccagata

SEQ ID NO: 125624 - DNA, 15 bp, Homo sapiens
aagtgaaccagataa

SEQ ID NO: 125625 - DNA, 15 bp, Homo sapiens
agtgaaccagataaa

SEQ ID NO: 125626 - DNA, 15 bp, Homo sapiens
gtgaaccagataaag

SEQ ID NO: 125627 - DNA, 15 bp, Homo sapiens
tgaaccagataaagc

SEQ ID NO: 125628 - DNA, 15 bp, Homo sapiens
gaaccagataaagca

SEQ ID NO: 125629 - DNA, 15 bp, Homo sapiens
aaccagataaagcac

SEQ ID NO: 125630 - DNA, 15 bp, Homo sapiens
accagataaagcacg

SEQ ID NO: 125631 - DNA, 15 bp, Homo sapiens
ccagataaagcacga

SEQ ID NO: 125632 - DNA, 15 bp, Homo sapiens
cagataaagcacgat

SEQ ID NO: 125633 - DNA, 15 bp, Homo sapiens
agataaagcacgata

SEQ ID NO: 125634 - DNA, 15 bp, Homo sapiens
gataaagcacgatag

SEQ ID NO: 125635 - DNA, 15 bp, Homo sapiens
ataaagcacgatagg

SEQ ID NO: 125636 - DNA, 15 bp, Homo sapiens
taaagcacgatagga

SEQ ID NO: 125637 - DNA, 15 bp, Homo sapiens
aaagcacgataggaa

SEQ ID NO: 125638 - DNA, 15 bp, Homo sapiens
aagcacgataggaag

SEQ ID NO: 125639 - DNA, 15 bp, Homo sapiens
agcacgataggaagc

SEQ ID NO: 125640 - DNA, 15 bp, Homo sapiens
gcacgataggaagca

SEQ ID NO: 125641 - DNA, 15 bp, Homo sapiens
cacgataggaagcat

SEQ ID NO: 125642 - DNA, 15 bp, Homo sapiens
acgataggaagcatc

SEQ ID NO: 125643 - DNA, 15 bp, Homo sapiens
cgataggaagcatct

SEQ ID NO: 125644 - DNA, 15 bp, Homo sapiens
gataggaagcatctt

SEQ ID NO: 125645 - DNA, 15 bp, Homo sapiens
ataggaagcatcttc

SEQ ID NO: 125646 - DNA, 15 bp, Homo sapiens
taggaagcatcttcc

SEQ ID NO: 125647 - DNA, 15 bp, Homo sapiens
aggaagcatcttccc

SEQ ID NO: 125648 - DNA, 15 bp, Homo sapiens
ggaagcatcttccct

SEQ ID NO: 125649 - DNA, 15 bp, Homo sapiens
gaagcatcttccctt

SEQ ID NO: 125650 - DNA, 15 bp, Homo sapiens
aagcatcttccctta

SEQ ID NO: 125651 - DNA, 15 bp, Homo sapiens
agcatcttcccttac

SEQ ID NO: 125652 - DNA, 15 bp, Homo sapiens
gcatcttcccttacc

SEQ ID NO: 125653 - DNA, 15 bp, Homo sapiens
catcttcccttacct

SEQ ID NO: 125654 - DNA, 15 bp, Homo sapiens
atcttcccttaccta

SEQ ID NO: 125655 - DNA, 15 bp, Homo sapiens
tcttcccttacctaa

SEQ ID NO: 125656 - DNA, 15 bp, Homo sapiens
cttcccttacctaag

SEQ ID NO: 125657 - DNA, 15 bp, Homo sapiens
ttcccttacctaagg

SEQ ID NO: 125658 - DNA, 15 bp, Homo sapiens
tcccttacctaaggg

SEQ ID NO: 125659 - DNA, 15 bp, Homo sapiens
cccttacctaaggga

SEQ ID NO: 125660 - DNA, 15 bp, Homo sapiens
ccttacctaagggaa

SEQ ID NO: 125661 - DNA, 15 bp, Homo sapiens
cttacctaagggaag

SEQ ID NO: 125662 - DNA, 15 bp, Homo sapiens
ttacctaagggaaga

SEQ ID NO: 125663 - DNA, 15 bp, Homo sapiens
tacctaagggaagac

SEQ ID NO: 125664 - DNA, 15 bp, Homo sapiens
acctaagggaagaca

SEQ ID NO: 125665 - DNA, 15 bp, Homo sapiens
cctaagggaagacac

SEQ ID NO: 125666 - DNA, 15 bp, Homo sapiens
ctaagggaagacaca

SEQ ID NO: 125667 - DNA, 15 bp, Homo sapiens
taagggaagacacag

SEQ ID NO: 125668 - DNA, 15 bp, Homo sapiens
aagggaagacacaga

SEQ ID NO: 125669 - DNA, 15 bp, Homo sapiens
agggaagacacagag

SEQ ID NO: 125670 - DNA, 15 bp, Homo sapiens
gggaagacacagagg

SEQ ID NO: 125671 - DNA, 15 bp, Homo sapiens
ggaagacacagaggt

SEQ ID NO: 125672 - DNA, 15 bp, Homo sapiens
gaagacacagaggta

SEQ ID NO: 125673 - DNA, 15 bp, Homo sapiens
aagacacagaggtat

SEQ ID NO: 125674 - DNA, 15 bp, Homo sapiens
agacacagaggtata

SEQ ID NO: 125675 - DNA, 15 bp, Homo sapiens
gacacagaggtatat

SEQ ID NO: 125676 - DNA, 15 bp, Homo sapiens
acacagaggtatatg

SEQ ID NO: 125677 - DNA, 15 bp, Homo sapiens
cacagaggtatatgg

SEQ ID NO: 125678 - DNA, 15 bp, Homo sapiens
acagaggtatatgga

SEQ ID NO: 125679 - DNA, 15 bp, Homo sapiens
cagaggtatatggaa

SEQ ID NO: 125680 - DNA, 15 bp, Homo sapiens
agaggtatatggaat

SEQ ID NO: 125681 - DNA, 15 bp, Homo sapiens
gaggtatatggaatg

SEQ ID NO: 125682 - DNA, 15 bp, Homo sapiens
aggtatatggaatgg

SEQ ID NO: 125683 - DNA, 15 bp, Homo sapiens
ggtatatggaatggt

SEQ ID NO: 125684 - DNA, 15 bp, Homo sapiens
gtatatggaatggta

SEQ ID NO: 125685 - DNA, 15 bp, Homo sapiens
tatatggaatggtat

SEQ ID NO: 125686 - DNA, 15 bp, Homo sapiens
atatggaatggtatg

SEQ ID NO: 125687 - DNA, 15 bp, Homo sapiens
tatggaatggtatgt

SEQ ID NO: 125688 - DNA, 15 bp, Homo sapiens
atggaatggtatgtt

SEQ ID NO: 125689 - DNA, 15 bp, Homo sapiens
tggaatggtatgtta

SEQ ID NO: 125690 - DNA, 15 bp, Homo sapiens
ggaatggtatgttaa

SEQ ID NO: 125691 - DNA, 15 bp, Homo sapiens
gaatggtatgttaaa

SEQ ID NO: 125692 - DNA, 15 bp, Homo sapiens
aatggtatgttaaaa

SEQ ID NO: 125693 - DNA, 15 bp, Homo sapiens
atggtatgttaaaag

SEQ ID NO: 125694 - DNA, 15 bp, Homo sapiens
tggtatgttaaaagg

SEQ ID NO: 125695 - DNA, 15 bp, Homo sapiens
ggtatgttaaaaggt

SEQ ID NO: 125696 - DNA, 15 bp, Homo sapiens
gtatgttaaaaggtt

SEQ ID NO: 125697 - DNA, 15 bp, Homo sapiens
tatgttaaaaggttg

SEQ ID NO: 125698 - DNA, 15 bp, Homo sapiens
atgttaaaaggttgg

SEQ ID NO: 125699 - DNA, 15 bp, Homo sapiens
tgttaaaaggttggg

SEQ ID NO: 125700 - DNA, 15 bp, Homo sapiens
gttaaaaggttggga

SEQ ID NO: 125701 - DNA, 15 bp, Homo sapiens
ttaaaaggttgggac

SEQ ID NO: 125702 - DNA, 15 bp, Homo sapiens
taaaaggttgggact

SEQ ID NO: 125703 - DNA, 15 bp, Homo sapiens
aaaaggttgggactc

SEQ ID NO: 125704 - DNA, 15 bp, Homo sapiens
aaaggttgggactcc

SEQ ID NO: 125705 - DNA, 15 bp, Homo sapiens
aaggttgggactcca

SEQ ID NO: 125706 - DNA, 15 bp, Homo sapiens
aggttgggactccaa

SEQ ID NO: 125707 - DNA, 15 bp, Homo sapiens
ggttgggactccaaa

SEQ ID NO: 125708 - DNA, 15 bp, Homo sapiens
gttgggactccaaac

SEQ ID NO: 125709 - DNA, 15 bp, Homo sapiens
ttgggactccaaaca

SEQ ID NO: 125710 - DNA, 15 bp, Homo sapiens
tgggactccaaacag

SEQ ID NO: 125711 - DNA, 15 bp, Homo sapiens
gggactccaaacagt

SEQ ID NO: 125712 - DNA, 15 bp, Homo sapiens
ggactccaaacagtt

SEQ ID NO: 125713 - DNA, 15 bp, Homo sapiens
gactccaaacagttc

SEQ ID NO: 125714 - DNA, 15 bp, Homo sapiens
actccaaacagttct

SEQ ID NO: 125715 - DNA, 15 bp, Homo sapiens
ctccaaacagttctg

SEQ ID NO: 125716 - DNA, 15 bp, Homo sapiens
tccaaacagttctgt

SEQ ID NO: 125717 - DNA, 15 bp, Homo sapiens
ccaaacagttctgtt

SEQ ID NO: 125718 - DNA, 15 bp, Homo sapiens
caaacagttctgtta

SEQ ID NO: 125719 - DNA, 15 bp, Homo sapiens
aaacagttctgttaa

SEQ ID NO: 125720 - DNA, 15 bp, Homo sapiens
aacagttctgttaaa

SEQ ID NO: 125721 - DNA, 15 bp, Homo sapiens
acagttctgttaaag

SEQ ID NO: 125722 - DNA, 15 bp, Homo sapiens
cagttctgttaaagc

SEQ ID NO: 125723 - DNA, 15 bp, Homo sapiens
agttctgttaaagct

SEQ ID NO: 125724 - DNA, 15 bp, Homo sapiens
gttctgttaaagctt

SEQ ID NO: 125725 - DNA, 15 bp, Homo sapiens
ttctgttaaagctta

SEQ ID NO: 125726 - DNA, 15 bp, Homo sapiens
tctgttaaagcttag

SEQ ID NO: 125727 - DNA, 15 bp, Homo sapiens
ctgttaaagcttaga

SEQ ID NO: 125728 - DNA, 15 bp, Homo sapiens
tgttaaagcttagag

SEQ ID NO: 125729 - DNA, 15 bp, Homo sapiens
gttaaagcttagaga

SEQ ID NO: 125730 - DNA, 15 bp, Homo sapiens
ttaaagcttagagag

SEQ ID NO: 125731 - DNA, 15 bp, Homo sapiens
taaagcttagagagt

SEQ ID NO: 125732 - DNA, 15 bp, Homo sapiens
aaagcttagagagtg

SEQ ID NO: 125733 - DNA, 15 bp, Homo sapiens
aagcttagagagtgg

SEQ ID NO: 125734 - DNA, 15 bp, Homo sapiens
agcttagagagtggt

SEQ ID NO: 125735 - DNA, 15 bp, Homo sapiens
gcttagagagtggtg

SEQ ID NO: 125736 - DNA, 15 bp, Homo sapiens
cttagagagtggtgg

SEQ ID NO: 125737 - DNA, 15 bp, Homo sapiens
ttagagagtggtggg

SEQ ID NO: 125738 - DNA, 15 bp, Homo sapiens
tagagagtggtggga

SEQ ID NO: 125739 - DNA, 15 bp, Homo sapiens
agagagtggtgggag

SEQ ID NO: 125740 - DNA, 15 bp, Homo sapiens
gagagtggtgggaga

SEQ ID NO: 125741 - DNA, 15 bp, Homo sapiens
agagtggtgggagag

SEQ ID NO: 125742 - DNA, 15 bp, Homo sapiens
gagtggtgggagaga

SEQ ID NO: 125743 - DNA, 15 bp, Homo sapiens
agtggtgggagagac

SEQ ID NO: 125744 - DNA, 15 bp, Homo sapiens
gtggtgggagagact

SEQ ID NO: 125745 - DNA, 15 bp, Homo sapiens
tggtgggagagactg

SEQ ID NO: 125746 - DNA, 15 bp, Homo sapiens
ggtgggagagactgg

SEQ ID NO: 125747 - DNA, 15 bp, Homo sapiens
gtgggagagactgga

SEQ ID NO: 125748 - DNA, 15 bp, Homo sapiens
tgggagagactggag

SEQ ID NO: 125749 - DNA, 15 bp, Homo sapiens
gggagagactggaga

SEQ ID NO: 125750 - DNA, 15 bp, Homo sapiens
ggagagactggagaa

SEQ ID NO: 125751 - DNA, 15 bp, Homo sapiens
gagagactggagaag

SEQ ID NO: 125752 - DNA, 15 bp, Homo sapiens
agagactggagaagt

SEQ ID NO: 125753 - DNA, 15 bp, Homo sapiens
gagactggagaagtt

SEQ ID NO: 125754 - DNA, 15 bp, Homo sapiens
agactggagaagttg

SEQ ID NO: 125755 - DNA, 15 bp, Homo sapiens
gactggagaagttga

SEQ ID NO: 125756 - DNA, 15 bp, Homo sapiens
actggagaagttgat

SEQ ID NO: 125757 - DNA, 15 bp, Homo sapiens
ctggagaagttgatt

SEQ ID NO: 125758 - DNA, 15 bp, Homo sapiens
tggagaagttgatta

SEQ ID NO: 125759 - DNA, 15 bp, Homo sapiens
ggagaagttgattaa

SEQ ID NO: 125760 - DNA, 15 bp, Homo sapiens
gagaagttgattaat

SEQ ID NO: 125761 - DNA, 15 bp, Homo sapiens
agaagttgattaatt

SEQ ID NO: 125762 - DNA, 15 bp, Homo sapiens
gaagttgattaatta

SEQ ID NO: 125763 - DNA, 15 bp, Homo sapiens
aagttgattaattag

SEQ ID NO: 125764 - DNA, 15 bp, Homo sapiens
agttgattaattagt

SEQ ID NO: 125765 - DNA, 15 bp, Homo sapiens
gttgattaattagta

SEQ ID NO: 125766 - DNA, 15 bp, Homo sapiens
ttgattaattagtaa

SEQ ID NO: 125767 - DNA, 15 bp, Homo sapiens
tgattaattagtaaa

SEQ ID NO: 125768 - DNA, 15 bp, Homo sapiens
gattaattagtaaat

SEQ ID NO: 125769 - DNA, 15 bp, Homo sapiens
attaattagtaaatg

SEQ ID NO: 125770 - DNA, 15 bp, Homo sapiens
ttaattagtaaatga

SEQ ID NO: 125771 - DNA, 15 bp, Homo sapiens
taattagtaaatgaa

SEQ ID NO: 125772 - DNA, 15 bp, Homo sapiens
aattagtaaatgaag

SEQ ID NO: 125773 - DNA, 15 bp, Homo sapiens
attagtaaatgaagt

SEQ ID NO: 125774 - DNA, 15 bp, Homo sapiens
ttagtaaatgaagtt

SEQ ID NO: 125775 - DNA, 15 bp, Homo sapiens
tagtaaatgaagttg

SEQ ID NO: 125776 - DNA, 15 bp, Homo sapiens
agtaaatgaagttgt

SEQ ID NO: 125777 - DNA, 15 bp, Homo sapiens
gtaaatgaagttgtc

SEQ ID NO: 125778 - DNA, 15 bp, Homo sapiens
taaatgaagttgtct

SEQ ID NO: 125779 - DNA, 15 bp, Homo sapiens
aaatgaagttgtctg

SEQ ID NO: 125780 - DNA, 15 bp, Homo sapiens
aatgaagttgtctgt

SEQ ID NO: 125781 - DNA, 15 bp, Homo sapiens
atgaagttgtctgtg

SEQ ID NO: 125782 - DNA, 15 bp, Homo sapiens
tgaagttgtctgtgg

SEQ ID NO: 125783 - DNA, 15 bp, Homo sapiens
gaagttgtctgtgga

SEQ ID NO: 125784 - DNA, 15 bp, Homo sapiens
aagttgtctgtggat

SEQ ID NO: 125785 - DNA, 15 bp, Homo sapiens
agttgtctgtggatt

SEQ ID NO: 125786 - DNA, 15 bp, Homo sapiens
gttgtctgtggattt

SEQ ID NO: 125787 - DNA, 15 bp, Homo sapiens
ttgtctgtggatttc

SEQ ID NO: 125788 - DNA, 15 bp, Homo sapiens
tgtctgtggatttcc

SEQ ID NO: 125789 - DNA, 15 bp, Homo sapiens
gtctgtggatttccc

SEQ ID NO: 125790 - DNA, 15 bp, Homo sapiens
tctgtggatttccca

SEQ ID NO: 125791 - DNA, 15 bp, Homo sapiens
ctgtggatttcccag

SEQ ID NO: 125792 - DNA, 15 bp, Homo sapiens
tgtggatttcccaga

SEQ ID NO: 125793 - DNA, 15 bp, Homo sapiens
gtggatttcccagat

SEQ ID NO: 125794 - DNA, 15 bp, Homo sapiens
tggatttcccagatc

SEQ ID NO: 125795 - DNA, 15 bp, Homo sapiens
ggatttcccagatcc

SEQ ID NO: 125796 - DNA, 15 bp, Homo sapiens
gatttcccagatccc

SEQ ID NO: 125797 - DNA, 15 bp, Homo sapiens
atttcccagatccca

SEQ ID NO: 125798 - DNA, 15 bp, Homo sapiens
tttcccagatcccag

SEQ ID NO: 125799 - DNA, 15 bp, Homo sapiens
ttcccagatcccagt

SEQ ID NO: 125800 - DNA, 15 bp, Homo sapiens
tcccagatcccagtg

SEQ ID NO: 125801 - DNA, 15 bp, Homo sapiens
cccagatcccagtgg

SEQ ID NO: 125802 - DNA, 15 bp, Homo sapiens
ccagatcccagtggc

SEQ ID NO: 125803 - DNA, 15 bp, Homo sapiens
cagatcccagtggca

SEQ ID NO: 125804 - DNA, 15 bp, Homo sapiens
agatcccagtggcat

SEQ ID NO: 125805 - DNA, 15 bp, Homo sapiens
gatcccagtggcatt

SEQ ID NO: 125806 - DNA, 15 bp, Homo sapiens
atcccagtggcattg

SEQ ID NO: 125807 - DNA, 15 bp, Homo sapiens
tcccagtggcattgg

SEQ ID NO: 125808 - DNA, 15 bp, Homo sapiens
cccagtggcattgga

SEQ ID NO: 125809 - DNA, 15 bp, Homo sapiens
ccagtggcattggat

SEQ ID NO: 125810 - DNA, 15 bp, Homo sapiens
cagtggcattggata

SEQ ID NO: 125811 - DNA, 15 bp, Homo sapiens
agtggcattggatat

SEQ ID NO: 125812 - DNA, 15 bp, Homo sapiens
gtggcattggatatc

SEQ ID NO: 125813 - DNA, 15 bp, Homo sapiens
tggcattggatatcc

SEQ ID NO: 125814 - DNA, 15 bp, Homo sapiens
ggcattggatatcca

SEQ ID NO: 125815 - DNA, 15 bp, Homo sapiens
gcattggatatccat

SEQ ID NO: 125816 - DNA, 15 bp, Homo sapiens
cattggatatccata

SEQ ID NO: 125817 - DNA, 15 bp, Homo sapiens
attggatatccatat

SEQ ID NO: 125818 - DNA, 15 bp, Homo sapiens
ttggatatccatatt

SEQ ID NO: 125819 - DNA, 15 bp, Homo sapiens
tggatatccatatta

SEQ ID NO: 125820 - DNA, 15 bp, Homo sapiens
ggatatccatattat

SEQ ID NO: 125821 - DNA, 15 bp, Homo sapiens
gatatccatattatt

SEQ ID NO: 125822 - DNA, 15 bp, Homo sapiens
atatccatattattt

SEQ ID NO: 125823 - DNA, 15 bp, Homo sapiens
tatccatattatttt

SEQ ID NO: 125824 - DNA, 15 bp, Homo sapiens
atccatattattttt

SEQ ID NO: 125825 - DNA, 15 bp, Homo sapiens
tccatattattttta

SEQ ID NO: 125826 - DNA, 15 bp, Homo sapiens
ccatattatttttaa

SEQ ID NO: 125827 - DNA, 15 bp, Homo sapiens
catattatttttaaa

SEQ ID NO: 125828 - DNA, 15 bp, Homo sapiens
atattatttttaaat

SEQ ID NO: 125829 - DNA, 15 bp, Homo sapiens
tattatttttaaatt

SEQ ID NO: 125830 - DNA, 15 bp, Homo sapiens
attatttttaaattt

SEQ ID NO: 125831 - DNA, 15 bp, Homo sapiens
ttatttttaaattta

SEQ ID NO: 125832 - DNA, 15 bp, Homo sapiens
tatttttaaatttac

SEQ ID NO: 125833 - DNA, 15 bp, Homo sapiens
atttttaaatttaca

SEQ ID NO: 125834 - DNA, 15 bp, Homo sapiens
tttttaaatttacag

SEQ ID NO: 125835 - DNA, 15 bp, Homo sapiens
ttttaaatttacagt

SEQ ID NO: 125836 - DNA, 15 bp, Homo sapiens
tttaaatttacagtg

SEQ ID NO: 125837 - DNA, 15 bp, Homo sapiens
ttaaatttacagtgt

SEQ ID NO: 125838 - DNA, 15 bp, Homo sapiens
taaatttacagtgtt

SEQ ID NO: 125839 - DNA, 15 bp, Homo sapiens
aaatttacagtgttc

SEQ ID NO: 125840 - DNA, 15 bp, Homo sapiens
aatttacagtgttct

SEQ ID NO: 125841 - DNA, 15 bp, Homo sapiens
atttacagtgttcta

SEQ ID NO: 125842 - DNA, 15 bp, Homo sapiens
tttacagtgttctat

SEQ ID NO: 125843 - DNA, 15 bp, Homo sapiens
ttacagtgttctatc

SEQ ID NO: 125844 - DNA, 15 bp, Homo sapiens
tacagtgttctatct

SEQ ID NO: 125845 - DNA, 15 bp, Homo sapiens
acagtgttctatctt

SEQ ID NO: 125846 - DNA, 15 bp, Homo sapiens
cagtgttctatctta

SEQ ID NO: 125847 - DNA, 15 bp, Homo sapiens
agtgttctatcttat

SEQ ID NO: 125848 - DNA, 15 bp, Homo sapiens
gtgttctatcttatt

SEQ ID NO: 125849 - DNA, 15 bp, Homo sapiens
tgttctatcttattt

SEQ ID NO: 125850 - DNA, 15 bp, Homo sapiens
gttctatcttatttc

SEQ ID NO: 125851 - DNA, 15 bp, Homo sapiens
ttctatcttatttcc

SEQ ID NO: 125852 - DNA, 15 bp, Homo sapiens
tctatcttatttccc

SEQ ID NO: 125853 - DNA, 15 bp, Homo sapiens
ctatcttatttccca

SEQ ID NO: 125854 - DNA, 15 bp, Homo sapiens
tatcttatttcccac

SEQ ID NO: 125855 - DNA, 15 bp, Homo sapiens
atcttatttcccact

SEQ ID NO: 125856 - DNA, 15 bp, Homo sapiens
tcttatttcccactc

SEQ ID NO: 125857 - DNA, 15 bp, Homo sapiens
cttatttcccactca

SEQ ID NO: 125858 - DNA, 15 bp, Homo sapiens
ttatttcccactcag

SEQ ID NO: 125859 - DNA, 15 bp, Homo sapiens
tatttcccactcagt

SEQ ID NO: 125860 - DNA, 15 bp, Homo sapiens
atttcccactcagtg

SEQ ID NO: 125861 - DNA, 15 bp, Homo sapiens
tttcccactcagtgt

SEQ ID NO: 125862 - DNA, 15 bp, Homo sapiens
ttcccactcagtgtc

SEQ ID NO: 125863 - DNA, 15 bp, Homo sapiens
tcccactcagtgtca

SEQ ID NO: 125864 - DNA, 15 bp, Homo sapiens
cccactcagtgtcag

SEQ ID NO: 125865 - DNA, 15 bp, Homo sapiens
ccactcagtgtcagc

SEQ ID NO: 125866 - DNA, 15 bp, Homo sapiens
cactcagtgtcagct

SEQ ID NO: 125867 - DNA, 15 bp, Homo sapiens
actcagtgtcagctg

SEQ ID NO: 125868 - DNA, 15 bp, Homo sapiens
ctcagtgtcagctgc

SEQ ID NO: 125869 - DNA, 15 bp, Homo sapiens
tcagtgtcagctgct

SEQ ID NO: 125870 - DNA, 15 bp, Homo sapiens
cagtgtcagctgctg

SEQ ID NO: 125871 - DNA, 15 bp, Homo sapiens
agtgtcagctgctgc

SEQ ID NO: 125872 - DNA, 15 bp, Homo sapiens
gtgtcagctgctgct

SEQ ID NO: 125873 - DNA, 15 bp, Homo sapiens
tgtcagctgctgctg

SEQ ID NO: 125874 - DNA, 15 bp, Homo sapiens
gtcagctgctgctgg

SEQ ID NO: 125875 - DNA, 15 bp, Homo sapiens
tcagctgctgctgga

SEQ ID NO: 125876 - DNA, 15 bp, Homo sapiens
cagctgctgctggaa

SEQ ID NO: 125877 - DNA, 15 bp, Homo sapiens
agctgctgctggaag

SEQ ID NO: 125878 - DNA, 15 bp, Homo sapiens
gctgctgctggaagt

SEQ ID NO: 125879 - DNA, 15 bp, Homo sapiens
ctgctgctggaagtg

SEQ ID NO: 125880 - DNA, 15 bp, Homo sapiens
tgctgctggaagtgg

SEQ ID NO: 125881 - DNA, 15 bp, Homo sapiens
gctgctggaagtggc

SEQ ID NO: 125882 - DNA, 15 bp, Homo sapiens
ctgctggaagtggcc

SEQ ID NO: 125883 - DNA, 15 bp, Homo sapiens
tgctggaagtggcct

SEQ ID NO: 125884 - DNA, 15 bp, Homo sapiens
gctggaagtggcctg

SEQ ID NO: 125885 - DNA, 15 bp, Homo sapiens
ctggaagtggcctgg

SEQ ID NO: 125886 - DNA, 15 bp, Homo sapiens
tggaagtggcctggc

SEQ ID NO: 125887 - DNA, 15 bp, Homo sapiens
ggaagtggcctggcc

SEQ ID NO: 125888 - DNA, 15 bp, Homo sapiens
gaagtggcctggcct

SEQ ID NO: 125889 - DNA, 15 bp, Homo sapiens
aagtggcctggcctc

SEQ ID NO: 125890 - DNA, 15 bp, Homo sapiens
agtggcctggcctct

SEQ ID NO: 125891 - DNA, 15 bp, Homo sapiens
gtggcctggcctcta

SEQ ID NO: 125892 - DNA, 15 bp, Homo sapiens
tggcctggcctctat

SEQ ID NO: 125893 - DNA, 15 bp, Homo sapiens
ggcctggcctctatt

SEQ ID NO: 125894 - DNA, 15 bp, Homo sapiens
gcctggcctctattt

SEQ ID NO: 125895 - DNA, 15 bp, Homo sapiens
cctggcctctattta

SEQ ID NO: 125896 - DNA, 15 bp, Homo sapiens
ctggcctctatttat

SEQ ID NO: 125897 - DNA, 15 bp, Homo sapiens
tggcctctatttatc

SEQ ID NO: 125898 - DNA, 15 bp, Homo sapiens
ggcctctatttatct

SEQ ID NO: 125899 - DNA, 15 bp, Homo sapiens
gcctctatttatctt

SEQ ID NO: 125900 - DNA, 15 bp, Homo sapiens
cctctatttatcttc

SEQ ID NO: 125901 - DNA, 15 bp, Homo sapiens
ctctatttatcttcc

SEQ ID NO: 125902 - DNA, 15 bp, Homo sapiens
tctatttatcttcct

SEQ ID NO: 125903 - DNA, 15 bp, Homo sapiens
ctatttatcttcctg

SEQ ID NO: 125904 - DNA, 15 bp, Homo sapiens
tatttatcttcctga

SEQ ID NO: 125905 - DNA, 15 bp, Homo sapiens
atttatcttcctgat

SEQ ID NO: 125906 - DNA, 15 bp, Homo sapiens
tttatcttcctgatc

SEQ ID NO: 125907 - DNA, 15 bp, Homo sapiens
ttatcttcctgatcc

SEQ ID NO: 125908 - DNA, 15 bp, Homo sapiens
tatcttcctgatcct

SEQ ID NO: 125909 - DNA, 15 bp, Homo sapiens
atcttcctgatcctg

SEQ ID NO: 125910 - DNA, 15 bp, Homo sapiens
tcttcctgatcctga

SEQ ID NO: 125911 - DNA, 15 bp, Homo sapiens
cttcctgatcctgat

SEQ ID NO: 125912 - DNA, 15 bp, Homo sapiens
ttcctgatcctgatc

SEQ ID NO: 125913 - DNA, 15 bp, Homo sapiens
tcctgatcctgatct

SEQ ID NO: 125914 - DNA, 15 bp, Homo sapiens
cctgatcctgatctc

SEQ ID NO: 125915 - DNA, 15 bp, Homo sapiens
ctgatcctgatctct

SEQ ID NO: 125916 - DNA, 15 bp, Homo sapiens
tgatcctgatctctg

SEQ ID NO: 125917 - DNA, 15 bp, Homo sapiens
gatcctgatctctgt

SEQ ID NO: 125918 - DNA, 15 bp, Homo sapiens
atcctgatctctgtt

SEQ ID NO: 125919 - DNA, 15 bp, Homo sapiens
tcctgatctctgttc

SEQ ID NO: 125920 - DNA, 15 bp, Homo sapiens
cctgatctctgttcg

SEQ ID NO: 125921 - DNA, 15 bp, Homo sapiens
ctgatctctgttcgg

SEQ ID NO: 125922 - DNA, 15 bp, Homo sapiens
tgatctctgttcggc

SEQ ID NO: 125923 - DNA, 15 bp, Homo sapiens
gatctctgttcggct

SEQ ID NO: 125924 - DNA, 15 bp, Homo sapiens
atctctgttcggctg

SEQ ID NO: 125925 - DNA, 15 bp, Homo sapiens
tctctgttcggctga

SEQ ID NO: 125926 - DNA, 15 bp, Homo sapiens
ctctgttcggctgag

SEQ ID NO: 125927 - DNA, 15 bp, Homo sapiens
tctgttcggctgagc

SEQ ID NO: 125928 - DNA, 15 bp, Homo sapiens
ctgttcggctgagct

SEQ ID NO: 125929 - DNA, 15 bp, Homo sapiens
tgttcggctgagcta

SEQ ID NO: 125930 - DNA, 15 bp, Homo sapiens
gttcggctgagctac

SEQ ID NO: 125931 - DNA, 15 bp, Homo sapiens
ttcggctgagctacc

SEQ ID NO: 125932 - DNA, 15 bp, Homo sapiens
tcggctgagctaccc

SEQ ID NO: 125933 - DNA, 15 bp, Homo sapiens
cggctgagctaccca

SEQ ID NO: 125934 - DNA, 15 bp, Homo sapiens
ggctgagctacccac

SEQ ID NO: 125935 - DNA, 15 bp, Homo sapiens
gctgagctacccacc

SEQ ID NO: 125936 - DNA, 15 bp, Homo sapiens
ctgagctacccaccc

SEQ ID NO: 125937 - DNA, 15 bp, Homo sapiens
tgagctacccaccct

SEQ ID NO: 125938 - DNA, 15 bp, Homo sapiens
gagctacccacccta

SEQ ID NO: 125939 - DNA, 15 bp, Homo sapiens
agctacccaccctat

SEQ ID NO: 125940 - DNA, 15 bp, Homo sapiens
gctacccaccctatg

SEQ ID NO: 125941 - DNA, 15 bp, Homo sapiens
ctacccaccctatga

SEQ ID NO: 125942 - DNA, 15 bp, Homo sapiens
tacccaccctatgaa

SEQ ID NO: 125943 - DNA, 15 bp, Homo sapiens
acccaccctatgaac

SEQ ID NO: 125944 - DNA, 15 bp, Homo sapiens
cccaccctatgaaca

SEQ ID NO: 125945 - DNA, 15 bp, Homo sapiens
ccaccctatgaacaa

SEQ ID NO: 125946 - DNA, 15 bp, Homo sapiens
caccctatgaacaac

SEQ ID NO: 125947 - DNA, 15 bp, Homo sapiens
accctatgaacaaca

SEQ ID NO: 125948 - DNA, 15 bp, Homo sapiens
ccctatgaacaacat

SEQ ID NO: 125949 - DNA, 15 bp, Homo sapiens
cctatgaacaacatg

SEQ ID NO: 125950 - DNA, 15 bp, Homo sapiens
ctatgaacaacatga

SEQ ID NO: 125951 - DNA, 15 bp, Homo sapiens
tatgaacaacatgaa

SEQ ID NO: 125952 - DNA, 15 bp, Homo sapiens
atgaacaacatgaat

SEQ ID NO: 125953 - DNA, 15 bp, Homo sapiens
tgaacaacatgaatg

SEQ ID NO: 125954 - DNA, 15 bp, Homo sapiens
gaacaacatgaatgt

SEQ ID NO: 125955 - DNA, 15 bp, Homo sapiens
aacaacatgaatgta

SEQ ID NO: 125956 - DNA, 15 bp, Homo sapiens
acaacatgaatgtaa

SEQ ID NO: 125957 - DNA, 15 bp, Homo sapiens
caacatgaatgtaag

SEQ ID NO: 125958 - DNA, 15 bp, Homo sapiens
aacatgaatgtaagt

SEQ ID NO: 125959 - DNA, 15 bp, Homo sapiens
acatgaatgtaagta

SEQ ID NO: 125960 - DNA, 15 bp, Homo sapiens
catgaatgtaagtaa

SEQ ID NO: 125961 - DNA, 15 bp, Homo sapiens
atgaatgtaagtaac

SEQ ID NO: 125962 - DNA, 15 bp, Homo sapiens
tgaatgtaagtaact

SEQ ID NO: 125963 - DNA, 15 bp, Homo sapiens
gaatgtaagtaactg

SEQ ID NO: 125964 - DNA, 15 bp, Homo sapiens
aatgtaagtaactgt

SEQ ID NO: 125965 - DNA, 15 bp, Homo sapiens
atgtaagtaactgtg

SEQ ID NO: 125966 - DNA, 15 bp, Homo sapiens
tgtaagtaactgtgg

SEQ ID NO: 125967 - DNA, 15 bp, Homo sapiens
gtaagtaactgtgga

SEQ ID NO: 125968 - DNA, 15 bp, Homo sapiens
taagtaactgtggat

SEQ ID NO: 125969 - DNA, 15 bp, Homo sapiens
aagtaactgtggatg

SEQ ID NO: 125970 - DNA, 15 bp, Homo sapiens
agtaactgtggatgt

SEQ ID NO: 125971 - DNA, 15 bp, Homo sapiens
gtaactgtggatgtt

SEQ ID NO: 125972 - DNA, 15 bp, Homo sapiens
taactgtggatgttg

SEQ ID NO: 125973 - DNA, 15 bp, Homo sapiens
aactgtggatgttgc

SEQ ID NO: 125974 - DNA, 15 bp, Homo sapiens
actgtggatgttgcc

SEQ ID NO: 125975 - DNA, 15 bp, Homo sapiens
ctgtggatgttgcct

SEQ ID NO: 125976 - DNA, 15 bp, Homo sapiens
tgtggatgttgcctg

SEQ ID NO: 125977 - DNA, 15 bp, Homo sapiens
gtggatgttgcctga

SEQ ID NO: 125978 - DNA, 15 bp, Homo sapiens
tggatgttgcctgag

SEQ ID NO: 125979 - DNA, 15 bp, Homo sapiens
ggatgttgcctgaga

SEQ ID NO: 125980 - DNA, 15 bp, Homo sapiens
gatgttgcctgagac

SEQ ID NO: 125981 - DNA, 15 bp, Homo sapiens
atgttgcctgagact

SEQ ID NO: 125982 - DNA, 15 bp, Homo sapiens
tgttgcctgagactc

SEQ ID NO: 125983 - DNA, 15 bp, Homo sapiens
gttgcctgagactca

SEQ ID NO: 125984 - DNA, 15 bp, Homo sapiens
ttgcctgagactcac

SEQ ID NO: 125985 - DNA, 15 bp, Homo sapiens
tgcctgagactcacc

SEQ ID NO: 125986 - DNA, 15 bp, Homo sapiens
gcctgagactcacca

SEQ ID NO: 125987 - DNA, 15 bp, Homo sapiens
cctgagactcaccaa

SEQ ID NO: 125988 - DNA, 15 bp, Homo sapiens
ctgagactcaccaat

SEQ ID NO: 125989 - DNA, 15 bp, Homo sapiens
tgagactcaccaatg

SEQ ID NO: 125990 - DNA, 15 bp, Homo sapiens
gagactcaccaatgg

SEQ ID NO: 125991 - DNA, 15 bp, Homo sapiens
agactcaccaatggc

SEQ ID NO: 125992 - DNA, 15 bp, Homo sapiens
gactcaccaatggca

SEQ ID NO: 125993 - DNA, 15 bp, Homo sapiens
actcaccaatggcag

SEQ ID NO: 125994 - DNA, 15 bp, Homo sapiens
ctcaccaatggcagg

SEQ ID NO: 125995 - DNA, 15 bp, Homo sapiens
tcaccaatggcaggg

SEQ ID NO: 125996 - DNA, 15 bp, Homo sapiens
caccaatggcaggga

SEQ ID NO: 125997 - DNA, 15 bp, Homo sapiens
accaatggcagggaa

SEQ ID NO: 125998 - DNA, 15 bp, Homo sapiens
ccaatggcagggaaa

SEQ ID NO: 125999 - DNA, 15 bp, Homo sapiens
caatggcagggaaaa

SEQ ID NO: 126000 - DNA, 15 bp, Homo sapiens
aatggcagggaaaat

SEQ ID NO: 126001 - DNA, 15 bp, Homo sapiens
atggcagggaaaatc

SEQ ID NO: 126002 - DNA, 15 bp, Homo sapiens
tggcagggaaaatcc

SEQ ID NO: 126003 - DNA, 15 bp, Homo sapiens
ggcagggaaaatcca

SEQ ID NO: 126004 - DNA, 15 bp, Homo sapiens
gcagggaaaatccag

SEQ ID NO: 126005 - DNA, 15 bp, Homo sapiens
cagggaaaatccagg

SEQ ID NO: 126006 - DNA, 15 bp, Homo sapiens
agggaaaatccaggc

SEQ ID NO: 126007 - DNA, 15 bp, Homo sapiens
gggaaaatccaggca

SEQ ID NO: 126008 - DNA, 15 bp, Homo sapiens
ggaaaatccaggcaa

SEQ ID NO: 126009 - DNA, 15 bp, Homo sapiens
gaaaatccaggcaat

SEQ ID NO: 126010 - DNA, 15 bp, Homo sapiens
aaaatccaggcaatt

SEQ ID NO: 126011 - DNA, 15 bp, Homo sapiens
aaatccaggcaatta

SEQ ID NO: 126012 - DNA, 15 bp, Homo sapiens
aatccaggcaattaa

SEQ ID NO: 126013 - DNA, 15 bp, Homo sapiens
atccaggcaattaac

SEQ ID NO: 126014 - DNA, 15 bp, Homo sapiens
tccaggcaattaacg

SEQ ID NO: 126015 - DNA, 15 bp, Homo sapiens
ccaggcaattaacgt

SEQ ID NO: 126016 - DNA, 15 bp, Homo sapiens
caggcaattaacgtg

SEQ ID NO: 126017 - DNA, 15 bp, Homo sapiens
aggcaattaacgtgg

SEQ ID NO: 126018 - DNA, 15 bp, Homo sapiens
ggcaattaacgtggg

SEQ ID NO: 126019 - DNA, 15 bp, Homo sapiens
gcaattaacgtgggc

SEQ ID NO: 126020 - DNA, 15 bp, Homo sapiens
caattaacgtgggct

SEQ ID NO: 126021 - DNA, 15 bp, Homo sapiens
aattaacgtgggcta

SEQ ID NO: 126022 - DNA, 15 bp, Homo sapiens
attaacgtgggctaa

SEQ ID NO: 126023 - DNA, 15 bp, Homo sapiens
ttaacgtgggctaaa

SEQ ID NO: 126024 - DNA, 15 bp, Homo sapiens
taacgtgggctaaat

SEQ ID NO: 126025 - DNA, 15 bp, Homo sapiens
aacgtgggctaaatt

SEQ ID NO: 126026 - DNA, 15 bp, Homo sapiens
acgtgggctaaattg

SEQ ID NO: 126027 - DNA, 15 bp, Homo sapiens
cgtgggctaaattgg

SEQ ID NO: 126028 - DNA, 15 bp, Homo sapiens
gtgggctaaattgga

SEQ ID NO: 126029 - DNA, 15 bp, Homo sapiens
tgggctaaattggac

SEQ ID NO: 126030 - DNA, 15 bp, Homo sapiens
gggctaaattggact

SEQ ID NO: 126031 - DNA, 15 bp, Homo sapiens
ggctaaattggactt

SEQ ID NO: 126032 - DNA, 15 bp, Homo sapiens
gctaaattggacttt

SEQ ID NO: 126033 - DNA, 15 bp, Homo sapiens
ctaaattggactttt

SEQ ID NO: 126034 - DNA, 15 bp, Homo sapiens
taaattggacttttc

SEQ ID NO: 126035 - DNA, 15 bp, Homo sapiens
aaattggacttttcc

SEQ ID NO: 126036 - DNA, 15 bp, Homo sapiens
aattggacttttcca

SEQ ID NO: 126037 - DNA, 15 bp, Homo sapiens
attggacttttccaa

SEQ ID NO: 126038 - DNA, 15 bp, Homo sapiens
ttggacttttccaaa

SEQ ID NO: 126039 - DNA, 15 bp, Homo sapiens
tggacttttccaaag

SEQ ID NO: 126040 - DNA, 15 bp, Homo sapiens
ggacttttccaaaga

SEQ ID NO: 126041 - DNA, 15 bp, Homo sapiens
gacttttccaaagat

SEQ ID NO: 126042 - DNA, 15 bp, Homo sapiens
acttttccaaagatg

SEQ ID NO: 126043 - DNA, 15 bp, Homo sapiens
cttttccaaagatgc

SEQ ID NO: 126044 - DNA, 15 bp, Homo sapiens
ttttccaaagatgct

SEQ ID NO: 126045 - DNA, 15 bp, Homo sapiens
tttccaaagatgctg

SEQ ID NO: 126046 - DNA, 15 bp, Homo sapiens
ttccaaagatgctgt

SEQ ID NO: 126047 - DNA, 15 bp, Homo sapiens
tccaaagatgctgtc

SEQ ID NO: 126048 - DNA, 15 bp, Homo sapiens
ccaaagatgctgtct

SEQ ID NO: 126049 - DNA, 15 bp, Homo sapiens
caaagatgctgtctt

SEQ ID NO: 126050 - DNA, 15 bp, Homo sapiens
aaagatgctgtcttt

SEQ ID NO: 126051 - DNA, 15 bp, Homo sapiens
aagatgctgtctttg

SEQ ID NO: 126052 - DNA, 15 bp, Homo sapiens
agatgctgtctttgg

SEQ ID NO: 126053 - DNA, 15 bp, Homo sapiens
gatgctgtctttggg

SEQ ID NO: 126054 - DNA, 15 bp, Homo sapiens
atgctgtctttggga

SEQ ID NO: 126055 - DNA, 15 bp, Homo sapiens
tgctgtctttgggaa

SEQ ID NO: 126056 - DNA, 15 bp, Homo sapiens
gctgtctttgggaaa

SEQ ID NO: 126057 - DNA, 15 bp, Homo sapiens
ctgtctttgggaaac

SEQ ID NO: 126058 - DNA, 15 bp, Homo sapiens
tgtctttgggaaaca

SEQ ID NO: 126059 - DNA, 15 bp, Homo sapiens
gtctttgggaaacat

SEQ ID NO: 126060 - DNA, 15 bp, Homo sapiens
tctttgggaaacatc

SEQ ID NO: 126061 - DNA, 15 bp, Homo sapiens
ctttgggaaacatca

SEQ ID NO: 126062 - DNA, 15 bp, Homo sapiens
tttgggaaacatcac

SEQ ID NO: 126063 - DNA, 15 bp, Homo sapiens
ttgggaaacatcaca

SEQ ID NO: 126064 - DNA, 15 bp, Homo sapiens
tgggaaacatcacac

SEQ ID NO: 126065 - DNA, 15 bp, Homo sapiens
gggaaacatcacaca

SEQ ID NO: 126066 - DNA, 15 bp, Homo sapiens
ggaaacatcacacat

SEQ ID NO: 126067 - DNA, 15 bp, Homo sapiens
gaaacatcacacatg

SEQ ID NO: 126068 - DNA, 15 bp, Homo sapiens
aaacatcacacatgc

SEQ ID NO: 126069 - DNA, 15 bp, Homo sapiens
aacatcacacatgct

SEQ ID NO: 126070 - DNA, 15 bp, Homo sapiens
acatcacacatgctt

SEQ ID NO: 126071 - DNA, 15 bp, Homo sapiens
catcacacatgcttt

SEQ ID NO: 126072 - DNA, 15 bp, Homo sapiens
atcacacatgctttg

SEQ ID NO: 126073 - DNA, 15 bp, Homo sapiens
tcacacatgctttgg

SEQ ID NO: 126074 - DNA, 15 bp, Homo sapiens
cacacatgctttgga

SEQ ID NO: 126075 - DNA, 15 bp, Homo sapiens
acacatgctttggat

SEQ ID NO: 126076 - DNA, 15 bp, Homo sapiens
cacatgctttggatc

SEQ ID NO: 126077 - DNA, 15 bp, Homo sapiens
acatgctttggatca

SEQ ID NO: 126078 - DNA, 15 bp, Homo sapiens
catgctttggatcag

SEQ ID NO: 126079 - DNA, 15 bp, Homo sapiens
atgctttggatcaga

SEQ ID NO: 126080 - DNA, 15 bp, Homo sapiens
tgctttggatcagaa

SEQ ID NO: 126081 - DNA, 15 bp, Homo sapiens
gctttggatcagaaa

SEQ ID NO: 126082 - DNA, 15 bp, Homo sapiens
ctttggatcagaaaa

SEQ ID NO: 126083 - DNA, 15 bp, Homo sapiens
tttggatcagaaaac

SEQ ID NO: 126084 - DNA, 15 bp, Homo sapiens
ttggatcagaaaacc

SEQ ID NO: 126085 - DNA, 15 bp, Homo sapiens
tggatcagaaaacct

SEQ ID NO: 126086 - DNA, 15 bp, Homo sapiens
ggatcagaaaaccta

SEQ ID NO: 126087 - DNA, 15 bp, Homo sapiens
gatcagaaaacctag

SEQ ID NO: 126088 - DNA, 15 bp, Homo sapiens
atcagaaaacctagg

SEQ ID NO: 126089 - DNA, 15 bp, Homo sapiens
tcagaaaacctaggc

SEQ ID NO: 126090 - DNA, 15 bp, Homo sapiens
cagaaaacctaggct

SEQ ID NO: 126091 - DNA, 15 bp, Homo sapiens
agaaaacctaggctt

SEQ ID NO: 126092 - DNA, 15 bp, Homo sapiens
gaaaacctaggcttc

SEQ ID NO: 126093 - DNA, 15 bp, Homo sapiens
aaaacctaggcttct

SEQ ID NO: 126094 - DNA, 15 bp, Homo sapiens
aaacctaggcttcta

SEQ ID NO: 126095 - DNA, 15 bp, Homo sapiens
aacctaggcttctaa

SEQ ID NO: 126096 - DNA, 15 bp, Homo sapiens
acctaggcttctaat

SEQ ID NO: 126097 - DNA, 15 bp, Homo sapiens
cctaggcttctaatt

SEQ ID NO: 126098 - DNA, 15 bp, Homo sapiens
ctaggcttctaattt

SEQ ID NO: 126099 - DNA, 15 bp, Homo sapiens
taggcttctaatttg

SEQ ID NO: 126100 - DNA, 15 bp, Homo sapiens
aggcttctaatttgt

SEQ ID NO: 126101 - DNA, 15 bp, Homo sapiens
ggcttctaatttgtt

SEQ ID NO: 126102 - DNA, 15 bp, Homo sapiens
gcttctaatttgttg

SEQ ID NO: 126103 - DNA, 15 bp, Homo sapiens
cttctaatttgttga

SEQ ID NO: 126104 - DNA, 15 bp, Homo sapiens
ttctaatttgttgat

SEQ ID NO: 126105 - DNA, 15 bp, Homo sapiens
tctaatttgttgata

SEQ ID NO: 126106 - DNA, 15 bp, Homo sapiens
ctaatttgttgataa

SEQ ID NO: 126107 - DNA, 15 bp, Homo sapiens
taatttgttgataag

SEQ ID NO: 126108 - DNA, 15 bp, Homo sapiens
aatttgttgataagg

SEQ ID NO: 126109 - DNA, 15 bp, Homo sapiens
atttgttgataaggc

SEQ ID NO: 126110 - DNA, 15 bp, Homo sapiens
tttgttgataaggca

SEQ ID NO: 126111 - DNA, 15 bp, Homo sapiens
ttgttgataaggcat

SEQ ID NO: 126112 - DNA, 15 bp, Homo sapiens
tgttgataaggcatg

SEQ ID NO: 126113 - DNA, 15 bp, Homo sapiens
gttgataaggcatga

SEQ ID NO: 126114 - DNA, 15 bp, Homo sapiens
ttgataaggcatgaa

SEQ ID NO: 126115 - DNA, 15 bp, Homo sapiens
tgataaggcatgaac

SEQ ID NO: 126116 - DNA, 15 bp, Homo sapiens
gataaggcatgaact

SEQ ID NO: 126117 - DNA, 15 bp, Homo sapiens
ataaggcatgaactc

SEQ ID NO: 126118 - DNA, 15 bp, Homo sapiens
taaggcatgaactca

SEQ ID NO: 126119 - DNA, 15 bp, Homo sapiens
aaggcatgaactcag

SEQ ID NO: 126120 - DNA, 15 bp, Homo sapiens
aggcatgaactcagg

SEQ ID NO: 126121 - DNA, 15 bp, Homo sapiens
ggcatgaactcagga

SEQ ID NO: 126122 - DNA, 15 bp, Homo sapiens
gcatgaactcaggag

SEQ ID NO: 126123 - DNA, 15 bp, Homo sapiens
catgaactcaggaga

SEQ ID NO: 126124 - DNA, 15 bp, Homo sapiens
atgaactcaggagac

SEQ ID NO: 126125 - DNA, 15 bp, Homo sapiens
tgaactcaggagact

SEQ ID NO: 126126 - DNA, 15 bp, Homo sapiens
gaactcaggagactg

SEQ ID NO: 126127 - DNA, 15 bp, Homo sapiens
aactcaggagactgt

SEQ ID NO: 126128 - DNA, 15 bp, Homo sapiens
actcaggagactgtt

SEQ ID NO: 126129 - DNA, 15 bp, Homo sapiens
ctcaggagactgttt

SEQ ID NO: 126130 - DNA, 15 bp, Homo sapiens
tcaggagactgtttt

SEQ ID NO: 126131 - DNA, 15 bp, Homo sapiens
caggagactgttttc

SEQ ID NO: 126132 - DNA, 15 bp, Homo sapiens
aggagactgttttca

SEQ ID NO: 126133 - DNA, 15 bp, Homo sapiens
ggagactgttttcag

SEQ ID NO: 126134 - DNA, 15 bp, Homo sapiens
gagactgttttcagt

SEQ ID NO: 126135 - DNA, 15 bp, Homo sapiens
agactgttttcagtc

SEQ ID NO: 126136 - DNA, 15 bp, Homo sapiens
gactgttttcagtcc

SEQ ID NO: 126137 - DNA, 15 bp, Homo sapiens
actgttttcagtcct

SEQ ID NO: 126138 - DNA, 15 bp, Homo sapiens
ctgttttcagtccta

SEQ ID NO: 126139 - DNA, 15 bp, Homo sapiens
tgttttcagtcctag

SEQ ID NO: 126140 - DNA, 15 bp, Homo sapiens
gttttcagtcctagt

SEQ ID NO: 126141 - DNA, 15 bp, Homo sapiens
ttttcagtcctagtg

SEQ ID NO: 126142 - DNA, 15 bp, Homo sapiens
tttcagtcctagtga

SEQ ID NO: 126143 - DNA, 15 bp, Homo sapiens
ttcagtcctagtgaa

SEQ ID NO: 126144 - DNA, 15 bp, Homo sapiens
tcagtcctagtgaat

SEQ ID NO: 126145 - DNA, 15 bp, Homo sapiens
cagtcctagtgaatg

SEQ ID NO: 126146 - DNA, 15 bp, Homo sapiens
agtcctagtgaatgg

SEQ ID NO: 126147 - DNA, 15 bp, Homo sapiens
gtcctagtgaatggt

SEQ ID NO: 126148 - DNA, 15 bp, Homo sapiens
tcctagtgaatggtg

SEQ ID NO: 126149 - DNA, 15 bp, Homo sapiens
cctagtgaatggtga

SEQ ID NO: 126150 - DNA, 15 bp, Homo sapiens
ctagtgaatggtgat

SEQ ID NO: 126151 - DNA, 15 bp, Homo sapiens
tagtgaatggtgata

SEQ ID NO: 126152 - DNA, 15 bp, Homo sapiens
agtgaatggtgataa

SEQ ID NO: 126153 - DNA, 15 bp, Homo sapiens
gtgaatggtgataat

SEQ ID NO: 126154 - DNA, 15 bp, Homo sapiens
tgaatggtgataatt

SEQ ID NO: 126155 - DNA, 15 bp, Homo sapiens
gaatggtgataattg

SEQ ID NO: 126156 - DNA, 15 bp, Homo sapiens
aatggtgataattgt

SEQ ID NO: 126157 - DNA, 15 bp, Homo sapiens
atggtgataattgta

SEQ ID NO: 126158 - DNA, 15 bp, Homo sapiens
tggtgataattgtaa

SEQ ID NO: 126159 - DNA, 15 bp, Homo sapiens
ggtgataattgtaat

SEQ ID NO: 126160 - DNA, 15 bp, Homo sapiens
gtgataattgtaatt

SEQ ID NO: 126161 - DNA, 15 bp, Homo sapiens
tgataattgtaatta

SEQ ID NO: 126162 - DNA, 15 bp, Homo sapiens
gataattgtaattat

SEQ ID NO: 126163 - DNA, 15 bp, Homo sapiens
ataattgtaattata

SEQ ID NO: 126164 - DNA, 15 bp, Homo sapiens
taattgtaattataa

SEQ ID NO: 126165 - DNA, 15 bp, Homo sapiens
aattgtaattataac

SEQ ID NO: 126166 - DNA, 15 bp, Homo sapiens
attgtaattataaca

SEQ ID NO: 126167 - DNA, 15 bp, Homo sapiens
ttgtaattataacag

SEQ ID NO: 126168 - DNA, 15 bp, Homo sapiens
tgtaattataacagt

SEQ ID NO: 126169 - DNA, 15 bp, Homo sapiens
gtaattataacagta

SEQ ID NO: 126170 - DNA, 15 bp, Homo sapiens
taattataacagtag

SEQ ID NO: 126171 - DNA, 15 bp, Homo sapiens
aattataacagtaga

SEQ ID NO: 126172 - DNA, 15 bp, Homo sapiens
attataacagtagac

SEQ ID NO: 126173 - DNA, 15 bp, Homo sapiens
ttataacagtagaca

SEQ ID NO: 126174 - DNA, 15 bp, Homo sapiens
tataacagtagacaa

SEQ ID NO: 126175 - DNA, 15 bp, Homo sapiens
ataacagtagacaac

SEQ ID NO: 126176 - DNA, 15 bp, Homo sapiens
taacagtagacaaca

SEQ ID NO: 126177 - DNA, 15 bp, Homo sapiens
aacagtagacaacat

SEQ ID NO: 126178 - DNA, 15 bp, Homo sapiens
acagtagacaacatc

SEQ ID NO: 126179 - DNA, 15 bp, Homo sapiens
cagtagacaacatct

SEQ ID NO: 126180 - DNA, 15 bp, Homo sapiens
agtagacaacatctc

SEQ ID NO: 126181 - DNA, 15 bp, Homo sapiens
gtagacaacatctct

SEQ ID NO: 126182 - DNA, 15 bp, Homo sapiens
tagacaacatctctt

SEQ ID NO: 126183 - DNA, 15 bp, Homo sapiens
agacaacatctcttt

SEQ ID NO: 126184 - DNA, 15 bp, Homo sapiens
gacaacatctctttt

SEQ ID NO: 126185 - DNA, 15 bp, Homo sapiens
acaacatctctttta

SEQ ID NO: 126186 - DNA, 15 bp, Homo sapiens
caacatctcttttac

SEQ ID NO: 126187 - DNA, 15 bp, Homo sapiens
aacatctcttttaca

SEQ ID NO: 126188 - DNA, 15 bp, Homo sapiens
acatctcttttacac

SEQ ID NO: 126189 - DNA, 15 bp, Homo sapiens
catctcttttacaca

SEQ ID NO: 126190 - DNA, 15 bp, Homo sapiens
atctcttttacacat

SEQ ID NO: 126191 - DNA, 15 bp, Homo sapiens
tctcttttacacatt

SEQ ID NO: 126192 - DNA, 15 bp, Homo sapiens
ctcttttacacattt

SEQ ID NO: 126193 - DNA, 15 bp, Homo sapiens
tcttttacacatttt

SEQ ID NO: 126194 - DNA, 15 bp, Homo sapiens
cttttacacatttta

SEQ ID NO: 126195 - DNA, 15 bp, Homo sapiens
ttttacacattttaa

SEQ ID NO: 126196 - DNA, 15 bp, Homo sapiens
tttacacattttaaa

SEQ ID NO: 126197 - DNA, 15 bp, Homo sapiens
ttacacattttaaat

SEQ ID NO: 126198 - DNA, 15 bp, Homo sapiens
tacacattttaaatc

SEQ ID NO: 126199 - DNA, 15 bp, Homo sapiens
acacattttaaatca

SEQ ID NO: 126200 - DNA, 15 bp, Homo sapiens
cacattttaaatcat

SEQ ID NO: 126201 - DNA, 15 bp, Homo sapiens
acattttaaatcatg

SEQ ID NO: 126202 - DNA, 15 bp, Homo sapiens
cattttaaatcatga

SEQ ID NO: 126203 - DNA, 15 bp, Homo sapiens
attttaaatcatgaa

SEQ ID NO: 126204 - DNA, 15 bp, Homo sapiens
ttttaaatcatgaaa

SEQ ID NO: 126205 - DNA, 15 bp, Homo sapiens
tttaaatcatgaaaa

SEQ ID NO: 126206 - DNA, 15 bp, Homo sapiens
ttaaatcatgaaaat

SEQ ID NO: 126207 - DNA, 15 bp, Homo sapiens
taaatcatgaaaata

SEQ ID NO: 126208 - DNA, 15 bp, Homo sapiens
aaatcatgaaaatag

SEQ ID NO: 126209 - DNA, 15 bp, Homo sapiens
aatcatgaaaataga

SEQ ID NO: 126210 - DNA, 15 bp, Homo sapiens
atcatgaaaatagaa

SEQ ID NO: 126211 - DNA, 15 bp, Homo sapiens
tcatgaaaatagaat

SEQ ID NO: 126212 - DNA, 15 bp, Homo sapiens
catgaaaatagaata

SEQ ID NO: 126213 - DNA, 15 bp, Homo sapiens
atgaaaatagaataa

SEQ ID NO: 126214 - DNA, 15 bp, Homo sapiens
tgaaaatagaataac

SEQ ID NO: 126215 - DNA, 15 bp, Homo sapiens
gaaaatagaataacc

SEQ ID NO: 126216 - DNA, 15 bp, Homo sapiens
aaaatagaataacct

SEQ ID NO: 126217 - DNA, 15 bp, Homo sapiens
aaatagaataacctt

SEQ ID NO: 126218 - DNA, 15 bp, Homo sapiens
aatagaataacctta

SEQ ID NO: 126219 - DNA, 15 bp, Homo sapiens
atagaataaccttac

SEQ ID NO: 126220 - DNA, 15 bp, Homo sapiens
tagaataaccttact

SEQ ID NO: 126221 - DNA, 15 bp, Homo sapiens
agaataaccttactg

SEQ ID NO: 126222 - DNA, 15 bp, Homo sapiens
gaataaccttactga

SEQ ID NO: 126223 - DNA, 15 bp, Homo sapiens
aataaccttactgat

SEQ ID NO: 126224 - DNA, 15 bp, Homo sapiens
ataaccttactgata

SEQ ID NO: 126225 - DNA, 15 bp, Homo sapiens
taaccttactgataa

SEQ ID NO: 126226 - DNA, 15 bp, Homo sapiens
aaccttactgataat

SEQ ID NO: 126227 - DNA, 15 bp, Homo sapiens
accttactgataatt

SEQ ID NO: 126228 - DNA, 15 bp, Homo sapiens
ccttactgataattt

SEQ ID NO: 126229 - DNA, 15 bp, Homo sapiens
cttactgataatttt

SEQ ID NO: 126230 - DNA, 15 bp, Homo sapiens
ttactgataatttta

SEQ ID NO: 126231 - DNA, 15 bp, Homo sapiens
tactgataattttag

SEQ ID NO: 126232 - DNA, 15 bp, Homo sapiens
actgataattttaga

SEQ ID NO: 126233 - DNA, 15 bp, Homo sapiens
ctgataattttagaa

SEQ ID NO: 126234 - DNA, 15 bp, Homo sapiens
tgataattttagaaa

SEQ ID NO: 126235 - DNA, 15 bp, Homo sapiens
gataattttagaaag

SEQ ID NO: 126236 - DNA, 15 bp, Homo sapiens
ataattttagaaagt

SEQ ID NO: 126237 - DNA, 15 bp, Homo sapiens
taattttagaaagtg

SEQ ID NO: 126238 - DNA, 15 bp, Homo sapiens
aattttagaaagtgg

SEQ ID NO: 126239 - DNA, 15 bp, Homo sapiens
attttagaaagtggt

SEQ ID NO: 126240 - DNA, 15 bp, Homo sapiens
ttttagaaagtggtg

SEQ ID NO: 126241 - DNA, 15 bp, Homo sapiens
tttagaaagtggtga

SEQ ID NO: 126242 - DNA, 15 bp, Homo sapiens
ttagaaagtggtgat

SEQ ID NO: 126243 - DNA, 15 bp, Homo sapiens
tagaaagtggtgatt

SEQ ID NO: 126244 - DNA, 15 bp, Homo sapiens
agaaagtggtgatta

SEQ ID NO: 126245 - DNA, 15 bp, Homo sapiens
gaaagtggtgattaa

SEQ ID NO: 126246 - DNA, 15 bp, Homo sapiens
aaagtggtgattaaa

SEQ ID NO: 126247 - DNA, 15 bp, Homo sapiens
aagtggtgattaaaa

SEQ ID NO: 126248 - DNA, 15 bp, Homo sapiens
agtggtgattaaaag

SEQ ID NO: 126249 - DNA, 15 bp, Homo sapiens
gtggtgattaaaagc

SEQ ID NO: 126250 - DNA, 15 bp, Homo sapiens
tggtgattaaaagca

SEQ ID NO: 126251 - DNA, 15 bp, Homo sapiens
ggtgattaaaagcac

SEQ ID NO: 126252 - DNA, 15 bp, Homo sapiens
gtgattaaaagcaca

SEQ ID NO: 126253 - DNA, 15 bp, Homo sapiens
tgattaaaagcacat

SEQ ID NO: 126254 - DNA, 15 bp, Homo sapiens
gattaaaagcacatt

SEQ ID NO: 126255 - DNA, 15 bp, Homo sapiens
attaaaagcacattt

SEQ ID NO: 126256 - DNA, 15 bp, Homo sapiens
ttaaaagcacattta

SEQ ID NO: 126257 - DNA, 15 bp, Homo sapiens
taaaagcacatttaa

SEQ ID NO: 126258 - DNA, 15 bp, Homo sapiens
aaaagcacatttaag

SEQ ID NO: 126259 - DNA, 15 bp, Homo sapiens
aaagcacatttaaga

SEQ ID NO: 126260 - DNA, 15 bp, Homo sapiens
aagcacatttaagat

SEQ ID NO: 126261 - DNA, 15 bp, Homo sapiens
agcacatttaagata

SEQ ID NO: 126262 - DNA, 15 bp, Homo sapiens
gcacatttaagataa

SEQ ID NO: 126263 - DNA, 15 bp, Homo sapiens
cacatttaagataat

SEQ ID NO: 126264 - DNA, 15 bp, Homo sapiens
acatttaagataatg

SEQ ID NO: 126265 - DNA, 15 bp, Homo sapiens
catttaagataatgc

SEQ ID NO: 126266 - DNA, 15 bp, Homo sapiens
atttaagataatgcc

SEQ ID NO: 126267 - DNA, 15 bp, Homo sapiens
tttaagataatgcct

SEQ ID NO: 126268 - DNA, 15 bp, Homo sapiens
ttaagataatgcctt

SEQ ID NO: 126269 - DNA, 15 bp, Homo sapiens
taagataatgcctta

SEQ ID NO: 126270 - DNA, 15 bp, Homo sapiens
aagataatgccttaa

SEQ ID NO: 126271 - DNA, 15 bp, Homo sapiens
agataatgccttaac

SEQ ID NO: 126272 - DNA, 15 bp, Homo sapiens
gataatgccttaaca

SEQ ID NO: 126273 - DNA, 15 bp, Homo sapiens
ataatgccttaacac

SEQ ID NO: 126274 - DNA, 15 bp, Homo sapiens
taatgccttaacacc

SEQ ID NO: 126275 - DNA, 15 bp, Homo sapiens
aatgccttaacacct

SEQ ID NO: 126276 - DNA, 15 bp, Homo sapiens
atgccttaacaccta

SEQ ID NO: 126277 - DNA, 15 bp, Homo sapiens
tgccttaacacctag

SEQ ID NO: 126278 - DNA, 15 bp, Homo sapiens
gccttaacacctagt

SEQ ID NO: 126279 - DNA, 15 bp, Homo sapiens
ccttaacacctagtc

SEQ ID NO: 126280 - DNA, 15 bp, Homo sapiens
cttaacacctagtct

SEQ ID NO: 126281 - DNA, 15 bp, Homo sapiens
ttaacacctagtctt

SEQ ID NO: 126282 - DNA, 15 bp, Homo sapiens
taacacctagtcttt

SEQ ID NO: 126283 - DNA, 15 bp, Homo sapiens
aacacctagtctttt

SEQ ID NO: 126284 - DNA, 15 bp, Homo sapiens
acacctagtcttttc

SEQ ID NO: 126285 - DNA, 15 bp, Homo sapiens
cacctagtcttttcc

SEQ ID NO: 126286 - DNA, 15 bp, Homo sapiens
acctagtcttttcca

SEQ ID NO: 126287 - DNA, 15 bp, Homo sapiens
cctagtcttttccat

SEQ ID NO: 126288 - DNA, 15 bp, Homo sapiens
ctagtcttttccata

SEQ ID NO: 126289 - DNA, 15 bp, Homo sapiens
tagtcttttccatat

SEQ ID NO: 126290 - DNA, 15 bp, Homo sapiens
agtcttttccatatg

SEQ ID NO: 126291 - DNA, 15 bp, Homo sapiens
gtcttttccatatgc

SEQ ID NO: 126292 - DNA, 15 bp, Homo sapiens
tcttttccatatgca

SEQ ID NO: 126293 - DNA, 15 bp, Homo sapiens
cttttccatatgcat

SEQ ID NO: 126294 - DNA, 15 bp, Homo sapiens
ttttccatatgcatg

SEQ ID NO: 126295 - DNA, 15 bp, Homo sapiens
tttccatatgcatga

SEQ ID NO: 126296 - DNA, 15 bp, Homo sapiens
ttccatatgcatgat

SEQ ID NO: 126297 - DNA, 15 bp, Homo sapiens
tccatatgcatgatg

SEQ ID NO: 126298 - DNA, 15 bp, Homo sapiens
ccatatgcatgatgt

SEQ ID NO: 126299 - DNA, 15 bp, Homo sapiens
catatgcatgatgtc

SEQ ID NO: 126300 - DNA, 15 bp, Homo sapiens
atatgcatgatgtct

SEQ ID NO: 126301 - DNA, 15 bp, Homo sapiens
tatgcatgatgtctt

SEQ ID NO: 126302 - DNA, 15 bp, Homo sapiens
atgcatgatgtctta

SEQ ID NO: 126303 - DNA, 15 bp, Homo sapiens
tgcatgatgtcttaa

SEQ ID NO: 126304 - DNA, 15 bp, Homo sapiens
gcatgatgtcttaat

SEQ ID NO: 126305 - DNA, 15 bp, Homo sapiens
catgatgtcttaatc

SEQ ID NO: 126306 - DNA, 15 bp, Homo sapiens
atgatgtcttaatca

SEQ ID NO: 126307 - DNA, 15 bp, Homo sapiens
tgatgtcttaatcac

SEQ ID NO: 126308 - DNA, 15 bp, Homo sapiens
gatgtcttaatcaca

SEQ ID NO: 126309 - DNA, 15 bp, Homo sapiens
atgtcttaatcacac

SEQ ID NO: 126310 - DNA, 15 bp, Homo sapiens
tgtcttaatcacaca

SEQ ID NO: 126311 - DNA, 15 bp, Homo sapiens
gtcttaatcacacat

SEQ ID NO: 126312 - DNA, 15 bp, Homo sapiens
tcttaatcacacatt

SEQ ID NO: 126313 - DNA, 15 bp, Homo sapiens
cttaatcacacattg

SEQ ID NO: 126314 - DNA, 15 bp, Homo sapiens
ttaatcacacattgc

SEQ ID NO: 126315 - DNA, 15 bp, Homo sapiens
taatcacacattgca

SEQ ID NO: 126316 - DNA, 15 bp, Homo sapiens
aatcacacattgcaa

SEQ ID NO: 126317 - DNA, 15 bp, Homo sapiens
atcacacattgcaaa

SEQ ID NO: 126318 - DNA, 15 bp, Homo sapiens
tcacacattgcaaat

SEQ ID NO: 126319 - DNA, 15 bp, Homo sapiens
cacacattgcaaatc

SEQ ID NO: 126320 - DNA, 15 bp, Homo sapiens
acacattgcaaatca

SEQ ID NO: 126321 - DNA, 15 bp, Homo sapiens
cacattgcaaatcat

SEQ ID NO: 126322 - DNA, 15 bp, Homo sapiens
acattgcaaatcatg

SEQ ID NO: 126323 - DNA, 15 bp, Homo sapiens
cattgcaaatcatgg

SEQ ID NO: 126324 - DNA, 15 bp, Homo sapiens
attgcaaatcatgga

SEQ ID NO: 126325 - DNA, 15 bp, Homo sapiens
ttgcaaatcatggaa

SEQ ID NO: 126326 - DNA, 15 bp, Homo sapiens
tgcaaatcatggaac

SEQ ID NO: 126327 - DNA, 15 bp, Homo sapiens
gcaaatcatggaaca

SEQ ID NO: 126328 - DNA, 15 bp, Homo sapiens
caaatcatggaacac

SEQ ID NO: 126329 - DNA, 15 bp, Homo sapiens
aaatcatggaacaca

SEQ ID NO: 126330 - DNA, 15 bp, Homo sapiens
aatcatggaacacag

SEQ ID NO: 126331 - DNA, 15 bp, Homo sapiens
atcatggaacacaga

SEQ ID NO: 126332 - DNA, 15 bp, Homo sapiens
tcatggaacacagaa

SEQ ID NO: 126333 - DNA, 15 bp, Homo sapiens
catggaacacagaat

SEQ ID NO: 126334 - DNA, 15 bp, Homo sapiens
atggaacacagaatt

SEQ ID NO: 126335 - DNA, 15 bp, Homo sapiens
tggaacacagaattt

SEQ ID NO: 126336 - DNA, 15 bp, Homo sapiens
ggaacacagaatttt

SEQ ID NO: 126337 - DNA, 15 bp, Homo sapiens
gaacacagaatttta

SEQ ID NO: 126338 - DNA, 15 bp, Homo sapiens
aacacagaattttaa

SEQ ID NO: 126339 - DNA, 15 bp, Homo sapiens
acacagaattttaag

SEQ ID NO: 126340 - DNA, 15 bp, Homo sapiens
cacagaattttaagc

SEQ ID NO: 126341 - DNA, 15 bp, Homo sapiens
acagaattttaagca

SEQ ID NO: 126342 - DNA, 15 bp, Homo sapiens
cagaattttaagcag

SEQ ID NO: 126343 - DNA, 15 bp, Homo sapiens
agaattttaagcagc

SEQ ID NO: 126344 - DNA, 15 bp, Homo sapiens
gaattttaagcagca

SEQ ID NO: 126345 - DNA, 15 bp, Homo sapiens
aattttaagcagcat

SEQ ID NO: 126346 - DNA, 15 bp, Homo sapiens
attttaagcagcatt

SEQ ID NO: 126347 - DNA, 15 bp, Homo sapiens
ttttaagcagcattt

SEQ ID NO: 126348 - DNA, 15 bp, Homo sapiens
tttaagcagcatttg

SEQ ID NO: 126349 - DNA, 15 bp, Homo sapiens
ttaagcagcatttgt

SEQ ID NO: 126350 - DNA, 15 bp, Homo sapiens
taagcagcatttgtg

SEQ ID NO: 126351 - DNA, 15 bp, Homo sapiens
aagcagcatttgtgt

SEQ ID NO: 126352 - DNA, 15 bp, Homo sapiens
agcagcatttgtgta

SEQ ID NO: 126353 - DNA, 15 bp, Homo sapiens
gcagcatttgtgtag

SEQ ID NO: 126354 - DNA, 15 bp, Homo sapiens
cagcatttgtgtaga

SEQ ID NO: 126355 - DNA, 15 bp, Homo sapiens
agcatttgtgtagaa

SEQ ID NO: 126356 - DNA, 15 bp, Homo sapiens
gcatttgtgtagaac

SEQ ID NO: 126357 - DNA, 15 bp, Homo sapiens
catttgtgtagaact

SEQ ID NO: 126358 - DNA, 15 bp, Homo sapiens
atttgtgtagaactt

SEQ ID NO: 126359 - DNA, 15 bp, Homo sapiens
tttgtgtagaacttc

SEQ ID NO: 126360 - DNA, 15 bp, Homo sapiens
ttgtgtagaacttct

SEQ ID NO: 126361 - DNA, 15 bp, Homo sapiens
tgtgtagaacttctc

SEQ ID NO: 126362 - DNA, 15 bp, Homo sapiens
gtgtagaacttctca

SEQ ID NO: 126363 - DNA, 15 bp, Homo sapiens
tgtagaacttctcag

SEQ ID NO: 126364 - DNA, 15 bp, Homo sapiens
gtagaacttctcagt

SEQ ID NO: 126365 - DNA, 15 bp, Homo sapiens
tagaacttctcagtt

SEQ ID NO: 126366 - DNA, 15 bp, Homo sapiens
agaacttctcagttt

SEQ ID NO: 126367 - DNA, 15 bp, Homo sapiens
gaacttctcagtttt

SEQ ID NO: 126368 - DNA, 15 bp, Homo sapiens
aacttctcagtttta

SEQ ID NO: 126369 - DNA, 15 bp, Homo sapiens
acttctcagttttac

SEQ ID NO: 126370 - DNA, 15 bp, Homo sapiens
cttctcagttttact

SEQ ID NO: 126371 - DNA, 15 bp, Homo sapiens
ttctcagttttacta

SEQ ID NO: 126372 - DNA, 15 bp, Homo sapiens
tctcagttttactaa

SEQ ID NO: 126373 - DNA, 15 bp, Homo sapiens
ctcagttttactaat

SEQ ID NO: 126374 - DNA, 15 bp, Homo sapiens
tcagttttactaata

SEQ ID NO: 126375 - DNA, 15 bp, Homo sapiens
cagttttactaatat

SEQ ID NO: 126376 - DNA, 15 bp, Homo sapiens
agttttactaatatt

SEQ ID NO: 126377 - DNA, 15 bp, Homo sapiens
gttttactaatatta

SEQ ID NO: 126378 - DNA, 15 bp, Homo sapiens
ttttactaatattat

SEQ ID NO: 126379 - DNA, 15 bp, Homo sapiens
tttactaatattatt

SEQ ID NO: 126380 - DNA, 15 bp, Homo sapiens
ttactaatattattt

SEQ ID NO: 126381 - DNA, 15 bp, Homo sapiens
tactaatattatttt

SEQ ID NO: 126382 - DNA, 15 bp, Homo sapiens
actaatattatttta

SEQ ID NO: 126383 - DNA, 15 bp, Homo sapiens
ctaatattattttat

SEQ ID NO: 126384 - DNA, 15 bp, Homo sapiens
taatattattttatt

SEQ ID NO: 126385 - DNA, 15 bp, Homo sapiens
aatattattttattt

SEQ ID NO: 126386 - DNA, 15 bp, Homo sapiens
atattattttatttt

SEQ ID NO: 126387 - DNA, 15 bp, Homo sapiens
tattattttatttta

SEQ ID NO: 126388 - DNA, 15 bp, Homo sapiens
attattttattttat

SEQ ID NO: 126389 - DNA, 15 bp, Homo sapiens
ttattttattttatt

SEQ ID NO: 126390 - DNA, 15 bp, Homo sapiens
tattttattttattc

SEQ ID NO: 126391 - DNA, 15 bp, Homo sapiens
attttattttattct

SEQ ID NO: 126392 - DNA, 15 bp, Homo sapiens
ttttattttattctc

SEQ ID NO: 126393 - DNA, 15 bp, Homo sapiens
tttattttattctca

SEQ ID NO: 126394 - DNA, 15 bp, Homo sapiens
ttattttattctcat

SEQ ID NO: 126395 - DNA, 15 bp, Homo sapiens
tattttattctcata

SEQ ID NO: 126396 - DNA, 15 bp, Homo sapiens
attttattctcataa

SEQ ID NO: 126397 - DNA, 15 bp, Homo sapiens
ttttattctcataac

SEQ ID NO: 126398 - DNA, 15 bp, Homo sapiens
tttattctcataaca

SEQ ID NO: 126399 - DNA, 15 bp, Homo sapiens
ttattctcataacaa

SEQ ID NO: 126400 - DNA, 15 bp, Homo sapiens
tattctcataacaac

SEQ ID NO: 126401 - DNA, 15 bp, Homo sapiens
attctcataacaacc

SEQ ID NO: 126402 - DNA, 15 bp, Homo sapiens
ttctcataacaacct

SEQ ID NO: 126403 - DNA, 15 bp, Homo sapiens
tctcataacaacctt

SEQ ID NO: 126404 - DNA, 15 bp, Homo sapiens
ctcataacaaccttg

SEQ ID NO: 126405 - DNA, 15 bp, Homo sapiens
tcataacaaccttga

SEQ ID NO: 126406 - DNA, 15 bp, Homo sapiens
cataacaaccttgaa

SEQ ID NO: 126407 - DNA, 15 bp, Homo sapiens
ataacaaccttgaat

SEQ ID NO: 126408 - DNA, 15 bp, Homo sapiens
taacaaccttgaata

SEQ ID NO: 126409 - DNA, 15 bp, Homo sapiens
aacaaccttgaatag

SEQ ID NO: 126410 - DNA, 15 bp, Homo sapiens
acaaccttgaataga

SEQ ID NO: 126411 - DNA, 15 bp, Homo sapiens
caaccttgaatagaa

SEQ ID NO: 126412 - DNA, 15 bp, Homo sapiens
aaccttgaatagaac

SEQ ID NO: 126413 - DNA, 15 bp, Homo sapiens
accttgaatagaact

SEQ ID NO: 126414 - DNA, 15 bp, Homo sapiens
ccttgaatagaactc

SEQ ID NO: 126415 - DNA, 15 bp, Homo sapiens
cttgaatagaactca

SEQ ID NO: 126416 - DNA, 15 bp, Homo sapiens
ttgaatagaactcag

SEQ ID NO: 126417 - DNA, 15 bp, Homo sapiens
tgaatagaactcaga

SEQ ID NO: 126418 - DNA, 15 bp, Homo sapiens
gaatagaactcagat

SEQ ID NO: 126419 - DNA, 15 bp, Homo sapiens
aatagaactcagatc

SEQ ID NO: 126420 - DNA, 15 bp, Homo sapiens
atagaactcagatca

SEQ ID NO: 126421 - DNA, 15 bp, Homo sapiens
tagaactcagatcat

SEQ ID NO: 126422 - DNA, 15 bp, Homo sapiens
agaactcagatcatc

SEQ ID NO: 126423 - DNA, 15 bp, Homo sapiens
gaactcagatcatct

SEQ ID NO: 126424 - DNA, 15 bp, Homo sapiens
aactcagatcatctg

SEQ ID NO: 126425 - DNA, 15 bp, Homo sapiens
actcagatcatctgt

SEQ ID NO: 126426 - DNA, 15 bp, Homo sapiens
ctcagatcatctgtc

SEQ ID NO: 126427 - DNA, 15 bp, Homo sapiens
tcagatcatctgtca

SEQ ID NO: 126428 - DNA, 15 bp, Homo sapiens
cagatcatctgtcaa

SEQ ID NO: 126429 - DNA, 15 bp, Homo sapiens
agatcatctgtcaat

SEQ ID NO: 126430 - DNA, 15 bp, Homo sapiens
gatcatctgtcaatc

SEQ ID NO: 126431 - DNA, 15 bp, Homo sapiens
atcatctgtcaatca

SEQ ID NO: 126432 - DNA, 15 bp, Homo sapiens
tcatctgtcaatcat

SEQ ID NO: 126433 - DNA, 15 bp, Homo sapiens
catctgtcaatcatg

SEQ ID NO: 126434 - DNA, 15 bp, Homo sapiens
atctgtcaatcatgt

SEQ ID NO: 126435 - DNA, 15 bp, Homo sapiens
tctgtcaatcatgta

SEQ ID NO: 126436 - DNA, 15 bp, Homo sapiens
ctgtcaatcatgtat

SEQ ID NO: 126437 - DNA, 15 bp, Homo sapiens
tgtcaatcatgtatt

SEQ ID NO: 126438 - DNA, 15 bp, Homo sapiens
gtcaatcatgtattt

SEQ ID NO: 126439 - DNA, 15 bp, Homo sapiens
tcaatcatgtatttt

SEQ ID NO: 126440 - DNA, 15 bp, Homo sapiens
caatcatgtattttg

SEQ ID NO: 126441 - DNA, 15 bp, Homo sapiens
aatcatgtattttga

SEQ ID NO: 126442 - DNA, 15 bp, Homo sapiens
atcatgtattttgat

SEQ ID NO: 126443 - DNA, 15 bp, Homo sapiens
tcatgtattttgata

SEQ ID NO: 126444 - DNA, 15 bp, Homo sapiens
catgtattttgataa

SEQ ID NO: 126445 - DNA, 15 bp, Homo sapiens
atgtattttgataac

SEQ ID NO: 126446 - DNA, 15 bp, Homo sapiens
tgtattttgataaca

SEQ ID NO: 126447 - DNA, 15 bp, Homo sapiens
gtattttgataacag

SEQ ID NO: 126448 - DNA, 15 bp, Homo sapiens
tattttgataacagc

SEQ ID NO: 126449 - DNA, 15 bp, Homo sapiens
attttgataacagcc

SEQ ID NO: 126450 - DNA, 15 bp, Homo sapiens
ttttgataacagcct

SEQ ID NO: 126451 - DNA, 15 bp, Homo sapiens
tttgataacagcctt

SEQ ID NO: 126452 - DNA, 15 bp, Homo sapiens
ttgataacagccttt

SEQ ID NO: 126453 - DNA, 15 bp, Homo sapiens
tgataacagccttta

SEQ ID NO: 126454 - DNA, 15 bp, Homo sapiens
gataacagcctttac

SEQ ID NO: 126455 - DNA, 15 bp, Homo sapiens
ataacagcctttaca

SEQ ID NO: 126456 - DNA, 15 bp, Homo sapiens
taacagcctttacag

SEQ ID NO: 126457 - DNA, 15 bp, Homo sapiens
aacagcctttacagt

SEQ ID NO: 126458 - DNA, 15 bp, Homo sapiens
acagcctttacagtg

SEQ ID NO: 126459 - DNA, 15 bp, Homo sapiens
cagcctttacagtga

SEQ ID NO: 126460 - DNA, 15 bp, Homo sapiens
agcctttacagtgag

SEQ ID NO: 126461 - DNA, 15 bp, Homo sapiens
gcctttacagtgagc

SEQ ID NO: 126462 - DNA, 15 bp, Homo sapiens
cctttacagtgagca

SEQ ID NO: 126463 - DNA, 15 bp, Homo sapiens
ctttacagtgagcat

SEQ ID NO: 126464 - DNA, 15 bp, Homo sapiens
tttacagtgagcata

SEQ ID NO: 126465 - DNA, 15 bp, Homo sapiens
ttacagtgagcatag

SEQ ID NO: 126466 - DNA, 15 bp, Homo sapiens
tacagtgagcataga

SEQ ID NO: 126467 - DNA, 15 bp, Homo sapiens
acagtgagcatagaa

SEQ ID NO: 126468 - DNA, 15 bp, Homo sapiens
cagtgagcatagaaa

SEQ ID NO: 126469 - DNA, 15 bp, Homo sapiens
agtgagcatagaaaa

SEQ ID NO: 126470 - DNA, 15 bp, Homo sapiens
gtgagcatagaaaat

SEQ ID NO: 126471 - DNA, 15 bp, Homo sapiens
tgagcatagaaaata

SEQ ID NO: 126472 - DNA, 15 bp, Homo sapiens
gagcatagaaaatac

SEQ ID NO: 126473 - DNA, 15 bp, Homo sapiens
agcatagaaaataca

SEQ ID NO: 126474 - DNA, 15 bp, Homo sapiens
gcatagaaaatacag

SEQ ID NO: 126475 - DNA, 15 bp, Homo sapiens
catagaaaatacagt

SEQ ID NO: 126476 - DNA, 15 bp, Homo sapiens
atagaaaatacagta

SEQ ID NO: 126477 - DNA, 15 bp, Homo sapiens
tagaaaatacagtag

SEQ ID NO: 126478 - DNA, 15 bp, Homo sapiens
agaaaatacagtagt

SEQ ID NO: 126479 - DNA, 15 bp, Homo sapiens
gaaaatacagtagtg

SEQ ID NO: 126480 - DNA, 15 bp, Homo sapiens
aaaatacagtagtgg

SEQ ID NO: 126481 - DNA, 15 bp, Homo sapiens
aaatacagtagtggc

SEQ ID NO: 126482 - DNA, 15 bp, Homo sapiens
aatacagtagtggct

SEQ ID NO: 126483 - DNA, 15 bp, Homo sapiens
atacagtagtggcta

SEQ ID NO: 126484 - DNA, 15 bp, Homo sapiens
tacagtagtggctaa

SEQ ID NO: 126485 - DNA, 15 bp, Homo sapiens
acagtagtggctaac

SEQ ID NO: 126486 - DNA, 15 bp, Homo sapiens
cagtagtggctaaca

SEQ ID NO: 126487 - DNA, 15 bp, Homo sapiens
agtagtggctaacaa

SEQ ID NO: 126488 - DNA, 15 bp, Homo sapiens
gtagtggctaacaac

SEQ ID NO: 126489 - DNA, 15 bp, Homo sapiens
tagtggctaacaaca

SEQ ID NO: 126490 - DNA, 15 bp, Homo sapiens
agtggctaacaacac

SEQ ID NO: 126491 - DNA, 15 bp, Homo sapiens
gtggctaacaacaca

SEQ ID NO: 126492 - DNA, 15 bp, Homo sapiens
tggctaacaacacag

SEQ ID NO: 126493 - DNA, 15 bp, Homo sapiens
ggctaacaacacagg

SEQ ID NO: 126494 - DNA, 15 bp, Homo sapiens
gctaacaacacaggc

SEQ ID NO: 126495 - DNA, 15 bp, Homo sapiens
ctaacaacacaggct

SEQ ID NO: 126496 - DNA, 15 bp, Homo sapiens
taacaacacaggctc

SEQ ID NO: 126497 - DNA, 15 bp, Homo sapiens
aacaacacaggctcc

SEQ ID NO: 126498 - DNA, 15 bp, Homo sapiens
acaacacaggctcca

SEQ ID NO: 126499 - DNA, 15 bp, Homo sapiens
caacacaggctccag

SEQ ID NO: 126500 - DNA, 15 bp, Homo sapiens
aacacaggctccaga

SEQ ID NO: 126501 - DNA, 15 bp, Homo sapiens
acacaggctccagat

SEQ ID NO: 126502 - DNA, 15 bp, Homo sapiens
cacaggctccagatg

SEQ ID NO: 126503 - DNA, 15 bp, Homo sapiens
acaggctccagatgt

SEQ ID NO: 126504 - DNA, 15 bp, Homo sapiens
caggctccagatgtc

SEQ ID NO: 126505 - DNA, 15 bp, Homo sapiens
aggctccagatgtca

SEQ ID NO: 126506 - DNA, 15 bp, Homo sapiens
ggctccagatgtcag

SEQ ID NO: 126507 - DNA, 15 bp, Homo sapiens
gctccagatgtcagg

SEQ ID NO: 126508 - DNA, 15 bp, Homo sapiens
ctccagatgtcaggt

SEQ ID NO: 126509 - DNA, 15 bp, Homo sapiens
tccagatgtcaggtt

SEQ ID NO: 126510 - DNA, 15 bp, Homo sapiens
ccagatgtcaggtta

SEQ ID NO: 126511 - DNA, 15 bp, Homo sapiens
cagatgtcaggttat

SEQ ID NO: 126512 - DNA, 15 bp, Homo sapiens
agatgtcaggttatc

SEQ ID NO: 126513 - DNA, 15 bp, Homo sapiens
gatgtcaggttatct

SEQ ID NO: 126514 - DNA, 15 bp, Homo sapiens
atgtcaggttatctg

SEQ ID NO: 126515 - DNA, 15 bp, Homo sapiens
tgtcaggttatctgg

SEQ ID NO: 126516 - DNA, 15 bp, Homo sapiens
gtcaggttatctggg

SEQ ID NO: 126517 - DNA, 15 bp, Homo sapiens
tcaggttatctgggt

SEQ ID NO: 126518 - DNA, 15 bp, Homo sapiens
caggttatctgggta

SEQ ID NO: 126519 - DNA, 15 bp, Homo sapiens
aggttatctgggtat

SEQ ID NO: 126520 - DNA, 15 bp, Homo sapiens
ggttatctgggtatg

SEQ ID NO: 126521 - DNA, 15 bp, Homo sapiens
gttatctgggtatga

SEQ ID NO: 126522 - DNA, 15 bp, Homo sapiens
ttatctgggtatgaa

SEQ ID NO: 126523 - DNA, 15 bp, Homo sapiens
tatctgggtatgaat

SEQ ID NO: 126524 - DNA, 15 bp, Homo sapiens
atctgggtatgaatt

SEQ ID NO: 126525 - DNA, 15 bp, Homo sapiens
tctgggtatgaattc

SEQ ID NO: 126526 - DNA, 15 bp, Homo sapiens
ctgggtatgaattct

SEQ ID NO: 126527 - DNA, 15 bp, Homo sapiens
tgggtatgaattctg

SEQ ID NO: 126528 - DNA, 15 bp, Homo sapiens
gggtatgaattctgg

SEQ ID NO: 126529 - DNA, 15 bp, Homo sapiens
ggtatgaattctggt

SEQ ID NO: 126530 - DNA, 15 bp, Homo sapiens
gtatgaattctggtg

SEQ ID NO: 126531 - DNA, 15 bp, Homo sapiens
tatgaattctggtgt

SEQ ID NO: 126532 - DNA, 15 bp, Homo sapiens
atgaattctggtgtc

SEQ ID NO: 126533 - DNA, 15 bp, Homo sapiens
tgaattctggtgtca

SEQ ID NO: 126534 - DNA, 15 bp, Homo sapiens
gaattctggtgtcag

SEQ ID NO: 126535 - DNA, 15 bp, Homo sapiens
aattctggtgtcagc

SEQ ID NO: 126536 - DNA, 15 bp, Homo sapiens
attctggtgtcagca

SEQ ID NO: 126537 - DNA, 15 bp, Homo sapiens
ttctggtgtcagcat

SEQ ID NO: 126538 - DNA, 15 bp, Homo sapiens
tctggtgtcagcatt

SEQ ID NO: 126539 - DNA, 15 bp, Homo sapiens
ctggtgtcagcattc

SEQ ID NO: 126540 - DNA, 15 bp, Homo sapiens
tggtgtcagcattca

SEQ ID NO: 126541 - DNA, 15 bp, Homo sapiens
ggtgtcagcattcac

SEQ ID NO: 126542 - DNA, 15 bp, Homo sapiens
gtgtcagcattcact

SEQ ID NO: 126543 - DNA, 15 bp, Homo sapiens
tgtcagcattcacta

SEQ ID NO: 126544 - DNA, 15 bp, Homo sapiens
gtcagcattcactaa

SEQ ID NO: 126545 - DNA, 15 bp, Homo sapiens
tcagcattcactaag

SEQ ID NO: 126546 - DNA, 15 bp, Homo sapiens
cagcattcactaagc

SEQ ID NO: 126547 - DNA, 15 bp, Homo sapiens
agcattcactaagca

SEQ ID NO: 126548 - DNA, 15 bp, Homo sapiens
gcattcactaagcat

SEQ ID NO: 126549 - DNA, 15 bp, Homo sapiens
cattcactaagcata

SEQ ID NO: 126550 - DNA, 15 bp, Homo sapiens
attcactaagcatat

SEQ ID NO: 126551 - DNA, 15 bp, Homo sapiens
ttcactaagcatatg

SEQ ID NO: 126552 - DNA, 15 bp, Homo sapiens
tcactaagcatatga

SEQ ID NO: 126553 - DNA, 15 bp, Homo sapiens
cactaagcatatgac

SEQ ID NO: 126554 - DNA, 15 bp, Homo sapiens
actaagcatatgacc

SEQ ID NO: 126555 - DNA, 15 bp, Homo sapiens
ctaagcatatgacct

SEQ ID NO: 126556 - DNA, 15 bp, Homo sapiens
taagcatatgacctt

SEQ ID NO: 126557 - DNA, 15 bp, Homo sapiens
aagcatatgaccttg

SEQ ID NO: 126558 - DNA, 15 bp, Homo sapiens
agcatatgaccttgg

SEQ ID NO: 126559 - DNA, 15 bp, Homo sapiens
gcatatgaccttgga

SEQ ID NO: 126560 - DNA, 15 bp, Homo sapiens
catatgaccttggac

SEQ ID NO: 126561 - DNA, 15 bp, Homo sapiens
atatgaccttggaca

SEQ ID NO: 126562 - DNA, 15 bp, Homo sapiens
tatgaccttggacaa

SEQ ID NO: 126563 - DNA, 15 bp, Homo sapiens
atgaccttggacaag

SEQ ID NO: 126564 - DNA, 15 bp, Homo sapiens
gaccttggacaagtg

SEQ ID NO: 126565 - DNA, 15 bp, Homo sapiens
accttggacaagtga

SEQ ID NO: 126566 - DNA, 15 bp, Homo sapiens
ccttggacaagtgat

SEQ ID NO: 126567 - DNA, 15 bp, Homo sapiens
cttggacaagtgatt

SEQ ID NO: 126568 - DNA, 15 bp, Homo sapiens
ttggacaagtgattt

SEQ ID NO: 126569 - DNA, 15 bp, Homo sapiens
tggacaagtgattta

SEQ ID NO: 126570 - DNA, 15 bp, Homo sapiens
ggacaagtgatttaa

SEQ ID NO: 126571 - DNA, 15 bp, Homo sapiens
gacaagtgatttaag

SEQ ID NO: 126572 - DNA, 15 bp, Homo sapiens
acaagtgatttaagt

SEQ ID NO: 126573 - DNA, 15 bp, Homo sapiens
caagtgatttaagtt

SEQ ID NO: 126574 - DNA, 15 bp, Homo sapiens
aagtgatttaagttt

SEQ ID NO: 126575 - DNA, 15 bp, Homo sapiens
agtgatttaagtttc

SEQ ID NO: 126576 - DNA, 15 bp, Homo sapiens
gtgatttaagtttct

SEQ ID NO: 126577 - DNA, 15 bp, Homo sapiens
tgatttaagtttctt

SEQ ID NO: 126578 - DNA, 15 bp, Homo sapiens
gatttaagtttcttt

SEQ ID NO: 126579 - DNA, 15 bp, Homo sapiens
atttaagtttctttt

SEQ ID NO: 126580 - DNA, 15 bp, Homo sapiens
tttaagtttctttta

SEQ ID NO: 126581 - DNA, 15 bp, Homo sapiens
ttaagtttcttttaa

SEQ ID NO: 126582 - DNA, 15 bp, Homo sapiens
taagtttcttttaaa

SEQ ID NO: 126583 - DNA, 15 bp, Homo sapiens
aagtttcttttaaac

SEQ ID NO: 126584 - DNA, 15 bp, Homo sapiens
agtttcttttaaaca

SEQ ID NO: 126585 - DNA, 15 bp, Homo sapiens
gtttcttttaaacag

SEQ ID NO: 126586 - DNA, 15 bp, Homo sapiens
tttcttttaaacaga

SEQ ID NO: 126587 - DNA, 15 bp, Homo sapiens
ttcttttaaacagag

SEQ ID NO: 126588 - DNA, 15 bp, Homo sapiens
tcttttaaacagaga

SEQ ID NO: 126589 - DNA, 15 bp, Homo sapiens
cttttaaacagagaa

SEQ ID NO: 126590 - DNA, 15 bp, Homo sapiens
ttttaaacagagaat

SEQ ID NO: 126591 - DNA, 15 bp, Homo sapiens
tttaaacagagaata

SEQ ID NO: 126592 - DNA, 15 bp, Homo sapiens
ttaaacagagaatag

SEQ ID NO: 126593 - DNA, 15 bp, Homo sapiens
taaacagagaatagt

SEQ ID NO: 126594 - DNA, 15 bp, Homo sapiens
aaacagagaatagta

SEQ ID NO: 126595 - DNA, 15 bp, Homo sapiens
aacagagaatagtaa

SEQ ID NO: 126596 - DNA, 15 bp, Homo sapiens
acagagaatagtaat

SEQ ID NO: 126597 - DNA, 15 bp, Homo sapiens
cagagaatagtaata

SEQ ID NO: 126598 - DNA, 15 bp, Homo sapiens
agagaatagtaatac

SEQ ID NO: 126599 - DNA, 15 bp, Homo sapiens
gagaatagtaatacc

SEQ ID NO: 126600 - DNA, 15 bp, Homo sapiens
agaatagtaatacct

SEQ ID NO: 126601 - DNA, 15 bp, Homo sapiens
gaatagtaataccta

SEQ ID NO: 126602 - DNA, 15 bp, Homo sapiens
aatagtaatacctac

SEQ ID NO: 126603 - DNA, 15 bp, Homo sapiens
atagtaatacctacc

SEQ ID NO: 126604 - DNA, 15 bp, Homo sapiens
tagtaatacctacct

SEQ ID NO: 126605 - DNA, 15 bp, Homo sapiens
agtaatacctacctc

SEQ ID NO: 126606 - DNA, 15 bp, Homo sapiens
gtaatacctacctca

SEQ ID NO: 126607 - DNA, 15 bp, Homo sapiens
taatacctacctcat

SEQ ID NO: 126608 - DNA, 15 bp, Homo sapiens
aatacctacctcata

SEQ ID NO: 126609 - DNA, 15 bp, Homo sapiens
atacctacctcatat

SEQ ID NO: 126610 - DNA, 15 bp, Homo sapiens
tacctacctcatatt

SEQ ID NO: 126611 - DNA, 15 bp, Homo sapiens
acctacctcatatta

SEQ ID NO: 126612 - DNA, 15 bp, Homo sapiens
cctacctcatattat

SEQ ID NO: 126613 - DNA, 15 bp, Homo sapiens
ctacctcatattatt

SEQ ID NO: 126614 - DNA, 15 bp, Homo sapiens
tacctcatattatta

SEQ ID NO: 126615 - DNA, 15 bp, Homo sapiens
acctcatattattat

SEQ ID NO: 126616 - DNA, 15 bp, Homo sapiens
cctcatattattatt

SEQ ID NO: 126617 - DNA, 15 bp, Homo sapiens
ctcatattattattg

SEQ ID NO: 126618 - DNA, 15 bp, Homo sapiens
tcatattattattgt

SEQ ID NO: 126619 - DNA, 15 bp, Homo sapiens
catattattattgtc

SEQ ID NO: 126620 - DNA, 15 bp, Homo sapiens
atattattattgtca

SEQ ID NO: 126621 - DNA, 15 bp, Homo sapiens
tattattattgtcag

SEQ ID NO: 126622 - DNA, 15 bp, Homo sapiens
attattattgtcagt

SEQ ID NO: 126623 - DNA, 15 bp, Homo sapiens
ttattattgtcagtg

SEQ ID NO: 126624 - DNA, 15 bp, Homo sapiens
tattattgtcagtgt

SEQ ID NO: 126625 - DNA, 15 bp, Homo sapiens
attattgtcagtgta

SEQ ID NO: 126626 - DNA, 15 bp, Homo sapiens
ttattgtcagtgtat

SEQ ID NO: 126627 - DNA, 15 bp, Homo sapiens
tattgtcagtgtatc

SEQ ID NO: 126628 - DNA, 15 bp, Homo sapiens
attgtcagtgtatca

SEQ ID NO: 126629 - DNA, 15 bp, Homo sapiens
ttgtcagtgtatcat

SEQ ID NO: 126630 - DNA, 15 bp, Homo sapiens
tgtcagtgtatcatc

SEQ ID NO: 126631 - DNA, 15 bp, Homo sapiens
gtcagtgtatcatct

SEQ ID NO: 126632 - DNA, 15 bp, Homo sapiens
tcagtgtatcatctt

SEQ ID NO: 126633 - DNA, 15 bp, Homo sapiens
cagtgtatcatctta

SEQ ID NO: 126634 - DNA, 15 bp, Homo sapiens
agtgtatcatcttac

SEQ ID NO: 126635 - DNA, 15 bp, Homo sapiens
gtgtatcatcttaca

SEQ ID NO: 126636 - DNA, 15 bp, Homo sapiens
tgtatcatcttacaa

SEQ ID NO: 126637 - DNA, 15 bp, Homo sapiens
gtatcatcttacaat

SEQ ID NO: 126638 - DNA, 15 bp, Homo sapiens
tatcatcttacaatc

SEQ ID NO: 126639 - DNA, 15 bp, Homo sapiens
atcatcttacaatca

SEQ ID NO: 126640 - DNA, 15 bp, Homo sapiens
tcatcttacaatcac

SEQ ID NO: 126641 - DNA, 15 bp, Homo sapiens
catcttacaatcaca

SEQ ID NO: 126642 - DNA, 15 bp, Homo sapiens
atcttacaatcacag

SEQ ID NO: 126643 - DNA, 15 bp, Homo sapiens
tcttacaatcacagt

SEQ ID NO: 126644 - DNA, 15 bp, Homo sapiens
cttacaatcacagtc

SEQ ID NO: 126645 - DNA, 15 bp, Homo sapiens
ttacaatcacagtct

SEQ ID NO: 126646 - DNA, 15 bp, Homo sapiens
tacaatcacagtctt

SEQ ID NO: 126647 - DNA, 15 bp, Homo sapiens
acaatcacagtcttt

SEQ ID NO: 126648 - DNA, 15 bp, Homo sapiens
caatcacagtctttc

SEQ ID NO: 126649 - DNA, 15 bp, Homo sapiens
aatcacagtctttct

SEQ ID NO: 126650 - DNA, 15 bp, Homo sapiens
atcacagtctttctc

SEQ ID NO: 126651 - DNA, 15 bp, Homo sapiens
tcacagtctttctct

SEQ ID NO: 126652 - DNA, 15 bp, Homo sapiens
cacagtctttctctt

SEQ ID NO: 126653 - DNA, 15 bp, Homo sapiens
acagtctttctctta

SEQ ID NO: 126654 - DNA, 15 bp, Homo sapiens
cagtctttctcttag

SEQ ID NO: 126655 - DNA, 15 bp, Homo sapiens
agtctttctcttagg

SEQ ID NO: 126656 - DNA, 15 bp, Homo sapiens
gtctttctcttaggg

SEQ ID NO: 126657 - DNA, 15 bp, Homo sapiens
tctttctcttagggc

SEQ ID NO: 126658 - DNA, 15 bp, Homo sapiens
ctttctcttagggct

SEQ ID NO: 126659 - DNA, 15 bp, Homo sapiens
tttctcttagggctg

SEQ ID NO: 126660 - DNA, 15 bp, Homo sapiens
ttctcttagggctgg

SEQ ID NO: 126661 - DNA, 15 bp, Homo sapiens
tctcttagggctggg

SEQ ID NO: 126662 - DNA, 15 bp, Homo sapiens
ctcttagggctgggc

SEQ ID NO: 126663 - DNA, 15 bp, Homo sapiens
tcttagggctgggct

SEQ ID NO: 126664 - DNA, 15 bp, Homo sapiens
cttagggctgggctc

SEQ ID NO: 126665 - DNA, 15 bp, Homo sapiens
ttagggctgggctca

SEQ ID NO: 126666 - DNA, 15 bp, Homo sapiens
tagggctgggctcag

SEQ ID NO: 126667 - DNA, 15 bp, Homo sapiens
agggctgggctcagt

SEQ ID NO: 126668 - DNA, 15 bp, Homo sapiens
gggctgggctcagtg

SEQ ID NO: 126669 - DNA, 15 bp, Homo sapiens
ggctgggctcagtgg

SEQ ID NO: 126670 - DNA, 15 bp, Homo sapiens
gctgggctcagtggg

SEQ ID NO: 126671 - DNA, 15 bp, Homo sapiens
ctgggctcagtgggt

SEQ ID NO: 126672 - DNA, 15 bp, Homo sapiens
tgggctcagtgggtg

SEQ ID NO: 126673 - DNA, 15 bp, Homo sapiens
gggctcagtgggtgg

SEQ ID NO: 126674 - DNA, 15 bp, Homo sapiens
ggctcagtgggtgga

SEQ ID NO: 126675 - DNA, 15 bp, Homo sapiens
gctcagtgggtggat

SEQ ID NO: 126676 - DNA, 15 bp, Homo sapiens
ctcagtgggtggatt

SEQ ID NO: 126677 - DNA, 15 bp, Homo sapiens
tcagtgggtggattg

SEQ ID NO: 126678 - DNA, 15 bp, Homo sapiens
cagtgggtggattga

SEQ ID NO: 126679 - DNA, 15 bp, Homo sapiens
agtgggtggattgac

SEQ ID NO: 126680 - DNA, 15 bp, Homo sapiens
gtgggtggattgaca

SEQ ID NO: 126681 - DNA, 15 bp, Homo sapiens
tgggtggattgacac

SEQ ID NO: 126682 - DNA, 15 bp, Homo sapiens
gggtggattgacact

SEQ ID NO: 126683 - DNA, 15 bp, Homo sapiens
ggtggattgacactg

SEQ ID NO: 126684 - DNA, 15 bp, Homo sapiens
gtggattgacactgc

SEQ ID NO: 126685 - DNA, 15 bp, Homo sapiens
tggattgacactgca

SEQ ID NO: 126686 - DNA, 15 bp, Homo sapiens
ggattgacactgcag

SEQ ID NO: 126687 - DNA, 15 bp, Homo sapiens
gattgacactgcaga

SEQ ID NO: 126688 - DNA, 15 bp, Homo sapiens
attgacactgcagaa

SEQ ID NO: 126689 - DNA, 15 bp, Homo sapiens
ttgacactgcagaaa

SEQ ID NO: 126690 - DNA, 15 bp, Homo sapiens
tgacactgcagaaat

SEQ ID NO: 126691 - DNA, 15 bp, Homo sapiens
gacactgcagaaatg

SEQ ID NO: 126692 - DNA, 15 bp, Homo sapiens
acactgcagaaatgg

SEQ ID NO: 126693 - DNA, 15 bp, Homo sapiens
cactgcagaaatggc

SEQ ID NO: 126694 - DNA, 15 bp, Homo sapiens
actgcagaaatggcc

SEQ ID NO: 126695 - DNA, 15 bp, Homo sapiens
ctgcagaaatggcca

SEQ ID NO: 126696 - DNA, 15 bp, Homo sapiens
tgcagaaatggccag

SEQ ID NO: 126697 - DNA, 15 bp, Homo sapiens
gcagaaatggccaga

SEQ ID NO: 126698 - DNA, 15 bp, Homo sapiens
cagaaatggccagat

SEQ ID NO: 126699 - DNA, 15 bp, Homo sapiens
agaaatggccagatc

SEQ ID NO: 126700 - DNA, 15 bp, Homo sapiens
gaaatggccagatct

SEQ ID NO: 126701 - DNA, 15 bp, Homo sapiens
aaatggccagatcta

SEQ ID NO: 126702 - DNA, 15 bp, Homo sapiens
aatggccagatctaa

SEQ ID NO: 126703 - DNA, 15 bp, Homo sapiens
atggccagatctaaa

SEQ ID NO: 126704 - DNA, 15 bp, Homo sapiens
tggccagatctaaag

SEQ ID NO: 126705 - DNA, 15 bp, Homo sapiens
ggccagatctaaagg

SEQ ID NO: 126706 - DNA, 15 bp, Homo sapiens
gccagatctaaagga

SEQ ID NO: 126707 - DNA, 15 bp, Homo sapiens
ccagatctaaaggat

SEQ ID NO: 126708 - DNA, 15 bp, Homo sapiens
cagatctaaaggatc

SEQ ID NO: 126709 - DNA, 15 bp, Homo sapiens
agatctaaaggatca

SEQ ID NO: 126710 - DNA, 15 bp, Homo sapiens
gatctaaaggatcaa

SEQ ID NO: 126711 - DNA, 15 bp, Homo sapiens
atctaaaggatcaac

SEQ ID NO: 126712 - DNA, 15 bp, Homo sapiens
tctaaaggatcaaca

SEQ ID NO: 126713 - DNA, 15 bp, Homo sapiens
ctaaaggatcaacat

SEQ ID NO: 126714 - DNA, 15 bp, Homo sapiens
taaaggatcaacatt

SEQ ID NO: 126715 - DNA, 15 bp, Homo sapiens
aaaggatcaacattt

SEQ ID NO: 126716 - DNA, 15 bp, Homo sapiens
aaggatcaacattta

SEQ ID NO: 126717 - DNA, 15 bp, Homo sapiens
aggatcaacatttac

SEQ ID NO: 126718 - DNA, 15 bp, Homo sapiens
ggatcaacatttacg

SEQ ID NO: 126719 - DNA, 15 bp, Homo sapiens
gatcaacatttacgt

SEQ ID NO: 126720 - DNA, 15 bp, Homo sapiens
atcaacatttacgta

SEQ ID NO: 126721 - DNA, 15 bp, Homo sapiens
tcaacatttacgtag

SEQ ID NO: 126722 - DNA, 15 bp, Homo sapiens
caacatttacgtagc

SEQ ID NO: 126723 - DNA, 15 bp, Homo sapiens
aacatttacgtagct

SEQ ID NO: 126724 - DNA, 15 bp, Homo sapiens
acatttacgtagctg

SEQ ID NO: 126725 - DNA, 15 bp, Homo sapiens
catttacgtagctgg

SEQ ID NO: 126726 - DNA, 15 bp, Homo sapiens
atttacgtagctggg

SEQ ID NO: 126727 - DNA, 15 bp, Homo sapiens
tttacgtagctggga

SEQ ID NO: 126728 - DNA, 15 bp, Homo sapiens
ttacgtagctgggaa

SEQ ID NO: 126729 - DNA, 15 bp, Homo sapiens
tacgtagctgggaaa

SEQ ID NO: 126730 - DNA, 15 bp, Homo sapiens
acgtagctgggaaat

SEQ ID NO: 126731 - DNA, 15 bp, Homo sapiens
cgtagctgggaaatg

SEQ ID NO: 126732 - DNA, 15 bp, Homo sapiens
gtagctgggaaatgt

SEQ ID NO: 126733 - DNA, 15 bp, Homo sapiens
tagctgggaaatgta

SEQ ID NO: 126734 - DNA, 15 bp, Homo sapiens
agctgggaaatgtag

SEQ ID NO: 126735 - DNA, 15 bp, Homo sapiens
gctgggaaatgtagc

SEQ ID NO: 126736 - DNA, 15 bp, Homo sapiens
ctgggaaatgtagct

SEQ ID NO: 126737 - DNA, 15 bp, Homo sapiens
tgggaaatgtagctg

SEQ ID NO: 126738 - DNA, 15 bp, Homo sapiens
gggaaatgtagctgg

SEQ ID NO: 126739 - DNA, 15 bp, Homo sapiens
ggaaatgtagctggg

SEQ ID NO: 126740 - DNA, 15 bp, Homo sapiens
gaaatgtagctggga

SEQ ID NO: 126741 - DNA, 15 bp, Homo sapiens
aaatgtagctgggac

SEQ ID NO: 126742 - DNA, 15 bp, Homo sapiens
aatgtagctgggact

SEQ ID NO: 126743 - DNA, 15 bp, Homo sapiens
atgtagctgggactt

SEQ ID NO: 126744 - DNA, 15 bp, Homo sapiens
tgtagctgggacttc

SEQ ID NO: 126745 - DNA, 15 bp, Homo sapiens
gtagctgggacttca

SEQ ID NO: 126746 - DNA, 15 bp, Homo sapiens
tagctgggacttcag

SEQ ID NO: 126747 - DNA, 15 bp, Homo sapiens
agctgggacttcagt

SEQ ID NO: 126748 - DNA, 15 bp, Homo sapiens
gctgggacttcagtt

SEQ ID NO: 126749 - DNA, 15 bp, Homo sapiens
ctgggacttcagttt

SEQ ID NO: 126750 - DNA, 15 bp, Homo sapiens
tgggacttcagtttc

SEQ ID NO: 126751 - DNA, 15 bp, Homo sapiens
gggacttcagtttca

SEQ ID NO: 126752 - DNA, 15 bp, Homo sapiens
ggacttcagtttcac

SEQ ID NO: 126753 - DNA, 15 bp, Homo sapiens
gacttcagtttcact

SEQ ID NO: 126754 - DNA, 15 bp, Homo sapiens
acttcagtttcactg

SEQ ID NO: 126755 - DNA, 15 bp, Homo sapiens
cttcagtttcactgc

SEQ ID NO: 126756 - DNA, 15 bp, Homo sapiens
ttcagtttcactgcc

SEQ ID NO: 126757 - DNA, 15 bp, Homo sapiens
tcagtttcactgccc

SEQ ID NO: 126758 - DNA, 15 bp, Homo sapiens
cagtttcactgccct

SEQ ID NO: 126759 - DNA, 15 bp, Homo sapiens
agtttcactgcccta

SEQ ID NO: 126760 - DNA, 15 bp, Homo sapiens
gtttcactgccctag

SEQ ID NO: 126761 - DNA, 15 bp, Homo sapiens
tttcactgccctagt

SEQ ID NO: 126762 - DNA, 15 bp, Homo sapiens
ttcactgccctagtg

SEQ ID NO: 126763 - DNA, 15 bp, Homo sapiens
tcactgccctagtga

SEQ ID NO: 126764 - DNA, 15 bp, Homo sapiens
cactgccctagtgat

SEQ ID NO: 126765 - DNA, 15 bp, Homo sapiens
actgccctagtgatt

SEQ ID NO: 126766 - DNA, 15 bp, Homo sapiens
ctgccctagtgattt

SEQ ID NO: 126767 - DNA, 15 bp, Homo sapiens
tgccctagtgatttt

SEQ ID NO: 126768 - DNA, 15 bp, Homo sapiens
gccctagtgattttt

SEQ ID NO: 126769 - DNA, 15 bp, Homo sapiens
ccctagtgatttttc

SEQ ID NO: 126770 - DNA, 15 bp, Homo sapiens
cctagtgatttttcc

SEQ ID NO: 126771 - DNA, 15 bp, Homo sapiens
ctagtgatttttcct

SEQ ID NO: 126772 - DNA, 15 bp, Homo sapiens
tagtgatttttccta

SEQ ID NO: 126773 - DNA, 15 bp, Homo sapiens
agtgatttttcctac

SEQ ID NO: 126774 - DNA, 15 bp, Homo sapiens
gtgatttttcctacc

SEQ ID NO: 126775 - DNA, 15 bp, Homo sapiens
tgatttttcctacca

SEQ ID NO: 126776 - DNA, 15 bp, Homo sapiens
gatttttcctaccac

SEQ ID NO: 126777 - DNA, 15 bp, Homo sapiens
atttttcctaccact

SEQ ID NO: 126778 - DNA, 15 bp, Homo sapiens
tttttcctaccacta

SEQ ID NO: 126779 - DNA, 15 bp, Homo sapiens
ttttcctaccactaa

SEQ ID NO: 126780 - DNA, 15 bp, Homo sapiens
tttcctaccactaag

SEQ ID NO: 126781 - DNA, 15 bp, Homo sapiens
ttcctaccactaagc

SEQ ID NO: 126782 - DNA, 15 bp, Homo sapiens
tcctaccactaagca

SEQ ID NO: 126783 - DNA, 15 bp, Homo sapiens
cctaccactaagcag

SEQ ID NO: 126784 - DNA, 15 bp, Homo sapiens
ctaccactaagcagc

SEQ ID NO: 126785 - DNA, 15 bp, Homo sapiens
taccactaagcagct

SEQ ID NO: 126786 - DNA, 15 bp, Homo sapiens
accactaagcagctc

SEQ ID NO: 126787 - DNA, 15 bp, Homo sapiens
ccactaagcagctca

SEQ ID NO: 126788 - DNA, 15 bp, Homo sapiens
cactaagcagctcag

SEQ ID NO: 126789 - DNA, 15 bp, Homo sapiens
actaagcagctcagt

SEQ ID NO: 126790 - DNA, 15 bp, Homo sapiens
ctaagcagctcagtc

SEQ ID NO: 126791 - DNA, 15 bp, Homo sapiens
taagcagctcagtcc

SEQ ID NO: 126792 - DNA, 15 bp, Homo sapiens
aagcagctcagtcca

SEQ ID NO: 126793 - DNA, 15 bp, Homo sapiens
agcagctcagtccat

SEQ ID NO: 126794 - DNA, 15 bp, Homo sapiens
gcagctcagtccata

SEQ ID NO: 126795 - DNA, 15 bp, Homo sapiens
cagctcagtccatac

SEQ ID NO: 126796 - DNA, 15 bp, Homo sapiens
agctcagtccatacc

SEQ ID NO: 126797 - DNA, 15 bp, Homo sapiens
gctcagtccataccc

SEQ ID NO: 126798 - DNA, 15 bp, Homo sapiens
ctcagtccatacccc

SEQ ID NO: 126799 - DNA, 15 bp, Homo sapiens
tcagtccatacccct

SEQ ID NO: 126800 - DNA, 15 bp, Homo sapiens
cagtccataccccta

SEQ ID NO: 126801 - DNA, 15 bp, Homo sapiens
agtccatacccctac

SEQ ID NO: 126802 - DNA, 15 bp, Homo sapiens
gtccatacccctacg

SEQ ID NO: 126803 - DNA, 15 bp, Homo sapiens
tccatacccctacga

SEQ ID NO: 126804 - DNA, 15 bp, Homo sapiens
ccatacccctacgag

SEQ ID NO: 126805 - DNA, 15 bp, Homo sapiens
catacccctacgaga

SEQ ID NO: 126806 - DNA, 15 bp, Homo sapiens
atacccctacgagac

SEQ ID NO: 126807 - DNA, 15 bp, Homo sapiens
tacccctacgagacc

SEQ ID NO: 126808 - DNA, 15 bp, Homo sapiens
acccctacgagaccc

SEQ ID NO: 126809 - DNA, 15 bp, Homo sapiens
cccctacgagaccca

SEQ ID NO: 126810 - DNA, 15 bp, Homo sapiens
ccctacgagacccac

SEQ ID NO: 126811 - DNA, 15 bp, Homo sapiens
cctacgagacccaca

SEQ ID NO: 126812 - DNA, 15 bp, Homo sapiens
ctacgagacccacaa

SEQ ID NO: 126813 - DNA, 15 bp, Homo sapiens
tacgagacccacaag

SEQ ID NO: 126814 - DNA, 15 bp, Homo sapiens
acgagacccacaagc

SEQ ID NO: 126815 - DNA, 15 bp, Homo sapiens
cgagacccacaagct

SEQ ID NO: 126816 - DNA, 15 bp, Homo sapiens
gagacccacaagctt

SEQ ID NO: 126817 - DNA, 15 bp, Homo sapiens
agacccacaagctta

SEQ ID NO: 126818 - DNA, 15 bp, Homo sapiens
gacccacaagcttat

SEQ ID NO: 126819 - DNA, 15 bp, Homo sapiens
acccacaagcttatg

SEQ ID NO: 126820 - DNA, 15 bp, Homo sapiens
cccacaagcttatga

SEQ ID NO: 126821 - DNA, 15 bp, Homo sapiens
ccacaagcttatgag

SEQ ID NO: 126822 - DNA, 15 bp, Homo sapiens
cacaagcttatgaga

SEQ ID NO: 126823 - DNA, 15 bp, Homo sapiens
acaagcttatgagat

SEQ ID NO: 126824 - DNA, 15 bp, Homo sapiens
caagcttatgagata

SEQ ID NO: 126825 - DNA, 15 bp, Homo sapiens
aagcttatgagatac

SEQ ID NO: 126826 - DNA, 15 bp, Homo sapiens
agcttatgagatact

SEQ ID NO: 126827 - DNA, 15 bp, Homo sapiens
gcttatgagatactg

SEQ ID NO: 126828 - DNA, 15 bp, Homo sapiens
cttatgagatactgt

SEQ ID NO: 126829 - DNA, 15 bp, Homo sapiens
ttatgagatactgtt

SEQ ID NO: 126830 - DNA, 15 bp, Homo sapiens
tatgagatactgttc

SEQ ID NO: 126831 - DNA, 15 bp, Homo sapiens
atgagatactgttct

SEQ ID NO: 126832 - DNA, 15 bp, Homo sapiens
gagatactgttcttc

SEQ ID NO: 126833 - DNA, 15 bp, Homo sapiens
agatactgttcttcc

SEQ ID NO: 126834 - DNA, 15 bp, Homo sapiens
gatactgttcttcca

SEQ ID NO: 126835 - DNA, 15 bp, Homo sapiens
atactgttcttccag

SEQ ID NO: 126836 - DNA, 15 bp, Homo sapiens
tactgttcttccagg

SEQ ID NO: 126837 - DNA, 15 bp, Homo sapiens
actgttcttccagga

SEQ ID NO: 126838 - DNA, 15 bp, Homo sapiens
ctgttcttccaggaa

SEQ ID NO: 126839 - DNA, 15 bp, Homo sapiens
tgttcttccaggaaa

SEQ ID NO: 126840 - DNA, 15 bp, Homo sapiens
gttcttccaggaaag

SEQ ID NO: 126841 - DNA, 15 bp, Homo sapiens
ttcttccaggaaagc

SEQ ID NO: 126842 - DNA, 15 bp, Homo sapiens
tcttccaggaaagca

SEQ ID NO: 126843 - DNA, 15 bp, Homo sapiens
cttccaggaaagcag

SEQ ID NO: 126844 - DNA, 15 bp, Homo sapiens
ttccaggaaagcagt

SEQ ID NO: 126845 - DNA, 15 bp, Homo sapiens
tccaggaaagcagtg

SEQ ID NO: 126846 - DNA, 15 bp, Homo sapiens
ccaggaaagcagtgg

SEQ ID NO: 126847 - DNA, 15 bp, Homo sapiens
caggaaagcagtggg

SEQ ID NO: 126848 - DNA, 15 bp, Homo sapiens
aggaaagcagtgggg

SEQ ID NO: 126849 - DNA, 15 bp, Homo sapiens
ggaaagcagtggggc

SEQ ID NO: 126850 - DNA, 15 bp, Homo sapiens
gaaagcagtggggcc

SEQ ID NO: 126851 - DNA, 15 bp, Homo sapiens
aaagcagtggggcca

SEQ ID NO: 126852 - DNA, 15 bp, Homo sapiens
aagcagtggggccag

SEQ ID NO: 126853 - DNA, 15 bp, Homo sapiens
agcagtggggccagg

SEQ ID NO: 126854 - DNA, 15 bp, Homo sapiens
gcagtggggccaggg

SEQ ID NO: 126855 - DNA, 15 bp, Homo sapiens
cagtggggccagggc

SEQ ID NO: 126856 - DNA, 15 bp, Homo sapiens
agtggggccagggcc

SEQ ID NO: 126857 - DNA, 15 bp, Homo sapiens
gtggggccagggcca

SEQ ID NO: 126858 - DNA, 15 bp, Homo sapiens
tggggccagggccac

SEQ ID NO: 126859 - DNA, 15 bp, Homo sapiens
ggggccagggccacc

SEQ ID NO: 126860 - DNA, 15 bp, Homo sapiens
gggccagggccacct

SEQ ID NO: 126861 - DNA, 15 bp, Homo sapiens
ggccagggccacctt

SEQ ID NO: 126862 - DNA, 15 bp, Homo sapiens
gccagggccaccttt

SEQ ID NO: 126863 - DNA, 15 bp, Homo sapiens
ccagggccacctttt

SEQ ID NO: 126864 - DNA, 15 bp, Homo sapiens
cagggccacctttta

SEQ ID NO: 126865 - DNA, 15 bp, Homo sapiens
agggccaccttttaa

SEQ ID NO: 126866 - DNA, 15 bp, Homo sapiens
gggccaccttttaat

SEQ ID NO: 126867 - DNA, 15 bp, Homo sapiens
ggccaccttttaatt

SEQ ID NO: 126868 - DNA, 15 bp, Homo sapiens
gccaccttttaattg

SEQ ID NO: 126869 - DNA, 15 bp, Homo sapiens
ccaccttttaattgt

SEQ ID NO: 126870 - DNA, 15 bp, Homo sapiens
caccttttaattgtg

SEQ ID NO: 126871 - DNA, 15 bp, Homo sapiens
accttttaattgtgt

SEQ ID NO: 126872 - DNA, 15 bp, Homo sapiens
ccttttaattgtgtt

SEQ ID NO: 126873 - DNA, 15 bp, Homo sapiens
cttttaattgtgttt

SEQ ID NO: 126874 - DNA, 15 bp, Homo sapiens
ttttaattgtgtttc

SEQ ID NO: 126875 - DNA, 15 bp, Homo sapiens
tttaattgtgtttct

SEQ ID NO: 126876 - DNA, 15 bp, Homo sapiens
ttaattgtgtttctt

SEQ ID NO: 126877 - DNA, 15 bp, Homo sapiens
taattgtgtttcttg

SEQ ID NO: 126878 - DNA, 15 bp, Homo sapiens
aattgtgtttcttgg

SEQ ID NO: 126879 - DNA, 15 bp, Homo sapiens
attgtgtttcttggc

SEQ ID NO: 126880 - DNA, 15 bp, Homo sapiens
ttgtgtttcttggcc

SEQ ID NO: 126881 - DNA, 15 bp, Homo sapiens
tgtgtttcttggcct

SEQ ID NO: 126882 - DNA, 15 bp, Homo sapiens
gtgtttcttggcctg

SEQ ID NO: 126883 - DNA, 15 bp, Homo sapiens
tgtttcttggcctgg

SEQ ID NO: 126884 - DNA, 15 bp, Homo sapiens
gtttcttggcctggt

SEQ ID NO: 126885 - DNA, 15 bp, Homo sapiens
tttcttggcctggtc

SEQ ID NO: 126886 - DNA, 15 bp, Homo sapiens
ttcttggcctggtcc

SEQ ID NO: 126887 - DNA, 15 bp, Homo sapiens
tcttggcctggtccc

SEQ ID NO: 126888 - DNA, 15 bp, Homo sapiens
cttggcctggtccca

SEQ ID NO: 126889 - DNA, 15 bp, Homo sapiens
ttggcctggtcccat

SEQ ID NO: 126890 - DNA, 15 bp, Homo sapiens
tggcctggtcccatc

SEQ ID NO: 126891 - DNA, 15 bp, Homo sapiens
ggcctggtcccatct

SEQ ID NO: 126892 - DNA, 15 bp, Homo sapiens
gcctggtcccatctt

SEQ ID NO: 126893 - DNA, 15 bp, Homo sapiens
cctggtcccatcttt

SEQ ID NO: 126894 - DNA, 15 bp, Homo sapiens
ctggtcccatctttc

SEQ ID NO: 126895 - DNA, 15 bp, Homo sapiens
tggtcccatctttct

SEQ ID NO: 126896 - DNA, 15 bp, Homo sapiens
ggtcccatctttctc

SEQ ID NO: 126897 - DNA, 15 bp, Homo sapiens
gtcccatctttctca

SEQ ID NO: 126898 - DNA, 15 bp, Homo sapiens
tcccatctttctcac

SEQ ID NO: 126899 - DNA, 15 bp, Homo sapiens
cccatctttctcaca

SEQ ID NO: 126900 - DNA, 15 bp, Homo sapiens
ccatctttctcacaa

SEQ ID NO: 126901 - DNA, 15 bp, Homo sapiens
catctttctcacaat

SEQ ID NO: 126902 - DNA, 15 bp, Homo sapiens
atctttctcacaata

SEQ ID NO: 126903 - DNA, 15 bp, Homo sapiens
tctttctcacaatat

SEQ ID NO: 126904 - DNA, 15 bp, Homo sapiens
ctttctcacaatata

SEQ ID NO: 126905 - DNA, 15 bp, Homo sapiens
tttctcacaatatat

SEQ ID NO: 126906 - DNA, 15 bp, Homo sapiens
ttctcacaatatata

SEQ ID NO: 126907 - DNA, 15 bp, Homo sapiens
tctcacaatatatag

SEQ ID NO: 126908 - DNA, 15 bp, Homo sapiens
ctcacaatatatagc

SEQ ID NO: 126909 - DNA, 15 bp, Homo sapiens
tcacaatatatagca

SEQ ID NO: 126910 - DNA, 15 bp, Homo sapiens
cacaatatatagcaa

SEQ ID NO: 126911 - DNA, 15 bp, Homo sapiens
acaatatatagcaac

SEQ ID NO: 126912 - DNA, 15 bp, Homo sapiens
caatatatagcaaca

SEQ ID NO: 126913 - DNA, 15 bp, Homo sapiens
aatatatagcaacag

SEQ ID NO: 126914 - DNA, 15 bp, Homo sapiens
atatatagcaacagt

SEQ ID NO: 126915 - DNA, 15 bp, Homo sapiens
tatatagcaacagtt

SEQ ID NO: 126916 - DNA, 15 bp, Homo sapiens
atatagcaacagtta

SEQ ID NO: 126917 - DNA, 15 bp, Homo sapiens
tatagcaacagttat

SEQ ID NO: 126918 - DNA, 15 bp, Homo sapiens
atagcaacagttatt

SEQ ID NO: 126919 - DNA, 15 bp, Homo sapiens
tagcaacagttattt

SEQ ID NO: 126920 - DNA, 15 bp, Homo sapiens
agcaacagttattta

SEQ ID NO: 126921 - DNA, 15 bp, Homo sapiens
gcaacagttatttac

SEQ ID NO: 126922 - DNA, 15 bp, Homo sapiens
caacagttatttact

SEQ ID NO: 126923 - DNA, 15 bp, Homo sapiens
aacagttatttactt

SEQ ID NO: 126924 - DNA, 15 bp, Homo sapiens
acagttatttacttg

SEQ ID NO: 126925 - DNA, 15 bp, Homo sapiens
cagttatttacttgc

SEQ ID NO: 126926 - DNA, 15 bp, Homo sapiens
agttatttacttgct

SEQ ID NO: 126927 - DNA, 15 bp, Homo sapiens
gttatttacttgctg

SEQ ID NO: 126928 - DNA, 15 bp, Homo sapiens
ttatttacttgctga

SEQ ID NO: 126929 - DNA, 15 bp, Homo sapiens
tatttacttgctgat

SEQ ID NO: 126930 - DNA, 15 bp, Homo sapiens
atttacttgctgatt

SEQ ID NO: 126931 - DNA, 15 bp, Homo sapiens
tttacttgctgattt

SEQ ID NO: 126932 - DNA, 15 bp, Homo sapiens
ttacttgctgatttt

SEQ ID NO: 126933 - DNA, 15 bp, Homo sapiens
tacttgctgattttc

SEQ ID NO: 126934 - DNA, 15 bp, Homo sapiens
acttgctgattttct

SEQ ID NO: 126935 - DNA, 15 bp, Homo sapiens
cttgctgattttcta

SEQ ID NO: 126936 - DNA, 15 bp, Homo sapiens
ttgctgattttctaa

SEQ ID NO: 126937 - DNA, 15 bp, Homo sapiens
tgctgattttctaat

SEQ ID NO: 126938 - DNA, 15 bp, Homo sapiens
gctgattttctaatg

SEQ ID NO: 126939 - DNA, 15 bp, Homo sapiens
ctgattttctaatgc

SEQ ID NO: 126940 - DNA, 15 bp, Homo sapiens
tgattttctaatgca

SEQ ID NO: 126941 - DNA, 15 bp, Homo sapiens
gattttctaatgcac

SEQ ID NO: 126942 - DNA, 15 bp, Homo sapiens
attttctaatgcaca

SEQ ID NO: 126943 - DNA, 15 bp, Homo sapiens
ttttctaatgcacat

SEQ ID NO: 126944 - DNA, 15 bp, Homo sapiens
tttctaatgcacatc

SEQ ID NO: 126945 - DNA, 15 bp, Homo sapiens
ttctaatgcacatca

SEQ ID NO: 126946 - DNA, 15 bp, Homo sapiens
tctaatgcacatcac

SEQ ID NO: 126947 - DNA, 15 bp, Homo sapiens
ctaatgcacatcaca

SEQ ID NO: 126948 - DNA, 15 bp, Homo sapiens
taatgcacatcacac

SEQ ID NO: 126949 - DNA, 15 bp, Homo sapiens
aatgcacatcacaca

SEQ ID NO: 126950 - DNA, 15 bp, Homo sapiens
atgcacatcacacat

SEQ ID NO: 126951 - DNA, 15 bp, Homo sapiens
tgcacatcacacata

SEQ ID NO: 126952 - DNA, 15 bp, Homo sapiens
gcacatcacacatag

SEQ ID NO: 126953 - DNA, 15 bp, Homo sapiens
cacatcacacatagt

SEQ ID NO: 126954 - DNA, 15 bp, Homo sapiens
acatcacacatagtc

SEQ ID NO: 126955 - DNA, 15 bp, Homo sapiens
catcacacatagtca

SEQ ID NO: 126956 - DNA, 15 bp, Homo sapiens
atcacacatagtcat

SEQ ID NO: 126957 - DNA, 15 bp, Homo sapiens
tcacacatagtcata

SEQ ID NO: 126958 - DNA, 15 bp, Homo sapiens
cacacatagtcatat

SEQ ID NO: 126959 - DNA, 15 bp, Homo sapiens
acacatagtcatatt

SEQ ID NO: 126960 - DNA, 15 bp, Homo sapiens
cacatagtcatatta

SEQ ID NO: 126961 - DNA, 15 bp, Homo sapiens
acatagtcatattaa

SEQ ID NO: 126962 - DNA, 15 bp, Homo sapiens
catagtcatattaaa

SEQ ID NO: 126963 - DNA, 15 bp, Homo sapiens
atagtcatattaaac

SEQ ID NO: 126964 - DNA, 15 bp, Homo sapiens
tagtcatattaaaca

SEQ ID NO: 126965 - DNA, 15 bp, Homo sapiens
agtcatattaaacac

SEQ ID NO: 126966 - DNA, 15 bp, Homo sapiens
gtcatattaaacaca

SEQ ID NO: 126967 - DNA, 15 bp, Homo sapiens
tcatattaaacacac

SEQ ID NO: 126968 - DNA, 15 bp, Homo sapiens
catattaaacacaca

SEQ ID NO: 126969 - DNA, 15 bp, Homo sapiens
atattaaacacacac

SEQ ID NO: 126970 - DNA, 15 bp, Homo sapiens
tattaaacacacaca

SEQ ID NO: 126971 - DNA, 15 bp, Homo sapiens
attaaacacacacac

SEQ ID NO: 126972 - DNA, 15 bp, Homo sapiens
ttaaacacacacaca

SEQ ID NO: 126973 - DNA, 15 bp, Homo sapiens
taaacacacacacac

SEQ ID NO: 126974 - DNA, 15 bp, Homo sapiens
aaacacacacacaca

SEQ ID NO: 126975 - DNA, 15 bp, Homo sapiens
aacacacacacacac

SEQ ID NO: 126976 - DNA, 15 bp, Homo sapiens
acacacacacacaca

SEQ ID NO: 126977 - DNA, 15 bp, Homo sapiens
cacacacacacacac

SEQ ID NO: 126978 - DNA, 15 bp, Homo sapiens
acacacacacacacc

SEQ ID NO: 126979 - DNA, 15 bp, Homo sapiens
cacacacacacaccc

SEQ ID NO: 126980 - DNA, 15 bp, Homo sapiens
acacacacacacccc

SEQ ID NO: 126981 - DNA, 15 bp, Homo sapiens
cacacacacacccct

SEQ ID NO: 126982 - DNA, 15 bp, Homo sapiens
acacacacacccctc

SEQ ID NO: 126983 - DNA, 15 bp, Homo sapiens
cacacacacccctca

SEQ ID NO: 126984 - DNA, 15 bp, Homo sapiens
acacacacccctcaa

SEQ ID NO: 126985 - DNA, 15 bp, Homo sapiens
cacacacccctcaag

SEQ ID NO: 126986 - DNA, 15 bp, Homo sapiens
acacacccctcaaga

SEQ ID NO: 126987 - DNA, 15 bp, Homo sapiens
cacacccctcaagaa

SEQ ID NO: 126988 - DNA, 15 bp, Homo sapiens
acacccctcaagaaa

SEQ ID NO: 126989 - DNA, 15 bp, Homo sapiens
cacccctcaagaaac

SEQ ID NO: 126990 - DNA, 15 bp, Homo sapiens
acccctcaagaaaca

SEQ ID NO: 126991 - DNA, 15 bp, Homo sapiens
cccctcaagaaacat

SEQ ID NO: 126992 - DNA, 15 bp, Homo sapiens
ccctcaagaaacatt

SEQ ID NO: 126993 - DNA, 15 bp, Homo sapiens
cctcaagaaacattt

SEQ ID NO: 126994 - DNA, 15 bp, Homo sapiens
ctcaagaaacatttt

SEQ ID NO: 126995 - DNA, 15 bp, Homo sapiens
tcaagaaacattttc

SEQ ID NO: 126996 - DNA, 15 bp, Homo sapiens
caagaaacattttct

SEQ ID NO: 126997 - DNA, 15 bp, Homo sapiens
aagaaacattttctg

SEQ ID NO: 126998 - DNA, 15 bp, Homo sapiens
agaaacattttctga

SEQ ID NO: 126999 - DNA, 15 bp, Homo sapiens
gaaacattttctgag

SEQ ID NO: 127000 - DNA, 15 bp, Homo sapiens
aaacattttctgaga

SEQ ID NO: 127001 - DNA, 15 bp, Homo sapiens
aacattttctgagac

SEQ ID NO: 127002 - DNA, 15 bp, Homo sapiens
acattttctgagacg

SEQ ID NO: 127003 - DNA, 15 bp, Homo sapiens
cattttctgagacgt

SEQ ID NO: 127004 - DNA, 15 bp, Homo sapiens
attttctgagacgtg

SEQ ID NO: 127005 - DNA, 15 bp, Homo sapiens
ttttctgagacgtga

SEQ ID NO: 127006 - DNA, 15 bp, Homo sapiens
tttctgagacgtgat

SEQ ID NO: 127007 - DNA, 15 bp, Homo sapiens
ttctgagacgtgatt

SEQ ID NO: 127008 - DNA, 15 bp, Homo sapiens
tctgagacgtgattt

SEQ ID NO: 127009 - DNA, 15 bp, Homo sapiens
ctgagacgtgatttc

SEQ ID NO: 127010 - DNA, 15 bp, Homo sapiens
tgagacgtgatttcc

SEQ ID NO: 127011 - DNA, 15 bp, Homo sapiens
gagacgtgatttcct

SEQ ID NO: 127012 - DNA, 15 bp, Homo sapiens
agacgtgatttcctg

SEQ ID NO: 127013 - DNA, 15 bp, Homo sapiens
gacgtgatttcctga

SEQ ID NO: 127014 - DNA, 15 bp, Homo sapiens
acgtgatttcctgat

SEQ ID NO: 127015 - DNA, 15 bp, Homo sapiens
cgtgatttcctgatt

SEQ ID NO: 127016 - DNA, 15 bp, Homo sapiens
gtgatttcctgattt

SEQ ID NO: 127017 - DNA, 15 bp, Homo sapiens
tgatttcctgatttc

SEQ ID NO: 127018 - DNA, 15 bp, Homo sapiens
gatttcctgatttca

SEQ ID NO: 127019 - DNA, 15 bp, Homo sapiens
atttcctgatttcat

SEQ ID NO: 127020 - DNA, 15 bp, Homo sapiens
tttcctgatttcatc

SEQ ID NO: 127021 - DNA, 15 bp, Homo sapiens
ttcctgatttcatca

SEQ ID NO: 127022 - DNA, 15 bp, Homo sapiens
tcctgatttcatcaa

SEQ ID NO: 127023 - DNA, 15 bp, Homo sapiens
cctgatttcatcaaa

SEQ ID NO: 127024 - DNA, 15 bp, Homo sapiens
ctgatttcatcaaaa

SEQ ID NO: 127025 - DNA, 15 bp, Homo sapiens
tgatttcatcaaaaa

SEQ ID NO: 127026 - DNA, 15 bp, Homo sapiens
gatttcatcaaaaaa

SEQ ID NO: 127027 - DNA, 15 bp, Homo sapiens
atttcatcaaaaaag

SEQ ID NO: 127028 - DNA, 15 bp, Homo sapiens
tttcatcaaaaaaga

SEQ ID NO: 127029 - DNA, 15 bp, Homo sapiens
ttcatcaaaaaagaa

SEQ ID NO: 127030 - DNA, 15 bp, Homo sapiens
tcatcaaaaaagaaa

SEQ ID NO: 127031 - DNA, 15 bp, Homo sapiens
catcaaaaaagaaaa

SEQ ID NO: 127032 - DNA, 15 bp, Homo sapiens
atcaaaaaagaaaag

SEQ ID NO: 127033 - DNA, 15 bp, Homo sapiens
tcaaaaaagaaaaga

SEQ ID NO: 127034 - DNA, 15 bp, Homo sapiens
caaaaaagaaaagag

SEQ ID NO: 127035 - DNA, 15 bp, Homo sapiens
aaaaaagaaaagagc

SEQ ID NO: 127036 - DNA, 15 bp, Homo sapiens
aaaaagaaaagagcg

SEQ ID NO: 127037 - DNA, 15 bp, Homo sapiens
aaaagaaaagagcgg

SEQ ID NO: 127038 - DNA, 15 bp, Homo sapiens
aaagaaaagagcggg

SEQ ID NO: 127039 - DNA, 15 bp, Homo sapiens
aagaaaagagcgggc

SEQ ID NO: 127040 - DNA, 15 bp, Homo sapiens
agaaaagagcgggcc

SEQ ID NO: 127041 - DNA, 15 bp, Homo sapiens
gaaaagagcgggcca

SEQ ID NO: 127042 - DNA, 15 bp, Homo sapiens
aaaagagcgggccag

SEQ ID NO: 127043 - DNA, 15 bp, Homo sapiens
aaagagcgggccagg

SEQ ID NO: 127044 - DNA, 15 bp, Homo sapiens
aagagcgggccaggc

SEQ ID NO: 127045 - DNA, 15 bp, Homo sapiens
agagcgggccaggca

SEQ ID NO: 127046 - DNA, 15 bp, Homo sapiens
gagcgggccaggcac

SEQ ID NO: 127047 - DNA, 15 bp, Homo sapiens
agcgggccaggcaca

SEQ ID NO: 127048 - DNA, 15 bp, Homo sapiens
gcgggccaggcacag

SEQ ID NO: 127049 - DNA, 15 bp, Homo sapiens
cgggccaggcacagt

SEQ ID NO: 127050 - DNA, 15 bp, Homo sapiens
gggccaggcacagtg

SEQ ID NO: 127051 - DNA, 15 bp, Homo sapiens
ggccaggcacagtgg

SEQ ID NO: 127052 - DNA, 15 bp, Homo sapiens
gccaggcacagtggg

SEQ ID NO: 127053 - DNA, 15 bp, Homo sapiens
ccaggcacagtggga

SEQ ID NO: 127054 - DNA, 15 bp, Homo sapiens
caggcacagtgggaa

SEQ ID NO: 127055 - DNA, 15 bp, Homo sapiens
aggcacagtgggaag

SEQ ID NO: 127056 - DNA, 15 bp, Homo sapiens
ggcacagtgggaagt

SEQ ID NO: 127057 - DNA, 15 bp, Homo sapiens
gcacagtgggaagtc

SEQ ID NO: 127058 - DNA, 15 bp, Homo sapiens
cacagtgggaagtca

SEQ ID NO: 127059 - DNA, 15 bp, Homo sapiens
acagtgggaagtcaa

SEQ ID NO: 127060 - DNA, 15 bp, Homo sapiens
cagtgggaagtcaag

SEQ ID NO: 127061 - DNA, 15 bp, Homo sapiens
agtgggaagtcaagg

SEQ ID NO: 127062 - DNA, 15 bp, Homo sapiens
gtgggaagtcaaggt

SEQ ID NO: 127063 - DNA, 15 bp, Homo sapiens
tgggaagtcaaggtg

SEQ ID NO: 127064 - DNA, 15 bp, Homo sapiens
gggaagtcaaggtgg

SEQ ID NO: 127065 - DNA, 15 bp, Homo sapiens
ggaagtcaaggtggg

SEQ ID NO: 127066 - DNA, 15 bp, Homo sapiens
gaagtcaaggtgggt

SEQ ID NO: 127067 - DNA, 15 bp, Homo sapiens
aagtcaaggtgggtg

SEQ ID NO: 127068 - DNA, 15 bp, Homo sapiens
agtcaaggtgggtgg

SEQ ID NO: 127069 - DNA, 15 bp, Homo sapiens
gtcaaggtgggtgga

SEQ ID NO: 127070 - DNA, 15 bp, Homo sapiens
tcaaggtgggtggat

SEQ ID NO: 127071 - DNA, 15 bp, Homo sapiens
caaggtgggtggatc

SEQ ID NO: 127072 - DNA, 15 bp, Homo sapiens
aaggtgggtggatca

SEQ ID NO: 127073 - DNA, 15 bp, Homo sapiens
aggtgggtggatcac

SEQ ID NO: 127074 - DNA, 15 bp, Homo sapiens
ggtcaggagtttgaa

SEQ ID NO: 127075 - DNA, 15 bp, Homo sapiens
gtcaggagtttgaaa

SEQ ID NO: 127076 - DNA, 15 bp, Homo sapiens
tcaggagtttgaaac

SEQ ID NO: 127077 - DNA, 15 bp, Homo sapiens
caggagtttgaaacc

SEQ ID NO: 127078 - DNA, 15 bp, Homo sapiens
aggagtttgaaacca

SEQ ID NO: 127079 - DNA, 15 bp, Homo sapiens
ggagtttgaaaccag

SEQ ID NO: 127080 - DNA, 15 bp, Homo sapiens
cagcctggccaacac

SEQ ID NO: 127081 - DNA, 15 bp, Homo sapiens
agcctggccaacacg

SEQ ID NO: 127082 - DNA, 15 bp, Homo sapiens
gcctggccaacacgg

SEQ ID NO: 127083 - DNA, 15 bp, Homo sapiens
cctggccaacacggt

SEQ ID NO: 127084 - DNA, 15 bp, Homo sapiens
ctggccaacacggtg

SEQ ID NO: 127085 - DNA, 15 bp, Homo sapiens
tggccaacacggtgg

SEQ ID NO: 127086 - DNA, 15 bp, Homo sapiens
ggccaacacggtgga

SEQ ID NO: 127087 - DNA, 15 bp, Homo sapiens
gccaacacggtggaa

SEQ ID NO: 127088 - DNA, 15 bp, Homo sapiens
ccaacacggtggaac

SEQ ID NO: 127089 - DNA, 15 bp, Homo sapiens
caacacggtggaacc

SEQ ID NO: 127090 - DNA, 15 bp, Homo sapiens
aacacggtggaacct

SEQ ID NO: 127091 - DNA, 15 bp, Homo sapiens
acacggtggaacctc

SEQ ID NO: 127092 - DNA, 15 bp, Homo sapiens
cacggtggaacctcg

SEQ ID NO: 127093 - DNA, 15 bp, Homo sapiens
acggtggaacctcgt

SEQ ID NO: 127094 - DNA, 15 bp, Homo sapiens
cggtggaacctcgtc

SEQ ID NO: 127095 - DNA, 15 bp, Homo sapiens
ggtggaacctcgtct

SEQ ID NO: 127096 - DNA, 15 bp, Homo sapiens
gtggaacctcgtctc

SEQ ID NO: 127097 - DNA, 15 bp, Homo sapiens
tggaacctcgtctct

SEQ ID NO: 127098 - DNA, 15 bp, Homo sapiens
ggaacctcgtctcta

SEQ ID NO: 127099 - DNA, 15 bp, Homo sapiens
gaacctcgtctctac

SEQ ID NO: 127100 - DNA, 15 bp, Homo sapiens
agccaggcgtggtgg

SEQ ID NO: 127101 - DNA, 15 bp, Homo sapiens
ccaggcgtggtggcg

SEQ ID NO: 127102 - DNA, 15 bp, Homo sapiens
caggcgtggtggcgc

SEQ ID NO: 127103 - DNA, 15 bp, Homo sapiens
aggcgtggtggcgca

SEQ ID NO: 127104 - DNA, 15 bp, Homo sapiens
ggcgtggtggcgcac

SEQ ID NO: 127105 - DNA, 15 bp, Homo sapiens
gcgtggtggcgcaca

SEQ ID NO: 127106 - DNA, 15 bp, Homo sapiens
cgtggtggcgcacac

SEQ ID NO: 127107 - DNA, 15 bp, Homo sapiens
gtggtggcgcacacc

SEQ ID NO: 127108 - DNA, 15 bp, Homo sapiens
tggtggcgcacacct

SEQ ID NO: 127109 - DNA, 15 bp, Homo sapiens
ggtggcgcacacctg

SEQ ID NO: 127110 - DNA, 15 bp, Homo sapiens
gtggcgcacacctgt

SEQ ID NO: 127111 - DNA, 15 bp, Homo sapiens
tggcgcacacctgta

SEQ ID NO: 127112 - DNA, 15 bp, Homo sapiens
ggcgcacacctgtaa

SEQ ID NO: 127113 - DNA, 15 bp, Homo sapiens
gcgcacacctgtaat

SEQ ID NO: 127114 - DNA, 15 bp, Homo sapiens
cgcacacctgtaatc

SEQ ID NO: 127115 - DNA, 15 bp, Homo sapiens
gcacacctgtaatcc

SEQ ID NO: 127116 - DNA, 15 bp, Homo sapiens
caggagaattgcttc

SEQ ID NO: 127117 - DNA, 15 bp, Homo sapiens
aggagaattgcttca

SEQ ID NO: 127118 - DNA, 15 bp, Homo sapiens
ggagaattgcttcaa

SEQ ID NO: 127119 - DNA, 15 bp, Homo sapiens
gagaattgcttcaac

SEQ ID NO: 127120 - DNA, 15 bp, Homo sapiens
agaattgcttcaacc

SEQ ID NO: 127121 - DNA, 15 bp, Homo sapiens
gaattgcttcaacct

SEQ ID NO: 127122 - DNA, 15 bp, Homo sapiens
aattgcttcaacctg

SEQ ID NO: 127123 - DNA, 15 bp, Homo sapiens
attgcttcaacctgc

SEQ ID NO: 127124 - DNA, 15 bp, Homo sapiens
ttgcttcaacctgcg

SEQ ID NO: 127125 - DNA, 15 bp, Homo sapiens
tgcttcaacctgcga

SEQ ID NO: 127126 - DNA, 15 bp, Homo sapiens
gcttcaacctgcgag

SEQ ID NO: 127127 - DNA, 15 bp, Homo sapiens
cttcaacctgcgagg

SEQ ID NO: 127128 - DNA, 15 bp, Homo sapiens
ttcaacctgcgaggc

SEQ ID NO: 127129 - DNA, 15 bp, Homo sapiens
tcaacctgcgaggct

SEQ ID NO: 127130 - DNA, 15 bp, Homo sapiens
caacctgcgaggctg

SEQ ID NO: 127131 - DNA, 15 bp, Homo sapiens
aacctgcgaggctga

SEQ ID NO: 127132 - DNA, 15 bp, Homo sapiens
acctgcgaggctgag

SEQ ID NO: 127133 - DNA, 15 bp, Homo sapiens
cctgcgaggctgagg

SEQ ID NO: 127134 - DNA, 15 bp, Homo sapiens
ctgcgaggctgaggt

SEQ ID NO: 127135 - DNA, 15 bp, Homo sapiens
tgcgaggctgaggtt

SEQ ID NO: 127136 - DNA, 15 bp, Homo sapiens
gcgaggctgaggttg

SEQ ID NO: 127137 - DNA, 15 bp, Homo sapiens
cgaggctgaggttgc

SEQ ID NO: 127138 - DNA, 15 bp, Homo sapiens
gaggctgaggttgca

SEQ ID NO: 127139 - DNA, 15 bp, Homo sapiens
aggctgaggttgcag

SEQ ID NO: 127140 - DNA, 15 bp, Homo sapiens
ggctgaggttgcagt

SEQ ID NO: 127141 - DNA, 15 bp, Homo sapiens
gctgaggttgcagtg

SEQ ID NO: 127142 - DNA, 15 bp, Homo sapiens
ctgaggttgcagtga

SEQ ID NO: 127143 - DNA, 15 bp, Homo sapiens
tgaggttgcagtgag

SEQ ID NO: 127144 - DNA, 15 bp, Homo sapiens
ccgagattgcgccat

SEQ ID NO: 127145 - DNA, 15 bp, Homo sapiens
cgagattgcgccatt

SEQ ID NO: 127146 - DNA, 15 bp, Homo sapiens
gagattgcgccattg

SEQ ID NO: 127147 - DNA, 15 bp, Homo sapiens
agattgcgccattgc

SEQ ID NO: 127148 - DNA, 15 bp, Homo sapiens
gattgcgccattgca

SEQ ID NO: 127149 - DNA, 15 bp, Homo sapiens
attgcgccattgcac

SEQ ID NO: 127150 - DNA, 15 bp, Homo sapiens
ttgcgccattgcact

SEQ ID NO: 127151 - DNA, 15 bp, Homo sapiens
tgcgccattgcactc

SEQ ID NO: 127152 - DNA, 15 bp, Homo sapiens
gcgccattgcactcc

SEQ ID NO: 127153 - DNA, 15 bp, Homo sapiens
cgccattgcactcca

SEQ ID NO: 127154 - DNA, 15 bp, Homo sapiens
gccattgcactccag

SEQ ID NO: 127155 - DNA, 15 bp, Homo sapiens
aacagagtgagactc

SEQ ID NO: 127156 - DNA, 15 bp, Homo sapiens
acagagtgagactct

SEQ ID NO: 127157 - DNA, 15 bp, Homo sapiens
cagagtgagactctg

SEQ ID NO: 127158 - DNA, 15 bp, Homo sapiens
agagtgagactctgt

SEQ ID NO: 127159 - DNA, 15 bp, Homo sapiens
gagtgagactctgtc

SEQ ID NO: 127160 - DNA, 15 bp, Homo sapiens
agtgagactctgtct

SEQ ID NO: 127161 - DNA, 15 bp, Homo sapiens
gtgagactctgtctc

SEQ ID NO: 127162 - DNA, 15 bp, Homo sapiens
tgagactctgtctca

SEQ ID NO: 127163 - DNA, 15 bp, Homo sapiens
ctcaaaaaaaaaaaa

SEQ ID NO: 127164 - DNA, 15 bp, Homo sapiens
tcaaaaaaaaaaaaa

SEQ ID NO: 127165 - DNA, 15 bp, Homo sapiens
caaaaaaaaaaaaaa

SEQ ID NO: 127166 - DNA, 15 bp, Homo sapiens
aaaaaaaaaaagcat

SEQ ID NO: 127167 - DNA, 15 bp, Homo sapiens
aaaaaaaaaagcata

SEQ ID NO: 127168 - DNA, 15 bp, Homo sapiens
aaaaaaaaagcataa

SEQ ID NO: 127169 - DNA, 15 bp, Homo sapiens
aaaaaaaagcataaa

SEQ ID NO: 127170 - DNA, 15 bp, Homo sapiens
aaaaaaagcataaac

SEQ ID NO: 127171 - DNA, 15 bp, Homo sapiens
aaaaaagcataaact

SEQ ID NO: 127172 - DNA, 15 bp, Homo sapiens
aaaaagcataaactg

SEQ ID NO: 127173 - DNA, 15 bp, Homo sapiens
aaaagcataaactga

SEQ ID NO: 127174 - DNA, 15 bp, Homo sapiens
aaagcataaactgaa

SEQ ID NO: 127175 - DNA, 15 bp, Homo sapiens
aagcataaactgaaa

SEQ ID NO: 127176 - DNA, 15 bp, Homo sapiens
agcataaactgaaat

SEQ ID NO: 127177 - DNA, 15 bp, Homo sapiens
gcataaactgaaatt

SEQ ID NO: 127178 - DNA, 15 bp, Homo sapiens
cataaactgaaattt

SEQ ID NO: 127179 - DNA, 15 bp, Homo sapiens
ataaactgaaattta

SEQ ID NO: 127180 - DNA, 15 bp, Homo sapiens
taaactgaaatttat

SEQ ID NO: 127181 - DNA, 15 bp, Homo sapiens
aaactgaaatttata

SEQ ID NO: 127182 - DNA, 15 bp, Homo sapiens
aactgaaatttatat

SEQ ID NO: 127183 - DNA, 15 bp, Homo sapiens
actgaaatttatatg

SEQ ID NO: 127184 - DNA, 15 bp, Homo sapiens
ctgaaatttatatgc

SEQ ID NO: 127185 - DNA, 15 bp, Homo sapiens
tgaaatttatatgca

SEQ ID NO: 127186 - DNA, 15 bp, Homo sapiens
gaaatttatatgcaa

SEQ ID NO: 127187 - DNA, 15 bp, Homo sapiens
aaatttatatgcaat

SEQ ID NO: 127188 - DNA, 15 bp, Homo sapiens
aatttatatgcaatt

SEQ ID NO: 127189 - DNA, 15 bp, Homo sapiens
atttatatgcaattt

SEQ ID NO: 127190 - DNA, 15 bp, Homo sapiens
tttatatgcaattta

SEQ ID NO: 127191 - DNA, 15 bp, Homo sapiens
ttatatgcaatttat

SEQ ID NO: 127192 - DNA, 15 bp, Homo sapiens
tatatgcaatttata

SEQ ID NO: 127193 - DNA, 15 bp, Homo sapiens
atatgcaatttatat

SEQ ID NO: 127194 - DNA, 15 bp, Homo sapiens
tatgcaatttatatg

SEQ ID NO: 127195 - DNA, 15 bp, Homo sapiens
atgcaatttatatgc

SEQ ID NO: 127196 - DNA, 15 bp, Homo sapiens
tgcaatttatatgcc

SEQ ID NO: 127197 - DNA, 15 bp, Homo sapiens
gcaatttatatgcct

SEQ ID NO: 127198 - DNA, 15 bp, Homo sapiens
caatttatatgcctg

SEQ ID NO: 127199 - DNA, 15 bp, Homo sapiens
aatttatatgcctgt

SEQ ID NO: 127200 - DNA, 15 bp, Homo sapiens
atttatatgcctgtg

SEQ ID NO: 127201 - DNA, 15 bp, Homo sapiens
tttatatgcctgtga

SEQ ID NO: 127202 - DNA, 15 bp, Homo sapiens
ttatatgcctgtgag

SEQ ID NO: 127203 - DNA, 15 bp, Homo sapiens
tatatgcctgtgaga

SEQ ID NO: 127204 - DNA, 15 bp, Homo sapiens
atatgcctgtgagat

SEQ ID NO: 127205 - DNA, 15 bp, Homo sapiens
tatgcctgtgagata

SEQ ID NO: 127206 - DNA, 15 bp, Homo sapiens
atgcctgtgagataa

SEQ ID NO: 127207 - DNA, 15 bp, Homo sapiens
tgcctgtgagataat

SEQ ID NO: 127208 - DNA, 15 bp, Homo sapiens
gcctgtgagataatt

SEQ ID NO: 127209 - DNA, 15 bp, Homo sapiens
cctgtgagataattc

SEQ ID NO: 127210 - DNA, 15 bp, Homo sapiens
ctgtgagataattct

SEQ ID NO: 127211 - DNA, 15 bp, Homo sapiens
tgtgagataattctg

SEQ ID NO: 127212 - DNA, 15 bp, Homo sapiens
gtgagataattctgt

SEQ ID NO: 127213 - DNA, 15 bp, Homo sapiens
tgagataattctgtt

SEQ ID NO: 127214 - DNA, 15 bp, Homo sapiens
gagataattctgttt

SEQ ID NO: 127215 - DNA, 15 bp, Homo sapiens
agataattctgtttt

SEQ ID NO: 127216 - DNA, 15 bp, Homo sapiens
gataattctgttttc

SEQ ID NO: 127217 - DNA, 15 bp, Homo sapiens
ataattctgttttct

SEQ ID NO: 127218 - DNA, 15 bp, Homo sapiens
taattctgttttctc

SEQ ID NO: 127219 - DNA, 15 bp, Homo sapiens
aattctgttttctct

SEQ ID NO: 127220 - DNA, 15 bp, Homo sapiens
attctgttttctctt

SEQ ID NO: 127221 - DNA, 15 bp, Homo sapiens
ttctgttttctcttt

SEQ ID NO: 127222 - DNA, 15 bp, Homo sapiens
tctgttttctctttt

SEQ ID NO: 127223 - DNA, 15 bp, Homo sapiens
ctgttttctcttttg

SEQ ID NO: 127224 - DNA, 15 bp, Homo sapiens
tgttttctcttttgg

SEQ ID NO: 127225 - DNA, 15 bp, Homo sapiens
gttttctcttttgga

SEQ ID NO: 127226 - DNA, 15 bp, Homo sapiens
ttttctcttttggaa

SEQ ID NO: 127227 - DNA, 15 bp, Homo sapiens
tttctcttttggaac

SEQ ID NO: 127228 - DNA, 15 bp, Homo sapiens
ttctcttttggaacc

SEQ ID NO: 127229 - DNA, 15 bp, Homo sapiens
tctcttttggaaccc

SEQ ID NO: 127230 - DNA, 15 bp, Homo sapiens
ctcttttggaacccc

SEQ ID NO: 127231 - DNA, 15 bp, Homo sapiens
tcttttggaacccca

SEQ ID NO: 127232 - DNA, 15 bp, Homo sapiens
cttttggaaccccaa

SEQ ID NO: 127233 - DNA, 15 bp, Homo sapiens
ttttggaaccccaaa

SEQ ID NO: 127234 - DNA, 15 bp, Homo sapiens
tttggaaccccaaag

SEQ ID NO: 127235 - DNA, 15 bp, Homo sapiens
ttggaaccccaaaga

SEQ ID NO: 127236 - DNA, 15 bp, Homo sapiens
tggaaccccaaagag

SEQ ID NO: 127237 - DNA, 15 bp, Homo sapiens
ggaaccccaaagaga

SEQ ID NO: 127238 - DNA, 15 bp, Homo sapiens
gaaccccaaagagat

SEQ ID NO: 127239 - DNA, 15 bp, Homo sapiens
aaccccaaagagatt

SEQ ID NO: 127240 - DNA, 15 bp, Homo sapiens
accccaaagagattt

SEQ ID NO: 127241 - DNA, 15 bp, Homo sapiens
ccccaaagagatttt

SEQ ID NO: 127242 - DNA, 15 bp, Homo sapiens
cccaaagagattttt

SEQ ID NO: 127243 - DNA, 15 bp, Homo sapiens
ccaaagagatttttt

SEQ ID NO: 127244 - DNA, 15 bp, Homo sapiens
caaagagattttttt

SEQ ID NO: 127245 - DNA, 15 bp, Homo sapiens
aaagagatttttttg

SEQ ID NO: 127246 - DNA, 15 bp, Homo sapiens
aagagatttttttga

SEQ ID NO: 127247 - DNA, 15 bp, Homo sapiens
agagatttttttgat

SEQ ID NO: 127248 - DNA, 15 bp, Homo sapiens
gagatttttttgatt

SEQ ID NO: 127249 - DNA, 15 bp, Homo sapiens
agatttttttgattg

SEQ ID NO: 127250 - DNA, 15 bp, Homo sapiens
gatttttttgattga

SEQ ID NO: 127251 - DNA, 15 bp, Homo sapiens
atttttttgattgat

SEQ ID NO: 127252 - DNA, 15 bp, Homo sapiens
tttttttgattgatg

SEQ ID NO: 127253 - DNA, 15 bp, Homo sapiens
ttttttgattgatga

SEQ ID NO: 127254 - DNA, 15 bp, Homo sapiens
tttttgattgatgag

SEQ ID NO: 127255 - DNA, 15 bp, Homo sapiens
ttttgattgatgagc

SEQ ID NO: 127256 - DNA, 15 bp, Homo sapiens
tttgattgatgagca

SEQ ID NO: 127257 - DNA, 15 bp, Homo sapiens
ttgattgatgagcaa

SEQ ID NO: 127258 - DNA, 15 bp, Homo sapiens
tgattgatgagcaaa

SEQ ID NO: 127259 - DNA, 15 bp, Homo sapiens
gattgatgagcaaat

SEQ ID NO: 127260 - DNA, 15 bp, Homo sapiens
attgatgagcaaata

SEQ ID NO: 127261 - DNA, 15 bp, Homo sapiens
ttgatgagcaaatac

SEQ ID NO: 127262 - DNA, 15 bp, Homo sapiens
tgatgagcaaataca

SEQ ID NO: 127263 - DNA, 15 bp, Homo sapiens
gatgagcaaatacat

SEQ ID NO: 127264 - DNA, 15 bp, Homo sapiens
atgagcaaatacatt

SEQ ID NO: 127265 - DNA, 15 bp, Homo sapiens
tgagcaaatacattt

SEQ ID NO: 127266 - DNA, 15 bp, Homo sapiens
gagcaaatacatttt

SEQ ID NO: 127267 - DNA, 15 bp, Homo sapiens
agcaaatacatttta

SEQ ID NO: 127268 - DNA, 15 bp, Homo sapiens
gcaaatacattttag

SEQ ID NO: 127269 - DNA, 15 bp, Homo sapiens
caaatacattttaga

SEQ ID NO: 127270 - DNA, 15 bp, Homo sapiens
aaatacattttagat

SEQ ID NO: 127271 - DNA, 15 bp, Homo sapiens
aatacattttagatt

SEQ ID NO: 127272 - DNA, 15 bp, Homo sapiens
atacattttagattt

SEQ ID NO: 127273 - DNA, 15 bp, Homo sapiens
tacattttagatttt

SEQ ID NO: 127274 - DNA, 15 bp, Homo sapiens
acattttagatttta

SEQ ID NO: 127275 - DNA, 15 bp, Homo sapiens
cattttagattttat

SEQ ID NO: 127276 - DNA, 15 bp, Homo sapiens
attttagattttatt

SEQ ID NO: 127277 - DNA, 15 bp, Homo sapiens
ttttagattttattt

SEQ ID NO: 127278 - DNA, 15 bp, Homo sapiens
tttagattttattta

SEQ ID NO: 127279 - DNA, 15 bp, Homo sapiens
ttagattttatttaa

SEQ ID NO: 127280 - DNA, 15 bp, Homo sapiens
tagattttatttaag

SEQ ID NO: 127281 - DNA, 15 bp, Homo sapiens
agattttatttaagc

SEQ ID NO: 127282 - DNA, 15 bp, Homo sapiens
gattttatttaagca

SEQ ID NO: 127283 - DNA, 15 bp, Homo sapiens
attttatttaagcat

SEQ ID NO: 127284 - DNA, 15 bp, Homo sapiens
ttttatttaagcatt

SEQ ID NO: 127285 - DNA, 15 bp, Homo sapiens
tttatttaagcatta

SEQ ID NO: 127286 - DNA, 15 bp, Homo sapiens
ttatttaagcattat

SEQ ID NO: 127287 - DNA, 15 bp, Homo sapiens
tatttaagcattatg

SEQ ID NO: 127288 - DNA, 15 bp, Homo sapiens
atttaagcattatgc

SEQ ID NO: 127289 - DNA, 15 bp, Homo sapiens
tttaagcattatgcc

SEQ ID NO: 127290 - DNA, 15 bp, Homo sapiens
ttaagcattatgcca

SEQ ID NO: 127291 - DNA, 15 bp, Homo sapiens
taagcattatgccaa

SEQ ID NO: 127292 - DNA, 15 bp, Homo sapiens
aagcattatgccaag

SEQ ID NO: 127293 - DNA, 15 bp, Homo sapiens
agcattatgccaagc

SEQ ID NO: 127294 - DNA, 15 bp, Homo sapiens
gcattatgccaagca

SEQ ID NO: 127295 - DNA, 15 bp, Homo sapiens
cattatgccaagcac

SEQ ID NO: 127296 - DNA, 15 bp, Homo sapiens
attatgccaagcacc

SEQ ID NO: 127297 - DNA, 15 bp, Homo sapiens
ttatgccaagcacca

SEQ ID NO: 127298 - DNA, 15 bp, Homo sapiens
tatgccaagcaccac

SEQ ID NO: 127299 - DNA, 15 bp, Homo sapiens
atgccaagcaccact

SEQ ID NO: 127300 - DNA, 15 bp, Homo sapiens
tgccaagcaccactg

SEQ ID NO: 127301 - DNA, 15 bp, Homo sapiens
gccaagcaccactga

SEQ ID NO: 127302 - DNA, 15 bp, Homo sapiens
ccaagcaccactgaa

SEQ ID NO: 127303 - DNA, 15 bp, Homo sapiens
caagcaccactgaag

SEQ ID NO: 127304 - DNA, 15 bp, Homo sapiens
aagcaccactgaagt

SEQ ID NO: 127305 - DNA, 15 bp, Homo sapiens
agcaccactgaagta

SEQ ID NO: 127306 - DNA, 15 bp, Homo sapiens
gcaccactgaagtat

SEQ ID NO: 127307 - DNA, 15 bp, Homo sapiens
caccactgaagtata

SEQ ID NO: 127308 - DNA, 15 bp, Homo sapiens
accactgaagtataa

SEQ ID NO: 127309 - DNA, 15 bp, Homo sapiens
ccactgaagtataag

SEQ ID NO: 127310 - DNA, 15 bp, Homo sapiens
cactgaagtataagt

SEQ ID NO: 127311 - DNA, 15 bp, Homo sapiens
actgaagtataagtt

SEQ ID NO: 127312 - DNA, 15 bp, Homo sapiens
ctgaagtataagttt

SEQ ID NO: 127313 - DNA, 15 bp, Homo sapiens
tgaagtataagtttc

SEQ ID NO: 127314 - DNA, 15 bp, Homo sapiens
gaagtataagtttca

SEQ ID NO: 127315 - DNA, 15 bp, Homo sapiens
aagtataagtttcaa

SEQ ID NO: 127316 - DNA, 15 bp, Homo sapiens
agtataagtttcaag

SEQ ID NO: 127317 - DNA, 15 bp, Homo sapiens
gtataagtttcaagg

SEQ ID NO: 127318 - DNA, 15 bp, Homo sapiens
tataagtttcaaggg

SEQ ID NO: 127319 - DNA, 15 bp, Homo sapiens
ataagtttcaagggc

SEQ ID NO: 127320 - DNA, 15 bp, Homo sapiens
taagtttcaagggca

SEQ ID NO: 127321 - DNA, 15 bp, Homo sapiens
aagtttcaagggcaa

SEQ ID NO: 127322 - DNA, 15 bp, Homo sapiens
agtttcaagggcaaa

SEQ ID NO: 127323 - DNA, 15 bp, Homo sapiens
gtttcaagggcaaac

SEQ ID NO: 127324 - DNA, 15 bp, Homo sapiens
tttcaagggcaaact

SEQ ID NO: 127325 - DNA, 15 bp, Homo sapiens
ttcaagggcaaactc

SEQ ID NO: 127326 - DNA, 15 bp, Homo sapiens
tcaagggcaaactca

SEQ ID NO: 127327 - DNA, 15 bp, Homo sapiens
caagggcaaactcag

SEQ ID NO: 127328 - DNA, 15 bp, Homo sapiens
aagggcaaactcagt

SEQ ID NO: 127329 - DNA, 15 bp, Homo sapiens
agggcaaactcagtt

SEQ ID NO: 127330 - DNA, 15 bp, Homo sapiens
gggcaaactcagttt

SEQ ID NO: 127331 - DNA, 15 bp, Homo sapiens
ggcaaactcagtttt

SEQ ID NO: 127332 - DNA, 15 bp, Homo sapiens
gcaaactcagttttt

SEQ ID NO: 127333 - DNA, 15 bp, Homo sapiens
caaactcagtttttt

SEQ ID NO: 127334 - DNA, 15 bp, Homo sapiens
aaactcagttttttc

SEQ ID NO: 127335 - DNA, 15 bp, Homo sapiens
aactcagttttttca

SEQ ID NO: 127336 - DNA, 15 bp, Homo sapiens
actcagttttttcat

SEQ ID NO: 127337 - DNA, 15 bp, Homo sapiens
ctcagttttttcatc

SEQ ID NO: 127338 - DNA, 15 bp, Homo sapiens
tcagttttttcatct

SEQ ID NO: 127339 - DNA, 15 bp, Homo sapiens
cagttttttcatcta

SEQ ID NO: 127340 - DNA, 15 bp, Homo sapiens
agttttttcatctac

SEQ ID NO: 127341 - DNA, 15 bp, Homo sapiens
gttttttcatctact

SEQ ID NO: 127342 - DNA, 15 bp, Homo sapiens
ttttttcatctacta

SEQ ID NO: 127343 - DNA, 15 bp, Homo sapiens
tttttcatctactag

SEQ ID NO: 127344 - DNA, 15 bp, Homo sapiens
ttttcatctactaga

SEQ ID NO: 127345 - DNA, 15 bp, Homo sapiens
tttcatctactagac

SEQ ID NO: 127346 - DNA, 15 bp, Homo sapiens
ttcatctactagacg

SEQ ID NO: 127347 - DNA, 15 bp, Homo sapiens
tcatctactagacga

SEQ ID NO: 127348 - DNA, 15 bp, Homo sapiens
catctactagacgaa

SEQ ID NO: 127349 - DNA, 15 bp, Homo sapiens
atctactagacgaat

SEQ ID NO: 127350 - DNA, 15 bp, Homo sapiens
tctactagacgaatg

SEQ ID NO: 127351 - DNA, 15 bp, Homo sapiens
ctactagacgaatga

SEQ ID NO: 127352 - DNA, 15 bp, Homo sapiens
tactagacgaatgat

SEQ ID NO: 127353 - DNA, 15 bp, Homo sapiens
actagacgaatgatt

SEQ ID NO: 127354 - DNA, 15 bp, Homo sapiens
ctagacgaatgattt

SEQ ID NO: 127355 - DNA, 15 bp, Homo sapiens
tagacgaatgatttt

SEQ ID NO: 127356 - DNA, 15 bp, Homo sapiens
agacgaatgattttc

SEQ ID NO: 127357 - DNA, 15 bp, Homo sapiens
gacgaatgattttct

SEQ ID NO: 127358 - DNA, 15 bp, Homo sapiens
acgaatgattttctg

SEQ ID NO: 127359 - DNA, 15 bp, Homo sapiens
cgaatgattttctgg

SEQ ID NO: 127360 - DNA, 15 bp, Homo sapiens
gaatgattttctgga

SEQ ID NO: 127361 - DNA, 15 bp, Homo sapiens
aatgattttctggaa

SEQ ID NO: 127362 - DNA, 15 bp, Homo sapiens
atgattttctggaat

SEQ ID NO: 127363 - DNA, 15 bp, Homo sapiens
tgattttctggaatg

SEQ ID NO: 127364 - DNA, 15 bp, Homo sapiens
gattttctggaatga

SEQ ID NO: 127365 - DNA, 15 bp, Homo sapiens
attttctggaatgat

SEQ ID NO: 127366 - DNA, 15 bp, Homo sapiens
ttttctggaatgatt

SEQ ID NO: 127367 - DNA, 15 bp, Homo sapiens
tttctggaatgatta

SEQ ID NO: 127368 - DNA, 15 bp, Homo sapiens
ttctggaatgattac

SEQ ID NO: 127369 - DNA, 15 bp, Homo sapiens
tctggaatgattaca

SEQ ID NO: 127370 - DNA, 15 bp, Homo sapiens
ctggaatgattacaa

SEQ ID NO: 127371 - DNA, 15 bp, Homo sapiens
tggaatgattacaag

SEQ ID NO: 127372 - DNA, 15 bp, Homo sapiens
ggaatgattacaagc

SEQ ID NO: 127373 - DNA, 15 bp, Homo sapiens
gaatgattacaagca

SEQ ID NO: 127374 - DNA, 15 bp, Homo sapiens
aatgattacaagcag

SEQ ID NO: 127375 - DNA, 15 bp, Homo sapiens
atgattacaagcagg

SEQ ID NO: 127376 - DNA, 15 bp, Homo sapiens
tgattacaagcaggc

SEQ ID NO: 127377 - DNA, 15 bp, Homo sapiens
gattacaagcaggca

SEQ ID NO: 127378 - DNA, 15 bp, Homo sapiens
attacaagcaggcaa

SEQ ID NO: 127379 - DNA, 15 bp, Homo sapiens
ttacaagcaggcaag

SEQ ID NO: 127380 - DNA, 15 bp, Homo sapiens
tacaagcaggcaaga

SEQ ID NO: 127381 - DNA, 15 bp, Homo sapiens
acaagcaggcaagat

SEQ ID NO: 127382 - DNA, 15 bp, Homo sapiens
caagcaggcaagatg

SEQ ID NO: 127383 - DNA, 15 bp, Homo sapiens
aagcaggcaagatgg

SEQ ID NO: 127384 - DNA, 15 bp, Homo sapiens
agcaggcaagatggt

SEQ ID NO: 127385 - DNA, 15 bp, Homo sapiens
gcaggcaagatggtg

SEQ ID NO: 127386 - DNA, 15 bp, Homo sapiens
caggcaagatggtgt

SEQ ID NO: 127387 - DNA, 15 bp, Homo sapiens
aggcaagatggtgta

SEQ ID NO: 127388 - DNA, 15 bp, Homo sapiens
ggcaagatggtgtag

SEQ ID NO: 127389 - DNA, 15 bp, Homo sapiens
gcaagatggtgtagt

SEQ ID NO: 127390 - DNA, 15 bp, Homo sapiens
caagatggtgtagtg

SEQ ID NO: 127391 - DNA, 15 bp, Homo sapiens
aagatggtgtagtgg

SEQ ID NO: 127392 - DNA, 15 bp, Homo sapiens
agatggtgtagtgga

SEQ ID NO: 127393 - DNA, 15 bp, Homo sapiens
gatggtgtagtggaa

SEQ ID NO: 127394 - DNA, 15 bp, Homo sapiens
atggtgtagtggaaa

SEQ ID NO: 127395 - DNA, 15 bp, Homo sapiens
tggtgtagtggaaat

SEQ ID NO: 127396 - DNA, 15 bp, Homo sapiens
ggtgtagtggaaata

SEQ ID NO: 127397 - DNA, 15 bp, Homo sapiens
gtgtagtggaaatag

SEQ ID NO: 127398 - DNA, 15 bp, Homo sapiens
tgtagtggaaatagc

SEQ ID NO: 127399 - DNA, 15 bp, Homo sapiens
gtagtggaaatagca

SEQ ID NO: 127400 - DNA, 15 bp, Homo sapiens
tagtggaaatagcaa

SEQ ID NO: 127401 - DNA, 15 bp, Homo sapiens
agtggaaatagcaaa

SEQ ID NO: 127402 - DNA, 15 bp, Homo sapiens
gtggaaatagcaaat

SEQ ID NO: 127403 - DNA, 15 bp, Homo sapiens
tggaaatagcaaatg

SEQ ID NO: 127404 - DNA, 15 bp, Homo sapiens
ggaaatagcaaatgt

SEQ ID NO: 127405 - DNA, 15 bp, Homo sapiens
gaaatagcaaatgtc

SEQ ID NO: 127406 - DNA, 15 bp, Homo sapiens
aaatagcaaatgtct

SEQ ID NO: 127407 - DNA, 15 bp, Homo sapiens
aatagcaaatgtctt

SEQ ID NO: 127408 - DNA, 15 bp, Homo sapiens
atagcaaatgtcttc

SEQ ID NO: 127409 - DNA, 15 bp, Homo sapiens
tagcaaatgtcttcg

SEQ ID NO: 127410 - DNA, 15 bp, Homo sapiens
agcaaatgtcttcgg

SEQ ID NO: 127411 - DNA, 15 bp, Homo sapiens
gcaaatgtcttcggc

SEQ ID NO: 127412 - DNA, 15 bp, Homo sapiens
caaatgtcttcggca

SEQ ID NO: 127413 - DNA, 15 bp, Homo sapiens
aaatgtcttcggcat

SEQ ID NO: 127414 - DNA, 15 bp, Homo sapiens
aatgtcttcggcatc

SEQ ID NO: 127415 - DNA, 15 bp, Homo sapiens
atgtcttcggcatca

SEQ ID NO: 127416 - DNA, 15 bp, Homo sapiens
tgtcttcggcatcag

SEQ ID NO: 127417 - DNA, 15 bp, Homo sapiens
gtcttcggcatcaga

SEQ ID NO: 127418 - DNA, 15 bp, Homo sapiens
tcttcggcatcagac

SEQ ID NO: 127419 - DNA, 15 bp, Homo sapiens
cttcggcatcagaca

SEQ ID NO: 127420 - DNA, 15 bp, Homo sapiens
ttcggcatcagacaa

SEQ ID NO: 127421 - DNA, 15 bp, Homo sapiens
tcggcatcagacaag

SEQ ID NO: 127422 - DNA, 15 bp, Homo sapiens
cggcatcagacaagt

SEQ ID NO: 127423 - DNA, 15 bp, Homo sapiens
ggcatcagacaagtt

SEQ ID NO: 127424 - DNA, 15 bp, Homo sapiens
gcatcagacaagttg

SEQ ID NO: 127425 - DNA, 15 bp, Homo sapiens
catcagacaagttgg

SEQ ID NO: 127426 - DNA, 15 bp, Homo sapiens
atcagacaagttggg

SEQ ID NO: 127427 - DNA, 15 bp, Homo sapiens
tcagacaagttgggg

SEQ ID NO: 127428 - DNA, 15 bp, Homo sapiens
cagacaagttggggt

SEQ ID NO: 127429 - DNA, 15 bp, Homo sapiens
agacaagttggggtt

SEQ ID NO: 127430 - DNA, 15 bp, Homo sapiens
gacaagttggggttt

SEQ ID NO: 127431 - DNA, 15 bp, Homo sapiens
acaagttggggtttg

SEQ ID NO: 127432 - DNA, 15 bp, Homo sapiens
caagttggggtttgt

SEQ ID NO: 127433 - DNA, 15 bp, Homo sapiens
aagttggggtttgtt

SEQ ID NO: 127434 - DNA, 15 bp, Homo sapiens
agttggggtttgttt

SEQ ID NO: 127435 - DNA, 15 bp, Homo sapiens
gttggggtttgtttg

SEQ ID NO: 127436 - DNA, 15 bp, Homo sapiens
ttggggtttgtttgt

SEQ ID NO: 127437 - DNA, 15 bp, Homo sapiens
tggggtttgtttgta

SEQ ID NO: 127438 - DNA, 15 bp, Homo sapiens
ggggtttgtttgtat

SEQ ID NO: 127439 - DNA, 15 bp, Homo sapiens
gggtttgtttgtatc

SEQ ID NO: 127440 - DNA, 15 bp, Homo sapiens
ggtttgtttgtatcc

SEQ ID NO: 127441 - DNA, 15 bp, Homo sapiens
gtttgtttgtatcct

SEQ ID NO: 127442 - DNA, 15 bp, Homo sapiens
tttgtttgtatcctg

SEQ ID NO: 127443 - DNA, 15 bp, Homo sapiens
ttgtttgtatcctgc

SEQ ID NO: 127444 - DNA, 15 bp, Homo sapiens
tgtttgtatcctgcc

SEQ ID NO: 127445 - DNA, 15 bp, Homo sapiens
gtttgtatcctgcct

SEQ ID NO: 127446 - DNA, 15 bp, Homo sapiens
tttgtatcctgcctc

SEQ ID NO: 127447 - DNA, 15 bp, Homo sapiens
ttgtatcctgcctct

SEQ ID NO: 127448 - DNA, 15 bp, Homo sapiens
tgtatcctgcctctg

SEQ ID NO: 127449 - DNA, 15 bp, Homo sapiens
gtatcctgcctctgc

SEQ ID NO: 127450 - DNA, 15 bp, Homo sapiens
tatcctgcctctgcc

SEQ ID NO: 127451 - DNA, 15 bp, Homo sapiens
atcctgcctctgccc

SEQ ID NO: 127452 - DNA, 15 bp, Homo sapiens
tcctgcctctgccct

SEQ ID NO: 127453 - DNA, 15 bp, Homo sapiens
cctgcctctgccctt

SEQ ID NO: 127454 - DNA, 15 bp, Homo sapiens
ctgcctctgcccttc

SEQ ID NO: 127455 - DNA, 15 bp, Homo sapiens
tgcctctgcccttca

SEQ ID NO: 127456 - DNA, 15 bp, Homo sapiens
gcctctgcccttcac

SEQ ID NO: 127457 - DNA, 15 bp, Homo sapiens
cctctgcccttcacc

SEQ ID NO: 127458 - DNA, 15 bp, Homo sapiens
ctctgcccttcaccg

SEQ ID NO: 127459 - DNA, 15 bp, Homo sapiens
tctgcccttcaccga

SEQ ID NO: 127460 - DNA, 15 bp, Homo sapiens
ctgcccttcaccgag

SEQ ID NO: 127461 - DNA, 15 bp, Homo sapiens
tgcccttcaccgagg

SEQ ID NO: 127462 - DNA, 15 bp, Homo sapiens
gcccttcaccgaggt

SEQ ID NO: 127463 - DNA, 15 bp, Homo sapiens
cccttcaccgaggtt

SEQ ID NO: 127464 - DNA, 15 bp, Homo sapiens
ccttcaccgaggttg

SEQ ID NO: 127465 - DNA, 15 bp, Homo sapiens
cttcaccgaggttgt

SEQ ID NO: 127466 - DNA, 15 bp, Homo sapiens
ttcaccgaggttgtg

SEQ ID NO: 127467 - DNA, 15 bp, Homo sapiens
tcaccgaggttgtga

SEQ ID NO: 127468 - DNA, 15 bp, Homo sapiens
caccgaggttgtgat

SEQ ID NO: 127469 - DNA, 15 bp, Homo sapiens
accgaggttgtgatc

SEQ ID NO: 127470 - DNA, 15 bp, Homo sapiens
ccgaggttgtgatct

SEQ ID NO: 127471 - DNA, 15 bp, Homo sapiens
cgaggttgtgatctt

SEQ ID NO: 127472 - DNA, 15 bp, Homo sapiens
gaggttgtgatcttg

SEQ ID NO: 127473 - DNA, 15 bp, Homo sapiens
aggttgtgatcttgg

SEQ ID NO: 127474 - DNA, 15 bp, Homo sapiens
ggttgtgatcttggg

SEQ ID NO: 127475 - DNA, 15 bp, Homo sapiens
gttgtgatcttgggc

SEQ ID NO: 127476 - DNA, 15 bp, Homo sapiens
ttgtgatcttgggca

SEQ ID NO: 127477 - DNA, 15 bp, Homo sapiens
tgtgatcttgggcag

SEQ ID NO: 127478 - DNA, 15 bp, Homo sapiens
gtgatcttgggcaga

SEQ ID NO: 127479 - DNA, 15 bp, Homo sapiens
tgatcttgggcagat

SEQ ID NO: 127480 - DNA, 15 bp, Homo sapiens
gatcttgggcagatt

SEQ ID NO: 127481 - DNA, 15 bp, Homo sapiens
atcttgggcagattg

SEQ ID NO: 127482 - DNA, 15 bp, Homo sapiens
tcttgggcagattgt

SEQ ID NO: 127483 - DNA, 15 bp, Homo sapiens
cttgggcagattgtt

SEQ ID NO: 127484 - DNA, 15 bp, Homo sapiens
ttgggcagattgttg

SEQ ID NO: 127485 - DNA, 15 bp, Homo sapiens
tgggcagattgttga

SEQ ID NO: 127486 - DNA, 15 bp, Homo sapiens
gggcagattgttgag

SEQ ID NO: 127487 - DNA, 15 bp, Homo sapiens
ggcagattgttgagt

SEQ ID NO: 127488 - DNA, 15 bp, Homo sapiens
gcagattgttgagtt

SEQ ID NO: 127489 - DNA, 15 bp, Homo sapiens
cagattgttgagttt

SEQ ID NO: 127490 - DNA, 15 bp, Homo sapiens
agattgttgagtttt

SEQ ID NO: 127491 - DNA, 15 bp, Homo sapiens
gattgttgagtttta

SEQ ID NO: 127492 - DNA, 15 bp, Homo sapiens
attgttgagttttaa

SEQ ID NO: 127493 - DNA, 15 bp, Homo sapiens
ttgttgagttttaac

SEQ ID NO: 127494 - DNA, 15 bp, Homo sapiens
tgttgagttttaacc

SEQ ID NO: 127495 - DNA, 15 bp, Homo sapiens
gttgagttttaacct

SEQ ID NO: 127496 - DNA, 15 bp, Homo sapiens
ttgagttttaaccta

SEQ ID NO: 127497 - DNA, 15 bp, Homo sapiens
tgagttttaacctag

SEQ ID NO: 127498 - DNA, 15 bp, Homo sapiens
gagttttaacctaga

SEQ ID NO: 127499 - DNA, 15 bp, Homo sapiens
agttttaacctagat

SEQ ID NO: 127500 - DNA, 15 bp, Homo sapiens
gttttaacctagatt

SEQ ID NO: 127501 - DNA, 15 bp, Homo sapiens
ttttaacctagattc

SEQ ID NO: 127502 - DNA, 15 bp, Homo sapiens
tttaacctagattcc

SEQ ID NO: 127503 - DNA, 15 bp, Homo sapiens
ttaacctagattcct

SEQ ID NO: 127504 - DNA, 15 bp, Homo sapiens
taacctagattcctc

SEQ ID NO: 127505 - DNA, 15 bp, Homo sapiens
aacctagattcctct

SEQ ID NO: 127506 - DNA, 15 bp, Homo sapiens
acctagattcctctg

SEQ ID NO: 127507 - DNA, 15 bp, Homo sapiens
cctagattcctctga

SEQ ID NO: 127508 - DNA, 15 bp, Homo sapiens
ctagattcctctgac

SEQ ID NO: 127509 - DNA, 15 bp, Homo sapiens
tagattcctctgact

SEQ ID NO: 127510 - DNA, 15 bp, Homo sapiens
agattcctctgactc

SEQ ID NO: 127511 - DNA, 15 bp, Homo sapiens
gattcctctgactcc

SEQ ID NO: 127512 - DNA, 15 bp, Homo sapiens
attcctctgactcca

SEQ ID NO: 127513 - DNA, 15 bp, Homo sapiens
ttcctctgactccag

SEQ ID NO: 127514 - DNA, 15 bp, Homo sapiens
tcctctgactccaga

SEQ ID NO: 127515 - DNA, 15 bp, Homo sapiens
cctctgactccagat

SEQ ID NO: 127516 - DNA, 15 bp, Homo sapiens
ctctgactccagatc

SEQ ID NO: 127517 - DNA, 15 bp, Homo sapiens
tctgactccagatca

SEQ ID NO: 127518 - DNA, 15 bp, Homo sapiens
ctgactccagatcat

SEQ ID NO: 127519 - DNA, 15 bp, Homo sapiens
tgactccagatcata

SEQ ID NO: 127520 - DNA, 15 bp, Homo sapiens
gactccagatcataa

SEQ ID NO: 127521 - DNA, 15 bp, Homo sapiens
actccagatcataaa

SEQ ID NO: 127522 - DNA, 15 bp, Homo sapiens
ctccagatcataaat

SEQ ID NO: 127523 - DNA, 15 bp, Homo sapiens
tccagatcataaatt

SEQ ID NO: 127524 - DNA, 15 bp, Homo sapiens
ccagatcataaattt

SEQ ID NO: 127525 - DNA, 15 bp, Homo sapiens
cagatcataaatttt

SEQ ID NO: 127526 - DNA, 15 bp, Homo sapiens
agatcataaattttc

SEQ ID NO: 127527 - DNA, 15 bp, Homo sapiens
gatcataaattttca

SEQ ID NO: 127528 - DNA, 15 bp, Homo sapiens
atcataaattttcag

SEQ ID NO: 127529 - DNA, 15 bp, Homo sapiens
tcataaattttcaga

SEQ ID NO: 127530 - DNA, 15 bp, Homo sapiens
cataaattttcagaa

SEQ ID NO: 127531 - DNA, 15 bp, Homo sapiens
ataaattttcagaaa

SEQ ID NO: 127532 - DNA, 15 bp, Homo sapiens
taaattttcagaaaa

SEQ ID NO: 127533 - DNA, 15 bp, Homo sapiens
aaattttcagaaaag

SEQ ID NO: 127534 - DNA, 15 bp, Homo sapiens
aattttcagaaaagt

SEQ ID NO: 127535 - DNA, 15 bp, Homo sapiens
attttcagaaaagtt

SEQ ID NO: 127536 - DNA, 15 bp, Homo sapiens
ttttcagaaaagttc

SEQ ID NO: 127537 - DNA, 15 bp, Homo sapiens
tttcagaaaagttct

SEQ ID NO: 127538 - DNA, 15 bp, Homo sapiens
ttcagaaaagttctg

SEQ ID NO: 127539 - DNA, 15 bp, Homo sapiens
tcagaaaagttctga

SEQ ID NO: 127540 - DNA, 15 bp, Homo sapiens
cagaaaagttctgaa

SEQ ID NO: 127541 - DNA, 15 bp, Homo sapiens
agaaaagttctgaaa

SEQ ID NO: 127542 - DNA, 15 bp, Homo sapiens
gaaaagttctgaaat

SEQ ID NO: 127543 - DNA, 15 bp, Homo sapiens
aaaagttctgaaatt

SEQ ID NO: 127544 - DNA, 15 bp, Homo sapiens
aaagttctgaaattc

SEQ ID NO: 127545 - DNA, 15 bp, Homo sapiens
aagttctgaaattct

SEQ ID NO: 127546 - DNA, 15 bp, Homo sapiens
agttctgaaattctt

SEQ ID NO: 127547 - DNA, 15 bp, Homo sapiens
gttctgaaattcttg

SEQ ID NO: 127548 - DNA, 15 bp, Homo sapiens
ttctgaaattcttgt

SEQ ID NO: 127549 - DNA, 15 bp, Homo sapiens
tctgaaattcttgta

SEQ ID NO: 127550 - DNA, 15 bp, Homo sapiens
ctgaaattcttgtat

SEQ ID NO: 127551 - DNA, 15 bp, Homo sapiens
tgaaattcttgtata

SEQ ID NO: 127552 - DNA, 15 bp, Homo sapiens
gaaattcttgtatat

SEQ ID NO: 127553 - DNA, 15 bp, Homo sapiens
aaattcttgtatata

SEQ ID NO: 127554 - DNA, 15 bp, Homo sapiens
aattcttgtatatac

SEQ ID NO: 127555 - DNA, 15 bp, Homo sapiens
attcttgtatatact

SEQ ID NO: 127556 - DNA, 15 bp, Homo sapiens
ttcttgtatatactg

SEQ ID NO: 127557 - DNA, 15 bp, Homo sapiens
tcttgtatatactga

SEQ ID NO: 127558 - DNA, 15 bp, Homo sapiens
cttgtatatactgat

SEQ ID NO: 127559 - DNA, 15 bp, Homo sapiens
ttgtatatactgatg

SEQ ID NO: 127560 - DNA, 15 bp, Homo sapiens
tgtatatactgatgg

SEQ ID NO: 127561 - DNA, 15 bp, Homo sapiens
gtatatactgatggt

SEQ ID NO: 127562 - DNA, 15 bp, Homo sapiens
tatatactgatggta

SEQ ID NO: 127563 - DNA, 15 bp, Homo sapiens
atatactgatggtaa

SEQ ID NO: 127564 - DNA, 15 bp, Homo sapiens
tatactgatggtaaa

SEQ ID NO: 127565 - DNA, 15 bp, Homo sapiens
atactgatggtaaat

SEQ ID NO: 127566 - DNA, 15 bp, Homo sapiens
tactgatggtaaatg

SEQ ID NO: 127567 - DNA, 15 bp, Homo sapiens
actgatggtaaatga

SEQ ID NO: 127568 - DNA, 15 bp, Homo sapiens
ctgatggtaaatgag

SEQ ID NO: 127569 - DNA, 15 bp, Homo sapiens
tgatggtaaatgaga

SEQ ID NO: 127570 - DNA, 15 bp, Homo sapiens
gatggtaaatgagac

SEQ ID NO: 127571 - DNA, 15 bp, Homo sapiens
atggtaaatgagact

SEQ ID NO: 127572 - DNA, 15 bp, Homo sapiens
tggtaaatgagactt

SEQ ID NO: 127573 - DNA, 15 bp, Homo sapiens
ggtaaatgagacttt

SEQ ID NO: 127574 - DNA, 15 bp, Homo sapiens
gtaaatgagactttt

SEQ ID NO: 127575 - DNA, 15 bp, Homo sapiens
taaatgagacttttc

SEQ ID NO: 127576 - DNA, 15 bp, Homo sapiens
aaatgagacttttcc

SEQ ID NO: 127577 - DNA, 15 bp, Homo sapiens
aatgagacttttcct

SEQ ID NO: 127578 - DNA, 15 bp, Homo sapiens
atgagacttttcctt

SEQ ID NO: 127579 - DNA, 15 bp, Homo sapiens
tgagacttttcctta

SEQ ID NO: 127580 - DNA, 15 bp, Homo sapiens
gagacttttccttac

SEQ ID NO: 127581 - DNA, 15 bp, Homo sapiens
agacttttccttaca

SEQ ID NO: 127582 - DNA, 15 bp, Homo sapiens
gacttttccttacat

SEQ ID NO: 127583 - DNA, 15 bp, Homo sapiens
acttttccttacatc

SEQ ID NO: 127584 - DNA, 15 bp, Homo sapiens
cttttccttacatct

SEQ ID NO: 127585 - DNA, 15 bp, Homo sapiens
ttttccttacatcta

SEQ ID NO: 127586 - DNA, 15 bp, Homo sapiens
tttccttacatctat

SEQ ID NO: 127587 - DNA, 15 bp, Homo sapiens
ttccttacatctatg

SEQ ID NO: 127588 - DNA, 15 bp, Homo sapiens
tccttacatctatgc

SEQ ID NO: 127589 - DNA, 15 bp, Homo sapiens
ccttacatctatgca

SEQ ID NO: 127590 - DNA, 15 bp, Homo sapiens
cttacatctatgcac

SEQ ID NO: 127591 - DNA, 15 bp, Homo sapiens
ttacatctatgcact

SEQ ID NO: 127592 - DNA, 15 bp, Homo sapiens
tacatctatgcactt

SEQ ID NO: 127593 - DNA, 15 bp, Homo sapiens
acatctatgcacttc

SEQ ID NO: 127594 - DNA, 15 bp, Homo sapiens
catctatgcacttct

SEQ ID NO: 127595 - DNA, 15 bp, Homo sapiens
atctatgcacttctt

SEQ ID NO: 127596 - DNA, 15 bp, Homo sapiens
tctatgcacttcttt

SEQ ID NO: 127597 - DNA, 15 bp, Homo sapiens
ctatgcacttctttg

SEQ ID NO: 127598 - DNA, 15 bp, Homo sapiens
tatgcacttctttgt

SEQ ID NO: 127599 - DNA, 15 bp, Homo sapiens
atgcacttctttgtt

SEQ ID NO: 127600 - DNA, 15 bp, Homo sapiens
tgcacttctttgttt

SEQ ID NO: 127601 - DNA, 15 bp, Homo sapiens
gcacttctttgtttg

SEQ ID NO: 127602 - DNA, 15 bp, Homo sapiens
cacttctttgtttgt

SEQ ID NO: 127603 - DNA, 15 bp, Homo sapiens
acttctttgtttgtt

SEQ ID NO: 127604 - DNA, 15 bp, Homo sapiens
cttctttgtttgttt

SEQ ID NO: 127605 - DNA, 15 bp, Homo sapiens
ttctttgtttgtttg

SEQ ID NO: 127606 - DNA, 15 bp, Homo sapiens
tctttgtttgtttgt

SEQ ID NO: 127607 - DNA, 15 bp, Homo sapiens
ctttgtttgtttgtt

SEQ ID NO: 127608 - DNA, 15 bp, Homo sapiens
ttgtttgtttgtttt

SEQ ID NO: 127609 - DNA, 15 bp, Homo sapiens
tgtttgtttgttttg

SEQ ID NO: 127610 - DNA, 15 bp, Homo sapiens
gtttgtttgttttga

SEQ ID NO: 127611 - DNA, 15 bp, Homo sapiens
tttgtttgttttgag

SEQ ID NO: 127612 - DNA, 15 bp, Homo sapiens
ttgtttgttttgaga

SEQ ID NO: 127613 - DNA, 15 bp, Homo sapiens
tgtttgttttgagat

SEQ ID NO: 127614 - DNA, 15 bp, Homo sapiens
gtttgttttgagatg

SEQ ID NO: 127615 - DNA, 15 bp, Homo sapiens
tttgttttgagatgg

SEQ ID NO: 127616 - DNA, 15 bp, Homo sapiens
ttgttttgagatggt

SEQ ID NO: 127617 - DNA, 15 bp, Homo sapiens
tgttttgagatggtc

SEQ ID NO: 127618 - DNA, 15 bp, Homo sapiens
gttttgagatggtct

SEQ ID NO: 127619 - DNA, 15 bp, Homo sapiens
ttttgagatggtctt

SEQ ID NO: 127620 - DNA, 15 bp, Homo sapiens
tttgagatggtcttg

SEQ ID NO: 127621 - DNA, 15 bp, Homo sapiens
ttgagatggtcttgc

SEQ ID NO: 127622 - DNA, 15 bp, Homo sapiens
tgagatggtcttgct

SEQ ID NO: 127623 - DNA, 15 bp, Homo sapiens
gagatggtcttgctc

SEQ ID NO: 127624 - DNA, 15 bp, Homo sapiens
agatggtcttgctct

SEQ ID NO: 127625 - DNA, 15 bp, Homo sapiens
gatggtcttgctctg

SEQ ID NO: 127626 - DNA, 15 bp, Homo sapiens
atggtcttgctctgt

SEQ ID NO: 127627 - DNA, 15 bp, Homo sapiens
tggtcttgctctgtt

SEQ ID NO: 127628 - DNA, 15 bp, Homo sapiens
gctctgttgcccaga

SEQ ID NO: 127629 - DNA, 15 bp, Homo sapiens
ctctgttgcccagac

SEQ ID NO: 127630 - DNA, 15 bp, Homo sapiens
tctgttgcccagact

SEQ ID NO: 127631 - DNA, 15 bp, Homo sapiens
ctgttgcccagactg

SEQ ID NO: 127632 - DNA, 15 bp, Homo sapiens
tgttgcccagactgg

SEQ ID NO: 127633 - DNA, 15 bp, Homo sapiens
gttgcccagactgga

SEQ ID NO: 127634 - DNA, 15 bp, Homo sapiens
ttgcccagactggag

SEQ ID NO: 127635 - DNA, 15 bp, Homo sapiens
tgcccagactggagt

SEQ ID NO: 127636 - DNA, 15 bp, Homo sapiens
gcccagactggagtg

SEQ ID NO: 127637 - DNA, 15 bp, Homo sapiens
cccagactggagtgc

SEQ ID NO: 127638 - DNA, 15 bp, Homo sapiens
ccagactggagtgca

SEQ ID NO: 127639 - DNA, 15 bp, Homo sapiens
cagactggagtgcag

SEQ ID NO: 127640 - DNA, 15 bp, Homo sapiens
agactggagtgcagt

SEQ ID NO: 127641 - DNA, 15 bp, Homo sapiens
gactggagtgcagta

SEQ ID NO: 127642 - DNA, 15 bp, Homo sapiens
actggagtgcagtag

SEQ ID NO: 127643 - DNA, 15 bp, Homo sapiens
ctggagtgcagtagt

SEQ ID NO: 127644 - DNA, 15 bp, Homo sapiens
tggagtgcagtagtg

SEQ ID NO: 127645 - DNA, 15 bp, Homo sapiens
ggagtgcagtagtgc

SEQ ID NO: 127646 - DNA, 15 bp, Homo sapiens
gagtgcagtagtgca

SEQ ID NO: 127647 - DNA, 15 bp, Homo sapiens
agtgcagtagtgcaa

SEQ ID NO: 127648 - DNA, 15 bp, Homo sapiens
gtgcagtagtgcaat

SEQ ID NO: 127649 - DNA, 15 bp, Homo sapiens
tgcagtagtgcaatc

SEQ ID NO: 127650 - DNA, 15 bp, Homo sapiens
gcagtagtgcaatct

SEQ ID NO: 127651 - DNA, 15 bp, Homo sapiens
cagtagtgcaatctc

SEQ ID NO: 127652 - DNA, 15 bp, Homo sapiens
agtagtgcaatctcc

SEQ ID NO: 127653 - DNA, 15 bp, Homo sapiens
gtagtgcaatctccg

SEQ ID NO: 127654 - DNA, 15 bp, Homo sapiens
tagtgcaatctccgc

SEQ ID NO: 127655 - DNA, 15 bp, Homo sapiens
agtgcaatctccgct

SEQ ID NO: 127656 - DNA, 15 bp, Homo sapiens
gtgcaatctccgctc

SEQ ID NO: 127657 - DNA, 15 bp, Homo sapiens
tgcaatctccgctca

SEQ ID NO: 127658 - DNA, 15 bp, Homo sapiens
gcaatctccgctcac

SEQ ID NO: 127659 - DNA, 15 bp, Homo sapiens
caatctccgctcact

SEQ ID NO: 127660 - DNA, 15 bp, Homo sapiens
aatctccgctcacta

SEQ ID NO: 127661 - DNA, 15 bp, Homo sapiens
atctccgctcactac

SEQ ID NO: 127662 - DNA, 15 bp, Homo sapiens
tctccgctcactaca

SEQ ID NO: 127663 - DNA, 15 bp, Homo sapiens
ctccgctcactacaa

SEQ ID NO: 127664 - DNA, 15 bp, Homo sapiens
tccgctcactacaat

SEQ ID NO: 127665 - DNA, 15 bp, Homo sapiens
ccgctcactacaatg

SEQ ID NO: 127666 - DNA, 15 bp, Homo sapiens
cgctcactacaatgt

SEQ ID NO: 127667 - DNA, 15 bp, Homo sapiens
gctcactacaatgtc

SEQ ID NO: 127668 - DNA, 15 bp, Homo sapiens
ctcactacaatgtct

SEQ ID NO: 127669 - DNA, 15 bp, Homo sapiens
tcactacaatgtctg

SEQ ID NO: 127670 - DNA, 15 bp, Homo sapiens
cactacaatgtctgc

SEQ ID NO: 127671 - DNA, 15 bp, Homo sapiens
actacaatgtctgcc

SEQ ID NO: 127672 - DNA, 15 bp, Homo sapiens
ctacaatgtctgcct

SEQ ID NO: 127673 - DNA, 15 bp, Homo sapiens
tacaatgtctgcctc

SEQ ID NO: 127674 - DNA, 15 bp, Homo sapiens
acaatgtctgcctcc

SEQ ID NO: 127675 - DNA, 15 bp, Homo sapiens
caatgtctgcctccc

SEQ ID NO: 127676 - DNA, 15 bp, Homo sapiens
aatgtctgcctccca

SEQ ID NO: 127677 - DNA, 15 bp, Homo sapiens
atgtctgcctcccag

SEQ ID NO: 127678 - DNA, 15 bp, Homo sapiens
tgtctgcctcccagg

SEQ ID NO: 127679 - DNA, 15 bp, Homo sapiens
gtctgcctcccaggt

SEQ ID NO: 127680 - DNA, 15 bp, Homo sapiens
tgcctcccaggttcc

SEQ ID NO: 127681 - DNA, 15 bp, Homo sapiens
gcctcccaggttcca

SEQ ID NO: 127682 - DNA, 15 bp, Homo sapiens
cctcccaggttccag

SEQ ID NO: 127683 - DNA, 15 bp, Homo sapiens
ctcccaggttccagt

SEQ ID NO: 127684 - DNA, 15 bp, Homo sapiens
tcccaggttccagtg

SEQ ID NO: 127685 - DNA, 15 bp, Homo sapiens
cccaggttccagtga

SEQ ID NO: 127686 - DNA, 15 bp, Homo sapiens
ccaggttccagtgag

SEQ ID NO: 127687 - DNA, 15 bp, Homo sapiens
caggttccagtgagc

SEQ ID NO: 127688 - DNA, 15 bp, Homo sapiens
aggttccagtgagcc

SEQ ID NO: 127689 - DNA, 15 bp, Homo sapiens
ggttccagtgagcct

SEQ ID NO: 127690 - DNA, 15 bp, Homo sapiens
gttccagtgagcctc

SEQ ID NO: 127691 - DNA, 15 bp, Homo sapiens
ttccagtgagcctcc

SEQ ID NO: 127692 - DNA, 15 bp, Homo sapiens
tccagtgagcctcct

SEQ ID NO: 127693 - DNA, 15 bp, Homo sapiens
ccagtgagcctcctg

SEQ ID NO: 127694 - DNA, 15 bp, Homo sapiens
cagtgagcctcctgc

SEQ ID NO: 127695 - DNA, 15 bp, Homo sapiens
agtgagcctcctgcc

SEQ ID NO: 127696 - DNA, 15 bp, Homo sapiens
gtgagcctcctgcct

SEQ ID NO: 127697 - DNA, 15 bp, Homo sapiens
tgagcctcctgcctc

SEQ ID NO: 127698 - DNA, 15 bp, Homo sapiens
gagcctcctgcctca

SEQ ID NO: 127699 - DNA, 15 bp, Homo sapiens
agcctcctgcctcag

SEQ ID NO: 127700 - DNA, 15 bp, Homo sapiens
gcctcctgcctcagc

SEQ ID NO: 127701 - DNA, 15 bp, Homo sapiens
cctcctgcctcagcc

SEQ ID NO: 127702 - DNA, 15 bp, Homo sapiens
ctcagcctcccaaat

SEQ ID NO: 127703 - DNA, 15 bp, Homo sapiens
tcagcctcccaaata

SEQ ID NO: 127704 - DNA, 15 bp, Homo sapiens
cagcctcccaaatag

SEQ ID NO: 127705 - DNA, 15 bp, Homo sapiens
agcctcccaaatagc

SEQ ID NO: 127706 - DNA, 15 bp, Homo sapiens
gcctcccaaatagct

SEQ ID NO: 127707 - DNA, 15 bp, Homo sapiens
cctcccaaatagctg

SEQ ID NO: 127708 - DNA, 15 bp, Homo sapiens
ctcccaaatagctga

SEQ ID NO: 127709 - DNA, 15 bp, Homo sapiens
tcccaaatagctgag

SEQ ID NO: 127710 - DNA, 15 bp, Homo sapiens
cccaaatagctgaga

SEQ ID NO: 127711 - DNA, 15 bp, Homo sapiens
ccaaatagctgagac

SEQ ID NO: 127712 - DNA, 15 bp, Homo sapiens
caaatagctgagact

SEQ ID NO: 127713 - DNA, 15 bp, Homo sapiens
aaatagctgagacta

SEQ ID NO: 127714 - DNA, 15 bp, Homo sapiens
aatagctgagactac

SEQ ID NO: 127715 - DNA, 15 bp, Homo sapiens
atagctgagactaca

SEQ ID NO: 127716 - DNA, 15 bp, Homo sapiens
tagctgagactacag

SEQ ID NO: 127717 - DNA, 15 bp, Homo sapiens
agctgagactacagg

SEQ ID NO: 127718 - DNA, 15 bp, Homo sapiens
gctgagactacaggc

SEQ ID NO: 127719 - DNA, 15 bp, Homo sapiens
ctgagactacaggca

SEQ ID NO: 127720 - DNA, 15 bp, Homo sapiens
tgagactacaggcat

SEQ ID NO: 127721 - DNA, 15 bp, Homo sapiens
gagactacaggcatg

SEQ ID NO: 127722 - DNA, 15 bp, Homo sapiens
agactacaggcatgt

SEQ ID NO: 127723 - DNA, 15 bp, Homo sapiens
gactacaggcatgtg

SEQ ID NO: 127724 - DNA, 15 bp, Homo sapiens
actacaggcatgtgc

SEQ ID NO: 127725 - DNA, 15 bp, Homo sapiens
ctacaggcatgtgcc

SEQ ID NO: 127726 - DNA, 15 bp, Homo sapiens
gcatgtgccaccacg

SEQ ID NO: 127727 - DNA, 15 bp, Homo sapiens
catgtgccaccacgt

SEQ ID NO: 127728 - DNA, 15 bp, Homo sapiens
atgtgccaccacgtc

SEQ ID NO: 127729 - DNA, 15 bp, Homo sapiens
tgtgccaccacgtcc

SEQ ID NO: 127730 - DNA, 15 bp, Homo sapiens
gtgccaccacgtccg

SEQ ID NO: 127731 - DNA, 15 bp, Homo sapiens
tgccaccacgtccgg

SEQ ID NO: 127732 - DNA, 15 bp, Homo sapiens
gccaccacgtccggc

SEQ ID NO: 127733 - DNA, 15 bp, Homo sapiens
ccaccacgtccggct

SEQ ID NO: 127734 - DNA, 15 bp, Homo sapiens
caccacgtccggcta

SEQ ID NO: 127735 - DNA, 15 bp, Homo sapiens
accacgtccggctaa

SEQ ID NO: 127736 - DNA, 15 bp, Homo sapiens
ccacgtccggctaat

SEQ ID NO: 127737 - DNA, 15 bp, Homo sapiens
cacgtccggctaatt

SEQ ID NO: 127738 - DNA, 15 bp, Homo sapiens
acgtccggctaattt

SEQ ID NO: 127739 - DNA, 15 bp, Homo sapiens
cgtccggctaatttt

SEQ ID NO: 127740 - DNA, 15 bp, Homo sapiens
tagagacagggtttt

SEQ ID NO: 127741 - DNA, 15 bp, Homo sapiens
agagacagggttttg

SEQ ID NO: 127742 - DNA, 15 bp, Homo sapiens
gagacagggttttgc

SEQ ID NO: 127743 - DNA, 15 bp, Homo sapiens
agacagggttttgcc

SEQ ID NO: 127744 - DNA, 15 bp, Homo sapiens
gacagggttttgcca

SEQ ID NO: 127745 - DNA, 15 bp, Homo sapiens
acagggttttgccat

SEQ ID NO: 127746 - DNA, 15 bp, Homo sapiens
cagggttttgccatg

SEQ ID NO: 127747 - DNA, 15 bp, Homo sapiens
agggttttgccatgt

SEQ ID NO: 127748 - DNA, 15 bp, Homo sapiens
gggttttgccatgtt

SEQ ID NO: 127749 - DNA, 15 bp, Homo sapiens
ggttttgccatgttg

SEQ ID NO: 127750 - DNA, 15 bp, Homo sapiens
gttttgccatgttga

SEQ ID NO: 127751 - DNA, 15 bp, Homo sapiens
ttttgccatgttgac

SEQ ID NO: 127752 - DNA, 15 bp, Homo sapiens
tttgccatgttgacc

SEQ ID NO: 127753 - DNA, 15 bp, Homo sapiens
ttgccatgttgacca

SEQ ID NO: 127754 - DNA, 15 bp, Homo sapiens
tgccatgttgaccac

SEQ ID NO: 127755 - DNA, 15 bp, Homo sapiens
gccatgttgaccaca

SEQ ID NO: 127756 - DNA, 15 bp, Homo sapiens
ccatgttgaccacac

SEQ ID NO: 127757 - DNA, 15 bp, Homo sapiens
catgttgaccacact

SEQ ID NO: 127758 - DNA, 15 bp, Homo sapiens
atgttgaccacactg

SEQ ID NO: 127759 - DNA, 15 bp, Homo sapiens
tgttgaccacactgg

SEQ ID NO: 127760 - DNA, 15 bp, Homo sapiens
gttgaccacactggt

SEQ ID NO: 127761 - DNA, 15 bp, Homo sapiens
ttgaccacactggtc

SEQ ID NO: 127762 - DNA, 15 bp, Homo sapiens
tgaccacactggtct

SEQ ID NO: 127763 - DNA, 15 bp, Homo sapiens
gaccacactggtctc

SEQ ID NO: 127764 - DNA, 15 bp, Homo sapiens
accacactggtctcg

SEQ ID NO: 127765 - DNA, 15 bp, Homo sapiens
ccacactggtctcga

SEQ ID NO: 127766 - DNA, 15 bp, Homo sapiens
cacactggtctcgaa

SEQ ID NO: 127767 - DNA, 15 bp, Homo sapiens
acactggtctcgaac

SEQ ID NO: 127768 - DNA, 15 bp, Homo sapiens
cactggtctcgaact

SEQ ID NO: 127769 - DNA, 15 bp, Homo sapiens
actggtctcgaactc

SEQ ID NO: 127770 - DNA, 15 bp, Homo sapiens
gtctcgaactcctgg

SEQ ID NO: 127771 - DNA, 15 bp, Homo sapiens
tctcgaactcctggc

SEQ ID NO: 127772 - DNA, 15 bp, Homo sapiens
ctcgaactcctggcc

SEQ ID NO: 127773 - DNA, 15 bp, Homo sapiens
tcgaactcctggcct

SEQ ID NO: 127774 - DNA, 15 bp, Homo sapiens
cgaactcctggcctc

SEQ ID NO: 127775 - DNA, 15 bp, Homo sapiens
gaactcctggcctca

SEQ ID NO: 127776 - DNA, 15 bp, Homo sapiens
aactcctggcctcag

SEQ ID NO: 127777 - DNA, 15 bp, Homo sapiens
actcctggcctcagg

SEQ ID NO: 127778 - DNA, 15 bp, Homo sapiens
ctcctggcctcaggt

SEQ ID NO: 127779 - DNA, 15 bp, Homo sapiens
tcctggcctcaggtg

SEQ ID NO: 127780 - DNA, 15 bp, Homo sapiens
cctggcctcaggtga

SEQ ID NO: 127781 - DNA, 15 bp, Homo sapiens
ctggcctcaggtgat

SEQ ID NO: 127782 - DNA, 15 bp, Homo sapiens
tggcctcaggtgatt

SEQ ID NO: 127783 - DNA, 15 bp, Homo sapiens
ggcctcaggtgattc

SEQ ID NO: 127784 - DNA, 15 bp, Homo sapiens
gcctcaggtgattcg

SEQ ID NO: 127785 - DNA, 15 bp, Homo sapiens
cctcaggtgattcgc

SEQ ID NO: 127786 - DNA, 15 bp, Homo sapiens
ctcaggtgattcgcc

SEQ ID NO: 127787 - DNA, 15 bp, Homo sapiens
tcaggtgattcgccc

SEQ ID NO: 127788 - DNA, 15 bp, Homo sapiens
caggtgattcgcccg

SEQ ID NO: 127789 - DNA, 15 bp, Homo sapiens
aggtgattcgcccgc

SEQ ID NO: 127790 - DNA, 15 bp, Homo sapiens
ggtgattcgcccgcc

SEQ ID NO: 127791 - DNA, 15 bp, Homo sapiens
gtgattcgcccgcct

SEQ ID NO: 127792 - DNA, 15 bp, Homo sapiens
tgattcgcccgcctc

SEQ ID NO: 127793 - DNA, 15 bp, Homo sapiens
gattcgcccgcctca

SEQ ID NO: 127794 - DNA, 15 bp, Homo sapiens
attcgcccgcctcag

SEQ ID NO: 127795 - DNA, 15 bp, Homo sapiens
ttcgcccgcctcagc

SEQ ID NO: 127796 - DNA, 15 bp, Homo sapiens
tcgcccgcctcagcc

SEQ ID NO: 127797 - DNA, 15 bp, Homo sapiens
cgcccgcctcagcct

SEQ ID NO: 127798 - DNA, 15 bp, Homo sapiens
gcccgcctcagcctc

SEQ ID NO: 127799 - DNA, 15 bp, Homo sapiens
cccgcctcagcctcc

SEQ ID NO: 127800 - DNA, 15 bp, Homo sapiens
ccgcctcagcctccc

SEQ ID NO: 127801 - DNA, 15 bp, Homo sapiens
cgcctcagcctccca

SEQ ID NO: 127802 - DNA, 15 bp, Homo sapiens
ggcatgagccaccat

SEQ ID NO: 127803 - DNA, 15 bp, Homo sapiens
tgagccaccatgccc

SEQ ID NO: 127804 - DNA, 15 bp, Homo sapiens
gagccaccatgcccg

SEQ ID NO: 127805 - DNA, 15 bp, Homo sapiens
agccaccatgcccgg

SEQ ID NO: 127806 - DNA, 15 bp, Homo sapiens
gccaccatgcccggc

SEQ ID NO: 127807 - DNA, 15 bp, Homo sapiens
ccaccatgcccggcc

SEQ ID NO: 127808 - DNA, 15 bp, Homo sapiens
caccatgcccggcca

SEQ ID NO: 127809 - DNA, 15 bp, Homo sapiens
accatgcccggccat

SEQ ID NO: 127810 - DNA, 15 bp, Homo sapiens
ccatgcccggccata

SEQ ID NO: 127811 - DNA, 15 bp, Homo sapiens
catgcccggccatat

SEQ ID NO: 127812 - DNA, 15 bp, Homo sapiens
atgcccggccatatc

SEQ ID NO: 127813 - DNA, 15 bp, Homo sapiens
tgcccggccatatcc

SEQ ID NO: 127814 - DNA, 15 bp, Homo sapiens
gcccggccatatcca

SEQ ID NO: 127815 - DNA, 15 bp, Homo sapiens
cccggccatatccat

SEQ ID NO: 127816 - DNA, 15 bp, Homo sapiens
ccggccatatccatg

SEQ ID NO: 127817 - DNA, 15 bp, Homo sapiens
cggccatatccatgc

SEQ ID NO: 127818 - DNA, 15 bp, Homo sapiens
ggccatatccatgca

SEQ ID NO: 127819 - DNA, 15 bp, Homo sapiens
gccatatccatgcac

SEQ ID NO: 127820 - DNA, 15 bp, Homo sapiens
ccatatccatgcact

SEQ ID NO: 127821 - DNA, 15 bp, Homo sapiens
catatccatgcactt

SEQ ID NO: 127822 - DNA, 15 bp, Homo sapiens
atatccatgcacttc

SEQ ID NO: 127823 - DNA, 15 bp, Homo sapiens
tatccatgcacttct

SEQ ID NO: 127824 - DNA, 15 bp, Homo sapiens
atccatgcacttctt

SEQ ID NO: 127825 - DNA, 15 bp, Homo sapiens
tccatgcacttcttg

SEQ ID NO: 127826 - DNA, 15 bp, Homo sapiens
ccatgcacttcttgc

SEQ ID NO: 127827 - DNA, 15 bp, Homo sapiens
catgcacttcttgca

SEQ ID NO: 127828 - DNA, 15 bp, Homo sapiens
atgcacttcttgcaa

SEQ ID NO: 127829 - DNA, 15 bp, Homo sapiens
tgcacttcttgcaac

SEQ ID NO: 127830 - DNA, 15 bp, Homo sapiens
gcacttcttgcaacc

SEQ ID NO: 127831 - DNA, 15 bp, Homo sapiens
cacttcttgcaacct

SEQ ID NO: 127832 - DNA, 15 bp, Homo sapiens
acttcttgcaacctt

SEQ ID NO: 127833 - DNA, 15 bp, Homo sapiens
cttcttgcaacctta

SEQ ID NO: 127834 - DNA, 15 bp, Homo sapiens
ttcttgcaaccttac

SEQ ID NO: 127835 - DNA, 15 bp, Homo sapiens
tcttgcaaccttacc

SEQ ID NO: 127836 - DNA, 15 bp, Homo sapiens
cttgcaaccttacct

SEQ ID NO: 127837 - DNA, 15 bp, Homo sapiens
ttgcaaccttacctt

SEQ ID NO: 127838 - DNA, 15 bp, Homo sapiens
tgcaaccttaccttc

SEQ ID NO: 127839 - DNA, 15 bp, Homo sapiens
gcaaccttaccttct

SEQ ID NO: 127840 - DNA, 15 bp, Homo sapiens
caaccttaccttctt

SEQ ID NO: 127841 - DNA, 15 bp, Homo sapiens
aaccttaccttcttt

SEQ ID NO: 127842 - DNA, 15 bp, Homo sapiens
accttaccttctttt

SEQ ID NO: 127843 - DNA, 15 bp, Homo sapiens
ccttaccttcttttc

SEQ ID NO: 127844 - DNA, 15 bp, Homo sapiens
cttaccttcttttct

SEQ ID NO: 127845 - DNA, 15 bp, Homo sapiens
ttaccttcttttctc

SEQ ID NO: 127846 - DNA, 15 bp, Homo sapiens
taccttcttttctca

SEQ ID NO: 127847 - DNA, 15 bp, Homo sapiens
accttcttttctcat

SEQ ID NO: 127848 - DNA, 15 bp, Homo sapiens
ccttcttttctcatc

SEQ ID NO: 127849 - DNA, 15 bp, Homo sapiens
cttcttttctcatca

SEQ ID NO: 127850 - DNA, 15 bp, Homo sapiens
ttcttttctcatcac

SEQ ID NO: 127851 - DNA, 15 bp, Homo sapiens
tcttttctcatcacc

SEQ ID NO: 127852 - DNA, 15 bp, Homo sapiens
cttttctcatcaccc

SEQ ID NO: 127853 - DNA, 15 bp, Homo sapiens
ttttctcatcaccct

SEQ ID NO: 127854 - DNA, 15 bp, Homo sapiens
tttctcatcaccctc

SEQ ID NO: 127855 - DNA, 15 bp, Homo sapiens
ttctcatcaccctcc

SEQ ID NO: 127856 - DNA, 15 bp, Homo sapiens
tctcatcaccctcca

SEQ ID NO: 127857 - DNA, 15 bp, Homo sapiens
ctcatcaccctccag

SEQ ID NO: 127858 - DNA, 15 bp, Homo sapiens
tcatcaccctccagg

SEQ ID NO: 127859 - DNA, 15 bp, Homo sapiens
catcaccctccaggg

SEQ ID NO: 127860 - DNA, 15 bp, Homo sapiens
atcaccctccaggga

SEQ ID NO: 127861 - DNA, 15 bp, Homo sapiens
tcaccctccagggac

SEQ ID NO: 127862 - DNA, 15 bp, Homo sapiens
caccctccagggacc

SEQ ID NO: 127863 - DNA, 15 bp, Homo sapiens
accctccagggacct

SEQ ID NO: 127864 - DNA, 15 bp, Homo sapiens
ccctccagggaccta

SEQ ID NO: 127865 - DNA, 15 bp, Homo sapiens
cctccagggacctag

SEQ ID NO: 127866 - DNA, 15 bp, Homo sapiens
ctccagggacctagt

SEQ ID NO: 127867 - DNA, 15 bp, Homo sapiens
tccagggacctagtt

SEQ ID NO: 127868 - DNA, 15 bp, Homo sapiens
ccagggacctagttg

SEQ ID NO: 127869 - DNA, 15 bp, Homo sapiens
cagggacctagttgg

SEQ ID NO: 127870 - DNA, 15 bp, Homo sapiens
agggacctagttgga

SEQ ID NO: 127871 - DNA, 15 bp, Homo sapiens
gggacctagttggaa

SEQ ID NO: 127872 - DNA, 15 bp, Homo sapiens
ggacctagttggaag

SEQ ID NO: 127873 - DNA, 15 bp, Homo sapiens
gacctagttggaaga

SEQ ID NO: 127874 - DNA, 15 bp, Homo sapiens
acctagttggaagag

SEQ ID NO: 127875 - DNA, 15 bp, Homo sapiens
cctagttggaagagc

SEQ ID NO: 127876 - DNA, 15 bp, Homo sapiens
ctagttggaagagca

SEQ ID NO: 127877 - DNA, 15 bp, Homo sapiens
tagttggaagagcag

SEQ ID NO: 127878 - DNA, 15 bp, Homo sapiens
agttggaagagcaga

SEQ ID NO: 127879 - DNA, 15 bp, Homo sapiens
gttggaagagcagag

SEQ ID NO: 127880 - DNA, 15 bp, Homo sapiens
ttggaagagcagagt

SEQ ID NO: 127881 - DNA, 15 bp, Homo sapiens
tggaagagcagagtt

SEQ ID NO: 127882 - DNA, 15 bp, Homo sapiens
ggaagagcagagtta

SEQ ID NO: 127883 - DNA, 15 bp, Homo sapiens
gaagagcagagttaa

SEQ ID NO: 127884 - DNA, 15 bp, Homo sapiens
aagagcagagttaaa

SEQ ID NO: 127885 - DNA, 15 bp, Homo sapiens
agagcagagttaaaa

SEQ ID NO: 127886 - DNA, 15 bp, Homo sapiens
gagcagagttaaaag

SEQ ID NO: 127887 - DNA, 15 bp, Homo sapiens
agcagagttaaaagt

SEQ ID NO: 127888 - DNA, 15 bp, Homo sapiens
gcagagttaaaagtt

SEQ ID NO: 127889 - DNA, 15 bp, Homo sapiens
cagagttaaaagtta

SEQ ID NO: 127890 - DNA, 15 bp, Homo sapiens
agagttaaaagttaa

SEQ ID NO: 127891 - DNA, 15 bp, Homo sapiens
gagttaaaagttaag

SEQ ID NO: 127892 - DNA, 15 bp, Homo sapiens
agttaaaagttaagg

SEQ ID NO: 127893 - DNA, 15 bp, Homo sapiens
gttaaaagttaaggt

SEQ ID NO: 127894 - DNA, 15 bp, Homo sapiens
ttaaaagttaaggtg

SEQ ID NO: 127895 - DNA, 15 bp, Homo sapiens
taaaagttaaggtga

SEQ ID NO: 127896 - DNA, 15 bp, Homo sapiens
aaaagttaaggtgaa

SEQ ID NO: 127897 - DNA, 15 bp, Homo sapiens
aaagttaaggtgaaa

SEQ ID NO: 127898 - DNA, 15 bp, Homo sapiens
aagttaaggtgaaac

SEQ ID NO: 127899 - DNA, 15 bp, Homo sapiens
agttaaggtgaaact

SEQ ID NO: 127900 - DNA, 15 bp, Homo sapiens
gttaaggtgaaactt

SEQ ID NO: 127901 - DNA, 15 bp, Homo sapiens
ttaaggtgaaacttg

SEQ ID NO: 127902 - DNA, 15 bp, Homo sapiens
taaggtgaaacttgg

SEQ ID NO: 127903 - DNA, 15 bp, Homo sapiens
aaggtgaaacttgga

SEQ ID NO: 127904 - DNA, 15 bp, Homo sapiens
aggtgaaacttggag

SEQ ID NO: 127905 - DNA, 15 bp, Homo sapiens
ggtgaaacttggaga

SEQ ID NO: 127906 - DNA, 15 bp, Homo sapiens
gtgaaacttggagag

SEQ ID NO: 127907 - DNA, 15 bp, Homo sapiens
tgaaacttggagagg

SEQ ID NO: 127908 - DNA, 15 bp, Homo sapiens
gaaacttggagaggt

SEQ ID NO: 127909 - DNA, 15 bp, Homo sapiens
aaacttggagaggtg

SEQ ID NO: 127910 - DNA, 15 bp, Homo sapiens
aacttggagaggtgt

SEQ ID NO: 127911 - DNA, 15 bp, Homo sapiens
acttggagaggtgtc

SEQ ID NO: 127912 - DNA, 15 bp, Homo sapiens
cttggagaggtgtct

SEQ ID NO: 127913 - DNA, 15 bp, Homo sapiens
ttggagaggtgtctt

SEQ ID NO: 127914 - DNA, 15 bp, Homo sapiens
tggagaggtgtcttg

SEQ ID NO: 127915 - DNA, 15 bp, Homo sapiens
ggagaggtgtcttgt

SEQ ID NO: 127916 - DNA, 15 bp, Homo sapiens
gagaggtgtcttgtc

SEQ ID NO: 127917 - DNA, 15 bp, Homo sapiens
agaggtgtcttgtcc

SEQ ID NO: 127918 - DNA, 15 bp, Homo sapiens
gaggtgtcttgtccc

SEQ ID NO: 127919 - DNA, 15 bp, Homo sapiens
aggtgtcttgtccct

SEQ ID NO: 127920 - DNA, 15 bp, Homo sapiens
ggtgtcttgtcccta

SEQ ID NO: 127921 - DNA, 15 bp, Homo sapiens
gtgtcttgtccctag

SEQ ID NO: 127922 - DNA, 15 bp, Homo sapiens
tgtcttgtccctagg

SEQ ID NO: 127923 - DNA, 15 bp, Homo sapiens
gtcttgtccctagga

SEQ ID NO: 127924 - DNA, 15 bp, Homo sapiens
tcttgtccctaggaa

SEQ ID NO: 127925 - DNA, 15 bp, Homo sapiens
cttgtccctaggaac

SEQ ID NO: 127926 - DNA, 15 bp, Homo sapiens
ttgtccctaggaaca

SEQ ID NO: 127927 - DNA, 15 bp, Homo sapiens
tgtccctaggaacaa

SEQ ID NO: 127928 - DNA, 15 bp, Homo sapiens
gtccctaggaacaaa

SEQ ID NO: 127929 - DNA, 15 bp, Homo sapiens
tccctaggaacaaag

SEQ ID NO: 127930 - DNA, 15 bp, Homo sapiens
ccctaggaacaaagg

SEQ ID NO: 127931 - DNA, 15 bp, Homo sapiens
cctaggaacaaagga

SEQ ID NO: 127932 - DNA, 15 bp, Homo sapiens
ctaggaacaaaggac

SEQ ID NO: 127933 - DNA, 15 bp, Homo sapiens
taggaacaaaggact

SEQ ID NO: 127934 - DNA, 15 bp, Homo sapiens
aggaacaaaggactg

SEQ ID NO: 127935 - DNA, 15 bp, Homo sapiens
ggaacaaaggactgg

SEQ ID NO: 127936 - DNA, 15 bp, Homo sapiens
gaacaaaggactggt

SEQ ID NO: 127937 - DNA, 15 bp, Homo sapiens
aacaaaggactggtt

SEQ ID NO: 127938 - DNA, 15 bp, Homo sapiens
acaaaggactggttt

SEQ ID NO: 127939 - DNA, 15 bp, Homo sapiens
caaaggactggtttg

SEQ ID NO: 127940 - DNA, 15 bp, Homo sapiens
aaaggactggtttga

SEQ ID NO: 127941 - DNA, 15 bp, Homo sapiens
aaggactggtttgaa

SEQ ID NO: 127942 - DNA, 15 bp, Homo sapiens
aggactggtttgaaa

SEQ ID NO: 127943 - DNA, 15 bp, Homo sapiens
ggactggtttgaaat

SEQ ID NO: 127944 - DNA, 15 bp, Homo sapiens
gactggtttgaaatt

SEQ ID NO: 127945 - DNA, 15 bp, Homo sapiens
actggtttgaaattc

SEQ ID NO: 127946 - DNA, 15 bp, Homo sapiens
ctggtttgaaattct

SEQ ID NO: 127947 - DNA, 15 bp, Homo sapiens
tggtttgaaattctc

SEQ ID NO: 127948 - DNA, 15 bp, Homo sapiens
ggtttgaaattctct

SEQ ID NO: 127949 - DNA, 15 bp, Homo sapiens
gtttgaaattctctg

SEQ ID NO: 127950 - DNA, 15 bp, Homo sapiens
tttgaaattctctgt

SEQ ID NO: 127951 - DNA, 15 bp, Homo sapiens
ttgaaattctctgta

SEQ ID NO: 127952 - DNA, 15 bp, Homo sapiens
tgaaattctctgtaa

SEQ ID NO: 127953 - DNA, 15 bp, Homo sapiens
gaaattctctgtaaa

SEQ ID NO: 127954 - DNA, 15 bp, Homo sapiens
aaattctctgtaaat

SEQ ID NO: 127955 - DNA, 15 bp, Homo sapiens
aattctctgtaaatc

SEQ ID NO: 127956 - DNA, 15 bp, Homo sapiens
attctctgtaaatct

SEQ ID NO: 127957 - DNA, 15 bp, Homo sapiens
ttctctgtaaatctt

SEQ ID NO: 127958 - DNA, 15 bp, Homo sapiens
tctctgtaaatcttc

SEQ ID NO: 127959 - DNA, 15 bp, Homo sapiens
ctctgtaaatcttcc

SEQ ID NO: 127960 - DNA, 15 bp, Homo sapiens
tctgtaaatcttccc

SEQ ID NO: 127961 - DNA, 15 bp, Homo sapiens
ctgtaaatcttcccc

SEQ ID NO: 127962 - DNA, 15 bp, Homo sapiens
tgtaaatcttcccca

SEQ ID NO: 127963 - DNA, 15 bp, Homo sapiens
gtaaatcttccccag

SEQ ID NO: 127964 - DNA, 15 bp, Homo sapiens
taaatcttccccagt

SEQ ID NO: 127965 - DNA, 15 bp, Homo sapiens
aaatcttccccagtt

SEQ ID NO: 127966 - DNA, 15 bp, Homo sapiens
aatcttccccagttc

SEQ ID NO: 127967 - DNA, 15 bp, Homo sapiens
atcttccccagttca

SEQ ID NO: 127968 - DNA, 15 bp, Homo sapiens
tcttccccagttcaa

SEQ ID NO: 127969 - DNA, 15 bp, Homo sapiens
cttccccagttcaaa

SEQ ID NO: 127970 - DNA, 15 bp, Homo sapiens
ttccccagttcaaac

SEQ ID NO: 127971 - DNA, 15 bp, Homo sapiens
tccccagttcaaacc

SEQ ID NO: 127972 - DNA, 15 bp, Homo sapiens
ccccagttcaaacca

SEQ ID NO: 127973 - DNA, 15 bp, Homo sapiens
cccagttcaaaccag

SEQ ID NO: 127974 - DNA, 15 bp, Homo sapiens
ccagttcaaaccaga

SEQ ID NO: 127975 - DNA, 15 bp, Homo sapiens
cagttcaaaccagag

SEQ ID NO: 127976 - DNA, 15 bp, Homo sapiens
agttcaaaccagagt

SEQ ID NO: 127977 - DNA, 15 bp, Homo sapiens
gttcaaaccagagtt

SEQ ID NO: 127978 - DNA, 15 bp, Homo sapiens
ttcaaaccagagtta

SEQ ID NO: 127979 - DNA, 15 bp, Homo sapiens
tcaaaccagagttat

SEQ ID NO: 127980 - DNA, 15 bp, Homo sapiens
caaaccagagttatc

SEQ ID NO: 127981 - DNA, 15 bp, Homo sapiens
aaaccagagttatca

SEQ ID NO: 127982 - DNA, 15 bp, Homo sapiens
aaccagagttatcaa

SEQ ID NO: 127983 - DNA, 15 bp, Homo sapiens
accagagttatcaag

SEQ ID NO: 127984 - DNA, 15 bp, Homo sapiens
ccagagttatcaagg

SEQ ID NO: 127985 - DNA, 15 bp, Homo sapiens
cagagttatcaaggt

SEQ ID NO: 127986 - DNA, 15 bp, Homo sapiens
agagttatcaaggtc

SEQ ID NO: 127987 - DNA, 15 bp, Homo sapiens
gagttatcaaggtct

SEQ ID NO: 127988 - DNA, 15 bp, Homo sapiens
agttatcaaggtctt

SEQ ID NO: 127989 - DNA, 15 bp, Homo sapiens
gttatcaaggtctta

SEQ ID NO: 127990 - DNA, 15 bp, Homo sapiens
ttatcaaggtcttaa

SEQ ID NO: 127991 - DNA, 15 bp, Homo sapiens
tatcaaggtcttaaa

SEQ ID NO: 127992 - DNA, 15 bp, Homo sapiens
atcaaggtcttaaaa

SEQ ID NO: 127993 - DNA, 15 bp, Homo sapiens
tcaaggtcttaaaaa

SEQ ID NO: 127994 - DNA, 15 bp, Homo sapiens
caaggtcttaaaaac

SEQ ID NO: 127995 - DNA, 15 bp, Homo sapiens
aaggtcttaaaaact

SEQ ID NO: 127996 - DNA, 15 bp, Homo sapiens
aggtcttaaaaactt

SEQ ID NO: 127997 - DNA, 15 bp, Homo sapiens
ggtcttaaaaacttc

SEQ ID NO: 127998 - DNA, 15 bp, Homo sapiens
gtcttaaaaacttcc

SEQ ID NO: 127999 - DNA, 15 bp, Homo sapiens
tcttaaaaacttccc

SEQ ID NO: 128000 - DNA, 15 bp, Homo sapiens
cttaaaaacttccct

SEQ ID NO: 128001 - DNA, 15 bp, Homo sapiens
ttaaaaacttccctg

SEQ ID NO: 128002 - DNA, 15 bp, Homo sapiens
taaaaacttccctgg

SEQ ID NO: 128003 - DNA, 15 bp, Homo sapiens
aaaaacttccctggg

SEQ ID NO: 128004 - DNA, 15 bp, Homo sapiens
aaaacttccctgggt

SEQ ID NO: 128005 - DNA, 15 bp, Homo sapiens
aaacttccctgggtc

SEQ ID NO: 128006 - DNA, 15 bp, Homo sapiens
aacttccctgggtcc

SEQ ID NO: 128007 - DNA, 15 bp, Homo sapiens
acttccctgggtcct

SEQ ID NO: 128008 - DNA, 15 bp, Homo sapiens
cttccctgggtcctg

SEQ ID NO: 128009 - DNA, 15 bp, Homo sapiens
ttccctgggtcctga

SEQ ID NO: 128010 - DNA, 15 bp, Homo sapiens
tccctgggtcctgag

SEQ ID NO: 128011 - DNA, 15 bp, Homo sapiens
ccctgggtcctgaga

SEQ ID NO: 128012 - DNA, 15 bp, Homo sapiens
cctgggtcctgagag

SEQ ID NO: 128013 - DNA, 15 bp, Homo sapiens
ctgggtcctgagagc

SEQ ID NO: 128014 - DNA, 15 bp, Homo sapiens
tgggtcctgagagcc

SEQ ID NO: 128015 - DNA, 15 bp, Homo sapiens
gggtcctgagagccc

SEQ ID NO: 128016 - DNA, 15 bp, Homo sapiens
ggtcctgagagccca

SEQ ID NO: 128017 - DNA, 15 bp, Homo sapiens
gtcctgagagcccat

SEQ ID NO: 128018 - DNA, 15 bp, Homo sapiens
tcctgagagcccatt

SEQ ID NO: 128019 - DNA, 15 bp, Homo sapiens
cctgagagcccatta

SEQ ID NO: 128020 - DNA, 15 bp, Homo sapiens
ctgagagcccattat

SEQ ID NO: 128021 - DNA, 15 bp, Homo sapiens
tgagagcccattata

SEQ ID NO: 128022 - DNA, 15 bp, Homo sapiens
gagagcccattatat

SEQ ID NO: 128023 - DNA, 15 bp, Homo sapiens
agagcccattatatt

SEQ ID NO: 128024 - DNA, 15 bp, Homo sapiens
gagcccattatatta

SEQ ID NO: 128025 - DNA, 15 bp, Homo sapiens
agcccattatattat

SEQ ID NO: 128026 - DNA, 15 bp, Homo sapiens
gcccattatattatt

SEQ ID NO: 128027 - DNA, 15 bp, Homo sapiens
cccattatattattt

SEQ ID NO: 128028 - DNA, 15 bp, Homo sapiens
ccattatattattta

SEQ ID NO: 128029 - DNA, 15 bp, Homo sapiens
cattatattatttac

SEQ ID NO: 128030 - DNA, 15 bp, Homo sapiens
attatattatttact

SEQ ID NO: 128031 - DNA, 15 bp, Homo sapiens
ttatattatttactt

SEQ ID NO: 128032 - DNA, 15 bp, Homo sapiens
tatattatttacttg

SEQ ID NO: 128033 - DNA, 15 bp, Homo sapiens
atattatttacttgt

SEQ ID NO: 128034 - DNA, 15 bp, Homo sapiens
tattatttacttgtc

SEQ ID NO: 128035 - DNA, 15 bp, Homo sapiens
attatttacttgtct

SEQ ID NO: 128036 - DNA, 15 bp, Homo sapiens
ttatttacttgtctt

SEQ ID NO: 128037 - DNA, 15 bp, Homo sapiens
tatttacttgtcttc

SEQ ID NO: 128038 - DNA, 15 bp, Homo sapiens
atttacttgtcttcc

SEQ ID NO: 128039 - DNA, 15 bp, Homo sapiens
tttacttgtcttcct

SEQ ID NO: 128040 - DNA, 15 bp, Homo sapiens
ttacttgtcttcctg

SEQ ID NO: 128041 - DNA, 15 bp, Homo sapiens
tacttgtcttcctgt

SEQ ID NO: 128042 - DNA, 15 bp, Homo sapiens
acttgtcttcctgta

SEQ ID NO: 128043 - DNA, 15 bp, Homo sapiens
cttgtcttcctgtac

SEQ ID NO: 128044 - DNA, 15 bp, Homo sapiens
ttgtcttcctgtaca

SEQ ID NO: 128045 - DNA, 15 bp, Homo sapiens
tgtcttcctgtacac

SEQ ID NO: 128046 - DNA, 15 bp, Homo sapiens
gtcttcctgtacacc

SEQ ID NO: 128047 - DNA, 15 bp, Homo sapiens
tcttcctgtacaccc

SEQ ID NO: 128048 - DNA, 15 bp, Homo sapiens
cttcctgtacaccca

SEQ ID NO: 128049 - DNA, 15 bp, Homo sapiens
ttcctgtacacccac

SEQ ID NO: 128050 - DNA, 15 bp, Homo sapiens
tcctgtacacccact

SEQ ID NO: 128051 - DNA, 15 bp, Homo sapiens
cctgtacacccactg

SEQ ID NO: 128052 - DNA, 15 bp, Homo sapiens
ctgtacacccactgc

SEQ ID NO: 128053 - DNA, 15 bp, Homo sapiens
tgtacacccactgcc

SEQ ID NO: 128054 - DNA, 15 bp, Homo sapiens
gtacacccactgcct

SEQ ID NO: 128055 - DNA, 15 bp, Homo sapiens
tacacccactgccta

SEQ ID NO: 128056 - DNA, 15 bp, Homo sapiens
acacccactgcctag

SEQ ID NO: 128057 - DNA, 15 bp, Homo sapiens
cacccactgcctagt

SEQ ID NO: 128058 - DNA, 15 bp, Homo sapiens
acccactgcctagtc

SEQ ID NO: 128059 - DNA, 15 bp, Homo sapiens
cccactgcctagtcc

SEQ ID NO: 128060 - DNA, 15 bp, Homo sapiens
ccactgcctagtcct

SEQ ID NO: 128061 - DNA, 15 bp, Homo sapiens
cactgcctagtcctg

SEQ ID NO: 128062 - DNA, 15 bp, Homo sapiens
actgcctagtcctga

SEQ ID NO: 128063 - DNA, 15 bp, Homo sapiens
ctgcctagtcctgat

SEQ ID NO: 128064 - DNA, 15 bp, Homo sapiens
tgcctagtcctgatc

SEQ ID NO: 128065 - DNA, 15 bp, Homo sapiens
gcctagtcctgatcc

SEQ ID NO: 128066 - DNA, 15 bp, Homo sapiens
cctagtcctgatcct

SEQ ID NO: 128067 - DNA, 15 bp, Homo sapiens
ctagtcctgatccta

SEQ ID NO: 128068 - DNA, 15 bp, Homo sapiens
tagtcctgatcctac

SEQ ID NO: 128069 - DNA, 15 bp, Homo sapiens
agtcctgatcctact

SEQ ID NO: 128070 - DNA, 15 bp, Homo sapiens
gtcctgatcctactt

SEQ ID NO: 128071 - DNA, 15 bp, Homo sapiens
tcctgatcctacttt

SEQ ID NO: 128072 - DNA, 15 bp, Homo sapiens
cctgatcctactttt

SEQ ID NO: 128073 - DNA, 15 bp, Homo sapiens
ctgatcctacttttg

SEQ ID NO: 128074 - DNA, 15 bp, Homo sapiens
tgatcctacttttgt

SEQ ID NO: 128075 - DNA, 15 bp, Homo sapiens
gatcctacttttgtt

SEQ ID NO: 128076 - DNA, 15 bp, Homo sapiens
atcctacttttgttt

SEQ ID NO: 128077 - DNA, 15 bp, Homo sapiens
tcctacttttgtttg

SEQ ID NO: 128078 - DNA, 15 bp, Homo sapiens
cctacttttgtttgc

SEQ ID NO: 128079 - DNA, 15 bp, Homo sapiens
ctacttttgtttgca

SEQ ID NO: 128080 - DNA, 15 bp, Homo sapiens
tacttttgtttgcaa

SEQ ID NO: 128081 - DNA, 15 bp, Homo sapiens
acttttgtttgcaaa

SEQ ID NO: 128082 - DNA, 15 bp, Homo sapiens
cttttgtttgcaaat

SEQ ID NO: 128083 - DNA, 15 bp, Homo sapiens
ttttgtttgcaaata

SEQ ID NO: 128084 - DNA, 15 bp, Homo sapiens
tttgtttgcaaatag

SEQ ID NO: 128085 - DNA, 15 bp, Homo sapiens
ttgtttgcaaatagg

SEQ ID NO: 128086 - DNA, 15 bp, Homo sapiens
tgtttgcaaatagga

SEQ ID NO: 128087 - DNA, 15 bp, Homo sapiens
gtttgcaaataggat

SEQ ID NO: 128088 - DNA, 15 bp, Homo sapiens
tttgcaaataggatg

SEQ ID NO: 128089 - DNA, 15 bp, Homo sapiens
ttgcaaataggatgg

SEQ ID NO: 128090 - DNA, 15 bp, Homo sapiens
tgcaaataggatggg

SEQ ID NO: 128091 - DNA, 15 bp, Homo sapiens
gcaaataggatgggg

SEQ ID NO: 128092 - DNA, 15 bp, Homo sapiens
caaataggatggggc

SEQ ID NO: 128093 - DNA, 15 bp, Homo sapiens
aaataggatggggca

SEQ ID NO: 128094 - DNA, 15 bp, Homo sapiens
aataggatggggcac

SEQ ID NO: 128095 - DNA, 15 bp, Homo sapiens
ataggatggggcaca

SEQ ID NO: 128096 - DNA, 15 bp, Homo sapiens
taggatggggcacaa

SEQ ID NO: 128097 - DNA, 15 bp, Homo sapiens
aggatggggcacaac

SEQ ID NO: 128098 - DNA, 15 bp, Homo sapiens
ggatggggcacaacg

SEQ ID NO: 128099 - DNA, 15 bp, Homo sapiens
gatggggcacaacgt

SEQ ID NO: 128100 - DNA, 15 bp, Homo sapiens
atggggcacaacgta

SEQ ID NO: 128101 - DNA, 15 bp, Homo sapiens
tggggcacaacgtac

SEQ ID NO: 128102 - DNA, 15 bp, Homo sapiens
ggggcacaacgtaca

SEQ ID NO: 128103 - DNA, 15 bp, Homo sapiens
gggcacaacgtacaa

SEQ ID NO: 128104 - DNA, 15 bp, Homo sapiens
ggcacaacgtacaag

SEQ ID NO: 128105 - DNA, 15 bp, Homo sapiens
gcacaacgtacaagg

SEQ ID NO: 128106 - DNA, 15 bp, Homo sapiens
cacaacgtacaagga

SEQ ID NO: 128107 - DNA, 15 bp, Homo sapiens
acaacgtacaaggaa

SEQ ID NO: 128108 - DNA, 15 bp, Homo sapiens
caacgtacaaggaag

SEQ ID NO: 128109 - DNA, 15 bp, Homo sapiens
aacgtacaaggaagg

SEQ ID NO: 128110 - DNA, 15 bp, Homo sapiens
acgtacaaggaaggg

SEQ ID NO: 128111 - DNA, 15 bp, Homo sapiens
cgtacaaggaagggc

SEQ ID NO: 128112 - DNA, 15 bp, Homo sapiens
gtacaaggaagggcc

SEQ ID NO: 128113 - DNA, 15 bp, Homo sapiens
tacaaggaagggcct

SEQ ID NO: 128114 - DNA, 15 bp, Homo sapiens
acaaggaagggcctt

SEQ ID NO: 128115 - DNA, 15 bp, Homo sapiens
caaggaagggccttt

SEQ ID NO: 128116 - DNA, 15 bp, Homo sapiens
aaggaagggcctttg

SEQ ID NO: 128117 - DNA, 15 bp, Homo sapiens
aggaagggcctttgc

SEQ ID NO: 128118 - DNA, 15 bp, Homo sapiens
ggaagggcctttgcc

SEQ ID NO: 128119 - DNA, 15 bp, Homo sapiens
gaagggcctttgcca

SEQ ID NO: 128120 - DNA, 15 bp, Homo sapiens
aagggcctttgccac

SEQ ID NO: 128121 - DNA, 15 bp, Homo sapiens
agggcctttgccacc

SEQ ID NO: 128122 - DNA, 15 bp, Homo sapiens
gggcctttgccaccc

SEQ ID NO: 128123 - DNA, 15 bp, Homo sapiens
ggcctttgccacccc

SEQ ID NO: 128124 - DNA, 15 bp, Homo sapiens
gcctttgccacccct

SEQ ID NO: 128125 - DNA, 15 bp, Homo sapiens
cctttgccacccctg

SEQ ID NO: 128126 - DNA, 15 bp, Homo sapiens
ctttgccacccctgc

SEQ ID NO: 128127 - DNA, 15 bp, Homo sapiens
tttgccacccctgct

SEQ ID NO: 128128 - DNA, 15 bp, Homo sapiens
ttgccacccctgcta

SEQ ID NO: 128129 - DNA, 15 bp, Homo sapiens
tgccacccctgctaa

SEQ ID NO: 128130 - DNA, 15 bp, Homo sapiens
gccacccctgctaag

SEQ ID NO: 128131 - DNA, 15 bp, Homo sapiens
ccacccctgctaagg

SEQ ID NO: 128132 - DNA, 15 bp, Homo sapiens
cacccctgctaaggg

SEQ ID NO: 128133 - DNA, 15 bp, Homo sapiens
acccctgctaaggga

SEQ ID NO: 128134 - DNA, 15 bp, Homo sapiens
cccctgctaagggat

SEQ ID NO: 128135 - DNA, 15 bp, Homo sapiens
ccctgctaagggata

SEQ ID NO: 128136 - DNA, 15 bp, Homo sapiens
cctgctaagggataa

SEQ ID NO: 128137 - DNA, 15 bp, Homo sapiens
ctgctaagggataac

SEQ ID NO: 128138 - DNA, 15 bp, Homo sapiens
tgctaagggataacc

SEQ ID NO: 128139 - DNA, 15 bp, Homo sapiens
gctaagggataacct

SEQ ID NO: 128140 - DNA, 15 bp, Homo sapiens
ctaagggataacctg

SEQ ID NO: 128141 - DNA, 15 bp, Homo sapiens
taagggataacctga

SEQ ID NO: 128142 - DNA, 15 bp, Homo sapiens
aagggataacctgaa

SEQ ID NO: 128143 - DNA, 15 bp, Homo sapiens
agggataacctgaaa

SEQ ID NO: 128144 - DNA, 15 bp, Homo sapiens
gggataacctgaaat

SEQ ID NO: 128145 - DNA, 15 bp, Homo sapiens
ggataacctgaaata

SEQ ID NO: 128146 - DNA, 15 bp, Homo sapiens
gataacctgaaatac

SEQ ID NO: 128147 - DNA, 15 bp, Homo sapiens
ataacctgaaatacc

SEQ ID NO: 128148 - DNA, 15 bp, Homo sapiens
taacctgaaatacct

SEQ ID NO: 128149 - DNA, 15 bp, Homo sapiens
aacctgaaatacctt

SEQ ID NO: 128150 - DNA, 15 bp, Homo sapiens
acctgaaataccttc

SEQ ID NO: 128151 - DNA, 15 bp, Homo sapiens
cctgaaataccttca

SEQ ID NO: 128152 - DNA, 15 bp, Homo sapiens
ctgaaataccttcac

SEQ ID NO: 128153 - DNA, 15 bp, Homo sapiens
tgaaataccttcacc

SEQ ID NO: 128154 - DNA, 15 bp, Homo sapiens
gaaataccttcacca

SEQ ID NO: 128155 - DNA, 15 bp, Homo sapiens
aaataccttcaccat

SEQ ID NO: 128156 - DNA, 15 bp, Homo sapiens
aataccttcaccatc

SEQ ID NO: 128157 - DNA, 15 bp, Homo sapiens
ataccttcaccatca

SEQ ID NO: 128158 - DNA, 15 bp, Homo sapiens
taccttcaccatcac

SEQ ID NO: 128159 - DNA, 15 bp, Homo sapiens
accttcaccatcact

SEQ ID NO: 128160 - DNA, 15 bp, Homo sapiens
ccttcaccatcactg

SEQ ID NO: 128161 - DNA, 15 bp, Homo sapiens
cttcaccatcactgc

SEQ ID NO: 128162 - DNA, 15 bp, Homo sapiens
ttcaccatcactgcc

SEQ ID NO: 128163 - DNA, 15 bp, Homo sapiens
tcaccatcactgccc

SEQ ID NO: 128164 - DNA, 15 bp, Homo sapiens
caccatcactgccct

SEQ ID NO: 128165 - DNA, 15 bp, Homo sapiens
accatcactgccctg

SEQ ID NO: 128166 - DNA, 15 bp, Homo sapiens
ccatcactgccctgt

SEQ ID NO: 128167 - DNA, 15 bp, Homo sapiens
catcactgccctgtg

SEQ ID NO: 128168 - DNA, 15 bp, Homo sapiens
atcactgccctgtgc

SEQ ID NO: 128169 - DNA, 15 bp, Homo sapiens
tcactgccctgtgct

SEQ ID NO: 128170 - DNA, 15 bp, Homo sapiens
cactgccctgtgctg

SEQ ID NO: 128171 - DNA, 15 bp, Homo sapiens
actgccctgtgctgc

SEQ ID NO: 128172 - DNA, 15 bp, Homo sapiens
ctgccctgtgctgct

SEQ ID NO: 128173 - DNA, 15 bp, Homo sapiens
tgccctgtgctgctt

SEQ ID NO: 128174 - DNA, 15 bp, Homo sapiens
gccctgtgctgcttt

SEQ ID NO: 128175 - DNA, 15 bp, Homo sapiens
ccctgtgctgctttt

SEQ ID NO: 128176 - DNA, 15 bp, Homo sapiens
cctgtgctgcttttc

SEQ ID NO: 128177 - DNA, 15 bp, Homo sapiens
ctgtgctgcttttca

SEQ ID NO: 128178 - DNA, 15 bp, Homo sapiens
tgtgctgcttttcac

SEQ ID NO: 128179 - DNA, 15 bp, Homo sapiens
gtgctgcttttcacc

SEQ ID NO: 128180 - DNA, 15 bp, Homo sapiens
tgctgcttttcacct

SEQ ID NO: 128181 - DNA, 15 bp, Homo sapiens
gctgcttttcaccta

SEQ ID NO: 128182 - DNA, 15 bp, Homo sapiens
ctgcttttcacctat

SEQ ID NO: 128183 - DNA, 15 bp, Homo sapiens
tgcttttcacctatg

SEQ ID NO: 128184 - DNA, 15 bp, Homo sapiens
gcttttcacctatgc

SEQ ID NO: 128185 - DNA, 15 bp, Homo sapiens
cttttcacctatgcc

SEQ ID NO: 128186 - DNA, 15 bp, Homo sapiens
ttttcacctatgcca

SEQ ID NO: 128187 - DNA, 15 bp, Homo sapiens
tttcacctatgccag

SEQ ID NO: 128188 - DNA, 15 bp, Homo sapiens
ttcacctatgccagt

SEQ ID NO: 128189 - DNA, 15 bp, Homo sapiens
tcacctatgccagtc

SEQ ID NO: 128190 - DNA, 15 bp, Homo sapiens
cacctatgccagtct

SEQ ID NO: 128191 - DNA, 15 bp, Homo sapiens
acctatgccagtctg

SEQ ID NO: 128192 - DNA, 15 bp, Homo sapiens
cctatgccagtctgt

SEQ ID NO: 128193 - DNA, 15 bp, Homo sapiens
ctatgccagtctgtc

SEQ ID NO: 128194 - DNA, 15 bp, Homo sapiens
tatgccagtctgtct

SEQ ID NO: 128195 - DNA, 15 bp, Homo sapiens
atgccagtctgtcta

SEQ ID NO: 128196 - DNA, 15 bp, Homo sapiens
tgccagtctgtctac

SEQ ID NO: 128197 - DNA, 15 bp, Homo sapiens
gccagtctgtctaca

SEQ ID NO: 128198 - DNA, 15 bp, Homo sapiens
ccagtctgtctacag

SEQ ID NO: 128199 - DNA, 15 bp, Homo sapiens
cagtctgtctacagt

SEQ ID NO: 128200 - DNA, 15 bp, Homo sapiens
agtctgtctacagtg

SEQ ID NO: 128201 - DNA, 15 bp, Homo sapiens
gtctgtctacagtgc

SEQ ID NO: 128202 - DNA, 15 bp, Homo sapiens
tctgtctacagtgcc

SEQ ID NO: 128203 - DNA, 15 bp, Homo sapiens
ctgtctacagtgcca

SEQ ID NO: 128204 - DNA, 15 bp, Homo sapiens
tgtctacagtgccag

SEQ ID NO: 128205 - DNA, 15 bp, Homo sapiens
gtctacagtgccagt

SEQ ID NO: 128206 - DNA, 15 bp, Homo sapiens
tctacagtgccagtg

SEQ ID NO: 128207 - DNA, 15 bp, Homo sapiens
ctacagtgccagtgt

SEQ ID NO: 128208 - DNA, 15 bp, Homo sapiens
tacagtgccagtgtc

SEQ ID NO: 128209 - DNA, 15 bp, Homo sapiens
acagtgccagtgtct

SEQ ID NO: 128210 - DNA, 15 bp, Homo sapiens
cagtgccagtgtctc

SEQ ID NO: 128211 - DNA, 15 bp, Homo sapiens
agtgccagtgtctcc

SEQ ID NO: 128212 - DNA, 15 bp, Homo sapiens
gtgccagtgtctcct

SEQ ID NO: 128213 - DNA, 15 bp, Homo sapiens
tgccagtgtctcctg

SEQ ID NO: 128214 - DNA, 15 bp, Homo sapiens
gccagtgtctcctgg

SEQ ID NO: 128215 - DNA, 15 bp, Homo sapiens
ccagtgtctcctggc

SEQ ID NO: 128216 - DNA, 15 bp, Homo sapiens
cagtgtctcctggca

SEQ ID NO: 128217 - DNA, 15 bp, Homo sapiens
agtgtctcctggcat

SEQ ID NO: 128218 - DNA, 15 bp, Homo sapiens
gtgtctcctggcatt

SEQ ID NO: 128219 - DNA, 15 bp, Homo sapiens
tgtctcctggcattg

SEQ ID NO: 128220 - DNA, 15 bp, Homo sapiens
gtctcctggcattga

SEQ ID NO: 128221 - DNA, 15 bp, Homo sapiens
tctcctggcattgaa

SEQ ID NO: 128222 - DNA, 15 bp, Homo sapiens
ctcctggcattgaaa

SEQ ID NO: 128223 - DNA, 15 bp, Homo sapiens
tcctggcattgaaag

SEQ ID NO: 128224 - DNA, 15 bp, Homo sapiens
cctggcattgaaagg

SEQ ID NO: 128225 - DNA, 15 bp, Homo sapiens
ctggcattgaaaggg

SEQ ID NO: 128226 - DNA, 15 bp, Homo sapiens
tggcattgaaagggg

SEQ ID NO: 128227 - DNA, 15 bp, Homo sapiens
ggcattgaaagggga

SEQ ID NO: 128228 - DNA, 15 bp, Homo sapiens
gcattgaaaggggag

SEQ ID NO: 128229 - DNA, 15 bp, Homo sapiens
cattgaaaggggaga

SEQ ID NO: 128230 - DNA, 15 bp, Homo sapiens
attgaaaggggagaa

SEQ ID NO: 128231 - DNA, 15 bp, Homo sapiens
ttgaaaggggagaat

SEQ ID NO: 128232 - DNA, 15 bp, Homo sapiens
tgaaaggggagaatc

SEQ ID NO: 128233 - DNA, 15 bp, Homo sapiens
gaaaggggagaatct

SEQ ID NO: 128234 - DNA, 15 bp, Homo sapiens
aaaggggagaatctt

SEQ ID NO: 128235 - DNA, 15 bp, Homo sapiens
aaggggagaatcttt

SEQ ID NO: 128236 - DNA, 15 bp, Homo sapiens
aggggagaatctttt

SEQ ID NO: 128237 - DNA, 15 bp, Homo sapiens
ggggagaatcttttg

SEQ ID NO: 128238 - DNA, 15 bp, Homo sapiens
gggagaatcttttgg

SEQ ID NO: 128239 - DNA, 15 bp, Homo sapiens
ggagaatcttttggt

SEQ ID NO: 128240 - DNA, 15 bp, Homo sapiens
gagaatcttttggtc

SEQ ID NO: 128241 - DNA, 15 bp, Homo sapiens
agaatcttttggtcc

SEQ ID NO: 128242 - DNA, 15 bp, Homo sapiens
gaatcttttggtcct

SEQ ID NO: 128243 - DNA, 15 bp, Homo sapiens
aatcttttggtcctt

SEQ ID NO: 128244 - DNA, 15 bp, Homo sapiens
atcttttggtccttt

SEQ ID NO: 128245 - DNA, 15 bp, Homo sapiens
tcttttggtcctttg

SEQ ID NO: 128246 - DNA, 15 bp, Homo sapiens
cttttggtcctttga

SEQ ID NO: 128247 - DNA, 15 bp, Homo sapiens
ttttggtcctttgag

SEQ ID NO: 128248 - DNA, 15 bp, Homo sapiens
tttggtcctttgagt

SEQ ID NO: 128249 - DNA, 15 bp, Homo sapiens
ttggtcctttgagta

SEQ ID NO: 128250 - DNA, 15 bp, Homo sapiens
tggtcctttgagtat

SEQ ID NO: 128251 - DNA, 15 bp, Homo sapiens
ggtcctttgagtatt

SEQ ID NO: 128252 - DNA, 15 bp, Homo sapiens
gtcctttgagtattt

SEQ ID NO: 128253 - DNA, 15 bp, Homo sapiens
tcctttgagtatttg

SEQ ID NO: 128254 - DNA, 15 bp, Homo sapiens
cctttgagtatttgg

SEQ ID NO: 128255 - DNA, 15 bp, Homo sapiens
ctttgagtatttggt

SEQ ID NO: 128256 - DNA, 15 bp, Homo sapiens
tttgagtatttggtt

SEQ ID NO: 128257 - DNA, 15 bp, Homo sapiens
ttgagtatttggttg

SEQ ID NO: 128258 - DNA, 15 bp, Homo sapiens
tgagtatttggttgg

SEQ ID NO: 128259 - DNA, 15 bp, Homo sapiens
gagtatttggttggg

SEQ ID NO: 128260 - DNA, 15 bp, Homo sapiens
agtatttggttgggt

SEQ ID NO: 128261 - DNA, 15 bp, Homo sapiens
gtatttggttgggtt

SEQ ID NO: 128262 - DNA, 15 bp, Homo sapiens
tatttggttgggtta

SEQ ID NO: 128263 - DNA, 15 bp, Homo sapiens
atttggttgggttac

SEQ ID NO: 128264 - DNA, 15 bp, Homo sapiens
tttggttgggttaca

SEQ ID NO: 128265 - DNA, 15 bp, Homo sapiens
ttggttgggttacat

SEQ ID NO: 128266 - DNA, 15 bp, Homo sapiens
tggttgggttacata

SEQ ID NO: 128267 - DNA, 15 bp, Homo sapiens
ggttgggttacataa

SEQ ID NO: 128268 - DNA, 15 bp, Homo sapiens
gttgggttacataaa

SEQ ID NO: 128269 - DNA, 15 bp, Homo sapiens
ttgggttacataaat

SEQ ID NO: 128270 - DNA, 15 bp, Homo sapiens
tgggttacataaatc

SEQ ID NO: 128271 - DNA, 15 bp, Homo sapiens
gggttacataaatct

SEQ ID NO: 128272 - DNA, 15 bp, Homo sapiens
ggttacataaatctc

SEQ ID NO: 128273 - DNA, 15 bp, Homo sapiens
gttacataaatctcc

SEQ ID NO: 128274 - DNA, 15 bp, Homo sapiens
ttacataaatctccc

SEQ ID NO: 128275 - DNA, 15 bp, Homo sapiens
tacataaatctccct

SEQ ID NO: 128276 - DNA, 15 bp, Homo sapiens
acataaatctccctg

SEQ ID NO: 128277 - DNA, 15 bp, Homo sapiens
cataaatctccctga

SEQ ID NO: 128278 - DNA, 15 bp, Homo sapiens
ataaatctccctgaa

SEQ ID NO: 128279 - DNA, 15 bp, Homo sapiens
taaatctccctgaat

SEQ ID NO: 128280 - DNA, 15 bp, Homo sapiens
aaatctccctgaatg

SEQ ID NO: 128281 - DNA, 15 bp, Homo sapiens
aatctccctgaatga

SEQ ID NO: 128282 - DNA, 15 bp, Homo sapiens
atctccctgaatgaa

SEQ ID NO: 128283 - DNA, 15 bp, Homo sapiens
tctccctgaatgaag

SEQ ID NO: 128284 - DNA, 15 bp, Homo sapiens
ctccctgaatgaaga

SEQ ID NO: 128285 - DNA, 15 bp, Homo sapiens
tccctgaatgaagag

SEQ ID NO: 128286 - DNA, 15 bp, Homo sapiens
ccctgaatgaagagc

SEQ ID NO: 128287 - DNA, 15 bp, Homo sapiens
cctgaatgaagagca

SEQ ID NO: 128288 - DNA, 15 bp, Homo sapiens
ctgaatgaagagcag

SEQ ID NO: 128289 - DNA, 15 bp, Homo sapiens
tgaatgaagagcagc

SEQ ID NO: 128290 - DNA, 15 bp, Homo sapiens
gaatgaagagcagct

SEQ ID NO: 128291 - DNA, 15 bp, Homo sapiens
aatgaagagcagctg

SEQ ID NO: 128292 - DNA, 15 bp, Homo sapiens
atgaagagcagctga

SEQ ID NO: 128293 - DNA, 15 bp, Homo sapiens
tgaagagcagctgac

SEQ ID NO: 128294 - DNA, 15 bp, Homo sapiens
gaagagcagctgact

SEQ ID NO: 128295 - DNA, 15 bp, Homo sapiens
aagagcagctgactt

SEQ ID NO: 128296 - DNA, 15 bp, Homo sapiens
agagcagctgactta

SEQ ID NO: 128297 - DNA, 15 bp, Homo sapiens
gagcagctgacttag

SEQ ID NO: 128298 - DNA, 15 bp, Homo sapiens
agcagctgacttagg

SEQ ID NO: 128299 - DNA, 15 bp, Homo sapiens
gcagctgacttaggc

SEQ ID NO: 128300 - DNA, 15 bp, Homo sapiens
cagctgacttaggca

SEQ ID NO: 128301 - DNA, 15 bp, Homo sapiens
agctgacttaggcaa

SEQ ID NO: 128302 - DNA, 15 bp, Homo sapiens
gctgacttaggcaag

SEQ ID NO: 128303 - DNA, 15 bp, Homo sapiens
ctgacttaggcaagg

SEQ ID NO: 128304 - DNA, 15 bp, Homo sapiens
tgacttaggcaaggg

SEQ ID NO: 128305 - DNA, 15 bp, Homo sapiens
gacttaggcaagggg

SEQ ID NO: 128306 - DNA, 15 bp, Homo sapiens
acttaggcaaggggc

SEQ ID NO: 128307 - DNA, 15 bp, Homo sapiens
cttaggcaaggggcc

SEQ ID NO: 128308 - DNA, 15 bp, Homo sapiens
ttaggcaaggggcct

SEQ ID NO: 128309 - DNA, 15 bp, Homo sapiens
taggcaaggggcctt

SEQ ID NO: 128310 - DNA, 15 bp, Homo sapiens
aggcaaggggccttg

SEQ ID NO: 128311 - DNA, 15 bp, Homo sapiens
ggcaaggggccttgt

SEQ ID NO: 128312 - DNA, 15 bp, Homo sapiens
gcaaggggccttgtt

SEQ ID NO: 128313 - DNA, 15 bp, Homo sapiens
caaggggccttgttt

SEQ ID NO: 128314 - DNA, 15 bp, Homo sapiens
aaggggccttgtttg

SEQ ID NO: 128315 - DNA, 15 bp, Homo sapiens
aggggccttgtttgg

SEQ ID NO: 128316 - DNA, 15 bp, Homo sapiens
ggggccttgtttggt

SEQ ID NO: 128317 - DNA, 15 bp, Homo sapiens
gggccttgtttggtt

SEQ ID NO: 128318 - DNA, 15 bp, Homo sapiens
ggccttgtttggttt

SEQ ID NO: 128319 - DNA, 15 bp, Homo sapiens
gccttgtttggtttt

SEQ ID NO: 128320 - DNA, 15 bp, Homo sapiens
ccttgtttggttttc

SEQ ID NO: 128321 - DNA, 15 bp, Homo sapiens
cttgtttggttttcc

SEQ ID NO: 128322 - DNA, 15 bp, Homo sapiens
ttgtttggttttcct

SEQ ID NO: 128323 - DNA, 15 bp, Homo sapiens
tgtttggttttcctt

SEQ ID NO: 128324 - DNA, 15 bp, Homo sapiens
gtttggttttccttg

SEQ ID NO: 128325 - DNA, 15 bp, Homo sapiens
tttggttttccttga

SEQ ID NO: 128326 - DNA, 15 bp, Homo sapiens
ttggttttccttgaa

SEQ ID NO: 128327 - DNA, 15 bp, Homo sapiens
tggttttccttgaac

SEQ ID NO: 128328 - DNA, 15 bp, Homo sapiens
ggttttccttgaact

SEQ ID NO: 128329 - DNA, 15 bp, Homo sapiens
gttttccttgaacta

SEQ ID NO: 128330 - DNA, 15 bp, Homo sapiens
ttttccttgaactat

SEQ ID NO: 128331 - DNA, 15 bp, Homo sapiens
tttccttgaactatt

SEQ ID NO: 128332 - DNA, 15 bp, Homo sapiens
ttccttgaactatta

SEQ ID NO: 128333 - DNA, 15 bp, Homo sapiens
tccttgaactattaa

SEQ ID NO: 128334 - DNA, 15 bp, Homo sapiens
ccttgaactattaac

SEQ ID NO: 128335 - DNA, 15 bp, Homo sapiens
cttgaactattaaca

SEQ ID NO: 128336 - DNA, 15 bp, Homo sapiens
ttgaactattaacag

SEQ ID NO: 128337 - DNA, 15 bp, Homo sapiens
tgaactattaacagg

SEQ ID NO: 128338 - DNA, 15 bp, Homo sapiens
gaactattaacagga

SEQ ID NO: 128339 - DNA, 15 bp, Homo sapiens
aactattaacaggaa

SEQ ID NO: 128340 - DNA, 15 bp, Homo sapiens
actattaacaggaag

SEQ ID NO: 128341 - DNA, 15 bp, Homo sapiens
ctattaacaggaaga

SEQ ID NO: 128342 - DNA, 15 bp, Homo sapiens
tattaacaggaagat

SEQ ID NO: 128343 - DNA, 15 bp, Homo sapiens
attaacaggaagata

SEQ ID NO: 128344 - DNA, 15 bp, Homo sapiens
ttaacaggaagatag

SEQ ID NO: 128345 - DNA, 15 bp, Homo sapiens
taacaggaagatagg

SEQ ID NO: 128346 - DNA, 15 bp, Homo sapiens
aacaggaagataggg

SEQ ID NO: 128347 - DNA, 15 bp, Homo sapiens
acaggaagataggga

SEQ ID NO: 128348 - DNA, 15 bp, Homo sapiens
caggaagatagggag

SEQ ID NO: 128349 - DNA, 15 bp, Homo sapiens
aggaagatagggaga

SEQ ID NO: 128350 - DNA, 15 bp, Homo sapiens
ggaagatagggagat

SEQ ID NO: 128351 - DNA, 15 bp, Homo sapiens
gaagatagggagatt

SEQ ID NO: 128352 - DNA, 15 bp, Homo sapiens
aagatagggagatta

SEQ ID NO: 128353 - DNA, 15 bp, Homo sapiens
agatagggagattaa

SEQ ID NO: 128354 - DNA, 15 bp, Homo sapiens
gatagggagattaac

SEQ ID NO: 128355 - DNA, 15 bp, Homo sapiens
atagggagattaact

SEQ ID NO: 128356 - DNA, 15 bp, Homo sapiens
tagggagattaactg

SEQ ID NO: 128357 - DNA, 15 bp, Homo sapiens
agggagattaactgt

SEQ ID NO: 128358 - DNA, 15 bp, Homo sapiens
gggagattaactgtg

SEQ ID NO: 128359 - DNA, 15 bp, Homo sapiens
ggagattaactgtgt

SEQ ID NO: 128360 - DNA, 15 bp, Homo sapiens
gagattaactgtgta

SEQ ID NO: 128361 - DNA, 15 bp, Homo sapiens
agattaactgtgtaa

SEQ ID NO: 128362 - DNA, 15 bp, Homo sapiens
gattaactgtgtaaa

SEQ ID NO: 128363 - DNA, 15 bp, Homo sapiens
attaactgtgtaaat

SEQ ID NO: 128364 - DNA, 15 bp, Homo sapiens
ttaactgtgtaaatg

SEQ ID NO: 128365 - DNA, 15 bp, Homo sapiens
taactgtgtaaatgt

SEQ ID NO: 128366 - DNA, 15 bp, Homo sapiens
aactgtgtaaatgtt

SEQ ID NO: 128367 - DNA, 15 bp, Homo sapiens
actgtgtaaatgttc

SEQ ID NO: 128368 - DNA, 15 bp, Homo sapiens
ctgtgtaaatgttca

SEQ ID NO: 128369 - DNA, 15 bp, Homo sapiens
tgtgtaaatgttcaa

SEQ ID NO: 128370 - DNA, 15 bp, Homo sapiens
gtgtaaatgttcaat

SEQ ID NO: 128371 - DNA, 15 bp, Homo sapiens
tgtaaatgttcaata

SEQ ID NO: 128372 - DNA, 15 bp, Homo sapiens
gtaaatgttcaatag

SEQ ID NO: 128373 - DNA, 15 bp, Homo sapiens
taaatgttcaatagg

SEQ ID NO: 128374 - DNA, 15 bp, Homo sapiens
aaatgttcaataggc

SEQ ID NO: 128375 - DNA, 15 bp, Homo sapiens
aatgttcaataggcc

SEQ ID NO: 128376 - DNA, 15 bp, Homo sapiens
atgttcaataggcca

SEQ ID NO: 128377 - DNA, 15 bp, Homo sapiens
tgttcaataggccag

SEQ ID NO: 128378 - DNA, 15 bp, Homo sapiens
gttcaataggccaga

SEQ ID NO: 128379 - DNA, 15 bp, Homo sapiens
ttcaataggccagag

SEQ ID NO: 128380 - DNA, 15 bp, Homo sapiens
tcaataggccagagt

SEQ ID NO: 128381 - DNA, 15 bp, Homo sapiens
caataggccagagtc

SEQ ID NO: 128382 - DNA, 15 bp, Homo sapiens
aataggccagagtcc

SEQ ID NO: 128383 - DNA, 15 bp, Homo sapiens
ataggccagagtccc

SEQ ID NO: 128384 - DNA, 15 bp, Homo sapiens
taggccagagtccct

SEQ ID NO: 128385 - DNA, 15 bp, Homo sapiens
aggccagagtccctg

SEQ ID NO: 128386 - DNA, 15 bp, Homo sapiens
ggccagagtccctgc

SEQ ID NO: 128387 - DNA, 15 bp, Homo sapiens
gccagagtccctgca

SEQ ID NO: 128388 - DNA, 15 bp, Homo sapiens
ccagagtccctgcag

SEQ ID NO: 128389 - DNA, 15 bp, Homo sapiens
cagagtccctgcaga

SEQ ID NO: 128390 - DNA, 15 bp, Homo sapiens
agagtccctgcagag

SEQ ID NO: 128391 - DNA, 15 bp, Homo sapiens
gagtccctgcagagg

SEQ ID NO: 128392 - DNA, 15 bp, Homo sapiens
agtccctgcagaggg

SEQ ID NO: 128393 - DNA, 15 bp, Homo sapiens
gtccctgcagagggt

SEQ ID NO: 128394 - DNA, 15 bp, Homo sapiens
tccctgcagagggtg

SEQ ID NO: 128395 - DNA, 15 bp, Homo sapiens
ccctgcagagggtgg

SEQ ID NO: 128396 - DNA, 15 bp, Homo sapiens
cctgcagagggtggc

SEQ ID NO: 128397 - DNA, 15 bp, Homo sapiens
ctgcagagggtggcc

SEQ ID NO: 128398 - DNA, 15 bp, Homo sapiens
tgcagagggtggcca

SEQ ID NO: 128399 - DNA, 15 bp, Homo sapiens
gcagagggtggccac

SEQ ID NO: 128400 - DNA, 15 bp, Homo sapiens
cagagggtggccaca

SEQ ID NO: 128401 - DNA, 15 bp, Homo sapiens
agagggtggccacag

SEQ ID NO: 128402 - DNA, 15 bp, Homo sapiens
gagggtggccacagt

SEQ ID NO: 128403 - DNA, 15 bp, Homo sapiens
agggtggccacagtg

SEQ ID NO: 128404 - DNA, 15 bp, Homo sapiens
gggtggccacagtga

SEQ ID NO: 128405 - DNA, 15 bp, Homo sapiens
ggtggccacagtgat

SEQ ID NO: 128406 - DNA, 15 bp, Homo sapiens
gtggccacagtgatc

SEQ ID NO: 128407 - DNA, 15 bp, Homo sapiens
tggccacagtgatca

SEQ ID NO: 128408 - DNA, 15 bp, Homo sapiens
ggccacagtgatcag

SEQ ID NO: 128409 - DNA, 15 bp, Homo sapiens
gccacagtgatcaga

SEQ ID NO: 128410 - DNA, 15 bp, Homo sapiens
ccacagtgatcagat

SEQ ID NO: 128411 - DNA, 15 bp, Homo sapiens
cacagtgatcagatc

SEQ ID NO: 128412 - DNA, 15 bp, Homo sapiens
acagtgatcagatct

SEQ ID NO: 128413 - DNA, 15 bp, Homo sapiens
cagtgatcagatctt

SEQ ID NO: 128414 - DNA, 15 bp, Homo sapiens
agtgatcagatctta

SEQ ID NO: 128415 - DNA, 15 bp, Homo sapiens
gtgatcagatcttat

SEQ ID NO: 128416 - DNA, 15 bp, Homo sapiens
tgatcagatcttatc

SEQ ID NO: 128417 - DNA, 15 bp, Homo sapiens
gatcagatcttatca

SEQ ID NO: 128418 - DNA, 15 bp, Homo sapiens
atcagatcttatcac

SEQ ID NO: 128419 - DNA, 15 bp, Homo sapiens
tcagatcttatcaca

SEQ ID NO: 128420 - DNA, 15 bp, Homo sapiens
cagatcttatcacat

SEQ ID NO: 128421 - DNA, 15 bp, Homo sapiens
agatcttatcacatc

SEQ ID NO: 128422 - DNA, 15 bp, Homo sapiens
gatcttatcacatcc

SEQ ID NO: 128423 - DNA, 15 bp, Homo sapiens
atcttatcacatcct

SEQ ID NO: 128424 - DNA, 15 bp, Homo sapiens
tcttatcacatcctt

SEQ ID NO: 128425 - DNA, 15 bp, Homo sapiens
cttatcacatccttg

SEQ ID NO: 128426 - DNA, 15 bp, Homo sapiens
ttatcacatccttgc

SEQ ID NO: 128427 - DNA, 15 bp, Homo sapiens
tatcacatccttgct

SEQ ID NO: 128428 - DNA, 15 bp, Homo sapiens
atcacatccttgctt

SEQ ID NO: 128429 - DNA, 15 bp, Homo sapiens
tcacatccttgcttt

SEQ ID NO: 128430 - DNA, 15 bp, Homo sapiens
cacatccttgctttg

SEQ ID NO: 128431 - DNA, 15 bp, Homo sapiens
acatccttgctttgg

SEQ ID NO: 128432 - DNA, 15 bp, Homo sapiens
catccttgctttggg

SEQ ID NO: 128433 - DNA, 15 bp, Homo sapiens
atccttgctttgggt

SEQ ID NO: 128434 - DNA, 15 bp, Homo sapiens
tccttgctttgggtg

SEQ ID NO: 128435 - DNA, 15 bp, Homo sapiens
ccttgctttgggtgt

SEQ ID NO: 128436 - DNA, 15 bp, Homo sapiens
cttgctttgggtgtt

SEQ ID NO: 128437 - DNA, 15 bp, Homo sapiens
ttgctttgggtgttg

SEQ ID NO: 128438 - DNA, 15 bp, Homo sapiens
tgctttgggtgttgc

SEQ ID NO: 128439 - DNA, 15 bp, Homo sapiens
gctttgggtgttgcc

SEQ ID NO: 128440 - DNA, 15 bp, Homo sapiens
ctttgggtgttgcct

SEQ ID NO: 128441 - DNA, 15 bp, Homo sapiens
tttgggtgttgcctc

SEQ ID NO: 128442 - DNA, 15 bp, Homo sapiens
ttgggtgttgcctct

SEQ ID NO: 128443 - DNA, 15 bp, Homo sapiens
tgggtgttgcctctc

SEQ ID NO: 128444 - DNA, 15 bp, Homo sapiens
gggtgttgcctctct

SEQ ID NO: 128445 - DNA, 15 bp, Homo sapiens
ggtgttgcctctctg

SEQ ID NO: 128446 - DNA, 15 bp, Homo sapiens
gtgttgcctctctgg

SEQ ID NO: 128447 - DNA, 15 bp, Homo sapiens
tgttgcctctctggt

SEQ ID NO: 128448 - DNA, 15 bp, Homo sapiens
gttgcctctctggtt

SEQ ID NO: 128449 - DNA, 15 bp, Homo sapiens
ttgcctctctggttg

SEQ ID NO: 128450 - DNA, 15 bp, Homo sapiens
tgcctctctggttgg

SEQ ID NO: 128451 - DNA, 15 bp, Homo sapiens
gcctctctggttgga

SEQ ID NO: 128452 - DNA, 15 bp, Homo sapiens
cctctctggttggag

SEQ ID NO: 128453 - DNA, 15 bp, Homo sapiens
ctctctggttggagt

SEQ ID NO: 128454 - DNA, 15 bp, Homo sapiens
tctctggttggagta

SEQ ID NO: 128455 - DNA, 15 bp, Homo sapiens
ctctggttggagtat

SEQ ID NO: 128456 - DNA, 15 bp, Homo sapiens
tctggttggagtatg

SEQ ID NO: 128457 - DNA, 15 bp, Homo sapiens
ctggttggagtatgg

SEQ ID NO: 128458 - DNA, 15 bp, Homo sapiens
tggttggagtatgga

SEQ ID NO: 128459 - DNA, 15 bp, Homo sapiens
ggttggagtatggat

SEQ ID NO: 128460 - DNA, 15 bp, Homo sapiens
gttggagtatggata

SEQ ID NO: 128461 - DNA, 15 bp, Homo sapiens
ttggagtatggatag

SEQ ID NO: 128462 - DNA, 15 bp, Homo sapiens
tggagtatggataga

SEQ ID NO: 128463 - DNA, 15 bp, Homo sapiens
ggagtatggatagaa

SEQ ID NO: 128464 - DNA, 15 bp, Homo sapiens
gagtatggatagaaa

SEQ ID NO: 128465 - DNA, 15 bp, Homo sapiens
agtatggatagaaaa

SEQ ID NO: 128466 - DNA, 15 bp, Homo sapiens
gtatggatagaaaag

SEQ ID NO: 128467 - DNA, 15 bp, Homo sapiens
tatggatagaaaaga

SEQ ID NO: 128468 - DNA, 15 bp, Homo sapiens
atggatagaaaagaa

SEQ ID NO: 128469 - DNA, 15 bp, Homo sapiens
tggatagaaaagaaa

SEQ ID NO: 128470 - DNA, 15 bp, Homo sapiens
ggatagaaaagaaag

SEQ ID NO: 128471 - DNA, 15 bp, Homo sapiens
gatagaaaagaaaga

SEQ ID NO: 128472 - DNA, 15 bp, Homo sapiens
atagaaaagaaagaa

SEQ ID NO: 128473 - DNA, 15 bp, Homo sapiens
tagaaaagaaagaaa

SEQ ID NO: 128474 - DNA, 15 bp, Homo sapiens
agaaaagaaagaaag

SEQ ID NO: 128475 - DNA, 15 bp, Homo sapiens
aaagaaagaaagacc

SEQ ID NO: 128476 - DNA, 15 bp, Homo sapiens
aagaaagaaagaccc

SEQ ID NO: 128477 - DNA, 15 bp, Homo sapiens
agaaagaaagaccct

SEQ ID NO: 128478 - DNA, 15 bp, Homo sapiens
gaaagaaagacccta

SEQ ID NO: 128479 - DNA, 15 bp, Homo sapiens
aaagaaagaccctat

SEQ ID NO: 128480 - DNA, 15 bp, Homo sapiens
aagaaagaccctata

SEQ ID NO: 128481 - DNA, 15 bp, Homo sapiens
agaaagaccctatat

SEQ ID NO: 128482 - DNA, 15 bp, Homo sapiens
gaaagaccctatatt

SEQ ID NO: 128483 - DNA, 15 bp, Homo sapiens
aaagaccctatattg

SEQ ID NO: 128484 - DNA, 15 bp, Homo sapiens
aagaccctatattga

SEQ ID NO: 128485 - DNA, 15 bp, Homo sapiens
agaccctatattgaa

SEQ ID NO: 128486 - DNA, 15 bp, Homo sapiens
gaccctatattgaaa

SEQ ID NO: 128487 - DNA, 15 bp, Homo sapiens
accctatattgaaat

SEQ ID NO: 128488 - DNA, 15 bp, Homo sapiens
ccctatattgaaatg

SEQ ID NO: 128489 - DNA, 15 bp, Homo sapiens
cctatattgaaatgc

SEQ ID NO: 128490 - DNA, 15 bp, Homo sapiens
ctatattgaaatgca

SEQ ID NO: 128491 - DNA, 15 bp, Homo sapiens
tatattgaaatgcaa

SEQ ID NO: 128492 - DNA, 15 bp, Homo sapiens
atattgaaatgcaaa

SEQ ID NO: 128493 - DNA, 15 bp, Homo sapiens
tattgaaatgcaaag

SEQ ID NO: 128494 - DNA, 15 bp, Homo sapiens
attgaaatgcaaagt

SEQ ID NO: 128495 - DNA, 15 bp, Homo sapiens
ttgaaatgcaaagtg

SEQ ID NO: 128496 - DNA, 15 bp, Homo sapiens
tgaaatgcaaagtgc

SEQ ID NO: 128497 - DNA, 15 bp, Homo sapiens
gaaatgcaaagtgca

SEQ ID NO: 128498 - DNA, 15 bp, Homo sapiens
aaatgcaaagtgcag

SEQ ID NO: 128499 - DNA, 15 bp, Homo sapiens
aatgcaaagtgcagc

SEQ ID NO: 128500 - DNA, 15 bp, Homo sapiens
atgcaaagtgcagca

SEQ ID NO: 128501 - DNA, 15 bp, Homo sapiens
tgcaaagtgcagcaa

SEQ ID NO: 128502 - DNA, 15 bp, Homo sapiens
gcaaagtgcagcaag

SEQ ID NO: 128503 - DNA, 15 bp, Homo sapiens
caaagtgcagcaagt

SEQ ID NO: 128504 - DNA, 15 bp, Homo sapiens
aaagtgcagcaagtc

SEQ ID NO: 128505 - DNA, 15 bp, Homo sapiens
aagtgcagcaagtcc

SEQ ID NO: 128506 - DNA, 15 bp, Homo sapiens
agtgcagcaagtcct

SEQ ID NO: 128507 - DNA, 15 bp, Homo sapiens
gtgcagcaagtcctg

SEQ ID NO: 128508 - DNA, 15 bp, Homo sapiens
tgcagcaagtcctga

SEQ ID NO: 128509 - DNA, 15 bp, Homo sapiens
gcagcaagtcctgac

SEQ ID NO: 128510 - DNA, 15 bp, Homo sapiens
cagcaagtcctgact

SEQ ID NO: 128511 - DNA, 15 bp, Homo sapiens
agcaagtcctgactt

SEQ ID NO: 128512 - DNA, 15 bp, Homo sapiens
gcaagtcctgacttt

SEQ ID NO: 128513 - DNA, 15 bp, Homo sapiens
caagtcctgactttg

SEQ ID NO: 128514 - DNA, 15 bp, Homo sapiens
aagtcctgactttgg

SEQ ID NO: 128515 - DNA, 15 bp, Homo sapiens
agtcctgactttgga

SEQ ID NO: 128516 - DNA, 15 bp, Homo sapiens
gtcctgactttggat

SEQ ID NO: 128517 - DNA, 15 bp, Homo sapiens
tcctgactttggatt

SEQ ID NO: 128518 - DNA, 15 bp, Homo sapiens
cctgactttggatta

SEQ ID NO: 128519 - DNA, 15 bp, Homo sapiens
ctgactttggattaa

SEQ ID NO: 128520 - DNA, 15 bp, Homo sapiens
tgactttggattaac

SEQ ID NO: 128521 - DNA, 15 bp, Homo sapiens
gactttggattaact

SEQ ID NO: 128522 - DNA, 15 bp, Homo sapiens
actttggattaactt

SEQ ID NO: 128523 - DNA, 15 bp, Homo sapiens
ctttggattaacttc

SEQ ID NO: 128524 - DNA, 15 bp, Homo sapiens
tttggattaacttct

SEQ ID NO: 128525 - DNA, 15 bp, Homo sapiens
ttggattaacttctc

SEQ ID NO: 128526 - DNA, 15 bp, Homo sapiens
tggattaacttctca

SEQ ID NO: 128527 - DNA, 15 bp, Homo sapiens
ggattaacttctcag

SEQ ID NO: 128528 - DNA, 15 bp, Homo sapiens
gattaacttctcagc

SEQ ID NO: 128529 - DNA, 15 bp, Homo sapiens
attaacttctcagcc

SEQ ID NO: 128530 - DNA, 15 bp, Homo sapiens
ttaacttctcagccc

SEQ ID NO: 128531 - DNA, 15 bp, Homo sapiens
taacttctcagccca

SEQ ID NO: 128532 - DNA, 15 bp, Homo sapiens
aacttctcagcccat

SEQ ID NO: 128533 - DNA, 15 bp, Homo sapiens
acttctcagcccatt

SEQ ID NO: 128534 - DNA, 15 bp, Homo sapiens
cttctcagcccattt

SEQ ID NO: 128535 - DNA, 15 bp, Homo sapiens
ttctcagcccatttg

SEQ ID NO: 128536 - DNA, 15 bp, Homo sapiens
tctcagcccatttgc

SEQ ID NO: 128537 - DNA, 15 bp, Homo sapiens
ctcagcccatttgca

SEQ ID NO: 128538 - DNA, 15 bp, Homo sapiens
tcagcccatttgcat

SEQ ID NO: 128539 - DNA, 15 bp, Homo sapiens
cagcccatttgcatg

SEQ ID NO: 128540 - DNA, 15 bp, Homo sapiens
agcccatttgcatga

SEQ ID NO: 128541 - DNA, 15 bp, Homo sapiens
gcccatttgcatgaa

SEQ ID NO: 128542 - DNA, 15 bp, Homo sapiens
cccatttgcatgaaa

SEQ ID NO: 128543 - DNA, 15 bp, Homo sapiens
ccatttgcatgaaaa

SEQ ID NO: 128544 - DNA, 15 bp, Homo sapiens
catttgcatgaaaat

SEQ ID NO: 128545 - DNA, 15 bp, Homo sapiens
atttgcatgaaaata

SEQ ID NO: 128546 - DNA, 15 bp, Homo sapiens
tttgcatgaaaataa

SEQ ID NO: 128547 - DNA, 15 bp, Homo sapiens
ttgcatgaaaataaa

SEQ ID NO: 128548 - DNA, 15 bp, Homo sapiens
tgcatgaaaataaaa

SEQ ID NO: 128549 - DNA, 15 bp, Homo sapiens
gcatgaaaataaaaa

SEQ ID NO: 128550 - DNA, 15 bp, Homo sapiens
catgaaaataaaaag

SEQ ID NO: 128551 - DNA, 15 bp, Homo sapiens
atgaaaataaaaaga

SEQ ID NO: 128552 - DNA, 15 bp, Homo sapiens
tgaaaataaaaagat

SEQ ID NO: 128553 - DNA, 15 bp, Homo sapiens
gaaaataaaaagatg

SEQ ID NO: 128554 - DNA, 15 bp, Homo sapiens
aaaataaaaagatga

SEQ ID NO: 128555 - DNA, 15 bp, Homo sapiens
aaataaaaagatgaa

SEQ ID NO: 128556 - DNA, 15 bp, Homo sapiens
aataaaaagatgaat

SEQ ID NO: 128557 - DNA, 15 bp, Homo sapiens
ataaaaagatgaata

SEQ ID NO: 128558 - DNA, 15 bp, Homo sapiens
taaaaagatgaataa

SEQ ID NO: 128559 - DNA, 15 bp, Homo sapiens
aaaagatgaataaaa

SEQ ID NO: 128560 - DNA, 15 bp, Homo sapiens
aaagatgaataaaac

SEQ ID NO: 128561 - DNA, 15 bp, Homo sapiens
aagatgaataaaaca

SEQ ID NO: 128562 - DNA, 15 bp, Homo sapiens
agatgaataaaacaa

SEQ ID NO: 128563 - DNA, 15 bp, Homo sapiens
gatgaataaaacaag

SEQ ID NO: 128564 - DNA, 15 bp, Homo sapiens
atgaataaaacaagg

SEQ ID NO: 128565 - DNA, 15 bp, Homo sapiens
tgaataaaacaaggt

SEQ ID NO: 128566 - DNA, 15 bp, Homo sapiens
gaataaaacaaggtt

SEQ ID NO: 128567 - DNA, 15 bp, Homo sapiens
aataaaacaaggttc

SEQ ID NO: 128568 - DNA, 15 bp, Homo sapiens
ataaaacaaggttcc

SEQ ID NO: 128569 - DNA, 15 bp, Homo sapiens
taaaacaaggttccc

SEQ ID NO: 128570 - DNA, 15 bp, Homo sapiens
aaaacaaggttccca

SEQ ID NO: 128571 - DNA, 15 bp, Homo sapiens
aaacaaggttcccac

SEQ ID NO: 128572 - DNA, 15 bp, Homo sapiens
aacaaggttcccact

SEQ ID NO: 128573 - DNA, 15 bp, Homo sapiens
acaaggttcccactt

SEQ ID NO: 128574 - DNA, 15 bp, Homo sapiens
caaggttcccacttt

SEQ ID NO: 128575 - DNA, 15 bp, Homo sapiens
aaggttcccactttg

SEQ ID NO: 128576 - DNA, 15 bp, Homo sapiens
aggttcccactttgg

SEQ ID NO: 128577 - DNA, 15 bp, Homo sapiens
ggttcccactttgga

SEQ ID NO: 128578 - DNA, 15 bp, Homo sapiens
gttcccactttggag

SEQ ID NO: 128579 - DNA, 15 bp, Homo sapiens
ttcccactttggagg

SEQ ID NO: 128580 - DNA, 15 bp, Homo sapiens
tcccactttggaggg

SEQ ID NO: 128581 - DNA, 15 bp, Homo sapiens
cccactttggaggga

SEQ ID NO: 128582 - DNA, 15 bp, Homo sapiens
ccactttggagggag

SEQ ID NO: 128583 - DNA, 15 bp, Homo sapiens
cactttggagggagg

SEQ ID NO: 128584 - DNA, 15 bp, Homo sapiens
actttggagggaggt

SEQ ID NO: 128585 - DNA, 15 bp, Homo sapiens
ctttggagggaggtg

SEQ ID NO: 128586 - DNA, 15 bp, Homo sapiens
tttggagggaggtgg

SEQ ID NO: 128587 - DNA, 15 bp, Homo sapiens
ttggagggaggtggt

SEQ ID NO: 128588 - DNA, 15 bp, Homo sapiens
tggagggaggtggta

SEQ ID NO: 128589 - DNA, 15 bp, Homo sapiens
ggagggaggtggtag

SEQ ID NO: 128590 - DNA, 15 bp, Homo sapiens
gagggaggtggtagc

SEQ ID NO: 128591 - DNA, 15 bp, Homo sapiens
agggaggtggtagct

SEQ ID NO: 128592 - DNA, 15 bp, Homo sapiens
gggaggtggtagctg

SEQ ID NO: 128593 - DNA, 15 bp, Homo sapiens
ggaggtggtagctgt

SEQ ID NO: 128594 - DNA, 15 bp, Homo sapiens
gaggtggtagctgtg

SEQ ID NO: 128595 - DNA, 15 bp, Homo sapiens
aggtggtagctgtga

SEQ ID NO: 128596 - DNA, 15 bp, Homo sapiens
ggtggtagctgtgag

SEQ ID NO: 128597 - DNA, 15 bp, Homo sapiens
gtggtagctgtgaga

SEQ ID NO: 128598 - DNA, 15 bp, Homo sapiens
tggtagctgtgagat

SEQ ID NO: 128599 - DNA, 15 bp, Homo sapiens
ggtagctgtgagatg

SEQ ID NO: 128600 - DNA, 15 bp, Homo sapiens
gtagctgtgagatgg

SEQ ID NO: 128601 - DNA, 15 bp, Homo sapiens
tagctgtgagatgga

SEQ ID NO: 128602 - DNA, 15 bp, Homo sapiens
agctgtgagatggaa

SEQ ID NO: 128603 - DNA, 15 bp, Homo sapiens
gctgtgagatggaag

SEQ ID NO: 128604 - DNA, 15 bp, Homo sapiens
ctgtgagatggaagg

SEQ ID NO: 128605 - DNA, 15 bp, Homo sapiens
tgtgagatggaagga

SEQ ID NO: 128606 - DNA, 15 bp, Homo sapiens
gtgagatggaaggag

SEQ ID NO: 128607 - DNA, 15 bp, Homo sapiens
tgagatggaaggagt

SEQ ID NO: 128608 - DNA, 15 bp, Homo sapiens
gagatggaaggagtg

SEQ ID NO: 128609 - DNA, 15 bp, Homo sapiens
agatggaaggagtgt

SEQ ID NO: 128610 - DNA, 15 bp, Homo sapiens
gatggaaggagtgtt

SEQ ID NO: 128611 - DNA, 15 bp, Homo sapiens
atggaaggagtgttc

SEQ ID NO: 128612 - DNA, 15 bp, Homo sapiens
tggaaggagtgttcc

SEQ ID NO: 128613 - DNA, 15 bp, Homo sapiens
ggaaggagtgttcct

SEQ ID NO: 128614 - DNA, 15 bp, Homo sapiens
gaaggagtgttcctg

SEQ ID NO: 128615 - DNA, 15 bp, Homo sapiens
aaggagtgttcctgc

SEQ ID NO: 128616 - DNA, 15 bp, Homo sapiens
aggagtgttcctgct

SEQ ID NO: 128617 - DNA, 15 bp, Homo sapiens
ggagtgttcctgctg

SEQ ID NO: 128618 - DNA, 15 bp, Homo sapiens
gagtgttcctgctgg

SEQ ID NO: 128619 - DNA, 15 bp, Homo sapiens
agtgttcctgctggg

SEQ ID NO: 128620 - DNA, 15 bp, Homo sapiens
gtgttcctgctgggc

SEQ ID NO: 128621 - DNA, 15 bp, Homo sapiens
tgttcctgctgggca

SEQ ID NO: 128622 - DNA, 15 bp, Homo sapiens
gttcctgctgggcaa

SEQ ID NO: 128623 - DNA, 15 bp, Homo sapiens
ttcctgctgggcaac

SEQ ID NO: 128624 - DNA, 15 bp, Homo sapiens
tcctgctgggcaaca

SEQ ID NO: 128625 - DNA, 15 bp, Homo sapiens
cctgctgggcaacag

SEQ ID NO: 128626 - DNA, 15 bp, Homo sapiens
ctgctgggcaacagc

SEQ ID NO: 128627 - DNA, 15 bp, Homo sapiens
tgctgggcaacagca

SEQ ID NO: 128628 - DNA, 15 bp, Homo sapiens
gctgggcaacagcag

SEQ ID NO: 128629 - DNA, 15 bp, Homo sapiens
ctgggcaacagcaga

SEQ ID NO: 128630 - DNA, 15 bp, Homo sapiens
tgggcaacagcagag

SEQ ID NO: 128631 - DNA, 15 bp, Homo sapiens
gggcaacagcagagt

SEQ ID NO: 128632 - DNA, 15 bp, Homo sapiens
ggcaacagcagagta

SEQ ID NO: 128633 - DNA, 15 bp, Homo sapiens
gcaacagcagagtaa

SEQ ID NO: 128634 - DNA, 15 bp, Homo sapiens
caacagcagagtaag

SEQ ID NO: 128635 - DNA, 15 bp, Homo sapiens
aacagcagagtaagt

SEQ ID NO: 128636 - DNA, 15 bp, Homo sapiens
acagcagagtaagtg

SEQ ID NO: 128637 - DNA, 15 bp, Homo sapiens
cagcagagtaagtgc

SEQ ID NO: 128638 - DNA, 15 bp, Homo sapiens
agcagagtaagtgct

SEQ ID NO: 128639 - DNA, 15 bp, Homo sapiens
gcagagtaagtgctg

SEQ ID NO: 128640 - DNA, 15 bp, Homo sapiens
cagagtaagtgctgg

SEQ ID NO: 128641 - DNA, 15 bp, Homo sapiens
agagtaagtgctggg

SEQ ID NO: 128642 - DNA, 15 bp, Homo sapiens
gagtaagtgctgggg

SEQ ID NO: 128643 - DNA, 15 bp, Homo sapiens
agtaagtgctggggt

SEQ ID NO: 128644 - DNA, 15 bp, Homo sapiens
gtaagtgctggggta

SEQ ID NO: 128645 - DNA, 15 bp, Homo sapiens
taagtgctggggtag

SEQ ID NO: 128646 - DNA, 15 bp, Homo sapiens
aagtgctggggtaga

SEQ ID NO: 128647 - DNA, 15 bp, Homo sapiens
agtgctggggtagat

SEQ ID NO: 128648 - DNA, 15 bp, Homo sapiens
gtgctggggtagatt

SEQ ID NO: 128649 - DNA, 15 bp, Homo sapiens
tgctggggtagattc

SEQ ID NO: 128650 - DNA, 15 bp, Homo sapiens
gctggggtagattca

SEQ ID NO: 128651 - DNA, 15 bp, Homo sapiens
ctggggtagattcac

SEQ ID NO: 128652 - DNA, 15 bp, Homo sapiens
tggggtagattcact

SEQ ID NO: 128653 - DNA, 15 bp, Homo sapiens
ggggtagattcactc

SEQ ID NO: 128654 - DNA, 15 bp, Homo sapiens
gggtagattcactcc

SEQ ID NO: 128655 - DNA, 15 bp, Homo sapiens
ggtagattcactccc

SEQ ID NO: 128656 - DNA, 15 bp, Homo sapiens
gtagattcactccca

SEQ ID NO: 128657 - DNA, 15 bp, Homo sapiens
tagattcactcccac

SEQ ID NO: 128658 - DNA, 15 bp, Homo sapiens
agattcactcccaca

SEQ ID NO: 128659 - DNA, 15 bp, Homo sapiens
gattcactcccacag

SEQ ID NO: 128660 - DNA, 15 bp, Homo sapiens
attcactcccacagt

SEQ ID NO: 128661 - DNA, 15 bp, Homo sapiens
ttcactcccacagtg

SEQ ID NO: 128662 - DNA, 15 bp, Homo sapiens
tcactcccacagtgc

SEQ ID NO: 128663 - DNA, 15 bp, Homo sapiens
cactcccacagtgcc

SEQ ID NO: 128664 - DNA, 15 bp, Homo sapiens
actcccacagtgcct

SEQ ID NO: 128665 - DNA, 15 bp, Homo sapiens
ctcccacagtgcctg

SEQ ID NO: 128666 - DNA, 15 bp, Homo sapiens
tcccacagtgcctgg

SEQ ID NO: 128667 - DNA, 15 bp, Homo sapiens
cccacagtgcctgga

SEQ ID NO: 128668 - DNA, 15 bp, Homo sapiens
ccacagtgcctggaa

SEQ ID NO: 128669 - DNA, 15 bp, Homo sapiens
cacagtgcctggaaa

SEQ ID NO: 128670 - DNA, 15 bp, Homo sapiens
acagtgcctggaaaa

SEQ ID NO: 128671 - DNA, 15 bp, Homo sapiens
cagtgcctggaaaat

SEQ ID NO: 128672 - DNA, 15 bp, Homo sapiens
agtgcctggaaaatc

SEQ ID NO: 128673 - DNA, 15 bp, Homo sapiens
gtgcctggaaaatcc

SEQ ID NO: 128674 - DNA, 15 bp, Homo sapiens
tgcctggaaaatcct

SEQ ID NO: 128675 - DNA, 15 bp, Homo sapiens
gcctggaaaatcctc

SEQ ID NO: 128676 - DNA, 15 bp, Homo sapiens
cctggaaaatcctca

SEQ ID NO: 128677 - DNA, 15 bp, Homo sapiens
ctggaaaatcctcat

SEQ ID NO: 128678 - DNA, 15 bp, Homo sapiens
tggaaaatcctcata

SEQ ID NO: 128679 - DNA, 15 bp, Homo sapiens
ggaaaatcctcatag

SEQ ID NO: 128680 - DNA, 15 bp, Homo sapiens
gaaaatcctcatagg

SEQ ID NO: 128681 - DNA, 15 bp, Homo sapiens
aaaatcctcataggc

SEQ ID NO: 128682 - DNA, 15 bp, Homo sapiens
aaatcctcataggct

SEQ ID NO: 128683 - DNA, 15 bp, Homo sapiens
aatcctcataggctc

SEQ ID NO: 128684 - DNA, 15 bp, Homo sapiens
atcctcataggctca

SEQ ID NO: 128685 - DNA, 15 bp, Homo sapiens
tcctcataggctcat

SEQ ID NO: 128686 - DNA, 15 bp, Homo sapiens
cctcataggctcatt

SEQ ID NO: 128687 - DNA, 15 bp, Homo sapiens
ctcataggctcattt

SEQ ID NO: 128688 - DNA, 15 bp, Homo sapiens
tcataggctcatttg

SEQ ID NO: 128689 - DNA, 15 bp, Homo sapiens
cataggctcatttgt

SEQ ID NO: 128690 - DNA, 15 bp, Homo sapiens
ataggctcatttgtt

SEQ ID NO: 128691 - DNA, 15 bp, Homo sapiens
taggctcatttgttg

SEQ ID NO: 128692 - DNA, 15 bp, Homo sapiens
aggctcatttgttga

SEQ ID NO: 128693 - DNA, 15 bp, Homo sapiens
ggctcatttgttgag

SEQ ID NO: 128694 - DNA, 15 bp, Homo sapiens
gctcatttgttgagt

SEQ ID NO: 128695 - DNA, 15 bp, Homo sapiens
ctcatttgttgagtc

SEQ ID NO: 128696 - DNA, 15 bp, Homo sapiens
tcatttgttgagtct

SEQ ID NO: 128697 - DNA, 15 bp, Homo sapiens
catttgttgagtctt

SEQ ID NO: 128698 - DNA, 15 bp, Homo sapiens
atttgttgagtcttt

SEQ ID NO: 128699 - DNA, 15 bp, Homo sapiens
tttgttgagtctttg

SEQ ID NO: 128700 - DNA, 15 bp, Homo sapiens
ttgttgagtctttgt

SEQ ID NO: 128701 - DNA, 15 bp, Homo sapiens
tgttgagtctttgtc

SEQ ID NO: 128702 - DNA, 15 bp, Homo sapiens
gttgagtctttgtcc

SEQ ID NO: 128703 - DNA, 15 bp, Homo sapiens
ttgagtctttgtcct

SEQ ID NO: 128704 - DNA, 15 bp, Homo sapiens
tgagtctttgtccta

SEQ ID NO: 128705 - DNA, 15 bp, Homo sapiens
gagtctttgtcctac

SEQ ID NO: 128706 - DNA, 15 bp, Homo sapiens
agtctttgtcctaca

SEQ ID NO: 128707 - DNA, 15 bp, Homo sapiens
gtctttgtcctacac

SEQ ID NO: 128708 - DNA, 15 bp, Homo sapiens
tctttgtcctacacc

SEQ ID NO: 128709 - DNA, 15 bp, Homo sapiens
ctttgtcctacacca

SEQ ID NO: 128710 - DNA, 15 bp, Homo sapiens
tttgtcctacaccag

SEQ ID NO: 128711 - DNA, 15 bp, Homo sapiens
ttgtcctacaccagg

SEQ ID NO: 128712 - DNA, 15 bp, Homo sapiens
tgtcctacaccaggc

SEQ ID NO: 128713 - DNA, 15 bp, Homo sapiens
gtcctacaccaggca

SEQ ID NO: 128714 - DNA, 15 bp, Homo sapiens
tcctacaccaggcac

SEQ ID NO: 128715 - DNA, 15 bp, Homo sapiens
cctacaccaggcact

SEQ ID NO: 128716 - DNA, 15 bp, Homo sapiens
ctacaccaggcactc

SEQ ID NO: 128717 - DNA, 15 bp, Homo sapiens
tacaccaggcactct

SEQ ID NO: 128718 - DNA, 15 bp, Homo sapiens
acaccaggcactctg

SEQ ID NO: 128719 - DNA, 15 bp, Homo sapiens
caccaggcactctgc

SEQ ID NO: 128720 - DNA, 15 bp, Homo sapiens
accaggcactctgca

SEQ ID NO: 128721 - DNA, 15 bp, Homo sapiens
ccaggcactctgcaa

SEQ ID NO: 128722 - DNA, 15 bp, Homo sapiens
caggcactctgcaaa

SEQ ID NO: 128723 - DNA, 15 bp, Homo sapiens
aggcactctgcaaaa

SEQ ID NO: 128724 - DNA, 15 bp, Homo sapiens
ggcactctgcaaaaa

SEQ ID NO: 128725 - DNA, 15 bp, Homo sapiens
gcactctgcaaaaac

SEQ ID NO: 128726 - DNA, 15 bp, Homo sapiens
cactctgcaaaaacg

SEQ ID NO: 128727 - DNA, 15 bp, Homo sapiens
actctgcaaaaacgc

SEQ ID NO: 128728 - DNA, 15 bp, Homo sapiens
ctctgcaaaaacgct

SEQ ID NO: 128729 - DNA, 15 bp, Homo sapiens
tctgcaaaaacgctt

SEQ ID NO: 128730 - DNA, 15 bp, Homo sapiens
ctgcaaaaacgcttt

SEQ ID NO: 128731 - DNA, 15 bp, Homo sapiens
tgcaaaaacgctttg

SEQ ID NO: 128732 - DNA, 15 bp, Homo sapiens
gcaaaaacgctttgc

SEQ ID NO: 128733 - DNA, 15 bp, Homo sapiens
caaaaacgctttgcc

SEQ ID NO: 128734 - DNA, 15 bp, Homo sapiens
aaaaacgctttgcct

SEQ ID NO: 128735 - DNA, 15 bp, Homo sapiens
aaaacgctttgcctg

SEQ ID NO: 128736 - DNA, 15 bp, Homo sapiens
aaacgctttgcctgc

SEQ ID NO: 128737 - DNA, 15 bp, Homo sapiens
aacgctttgcctgca

SEQ ID NO: 128738 - DNA, 15 bp, Homo sapiens
acgctttgcctgcaa

SEQ ID NO: 128739 - DNA, 15 bp, Homo sapiens
cgctttgcctgcaag

SEQ ID NO: 128740 - DNA, 15 bp, Homo sapiens
gctttgcctgcaagg

SEQ ID NO: 128741 - DNA, 15 bp, Homo sapiens
ctttgcctgcaaggt

SEQ ID NO: 128742 - DNA, 15 bp, Homo sapiens
tttgcctgcaaggtc

SEQ ID NO: 128743 - DNA, 15 bp, Homo sapiens
ttgcctgcaaggtct

SEQ ID NO: 128744 - DNA, 15 bp, Homo sapiens
tgcctgcaaggtctc

SEQ ID NO: 128745 - DNA, 15 bp, Homo sapiens
gcctgcaaggtctca

SEQ ID NO: 128746 - DNA, 15 bp, Homo sapiens
cctgcaaggtctcat

SEQ ID NO: 128747 - DNA, 15 bp, Homo sapiens
ctgcaaggtctcatg

SEQ ID NO: 128748 - DNA, 15 bp, Homo sapiens
tgcaaggtctcatgc

SEQ ID NO: 128749 - DNA, 15 bp, Homo sapiens
gcaaggtctcatgcg

SEQ ID NO: 128750 - DNA, 15 bp, Homo sapiens
caaggtctcatgcga

SEQ ID NO: 128751 - DNA, 15 bp, Homo sapiens
aaggtctcatgcgat

SEQ ID NO: 128752 - DNA, 15 bp, Homo sapiens
aggtctcatgcgatg

SEQ ID NO: 128753 - DNA, 15 bp, Homo sapiens
ggtctcatgcgatgc

SEQ ID NO: 128754 - DNA, 15 bp, Homo sapiens
gtctcatgcgatgct

SEQ ID NO: 128755 - DNA, 15 bp, Homo sapiens
tctcatgcgatgctc

SEQ ID NO: 128756 - DNA, 15 bp, Homo sapiens
ctcatgcgatgctca

SEQ ID NO: 128757 - DNA, 15 bp, Homo sapiens
tcatgcgatgctcac

SEQ ID NO: 128758 - DNA, 15 bp, Homo sapiens
catgcgatgctcacc

SEQ ID NO: 128759 - DNA, 15 bp, Homo sapiens
atgcgatgctcacca

SEQ ID NO: 128760 - DNA, 15 bp, Homo sapiens
tgcgatgctcaccac

SEQ ID NO: 128761 - DNA, 15 bp, Homo sapiens
gcgatgctcaccaca

SEQ ID NO: 128762 - DNA, 15 bp, Homo sapiens
cgatgctcaccacag

SEQ ID NO: 128763 - DNA, 15 bp, Homo sapiens
gatgctcaccacagc

SEQ ID NO: 128764 - DNA, 15 bp, Homo sapiens
atgctcaccacagct

SEQ ID NO: 128765 - DNA, 15 bp, Homo sapiens
tgctcaccacagctc

SEQ ID NO: 128766 - DNA, 15 bp, Homo sapiens
gctcaccacagctct

SEQ ID NO: 128767 - DNA, 15 bp, Homo sapiens
ctcaccacagctctg

SEQ ID NO: 128768 - DNA, 15 bp, Homo sapiens
tcaccacagctctgt

SEQ ID NO: 128769 - DNA, 15 bp, Homo sapiens
caccacagctctgtg

SEQ ID NO: 128770 - DNA, 15 bp, Homo sapiens
accacagctctgtga

SEQ ID NO: 128771 - DNA, 15 bp, Homo sapiens
ccacagctctgtgaa

SEQ ID NO: 128772 - DNA, 15 bp, Homo sapiens
cacagctctgtgaag

SEQ ID NO: 128773 - DNA, 15 bp, Homo sapiens
acagctctgtgaagt

SEQ ID NO: 128774 - DNA, 15 bp, Homo sapiens
cagctctgtgaagtt

SEQ ID NO: 128775 - DNA, 15 bp, Homo sapiens
agctctgtgaagtta

SEQ ID NO: 128776 - DNA, 15 bp, Homo sapiens
gctctgtgaagttaa

SEQ ID NO: 128777 - DNA, 15 bp, Homo sapiens
ctctgtgaagttaat

SEQ ID NO: 128778 - DNA, 15 bp, Homo sapiens
tctgtgaagttaatt

SEQ ID NO: 128779 - DNA, 15 bp, Homo sapiens
ctgtgaagttaattg

SEQ ID NO: 128780 - DNA, 15 bp, Homo sapiens
tgtgaagttaattgt

SEQ ID NO: 128781 - DNA, 15 bp, Homo sapiens
gtgaagttaattgta

SEQ ID NO: 128782 - DNA, 15 bp, Homo sapiens
tgaagttaattgtac

SEQ ID NO: 128783 - DNA, 15 bp, Homo sapiens
gaagttaattgtact

SEQ ID NO: 128784 - DNA, 15 bp, Homo sapiens
aagttaattgtactt

SEQ ID NO: 128785 - DNA, 15 bp, Homo sapiens
agttaattgtacttt

SEQ ID NO: 128786 - DNA, 15 bp, Homo sapiens
gttaattgtactttt

SEQ ID NO: 128787 - DNA, 15 bp, Homo sapiens
ttaattgtactttta

SEQ ID NO: 128788 - DNA, 15 bp, Homo sapiens
taattgtacttttat

SEQ ID NO: 128789 - DNA, 15 bp, Homo sapiens
aattgtacttttatc

SEQ ID NO: 128790 - DNA, 15 bp, Homo sapiens
attgtacttttatca

SEQ ID NO: 128791 - DNA, 15 bp, Homo sapiens
ttgtacttttatcac

SEQ ID NO: 128792 - DNA, 15 bp, Homo sapiens
tgtacttttatcacc

SEQ ID NO: 128793 - DNA, 15 bp, Homo sapiens
gtacttttatcacca

SEQ ID NO: 128794 - DNA, 15 bp, Homo sapiens
tacttttatcaccat

SEQ ID NO: 128795 - DNA, 15 bp, Homo sapiens
acttttatcaccatt

SEQ ID NO: 128796 - DNA, 15 bp, Homo sapiens
cttttatcaccattt

SEQ ID NO: 128797 - DNA, 15 bp, Homo sapiens
ttttatcaccatttt

SEQ ID NO: 128798 - DNA, 15 bp, Homo sapiens
tttatcaccatttta

SEQ ID NO: 128799 - DNA, 15 bp, Homo sapiens
ttatcaccattttac

SEQ ID NO: 128800 - DNA, 15 bp, Homo sapiens
tatcaccattttaca

SEQ ID NO: 128801 - DNA, 15 bp, Homo sapiens
atcaccattttacag

SEQ ID NO: 128802 - DNA, 15 bp, Homo sapiens
tcaccattttacaga

SEQ ID NO: 128803 - DNA, 15 bp, Homo sapiens
caccattttacagat

SEQ ID NO: 128804 - DNA, 15 bp, Homo sapiens
accattttacagatg

SEQ ID NO: 128805 - DNA, 15 bp, Homo sapiens
attttacagatgaga

SEQ ID NO: 128806 - DNA, 15 bp, Homo sapiens
ttttacagatgagaa

SEQ ID NO: 128807 - DNA, 15 bp, Homo sapiens
tttacagatgagaaa

SEQ ID NO: 128808 - DNA, 15 bp, Homo sapiens
ttacagatgagaaaa

SEQ ID NO: 128809 - DNA, 15 bp, Homo sapiens
tacagatgagaaaac

SEQ ID NO: 128810 - DNA, 15 bp, Homo sapiens
acagatgagaaaact

SEQ ID NO: 128811 - DNA, 15 bp, Homo sapiens
cagatgagaaaactg

SEQ ID NO: 128812 - DNA, 15 bp, Homo sapiens
agatgagaaaactga

SEQ ID NO: 128813 - DNA, 15 bp, Homo sapiens
gatgagaaaactgag

SEQ ID NO: 128814 - DNA, 15 bp, Homo sapiens
atgagaaaactgagg

SEQ ID NO: 128815 - DNA, 15 bp, Homo sapiens
tgagaaaactgaggg

SEQ ID NO: 128816 - DNA, 15 bp, Homo sapiens
gagaaaactgagggt

SEQ ID NO: 128817 - DNA, 15 bp, Homo sapiens
agaaaactgagggta

SEQ ID NO: 128818 - DNA, 15 bp, Homo sapiens
gaaaactgagggtat

SEQ ID NO: 128819 - DNA, 15 bp, Homo sapiens
aaaactgagggtatg

SEQ ID NO: 128820 - DNA, 15 bp, Homo sapiens
aaactgagggtatgg

SEQ ID NO: 128821 - DNA, 15 bp, Homo sapiens
aactgagggtatggg

SEQ ID NO: 128822 - DNA, 15 bp, Homo sapiens
actgagggtatgggg

SEQ ID NO: 128823 - DNA, 15 bp, Homo sapiens
ctgagggtatggggt

SEQ ID NO: 128824 - DNA, 15 bp, Homo sapiens
tgagggtatggggtc

SEQ ID NO: 128825 - DNA, 15 bp, Homo sapiens
gagggtatggggtca

SEQ ID NO: 128826 - DNA, 15 bp, Homo sapiens
agggtatggggtcaa

SEQ ID NO: 128827 - DNA, 15 bp, Homo sapiens
gggtatggggtcaat

SEQ ID NO: 128828 - DNA, 15 bp, Homo sapiens
ggtatggggtcaatg

SEQ ID NO: 128829 - DNA, 15 bp, Homo sapiens
gtatggggtcaatga

SEQ ID NO: 128830 - DNA, 15 bp, Homo sapiens
tatggggtcaatgac

SEQ ID NO: 128831 - DNA, 15 bp, Homo sapiens
atggggtcaatgact

SEQ ID NO: 128832 - DNA, 15 bp, Homo sapiens
tggggtcaatgactt

SEQ ID NO: 128833 - DNA, 15 bp, Homo sapiens
ggggtcaatgacttg

SEQ ID NO: 128834 - DNA, 15 bp, Homo sapiens
gggtcaatgacttgg

SEQ ID NO: 128835 - DNA, 15 bp, Homo sapiens
ggtcaatgacttggc

SEQ ID NO: 128836 - DNA, 15 bp, Homo sapiens
gtcaatgacttggct

SEQ ID NO: 128837 - DNA, 15 bp, Homo sapiens
tcaatgacttggcta

SEQ ID NO: 128838 - DNA, 15 bp, Homo sapiens
caatgacttggctaa

SEQ ID NO: 128839 - DNA, 15 bp, Homo sapiens
aatgacttggctaaa

SEQ ID NO: 128840 - DNA, 15 bp, Homo sapiens
atgacttggctaaag

SEQ ID NO: 128841 - DNA, 15 bp, Homo sapiens
tgacttggctaaagt

SEQ ID NO: 128842 - DNA, 15 bp, Homo sapiens
gacttggctaaagtc

SEQ ID NO: 128843 - DNA, 15 bp, Homo sapiens
acttggctaaagtca

SEQ ID NO: 128844 - DNA, 15 bp, Homo sapiens
cttggctaaagtcac

SEQ ID NO: 128845 - DNA, 15 bp, Homo sapiens
ttggctaaagtcact

SEQ ID NO: 128846 - DNA, 15 bp, Homo sapiens
tggctaaagtcactg

SEQ ID NO: 128847 - DNA, 15 bp, Homo sapiens
ggctaaagtcactgc

SEQ ID NO: 128848 - DNA, 15 bp, Homo sapiens
gctaaagtcactgct

SEQ ID NO: 128849 - DNA, 15 bp, Homo sapiens
ctaaagtcactgctt

SEQ ID NO: 128850 - DNA, 15 bp, Homo sapiens
taaagtcactgctta

SEQ ID NO: 128851 - DNA, 15 bp, Homo sapiens
aaagtcactgcttag

SEQ ID NO: 128852 - DNA, 15 bp, Homo sapiens
aagtcactgcttagc

SEQ ID NO: 128853 - DNA, 15 bp, Homo sapiens
agtcactgcttagca

SEQ ID NO: 128854 - DNA, 15 bp, Homo sapiens
gtcactgcttagcaa

SEQ ID NO: 128855 - DNA, 15 bp, Homo sapiens
tcactgcttagcaag

SEQ ID NO: 128856 - DNA, 15 bp, Homo sapiens
cactgcttagcaagc

SEQ ID NO: 128857 - DNA, 15 bp, Homo sapiens
actgcttagcaagct

SEQ ID NO: 128858 - DNA, 15 bp, Homo sapiens
ctgcttagcaagctg

SEQ ID NO: 128859 - DNA, 15 bp, Homo sapiens
tgcttagcaagctgc

SEQ ID NO: 128860 - DNA, 15 bp, Homo sapiens
gcttagcaagctgca

SEQ ID NO: 128861 - DNA, 15 bp, Homo sapiens
cttagcaagctgcag

SEQ ID NO: 128862 - DNA, 15 bp, Homo sapiens
ttagcaagctgcagg

SEQ ID NO: 128863 - DNA, 15 bp, Homo sapiens
tagcaagctgcaggg

SEQ ID NO: 128864 - DNA, 15 bp, Homo sapiens
agcaagctgcaggga

SEQ ID NO: 128865 - DNA, 15 bp, Homo sapiens
gcaagctgcagggac

SEQ ID NO: 128866 - DNA, 15 bp, Homo sapiens
agctgcagggactgg

SEQ ID NO: 128867 - DNA, 15 bp, Homo sapiens
gctgcagggactgga

SEQ ID NO: 128868 - DNA, 15 bp, Homo sapiens
ctgcagggactggat

SEQ ID NO: 128869 - DNA, 15 bp, Homo sapiens
tgcagggactggatg

SEQ ID NO: 128870 - DNA, 15 bp, Homo sapiens
gcagggactggatgt

SEQ ID NO: 128871 - DNA, 15 bp, Homo sapiens
cagggactggatgtg

SEQ ID NO: 128872 - DNA, 15 bp, Homo sapiens
agggactggatgtga

SEQ ID NO: 128873 - DNA, 15 bp, Homo sapiens
gggactggatgtgaa

SEQ ID NO: 128874 - DNA, 15 bp, Homo sapiens
ggactggatgtgaat

SEQ ID NO: 128875 - DNA, 15 bp, Homo sapiens
gactggatgtgaatt

SEQ ID NO: 128876 - DNA, 15 bp, Homo sapiens
actggatgtgaattc

SEQ ID NO: 128877 - DNA, 15 bp, Homo sapiens
ctggatgtgaattcc

SEQ ID NO: 128878 - DNA, 15 bp, Homo sapiens
tggatgtgaattcca

SEQ ID NO: 128879 - DNA, 15 bp, Homo sapiens
ggatgtgaattccaa

SEQ ID NO: 128880 - DNA, 15 bp, Homo sapiens
gatgtgaattccaat

SEQ ID NO: 128881 - DNA, 15 bp, Homo sapiens
atgtgaattccaatt

SEQ ID NO: 128882 - DNA, 15 bp, Homo sapiens
tgtgaattccaattg

SEQ ID NO: 128883 - DNA, 15 bp, Homo sapiens
gtgaattccaattgg

SEQ ID NO: 128884 - DNA, 15 bp, Homo sapiens
tgaattccaattggt

SEQ ID NO: 128885 - DNA, 15 bp, Homo sapiens
gaattccaattggtt

SEQ ID NO: 128886 - DNA, 15 bp, Homo sapiens
aattccaattggttt

SEQ ID NO: 128887 - DNA, 15 bp, Homo sapiens
attccaattggtttg

SEQ ID NO: 128888 - DNA, 15 bp, Homo sapiens
ttccaattggtttga

SEQ ID NO: 128889 - DNA, 15 bp, Homo sapiens
tccaattggtttgac

SEQ ID NO: 128890 - DNA, 15 bp, Homo sapiens
ccaattggtttgact

SEQ ID NO: 128891 - DNA, 15 bp, Homo sapiens
caattggtttgactc

SEQ ID NO: 128892 - DNA, 15 bp, Homo sapiens
aattggtttgactcc

SEQ ID NO: 128893 - DNA, 15 bp, Homo sapiens
attggtttgactcca

SEQ ID NO: 128894 - DNA, 15 bp, Homo sapiens
ttggtttgactccaa

SEQ ID NO: 128895 - DNA, 15 bp, Homo sapiens
tggtttgactccaaa

SEQ ID NO: 128896 - DNA, 15 bp, Homo sapiens
ggtttgactccaaag

SEQ ID NO: 128897 - DNA, 15 bp, Homo sapiens
tttgactccaaagcc

SEQ ID NO: 128898 - DNA, 15 bp, Homo sapiens
ttgactccaaagcct

SEQ ID NO: 128899 - DNA, 15 bp, Homo sapiens
tgactccaaagcctg

SEQ ID NO: 128900 - DNA, 15 bp, Homo sapiens
gactccaaagcctgt

SEQ ID NO: 128901 - DNA, 15 bp, Homo sapiens
actccaaagcctgtg

SEQ ID NO: 128902 - DNA, 15 bp, Homo sapiens
ctccaaagcctgtga

SEQ ID NO: 128903 - DNA, 15 bp, Homo sapiens
tccaaagcctgtgaa

SEQ ID NO: 128904 - DNA, 15 bp, Homo sapiens
ccaaagcctgtgaag

SEQ ID NO: 128905 - DNA, 15 bp, Homo sapiens
caaagcctgtgaagc

SEQ ID NO: 128906 - DNA, 15 bp, Homo sapiens
aaagcctgtgaagct

SEQ ID NO: 128907 - DNA, 15 bp, Homo sapiens
aagcctgtgaagcta

SEQ ID NO: 128908 - DNA, 15 bp, Homo sapiens
agcctgtgaagctac

SEQ ID NO: 128909 - DNA, 15 bp, Homo sapiens
gcctgtgaagctact

SEQ ID NO: 128910 - DNA, 15 bp, Homo sapiens
cctgtgaagctactt

SEQ ID NO: 128911 - DNA, 15 bp, Homo sapiens
ctgtgaagctacttg

SEQ ID NO: 128912 - DNA, 15 bp, Homo sapiens
tgtgaagctacttgt

SEQ ID NO: 128913 - DNA, 15 bp, Homo sapiens
gtgaagctacttgtt

SEQ ID NO: 128914 - DNA, 15 bp, Homo sapiens
tgaagctacttgttc

SEQ ID NO: 128915 - DNA, 15 bp, Homo sapiens
gaagctacttgttct

SEQ ID NO: 128916 - DNA, 15 bp, Homo sapiens
aagctacttgttctt

SEQ ID NO: 128917 - DNA, 15 bp, Homo sapiens
agctacttgttcttc

SEQ ID NO: 128918 - DNA, 15 bp, Homo sapiens
gctacttgttcttca

SEQ ID NO: 128919 - DNA, 15 bp, Homo sapiens
ctacttgttcttcac

SEQ ID NO: 128920 - DNA, 15 bp, Homo sapiens
tacttgttcttcacc

SEQ ID NO: 128921 - DNA, 15 bp, Homo sapiens
acttgttcttcacca

SEQ ID NO: 128922 - DNA, 15 bp, Homo sapiens
cttgttcttcaccac

SEQ ID NO: 128923 - DNA, 15 bp, Homo sapiens
ttgttcttcaccacc

SEQ ID NO: 128924 - DNA, 15 bp, Homo sapiens
tgttcttcaccacct

SEQ ID NO: 128925 - DNA, 15 bp, Homo sapiens
gttcttcaccaccta

SEQ ID NO: 128926 - DNA, 15 bp, Homo sapiens
ttcttcaccacctag

SEQ ID NO: 128927 - DNA, 15 bp, Homo sapiens
tcttcaccacctaga

SEQ ID NO: 128928 - DNA, 15 bp, Homo sapiens
cttcaccacctagag

SEQ ID NO: 128929 - DNA, 15 bp, Homo sapiens
ttcaccacctagagc

SEQ ID NO: 128930 - DNA, 15 bp, Homo sapiens
tcaccacctagagct

SEQ ID NO: 128931 - DNA, 15 bp, Homo sapiens
caccacctagagctg

SEQ ID NO: 128932 - DNA, 15 bp, Homo sapiens
accacctagagctgt

SEQ ID NO: 128933 - DNA, 15 bp, Homo sapiens
ccacctagagctgtg

SEQ ID NO: 128934 - DNA, 15 bp, Homo sapiens
cacctagagctgtgg

SEQ ID NO: 128935 - DNA, 15 bp, Homo sapiens
acctagagctgtggt

SEQ ID NO: 128936 - DNA, 15 bp, Homo sapiens
cctagagctgtggtt

SEQ ID NO: 128937 - DNA, 15 bp, Homo sapiens
ctagagctgtggttc

SEQ ID NO: 128938 - DNA, 15 bp, Homo sapiens
tagagctgtggttct

SEQ ID NO: 128939 - DNA, 15 bp, Homo sapiens
agagctgtggttctt

SEQ ID NO: 128940 - DNA, 15 bp, Homo sapiens
gagctgtggttcttg

SEQ ID NO: 128941 - DNA, 15 bp, Homo sapiens
agctgtggttcttga

SEQ ID NO: 128942 - DNA, 15 bp, Homo sapiens
gctgtggttcttgat

SEQ ID NO: 128943 - DNA, 15 bp, Homo sapiens
ctgtggttcttgata

SEQ ID NO: 128944 - DNA, 15 bp, Homo sapiens
tgtggttcttgataa

SEQ ID NO: 128945 - DNA, 15 bp, Homo sapiens
gtggttcttgataac

SEQ ID NO: 128946 - DNA, 15 bp, Homo sapiens
tggttcttgataact

SEQ ID NO: 128947 - DNA, 15 bp, Homo sapiens
ggttcttgataactg

SEQ ID NO: 128948 - DNA, 15 bp, Homo sapiens
gttcttgataactgt

SEQ ID NO: 128949 - DNA, 15 bp, Homo sapiens
ttcttgataactgtg

SEQ ID NO: 128950 - DNA, 15 bp, Homo sapiens
tcttgataactgtga

SEQ ID NO: 128951 - DNA, 15 bp, Homo sapiens
cttgataactgtgaa

SEQ ID NO: 128952 - DNA, 15 bp, Homo sapiens
ttgataactgtgaac

SEQ ID NO: 128953 - DNA, 15 bp, Homo sapiens
tgataactgtgaact

SEQ ID NO: 128954 - DNA, 15 bp, Homo sapiens
gataactgtgaactc

SEQ ID NO: 128955 - DNA, 15 bp, Homo sapiens
ataactgtgaactct

SEQ ID NO: 128956 - DNA, 15 bp, Homo sapiens
taactgtgaactctt

SEQ ID NO: 128957 - DNA, 15 bp, Homo sapiens
aactgtgaactcttt

SEQ ID NO: 128958 - DNA, 15 bp, Homo sapiens
actgtgaactctttt

SEQ ID NO: 128959 - DNA, 15 bp, Homo sapiens
ctgtgaactcttttg

SEQ ID NO: 128960 - DNA, 15 bp, Homo sapiens
tgtgaactcttttgg

SEQ ID NO: 128961 - DNA, 15 bp, Homo sapiens
gtgaactcttttggg

SEQ ID NO: 128962 - DNA, 15 bp, Homo sapiens
tgaactcttttgggg

SEQ ID NO: 128963 - DNA, 15 bp, Homo sapiens
gaactcttttggggt

SEQ ID NO: 128964 - DNA, 15 bp, Homo sapiens
aactcttttggggtc

SEQ ID NO: 128965 - DNA, 15 bp, Homo sapiens
actcttttggggtca

SEQ ID NO: 128966 - DNA, 15 bp, Homo sapiens
ctcttttggggtcac

SEQ ID NO: 128967 - DNA, 15 bp, Homo sapiens
tcttttggggtcaca

SEQ ID NO: 128968 - DNA, 15 bp, Homo sapiens
cttttggggtcacaa

SEQ ID NO: 128969 - DNA, 15 bp, Homo sapiens
ttttggggtcacaaa

SEQ ID NO: 128970 - DNA, 15 bp, Homo sapiens
tttggggtcacaaat

SEQ ID NO: 128971 - DNA, 15 bp, Homo sapiens
ttggggtcacaaata

SEQ ID NO: 128972 - DNA, 15 bp, Homo sapiens
tggggtcacaaatag

SEQ ID NO: 128973 - DNA, 15 bp, Homo sapiens
ggggtcacaaatagc

SEQ ID NO: 128974 - DNA, 15 bp, Homo sapiens
gggtcacaaatagcc

SEQ ID NO: 128975 - DNA, 15 bp, Homo sapiens
ggtcacaaatagccc

SEQ ID NO: 128976 - DNA, 15 bp, Homo sapiens
gtcacaaatagccct

SEQ ID NO: 128977 - DNA, 15 bp, Homo sapiens
tcacaaatagccctg

SEQ ID NO: 128978 - DNA, 15 bp, Homo sapiens
cacaaatagccctga

SEQ ID NO: 128979 - DNA, 15 bp, Homo sapiens
acaaatagccctgag

SEQ ID NO: 128980 - DNA, 15 bp, Homo sapiens
caaatagccctgaga

SEQ ID NO: 128981 - DNA, 15 bp, Homo sapiens
aaatagccctgagaa

SEQ ID NO: 128982 - DNA, 15 bp, Homo sapiens
aatagccctgagaat

SEQ ID NO: 128983 - DNA, 15 bp, Homo sapiens
atagccctgagaata

SEQ ID NO: 128984 - DNA, 15 bp, Homo sapiens
tagccctgagaatat

SEQ ID NO: 128985 - DNA, 15 bp, Homo sapiens
agccctgagaatatg

SEQ ID NO: 128986 - DNA, 15 bp, Homo sapiens
gccctgagaatatga

SEQ ID NO: 128987 - DNA, 15 bp, Homo sapiens
ccctgagaatatgat

SEQ ID NO: 128988 - DNA, 15 bp, Homo sapiens
cctgagaatatgata

SEQ ID NO: 128989 - DNA, 15 bp, Homo sapiens
ctgagaatatgatag

SEQ ID NO: 128990 - DNA, 15 bp, Homo sapiens
tgagaatatgataga

SEQ ID NO: 128991 - DNA, 15 bp, Homo sapiens
gagaatatgatagaa

SEQ ID NO: 128992 - DNA, 15 bp, Homo sapiens
agaatatgatagaag

SEQ ID NO: 128993 - DNA, 15 bp, Homo sapiens
gaatatgatagaagc

SEQ ID NO: 128994 - DNA, 15 bp, Homo sapiens
aatatgatagaagca

SEQ ID NO: 128995 - DNA, 15 bp, Homo sapiens
atatgatagaagcag

SEQ ID NO: 128996 - DNA, 15 bp, Homo sapiens
tatgatagaagcagg

SEQ ID NO: 128997 - DNA, 15 bp, Homo sapiens
atgatagaagcagga

SEQ ID NO: 128998 - DNA, 15 bp, Homo sapiens
tgatagaagcaggag

SEQ ID NO: 128999 - DNA, 15 bp, Homo sapiens
gatagaagcaggagc

SEQ ID NO: 129000 - DNA, 15 bp, Homo sapiens
atagaagcaggagct

SEQ ID NO: 129001 - DNA, 15 bp, Homo sapiens
tagaagcaggagctc

SEQ ID NO: 129002 - DNA, 15 bp, Homo sapiens
agaagcaggagctct

SEQ ID NO: 129003 - DNA, 15 bp, Homo sapiens
gaagcaggagctctg

SEQ ID NO: 129004 - DNA, 15 bp, Homo sapiens
aagcaggagctctgg

SEQ ID NO: 129005 - DNA, 15 bp, Homo sapiens
agcaggagctctggc

SEQ ID NO: 129006 - DNA, 15 bp, Homo sapiens
gcaggagctctggcc

SEQ ID NO: 129007 - DNA, 15 bp, Homo sapiens
caggagctctggcct

SEQ ID NO: 129008 - DNA, 15 bp, Homo sapiens
aggagctctggcctt

SEQ ID NO: 129009 - DNA, 15 bp, Homo sapiens
ggagctctggccttt

SEQ ID NO: 129010 - DNA, 15 bp, Homo sapiens
gagctctggcctttc

SEQ ID NO: 129011 - DNA, 15 bp, Homo sapiens
agctctggcctttct

SEQ ID NO: 129012 - DNA, 15 bp, Homo sapiens
gctctggcctttctg

SEQ ID NO: 129013 - DNA, 15 bp, Homo sapiens
ctctggcctttctgt

SEQ ID NO: 129014 - DNA, 15 bp, Homo sapiens
tctggcctttctgtc

SEQ ID NO: 129015 - DNA, 15 bp, Homo sapiens
ctggcctttctgtcc

SEQ ID NO: 129016 - DNA, 15 bp, Homo sapiens
tggcctttctgtcca

SEQ ID NO: 129017 - DNA, 15 bp, Homo sapiens
ggcctttctgtccat

SEQ ID NO: 129018 - DNA, 15 bp, Homo sapiens
gcctttctgtccata

SEQ ID NO: 129019 - DNA, 15 bp, Homo sapiens
cctttctgtccatac

SEQ ID NO: 129020 - DNA, 15 bp, Homo sapiens
ctttctgtccatacc

SEQ ID NO: 129021 - DNA, 15 bp, Homo sapiens
tttctgtccatacct

SEQ ID NO: 129022 - DNA, 15 bp, Homo sapiens
ttctgtccatacctg

SEQ ID NO: 129023 - DNA, 15 bp, Homo sapiens
tctgtccatacctga

SEQ ID NO: 129024 - DNA, 15 bp, Homo sapiens
ctgtccatacctgaa

SEQ ID NO: 129025 - DNA, 15 bp, Homo sapiens
tgtccatacctgaac

SEQ ID NO: 129026 - DNA, 15 bp, Homo sapiens
gtccatacctgaaca

SEQ ID NO: 129027 - DNA, 15 bp, Homo sapiens
tccatacctgaacag

SEQ ID NO: 129028 - DNA, 15 bp, Homo sapiens
ccatacctgaacagg

SEQ ID NO: 129029 - DNA, 15 bp, Homo sapiens
catacctgaacaggt

SEQ ID NO: 129030 - DNA, 15 bp, Homo sapiens
atacctgaacaggtc

SEQ ID NO: 129031 - DNA, 15 bp, Homo sapiens
tacctgaacaggtcc

SEQ ID NO: 129032 - DNA, 15 bp, Homo sapiens
acctgaacaggtcct

SEQ ID NO: 129033 - DNA, 15 bp, Homo sapiens
cctgaacaggtcctt

SEQ ID NO: 129034 - DNA, 15 bp, Homo sapiens
ctgaacaggtccttg

SEQ ID NO: 129035 - DNA, 15 bp, Homo sapiens
tgaacaggtccttgg

SEQ ID NO: 129036 - DNA, 15 bp, Homo sapiens
gaacaggtccttggg

SEQ ID NO: 129037 - DNA, 15 bp, Homo sapiens
aacaggtccttgggt

SEQ ID NO: 129038 - DNA, 15 bp, Homo sapiens
acaggtccttgggtt

SEQ ID NO: 129039 - DNA, 15 bp, Homo sapiens
caggtccttgggtta

SEQ ID NO: 129040 - DNA, 15 bp, Homo sapiens
aggtccttgggttaa

SEQ ID NO: 129041 - DNA, 15 bp, Homo sapiens
ggtccttgggttaag

SEQ ID NO: 129042 - DNA, 15 bp, Homo sapiens
gtccttgggttaaga

SEQ ID NO: 129043 - DNA, 15 bp, Homo sapiens
tccttgggttaagag

SEQ ID NO: 129044 - DNA, 15 bp, Homo sapiens
ccttgggttaagagc

SEQ ID NO: 129045 - DNA, 15 bp, Homo sapiens
cttgggttaagagcc

SEQ ID NO: 129046 - DNA, 15 bp, Homo sapiens
ttgggttaagagccc

SEQ ID NO: 129047 - DNA, 15 bp, Homo sapiens
tgggttaagagcccc

SEQ ID NO: 129048 - DNA, 15 bp, Homo sapiens
gggttaagagcccct

SEQ ID NO: 129049 - DNA, 15 bp, Homo sapiens
ggttaagagcccctc

SEQ ID NO: 129050 - DNA, 15 bp, Homo sapiens
gttaagagcccctcg

SEQ ID NO: 129051 - DNA, 15 bp, Homo sapiens
ttaagagcccctcgt

SEQ ID NO: 129052 - DNA, 15 bp, Homo sapiens
taagagcccctcgtc

SEQ ID NO: 129053 - DNA, 15 bp, Homo sapiens
aagagcccctcgtcc

SEQ ID NO: 129054 - DNA, 15 bp, Homo sapiens
agagcccctcgtcca

SEQ ID NO: 129055 - DNA, 15 bp, Homo sapiens
gagcccctcgtccag

SEQ ID NO: 129056 - DNA, 15 bp, Homo sapiens
agcccctcgtccagg

SEQ ID NO: 129057 - DNA, 15 bp, Homo sapiens
gcccctcgtccaggg

SEQ ID NO: 129058 - DNA, 15 bp, Homo sapiens
cccctcgtccagggc

SEQ ID NO: 129059 - DNA, 15 bp, Homo sapiens
ccctcgtccagggcc

SEQ ID NO: 129060 - DNA, 15 bp, Homo sapiens
cctcgtccagggcct

SEQ ID NO: 129061 - DNA, 15 bp, Homo sapiens
ctcgtccagggccta

SEQ ID NO: 129062 - DNA, 15 bp, Homo sapiens
tcgtccagggcctat

SEQ ID NO: 129063 - DNA, 15 bp, Homo sapiens
cgtccagggcctatt

SEQ ID NO: 129064 - DNA, 15 bp, Homo sapiens
gtccagggcctatta

SEQ ID NO: 129065 - DNA, 15 bp, Homo sapiens
tccagggcctattaa

SEQ ID NO: 129066 - DNA, 15 bp, Homo sapiens
ccagggcctattaat

SEQ ID NO: 129067 - DNA, 15 bp, Homo sapiens
cagggcctattaatc

SEQ ID NO: 129068 - DNA, 15 bp, Homo sapiens
agggcctattaatct

SEQ ID NO: 129069 - DNA, 15 bp, Homo sapiens
gggcctattaatctt

SEQ ID NO: 129070 - DNA, 15 bp, Homo sapiens
ggcctattaatcttg

SEQ ID NO: 129071 - DNA, 15 bp, Homo sapiens
gcctattaatcttga

SEQ ID NO: 129072 - DNA, 15 bp, Homo sapiens
cctattaatcttgat

SEQ ID NO: 129073 - DNA, 15 bp, Homo sapiens
ctattaatcttgatc

SEQ ID NO: 129074 - DNA, 15 bp, Homo sapiens
tattaatcttgatcc

SEQ ID NO: 129075 - DNA, 15 bp, Homo sapiens
attaatcttgatcct

SEQ ID NO: 129076 - DNA, 15 bp, Homo sapiens
ttaatcttgatcctc

SEQ ID NO: 129077 - DNA, 15 bp, Homo sapiens
taatcttgatcctca

SEQ ID NO: 129078 - DNA, 15 bp, Homo sapiens
aatcttgatcctcat

SEQ ID NO: 129079 - DNA, 15 bp, Homo sapiens
atcttgatcctcata

SEQ ID NO: 129080 - DNA, 15 bp, Homo sapiens
tcttgatcctcataa

SEQ ID NO: 129081 - DNA, 15 bp, Homo sapiens
cttgatcctcataag

SEQ ID NO: 129082 - DNA, 15 bp, Homo sapiens
ttgatcctcataagc

SEQ ID NO: 129083 - DNA, 15 bp, Homo sapiens
tgatcctcataagca

SEQ ID NO: 129084 - DNA, 15 bp, Homo sapiens
gatcctcataagcag

SEQ ID NO: 129085 - DNA, 15 bp, Homo sapiens
atcctcataagcagc

SEQ ID NO: 129086 - DNA, 15 bp, Homo sapiens
tcctcataagcagca

SEQ ID NO: 129087 - DNA, 15 bp, Homo sapiens
cctcataagcagcat

SEQ ID NO: 129088 - DNA, 15 bp, Homo sapiens
ctcataagcagcatc

SEQ ID NO: 129089 - DNA, 15 bp, Homo sapiens
tcataagcagcatcc

SEQ ID NO: 129090 - DNA, 15 bp, Homo sapiens
cataagcagcatcca

SEQ ID NO: 129091 - DNA, 15 bp, Homo sapiens
ataagcagcatccat

SEQ ID NO: 129092 - DNA, 15 bp, Homo sapiens
taagcagcatccatg

SEQ ID NO: 129093 - DNA, 15 bp, Homo sapiens
aagcagcatccatgt

SEQ ID NO: 129094 - DNA, 15 bp, Homo sapiens
agcagcatccatgta

SEQ ID NO: 129095 - DNA, 15 bp, Homo sapiens
gcagcatccatgtat

SEQ ID NO: 129096 - DNA, 15 bp, Homo sapiens
cagcatccatgtatt

SEQ ID NO: 129097 - DNA, 15 bp, Homo sapiens
agcatccatgtatta

SEQ ID NO: 129098 - DNA, 15 bp, Homo sapiens
gcatccatgtattac

SEQ ID NO: 129099 - DNA, 15 bp, Homo sapiens
catccatgtattacg

SEQ ID NO: 129100 - DNA, 15 bp, Homo sapiens
atccatgtattacgg

SEQ ID NO: 129101 - DNA, 15 bp, Homo sapiens
tccatgtattacggc

SEQ ID NO: 129102 - DNA, 15 bp, Homo sapiens
ccatgtattacggcc

SEQ ID NO: 129103 - DNA, 15 bp, Homo sapiens
catgtattacggccg

SEQ ID NO: 129104 - DNA, 15 bp, Homo sapiens
atgtattacggccgc

SEQ ID NO: 129105 - DNA, 15 bp, Homo sapiens
tgtattacggccgca

SEQ ID NO: 129106 - DNA, 15 bp, Homo sapiens
gtattacggccgcaa

SEQ ID NO: 129107 - DNA, 15 bp, Homo sapiens
tattacggccgcaaa

SEQ ID NO: 129108 - DNA, 15 bp, Homo sapiens
attacggccgcaaac

SEQ ID NO: 129109 - DNA, 15 bp, Homo sapiens
ttacggccgcaaacc

SEQ ID NO: 129110 - DNA, 15 bp, Homo sapiens
tacggccgcaaacca

SEQ ID NO: 129111 - DNA, 15 bp, Homo sapiens
acggccgcaaaccaa

SEQ ID NO: 129112 - DNA, 15 bp, Homo sapiens
cggccgcaaaccaaa

SEQ ID NO: 129113 - DNA, 15 bp, Homo sapiens
ggccgcaaaccaaac

SEQ ID NO: 129114 - DNA, 15 bp, Homo sapiens
gccgcaaaccaaact

SEQ ID NO: 129115 - DNA, 15 bp, Homo sapiens
ccgcaaaccaaactg

SEQ ID NO: 129116 - DNA, 15 bp, Homo sapiens
cgcaaaccaaactgt

SEQ ID NO: 129117 - DNA, 15 bp, Homo sapiens
gcaaaccaaactgtg

SEQ ID NO: 129118 - DNA, 15 bp, Homo sapiens
caaaccaaactgtgc

SEQ ID NO: 129119 - DNA, 15 bp, Homo sapiens
aaaccaaactgtgcc

SEQ ID NO: 129120 - DNA, 15 bp, Homo sapiens
aaccaaactgtgcca

SEQ ID NO: 129121 - DNA, 15 bp, Homo sapiens
accaaactgtgccag

SEQ ID NO: 129122 - DNA, 15 bp, Homo sapiens
ccaaactgtgccaga

SEQ ID NO: 129123 - DNA, 15 bp, Homo sapiens
caaactgtgccagac

SEQ ID NO: 129124 - DNA, 15 bp, Homo sapiens
aaactgtgccagacc

SEQ ID NO: 129125 - DNA, 15 bp, Homo sapiens
aactgtgccagaccg

SEQ ID NO: 129126 - DNA, 15 bp, Homo sapiens
actgtgccagaccga

SEQ ID NO: 129127 - DNA, 15 bp, Homo sapiens
ctgtgccagaccgaa

SEQ ID NO: 129128 - DNA, 15 bp, Homo sapiens
tgtgccagaccgaat

SEQ ID NO: 129129 - DNA, 15 bp, Homo sapiens
gtgccagaccgaatc

SEQ ID NO: 129130 - DNA, 15 bp, Homo sapiens
tgccagaccgaatcc

SEQ ID NO: 129131 - DNA, 15 bp, Homo sapiens
gccagaccgaatcct

SEQ ID NO: 129132 - DNA, 15 bp, Homo sapiens
ccagaccgaatccta

SEQ ID NO: 129133 - DNA, 15 bp, Homo sapiens
cagaccgaatcctag

SEQ ID NO: 129134 - DNA, 15 bp, Homo sapiens
agaccgaatcctagg

SEQ ID NO: 129135 - DNA, 15 bp, Homo sapiens
gaccgaatcctagga

SEQ ID NO: 129136 - DNA, 15 bp, Homo sapiens
accgaatcctaggac

SEQ ID NO: 129137 - DNA, 15 bp, Homo sapiens
ccgaatcctaggacc

SEQ ID NO: 129138 - DNA, 15 bp, Homo sapiens
cgaatcctaggacca

SEQ ID NO: 129139 - DNA, 15 bp, Homo sapiens
gaatcctaggaccaa

SEQ ID NO: 129140 - DNA, 15 bp, Homo sapiens
aatcctaggaccaag

SEQ ID NO: 129141 - DNA, 15 bp, Homo sapiens
atcctaggaccaagc

SEQ ID NO: 129142 - DNA, 15 bp, Homo sapiens
tcctaggaccaagcc

SEQ ID NO: 129143 - DNA, 15 bp, Homo sapiens
cctaggaccaagccc

SEQ ID NO: 129144 - DNA, 15 bp, Homo sapiens
ctaggaccaagccca

SEQ ID NO: 129145 - DNA, 15 bp, Homo sapiens
taggaccaagcccaa

SEQ ID NO: 129146 - DNA, 15 bp, Homo sapiens
aggaccaagcccaaa

SEQ ID NO: 129147 - DNA, 15 bp, Homo sapiens
ggaccaagcccaaat

SEQ ID NO: 129148 - DNA, 15 bp, Homo sapiens
gaccaagcccaaata

SEQ ID NO: 129149 - DNA, 15 bp, Homo sapiens
accaagcccaaatat

SEQ ID NO: 129150 - DNA, 15 bp, Homo sapiens
ccaagcccaaatatg

SEQ ID NO: 129151 - DNA, 15 bp, Homo sapiens
caagcccaaatatgt

SEQ ID NO: 129152 - DNA, 15 bp, Homo sapiens
aagcccaaatatgtc

SEQ ID NO: 129153 - DNA, 15 bp, Homo sapiens
agcccaaatatgtcc

SEQ ID NO: 129154 - DNA, 15 bp, Homo sapiens
gcccaaatatgtccc

SEQ ID NO: 129155 - DNA, 15 bp, Homo sapiens
cccaaatatgtccca

SEQ ID NO: 129156 - DNA, 15 bp, Homo sapiens
ccaaatatgtcccat

SEQ ID NO: 129157 - DNA, 15 bp, Homo sapiens
caaatatgtcccatc

SEQ ID NO: 129158 - DNA, 15 bp, Homo sapiens
aaatatgtcccatca

SEQ ID NO: 129159 - DNA, 15 bp, Homo sapiens
aatatgtcccatcat

SEQ ID NO: 129160 - DNA, 15 bp, Homo sapiens
atatgtcccatcatc

SEQ ID NO: 129161 - DNA, 15 bp, Homo sapiens
tatgtcccatcatcc

SEQ ID NO: 129162 - DNA, 15 bp, Homo sapiens
atgtcccatcatcct

SEQ ID NO: 129163 - DNA, 15 bp, Homo sapiens
tgtcccatcatcctt

SEQ ID NO: 129164 - DNA, 15 bp, Homo sapiens
gtcccatcatccttt

SEQ ID NO: 129165 - DNA, 15 bp, Homo sapiens
tcccatcatcctttt

SEQ ID NO: 129166 - DNA, 15 bp, Homo sapiens
cccatcatccttttg

SEQ ID NO: 129167 - DNA, 15 bp, Homo sapiens
ccatcatccttttgg

SEQ ID NO: 129168 - DNA, 15 bp, Homo sapiens
catcatccttttggt

SEQ ID NO: 129169 - DNA, 15 bp, Homo sapiens
atcatccttttggta

SEQ ID NO: 129170 - DNA, 15 bp, Homo sapiens
tcatccttttggtaa

SEQ ID NO: 129171 - DNA, 15 bp, Homo sapiens
catccttttggtaag

SEQ ID NO: 129172 - DNA, 15 bp, Homo sapiens
atccttttggtaaga

SEQ ID NO: 129173 - DNA, 15 bp, Homo sapiens
tccttttggtaagaa

SEQ ID NO: 129174 - DNA, 15 bp, Homo sapiens
ccttttggtaagaag

SEQ ID NO: 129175 - DNA, 15 bp, Homo sapiens
cttttggtaagaagc

SEQ ID NO: 129176 - DNA, 15 bp, Homo sapiens
ttttggtaagaagct

SEQ ID NO: 129177 - DNA, 15 bp, Homo sapiens
tttggtaagaagctc

SEQ ID NO: 129178 - DNA, 15 bp, Homo sapiens
ttggtaagaagctca

SEQ ID NO: 129179 - DNA, 15 bp, Homo sapiens
tggtaagaagctcat

SEQ ID NO: 129180 - DNA, 15 bp, Homo sapiens
ggtaagaagctcatt

SEQ ID NO: 129181 - DNA, 15 bp, Homo sapiens
gtaagaagctcattg

SEQ ID NO: 129182 - DNA, 15 bp, Homo sapiens
taagaagctcattgt

SEQ ID NO: 129183 - DNA, 15 bp, Homo sapiens
aagaagctcattgta

SEQ ID NO: 129184 - DNA, 15 bp, Homo sapiens
agaagctcattgtaa

SEQ ID NO: 129185 - DNA, 15 bp, Homo sapiens
gaagctcattgtaag

SEQ ID NO: 129186 - DNA, 15 bp, Homo sapiens
aagctcattgtaaga

SEQ ID NO: 129187 - DNA, 15 bp, Homo sapiens
agctcattgtaagaa

SEQ ID NO: 129188 - DNA, 15 bp, Homo sapiens
gctcattgtaagaaa

SEQ ID NO: 129189 - DNA, 15 bp, Homo sapiens
ctcattgtaagaaag

SEQ ID NO: 129190 - DNA, 15 bp, Homo sapiens
tcattgtaagaaaga

SEQ ID NO: 129191 - DNA, 15 bp, Homo sapiens
cattgtaagaaagaa

SEQ ID NO: 129192 - DNA, 15 bp, Homo sapiens
attgtaagaaagaaa

SEQ ID NO: 129193 - DNA, 15 bp, Homo sapiens
ttgtaagaaagaaag

SEQ ID NO: 129194 - DNA, 15 bp, Homo sapiens
tgtaagaaagaaaga

SEQ ID NO: 129195 - DNA, 15 bp, Homo sapiens
gtaagaaagaaagag

SEQ ID NO: 129196 - DNA, 15 bp, Homo sapiens
taagaaagaaagagg

SEQ ID NO: 129197 - DNA, 15 bp, Homo sapiens
aagaaagaggagagc

SEQ ID NO: 129198 - DNA, 15 bp, Homo sapiens
agaaagaggagagca

SEQ ID NO: 129199 - DNA, 15 bp, Homo sapiens
gaaagaggagagcaa

SEQ ID NO: 129200 - DNA, 15 bp, Homo sapiens
aaagaggagagcaag

SEQ ID NO: 129201 - DNA, 15 bp, Homo sapiens
aagaggagagcaaga

SEQ ID NO: 129202 - DNA, 15 bp, Homo sapiens
agaggagagcaagag

SEQ ID NO: 129203 - DNA, 15 bp, Homo sapiens
gaggagagcaagagg

SEQ ID NO: 129204 - DNA, 15 bp, Homo sapiens
aggagagcaagagga

SEQ ID NO: 129205 - DNA, 15 bp, Homo sapiens
ggagagcaagaggat

SEQ ID NO: 129206 - DNA, 15 bp, Homo sapiens
gagagcaagaggatg

SEQ ID NO: 129207 - DNA, 15 bp, Homo sapiens
agagcaagaggatga

SEQ ID NO: 129208 - DNA, 15 bp, Homo sapiens
gagcaagaggatgac

SEQ ID NO: 129209 - DNA, 15 bp, Homo sapiens
agcaagaggatgacc

SEQ ID NO: 129210 - DNA, 15 bp, Homo sapiens
gcaagaggatgacct

SEQ ID NO: 129211 - DNA, 15 bp, Homo sapiens
caagaggatgaccta

SEQ ID NO: 129212 - DNA, 15 bp, Homo sapiens
aagaggatgacctag

SEQ ID NO: 129213 - DNA, 15 bp, Homo sapiens
agaggatgacctagt

SEQ ID NO: 129214 - DNA, 15 bp, Homo sapiens
gaggatgacctagtg

SEQ ID NO: 129215 - DNA, 15 bp, Homo sapiens
aggatgacctagtgc

SEQ ID NO: 129216 - DNA, 15 bp, Homo sapiens
ggatgacctagtgca

SEQ ID NO: 129217 - DNA, 15 bp, Homo sapiens
gatgacctagtgcat

SEQ ID NO: 129218 - DNA, 15 bp, Homo sapiens
atgacctagtgcatg

SEQ ID NO: 129219 - DNA, 15 bp, Homo sapiens
tgacctagtgcatgg

SEQ ID NO: 129220 - DNA, 15 bp, Homo sapiens
gacctagtgcatggg

SEQ ID NO: 129221 - DNA, 15 bp, Homo sapiens
acctagtgcatgggg

SEQ ID NO: 129222 - DNA, 15 bp, Homo sapiens
cctagtgcatggggc

SEQ ID NO: 129223 - DNA, 15 bp, Homo sapiens
ctagtgcatggggcc

SEQ ID NO: 129224 - DNA, 15 bp, Homo sapiens
tagtgcatggggcct

SEQ ID NO: 129225 - DNA, 15 bp, Homo sapiens
agtgcatggggcctc

SEQ ID NO: 129226 - DNA, 15 bp, Homo sapiens
gtgcatggggcctca

SEQ ID NO: 129227 - DNA, 15 bp, Homo sapiens
tgcatggggcctcat

SEQ ID NO: 129228 - DNA, 15 bp, Homo sapiens
gcatggggcctcatt

SEQ ID NO: 129229 - DNA, 15 bp, Homo sapiens
catggggcctcattg

SEQ ID NO: 129230 - DNA, 15 bp, Homo sapiens
atggggcctcattgt

SEQ ID NO: 129231 - DNA, 15 bp, Homo sapiens
tggggcctcattgtt

SEQ ID NO: 129232 - DNA, 15 bp, Homo sapiens
ggggcctcattgttt

SEQ ID NO: 129233 - DNA, 15 bp, Homo sapiens
gggcctcattgtttt

SEQ ID NO: 129234 - DNA, 15 bp, Homo sapiens
ggcctcattgtttta

SEQ ID NO: 129235 - DNA, 15 bp, Homo sapiens
gcctcattgttttaa

SEQ ID NO: 129236 - DNA, 15 bp, Homo sapiens
cctcattgttttaat

SEQ ID NO: 129237 - DNA, 15 bp, Homo sapiens
ctcattgttttaatt

SEQ ID NO: 129238 - DNA, 15 bp, Homo sapiens
tcattgttttaatta

SEQ ID NO: 129239 - DNA, 15 bp, Homo sapiens
cattgttttaattag

SEQ ID NO: 129240 - DNA, 15 bp, Homo sapiens
attgttttaattagt

SEQ ID NO: 129241 - DNA, 15 bp, Homo sapiens
ttgttttaattagtg

SEQ ID NO: 129242 - DNA, 15 bp, Homo sapiens
tgttttaattagtga

SEQ ID NO: 129243 - DNA, 15 bp, Homo sapiens
gttttaattagtgac

SEQ ID NO: 129244 - DNA, 15 bp, Homo sapiens
ttttaattagtgaca

SEQ ID NO: 129245 - DNA, 15 bp, Homo sapiens
tttaattagtgacaa

SEQ ID NO: 129246 - DNA, 15 bp, Homo sapiens
ttaattagtgacaaa

SEQ ID NO: 129247 - DNA, 15 bp, Homo sapiens
taattagtgacaaaa

SEQ ID NO: 129248 - DNA, 15 bp, Homo sapiens
aattagtgacaaaac

SEQ ID NO: 129249 - DNA, 15 bp, Homo sapiens
attagtgacaaaaca

SEQ ID NO: 129250 - DNA, 15 bp, Homo sapiens
ttagtgacaaaacaa

SEQ ID NO: 129251 - DNA, 15 bp, Homo sapiens
tagtgacaaaacaac

SEQ ID NO: 129252 - DNA, 15 bp, Homo sapiens
agtgacaaaacaaca

SEQ ID NO: 129253 - DNA, 15 bp, Homo sapiens
gtgacaaaacaacaa

SEQ ID NO: 129254 - DNA, 15 bp, Homo sapiens
tgacaaaacaacaat

SEQ ID NO: 129255 - DNA, 15 bp, Homo sapiens
gacaaaacaacaata

SEQ ID NO: 129256 - DNA, 15 bp, Homo sapiens
acaaaacaacaataa

SEQ ID NO: 129257 - DNA, 15 bp, Homo sapiens
caaaacaacaataat

SEQ ID NO: 129258 - DNA, 15 bp, Homo sapiens
aaaacaacaataata

SEQ ID NO: 129259 - DNA, 15 bp, Homo sapiens
aaacaacaataataa

SEQ ID NO: 129260 - DNA, 15 bp, Homo sapiens
aacaacaataataac

SEQ ID NO: 129261 - DNA, 15 bp, Homo sapiens
acaacaataataaca

SEQ ID NO: 129262 - DNA, 15 bp, Homo sapiens
caacaataataacaa

SEQ ID NO: 129263 - DNA, 15 bp, Homo sapiens
aacaataataacaac

SEQ ID NO: 129264 - DNA, 15 bp, Homo sapiens
acaataataacaaca

SEQ ID NO: 129265 - DNA, 15 bp, Homo sapiens
caataataacaacaa

SEQ ID NO: 129266 - DNA, 15 bp, Homo sapiens
aataataacaacaaa

SEQ ID NO: 129267 - DNA, 15 bp, Homo sapiens
ataataacaacaaaa

SEQ ID NO: 129268 - DNA, 15 bp, Homo sapiens
taataacaacaaaac

SEQ ID NO: 129269 - DNA, 15 bp, Homo sapiens
aataacaacaaaacc

SEQ ID NO: 129270 - DNA, 15 bp, Homo sapiens
ataacaacaaaaccc

SEQ ID NO: 129271 - DNA, 15 bp, Homo sapiens
taacaacaaaacccc

SEQ ID NO: 129272 - DNA, 15 bp, Homo sapiens
aacaacaaaaccccc

SEQ ID NO: 129273 - DNA, 15 bp, Homo sapiens
acaacaaaacccccg

SEQ ID NO: 129274 - DNA, 15 bp, Homo sapiens
caacaaaacccccga

SEQ ID NO: 129275 - DNA, 15 bp, Homo sapiens
aacaaaacccccgaa

SEQ ID NO: 129276 - DNA, 15 bp, Homo sapiens
acaaaacccccgaag

SEQ ID NO: 129277 - DNA, 15 bp, Homo sapiens
caaaacccccgaagc

SEQ ID NO: 129278 - DNA, 15 bp, Homo sapiens
aaaacccccgaagct

SEQ ID NO: 129279 - DNA, 15 bp, Homo sapiens
aaacccccgaagctt

SEQ ID NO: 129280 - DNA, 15 bp, Homo sapiens
aacccccgaagcttc

SEQ ID NO: 129281 - DNA, 15 bp, Homo sapiens
acccccgaagcttca

SEQ ID NO: 129282 - DNA, 15 bp, Homo sapiens
cccccgaagcttcac

SEQ ID NO: 129283 - DNA, 15 bp, Homo sapiens
ccccgaagcttcaca

SEQ ID NO: 129284 - DNA, 15 bp, Homo sapiens
cccgaagcttcacag

SEQ ID NO: 129285 - DNA, 15 bp, Homo sapiens
ccgaagcttcacaga

SEQ ID NO: 129286 - DNA, 15 bp, Homo sapiens
cgaagcttcacagat

SEQ ID NO: 129287 - DNA, 15 bp, Homo sapiens
gaagcttcacagatg

SEQ ID NO: 129288 - DNA, 15 bp, Homo sapiens
aagcttcacagatga

SEQ ID NO: 129289 - DNA, 15 bp, Homo sapiens
agcttcacagatgac

SEQ ID NO: 129290 - DNA, 15 bp, Homo sapiens
gcttcacagatgaca

SEQ ID NO: 129291 - DNA, 15 bp, Homo sapiens
cttcacagatgacat

SEQ ID NO: 129292 - DNA, 15 bp, Homo sapiens
ttcacagatgacatc

SEQ ID NO: 129293 - DNA, 15 bp, Homo sapiens
tcacagatgacatca

SEQ ID NO: 129294 - DNA, 15 bp, Homo sapiens
cacagatgacatcag

SEQ ID NO: 129295 - DNA, 15 bp, Homo sapiens
acagatgacatcaga

SEQ ID NO: 129296 - DNA, 15 bp, Homo sapiens
cagatgacatcagac

SEQ ID NO: 129297 - DNA, 15 bp, Homo sapiens
agatgacatcagacc

SEQ ID NO: 129298 - DNA, 15 bp, Homo sapiens
gatgacatcagaccc

SEQ ID NO: 129299 - DNA, 15 bp, Homo sapiens
atgacatcagacccc

SEQ ID NO: 129300 - DNA, 15 bp, Homo sapiens
tgacatcagacccca

SEQ ID NO: 129301 - DNA, 15 bp, Homo sapiens
gacatcagaccccaa

SEQ ID NO: 129302 - DNA, 15 bp, Homo sapiens
acatcagaccccaag

SEQ ID NO: 129303 - DNA, 15 bp, Homo sapiens
catcagaccccaagc

SEQ ID NO: 129304 - DNA, 15 bp, Homo sapiens
atcagaccccaagcc

SEQ ID NO: 129305 - DNA, 15 bp, Homo sapiens
tcagaccccaagcct

SEQ ID NO: 129306 - DNA, 15 bp, Homo sapiens
cagaccccaagcctg

SEQ ID NO: 129307 - DNA, 15 bp, Homo sapiens
agaccccaagcctgt

SEQ ID NO: 129308 - DNA, 15 bp, Homo sapiens
gaccccaagcctgtg

SEQ ID NO: 129309 - DNA, 15 bp, Homo sapiens
accccaagcctgtgt

SEQ ID NO: 129310 - DNA, 15 bp, Homo sapiens
ccccaagcctgtgtg

SEQ ID NO: 129311 - DNA, 15 bp, Homo sapiens
cccaagcctgtgtgt

SEQ ID NO: 129312 - DNA, 15 bp, Homo sapiens
ccaagcctgtgtgtt

SEQ ID NO: 129313 - DNA, 15 bp, Homo sapiens
caagcctgtgtgttt

SEQ ID NO: 129314 - DNA, 15 bp, Homo sapiens
aagcctgtgtgtttt

SEQ ID NO: 129315 - DNA, 15 bp, Homo sapiens
agcctgtgtgttttt

SEQ ID NO: 129316 - DNA, 15 bp, Homo sapiens
gcctgtgtgtttttc

SEQ ID NO: 129317 - DNA, 15 bp, Homo sapiens
cctgtgtgtttttca

SEQ ID NO: 129318 - DNA, 15 bp, Homo sapiens
ctgtgtgtttttcag

SEQ ID NO: 129319 - DNA, 15 bp, Homo sapiens
tgtgtgtttttcagg

SEQ ID NO: 129320 - DNA, 15 bp, Homo sapiens
gtgtgtttttcaggt

SEQ ID NO: 129321 - DNA, 15 bp, Homo sapiens
tgtgtttttcaggtg

SEQ ID NO: 129322 - DNA, 15 bp, Homo sapiens
gtgtttttcaggtgc

SEQ ID NO: 129323 - DNA, 15 bp, Homo sapiens
tgtttttcaggtgcc

SEQ ID NO: 129324 - DNA, 15 bp, Homo sapiens
gtttttcaggtgccc

SEQ ID NO: 129325 - DNA, 15 bp, Homo sapiens
tttttcaggtgccct

SEQ ID NO: 129326 - DNA, 15 bp, Homo sapiens
ttttcaggtgccctt

SEQ ID NO: 129327 - DNA, 15 bp, Homo sapiens
tttcaggtgcccttg

SEQ ID NO: 129328 - DNA, 15 bp, Homo sapiens
ttcaggtgcccttga

SEQ ID NO: 129329 - DNA, 15 bp, Homo sapiens
tcaggtgcccttgag

SEQ ID NO: 129330 - DNA, 15 bp, Homo sapiens
caggtgcccttgagg

SEQ ID NO: 129331 - DNA, 15 bp, Homo sapiens
aggtgcccttgagga

SEQ ID NO: 129332 - DNA, 15 bp, Homo sapiens
ggtgcccttgaggag

SEQ ID NO: 129333 - DNA, 15 bp, Homo sapiens
gtgcccttgaggagc

SEQ ID NO: 129334 - DNA, 15 bp, Homo sapiens
tgcccttgaggagct

SEQ ID NO: 129335 - DNA, 15 bp, Homo sapiens
gcccttgaggagctt

SEQ ID NO: 129336 - DNA, 15 bp, Homo sapiens
cccttgaggagcttt

SEQ ID NO: 129337 - DNA, 15 bp, Homo sapiens
ccttgaggagctttg

SEQ ID NO: 129338 - DNA, 15 bp, Homo sapiens
cttgaggagctttgt

SEQ ID NO: 129339 - DNA, 15 bp, Homo sapiens
ttgaggagctttgta

SEQ ID NO: 129340 - DNA, 15 bp, Homo sapiens
tgaggagctttgtag

SEQ ID NO: 129341 - DNA, 15 bp, Homo sapiens
gaggagctttgtagc

SEQ ID NO: 129342 - DNA, 15 bp, Homo sapiens
aggagctttgtagct

SEQ ID NO: 129343 - DNA, 15 bp, Homo sapiens
ggagctttgtagctg

SEQ ID NO: 129344 - DNA, 15 bp, Homo sapiens
gagctttgtagctgg

SEQ ID NO: 129345 - DNA, 15 bp, Homo sapiens
agctttgtagctggc

SEQ ID NO: 129346 - DNA, 15 bp, Homo sapiens
gctttgtagctggca

SEQ ID NO: 129347 - DNA, 15 bp, Homo sapiens
ctttgtagctggcag

SEQ ID NO: 129348 - DNA, 15 bp, Homo sapiens
tttgtagctggcaga

SEQ ID NO: 129349 - DNA, 15 bp, Homo sapiens
ttgtagctggcagag

SEQ ID NO: 129350 - DNA, 15 bp, Homo sapiens
tgtagctggcagagg

SEQ ID NO: 129351 - DNA, 15 bp, Homo sapiens
gtagctggcagagga

SEQ ID NO: 129352 - DNA, 15 bp, Homo sapiens
tagctggcagaggag

SEQ ID NO: 129353 - DNA, 15 bp, Homo sapiens
agctggcagaggagg

SEQ ID NO: 129354 - DNA, 15 bp, Homo sapiens
gctggcagaggaggt

SEQ ID NO: 129355 - DNA, 15 bp, Homo sapiens
ctggcagaggaggtg

SEQ ID NO: 129356 - DNA, 15 bp, Homo sapiens
tggcagaggaggtga

SEQ ID NO: 129357 - DNA, 15 bp, Homo sapiens
ggcagaggaggtgaa

SEQ ID NO: 129358 - DNA, 15 bp, Homo sapiens
gcagaggaggtgaaa

SEQ ID NO: 129359 - DNA, 15 bp, Homo sapiens
cagaggaggtgaaac

SEQ ID NO: 129360 - DNA, 15 bp, Homo sapiens
agaggaggtgaaact

SEQ ID NO: 129361 - DNA, 15 bp, Homo sapiens
gaggaggtgaaactg

SEQ ID NO: 129362 - DNA, 15 bp, Homo sapiens
aggaggtgaaactga

SEQ ID NO: 129363 - DNA, 15 bp, Homo sapiens
ggaggtgaaactgac

SEQ ID NO: 129364 - DNA, 15 bp, Homo sapiens
gaggtgaaactgaca

SEQ ID NO: 129365 - DNA, 15 bp, Homo sapiens
aggtgaaactgacaa

SEQ ID NO: 129366 - DNA, 15 bp, Homo sapiens
ggtgaaactgacaaa

SEQ ID NO: 129367 - DNA, 15 bp, Homo sapiens
gtgaaactgacaaat

SEQ ID NO: 129368 - DNA, 15 bp, Homo sapiens
tgaaactgacaaatg

SEQ ID NO: 129369 - DNA, 15 bp, Homo sapiens
gaaactgacaaatgt

SEQ ID NO: 129370 - DNA, 15 bp, Homo sapiens
aaactgacaaatgtt

SEQ ID NO: 129371 - DNA, 15 bp, Homo sapiens
aactgacaaatgttt

SEQ ID NO: 129372 - DNA, 15 bp, Homo sapiens
actgacaaatgtttg

SEQ ID NO: 129373 - DNA, 15 bp, Homo sapiens
ctgacaaatgtttgg

SEQ ID NO: 129374 - DNA, 15 bp, Homo sapiens
tgacaaatgtttggc

SEQ ID NO: 129375 - DNA, 15 bp, Homo sapiens
gacaaatgtttggca

SEQ ID NO: 129376 - DNA, 15 bp, Homo sapiens
acaaatgtttggcag

SEQ ID NO: 129377 - DNA, 15 bp, Homo sapiens
caaatgtttggcaga

SEQ ID NO: 129378 - DNA, 15 bp, Homo sapiens
aaatgtttggcagat

SEQ ID NO: 129379 - DNA, 15 bp, Homo sapiens
aatgtttggcagatg

SEQ ID NO: 129380 - DNA, 15 bp, Homo sapiens
atgtttggcagatgg

SEQ ID NO: 129381 - DNA, 15 bp, Homo sapiens
tgtttggcagatgga

SEQ ID NO: 129382 - DNA, 15 bp, Homo sapiens
gtttggcagatggag

SEQ ID NO: 129383 - DNA, 15 bp, Homo sapiens
tttggcagatggagg

SEQ ID NO: 129384 - DNA, 15 bp, Homo sapiens
ttggcagatggagga

SEQ ID NO: 129385 - DNA, 15 bp, Homo sapiens
tggcagatggaggag

SEQ ID NO: 129386 - DNA, 15 bp, Homo sapiens
ggcagatggaggaga

SEQ ID NO: 129387 - DNA, 15 bp, Homo sapiens
gcagatggaggagag

SEQ ID NO: 129388 - DNA, 15 bp, Homo sapiens
cagatggaggagagt

SEQ ID NO: 129389 - DNA, 15 bp, Homo sapiens
agatggaggagagta

SEQ ID NO: 129390 - DNA, 15 bp, Homo sapiens
gatggaggagagtac

SEQ ID NO: 129391 - DNA, 15 bp, Homo sapiens
atggaggagagtacc

SEQ ID NO: 129392 - DNA, 15 bp, Homo sapiens
tggaggagagtacca

SEQ ID NO: 129393 - DNA, 15 bp, Homo sapiens
ggaggagagtaccag

SEQ ID NO: 129394 - DNA, 15 bp, Homo sapiens
gaggagagtaccaga

SEQ ID NO: 129395 - DNA, 15 bp, Homo sapiens
aggagagtaccagag

SEQ ID NO: 129396 - DNA, 15 bp, Homo sapiens
ggagagtaccagagg

SEQ ID NO: 129397 - DNA, 15 bp, Homo sapiens
gagagtaccagaggg

SEQ ID NO: 129398 - DNA, 15 bp, Homo sapiens
agagtaccagagggg

SEQ ID NO: 129399 - DNA, 15 bp, Homo sapiens
gagtaccagaggggt

SEQ ID NO: 129400 - DNA, 15 bp, Homo sapiens
agtaccagaggggtt

SEQ ID NO: 129401 - DNA, 15 bp, Homo sapiens
gtaccagaggggttt

SEQ ID NO: 129402 - DNA, 15 bp, Homo sapiens
taccagaggggtttg

SEQ ID NO: 129403 - DNA, 15 bp, Homo sapiens
accagaggggtttga

SEQ ID NO: 129404 - DNA, 15 bp, Homo sapiens
ccagaggggtttgag

SEQ ID NO: 129405 - DNA, 15 bp, Homo sapiens
cagaggggtttgaga

SEQ ID NO: 129406 - DNA, 15 bp, Homo sapiens
agaggggtttgagat

SEQ ID NO: 129407 - DNA, 15 bp, Homo sapiens
gaggggtttgagatg

SEQ ID NO: 129408 - DNA, 15 bp, Homo sapiens
aggggtttgagatga

SEQ ID NO: 129409 - DNA, 15 bp, Homo sapiens
ggggtttgagatgag

SEQ ID NO: 129410 - DNA, 15 bp, Homo sapiens
gggtttgagatgagc

SEQ ID NO: 129411 - DNA, 15 bp, Homo sapiens
ggtttgagatgagct

SEQ ID NO: 129412 - DNA, 15 bp, Homo sapiens
gtttgagatgagcta

SEQ ID NO: 129413 - DNA, 15 bp, Homo sapiens
tttgagatgagctaa

SEQ ID NO: 129414 - DNA, 15 bp, Homo sapiens
ttgagatgagctaaa

SEQ ID NO: 129415 - DNA, 15 bp, Homo sapiens
tgagatgagctaaat

SEQ ID NO: 129416 - DNA, 15 bp, Homo sapiens
gagatgagctaaatt

SEQ ID NO: 129417 - DNA, 15 bp, Homo sapiens
agatgagctaaattc

SEQ ID NO: 129418 - DNA, 15 bp, Homo sapiens
gatgagctaaattcc

SEQ ID NO: 129419 - DNA, 15 bp, Homo sapiens
atgagctaaattcca

SEQ ID NO: 129420 - DNA, 15 bp, Homo sapiens
tgagctaaattccaa

SEQ ID NO: 129421 - DNA, 15 bp, Homo sapiens
gagctaaattccaat

SEQ ID NO: 129422 - DNA, 15 bp, Homo sapiens
agctaaattccaatc

SEQ ID NO: 129423 - DNA, 15 bp, Homo sapiens
gctaaattccaatct

SEQ ID NO: 129424 - DNA, 15 bp, Homo sapiens
ctaaattccaatcta

SEQ ID NO: 129425 - DNA, 15 bp, Homo sapiens
taaattccaatctaa

SEQ ID NO: 129426 - DNA, 15 bp, Homo sapiens
aaattccaatctaac

SEQ ID NO: 129427 - DNA, 15 bp, Homo sapiens
aattccaatctaacc

SEQ ID NO: 129428 - DNA, 15 bp, Homo sapiens
attccaatctaaccg

SEQ ID NO: 129429 - DNA, 15 bp, Homo sapiens
ttccaatctaaccgc

SEQ ID NO: 129430 - DNA, 15 bp, Homo sapiens
tccaatctaaccgca

SEQ ID NO: 129431 - DNA, 15 bp, Homo sapiens
ccaatctaaccgcag

SEQ ID NO: 129432 - DNA, 15 bp, Homo sapiens
caatctaaccgcagg

SEQ ID NO: 129433 - DNA, 15 bp, Homo sapiens
aatctaaccgcaggt

SEQ ID NO: 129434 - DNA, 15 bp, Homo sapiens
atctaaccgcaggtg

SEQ ID NO: 129435 - DNA, 15 bp, Homo sapiens
tctaaccgcaggtgt

SEQ ID NO: 129436 - DNA, 15 bp, Homo sapiens
ctaaccgcaggtgtg

SEQ ID NO: 129437 - DNA, 15 bp, Homo sapiens
taaccgcaggtgtga

SEQ ID NO: 129438 - DNA, 15 bp, Homo sapiens
aaccgcaggtgtgag

SEQ ID NO: 129439 - DNA, 15 bp, Homo sapiens
accgcaggtgtgagg

SEQ ID NO: 129440 - DNA, 15 bp, Homo sapiens
ccgcaggtgtgagga

SEQ ID NO: 129441 - DNA, 15 bp, Homo sapiens
cgcaggtgtgaggaa

SEQ ID NO: 129442 - DNA, 15 bp, Homo sapiens
gcaggtgtgaggaag

SEQ ID NO: 129443 - DNA, 15 bp, Homo sapiens
caggtgtgaggaaga

SEQ ID NO: 129444 - DNA, 15 bp, Homo sapiens
aggtgtgaggaagag

SEQ ID NO: 129445 - DNA, 15 bp, Homo sapiens
ggtgtgaggaagagg

SEQ ID NO: 129446 - DNA, 15 bp, Homo sapiens
gtgtgaggaagaggc

SEQ ID NO: 129447 - DNA, 15 bp, Homo sapiens
tgtgaggaagaggct

SEQ ID NO: 129448 - DNA, 15 bp, Homo sapiens
gtgaggaagaggctt

SEQ ID NO: 129449 - DNA, 15 bp, Homo sapiens
tgaggaagaggcttg

SEQ ID NO: 129450 - DNA, 15 bp, Homo sapiens
gaggaagaggcttgg

SEQ ID NO: 129451 - DNA, 15 bp, Homo sapiens
aggaagaggcttgga

SEQ ID NO: 129452 - DNA, 15 bp, Homo sapiens
ggaagaggcttggat

SEQ ID NO: 129453 - DNA, 15 bp, Homo sapiens
gaagaggcttggatt

SEQ ID NO: 129454 - DNA, 15 bp, Homo sapiens
aagaggcttggattg

SEQ ID NO: 129455 - DNA, 15 bp, Homo sapiens
agaggcttggattgg

SEQ ID NO: 129456 - DNA, 15 bp, Homo sapiens
gaggcttggattggg

SEQ ID NO: 129457 - DNA, 15 bp, Homo sapiens
aggcttggattggga

SEQ ID NO: 129458 - DNA, 15 bp, Homo sapiens
ggcttggattgggac

SEQ ID NO: 129459 - DNA, 15 bp, Homo sapiens
gcttggattgggacc

SEQ ID NO: 129460 - DNA, 15 bp, Homo sapiens
cttggattgggacca

SEQ ID NO: 129461 - DNA, 15 bp, Homo sapiens
ttggattgggaccat

SEQ ID NO: 129462 - DNA, 15 bp, Homo sapiens
tggattgggaccatg

SEQ ID NO: 129463 - DNA, 15 bp, Homo sapiens
ggattgggaccatgg

SEQ ID NO: 129464 - DNA, 15 bp, Homo sapiens
gattgggaccatgga

SEQ ID NO: 129465 - DNA, 15 bp, Homo sapiens
attgggaccatggag

SEQ ID NO: 129466 - DNA, 15 bp, Homo sapiens
ttgggaccatggaga

SEQ ID NO: 129467 - DNA, 15 bp, Homo sapiens
tgggaccatggagat

SEQ ID NO: 129468 - DNA, 15 bp, Homo sapiens
gggaccatggagatg

SEQ ID NO: 129469 - DNA, 15 bp, Homo sapiens
ggaccatggagatgg

SEQ ID NO: 129470 - DNA, 15 bp, Homo sapiens
gaccatggagatggg

SEQ ID NO: 129471 - DNA, 15 bp, Homo sapiens
accatggagatgggg

SEQ ID NO: 129472 - DNA, 15 bp, Homo sapiens
ccatggagatggggg

SEQ ID NO: 129473 - DNA, 15 bp, Homo sapiens
catggagatgggggt

SEQ ID NO: 129474 - DNA, 15 bp, Homo sapiens
atggagatgggggtt

SEQ ID NO: 129475 - DNA, 15 bp, Homo sapiens
tggagatgggggttc

SEQ ID NO: 129476 - DNA, 15 bp, Homo sapiens
ggagatgggggttct

SEQ ID NO: 129477 - DNA, 15 bp, Homo sapiens
gagatgggggttcta

SEQ ID NO: 129478 - DNA, 15 bp, Homo sapiens
agatgggggttctac

SEQ ID NO: 129479 - DNA, 15 bp, Homo sapiens
gatgggggttctact

SEQ ID NO: 129480 - DNA, 15 bp, Homo sapiens
atgggggttctactc

SEQ ID NO: 129481 - DNA, 15 bp, Homo sapiens
tgggggttctactcc

SEQ ID NO: 129482 - DNA, 15 bp, Homo sapiens
gggggttctactccc

SEQ ID NO: 129483 - DNA, 15 bp, Homo sapiens
ggggttctactccca

SEQ ID NO: 129484 - DNA, 15 bp, Homo sapiens
gggttctactcccag

SEQ ID NO: 129485 - DNA, 15 bp, Homo sapiens
ggttctactcccagt

SEQ ID NO: 129486 - DNA, 15 bp, Homo sapiens
gttctactcccagtc

SEQ ID NO: 129487 - DNA, 15 bp, Homo sapiens
ttctactcccagtca

SEQ ID NO: 129488 - DNA, 15 bp, Homo sapiens
tctactcccagtcac

SEQ ID NO: 129489 - DNA, 15 bp, Homo sapiens
ctactcccagtcacg

SEQ ID NO: 129490 - DNA, 15 bp, Homo sapiens
tactcccagtcacgc

SEQ ID NO: 129491 - DNA, 15 bp, Homo sapiens
actcccagtcacgcc

SEQ ID NO: 129492 - DNA, 15 bp, Homo sapiens
ctcccagtcacgcca

SEQ ID NO: 129493 - DNA, 15 bp, Homo sapiens
tcccagtcacgccag

SEQ ID NO: 129494 - DNA, 15 bp, Homo sapiens
cccagtcacgccagc

SEQ ID NO: 129495 - DNA, 15 bp, Homo sapiens
ccagtcacgccagct

SEQ ID NO: 129496 - DNA, 15 bp, Homo sapiens
cagtcacgccagctg

SEQ ID NO: 129497 - DNA, 15 bp, Homo sapiens
agtcacgccagctga

SEQ ID NO: 129498 - DNA, 15 bp, Homo sapiens
gtcacgccagctgac

SEQ ID NO: 129499 - DNA, 15 bp, Homo sapiens
tcacgccagctgact

SEQ ID NO: 129500 - DNA, 15 bp, Homo sapiens
cacgccagctgactt

SEQ ID NO: 129501 - DNA, 15 bp, Homo sapiens
acgccagctgacttt

SEQ ID NO: 129502 - DNA, 15 bp, Homo sapiens
cgccagctgactttg

SEQ ID NO: 129503 - DNA, 15 bp, Homo sapiens
gccagctgactttgc

SEQ ID NO: 129504 - DNA, 15 bp, Homo sapiens
ccagctgactttgcg

SEQ ID NO: 129505 - DNA, 15 bp, Homo sapiens
cagctgactttgcga

SEQ ID NO: 129506 - DNA, 15 bp, Homo sapiens
agctgactttgcgag

SEQ ID NO: 129507 - DNA, 15 bp, Homo sapiens
gctgactttgcgagt

SEQ ID NO: 129508 - DNA, 15 bp, Homo sapiens
ctgactttgcgagtg

SEQ ID NO: 129509 - DNA, 15 bp, Homo sapiens
tgactttgcgagtgt

SEQ ID NO: 129510 - DNA, 15 bp, Homo sapiens
gactttgcgagtgtt

SEQ ID NO: 129511 - DNA, 15 bp, Homo sapiens
actttgcgagtgttc

SEQ ID NO: 129512 - DNA, 15 bp, Homo sapiens
ctttgcgagtgttct

SEQ ID NO: 129513 - DNA, 15 bp, Homo sapiens
tttgcgagtgttctt

SEQ ID NO: 129514 - DNA, 15 bp, Homo sapiens
ttgcgagtgttcttt

SEQ ID NO: 129515 - DNA, 15 bp, Homo sapiens
tgcgagtgttctttg

SEQ ID NO: 129516 - DNA, 15 bp, Homo sapiens
gcgagtgttctttgt

SEQ ID NO: 129517 - DNA, 15 bp, Homo sapiens
cgagtgttctttgtc

SEQ ID NO: 129518 - DNA, 15 bp, Homo sapiens
gagtgttctttgtca

SEQ ID NO: 129519 - DNA, 15 bp, Homo sapiens
agtgttctttgtcag

SEQ ID NO: 129520 - DNA, 15 bp, Homo sapiens
gtgttctttgtcagt

SEQ ID NO: 129521 - DNA, 15 bp, Homo sapiens
tgttctttgtcagtc

SEQ ID NO: 129522 - DNA, 15 bp, Homo sapiens
gttctttgtcagtca

SEQ ID NO: 129523 - DNA, 15 bp, Homo sapiens
ttctttgtcagtcac

SEQ ID NO: 129524 - DNA, 15 bp, Homo sapiens
tctttgtcagtcact

SEQ ID NO: 129525 - DNA, 15 bp, Homo sapiens
ctttgtcagtcactt

SEQ ID NO: 129526 - DNA, 15 bp, Homo sapiens
tttgtcagtcacttt

SEQ ID NO: 129527 - DNA, 15 bp, Homo sapiens
ttgtcagtcacttta

SEQ ID NO: 129528 - DNA, 15 bp, Homo sapiens
tgtcagtcactttat

SEQ ID NO: 129529 - DNA, 15 bp, Homo sapiens
gtcagtcactttatc

SEQ ID NO: 129530 - DNA, 15 bp, Homo sapiens
tcagtcactttatct

SEQ ID NO: 129531 - DNA, 15 bp, Homo sapiens
cagtcactttatctt

SEQ ID NO: 129532 - DNA, 15 bp, Homo sapiens
agtcactttatctta

SEQ ID NO: 129533 - DNA, 15 bp, Homo sapiens
gtcactttatcttat

SEQ ID NO: 129534 - DNA, 15 bp, Homo sapiens
tcactttatcttatt

SEQ ID NO: 129535 - DNA, 15 bp, Homo sapiens
cactttatcttattt

SEQ ID NO: 129536 - DNA, 15 bp, Homo sapiens
actttatcttatttt

SEQ ID NO: 129537 - DNA, 15 bp, Homo sapiens
ctttatcttatttta

SEQ ID NO: 129538 - DNA, 15 bp, Homo sapiens
tttatcttattttat

SEQ ID NO: 129539 - DNA, 15 bp, Homo sapiens
ttatcttattttatt

SEQ ID NO: 129540 - DNA, 15 bp, Homo sapiens
tatcttattttattt

SEQ ID NO: 129541 - DNA, 15 bp, Homo sapiens
atcttattttattta

SEQ ID NO: 129542 - DNA, 15 bp, Homo sapiens
tcttattttatttat

SEQ ID NO: 129543 - DNA, 15 bp, Homo sapiens
cttattttatttatt

SEQ ID NO: 129544 - DNA, 15 bp, Homo sapiens
ttattttatttattt

SEQ ID NO: 129545 - DNA, 15 bp, Homo sapiens
tattttatttatttt

SEQ ID NO: 129546 - DNA, 15 bp, Homo sapiens
attttatttattttt

SEQ ID NO: 129547 - DNA, 15 bp, Homo sapiens
ttttatttattttta

SEQ ID NO: 129548 - DNA, 15 bp, Homo sapiens
tttatttatttttat

SEQ ID NO: 129549 - DNA, 15 bp, Homo sapiens
ttatttatttttatt

SEQ ID NO: 129550 - DNA, 15 bp, Homo sapiens
tatttatttttattt

SEQ ID NO: 129551 - DNA, 15 bp, Homo sapiens
atttatttttatttt

SEQ ID NO: 129552 - DNA, 15 bp, Homo sapiens
atttttatttttttg

SEQ ID NO: 129553 - DNA, 15 bp, Homo sapiens
tttttatttttttga

SEQ ID NO: 129554 - DNA, 15 bp, Homo sapiens
ttttatttttttgaa

SEQ ID NO: 129555 - DNA, 15 bp, Homo sapiens
tttatttttttgaaa

SEQ ID NO: 129556 - DNA, 15 bp, Homo sapiens
ttatttttttgaaat

SEQ ID NO: 129557 - DNA, 15 bp, Homo sapiens
tatttttttgaaatg

SEQ ID NO: 129558 - DNA, 15 bp, Homo sapiens
atttttttgaaatgg

SEQ ID NO: 129559 - DNA, 15 bp, Homo sapiens
tttttttgaaatgga

SEQ ID NO: 129560 - DNA, 15 bp, Homo sapiens
ttttttgaaatggag

SEQ ID NO: 129561 - DNA, 15 bp, Homo sapiens
tttttgaaatggagt

SEQ ID NO: 129562 - DNA, 15 bp, Homo sapiens
ttttgaaatggagtt

SEQ ID NO: 129563 - DNA, 15 bp, Homo sapiens
tttgaaatggagttt

SEQ ID NO: 129564 - DNA, 15 bp, Homo sapiens
ttgaaatggagtttc

SEQ ID NO: 129565 - DNA, 15 bp, Homo sapiens
tgaaatggagtttcg

SEQ ID NO: 129566 - DNA, 15 bp, Homo sapiens
gaaatggagtttcgc

SEQ ID NO: 129567 - DNA, 15 bp, Homo sapiens
aaatggagtttcgct

SEQ ID NO: 129568 - DNA, 15 bp, Homo sapiens
aatggagtttcgctc

SEQ ID NO: 129569 - DNA, 15 bp, Homo sapiens
atggagtttcgctct

SEQ ID NO: 129570 - DNA, 15 bp, Homo sapiens
tggagtttcgctctt

SEQ ID NO: 129571 - DNA, 15 bp, Homo sapiens
ggagtttcgctcttg

SEQ ID NO: 129572 - DNA, 15 bp, Homo sapiens
gagtttcgctcttgt

SEQ ID NO: 129573 - DNA, 15 bp, Homo sapiens
agtttcgctcttgtc

SEQ ID NO: 129574 - DNA, 15 bp, Homo sapiens
gtttcgctcttgtcg

SEQ ID NO: 129575 - DNA, 15 bp, Homo sapiens
tttcgctcttgtcgc

SEQ ID NO: 129576 - DNA, 15 bp, Homo sapiens
ttcgctcttgtcgcc

SEQ ID NO: 129577 - DNA, 15 bp, Homo sapiens
tcgctcttgtcgccc

SEQ ID NO: 129578 - DNA, 15 bp, Homo sapiens
cgctcttgtcgccca

SEQ ID NO: 129579 - DNA, 15 bp, Homo sapiens
gctcttgtcgcccag

SEQ ID NO: 129580 - DNA, 15 bp, Homo sapiens
ctcttgtcgcccagg

SEQ ID NO: 129581 - DNA, 15 bp, Homo sapiens
tcttgtcgcccaggc

SEQ ID NO: 129582 - DNA, 15 bp, Homo sapiens
cttgtcgcccaggct

SEQ ID NO: 129583 - DNA, 15 bp, Homo sapiens
ttgtcgcccaggctg

SEQ ID NO: 129584 - DNA, 15 bp, Homo sapiens
cccaggctggagtga

SEQ ID NO: 129585 - DNA, 15 bp, Homo sapiens
ccaggctggagtgaa

SEQ ID NO: 129586 - DNA, 15 bp, Homo sapiens
caggctggagtgaaa

SEQ ID NO: 129587 - DNA, 15 bp, Homo sapiens
aggctggagtgaaat

SEQ ID NO: 129588 - DNA, 15 bp, Homo sapiens
ggctggagtgaaatg

SEQ ID NO: 129589 - DNA, 15 bp, Homo sapiens
gctggagtgaaatgg

SEQ ID NO: 129590 - DNA, 15 bp, Homo sapiens
ctggagtgaaatggc

SEQ ID NO: 129591 - DNA, 15 bp, Homo sapiens
tggagtgaaatggcg

SEQ ID NO: 129592 - DNA, 15 bp, Homo sapiens
ggagtgaaatggcgc

SEQ ID NO: 129593 - DNA, 15 bp, Homo sapiens
gagtgaaatggcgcg

SEQ ID NO: 129594 - DNA, 15 bp, Homo sapiens
agtgaaatggcgcga

SEQ ID NO: 129595 - DNA, 15 bp, Homo sapiens
gtgaaatggcgcgat

SEQ ID NO: 129596 - DNA, 15 bp, Homo sapiens
tgaaatggcgcgatc

SEQ ID NO: 129597 - DNA, 15 bp, Homo sapiens
gaaatggcgcgatct

SEQ ID NO: 129598 - DNA, 15 bp, Homo sapiens
aaatggcgcgatctt

SEQ ID NO: 129599 - DNA, 15 bp, Homo sapiens
aatggcgcgatcttg

SEQ ID NO: 129600 - DNA, 15 bp, Homo sapiens
atggcgcgatcttgg

SEQ ID NO: 129601 - DNA, 15 bp, Homo sapiens
tggcgcgatcttggc

SEQ ID NO: 129602 - DNA, 15 bp, Homo sapiens
ggcgcgatcttggct

SEQ ID NO: 129603 - DNA, 15 bp, Homo sapiens
gcgcgatcttggctc

SEQ ID NO: 129604 - DNA, 15 bp, Homo sapiens
cgcgatcttggctca

SEQ ID NO: 129605 - DNA, 15 bp, Homo sapiens
acctccccctcctga

SEQ ID NO: 129606 - DNA, 15 bp, Homo sapiens
cctccccctcctgag

SEQ ID NO: 129607 - DNA, 15 bp, Homo sapiens
ctccccctcctgagt

SEQ ID NO: 129608 - DNA, 15 bp, Homo sapiens
tccccctcctgagtt

SEQ ID NO: 129609 - DNA, 15 bp, Homo sapiens
ccccctcctgagttc

SEQ ID NO: 129610 - DNA, 15 bp, Homo sapiens
cccctcctgagttca

SEQ ID NO: 129611 - DNA, 15 bp, Homo sapiens
ccctcctgagttcaa

SEQ ID NO: 129612 - DNA, 15 bp, Homo sapiens
cctcctgagttcaag

SEQ ID NO: 129613 - DNA, 15 bp, Homo sapiens
ctcctgagttcaagc

SEQ ID NO: 129614 - DNA, 15 bp, Homo sapiens
tcctgagttcaagcg

SEQ ID NO: 129615 - DNA, 15 bp, Homo sapiens
cctgagttcaagcga

SEQ ID NO: 129616 - DNA, 15 bp, Homo sapiens
ctgagttcaagcgat

SEQ ID NO: 129617 - DNA, 15 bp, Homo sapiens
tgagttcaagcgatt

SEQ ID NO: 129618 - DNA, 15 bp, Homo sapiens
gagttcaagcgattc

SEQ ID NO: 129619 - DNA, 15 bp, Homo sapiens
agttcaagcgattct

SEQ ID NO: 129620 - DNA, 15 bp, Homo sapiens
ctgcctcagcctcca

SEQ ID NO: 129621 - DNA, 15 bp, Homo sapiens
tgcctcagcctccag

SEQ ID NO: 129622 - DNA, 15 bp, Homo sapiens
gcctcagcctccaga

SEQ ID NO: 129623 - DNA, 15 bp, Homo sapiens
cctcagcctccagag

SEQ ID NO: 129624 - DNA, 15 bp, Homo sapiens
ctcagcctccagagt

SEQ ID NO: 129625 - DNA, 15 bp, Homo sapiens
tcagcctccagagta

SEQ ID NO: 129626 - DNA, 15 bp, Homo sapiens
cagcctccagagtac

SEQ ID NO: 129627 - DNA, 15 bp, Homo sapiens
agcctccagagtacc

SEQ ID NO: 129628 - DNA, 15 bp, Homo sapiens
gcctccagagtacct

SEQ ID NO: 129629 - DNA, 15 bp, Homo sapiens
cctccagagtacctg

SEQ ID NO: 129630 - DNA, 15 bp, Homo sapiens
ctccagagtacctgg

SEQ ID NO: 129631 - DNA, 15 bp, Homo sapiens
tccagagtacctggg

SEQ ID NO: 129632 - DNA, 15 bp, Homo sapiens
ccagagtacctggga

SEQ ID NO: 129633 - DNA, 15 bp, Homo sapiens
cagagtacctgggat

SEQ ID NO: 129634 - DNA, 15 bp, Homo sapiens
agagtacctgggatt

SEQ ID NO: 129635 - DNA, 15 bp, Homo sapiens
gagtacctgggatta

SEQ ID NO: 129636 - DNA, 15 bp, Homo sapiens
agtacctgggattac

SEQ ID NO: 129637 - DNA, 15 bp, Homo sapiens
gtacctgggattaca

SEQ ID NO: 129638 - DNA, 15 bp, Homo sapiens
tacctgggattacag

SEQ ID NO: 129639 - DNA, 15 bp, Homo sapiens
acctgggattacagg

SEQ ID NO: 129640 - DNA, 15 bp, Homo sapiens
cctgggattacaggc

SEQ ID NO: 129641 - DNA, 15 bp, Homo sapiens
gggattacaggcgcc

SEQ ID NO: 129642 - DNA, 15 bp, Homo sapiens
ggattacaggcgcct

SEQ ID NO: 129643 - DNA, 15 bp, Homo sapiens
gattacaggcgcctg

SEQ ID NO: 129644 - DNA, 15 bp, Homo sapiens
attacaggcgcctgc

SEQ ID NO: 129645 - DNA, 15 bp, Homo sapiens
ttacaggcgcctgcc

SEQ ID NO: 129646 - DNA, 15 bp, Homo sapiens
ggcgcctgccaccaa

SEQ ID NO: 129647 - DNA, 15 bp, Homo sapiens
gcgcctgccaccaag

SEQ ID NO: 129648 - DNA, 15 bp, Homo sapiens
cgcctgccaccaagc

SEQ ID NO: 129649 - DNA, 15 bp, Homo sapiens
gcctgccaccaagcc

SEQ ID NO: 129650 - DNA, 15 bp, Homo sapiens
cctgccaccaagccc

SEQ ID NO: 129651 - DNA, 15 bp, Homo sapiens
ctgccaccaagccca

SEQ ID NO: 129652 - DNA, 15 bp, Homo sapiens
tgccaccaagcccat

SEQ ID NO: 129653 - DNA, 15 bp, Homo sapiens
gccaccaagcccatc

SEQ ID NO: 129654 - DNA, 15 bp, Homo sapiens
ccaccaagcccatcg

SEQ ID NO: 129655 - DNA, 15 bp, Homo sapiens
caccaagcccatcga

SEQ ID NO: 129656 - DNA, 15 bp, Homo sapiens
accaagcccatcgaa

SEQ ID NO: 129657 - DNA, 15 bp, Homo sapiens
ccaagcccatcgaat

SEQ ID NO: 129658 - DNA, 15 bp, Homo sapiens
caagcccatcgaatt

SEQ ID NO: 129659 - DNA, 15 bp, Homo sapiens
aagcccatcgaattt

SEQ ID NO: 129660 - DNA, 15 bp, Homo sapiens
agcccatcgaatttt

SEQ ID NO: 129661 - DNA, 15 bp, Homo sapiens
gcccatcgaattttt

SEQ ID NO: 129662 - DNA, 15 bp, Homo sapiens
cccatcgaatttttg

SEQ ID NO: 129663 - DNA, 15 bp, Homo sapiens
ccatcgaatttttgt

SEQ ID NO: 129664 - DNA, 15 bp, Homo sapiens
catcgaatttttgta

SEQ ID NO: 129665 - DNA, 15 bp, Homo sapiens
atcgaatttttgtat

SEQ ID NO: 129666 - DNA, 15 bp, Homo sapiens
tcgaatttttgtatg

SEQ ID NO: 129667 - DNA, 15 bp, Homo sapiens
cgaatttttgtatgc

SEQ ID NO: 129668 - DNA, 15 bp, Homo sapiens
gaatttttgtatgct

SEQ ID NO: 129669 - DNA, 15 bp, Homo sapiens
aatttttgtatgctt

SEQ ID NO: 129670 - DNA, 15 bp, Homo sapiens
atttttgtatgctta

SEQ ID NO: 129671 - DNA, 15 bp, Homo sapiens
tttttgtatgcttag

SEQ ID NO: 129672 - DNA, 15 bp, Homo sapiens
ttttgtatgcttagt

SEQ ID NO: 129673 - DNA, 15 bp, Homo sapiens
tttgtatgcttagta

SEQ ID NO: 129674 - DNA, 15 bp, Homo sapiens
ttgtatgcttagtag

SEQ ID NO: 129675 - DNA, 15 bp, Homo sapiens
tgtatgcttagtaga

SEQ ID NO: 129676 - DNA, 15 bp, Homo sapiens
gtatgcttagtagag

SEQ ID NO: 129677 - DNA, 15 bp, Homo sapiens
tatgcttagtagaga

SEQ ID NO: 129678 - DNA, 15 bp, Homo sapiens
atgcttagtagagac

SEQ ID NO: 129679 - DNA, 15 bp, Homo sapiens
tgcttagtagagaca

SEQ ID NO: 129680 - DNA, 15 bp, Homo sapiens
gcttagtagagacag

SEQ ID NO: 129681 - DNA, 15 bp, Homo sapiens
cttagtagagacagg

SEQ ID NO: 129682 - DNA, 15 bp, Homo sapiens
acagggtttcgccat

SEQ ID NO: 129683 - DNA, 15 bp, Homo sapiens
cagggtttcgccatg

SEQ ID NO: 129684 - DNA, 15 bp, Homo sapiens
agggtttcgccatgt

SEQ ID NO: 129685 - DNA, 15 bp, Homo sapiens
gggtttcgccatgtt

SEQ ID NO: 129686 - DNA, 15 bp, Homo sapiens
ggtttcgccatgttg

SEQ ID NO: 129687 - DNA, 15 bp, Homo sapiens
gtttcgccatgttgg

SEQ ID NO: 129688 - DNA, 15 bp, Homo sapiens
tttcgccatgttggc

SEQ ID NO: 129689 - DNA, 15 bp, Homo sapiens
ttcgccatgttggcc

SEQ ID NO: 129690 - DNA, 15 bp, Homo sapiens
tcgccatgttggcca

SEQ ID NO: 129691 - DNA, 15 bp, Homo sapiens
cgccatgttggccag

SEQ ID NO: 129692 - DNA, 15 bp, Homo sapiens
ccatgttggccaggg

SEQ ID NO: 129693 - DNA, 15 bp, Homo sapiens
catgttggccagggt

SEQ ID NO: 129694 - DNA, 15 bp, Homo sapiens
atgttggccagggtg

SEQ ID NO: 129695 - DNA, 15 bp, Homo sapiens
tgttggccagggtgg

SEQ ID NO: 129696 - DNA, 15 bp, Homo sapiens
gttggccagggtggt

SEQ ID NO: 129697 - DNA, 15 bp, Homo sapiens
ttggccagggtggtc

SEQ ID NO: 129698 - DNA, 15 bp, Homo sapiens
tggccagggtggtct

SEQ ID NO: 129699 - DNA, 15 bp, Homo sapiens
ggccagggtggtctt

SEQ ID NO: 129700 - DNA, 15 bp, Homo sapiens
gccagggtggtcttg

SEQ ID NO: 129701 - DNA, 15 bp, Homo sapiens
ccagggtggtcttga

SEQ ID NO: 129702 - DNA, 15 bp, Homo sapiens
cagggtggtcttgaa

SEQ ID NO: 129703 - DNA, 15 bp, Homo sapiens
agggtggtcttgaac

SEQ ID NO: 129704 - DNA, 15 bp, Homo sapiens
gggtggtcttgaact

SEQ ID NO: 129705 - DNA, 15 bp, Homo sapiens
ggtggtcttgaactc

SEQ ID NO: 129706 - DNA, 15 bp, Homo sapiens
gtggtcttgaactcc

SEQ ID NO: 129707 - DNA, 15 bp, Homo sapiens
tgatccgcccacctt

SEQ ID NO: 129708 - DNA, 15 bp, Homo sapiens
gatccgcccaccttg

SEQ ID NO: 129709 - DNA, 15 bp, Homo sapiens
atccgcccaccttgg

SEQ ID NO: 129710 - DNA, 15 bp, Homo sapiens
tccgcccaccttggc

SEQ ID NO: 129711 - DNA, 15 bp, Homo sapiens
ccgcccaccttggcc

SEQ ID NO: 129712 - DNA, 15 bp, Homo sapiens
cgcccaccttggcct

SEQ ID NO: 129713 - DNA, 15 bp, Homo sapiens
ggattacaggcgcga

SEQ ID NO: 129714 - DNA, 15 bp, Homo sapiens
gattacaggcgcgag

SEQ ID NO: 129715 - DNA, 15 bp, Homo sapiens
attacaggcgcgagc

SEQ ID NO: 129716 - DNA, 15 bp, Homo sapiens
ttacaggcgcgagcc

SEQ ID NO: 129717 - DNA, 15 bp, Homo sapiens
tacaggcgcgagcca

SEQ ID NO: 129718 - DNA, 15 bp, Homo sapiens
acaggcgcgagccac

SEQ ID NO: 129719 - DNA, 15 bp, Homo sapiens
caggcgcgagccact

SEQ ID NO: 129720 - DNA, 15 bp, Homo sapiens
aggcgcgagccactg

SEQ ID NO: 129721 - DNA, 15 bp, Homo sapiens
ggcgcgagccactgt

SEQ ID NO: 129722 - DNA, 15 bp, Homo sapiens
gcgcgagccactgtg

SEQ ID NO: 129723 - DNA, 15 bp, Homo sapiens
cgcgagccactgtgc

SEQ ID NO: 129724 - DNA, 15 bp, Homo sapiens
gcgagccactgtgcc

SEQ ID NO: 129725 - DNA, 15 bp, Homo sapiens
cgagccactgtgccc

SEQ ID NO: 129726 - DNA, 15 bp, Homo sapiens
ctgtgcccagcccac

SEQ ID NO: 129727 - DNA, 15 bp, Homo sapiens
tgtgcccagcccact

SEQ ID NO: 129728 - DNA, 15 bp, Homo sapiens
gtgcccagcccactt

SEQ ID NO: 129729 - DNA, 15 bp, Homo sapiens
tgcccagcccacttc

SEQ ID NO: 129730 - DNA, 15 bp, Homo sapiens
gcccagcccacttca

SEQ ID NO: 129731 - DNA, 15 bp, Homo sapiens
cccagcccacttcat

SEQ ID NO: 129732 - DNA, 15 bp, Homo sapiens
ccagcccacttcatc

SEQ ID NO: 129733 - DNA, 15 bp, Homo sapiens
cagcccacttcatct

SEQ ID NO: 129734 - DNA, 15 bp, Homo sapiens
agcccacttcatctt

SEQ ID NO: 129735 - DNA, 15 bp, Homo sapiens
gcccacttcatctta

SEQ ID NO: 129736 - DNA, 15 bp, Homo sapiens
cccacttcatcttac

SEQ ID NO: 129737 - DNA, 15 bp, Homo sapiens
ccacttcatcttacc

SEQ ID NO: 129738 - DNA, 15 bp, Homo sapiens
cacttcatcttaccg

SEQ ID NO: 129739 - DNA, 15 bp, Homo sapiens
acttcatcttaccgt

SEQ ID NO: 129740 - DNA, 15 bp, Homo sapiens
cttcatcttaccgta

SEQ ID NO: 129741 - DNA, 15 bp, Homo sapiens
ttcatcttaccgtag

SEQ ID NO: 129742 - DNA, 15 bp, Homo sapiens
tcatcttaccgtagt

SEQ ID NO: 129743 - DNA, 15 bp, Homo sapiens
catcttaccgtagtt

SEQ ID NO: 129744 - DNA, 15 bp, Homo sapiens
atcttaccgtagtta

SEQ ID NO: 129745 - DNA, 15 bp, Homo sapiens
tcttaccgtagttac

SEQ ID NO: 129746 - DNA, 15 bp, Homo sapiens
cttaccgtagttacc

SEQ ID NO: 129747 - DNA, 15 bp, Homo sapiens
ttaccgtagttacct

SEQ ID NO: 129748 - DNA, 15 bp, Homo sapiens
taccgtagttacctc

SEQ ID NO: 129749 - DNA, 15 bp, Homo sapiens
accgtagttacctcc

SEQ ID NO: 129750 - DNA, 15 bp, Homo sapiens
ccgtagttacctcct

SEQ ID NO: 129751 - DNA, 15 bp, Homo sapiens
cgtagttacctcctt

SEQ ID NO: 129752 - DNA, 15 bp, Homo sapiens
gtagttacctcctta

SEQ ID NO: 129753 - DNA, 15 bp, Homo sapiens
tagttacctccttag

SEQ ID NO: 129754 - DNA, 15 bp, Homo sapiens
agttacctccttaga

SEQ ID NO: 129755 - DNA, 15 bp, Homo sapiens
gttacctccttagag

SEQ ID NO: 129756 - DNA, 15 bp, Homo sapiens
ttacctccttagagt

SEQ ID NO: 129757 - DNA, 15 bp, Homo sapiens
tacctccttagagta

SEQ ID NO: 129758 - DNA, 15 bp, Homo sapiens
acctccttagagtat

SEQ ID NO: 129759 - DNA, 15 bp, Homo sapiens
cctccttagagtatg

SEQ ID NO: 129760 - DNA, 15 bp, Homo sapiens
ctccttagagtatga

SEQ ID NO: 129761 - DNA, 15 bp, Homo sapiens
tccttagagtatgaa

SEQ ID NO: 129762 - DNA, 15 bp, Homo sapiens
ccttagagtatgaaa

SEQ ID NO: 129763 - DNA, 15 bp, Homo sapiens
cttagagtatgaaaa

SEQ ID NO: 129764 - DNA, 15 bp, Homo sapiens
ttagagtatgaaaaa

SEQ ID NO: 129765 - DNA, 15 bp, Homo sapiens
tagagtatgaaaaaa

SEQ ID NO: 129766 - DNA, 15 bp, Homo sapiens
agagtatgaaaaaat

SEQ ID NO: 129767 - DNA, 15 bp, Homo sapiens
gagtatgaaaaaata

SEQ ID NO: 129768 - DNA, 15 bp, Homo sapiens
agtatgaaaaaatag

SEQ ID NO: 129769 - DNA, 15 bp, Homo sapiens
gtatgaaaaaatagg

SEQ ID NO: 129770 - DNA, 15 bp, Homo sapiens
tatgaaaaaataggc

SEQ ID NO: 129771 - DNA, 15 bp, Homo sapiens
atgaaaaaataggct

SEQ ID NO: 129772 - DNA, 15 bp, Homo sapiens
tgaaaaaataggctt

SEQ ID NO: 129773 - DNA, 15 bp, Homo sapiens
gaaaaaataggctta

SEQ ID NO: 129774 - DNA, 15 bp, Homo sapiens
aaaaaataggcttag

SEQ ID NO: 129775 - DNA, 15 bp, Homo sapiens
aaaaataggcttagg

SEQ ID NO: 129776 - DNA, 15 bp, Homo sapiens
aaaataggcttaggg

SEQ ID NO: 129777 - DNA, 15 bp, Homo sapiens
aaataggcttagggc

SEQ ID NO: 129778 - DNA, 15 bp, Homo sapiens
aataggcttagggca

SEQ ID NO: 129779 - DNA, 15 bp, Homo sapiens
ataggcttagggcat

SEQ ID NO: 129780 - DNA, 15 bp, Homo sapiens
taggcttagggcatc

SEQ ID NO: 129781 - DNA, 15 bp, Homo sapiens
aggcttagggcatcc

SEQ ID NO: 129782 - DNA, 15 bp, Homo sapiens
ggcttagggcatccc

SEQ ID NO: 129783 - DNA, 15 bp, Homo sapiens
gcttagggcatcccc

SEQ ID NO: 129784 - DNA, 15 bp, Homo sapiens
cttagggcatcccca

SEQ ID NO: 129785 - DNA, 15 bp, Homo sapiens
ttagggcatccccaa

SEQ ID NO: 129786 - DNA, 15 bp, Homo sapiens
tagggcatccccaag

SEQ ID NO: 129787 - DNA, 15 bp, Homo sapiens
agggcatccccaagt

SEQ ID NO: 129788 - DNA, 15 bp, Homo sapiens
gggcatccccaagtc

SEQ ID NO: 129789 - DNA, 15 bp, Homo sapiens
ggcatccccaagtcc

SEQ ID NO: 129790 - DNA, 15 bp, Homo sapiens
gcatccccaagtccc

SEQ ID NO: 129791 - DNA, 15 bp, Homo sapiens
catccccaagtcccc

SEQ ID NO: 129792 - DNA, 15 bp, Homo sapiens
atccccaagtcccct

SEQ ID NO: 129793 - DNA, 15 bp, Homo sapiens
tccccaagtcccctc

SEQ ID NO: 129794 - DNA, 15 bp, Homo sapiens
ccccaagtcccctct

SEQ ID NO: 129795 - DNA, 15 bp, Homo sapiens
cccaagtcccctcta

SEQ ID NO: 129796 - DNA, 15 bp, Homo sapiens
ccaagtcccctctat

SEQ ID NO: 129797 - DNA, 15 bp, Homo sapiens
caagtcccctctatg

SEQ ID NO: 129798 - DNA, 15 bp, Homo sapiens
aagtcccctctatgt

SEQ ID NO: 129799 - DNA, 15 bp, Homo sapiens
agtcccctctatgtc

SEQ ID NO: 129800 - DNA, 15 bp, Homo sapiens
gtcccctctatgtct

SEQ ID NO: 129801 - DNA, 15 bp, Homo sapiens
tcccctctatgtctg

SEQ ID NO: 129802 - DNA, 15 bp, Homo sapiens
cccctctatgtctga

SEQ ID NO: 129803 - DNA, 15 bp, Homo sapiens
ccctctatgtctgag

SEQ ID NO: 129804 - DNA, 15 bp, Homo sapiens
cctctatgtctgaga

SEQ ID NO: 129805 - DNA, 15 bp, Homo sapiens
ctctatgtctgagag

SEQ ID NO: 129806 - DNA, 15 bp, Homo sapiens
tctatgtctgagagc

SEQ ID NO: 129807 - DNA, 15 bp, Homo sapiens
ctatgtctgagagct

SEQ ID NO: 129808 - DNA, 15 bp, Homo sapiens
tatgtctgagagctg

SEQ ID NO: 129809 - DNA, 15 bp, Homo sapiens
atgtctgagagctga

SEQ ID NO: 129810 - DNA, 15 bp, Homo sapiens
tgtctgagagctgag

SEQ ID NO: 129811 - DNA, 15 bp, Homo sapiens
gtctgagagctgagg

SEQ ID NO: 129812 - DNA, 15 bp, Homo sapiens
tctgagagctgaggc

SEQ ID NO: 129813 - DNA, 15 bp, Homo sapiens
ctgagagctgaggct

SEQ ID NO: 129814 - DNA, 15 bp, Homo sapiens
tgagagctgaggctg

SEQ ID NO: 129815 - DNA, 15 bp, Homo sapiens
gagagctgaggctgg

SEQ ID NO: 129816 - DNA, 15 bp, Homo sapiens
agagctgaggctggc

SEQ ID NO: 129817 - DNA, 15 bp, Homo sapiens
gagctgaggctggct

SEQ ID NO: 129818 - DNA, 15 bp, Homo sapiens
agctgaggctggctg

SEQ ID NO: 129819 - DNA, 15 bp, Homo sapiens
gctgaggctggctgt

SEQ ID NO: 129820 - DNA, 15 bp, Homo sapiens
ctgaggctggctgtc

SEQ ID NO: 129821 - DNA, 15 bp, Homo sapiens
tgaggctggctgtca

SEQ ID NO: 129822 - DNA, 15 bp, Homo sapiens
gaggctggctgtcaa

SEQ ID NO: 129823 - DNA, 15 bp, Homo sapiens
aggctggctgtcaaa

SEQ ID NO: 129824 - DNA, 15 bp, Homo sapiens
ggctggctgtcaaag

SEQ ID NO: 129825 - DNA, 15 bp, Homo sapiens
gctggctgtcaaaga

SEQ ID NO: 129826 - DNA, 15 bp, Homo sapiens
ctggctgtcaaagag

SEQ ID NO: 129827 - DNA, 15 bp, Homo sapiens
tggctgtcaaagagg

SEQ ID NO: 129828 - DNA, 15 bp, Homo sapiens
ggctgtcaaagagga

SEQ ID NO: 129829 - DNA, 15 bp, Homo sapiens
gctgtcaaagaggaa

SEQ ID NO: 129830 - DNA, 15 bp, Homo sapiens
ctgtcaaagaggaac

SEQ ID NO: 129831 - DNA, 15 bp, Homo sapiens
tgtcaaagaggaact

SEQ ID NO: 129832 - DNA, 15 bp, Homo sapiens
gtcaaagaggaacta

SEQ ID NO: 129833 - DNA, 15 bp, Homo sapiens
tcaaagaggaactaa

SEQ ID NO: 129834 - DNA, 15 bp, Homo sapiens
caaagaggaactaag

SEQ ID NO: 129835 - DNA, 15 bp, Homo sapiens
aaagaggaactaagg

SEQ ID NO: 129836 - DNA, 15 bp, Homo sapiens
aagaggaactaagga

SEQ ID NO: 129837 - DNA, 15 bp, Homo sapiens
agaggaactaaggat

SEQ ID NO: 129838 - DNA, 15 bp, Homo sapiens
gaggaactaaggatg

SEQ ID NO: 129839 - DNA, 15 bp, Homo sapiens
aggaactaaggatgc

SEQ ID NO: 129840 - DNA, 15 bp, Homo sapiens
ggaactaaggatgcc

SEQ ID NO: 129841 - DNA, 15 bp, Homo sapiens
gaactaaggatgcca

SEQ ID NO: 129842 - DNA, 15 bp, Homo sapiens
aactaaggatgccag

SEQ ID NO: 129843 - DNA, 15 bp, Homo sapiens
actaaggatgccagg

SEQ ID NO: 129844 - DNA, 15 bp, Homo sapiens
ctaaggatgccaggg

SEQ ID NO: 129845 - DNA, 15 bp, Homo sapiens
taaggatgccaggga

SEQ ID NO: 129846 - DNA, 15 bp, Homo sapiens
aaggatgccagggac

SEQ ID NO: 129847 - DNA, 15 bp, Homo sapiens
aggatgccagggact

SEQ ID NO: 129848 - DNA, 15 bp, Homo sapiens
ggatgccagggactt

SEQ ID NO: 129849 - DNA, 15 bp, Homo sapiens
gatgccagggacttt

SEQ ID NO: 129850 - DNA, 15 bp, Homo sapiens
atgccagggactttc

SEQ ID NO: 129851 - DNA, 15 bp, Homo sapiens
tgccagggactttct

SEQ ID NO: 129852 - DNA, 15 bp, Homo sapiens
gccagggactttctg

SEQ ID NO: 129853 - DNA, 15 bp, Homo sapiens
ccagggactttctgc

SEQ ID NO: 129854 - DNA, 15 bp, Homo sapiens
cagggactttctgct

SEQ ID NO: 129855 - DNA, 15 bp, Homo sapiens
agggactttctgctt

SEQ ID NO: 129856 - DNA, 15 bp, Homo sapiens
gggactttctgctta

SEQ ID NO: 129857 - DNA, 15 bp, Homo sapiens
ggactttctgcttag

SEQ ID NO: 129858 - DNA, 15 bp, Homo sapiens
gactttctgcttagg

SEQ ID NO: 129859 - DNA, 15 bp, Homo sapiens
actttctgcttagga

SEQ ID NO: 129860 - DNA, 15 bp, Homo sapiens
ctttctgcttaggac

SEQ ID NO: 129861 - DNA, 15 bp, Homo sapiens
tttctgcttaggacc

SEQ ID NO: 129862 - DNA, 15 bp, Homo sapiens
ttctgcttaggaccc

SEQ ID NO: 129863 - DNA, 15 bp, Homo sapiens
tctgcttaggacccc

SEQ ID NO: 129864 - DNA, 15 bp, Homo sapiens
ctgcttaggacccct

SEQ ID NO: 129865 - DNA, 15 bp, Homo sapiens
tgcttaggacccctc

SEQ ID NO: 129866 - DNA, 15 bp, Homo sapiens
gcttaggacccctct

SEQ ID NO: 129867 - DNA, 15 bp, Homo sapiens
cttaggacccctctc

SEQ ID NO: 129868 - DNA, 15 bp, Homo sapiens
ttaggacccctctca

SEQ ID NO: 129869 - DNA, 15 bp, Homo sapiens
taggacccctctcat

SEQ ID NO: 129870 - DNA, 15 bp, Homo sapiens
aggacccctctcatc

SEQ ID NO: 129871 - DNA, 15 bp, Homo sapiens
ggacccctctcatca

SEQ ID NO: 129872 - DNA, 15 bp, Homo sapiens
gacccctctcatcac

SEQ ID NO: 129873 - DNA, 15 bp, Homo sapiens
acccctctcatcact

SEQ ID NO: 129874 - DNA, 15 bp, Homo sapiens
cccctctcatcactt

SEQ ID NO: 129875 - DNA, 15 bp, Homo sapiens
ccctctcatcacttc

SEQ ID NO: 129876 - DNA, 15 bp, Homo sapiens
cctctcatcacttct

SEQ ID NO: 129877 - DNA, 15 bp, Homo sapiens
ctctcatcacttctc

SEQ ID NO: 129878 - DNA, 15 bp, Homo sapiens
tctcatcacttctcc

SEQ ID NO: 129879 - DNA, 15 bp, Homo sapiens
ctcatcacttctcca

SEQ ID NO: 129880 - DNA, 15 bp, Homo sapiens
tcatcacttctccaa

SEQ ID NO: 129881 - DNA, 15 bp, Homo sapiens
catcacttctccaac

SEQ ID NO: 129882 - DNA, 15 bp, Homo sapiens
atcacttctccaacg

SEQ ID NO: 129883 - DNA, 15 bp, Homo sapiens
tcacttctccaacgc

SEQ ID NO: 129884 - DNA, 15 bp, Homo sapiens
cacttctccaacgct

SEQ ID NO: 129885 - DNA, 15 bp, Homo sapiens
acttctccaacgctg

SEQ ID NO: 129886 - DNA, 15 bp, Homo sapiens
cttctccaacgctgg

SEQ ID NO: 129887 - DNA, 15 bp, Homo sapiens
ttctccaacgctggt

SEQ ID NO: 129888 - DNA, 15 bp, Homo sapiens
tctccaacgctggta

SEQ ID NO: 129889 - DNA, 15 bp, Homo sapiens
ctccaacgctggtat

SEQ ID NO: 129890 - DNA, 15 bp, Homo sapiens
tccaacgctggtatc

SEQ ID NO: 129891 - DNA, 15 bp, Homo sapiens
ccaacgctggtatca

SEQ ID NO: 129892 - DNA, 15 bp, Homo sapiens
caacgctggtatcat

SEQ ID NO: 129893 - DNA, 15 bp, Homo sapiens
aacgctggtatcatg

SEQ ID NO: 129894 - DNA, 15 bp, Homo sapiens
acgctggtatcatga

SEQ ID NO: 129895 - DNA, 15 bp, Homo sapiens
cgctggtatcatgaa

SEQ ID NO: 129896 - DNA, 15 bp, Homo sapiens
gctggtatcatgaac

SEQ ID NO: 129897 - DNA, 15 bp, Homo sapiens
ctggtatcatgaacc

SEQ ID NO: 129898 - DNA, 15 bp, Homo sapiens
tggtatcatgaaccc

SEQ ID NO: 129899 - DNA, 15 bp, Homo sapiens
ggtatcatgaacccc

SEQ ID NO: 129900 - DNA, 15 bp, Homo sapiens
gtatcatgaacccca

SEQ ID NO: 129901 - DNA, 15 bp, Homo sapiens
tatcatgaaccccat

SEQ ID NO: 129902 - DNA, 15 bp, Homo sapiens
atcatgaaccccatt

SEQ ID NO: 129903 - DNA, 15 bp, Homo sapiens
tcatgaaccccattc

SEQ ID NO: 129904 - DNA, 15 bp, Homo sapiens
catgaaccccattct

SEQ ID NO: 129905 - DNA, 15 bp, Homo sapiens
atgaaccccattcta

SEQ ID NO: 129906 - DNA, 15 bp, Homo sapiens
tgaaccccattctac

SEQ ID NO: 129907 - DNA, 15 bp, Homo sapiens
gaaccccattctaca

SEQ ID NO: 129908 - DNA, 15 bp, Homo sapiens
aaccccattctacag

SEQ ID NO: 129909 - DNA, 15 bp, Homo sapiens
accccattctacaga

SEQ ID NO: 129910 - DNA, 15 bp, Homo sapiens
ccccattctacagat

SEQ ID NO: 129911 - DNA, 15 bp, Homo sapiens
cccattctacagatg

SEQ ID NO: 129912 - DNA, 15 bp, Homo sapiens
ccattctacagatga

SEQ ID NO: 129913 - DNA, 15 bp, Homo sapiens
cattctacagatgat

SEQ ID NO: 129914 - DNA, 15 bp, Homo sapiens
attctacagatgatg

SEQ ID NO: 129915 - DNA, 15 bp, Homo sapiens
ttctacagatgatgt

SEQ ID NO: 129916 - DNA, 15 bp, Homo sapiens
tctacagatgatgtc

SEQ ID NO: 129917 - DNA, 15 bp, Homo sapiens
ctacagatgatgtcc

SEQ ID NO: 129918 - DNA, 15 bp, Homo sapiens
tacagatgatgtcca

SEQ ID NO: 129919 - DNA, 15 bp, Homo sapiens
acagatgatgtccac

SEQ ID NO: 129920 - DNA, 15 bp, Homo sapiens
cagatgatgtccact

SEQ ID NO: 129921 - DNA, 15 bp, Homo sapiens
agatgatgtccacta

SEQ ID NO: 129922 - DNA, 15 bp, Homo sapiens
gatgatgtccactag

SEQ ID NO: 129923 - DNA, 15 bp, Homo sapiens
atgatgtccactaga

SEQ ID NO: 129924 - DNA, 15 bp, Homo sapiens
tgatgtccactagat

SEQ ID NO: 129925 - DNA, 15 bp, Homo sapiens
gatgtccactagatt

SEQ ID NO: 129926 - DNA, 15 bp, Homo sapiens
atgtccactagatta

SEQ ID NO: 129927 - DNA, 15 bp, Homo sapiens
tgtccactagattaa

SEQ ID NO: 129928 - DNA, 15 bp, Homo sapiens
gtccactagattaag

SEQ ID NO: 129929 - DNA, 15 bp, Homo sapiens
tccactagattaaga

SEQ ID NO: 129930 - DNA, 15 bp, Homo sapiens
ccactagattaagaa

SEQ ID NO: 129931 - DNA, 15 bp, Homo sapiens
cactagattaagaat

SEQ ID NO: 129932 - DNA, 15 bp, Homo sapiens
actagattaagaatg

SEQ ID NO: 129933 - DNA, 15 bp, Homo sapiens
ctagattaagaatgg

SEQ ID NO: 129934 - DNA, 15 bp, Homo sapiens
tagattaagaatggc

SEQ ID NO: 129935 - DNA, 15 bp, Homo sapiens
agattaagaatggca

SEQ ID NO: 129936 - DNA, 15 bp, Homo sapiens
gattaagaatggcat

SEQ ID NO: 129937 - DNA, 15 bp, Homo sapiens
attaagaatggcatg

SEQ ID NO: 129938 - DNA, 15 bp, Homo sapiens
ttaagaatggcatgt

SEQ ID NO: 129939 - DNA, 15 bp, Homo sapiens
taagaatggcatgtg

SEQ ID NO: 129940 - DNA, 15 bp, Homo sapiens
aagaatggcatgtga

SEQ ID NO: 129941 - DNA, 15 bp, Homo sapiens
agaatggcatgtgag

SEQ ID NO: 129942 - DNA, 15 bp, Homo sapiens
gaatggcatgtgagg

SEQ ID NO: 129943 - DNA, 15 bp, Homo sapiens
aatggcatgtgaggc

SEQ ID NO: 129944 - DNA, 15 bp, Homo sapiens
atggcatgtgaggcc

SEQ ID NO: 129945 - DNA, 15 bp, Homo sapiens
tggcatgtgaggcca

SEQ ID NO: 129946 - DNA, 15 bp, Homo sapiens
ggcatgtgaggccaa

SEQ ID NO: 129947 - DNA, 15 bp, Homo sapiens
gcatgtgaggccaag

SEQ ID NO: 129948 - DNA, 15 bp, Homo sapiens
catgtgaggccaagt

SEQ ID NO: 129949 - DNA, 15 bp, Homo sapiens
atgtgaggccaagtt

SEQ ID NO: 129950 - DNA, 15 bp, Homo sapiens
tgtgaggccaagttt

SEQ ID NO: 129951 - DNA, 15 bp, Homo sapiens
gtgaggccaagtttc

SEQ ID NO: 129952 - DNA, 15 bp, Homo sapiens
tgaggccaagtttcc

SEQ ID NO: 129953 - DNA, 15 bp, Homo sapiens
gaggccaagtttcca

SEQ ID NO: 129954 - DNA, 15 bp, Homo sapiens
aggccaagtttccac

SEQ ID NO: 129955 - DNA, 15 bp, Homo sapiens
ggccaagtttccacc

SEQ ID NO: 129956 - DNA, 15 bp, Homo sapiens
gccaagtttccacct

SEQ ID NO: 129957 - DNA, 15 bp, Homo sapiens
ccaagtttccacctg

SEQ ID NO: 129958 - DNA, 15 bp, Homo sapiens
caagtttccacctga

SEQ ID NO: 129959 - DNA, 15 bp, Homo sapiens
aagtttccacctgag

SEQ ID NO: 129960 - DNA, 15 bp, Homo sapiens
agtttccacctgaga

SEQ ID NO: 129961 - DNA, 15 bp, Homo sapiens
gtttccacctgagag

SEQ ID NO: 129962 - DNA, 15 bp, Homo sapiens
tttccacctgagagt

SEQ ID NO: 129963 - DNA, 15 bp, Homo sapiens
ttccacctgagagtc

SEQ ID NO: 129964 - DNA, 15 bp, Homo sapiens
tccacctgagagtca

SEQ ID NO: 129965 - DNA, 15 bp, Homo sapiens
ccacctgagagtcag

SEQ ID NO: 129966 - DNA, 15 bp, Homo sapiens
cacctgagagtcagt

SEQ ID NO: 129967 - DNA, 15 bp, Homo sapiens
acctgagagtcagtt

SEQ ID NO: 129968 - DNA, 15 bp, Homo sapiens
cctgagagtcagttt

SEQ ID NO: 129969 - DNA, 15 bp, Homo sapiens
ctgagagtcagtttt

SEQ ID NO: 129970 - DNA, 15 bp, Homo sapiens
tgagagtcagtttta

SEQ ID NO: 129971 - DNA, 15 bp, Homo sapiens
gagagtcagttttat

SEQ ID NO: 129972 - DNA, 15 bp, Homo sapiens
agagtcagttttatt

SEQ ID NO: 129973 - DNA, 15 bp, Homo sapiens
gagtcagttttattc

SEQ ID NO: 129974 - DNA, 15 bp, Homo sapiens
agtcagttttattca

SEQ ID NO: 129975 - DNA, 15 bp, Homo sapiens
gtcagttttattcag

SEQ ID NO: 129976 - DNA, 15 bp, Homo sapiens
tcagttttattcaga

SEQ ID NO: 129977 - DNA, 15 bp, Homo sapiens
cagttttattcagaa

SEQ ID NO: 129978 - DNA, 15 bp, Homo sapiens
agttttattcagaag

SEQ ID NO: 129979 - DNA, 15 bp, Homo sapiens
gttttattcagaaga

SEQ ID NO: 129980 - DNA, 15 bp, Homo sapiens
ttttattcagaagag

SEQ ID NO: 129981 - DNA, 15 bp, Homo sapiens
tttattcagaagaga

SEQ ID NO: 129982 - DNA, 15 bp, Homo sapiens
ttattcagaagagac

SEQ ID NO: 129983 - DNA, 15 bp, Homo sapiens
tattcagaagagaca

SEQ ID NO: 129984 - DNA, 15 bp, Homo sapiens
attcagaagagacag

SEQ ID NO: 129985 - DNA, 15 bp, Homo sapiens
ttcagaagagacagg

SEQ ID NO: 129986 - DNA, 15 bp, Homo sapiens
tcagaagagacaggt

SEQ ID NO: 129987 - DNA, 15 bp, Homo sapiens
cagaagagacaggtc

SEQ ID NO: 129988 - DNA, 15 bp, Homo sapiens
agaagagacaggtct

SEQ ID NO: 129989 - DNA, 15 bp, Homo sapiens
gaagagacaggtctc

SEQ ID NO: 129990 - DNA, 15 bp, Homo sapiens
aagagacaggtctct

SEQ ID NO: 129991 - DNA, 15 bp, Homo sapiens
agagacaggtctctg

SEQ ID NO: 129992 - DNA, 15 bp, Homo sapiens
gagacaggtctctgg

SEQ ID NO: 129993 - DNA, 15 bp, Homo sapiens
agacaggtctctggg

SEQ ID NO: 129994 - DNA, 15 bp, Homo sapiens
gacaggtctctggga

SEQ ID NO: 129995 - DNA, 15 bp, Homo sapiens
acaggtctctgggat

SEQ ID NO: 129996 - DNA, 15 bp, Homo sapiens
caggtctctgggatg

SEQ ID NO: 129997 - DNA, 15 bp, Homo sapiens
aggtctctgggatgt

SEQ ID NO: 129998 - DNA, 15 bp, Homo sapiens
ggtctctgggatgtg

SEQ ID NO: 129999 - DNA, 15 bp, Homo sapiens
gtctctgggatgtgg

SEQ ID NO: 130000 - DNA, 15 bp, Homo sapiens
tctctgggatgtggg

SEQ ID NO: 130001 - DNA, 15 bp, Homo sapiens
ctctgggatgtgggg

SEQ ID NO: 130002 - DNA, 15 bp, Homo sapiens
tctgggatgtgggga

SEQ ID NO: 130003 - DNA, 15 bp, Homo sapiens
ctgggatgtggggaa

SEQ ID NO: 130004 - DNA, 15 bp, Homo sapiens
tgggatgtggggaat

SEQ ID NO: 130005 - DNA, 15 bp, Homo sapiens
gggatgtggggaatg

SEQ ID NO: 130006 - DNA, 15 bp, Homo sapiens
ggatgtggggaatgg

SEQ ID NO: 130007 - DNA, 15 bp, Homo sapiens
gatgtggggaatggg

SEQ ID NO: 130008 - DNA, 15 bp, Homo sapiens
atgtggggaatggga

SEQ ID NO: 130009 - DNA, 15 bp, Homo sapiens
tgtggggaatgggac

SEQ ID NO: 130010 - DNA, 15 bp, Homo sapiens
gtggggaatgggacg

SEQ ID NO: 130011 - DNA, 15 bp, Homo sapiens
tggggaatgggacgg

SEQ ID NO: 130012 - DNA, 15 bp, Homo sapiens
ggggaatgggacgga

SEQ ID NO: 130013 - DNA, 15 bp, Homo sapiens
gggaatgggacggac

SEQ ID NO: 130014 - DNA, 15 bp, Homo sapiens
ggaatgggacggaca

SEQ ID NO: 130015 - DNA, 15 bp, Homo sapiens
gaatgggacggacag

SEQ ID NO: 130016 - DNA, 15 bp, Homo sapiens
aatgggacggacaga

SEQ ID NO: 130017 - DNA, 15 bp, Homo sapiens
atgggacggacagac

SEQ ID NO: 130018 - DNA, 15 bp, Homo sapiens
tgggacggacagact

SEQ ID NO: 130019 - DNA, 15 bp, Homo sapiens
gggacggacagactt

SEQ ID NO: 130020 - DNA, 15 bp, Homo sapiens
ggacggacagacttg

SEQ ID NO: 130021 - DNA, 15 bp, Homo sapiens
gacggacagacttgg

SEQ ID NO: 130022 - DNA, 15 bp, Homo sapiens
acggacagacttggc

SEQ ID NO: 130023 - DNA, 15 bp, Homo sapiens
cggacagacttggca

SEQ ID NO: 130024 - DNA, 15 bp, Homo sapiens
ggacagacttggcat

SEQ ID NO: 130025 - DNA, 15 bp, Homo sapiens
gacagacttggcatg

SEQ ID NO: 130026 - DNA, 15 bp, Homo sapiens
acagacttggcatga

SEQ ID NO: 130027 - DNA, 15 bp, Homo sapiens
cagacttggcatgaa

SEQ ID NO: 130028 - DNA, 15 bp, Homo sapiens
agacttggcatgaag

SEQ ID NO: 130029 - DNA, 15 bp, Homo sapiens
gacttggcatgaagc

SEQ ID NO: 130030 - DNA, 15 bp, Homo sapiens
acttggcatgaagca

SEQ ID NO: 130031 - DNA, 15 bp, Homo sapiens
cttggcatgaagcat

SEQ ID NO: 130032 - DNA, 15 bp, Homo sapiens
ttggcatgaagcatt

SEQ ID NO: 130033 - DNA, 15 bp, Homo sapiens
tggcatgaagcattg

SEQ ID NO: 130034 - DNA, 15 bp, Homo sapiens
ggcatgaagcattgt

SEQ ID NO: 130035 - DNA, 15 bp, Homo sapiens
gcatgaagcattgta

SEQ ID NO: 130036 - DNA, 15 bp, Homo sapiens
catgaagcattgtat

SEQ ID NO: 130037 - DNA, 15 bp, Homo sapiens
atgaagcattgtata

SEQ ID NO: 130038 - DNA, 15 bp, Homo sapiens
tgaagcattgtataa

SEQ ID NO: 130039 - DNA, 15 bp, Homo sapiens
gaagcattgtataaa

SEQ ID NO: 130040 - DNA, 15 bp, Homo sapiens
aagcattgtataaat

SEQ ID NO: 130041 - DNA, 15 bp, Homo sapiens
agcattgtataaatg

SEQ ID NO: 130042 - DNA, 15 bp, Homo sapiens
gcattgtataaatgg

SEQ ID NO: 130043 - DNA, 15 bp, Homo sapiens
cattgtataaatgga

SEQ ID NO: 130044 - DNA, 15 bp, Homo sapiens
attgtataaatggag

SEQ ID NO: 130045 - DNA, 15 bp, Homo sapiens
ttgtataaatggagc

SEQ ID NO: 130046 - DNA, 15 bp, Homo sapiens
tgtataaatggagcc

SEQ ID NO: 130047 - DNA, 15 bp, Homo sapiens
gtataaatggagcct

SEQ ID NO: 130048 - DNA, 15 bp, Homo sapiens
tataaatggagcctc

SEQ ID NO: 130049 - DNA, 15 bp, Homo sapiens
ataaatggagcctca

SEQ ID NO: 130050 - DNA, 15 bp, Homo sapiens
taaatggagcctcaa

SEQ ID NO: 130051 - DNA, 15 bp, Homo sapiens
aaatggagcctcaaa

SEQ ID NO: 130052 - DNA, 15 bp, Homo sapiens
aatggagcctcaaaa

SEQ ID NO: 130053 - DNA, 15 bp, Homo sapiens
atggagcctcaaaat

SEQ ID NO: 130054 - DNA, 15 bp, Homo sapiens
tggagcctcaaaatc

SEQ ID NO: 130055 - DNA, 15 bp, Homo sapiens
ggagcctcaaaatcg

SEQ ID NO: 130056 - DNA, 15 bp, Homo sapiens
gagcctcaaaatcgc

SEQ ID NO: 130057 - DNA, 15 bp, Homo sapiens
agcctcaaaatcgct

SEQ ID NO: 130058 - DNA, 15 bp, Homo sapiens
gcctcaaaatcgctt

SEQ ID NO: 130059 - DNA, 15 bp, Homo sapiens
cctcaaaatcgcttc

SEQ ID NO: 130060 - DNA, 15 bp, Homo sapiens
ctcaaaatcgcttca

SEQ ID NO: 130061 - DNA, 15 bp, Homo sapiens
tcaaaatcgcttcag

SEQ ID NO: 130062 - DNA, 15 bp, Homo sapiens
caaaatcgcttcagg

SEQ ID NO: 130063 - DNA, 15 bp, Homo sapiens
aaaatcgcttcaggg

SEQ ID NO: 130064 - DNA, 15 bp, Homo sapiens
aaatcgcttcaggga

SEQ ID NO: 130065 - DNA, 15 bp, Homo sapiens
aatcgcttcagggaa

SEQ ID NO: 130066 - DNA, 15 bp, Homo sapiens
atcgcttcagggaat

SEQ ID NO: 130067 - DNA, 15 bp, Homo sapiens
tcgcttcagggaatt

SEQ ID NO: 130068 - DNA, 15 bp, Homo sapiens
cgcttcagggaatta

SEQ ID NO: 130069 - DNA, 15 bp, Homo sapiens
gcttcagggaattaa

SEQ ID NO: 130070 - DNA, 15 bp, Homo sapiens
cttcagggaattaat

SEQ ID NO: 130071 - DNA, 15 bp, Homo sapiens
ttcagggaattaatg

SEQ ID NO: 130072 - DNA, 15 bp, Homo sapiens
tcagggaattaatgt

SEQ ID NO: 130073 - DNA, 15 bp, Homo sapiens
cagggaattaatgtt

SEQ ID NO: 130074 - DNA, 15 bp, Homo sapiens
agggaattaatgttt

SEQ ID NO: 130075 - DNA, 15 bp, Homo sapiens
gggaattaatgtttc

SEQ ID NO: 130076 - DNA, 15 bp, Homo sapiens
ggaattaatgtttct

SEQ ID NO: 130077 - DNA, 15 bp, Homo sapiens
gaattaatgtttctc

SEQ ID NO: 130078 - DNA, 15 bp, Homo sapiens
aattaatgtttctcc

SEQ ID NO: 130079 - DNA, 15 bp, Homo sapiens
attaatgtttctccc

SEQ ID NO: 130080 - DNA, 15 bp, Homo sapiens
ttaatgtttctccct

SEQ ID NO: 130081 - DNA, 15 bp, Homo sapiens
taatgtttctccctg

SEQ ID NO: 130082 - DNA, 15 bp, Homo sapiens
aatgtttctccctgt

SEQ ID NO: 130083 - DNA, 15 bp, Homo sapiens
atgtttctccctgtg

SEQ ID NO: 130084 - DNA, 15 bp, Homo sapiens
tgtttctccctgtgt

SEQ ID NO: 130085 - DNA, 15 bp, Homo sapiens
gtttctccctgtgtt

SEQ ID NO: 130086 - DNA, 15 bp, Homo sapiens
tttctccctgtgttt

SEQ ID NO: 130087 - DNA, 15 bp, Homo sapiens
ttctccctgtgtttt

SEQ ID NO: 130088 - DNA, 15 bp, Homo sapiens
tctccctgtgttttt

SEQ ID NO: 130089 - DNA, 15 bp, Homo sapiens
ctccctgtgtttttc

SEQ ID NO: 130090 - DNA, 15 bp, Homo sapiens
tccctgtgtttttct

SEQ ID NO: 130091 - DNA, 15 bp, Homo sapiens
ccctgtgtttttcta

SEQ ID NO: 130092 - DNA, 15 bp, Homo sapiens
cctgtgtttttctac

SEQ ID NO: 130093 - DNA, 15 bp, Homo sapiens
ctgtgtttttctact

SEQ ID NO: 130094 - DNA, 15 bp, Homo sapiens
tgtgtttttctactc

SEQ ID NO: 130095 - DNA, 15 bp, Homo sapiens
gtgtttttctactcc

SEQ ID NO: 130096 - DNA, 15 bp, Homo sapiens
tgtttttctactcct

SEQ ID NO: 130097 - DNA, 15 bp, Homo sapiens
gtttttctactcctc

SEQ ID NO: 130098 - DNA, 15 bp, Homo sapiens
tttttctactcctcg

SEQ ID NO: 130099 - DNA, 15 bp, Homo sapiens
ttttctactcctcga

SEQ ID NO: 130100 - DNA, 15 bp, Homo sapiens
tttctactcctcgat

SEQ ID NO: 130101 - DNA, 15 bp, Homo sapiens
ttctactcctcgatt

SEQ ID NO: 130102 - DNA, 15 bp, Homo sapiens
tctactcctcgattt

SEQ ID NO: 130103 - DNA, 15 bp, Homo sapiens
ctactcctcgatttc

SEQ ID NO: 130104 - DNA, 15 bp, Homo sapiens
tactcctcgatttca

SEQ ID NO: 130105 - DNA, 15 bp, Homo sapiens
actcctcgatttcaa

SEQ ID NO: 130106 - DNA, 15 bp, Homo sapiens
ctcctcgatttcaac

SEQ ID NO: 130107 - DNA, 15 bp, Homo sapiens
tcctcgatttcaaca

SEQ ID NO: 130108 - DNA, 15 bp, Homo sapiens
cctcgatttcaacag

SEQ ID NO: 130109 - DNA, 15 bp, Homo sapiens
ctcgatttcaacagg

SEQ ID NO: 130110 - DNA, 15 bp, Homo sapiens
tcgatttcaacaggc

SEQ ID NO: 130111 - DNA, 15 bp, Homo sapiens
cgatttcaacaggcc

SEQ ID NO: 130112 - DNA, 15 bp, Homo sapiens
gatttcaacaggcca

SEQ ID NO: 130113 - DNA, 15 bp, Homo sapiens
atttcaacaggccat

SEQ ID NO: 130114 - DNA, 15 bp, Homo sapiens
tttcaacaggccatt

SEQ ID NO: 130115 - DNA, 15 bp, Homo sapiens
ttcaacaggccattt

SEQ ID NO: 130116 - DNA, 15 bp, Homo sapiens
tcaacaggccatttt

SEQ ID NO: 130117 - DNA, 15 bp, Homo sapiens
caacaggccattttc

SEQ ID NO: 130118 - DNA, 15 bp, Homo sapiens
aacaggccattttcc

SEQ ID NO: 130119 - DNA, 15 bp, Homo sapiens
acaggccattttcca

SEQ ID NO: 130120 - DNA, 15 bp, Homo sapiens
caggccattttccaa

SEQ ID NO: 130121 - DNA, 15 bp, Homo sapiens
aggccattttccaaa

SEQ ID NO: 130122 - DNA, 15 bp, Homo sapiens
ggccattttccaaat

SEQ ID NO: 130123 - DNA, 15 bp, Homo sapiens
gccattttccaaata

SEQ ID NO: 130124 - DNA, 15 bp, Homo sapiens
ccattttccaaataa

SEQ ID NO: 130125 - DNA, 15 bp, Homo sapiens
cattttccaaataaa

SEQ ID NO: 130126 - DNA, 15 bp, Homo sapiens
attttccaaataaag

SEQ ID NO: 130127 - DNA, 15 bp, Homo sapiens
ttttccaaataaagc

SEQ ID NO: 130128 - DNA, 15 bp, Homo sapiens
tttccaaataaagcc

SEQ ID NO: 130129 - DNA, 15 bp, Homo sapiens
ttccaaataaagcca

SEQ ID NO: 130130 - DNA, 15 bp, Homo sapiens
tccaaataaagccat

SEQ ID NO: 130131 - DNA, 15 bp, Homo sapiens
ccaaataaagccatg

SEQ ID NO: 130132 - DNA, 15 bp, Homo sapiens
caaataaagccatgc

SEQ ID NO: 130133 - DNA, 15 bp, Homo sapiens
aaataaagccatgcc

SEQ ID NO: 130134 - DNA, 15 bp, Homo sapiens
aataaagccatgccc

SEQ ID NO: 130135 - DNA, 15 bp, Homo sapiens
ataaagccatgccct

SEQ ID NO: 130136 - DNA, 15 bp, Homo sapiens
taaagccatgccctc

SEQ ID NO: 130137 - DNA, 15 bp, Homo sapiens
aaagccatgccctct

SEQ ID NO: 130138 - DNA, 15 bp, Homo sapiens
aagccatgccctctg

SEQ ID NO: 130139 - DNA, 15 bp, Homo sapiens
agccatgccctctgc

SEQ ID NO: 130140 - DNA, 15 bp, Homo sapiens
gccatgccctctgca

SEQ ID NO: 130141 - DNA, 15 bp, Homo sapiens
ccatgccctctgcag

SEQ ID NO: 130142 - DNA, 15 bp, Homo sapiens
catgccctctgcagg

SEQ ID NO: 130143 - DNA, 15 bp, Homo sapiens
atgccctctgcagga

SEQ ID NO: 130144 - DNA, 15 bp, Homo sapiens
tgccctctgcaggaa

SEQ ID NO: 130145 - DNA, 15 bp, Homo sapiens
gccctctgcaggaac

SEQ ID NO: 130146 - DNA, 15 bp, Homo sapiens
ccctctgcaggaaca

SEQ ID NO: 130147 - DNA, 15 bp, Homo sapiens
cctctgcaggaacac

SEQ ID NO: 130148 - DNA, 15 bp, Homo sapiens
ctctgcaggaacact

SEQ ID NO: 130149 - DNA, 15 bp, Homo sapiens
tctgcaggaacactt

SEQ ID NO: 130150 - DNA, 15 bp, Homo sapiens
ctgcaggaacacttc

SEQ ID NO: 130151 - DNA, 15 bp, Homo sapiens
tgcaggaacacttcc

SEQ ID NO: 130152 - DNA, 15 bp, Homo sapiens
gcaggaacacttcct

SEQ ID NO: 130153 - DNA, 15 bp, Homo sapiens
caggaacacttcctt

SEQ ID NO: 130154 - DNA, 15 bp, Homo sapiens
aggaacacttccttg

SEQ ID NO: 130155 - DNA, 15 bp, Homo sapiens
ggaacacttccttgg

SEQ ID NO: 130156 - DNA, 15 bp, Homo sapiens
gaacacttccttggg

SEQ ID NO: 130157 - DNA, 15 bp, Homo sapiens
taagctcactgcatt

SEQ ID NO: 130158 - DNA, 15 bp, Homo sapiens
aagctcactgcattt

SEQ ID NO: 130159 - DNA, 15 bp, Homo sapiens
agctcactgcatttt

SEQ ID NO: 130160 - DNA, 15 bp, Homo sapiens
gctcactgcattttt

SEQ ID NO: 130161 - DNA, 15 bp, Homo sapiens
ctcactgcattttta

SEQ ID NO: 130162 - DNA, 15 bp, Homo sapiens
tcactgcatttttac

SEQ ID NO: 130163 - DNA, 15 bp, Homo sapiens
cactgcatttttaca

SEQ ID NO: 130164 - DNA, 15 bp, Homo sapiens
actgcatttttacaa

SEQ ID NO: 130165 - DNA, 15 bp, Homo sapiens
ctgcatttttacaat

SEQ ID NO: 130166 - DNA, 15 bp, Homo sapiens
tgcatttttacaatc

SEQ ID NO: 130167 - DNA, 15 bp, Homo sapiens
gcatttttacaatca

SEQ ID NO: 130168 - DNA, 15 bp, Homo sapiens
catttttacaatcat

SEQ ID NO: 130169 - DNA, 15 bp, Homo sapiens
atttttacaatcatc

SEQ ID NO: 130170 - DNA, 15 bp, Homo sapiens
tttttacaatcatca

SEQ ID NO: 130171 - DNA, 15 bp, Homo sapiens
ttttacaatcatcat

SEQ ID NO: 130172 - DNA, 15 bp, Homo sapiens
tttacaatcatcata

SEQ ID NO: 130173 - DNA, 15 bp, Homo sapiens
ttacaatcatcataa

SEQ ID NO: 130174 - DNA, 15 bp, Homo sapiens
tacaatcatcataaa

SEQ ID NO: 130175 - DNA, 15 bp, Homo sapiens
acaatcatcataaaa

SEQ ID NO: 130176 - DNA, 15 bp, Homo sapiens
caatcatcataaaat

SEQ ID NO: 130177 - DNA, 15 bp, Homo sapiens
aatcatcataaaatg

SEQ ID NO: 130178 - DNA, 15 bp, Homo sapiens
atcatcataaaatgc

SEQ ID NO: 130179 - DNA, 15 bp, Homo sapiens
tcatcataaaatgca

SEQ ID NO: 130180 - DNA, 15 bp, Homo sapiens
catcataaaatgcag

SEQ ID NO: 130181 - DNA, 15 bp, Homo sapiens
atcataaaatgcagg

SEQ ID NO: 130182 - DNA, 15 bp, Homo sapiens
tcataaaatgcaggg

SEQ ID NO: 130183 - DNA, 15 bp, Homo sapiens
cataaaatgcagggg

SEQ ID NO: 130184 - DNA, 15 bp, Homo sapiens
ataaaatgcagggga

SEQ ID NO: 130185 - DNA, 15 bp, Homo sapiens
taaaatgcaggggat

SEQ ID NO: 130186 - DNA, 15 bp, Homo sapiens
aaaatgcaggggata

SEQ ID NO: 130187 - DNA, 15 bp, Homo sapiens
aaatgcaggggatac

SEQ ID NO: 130188 - DNA, 15 bp, Homo sapiens
aatgcaggggataca

SEQ ID NO: 130189 - DNA, 15 bp, Homo sapiens
atgcaggggatacac

SEQ ID NO: 130190 - DNA, 15 bp, Homo sapiens
tgcaggggatacaca

SEQ ID NO: 130191 - DNA, 15 bp, Homo sapiens
gcaggggatacacac

SEQ ID NO: 130192 - DNA, 15 bp, Homo sapiens
caggggatacacaca

SEQ ID NO: 130193 - DNA, 15 bp, Homo sapiens
aggggatacacacat

SEQ ID NO: 130194 - DNA, 15 bp, Homo sapiens
ggggatacacacatg

SEQ ID NO: 130195 - DNA, 15 bp, Homo sapiens
gggatacacacatga

SEQ ID NO: 130196 - DNA, 15 bp, Homo sapiens
ggatacacacatgaa

SEQ ID NO: 130197 - DNA, 15 bp, Homo sapiens
gatacacacatgaag

SEQ ID NO: 130198 - DNA, 15 bp, Homo sapiens
atacacacatgaagg

SEQ ID NO: 130199 - DNA, 15 bp, Homo sapiens
tacacacatgaagga

SEQ ID NO: 130200 - DNA, 15 bp, Homo sapiens
acacacatgaaggag

SEQ ID NO: 130201 - DNA, 15 bp, Homo sapiens
cacacatgaaggagc

SEQ ID NO: 130202 - DNA, 15 bp, Homo sapiens
acacatgaaggagcc

SEQ ID NO: 130203 - DNA, 15 bp, Homo sapiens
cacatgaaggagccg

SEQ ID NO: 130204 - DNA, 15 bp, Homo sapiens
acatgaaggagccga

SEQ ID NO: 130205 - DNA, 15 bp, Homo sapiens
catgaaggagccgaa

SEQ ID NO: 130206 - DNA, 15 bp, Homo sapiens
atgaaggagccgaag

SEQ ID NO: 130207 - DNA, 15 bp, Homo sapiens
tgaaggagccgaagt

SEQ ID NO: 130208 - DNA, 15 bp, Homo sapiens
gaaggagccgaagtt

SEQ ID NO: 130209 - DNA, 15 bp, Homo sapiens
aaggagccgaagttc

SEQ ID NO: 130210 - DNA, 15 bp, Homo sapiens
aggagccgaagttca

SEQ ID NO: 130211 - DNA, 15 bp, Homo sapiens
ggagccgaagttcag

SEQ ID NO: 130212 - DNA, 15 bp, Homo sapiens
gagccgaagttcaga

SEQ ID NO: 130213 - DNA, 15 bp, Homo sapiens
agccgaagttcagag

SEQ ID NO: 130214 - DNA, 15 bp, Homo sapiens
gccgaagttcagaga

SEQ ID NO: 130215 - DNA, 15 bp, Homo sapiens
ccgaagttcagagag

SEQ ID NO: 130216 - DNA, 15 bp, Homo sapiens
cgaagttcagagagg

SEQ ID NO: 130217 - DNA, 15 bp, Homo sapiens
gaagttcagagaggc

SEQ ID NO: 130218 - DNA, 15 bp, Homo sapiens
aagttcagagaggcc

SEQ ID NO: 130219 - DNA, 15 bp, Homo sapiens
agttcagagaggcca

SEQ ID NO: 130220 - DNA, 15 bp, Homo sapiens
gttcagagaggccaa

SEQ ID NO: 130221 - DNA, 15 bp, Homo sapiens
ttcagagaggccaag

SEQ ID NO: 130222 - DNA, 15 bp, Homo sapiens
tcagagaggccaagt

SEQ ID NO: 130223 - DNA, 15 bp, Homo sapiens
cagagaggccaagta

SEQ ID NO: 130224 - DNA, 15 bp, Homo sapiens
agagaggccaagtaa

SEQ ID NO: 130225 - DNA, 15 bp, Homo sapiens
gagaggccaagtaac

SEQ ID NO: 130226 - DNA, 15 bp, Homo sapiens
agaggccaagtaact

SEQ ID NO: 130227 - DNA, 15 bp, Homo sapiens
gaggccaagtaactt

SEQ ID NO: 130228 - DNA, 15 bp, Homo sapiens
aggccaagtaacttg

SEQ ID NO: 130229 - DNA, 15 bp, Homo sapiens
ggccaagtaacttgc

SEQ ID NO: 130230 - DNA, 15 bp, Homo sapiens
gccaagtaacttgcc

SEQ ID NO: 130231 - DNA, 15 bp, Homo sapiens
ccaagtaacttgcct

SEQ ID NO: 130232 - DNA, 15 bp, Homo sapiens
caagtaacttgccta

SEQ ID NO: 130233 - DNA, 15 bp, Homo sapiens
aagtaacttgcctaa

SEQ ID NO: 130234 - DNA, 15 bp, Homo sapiens
agtaacttgcctaag

SEQ ID NO: 130235 - DNA, 15 bp, Homo sapiens
gtaacttgcctaaga

SEQ ID NO: 130236 - DNA, 15 bp, Homo sapiens
taacttgcctaagaa

SEQ ID NO: 130237 - DNA, 15 bp, Homo sapiens
aacttgcctaagaaa

SEQ ID NO: 130238 - DNA, 15 bp, Homo sapiens
acttgcctaagaaag

SEQ ID NO: 130239 - DNA, 15 bp, Homo sapiens
cttgcctaagaaagc

SEQ ID NO: 130240 - DNA, 15 bp, Homo sapiens
ttgcctaagaaagca

SEQ ID NO: 130241 - DNA, 15 bp, Homo sapiens
tgcctaagaaagcac

SEQ ID NO: 130242 - DNA, 15 bp, Homo sapiens
gcctaagaaagcaca

SEQ ID NO: 130243 - DNA, 15 bp, Homo sapiens
cctaagaaagcacag

SEQ ID NO: 130244 - DNA, 15 bp, Homo sapiens
ctaagaaagcacagc

SEQ ID NO: 130245 - DNA, 15 bp, Homo sapiens
taagaaagcacagct

SEQ ID NO: 130246 - DNA, 15 bp, Homo sapiens
aagaaagcacagctg

SEQ ID NO: 130247 - DNA, 15 bp, Homo sapiens
agaaagcacagctgg

SEQ ID NO: 130248 - DNA, 15 bp, Homo sapiens
gaaagcacagctggc

SEQ ID NO: 130249 - DNA, 15 bp, Homo sapiens
aaagcacagctggca

SEQ ID NO: 130250 - DNA, 15 bp, Homo sapiens
aagcacagctggcaa

SEQ ID NO: 130251 - DNA, 15 bp, Homo sapiens
agcacagctggcaag

SEQ ID NO: 130252 - DNA, 15 bp, Homo sapiens
gcacagctggcaagg

SEQ ID NO: 130253 - DNA, 15 bp, Homo sapiens
cacagctggcaaggg

SEQ ID NO: 130254 - DNA, 15 bp, Homo sapiens
acagctggcaagggg

SEQ ID NO: 130255 - DNA, 15 bp, Homo sapiens
cagctggcaaggggc

SEQ ID NO: 130256 - DNA, 15 bp, Homo sapiens
agctggcaaggggca

SEQ ID NO: 130257 - DNA, 15 bp, Homo sapiens
gctggcaaggggcag

SEQ ID NO: 130258 - DNA, 15 bp, Homo sapiens
ctggcaaggggcagt

SEQ ID NO: 130259 - DNA, 15 bp, Homo sapiens
tggcaaggggcagta

SEQ ID NO: 130260 - DNA, 15 bp, Homo sapiens
ggcaaggggcagtaa

SEQ ID NO: 130261 - DNA, 15 bp, Homo sapiens
gcaaggggcagtaat

SEQ ID NO: 130262 - DNA, 15 bp, Homo sapiens
caaggggcagtaata

SEQ ID NO: 130263 - DNA, 15 bp, Homo sapiens
aaggggcagtaatag

SEQ ID NO: 130264 - DNA, 15 bp, Homo sapiens
aggggcagtaatagg

SEQ ID NO: 130265 - DNA, 15 bp, Homo sapiens
ggggcagtaatagga

SEQ ID NO: 130266 - DNA, 15 bp, Homo sapiens
gggcagtaataggac

SEQ ID NO: 130267 - DNA, 15 bp, Homo sapiens
ggcagtaataggacc

SEQ ID NO: 130268 - DNA, 15 bp, Homo sapiens
gcagtaataggacca

SEQ ID NO: 130269 - DNA, 15 bp, Homo sapiens
cagtaataggaccag

SEQ ID NO: 130270 - DNA, 15 bp, Homo sapiens
agtaataggaccaga

SEQ ID NO: 130271 - DNA, 15 bp, Homo sapiens
gtaataggaccagaa

SEQ ID NO: 130272 - DNA, 15 bp, Homo sapiens
taataggaccagaat

SEQ ID NO: 130273 - DNA, 15 bp, Homo sapiens
aataggaccagaatt

SEQ ID NO: 130274 - DNA, 15 bp, Homo sapiens
ataggaccagaattc

SEQ ID NO: 130275 - DNA, 15 bp, Homo sapiens
taggaccagaattcc

SEQ ID NO: 130276 - DNA, 15 bp, Homo sapiens
aggaccagaattcca

SEQ ID NO: 130277 - DNA, 15 bp, Homo sapiens
ggaccagaattccag

SEQ ID NO: 130278 - DNA, 15 bp, Homo sapiens
gaccagaattccagt

SEQ ID NO: 130279 - DNA, 15 bp, Homo sapiens
accagaattccagtt

SEQ ID NO: 130280 - DNA, 15 bp, Homo sapiens
ccagaattccagttt

SEQ ID NO: 130281 - DNA, 15 bp, Homo sapiens
cagaattccagtttc

SEQ ID NO: 130282 - DNA, 15 bp, Homo sapiens
agaattccagtttct

SEQ ID NO: 130283 - DNA, 15 bp, Homo sapiens
gaattccagtttctc

SEQ ID NO: 130284 - DNA, 15 bp, Homo sapiens
aattccagtttctcg

SEQ ID NO: 130285 - DNA, 15 bp, Homo sapiens
attccagtttctcgt

SEQ ID NO: 130286 - DNA, 15 bp, Homo sapiens
ttccagtttctcgtg

SEQ ID NO: 130287 - DNA, 15 bp, Homo sapiens
tccagtttctcgtgc

SEQ ID NO: 130288 - DNA, 15 bp, Homo sapiens
ccagtttctcgtgct

SEQ ID NO: 130289 - DNA, 15 bp, Homo sapiens
cagtttctcgtgctc

SEQ ID NO: 130290 - DNA, 15 bp, Homo sapiens
agtttctcgtgctct

SEQ ID NO: 130291 - DNA, 15 bp, Homo sapiens
gtttctcgtgctctg

SEQ ID NO: 130292 - DNA, 15 bp, Homo sapiens
tttctcgtgctctgt

SEQ ID NO: 130293 - DNA, 15 bp, Homo sapiens
ttctcgtgctctgtt

SEQ ID NO: 130294 - DNA, 15 bp, Homo sapiens
tctcgtgctctgttg

SEQ ID NO: 130295 - DNA, 15 bp, Homo sapiens
ctcgtgctctgttgt

SEQ ID NO: 130296 - DNA, 15 bp, Homo sapiens
tcgtgctctgttgtt

SEQ ID NO: 130297 - DNA, 15 bp, Homo sapiens
cgtgctctgttgttg

SEQ ID NO: 130298 - DNA, 15 bp, Homo sapiens
gtgctctgttgttgt

SEQ ID NO: 130299 - DNA, 15 bp, Homo sapiens
tgctctgttgttgtt

SEQ ID NO: 130300 - DNA, 15 bp, Homo sapiens
gctctgttgttgtta

SEQ ID NO: 130301 - DNA, 15 bp, Homo sapiens
ctctgttgttgttat

SEQ ID NO: 130302 - DNA, 15 bp, Homo sapiens
tctgttgttgttata

SEQ ID NO: 130303 - DNA, 15 bp, Homo sapiens
ctgttgttgttatat

SEQ ID NO: 130304 - DNA, 15 bp, Homo sapiens
tgttgttgttatatc

SEQ ID NO: 130305 - DNA, 15 bp, Homo sapiens
gttgttgttatatcc

SEQ ID NO: 130306 - DNA, 15 bp, Homo sapiens
ttgttgttatatcct

SEQ ID NO: 130307 - DNA, 15 bp, Homo sapiens
tgttgttatatccta

SEQ ID NO: 130308 - DNA, 15 bp, Homo sapiens
gttgttatatcctaa

SEQ ID NO: 130309 - DNA, 15 bp, Homo sapiens
ttgttatatcctaaa

SEQ ID NO: 130310 - DNA, 15 bp, Homo sapiens
tgttatatcctaaag

SEQ ID NO: 130311 - DNA, 15 bp, Homo sapiens
gttatatcctaaaga

SEQ ID NO: 130312 - DNA, 15 bp, Homo sapiens
ttatatcctaaagag

SEQ ID NO: 130313 - DNA, 15 bp, Homo sapiens
tatatcctaaagaga

SEQ ID NO: 130314 - DNA, 15 bp, Homo sapiens
atatcctaaagagag

SEQ ID NO: 130315 - DNA, 15 bp, Homo sapiens
tatcctaaagagagc

SEQ ID NO: 130316 - DNA, 15 bp, Homo sapiens
atcctaaagagagca

SEQ ID NO: 130317 - DNA, 15 bp, Homo sapiens
tcctaaagagagcag

SEQ ID NO: 130318 - DNA, 15 bp, Homo sapiens
cctaaagagagcagc

SEQ ID NO: 130319 - DNA, 15 bp, Homo sapiens
ctaaagagagcagct

SEQ ID NO: 130320 - DNA, 15 bp, Homo sapiens
taaagagagcagctc

SEQ ID NO: 130321 - DNA, 15 bp, Homo sapiens
aaagagagcagctct

SEQ ID NO: 130322 - DNA, 15 bp, Homo sapiens
aagagagcagctctg

SEQ ID NO: 130323 - DNA, 15 bp, Homo sapiens
agagagcagctctga

SEQ ID NO: 130324 - DNA, 15 bp, Homo sapiens
gagagcagctctgag

SEQ ID NO: 130325 - DNA, 15 bp, Homo sapiens
agagcagctctgagt

SEQ ID NO: 130326 - DNA, 15 bp, Homo sapiens
gagcagctctgagta

SEQ ID NO: 130327 - DNA, 15 bp, Homo sapiens
agcagctctgagtag

SEQ ID NO: 130328 - DNA, 15 bp, Homo sapiens
gcagctctgagtagc

SEQ ID NO: 130329 - DNA, 15 bp, Homo sapiens
cagctctgagtagcc

SEQ ID NO: 130330 - DNA, 15 bp, Homo sapiens
agctctgagtagcca

SEQ ID NO: 130331 - DNA, 15 bp, Homo sapiens
gctctgagtagccag

SEQ ID NO: 130332 - DNA, 15 bp, Homo sapiens
ctctgagtagccaga

SEQ ID NO: 130333 - DNA, 15 bp, Homo sapiens
tctgagtagccagaa

SEQ ID NO: 130334 - DNA, 15 bp, Homo sapiens
ctgagtagccagaag

SEQ ID NO: 130335 - DNA, 15 bp, Homo sapiens
tgagtagccagaagc

SEQ ID NO: 130336 - DNA, 15 bp, Homo sapiens
gagtagccagaagct

SEQ ID NO: 130337 - DNA, 15 bp, Homo sapiens
agtagccagaagctt

SEQ ID NO: 130338 - DNA, 15 bp, Homo sapiens
gtagccagaagcttc

SEQ ID NO: 130339 - DNA, 15 bp, Homo sapiens
tagccagaagcttcc

SEQ ID NO: 130340 - DNA, 15 bp, Homo sapiens
agccagaagcttccc

SEQ ID NO: 130341 - DNA, 15 bp, Homo sapiens
gccagaagcttccct

SEQ ID NO: 130342 - DNA, 15 bp, Homo sapiens
ccagaagcttcccta

SEQ ID NO: 130343 - DNA, 15 bp, Homo sapiens
cagaagcttccctaa

SEQ ID NO: 130344 - DNA, 15 bp, Homo sapiens
agaagcttccctaaa

SEQ ID NO: 130345 - DNA, 15 bp, Homo sapiens
gaagcttccctaaag

SEQ ID NO: 130346 - DNA, 15 bp, Homo sapiens
aagcttccctaaagt

SEQ ID NO: 130347 - DNA, 15 bp, Homo sapiens
agcttccctaaagtc

SEQ ID NO: 130348 - DNA, 15 bp, Homo sapiens
gcttccctaaagtca

SEQ ID NO: 130349 - DNA, 15 bp, Homo sapiens
cttccctaaagtcac

SEQ ID NO: 130350 - DNA, 15 bp, Homo sapiens
ttccctaaagtcaca

SEQ ID NO: 130351 - DNA, 15 bp, Homo sapiens
tccctaaagtcacag

SEQ ID NO: 130352 - DNA, 15 bp, Homo sapiens
ccctaaagtcacagg

SEQ ID NO: 130353 - DNA, 15 bp, Homo sapiens
cctaaagtcacagga

SEQ ID NO: 130354 - DNA, 15 bp, Homo sapiens
ctaaagtcacaggac

SEQ ID NO: 130355 - DNA, 15 bp, Homo sapiens
taaagtcacaggaca

SEQ ID NO: 130356 - DNA, 15 bp, Homo sapiens
aaagtcacaggacat

SEQ ID NO: 130357 - DNA, 15 bp, Homo sapiens
aagtcacaggacatg

SEQ ID NO: 130358 - DNA, 15 bp, Homo sapiens
agtcacaggacatgg

SEQ ID NO: 130359 - DNA, 15 bp, Homo sapiens
gtcacaggacatggg

SEQ ID NO: 130360 - DNA, 15 bp, Homo sapiens
tcacaggacatgggg

SEQ ID NO: 130361 - DNA, 15 bp, Homo sapiens
cacaggacatggggc

SEQ ID NO: 130362 - DNA, 15 bp, Homo sapiens
acaggacatggggca

SEQ ID NO: 130363 - DNA, 15 bp, Homo sapiens
caggacatggggcat

SEQ ID NO: 130364 - DNA, 15 bp, Homo sapiens
aggacatggggcatg

SEQ ID NO: 130365 - DNA, 15 bp, Homo sapiens
ggacatggggcatgg

SEQ ID NO: 130366 - DNA, 15 bp, Homo sapiens
gacatggggcatggg

SEQ ID NO: 130367 - DNA, 15 bp, Homo sapiens
acatggggcatgggc

SEQ ID NO: 130368 - DNA, 15 bp, Homo sapiens
catggggcatgggct

SEQ ID NO: 130369 - DNA, 15 bp, Homo sapiens
atggggcatgggctg

SEQ ID NO: 130370 - DNA, 15 bp, Homo sapiens
tggggcatgggctgg

SEQ ID NO: 130371 - DNA, 15 bp, Homo sapiens
ggggcatgggctggc

SEQ ID NO: 130372 - DNA, 15 bp, Homo sapiens
gggcatgggctggct

SEQ ID NO: 130373 - DNA, 15 bp, Homo sapiens
ggcatgggctggctg

SEQ ID NO: 130374 - DNA, 15 bp, Homo sapiens
gcatgggctggctgg

SEQ ID NO: 130375 - DNA, 15 bp, Homo sapiens
catgggctggctggg

SEQ ID NO: 130376 - DNA, 15 bp, Homo sapiens
atgggctggctggga

SEQ ID NO: 130377 - DNA, 15 bp, Homo sapiens
tgggctggctgggat

SEQ ID NO: 130378 - DNA, 15 bp, Homo sapiens
gggctggctgggatg

SEQ ID NO: 130379 - DNA, 15 bp, Homo sapiens
ggctggctgggatga

SEQ ID NO: 130380 - DNA, 15 bp, Homo sapiens
gctggctgggatgag

SEQ ID NO: 130381 - DNA, 15 bp, Homo sapiens
ctggctgggatgaga

SEQ ID NO: 130382 - DNA, 15 bp, Homo sapiens
tggctgggatgagaa

SEQ ID NO: 130383 - DNA, 15 bp, Homo sapiens
ggctgggatgagaaa

SEQ ID NO: 130384 - DNA, 15 bp, Homo sapiens
gctgggatgagaaag

SEQ ID NO: 130385 - DNA, 15 bp, Homo sapiens
ctgggatgagaaagg

SEQ ID NO: 130386 - DNA, 15 bp, Homo sapiens
tgggatgagaaagga

SEQ ID NO: 130387 - DNA, 15 bp, Homo sapiens
gggatgagaaaggag

SEQ ID NO: 130388 - DNA, 15 bp, Homo sapiens
ggatgagaaaggaga

SEQ ID NO: 130389 - DNA, 15 bp, Homo sapiens
gatgagaaaggagac

SEQ ID NO: 130390 - DNA, 15 bp, Homo sapiens
atgagaaaggagaca

SEQ ID NO: 130391 - DNA, 15 bp, Homo sapiens
tgagaaaggagacaa

SEQ ID NO: 130392 - DNA, 15 bp, Homo sapiens
gagaaaggagacaag

SEQ ID NO: 130393 - DNA, 15 bp, Homo sapiens
agaaaggagacaaga

SEQ ID NO: 130394 - DNA, 15 bp, Homo sapiens
gaaaggagacaagag

SEQ ID NO: 130395 - DNA, 15 bp, Homo sapiens
aaaggagacaagagg

SEQ ID NO: 130396 - DNA, 15 bp, Homo sapiens
aaggagacaagaggg

SEQ ID NO: 130397 - DNA, 15 bp, Homo sapiens
aggagacaagagggc

SEQ ID NO: 130398 - DNA, 15 bp, Homo sapiens
ggagacaagagggct

SEQ ID NO: 130399 - DNA, 15 bp, Homo sapiens
gagacaagagggctt

SEQ ID NO: 130400 - DNA, 15 bp, Homo sapiens
agacaagagggcttc

SEQ ID NO: 130401 - DNA, 15 bp, Homo sapiens
gacaagagggcttct

SEQ ID NO: 130402 - DNA, 15 bp, Homo sapiens
acaagagggcttctg

SEQ ID NO: 130403 - DNA, 15 bp, Homo sapiens
caagagggcttctga

SEQ ID NO: 130404 - DNA, 15 bp, Homo sapiens
aagagggcttctgaa

SEQ ID NO: 130405 - DNA, 15 bp, Homo sapiens
agagggcttctgaaa

SEQ ID NO: 130406 - DNA, 15 bp, Homo sapiens
gagggcttctgaaag

SEQ ID NO: 130407 - DNA, 15 bp, Homo sapiens
agggcttctgaaaga

SEQ ID NO: 130408 - DNA, 15 bp, Homo sapiens
gggcttctgaaagaa

SEQ ID NO: 130409 - DNA, 15 bp, Homo sapiens
ggcttctgaaagaaa

SEQ ID NO: 130410 - DNA, 15 bp, Homo sapiens
gcttctgaaagaaat

SEQ ID NO: 130411 - DNA, 15 bp, Homo sapiens
cttctgaaagaaatg

SEQ ID NO: 130412 - DNA, 15 bp, Homo sapiens
ttctgaaagaaatgc

SEQ ID NO: 130413 - DNA, 15 bp, Homo sapiens
tctgaaagaaatgcc

SEQ ID NO: 130414 - DNA, 15 bp, Homo sapiens
ctgaaagaaatgcca

SEQ ID NO: 130415 - DNA, 15 bp, Homo sapiens
tgaaagaaatgccag

SEQ ID NO: 130416 - DNA, 15 bp, Homo sapiens
gaaagaaatgccaga

SEQ ID NO: 130417 - DNA, 15 bp, Homo sapiens
aaagaaatgccagat

SEQ ID NO: 130418 - DNA, 15 bp, Homo sapiens
aagaaatgccagatt

SEQ ID NO: 130419 - DNA, 15 bp, Homo sapiens
agaaatgccagattc

SEQ ID NO: 130420 - DNA, 15 bp, Homo sapiens
gaaatgccagattca

SEQ ID NO: 130421 - DNA, 15 bp, Homo sapiens
aaatgccagattcac

SEQ ID NO: 130422 - DNA, 15 bp, Homo sapiens
aatgccagattcact

SEQ ID NO: 130423 - DNA, 15 bp, Homo sapiens
atgccagattcactc

SEQ ID NO: 130424 - DNA, 15 bp, Homo sapiens
tgccagattcactcc

SEQ ID NO: 130425 - DNA, 15 bp, Homo sapiens
gccagattcactcca

SEQ ID NO: 130426 - DNA, 15 bp, Homo sapiens
ccagattcactccac

SEQ ID NO: 130427 - DNA, 15 bp, Homo sapiens
cagattcactccact

SEQ ID NO: 130428 - DNA, 15 bp, Homo sapiens
agattcactccactt

SEQ ID NO: 130429 - DNA, 15 bp, Homo sapiens
gattcactccacttc

SEQ ID NO: 130430 - DNA, 15 bp, Homo sapiens
attcactccacttcc

SEQ ID NO: 130431 - DNA, 15 bp, Homo sapiens
ttcactccacttcct

SEQ ID NO: 130432 - DNA, 15 bp, Homo sapiens
tcactccacttcctg

SEQ ID NO: 130433 - DNA, 15 bp, Homo sapiens
cactccacttcctgg

SEQ ID NO: 130434 - DNA, 15 bp, Homo sapiens
actccacttcctggc

SEQ ID NO: 130435 - DNA, 15 bp, Homo sapiens
ctccacttcctggct

SEQ ID NO: 130436 - DNA, 15 bp, Homo sapiens
tccacttcctggctt

SEQ ID NO: 130437 - DNA, 15 bp, Homo sapiens
ccacttcctggcttc

SEQ ID NO: 130438 - DNA, 15 bp, Homo sapiens
cacttcctggcttca

SEQ ID NO: 130439 - DNA, 15 bp, Homo sapiens
acttcctggcttcag

SEQ ID NO: 130440 - DNA, 15 bp, Homo sapiens
cttcctggcttcagg

SEQ ID NO: 130441 - DNA, 15 bp, Homo sapiens
ttcctggcttcaggc

SEQ ID NO: 130442 - DNA, 15 bp, Homo sapiens
tcctggcttcaggca

SEQ ID NO: 130443 - DNA, 15 bp, Homo sapiens
cctggcttcaggcac

SEQ ID NO: 130444 - DNA, 15 bp, Homo sapiens
ctggcttcaggcacc

SEQ ID NO: 130445 - DNA, 15 bp, Homo sapiens
tggcttcaggcaccg

SEQ ID NO: 130446 - DNA, 15 bp, Homo sapiens
ggcttcaggcaccga

SEQ ID NO: 130447 - DNA, 15 bp, Homo sapiens
gcttcaggcaccgat

SEQ ID NO: 130448 - DNA, 15 bp, Homo sapiens
cttcaggcaccgatg

SEQ ID NO: 130449 - DNA, 15 bp, Homo sapiens
ttcaggcaccgatgg

SEQ ID NO: 130450 - DNA, 15 bp, Homo sapiens
tcaggcaccgatgga

SEQ ID NO: 130451 - DNA, 15 bp, Homo sapiens
caggcaccgatggaa

SEQ ID NO: 130452 - DNA, 15 bp, Homo sapiens
aggcaccgatggaat

SEQ ID NO: 130453 - DNA, 15 bp, Homo sapiens
ggcaccgatggaatg

SEQ ID NO: 130454 - DNA, 15 bp, Homo sapiens
gcaccgatggaatgt

SEQ ID NO: 130455 - DNA, 15 bp, Homo sapiens
caccgatggaatgtt

SEQ ID NO: 130456 - DNA, 15 bp, Homo sapiens
accgatggaatgttt

SEQ ID NO: 130457 - DNA, 15 bp, Homo sapiens
ccgatggaatgtttc

SEQ ID NO: 130458 - DNA, 15 bp, Homo sapiens
cgatggaatgtttcc

SEQ ID NO: 130459 - DNA, 15 bp, Homo sapiens
gatggaatgtttccc

SEQ ID NO: 130460 - DNA, 15 bp, Homo sapiens
atggaatgtttccca

SEQ ID NO: 130461 - DNA, 15 bp, Homo sapiens
tggaatgtttcccaa

SEQ ID NO: 130462 - DNA, 15 bp, Homo sapiens
ggaatgtttcccaag

SEQ ID NO: 130463 - DNA, 15 bp, Homo sapiens
gaatgtttcccaagg

SEQ ID NO: 130464 - DNA, 15 bp, Homo sapiens
aatgtttcccaaggc

SEQ ID NO: 130465 - DNA, 15 bp, Homo sapiens
atgtttcccaaggcc

SEQ ID NO: 130466 - DNA, 15 bp, Homo sapiens
tgtttcccaaggccc

SEQ ID NO: 130467 - DNA, 15 bp, Homo sapiens
gtttcccaaggccca

SEQ ID NO: 130468 - DNA, 15 bp, Homo sapiens
tttcccaaggcccat

SEQ ID NO: 130469 - DNA, 15 bp, Homo sapiens
ttcccaaggcccatc

SEQ ID NO: 130470 - DNA, 15 bp, Homo sapiens
tcccaaggcccatct

SEQ ID NO: 130471 - DNA, 15 bp, Homo sapiens
cccaaggcccatcta

SEQ ID NO: 130472 - DNA, 15 bp, Homo sapiens
ccaaggcccatctag

SEQ ID NO: 130473 - DNA, 15 bp, Homo sapiens
caaggcccatctaga

SEQ ID NO: 130474 - DNA, 15 bp, Homo sapiens
aaggcccatctagaa

SEQ ID NO: 130475 - DNA, 15 bp, Homo sapiens
aggcccatctagaaa

SEQ ID NO: 130476 - DNA, 15 bp, Homo sapiens
ggcccatctagaaag

SEQ ID NO: 130477 - DNA, 15 bp, Homo sapiens
gcccatctagaaaga

SEQ ID NO: 130478 - DNA, 15 bp, Homo sapiens
cccatctagaaagaa

SEQ ID NO: 130479 - DNA, 15 bp, Homo sapiens
ccatctagaaagaac

SEQ ID NO: 130480 - DNA, 15 bp, Homo sapiens
catctagaaagaaca

SEQ ID NO: 130481 - DNA, 15 bp, Homo sapiens
atctagaaagaacat

SEQ ID NO: 130482 - DNA, 15 bp, Homo sapiens
tctagaaagaacatc

SEQ ID NO: 130483 - DNA, 15 bp, Homo sapiens
ctagaaagaacatcc

SEQ ID NO: 130484 - DNA, 15 bp, Homo sapiens
tagaaagaacatcct

SEQ ID NO: 130485 - DNA, 15 bp, Homo sapiens
agaaagaacatcctg

SEQ ID NO: 130486 - DNA, 15 bp, Homo sapiens
gaaagaacatcctgt

SEQ ID NO: 130487 - DNA, 15 bp, Homo sapiens
aaagaacatcctgtg

SEQ ID NO: 130488 - DNA, 15 bp, Homo sapiens
aagaacatcctgtga

SEQ ID NO: 130489 - DNA, 15 bp, Homo sapiens
agaacatcctgtgac

SEQ ID NO: 130490 - DNA, 15 bp, Homo sapiens
gaacatcctgtgact

SEQ ID NO: 130491 - DNA, 15 bp, Homo sapiens
aacatcctgtgactc

SEQ ID NO: 130492 - DNA, 15 bp, Homo sapiens
acatcctgtgactca

SEQ ID NO: 130493 - DNA, 15 bp, Homo sapiens
catcctgtgactcac

SEQ ID NO: 130494 - DNA, 15 bp, Homo sapiens
atcctgtgactcaca

SEQ ID NO: 130495 - DNA, 15 bp, Homo sapiens
tcctgtgactcacag

SEQ ID NO: 130496 - DNA, 15 bp, Homo sapiens
cctgtgactcacagc

SEQ ID NO: 130497 - DNA, 15 bp, Homo sapiens
ctgtgactcacagcc

SEQ ID NO: 130498 - DNA, 15 bp, Homo sapiens
tgtgactcacagcca

SEQ ID NO: 130499 - DNA, 15 bp, Homo sapiens
gtgactcacagccac

SEQ ID NO: 130500 - DNA, 15 bp, Homo sapiens
tgactcacagccact

SEQ ID NO: 130501 - DNA, 15 bp, Homo sapiens
gactcacagccactt

SEQ ID NO: 130502 - DNA, 15 bp, Homo sapiens
actcacagccacttc

SEQ ID NO: 130503 - DNA, 15 bp, Homo sapiens
ctcacagccacttct

SEQ ID NO: 130504 - DNA, 15 bp, Homo sapiens
tcacagccacttctc

SEQ ID NO: 130505 - DNA, 15 bp, Homo sapiens
cacagccacttctca

SEQ ID NO: 130506 - DNA, 15 bp, Homo sapiens
acagccacttctcat

SEQ ID NO: 130507 - DNA, 15 bp, Homo sapiens
cagccacttctcatt

SEQ ID NO: 130508 - DNA, 15 bp, Homo sapiens
agccacttctcattt

SEQ ID NO: 130509 - DNA, 15 bp, Homo sapiens
gccacttctcatttt

SEQ ID NO: 130510 - DNA, 15 bp, Homo sapiens
ccacttctcattttc

SEQ ID NO: 130511 - DNA, 15 bp, Homo sapiens
cacttctcattttct

SEQ ID NO: 130512 - DNA, 15 bp, Homo sapiens
acttctcattttctg

SEQ ID NO: 130513 - DNA, 15 bp, Homo sapiens
cttctcattttctgt

SEQ ID NO: 130514 - DNA, 15 bp, Homo sapiens
ttctcattttctgtc

SEQ ID NO: 130515 - DNA, 15 bp, Homo sapiens
tctcattttctgtct

SEQ ID NO: 130516 - DNA, 15 bp, Homo sapiens
ctcattttctgtctg

SEQ ID NO: 130517 - DNA, 15 bp, Homo sapiens
tcattttctgtctga

SEQ ID NO: 130518 - DNA, 15 bp, Homo sapiens
cattttctgtctgaa

SEQ ID NO: 130519 - DNA, 15 bp, Homo sapiens
attttctgtctgaac

SEQ ID NO: 130520 - DNA, 15 bp, Homo sapiens
ttttctgtctgaacc

SEQ ID NO: 130521 - DNA, 15 bp, Homo sapiens
tttctgtctgaaccc

SEQ ID NO: 130522 - DNA, 15 bp, Homo sapiens
ttctgtctgaacccc

SEQ ID NO: 130523 - DNA, 15 bp, Homo sapiens
tctgtctgaaccccc

SEQ ID NO: 130524 - DNA, 15 bp, Homo sapiens
ctgtctgaaccccct

SEQ ID NO: 130525 - DNA, 15 bp, Homo sapiens
tgtctgaaccccctc

SEQ ID NO: 130526 - DNA, 15 bp, Homo sapiens
gtctgaaccccctca

SEQ ID NO: 130527 - DNA, 15 bp, Homo sapiens
tctgaaccccctcac

SEQ ID NO: 130528 - DNA, 15 bp, Homo sapiens
ctgaaccccctcacc

SEQ ID NO: 130529 - DNA, 15 bp, Homo sapiens
tgaaccccctcaccc

SEQ ID NO: 130530 - DNA, 15 bp, Homo sapiens
gaaccccctcaccca

SEQ ID NO: 130531 - DNA, 15 bp, Homo sapiens
aaccccctcacccat

SEQ ID NO: 130532 - DNA, 15 bp, Homo sapiens
accccctcacccatt

SEQ ID NO: 130533 - DNA, 15 bp, Homo sapiens
ccccctcacccattc

SEQ ID NO: 130534 - DNA, 15 bp, Homo sapiens
cccctcacccattca

SEQ ID NO: 130535 - DNA, 15 bp, Homo sapiens
ccctcacccattcag

SEQ ID NO: 130536 - DNA, 15 bp, Homo sapiens
cctcacccattcagg

SEQ ID NO: 130537 - DNA, 15 bp, Homo sapiens
ctcacccattcaggc

SEQ ID NO: 130538 - DNA, 15 bp, Homo sapiens
tcacccattcaggca

SEQ ID NO: 130539 - DNA, 15 bp, Homo sapiens
cacccattcaggcag

SEQ ID NO: 130540 - DNA, 15 bp, Homo sapiens
acccattcaggcagc

SEQ ID NO: 130541 - DNA, 15 bp, Homo sapiens
cccattcaggcagct

SEQ ID NO: 130542 - DNA, 15 bp, Homo sapiens
ccattcaggcagctg

SEQ ID NO: 130543 - DNA, 15 bp, Homo sapiens
cattcaggcagctgc

SEQ ID NO: 130544 - DNA, 15 bp, Homo sapiens
attcaggcagctgct

SEQ ID NO: 130545 - DNA, 15 bp, Homo sapiens
ttcaggcagctgcta

SEQ ID NO: 130546 - DNA, 15 bp, Homo sapiens
tcaggcagctgctaa

SEQ ID NO: 130547 - DNA, 15 bp, Homo sapiens
caggcagctgctaaa

SEQ ID NO: 130548 - DNA, 15 bp, Homo sapiens
aggcagctgctaaag

SEQ ID NO: 130549 - DNA, 15 bp, Homo sapiens
ggcagctgctaaagt

SEQ ID NO: 130550 - DNA, 15 bp, Homo sapiens
gcagctgctaaagtt

SEQ ID NO: 130551 - DNA, 15 bp, Homo sapiens
cagctgctaaagttg

SEQ ID NO: 130552 - DNA, 15 bp, Homo sapiens
agctgctaaagttga

SEQ ID NO: 130553 - DNA, 15 bp, Homo sapiens
gctgctaaagttgag

SEQ ID NO: 130554 - DNA, 15 bp, Homo sapiens
ctgctaaagttgagg

SEQ ID NO: 130555 - DNA, 15 bp, Homo sapiens
tgctaaagttgaggt

SEQ ID NO: 130556 - DNA, 15 bp, Homo sapiens
gctaaagttgaggtt

SEQ ID NO: 130557 - DNA, 15 bp, Homo sapiens
ctaaagttgaggtta

SEQ ID NO: 130558 - DNA, 15 bp, Homo sapiens
taaagttgaggttac

SEQ ID NO: 130559 - DNA, 15 bp, Homo sapiens
aaagttgaggttaca

SEQ ID NO: 130560 - DNA, 15 bp, Homo sapiens
aagttgaggttacag

SEQ ID NO: 130561 - DNA, 15 bp, Homo sapiens
agttgaggttacagc

SEQ ID NO: 130562 - DNA, 15 bp, Homo sapiens
gttgaggttacagcc

SEQ ID NO: 130563 - DNA, 15 bp, Homo sapiens
ttgaggttacagcct

SEQ ID NO: 130564 - DNA, 15 bp, Homo sapiens
tgaggttacagcctc

SEQ ID NO: 130565 - DNA, 15 bp, Homo sapiens
gaggttacagcctca

SEQ ID NO: 130566 - DNA, 15 bp, Homo sapiens
aggttacagcctcag

SEQ ID NO: 130567 - DNA, 15 bp, Homo sapiens
ggttacagcctcaga

SEQ ID NO: 130568 - DNA, 15 bp, Homo sapiens
gttacagcctcagac

SEQ ID NO: 130569 - DNA, 15 bp, Homo sapiens
ttacagcctcagact

SEQ ID NO: 130570 - DNA, 15 bp, Homo sapiens
tacagcctcagacta

SEQ ID NO: 130571 - DNA, 15 bp, Homo sapiens
acagcctcagactat

SEQ ID NO: 130572 - DNA, 15 bp, Homo sapiens
cagcctcagactata

SEQ ID NO: 130573 - DNA, 15 bp, Homo sapiens
agcctcagactatat

SEQ ID NO: 130574 - DNA, 15 bp, Homo sapiens
gcctcagactatatt

SEQ ID NO: 130575 - DNA, 15 bp, Homo sapiens
cctcagactatattt

SEQ ID NO: 130576 - DNA, 15 bp, Homo sapiens
ctcagactatatttt

SEQ ID NO: 130577 - DNA, 15 bp, Homo sapiens
tcagactatattttc

SEQ ID NO: 130578 - DNA, 15 bp, Homo sapiens
cagactatattttct

SEQ ID NO: 130579 - DNA, 15 bp, Homo sapiens
agactatattttctg

SEQ ID NO: 130580 - DNA, 15 bp, Homo sapiens
gactatattttctgt

SEQ ID NO: 130581 - DNA, 15 bp, Homo sapiens
actatattttctgtc

SEQ ID NO: 130582 - DNA, 15 bp, Homo sapiens
ctatattttctgtcc

SEQ ID NO: 130583 - DNA, 15 bp, Homo sapiens
tatattttctgtcct

SEQ ID NO: 130584 - DNA, 15 bp, Homo sapiens
atattttctgtcctt

SEQ ID NO: 130585 - DNA, 15 bp, Homo sapiens
tattttctgtccttg

SEQ ID NO: 130586 - DNA, 15 bp, Homo sapiens
attttctgtccttgt

SEQ ID NO: 130587 - DNA, 15 bp, Homo sapiens
ttttctgtccttgtg

SEQ ID NO: 130588 - DNA, 15 bp, Homo sapiens
tttctgtccttgtgg

SEQ ID NO: 130589 - DNA, 15 bp, Homo sapiens
ttctgtccttgtgga

SEQ ID NO: 130590 - DNA, 15 bp, Homo sapiens
tctgtccttgtggaa

SEQ ID NO: 130591 - DNA, 15 bp, Homo sapiens
ctgtccttgtggaac

SEQ ID NO: 130592 - DNA, 15 bp, Homo sapiens
tgtccttgtggaacc

SEQ ID NO: 130593 - DNA, 15 bp, Homo sapiens
gtccttgtggaaccc

SEQ ID NO: 130594 - DNA, 15 bp, Homo sapiens
tccttgtggaacccc

SEQ ID NO: 130595 - DNA, 15 bp, Homo sapiens
ccttgtggaacccca

SEQ ID NO: 130596 - DNA, 15 bp, Homo sapiens
cttgtggaaccccag

SEQ ID NO: 130597 - DNA, 15 bp, Homo sapiens
ttgtggaaccccagt

SEQ ID NO: 130598 - DNA, 15 bp, Homo sapiens
tgtggaaccccagtg

SEQ ID NO: 130599 - DNA, 15 bp, Homo sapiens
gtggaaccccagtgt

SEQ ID NO: 130600 - DNA, 15 bp, Homo sapiens
tggaaccccagtgtg

SEQ ID NO: 130601 - DNA, 15 bp, Homo sapiens
ggaaccccagtgtgt

SEQ ID NO: 130602 - DNA, 15 bp, Homo sapiens
gaaccccagtgtgtc

SEQ ID NO: 130603 - DNA, 15 bp, Homo sapiens
aaccccagtgtgtca

SEQ ID NO: 130604 - DNA, 15 bp, Homo sapiens
accccagtgtgtcat

SEQ ID NO: 130605 - DNA, 15 bp, Homo sapiens
ccccagtgtgtcatc

SEQ ID NO: 130606 - DNA, 15 bp, Homo sapiens
cccagtgtgtcatct

SEQ ID NO: 130607 - DNA, 15 bp, Homo sapiens
ccagtgtgtcatctt

SEQ ID NO: 130608 - DNA, 15 bp, Homo sapiens
cagtgtgtcatcttg

SEQ ID NO: 130609 - DNA, 15 bp, Homo sapiens
agtgtgtcatcttgt

SEQ ID NO: 130610 - DNA, 15 bp, Homo sapiens
gtgtgtcatcttgtt

SEQ ID NO: 130611 - DNA, 15 bp, Homo sapiens
tgtgtcatcttgttg

SEQ ID NO: 130612 - DNA, 15 bp, Homo sapiens
gtgtcatcttgttgg

SEQ ID NO: 130613 - DNA, 15 bp, Homo sapiens
tgtcatcttgttggg

SEQ ID NO: 130614 - DNA, 15 bp, Homo sapiens
gtcatcttgttggga

SEQ ID NO: 130615 - DNA, 15 bp, Homo sapiens
tcatcttgttgggag

SEQ ID NO: 130616 - DNA, 15 bp, Homo sapiens
catcttgttgggaga

SEQ ID NO: 130617 - DNA, 15 bp, Homo sapiens
atcttgttgggagat

SEQ ID NO: 130618 - DNA, 15 bp, Homo sapiens
tcttgttgggagatc

SEQ ID NO: 130619 - DNA, 15 bp, Homo sapiens
cttgttgggagatct

SEQ ID NO: 130620 - DNA, 15 bp, Homo sapiens
ttgttgggagatctg

SEQ ID NO: 130621 - DNA, 15 bp, Homo sapiens
tgttgggagatctgg

SEQ ID NO: 130622 - DNA, 15 bp, Homo sapiens
gttgggagatctggt

SEQ ID NO: 130623 - DNA, 15 bp, Homo sapiens
ttgggagatctggtg

SEQ ID NO: 130624 - DNA, 15 bp, Homo sapiens
tgggagatctggtga

SEQ ID NO: 130625 - DNA, 15 bp, Homo sapiens
gggagatctggtgat

SEQ ID NO: 130626 - DNA, 15 bp, Homo sapiens
ggagatctggtgata

SEQ ID NO: 130627 - DNA, 15 bp, Homo sapiens
gagatctggtgatac

SEQ ID NO: 130628 - DNA, 15 bp, Homo sapiens
agatctggtgataca

SEQ ID NO: 130629 - DNA, 15 bp, Homo sapiens
gatctggtgatacat

SEQ ID NO: 130630 - DNA, 15 bp, Homo sapiens
atctggtgatacatg

SEQ ID NO: 130631 - DNA, 15 bp, Homo sapiens
tctggtgatacatgt

SEQ ID NO: 130632 - DNA, 15 bp, Homo sapiens
ctggtgatacatgtg

SEQ ID NO: 130633 - DNA, 15 bp, Homo sapiens
tggtgatacatgtgt

SEQ ID NO: 130634 - DNA, 15 bp, Homo sapiens
ggtgatacatgtgtc

SEQ ID NO: 130635 - DNA, 15 bp, Homo sapiens
gtgatacatgtgtca

SEQ ID NO: 130636 - DNA, 15 bp, Homo sapiens
tgatacatgtgtcaa

SEQ ID NO: 130637 - DNA, 15 bp, Homo sapiens
gatacatgtgtcaac

SEQ ID NO: 130638 - DNA, 15 bp, Homo sapiens
atacatgtgtcaaca

SEQ ID NO: 130639 - DNA, 15 bp, Homo sapiens
tacatgtgtcaacat

SEQ ID NO: 130640 - DNA, 15 bp, Homo sapiens
acatgtgtcaacatt

SEQ ID NO: 130641 - DNA, 15 bp, Homo sapiens
catgtgtcaacatta

SEQ ID NO: 130642 - DNA, 15 bp, Homo sapiens
atgtgtcaacattat

SEQ ID NO: 130643 - DNA, 15 bp, Homo sapiens
tgtgtcaacattatg

SEQ ID NO: 130644 - DNA, 15 bp, Homo sapiens
gtgtcaacattatgt

SEQ ID NO: 130645 - DNA, 15 bp, Homo sapiens
tgtcaacattatgtc

SEQ ID NO: 130646 - DNA, 15 bp, Homo sapiens
gtcaacattatgtca

SEQ ID NO: 130647 - DNA, 15 bp, Homo sapiens
tcaacattatgtcat

SEQ ID NO: 130648 - DNA, 15 bp, Homo sapiens
caacattatgtcatc

SEQ ID NO: 130649 - DNA, 15 bp, Homo sapiens
aacattatgtcatca

SEQ ID NO: 130650 - DNA, 15 bp, Homo sapiens
acattatgtcatcaa

SEQ ID NO: 130651 - DNA, 15 bp, Homo sapiens
cattatgtcatcaaa

SEQ ID NO: 130652 - DNA, 15 bp, Homo sapiens
attatgtcatcaaaa

SEQ ID NO: 130653 - DNA, 15 bp, Homo sapiens
ttatgtcatcaaaat

SEQ ID NO: 130654 - DNA, 15 bp, Homo sapiens
tatgtcatcaaaatg

SEQ ID NO: 130655 - DNA, 15 bp, Homo sapiens
atgtcatcaaaatgg

SEQ ID NO: 130656 - DNA, 15 bp, Homo sapiens
tgtcatcaaaatgga

SEQ ID NO: 130657 - DNA, 15 bp, Homo sapiens
gtcatcaaaatggaa

SEQ ID NO: 130658 - DNA, 15 bp, Homo sapiens
tcatcaaaatggaaa

SEQ ID NO: 130659 - DNA, 15 bp, Homo sapiens
catcaaaatggaaat

SEQ ID NO: 130660 - DNA, 15 bp, Homo sapiens
atcaaaatggaaatt

SEQ ID NO: 130661 - DNA, 15 bp, Homo sapiens
tcaaaatggaaattc

SEQ ID NO: 130662 - DNA, 15 bp, Homo sapiens
caaaatggaaattct

SEQ ID NO: 130663 - DNA, 15 bp, Homo sapiens
aaaatggaaattctt

SEQ ID NO: 130664 - DNA, 15 bp, Homo sapiens
aaatggaaattcttt

SEQ ID NO: 130665 - DNA, 15 bp, Homo sapiens
aatggaaattctttg

SEQ ID NO: 130666 - DNA, 15 bp, Homo sapiens
atggaaattctttga

SEQ ID NO: 130667 - DNA, 15 bp, Homo sapiens
tggaaattctttgaa

SEQ ID NO: 130668 - DNA, 15 bp, Homo sapiens
ggaaattctttgaaa

SEQ ID NO: 130669 - DNA, 15 bp, Homo sapiens
gaaattctttgaaat

SEQ ID NO: 130670 - DNA, 15 bp, Homo sapiens
aaattctttgaaatc

SEQ ID NO: 130671 - DNA, 15 bp, Homo sapiens
aattctttgaaatct

SEQ ID NO: 130672 - DNA, 15 bp, Homo sapiens
attctttgaaatctt

SEQ ID NO: 130673 - DNA, 15 bp, Homo sapiens
ttctttgaaatcttt

SEQ ID NO: 130674 - DNA, 15 bp, Homo sapiens
tctttgaaatcttta

SEQ ID NO: 130675 - DNA, 15 bp, Homo sapiens
ctttgaaatctttag

SEQ ID NO: 130676 - DNA, 15 bp, Homo sapiens
tttgaaatctttagg

SEQ ID NO: 130677 - DNA, 15 bp, Homo sapiens
ttgaaatctttaggt

SEQ ID NO: 130678 - DNA, 15 bp, Homo sapiens
tgaaatctttaggtg

SEQ ID NO: 130679 - DNA, 15 bp, Homo sapiens
gaaatctttaggtga

SEQ ID NO: 130680 - DNA, 15 bp, Homo sapiens
aaatctttaggtgat

SEQ ID NO: 130681 - DNA, 15 bp, Homo sapiens
aatctttaggtgatt

SEQ ID NO: 130682 - DNA, 15 bp, Homo sapiens
atctttaggtgattg

SEQ ID NO: 130683 - DNA, 15 bp, Homo sapiens
tctttaggtgattgc

SEQ ID NO: 130684 - DNA, 15 bp, Homo sapiens
ctttaggtgattgca

SEQ ID NO: 130685 - DNA, 15 bp, Homo sapiens
tttaggtgattgcaa

SEQ ID NO: 130686 - DNA, 15 bp, Homo sapiens
ttaggtgattgcaat

SEQ ID NO: 130687 - DNA, 15 bp, Homo sapiens
taggtgattgcaatt

SEQ ID NO: 130688 - DNA, 15 bp, Homo sapiens
aggtgattgcaattc

SEQ ID NO: 130689 - DNA, 15 bp, Homo sapiens
ggtgattgcaattca

SEQ ID NO: 130690 - DNA, 15 bp, Homo sapiens
gtgattgcaattcac

SEQ ID NO: 130691 - DNA, 15 bp, Homo sapiens
tgattgcaattcacg

SEQ ID NO: 130692 - DNA, 15 bp, Homo sapiens
gattgcaattcacgt

SEQ ID NO: 130693 - DNA, 15 bp, Homo sapiens
attgcaattcacgtt

SEQ ID NO: 130694 - DNA, 15 bp, Homo sapiens
ttgcaattcacgttc

SEQ ID NO: 130695 - DNA, 15 bp, Homo sapiens
tgcaattcacgttct

SEQ ID NO: 130696 - DNA, 15 bp, Homo sapiens
gcaattcacgttctg

SEQ ID NO: 130697 - DNA, 15 bp, Homo sapiens
caattcacgttctgt

SEQ ID NO: 130698 - DNA, 15 bp, Homo sapiens
aattcacgttctgta

SEQ ID NO: 130699 - DNA, 15 bp, Homo sapiens
attcacgttctgtat

SEQ ID NO: 130700 - DNA, 15 bp, Homo sapiens
ttcacgttctgtatg

SEQ ID NO: 130701 - DNA, 15 bp, Homo sapiens
tcacgttctgtatgt

SEQ ID NO: 130702 - DNA, 15 bp, Homo sapiens
cacgttctgtatgta

SEQ ID NO: 130703 - DNA, 15 bp, Homo sapiens
acgttctgtatgtat

SEQ ID NO: 130704 - DNA, 15 bp, Homo sapiens
cgttctgtatgtatg

SEQ ID NO: 130705 - DNA, 15 bp, Homo sapiens
gttctgtatgtatgc

SEQ ID NO: 130706 - DNA, 15 bp, Homo sapiens
ttctgtatgtatgca

SEQ ID NO: 130707 - DNA, 15 bp, Homo sapiens
tctgtatgtatgcac

SEQ ID NO: 130708 - DNA, 15 bp, Homo sapiens
ctgtatgtatgcact

SEQ ID NO: 130709 - DNA, 15 bp, Homo sapiens
tgtatgtatgcactt

SEQ ID NO: 130710 - DNA, 15 bp, Homo sapiens
gtatgtatgcacttg

SEQ ID NO: 130711 - DNA, 15 bp, Homo sapiens
tatgtatgcacttgt

SEQ ID NO: 130712 - DNA, 15 bp, Homo sapiens
atgtatgcacttgtc

SEQ ID NO: 130713 - DNA, 15 bp, Homo sapiens
tgtatgcacttgtca

SEQ ID NO: 130714 - DNA, 15 bp, Homo sapiens
gtatgcacttgtcaa

SEQ ID NO: 130715 - DNA, 15 bp, Homo sapiens
tatgcacttgtcaaa

SEQ ID NO: 130716 - DNA, 15 bp, Homo sapiens
atgcacttgtcaaaa

SEQ ID NO: 130717 - DNA, 15 bp, Homo sapiens
tgcacttgtcaaaag

SEQ ID NO: 130718 - DNA, 15 bp, Homo sapiens
gcacttgtcaaaagt

SEQ ID NO: 130719 - DNA, 15 bp, Homo sapiens
cacttgtcaaaagtt

SEQ ID NO: 130720 - DNA, 15 bp, Homo sapiens
acttgtcaaaagttt

SEQ ID NO: 130721 - DNA, 15 bp, Homo sapiens
cttgtcaaaagtttt

SEQ ID NO: 130722 - DNA, 15 bp, Homo sapiens
ttgtcaaaagttttg

SEQ ID NO: 130723 - DNA, 15 bp, Homo sapiens
tgtcaaaagttttga

SEQ ID NO: 130724 - DNA, 15 bp, Homo sapiens
gtcaaaagttttgat

SEQ ID NO: 130725 - DNA, 15 bp, Homo sapiens
tcaaaagttttgatt

SEQ ID NO: 130726 - DNA, 15 bp, Homo sapiens
caaaagttttgattt

SEQ ID NO: 130727 - DNA, 15 bp, Homo sapiens
aaaagttttgatttg

SEQ ID NO: 130728 - DNA, 15 bp, Homo sapiens
aaagttttgatttga

SEQ ID NO: 130729 - DNA, 15 bp, Homo sapiens
aagttttgatttgag

SEQ ID NO: 130730 - DNA, 15 bp, Homo sapiens
agttttgatttgagg

SEQ ID NO: 130731 - DNA, 15 bp, Homo sapiens
gttttgatttgaggc

SEQ ID NO: 130732 - DNA, 15 bp, Homo sapiens
ttttgatttgaggcc

SEQ ID NO: 130733 - DNA, 15 bp, Homo sapiens
tttgatttgaggcct

SEQ ID NO: 130734 - DNA, 15 bp, Homo sapiens
ttgatttgaggcctt

SEQ ID NO: 130735 - DNA, 15 bp, Homo sapiens
tgatttgaggcctta

SEQ ID NO: 130736 - DNA, 15 bp, Homo sapiens
gatttgaggccttag

SEQ ID NO: 130737 - DNA, 15 bp, Homo sapiens
atttgaggccttaga

SEQ ID NO: 130738 - DNA, 15 bp, Homo sapiens
tttgaggccttagaa

SEQ ID NO: 130739 - DNA, 15 bp, Homo sapiens
ttgaggccttagaat

SEQ ID NO: 130740 - DNA, 15 bp, Homo sapiens
tgaggccttagaatt

SEQ ID NO: 130741 - DNA, 15 bp, Homo sapiens
gaggccttagaattt

SEQ ID NO: 130742 - DNA, 15 bp, Homo sapiens
aggccttagaatttt

SEQ ID NO: 130743 - DNA, 15 bp, Homo sapiens
ggccttagaatttta

SEQ ID NO: 130744 - DNA, 15 bp, Homo sapiens
gccttagaattttat

SEQ ID NO: 130745 - DNA, 15 bp, Homo sapiens
ccttagaattttata

SEQ ID NO: 130746 - DNA, 15 bp, Homo sapiens
cttagaattttatat

SEQ ID NO: 130747 - DNA, 15 bp, Homo sapiens
ttagaattttatatt

SEQ ID NO: 130748 - DNA, 15 bp, Homo sapiens
tagaattttatattt

SEQ ID NO: 130749 - DNA, 15 bp, Homo sapiens
agaattttatatttg

SEQ ID NO: 130750 - DNA, 15 bp, Homo sapiens
gaattttatatttgg

SEQ ID NO: 130751 - DNA, 15 bp, Homo sapiens
aattttatatttgga

SEQ ID NO: 130752 - DNA, 15 bp, Homo sapiens
attttatatttggaa

SEQ ID NO: 130753 - DNA, 15 bp, Homo sapiens
ttttatatttggaaa

SEQ ID NO: 130754 - DNA, 15 bp, Homo sapiens
tttatatttggaaac

SEQ ID NO: 130755 - DNA, 15 bp, Homo sapiens
ttatatttggaaacc

SEQ ID NO: 130756 - DNA, 15 bp, Homo sapiens
tatatttggaaacct

SEQ ID NO: 130757 - DNA, 15 bp, Homo sapiens
atatttggaaacctt

SEQ ID NO: 130758 - DNA, 15 bp, Homo sapiens
tatttggaaaccttt

SEQ ID NO: 130759 - DNA, 15 bp, Homo sapiens
atttggaaacctttc

SEQ ID NO: 130760 - DNA, 15 bp, Homo sapiens
tttggaaacctttcc

SEQ ID NO: 130761 - DNA, 15 bp, Homo sapiens
ttggaaacctttcca

SEQ ID NO: 130762 - DNA, 15 bp, Homo sapiens
tggaaacctttccac

SEQ ID NO: 130763 - DNA, 15 bp, Homo sapiens
ggaaacctttccact

SEQ ID NO: 130764 - DNA, 15 bp, Homo sapiens
gaaacctttccacta

SEQ ID NO: 130765 - DNA, 15 bp, Homo sapiens
aaacctttccactac

SEQ ID NO: 130766 - DNA, 15 bp, Homo sapiens
aacctttccactacc

SEQ ID NO: 130767 - DNA, 15 bp, Homo sapiens
acctttccactacca

SEQ ID NO: 130768 - DNA, 15 bp, Homo sapiens
cctttccactaccat

SEQ ID NO: 130769 - DNA, 15 bp, Homo sapiens
ctttccactaccatg

SEQ ID NO: 130770 - DNA, 15 bp, Homo sapiens
tttccactaccatga

SEQ ID NO: 130771 - DNA, 15 bp, Homo sapiens
ttccactaccatgag

SEQ ID NO: 130772 - DNA, 15 bp, Homo sapiens
tccactaccatgagt

SEQ ID NO: 130773 - DNA, 15 bp, Homo sapiens
ccactaccatgagtt

SEQ ID NO: 130774 - DNA, 15 bp, Homo sapiens
cactaccatgagttt

SEQ ID NO: 130775 - DNA, 15 bp, Homo sapiens
actaccatgagtttt

SEQ ID NO: 130776 - DNA, 15 bp, Homo sapiens
ctaccatgagttttc

SEQ ID NO: 130777 - DNA, 15 bp, Homo sapiens
taccatgagttttcc

SEQ ID NO: 130778 - DNA, 15 bp, Homo sapiens
accatgagttttccc

SEQ ID NO: 130779 - DNA, 15 bp, Homo sapiens
ccatgagttttccca

SEQ ID NO: 130780 - DNA, 15 bp, Homo sapiens
catgagttttcccag

SEQ ID NO: 130781 - DNA, 15 bp, Homo sapiens
atgagttttcccaga

SEQ ID NO: 130782 - DNA, 15 bp, Homo sapiens
tgagttttcccagac

SEQ ID NO: 130783 - DNA, 15 bp, Homo sapiens
gagttttcccagacc

SEQ ID NO: 130784 - DNA, 15 bp, Homo sapiens
agttttcccagacct

SEQ ID NO: 130785 - DNA, 15 bp, Homo sapiens
gttttcccagacctg

SEQ ID NO: 130786 - DNA, 15 bp, Homo sapiens
ttttcccagacctgt

SEQ ID NO: 130787 - DNA, 15 bp, Homo sapiens
tttcccagacctgtc

SEQ ID NO: 130788 - DNA, 15 bp, Homo sapiens
ttcccagacctgtca

SEQ ID NO: 130789 - DNA, 15 bp, Homo sapiens
tcccagacctgtcaa

SEQ ID NO: 130790 - DNA, 15 bp, Homo sapiens
cccagacctgtcaaa

SEQ ID NO: 130791 - DNA, 15 bp, Homo sapiens
ccagacctgtcaaag

SEQ ID NO: 130792 - DNA, 15 bp, Homo sapiens
cagacctgtcaaagc

SEQ ID NO: 130793 - DNA, 15 bp, Homo sapiens
agacctgtcaaagcc

SEQ ID NO: 130794 - DNA, 15 bp, Homo sapiens
gacctgtcaaagcca

SEQ ID NO: 130795 - DNA, 15 bp, Homo sapiens
acctgtcaaagccag

SEQ ID NO: 130796 - DNA, 15 bp, Homo sapiens
cctgtcaaagccagg

SEQ ID NO: 130797 - DNA, 15 bp, Homo sapiens
ctgtcaaagccaggc

SEQ ID NO: 130798 - DNA, 15 bp, Homo sapiens
tgtcaaagccaggct

SEQ ID NO: 130799 - DNA, 15 bp, Homo sapiens
gtcaaagccaggctg

SEQ ID NO: 130800 - DNA, 15 bp, Homo sapiens
tcaaagccaggctgc

SEQ ID NO: 130801 - DNA, 15 bp, Homo sapiens
caaagccaggctgca

SEQ ID NO: 130802 - DNA, 15 bp, Homo sapiens
aaagccaggctgcat

SEQ ID NO: 130803 - DNA, 15 bp, Homo sapiens
aagccaggctgcatc

SEQ ID NO: 130804 - DNA, 15 bp, Homo sapiens
agccaggctgcatct

SEQ ID NO: 130805 - DNA, 15 bp, Homo sapiens
gccaggctgcatctc

SEQ ID NO: 130806 - DNA, 15 bp, Homo sapiens
ccaggctgcatctca

SEQ ID NO: 130807 - DNA, 15 bp, Homo sapiens
caggctgcatctcag

SEQ ID NO: 130808 - DNA, 15 bp, Homo sapiens
aggctgcatctcaga

SEQ ID NO: 130809 - DNA, 15 bp, Homo sapiens
ggctgcatctcagaa

SEQ ID NO: 130810 - DNA, 15 bp, Homo sapiens
gctgcatctcagaaa

SEQ ID NO: 130811 - DNA, 15 bp, Homo sapiens
ctgcatctcagaaac

SEQ ID NO: 130812 - DNA, 15 bp, Homo sapiens
tgcatctcagaaacc

SEQ ID NO: 130813 - DNA, 15 bp, Homo sapiens
gcatctcagaaacca

SEQ ID NO: 130814 - DNA, 15 bp, Homo sapiens
catctcagaaaccag

SEQ ID NO: 130815 - DNA, 15 bp, Homo sapiens
atctcagaaaccagg

SEQ ID NO: 130816 - DNA, 15 bp, Homo sapiens
tctcagaaaccaggt

SEQ ID NO: 130817 - DNA, 15 bp, Homo sapiens
ctcagaaaccaggtc

SEQ ID NO: 130818 - DNA, 15 bp, Homo sapiens
tcagaaaccaggtct

SEQ ID NO: 130819 - DNA, 15 bp, Homo sapiens
cagaaaccaggtctt

SEQ ID NO: 130820 - DNA, 15 bp, Homo sapiens
agaaaccaggtcttt

SEQ ID NO: 130821 - DNA, 15 bp, Homo sapiens
gaaaccaggtctttg

SEQ ID NO: 130822 - DNA, 15 bp, Homo sapiens
aaaccaggtctttga

SEQ ID NO: 130823 - DNA, 15 bp, Homo sapiens
aaccaggtctttgat

SEQ ID NO: 130824 - DNA, 15 bp, Homo sapiens
accaggtctttgatt

SEQ ID NO: 130825 - DNA, 15 bp, Homo sapiens
ccaggtctttgattt

SEQ ID NO: 130826 - DNA, 15 bp, Homo sapiens
caggtctttgatttc

SEQ ID NO: 130827 - DNA, 15 bp, Homo sapiens
aggtctttgatttcc

SEQ ID NO: 130828 - DNA, 15 bp, Homo sapiens
ggtctttgatttcca

SEQ ID NO: 130829 - DNA, 15 bp, Homo sapiens
gtctttgatttccat

SEQ ID NO: 130830 - DNA, 15 bp, Homo sapiens
tctttgatttccatc

SEQ ID NO: 130831 - DNA, 15 bp, Homo sapiens
ctttgatttccatcc

SEQ ID NO: 130832 - DNA, 15 bp, Homo sapiens
tttgatttccatcca

SEQ ID NO: 130833 - DNA, 15 bp, Homo sapiens
ttgatttccatccag

SEQ ID NO: 130834 - DNA, 15 bp, Homo sapiens
tgatttccatccagg

SEQ ID NO: 130835 - DNA, 15 bp, Homo sapiens
gatttccatccaggg

SEQ ID NO: 130836 - DNA, 15 bp, Homo sapiens
atttccatccagggc

SEQ ID NO: 130837 - DNA, 15 bp, Homo sapiens
tttccatccagggca

SEQ ID NO: 130838 - DNA, 15 bp, Homo sapiens
ttccatccagggcaa

SEQ ID NO: 130839 - DNA, 15 bp, Homo sapiens
tccatccagggcaag

SEQ ID NO: 130840 - DNA, 15 bp, Homo sapiens
ccatccagggcaagg

SEQ ID NO: 130841 - DNA, 15 bp, Homo sapiens
catccagggcaaggg

SEQ ID NO: 130842 - DNA, 15 bp, Homo sapiens
atccagggcaagggc

SEQ ID NO: 130843 - DNA, 15 bp, Homo sapiens
tccagggcaagggcc

SEQ ID NO: 130844 - DNA, 15 bp, Homo sapiens
ccagggcaagggcct

SEQ ID NO: 130845 - DNA, 15 bp, Homo sapiens
cagggcaagggcctg

SEQ ID NO: 130846 - DNA, 15 bp, Homo sapiens
agggcaagggcctgg

SEQ ID NO: 130847 - DNA, 15 bp, Homo sapiens
gggcaagggcctggg

SEQ ID NO: 130848 - DNA, 15 bp, Homo sapiens
ggcaagggcctgggc

SEQ ID NO: 130849 - DNA, 15 bp, Homo sapiens
gcaagggcctgggcc

SEQ ID NO: 130850 - DNA, 15 bp, Homo sapiens
caagggcctgggccc

SEQ ID NO: 130851 - DNA, 15 bp, Homo sapiens
aagggcctgggccca

SEQ ID NO: 130852 - DNA, 15 bp, Homo sapiens
agggcctgggcccag

SEQ ID NO: 130853 - DNA, 15 bp, Homo sapiens
gggcctgggcccagc

SEQ ID NO: 130854 - DNA, 15 bp, Homo sapiens
ggcctgggcccagct

SEQ ID NO: 130855 - DNA, 15 bp, Homo sapiens
gcctgggcccagctg

SEQ ID NO: 130856 - DNA, 15 bp, Homo sapiens
cctgggcccagctgg

SEQ ID NO: 130857 - DNA, 15 bp, Homo sapiens
ctgggcccagctggg

SEQ ID NO: 130858 - DNA, 15 bp, Homo sapiens
tgggcccagctgggc

SEQ ID NO: 130859 - DNA, 15 bp, Homo sapiens
gggcccagctgggct

SEQ ID NO: 130860 - DNA, 15 bp, Homo sapiens
ggcccagctgggctg

SEQ ID NO: 130861 - DNA, 15 bp, Homo sapiens
gcccagctgggctgt

SEQ ID NO: 130862 - DNA, 15 bp, Homo sapiens
cccagctgggctgta

SEQ ID NO: 130863 - DNA, 15 bp, Homo sapiens
ccagctgggctgtaa

SEQ ID NO: 130864 - DNA, 15 bp, Homo sapiens
cagctgggctgtaag

SEQ ID NO: 130865 - DNA, 15 bp, Homo sapiens
agctgggctgtaagc

SEQ ID NO: 130866 - DNA, 15 bp, Homo sapiens
gctgggctgtaagca

SEQ ID NO: 130867 - DNA, 15 bp, Homo sapiens
ctgggctgtaagcag

SEQ ID NO: 130868 - DNA, 15 bp, Homo sapiens
tgggctgtaagcagg

SEQ ID NO: 130869 - DNA, 15 bp, Homo sapiens
gggctgtaagcaggt

SEQ ID NO: 130870 - DNA, 15 bp, Homo sapiens
ggctgtaagcaggtg

SEQ ID NO: 130871 - DNA, 15 bp, Homo sapiens
gctgtaagcaggtgg

SEQ ID NO: 130872 - DNA, 15 bp, Homo sapiens
ctgtaagcaggtggg

SEQ ID NO: 130873 - DNA, 15 bp, Homo sapiens
tgtaagcaggtgggg

SEQ ID NO: 130874 - DNA, 15 bp, Homo sapiens
gtaagcaggtggggg

SEQ ID NO: 130875 - DNA, 15 bp, Homo sapiens
taagcaggtgggggt

SEQ ID NO: 130876 - DNA, 15 bp, Homo sapiens
aagcaggtgggggtg

SEQ ID NO: 130877 - DNA, 15 bp, Homo sapiens
agcaggtgggggtgg

SEQ ID NO: 130878 - DNA, 15 bp, Homo sapiens
gcaggtgggggtggg

SEQ ID NO: 130879 - DNA, 15 bp, Homo sapiens
caggtgggggtgggg

SEQ ID NO: 130880 - DNA, 15 bp, Homo sapiens
aggtgggggtgggga

SEQ ID NO: 130881 - DNA, 15 bp, Homo sapiens
ggtgggggtggggag

SEQ ID NO: 130882 - DNA, 15 bp, Homo sapiens
gtgggggtggggagc

SEQ ID NO: 130883 - DNA, 15 bp, Homo sapiens
tgggggtggggagca

SEQ ID NO: 130884 - DNA, 15 bp, Homo sapiens
gggggtggggagcaa

SEQ ID NO: 130885 - DNA, 15 bp, Homo sapiens
ggggtggggagcaac

SEQ ID NO: 130886 - DNA, 15 bp, Homo sapiens
gggtggggagcaacg

SEQ ID NO: 130887 - DNA, 15 bp, Homo sapiens
ggtggggagcaacgc

SEQ ID NO: 130888 - DNA, 15 bp, Homo sapiens
gtggggagcaacgct

SEQ ID NO: 130889 - DNA, 15 bp, Homo sapiens
tggggagcaacgctg

SEQ ID NO: 130890 - DNA, 15 bp, Homo sapiens
ggggagcaacgctgc

SEQ ID NO: 130891 - DNA, 15 bp, Homo sapiens
gggagcaacgctgca

SEQ ID NO: 130892 - DNA, 15 bp, Homo sapiens
ggagcaacgctgcac

SEQ ID NO: 130893 - DNA, 15 bp, Homo sapiens
gagcaacgctgcact

SEQ ID NO: 130894 - DNA, 15 bp, Homo sapiens
agcaacgctgcactg

SEQ ID NO: 130895 - DNA, 15 bp, Homo sapiens
gcaacgctgcactgc

SEQ ID NO: 130896 - DNA, 15 bp, Homo sapiens
caacgctgcactgca

SEQ ID NO: 130897 - DNA, 15 bp, Homo sapiens
aacgctgcactgcaa

SEQ ID NO: 130898 - DNA, 15 bp, Homo sapiens
acgctgcactgcaat

SEQ ID NO: 130899 - DNA, 15 bp, Homo sapiens
cgctgcactgcaatg

SEQ ID NO: 130900 - DNA, 15 bp, Homo sapiens
gctgcactgcaatgt

SEQ ID NO: 130901 - DNA, 15 bp, Homo sapiens
ctgcactgcaatgtt

SEQ ID NO: 130902 - DNA, 15 bp, Homo sapiens
tgcactgcaatgttg

SEQ ID NO: 130903 - DNA, 15 bp, Homo sapiens
gcactgcaatgttga

SEQ ID NO: 130904 - DNA, 15 bp, Homo sapiens
cactgcaatgttgaa

SEQ ID NO: 130905 - DNA, 15 bp, Homo sapiens
actgcaatgttgaaa

SEQ ID NO: 130906 - DNA, 15 bp, Homo sapiens
ctgcaatgttgaaat

SEQ ID NO: 130907 - DNA, 15 bp, Homo sapiens
tgcaatgttgaaata

SEQ ID NO: 130908 - DNA, 15 bp, Homo sapiens
gcaatgttgaaatat

SEQ ID NO: 130909 - DNA, 15 bp, Homo sapiens
caatgttgaaatatt

SEQ ID NO: 130910 - DNA, 15 bp, Homo sapiens
aatgttgaaatatta

SEQ ID NO: 130911 - DNA, 15 bp, Homo sapiens
atgttgaaatattac

SEQ ID NO: 130912 - DNA, 15 bp, Homo sapiens
tgttgaaatattact

SEQ ID NO: 130913 - DNA, 15 bp, Homo sapiens
gttgaaatattactt

SEQ ID NO: 130914 - DNA, 15 bp, Homo sapiens
ttgaaatattacttg

SEQ ID NO: 130915 - DNA, 15 bp, Homo sapiens
tgaaatattacttga

SEQ ID NO: 130916 - DNA, 15 bp, Homo sapiens
gaaatattacttgaa

SEQ ID NO: 130917 - DNA, 15 bp, Homo sapiens
aaatattacttgaac

SEQ ID NO: 130918 - DNA, 15 bp, Homo sapiens
aatattacttgaact

SEQ ID NO: 130919 - DNA, 15 bp, Homo sapiens
atattacttgaacta

SEQ ID NO: 130920 - DNA, 15 bp, Homo sapiens
tattacttgaactaa

SEQ ID NO: 130921 - DNA, 15 bp, Homo sapiens
attacttgaactaaa

SEQ ID NO: 130922 - DNA, 15 bp, Homo sapiens
ttacttgaactaaat

SEQ ID NO: 130923 - DNA, 15 bp, Homo sapiens
tacttgaactaaatc

SEQ ID NO: 130924 - DNA, 15 bp, Homo sapiens
acttgaactaaatca

SEQ ID NO: 130925 - DNA, 15 bp, Homo sapiens
cttgaactaaatcaa

SEQ ID NO: 130926 - DNA, 15 bp, Homo sapiens
ttgaactaaatcaaa

SEQ ID NO: 130927 - DNA, 15 bp, Homo sapiens
tgaactaaatcaaat

SEQ ID NO: 130928 - DNA, 15 bp, Homo sapiens
gaactaaatcaaatc

SEQ ID NO: 130929 - DNA, 15 bp, Homo sapiens
aactaaatcaaatca

SEQ ID NO: 130930 - DNA, 15 bp, Homo sapiens
actaaatcaaatcaa

SEQ ID NO: 130931 - DNA, 15 bp, Homo sapiens
ctaaatcaaatcaaa

SEQ ID NO: 130932 - DNA, 15 bp, Homo sapiens
taaatcaaatcaaag

SEQ ID NO: 130933 - DNA, 15 bp, Homo sapiens
aaatcaaatcaaaga

SEQ ID NO: 130934 - DNA, 15 bp, Homo sapiens
aatcaaatcaaagat

SEQ ID NO: 130935 - DNA, 15 bp, Homo sapiens
atcaaatcaaagatc

SEQ ID NO: 130936 - DNA, 15 bp, Homo sapiens
tcaaatcaaagatca

SEQ ID NO: 130937 - DNA, 15 bp, Homo sapiens
caaatcaaagatcag

SEQ ID NO: 130938 - DNA, 15 bp, Homo sapiens
aaatcaaagatcagc

SEQ ID NO: 130939 - DNA, 15 bp, Homo sapiens
aatcaaagatcagct

SEQ ID NO: 130940 - DNA, 15 bp, Homo sapiens
atcaaagatcagctt

SEQ ID NO: 130941 - DNA, 15 bp, Homo sapiens
tcaaagatcagcttt

SEQ ID NO: 130942 - DNA, 15 bp, Homo sapiens
caaagatcagcttta

SEQ ID NO: 130943 - DNA, 15 bp, Homo sapiens
aaagatcagctttac

SEQ ID NO: 130944 - DNA, 15 bp, Homo sapiens
aagatcagctttact

SEQ ID NO: 130945 - DNA, 15 bp, Homo sapiens
agatcagctttactc

SEQ ID NO: 130946 - DNA, 15 bp, Homo sapiens
gatcagctttactca

SEQ ID NO: 130947 - DNA, 15 bp, Homo sapiens
atcagctttactcag

SEQ ID NO: 130948 - DNA, 15 bp, Homo sapiens
tcagctttactcaga

SEQ ID NO: 130949 - DNA, 15 bp, Homo sapiens
cagctttactcagac

SEQ ID NO: 130950 - DNA, 15 bp, Homo sapiens
agctttactcagaca

SEQ ID NO: 130951 - DNA, 15 bp, Homo sapiens
gctttactcagacaa

SEQ ID NO: 130952 - DNA, 15 bp, Homo sapiens
ctttactcagacaag

SEQ ID NO: 130953 - DNA, 15 bp, Homo sapiens
tttactcagacaaga

SEQ ID NO: 130954 - DNA, 15 bp, Homo sapiens
ttactcagacaagaa

SEQ ID NO: 130955 - DNA, 15 bp, Homo sapiens
tactcagacaagaat

SEQ ID NO: 130956 - DNA, 15 bp, Homo sapiens
actcagacaagaata

SEQ ID NO: 130957 - DNA, 15 bp, Homo sapiens
ctcagacaagaatag

SEQ ID NO: 130958 - DNA, 15 bp, Homo sapiens
tcagacaagaataga

SEQ ID NO: 130959 - DNA, 15 bp, Homo sapiens
cagacaagaatagaa

SEQ ID NO: 130960 - DNA, 15 bp, Homo sapiens
agacaagaatagaaa

SEQ ID NO: 130961 - DNA, 15 bp, Homo sapiens
gacaagaatagaaaa

SEQ ID NO: 130962 - DNA, 15 bp, Homo sapiens
acaagaatagaaaac

SEQ ID NO: 130963 - DNA, 15 bp, Homo sapiens
caagaatagaaaaca

SEQ ID NO: 130964 - DNA, 15 bp, Homo sapiens
aagaatagaaaacac

SEQ ID NO: 130965 - DNA, 15 bp, Homo sapiens
agaatagaaaacaca

SEQ ID NO: 130966 - DNA, 15 bp, Homo sapiens
gaatagaaaacacaa

SEQ ID NO: 130967 - DNA, 15 bp, Homo sapiens
aatagaaaacacaat

SEQ ID NO: 130968 - DNA, 15 bp, Homo sapiens
atagaaaacacaatt

SEQ ID NO: 130969 - DNA, 15 bp, Homo sapiens
tagaaaacacaattg

SEQ ID NO: 130970 - DNA, 15 bp, Homo sapiens
agaaaacacaattgc

SEQ ID NO: 130971 - DNA, 15 bp, Homo sapiens
gaaaacacaattgca

SEQ ID NO: 130972 - DNA, 15 bp, Homo sapiens
aaaacacaattgcat

SEQ ID NO: 130973 - DNA, 15 bp, Homo sapiens
aaacacaattgcatt

SEQ ID NO: 130974 - DNA, 15 bp, Homo sapiens
aacacaattgcattc

SEQ ID NO: 130975 - DNA, 15 bp, Homo sapiens
acacaattgcattcg

SEQ ID NO: 130976 - DNA, 15 bp, Homo sapiens
cacaattgcattcga

SEQ ID NO: 130977 - DNA, 15 bp, Homo sapiens
acaattgcattcgat

SEQ ID NO: 130978 - DNA, 15 bp, Homo sapiens
caattgcattcgatt

SEQ ID NO: 130979 - DNA, 15 bp, Homo sapiens
aattgcattcgatta

SEQ ID NO: 130980 - DNA, 15 bp, Homo sapiens
attgcattcgattac

SEQ ID NO: 130981 - DNA, 15 bp, Homo sapiens
ttgcattcgattaca

SEQ ID NO: 130982 - DNA, 15 bp, Homo sapiens
tgcattcgattacag

SEQ ID NO: 130983 - DNA, 15 bp, Homo sapiens
gcattcgattacaga

SEQ ID NO: 130984 - DNA, 15 bp, Homo sapiens
cattcgattacagaa

SEQ ID NO: 130985 - DNA, 15 bp, Homo sapiens
attcgattacagaat

SEQ ID NO: 130986 - DNA, 15 bp, Homo sapiens
ttcgattacagaata

SEQ ID NO: 130987 - DNA, 15 bp, Homo sapiens
tcgattacagaatag

SEQ ID NO: 130988 - DNA, 15 bp, Homo sapiens
cgattacagaatagt

SEQ ID NO: 130989 - DNA, 15 bp, Homo sapiens
gattacagaatagtg

SEQ ID NO: 130990 - DNA, 15 bp, Homo sapiens
attacagaatagtgt

SEQ ID NO: 130991 - DNA, 15 bp, Homo sapiens
ttacagaatagtgtg

SEQ ID NO: 130992 - DNA, 15 bp, Homo sapiens
tacagaatagtgtgt

SEQ ID NO: 130993 - DNA, 15 bp, Homo sapiens
acagaatagtgtgta

SEQ ID NO: 130994 - DNA, 15 bp, Homo sapiens
cagaatagtgtgtat

SEQ ID NO: 130995 - DNA, 15 bp, Homo sapiens
agaatagtgtgtatc

SEQ ID NO: 130996 - DNA, 15 bp, Homo sapiens
gaatagtgtgtatcc

SEQ ID NO: 130997 - DNA, 15 bp, Homo sapiens
aatagtgtgtatccc

SEQ ID NO: 130998 - DNA, 15 bp, Homo sapiens
atagtgtgtatcccc

SEQ ID NO: 130999 - DNA, 15 bp, Homo sapiens
tagtgtgtatcccca

SEQ ID NO: 131000 - DNA, 15 bp, Homo sapiens
agtgtgtatccccac

SEQ ID NO: 131001 - DNA, 15 bp, Homo sapiens
gtgtgtatccccaca

SEQ ID NO: 131002 - DNA, 15 bp, Homo sapiens
tgtgtatccccacaa

SEQ ID NO: 131003 - DNA, 15 bp, Homo sapiens
gtgtatccccacaaa

SEQ ID NO: 131004 - DNA, 15 bp, Homo sapiens
tgtatccccacaaat

SEQ ID NO: 131005 - DNA, 15 bp, Homo sapiens
gtatccccacaaata

SEQ ID NO: 131006 - DNA, 15 bp, Homo sapiens
tatccccacaaatat

SEQ ID NO: 131007 - DNA, 15 bp, Homo sapiens
atccccacaaatatc

SEQ ID NO: 131008 - DNA, 15 bp, Homo sapiens
tccccacaaatatca

SEQ ID NO: 131009 - DNA, 15 bp, Homo sapiens
ccccacaaatatcag

SEQ ID NO: 131010 - DNA, 15 bp, Homo sapiens
cccacaaatatcaga

SEQ ID NO: 131011 - DNA, 15 bp, Homo sapiens
ccacaaatatcagac

SEQ ID NO: 131012 - DNA, 15 bp, Homo sapiens
cacaaatatcagact

SEQ ID NO: 131013 - DNA, 15 bp, Homo sapiens
acaaatatcagactg

SEQ ID NO: 131014 - DNA, 15 bp, Homo sapiens
caaatatcagactgc

SEQ ID NO: 131015 - DNA, 15 bp, Homo sapiens
aaatatcagactgcc

SEQ ID NO: 131016 - DNA, 15 bp, Homo sapiens
aatatcagactgcct

SEQ ID NO: 131017 - DNA, 15 bp, Homo sapiens
atatcagactgcctt

SEQ ID NO: 131018 - DNA, 15 bp, Homo sapiens
tatcagactgccttt

SEQ ID NO: 131019 - DNA, 15 bp, Homo sapiens
atcagactgccttta

SEQ ID NO: 131020 - DNA, 15 bp, Homo sapiens
tcagactgcctttaa

SEQ ID NO: 131021 - DNA, 15 bp, Homo sapiens
cagactgcctttaaa

SEQ ID NO: 131022 - DNA, 15 bp, Homo sapiens
agactgcctttaaaa

SEQ ID NO: 131023 - DNA, 15 bp, Homo sapiens
gactgcctttaaaaa

SEQ ID NO: 131024 - DNA, 15 bp, Homo sapiens
actgcctttaaaaag

SEQ ID NO: 131025 - DNA, 15 bp, Homo sapiens
ctgcctttaaaaagt

SEQ ID NO: 131026 - DNA, 15 bp, Homo sapiens
tgcctttaaaaagtt

SEQ ID NO: 131027 - DNA, 15 bp, Homo sapiens
gcctttaaaaagttt

SEQ ID NO: 131028 - DNA, 15 bp, Homo sapiens
cctttaaaaagtttt

SEQ ID NO: 131029 - DNA, 15 bp, Homo sapiens
ctttaaaaagttttg

SEQ ID NO: 131030 - DNA, 15 bp, Homo sapiens
tttaaaaagttttga

SEQ ID NO: 131031 - DNA, 15 bp, Homo sapiens
ttaaaaagttttgaa

SEQ ID NO: 131032 - DNA, 15 bp, Homo sapiens
taaaaagttttgaat

SEQ ID NO: 131033 - DNA, 15 bp, Homo sapiens
aaaaagttttgaatt

SEQ ID NO: 131034 - DNA, 15 bp, Homo sapiens
aaaagttttgaattg

SEQ ID NO: 131035 - DNA, 15 bp, Homo sapiens
aaagttttgaattgt

SEQ ID NO: 131036 - DNA, 15 bp, Homo sapiens
aagttttgaattgtt

SEQ ID NO: 131037 - DNA, 15 bp, Homo sapiens
agttttgaattgtta

SEQ ID NO: 131038 - DNA, 15 bp, Homo sapiens
gttttgaattgttaa

SEQ ID NO: 131039 - DNA, 15 bp, Homo sapiens
ttttgaattgttaac

SEQ ID NO: 131040 - DNA, 15 bp, Homo sapiens
tttgaattgttaaca

SEQ ID NO: 131041 - DNA, 15 bp, Homo sapiens
ttgaattgttaacat

SEQ ID NO: 131042 - DNA, 15 bp, Homo sapiens
tgaattgttaacatc

SEQ ID NO: 131043 - DNA, 15 bp, Homo sapiens
gaattgttaacatca

SEQ ID NO: 131044 - DNA, 15 bp, Homo sapiens
aattgttaacatcaa

SEQ ID NO: 131045 - DNA, 15 bp, Homo sapiens
attgttaacatcaag

SEQ ID NO: 131046 - DNA, 15 bp, Homo sapiens
ttgttaacatcaaga

SEQ ID NO: 131047 - DNA, 15 bp, Homo sapiens
tgttaacatcaagaa

SEQ ID NO: 131048 - DNA, 15 bp, Homo sapiens
gttaacatcaagaac

SEQ ID NO: 131049 - DNA, 15 bp, Homo sapiens
ttaacatcaagaaca

SEQ ID NO: 131050 - DNA, 15 bp, Homo sapiens
taacatcaagaacag

SEQ ID NO: 131051 - DNA, 15 bp, Homo sapiens
aacatcaagaacagt

SEQ ID NO: 131052 - DNA, 15 bp, Homo sapiens
acatcaagaacagtg

SEQ ID NO: 131053 - DNA, 15 bp, Homo sapiens
catcaagaacagtgt

SEQ ID NO: 131054 - DNA, 15 bp, Homo sapiens
atcaagaacagtgtt

SEQ ID NO: 131055 - DNA, 15 bp, Homo sapiens
tcaagaacagtgttg

SEQ ID NO: 131056 - DNA, 15 bp, Homo sapiens
caagaacagtgttgc

SEQ ID NO: 131057 - DNA, 15 bp, Homo sapiens
aagaacagtgttgcg

SEQ ID NO: 131058 - DNA, 15 bp, Homo sapiens
agaacagtgttgcgt

SEQ ID NO: 131059 - DNA, 15 bp, Homo sapiens
gaacagtgttgcgtg

SEQ ID NO: 131060 - DNA, 15 bp, Homo sapiens
aacagtgttgcgtgt

SEQ ID NO: 131061 - DNA, 15 bp, Homo sapiens
acagtgttgcgtgtc

SEQ ID NO: 131062 - DNA, 15 bp, Homo sapiens
cagtgttgcgtgtct

SEQ ID NO: 131063 - DNA, 15 bp, Homo sapiens
agtgttgcgtgtctc

SEQ ID NO: 131064 - DNA, 15 bp, Homo sapiens
gtgttgcgtgtctcc

SEQ ID NO: 131065 - DNA, 15 bp, Homo sapiens
tgttgcgtgtctcct

SEQ ID NO: 131066 - DNA, 15 bp, Homo sapiens
gttgcgtgtctcctg

SEQ ID NO: 131067 - DNA, 15 bp, Homo sapiens
ttgcgtgtctcctgc

SEQ ID NO: 131068 - DNA, 15 bp, Homo sapiens
tgcgtgtctcctgct

SEQ ID NO: 131069 - DNA, 15 bp, Homo sapiens
gcgtgtctcctgctt

SEQ ID NO: 131070 - DNA, 15 bp, Homo sapiens
cgtgtctcctgcttt

SEQ ID NO: 131071 - DNA, 15 bp, Homo sapiens
gtgtctcctgctttt

SEQ ID NO: 131072 - DNA, 15 bp, Homo sapiens
tgtctcctgcttttc

SEQ ID NO: 131073 - DNA, 15 bp, Homo sapiens
gtctcctgcttttcc

SEQ ID NO: 131074 - DNA, 15 bp, Homo sapiens
tctcctgcttttcca

SEQ ID NO: 131075 - DNA, 15 bp, Homo sapiens
ctcctgcttttccag

SEQ ID NO: 131076 - DNA, 15 bp, Homo sapiens
tcctgcttttccagc

SEQ ID NO: 131077 - DNA, 15 bp, Homo sapiens
cctgcttttccagca

SEQ ID NO: 131078 - DNA, 15 bp, Homo sapiens
ctgcttttccagcat

SEQ ID NO: 131079 - DNA, 15 bp, Homo sapiens
tgcttttccagcata

SEQ ID NO: 131080 - DNA, 15 bp, Homo sapiens
gcttttccagcataa

SEQ ID NO: 131081 - DNA, 15 bp, Homo sapiens
cttttccagcataag

SEQ ID NO: 131082 - DNA, 15 bp, Homo sapiens
ttttccagcataagg

SEQ ID NO: 131083 - DNA, 15 bp, Homo sapiens
tttccagcataaggt

SEQ ID NO: 131084 - DNA, 15 bp, Homo sapiens
ttccagcataaggtt

SEQ ID NO: 131085 - DNA, 15 bp, Homo sapiens
tccagcataaggttt

SEQ ID NO: 131086 - DNA, 15 bp, Homo sapiens
ccagcataaggttta

SEQ ID NO: 131087 - DNA, 15 bp, Homo sapiens
cagcataaggtttat

SEQ ID NO: 131088 - DNA, 15 bp, Homo sapiens
agcataaggtttatt

SEQ ID NO: 131089 - DNA, 15 bp, Homo sapiens
gcataaggtttattt

SEQ ID NO: 131090 - DNA, 15 bp, Homo sapiens
cataaggtttattta

SEQ ID NO: 131091 - DNA, 15 bp, Homo sapiens
ataaggtttatttat

SEQ ID NO: 131092 - DNA, 15 bp, Homo sapiens
taaggtttatttatt

SEQ ID NO: 131093 - DNA, 15 bp, Homo sapiens
aaggtttatttattc

SEQ ID NO: 131094 - DNA, 15 bp, Homo sapiens
aggtttatttattct

SEQ ID NO: 131095 - DNA, 15 bp, Homo sapiens
ggtttatttattctg

SEQ ID NO: 131096 - DNA, 15 bp, Homo sapiens
gtttatttattctgt

SEQ ID NO: 131097 - DNA, 15 bp, Homo sapiens
tttatttattctgtg

SEQ ID NO: 131098 - DNA, 15 bp, Homo sapiens
ttatttattctgtgg

SEQ ID NO: 131099 - DNA, 15 bp, Homo sapiens
tatttattctgtggg

SEQ ID NO: 131100 - DNA, 15 bp, Homo sapiens
atttattctgtgggt

SEQ ID NO: 131101 - DNA, 15 bp, Homo sapiens
tttattctgtgggtg

SEQ ID NO: 131102 - DNA, 15 bp, Homo sapiens
ttattctgtgggtgg

SEQ ID NO: 131103 - DNA, 15 bp, Homo sapiens
tattctgtgggtggc

SEQ ID NO: 131104 - DNA, 15 bp, Homo sapiens
attctgtgggtggca

SEQ ID NO: 131105 - DNA, 15 bp, Homo sapiens
ttctgtgggtggcaa

SEQ ID NO: 131106 - DNA, 15 bp, Homo sapiens
tctgtgggtggcaaa

SEQ ID NO: 131107 - DNA, 15 bp, Homo sapiens
ctgtgggtggcaaag

SEQ ID NO: 131108 - DNA, 15 bp, Homo sapiens
tgtgggtggcaaaga

SEQ ID NO: 131109 - DNA, 15 bp, Homo sapiens
gtgggtggcaaagag

SEQ ID NO: 131110 - DNA, 15 bp, Homo sapiens
tgggtggcaaagagc

SEQ ID NO: 131111 - DNA, 15 bp, Homo sapiens
gggtggcaaagagca

SEQ ID NO: 131112 - DNA, 15 bp, Homo sapiens
ggtggcaaagagcaa

SEQ ID NO: 131113 - DNA, 15 bp, Homo sapiens
gtggcaaagagcaat

SEQ ID NO: 131114 - DNA, 15 bp, Homo sapiens
tggcaaagagcaatt

SEQ ID NO: 131115 - DNA, 15 bp, Homo sapiens
ggcaaagagcaattt

SEQ ID NO: 131116 - DNA, 15 bp, Homo sapiens
gcaaagagcaatttg

SEQ ID NO: 131117 - DNA, 15 bp, Homo sapiens
caaagagcaatttgg

SEQ ID NO: 131118 - DNA, 15 bp, Homo sapiens
aaagagcaatttggg

SEQ ID NO: 131119 - DNA, 15 bp, Homo sapiens
aagagcaatttggga

SEQ ID NO: 131120 - DNA, 15 bp, Homo sapiens
agagcaatttgggag

SEQ ID NO: 131121 - DNA, 15 bp, Homo sapiens
gagcaatttgggagt

SEQ ID NO: 131122 - DNA, 15 bp, Homo sapiens
agcaatttgggagtc

SEQ ID NO: 131123 - DNA, 15 bp, Homo sapiens
gcaatttgggagtcc

SEQ ID NO: 131124 - DNA, 15 bp, Homo sapiens
caatttgggagtcca

SEQ ID NO: 131125 - DNA, 15 bp, Homo sapiens
aatttgggagtccag

SEQ ID NO: 131126 - DNA, 15 bp, Homo sapiens
atttgggagtccagt

SEQ ID NO: 131127 - DNA, 15 bp, Homo sapiens
tttgggagtccagtt

SEQ ID NO: 131128 - DNA, 15 bp, Homo sapiens
ttgggagtccagttt

SEQ ID NO: 131129 - DNA, 15 bp, Homo sapiens
tgggagtccagtttg

SEQ ID NO: 131130 - DNA, 15 bp, Homo sapiens
gggagtccagtttgt

SEQ ID NO: 131131 - DNA, 15 bp, Homo sapiens
ggagtccagtttgtt

SEQ ID NO: 131132 - DNA, 15 bp, Homo sapiens
gagtccagtttgttt

SEQ ID NO: 131133 - DNA, 15 bp, Homo sapiens
agtccagtttgtttc

SEQ ID NO: 131134 - DNA, 15 bp, Homo sapiens
gtccagtttgtttct

SEQ ID NO: 131135 - DNA, 15 bp, Homo sapiens
tccagtttgtttctc

SEQ ID NO: 131136 - DNA, 15 bp, Homo sapiens
ccagtttgtttctca

SEQ ID NO: 131137 - DNA, 15 bp, Homo sapiens
cagtttgtttctcat

SEQ ID NO: 131138 - DNA, 15 bp, Homo sapiens
agtttgtttctcatt

SEQ ID NO: 131139 - DNA, 15 bp, Homo sapiens
gtttgtttctcattg

SEQ ID NO: 131140 - DNA, 15 bp, Homo sapiens
tttgtttctcattga

SEQ ID NO: 131141 - DNA, 15 bp, Homo sapiens
ttgtttctcattgaa

SEQ ID NO: 131142 - DNA, 15 bp, Homo sapiens
tgtttctcattgaaa

SEQ ID NO: 131143 - DNA, 15 bp, Homo sapiens
gtttctcattgaaag

SEQ ID NO: 131144 - DNA, 15 bp, Homo sapiens
tttctcattgaaagc

SEQ ID NO: 131145 - DNA, 15 bp, Homo sapiens
ttctcattgaaagct

SEQ ID NO: 131146 - DNA, 15 bp, Homo sapiens
tctcattgaaagctt

SEQ ID NO: 131147 - DNA, 15 bp, Homo sapiens
ctcattgaaagcttt

SEQ ID NO: 131148 - DNA, 15 bp, Homo sapiens
tcattgaaagctttc

SEQ ID NO: 131149 - DNA, 15 bp, Homo sapiens
cattgaaagctttcc

SEQ ID NO: 131150 - DNA, 15 bp, Homo sapiens
attgaaagctttccc

SEQ ID NO: 131151 - DNA, 15 bp, Homo sapiens
ttgaaagctttccca

SEQ ID NO: 131152 - DNA, 15 bp, Homo sapiens
tgaaagctttcccat

SEQ ID NO: 131153 - DNA, 15 bp, Homo sapiens
gaaagctttcccatt

SEQ ID NO: 131154 - DNA, 15 bp, Homo sapiens
aaagctttcccattt

SEQ ID NO: 131155 - DNA, 15 bp, Homo sapiens
aagctttcccatttc

SEQ ID NO: 131156 - DNA, 15 bp, Homo sapiens
agctttcccatttct

SEQ ID NO: 131157 - DNA, 15 bp, Homo sapiens
gctttcccatttctg

SEQ ID NO: 131158 - DNA, 15 bp, Homo sapiens
ctttcccatttctgg

SEQ ID NO: 131159 - DNA, 15 bp, Homo sapiens
tttcccatttctggt

SEQ ID NO: 131160 - DNA, 15 bp, Homo sapiens
ttcccatttctggtc

SEQ ID NO: 131161 - DNA, 15 bp, Homo sapiens
tcccatttctggtcc

SEQ ID NO: 131162 - DNA, 15 bp, Homo sapiens
cccatttctggtcct

SEQ ID NO: 131163 - DNA, 15 bp, Homo sapiens
ccatttctggtcctc

SEQ ID NO: 131164 - DNA, 15 bp, Homo sapiens
catttctggtcctct

SEQ ID NO: 131165 - DNA, 15 bp, Homo sapiens
atttctggtcctctt

SEQ ID NO: 131166 - DNA, 15 bp, Homo sapiens
tttctggtcctcttg

SEQ ID NO: 131167 - DNA, 15 bp, Homo sapiens
ttctggtcctcttgt

SEQ ID NO: 131168 - DNA, 15 bp, Homo sapiens
tctggtcctcttgtc

SEQ ID NO: 131169 - DNA, 15 bp, Homo sapiens
ctggtcctcttgtca

SEQ ID NO: 131170 - DNA, 15 bp, Homo sapiens
tggtcctcttgtcac

SEQ ID NO: 131171 - DNA, 15 bp, Homo sapiens
ggtcctcttgtcact

SEQ ID NO: 131172 - DNA, 15 bp, Homo sapiens
gtcctcttgtcactg

SEQ ID NO: 131173 - DNA, 15 bp, Homo sapiens
tcctcttgtcactgt

SEQ ID NO: 131174 - DNA, 15 bp, Homo sapiens
cctcttgtcactgtt

SEQ ID NO: 131175 - DNA, 15 bp, Homo sapiens
ctcttgtcactgttg

SEQ ID NO: 131176 - DNA, 15 bp, Homo sapiens
tcttgtcactgttgc

SEQ ID NO: 131177 - DNA, 15 bp, Homo sapiens
cttgtcactgttgca

SEQ ID NO: 131178 - DNA, 15 bp, Homo sapiens
ttgtcactgttgcat

SEQ ID NO: 131179 - DNA, 15 bp, Homo sapiens
tgtcactgttgcatt

SEQ ID NO: 131180 - DNA, 15 bp, Homo sapiens
gtcactgttgcattg

SEQ ID NO: 131181 - DNA, 15 bp, Homo sapiens
tcactgttgcattga

SEQ ID NO: 131182 - DNA, 15 bp, Homo sapiens
cactgttgcattgag

SEQ ID NO: 131183 - DNA, 15 bp, Homo sapiens
actgttgcattgagg

SEQ ID NO: 131184 - DNA, 15 bp, Homo sapiens
ctgttgcattgaggc

SEQ ID NO: 131185 - DNA, 15 bp, Homo sapiens
tgttgcattgaggca

SEQ ID NO: 131186 - DNA, 15 bp, Homo sapiens
gttgcattgaggcac

SEQ ID NO: 131187 - DNA, 15 bp, Homo sapiens
ttgcattgaggcacc

SEQ ID NO: 131188 - DNA, 15 bp, Homo sapiens
tgcattgaggcacca

SEQ ID NO: 131189 - DNA, 15 bp, Homo sapiens
gcattgaggcaccaa

SEQ ID NO: 131190 - DNA, 15 bp, Homo sapiens
cattgaggcaccaaa

SEQ ID NO: 131191 - DNA, 15 bp, Homo sapiens
attgaggcaccaaaa

SEQ ID NO: 131192 - DNA, 15 bp, Homo sapiens
ttgaggcaccaaaag

SEQ ID NO: 131193 - DNA, 15 bp, Homo sapiens
tgaggcaccaaaagg

SEQ ID NO: 131194 - DNA, 15 bp, Homo sapiens
gaggcaccaaaaggc

SEQ ID NO: 131195 - DNA, 15 bp, Homo sapiens
aggcaccaaaaggca

SEQ ID NO: 131196 - DNA, 15 bp, Homo sapiens
ggcaccaaaaggcaa

SEQ ID NO: 131197 - DNA, 15 bp, Homo sapiens
gcaccaaaaggcaat

SEQ ID NO: 131198 - DNA, 15 bp, Homo sapiens
caccaaaaggcaatc

SEQ ID NO: 131199 - DNA, 15 bp, Homo sapiens
accaaaaggcaatct

SEQ ID NO: 131200 - DNA, 15 bp, Homo sapiens
ccaaaaggcaatctc

SEQ ID NO: 131201 - DNA, 15 bp, Homo sapiens
caaaaggcaatctca

SEQ ID NO: 131202 - DNA, 15 bp, Homo sapiens
aaaaggcaatctcag

SEQ ID NO: 131203 - DNA, 15 bp, Homo sapiens
aaaggcaatctcagt

SEQ ID NO: 131204 - DNA, 15 bp, Homo sapiens
aaggcaatctcagtg

SEQ ID NO: 131205 - DNA, 15 bp, Homo sapiens
aggcaatctcagtgc

SEQ ID NO: 131206 - DNA, 15 bp, Homo sapiens
ggcaatctcagtgcg

SEQ ID NO: 131207 - DNA, 15 bp, Homo sapiens
gcaatctcagtgcga

SEQ ID NO: 131208 - DNA, 15 bp, Homo sapiens
caatctcagtgcgac

SEQ ID NO: 131209 - DNA, 15 bp, Homo sapiens
aatctcagtgcgaca

SEQ ID NO: 131210 - DNA, 15 bp, Homo sapiens
atctcagtgcgacac

SEQ ID NO: 131211 - DNA, 15 bp, Homo sapiens
tctcagtgcgacact

SEQ ID NO: 131212 - DNA, 15 bp, Homo sapiens
ctcagtgcgacacta

SEQ ID NO: 131213 - DNA, 15 bp, Homo sapiens
tcagtgcgacactat

SEQ ID NO: 131214 - DNA, 15 bp, Homo sapiens
cagtgcgacactatt

SEQ ID NO: 131215 - DNA, 15 bp, Homo sapiens
agtgcgacactattc

SEQ ID NO: 131216 - DNA, 15 bp, Homo sapiens
gtgcgacactattca

SEQ ID NO: 131217 - DNA, 15 bp, Homo sapiens
tgcgacactattcaa

SEQ ID NO: 131218 - DNA, 15 bp, Homo sapiens
gcgacactattcaac

SEQ ID NO: 131219 - DNA, 15 bp, Homo sapiens
cgacactattcaaca

SEQ ID NO: 131220 - DNA, 15 bp, Homo sapiens
gacactattcaacag

SEQ ID NO: 131221 - DNA, 15 bp, Homo sapiens
acactattcaacaga

SEQ ID NO: 131222 - DNA, 15 bp, Homo sapiens
cactattcaacagac

SEQ ID NO: 131223 - DNA, 15 bp, Homo sapiens
actattcaacagact

SEQ ID NO: 131224 - DNA, 15 bp, Homo sapiens
ctattcaacagacta

SEQ ID NO: 131225 - DNA, 15 bp, Homo sapiens
tattcaacagactaa

SEQ ID NO: 131226 - DNA, 15 bp, Homo sapiens
attcaacagactaag

SEQ ID NO: 131227 - DNA, 15 bp, Homo sapiens
ttcaacagactaagt

SEQ ID NO: 131228 - DNA, 15 bp, Homo sapiens
tcaacagactaagtt

SEQ ID NO: 131229 - DNA, 15 bp, Homo sapiens
caacagactaagttg

SEQ ID NO: 131230 - DNA, 15 bp, Homo sapiens
aacagactaagttgc

SEQ ID NO: 131231 - DNA, 15 bp, Homo sapiens
acagactaagttgca

SEQ ID NO: 131232 - DNA, 15 bp, Homo sapiens
cagactaagttgcac

SEQ ID NO: 131233 - DNA, 15 bp, Homo sapiens
agactaagttgcacc

SEQ ID NO: 131234 - DNA, 15 bp, Homo sapiens
gactaagttgcaccg

SEQ ID NO: 131235 - DNA, 15 bp, Homo sapiens
actaagttgcaccgg

SEQ ID NO: 131236 - DNA, 15 bp, Homo sapiens
ctaagttgcaccgga

SEQ ID NO: 131237 - DNA, 15 bp, Homo sapiens
taagttgcaccggat

SEQ ID NO: 131238 - DNA, 15 bp, Homo sapiens
aagttgcaccggata

SEQ ID NO: 131239 - DNA, 15 bp, Homo sapiens
agttgcaccggataa

SEQ ID NO: 131240 - DNA, 15 bp, Homo sapiens
gttgcaccggataat

SEQ ID NO: 131241 - DNA, 15 bp, Homo sapiens
ttgcaccggataatg

SEQ ID NO: 131242 - DNA, 15 bp, Homo sapiens
tgcaccggataatga

SEQ ID NO: 131243 - DNA, 15 bp, Homo sapiens
gcaccggataatgat

SEQ ID NO: 131244 - DNA, 15 bp, Homo sapiens
caccggataatgata

SEQ ID NO: 131245 - DNA, 15 bp, Homo sapiens
accggataatgatac

SEQ ID NO: 131246 - DNA, 15 bp, Homo sapiens
ccggataatgatacc

SEQ ID NO: 131247 - DNA, 15 bp, Homo sapiens
cggataatgatacca

SEQ ID NO: 131248 - DNA, 15 bp, Homo sapiens
ggataatgataccat

SEQ ID NO: 131249 - DNA, 15 bp, Homo sapiens
gataatgataccatt

SEQ ID NO: 131250 - DNA, 15 bp, Homo sapiens
ataatgataccattt

SEQ ID NO: 131251 - DNA, 15 bp, Homo sapiens
taatgataccatttt

SEQ ID NO: 131252 - DNA, 15 bp, Homo sapiens
aatgataccatttta

SEQ ID NO: 131253 - DNA, 15 bp, Homo sapiens
atgataccattttac

SEQ ID NO: 131254 - DNA, 15 bp, Homo sapiens
tgataccattttaca

SEQ ID NO: 131255 - DNA, 15 bp, Homo sapiens
gataccattttacat

SEQ ID NO: 131256 - DNA, 15 bp, Homo sapiens
ataccattttacatt

SEQ ID NO: 131257 - DNA, 15 bp, Homo sapiens
taccattttacattt

SEQ ID NO: 131258 - DNA, 15 bp, Homo sapiens
accattttacatttt

SEQ ID NO: 131259 - DNA, 15 bp, Homo sapiens
ccattttacattttt

SEQ ID NO: 131260 - DNA, 15 bp, Homo sapiens
cattttacatttttc

SEQ ID NO: 131261 - DNA, 15 bp, Homo sapiens
attttacatttttca

SEQ ID NO: 131262 - DNA, 15 bp, Homo sapiens
ttttacatttttcat

SEQ ID NO: 131263 - DNA, 15 bp, Homo sapiens
tttacatttttcata

SEQ ID NO: 131264 - DNA, 15 bp, Homo sapiens
ttacatttttcatat

SEQ ID NO: 131265 - DNA, 15 bp, Homo sapiens
tacatttttcatata

SEQ ID NO: 131266 - DNA, 15 bp, Homo sapiens
acatttttcatatat

SEQ ID NO: 131267 - DNA, 15 bp, Homo sapiens
catttttcatatatt

SEQ ID NO: 131268 - DNA, 15 bp, Homo sapiens
atttttcatatatta

SEQ ID NO: 131269 - DNA, 15 bp, Homo sapiens
tttttcatatattat

SEQ ID NO: 131270 - DNA, 15 bp, Homo sapiens
ttttcatatattatt

SEQ ID NO: 131271 - DNA, 15 bp, Homo sapiens
tttcatatattatta

SEQ ID NO: 131272 - DNA, 15 bp, Homo sapiens
ttcatatattattac

SEQ ID NO: 131273 - DNA, 15 bp, Homo sapiens
tcatatattattaca

SEQ ID NO: 131274 - DNA, 15 bp, Homo sapiens
catatattattacat

SEQ ID NO: 131275 - DNA, 15 bp, Homo sapiens
atatattattacatt

SEQ ID NO: 131276 - DNA, 15 bp, Homo sapiens
tatattattacattg

SEQ ID NO: 131277 - DNA, 15 bp, Homo sapiens
atattattacattga

SEQ ID NO: 131278 - DNA, 15 bp, Homo sapiens
tattattacattgaa

SEQ ID NO: 131279 - DNA, 15 bp, Homo sapiens
attattacattgaag

SEQ ID NO: 131280 - DNA, 15 bp, Homo sapiens
ttattacattgaagg

SEQ ID NO: 131281 - DNA, 15 bp, Homo sapiens
tattacattgaaggc

SEQ ID NO: 131282 - DNA, 15 bp, Homo sapiens
attacattgaaggct

SEQ ID NO: 131283 - DNA, 15 bp, Homo sapiens
ttacattgaaggctt

SEQ ID NO: 131284 - DNA, 15 bp, Homo sapiens
tacattgaaggcttc

SEQ ID NO: 131285 - DNA, 15 bp, Homo sapiens
acattgaaggcttca

SEQ ID NO: 131286 - DNA, 15 bp, Homo sapiens
cattgaaggcttcaa

SEQ ID NO: 131287 - DNA, 15 bp, Homo sapiens
attgaaggcttcaaa

SEQ ID NO: 131288 - DNA, 15 bp, Homo sapiens
ttgaaggcttcaaac

SEQ ID NO: 131289 - DNA, 15 bp, Homo sapiens
tgaaggcttcaaaca

SEQ ID NO: 131290 - DNA, 15 bp, Homo sapiens
gaaggcttcaaacag

SEQ ID NO: 131291 - DNA, 15 bp, Homo sapiens
aaggcttcaaacagc

SEQ ID NO: 131292 - DNA, 15 bp, Homo sapiens
aggcttcaaacagca

SEQ ID NO: 131293 - DNA, 15 bp, Homo sapiens
ggcttcaaacagcac

SEQ ID NO: 131294 - DNA, 15 bp, Homo sapiens
gcttcaaacagcact

SEQ ID NO: 131295 - DNA, 15 bp, Homo sapiens
cttcaaacagcacta

SEQ ID NO: 131296 - DNA, 15 bp, Homo sapiens
ttcaaacagcactag

SEQ ID NO: 131297 - DNA, 15 bp, Homo sapiens
tcaaacagcactagc

SEQ ID NO: 131298 - DNA, 15 bp, Homo sapiens
caaacagcactagca

SEQ ID NO: 131299 - DNA, 15 bp, Homo sapiens
aaacagcactagcag

SEQ ID NO: 131300 - DNA, 15 bp, Homo sapiens
aacagcactagcagg

SEQ ID NO: 131301 - DNA, 15 bp, Homo sapiens
acagcactagcaggg

SEQ ID NO: 131302 - DNA, 15 bp, Homo sapiens
cagcactagcagggg

SEQ ID NO: 131303 - DNA, 15 bp, Homo sapiens
agcactagcaggggc

SEQ ID NO: 131304 - DNA, 15 bp, Homo sapiens
gcactagcaggggca

SEQ ID NO: 131305 - DNA, 15 bp, Homo sapiens
cactagcaggggcaa

SEQ ID NO: 131306 - DNA, 15 bp, Homo sapiens
actagcaggggcaaa

SEQ ID NO: 131307 - DNA, 15 bp, Homo sapiens
ctagcaggggcaaat

SEQ ID NO: 131308 - DNA, 15 bp, Homo sapiens
tagcaggggcaaatt

SEQ ID NO: 131309 - DNA, 15 bp, Homo sapiens
agcaggggcaaattg

SEQ ID NO: 131310 - DNA, 15 bp, Homo sapiens
gcaggggcaaattgg

SEQ ID NO: 131311 - DNA, 15 bp, Homo sapiens
caggggcaaattggt

SEQ ID NO: 131312 - DNA, 15 bp, Homo sapiens
aggggcaaattggta

SEQ ID NO: 131313 - DNA, 15 bp, Homo sapiens
ggggcaaattggtat

SEQ ID NO: 131314 - DNA, 15 bp, Homo sapiens
gggcaaattggtatt

SEQ ID NO: 131315 - DNA, 15 bp, Homo sapiens
ggcaaattggtatta

SEQ ID NO: 131316 - DNA, 15 bp, Homo sapiens
gcaaattggtattat

SEQ ID NO: 131317 - DNA, 15 bp, Homo sapiens
caaattggtattatt

SEQ ID NO: 131318 - DNA, 15 bp, Homo sapiens
aaattggtattatta

SEQ ID NO: 131319 - DNA, 15 bp, Homo sapiens
aattggtattattat

SEQ ID NO: 131320 - DNA, 15 bp, Homo sapiens
attggtattattatc

SEQ ID NO: 131321 - DNA, 15 bp, Homo sapiens
ttggtattattatct

SEQ ID NO: 131322 - DNA, 15 bp, Homo sapiens
tggtattattatctc

SEQ ID NO: 131323 - DNA, 15 bp, Homo sapiens
ggtattattatctcc

SEQ ID NO: 131324 - DNA, 15 bp, Homo sapiens
gtattattatctcca

SEQ ID NO: 131325 - DNA, 15 bp, Homo sapiens
tattattatctccat

SEQ ID NO: 131326 - DNA, 15 bp, Homo sapiens
attattatctccatt

SEQ ID NO: 131327 - DNA, 15 bp, Homo sapiens
ttattatctccattt

SEQ ID NO: 131328 - DNA, 15 bp, Homo sapiens
tattatctccatttc

SEQ ID NO: 131329 - DNA, 15 bp, Homo sapiens
attatctccatttca

SEQ ID NO: 131330 - DNA, 15 bp, Homo sapiens
ttatctccatttcat

SEQ ID NO: 131331 - DNA, 15 bp, Homo sapiens
tatctccatttcatt

SEQ ID NO: 131332 - DNA, 15 bp, Homo sapiens
atctccatttcattg

SEQ ID NO: 131333 - DNA, 15 bp, Homo sapiens
tctccatttcattga

SEQ ID NO: 131334 - DNA, 15 bp, Homo sapiens
ctccatttcattgat

SEQ ID NO: 131335 - DNA, 15 bp, Homo sapiens
tccatttcattgatg

SEQ ID NO: 131336 - DNA, 15 bp, Homo sapiens
ccatttcattgatga

SEQ ID NO: 131337 - DNA, 15 bp, Homo sapiens
catttcattgatgag

SEQ ID NO: 131338 - DNA, 15 bp, Homo sapiens
atttcattgatgagg

SEQ ID NO: 131339 - DNA, 15 bp, Homo sapiens
tttcattgatgagga

SEQ ID NO: 131340 - DNA, 15 bp, Homo sapiens
ttcattgatgaggaa

SEQ ID NO: 131341 - DNA, 15 bp, Homo sapiens
tcattgatgaggaaa

SEQ ID NO: 131342 - DNA, 15 bp, Homo sapiens
cattgatgaggaaac

SEQ ID NO: 131343 - DNA, 15 bp, Homo sapiens
attgatgaggaaacc

SEQ ID NO: 131344 - DNA, 15 bp, Homo sapiens
ttgatgaggaaaccg

SEQ ID NO: 131345 - DNA, 15 bp, Homo sapiens
tgatgaggaaaccga

SEQ ID NO: 131346 - DNA, 15 bp, Homo sapiens
gatgaggaaaccgag

SEQ ID NO: 131347 - DNA, 15 bp, Homo sapiens
atgaggaaaccgagg

SEQ ID NO: 131348 - DNA, 15 bp, Homo sapiens
tgaggaaaccgaggc

SEQ ID NO: 131349 - DNA, 15 bp, Homo sapiens
gaggaaaccgaggct

SEQ ID NO: 131350 - DNA, 15 bp, Homo sapiens
aggaaaccgaggctc

SEQ ID NO: 131351 - DNA, 15 bp, Homo sapiens
ggaaaccgaggctcg

SEQ ID NO: 131352 - DNA, 15 bp, Homo sapiens
gaaaccgaggctcga

SEQ ID NO: 131353 - DNA, 15 bp, Homo sapiens
aaaccgaggctcgaa

SEQ ID NO: 131354 - DNA, 15 bp, Homo sapiens
aaccgaggctcgaaa

SEQ ID NO: 131355 - DNA, 15 bp, Homo sapiens
accgaggctcgaaag

SEQ ID NO: 131356 - DNA, 15 bp, Homo sapiens
ccgaggctcgaaagg

SEQ ID NO: 131357 - DNA, 15 bp, Homo sapiens
cgaggctcgaaaggg

SEQ ID NO: 131358 - DNA, 15 bp, Homo sapiens
gaggctcgaaagggt

SEQ ID NO: 131359 - DNA, 15 bp, Homo sapiens
aggctcgaaagggta

SEQ ID NO: 131360 - DNA, 15 bp, Homo sapiens
ggctcgaaagggtaa

SEQ ID NO: 131361 - DNA, 15 bp, Homo sapiens
gctcgaaagggtaat

SEQ ID NO: 131362 - DNA, 15 bp, Homo sapiens
ctcgaaagggtaatg

SEQ ID NO: 131363 - DNA, 15 bp, Homo sapiens
tcgaaagggtaatgt

SEQ ID NO: 131364 - DNA, 15 bp, Homo sapiens
cgaaagggtaatgtc

SEQ ID NO: 131365 - DNA, 15 bp, Homo sapiens
gaaagggtaatgtct

SEQ ID NO: 131366 - DNA, 15 bp, Homo sapiens
aaagggtaatgtctg

SEQ ID NO: 131367 - DNA, 15 bp, Homo sapiens
aagggtaatgtctgt

SEQ ID NO: 131368 - DNA, 15 bp, Homo sapiens
agggtaatgtctgtt

SEQ ID NO: 131369 - DNA, 15 bp, Homo sapiens
gggtaatgtctgttg

SEQ ID NO: 131370 - DNA, 15 bp, Homo sapiens
ggtaatgtctgttgt

SEQ ID NO: 131371 - DNA, 15 bp, Homo sapiens
gtaatgtctgttgtc

SEQ ID NO: 131372 - DNA, 15 bp, Homo sapiens
taatgtctgttgtcc

SEQ ID NO: 131373 - DNA, 15 bp, Homo sapiens
aatgtctgttgtcca

SEQ ID NO: 131374 - DNA, 15 bp, Homo sapiens
atgtctgttgtccaa

SEQ ID NO: 131375 - DNA, 15 bp, Homo sapiens
tgtctgttgtccaag

SEQ ID NO: 131376 - DNA, 15 bp, Homo sapiens
gtctgttgtccaaga

SEQ ID NO: 131377 - DNA, 15 bp, Homo sapiens
tctgttgtccaagat

SEQ ID NO: 131378 - DNA, 15 bp, Homo sapiens
ctgttgtccaagatt

SEQ ID NO: 131379 - DNA, 15 bp, Homo sapiens
tgttgtccaagatta

SEQ ID NO: 131380 - DNA, 15 bp, Homo sapiens
gttgtccaagattaa

SEQ ID NO: 131381 - DNA, 15 bp, Homo sapiens
ttgtccaagattaaa

SEQ ID NO: 131382 - DNA, 15 bp, Homo sapiens
tgtccaagattaaag

SEQ ID NO: 131383 - DNA, 15 bp, Homo sapiens
gtccaagattaaaga

SEQ ID NO: 131384 - DNA, 15 bp, Homo sapiens
tccaagattaaagag

SEQ ID NO: 131385 - DNA, 15 bp, Homo sapiens
ccaagattaaagagt

SEQ ID NO: 131386 - DNA, 15 bp, Homo sapiens
caagattaaagagta

SEQ ID NO: 131387 - DNA, 15 bp, Homo sapiens
aagattaaagagtaa

SEQ ID NO: 131388 - DNA, 15 bp, Homo sapiens
agattaaagagtaaa

SEQ ID NO: 131389 - DNA, 15 bp, Homo sapiens
gattaaagagtaaag

SEQ ID NO: 131390 - DNA, 15 bp, Homo sapiens
attaaagagtaaagt

SEQ ID NO: 131391 - DNA, 15 bp, Homo sapiens
ttaaagagtaaagtt

SEQ ID NO: 131392 - DNA, 15 bp, Homo sapiens
taaagagtaaagttg

SEQ ID NO: 131393 - DNA, 15 bp, Homo sapiens
aaagagtaaagttgt

SEQ ID NO: 131394 - DNA, 15 bp, Homo sapiens
aagagtaaagttgta

SEQ ID NO: 131395 - DNA, 15 bp, Homo sapiens
agagtaaagttgtac

SEQ ID NO: 131396 - DNA, 15 bp, Homo sapiens
gagtaaagttgtacg

SEQ ID NO: 131397 - DNA, 15 bp, Homo sapiens
agtaaagttgtacgt

SEQ ID NO: 131398 - DNA, 15 bp, Homo sapiens
gtaaagttgtacgtt

SEQ ID NO: 131399 - DNA, 15 bp, Homo sapiens
taaagttgtacgttg

SEQ ID NO: 131400 - DNA, 15 bp, Homo sapiens
aaagttgtacgttga

SEQ ID NO: 131401 - DNA, 15 bp, Homo sapiens
aagttgtacgttgaa

SEQ ID NO: 131402 - DNA, 15 bp, Homo sapiens
agttgtacgttgaat

SEQ ID NO: 131403 - DNA, 15 bp, Homo sapiens
gttgtacgttgaatc

SEQ ID NO: 131404 - DNA, 15 bp, Homo sapiens
ttgtacgttgaatcg

SEQ ID NO: 131405 - DNA, 15 bp, Homo sapiens
tgtacgttgaatcgg

SEQ ID NO: 131406 - DNA, 15 bp, Homo sapiens
gtacgttgaatcggg

SEQ ID NO: 131407 - DNA, 15 bp, Homo sapiens
tacgttgaatcgggg

SEQ ID NO: 131408 - DNA, 15 bp, Homo sapiens
acgttgaatcggggt

SEQ ID NO: 131409 - DNA, 15 bp, Homo sapiens
cgttgaatcggggtc

SEQ ID NO: 131410 - DNA, 15 bp, Homo sapiens
gttgaatcggggtct

SEQ ID NO: 131411 - DNA, 15 bp, Homo sapiens
ttgaatcggggtctg

SEQ ID NO: 131412 - DNA, 15 bp, Homo sapiens
tgaatcggggtctga

SEQ ID NO: 131413 - DNA, 15 bp, Homo sapiens
gaatcggggtctgac

SEQ ID NO: 131414 - DNA, 15 bp, Homo sapiens
aatcggggtctgact

SEQ ID NO: 131415 - DNA, 15 bp, Homo sapiens
atcggggtctgactc

SEQ ID NO: 131416 - DNA, 15 bp, Homo sapiens
tcggggtctgactcc

SEQ ID NO: 131417 - DNA, 15 bp, Homo sapiens
cggggtctgactcct

SEQ ID NO: 131418 - DNA, 15 bp, Homo sapiens
ggggtctgactccta

SEQ ID NO: 131419 - DNA, 15 bp, Homo sapiens
gggtctgactcctag

SEQ ID NO: 131420 - DNA, 15 bp, Homo sapiens
ggtctgactcctagg

SEQ ID NO: 131421 - DNA, 15 bp, Homo sapiens
gtctgactcctaggc

SEQ ID NO: 131422 - DNA, 15 bp, Homo sapiens
tctgactcctaggct

SEQ ID NO: 131423 - DNA, 15 bp, Homo sapiens
ctgactcctaggctt

SEQ ID NO: 131424 - DNA, 15 bp, Homo sapiens
tgactcctaggctta

SEQ ID NO: 131425 - DNA, 15 bp, Homo sapiens
gactcctaggcttag

SEQ ID NO: 131426 - DNA, 15 bp, Homo sapiens
actcctaggcttagc

SEQ ID NO: 131427 - DNA, 15 bp, Homo sapiens
ctcctaggcttagca

SEQ ID NO: 131428 - DNA, 15 bp, Homo sapiens
tcctaggcttagcat

SEQ ID NO: 131429 - DNA, 15 bp, Homo sapiens
cctaggcttagcatt

SEQ ID NO: 131430 - DNA, 15 bp, Homo sapiens
ctaggcttagcattt

SEQ ID NO: 131431 - DNA, 15 bp, Homo sapiens
taggcttagcatttt

SEQ ID NO: 131432 - DNA, 15 bp, Homo sapiens
aggcttagcattttc

SEQ ID NO: 131433 - DNA, 15 bp, Homo sapiens
ggcttagcattttct

SEQ ID NO: 131434 - DNA, 15 bp, Homo sapiens
gcttagcattttctc

SEQ ID NO: 131435 - DNA, 15 bp, Homo sapiens
cttagcattttctcc

SEQ ID NO: 131436 - DNA, 15 bp, Homo sapiens
ttagcattttctccc

SEQ ID NO: 131437 - DNA, 15 bp, Homo sapiens
tagcattttctcccc

SEQ ID NO: 131438 - DNA, 15 bp, Homo sapiens
agcattttctcccca

SEQ ID NO: 131439 - DNA, 15 bp, Homo sapiens
gcattttctccccac

SEQ ID NO: 131440 - DNA, 15 bp, Homo sapiens
cattttctccccaca

SEQ ID NO: 131441 - DNA, 15 bp, Homo sapiens
attttctccccacac

SEQ ID NO: 131442 - DNA, 15 bp, Homo sapiens
ttttctccccacact

SEQ ID NO: 131443 - DNA, 15 bp, Homo sapiens
tttctccccacacta

SEQ ID NO: 131444 - DNA, 15 bp, Homo sapiens
ttctccccacactat

SEQ ID NO: 131445 - DNA, 15 bp, Homo sapiens
tctccccacactatg

SEQ ID NO: 131446 - DNA, 15 bp, Homo sapiens
ctccccacactatgc

SEQ ID NO: 131447 - DNA, 15 bp, Homo sapiens
tccccacactatgct

SEQ ID NO: 131448 - DNA, 15 bp, Homo sapiens
ccccacactatgctg

SEQ ID NO: 131449 - DNA, 15 bp, Homo sapiens
cccacactatgctgc

SEQ ID NO: 131450 - DNA, 15 bp, Homo sapiens
ccacactatgctgcc

SEQ ID NO: 131451 - DNA, 15 bp, Homo sapiens
cacactatgctgcca

SEQ ID NO: 131452 - DNA, 15 bp, Homo sapiens
acactatgctgccat

SEQ ID NO: 131453 - DNA, 15 bp, Homo sapiens
cactatgctgccatg

SEQ ID NO: 131454 - DNA, 15 bp, Homo sapiens
actatgctgccatgt

SEQ ID NO: 131455 - DNA, 15 bp, Homo sapiens
ctatgctgccatgtt

SEQ ID NO: 131456 - DNA, 15 bp, Homo sapiens
tatgctgccatgttg

SEQ ID NO: 131457 - DNA, 15 bp, Homo sapiens
atgctgccatgttgc

SEQ ID NO: 131458 - DNA, 15 bp, Homo sapiens
tgctgccatgttgct

SEQ ID NO: 131459 - DNA, 15 bp, Homo sapiens
gctgccatgttgctt

SEQ ID NO: 131460 - DNA, 15 bp, Homo sapiens
ctgccatgttgctta

SEQ ID NO: 131461 - DNA, 15 bp, Homo sapiens
tgccatgttgcttat

SEQ ID NO: 131462 - DNA, 15 bp, Homo sapiens
gccatgttgcttatt

SEQ ID NO: 131463 - DNA, 15 bp, Homo sapiens
ccatgttgcttattc

SEQ ID NO: 131464 - DNA, 15 bp, Homo sapiens
catgttgcttattcc

SEQ ID NO: 131465 - DNA, 15 bp, Homo sapiens
atgttgcttattcca

SEQ ID NO: 131466 - DNA, 15 bp, Homo sapiens
tgttgcttattccaa

SEQ ID NO: 131467 - DNA, 15 bp, Homo sapiens
gttgcttattccaac

SEQ ID NO: 131468 - DNA, 15 bp, Homo sapiens
ttgcttattccaaca

SEQ ID NO: 131469 - DNA, 15 bp, Homo sapiens
tgcttattccaacat

SEQ ID NO: 131470 - DNA, 15 bp, Homo sapiens
gcttattccaacatt

SEQ ID NO: 131471 - DNA, 15 bp, Homo sapiens
cttattccaacatta

SEQ ID NO: 131472 - DNA, 15 bp, Homo sapiens
ttattccaacattag

SEQ ID NO: 131473 - DNA, 15 bp, Homo sapiens
tattccaacattagg

SEQ ID NO: 131474 - DNA, 15 bp, Homo sapiens
attccaacattagga

SEQ ID NO: 131475 - DNA, 15 bp, Homo sapiens
ttccaacattaggaa

SEQ ID NO: 131476 - DNA, 15 bp, Homo sapiens
tccaacattaggaag

SEQ ID NO: 131477 - DNA, 15 bp, Homo sapiens
ccaacattaggaagc

SEQ ID NO: 131478 - DNA, 15 bp, Homo sapiens
caacattaggaagca

SEQ ID NO: 131479 - DNA, 15 bp, Homo sapiens
aacattaggaagcat

SEQ ID NO: 131480 - DNA, 15 bp, Homo sapiens
acattaggaagcata

SEQ ID NO: 131481 - DNA, 15 bp, Homo sapiens
cattaggaagcatag

SEQ ID NO: 131482 - DNA, 15 bp, Homo sapiens
attaggaagcatagg

SEQ ID NO: 131483 - DNA, 15 bp, Homo sapiens
ttaggaagcataggt

SEQ ID NO: 131484 - DNA, 15 bp, Homo sapiens
taggaagcataggtg

SEQ ID NO: 131485 - DNA, 15 bp, Homo sapiens
aggaagcataggtgc

SEQ ID NO: 131486 - DNA, 15 bp, Homo sapiens
ggaagcataggtgcc

SEQ ID NO: 131487 - DNA, 15 bp, Homo sapiens
gaagcataggtgcca

SEQ ID NO: 131488 - DNA, 15 bp, Homo sapiens
aagcataggtgccat

SEQ ID NO: 131489 - DNA, 15 bp, Homo sapiens
agcataggtgccatc

SEQ ID NO: 131490 - DNA, 15 bp, Homo sapiens
gcataggtgccatcc

SEQ ID NO: 131491 - DNA, 15 bp, Homo sapiens
cataggtgccatccc

SEQ ID NO: 131492 - DNA, 15 bp, Homo sapiens
ataggtgccatcccc

SEQ ID NO: 131493 - DNA, 15 bp, Homo sapiens
taggtgccatcccca

SEQ ID NO: 131494 - DNA, 15 bp, Homo sapiens
aggtgccatccccag

SEQ ID NO: 131495 - DNA, 15 bp, Homo sapiens
ggtgccatccccagc

SEQ ID NO: 131496 - DNA, 15 bp, Homo sapiens
gtgccatccccagct

SEQ ID NO: 131497 - DNA, 15 bp, Homo sapiens
tgccatccccagctt

SEQ ID NO: 131498 - DNA, 15 bp, Homo sapiens
gccatccccagcttt

SEQ ID NO: 131499 - DNA, 15 bp, Homo sapiens
ccatccccagctttt

SEQ ID NO: 131500 - DNA, 15 bp, Homo sapiens
catccccagcttttg

SEQ ID NO: 131501 - DNA, 15 bp, Homo sapiens
atccccagcttttga

SEQ ID NO: 131502 - DNA, 15 bp, Homo sapiens
tccccagcttttgag

SEQ ID NO: 131503 - DNA, 15 bp, Homo sapiens
ccccagcttttgagg

SEQ ID NO: 131504 - DNA, 15 bp, Homo sapiens
cccagcttttgaggc

SEQ ID NO: 131505 - DNA, 15 bp, Homo sapiens
ccagcttttgaggcc

SEQ ID NO: 131506 - DNA, 15 bp, Homo sapiens
cagcttttgaggcca

SEQ ID NO: 131507 - DNA, 15 bp, Homo sapiens
agcttttgaggccaa

SEQ ID NO: 131508 - DNA, 15 bp, Homo sapiens
gcttttgaggccaat

SEQ ID NO: 131509 - DNA, 15 bp, Homo sapiens
cttttgaggccaata

SEQ ID NO: 131510 - DNA, 15 bp, Homo sapiens
ttttgaggccaatat

SEQ ID NO: 131511 - DNA, 15 bp, Homo sapiens
tttgaggccaatatc

SEQ ID NO: 131512 - DNA, 15 bp, Homo sapiens
ttgaggccaatatca

SEQ ID NO: 131513 - DNA, 15 bp, Homo sapiens
tgaggccaatatcac

SEQ ID NO: 131514 - DNA, 15 bp, Homo sapiens
gaggccaatatcacg

SEQ ID NO: 131515 - DNA, 15 bp, Homo sapiens
aggccaatatcacga

SEQ ID NO: 131516 - DNA, 15 bp, Homo sapiens
ggccaatatcacgat

SEQ ID NO: 131517 - DNA, 15 bp, Homo sapiens
gccaatatcacgatg

SEQ ID NO: 131518 - DNA, 15 bp, Homo sapiens
ccaatatcacgatga

SEQ ID NO: 131519 - DNA, 15 bp, Homo sapiens
caatatcacgatgaa

SEQ ID NO: 131520 - DNA, 15 bp, Homo sapiens
aatatcacgatgaag

SEQ ID NO: 131521 - DNA, 15 bp, Homo sapiens
atatcacgatgaagc

SEQ ID NO: 131522 - DNA, 15 bp, Homo sapiens
tatcacgatgaagca

SEQ ID NO: 131523 - DNA, 15 bp, Homo sapiens
atcacgatgaagcat

SEQ ID NO: 131524 - DNA, 15 bp, Homo sapiens
tcacgatgaagcatt

SEQ ID NO: 131525 - DNA, 15 bp, Homo sapiens
cacgatgaagcattt

SEQ ID NO: 131526 - DNA, 15 bp, Homo sapiens
acgatgaagcatttt

SEQ ID NO: 131527 - DNA, 15 bp, Homo sapiens
cgatgaagcattttt

SEQ ID NO: 131528 - DNA, 15 bp, Homo sapiens
gatgaagcattttta

SEQ ID NO: 131529 - DNA, 15 bp, Homo sapiens
atgaagcatttttaa

SEQ ID NO: 131530 - DNA, 15 bp, Homo sapiens
tgaagcatttttaaa

SEQ ID NO: 131531 - DNA, 15 bp, Homo sapiens
gaagcatttttaaaa

SEQ ID NO: 131532 - DNA, 15 bp, Homo sapiens
aagcatttttaaaac

SEQ ID NO: 131533 - DNA, 15 bp, Homo sapiens
agcatttttaaaaca

SEQ ID NO: 131534 - DNA, 15 bp, Homo sapiens
gcatttttaaaacat

SEQ ID NO: 131535 - DNA, 15 bp, Homo sapiens
catttttaaaacatc

SEQ ID NO: 131536 - DNA, 15 bp, Homo sapiens
atttttaaaacatct

SEQ ID NO: 131537 - DNA, 15 bp, Homo sapiens
tttttaaaacatctc

SEQ ID NO: 131538 - DNA, 15 bp, Homo sapiens
ttttaaaacatctca

SEQ ID NO: 131539 - DNA, 15 bp, Homo sapiens
tttaaaacatctcat

SEQ ID NO: 131540 - DNA, 15 bp, Homo sapiens
ttaaaacatctcatt

SEQ ID NO: 131541 - DNA, 15 bp, Homo sapiens
taaaacatctcatta

SEQ ID NO: 131542 - DNA, 15 bp, Homo sapiens
aaaacatctcattaa

SEQ ID NO: 131543 - DNA, 15 bp, Homo sapiens
aaacatctcattaaa

SEQ ID NO: 131544 - DNA, 15 bp, Homo sapiens
aacatctcattaaat

SEQ ID NO: 131545 - DNA, 15 bp, Homo sapiens
acatctcattaaatt

SEQ ID NO: 131546 - DNA, 15 bp, Homo sapiens
catctcattaaattg

SEQ ID NO: 131547 - DNA, 15 bp, Homo sapiens
atctcattaaattgc

SEQ ID NO: 131548 - DNA, 15 bp, Homo sapiens
tctcattaaattgct

SEQ ID NO: 131549 - DNA, 15 bp, Homo sapiens
ctcattaaattgctg

SEQ ID NO: 131550 - DNA, 15 bp, Homo sapiens
tcattaaattgctga

SEQ ID NO: 131551 - DNA, 15 bp, Homo sapiens
cattaaattgctgat

SEQ ID NO: 131552 - DNA, 15 bp, Homo sapiens
attaaattgctgata

SEQ ID NO: 131553 - DNA, 15 bp, Homo sapiens
ttaaattgctgatat

SEQ ID NO: 131554 - DNA, 15 bp, Homo sapiens
taaattgctgatata

SEQ ID NO: 131555 - DNA, 15 bp, Homo sapiens
aaattgctgatatag

SEQ ID NO: 131556 - DNA, 15 bp, Homo sapiens
aattgctgatatagt

SEQ ID NO: 131557 - DNA, 15 bp, Homo sapiens
attgctgatatagtg

SEQ ID NO: 131558 - DNA, 15 bp, Homo sapiens
ttgctgatatagtgg

SEQ ID NO: 131559 - DNA, 15 bp, Homo sapiens
tgctgatatagtgga

SEQ ID NO: 131560 - DNA, 15 bp, Homo sapiens
gctgatatagtggaa

SEQ ID NO: 131561 - DNA, 15 bp, Homo sapiens
ctgatatagtggaaa

SEQ ID NO: 131562 - DNA, 15 bp, Homo sapiens
tgatatagtggaaag

SEQ ID NO: 131563 - DNA, 15 bp, Homo sapiens
gatatagtggaaaga

SEQ ID NO: 131564 - DNA, 15 bp, Homo sapiens
atatagtggaaagaa

SEQ ID NO: 131565 - DNA, 15 bp, Homo sapiens
tatagtggaaagaac

SEQ ID NO: 131566 - DNA, 15 bp, Homo sapiens
atagtggaaagaacc

SEQ ID NO: 131567 - DNA, 15 bp, Homo sapiens
tagtggaaagaacca

SEQ ID NO: 131568 - DNA, 15 bp, Homo sapiens
agtggaaagaaccaa

SEQ ID NO: 131569 - DNA, 15 bp, Homo sapiens
gtggaaagaaccaaa

SEQ ID NO: 131570 - DNA, 15 bp, Homo sapiens
tggaaagaaccaaag

SEQ ID NO: 131571 - DNA, 15 bp, Homo sapiens
ggaaagaaccaaagc

SEQ ID NO: 131572 - DNA, 15 bp, Homo sapiens
gaaagaaccaaagct

SEQ ID NO: 131573 - DNA, 15 bp, Homo sapiens
aaagaaccaaagctt

SEQ ID NO: 131574 - DNA, 15 bp, Homo sapiens
aagaaccaaagcttt

SEQ ID NO: 131575 - DNA, 15 bp, Homo sapiens
agaaccaaagctttg

SEQ ID NO: 131576 - DNA, 15 bp, Homo sapiens
gaaccaaagctttgc

SEQ ID NO: 131577 - DNA, 15 bp, Homo sapiens
aaccaaagctttgca

SEQ ID NO: 131578 - DNA, 15 bp, Homo sapiens
accaaagctttgcag

SEQ ID NO: 131579 - DNA, 15 bp, Homo sapiens
ccaaagctttgcagt

SEQ ID NO: 131580 - DNA, 15 bp, Homo sapiens
caaagctttgcagtc

SEQ ID NO: 131581 - DNA, 15 bp, Homo sapiens
aaagctttgcagtca

SEQ ID NO: 131582 - DNA, 15 bp, Homo sapiens
aagctttgcagtcaa

SEQ ID NO: 131583 - DNA, 15 bp, Homo sapiens
agctttgcagtcaaa

SEQ ID NO: 131584 - DNA, 15 bp, Homo sapiens
gctttgcagtcaaag

SEQ ID NO: 131585 - DNA, 15 bp, Homo sapiens
ctttgcagtcaaagc

SEQ ID NO: 131586 - DNA, 15 bp, Homo sapiens
tttgcagtcaaagct

SEQ ID NO: 131587 - DNA, 15 bp, Homo sapiens
ttgcagtcaaagctg

SEQ ID NO: 131588 - DNA, 15 bp, Homo sapiens
tgcagtcaaagctgt

SEQ ID NO: 131589 - DNA, 15 bp, Homo sapiens
gcagtcaaagctgtt

SEQ ID NO: 131590 - DNA, 15 bp, Homo sapiens
cagtcaaagctgttt

SEQ ID NO: 131591 - DNA, 15 bp, Homo sapiens
agtcaaagctgtttg

SEQ ID NO: 131592 - DNA, 15 bp, Homo sapiens
gtcaaagctgtttgg

SEQ ID NO: 131593 - DNA, 15 bp, Homo sapiens
tcaaagctgtttggg

SEQ ID NO: 131594 - DNA, 15 bp, Homo sapiens
caaagctgtttgggt

SEQ ID NO: 131595 - DNA, 15 bp, Homo sapiens
aaagctgtttgggtt

SEQ ID NO: 131596 - DNA, 15 bp, Homo sapiens
aagctgtttgggttc

SEQ ID NO: 131597 - DNA, 15 bp, Homo sapiens
agctgtttgggttca

SEQ ID NO: 131598 - DNA, 15 bp, Homo sapiens
gctgtttgggttcaa

SEQ ID NO: 131599 - DNA, 15 bp, Homo sapiens
ctgtttgggttcaaa

SEQ ID NO: 131600 - DNA, 15 bp, Homo sapiens
tgtttgggttcaaat

SEQ ID NO: 131601 - DNA, 15 bp, Homo sapiens
gtttgggttcaaatt

SEQ ID NO: 131602 - DNA, 15 bp, Homo sapiens
tttgggttcaaattt

SEQ ID NO: 131603 - DNA, 15 bp, Homo sapiens
ttgggttcaaattta

SEQ ID NO: 131604 - DNA, 15 bp, Homo sapiens
tgggttcaaatttac

SEQ ID NO: 131605 - DNA, 15 bp, Homo sapiens
gggttcaaatttacc

SEQ ID NO: 131606 - DNA, 15 bp, Homo sapiens
ggttcaaatttacca

SEQ ID NO: 131607 - DNA, 15 bp, Homo sapiens
gttcaaatttaccac

SEQ ID NO: 131608 - DNA, 15 bp, Homo sapiens
ttcaaatttaccact

SEQ ID NO: 131609 - DNA, 15 bp, Homo sapiens
tcaaatttaccactt

SEQ ID NO: 131610 - DNA, 15 bp, Homo sapiens
caaatttaccacttg

SEQ ID NO: 131611 - DNA, 15 bp, Homo sapiens
aaatttaccacttgt

SEQ ID NO: 131612 - DNA, 15 bp, Homo sapiens
aatttaccacttgtt

SEQ ID NO: 131613 - DNA, 15 bp, Homo sapiens
atttaccacttgttt

SEQ ID NO: 131614 - DNA, 15 bp, Homo sapiens
tttaccacttgtttg

SEQ ID NO: 131615 - DNA, 15 bp, Homo sapiens
ttaccacttgtttgt

SEQ ID NO: 131616 - DNA, 15 bp, Homo sapiens
taccacttgtttgtt

SEQ ID NO: 131617 - DNA, 15 bp, Homo sapiens
accacttgtttgttc

SEQ ID NO: 131618 - DNA, 15 bp, Homo sapiens
ccacttgtttgttct

SEQ ID NO: 131619 - DNA, 15 bp, Homo sapiens
cacttgtttgttcta

SEQ ID NO: 131620 - DNA, 15 bp, Homo sapiens
acttgtttgttctat

SEQ ID NO: 131621 - DNA, 15 bp, Homo sapiens
cttgtttgttctatg

SEQ ID NO: 131622 - DNA, 15 bp, Homo sapiens
ttgtttgttctatga

SEQ ID NO: 131623 - DNA, 15 bp, Homo sapiens
tgtttgttctatgac

SEQ ID NO: 131624 - DNA, 15 bp, Homo sapiens
gtttgttctatgacc

SEQ ID NO: 131625 - DNA, 15 bp, Homo sapiens
tttgttctatgaccc

SEQ ID NO: 131626 - DNA, 15 bp, Homo sapiens
ttgttctatgaccct

SEQ ID NO: 131627 - DNA, 15 bp, Homo sapiens
tgttctatgaccctg

SEQ ID NO: 131628 - DNA, 15 bp, Homo sapiens
gttctatgaccctga

SEQ ID NO: 131629 - DNA, 15 bp, Homo sapiens
ttctatgaccctgag

SEQ ID NO: 131630 - DNA, 15 bp, Homo sapiens
tctatgaccctgagc

SEQ ID NO: 131631 - DNA, 15 bp, Homo sapiens
ctatgaccctgagca

SEQ ID NO: 131632 - DNA, 15 bp, Homo sapiens
tatgaccctgagcaa

SEQ ID NO: 131633 - DNA, 15 bp, Homo sapiens
atgaccctgagcaag

SEQ ID NO: 131634 - DNA, 15 bp, Homo sapiens
tgaccctgagcaaga

SEQ ID NO: 131635 - DNA, 15 bp, Homo sapiens
gaccctgagcaagat

SEQ ID NO: 131636 - DNA, 15 bp, Homo sapiens
accctgagcaagata

SEQ ID NO: 131637 - DNA, 15 bp, Homo sapiens
ccctgagcaagatat

SEQ ID NO: 131638 - DNA, 15 bp, Homo sapiens
cctgagcaagatatt

SEQ ID NO: 131639 - DNA, 15 bp, Homo sapiens
ctgagcaagatattc

SEQ ID NO: 131640 - DNA, 15 bp, Homo sapiens
tgagcaagatattct

SEQ ID NO: 131641 - DNA, 15 bp, Homo sapiens
gagcaagatattctc

SEQ ID NO: 131642 - DNA, 15 bp, Homo sapiens
agcaagatattctcc

SEQ ID NO: 131643 - DNA, 15 bp, Homo sapiens
gcaagatattctcca

SEQ ID NO: 131644 - DNA, 15 bp, Homo sapiens
caagatattctccag

SEQ ID NO: 131645 - DNA, 15 bp, Homo sapiens
aagatattctccaga

SEQ ID NO: 131646 - DNA, 15 bp, Homo sapiens
agatattctccagat

SEQ ID NO: 131647 - DNA, 15 bp, Homo sapiens
gatattctccagatc

SEQ ID NO: 131648 - DNA, 15 bp, Homo sapiens
atattctccagatct

SEQ ID NO: 131649 - DNA, 15 bp, Homo sapiens
tattctccagatctg

SEQ ID NO: 131650 - DNA, 15 bp, Homo sapiens
attctccagatctgt

SEQ ID NO: 131651 - DNA, 15 bp, Homo sapiens
ttctccagatctgtt

SEQ ID NO: 131652 - DNA, 15 bp, Homo sapiens
tctccagatctgttt

SEQ ID NO: 131653 - DNA, 15 bp, Homo sapiens
ctccagatctgtttc

SEQ ID NO: 131654 - DNA, 15 bp, Homo sapiens
tccagatctgtttcc

SEQ ID NO: 131655 - DNA, 15 bp, Homo sapiens
ccagatctgtttcct

SEQ ID NO: 131656 - DNA, 15 bp, Homo sapiens
cagatctgtttcctc

SEQ ID NO: 131657 - DNA, 15 bp, Homo sapiens
agatctgtttcctca

SEQ ID NO: 131658 - DNA, 15 bp, Homo sapiens
gatctgtttcctcat

SEQ ID NO: 131659 - DNA, 15 bp, Homo sapiens
atctgtttcctcatt

SEQ ID NO: 131660 - DNA, 15 bp, Homo sapiens
tctgtttcctcattt

SEQ ID NO: 131661 - DNA, 15 bp, Homo sapiens
ctgtttcctcatttg

SEQ ID NO: 131662 - DNA, 15 bp, Homo sapiens
tgtttcctcatttga

SEQ ID NO: 131663 - DNA, 15 bp, Homo sapiens
gtttcctcatttgaa

SEQ ID NO: 131664 - DNA, 15 bp, Homo sapiens
tttcctcatttgaaa

SEQ ID NO: 131665 - DNA, 15 bp, Homo sapiens
ttcctcatttgaaaa

SEQ ID NO: 131666 - DNA, 15 bp, Homo sapiens
tcctcatttgaaaaa

SEQ ID NO: 131667 - DNA, 15 bp, Homo sapiens
cctcatttgaaaaat

SEQ ID NO: 131668 - DNA, 15 bp, Homo sapiens
ctcatttgaaaaatg

SEQ ID NO: 131669 - DNA, 15 bp, Homo sapiens
tcatttgaaaaatgg

SEQ ID NO: 131670 - DNA, 15 bp, Homo sapiens
catttgaaaaatggg

SEQ ID NO: 131671 - DNA, 15 bp, Homo sapiens
atttgaaaaatggga

SEQ ID NO: 131672 - DNA, 15 bp, Homo sapiens
tttgaaaaatgggaa

SEQ ID NO: 131673 - DNA, 15 bp, Homo sapiens
ttgaaaaatgggaat

SEQ ID NO: 131674 - DNA, 15 bp, Homo sapiens
tgaaaaatgggaata

SEQ ID NO: 131675 - DNA, 15 bp, Homo sapiens
gaaaaatgggaataa

SEQ ID NO: 131676 - DNA, 15 bp, Homo sapiens
aaaaatgggaataat

SEQ ID NO: 131677 - DNA, 15 bp, Homo sapiens
aaaatgggaataata

SEQ ID NO: 131678 - DNA, 15 bp, Homo sapiens
aaatgggaataataa

SEQ ID NO: 131679 - DNA, 15 bp, Homo sapiens
aatgggaataataat

SEQ ID NO: 131680 - DNA, 15 bp, Homo sapiens
atgggaataataata

SEQ ID NO: 131681 - DNA, 15 bp, Homo sapiens
tgggaataataatac

SEQ ID NO: 131682 - DNA, 15 bp, Homo sapiens
gggaataataatacg

SEQ ID NO: 131683 - DNA, 15 bp, Homo sapiens
ggaataataatacgt

SEQ ID NO: 131684 - DNA, 15 bp, Homo sapiens
gaataataatacgtt

SEQ ID NO: 131685 - DNA, 15 bp, Homo sapiens
aataataatacgttt

SEQ ID NO: 131686 - DNA, 15 bp, Homo sapiens
ataataatacgtttc

SEQ ID NO: 131687 - DNA, 15 bp, Homo sapiens
taataatacgtttct

SEQ ID NO: 131688 - DNA, 15 bp, Homo sapiens
aataatacgtttctt

SEQ ID NO: 131689 - DNA, 15 bp, Homo sapiens
ataatacgtttcttt

SEQ ID NO: 131690 - DNA, 15 bp, Homo sapiens
taatacgtttcttta

SEQ ID NO: 131691 - DNA, 15 bp, Homo sapiens
aatacgtttctttat

SEQ ID NO: 131692 - DNA, 15 bp, Homo sapiens
atacgtttctttata

SEQ ID NO: 131693 - DNA, 15 bp, Homo sapiens
tacgtttctttatag

SEQ ID NO: 131694 - DNA, 15 bp, Homo sapiens
acgtttctttatagg

SEQ ID NO: 131695 - DNA, 15 bp, Homo sapiens
cgtttctttataggc

SEQ ID NO: 131696 - DNA, 15 bp, Homo sapiens
gtttctttataggct

SEQ ID NO: 131697 - DNA, 15 bp, Homo sapiens
tttctttataggctg

SEQ ID NO: 131698 - DNA, 15 bp, Homo sapiens
ttctttataggctgt

SEQ ID NO: 131699 - DNA, 15 bp, Homo sapiens
tctttataggctgtt

SEQ ID NO: 131700 - DNA, 15 bp, Homo sapiens
ctttataggctgttc

SEQ ID NO: 131701 - DNA, 15 bp, Homo sapiens
tttataggctgttct

SEQ ID NO: 131702 - DNA, 15 bp, Homo sapiens
ttataggctgttctt

SEQ ID NO: 131703 - DNA, 15 bp, Homo sapiens
tataggctgttctta

SEQ ID NO: 131704 - DNA, 15 bp, Homo sapiens
ataggctgttcttaa

SEQ ID NO: 131705 - DNA, 15 bp, Homo sapiens
taggctgttcttaaa

SEQ ID NO: 131706 - DNA, 15 bp, Homo sapiens
aggctgttcttaaag

SEQ ID NO: 131707 - DNA, 15 bp, Homo sapiens
ggctgttcttaaaga

SEQ ID NO: 131708 - DNA, 15 bp, Homo sapiens
gctgttcttaaagat

SEQ ID NO: 131709 - DNA, 15 bp, Homo sapiens
ctgttcttaaagatt

SEQ ID NO: 131710 - DNA, 15 bp, Homo sapiens
tgttcttaaagattc

SEQ ID NO: 131711 - DNA, 15 bp, Homo sapiens
gttcttaaagattct

SEQ ID NO: 131712 - DNA, 15 bp, Homo sapiens
ttcttaaagattctg

SEQ ID NO: 131713 - DNA, 15 bp, Homo sapiens
tcttaaagattctgg

SEQ ID NO: 131714 - DNA, 15 bp, Homo sapiens
cttaaagattctgga

SEQ ID NO: 131715 - DNA, 15 bp, Homo sapiens
ttaaagattctggaa

SEQ ID NO: 131716 - DNA, 15 bp, Homo sapiens
taaagattctggaaa

SEQ ID NO: 131717 - DNA, 15 bp, Homo sapiens
aaagattctggaaaa

SEQ ID NO: 131718 - DNA, 15 bp, Homo sapiens
aagattctggaaaat

SEQ ID NO: 131719 - DNA, 15 bp, Homo sapiens
agattctggaaaata

SEQ ID NO: 131720 - DNA, 15 bp, Homo sapiens
gattctggaaaataa

SEQ ID NO: 131721 - DNA, 15 bp, Homo sapiens
attctggaaaataat

SEQ ID NO: 131722 - DNA, 15 bp, Homo sapiens
ttctggaaaataatg

SEQ ID NO: 131723 - DNA, 15 bp, Homo sapiens
tctggaaaataatgc

SEQ ID NO: 131724 - DNA, 15 bp, Homo sapiens
ctggaaaataatgct

SEQ ID NO: 131725 - DNA, 15 bp, Homo sapiens
tggaaaataatgcta

SEQ ID NO: 131726 - DNA, 15 bp, Homo sapiens
ggaaaataatgctaa

SEQ ID NO: 131727 - DNA, 15 bp, Homo sapiens
gaaaataatgctaat

SEQ ID NO: 131728 - DNA, 15 bp, Homo sapiens
aaaataatgctaata

SEQ ID NO: 131729 - DNA, 15 bp, Homo sapiens
aaataatgctaatag

SEQ ID NO: 131730 - DNA, 15 bp, Homo sapiens
aataatgctaatagt

SEQ ID NO: 131731 - DNA, 15 bp, Homo sapiens
ataatgctaatagtg

SEQ ID NO: 131732 - DNA, 15 bp, Homo sapiens
taatgctaatagtgt

SEQ ID NO: 131733 - DNA, 15 bp, Homo sapiens
aatgctaatagtgtg

SEQ ID NO: 131734 - DNA, 15 bp, Homo sapiens
atgctaatagtgtgc

SEQ ID NO: 131735 - DNA, 15 bp, Homo sapiens
tgctaatagtgtgcc

SEQ ID NO: 131736 - DNA, 15 bp, Homo sapiens
gctaatagtgtgcct

SEQ ID NO: 131737 - DNA, 15 bp, Homo sapiens
ctaatagtgtgccta

SEQ ID NO: 131738 - DNA, 15 bp, Homo sapiens
taatagtgtgcctaa

SEQ ID NO: 131739 - DNA, 15 bp, Homo sapiens
aatagtgtgcctaat

SEQ ID NO: 131740 - DNA, 15 bp, Homo sapiens
atagtgtgcctaatg

SEQ ID NO: 131741 - DNA, 15 bp, Homo sapiens
tagtgtgcctaatgc

SEQ ID NO: 131742 - DNA, 15 bp, Homo sapiens
agtgtgcctaatgct

SEQ ID NO: 131743 - DNA, 15 bp, Homo sapiens
gtgtgcctaatgctt

SEQ ID NO: 131744 - DNA, 15 bp, Homo sapiens
tgtgcctaatgcttg

SEQ ID NO: 131745 - DNA, 15 bp, Homo sapiens
gtgcctaatgcttgg

SEQ ID NO: 131746 - DNA, 15 bp, Homo sapiens
tgcctaatgcttggt

SEQ ID NO: 131747 - DNA, 15 bp, Homo sapiens
gcctaatgcttggta

SEQ ID NO: 131748 - DNA, 15 bp, Homo sapiens
cctaatgcttggtaa

SEQ ID NO: 131749 - DNA, 15 bp, Homo sapiens
ctaatgcttggtaaa

SEQ ID NO: 131750 - DNA, 15 bp, Homo sapiens
taatgcttggtaaat

SEQ ID NO: 131751 - DNA, 15 bp, Homo sapiens
aatgcttggtaaata

SEQ ID NO: 131752 - DNA, 15 bp, Homo sapiens
atgcttggtaaatat

SEQ ID NO: 131753 - DNA, 15 bp, Homo sapiens
tgcttggtaaatatg

SEQ ID NO: 131754 - DNA, 15 bp, Homo sapiens
gcttggtaaatatga

SEQ ID NO: 131755 - DNA, 15 bp, Homo sapiens
cttggtaaatatgag

SEQ ID NO: 131756 - DNA, 15 bp, Homo sapiens
ttggtaaatatgagt

SEQ ID NO: 131757 - DNA, 15 bp, Homo sapiens
tggtaaatatgagtc

SEQ ID NO: 131758 - DNA, 15 bp, Homo sapiens
ggtaaatatgagtca

SEQ ID NO: 131759 - DNA, 15 bp, Homo sapiens
gtaaatatgagtcac

SEQ ID NO: 131760 - DNA, 15 bp, Homo sapiens
taaatatgagtcact

SEQ ID NO: 131761 - DNA, 15 bp, Homo sapiens
aaatatgagtcactt

SEQ ID NO: 131762 - DNA, 15 bp, Homo sapiens
aatatgagtcacttt

SEQ ID NO: 131763 - DNA, 15 bp, Homo sapiens
atatgagtcactttt

SEQ ID NO: 131764 - DNA, 15 bp, Homo sapiens
tatgagtcacttttc

SEQ ID NO: 131765 - DNA, 15 bp, Homo sapiens
atgagtcacttttct

SEQ ID NO: 131766 - DNA, 15 bp, Homo sapiens
tgagtcacttttctg

SEQ ID NO: 131767 - DNA, 15 bp, Homo sapiens
gagtcacttttctgt

SEQ ID NO: 131768 - DNA, 15 bp, Homo sapiens
agtcacttttctgtg

SEQ ID NO: 131769 - DNA, 15 bp, Homo sapiens
gtcacttttctgtgc

SEQ ID NO: 131770 - DNA, 15 bp, Homo sapiens
tcacttttctgtgcc

SEQ ID NO: 131771 - DNA, 15 bp, Homo sapiens
cacttttctgtgccc

SEQ ID NO: 131772 - DNA, 15 bp, Homo sapiens
acttttctgtgccca

SEQ ID NO: 131773 - DNA, 15 bp, Homo sapiens
cttttctgtgcccac

SEQ ID NO: 131774 - DNA, 15 bp, Homo sapiens
ttttctgtgcccaca

SEQ ID NO: 131775 - DNA, 15 bp, Homo sapiens
tttctgtgcccacaa

SEQ ID NO: 131776 - DNA, 15 bp, Homo sapiens
ttctgtgcccacaaa

SEQ ID NO: 131777 - DNA, 15 bp, Homo sapiens
tctgtgcccacaaag

SEQ ID NO: 131778 - DNA, 15 bp, Homo sapiens
ctgtgcccacaaagc

SEQ ID NO: 131779 - DNA, 15 bp, Homo sapiens
tgtgcccacaaagca

SEQ ID NO: 131780 - DNA, 15 bp, Homo sapiens
gtgcccacaaagcac

SEQ ID NO: 131781 - DNA, 15 bp, Homo sapiens
tgcccacaaagcact

SEQ ID NO: 131782 - DNA, 15 bp, Homo sapiens
gcccacaaagcacta

SEQ ID NO: 131783 - DNA, 15 bp, Homo sapiens
cccacaaagcactac

SEQ ID NO: 131784 - DNA, 15 bp, Homo sapiens
ccacaaagcactact

SEQ ID NO: 131785 - DNA, 15 bp, Homo sapiens
cacaaagcactacta

SEQ ID NO: 131786 - DNA, 15 bp, Homo sapiens
acaaagcactactat

SEQ ID NO: 131787 - DNA, 15 bp, Homo sapiens
caaagcactactatg

SEQ ID NO: 131788 - DNA, 15 bp, Homo sapiens
aaagcactactatgt

SEQ ID NO: 131789 - DNA, 15 bp, Homo sapiens
aagcactactatgtc

SEQ ID NO: 131790 - DNA, 15 bp, Homo sapiens
agcactactatgtcc

SEQ ID NO: 131791 - DNA, 15 bp, Homo sapiens
gcactactatgtccc

SEQ ID NO: 131792 - DNA, 15 bp, Homo sapiens
cactactatgtccct

SEQ ID NO: 131793 - DNA, 15 bp, Homo sapiens
actactatgtccctt

SEQ ID NO: 131794 - DNA, 15 bp, Homo sapiens
ctactatgtccctta

SEQ ID NO: 131795 - DNA, 15 bp, Homo sapiens
tactatgtcccttaa

SEQ ID NO: 131796 - DNA, 15 bp, Homo sapiens
actatgtcccttaat

SEQ ID NO: 131797 - DNA, 15 bp, Homo sapiens
ctatgtcccttaata

SEQ ID NO: 131798 - DNA, 15 bp, Homo sapiens
tatgtcccttaataa

SEQ ID NO: 131799 - DNA, 15 bp, Homo sapiens
atgtcccttaataaa

SEQ ID NO: 131800 - DNA, 15 bp, Homo sapiens
tgtcccttaataaat

SEQ ID NO: 131801 - DNA, 15 bp, Homo sapiens
gtcccttaataaatt

SEQ ID NO: 131802 - DNA, 15 bp, Homo sapiens
tcccttaataaattt

SEQ ID NO: 131803 - DNA, 15 bp, Homo sapiens
cccttaataaatttt

SEQ ID NO: 131804 - DNA, 15 bp, Homo sapiens
ccttaataaattttg

SEQ ID NO: 131805 - DNA, 15 bp, Homo sapiens
cttaataaattttgt

SEQ ID NO: 131806 - DNA, 15 bp, Homo sapiens
ttaataaattttgtt

SEQ ID NO: 131807 - DNA, 15 bp, Homo sapiens
taataaattttgtta

SEQ ID NO: 131808 - DNA, 15 bp, Homo sapiens
aataaattttgttaa

SEQ ID NO: 131809 - DNA, 15 bp, Homo sapiens
ataaattttgttaat

SEQ ID NO: 131810 - DNA, 15 bp, Homo sapiens
taaattttgttaatt

SEQ ID NO: 131811 - DNA, 15 bp, Homo sapiens
aaattttgttaattt

SEQ ID NO: 131812 - DNA, 15 bp, Homo sapiens
aattttgttaatttt

SEQ ID NO: 131813 - DNA, 15 bp, Homo sapiens
attttgttaatttta

SEQ ID NO: 131814 - DNA, 15 bp, Homo sapiens
ttttgttaattttaa

SEQ ID NO: 131815 - DNA, 15 bp, Homo sapiens
tttgttaattttaaa

SEQ ID NO: 131816 - DNA, 15 bp, Homo sapiens
ttgttaattttaaaa

SEQ ID NO: 131817 - DNA, 15 bp, Homo sapiens
tgttaattttaaaag

SEQ ID NO: 131818 - DNA, 15 bp, Homo sapiens
gttaattttaaaagt

SEQ ID NO: 131819 - DNA, 15 bp, Homo sapiens
ttaattttaaaagtt

SEQ ID NO: 131820 - DNA, 15 bp, Homo sapiens
taattttaaaagtta

SEQ ID NO: 131821 - DNA, 15 bp, Homo sapiens
aattttaaaagttag

SEQ ID NO: 131822 - DNA, 15 bp, Homo sapiens
attttaaaagttaga

SEQ ID NO: 131823 - DNA, 15 bp, Homo sapiens
ttttaaaagttagaa

SEQ ID NO: 131824 - DNA, 15 bp, Homo sapiens
tttaaaagttagaaa

SEQ ID NO: 131825 - DNA, 15 bp, Homo sapiens
ttaaaagttagaaaa

SEQ ID NO: 131826 - DNA, 15 bp, Homo sapiens
taaaagttagaaaaa

SEQ ID NO: 131827 - DNA, 15 bp, Homo sapiens
aaaagttagaaaaaa

SEQ ID NO: 131828 - DNA, 15 bp, Homo sapiens
aaagttagaaaaaaa

SEQ ID NO: 131829 - DNA, 15 bp, Homo sapiens
aagttagaaaaaaat

SEQ ID NO: 131830 - DNA, 15 bp, Homo sapiens
agttagaaaaaaatt

SEQ ID NO: 131831 - DNA, 15 bp, Homo sapiens
gttagaaaaaaatta

SEQ ID NO: 131832 - DNA, 15 bp, Homo sapiens
ttagaaaaaaattaa

SEQ ID NO: 131833 - DNA, 15 bp, Homo sapiens
tagaaaaaaattaaa

SEQ ID NO: 131834 - DNA, 15 bp, Homo sapiens
agaaaaaaattaaac

SEQ ID NO: 131835 - DNA, 15 bp, Homo sapiens
gaaaaaaattaaact

SEQ ID NO: 131836 - DNA, 15 bp, Homo sapiens
aaaaaaattaaacta

SEQ ID NO: 131837 - DNA, 15 bp, Homo sapiens
aaaaaattaaactat

SEQ ID NO: 131838 - DNA, 15 bp, Homo sapiens
aaaaattaaactatt

SEQ ID NO: 131839 - DNA, 15 bp, Homo sapiens
aaaattaaactattt

SEQ ID NO: 131840 - DNA, 15 bp, Homo sapiens
aaattaaactattta

SEQ ID NO: 131841 - DNA, 15 bp, Homo sapiens
aattaaactatttat

SEQ ID NO: 131842 - DNA, 15 bp, Homo sapiens
attaaactatttata

SEQ ID NO: 131843 - DNA, 15 bp, Homo sapiens
ttaaactatttatac

SEQ ID NO: 131844 - DNA, 15 bp, Homo sapiens
taaactatttataca

SEQ ID NO: 131845 - DNA, 15 bp, Homo sapiens
aaactatttatacat

SEQ ID NO: 131846 - DNA, 15 bp, Homo sapiens
aactatttatacatt

SEQ ID NO: 131847 - DNA, 15 bp, Homo sapiens
actatttatacattg

SEQ ID NO: 131848 - DNA, 15 bp, Homo sapiens
ctatttatacattgt

SEQ ID NO: 131849 - DNA, 15 bp, Homo sapiens
tatttatacattgtg

SEQ ID NO: 131850 - DNA, 15 bp, Homo sapiens
atttatacattgtgt

SEQ ID NO: 131851 - DNA, 15 bp, Homo sapiens
tttatacattgtgta

SEQ ID NO: 131852 - DNA, 15 bp, Homo sapiens
ttatacattgtgtat

SEQ ID NO: 131853 - DNA, 15 bp, Homo sapiens
tatacattgtgtatg

SEQ ID NO: 131854 - DNA, 15 bp, Homo sapiens
atacattgtgtatgt

SEQ ID NO: 131855 - DNA, 15 bp, Homo sapiens
tacattgtgtatgtt

SEQ ID NO: 131856 - DNA, 15 bp, Homo sapiens
acattgtgtatgtta

SEQ ID NO: 131857 - DNA, 15 bp, Homo sapiens
cattgtgtatgttaa

SEQ ID NO: 131858 - DNA, 15 bp, Homo sapiens
attgtgtatgttaat

SEQ ID NO: 131859 - DNA, 15 bp, Homo sapiens
ttgtgtatgttaatt

SEQ ID NO: 131860 - DNA, 15 bp, Homo sapiens
tgtgtatgttaattc

SEQ ID NO: 131861 - DNA, 15 bp, Homo sapiens
gtgtatgttaattct

SEQ ID NO: 131862 - DNA, 15 bp, Homo sapiens
tgtatgttaattctt

SEQ ID NO: 131863 - DNA, 15 bp, Homo sapiens
gtatgttaattcttc

SEQ ID NO: 131864 - DNA, 15 bp, Homo sapiens
tatgttaattcttcc

SEQ ID NO: 131865 - DNA, 15 bp, Homo sapiens
atgttaattcttccc

SEQ ID NO: 131866 - DNA, 15 bp, Homo sapiens
tgttaattcttccct

SEQ ID NO: 131867 - DNA, 15 bp, Homo sapiens
gttaattcttcccta

SEQ ID NO: 131868 - DNA, 15 bp, Homo sapiens
ttaattcttccctag

SEQ ID NO: 131869 - DNA, 15 bp, Homo sapiens
taattcttccctaga

SEQ ID NO: 131870 - DNA, 15 bp, Homo sapiens
aattcttccctagac

SEQ ID NO: 131871 - DNA, 15 bp, Homo sapiens
attcttccctagacc

SEQ ID NO: 131872 - DNA, 15 bp, Homo sapiens
ttcttccctagacca

SEQ ID NO: 131873 - DNA, 15 bp, Homo sapiens
tcttccctagaccag

SEQ ID NO: 131874 - DNA, 15 bp, Homo sapiens
cttccctagaccagc

SEQ ID NO: 131875 - DNA, 15 bp, Homo sapiens
ttccctagaccagcc

SEQ ID NO: 131876 - DNA, 15 bp, Homo sapiens
tccctagaccagcct

SEQ ID NO: 131877 - DNA, 15 bp, Homo sapiens
ccctagaccagcctt

SEQ ID NO: 131878 - DNA, 15 bp, Homo sapiens
cctagaccagcctta

SEQ ID NO: 131879 - DNA, 15 bp, Homo sapiens
ctagaccagccttag

SEQ ID NO: 131880 - DNA, 15 bp, Homo sapiens
tagaccagccttagg

SEQ ID NO: 131881 - DNA, 15 bp, Homo sapiens
agaccagccttagga

SEQ ID NO: 131882 - DNA, 15 bp, Homo sapiens
gaccagccttaggaa

SEQ ID NO: 131883 - DNA, 15 bp, Homo sapiens
accagccttaggaag

SEQ ID NO: 131884 - DNA, 15 bp, Homo sapiens
ccagccttaggaaga

SEQ ID NO: 131885 - DNA, 15 bp, Homo sapiens
cagccttaggaagaa

SEQ ID NO: 131886 - DNA, 15 bp, Homo sapiens
agccttaggaagaat

SEQ ID NO: 131887 - DNA, 15 bp, Homo sapiens
gccttaggaagaatc

SEQ ID NO: 131888 - DNA, 15 bp, Homo sapiens
ccttaggaagaatct

SEQ ID NO: 131889 - DNA, 15 bp, Homo sapiens
cttaggaagaatctc

SEQ ID NO: 131890 - DNA, 15 bp, Homo sapiens
ttaggaagaatctca

SEQ ID NO: 131891 - DNA, 15 bp, Homo sapiens
taggaagaatctcat

SEQ ID NO: 131892 - DNA, 15 bp, Homo sapiens
aggaagaatctcatc

SEQ ID NO: 131893 - DNA, 15 bp, Homo sapiens
ggaagaatctcatcc

SEQ ID NO: 131894 - DNA, 15 bp, Homo sapiens
gaagaatctcatccc

SEQ ID NO: 131895 - DNA, 15 bp, Homo sapiens
aagaatctcatcccc

SEQ ID NO: 131896 - DNA, 15 bp, Homo sapiens
agaatctcatcccca

SEQ ID NO: 131897 - DNA, 15 bp, Homo sapiens
gaatctcatccccaa

SEQ ID NO: 131898 - DNA, 15 bp, Homo sapiens
aatctcatccccaac

SEQ ID NO: 131899 - DNA, 15 bp, Homo sapiens
atctcatccccaact

SEQ ID NO: 131900 - DNA, 15 bp, Homo sapiens
tctcatccccaactt

SEQ ID NO: 131901 - DNA, 15 bp, Homo sapiens
ctcatccccaacttg

SEQ ID NO: 131902 - DNA, 15 bp, Homo sapiens
tcatccccaacttgt

SEQ ID NO: 131903 - DNA, 15 bp, Homo sapiens
catccccaacttgta

SEQ ID NO: 131904 - DNA, 15 bp, Homo sapiens
atccccaacttgtaa

SEQ ID NO: 131905 - DNA, 15 bp, Homo sapiens
tccccaacttgtaaa

SEQ ID NO: 131906 - DNA, 15 bp, Homo sapiens
ccccaacttgtaaac

SEQ ID NO: 131907 - DNA, 15 bp, Homo sapiens
cccaacttgtaaact

SEQ ID NO: 131908 - DNA, 15 bp, Homo sapiens
ccaacttgtaaactc

SEQ ID NO: 131909 - DNA, 15 bp, Homo sapiens
caacttgtaaactca

SEQ ID NO: 131910 - DNA, 15 bp, Homo sapiens
aacttgtaaactcat

SEQ ID NO: 131911 - DNA, 15 bp, Homo sapiens
acttgtaaactcatc

SEQ ID NO: 131912 - DNA, 15 bp, Homo sapiens
cttgtaaactcatct

SEQ ID NO: 131913 - DNA, 15 bp, Homo sapiens
ttgtaaactcatctt

SEQ ID NO: 131914 - DNA, 15 bp, Homo sapiens
tgtaaactcatcttt

SEQ ID NO: 131915 - DNA, 15 bp, Homo sapiens
gtaaactcatctttt

SEQ ID NO: 131916 - DNA, 15 bp, Homo sapiens
taaactcatcttttt

SEQ ID NO: 131917 - DNA, 15 bp, Homo sapiens
aaactcatctttttc

SEQ ID NO: 131918 - DNA, 15 bp, Homo sapiens
aactcatctttttcc

SEQ ID NO: 131919 - DNA, 15 bp, Homo sapiens
actcatctttttccg

SEQ ID NO: 131920 - DNA, 15 bp, Homo sapiens
ctcatctttttccgt

SEQ ID NO: 131921 - DNA, 15 bp, Homo sapiens
tcatctttttccgtt

SEQ ID NO: 131922 - DNA, 15 bp, Homo sapiens
catctttttccgttc

SEQ ID NO: 131923 - DNA, 15 bp, Homo sapiens
atctttttccgttct

SEQ ID NO: 131924 - DNA, 15 bp, Homo sapiens
tctttttccgttctt

SEQ ID NO: 131925 - DNA, 15 bp, Homo sapiens
ctttttccgttcttt

SEQ ID NO: 131926 - DNA, 15 bp, Homo sapiens
tttttccgttctttt

SEQ ID NO: 131927 - DNA, 15 bp, Homo sapiens
ttttccgttcttttt

SEQ ID NO: 131928 - DNA, 15 bp, Homo sapiens
tttccgttctttttg

SEQ ID NO: 131929 - DNA, 15 bp, Homo sapiens
ttccgttctttttgt

SEQ ID NO: 131930 - DNA, 15 bp, Homo sapiens
tccgttctttttgtg

SEQ ID NO: 131931 - DNA, 15 bp, Homo sapiens
ccgttctttttgtgc

SEQ ID NO: 131932 - DNA, 15 bp, Homo sapiens
cgttctttttgtgcc

SEQ ID NO: 131933 - DNA, 15 bp, Homo sapiens
gttctttttgtgcct

SEQ ID NO: 131934 - DNA, 15 bp, Homo sapiens
ttctttttgtgcctg

SEQ ID NO: 131935 - DNA, 15 bp, Homo sapiens
tctttttgtgcctgg

SEQ ID NO: 131936 - DNA, 15 bp, Homo sapiens
ctttttgtgcctgga

SEQ ID NO: 131937 - DNA, 15 bp, Homo sapiens
tttttgtgcctggac

SEQ ID NO: 131938 - DNA, 15 bp, Homo sapiens
ttttgtgcctggact

SEQ ID NO: 131939 - DNA, 15 bp, Homo sapiens
tttgtgcctggactt

SEQ ID NO: 131940 - DNA, 15 bp, Homo sapiens
ttgtgcctggacttc

SEQ ID NO: 131941 - DNA, 15 bp, Homo sapiens
tgtgcctggacttct

SEQ ID NO: 131942 - DNA, 15 bp, Homo sapiens
gtgcctggacttctc

SEQ ID NO: 131943 - DNA, 15 bp, Homo sapiens
tgcctggacttctca

SEQ ID NO: 131944 - DNA, 15 bp, Homo sapiens
gcctggacttctcag

SEQ ID NO: 131945 - DNA, 15 bp, Homo sapiens
cctggacttctcagg

SEQ ID NO: 131946 - DNA, 15 bp, Homo sapiens
ctggacttctcaggg

SEQ ID NO: 131947 - DNA, 15 bp, Homo sapiens
tggacttctcagggc

SEQ ID NO: 131948 - DNA, 15 bp, Homo sapiens
ggacttctcagggcc

SEQ ID NO: 131949 - DNA, 15 bp, Homo sapiens
gacttctcagggccc

SEQ ID NO: 131950 - DNA, 15 bp, Homo sapiens
acttctcagggccct

SEQ ID NO: 131951 - DNA, 15 bp, Homo sapiens
cttctcagggccctg

SEQ ID NO: 131952 - DNA, 15 bp, Homo sapiens
ttctcagggccctgc

SEQ ID NO: 131953 - DNA, 15 bp, Homo sapiens
tctcagggccctgca

SEQ ID NO: 131954 - DNA, 15 bp, Homo sapiens
ctcagggccctgcag

SEQ ID NO: 131955 - DNA, 15 bp, Homo sapiens
tcagggccctgcagg

SEQ ID NO: 131956 - DNA, 15 bp, Homo sapiens
cagggccctgcaggc

SEQ ID NO: 131957 - DNA, 15 bp, Homo sapiens
agggccctgcaggct

SEQ ID NO: 131958 - DNA, 15 bp, Homo sapiens
gggccctgcaggctg

SEQ ID NO: 131959 - DNA, 15 bp, Homo sapiens
ggccctgcaggctga

SEQ ID NO: 131960 - DNA, 15 bp, Homo sapiens
gccctgcaggctgat

SEQ ID NO: 131961 - DNA, 15 bp, Homo sapiens
ccctgcaggctgatt

SEQ ID NO: 131962 - DNA, 15 bp, Homo sapiens
cctgcaggctgattc

SEQ ID NO: 131963 - DNA, 15 bp, Homo sapiens
ctgcaggctgattct

SEQ ID NO: 131964 - DNA, 15 bp, Homo sapiens
tgcaggctgattcta

SEQ ID NO: 131965 - DNA, 15 bp, Homo sapiens
gcaggctgattctag

SEQ ID NO: 131966 - DNA, 15 bp, Homo sapiens
caggctgattctagt

SEQ ID NO: 131967 - DNA, 15 bp, Homo sapiens
aggctgattctagtc

SEQ ID NO: 131968 - DNA, 15 bp, Homo sapiens
ggctgattctagtcc

SEQ ID NO: 131969 - DNA, 15 bp, Homo sapiens
gctgattctagtccc

SEQ ID NO: 131970 - DNA, 15 bp, Homo sapiens
ctgattctagtccca

SEQ ID NO: 131971 - DNA, 15 bp, Homo sapiens
tgattctagtcccat

SEQ ID NO: 131972 - DNA, 15 bp, Homo sapiens
gattctagtcccatg

SEQ ID NO: 131973 - DNA, 15 bp, Homo sapiens
attctagtcccatgt

SEQ ID NO: 131974 - DNA, 15 bp, Homo sapiens
ttctagtcccatgtt

SEQ ID NO: 131975 - DNA, 15 bp, Homo sapiens
tctagtcccatgttg

SEQ ID NO: 131976 - DNA, 15 bp, Homo sapiens
ctagtcccatgttgt

SEQ ID NO: 131977 - DNA, 15 bp, Homo sapiens
tagtcccatgttgtg

SEQ ID NO: 131978 - DNA, 15 bp, Homo sapiens
agtcccatgttgtgt

SEQ ID NO: 131979 - DNA, 15 bp, Homo sapiens
gtcccatgttgtgtg

SEQ ID NO: 131980 - DNA, 15 bp, Homo sapiens
tcccatgttgtgtgg

SEQ ID NO: 131981 - DNA, 15 bp, Homo sapiens
cccatgttgtgtggt

SEQ ID NO: 131982 - DNA, 15 bp, Homo sapiens
ccatgttgtgtggtg

SEQ ID NO: 131983 - DNA, 15 bp, Homo sapiens
catgttgtgtggtgt

SEQ ID NO: 131984 - DNA, 15 bp, Homo sapiens
atgttgtgtggtgtt

SEQ ID NO: 131985 - DNA, 15 bp, Homo sapiens
tgttgtgtggtgttt

SEQ ID NO: 131986 - DNA, 15 bp, Homo sapiens
gttgtgtggtgtttg

SEQ ID NO: 131987 - DNA, 15 bp, Homo sapiens
ttgtgtggtgtttga

SEQ ID NO: 131988 - DNA, 15 bp, Homo sapiens
tgtgtggtgtttgaa

SEQ ID NO: 131989 - DNA, 15 bp, Homo sapiens
gtgtggtgtttgaag

SEQ ID NO: 131990 - DNA, 15 bp, Homo sapiens
tgtggtgtttgaagt

SEQ ID NO: 131991 - DNA, 15 bp, Homo sapiens
gtggtgtttgaagtg

SEQ ID NO: 131992 - DNA, 15 bp, Homo sapiens
tggtgtttgaagtgt

SEQ ID NO: 131993 - DNA, 15 bp, Homo sapiens
ggtgtttgaagtgtc

SEQ ID NO: 131994 - DNA, 15 bp, Homo sapiens
gtgtttgaagtgtct

SEQ ID NO: 131995 - DNA, 15 bp, Homo sapiens
tgtttgaagtgtctg

SEQ ID NO: 131996 - DNA, 15 bp, Homo sapiens
gtttgaagtgtctgg

SEQ ID NO: 131997 - DNA, 15 bp, Homo sapiens
tttgaagtgtctggt

SEQ ID NO: 131998 - DNA, 15 bp, Homo sapiens
ttgaagtgtctggtc

SEQ ID NO: 131999 - DNA, 15 bp, Homo sapiens
tgaagtgtctggtcc

SEQ ID NO: 132000 - DNA, 15 bp, Homo sapiens
gaagtgtctggtccc

SEQ ID NO: 132001 - DNA, 15 bp, Homo sapiens
aagtgtctggtccct

SEQ ID NO: 132002 - DNA, 15 bp, Homo sapiens
agtgtctggtccctt

SEQ ID NO: 132003 - DNA, 15 bp, Homo sapiens
gtgtctggtcccttt

SEQ ID NO: 132004 - DNA, 15 bp, Homo sapiens
tgtctggtccctttt

SEQ ID NO: 132005 - DNA, 15 bp, Homo sapiens
gtctggtcccttttt

SEQ ID NO: 132006 - DNA, 15 bp, Homo sapiens
tctggtccctttttt

SEQ ID NO: 132007 - DNA, 15 bp, Homo sapiens
ctggtcccttttttc

SEQ ID NO: 132008 - DNA, 15 bp, Homo sapiens
tggtcccttttttca

SEQ ID NO: 132009 - DNA, 15 bp, Homo sapiens
ggtcccttttttcag

SEQ ID NO: 132010 - DNA, 15 bp, Homo sapiens
gtcccttttttcagt

SEQ ID NO: 132011 - DNA, 15 bp, Homo sapiens
tcccttttttcagtg

SEQ ID NO: 132012 - DNA, 15 bp, Homo sapiens
cccttttttcagtga

SEQ ID NO: 132013 - DNA, 15 bp, Homo sapiens
ccttttttcagtgag

SEQ ID NO: 132014 - DNA, 15 bp, Homo sapiens
cttttttcagtgaga

SEQ ID NO: 132015 - DNA, 15 bp, Homo sapiens
ttttttcagtgagag

SEQ ID NO: 132016 - DNA, 15 bp, Homo sapiens
tttttcagtgagaga

SEQ ID NO: 132017 - DNA, 15 bp, Homo sapiens
ttttcagtgagagac

SEQ ID NO: 132018 - DNA, 15 bp, Homo sapiens
tttcagtgagagacc

SEQ ID NO: 132019 - DNA, 15 bp, Homo sapiens
ttcagtgagagacca

SEQ ID NO: 132020 - DNA, 15 bp, Homo sapiens
tcagtgagagaccag

SEQ ID NO: 132021 - DNA, 15 bp, Homo sapiens
cagtgagagaccagc

SEQ ID NO: 132022 - DNA, 15 bp, Homo sapiens
agtgagagaccagct

SEQ ID NO: 132023 - DNA, 15 bp, Homo sapiens
gtgagagaccagctc

SEQ ID NO: 132024 - DNA, 15 bp, Homo sapiens
tgagagaccagctca

SEQ ID NO: 132025 - DNA, 15 bp, Homo sapiens
gagagaccagctcat

SEQ ID NO: 132026 - DNA, 15 bp, Homo sapiens
agagaccagctcatc

SEQ ID NO: 132027 - DNA, 15 bp, Homo sapiens
gagaccagctcatcc

SEQ ID NO: 132028 - DNA, 15 bp, Homo sapiens
agaccagctcatcct

SEQ ID NO: 132029 - DNA, 15 bp, Homo sapiens
gaccagctcatcctt

SEQ ID NO: 132030 - DNA, 15 bp, Homo sapiens
accagctcatccttg

SEQ ID NO: 132031 - DNA, 15 bp, Homo sapiens
ccagctcatccttgg

SEQ ID NO: 132032 - DNA, 15 bp, Homo sapiens
cagctcatccttggg

SEQ ID NO: 132033 - DNA, 15 bp, Homo sapiens
agctcatccttggga

SEQ ID NO: 132034 - DNA, 15 bp, Homo sapiens
gctcatccttgggaa

SEQ ID NO: 132035 - DNA, 15 bp, Homo sapiens
ctcatccttgggaac

SEQ ID NO: 132036 - DNA, 15 bp, Homo sapiens
tcatccttgggaact

SEQ ID NO: 132037 - DNA, 15 bp, Homo sapiens
catccttgggaactg

SEQ ID NO: 132038 - DNA, 15 bp, Homo sapiens
atccttgggaactga

SEQ ID NO: 132039 - DNA, 15 bp, Homo sapiens
tccttgggaactgaa

SEQ ID NO: 132040 - DNA, 15 bp, Homo sapiens
ccttgggaactgaat

SEQ ID NO: 132041 - DNA, 15 bp, Homo sapiens
cttgggaactgaatg

SEQ ID NO: 132042 - DNA, 15 bp, Homo sapiens
ttgggaactgaatgc

SEQ ID NO: 132043 - DNA, 15 bp, Homo sapiens
tgggaactgaatgcc

SEQ ID NO: 132044 - DNA, 15 bp, Homo sapiens
gggaactgaatgcct

SEQ ID NO: 132045 - DNA, 15 bp, Homo sapiens
ggaactgaatgcctc

SEQ ID NO: 132046 - DNA, 15 bp, Homo sapiens
gaactgaatgcctca

SEQ ID NO: 132047 - DNA, 15 bp, Homo sapiens
aactgaatgcctcaa

SEQ ID NO: 132048 - DNA, 15 bp, Homo sapiens
actgaatgcctcaaa

SEQ ID NO: 132049 - DNA, 15 bp, Homo sapiens
ctgaatgcctcaaac

SEQ ID NO: 132050 - DNA, 15 bp, Homo sapiens
tgaatgcctcaaact

SEQ ID NO: 132051 - DNA, 15 bp, Homo sapiens
gaatgcctcaaactc

SEQ ID NO: 132052 - DNA, 15 bp, Homo sapiens
aatgcctcaaactct

SEQ ID NO: 132053 - DNA, 15 bp, Homo sapiens
atgcctcaaactctc

SEQ ID NO: 132054 - DNA, 15 bp, Homo sapiens
tgcctcaaactctct

SEQ ID NO: 132055 - DNA, 15 bp, Homo sapiens
gcctcaaactctctt

SEQ ID NO: 132056 - DNA, 15 bp, Homo sapiens
cctcaaactctcttt

SEQ ID NO: 132057 - DNA, 15 bp, Homo sapiens
ctcaaactctctttt

SEQ ID NO: 132058 - DNA, 15 bp, Homo sapiens
tcaaactctcttttc

SEQ ID NO: 132059 - DNA, 15 bp, Homo sapiens
caaactctcttttct

SEQ ID NO: 132060 - DNA, 15 bp, Homo sapiens
aaactctcttttctt

SEQ ID NO: 132061 - DNA, 15 bp, Homo sapiens
aactctcttttcttt

SEQ ID NO: 132062 - DNA, 15 bp, Homo sapiens
actctcttttctttt

SEQ ID NO: 132063 - DNA, 15 bp, Homo sapiens
ctctcttttcttttt

SEQ ID NO: 132064 - DNA, 15 bp, Homo sapiens
tctcttttctttttc

SEQ ID NO: 132065 - DNA, 15 bp, Homo sapiens
ctcttttctttttct

SEQ ID NO: 132066 - DNA, 15 bp, Homo sapiens
tcttttctttttctc

SEQ ID NO: 132067 - DNA, 15 bp, Homo sapiens
cttttctttttctct

SEQ ID NO: 132068 - DNA, 15 bp, Homo sapiens
ttttctttttctctc

SEQ ID NO: 132069 - DNA, 15 bp, Homo sapiens
tttctttttctctct

SEQ ID NO: 132070 - DNA, 15 bp, Homo sapiens
ttctttttctctctt

SEQ ID NO: 132071 - DNA, 15 bp, Homo sapiens
tctttttctctcttc

SEQ ID NO: 132072 - DNA, 15 bp, Homo sapiens
ctttttctctcttcc

SEQ ID NO: 132073 - DNA, 15 bp, Homo sapiens
tttttctctcttccc

SEQ ID NO: 132074 - DNA, 15 bp, Homo sapiens
ttttctctcttcccc

SEQ ID NO: 132075 - DNA, 15 bp, Homo sapiens
tttctctcttcccct

SEQ ID NO: 132076 - DNA, 15 bp, Homo sapiens
ttctctcttcccctt

SEQ ID NO: 132077 - DNA, 15 bp, Homo sapiens
tctctcttccccttc

SEQ ID NO: 132078 - DNA, 15 bp, Homo sapiens
ctctcttccccttct

SEQ ID NO: 132079 - DNA, 15 bp, Homo sapiens
tctcttccccttctg

SEQ ID NO: 132080 - DNA, 15 bp, Homo sapiens
ctcttccccttctgt

SEQ ID NO: 132081 - DNA, 15 bp, Homo sapiens
tcttccccttctgtt

SEQ ID NO: 132082 - DNA, 15 bp, Homo sapiens
cttccccttctgttt

SEQ ID NO: 132083 - DNA, 15 bp, Homo sapiens
ttccccttctgtttg

SEQ ID NO: 132084 - DNA, 15 bp, Homo sapiens
tccccttctgtttga

SEQ ID NO: 132085 - DNA, 15 bp, Homo sapiens
ccccttctgtttgat

SEQ ID NO: 132086 - DNA, 15 bp, Homo sapiens
cccttctgtttgatg

SEQ ID NO: 132087 - DNA, 15 bp, Homo sapiens
ccttctgtttgatgt

SEQ ID NO: 132088 - DNA, 15 bp, Homo sapiens
cttctgtttgatgta

SEQ ID NO: 132089 - DNA, 15 bp, Homo sapiens
ttctgtttgatgtag

SEQ ID NO: 132090 - DNA, 15 bp, Homo sapiens
tctgtttgatgtagt

SEQ ID NO: 132091 - DNA, 15 bp, Homo sapiens
ctgtttgatgtagtc

SEQ ID NO: 132092 - DNA, 15 bp, Homo sapiens
tgtttgatgtagtct

SEQ ID NO: 132093 - DNA, 15 bp, Homo sapiens
gtttgatgtagtctt

SEQ ID NO: 132094 - DNA, 15 bp, Homo sapiens
tttgatgtagtcttt

SEQ ID NO: 132095 - DNA, 15 bp, Homo sapiens
ttgatgtagtctttc

SEQ ID NO: 132096 - DNA, 15 bp, Homo sapiens
tgatgtagtctttcc

SEQ ID NO: 132097 - DNA, 15 bp, Homo sapiens
gatgtagtctttcct

SEQ ID NO: 132098 - DNA, 15 bp, Homo sapiens
atgtagtctttcctg

SEQ ID NO: 132099 - DNA, 15 bp, Homo sapiens
tgtagtctttcctgt

SEQ ID NO: 132100 - DNA, 15 bp, Homo sapiens
gtagtctttcctgtt

SEQ ID NO: 132101 - DNA, 15 bp, Homo sapiens
tagtctttcctgttt

SEQ ID NO: 132102 - DNA, 15 bp, Homo sapiens
agtctttcctgtttc

SEQ ID NO: 132103 - DNA, 15 bp, Homo sapiens
gtctttcctgtttct

SEQ ID NO: 132104 - DNA, 15 bp, Homo sapiens
tctttcctgtttctg

SEQ ID NO: 132105 - DNA, 15 bp, Homo sapiens
ctttcctgtttctgg

SEQ ID NO: 132106 - DNA, 15 bp, Homo sapiens
tttcctgtttctgga

SEQ ID NO: 132107 - DNA, 15 bp, Homo sapiens
ttcctgtttctggac

SEQ ID NO: 132108 - DNA, 15 bp, Homo sapiens
tcctgtttctggact

SEQ ID NO: 132109 - DNA, 15 bp, Homo sapiens
cctgtttctggactc

SEQ ID NO: 132110 - DNA, 15 bp, Homo sapiens
ctgtttctggactct

SEQ ID NO: 132111 - DNA, 15 bp, Homo sapiens
tgtttctggactctg

SEQ ID NO: 132112 - DNA, 15 bp, Homo sapiens
gtttctggactctgt

SEQ ID NO: 132113 - DNA, 15 bp, Homo sapiens
tttctggactctgtt

SEQ ID NO: 132114 - DNA, 15 bp, Homo sapiens
ttctggactctgttt

SEQ ID NO: 132115 - DNA, 15 bp, Homo sapiens
tctggactctgtttc

SEQ ID NO: 132116 - DNA, 15 bp, Homo sapiens
ctggactctgtttct

SEQ ID NO: 132117 - DNA, 15 bp, Homo sapiens
tggactctgtttctt

SEQ ID NO: 132118 - DNA, 15 bp, Homo sapiens
ggactctgtttcttc

SEQ ID NO: 132119 - DNA, 15 bp, Homo sapiens
gactctgtttcttca

SEQ ID NO: 132120 - DNA, 15 bp, Homo sapiens
actctgtttcttcat

SEQ ID NO: 132121 - DNA, 15 bp, Homo sapiens
ctctgtttcttcata

SEQ ID NO: 132122 - DNA, 15 bp, Homo sapiens
tctgtttcttcatac

SEQ ID NO: 132123 - DNA, 15 bp, Homo sapiens
ctgtttcttcatact

SEQ ID NO: 132124 - DNA, 15 bp, Homo sapiens
tgtttcttcatactt

SEQ ID NO: 132125 - DNA, 15 bp, Homo sapiens
gtttcttcatacttc

SEQ ID NO: 132126 - DNA, 15 bp, Homo sapiens
tttcttcatacttcc

SEQ ID NO: 132127 - DNA, 15 bp, Homo sapiens
ttcttcatacttcct

SEQ ID NO: 132128 - DNA, 15 bp, Homo sapiens
tcttcatacttccta

SEQ ID NO: 132129 - DNA, 15 bp, Homo sapiens
cttcatacttcctat

SEQ ID NO: 132130 - DNA, 15 bp, Homo sapiens
ttcatacttcctatc

SEQ ID NO: 132131 - DNA, 15 bp, Homo sapiens
tcatacttcctatct

SEQ ID NO: 132132 - DNA, 15 bp, Homo sapiens
catacttcctatctc

SEQ ID NO: 132133 - DNA, 15 bp, Homo sapiens
atacttcctatctct

SEQ ID NO: 132134 - DNA, 15 bp, Homo sapiens
tacttcctatctctt

SEQ ID NO: 132135 - DNA, 15 bp, Homo sapiens
acttcctatctctta

SEQ ID NO: 132136 - DNA, 15 bp, Homo sapiens
cttcctatctcttac

SEQ ID NO: 132137 - DNA, 15 bp, Homo sapiens
ttcctatctcttacc

SEQ ID NO: 132138 - DNA, 15 bp, Homo sapiens
tcctatctcttacct

SEQ ID NO: 132139 - DNA, 15 bp, Homo sapiens
cctatctcttacctt

SEQ ID NO: 132140 - DNA, 15 bp, Homo sapiens
ctatctcttaccttc

SEQ ID NO: 132141 - DNA, 15 bp, Homo sapiens
tatctcttaccttct

SEQ ID NO: 132142 - DNA, 15 bp, Homo sapiens
atctcttaccttctt

SEQ ID NO: 132143 - DNA, 15 bp, Homo sapiens
tctcttaccttcttt

SEQ ID NO: 132144 - DNA, 15 bp, Homo sapiens
ctcttaccttctttt

SEQ ID NO: 132145 - DNA, 15 bp, Homo sapiens
tcttaccttcttttc

SEQ ID NO: 132146 - DNA, 15 bp, Homo sapiens
cttaccttcttttca

SEQ ID NO: 132147 - DNA, 15 bp, Homo sapiens
ttaccttcttttcac

SEQ ID NO: 132148 - DNA, 15 bp, Homo sapiens
taccttcttttcact

SEQ ID NO: 132149 - DNA, 15 bp, Homo sapiens
accttcttttcactc

SEQ ID NO: 132150 - DNA, 15 bp, Homo sapiens
ccttcttttcactcc

SEQ ID NO: 132151 - DNA, 15 bp, Homo sapiens
cttcttttcactcct

SEQ ID NO: 132152 - DNA, 15 bp, Homo sapiens
ttcttttcactcctt

SEQ ID NO: 132153 - DNA, 15 bp, Homo sapiens
tcttttcactccttt

SEQ ID NO: 132154 - DNA, 15 bp, Homo sapiens
cttttcactcctttt

SEQ ID NO: 132155 - DNA, 15 bp, Homo sapiens
ttttcactccttttg

SEQ ID NO: 132156 - DNA, 15 bp, Homo sapiens
tttcactccttttgt

SEQ ID NO: 132157 - DNA, 15 bp, Homo sapiens
ttcactccttttgtc

SEQ ID NO: 132158 - DNA, 15 bp, Homo sapiens
tcactccttttgtct

SEQ ID NO: 132159 - DNA, 15 bp, Homo sapiens
cactccttttgtctt

SEQ ID NO: 132160 - DNA, 15 bp, Homo sapiens
actccttttgtcttc

SEQ ID NO: 132161 - DNA, 15 bp, Homo sapiens
ctccttttgtcttcc

SEQ ID NO: 132162 - DNA, 15 bp, Homo sapiens
tccttttgtcttcca

SEQ ID NO: 132163 - DNA, 15 bp, Homo sapiens
ccttttgtcttccag

SEQ ID NO: 132164 - DNA, 15 bp, Homo sapiens
cttttgtcttccagc

SEQ ID NO: 132165 - DNA, 15 bp, Homo sapiens
ttttgtcttccagct

SEQ ID NO: 132166 - DNA, 15 bp, Homo sapiens
tttgtcttccagctg

SEQ ID NO: 132167 - DNA, 15 bp, Homo sapiens
ttgtcttccagctgt

SEQ ID NO: 132168 - DNA, 15 bp, Homo sapiens
tgtcttccagctgtc

SEQ ID NO: 132169 - DNA, 15 bp, Homo sapiens
gtcttccagctgtcc

SEQ ID NO: 132170 - DNA, 15 bp, Homo sapiens
tcttccagctgtcct

SEQ ID NO: 132171 - DNA, 15 bp, Homo sapiens
cttccagctgtcctc

SEQ ID NO: 132172 - DNA, 15 bp, Homo sapiens
ttccagctgtcctct

SEQ ID NO: 132173 - DNA, 15 bp, Homo sapiens
tccagctgtcctctc

SEQ ID NO: 132174 - DNA, 15 bp, Homo sapiens
ccagctgtcctctct

SEQ ID NO: 132175 - DNA, 15 bp, Homo sapiens
cagctgtcctctctc

SEQ ID NO: 132176 - DNA, 15 bp, Homo sapiens
agctgtcctctctca

SEQ ID NO: 132177 - DNA, 15 bp, Homo sapiens
gctgtcctctctcat

SEQ ID NO: 132178 - DNA, 15 bp, Homo sapiens
ctgtcctctctcatt

SEQ ID NO: 132179 - DNA, 15 bp, Homo sapiens
tgtcctctctcattt

SEQ ID NO: 132180 - DNA, 15 bp, Homo sapiens
gtcctctctcatttt

SEQ ID NO: 132181 - DNA, 15 bp, Homo sapiens
tcctctctcattttt

SEQ ID NO: 132182 - DNA, 15 bp, Homo sapiens
cctctctcatttttc

SEQ ID NO: 132183 - DNA, 15 bp, Homo sapiens
ctctctcatttttct

SEQ ID NO: 132184 - DNA, 15 bp, Homo sapiens
tctctcatttttctg

SEQ ID NO: 132185 - DNA, 15 bp, Homo sapiens
ctctcatttttctgc

SEQ ID NO: 132186 - DNA, 15 bp, Homo sapiens
tctcatttttctgcc

SEQ ID NO: 132187 - DNA, 15 bp, Homo sapiens
ctcatttttctgcct

SEQ ID NO: 132188 - DNA, 15 bp, Homo sapiens
tcatttttctgcctc

SEQ ID NO: 132189 - DNA, 15 bp, Homo sapiens
catttttctgcctct

SEQ ID NO: 132190 - DNA, 15 bp, Homo sapiens
atttttctgcctctc

SEQ ID NO: 132191 - DNA, 15 bp, Homo sapiens
tttttctgcctctct

SEQ ID NO: 132192 - DNA, 15 bp, Homo sapiens
ttttctgcctctctg

SEQ ID NO: 132193 - DNA, 15 bp, Homo sapiens
tttctgcctctctgg

SEQ ID NO: 132194 - DNA, 15 bp, Homo sapiens
ttctgcctctctggt

SEQ ID NO: 132195 - DNA, 15 bp, Homo sapiens
tctgcctctctggtc

SEQ ID NO: 132196 - DNA, 15 bp, Homo sapiens
ctgcctctctggtct

SEQ ID NO: 132197 - DNA, 15 bp, Homo sapiens
tgcctctctggtctt

SEQ ID NO: 132198 - DNA, 15 bp, Homo sapiens
gcctctctggtcttc

SEQ ID NO: 132199 - DNA, 15 bp, Homo sapiens
cctctctggtcttca

SEQ ID NO: 132200 - DNA, 15 bp, Homo sapiens
ctctctggtcttcag

SEQ ID NO: 132201 - DNA, 15 bp, Homo sapiens
tctctggtcttcagg

SEQ ID NO: 132202 - DNA, 15 bp, Homo sapiens
ctctggtcttcaggt

SEQ ID NO: 132203 - DNA, 15 bp, Homo sapiens
tctggtcttcaggta

SEQ ID NO: 132204 - DNA, 15 bp, Homo sapiens
ctggtcttcaggtag

SEQ ID NO: 132205 - DNA, 15 bp, Homo sapiens
tggtcttcaggtaga

SEQ ID NO: 132206 - DNA, 15 bp, Homo sapiens
ggtcttcaggtagag

SEQ ID NO: 132207 - DNA, 15 bp, Homo sapiens
gtcttcaggtagagt

SEQ ID NO: 132208 - DNA, 15 bp, Homo sapiens
tcttcaggtagagtt

SEQ ID NO: 132209 - DNA, 15 bp, Homo sapiens
cttcaggtagagttt

SEQ ID NO: 132210 - DNA, 15 bp, Homo sapiens
ttcaggtagagtttt

SEQ ID NO: 132211 - DNA, 15 bp, Homo sapiens
tcaggtagagttttc

SEQ ID NO: 132212 - DNA, 15 bp, Homo sapiens
caggtagagttttca

SEQ ID NO: 132213 - DNA, 15 bp, Homo sapiens
aggtagagttttcat

SEQ ID NO: 132214 - DNA, 15 bp, Homo sapiens
ggtagagttttcatc

SEQ ID NO: 132215 - DNA, 15 bp, Homo sapiens
gtagagttttcatct

SEQ ID NO: 132216 - DNA, 15 bp, Homo sapiens
tagagttttcatctc

SEQ ID NO: 132217 - DNA, 15 bp, Homo sapiens
agagttttcatctca

SEQ ID NO: 132218 - DNA, 15 bp, Homo sapiens
gagttttcatctcag

SEQ ID NO: 132219 - DNA, 15 bp, Homo sapiens
agttttcatctcagc

SEQ ID NO: 132220 - DNA, 15 bp, Homo sapiens
gttttcatctcagct

SEQ ID NO: 132221 - DNA, 15 bp, Homo sapiens
ttttcatctcagcta

SEQ ID NO: 132222 - DNA, 15 bp, Homo sapiens
tttcatctcagctat

SEQ ID NO: 132223 - DNA, 15 bp, Homo sapiens
ttcatctcagctatc

SEQ ID NO: 132224 - DNA, 15 bp, Homo sapiens
tcatctcagctatct

SEQ ID NO: 132225 - DNA, 15 bp, Homo sapiens
catctcagctatctt

SEQ ID NO: 132226 - DNA, 15 bp, Homo sapiens
atctcagctatcttc

SEQ ID NO: 132227 - DNA, 15 bp, Homo sapiens
tctcagctatcttct

SEQ ID NO: 132228 - DNA, 15 bp, Homo sapiens
ctcagctatcttctt

SEQ ID NO: 132229 - DNA, 15 bp, Homo sapiens
tcagctatcttcttg

SEQ ID NO: 132230 - DNA, 15 bp, Homo sapiens
cagctatcttcttgc

SEQ ID NO: 132231 - DNA, 15 bp, Homo sapiens
agctatcttcttgct

SEQ ID NO: 132232 - DNA, 15 bp, Homo sapiens
gctatcttcttgctt

SEQ ID NO: 132233 - DNA, 15 bp, Homo sapiens
ctatcttcttgcttt

SEQ ID NO: 132234 - DNA, 15 bp, Homo sapiens
tatcttcttgctttt

SEQ ID NO: 132235 - DNA, 15 bp, Homo sapiens
atcttcttgcttttt

SEQ ID NO: 132236 - DNA, 15 bp, Homo sapiens
tcttcttgctttttc

SEQ ID NO: 132237 - DNA, 15 bp, Homo sapiens
cttcttgctttttct

SEQ ID NO: 132238 - DNA, 15 bp, Homo sapiens
ttcttgctttttctg

SEQ ID NO: 132239 - DNA, 15 bp, Homo sapiens
tcttgctttttctga

SEQ ID NO: 132240 - DNA, 15 bp, Homo sapiens
cttgctttttctgat

SEQ ID NO: 132241 - DNA, 15 bp, Homo sapiens
ttgctttttctgatg

SEQ ID NO: 132242 - DNA, 15 bp, Homo sapiens
tgctttttctgatgt

SEQ ID NO: 132243 - DNA, 15 bp, Homo sapiens
gctttttctgatgtt

SEQ ID NO: 132244 - DNA, 15 bp, Homo sapiens
ctttttctgatgttg

SEQ ID NO: 132245 - DNA, 15 bp, Homo sapiens
tttttctgatgttgg

SEQ ID NO: 132246 - DNA, 15 bp, Homo sapiens
ttttctgatgttggt

SEQ ID NO: 132247 - DNA, 15 bp, Homo sapiens
tttctgatgttggtt

SEQ ID NO: 132248 - DNA, 15 bp, Homo sapiens
ttctgatgttggttc

SEQ ID NO: 132249 - DNA, 15 bp, Homo sapiens
tctgatgttggttct

SEQ ID NO: 132250 - DNA, 15 bp, Homo sapiens
ctgatgttggttctt

SEQ ID NO: 132251 - DNA, 15 bp, Homo sapiens
tgatgttggttcttt

SEQ ID NO: 132252 - DNA, 15 bp, Homo sapiens
gatgttggttctttg

SEQ ID NO: 132253 - DNA, 15 bp, Homo sapiens
atgttggttctttgt

SEQ ID NO: 132254 - DNA, 15 bp, Homo sapiens
tgttggttctttgtt

SEQ ID NO: 132255 - DNA, 15 bp, Homo sapiens
gttggttctttgttt

SEQ ID NO: 132256 - DNA, 15 bp, Homo sapiens
ttggttctttgtttc

SEQ ID NO: 132257 - DNA, 15 bp, Homo sapiens
tggttctttgtttct

SEQ ID NO: 132258 - DNA, 15 bp, Homo sapiens
ggttctttgtttctt

SEQ ID NO: 132259 - DNA, 15 bp, Homo sapiens
gttctttgtttcttc

SEQ ID NO: 132260 - DNA, 15 bp, Homo sapiens
ttctttgtttcttct

SEQ ID NO: 132261 - DNA, 15 bp, Homo sapiens
tctttgtttcttctt

SEQ ID NO: 132262 - DNA, 15 bp, Homo sapiens
ctttgtttcttcttc

SEQ ID NO: 132263 - DNA, 15 bp, Homo sapiens
tttgtttcttcttct

SEQ ID NO: 132264 - DNA, 15 bp, Homo sapiens
ttgtttcttcttctc

SEQ ID NO: 132265 - DNA, 15 bp, Homo sapiens
tgtttcttcttctca

SEQ ID NO: 132266 - DNA, 15 bp, Homo sapiens
gtttcttcttctcat

SEQ ID NO: 132267 - DNA, 15 bp, Homo sapiens
tttcttcttctcatt

SEQ ID NO: 132268 - DNA, 15 bp, Homo sapiens
ttcttcttctcattc

SEQ ID NO: 132269 - DNA, 15 bp, Homo sapiens
tcttcttctcattct

SEQ ID NO: 132270 - DNA, 15 bp, Homo sapiens
cttcttctcattctg

SEQ ID NO: 132271 - DNA, 15 bp, Homo sapiens
ttcttctcattctgt

SEQ ID NO: 132272 - DNA, 15 bp, Homo sapiens
tcttctcattctgtt

SEQ ID NO: 132273 - DNA, 15 bp, Homo sapiens
cttctcattctgttc

SEQ ID NO: 132274 - DNA, 15 bp, Homo sapiens
ttctcattctgttca

SEQ ID NO: 132275 - DNA, 15 bp, Homo sapiens
tctcattctgttcag

SEQ ID NO: 132276 - DNA, 15 bp, Homo sapiens
ctcattctgttcagg

SEQ ID NO: 132277 - DNA, 15 bp, Homo sapiens
tcattctgttcaggt

SEQ ID NO: 132278 - DNA, 15 bp, Homo sapiens
cattctgttcaggtc

SEQ ID NO: 132279 - DNA, 15 bp, Homo sapiens
attctgttcaggtcc

SEQ ID NO: 132280 - DNA, 15 bp, Homo sapiens
ttctgttcaggtcca

SEQ ID NO: 132281 - DNA, 15 bp, Homo sapiens
tctgttcaggtccaa

SEQ ID NO: 132282 - DNA, 15 bp, Homo sapiens
ctgttcaggtccaaa

SEQ ID NO: 132283 - DNA, 15 bp, Homo sapiens
tgttcaggtccaaaa

SEQ ID NO: 132284 - DNA, 15 bp, Homo sapiens
gttcaggtccaaaat

SEQ ID NO: 132285 - DNA, 15 bp, Homo sapiens
ttcaggtccaaaatt

SEQ ID NO: 132286 - DNA, 15 bp, Homo sapiens
tcaggtccaaaattc

SEQ ID NO: 132287 - DNA, 15 bp, Homo sapiens
caggtccaaaattca

SEQ ID NO: 132288 - DNA, 15 bp, Homo sapiens
aggtccaaaattcat

SEQ ID NO: 132289 - DNA, 15 bp, Homo sapiens
ggtccaaaattcatt

SEQ ID NO: 132290 - DNA, 15 bp, Homo sapiens
gtccaaaattcattt

SEQ ID NO: 132291 - DNA, 15 bp, Homo sapiens
tccaaaattcatttg

SEQ ID NO: 132292 - DNA, 15 bp, Homo sapiens
ccaaaattcatttgg

SEQ ID NO: 132293 - DNA, 15 bp, Homo sapiens
caaaattcatttggg

SEQ ID NO: 132294 - DNA, 15 bp, Homo sapiens
aaaattcatttgggt

SEQ ID NO: 132295 - DNA, 15 bp, Homo sapiens
aaattcatttgggtc

SEQ ID NO: 132296 - DNA, 15 bp, Homo sapiens
aattcatttgggtca

SEQ ID NO: 132297 - DNA, 15 bp, Homo sapiens
attcatttgggtcaa

SEQ ID NO: 132298 - DNA, 15 bp, Homo sapiens
ttcatttgggtcaat

SEQ ID NO: 132299 - DNA, 15 bp, Homo sapiens
tcatttgggtcaatg

SEQ ID NO: 132300 - DNA, 15 bp, Homo sapiens
catttgggtcaatgt

SEQ ID NO: 132301 - DNA, 15 bp, Homo sapiens
atttgggtcaatgtt

SEQ ID NO: 132302 - DNA, 15 bp, Homo sapiens
tttgggtcaatgtta

SEQ ID NO: 132303 - DNA, 15 bp, Homo sapiens
ttgggtcaatgttat

SEQ ID NO: 132304 - DNA, 15 bp, Homo sapiens
tgggtcaatgttatg

SEQ ID NO: 132305 - DNA, 15 bp, Homo sapiens
gggtcaatgttatgt

SEQ ID NO: 132306 - DNA, 15 bp, Homo sapiens
ggtcaatgttatgtc

SEQ ID NO: 132307 - DNA, 15 bp, Homo sapiens
gtcaatgttatgtct

SEQ ID NO: 132308 - DNA, 15 bp, Homo sapiens
tcaatgttatgtctt

SEQ ID NO: 132309 - DNA, 15 bp, Homo sapiens
caatgttatgtctta

SEQ ID NO: 132310 - DNA, 15 bp, Homo sapiens
aatgttatgtcttag

SEQ ID NO: 132311 - DNA, 15 bp, Homo sapiens
atgttatgtcttagt

SEQ ID NO: 132312 - DNA, 15 bp, Homo sapiens
tgttatgtcttagtg

SEQ ID NO: 132313 - DNA, 15 bp, Homo sapiens
gttatgtcttagtgt

SEQ ID NO: 132314 - DNA, 15 bp, Homo sapiens
ttatgtcttagtgtt

SEQ ID NO: 132315 - DNA, 15 bp, Homo sapiens
tatgtcttagtgtta

SEQ ID NO: 132316 - DNA, 15 bp, Homo sapiens
atgtcttagtgttat

SEQ ID NO: 132317 - DNA, 15 bp, Homo sapiens
tgtcttagtgttatc

SEQ ID NO: 132318 - DNA, 15 bp, Homo sapiens
gtcttagtgttatct

SEQ ID NO: 132319 - DNA, 15 bp, Homo sapiens
tcttagtgttatctt

SEQ ID NO: 132320 - DNA, 15 bp, Homo sapiens
cttagtgttatcttc

SEQ ID NO: 132321 - DNA, 15 bp, Homo sapiens
ttagtgttatcttcc

SEQ ID NO: 132322 - DNA, 15 bp, Homo sapiens
tagtgttatcttcca

SEQ ID NO: 132323 - DNA, 15 bp, Homo sapiens
agtgttatcttccat

SEQ ID NO: 132324 - DNA, 15 bp, Homo sapiens
gtgttatcttccatt

SEQ ID NO: 132325 - DNA, 15 bp, Homo sapiens
tgttatcttccattt

SEQ ID NO: 132326 - DNA, 15 bp, Homo sapiens
gttatcttccatttc

SEQ ID NO: 132327 - DNA, 15 bp, Homo sapiens
ttatcttccatttcc

SEQ ID NO: 132328 - DNA, 15 bp, Homo sapiens
tatcttccatttcct

SEQ ID NO: 132329 - DNA, 15 bp, Homo sapiens
atcttccatttcctt

SEQ ID NO: 132330 - DNA, 15 bp, Homo sapiens
tcttccatttccttc

SEQ ID NO: 132331 - DNA, 15 bp, Homo sapiens
cttccatttccttct

SEQ ID NO: 132332 - DNA, 15 bp, Homo sapiens
ttccatttccttctg

SEQ ID NO: 132333 - DNA, 15 bp, Homo sapiens
tccatttccttctga

SEQ ID NO: 132334 - DNA, 15 bp, Homo sapiens
ccatttccttctgag

SEQ ID NO: 132335 - DNA, 15 bp, Homo sapiens
catttccttctgagc

SEQ ID NO: 132336 - DNA, 15 bp, Homo sapiens
atttccttctgagct

SEQ ID NO: 132337 - DNA, 15 bp, Homo sapiens
tttccttctgagctt

SEQ ID NO: 132338 - DNA, 15 bp, Homo sapiens
ttccttctgagcttc

SEQ ID NO: 132339 - DNA, 15 bp, Homo sapiens
tccttctgagcttca

SEQ ID NO: 132340 - DNA, 15 bp, Homo sapiens
ccttctgagcttcaa

SEQ ID NO: 132341 - DNA, 15 bp, Homo sapiens
cttctgagcttcaaa

SEQ ID NO: 132342 - DNA, 15 bp, Homo sapiens
ttctgagcttcaaag

SEQ ID NO: 132343 - DNA, 15 bp, Homo sapiens
tctgagcttcaaagc

SEQ ID NO: 132344 - DNA, 15 bp, Homo sapiens
ctgagcttcaaagcc

SEQ ID NO: 132345 - DNA, 15 bp, Homo sapiens
tgagcttcaaagcca

SEQ ID NO: 132346 - DNA, 15 bp, Homo sapiens
gagcttcaaagccag

SEQ ID NO: 132347 - DNA, 15 bp, Homo sapiens
agcttcaaagccagg

SEQ ID NO: 132348 - DNA, 15 bp, Homo sapiens
gcttcaaagccaggc

SEQ ID NO: 132349 - DNA, 15 bp, Homo sapiens
cttcaaagccaggct

SEQ ID NO: 132350 - DNA, 15 bp, Homo sapiens
ttcaaagccaggctg

SEQ ID NO: 132351 - DNA, 15 bp, Homo sapiens
tcaaagccaggctga

SEQ ID NO: 132352 - DNA, 15 bp, Homo sapiens
caaagccaggctgac

SEQ ID NO: 132353 - DNA, 15 bp, Homo sapiens
aaagccaggctgact

SEQ ID NO: 132354 - DNA, 15 bp, Homo sapiens
aagccaggctgactg

SEQ ID NO: 132355 - DNA, 15 bp, Homo sapiens
agccaggctgactgt

SEQ ID NO: 132356 - DNA, 15 bp, Homo sapiens
gccaggctgactgtg

SEQ ID NO: 132357 - DNA, 15 bp, Homo sapiens
ccaggctgactgtgc

SEQ ID NO: 132358 - DNA, 15 bp, Homo sapiens
caggctgactgtgcc

SEQ ID NO: 132359 - DNA, 15 bp, Homo sapiens
aggctgactgtgccc

SEQ ID NO: 132360 - DNA, 15 bp, Homo sapiens
ggctgactgtgccct

SEQ ID NO: 132361 - DNA, 15 bp, Homo sapiens
gctgactgtgccctt

SEQ ID NO: 132362 - DNA, 15 bp, Homo sapiens
ctgactgtgcccttc

SEQ ID NO: 132363 - DNA, 15 bp, Homo sapiens
tgactgtgcccttcc

SEQ ID NO: 132364 - DNA, 15 bp, Homo sapiens
gactgtgcccttcca

SEQ ID NO: 132365 - DNA, 15 bp, Homo sapiens
actgtgcccttccac

SEQ ID NO: 132366 - DNA, 15 bp, Homo sapiens
ctgtgcccttccacg

SEQ ID NO: 132367 - DNA, 15 bp, Homo sapiens
tgtgcccttccacgc

SEQ ID NO: 132368 - DNA, 15 bp, Homo sapiens
gtgcccttccacgcc

SEQ ID NO: 132369 - DNA, 15 bp, Homo sapiens
tgcccttccacgccc

SEQ ID NO: 132370 - DNA, 15 bp, Homo sapiens
gcccttccacgccct

SEQ ID NO: 132371 - DNA, 15 bp, Homo sapiens
cccttccacgccctg

SEQ ID NO: 132372 - DNA, 15 bp, Homo sapiens
ccttccacgccctgg

SEQ ID NO: 132373 - DNA, 15 bp, Homo sapiens
cttccacgccctggc

SEQ ID NO: 132374 - DNA, 15 bp, Homo sapiens
ttccacgccctggcc

SEQ ID NO: 132375 - DNA, 15 bp, Homo sapiens
tccacgccctggcca

SEQ ID NO: 132376 - DNA, 15 bp, Homo sapiens
ccacgccctggccag

SEQ ID NO: 132377 - DNA, 15 bp, Homo sapiens
cacgccctggccagt

SEQ ID NO: 132378 - DNA, 15 bp, Homo sapiens
acgccctggccagtg

SEQ ID NO: 132379 - DNA, 15 bp, Homo sapiens
cgccctggccagtgt

SEQ ID NO: 132380 - DNA, 15 bp, Homo sapiens
gccctggccagtgtg

SEQ ID NO: 132381 - DNA, 15 bp, Homo sapiens
ccctggccagtgtga

SEQ ID NO: 132382 - DNA, 15 bp, Homo sapiens
cctggccagtgtgac

SEQ ID NO: 132383 - DNA, 15 bp, Homo sapiens
ctggccagtgtgacc

SEQ ID NO: 132384 - DNA, 15 bp, Homo sapiens
tggccagtgtgacca

SEQ ID NO: 132385 - DNA, 15 bp, Homo sapiens
ggccagtgtgaccag

SEQ ID NO: 132386 - DNA, 15 bp, Homo sapiens
gccagtgtgaccagg

SEQ ID NO: 132387 - DNA, 15 bp, Homo sapiens
ccagtgtgaccagga

SEQ ID NO: 132388 - DNA, 15 bp, Homo sapiens
cagtgtgaccaggac

SEQ ID NO: 132389 - DNA, 15 bp, Homo sapiens
agtgtgaccaggaca

SEQ ID NO: 132390 - DNA, 15 bp, Homo sapiens
gtgtgaccaggacat

SEQ ID NO: 132391 - DNA, 15 bp, Homo sapiens
tgtgaccaggacatc

SEQ ID NO: 132392 - DNA, 15 bp, Homo sapiens
gtgaccaggacatcc

SEQ ID NO: 132393 - DNA, 15 bp, Homo sapiens
tgaccaggacatcct

SEQ ID NO: 132394 - DNA, 15 bp, Homo sapiens
gaccaggacatcctt

SEQ ID NO: 132395 - DNA, 15 bp, Homo sapiens
accaggacatccttt

SEQ ID NO: 132396 - DNA, 15 bp, Homo sapiens
ccaggacatcctttc

SEQ ID NO: 132397 - DNA, 15 bp, Homo sapiens
caggacatcctttcc

SEQ ID NO: 132398 - DNA, 15 bp, Homo sapiens
aggacatcctttccc

SEQ ID NO: 132399 - DNA, 15 bp, Homo sapiens
ggacatcctttccct

SEQ ID NO: 132400 - DNA, 15 bp, Homo sapiens
gacatcctttccctc

SEQ ID NO: 132401 - DNA, 15 bp, Homo sapiens
acatcctttccctct

SEQ ID NO: 132402 - DNA, 15 bp, Homo sapiens
catcctttccctctg

SEQ ID NO: 132403 - DNA, 15 bp, Homo sapiens
atcctttccctctgg

SEQ ID NO: 132404 - DNA, 15 bp, Homo sapiens
tcctttccctctggg

SEQ ID NO: 132405 - DNA, 15 bp, Homo sapiens
cctttccctctgggg

SEQ ID NO: 132406 - DNA, 15 bp, Homo sapiens
ctttccctctggggc

SEQ ID NO: 132407 - DNA, 15 bp, Homo sapiens
tttccctctggggct

SEQ ID NO: 132408 - DNA, 15 bp, Homo sapiens
ttccctctggggctg

SEQ ID NO: 132409 - DNA, 15 bp, Homo sapiens
tccctctggggctgc

SEQ ID NO: 132410 - DNA, 15 bp, Homo sapiens
ccctctggggctgca

SEQ ID NO: 132411 - DNA, 15 bp, Homo sapiens
cctctggggctgcac

SEQ ID NO: 132412 - DNA, 15 bp, Homo sapiens
ctctggggctgcact

SEQ ID NO: 132413 - DNA, 15 bp, Homo sapiens
tctggggctgcactg

SEQ ID NO: 132414 - DNA, 15 bp, Homo sapiens
ctggggctgcactgg

SEQ ID NO: 132415 - DNA, 15 bp, Homo sapiens
tggggctgcactggc

SEQ ID NO: 132416 - DNA, 15 bp, Homo sapiens
ggggctgcactggct

SEQ ID NO: 132417 - DNA, 15 bp, Homo sapiens
gggctgcactggctc

SEQ ID NO: 132418 - DNA, 15 bp, Homo sapiens
ggctgcactggctct

SEQ ID NO: 132419 - DNA, 15 bp, Homo sapiens
gctgcactggctctt

SEQ ID NO: 132420 - DNA, 15 bp, Homo sapiens
ctgcactggctcttt

SEQ ID NO: 132421 - DNA, 15 bp, Homo sapiens
tgcactggctctttg

SEQ ID NO: 132422 - DNA, 15 bp, Homo sapiens
gcactggctctttgg

SEQ ID NO: 132423 - DNA, 15 bp, Homo sapiens
cactggctctttggg

SEQ ID NO: 132424 - DNA, 15 bp, Homo sapiens
actggctctttgggg

SEQ ID NO: 132425 - DNA, 15 bp, Homo sapiens
ctggctctttggggg

SEQ ID NO: 132426 - DNA, 15 bp, Homo sapiens
tggctctttggggga

SEQ ID NO: 132427 - DNA, 15 bp, Homo sapiens
ggctctttgggggaa

SEQ ID NO: 132428 - DNA, 15 bp, Homo sapiens
gctctttgggggaat

SEQ ID NO: 132429 - DNA, 15 bp, Homo sapiens
ctctttgggggaatt

SEQ ID NO: 132430 - DNA, 15 bp, Homo sapiens
tctttgggggaattg

SEQ ID NO: 132431 - DNA, 15 bp, Homo sapiens
ctttgggggaattgt

SEQ ID NO: 132432 - DNA, 15 bp, Homo sapiens
tttgggggaattgtt

SEQ ID NO: 132433 - DNA, 15 bp, Homo sapiens
ttgggggaattgtta

SEQ ID NO: 132434 - DNA, 15 bp, Homo sapiens
tgggggaattgttac

SEQ ID NO: 132435 - DNA, 15 bp, Homo sapiens
gggggaattgttacc

SEQ ID NO: 132436 - DNA, 15 bp, Homo sapiens
ggggaattgttacca

SEQ ID NO: 132437 - DNA, 15 bp, Homo sapiens
gggaattgttaccat

SEQ ID NO: 132438 - DNA, 15 bp, Homo sapiens
ggaattgttaccatt

SEQ ID NO: 132439 - DNA, 15 bp, Homo sapiens
gaattgttaccattc

SEQ ID NO: 132440 - DNA, 15 bp, Homo sapiens
aattgttaccattca

SEQ ID NO: 132441 - DNA, 15 bp, Homo sapiens
attgttaccattcag

SEQ ID NO: 132442 - DNA, 15 bp, Homo sapiens
ttgttaccattcagg

SEQ ID NO: 132443 - DNA, 15 bp, Homo sapiens
tgttaccattcaggg

SEQ ID NO: 132444 - DNA, 15 bp, Homo sapiens
gttaccattcagggt

SEQ ID NO: 132445 - DNA, 15 bp, Homo sapiens
ttaccattcagggtc

SEQ ID NO: 132446 - DNA, 15 bp, Homo sapiens
taccattcagggtct

SEQ ID NO: 132447 - DNA, 15 bp, Homo sapiens
accattcagggtctt

SEQ ID NO: 132448 - DNA, 15 bp, Homo sapiens
ccattcagggtcttc

SEQ ID NO: 132449 - DNA, 15 bp, Homo sapiens
cattcagggtcttca

SEQ ID NO: 132450 - DNA, 15 bp, Homo sapiens
attcagggtcttcaa

SEQ ID NO: 132451 - DNA, 15 bp, Homo sapiens
ttcagggtcttcaac

SEQ ID NO: 132452 - DNA, 15 bp, Homo sapiens
tcagggtcttcaacc

SEQ ID NO: 132453 - DNA, 15 bp, Homo sapiens
cagggtcttcaaccc

SEQ ID NO: 132454 - DNA, 15 bp, Homo sapiens
agggtcttcaaccct

SEQ ID NO: 132455 - DNA, 15 bp, Homo sapiens
gggtcttcaaccctc

SEQ ID NO: 132456 - DNA, 15 bp, Homo sapiens
ggtcttcaaccctca

SEQ ID NO: 132457 - DNA, 15 bp, Homo sapiens
gtcttcaaccctcat

SEQ ID NO: 132458 - DNA, 15 bp, Homo sapiens
tcttcaaccctcatt

SEQ ID NO: 132459 - DNA, 15 bp, Homo sapiens
cttcaaccctcattc

SEQ ID NO: 132460 - DNA, 15 bp, Homo sapiens
ttcaaccctcattct

SEQ ID NO: 132461 - DNA, 15 bp, Homo sapiens
tcaaccctcattcta

SEQ ID NO: 132462 - DNA, 15 bp, Homo sapiens
caaccctcattctag

SEQ ID NO: 132463 - DNA, 15 bp, Homo sapiens
aaccctcattctagg

SEQ ID NO: 132464 - DNA, 15 bp, Homo sapiens
accctcattctaggg

SEQ ID NO: 132465 - DNA, 15 bp, Homo sapiens
ccctcattctaggga

SEQ ID NO: 132466 - DNA, 15 bp, Homo sapiens
cctcattctagggac

SEQ ID NO: 132467 - DNA, 15 bp, Homo sapiens
ctcattctagggact

SEQ ID NO: 132468 - DNA, 15 bp, Homo sapiens
tcattctagggactt

SEQ ID NO: 132469 - DNA, 15 bp, Homo sapiens
cattctagggacttc

SEQ ID NO: 132470 - DNA, 15 bp, Homo sapiens
attctagggacttcc

SEQ ID NO: 132471 - DNA, 15 bp, Homo sapiens
ttctagggacttcca

SEQ ID NO: 132472 - DNA, 15 bp, Homo sapiens
tctagggacttccag

SEQ ID NO: 132473 - DNA, 15 bp, Homo sapiens
ctagggacttccagt

SEQ ID NO: 132474 - DNA, 15 bp, Homo sapiens
tagggacttccagta

SEQ ID NO: 132475 - DNA, 15 bp, Homo sapiens
agggacttccagtaa

SEQ ID NO: 132476 - DNA, 15 bp, Homo sapiens
gggacttccagtaac

SEQ ID NO: 132477 - DNA, 15 bp, Homo sapiens
ggacttccagtaact

SEQ ID NO: 132478 - DNA, 15 bp, Homo sapiens
gacttccagtaactt

SEQ ID NO: 132479 - DNA, 15 bp, Homo sapiens
acttccagtaacttc

SEQ ID NO: 132480 - DNA, 15 bp, Homo sapiens
cttccagtaacttct

SEQ ID NO: 132481 - DNA, 15 bp, Homo sapiens
ttccagtaacttctc

SEQ ID NO: 132482 - DNA, 15 bp, Homo sapiens
tccagtaacttctcc

SEQ ID NO: 132483 - DNA, 15 bp, Homo sapiens
ccagtaacttctccc

SEQ ID NO: 132484 - DNA, 15 bp, Homo sapiens
cagtaacttctccca

SEQ ID NO: 132485 - DNA, 15 bp, Homo sapiens
agtaacttctcccac

SEQ ID NO: 132486 - DNA, 15 bp, Homo sapiens
gtaacttctcccacc

SEQ ID NO: 132487 - DNA, 15 bp, Homo sapiens
taacttctcccacct

SEQ ID NO: 132488 - DNA, 15 bp, Homo sapiens
aacttctcccacctt

SEQ ID NO: 132489 - DNA, 15 bp, Homo sapiens
acttctcccaccttc

SEQ ID NO: 132490 - DNA, 15 bp, Homo sapiens
cttctcccaccttcc

SEQ ID NO: 132491 - DNA, 15 bp, Homo sapiens
ttctcccaccttccc

SEQ ID NO: 132492 - DNA, 15 bp, Homo sapiens
tctcccaccttccct

SEQ ID NO: 132493 - DNA, 15 bp, Homo sapiens
ctcccaccttccctc

SEQ ID NO: 132494 - DNA, 15 bp, Homo sapiens
tcccaccttccctct

SEQ ID NO: 132495 - DNA, 15 bp, Homo sapiens
cccaccttccctctt

SEQ ID NO: 132496 - DNA, 15 bp, Homo sapiens
ccaccttccctcttc

SEQ ID NO: 132497 - DNA, 15 bp, Homo sapiens
caccttccctcttct

SEQ ID NO: 132498 - DNA, 15 bp, Homo sapiens
accttccctcttctc

SEQ ID NO: 132499 - DNA, 15 bp, Homo sapiens
ccttccctcttctca

SEQ ID NO: 132500 - DNA, 15 bp, Homo sapiens
cttccctcttctcag

SEQ ID NO: 132501 - DNA, 15 bp, Homo sapiens
ttccctcttctcagt

SEQ ID NO: 132502 - DNA, 15 bp, Homo sapiens
tccctcttctcagta

SEQ ID NO: 132503 - DNA, 15 bp, Homo sapiens
ccctcttctcagtaa

SEQ ID NO: 132504 - DNA, 15 bp, Homo sapiens
cctcttctcagtaag

SEQ ID NO: 132505 - DNA, 15 bp, Homo sapiens
ctcttctcagtaaga

SEQ ID NO: 132506 - DNA, 15 bp, Homo sapiens
tcttctcagtaagac

SEQ ID NO: 132507 - DNA, 15 bp, Homo sapiens
cttctcagtaagaca

SEQ ID NO: 132508 - DNA, 15 bp, Homo sapiens
ttctcagtaagacat

SEQ ID NO: 132509 - DNA, 15 bp, Homo sapiens
tctcagtaagacatg

SEQ ID NO: 132510 - DNA, 15 bp, Homo sapiens
ctcagtaagacatgg

SEQ ID NO: 132511 - DNA, 15 bp, Homo sapiens
tcagtaagacatggg

SEQ ID NO: 132512 - DNA, 15 bp, Homo sapiens
cagtaagacatgggt

SEQ ID NO: 132513 - DNA, 15 bp, Homo sapiens
agtaagacatgggta

SEQ ID NO: 132514 - DNA, 15 bp, Homo sapiens
gtaagacatgggtat

SEQ ID NO: 132515 - DNA, 15 bp, Homo sapiens
taagacatgggtatt

SEQ ID NO: 132516 - DNA, 15 bp, Homo sapiens
aagacatgggtattg

SEQ ID NO: 132517 - DNA, 15 bp, Homo sapiens
agacatgggtattgt

SEQ ID NO: 132518 - DNA, 15 bp, Homo sapiens
gacatgggtattgtc

SEQ ID NO: 132519 - DNA, 15 bp, Homo sapiens
acatgggtattgtct

SEQ ID NO: 132520 - DNA, 15 bp, Homo sapiens
catgggtattgtctt

SEQ ID NO: 132521 - DNA, 15 bp, Homo sapiens
atgggtattgtctta

SEQ ID NO: 132522 - DNA, 15 bp, Homo sapiens
tgggtattgtcttat

SEQ ID NO: 132523 - DNA, 15 bp, Homo sapiens
gggtattgtcttatt

SEQ ID NO: 132524 - DNA, 15 bp, Homo sapiens
ggtattgtcttattc

SEQ ID NO: 132525 - DNA, 15 bp, Homo sapiens
gtattgtcttattct

SEQ ID NO: 132526 - DNA, 15 bp, Homo sapiens
tattgtcttattctg

SEQ ID NO: 132527 - DNA, 15 bp, Homo sapiens
attgtcttattctgt

SEQ ID NO: 132528 - DNA, 15 bp, Homo sapiens
ttgtcttattctgtt

SEQ ID NO: 132529 - DNA, 15 bp, Homo sapiens
tgtcttattctgttt

SEQ ID NO: 132530 - DNA, 15 bp, Homo sapiens
gtcttattctgtttc

SEQ ID NO: 132531 - DNA, 15 bp, Homo sapiens
tcttattctgtttct

SEQ ID NO: 132532 - DNA, 15 bp, Homo sapiens
cttattctgtttctg

SEQ ID NO: 132533 - DNA, 15 bp, Homo sapiens
ttattctgtttctgc

SEQ ID NO: 132534 - DNA, 15 bp, Homo sapiens
tattctgtttctgct

SEQ ID NO: 132535 - DNA, 15 bp, Homo sapiens
attctgtttctgctg

SEQ ID NO: 132536 - DNA, 15 bp, Homo sapiens
ttctgtttctgctgc

SEQ ID NO: 132537 - DNA, 15 bp, Homo sapiens
tctgtttctgctgct

SEQ ID NO: 132538 - DNA, 15 bp, Homo sapiens
ctgtttctgctgcta

SEQ ID NO: 132539 - DNA, 15 bp, Homo sapiens
tgtttctgctgctag

SEQ ID NO: 132540 - DNA, 15 bp, Homo sapiens
gtttctgctgctaga

SEQ ID NO: 132541 - DNA, 15 bp, Homo sapiens
tttctgctgctagaa

SEQ ID NO: 132542 - DNA, 15 bp, Homo sapiens
ttctgctgctagaag

SEQ ID NO: 132543 - DNA, 15 bp, Homo sapiens
tctgctgctagaaga

SEQ ID NO: 132544 - DNA, 15 bp, Homo sapiens
ctgctgctagaagaa

SEQ ID NO: 132545 - DNA, 15 bp, Homo sapiens
tgctgctagaagaaa

SEQ ID NO: 132546 - DNA, 15 bp, Homo sapiens
gctgctagaagaaaa

SEQ ID NO: 132547 - DNA, 15 bp, Homo sapiens
ctgctagaagaaaat

SEQ ID NO: 132548 - DNA, 15 bp, Homo sapiens
tgctagaagaaaatt

SEQ ID NO: 132549 - DNA, 15 bp, Homo sapiens
gctagaagaaaattc

SEQ ID NO: 132550 - DNA, 15 bp, Homo sapiens
ctagaagaaaattct

SEQ ID NO: 132551 - DNA, 15 bp, Homo sapiens
tagaagaaaattctc

SEQ ID NO: 132552 - DNA, 15 bp, Homo sapiens
agaagaaaattctcg

SEQ ID NO: 132553 - DNA, 15 bp, Homo sapiens
gaagaaaattctcga

SEQ ID NO: 132554 - DNA, 15 bp, Homo sapiens
aagaaaattctcgag

SEQ ID NO: 132555 - DNA, 15 bp, Homo sapiens
agaaaattctcgaga

SEQ ID NO: 132556 - DNA, 15 bp, Homo sapiens
gaaaattctcgagac

SEQ ID NO: 132557 - DNA, 15 bp, Homo sapiens
aaaattctcgagact

SEQ ID NO: 132558 - DNA, 15 bp, Homo sapiens
aaattctcgagactg

SEQ ID NO: 132559 - DNA, 15 bp, Homo sapiens
aattctcgagactga

SEQ ID NO: 132560 - DNA, 15 bp, Homo sapiens
attctcgagactgag

SEQ ID NO: 132561 - DNA, 15 bp, Homo sapiens
ttctcgagactgagt

SEQ ID NO: 132562 - DNA, 15 bp, Homo sapiens
tctcgagactgagta

SEQ ID NO: 132563 - DNA, 15 bp, Homo sapiens
ctcgagactgagtaa

SEQ ID NO: 132564 - DNA, 15 bp, Homo sapiens
tcgagactgagtaat

SEQ ID NO: 132565 - DNA, 15 bp, Homo sapiens
cgagactgagtaatt

SEQ ID NO: 132566 - DNA, 15 bp, Homo sapiens
gagactgagtaattt

SEQ ID NO: 132567 - DNA, 15 bp, Homo sapiens
agactgagtaattta

SEQ ID NO: 132568 - DNA, 15 bp, Homo sapiens
gactgagtaatttat

SEQ ID NO: 132569 - DNA, 15 bp, Homo sapiens
actgagtaatttata

SEQ ID NO: 132570 - DNA, 15 bp, Homo sapiens
ctgagtaatttatac

SEQ ID NO: 132571 - DNA, 15 bp, Homo sapiens
tgagtaatttataca

SEQ ID NO: 132572 - DNA, 15 bp, Homo sapiens
gagtaatttatacac

SEQ ID NO: 132573 - DNA, 15 bp, Homo sapiens
agtaatttatacaca

SEQ ID NO: 132574 - DNA, 15 bp, Homo sapiens
gtaatttatacacaa

SEQ ID NO: 132575 - DNA, 15 bp, Homo sapiens
taatttatacacaat

SEQ ID NO: 132576 - DNA, 15 bp, Homo sapiens
aatttatacacaata

SEQ ID NO: 132577 - DNA, 15 bp, Homo sapiens
atttatacacaatag

SEQ ID NO: 132578 - DNA, 15 bp, Homo sapiens
tttatacacaataga

SEQ ID NO: 132579 - DNA, 15 bp, Homo sapiens
ttatacacaatagaa

SEQ ID NO: 132580 - DNA, 15 bp, Homo sapiens
tatacacaatagaaa

SEQ ID NO: 132581 - DNA, 15 bp, Homo sapiens
atacacaatagaaat

SEQ ID NO: 132582 - DNA, 15 bp, Homo sapiens
tacacaatagaaatt

SEQ ID NO: 132583 - DNA, 15 bp, Homo sapiens
acacaatagaaattt

SEQ ID NO: 132584 - DNA, 15 bp, Homo sapiens
cacaatagaaattta

SEQ ID NO: 132585 - DNA, 15 bp, Homo sapiens
acaatagaaatttac

SEQ ID NO: 132586 - DNA, 15 bp, Homo sapiens
caatagaaatttact

SEQ ID NO: 132587 - DNA, 15 bp, Homo sapiens
aatagaaatttactt

SEQ ID NO: 132588 - DNA, 15 bp, Homo sapiens
atagaaatttacttc

SEQ ID NO: 132589 - DNA, 15 bp, Homo sapiens
tagaaatttacttct

SEQ ID NO: 132590 - DNA, 15 bp, Homo sapiens
agaaatttacttctc

SEQ ID NO: 132591 - DNA, 15 bp, Homo sapiens
gaaatttacttctca

SEQ ID NO: 132592 - DNA, 15 bp, Homo sapiens
aaatttacttctcac

SEQ ID NO: 132593 - DNA, 15 bp, Homo sapiens
aatttacttctcaca

SEQ ID NO: 132594 - DNA, 15 bp, Homo sapiens
atttacttctcacag

SEQ ID NO: 132595 - DNA, 15 bp, Homo sapiens
tttacttctcacagt

SEQ ID NO: 132596 - DNA, 15 bp, Homo sapiens
ttacttctcacagtt

SEQ ID NO: 132597 - DNA, 15 bp, Homo sapiens
tacttctcacagttc

SEQ ID NO: 132598 - DNA, 15 bp, Homo sapiens
acttctcacagttct

SEQ ID NO: 132599 - DNA, 15 bp, Homo sapiens
cttctcacagttctg

SEQ ID NO: 132600 - DNA, 15 bp, Homo sapiens
ttctcacagttctgg

SEQ ID NO: 132601 - DNA, 15 bp, Homo sapiens
tctcacagttctgga

SEQ ID NO: 132602 - DNA, 15 bp, Homo sapiens
ctcacagttctggag

SEQ ID NO: 132603 - DNA, 15 bp, Homo sapiens
tcacagttctggagg

SEQ ID NO: 132604 - DNA, 15 bp, Homo sapiens
cacagttctggaggc

SEQ ID NO: 132605 - DNA, 15 bp, Homo sapiens
acagttctggaggct

SEQ ID NO: 132606 - DNA, 15 bp, Homo sapiens
cagttctggaggctg

SEQ ID NO: 132607 - DNA, 15 bp, Homo sapiens
agttctggaggctgg

SEQ ID NO: 132608 - DNA, 15 bp, Homo sapiens
gttctggaggctggg

SEQ ID NO: 132609 - DNA, 15 bp, Homo sapiens
ttctggaggctggga

SEQ ID NO: 132610 - DNA, 15 bp, Homo sapiens
tctggaggctgggaa

SEQ ID NO: 132611 - DNA, 15 bp, Homo sapiens
ctggaggctgggaaa

SEQ ID NO: 132612 - DNA, 15 bp, Homo sapiens
tggaggctgggaaat

SEQ ID NO: 132613 - DNA, 15 bp, Homo sapiens
ggaggctgggaaatc

SEQ ID NO: 132614 - DNA, 15 bp, Homo sapiens
gaggctgggaaatcc

SEQ ID NO: 132615 - DNA, 15 bp, Homo sapiens
aggctgggaaatcca

SEQ ID NO: 132616 - DNA, 15 bp, Homo sapiens
ggctgggaaatccaa

SEQ ID NO: 132617 - DNA, 15 bp, Homo sapiens
gctgggaaatccaaa

SEQ ID NO: 132618 - DNA, 15 bp, Homo sapiens
ctgggaaatccaaaa

SEQ ID NO: 132619 - DNA, 15 bp, Homo sapiens
tgggaaatccaaaat

SEQ ID NO: 132620 - DNA, 15 bp, Homo sapiens
gggaaatccaaaatc

SEQ ID NO: 132621 - DNA, 15 bp, Homo sapiens
ggaaatccaaaatca

SEQ ID NO: 132622 - DNA, 15 bp, Homo sapiens
gaaatccaaaatcaa

SEQ ID NO: 132623 - DNA, 15 bp, Homo sapiens
aaatccaaaatcaag

SEQ ID NO: 132624 - DNA, 15 bp, Homo sapiens
aatccaaaatcaagg

SEQ ID NO: 132625 - DNA, 15 bp, Homo sapiens
atccaaaatcaaggt

SEQ ID NO: 132626 - DNA, 15 bp, Homo sapiens
tccaaaatcaaggtg

SEQ ID NO: 132627 - DNA, 15 bp, Homo sapiens
ccaaaatcaaggtgt

SEQ ID NO: 132628 - DNA, 15 bp, Homo sapiens
caaaatcaaggtgtt

SEQ ID NO: 132629 - DNA, 15 bp, Homo sapiens
aaaatcaaggtgttg

SEQ ID NO: 132630 - DNA, 15 bp, Homo sapiens
aaatcaaggtgttgg

SEQ ID NO: 132631 - DNA, 15 bp, Homo sapiens
aatcaaggtgttggc

SEQ ID NO: 132632 - DNA, 15 bp, Homo sapiens
atcaaggtgttggca

SEQ ID NO: 132633 - DNA, 15 bp, Homo sapiens
tcaaggtgttggcag

SEQ ID NO: 132634 - DNA, 15 bp, Homo sapiens
caaggtgttggcagg

SEQ ID NO: 132635 - DNA, 15 bp, Homo sapiens
aaggtgttggcaggt

SEQ ID NO: 132636 - DNA, 15 bp, Homo sapiens
aggtgttggcaggtt

SEQ ID NO: 132637 - DNA, 15 bp, Homo sapiens
ggtgttggcaggttt

SEQ ID NO: 132638 - DNA, 15 bp, Homo sapiens
gtgttggcaggtttg

SEQ ID NO: 132639 - DNA, 15 bp, Homo sapiens
tgttggcaggtttgg

SEQ ID NO: 132640 - DNA, 15 bp, Homo sapiens
gttggcaggtttggt

SEQ ID NO: 132641 - DNA, 15 bp, Homo sapiens
ttggcaggtttggtg

SEQ ID NO: 132642 - DNA, 15 bp, Homo sapiens
tggcaggtttggtgt

SEQ ID NO: 132643 - DNA, 15 bp, Homo sapiens
ggcaggtttggtgtc

SEQ ID NO: 132644 - DNA, 15 bp, Homo sapiens
gcaggtttggtgtct

SEQ ID NO: 132645 - DNA, 15 bp, Homo sapiens
caggtttggtgtctg

SEQ ID NO: 132646 - DNA, 15 bp, Homo sapiens
aggtttggtgtctgg

SEQ ID NO: 132647 - DNA, 15 bp, Homo sapiens
ggtttggtgtctggt

SEQ ID NO: 132648 - DNA, 15 bp, Homo sapiens
gtttggtgtctggtg

SEQ ID NO: 132649 - DNA, 15 bp, Homo sapiens
tttggtgtctggtga

SEQ ID NO: 132650 - DNA, 15 bp, Homo sapiens
ttggtgtctggtgag

SEQ ID NO: 132651 - DNA, 15 bp, Homo sapiens
tggtgtctggtgagg

SEQ ID NO: 132652 - DNA, 15 bp, Homo sapiens
ggtgtctggtgaggg

SEQ ID NO: 132653 - DNA, 15 bp, Homo sapiens
gtgtctggtgagggc

SEQ ID NO: 132654 - DNA, 15 bp, Homo sapiens
tgtctggtgagggct

SEQ ID NO: 132655 - DNA, 15 bp, Homo sapiens
gtctggtgagggctg

SEQ ID NO: 132656 - DNA, 15 bp, Homo sapiens
tctggtgagggctgc

SEQ ID NO: 132657 - DNA, 15 bp, Homo sapiens
ctggtgagggctgct

SEQ ID NO: 132658 - DNA, 15 bp, Homo sapiens
tggtgagggctgctc

SEQ ID NO: 132659 - DNA, 15 bp, Homo sapiens
ggtgagggctgctct

SEQ ID NO: 132660 - DNA, 15 bp, Homo sapiens
gtgagggctgctctc

SEQ ID NO: 132661 - DNA, 15 bp, Homo sapiens
tgagggctgctctct

SEQ ID NO: 132662 - DNA, 15 bp, Homo sapiens
gagggctgctctctg

SEQ ID NO: 132663 - DNA, 15 bp, Homo sapiens
agggctgctctctgc

SEQ ID NO: 132664 - DNA, 15 bp, Homo sapiens
gggctgctctctgct

SEQ ID NO: 132665 - DNA, 15 bp, Homo sapiens
ggctgctctctgctt

SEQ ID NO: 132666 - DNA, 15 bp, Homo sapiens
gctgctctctgcttc

SEQ ID NO: 132667 - DNA, 15 bp, Homo sapiens
ctgctctctgcttct

SEQ ID NO: 132668 - DNA, 15 bp, Homo sapiens
tgctctctgcttcta

SEQ ID NO: 132669 - DNA, 15 bp, Homo sapiens
gctctctgcttctaa

SEQ ID NO: 132670 - DNA, 15 bp, Homo sapiens
ctctctgcttctaag

SEQ ID NO: 132671 - DNA, 15 bp, Homo sapiens
tctctgcttctaaga

SEQ ID NO: 132672 - DNA, 15 bp, Homo sapiens
ctctgcttctaagat

SEQ ID NO: 132673 - DNA, 15 bp, Homo sapiens
tctgcttctaagatg

SEQ ID NO: 132674 - DNA, 15 bp, Homo sapiens
ctgcttctaagatgg

SEQ ID NO: 132675 - DNA, 15 bp, Homo sapiens
tgcttctaagatggt

SEQ ID NO: 132676 - DNA, 15 bp, Homo sapiens
gcttctaagatggtg

SEQ ID NO: 132677 - DNA, 15 bp, Homo sapiens
cttctaagatggtgc

SEQ ID NO: 132678 - DNA, 15 bp, Homo sapiens
ttctaagatggtgcc

SEQ ID NO: 132679 - DNA, 15 bp, Homo sapiens
tctaagatggtgcct

SEQ ID NO: 132680 - DNA, 15 bp, Homo sapiens
ctaagatggtgcctt

SEQ ID NO: 132681 - DNA, 15 bp, Homo sapiens
taagatggtgccttg

SEQ ID NO: 132682 - DNA, 15 bp, Homo sapiens
aagatggtgccttgt

SEQ ID NO: 132683 - DNA, 15 bp, Homo sapiens
agatggtgccttgtt

SEQ ID NO: 132684 - DNA, 15 bp, Homo sapiens
gatggtgccttgttg

SEQ ID NO: 132685 - DNA, 15 bp, Homo sapiens
atggtgccttgttgc

SEQ ID NO: 132686 - DNA, 15 bp, Homo sapiens
tggtgccttgttgct

SEQ ID NO: 132687 - DNA, 15 bp, Homo sapiens
ggtgccttgttgctg

SEQ ID NO: 132688 - DNA, 15 bp, Homo sapiens
gtgccttgttgctgc

SEQ ID NO: 132689 - DNA, 15 bp, Homo sapiens
tgccttgttgctgca

SEQ ID NO: 132690 - DNA, 15 bp, Homo sapiens
gccttgttgctgcat

SEQ ID NO: 132691 - DNA, 15 bp, Homo sapiens
ccttgttgctgcatc

SEQ ID NO: 132692 - DNA, 15 bp, Homo sapiens
cttgttgctgcatcc

SEQ ID NO: 132693 - DNA, 15 bp, Homo sapiens
ttgttgctgcatcct

SEQ ID NO: 132694 - DNA, 15 bp, Homo sapiens
tgttgctgcatcctt

SEQ ID NO: 132695 - DNA, 15 bp, Homo sapiens
gttgctgcatcctta

SEQ ID NO: 132696 - DNA, 15 bp, Homo sapiens
ttgctgcatccttag

SEQ ID NO: 132697 - DNA, 15 bp, Homo sapiens
tgctgcatccttagg

SEQ ID NO: 132698 - DNA, 15 bp, Homo sapiens
gctgcatccttagga

SEQ ID NO: 132699 - DNA, 15 bp, Homo sapiens
ctgcatccttaggag

SEQ ID NO: 132700 - DNA, 15 bp, Homo sapiens
tgcatccttaggagg

SEQ ID NO: 132701 - DNA, 15 bp, Homo sapiens
gcatccttaggaggg

SEQ ID NO: 132702 - DNA, 15 bp, Homo sapiens
catccttaggagggg

SEQ ID NO: 132703 - DNA, 15 bp, Homo sapiens
atccttaggagggga

SEQ ID NO: 132704 - DNA, 15 bp, Homo sapiens
tccttaggaggggac

SEQ ID NO: 132705 - DNA, 15 bp, Homo sapiens
ccttaggaggggaca

SEQ ID NO: 132706 - DNA, 15 bp, Homo sapiens
cttaggaggggacaa

SEQ ID NO: 132707 - DNA, 15 bp, Homo sapiens
ttaggaggggacaaa

SEQ ID NO: 132708 - DNA, 15 bp, Homo sapiens
taggaggggacaaac

SEQ ID NO: 132709 - DNA, 15 bp, Homo sapiens
aggaggggacaaacg

SEQ ID NO: 132710 - DNA, 15 bp, Homo sapiens
ggaggggacaaacgc

SEQ ID NO: 132711 - DNA, 15 bp, Homo sapiens
gaggggacaaacgcc

SEQ ID NO: 132712 - DNA, 15 bp, Homo sapiens
aggggacaaacgcca

SEQ ID NO: 132713 - DNA, 15 bp, Homo sapiens
ggggacaaacgccat

SEQ ID NO: 132714 - DNA, 15 bp, Homo sapiens
gggacaaacgccatt

SEQ ID NO: 132715 - DNA, 15 bp, Homo sapiens
ggacaaacgccattt

SEQ ID NO: 132716 - DNA, 15 bp, Homo sapiens
gacaaacgccatttc

SEQ ID NO: 132717 - DNA, 15 bp, Homo sapiens
acaaacgccatttcc

SEQ ID NO: 132718 - DNA, 15 bp, Homo sapiens
caaacgccatttcct

SEQ ID NO: 132719 - DNA, 15 bp, Homo sapiens
aaacgccatttcctc

SEQ ID NO: 132720 - DNA, 15 bp, Homo sapiens
aacgccatttcctca

SEQ ID NO: 132721 - DNA, 15 bp, Homo sapiens
acgccatttcctcaa

SEQ ID NO: 132722 - DNA, 15 bp, Homo sapiens
cgccatttcctcaac

SEQ ID NO: 132723 - DNA, 15 bp, Homo sapiens
gccatttcctcaact

SEQ ID NO: 132724 - DNA, 15 bp, Homo sapiens
ccatttcctcaactg

SEQ ID NO: 132725 - DNA, 15 bp, Homo sapiens
catttcctcaactgg

SEQ ID NO: 132726 - DNA, 15 bp, Homo sapiens
atttcctcaactggc

SEQ ID NO: 132727 - DNA, 15 bp, Homo sapiens
tttcctcaactggca

SEQ ID NO: 132728 - DNA, 15 bp, Homo sapiens
ttcctcaactggcag

SEQ ID NO: 132729 - DNA, 15 bp, Homo sapiens
tcctcaactggcaga

SEQ ID NO: 132730 - DNA, 15 bp, Homo sapiens
cctcaactggcagaa

SEQ ID NO: 132731 - DNA, 15 bp, Homo sapiens
ctcaactggcagaag

SEQ ID NO: 132732 - DNA, 15 bp, Homo sapiens
tcaactggcagaagg

SEQ ID NO: 132733 - DNA, 15 bp, Homo sapiens
caactggcagaaggg

SEQ ID NO: 132734 - DNA, 15 bp, Homo sapiens
aactggcagaaggga

SEQ ID NO: 132735 - DNA, 15 bp, Homo sapiens
actggcagaagggac

SEQ ID NO: 132736 - DNA, 15 bp, Homo sapiens
ctggcagaagggact

SEQ ID NO: 132737 - DNA, 15 bp, Homo sapiens
tggcagaagggactg

SEQ ID NO: 132738 - DNA, 15 bp, Homo sapiens
ggcagaagggactga

SEQ ID NO: 132739 - DNA, 15 bp, Homo sapiens
gcagaagggactgaa

SEQ ID NO: 132740 - DNA, 15 bp, Homo sapiens
cagaagggactgaag

SEQ ID NO: 132741 - DNA, 15 bp, Homo sapiens
agaagggactgaagc

SEQ ID NO: 132742 - DNA, 15 bp, Homo sapiens
gaagggactgaagcc

SEQ ID NO: 132743 - DNA, 15 bp, Homo sapiens
aagggactgaagcct

SEQ ID NO: 132744 - DNA, 15 bp, Homo sapiens
agggactgaagcctc

SEQ ID NO: 132745 - DNA, 15 bp, Homo sapiens
gggactgaagcctct

SEQ ID NO: 132746 - DNA, 15 bp, Homo sapiens
ggactgaagcctctc

SEQ ID NO: 132747 - DNA, 15 bp, Homo sapiens
gactgaagcctctcc

SEQ ID NO: 132748 - DNA, 15 bp, Homo sapiens
actgaagcctctccc

SEQ ID NO: 132749 - DNA, 15 bp, Homo sapiens
ctgaagcctctccct

SEQ ID NO: 132750 - DNA, 15 bp, Homo sapiens
tgaagcctctccctc

SEQ ID NO: 132751 - DNA, 15 bp, Homo sapiens
gaagcctctccctca

SEQ ID NO: 132752 - DNA, 15 bp, Homo sapiens
aagcctctccctcaa

SEQ ID NO: 132753 - DNA, 15 bp, Homo sapiens
agcctctccctcaag

SEQ ID NO: 132754 - DNA, 15 bp, Homo sapiens
gcctctccctcaagc

SEQ ID NO: 132755 - DNA, 15 bp, Homo sapiens
cctctccctcaagcc

SEQ ID NO: 132756 - DNA, 15 bp, Homo sapiens
ctctccctcaagccc

SEQ ID NO: 132757 - DNA, 15 bp, Homo sapiens
tctccctcaagccct

SEQ ID NO: 132758 - DNA, 15 bp, Homo sapiens
ctccctcaagccctt

SEQ ID NO: 132759 - DNA, 15 bp, Homo sapiens
tccctcaagcccttt

SEQ ID NO: 132760 - DNA, 15 bp, Homo sapiens
ccctcaagccctttt

SEQ ID NO: 132761 - DNA, 15 bp, Homo sapiens
cctcaagccctttta

SEQ ID NO: 132762 - DNA, 15 bp, Homo sapiens
ctcaagcccttttat

SEQ ID NO: 132763 - DNA, 15 bp, Homo sapiens
tcaagcccttttata

SEQ ID NO: 132764 - DNA, 15 bp, Homo sapiens
caagcccttttatag

SEQ ID NO: 132765 - DNA, 15 bp, Homo sapiens
aagcccttttatagg

SEQ ID NO: 132766 - DNA, 15 bp, Homo sapiens
agcccttttataggg

SEQ ID NO: 132767 - DNA, 15 bp, Homo sapiens
gcccttttatagggg

SEQ ID NO: 132768 - DNA, 15 bp, Homo sapiens
cccttttataggggt

SEQ ID NO: 132769 - DNA, 15 bp, Homo sapiens
ccttttataggggtc

SEQ ID NO: 132770 - DNA, 15 bp, Homo sapiens
cttttataggggtcc

SEQ ID NO: 132771 - DNA, 15 bp, Homo sapiens
ttttataggggtcct

SEQ ID NO: 132772 - DNA, 15 bp, Homo sapiens
tttataggggtcctc

SEQ ID NO: 132773 - DNA, 15 bp, Homo sapiens
ttataggggtcctca

SEQ ID NO: 132774 - DNA, 15 bp, Homo sapiens
tataggggtcctcat

SEQ ID NO: 132775 - DNA, 15 bp, Homo sapiens
ataggggtcctcatt

SEQ ID NO: 132776 - DNA, 15 bp, Homo sapiens
taggggtcctcattg

SEQ ID NO: 132777 - DNA, 15 bp, Homo sapiens
aggggtcctcattgt

SEQ ID NO: 132778 - DNA, 15 bp, Homo sapiens
ggggtcctcattgtc

SEQ ID NO: 132779 - DNA, 15 bp, Homo sapiens
gggtcctcattgtca

SEQ ID NO: 132780 - DNA, 15 bp, Homo sapiens
ggtcctcattgtcag

SEQ ID NO: 132781 - DNA, 15 bp, Homo sapiens
gtcctcattgtcagg

SEQ ID NO: 132782 - DNA, 15 bp, Homo sapiens
tcctcattgtcaggc

SEQ ID NO: 132783 - DNA, 15 bp, Homo sapiens
cctcattgtcaggcc

SEQ ID NO: 132784 - DNA, 15 bp, Homo sapiens
ctcattgtcaggcct

SEQ ID NO: 132785 - DNA, 15 bp, Homo sapiens
tcattgtcaggcctc

SEQ ID NO: 132786 - DNA, 15 bp, Homo sapiens
cattgtcaggcctct

SEQ ID NO: 132787 - DNA, 15 bp, Homo sapiens
attgtcaggcctcta

SEQ ID NO: 132788 - DNA, 15 bp, Homo sapiens
ttgtcaggcctctaa

SEQ ID NO: 132789 - DNA, 15 bp, Homo sapiens
tgtcaggcctctaag

SEQ ID NO: 132790 - DNA, 15 bp, Homo sapiens
gtcaggcctctaagc

SEQ ID NO: 132791 - DNA, 15 bp, Homo sapiens
tcaggcctctaagcc

SEQ ID NO: 132792 - DNA, 15 bp, Homo sapiens
caggcctctaagccc

SEQ ID NO: 132793 - DNA, 15 bp, Homo sapiens
aggcctctaagccca

SEQ ID NO: 132794 - DNA, 15 bp, Homo sapiens
ggcctctaagcccaa

SEQ ID NO: 132795 - DNA, 15 bp, Homo sapiens
gcctctaagcccaag

SEQ ID NO: 132796 - DNA, 15 bp, Homo sapiens
cctctaagcccaagc

SEQ ID NO: 132797 - DNA, 15 bp, Homo sapiens
ctctaagcccaagcc

SEQ ID NO: 132798 - DNA, 15 bp, Homo sapiens
tctaagcccaagcca

SEQ ID NO: 132799 - DNA, 15 bp, Homo sapiens
ctaagcccaagccaa

SEQ ID NO: 132800 - DNA, 15 bp, Homo sapiens
taagcccaagccaag

SEQ ID NO: 132801 - DNA, 15 bp, Homo sapiens
aagcccaagccaagc

SEQ ID NO: 132802 - DNA, 15 bp, Homo sapiens
agcccaagccaagcc

SEQ ID NO: 132803 - DNA, 15 bp, Homo sapiens
gcccaagccaagcca

SEQ ID NO: 132804 - DNA, 15 bp, Homo sapiens
cccaagccaagccat

SEQ ID NO: 132805 - DNA, 15 bp, Homo sapiens
ccaagccaagccatc

SEQ ID NO: 132806 - DNA, 15 bp, Homo sapiens
caagccaagccatcg

SEQ ID NO: 132807 - DNA, 15 bp, Homo sapiens
aagccaagccatcgc

SEQ ID NO: 132808 - DNA, 15 bp, Homo sapiens
agccaagccatcgca

SEQ ID NO: 132809 - DNA, 15 bp, Homo sapiens
gccaagccatcgcat

SEQ ID NO: 132810 - DNA, 15 bp, Homo sapiens
ccaagccatcgcatc

SEQ ID NO: 132811 - DNA, 15 bp, Homo sapiens
caagccatcgcatcc

SEQ ID NO: 132812 - DNA, 15 bp, Homo sapiens
aagccatcgcatccc

SEQ ID NO: 132813 - DNA, 15 bp, Homo sapiens
agccatcgcatcccc

SEQ ID NO: 132814 - DNA, 15 bp, Homo sapiens
gccatcgcatcccct

SEQ ID NO: 132815 - DNA, 15 bp, Homo sapiens
ccatcgcatcccctg

SEQ ID NO: 132816 - DNA, 15 bp, Homo sapiens
catcgcatcccctgt

SEQ ID NO: 132817 - DNA, 15 bp, Homo sapiens
atcgcatcccctgtg

SEQ ID NO: 132818 - DNA, 15 bp, Homo sapiens
tcgcatcccctgtga

SEQ ID NO: 132819 - DNA, 15 bp, Homo sapiens
cgcatcccctgtgac

SEQ ID NO: 132820 - DNA, 15 bp, Homo sapiens
gcatcccctgtgact

SEQ ID NO: 132821 - DNA, 15 bp, Homo sapiens
catcccctgtgactt

SEQ ID NO: 132822 - DNA, 15 bp, Homo sapiens
atcccctgtgacttg

SEQ ID NO: 132823 - DNA, 15 bp, Homo sapiens
tcccctgtgacttgc

SEQ ID NO: 132824 - DNA, 15 bp, Homo sapiens
cccctgtgacttgca

SEQ ID NO: 132825 - DNA, 15 bp, Homo sapiens
ccctgtgacttgcac

SEQ ID NO: 132826 - DNA, 15 bp, Homo sapiens
cctgtgacttgcaca

SEQ ID NO: 132827 - DNA, 15 bp, Homo sapiens
ctgtgacttgcacat

SEQ ID NO: 132828 - DNA, 15 bp, Homo sapiens
tgtgacttgcacata

SEQ ID NO: 132829 - DNA, 15 bp, Homo sapiens
gtgacttgcacatat

SEQ ID NO: 132830 - DNA, 15 bp, Homo sapiens
tgacttgcacatata

SEQ ID NO: 132831 - DNA, 15 bp, Homo sapiens
gacttgcacatatac

SEQ ID NO: 132832 - DNA, 15 bp, Homo sapiens
acttgcacatatacg

SEQ ID NO: 132833 - DNA, 15 bp, Homo sapiens
cttgcacatatacgc

SEQ ID NO: 132834 - DNA, 15 bp, Homo sapiens
ttgcacatatacgcc

SEQ ID NO: 132835 - DNA, 15 bp, Homo sapiens
tgcacatatacgccc

SEQ ID NO: 132836 - DNA, 15 bp, Homo sapiens
gcacatatacgccca

SEQ ID NO: 132837 - DNA, 15 bp, Homo sapiens
cacatatacgcccag

SEQ ID NO: 132838 - DNA, 15 bp, Homo sapiens
acatatacgcccaga

SEQ ID NO: 132839 - DNA, 15 bp, Homo sapiens
catatacgcccagat

SEQ ID NO: 132840 - DNA, 15 bp, Homo sapiens
atatacgcccagatg

SEQ ID NO: 132841 - DNA, 15 bp, Homo sapiens
tatacgcccagatgg

SEQ ID NO: 132842 - DNA, 15 bp, Homo sapiens
atacgcccagatggc

SEQ ID NO: 132843 - DNA, 15 bp, Homo sapiens
tacgcccagatggcc

SEQ ID NO: 132844 - DNA, 15 bp, Homo sapiens
acgcccagatggcct

SEQ ID NO: 132845 - DNA, 15 bp, Homo sapiens
cgcccagatggcctg

SEQ ID NO: 132846 - DNA, 15 bp, Homo sapiens
gcccagatggcctga

SEQ ID NO: 132847 - DNA, 15 bp, Homo sapiens
cccagatggcctgaa

SEQ ID NO: 132848 - DNA, 15 bp, Homo sapiens
ccagatggcctgaag

SEQ ID NO: 132849 - DNA, 15 bp, Homo sapiens
cagatggcctgaagt

SEQ ID NO: 132850 - DNA, 15 bp, Homo sapiens
agatggcctgaagta

SEQ ID NO: 132851 - DNA, 15 bp, Homo sapiens
gatggcctgaagtaa

SEQ ID NO: 132852 - DNA, 15 bp, Homo sapiens
atggcctgaagtaac

SEQ ID NO: 132853 - DNA, 15 bp, Homo sapiens
tggcctgaagtaact

SEQ ID NO: 132854 - DNA, 15 bp, Homo sapiens
ggcctgaagtaactg

SEQ ID NO: 132855 - DNA, 15 bp, Homo sapiens
gcctgaagtaactga

SEQ ID NO: 132856 - DNA, 15 bp, Homo sapiens
cctgaagtaactgaa

SEQ ID NO: 132857 - DNA, 15 bp, Homo sapiens
ctgaagtaactgaag

SEQ ID NO: 132858 - DNA, 15 bp, Homo sapiens
tgaagtaactgaaga

SEQ ID NO: 132859 - DNA, 15 bp, Homo sapiens
gaagtaactgaagaa

SEQ ID NO: 132860 - DNA, 15 bp, Homo sapiens
aagtaactgaagaat

SEQ ID NO: 132861 - DNA, 15 bp, Homo sapiens
agtaactgaagaatc

SEQ ID NO: 132862 - DNA, 15 bp, Homo sapiens
gtaactgaagaatca

SEQ ID NO: 132863 - DNA, 15 bp, Homo sapiens
taactgaagaatcac

SEQ ID NO: 132864 - DNA, 15 bp, Homo sapiens
aactgaagaatcaca

SEQ ID NO: 132865 - DNA, 15 bp, Homo sapiens
actgaagaatcacaa

SEQ ID NO: 132866 - DNA, 15 bp, Homo sapiens
ctgaagaatcacaaa

SEQ ID NO: 132867 - DNA, 15 bp, Homo sapiens
tgaagaatcacaaaa

SEQ ID NO: 132868 - DNA, 15 bp, Homo sapiens
gaagaatcacaaaag

SEQ ID NO: 132869 - DNA, 15 bp, Homo sapiens
aagaatcacaaaaga

SEQ ID NO: 132870 - DNA, 15 bp, Homo sapiens
agaatcacaaaagaa

SEQ ID NO: 132871 - DNA, 15 bp, Homo sapiens
gaatcacaaaagaag

SEQ ID NO: 132872 - DNA, 15 bp, Homo sapiens
aatcacaaaagaagt

SEQ ID NO: 132873 - DNA, 15 bp, Homo sapiens
atcacaaaagaagtg

SEQ ID NO: 132874 - DNA, 15 bp, Homo sapiens
tcacaaaagaagtga

SEQ ID NO: 132875 - DNA, 15 bp, Homo sapiens
cacaaaagaagtgaa

SEQ ID NO: 132876 - DNA, 15 bp, Homo sapiens
acaaaagaagtgaaa

SEQ ID NO: 132877 - DNA, 15 bp, Homo sapiens
caaaagaagtgaaaa

SEQ ID NO: 132878 - DNA, 15 bp, Homo sapiens
aaaagaagtgaaaag

SEQ ID NO: 132879 - DNA, 15 bp, Homo sapiens
aaagaagtgaaaagg

SEQ ID NO: 132880 - DNA, 15 bp, Homo sapiens
aagaagtgaaaaggc

SEQ ID NO: 132881 - DNA, 15 bp, Homo sapiens
agaagtgaaaaggcc

SEQ ID NO: 132882 - DNA, 15 bp, Homo sapiens
gaagtgaaaaggccc

SEQ ID NO: 132883 - DNA, 15 bp, Homo sapiens
aagtgaaaaggccct

SEQ ID NO: 132884 - DNA, 15 bp, Homo sapiens
agtgaaaaggccctg

SEQ ID NO: 132885 - DNA, 15 bp, Homo sapiens
gtgaaaaggccctgc

SEQ ID NO: 132886 - DNA, 15 bp, Homo sapiens
tgaaaaggccctgcc

SEQ ID NO: 132887 - DNA, 15 bp, Homo sapiens
gaaaaggccctgcct

SEQ ID NO: 132888 - DNA, 15 bp, Homo sapiens
aaaaggccctgcctc

SEQ ID NO: 132889 - DNA, 15 bp, Homo sapiens
aaaggccctgcctcg

SEQ ID NO: 132890 - DNA, 15 bp, Homo sapiens
aaggccctgcctcgc

SEQ ID NO: 132891 - DNA, 15 bp, Homo sapiens
aggccctgcctcgcc

SEQ ID NO: 132892 - DNA, 15 bp, Homo sapiens
ggccctgcctcgcct

SEQ ID NO: 132893 - DNA, 15 bp, Homo sapiens
gccctgcctcgcctt

SEQ ID NO: 132894 - DNA, 15 bp, Homo sapiens
ccctgcctcgcctta

SEQ ID NO: 132895 - DNA, 15 bp, Homo sapiens
cctgcctcgccttaa

SEQ ID NO: 132896 - DNA, 15 bp, Homo sapiens
ctgcctcgccttaac

SEQ ID NO: 132897 - DNA, 15 bp, Homo sapiens
tgcctcgccttaact

SEQ ID NO: 132898 - DNA, 15 bp, Homo sapiens
gcctcgccttaactg

SEQ ID NO: 132899 - DNA, 15 bp, Homo sapiens
cctcgccttaactga

SEQ ID NO: 132900 - DNA, 15 bp, Homo sapiens
ctcgccttaactgat

SEQ ID NO: 132901 - DNA, 15 bp, Homo sapiens
tcgccttaactgatg

SEQ ID NO: 132902 - DNA, 15 bp, Homo sapiens
cgccttaactgatga

SEQ ID NO: 132903 - DNA, 15 bp, Homo sapiens
gccttaactgatgac

SEQ ID NO: 132904 - DNA, 15 bp, Homo sapiens
ccttaactgatgacg

SEQ ID NO: 132905 - DNA, 15 bp, Homo sapiens
cttaactgatgacgt

SEQ ID NO: 132906 - DNA, 15 bp, Homo sapiens
ttaactgatgacgtt

SEQ ID NO: 132907 - DNA, 15 bp, Homo sapiens
taactgatgacgttc

SEQ ID NO: 132908 - DNA, 15 bp, Homo sapiens
aactgatgacgttcc

SEQ ID NO: 132909 - DNA, 15 bp, Homo sapiens
actgatgacgttcca

SEQ ID NO: 132910 - DNA, 15 bp, Homo sapiens
ctgatgacgttccac

SEQ ID NO: 132911 - DNA, 15 bp, Homo sapiens
tgatgacgttccacc

SEQ ID NO: 132912 - DNA, 15 bp, Homo sapiens
gatgacgttccacca

SEQ ID NO: 132913 - DNA, 15 bp, Homo sapiens
atgacgttccaccat

SEQ ID NO: 132914 - DNA, 15 bp, Homo sapiens
tgacgttccaccatt

SEQ ID NO: 132915 - DNA, 15 bp, Homo sapiens
gacgttccaccattg

SEQ ID NO: 132916 - DNA, 15 bp, Homo sapiens
acgttccaccattgt

SEQ ID NO: 132917 - DNA, 15 bp, Homo sapiens
cgttccaccattgtg

SEQ ID NO: 132918 - DNA, 15 bp, Homo sapiens
gttccaccattgtga

SEQ ID NO: 132919 - DNA, 15 bp, Homo sapiens
ttccaccattgtgat

SEQ ID NO: 132920 - DNA, 15 bp, Homo sapiens
tccaccattgtgatt

SEQ ID NO: 132921 - DNA, 15 bp, Homo sapiens
ccaccattgtgattt

SEQ ID NO: 132922 - DNA, 15 bp, Homo sapiens
caccattgtgatttg

SEQ ID NO: 132923 - DNA, 15 bp, Homo sapiens
accattgtgatttgt

SEQ ID NO: 132924 - DNA, 15 bp, Homo sapiens
ccattgtgatttgtt

SEQ ID NO: 132925 - DNA, 15 bp, Homo sapiens
cattgtgatttgttc

SEQ ID NO: 132926 - DNA, 15 bp, Homo sapiens
attgtgatttgttcc

SEQ ID NO: 132927 - DNA, 15 bp, Homo sapiens
ttgtgatttgttcct

SEQ ID NO: 132928 - DNA, 15 bp, Homo sapiens
tgtgatttgttcctg

SEQ ID NO: 132929 - DNA, 15 bp, Homo sapiens
gtgatttgttcctgc

SEQ ID NO: 132930 - DNA, 15 bp, Homo sapiens
tgatttgttcctgcc

SEQ ID NO: 132931 - DNA, 15 bp, Homo sapiens
gatttgttcctgccc

SEQ ID NO: 132932 - DNA, 15 bp, Homo sapiens
atttgttcctgcccc

SEQ ID NO: 132933 - DNA, 15 bp, Homo sapiens
tttgttcctgcccca

SEQ ID NO: 132934 - DNA, 15 bp, Homo sapiens
ttgttcctgccccac

SEQ ID NO: 132935 - DNA, 15 bp, Homo sapiens
tgttcctgccccacc

SEQ ID NO: 132936 - DNA, 15 bp, Homo sapiens
gttcctgccccacct

SEQ ID NO: 132937 - DNA, 15 bp, Homo sapiens
ttcctgccccacctt

SEQ ID NO: 132938 - DNA, 15 bp, Homo sapiens
tcctgccccacctta

SEQ ID NO: 132939 - DNA, 15 bp, Homo sapiens
cctgccccaccttaa

SEQ ID NO: 132940 - DNA, 15 bp, Homo sapiens
ctgccccaccttaac

SEQ ID NO: 132941 - DNA, 15 bp, Homo sapiens
tgccccaccttaact

SEQ ID NO: 132942 - DNA, 15 bp, Homo sapiens
gccccaccttaactg

SEQ ID NO: 132943 - DNA, 15 bp, Homo sapiens
ccccaccttaactga

SEQ ID NO: 132944 - DNA, 15 bp, Homo sapiens
cccaccttaactgag

SEQ ID NO: 132945 - DNA, 15 bp, Homo sapiens
ccaccttaactgagt

SEQ ID NO: 132946 - DNA, 15 bp, Homo sapiens
caccttaactgagtg

SEQ ID NO: 132947 - DNA, 15 bp, Homo sapiens
accttaactgagtga

SEQ ID NO: 132948 - DNA, 15 bp, Homo sapiens
ccttaactgagtgat

SEQ ID NO: 132949 - DNA, 15 bp, Homo sapiens
cttaactgagtgatt

SEQ ID NO: 132950 - DNA, 15 bp, Homo sapiens
ttaactgagtgatta

SEQ ID NO: 132951 - DNA, 15 bp, Homo sapiens
taactgagtgattaa

SEQ ID NO: 132952 - DNA, 15 bp, Homo sapiens
aactgagtgattaac

SEQ ID NO: 132953 - DNA, 15 bp, Homo sapiens
actgagtgattaacc

SEQ ID NO: 132954 - DNA, 15 bp, Homo sapiens
ctgagtgattaaccc

SEQ ID NO: 132955 - DNA, 15 bp, Homo sapiens
tgagtgattaaccct

SEQ ID NO: 132956 - DNA, 15 bp, Homo sapiens
gagtgattaaccctg

SEQ ID NO: 132957 - DNA, 15 bp, Homo sapiens
agtgattaaccctgt

SEQ ID NO: 132958 - DNA, 15 bp, Homo sapiens
gtgattaaccctgtg

SEQ ID NO: 132959 - DNA, 15 bp, Homo sapiens
tgattaaccctgtga

SEQ ID NO: 132960 - DNA, 15 bp, Homo sapiens
gattaaccctgtgaa

SEQ ID NO: 132961 - DNA, 15 bp, Homo sapiens
attaaccctgtgaat

SEQ ID NO: 132962 - DNA, 15 bp, Homo sapiens
ttaaccctgtgaatt

SEQ ID NO: 132963 - DNA, 15 bp, Homo sapiens
taaccctgtgaattt

SEQ ID NO: 132964 - DNA, 15 bp, Homo sapiens
aaccctgtgaatttc

SEQ ID NO: 132965 - DNA, 15 bp, Homo sapiens
accctgtgaatttcc

SEQ ID NO: 132966 - DNA, 15 bp, Homo sapiens
ccctgtgaatttcct

SEQ ID NO: 132967 - DNA, 15 bp, Homo sapiens
cctgtgaatttcctt

SEQ ID NO: 132968 - DNA, 15 bp, Homo sapiens
ctgtgaatttccttc

SEQ ID NO: 132969 - DNA, 15 bp, Homo sapiens
tgtgaatttccttct

SEQ ID NO: 132970 - DNA, 15 bp, Homo sapiens
gtgaatttccttctc

SEQ ID NO: 132971 - DNA, 15 bp, Homo sapiens
tgaatttccttctcc

SEQ ID NO: 132972 - DNA, 15 bp, Homo sapiens
gaatttccttctcct

SEQ ID NO: 132973 - DNA, 15 bp, Homo sapiens
aatttccttctcctg

SEQ ID NO: 132974 - DNA, 15 bp, Homo sapiens
atttccttctcctgg

SEQ ID NO: 132975 - DNA, 15 bp, Homo sapiens
tttccttctcctggc

SEQ ID NO: 132976 - DNA, 15 bp, Homo sapiens
ttccttctcctggct

SEQ ID NO: 132977 - DNA, 15 bp, Homo sapiens
tccttctcctggctc

SEQ ID NO: 132978 - DNA, 15 bp, Homo sapiens
ccttctcctggctca

SEQ ID NO: 132979 - DNA, 15 bp, Homo sapiens
cttctcctggctcag

SEQ ID NO: 132980 - DNA, 15 bp, Homo sapiens
ttctcctggctcaga

SEQ ID NO: 132981 - DNA, 15 bp, Homo sapiens
tctcctggctcagaa

SEQ ID NO: 132982 - DNA, 15 bp, Homo sapiens
ctcctggctcagaag

SEQ ID NO: 132983 - DNA, 15 bp, Homo sapiens
tcctggctcagaagc

SEQ ID NO: 132984 - DNA, 15 bp, Homo sapiens
cctggctcagaagct

SEQ ID NO: 132985 - DNA, 15 bp, Homo sapiens
ctggctcagaagctc

SEQ ID NO: 132986 - DNA, 15 bp, Homo sapiens
tggctcagaagctcc

SEQ ID NO: 132987 - DNA, 15 bp, Homo sapiens
ggctcagaagctccc

SEQ ID NO: 132988 - DNA, 15 bp, Homo sapiens
gctcagaagctcccc

SEQ ID NO: 132989 - DNA, 15 bp, Homo sapiens
ctcagaagctccccc

SEQ ID NO: 132990 - DNA, 15 bp, Homo sapiens
tcagaagctccccca

SEQ ID NO: 132991 - DNA, 15 bp, Homo sapiens
cagaagctcccccac

SEQ ID NO: 132992 - DNA, 15 bp, Homo sapiens
agaagctcccccact

SEQ ID NO: 132993 - DNA, 15 bp, Homo sapiens
gaagctcccccactg

SEQ ID NO: 132994 - DNA, 15 bp, Homo sapiens
aagctcccccactga

SEQ ID NO: 132995 - DNA, 15 bp, Homo sapiens
agctcccccactgag

SEQ ID NO: 132996 - DNA, 15 bp, Homo sapiens
gctcccccactgagc

SEQ ID NO: 132997 - DNA, 15 bp, Homo sapiens
ctcccccactgagca

SEQ ID NO: 132998 - DNA, 15 bp, Homo sapiens
tcccccactgagcac

SEQ ID NO: 132999 - DNA, 15 bp, Homo sapiens
cccccactgagcacc

SEQ ID NO: 133000 - DNA, 15 bp, Homo sapiens
ccccactgagcacct

SEQ ID NO: 133001 - DNA, 15 bp, Homo sapiens
cccactgagcacctt

SEQ ID NO: 133002 - DNA, 15 bp, Homo sapiens
ccactgagcaccttg

SEQ ID NO: 133003 - DNA, 15 bp, Homo sapiens
cactgagcaccttgt

SEQ ID NO: 133004 - DNA, 15 bp, Homo sapiens
actgagcaccttgtg

SEQ ID NO: 133005 - DNA, 15 bp, Homo sapiens
ctgagcaccttgtga

SEQ ID NO: 133006 - DNA, 15 bp, Homo sapiens
tgagcaccttgtgac

SEQ ID NO: 133007 - DNA, 15 bp, Homo sapiens
gagcaccttgtgacc

SEQ ID NO: 133008 - DNA, 15 bp, Homo sapiens
agcaccttgtgaccc

SEQ ID NO: 133009 - DNA, 15 bp, Homo sapiens
gcaccttgtgacccc

SEQ ID NO: 133010 - DNA, 15 bp, Homo sapiens
caccttgtgaccccc

SEQ ID NO: 133011 - DNA, 15 bp, Homo sapiens
accttgtgaccccct

SEQ ID NO: 133012 - DNA, 15 bp, Homo sapiens
ccttgtgaccccctg

SEQ ID NO: 133013 - DNA, 15 bp, Homo sapiens
cttgtgaccccctgc

SEQ ID NO: 133014 - DNA, 15 bp, Homo sapiens
ttgtgaccccctgcc

SEQ ID NO: 133015 - DNA, 15 bp, Homo sapiens
tgtgaccccctgccc

SEQ ID NO: 133016 - DNA, 15 bp, Homo sapiens
gtgaccccctgcccc

SEQ ID NO: 133017 - DNA, 15 bp, Homo sapiens
tgaccccctgcccct

SEQ ID NO: 133018 - DNA, 15 bp, Homo sapiens
gaccccctgcccctg

SEQ ID NO: 133019 - DNA, 15 bp, Homo sapiens
accccctgcccctgc

SEQ ID NO: 133020 - DNA, 15 bp, Homo sapiens
ccccctgcccctgcc

SEQ ID NO: 133021 - DNA, 15 bp, Homo sapiens
cccctgcccctgccc

SEQ ID NO: 133022 - DNA, 15 bp, Homo sapiens
ccctgcccctgccca

SEQ ID NO: 133023 - DNA, 15 bp, Homo sapiens
cctgcccctgcccac

SEQ ID NO: 133024 - DNA, 15 bp, Homo sapiens
ctgcccctgcccacc

SEQ ID NO: 133025 - DNA, 15 bp, Homo sapiens
tgcccctgcccacca

SEQ ID NO: 133026 - DNA, 15 bp, Homo sapiens
gcccctgcccaccag

SEQ ID NO: 133027 - DNA, 15 bp, Homo sapiens
cccctgcccaccaga

SEQ ID NO: 133028 - DNA, 15 bp, Homo sapiens
ccctgcccaccagag

SEQ ID NO: 133029 - DNA, 15 bp, Homo sapiens
cctgcccaccagaga

SEQ ID NO: 133030 - DNA, 15 bp, Homo sapiens
ctgcccaccagagaa

SEQ ID NO: 133031 - DNA, 15 bp, Homo sapiens
tgcccaccagagaac

SEQ ID NO: 133032 - DNA, 15 bp, Homo sapiens
gcccaccagagaaca

SEQ ID NO: 133033 - DNA, 15 bp, Homo sapiens
cccaccagagaacaa

SEQ ID NO: 133034 - DNA, 15 bp, Homo sapiens
ccaccagagaacaac

SEQ ID NO: 133035 - DNA, 15 bp, Homo sapiens
caccagagaacaacc

SEQ ID NO: 133036 - DNA, 15 bp, Homo sapiens
accagagaacaaccc

SEQ ID NO: 133037 - DNA, 15 bp, Homo sapiens
ccagagaacaacccc

SEQ ID NO: 133038 - DNA, 15 bp, Homo sapiens
cagagaacaaccccc

SEQ ID NO: 133039 - DNA, 15 bp, Homo sapiens
agagaacaaccccct

SEQ ID NO: 133040 - DNA, 15 bp, Homo sapiens
gagaacaaccccctt

SEQ ID NO: 133041 - DNA, 15 bp, Homo sapiens
agaacaacccccttt

SEQ ID NO: 133042 - DNA, 15 bp, Homo sapiens
gaacaaccccctttg

SEQ ID NO: 133043 - DNA, 15 bp, Homo sapiens
aacaaccccctttga

SEQ ID NO: 133044 - DNA, 15 bp, Homo sapiens
acaaccccctttgac

SEQ ID NO: 133045 - DNA, 15 bp, Homo sapiens
caaccccctttgact

SEQ ID NO: 133046 - DNA, 15 bp, Homo sapiens
aaccccctttgactg

SEQ ID NO: 133047 - DNA, 15 bp, Homo sapiens
accccctttgactgt

SEQ ID NO: 133048 - DNA, 15 bp, Homo sapiens
ccccctttgactgta

SEQ ID NO: 133049 - DNA, 15 bp, Homo sapiens
cccctttgactgtaa

SEQ ID NO: 133050 - DNA, 15 bp, Homo sapiens
ccctttgactgtaat

SEQ ID NO: 133051 - DNA, 15 bp, Homo sapiens
cctttgactgtaatt

SEQ ID NO: 133052 - DNA, 15 bp, Homo sapiens
ctttgactgtaattt

SEQ ID NO: 133053 - DNA, 15 bp, Homo sapiens
tttgactgtaatttt

SEQ ID NO: 133054 - DNA, 15 bp, Homo sapiens
ttgactgtaattttc

SEQ ID NO: 133055 - DNA, 15 bp, Homo sapiens
tgactgtaattttcc

SEQ ID NO: 133056 - DNA, 15 bp, Homo sapiens
gactgtaattttcca

SEQ ID NO: 133057 - DNA, 15 bp, Homo sapiens
actgtaattttccat

SEQ ID NO: 133058 - DNA, 15 bp, Homo sapiens
ctgtaattttccatt

SEQ ID NO: 133059 - DNA, 15 bp, Homo sapiens
tgtaattttccatta

SEQ ID NO: 133060 - DNA, 15 bp, Homo sapiens
gtaattttccattac

SEQ ID NO: 133061 - DNA, 15 bp, Homo sapiens
taattttccattacc

SEQ ID NO: 133062 - DNA, 15 bp, Homo sapiens
aattttccattacct

SEQ ID NO: 133063 - DNA, 15 bp, Homo sapiens
attttccattacctt

SEQ ID NO: 133064 - DNA, 15 bp, Homo sapiens
ttttccattaccttc

SEQ ID NO: 133065 - DNA, 15 bp, Homo sapiens
tttccattaccttcc

SEQ ID NO: 133066 - DNA, 15 bp, Homo sapiens
ttccattaccttccc

SEQ ID NO: 133067 - DNA, 15 bp, Homo sapiens
tccattaccttccca

SEQ ID NO: 133068 - DNA, 15 bp, Homo sapiens
ccattaccttcccaa

SEQ ID NO: 133069 - DNA, 15 bp, Homo sapiens
cattaccttcccaaa

SEQ ID NO: 133070 - DNA, 15 bp, Homo sapiens
attaccttcccaaat

SEQ ID NO: 133071 - DNA, 15 bp, Homo sapiens
ttaccttcccaaatc

SEQ ID NO: 133072 - DNA, 15 bp, Homo sapiens
taccttcccaaatcc

SEQ ID NO: 133073 - DNA, 15 bp, Homo sapiens
accttcccaaatcct

SEQ ID NO: 133074 - DNA, 15 bp, Homo sapiens
ccttcccaaatccta

SEQ ID NO: 133075 - DNA, 15 bp, Homo sapiens
cttcccaaatcctat

SEQ ID NO: 133076 - DNA, 15 bp, Homo sapiens
ttcccaaatcctata

SEQ ID NO: 133077 - DNA, 15 bp, Homo sapiens
tcccaaatcctataa

SEQ ID NO: 133078 - DNA, 15 bp, Homo sapiens
cccaaatcctataaa

SEQ ID NO: 133079 - DNA, 15 bp, Homo sapiens
ccaaatcctataaaa

SEQ ID NO: 133080 - DNA, 15 bp, Homo sapiens
caaatcctataaaac

SEQ ID NO: 133081 - DNA, 15 bp, Homo sapiens
aaatcctataaaacg

SEQ ID NO: 133082 - DNA, 15 bp, Homo sapiens
aatcctataaaacgg

SEQ ID NO: 133083 - DNA, 15 bp, Homo sapiens
atcctataaaacggc

SEQ ID NO: 133084 - DNA, 15 bp, Homo sapiens
tcctataaaacggcc

SEQ ID NO: 133085 - DNA, 15 bp, Homo sapiens
cctataaaacggccc

SEQ ID NO: 133086 - DNA, 15 bp, Homo sapiens
ctataaaacggcccc

SEQ ID NO: 133087 - DNA, 15 bp, Homo sapiens
tataaaacggcccca

SEQ ID NO: 133088 - DNA, 15 bp, Homo sapiens
ataaaacggccccac

SEQ ID NO: 133089 - DNA, 15 bp, Homo sapiens
taaaacggccccacc

SEQ ID NO: 133090 - DNA, 15 bp, Homo sapiens
aaaacggccccaccc

SEQ ID NO: 133091 - DNA, 15 bp, Homo sapiens
aaacggccccacccc

SEQ ID NO: 133092 - DNA, 15 bp, Homo sapiens
aacggccccacccct

SEQ ID NO: 133093 - DNA, 15 bp, Homo sapiens
acggccccaccccta

SEQ ID NO: 133094 - DNA, 15 bp, Homo sapiens
cggccccacccctat

SEQ ID NO: 133095 - DNA, 15 bp, Homo sapiens
ggccccacccctatc

SEQ ID NO: 133096 - DNA, 15 bp, Homo sapiens
gccccacccctatct

SEQ ID NO: 133097 - DNA, 15 bp, Homo sapiens
ccccacccctatctc

SEQ ID NO: 133098 - DNA, 15 bp, Homo sapiens
cccacccctatctcc

SEQ ID NO: 133099 - DNA, 15 bp, Homo sapiens
ccacccctatctccc

SEQ ID NO: 133100 - DNA, 15 bp, Homo sapiens
cacccctatctccct

SEQ ID NO: 133101 - DNA, 15 bp, Homo sapiens
acccctatctccctt

SEQ ID NO: 133102 - DNA, 15 bp, Homo sapiens
cccctatctcccttt

SEQ ID NO: 133103 - DNA, 15 bp, Homo sapiens
ccctatctccctttg

SEQ ID NO: 133104 - DNA, 15 bp, Homo sapiens
cctatctccctttgc

SEQ ID NO: 133105 - DNA, 15 bp, Homo sapiens
ctatctccctttgct

SEQ ID NO: 133106 - DNA, 15 bp, Homo sapiens
tatctccctttgctg

SEQ ID NO: 133107 - DNA, 15 bp, Homo sapiens
atctccctttgctga

SEQ ID NO: 133108 - DNA, 15 bp, Homo sapiens
tctccctttgctgac

SEQ ID NO: 133109 - DNA, 15 bp, Homo sapiens
ctccctttgctgact

SEQ ID NO: 133110 - DNA, 15 bp, Homo sapiens
tccctttgctgactc

SEQ ID NO: 133111 - DNA, 15 bp, Homo sapiens
ccctttgctgactct

SEQ ID NO: 133112 - DNA, 15 bp, Homo sapiens
cctttgctgactctc

SEQ ID NO: 133113 - DNA, 15 bp, Homo sapiens
ctttgctgactctct

SEQ ID NO: 133114 - DNA, 15 bp, Homo sapiens
tttgctgactctctt

SEQ ID NO: 133115 - DNA, 15 bp, Homo sapiens
ttgctgactctcttt

SEQ ID NO: 133116 - DNA, 15 bp, Homo sapiens
tgctgactctctttt

SEQ ID NO: 133117 - DNA, 15 bp, Homo sapiens
gctgactctcttttc

SEQ ID NO: 133118 - DNA, 15 bp, Homo sapiens
ctgactctcttttcg

SEQ ID NO: 133119 - DNA, 15 bp, Homo sapiens
tgactctcttttcgg

SEQ ID NO: 133120 - DNA, 15 bp, Homo sapiens
gactctcttttcgga

SEQ ID NO: 133121 - DNA, 15 bp, Homo sapiens
actctcttttcggac

SEQ ID NO: 133122 - DNA, 15 bp, Homo sapiens
ctctcttttcggact

SEQ ID NO: 133123 - DNA, 15 bp, Homo sapiens
tctcttttcggactc

SEQ ID NO: 133124 - DNA, 15 bp, Homo sapiens
ctcttttcggactca

SEQ ID NO: 133125 - DNA, 15 bp, Homo sapiens
tcttttcggactcag

SEQ ID NO: 133126 - DNA, 15 bp, Homo sapiens
cttttcggactcagc

SEQ ID NO: 133127 - DNA, 15 bp, Homo sapiens
ttttcggactcagcc

SEQ ID NO: 133128 - DNA, 15 bp, Homo sapiens
tttcggactcagccc

SEQ ID NO: 133129 - DNA, 15 bp, Homo sapiens
ttcggactcagccca

SEQ ID NO: 133130 - DNA, 15 bp, Homo sapiens
tcggactcagcccac

SEQ ID NO: 133131 - DNA, 15 bp, Homo sapiens
cggactcagcccacc

SEQ ID NO: 133132 - DNA, 15 bp, Homo sapiens
ggactcagcccacct

SEQ ID NO: 133133 - DNA, 15 bp, Homo sapiens
gactcagcccacctg

SEQ ID NO: 133134 - DNA, 15 bp, Homo sapiens
actcagcccacctgc

SEQ ID NO: 133135 - DNA, 15 bp, Homo sapiens
ctcagcccacctgca

SEQ ID NO: 133136 - DNA, 15 bp, Homo sapiens
tcagcccacctgcag

SEQ ID NO: 133137 - DNA, 15 bp, Homo sapiens
cagcccacctgcagc

SEQ ID NO: 133138 - DNA, 15 bp, Homo sapiens
agcccacctgcagcc

SEQ ID NO: 133139 - DNA, 15 bp, Homo sapiens
gcccacctgcagcca

SEQ ID NO: 133140 - DNA, 15 bp, Homo sapiens
cccacctgcagccag

SEQ ID NO: 133141 - DNA, 15 bp, Homo sapiens
ccacctgcagccagg

SEQ ID NO: 133142 - DNA, 15 bp, Homo sapiens
cacctgcagccaggt

SEQ ID NO: 133143 - DNA, 15 bp, Homo sapiens
acctgcagccaggtg

SEQ ID NO: 133144 - DNA, 15 bp, Homo sapiens
cctgcagccaggtga

SEQ ID NO: 133145 - DNA, 15 bp, Homo sapiens
ctgcagccaggtgaa

SEQ ID NO: 133146 - DNA, 15 bp, Homo sapiens
tgcagccaggtgaaa

SEQ ID NO: 133147 - DNA, 15 bp, Homo sapiens
gcagccaggtgaaaa

SEQ ID NO: 133148 - DNA, 15 bp, Homo sapiens
cagccaggtgaaaaa

SEQ ID NO: 133149 - DNA, 15 bp, Homo sapiens
agccaggtgaaaaaa

SEQ ID NO: 133150 - DNA, 15 bp, Homo sapiens
gccaggtgaaaaaaa

SEQ ID NO: 133151 - DNA, 15 bp, Homo sapiens
ccaggtgaaaaaaac

SEQ ID NO: 133152 - DNA, 15 bp, Homo sapiens
caggtgaaaaaaaca

SEQ ID NO: 133153 - DNA, 15 bp, Homo sapiens
aggtgaaaaaaacag

SEQ ID NO: 133154 - DNA, 15 bp, Homo sapiens
ggtgaaaaaaacagc

SEQ ID NO: 133155 - DNA, 15 bp, Homo sapiens
gtgaaaaaaacagct

SEQ ID NO: 133156 - DNA, 15 bp, Homo sapiens
tgaaaaaaacagctt

SEQ ID NO: 133157 - DNA, 15 bp, Homo sapiens
gaaaaaaacagcttt

SEQ ID NO: 133158 - DNA, 15 bp, Homo sapiens
aaaaaaacagcttta

SEQ ID NO: 133159 - DNA, 15 bp, Homo sapiens
aaaaaacagctttat

SEQ ID NO: 133160 - DNA, 15 bp, Homo sapiens
aaaaacagctttatt

SEQ ID NO: 133161 - DNA, 15 bp, Homo sapiens
aaaacagctttattg

SEQ ID NO: 133162 - DNA, 15 bp, Homo sapiens
aaacagctttattgc

SEQ ID NO: 133163 - DNA, 15 bp, Homo sapiens
aacagctttattgct

SEQ ID NO: 133164 - DNA, 15 bp, Homo sapiens
acagctttattgctc

SEQ ID NO: 133165 - DNA, 15 bp, Homo sapiens
cagctttattgctca

SEQ ID NO: 133166 - DNA, 15 bp, Homo sapiens
agctttattgctcac

SEQ ID NO: 133167 - DNA, 15 bp, Homo sapiens
gctttattgctcaca

SEQ ID NO: 133168 - DNA, 15 bp, Homo sapiens
ctttattgctcacac

SEQ ID NO: 133169 - DNA, 15 bp, Homo sapiens
tttattgctcacaca

SEQ ID NO: 133170 - DNA, 15 bp, Homo sapiens
ttattgctcacacaa

SEQ ID NO: 133171 - DNA, 15 bp, Homo sapiens
tattgctcacacaaa

SEQ ID NO: 133172 - DNA, 15 bp, Homo sapiens
attgctcacacaaag

SEQ ID NO: 133173 - DNA, 15 bp, Homo sapiens
ttgctcacacaaagc

SEQ ID NO: 133174 - DNA, 15 bp, Homo sapiens
tgctcacacaaagcc

SEQ ID NO: 133175 - DNA, 15 bp, Homo sapiens
gctcacacaaagcct

SEQ ID NO: 133176 - DNA, 15 bp, Homo sapiens
ctcacacaaagcctg

SEQ ID NO: 133177 - DNA, 15 bp, Homo sapiens
tcacacaaagcctgt

SEQ ID NO: 133178 - DNA, 15 bp, Homo sapiens
cacacaaagcctgtt

SEQ ID NO: 133179 - DNA, 15 bp, Homo sapiens
acacaaagcctgttt

SEQ ID NO: 133180 - DNA, 15 bp, Homo sapiens
cacaaagcctgtttg

SEQ ID NO: 133181 - DNA, 15 bp, Homo sapiens
acaaagcctgtttgg

SEQ ID NO: 133182 - DNA, 15 bp, Homo sapiens
caaagcctgtttggt

SEQ ID NO: 133183 - DNA, 15 bp, Homo sapiens
aaagcctgtttggtg

SEQ ID NO: 133184 - DNA, 15 bp, Homo sapiens
aagcctgtttggtgg

SEQ ID NO: 133185 - DNA, 15 bp, Homo sapiens
agcctgtttggtggt

SEQ ID NO: 133186 - DNA, 15 bp, Homo sapiens
gcctgtttggtggtc

SEQ ID NO: 133187 - DNA, 15 bp, Homo sapiens
cctgtttggtggtct

SEQ ID NO: 133188 - DNA, 15 bp, Homo sapiens
ctgtttggtggtctc

SEQ ID NO: 133189 - DNA, 15 bp, Homo sapiens
tgtttggtggtctct

SEQ ID NO: 133190 - DNA, 15 bp, Homo sapiens
gtttggtggtctctt

SEQ ID NO: 133191 - DNA, 15 bp, Homo sapiens
tttggtggtctcttc

SEQ ID NO: 133192 - DNA, 15 bp, Homo sapiens
ttggtggtctcttca

SEQ ID NO: 133193 - DNA, 15 bp, Homo sapiens
tggtggtctcttcac

SEQ ID NO: 133194 - DNA, 15 bp, Homo sapiens
ggtggtctcttcaca

SEQ ID NO: 133195 - DNA, 15 bp, Homo sapiens
gtggtctcttcacac

SEQ ID NO: 133196 - DNA, 15 bp, Homo sapiens
tggtctcttcacaca

SEQ ID NO: 133197 - DNA, 15 bp, Homo sapiens
ggtctcttcacacag

SEQ ID NO: 133198 - DNA, 15 bp, Homo sapiens
gtctcttcacacaga

SEQ ID NO: 133199 - DNA, 15 bp, Homo sapiens
tctcttcacacagac

SEQ ID NO: 133200 - DNA, 15 bp, Homo sapiens
ctcttcacacagacg

SEQ ID NO: 133201 - DNA, 15 bp, Homo sapiens
tcttcacacagacgc

SEQ ID NO: 133202 - DNA, 15 bp, Homo sapiens
cttcacacagacgca

SEQ ID NO: 133203 - DNA, 15 bp, Homo sapiens
ttcacacagacgcac

SEQ ID NO: 133204 - DNA, 15 bp, Homo sapiens
tcacacagacgcaca

SEQ ID NO: 133205 - DNA, 15 bp, Homo sapiens
cacacagacgcacat

SEQ ID NO: 133206 - DNA, 15 bp, Homo sapiens
acacagacgcacatg

SEQ ID NO: 133207 - DNA, 15 bp, Homo sapiens
cacagacgcacatga

SEQ ID NO: 133208 - DNA, 15 bp, Homo sapiens
acagacgcacatgaa

SEQ ID NO: 133209 - DNA, 15 bp, Homo sapiens
cagacgcacatgaaa

SEQ ID NO: 133210 - DNA, 15 bp, Homo sapiens
agacgcacatgaaac

SEQ ID NO: 133211 - DNA, 15 bp, Homo sapiens
gacgcacatgaaact

SEQ ID NO: 133212 - DNA, 15 bp, Homo sapiens
acgcacatgaaactc

SEQ ID NO: 133213 - DNA, 15 bp, Homo sapiens
cgcacatgaaactca

SEQ ID NO: 133214 - DNA, 15 bp, Homo sapiens
gcacatgaaactcat

SEQ ID NO: 133215 - DNA, 15 bp, Homo sapiens
cacatgaaactcatg

SEQ ID NO: 133216 - DNA, 15 bp, Homo sapiens
acatgaaactcatgg

SEQ ID NO: 133217 - DNA, 15 bp, Homo sapiens
catgaaactcatggt

SEQ ID NO: 133218 - DNA, 15 bp, Homo sapiens
atgaaactcatggta

SEQ ID NO: 133219 - DNA, 15 bp, Homo sapiens
tgaaactcatggtat

SEQ ID NO: 133220 - DNA, 15 bp, Homo sapiens
gaaactcatggtatc

SEQ ID NO: 133221 - DNA, 15 bp, Homo sapiens
aaactcatggtatct

SEQ ID NO: 133222 - DNA, 15 bp, Homo sapiens
aactcatggtatctg

SEQ ID NO: 133223 - DNA, 15 bp, Homo sapiens
actcatggtatctgt

SEQ ID NO: 133224 - DNA, 15 bp, Homo sapiens
ctcatggtatctgtg

SEQ ID NO: 133225 - DNA, 15 bp, Homo sapiens
tcatggtatctgtga

SEQ ID NO: 133226 - DNA, 15 bp, Homo sapiens
catggtatctgtgag

SEQ ID NO: 133227 - DNA, 15 bp, Homo sapiens
atggtatctgtgagg

SEQ ID NO: 133228 - DNA, 15 bp, Homo sapiens
tggtatctgtgaggg

SEQ ID NO: 133229 - DNA, 15 bp, Homo sapiens
ggtatctgtgagggg

SEQ ID NO: 133230 - DNA, 15 bp, Homo sapiens
gtatctgtgaggggc

SEQ ID NO: 133231 - DNA, 15 bp, Homo sapiens
tatctgtgaggggcc

SEQ ID NO: 133232 - DNA, 15 bp, Homo sapiens
atctgtgaggggccc

SEQ ID NO: 133233 - DNA, 15 bp, Homo sapiens
tctgtgaggggccct

SEQ ID NO: 133234 - DNA, 15 bp, Homo sapiens
ctgtgaggggcccta

SEQ ID NO: 133235 - DNA, 15 bp, Homo sapiens
tgtgaggggccctaa

SEQ ID NO: 133236 - DNA, 15 bp, Homo sapiens
gtgaggggccctaat

SEQ ID NO: 133237 - DNA, 15 bp, Homo sapiens
tgaggggccctaatg

SEQ ID NO: 133238 - DNA, 15 bp, Homo sapiens
gaggggccctaatgc

SEQ ID NO: 133239 - DNA, 15 bp, Homo sapiens
aggggccctaatgct

SEQ ID NO: 133240 - DNA, 15 bp, Homo sapiens
ggggccctaatgcta

SEQ ID NO: 133241 - DNA, 15 bp, Homo sapiens
gggccctaatgctat

SEQ ID NO: 133242 - DNA, 15 bp, Homo sapiens
ggccctaatgctatt

SEQ ID NO: 133243 - DNA, 15 bp, Homo sapiens
gccctaatgctattg

SEQ ID NO: 133244 - DNA, 15 bp, Homo sapiens
ccctaatgctattgg

SEQ ID NO: 133245 - DNA, 15 bp, Homo sapiens
cctaatgctattggt

SEQ ID NO: 133246 - DNA, 15 bp, Homo sapiens
ctaatgctattggtg

SEQ ID NO: 133247 - DNA, 15 bp, Homo sapiens
taatgctattggtga

SEQ ID NO: 133248 - DNA, 15 bp, Homo sapiens
aatgctattggtgag

SEQ ID NO: 133249 - DNA, 15 bp, Homo sapiens
atgctattggtgagg

SEQ ID NO: 133250 - DNA, 15 bp, Homo sapiens
tgctattggtgaggg

SEQ ID NO: 133251 - DNA, 15 bp, Homo sapiens
gctattggtgagggc

SEQ ID NO: 133252 - DNA, 15 bp, Homo sapiens
ctattggtgagggca

SEQ ID NO: 133253 - DNA, 15 bp, Homo sapiens
tattggtgagggcac

SEQ ID NO: 133254 - DNA, 15 bp, Homo sapiens
attggtgagggcact

SEQ ID NO: 133255 - DNA, 15 bp, Homo sapiens
ttggtgagggcactg

SEQ ID NO: 133256 - DNA, 15 bp, Homo sapiens
tggtgagggcactgc

SEQ ID NO: 133257 - DNA, 15 bp, Homo sapiens
ggtgagggcactgct

SEQ ID NO: 133258 - DNA, 15 bp, Homo sapiens
gtgagggcactgctc

SEQ ID NO: 133259 - DNA, 15 bp, Homo sapiens
tgagggcactgctca

SEQ ID NO: 133260 - DNA, 15 bp, Homo sapiens
gagggcactgctcac

SEQ ID NO: 133261 - DNA, 15 bp, Homo sapiens
agggcactgctcaca

SEQ ID NO: 133262 - DNA, 15 bp, Homo sapiens
gggcactgctcacat

SEQ ID NO: 133263 - DNA, 15 bp, Homo sapiens
ggcactgctcacata

SEQ ID NO: 133264 - DNA, 15 bp, Homo sapiens
gcactgctcacataa

SEQ ID NO: 133265 - DNA, 15 bp, Homo sapiens
cactgctcacataac

SEQ ID NO: 133266 - DNA, 15 bp, Homo sapiens
actgctcacataact

SEQ ID NO: 133267 - DNA, 15 bp, Homo sapiens
ctgctcacataactt

SEQ ID NO: 133268 - DNA, 15 bp, Homo sapiens
tgctcacataactta

SEQ ID NO: 133269 - DNA, 15 bp, Homo sapiens
gctcacataacttaa

SEQ ID NO: 133270 - DNA, 15 bp, Homo sapiens
ctcacataacttaat

SEQ ID NO: 133271 - DNA, 15 bp, Homo sapiens
tcacataacttaatc

SEQ ID NO: 133272 - DNA, 15 bp, Homo sapiens
cacataacttaatca

SEQ ID NO: 133273 - DNA, 15 bp, Homo sapiens
acataacttaatcac

SEQ ID NO: 133274 - DNA, 15 bp, Homo sapiens
cataacttaatcacc

SEQ ID NO: 133275 - DNA, 15 bp, Homo sapiens
ataacttaatcaccc

SEQ ID NO: 133276 - DNA, 15 bp, Homo sapiens
taacttaatcacccc

SEQ ID NO: 133277 - DNA, 15 bp, Homo sapiens
aacttaatcacccct

SEQ ID NO: 133278 - DNA, 15 bp, Homo sapiens
acttaatcacccctt

SEQ ID NO: 133279 - DNA, 15 bp, Homo sapiens
cttaatcacccctta

SEQ ID NO: 133280 - DNA, 15 bp, Homo sapiens
ttaatcaccccttaa

SEQ ID NO: 133281 - DNA, 15 bp, Homo sapiens
taatcaccccttaaa

SEQ ID NO: 133282 - DNA, 15 bp, Homo sapiens
aatcaccccttaaag

SEQ ID NO: 133283 - DNA, 15 bp, Homo sapiens
atcaccccttaaagg

SEQ ID NO: 133284 - DNA, 15 bp, Homo sapiens
tcaccccttaaaggc

SEQ ID NO: 133285 - DNA, 15 bp, Homo sapiens
caccccttaaaggcc

SEQ ID NO: 133286 - DNA, 15 bp, Homo sapiens
accccttaaaggccc

SEQ ID NO: 133287 - DNA, 15 bp, Homo sapiens
ccccttaaaggccct

SEQ ID NO: 133288 - DNA, 15 bp, Homo sapiens
cccttaaaggccctg

SEQ ID NO: 133289 - DNA, 15 bp, Homo sapiens
ccttaaaggccctgc

SEQ ID NO: 133290 - DNA, 15 bp, Homo sapiens
cttaaaggccctgcc

SEQ ID NO: 133291 - DNA, 15 bp, Homo sapiens
ttaaaggccctgcct

SEQ ID NO: 133292 - DNA, 15 bp, Homo sapiens
taaaggccctgcctc

SEQ ID NO: 133293 - DNA, 15 bp, Homo sapiens
aaaggccctgcctct

SEQ ID NO: 133294 - DNA, 15 bp, Homo sapiens
aaggccctgcctctt

SEQ ID NO: 133295 - DNA, 15 bp, Homo sapiens
aggccctgcctctta

SEQ ID NO: 133296 - DNA, 15 bp, Homo sapiens
ggccctgcctcttaa

SEQ ID NO: 133297 - DNA, 15 bp, Homo sapiens
gccctgcctcttaat

SEQ ID NO: 133298 - DNA, 15 bp, Homo sapiens
ccctgcctcttaata

SEQ ID NO: 133299 - DNA, 15 bp, Homo sapiens
cctgcctcttaatac

SEQ ID NO: 133300 - DNA, 15 bp, Homo sapiens
ctgcctcttaatact

SEQ ID NO: 133301 - DNA, 15 bp, Homo sapiens
tgcctcttaatactg

SEQ ID NO: 133302 - DNA, 15 bp, Homo sapiens
gcctcttaatactgt

SEQ ID NO: 133303 - DNA, 15 bp, Homo sapiens
cctcttaatactgtc

SEQ ID NO: 133304 - DNA, 15 bp, Homo sapiens
ctcttaatactgtca

SEQ ID NO: 133305 - DNA, 15 bp, Homo sapiens
tcttaatactgtcac

SEQ ID NO: 133306 - DNA, 15 bp, Homo sapiens
cttaatactgtcaca

SEQ ID NO: 133307 - DNA, 15 bp, Homo sapiens
ttaatactgtcacat

SEQ ID NO: 133308 - DNA, 15 bp, Homo sapiens
taatactgtcacatt

SEQ ID NO: 133309 - DNA, 15 bp, Homo sapiens
aatactgtcacattg

SEQ ID NO: 133310 - DNA, 15 bp, Homo sapiens
atactgtcacattgg

SEQ ID NO: 133311 - DNA, 15 bp, Homo sapiens
tactgtcacattggt

SEQ ID NO: 133312 - DNA, 15 bp, Homo sapiens
actgtcacattggtg

SEQ ID NO: 133313 - DNA, 15 bp, Homo sapiens
ctgtcacattggtga

SEQ ID NO: 133314 - DNA, 15 bp, Homo sapiens
tgtcacattggtgat

SEQ ID NO: 133315 - DNA, 15 bp, Homo sapiens
gtcacattggtgatg

SEQ ID NO: 133316 - DNA, 15 bp, Homo sapiens
tcacattggtgatga

SEQ ID NO: 133317 - DNA, 15 bp, Homo sapiens
cacattggtgatgaa

SEQ ID NO: 133318 - DNA, 15 bp, Homo sapiens
acattggtgatgaag

SEQ ID NO: 133319 - DNA, 15 bp, Homo sapiens
cattggtgatgaagt

SEQ ID NO: 133320 - DNA, 15 bp, Homo sapiens
attggtgatgaagtt

SEQ ID NO: 133321 - DNA, 15 bp, Homo sapiens
ttggtgatgaagttt

SEQ ID NO: 133322 - DNA, 15 bp, Homo sapiens
tggtgatgaagtttc

SEQ ID NO: 133323 - DNA, 15 bp, Homo sapiens
ggtgatgaagtttca

SEQ ID NO: 133324 - DNA, 15 bp, Homo sapiens
gtgatgaagtttcaa

SEQ ID NO: 133325 - DNA, 15 bp, Homo sapiens
tgatgaagtttcaat

SEQ ID NO: 133326 - DNA, 15 bp, Homo sapiens
gatgaagtttcaatg

SEQ ID NO: 133327 - DNA, 15 bp, Homo sapiens
atgaagtttcaatgt

SEQ ID NO: 133328 - DNA, 15 bp, Homo sapiens
tgaagtttcaatgta

SEQ ID NO: 133329 - DNA, 15 bp, Homo sapiens
gaagtttcaatgtat

SEQ ID NO: 133330 - DNA, 15 bp, Homo sapiens
aagtttcaatgtatg

SEQ ID NO: 133331 - DNA, 15 bp, Homo sapiens
agtttcaatgtatga

SEQ ID NO: 133332 - DNA, 15 bp, Homo sapiens
gtttcaatgtatgaa

SEQ ID NO: 133333 - DNA, 15 bp, Homo sapiens
tttcaatgtatgaac

SEQ ID NO: 133334 - DNA, 15 bp, Homo sapiens
ttcaatgtatgaact

SEQ ID NO: 133335 - DNA, 15 bp, Homo sapiens
tcaatgtatgaactt

SEQ ID NO: 133336 - DNA, 15 bp, Homo sapiens
caatgtatgaacttt

SEQ ID NO: 133337 - DNA, 15 bp, Homo sapiens
aatgtatgaactttg

SEQ ID NO: 133338 - DNA, 15 bp, Homo sapiens
atgtatgaactttga

SEQ ID NO: 133339 - DNA, 15 bp, Homo sapiens
tgtatgaactttgag

SEQ ID NO: 133340 - DNA, 15 bp, Homo sapiens
gtatgaactttgagg

SEQ ID NO: 133341 - DNA, 15 bp, Homo sapiens
tatgaactttgaggg

SEQ ID NO: 133342 - DNA, 15 bp, Homo sapiens
atgaactttgagggg

SEQ ID NO: 133343 - DNA, 15 bp, Homo sapiens
tgaactttgaggggg

SEQ ID NO: 133344 - DNA, 15 bp, Homo sapiens
gaactttgagggggg

SEQ ID NO: 133345 - DNA, 15 bp, Homo sapiens
aactttgagggggga

SEQ ID NO: 133346 - DNA, 15 bp, Homo sapiens
actttgaggggggac

SEQ ID NO: 133347 - DNA, 15 bp, Homo sapiens
ctttgaggggggaca

SEQ ID NO: 133348 - DNA, 15 bp, Homo sapiens
tttgaggggggacac

SEQ ID NO: 133349 - DNA, 15 bp, Homo sapiens
ttgaggggggacacg

SEQ ID NO: 133350 - DNA, 15 bp, Homo sapiens
tgaggggggacacgt

SEQ ID NO: 133351 - DNA, 15 bp, Homo sapiens
gaggggggacacgtt

SEQ ID NO: 133352 - DNA, 15 bp, Homo sapiens
aggggggacacgttc

SEQ ID NO: 133353 - DNA, 15 bp, Homo sapiens
ggggggacacgttca

SEQ ID NO: 133354 - DNA, 15 bp, Homo sapiens
gggggacacgttcaa

SEQ ID NO: 133355 - DNA, 15 bp, Homo sapiens
ggggacacgttcaaa

SEQ ID NO: 133356 - DNA, 15 bp, Homo sapiens
gggacacgttcaaat

SEQ ID NO: 133357 - DNA, 15 bp, Homo sapiens
ggacacgttcaaatc

SEQ ID NO: 133358 - DNA, 15 bp, Homo sapiens
gacacgttcaaatca

SEQ ID NO: 133359 - DNA, 15 bp, Homo sapiens
acacgttcaaatcat

SEQ ID NO: 133360 - DNA, 15 bp, Homo sapiens
cacgttcaaatcata

SEQ ID NO: 133361 - DNA, 15 bp, Homo sapiens
acgttcaaatcatag

SEQ ID NO: 133362 - DNA, 15 bp, Homo sapiens
cgttcaaatcatagc

SEQ ID NO: 133363 - DNA, 15 bp, Homo sapiens
gttcaaatcatagca

SEQ ID NO: 133364 - DNA, 15 bp, Homo sapiens
ttcaaatcatagcag

SEQ ID NO: 133365 - DNA, 15 bp, Homo sapiens
tcaaatcatagcagg

SEQ ID NO: 133366 - DNA, 15 bp, Homo sapiens
caaatcatagcaggt

SEQ ID NO: 133367 - DNA, 15 bp, Homo sapiens
aaatcatagcaggtg

SEQ ID NO: 133368 - DNA, 15 bp, Homo sapiens
aatcatagcaggtgt

SEQ ID NO: 133369 - DNA, 15 bp, Homo sapiens
atcatagcaggtgtg

SEQ ID NO: 133370 - DNA, 15 bp, Homo sapiens
tcatagcaggtgtgc

SEQ ID NO: 133371 - DNA, 15 bp, Homo sapiens
catagcaggtgtgct

SEQ ID NO: 133372 - DNA, 15 bp, Homo sapiens
atagcaggtgtgcta

SEQ ID NO: 133373 - DNA, 15 bp, Homo sapiens
tagcaggtgtgctat

SEQ ID NO: 133374 - DNA, 15 bp, Homo sapiens
agcaggtgtgctatt

SEQ ID NO: 133375 - DNA, 15 bp, Homo sapiens
gcaggtgtgctattg

SEQ ID NO: 133376 - DNA, 15 bp, Homo sapiens
caggtgtgctattgc

SEQ ID NO: 133377 - DNA, 15 bp, Homo sapiens
aggtgtgctattgcc

SEQ ID NO: 133378 - DNA, 15 bp, Homo sapiens
ggtgtgctattgcct

SEQ ID NO: 133379 - DNA, 15 bp, Homo sapiens
gtgtgctattgcctt

SEQ ID NO: 133380 - DNA, 15 bp, Homo sapiens
tgtgctattgcctta

SEQ ID NO: 133381 - DNA, 15 bp, Homo sapiens
gtgctattgccttac

SEQ ID NO: 133382 - DNA, 15 bp, Homo sapiens
tgctattgccttact

SEQ ID NO: 133383 - DNA, 15 bp, Homo sapiens
gctattgccttacta

SEQ ID NO: 133384 - DNA, 15 bp, Homo sapiens
ctattgccttactag

SEQ ID NO: 133385 - DNA, 15 bp, Homo sapiens
tattgccttactagc

SEQ ID NO: 133386 - DNA, 15 bp, Homo sapiens
attgccttactagca

SEQ ID NO: 133387 - DNA, 15 bp, Homo sapiens
ttgccttactagcaa

SEQ ID NO: 133388 - DNA, 15 bp, Homo sapiens
tgccttactagcaaa

SEQ ID NO: 133389 - DNA, 15 bp, Homo sapiens
gccttactagcaaag

SEQ ID NO: 133390 - DNA, 15 bp, Homo sapiens
ccttactagcaaagt

SEQ ID NO: 133391 - DNA, 15 bp, Homo sapiens
cttactagcaaagta

SEQ ID NO: 133392 - DNA, 15 bp, Homo sapiens
ttactagcaaagtaa

SEQ ID NO: 133393 - DNA, 15 bp, Homo sapiens
tactagcaaagtaat

SEQ ID NO: 133394 - DNA, 15 bp, Homo sapiens
actagcaaagtaatc

SEQ ID NO: 133395 - DNA, 15 bp, Homo sapiens
ctagcaaagtaatct

SEQ ID NO: 133396 - DNA, 15 bp, Homo sapiens
tagcaaagtaatctg

SEQ ID NO: 133397 - DNA, 15 bp, Homo sapiens
agcaaagtaatctgg

SEQ ID NO: 133398 - DNA, 15 bp, Homo sapiens
gcaaagtaatctggg

SEQ ID NO: 133399 - DNA, 15 bp, Homo sapiens
caaagtaatctgggg

SEQ ID NO: 133400 - DNA, 15 bp, Homo sapiens
aaagtaatctggggg

SEQ ID NO: 133401 - DNA, 15 bp, Homo sapiens
aagtaatctggggga

SEQ ID NO: 133402 - DNA, 15 bp, Homo sapiens
agtaatctgggggaa

SEQ ID NO: 133403 - DNA, 15 bp, Homo sapiens
gtaatctgggggaag

SEQ ID NO: 133404 - DNA, 15 bp, Homo sapiens
taatctgggggaaga

SEQ ID NO: 133405 - DNA, 15 bp, Homo sapiens
aatctgggggaagat

SEQ ID NO: 133406 - DNA, 15 bp, Homo sapiens
atctgggggaagatg

SEQ ID NO: 133407 - DNA, 15 bp, Homo sapiens
tctgggggaagatga

SEQ ID NO: 133408 - DNA, 15 bp, Homo sapiens
ctgggggaagatgag

SEQ ID NO: 133409 - DNA, 15 bp, Homo sapiens
tgggggaagatgagt

SEQ ID NO: 133410 - DNA, 15 bp, Homo sapiens
gggggaagatgagta

SEQ ID NO: 133411 - DNA, 15 bp, Homo sapiens
ggggaagatgagtaa

SEQ ID NO: 133412 - DNA, 15 bp, Homo sapiens
gggaagatgagtaat

SEQ ID NO: 133413 - DNA, 15 bp, Homo sapiens
ggaagatgagtaatg

SEQ ID NO: 133414 - DNA, 15 bp, Homo sapiens
gaagatgagtaatgt

SEQ ID NO: 133415 - DNA, 15 bp, Homo sapiens
aagatgagtaatgtc

SEQ ID NO: 133416 - DNA, 15 bp, Homo sapiens
agatgagtaatgtct

SEQ ID NO: 133417 - DNA, 15 bp, Homo sapiens
gatgagtaatgtctc

SEQ ID NO: 133418 - DNA, 15 bp, Homo sapiens
atgagtaatgtctcg

SEQ ID NO: 133419 - DNA, 15 bp, Homo sapiens
tgagtaatgtctcgt

SEQ ID NO: 133420 - DNA, 15 bp, Homo sapiens
gagtaatgtctcgtt

SEQ ID NO: 133421 - DNA, 15 bp, Homo sapiens
agtaatgtctcgttc

SEQ ID NO: 133422 - DNA, 15 bp, Homo sapiens
gtaatgtctcgttcc

SEQ ID NO: 133423 - DNA, 15 bp, Homo sapiens
taatgtctcgttcca

SEQ ID NO: 133424 - DNA, 15 bp, Homo sapiens
aatgtctcgttccac

SEQ ID NO: 133425 - DNA, 15 bp, Homo sapiens
atgtctcgttccacc

SEQ ID NO: 133426 - DNA, 15 bp, Homo sapiens
tgtctcgttccaccc

SEQ ID NO: 133427 - DNA, 15 bp, Homo sapiens
gtctcgttccacccc

SEQ ID NO: 133428 - DNA, 15 bp, Homo sapiens
tctcgttccacccct

SEQ ID NO: 133429 - DNA, 15 bp, Homo sapiens
ctcgttccacccctg

SEQ ID NO: 133430 - DNA, 15 bp, Homo sapiens
tcgttccacccctga

SEQ ID NO: 133431 - DNA, 15 bp, Homo sapiens
cgttccacccctgat

SEQ ID NO: 133432 - DNA, 15 bp, Homo sapiens
gttccacccctgatt

SEQ ID NO: 133433 - DNA, 15 bp, Homo sapiens
ttccacccctgattc

SEQ ID NO: 133434 - DNA, 15 bp, Homo sapiens
tccacccctgattcc

SEQ ID NO: 133435 - DNA, 15 bp, Homo sapiens
ccacccctgattcca

SEQ ID NO: 133436 - DNA, 15 bp, Homo sapiens
cacccctgattccag

SEQ ID NO: 133437 - DNA, 15 bp, Homo sapiens
acccctgattccagt

SEQ ID NO: 133438 - DNA, 15 bp, Homo sapiens
cccctgattccagtg

SEQ ID NO: 133439 - DNA, 15 bp, Homo sapiens
ccctgattccagtgc

SEQ ID NO: 133440 - DNA, 15 bp, Homo sapiens
cctgattccagtgct

SEQ ID NO: 133441 - DNA, 15 bp, Homo sapiens
ctgattccagtgctg

SEQ ID NO: 133442 - DNA, 15 bp, Homo sapiens
tgattccagtgctga

SEQ ID NO: 133443 - DNA, 15 bp, Homo sapiens
gattccagtgctgac

SEQ ID NO: 133444 - DNA, 15 bp, Homo sapiens
attccagtgctgact

SEQ ID NO: 133445 - DNA, 15 bp, Homo sapiens
ttccagtgctgactg

SEQ ID NO: 133446 - DNA, 15 bp, Homo sapiens
tccagtgctgactga

SEQ ID NO: 133447 - DNA, 15 bp, Homo sapiens
ccagtgctgactgat

SEQ ID NO: 133448 - DNA, 15 bp, Homo sapiens
cagtgctgactgatt

SEQ ID NO: 133449 - DNA, 15 bp, Homo sapiens
agtgctgactgattc

SEQ ID NO: 133450 - DNA, 15 bp, Homo sapiens
gtgctgactgattct

SEQ ID NO: 133451 - DNA, 15 bp, Homo sapiens
tgctgactgattctg

SEQ ID NO: 133452 - DNA, 15 bp, Homo sapiens
gctgactgattctgg

SEQ ID NO: 133453 - DNA, 15 bp, Homo sapiens
ctgactgattctgga

SEQ ID NO: 133454 - DNA, 15 bp, Homo sapiens
tgactgattctggag

SEQ ID NO: 133455 - DNA, 15 bp, Homo sapiens
gactgattctggagt

SEQ ID NO: 133456 - DNA, 15 bp, Homo sapiens
actgattctggagtg

SEQ ID NO: 133457 - DNA, 15 bp, Homo sapiens
ctgattctggagtgg

SEQ ID NO: 133458 - DNA, 15 bp, Homo sapiens
tgattctggagtggc

SEQ ID NO: 133459 - DNA, 15 bp, Homo sapiens
gattctggagtggca

SEQ ID NO: 133460 - DNA, 15 bp, Homo sapiens
attctggagtggcag

SEQ ID NO: 133461 - DNA, 15 bp, Homo sapiens
ttctggagtggcaga

SEQ ID NO: 133462 - DNA, 15 bp, Homo sapiens
tctggagtggcagag

SEQ ID NO: 133463 - DNA, 15 bp, Homo sapiens
ctggagtggcagaga

SEQ ID NO: 133464 - DNA, 15 bp, Homo sapiens
tggagtggcagagag

SEQ ID NO: 133465 - DNA, 15 bp, Homo sapiens
ggagtggcagagagg

SEQ ID NO: 133466 - DNA, 15 bp, Homo sapiens
gagtggcagagaggg

SEQ ID NO: 133467 - DNA, 15 bp, Homo sapiens
agtggcagagagggt

SEQ ID NO: 133468 - DNA, 15 bp, Homo sapiens
gtggcagagagggtt

SEQ ID NO: 133469 - DNA, 15 bp, Homo sapiens
tggcagagagggttg

SEQ ID NO: 133470 - DNA, 15 bp, Homo sapiens
ggcagagagggttgg

SEQ ID NO: 133471 - DNA, 15 bp, Homo sapiens
gcagagagggttgga

SEQ ID NO: 133472 - DNA, 15 bp, Homo sapiens
cagagagggttggag

SEQ ID NO: 133473 - DNA, 15 bp, Homo sapiens
agagagggttggagg

SEQ ID NO: 133474 - DNA, 15 bp, Homo sapiens
gagagggttggaggc

SEQ ID NO: 133475 - DNA, 15 bp, Homo sapiens
agagggttggaggct

SEQ ID NO: 133476 - DNA, 15 bp, Homo sapiens
gagggttggaggctc

SEQ ID NO: 133477 - DNA, 15 bp, Homo sapiens
agggttggaggctca

SEQ ID NO: 133478 - DNA, 15 bp, Homo sapiens
gggttggaggctcac

SEQ ID NO: 133479 - DNA, 15 bp, Homo sapiens
ggttggaggctcacc

SEQ ID NO: 133480 - DNA, 15 bp, Homo sapiens
gttggaggctcaccg

SEQ ID NO: 133481 - DNA, 15 bp, Homo sapiens
ttggaggctcaccgc

SEQ ID NO: 133482 - DNA, 15 bp, Homo sapiens
tggaggctcaccgct

SEQ ID NO: 133483 - DNA, 15 bp, Homo sapiens
ggaggctcaccgctc

SEQ ID NO: 133484 - DNA, 15 bp, Homo sapiens
gaggctcaccgctct

SEQ ID NO: 133485 - DNA, 15 bp, Homo sapiens
aggctcaccgctctg

SEQ ID NO: 133486 - DNA, 15 bp, Homo sapiens
ggctcaccgctctgc

SEQ ID NO: 133487 - DNA, 15 bp, Homo sapiens
gctcaccgctctgct

SEQ ID NO: 133488 - DNA, 15 bp, Homo sapiens
ctcaccgctctgctc

SEQ ID NO: 133489 - DNA, 15 bp, Homo sapiens
tcaccgctctgctca

SEQ ID NO: 133490 - DNA, 15 bp, Homo sapiens
caccgctctgctcac

SEQ ID NO: 133491 - DNA, 15 bp, Homo sapiens
accgctctgctcacc

SEQ ID NO: 133492 - DNA, 15 bp, Homo sapiens
ccgctctgctcaccc

SEQ ID NO: 133493 - DNA, 15 bp, Homo sapiens
cgctctgctcacccg

SEQ ID NO: 133494 - DNA, 15 bp, Homo sapiens
gctctgctcacccga

SEQ ID NO: 133495 - DNA, 15 bp, Homo sapiens
ctctgctcacccgac

SEQ ID NO: 133496 - DNA, 15 bp, Homo sapiens
tctgctcacccgacc

SEQ ID NO: 133497 - DNA, 15 bp, Homo sapiens
ctgctcacccgaccc

SEQ ID NO: 133498 - DNA, 15 bp, Homo sapiens
tgctcacccgaccct

SEQ ID NO: 133499 - DNA, 15 bp, Homo sapiens
gctcacccgaccctc

SEQ ID NO: 133500 - DNA, 15 bp, Homo sapiens
ctcacccgaccctct

SEQ ID NO: 133501 - DNA, 15 bp, Homo sapiens
tcacccgaccctctg

SEQ ID NO: 133502 - DNA, 15 bp, Homo sapiens
cacccgaccctctgg

SEQ ID NO: 133503 - DNA, 15 bp, Homo sapiens
acccgaccctctggc

SEQ ID NO: 133504 - DNA, 15 bp, Homo sapiens
cccgaccctctggcc

SEQ ID NO: 133505 - DNA, 15 bp, Homo sapiens
ccgaccctctggcca

SEQ ID NO: 133506 - DNA, 15 bp, Homo sapiens
cgaccctctggccat

SEQ ID NO: 133507 - DNA, 15 bp, Homo sapiens
gaccctctggccatc

SEQ ID NO: 133508 - DNA, 15 bp, Homo sapiens
accctctggccatct

SEQ ID NO: 133509 - DNA, 15 bp, Homo sapiens
ccctctggccatctc

SEQ ID NO: 133510 - DNA, 15 bp, Homo sapiens
cctctggccatctcc

SEQ ID NO: 133511 - DNA, 15 bp, Homo sapiens
ctctggccatctcct

SEQ ID NO: 133512 - DNA, 15 bp, Homo sapiens
tctggccatctcctc

SEQ ID NO: 133513 - DNA, 15 bp, Homo sapiens
ctggccatctcctct

SEQ ID NO: 133514 - DNA, 15 bp, Homo sapiens
tggccatctcctctt

SEQ ID NO: 133515 - DNA, 15 bp, Homo sapiens
ggccatctcctctta

SEQ ID NO: 133516 - DNA, 15 bp, Homo sapiens
gccatctcctcttag

SEQ ID NO: 133517 - DNA, 15 bp, Homo sapiens
ccatctcctcttaga

SEQ ID NO: 133518 - DNA, 15 bp, Homo sapiens
catctcctcttagaa

SEQ ID NO: 133519 - DNA, 15 bp, Homo sapiens
atctcctcttagaat

SEQ ID NO: 133520 - DNA, 15 bp, Homo sapiens
tctcctcttagaatg

SEQ ID NO: 133521 - DNA, 15 bp, Homo sapiens
ctcctcttagaatgc

SEQ ID NO: 133522 - DNA, 15 bp, Homo sapiens
tcctcttagaatgca

SEQ ID NO: 133523 - DNA, 15 bp, Homo sapiens
cctcttagaatgcaa

SEQ ID NO: 133524 - DNA, 15 bp, Homo sapiens
ctcttagaatgcaag

SEQ ID NO: 133525 - DNA, 15 bp, Homo sapiens
tcttagaatgcaagg

SEQ ID NO: 133526 - DNA, 15 bp, Homo sapiens
cttagaatgcaaggg

SEQ ID NO: 133527 - DNA, 15 bp, Homo sapiens
ttagaatgcaagggc

SEQ ID NO: 133528 - DNA, 15 bp, Homo sapiens
tagaatgcaagggca

SEQ ID NO: 133529 - DNA, 15 bp, Homo sapiens
agaatgcaagggcag

SEQ ID NO: 133530 - DNA, 15 bp, Homo sapiens
gaatgcaagggcagg

SEQ ID NO: 133531 - DNA, 15 bp, Homo sapiens
aatgcaagggcaggg

SEQ ID NO: 133532 - DNA, 15 bp, Homo sapiens
atgcaagggcaggga

SEQ ID NO: 133533 - DNA, 15 bp, Homo sapiens
tgcaagggcagggat

SEQ ID NO: 133534 - DNA, 15 bp, Homo sapiens
gcaagggcagggatt

SEQ ID NO: 133535 - DNA, 15 bp, Homo sapiens
caagggcagggattt

SEQ ID NO: 133536 - DNA, 15 bp, Homo sapiens
aagggcagggatttt

SEQ ID NO: 133537 - DNA, 15 bp, Homo sapiens
agggcagggattttg

SEQ ID NO: 133538 - DNA, 15 bp, Homo sapiens
gggcagggattttgt

SEQ ID NO: 133539 - DNA, 15 bp, Homo sapiens
ggcagggattttgtt

SEQ ID NO: 133540 - DNA, 15 bp, Homo sapiens
gcagggattttgtta

SEQ ID NO: 133541 - DNA, 15 bp, Homo sapiens
cagggattttgttac

SEQ ID NO: 133542 - DNA, 15 bp, Homo sapiens
agggattttgttaca

SEQ ID NO: 133543 - DNA, 15 bp, Homo sapiens
gggattttgttacac

SEQ ID NO: 133544 - DNA, 15 bp, Homo sapiens
ggattttgttacaca

SEQ ID NO: 133545 - DNA, 15 bp, Homo sapiens
gattttgttacacag

SEQ ID NO: 133546 - DNA, 15 bp, Homo sapiens
attttgttacacagc

SEQ ID NO: 133547 - DNA, 15 bp, Homo sapiens
ttttgttacacagcg

SEQ ID NO: 133548 - DNA, 15 bp, Homo sapiens
tttgttacacagcgc

SEQ ID NO: 133549 - DNA, 15 bp, Homo sapiens
ttgttacacagcgcc

SEQ ID NO: 133550 - DNA, 15 bp, Homo sapiens
tgttacacagcgcct

SEQ ID NO: 133551 - DNA, 15 bp, Homo sapiens
gttacacagcgcctc

SEQ ID NO: 133552 - DNA, 15 bp, Homo sapiens
ttacacagcgcctct

SEQ ID NO: 133553 - DNA, 15 bp, Homo sapiens
tacacagcgcctctt

SEQ ID NO: 133554 - DNA, 15 bp, Homo sapiens
acacagcgcctcttt

SEQ ID NO: 133555 - DNA, 15 bp, Homo sapiens
cacagcgcctctttt

SEQ ID NO: 133556 - DNA, 15 bp, Homo sapiens
acagcgcctcttttg

SEQ ID NO: 133557 - DNA, 15 bp, Homo sapiens
cagcgcctcttttgt

SEQ ID NO: 133558 - DNA, 15 bp, Homo sapiens
agcgcctcttttgtt

SEQ ID NO: 133559 - DNA, 15 bp, Homo sapiens
gcgcctcttttgtta

SEQ ID NO: 133560 - DNA, 15 bp, Homo sapiens
cgcctcttttgttat

SEQ ID NO: 133561 - DNA, 15 bp, Homo sapiens
gcctcttttgttata

SEQ ID NO: 133562 - DNA, 15 bp, Homo sapiens
cctcttttgttatag

SEQ ID NO: 133563 - DNA, 15 bp, Homo sapiens
ctcttttgttatagg

SEQ ID NO: 133564 - DNA, 15 bp, Homo sapiens
tcttttgttataggc

SEQ ID NO: 133565 - DNA, 15 bp, Homo sapiens
cttttgttataggct

SEQ ID NO: 133566 - DNA, 15 bp, Homo sapiens
ttttgttataggcta

SEQ ID NO: 133567 - DNA, 15 bp, Homo sapiens
tttgttataggctag

SEQ ID NO: 133568 - DNA, 15 bp, Homo sapiens
ttgttataggctagc

SEQ ID NO: 133569 - DNA, 15 bp, Homo sapiens
tgttataggctagct

SEQ ID NO: 133570 - DNA, 15 bp, Homo sapiens
gttataggctagctc

SEQ ID NO: 133571 - DNA, 15 bp, Homo sapiens
ttataggctagctcc

SEQ ID NO: 133572 - DNA, 15 bp, Homo sapiens
tataggctagctcct

SEQ ID NO: 133573 - DNA, 15 bp, Homo sapiens
ataggctagctcctg

SEQ ID NO: 133574 - DNA, 15 bp, Homo sapiens
taggctagctcctgc

SEQ ID NO: 133575 - DNA, 15 bp, Homo sapiens
aggctagctcctgcc

SEQ ID NO: 133576 - DNA, 15 bp, Homo sapiens
ggctagctcctgcct

SEQ ID NO: 133577 - DNA, 15 bp, Homo sapiens
gctagctcctgcctt

SEQ ID NO: 133578 - DNA, 15 bp, Homo sapiens
ctagctcctgccttc

SEQ ID NO: 133579 - DNA, 15 bp, Homo sapiens
tagctcctgccttca

SEQ ID NO: 133580 - DNA, 15 bp, Homo sapiens
agctcctgccttcaa

SEQ ID NO: 133581 - DNA, 15 bp, Homo sapiens
gctcctgccttcaag

SEQ ID NO: 133582 - DNA, 15 bp, Homo sapiens
ctcctgccttcaagg

SEQ ID NO: 133583 - DNA, 15 bp, Homo sapiens
tcctgccttcaagga

SEQ ID NO: 133584 - DNA, 15 bp, Homo sapiens
cctgccttcaaggag

SEQ ID NO: 133585 - DNA, 15 bp, Homo sapiens
ctgccttcaaggagc

SEQ ID NO: 133586 - DNA, 15 bp, Homo sapiens
tgccttcaaggagca

SEQ ID NO: 133587 - DNA, 15 bp, Homo sapiens
gccttcaaggagcac

SEQ ID NO: 133588 - DNA, 15 bp, Homo sapiens
ccttcaaggagcact

SEQ ID NO: 133589 - DNA, 15 bp, Homo sapiens
cttcaaggagcactg

SEQ ID NO: 133590 - DNA, 15 bp, Homo sapiens
ttcaaggagcactga

SEQ ID NO: 133591 - DNA, 15 bp, Homo sapiens
tcaaggagcactgag

SEQ ID NO: 133592 - DNA, 15 bp, Homo sapiens
caaggagcactgaga

SEQ ID NO: 133593 - DNA, 15 bp, Homo sapiens
aaggagcactgagaa

SEQ ID NO: 133594 - DNA, 15 bp, Homo sapiens
aggagcactgagaaa

SEQ ID NO: 133595 - DNA, 15 bp, Homo sapiens
ggagcactgagaaaa

SEQ ID NO: 133596 - DNA, 15 bp, Homo sapiens
gagcactgagaaaaa

SEQ ID NO: 133597 - DNA, 15 bp, Homo sapiens
agcactgagaaaaat

SEQ ID NO: 133598 - DNA, 15 bp, Homo sapiens
gcactgagaaaaata

SEQ ID NO: 133599 - DNA, 15 bp, Homo sapiens
cactgagaaaaatat

SEQ ID NO: 133600 - DNA, 15 bp, Homo sapiens
actgagaaaaatatt

SEQ ID NO: 133601 - DNA, 15 bp, Homo sapiens
ctgagaaaaatatta

SEQ ID NO: 133602 - DNA, 15 bp, Homo sapiens
tgagaaaaatattat

SEQ ID NO: 133603 - DNA, 15 bp, Homo sapiens
gagaaaaatattatc

SEQ ID NO: 133604 - DNA, 15 bp, Homo sapiens
agaaaaatattatcc

SEQ ID NO: 133605 - DNA, 15 bp, Homo sapiens
gaaaaatattatccc

SEQ ID NO: 133606 - DNA, 15 bp, Homo sapiens
aaaaatattatccct

SEQ ID NO: 133607 - DNA, 15 bp, Homo sapiens
aaaatattatccctt

SEQ ID NO: 133608 - DNA, 15 bp, Homo sapiens
aaatattatcccttt

SEQ ID NO: 133609 - DNA, 15 bp, Homo sapiens
aatattatccctttg

SEQ ID NO: 133610 - DNA, 15 bp, Homo sapiens
atattatccctttga

SEQ ID NO: 133611 - DNA, 15 bp, Homo sapiens
tattatccctttgaa

SEQ ID NO: 133612 - DNA, 15 bp, Homo sapiens
attatccctttgaac

SEQ ID NO: 133613 - DNA, 15 bp, Homo sapiens
ttatccctttgaacc

SEQ ID NO: 133614 - DNA, 15 bp, Homo sapiens
tatccctttgaacca

SEQ ID NO: 133615 - DNA, 15 bp, Homo sapiens
atccctttgaaccac

SEQ ID NO: 133616 - DNA, 15 bp, Homo sapiens
tccctttgaaccaca

SEQ ID NO: 133617 - DNA, 15 bp, Homo sapiens
ccctttgaaccacaa

SEQ ID NO: 133618 - DNA, 15 bp, Homo sapiens
cctttgaaccacaac

SEQ ID NO: 133619 - DNA, 15 bp, Homo sapiens
ctttgaaccacaaca

SEQ ID NO: 133620 - DNA, 15 bp, Homo sapiens
tttgaaccacaacac

SEQ ID NO: 133621 - DNA, 15 bp, Homo sapiens
ttgaaccacaacact

SEQ ID NO: 133622 - DNA, 15 bp, Homo sapiens
tgaaccacaacacta

SEQ ID NO: 133623 - DNA, 15 bp, Homo sapiens
gaaccacaacactag

SEQ ID NO: 133624 - DNA, 15 bp, Homo sapiens
aaccacaacactagt

SEQ ID NO: 133625 - DNA, 15 bp, Homo sapiens
accacaacactagta

SEQ ID NO: 133626 - DNA, 15 bp, Homo sapiens
ccacaacactagtat

SEQ ID NO: 133627 - DNA, 15 bp, Homo sapiens
cacaacactagtatt

SEQ ID NO: 133628 - DNA, 15 bp, Homo sapiens
acaacactagtattt

SEQ ID NO: 133629 - DNA, 15 bp, Homo sapiens
caacactagtatttt

SEQ ID NO: 133630 - DNA, 15 bp, Homo sapiens
aacactagtattttg

SEQ ID NO: 133631 - DNA, 15 bp, Homo sapiens
acactagtattttgg

SEQ ID NO: 133632 - DNA, 15 bp, Homo sapiens
cactagtattttggg

SEQ ID NO: 133633 - DNA, 15 bp, Homo sapiens
actagtattttgggt

SEQ ID NO: 133634 - DNA, 15 bp, Homo sapiens
ctagtattttgggta

SEQ ID NO: 133635 - DNA, 15 bp, Homo sapiens
tagtattttgggtac

SEQ ID NO: 133636 - DNA, 15 bp, Homo sapiens
agtattttgggtact

SEQ ID NO: 133637 - DNA, 15 bp, Homo sapiens
gtattttgggtactg

SEQ ID NO: 133638 - DNA, 15 bp, Homo sapiens
tattttgggtactgt

SEQ ID NO: 133639 - DNA, 15 bp, Homo sapiens
attttgggtactgta

SEQ ID NO: 133640 - DNA, 15 bp, Homo sapiens
ttttgggtactgtag

SEQ ID NO: 133641 - DNA, 15 bp, Homo sapiens
tttgggtactgtagc

SEQ ID NO: 133642 - DNA, 15 bp, Homo sapiens
ttgggtactgtagcc

SEQ ID NO: 133643 - DNA, 15 bp, Homo sapiens
tgggtactgtagcca

SEQ ID NO: 133644 - DNA, 15 bp, Homo sapiens
gggtactgtagccat

SEQ ID NO: 133645 - DNA, 15 bp, Homo sapiens
ggtactgtagccatt

SEQ ID NO: 133646 - DNA, 15 bp, Homo sapiens
gtactgtagccattc

SEQ ID NO: 133647 - DNA, 15 bp, Homo sapiens
tactgtagccattca

SEQ ID NO: 133648 - DNA, 15 bp, Homo sapiens
actgtagccattcag

SEQ ID NO: 133649 - DNA, 15 bp, Homo sapiens
ctgtagccattcaga

SEQ ID NO: 133650 - DNA, 15 bp, Homo sapiens
tgtagccattcagaa

SEQ ID NO: 133651 - DNA, 15 bp, Homo sapiens
gtagccattcagaag

SEQ ID NO: 133652 - DNA, 15 bp, Homo sapiens
tagccattcagaagt

SEQ ID NO: 133653 - DNA, 15 bp, Homo sapiens
agccattcagaagtt

SEQ ID NO: 133654 - DNA, 15 bp, Homo sapiens
gccattcagaagttt

SEQ ID NO: 133655 - DNA, 15 bp, Homo sapiens
ccattcagaagtttg

SEQ ID NO: 133656 - DNA, 15 bp, Homo sapiens
cattcagaagtttgt

SEQ ID NO: 133657 - DNA, 15 bp, Homo sapiens
attcagaagtttgtt

SEQ ID NO: 133658 - DNA, 15 bp, Homo sapiens
ttcagaagtttgttg

SEQ ID NO: 133659 - DNA, 15 bp, Homo sapiens
tcagaagtttgttga

SEQ ID NO: 133660 - DNA, 15 bp, Homo sapiens
cagaagtttgttgaa

SEQ ID NO: 133661 - DNA, 15 bp, Homo sapiens
agaagtttgttgaac

SEQ ID NO: 133662 - DNA, 15 bp, Homo sapiens
gaagtttgttgaact

SEQ ID NO: 133663 - DNA, 15 bp, Homo sapiens
aagtttgttgaacta

SEQ ID NO: 133664 - DNA, 15 bp, Homo sapiens
agtttgttgaactaa

SEQ ID NO: 133665 - DNA, 15 bp, Homo sapiens
gtttgttgaactaat

SEQ ID NO: 133666 - DNA, 15 bp, Homo sapiens
tttgttgaactaata

SEQ ID NO: 133667 - DNA, 15 bp, Homo sapiens
ttgttgaactaatac

SEQ ID NO: 133668 - DNA, 15 bp, Homo sapiens
tgttgaactaataca

SEQ ID NO: 133669 - DNA, 15 bp, Homo sapiens
gttgaactaatacaa

SEQ ID NO: 133670 - DNA, 15 bp, Homo sapiens
ttgaactaatacaag

SEQ ID NO: 133671 - DNA, 15 bp, Homo sapiens
tgaactaatacaagt

SEQ ID NO: 133672 - DNA, 15 bp, Homo sapiens
gaactaatacaagtt

SEQ ID NO: 133673 - DNA, 15 bp, Homo sapiens
aactaatacaagttt

SEQ ID NO: 133674 - DNA, 15 bp, Homo sapiens
actaatacaagttta

SEQ ID NO: 133675 - DNA, 15 bp, Homo sapiens
ctaatacaagtttat

SEQ ID NO: 133676 - DNA, 15 bp, Homo sapiens
taatacaagtttata

SEQ ID NO: 133677 - DNA, 15 bp, Homo sapiens
aatacaagtttatat

SEQ ID NO: 133678 - DNA, 15 bp, Homo sapiens
atacaagtttatatt

SEQ ID NO: 133679 - DNA, 15 bp, Homo sapiens
tacaagtttatatta

SEQ ID NO: 133680 - DNA, 15 bp, Homo sapiens
acaagtttatattat

SEQ ID NO: 133681 - DNA, 15 bp, Homo sapiens
caagtttatattatt

SEQ ID NO: 133682 - DNA, 15 bp, Homo sapiens
aagtttatattattt

SEQ ID NO: 133683 - DNA, 15 bp, Homo sapiens
agtttatattatttg

SEQ ID NO: 133684 - DNA, 15 bp, Homo sapiens
gtttatattatttgt

SEQ ID NO: 133685 - DNA, 15 bp, Homo sapiens
tttatattatttgta

SEQ ID NO: 133686 - DNA, 15 bp, Homo sapiens
ttatattatttgtaa

SEQ ID NO: 133687 - DNA, 15 bp, Homo sapiens
tatattatttgtaaa

SEQ ID NO: 133688 - DNA, 15 bp, Homo sapiens
atattatttgtaaaa

SEQ ID NO: 133689 - DNA, 15 bp, Homo sapiens
tattatttgtaaaat

SEQ ID NO: 133690 - DNA, 15 bp, Homo sapiens
attatttgtaaaata

SEQ ID NO: 133691 - DNA, 15 bp, Homo sapiens
ttatttgtaaaatac

SEQ ID NO: 133692 - DNA, 15 bp, Homo sapiens
tatttgtaaaatact

SEQ ID NO: 133693 - DNA, 15 bp, Homo sapiens
atttgtaaaatacta

SEQ ID NO: 133694 - DNA, 15 bp, Homo sapiens
tttgtaaaatactag

SEQ ID NO: 133695 - DNA, 15 bp, Homo sapiens
ttgtaaaatactaga

SEQ ID NO: 133696 - DNA, 15 bp, Homo sapiens
tgtaaaatactagaa

SEQ ID NO: 133697 - DNA, 15 bp, Homo sapiens
gtaaaatactagaag

SEQ ID NO: 133698 - DNA, 15 bp, Homo sapiens
taaaatactagaagg

SEQ ID NO: 133699 - DNA, 15 bp, Homo sapiens
aaaatactagaagga

SEQ ID NO: 133700 - DNA, 15 bp, Homo sapiens
aaatactagaaggaa

SEQ ID NO: 133701 - DNA, 15 bp, Homo sapiens
aatactagaaggaat

SEQ ID NO: 133702 - DNA, 15 bp, Homo sapiens
atactagaaggaatg

SEQ ID NO: 133703 - DNA, 15 bp, Homo sapiens
tactagaaggaatgt

SEQ ID NO: 133704 - DNA, 15 bp, Homo sapiens
actagaaggaatgtg

SEQ ID NO: 133705 - DNA, 15 bp, Homo sapiens
ctagaaggaatgtgt

SEQ ID NO: 133706 - DNA, 15 bp, Homo sapiens
tagaaggaatgtgtg

SEQ ID NO: 133707 - DNA, 15 bp, Homo sapiens
agaaggaatgtgtgg

SEQ ID NO: 133708 - DNA, 15 bp, Homo sapiens
gaaggaatgtgtggt

SEQ ID NO: 133709 - DNA, 15 bp, Homo sapiens
aaggaatgtgtggtt

SEQ ID NO: 133710 - DNA, 15 bp, Homo sapiens
aggaatgtgtggttc

SEQ ID NO: 133711 - DNA, 15 bp, Homo sapiens
ggaatgtgtggttcc

SEQ ID NO: 133712 - DNA, 15 bp, Homo sapiens
gaatgtgtggttcct

SEQ ID NO: 133713 - DNA, 15 bp, Homo sapiens
aatgtgtggttccta

SEQ ID NO: 133714 - DNA, 15 bp, Homo sapiens
atgtgtggttcctaa

SEQ ID NO: 133715 - DNA, 15 bp, Homo sapiens
tgtgtggttcctaaa

SEQ ID NO: 133716 - DNA, 15 bp, Homo sapiens
gtgtggttcctaaag

SEQ ID NO: 133717 - DNA, 15 bp, Homo sapiens
tgtggttcctaaagt

SEQ ID NO: 133718 - DNA, 15 bp, Homo sapiens
gtggttcctaaagtt

SEQ ID NO: 133719 - DNA, 15 bp, Homo sapiens
tggttcctaaagtta

SEQ ID NO: 133720 - DNA, 15 bp, Homo sapiens
ggttcctaaagttat

SEQ ID NO: 133721 - DNA, 15 bp, Homo sapiens
gttcctaaagttatg

SEQ ID NO: 133722 - DNA, 15 bp, Homo sapiens
ttcctaaagttatgg

SEQ ID NO: 133723 - DNA, 15 bp, Homo sapiens
tcctaaagttatggt

SEQ ID NO: 133724 - DNA, 15 bp, Homo sapiens
cctaaagttatggta

SEQ ID NO: 133725 - DNA, 15 bp, Homo sapiens
ctaaagttatggtat

SEQ ID NO: 133726 - DNA, 15 bp, Homo sapiens
taaagttatggtatt

SEQ ID NO: 133727 - DNA, 15 bp, Homo sapiens
aaagttatggtattc

SEQ ID NO: 133728 - DNA, 15 bp, Homo sapiens
aagttatggtattcc

SEQ ID NO: 133729 - DNA, 15 bp, Homo sapiens
agttatggtattccc

SEQ ID NO: 133730 - DNA, 15 bp, Homo sapiens
gttatggtattccca

SEQ ID NO: 133731 - DNA, 15 bp, Homo sapiens
ttatggtattcccat

SEQ ID NO: 133732 - DNA, 15 bp, Homo sapiens
tatggtattcccatt

SEQ ID NO: 133733 - DNA, 15 bp, Homo sapiens
atggtattcccattg

SEQ ID NO: 133734 - DNA, 15 bp, Homo sapiens
tggtattcccattgg

SEQ ID NO: 133735 - DNA, 15 bp, Homo sapiens
ggtattcccattggt

SEQ ID NO: 133736 - DNA, 15 bp, Homo sapiens
gtattcccattggtt

SEQ ID NO: 133737 - DNA, 15 bp, Homo sapiens
tattcccattggttg

SEQ ID NO: 133738 - DNA, 15 bp, Homo sapiens
attcccattggttga

SEQ ID NO: 133739 - DNA, 15 bp, Homo sapiens
ttcccattggttgaa

SEQ ID NO: 133740 - DNA, 15 bp, Homo sapiens
tcccattggttgaaa

SEQ ID NO: 133741 - DNA, 15 bp, Homo sapiens
cccattggttgaaag

SEQ ID NO: 133742 - DNA, 15 bp, Homo sapiens
ccattggttgaaaga

SEQ ID NO: 133743 - DNA, 15 bp, Homo sapiens
cattggttgaaagag

SEQ ID NO: 133744 - DNA, 15 bp, Homo sapiens
attggttgaaagaga

SEQ ID NO: 133745 - DNA, 15 bp, Homo sapiens
ttggttgaaagagaa

SEQ ID NO: 133746 - DNA, 15 bp, Homo sapiens
tggttgaaagagaag

SEQ ID NO: 133747 - DNA, 15 bp, Homo sapiens
ggttgaaagagaaga

SEQ ID NO: 133748 - DNA, 15 bp, Homo sapiens
gttgaaagagaagac

SEQ ID NO: 133749 - DNA, 15 bp, Homo sapiens
ttgaaagagaagact

SEQ ID NO: 133750 - DNA, 15 bp, Homo sapiens
tgaaagagaagactc

SEQ ID NO: 133751 - DNA, 15 bp, Homo sapiens
gaaagagaagactct

SEQ ID NO: 133752 - DNA, 15 bp, Homo sapiens
aaagagaagactctg

SEQ ID NO: 133753 - DNA, 15 bp, Homo sapiens
aagagaagactctgg

SEQ ID NO: 133754 - DNA, 15 bp, Homo sapiens
agagaagactctggc

SEQ ID NO: 133755 - DNA, 15 bp, Homo sapiens
gagaagactctggct

SEQ ID NO: 133756 - DNA, 15 bp, Homo sapiens
agaagactctggctt

SEQ ID NO: 133757 - DNA, 15 bp, Homo sapiens
gaagactctggcttc

SEQ ID NO: 133758 - DNA, 15 bp, Homo sapiens
aagactctggcttcc

SEQ ID NO: 133759 - DNA, 15 bp, Homo sapiens
agactctggcttcct

SEQ ID NO: 133760 - DNA, 15 bp, Homo sapiens
gactctggcttccta

SEQ ID NO: 133761 - DNA, 15 bp, Homo sapiens
actctggcttcctaa

SEQ ID NO: 133762 - DNA, 15 bp, Homo sapiens
ctctggcttcctaat

SEQ ID NO: 133763 - DNA, 15 bp, Homo sapiens
tctggcttcctaatg

SEQ ID NO: 133764 - DNA, 15 bp, Homo sapiens
ctggcttcctaatgc

SEQ ID NO: 133765 - DNA, 15 bp, Homo sapiens
tggcttcctaatgcc

SEQ ID NO: 133766 - DNA, 15 bp, Homo sapiens
ggcttcctaatgcct

SEQ ID NO: 133767 - DNA, 15 bp, Homo sapiens
gcttcctaatgcctt

SEQ ID NO: 133768 - DNA, 15 bp, Homo sapiens
cttcctaatgccttg

SEQ ID NO: 133769 - DNA, 15 bp, Homo sapiens
ttcctaatgccttgg

SEQ ID NO: 133770 - DNA, 15 bp, Homo sapiens
tcctaatgccttgga

SEQ ID NO: 133771 - DNA, 15 bp, Homo sapiens
cctaatgccttggaa

SEQ ID NO: 133772 - DNA, 15 bp, Homo sapiens
ctaatgccttggaag

SEQ ID NO: 133773 - DNA, 15 bp, Homo sapiens
taatgccttggaagg

SEQ ID NO: 133774 - DNA, 15 bp, Homo sapiens
aatgccttggaaggt

SEQ ID NO: 133775 - DNA, 15 bp, Homo sapiens
atgccttggaaggtt

SEQ ID NO: 133776 - DNA, 15 bp, Homo sapiens
tgccttggaaggttc

SEQ ID NO: 133777 - DNA, 15 bp, Homo sapiens
gccttggaaggttca

SEQ ID NO: 133778 - DNA, 15 bp, Homo sapiens
ccttggaaggttcag

SEQ ID NO: 133779 - DNA, 15 bp, Homo sapiens
cttggaaggttcagg

SEQ ID NO: 133780 - DNA, 15 bp, Homo sapiens
ttggaaggttcaggg

SEQ ID NO: 133781 - DNA, 15 bp, Homo sapiens
tggaaggttcaggga

SEQ ID NO: 133782 - DNA, 15 bp, Homo sapiens
ggaaggttcagggag

SEQ ID NO: 133783 - DNA, 15 bp, Homo sapiens
gaaggttcagggagc

SEQ ID NO: 133784 - DNA, 15 bp, Homo sapiens
aaggttcagggagca

SEQ ID NO: 133785 - DNA, 15 bp, Homo sapiens
aggttcagggagcat

SEQ ID NO: 133786 - DNA, 15 bp, Homo sapiens
ggttcagggagcata

SEQ ID NO: 133787 - DNA, 15 bp, Homo sapiens
gttcagggagcataa

SEQ ID NO: 133788 - DNA, 15 bp, Homo sapiens
ttcagggagcataag

SEQ ID NO: 133789 - DNA, 15 bp, Homo sapiens
tcagggagcataagc

SEQ ID NO: 133790 - DNA, 15 bp, Homo sapiens
cagggagcataagcc

SEQ ID NO: 133791 - DNA, 15 bp, Homo sapiens
agggagcataagcct

SEQ ID NO: 133792 - DNA, 15 bp, Homo sapiens
gggagcataagccta

SEQ ID NO: 133793 - DNA, 15 bp, Homo sapiens
ggagcataagcctaa

SEQ ID NO: 133794 - DNA, 15 bp, Homo sapiens
gagcataagcctaaa

SEQ ID NO: 133795 - DNA, 15 bp, Homo sapiens
agcataagcctaaat

SEQ ID NO: 133796 - DNA, 15 bp, Homo sapiens
gcataagcctaaata

SEQ ID NO: 133797 - DNA, 15 bp, Homo sapiens
cataagcctaaatat

SEQ ID NO: 133798 - DNA, 15 bp, Homo sapiens
ataagcctaaatatc

SEQ ID NO: 133799 - DNA, 15 bp, Homo sapiens
taagcctaaatatcc

SEQ ID NO: 133800 - DNA, 15 bp, Homo sapiens
aagcctaaatatcct

SEQ ID NO: 133801 - DNA, 15 bp, Homo sapiens
agcctaaatatcctg

SEQ ID NO: 133802 - DNA, 15 bp, Homo sapiens
gcctaaatatcctgg

SEQ ID NO: 133803 - DNA, 15 bp, Homo sapiens
cctaaatatcctggt

SEQ ID NO: 133804 - DNA, 15 bp, Homo sapiens
ctaaatatcctggtt

SEQ ID NO: 133805 - DNA, 15 bp, Homo sapiens
taaatatcctggttt

SEQ ID NO: 133806 - DNA, 15 bp, Homo sapiens
aaatatcctggtttc

SEQ ID NO: 133807 - DNA, 15 bp, Homo sapiens
aatatcctggtttct

SEQ ID NO: 133808 - DNA, 15 bp, Homo sapiens
atatcctggtttctc

SEQ ID NO: 133809 - DNA, 15 bp, Homo sapiens
tatcctggtttctct

SEQ ID NO: 133810 - DNA, 15 bp, Homo sapiens
atcctggtttctctt

SEQ ID NO: 133811 - DNA, 15 bp, Homo sapiens
tcctggtttctcttg

SEQ ID NO: 133812 - DNA, 15 bp, Homo sapiens
cctggtttctcttgg

SEQ ID NO: 133813 - DNA, 15 bp, Homo sapiens
ctggtttctcttggg

SEQ ID NO: 133814 - DNA, 15 bp, Homo sapiens
tggtttctcttggga

SEQ ID NO: 133815 - DNA, 15 bp, Homo sapiens
ggtttctcttgggaa

SEQ ID NO: 133816 - DNA, 15 bp, Homo sapiens
gtttctcttgggaat

SEQ ID NO: 133817 - DNA, 15 bp, Homo sapiens
tttctcttgggaatt

SEQ ID NO: 133818 - DNA, 15 bp, Homo sapiens
ttctcttgggaattc

SEQ ID NO: 133819 - DNA, 15 bp, Homo sapiens
tctcttgggaattct

SEQ ID NO: 133820 - DNA, 15 bp, Homo sapiens
ctcttgggaattctt

SEQ ID NO: 133821 - DNA, 15 bp, Homo sapiens
tcttgggaattcttc

SEQ ID NO: 133822 - DNA, 15 bp, Homo sapiens
cttgggaattcttca

SEQ ID NO: 133823 - DNA, 15 bp, Homo sapiens
ttgggaattcttcac

SEQ ID NO: 133824 - DNA, 15 bp, Homo sapiens
tgggaattcttcaca

SEQ ID NO: 133825 - DNA, 15 bp, Homo sapiens
gggaattcttcacag

SEQ ID NO: 133826 - DNA, 15 bp, Homo sapiens
ggaattcttcacagc

SEQ ID NO: 133827 - DNA, 15 bp, Homo sapiens
gaattcttcacagct

SEQ ID NO: 133828 - DNA, 15 bp, Homo sapiens
aattcttcacagctt

SEQ ID NO: 133829 - DNA, 15 bp, Homo sapiens
attcttcacagcttg

SEQ ID NO: 133830 - DNA, 15 bp, Homo sapiens
ttcttcacagcttgt

SEQ ID NO: 133831 - DNA, 15 bp, Homo sapiens
tcttcacagcttgtc

SEQ ID NO: 133832 - DNA, 15 bp, Homo sapiens
cttcacagcttgtca

SEQ ID NO: 133833 - DNA, 15 bp, Homo sapiens
ttcacagcttgtcat

SEQ ID NO: 133834 - DNA, 15 bp, Homo sapiens
tcacagcttgtcatc

SEQ ID NO: 133835 - DNA, 15 bp, Homo sapiens
cacagcttgtcatct

SEQ ID NO: 133836 - DNA, 15 bp, Homo sapiens
acagcttgtcatcta

SEQ ID NO: 133837 - DNA, 15 bp, Homo sapiens
cagcttgtcatctat

SEQ ID NO: 133838 - DNA, 15 bp, Homo sapiens
agcttgtcatctatg

SEQ ID NO: 133839 - DNA, 15 bp, Homo sapiens
gcttgtcatctatga

SEQ ID NO: 133840 - DNA, 15 bp, Homo sapiens
cttgtcatctatgac

SEQ ID NO: 133841 - DNA, 15 bp, Homo sapiens
ttgtcatctatgact

SEQ ID NO: 133842 - DNA, 15 bp, Homo sapiens
tgtcatctatgactt

SEQ ID NO: 133843 - DNA, 15 bp, Homo sapiens
gtcatctatgacttt

SEQ ID NO: 133844 - DNA, 15 bp, Homo sapiens
tcatctatgacttta

SEQ ID NO: 133845 - DNA, 15 bp, Homo sapiens
catctatgactttat

SEQ ID NO: 133846 - DNA, 15 bp, Homo sapiens
atctatgactttatc

SEQ ID NO: 133847 - DNA, 15 bp, Homo sapiens
tctatgactttatcc

SEQ ID NO: 133848 - DNA, 15 bp, Homo sapiens
ctatgactttatcca

SEQ ID NO: 133849 - DNA, 15 bp, Homo sapiens
tatgactttatccac

SEQ ID NO: 133850 - DNA, 15 bp, Homo sapiens
atgactttatccaca

SEQ ID NO: 133851 - DNA, 15 bp, Homo sapiens
tgactttatccacat

SEQ ID NO: 133852 - DNA, 15 bp, Homo sapiens
gactttatccacatt

SEQ ID NO: 133853 - DNA, 15 bp, Homo sapiens
actttatccacattt

SEQ ID NO: 133854 - DNA, 15 bp, Homo sapiens
ctttatccacattta

SEQ ID NO: 133855 - DNA, 15 bp, Homo sapiens
tttatccacatttat

SEQ ID NO: 133856 - DNA, 15 bp, Homo sapiens
ttatccacatttatt

SEQ ID NO: 133857 - DNA, 15 bp, Homo sapiens
tatccacatttattt

SEQ ID NO: 133858 - DNA, 15 bp, Homo sapiens
atccacatttatttt

SEQ ID NO: 133859 - DNA, 15 bp, Homo sapiens
tccacatttattttg

SEQ ID NO: 133860 - DNA, 15 bp, Homo sapiens
ccacatttattttga

SEQ ID NO: 133861 - DNA, 15 bp, Homo sapiens
cacatttattttgaa

SEQ ID NO: 133862 - DNA, 15 bp, Homo sapiens
acatttattttgaac

SEQ ID NO: 133863 - DNA, 15 bp, Homo sapiens
catttattttgaaca

SEQ ID NO: 133864 - DNA, 15 bp, Homo sapiens
atttattttgaacat

SEQ ID NO: 133865 - DNA, 15 bp, Homo sapiens
tttattttgaacatg

SEQ ID NO: 133866 - DNA, 15 bp, Homo sapiens
ttattttgaacatgt

SEQ ID NO: 133867 - DNA, 15 bp, Homo sapiens
tattttgaacatgtt

SEQ ID NO: 133868 - DNA, 15 bp, Homo sapiens
attttgaacatgttt

SEQ ID NO: 133869 - DNA, 15 bp, Homo sapiens
ttttgaacatgttta

SEQ ID NO: 133870 - DNA, 15 bp, Homo sapiens
tttgaacatgtttaa

SEQ ID NO: 133871 - DNA, 15 bp, Homo sapiens
ttgaacatgtttaat

SEQ ID NO: 133872 - DNA, 15 bp, Homo sapiens
tgaacatgtttaatt

SEQ ID NO: 133873 - DNA, 15 bp, Homo sapiens
gaacatgtttaattt

SEQ ID NO: 133874 - DNA, 15 bp, Homo sapiens
aacatgtttaatttt

SEQ ID NO: 133875 - DNA, 15 bp, Homo sapiens
acatgtttaattttc

SEQ ID NO: 133876 - DNA, 15 bp, Homo sapiens
catgtttaattttca

SEQ ID NO: 133877 - DNA, 15 bp, Homo sapiens
atgtttaattttcag

SEQ ID NO: 133878 - DNA, 15 bp, Homo sapiens
tgtttaattttcagc

SEQ ID NO: 133879 - DNA, 15 bp, Homo sapiens
gtttaattttcagct

SEQ ID NO: 133880 - DNA, 15 bp, Homo sapiens
tttaattttcagctt

SEQ ID NO: 133881 - DNA, 15 bp, Homo sapiens
ttaattttcagcttg

SEQ ID NO: 133882 - DNA, 15 bp, Homo sapiens
taattttcagcttgt

SEQ ID NO: 133883 - DNA, 15 bp, Homo sapiens
aattttcagcttgta

SEQ ID NO: 133884 - DNA, 15 bp, Homo sapiens
attttcagcttgtat

SEQ ID NO: 133885 - DNA, 15 bp, Homo sapiens
ttttcagcttgtatt

SEQ ID NO: 133886 - DNA, 15 bp, Homo sapiens
tttcagcttgtattt

SEQ ID NO: 133887 - DNA, 15 bp, Homo sapiens
ttcagcttgtatttt

SEQ ID NO: 133888 - DNA, 15 bp, Homo sapiens
tcagcttgtattttc

SEQ ID NO: 133889 - DNA, 15 bp, Homo sapiens
cagcttgtattttct

SEQ ID NO: 133890 - DNA, 15 bp, Homo sapiens
agcttgtattttctc

SEQ ID NO: 133891 - DNA, 15 bp, Homo sapiens
gcttgtattttctca

SEQ ID NO: 133892 - DNA, 15 bp, Homo sapiens
cttgtattttctcaa

SEQ ID NO: 133893 - DNA, 15 bp, Homo sapiens
ttgtattttctcaag

SEQ ID NO: 133894 - DNA, 15 bp, Homo sapiens
tgtattttctcaagg

SEQ ID NO: 133895 - DNA, 15 bp, Homo sapiens
gtattttctcaagga

SEQ ID NO: 133896 - DNA, 15 bp, Homo sapiens
tattttctcaaggag

SEQ ID NO: 133897 - DNA, 15 bp, Homo sapiens
attttctcaaggagt

SEQ ID NO: 133898 - DNA, 15 bp, Homo sapiens
ttttctcaaggagta

SEQ ID NO: 133899 - DNA, 15 bp, Homo sapiens
tttctcaaggagtat

SEQ ID NO: 133900 - DNA, 15 bp, Homo sapiens
ttctcaaggagtatg

SEQ ID NO: 133901 - DNA, 15 bp, Homo sapiens
tctcaaggagtatgt

SEQ ID NO: 133902 - DNA, 15 bp, Homo sapiens
ctcaaggagtatgtg

SEQ ID NO: 133903 - DNA, 15 bp, Homo sapiens
tcaaggagtatgtgt

SEQ ID NO: 133904 - DNA, 15 bp, Homo sapiens
caaggagtatgtgtg

SEQ ID NO: 133905 - DNA, 15 bp, Homo sapiens
aaggagtatgtgtga

SEQ ID NO: 133906 - DNA, 15 bp, Homo sapiens
aggagtatgtgtgag

SEQ ID NO: 133907 - DNA, 15 bp, Homo sapiens
ggagtatgtgtgagt

SEQ ID NO: 133908 - DNA, 15 bp, Homo sapiens
gagtatgtgtgagtc

SEQ ID NO: 133909 - DNA, 15 bp, Homo sapiens
agtatgtgtgagtca

SEQ ID NO: 133910 - DNA, 15 bp, Homo sapiens
gtatgtgtgagtcag

SEQ ID NO: 133911 - DNA, 15 bp, Homo sapiens
tatgtgtgagtcagc

SEQ ID NO: 133912 - DNA, 15 bp, Homo sapiens
atgtgtgagtcagca

SEQ ID NO: 133913 - DNA, 15 bp, Homo sapiens
tgtgtgagtcagcat

SEQ ID NO: 133914 - DNA, 15 bp, Homo sapiens
gtgtgagtcagcatt

SEQ ID NO: 133915 - DNA, 15 bp, Homo sapiens
tgtgagtcagcattc

SEQ ID NO: 133916 - DNA, 15 bp, Homo sapiens
gtgagtcagcattca

SEQ ID NO: 133917 - DNA, 15 bp, Homo sapiens
tgagtcagcattcag

SEQ ID NO: 133918 - DNA, 15 bp, Homo sapiens
gagtcagcattcaga

SEQ ID NO: 133919 - DNA, 15 bp, Homo sapiens
agtcagcattcagag

SEQ ID NO: 133920 - DNA, 15 bp, Homo sapiens
gtcagcattcagagt

SEQ ID NO: 133921 - DNA, 15 bp, Homo sapiens
tcagcattcagagta

SEQ ID NO: 133922 - DNA, 15 bp, Homo sapiens
cagcattcagagtac

SEQ ID NO: 133923 - DNA, 15 bp, Homo sapiens
agcattcagagtact

SEQ ID NO: 133924 - DNA, 15 bp, Homo sapiens
gcattcagagtactt

SEQ ID NO: 133925 - DNA, 15 bp, Homo sapiens
cattcagagtactta

SEQ ID NO: 133926 - DNA, 15 bp, Homo sapiens
attcagagtacttaa

SEQ ID NO: 133927 - DNA, 15 bp, Homo sapiens
ttcagagtacttaac

SEQ ID NO: 133928 - DNA, 15 bp, Homo sapiens
tcagagtacttaaca

SEQ ID NO: 133929 - DNA, 15 bp, Homo sapiens
cagagtacttaacac

SEQ ID NO: 133930 - DNA, 15 bp, Homo sapiens
agagtacttaacaca

SEQ ID NO: 133931 - DNA, 15 bp, Homo sapiens
gagtacttaacacac

SEQ ID NO: 133932 - DNA, 15 bp, Homo sapiens
agtacttaacacact

SEQ ID NO: 133933 - DNA, 15 bp, Homo sapiens
gtacttaacacactt

SEQ ID NO: 133934 - DNA, 15 bp, Homo sapiens
tacttaacacactta

SEQ ID NO: 133935 - DNA, 15 bp, Homo sapiens
acttaacacacttag

SEQ ID NO: 133936 - DNA, 15 bp, Homo sapiens
cttaacacacttagt

SEQ ID NO: 133937 - DNA, 15 bp, Homo sapiens
ttaacacacttagtg

SEQ ID NO: 133938 - DNA, 15 bp, Homo sapiens
taacacacttagtgt

SEQ ID NO: 133939 - DNA, 15 bp, Homo sapiens
aacacacttagtgtc

SEQ ID NO: 133940 - DNA, 15 bp, Homo sapiens
acacacttagtgtca

SEQ ID NO: 133941 - DNA, 15 bp, Homo sapiens
cacacttagtgtcat

SEQ ID NO: 133942 - DNA, 15 bp, Homo sapiens
acacttagtgtcatt

SEQ ID NO: 133943 - DNA, 15 bp, Homo sapiens
cacttagtgtcatta

SEQ ID NO: 133944 - DNA, 15 bp, Homo sapiens
acttagtgtcattag

SEQ ID NO: 133945 - DNA, 15 bp, Homo sapiens
cttagtgtcattagt

SEQ ID NO: 133946 - DNA, 15 bp, Homo sapiens
ttagtgtcattagtg

SEQ ID NO: 133947 - DNA, 15 bp, Homo sapiens
tagtgtcattagtga

SEQ ID NO: 133948 - DNA, 15 bp, Homo sapiens
agtgtcattagtgat

SEQ ID NO: 133949 - DNA, 15 bp, Homo sapiens
gtgtcattagtgata

SEQ ID NO: 133950 - DNA, 15 bp, Homo sapiens
tgtcattagtgataa

SEQ ID NO: 133951 - DNA, 15 bp, Homo sapiens
gtcattagtgataac

SEQ ID NO: 133952 - DNA, 15 bp, Homo sapiens
tcattagtgataact

SEQ ID NO: 133953 - DNA, 15 bp, Homo sapiens
cattagtgataactt

SEQ ID NO: 133954 - DNA, 15 bp, Homo sapiens
attagtgataactta

SEQ ID NO: 133955 - DNA, 15 bp, Homo sapiens
ttagtgataacttaa

SEQ ID NO: 133956 - DNA, 15 bp, Homo sapiens
tagtgataacttaac

SEQ ID NO: 133957 - DNA, 15 bp, Homo sapiens
agtgataacttaacc

SEQ ID NO: 133958 - DNA, 15 bp, Homo sapiens
gtgataacttaaccc

SEQ ID NO: 133959 - DNA, 15 bp, Homo sapiens
tgataacttaaccca

SEQ ID NO: 133960 - DNA, 15 bp, Homo sapiens
gataacttaacccac

SEQ ID NO: 133961 - DNA, 15 bp, Homo sapiens
ataacttaacccaca

SEQ ID NO: 133962 - DNA, 15 bp, Homo sapiens
taacttaacccacac

SEQ ID NO: 133963 - DNA, 15 bp, Homo sapiens
aacttaacccacacg

SEQ ID NO: 133964 - DNA, 15 bp, Homo sapiens
acttaacccacacgt

SEQ ID NO: 133965 - DNA, 15 bp, Homo sapiens
cttaacccacacgta

SEQ ID NO: 133966 - DNA, 15 bp, Homo sapiens
ttaacccacacgtat

SEQ ID NO: 133967 - DNA, 15 bp, Homo sapiens
taacccacacgtata

SEQ ID NO: 133968 - DNA, 15 bp, Homo sapiens
aacccacacgtatag

SEQ ID NO: 133969 - DNA, 15 bp, Homo sapiens
acccacacgtatagg

SEQ ID NO: 133970 - DNA, 15 bp, Homo sapiens
cccacacgtatagga

SEQ ID NO: 133971 - DNA, 15 bp, Homo sapiens
ccacacgtataggaa

SEQ ID NO: 133972 - DNA, 15 bp, Homo sapiens
cacacgtataggaag

SEQ ID NO: 133973 - DNA, 15 bp, Homo sapiens
acacgtataggaagc

SEQ ID NO: 133974 - DNA, 15 bp, Homo sapiens
cacgtataggaagct

SEQ ID NO: 133975 - DNA, 15 bp, Homo sapiens
acgtataggaagcta

SEQ ID NO: 133976 - DNA, 15 bp, Homo sapiens
cgtataggaagctag

SEQ ID NO: 133977 - DNA, 15 bp, Homo sapiens
gtataggaagctaga

SEQ ID NO: 133978 - DNA, 15 bp, Homo sapiens
tataggaagctagac

SEQ ID NO: 133979 - DNA, 15 bp, Homo sapiens
ataggaagctagacc

SEQ ID NO: 133980 - DNA, 15 bp, Homo sapiens
taggaagctagacct

SEQ ID NO: 133981 - DNA, 15 bp, Homo sapiens
aggaagctagacctc

SEQ ID NO: 133982 - DNA, 15 bp, Homo sapiens
ggaagctagacctcc

SEQ ID NO: 133983 - DNA, 15 bp, Homo sapiens
gaagctagacctcca

SEQ ID NO: 133984 - DNA, 15 bp, Homo sapiens
aagctagacctccat

SEQ ID NO: 133985 - DNA, 15 bp, Homo sapiens
agctagacctccatt

SEQ ID NO: 133986 - DNA, 15 bp, Homo sapiens
gctagacctccattt

SEQ ID NO: 133987 - DNA, 15 bp, Homo sapiens
ctagacctccattta

SEQ ID NO: 133988 - DNA, 15 bp, Homo sapiens
tagacctccatttac

SEQ ID NO: 133989 - DNA, 15 bp, Homo sapiens
agacctccatttaca

SEQ ID NO: 133990 - DNA, 15 bp, Homo sapiens
gacctccatttacag

SEQ ID NO: 133991 - DNA, 15 bp, Homo sapiens
acctccatttacaga

SEQ ID NO: 133992 - DNA, 15 bp, Homo sapiens
cctccatttacagaa

SEQ ID NO: 133993 - DNA, 15 bp, Homo sapiens
ctccatttacagaaa

SEQ ID NO: 133994 - DNA, 15 bp, Homo sapiens
tccatttacagaaaa

SEQ ID NO: 133995 - DNA, 15 bp, Homo sapiens
ccatttacagaaaaa

SEQ ID NO: 133996 - DNA, 15 bp, Homo sapiens
catttacagaaaaat

SEQ ID NO: 133997 - DNA, 15 bp, Homo sapiens
atttacagaaaaatg

SEQ ID NO: 133998 - DNA, 15 bp, Homo sapiens
tttacagaaaaatgg

SEQ ID NO: 133999 - DNA, 15 bp, Homo sapiens
ttacagaaaaatgga

SEQ ID NO: 134000 - DNA, 15 bp, Homo sapiens
tacagaaaaatggag

SEQ ID NO: 134001 - DNA, 15 bp, Homo sapiens
acagaaaaatggagg

SEQ ID NO: 134002 - DNA, 15 bp, Homo sapiens
cagaaaaatggaggc

SEQ ID NO: 134003 - DNA, 15 bp, Homo sapiens
agaaaaatggaggct

SEQ ID NO: 134004 - DNA, 15 bp, Homo sapiens
gaaaaatggaggctc

SEQ ID NO: 134005 - DNA, 15 bp, Homo sapiens
aaaaatggaggctca

SEQ ID NO: 134006 - DNA, 15 bp, Homo sapiens
aaaatggaggctcag

SEQ ID NO: 134007 - DNA, 15 bp, Homo sapiens
aaatggaggctcaga

SEQ ID NO: 134008 - DNA, 15 bp, Homo sapiens
aatggaggctcagag

SEQ ID NO: 134009 - DNA, 15 bp, Homo sapiens
atggaggctcagaga

SEQ ID NO: 134010 - DNA, 15 bp, Homo sapiens
tggaggctcagagag

SEQ ID NO: 134011 - DNA, 15 bp, Homo sapiens
ggaggctcagagagc

SEQ ID NO: 134012 - DNA, 15 bp, Homo sapiens
gaggctcagagagcc

SEQ ID NO: 134013 - DNA, 15 bp, Homo sapiens
aggctcagagagcct

SEQ ID NO: 134014 - DNA, 15 bp, Homo sapiens
ggctcagagagccta

SEQ ID NO: 134015 - DNA, 15 bp, Homo sapiens
gctcagagagcctaa

SEQ ID NO: 134016 - DNA, 15 bp, Homo sapiens
ctcagagagcctaac

SEQ ID NO: 134017 - DNA, 15 bp, Homo sapiens
tcagagagcctaact

SEQ ID NO: 134018 - DNA, 15 bp, Homo sapiens
cagagagcctaactg

SEQ ID NO: 134019 - DNA, 15 bp, Homo sapiens
agagagcctaactga

SEQ ID NO: 134020 - DNA, 15 bp, Homo sapiens
gagagcctaactgac

SEQ ID NO: 134021 - DNA, 15 bp, Homo sapiens
agagcctaactgact

SEQ ID NO: 134022 - DNA, 15 bp, Homo sapiens
gagcctaactgactt

SEQ ID NO: 134023 - DNA, 15 bp, Homo sapiens
agcctaactgacttt

SEQ ID NO: 134024 - DNA, 15 bp, Homo sapiens
gcctaactgactttc

SEQ ID NO: 134025 - DNA, 15 bp, Homo sapiens
cctaactgactttcc

SEQ ID NO: 134026 - DNA, 15 bp, Homo sapiens
ctaactgactttccc

SEQ ID NO: 134027 - DNA, 15 bp, Homo sapiens
taactgactttccca

SEQ ID NO: 134028 - DNA, 15 bp, Homo sapiens
aactgactttcccaa

SEQ ID NO: 134029 - DNA, 15 bp, Homo sapiens
actgactttcccaag

SEQ ID NO: 134030 - DNA, 15 bp, Homo sapiens
ctgactttcccaagg

SEQ ID NO: 134031 - DNA, 15 bp, Homo sapiens
tgactttcccaaggc

SEQ ID NO: 134032 - DNA, 15 bp, Homo sapiens
gactttcccaaggcc

SEQ ID NO: 134033 - DNA, 15 bp, Homo sapiens
actttcccaaggcca

SEQ ID NO: 134034 - DNA, 15 bp, Homo sapiens
ctttcccaaggccac

SEQ ID NO: 134035 - DNA, 15 bp, Homo sapiens
tttcccaaggccaca

SEQ ID NO: 134036 - DNA, 15 bp, Homo sapiens
ttcccaaggccacat

SEQ ID NO: 134037 - DNA, 15 bp, Homo sapiens
tcccaaggccacata

SEQ ID NO: 134038 - DNA, 15 bp, Homo sapiens
cccaaggccacataa

SEQ ID NO: 134039 - DNA, 15 bp, Homo sapiens
ccaaggccacataac

SEQ ID NO: 134040 - DNA, 15 bp, Homo sapiens
caaggccacataact

SEQ ID NO: 134041 - DNA, 15 bp, Homo sapiens
aaggccacataactg

SEQ ID NO: 134042 - DNA, 15 bp, Homo sapiens
aggccacataactgg

SEQ ID NO: 134043 - DNA, 15 bp, Homo sapiens
ggccacataactgga

SEQ ID NO: 134044 - DNA, 15 bp, Homo sapiens
gccacataactggaa

SEQ ID NO: 134045 - DNA, 15 bp, Homo sapiens
ccacataactggaaa

SEQ ID NO: 134046 - DNA, 15 bp, Homo sapiens
cacataactggaaaa

SEQ ID NO: 134047 - DNA, 15 bp, Homo sapiens
acataactggaaaat

SEQ ID NO: 134048 - DNA, 15 bp, Homo sapiens
cataactggaaaatt

SEQ ID NO: 134049 - DNA, 15 bp, Homo sapiens
ataactggaaaattc

SEQ ID NO: 134050 - DNA, 15 bp, Homo sapiens
taactggaaaattct

SEQ ID NO: 134051 - DNA, 15 bp, Homo sapiens
aactggaaaattctg

SEQ ID NO: 134052 - DNA, 15 bp, Homo sapiens
actggaaaattctgg

SEQ ID NO: 134053 - DNA, 15 bp, Homo sapiens
ctggaaaattctgga

SEQ ID NO: 134054 - DNA, 15 bp, Homo sapiens
tggaaaattctggaa

SEQ ID NO: 134055 - DNA, 15 bp, Homo sapiens
ggaaaattctggaac

SEQ ID NO: 134056 - DNA, 15 bp, Homo sapiens
gaaaattctggaact

SEQ ID NO: 134057 - DNA, 15 bp, Homo sapiens
aaaattctggaactg

SEQ ID NO: 134058 - DNA, 15 bp, Homo sapiens
aaattctggaactga

SEQ ID NO: 134059 - DNA, 15 bp, Homo sapiens
aattctggaactgag

SEQ ID NO: 134060 - DNA, 15 bp, Homo sapiens
attctggaactgagt

SEQ ID NO: 134061 - DNA, 15 bp, Homo sapiens
ttctggaactgagtt

SEQ ID NO: 134062 - DNA, 15 bp, Homo sapiens
tctggaactgagttt

SEQ ID NO: 134063 - DNA, 15 bp, Homo sapiens
ctggaactgagtttt

SEQ ID NO: 134064 - DNA, 15 bp, Homo sapiens
tggaactgagttttt

SEQ ID NO: 134065 - DNA, 15 bp, Homo sapiens
ggaactgagtttttt

SEQ ID NO: 134066 - DNA, 15 bp, Homo sapiens
gaactgagttttttc

SEQ ID NO: 134067 - DNA, 15 bp, Homo sapiens
aactgagttttttca

SEQ ID NO: 134068 - DNA, 15 bp, Homo sapiens
actgagttttttcag

SEQ ID NO: 134069 - DNA, 15 bp, Homo sapiens
ctgagttttttcagg

SEQ ID NO: 134070 - DNA, 15 bp, Homo sapiens
tgagttttttcaggt

SEQ ID NO: 134071 - DNA, 15 bp, Homo sapiens
gagttttttcaggta

SEQ ID NO: 134072 - DNA, 15 bp, Homo sapiens
agttttttcaggtat

SEQ ID NO: 134073 - DNA, 15 bp, Homo sapiens
gttttttcaggtatg

SEQ ID NO: 134074 - DNA, 15 bp, Homo sapiens
ttttttcaggtatgt

SEQ ID NO: 134075 - DNA, 15 bp, Homo sapiens
tttttcaggtatgtc

SEQ ID NO: 134076 - DNA, 15 bp, Homo sapiens
ttttcaggtatgtct

SEQ ID NO: 134077 - DNA, 15 bp, Homo sapiens
tttcaggtatgtctt

SEQ ID NO: 134078 - DNA, 15 bp, Homo sapiens
ttcaggtatgtcttg

SEQ ID NO: 134079 - DNA, 15 bp, Homo sapiens
tcaggtatgtcttgg

SEQ ID NO: 134080 - DNA, 15 bp, Homo sapiens
caggtatgtcttggt

SEQ ID NO: 134081 - DNA, 15 bp, Homo sapiens
aggtatgtcttggta

SEQ ID NO: 134082 - DNA, 15 bp, Homo sapiens
ggtatgtcttggtat

SEQ ID NO: 134083 - DNA, 15 bp, Homo sapiens
gtatgtcttggtatc

SEQ ID NO: 134084 - DNA, 15 bp, Homo sapiens
tatgtcttggtatcc

SEQ ID NO: 134085 - DNA, 15 bp, Homo sapiens
atgtcttggtatccc

SEQ ID NO: 134086 - DNA, 15 bp, Homo sapiens
tgtcttggtatccct

SEQ ID NO: 134087 - DNA, 15 bp, Homo sapiens
gtcttggtatccctc

SEQ ID NO: 134088 - DNA, 15 bp, Homo sapiens
tcttggtatccctcg

SEQ ID NO: 134089 - DNA, 15 bp, Homo sapiens
cttggtatccctcgg

SEQ ID NO: 134090 - DNA, 15 bp, Homo sapiens
ttggtatccctcggt

SEQ ID NO: 134091 - DNA, 15 bp, Homo sapiens
tggtatccctcggtg

SEQ ID NO: 134092 - DNA, 15 bp, Homo sapiens
ggtatccctcggtga

SEQ ID NO: 134093 - DNA, 15 bp, Homo sapiens
gtatccctcggtgag

SEQ ID NO: 134094 - DNA, 15 bp, Homo sapiens
tatccctcggtgagc

SEQ ID NO: 134095 - DNA, 15 bp, Homo sapiens
atccctcggtgagcc

SEQ ID NO: 134096 - DNA, 15 bp, Homo sapiens
tccctcggtgagcct

SEQ ID NO: 134097 - DNA, 15 bp, Homo sapiens
ccctcggtgagcctt

SEQ ID NO: 134098 - DNA, 15 bp, Homo sapiens
cctcggtgagccttc

SEQ ID NO: 134099 - DNA, 15 bp, Homo sapiens
ctcggtgagccttct

SEQ ID NO: 134100 - DNA, 15 bp, Homo sapiens
tcggtgagccttctc

SEQ ID NO: 134101 - DNA, 15 bp, Homo sapiens
cggtgagccttctct

SEQ ID NO: 134102 - DNA, 15 bp, Homo sapiens
ggtgagccttctctg

SEQ ID NO: 134103 - DNA, 15 bp, Homo sapiens
gtgagccttctctgt

SEQ ID NO: 134104 - DNA, 15 bp, Homo sapiens
tgagccttctctgta

SEQ ID NO: 134105 - DNA, 15 bp, Homo sapiens
gagccttctctgtag

SEQ ID NO: 134106 - DNA, 15 bp, Homo sapiens
agccttctctgtaga

SEQ ID NO: 134107 - DNA, 15 bp, Homo sapiens
gccttctctgtagag

SEQ ID NO: 134108 - DNA, 15 bp, Homo sapiens
ccttctctgtagaga

SEQ ID NO: 134109 - DNA, 15 bp, Homo sapiens
cttctctgtagagaa

SEQ ID NO: 134110 - DNA, 15 bp, Homo sapiens
ttctctgtagagaag

SEQ ID NO: 134111 - DNA, 15 bp, Homo sapiens
tctctgtagagaagg

SEQ ID NO: 134112 - DNA, 15 bp, Homo sapiens
ctctgtagagaagga

SEQ ID NO: 134113 - DNA, 15 bp, Homo sapiens
tctgtagagaaggaa

SEQ ID NO: 134114 - DNA, 15 bp, Homo sapiens
ctgtagagaaggaag

SEQ ID NO: 134115 - DNA, 15 bp, Homo sapiens
tgtagagaaggaagt

SEQ ID NO: 134116 - DNA, 15 bp, Homo sapiens
gtagagaaggaagtg

SEQ ID NO: 134117 - DNA, 15 bp, Homo sapiens
tagagaaggaagtgt

SEQ ID NO: 134118 - DNA, 15 bp, Homo sapiens
agagaaggaagtgtc

SEQ ID NO: 134119 - DNA, 15 bp, Homo sapiens
gagaaggaagtgtct

SEQ ID NO: 134120 - DNA, 15 bp, Homo sapiens
agaaggaagtgtctc

SEQ ID NO: 134121 - DNA, 15 bp, Homo sapiens
gaaggaagtgtctcc

SEQ ID NO: 134122 - DNA, 15 bp, Homo sapiens
aaggaagtgtctcct

SEQ ID NO: 134123 - DNA, 15 bp, Homo sapiens
aggaagtgtctcctg

SEQ ID NO: 134124 - DNA, 15 bp, Homo sapiens
ggaagtgtctcctgg

SEQ ID NO: 134125 - DNA, 15 bp, Homo sapiens
gaagtgtctcctggg

SEQ ID NO: 134126 - DNA, 15 bp, Homo sapiens
aagtgtctcctgggt

SEQ ID NO: 134127 - DNA, 15 bp, Homo sapiens
agtgtctcctgggtt

SEQ ID NO: 134128 - DNA, 15 bp, Homo sapiens
gtgtctcctgggttg

SEQ ID NO: 134129 - DNA, 15 bp, Homo sapiens
tgtctcctgggttgg

SEQ ID NO: 134130 - DNA, 15 bp, Homo sapiens
gtctcctgggttgga

SEQ ID NO: 134131 - DNA, 15 bp, Homo sapiens
tctcctgggttggaa

SEQ ID NO: 134132 - DNA, 15 bp, Homo sapiens
ctcctgggttggaaa

SEQ ID NO: 134133 - DNA, 15 bp, Homo sapiens
tcctgggttggaaag

SEQ ID NO: 134134 - DNA, 15 bp, Homo sapiens
cctgggttggaaagc

SEQ ID NO: 134135 - DNA, 15 bp, Homo sapiens
ctgggttggaaagcc

SEQ ID NO: 134136 - DNA, 15 bp, Homo sapiens
tgggttggaaagccc

SEQ ID NO: 134137 - DNA, 15 bp, Homo sapiens
gggttggaaagccca

SEQ ID NO: 134138 - DNA, 15 bp, Homo sapiens
ggttggaaagcccag

SEQ ID NO: 134139 - DNA, 15 bp, Homo sapiens
gttggaaagcccagg

SEQ ID NO: 134140 - DNA, 15 bp, Homo sapiens
ttggaaagcccaggc

SEQ ID NO: 134141 - DNA, 15 bp, Homo sapiens
tggaaagcccaggcc

SEQ ID NO: 134142 - DNA, 15 bp, Homo sapiens
ggaaagcccaggccg

SEQ ID NO: 134143 - DNA, 15 bp, Homo sapiens
gaaagcccaggccgg

SEQ ID NO: 134144 - DNA, 15 bp, Homo sapiens
aaagcccaggccggg

SEQ ID NO: 134145 - DNA, 15 bp, Homo sapiens
aagcccaggccggga

SEQ ID NO: 134146 - DNA, 15 bp, Homo sapiens
agcccaggccgggat

SEQ ID NO: 134147 - DNA, 15 bp, Homo sapiens
gcccaggccgggatg

SEQ ID NO: 134148 - DNA, 15 bp, Homo sapiens
cccaggccgggatga

SEQ ID NO: 134149 - DNA, 15 bp, Homo sapiens
ccaggccgggatgaa

SEQ ID NO: 134150 - DNA, 15 bp, Homo sapiens
caggccgggatgaac

SEQ ID NO: 134151 - DNA, 15 bp, Homo sapiens
aggccgggatgaaca

SEQ ID NO: 134152 - DNA, 15 bp, Homo sapiens
ggccgggatgaacag

SEQ ID NO: 134153 - DNA, 15 bp, Homo sapiens
gccgggatgaacagc

SEQ ID NO: 134154 - DNA, 15 bp, Homo sapiens
ccgggatgaacagca

SEQ ID NO: 134155 - DNA, 15 bp, Homo sapiens
cgggatgaacagcat

SEQ ID NO: 134156 - DNA, 15 bp, Homo sapiens
gggatgaacagcatg

SEQ ID NO: 134157 - DNA, 15 bp, Homo sapiens
ggatgaacagcatgg

SEQ ID NO: 134158 - DNA, 15 bp, Homo sapiens
gatgaacagcatggg

SEQ ID NO: 134159 - DNA, 15 bp, Homo sapiens
atgaacagcatgggt

SEQ ID NO: 134160 - DNA, 15 bp, Homo sapiens
tgaacagcatgggtg

SEQ ID NO: 134161 - DNA, 15 bp, Homo sapiens
gaacagcatgggtgt

SEQ ID NO: 134162 - DNA, 15 bp, Homo sapiens
aacagcatgggtgtc

SEQ ID NO: 134163 - DNA, 15 bp, Homo sapiens
acagcatgggtgtcc

SEQ ID NO: 134164 - DNA, 15 bp, Homo sapiens
cagcatgggtgtcct

SEQ ID NO: 134165 - DNA, 15 bp, Homo sapiens
agcatgggtgtcctt

SEQ ID NO: 134166 - DNA, 15 bp, Homo sapiens
gcatgggtgtcctta

SEQ ID NO: 134167 - DNA, 15 bp, Homo sapiens
catgggtgtccttag

SEQ ID NO: 134168 - DNA, 15 bp, Homo sapiens
atgggtgtccttagg

SEQ ID NO: 134169 - DNA, 15 bp, Homo sapiens
tgggtgtccttaggc

SEQ ID NO: 134170 - DNA, 15 bp, Homo sapiens
gggtgtccttaggct

SEQ ID NO: 134171 - DNA, 15 bp, Homo sapiens
ggtgtccttaggctg

SEQ ID NO: 134172 - DNA, 15 bp, Homo sapiens
gtgtccttaggctgt

SEQ ID NO: 134173 - DNA, 15 bp, Homo sapiens
tgtccttaggctgtg

SEQ ID NO: 134174 - DNA, 15 bp, Homo sapiens
gtccttaggctgtgt

SEQ ID NO: 134175 - DNA, 15 bp, Homo sapiens
tccttaggctgtgtg

SEQ ID NO: 134176 - DNA, 15 bp, Homo sapiens
ccttaggctgtgtgt

SEQ ID NO: 134177 - DNA, 15 bp, Homo sapiens
cttaggctgtgtgta

SEQ ID NO: 134178 - DNA, 15 bp, Homo sapiens
ttaggctgtgtgtac

SEQ ID NO: 134179 - DNA, 15 bp, Homo sapiens
taggctgtgtgtacc

SEQ ID NO: 134180 - DNA, 15 bp, Homo sapiens
aggctgtgtgtacca

SEQ ID NO: 134181 - DNA, 15 bp, Homo sapiens
ggctgtgtgtaccac

SEQ ID NO: 134182 - DNA, 15 bp, Homo sapiens
gctgtgtgtaccaca

SEQ ID NO: 134183 - DNA, 15 bp, Homo sapiens
ctgtgtgtaccacac

SEQ ID NO: 134184 - DNA, 15 bp, Homo sapiens
tgtgtgtaccacaca

SEQ ID NO: 134185 - DNA, 15 bp, Homo sapiens
gtgtgtaccacacac

SEQ ID NO: 134186 - DNA, 15 bp, Homo sapiens
tgtgtaccacacacc

SEQ ID NO: 134187 - DNA, 15 bp, Homo sapiens
gtgtaccacacaccc

SEQ ID NO: 134188 - DNA, 15 bp, Homo sapiens
tgtaccacacacccc

SEQ ID NO: 134189 - DNA, 15 bp, Homo sapiens
gtaccacacacccct

SEQ ID NO: 134190 - DNA, 15 bp, Homo sapiens
taccacacacccctg

SEQ ID NO: 134191 - DNA, 15 bp, Homo sapiens
accacacacccctgg

SEQ ID NO: 134192 - DNA, 15 bp, Homo sapiens
ccacacacccctggc

SEQ ID NO: 134193 - DNA, 15 bp, Homo sapiens
cacacacccctggcc

SEQ ID NO: 134194 - DNA, 15 bp, Homo sapiens
acacacccctggcct

SEQ ID NO: 134195 - DNA, 15 bp, Homo sapiens
cacacccctggccta

SEQ ID NO: 134196 - DNA, 15 bp, Homo sapiens
acacccctggcctac

SEQ ID NO: 134197 - DNA, 15 bp, Homo sapiens
cacccctggcctact

SEQ ID NO: 134198 - DNA, 15 bp, Homo sapiens
acccctggcctactc

SEQ ID NO: 134199 - DNA, 15 bp, Homo sapiens
cccctggcctactct

SEQ ID NO: 134200 - DNA, 15 bp, Homo sapiens
ccctggcctactctc

SEQ ID NO: 134201 - DNA, 15 bp, Homo sapiens
cctggcctactctcc

SEQ ID NO: 134202 - DNA, 15 bp, Homo sapiens
ctggcctactctccc

SEQ ID NO: 134203 - DNA, 15 bp, Homo sapiens
tggcctactctcccc

SEQ ID NO: 134204 - DNA, 15 bp, Homo sapiens
ggcctactctcccct

SEQ ID NO: 134205 - DNA, 15 bp, Homo sapiens
gcctactctcccctg

SEQ ID NO: 134206 - DNA, 15 bp, Homo sapiens
cctactctcccctgc

SEQ ID NO: 134207 - DNA, 15 bp, Homo sapiens
ctactctcccctgct

SEQ ID NO: 134208 - DNA, 15 bp, Homo sapiens
tactctcccctgctc

SEQ ID NO: 134209 - DNA, 15 bp, Homo sapiens
actctcccctgctct

SEQ ID NO: 134210 - DNA, 15 bp, Homo sapiens
ctctcccctgctcta

SEQ ID NO: 134211 - DNA, 15 bp, Homo sapiens
tctcccctgctctaa

SEQ ID NO: 134212 - DNA, 15 bp, Homo sapiens
ctcccctgctctaag

SEQ ID NO: 134213 - DNA, 15 bp, Homo sapiens
tcccctgctctaagg

SEQ ID NO: 134214 - DNA, 15 bp, Homo sapiens
cccctgctctaagga

SEQ ID NO: 134215 - DNA, 15 bp, Homo sapiens
ccctgctctaaggag

SEQ ID NO: 134216 - DNA, 15 bp, Homo sapiens
cctgctctaaggagt

SEQ ID NO: 134217 - DNA, 15 bp, Homo sapiens
ctgctctaaggagtc

SEQ ID NO: 134218 - DNA, 15 bp, Homo sapiens
tgctctaaggagtca

SEQ ID NO: 134219 - DNA, 15 bp, Homo sapiens
gctctaaggagtcac

SEQ ID NO: 134220 - DNA, 15 bp, Homo sapiens
ctctaaggagtcacc

SEQ ID NO: 134221 - DNA, 15 bp, Homo sapiens
tctaaggagtcacct

SEQ ID NO: 134222 - DNA, 15 bp, Homo sapiens
ctaaggagtcacctg

SEQ ID NO: 134223 - DNA, 15 bp, Homo sapiens
taaggagtcacctga

SEQ ID NO: 134224 - DNA, 15 bp, Homo sapiens
aaggagtcacctgaa

SEQ ID NO: 134225 - DNA, 15 bp, Homo sapiens
aggagtcacctgaag

SEQ ID NO: 134226 - DNA, 15 bp, Homo sapiens
ggagtcacctgaagg

SEQ ID NO: 134227 - DNA, 15 bp, Homo sapiens
gagtcacctgaagga

SEQ ID NO: 134228 - DNA, 15 bp, Homo sapiens
agtcacctgaaggag

SEQ ID NO: 134229 - DNA, 15 bp, Homo sapiens
gtcacctgaaggagc

SEQ ID NO: 134230 - DNA, 15 bp, Homo sapiens
tcacctgaaggagca

SEQ ID NO: 134231 - DNA, 15 bp, Homo sapiens
cacctgaaggagcag

SEQ ID NO: 134232 - DNA, 15 bp, Homo sapiens
acctgaaggagcagc

SEQ ID NO: 134233 - DNA, 15 bp, Homo sapiens
cctgaaggagcagct

SEQ ID NO: 134234 - DNA, 15 bp, Homo sapiens
ctgaaggagcagctg

SEQ ID NO: 134235 - DNA, 15 bp, Homo sapiens
tgaaggagcagctgc

SEQ ID NO: 134236 - DNA, 15 bp, Homo sapiens
gaaggagcagctgca

SEQ ID NO: 134237 - DNA, 15 bp, Homo sapiens
aaggagcagctgcat

SEQ ID NO: 134238 - DNA, 15 bp, Homo sapiens
aggagcagctgcatc

SEQ ID NO: 134239 - DNA, 15 bp, Homo sapiens
ggagcagctgcatca

SEQ ID NO: 134240 - DNA, 15 bp, Homo sapiens
gagcagctgcatcac

SEQ ID NO: 134241 - DNA, 15 bp, Homo sapiens
agcagctgcatcacc

SEQ ID NO: 134242 - DNA, 15 bp, Homo sapiens
gcagctgcatcaccc

SEQ ID NO: 134243 - DNA, 15 bp, Homo sapiens
cagctgcatcacccc

SEQ ID NO: 134244 - DNA, 15 bp, Homo sapiens
agctgcatcaccccg

SEQ ID NO: 134245 - DNA, 15 bp, Homo sapiens
gctgcatcaccccgc

SEQ ID NO: 134246 - DNA, 15 bp, Homo sapiens
ctgcatcaccccgcc

SEQ ID NO: 134247 - DNA, 15 bp, Homo sapiens
tgcatcaccccgcct

SEQ ID NO: 134248 - DNA, 15 bp, Homo sapiens
gcatcaccccgcctc

SEQ ID NO: 134249 - DNA, 15 bp, Homo sapiens
catcaccccgcctca

SEQ ID NO: 134250 - DNA, 15 bp, Homo sapiens
atcaccccgcctcac

SEQ ID NO: 134251 - DNA, 15 bp, Homo sapiens
tcaccccgcctcacc

SEQ ID NO: 134252 - DNA, 15 bp, Homo sapiens
caccccgcctcaccc

SEQ ID NO: 134253 - DNA, 15 bp, Homo sapiens
accccgcctcacccc

SEQ ID NO: 134254 - DNA, 15 bp, Homo sapiens
ccccgcctcacccct

SEQ ID NO: 134255 - DNA, 15 bp, Homo sapiens
cccgcctcacccctt

SEQ ID NO: 134256 - DNA, 15 bp, Homo sapiens
ccgcctcaccccttc

SEQ ID NO: 134257 - DNA, 15 bp, Homo sapiens
cgcctcaccccttct

SEQ ID NO: 134258 - DNA, 15 bp, Homo sapiens
gcctcaccccttctc

SEQ ID NO: 134259 - DNA, 15 bp, Homo sapiens
cctcaccccttctcc

SEQ ID NO: 134260 - DNA, 15 bp, Homo sapiens
ctcaccccttctcct

SEQ ID NO: 134261 - DNA, 15 bp, Homo sapiens
tcaccccttctcctc

SEQ ID NO: 134262 - DNA, 15 bp, Homo sapiens
caccccttctcctca

SEQ ID NO: 134263 - DNA, 15 bp, Homo sapiens
accccttctcctcag

SEQ ID NO: 134264 - DNA, 15 bp, Homo sapiens
ccccttctcctcagc

SEQ ID NO: 134265 - DNA, 15 bp, Homo sapiens
cccttctcctcagca

SEQ ID NO: 134266 - DNA, 15 bp, Homo sapiens
ccttctcctcagcac

SEQ ID NO: 134267 - DNA, 15 bp, Homo sapiens
cttctcctcagcacc

SEQ ID NO: 134268 - DNA, 15 bp, Homo sapiens
ttctcctcagcaccc

SEQ ID NO: 134269 - DNA, 15 bp, Homo sapiens
tctcctcagcaccca

SEQ ID NO: 134270 - DNA, 15 bp, Homo sapiens
ctcctcagcacccaa

SEQ ID NO: 134271 - DNA, 15 bp, Homo sapiens
tcctcagcacccaac

SEQ ID NO: 134272 - DNA, 15 bp, Homo sapiens
cctcagcacccaaca

SEQ ID NO: 134273 - DNA, 15 bp, Homo sapiens
ctcagcacccaacaa

SEQ ID NO: 134274 - DNA, 15 bp, Homo sapiens
tcagcacccaacaac

SEQ ID NO: 134275 - DNA, 15 bp, Homo sapiens
cagcacccaacaacc

SEQ ID NO: 134276 - DNA, 15 bp, Homo sapiens
agcacccaacaacca

SEQ ID NO: 134277 - DNA, 15 bp, Homo sapiens
gcacccaacaaccag

SEQ ID NO: 134278 - DNA, 15 bp, Homo sapiens
cacccaacaaccagg

SEQ ID NO: 134279 - DNA, 15 bp, Homo sapiens
acccaacaaccaggt

SEQ ID NO: 134280 - DNA, 15 bp, Homo sapiens
cccaacaaccaggtc

SEQ ID NO: 134281 - DNA, 15 bp, Homo sapiens
ccaacaaccaggtct

SEQ ID NO: 134282 - DNA, 15 bp, Homo sapiens
caacaaccaggtctt

SEQ ID NO: 134283 - DNA, 15 bp, Homo sapiens
aacaaccaggtcttc

SEQ ID NO: 134284 - DNA, 15 bp, Homo sapiens
acaaccaggtcttcc

SEQ ID NO: 134285 - DNA, 15 bp, Homo sapiens
caaccaggtcttccc

SEQ ID NO: 134286 - DNA, 15 bp, Homo sapiens
aaccaggtcttccca

SEQ ID NO: 134287 - DNA, 15 bp, Homo sapiens
accaggtcttcccag

SEQ ID NO: 134288 - DNA, 15 bp, Homo sapiens
ccaggtcttcccaga

SEQ ID NO: 134289 - DNA, 15 bp, Homo sapiens
caggtcttcccagag

SEQ ID NO: 134290 - DNA, 15 bp, Homo sapiens
aggtcttcccagaga

SEQ ID NO: 134291 - DNA, 15 bp, Homo sapiens
ggtcttcccagagag

SEQ ID NO: 134292 - DNA, 15 bp, Homo sapiens
gtcttcccagagagt

SEQ ID NO: 134293 - DNA, 15 bp, Homo sapiens
tcttcccagagagtg

SEQ ID NO: 134294 - DNA, 15 bp, Homo sapiens
cttcccagagagtgc

SEQ ID NO: 134295 - DNA, 15 bp, Homo sapiens
ttcccagagagtgct

SEQ ID NO: 134296 - DNA, 15 bp, Homo sapiens
tcccagagagtgctc

SEQ ID NO: 134297 - DNA, 15 bp, Homo sapiens
cccagagagtgctca

SEQ ID NO: 134298 - DNA, 15 bp, Homo sapiens
ccagagagtgctcag

SEQ ID NO: 134299 - DNA, 15 bp, Homo sapiens
cagagagtgctcagc

SEQ ID NO: 134300 - DNA, 15 bp, Homo sapiens
agagagtgctcagct

SEQ ID NO: 134301 - DNA, 15 bp, Homo sapiens
gagagtgctcagcta

SEQ ID NO: 134302 - DNA, 15 bp, Homo sapiens
agagtgctcagctat

SEQ ID NO: 134303 - DNA, 15 bp, Homo sapiens
gagtgctcagctatt

SEQ ID NO: 134304 - DNA, 15 bp, Homo sapiens
agtgctcagctattg

SEQ ID NO: 134305 - DNA, 15 bp, Homo sapiens
gtgctcagctattgg

SEQ ID NO: 134306 - DNA, 15 bp, Homo sapiens
tgctcagctattggt

SEQ ID NO: 134307 - DNA, 15 bp, Homo sapiens
gctcagctattggtg

SEQ ID NO: 134308 - DNA, 15 bp, Homo sapiens
ctcagctattggtga

SEQ ID NO: 134309 - DNA, 15 bp, Homo sapiens
tcagctattggtgaa

SEQ ID NO: 134310 - DNA, 15 bp, Homo sapiens
cagctattggtgaag

SEQ ID NO: 134311 - DNA, 15 bp, Homo sapiens
agctattggtgaagc

SEQ ID NO: 134312 - DNA, 15 bp, Homo sapiens
gctattggtgaagca

SEQ ID NO: 134313 - DNA, 15 bp, Homo sapiens
ctattggtgaagcag

SEQ ID NO: 134314 - DNA, 15 bp, Homo sapiens
tattggtgaagcagg

SEQ ID NO: 134315 - DNA, 15 bp, Homo sapiens
attggtgaagcaggc

SEQ ID NO: 134316 - DNA, 15 bp, Homo sapiens
ttggtgaagcaggca

SEQ ID NO: 134317 - DNA, 15 bp, Homo sapiens
tggtgaagcaggcat

SEQ ID NO: 134318 - DNA, 15 bp, Homo sapiens
ggtgaagcaggcatc

SEQ ID NO: 134319 - DNA, 15 bp, Homo sapiens
gtgaagcaggcatcg

SEQ ID NO: 134320 - DNA, 15 bp, Homo sapiens
tgaagcaggcatcgt

SEQ ID NO: 134321 - DNA, 15 bp, Homo sapiens
gaagcaggcatcgtc

SEQ ID NO: 134322 - DNA, 15 bp, Homo sapiens
aagcaggcatcgtct

SEQ ID NO: 134323 - DNA, 15 bp, Homo sapiens
agcaggcatcgtcta

SEQ ID NO: 134324 - DNA, 15 bp, Homo sapiens
gcaggcatcgtctat

SEQ ID NO: 134325 - DNA, 15 bp, Homo sapiens
caggcatcgtctatt

SEQ ID NO: 134326 - DNA, 15 bp, Homo sapiens
aggcatcgtctattc

SEQ ID NO: 134327 - DNA, 15 bp, Homo sapiens
ggcatcgtctattct

SEQ ID NO: 134328 - DNA, 15 bp, Homo sapiens
gcatcgtctattctt

SEQ ID NO: 134329 - DNA, 15 bp, Homo sapiens
catcgtctattcttc

SEQ ID NO: 134330 - DNA, 15 bp, Homo sapiens
atcgtctattcttca

SEQ ID NO: 134331 - DNA, 15 bp, Homo sapiens
tcgtctattcttcaa

SEQ ID NO: 134332 - DNA, 15 bp, Homo sapiens
cgtctattcttcaag

SEQ ID NO: 134333 - DNA, 15 bp, Homo sapiens
gtctattcttcaaga

SEQ ID NO: 134334 - DNA, 15 bp, Homo sapiens
tctattcttcaagaa

SEQ ID NO: 134335 - DNA, 15 bp, Homo sapiens
ctattcttcaagaag

SEQ ID NO: 134336 - DNA, 15 bp, Homo sapiens
tattcttcaagaaga

SEQ ID NO: 134337 - DNA, 15 bp, Homo sapiens
attcttcaagaagac

SEQ ID NO: 134338 - DNA, 15 bp, Homo sapiens
ttcttcaagaagaca

SEQ ID NO: 134339 - DNA, 15 bp, Homo sapiens
tcttcaagaagacag

SEQ ID NO: 134340 - DNA, 15 bp, Homo sapiens
cttcaagaagacagc

SEQ ID NO: 134341 - DNA, 15 bp, Homo sapiens
ttcaagaagacagca

SEQ ID NO: 134342 - DNA, 15 bp, Homo sapiens
tcaagaagacagcag

SEQ ID NO: 134343 - DNA, 15 bp, Homo sapiens
caagaagacagcaga

SEQ ID NO: 134344 - DNA, 15 bp, Homo sapiens
aagaagacagcagag

SEQ ID NO: 134345 - DNA, 15 bp, Homo sapiens
agaagacagcagagc

SEQ ID NO: 134346 - DNA, 15 bp, Homo sapiens
gaagacagcagagca

SEQ ID NO: 134347 - DNA, 15 bp, Homo sapiens
aagacagcagagcat

SEQ ID NO: 134348 - DNA, 15 bp, Homo sapiens
agacagcagagcatc

SEQ ID NO: 134349 - DNA, 15 bp, Homo sapiens
gacagcagagcatca

SEQ ID NO: 134350 - DNA, 15 bp, Homo sapiens
acagcagagcatcag

SEQ ID NO: 134351 - DNA, 15 bp, Homo sapiens
cagcagagcatcagg

SEQ ID NO: 134352 - DNA, 15 bp, Homo sapiens
agcagagcatcagga

SEQ ID NO: 134353 - DNA, 15 bp, Homo sapiens
gcagagcatcaggaa

SEQ ID NO: 134354 - DNA, 15 bp, Homo sapiens
cagagcatcaggaaa

SEQ ID NO: 134355 - DNA, 15 bp, Homo sapiens
agagcatcaggaaaa

SEQ ID NO: 134356 - DNA, 15 bp, Homo sapiens
gagcatcaggaaaac

SEQ ID NO: 134357 - DNA, 15 bp, Homo sapiens
agcatcaggaaaaca

SEQ ID NO: 134358 - DNA, 15 bp, Homo sapiens
gcatcaggaaaacaa

SEQ ID NO: 134359 - DNA, 15 bp, Homo sapiens
catcaggaaaacaaa

SEQ ID NO: 134360 - DNA, 15 bp, Homo sapiens
atcaggaaaacaaaa

SEQ ID NO: 134361 - DNA, 15 bp, Homo sapiens
tcaggaaaacaaaac

SEQ ID NO: 134362 - DNA, 15 bp, Homo sapiens
caggaaaacaaaaca

SEQ ID NO: 134363 - DNA, 15 bp, Homo sapiens
aggaaaacaaaacac

SEQ ID NO: 134364 - DNA, 15 bp, Homo sapiens
ggaaaacaaaacacc

SEQ ID NO: 134365 - DNA, 15 bp, Homo sapiens
gaaaacaaaacacca

SEQ ID NO: 134366 - DNA, 15 bp, Homo sapiens
aaaacaaaacaccaa

SEQ ID NO: 134367 - DNA, 15 bp, Homo sapiens
aaacaaaacaccaaa

SEQ ID NO: 134368 - DNA, 15 bp, Homo sapiens
aacaaaacaccaaaa

SEQ ID NO: 134369 - DNA, 15 bp, Homo sapiens
acaaaacaccaaaaa

SEQ ID NO: 134370 - DNA, 15 bp, Homo sapiens
caaaacaccaaaaaa

SEQ ID NO: 134371 - DNA, 15 bp, Homo sapiens
aaaacaccaaaaaaa

SEQ ID NO: 134372 - DNA, 15 bp, Homo sapiens
aaacaccaaaaaaat

SEQ ID NO: 134373 - DNA, 15 bp, Homo sapiens
aacaccaaaaaaata

SEQ ID NO: 134374 - DNA, 15 bp, Homo sapiens
acaccaaaaaaatac

SEQ ID NO: 134375 - DNA, 15 bp, Homo sapiens
caccaaaaaaatacc

SEQ ID NO: 134376 - DNA, 15 bp, Homo sapiens
accaaaaaaatacca

SEQ ID NO: 134377 - DNA, 15 bp, Homo sapiens
ccaaaaaaataccat

SEQ ID NO: 134378 - DNA, 15 bp, Homo sapiens
caaaaaaataccata

SEQ ID NO: 134379 - DNA, 15 bp, Homo sapiens
aaaaaaataccataa

SEQ ID NO: 134380 - DNA, 15 bp, Homo sapiens
aaaaaataccataaa

SEQ ID NO: 134381 - DNA, 15 bp, Homo sapiens
aaaaataccataaag

SEQ ID NO: 134382 - DNA, 15 bp, Homo sapiens
aaaataccataaaga

SEQ ID NO: 134383 - DNA, 15 bp, Homo sapiens
aaataccataaagac

SEQ ID NO: 134384 - DNA, 15 bp, Homo sapiens
aataccataaagaca

SEQ ID NO: 134385 - DNA, 15 bp, Homo sapiens
ataccataaagacac

SEQ ID NO: 134386 - DNA, 15 bp, Homo sapiens
taccataaagacact

SEQ ID NO: 134387 - DNA, 15 bp, Homo sapiens
accataaagacactg

SEQ ID NO: 134388 - DNA, 15 bp, Homo sapiens
ccataaagacactgg

SEQ ID NO: 134389 - DNA, 15 bp, Homo sapiens
cataaagacactgga

SEQ ID NO: 134390 - DNA, 15 bp, Homo sapiens
ataaagacactggag

SEQ ID NO: 134391 - DNA, 15 bp, Homo sapiens
taaagacactggagt

SEQ ID NO: 134392 - DNA, 15 bp, Homo sapiens
aaagacactggagtg

SEQ ID NO: 134393 - DNA, 15 bp, Homo sapiens
aagacactggagtgt

SEQ ID NO: 134394 - DNA, 15 bp, Homo sapiens
agacactggagtgta

SEQ ID NO: 134395 - DNA, 15 bp, Homo sapiens
gacactggagtgtat

SEQ ID NO: 134396 - DNA, 15 bp, Homo sapiens
acactggagtgtatt

SEQ ID NO: 134397 - DNA, 15 bp, Homo sapiens
cactggagtgtattt

SEQ ID NO: 134398 - DNA, 15 bp, Homo sapiens
actggagtgtatttg

SEQ ID NO: 134399 - DNA, 15 bp, Homo sapiens
ctggagtgtatttgt

SEQ ID NO: 134400 - DNA, 15 bp, Homo sapiens
tggagtgtatttgtt

SEQ ID NO: 134401 - DNA, 15 bp, Homo sapiens
ggagtgtatttgtta

SEQ ID NO: 134402 - DNA, 15 bp, Homo sapiens
gagtgtatttgttac

SEQ ID NO: 134403 - DNA, 15 bp, Homo sapiens
agtgtatttgttacc

SEQ ID NO: 134404 - DNA, 15 bp, Homo sapiens
gtgtatttgttacca

SEQ ID NO: 134405 - DNA, 15 bp, Homo sapiens
tgtatttgttaccag

SEQ ID NO: 134406 - DNA, 15 bp, Homo sapiens
gtatttgttaccagc

SEQ ID NO: 134407 - DNA, 15 bp, Homo sapiens
tatttgttaccagcc

SEQ ID NO: 134408 - DNA, 15 bp, Homo sapiens
atttgttaccagccc

SEQ ID NO: 134409 - DNA, 15 bp, Homo sapiens
tttgttaccagccct

SEQ ID NO: 134410 - DNA, 15 bp, Homo sapiens
ttgttaccagccctt

SEQ ID NO: 134411 - DNA, 15 bp, Homo sapiens
tgttaccagcccttg

SEQ ID NO: 134412 - DNA, 15 bp, Homo sapiens
gttaccagcccttgt

SEQ ID NO: 134413 - DNA, 15 bp, Homo sapiens
ttaccagcccttgta

SEQ ID NO: 134414 - DNA, 15 bp, Homo sapiens
taccagcccttgtat

SEQ ID NO: 134415 - DNA, 15 bp, Homo sapiens
accagcccttgtata

SEQ ID NO: 134416 - DNA, 15 bp, Homo sapiens
ccagcccttgtataa

SEQ ID NO: 134417 - DNA, 15 bp, Homo sapiens
cagcccttgtataac

SEQ ID NO: 134418 - DNA, 15 bp, Homo sapiens
agcccttgtataaca

SEQ ID NO: 134419 - DNA, 15 bp, Homo sapiens
gcccttgtataacag

SEQ ID NO: 134420 - DNA, 15 bp, Homo sapiens
cccttgtataacaga

SEQ ID NO: 134421 - DNA, 15 bp, Homo sapiens
ccttgtataacagag

SEQ ID NO: 134422 - DNA, 15 bp, Homo sapiens
cttgtataacagaga

SEQ ID NO: 134423 - DNA, 15 bp, Homo sapiens
ttgtataacagagaa

SEQ ID NO: 134424 - DNA, 15 bp, Homo sapiens
tgtataacagagaag

SEQ ID NO: 134425 - DNA, 15 bp, Homo sapiens
gtataacagagaagt

SEQ ID NO: 134426 - DNA, 15 bp, Homo sapiens
tataacagagaagta

SEQ ID NO: 134427 - DNA, 15 bp, Homo sapiens
ataacagagaagtat

SEQ ID NO: 134428 - DNA, 15 bp, Homo sapiens
taacagagaagtatt

SEQ ID NO: 134429 - DNA, 15 bp, Homo sapiens
aacagagaagtattt

SEQ ID NO: 134430 - DNA, 15 bp, Homo sapiens
acagagaagtatttc

SEQ ID NO: 134431 - DNA, 15 bp, Homo sapiens
cagagaagtatttca

SEQ ID NO: 134432 - DNA, 15 bp, Homo sapiens
agagaagtatttcaa

SEQ ID NO: 134433 - DNA, 15 bp, Homo sapiens
gagaagtatttcaag

SEQ ID NO: 134434 - DNA, 15 bp, Homo sapiens
agaagtatttcaagg

SEQ ID NO: 134435 - DNA, 15 bp, Homo sapiens
gaagtatttcaaggt

SEQ ID NO: 134436 - DNA, 15 bp, Homo sapiens
aagtatttcaaggtc

SEQ ID NO: 134437 - DNA, 15 bp, Homo sapiens
agtatttcaaggtct

SEQ ID NO: 134438 - DNA, 15 bp, Homo sapiens
gtatttcaaggtctt

SEQ ID NO: 134439 - DNA, 15 bp, Homo sapiens
tatttcaaggtctta

SEQ ID NO: 134440 - DNA, 15 bp, Homo sapiens
atttcaaggtcttat

SEQ ID NO: 134441 - DNA, 15 bp, Homo sapiens
tttcaaggtcttatt

SEQ ID NO: 134442 - DNA, 15 bp, Homo sapiens
ttcaaggtcttattt

SEQ ID NO: 134443 - DNA, 15 bp, Homo sapiens
tcaaggtcttatttg

SEQ ID NO: 134444 - DNA, 15 bp, Homo sapiens
caaggtcttatttgt

SEQ ID NO: 134445 - DNA, 15 bp, Homo sapiens
aaggtcttatttgta

SEQ ID NO: 134446 - DNA, 15 bp, Homo sapiens
aggtcttatttgtaa

SEQ ID NO: 134447 - DNA, 15 bp, Homo sapiens
ggtcttatttgtaag

SEQ ID NO: 134448 - DNA, 15 bp, Homo sapiens
gtcttatttgtaagg

SEQ ID NO: 134449 - DNA, 15 bp, Homo sapiens
tcttatttgtaaggc

SEQ ID NO: 134450 - DNA, 15 bp, Homo sapiens
cttatttgtaaggct

SEQ ID NO: 134451 - DNA, 15 bp, Homo sapiens
ttatttgtaaggctg

SEQ ID NO: 134452 - DNA, 15 bp, Homo sapiens
tatttgtaaggctgg

SEQ ID NO: 134453 - DNA, 15 bp, Homo sapiens
atttgtaaggctgga

SEQ ID NO: 134454 - DNA, 15 bp, Homo sapiens
tttgtaaggctggac

SEQ ID NO: 134455 - DNA, 15 bp, Homo sapiens
ttgtaaggctggaca

SEQ ID NO: 134456 - DNA, 15 bp, Homo sapiens
tgtaaggctggacaa

SEQ ID NO: 134457 - DNA, 15 bp, Homo sapiens
gtaaggctggacaag

SEQ ID NO: 134458 - DNA, 15 bp, Homo sapiens
taaggctggacaagc

SEQ ID NO: 134459 - DNA, 15 bp, Homo sapiens
aaggctggacaagct

SEQ ID NO: 134460 - DNA, 15 bp, Homo sapiens
aggctggacaagctc

SEQ ID NO: 134461 - DNA, 15 bp, Homo sapiens
ggctggacaagctca

SEQ ID NO: 134462 - DNA, 15 bp, Homo sapiens
gctggacaagctcag

SEQ ID NO: 134463 - DNA, 15 bp, Homo sapiens
ctggacaagctcagg

SEQ ID NO: 134464 - DNA, 15 bp, Homo sapiens
tggacaagctcaggc

SEQ ID NO: 134465 - DNA, 15 bp, Homo sapiens
ggacaagctcaggct

SEQ ID NO: 134466 - DNA, 15 bp, Homo sapiens
gacaagctcaggctg

SEQ ID NO: 134467 - DNA, 15 bp, Homo sapiens
acaagctcaggctga

SEQ ID NO: 134468 - DNA, 15 bp, Homo sapiens
caagctcaggctgat

SEQ ID NO: 134469 - DNA, 15 bp, Homo sapiens
aagctcaggctgatt

SEQ ID NO: 134470 - DNA, 15 bp, Homo sapiens
agctcaggctgatta

SEQ ID NO: 134471 - DNA, 15 bp, Homo sapiens
gctcaggctgattaa

SEQ ID NO: 134472 - DNA, 15 bp, Homo sapiens
ctcaggctgattaaa

SEQ ID NO: 134473 - DNA, 15 bp, Homo sapiens
tcaggctgattaaaa

SEQ ID NO: 134474 - DNA, 15 bp, Homo sapiens
caggctgattaaaac

SEQ ID NO: 134475 - DNA, 15 bp, Homo sapiens
aggctgattaaaacc

SEQ ID NO: 134476 - DNA, 15 bp, Homo sapiens
ggctgattaaaacca

SEQ ID NO: 134477 - DNA, 15 bp, Homo sapiens
gctgattaaaaccac

SEQ ID NO: 134478 - DNA, 15 bp, Homo sapiens
ctgattaaaaccacg

SEQ ID NO: 134479 - DNA, 15 bp, Homo sapiens
tgattaaaaccacga

SEQ ID NO: 134480 - DNA, 15 bp, Homo sapiens
gattaaaaccacgag

SEQ ID NO: 134481 - DNA, 15 bp, Homo sapiens
attaaaaccacgagt

SEQ ID NO: 134482 - DNA, 15 bp, Homo sapiens
ttaaaaccacgagtt

SEQ ID NO: 134483 - DNA, 15 bp, Homo sapiens
taaaaccacgagtta

SEQ ID NO: 134484 - DNA, 15 bp, Homo sapiens
aaaaccacgagttag

SEQ ID NO: 134485 - DNA, 15 bp, Homo sapiens
aaaccacgagttaga

SEQ ID NO: 134486 - DNA, 15 bp, Homo sapiens
aaccacgagttagaa

SEQ ID NO: 134487 - DNA, 15 bp, Homo sapiens
accacgagttagaat

SEQ ID NO: 134488 - DNA, 15 bp, Homo sapiens
ccacgagttagaatt

SEQ ID NO: 134489 - DNA, 15 bp, Homo sapiens
cacgagttagaattt

SEQ ID NO: 134490 - DNA, 15 bp, Homo sapiens
acgagttagaatttg

SEQ ID NO: 134491 - DNA, 15 bp, Homo sapiens
cgagttagaatttgt

SEQ ID NO: 134492 - DNA, 15 bp, Homo sapiens
gagttagaatttgtc

SEQ ID NO: 134493 - DNA, 15 bp, Homo sapiens
agttagaatttgtct

SEQ ID NO: 134494 - DNA, 15 bp, Homo sapiens
gttagaatttgtctc

SEQ ID NO: 134495 - DNA, 15 bp, Homo sapiens
ttagaatttgtctcc

SEQ ID NO: 134496 - DNA, 15 bp, Homo sapiens
tagaatttgtctccc

SEQ ID NO: 134497 - DNA, 15 bp, Homo sapiens
agaatttgtctcccg

SEQ ID NO: 134498 - DNA, 15 bp, Homo sapiens
gaatttgtctcccgc

SEQ ID NO: 134499 - DNA, 15 bp, Homo sapiens
aatttgtctcccgct

SEQ ID NO: 134500 - DNA, 15 bp, Homo sapiens
atttgtctcccgctc

SEQ ID NO: 134501 - DNA, 15 bp, Homo sapiens
tttgtctcccgctcc

SEQ ID NO: 134502 - DNA, 15 bp, Homo sapiens
ttgtctcccgctccc

SEQ ID NO: 134503 - DNA, 15 bp, Homo sapiens
tgtctcccgctccca

SEQ ID NO: 134504 - DNA, 15 bp, Homo sapiens
gtctcccgctcccag

SEQ ID NO: 134505 - DNA, 15 bp, Homo sapiens
tctcccgctcccagg

SEQ ID NO: 134506 - DNA, 15 bp, Homo sapiens
ctcccgctcccaggc

SEQ ID NO: 134507 - DNA, 15 bp, Homo sapiens
tcccgctcccaggcc

SEQ ID NO: 134508 - DNA, 15 bp, Homo sapiens
cccgctcccaggccc

SEQ ID NO: 134509 - DNA, 15 bp, Homo sapiens
ccgctcccaggccct

SEQ ID NO: 134510 - DNA, 15 bp, Homo sapiens
cgctcccaggccctg

SEQ ID NO: 134511 - DNA, 15 bp, Homo sapiens
gctcccaggccctgc

SEQ ID NO: 134512 - DNA, 15 bp, Homo sapiens
ctcccaggccctgct

SEQ ID NO: 134513 - DNA, 15 bp, Homo sapiens
tcccaggccctgctc

SEQ ID NO: 134514 - DNA, 15 bp, Homo sapiens
cccaggccctgctca

SEQ ID NO: 134515 - DNA, 15 bp, Homo sapiens
ccaggccctgctcag

SEQ ID NO: 134516 - DNA, 15 bp, Homo sapiens
caggccctgctcagt

SEQ ID NO: 134517 - DNA, 15 bp, Homo sapiens
aggccctgctcagtt

SEQ ID NO: 134518 - DNA, 15 bp, Homo sapiens
ggccctgctcagttg

SEQ ID NO: 134519 - DNA, 15 bp, Homo sapiens
gccctgctcagttga

SEQ ID NO: 134520 - DNA, 15 bp, Homo sapiens
ccctgctcagttgac

SEQ ID NO: 134521 - DNA, 15 bp, Homo sapiens
cctgctcagttgaca

SEQ ID NO: 134522 - DNA, 15 bp, Homo sapiens
ctgctcagttgacag

SEQ ID NO: 134523 - DNA, 15 bp, Homo sapiens
tgctcagttgacagc

SEQ ID NO: 134524 - DNA, 15 bp, Homo sapiens
gctcagttgacagct

SEQ ID NO: 134525 - DNA, 15 bp, Homo sapiens
ctcagttgacagctc

SEQ ID NO: 134526 - DNA, 15 bp, Homo sapiens
tcagttgacagctcc

SEQ ID NO: 134527 - DNA, 15 bp, Homo sapiens
cagttgacagctcct

SEQ ID NO: 134528 - DNA, 15 bp, Homo sapiens
agttgacagctccta

SEQ ID NO: 134529 - DNA, 15 bp, Homo sapiens
gttgacagctcctag

SEQ ID NO: 134530 - DNA, 15 bp, Homo sapiens
ttgacagctcctagc

SEQ ID NO: 134531 - DNA, 15 bp, Homo sapiens
tgacagctcctagca

SEQ ID NO: 134532 - DNA, 15 bp, Homo sapiens
gacagctcctagcag

SEQ ID NO: 134533 - DNA, 15 bp, Homo sapiens
acagctcctagcagg

SEQ ID NO: 134534 - DNA, 15 bp, Homo sapiens
cagctcctagcaggc

SEQ ID NO: 134535 - DNA, 15 bp, Homo sapiens
agctcctagcaggct

SEQ ID NO: 134536 - DNA, 15 bp, Homo sapiens
gctcctagcaggctg

SEQ ID NO: 134537 - DNA, 15 bp, Homo sapiens
ctcctagcaggctgg

SEQ ID NO: 134538 - DNA, 15 bp, Homo sapiens
tcctagcaggctggg

SEQ ID NO: 134539 - DNA, 15 bp, Homo sapiens
cctagcaggctggga

SEQ ID NO: 134540 - DNA, 15 bp, Homo sapiens
ctagcaggctgggag

SEQ ID NO: 134541 - DNA, 15 bp, Homo sapiens
tagcaggctgggagg

SEQ ID NO: 134542 - DNA, 15 bp, Homo sapiens
agcaggctgggaggc

SEQ ID NO: 134543 - DNA, 15 bp, Homo sapiens
gcaggctgggaggcc

SEQ ID NO: 134544 - DNA, 15 bp, Homo sapiens
caggctgggaggccc

SEQ ID NO: 134545 - DNA, 15 bp, Homo sapiens
aggctgggaggcccc

SEQ ID NO: 134546 - DNA, 15 bp, Homo sapiens
ggctgggaggcccca

SEQ ID NO: 134547 - DNA, 15 bp, Homo sapiens
gctgggaggccccac

SEQ ID NO: 134548 - DNA, 15 bp, Homo sapiens
ctgggaggccccacc

SEQ ID NO: 134549 - DNA, 15 bp, Homo sapiens
tgggaggccccaccc

SEQ ID NO: 134550 - DNA, 15 bp, Homo sapiens
gggaggccccacccc

SEQ ID NO: 134551 - DNA, 15 bp, Homo sapiens
ggaggccccacccca

SEQ ID NO: 134552 - DNA, 15 bp, Homo sapiens
gaggccccaccccac

SEQ ID NO: 134553 - DNA, 15 bp, Homo sapiens
aggccccaccccacc

SEQ ID NO: 134554 - DNA, 15 bp, Homo sapiens
ggccccaccccaccc

SEQ ID NO: 134555 - DNA, 15 bp, Homo sapiens
gccccaccccacccc

SEQ ID NO: 134556 - DNA, 15 bp, Homo sapiens
ccccaccccaccccc

SEQ ID NO: 134557 - DNA, 15 bp, Homo sapiens
cccaccccaccccca

SEQ ID NO: 134558 - DNA, 15 bp, Homo sapiens
ccaccccacccccac

SEQ ID NO: 134559 - DNA, 15 bp, Homo sapiens
caccccacccccacc

SEQ ID NO: 134560 - DNA, 15 bp, Homo sapiens
accccacccccaccc

SEQ ID NO: 134561 - DNA, 15 bp, Homo sapiens
cccacccccacccca

SEQ ID NO: 134562 - DNA, 15 bp, Homo sapiens
ccacccccaccccag

SEQ ID NO: 134563 - DNA, 15 bp, Homo sapiens
cacccccaccccagg

SEQ ID NO: 134564 - DNA, 15 bp, Homo sapiens
acccccaccccaggg

SEQ ID NO: 134565 - DNA, 15 bp, Homo sapiens
cccccaccccagggg

SEQ ID NO: 134566 - DNA, 15 bp, Homo sapiens
ccccaccccaggggt

SEQ ID NO: 134567 - DNA, 15 bp, Homo sapiens
cccaccccaggggtc

SEQ ID NO: 134568 - DNA, 15 bp, Homo sapiens
ccaccccaggggtcc

SEQ ID NO: 134569 - DNA, 15 bp, Homo sapiens
caccccaggggtcca

SEQ ID NO: 134570 - DNA, 15 bp, Homo sapiens
accccaggggtccat

SEQ ID NO: 134571 - DNA, 15 bp, Homo sapiens
ccccaggggtccatt

SEQ ID NO: 134572 - DNA, 15 bp, Homo sapiens
cccaggggtccattg

SEQ ID NO: 134573 - DNA, 15 bp, Homo sapiens
ccaggggtccattga

SEQ ID NO: 134574 - DNA, 15 bp, Homo sapiens
caggggtccattgaa

SEQ ID NO: 134575 - DNA, 15 bp, Homo sapiens
aggggtccattgaag

SEQ ID NO: 134576 - DNA, 15 bp, Homo sapiens
ggggtccattgaaga

SEQ ID NO: 134577 - DNA, 15 bp, Homo sapiens
gggtccattgaagaa

SEQ ID NO: 134578 - DNA, 15 bp, Homo sapiens
ggtccattgaagaag

SEQ ID NO: 134579 - DNA, 15 bp, Homo sapiens
gtccattgaagaaga

SEQ ID NO: 134580 - DNA, 15 bp, Homo sapiens
tccattgaagaagac

SEQ ID NO: 134581 - DNA, 15 bp, Homo sapiens
ccattgaagaagacc

SEQ ID NO: 134582 - DNA, 15 bp, Homo sapiens
cattgaagaagacca

SEQ ID NO: 134583 - DNA, 15 bp, Homo sapiens
attgaagaagaccat

SEQ ID NO: 134584 - DNA, 15 bp, Homo sapiens
ttgaagaagaccatc

SEQ ID NO: 134585 - DNA, 15 bp, Homo sapiens
tgaagaagaccatct

SEQ ID NO: 134586 - DNA, 15 bp, Homo sapiens
gaagaagaccatctg

SEQ ID NO: 134587 - DNA, 15 bp, Homo sapiens
aagaagaccatctgg

SEQ ID NO: 134588 - DNA, 15 bp, Homo sapiens
agaagaccatctggg

SEQ ID NO: 134589 - DNA, 15 bp, Homo sapiens
gaagaccatctgggc

SEQ ID NO: 134590 - DNA, 15 bp, Homo sapiens
aagaccatctgggcc

SEQ ID NO: 134591 - DNA, 15 bp, Homo sapiens
agaccatctgggcct

SEQ ID NO: 134592 - DNA, 15 bp, Homo sapiens
gaccatctgggcctg

SEQ ID NO: 134593 - DNA, 15 bp, Homo sapiens
accatctgggcctgg

SEQ ID NO: 134594 - DNA, 15 bp, Homo sapiens
ccatctgggcctggg

SEQ ID NO: 134595 - DNA, 15 bp, Homo sapiens
catctgggcctggga

SEQ ID NO: 134596 - DNA, 15 bp, Homo sapiens
atctgggcctgggat

SEQ ID NO: 134597 - DNA, 15 bp, Homo sapiens
tctgggcctgggatg

SEQ ID NO: 134598 - DNA, 15 bp, Homo sapiens
ctgggcctgggatgc

SEQ ID NO: 134599 - DNA, 15 bp, Homo sapiens
tgggcctgggatgct

SEQ ID NO: 134600 - DNA, 15 bp, Homo sapiens
gggcctgggatgctg

SEQ ID NO: 134601 - DNA, 15 bp, Homo sapiens
ggcctgggatgctga

SEQ ID NO: 134602 - DNA, 15 bp, Homo sapiens
gcctgggatgctgat

SEQ ID NO: 134603 - DNA, 15 bp, Homo sapiens
cctgggatgctgatg

SEQ ID NO: 134604 - DNA, 15 bp, Homo sapiens
ctgggatgctgatgt

SEQ ID NO: 134605 - DNA, 15 bp, Homo sapiens
tgggatgctgatgtg

SEQ ID NO: 134606 - DNA, 15 bp, Homo sapiens
gggatgctgatgtga

SEQ ID NO: 134607 - DNA, 15 bp, Homo sapiens
ggatgctgatgtgat

SEQ ID NO: 134608 - DNA, 15 bp, Homo sapiens
gatgctgatgtgatt

SEQ ID NO: 134609 - DNA, 15 bp, Homo sapiens
atgctgatgtgattt

SEQ ID NO: 134610 - DNA, 15 bp, Homo sapiens
tgctgatgtgatttt

SEQ ID NO: 134611 - DNA, 15 bp, Homo sapiens
gctgatgtgattttc

SEQ ID NO: 134612 - DNA, 15 bp, Homo sapiens
ctgatgtgattttcc

SEQ ID NO: 134613 - DNA, 15 bp, Homo sapiens
tgatgtgattttccc

SEQ ID NO: 134614 - DNA, 15 bp, Homo sapiens
gatgtgattttccct

SEQ ID NO: 134615 - DNA, 15 bp, Homo sapiens
atgtgattttcccta

SEQ ID NO: 134616 - DNA, 15 bp, Homo sapiens
tgtgattttccctac

SEQ ID NO: 134617 - DNA, 15 bp, Homo sapiens
gtgattttccctact

SEQ ID NO: 134618 - DNA, 15 bp, Homo sapiens
tgattttccctactt

SEQ ID NO: 134619 - DNA, 15 bp, Homo sapiens
gattttccctacttc

SEQ ID NO: 134620 - DNA, 15 bp, Homo sapiens
attttccctacttct

SEQ ID NO: 134621 - DNA, 15 bp, Homo sapiens
ttttccctacttctc

SEQ ID NO: 134622 - DNA, 15 bp, Homo sapiens
tttccctacttctcc

SEQ ID NO: 134623 - DNA, 15 bp, Homo sapiens
ttccctacttctcct

SEQ ID NO: 134624 - DNA, 15 bp, Homo sapiens
tccctacttctcctt

SEQ ID NO: 134625 - DNA, 15 bp, Homo sapiens
ccctacttctccttt

SEQ ID NO: 134626 - DNA, 15 bp, Homo sapiens
cctacttctcctttt

SEQ ID NO: 134627 - DNA, 15 bp, Homo sapiens
ctacttctccttttt

SEQ ID NO: 134628 - DNA, 15 bp, Homo sapiens
tacttctcctttttt

SEQ ID NO: 134629 - DNA, 15 bp, Homo sapiens
acttctccttttttt

SEQ ID NO: 134630 - DNA, 15 bp, Homo sapiens
cttctcctttttttt

SEQ ID NO: 134631 - DNA, 15 bp, Homo sapiens
ttctccttttttttc

SEQ ID NO: 134632 - DNA, 15 bp, Homo sapiens
tctccttttttttca

SEQ ID NO: 134633 - DNA, 15 bp, Homo sapiens
ctccttttttttcat

SEQ ID NO: 134634 - DNA, 15 bp, Homo sapiens
tccttttttttcatt

SEQ ID NO: 134635 - DNA, 15 bp, Homo sapiens
ccttttttttcattt

SEQ ID NO: 134636 - DNA, 15 bp, Homo sapiens
cttttttttcatttg

SEQ ID NO: 134637 - DNA, 15 bp, Homo sapiens
ttttttttcatttgc

SEQ ID NO: 134638 - DNA, 15 bp, Homo sapiens
tttttttcatttgcc

SEQ ID NO: 134639 - DNA, 15 bp, Homo sapiens
ttttttcatttgcct

SEQ ID NO: 134640 - DNA, 15 bp, Homo sapiens
tttttcatttgcctc

SEQ ID NO: 134641 - DNA, 15 bp, Homo sapiens
ttttcatttgcctcc

SEQ ID NO: 134642 - DNA, 15 bp, Homo sapiens
tttcatttgcctcct

SEQ ID NO: 134643 - DNA, 15 bp, Homo sapiens
ttcatttgcctcctc

SEQ ID NO: 134644 - DNA, 15 bp, Homo sapiens
tcatttgcctcctcc

SEQ ID NO: 134645 - DNA, 15 bp, Homo sapiens
catttgcctcctcca

SEQ ID NO: 134646 - DNA, 15 bp, Homo sapiens
atttgcctcctccac

SEQ ID NO: 134647 - DNA, 15 bp, Homo sapiens
tttgcctcctccacc

SEQ ID NO: 134648 - DNA, 15 bp, Homo sapiens
ttgcctcctccaccc

SEQ ID NO: 134649 - DNA, 15 bp, Homo sapiens
tgcctcctccaccca

SEQ ID NO: 134650 - DNA, 15 bp, Homo sapiens
gcctcctccacccac

SEQ ID NO: 134651 - DNA, 15 bp, Homo sapiens
cctcctccacccact

SEQ ID NO: 134652 - DNA, 15 bp, Homo sapiens
ctcctccacccactt

SEQ ID NO: 134653 - DNA, 15 bp, Homo sapiens
tcctccacccacttc

SEQ ID NO: 134654 - DNA, 15 bp, Homo sapiens
cctccacccacttct

SEQ ID NO: 134655 - DNA, 15 bp, Homo sapiens
ctccacccacttcta

SEQ ID NO: 134656 - DNA, 15 bp, Homo sapiens
tccacccacttctaa

SEQ ID NO: 134657 - DNA, 15 bp, Homo sapiens
ccacccacttctaaa

SEQ ID NO: 134658 - DNA, 15 bp, Homo sapiens
cacccacttctaaag

SEQ ID NO: 134659 - DNA, 15 bp, Homo sapiens
acccacttctaaagc

SEQ ID NO: 134660 - DNA, 15 bp, Homo sapiens
cccacttctaaagca

SEQ ID NO: 134661 - DNA, 15 bp, Homo sapiens
ccacttctaaagcag

SEQ ID NO: 134662 - DNA, 15 bp, Homo sapiens
cacttctaaagcagc

SEQ ID NO: 134663 - DNA, 15 bp, Homo sapiens
acttctaaagcagct

SEQ ID NO: 134664 - DNA, 15 bp, Homo sapiens
cttctaaagcagctg

SEQ ID NO: 134665 - DNA, 15 bp, Homo sapiens
ttctaaagcagctga

SEQ ID NO: 134666 - DNA, 15 bp, Homo sapiens
tctaaagcagctgat

SEQ ID NO: 134667 - DNA, 15 bp, Homo sapiens
ctaaagcagctgatt

SEQ ID NO: 134668 - DNA, 15 bp, Homo sapiens
taaagcagctgattg

SEQ ID NO: 134669 - DNA, 15 bp, Homo sapiens
aaagcagctgattgc

SEQ ID NO: 134670 - DNA, 15 bp, Homo sapiens
aagcagctgattgct

SEQ ID NO: 134671 - DNA, 15 bp, Homo sapiens
agcagctgattgctc

SEQ ID NO: 134672 - DNA, 15 bp, Homo sapiens
gcagctgattgctct

SEQ ID NO: 134673 - DNA, 15 bp, Homo sapiens
cagctgattgctctg

SEQ ID NO: 134674 - DNA, 15 bp, Homo sapiens
agctgattgctctgg

SEQ ID NO: 134675 - DNA, 15 bp, Homo sapiens
gctgattgctctggt

SEQ ID NO: 134676 - DNA, 15 bp, Homo sapiens
ctgattgctctggtt

SEQ ID NO: 134677 - DNA, 15 bp, Homo sapiens
tgattgctctggttc

SEQ ID NO: 134678 - DNA, 15 bp, Homo sapiens
gattgctctggttcc

SEQ ID NO: 134679 - DNA, 15 bp, Homo sapiens
attgctctggttcct

SEQ ID NO: 134680 - DNA, 15 bp, Homo sapiens
ttgctctggttcctt

SEQ ID NO: 134681 - DNA, 15 bp, Homo sapiens
tgctctggttccttt

SEQ ID NO: 134682 - DNA, 15 bp, Homo sapiens
gctctggttcctttt

SEQ ID NO: 134683 - DNA, 15 bp, Homo sapiens
ctctggttccttttc

SEQ ID NO: 134684 - DNA, 15 bp, Homo sapiens
tctggttccttttca

SEQ ID NO: 134685 - DNA, 15 bp, Homo sapiens
ctggttccttttcat

SEQ ID NO: 134686 - DNA, 15 bp, Homo sapiens
tggttccttttcatg

SEQ ID NO: 134687 - DNA, 15 bp, Homo sapiens
ggttccttttcatgt

SEQ ID NO: 134688 - DNA, 15 bp, Homo sapiens
gttccttttcatgtt

SEQ ID NO: 134689 - DNA, 15 bp, Homo sapiens
ttccttttcatgttg

SEQ ID NO: 134690 - DNA, 15 bp, Homo sapiens
tccttttcatgttga

SEQ ID NO: 134691 - DNA, 15 bp, Homo sapiens
ccttttcatgttgag

SEQ ID NO: 134692 - DNA, 15 bp, Homo sapiens
cttttcatgttgagc

SEQ ID NO: 134693 - DNA, 15 bp, Homo sapiens
ttttcatgttgagca

SEQ ID NO: 134694 - DNA, 15 bp, Homo sapiens
tttcatgttgagcaa

SEQ ID NO: 134695 - DNA, 15 bp, Homo sapiens
ttcatgttgagcaaa

SEQ ID NO: 134696 - DNA, 15 bp, Homo sapiens
tcatgttgagcaaaa

SEQ ID NO: 134697 - DNA, 15 bp, Homo sapiens
catgttgagcaaaag

SEQ ID NO: 134698 - DNA, 15 bp, Homo sapiens
atgttgagcaaaaga

SEQ ID NO: 134699 - DNA, 15 bp, Homo sapiens
tgttgagcaaaagag

SEQ ID NO: 134700 - DNA, 15 bp, Homo sapiens
gttgagcaaaagaga

SEQ ID NO: 134701 - DNA, 15 bp, Homo sapiens
ttgagcaaaagagaa

SEQ ID NO: 134702 - DNA, 15 bp, Homo sapiens
tgagcaaaagagaag

SEQ ID NO: 134703 - DNA, 15 bp, Homo sapiens
gagcaaaagagaaga

SEQ ID NO: 134704 - DNA, 15 bp, Homo sapiens
agcaaaagagaagac

SEQ ID NO: 134705 - DNA, 15 bp, Homo sapiens
gcaaaagagaagaca

SEQ ID NO: 134706 - DNA, 15 bp, Homo sapiens
caaaagagaagacag

SEQ ID NO: 134707 - DNA, 15 bp, Homo sapiens
aaaagagaagacaga

SEQ ID NO: 134708 - DNA, 15 bp, Homo sapiens
aaagagaagacagat

SEQ ID NO: 134709 - DNA, 15 bp, Homo sapiens
aagagaagacagatc

SEQ ID NO: 134710 - DNA, 15 bp, Homo sapiens
agagaagacagatct

SEQ ID NO: 134711 - DNA, 15 bp, Homo sapiens
gagaagacagatctt

SEQ ID NO: 134712 - DNA, 15 bp, Homo sapiens
agaagacagatcttg

SEQ ID NO: 134713 - DNA, 15 bp, Homo sapiens
gaagacagatcttga

SEQ ID NO: 134714 - DNA, 15 bp, Homo sapiens
aagacagatcttgaa

SEQ ID NO: 134715 - DNA, 15 bp, Homo sapiens
agacagatcttgaaa

SEQ ID NO: 134716 - DNA, 15 bp, Homo sapiens
gacagatcttgaaac

SEQ ID NO: 134717 - DNA, 15 bp, Homo sapiens
acagatcttgaaacc

SEQ ID NO: 134718 - DNA, 15 bp, Homo sapiens
cagatcttgaaacct

SEQ ID NO: 134719 - DNA, 15 bp, Homo sapiens
agatcttgaaacctg

SEQ ID NO: 134720 - DNA, 15 bp, Homo sapiens
gatcttgaaacctga

SEQ ID NO: 134721 - DNA, 15 bp, Homo sapiens
atcttgaaacctgag

SEQ ID NO: 134722 - DNA, 15 bp, Homo sapiens
tcttgaaacctgagc

SEQ ID NO: 134723 - DNA, 15 bp, Homo sapiens
cttgaaacctgagct

SEQ ID NO: 134724 - DNA, 15 bp, Homo sapiens
tgaaacctgagctgg

SEQ ID NO: 134725 - DNA, 15 bp, Homo sapiens
gaaacctgagctggg

SEQ ID NO: 134726 - DNA, 15 bp, Homo sapiens
aaacctgagctgggg

SEQ ID NO: 134727 - DNA, 15 bp, Homo sapiens
aacctgagctgggga

SEQ ID NO: 134728 - DNA, 15 bp, Homo sapiens
acctgagctggggac

SEQ ID NO: 134729 - DNA, 15 bp, Homo sapiens
cctgagctggggact

SEQ ID NO: 134730 - DNA, 15 bp, Homo sapiens
ctgagctggggactg

SEQ ID NO: 134731 - DNA, 15 bp, Homo sapiens
tgagctggggactgg

SEQ ID NO: 134732 - DNA, 15 bp, Homo sapiens
gagctggggactgga

SEQ ID NO: 134733 - DNA, 15 bp, Homo sapiens
agctggggactggag

SEQ ID NO: 134734 - DNA, 15 bp, Homo sapiens
gctggggactggagg

SEQ ID NO: 134735 - DNA, 15 bp, Homo sapiens
ctggggactggaggg

SEQ ID NO: 134736 - DNA, 15 bp, Homo sapiens
tggggactggagggc

SEQ ID NO: 134737 - DNA, 15 bp, Homo sapiens
ggggactggagggca

SEQ ID NO: 134738 - DNA, 15 bp, Homo sapiens
gggactggagggcac

SEQ ID NO: 134739 - DNA, 15 bp, Homo sapiens
ggactggagggcact

SEQ ID NO: 134740 - DNA, 15 bp, Homo sapiens
gactggagggcactg

SEQ ID NO: 134741 - DNA, 15 bp, Homo sapiens
actggagggcactga

SEQ ID NO: 134742 - DNA, 15 bp, Homo sapiens
ctggagggcactgac

SEQ ID NO: 134743 - DNA, 15 bp, Homo sapiens
tggagggcactgacc

SEQ ID NO: 134744 - DNA, 15 bp, Homo sapiens
ggagggcactgaccg

SEQ ID NO: 134745 - DNA, 15 bp, Homo sapiens
gagggcactgaccga

SEQ ID NO: 134746 - DNA, 15 bp, Homo sapiens
agggcactgaccgag

SEQ ID NO: 134747 - DNA, 15 bp, Homo sapiens
gggcactgaccgaga

SEQ ID NO: 134748 - DNA, 15 bp, Homo sapiens
ggcactgaccgagag

SEQ ID NO: 134749 - DNA, 15 bp, Homo sapiens
gcactgaccgagagt

SEQ ID NO: 134750 - DNA, 15 bp, Homo sapiens
cactgaccgagagta

SEQ ID NO: 134751 - DNA, 15 bp, Homo sapiens
actgaccgagagtaa

SEQ ID NO: 134752 - DNA, 15 bp, Homo sapiens
ctgaccgagagtaac

SEQ ID NO: 134753 - DNA, 15 bp, Homo sapiens
tgaccgagagtaacc

SEQ ID NO: 134754 - DNA, 15 bp, Homo sapiens
gaccgagagtaaccc

SEQ ID NO: 134755 - DNA, 15 bp, Homo sapiens
accgagagtaacccc

SEQ ID NO: 134756 - DNA, 15 bp, Homo sapiens
ccgagagtaaccccg

SEQ ID NO: 134757 - DNA, 15 bp, Homo sapiens
cgagagtaaccccgt

SEQ ID NO: 134758 - DNA, 15 bp, Homo sapiens
gagagtaaccccgtc

SEQ ID NO: 134759 - DNA, 15 bp, Homo sapiens
agagtaaccccgtct

SEQ ID NO: 134760 - DNA, 15 bp, Homo sapiens
gagtaaccccgtctg

SEQ ID NO: 134761 - DNA, 15 bp, Homo sapiens
agtaaccccgtctgg

SEQ ID NO: 134762 - DNA, 15 bp, Homo sapiens
gtaaccccgtctggc

SEQ ID NO: 134763 - DNA, 15 bp, Homo sapiens
taaccccgtctggct

SEQ ID NO: 134764 - DNA, 15 bp, Homo sapiens
aaccccgtctggctc

SEQ ID NO: 134765 - DNA, 15 bp, Homo sapiens
accccgtctggctca

SEQ ID NO: 134766 - DNA, 15 bp, Homo sapiens
ccccgtctggctcag

SEQ ID NO: 134767 - DNA, 15 bp, Homo sapiens
cccgtctggctcagc

SEQ ID NO: 134768 - DNA, 15 bp, Homo sapiens
ccgtctggctcagct

SEQ ID NO: 134769 - DNA, 15 bp, Homo sapiens
cgtctggctcagctc

SEQ ID NO: 134770 - DNA, 15 bp, Homo sapiens
gtctggctcagctca

SEQ ID NO: 134771 - DNA, 15 bp, Homo sapiens
tctggctcagctcag

SEQ ID NO: 134772 - DNA, 15 bp, Homo sapiens
ctggctcagctcagc

SEQ ID NO: 134773 - DNA, 15 bp, Homo sapiens
tggctcagctcagct

SEQ ID NO: 134774 - DNA, 15 bp, Homo sapiens
ggctcagctcagctc

SEQ ID NO: 134775 - DNA, 15 bp, Homo sapiens
gctcagctcagctca

SEQ ID NO: 134776 - DNA, 15 bp, Homo sapiens
ctcagctcagctcag

SEQ ID NO: 134777 - DNA, 15 bp, Homo sapiens
tcagctcagctcagc

SEQ ID NO: 134778 - DNA, 15 bp, Homo sapiens
cagctcagctcagca

SEQ ID NO: 134779 - DNA, 15 bp, Homo sapiens
agctcagctcagcaa

SEQ ID NO: 134780 - DNA, 15 bp, Homo sapiens
gctcagctcagcaaa

SEQ ID NO: 134781 - DNA, 15 bp, Homo sapiens
ctcagctcagcaaag

SEQ ID NO: 134782 - DNA, 15 bp, Homo sapiens
tcagctcagcaaagg

SEQ ID NO: 134783 - DNA, 15 bp, Homo sapiens
cagctcagcaaaggg

SEQ ID NO: 134784 - DNA, 15 bp, Homo sapiens
agctcagcaaagggc

SEQ ID NO: 134785 - DNA, 15 bp, Homo sapiens
gctcagcaaagggct

SEQ ID NO: 134786 - DNA, 15 bp, Homo sapiens
ctcagcaaagggctt

SEQ ID NO: 134787 - DNA, 15 bp, Homo sapiens
tcagcaaagggcttt

SEQ ID NO: 134788 - DNA, 15 bp, Homo sapiens
cagcaaagggctttc

SEQ ID NO: 134789 - DNA, 15 bp, Homo sapiens
agcaaagggctttcc

SEQ ID NO: 134790 - DNA, 15 bp, Homo sapiens
gcaaagggctttcct

SEQ ID NO: 134791 - DNA, 15 bp, Homo sapiens
caaagggctttcctc

SEQ ID NO: 134792 - DNA, 15 bp, Homo sapiens
aaagggctttcctcc

SEQ ID NO: 134793 - DNA, 15 bp, Homo sapiens
aagggctttcctcct

SEQ ID NO: 134794 - DNA, 15 bp, Homo sapiens
agggctttcctcctc

SEQ ID NO: 134795 - DNA, 15 bp, Homo sapiens
gggctttcctcctcc

SEQ ID NO: 134796 - DNA, 15 bp, Homo sapiens
ggctttcctcctccg

SEQ ID NO: 134797 - DNA, 15 bp, Homo sapiens
gctttcctcctccgc

SEQ ID NO: 134798 - DNA, 15 bp, Homo sapiens
ctttcctcctccgcc

SEQ ID NO: 134799 - DNA, 15 bp, Homo sapiens
tttcctcctccgcct

SEQ ID NO: 134800 - DNA, 15 bp, Homo sapiens
ttcctcctccgcctt

SEQ ID NO: 134801 - DNA, 15 bp, Homo sapiens
tcctcctccgccttc

SEQ ID NO: 134802 - DNA, 15 bp, Homo sapiens
cctcctccgccttcc

SEQ ID NO: 134803 - DNA, 15 bp, Homo sapiens
ctcctccgccttcct

SEQ ID NO: 134804 - DNA, 15 bp, Homo sapiens
tcctccgccttcctg

SEQ ID NO: 134805 - DNA, 15 bp, Homo sapiens
cctccgccttcctga

SEQ ID NO: 134806 - DNA, 15 bp, Homo sapiens
ctccgccttcctgag

SEQ ID NO: 134807 - DNA, 15 bp, Homo sapiens
tccgccttcctgagc

SEQ ID NO: 134808 - DNA, 15 bp, Homo sapiens
ccgccttcctgagct

SEQ ID NO: 134809 - DNA, 15 bp, Homo sapiens
cgccttcctgagctg

SEQ ID NO: 134810 - DNA, 15 bp, Homo sapiens
gccttcctgagctgc

SEQ ID NO: 134811 - DNA, 15 bp, Homo sapiens
ccttcctgagctgct

SEQ ID NO: 134812 - DNA, 15 bp, Homo sapiens
cttcctgagctgctc

SEQ ID NO: 134813 - DNA, 15 bp, Homo sapiens
ttcctgagctgctct

SEQ ID NO: 134814 - DNA, 15 bp, Homo sapiens
tcctgagctgctctc

SEQ ID NO: 134815 - DNA, 15 bp, Homo sapiens
cctgagctgctctcc

SEQ ID NO: 134816 - DNA, 15 bp, Homo sapiens
ctgagctgctctccc

SEQ ID NO: 134817 - DNA, 15 bp, Homo sapiens
tgagctgctctccct

SEQ ID NO: 134818 - DNA, 15 bp, Homo sapiens
gagctgctctccctc

SEQ ID NO: 134819 - DNA, 15 bp, Homo sapiens
agctgctctccctcc

SEQ ID NO: 134820 - DNA, 15 bp, Homo sapiens
gctgctctccctcct

SEQ ID NO: 134821 - DNA, 15 bp, Homo sapiens
ctgctctccctcctc

SEQ ID NO: 134822 - DNA, 15 bp, Homo sapiens
tgctctccctcctct

SEQ ID NO: 134823 - DNA, 15 bp, Homo sapiens
gctctccctcctctc

SEQ ID NO: 134824 - DNA, 15 bp, Homo sapiens
ctctccctcctctcc

SEQ ID NO: 134825 - DNA, 15 bp, Homo sapiens
tctccctcctctcct

SEQ ID NO: 134826 - DNA, 15 bp, Homo sapiens
ctccctcctctcctt

SEQ ID NO: 134827 - DNA, 15 bp, Homo sapiens
tccctcctctccttt

SEQ ID NO: 134828 - DNA, 15 bp, Homo sapiens
ccctcctctcctttc

SEQ ID NO: 134829 - DNA, 15 bp, Homo sapiens
cctcctctcctttcc

SEQ ID NO: 134830 - DNA, 15 bp, Homo sapiens
ctcctctcctttcct

SEQ ID NO: 134831 - DNA, 15 bp, Homo sapiens
tcctctcctttcctc

SEQ ID NO: 134832 - DNA, 15 bp, Homo sapiens
cctctcctttcctcc

SEQ ID NO: 134833 - DNA, 15 bp, Homo sapiens
ctctcctttcctcct

SEQ ID NO: 134834 - DNA, 15 bp, Homo sapiens
tctcctttcctcctt

SEQ ID NO: 134835 - DNA, 15 bp, Homo sapiens
ctcctttcctccttc

SEQ ID NO: 134836 - DNA, 15 bp, Homo sapiens
tcctttcctccttct

SEQ ID NO: 134837 - DNA, 15 bp, Homo sapiens
cctttcctccttctt

SEQ ID NO: 134838 - DNA, 15 bp, Homo sapiens
ctttcctccttcttt

SEQ ID NO: 134839 - DNA, 15 bp, Homo sapiens
tttcctccttctttc

SEQ ID NO: 134840 - DNA, 15 bp, Homo sapiens
ttcctccttctttcc

SEQ ID NO: 134841 - DNA, 15 bp, Homo sapiens
tcctccttctttccc

SEQ ID NO: 134842 - DNA, 15 bp, Homo sapiens
cctccttctttccca

SEQ ID NO: 134843 - DNA, 15 bp, Homo sapiens
ctccttctttcccag

SEQ ID NO: 134844 - DNA, 15 bp, Homo sapiens
tccttctttcccagc

SEQ ID NO: 134845 - DNA, 15 bp, Homo sapiens
ccttctttcccagcc

SEQ ID NO: 134846 - DNA, 15 bp, Homo sapiens
cttctttcccagcct

SEQ ID NO: 134847 - DNA, 15 bp, Homo sapiens
ttctttcccagcctc

SEQ ID NO: 134848 - DNA, 15 bp, Homo sapiens
tctttcccagcctcc

SEQ ID NO: 134849 - DNA, 15 bp, Homo sapiens
ctttcccagcctccc

SEQ ID NO: 134850 - DNA, 15 bp, Homo sapiens
tttcccagcctcccc

SEQ ID NO: 134851 - DNA, 15 bp, Homo sapiens
ttcccagcctccccc

SEQ ID NO: 134852 - DNA, 15 bp, Homo sapiens
tcccagcctccccca

SEQ ID NO: 134853 - DNA, 15 bp, Homo sapiens
cccagcctcccccaa

SEQ ID NO: 134854 - DNA, 15 bp, Homo sapiens
ccagcctcccccaag

SEQ ID NO: 134855 - DNA, 15 bp, Homo sapiens
cagcctcccccaagc

SEQ ID NO: 134856 - DNA, 15 bp, Homo sapiens
agcctcccccaagct

SEQ ID NO: 134857 - DNA, 15 bp, Homo sapiens
gcctcccccaagctc

SEQ ID NO: 134858 - DNA, 15 bp, Homo sapiens
cctcccccaagctcc

SEQ ID NO: 134859 - DNA, 15 bp, Homo sapiens
ctcccccaagctcct

SEQ ID NO: 134860 - DNA, 15 bp, Homo sapiens
tcccccaagctcctt

SEQ ID NO: 134861 - DNA, 15 bp, Homo sapiens
cccccaagctccttc

SEQ ID NO: 134862 - DNA, 15 bp, Homo sapiens
ccccaagctccttca

SEQ ID NO: 134863 - DNA, 15 bp, Homo sapiens
cccaagctccttcac

SEQ ID NO: 134864 - DNA, 15 bp, Homo sapiens
ccaagctccttcacc

SEQ ID NO: 134865 - DNA, 15 bp, Homo sapiens
caagctccttcaccc

SEQ ID NO: 134866 - DNA, 15 bp, Homo sapiens
aagctccttcacccc

SEQ ID NO: 134867 - DNA, 15 bp, Homo sapiens
agctccttcacccct

SEQ ID NO: 134868 - DNA, 15 bp, Homo sapiens
gctccttcacccctc

SEQ ID NO: 134869 - DNA, 15 bp, Homo sapiens
ctccttcacccctct

SEQ ID NO: 134870 - DNA, 15 bp, Homo sapiens
tccttcacccctctc

SEQ ID NO: 134871 - DNA, 15 bp, Homo sapiens
ccttcacccctctct

SEQ ID NO: 134872 - DNA, 15 bp, Homo sapiens
cttcacccctctctt

SEQ ID NO: 134873 - DNA, 15 bp, Homo sapiens
ttcacccctctcttc

SEQ ID NO: 134874 - DNA, 15 bp, Homo sapiens
tcacccctctcttcc

SEQ ID NO: 134875 - DNA, 15 bp, Homo sapiens
cacccctctcttccc

SEQ ID NO: 134876 - DNA, 15 bp, Homo sapiens
acccctctcttccct

SEQ ID NO: 134877 - DNA, 15 bp, Homo sapiens
cccctctcttccctc

SEQ ID NO: 134878 - DNA, 15 bp, Homo sapiens
ccctctcttccctct

SEQ ID NO: 134879 - DNA, 15 bp, Homo sapiens
cctctcttccctctc

SEQ ID NO: 134880 - DNA, 15 bp, Homo sapiens
ctctcttccctctcc

SEQ ID NO: 134881 - DNA, 15 bp, Homo sapiens
tcttccctctcctcc

SEQ ID NO: 134882 - DNA, 15 bp, Homo sapiens
cttccctctcctccc

SEQ ID NO: 134883 - DNA, 15 bp, Homo sapiens
ttccctctcctccct

SEQ ID NO: 134884 - DNA, 15 bp, Homo sapiens
tccctctcctccctc

SEQ ID NO: 134885 - DNA, 15 bp, Homo sapiens
ccctctcctccctcc

SEQ ID NO: 134886 - DNA, 15 bp, Homo sapiens
cctctcctccctcct

SEQ ID NO: 134887 - DNA, 15 bp, Homo sapiens
ctctcctccctcctc

SEQ ID NO: 134888 - DNA, 15 bp, Homo sapiens
tctcctccctcctcc

SEQ ID NO: 134889 - DNA, 15 bp, Homo sapiens
ctcctccctcctccc

SEQ ID NO: 134890 - DNA, 15 bp, Homo sapiens
tcctccctcctccca

SEQ ID NO: 134891 - DNA, 15 bp, Homo sapiens
cctccctcctcccac

SEQ ID NO: 134892 - DNA, 15 bp, Homo sapiens
ctccctcctcccacc

SEQ ID NO: 134893 - DNA, 15 bp, Homo sapiens
tccctcctcccacct

SEQ ID NO: 134894 - DNA, 15 bp, Homo sapiens
ccctcctcccacctt

SEQ ID NO: 134895 - DNA, 15 bp, Homo sapiens
cctcctcccaccttc

SEQ ID NO: 134896 - DNA, 15 bp, Homo sapiens
ctcctcccaccttcc

SEQ ID NO: 134897 - DNA, 15 bp, Homo sapiens
tcctcccaccttcct

SEQ ID NO: 134898 - DNA, 15 bp, Homo sapiens
cctcccaccttcctt

SEQ ID NO: 134899 - DNA, 15 bp, Homo sapiens
ctcccaccttccttg

SEQ ID NO: 134900 - DNA, 15 bp, Homo sapiens
tcccaccttccttgt

SEQ ID NO: 134901 - DNA, 15 bp, Homo sapiens
cccaccttccttgtc

SEQ ID NO: 134902 - DNA, 15 bp, Homo sapiens
ccaccttccttgtcc

SEQ ID NO: 134903 - DNA, 15 bp, Homo sapiens
caccttccttgtcct

SEQ ID NO: 134904 - DNA, 15 bp, Homo sapiens
accttccttgtcctc

SEQ ID NO: 134905 - DNA, 15 bp, Homo sapiens
ccttccttgtcctct

SEQ ID NO: 134906 - DNA, 15 bp, Homo sapiens
cttccttgtcctcta

SEQ ID NO: 134907 - DNA, 15 bp, Homo sapiens
ttccttgtcctctat

SEQ ID NO: 134908 - DNA, 15 bp, Homo sapiens
tccttgtcctctatg

SEQ ID NO: 134909 - DNA, 15 bp, Homo sapiens
ccttgtcctctatgc

SEQ ID NO: 134910 - DNA, 15 bp, Homo sapiens
cttgtcctctatgct

SEQ ID NO: 134911 - DNA, 15 bp, Homo sapiens
ttgtcctctatgctc

SEQ ID NO: 134912 - DNA, 15 bp, Homo sapiens
tgtcctctatgctca

SEQ ID NO: 134913 - DNA, 15 bp, Homo sapiens
gtcctctatgctcag

SEQ ID NO: 134914 - DNA, 15 bp, Homo sapiens
tcctctatgctcaga

SEQ ID NO: 134915 - DNA, 15 bp, Homo sapiens
cctctatgctcagag

SEQ ID NO: 134916 - DNA, 15 bp, Homo sapiens
ctctatgctcagaga

SEQ ID NO: 134917 - DNA, 15 bp, Homo sapiens
tctatgctcagagaa

SEQ ID NO: 134918 - DNA, 15 bp, Homo sapiens
ctatgctcagagaac

SEQ ID NO: 134919 - DNA, 15 bp, Homo sapiens
tatgctcagagaact

SEQ ID NO: 134920 - DNA, 15 bp, Homo sapiens
atgctcagagaactg

SEQ ID NO: 134921 - DNA, 15 bp, Homo sapiens
tgctcagagaactga

SEQ ID NO: 134922 - DNA, 15 bp, Homo sapiens
gctcagagaactgaa

SEQ ID NO: 134923 - DNA, 15 bp, Homo sapiens
ctcagagaactgaag

SEQ ID NO: 134924 - DNA, 15 bp, Homo sapiens
tcagagaactgaagg

SEQ ID NO: 134925 - DNA, 15 bp, Homo sapiens
cagagaactgaagga

SEQ ID NO: 134926 - DNA, 15 bp, Homo sapiens
agagaactgaaggaa

SEQ ID NO: 134927 - DNA, 15 bp, Homo sapiens
gagaactgaaggaac

SEQ ID NO: 134928 - DNA, 15 bp, Homo sapiens
agaactgaaggaaca

SEQ ID NO: 134929 - DNA, 15 bp, Homo sapiens
gaactgaaggaacac

SEQ ID NO: 134930 - DNA, 15 bp, Homo sapiens
aactgaaggaacact

SEQ ID NO: 134931 - DNA, 15 bp, Homo sapiens
actgaaggaacactg

SEQ ID NO: 134932 - DNA, 15 bp, Homo sapiens
ctgaaggaacactga

SEQ ID NO: 134933 - DNA, 15 bp, Homo sapiens
tgaaggaacactgaa

SEQ ID NO: 134934 - DNA, 15 bp, Homo sapiens
gaaggaacactgaat

SEQ ID NO: 134935 - DNA, 15 bp, Homo sapiens
aaggaacactgaatg

SEQ ID NO: 134936 - DNA, 15 bp, Homo sapiens
aggaacactgaatgg

SEQ ID NO: 134937 - DNA, 15 bp, Homo sapiens
ggaacactgaatggc

SEQ ID NO: 134938 - DNA, 15 bp, Homo sapiens
gaacactgaatggcc

SEQ ID NO: 134939 - DNA, 15 bp, Homo sapiens
aacactgaatggcct

SEQ ID NO: 134940 - DNA, 15 bp, Homo sapiens
acactgaatggcctg

SEQ ID NO: 134941 - DNA, 15 bp, Homo sapiens
cactgaatggcctgg

SEQ ID NO: 134942 - DNA, 15 bp, Homo sapiens
actgaatggcctgga

SEQ ID NO: 134943 - DNA, 15 bp, Homo sapiens
ctgaatggcctggaa

SEQ ID NO: 134944 - DNA, 15 bp, Homo sapiens
tgaatggcctggaaa

SEQ ID NO: 134945 - DNA, 15 bp, Homo sapiens
gaatggcctggaaag

SEQ ID NO: 134946 - DNA, 15 bp, Homo sapiens
aatggcctggaaagc

SEQ ID NO: 134947 - DNA, 15 bp, Homo sapiens
atggcctggaaagca

SEQ ID NO: 134948 - DNA, 15 bp, Homo sapiens
tggcctggaaagcag

SEQ ID NO: 134949 - DNA, 15 bp, Homo sapiens
ggcctggaaagcagg

SEQ ID NO: 134950 - DNA, 15 bp, Homo sapiens
gcctggaaagcagga

SEQ ID NO: 134951 - DNA, 15 bp, Homo sapiens
cctggaaagcaggac

SEQ ID NO: 134952 - DNA, 15 bp, Homo sapiens
ctggaaagcaggacc

SEQ ID NO: 134953 - DNA, 15 bp, Homo sapiens
tggaaagcaggacct

SEQ ID NO: 134954 - DNA, 15 bp, Homo sapiens
ggaaagcaggacctc

SEQ ID NO: 134955 - DNA, 15 bp, Homo sapiens
gaaagcaggacctcg

SEQ ID NO: 134956 - DNA, 15 bp, Homo sapiens
aaagcaggacctcgc

SEQ ID NO: 134957 - DNA, 15 bp, Homo sapiens
aagcaggacctcgcc

SEQ ID NO: 134958 - DNA, 15 bp, Homo sapiens
agcaggacctcgccc

SEQ ID NO: 134959 - DNA, 15 bp, Homo sapiens
gcaggacctcgcccc

SEQ ID NO: 134960 - DNA, 15 bp, Homo sapiens
caggacctcgccccc

SEQ ID NO: 134961 - DNA, 15 bp, Homo sapiens
aggacctcgccccca

SEQ ID NO: 134962 - DNA, 15 bp, Homo sapiens
ggacctcgcccccac

SEQ ID NO: 134963 - DNA, 15 bp, Homo sapiens
gacctcgcccccacc

SEQ ID NO: 134964 - DNA, 15 bp, Homo sapiens
acctcgcccccaccc

SEQ ID NO: 134965 - DNA, 15 bp, Homo sapiens
cctcgcccccacccc

SEQ ID NO: 134966 - DNA, 15 bp, Homo sapiens
ctcgcccccaccccg

SEQ ID NO: 134967 - DNA, 15 bp, Homo sapiens
tcgcccccaccccgc

SEQ ID NO: 134968 - DNA, 15 bp, Homo sapiens
cgcccccaccccgcg

SEQ ID NO: 134969 - DNA, 15 bp, Homo sapiens
gcccccaccccgcgt

SEQ ID NO: 134970 - DNA, 15 bp, Homo sapiens
cccccaccccgcgtc

SEQ ID NO: 134971 - DNA, 15 bp, Homo sapiens
ccccaccccgcgtca

SEQ ID NO: 134972 - DNA, 15 bp, Homo sapiens
cccaccccgcgtcat

SEQ ID NO: 134973 - DNA, 15 bp, Homo sapiens
ccaccccgcgtcata

SEQ ID NO: 134974 - DNA, 15 bp, Homo sapiens
caccccgcgtcatac

SEQ ID NO: 134975 - DNA, 15 bp, Homo sapiens
accccgcgtcatacc

SEQ ID NO: 134976 - DNA, 15 bp, Homo sapiens
ccccgcgtcataccc

SEQ ID NO: 134977 - DNA, 15 bp, Homo sapiens
cccgcgtcatacccc

SEQ ID NO: 134978 - DNA, 15 bp, Homo sapiens
ccgcgtcatacccct

SEQ ID NO: 134979 - DNA, 15 bp, Homo sapiens
cgcgtcatacccctc

SEQ ID NO: 134980 - DNA, 15 bp, Homo sapiens
gcgtcatacccctcc

SEQ ID NO: 134981 - DNA, 15 bp, Homo sapiens
cgtcatacccctccg

SEQ ID NO: 134982 - DNA, 15 bp, Homo sapiens
gtcatacccctccgc

SEQ ID NO: 134983 - DNA, 15 bp, Homo sapiens
tcatacccctccgcc

SEQ ID NO: 134984 - DNA, 15 bp, Homo sapiens
catacccctccgcct

SEQ ID NO: 134985 - DNA, 15 bp, Homo sapiens
atacccctccgcctg

SEQ ID NO: 134986 - DNA, 15 bp, Homo sapiens
tacccctccgcctgc

SEQ ID NO: 134987 - DNA, 15 bp, Homo sapiens
acccctccgcctgca

SEQ ID NO: 134988 - DNA, 15 bp, Homo sapiens
cccctccgcctgcac

SEQ ID NO: 134989 - DNA, 15 bp, Homo sapiens
ccctccgcctgcacg

SEQ ID NO: 134990 - DNA, 15 bp, Homo sapiens
cctccgcctgcacgt

SEQ ID NO: 134991 - DNA, 15 bp, Homo sapiens
ctccgcctgcacgtg

SEQ ID NO: 134992 - DNA, 15 bp, Homo sapiens
tccgcctgcacgtgc

SEQ ID NO: 134993 - DNA, 15 bp, Homo sapiens
ccgcctgcacgtgca

SEQ ID NO: 134994 - DNA, 15 bp, Homo sapiens
cgcctgcacgtgcaa

SEQ ID NO: 134995 - DNA, 15 bp, Homo sapiens
gcctgcacgtgcaaa

SEQ ID NO: 134996 - DNA, 15 bp, Homo sapiens
cctgcacgtgcaaat

SEQ ID NO: 134997 - DNA, 15 bp, Homo sapiens
ctgcacgtgcaaatg

SEQ ID NO: 134998 - DNA, 15 bp, Homo sapiens
tgcacgtgcaaatgt

SEQ ID NO: 134999 - DNA, 15 bp, Homo sapiens
gcacgtgcaaatgtg

SEQ ID NO: 135000 - DNA, 15 bp, Homo sapiens
cacgtgcaaatgtgt

SEQ ID NO: 135001 - DNA, 15 bp, Homo sapiens
acgtgcaaatgtgtt

SEQ ID NO: 135002 - DNA, 15 bp, Homo sapiens
cgtgcaaatgtgttc

SEQ ID NO: 135003 - DNA, 15 bp, Homo sapiens
gtgcaaatgtgttcc

SEQ ID NO: 135004 - DNA, 15 bp, Homo sapiens
tgcaaatgtgttcct

SEQ ID NO: 135005 - DNA, 15 bp, Homo sapiens
gcaaatgtgttcctc

SEQ ID NO: 135006 - DNA, 15 bp, Homo sapiens
caaatgtgttcctca

SEQ ID NO: 135007 - DNA, 15 bp, Homo sapiens
aaatgtgttcctcag

SEQ ID NO: 135008 - DNA, 15 bp, Homo sapiens
aatgtgttcctcagc

SEQ ID NO: 135009 - DNA, 15 bp, Homo sapiens
atgtgttcctcagct

SEQ ID NO: 135010 - DNA, 15 bp, Homo sapiens
tgtgttcctcagctt

SEQ ID NO: 135011 - DNA, 15 bp, Homo sapiens
gtgttcctcagcttg

SEQ ID NO: 135012 - DNA, 15 bp, Homo sapiens
tgttcctcagcttgg

SEQ ID NO: 135013 - DNA, 15 bp, Homo sapiens
gttcctcagcttggt

SEQ ID NO: 135014 - DNA, 15 bp, Homo sapiens
ttcctcagcttggtc

SEQ ID NO: 135015 - DNA, 15 bp, Homo sapiens
tcctcagcttggtcc

SEQ ID NO: 135016 - DNA, 15 bp, Homo sapiens
cctcagcttggtccc

SEQ ID NO: 135017 - DNA, 15 bp, Homo sapiens
ctcagcttggtccca

SEQ ID NO: 135018 - DNA, 15 bp, Homo sapiens
tcagcttggtcccag

SEQ ID NO: 135019 - DNA, 15 bp, Homo sapiens
cagcttggtcccaga

SEQ ID NO: 135020 - DNA, 15 bp, Homo sapiens
agcttggtcccagag

SEQ ID NO: 135021 - DNA, 15 bp, Homo sapiens
gcttggtcccagagg

SEQ ID NO: 135022 - DNA, 15 bp, Homo sapiens
cttggtcccagaggc

SEQ ID NO: 135023 - DNA, 15 bp, Homo sapiens
ttggtcccagaggcc

SEQ ID NO: 135024 - DNA, 15 bp, Homo sapiens
tggtcccagaggcct

SEQ ID NO: 135025 - DNA, 15 bp, Homo sapiens
ggtcccagaggcctg

SEQ ID NO: 135026 - DNA, 15 bp, Homo sapiens
gtcccagaggcctgg

SEQ ID NO: 135027 - DNA, 15 bp, Homo sapiens
tcccagaggcctgga

SEQ ID NO: 135028 - DNA, 15 bp, Homo sapiens
cccagaggcctggac

SEQ ID NO: 135029 - DNA, 15 bp, Homo sapiens
ccagaggcctggacc

SEQ ID NO: 135030 - DNA, 15 bp, Homo sapiens
cagaggcctggacct

SEQ ID NO: 135031 - DNA, 15 bp, Homo sapiens
agaggcctggacctg

SEQ ID NO: 135032 - DNA, 15 bp, Homo sapiens
gaggcctggacctgg

SEQ ID NO: 135033 - DNA, 15 bp, Homo sapiens
aggcctggacctggg

SEQ ID NO: 135034 - DNA, 15 bp, Homo sapiens
ggcctggacctgggt

SEQ ID NO: 135035 - DNA, 15 bp, Homo sapiens
gcctggacctgggtc

SEQ ID NO: 135036 - DNA, 15 bp, Homo sapiens
cctggacctgggtcc

SEQ ID NO: 135037 - DNA, 15 bp, Homo sapiens
ctggacctgggtccc

SEQ ID NO: 135038 - DNA, 15 bp, Homo sapiens
tggacctgggtccca

SEQ ID NO: 135039 - DNA, 15 bp, Homo sapiens
ggacctgggtcccag

SEQ ID NO: 135040 - DNA, 15 bp, Homo sapiens
gacctgggtcccaga

SEQ ID NO: 135041 - DNA, 15 bp, Homo sapiens
acctgggtcccagag

SEQ ID NO: 135042 - DNA, 15 bp, Homo sapiens
cctgggtcccagagg

SEQ ID NO: 135043 - DNA, 15 bp, Homo sapiens
ctgggtcccagaggt

SEQ ID NO: 135044 - DNA, 15 bp, Homo sapiens
tgggtcccagaggtc

SEQ ID NO: 135045 - DNA, 15 bp, Homo sapiens
gggtcccagaggtcc

SEQ ID NO: 135046 - DNA, 15 bp, Homo sapiens
ggtcccagaggtccc

SEQ ID NO: 135047 - DNA, 15 bp, Homo sapiens
gtcccagaggtccca

SEQ ID NO: 135048 - DNA, 15 bp, Homo sapiens
tcccagaggtcccag

SEQ ID NO: 135049 - DNA, 15 bp, Homo sapiens
cccagaggtcccagc

SEQ ID NO: 135050 - DNA, 15 bp, Homo sapiens
ccagaggtcccagct

SEQ ID NO: 135051 - DNA, 15 bp, Homo sapiens
cagaggtcccagctg

SEQ ID NO: 135052 - DNA, 15 bp, Homo sapiens
agaggtcccagctgg

SEQ ID NO: 135053 - DNA, 15 bp, Homo sapiens
gaggtcccagctggt

SEQ ID NO: 135054 - DNA, 15 bp, Homo sapiens
aggtcccagctggtt

SEQ ID NO: 135055 - DNA, 15 bp, Homo sapiens
ggtcccagctggttc

SEQ ID NO: 135056 - DNA, 15 bp, Homo sapiens
gtcccagctggttcc

SEQ ID NO: 135057 - DNA, 15 bp, Homo sapiens
tcccagctggttccc

SEQ ID NO: 135058 - DNA, 15 bp, Homo sapiens
cccagctggttcccc

SEQ ID NO: 135059 - DNA, 15 bp, Homo sapiens
ccagctggttccccg

SEQ ID NO: 135060 - DNA, 15 bp, Homo sapiens
cagctggttccccgg

SEQ ID NO: 135061 - DNA, 15 bp, Homo sapiens
agctggttccccggc

SEQ ID NO: 135062 - DNA, 15 bp, Homo sapiens
gctggttccccggct

SEQ ID NO: 135063 - DNA, 15 bp, Homo sapiens
ctggttccccggctt

SEQ ID NO: 135064 - DNA, 15 bp, Homo sapiens
tggttccccggcttg

SEQ ID NO: 135065 - DNA, 15 bp, Homo sapiens
ggttccccggcttgg

SEQ ID NO: 135066 - DNA, 15 bp, Homo sapiens
gttccccggcttggt

SEQ ID NO: 135067 - DNA, 15 bp, Homo sapiens
ttccccggcttggtc

SEQ ID NO: 135068 - DNA, 15 bp, Homo sapiens
tccccggcttggtcc

SEQ ID NO: 135069 - DNA, 15 bp, Homo sapiens
ccccggcttggtccc

SEQ ID NO: 135070 - DNA, 15 bp, Homo sapiens
cccggcttggtccca

SEQ ID NO: 135071 - DNA, 15 bp, Homo sapiens
ccggcttggtcccag

SEQ ID NO: 135072 - DNA, 15 bp, Homo sapiens
cggcttggtcccaga

SEQ ID NO: 135073 - DNA, 15 bp, Homo sapiens
ggcttggtcccagag

SEQ ID NO: 135074 - DNA, 15 bp, Homo sapiens
cccagaggcctggat

SEQ ID NO: 135075 - DNA, 15 bp, Homo sapiens
ccagaggcctggatg

SEQ ID NO: 135076 - DNA, 15 bp, Homo sapiens
cagaggcctggatgt

SEQ ID NO: 135077 - DNA, 15 bp, Homo sapiens
agaggcctggatgtg

SEQ ID NO: 135078 - DNA, 15 bp, Homo sapiens
gaggcctggatgtgt

SEQ ID NO: 135079 - DNA, 15 bp, Homo sapiens
aggcctggatgtgtg

SEQ ID NO: 135080 - DNA, 15 bp, Homo sapiens
ggcctggatgtgtgg

SEQ ID NO: 135081 - DNA, 15 bp, Homo sapiens
gcctggatgtgtggc

SEQ ID NO: 135082 - DNA, 15 bp, Homo sapiens
cctggatgtgtggca

SEQ ID NO: 135083 - DNA, 15 bp, Homo sapiens
ctggatgtgtggcaa

SEQ ID NO: 135084 - DNA, 15 bp, Homo sapiens
tggatgtgtggcaag

SEQ ID NO: 135085 - DNA, 15 bp, Homo sapiens
ggatgtgtggcaaga

SEQ ID NO: 135086 - DNA, 15 bp, Homo sapiens
gatgtgtggcaagaa

SEQ ID NO: 135087 - DNA, 15 bp, Homo sapiens
atgtgtggcaagaag

SEQ ID NO: 135088 - DNA, 15 bp, Homo sapiens
tgtgtggcaagaagc

SEQ ID NO: 135089 - DNA, 15 bp, Homo sapiens
gtgtggcaagaagct

SEQ ID NO: 135090 - DNA, 15 bp, Homo sapiens
tgtggcaagaagctg

SEQ ID NO: 135091 - DNA, 15 bp, Homo sapiens
gtggcaagaagctga

SEQ ID NO: 135092 - DNA, 15 bp, Homo sapiens
tggcaagaagctgag

SEQ ID NO: 135093 - DNA, 15 bp, Homo sapiens
ggcaagaagctgagg

SEQ ID NO: 135094 - DNA, 15 bp, Homo sapiens
gcaagaagctgaggg

SEQ ID NO: 135095 - DNA, 15 bp, Homo sapiens
caagaagctgagggt

SEQ ID NO: 135096 - DNA, 15 bp, Homo sapiens
aagaagctgagggtt

SEQ ID NO: 135097 - DNA, 15 bp, Homo sapiens
agaagctgagggttc

SEQ ID NO: 135098 - DNA, 15 bp, Homo sapiens
gaagctgagggttct

SEQ ID NO: 135099 - DNA, 15 bp, Homo sapiens
aagctgagggttctg

SEQ ID NO: 135100 - DNA, 15 bp, Homo sapiens
agctgagggttctgc

SEQ ID NO: 135101 - DNA, 15 bp, Homo sapiens
gctgagggttctgct

SEQ ID NO: 135102 - DNA, 15 bp, Homo sapiens
ctgagggttctgctt

SEQ ID NO: 135103 - DNA, 15 bp, Homo sapiens
tgagggttctgcttc

SEQ ID NO: 135104 - DNA, 15 bp, Homo sapiens
gagggttctgcttcg

SEQ ID NO: 135105 - DNA, 15 bp, Homo sapiens
agggttctgcttcgt

SEQ ID NO: 135106 - DNA, 15 bp, Homo sapiens
gggttctgcttcgtt

SEQ ID NO: 135107 - DNA, 15 bp, Homo sapiens
ggttctgcttcgttt

SEQ ID NO: 135108 - DNA, 15 bp, Homo sapiens
gttctgcttcgtttc

SEQ ID NO: 135109 - DNA, 15 bp, Homo sapiens
ttctgcttcgtttct

SEQ ID NO: 135110 - DNA, 15 bp, Homo sapiens
tctgcttcgtttctt

SEQ ID NO: 135111 - DNA, 15 bp, Homo sapiens
ctgcttcgtttcttc

SEQ ID NO: 135112 - DNA, 15 bp, Homo sapiens
tgcttcgtttcttcc

SEQ ID NO: 135113 - DNA, 15 bp, Homo sapiens
gcttcgtttcttcca

SEQ ID NO: 135114 - DNA, 15 bp, Homo sapiens
cttcgtttcttccag

SEQ ID NO: 135115 - DNA, 15 bp, Homo sapiens
ttcgtttcttccagc

SEQ ID NO: 135116 - DNA, 15 bp, Homo sapiens
tcgtttcttccagcc

SEQ ID NO: 135117 - DNA, 15 bp, Homo sapiens
cgtttcttccagccc

SEQ ID NO: 135118 - DNA, 15 bp, Homo sapiens
gtttcttccagccca

SEQ ID NO: 135119 - DNA, 15 bp, Homo sapiens
tttcttccagcccac

SEQ ID NO: 135120 - DNA, 15 bp, Homo sapiens
ttcttccagcccaca

SEQ ID NO: 135121 - DNA, 15 bp, Homo sapiens
tcttccagcccacaa

SEQ ID NO: 135122 - DNA, 15 bp, Homo sapiens
cttccagcccacaaa

SEQ ID NO: 135123 - DNA, 15 bp, Homo sapiens
ttccagcccacaaac

SEQ ID NO: 135124 - DNA, 15 bp, Homo sapiens
tccagcccacaaaca

SEQ ID NO: 135125 - DNA, 15 bp, Homo sapiens
ccagcccacaaacac

SEQ ID NO: 135126 - DNA, 15 bp, Homo sapiens
cagcccacaaacaca

SEQ ID NO: 135127 - DNA, 15 bp, Homo sapiens
agcccacaaacacac

SEQ ID NO: 135128 - DNA, 15 bp, Homo sapiens
gcccacaaacacaca

SEQ ID NO: 135129 - DNA, 15 bp, Homo sapiens
cccacaaacacacat

SEQ ID NO: 135130 - DNA, 15 bp, Homo sapiens
ccacaaacacacatg

SEQ ID NO: 135131 - DNA, 15 bp, Homo sapiens
cacaaacacacatgt

SEQ ID NO: 135132 - DNA, 15 bp, Homo sapiens
acaaacacacatgtc

SEQ ID NO: 135133 - DNA, 15 bp, Homo sapiens
caaacacacatgtca

SEQ ID NO: 135134 - DNA, 15 bp, Homo sapiens
aaacacacatgtcac

SEQ ID NO: 135135 - DNA, 15 bp, Homo sapiens
aacacacatgtcacc

SEQ ID NO: 135136 - DNA, 15 bp, Homo sapiens
acacacatgtcacct

SEQ ID NO: 135137 - DNA, 15 bp, Homo sapiens
cacacatgtcacctg

SEQ ID NO: 135138 - DNA, 15 bp, Homo sapiens
acacatgtcacctgt

SEQ ID NO: 135139 - DNA, 15 bp, Homo sapiens
cacatgtcacctgtt

SEQ ID NO: 135140 - DNA, 15 bp, Homo sapiens
acatgtcacctgttt

SEQ ID NO: 135141 - DNA, 15 bp, Homo sapiens
catgtcacctgtttt

SEQ ID NO: 135142 - DNA, 15 bp, Homo sapiens
atgtcacctgttttt

SEQ ID NO: 135143 - DNA, 15 bp, Homo sapiens
tgtcacctgtttttt

SEQ ID NO: 135144 - DNA, 15 bp, Homo sapiens
gtcacctgttttttg

SEQ ID NO: 135145 - DNA, 15 bp, Homo sapiens
tcacctgttttttgt

SEQ ID NO: 135146 - DNA, 15 bp, Homo sapiens
cacctgttttttgtt

SEQ ID NO: 135147 - DNA, 15 bp, Homo sapiens
acctgttttttgttc

SEQ ID NO: 135148 - DNA, 15 bp, Homo sapiens
cctgttttttgttct

SEQ ID NO: 135149 - DNA, 15 bp, Homo sapiens
ctgttttttgttctt

SEQ ID NO: 135150 - DNA, 15 bp, Homo sapiens
tgttttttgttcttt

SEQ ID NO: 135151 - DNA, 15 bp, Homo sapiens
gttttttgttctttt

SEQ ID NO: 135152 - DNA, 15 bp, Homo sapiens
tttttgttctttttc

SEQ ID NO: 135153 - DNA, 15 bp, Homo sapiens
ttttgttctttttcc

SEQ ID NO: 135154 - DNA, 15 bp, Homo sapiens
tttgttctttttcct

SEQ ID NO: 135155 - DNA, 15 bp, Homo sapiens
ttgttctttttcctt

SEQ ID NO: 135156 - DNA, 15 bp, Homo sapiens
tgttctttttccttt

SEQ ID NO: 135157 - DNA, 15 bp, Homo sapiens
gttctttttcctttc

SEQ ID NO: 135158 - DNA, 15 bp, Homo sapiens
ttctttttcctttcc

SEQ ID NO: 135159 - DNA, 15 bp, Homo sapiens
tctttttcctttcct

SEQ ID NO: 135160 - DNA, 15 bp, Homo sapiens
ctttttcctttcctt

SEQ ID NO: 135161 - DNA, 15 bp, Homo sapiens
tttttcctttccttt

SEQ ID NO: 135162 - DNA, 15 bp, Homo sapiens
ttttcctttcctttg

SEQ ID NO: 135163 - DNA, 15 bp, Homo sapiens
tttcctttcctttgc

SEQ ID NO: 135164 - DNA, 15 bp, Homo sapiens
ttcctttcctttgcc

SEQ ID NO: 135165 - DNA, 15 bp, Homo sapiens
tcctttcctttgccc

SEQ ID NO: 135166 - DNA, 15 bp, Homo sapiens
cctttcctttgcccc

SEQ ID NO: 135167 - DNA, 15 bp, Homo sapiens
ctttcctttgcccca

SEQ ID NO: 135168 - DNA, 15 bp, Homo sapiens
tttcctttgccccac

SEQ ID NO: 135169 - DNA, 15 bp, Homo sapiens
ttcctttgccccact

SEQ ID NO: 135170 - DNA, 15 bp, Homo sapiens
tcctttgccccactt

SEQ ID NO: 135171 - DNA, 15 bp, Homo sapiens
cctttgccccacttt

SEQ ID NO: 135172 - DNA, 15 bp, Homo sapiens
ctttgccccacttta

SEQ ID NO: 135173 - DNA, 15 bp, Homo sapiens
tttgccccactttac

SEQ ID NO: 135174 - DNA, 15 bp, Homo sapiens
ttgccccactttaca

SEQ ID NO: 135175 - DNA, 15 bp, Homo sapiens
tgccccactttacag

SEQ ID NO: 135176 - DNA, 15 bp, Homo sapiens
gccccactttacaga

SEQ ID NO: 135177 - DNA, 15 bp, Homo sapiens
ccccactttacagaa

SEQ ID NO: 135178 - DNA, 15 bp, Homo sapiens
cccactttacagaag

SEQ ID NO: 135179 - DNA, 15 bp, Homo sapiens
ccactttacagaagc

SEQ ID NO: 135180 - DNA, 15 bp, Homo sapiens
cactttacagaagct

SEQ ID NO: 135181 - DNA, 15 bp, Homo sapiens
actttacagaagctc

SEQ ID NO: 135182 - DNA, 15 bp, Homo sapiens
ctttacagaagctct

SEQ ID NO: 135183 - DNA, 15 bp, Homo sapiens
tttacagaagctctt

SEQ ID NO: 135184 - DNA, 15 bp, Homo sapiens
ttacagaagctcttg

SEQ ID NO: 135185 - DNA, 15 bp, Homo sapiens
tacagaagctcttgg

SEQ ID NO: 135186 - DNA, 15 bp, Homo sapiens
acagaagctcttggc

SEQ ID NO: 135187 - DNA, 15 bp, Homo sapiens
cagaagctcttggct

SEQ ID NO: 135188 - DNA, 15 bp, Homo sapiens
agaagctcttggcta

SEQ ID NO: 135189 - DNA, 15 bp, Homo sapiens
gaagctcttggctaa

SEQ ID NO: 135190 - DNA, 15 bp, Homo sapiens
aagctcttggctaat

SEQ ID NO: 135191 - DNA, 15 bp, Homo sapiens
agctcttggctaatt

SEQ ID NO: 135192 - DNA, 15 bp, Homo sapiens
gctcttggctaattg

SEQ ID NO: 135193 - DNA, 15 bp, Homo sapiens
ctcttggctaattgg

SEQ ID NO: 135194 - DNA, 15 bp, Homo sapiens
tcttggctaattggt

SEQ ID NO: 135195 - DNA, 15 bp, Homo sapiens
cttggctaattggta

SEQ ID NO: 135196 - DNA, 15 bp, Homo sapiens
ttggctaattggtag

SEQ ID NO: 135197 - DNA, 15 bp, Homo sapiens
tggctaattggtagg

SEQ ID NO: 135198 - DNA, 15 bp, Homo sapiens
ggctaattggtaggt

SEQ ID NO: 135199 - DNA, 15 bp, Homo sapiens
gctaattggtaggtc

SEQ ID NO: 135200 - DNA, 15 bp, Homo sapiens
ctaattggtaggtca

SEQ ID NO: 135201 - DNA, 15 bp, Homo sapiens
taattggtaggtcac

SEQ ID NO: 135202 - DNA, 15 bp, Homo sapiens
aattggtaggtcact

SEQ ID NO: 135203 - DNA, 15 bp, Homo sapiens
attggtaggtcactg

SEQ ID NO: 135204 - DNA, 15 bp, Homo sapiens
ttggtaggtcactgt

SEQ ID NO: 135205 - DNA, 15 bp, Homo sapiens
tggtaggtcactgtt

SEQ ID NO: 135206 - DNA, 15 bp, Homo sapiens
ggtaggtcactgttt

SEQ ID NO: 135207 - DNA, 15 bp, Homo sapiens
gtaggtcactgtttg

SEQ ID NO: 135208 - DNA, 15 bp, Homo sapiens
taggtcactgtttgc

SEQ ID NO: 135209 - DNA, 15 bp, Homo sapiens
aggtcactgtttgct

SEQ ID NO: 135210 - DNA, 15 bp, Homo sapiens
ggtcactgtttgctc

SEQ ID NO: 135211 - DNA, 15 bp, Homo sapiens
gtcactgtttgctcc

SEQ ID NO: 135212 - DNA, 15 bp, Homo sapiens
tcactgtttgctcct

SEQ ID NO: 135213 - DNA, 15 bp, Homo sapiens
cactgtttgctcctc

SEQ ID NO: 135214 - DNA, 15 bp, Homo sapiens
actgtttgctcctcc

SEQ ID NO: 135215 - DNA, 15 bp, Homo sapiens
ctgtttgctcctcca

SEQ ID NO: 135216 - DNA, 15 bp, Homo sapiens
tgtttgctcctccag

SEQ ID NO: 135217 - DNA, 15 bp, Homo sapiens
gtttgctcctccagg

SEQ ID NO: 135218 - DNA, 15 bp, Homo sapiens
tttgctcctccaggc

SEQ ID NO: 135219 - DNA, 15 bp, Homo sapiens
ttgctcctccaggca

SEQ ID NO: 135220 - DNA, 15 bp, Homo sapiens
tgctcctccaggcaa

SEQ ID NO: 135221 - DNA, 15 bp, Homo sapiens
gctcctccaggcaaa

SEQ ID NO: 135222 - DNA, 15 bp, Homo sapiens
ctcctccaggcaaaa

SEQ ID NO: 135223 - DNA, 15 bp, Homo sapiens
tcctccaggcaaaac

SEQ ID NO: 135224 - DNA, 15 bp, Homo sapiens
cctccaggcaaaacc

SEQ ID NO: 135225 - DNA, 15 bp, Homo sapiens
ctccaggcaaaacca

SEQ ID NO: 135226 - DNA, 15 bp, Homo sapiens
tccaggcaaaaccaa

SEQ ID NO: 135227 - DNA, 15 bp, Homo sapiens
ccaggcaaaaccaag

SEQ ID NO: 135228 - DNA, 15 bp, Homo sapiens
caggcaaaaccaagg

SEQ ID NO: 135229 - DNA, 15 bp, Homo sapiens
aggcaaaaccaagga

SEQ ID NO: 135230 - DNA, 15 bp, Homo sapiens
ggcaaaaccaaggag

SEQ ID NO: 135231 - DNA, 15 bp, Homo sapiens
gcaaaaccaaggagg

SEQ ID NO: 135232 - DNA, 15 bp, Homo sapiens
caaaaccaaggaggc

SEQ ID NO: 135233 - DNA, 15 bp, Homo sapiens
aaaaccaaggaggct

SEQ ID NO: 135234 - DNA, 15 bp, Homo sapiens
aaaccaaggaggctg

SEQ ID NO: 135235 - DNA, 15 bp, Homo sapiens
aaccaaggaggctga

SEQ ID NO: 135236 - DNA, 15 bp, Homo sapiens
accaaggaggctgag

SEQ ID NO: 135237 - DNA, 15 bp, Homo sapiens
ccaaggaggctgagc

SEQ ID NO: 135238 - DNA, 15 bp, Homo sapiens
caaggaggctgagct

SEQ ID NO: 135239 - DNA, 15 bp, Homo sapiens
aaggaggctgagctc

SEQ ID NO: 135240 - DNA, 15 bp, Homo sapiens
aggaggctgagctca

SEQ ID NO: 135241 - DNA, 15 bp, Homo sapiens
ggaggctgagctcag

SEQ ID NO: 135242 - DNA, 15 bp, Homo sapiens
gaggctgagctcagc

SEQ ID NO: 135243 - DNA, 15 bp, Homo sapiens
aggctgagctcagca

SEQ ID NO: 135244 - DNA, 15 bp, Homo sapiens
ggctgagctcagcag

SEQ ID NO: 135245 - DNA, 15 bp, Homo sapiens
gctgagctcagcagg

SEQ ID NO: 135246 - DNA, 15 bp, Homo sapiens
ctgagctcagcaggt

SEQ ID NO: 135247 - DNA, 15 bp, Homo sapiens
tgagctcagcaggtc

SEQ ID NO: 135248 - DNA, 15 bp, Homo sapiens
gagctcagcaggtca

SEQ ID NO: 135249 - DNA, 15 bp, Homo sapiens
agctcagcaggtcaa

SEQ ID NO: 135250 - DNA, 15 bp, Homo sapiens
gctcagcaggtcaag

SEQ ID NO: 135251 - DNA, 15 bp, Homo sapiens
ctcagcaggtcaagt

SEQ ID NO: 135252 - DNA, 15 bp, Homo sapiens
tcagcaggtcaagta

SEQ ID NO: 135253 - DNA, 15 bp, Homo sapiens
cagcaggtcaagtat

SEQ ID NO: 135254 - DNA, 15 bp, Homo sapiens
agcaggtcaagtatt

SEQ ID NO: 135255 - DNA, 15 bp, Homo sapiens
gcaggtcaagtattt

SEQ ID NO: 135256 - DNA, 15 bp, Homo sapiens
caggtcaagtatttt

SEQ ID NO: 135257 - DNA, 15 bp, Homo sapiens
aggtcaagtattttg

SEQ ID NO: 135258 - DNA, 15 bp, Homo sapiens
ggtcaagtattttgg

SEQ ID NO: 135259 - DNA, 15 bp, Homo sapiens
gtcaagtattttggt

SEQ ID NO: 135260 - DNA, 15 bp, Homo sapiens
tcaagtattttggtc

SEQ ID NO: 135261 - DNA, 15 bp, Homo sapiens
caagtattttggtct

SEQ ID NO: 135262 - DNA, 15 bp, Homo sapiens
aagtattttggtctg

SEQ ID NO: 135263 - DNA, 15 bp, Homo sapiens
agtattttggtctgt

SEQ ID NO: 135264 - DNA, 15 bp, Homo sapiens
gtattttggtctgta

SEQ ID NO: 135265 - DNA, 15 bp, Homo sapiens
tattttggtctgtat

SEQ ID NO: 135266 - DNA, 15 bp, Homo sapiens
attttggtctgtatt

SEQ ID NO: 135267 - DNA, 15 bp, Homo sapiens
ttttggtctgtattg

SEQ ID NO: 135268 - DNA, 15 bp, Homo sapiens
tttggtctgtattga

SEQ ID NO: 135269 - DNA, 15 bp, Homo sapiens
ttggtctgtattgaa

SEQ ID NO: 135270 - DNA, 15 bp, Homo sapiens
tggtctgtattgaag

SEQ ID NO: 135271 - DNA, 15 bp, Homo sapiens
ggtctgtattgaaga

SEQ ID NO: 135272 - DNA, 15 bp, Homo sapiens
gtctgtattgaagag

SEQ ID NO: 135273 - DNA, 15 bp, Homo sapiens
tctgtattgaagaga

SEQ ID NO: 135274 - DNA, 15 bp, Homo sapiens
ctgtattgaagagac

SEQ ID NO: 135275 - DNA, 15 bp, Homo sapiens
tgtattgaagagact

SEQ ID NO: 135276 - DNA, 15 bp, Homo sapiens
gtattgaagagactg

SEQ ID NO: 135277 - DNA, 15 bp, Homo sapiens
tattgaagagactgt

SEQ ID NO: 135278 - DNA, 15 bp, Homo sapiens
attgaagagactgtg

SEQ ID NO: 135279 - DNA, 15 bp, Homo sapiens
ttgaagagactgtgg

SEQ ID NO: 135280 - DNA, 15 bp, Homo sapiens
tgaagagactgtggt

SEQ ID NO: 135281 - DNA, 15 bp, Homo sapiens
gaagagactgtggtg

SEQ ID NO: 135282 - DNA, 15 bp, Homo sapiens
aagagactgtggtgg

SEQ ID NO: 135283 - DNA, 15 bp, Homo sapiens
agagactgtggtggg

SEQ ID NO: 135284 - DNA, 15 bp, Homo sapiens
gagactgtggtggga

SEQ ID NO: 135285 - DNA, 15 bp, Homo sapiens
agactgtggtgggag

SEQ ID NO: 135286 - DNA, 15 bp, Homo sapiens
gactgtggtgggaga

SEQ ID NO: 135287 - DNA, 15 bp, Homo sapiens
actgtggtgggagag

SEQ ID NO: 135288 - DNA, 15 bp, Homo sapiens
ctgtggtgggagagc

SEQ ID NO: 135289 - DNA, 15 bp, Homo sapiens
tgtggtgggagagcc

SEQ ID NO: 135290 - DNA, 15 bp, Homo sapiens
gtggtgggagagccc

SEQ ID NO: 135291 - DNA, 15 bp, Homo sapiens
tggtgggagagccct

SEQ ID NO: 135292 - DNA, 15 bp, Homo sapiens
ggtgggagagccctc

SEQ ID NO: 135293 - DNA, 15 bp, Homo sapiens
gtgggagagccctct

SEQ ID NO: 135294 - DNA, 15 bp, Homo sapiens
tgggagagccctctt

SEQ ID NO: 135295 - DNA, 15 bp, Homo sapiens
gggagagccctcttg

SEQ ID NO: 135296 - DNA, 15 bp, Homo sapiens
ggagagccctcttga

SEQ ID NO: 135297 - DNA, 15 bp, Homo sapiens
gagagccctcttgac

SEQ ID NO: 135298 - DNA, 15 bp, Homo sapiens
agagccctcttgacc

SEQ ID NO: 135299 - DNA, 15 bp, Homo sapiens
gagccctcttgacct

SEQ ID NO: 135300 - DNA, 15 bp, Homo sapiens
agccctcttgacctt

SEQ ID NO: 135301 - DNA, 15 bp, Homo sapiens
gccctcttgaccttc

SEQ ID NO: 135302 - DNA, 15 bp, Homo sapiens
ccctcttgaccttct

SEQ ID NO: 135303 - DNA, 15 bp, Homo sapiens
cctcttgaccttctg

SEQ ID NO: 135304 - DNA, 15 bp, Homo sapiens
ctcttgaccttctgc

SEQ ID NO: 135305 - DNA, 15 bp, Homo sapiens
tcttgaccttctgct

SEQ ID NO: 135306 - DNA, 15 bp, Homo sapiens
cttgaccttctgctg

SEQ ID NO: 135307 - DNA, 15 bp, Homo sapiens
ttgaccttctgctgg

SEQ ID NO: 135308 - DNA, 15 bp, Homo sapiens
tgaccttctgctgga

SEQ ID NO: 135309 - DNA, 15 bp, Homo sapiens
gaccttctgctggat

SEQ ID NO: 135310 - DNA, 15 bp, Homo sapiens
accttctgctggata

SEQ ID NO: 135311 - DNA, 15 bp, Homo sapiens
ccttctgctggatag

SEQ ID NO: 135312 - DNA, 15 bp, Homo sapiens
cttctgctggatagt

SEQ ID NO: 135313 - DNA, 15 bp, Homo sapiens
ttctgctggatagtg

SEQ ID NO: 135314 - DNA, 15 bp, Homo sapiens
tctgctggatagtga

SEQ ID NO: 135315 - DNA, 15 bp, Homo sapiens
ctgctggatagtgac

SEQ ID NO: 135316 - DNA, 15 bp, Homo sapiens
tgctggatagtgact

SEQ ID NO: 135317 - DNA, 15 bp, Homo sapiens
gctggatagtgactt

SEQ ID NO: 135318 - DNA, 15 bp, Homo sapiens
ctggatagtgacttt

SEQ ID NO: 135319 - DNA, 15 bp, Homo sapiens
tggatagtgactttc

SEQ ID NO: 135320 - DNA, 15 bp, Homo sapiens
ggatagtgactttct

SEQ ID NO: 135321 - DNA, 15 bp, Homo sapiens
gatagtgactttctc

SEQ ID NO: 135322 - DNA, 15 bp, Homo sapiens
atagtgactttctct

SEQ ID NO: 135323 - DNA, 15 bp, Homo sapiens
tagtgactttctctt

SEQ ID NO: 135324 - DNA, 15 bp, Homo sapiens
agtgactttctcttc

SEQ ID NO: 135325 - DNA, 15 bp, Homo sapiens
gtgactttctcttct

SEQ ID NO: 135326 - DNA, 15 bp, Homo sapiens
tgactttctcttctg

SEQ ID NO: 135327 - DNA, 15 bp, Homo sapiens
gactttctcttctgc

SEQ ID NO: 135328 - DNA, 15 bp, Homo sapiens
actttctcttctgct

SEQ ID NO: 135329 - DNA, 15 bp, Homo sapiens
ctttctcttctgctg

SEQ ID NO: 135330 - DNA, 15 bp, Homo sapiens
tttctcttctgctgg

SEQ ID NO: 135331 - DNA, 15 bp, Homo sapiens
ttctcttctgctggc

SEQ ID NO: 135332 - DNA, 15 bp, Homo sapiens
tctcttctgctggca

SEQ ID NO: 135333 - DNA, 15 bp, Homo sapiens
ctcttctgctggcag

SEQ ID NO: 135334 - DNA, 15 bp, Homo sapiens
tcttctgctggcagc

SEQ ID NO: 135335 - DNA, 15 bp, Homo sapiens
cttctgctggcagca

SEQ ID NO: 135336 - DNA, 15 bp, Homo sapiens
ttctgctggcagcag

SEQ ID NO: 135337 - DNA, 15 bp, Homo sapiens
tctgctggcagcagt

SEQ ID NO: 135338 - DNA, 15 bp, Homo sapiens
ctgctggcagcagta

SEQ ID NO: 135339 - DNA, 15 bp, Homo sapiens
tgctggcagcagtag

SEQ ID NO: 135340 - DNA, 15 bp, Homo sapiens
gctggcagcagtagc

SEQ ID NO: 135341 - DNA, 15 bp, Homo sapiens
ctggcagcagtagcc

SEQ ID NO: 135342 - DNA, 15 bp, Homo sapiens
tggcagcagtagccc

SEQ ID NO: 135343 - DNA, 15 bp, Homo sapiens
ggcagcagtagccca

SEQ ID NO: 135344 - DNA, 15 bp, Homo sapiens
gcagcagtagcccag

SEQ ID NO: 135345 - DNA, 15 bp, Homo sapiens
cagcagtagcccagc

SEQ ID NO: 135346 - DNA, 15 bp, Homo sapiens
agcagtagcccagct

SEQ ID NO: 135347 - DNA, 15 bp, Homo sapiens
gcagtagcccagctc

SEQ ID NO: 135348 - DNA, 15 bp, Homo sapiens
cagtagcccagctcc

SEQ ID NO: 135349 - DNA, 15 bp, Homo sapiens
agtagcccagctccg

SEQ ID NO: 135350 - DNA, 15 bp, Homo sapiens
gtagcccagctccgc

SEQ ID NO: 135351 - DNA, 15 bp, Homo sapiens
tagcccagctccgca

SEQ ID NO: 135352 - DNA, 15 bp, Homo sapiens
agcccagctccgcat

SEQ ID NO: 135353 - DNA, 15 bp, Homo sapiens
gcccagctccgcatc

SEQ ID NO: 135354 - DNA, 15 bp, Homo sapiens
cccagctccgcatcc

SEQ ID NO: 135355 - DNA, 15 bp, Homo sapiens
ccagctccgcatcct

SEQ ID NO: 135356 - DNA, 15 bp, Homo sapiens
cagctccgcatcctg

SEQ ID NO: 135357 - DNA, 15 bp, Homo sapiens
agctccgcatcctgt

SEQ ID NO: 135358 - DNA, 15 bp, Homo sapiens
gctccgcatcctgtg

SEQ ID NO: 135359 - DNA, 15 bp, Homo sapiens
ctccgcatcctgtga

SEQ ID NO: 135360 - DNA, 15 bp, Homo sapiens
tccgcatcctgtgac

SEQ ID NO: 135361 - DNA, 15 bp, Homo sapiens
ccgcatcctgtgaca

SEQ ID NO: 135362 - DNA, 15 bp, Homo sapiens
cgcatcctgtgacag

SEQ ID NO: 135363 - DNA, 15 bp, Homo sapiens
gcatcctgtgacaga

SEQ ID NO: 135364 - DNA, 15 bp, Homo sapiens
catcctgtgacagag

SEQ ID NO: 135365 - DNA, 15 bp, Homo sapiens
atcctgtgacagagg

SEQ ID NO: 135366 - DNA, 15 bp, Homo sapiens
tcctgtgacagaggt

SEQ ID NO: 135367 - DNA, 15 bp, Homo sapiens
cctgtgacagaggtc

SEQ ID NO: 135368 - DNA, 15 bp, Homo sapiens
ctgtgacagaggtca

SEQ ID NO: 135369 - DNA, 15 bp, Homo sapiens
tgtgacagaggtcat

SEQ ID NO: 135370 - DNA, 15 bp, Homo sapiens
gtgacagaggtcata

SEQ ID NO: 135371 - DNA, 15 bp, Homo sapiens
tgacagaggtcatac

SEQ ID NO: 135372 - DNA, 15 bp, Homo sapiens
gacagaggtcatacc

SEQ ID NO: 135373 - DNA, 15 bp, Homo sapiens
acagaggtcatacct

SEQ ID NO: 135374 - DNA, 15 bp, Homo sapiens
cagaggtcatacctt

SEQ ID NO: 135375 - DNA, 15 bp, Homo sapiens
agaggtcataccttc

SEQ ID NO: 135376 - DNA, 15 bp, Homo sapiens
gaggtcataccttcc

SEQ ID NO: 135377 - DNA, 15 bp, Homo sapiens
aggtcataccttcca

SEQ ID NO: 135378 - DNA, 15 bp, Homo sapiens
ggtcataccttccag

SEQ ID NO: 135379 - DNA, 15 bp, Homo sapiens
gtcataccttccagt

SEQ ID NO: 135380 - DNA, 15 bp, Homo sapiens
tcataccttccagtt

SEQ ID NO: 135381 - DNA, 15 bp, Homo sapiens
cataccttccagtta

SEQ ID NO: 135382 - DNA, 15 bp, Homo sapiens
ataccttccagttac

SEQ ID NO: 135383 - DNA, 15 bp, Homo sapiens
taccttccagttacc

SEQ ID NO: 135384 - DNA, 15 bp, Homo sapiens
accttccagttaccc

SEQ ID NO: 135385 - DNA, 15 bp, Homo sapiens
ccttccagttacccg

SEQ ID NO: 135386 - DNA, 15 bp, Homo sapiens
cttccagttacccga

SEQ ID NO: 135387 - DNA, 15 bp, Homo sapiens
ttccagttacccgag

SEQ ID NO: 135388 - DNA, 15 bp, Homo sapiens
tccagttacccgagc

SEQ ID NO: 135389 - DNA, 15 bp, Homo sapiens
ccagttacccgagcg

SEQ ID NO: 135390 - DNA, 15 bp, Homo sapiens
cagttacccgagcga

SEQ ID NO: 135391 - DNA, 15 bp, Homo sapiens
agttacccgagcgaa

SEQ ID NO: 135392 - DNA, 15 bp, Homo sapiens
gttacccgagcgaac

SEQ ID NO: 135393 - DNA, 15 bp, Homo sapiens
ttacccgagcgaaca

SEQ ID NO: 135394 - DNA, 15 bp, Homo sapiens
tacccgagcgaacac

SEQ ID NO: 135395 - DNA, 15 bp, Homo sapiens
acccgagcgaacact

SEQ ID NO: 135396 - DNA, 15 bp, Homo sapiens
cccgagcgaacactt

SEQ ID NO: 135397 - DNA, 15 bp, Homo sapiens
ccgagcgaacacttg

SEQ ID NO: 135398 - DNA, 15 bp, Homo sapiens
cgagcgaacacttgg

SEQ ID NO: 135399 - DNA, 15 bp, Homo sapiens
gagcgaacacttgga

SEQ ID NO: 135400 - DNA, 15 bp, Homo sapiens
agcgaacacttggag

SEQ ID NO: 135401 - DNA, 15 bp, Homo sapiens
gcgaacacttggagc

SEQ ID NO: 135402 - DNA, 15 bp, Homo sapiens
cgaacacttggagca

SEQ ID NO: 135403 - DNA, 15 bp, Homo sapiens
gaacacttggagcaa

SEQ ID NO: 135404 - DNA, 15 bp, Homo sapiens
aacacttggagcaag

SEQ ID NO: 135405 - DNA, 15 bp, Homo sapiens
acacttggagcaagt

SEQ ID NO: 135406 - DNA, 15 bp, Homo sapiens
cacttggagcaagtc

SEQ ID NO: 135407 - DNA, 15 bp, Homo sapiens
acttggagcaagtca

SEQ ID NO: 135408 - DNA, 15 bp, Homo sapiens
cttggagcaagtcag

SEQ ID NO: 135409 - DNA, 15 bp, Homo sapiens
ttggagcaagtcagc

SEQ ID NO: 135410 - DNA, 15 bp, Homo sapiens
tggagcaagtcagct

SEQ ID NO: 135411 - DNA, 15 bp, Homo sapiens
ggagcaagtcagctt

SEQ ID NO: 135412 - DNA, 15 bp, Homo sapiens
gagcaagtcagcttt

SEQ ID NO: 135413 - DNA, 15 bp, Homo sapiens
agcaagtcagctttt

SEQ ID NO: 135414 - DNA, 15 bp, Homo sapiens
gcaagtcagcttttt

SEQ ID NO: 135415 - DNA, 15 bp, Homo sapiens
caagtcagctttttc

SEQ ID NO: 135416 - DNA, 15 bp, Homo sapiens
aagtcagctttttcc

SEQ ID NO: 135417 - DNA, 15 bp, Homo sapiens
agtcagctttttccc

SEQ ID NO: 135418 - DNA, 15 bp, Homo sapiens
gtcagctttttcccc

SEQ ID NO: 135419 - DNA, 15 bp, Homo sapiens
tcagctttttcccct

SEQ ID NO: 135420 - DNA, 15 bp, Homo sapiens
cagctttttcccctg

SEQ ID NO: 135421 - DNA, 15 bp, Homo sapiens
agctttttcccctga

SEQ ID NO: 135422 - DNA, 15 bp, Homo sapiens
gctttttcccctgaa

SEQ ID NO: 135423 - DNA, 15 bp, Homo sapiens
ctttttcccctgaaa

SEQ ID NO: 135424 - DNA, 15 bp, Homo sapiens
tttttcccctgaaac

SEQ ID NO: 135425 - DNA, 15 bp, Homo sapiens
ttttcccctgaaaca

SEQ ID NO: 135426 - DNA, 15 bp, Homo sapiens
tttcccctgaaacag

SEQ ID NO: 135427 - DNA, 15 bp, Homo sapiens
ttcccctgaaacagc

SEQ ID NO: 135428 - DNA, 15 bp, Homo sapiens
tcccctgaaacagca

SEQ ID NO: 135429 - DNA, 15 bp, Homo sapiens
cccctgaaacagcac

SEQ ID NO: 135430 - DNA, 15 bp, Homo sapiens
ccctgaaacagcacg

SEQ ID NO: 135431 - DNA, 15 bp, Homo sapiens
cctgaaacagcacgt

SEQ ID NO: 135432 - DNA, 15 bp, Homo sapiens
ctgaaacagcacgtt

SEQ ID NO: 135433 - DNA, 15 bp, Homo sapiens
tgaaacagcacgttc

SEQ ID NO: 135434 - DNA, 15 bp, Homo sapiens
gaaacagcacgttca

SEQ ID NO: 135435 - DNA, 15 bp, Homo sapiens
aaacagcacgttcac

SEQ ID NO: 135436 - DNA, 15 bp, Homo sapiens
aacagcacgttcacg

SEQ ID NO: 135437 - DNA, 15 bp, Homo sapiens
acagcacgttcacgt

SEQ ID NO: 135438 - DNA, 15 bp, Homo sapiens
cagcacgttcacgtt

SEQ ID NO: 135439 - DNA, 15 bp, Homo sapiens
agcacgttcacgttc

SEQ ID NO: 135440 - DNA, 15 bp, Homo sapiens
gcacgttcacgttct

SEQ ID NO: 135441 - DNA, 15 bp, Homo sapiens
cacgttcacgttctt

SEQ ID NO: 135442 - DNA, 15 bp, Homo sapiens
acgttcacgttcttg

SEQ ID NO: 135443 - DNA, 15 bp, Homo sapiens
cgttcacgttcttga

SEQ ID NO: 135444 - DNA, 15 bp, Homo sapiens
gttcacgttcttgat

SEQ ID NO: 135445 - DNA, 15 bp, Homo sapiens
ttcacgttcttgatc

SEQ ID NO: 135446 - DNA, 15 bp, Homo sapiens
tcacgttcttgatct

SEQ ID NO: 135447 - DNA, 15 bp, Homo sapiens
cacgttcttgatctt

SEQ ID NO: 135448 - DNA, 15 bp, Homo sapiens
acgttcttgatcttt

SEQ ID NO: 135449 - DNA, 15 bp, Homo sapiens
cgttcttgatctttg

SEQ ID NO: 135450 - DNA, 15 bp, Homo sapiens
gttcttgatctttgg

SEQ ID NO: 135451 - DNA, 15 bp, Homo sapiens
ttcttgatctttggt

SEQ ID NO: 135452 - DNA, 15 bp, Homo sapiens
tcttgatctttggtt

SEQ ID NO: 135453 - DNA, 15 bp, Homo sapiens
cttgatctttggttt

SEQ ID NO: 135454 - DNA, 15 bp, Homo sapiens
ttgatctttggtttg

SEQ ID NO: 135455 - DNA, 15 bp, Homo sapiens
tgatctttggtttgc

SEQ ID NO: 135456 - DNA, 15 bp, Homo sapiens
gatctttggtttgca

SEQ ID NO: 135457 - DNA, 15 bp, Homo sapiens
atctttggtttgcac

SEQ ID NO: 135458 - DNA, 15 bp, Homo sapiens
tctttggtttgcaca

SEQ ID NO: 135459 - DNA, 15 bp, Homo sapiens
ctttggtttgcacaa

SEQ ID NO: 135460 - DNA, 15 bp, Homo sapiens
tttggtttgcacaac

SEQ ID NO: 135461 - DNA, 15 bp, Homo sapiens
ttggtttgcacaaca

SEQ ID NO: 135462 - DNA, 15 bp, Homo sapiens
tggtttgcacaacaa

SEQ ID NO: 135463 - DNA, 15 bp, Homo sapiens
ggtttgcacaacaac

SEQ ID NO: 135464 - DNA, 15 bp, Homo sapiens
gtttgcacaacaacc

SEQ ID NO: 135465 - DNA, 15 bp, Homo sapiens
tttgcacaacaacct

SEQ ID NO: 135466 - DNA, 15 bp, Homo sapiens
ttgcacaacaacctg

SEQ ID NO: 135467 - DNA, 15 bp, Homo sapiens
tgcacaacaacctgt

SEQ ID NO: 135468 - DNA, 15 bp, Homo sapiens
gcacaacaacctgtg

SEQ ID NO: 135469 - DNA, 15 bp, Homo sapiens
cacaacaacctgtga

SEQ ID NO: 135470 - DNA, 15 bp, Homo sapiens
acaacaacctgtgaa

SEQ ID NO: 135471 - DNA, 15 bp, Homo sapiens
caacaacctgtgaat

SEQ ID NO: 135472 - DNA, 15 bp, Homo sapiens
aacaacctgtgaatg

SEQ ID NO: 135473 - DNA, 15 bp, Homo sapiens
acaacctgtgaatgt

SEQ ID NO: 135474 - DNA, 15 bp, Homo sapiens
caacctgtgaatgtt

SEQ ID NO: 135475 - DNA, 15 bp, Homo sapiens
aacctgtgaatgtta

SEQ ID NO: 135476 - DNA, 15 bp, Homo sapiens
acctgtgaatgttat

SEQ ID NO: 135477 - DNA, 15 bp, Homo sapiens
cctgtgaatgttatt

SEQ ID NO: 135478 - DNA, 15 bp, Homo sapiens
ctgtgaatgttatta

SEQ ID NO: 135479 - DNA, 15 bp, Homo sapiens
tgtgaatgttattag

SEQ ID NO: 135480 - DNA, 15 bp, Homo sapiens
gtgaatgttattagc

SEQ ID NO: 135481 - DNA, 15 bp, Homo sapiens
tgaatgttattagcc

SEQ ID NO: 135482 - DNA, 15 bp, Homo sapiens
gaatgttattagccc

SEQ ID NO: 135483 - DNA, 15 bp, Homo sapiens
aatgttattagcccc

SEQ ID NO: 135484 - DNA, 15 bp, Homo sapiens
atgttattagccccg

SEQ ID NO: 135485 - DNA, 15 bp, Homo sapiens
tgttattagccccgt

SEQ ID NO: 135486 - DNA, 15 bp, Homo sapiens
gttattagccccgtt

SEQ ID NO: 135487 - DNA, 15 bp, Homo sapiens
ttattagccccgttt

SEQ ID NO: 135488 - DNA, 15 bp, Homo sapiens
tattagccccgtttt

SEQ ID NO: 135489 - DNA, 15 bp, Homo sapiens
attagccccgttttt

SEQ ID NO: 135490 - DNA, 15 bp, Homo sapiens
ttagccccgtttttt

SEQ ID NO: 135491 - DNA, 15 bp, Homo sapiens
tagccccgttttttt

SEQ ID NO: 135492 - DNA, 15 bp, Homo sapiens
agccccgtttttttt

SEQ ID NO: 135493 - DNA, 15 bp, Homo sapiens
gccccgttttttttg

SEQ ID NO: 135494 - DNA, 15 bp, Homo sapiens
ccccgttttttttgt

SEQ ID NO: 135495 - DNA, 15 bp, Homo sapiens
cccgttttttttgtt

SEQ ID NO: 135496 - DNA, 15 bp, Homo sapiens
ccgttttttttgttt

SEQ ID NO: 135497 - DNA, 15 bp, Homo sapiens
cgttttttttgtttg

SEQ ID NO: 135498 - DNA, 15 bp, Homo sapiens
gttttttttgtttgt

SEQ ID NO: 135499 - DNA, 15 bp, Homo sapiens
gtttgtttgtttttt

SEQ ID NO: 135500 - DNA, 15 bp, Homo sapiens
tttgtttgttttttg

SEQ ID NO: 135501 - DNA, 15 bp, Homo sapiens
ttgtttgttttttga

SEQ ID NO: 135502 - DNA, 15 bp, Homo sapiens
tgtttgttttttgag

SEQ ID NO: 135503 - DNA, 15 bp, Homo sapiens
gtttgttttttgaga

SEQ ID NO: 135504 - DNA, 15 bp, Homo sapiens
tttgttttttgagac

SEQ ID NO: 135505 - DNA, 15 bp, Homo sapiens
ttgttttttgagaca

SEQ ID NO: 135506 - DNA, 15 bp, Homo sapiens
tgttttttgagacag

SEQ ID NO: 135507 - DNA, 15 bp, Homo sapiens
gttttttgagacaga

SEQ ID NO: 135508 - DNA, 15 bp, Homo sapiens
ttttgagacagagtg

SEQ ID NO: 135509 - DNA, 15 bp, Homo sapiens
tttgagacagagtgt

SEQ ID NO: 135510 - DNA, 15 bp, Homo sapiens
ttgagacagagtgtc

SEQ ID NO: 135511 - DNA, 15 bp, Homo sapiens
tgagacagagtgtcg

SEQ ID NO: 135512 - DNA, 15 bp, Homo sapiens
gagacagagtgtcgc

SEQ ID NO: 135513 - DNA, 15 bp, Homo sapiens
agacagagtgtcgct

SEQ ID NO: 135514 - DNA, 15 bp, Homo sapiens
gacagagtgtcgctc

SEQ ID NO: 135515 - DNA, 15 bp, Homo sapiens
acagagtgtcgctct

SEQ ID NO: 135516 - DNA, 15 bp, Homo sapiens
cagagtgtcgctctt

SEQ ID NO: 135517 - DNA, 15 bp, Homo sapiens
agagtgtcgctcttg

SEQ ID NO: 135518 - DNA, 15 bp, Homo sapiens
gagtgtcgctcttgt

SEQ ID NO: 135519 - DNA, 15 bp, Homo sapiens
agtgtcgctcttgtt

SEQ ID NO: 135520 - DNA, 15 bp, Homo sapiens
gtgtcgctcttgttg

SEQ ID NO: 135521 - DNA, 15 bp, Homo sapiens
tgtcgctcttgttgc

SEQ ID NO: 135522 - DNA, 15 bp, Homo sapiens
gtcgctcttgttgcc

SEQ ID NO: 135523 - DNA, 15 bp, Homo sapiens
ttgttgcccaggctg

SEQ ID NO: 135524 - DNA, 15 bp, Homo sapiens
ttgcccaggctggat

SEQ ID NO: 135525 - DNA, 15 bp, Homo sapiens
tgcccaggctggatt

SEQ ID NO: 135526 - DNA, 15 bp, Homo sapiens
gcccaggctggattg

SEQ ID NO: 135527 - DNA, 15 bp, Homo sapiens
cccaggctggattgc

SEQ ID NO: 135528 - DNA, 15 bp, Homo sapiens
ccaggctggattgca

SEQ ID NO: 135529 - DNA, 15 bp, Homo sapiens
caggctggattgcaa

SEQ ID NO: 135530 - DNA, 15 bp, Homo sapiens
aggctggattgcaat

SEQ ID NO: 135531 - DNA, 15 bp, Homo sapiens
ggctggattgcaatg

SEQ ID NO: 135532 - DNA, 15 bp, Homo sapiens
gctggattgcaatgg

SEQ ID NO: 135533 - DNA, 15 bp, Homo sapiens
ctggattgcaatggc

SEQ ID NO: 135534 - DNA, 15 bp, Homo sapiens
tggattgcaatggcg

SEQ ID NO: 135535 - DNA, 15 bp, Homo sapiens
ggattgcaatggcgt

SEQ ID NO: 135536 - DNA, 15 bp, Homo sapiens
gattgcaatggcgtg

SEQ ID NO: 135537 - DNA, 15 bp, Homo sapiens
attgcaatggcgtga

SEQ ID NO: 135538 - DNA, 15 bp, Homo sapiens
ttgcaatggcgtgat

SEQ ID NO: 135539 - DNA, 15 bp, Homo sapiens
tgcaatggcgtgatc

SEQ ID NO: 135540 - DNA, 15 bp, Homo sapiens
gcaatggcgtgatct

SEQ ID NO: 135541 - DNA, 15 bp, Homo sapiens
caatggcgtgatctc

SEQ ID NO: 135542 - DNA, 15 bp, Homo sapiens
aatggcgtgatctcg

SEQ ID NO: 135543 - DNA, 15 bp, Homo sapiens
atggcgtgatctcgg

SEQ ID NO: 135544 - DNA, 15 bp, Homo sapiens
tggcgtgatctcggc

SEQ ID NO: 135545 - DNA, 15 bp, Homo sapiens
ggcgtgatctcggct

SEQ ID NO: 135546 - DNA, 15 bp, Homo sapiens
gcgtgatctcggctc

SEQ ID NO: 135547 - DNA, 15 bp, Homo sapiens
cgtgatctcggctca

SEQ ID NO: 135548 - DNA, 15 bp, Homo sapiens
caacctctgcctcca

SEQ ID NO: 135549 - DNA, 15 bp, Homo sapiens
aacctctgcctccaa

SEQ ID NO: 135550 - DNA, 15 bp, Homo sapiens
acctctgcctccaag

SEQ ID NO: 135551 - DNA, 15 bp, Homo sapiens
cctctgcctccaagc

SEQ ID NO: 135552 - DNA, 15 bp, Homo sapiens
ctctgcctccaagca

SEQ ID NO: 135553 - DNA, 15 bp, Homo sapiens
tctgcctccaagcaa

SEQ ID NO: 135554 - DNA, 15 bp, Homo sapiens
ctgcctccaagcaat

SEQ ID NO: 135555 - DNA, 15 bp, Homo sapiens
tgcctccaagcaatt

SEQ ID NO: 135556 - DNA, 15 bp, Homo sapiens
gcctccaagcaattc

SEQ ID NO: 135557 - DNA, 15 bp, Homo sapiens
cctccaagcaattct

SEQ ID NO: 135558 - DNA, 15 bp, Homo sapiens
ctccaagcaattctc

SEQ ID NO: 135559 - DNA, 15 bp, Homo sapiens
tccaagcaattctcc

SEQ ID NO: 135560 - DNA, 15 bp, Homo sapiens
ccaagcaattctcct

SEQ ID NO: 135561 - DNA, 15 bp, Homo sapiens
tctcctgcctcagct

SEQ ID NO: 135562 - DNA, 15 bp, Homo sapiens
ctcctgcctcagctt

SEQ ID NO: 135563 - DNA, 15 bp, Homo sapiens
tcctgcctcagcttc

SEQ ID NO: 135564 - DNA, 15 bp, Homo sapiens
cctgcctcagcttcc

SEQ ID NO: 135565 - DNA, 15 bp, Homo sapiens
ctgcctcagcttcct

SEQ ID NO: 135566 - DNA, 15 bp, Homo sapiens
tgcctcagcttcctg

SEQ ID NO: 135567 - DNA, 15 bp, Homo sapiens
gcctcagcttcctga

SEQ ID NO: 135568 - DNA, 15 bp, Homo sapiens
cctcagcttcctgag

SEQ ID NO: 135569 - DNA, 15 bp, Homo sapiens
ctcagcttcctgagt

SEQ ID NO: 135570 - DNA, 15 bp, Homo sapiens
tcagcttcctgagta

SEQ ID NO: 135571 - DNA, 15 bp, Homo sapiens
cagcttcctgagtag

SEQ ID NO: 135572 - DNA, 15 bp, Homo sapiens
agcttcctgagtagc

SEQ ID NO: 135573 - DNA, 15 bp, Homo sapiens
gcttcctgagtagct

SEQ ID NO: 135574 - DNA, 15 bp, Homo sapiens
cttcctgagtagctg

SEQ ID NO: 135575 - DNA, 15 bp, Homo sapiens
ttcctgagtagctgg

SEQ ID NO: 135576 - DNA, 15 bp, Homo sapiens
gattacaggcatgcg

SEQ ID NO: 135577 - DNA, 15 bp, Homo sapiens
attacaggcatgcgc

SEQ ID NO: 135578 - DNA, 15 bp, Homo sapiens
ttacaggcatgcgcc

SEQ ID NO: 135579 - DNA, 15 bp, Homo sapiens
tacaggcatgcgcca

SEQ ID NO: 135580 - DNA, 15 bp, Homo sapiens
acaggcatgcgccac

SEQ ID NO: 135581 - DNA, 15 bp, Homo sapiens
caggcatgcgccacc

SEQ ID NO: 135582 - DNA, 15 bp, Homo sapiens
aggcatgcgccacca

SEQ ID NO: 135583 - DNA, 15 bp, Homo sapiens
ggcatgcgccaccac

SEQ ID NO: 135584 - DNA, 15 bp, Homo sapiens
gcatgcgccaccaca

SEQ ID NO: 135585 - DNA, 15 bp, Homo sapiens
catgcgccaccacac

SEQ ID NO: 135586 - DNA, 15 bp, Homo sapiens
atgcgccaccacacc

SEQ ID NO: 135587 - DNA, 15 bp, Homo sapiens
tgcgccaccacaccc

SEQ ID NO: 135588 - DNA, 15 bp, Homo sapiens
gcgccaccacacccg

SEQ ID NO: 135589 - DNA, 15 bp, Homo sapiens
cgccaccacacccgg

SEQ ID NO: 135590 - DNA, 15 bp, Homo sapiens
acccggctaattttg

SEQ ID NO: 135591 - DNA, 15 bp, Homo sapiens
gagacggggtttctt

SEQ ID NO: 135592 - DNA, 15 bp, Homo sapiens
agacggggtttcttc

SEQ ID NO: 135593 - DNA, 15 bp, Homo sapiens
gacggggtttcttca

SEQ ID NO: 135594 - DNA, 15 bp, Homo sapiens
acggggtttcttcat

SEQ ID NO: 135595 - DNA, 15 bp, Homo sapiens
cggggtttcttcatg

SEQ ID NO: 135596 - DNA, 15 bp, Homo sapiens
ggggtttcttcatgt

SEQ ID NO: 135597 - DNA, 15 bp, Homo sapiens
gggtttcttcatgtt

SEQ ID NO: 135598 - DNA, 15 bp, Homo sapiens
ggtttcttcatgttg

SEQ ID NO: 135599 - DNA, 15 bp, Homo sapiens
gtttcttcatgttgg

SEQ ID NO: 135600 - DNA, 15 bp, Homo sapiens
tttcttcatgttggt

SEQ ID NO: 135601 - DNA, 15 bp, Homo sapiens
ttcttcatgttggtc

SEQ ID NO: 135602 - DNA, 15 bp, Homo sapiens
tcttcatgttggtca

SEQ ID NO: 135603 - DNA, 15 bp, Homo sapiens
cttcatgttggtcag

SEQ ID NO: 135604 - DNA, 15 bp, Homo sapiens
ttcatgttggtcagg

SEQ ID NO: 135605 - DNA, 15 bp, Homo sapiens
tcatgttggtcaggc

SEQ ID NO: 135606 - DNA, 15 bp, Homo sapiens
tggtctcgaacttcc

SEQ ID NO: 135607 - DNA, 15 bp, Homo sapiens
ggtctcgaacttccg

SEQ ID NO: 135608 - DNA, 15 bp, Homo sapiens
gtctcgaacttccga

SEQ ID NO: 135609 - DNA, 15 bp, Homo sapiens
tctcgaacttccgac

SEQ ID NO: 135610 - DNA, 15 bp, Homo sapiens
ctcgaacttccgacc

SEQ ID NO: 135611 - DNA, 15 bp, Homo sapiens
tcgaacttccgacct

SEQ ID NO: 135612 - DNA, 15 bp, Homo sapiens
cgaacttccgacctc

SEQ ID NO: 135613 - DNA, 15 bp, Homo sapiens
gaacttccgacctca

SEQ ID NO: 135614 - DNA, 15 bp, Homo sapiens
aacttccgacctcag

SEQ ID NO: 135615 - DNA, 15 bp, Homo sapiens
acttccgacctcagt

SEQ ID NO: 135616 - DNA, 15 bp, Homo sapiens
cttccgacctcagtt

SEQ ID NO: 135617 - DNA, 15 bp, Homo sapiens
ttccgacctcagttg

SEQ ID NO: 135618 - DNA, 15 bp, Homo sapiens
tccgacctcagttga

SEQ ID NO: 135619 - DNA, 15 bp, Homo sapiens
ccgacctcagttgat

SEQ ID NO: 135620 - DNA, 15 bp, Homo sapiens
cgacctcagttgatc

SEQ ID NO: 135621 - DNA, 15 bp, Homo sapiens
gacctcagttgatcc

SEQ ID NO: 135622 - DNA, 15 bp, Homo sapiens
acctcagttgatcca

SEQ ID NO: 135623 - DNA, 15 bp, Homo sapiens
cctcagttgatccac

SEQ ID NO: 135624 - DNA, 15 bp, Homo sapiens
ctcagttgatccacc

SEQ ID NO: 135625 - DNA, 15 bp, Homo sapiens
tcagttgatccaccc

SEQ ID NO: 135626 - DNA, 15 bp, Homo sapiens
cagttgatccacccg

SEQ ID NO: 135627 - DNA, 15 bp, Homo sapiens
agttgatccacccgt

SEQ ID NO: 135628 - DNA, 15 bp, Homo sapiens
gttgatccacccgtc

SEQ ID NO: 135629 - DNA, 15 bp, Homo sapiens
ttgatccacccgtct

SEQ ID NO: 135630 - DNA, 15 bp, Homo sapiens
tgatccacccgtctt

SEQ ID NO: 135631 - DNA, 15 bp, Homo sapiens
gatccacccgtcttg

SEQ ID NO: 135632 - DNA, 15 bp, Homo sapiens
atccacccgtcttgg

SEQ ID NO: 135633 - DNA, 15 bp, Homo sapiens
tccacccgtcttggc

SEQ ID NO: 135634 - DNA, 15 bp, Homo sapiens
ccacccgtcttggcc

SEQ ID NO: 135635 - DNA, 15 bp, Homo sapiens
cacccgtcttggcct

SEQ ID NO: 135636 - DNA, 15 bp, Homo sapiens
acccgtcttggcctc

SEQ ID NO: 135637 - DNA, 15 bp, Homo sapiens
cccgtcttggcctcc

SEQ ID NO: 135638 - DNA, 15 bp, Homo sapiens
ccgtcttggcctccc

SEQ ID NO: 135639 - DNA, 15 bp, Homo sapiens
cgtcttggcctccca

SEQ ID NO: 135640 - DNA, 15 bp, Homo sapiens
gtcttggcctcccaa

SEQ ID NO: 135641 - DNA, 15 bp, Homo sapiens
tcttggcctcccaaa

SEQ ID NO: 135642 - DNA, 15 bp, Homo sapiens
ctcccaaagtgctgt

SEQ ID NO: 135643 - DNA, 15 bp, Homo sapiens
tcccaaagtgctgta

SEQ ID NO: 135644 - DNA, 15 bp, Homo sapiens
cccaaagtgctgtat

SEQ ID NO: 135645 - DNA, 15 bp, Homo sapiens
ccaaagtgctgtatt

SEQ ID NO: 135646 - DNA, 15 bp, Homo sapiens
caaagtgctgtatta

SEQ ID NO: 135647 - DNA, 15 bp, Homo sapiens
aaagtgctgtattag

SEQ ID NO: 135648 - DNA, 15 bp, Homo sapiens
aagtgctgtattagc

SEQ ID NO: 135649 - DNA, 15 bp, Homo sapiens
agtgctgtattagcc

SEQ ID NO: 135650 - DNA, 15 bp, Homo sapiens
gtgctgtattagccc

SEQ ID NO: 135651 - DNA, 15 bp, Homo sapiens
tgctgtattagcccc

SEQ ID NO: 135652 - DNA, 15 bp, Homo sapiens
gctgtattagcccca

SEQ ID NO: 135653 - DNA, 15 bp, Homo sapiens
ctgtattagccccat

SEQ ID NO: 135654 - DNA, 15 bp, Homo sapiens
tgtattagccccatt

SEQ ID NO: 135655 - DNA, 15 bp, Homo sapiens
gtattagccccattt

SEQ ID NO: 135656 - DNA, 15 bp, Homo sapiens
tattagccccatttt

SEQ ID NO: 135657 - DNA, 15 bp, Homo sapiens
attagccccatttta

SEQ ID NO: 135658 - DNA, 15 bp, Homo sapiens
ttagccccattttat

SEQ ID NO: 135659 - DNA, 15 bp, Homo sapiens
tagccccattttata

SEQ ID NO: 135660 - DNA, 15 bp, Homo sapiens
agccccattttatat

SEQ ID NO: 135661 - DNA, 15 bp, Homo sapiens
gccccattttatatc

SEQ ID NO: 135662 - DNA, 15 bp, Homo sapiens
ccccattttatatcc

SEQ ID NO: 135663 - DNA, 15 bp, Homo sapiens
cccattttatatcca

SEQ ID NO: 135664 - DNA, 15 bp, Homo sapiens
ccattttatatccaa

SEQ ID NO: 135665 - DNA, 15 bp, Homo sapiens
cattttatatccaag

SEQ ID NO: 135666 - DNA, 15 bp, Homo sapiens
attttatatccaagg

SEQ ID NO: 135667 - DNA, 15 bp, Homo sapiens
ttttatatccaagga

SEQ ID NO: 135668 - DNA, 15 bp, Homo sapiens
tttatatccaaggaa

SEQ ID NO: 135669 - DNA, 15 bp, Homo sapiens
ttatatccaaggaaa

SEQ ID NO: 135670 - DNA, 15 bp, Homo sapiens
tatatccaaggaaac

SEQ ID NO: 135671 - DNA, 15 bp, Homo sapiens
atatccaaggaaact

SEQ ID NO: 135672 - DNA, 15 bp, Homo sapiens
tatccaaggaaactg

SEQ ID NO: 135673 - DNA, 15 bp, Homo sapiens
atccaaggaaactga

SEQ ID NO: 135674 - DNA, 15 bp, Homo sapiens
tccaaggaaactgag

SEQ ID NO: 135675 - DNA, 15 bp, Homo sapiens
ccaaggaaactgagg

SEQ ID NO: 135676 - DNA, 15 bp, Homo sapiens
caaggaaactgaggc

SEQ ID NO: 135677 - DNA, 15 bp, Homo sapiens
aaggaaactgaggct

SEQ ID NO: 135678 - DNA, 15 bp, Homo sapiens
aggaaactgaggctt

SEQ ID NO: 135679 - DNA, 15 bp, Homo sapiens
ggaaactgaggctta

SEQ ID NO: 135680 - DNA, 15 bp, Homo sapiens
gaaactgaggcttag

SEQ ID NO: 135681 - DNA, 15 bp, Homo sapiens
aaactgaggcttagg

SEQ ID NO: 135682 - DNA, 15 bp, Homo sapiens
aactgaggcttaggg

SEQ ID NO: 135683 - DNA, 15 bp, Homo sapiens
actgaggcttaggga

SEQ ID NO: 135684 - DNA, 15 bp, Homo sapiens
ctgaggcttagggag

SEQ ID NO: 135685 - DNA, 15 bp, Homo sapiens
tgaggcttagggaga

SEQ ID NO: 135686 - DNA, 15 bp, Homo sapiens
gaggcttagggagat

SEQ ID NO: 135687 - DNA, 15 bp, Homo sapiens
aggcttagggagatt

SEQ ID NO: 135688 - DNA, 15 bp, Homo sapiens
ggcttagggagattt

SEQ ID NO: 135689 - DNA, 15 bp, Homo sapiens
gcttagggagattta

SEQ ID NO: 135690 - DNA, 15 bp, Homo sapiens
cttagggagatttaa

SEQ ID NO: 135691 - DNA, 15 bp, Homo sapiens
ttagggagatttaaa

SEQ ID NO: 135692 - DNA, 15 bp, Homo sapiens
tagggagatttaaat

SEQ ID NO: 135693 - DNA, 15 bp, Homo sapiens
agggagatttaaata

SEQ ID NO: 135694 - DNA, 15 bp, Homo sapiens
gggagatttaaatag

SEQ ID NO: 135695 - DNA, 15 bp, Homo sapiens
ggagatttaaatagg

SEQ ID NO: 135696 - DNA, 15 bp, Homo sapiens
gagatttaaataggg

SEQ ID NO: 135697 - DNA, 15 bp, Homo sapiens
agatttaaatagggg

SEQ ID NO: 135698 - DNA, 15 bp, Homo sapiens
gatttaaataggggg

SEQ ID NO: 135699 - DNA, 15 bp, Homo sapiens
atttaaatagggggg

SEQ ID NO: 135700 - DNA, 15 bp, Homo sapiens
tttaaatagggggga

SEQ ID NO: 135701 - DNA, 15 bp, Homo sapiens
ttaaataggggggaa

SEQ ID NO: 135702 - DNA, 15 bp, Homo sapiens
taaataggggggaaa

SEQ ID NO: 135703 - DNA, 15 bp, Homo sapiens
aaataggggggaaag

SEQ ID NO: 135704 - DNA, 15 bp, Homo sapiens
aataggggggaaagt

SEQ ID NO: 135705 - DNA, 15 bp, Homo sapiens
ataggggggaaagta

SEQ ID NO: 135706 - DNA, 15 bp, Homo sapiens
taggggggaaagtat

SEQ ID NO: 135707 - DNA, 15 bp, Homo sapiens
aggggggaaagtata

SEQ ID NO: 135708 - DNA, 15 bp, Homo sapiens
ggggggaaagtatag

SEQ ID NO: 135709 - DNA, 15 bp, Homo sapiens
gggggaaagtatagc

SEQ ID NO: 135710 - DNA, 15 bp, Homo sapiens
ggggaaagtatagct

SEQ ID NO: 135711 - DNA, 15 bp, Homo sapiens
gggaaagtatagctt

SEQ ID NO: 135712 - DNA, 15 bp, Homo sapiens
ggaaagtatagcttc

SEQ ID NO: 135713 - DNA, 15 bp, Homo sapiens
gaaagtatagcttca

SEQ ID NO: 135714 - DNA, 15 bp, Homo sapiens
aaagtatagcttcat

SEQ ID NO: 135715 - DNA, 15 bp, Homo sapiens
aagtatagcttcatg

SEQ ID NO: 135716 - DNA, 15 bp, Homo sapiens
agtatagcttcatga

SEQ ID NO: 135717 - DNA, 15 bp, Homo sapiens
gtatagcttcatgat

SEQ ID NO: 135718 - DNA, 15 bp, Homo sapiens
tatagcttcatgatt

SEQ ID NO: 135719 - DNA, 15 bp, Homo sapiens
atagcttcatgatta

SEQ ID NO: 135720 - DNA, 15 bp, Homo sapiens
tagcttcatgattac

SEQ ID NO: 135721 - DNA, 15 bp, Homo sapiens
agcttcatgattaca

SEQ ID NO: 135722 - DNA, 15 bp, Homo sapiens
gcttcatgattacac

SEQ ID NO: 135723 - DNA, 15 bp, Homo sapiens
cttcatgattacaca

SEQ ID NO: 135724 - DNA, 15 bp, Homo sapiens
ttcatgattacacag

SEQ ID NO: 135725 - DNA, 15 bp, Homo sapiens
tcatgattacacagt

SEQ ID NO: 135726 - DNA, 15 bp, Homo sapiens
catgattacacagtc

SEQ ID NO: 135727 - DNA, 15 bp, Homo sapiens
atgattacacagtca

SEQ ID NO: 135728 - DNA, 15 bp, Homo sapiens
tgattacacagtcag

SEQ ID NO: 135729 - DNA, 15 bp, Homo sapiens
gattacacagtcagg

SEQ ID NO: 135730 - DNA, 15 bp, Homo sapiens
attacacagtcagga

SEQ ID NO: 135731 - DNA, 15 bp, Homo sapiens
ttacacagtcaggaa

SEQ ID NO: 135732 - DNA, 15 bp, Homo sapiens
tacacagtcaggaaa

SEQ ID NO: 135733 - DNA, 15 bp, Homo sapiens
acacagtcaggaaat

SEQ ID NO: 135734 - DNA, 15 bp, Homo sapiens
cacagtcaggaaatg

SEQ ID NO: 135735 - DNA, 15 bp, Homo sapiens
acagtcaggaaatgg

SEQ ID NO: 135736 - DNA, 15 bp, Homo sapiens
cagtcaggaaatggc

SEQ ID NO: 135737 - DNA, 15 bp, Homo sapiens
agtcaggaaatggca

SEQ ID NO: 135738 - DNA, 15 bp, Homo sapiens
gtcaggaaatggcag

SEQ ID NO: 135739 - DNA, 15 bp, Homo sapiens
tcaggaaatggcaga

SEQ ID NO: 135740 - DNA, 15 bp, Homo sapiens
caggaaatggcagag

SEQ ID NO: 135741 - DNA, 15 bp, Homo sapiens
aggaaatggcagagc

SEQ ID NO: 135742 - DNA, 15 bp, Homo sapiens
ggaaatggcagagct

SEQ ID NO: 135743 - DNA, 15 bp, Homo sapiens
gaaatggcagagctg

SEQ ID NO: 135744 - DNA, 15 bp, Homo sapiens
aaatggcagagctga

SEQ ID NO: 135745 - DNA, 15 bp, Homo sapiens
aatggcagagctgac

SEQ ID NO: 135746 - DNA, 15 bp, Homo sapiens
atggcagagctgact

SEQ ID NO: 135747 - DNA, 15 bp, Homo sapiens
tggcagagctgactc

SEQ ID NO: 135748 - DNA, 15 bp, Homo sapiens
ggcagagctgactct

SEQ ID NO: 135749 - DNA, 15 bp, Homo sapiens
gcagagctgactctt

SEQ ID NO: 135750 - DNA, 15 bp, Homo sapiens
cagagctgactcttg

SEQ ID NO: 135751 - DNA, 15 bp, Homo sapiens
agagctgactcttga

SEQ ID NO: 135752 - DNA, 15 bp, Homo sapiens
gagctgactcttgaa

SEQ ID NO: 135753 - DNA, 15 bp, Homo sapiens
agctgactcttgaat

SEQ ID NO: 135754 - DNA, 15 bp, Homo sapiens
gctgactcttgaatt

SEQ ID NO: 135755 - DNA, 15 bp, Homo sapiens
ctgactcttgaattc

SEQ ID NO: 135756 - DNA, 15 bp, Homo sapiens
tgactcttgaattca

SEQ ID NO: 135757 - DNA, 15 bp, Homo sapiens
gactcttgaattcag

SEQ ID NO: 135758 - DNA, 15 bp, Homo sapiens
actcttgaattcaga

SEQ ID NO: 135759 - DNA, 15 bp, Homo sapiens
ctcttgaattcagac

SEQ ID NO: 135760 - DNA, 15 bp, Homo sapiens
tcttgaattcagacc

SEQ ID NO: 135761 - DNA, 15 bp, Homo sapiens
cttgaattcagaccc

SEQ ID NO: 135762 - DNA, 15 bp, Homo sapiens
ttgaattcagaccct

SEQ ID NO: 135763 - DNA, 15 bp, Homo sapiens
tgaattcagaccctg

SEQ ID NO: 135764 - DNA, 15 bp, Homo sapiens
gaattcagaccctgt

SEQ ID NO: 135765 - DNA, 15 bp, Homo sapiens
aattcagaccctgtg

SEQ ID NO: 135766 - DNA, 15 bp, Homo sapiens
attcagaccctgtga

SEQ ID NO: 135767 - DNA, 15 bp, Homo sapiens
ttcagaccctgtgat

SEQ ID NO: 135768 - DNA, 15 bp, Homo sapiens
tcagaccctgtgatg

SEQ ID NO: 135769 - DNA, 15 bp, Homo sapiens
cagaccctgtgatgc

SEQ ID NO: 135770 - DNA, 15 bp, Homo sapiens
agaccctgtgatgct

SEQ ID NO: 135771 - DNA, 15 bp, Homo sapiens
gaccctgtgatgctg

SEQ ID NO: 135772 - DNA, 15 bp, Homo sapiens
accctgtgatgctgt

SEQ ID NO: 135773 - DNA, 15 bp, Homo sapiens
ccctgtgatgctgta

SEQ ID NO: 135774 - DNA, 15 bp, Homo sapiens
cctgtgatgctgtat

SEQ ID NO: 135775 - DNA, 15 bp, Homo sapiens
ctgtgatgctgtatc

SEQ ID NO: 135776 - DNA, 15 bp, Homo sapiens
tgtgatgctgtatcc

SEQ ID NO: 135777 - DNA, 15 bp, Homo sapiens
gtgatgctgtatcca

SEQ ID NO: 135778 - DNA, 15 bp, Homo sapiens
tgatgctgtatccag

SEQ ID NO: 135779 - DNA, 15 bp, Homo sapiens
gatgctgtatccagt

SEQ ID NO: 135780 - DNA, 15 bp, Homo sapiens
atgctgtatccagtg

SEQ ID NO: 135781 - DNA, 15 bp, Homo sapiens
tgctgtatccagtgc

SEQ ID NO: 135782 - DNA, 15 bp, Homo sapiens
gctgtatccagtgct

SEQ ID NO: 135783 - DNA, 15 bp, Homo sapiens
ctgtatccagtgctg

SEQ ID NO: 135784 - DNA, 15 bp, Homo sapiens
tgtatccagtgctga

SEQ ID NO: 135785 - DNA, 15 bp, Homo sapiens
gtatccagtgctgat

SEQ ID NO: 135786 - DNA, 15 bp, Homo sapiens
tatccagtgctgatt

SEQ ID NO: 135787 - DNA, 15 bp, Homo sapiens
atccagtgctgattt

SEQ ID NO: 135788 - DNA, 15 bp, Homo sapiens
tccagtgctgatttt

SEQ ID NO: 135789 - DNA, 15 bp, Homo sapiens
ccagtgctgattttg

SEQ ID NO: 135790 - DNA, 15 bp, Homo sapiens
cagtgctgattttgt

SEQ ID NO: 135791 - DNA, 15 bp, Homo sapiens
agtgctgattttgtt

SEQ ID NO: 135792 - DNA, 15 bp, Homo sapiens
gtgctgattttgttt

SEQ ID NO: 135793 - DNA, 15 bp, Homo sapiens
tgctgattttgtttt

SEQ ID NO: 135794 - DNA, 15 bp, Homo sapiens
gctgattttgttttg

SEQ ID NO: 135795 - DNA, 15 bp, Homo sapiens
ctgattttgttttgc

SEQ ID NO: 135796 - DNA, 15 bp, Homo sapiens
tgattttgttttgcc

SEQ ID NO: 135797 - DNA, 15 bp, Homo sapiens
gattttgttttgccc

SEQ ID NO: 135798 - DNA, 15 bp, Homo sapiens
attttgttttgccct

SEQ ID NO: 135799 - DNA, 15 bp, Homo sapiens
ttttgttttgccctg

SEQ ID NO: 135800 - DNA, 15 bp, Homo sapiens
tttgttttgccctgt

SEQ ID NO: 135801 - DNA, 15 bp, Homo sapiens
ttgttttgccctgtg

SEQ ID NO: 135802 - DNA, 15 bp, Homo sapiens
tgttttgccctgtgt

SEQ ID NO: 135803 - DNA, 15 bp, Homo sapiens
gttttgccctgtgtt

SEQ ID NO: 135804 - DNA, 15 bp, Homo sapiens
ttttgccctgtgttc

SEQ ID NO: 135805 - DNA, 15 bp, Homo sapiens
tttgccctgtgttcc

SEQ ID NO: 135806 - DNA, 15 bp, Homo sapiens
ttgccctgtgttcct

SEQ ID NO: 135807 - DNA, 15 bp, Homo sapiens
tgccctgtgttcctt

SEQ ID NO: 135808 - DNA, 15 bp, Homo sapiens
gccctgtgttccttt

SEQ ID NO: 135809 - DNA, 15 bp, Homo sapiens
ccctgtgttcctttc

SEQ ID NO: 135810 - DNA, 15 bp, Homo sapiens
cctgtgttcctttca

SEQ ID NO: 135811 - DNA, 15 bp, Homo sapiens
ctgtgttcctttcag

SEQ ID NO: 135812 - DNA, 15 bp, Homo sapiens
tgtgttcctttcagt

SEQ ID NO: 135813 - DNA, 15 bp, Homo sapiens
gtgttcctttcagtg

SEQ ID NO: 135814 - DNA, 15 bp, Homo sapiens
tgttcctttcagtgt

SEQ ID NO: 135815 - DNA, 15 bp, Homo sapiens
gttcctttcagtgtc

SEQ ID NO: 135816 - DNA, 15 bp, Homo sapiens
ttcctttcagtgtca

SEQ ID NO: 135817 - DNA, 15 bp, Homo sapiens
tcctttcagtgtcag

SEQ ID NO: 135818 - DNA, 15 bp, Homo sapiens
cctttcagtgtcagg

SEQ ID NO: 135819 - DNA, 15 bp, Homo sapiens
ctttcagtgtcaggt

SEQ ID NO: 135820 - DNA, 15 bp, Homo sapiens
tttcagtgtcaggta

SEQ ID NO: 135821 - DNA, 15 bp, Homo sapiens
ttcagtgtcaggtaa

SEQ ID NO: 135822 - DNA, 15 bp, Homo sapiens
tcagtgtcaggtaag

SEQ ID NO: 135823 - DNA, 15 bp, Homo sapiens
cagtgtcaggtaaga

SEQ ID NO: 135824 - DNA, 15 bp, Homo sapiens
agtgtcaggtaagaa

SEQ ID NO: 135825 - DNA, 15 bp, Homo sapiens
gtgtcaggtaagaag

SEQ ID NO: 135826 - DNA, 15 bp, Homo sapiens
tgtcaggtaagaaga

SEQ ID NO: 135827 - DNA, 15 bp, Homo sapiens
gtcaggtaagaagac

SEQ ID NO: 135828 - DNA, 15 bp, Homo sapiens
tcaggtaagaagacc

SEQ ID NO: 135829 - DNA, 15 bp, Homo sapiens
caggtaagaagacct

SEQ ID NO: 135830 - DNA, 15 bp, Homo sapiens
aggtaagaagacctc

SEQ ID NO: 135831 - DNA, 15 bp, Homo sapiens
ggtaagaagacctca

SEQ ID NO: 135832 - DNA, 15 bp, Homo sapiens
gtaagaagacctcag

SEQ ID NO: 135833 - DNA, 15 bp, Homo sapiens
taagaagacctcaga

SEQ ID NO: 135834 - DNA, 15 bp, Homo sapiens
aagaagacctcagag

SEQ ID NO: 135835 - DNA, 15 bp, Homo sapiens
agaagacctcagaga

SEQ ID NO: 135836 - DNA, 15 bp, Homo sapiens
gaagacctcagagat

SEQ ID NO: 135837 - DNA, 15 bp, Homo sapiens
aagacctcagagatc

SEQ ID NO: 135838 - DNA, 15 bp, Homo sapiens
agacctcagagatca

SEQ ID NO: 135839 - DNA, 15 bp, Homo sapiens
gacctcagagatcat

SEQ ID NO: 135840 - DNA, 15 bp, Homo sapiens
acctcagagatcatc

SEQ ID NO: 135841 - DNA, 15 bp, Homo sapiens
cctcagagatcatct

SEQ ID NO: 135842 - DNA, 15 bp, Homo sapiens
ctcagagatcatctt

SEQ ID NO: 135843 - DNA, 15 bp, Homo sapiens
tcagagatcatcttc

SEQ ID NO: 135844 - DNA, 15 bp, Homo sapiens
cagagatcatcttct

SEQ ID NO: 135845 - DNA, 15 bp, Homo sapiens
agagatcatcttctc

SEQ ID NO: 135846 - DNA, 15 bp, Homo sapiens
gagatcatcttctcc

SEQ ID NO: 135847 - DNA, 15 bp, Homo sapiens
agatcatcttctcca

SEQ ID NO: 135848 - DNA, 15 bp, Homo sapiens
gatcatcttctccaa

SEQ ID NO: 135849 - DNA, 15 bp, Homo sapiens
atcatcttctccaac

SEQ ID NO: 135850 - DNA, 15 bp, Homo sapiens
tcatcttctccaacc

SEQ ID NO: 135851 - DNA, 15 bp, Homo sapiens
catcttctccaaccc

SEQ ID NO: 135852 - DNA, 15 bp, Homo sapiens
atcttctccaaccca

SEQ ID NO: 135853 - DNA, 15 bp, Homo sapiens
tcttctccaacccac

SEQ ID NO: 135854 - DNA, 15 bp, Homo sapiens
cttctccaacccaca

SEQ ID NO: 135855 - DNA, 15 bp, Homo sapiens
ttctccaacccacac

SEQ ID NO: 135856 - DNA, 15 bp, Homo sapiens
tctccaacccacaca

SEQ ID NO: 135857 - DNA, 15 bp, Homo sapiens
ctccaacccacacat

SEQ ID NO: 135858 - DNA, 15 bp, Homo sapiens
tccaacccacacatt

SEQ ID NO: 135859 - DNA, 15 bp, Homo sapiens
ccaacccacacattt

SEQ ID NO: 135860 - DNA, 15 bp, Homo sapiens
caacccacacatttt

SEQ ID NO: 135861 - DNA, 15 bp, Homo sapiens
aacccacacatttta

SEQ ID NO: 135862 - DNA, 15 bp, Homo sapiens
acccacacattttac

SEQ ID NO: 135863 - DNA, 15 bp, Homo sapiens
cccacacattttact

SEQ ID NO: 135864 - DNA, 15 bp, Homo sapiens
ccacacattttactg

SEQ ID NO: 135865 - DNA, 15 bp, Homo sapiens
cacacattttactga

SEQ ID NO: 135866 - DNA, 15 bp, Homo sapiens
acacattttactgat

SEQ ID NO: 135867 - DNA, 15 bp, Homo sapiens
cacattttactgatt

SEQ ID NO: 135868 - DNA, 15 bp, Homo sapiens
acattttactgatta

SEQ ID NO: 135869 - DNA, 15 bp, Homo sapiens
cattttactgattat

SEQ ID NO: 135870 - DNA, 15 bp, Homo sapiens
attttactgattata

SEQ ID NO: 135871 - DNA, 15 bp, Homo sapiens
ttttactgattataa

SEQ ID NO: 135872 - DNA, 15 bp, Homo sapiens
tttactgattataaa

SEQ ID NO: 135873 - DNA, 15 bp, Homo sapiens
ttactgattataaaa

SEQ ID NO: 135874 - DNA, 15 bp, Homo sapiens
tactgattataaaat

SEQ ID NO: 135875 - DNA, 15 bp, Homo sapiens
actgattataaaatc

SEQ ID NO: 135876 - DNA, 15 bp, Homo sapiens
ctgattataaaatcc

SEQ ID NO: 135877 - DNA, 15 bp, Homo sapiens
tgattataaaatcca

SEQ ID NO: 135878 - DNA, 15 bp, Homo sapiens
gattataaaatccag

SEQ ID NO: 135879 - DNA, 15 bp, Homo sapiens
attataaaatccagg

SEQ ID NO: 135880 - DNA, 15 bp, Homo sapiens
ttataaaatccaggt

SEQ ID NO: 135881 - DNA, 15 bp, Homo sapiens
tataaaatccaggtc

SEQ ID NO: 135882 - DNA, 15 bp, Homo sapiens
ataaaatccaggtcc

SEQ ID NO: 135883 - DNA, 15 bp, Homo sapiens
taaaatccaggtccg

SEQ ID NO: 135884 - DNA, 15 bp, Homo sapiens
aaaatccaggtccgc

SEQ ID NO: 135885 - DNA, 15 bp, Homo sapiens
aaatccaggtccgca

SEQ ID NO: 135886 - DNA, 15 bp, Homo sapiens
aatccaggtccgcat

SEQ ID NO: 135887 - DNA, 15 bp, Homo sapiens
atccaggtccgcatt

SEQ ID NO: 135888 - DNA, 15 bp, Homo sapiens
tccaggtccgcatta

SEQ ID NO: 135889 - DNA, 15 bp, Homo sapiens
ccaggtccgcattaa

SEQ ID NO: 135890 - DNA, 15 bp, Homo sapiens
caggtccgcattaac

SEQ ID NO: 135891 - DNA, 15 bp, Homo sapiens
aggtccgcattaact

SEQ ID NO: 135892 - DNA, 15 bp, Homo sapiens
ggtccgcattaactc

SEQ ID NO: 135893 - DNA, 15 bp, Homo sapiens
gtccgcattaactca

SEQ ID NO: 135894 - DNA, 15 bp, Homo sapiens
tccgcattaactcat

SEQ ID NO: 135895 - DNA, 15 bp, Homo sapiens
ccgcattaactcatt

SEQ ID NO: 135896 - DNA, 15 bp, Homo sapiens
cgcattaactcattg

SEQ ID NO: 135897 - DNA, 15 bp, Homo sapiens
gcattaactcattgg

SEQ ID NO: 135898 - DNA, 15 bp, Homo sapiens
cattaactcattggc

SEQ ID NO: 135899 - DNA, 15 bp, Homo sapiens
attaactcattggcc

SEQ ID NO: 135900 - DNA, 15 bp, Homo sapiens
ttaactcattggcca

SEQ ID NO: 135901 - DNA, 15 bp, Homo sapiens
taactcattggccaa

SEQ ID NO: 135902 - DNA, 15 bp, Homo sapiens
aactcattggccaaa

SEQ ID NO: 135903 - DNA, 15 bp, Homo sapiens
actcattggccaaag

SEQ ID NO: 135904 - DNA, 15 bp, Homo sapiens
ctcattggccaaagt

SEQ ID NO: 135905 - DNA, 15 bp, Homo sapiens
tcattggccaaagtt

SEQ ID NO: 135906 - DNA, 15 bp, Homo sapiens
cattggccaaagtta

SEQ ID NO: 135907 - DNA, 15 bp, Homo sapiens
attggccaaagttaa

SEQ ID NO: 135908 - DNA, 15 bp, Homo sapiens
ttggccaaagttaag

SEQ ID NO: 135909 - DNA, 15 bp, Homo sapiens
tggccaaagttaagt

SEQ ID NO: 135910 - DNA, 15 bp, Homo sapiens
ggccaaagttaagtg

SEQ ID NO: 135911 - DNA, 15 bp, Homo sapiens
gccaaagttaagtgg

SEQ ID NO: 135912 - DNA, 15 bp, Homo sapiens
ccaaagttaagtggc

SEQ ID NO: 135913 - DNA, 15 bp, Homo sapiens
caaagttaagtggct

SEQ ID NO: 135914 - DNA, 15 bp, Homo sapiens
aaagttaagtggcta

SEQ ID NO: 135915 - DNA, 15 bp, Homo sapiens
aagttaagtggctaa

SEQ ID NO: 135916 - DNA, 15 bp, Homo sapiens
agttaagtggctaaa

SEQ ID NO: 135917 - DNA, 15 bp, Homo sapiens
gttaagtggctaaat

SEQ ID NO: 135918 - DNA, 15 bp, Homo sapiens
ttaagtggctaaatg

SEQ ID NO: 135919 - DNA, 15 bp, Homo sapiens
taagtggctaaatga

SEQ ID NO: 135920 - DNA, 15 bp, Homo sapiens
aagtggctaaatgac

SEQ ID NO: 135921 - DNA, 15 bp, Homo sapiens
agtggctaaatgact

SEQ ID NO: 135922 - DNA, 15 bp, Homo sapiens
gtggctaaatgactc

SEQ ID NO: 135923 - DNA, 15 bp, Homo sapiens
tggctaaatgactct

SEQ ID NO: 135924 - DNA, 15 bp, Homo sapiens
ggctaaatgactctc

SEQ ID NO: 135925 - DNA, 15 bp, Homo sapiens
gctaaatgactctcc

SEQ ID NO: 135926 - DNA, 15 bp, Homo sapiens
ctaaatgactctcct

SEQ ID NO: 135927 - DNA, 15 bp, Homo sapiens
taaatgactctcctg

SEQ ID NO: 135928 - DNA, 15 bp, Homo sapiens
aaatgactctcctgt

SEQ ID NO: 135929 - DNA, 15 bp, Homo sapiens
aatgactctcctgtt

SEQ ID NO: 135930 - DNA, 15 bp, Homo sapiens
atgactctcctgttc

SEQ ID NO: 135931 - DNA, 15 bp, Homo sapiens
tgactctcctgttca

SEQ ID NO: 135932 - DNA, 15 bp, Homo sapiens
gactctcctgttcag

SEQ ID NO: 135933 - DNA, 15 bp, Homo sapiens
actctcctgttcagg

SEQ ID NO: 135934 - DNA, 15 bp, Homo sapiens
ctctcctgttcagga

SEQ ID NO: 135935 - DNA, 15 bp, Homo sapiens
tctcctgttcaggaa

SEQ ID NO: 135936 - DNA, 15 bp, Homo sapiens
ctcctgttcaggaag

SEQ ID NO: 135937 - DNA, 15 bp, Homo sapiens
tcctgttcaggaagt

SEQ ID NO: 135938 - DNA, 15 bp, Homo sapiens
cctgttcaggaagta

SEQ ID NO: 135939 - DNA, 15 bp, Homo sapiens
ctgttcaggaagtat

SEQ ID NO: 135940 - DNA, 15 bp, Homo sapiens
tgttcaggaagtatt

SEQ ID NO: 135941 - DNA, 15 bp, Homo sapiens
gttcaggaagtattc

SEQ ID NO: 135942 - DNA, 15 bp, Homo sapiens
ttcaggaagtattcc

SEQ ID NO: 135943 - DNA, 15 bp, Homo sapiens
tcaggaagtattccc

SEQ ID NO: 135944 - DNA, 15 bp, Homo sapiens
caggaagtattccct

SEQ ID NO: 135945 - DNA, 15 bp, Homo sapiens
aggaagtattccctg

SEQ ID NO: 135946 - DNA, 15 bp, Homo sapiens
ggaagtattccctgt

SEQ ID NO: 135947 - DNA, 15 bp, Homo sapiens
gaagtattccctgtc

SEQ ID NO: 135948 - DNA, 15 bp, Homo sapiens
aagtattccctgtct

SEQ ID NO: 135949 - DNA, 15 bp, Homo sapiens
agtattccctgtctt

SEQ ID NO: 135950 - DNA, 15 bp, Homo sapiens
gtattccctgtcttg

SEQ ID NO: 135951 - DNA, 15 bp, Homo sapiens
tattccctgtcttgt

SEQ ID NO: 135952 - DNA, 15 bp, Homo sapiens
attccctgtcttgtg

SEQ ID NO: 135953 - DNA, 15 bp, Homo sapiens
ttccctgtcttgtgt

SEQ ID NO: 135954 - DNA, 15 bp, Homo sapiens
tccctgtcttgtgtg

SEQ ID NO: 135955 - DNA, 15 bp, Homo sapiens
ccctgtcttgtgtgg

SEQ ID NO: 135956 - DNA, 15 bp, Homo sapiens
cctgtcttgtgtgga

SEQ ID NO: 135957 - DNA, 15 bp, Homo sapiens
ctgtcttgtgtggaa

SEQ ID NO: 135958 - DNA, 15 bp, Homo sapiens
tgtcttgtgtggaat

SEQ ID NO: 135959 - DNA, 15 bp, Homo sapiens
gtcttgtgtggaatg

SEQ ID NO: 135960 - DNA, 15 bp, Homo sapiens
tcttgtgtggaatga

SEQ ID NO: 135961 - DNA, 15 bp, Homo sapiens
cttgtgtggaatgat

SEQ ID NO: 135962 - DNA, 15 bp, Homo sapiens
ttgtgtggaatgatt

SEQ ID NO: 135963 - DNA, 15 bp, Homo sapiens
tgtgtggaatgattg

SEQ ID NO: 135964 - DNA, 15 bp, Homo sapiens
gtgtggaatgattgg

SEQ ID NO: 135965 - DNA, 15 bp, Homo sapiens
tgtggaatgattggt

SEQ ID NO: 135966 - DNA, 15 bp, Homo sapiens
gtggaatgattggtc

SEQ ID NO: 135967 - DNA, 15 bp, Homo sapiens
tggaatgattggtct

SEQ ID NO: 135968 - DNA, 15 bp, Homo sapiens
ggaatgattggtctt

SEQ ID NO: 135969 - DNA, 15 bp, Homo sapiens
gaatgattggtcttt

SEQ ID NO: 135970 - DNA, 15 bp, Homo sapiens
aatgattggtctttc

SEQ ID NO: 135971 - DNA, 15 bp, Homo sapiens
atgattggtctttcg

SEQ ID NO: 135972 - DNA, 15 bp, Homo sapiens
tgattggtctttcgt

SEQ ID NO: 135973 - DNA, 15 bp, Homo sapiens
gattggtctttcgtc

SEQ ID NO: 135974 - DNA, 15 bp, Homo sapiens
attggtctttcgtcc

SEQ ID NO: 135975 - DNA, 15 bp, Homo sapiens
ttggtctttcgtcca

SEQ ID NO: 135976 - DNA, 15 bp, Homo sapiens
tggtctttcgtccag

SEQ ID NO: 135977 - DNA, 15 bp, Homo sapiens
ggtctttcgtccagg

SEQ ID NO: 135978 - DNA, 15 bp, Homo sapiens
gtctttcgtccaggt

SEQ ID NO: 135979 - DNA, 15 bp, Homo sapiens
tctttcgtccaggtc

SEQ ID NO: 135980 - DNA, 15 bp, Homo sapiens
ctttcgtccaggtca

SEQ ID NO: 135981 - DNA, 15 bp, Homo sapiens
tttcgtccaggtcat

SEQ ID NO: 135982 - DNA, 15 bp, Homo sapiens
ttcgtccaggtcatc

SEQ ID NO: 135983 - DNA, 15 bp, Homo sapiens
tcgtccaggtcatct

SEQ ID NO: 135984 - DNA, 15 bp, Homo sapiens
cgtccaggtcatctt

SEQ ID NO: 135985 - DNA, 15 bp, Homo sapiens
gtccaggtcatcttc

SEQ ID NO: 135986 - DNA, 15 bp, Homo sapiens
tccaggtcatcttcc

SEQ ID NO: 135987 - DNA, 15 bp, Homo sapiens
ccaggtcatcttcca

SEQ ID NO: 135988 - DNA, 15 bp, Homo sapiens
caggtcatcttccac

SEQ ID NO: 135989 - DNA, 15 bp, Homo sapiens
aggtcatcttccacc

SEQ ID NO: 135990 - DNA, 15 bp, Homo sapiens
ggtcatcttccacct

SEQ ID NO: 135991 - DNA, 15 bp, Homo sapiens
gtcatcttccaccta

SEQ ID NO: 135992 - DNA, 15 bp, Homo sapiens
tcatcttccacctat

SEQ ID NO: 135993 - DNA, 15 bp, Homo sapiens
catcttccacctata

SEQ ID NO: 135994 - DNA, 15 bp, Homo sapiens
atcttccacctatat

SEQ ID NO: 135995 - DNA, 15 bp, Homo sapiens
tcttccacctatatc

SEQ ID NO: 135996 - DNA, 15 bp, Homo sapiens
cttccacctatatcc

SEQ ID NO: 135997 - DNA, 15 bp, Homo sapiens
ttccacctatatcca

SEQ ID NO: 135998 - DNA, 15 bp, Homo sapiens
tccacctatatccat

SEQ ID NO: 135999 - DNA, 15 bp, Homo sapiens
ccacctatatccatc

SEQ ID NO: 136000 - DNA, 15 bp, Homo sapiens
cacctatatccatcc

SEQ ID NO: 136001 - DNA, 15 bp, Homo sapiens
acctatatccatcct

SEQ ID NO: 136002 - DNA, 15 bp, Homo sapiens
cctatatccatcctt

SEQ ID NO: 136003 - DNA, 15 bp, Homo sapiens
ctatatccatccttg

SEQ ID NO: 136004 - DNA, 15 bp, Homo sapiens
tatatccatccttgc

SEQ ID NO: 136005 - DNA, 15 bp, Homo sapiens
atatccatccttgca

SEQ ID NO: 136006 - DNA, 15 bp, Homo sapiens
tatccatccttgcag

SEQ ID NO: 136007 - DNA, 15 bp, Homo sapiens
atccatccttgcagt

SEQ ID NO: 136008 - DNA, 15 bp, Homo sapiens
tccatccttgcagtg

SEQ ID NO: 136009 - DNA, 15 bp, Homo sapiens
ccatccttgcagtga

SEQ ID NO: 136010 - DNA, 15 bp, Homo sapiens
catccttgcagtgac

SEQ ID NO: 136011 - DNA, 15 bp, Homo sapiens
atccttgcagtgact

SEQ ID NO: 136012 - DNA, 15 bp, Homo sapiens
tccttgcagtgactg

SEQ ID NO: 136013 - DNA, 15 bp, Homo sapiens
ccttgcagtgactgg

SEQ ID NO: 136014 - DNA, 15 bp, Homo sapiens
cttgcagtgactggt

SEQ ID NO: 136015 - DNA, 15 bp, Homo sapiens
ttgcagtgactggtg

SEQ ID NO: 136016 - DNA, 15 bp, Homo sapiens
tgcagtgactggtgg

SEQ ID NO: 136017 - DNA, 15 bp, Homo sapiens
gcagtgactggtgga

SEQ ID NO: 136018 - DNA, 15 bp, Homo sapiens
cagtgactggtggat

SEQ ID NO: 136019 - DNA, 15 bp, Homo sapiens
agtgactggtggata

SEQ ID NO: 136020 - DNA, 15 bp, Homo sapiens
gtgactggtggatat

SEQ ID NO: 136021 - DNA, 15 bp, Homo sapiens
tgactggtggatatg

SEQ ID NO: 136022 - DNA, 15 bp, Homo sapiens
gactggtggatatga

SEQ ID NO: 136023 - DNA, 15 bp, Homo sapiens
actggtggatatgat

SEQ ID NO: 136024 - DNA, 15 bp, Homo sapiens
ctggtggatatgatc

SEQ ID NO: 136025 - DNA, 15 bp, Homo sapiens
tggtggatatgatca

SEQ ID NO: 136026 - DNA, 15 bp, Homo sapiens
ggtggatatgatcat

SEQ ID NO: 136027 - DNA, 15 bp, Homo sapiens
gtggatatgatcatt

SEQ ID NO: 136028 - DNA, 15 bp, Homo sapiens
tggatatgatcattc

SEQ ID NO: 136029 - DNA, 15 bp, Homo sapiens
ggatatgatcattcc

SEQ ID NO: 136030 - DNA, 15 bp, Homo sapiens
gatatgatcattcct

SEQ ID NO: 136031 - DNA, 15 bp, Homo sapiens
atatgatcattcctg

SEQ ID NO: 136032 - DNA, 15 bp, Homo sapiens
tatgatcattcctgg

SEQ ID NO: 136033 - DNA, 15 bp, Homo sapiens
atgatcattcctggt

SEQ ID NO: 136034 - DNA, 15 bp, Homo sapiens
tgatcattcctggtg

SEQ ID NO: 136035 - DNA, 15 bp, Homo sapiens
gatcattcctggtga

SEQ ID NO: 136036 - DNA, 15 bp, Homo sapiens
atcattcctggtgat

SEQ ID NO: 136037 - DNA, 15 bp, Homo sapiens
tcattcctggtgatt

SEQ ID NO: 136038 - DNA, 15 bp, Homo sapiens
cattcctggtgattc

SEQ ID NO: 136039 - DNA, 15 bp, Homo sapiens
attcctggtgattcc

SEQ ID NO: 136040 - DNA, 15 bp, Homo sapiens
ttcctggtgattccc

SEQ ID NO: 136041 - DNA, 15 bp, Homo sapiens
tcctggtgattccct

SEQ ID NO: 136042 - DNA, 15 bp, Homo sapiens
cctggtgattccctg

SEQ ID NO: 136043 - DNA, 15 bp, Homo sapiens
ctggtgattccctgt

SEQ ID NO: 136044 - DNA, 15 bp, Homo sapiens
tggtgattccctgta

SEQ ID NO: 136045 - DNA, 15 bp, Homo sapiens
ggtgattccctgtaa

SEQ ID NO: 136046 - DNA, 15 bp, Homo sapiens
gtgattccctgtaaa

SEQ ID NO: 136047 - DNA, 15 bp, Homo sapiens
tgattccctgtaaaa

SEQ ID NO: 136048 - DNA, 15 bp, Homo sapiens
gattccctgtaaaat

SEQ ID NO: 136049 - DNA, 15 bp, Homo sapiens
attccctgtaaaata

SEQ ID NO: 136050 - DNA, 15 bp, Homo sapiens
ttccctgtaaaatac

SEQ ID NO: 136051 - DNA, 15 bp, Homo sapiens
tccctgtaaaatact

SEQ ID NO: 136052 - DNA, 15 bp, Homo sapiens
ccctgtaaaatacta

SEQ ID NO: 136053 - DNA, 15 bp, Homo sapiens
cctgtaaaatactag

SEQ ID NO: 136054 - DNA, 15 bp, Homo sapiens
ctgtaaaatactaga

SEQ ID NO: 136055 - DNA, 15 bp, Homo sapiens
tgtaaaatactagat

SEQ ID NO: 136056 - DNA, 15 bp, Homo sapiens
gtaaaatactagatt

SEQ ID NO: 136057 - DNA, 15 bp, Homo sapiens
taaaatactagattt

SEQ ID NO: 136058 - DNA, 15 bp, Homo sapiens
aaaatactagattta

SEQ ID NO: 136059 - DNA, 15 bp, Homo sapiens
aaatactagatttat

SEQ ID NO: 136060 - DNA, 15 bp, Homo sapiens
aatactagatttatt

SEQ ID NO: 136061 - DNA, 15 bp, Homo sapiens
atactagatttattt

SEQ ID NO: 136062 - DNA, 15 bp, Homo sapiens
tactagatttattta

SEQ ID NO: 136063 - DNA, 15 bp, Homo sapiens
actagatttatttat

SEQ ID NO: 136064 - DNA, 15 bp, Homo sapiens
ctagatttatttatt

SEQ ID NO: 136065 - DNA, 15 bp, Homo sapiens
tagatttatttattc

SEQ ID NO: 136066 - DNA, 15 bp, Homo sapiens
agatttatttattct

SEQ ID NO: 136067 - DNA, 15 bp, Homo sapiens
gatttatttattctt

SEQ ID NO: 136068 - DNA, 15 bp, Homo sapiens
atttatttattcttt

SEQ ID NO: 136069 - DNA, 15 bp, Homo sapiens
tttatttattctttc

SEQ ID NO: 136070 - DNA, 15 bp, Homo sapiens
ttatttattctttca

SEQ ID NO: 136071 - DNA, 15 bp, Homo sapiens
tatttattctttcat

SEQ ID NO: 136072 - DNA, 15 bp, Homo sapiens
atttattctttcata

SEQ ID NO: 136073 - DNA, 15 bp, Homo sapiens
tttattctttcataa

SEQ ID NO: 136074 - DNA, 15 bp, Homo sapiens
ttattctttcataaa

SEQ ID NO: 136075 - DNA, 15 bp, Homo sapiens
tattctttcataaag

SEQ ID NO: 136076 - DNA, 15 bp, Homo sapiens
attctttcataaagt

SEQ ID NO: 136077 - DNA, 15 bp, Homo sapiens
ttctttcataaagtt

SEQ ID NO: 136078 - DNA, 15 bp, Homo sapiens
tctttcataaagtta

SEQ ID NO: 136079 - DNA, 15 bp, Homo sapiens
ctttcataaagttat

SEQ ID NO: 136080 - DNA, 15 bp, Homo sapiens
tttcataaagttatg

SEQ ID NO: 136081 - DNA, 15 bp, Homo sapiens
ttcataaagttatga

SEQ ID NO: 136082 - DNA, 15 bp, Homo sapiens
tcataaagttatgag

SEQ ID NO: 136083 - DNA, 15 bp, Homo sapiens
cataaagttatgagt

SEQ ID NO: 136084 - DNA, 15 bp, Homo sapiens
ataaagttatgagta

SEQ ID NO: 136085 - DNA, 15 bp, Homo sapiens
taaagttatgagtag

SEQ ID NO: 136086 - DNA, 15 bp, Homo sapiens
aaagttatgagtaga

SEQ ID NO: 136087 - DNA, 15 bp, Homo sapiens
aagttatgagtagac

SEQ ID NO: 136088 - DNA, 15 bp, Homo sapiens
agttatgagtagaca

SEQ ID NO: 136089 - DNA, 15 bp, Homo sapiens
gttatgagtagacaa

SEQ ID NO: 136090 - DNA, 15 bp, Homo sapiens
ttatgagtagacaaa

SEQ ID NO: 136091 - DNA, 15 bp, Homo sapiens
tatgagtagacaaat

SEQ ID NO: 136092 - DNA, 15 bp, Homo sapiens
atgagtagacaaatc

SEQ ID NO: 136093 - DNA, 15 bp, Homo sapiens
tgagtagacaaatca

SEQ ID NO: 136094 - DNA, 15 bp, Homo sapiens
gagtagacaaatcag

SEQ ID NO: 136095 - DNA, 15 bp, Homo sapiens
agtagacaaatcagt

SEQ ID NO: 136096 - DNA, 15 bp, Homo sapiens
gtagacaaatcagtc

SEQ ID NO: 136097 - DNA, 15 bp, Homo sapiens
tagacaaatcagtca

SEQ ID NO: 136098 - DNA, 15 bp, Homo sapiens
agacaaatcagtcag

SEQ ID NO: 136099 - DNA, 15 bp, Homo sapiens
gacaaatcagtcagc

SEQ ID NO: 136100 - DNA, 15 bp, Homo sapiens
acaaatcagtcagct

SEQ ID NO: 136101 - DNA, 15 bp, Homo sapiens
caaatcagtcagctt

SEQ ID NO: 136102 - DNA, 15 bp, Homo sapiens
aaatcagtcagcttc

SEQ ID NO: 136103 - DNA, 15 bp, Homo sapiens
aatcagtcagcttca

SEQ ID NO: 136104 - DNA, 15 bp, Homo sapiens
atcagtcagcttcaa

SEQ ID NO: 136105 - DNA, 15 bp, Homo sapiens
tcagtcagcttcaac

SEQ ID NO: 136106 - DNA, 15 bp, Homo sapiens
cagtcagcttcaacc

SEQ ID NO: 136107 - DNA, 15 bp, Homo sapiens
agtcagcttcaacct

SEQ ID NO: 136108 - DNA, 15 bp, Homo sapiens
gtcagcttcaacctt

SEQ ID NO: 136109 - DNA, 15 bp, Homo sapiens
tcagcttcaaccttt

SEQ ID NO: 136110 - DNA, 15 bp, Homo sapiens
cagcttcaacctttc

SEQ ID NO: 136111 - DNA, 15 bp, Homo sapiens
agcttcaacctttcc

SEQ ID NO: 136112 - DNA, 15 bp, Homo sapiens
gcttcaacctttcct

SEQ ID NO: 136113 - DNA, 15 bp, Homo sapiens
cttcaacctttcctt

SEQ ID NO: 136114 - DNA, 15 bp, Homo sapiens
ttcaacctttccttt

SEQ ID NO: 136115 - DNA, 15 bp, Homo sapiens
tcaacctttccttta

SEQ ID NO: 136116 - DNA, 15 bp, Homo sapiens
caacctttcctttac

SEQ ID NO: 136117 - DNA, 15 bp, Homo sapiens
aacctttcctttacc

SEQ ID NO: 136118 - DNA, 15 bp, Homo sapiens
acctttcctttacct

SEQ ID NO: 136119 - DNA, 15 bp, Homo sapiens
cctttcctttacctt

SEQ ID NO: 136120 - DNA, 15 bp, Homo sapiens
ctttcctttacctta

SEQ ID NO: 136121 - DNA, 15 bp, Homo sapiens
tttcctttaccttat

SEQ ID NO: 136122 - DNA, 15 bp, Homo sapiens
ttcctttaccttata

SEQ ID NO: 136123 - DNA, 15 bp, Homo sapiens
tcctttaccttatag

SEQ ID NO: 136124 - DNA, 15 bp, Homo sapiens
cctttaccttataga

SEQ ID NO: 136125 - DNA, 15 bp, Homo sapiens
ctttaccttatagat

SEQ ID NO: 136126 - DNA, 15 bp, Homo sapiens
tttaccttatagata

SEQ ID NO: 136127 - DNA, 15 bp, Homo sapiens
ttaccttatagatag

SEQ ID NO: 136128 - DNA, 15 bp, Homo sapiens
taccttatagatagt

SEQ ID NO: 136129 - DNA, 15 bp, Homo sapiens
accttatagatagta

SEQ ID NO: 136130 - DNA, 15 bp, Homo sapiens
ccttatagatagtat

SEQ ID NO: 136131 - DNA, 15 bp, Homo sapiens
cttatagatagtatc

SEQ ID NO: 136132 - DNA, 15 bp, Homo sapiens
ttatagatagtatca

SEQ ID NO: 136133 - DNA, 15 bp, Homo sapiens
tatagatagtatcag

SEQ ID NO: 136134 - DNA, 15 bp, Homo sapiens
atagatagtatcagc

SEQ ID NO: 136135 - DNA, 15 bp, Homo sapiens
tagatagtatcagca

SEQ ID NO: 136136 - DNA, 15 bp, Homo sapiens
agatagtatcagcag

SEQ ID NO: 136137 - DNA, 15 bp, Homo sapiens
gatagtatcagcaga

SEQ ID NO: 136138 - DNA, 15 bp, Homo sapiens
atagtatcagcagaa

SEQ ID NO: 136139 - DNA, 15 bp, Homo sapiens
tagtatcagcagaaa

SEQ ID NO: 136140 - DNA, 15 bp, Homo sapiens
agtatcagcagaaag

SEQ ID NO: 136141 - DNA, 15 bp, Homo sapiens
gtatcagcagaaaga

SEQ ID NO: 136142 - DNA, 15 bp, Homo sapiens
tatcagcagaaagaa

SEQ ID NO: 136143 - DNA, 15 bp, Homo sapiens
atcagcagaaagaac

SEQ ID NO: 136144 - DNA, 15 bp, Homo sapiens
tcagcagaaagaact

SEQ ID NO: 136145 - DNA, 15 bp, Homo sapiens
cagcagaaagaactc

SEQ ID NO: 136146 - DNA, 15 bp, Homo sapiens
agcagaaagaactca

SEQ ID NO: 136147 - DNA, 15 bp, Homo sapiens
gcagaaagaactcaa

SEQ ID NO: 136148 - DNA, 15 bp, Homo sapiens
cagaaagaactcaat

SEQ ID NO: 136149 - DNA, 15 bp, Homo sapiens
agaaagaactcaata

SEQ ID NO: 136150 - DNA, 15 bp, Homo sapiens
gaaagaactcaataa

SEQ ID NO: 136151 - DNA, 15 bp, Homo sapiens
aaagaactcaataat

SEQ ID NO: 136152 - DNA, 15 bp, Homo sapiens
aagaactcaataatt

SEQ ID NO: 136153 - DNA, 15 bp, Homo sapiens
agaactcaataattc

SEQ ID NO: 136154 - DNA, 15 bp, Homo sapiens
gaactcaataattct

SEQ ID NO: 136155 - DNA, 15 bp, Homo sapiens
aactcaataattctg

SEQ ID NO: 136156 - DNA, 15 bp, Homo sapiens
actcaataattctgt

SEQ ID NO: 136157 - DNA, 15 bp, Homo sapiens
ctcaataattctgtc

SEQ ID NO: 136158 - DNA, 15 bp, Homo sapiens
tcaataattctgtct

SEQ ID NO: 136159 - DNA, 15 bp, Homo sapiens
caataattctgtctt

SEQ ID NO: 136160 - DNA, 15 bp, Homo sapiens
aataattctgtctta

SEQ ID NO: 136161 - DNA, 15 bp, Homo sapiens
ataattctgtcttag

SEQ ID NO: 136162 - DNA, 15 bp, Homo sapiens
taattctgtcttagg

SEQ ID NO: 136163 - DNA, 15 bp, Homo sapiens
aattctgtcttagga

SEQ ID NO: 136164 - DNA, 15 bp, Homo sapiens
attctgtcttaggaa

SEQ ID NO: 136165 - DNA, 15 bp, Homo sapiens
ttctgtcttaggaac

SEQ ID NO: 136166 - DNA, 15 bp, Homo sapiens
tctgtcttaggaact

SEQ ID NO: 136167 - DNA, 15 bp, Homo sapiens
ctgtcttaggaactc

SEQ ID NO: 136168 - DNA, 15 bp, Homo sapiens
tgtcttaggaactca

SEQ ID NO: 136169 - DNA, 15 bp, Homo sapiens
gtcttaggaactcag

SEQ ID NO: 136170 - DNA, 15 bp, Homo sapiens
tcttaggaactcagc

SEQ ID NO: 136171 - DNA, 15 bp, Homo sapiens
cttaggaactcagcc

SEQ ID NO: 136172 - DNA, 15 bp, Homo sapiens
ttaggaactcagcca

SEQ ID NO: 136173 - DNA, 15 bp, Homo sapiens
taggaactcagccag

SEQ ID NO: 136174 - DNA, 15 bp, Homo sapiens
aggaactcagccagg

SEQ ID NO: 136175 - DNA, 15 bp, Homo sapiens
ggaactcagccaggc

SEQ ID NO: 136176 - DNA, 15 bp, Homo sapiens
gaactcagccaggct

SEQ ID NO: 136177 - DNA, 15 bp, Homo sapiens
aactcagccaggcta

SEQ ID NO: 136178 - DNA, 15 bp, Homo sapiens
actcagccaggctaa

SEQ ID NO: 136179 - DNA, 15 bp, Homo sapiens
ctcagccaggctaat

SEQ ID NO: 136180 - DNA, 15 bp, Homo sapiens
tcagccaggctaata

SEQ ID NO: 136181 - DNA, 15 bp, Homo sapiens
cagccaggctaatat

SEQ ID NO: 136182 - DNA, 15 bp, Homo sapiens
agccaggctaatatg

SEQ ID NO: 136183 - DNA, 15 bp, Homo sapiens
gccaggctaatatgt

SEQ ID NO: 136184 - DNA, 15 bp, Homo sapiens
ccaggctaatatgta

SEQ ID NO: 136185 - DNA, 15 bp, Homo sapiens
caggctaatatgtat

SEQ ID NO: 136186 - DNA, 15 bp, Homo sapiens
aggctaatatgtatt

SEQ ID NO: 136187 - DNA, 15 bp, Homo sapiens
ggctaatatgtatta

SEQ ID NO: 136188 - DNA, 15 bp, Homo sapiens
gctaatatgtattat

SEQ ID NO: 136189 - DNA, 15 bp, Homo sapiens
ctaatatgtattata

SEQ ID NO: 136190 - DNA, 15 bp, Homo sapiens
taatatgtattataa

SEQ ID NO: 136191 - DNA, 15 bp, Homo sapiens
aatatgtattataat

SEQ ID NO: 136192 - DNA, 15 bp, Homo sapiens
atatgtattataata

SEQ ID NO: 136193 - DNA, 15 bp, Homo sapiens
tatgtattataatac

SEQ ID NO: 136194 - DNA, 15 bp, Homo sapiens
atgtattataataca

SEQ ID NO: 136195 - DNA, 15 bp, Homo sapiens
tgtattataatacac

SEQ ID NO: 136196 - DNA, 15 bp, Homo sapiens
gtattataatacaca

SEQ ID NO: 136197 - DNA, 15 bp, Homo sapiens
tattataatacacac

SEQ ID NO: 136198 - DNA, 15 bp, Homo sapiens
attataatacacaca

SEQ ID NO: 136199 - DNA, 15 bp, Homo sapiens
ttataatacacacat

SEQ ID NO: 136200 - DNA, 15 bp, Homo sapiens
tataatacacacata

SEQ ID NO: 136201 - DNA, 15 bp, Homo sapiens
ataatacacacatac

SEQ ID NO: 136202 - DNA, 15 bp, Homo sapiens
taatacacacataca

SEQ ID NO: 136203 - DNA, 15 bp, Homo sapiens
aatacacacatacat

SEQ ID NO: 136204 - DNA, 15 bp, Homo sapiens
atacacacatacata

SEQ ID NO: 136205 - DNA, 15 bp, Homo sapiens
tacacacatacatat

SEQ ID NO: 136206 - DNA, 15 bp, Homo sapiens
acacacatacatatg

SEQ ID NO: 136207 - DNA, 15 bp, Homo sapiens
cacacatacatatgc

SEQ ID NO: 136208 - DNA, 15 bp, Homo sapiens
acacatacatatgca

SEQ ID NO: 136209 - DNA, 15 bp, Homo sapiens
cacatacatatgcac

SEQ ID NO: 136210 - DNA, 15 bp, Homo sapiens
acatacatatgcaca

SEQ ID NO: 136211 - DNA, 15 bp, Homo sapiens
catacatatgcacac

SEQ ID NO: 136212 - DNA, 15 bp, Homo sapiens
atacatatgcacaca

SEQ ID NO: 136213 - DNA, 15 bp, Homo sapiens
tacatatgcacacac

SEQ ID NO: 136214 - DNA, 15 bp, Homo sapiens
acatatgcacacaca

SEQ ID NO: 136215 - DNA, 15 bp, Homo sapiens
catatgcacacacat

SEQ ID NO: 136216 - DNA, 15 bp, Homo sapiens
atatgcacacacata

SEQ ID NO: 136217 - DNA, 15 bp, Homo sapiens
tatgcacacacatac

SEQ ID NO: 136218 - DNA, 15 bp, Homo sapiens
atgcacacacataca

SEQ ID NO: 136219 - DNA, 15 bp, Homo sapiens
tgcacacacatacac

SEQ ID NO: 136220 - DNA, 15 bp, Homo sapiens
gcacacacatacaca

SEQ ID NO: 136221 - DNA, 15 bp, Homo sapiens
cacacatacacacat

SEQ ID NO: 136222 - DNA, 15 bp, Homo sapiens
acacatacacacatg

SEQ ID NO: 136223 - DNA, 15 bp, Homo sapiens
cacatacacacatgt

SEQ ID NO: 136224 - DNA, 15 bp, Homo sapiens
acatacacacatgtg

SEQ ID NO: 136225 - DNA, 15 bp, Homo sapiens
catacacacatgtgc

SEQ ID NO: 136226 - DNA, 15 bp, Homo sapiens
atacacacatgtgca

SEQ ID NO: 136227 - DNA, 15 bp, Homo sapiens
tacacacatgtgcat

SEQ ID NO: 136228 - DNA, 15 bp, Homo sapiens
acacacatgtgcata

SEQ ID NO: 136229 - DNA, 15 bp, Homo sapiens
cacacatgtgcatac

SEQ ID NO: 136230 - DNA, 15 bp, Homo sapiens
acacatgtgcatacc

SEQ ID NO: 136231 - DNA, 15 bp, Homo sapiens
cacatgtgcatacct

SEQ ID NO: 136232 - DNA, 15 bp, Homo sapiens
acatgtgcatacctt

SEQ ID NO: 136233 - DNA, 15 bp, Homo sapiens
catgtgcatacctta

SEQ ID NO: 136234 - DNA, 15 bp, Homo sapiens
atgtgcataccttag

SEQ ID NO: 136235 - DNA, 15 bp, Homo sapiens
tgtgcataccttaga

SEQ ID NO: 136236 - DNA, 15 bp, Homo sapiens
gtgcataccttagat

SEQ ID NO: 136237 - DNA, 15 bp, Homo sapiens
tgcataccttagatc

SEQ ID NO: 136238 - DNA, 15 bp, Homo sapiens
gcataccttagatca

SEQ ID NO: 136239 - DNA, 15 bp, Homo sapiens
cataccttagatcac

SEQ ID NO: 136240 - DNA, 15 bp, Homo sapiens
ataccttagatcaca

SEQ ID NO: 136241 - DNA, 15 bp, Homo sapiens
taccttagatcacaa

SEQ ID NO: 136242 - DNA, 15 bp, Homo sapiens
accttagatcacaaa

SEQ ID NO: 136243 - DNA, 15 bp, Homo sapiens
ccttagatcacaaat

SEQ ID NO: 136244 - DNA, 15 bp, Homo sapiens
cttagatcacaaatt

SEQ ID NO: 136245 - DNA, 15 bp, Homo sapiens
ttagatcacaaattc

SEQ ID NO: 136246 - DNA, 15 bp, Homo sapiens
tagatcacaaattca

SEQ ID NO: 136247 - DNA, 15 bp, Homo sapiens
agatcacaaattcaa

SEQ ID NO: 136248 - DNA, 15 bp, Homo sapiens
gatcacaaattcaac

SEQ ID NO: 136249 - DNA, 15 bp, Homo sapiens
atcacaaattcaaca

SEQ ID NO: 136250 - DNA, 15 bp, Homo sapiens
tcacaaattcaacat

SEQ ID NO: 136251 - DNA, 15 bp, Homo sapiens
cacaaattcaacatc

SEQ ID NO: 136252 - DNA, 15 bp, Homo sapiens
acaaattcaacatct

SEQ ID NO: 136253 - DNA, 15 bp, Homo sapiens
caaattcaacatctc

SEQ ID NO: 136254 - DNA, 15 bp, Homo sapiens
aaattcaacatctca

SEQ ID NO: 136255 - DNA, 15 bp, Homo sapiens
aattcaacatctcaa

SEQ ID NO: 136256 - DNA, 15 bp, Homo sapiens
attcaacatctcaac

SEQ ID NO: 136257 - DNA, 15 bp, Homo sapiens
ttcaacatctcaact

SEQ ID NO: 136258 - DNA, 15 bp, Homo sapiens
tcaacatctcaactt

SEQ ID NO: 136259 - DNA, 15 bp, Homo sapiens
caacatctcaactta

SEQ ID NO: 136260 - DNA, 15 bp, Homo sapiens
aacatctcaacttag

SEQ ID NO: 136261 - DNA, 15 bp, Homo sapiens
acatctcaacttagc

SEQ ID NO: 136262 - DNA, 15 bp, Homo sapiens
catctcaacttagcc

SEQ ID NO: 136263 - DNA, 15 bp, Homo sapiens
atctcaacttagccg

SEQ ID NO: 136264 - DNA, 15 bp, Homo sapiens
tctcaacttagccgc

SEQ ID NO: 136265 - DNA, 15 bp, Homo sapiens
ctcaacttagccgcc

SEQ ID NO: 136266 - DNA, 15 bp, Homo sapiens
tcaacttagccgcca

SEQ ID NO: 136267 - DNA, 15 bp, Homo sapiens
caacttagccgccaa

SEQ ID NO: 136268 - DNA, 15 bp, Homo sapiens
aacttagccgccaaa

SEQ ID NO: 136269 - DNA, 15 bp, Homo sapiens
acttagccgccaaag

SEQ ID NO: 136270 - DNA, 15 bp, Homo sapiens
cttagccgccaaagc

SEQ ID NO: 136271 - DNA, 15 bp, Homo sapiens
ttagccgccaaagcc

SEQ ID NO: 136272 - DNA, 15 bp, Homo sapiens
tagccgccaaagcca

SEQ ID NO: 136273 - DNA, 15 bp, Homo sapiens
agccgccaaagccac

SEQ ID NO: 136274 - DNA, 15 bp, Homo sapiens
gccgccaaagccact

SEQ ID NO: 136275 - DNA, 15 bp, Homo sapiens
ccgccaaagccactt

SEQ ID NO: 136276 - DNA, 15 bp, Homo sapiens
cgccaaagccacttc

SEQ ID NO: 136277 - DNA, 15 bp, Homo sapiens
gccaaagccacttct

SEQ ID NO: 136278 - DNA, 15 bp, Homo sapiens
ccaaagccacttctg

SEQ ID NO: 136279 - DNA, 15 bp, Homo sapiens
caaagccacttctgt

SEQ ID NO: 136280 - DNA, 15 bp, Homo sapiens
aaagccacttctgtg

SEQ ID NO: 136281 - DNA, 15 bp, Homo sapiens
aagccacttctgtgt

SEQ ID NO: 136282 - DNA, 15 bp, Homo sapiens
agccacttctgtgtc

SEQ ID NO: 136283 - DNA, 15 bp, Homo sapiens
gccacttctgtgtct

SEQ ID NO: 136284 - DNA, 15 bp, Homo sapiens
ccacttctgtgtctt

SEQ ID NO: 136285 - DNA, 15 bp, Homo sapiens
cacttctgtgtcttg

SEQ ID NO: 136286 - DNA, 15 bp, Homo sapiens
acttctgtgtcttgt

SEQ ID NO: 136287 - DNA, 15 bp, Homo sapiens
cttctgtgtcttgtc

SEQ ID NO: 136288 - DNA, 15 bp, Homo sapiens
ttctgtgtcttgtct

SEQ ID NO: 136289 - DNA, 15 bp, Homo sapiens
tctgtgtcttgtcta

SEQ ID NO: 136290 - DNA, 15 bp, Homo sapiens
ctgtgtcttgtctat

SEQ ID NO: 136291 - DNA, 15 bp, Homo sapiens
tgtgtcttgtctatt

SEQ ID NO: 136292 - DNA, 15 bp, Homo sapiens
gtgtcttgtctattc

SEQ ID NO: 136293 - DNA, 15 bp, Homo sapiens
tgtcttgtctattct

SEQ ID NO: 136294 - DNA, 15 bp, Homo sapiens
gtcttgtctattctg

SEQ ID NO: 136295 - DNA, 15 bp, Homo sapiens
tcttgtctattctga

SEQ ID NO: 136296 - DNA, 15 bp, Homo sapiens
cttgtctattctgaa

SEQ ID NO: 136297 - DNA, 15 bp, Homo sapiens
ttgtctattctgaat

SEQ ID NO: 136298 - DNA, 15 bp, Homo sapiens
tgtctattctgaata

SEQ ID NO: 136299 - DNA, 15 bp, Homo sapiens
gtctattctgaatat

SEQ ID NO: 136300 - DNA, 15 bp, Homo sapiens
tctattctgaatatg

SEQ ID NO: 136301 - DNA, 15 bp, Homo sapiens
ctattctgaatatgc

SEQ ID NO: 136302 - DNA, 15 bp, Homo sapiens
tattctgaatatgct

SEQ ID NO: 136303 - DNA, 15 bp, Homo sapiens
attctgaatatgctt

SEQ ID NO: 136304 - DNA, 15 bp, Homo sapiens
ttctgaatatgcttt

SEQ ID NO: 136305 - DNA, 15 bp, Homo sapiens
tctgaatatgcttta

SEQ ID NO: 136306 - DNA, 15 bp, Homo sapiens
ctgaatatgctttaa

SEQ ID NO: 136307 - DNA, 15 bp, Homo sapiens
tgaatatgctttaag

SEQ ID NO: 136308 - DNA, 15 bp, Homo sapiens
gaatatgctttaagg

SEQ ID NO: 136309 - DNA, 15 bp, Homo sapiens
aatatgctttaaggt

SEQ ID NO: 136310 - DNA, 15 bp, Homo sapiens
atatgctttaaggtt

SEQ ID NO: 136311 - DNA, 15 bp, Homo sapiens
tatgctttaaggtta

SEQ ID NO: 136312 - DNA, 15 bp, Homo sapiens
atgctttaaggttaa

SEQ ID NO: 136313 - DNA, 15 bp, Homo sapiens
tgctttaaggttaaa

SEQ ID NO: 136314 - DNA, 15 bp, Homo sapiens
gctttaaggttaaat

SEQ ID NO: 136315 - DNA, 15 bp, Homo sapiens
ctttaaggttaaatt

SEQ ID NO: 136316 - DNA, 15 bp, Homo sapiens
tttaaggttaaatta

SEQ ID NO: 136317 - DNA, 15 bp, Homo sapiens
ttaaggttaaattag

SEQ ID NO: 136318 - DNA, 15 bp, Homo sapiens
taaggttaaattagc

SEQ ID NO: 136319 - DNA, 15 bp, Homo sapiens
aaggttaaattagcc

SEQ ID NO: 136320 - DNA, 15 bp, Homo sapiens
aggttaaattagcca

SEQ ID NO: 136321 - DNA, 15 bp, Homo sapiens
ggttaaattagccat

SEQ ID NO: 136322 - DNA, 15 bp, Homo sapiens
gttaaattagccatg

SEQ ID NO: 136323 - DNA, 15 bp, Homo sapiens
ttaaattagccatga

SEQ ID NO: 136324 - DNA, 15 bp, Homo sapiens
taaattagccatgaa

SEQ ID NO: 136325 - DNA, 15 bp, Homo sapiens
aaattagccatgaat

SEQ ID NO: 136326 - DNA, 15 bp, Homo sapiens
aattagccatgaatc

SEQ ID NO: 136327 - DNA, 15 bp, Homo sapiens
attagccatgaatct

SEQ ID NO: 136328 - DNA, 15 bp, Homo sapiens
ttagccatgaatctg

SEQ ID NO: 136329 - DNA, 15 bp, Homo sapiens
tagccatgaatctgt

SEQ ID NO: 136330 - DNA, 15 bp, Homo sapiens
agccatgaatctgtt

SEQ ID NO: 136331 - DNA, 15 bp, Homo sapiens
gccatgaatctgttc

SEQ ID NO: 136332 - DNA, 15 bp, Homo sapiens
ccatgaatctgttca

SEQ ID NO: 136333 - DNA, 15 bp, Homo sapiens
catgaatctgttcag

SEQ ID NO: 136334 - DNA, 15 bp, Homo sapiens
atgaatctgttcaga

SEQ ID NO: 136335 - DNA, 15 bp, Homo sapiens
tgaatctgttcagat

SEQ ID NO: 136336 - DNA, 15 bp, Homo sapiens
gaatctgttcagatc

SEQ ID NO: 136337 - DNA, 15 bp, Homo sapiens
aatctgttcagatca

SEQ ID NO: 136338 - DNA, 15 bp, Homo sapiens
atctgttcagatcag

SEQ ID NO: 136339 - DNA, 15 bp, Homo sapiens
tctgttcagatcagt

SEQ ID NO: 136340 - DNA, 15 bp, Homo sapiens
ctgttcagatcagtc

SEQ ID NO: 136341 - DNA, 15 bp, Homo sapiens
tgttcagatcagtca

SEQ ID NO: 136342 - DNA, 15 bp, Homo sapiens
gttcagatcagtcat

SEQ ID NO: 136343 - DNA, 15 bp, Homo sapiens
ttcagatcagtcatt

SEQ ID NO: 136344 - DNA, 15 bp, Homo sapiens
tcagatcagtcattc

SEQ ID NO: 136345 - DNA, 15 bp, Homo sapiens
cagatcagtcattcc

SEQ ID NO: 136346 - DNA, 15 bp, Homo sapiens
agatcagtcattcct

SEQ ID NO: 136347 - DNA, 15 bp, Homo sapiens
gatcagtcattcctg

SEQ ID NO: 136348 - DNA, 15 bp, Homo sapiens
atcagtcattcctga

SEQ ID NO: 136349 - DNA, 15 bp, Homo sapiens
tcagtcattcctgaa

SEQ ID NO: 136350 - DNA, 15 bp, Homo sapiens
cagtcattcctgaaa

SEQ ID NO: 136351 - DNA, 15 bp, Homo sapiens
agtcattcctgaaaa

SEQ ID NO: 136352 - DNA, 15 bp, Homo sapiens
gtcattcctgaaaat

SEQ ID NO: 136353 - DNA, 15 bp, Homo sapiens
tcattcctgaaaatg

SEQ ID NO: 136354 - DNA, 15 bp, Homo sapiens
cattcctgaaaatga

SEQ ID NO: 136355 - DNA, 15 bp, Homo sapiens
attcctgaaaatgat

SEQ ID NO: 136356 - DNA, 15 bp, Homo sapiens
ttcctgaaaatgatg

SEQ ID NO: 136357 - DNA, 15 bp, Homo sapiens
tcctgaaaatgatga

SEQ ID NO: 136358 - DNA, 15 bp, Homo sapiens
cctgaaaatgatgat

SEQ ID NO: 136359 - DNA, 15 bp, Homo sapiens
ctgaaaatgatgatg

SEQ ID NO: 136360 - DNA, 15 bp, Homo sapiens
tgaaaatgatgatga

SEQ ID NO: 136361 - DNA, 15 bp, Homo sapiens
gaaaatgatgatgat

SEQ ID NO: 136362 - DNA, 15 bp, Homo sapiens
aaaatgatgatgata

SEQ ID NO: 136363 - DNA, 15 bp, Homo sapiens
aaatgatgatgatat

SEQ ID NO: 136364 - DNA, 15 bp, Homo sapiens
aatgatgatgatatt

SEQ ID NO: 136365 - DNA, 15 bp, Homo sapiens
atgatgatgatatta

SEQ ID NO: 136366 - DNA, 15 bp, Homo sapiens
tgatgatgatattag

SEQ ID NO: 136367 - DNA, 15 bp, Homo sapiens
gatgatgatattagc

SEQ ID NO: 136368 - DNA, 15 bp, Homo sapiens
atgatgatattagcc

SEQ ID NO: 136369 - DNA, 15 bp, Homo sapiens
tgatgatattagcca

SEQ ID NO: 136370 - DNA, 15 bp, Homo sapiens
gatgatattagccat

SEQ ID NO: 136371 - DNA, 15 bp, Homo sapiens
atgatattagccatc

SEQ ID NO: 136372 - DNA, 15 bp, Homo sapiens
tgatattagccatcc

SEQ ID NO: 136373 - DNA, 15 bp, Homo sapiens
gatattagccatcct

SEQ ID NO: 136374 - DNA, 15 bp, Homo sapiens
atattagccatcctt

SEQ ID NO: 136375 - DNA, 15 bp, Homo sapiens
tattagccatccttt

SEQ ID NO: 136376 - DNA, 15 bp, Homo sapiens
attagccatccttta

SEQ ID NO: 136377 - DNA, 15 bp, Homo sapiens
ttagccatcctttac

SEQ ID NO: 136378 - DNA, 15 bp, Homo sapiens
tagccatcctttacc

SEQ ID NO: 136379 - DNA, 15 bp, Homo sapiens
agccatcctttaccg

SEQ ID NO: 136380 - DNA, 15 bp, Homo sapiens
gccatcctttaccgg

SEQ ID NO: 136381 - DNA, 15 bp, Homo sapiens
ccatcctttaccggg

SEQ ID NO: 136382 - DNA, 15 bp, Homo sapiens
catcctttaccgggc

SEQ ID NO: 136383 - DNA, 15 bp, Homo sapiens
atcctttaccgggca

SEQ ID NO: 136384 - DNA, 15 bp, Homo sapiens
tcctttaccgggcac

SEQ ID NO: 136385 - DNA, 15 bp, Homo sapiens
cctttaccgggcacc

SEQ ID NO: 136386 - DNA, 15 bp, Homo sapiens
ctttaccgggcacct

SEQ ID NO: 136387 - DNA, 15 bp, Homo sapiens
tttaccgggcacctt

SEQ ID NO: 136388 - DNA, 15 bp, Homo sapiens
ttaccgggcacctta

SEQ ID NO: 136389 - DNA, 15 bp, Homo sapiens
taccgggcaccttac

SEQ ID NO: 136390 - DNA, 15 bp, Homo sapiens
accgggcaccttact

SEQ ID NO: 136391 - DNA, 15 bp, Homo sapiens
ccgggcaccttactc

SEQ ID NO: 136392 - DNA, 15 bp, Homo sapiens
cgggcaccttactca

SEQ ID NO: 136393 - DNA, 15 bp, Homo sapiens
gggcaccttactcag

SEQ ID NO: 136394 - DNA, 15 bp, Homo sapiens
ggcaccttactcagt

SEQ ID NO: 136395 - DNA, 15 bp, Homo sapiens
gcaccttactcagtg

SEQ ID NO: 136396 - DNA, 15 bp, Homo sapiens
caccttactcagtgc

SEQ ID NO: 136397 - DNA, 15 bp, Homo sapiens
accttactcagtgcc

SEQ ID NO: 136398 - DNA, 15 bp, Homo sapiens
ccttactcagtgccc

SEQ ID NO: 136399 - DNA, 15 bp, Homo sapiens
cttactcagtgcccg

SEQ ID NO: 136400 - DNA, 15 bp, Homo sapiens
ttactcagtgcccgg

SEQ ID NO: 136401 - DNA, 15 bp, Homo sapiens
tactcagtgcccggc

SEQ ID NO: 136402 - DNA, 15 bp, Homo sapiens
actcagtgcccggca

SEQ ID NO: 136403 - DNA, 15 bp, Homo sapiens
ctcagtgcccggcat

SEQ ID NO: 136404 - DNA, 15 bp, Homo sapiens
tcagtgcccggcatt

SEQ ID NO: 136405 - DNA, 15 bp, Homo sapiens
cagtgcccggcatta

SEQ ID NO: 136406 - DNA, 15 bp, Homo sapiens
agtgcccggcattat

SEQ ID NO: 136407 - DNA, 15 bp, Homo sapiens
gtgcccggcattata

SEQ ID NO: 136408 - DNA, 15 bp, Homo sapiens
tgcccggcattatac

SEQ ID NO: 136409 - DNA, 15 bp, Homo sapiens
gcccggcattatact

SEQ ID NO: 136410 - DNA, 15 bp, Homo sapiens
cccggcattatacta

SEQ ID NO: 136411 - DNA, 15 bp, Homo sapiens
ccggcattatactag

SEQ ID NO: 136412 - DNA, 15 bp, Homo sapiens
cggcattatactagg

SEQ ID NO: 136413 - DNA, 15 bp, Homo sapiens
ggcattatactaggt

SEQ ID NO: 136414 - DNA, 15 bp, Homo sapiens
gcattatactaggtc

SEQ ID NO: 136415 - DNA, 15 bp, Homo sapiens
cattatactaggtct

SEQ ID NO: 136416 - DNA, 15 bp, Homo sapiens
attatactaggtctg

SEQ ID NO: 136417 - DNA, 15 bp, Homo sapiens
ttatactaggtctgc

SEQ ID NO: 136418 - DNA, 15 bp, Homo sapiens
tatactaggtctgca

SEQ ID NO: 136419 - DNA, 15 bp, Homo sapiens
atactaggtctgcag

SEQ ID NO: 136420 - DNA, 15 bp, Homo sapiens
tactaggtctgcagg

SEQ ID NO: 136421 - DNA, 15 bp, Homo sapiens
actaggtctgcaggt

SEQ ID NO: 136422 - DNA, 15 bp, Homo sapiens
ctaggtctgcaggta

SEQ ID NO: 136423 - DNA, 15 bp, Homo sapiens
taggtctgcaggtac

SEQ ID NO: 136424 - DNA, 15 bp, Homo sapiens
aggtctgcaggtaca

SEQ ID NO: 136425 - DNA, 15 bp, Homo sapiens
ggtctgcaggtacat

SEQ ID NO: 136426 - DNA, 15 bp, Homo sapiens
gtctgcaggtacatt

SEQ ID NO: 136427 - DNA, 15 bp, Homo sapiens
tctgcaggtacattt

SEQ ID NO: 136428 - DNA, 15 bp, Homo sapiens
ctgcaggtacatttg

SEQ ID NO: 136429 - DNA, 15 bp, Homo sapiens
tgcaggtacatttgc

SEQ ID NO: 136430 - DNA, 15 bp, Homo sapiens
gcaggtacatttgct

SEQ ID NO: 136431 - DNA, 15 bp, Homo sapiens
caggtacatttgctc

SEQ ID NO: 136432 - DNA, 15 bp, Homo sapiens
aggtacatttgctca

SEQ ID NO: 136433 - DNA, 15 bp, Homo sapiens
ggtacatttgctcat

SEQ ID NO: 136434 - DNA, 15 bp, Homo sapiens
gtacatttgctcatt

SEQ ID NO: 136435 - DNA, 15 bp, Homo sapiens
tacatttgctcattt

SEQ ID NO: 136436 - DNA, 15 bp, Homo sapiens
acatttgctcattta

SEQ ID NO: 136437 - DNA, 15 bp, Homo sapiens
catttgctcatttaa

SEQ ID NO: 136438 - DNA, 15 bp, Homo sapiens
atttgctcatttaac

SEQ ID NO: 136439 - DNA, 15 bp, Homo sapiens
tttgctcatttaaca

SEQ ID NO: 136440 - DNA, 15 bp, Homo sapiens
ttgctcatttaacac

SEQ ID NO: 136441 - DNA, 15 bp, Homo sapiens
tgctcatttaacacc

SEQ ID NO: 136442 - DNA, 15 bp, Homo sapiens
gctcatttaacacct

SEQ ID NO: 136443 - DNA, 15 bp, Homo sapiens
ctcatttaacaccta

SEQ ID NO: 136444 - DNA, 15 bp, Homo sapiens
tcatttaacacctag

SEQ ID NO: 136445 - DNA, 15 bp, Homo sapiens
catttaacacctagc

SEQ ID NO: 136446 - DNA, 15 bp, Homo sapiens
atttaacacctagct

SEQ ID NO: 136447 - DNA, 15 bp, Homo sapiens
tttaacacctagctc

SEQ ID NO: 136448 - DNA, 15 bp, Homo sapiens
ttaacacctagctca

SEQ ID NO: 136449 - DNA, 15 bp, Homo sapiens
taacacctagctcag

SEQ ID NO: 136450 - DNA, 15 bp, Homo sapiens
aacacctagctcagt

SEQ ID NO: 136451 - DNA, 15 bp, Homo sapiens
acacctagctcagtc

SEQ ID NO: 136452 - DNA, 15 bp, Homo sapiens
cacctagctcagtcc

SEQ ID NO: 136453 - DNA, 15 bp, Homo sapiens
acctagctcagtcca

SEQ ID NO: 136454 - DNA, 15 bp, Homo sapiens
cctagctcagtccaa

SEQ ID NO: 136455 - DNA, 15 bp, Homo sapiens
ctagctcagtccaat

SEQ ID NO: 136456 - DNA, 15 bp, Homo sapiens
tagctcagtccaatg

SEQ ID NO: 136457 - DNA, 15 bp, Homo sapiens
agctcagtccaatga

SEQ ID NO: 136458 - DNA, 15 bp, Homo sapiens
gctcagtccaatgag

SEQ ID NO: 136459 - DNA, 15 bp, Homo sapiens
ctcagtccaatgagg

SEQ ID NO: 136460 - DNA, 15 bp, Homo sapiens
tcagtccaatgaggt

SEQ ID NO: 136461 - DNA, 15 bp, Homo sapiens
cagtccaatgaggtg

SEQ ID NO: 136462 - DNA, 15 bp, Homo sapiens
agtccaatgaggtgg

SEQ ID NO: 136463 - DNA, 15 bp, Homo sapiens
gtccaatgaggtgga

SEQ ID NO: 136464 - DNA, 15 bp, Homo sapiens
tccaatgaggtggat

SEQ ID NO: 136465 - DNA, 15 bp, Homo sapiens
ccaatgaggtggatg

SEQ ID NO: 136466 - DNA, 15 bp, Homo sapiens
caatgaggtggatgc

SEQ ID NO: 136467 - DNA, 15 bp, Homo sapiens
aatgaggtggatgcc

SEQ ID NO: 136468 - DNA, 15 bp, Homo sapiens
atgaggtggatgcca

SEQ ID NO: 136469 - DNA, 15 bp, Homo sapiens
tgaggtggatgccat

SEQ ID NO: 136470 - DNA, 15 bp, Homo sapiens
gaggtggatgccatt

SEQ ID NO: 136471 - DNA, 15 bp, Homo sapiens
aggtggatgccattg

SEQ ID NO: 136472 - DNA, 15 bp, Homo sapiens
ggtggatgccattgt

SEQ ID NO: 136473 - DNA, 15 bp, Homo sapiens
gtggatgccattgtc

SEQ ID NO: 136474 - DNA, 15 bp, Homo sapiens
tggatgccattgtca

SEQ ID NO: 136475 - DNA, 15 bp, Homo sapiens
ggatgccattgtcat

SEQ ID NO: 136476 - DNA, 15 bp, Homo sapiens
gatgccattgtcatc

SEQ ID NO: 136477 - DNA, 15 bp, Homo sapiens
atgccattgtcatct

SEQ ID NO: 136478 - DNA, 15 bp, Homo sapiens
tgccattgtcatctc

SEQ ID NO: 136479 - DNA, 15 bp, Homo sapiens
gccattgtcatctcc

SEQ ID NO: 136480 - DNA, 15 bp, Homo sapiens
ccattgtcatctcca

SEQ ID NO: 136481 - DNA, 15 bp, Homo sapiens
cattgtcatctccat

SEQ ID NO: 136482 - DNA, 15 bp, Homo sapiens
attgtcatctccatt

SEQ ID NO: 136483 - DNA, 15 bp, Homo sapiens
ttgtcatctccattt

SEQ ID NO: 136484 - DNA, 15 bp, Homo sapiens
tgtcatctccatttt

SEQ ID NO: 136485 - DNA, 15 bp, Homo sapiens
gtcatctccatttta

SEQ ID NO: 136486 - DNA, 15 bp, Homo sapiens
tcatctccattttat

SEQ ID NO: 136487 - DNA, 15 bp, Homo sapiens
catctccattttatc

SEQ ID NO: 136488 - DNA, 15 bp, Homo sapiens
atctccattttatca

SEQ ID NO: 136489 - DNA, 15 bp, Homo sapiens
tctccattttatcat

SEQ ID NO: 136490 - DNA, 15 bp, Homo sapiens
ctccattttatcatt

SEQ ID NO: 136491 - DNA, 15 bp, Homo sapiens
tccattttatcattt

SEQ ID NO: 136492 - DNA, 15 bp, Homo sapiens
ccattttatcattta

SEQ ID NO: 136493 - DNA, 15 bp, Homo sapiens
cattttatcatttaa

SEQ ID NO: 136494 - DNA, 15 bp, Homo sapiens
attttatcatttaat

SEQ ID NO: 136495 - DNA, 15 bp, Homo sapiens
ttttatcatttaatc

SEQ ID NO: 136496 - DNA, 15 bp, Homo sapiens
tttatcatttaatca

SEQ ID NO: 136497 - DNA, 15 bp, Homo sapiens
ttatcatttaatcaa

SEQ ID NO: 136498 - DNA, 15 bp, Homo sapiens
tatcatttaatcaac

SEQ ID NO: 136499 - DNA, 15 bp, Homo sapiens
atcatttaatcaact

SEQ ID NO: 136500 - DNA, 15 bp, Homo sapiens
tcatttaatcaactc

SEQ ID NO: 136501 - DNA, 15 bp, Homo sapiens
catttaatcaactca

SEQ ID NO: 136502 - DNA, 15 bp, Homo sapiens
atttaatcaactcag

SEQ ID NO: 136503 - DNA, 15 bp, Homo sapiens
tttaatcaactcagc

SEQ ID NO: 136504 - DNA, 15 bp, Homo sapiens
ttaatcaactcagcc

SEQ ID NO: 136505 - DNA, 15 bp, Homo sapiens
taatcaactcagcct

SEQ ID NO: 136506 - DNA, 15 bp, Homo sapiens
aatcaactcagcctt

SEQ ID NO: 136507 - DNA, 15 bp, Homo sapiens
atcaactcagccttc

SEQ ID NO: 136508 - DNA, 15 bp, Homo sapiens
tcaactcagccttcc

SEQ ID NO: 136509 - DNA, 15 bp, Homo sapiens
caactcagccttcct

SEQ ID NO: 136510 - DNA, 15 bp, Homo sapiens
aactcagccttcctc

SEQ ID NO: 136511 - DNA, 15 bp, Homo sapiens
actcagccttcctct

SEQ ID NO: 136512 - DNA, 15 bp, Homo sapiens
ctcagccttcctctc

SEQ ID NO: 136513 - DNA, 15 bp, Homo sapiens
tcagccttcctctct

SEQ ID NO: 136514 - DNA, 15 bp, Homo sapiens
cagccttcctctctc

SEQ ID NO: 136515 - DNA, 15 bp, Homo sapiens
agccttcctctctcc

SEQ ID NO: 136516 - DNA, 15 bp, Homo sapiens
gccttcctctctcct

SEQ ID NO: 136517 - DNA, 15 bp, Homo sapiens
ccttcctctctcctg

SEQ ID NO: 136518 - DNA, 15 bp, Homo sapiens
cttcctctctcctgt

SEQ ID NO: 136519 - DNA, 15 bp, Homo sapiens
ttcctctctcctgtt

SEQ ID NO: 136520 - DNA, 15 bp, Homo sapiens
tcctctctcctgttc

SEQ ID NO: 136521 - DNA, 15 bp, Homo sapiens
cctctctcctgttcc

SEQ ID NO: 136522 - DNA, 15 bp, Homo sapiens
ctctctcctgttccc

SEQ ID NO: 136523 - DNA, 15 bp, Homo sapiens
tctctcctgttcccc

SEQ ID NO: 136524 - DNA, 15 bp, Homo sapiens
ctctcctgttcccca

SEQ ID NO: 136525 - DNA, 15 bp, Homo sapiens
tctcctgttccccac

SEQ ID NO: 136526 - DNA, 15 bp, Homo sapiens
ctcctgttccccact

SEQ ID NO: 136527 - DNA, 15 bp, Homo sapiens
tcctgttccccactc

SEQ ID NO: 136528 - DNA, 15 bp, Homo sapiens
cctgttccccactct

SEQ ID NO: 136529 - DNA, 15 bp, Homo sapiens
ctgttccccactctg

SEQ ID NO: 136530 - DNA, 15 bp, Homo sapiens
tgttccccactctgc

SEQ ID NO: 136531 - DNA, 15 bp, Homo sapiens
gttccccactctgct

SEQ ID NO: 136532 - DNA, 15 bp, Homo sapiens
ttccccactctgctt

SEQ ID NO: 136533 - DNA, 15 bp, Homo sapiens
tccccactctgcttc

SEQ ID NO: 136534 - DNA, 15 bp, Homo sapiens
ccccactctgcttct

SEQ ID NO: 136535 - DNA, 15 bp, Homo sapiens
cccactctgcttcta

SEQ ID NO: 136536 - DNA, 15 bp, Homo sapiens
ccactctgcttctag

SEQ ID NO: 136537 - DNA, 15 bp, Homo sapiens
cactctgcttctagc

SEQ ID NO: 136538 - DNA, 15 bp, Homo sapiens
actctgcttctagct

SEQ ID NO: 136539 - DNA, 15 bp, Homo sapiens
ctctgcttctagctg

SEQ ID NO: 136540 - DNA, 15 bp, Homo sapiens
tctgcttctagctgc

SEQ ID NO: 136541 - DNA, 15 bp, Homo sapiens
ctgcttctagctgcc

SEQ ID NO: 136542 - DNA, 15 bp, Homo sapiens
tgcttctagctgcca

SEQ ID NO: 136543 - DNA, 15 bp, Homo sapiens
gcttctagctgccac

SEQ ID NO: 136544 - DNA, 15 bp, Homo sapiens
cttctagctgccact

SEQ ID NO: 136545 - DNA, 15 bp, Homo sapiens
ttctagctgccactc

SEQ ID NO: 136546 - DNA, 15 bp, Homo sapiens
tctagctgccactca

SEQ ID NO: 136547 - DNA, 15 bp, Homo sapiens
ctagctgccactcac

SEQ ID NO: 136548 - DNA, 15 bp, Homo sapiens
tagctgccactcacc

SEQ ID NO: 136549 - DNA, 15 bp, Homo sapiens
agctgccactcacct

SEQ ID NO: 136550 - DNA, 15 bp, Homo sapiens
gctgccactcacctg

SEQ ID NO: 136551 - DNA, 15 bp, Homo sapiens
ctgccactcacctga

SEQ ID NO: 136552 - DNA, 15 bp, Homo sapiens
tgccactcacctgac

SEQ ID NO: 136553 - DNA, 15 bp, Homo sapiens
gccactcacctgact

SEQ ID NO: 136554 - DNA, 15 bp, Homo sapiens
ccactcacctgactc

SEQ ID NO: 136555 - DNA, 15 bp, Homo sapiens
cactcacctgactct

SEQ ID NO: 136556 - DNA, 15 bp, Homo sapiens
actcacctgactctc

SEQ ID NO: 136557 - DNA, 15 bp, Homo sapiens
ctcacctgactctcc

SEQ ID NO: 136558 - DNA, 15 bp, Homo sapiens
tcacctgactctcct

SEQ ID NO: 136559 - DNA, 15 bp, Homo sapiens
cacctgactctcctc

SEQ ID NO: 136560 - DNA, 15 bp, Homo sapiens
acctgactctcctct

SEQ ID NO: 136561 - DNA, 15 bp, Homo sapiens
cctgactctcctctt

SEQ ID NO: 136562 - DNA, 15 bp, Homo sapiens
ctgactctcctcttg

SEQ ID NO: 136563 - DNA, 15 bp, Homo sapiens
tgactctcctcttga

SEQ ID NO: 136564 - DNA, 15 bp, Homo sapiens
gactctcctcttgat

SEQ ID NO: 136565 - DNA, 15 bp, Homo sapiens
actctcctcttgatc

SEQ ID NO: 136566 - DNA, 15 bp, Homo sapiens
ctctcctcttgatct

SEQ ID NO: 136567 - DNA, 15 bp, Homo sapiens
tctcctcttgatctg

SEQ ID NO: 136568 - DNA, 15 bp, Homo sapiens
ctcctcttgatctgg

SEQ ID NO: 136569 - DNA, 15 bp, Homo sapiens
tcctcttgatctggg

SEQ ID NO: 136570 - DNA, 15 bp, Homo sapiens
cctcttgatctgggc

SEQ ID NO: 136571 - DNA, 15 bp, Homo sapiens
ctcttgatctgggct

SEQ ID NO: 136572 - DNA, 15 bp, Homo sapiens
tcttgatctgggctg

SEQ ID NO: 136573 - DNA, 15 bp, Homo sapiens
cttgatctgggctga

SEQ ID NO: 136574 - DNA, 15 bp, Homo sapiens
ttgatctgggctgac

SEQ ID NO: 136575 - DNA, 15 bp, Homo sapiens
tgatctgggctgacg

SEQ ID NO: 136576 - DNA, 15 bp, Homo sapiens
gatctgggctgacgt

SEQ ID NO: 136577 - DNA, 15 bp, Homo sapiens
atctgggctgacgtg

SEQ ID NO: 136578 - DNA, 15 bp, Homo sapiens
tctgggctgacgtgg

SEQ ID NO: 136579 - DNA, 15 bp, Homo sapiens
ctgggctgacgtggc

SEQ ID NO: 136580 - DNA, 15 bp, Homo sapiens
tgggctgacgtggct

SEQ ID NO: 136581 - DNA, 15 bp, Homo sapiens
gggctgacgtggctg

SEQ ID NO: 136582 - DNA, 15 bp, Homo sapiens
ggctgacgtggctga

SEQ ID NO: 136583 - DNA, 15 bp, Homo sapiens
gctgacgtggctgag

SEQ ID NO: 136584 - DNA, 15 bp, Homo sapiens
ctgacgtggctgagt

SEQ ID NO: 136585 - DNA, 15 bp, Homo sapiens
tgacgtggctgagtg

SEQ ID NO: 136586 - DNA, 15 bp, Homo sapiens
gacgtggctgagtgg

SEQ ID NO: 136587 - DNA, 15 bp, Homo sapiens
acgtggctgagtggg

SEQ ID NO: 136588 - DNA, 15 bp, Homo sapiens
cgtggctgagtgggt

SEQ ID NO: 136589 - DNA, 15 bp, Homo sapiens
gtggctgagtgggtt

SEQ ID NO: 136590 - DNA, 15 bp, Homo sapiens
tggctgagtgggttt

SEQ ID NO: 136591 - DNA, 15 bp, Homo sapiens
ggctgagtgggttta

SEQ ID NO: 136592 - DNA, 15 bp, Homo sapiens
gctgagtgggtttag

SEQ ID NO: 136593 - DNA, 15 bp, Homo sapiens
ctgagtgggtttagc

SEQ ID NO: 136594 - DNA, 15 bp, Homo sapiens
tgagtgggtttagca

SEQ ID NO: 136595 - DNA, 15 bp, Homo sapiens
gagtgggtttagcag

SEQ ID NO: 136596 - DNA, 15 bp, Homo sapiens
agtgggtttagcaga

SEQ ID NO: 136597 - DNA, 15 bp, Homo sapiens
gtgggtttagcagaa

SEQ ID NO: 136598 - DNA, 15 bp, Homo sapiens
tgggtttagcagaac

SEQ ID NO: 136599 - DNA, 15 bp, Homo sapiens
gggtttagcagaact

SEQ ID NO: 136600 - DNA, 15 bp, Homo sapiens
ggtttagcagaactc

SEQ ID NO: 136601 - DNA, 15 bp, Homo sapiens
gtttagcagaactct

SEQ ID NO: 136602 - DNA, 15 bp, Homo sapiens
tttagcagaactctt

SEQ ID NO: 136603 - DNA, 15 bp, Homo sapiens
ttagcagaactcttg

SEQ ID NO: 136604 - DNA, 15 bp, Homo sapiens
tagcagaactcttgt

SEQ ID NO: 136605 - DNA, 15 bp, Homo sapiens
agcagaactcttgtg

SEQ ID NO: 136606 - DNA, 15 bp, Homo sapiens
gcagaactcttgtgt

SEQ ID NO: 136607 - DNA, 15 bp, Homo sapiens
cagaactcttgtgtc

SEQ ID NO: 136608 - DNA, 15 bp, Homo sapiens
agaactcttgtgtcc

SEQ ID NO: 136609 - DNA, 15 bp, Homo sapiens
gaactcttgtgtcct

SEQ ID NO: 136610 - DNA, 15 bp, Homo sapiens
aactcttgtgtcctc

SEQ ID NO: 136611 - DNA, 15 bp, Homo sapiens
actcttgtgtcctct

SEQ ID NO: 136612 - DNA, 15 bp, Homo sapiens
ctcttgtgtcctctt

SEQ ID NO: 136613 - DNA, 15 bp, Homo sapiens
tcttgtgtcctcttt

SEQ ID NO: 136614 - DNA, 15 bp, Homo sapiens
cttgtgtcctcttta

SEQ ID NO: 136615 - DNA, 15 bp, Homo sapiens
ttgtgtcctctttac

SEQ ID NO: 136616 - DNA, 15 bp, Homo sapiens
tgtgtcctctttact

SEQ ID NO: 136617 - DNA, 15 bp, Homo sapiens
gtgtcctctttactt

SEQ ID NO: 136618 - DNA, 15 bp, Homo sapiens
tgtcctctttacttg

SEQ ID NO: 136619 - DNA, 15 bp, Homo sapiens
gtcctctttacttgg

SEQ ID NO: 136620 - DNA, 15 bp, Homo sapiens
tcctctttacttggt

SEQ ID NO: 136621 - DNA, 15 bp, Homo sapiens
cctctttacttggtt

SEQ ID NO: 136622 - DNA, 15 bp, Homo sapiens
ctctttacttggttt

SEQ ID NO: 136623 - DNA, 15 bp, Homo sapiens
tctttacttggtttg

SEQ ID NO: 136624 - DNA, 15 bp, Homo sapiens
ctttacttggtttgt

SEQ ID NO: 136625 - DNA, 15 bp, Homo sapiens
tttacttggtttgtt

SEQ ID NO: 136626 - DNA, 15 bp, Homo sapiens
ttacttggtttgttt

SEQ ID NO: 136627 - DNA, 15 bp, Homo sapiens
tacttggtttgtttc

SEQ ID NO: 136628 - DNA, 15 bp, Homo sapiens
acttggtttgtttca

SEQ ID NO: 136629 - DNA, 15 bp, Homo sapiens
cttggtttgtttcaa

SEQ ID NO: 136630 - DNA, 15 bp, Homo sapiens
ttggtttgtttcaag

SEQ ID NO: 136631 - DNA, 15 bp, Homo sapiens
tggtttgtttcaagt

SEQ ID NO: 136632 - DNA, 15 bp, Homo sapiens
ggtttgtttcaagtt

SEQ ID NO: 136633 - DNA, 15 bp, Homo sapiens
gtttgtttcaagttc

SEQ ID NO: 136634 - DNA, 15 bp, Homo sapiens
tttgtttcaagttca

SEQ ID NO: 136635 - DNA, 15 bp, Homo sapiens
ttgtttcaagttcat

SEQ ID NO: 136636 - DNA, 15 bp, Homo sapiens
tgtttcaagttcatg

SEQ ID NO: 136637 - DNA, 15 bp, Homo sapiens
gtttcaagttcatgt

SEQ ID NO: 136638 - DNA, 15 bp, Homo sapiens
tttcaagttcatgtc

SEQ ID NO: 136639 - DNA, 15 bp, Homo sapiens
ttcaagttcatgtcc

SEQ ID NO: 136640 - DNA, 15 bp, Homo sapiens
tcaagttcatgtcct

SEQ ID NO: 136641 - DNA, 15 bp, Homo sapiens
caagttcatgtcctg

SEQ ID NO: 136642 - DNA, 15 bp, Homo sapiens
aagttcatgtcctgc

SEQ ID NO: 136643 - DNA, 15 bp, Homo sapiens
agttcatgtcctgct

SEQ ID NO: 136644 - DNA, 15 bp, Homo sapiens
gttcatgtcctgctt

SEQ ID NO: 136645 - DNA, 15 bp, Homo sapiens
ttcatgtcctgcttc

SEQ ID NO: 136646 - DNA, 15 bp, Homo sapiens
tcatgtcctgcttca

SEQ ID NO: 136647 - DNA, 15 bp, Homo sapiens
catgtcctgcttcat

SEQ ID NO: 136648 - DNA, 15 bp, Homo sapiens
atgtcctgcttcatc

SEQ ID NO: 136649 - DNA, 15 bp, Homo sapiens
tgtcctgcttcatct

SEQ ID NO: 136650 - DNA, 15 bp, Homo sapiens
gtcctgcttcatctt

SEQ ID NO: 136651 - DNA, 15 bp, Homo sapiens
tcctgcttcatcttt

SEQ ID NO: 136652 - DNA, 15 bp, Homo sapiens
cctgcttcatctttt

SEQ ID NO: 136653 - DNA, 15 bp, Homo sapiens
ctgcttcatcttttc

SEQ ID NO: 136654 - DNA, 15 bp, Homo sapiens
tgcttcatcttttcc

SEQ ID NO: 136655 - DNA, 15 bp, Homo sapiens
gcttcatcttttccc

SEQ ID NO: 136656 - DNA, 15 bp, Homo sapiens
cttcatcttttccct

SEQ ID NO: 136657 - DNA, 15 bp, Homo sapiens
ttcatcttttcccta

SEQ ID NO: 136658 - DNA, 15 bp, Homo sapiens
tcatcttttccctaa

SEQ ID NO: 136659 - DNA, 15 bp, Homo sapiens
catcttttccctaac

SEQ ID NO: 136660 - DNA, 15 bp, Homo sapiens
atcttttccctaact

SEQ ID NO: 136661 - DNA, 15 bp, Homo sapiens
tcttttccctaactc

SEQ ID NO: 136662 - DNA, 15 bp, Homo sapiens
cttttccctaactca

SEQ ID NO: 136663 - DNA, 15 bp, Homo sapiens
ttttccctaactcac

SEQ ID NO: 136664 - DNA, 15 bp, Homo sapiens
tttccctaactcact

SEQ ID NO: 136665 - DNA, 15 bp, Homo sapiens
ttccctaactcactg

SEQ ID NO: 136666 - DNA, 15 bp, Homo sapiens
tccctaactcactgc

SEQ ID NO: 136667 - DNA, 15 bp, Homo sapiens
ccctaactcactgca

SEQ ID NO: 136668 - DNA, 15 bp, Homo sapiens
cctaactcactgcaa

SEQ ID NO: 136669 - DNA, 15 bp, Homo sapiens
ctaactcactgcaag

SEQ ID NO: 136670 - DNA, 15 bp, Homo sapiens
taactcactgcaagg

SEQ ID NO: 136671 - DNA, 15 bp, Homo sapiens
aactcactgcaaggt

SEQ ID NO: 136672 - DNA, 15 bp, Homo sapiens
actcactgcaaggtg

SEQ ID NO: 136673 - DNA, 15 bp, Homo sapiens
ctcactgcaaggtga

SEQ ID NO: 136674 - DNA, 15 bp, Homo sapiens
tcactgcaaggtgaa

SEQ ID NO: 136675 - DNA, 15 bp, Homo sapiens
cactgcaaggtgaat

SEQ ID NO: 136676 - DNA, 15 bp, Homo sapiens
actgcaaggtgaatt

SEQ ID NO: 136677 - DNA, 15 bp, Homo sapiens
ctgcaaggtgaattt

SEQ ID NO: 136678 - DNA, 15 bp, Homo sapiens
tgcaaggtgaatttt

SEQ ID NO: 136679 - DNA, 15 bp, Homo sapiens
gcaaggtgaattttc

SEQ ID NO: 136680 - DNA, 15 bp, Homo sapiens
caaggtgaattttct

SEQ ID NO: 136681 - DNA, 15 bp, Homo sapiens
aaggtgaattttctt

SEQ ID NO: 136682 - DNA, 15 bp, Homo sapiens
aggtgaattttcttc

SEQ ID NO: 136683 - DNA, 15 bp, Homo sapiens
ggtgaattttcttct

SEQ ID NO: 136684 - DNA, 15 bp, Homo sapiens
gtgaattttcttctc

SEQ ID NO: 136685 - DNA, 15 bp, Homo sapiens
tgaattttcttctct

SEQ ID NO: 136686 - DNA, 15 bp, Homo sapiens
gaattttcttctctg

SEQ ID NO: 136687 - DNA, 15 bp, Homo sapiens
aattttcttctctgc

SEQ ID NO: 136688 - DNA, 15 bp, Homo sapiens
attttcttctctgca

SEQ ID NO: 136689 - DNA, 15 bp, Homo sapiens
ttttcttctctgcaa

SEQ ID NO: 136690 - DNA, 15 bp, Homo sapiens
tttcttctctgcaat

SEQ ID NO: 136691 - DNA, 15 bp, Homo sapiens
ttcttctctgcaatc

SEQ ID NO: 136692 - DNA, 15 bp, Homo sapiens
tcttctctgcaatcg

SEQ ID NO: 136693 - DNA, 15 bp, Homo sapiens
cttctctgcaatcgg

SEQ ID NO: 136694 - DNA, 15 bp, Homo sapiens
ttctctgcaatcggc

SEQ ID NO: 136695 - DNA, 15 bp, Homo sapiens
tctctgcaatcggca

SEQ ID NO: 136696 - DNA, 15 bp, Homo sapiens
ctctgcaatcggcaa

SEQ ID NO: 136697 - DNA, 15 bp, Homo sapiens
tctgcaatcggcaat

SEQ ID NO: 136698 - DNA, 15 bp, Homo sapiens
ctgcaatcggcaatt

SEQ ID NO: 136699 - DNA, 15 bp, Homo sapiens
tgcaatcggcaattc

SEQ ID NO: 136700 - DNA, 15 bp, Homo sapiens
gcaatcggcaattcc

SEQ ID NO: 136701 - DNA, 15 bp, Homo sapiens
caatcggcaattccc

SEQ ID NO: 136702 - DNA, 15 bp, Homo sapiens
aatcggcaattcccc

SEQ ID NO: 136703 - DNA, 15 bp, Homo sapiens
atcggcaattcccca

SEQ ID NO: 136704 - DNA, 15 bp, Homo sapiens
tcggcaattccccaa

SEQ ID NO: 136705 - DNA, 15 bp, Homo sapiens
cggcaattccccaaa

SEQ ID NO: 136706 - DNA, 15 bp, Homo sapiens
ggcaattccccaaat

SEQ ID NO: 136707 - DNA, 15 bp, Homo sapiens
gcaattccccaaatc

SEQ ID NO: 136708 - DNA, 15 bp, Homo sapiens
caattccccaaatca

SEQ ID NO: 136709 - DNA, 15 bp, Homo sapiens
aattccccaaatcac

SEQ ID NO: 136710 - DNA, 15 bp, Homo sapiens
attccccaaatcaca

SEQ ID NO: 136711 - DNA, 15 bp, Homo sapiens
ttccccaaatcacat

SEQ ID NO: 136712 - DNA, 15 bp, Homo sapiens
tccccaaatcacatc

SEQ ID NO: 136713 - DNA, 15 bp, Homo sapiens
ccccaaatcacatca

SEQ ID NO: 136714 - DNA, 15 bp, Homo sapiens
cccaaatcacatcag

SEQ ID NO: 136715 - DNA, 15 bp, Homo sapiens
ccaaatcacatcagg

SEQ ID NO: 136716 - DNA, 15 bp, Homo sapiens
caaatcacatcaggt

SEQ ID NO: 136717 - DNA, 15 bp, Homo sapiens
aaatcacatcaggtc

SEQ ID NO: 136718 - DNA, 15 bp, Homo sapiens
aatcacatcaggtca

SEQ ID NO: 136719 - DNA, 15 bp, Homo sapiens
atcacatcaggtcat

SEQ ID NO: 136720 - DNA, 15 bp, Homo sapiens
tcacatcaggtcatt

SEQ ID NO: 136721 - DNA, 15 bp, Homo sapiens
cacatcaggtcatta

SEQ ID NO: 136722 - DNA, 15 bp, Homo sapiens
acatcaggtcattaa

SEQ ID NO: 136723 - DNA, 15 bp, Homo sapiens
catcaggtcattaat

SEQ ID NO: 136724 - DNA, 15 bp, Homo sapiens
atcaggtcattaatt

SEQ ID NO: 136725 - DNA, 15 bp, Homo sapiens
tcaggtcattaattt

SEQ ID NO: 136726 - DNA, 15 bp, Homo sapiens
caggtcattaattta

SEQ ID NO: 136727 - DNA, 15 bp, Homo sapiens
aggtcattaatttat

SEQ ID NO: 136728 - DNA, 15 bp, Homo sapiens
ggtcattaatttatt

SEQ ID NO: 136729 - DNA, 15 bp, Homo sapiens
gtcattaatttattc

SEQ ID NO: 136730 - DNA, 15 bp, Homo sapiens
tcattaatttattca

SEQ ID NO: 136731 - DNA, 15 bp, Homo sapiens
cattaatttattcac

SEQ ID NO: 136732 - DNA, 15 bp, Homo sapiens
attaatttattcact

SEQ ID NO: 136733 - DNA, 15 bp, Homo sapiens
ttaatttattcactc

SEQ ID NO: 136734 - DNA, 15 bp, Homo sapiens
taatttattcactca

SEQ ID NO: 136735 - DNA, 15 bp, Homo sapiens
aatttattcactcat

SEQ ID NO: 136736 - DNA, 15 bp, Homo sapiens
atttattcactcatt

SEQ ID NO: 136737 - DNA, 15 bp, Homo sapiens
tttattcactcattt

SEQ ID NO: 136738 - DNA, 15 bp, Homo sapiens
ttattcactcatttg

SEQ ID NO: 136739 - DNA, 15 bp, Homo sapiens
tattcactcatttgt

SEQ ID NO: 136740 - DNA, 15 bp, Homo sapiens
attcactcatttgta

SEQ ID NO: 136741 - DNA, 15 bp, Homo sapiens
ttcactcatttgtat

SEQ ID NO: 136742 - DNA, 15 bp, Homo sapiens
tcactcatttgtatt

SEQ ID NO: 136743 - DNA, 15 bp, Homo sapiens
cactcatttgtattc

SEQ ID NO: 136744 - DNA, 15 bp, Homo sapiens
actcatttgtattca

SEQ ID NO: 136745 - DNA, 15 bp, Homo sapiens
ctcatttgtattcat

SEQ ID NO: 136746 - DNA, 15 bp, Homo sapiens
tcatttgtattcatt

SEQ ID NO: 136747 - DNA, 15 bp, Homo sapiens
catttgtattcattc

SEQ ID NO: 136748 - DNA, 15 bp, Homo sapiens
atttgtattcattca

SEQ ID NO: 136749 - DNA, 15 bp, Homo sapiens
tttgtattcattcat

SEQ ID NO: 136750 - DNA, 15 bp, Homo sapiens
ttgtattcattcatt

SEQ ID NO: 136751 - DNA, 15 bp, Homo sapiens
tgtattcattcattc

SEQ ID NO: 136752 - DNA, 15 bp, Homo sapiens
gtattcattcattca

SEQ ID NO: 136753 - DNA, 15 bp, Homo sapiens
tattcattcattcat

SEQ ID NO: 136754 - DNA, 15 bp, Homo sapiens
attcattcattcatt

SEQ ID NO: 136755 - DNA, 15 bp, Homo sapiens
ttcattcattcatta

SEQ ID NO: 136756 - DNA, 15 bp, Homo sapiens
tcattcattcattag

SEQ ID NO: 136757 - DNA, 15 bp, Homo sapiens
cattcattcattagt

SEQ ID NO: 136758 - DNA, 15 bp, Homo sapiens
attcattcattagtt

SEQ ID NO: 136759 - DNA, 15 bp, Homo sapiens
ttcattcattagttc

SEQ ID NO: 136760 - DNA, 15 bp, Homo sapiens
tcattcattagttca

SEQ ID NO: 136761 - DNA, 15 bp, Homo sapiens
cattcattagttcat

SEQ ID NO: 136762 - DNA, 15 bp, Homo sapiens
attcattagttcatc

SEQ ID NO: 136763 - DNA, 15 bp, Homo sapiens
ttcattagttcatcc

SEQ ID NO: 136764 - DNA, 15 bp, Homo sapiens
tcattagttcatcca

SEQ ID NO: 136765 - DNA, 15 bp, Homo sapiens
cattagttcatccat

SEQ ID NO: 136766 - DNA, 15 bp, Homo sapiens
attagttcatccatc

SEQ ID NO: 136767 - DNA, 15 bp, Homo sapiens
ttagttcatccatcc

SEQ ID NO: 136768 - DNA, 15 bp, Homo sapiens
tagttcatccatcca

SEQ ID NO: 136769 - DNA, 15 bp, Homo sapiens
agttcatccatccat

SEQ ID NO: 136770 - DNA, 15 bp, Homo sapiens
gttcatccatccatc

SEQ ID NO: 136771 - DNA, 15 bp, Homo sapiens
ttcatccatccatct

SEQ ID NO: 136772 - DNA, 15 bp, Homo sapiens
tcatccatccatcta

SEQ ID NO: 136773 - DNA, 15 bp, Homo sapiens
catccatccatctat

SEQ ID NO: 136774 - DNA, 15 bp, Homo sapiens
atccatccatctatt

SEQ ID NO: 136775 - DNA, 15 bp, Homo sapiens
tccatccatctattc

SEQ ID NO: 136776 - DNA, 15 bp, Homo sapiens
ccatccatctattca

SEQ ID NO: 136777 - DNA, 15 bp, Homo sapiens
catccatctattcat

SEQ ID NO: 136778 - DNA, 15 bp, Homo sapiens
atccatctattcatt

SEQ ID NO: 136779 - DNA, 15 bp, Homo sapiens
tccatctattcattc

SEQ ID NO: 136780 - DNA, 15 bp, Homo sapiens
ccatctattcattca

SEQ ID NO: 136781 - DNA, 15 bp, Homo sapiens
catctattcattcat

SEQ ID NO: 136782 - DNA, 15 bp, Homo sapiens
atctattcattcatt

SEQ ID NO: 136783 - DNA, 15 bp, Homo sapiens
tctattcattcattc

SEQ ID NO: 136784 - DNA, 15 bp, Homo sapiens
ctattcattcattca

SEQ ID NO: 136785 - DNA, 15 bp, Homo sapiens
attcattcattcatc

SEQ ID NO: 136786 - DNA, 15 bp, Homo sapiens
ttcattcattcatcc

SEQ ID NO: 136787 - DNA, 15 bp, Homo sapiens
tcattcattcatcca

SEQ ID NO: 136788 - DNA, 15 bp, Homo sapiens
cattcattcatccaa

SEQ ID NO: 136789 - DNA, 15 bp, Homo sapiens
attcattcatccaat

SEQ ID NO: 136790 - DNA, 15 bp, Homo sapiens
ttcattcatccaatt

SEQ ID NO: 136791 - DNA, 15 bp, Homo sapiens
tcattcatccaattt

SEQ ID NO: 136792 - DNA, 15 bp, Homo sapiens
cattcatccaattta

SEQ ID NO: 136793 - DNA, 15 bp, Homo sapiens
attcatccaatttac

SEQ ID NO: 136794 - DNA, 15 bp, Homo sapiens
ttcatccaatttact

SEQ ID NO: 136795 - DNA, 15 bp, Homo sapiens
tcatccaatttactg

SEQ ID NO: 136796 - DNA, 15 bp, Homo sapiens
catccaatttactga

SEQ ID NO: 136797 - DNA, 15 bp, Homo sapiens
atccaatttactgag

SEQ ID NO: 136798 - DNA, 15 bp, Homo sapiens
tccaatttactgagt

SEQ ID NO: 136799 - DNA, 15 bp, Homo sapiens
ccaatttactgagtg

SEQ ID NO: 136800 - DNA, 15 bp, Homo sapiens
caatttactgagtgc

SEQ ID NO: 136801 - DNA, 15 bp, Homo sapiens
aatttactgagtgcc

SEQ ID NO: 136802 - DNA, 15 bp, Homo sapiens
atttactgagtgcct

SEQ ID NO: 136803 - DNA, 15 bp, Homo sapiens
tttactgagtgcctc

SEQ ID NO: 136804 - DNA, 15 bp, Homo sapiens
ttactgagtgcctcc

SEQ ID NO: 136805 - DNA, 15 bp, Homo sapiens
tactgagtgcctcct

SEQ ID NO: 136806 - DNA, 15 bp, Homo sapiens
actgagtgcctcctc

SEQ ID NO: 136807 - DNA, 15 bp, Homo sapiens
ctgagtgcctcctct

SEQ ID NO: 136808 - DNA, 15 bp, Homo sapiens
tgagtgcctcctctg

SEQ ID NO: 136809 - DNA, 15 bp, Homo sapiens
gagtgcctcctctgt

SEQ ID NO: 136810 - DNA, 15 bp, Homo sapiens
agtgcctcctctgtg

SEQ ID NO: 136811 - DNA, 15 bp, Homo sapiens
gtgcctcctctgtgc

SEQ ID NO: 136812 - DNA, 15 bp, Homo sapiens
tgcctcctctgtgcc

SEQ ID NO: 136813 - DNA, 15 bp, Homo sapiens
gcctcctctgtgcca

SEQ ID NO: 136814 - DNA, 15 bp, Homo sapiens
ctcctctgtgccagg

SEQ ID NO: 136815 - DNA, 15 bp, Homo sapiens
tcctctgtgccaggc

SEQ ID NO: 136816 - DNA, 15 bp, Homo sapiens
cctctgtgccaggca

SEQ ID NO: 136817 - DNA, 15 bp, Homo sapiens
ctctgtgccaggcac

SEQ ID NO: 136818 - DNA, 15 bp, Homo sapiens
tctgtgccaggcact

SEQ ID NO: 136819 - DNA, 15 bp, Homo sapiens
ctgtgccaggcactg

SEQ ID NO: 136820 - DNA, 15 bp, Homo sapiens
tgtgccaggcactgc

SEQ ID NO: 136821 - DNA, 15 bp, Homo sapiens
gtgccaggcactgct

SEQ ID NO: 136822 - DNA, 15 bp, Homo sapiens
tgccaggcactgctg

SEQ ID NO: 136823 - DNA, 15 bp, Homo sapiens
gccaggcactgctgg

SEQ ID NO: 136824 - DNA, 15 bp, Homo sapiens
ccaggcactgctggc

SEQ ID NO: 136825 - DNA, 15 bp, Homo sapiens
caggcactgctggct

SEQ ID NO: 136826 - DNA, 15 bp, Homo sapiens
aggcactgctggctt

SEQ ID NO: 136827 - DNA, 15 bp, Homo sapiens
ggcactgctggcttt

SEQ ID NO: 136828 - DNA, 15 bp, Homo sapiens
gcactgctggctttg

SEQ ID NO: 136829 - DNA, 15 bp, Homo sapiens
cactgctggctttgg

SEQ ID NO: 136830 - DNA, 15 bp, Homo sapiens
actgctggctttgga

SEQ ID NO: 136831 - DNA, 15 bp, Homo sapiens
ctgctggctttggaa

SEQ ID NO: 136832 - DNA, 15 bp, Homo sapiens
tgctggctttggaat

SEQ ID NO: 136833 - DNA, 15 bp, Homo sapiens
gctggctttggaatt

SEQ ID NO: 136834 - DNA, 15 bp, Homo sapiens
ctggctttggaatta

SEQ ID NO: 136835 - DNA, 15 bp, Homo sapiens
tggctttggaattaa

SEQ ID NO: 136836 - DNA, 15 bp, Homo sapiens
ggctttggaattaaa

SEQ ID NO: 136837 - DNA, 15 bp, Homo sapiens
gctttggaattaaaa

SEQ ID NO: 136838 - DNA, 15 bp, Homo sapiens
ctttggaattaaaaa

SEQ ID NO: 136839 - DNA, 15 bp, Homo sapiens
tttggaattaaaaac

SEQ ID NO: 136840 - DNA, 15 bp, Homo sapiens
ttggaattaaaaacc

SEQ ID NO: 136841 - DNA, 15 bp, Homo sapiens
tggaattaaaaaccc

SEQ ID NO: 136842 - DNA, 15 bp, Homo sapiens
ggaattaaaaaccct

SEQ ID NO: 136843 - DNA, 15 bp, Homo sapiens
gaattaaaaaccctg

SEQ ID NO: 136844 - DNA, 15 bp, Homo sapiens
aattaaaaaccctgg

SEQ ID NO: 136845 - DNA, 15 bp, Homo sapiens
attaaaaaccctggc

SEQ ID NO: 136846 - DNA, 15 bp, Homo sapiens
ttaaaaaccctggcc

SEQ ID NO: 136847 - DNA, 15 bp, Homo sapiens
taaaaaccctggccc

SEQ ID NO: 136848 - DNA, 15 bp, Homo sapiens
aaaaaccctggccct

SEQ ID NO: 136849 - DNA, 15 bp, Homo sapiens
aaaaccctggccctc

SEQ ID NO: 136850 - DNA, 15 bp, Homo sapiens
aaaccctggccctca

SEQ ID NO: 136851 - DNA, 15 bp, Homo sapiens
aaccctggccctcaa

SEQ ID NO: 136852 - DNA, 15 bp, Homo sapiens
accctggccctcaag

SEQ ID NO: 136853 - DNA, 15 bp, Homo sapiens
ccctggccctcaagg

SEQ ID NO: 136854 - DNA, 15 bp, Homo sapiens
cctggccctcaagga

SEQ ID NO: 136855 - DNA, 15 bp, Homo sapiens
ctggccctcaaggaa

SEQ ID NO: 136856 - DNA, 15 bp, Homo sapiens
tggccctcaaggaat

SEQ ID NO: 136857 - DNA, 15 bp, Homo sapiens
ggccctcaaggaatt

SEQ ID NO: 136858 - DNA, 15 bp, Homo sapiens
gccctcaaggaattt

SEQ ID NO: 136859 - DNA, 15 bp, Homo sapiens
ccctcaaggaatttc

SEQ ID NO: 136860 - DNA, 15 bp, Homo sapiens
cctcaaggaatttct

SEQ ID NO: 136861 - DNA, 15 bp, Homo sapiens
ctcaaggaatttcta

SEQ ID NO: 136862 - DNA, 15 bp, Homo sapiens
tcaaggaatttctat

SEQ ID NO: 136863 - DNA, 15 bp, Homo sapiens
caaggaatttctatt

SEQ ID NO: 136864 - DNA, 15 bp, Homo sapiens
aaggaatttctattc

SEQ ID NO: 136865 - DNA, 15 bp, Homo sapiens
aggaatttctattct

SEQ ID NO: 136866 - DNA, 15 bp, Homo sapiens
ggaatttctattctt

SEQ ID NO: 136867 - DNA, 15 bp, Homo sapiens
gaatttctattcttc

SEQ ID NO: 136868 - DNA, 15 bp, Homo sapiens
aatttctattcttct

SEQ ID NO: 136869 - DNA, 15 bp, Homo sapiens
atttctattcttctg

SEQ ID NO: 136870 - DNA, 15 bp, Homo sapiens
tttctattcttctgg

SEQ ID NO: 136871 - DNA, 15 bp, Homo sapiens
ttctattcttctggg

SEQ ID NO: 136872 - DNA, 15 bp, Homo sapiens
tctattcttctggga

SEQ ID NO: 136873 - DNA, 15 bp, Homo sapiens
ctattcttctgggag

SEQ ID NO: 136874 - DNA, 15 bp, Homo sapiens
tattcttctgggagc

SEQ ID NO: 136875 - DNA, 15 bp, Homo sapiens
attcttctgggagca

SEQ ID NO: 136876 - DNA, 15 bp, Homo sapiens
ttcttctgggagcag

SEQ ID NO: 136877 - DNA, 15 bp, Homo sapiens
tcttctgggagcagg

SEQ ID NO: 136878 - DNA, 15 bp, Homo sapiens
cttctgggagcagga

SEQ ID NO: 136879 - DNA, 15 bp, Homo sapiens
ttctgggagcaggat

SEQ ID NO: 136880 - DNA, 15 bp, Homo sapiens
tctgggagcaggata

SEQ ID NO: 136881 - DNA, 15 bp, Homo sapiens
ctgggagcaggatat

SEQ ID NO: 136882 - DNA, 15 bp, Homo sapiens
tgggagcaggatatt

SEQ ID NO: 136883 - DNA, 15 bp, Homo sapiens
gggagcaggatattt

SEQ ID NO: 136884 - DNA, 15 bp, Homo sapiens
ggagcaggatattta

SEQ ID NO: 136885 - DNA, 15 bp, Homo sapiens
gagcaggatatttac

SEQ ID NO: 136886 - DNA, 15 bp, Homo sapiens
agcaggatatttaca

SEQ ID NO: 136887 - DNA, 15 bp, Homo sapiens
gcaggatatttacat

SEQ ID NO: 136888 - DNA, 15 bp, Homo sapiens
caggatatttacatg

SEQ ID NO: 136889 - DNA, 15 bp, Homo sapiens
aggatatttacatgg

SEQ ID NO: 136890 - DNA, 15 bp, Homo sapiens
ggatatttacatggg

SEQ ID NO: 136891 - DNA, 15 bp, Homo sapiens
gatatttacatgggt

SEQ ID NO: 136892 - DNA, 15 bp, Homo sapiens
atatttacatgggtg

SEQ ID NO: 136893 - DNA, 15 bp, Homo sapiens
tatttacatgggtga

SEQ ID NO: 136894 - DNA, 15 bp, Homo sapiens
atttacatgggtgac

SEQ ID NO: 136895 - DNA, 15 bp, Homo sapiens
tttacatgggtgact

SEQ ID NO: 136896 - DNA, 15 bp, Homo sapiens
ttacatgggtgactg

SEQ ID NO: 136897 - DNA, 15 bp, Homo sapiens
tacatgggtgactgc

SEQ ID NO: 136898 - DNA, 15 bp, Homo sapiens
acatgggtgactgca

SEQ ID NO: 136899 - DNA, 15 bp, Homo sapiens
catgggtgactgcag

SEQ ID NO: 136900 - DNA, 15 bp, Homo sapiens
atgggtgactgcagc

SEQ ID NO: 136901 - DNA, 15 bp, Homo sapiens
tgggtgactgcagct

SEQ ID NO: 136902 - DNA, 15 bp, Homo sapiens
gggtgactgcagctt

SEQ ID NO: 136903 - DNA, 15 bp, Homo sapiens
ggtgactgcagcttg

SEQ ID NO: 136904 - DNA, 15 bp, Homo sapiens
gtgactgcagcttga

SEQ ID NO: 136905 - DNA, 15 bp, Homo sapiens
tgactgcagcttgat

SEQ ID NO: 136906 - DNA, 15 bp, Homo sapiens
gactgcagcttgatc

SEQ ID NO: 136907 - DNA, 15 bp, Homo sapiens
actgcagcttgatct

SEQ ID NO: 136908 - DNA, 15 bp, Homo sapiens
ctgcagcttgatctg

SEQ ID NO: 136909 - DNA, 15 bp, Homo sapiens
tgcagcttgatctgt

SEQ ID NO: 136910 - DNA, 15 bp, Homo sapiens
gcagcttgatctgtg

SEQ ID NO: 136911 - DNA, 15 bp, Homo sapiens
cagcttgatctgtgt

SEQ ID NO: 136912 - DNA, 15 bp, Homo sapiens
agcttgatctgtgtg

SEQ ID NO: 136913 - DNA, 15 bp, Homo sapiens
gcttgatctgtgtgg

SEQ ID NO: 136914 - DNA, 15 bp, Homo sapiens
cttgatctgtgtggt

SEQ ID NO: 136915 - DNA, 15 bp, Homo sapiens
ttgatctgtgtggta

SEQ ID NO: 136916 - DNA, 15 bp, Homo sapiens
tgatctgtgtggtac

SEQ ID NO: 136917 - DNA, 15 bp, Homo sapiens
gatctgtgtggtact

SEQ ID NO: 136918 - DNA, 15 bp, Homo sapiens
atctgtgtggtacta

SEQ ID NO: 136919 - DNA, 15 bp, Homo sapiens
tctgtgtggtactag

SEQ ID NO: 136920 - DNA, 15 bp, Homo sapiens
ctgtgtggtactagt

SEQ ID NO: 136921 - DNA, 15 bp, Homo sapiens
tgtgtggtactagtg

SEQ ID NO: 136922 - DNA, 15 bp, Homo sapiens
gtgtggtactagtgg

SEQ ID NO: 136923 - DNA, 15 bp, Homo sapiens
tgtggtactagtgga

SEQ ID NO: 136924 - DNA, 15 bp, Homo sapiens
gtggtactagtggaa

SEQ ID NO: 136925 - DNA, 15 bp, Homo sapiens
tggtactagtggaaa

SEQ ID NO: 136926 - DNA, 15 bp, Homo sapiens
ggtactagtggaaaa

SEQ ID NO: 136927 - DNA, 15 bp, Homo sapiens
gtactagtggaaaac

SEQ ID NO: 136928 - DNA, 15 bp, Homo sapiens
tactagtggaaaaca

SEQ ID NO: 136929 - DNA, 15 bp, Homo sapiens
actagtggaaaacat

SEQ ID NO: 136930 - DNA, 15 bp, Homo sapiens
ctagtggaaaacata

SEQ ID NO: 136931 - DNA, 15 bp, Homo sapiens
tagtggaaaacatag

SEQ ID NO: 136932 - DNA, 15 bp, Homo sapiens
agtggaaaacatagg

SEQ ID NO: 136933 - DNA, 15 bp, Homo sapiens
gtggaaaacatagga

SEQ ID NO: 136934 - DNA, 15 bp, Homo sapiens
tggaaaacataggat

SEQ ID NO: 136935 - DNA, 15 bp, Homo sapiens
ggaaaacataggatg

SEQ ID NO: 136936 - DNA, 15 bp, Homo sapiens
gaaaacataggatgt

SEQ ID NO: 136937 - DNA, 15 bp, Homo sapiens
aaaacataggatgtt

SEQ ID NO: 136938 - DNA, 15 bp, Homo sapiens
aaacataggatgttg

SEQ ID NO: 136939 - DNA, 15 bp, Homo sapiens
aacataggatgttgg

SEQ ID NO: 136940 - DNA, 15 bp, Homo sapiens
acataggatgttggg

SEQ ID NO: 136941 - DNA, 15 bp, Homo sapiens
cataggatgttgggc

SEQ ID NO: 136942 - DNA, 15 bp, Homo sapiens
ataggatgttgggca

SEQ ID NO: 136943 - DNA, 15 bp, Homo sapiens
taggatgttgggcac

SEQ ID NO: 136944 - DNA, 15 bp, Homo sapiens
aggatgttgggcaca

SEQ ID NO: 136945 - DNA, 15 bp, Homo sapiens
ggatgttgggcacaa

SEQ ID NO: 136946 - DNA, 15 bp, Homo sapiens
gatgttgggcacaaa

SEQ ID NO: 136947 - DNA, 15 bp, Homo sapiens
atgttgggcacaaaa

SEQ ID NO: 136948 - DNA, 15 bp, Homo sapiens
tgttgggcacaaaag

SEQ ID NO: 136949 - DNA, 15 bp, Homo sapiens
gttgggcacaaaaga

SEQ ID NO: 136950 - DNA, 15 bp, Homo sapiens
ttgggcacaaaagag

SEQ ID NO: 136951 - DNA, 15 bp, Homo sapiens
tgggcacaaaagagt

SEQ ID NO: 136952 - DNA, 15 bp, Homo sapiens
gggcacaaaagagtc

SEQ ID NO: 136953 - DNA, 15 bp, Homo sapiens
ggcacaaaagagtca

SEQ ID NO: 136954 - DNA, 15 bp, Homo sapiens
gcacaaaagagtcac

SEQ ID NO: 136955 - DNA, 15 bp, Homo sapiens
cacaaaagagtcaca

SEQ ID NO: 136956 - DNA, 15 bp, Homo sapiens
acaaaagagtcacaa

SEQ ID NO: 136957 - DNA, 15 bp, Homo sapiens
caaaagagtcacaaa

SEQ ID NO: 136958 - DNA, 15 bp, Homo sapiens
aaaagagtcacaaaa

SEQ ID NO: 136959 - DNA, 15 bp, Homo sapiens
aaagagtcacaaaac

SEQ ID NO: 136960 - DNA, 15 bp, Homo sapiens
aagagtcacaaaacg

SEQ ID NO: 136961 - DNA, 15 bp, Homo sapiens
agagtcacaaaacgc

SEQ ID NO: 136962 - DNA, 15 bp, Homo sapiens
gagtcacaaaacgcc

SEQ ID NO: 136963 - DNA, 15 bp, Homo sapiens
agtcacaaaacgccg

SEQ ID NO: 136964 - DNA, 15 bp, Homo sapiens
gtcacaaaacgccgg

SEQ ID NO: 136965 - DNA, 15 bp, Homo sapiens
tcacaaaacgccggg

SEQ ID NO: 136966 - DNA, 15 bp, Homo sapiens
cacaaaacgccgggc

SEQ ID NO: 136967 - DNA, 15 bp, Homo sapiens
acaaaacgccgggcg

SEQ ID NO: 136968 - DNA, 15 bp, Homo sapiens
caaaacgccgggcgc

SEQ ID NO: 136969 - DNA, 15 bp, Homo sapiens
aaaacgccgggcgcg

SEQ ID NO: 136970 - DNA, 15 bp, Homo sapiens
aaacgccgggcgcgg

SEQ ID NO: 136971 - DNA, 15 bp, Homo sapiens
aacgccgggcgcggt

SEQ ID NO: 136972 - DNA, 15 bp, Homo sapiens
acgccgggcgcggtg

SEQ ID NO: 136973 - DNA, 15 bp, Homo sapiens
cgccgggcgcggtgg

SEQ ID NO: 136974 - DNA, 15 bp, Homo sapiens
gccgggcgcggtggc

SEQ ID NO: 136975 - DNA, 15 bp, Homo sapiens
ccgggcgcggtggct

SEQ ID NO: 136976 - DNA, 15 bp, Homo sapiens
cgggcgcggtggctc

SEQ ID NO: 136977 - DNA, 15 bp, Homo sapiens
ggtggctcatgcctc

SEQ ID NO: 136978 - DNA, 15 bp, Homo sapiens
gtggctcatgcctct

SEQ ID NO: 136979 - DNA, 15 bp, Homo sapiens
tggctcatgcctcta

SEQ ID NO: 136980 - DNA, 15 bp, Homo sapiens
ggctcatgcctctaa

SEQ ID NO: 136981 - DNA, 15 bp, Homo sapiens
gctcatgcctctaat

SEQ ID NO: 136982 - DNA, 15 bp, Homo sapiens
ctcatgcctctaatc

SEQ ID NO: 136983 - DNA, 15 bp, Homo sapiens
tcatgcctctaatcc

SEQ ID NO: 136984 - DNA, 15 bp, Homo sapiens
catgcctctaatcct

SEQ ID NO: 136985 - DNA, 15 bp, Homo sapiens
atgcctctaatccta

SEQ ID NO: 136986 - DNA, 15 bp, Homo sapiens
tgcctctaatcctag

SEQ ID NO: 136987 - DNA, 15 bp, Homo sapiens
gcctctaatcctagc

SEQ ID NO: 136988 - DNA, 15 bp, Homo sapiens
cctctaatcctagca

SEQ ID NO: 136989 - DNA, 15 bp, Homo sapiens
ctctaatcctagcac

SEQ ID NO: 136990 - DNA, 15 bp, Homo sapiens
tctaatcctagcact

SEQ ID NO: 136991 - DNA, 15 bp, Homo sapiens
ctaatcctagcactt

SEQ ID NO: 136992 - DNA, 15 bp, Homo sapiens
ctagcactttgggag

SEQ ID NO: 136993 - DNA, 15 bp, Homo sapiens
tagcactttgggagg

SEQ ID NO: 136994 - DNA, 15 bp, Homo sapiens
ttgggaggccaaggc

SEQ ID NO: 136995 - DNA, 15 bp, Homo sapiens
tgggaggccaaggcg

SEQ ID NO: 136996 - DNA, 15 bp, Homo sapiens
gggaggccaaggcga

SEQ ID NO: 136997 - DNA, 15 bp, Homo sapiens
ggaggccaaggcgag

SEQ ID NO: 136998 - DNA, 15 bp, Homo sapiens
gaggccaaggcgagt

SEQ ID NO: 136999 - DNA, 15 bp, Homo sapiens
aggccaaggcgagtg

SEQ ID NO: 137000 - DNA, 15 bp, Homo sapiens
ggccaaggcgagtgg

SEQ ID NO: 137001 - DNA, 15 bp, Homo sapiens
gccaaggcgagtgga

SEQ ID NO: 137002 - DNA, 15 bp, Homo sapiens
ccaaggcgagtggat

SEQ ID NO: 137003 - DNA, 15 bp, Homo sapiens
caaggcgagtggatc

SEQ ID NO: 137004 - DNA, 15 bp, Homo sapiens
aaggcgagtggatca

SEQ ID NO: 137005 - DNA, 15 bp, Homo sapiens
aggcgagtggatcac

SEQ ID NO: 137006 - DNA, 15 bp, Homo sapiens
ggcgagtggatcacc

SEQ ID NO: 137007 - DNA, 15 bp, Homo sapiens
gcgagtggatcacct

SEQ ID NO: 137008 - DNA, 15 bp, Homo sapiens
cgagtggatcacctg

SEQ ID NO: 137009 - DNA, 15 bp, Homo sapiens
gagtggatcacctga

SEQ ID NO: 137010 - DNA, 15 bp, Homo sapiens
agtggatcacctgag

SEQ ID NO: 137011 - DNA, 15 bp, Homo sapiens
ggatcacctgaggtc

SEQ ID NO: 137012 - DNA, 15 bp, Homo sapiens
gatcacctgaggtca

SEQ ID NO: 137013 - DNA, 15 bp, Homo sapiens
atcacctgaggtcag

SEQ ID NO: 137014 - DNA, 15 bp, Homo sapiens
tcacctgaggtcagg

SEQ ID NO: 137015 - DNA, 15 bp, Homo sapiens
cacctgaggtcagga

SEQ ID NO: 137016 - DNA, 15 bp, Homo sapiens
acctgaggtcaggag

SEQ ID NO: 137017 - DNA, 15 bp, Homo sapiens
gcctggccaacatga

SEQ ID NO: 137018 - DNA, 15 bp, Homo sapiens
acatgatgaaacccc

SEQ ID NO: 137019 - DNA, 15 bp, Homo sapiens
catgatgaaacccca

SEQ ID NO: 137020 - DNA, 15 bp, Homo sapiens
atgatgaaaccccaa

SEQ ID NO: 137021 - DNA, 15 bp, Homo sapiens
tgatgaaaccccaac

SEQ ID NO: 137022 - DNA, 15 bp, Homo sapiens
gatgaaaccccaact

SEQ ID NO: 137023 - DNA, 15 bp, Homo sapiens
atgaaaccccaactc

SEQ ID NO: 137024 - DNA, 15 bp, Homo sapiens
tgaaaccccaactct

SEQ ID NO: 137025 - DNA, 15 bp, Homo sapiens
gaaaccccaactcta

SEQ ID NO: 137026 - DNA, 15 bp, Homo sapiens
aaaccccaactctac

SEQ ID NO: 137027 - DNA, 15 bp, Homo sapiens
aaccccaactctact

SEQ ID NO: 137028 - DNA, 15 bp, Homo sapiens
accccaactctacta

SEQ ID NO: 137029 - DNA, 15 bp, Homo sapiens
ccccaactctactaa

SEQ ID NO: 137030 - DNA, 15 bp, Homo sapiens
cccaactctactaaa

SEQ ID NO: 137031 - DNA, 15 bp, Homo sapiens
ccaactctactaaaa

SEQ ID NO: 137032 - DNA, 15 bp, Homo sapiens
caactctactaaaaa

SEQ ID NO: 137033 - DNA, 15 bp, Homo sapiens
aactctactaaaaat

SEQ ID NO: 137034 - DNA, 15 bp, Homo sapiens
actctactaaaaata

SEQ ID NO: 137035 - DNA, 15 bp, Homo sapiens
taaaaatacaaaaag

SEQ ID NO: 137036 - DNA, 15 bp, Homo sapiens
aaaaatacaaaaagg

SEQ ID NO: 137037 - DNA, 15 bp, Homo sapiens
aaaatacaaaaagga

SEQ ID NO: 137038 - DNA, 15 bp, Homo sapiens
aaatacaaaaaggaa

SEQ ID NO: 137039 - DNA, 15 bp, Homo sapiens
aatacaaaaaggaat

SEQ ID NO: 137040 - DNA, 15 bp, Homo sapiens
atacaaaaaggaata

SEQ ID NO: 137041 - DNA, 15 bp, Homo sapiens
tacaaaaaggaataa

SEQ ID NO: 137042 - DNA, 15 bp, Homo sapiens
acaaaaaggaataat

SEQ ID NO: 137043 - DNA, 15 bp, Homo sapiens
caaaaaggaataata

SEQ ID NO: 137044 - DNA, 15 bp, Homo sapiens
aaaaaggaataatag

SEQ ID NO: 137045 - DNA, 15 bp, Homo sapiens
aaaaggaataatagc

SEQ ID NO: 137046 - DNA, 15 bp, Homo sapiens
aaaggaataatagct

SEQ ID NO: 137047 - DNA, 15 bp, Homo sapiens
aaggaataatagctg

SEQ ID NO: 137048 - DNA, 15 bp, Homo sapiens
aggaataatagctgg

SEQ ID NO: 137049 - DNA, 15 bp, Homo sapiens
ggaataatagctggg

SEQ ID NO: 137050 - DNA, 15 bp, Homo sapiens
gaataatagctgggc

SEQ ID NO: 137051 - DNA, 15 bp, Homo sapiens
aataatagctgggcg

SEQ ID NO: 137052 - DNA, 15 bp, Homo sapiens
ataatagctgggcgt

SEQ ID NO: 137053 - DNA, 15 bp, Homo sapiens
taatagctgggcgtg

SEQ ID NO: 137054 - DNA, 15 bp, Homo sapiens
aatagctgggcgtga

SEQ ID NO: 137055 - DNA, 15 bp, Homo sapiens
atagctgggcgtgat

SEQ ID NO: 137056 - DNA, 15 bp, Homo sapiens
tagctgggcgtgatg

SEQ ID NO: 137057 - DNA, 15 bp, Homo sapiens
agctgggcgtgatgg

SEQ ID NO: 137058 - DNA, 15 bp, Homo sapiens
gctgggcgtgatggc

SEQ ID NO: 137059 - DNA, 15 bp, Homo sapiens
ctgggcgtgatggcg

SEQ ID NO: 137060 - DNA, 15 bp, Homo sapiens
tgggcgtgatggcgg

SEQ ID NO: 137061 - DNA, 15 bp, Homo sapiens
gggcgtgatggcggg

SEQ ID NO: 137062 - DNA, 15 bp, Homo sapiens
ggcgtgatggcgggt

SEQ ID NO: 137063 - DNA, 15 bp, Homo sapiens
gcgtgatggcgggtg

SEQ ID NO: 137064 - DNA, 15 bp, Homo sapiens
cgtgatggcgggtgc

SEQ ID NO: 137065 - DNA, 15 bp, Homo sapiens
gtgatggcgggtgcc

SEQ ID NO: 137066 - DNA, 15 bp, Homo sapiens
tgatggcgggtgcct

SEQ ID NO: 137067 - DNA, 15 bp, Homo sapiens
gatggcgggtgcctg

SEQ ID NO: 137068 - DNA, 15 bp, Homo sapiens
atggcgggtgcctgt

SEQ ID NO: 137069 - DNA, 15 bp, Homo sapiens
tggcgggtgcctgta

SEQ ID NO: 137070 - DNA, 15 bp, Homo sapiens
ggcgggtgcctgtaa

SEQ ID NO: 137071 - DNA, 15 bp, Homo sapiens
gcgggtgcctgtaat

SEQ ID NO: 137072 - DNA, 15 bp, Homo sapiens
cgggtgcctgtaatc

SEQ ID NO: 137073 - DNA, 15 bp, Homo sapiens
ctgtaatcccaacaa

SEQ ID NO: 137074 - DNA, 15 bp, Homo sapiens
tgtaatcccaacaac

SEQ ID NO: 137075 - DNA, 15 bp, Homo sapiens
gtaatcccaacaact

SEQ ID NO: 137076 - DNA, 15 bp, Homo sapiens
taatcccaacaactc

SEQ ID NO: 137077 - DNA, 15 bp, Homo sapiens
aatcccaacaactcg

SEQ ID NO: 137078 - DNA, 15 bp, Homo sapiens
atcccaacaactcgg

SEQ ID NO: 137079 - DNA, 15 bp, Homo sapiens
tcccaacaactcggg

SEQ ID NO: 137080 - DNA, 15 bp, Homo sapiens
cccaacaactcggga

SEQ ID NO: 137081 - DNA, 15 bp, Homo sapiens
ccaacaactcgggag

SEQ ID NO: 137082 - DNA, 15 bp, Homo sapiens
caacaactcgggagg

SEQ ID NO: 137083 - DNA, 15 bp, Homo sapiens
aacaactcgggaggc

SEQ ID NO: 137084 - DNA, 15 bp, Homo sapiens
acaactcgggaggct

SEQ ID NO: 137085 - DNA, 15 bp, Homo sapiens
caactcgggaggctg

SEQ ID NO: 137086 - DNA, 15 bp, Homo sapiens
aactcgggaggctga

SEQ ID NO: 137087 - DNA, 15 bp, Homo sapiens
tgcttgaacctgggg

SEQ ID NO: 137088 - DNA, 15 bp, Homo sapiens
gcttgaacctggggc

SEQ ID NO: 137089 - DNA, 15 bp, Homo sapiens
cttgaacctggggct

SEQ ID NO: 137090 - DNA, 15 bp, Homo sapiens
ttgaacctggggctt

SEQ ID NO: 137091 - DNA, 15 bp, Homo sapiens
tgaacctggggcttt

SEQ ID NO: 137092 - DNA, 15 bp, Homo sapiens
gaacctggggctttg

SEQ ID NO: 137093 - DNA, 15 bp, Homo sapiens
aacctggggctttgg

SEQ ID NO: 137094 - DNA, 15 bp, Homo sapiens
acctggggctttgga

SEQ ID NO: 137095 - DNA, 15 bp, Homo sapiens
cctggggctttggag

SEQ ID NO: 137096 - DNA, 15 bp, Homo sapiens
ctggggctttggagg

SEQ ID NO: 137097 - DNA, 15 bp, Homo sapiens
tggggctttggaggt

SEQ ID NO: 137098 - DNA, 15 bp, Homo sapiens
ggggctttggaggtt

SEQ ID NO: 137099 - DNA, 15 bp, Homo sapiens
gggctttggaggttg

SEQ ID NO: 137100 - DNA, 15 bp, Homo sapiens
ggctttggaggttgc

SEQ ID NO: 137101 - DNA, 15 bp, Homo sapiens
gctttggaggttgca

SEQ ID NO: 137102 - DNA, 15 bp, Homo sapiens
ctttggaggttgcaa

SEQ ID NO: 137103 - DNA, 15 bp, Homo sapiens
tttggaggttgcaat

SEQ ID NO: 137104 - DNA, 15 bp, Homo sapiens
ttggaggttgcaatg

SEQ ID NO: 137105 - DNA, 15 bp, Homo sapiens
ggttgcaatgagcca

SEQ ID NO: 137106 - DNA, 15 bp, Homo sapiens
gttgcaatgagccaa

SEQ ID NO: 137107 - DNA, 15 bp, Homo sapiens
ttgcaatgagccaag

SEQ ID NO: 137108 - DNA, 15 bp, Homo sapiens
tgcaatgagccaaga

SEQ ID NO: 137109 - DNA, 15 bp, Homo sapiens
gcaatgagccaagag

SEQ ID NO: 137110 - DNA, 15 bp, Homo sapiens
caatgagccaagagc

SEQ ID NO: 137111 - DNA, 15 bp, Homo sapiens
aatgagccaagagcg

SEQ ID NO: 137112 - DNA, 15 bp, Homo sapiens
atgagccaagagcgg

SEQ ID NO: 137113 - DNA, 15 bp, Homo sapiens
tgagccaagagcggg

SEQ ID NO: 137114 - DNA, 15 bp, Homo sapiens
gagccaagagcgggc

SEQ ID NO: 137115 - DNA, 15 bp, Homo sapiens
agccaagagcgggcc

SEQ ID NO: 137116 - DNA, 15 bp, Homo sapiens
gccaagagcgggcca

SEQ ID NO: 137117 - DNA, 15 bp, Homo sapiens
ccaagagcgggccac

SEQ ID NO: 137118 - DNA, 15 bp, Homo sapiens
caagagcgggccact

SEQ ID NO: 137119 - DNA, 15 bp, Homo sapiens
aagagcgggccactt

SEQ ID NO: 137120 - DNA, 15 bp, Homo sapiens
agagcgggccacttc

SEQ ID NO: 137121 - DNA, 15 bp, Homo sapiens
gagcgggccacttca

SEQ ID NO: 137122 - DNA, 15 bp, Homo sapiens
agcgggccacttcac

SEQ ID NO: 137123 - DNA, 15 bp, Homo sapiens
gcgggccacttcact

SEQ ID NO: 137124 - DNA, 15 bp, Homo sapiens
cgggccacttcactc

SEQ ID NO: 137125 - DNA, 15 bp, Homo sapiens
gggccacttcactcc

SEQ ID NO: 137126 - DNA, 15 bp, Homo sapiens
ggccacttcactcca

SEQ ID NO: 137127 - DNA, 15 bp, Homo sapiens
gccacttcactccag

SEQ ID NO: 137128 - DNA, 15 bp, Homo sapiens
ccacttcactccagc

SEQ ID NO: 137129 - DNA, 15 bp, Homo sapiens
cacttcactccagcc

SEQ ID NO: 137130 - DNA, 15 bp, Homo sapiens
acttcactccagcct

SEQ ID NO: 137131 - DNA, 15 bp, Homo sapiens
cttcactccagcctg

SEQ ID NO: 137132 - DNA, 15 bp, Homo sapiens
actccagcctgggtg

SEQ ID NO: 137133 - DNA, 15 bp, Homo sapiens
tccagcctgggtgaa

SEQ ID NO: 137134 - DNA, 15 bp, Homo sapiens
ccagcctgggtgaaa

SEQ ID NO: 137135 - DNA, 15 bp, Homo sapiens
cagcctgggtgaaag

SEQ ID NO: 137136 - DNA, 15 bp, Homo sapiens
agcctgggtgaaagg

SEQ ID NO: 137137 - DNA, 15 bp, Homo sapiens
gcctgggtgaaaggg

SEQ ID NO: 137138 - DNA, 15 bp, Homo sapiens
cctgggtgaaagggt

SEQ ID NO: 137139 - DNA, 15 bp, Homo sapiens
ctgggtgaaagggtg

SEQ ID NO: 137140 - DNA, 15 bp, Homo sapiens
tgggtgaaagggtga

SEQ ID NO: 137141 - DNA, 15 bp, Homo sapiens
gggtgaaagggtgaa

SEQ ID NO: 137142 - DNA, 15 bp, Homo sapiens
ggtgaaagggtgaaa

SEQ ID NO: 137143 - DNA, 15 bp, Homo sapiens
gtgaaagggtgaaac

SEQ ID NO: 137144 - DNA, 15 bp, Homo sapiens
tgaaagggtgaaact

SEQ ID NO: 137145 - DNA, 15 bp, Homo sapiens
gaaagggtgaaactc

SEQ ID NO: 137146 - DNA, 15 bp, Homo sapiens
aaagggtgaaactct

SEQ ID NO: 137147 - DNA, 15 bp, Homo sapiens
aagggtgaaactctg

SEQ ID NO: 137148 - DNA, 15 bp, Homo sapiens
agggtgaaactctgt

SEQ ID NO: 137149 - DNA, 15 bp, Homo sapiens
gggtgaaactctgta

SEQ ID NO: 137150 - DNA, 15 bp, Homo sapiens
ggtgaaactctgtat

SEQ ID NO: 137151 - DNA, 15 bp, Homo sapiens
gtgaaactctgtatt

SEQ ID NO: 137152 - DNA, 15 bp, Homo sapiens
tgaaactctgtatta

SEQ ID NO: 137153 - DNA, 15 bp, Homo sapiens
gaaactctgtattaa

SEQ ID NO: 137154 - DNA, 15 bp, Homo sapiens
aaactctgtattaaa

SEQ ID NO: 137155 - DNA, 15 bp, Homo sapiens
aactctgtattaaaa

SEQ ID NO: 137156 - DNA, 15 bp, Homo sapiens
actctgtattaaaaa

SEQ ID NO: 137157 - DNA, 15 bp, Homo sapiens
ctctgtattaaaaaa

SEQ ID NO: 137158 - DNA, 15 bp, Homo sapiens
tctgtattaaaaaaa

SEQ ID NO: 137159 - DNA, 15 bp, Homo sapiens
ctgtattaaaaaaaa

SEQ ID NO: 137160 - DNA, 15 bp, Homo sapiens
tgtattaaaaaaaaa

SEQ ID NO: 137161 - DNA, 15 bp, Homo sapiens
gtattaaaaaaaaaa

SEQ ID NO: 137162 - DNA, 15 bp, Homo sapiens
tattaaaaaaaaaaa

SEQ ID NO: 137163 - DNA, 15 bp, Homo sapiens
ttaaaaaaaaaaaaa

SEQ ID NO: 137164 - DNA, 15 bp, Homo sapiens
taaaaaaaaaaaaag

SEQ ID NO: 137165 - DNA, 15 bp, Homo sapiens
aaaaaaaaaaaaagt

SEQ ID NO: 137166 - DNA, 15 bp, Homo sapiens
aaaaaaaaaaaagtc

SEQ ID NO: 137167 - DNA, 15 bp, Homo sapiens
aaaaaaaaaaagtca

SEQ ID NO: 137168 - DNA, 15 bp, Homo sapiens
aaaaaaaaaagtcac

SEQ ID NO: 137169 - DNA, 15 bp, Homo sapiens
aaaaaaaaagtcaca

SEQ ID NO: 137170 - DNA, 15 bp, Homo sapiens
aaaaaaaagtcacaa

SEQ ID NO: 137171 - DNA, 15 bp, Homo sapiens
aaaaaaagtcacaaa

SEQ ID NO: 137172 - DNA, 15 bp, Homo sapiens
aaaaaagtcacaaaa

SEQ ID NO: 137173 - DNA, 15 bp, Homo sapiens
aaaaagtcacaaaaa

SEQ ID NO: 137174 - DNA, 15 bp, Homo sapiens
aaaagtcacaaaaaa

SEQ ID NO: 137175 - DNA, 15 bp, Homo sapiens
aaagtcacaaaaaag

SEQ ID NO: 137176 - DNA, 15 bp, Homo sapiens
aagtcacaaaaaagg

SEQ ID NO: 137177 - DNA, 15 bp, Homo sapiens
agtcacaaaaaaggg

SEQ ID NO: 137178 - DNA, 15 bp, Homo sapiens
gtcacaaaaaagggc

SEQ ID NO: 137179 - DNA, 15 bp, Homo sapiens
tcacaaaaaagggct

SEQ ID NO: 137180 - DNA, 15 bp, Homo sapiens
cacaaaaaagggctg

SEQ ID NO: 137181 - DNA, 15 bp, Homo sapiens
acaaaaaagggctgg

SEQ ID NO: 137182 - DNA, 15 bp, Homo sapiens
caaaaaagggctggc

SEQ ID NO: 137183 - DNA, 15 bp, Homo sapiens
aaaaaagggctggcc

SEQ ID NO: 137184 - DNA, 15 bp, Homo sapiens
aaaaagggctggcca

SEQ ID NO: 137185 - DNA, 15 bp, Homo sapiens
aaaagggctggccac

SEQ ID NO: 137186 - DNA, 15 bp, Homo sapiens
aaagggctggccacc

SEQ ID NO: 137187 - DNA, 15 bp, Homo sapiens
aagggctggccacct

SEQ ID NO: 137188 - DNA, 15 bp, Homo sapiens
agggctggccaccta

SEQ ID NO: 137189 - DNA, 15 bp, Homo sapiens
gggctggccacctaa

SEQ ID NO: 137190 - DNA, 15 bp, Homo sapiens
ggctggccacctaac

SEQ ID NO: 137191 - DNA, 15 bp, Homo sapiens
gctggccacctaacc

SEQ ID NO: 137192 - DNA, 15 bp, Homo sapiens
ctggccacctaaccc

SEQ ID NO: 137193 - DNA, 15 bp, Homo sapiens
tggccacctaaccca

SEQ ID NO: 137194 - DNA, 15 bp, Homo sapiens
ggccacctaacccag

SEQ ID NO: 137195 - DNA, 15 bp, Homo sapiens
gccacctaacccagc

SEQ ID NO: 137196 - DNA, 15 bp, Homo sapiens
ccacctaacccagct

SEQ ID NO: 137197 - DNA, 15 bp, Homo sapiens
cacctaacccagctt

SEQ ID NO: 137198 - DNA, 15 bp, Homo sapiens
acctaacccagcttg

SEQ ID NO: 137199 - DNA, 15 bp, Homo sapiens
cctaacccagcttga

SEQ ID NO: 137200 - DNA, 15 bp, Homo sapiens
ctaacccagcttgag

SEQ ID NO: 137201 - DNA, 15 bp, Homo sapiens
taacccagcttgagg

SEQ ID NO: 137202 - DNA, 15 bp, Homo sapiens
aacccagcttgagga

SEQ ID NO: 137203 - DNA, 15 bp, Homo sapiens
acccagcttgaggat

SEQ ID NO: 137204 - DNA, 15 bp, Homo sapiens
cccagcttgaggatg

SEQ ID NO: 137205 - DNA, 15 bp, Homo sapiens
ccagcttgaggatgg

SEQ ID NO: 137206 - DNA, 15 bp, Homo sapiens
cagcttgaggatggg

SEQ ID NO: 137207 - DNA, 15 bp, Homo sapiens
agcttgaggatggga

SEQ ID NO: 137208 - DNA, 15 bp, Homo sapiens
gcttgaggatgggaa

SEQ ID NO: 137209 - DNA, 15 bp, Homo sapiens
cttgaggatgggaag

SEQ ID NO: 137210 - DNA, 15 bp, Homo sapiens
ttgaggatgggaagg

SEQ ID NO: 137211 - DNA, 15 bp, Homo sapiens
tgaggatgggaaggc

SEQ ID NO: 137212 - DNA, 15 bp, Homo sapiens
gaggatgggaaggcc

SEQ ID NO: 137213 - DNA, 15 bp, Homo sapiens
aggatgggaaggcca

SEQ ID NO: 137214 - DNA, 15 bp, Homo sapiens
ggatgggaaggccag

SEQ ID NO: 137215 - DNA, 15 bp, Homo sapiens
gatgggaaggccagg

SEQ ID NO: 137216 - DNA, 15 bp, Homo sapiens
atgggaaggccaggg

SEQ ID NO: 137217 - DNA, 15 bp, Homo sapiens
tgggaaggccagggc

SEQ ID NO: 137218 - DNA, 15 bp, Homo sapiens
gggaaggccagggca

SEQ ID NO: 137219 - DNA, 15 bp, Homo sapiens
ggaaggccagggcag

SEQ ID NO: 137220 - DNA, 15 bp, Homo sapiens
gaaggccagggcagg

SEQ ID NO: 137221 - DNA, 15 bp, Homo sapiens
aaggccagggcaggc

SEQ ID NO: 137222 - DNA, 15 bp, Homo sapiens
aggccagggcaggct

SEQ ID NO: 137223 - DNA, 15 bp, Homo sapiens
ggccagggcaggctt

SEQ ID NO: 137224 - DNA, 15 bp, Homo sapiens
gccagggcaggcttc

SEQ ID NO: 137225 - DNA, 15 bp, Homo sapiens
ccagggcaggcttcc

SEQ ID NO: 137226 - DNA, 15 bp, Homo sapiens
cagggcaggcttcct

SEQ ID NO: 137227 - DNA, 15 bp, Homo sapiens
agggcaggcttcctg

SEQ ID NO: 137228 - DNA, 15 bp, Homo sapiens
gggcaggcttcctgg

SEQ ID NO: 137229 - DNA, 15 bp, Homo sapiens
ggcaggcttcctgga

SEQ ID NO: 137230 - DNA, 15 bp, Homo sapiens
gcaggcttcctggag

SEQ ID NO: 137231 - DNA, 15 bp, Homo sapiens
caggcttcctggagg

SEQ ID NO: 137232 - DNA, 15 bp, Homo sapiens
aggcttcctggagga

SEQ ID NO: 137233 - DNA, 15 bp, Homo sapiens
ggcttcctggaggag

SEQ ID NO: 137234 - DNA, 15 bp, Homo sapiens
gcttcctggaggagg

SEQ ID NO: 137235 - DNA, 15 bp, Homo sapiens
cttcctggaggaggt

SEQ ID NO: 137236 - DNA, 15 bp, Homo sapiens
ttcctggaggaggtg

SEQ ID NO: 137237 - DNA, 15 bp, Homo sapiens
tcctggaggaggtga

SEQ ID NO: 137238 - DNA, 15 bp, Homo sapiens
cctggaggaggtgac

SEQ ID NO: 137239 - DNA, 15 bp, Homo sapiens
ctggaggaggtgact

SEQ ID NO: 137240 - DNA, 15 bp, Homo sapiens
tggaggaggtgactc

SEQ ID NO: 137241 - DNA, 15 bp, Homo sapiens
ggaggaggtgactca

SEQ ID NO: 137242 - DNA, 15 bp, Homo sapiens
gaggaggtgactcat

SEQ ID NO: 137243 - DNA, 15 bp, Homo sapiens
aggaggtgactcatg

SEQ ID NO: 137244 - DNA, 15 bp, Homo sapiens
ggaggtgactcatgg

SEQ ID NO: 137245 - DNA, 15 bp, Homo sapiens
gaggtgactcatggg

SEQ ID NO: 137246 - DNA, 15 bp, Homo sapiens
aggtgactcatgggc

SEQ ID NO: 137247 - DNA, 15 bp, Homo sapiens
ggtgactcatgggcc

SEQ ID NO: 137248 - DNA, 15 bp, Homo sapiens
gtgactcatgggcca

SEQ ID NO: 137249 - DNA, 15 bp, Homo sapiens
tgactcatgggccat

SEQ ID NO: 137250 - DNA, 15 bp, Homo sapiens
gactcatgggccatg

SEQ ID NO: 137251 - DNA, 15 bp, Homo sapiens
actcatgggccatgt

SEQ ID NO: 137252 - DNA, 15 bp, Homo sapiens
ctcatgggccatgtc

SEQ ID NO: 137253 - DNA, 15 bp, Homo sapiens
tcatgggccatgtca

SEQ ID NO: 137254 - DNA, 15 bp, Homo sapiens
catgggccatgtcat

SEQ ID NO: 137255 - DNA, 15 bp, Homo sapiens
atgggccatgtcatg

SEQ ID NO: 137256 - DNA, 15 bp, Homo sapiens
tgggccatgtcatga

SEQ ID NO: 137257 - DNA, 15 bp, Homo sapiens
gggccatgtcatgag

SEQ ID NO: 137258 - DNA, 15 bp, Homo sapiens
ggccatgtcatgagg

SEQ ID NO: 137259 - DNA, 15 bp, Homo sapiens
gccatgtcatgagga

SEQ ID NO: 137260 - DNA, 15 bp, Homo sapiens
ccatgtcatgaggat

SEQ ID NO: 137261 - DNA, 15 bp, Homo sapiens
catgtcatgaggatg

SEQ ID NO: 137262 - DNA, 15 bp, Homo sapiens
atgtcatgaggatgg

SEQ ID NO: 137263 - DNA, 15 bp, Homo sapiens
tgtcatgaggatggg

SEQ ID NO: 137264 - DNA, 15 bp, Homo sapiens
gtcatgaggatgggg

SEQ ID NO: 137265 - DNA, 15 bp, Homo sapiens
tcatgaggatggggt

SEQ ID NO: 137266 - DNA, 15 bp, Homo sapiens
catgaggatggggta

SEQ ID NO: 137267 - DNA, 15 bp, Homo sapiens
atgaggatggggtaa

SEQ ID NO: 137268 - DNA, 15 bp, Homo sapiens
tgaggatggggtaag

SEQ ID NO: 137269 - DNA, 15 bp, Homo sapiens
gaggatggggtaaga

SEQ ID NO: 137270 - DNA, 15 bp, Homo sapiens
aggatggggtaagag

SEQ ID NO: 137271 - DNA, 15 bp, Homo sapiens
ggatggggtaagagg

SEQ ID NO: 137272 - DNA, 15 bp, Homo sapiens
gatggggtaagagga

SEQ ID NO: 137273 - DNA, 15 bp, Homo sapiens
atggggtaagaggag

SEQ ID NO: 137274 - DNA, 15 bp, Homo sapiens
tggggtaagaggaga

SEQ ID NO: 137275 - DNA, 15 bp, Homo sapiens
ggggtaagaggagaa

SEQ ID NO: 137276 - DNA, 15 bp, Homo sapiens
gggtaagaggagaag

SEQ ID NO: 137277 - DNA, 15 bp, Homo sapiens
ggtaagaggagaagg

SEQ ID NO: 137278 - DNA, 15 bp, Homo sapiens
gtaagaggagaaggt

SEQ ID NO: 137279 - DNA, 15 bp, Homo sapiens
taagaggagaaggta

SEQ ID NO: 137280 - DNA, 15 bp, Homo sapiens
aagaggagaaggtat

SEQ ID NO: 137281 - DNA, 15 bp, Homo sapiens
agaggagaaggtatg

SEQ ID NO: 137282 - DNA, 15 bp, Homo sapiens
gaggagaaggtatgt

SEQ ID NO: 137283 - DNA, 15 bp, Homo sapiens
aggagaaggtatgtt

SEQ ID NO: 137284 - DNA, 15 bp, Homo sapiens
ggagaaggtatgttt

SEQ ID NO: 137285 - DNA, 15 bp, Homo sapiens
gagaaggtatgtttc

SEQ ID NO: 137286 - DNA, 15 bp, Homo sapiens
agaaggtatgtttca

SEQ ID NO: 137287 - DNA, 15 bp, Homo sapiens
gaaggtatgtttcag

SEQ ID NO: 137288 - DNA, 15 bp, Homo sapiens
aaggtatgtttcaga

SEQ ID NO: 137289 - DNA, 15 bp, Homo sapiens
aggtatgtttcagac

SEQ ID NO: 137290 - DNA, 15 bp, Homo sapiens
ggtatgtttcagaca

SEQ ID NO: 137291 - DNA, 15 bp, Homo sapiens
gtatgtttcagacat

SEQ ID NO: 137292 - DNA, 15 bp, Homo sapiens
tatgtttcagacatc

SEQ ID NO: 137293 - DNA, 15 bp, Homo sapiens
atgtttcagacatct

SEQ ID NO: 137294 - DNA, 15 bp, Homo sapiens
tgtttcagacatctg

SEQ ID NO: 137295 - DNA, 15 bp, Homo sapiens
gtttcagacatctgg

SEQ ID NO: 137296 - DNA, 15 bp, Homo sapiens
tttcagacatctggc

SEQ ID NO: 137297 - DNA, 15 bp, Homo sapiens
ttcagacatctggct

SEQ ID NO: 137298 - DNA, 15 bp, Homo sapiens
tcagacatctggctt

SEQ ID NO: 137299 - DNA, 15 bp, Homo sapiens
cagacatctggcttt

SEQ ID NO: 137300 - DNA, 15 bp, Homo sapiens
agacatctggctttc

SEQ ID NO: 137301 - DNA, 15 bp, Homo sapiens
gacatctggctttct

SEQ ID NO: 137302 - DNA, 15 bp, Homo sapiens
acatctggctttctt

SEQ ID NO: 137303 - DNA, 15 bp, Homo sapiens
catctggctttctta

SEQ ID NO: 137304 - DNA, 15 bp, Homo sapiens
atctggctttcttaa

SEQ ID NO: 137305 - DNA, 15 bp, Homo sapiens
tctggctttcttaat

SEQ ID NO: 137306 - DNA, 15 bp, Homo sapiens
ctggctttcttaata

SEQ ID NO: 137307 - DNA, 15 bp, Homo sapiens
tggctttcttaatat

SEQ ID NO: 137308 - DNA, 15 bp, Homo sapiens
ggctttcttaatatt

SEQ ID NO: 137309 - DNA, 15 bp, Homo sapiens
gctttcttaatattc

SEQ ID NO: 137310 - DNA, 15 bp, Homo sapiens
ctttcttaatattct

SEQ ID NO: 137311 - DNA, 15 bp, Homo sapiens
tttcttaatattctt

SEQ ID NO: 137312 - DNA, 15 bp, Homo sapiens
ttcttaatattcttg

SEQ ID NO: 137313 - DNA, 15 bp, Homo sapiens
tcttaatattcttgg

SEQ ID NO: 137314 - DNA, 15 bp, Homo sapiens
cttaatattcttggc

SEQ ID NO: 137315 - DNA, 15 bp, Homo sapiens
ttaatattcttggct

SEQ ID NO: 137316 - DNA, 15 bp, Homo sapiens
taatattcttggctt

SEQ ID NO: 137317 - DNA, 15 bp, Homo sapiens
aatattcttggcttt

SEQ ID NO: 137318 - DNA, 15 bp, Homo sapiens
atattcttggctttc

SEQ ID NO: 137319 - DNA, 15 bp, Homo sapiens
tattcttggctttcc

SEQ ID NO: 137320 - DNA, 15 bp, Homo sapiens
attcttggctttcca

SEQ ID NO: 137321 - DNA, 15 bp, Homo sapiens
ttcttggctttccac

SEQ ID NO: 137322 - DNA, 15 bp, Homo sapiens
tcttggctttccacc

SEQ ID NO: 137323 - DNA, 15 bp, Homo sapiens
cttggctttccaccc

SEQ ID NO: 137324 - DNA, 15 bp, Homo sapiens
ttggctttccaccca

SEQ ID NO: 137325 - DNA, 15 bp, Homo sapiens
tggctttccacccat

SEQ ID NO: 137326 - DNA, 15 bp, Homo sapiens
ggctttccacccatt

SEQ ID NO: 137327 - DNA, 15 bp, Homo sapiens
gctttccacccattt

SEQ ID NO: 137328 - DNA, 15 bp, Homo sapiens
ctttccacccatttt

SEQ ID NO: 137329 - DNA, 15 bp, Homo sapiens
tttccacccattttc

SEQ ID NO: 137330 - DNA, 15 bp, Homo sapiens
ttccacccattttcc

SEQ ID NO: 137331 - DNA, 15 bp, Homo sapiens
tccacccattttcct

SEQ ID NO: 137332 - DNA, 15 bp, Homo sapiens
ccacccattttcctg

SEQ ID NO: 137333 - DNA, 15 bp, Homo sapiens
cacccattttcctgc

SEQ ID NO: 137334 - DNA, 15 bp, Homo sapiens
acccattttcctgcc

SEQ ID NO: 137335 - DNA, 15 bp, Homo sapiens
cccattttcctgcca

SEQ ID NO: 137336 - DNA, 15 bp, Homo sapiens
ccattttcctgccag

SEQ ID NO: 137337 - DNA, 15 bp, Homo sapiens
cattttcctgccagc

SEQ ID NO: 137338 - DNA, 15 bp, Homo sapiens
attttcctgccagca

SEQ ID NO: 137339 - DNA, 15 bp, Homo sapiens
ttttcctgccagcaa

SEQ ID NO: 137340 - DNA, 15 bp, Homo sapiens
tttcctgccagcaac

SEQ ID NO: 137341 - DNA, 15 bp, Homo sapiens
ttcctgccagcaaca

SEQ ID NO: 137342 - DNA, 15 bp, Homo sapiens
tcctgccagcaacat

SEQ ID NO: 137343 - DNA, 15 bp, Homo sapiens
cctgccagcaacata

SEQ ID NO: 137344 - DNA, 15 bp, Homo sapiens
ctgccagcaacatag

SEQ ID NO: 137345 - DNA, 15 bp, Homo sapiens
tgccagcaacatagg

SEQ ID NO: 137346 - DNA, 15 bp, Homo sapiens
gccagcaacataggg

SEQ ID NO: 137347 - DNA, 15 bp, Homo sapiens
ccagcaacatagggg

SEQ ID NO: 137348 - DNA, 15 bp, Homo sapiens
cagcaacatagggga

SEQ ID NO: 137349 - DNA, 15 bp, Homo sapiens
agcaacataggggag

SEQ ID NO: 137350 - DNA, 15 bp, Homo sapiens
gcaacataggggaga

SEQ ID NO: 137351 - DNA, 15 bp, Homo sapiens
caacataggggagaa

SEQ ID NO: 137352 - DNA, 15 bp, Homo sapiens
aacataggggagaag

SEQ ID NO: 137353 - DNA, 15 bp, Homo sapiens
acataggggagaaga

SEQ ID NO: 137354 - DNA, 15 bp, Homo sapiens
cataggggagaagac

SEQ ID NO: 137355 - DNA, 15 bp, Homo sapiens
ataggggagaagact

SEQ ID NO: 137356 - DNA, 15 bp, Homo sapiens
taggggagaagactg

SEQ ID NO: 137357 - DNA, 15 bp, Homo sapiens
aggggagaagactga

SEQ ID NO: 137358 - DNA, 15 bp, Homo sapiens
ggggagaagactgag

SEQ ID NO: 137359 - DNA, 15 bp, Homo sapiens
gggagaagactgaga

SEQ ID NO: 137360 - DNA, 15 bp, Homo sapiens
ggagaagactgagac

SEQ ID NO: 137361 - DNA, 15 bp, Homo sapiens
gagaagactgagacc

SEQ ID NO: 137362 - DNA, 15 bp, Homo sapiens
agaagactgagacca

SEQ ID NO: 137363 - DNA, 15 bp, Homo sapiens
gaagactgagaccag

SEQ ID NO: 137364 - DNA, 15 bp, Homo sapiens
aagactgagaccagc

SEQ ID NO: 137365 - DNA, 15 bp, Homo sapiens
agactgagaccagca

SEQ ID NO: 137366 - DNA, 15 bp, Homo sapiens
gactgagaccagcag

SEQ ID NO: 137367 - DNA, 15 bp, Homo sapiens
actgagaccagcaga

SEQ ID NO: 137368 - DNA, 15 bp, Homo sapiens
ctgagaccagcagat

SEQ ID NO: 137369 - DNA, 15 bp, Homo sapiens
tgagaccagcagata

SEQ ID NO: 137370 - DNA, 15 bp, Homo sapiens
gagaccagcagatac

SEQ ID NO: 137371 - DNA, 15 bp, Homo sapiens
agaccagcagataca

SEQ ID NO: 137372 - DNA, 15 bp, Homo sapiens
gaccagcagatacaa

SEQ ID NO: 137373 - DNA, 15 bp, Homo sapiens
accagcagatacaaa

SEQ ID NO: 137374 - DNA, 15 bp, Homo sapiens
ccagcagatacaaag

SEQ ID NO: 137375 - DNA, 15 bp, Homo sapiens
cagcagatacaaagc

SEQ ID NO: 137376 - DNA, 15 bp, Homo sapiens
agcagatacaaagcc

SEQ ID NO: 137377 - DNA, 15 bp, Homo sapiens
gcagatacaaagcca

SEQ ID NO: 137378 - DNA, 15 bp, Homo sapiens
cagatacaaagccac

SEQ ID NO: 137379 - DNA, 15 bp, Homo sapiens
agatacaaagccact

SEQ ID NO: 137380 - DNA, 15 bp, Homo sapiens
gatacaaagccactg

SEQ ID NO: 137381 - DNA, 15 bp, Homo sapiens
atacaaagccactgt

SEQ ID NO: 137382 - DNA, 15 bp, Homo sapiens
tacaaagccactgta

SEQ ID NO: 137383 - DNA, 15 bp, Homo sapiens
acaaagccactgtac

SEQ ID NO: 137384 - DNA, 15 bp, Homo sapiens
caaagccactgtact

SEQ ID NO: 137385 - DNA, 15 bp, Homo sapiens
aaagccactgtactc

SEQ ID NO: 137386 - DNA, 15 bp, Homo sapiens
aagccactgtactct

SEQ ID NO: 137387 - DNA, 15 bp, Homo sapiens
agccactgtactctg

SEQ ID NO: 137388 - DNA, 15 bp, Homo sapiens
gccactgtactctgt

SEQ ID NO: 137389 - DNA, 15 bp, Homo sapiens
ccactgtactctgtc

SEQ ID NO: 137390 - DNA, 15 bp, Homo sapiens
cactgtactctgtcc

SEQ ID NO: 137391 - DNA, 15 bp, Homo sapiens
actgtactctgtcct

SEQ ID NO: 137392 - DNA, 15 bp, Homo sapiens
ctgtactctgtcctc

SEQ ID NO: 137393 - DNA, 15 bp, Homo sapiens
tgtactctgtcctca

SEQ ID NO: 137394 - DNA, 15 bp, Homo sapiens
gtactctgtcctcac

SEQ ID NO: 137395 - DNA, 15 bp, Homo sapiens
tactctgtcctcacc

SEQ ID NO: 137396 - DNA, 15 bp, Homo sapiens
actctgtcctcaccc

SEQ ID NO: 137397 - DNA, 15 bp, Homo sapiens
ctctgtcctcacccc

SEQ ID NO: 137398 - DNA, 15 bp, Homo sapiens
tctgtcctcaccccc

SEQ ID NO: 137399 - DNA, 15 bp, Homo sapiens
ctgtcctcaccccct

SEQ ID NO: 137400 - DNA, 15 bp, Homo sapiens
tgtcctcaccccctc

SEQ ID NO: 137401 - DNA, 15 bp, Homo sapiens
gtcctcaccccctcc

SEQ ID NO: 137402 - DNA, 15 bp, Homo sapiens
tcctcaccccctcct

SEQ ID NO: 137403 - DNA, 15 bp, Homo sapiens
cctcaccccctcctt

SEQ ID NO: 137404 - DNA, 15 bp, Homo sapiens
ctcaccccctccttt

SEQ ID NO: 137405 - DNA, 15 bp, Homo sapiens
tcaccccctcctttt

SEQ ID NO: 137406 - DNA, 15 bp, Homo sapiens
caccccctccttttt

SEQ ID NO: 137407 - DNA, 15 bp, Homo sapiens
accccctcctttttt

SEQ ID NO: 137408 - DNA, 15 bp, Homo sapiens
ccccctccttttttc

SEQ ID NO: 137409 - DNA, 15 bp, Homo sapiens
cccctccttttttct

SEQ ID NO: 137410 - DNA, 15 bp, Homo sapiens
ccctccttttttctc

SEQ ID NO: 137411 - DNA, 15 bp, Homo sapiens
cctccttttttctcc

SEQ ID NO: 137412 - DNA, 15 bp, Homo sapiens
ctccttttttctccc

SEQ ID NO: 137413 - DNA, 15 bp, Homo sapiens
tccttttttctcccc

SEQ ID NO: 137414 - DNA, 15 bp, Homo sapiens
ccttttttctcccct

SEQ ID NO: 137415 - DNA, 15 bp, Homo sapiens
cttttttctcccctt

SEQ ID NO: 137416 - DNA, 15 bp, Homo sapiens
ttttttctccccttc

SEQ ID NO: 137417 - DNA, 15 bp, Homo sapiens
tttttctccccttcc

SEQ ID NO: 137418 - DNA, 15 bp, Homo sapiens
ttttctccccttcct

SEQ ID NO: 137419 - DNA, 15 bp, Homo sapiens
tttctccccttccta

SEQ ID NO: 137420 - DNA, 15 bp, Homo sapiens
ttctccccttcctac

SEQ ID NO: 137421 - DNA, 15 bp, Homo sapiens
tctccccttcctact

SEQ ID NO: 137422 - DNA, 15 bp, Homo sapiens
ctccccttcctacta

SEQ ID NO: 137423 - DNA, 15 bp, Homo sapiens
tccccttcctactac

SEQ ID NO: 137424 - DNA, 15 bp, Homo sapiens
ccccttcctactacc

SEQ ID NO: 137425 - DNA, 15 bp, Homo sapiens
cccttcctactaccc

SEQ ID NO: 137426 - DNA, 15 bp, Homo sapiens
ccttcctactaccca

SEQ ID NO: 137427 - DNA, 15 bp, Homo sapiens
cttcctactacccag

SEQ ID NO: 137428 - DNA, 15 bp, Homo sapiens
ttcctactacccaga

SEQ ID NO: 137429 - DNA, 15 bp, Homo sapiens
tcctactacccagat

SEQ ID NO: 137430 - DNA, 15 bp, Homo sapiens
cctactacccagatc

SEQ ID NO: 137431 - DNA, 15 bp, Homo sapiens
ctactacccagatct

SEQ ID NO: 137432 - DNA, 15 bp, Homo sapiens
tactacccagatctg

SEQ ID NO: 137433 - DNA, 15 bp, Homo sapiens
actacccagatctga

SEQ ID NO: 137434 - DNA, 15 bp, Homo sapiens
ctacccagatctgag

SEQ ID NO: 137435 - DNA, 15 bp, Homo sapiens
tacccagatctgagg

SEQ ID NO: 137436 - DNA, 15 bp, Homo sapiens
acccagatctgaggt

SEQ ID NO: 137437 - DNA, 15 bp, Homo sapiens
cccagatctgaggtt

SEQ ID NO: 137438 - DNA, 15 bp, Homo sapiens
ccagatctgaggttt

SEQ ID NO: 137439 - DNA, 15 bp, Homo sapiens
cagatctgaggtttt

SEQ ID NO: 137440 - DNA, 15 bp, Homo sapiens
agatctgaggttttg

SEQ ID NO: 137441 - DNA, 15 bp, Homo sapiens
gatctgaggttttga

SEQ ID NO: 137442 - DNA, 15 bp, Homo sapiens
atctgaggttttgag

SEQ ID NO: 137443 - DNA, 15 bp, Homo sapiens
tctgaggttttgaga

SEQ ID NO: 137444 - DNA, 15 bp, Homo sapiens
ctgaggttttgagaa

SEQ ID NO: 137445 - DNA, 15 bp, Homo sapiens
tgaggttttgagaaa

SEQ ID NO: 137446 - DNA, 15 bp, Homo sapiens
gaggttttgagaaat

SEQ ID NO: 137447 - DNA, 15 bp, Homo sapiens
aggttttgagaaatc

SEQ ID NO: 137448 - DNA, 15 bp, Homo sapiens
ggttttgagaaatct

SEQ ID NO: 137449 - DNA, 15 bp, Homo sapiens
gttttgagaaatctc

SEQ ID NO: 137450 - DNA, 15 bp, Homo sapiens
ttttgagaaatctct

SEQ ID NO: 137451 - DNA, 15 bp, Homo sapiens
tttgagaaatctctt

SEQ ID NO: 137452 - DNA, 15 bp, Homo sapiens
ttgagaaatctcttc

SEQ ID NO: 137453 - DNA, 15 bp, Homo sapiens
tgagaaatctcttct

SEQ ID NO: 137454 - DNA, 15 bp, Homo sapiens
gagaaatctcttctc

SEQ ID NO: 137455 - DNA, 15 bp, Homo sapiens
agaaatctcttctct

SEQ ID NO: 137456 - DNA, 15 bp, Homo sapiens
gaaatctcttctcta

SEQ ID NO: 137457 - DNA, 15 bp, Homo sapiens
aaatctcttctctaa

SEQ ID NO: 137458 - DNA, 15 bp, Homo sapiens
aatctcttctctaat

SEQ ID NO: 137459 - DNA, 15 bp, Homo sapiens
atctcttctctaatt

SEQ ID NO: 137460 - DNA, 15 bp, Homo sapiens
tctcttctctaatta

SEQ ID NO: 137461 - DNA, 15 bp, Homo sapiens
ctcttctctaattat

SEQ ID NO: 137462 - DNA, 15 bp, Homo sapiens
tcttctctaattatc

SEQ ID NO: 137463 - DNA, 15 bp, Homo sapiens
cttctctaattatct

SEQ ID NO: 137464 - DNA, 15 bp, Homo sapiens
ttctctaattatctg

SEQ ID NO: 137465 - DNA, 15 bp, Homo sapiens
tctctaattatctgc

SEQ ID NO: 137466 - DNA, 15 bp, Homo sapiens
ctctaattatctgct

SEQ ID NO: 137467 - DNA, 15 bp, Homo sapiens
tctaattatctgctt

SEQ ID NO: 137468 - DNA, 15 bp, Homo sapiens
ctaattatctgcttg

SEQ ID NO: 137469 - DNA, 15 bp, Homo sapiens
taattatctgcttgt

SEQ ID NO: 137470 - DNA, 15 bp, Homo sapiens
aattatctgcttgtt

SEQ ID NO: 137471 - DNA, 15 bp, Homo sapiens
attatctgcttgttc

SEQ ID NO: 137472 - DNA, 15 bp, Homo sapiens
ttatctgcttgttca

SEQ ID NO: 137473 - DNA, 15 bp, Homo sapiens
tatctgcttgttcat

SEQ ID NO: 137474 - DNA, 15 bp, Homo sapiens
atctgcttgttcatt

SEQ ID NO: 137475 - DNA, 15 bp, Homo sapiens
tctgcttgttcattc

SEQ ID NO: 137476 - DNA, 15 bp, Homo sapiens
ctgcttgttcattca

SEQ ID NO: 137477 - DNA, 15 bp, Homo sapiens
tgcttgttcattcat

SEQ ID NO: 137478 - DNA, 15 bp, Homo sapiens
gcttgttcattcatt

SEQ ID NO: 137479 - DNA, 15 bp, Homo sapiens
cttgttcattcattt

SEQ ID NO: 137480 - DNA, 15 bp, Homo sapiens
ttgttcattcatttg

SEQ ID NO: 137481 - DNA, 15 bp, Homo sapiens
tgttcattcatttgt

SEQ ID NO: 137482 - DNA, 15 bp, Homo sapiens
gttcattcatttgtt

SEQ ID NO: 137483 - DNA, 15 bp, Homo sapiens
ttcattcatttgttg

SEQ ID NO: 137484 - DNA, 15 bp, Homo sapiens
tcattcatttgttga

SEQ ID NO: 137485 - DNA, 15 bp, Homo sapiens
cattcatttgttgag

SEQ ID NO: 137486 - DNA, 15 bp, Homo sapiens
attcatttgttgaga

SEQ ID NO: 137487 - DNA, 15 bp, Homo sapiens
ttcatttgttgagaa

SEQ ID NO: 137488 - DNA, 15 bp, Homo sapiens
tcatttgttgagaat

SEQ ID NO: 137489 - DNA, 15 bp, Homo sapiens
catttgttgagaatc

SEQ ID NO: 137490 - DNA, 15 bp, Homo sapiens
atttgttgagaatct

SEQ ID NO: 137491 - DNA, 15 bp, Homo sapiens
tttgttgagaatcta

SEQ ID NO: 137492 - DNA, 15 bp, Homo sapiens
ttgttgagaatctac

SEQ ID NO: 137493 - DNA, 15 bp, Homo sapiens
tgttgagaatctact

SEQ ID NO: 137494 - DNA, 15 bp, Homo sapiens
gttgagaatctacta

SEQ ID NO: 137495 - DNA, 15 bp, Homo sapiens
ttgagaatctactat

SEQ ID NO: 137496 - DNA, 15 bp, Homo sapiens
tgagaatctactatg

SEQ ID NO: 137497 - DNA, 15 bp, Homo sapiens
gagaatctactatgt

SEQ ID NO: 137498 - DNA, 15 bp, Homo sapiens
agaatctactatgtg

SEQ ID NO: 137499 - DNA, 15 bp, Homo sapiens
gaatctactatgtgc

SEQ ID NO: 137500 - DNA, 15 bp, Homo sapiens
aatctactatgtgca

SEQ ID NO: 137501 - DNA, 15 bp, Homo sapiens
atctactatgtgcat

SEQ ID NO: 137502 - DNA, 15 bp, Homo sapiens
tctactatgtgcata

SEQ ID NO: 137503 - DNA, 15 bp, Homo sapiens
ctactatgtgcatag

SEQ ID NO: 137504 - DNA, 15 bp, Homo sapiens
tactatgtgcatagc

SEQ ID NO: 137505 - DNA, 15 bp, Homo sapiens
actatgtgcatagca

SEQ ID NO: 137506 - DNA, 15 bp, Homo sapiens
ctatgtgcatagcat

SEQ ID NO: 137507 - DNA, 15 bp, Homo sapiens
tatgtgcatagcatt

SEQ ID NO: 137508 - DNA, 15 bp, Homo sapiens
atgtgcatagcatta

SEQ ID NO: 137509 - DNA, 15 bp, Homo sapiens
tgtgcatagcattat

SEQ ID NO: 137510 - DNA, 15 bp, Homo sapiens
gtgcatagcattatg

SEQ ID NO: 137511 - DNA, 15 bp, Homo sapiens
tgcatagcattatga

SEQ ID NO: 137512 - DNA, 15 bp, Homo sapiens
gcatagcattatgac

SEQ ID NO: 137513 - DNA, 15 bp, Homo sapiens
catagcattatgacc

SEQ ID NO: 137514 - DNA, 15 bp, Homo sapiens
atagcattatgacca

SEQ ID NO: 137515 - DNA, 15 bp, Homo sapiens
tagcattatgaccac

SEQ ID NO: 137516 - DNA, 15 bp, Homo sapiens
agcattatgaccaca

SEQ ID NO: 137517 - DNA, 15 bp, Homo sapiens
gcattatgaccacaa

SEQ ID NO: 137518 - DNA, 15 bp, Homo sapiens
cattatgaccacaaa

SEQ ID NO: 137519 - DNA, 15 bp, Homo sapiens
attatgaccacaaaa

SEQ ID NO: 137520 - DNA, 15 bp, Homo sapiens
ttatgaccacaaaat

SEQ ID NO: 137521 - DNA, 15 bp, Homo sapiens
tatgaccacaaaatg

SEQ ID NO: 137522 - DNA, 15 bp, Homo sapiens
atgaccacaaaatgt

SEQ ID NO: 137523 - DNA, 15 bp, Homo sapiens
tgaccacaaaatgtc

SEQ ID NO: 137524 - DNA, 15 bp, Homo sapiens
gaccacaaaatgtcc

SEQ ID NO: 137525 - DNA, 15 bp, Homo sapiens
accacaaaatgtcct

SEQ ID NO: 137526 - DNA, 15 bp, Homo sapiens
ccacaaaatgtcctg

SEQ ID NO: 137527 - DNA, 15 bp, Homo sapiens
cacaaaatgtcctgg

SEQ ID NO: 137528 - DNA, 15 bp, Homo sapiens
acaaaatgtcctggt

SEQ ID NO: 137529 - DNA, 15 bp, Homo sapiens
caaaatgtcctggtc

SEQ ID NO: 137530 - DNA, 15 bp, Homo sapiens
aaaatgtcctggtcg

SEQ ID NO: 137531 - DNA, 15 bp, Homo sapiens
aaatgtcctggtcgt

SEQ ID NO: 137532 - DNA, 15 bp, Homo sapiens
aatgtcctggtcgtt

SEQ ID NO: 137533 - DNA, 15 bp, Homo sapiens
atgtcctggtcgttg

SEQ ID NO: 137534 - DNA, 15 bp, Homo sapiens
tgtcctggtcgttgt

SEQ ID NO: 137535 - DNA, 15 bp, Homo sapiens
gtcctggtcgttgtc

SEQ ID NO: 137536 - DNA, 15 bp, Homo sapiens
tcctggtcgttgtca

SEQ ID NO: 137537 - DNA, 15 bp, Homo sapiens
cctggtcgttgtcat

SEQ ID NO: 137538 - DNA, 15 bp, Homo sapiens
ctggtcgttgtcatc

SEQ ID NO: 137539 - DNA, 15 bp, Homo sapiens
tggtcgttgtcatca

SEQ ID NO: 137540 - DNA, 15 bp, Homo sapiens
ggtcgttgtcatcat

SEQ ID NO: 137541 - DNA, 15 bp, Homo sapiens
gtcgttgtcatcatg

SEQ ID NO: 137542 - DNA, 15 bp, Homo sapiens
tcgttgtcatcatga

SEQ ID NO: 137543 - DNA, 15 bp, Homo sapiens
cgttgtcatcatgag

SEQ ID NO: 137544 - DNA, 15 bp, Homo sapiens
gttgtcatcatgaga

SEQ ID NO: 137545 - DNA, 15 bp, Homo sapiens
ttgtcatcatgagag

SEQ ID NO: 137546 - DNA, 15 bp, Homo sapiens
tgtcatcatgagagg

SEQ ID NO: 137547 - DNA, 15 bp, Homo sapiens
gtcatcatgagaggt

SEQ ID NO: 137548 - DNA, 15 bp, Homo sapiens
tcatcatgagaggtc

SEQ ID NO: 137549 - DNA, 15 bp, Homo sapiens
catcatgagaggtct

SEQ ID NO: 137550 - DNA, 15 bp, Homo sapiens
atcatgagaggtctt

SEQ ID NO: 137551 - DNA, 15 bp, Homo sapiens
tcatgagaggtctta

SEQ ID NO: 137552 - DNA, 15 bp, Homo sapiens
catgagaggtcttac

SEQ ID NO: 137553 - DNA, 15 bp, Homo sapiens
atgagaggtcttacc

SEQ ID NO: 137554 - DNA, 15 bp, Homo sapiens
tgagaggtcttaccc

SEQ ID NO: 137555 - DNA, 15 bp, Homo sapiens
gagaggtcttacccc

SEQ ID NO: 137556 - DNA, 15 bp, Homo sapiens
agaggtcttacccct

SEQ ID NO: 137557 - DNA, 15 bp, Homo sapiens
gaggtcttacccctt

SEQ ID NO: 137558 - DNA, 15 bp, Homo sapiens
aggtcttaccccttc

SEQ ID NO: 137559 - DNA, 15 bp, Homo sapiens
ggtcttaccccttcc

SEQ ID NO: 137560 - DNA, 15 bp, Homo sapiens
gtcttaccccttcct

SEQ ID NO: 137561 - DNA, 15 bp, Homo sapiens
tcttaccccttcctc

SEQ ID NO: 137562 - DNA, 15 bp, Homo sapiens
cttaccccttcctct

SEQ ID NO: 137563 - DNA, 15 bp, Homo sapiens
ttaccccttcctctc

SEQ ID NO: 137564 - DNA, 15 bp, Homo sapiens
taccccttcctctcc

SEQ ID NO: 137565 - DNA, 15 bp, Homo sapiens
accccttcctctcca

SEQ ID NO: 137566 - DNA, 15 bp, Homo sapiens
ccccttcctctccag

SEQ ID NO: 137567 - DNA, 15 bp, Homo sapiens
cccttcctctccagc

SEQ ID NO: 137568 - DNA, 15 bp, Homo sapiens
ccttcctctccagcc

SEQ ID NO: 137569 - DNA, 15 bp, Homo sapiens
cttcctctccagcca

SEQ ID NO: 137570 - DNA, 15 bp, Homo sapiens
ttcctctccagccac

SEQ ID NO: 137571 - DNA, 15 bp, Homo sapiens
tcctctccagccact

SEQ ID NO: 137572 - DNA, 15 bp, Homo sapiens
cctctccagccactt

SEQ ID NO: 137573 - DNA, 15 bp, Homo sapiens
ctctccagccacttc

SEQ ID NO: 137574 - DNA, 15 bp, Homo sapiens
tctccagccacttct

SEQ ID NO: 137575 - DNA, 15 bp, Homo sapiens
ctccagccacttcta

SEQ ID NO: 137576 - DNA, 15 bp, Homo sapiens
tccagccacttctag

SEQ ID NO: 137577 - DNA, 15 bp, Homo sapiens
ccagccacttctagg

SEQ ID NO: 137578 - DNA, 15 bp, Homo sapiens
cagccacttctaggg

SEQ ID NO: 137579 - DNA, 15 bp, Homo sapiens
agccacttctaggga

SEQ ID NO: 137580 - DNA, 15 bp, Homo sapiens
gccacttctagggat

SEQ ID NO: 137581 - DNA, 15 bp, Homo sapiens
ccacttctagggatt

SEQ ID NO: 137582 - DNA, 15 bp, Homo sapiens
cacttctagggattt

SEQ ID NO: 137583 - DNA, 15 bp, Homo sapiens
acttctagggatttt

SEQ ID NO: 137584 - DNA, 15 bp, Homo sapiens
cttctagggattttt

SEQ ID NO: 137585 - DNA, 15 bp, Homo sapiens
ttctagggatttttg

SEQ ID NO: 137586 - DNA, 15 bp, Homo sapiens
tctagggatttttga

SEQ ID NO: 137587 - DNA, 15 bp, Homo sapiens
ctagggatttttgac

SEQ ID NO: 137588 - DNA, 15 bp, Homo sapiens
tagggatttttgact

SEQ ID NO: 137589 - DNA, 15 bp, Homo sapiens
agggatttttgactc

SEQ ID NO: 137590 - DNA, 15 bp, Homo sapiens
gggatttttgactct

SEQ ID NO: 137591 - DNA, 15 bp, Homo sapiens
ggatttttgactctg

SEQ ID NO: 137592 - DNA, 15 bp, Homo sapiens
gatttttgactctgt

SEQ ID NO: 137593 - DNA, 15 bp, Homo sapiens
atttttgactctgtc

SEQ ID NO: 137594 - DNA, 15 bp, Homo sapiens
tttttgactctgtcc

SEQ ID NO: 137595 - DNA, 15 bp, Homo sapiens
ttttgactctgtcct

SEQ ID NO: 137596 - DNA, 15 bp, Homo sapiens
tttgactctgtcctt

SEQ ID NO: 137597 - DNA, 15 bp, Homo sapiens
ttgactctgtccttt

SEQ ID NO: 137598 - DNA, 15 bp, Homo sapiens
tgactctgtcctttt

SEQ ID NO: 137599 - DNA, 15 bp, Homo sapiens
gactctgtccttttc

SEQ ID NO: 137600 - DNA, 15 bp, Homo sapiens
actctgtccttttcc

SEQ ID NO: 137601 - DNA, 15 bp, Homo sapiens
ctctgtccttttcca

SEQ ID NO: 137602 - DNA, 15 bp, Homo sapiens
tctgtccttttccag

SEQ ID NO: 137603 - DNA, 15 bp, Homo sapiens
ctgtccttttccaga

SEQ ID NO: 137604 - DNA, 15 bp, Homo sapiens
tgtccttttccagaa

SEQ ID NO: 137605 - DNA, 15 bp, Homo sapiens
gtccttttccagaac

SEQ ID NO: 137606 - DNA, 15 bp, Homo sapiens
tccttttccagaact

SEQ ID NO: 137607 - DNA, 15 bp, Homo sapiens
ccttttccagaactt

SEQ ID NO: 137608 - DNA, 15 bp, Homo sapiens
cttttccagaacttg

SEQ ID NO: 137609 - DNA, 15 bp, Homo sapiens
ttttccagaacttgg

SEQ ID NO: 137610 - DNA, 15 bp, Homo sapiens
tttccagaacttggc

SEQ ID NO: 137611 - DNA, 15 bp, Homo sapiens
ttccagaacttggct

SEQ ID NO: 137612 - DNA, 15 bp, Homo sapiens
tccagaacttggctc

SEQ ID NO: 137613 - DNA, 15 bp, Homo sapiens
ccagaacttggctcc

SEQ ID NO: 137614 - DNA, 15 bp, Homo sapiens
cagaacttggctcca

SEQ ID NO: 137615 - DNA, 15 bp, Homo sapiens
agaacttggctccag

SEQ ID NO: 137616 - DNA, 15 bp, Homo sapiens
gaacttggctccagt

SEQ ID NO: 137617 - DNA, 15 bp, Homo sapiens
aacttggctccagtc

SEQ ID NO: 137618 - DNA, 15 bp, Homo sapiens
acttggctccagtct

SEQ ID NO: 137619 - DNA, 15 bp, Homo sapiens
cttggctccagtctg

SEQ ID NO: 137620 - DNA, 15 bp, Homo sapiens
ttggctccagtctgg

SEQ ID NO: 137621 - DNA, 15 bp, Homo sapiens
tggctccagtctggt

SEQ ID NO: 137622 - DNA, 15 bp, Homo sapiens
ggctccagtctggtt

SEQ ID NO: 137623 - DNA, 15 bp, Homo sapiens
gctccagtctggttg

SEQ ID NO: 137624 - DNA, 15 bp, Homo sapiens
ctccagtctggttgc

SEQ ID NO: 137625 - DNA, 15 bp, Homo sapiens
tccagtctggttgct

SEQ ID NO: 137626 - DNA, 15 bp, Homo sapiens
ccagtctggttgctc

SEQ ID NO: 137627 - DNA, 15 bp, Homo sapiens
cagtctggttgctcg

SEQ ID NO: 137628 - DNA, 15 bp, Homo sapiens
agtctggttgctcgc

SEQ ID NO: 137629 - DNA, 15 bp, Homo sapiens
gtctggttgctcgcc

SEQ ID NO: 137630 - DNA, 15 bp, Homo sapiens
tctggttgctcgcca

SEQ ID NO: 137631 - DNA, 15 bp, Homo sapiens
ctggttgctcgccat

SEQ ID NO: 137632 - DNA, 15 bp, Homo sapiens
tggttgctcgccatg

SEQ ID NO: 137633 - DNA, 15 bp, Homo sapiens
ggttgctcgccatga

SEQ ID NO: 137634 - DNA, 15 bp, Homo sapiens
gttgctcgccatgaa

SEQ ID NO: 137635 - DNA, 15 bp, Homo sapiens
ttgctcgccatgaag

SEQ ID NO: 137636 - DNA, 15 bp, Homo sapiens
tgctcgccatgaagc

SEQ ID NO: 137637 - DNA, 15 bp, Homo sapiens
gctcgccatgaagca

SEQ ID NO: 137638 - DNA, 15 bp, Homo sapiens
ctcgccatgaagcac

SEQ ID NO: 137639 - DNA, 15 bp, Homo sapiens
tcgccatgaagcact

SEQ ID NO: 137640 - DNA, 15 bp, Homo sapiens
cgccatgaagcactt

SEQ ID NO: 137641 - DNA, 15 bp, Homo sapiens
gccatgaagcactta

SEQ ID NO: 137642 - DNA, 15 bp, Homo sapiens
ccatgaagcacttac

SEQ ID NO: 137643 - DNA, 15 bp, Homo sapiens
catgaagcacttaca

SEQ ID NO: 137644 - DNA, 15 bp, Homo sapiens
atgaagcacttacag

SEQ ID NO: 137645 - DNA, 15 bp, Homo sapiens
tgaagcacttacaga

SEQ ID NO: 137646 - DNA, 15 bp, Homo sapiens
gaagcacttacagat

SEQ ID NO: 137647 - DNA, 15 bp, Homo sapiens
aagcacttacagata

SEQ ID NO: 137648 - DNA, 15 bp, Homo sapiens
agcacttacagataa

SEQ ID NO: 137649 - DNA, 15 bp, Homo sapiens
gcacttacagataaa

SEQ ID NO: 137650 - DNA, 15 bp, Homo sapiens
cacttacagataaac

SEQ ID NO: 137651 - DNA, 15 bp, Homo sapiens
acttacagataaacc

SEQ ID NO: 137652 - DNA, 15 bp, Homo sapiens
cttacagataaacct

SEQ ID NO: 137653 - DNA, 15 bp, Homo sapiens
ttacagataaacctc

SEQ ID NO: 137654 - DNA, 15 bp, Homo sapiens
tacagataaacctca

SEQ ID NO: 137655 - DNA, 15 bp, Homo sapiens
acagataaacctcat

SEQ ID NO: 137656 - DNA, 15 bp, Homo sapiens
cagataaacctcatc

SEQ ID NO: 137657 - DNA, 15 bp, Homo sapiens
agataaacctcatct

SEQ ID NO: 137658 - DNA, 15 bp, Homo sapiens
gataaacctcatctt

SEQ ID NO: 137659 - DNA, 15 bp, Homo sapiens
ataaacctcatcttg

SEQ ID NO: 137660 - DNA, 15 bp, Homo sapiens
taaacctcatcttgg

SEQ ID NO: 137661 - DNA, 15 bp, Homo sapiens
aaacctcatcttggg

SEQ ID NO: 137662 - DNA, 15 bp, Homo sapiens
aacctcatcttgggc

SEQ ID NO: 137663 - DNA, 15 bp, Homo sapiens
acctcatcttgggcc

SEQ ID NO: 137664 - DNA, 15 bp, Homo sapiens
cctcatcttgggcca

SEQ ID NO: 137665 - DNA, 15 bp, Homo sapiens
ctcatcttgggccag

SEQ ID NO: 137666 - DNA, 15 bp, Homo sapiens
tcatcttgggccagt

SEQ ID NO: 137667 - DNA, 15 bp, Homo sapiens
catcttgggccagtg

SEQ ID NO: 137668 - DNA, 15 bp, Homo sapiens
atcttgggccagtgc

SEQ ID NO: 137669 - DNA, 15 bp, Homo sapiens
tcttgggccagtgct

SEQ ID NO: 137670 - DNA, 15 bp, Homo sapiens
cttgggccagtgctt

SEQ ID NO: 137671 - DNA, 15 bp, Homo sapiens
ttgggccagtgcttc

SEQ ID NO: 137672 - DNA, 15 bp, Homo sapiens
tgggccagtgcttcc

SEQ ID NO: 137673 - DNA, 15 bp, Homo sapiens
gggccagtgcttcca

SEQ ID NO: 137674 - DNA, 15 bp, Homo sapiens
ggccagtgcttccat

SEQ ID NO: 137675 - DNA, 15 bp, Homo sapiens
gccagtgcttccatt

SEQ ID NO: 137676 - DNA, 15 bp, Homo sapiens
ccagtgcttccattt

SEQ ID NO: 137677 - DNA, 15 bp, Homo sapiens
cagtgcttccattta

SEQ ID NO: 137678 - DNA, 15 bp, Homo sapiens
agtgcttccatttac

SEQ ID NO: 137679 - DNA, 15 bp, Homo sapiens
gtgcttccatttact

SEQ ID NO: 137680 - DNA, 15 bp, Homo sapiens
tgcttccatttactg

SEQ ID NO: 137681 - DNA, 15 bp, Homo sapiens
gcttccatttactgt

SEQ ID NO: 137682 - DNA, 15 bp, Homo sapiens
cttccatttactgtc

SEQ ID NO: 137683 - DNA, 15 bp, Homo sapiens
ttccatttactgtct

SEQ ID NO: 137684 - DNA, 15 bp, Homo sapiens
tccatttactgtctc

SEQ ID NO: 137685 - DNA, 15 bp, Homo sapiens
ccatttactgtctcc

SEQ ID NO: 137686 - DNA, 15 bp, Homo sapiens
catttactgtctcct

SEQ ID NO: 137687 - DNA, 15 bp, Homo sapiens
atttactgtctcctt

SEQ ID NO: 137688 - DNA, 15 bp, Homo sapiens
tttactgtctccttt

SEQ ID NO: 137689 - DNA, 15 bp, Homo sapiens
ttactgtctcctttt

SEQ ID NO: 137690 - DNA, 15 bp, Homo sapiens
tactgtctccttttg

SEQ ID NO: 137691 - DNA, 15 bp, Homo sapiens
actgtctccttttgg

SEQ ID NO: 137692 - DNA, 15 bp, Homo sapiens
ctgtctccttttggc

SEQ ID NO: 137693 - DNA, 15 bp, Homo sapiens
tgtctccttttggct

SEQ ID NO: 137694 - DNA, 15 bp, Homo sapiens
gtctccttttggctt

SEQ ID NO: 137695 - DNA, 15 bp, Homo sapiens
tctccttttggcttg

SEQ ID NO: 137696 - DNA, 15 bp, Homo sapiens
ctccttttggcttgc

SEQ ID NO: 137697 - DNA, 15 bp, Homo sapiens
tccttttggcttgct

SEQ ID NO: 137698 - DNA, 15 bp, Homo sapiens
ccttttggcttgctt

SEQ ID NO: 137699 - DNA, 15 bp, Homo sapiens
cttttggcttgctta

SEQ ID NO: 137700 - DNA, 15 bp, Homo sapiens
ttttggcttgcttat

SEQ ID NO: 137701 - DNA, 15 bp, Homo sapiens
tttggcttgcttatc

SEQ ID NO: 137702 - DNA, 15 bp, Homo sapiens
ttggcttgcttatcc

SEQ ID NO: 137703 - DNA, 15 bp, Homo sapiens
tggcttgcttatcct

SEQ ID NO: 137704 - DNA, 15 bp, Homo sapiens
ggcttgcttatcctt

SEQ ID NO: 137705 - DNA, 15 bp, Homo sapiens
gcttgcttatccttc

SEQ ID NO: 137706 - DNA, 15 bp, Homo sapiens
cttgcttatccttcc

SEQ ID NO: 137707 - DNA, 15 bp, Homo sapiens
ttgcttatccttcct

SEQ ID NO: 137708 - DNA, 15 bp, Homo sapiens
tgcttatccttcctt

SEQ ID NO: 137709 - DNA, 15 bp, Homo sapiens
gcttatccttccttc

SEQ ID NO: 137710 - DNA, 15 bp, Homo sapiens
cttatccttccttct

SEQ ID NO: 137711 - DNA, 15 bp, Homo sapiens
ttatccttccttctg

SEQ ID NO: 137712 - DNA, 15 bp, Homo sapiens
tatccttccttctgc

SEQ ID NO: 137713 - DNA, 15 bp, Homo sapiens
atccttccttctgcc

SEQ ID NO: 137714 - DNA, 15 bp, Homo sapiens
tccttccttctgcct

SEQ ID NO: 137715 - DNA, 15 bp, Homo sapiens
ccttccttctgcctt

SEQ ID NO: 137716 - DNA, 15 bp, Homo sapiens
cttccttctgccttc

SEQ ID NO: 137717 - DNA, 15 bp, Homo sapiens
ttccttctgccttct

SEQ ID NO: 137718 - DNA, 15 bp, Homo sapiens
tccttctgccttctt

SEQ ID NO: 137719 - DNA, 15 bp, Homo sapiens
ccttctgccttcttg

SEQ ID NO: 137720 - DNA, 15 bp, Homo sapiens
cttctgccttcttga

SEQ ID NO: 137721 - DNA, 15 bp, Homo sapiens
ttctgccttcttgaa

SEQ ID NO: 137722 - DNA, 15 bp, Homo sapiens
tctgccttcttgaat

SEQ ID NO: 137723 - DNA, 15 bp, Homo sapiens
ctgccttcttgaatt

SEQ ID NO: 137724 - DNA, 15 bp, Homo sapiens
tgccttcttgaattg

SEQ ID NO: 137725 - DNA, 15 bp, Homo sapiens
gccttcttgaattga

SEQ ID NO: 137726 - DNA, 15 bp, Homo sapiens
ccttcttgaattgat

SEQ ID NO: 137727 - DNA, 15 bp, Homo sapiens
cttcttgaattgatt

SEQ ID NO: 137728 - DNA, 15 bp, Homo sapiens
ttcttgaattgattt

SEQ ID NO: 137729 - DNA, 15 bp, Homo sapiens
tcttgaattgatttg

SEQ ID NO: 137730 - DNA, 15 bp, Homo sapiens
cttgaattgatttgc

SEQ ID NO: 137731 - DNA, 15 bp, Homo sapiens
ttgaattgatttgcc

SEQ ID NO: 137732 - DNA, 15 bp, Homo sapiens
tgaattgatttgcct

SEQ ID NO: 137733 - DNA, 15 bp, Homo sapiens
gaattgatttgcctc

SEQ ID NO: 137734 - DNA, 15 bp, Homo sapiens
aattgatttgcctct

SEQ ID NO: 137735 - DNA, 15 bp, Homo sapiens
attgatttgcctctt

SEQ ID NO: 137736 - DNA, 15 bp, Homo sapiens
ttgatttgcctcttt

SEQ ID NO: 137737 - DNA, 15 bp, Homo sapiens
tgatttgcctcttta

SEQ ID NO: 137738 - DNA, 15 bp, Homo sapiens
gatttgcctctttat

SEQ ID NO: 137739 - DNA, 15 bp, Homo sapiens
atttgcctctttatc

SEQ ID NO: 137740 - DNA, 15 bp, Homo sapiens
tttgcctctttatct

SEQ ID NO: 137741 - DNA, 15 bp, Homo sapiens
ttgcctctttatctc

SEQ ID NO: 137742 - DNA, 15 bp, Homo sapiens
tgcctctttatctcc

SEQ ID NO: 137743 - DNA, 15 bp, Homo sapiens
gcctctttatctccc

SEQ ID NO: 137744 - DNA, 15 bp, Homo sapiens
cctctttatctcccc

SEQ ID NO: 137745 - DNA, 15 bp, Homo sapiens
ctctttatctcccct

SEQ ID NO: 137746 - DNA, 15 bp, Homo sapiens
tctttatctcccctt

SEQ ID NO: 137747 - DNA, 15 bp, Homo sapiens
ctttatctccccttt

SEQ ID NO: 137748 - DNA, 15 bp, Homo sapiens
tttatctcccctttc

SEQ ID NO: 137749 - DNA, 15 bp, Homo sapiens
ttatctcccctttca

SEQ ID NO: 137750 - DNA, 15 bp, Homo sapiens
tatctcccctttcag

SEQ ID NO: 137751 - DNA, 15 bp, Homo sapiens
atctcccctttcagc

SEQ ID NO: 137752 - DNA, 15 bp, Homo sapiens
tctcccctttcagcc

SEQ ID NO: 137753 - DNA, 15 bp, Homo sapiens
ctcccctttcagcct

SEQ ID NO: 137754 - DNA, 15 bp, Homo sapiens
tcccctttcagcctt

SEQ ID NO: 137755 - DNA, 15 bp, Homo sapiens
cccctttcagccttg

SEQ ID NO: 137756 - DNA, 15 bp, Homo sapiens
ccctttcagccttga

SEQ ID NO: 137757 - DNA, 15 bp, Homo sapiens
cctttcagccttgaa

SEQ ID NO: 137758 - DNA, 15 bp, Homo sapiens
ctttcagccttgaaa

SEQ ID NO: 137759 - DNA, 15 bp, Homo sapiens
tttcagccttgaaag

SEQ ID NO: 137760 - DNA, 15 bp, Homo sapiens
ttcagccttgaaagt

SEQ ID NO: 137761 - DNA, 15 bp, Homo sapiens
tcagccttgaaagtt

SEQ ID NO: 137762 - DNA, 15 bp, Homo sapiens
cagccttgaaagttc

SEQ ID NO: 137763 - DNA, 15 bp, Homo sapiens
agccttgaaagttcc

SEQ ID NO: 137764 - DNA, 15 bp, Homo sapiens
gccttgaaagttcct

SEQ ID NO: 137765 - DNA, 15 bp, Homo sapiens
ccttgaaagttcctc

SEQ ID NO: 137766 - DNA, 15 bp, Homo sapiens
cttgaaagttcctcg

SEQ ID NO: 137767 - DNA, 15 bp, Homo sapiens
ttgaaagttcctcga

SEQ ID NO: 137768 - DNA, 15 bp, Homo sapiens
tgaaagttcctcgaa

SEQ ID NO: 137769 - DNA, 15 bp, Homo sapiens
gaaagttcctcgaag

SEQ ID NO: 137770 - DNA, 15 bp, Homo sapiens
aaagttcctcgaagg

SEQ ID NO: 137771 - DNA, 15 bp, Homo sapiens
aagttcctcgaaggc

SEQ ID NO: 137772 - DNA, 15 bp, Homo sapiens
agttcctcgaaggca

SEQ ID NO: 137773 - DNA, 15 bp, Homo sapiens
gttcctcgaaggcag

SEQ ID NO: 137774 - DNA, 15 bp, Homo sapiens
ttcctcgaaggcagg

SEQ ID NO: 137775 - DNA, 15 bp, Homo sapiens
tcctcgaaggcaggg

SEQ ID NO: 137776 - DNA, 15 bp, Homo sapiens
cctcgaaggcaggga

SEQ ID NO: 137777 - DNA, 15 bp, Homo sapiens
ctcgaaggcagggac

SEQ ID NO: 137778 - DNA, 15 bp, Homo sapiens
tcgaaggcagggact

SEQ ID NO: 137779 - DNA, 15 bp, Homo sapiens
cgaaggcagggactg

SEQ ID NO: 137780 - DNA, 15 bp, Homo sapiens
gaaggcagggactgt

SEQ ID NO: 137781 - DNA, 15 bp, Homo sapiens
aaggcagggactgtg

SEQ ID NO: 137782 - DNA, 15 bp, Homo sapiens
aggcagggactgtgt

SEQ ID NO: 137783 - DNA, 15 bp, Homo sapiens
ggcagggactgtgtc

SEQ ID NO: 137784 - DNA, 15 bp, Homo sapiens
gcagggactgtgtcc

SEQ ID NO: 137785 - DNA, 15 bp, Homo sapiens
cagggactgtgtccc

SEQ ID NO: 137786 - DNA, 15 bp, Homo sapiens
agggactgtgtcccc

SEQ ID NO: 137787 - DNA, 15 bp, Homo sapiens
gggactgtgtcccca

SEQ ID NO: 137788 - DNA, 15 bp, Homo sapiens
ggactgtgtccccat

SEQ ID NO: 137789 - DNA, 15 bp, Homo sapiens
gactgtgtccccatc

SEQ ID NO: 137790 - DNA, 15 bp, Homo sapiens
actgtgtccccatct

SEQ ID NO: 137791 - DNA, 15 bp, Homo sapiens
ctgtgtccccatctt

SEQ ID NO: 137792 - DNA, 15 bp, Homo sapiens
tgtgtccccatcttt

SEQ ID NO: 137793 - DNA, 15 bp, Homo sapiens
gtgtccccatctttt

SEQ ID NO: 137794 - DNA, 15 bp, Homo sapiens
tgtccccatcttttc

SEQ ID NO: 137795 - DNA, 15 bp, Homo sapiens
gtccccatcttttct

SEQ ID NO: 137796 - DNA, 15 bp, Homo sapiens
tccccatcttttcta

SEQ ID NO: 137797 - DNA, 15 bp, Homo sapiens
ccccatcttttctat

SEQ ID NO: 137798 - DNA, 15 bp, Homo sapiens
cccatcttttctata

SEQ ID NO: 137799 - DNA, 15 bp, Homo sapiens
ccatcttttctataa

SEQ ID NO: 137800 - DNA, 15 bp, Homo sapiens
catcttttctataaa

SEQ ID NO: 137801 - DNA, 15 bp, Homo sapiens
atcttttctataaat

SEQ ID NO: 137802 - DNA, 15 bp, Homo sapiens
tcttttctataaatg

SEQ ID NO: 137803 - DNA, 15 bp, Homo sapiens
cttttctataaatgg

SEQ ID NO: 137804 - DNA, 15 bp, Homo sapiens
ttttctataaatggc

SEQ ID NO: 137805 - DNA, 15 bp, Homo sapiens
tttctataaatggca

SEQ ID NO: 137806 - DNA, 15 bp, Homo sapiens
ttctataaatggcat

SEQ ID NO: 137807 - DNA, 15 bp, Homo sapiens
tctataaatggcatt

SEQ ID NO: 137808 - DNA, 15 bp, Homo sapiens
ctataaatggcattg

SEQ ID NO: 137809 - DNA, 15 bp, Homo sapiens
tataaatggcattgt

SEQ ID NO: 137810 - DNA, 15 bp, Homo sapiens
ataaatggcattgtt

SEQ ID NO: 137811 - DNA, 15 bp, Homo sapiens
taaatggcattgttg

SEQ ID NO: 137812 - DNA, 15 bp, Homo sapiens
aaatggcattgttgt

SEQ ID NO: 137813 - DNA, 15 bp, Homo sapiens
aatggcattgttgta

SEQ ID NO: 137814 - DNA, 15 bp, Homo sapiens
atggcattgttgtac

SEQ ID NO: 137815 - DNA, 15 bp, Homo sapiens
tggcattgttgtaca

SEQ ID NO: 137816 - DNA, 15 bp, Homo sapiens
ggcattgttgtacat

SEQ ID NO: 137817 - DNA, 15 bp, Homo sapiens
gcattgttgtacatt

SEQ ID NO: 137818 - DNA, 15 bp, Homo sapiens
cattgttgtacattg

SEQ ID NO: 137819 - DNA, 15 bp, Homo sapiens
attgttgtacattgg

SEQ ID NO: 137820 - DNA, 15 bp, Homo sapiens
ttgttgtacattggt

SEQ ID NO: 137821 - DNA, 15 bp, Homo sapiens
tgttgtacattggta

SEQ ID NO: 137822 - DNA, 15 bp, Homo sapiens
gttgtacattggtaa

SEQ ID NO: 137823 - DNA, 15 bp, Homo sapiens
ttgtacattggtaaa

SEQ ID NO: 137824 - DNA, 15 bp, Homo sapiens
tgtacattggtaaag

SEQ ID NO: 137825 - DNA, 15 bp, Homo sapiens
gtacattggtaaagt

SEQ ID NO: 137826 - DNA, 15 bp, Homo sapiens
tacattggtaaagtt

SEQ ID NO: 137827 - DNA, 15 bp, Homo sapiens
acattggtaaagttg

SEQ ID NO: 137828 - DNA, 15 bp, Homo sapiens
cattggtaaagttga

SEQ ID NO: 137829 - DNA, 15 bp, Homo sapiens
attggtaaagttgag

SEQ ID NO: 137830 - DNA, 15 bp, Homo sapiens
ttggtaaagttgagt

SEQ ID NO: 137831 - DNA, 15 bp, Homo sapiens
tggtaaagttgagtg

SEQ ID NO: 137832 - DNA, 15 bp, Homo sapiens
ggtaaagttgagtga

SEQ ID NO: 137833 - DNA, 15 bp, Homo sapiens
gtaaagttgagtgaa

SEQ ID NO: 137834 - DNA, 15 bp, Homo sapiens
taaagttgagtgaaa

SEQ ID NO: 137835 - DNA, 15 bp, Homo sapiens
aaagttgagtgaaaa

SEQ ID NO: 137836 - DNA, 15 bp, Homo sapiens
aagttgagtgaaaaa

SEQ ID NO: 137837 - DNA, 15 bp, Homo sapiens
agttgagtgaaaaaa

SEQ ID NO: 137838 - DNA, 15 bp, Homo sapiens
gttgagtgaaaaaat

SEQ ID NO: 137839 - DNA, 15 bp, Homo sapiens
ttgagtgaaaaaatc

SEQ ID NO: 137840 - DNA, 15 bp, Homo sapiens
tgagtgaaaaaatct

SEQ ID NO: 137841 - DNA, 15 bp, Homo sapiens
gagtgaaaaaatctt

SEQ ID NO: 137842 - DNA, 15 bp, Homo sapiens
agtgaaaaaatcttt

SEQ ID NO: 137843 - DNA, 15 bp, Homo sapiens
gtgaaaaaatctttt

SEQ ID NO: 137844 - DNA, 15 bp, Homo sapiens
tgaaaaaatcttttt

SEQ ID NO: 137845 - DNA, 15 bp, Homo sapiens
gaaaaaatctttttg

SEQ ID NO: 137846 - DNA, 15 bp, Homo sapiens
aaaaaatctttttga

SEQ ID NO: 137847 - DNA, 15 bp, Homo sapiens
aaaaatctttttgat

SEQ ID NO: 137848 - DNA, 15 bp, Homo sapiens
aaaatctttttgata

SEQ ID NO: 137849 - DNA, 15 bp, Homo sapiens
aaatctttttgataa

SEQ ID NO: 137850 - DNA, 15 bp, Homo sapiens
aatctttttgataat

SEQ ID NO: 137851 - DNA, 15 bp, Homo sapiens
atctttttgataatc

SEQ ID NO: 137852 - DNA, 15 bp, Homo sapiens
tctttttgataatca

SEQ ID NO: 137853 - DNA, 15 bp, Homo sapiens
ctttttgataatcac

SEQ ID NO: 137854 - DNA, 15 bp, Homo sapiens
tttttgataatcaca

SEQ ID NO: 137855 - DNA, 15 bp, Homo sapiens
ttttgataatcacaa

SEQ ID NO: 137856 - DNA, 15 bp, Homo sapiens
tttgataatcacaaa

SEQ ID NO: 137857 - DNA, 15 bp, Homo sapiens
ttgataatcacaaat

SEQ ID NO: 137858 - DNA, 15 bp, Homo sapiens
tgataatcacaaatt

SEQ ID NO: 137859 - DNA, 15 bp, Homo sapiens
gataatcacaaatta

SEQ ID NO: 137860 - DNA, 15 bp, Homo sapiens
ataatcacaaattat

SEQ ID NO: 137861 - DNA, 15 bp, Homo sapiens
taatcacaaattatt

SEQ ID NO: 137862 - DNA, 15 bp, Homo sapiens
aatcacaaattatta

SEQ ID NO: 137863 - DNA, 15 bp, Homo sapiens
atcacaaattattac

SEQ ID NO: 137864 - DNA, 15 bp, Homo sapiens
tcacaaattattacc

SEQ ID NO: 137865 - DNA, 15 bp, Homo sapiens
cacaaattattacca

SEQ ID NO: 137866 - DNA, 15 bp, Homo sapiens
acaaattattaccat

SEQ ID NO: 137867 - DNA, 15 bp, Homo sapiens
caaattattaccata

SEQ ID NO: 137868 - DNA, 15 bp, Homo sapiens
aaattattaccatat

SEQ ID NO: 137869 - DNA, 15 bp, Homo sapiens
aattattaccatata

SEQ ID NO: 137870 - DNA, 15 bp, Homo sapiens
attattaccatatat

SEQ ID NO: 137871 - DNA, 15 bp, Homo sapiens
ttattaccatatatt

SEQ ID NO: 137872 - DNA, 15 bp, Homo sapiens
tattaccatatattg

SEQ ID NO: 137873 - DNA, 15 bp, Homo sapiens
attaccatatattga

SEQ ID NO: 137874 - DNA, 15 bp, Homo sapiens
ttaccatatattgag

SEQ ID NO: 137875 - DNA, 15 bp, Homo sapiens
taccatatattgagc

SEQ ID NO: 137876 - DNA, 15 bp, Homo sapiens
accatatattgagca

SEQ ID NO: 137877 - DNA, 15 bp, Homo sapiens
ccatatattgagcac

SEQ ID NO: 137878 - DNA, 15 bp, Homo sapiens
catatattgagcacc

SEQ ID NO: 137879 - DNA, 15 bp, Homo sapiens
atatattgagcacct

SEQ ID NO: 137880 - DNA, 15 bp, Homo sapiens
tatattgagcaccta

SEQ ID NO: 137881 - DNA, 15 bp, Homo sapiens
atattgagcacctac

SEQ ID NO: 137882 - DNA, 15 bp, Homo sapiens
tattgagcacctacc

SEQ ID NO: 137883 - DNA, 15 bp, Homo sapiens
attgagcacctacca

SEQ ID NO: 137884 - DNA, 15 bp, Homo sapiens
ttgagcacctaccat

SEQ ID NO: 137885 - DNA, 15 bp, Homo sapiens
tgagcacctaccatg

SEQ ID NO: 137886 - DNA, 15 bp, Homo sapiens
gagcacctaccatga

SEQ ID NO: 137887 - DNA, 15 bp, Homo sapiens
agcacctaccatgat

SEQ ID NO: 137888 - DNA, 15 bp, Homo sapiens
gcacctaccatgatg

SEQ ID NO: 137889 - DNA, 15 bp, Homo sapiens
cacctaccatgatga

SEQ ID NO: 137890 - DNA, 15 bp, Homo sapiens
acctaccatgatgag

SEQ ID NO: 137891 - DNA, 15 bp, Homo sapiens
cctaccatgatgagt

SEQ ID NO: 137892 - DNA, 15 bp, Homo sapiens
ctaccatgatgagta

SEQ ID NO: 137893 - DNA, 15 bp, Homo sapiens
taccatgatgagtat

SEQ ID NO: 137894 - DNA, 15 bp, Homo sapiens
accatgatgagtatc

SEQ ID NO: 137895 - DNA, 15 bp, Homo sapiens
ccatgatgagtatct

SEQ ID NO: 137896 - DNA, 15 bp, Homo sapiens
catgatgagtatctc

SEQ ID NO: 137897 - DNA, 15 bp, Homo sapiens
atgatgagtatctct

SEQ ID NO: 137898 - DNA, 15 bp, Homo sapiens
tgatgagtatctctg

SEQ ID NO: 137899 - DNA, 15 bp, Homo sapiens
gatgagtatctctga

SEQ ID NO: 137900 - DNA, 15 bp, Homo sapiens
atgagtatctctgat

SEQ ID NO: 137901 - DNA, 15 bp, Homo sapiens
tgagtatctctgatc

SEQ ID NO: 137902 - DNA, 15 bp, Homo sapiens
gagtatctctgatct

SEQ ID NO: 137903 - DNA, 15 bp, Homo sapiens
agtatctctgatctt

SEQ ID NO: 137904 - DNA, 15 bp, Homo sapiens
gtatctctgatcttc

SEQ ID NO: 137905 - DNA, 15 bp, Homo sapiens
tatctctgatcttca

SEQ ID NO: 137906 - DNA, 15 bp, Homo sapiens
atctctgatcttcat

SEQ ID NO: 137907 - DNA, 15 bp, Homo sapiens
tctctgatcttcata

SEQ ID NO: 137908 - DNA, 15 bp, Homo sapiens
ctctgatcttcatat

SEQ ID NO: 137909 - DNA, 15 bp, Homo sapiens
tctgatcttcatatc

SEQ ID NO: 137910 - DNA, 15 bp, Homo sapiens
ctgatcttcatatct

SEQ ID NO: 137911 - DNA, 15 bp, Homo sapiens
tgatcttcatatctt

SEQ ID NO: 137912 - DNA, 15 bp, Homo sapiens
gatcttcatatcttt

SEQ ID NO: 137913 - DNA, 15 bp, Homo sapiens
atcttcatatctttg

SEQ ID NO: 137914 - DNA, 15 bp, Homo sapiens
tcttcatatctttga

SEQ ID NO: 137915 - DNA, 15 bp, Homo sapiens
cttcatatctttgaa

SEQ ID NO: 137916 - DNA, 15 bp, Homo sapiens
ttcatatctttgaaa

SEQ ID NO: 137917 - DNA, 15 bp, Homo sapiens
tcatatctttgaaat

SEQ ID NO: 137918 - DNA, 15 bp, Homo sapiens
catatctttgaaatg

SEQ ID NO: 137919 - DNA, 15 bp, Homo sapiens
atatctttgaaatgt

SEQ ID NO: 137920 - DNA, 15 bp, Homo sapiens
atgaggaataactag

SEQ ID NO: 137921 - DNA, 15 bp, Homo sapiens
tgaggaataactagg

SEQ ID NO: 137922 - DNA, 15 bp, Homo sapiens
gaggaataactagga

SEQ ID NO: 137923 - DNA, 15 bp, Homo sapiens
aggaataactaggag

SEQ ID NO: 137924 - DNA, 15 bp, Homo sapiens
ggaataactaggagc

SEQ ID NO: 137925 - DNA, 15 bp, Homo sapiens
gaataactaggagct

SEQ ID NO: 137926 - DNA, 15 bp, Homo sapiens
aataactaggagcta

SEQ ID NO: 137927 - DNA, 15 bp, Homo sapiens
ataactaggagctag

SEQ ID NO: 137928 - DNA, 15 bp, Homo sapiens
taactaggagctagc

SEQ ID NO: 137929 - DNA, 15 bp, Homo sapiens
aactaggagctagcc

SEQ ID NO: 137930 - DNA, 15 bp, Homo sapiens
actaggagctagcca

SEQ ID NO: 137931 - DNA, 15 bp, Homo sapiens
ctaggagctagccat

SEQ ID NO: 137932 - DNA, 15 bp, Homo sapiens
taggagctagccata

SEQ ID NO: 137933 - DNA, 15 bp, Homo sapiens
aggagctagccatag

SEQ ID NO: 137934 - DNA, 15 bp, Homo sapiens
ggagctagccataga

SEQ ID NO: 137935 - DNA, 15 bp, Homo sapiens
gagctagccatagag

SEQ ID NO: 137936 - DNA, 15 bp, Homo sapiens
agctagccatagagg

SEQ ID NO: 137937 - DNA, 15 bp, Homo sapiens
gctagccatagaggg

SEQ ID NO: 137938 - DNA, 15 bp, Homo sapiens
ctagccatagagggg

SEQ ID NO: 137939 - DNA, 15 bp, Homo sapiens
tagccatagaggggt

SEQ ID NO: 137940 - DNA, 15 bp, Homo sapiens
agccatagaggggta

SEQ ID NO: 137941 - DNA, 15 bp, Homo sapiens
gccatagaggggtag

SEQ ID NO: 137942 - DNA, 15 bp, Homo sapiens
ccatagaggggtagc

SEQ ID NO: 137943 - DNA, 15 bp, Homo sapiens
catagaggggtagca

SEQ ID NO: 137944 - DNA, 15 bp, Homo sapiens
atagaggggtagcag

SEQ ID NO: 137945 - DNA, 15 bp, Homo sapiens
tagaggggtagcagt

SEQ ID NO: 137946 - DNA, 15 bp, Homo sapiens
agaggggtagcagtg

SEQ ID NO: 137947 - DNA, 15 bp, Homo sapiens
gaggggtagcagtga

SEQ ID NO: 137948 - DNA, 15 bp, Homo sapiens
aggggtagcagtgaa

SEQ ID NO: 137949 - DNA, 15 bp, Homo sapiens
ggggtagcagtgaat

SEQ ID NO: 137950 - DNA, 15 bp, Homo sapiens
gggtagcagtgaatc

SEQ ID NO: 137951 - DNA, 15 bp, Homo sapiens
ggtagcagtgaatca

SEQ ID NO: 137952 - DNA, 15 bp, Homo sapiens
gtagcagtgaatcat

SEQ ID NO: 137953 - DNA, 15 bp, Homo sapiens
tagcagtgaatcatt

SEQ ID NO: 137954 - DNA, 15 bp, Homo sapiens
agcagtgaatcattt

SEQ ID NO: 137955 - DNA, 15 bp, Homo sapiens
gcagtgaatcatttc

SEQ ID NO: 137956 - DNA, 15 bp, Homo sapiens
cagtgaatcatttct

SEQ ID NO: 137957 - DNA, 15 bp, Homo sapiens
agtgaatcatttctc

SEQ ID NO: 137958 - DNA, 15 bp, Homo sapiens
gtgaatcatttctct

SEQ ID NO: 137959 - DNA, 15 bp, Homo sapiens
tgaatcatttctcta

SEQ ID NO: 137960 - DNA, 15 bp, Homo sapiens
gaatcatttctctag

SEQ ID NO: 137961 - DNA, 15 bp, Homo sapiens
aatcatttctctagc

SEQ ID NO: 137962 - DNA, 15 bp, Homo sapiens
atcatttctctagcg

SEQ ID NO: 137963 - DNA, 15 bp, Homo sapiens
tcatttctctagcga

SEQ ID NO: 137964 - DNA, 15 bp, Homo sapiens
catttctctagcgat

SEQ ID NO: 137965 - DNA, 15 bp, Homo sapiens
atttctctagcgatg

SEQ ID NO: 137966 - DNA, 15 bp, Homo sapiens
tttctctagcgatgt

SEQ ID NO: 137967 - DNA, 15 bp, Homo sapiens
ttctctagcgatgta

SEQ ID NO: 137968 - DNA, 15 bp, Homo sapiens
tctctagcgatgtaa

SEQ ID NO: 137969 - DNA, 15 bp, Homo sapiens
ctctagcgatgtaaa

SEQ ID NO: 137970 - DNA, 15 bp, Homo sapiens
tctagcgatgtaaat

SEQ ID NO: 137971 - DNA, 15 bp, Homo sapiens
ctagcgatgtaaatc

SEQ ID NO: 137972 - DNA, 15 bp, Homo sapiens
tagcgatgtaaatct

SEQ ID NO: 137973 - DNA, 15 bp, Homo sapiens
agcgatgtaaatctt

SEQ ID NO: 137974 - DNA, 15 bp, Homo sapiens
gcgatgtaaatcttg

SEQ ID NO: 137975 - DNA, 15 bp, Homo sapiens
cgatgtaaatcttgc

SEQ ID NO: 137976 - DNA, 15 bp, Homo sapiens
gatgtaaatcttgct

SEQ ID NO: 137977 - DNA, 15 bp, Homo sapiens
atgtaaatcttgctc

SEQ ID NO: 137978 - DNA, 15 bp, Homo sapiens
tgtaaatcttgctca

SEQ ID NO: 137979 - DNA, 15 bp, Homo sapiens
gtaaatcttgctcaa

SEQ ID NO: 137980 - DNA, 15 bp, Homo sapiens
taaatcttgctcaat

SEQ ID NO: 137981 - DNA, 15 bp, Homo sapiens
aaatcttgctcaatt

SEQ ID NO: 137982 - DNA, 15 bp, Homo sapiens
aatcttgctcaattt

SEQ ID NO: 137983 - DNA, 15 bp, Homo sapiens
atcttgctcaattta

SEQ ID NO: 137984 - DNA, 15 bp, Homo sapiens
tcttgctcaatttat

SEQ ID NO: 137985 - DNA, 15 bp, Homo sapiens
cttgctcaatttatt

SEQ ID NO: 137986 - DNA, 15 bp, Homo sapiens
ttgctcaatttattc

SEQ ID NO: 137987 - DNA, 15 bp, Homo sapiens
tgctcaatttattct

SEQ ID NO: 137988 - DNA, 15 bp, Homo sapiens
gctcaatttattctg

SEQ ID NO: 137989 - DNA, 15 bp, Homo sapiens
ctcaatttattctgt

SEQ ID NO: 137990 - DNA, 15 bp, Homo sapiens
tcaatttattctgtc

SEQ ID NO: 137991 - DNA, 15 bp, Homo sapiens
caatttattctgtct

SEQ ID NO: 137992 - DNA, 15 bp, Homo sapiens
aatttattctgtcta

SEQ ID NO: 137993 - DNA, 15 bp, Homo sapiens
atttattctgtctat

SEQ ID NO: 137994 - DNA, 15 bp, Homo sapiens
tttattctgtctata

SEQ ID NO: 137995 - DNA, 15 bp, Homo sapiens
ttattctgtctatat

SEQ ID NO: 137996 - DNA, 15 bp, Homo sapiens
tattctgtctatata

SEQ ID NO: 137997 - DNA, 15 bp, Homo sapiens
attctgtctatataa

SEQ ID NO: 137998 - DNA, 15 bp, Homo sapiens
ttctgtctatataac

SEQ ID NO: 137999 - DNA, 15 bp, Homo sapiens
tctgtctatataact

SEQ ID NO: 138000 - DNA, 15 bp, Homo sapiens
ctgtctatataactc

SEQ ID NO: 138001 - DNA, 15 bp, Homo sapiens
tgtctatataactca

SEQ ID NO: 138002 - DNA, 15 bp, Homo sapiens
gtctatataactcaa

SEQ ID NO: 138003 - DNA, 15 bp, Homo sapiens
tctatataactcaat

SEQ ID NO: 138004 - DNA, 15 bp, Homo sapiens
ctatataactcaata

SEQ ID NO: 138005 - DNA, 15 bp, Homo sapiens
tatataactcaatat

SEQ ID NO: 138006 - DNA, 15 bp, Homo sapiens
atataactcaatatt

SEQ ID NO: 138007 - DNA, 15 bp, Homo sapiens
tataactcaatatta

SEQ ID NO: 138008 - DNA, 15 bp, Homo sapiens
ataactcaatattac

SEQ ID NO: 138009 - DNA, 15 bp, Homo sapiens
taactcaatattact

SEQ ID NO: 138010 - DNA, 15 bp, Homo sapiens
aactcaatattactg

SEQ ID NO: 138011 - DNA, 15 bp, Homo sapiens
actcaatattactga

SEQ ID NO: 138012 - DNA, 15 bp, Homo sapiens
ctcaatattactgaa

SEQ ID NO: 138013 - DNA, 15 bp, Homo sapiens
tcaatattactgaag

SEQ ID NO: 138014 - DNA, 15 bp, Homo sapiens
caatattactgaagt

SEQ ID NO: 138015 - DNA, 15 bp, Homo sapiens
aatattactgaagtt

SEQ ID NO: 138016 - DNA, 15 bp, Homo sapiens
atattactgaagttt

SEQ ID NO: 138017 - DNA, 15 bp, Homo sapiens
tattactgaagtttg

SEQ ID NO: 138018 - DNA, 15 bp, Homo sapiens
attactgaagtttgc

SEQ ID NO: 138019 - DNA, 15 bp, Homo sapiens
ttactgaagtttgcc

SEQ ID NO: 138020 - DNA, 15 bp, Homo sapiens
tactgaagtttgcct

SEQ ID NO: 138021 - DNA, 15 bp, Homo sapiens
actgaagtttgccta

SEQ ID NO: 138022 - DNA, 15 bp, Homo sapiens
ctgaagtttgcctaa

SEQ ID NO: 138023 - DNA, 15 bp, Homo sapiens
tgaagtttgcctaaa

SEQ ID NO: 138024 - DNA, 15 bp, Homo sapiens
gaagtttgcctaaag

SEQ ID NO: 138025 - DNA, 15 bp, Homo sapiens
aagtttgcctaaagc

SEQ ID NO: 138026 - DNA, 15 bp, Homo sapiens
agtttgcctaaagca

SEQ ID NO: 138027 - DNA, 15 bp, Homo sapiens
gtttgcctaaagcag

SEQ ID NO: 138028 - DNA, 15 bp, Homo sapiens
tttgcctaaagcaga

SEQ ID NO: 138029 - DNA, 15 bp, Homo sapiens
ttgcctaaagcagaa

SEQ ID NO: 138030 - DNA, 15 bp, Homo sapiens
tgcctaaagcagaat

SEQ ID NO: 138031 - DNA, 15 bp, Homo sapiens
gcctaaagcagaata

SEQ ID NO: 138032 - DNA, 15 bp, Homo sapiens
cctaaagcagaatac

SEQ ID NO: 138033 - DNA, 15 bp, Homo sapiens
ctaaagcagaataca

SEQ ID NO: 138034 - DNA, 15 bp, Homo sapiens
taaagcagaatacac

SEQ ID NO: 138035 - DNA, 15 bp, Homo sapiens
aaagcagaatacacc

SEQ ID NO: 138036 - DNA, 15 bp, Homo sapiens
aagcagaatacacct

SEQ ID NO: 138037 - DNA, 15 bp, Homo sapiens
agcagaatacacctg

SEQ ID NO: 138038 - DNA, 15 bp, Homo sapiens
gcagaatacacctgg

SEQ ID NO: 138039 - DNA, 15 bp, Homo sapiens
cagaatacacctgga

SEQ ID NO: 138040 - DNA, 15 bp, Homo sapiens
agaatacacctggat

SEQ ID NO: 138041 - DNA, 15 bp, Homo sapiens
gaatacacctggatc

SEQ ID NO: 138042 - DNA, 15 bp, Homo sapiens
aatacacctggatca

SEQ ID NO: 138043 - DNA, 15 bp, Homo sapiens
atacacctggatcat

SEQ ID NO: 138044 - DNA, 15 bp, Homo sapiens
tacacctggatcata

SEQ ID NO: 138045 - DNA, 15 bp, Homo sapiens
acacctggatcatac

SEQ ID NO: 138046 - DNA, 15 bp, Homo sapiens
cacctggatcataca

SEQ ID NO: 138047 - DNA, 15 bp, Homo sapiens
acctggatcatacag

SEQ ID NO: 138048 - DNA, 15 bp, Homo sapiens
cctggatcatacagc

SEQ ID NO: 138049 - DNA, 15 bp, Homo sapiens
ctggatcatacagca

SEQ ID NO: 138050 - DNA, 15 bp, Homo sapiens
tggatcatacagcat

SEQ ID NO: 138051 - DNA, 15 bp, Homo sapiens
ggatcatacagcatt

SEQ ID NO: 138052 - DNA, 15 bp, Homo sapiens
gatcatacagcattt

SEQ ID NO: 138053 - DNA, 15 bp, Homo sapiens
atcatacagcattta

SEQ ID NO: 138054 - DNA, 15 bp, Homo sapiens
tcatacagcatttat

SEQ ID NO: 138055 - DNA, 15 bp, Homo sapiens
catacagcatttatg

SEQ ID NO: 138056 - DNA, 15 bp, Homo sapiens
atacagcatttatga

SEQ ID NO: 138057 - DNA, 15 bp, Homo sapiens
tacagcatttatgag

SEQ ID NO: 138058 - DNA, 15 bp, Homo sapiens
acagcatttatgaga

SEQ ID NO: 138059 - DNA, 15 bp, Homo sapiens
cagcatttatgagag

SEQ ID NO: 138060 - DNA, 15 bp, Homo sapiens
agcatttatgagaga

SEQ ID NO: 138061 - DNA, 15 bp, Homo sapiens
gcatttatgagagac

SEQ ID NO: 138062 - DNA, 15 bp, Homo sapiens
catttatgagagact

SEQ ID NO: 138063 - DNA, 15 bp, Homo sapiens
atttatgagagactg

SEQ ID NO: 138064 - DNA, 15 bp, Homo sapiens
tttatgagagactgg

SEQ ID NO: 138065 - DNA, 15 bp, Homo sapiens
ttatgagagactggc

SEQ ID NO: 138066 - DNA, 15 bp, Homo sapiens
tatgagagactggct

SEQ ID NO: 138067 - DNA, 15 bp, Homo sapiens
atgagagactggctg

SEQ ID NO: 138068 - DNA, 15 bp, Homo sapiens
tgagagactggctgg

SEQ ID NO: 138069 - DNA, 15 bp, Homo sapiens
gagagactggctggg

SEQ ID NO: 138070 - DNA, 15 bp, Homo sapiens
agagactggctgggc

SEQ ID NO: 138071 - DNA, 15 bp, Homo sapiens
gagactggctgggct

SEQ ID NO: 138072 - DNA, 15 bp, Homo sapiens
agactggctgggctg

SEQ ID NO: 138073 - DNA, 15 bp, Homo sapiens
gactggctgggctgt

SEQ ID NO: 138074 - DNA, 15 bp, Homo sapiens
actggctgggctgtc

SEQ ID NO: 138075 - DNA, 15 bp, Homo sapiens
ctggctgggctgtca

SEQ ID NO: 138076 - DNA, 15 bp, Homo sapiens
tggctgggctgtcag

SEQ ID NO: 138077 - DNA, 15 bp, Homo sapiens
ggctgggctgtcagg

SEQ ID NO: 138078 - DNA, 15 bp, Homo sapiens
gctgggctgtcaggc

SEQ ID NO: 138079 - DNA, 15 bp, Homo sapiens
ctgggctgtcaggcc

SEQ ID NO: 138080 - DNA, 15 bp, Homo sapiens
tgggctgtcaggccc

SEQ ID NO: 138081 - DNA, 15 bp, Homo sapiens
gggctgtcaggccct

SEQ ID NO: 138082 - DNA, 15 bp, Homo sapiens
ggctgtcaggccctc

SEQ ID NO: 138083 - DNA, 15 bp, Homo sapiens
gctgtcaggccctcc

SEQ ID NO: 138084 - DNA, 15 bp, Homo sapiens
ctgtcaggccctcct

SEQ ID NO: 138085 - DNA, 15 bp, Homo sapiens
tgtcaggccctcctg

SEQ ID NO: 138086 - DNA, 15 bp, Homo sapiens
gtcaggccctcctgt

SEQ ID NO: 138087 - DNA, 15 bp, Homo sapiens
tcaggccctcctgtt

SEQ ID NO: 138088 - DNA, 15 bp, Homo sapiens
caggccctcctgtta

SEQ ID NO: 138089 - DNA, 15 bp, Homo sapiens
aggccctcctgttac

SEQ ID NO: 138090 - DNA, 15 bp, Homo sapiens
ggccctcctgttact

SEQ ID NO: 138091 - DNA, 15 bp, Homo sapiens
gccctcctgttactt

SEQ ID NO: 138092 - DNA, 15 bp, Homo sapiens
ccctcctgttacttt

SEQ ID NO: 138093 - DNA, 15 bp, Homo sapiens
cctcctgttacttta

SEQ ID NO: 138094 - DNA, 15 bp, Homo sapiens
ctcctgttactttat

SEQ ID NO: 138095 - DNA, 15 bp, Homo sapiens
tcctgttactttatc

SEQ ID NO: 138096 - DNA, 15 bp, Homo sapiens
cctgttactttatct

SEQ ID NO: 138097 - DNA, 15 bp, Homo sapiens
ctgttactttatctc

SEQ ID NO: 138098 - DNA, 15 bp, Homo sapiens
tgttactttatctct

SEQ ID NO: 138099 - DNA, 15 bp, Homo sapiens
gttactttatctctg

SEQ ID NO: 138100 - DNA, 15 bp, Homo sapiens
ttactttatctctgc

SEQ ID NO: 138101 - DNA, 15 bp, Homo sapiens
tactttatctctgca

SEQ ID NO: 138102 - DNA, 15 bp, Homo sapiens
actttatctctgcat

SEQ ID NO: 138103 - DNA, 15 bp, Homo sapiens
ctttatctctgcatg

SEQ ID NO: 138104 - DNA, 15 bp, Homo sapiens
tttatctctgcatgt

SEQ ID NO: 138105 - DNA, 15 bp, Homo sapiens
ttatctctgcatgtg

SEQ ID NO: 138106 - DNA, 15 bp, Homo sapiens
tatctctgcatgtga

SEQ ID NO: 138107 - DNA, 15 bp, Homo sapiens
atctctgcatgtgac

SEQ ID NO: 138108 - DNA, 15 bp, Homo sapiens
tctctgcatgtgacc

SEQ ID NO: 138109 - DNA, 15 bp, Homo sapiens
ctctgcatgtgaccc

SEQ ID NO: 138110 - DNA, 15 bp, Homo sapiens
tctgcatgtgaccct

SEQ ID NO: 138111 - DNA, 15 bp, Homo sapiens
ctgcatgtgaccctc

SEQ ID NO: 138112 - DNA, 15 bp, Homo sapiens
tgcatgtgaccctct

SEQ ID NO: 138113 - DNA, 15 bp, Homo sapiens
gcatgtgaccctctt

SEQ ID NO: 138114 - DNA, 15 bp, Homo sapiens
catgtgaccctctta

SEQ ID NO: 138115 - DNA, 15 bp, Homo sapiens
atgtgaccctcttag

SEQ ID NO: 138116 - DNA, 15 bp, Homo sapiens
tgtgaccctcttagc

SEQ ID NO: 138117 - DNA, 15 bp, Homo sapiens
gtgaccctcttagct

SEQ ID NO: 138118 - DNA, 15 bp, Homo sapiens
tgaccctcttagctc

SEQ ID NO: 138119 - DNA, 15 bp, Homo sapiens
gaccctcttagctcc

SEQ ID NO: 138120 - DNA, 15 bp, Homo sapiens
accctcttagctccg

SEQ ID NO: 138121 - DNA, 15 bp, Homo sapiens
ccctcttagctccgc

SEQ ID NO: 138122 - DNA, 15 bp, Homo sapiens
cctcttagctccgcg

SEQ ID NO: 138123 - DNA, 15 bp, Homo sapiens
ctcttagctccgcgg

SEQ ID NO: 138124 - DNA, 15 bp, Homo sapiens
tcttagctccgcgga

SEQ ID NO: 138125 - DNA, 15 bp, Homo sapiens
cttagctccgcggat

SEQ ID NO: 138126 - DNA, 15 bp, Homo sapiens
ttagctccgcggatt

SEQ ID NO: 138127 - DNA, 15 bp, Homo sapiens
tagctccgcggatta

SEQ ID NO: 138128 - DNA, 15 bp, Homo sapiens
agctccgcggattaa

SEQ ID NO: 138129 - DNA, 15 bp, Homo sapiens
gctccgcggattaac

SEQ ID NO: 138130 - DNA, 15 bp, Homo sapiens
ctccgcggattaact

SEQ ID NO: 138131 - DNA, 15 bp, Homo sapiens
tccgcggattaactc

SEQ ID NO: 138132 - DNA, 15 bp, Homo sapiens
ccgcggattaactcc

SEQ ID NO: 138133 - DNA, 15 bp, Homo sapiens
cgcggattaactcct

SEQ ID NO: 138134 - DNA, 15 bp, Homo sapiens
gcggattaactcctg

SEQ ID NO: 138135 - DNA, 15 bp, Homo sapiens
cggattaactcctgt

SEQ ID NO: 138136 - DNA, 15 bp, Homo sapiens
ggattaactcctgtc

SEQ ID NO: 138137 - DNA, 15 bp, Homo sapiens
gattaactcctgtcc

SEQ ID NO: 138138 - DNA, 15 bp, Homo sapiens
attaactcctgtcct

SEQ ID NO: 138139 - DNA, 15 bp, Homo sapiens
ttaactcctgtcctc

SEQ ID NO: 138140 - DNA, 15 bp, Homo sapiens
taactcctgtcctca

SEQ ID NO: 138141 - DNA, 15 bp, Homo sapiens
aactcctgtcctcat

SEQ ID NO: 138142 - DNA, 15 bp, Homo sapiens
actcctgtcctcatt

SEQ ID NO: 138143 - DNA, 15 bp, Homo sapiens
ctcctgtcctcatta

SEQ ID NO: 138144 - DNA, 15 bp, Homo sapiens
tcctgtcctcattaa

SEQ ID NO: 138145 - DNA, 15 bp, Homo sapiens
cctgtcctcattaag

SEQ ID NO: 138146 - DNA, 15 bp, Homo sapiens
ctgtcctcattaagc

SEQ ID NO: 138147 - DNA, 15 bp, Homo sapiens
tgtcctcattaagcc

SEQ ID NO: 138148 - DNA, 15 bp, Homo sapiens
gtcctcattaagcct

SEQ ID NO: 138149 - DNA, 15 bp, Homo sapiens
tcctcattaagcctc

SEQ ID NO: 138150 - DNA, 15 bp, Homo sapiens
cctcattaagcctca

SEQ ID NO: 138151 - DNA, 15 bp, Homo sapiens
ctcattaagcctcac

SEQ ID NO: 138152 - DNA, 15 bp, Homo sapiens
tcattaagcctcaca

SEQ ID NO: 138153 - DNA, 15 bp, Homo sapiens
cattaagcctcacac

SEQ ID NO: 138154 - DNA, 15 bp, Homo sapiens
attaagcctcacact

SEQ ID NO: 138155 - DNA, 15 bp, Homo sapiens
ttaagcctcacactg

SEQ ID NO: 138156 - DNA, 15 bp, Homo sapiens
taagcctcacactgt

SEQ ID NO: 138157 - DNA, 15 bp, Homo sapiens
aagcctcacactgta

SEQ ID NO: 138158 - DNA, 15 bp, Homo sapiens
agcctcacactgtag

SEQ ID NO: 138159 - DNA, 15 bp, Homo sapiens
gcctcacactgtagc

SEQ ID NO: 138160 - DNA, 15 bp, Homo sapiens
cctcacactgtagcc

SEQ ID NO: 138161 - DNA, 15 bp, Homo sapiens
ctcacactgtagccc

SEQ ID NO: 138162 - DNA, 15 bp, Homo sapiens
tcacactgtagcccc

SEQ ID NO: 138163 - DNA, 15 bp, Homo sapiens
cacactgtagcccca

SEQ ID NO: 138164 - DNA, 15 bp, Homo sapiens
acactgtagccccat

SEQ ID NO: 138165 - DNA, 15 bp, Homo sapiens
cactgtagccccatt

SEQ ID NO: 138166 - DNA, 15 bp, Homo sapiens
actgtagccccattt

SEQ ID NO: 138167 - DNA, 15 bp, Homo sapiens
ctgtagccccatttt

SEQ ID NO: 138168 - DNA, 15 bp, Homo sapiens
tgtagccccattttc

SEQ ID NO: 138169 - DNA, 15 bp, Homo sapiens
gtagccccattttca

SEQ ID NO: 138170 - DNA, 15 bp, Homo sapiens
tagccccattttcag

SEQ ID NO: 138171 - DNA, 15 bp, Homo sapiens
agccccattttcaga

SEQ ID NO: 138172 - DNA, 15 bp, Homo sapiens
gccccattttcagat

SEQ ID NO: 138173 - DNA, 15 bp, Homo sapiens
ccccattttcagatc

SEQ ID NO: 138174 - DNA, 15 bp, Homo sapiens
cccattttcagatca

SEQ ID NO: 138175 - DNA, 15 bp, Homo sapiens
ccattttcagatcaa

SEQ ID NO: 138176 - DNA, 15 bp, Homo sapiens
cattttcagatcaaa

SEQ ID NO: 138177 - DNA, 15 bp, Homo sapiens
attttcagatcaaac

SEQ ID NO: 138178 - DNA, 15 bp, Homo sapiens
ttttcagatcaaacc

SEQ ID NO: 138179 - DNA, 15 bp, Homo sapiens
tttcagatcaaacct

SEQ ID NO: 138180 - DNA, 15 bp, Homo sapiens
ttcagatcaaacctg

SEQ ID NO: 138181 - DNA, 15 bp, Homo sapiens
tcagatcaaacctgt

SEQ ID NO: 138182 - DNA, 15 bp, Homo sapiens
cagatcaaacctgtt

SEQ ID NO: 138183 - DNA, 15 bp, Homo sapiens
agatcaaacctgttt

SEQ ID NO: 138184 - DNA, 15 bp, Homo sapiens
gatcaaacctgtttc

SEQ ID NO: 138185 - DNA, 15 bp, Homo sapiens
atcaaacctgtttct

SEQ ID NO: 138186 - DNA, 15 bp, Homo sapiens
tcaaacctgtttctc

SEQ ID NO: 138187 - DNA, 15 bp, Homo sapiens
caaacctgtttctct

SEQ ID NO: 138188 - DNA, 15 bp, Homo sapiens
aaacctgtttctctt

SEQ ID NO: 138189 - DNA, 15 bp, Homo sapiens
aacctgtttctcttc

SEQ ID NO: 138190 - DNA, 15 bp, Homo sapiens
acctgtttctcttct

SEQ ID NO: 138191 - DNA, 15 bp, Homo sapiens
cctgtttctcttctg

SEQ ID NO: 138192 - DNA, 15 bp, Homo sapiens
ctgtttctcttctgg

SEQ ID NO: 138193 - DNA, 15 bp, Homo sapiens
tgtttctcttctggt

SEQ ID NO: 138194 - DNA, 15 bp, Homo sapiens
gtttctcttctggta

SEQ ID NO: 138195 - DNA, 15 bp, Homo sapiens
tttctcttctggtaa

SEQ ID NO: 138196 - DNA, 15 bp, Homo sapiens
ttctcttctggtaaa

SEQ ID NO: 138197 - DNA, 15 bp, Homo sapiens
tctcttctggtaaat

SEQ ID NO: 138198 - DNA, 15 bp, Homo sapiens
ctcttctggtaaatg

SEQ ID NO: 138199 - DNA, 15 bp, Homo sapiens
tcttctggtaaatga

SEQ ID NO: 138200 - DNA, 15 bp, Homo sapiens
cttctggtaaatgat

SEQ ID NO: 138201 - DNA, 15 bp, Homo sapiens
ttctggtaaatgatt

SEQ ID NO: 138202 - DNA, 15 bp, Homo sapiens
tctggtaaatgattt

SEQ ID NO: 138203 - DNA, 15 bp, Homo sapiens
ctggtaaatgatttc

SEQ ID NO: 138204 - DNA, 15 bp, Homo sapiens
tggtaaatgatttca

SEQ ID NO: 138205 - DNA, 15 bp, Homo sapiens
ggtaaatgatttcag

SEQ ID NO: 138206 - DNA, 15 bp, Homo sapiens
gtaaatgatttcagt

SEQ ID NO: 138207 - DNA, 15 bp, Homo sapiens
taaatgatttcagtt

SEQ ID NO: 138208 - DNA, 15 bp, Homo sapiens
aaatgatttcagttt

SEQ ID NO: 138209 - DNA, 15 bp, Homo sapiens
aatgatttcagtttg

SEQ ID NO: 138210 - DNA, 15 bp, Homo sapiens
atgatttcagtttgc

SEQ ID NO: 138211 - DNA, 15 bp, Homo sapiens
tgatttcagtttgca

SEQ ID NO: 138212 - DNA, 15 bp, Homo sapiens
gatttcagtttgcaa

SEQ ID NO: 138213 - DNA, 15 bp, Homo sapiens
atttcagtttgcaaa

SEQ ID NO: 138214 - DNA, 15 bp, Homo sapiens
tttcagtttgcaaag

SEQ ID NO: 138215 - DNA, 15 bp, Homo sapiens
ttcagtttgcaaagt

SEQ ID NO: 138216 - DNA, 15 bp, Homo sapiens
tcagtttgcaaagtt

SEQ ID NO: 138217 - DNA, 15 bp, Homo sapiens
cagtttgcaaagttt

SEQ ID NO: 138218 - DNA, 15 bp, Homo sapiens
agtttgcaaagtttg

SEQ ID NO: 138219 - DNA, 15 bp, Homo sapiens
gtttgcaaagtttgc

SEQ ID NO: 138220 - DNA, 15 bp, Homo sapiens
tttgcaaagtttgcc

SEQ ID NO: 138221 - DNA, 15 bp, Homo sapiens
ttgcaaagtttgccc

SEQ ID NO: 138222 - DNA, 15 bp, Homo sapiens
tgcaaagtttgccct

SEQ ID NO: 138223 - DNA, 15 bp, Homo sapiens
gcaaagtttgccctc

SEQ ID NO: 138224 - DNA, 15 bp, Homo sapiens
caaagtttgccctct

SEQ ID NO: 138225 - DNA, 15 bp, Homo sapiens
aaagtttgccctcta

SEQ ID NO: 138226 - DNA, 15 bp, Homo sapiens
aagtttgccctctag

SEQ ID NO: 138227 - DNA, 15 bp, Homo sapiens
agtttgccctctaga

SEQ ID NO: 138228 - DNA, 15 bp, Homo sapiens
gtttgccctctagag

SEQ ID NO: 138229 - DNA, 15 bp, Homo sapiens
tttgccctctagagg

SEQ ID NO: 138230 - DNA, 15 bp, Homo sapiens
ttgccctctagaggt

SEQ ID NO: 138231 - DNA, 15 bp, Homo sapiens
tgccctctagaggtt

SEQ ID NO: 138232 - DNA, 15 bp, Homo sapiens
gccctctagaggttg

SEQ ID NO: 138233 - DNA, 15 bp, Homo sapiens
ccctctagaggttgc

SEQ ID NO: 138234 - DNA, 15 bp, Homo sapiens
cctctagaggttgct

SEQ ID NO: 138235 - DNA, 15 bp, Homo sapiens
ctctagaggttgctt

SEQ ID NO: 138236 - DNA, 15 bp, Homo sapiens
tctagaggttgctta

SEQ ID NO: 138237 - DNA, 15 bp, Homo sapiens
ctagaggttgcttag

SEQ ID NO: 138238 - DNA, 15 bp, Homo sapiens
tagaggttgcttagt

SEQ ID NO: 138239 - DNA, 15 bp, Homo sapiens
agaggttgcttagtg

SEQ ID NO: 138240 - DNA, 15 bp, Homo sapiens
gaggttgcttagtgc

SEQ ID NO: 138241 - DNA, 15 bp, Homo sapiens
aggttgcttagtgcc

SEQ ID NO: 138242 - DNA, 15 bp, Homo sapiens
ggttgcttagtgcct

SEQ ID NO: 138243 - DNA, 15 bp, Homo sapiens
gttgcttagtgcctg

SEQ ID NO: 138244 - DNA, 15 bp, Homo sapiens
ttgcttagtgcctgg

SEQ ID NO: 138245 - DNA, 15 bp, Homo sapiens
tgcttagtgcctggc

SEQ ID NO: 138246 - DNA, 15 bp, Homo sapiens
gcttagtgcctggcc

SEQ ID NO: 138247 - DNA, 15 bp, Homo sapiens
cttagtgcctggcca

SEQ ID NO: 138248 - DNA, 15 bp, Homo sapiens
ttagtgcctggccat

SEQ ID NO: 138249 - DNA, 15 bp, Homo sapiens
tagtgcctggccatg

SEQ ID NO: 138250 - DNA, 15 bp, Homo sapiens
agtgcctggccatgt

SEQ ID NO: 138251 - DNA, 15 bp, Homo sapiens
gtgcctggccatgtg

SEQ ID NO: 138252 - DNA, 15 bp, Homo sapiens
tgcctggccatgtgg

SEQ ID NO: 138253 - DNA, 15 bp, Homo sapiens
gcctggccatgtggg

SEQ ID NO: 138254 - DNA, 15 bp, Homo sapiens
cctggccatgtgggc

SEQ ID NO: 138255 - DNA, 15 bp, Homo sapiens
ctggccatgtgggct

SEQ ID NO: 138256 - DNA, 15 bp, Homo sapiens
tggccatgtgggctc

SEQ ID NO: 138257 - DNA, 15 bp, Homo sapiens
ggccatgtgggctca

SEQ ID NO: 138258 - DNA, 15 bp, Homo sapiens
gccatgtgggctcag

SEQ ID NO: 138259 - DNA, 15 bp, Homo sapiens
ccatgtgggctcagt

SEQ ID NO: 138260 - DNA, 15 bp, Homo sapiens
catgtgggctcagtt

SEQ ID NO: 138261 - DNA, 15 bp, Homo sapiens
atgtgggctcagttc

SEQ ID NO: 138262 - DNA, 15 bp, Homo sapiens
tgtgggctcagttca

SEQ ID NO: 138263 - DNA, 15 bp, Homo sapiens
gtgggctcagttcat

SEQ ID NO: 138264 - DNA, 15 bp, Homo sapiens
tgggctcagttcatg

SEQ ID NO: 138265 - DNA, 15 bp, Homo sapiens
gggctcagttcatgt

SEQ ID NO: 138266 - DNA, 15 bp, Homo sapiens
ggctcagttcatgtg

SEQ ID NO: 138267 - DNA, 15 bp, Homo sapiens
gctcagttcatgtgg

SEQ ID NO: 138268 - DNA, 15 bp, Homo sapiens
ctcagttcatgtggt

SEQ ID NO: 138269 - DNA, 15 bp, Homo sapiens
tcagttcatgtggtc

SEQ ID NO: 138270 - DNA, 15 bp, Homo sapiens
cagttcatgtggtcc

SEQ ID NO: 138271 - DNA, 15 bp, Homo sapiens
agttcatgtggtcct

SEQ ID NO: 138272 - DNA, 15 bp, Homo sapiens
gttcatgtggtcctg

SEQ ID NO: 138273 - DNA, 15 bp, Homo sapiens
ttcatgtggtcctga

SEQ ID NO: 138274 - DNA, 15 bp, Homo sapiens
tcatgtggtcctgat

SEQ ID NO: 138275 - DNA, 15 bp, Homo sapiens
catgtggtcctgatg

SEQ ID NO: 138276 - DNA, 15 bp, Homo sapiens
atgtggtcctgatga

SEQ ID NO: 138277 - DNA, 15 bp, Homo sapiens
tgtggtcctgatgag

SEQ ID NO: 138278 - DNA, 15 bp, Homo sapiens
gtggtcctgatgagc

SEQ ID NO: 138279 - DNA, 15 bp, Homo sapiens
tggtcctgatgagct

SEQ ID NO: 138280 - DNA, 15 bp, Homo sapiens
ggtcctgatgagctg

SEQ ID NO: 138281 - DNA, 15 bp, Homo sapiens
gtcctgatgagctgg

SEQ ID NO: 138282 - DNA, 15 bp, Homo sapiens
tcctgatgagctggt

SEQ ID NO: 138283 - DNA, 15 bp, Homo sapiens
cctgatgagctggtt

SEQ ID NO: 138284 - DNA, 15 bp, Homo sapiens
ctgatgagctggttt

SEQ ID NO: 138285 - DNA, 15 bp, Homo sapiens
tgatgagctggtttt

SEQ ID NO: 138286 - DNA, 15 bp, Homo sapiens
gatgagctggtttta

SEQ ID NO: 138287 - DNA, 15 bp, Homo sapiens
atgagctggttttat

SEQ ID NO: 138288 - DNA, 15 bp, Homo sapiens
tgagctggttttatc

SEQ ID NO: 138289 - DNA, 15 bp, Homo sapiens
gagctggttttatct

SEQ ID NO: 138290 - DNA, 15 bp, Homo sapiens
agctggttttatctt

SEQ ID NO: 138291 - DNA, 15 bp, Homo sapiens
gctggttttatcttt

SEQ ID NO: 138292 - DNA, 15 bp, Homo sapiens
ctggttttatcttta

SEQ ID NO: 138293 - DNA, 15 bp, Homo sapiens
tggttttatctttat

SEQ ID NO: 138294 - DNA, 15 bp, Homo sapiens
ggttttatctttatt

SEQ ID NO: 138295 - DNA, 15 bp, Homo sapiens
gttttatctttatta

SEQ ID NO: 138296 - DNA, 15 bp, Homo sapiens
ttttatctttattac

SEQ ID NO: 138297 - DNA, 15 bp, Homo sapiens
tttatctttattaca

SEQ ID NO: 138298 - DNA, 15 bp, Homo sapiens
ttatctttattacaa

SEQ ID NO: 138299 - DNA, 15 bp, Homo sapiens
tatctttattacaaa

SEQ ID NO: 138300 - DNA, 15 bp, Homo sapiens
atctttattacaaag

SEQ ID NO: 138301 - DNA, 15 bp, Homo sapiens
tctttattacaaaga

SEQ ID NO: 138302 - DNA, 15 bp, Homo sapiens
ctttattacaaagaa

SEQ ID NO: 138303 - DNA, 15 bp, Homo sapiens
tttattacaaagaag

SEQ ID NO: 138304 - DNA, 15 bp, Homo sapiens
ttattacaaagaagt

SEQ ID NO: 138305 - DNA, 15 bp, Homo sapiens
tattacaaagaagtt

SEQ ID NO: 138306 - DNA, 15 bp, Homo sapiens
attacaaagaagtta

SEQ ID NO: 138307 - DNA, 15 bp, Homo sapiens
ttacaaagaagttag

SEQ ID NO: 138308 - DNA, 15 bp, Homo sapiens
tacaaagaagttagg

SEQ ID NO: 138309 - DNA, 15 bp, Homo sapiens
acaaagaagttaggc

SEQ ID NO: 138310 - DNA, 15 bp, Homo sapiens
caaagaagttaggct

SEQ ID NO: 138311 - DNA, 15 bp, Homo sapiens
aaagaagttaggctg

SEQ ID NO: 138312 - DNA, 15 bp, Homo sapiens
aagaagttaggctgt

SEQ ID NO: 138313 - DNA, 15 bp, Homo sapiens
agaagttaggctgtt

SEQ ID NO: 138314 - DNA, 15 bp, Homo sapiens
gaagttaggctgtta

SEQ ID NO: 138315 - DNA, 15 bp, Homo sapiens
aagttaggctgttag

SEQ ID NO: 138316 - DNA, 15 bp, Homo sapiens
agttaggctgttagg

SEQ ID NO: 138317 - DNA, 15 bp, Homo sapiens
gttaggctgttagga

SEQ ID NO: 138318 - DNA, 15 bp, Homo sapiens
ttaggctgttaggag

SEQ ID NO: 138319 - DNA, 15 bp, Homo sapiens
taggctgttaggaga

SEQ ID NO: 138320 - DNA, 15 bp, Homo sapiens
aggctgttaggagag

SEQ ID NO: 138321 - DNA, 15 bp, Homo sapiens
ggctgttaggagagt

SEQ ID NO: 138322 - DNA, 15 bp, Homo sapiens
gctgttaggagagtg

SEQ ID NO: 138323 - DNA, 15 bp, Homo sapiens
ctgttaggagagtgg

SEQ ID NO: 138324 - DNA, 15 bp, Homo sapiens
tgttaggagagtggg

SEQ ID NO: 138325 - DNA, 15 bp, Homo sapiens
gttaggagagtgggt

SEQ ID NO: 138326 - DNA, 15 bp, Homo sapiens
ttaggagagtgggtt

SEQ ID NO: 138327 - DNA, 15 bp, Homo sapiens
taggagagtgggttg

SEQ ID NO: 138328 - DNA, 15 bp, Homo sapiens
aggagagtgggttgg

SEQ ID NO: 138329 - DNA, 15 bp, Homo sapiens
ggagagtgggttgga

SEQ ID NO: 138330 - DNA, 15 bp, Homo sapiens
gagagtgggttggaa

SEQ ID NO: 138331 - DNA, 15 bp, Homo sapiens
agagtgggttggaag

SEQ ID NO: 138332 - DNA, 15 bp, Homo sapiens
gagtgggttggaagg

SEQ ID NO: 138333 - DNA, 15 bp, Homo sapiens
agtgggttggaagga

SEQ ID NO: 138334 - DNA, 15 bp, Homo sapiens
gtgggttggaaggag

SEQ ID NO: 138335 - DNA, 15 bp, Homo sapiens
tgggttggaaggaga

SEQ ID NO: 138336 - DNA, 15 bp, Homo sapiens
gggttggaaggagaa

SEQ ID NO: 138337 - DNA, 15 bp, Homo sapiens
ggttggaaggagaag

SEQ ID NO: 138338 - DNA, 15 bp, Homo sapiens
gttggaaggagaaga

SEQ ID NO: 138339 - DNA, 15 bp, Homo sapiens
ttggaaggagaagag

SEQ ID NO: 138340 - DNA, 15 bp, Homo sapiens
tggaaggagaagagg

SEQ ID NO: 138341 - DNA, 15 bp, Homo sapiens
ggaaggagaagaggt

SEQ ID NO: 138342 - DNA, 15 bp, Homo sapiens
gaaggagaagaggta

SEQ ID NO: 138343 - DNA, 15 bp, Homo sapiens
aaggagaagaggtag

SEQ ID NO: 138344 - DNA, 15 bp, Homo sapiens
aggagaagaggtaga

SEQ ID NO: 138345 - DNA, 15 bp, Homo sapiens
ggagaagaggtagac

SEQ ID NO: 138346 - DNA, 15 bp, Homo sapiens
gagaagaggtagaca

SEQ ID NO: 138347 - DNA, 15 bp, Homo sapiens
agaagaggtagacag

SEQ ID NO: 138348 - DNA, 15 bp, Homo sapiens
gaagaggtagacagc

SEQ ID NO: 138349 - DNA, 15 bp, Homo sapiens
aagaggtagacagcc

SEQ ID NO: 138350 - DNA, 15 bp, Homo sapiens
agaggtagacagcca

SEQ ID NO: 138351 - DNA, 15 bp, Homo sapiens
gaggtagacagccaa

SEQ ID NO: 138352 - DNA, 15 bp, Homo sapiens
aggtagacagccaaa

SEQ ID NO: 138353 - DNA, 15 bp, Homo sapiens
ggtagacagccaaat

SEQ ID NO: 138354 - DNA, 15 bp, Homo sapiens
gtagacagccaaatg

SEQ ID NO: 138355 - DNA, 15 bp, Homo sapiens
tagacagccaaatga

SEQ ID NO: 138356 - DNA, 15 bp, Homo sapiens
agacagccaaatgag

SEQ ID NO: 138357 - DNA, 15 bp, Homo sapiens
gacagccaaatgaga

SEQ ID NO: 138358 - DNA, 15 bp, Homo sapiens
acagccaaatgagat

SEQ ID NO: 138359 - DNA, 15 bp, Homo sapiens
cagccaaatgagatg

SEQ ID NO: 138360 - DNA, 15 bp, Homo sapiens
agccaaatgagatga

SEQ ID NO: 138361 - DNA, 15 bp, Homo sapiens
gccaaatgagatgag

SEQ ID NO: 138362 - DNA, 15 bp, Homo sapiens
ccaaatgagatgagt

SEQ ID NO: 138363 - DNA, 15 bp, Homo sapiens
caaatgagatgagtc

SEQ ID NO: 138364 - DNA, 15 bp, Homo sapiens
aaatgagatgagtca

SEQ ID NO: 138365 - DNA, 15 bp, Homo sapiens
aatgagatgagtcag

SEQ ID NO: 138366 - DNA, 15 bp, Homo sapiens
atgagatgagtcagg

SEQ ID NO: 138367 - DNA, 15 bp, Homo sapiens
tgagatgagtcaggg

SEQ ID NO: 138368 - DNA, 15 bp, Homo sapiens
gagatgagtcaggga

SEQ ID NO: 138369 - DNA, 15 bp, Homo sapiens
agatgagtcagggaa

SEQ ID NO: 138370 - DNA, 15 bp, Homo sapiens
gatgagtcagggaaa

SEQ ID NO: 138371 - DNA, 15 bp, Homo sapiens
atgagtcagggaaaa

SEQ ID NO: 138372 - DNA, 15 bp, Homo sapiens
tgagtcagggaaaac

SEQ ID NO: 138373 - DNA, 15 bp, Homo sapiens
gagtcagggaaaact

SEQ ID NO: 138374 - DNA, 15 bp, Homo sapiens
agtcagggaaaacta

SEQ ID NO: 138375 - DNA, 15 bp, Homo sapiens
gtcagggaaaactat

SEQ ID NO: 138376 - DNA, 15 bp, Homo sapiens
tcagggaaaactata

SEQ ID NO: 138377 - DNA, 15 bp, Homo sapiens
cagggaaaactatac

SEQ ID NO: 138378 - DNA, 15 bp, Homo sapiens
agggaaaactatact

SEQ ID NO: 138379 - DNA, 15 bp, Homo sapiens
gggaaaactatactg

SEQ ID NO: 138380 - DNA, 15 bp, Homo sapiens
ggaaaactatactgt

SEQ ID NO: 138381 - DNA, 15 bp, Homo sapiens
gaaaactatactgtt

SEQ ID NO: 138382 - DNA, 15 bp, Homo sapiens
aaaactatactgttt

SEQ ID NO: 138383 - DNA, 15 bp, Homo sapiens
aaactatactgtttc

SEQ ID NO: 138384 - DNA, 15 bp, Homo sapiens
aactatactgtttcg

SEQ ID NO: 138385 - DNA, 15 bp, Homo sapiens
actatactgtttcgg

SEQ ID NO: 138386 - DNA, 15 bp, Homo sapiens
ctatactgtttcgga

SEQ ID NO: 138387 - DNA, 15 bp, Homo sapiens
tatactgtttcggag

SEQ ID NO: 138388 - DNA, 15 bp, Homo sapiens
atactgtttcggagt

SEQ ID NO: 138389 - DNA, 15 bp, Homo sapiens
tactgtttcggagtc

SEQ ID NO: 138390 - DNA, 15 bp, Homo sapiens
actgtttcggagtca

SEQ ID NO: 138391 - DNA, 15 bp, Homo sapiens
ctgtttcggagtcat

SEQ ID NO: 138392 - DNA, 15 bp, Homo sapiens
tgtttcggagtcata

SEQ ID NO: 138393 - DNA, 15 bp, Homo sapiens
gtttcggagtcatag

SEQ ID NO: 138394 - DNA, 15 bp, Homo sapiens
tttcggagtcatagg

SEQ ID NO: 138395 - DNA, 15 bp, Homo sapiens
ttcggagtcataggg

SEQ ID NO: 138396 - DNA, 15 bp, Homo sapiens
tcggagtcatagggc

SEQ ID NO: 138397 - DNA, 15 bp, Homo sapiens
cggagtcatagggct

SEQ ID NO: 138398 - DNA, 15 bp, Homo sapiens
ggagtcatagggctc

SEQ ID NO: 138399 - DNA, 15 bp, Homo sapiens
gagtcatagggctcc

SEQ ID NO: 138400 - DNA, 15 bp, Homo sapiens
agtcatagggctcct

SEQ ID NO: 138401 - DNA, 15 bp, Homo sapiens
gtcatagggctccta

SEQ ID NO: 138402 - DNA, 15 bp, Homo sapiens
tcatagggctcctac

SEQ ID NO: 138403 - DNA, 15 bp, Homo sapiens
catagggctcctacc

SEQ ID NO: 138404 - DNA, 15 bp, Homo sapiens
atagggctcctacca

SEQ ID NO: 138405 - DNA, 15 bp, Homo sapiens
tagggctcctaccaa

SEQ ID NO: 138406 - DNA, 15 bp, Homo sapiens
agggctcctaccaag

SEQ ID NO: 138407 - DNA, 15 bp, Homo sapiens
gggctcctaccaagc

SEQ ID NO: 138408 - DNA, 15 bp, Homo sapiens
ggctcctaccaagca

SEQ ID NO: 138409 - DNA, 15 bp, Homo sapiens
gctcctaccaagcat

SEQ ID NO: 138410 - DNA, 15 bp, Homo sapiens
ctcctaccaagcatc

SEQ ID NO: 138411 - DNA, 15 bp, Homo sapiens
tcctaccaagcatct

SEQ ID NO: 138412 - DNA, 15 bp, Homo sapiens
cctaccaagcatctg

SEQ ID NO: 138413 - DNA, 15 bp, Homo sapiens
ctaccaagcatctgg

SEQ ID NO: 138414 - DNA, 15 bp, Homo sapiens
taccaagcatctggt

SEQ ID NO: 138415 - DNA, 15 bp, Homo sapiens
accaagcatctggtc

SEQ ID NO: 138416 - DNA, 15 bp, Homo sapiens
ccaagcatctggtca

SEQ ID NO: 138417 - DNA, 15 bp, Homo sapiens
caagcatctggtcag

SEQ ID NO: 138418 - DNA, 15 bp, Homo sapiens
aagcatctggtcaga

SEQ ID NO: 138419 - DNA, 15 bp, Homo sapiens
agcatctggtcagaa

SEQ ID NO: 138420 - DNA, 15 bp, Homo sapiens
gcatctggtcagaaa

SEQ ID NO: 138421 - DNA, 15 bp, Homo sapiens
catctggtcagaaac

SEQ ID NO: 138422 - DNA, 15 bp, Homo sapiens
atctggtcagaaacc

SEQ ID NO: 138423 - DNA, 15 bp, Homo sapiens
tctggtcagaaacct

SEQ ID NO: 138424 - DNA, 15 bp, Homo sapiens
ctggtcagaaacctc

SEQ ID NO: 138425 - DNA, 15 bp, Homo sapiens
tggtcagaaacctct

SEQ ID NO: 138426 - DNA, 15 bp, Homo sapiens
ggtcagaaacctctc

SEQ ID NO: 138427 - DNA, 15 bp, Homo sapiens
gtcagaaacctctca

SEQ ID NO: 138428 - DNA, 15 bp, Homo sapiens
tcagaaacctctcat

SEQ ID NO: 138429 - DNA, 15 bp, Homo sapiens
cagaaacctctcatt

SEQ ID NO: 138430 - DNA, 15 bp, Homo sapiens
agaaacctctcattt

SEQ ID NO: 138431 - DNA, 15 bp, Homo sapiens
gaaacctctcatttt

SEQ ID NO: 138432 - DNA, 15 bp, Homo sapiens
aaacctctcattttg

SEQ ID NO: 138433 - DNA, 15 bp, Homo sapiens
aacctctcattttgg

SEQ ID NO: 138434 - DNA, 15 bp, Homo sapiens
acctctcattttgga

SEQ ID NO: 138435 - DNA, 15 bp, Homo sapiens
cctctcattttggag

SEQ ID NO: 138436 - DNA, 15 bp, Homo sapiens
ctctcattttggaga

SEQ ID NO: 138437 - DNA, 15 bp, Homo sapiens
tctcattttggagat

SEQ ID NO: 138438 - DNA, 15 bp, Homo sapiens
ctcattttggagatc

SEQ ID NO: 138439 - DNA, 15 bp, Homo sapiens
tcattttggagatca

SEQ ID NO: 138440 - DNA, 15 bp, Homo sapiens
cattttggagatcaa

SEQ ID NO: 138441 - DNA, 15 bp, Homo sapiens
attttggagatcaag

SEQ ID NO: 138442 - DNA, 15 bp, Homo sapiens
ttttggagatcaaga

SEQ ID NO: 138443 - DNA, 15 bp, Homo sapiens
tttggagatcaagaa

SEQ ID NO: 138444 - DNA, 15 bp, Homo sapiens
ttggagatcaagaaa

SEQ ID NO: 138445 - DNA, 15 bp, Homo sapiens
tggagatcaagaaat

SEQ ID NO: 138446 - DNA, 15 bp, Homo sapiens
ggagatcaagaaatt

SEQ ID NO: 138447 - DNA, 15 bp, Homo sapiens
gagatcaagaaattg

SEQ ID NO: 138448 - DNA, 15 bp, Homo sapiens
agatcaagaaattga

SEQ ID NO: 138449 - DNA, 15 bp, Homo sapiens
gatcaagaaattgag

SEQ ID NO: 138450 - DNA, 15 bp, Homo sapiens
atcaagaaattgagg

SEQ ID NO: 138451 - DNA, 15 bp, Homo sapiens
tcaagaaattgaggt

SEQ ID NO: 138452 - DNA, 15 bp, Homo sapiens
caagaaattgaggtt

SEQ ID NO: 138453 - DNA, 15 bp, Homo sapiens
aagaaattgaggttc

SEQ ID NO: 138454 - DNA, 15 bp, Homo sapiens
agaaattgaggttca

SEQ ID NO: 138455 - DNA, 15 bp, Homo sapiens
gaaattgaggttcag

SEQ ID NO: 138456 - DNA, 15 bp, Homo sapiens
aaattgaggttcaga

SEQ ID NO: 138457 - DNA, 15 bp, Homo sapiens
aattgaggttcagaa

SEQ ID NO: 138458 - DNA, 15 bp, Homo sapiens
attgaggttcagaaa

SEQ ID NO: 138459 - DNA, 15 bp, Homo sapiens
ttgaggttcagaaag

SEQ ID NO: 138460 - DNA, 15 bp, Homo sapiens
tgaggttcagaaaga

SEQ ID NO: 138461 - DNA, 15 bp, Homo sapiens
gaggttcagaaagat

SEQ ID NO: 138462 - DNA, 15 bp, Homo sapiens
aggttcagaaagatg

SEQ ID NO: 138463 - DNA, 15 bp, Homo sapiens
ggttcagaaagatga

SEQ ID NO: 138464 - DNA, 15 bp, Homo sapiens
gttcagaaagatgac

SEQ ID NO: 138465 - DNA, 15 bp, Homo sapiens
ttcagaaagatgaca

SEQ ID NO: 138466 - DNA, 15 bp, Homo sapiens
tcagaaagatgacat

SEQ ID NO: 138467 - DNA, 15 bp, Homo sapiens
cagaaagatgacatg

SEQ ID NO: 138468 - DNA, 15 bp, Homo sapiens
agaaagatgacatga

SEQ ID NO: 138469 - DNA, 15 bp, Homo sapiens
gaaagatgacatgag

SEQ ID NO: 138470 - DNA, 15 bp, Homo sapiens
aaagatgacatgagg

SEQ ID NO: 138471 - DNA, 15 bp, Homo sapiens
aagatgacatgaggt

SEQ ID NO: 138472 - DNA, 15 bp, Homo sapiens
agatgacatgaggta

SEQ ID NO: 138473 - DNA, 15 bp, Homo sapiens
gatgacatgaggtac

SEQ ID NO: 138474 - DNA, 15 bp, Homo sapiens
atgacatgaggtacg

SEQ ID NO: 138475 - DNA, 15 bp, Homo sapiens
tgacatgaggtacgc

SEQ ID NO: 138476 - DNA, 15 bp, Homo sapiens
gacatgaggtacgca

SEQ ID NO: 138477 - DNA, 15 bp, Homo sapiens
acatgaggtacgcag

SEQ ID NO: 138478 - DNA, 15 bp, Homo sapiens
catgaggtacgcagg

SEQ ID NO: 138479 - DNA, 15 bp, Homo sapiens
atgaggtacgcaggg

SEQ ID NO: 138480 - DNA, 15 bp, Homo sapiens
tgaggtacgcaggga

SEQ ID NO: 138481 - DNA, 15 bp, Homo sapiens
gaggtacgcagggac

SEQ ID NO: 138482 - DNA, 15 bp, Homo sapiens
aggtacgcagggacg

SEQ ID NO: 138483 - DNA, 15 bp, Homo sapiens
ggtacgcagggacgc

SEQ ID NO: 138484 - DNA, 15 bp, Homo sapiens
gtacgcagggacgcc

SEQ ID NO: 138485 - DNA, 15 bp, Homo sapiens
tacgcagggacgcca

SEQ ID NO: 138486 - DNA, 15 bp, Homo sapiens
acgcagggacgccac

SEQ ID NO: 138487 - DNA, 15 bp, Homo sapiens
cgcagggacgccacc

SEQ ID NO: 138488 - DNA, 15 bp, Homo sapiens
gcagggacgccacca

SEQ ID NO: 138489 - DNA, 15 bp, Homo sapiens
cagggacgccaccag

SEQ ID NO: 138490 - DNA, 15 bp, Homo sapiens
agggacgccaccaga

SEQ ID NO: 138491 - DNA, 15 bp, Homo sapiens
gggacgccaccagac

SEQ ID NO: 138492 - DNA, 15 bp, Homo sapiens
ggacgccaccagaca

SEQ ID NO: 138493 - DNA, 15 bp, Homo sapiens
gacgccaccagacac

SEQ ID NO: 138494 - DNA, 15 bp, Homo sapiens
acgccaccagacaca

SEQ ID NO: 138495 - DNA, 15 bp, Homo sapiens
cgccaccagacacag

SEQ ID NO: 138496 - DNA, 15 bp, Homo sapiens
gccaccagacacagc

SEQ ID NO: 138497 - DNA, 15 bp, Homo sapiens
ccaccagacacagcc

SEQ ID NO: 138498 - DNA, 15 bp, Homo sapiens
caccagacacagcct

SEQ ID NO: 138499 - DNA, 15 bp, Homo sapiens
accagacacagcctc

SEQ ID NO: 138500 - DNA, 15 bp, Homo sapiens
ccagacacagcctcc

SEQ ID NO: 138501 - DNA, 15 bp, Homo sapiens
cagacacagcctcca

SEQ ID NO: 138502 - DNA, 15 bp, Homo sapiens
agacacagcctccaa

SEQ ID NO: 138503 - DNA, 15 bp, Homo sapiens
gacacagcctccaac

SEQ ID NO: 138504 - DNA, 15 bp, Homo sapiens
acacagcctccaact

SEQ ID NO: 138505 - DNA, 15 bp, Homo sapiens
cacagcctccaactc

SEQ ID NO: 138506 - DNA, 15 bp, Homo sapiens
acagcctccaactct

SEQ ID NO: 138507 - DNA, 15 bp, Homo sapiens
cagcctccaactcta

SEQ ID NO: 138508 - DNA, 15 bp, Homo sapiens
agcctccaactctag

SEQ ID NO: 138509 - DNA, 15 bp, Homo sapiens
gcctccaactctaga

SEQ ID NO: 138510 - DNA, 15 bp, Homo sapiens
cctccaactctagaa

SEQ ID NO: 138511 - DNA, 15 bp, Homo sapiens
ctccaactctagaaa

SEQ ID NO: 138512 - DNA, 15 bp, Homo sapiens
tccaactctagaaac

SEQ ID NO: 138513 - DNA, 15 bp, Homo sapiens
ccaactctagaaact

SEQ ID NO: 138514 - DNA, 15 bp, Homo sapiens
caactctagaaacta

SEQ ID NO: 138515 - DNA, 15 bp, Homo sapiens
aactctagaaactaa

SEQ ID NO: 138516 - DNA, 15 bp, Homo sapiens
actctagaaactaaa

SEQ ID NO: 138517 - DNA, 15 bp, Homo sapiens
ctctagaaactaaaa

SEQ ID NO: 138518 - DNA, 15 bp, Homo sapiens
tctagaaactaaaat

SEQ ID NO: 138519 - DNA, 15 bp, Homo sapiens
ctagaaactaaaatt

SEQ ID NO: 138520 - DNA, 15 bp, Homo sapiens
tagaaactaaaattc

SEQ ID NO: 138521 - DNA, 15 bp, Homo sapiens
agaaactaaaattct

SEQ ID NO: 138522 - DNA, 15 bp, Homo sapiens
gaaactaaaattctg

SEQ ID NO: 138523 - DNA, 15 bp, Homo sapiens
aaactaaaattctgg

SEQ ID NO: 138524 - DNA, 15 bp, Homo sapiens
aactaaaattctgga

SEQ ID NO: 138525 - DNA, 15 bp, Homo sapiens
actaaaattctggat

SEQ ID NO: 138526 - DNA, 15 bp, Homo sapiens
ctaaaattctggatt

SEQ ID NO: 138527 - DNA, 15 bp, Homo sapiens
taaaattctggattc

SEQ ID NO: 138528 - DNA, 15 bp, Homo sapiens
aaaattctggattct

SEQ ID NO: 138529 - DNA, 15 bp, Homo sapiens
aaattctggattctt

SEQ ID NO: 138530 - DNA, 15 bp, Homo sapiens
aattctggattctta

SEQ ID NO: 138531 - DNA, 15 bp, Homo sapiens
attctggattcttag

SEQ ID NO: 138532 - DNA, 15 bp, Homo sapiens
ttctggattcttagt

SEQ ID NO: 138533 - DNA, 15 bp, Homo sapiens
tctggattcttagtg

SEQ ID NO: 138534 - DNA, 15 bp, Homo sapiens
ctggattcttagtgc

SEQ ID NO: 138535 - DNA, 15 bp, Homo sapiens
tggattcttagtgct

SEQ ID NO: 138536 - DNA, 15 bp, Homo sapiens
ggattcttagtgctg

SEQ ID NO: 138537 - DNA, 15 bp, Homo sapiens
gattcttagtgctgc

SEQ ID NO: 138538 - DNA, 15 bp, Homo sapiens
attcttagtgctgct

SEQ ID NO: 138539 - DNA, 15 bp, Homo sapiens
ttcttagtgctgctt

SEQ ID NO: 138540 - DNA, 15 bp, Homo sapiens
tcttagtgctgcttt

SEQ ID NO: 138541 - DNA, 15 bp, Homo sapiens
cttagtgctgctttt

SEQ ID NO: 138542 - DNA, 15 bp, Homo sapiens
ttagtgctgcttttt

SEQ ID NO: 138543 - DNA, 15 bp, Homo sapiens
tagtgctgctttttc

SEQ ID NO: 138544 - DNA, 15 bp, Homo sapiens
agtgctgctttttct

SEQ ID NO: 138545 - DNA, 15 bp, Homo sapiens
gtgctgctttttctg

SEQ ID NO: 138546 - DNA, 15 bp, Homo sapiens
tgctgctttttctgt

SEQ ID NO: 138547 - DNA, 15 bp, Homo sapiens
gctgctttttctgtt

SEQ ID NO: 138548 - DNA, 15 bp, Homo sapiens
ctgctttttctgttt

SEQ ID NO: 138549 - DNA, 15 bp, Homo sapiens
gctttttctgttttg

SEQ ID NO: 138550 - DNA, 15 bp, Homo sapiens
ctttttctgttttgt

SEQ ID NO: 138551 - DNA, 15 bp, Homo sapiens
tttttctgttttgtt

SEQ ID NO: 138552 - DNA, 15 bp, Homo sapiens
ttttctgttttgttg

SEQ ID NO: 138553 - DNA, 15 bp, Homo sapiens
tttctgttttgttgc

SEQ ID NO: 138554 - DNA, 15 bp, Homo sapiens
ttctgttttgttgca

SEQ ID NO: 138555 - DNA, 15 bp, Homo sapiens
tctgttttgttgcac

SEQ ID NO: 138556 - DNA, 15 bp, Homo sapiens
ctgttttgttgcact

SEQ ID NO: 138557 - DNA, 15 bp, Homo sapiens
tgttttgttgcactg

SEQ ID NO: 138558 - DNA, 15 bp, Homo sapiens
gttttgttgcactgg

SEQ ID NO: 138559 - DNA, 15 bp, Homo sapiens
ttttgttgcactgga

SEQ ID NO: 138560 - DNA, 15 bp, Homo sapiens
tttgttgcactggat

SEQ ID NO: 138561 - DNA, 15 bp, Homo sapiens
ttgttgcactggatt

SEQ ID NO: 138562 - DNA, 15 bp, Homo sapiens
tgttgcactggattg

SEQ ID NO: 138563 - DNA, 15 bp, Homo sapiens
gttgcactggattga

SEQ ID NO: 138564 - DNA, 15 bp, Homo sapiens
ttgcactggattgaa

SEQ ID NO: 138565 - DNA, 15 bp, Homo sapiens
tgcactggattgaag

SEQ ID NO: 138566 - DNA, 15 bp, Homo sapiens
gcactggattgaagc

SEQ ID NO: 138567 - DNA, 15 bp, Homo sapiens
cactggattgaagcc

SEQ ID NO: 138568 - DNA, 15 bp, Homo sapiens
actggattgaagcct

SEQ ID NO: 138569 - DNA, 15 bp, Homo sapiens
ctggattgaagcctt

SEQ ID NO: 138570 - DNA, 15 bp, Homo sapiens
tggattgaagccttt

SEQ ID NO: 138571 - DNA, 15 bp, Homo sapiens
ggattgaagcctttt

SEQ ID NO: 138572 - DNA, 15 bp, Homo sapiens
gattgaagccttttc

SEQ ID NO: 138573 - DNA, 15 bp, Homo sapiens
attgaagccttttct

SEQ ID NO: 138574 - DNA, 15 bp, Homo sapiens
ttgaagccttttcta

SEQ ID NO: 138575 - DNA, 15 bp, Homo sapiens
tgaagccttttctaa

SEQ ID NO: 138576 - DNA, 15 bp, Homo sapiens
gaagccttttctaac

SEQ ID NO: 138577 - DNA, 15 bp, Homo sapiens
aagccttttctaact

SEQ ID NO: 138578 - DNA, 15 bp, Homo sapiens
agccttttctaactg

SEQ ID NO: 138579 - DNA, 15 bp, Homo sapiens
gccttttctaactgt

SEQ ID NO: 138580 - DNA, 15 bp, Homo sapiens
ccttttctaactgta

SEQ ID NO: 138581 - DNA, 15 bp, Homo sapiens
cttttctaactgtac

SEQ ID NO: 138582 - DNA, 15 bp, Homo sapiens
ttttctaactgtact

SEQ ID NO: 138583 - DNA, 15 bp, Homo sapiens
tttctaactgtactc

SEQ ID NO: 138584 - DNA, 15 bp, Homo sapiens
ttctaactgtactca

SEQ ID NO: 138585 - DNA, 15 bp, Homo sapiens
tctaactgtactcag

SEQ ID NO: 138586 - DNA, 15 bp, Homo sapiens
ctaactgtactcaga

SEQ ID NO: 138587 - DNA, 15 bp, Homo sapiens
taactgtactcagag

SEQ ID NO: 138588 - DNA, 15 bp, Homo sapiens
aactgtactcagagg

SEQ ID NO: 138589 - DNA, 15 bp, Homo sapiens
actgtactcagaggg

SEQ ID NO: 138590 - DNA, 15 bp, Homo sapiens
ctgtactcagagggc

SEQ ID NO: 138591 - DNA, 15 bp, Homo sapiens
tgtactcagagggcc

SEQ ID NO: 138592 - DNA, 15 bp, Homo sapiens
gtactcagagggcct

SEQ ID NO: 138593 - DNA, 15 bp, Homo sapiens
tactcagagggccta

SEQ ID NO: 138594 - DNA, 15 bp, Homo sapiens
actcagagggcctat

SEQ ID NO: 138595 - DNA, 15 bp, Homo sapiens
ctcagagggcctatt

SEQ ID NO: 138596 - DNA, 15 bp, Homo sapiens
tcagagggcctatta

SEQ ID NO: 138597 - DNA, 15 bp, Homo sapiens
cagagggcctattat

SEQ ID NO: 138598 - DNA, 15 bp, Homo sapiens
agagggcctattatt

SEQ ID NO: 138599 - DNA, 15 bp, Homo sapiens
gagggcctattattt

SEQ ID NO: 138600 - DNA, 15 bp, Homo sapiens
agggcctattattta

SEQ ID NO: 138601 - DNA, 15 bp, Homo sapiens
gggcctattatttag

SEQ ID NO: 138602 - DNA, 15 bp, Homo sapiens
ggcctattatttagg

SEQ ID NO: 138603 - DNA, 15 bp, Homo sapiens
gcctattatttaggg

SEQ ID NO: 138604 - DNA, 15 bp, Homo sapiens
cctattatttaggga

SEQ ID NO: 138605 - DNA, 15 bp, Homo sapiens
ctattatttagggag

SEQ ID NO: 138606 - DNA, 15 bp, Homo sapiens
tattatttagggaga

SEQ ID NO: 138607 - DNA, 15 bp, Homo sapiens
attatttagggagat

SEQ ID NO: 138608 - DNA, 15 bp, Homo sapiens
ttatttagggagatt

SEQ ID NO: 138609 - DNA, 15 bp, Homo sapiens
tatttagggagattc

SEQ ID NO: 138610 - DNA, 15 bp, Homo sapiens
atttagggagattcc

SEQ ID NO: 138611 - DNA, 15 bp, Homo sapiens
tttagggagattccg

SEQ ID NO: 138612 - DNA, 15 bp, Homo sapiens
ttagggagattccgt

SEQ ID NO: 138613 - DNA, 15 bp, Homo sapiens
tagggagattccgta

SEQ ID NO: 138614 - DNA, 15 bp, Homo sapiens
agggagattccgtat

SEQ ID NO: 138615 - DNA, 15 bp, Homo sapiens
gggagattccgtatg

SEQ ID NO: 138616 - DNA, 15 bp, Homo sapiens
ggagattccgtatga

SEQ ID NO: 138617 - DNA, 15 bp, Homo sapiens
gagattccgtatgaa

SEQ ID NO: 138618 - DNA, 15 bp, Homo sapiens
agattccgtatgaaa

SEQ ID NO: 138619 - DNA, 15 bp, Homo sapiens
gattccgtatgaaat

SEQ ID NO: 138620 - DNA, 15 bp, Homo sapiens
attccgtatgaaatc

SEQ ID NO: 138621 - DNA, 15 bp, Homo sapiens
ttccgtatgaaatcc

SEQ ID NO: 138622 - DNA, 15 bp, Homo sapiens
tccgtatgaaatcct

SEQ ID NO: 138623 - DNA, 15 bp, Homo sapiens
ccgtatgaaatcctt

SEQ ID NO: 138624 - DNA, 15 bp, Homo sapiens
cgtatgaaatccttt

SEQ ID NO: 138625 - DNA, 15 bp, Homo sapiens
gtatgaaatccttta

SEQ ID NO: 138626 - DNA, 15 bp, Homo sapiens
tatgaaatcctttag

SEQ ID NO: 138627 - DNA, 15 bp, Homo sapiens
atgaaatcctttagc

SEQ ID NO: 138628 - DNA, 15 bp, Homo sapiens
tgaaatcctttagca

SEQ ID NO: 138629 - DNA, 15 bp, Homo sapiens
gaaatcctttagcaa

SEQ ID NO: 138630 - DNA, 15 bp, Homo sapiens
aaatcctttagcaat

SEQ ID NO: 138631 - DNA, 15 bp, Homo sapiens
aatcctttagcaatc

SEQ ID NO: 138632 - DNA, 15 bp, Homo sapiens
atcctttagcaatca

SEQ ID NO: 138633 - DNA, 15 bp, Homo sapiens
tcctttagcaatcaa

SEQ ID NO: 138634 - DNA, 15 bp, Homo sapiens
cctttagcaatcaaa

SEQ ID NO: 138635 - DNA, 15 bp, Homo sapiens
ctttagcaatcaaat

SEQ ID NO: 138636 - DNA, 15 bp, Homo sapiens
tttagcaatcaaatc

SEQ ID NO: 138637 - DNA, 15 bp, Homo sapiens
ttagcaatcaaatca

SEQ ID NO: 138638 - DNA, 15 bp, Homo sapiens
tagcaatcaaatcat

SEQ ID NO: 138639 - DNA, 15 bp, Homo sapiens
agcaatcaaatcatt

SEQ ID NO: 138640 - DNA, 15 bp, Homo sapiens
gcaatcaaatcattt

SEQ ID NO: 138641 - DNA, 15 bp, Homo sapiens
caatcaaatcattta

SEQ ID NO: 138642 - DNA, 15 bp, Homo sapiens
aatcaaatcatttaa

SEQ ID NO: 138643 - DNA, 15 bp, Homo sapiens
atcaaatcatttaat

SEQ ID NO: 138644 - DNA, 15 bp, Homo sapiens
tcaaatcatttaata

SEQ ID NO: 138645 - DNA, 15 bp, Homo sapiens
caaatcatttaatag

SEQ ID NO: 138646 - DNA, 15 bp, Homo sapiens
aaatcatttaatagg

SEQ ID NO: 138647 - DNA, 15 bp, Homo sapiens
aatcatttaataggg

SEQ ID NO: 138648 - DNA, 15 bp, Homo sapiens
atcatttaatagggc

SEQ ID NO: 138649 - DNA, 15 bp, Homo sapiens
tcatttaatagggct

SEQ ID NO: 138650 - DNA, 15 bp, Homo sapiens
catttaatagggctg

SEQ ID NO: 138651 - DNA, 15 bp, Homo sapiens
atttaatagggctga

SEQ ID NO: 138652 - DNA, 15 bp, Homo sapiens
tttaatagggctgat

SEQ ID NO: 138653 - DNA, 15 bp, Homo sapiens
ttaatagggctgatg

SEQ ID NO: 138654 - DNA, 15 bp, Homo sapiens
taatagggctgatgg

SEQ ID NO: 138655 - DNA, 15 bp, Homo sapiens
aatagggctgatggt

SEQ ID NO: 138656 - DNA, 15 bp, Homo sapiens
atagggctgatggtt

SEQ ID NO: 138657 - DNA, 15 bp, Homo sapiens
tagggctgatggttt

SEQ ID NO: 138658 - DNA, 15 bp, Homo sapiens
agggctgatggttta

SEQ ID NO: 138659 - DNA, 15 bp, Homo sapiens
gggctgatggtttaa

SEQ ID NO: 138660 - DNA, 15 bp, Homo sapiens
ggctgatggtttaaa

SEQ ID NO: 138661 - DNA, 15 bp, Homo sapiens
gctgatggtttaaat

SEQ ID NO: 138662 - DNA, 15 bp, Homo sapiens
ctgatggtttaaata

SEQ ID NO: 138663 - DNA, 15 bp, Homo sapiens
tgatggtttaaatat

SEQ ID NO: 138664 - DNA, 15 bp, Homo sapiens
gatggtttaaatata

SEQ ID NO: 138665 - DNA, 15 bp, Homo sapiens
atggtttaaatatat

SEQ ID NO: 138666 - DNA, 15 bp, Homo sapiens
tggtttaaatatatg

SEQ ID NO: 138667 - DNA, 15 bp, Homo sapiens
ggtttaaatatatgt

SEQ ID NO: 138668 - DNA, 15 bp, Homo sapiens
gtttaaatatatgtt

SEQ ID NO: 138669 - DNA, 15 bp, Homo sapiens
tttaaatatatgtta

SEQ ID NO: 138670 - DNA, 15 bp, Homo sapiens
ttaaatatatgttaa

SEQ ID NO: 138671 - DNA, 15 bp, Homo sapiens
taaatatatgttaat

SEQ ID NO: 138672 - DNA, 15 bp, Homo sapiens
aaatatatgttaatg

SEQ ID NO: 138673 - DNA, 15 bp, Homo sapiens
aatatatgttaatgt

SEQ ID NO: 138674 - DNA, 15 bp, Homo sapiens
atatatgttaatgtg

SEQ ID NO: 138675 - DNA, 15 bp, Homo sapiens
tatatgttaatgtgt

SEQ ID NO: 138676 - DNA, 15 bp, Homo sapiens
atatgttaatgtgtt

SEQ ID NO: 138677 - DNA, 15 bp, Homo sapiens
tatgttaatgtgttt

SEQ ID NO: 138678 - DNA, 15 bp, Homo sapiens
atgttaatgtgtttt

SEQ ID NO: 138679 - DNA, 15 bp, Homo sapiens
tgttaatgtgttttc

SEQ ID NO: 138680 - DNA, 15 bp, Homo sapiens
gttaatgtgttttcc

SEQ ID NO: 138681 - DNA, 15 bp, Homo sapiens
ttaatgtgttttcct

SEQ ID NO: 138682 - DNA, 15 bp, Homo sapiens
taatgtgttttccta

SEQ ID NO: 138683 - DNA, 15 bp, Homo sapiens
aatgtgttttcctaa

SEQ ID NO: 138684 - DNA, 15 bp, Homo sapiens
atgtgttttcctaaa

SEQ ID NO: 138685 - DNA, 15 bp, Homo sapiens
tgtgttttcctaaag

SEQ ID NO: 138686 - DNA, 15 bp, Homo sapiens
gtgttttcctaaagc

SEQ ID NO: 138687 - DNA, 15 bp, Homo sapiens
tgttttcctaaagcc

SEQ ID NO: 138688 - DNA, 15 bp, Homo sapiens
gttttcctaaagcct

SEQ ID NO: 138689 - DNA, 15 bp, Homo sapiens
ttttcctaaagcctg

SEQ ID NO: 138690 - DNA, 15 bp, Homo sapiens
tttcctaaagcctgg

SEQ ID NO: 138691 - DNA, 15 bp, Homo sapiens
ttcctaaagcctggc

SEQ ID NO: 138692 - DNA, 15 bp, Homo sapiens
tcctaaagcctggca

SEQ ID NO: 138693 - DNA, 15 bp, Homo sapiens
cctaaagcctggcag

SEQ ID NO: 138694 - DNA, 15 bp, Homo sapiens
ctaaagcctggcaga

SEQ ID NO: 138695 - DNA, 15 bp, Homo sapiens
taaagcctggcagac

SEQ ID NO: 138696 - DNA, 15 bp, Homo sapiens
aaagcctggcagacc

SEQ ID NO: 138697 - DNA, 15 bp, Homo sapiens
aagcctggcagacct

SEQ ID NO: 138698 - DNA, 15 bp, Homo sapiens
agcctggcagacctg

SEQ ID NO: 138699 - DNA, 15 bp, Homo sapiens
gcctggcagacctgg

SEQ ID NO: 138700 - DNA, 15 bp, Homo sapiens
cctggcagacctggg

SEQ ID NO: 138701 - DNA, 15 bp, Homo sapiens
ctggcagacctgggt

SEQ ID NO: 138702 - DNA, 15 bp, Homo sapiens
tggcagacctgggtt

SEQ ID NO: 138703 - DNA, 15 bp, Homo sapiens
ggcagacctgggttt

SEQ ID NO: 138704 - DNA, 15 bp, Homo sapiens
gcagacctgggtttt

SEQ ID NO: 138705 - DNA, 15 bp, Homo sapiens
cagacctgggttttg

SEQ ID NO: 138706 - DNA, 15 bp, Homo sapiens
agacctgggttttgg

SEQ ID NO: 138707 - DNA, 15 bp, Homo sapiens
gacctgggttttgga

SEQ ID NO: 138708 - DNA, 15 bp, Homo sapiens
acctgggttttggag

SEQ ID NO: 138709 - DNA, 15 bp, Homo sapiens
cctgggttttggagc

SEQ ID NO: 138710 - DNA, 15 bp, Homo sapiens
ctgggttttggagct

SEQ ID NO: 138711 - DNA, 15 bp, Homo sapiens
tgggttttggagctt

SEQ ID NO: 138712 - DNA, 15 bp, Homo sapiens
gggttttggagcttt

SEQ ID NO: 138713 - DNA, 15 bp, Homo sapiens
ggttttggagctttg

SEQ ID NO: 138714 - DNA, 15 bp, Homo sapiens
gttttggagctttgt

SEQ ID NO: 138715 - DNA, 15 bp, Homo sapiens
ttttggagctttgta

SEQ ID NO: 138716 - DNA, 15 bp, Homo sapiens
tttggagctttgtat

SEQ ID NO: 138717 - DNA, 15 bp, Homo sapiens
ttggagctttgtatc

SEQ ID NO: 138718 - DNA, 15 bp, Homo sapiens
tggagctttgtatca

SEQ ID NO: 138719 - DNA, 15 bp, Homo sapiens
ggagctttgtatcac

SEQ ID NO: 138720 - DNA, 15 bp, Homo sapiens
gagctttgtatcaca

SEQ ID NO: 138721 - DNA, 15 bp, Homo sapiens
agctttgtatcacat

SEQ ID NO: 138722 - DNA, 15 bp, Homo sapiens
gctttgtatcacatg

SEQ ID NO: 138723 - DNA, 15 bp, Homo sapiens
ctttgtatcacatgt

SEQ ID NO: 138724 - DNA, 15 bp, Homo sapiens
tttgtatcacatgtt

SEQ ID NO: 138725 - DNA, 15 bp, Homo sapiens
ttgtatcacatgttt

SEQ ID NO: 138726 - DNA, 15 bp, Homo sapiens
tgtatcacatgtttt

SEQ ID NO: 138727 - DNA, 15 bp, Homo sapiens
gtatcacatgtttta

SEQ ID NO: 138728 - DNA, 15 bp, Homo sapiens
tatcacatgttttat

SEQ ID NO: 138729 - DNA, 15 bp, Homo sapiens
atcacatgttttatg

SEQ ID NO: 138730 - DNA, 15 bp, Homo sapiens
tcacatgttttatgt

SEQ ID NO: 138731 - DNA, 15 bp, Homo sapiens
cacatgttttatgtt

SEQ ID NO: 138732 - DNA, 15 bp, Homo sapiens
acatgttttatgttt

SEQ ID NO: 138733 - DNA, 15 bp, Homo sapiens
catgttttatgtttg

SEQ ID NO: 138734 - DNA, 15 bp, Homo sapiens
atgttttatgtttgg

SEQ ID NO: 138735 - DNA, 15 bp, Homo sapiens
tgttttatgtttgga

SEQ ID NO: 138736 - DNA, 15 bp, Homo sapiens
gttttatgtttggaa

SEQ ID NO: 138737 - DNA, 15 bp, Homo sapiens
ttttatgtttggaat

SEQ ID NO: 138738 - DNA, 15 bp, Homo sapiens
tttatgtttggaatg

SEQ ID NO: 138739 - DNA, 15 bp, Homo sapiens
ttatgtttggaatga

SEQ ID NO: 138740 - DNA, 15 bp, Homo sapiens
tatgtttggaatgaa

SEQ ID NO: 138741 - DNA, 15 bp, Homo sapiens
atgtttggaatgaaa

SEQ ID NO: 138742 - DNA, 15 bp, Homo sapiens
tgtttggaatgaaaa

SEQ ID NO: 138743 - DNA, 15 bp, Homo sapiens
gtttggaatgaaaat

SEQ ID NO: 138744 - DNA, 15 bp, Homo sapiens
tttggaatgaaaatg

SEQ ID NO: 138745 - DNA, 15 bp, Homo sapiens
ttggaatgaaaatga

SEQ ID NO: 138746 - DNA, 15 bp, Homo sapiens
tggaatgaaaatgag

SEQ ID NO: 138747 - DNA, 15 bp, Homo sapiens
ggaatgaaaatgaga

SEQ ID NO: 138748 - DNA, 15 bp, Homo sapiens
gaatgaaaatgagac

SEQ ID NO: 138749 - DNA, 15 bp, Homo sapiens
aatgaaaatgagacc

SEQ ID NO: 138750 - DNA, 15 bp, Homo sapiens
atgaaaatgagacca

SEQ ID NO: 138751 - DNA, 15 bp, Homo sapiens
tgaaaatgagaccat

SEQ ID NO: 138752 - DNA, 15 bp, Homo sapiens
gaaaatgagaccatg

SEQ ID NO: 138753 - DNA, 15 bp, Homo sapiens
aaaatgagaccatgt

SEQ ID NO: 138754 - DNA, 15 bp, Homo sapiens
aaatgagaccatgtc

SEQ ID NO: 138755 - DNA, 15 bp, Homo sapiens
aatgagaccatgtct

SEQ ID NO: 138756 - DNA, 15 bp, Homo sapiens
atgagaccatgtctg

SEQ ID NO: 138757 - DNA, 15 bp, Homo sapiens
tgagaccatgtctgt

SEQ ID NO: 138758 - DNA, 15 bp, Homo sapiens
gagaccatgtctgtg

SEQ ID NO: 138759 - DNA, 15 bp, Homo sapiens
agaccatgtctgtga

SEQ ID NO: 138760 - DNA, 15 bp, Homo sapiens
gaccatgtctgtgaa

SEQ ID NO: 138761 - DNA, 15 bp, Homo sapiens
accatgtctgtgaag

SEQ ID NO: 138762 - DNA, 15 bp, Homo sapiens
ccatgtctgtgaagg

SEQ ID NO: 138763 - DNA, 15 bp, Homo sapiens
catgtctgtgaaggc

SEQ ID NO: 138764 - DNA, 15 bp, Homo sapiens
atgtctgtgaaggca

SEQ ID NO: 138765 - DNA, 15 bp, Homo sapiens
tgtctgtgaaggcac

SEQ ID NO: 138766 - DNA, 15 bp, Homo sapiens
gtctgtgaaggcact

SEQ ID NO: 138767 - DNA, 15 bp, Homo sapiens
tctgtgaaggcactt

SEQ ID NO: 138768 - DNA, 15 bp, Homo sapiens
ctgtgaaggcacttt

SEQ ID NO: 138769 - DNA, 15 bp, Homo sapiens
tgtgaaggcactttg

SEQ ID NO: 138770 - DNA, 15 bp, Homo sapiens
gtgaaggcactttga

SEQ ID NO: 138771 - DNA, 15 bp, Homo sapiens
tgaaggcactttgat

SEQ ID NO: 138772 - DNA, 15 bp, Homo sapiens
gaaggcactttgata

SEQ ID NO: 138773 - DNA, 15 bp, Homo sapiens
aaggcactttgatat

SEQ ID NO: 138774 - DNA, 15 bp, Homo sapiens
aggcactttgatatg

SEQ ID NO: 138775 - DNA, 15 bp, Homo sapiens
ggcactttgatatgc

SEQ ID NO: 138776 - DNA, 15 bp, Homo sapiens
gcactttgatatgcg

SEQ ID NO: 138777 - DNA, 15 bp, Homo sapiens
cactttgatatgcgt

SEQ ID NO: 138778 - DNA, 15 bp, Homo sapiens
actttgatatgcgta

SEQ ID NO: 138779 - DNA, 15 bp, Homo sapiens
ctttgatatgcgtaa

SEQ ID NO: 138780 - DNA, 15 bp, Homo sapiens
tttgatatgcgtaat

SEQ ID NO: 138781 - DNA, 15 bp, Homo sapiens
ttgatatgcgtaatg

SEQ ID NO: 138782 - DNA, 15 bp, Homo sapiens
tgatatgcgtaatgc

SEQ ID NO: 138783 - DNA, 15 bp, Homo sapiens
gatatgcgtaatgca

SEQ ID NO: 138784 - DNA, 15 bp, Homo sapiens
atatgcgtaatgcac

SEQ ID NO: 138785 - DNA, 15 bp, Homo sapiens
tatgcgtaatgcact

SEQ ID NO: 138786 - DNA, 15 bp, Homo sapiens
atgcgtaatgcactc

SEQ ID NO: 138787 - DNA, 15 bp, Homo sapiens
tgcgtaatgcactct

SEQ ID NO: 138788 - DNA, 15 bp, Homo sapiens
gcgtaatgcactctg

SEQ ID NO: 138789 - DNA, 15 bp, Homo sapiens
cgtaatgcactctgc

SEQ ID NO: 138790 - DNA, 15 bp, Homo sapiens
gtaatgcactctgcc

SEQ ID NO: 138791 - DNA, 15 bp, Homo sapiens
taatgcactctgcca

SEQ ID NO: 138792 - DNA, 15 bp, Homo sapiens
aatgcactctgccag

SEQ ID NO: 138793 - DNA, 15 bp, Homo sapiens
atgcactctgccagt

SEQ ID NO: 138794 - DNA, 15 bp, Homo sapiens
tgcactctgccagtg

SEQ ID NO: 138795 - DNA, 15 bp, Homo sapiens
gcactctgccagtgt

SEQ ID NO: 138796 - DNA, 15 bp, Homo sapiens
cactctgccagtgtt

SEQ ID NO: 138797 - DNA, 15 bp, Homo sapiens
actctgccagtgttt

SEQ ID NO: 138798 - DNA, 15 bp, Homo sapiens
ctctgccagtgtttg

SEQ ID NO: 138799 - DNA, 15 bp, Homo sapiens
tctgccagtgtttgt

SEQ ID NO: 138800 - DNA, 15 bp, Homo sapiens
ctgccagtgtttgtc

SEQ ID NO: 138801 - DNA, 15 bp, Homo sapiens
tgccagtgtttgtca

SEQ ID NO: 138802 - DNA, 15 bp, Homo sapiens
gccagtgtttgtcaa

SEQ ID NO: 138803 - DNA, 15 bp, Homo sapiens
ccagtgtttgtcaaa

SEQ ID NO: 138804 - DNA, 15 bp, Homo sapiens
cagtgtttgtcaaaa

SEQ ID NO: 138805 - DNA, 15 bp, Homo sapiens
agtgtttgtcaaaac

SEQ ID NO: 138806 - DNA, 15 bp, Homo sapiens
gtgtttgtcaaaaca

SEQ ID NO: 138807 - DNA, 15 bp, Homo sapiens
tgtttgtcaaaacat

SEQ ID NO: 138808 - DNA, 15 bp, Homo sapiens
gtttgtcaaaacatg

SEQ ID NO: 138809 - DNA, 15 bp, Homo sapiens
tttgtcaaaacatgg

SEQ ID NO: 138810 - DNA, 15 bp, Homo sapiens
ttgtcaaaacatggt

SEQ ID NO: 138811 - DNA, 15 bp, Homo sapiens
tgtcaaaacatggtc

SEQ ID NO: 138812 - DNA, 15 bp, Homo sapiens
gtcaaaacatggtcc

SEQ ID NO: 138813 - DNA, 15 bp, Homo sapiens
tcaaaacatggtccc

SEQ ID NO: 138814 - DNA, 15 bp, Homo sapiens
caaaacatggtcccc

SEQ ID NO: 138815 - DNA, 15 bp, Homo sapiens
aaaacatggtcccca

SEQ ID NO: 138816 - DNA, 15 bp, Homo sapiens
aaacatggtccccag

SEQ ID NO: 138817 - DNA, 15 bp, Homo sapiens
aacatggtccccagg

SEQ ID NO: 138818 - DNA, 15 bp, Homo sapiens
acatggtccccaggt

SEQ ID NO: 138819 - DNA, 15 bp, Homo sapiens
catggtccccaggtc

SEQ ID NO: 138820 - DNA, 15 bp, Homo sapiens
atggtccccaggtca

SEQ ID NO: 138821 - DNA, 15 bp, Homo sapiens
tggtccccaggtcag

SEQ ID NO: 138822 - DNA, 15 bp, Homo sapiens
ggtccccaggtcagc

SEQ ID NO: 138823 - DNA, 15 bp, Homo sapiens
gtccccaggtcagca

SEQ ID NO: 138824 - DNA, 15 bp, Homo sapiens
tccccaggtcagcag

SEQ ID NO: 138825 - DNA, 15 bp, Homo sapiens
ccccaggtcagcagc

SEQ ID NO: 138826 - DNA, 15 bp, Homo sapiens
cccaggtcagcagca

SEQ ID NO: 138827 - DNA, 15 bp, Homo sapiens
ccaggtcagcagcat

SEQ ID NO: 138828 - DNA, 15 bp, Homo sapiens
caggtcagcagcatc

SEQ ID NO: 138829 - DNA, 15 bp, Homo sapiens
aggtcagcagcatca

SEQ ID NO: 138830 - DNA, 15 bp, Homo sapiens
ggtcagcagcatcag

SEQ ID NO: 138831 - DNA, 15 bp, Homo sapiens
gtcagcagcatcagc

SEQ ID NO: 138832 - DNA, 15 bp, Homo sapiens
tcagcagcatcagca

SEQ ID NO: 138833 - DNA, 15 bp, Homo sapiens
cagcagcatcagcat

SEQ ID NO: 138834 - DNA, 15 bp, Homo sapiens
agcagcatcagcatc

SEQ ID NO: 138835 - DNA, 15 bp, Homo sapiens
gcagcatcagcatca

SEQ ID NO: 138836 - DNA, 15 bp, Homo sapiens
cagcatcagcatcac

SEQ ID NO: 138837 - DNA, 15 bp, Homo sapiens
agcatcagcatcacc

SEQ ID NO: 138838 - DNA, 15 bp, Homo sapiens
gcatcagcatcacct

SEQ ID NO: 138839 - DNA, 15 bp, Homo sapiens
catcagcatcacctg

SEQ ID NO: 138840 - DNA, 15 bp, Homo sapiens
atcagcatcacctgt

SEQ ID NO: 138841 - DNA, 15 bp, Homo sapiens
tcagcatcacctgta

SEQ ID NO: 138842 - DNA, 15 bp, Homo sapiens
cagcatcacctgtaa

SEQ ID NO: 138843 - DNA, 15 bp, Homo sapiens
agcatcacctgtaag

SEQ ID NO: 138844 - DNA, 15 bp, Homo sapiens
gcatcacctgtaagt

SEQ ID NO: 138845 - DNA, 15 bp, Homo sapiens
catcacctgtaagtg

SEQ ID NO: 138846 - DNA, 15 bp, Homo sapiens
atcacctgtaagtga

SEQ ID NO: 138847 - DNA, 15 bp, Homo sapiens
tcacctgtaagtgat

SEQ ID NO: 138848 - DNA, 15 bp, Homo sapiens
cacctgtaagtgatt

SEQ ID NO: 138849 - DNA, 15 bp, Homo sapiens
acctgtaagtgattc

SEQ ID NO: 138850 - DNA, 15 bp, Homo sapiens
cctgtaagtgattct

SEQ ID NO: 138851 - DNA, 15 bp, Homo sapiens
ctgtaagtgattctc

SEQ ID NO: 138852 - DNA, 15 bp, Homo sapiens
tgtaagtgattctcc

SEQ ID NO: 138853 - DNA, 15 bp, Homo sapiens
gtaagtgattctcca

SEQ ID NO: 138854 - DNA, 15 bp, Homo sapiens
taagtgattctccag

SEQ ID NO: 138855 - DNA, 15 bp, Homo sapiens
aagtgattctccagt

SEQ ID NO: 138856 - DNA, 15 bp, Homo sapiens
agtgattctccagtc

SEQ ID NO: 138857 - DNA, 15 bp, Homo sapiens
gtgattctccagtcg

SEQ ID NO: 138858 - DNA, 15 bp, Homo sapiens
tgattctccagtcgc

SEQ ID NO: 138859 - DNA, 15 bp, Homo sapiens
gattctccagtcgca

SEQ ID NO: 138860 - DNA, 15 bp, Homo sapiens
attctccagtcgcat

SEQ ID NO: 138861 - DNA, 15 bp, Homo sapiens
ttctccagtcgcatc

SEQ ID NO: 138862 - DNA, 15 bp, Homo sapiens
tctccagtcgcatcc

SEQ ID NO: 138863 - DNA, 15 bp, Homo sapiens
ctccagtcgcatccc

SEQ ID NO: 138864 - DNA, 15 bp, Homo sapiens
tccagtcgcatccca

SEQ ID NO: 138865 - DNA, 15 bp, Homo sapiens
ccagtcgcatcccag

SEQ ID NO: 138866 - DNA, 15 bp, Homo sapiens
cagtcgcatcccagg

SEQ ID NO: 138867 - DNA, 15 bp, Homo sapiens
agtcgcatcccaggg

SEQ ID NO: 138868 - DNA, 15 bp, Homo sapiens
gtcgcatcccagggc

SEQ ID NO: 138869 - DNA, 15 bp, Homo sapiens
tcgcatcccagggcc

SEQ ID NO: 138870 - DNA, 15 bp, Homo sapiens
cgcatcccagggccg

SEQ ID NO: 138871 - DNA, 15 bp, Homo sapiens
gcatcccagggccgc

SEQ ID NO: 138872 - DNA, 15 bp, Homo sapiens
catcccagggccgct

SEQ ID NO: 138873 - DNA, 15 bp, Homo sapiens
atcccagggccgctg

SEQ ID NO: 138874 - DNA, 15 bp, Homo sapiens
tcccagggccgctgt

SEQ ID NO: 138875 - DNA, 15 bp, Homo sapiens
cccagggccgctgta

SEQ ID NO: 138876 - DNA, 15 bp, Homo sapiens
ccagggccgctgtat

SEQ ID NO: 138877 - DNA, 15 bp, Homo sapiens
cagggccgctgtatc

SEQ ID NO: 138878 - DNA, 15 bp, Homo sapiens
agggccgctgtatca

SEQ ID NO: 138879 - DNA, 15 bp, Homo sapiens
gggccgctgtatcag

SEQ ID NO: 138880 - DNA, 15 bp, Homo sapiens
ggccgctgtatcaga

SEQ ID NO: 138881 - DNA, 15 bp, Homo sapiens
gccgctgtatcagaa

SEQ ID NO: 138882 - DNA, 15 bp, Homo sapiens
ccgctgtatcagaaa

SEQ ID NO: 138883 - DNA, 15 bp, Homo sapiens
cgctgtatcagaaac

SEQ ID NO: 138884 - DNA, 15 bp, Homo sapiens
gctgtatcagaaact

SEQ ID NO: 138885 - DNA, 15 bp, Homo sapiens
ctgtatcagaaactc

SEQ ID NO: 138886 - DNA, 15 bp, Homo sapiens
tgtatcagaaactct

SEQ ID NO: 138887 - DNA, 15 bp, Homo sapiens
gtatcagaaactctg

SEQ ID NO: 138888 - DNA, 15 bp, Homo sapiens
tatcagaaactctgg

SEQ ID NO: 138889 - DNA, 15 bp, Homo sapiens
atcagaaactctggg

SEQ ID NO: 138890 - DNA, 15 bp, Homo sapiens
tcagaaactctgggg

SEQ ID NO: 138891 - DNA, 15 bp, Homo sapiens
cagaaactctggggg

SEQ ID NO: 138892 - DNA, 15 bp, Homo sapiens
agaaactctgggggt

SEQ ID NO: 138893 - DNA, 15 bp, Homo sapiens
gaaactctgggggtg

SEQ ID NO: 138894 - DNA, 15 bp, Homo sapiens
aaactctgggggtgg

SEQ ID NO: 138895 - DNA, 15 bp, Homo sapiens
aactctgggggtggg

SEQ ID NO: 138896 - DNA, 15 bp, Homo sapiens
actctgggggtgggg

SEQ ID NO: 138897 - DNA, 15 bp, Homo sapiens
ctctgggggtggggg

SEQ ID NO: 138898 - DNA, 15 bp, Homo sapiens
tctgggggtgggggt

SEQ ID NO: 138899 - DNA, 15 bp, Homo sapiens
gggtgggggtggggg

SEQ ID NO: 138900 - DNA, 15 bp, Homo sapiens
ggtgggggtgggggt

SEQ ID NO: 138901 - DNA, 15 bp, Homo sapiens
gtgggggtgggggtg

SEQ ID NO: 138902 - DNA, 15 bp, Homo sapiens
ggtgggggtgggggc

SEQ ID NO: 138903 - DNA, 15 bp, Homo sapiens
gtgggggtgggggcc

SEQ ID NO: 138904 - DNA, 15 bp, Homo sapiens
tgggggtgggggccg

SEQ ID NO: 138905 - DNA, 15 bp, Homo sapiens
gggggtgggggccgg

SEQ ID NO: 138906 - DNA, 15 bp, Homo sapiens
ggggtgggggccggc

SEQ ID NO: 138907 - DNA, 15 bp, Homo sapiens
gggtgggggccggcc

SEQ ID NO: 138908 - DNA, 15 bp, Homo sapiens
ggtgggggccggccc

SEQ ID NO: 138909 - DNA, 15 bp, Homo sapiens
gtgggggccggcccg

SEQ ID NO: 138910 - DNA, 15 bp, Homo sapiens
tgggggccggcccgg

SEQ ID NO: 138911 - DNA, 15 bp, Homo sapiens
gggggccggcccggc

SEQ ID NO: 138912 - DNA, 15 bp, Homo sapiens
ggggccggcccggcc

SEQ ID NO: 138913 - DNA, 15 bp, Homo sapiens
gggccggcccggccc

SEQ ID NO: 138914 - DNA, 15 bp, Homo sapiens
ggccggcccggcccg

SEQ ID NO: 138915 - DNA, 15 bp, Homo sapiens
gccggcccggcccgg

SEQ ID NO: 138916 - DNA, 15 bp, Homo sapiens
ccggcccggcccggc

SEQ ID NO: 138917 - DNA, 15 bp, Homo sapiens
cggcccggcccggcc

SEQ ID NO: 138918 - DNA, 15 bp, Homo sapiens
ggcccggcccggccc

SEQ ID NO: 138919 - DNA, 15 bp, Homo sapiens
gcccggcccggcccg

SEQ ID NO: 138920 - DNA, 15 bp, Homo sapiens
cccggcccggcccgg

SEQ ID NO: 138921 - DNA, 15 bp, Homo sapiens
cggcccggcccggca

SEQ ID NO: 138922 - DNA, 15 bp, Homo sapiens
ggcccggcccggcag

SEQ ID NO: 138923 - DNA, 15 bp, Homo sapiens
gcccggcccggcagt

SEQ ID NO: 138924 - DNA, 15 bp, Homo sapiens
cccggcccggcagtc

SEQ ID NO: 138925 - DNA, 15 bp, Homo sapiens
ccggcccggcagtct

SEQ ID NO: 138926 - DNA, 15 bp, Homo sapiens
cggcccggcagtctg

SEQ ID NO: 138927 - DNA, 15 bp, Homo sapiens
ggcccggcagtctgc

SEQ ID NO: 138928 - DNA, 15 bp, Homo sapiens
gcccggcagtctgca

SEQ ID NO: 138929 - DNA, 15 bp, Homo sapiens
cccggcagtctgcat

SEQ ID NO: 138930 - DNA, 15 bp, Homo sapiens
ccggcagtctgcatt

SEQ ID NO: 138931 - DNA, 15 bp, Homo sapiens
cggcagtctgcattt

SEQ ID NO: 138932 - DNA, 15 bp, Homo sapiens
ggcagtctgcatttt

SEQ ID NO: 138933 - DNA, 15 bp, Homo sapiens
gcagtctgcatttta

SEQ ID NO: 138934 - DNA, 15 bp, Homo sapiens
cagtctgcattttaa

SEQ ID NO: 138935 - DNA, 15 bp, Homo sapiens
agtctgcattttaac

SEQ ID NO: 138936 - DNA, 15 bp, Homo sapiens
gtctgcattttaaca

SEQ ID NO: 138937 - DNA, 15 bp, Homo sapiens
tctgcattttaacaa

SEQ ID NO: 138938 - DNA, 15 bp, Homo sapiens
ctgcattttaacaag

SEQ ID NO: 138939 - DNA, 15 bp, Homo sapiens
tgcattttaacaagc

SEQ ID NO: 138940 - DNA, 15 bp, Homo sapiens
gcattttaacaagct

SEQ ID NO: 138941 - DNA, 15 bp, Homo sapiens
cattttaacaagctc

SEQ ID NO: 138942 - DNA, 15 bp, Homo sapiens
attttaacaagctct

SEQ ID NO: 138943 - DNA, 15 bp, Homo sapiens
ttttaacaagctctc

SEQ ID NO: 138944 - DNA, 15 bp, Homo sapiens
tttaacaagctctcc

SEQ ID NO: 138945 - DNA, 15 bp, Homo sapiens
ttaacaagctctcca

SEQ ID NO: 138946 - DNA, 15 bp, Homo sapiens
taacaagctctccag

SEQ ID NO: 138947 - DNA, 15 bp, Homo sapiens
aacaagctctccagg

SEQ ID NO: 138948 - DNA, 15 bp, Homo sapiens
acaagctctccaggt

SEQ ID NO: 138949 - DNA, 15 bp, Homo sapiens
caagctctccaggtg

SEQ ID NO: 138950 - DNA, 15 bp, Homo sapiens
aagctctccaggtga

SEQ ID NO: 138951 - DNA, 15 bp, Homo sapiens
agctctccaggtgat

SEQ ID NO: 138952 - DNA, 15 bp, Homo sapiens
gctctccaggtgatt

SEQ ID NO: 138953 - DNA, 15 bp, Homo sapiens
ctctccaggtgattc

SEQ ID NO: 138954 - DNA, 15 bp, Homo sapiens
tctccaggtgattct

SEQ ID NO: 138955 - DNA, 15 bp, Homo sapiens
ctccaggtgattctg

SEQ ID NO: 138956 - DNA, 15 bp, Homo sapiens
tccaggtgattctga

SEQ ID NO: 138957 - DNA, 15 bp, Homo sapiens
ccaggtgattctgat

SEQ ID NO: 138958 - DNA, 15 bp, Homo sapiens
caggtgattctgatg

SEQ ID NO: 138959 - DNA, 15 bp, Homo sapiens
aggtgattctgatgc

SEQ ID NO: 138960 - DNA, 15 bp, Homo sapiens
ggtgattctgatgca

SEQ ID NO: 138961 - DNA, 15 bp, Homo sapiens
gtgattctgatgcat

SEQ ID NO: 138962 - DNA, 15 bp, Homo sapiens
tgattctgatgcata

SEQ ID NO: 138963 - DNA, 15 bp, Homo sapiens
gattctgatgcatac

SEQ ID NO: 138964 - DNA, 15 bp, Homo sapiens
attctgatgcatact

SEQ ID NO: 138965 - DNA, 15 bp, Homo sapiens
ttctgatgcatactt

SEQ ID NO: 138966 - DNA, 15 bp, Homo sapiens
tctgatgcatactta

SEQ ID NO: 138967 - DNA, 15 bp, Homo sapiens
ctgatgcatacttaa

SEQ ID NO: 138968 - DNA, 15 bp, Homo sapiens
tgatgcatacttaag

SEQ ID NO: 138969 - DNA, 15 bp, Homo sapiens
gatgcatacttaagt

SEQ ID NO: 138970 - DNA, 15 bp, Homo sapiens
atgcatacttaagtt

SEQ ID NO: 138971 - DNA, 15 bp, Homo sapiens
tgcatacttaagttt

SEQ ID NO: 138972 - DNA, 15 bp, Homo sapiens
gcatacttaagtttg

SEQ ID NO: 138973 - DNA, 15 bp, Homo sapiens
catacttaagtttga

SEQ ID NO: 138974 - DNA, 15 bp, Homo sapiens
atacttaagtttgag

SEQ ID NO: 138975 - DNA, 15 bp, Homo sapiens
tacttaagtttgaga

SEQ ID NO: 138976 - DNA, 15 bp, Homo sapiens
acttaagtttgagaa

SEQ ID NO: 138977 - DNA, 15 bp, Homo sapiens
cttaagtttgagaac

SEQ ID NO: 138978 - DNA, 15 bp, Homo sapiens
ttaagtttgagaacc

SEQ ID NO: 138979 - DNA, 15 bp, Homo sapiens
taagtttgagaacca

SEQ ID NO: 138980 - DNA, 15 bp, Homo sapiens
aagtttgagaaccat

SEQ ID NO: 138981 - DNA, 15 bp, Homo sapiens
agtttgagaaccatt

SEQ ID NO: 138982 - DNA, 15 bp, Homo sapiens
gtttgagaaccattg

SEQ ID NO: 138983 - DNA, 15 bp, Homo sapiens
tttgagaaccattgc

SEQ ID NO: 138984 - DNA, 15 bp, Homo sapiens
ttgagaaccattgct

SEQ ID NO: 138985 - DNA, 15 bp, Homo sapiens
tgagaaccattgctt

SEQ ID NO: 138986 - DNA, 15 bp, Homo sapiens
gagaaccattgcttg

SEQ ID NO: 138987 - DNA, 15 bp, Homo sapiens
agaaccattgcttgt

SEQ ID NO: 138988 - DNA, 15 bp, Homo sapiens
gaaccattgcttgtt

SEQ ID NO: 138989 - DNA, 15 bp, Homo sapiens
aaccattgcttgttt

SEQ ID NO: 138990 - DNA, 15 bp, Homo sapiens
accattgcttgtttt

SEQ ID NO: 138991 - DNA, 15 bp, Homo sapiens
ccattgcttgttttg

SEQ ID NO: 138992 - DNA, 15 bp, Homo sapiens
cattgcttgttttgc

SEQ ID NO: 138993 - DNA, 15 bp, Homo sapiens
attgcttgttttgca

SEQ ID NO: 138994 - DNA, 15 bp, Homo sapiens
ttgcttgttttgcat

SEQ ID NO: 138995 - DNA, 15 bp, Homo sapiens
tgcttgttttgcatt

SEQ ID NO: 138996 - DNA, 15 bp, Homo sapiens
gcttgttttgcatta

SEQ ID NO: 138997 - DNA, 15 bp, Homo sapiens
cttgttttgcattaa

SEQ ID NO: 138998 - DNA, 15 bp, Homo sapiens
ttgttttgcattaaa

SEQ ID NO: 138999 - DNA, 15 bp, Homo sapiens
tgttttgcattaaac

SEQ ID NO: 139000 - DNA, 15 bp, Homo sapiens
gttttgcattaaaca

SEQ ID NO: 139001 - DNA, 15 bp, Homo sapiens
ttttgcattaaacag

SEQ ID NO: 139002 - DNA, 15 bp, Homo sapiens
tttgcattaaacagg

SEQ ID NO: 139003 - DNA, 15 bp, Homo sapiens
ttgcattaaacagga

SEQ ID NO: 139004 - DNA, 15 bp, Homo sapiens
tgcattaaacaggag

SEQ ID NO: 139005 - DNA, 15 bp, Homo sapiens
gcattaaacaggaga

SEQ ID NO: 139006 - DNA, 15 bp, Homo sapiens
cattaaacaggagat

SEQ ID NO: 139007 - DNA, 15 bp, Homo sapiens
attaaacaggagatt

SEQ ID NO: 139008 - DNA, 15 bp, Homo sapiens
ttaaacaggagatta

SEQ ID NO: 139009 - DNA, 15 bp, Homo sapiens
taaacaggagattag

SEQ ID NO: 139010 - DNA, 15 bp, Homo sapiens
aaacaggagattagt

SEQ ID NO: 139011 - DNA, 15 bp, Homo sapiens
aacaggagattagtc

SEQ ID NO: 139012 - DNA, 15 bp, Homo sapiens
acaggagattagtct

SEQ ID NO: 139013 - DNA, 15 bp, Homo sapiens
caggagattagtctc

SEQ ID NO: 139014 - DNA, 15 bp, Homo sapiens
aggagattagtctct

SEQ ID NO: 139015 - DNA, 15 bp, Homo sapiens
ggagattagtctctg

SEQ ID NO: 139016 - DNA, 15 bp, Homo sapiens
gagattagtctctgc

SEQ ID NO: 139017 - DNA, 15 bp, Homo sapiens
agattagtctctgca

SEQ ID NO: 139018 - DNA, 15 bp, Homo sapiens
gattagtctctgcag

SEQ ID NO: 139019 - DNA, 15 bp, Homo sapiens
attagtctctgcagc

SEQ ID NO: 139020 - DNA, 15 bp, Homo sapiens
ttagtctctgcagct

SEQ ID NO: 139021 - DNA, 15 bp, Homo sapiens
tagtctctgcagctt

SEQ ID NO: 139022 - DNA, 15 bp, Homo sapiens
agtctctgcagcttg

SEQ ID NO: 139023 - DNA, 15 bp, Homo sapiens
gtctctgcagcttgt

SEQ ID NO: 139024 - DNA, 15 bp, Homo sapiens
tctctgcagcttgtg

SEQ ID NO: 139025 - DNA, 15 bp, Homo sapiens
ctctgcagcttgtgg

SEQ ID NO: 139026 - DNA, 15 bp, Homo sapiens
tctgcagcttgtggg

SEQ ID NO: 139027 - DNA, 15 bp, Homo sapiens
ctgcagcttgtggga

SEQ ID NO: 139028 - DNA, 15 bp, Homo sapiens
tgcagcttgtgggaa

SEQ ID NO: 139029 - DNA, 15 bp, Homo sapiens
gcagcttgtgggaat

SEQ ID NO: 139030 - DNA, 15 bp, Homo sapiens
cagcttgtgggaata

SEQ ID NO: 139031 - DNA, 15 bp, Homo sapiens
agcttgtgggaataa

SEQ ID NO: 139032 - DNA, 15 bp, Homo sapiens
gcttgtgggaataaa

SEQ ID NO: 139033 - DNA, 15 bp, Homo sapiens
cttgtgggaataaag

SEQ ID NO: 139034 - DNA, 15 bp, Homo sapiens
ttgtgggaataaagc

SEQ ID NO: 139035 - DNA, 15 bp, Homo sapiens
tgtgggaataaagct

SEQ ID NO: 139036 - DNA, 15 bp, Homo sapiens
gtgggaataaagctt

SEQ ID NO: 139037 - DNA, 15 bp, Homo sapiens
tgggaataaagcttt

SEQ ID NO: 139038 - DNA, 15 bp, Homo sapiens
gggaataaagcttta

SEQ ID NO: 139039 - DNA, 15 bp, Homo sapiens
ggaataaagctttaa

SEQ ID NO: 139040 - DNA, 15 bp, Homo sapiens
gaataaagctttaaa

SEQ ID NO: 139041 - DNA, 15 bp, Homo sapiens
aataaagctttaaat

SEQ ID NO: 139042 - DNA, 15 bp, Homo sapiens
ataaagctttaaatc

SEQ ID NO: 139043 - DNA, 15 bp, Homo sapiens
taaagctttaaatct

SEQ ID NO: 139044 - DNA, 15 bp, Homo sapiens
aaagctttaaatctc

SEQ ID NO: 139045 - DNA, 15 bp, Homo sapiens
aagctttaaatctct

SEQ ID NO: 139046 - DNA, 15 bp, Homo sapiens
agctttaaatctctc

SEQ ID NO: 139047 - DNA, 15 bp, Homo sapiens
gctttaaatctctcc

SEQ ID NO: 139048 - DNA, 15 bp, Homo sapiens
ctttaaatctctcca

SEQ ID NO: 139049 - DNA, 15 bp, Homo sapiens
tttaaatctctccaa

SEQ ID NO: 139050 - DNA, 15 bp, Homo sapiens
ttaaatctctccaat

SEQ ID NO: 139051 - DNA, 15 bp, Homo sapiens
taaatctctccaatt

SEQ ID NO: 139052 - DNA, 15 bp, Homo sapiens
aaatctctccaattt

SEQ ID NO: 139053 - DNA, 15 bp, Homo sapiens
aatctctccaatttt

SEQ ID NO: 139054 - DNA, 15 bp, Homo sapiens
atctctccaatttta

SEQ ID NO: 139055 - DNA, 15 bp, Homo sapiens
tctctccaattttag

SEQ ID NO: 139056 - DNA, 15 bp, Homo sapiens
ctctccaattttagc

SEQ ID NO: 139057 - DNA, 15 bp, Homo sapiens
tctccaattttagct

SEQ ID NO: 139058 - DNA, 15 bp, Homo sapiens
ctccaattttagctc

SEQ ID NO: 139059 - DNA, 15 bp, Homo sapiens
tccaattttagctct

SEQ ID NO: 139060 - DNA, 15 bp, Homo sapiens
ccaattttagctctg

SEQ ID NO: 139061 - DNA, 15 bp, Homo sapiens
caattttagctctgt

SEQ ID NO: 139062 - DNA, 15 bp, Homo sapiens
aattttagctctgtg

SEQ ID NO: 139063 - DNA, 15 bp, Homo sapiens
attttagctctgtga

SEQ ID NO: 139064 - DNA, 15 bp, Homo sapiens
ttttagctctgtgaa

SEQ ID NO: 139065 - DNA, 15 bp, Homo sapiens
tttagctctgtgaaa

SEQ ID NO: 139066 - DNA, 15 bp, Homo sapiens
ttagctctgtgaaaa

SEQ ID NO: 139067 - DNA, 15 bp, Homo sapiens
tagctctgtgaaaag

SEQ ID NO: 139068 - DNA, 15 bp, Homo sapiens
agctctgtgaaaagg

SEQ ID NO: 139069 - DNA, 15 bp, Homo sapiens
gctctgtgaaaaggc

SEQ ID NO: 139070 - DNA, 15 bp, Homo sapiens
ctctgtgaaaaggca

SEQ ID NO: 139071 - DNA, 15 bp, Homo sapiens
tctgtgaaaaggcag

SEQ ID NO: 139072 - DNA, 15 bp, Homo sapiens
ctgtgaaaaggcagt

SEQ ID NO: 139073 - DNA, 15 bp, Homo sapiens
tgtgaaaaggcagtg

SEQ ID NO: 139074 - DNA, 15 bp, Homo sapiens
gtgaaaaggcagtgg

SEQ ID NO: 139075 - DNA, 15 bp, Homo sapiens
tgaaaaggcagtggg

SEQ ID NO: 139076 - DNA, 15 bp, Homo sapiens
gaaaaggcagtgggg

SEQ ID NO: 139077 - DNA, 15 bp, Homo sapiens
aaaaggcagtgggga

SEQ ID NO: 139078 - DNA, 15 bp, Homo sapiens
aaaggcagtggggag

SEQ ID NO: 139079 - DNA, 15 bp, Homo sapiens
aaggcagtggggaga

SEQ ID NO: 139080 - DNA, 15 bp, Homo sapiens
aggcagtggggagac

SEQ ID NO: 139081 - DNA, 15 bp, Homo sapiens
ggcagtggggagaca

SEQ ID NO: 139082 - DNA, 15 bp, Homo sapiens
gcagtggggagacag

SEQ ID NO: 139083 - DNA, 15 bp, Homo sapiens
cagtggggagacagg

SEQ ID NO: 139084 - DNA, 15 bp, Homo sapiens
agtggggagacagga

SEQ ID NO: 139085 - DNA, 15 bp, Homo sapiens
gtggggagacaggaa

SEQ ID NO: 139086 - DNA, 15 bp, Homo sapiens
tggggagacaggaat

SEQ ID NO: 139087 - DNA, 15 bp, Homo sapiens
ggggagacaggaatg

SEQ ID NO: 139088 - DNA, 15 bp, Homo sapiens
gggagacaggaatga

SEQ ID NO: 139089 - DNA, 15 bp, Homo sapiens
ggagacaggaatgaa

SEQ ID NO: 139090 - DNA, 15 bp, Homo sapiens
gagacaggaatgaac

SEQ ID NO: 139091 - DNA, 15 bp, Homo sapiens
agacaggaatgaacg

SEQ ID NO: 139092 - DNA, 15 bp, Homo sapiens
gacaggaatgaacgg

SEQ ID NO: 139093 - DNA, 15 bp, Homo sapiens
acaggaatgaacgga

SEQ ID NO: 139094 - DNA, 15 bp, Homo sapiens
caggaatgaacggac

SEQ ID NO: 139095 - DNA, 15 bp, Homo sapiens
aggaatgaacggact

SEQ ID NO: 139096 - DNA, 15 bp, Homo sapiens
ggaatgaacggacta

SEQ ID NO: 139097 - DNA, 15 bp, Homo sapiens
gaatgaacggactag

SEQ ID NO: 139098 - DNA, 15 bp, Homo sapiens
aatgaacggactagt

SEQ ID NO: 139099 - DNA, 15 bp, Homo sapiens
atgaacggactagtg

SEQ ID NO: 139100 - DNA, 15 bp, Homo sapiens
tgaacggactagtgc

SEQ ID NO: 139101 - DNA, 15 bp, Homo sapiens
gaacggactagtgcc

SEQ ID NO: 139102 - DNA, 15 bp, Homo sapiens
aacggactagtgcca

SEQ ID NO: 139103 - DNA, 15 bp, Homo sapiens
acggactagtgccac

SEQ ID NO: 139104 - DNA, 15 bp, Homo sapiens
cggactagtgccaca

SEQ ID NO: 139105 - DNA, 15 bp, Homo sapiens
ggactagtgccacaa

SEQ ID NO: 139106 - DNA, 15 bp, Homo sapiens
gactagtgccacaaa

SEQ ID NO: 139107 - DNA, 15 bp, Homo sapiens
actagtgccacaaag

SEQ ID NO: 139108 - DNA, 15 bp, Homo sapiens
ctagtgccacaaagc

SEQ ID NO: 139109 - DNA, 15 bp, Homo sapiens
tagtgccacaaagct

SEQ ID NO: 139110 - DNA, 15 bp, Homo sapiens
agtgccacaaagctc

SEQ ID NO: 139111 - DNA, 15 bp, Homo sapiens
gtgccacaaagctca

SEQ ID NO: 139112 - DNA, 15 bp, Homo sapiens
tgccacaaagctcag

SEQ ID NO: 139113 - DNA, 15 bp, Homo sapiens
gccacaaagctcagg

SEQ ID NO: 139114 - DNA, 15 bp, Homo sapiens
ccacaaagctcaggt

SEQ ID NO: 139115 - DNA, 15 bp, Homo sapiens
cacaaagctcaggtg

SEQ ID NO: 139116 - DNA, 15 bp, Homo sapiens
acaaagctcaggtgg

SEQ ID NO: 139117 - DNA, 15 bp, Homo sapiens
caaagctcaggtggg

SEQ ID NO: 139118 - DNA, 15 bp, Homo sapiens
aaagctcaggtgggg

SEQ ID NO: 139119 - DNA, 15 bp, Homo sapiens
aagctcaggtggggt

SEQ ID NO: 139120 - DNA, 15 bp, Homo sapiens
agctcaggtggggtg

SEQ ID NO: 139121 - DNA, 15 bp, Homo sapiens
gctcaggtggggtgg

SEQ ID NO: 139122 - DNA, 15 bp, Homo sapiens
ctcaggtggggtggg

SEQ ID NO: 139123 - DNA, 15 bp, Homo sapiens
tcaggtggggtgggt

SEQ ID NO: 139124 - DNA, 15 bp, Homo sapiens
caggtggggtgggtg

SEQ ID NO: 139125 - DNA, 15 bp, Homo sapiens
aggtggggtgggtga

SEQ ID NO: 139126 - DNA, 15 bp, Homo sapiens
ggtggggtgggtgag

SEQ ID NO: 139127 - DNA, 15 bp, Homo sapiens
gtggggtgggtgaga

SEQ ID NO: 139128 - DNA, 15 bp, Homo sapiens
tggggtgggtgagat

SEQ ID NO: 139129 - DNA, 15 bp, Homo sapiens
ggggtgggtgagatc

SEQ ID NO: 139130 - DNA, 15 bp, Homo sapiens
gggtgggtgagatca

SEQ ID NO: 139131 - DNA, 15 bp, Homo sapiens
ggtgggtgagatcat

SEQ ID NO: 139132 - DNA, 15 bp, Homo sapiens
gtgggtgagatcatt

SEQ ID NO: 139133 - DNA, 15 bp, Homo sapiens
tgggtgagatcattt

SEQ ID NO: 139134 - DNA, 15 bp, Homo sapiens
gggtgagatcattta

SEQ ID NO: 139135 - DNA, 15 bp, Homo sapiens
ggtgagatcatttag

SEQ ID NO: 139136 - DNA, 15 bp, Homo sapiens
gtgagatcatttaga

SEQ ID NO: 139137 - DNA, 15 bp, Homo sapiens
tgagatcatttagaa

SEQ ID NO: 139138 - DNA, 15 bp, Homo sapiens
gagatcatttagaag

SEQ ID NO: 139139 - DNA, 15 bp, Homo sapiens
agatcatttagaaga

SEQ ID NO: 139140 - DNA, 15 bp, Homo sapiens
gatcatttagaagag

SEQ ID NO: 139141 - DNA, 15 bp, Homo sapiens
atcatttagaagaga

SEQ ID NO: 139142 - DNA, 15 bp, Homo sapiens
tcatttagaagagaa

SEQ ID NO: 139143 - DNA, 15 bp, Homo sapiens
catttagaagagaaa

SEQ ID NO: 139144 - DNA, 15 bp, Homo sapiens
atttagaagagaaag

SEQ ID NO: 139145 - DNA, 15 bp, Homo sapiens
tttagaagagaaaga

SEQ ID NO: 139146 - DNA, 15 bp, Homo sapiens
ttagaagagaaagac

SEQ ID NO: 139147 - DNA, 15 bp, Homo sapiens
tagaagagaaagacc

SEQ ID NO: 139148 - DNA, 15 bp, Homo sapiens
agaagagaaagaccg

SEQ ID NO: 139149 - DNA, 15 bp, Homo sapiens
gaagagaaagaccgg

SEQ ID NO: 139150 - DNA, 15 bp, Homo sapiens
aagagaaagaccggg

SEQ ID NO: 139151 - DNA, 15 bp, Homo sapiens
agagaaagaccgggc

SEQ ID NO: 139152 - DNA, 15 bp, Homo sapiens
gagaaagaccgggca

SEQ ID NO: 139153 - DNA, 15 bp, Homo sapiens
agaaagaccgggcat

SEQ ID NO: 139154 - DNA, 15 bp, Homo sapiens
gaaagaccgggcatg

SEQ ID NO: 139155 - DNA, 15 bp, Homo sapiens
aaagaccgggcatgg

SEQ ID NO: 139156 - DNA, 15 bp, Homo sapiens
aagaccgggcatggt

SEQ ID NO: 139157 - DNA, 15 bp, Homo sapiens
agaccgggcatggtg

SEQ ID NO: 139158 - DNA, 15 bp, Homo sapiens
gaccgggcatggtgg

SEQ ID NO: 139159 - DNA, 15 bp, Homo sapiens
accgggcatggtggc

SEQ ID NO: 139160 - DNA, 15 bp, Homo sapiens
gcatggtggctcacg

SEQ ID NO: 139161 - DNA, 15 bp, Homo sapiens
catggtggctcacgc

SEQ ID NO: 139162 - DNA, 15 bp, Homo sapiens
atggtggctcacgcc

SEQ ID NO: 139163 - DNA, 15 bp, Homo sapiens
tggtggctcacgcct

SEQ ID NO: 139164 - DNA, 15 bp, Homo sapiens
ggctcacgcctgtac

SEQ ID NO: 139165 - DNA, 15 bp, Homo sapiens
gctcacgcctgtact

SEQ ID NO: 139166 - DNA, 15 bp, Homo sapiens
ctcacgcctgtactg

SEQ ID NO: 139167 - DNA, 15 bp, Homo sapiens
tcacgcctgtactgt

SEQ ID NO: 139168 - DNA, 15 bp, Homo sapiens
cacgcctgtactgtc

SEQ ID NO: 139169 - DNA, 15 bp, Homo sapiens
acgcctgtactgtca

SEQ ID NO: 139170 - DNA, 15 bp, Homo sapiens
cgcctgtactgtcag

SEQ ID NO: 139171 - DNA, 15 bp, Homo sapiens
gcctgtactgtcagc

SEQ ID NO: 139172 - DNA, 15 bp, Homo sapiens
cctgtactgtcagca

SEQ ID NO: 139173 - DNA, 15 bp, Homo sapiens
ctgtactgtcagcac

SEQ ID NO: 139174 - DNA, 15 bp, Homo sapiens
tgtactgtcagcact

SEQ ID NO: 139175 - DNA, 15 bp, Homo sapiens
gtactgtcagcactt

SEQ ID NO: 139176 - DNA, 15 bp, Homo sapiens
tactgtcagcacttt

SEQ ID NO: 139177 - DNA, 15 bp, Homo sapiens
actgtcagcactttg

SEQ ID NO: 139178 - DNA, 15 bp, Homo sapiens
ctgtcagcactttgg

SEQ ID NO: 139179 - DNA, 15 bp, Homo sapiens
tgtcagcactttggg

SEQ ID NO: 139180 - DNA, 15 bp, Homo sapiens
gtcagcactttggga

SEQ ID NO: 139181 - DNA, 15 bp, Homo sapiens
tcagcactttgggag

SEQ ID NO: 139182 - DNA, 15 bp, Homo sapiens
ggaggccaaggcagg

SEQ ID NO: 139183 - DNA, 15 bp, Homo sapiens
gaggccaaggcaggt

SEQ ID NO: 139184 - DNA, 15 bp, Homo sapiens
aggccaaggcaggtt

SEQ ID NO: 139185 - DNA, 15 bp, Homo sapiens
ggccaaggcaggttg

SEQ ID NO: 139186 - DNA, 15 bp, Homo sapiens
gccaaggcaggttgg

SEQ ID NO: 139187 - DNA, 15 bp, Homo sapiens
ccaaggcaggttgga

SEQ ID NO: 139188 - DNA, 15 bp, Homo sapiens
caaggcaggttggat

SEQ ID NO: 139189 - DNA, 15 bp, Homo sapiens
aaggcaggttggatc

SEQ ID NO: 139190 - DNA, 15 bp, Homo sapiens
aggcaggttggatca

SEQ ID NO: 139191 - DNA, 15 bp, Homo sapiens
ggcaggttggatcac

SEQ ID NO: 139192 - DNA, 15 bp, Homo sapiens
gcaggttggatcaca

SEQ ID NO: 139193 - DNA, 15 bp, Homo sapiens
caggttggatcacaa

SEQ ID NO: 139194 - DNA, 15 bp, Homo sapiens
aggttggatcacaag

SEQ ID NO: 139195 - DNA, 15 bp, Homo sapiens
ggttggatcacaagg

SEQ ID NO: 139196 - DNA, 15 bp, Homo sapiens
gttggatcacaaggt

SEQ ID NO: 139197 - DNA, 15 bp, Homo sapiens
ttggatcacaaggtc

SEQ ID NO: 139198 - DNA, 15 bp, Homo sapiens
tggatcacaaggtca

SEQ ID NO: 139199 - DNA, 15 bp, Homo sapiens
ggatcacaaggtcag

SEQ ID NO: 139200 - DNA, 15 bp, Homo sapiens
gatcacaaggtcagg

SEQ ID NO: 139201 - DNA, 15 bp, Homo sapiens
atcacaaggtcagga

SEQ ID NO: 139202 - DNA, 15 bp, Homo sapiens
tcacaaggtcaggag

SEQ ID NO: 139203 - DNA, 15 bp, Homo sapiens
cacaaggtcaggagt

SEQ ID NO: 139204 - DNA, 15 bp, Homo sapiens
acaaggtcaggagtt

SEQ ID NO: 139205 - DNA, 15 bp, Homo sapiens
caaggtcaggagttt

SEQ ID NO: 139206 - DNA, 15 bp, Homo sapiens
aaggtcaggagtttg

SEQ ID NO: 139207 - DNA, 15 bp, Homo sapiens
ttgagaccagcctgc

SEQ ID NO: 139208 - DNA, 15 bp, Homo sapiens
tgagaccagcctgcc

SEQ ID NO: 139209 - DNA, 15 bp, Homo sapiens
gagaccagcctgcct

SEQ ID NO: 139210 - DNA, 15 bp, Homo sapiens
agaccagcctgccta

SEQ ID NO: 139211 - DNA, 15 bp, Homo sapiens
gaccagcctgcctat

SEQ ID NO: 139212 - DNA, 15 bp, Homo sapiens
accagcctgcctatc

SEQ ID NO: 139213 - DNA, 15 bp, Homo sapiens
ccagcctgcctatca

SEQ ID NO: 139214 - DNA, 15 bp, Homo sapiens
cagcctgcctatcat

SEQ ID NO: 139215 - DNA, 15 bp, Homo sapiens
agcctgcctatcatg

SEQ ID NO: 139216 - DNA, 15 bp, Homo sapiens
gcctgcctatcatgg

SEQ ID NO: 139217 - DNA, 15 bp, Homo sapiens
cctgcctatcatggt

SEQ ID NO: 139218 - DNA, 15 bp, Homo sapiens
ctgcctatcatggtg

SEQ ID NO: 139219 - DNA, 15 bp, Homo sapiens
tgcctatcatggtga

SEQ ID NO: 139220 - DNA, 15 bp, Homo sapiens
gcctatcatggtgaa

SEQ ID NO: 139221 - DNA, 15 bp, Homo sapiens
cctatcatggtgaaa

SEQ ID NO: 139222 - DNA, 15 bp, Homo sapiens
ctatcatggtgaaac

SEQ ID NO: 139223 - DNA, 15 bp, Homo sapiens
tatcatggtgaaacc

SEQ ID NO: 139224 - DNA, 15 bp, Homo sapiens
atcatggtgaaaccc

SEQ ID NO: 139225 - DNA, 15 bp, Homo sapiens
tcatggtgaaaccct

SEQ ID NO: 139226 - DNA, 15 bp, Homo sapiens
gtgaaaccctgtctg

SEQ ID NO: 139227 - DNA, 15 bp, Homo sapiens
tgaaaccctgtctgt

SEQ ID NO: 139228 - DNA, 15 bp, Homo sapiens
gaaaccctgtctgta

SEQ ID NO: 139229 - DNA, 15 bp, Homo sapiens
aaaccctgtctgtac

SEQ ID NO: 139230 - DNA, 15 bp, Homo sapiens
aaccctgtctgtact

SEQ ID NO: 139231 - DNA, 15 bp, Homo sapiens
accctgtctgtacta

SEQ ID NO: 139232 - DNA, 15 bp, Homo sapiens
ccctgtctgtactaa

SEQ ID NO: 139233 - DNA, 15 bp, Homo sapiens
cctgtctgtactaaa

SEQ ID NO: 139234 - DNA, 15 bp, Homo sapiens
ctgtctgtactaaag

SEQ ID NO: 139235 - DNA, 15 bp, Homo sapiens
tgtctgtactaaaga

SEQ ID NO: 139236 - DNA, 15 bp, Homo sapiens
gtctgtactaaagat

SEQ ID NO: 139237 - DNA, 15 bp, Homo sapiens
tctgtactaaagata

SEQ ID NO: 139238 - DNA, 15 bp, Homo sapiens
ctgtactaaagataa

SEQ ID NO: 139239 - DNA, 15 bp, Homo sapiens
tgtactaaagataaa

SEQ ID NO: 139240 - DNA, 15 bp, Homo sapiens
gtactaaagataaaa

SEQ ID NO: 139241 - DNA, 15 bp, Homo sapiens
tactaaagataaaaa

SEQ ID NO: 139242 - DNA, 15 bp, Homo sapiens
actaaagataaaaaa

SEQ ID NO: 139243 - DNA, 15 bp, Homo sapiens
ctaaagataaaaaaa

SEQ ID NO: 139244 - DNA, 15 bp, Homo sapiens
taaagataaaaaaaa

SEQ ID NO: 139245 - DNA, 15 bp, Homo sapiens
aaagataaaaaaaaa

SEQ ID NO: 139246 - DNA, 15 bp, Homo sapiens
aagataaaaaaaaaa

SEQ ID NO: 139247 - DNA, 15 bp, Homo sapiens
agataaaaaaaaaaa

SEQ ID NO: 139248 - DNA, 15 bp, Homo sapiens
gataaaaaaaaaaaa

SEQ ID NO: 139249 - DNA, 15 bp, Homo sapiens
aaaaaaaaaaaattt

SEQ ID NO: 139250 - DNA, 15 bp, Homo sapiens
aaaaaaaaaaatttg

SEQ ID NO: 139251 - DNA, 15 bp, Homo sapiens
aaaaaaaaaatttgc

SEQ ID NO: 139252 - DNA, 15 bp, Homo sapiens
aaaaaaaaatttgcc

SEQ ID NO: 139253 - DNA, 15 bp, Homo sapiens
aaaaaaaatttgcca

SEQ ID NO: 139254 - DNA, 15 bp, Homo sapiens
aaaaaaatttgccag

SEQ ID NO: 139255 - DNA, 15 bp, Homo sapiens
aaaaaatttgccagt

SEQ ID NO: 139256 - DNA, 15 bp, Homo sapiens
aaaaatttgccagtc

SEQ ID NO: 139257 - DNA, 15 bp, Homo sapiens
aaaatttgccagtca

SEQ ID NO: 139258 - DNA, 15 bp, Homo sapiens
aaatttgccagtcat

SEQ ID NO: 139259 - DNA, 15 bp, Homo sapiens
aatttgccagtcatg

SEQ ID NO: 139260 - DNA, 15 bp, Homo sapiens
atttgccagtcatgg

SEQ ID NO: 139261 - DNA, 15 bp, Homo sapiens
tttgccagtcatggt

SEQ ID NO: 139262 - DNA, 15 bp, Homo sapiens
ttgccagtcatggtg

SEQ ID NO: 139263 - DNA, 15 bp, Homo sapiens
tgccagtcatggtga

SEQ ID NO: 139264 - DNA, 15 bp, Homo sapiens
gccagtcatggtgat

SEQ ID NO: 139265 - DNA, 15 bp, Homo sapiens
ccagtcatggtgatg

SEQ ID NO: 139266 - DNA, 15 bp, Homo sapiens
cagtcatggtgatgc

SEQ ID NO: 139267 - DNA, 15 bp, Homo sapiens
agtcatggtgatgca

SEQ ID NO: 139268 - DNA, 15 bp, Homo sapiens
gtcatggtgatgcat

SEQ ID NO: 139269 - DNA, 15 bp, Homo sapiens
tcatggtgatgcata

SEQ ID NO: 139270 - DNA, 15 bp, Homo sapiens
catggtgatgcatac

SEQ ID NO: 139271 - DNA, 15 bp, Homo sapiens
atggtgatgcatacc

SEQ ID NO: 139272 - DNA, 15 bp, Homo sapiens
tggtgatgcatacct

SEQ ID NO: 139273 - DNA, 15 bp, Homo sapiens
ggtgatgcatacctg

SEQ ID NO: 139274 - DNA, 15 bp, Homo sapiens
gtgatgcatacctgt

SEQ ID NO: 139275 - DNA, 15 bp, Homo sapiens
tgatgcatacctgta

SEQ ID NO: 139276 - DNA, 15 bp, Homo sapiens
gatgcatacctgtaa

SEQ ID NO: 139277 - DNA, 15 bp, Homo sapiens
atgcatacctgtaat

SEQ ID NO: 139278 - DNA, 15 bp, Homo sapiens
tgcatacctgtaatc

SEQ ID NO: 139279 - DNA, 15 bp, Homo sapiens
gcatacctgtaatcc

SEQ ID NO: 139280 - DNA, 15 bp, Homo sapiens
catacctgtaatccc

SEQ ID NO: 139281 - DNA, 15 bp, Homo sapiens
atacctgtaatccca

SEQ ID NO: 139282 - DNA, 15 bp, Homo sapiens
tacctgtaatcccag

SEQ ID NO: 139283 - DNA, 15 bp, Homo sapiens
aatctcttgaacccg

SEQ ID NO: 139284 - DNA, 15 bp, Homo sapiens
atctcttgaacccgg

SEQ ID NO: 139285 - DNA, 15 bp, Homo sapiens
tctcttgaacccggg

SEQ ID NO: 139286 - DNA, 15 bp, Homo sapiens
ctcttgaacccggga

SEQ ID NO: 139287 - DNA, 15 bp, Homo sapiens
tcttgaacccgggag

SEQ ID NO: 139288 - DNA, 15 bp, Homo sapiens
aacccgggaggcggg

SEQ ID NO: 139289 - DNA, 15 bp, Homo sapiens
acccgggaggcgggg

SEQ ID NO: 139290 - DNA, 15 bp, Homo sapiens
cccgggaggcggggg

SEQ ID NO: 139291 - DNA, 15 bp, Homo sapiens
ccgggaggcgggggt

SEQ ID NO: 139292 - DNA, 15 bp, Homo sapiens
cgggaggcgggggtt

SEQ ID NO: 139293 - DNA, 15 bp, Homo sapiens
gggaggcgggggttg

SEQ ID NO: 139294 - DNA, 15 bp, Homo sapiens
ggaggcgggggttgc

SEQ ID NO: 139295 - DNA, 15 bp, Homo sapiens
gaggcgggggttgca

SEQ ID NO: 139296 - DNA, 15 bp, Homo sapiens
aggcgggggttgcag

SEQ ID NO: 139297 - DNA, 15 bp, Homo sapiens
ggcgggggttgcagt

SEQ ID NO: 139298 - DNA, 15 bp, Homo sapiens
gcgggggttgcagtg

SEQ ID NO: 139299 - DNA, 15 bp, Homo sapiens
cgggggttgcagtga

SEQ ID NO: 139300 - DNA, 15 bp, Homo sapiens
gggggttgcagtgag

SEQ ID NO: 139301 - DNA, 15 bp, Homo sapiens
ggggttgcagtgagc

SEQ ID NO: 139302 - DNA, 15 bp, Homo sapiens
gggttgcagtgagct

SEQ ID NO: 139303 - DNA, 15 bp, Homo sapiens
cagtgagctgagatt

SEQ ID NO: 139304 - DNA, 15 bp, Homo sapiens
agtgagctgagattc

SEQ ID NO: 139305 - DNA, 15 bp, Homo sapiens
gtgagctgagattcc

SEQ ID NO: 139306 - DNA, 15 bp, Homo sapiens
tgagctgagattcca

SEQ ID NO: 139307 - DNA, 15 bp, Homo sapiens
gagctgagattccac

SEQ ID NO: 139308 - DNA, 15 bp, Homo sapiens
agctgagattccacc

SEQ ID NO: 139309 - DNA, 15 bp, Homo sapiens
gctgagattccacca

SEQ ID NO: 139310 - DNA, 15 bp, Homo sapiens
ctgagattccaccat

SEQ ID NO: 139311 - DNA, 15 bp, Homo sapiens
tgagattccaccatt

SEQ ID NO: 139312 - DNA, 15 bp, Homo sapiens
gagattccaccattg

SEQ ID NO: 139313 - DNA, 15 bp, Homo sapiens
agattccaccattgc

SEQ ID NO: 139314 - DNA, 15 bp, Homo sapiens
gattccaccattgca

SEQ ID NO: 139315 - DNA, 15 bp, Homo sapiens
attccaccattgcac

SEQ ID NO: 139316 - DNA, 15 bp, Homo sapiens
ttccaccattgcact

SEQ ID NO: 139317 - DNA, 15 bp, Homo sapiens
tccaccattgcactc

SEQ ID NO: 139318 - DNA, 15 bp, Homo sapiens
ccaccattgcactcc

SEQ ID NO: 139319 - DNA, 15 bp, Homo sapiens
accattgcactccaa

SEQ ID NO: 139320 - DNA, 15 bp, Homo sapiens
ccattgcactccaac

SEQ ID NO: 139321 - DNA, 15 bp, Homo sapiens
cattgcactccaacc

SEQ ID NO: 139322 - DNA, 15 bp, Homo sapiens
attgcactccaacct

SEQ ID NO: 139323 - DNA, 15 bp, Homo sapiens
ttgcactccaaccta

SEQ ID NO: 139324 - DNA, 15 bp, Homo sapiens
tgcactccaacctag

SEQ ID NO: 139325 - DNA, 15 bp, Homo sapiens
gcactccaacctagg

SEQ ID NO: 139326 - DNA, 15 bp, Homo sapiens
cactccaacctaggt

SEQ ID NO: 139327 - DNA, 15 bp, Homo sapiens
actccaacctaggtg

SEQ ID NO: 139328 - DNA, 15 bp, Homo sapiens
ctccaacctaggtga

SEQ ID NO: 139329 - DNA, 15 bp, Homo sapiens
tccaacctaggtgac

SEQ ID NO: 139330 - DNA, 15 bp, Homo sapiens
ccaacctaggtgaca

SEQ ID NO: 139331 - DNA, 15 bp, Homo sapiens
caacctaggtgacag

SEQ ID NO: 139332 - DNA, 15 bp, Homo sapiens
aacctaggtgacagg

SEQ ID NO: 139333 - DNA, 15 bp, Homo sapiens
acctaggtgacaggg

SEQ ID NO: 139334 - DNA, 15 bp, Homo sapiens
cctaggtgacagggt

SEQ ID NO: 139335 - DNA, 15 bp, Homo sapiens
ctaggtgacagggtg

SEQ ID NO: 139336 - DNA, 15 bp, Homo sapiens
taggtgacagggtga

SEQ ID NO: 139337 - DNA, 15 bp, Homo sapiens
aggtgacagggtgag

SEQ ID NO: 139338 - DNA, 15 bp, Homo sapiens
ggtgacagggtgaga

SEQ ID NO: 139339 - DNA, 15 bp, Homo sapiens
gtgacagggtgagac

SEQ ID NO: 139340 - DNA, 15 bp, Homo sapiens
tgacagggtgagact

SEQ ID NO: 139341 - DNA, 15 bp, Homo sapiens
gacagggtgagactc

SEQ ID NO: 139342 - DNA, 15 bp, Homo sapiens
acagggtgagactcc

SEQ ID NO: 139343 - DNA, 15 bp, Homo sapiens
cagggtgagactccg

SEQ ID NO: 139344 - DNA, 15 bp, Homo sapiens
agggtgagactccgt

SEQ ID NO: 139345 - DNA, 15 bp, Homo sapiens
gggtgagactccgtc

SEQ ID NO: 139346 - DNA, 15 bp, Homo sapiens
ggtgagactccgtct

SEQ ID NO: 139347 - DNA, 15 bp, Homo sapiens
gtgagactccgtctc

SEQ ID NO: 139348 - DNA, 15 bp, Homo sapiens
tgagactccgtctca

SEQ ID NO: 139349 - DNA, 15 bp, Homo sapiens
gagactccgtctcaa

SEQ ID NO: 139350 - DNA, 15 bp, Homo sapiens
agactccgtctcaaa

SEQ ID NO: 139351 - DNA, 15 bp, Homo sapiens
gactccgtctcaaaa

SEQ ID NO: 139352 - DNA, 15 bp, Homo sapiens
actccgtctcaaaat

SEQ ID NO: 139353 - DNA, 15 bp, Homo sapiens
ctccgtctcaaaata

SEQ ID NO: 139354 - DNA, 15 bp, Homo sapiens
tccgtctcaaaataa

SEQ ID NO: 139355 - DNA, 15 bp, Homo sapiens
ccgtctcaaaataaa

SEQ ID NO: 139356 - DNA, 15 bp, Homo sapiens
cgtctcaaaataaaa

SEQ ID NO: 139357 - DNA, 15 bp, Homo sapiens
gtctcaaaataaaaa

SEQ ID NO: 139358 - DNA, 15 bp, Homo sapiens
tctcaaaataaaaaa

SEQ ID NO: 139359 - DNA, 15 bp, Homo sapiens
ctcaaaataaaaaaa

SEQ ID NO: 139360 - DNA, 15 bp, Homo sapiens
tcaaaataaaaaaaa

SEQ ID NO: 139361 - DNA, 15 bp, Homo sapiens
caaaataaaaaaaaa

SEQ ID NO: 139362 - DNA, 15 bp, Homo sapiens
aaaataaaaaaaaaa

SEQ ID NO: 139363 - DNA, 15 bp, Homo sapiens
aaataaaaaaaaaaa

SEQ ID NO: 139364 - DNA, 15 bp, Homo sapiens
aaaaaaaaaaaagaa

SEQ ID NO: 139365 - DNA, 15 bp, Homo sapiens
aaaaaaaaaaagaaa

SEQ ID NO: 139366 - DNA, 15 bp, Homo sapiens
aaaaaaaaaagaaaa

SEQ ID NO: 139367 - DNA, 15 bp, Homo sapiens
aaaaaaagaaaagga

SEQ ID NO: 139368 - DNA, 15 bp, Homo sapiens
aaaaaagaaaaggaa

SEQ ID NO: 139369 - DNA, 15 bp, Homo sapiens
aaaagaaaaggaaag

SEQ ID NO: 139370 - DNA, 15 bp, Homo sapiens
aaagaaaaggaaagg

SEQ ID NO: 139371 - DNA, 15 bp, Homo sapiens
aagaaaaggaaaggc

SEQ ID NO: 139372 - DNA, 15 bp, Homo sapiens
agaaaaggaaaggct

SEQ ID NO: 139373 - DNA, 15 bp, Homo sapiens
gaaaaggaaaggctg

SEQ ID NO: 139374 - DNA, 15 bp, Homo sapiens
aaaaggaaaggctgt

SEQ ID NO: 139375 - DNA, 15 bp, Homo sapiens
aaaggaaaggctgtg

SEQ ID NO: 139376 - DNA, 15 bp, Homo sapiens
aaggaaaggctgtgt

SEQ ID NO: 139377 - DNA, 15 bp, Homo sapiens
aggaaaggctgtgtg

SEQ ID NO: 139378 - DNA, 15 bp, Homo sapiens
ggaaaggctgtgtgt

SEQ ID NO: 139379 - DNA, 15 bp, Homo sapiens
gaaaggctgtgtgtg

SEQ ID NO: 139380 - DNA, 15 bp, Homo sapiens
aaaggctgtgtgtgt

SEQ ID NO: 139381 - DNA, 15 bp, Homo sapiens
aaggctgtgtgtgtg

SEQ ID NO: 139382 - DNA, 15 bp, Homo sapiens
aggctgtgtgtgtgt

SEQ ID NO: 139383 - DNA, 15 bp, Homo sapiens
ggctgtgtgtgtgtg

SEQ ID NO: 139384 - DNA, 15 bp, Homo sapiens
gctgtgtgtgtgtgt

SEQ ID NO: 139385 - DNA, 15 bp, Homo sapiens
ctgtgtgtgtgtgta

SEQ ID NO: 139386 - DNA, 15 bp, Homo sapiens
gtgtgtgtgtgtatg

SEQ ID NO: 139387 - DNA, 15 bp, Homo sapiens
tgtgtgtgtgtatgt

SEQ ID NO: 139388 - DNA, 15 bp, Homo sapiens
gtgtgtgtgtatgtg

SEQ ID NO: 139389 - DNA, 15 bp, Homo sapiens
tgtgtgtgtatgtgt

SEQ ID NO: 139390 - DNA, 15 bp, Homo sapiens
gtgtgtgtatgtgtg

SEQ ID NO: 139391 - DNA, 15 bp, Homo sapiens
tgtgtgtatgtgtgt

SEQ ID NO: 139392 - DNA, 15 bp, Homo sapiens
gtgtgtatgtgtgtg

SEQ ID NO: 139393 - DNA, 15 bp, Homo sapiens
tgtgtatgtgtgtgt

SEQ ID NO: 139394 - DNA, 15 bp, Homo sapiens
gtgtatgtgtgtgtg

SEQ ID NO: 139395 - DNA, 15 bp, Homo sapiens
tgtatgtgtgtgtgt

SEQ ID NO: 139396 - DNA, 15 bp, Homo sapiens
gtatgtgtgtgtgtg

SEQ ID NO: 139397 - DNA, 15 bp, Homo sapiens
tatgtgtgtgtgtgt

SEQ ID NO: 139398 - DNA, 15 bp, Homo sapiens
tgtgtgtgtgtgtaa

SEQ ID NO: 139399 - DNA, 15 bp, Homo sapiens
gtgtgtgtgtgtaac

SEQ ID NO: 139400 - DNA, 15 bp, Homo sapiens
tgtgtgtgtgtaaca

SEQ ID NO: 139401 - DNA, 15 bp, Homo sapiens
gtgtgtgtgtaacag

SEQ ID NO: 139402 - DNA, 15 bp, Homo sapiens
tgtgtgtgtaacagc

SEQ ID NO: 139403 - DNA, 15 bp, Homo sapiens
gtgtgtgtaacagca

SEQ ID NO: 139404 - DNA, 15 bp, Homo sapiens
tgtgtgtaacagcac

SEQ ID NO: 139405 - DNA, 15 bp, Homo sapiens
gtgtgtaacagcacc

SEQ ID NO: 139406 - DNA, 15 bp, Homo sapiens
tgtgtaacagcacca

SEQ ID NO: 139407 - DNA, 15 bp, Homo sapiens
gtgtaacagcaccat

SEQ ID NO: 139408 - DNA, 15 bp, Homo sapiens
tgtaacagcaccatc

SEQ ID NO: 139409 - DNA, 15 bp, Homo sapiens
gtaacagcaccatca

SEQ ID NO: 139410 - DNA, 15 bp, Homo sapiens
taacagcaccatcac

SEQ ID NO: 139411 - DNA, 15 bp, Homo sapiens
aacagcaccatcaca

SEQ ID NO: 139412 - DNA, 15 bp, Homo sapiens
acagcaccatcacac

SEQ ID NO: 139413 - DNA, 15 bp, Homo sapiens
cagcaccatcacact

SEQ ID NO: 139414 - DNA, 15 bp, Homo sapiens
agcaccatcacactg

SEQ ID NO: 139415 - DNA, 15 bp, Homo sapiens
gcaccatcacactgt

SEQ ID NO: 139416 - DNA, 15 bp, Homo sapiens
caccatcacactgtt

SEQ ID NO: 139417 - DNA, 15 bp, Homo sapiens
accatcacactgttt

SEQ ID NO: 139418 - DNA, 15 bp, Homo sapiens
ccatcacactgtttg

SEQ ID NO: 139419 - DNA, 15 bp, Homo sapiens
catcacactgtttga

SEQ ID NO: 139420 - DNA, 15 bp, Homo sapiens
atcacactgtttgag

SEQ ID NO: 139421 - DNA, 15 bp, Homo sapiens
tcacactgtttgagt

SEQ ID NO: 139422 - DNA, 15 bp, Homo sapiens
cacactgtttgagtt

SEQ ID NO: 139423 - DNA, 15 bp, Homo sapiens
acactgtttgagttg

SEQ ID NO: 139424 - DNA, 15 bp, Homo sapiens
cactgtttgagttga

SEQ ID NO: 139425 - DNA, 15 bp, Homo sapiens
actgtttgagttgag

SEQ ID NO: 139426 - DNA, 15 bp, Homo sapiens
ctgtttgagttgagg

SEQ ID NO: 139427 - DNA, 15 bp, Homo sapiens
tgtttgagttgagga

SEQ ID NO: 139428 - DNA, 15 bp, Homo sapiens
gtttgagttgaggag

SEQ ID NO: 139429 - DNA, 15 bp, Homo sapiens
tttgagttgaggagc

SEQ ID NO: 139430 - DNA, 15 bp, Homo sapiens
ttgagttgaggagca

SEQ ID NO: 139431 - DNA, 15 bp, Homo sapiens
tgagttgaggagcac

SEQ ID NO: 139432 - DNA, 15 bp, Homo sapiens
gagttgaggagcaca

SEQ ID NO: 139433 - DNA, 15 bp, Homo sapiens
agttgaggagcacat

SEQ ID NO: 139434 - DNA, 15 bp, Homo sapiens
gttgaggagcacatg

SEQ ID NO: 139435 - DNA, 15 bp, Homo sapiens
ttgaggagcacatgc

SEQ ID NO: 139436 - DNA, 15 bp, Homo sapiens
tgaggagcacatgct

SEQ ID NO: 139437 - DNA, 15 bp, Homo sapiens
gaggagcacatgctg

SEQ ID NO: 139438 - DNA, 15 bp, Homo sapiens
aggagcacatgctga

SEQ ID NO: 139439 - DNA, 15 bp, Homo sapiens
ggagcacatgctgag

SEQ ID NO: 139440 - DNA, 15 bp, Homo sapiens
gagcacatgctgagt

SEQ ID NO: 139441 - DNA, 15 bp, Homo sapiens
agcacatgctgagtg

SEQ ID NO: 139442 - DNA, 15 bp, Homo sapiens
gcacatgctgagtgt

SEQ ID NO: 139443 - DNA, 15 bp, Homo sapiens
cacatgctgagtgtg

SEQ ID NO: 139444 - DNA, 15 bp, Homo sapiens
acatgctgagtgtgg

SEQ ID NO: 139445 - DNA, 15 bp, Homo sapiens
catgctgagtgtggc

SEQ ID NO: 139446 - DNA, 15 bp, Homo sapiens
atgctgagtgtggct

SEQ ID NO: 139447 - DNA, 15 bp, Homo sapiens
tgctgagtgtggctc

SEQ ID NO: 139448 - DNA, 15 bp, Homo sapiens
gctgagtgtggctca

SEQ ID NO: 139449 - DNA, 15 bp, Homo sapiens
ctgagtgtggctcaa

SEQ ID NO: 139450 - DNA, 15 bp, Homo sapiens
tgagtgtggctcaac

SEQ ID NO: 139451 - DNA, 15 bp, Homo sapiens
gagtgtggctcaaca

SEQ ID NO: 139452 - DNA, 15 bp, Homo sapiens
agtgtggctcaacat

SEQ ID NO: 139453 - DNA, 15 bp, Homo sapiens
gtgtggctcaacatg

SEQ ID NO: 139454 - DNA, 15 bp, Homo sapiens
tgtggctcaacatgt

SEQ ID NO: 139455 - DNA, 15 bp, Homo sapiens
gtggctcaacatgtt

SEQ ID NO: 139456 - DNA, 15 bp, Homo sapiens
tggctcaacatgtta

SEQ ID NO: 139457 - DNA, 15 bp, Homo sapiens
ggctcaacatgttac

SEQ ID NO: 139458 - DNA, 15 bp, Homo sapiens
gctcaacatgttacc

SEQ ID NO: 139459 - DNA, 15 bp, Homo sapiens
ctcaacatgttacca

SEQ ID NO: 139460 - DNA, 15 bp, Homo sapiens
tcaacatgttaccag

SEQ ID NO: 139461 - DNA, 15 bp, Homo sapiens
caacatgttaccaga

SEQ ID NO: 139462 - DNA, 15 bp, Homo sapiens
aacatgttaccagaa

SEQ ID NO: 139463 - DNA, 15 bp, Homo sapiens
acatgttaccagaaa

SEQ ID NO: 139464 - DNA, 15 bp, Homo sapiens
catgttaccagaaag

SEQ ID NO: 139465 - DNA, 15 bp, Homo sapiens
atgttaccagaaagc

SEQ ID NO: 139466 - DNA, 15 bp, Homo sapiens
tgttaccagaaagca

SEQ ID NO: 139467 - DNA, 15 bp, Homo sapiens
gttaccagaaagcaa

SEQ ID NO: 139468 - DNA, 15 bp, Homo sapiens
ttaccagaaagcaat

SEQ ID NO: 139469 - DNA, 15 bp, Homo sapiens
taccagaaagcaata

SEQ ID NO: 139470 - DNA, 15 bp, Homo sapiens
accagaaagcaatat

SEQ ID NO: 139471 - DNA, 15 bp, Homo sapiens
ccagaaagcaatatt

SEQ ID NO: 139472 - DNA, 15 bp, Homo sapiens
cagaaagcaatattt

SEQ ID NO: 139473 - DNA, 15 bp, Homo sapiens
agaaagcaatatttt

SEQ ID NO: 139474 - DNA, 15 bp, Homo sapiens
gaaagcaatattttc

SEQ ID NO: 139475 - DNA, 15 bp, Homo sapiens
aaagcaatattttca

SEQ ID NO: 139476 - DNA, 15 bp, Homo sapiens
aagcaatattttcat

SEQ ID NO: 139477 - DNA, 15 bp, Homo sapiens
agcaatattttcatg

SEQ ID NO: 139478 - DNA, 15 bp, Homo sapiens
gcaatattttcatgc

SEQ ID NO: 139479 - DNA, 15 bp, Homo sapiens
caatattttcatgcc

SEQ ID NO: 139480 - DNA, 15 bp, Homo sapiens
aatattttcatgcct

SEQ ID NO: 139481 - DNA, 15 bp, Homo sapiens
atattttcatgcctc

SEQ ID NO: 139482 - DNA, 15 bp, Homo sapiens
tattttcatgcctct

SEQ ID NO: 139483 - DNA, 15 bp, Homo sapiens
attttcatgcctctc

SEQ ID NO: 139484 - DNA, 15 bp, Homo sapiens
ttttcatgcctctcc

SEQ ID NO: 139485 - DNA, 15 bp, Homo sapiens
tttcatgcctctcct

SEQ ID NO: 139486 - DNA, 15 bp, Homo sapiens
ttcatgcctctcctg

SEQ ID NO: 139487 - DNA, 15 bp, Homo sapiens
tcatgcctctcctga

SEQ ID NO: 139488 - DNA, 15 bp, Homo sapiens
catgcctctcctgat

SEQ ID NO: 139489 - DNA, 15 bp, Homo sapiens
atgcctctcctgata

SEQ ID NO: 139490 - DNA, 15 bp, Homo sapiens
tgcctctcctgatat

SEQ ID NO: 139491 - DNA, 15 bp, Homo sapiens
gcctctcctgatatg

SEQ ID NO: 139492 - DNA, 15 bp, Homo sapiens
cctctcctgatatgg

SEQ ID NO: 139493 - DNA, 15 bp, Homo sapiens
ctctcctgatatggc

SEQ ID NO: 139494 - DNA, 15 bp, Homo sapiens
tctcctgatatggcg

SEQ ID NO: 139495 - DNA, 15 bp, Homo sapiens
ctcctgatatggcga

SEQ ID NO: 139496 - DNA, 15 bp, Homo sapiens
tcctgatatggcgat

SEQ ID NO: 139497 - DNA, 15 bp, Homo sapiens
cctgatatggcgatg

SEQ ID NO: 139498 - DNA, 15 bp, Homo sapiens
ctgatatggcgatgc

SEQ ID NO: 139499 - DNA, 15 bp, Homo sapiens
tgatatggcgatgct

SEQ ID NO: 139500 - DNA, 15 bp, Homo sapiens
gatatggcgatgctc

SEQ ID NO: 139501 - DNA, 15 bp, Homo sapiens
atatggcgatgctcc

SEQ ID NO: 139502 - DNA, 15 bp, Homo sapiens
tatggcgatgctccc

SEQ ID NO: 139503 - DNA, 15 bp, Homo sapiens
atggcgatgctcccc

SEQ ID NO: 139504 - DNA, 15 bp, Homo sapiens
tggcgatgctcccct

SEQ ID NO: 139505 - DNA, 15 bp, Homo sapiens
ggcgatgctccccta

SEQ ID NO: 139506 - DNA, 15 bp, Homo sapiens
gcgatgctcccctat

SEQ ID NO: 139507 - DNA, 15 bp, Homo sapiens
cgatgctcccctatc

SEQ ID NO: 139508 - DNA, 15 bp, Homo sapiens
gatgctcccctatct

SEQ ID NO: 139509 - DNA, 15 bp, Homo sapiens
atgctcccctatctc

SEQ ID NO: 139510 - DNA, 15 bp, Homo sapiens
tgctcccctatctca

SEQ ID NO: 139511 - DNA, 15 bp, Homo sapiens
gctcccctatctcat

SEQ ID NO: 139512 - DNA, 15 bp, Homo sapiens
ctcccctatctcatt

SEQ ID NO: 139513 - DNA, 15 bp, Homo sapiens
tcccctatctcattc

SEQ ID NO: 139514 - DNA, 15 bp, Homo sapiens
cccctatctcattcc

SEQ ID NO: 139515 - DNA, 15 bp, Homo sapiens
ccctatctcattcct

SEQ ID NO: 139516 - DNA, 15 bp, Homo sapiens
cctatctcattcctg

SEQ ID NO: 139517 - DNA, 15 bp, Homo sapiens
ctatctcattcctgt

SEQ ID NO: 139518 - DNA, 15 bp, Homo sapiens
tatctcattcctgtg

SEQ ID NO: 139519 - DNA, 15 bp, Homo sapiens
atctcattcctgtgt

SEQ ID NO: 139520 - DNA, 15 bp, Homo sapiens
tctcattcctgtgtg

SEQ ID NO: 139521 - DNA, 15 bp, Homo sapiens
ctcattcctgtgtgt

SEQ ID NO: 139522 - DNA, 15 bp, Homo sapiens
tcattcctgtgtgtg

SEQ ID NO: 139523 - DNA, 15 bp, Homo sapiens
cattcctgtgtgtgt

SEQ ID NO: 139524 - DNA, 15 bp, Homo sapiens
attcctgtgtgtgtt

SEQ ID NO: 139525 - DNA, 15 bp, Homo sapiens
ttcctgtgtgtgttt

SEQ ID NO: 139526 - DNA, 15 bp, Homo sapiens
tcctgtgtgtgttta

SEQ ID NO: 139527 - DNA, 15 bp, Homo sapiens
cctgtgtgtgtttag

SEQ ID NO: 139528 - DNA, 15 bp, Homo sapiens
ctgtgtgtgtttagc

SEQ ID NO: 139529 - DNA, 15 bp, Homo sapiens
tgtgtgtgtttagcc

SEQ ID NO: 139530 - DNA, 15 bp, Homo sapiens
gtgtgtgtttagcca

SEQ ID NO: 139531 - DNA, 15 bp, Homo sapiens
tgtgtgtttagccag

SEQ ID NO: 139532 - DNA, 15 bp, Homo sapiens
gtgtgtttagccagg

SEQ ID NO: 139533 - DNA, 15 bp, Homo sapiens
tgtgtttagccaggc

SEQ ID NO: 139534 - DNA, 15 bp, Homo sapiens
gtgtttagccaggca

SEQ ID NO: 139535 - DNA, 15 bp, Homo sapiens
tgtttagccaggcaa

SEQ ID NO: 139536 - DNA, 15 bp, Homo sapiens
gtttagccaggcaac

SEQ ID NO: 139537 - DNA, 15 bp, Homo sapiens
tttagccaggcaact

SEQ ID NO: 139538 - DNA, 15 bp, Homo sapiens
ttagccaggcaactg

SEQ ID NO: 139539 - DNA, 15 bp, Homo sapiens
tagccaggcaactgt

SEQ ID NO: 139540 - DNA, 15 bp, Homo sapiens
agccaggcaactgtt

SEQ ID NO: 139541 - DNA, 15 bp, Homo sapiens
gccaggcaactgttg

SEQ ID NO: 139542 - DNA, 15 bp, Homo sapiens
ccaggcaactgttga

SEQ ID NO: 139543 - DNA, 15 bp, Homo sapiens
caggcaactgttgat

SEQ ID NO: 139544 - DNA, 15 bp, Homo sapiens
aggcaactgttgatc

SEQ ID NO: 139545 - DNA, 15 bp, Homo sapiens
ggcaactgttgatca

SEQ ID NO: 139546 - DNA, 15 bp, Homo sapiens
gcaactgttgatcat

SEQ ID NO: 139547 - DNA, 15 bp, Homo sapiens
caactgttgatcatc

SEQ ID NO: 139548 - DNA, 15 bp, Homo sapiens
aactgttgatcatca

SEQ ID NO: 139549 - DNA, 15 bp, Homo sapiens
actgttgatcatcaa

SEQ ID NO: 139550 - DNA, 15 bp, Homo sapiens
ctgttgatcatcaat

SEQ ID NO: 139551 - DNA, 15 bp, Homo sapiens
tgttgatcatcaata

SEQ ID NO: 139552 - DNA, 15 bp, Homo sapiens
gttgatcatcaatat

SEQ ID NO: 139553 - DNA, 15 bp, Homo sapiens
ttgatcatcaatatt

SEQ ID NO: 139554 - DNA, 15 bp, Homo sapiens
tgatcatcaatatta

SEQ ID NO: 139555 - DNA, 15 bp, Homo sapiens
gatcatcaatattat

SEQ ID NO: 139556 - DNA, 15 bp, Homo sapiens
atcatcaatattatg

SEQ ID NO: 139557 - DNA, 15 bp, Homo sapiens
tcatcaatattatga

SEQ ID NO: 139558 - DNA, 15 bp, Homo sapiens
catcaatattatgat

SEQ ID NO: 139559 - DNA, 15 bp, Homo sapiens
atcaatattatgata

SEQ ID NO: 139560 - DNA, 15 bp, Homo sapiens
tcaatattatgataa

SEQ ID NO: 139561 - DNA, 15 bp, Homo sapiens
caatattatgataac

SEQ ID NO: 139562 - DNA, 15 bp, Homo sapiens
aatattatgataacg

SEQ ID NO: 139563 - DNA, 15 bp, Homo sapiens
atattatgataacgt

SEQ ID NO: 139564 - DNA, 15 bp, Homo sapiens
tattatgataacgtt

SEQ ID NO: 139565 - DNA, 15 bp, Homo sapiens
attatgataacgttt

SEQ ID NO: 139566 - DNA, 15 bp, Homo sapiens
ttatgataacgtttc

SEQ ID NO: 139567 - DNA, 15 bp, Homo sapiens
tatgataacgtttct

SEQ ID NO: 139568 - DNA, 15 bp, Homo sapiens
atgataacgtttctc

SEQ ID NO: 139569 - DNA, 15 bp, Homo sapiens
tgataacgtttctcc

SEQ ID NO: 139570 - DNA, 15 bp, Homo sapiens
gataacgtttctcca

SEQ ID NO: 139571 - DNA, 15 bp, Homo sapiens
ataacgtttctccac

SEQ ID NO: 139572 - DNA, 15 bp, Homo sapiens
taacgtttctccact

SEQ ID NO: 139573 - DNA, 15 bp, Homo sapiens
aacgtttctccactg

SEQ ID NO: 139574 - DNA, 15 bp, Homo sapiens
acgtttctccactgt

SEQ ID NO: 139575 - DNA, 15 bp, Homo sapiens
cgtttctccactgtc

SEQ ID NO: 139576 - DNA, 15 bp, Homo sapiens
gtttctccactgtcc

SEQ ID NO: 139577 - DNA, 15 bp, Homo sapiens
tttctccactgtccc

SEQ ID NO: 139578 - DNA, 15 bp, Homo sapiens
ttctccactgtccca

SEQ ID NO: 139579 - DNA, 15 bp, Homo sapiens
tctccactgtcccat

SEQ ID NO: 139580 - DNA, 15 bp, Homo sapiens
ctccactgtcccatt

SEQ ID NO: 139581 - DNA, 15 bp, Homo sapiens
tccactgtcccattg

SEQ ID NO: 139582 - DNA, 15 bp, Homo sapiens
ccactgtcccattgt

SEQ ID NO: 139583 - DNA, 15 bp, Homo sapiens
cactgtcccattgtg

SEQ ID NO: 139584 - DNA, 15 bp, Homo sapiens
actgtcccattgtgc

SEQ ID NO: 139585 - DNA, 15 bp, Homo sapiens
ctgtcccattgtgcc

SEQ ID NO: 139586 - DNA, 15 bp, Homo sapiens
tgtcccattgtgccc

SEQ ID NO: 139587 - DNA, 15 bp, Homo sapiens
gtcccattgtgccca

SEQ ID NO: 139588 - DNA, 15 bp, Homo sapiens
tcccattgtgcccac

SEQ ID NO: 139589 - DNA, 15 bp, Homo sapiens
cccattgtgcccact

SEQ ID NO: 139590 - DNA, 15 bp, Homo sapiens
ccattgtgcccactt

SEQ ID NO: 139591 - DNA, 15 bp, Homo sapiens
cattgtgcccacttt

SEQ ID NO: 139592 - DNA, 15 bp, Homo sapiens
attgtgcccactttt

SEQ ID NO: 139593 - DNA, 15 bp, Homo sapiens
ttgtgcccacttttt

SEQ ID NO: 139594 - DNA, 15 bp, Homo sapiens
tgtgcccactttttt

SEQ ID NO: 139595 - DNA, 15 bp, Homo sapiens
gtgcccacttttttt

SEQ ID NO: 139596 - DNA, 15 bp, Homo sapiens
tgcccactttttttt

SEQ ID NO: 139597 - DNA, 15 bp, Homo sapiens
gcccacttttttttt

SEQ ID NO: 139598 - DNA, 15 bp, Homo sapiens
cccactttttttttt

SEQ ID NO: 139599 - DNA, 15 bp, Homo sapiens
ccacttttttttttt

SEQ ID NO: 139600 - DNA, 15 bp, Homo sapiens
tttttttttttgagt

SEQ ID NO: 139601 - DNA, 15 bp, Homo sapiens
ttttttttttgagtt

SEQ ID NO: 139602 - DNA, 15 bp, Homo sapiens
tttttttttgagtta

SEQ ID NO: 139603 - DNA, 15 bp, Homo sapiens
ttttttttgagttac

SEQ ID NO: 139604 - DNA, 15 bp, Homo sapiens
tttttttgagttact

SEQ ID NO: 139605 - DNA, 15 bp, Homo sapiens
ttttttgagttactt

SEQ ID NO: 139606 - DNA, 15 bp, Homo sapiens
tttttgagttactta

SEQ ID NO: 139607 - DNA, 15 bp, Homo sapiens
ttttgagttacttac

SEQ ID NO: 139608 - DNA, 15 bp, Homo sapiens
tttgagttacttact

SEQ ID NO: 139609 - DNA, 15 bp, Homo sapiens
ttgagttacttacta

SEQ ID NO: 139610 - DNA, 15 bp, Homo sapiens
tgagttacttactaa

SEQ ID NO: 139611 - DNA, 15 bp, Homo sapiens
gagttacttactaaa

SEQ ID NO: 139612 - DNA, 15 bp, Homo sapiens
agttacttactaaat

SEQ ID NO: 139613 - DNA, 15 bp, Homo sapiens
gttacttactaaata

SEQ ID NO: 139614 - DNA, 15 bp, Homo sapiens
ttacttactaaataa

SEQ ID NO: 139615 - DNA, 15 bp, Homo sapiens
tacttactaaataaa

SEQ ID NO: 139616 - DNA, 15 bp, Homo sapiens
acttactaaataaaa

SEQ ID NO: 139617 - DNA, 15 bp, Homo sapiens
cttactaaataaaaa

SEQ ID NO: 139618 - DNA, 15 bp, Homo sapiens
ttactaaataaaaat

SEQ ID NO: 139619 - DNA, 15 bp, Homo sapiens
tactaaataaaaata

SEQ ID NO: 139620 - DNA, 15 bp, Homo sapiens
actaaataaaaataa

SEQ ID NO: 139621 - DNA, 15 bp, Homo sapiens
ctaaataaaaataaa

SEQ ID NO: 139622 - DNA, 15 bp, Homo sapiens
taaataaaaataaaa

SEQ ID NO: 139623 - DNA, 15 bp, Homo sapiens
aaataaaaataaaac

SEQ ID NO: 139624 - DNA, 15 bp, Homo sapiens
aataaaaataaaaca

SEQ ID NO: 139625 - DNA, 15 bp, Homo sapiens
ataaaaataaaacac

SEQ ID NO: 139626 - DNA, 15 bp, Homo sapiens
taaaaataaaacact

SEQ ID NO: 139627 - DNA, 15 bp, Homo sapiens
aaaaataaaacacta

SEQ ID NO: 139628 - DNA, 15 bp, Homo sapiens
aaaataaaacactat

SEQ ID NO: 139629 - DNA, 15 bp, Homo sapiens
aaataaaacactatt

SEQ ID NO: 139630 - DNA, 15 bp, Homo sapiens
aataaaacactattt

SEQ ID NO: 139631 - DNA, 15 bp, Homo sapiens
ataaaacactatttc

SEQ ID NO: 139632 - DNA, 15 bp, Homo sapiens
taaaacactatttct

SEQ ID NO: 139633 - DNA, 15 bp, Homo sapiens
aaaacactatttctc

SEQ ID NO: 139634 - DNA, 15 bp, Homo sapiens
aaacactatttctca

SEQ ID NO: 139635 - DNA, 15 bp, Homo sapiens
aacactatttctcaa

SEQ ID NO: 139636 - DNA, 15 bp, Homo sapiens
acactatttctcaat

SEQ ID NO: 139637 - DNA, 15 bp, Homo sapiens
cactatttctcaata

SEQ ID NO: 139638 - DNA, 15 bp, Homo sapiens
actatttctcaatag

SEQ ID NO: 139639 - DNA, 15 bp, Homo sapiens
ctatttctcaataga

SEQ ID NO: 139640 - DNA, 15 bp, Homo sapiens
tatttctcaatagac

SEQ ID NO: 139641 - DNA, 15 bp, Homo sapiens
atttctcaatagact

SEQ ID NO: 139642 - DNA, 15 bp, Homo sapiens
tttctcaatagactt

SEQ ID NO: 139643 - DNA, 15 bp, Homo sapiens
ttctcaatagacttg

SEQ ID NO: 139644 - DNA, 15 bp, Homo sapiens
tctcaatagacttga

SEQ ID NO: 139645 - DNA, 15 bp, Homo sapiens
ctcaatagacttgaa

SEQ ID NO: 139646 - DNA, 15 bp, Homo sapiens
tcaatagacttgaag

SEQ ID NO: 139647 - DNA, 15 bp, Homo sapiens
caatagacttgaagc

SEQ ID NO: 139648 - DNA, 15 bp, Homo sapiens
aatagacttgaagct

SEQ ID NO: 139649 - DNA, 15 bp, Homo sapiens
atagacttgaagctt

SEQ ID NO: 139650 - DNA, 15 bp, Homo sapiens
tagacttgaagcttc

SEQ ID NO: 139651 - DNA, 15 bp, Homo sapiens
agacttgaagcttca

SEQ ID NO: 139652 - DNA, 15 bp, Homo sapiens
gacttgaagcttcaa

SEQ ID NO: 139653 - DNA, 15 bp, Homo sapiens
acttgaagcttcaag

SEQ ID NO: 139654 - DNA, 15 bp, Homo sapiens
cttgaagcttcaaga

SEQ ID NO: 139655 - DNA, 15 bp, Homo sapiens
ttgaagcttcaagat

SEQ ID NO: 139656 - DNA, 15 bp, Homo sapiens
tgaagcttcaagatt

SEQ ID NO: 139657 - DNA, 15 bp, Homo sapiens
gaagcttcaagattt

SEQ ID NO: 139658 - DNA, 15 bp, Homo sapiens
aagcttcaagatttc

SEQ ID NO: 139659 - DNA, 15 bp, Homo sapiens
agcttcaagatttcc

SEQ ID NO: 139660 - DNA, 15 bp, Homo sapiens
gcttcaagatttcct

SEQ ID NO: 139661 - DNA, 15 bp, Homo sapiens
cttcaagatttcctg

SEQ ID NO: 139662 - DNA, 15 bp, Homo sapiens
ttcaagatttcctgg

SEQ ID NO: 139663 - DNA, 15 bp, Homo sapiens
tcaagatttcctggt

SEQ ID NO: 139664 - DNA, 15 bp, Homo sapiens
caagatttcctggtg

SEQ ID NO: 139665 - DNA, 15 bp, Homo sapiens
aagatttcctggtgg

SEQ ID NO: 139666 - DNA, 15 bp, Homo sapiens
agatttcctggtgga

SEQ ID NO: 139667 - DNA, 15 bp, Homo sapiens
gatttcctggtggac

SEQ ID NO: 139668 - DNA, 15 bp, Homo sapiens
atttcctggtggaca

SEQ ID NO: 139669 - DNA, 15 bp, Homo sapiens
tttcctggtggacaa

SEQ ID NO: 139670 - DNA, 15 bp, Homo sapiens
ttcctggtggacaat

SEQ ID NO: 139671 - DNA, 15 bp, Homo sapiens
tcctggtggacaatg

SEQ ID NO: 139672 - DNA, 15 bp, Homo sapiens
cctggtggacaatga

SEQ ID NO: 139673 - DNA, 15 bp, Homo sapiens
ctggtggacaatgaa

SEQ ID NO: 139674 - DNA, 15 bp, Homo sapiens
tggtggacaatgaaa

SEQ ID NO: 139675 - DNA, 15 bp, Homo sapiens
ggtggacaatgaaac

SEQ ID NO: 139676 - DNA, 15 bp, Homo sapiens
gtggacaatgaaacc

SEQ ID NO: 139677 - DNA, 15 bp, Homo sapiens
tggacaatgaaacct

SEQ ID NO: 139678 - DNA, 15 bp, Homo sapiens
ggacaatgaaacctt

SEQ ID NO: 139679 - DNA, 15 bp, Homo sapiens
gacaatgaaaccttc

SEQ ID NO: 139680 - DNA, 15 bp, Homo sapiens
acaatgaaaccttct

SEQ ID NO: 139681 - DNA, 15 bp, Homo sapiens
caatgaaaccttctc

SEQ ID NO: 139682 - DNA, 15 bp, Homo sapiens
aatgaaaccttctct

SEQ ID NO: 139683 - DNA, 15 bp, Homo sapiens
atgaaaccttctctg

SEQ ID NO: 139684 - DNA, 15 bp, Homo sapiens
tgaaaccttctctgg

SEQ ID NO: 139685 - DNA, 15 bp, Homo sapiens
gaaaccttctctggg

SEQ ID NO: 139686 - DNA, 15 bp, Homo sapiens
aaaccttctctgggt

SEQ ID NO: 139687 - DNA, 15 bp, Homo sapiens
aaccttctctgggtt

SEQ ID NO: 139688 - DNA, 15 bp, Homo sapiens
accttctctgggttc

SEQ ID NO: 139689 - DNA, 15 bp, Homo sapiens
ccttctctgggttcc

SEQ ID NO: 139690 - DNA, 15 bp, Homo sapiens
cttctctgggttcct

SEQ ID NO: 139691 - DNA, 15 bp, Homo sapiens
ttctctgggttcctg

SEQ ID NO: 139692 - DNA, 15 bp, Homo sapiens
tctctgggttcctgt

SEQ ID NO: 139693 - DNA, 15 bp, Homo sapiens
ctctgggttcctgta

SEQ ID NO: 139694 - DNA, 15 bp, Homo sapiens
tctgggttcctgtat

SEQ ID NO: 139695 - DNA, 15 bp, Homo sapiens
ctgggttcctgtatc

SEQ ID NO: 139696 - DNA, 15 bp, Homo sapiens
tgggttcctgtatca

SEQ ID NO: 139697 - DNA, 15 bp, Homo sapiens
gggttcctgtatcac

SEQ ID NO: 139698 - DNA, 15 bp, Homo sapiens
ggttcctgtatcaca

SEQ ID NO: 139699 - DNA, 15 bp, Homo sapiens
gttcctgtatcacaa

SEQ ID NO: 139700 - DNA, 15 bp, Homo sapiens
ttcctgtatcacaac

SEQ ID NO: 139701 - DNA, 15 bp, Homo sapiens
tcctgtatcacaacc

SEQ ID NO: 139702 - DNA, 15 bp, Homo sapiens
cctgtatcacaacct

SEQ ID NO: 139703 - DNA, 15 bp, Homo sapiens
ctgtatcacaacctc

SEQ ID NO: 139704 - DNA, 15 bp, Homo sapiens
tgtatcacaacctct

SEQ ID NO: 139705 - DNA, 15 bp, Homo sapiens
gtatcacaacctctc

SEQ ID NO: 139706 - DNA, 15 bp, Homo sapiens
tatcacaacctctct

SEQ ID NO: 139707 - DNA, 15 bp, Homo sapiens
atcacaacctctctc

SEQ ID NO: 139708 - DNA, 15 bp, Homo sapiens
tcacaacctctctct

SEQ ID NO: 139709 - DNA, 15 bp, Homo sapiens
cacaacctctctctc

SEQ ID NO: 139710 - DNA, 15 bp, Homo sapiens
acaacctctctctcc

SEQ ID NO: 139711 - DNA, 15 bp, Homo sapiens
caacctctctctccc

SEQ ID NO: 139712 - DNA, 15 bp, Homo sapiens
aacctctctctccca

SEQ ID NO: 139713 - DNA, 15 bp, Homo sapiens
acctctctctcccaa

SEQ ID NO: 139714 - DNA, 15 bp, Homo sapiens
cctctctctcccaaa

SEQ ID NO: 139715 - DNA, 15 bp, Homo sapiens
ctctctctcccaaag

SEQ ID NO: 139716 - DNA, 15 bp, Homo sapiens
tctctctcccaaagt

SEQ ID NO: 139717 - DNA, 15 bp, Homo sapiens
ctctctcccaaagtc

SEQ ID NO: 139718 - DNA, 15 bp, Homo sapiens
tctctcccaaagtct

SEQ ID NO: 139719 - DNA, 15 bp, Homo sapiens
ctctcccaaagtcta

SEQ ID NO: 139720 - DNA, 15 bp, Homo sapiens
tctcccaaagtctac

SEQ ID NO: 139721 - DNA, 15 bp, Homo sapiens
ctcccaaagtctact

SEQ ID NO: 139722 - DNA, 15 bp, Homo sapiens
tcccaaagtctactg

SEQ ID NO: 139723 - DNA, 15 bp, Homo sapiens
cccaaagtctactgt

SEQ ID NO: 139724 - DNA, 15 bp, Homo sapiens
ccaaagtctactgtg

SEQ ID NO: 139725 - DNA, 15 bp, Homo sapiens
caaagtctactgtgg

SEQ ID NO: 139726 - DNA, 15 bp, Homo sapiens
aaagtctactgtgga

SEQ ID NO: 139727 - DNA, 15 bp, Homo sapiens
aagtctactgtggac

SEQ ID NO: 139728 - DNA, 15 bp, Homo sapiens
agtctactgtggaca

SEQ ID NO: 139729 - DNA, 15 bp, Homo sapiens
gtctactgtggacaa

SEQ ID NO: 139730 - DNA, 15 bp, Homo sapiens
tctactgtggacaag

SEQ ID NO: 139731 - DNA, 15 bp, Homo sapiens
ctactgtggacaaga

SEQ ID NO: 139732 - DNA, 15 bp, Homo sapiens
tactgtggacaagat

SEQ ID NO: 139733 - DNA, 15 bp, Homo sapiens
actgtggacaagatg

SEQ ID NO: 139734 - DNA, 15 bp, Homo sapiens
ctgtggacaagatgc

SEQ ID NO: 139735 - DNA, 15 bp, Homo sapiens
tgtggacaagatgct

SEQ ID NO: 139736 - DNA, 15 bp, Homo sapiens
gtggacaagatgctg

SEQ ID NO: 139737 - DNA, 15 bp, Homo sapiens
tggacaagatgctga

SEQ ID NO: 139738 - DNA, 15 bp, Homo sapiens
ggacaagatgctgag

SEQ ID NO: 139739 - DNA, 15 bp, Homo sapiens
gacaagatgctgagg

SEQ ID NO: 139740 - DNA, 15 bp, Homo sapiens
acaagatgctgaggg

SEQ ID NO: 139741 - DNA, 15 bp, Homo sapiens
caagatgctgagggc

SEQ ID NO: 139742 - DNA, 15 bp, Homo sapiens
aagatgctgagggct

SEQ ID NO: 139743 - DNA, 15 bp, Homo sapiens
agatgctgagggctg

SEQ ID NO: 139744 - DNA, 15 bp, Homo sapiens
gatgctgagggctga

SEQ ID NO: 139745 - DNA, 15 bp, Homo sapiens
atgctgagggctgat

SEQ ID NO: 139746 - DNA, 15 bp, Homo sapiens
tgctgagggctgatg

SEQ ID NO: 139747 - DNA, 15 bp, Homo sapiens
gctgagggctgatgt

SEQ ID NO: 139748 - DNA, 15 bp, Homo sapiens
ctgagggctgatgtc

SEQ ID NO: 139749 - DNA, 15 bp, Homo sapiens
tgagggctgatgtca

SEQ ID NO: 139750 - DNA, 15 bp, Homo sapiens
gagggctgatgtcat

SEQ ID NO: 139751 - DNA, 15 bp, Homo sapiens
agggctgatgtcatt

SEQ ID NO: 139752 - DNA, 15 bp, Homo sapiens
gggctgatgtcattc

SEQ ID NO: 139753 - DNA, 15 bp, Homo sapiens
ggctgatgtcattct

SEQ ID NO: 139754 - DNA, 15 bp, Homo sapiens
gctgatgtcattctc

SEQ ID NO: 139755 - DNA, 15 bp, Homo sapiens
ctgatgtcattctcc

SEQ ID NO: 139756 - DNA, 15 bp, Homo sapiens
tgatgtcattctcca

SEQ ID NO: 139757 - DNA, 15 bp, Homo sapiens
gatgtcattctccac

SEQ ID NO: 139758 - DNA, 15 bp, Homo sapiens
atgtcattctccaca

SEQ ID NO: 139759 - DNA, 15 bp, Homo sapiens
tgtcattctccacaa

SEQ ID NO: 139760 - DNA, 15 bp, Homo sapiens
gtcattctccacaag

SEQ ID NO: 139761 - DNA, 15 bp, Homo sapiens
tcattctccacaagg

SEQ ID NO: 139762 - DNA, 15 bp, Homo sapiens
cattctccacaaggt

SEQ ID NO: 139763 - DNA, 15 bp, Homo sapiens
attctccacaaggta

SEQ ID NO: 139764 - DNA, 15 bp, Homo sapiens
ttctccacaaggtaa

SEQ ID NO: 139765 - DNA, 15 bp, Homo sapiens
tctccacaaggtaag

SEQ ID NO: 139766 - DNA, 15 bp, Homo sapiens
ctccacaaggtaagc

SEQ ID NO: 139767 - DNA, 15 bp, Homo sapiens
tccacaaggtaagct

SEQ ID NO: 139768 - DNA, 15 bp, Homo sapiens
ccacaaggtaagctg

SEQ ID NO: 139769 - DNA, 15 bp, Homo sapiens
cacaaggtaagctga

SEQ ID NO: 139770 - DNA, 15 bp, Homo sapiens
acaaggtaagctgat

SEQ ID NO: 139771 - DNA, 15 bp, Homo sapiens
caaggtaagctgatg

SEQ ID NO: 139772 - DNA, 15 bp, Homo sapiens
aaggtaagctgatgc

SEQ ID NO: 139773 - DNA, 15 bp, Homo sapiens
aggtaagctgatgcc

SEQ ID NO: 139774 - DNA, 15 bp, Homo sapiens
ggtaagctgatgcct

SEQ ID NO: 139775 - DNA, 15 bp, Homo sapiens
gtaagctgatgcctc

SEQ ID NO: 139776 - DNA, 15 bp, Homo sapiens
taagctgatgcctcc

SEQ ID NO: 139777 - DNA, 15 bp, Homo sapiens
aagctgatgcctcca

SEQ ID NO: 139778 - DNA, 15 bp, Homo sapiens
agctgatgcctccag

SEQ ID NO: 139779 - DNA, 15 bp, Homo sapiens
gctgatgcctccagc

SEQ ID NO: 139780 - DNA, 15 bp, Homo sapiens
ctgatgcctccagct

SEQ ID NO: 139781 - DNA, 15 bp, Homo sapiens
tgatgcctccagctt

SEQ ID NO: 139782 - DNA, 15 bp, Homo sapiens
gatgcctccagcttc

SEQ ID NO: 139783 - DNA, 15 bp, Homo sapiens
atgcctccagcttcc

SEQ ID NO: 139784 - DNA, 15 bp, Homo sapiens
tgcctccagcttcct

SEQ ID NO: 139785 - DNA, 15 bp, Homo sapiens
gcctccagcttcctc

SEQ ID NO: 139786 - DNA, 15 bp, Homo sapiens
cctccagcttcctca

SEQ ID NO: 139787 - DNA, 15 bp, Homo sapiens
ctccagcttcctcag

SEQ ID NO: 139788 - DNA, 15 bp, Homo sapiens
tccagcttcctcagt

SEQ ID NO: 139789 - DNA, 15 bp, Homo sapiens
ccagcttcctcagta

SEQ ID NO: 139790 - DNA, 15 bp, Homo sapiens
cagcttcctcagtag

SEQ ID NO: 139791 - DNA, 15 bp, Homo sapiens
agcttcctcagtagg

SEQ ID NO: 139792 - DNA, 15 bp, Homo sapiens
gcttcctcagtaggg

SEQ ID NO: 139793 - DNA, 15 bp, Homo sapiens
cttcctcagtagggc

SEQ ID NO: 139794 - DNA, 15 bp, Homo sapiens
ttcctcagtagggct

SEQ ID NO: 139795 - DNA, 15 bp, Homo sapiens
tcctcagtagggctg

SEQ ID NO: 139796 - DNA, 15 bp, Homo sapiens
cctcagtagggctga

SEQ ID NO: 139797 - DNA, 15 bp, Homo sapiens
ctcagtagggctgat

SEQ ID NO: 139798 - DNA, 15 bp, Homo sapiens
tcagtagggctgatg

SEQ ID NO: 139799 - DNA, 15 bp, Homo sapiens
cagtagggctgatgg

SEQ ID NO: 139800 - DNA, 15 bp, Homo sapiens
agtagggctgatggc

SEQ ID NO: 139801 - DNA, 15 bp, Homo sapiens
gtagggctgatggca

SEQ ID NO: 139802 - DNA, 15 bp, Homo sapiens
tagggctgatggcaa

SEQ ID NO: 139803 - DNA, 15 bp, Homo sapiens
agggctgatggcaat

SEQ ID NO: 139804 - DNA, 15 bp, Homo sapiens
gggctgatggcaatt

SEQ ID NO: 139805 - DNA, 15 bp, Homo sapiens
ggctgatggcaatta

SEQ ID NO: 139806 - DNA, 15 bp, Homo sapiens
gctgatggcaattac

SEQ ID NO: 139807 - DNA, 15 bp, Homo sapiens
ctgatggcaattacg

SEQ ID NO: 139808 - DNA, 15 bp, Homo sapiens
tgatggcaattacgt

SEQ ID NO: 139809 - DNA, 15 bp, Homo sapiens
gatggcaattacgtt

SEQ ID NO: 139810 - DNA, 15 bp, Homo sapiens
atggcaattacgttg

SEQ ID NO: 139811 - DNA, 15 bp, Homo sapiens
tggcaattacgttgt

SEQ ID NO: 139812 - DNA, 15 bp, Homo sapiens
ggcaattacgttgtg

SEQ ID NO: 139813 - DNA, 15 bp, Homo sapiens
gcaattacgttgtgc

SEQ ID NO: 139814 - DNA, 15 bp, Homo sapiens
caattacgttgtgca

SEQ ID NO: 139815 - DNA, 15 bp, Homo sapiens
aattacgttgtgcag

SEQ ID NO: 139816 - DNA, 15 bp, Homo sapiens
attacgttgtgcagc

SEQ ID NO: 139817 - DNA, 15 bp, Homo sapiens
ttacgttgtgcagct

SEQ ID NO: 139818 - DNA, 15 bp, Homo sapiens
tacgttgtgcagcta

SEQ ID NO: 139819 - DNA, 15 bp, Homo sapiens
acgttgtgcagctac

SEQ ID NO: 139820 - DNA, 15 bp, Homo sapiens
cgttgtgcagctact

SEQ ID NO: 139821 - DNA, 15 bp, Homo sapiens
gttgtgcagctactg

SEQ ID NO: 139822 - DNA, 15 bp, Homo sapiens
ttgtgcagctactgg

SEQ ID NO: 139823 - DNA, 15 bp, Homo sapiens
tgtgcagctactgga

SEQ ID NO: 139824 - DNA, 15 bp, Homo sapiens
gtgcagctactggaa

SEQ ID NO: 139825 - DNA, 15 bp, Homo sapiens
tgcagctactggaaa

SEQ ID NO: 139826 - DNA, 15 bp, Homo sapiens
gcagctactggaaag

SEQ ID NO: 139827 - DNA, 15 bp, Homo sapiens
cagctactggaaaga

SEQ ID NO: 139828 - DNA, 15 bp, Homo sapiens
agctactggaaagaa

SEQ ID NO: 139829 - DNA, 15 bp, Homo sapiens
gctactggaaagaaa

SEQ ID NO: 139830 - DNA, 15 bp, Homo sapiens
ctactggaaagaaat

SEQ ID NO: 139831 - DNA, 15 bp, Homo sapiens
tactggaaagaaatg

SEQ ID NO: 139832 - DNA, 15 bp, Homo sapiens
actggaaagaaatga

SEQ ID NO: 139833 - DNA, 15 bp, Homo sapiens
ctggaaagaaatgaa

SEQ ID NO: 139834 - DNA, 15 bp, Homo sapiens
tggaaagaaatgaat

SEQ ID NO: 139835 - DNA, 15 bp, Homo sapiens
ggaaagaaatgaata

SEQ ID NO: 139836 - DNA, 15 bp, Homo sapiens
gaaagaaatgaataa

SEQ ID NO: 139837 - DNA, 15 bp, Homo sapiens
aaagaaatgaataaa

SEQ ID NO: 139838 - DNA, 15 bp, Homo sapiens
aagaaatgaataaac

SEQ ID NO: 139839 - DNA, 15 bp, Homo sapiens
agaaatgaataaacc

SEQ ID NO: 139840 - DNA, 15 bp, Homo sapiens
gaaatgaataaaccc

SEQ ID NO: 139841 - DNA, 15 bp, Homo sapiens
aaatgaataaaccct

SEQ ID NO: 139842 - DNA, 15 bp, Homo sapiens
aatgaataaaccctt

SEQ ID NO: 139843 - DNA, 15 bp, Homo sapiens
atgaataaacccttg

SEQ ID NO: 139844 - DNA, 15 bp, Homo sapiens
tgaataaacccttgt

SEQ ID NO: 139845 - DNA, 15 bp, Homo sapiens
gaataaacccttgtc

SEQ ID NO: 139846 - DNA, 15 bp, Homo sapiens
aataaacccttgtcc

SEQ ID NO: 139847 - DNA, 15 bp, Homo sapiens
ataaacccttgtcct

SEQ ID NO: 139848 - DNA, 15 bp, Homo sapiens
taaacccttgtcctt

SEQ ID NO: 139849 - DNA, 15 bp, Homo sapiens
aaacccttgtccttg

SEQ ID NO: 139850 - DNA, 15 bp, Homo sapiens
aacccttgtccttgt

SEQ ID NO: 139851 - DNA, 15 bp, Homo sapiens
acccttgtccttgta

SEQ ID NO: 139852 - DNA, 15 bp, Homo sapiens
cccttgtccttgtaa

SEQ ID NO: 139853 - DNA, 15 bp, Homo sapiens
ccttgtccttgtaat

SEQ ID NO: 139854 - DNA, 15 bp, Homo sapiens
cttgtccttgtaatg

SEQ ID NO: 139855 - DNA, 15 bp, Homo sapiens
ttgtccttgtaatgg

SEQ ID NO: 139856 - DNA, 15 bp, Homo sapiens
tgtccttgtaatggt

SEQ ID NO: 139857 - DNA, 15 bp, Homo sapiens
gtccttgtaatggtg

SEQ ID NO: 139858 - DNA, 15 bp, Homo sapiens
tccttgtaatggtgg

SEQ ID NO: 139859 - DNA, 15 bp, Homo sapiens
ccttgtaatggtggt

SEQ ID NO: 139860 - DNA, 15 bp, Homo sapiens
cttgtaatggtggtg

SEQ ID NO: 139861 - DNA, 15 bp, Homo sapiens
ttgtaatggtggtga

SEQ ID NO: 139862 - DNA, 15 bp, Homo sapiens
tgtaatggtggtgaa

SEQ ID NO: 139863 - DNA, 15 bp, Homo sapiens
gtaatggtggtgaag

SEQ ID NO: 139864 - DNA, 15 bp, Homo sapiens
taatggtggtgaagg

SEQ ID NO: 139865 - DNA, 15 bp, Homo sapiens
aatggtggtgaaggg

SEQ ID NO: 139866 - DNA, 15 bp, Homo sapiens
atggtggtgaagggg

SEQ ID NO: 139867 - DNA, 15 bp, Homo sapiens
tggtggtgaagggga

SEQ ID NO: 139868 - DNA, 15 bp, Homo sapiens
ggtggtgaaggggag

SEQ ID NO: 139869 - DNA, 15 bp, Homo sapiens
gtggtgaaggggagg

SEQ ID NO: 139870 - DNA, 15 bp, Homo sapiens
tggtgaaggggaggg

SEQ ID NO: 139871 - DNA, 15 bp, Homo sapiens
ggtgaaggggaggga

SEQ ID NO: 139872 - DNA, 15 bp, Homo sapiens
gtgaaggggagggag

SEQ ID NO: 139873 - DNA, 15 bp, Homo sapiens
tgaaggggagggagg

SEQ ID NO: 139874 - DNA, 15 bp, Homo sapiens
gaaggggagggaggt

SEQ ID NO: 139875 - DNA, 15 bp, Homo sapiens
aaggggagggaggta

SEQ ID NO: 139876 - DNA, 15 bp, Homo sapiens
aggggagggaggtag

SEQ ID NO: 139877 - DNA, 15 bp, Homo sapiens
ggggagggaggtagt

SEQ ID NO: 139878 - DNA, 15 bp, Homo sapiens
gggagggaggtagtt

SEQ ID NO: 139879 - DNA, 15 bp, Homo sapiens
ggagggaggtagttt

SEQ ID NO: 139880 - DNA, 15 bp, Homo sapiens
gagggaggtagtttg

SEQ ID NO: 139881 - DNA, 15 bp, Homo sapiens
agggaggtagtttga

SEQ ID NO: 139882 - DNA, 15 bp, Homo sapiens
gggaggtagtttgaa

SEQ ID NO: 139883 - DNA, 15 bp, Homo sapiens
ggaggtagtttgaat

SEQ ID NO: 139884 - DNA, 15 bp, Homo sapiens
gaggtagtttgaata

SEQ ID NO: 139885 - DNA, 15 bp, Homo sapiens
aggtagtttgaatac

SEQ ID NO: 139886 - DNA, 15 bp, Homo sapiens
ggtagtttgaataca

SEQ ID NO: 139887 - DNA, 15 bp, Homo sapiens
gtagtttgaatacaa

SEQ ID NO: 139888 - DNA, 15 bp, Homo sapiens
tagtttgaatacaac

SEQ ID NO: 139889 - DNA, 15 bp, Homo sapiens
agtttgaatacaact

SEQ ID NO: 139890 - DNA, 15 bp, Homo sapiens
gtttgaatacaactt

SEQ ID NO: 139891 - DNA, 15 bp, Homo sapiens
tttgaatacaacttc

SEQ ID NO: 139892 - DNA, 15 bp, Homo sapiens
ttgaatacaacttca

SEQ ID NO: 139893 - DNA, 15 bp, Homo sapiens
tgaatacaacttcac

SEQ ID NO: 139894 - DNA, 15 bp, Homo sapiens
gaatacaacttcact

SEQ ID NO: 139895 - DNA, 15 bp, Homo sapiens
aatacaacttcactt

SEQ ID NO: 139896 - DNA, 15 bp, Homo sapiens
atacaacttcactta

SEQ ID NO: 139897 - DNA, 15 bp, Homo sapiens
tacaacttcacttaa

SEQ ID NO: 139898 - DNA, 15 bp, Homo sapiens
acaacttcacttaat

SEQ ID NO: 139899 - DNA, 15 bp, Homo sapiens
caacttcacttaatt

SEQ ID NO: 139900 - DNA, 15 bp, Homo sapiens
aacttcacttaattt

SEQ ID NO: 139901 - DNA, 15 bp, Homo sapiens
acttcacttaatttt

SEQ ID NO: 139902 - DNA, 15 bp, Homo sapiens
cttcacttaatttta

SEQ ID NO: 139903 - DNA, 15 bp, Homo sapiens
ttcacttaattttac

SEQ ID NO: 139904 - DNA, 15 bp, Homo sapiens
tcacttaattttact

SEQ ID NO: 139905 - DNA, 15 bp, Homo sapiens
cacttaattttactt

SEQ ID NO: 139906 - DNA, 15 bp, Homo sapiens
acttaattttacttc

SEQ ID NO: 139907 - DNA, 15 bp, Homo sapiens
cttaattttacttcc

SEQ ID NO: 139908 - DNA, 15 bp, Homo sapiens
ttaattttacttccc

SEQ ID NO: 139909 - DNA, 15 bp, Homo sapiens
taattttacttccct

SEQ ID NO: 139910 - DNA, 15 bp, Homo sapiens
aattttacttcccta

SEQ ID NO: 139911 - DNA, 15 bp, Homo sapiens
attttacttccctat

SEQ ID NO: 139912 - DNA, 15 bp, Homo sapiens
ttttacttccctatt

SEQ ID NO: 139913 - DNA, 15 bp, Homo sapiens
tttacttccctattc

SEQ ID NO: 139914 - DNA, 15 bp, Homo sapiens
ttacttccctattca

SEQ ID NO: 139915 - DNA, 15 bp, Homo sapiens
tacttccctattcag

SEQ ID NO: 139916 - DNA, 15 bp, Homo sapiens
acttccctattcagg

SEQ ID NO: 139917 - DNA, 15 bp, Homo sapiens
cttccctattcaggc

SEQ ID NO: 139918 - DNA, 15 bp, Homo sapiens
ttccctattcaggca

SEQ ID NO: 139919 - DNA, 15 bp, Homo sapiens
tccctattcaggcag

SEQ ID NO: 139920 - DNA, 15 bp, Homo sapiens
ccctattcaggcagg

SEQ ID NO: 139921 - DNA, 15 bp, Homo sapiens
cctattcaggcagga

SEQ ID NO: 139922 - DNA, 15 bp, Homo sapiens
ctattcaggcaggaa

SEQ ID NO: 139923 - DNA, 15 bp, Homo sapiens
tattcaggcaggaat

SEQ ID NO: 139924 - DNA, 15 bp, Homo sapiens
attcaggcaggaatt

SEQ ID NO: 139925 - DNA, 15 bp, Homo sapiens
ttcaggcaggaattg

SEQ ID NO: 139926 - DNA, 15 bp, Homo sapiens
tcaggcaggaattgc

SEQ ID NO: 139927 - DNA, 15 bp, Homo sapiens
caggcaggaattgcc

SEQ ID NO: 139928 - DNA, 15 bp, Homo sapiens
aggcaggaattgcca

SEQ ID NO: 139929 - DNA, 15 bp, Homo sapiens
ggcaggaattgccaa

SEQ ID NO: 139930 - DNA, 15 bp, Homo sapiens
gcaggaattgccaaa

SEQ ID NO: 139931 - DNA, 15 bp, Homo sapiens
caggaattgccaaac

SEQ ID NO: 139932 - DNA, 15 bp, Homo sapiens
aggaattgccaaacc

SEQ ID NO: 139933 - DNA, 15 bp, Homo sapiens
ggaattgccaaacca

SEQ ID NO: 139934 - DNA, 15 bp, Homo sapiens
gaattgccaaaccat

SEQ ID NO: 139935 - DNA, 15 bp, Homo sapiens
aattgccaaaccatc

SEQ ID NO: 139936 - DNA, 15 bp, Homo sapiens
attgccaaaccatcc

SEQ ID NO: 139937 - DNA, 15 bp, Homo sapiens
ttgccaaaccatcca

SEQ ID NO: 139938 - DNA, 15 bp, Homo sapiens
tgccaaaccatccag

SEQ ID NO: 139939 - DNA, 15 bp, Homo sapiens
gccaaaccatccagg

SEQ ID NO: 139940 - DNA, 15 bp, Homo sapiens
ccaaaccatccagga

SEQ ID NO: 139941 - DNA, 15 bp, Homo sapiens
caaaccatccaggag

SEQ ID NO: 139942 - DNA, 15 bp, Homo sapiens
aaaccatccaggagt

SEQ ID NO: 139943 - DNA, 15 bp, Homo sapiens
aaccatccaggagtg

SEQ ID NO: 139944 - DNA, 15 bp, Homo sapiens
accatccaggagtgg

SEQ ID NO: 139945 - DNA, 15 bp, Homo sapiens
ccatccaggagtgga

SEQ ID NO: 139946 - DNA, 15 bp, Homo sapiens
catccaggagtggaa

SEQ ID NO: 139947 - DNA, 15 bp, Homo sapiens
atccaggagtggaat

SEQ ID NO: 139948 - DNA, 15 bp, Homo sapiens
tccaggagtggaata

SEQ ID NO: 139949 - DNA, 15 bp, Homo sapiens
ccaggagtggaatat

SEQ ID NO: 139950 - DNA, 15 bp, Homo sapiens
caggagtggaatatg

SEQ ID NO: 139951 - DNA, 15 bp, Homo sapiens
aggagtggaatatgc

SEQ ID NO: 139952 - DNA, 15 bp, Homo sapiens
ggagtggaatatgca

SEQ ID NO: 139953 - DNA, 15 bp, Homo sapiens
gagtggaatatgcaa

SEQ ID NO: 139954 - DNA, 15 bp, Homo sapiens
agtggaatatgcaac

SEQ ID NO: 139955 - DNA, 15 bp, Homo sapiens
gtggaatatgcaacc

SEQ ID NO: 139956 - DNA, 15 bp, Homo sapiens
tggaatatgcaacct

SEQ ID NO: 139957 - DNA, 15 bp, Homo sapiens
ggaatatgcaacctg

SEQ ID NO: 139958 - DNA, 15 bp, Homo sapiens
gaatatgcaacctgg

SEQ ID NO: 139959 - DNA, 15 bp, Homo sapiens
aatatgcaacctggc

SEQ ID NO: 139960 - DNA, 15 bp, Homo sapiens
atatgcaacctggcg

SEQ ID NO: 139961 - DNA, 15 bp, Homo sapiens
tatgcaacctggcgt

SEQ ID NO: 139962 - DNA, 15 bp, Homo sapiens
atgcaacctggcgtc

SEQ ID NO: 139963 - DNA, 15 bp, Homo sapiens
tgcaacctggcgtca

SEQ ID NO: 139964 - DNA, 15 bp, Homo sapiens
gcaacctggcgtcat

SEQ ID NO: 139965 - DNA, 15 bp, Homo sapiens
caacctggcgtcatg

SEQ ID NO: 139966 - DNA, 15 bp, Homo sapiens
aacctggcgtcatgg

SEQ ID NO: 139967 - DNA, 15 bp, Homo sapiens
acctggcgtcatggg

SEQ ID NO: 139968 - DNA, 15 bp, Homo sapiens
cctggcgtcatgggc

SEQ ID NO: 139969 - DNA, 15 bp, Homo sapiens
ctggcgtcatgggcc

SEQ ID NO: 139970 - DNA, 15 bp, Homo sapiens
tggcgtcatgggcca

SEQ ID NO: 139971 - DNA, 15 bp, Homo sapiens
ggcgtcatgggccag

SEQ ID NO: 139972 - DNA, 15 bp, Homo sapiens
gcgtcatgggccagc

SEQ ID NO: 139973 - DNA, 15 bp, Homo sapiens
cgtcatgggccagct

SEQ ID NO: 139974 - DNA, 15 bp, Homo sapiens
gtcatgggccagctg

SEQ ID NO: 139975 - DNA, 15 bp, Homo sapiens
tcatgggccagctgg

SEQ ID NO: 139976 - DNA, 15 bp, Homo sapiens
catgggccagctggt

SEQ ID NO: 139977 - DNA, 15 bp, Homo sapiens
atgggccagctggtt

SEQ ID NO: 139978 - DNA, 15 bp, Homo sapiens
tgggccagctggtta

SEQ ID NO: 139979 - DNA, 15 bp, Homo sapiens
gggccagctggttaa

SEQ ID NO: 139980 - DNA, 15 bp, Homo sapiens
ggccagctggttaaa

SEQ ID NO: 139981 - DNA, 15 bp, Homo sapiens
gccagctggttaaaa

SEQ ID NO: 139982 - DNA, 15 bp, Homo sapiens
ccagctggttaaaat

SEQ ID NO: 139983 - DNA, 15 bp, Homo sapiens
cagctggttaaaata

SEQ ID NO: 139984 - DNA, 15 bp, Homo sapiens
agctggttaaaataa

SEQ ID NO: 139985 - DNA, 15 bp, Homo sapiens
gctggttaaaataaa

SEQ ID NO: 139986 - DNA, 15 bp, Homo sapiens
ctggttaaaataaaa

SEQ ID NO: 139987 - DNA, 15 bp, Homo sapiens
tggttaaaataaaat

SEQ ID NO: 139988 - DNA, 15 bp, Homo sapiens
ggttaaaataaaatt

SEQ ID NO: 139989 - DNA, 15 bp, Homo sapiens
gttaaaataaaattg

SEQ ID NO: 139990 - DNA, 15 bp, Homo sapiens
taaaataaaattgat

SEQ ID NO: 139991 - DNA, 15 bp, Homo sapiens
aaaataaaattgatt

SEQ ID NO: 139992 - DNA, 15 bp, Homo sapiens
aaataaaattgattt

SEQ ID NO: 139993 - DNA, 15 bp, Homo sapiens
aataaaattgatttc

SEQ ID NO: 139994 - DNA, 15 bp, Homo sapiens
ataaaattgatttct

SEQ ID NO: 139995 - DNA, 15 bp, Homo sapiens
taaaattgatttctg

SEQ ID NO: 139996 - DNA, 15 bp, Homo sapiens
aaaattgatttctgg

SEQ ID NO: 139997 - DNA, 15 bp, Homo sapiens
aaattgatttctggc

SEQ ID NO: 139998 - DNA, 15 bp, Homo sapiens
aattgatttctggct

SEQ ID NO: 139999 - DNA, 15 bp, Homo sapiens
attgatttctggctt

SEQ ID NO: 140000 - DNA, 15 bp, Homo sapiens
ttgatttctggctta

SEQ ID NO: 140001 - DNA, 15 bp, Homo sapiens
tgatttctggcttat

SEQ ID NO: 140002 - DNA, 15 bp, Homo sapiens
gatttctggcttatc

SEQ ID NO: 140003 - DNA, 15 bp, Homo sapiens
atttctggcttatca

SEQ ID NO: 140004 - DNA, 15 bp, Homo sapiens
tttctggcttatcac

SEQ ID NO: 140005 - DNA, 15 bp, Homo sapiens
ttctggcttatcact

SEQ ID NO: 140006 - DNA, 15 bp, Homo sapiens
tctggcttatcactt

SEQ ID NO: 140007 - DNA, 15 bp, Homo sapiens
ctggcttatcacttg

SEQ ID NO: 140008 - DNA, 15 bp, Homo sapiens
tggcttatcacttgg

SEQ ID NO: 140009 - DNA, 15 bp, Homo sapiens
ggcttatcacttggc

SEQ ID NO: 140010 - DNA, 15 bp, Homo sapiens
gcttatcacttggca

SEQ ID NO: 140011 - DNA, 15 bp, Homo sapiens
cttatcacttggcat

SEQ ID NO: 140012 - DNA, 15 bp, Homo sapiens
ttatcacttggcatt

SEQ ID NO: 140013 - DNA, 15 bp, Homo sapiens
tatcacttggcattt

SEQ ID NO: 140014 - DNA, 15 bp, Homo sapiens
atcacttggcatttg

SEQ ID NO: 140015 - DNA, 15 bp, Homo sapiens
tcacttggcatttgt

SEQ ID NO: 140016 - DNA, 15 bp, Homo sapiens
cacttggcatttgtg

SEQ ID NO: 140017 - DNA, 15 bp, Homo sapiens
acttggcatttgtga

SEQ ID NO: 140018 - DNA, 15 bp, Homo sapiens
cttggcatttgtgat

SEQ ID NO: 140019 - DNA, 15 bp, Homo sapiens
ttggcatttgtgatg

SEQ ID NO: 140020 - DNA, 15 bp, Homo sapiens
tggcatttgtgatga

SEQ ID NO: 140021 - DNA, 15 bp, Homo sapiens
ggcatttgtgatgat

SEQ ID NO: 140022 - DNA, 15 bp, Homo sapiens
gcatttgtgatgatt

SEQ ID NO: 140023 - DNA, 15 bp, Homo sapiens
catttgtgatgattt

SEQ ID NO: 140024 - DNA, 15 bp, Homo sapiens
atttgtgatgatttc

SEQ ID NO: 140025 - DNA, 15 bp, Homo sapiens
tttgtgatgatttcc

SEQ ID NO: 140026 - DNA, 15 bp, Homo sapiens
ttgtgatgatttcct

SEQ ID NO: 140027 - DNA, 15 bp, Homo sapiens
tgtgatgatttcctc

SEQ ID NO: 140028 - DNA, 15 bp, Homo sapiens
gtgatgatttcctcc

SEQ ID NO: 140029 - DNA, 15 bp, Homo sapiens
tgatgatttcctcct

SEQ ID NO: 140030 - DNA, 15 bp, Homo sapiens
gatgatttcctccta

SEQ ID NO: 140031 - DNA, 15 bp, Homo sapiens
atgatttcctcctac

SEQ ID NO: 140032 - DNA, 15 bp, Homo sapiens
tgatttcctcctaca

SEQ ID NO: 140033 - DNA, 15 bp, Homo sapiens
gatttcctcctacaa

SEQ ID NO: 140034 - DNA, 15 bp, Homo sapiens
atttcctcctacaag

SEQ ID NO: 140035 - DNA, 15 bp, Homo sapiens
tttcctcctacaagg

SEQ ID NO: 140036 - DNA, 15 bp, Homo sapiens
ttcctcctacaaggg

SEQ ID NO: 140037 - DNA, 15 bp, Homo sapiens
tcctcctacaaggga

SEQ ID NO: 140038 - DNA, 15 bp, Homo sapiens
cctcctacaagggat

SEQ ID NO: 140039 - DNA, 15 bp, Homo sapiens
ctcctacaagggata

SEQ ID NO: 140040 - DNA, 15 bp, Homo sapiens
tcctacaagggatac

SEQ ID NO: 140041 - DNA, 15 bp, Homo sapiens
cctacaagggataca

SEQ ID NO: 140042 - DNA, 15 bp, Homo sapiens
ctacaagggatacat

SEQ ID NO: 140043 - DNA, 15 bp, Homo sapiens
tacaagggatacatt

SEQ ID NO: 140044 - DNA, 15 bp, Homo sapiens
acaagggatacattt

SEQ ID NO: 140045 - DNA, 15 bp, Homo sapiens
caagggatacatttt

SEQ ID NO: 140046 - DNA, 15 bp, Homo sapiens
aagggatacatttta

SEQ ID NO: 140047 - DNA, 15 bp, Homo sapiens
agggatacattttaa

SEQ ID NO: 140048 - DNA, 15 bp, Homo sapiens
gggatacattttaag

SEQ ID NO: 140049 - DNA, 15 bp, Homo sapiens
ggatacattttaagt

SEQ ID NO: 140050 - DNA, 15 bp, Homo sapiens
gatacattttaagtt

SEQ ID NO: 140051 - DNA, 15 bp, Homo sapiens
atacattttaagttg

SEQ ID NO: 140052 - DNA, 15 bp, Homo sapiens
tacattttaagttga

SEQ ID NO: 140053 - DNA, 15 bp, Homo sapiens
acattttaagttgag

SEQ ID NO: 140054 - DNA, 15 bp, Homo sapiens
cattttaagttgagt

SEQ ID NO: 140055 - DNA, 15 bp, Homo sapiens
attttaagttgagtt

SEQ ID NO: 140056 - DNA, 15 bp, Homo sapiens
ttttaagttgagtta

SEQ ID NO: 140057 - DNA, 15 bp, Homo sapiens
tttaagttgagttaa

SEQ ID NO: 140058 - DNA, 15 bp, Homo sapiens
ttaagttgagttaaa

SEQ ID NO: 140059 - DNA, 15 bp, Homo sapiens
taagttgagttaaac

SEQ ID NO: 140060 - DNA, 15 bp, Homo sapiens
aagttgagttaaact

SEQ ID NO: 140061 - DNA, 15 bp, Homo sapiens
agttgagttaaactt

SEQ ID NO: 140062 - DNA, 15 bp, Homo sapiens
gttgagttaaactta

SEQ ID NO: 140063 - DNA, 15 bp, Homo sapiens
ttgagttaaacttaa

SEQ ID NO: 140064 - DNA, 15 bp, Homo sapiens
tgagttaaacttaaa

SEQ ID NO: 140065 - DNA, 15 bp, Homo sapiens
gagttaaacttaaaa

SEQ ID NO: 140066 - DNA, 15 bp, Homo sapiens
agttaaacttaaaaa

SEQ ID NO: 140067 - DNA, 15 bp, Homo sapiens
gttaaacttaaaaaa

SEQ ID NO: 140068 - DNA, 15 bp, Homo sapiens
ttaaacttaaaaaat

SEQ ID NO: 140069 - DNA, 15 bp, Homo sapiens
taaacttaaaaaata

SEQ ID NO: 140070 - DNA, 15 bp, Homo sapiens
aaacttaaaaaatat

SEQ ID NO: 140071 - DNA, 15 bp, Homo sapiens
aacttaaaaaatatt

SEQ ID NO: 140072 - DNA, 15 bp, Homo sapiens
acttaaaaaatattc

SEQ ID NO: 140073 - DNA, 15 bp, Homo sapiens
cttaaaaaatattca

SEQ ID NO: 140074 - DNA, 15 bp, Homo sapiens
ttaaaaaatattcac

SEQ ID NO: 140075 - DNA, 15 bp, Homo sapiens
taaaaaatattcaca

SEQ ID NO: 140076 - DNA, 15 bp, Homo sapiens
aaaaaatattcacag

SEQ ID NO: 140077 - DNA, 15 bp, Homo sapiens
aaaaatattcacagt

SEQ ID NO: 140078 - DNA, 15 bp, Homo sapiens
aaaatattcacagtt

SEQ ID NO: 140079 - DNA, 15 bp, Homo sapiens
aaatattcacagttc

SEQ ID NO: 140080 - DNA, 15 bp, Homo sapiens
aatattcacagttct

SEQ ID NO: 140081 - DNA, 15 bp, Homo sapiens
atattcacagttctg

SEQ ID NO: 140082 - DNA, 15 bp, Homo sapiens
tattcacagttctga

SEQ ID NO: 140083 - DNA, 15 bp, Homo sapiens
attcacagttctgag

SEQ ID NO: 140084 - DNA, 15 bp, Homo sapiens
ttcacagttctgagg

SEQ ID NO: 140085 - DNA, 15 bp, Homo sapiens
tcacagttctgaggc

SEQ ID NO: 140086 - DNA, 15 bp, Homo sapiens
cacagttctgaggca

SEQ ID NO: 140087 - DNA, 15 bp, Homo sapiens
acagttctgaggcaa

SEQ ID NO: 140088 - DNA, 15 bp, Homo sapiens
cagttctgaggcaat

SEQ ID NO: 140089 - DNA, 15 bp, Homo sapiens
agttctgaggcaata

SEQ ID NO: 140090 - DNA, 15 bp, Homo sapiens
gttctgaggcaataa

SEQ ID NO: 140091 - DNA, 15 bp, Homo sapiens
ttctgaggcaataac

SEQ ID NO: 140092 - DNA, 15 bp, Homo sapiens
tctgaggcaataacc

SEQ ID NO: 140093 - DNA, 15 bp, Homo sapiens
ctgaggcaataaccg

SEQ ID NO: 140094 - DNA, 15 bp, Homo sapiens
tgaggcaataaccgt

SEQ ID NO: 140095 - DNA, 15 bp, Homo sapiens
gaggcaataaccgtg

SEQ ID NO: 140096 - DNA, 15 bp, Homo sapiens
aggcaataaccgtgg

SEQ ID NO: 140097 - DNA, 15 bp, Homo sapiens
ggcaataaccgtggt

SEQ ID NO: 140098 - DNA, 15 bp, Homo sapiens
gcaataaccgtggtt

SEQ ID NO: 140099 - DNA, 15 bp, Homo sapiens
caataaccgtggtta

SEQ ID NO: 140100 - DNA, 15 bp, Homo sapiens
aataaccgtggttaa

SEQ ID NO: 140101 - DNA, 15 bp, Homo sapiens
ataaccgtggttaag

SEQ ID NO: 140102 - DNA, 15 bp, Homo sapiens
taaccgtggttaagg

SEQ ID NO: 140103 - DNA, 15 bp, Homo sapiens
aaccgtggttaaggg

SEQ ID NO: 140104 - DNA, 15 bp, Homo sapiens
accgtggttaagggt

SEQ ID NO: 140105 - DNA, 15 bp, Homo sapiens
ccgtggttaagggtt

SEQ ID NO: 140106 - DNA, 15 bp, Homo sapiens
cgtggttaagggtta

SEQ ID NO: 140107 - DNA, 15 bp, Homo sapiens
gtggttaagggttat

SEQ ID NO: 140108 - DNA, 15 bp, Homo sapiens
tggttaagggttatt

SEQ ID NO: 140109 - DNA, 15 bp, Homo sapiens
ggttaagggttattg

SEQ ID NO: 140110 - DNA, 15 bp, Homo sapiens
gttaagggttattga

SEQ ID NO: 140111 - DNA, 15 bp, Homo sapiens
ttaagggttattgat

SEQ ID NO: 140112 - DNA, 15 bp, Homo sapiens
taagggttattgatc

SEQ ID NO: 140113 - DNA, 15 bp, Homo sapiens
aagggttattgatct

SEQ ID NO: 140114 - DNA, 15 bp, Homo sapiens
agggttattgatctg

SEQ ID NO: 140115 - DNA, 15 bp, Homo sapiens
gggttattgatctgg

SEQ ID NO: 140116 - DNA, 15 bp, Homo sapiens
ggttattgatctgga

SEQ ID NO: 140117 - DNA, 15 bp, Homo sapiens
gttattgatctggag

SEQ ID NO: 140118 - DNA, 15 bp, Homo sapiens
ttattgatctggagg

SEQ ID NO: 140119 - DNA, 15 bp, Homo sapiens
tattgatctggagga

SEQ ID NO: 140120 - DNA, 15 bp, Homo sapiens
attgatctggaggag

SEQ ID NO: 140121 - DNA, 15 bp, Homo sapiens
ttgatctggaggagc

SEQ ID NO: 140122 - DNA, 15 bp, Homo sapiens
tgatctggaggagct

SEQ ID NO: 140123 - DNA, 15 bp, Homo sapiens
gatctggaggagctc

SEQ ID NO: 140124 - DNA, 15 bp, Homo sapiens
atctggaggagctct

SEQ ID NO: 140125 - DNA, 15 bp, Homo sapiens
tctggaggagctctg

SEQ ID NO: 140126 - DNA, 15 bp, Homo sapiens
ctggaggagctctgt

SEQ ID NO: 140127 - DNA, 15 bp, Homo sapiens
tggaggagctctgtc

SEQ ID NO: 140128 - DNA, 15 bp, Homo sapiens
ggaggagctctgtct

SEQ ID NO: 140129 - DNA, 15 bp, Homo sapiens
gaggagctctgtcta

SEQ ID NO: 140130 - DNA, 15 bp, Homo sapiens
aggagctctgtctaa

SEQ ID NO: 140131 - DNA, 15 bp, Homo sapiens
ggagctctgtctaaa

SEQ ID NO: 140132 - DNA, 15 bp, Homo sapiens
gagctctgtctaaaa

SEQ ID NO: 140133 - DNA, 15 bp, Homo sapiens
agctctgtctaaaaa

SEQ ID NO: 140134 - DNA, 15 bp, Homo sapiens
gctctgtctaaaaaa

SEQ ID NO: 140135 - DNA, 15 bp, Homo sapiens
ctctgtctaaaaaat

SEQ ID NO: 140136 - DNA, 15 bp, Homo sapiens
tctgtctaaaaaatt

SEQ ID NO: 140137 - DNA, 15 bp, Homo sapiens
ctgtctaaaaaattg

SEQ ID NO: 140138 - DNA, 15 bp, Homo sapiens
tgtctaaaaaattga

SEQ ID NO: 140139 - DNA, 15 bp, Homo sapiens
gtctaaaaaattgag

SEQ ID NO: 140140 - DNA, 15 bp, Homo sapiens
tctaaaaaattgagg

SEQ ID NO: 140141 - DNA, 15 bp, Homo sapiens
ctaaaaaattgagga

SEQ ID NO: 140142 - DNA, 15 bp, Homo sapiens
taaaaaattgaggac

SEQ ID NO: 140143 - DNA, 15 bp, Homo sapiens
aaaaaattgaggaca

SEQ ID NO: 140144 - DNA, 15 bp, Homo sapiens
aaaaattgaggacag

SEQ ID NO: 140145 - DNA, 15 bp, Homo sapiens
aaaattgaggacagg

SEQ ID NO: 140146 - DNA, 15 bp, Homo sapiens
aaattgaggacagga

SEQ ID NO: 140147 - DNA, 15 bp, Homo sapiens
aattgaggacaggag

SEQ ID NO: 140148 - DNA, 15 bp, Homo sapiens
attgaggacaggaga

SEQ ID NO: 140149 - DNA, 15 bp, Homo sapiens
ttgaggacaggagac

SEQ ID NO: 140150 - DNA, 15 bp, Homo sapiens
tgaggacaggagact

SEQ ID NO: 140151 - DNA, 15 bp, Homo sapiens
gaggacaggagactt

SEQ ID NO: 140152 - DNA, 15 bp, Homo sapiens
aggacaggagacttt

SEQ ID NO: 140153 - DNA, 15 bp, Homo sapiens
ggacaggagacttta

SEQ ID NO: 140154 - DNA, 15 bp, Homo sapiens
gacaggagactttag

SEQ ID NO: 140155 - DNA, 15 bp, Homo sapiens
acaggagactttaga

SEQ ID NO: 140156 - DNA, 15 bp, Homo sapiens
caggagactttagac

SEQ ID NO: 140157 - DNA, 15 bp, Homo sapiens
aggagactttagaca

SEQ ID NO: 140158 - DNA, 15 bp, Homo sapiens
ggagactttagacaa

SEQ ID NO: 140159 - DNA, 15 bp, Homo sapiens
gagactttagacaag

SEQ ID NO: 140160 - DNA, 15 bp, Homo sapiens
agactttagacaagg

SEQ ID NO: 140161 - DNA, 15 bp, Homo sapiens
gactttagacaaggg

SEQ ID NO: 140162 - DNA, 15 bp, Homo sapiens
actttagacaagggt

SEQ ID NO: 140163 - DNA, 15 bp, Homo sapiens
ctttagacaagggtg

SEQ ID NO: 140164 - DNA, 15 bp, Homo sapiens
tttagacaagggtgt

SEQ ID NO: 140165 - DNA, 15 bp, Homo sapiens
ttagacaagggtgta

SEQ ID NO: 140166 - DNA, 15 bp, Homo sapiens
tagacaagggtgtat

SEQ ID NO: 140167 - DNA, 15 bp, Homo sapiens
agacaagggtgtatt

SEQ ID NO: 140168 - DNA, 15 bp, Homo sapiens
gacaagggtgtattt

SEQ ID NO: 140169 - DNA, 15 bp, Homo sapiens
acaagggtgtatttg

SEQ ID NO: 140170 - DNA, 15 bp, Homo sapiens
caagggtgtatttgg

SEQ ID NO: 140171 - DNA, 15 bp, Homo sapiens
aagggtgtatttgga

SEQ ID NO: 140172 - DNA, 15 bp, Homo sapiens
agggtgtatttggag

SEQ ID NO: 140173 - DNA, 15 bp, Homo sapiens
gggtgtatttggaga

SEQ ID NO: 140174 - DNA, 15 bp, Homo sapiens
ggtgtatttggagac

SEQ ID NO: 140175 - DNA, 15 bp, Homo sapiens
gtgtatttggagact

SEQ ID NO: 140176 - DNA, 15 bp, Homo sapiens
tgtatttggagactt

SEQ ID NO: 140177 - DNA, 15 bp, Homo sapiens
gtatttggagacttt

SEQ ID NO: 140178 - DNA, 15 bp, Homo sapiens
tatttggagactttt

SEQ ID NO: 140179 - DNA, 15 bp, Homo sapiens
atttggagactttta

SEQ ID NO: 140180 - DNA, 15 bp, Homo sapiens
tttggagacttttaa

SEQ ID NO: 140181 - DNA, 15 bp, Homo sapiens
ttggagacttttaag

SEQ ID NO: 140182 - DNA, 15 bp, Homo sapiens
tggagacttttaaga

SEQ ID NO: 140183 - DNA, 15 bp, Homo sapiens
ggagacttttaagaa

SEQ ID NO: 140184 - DNA, 15 bp, Homo sapiens
gagacttttaagaat

SEQ ID NO: 140185 - DNA, 15 bp, Homo sapiens
agacttttaagaatt

SEQ ID NO: 140186 - DNA, 15 bp, Homo sapiens
gacttttaagaattt

SEQ ID NO: 140187 - DNA, 15 bp, Homo sapiens
acttttaagaatttt

SEQ ID NO: 140188 - DNA, 15 bp, Homo sapiens
cttttaagaatttta

SEQ ID NO: 140189 - DNA, 15 bp, Homo sapiens
ttttaagaattttat

SEQ ID NO: 140190 - DNA, 15 bp, Homo sapiens
tttaagaattttata

SEQ ID NO: 140191 - DNA, 15 bp, Homo sapiens
ttaagaattttataa

SEQ ID NO: 140192 - DNA, 15 bp, Homo sapiens
taagaattttataaa

SEQ ID NO: 140193 - DNA, 15 bp, Homo sapiens
aagaattttataaaa

SEQ ID NO: 140194 - DNA, 15 bp, Homo sapiens
agaattttataaaat

SEQ ID NO: 140195 - DNA, 15 bp, Homo sapiens
gaattttataaaata

SEQ ID NO: 140196 - DNA, 15 bp, Homo sapiens
aattttataaaataa

SEQ ID NO: 140197 - DNA, 15 bp, Homo sapiens
attttataaaataag

SEQ ID NO: 140198 - DNA, 15 bp, Homo sapiens
ttttataaaataagg

SEQ ID NO: 140199 - DNA, 15 bp, Homo sapiens
tttataaaataaggg

SEQ ID NO: 140200 - DNA, 15 bp, Homo sapiens
ttataaaataagggc

SEQ ID NO: 140201 - DNA, 15 bp, Homo sapiens
tataaaataagggct

SEQ ID NO: 140202 - DNA, 15 bp, Homo sapiens
ataaaataagggctg

SEQ ID NO: 140203 - DNA, 15 bp, Homo sapiens
taaaataagggctgg

SEQ ID NO: 140204 - DNA, 15 bp, Homo sapiens
aaaataagggctgga

SEQ ID NO: 140205 - DNA, 15 bp, Homo sapiens
aaataagggctggac

SEQ ID NO: 140206 - DNA, 15 bp, Homo sapiens
aataagggctggacg

SEQ ID NO: 140207 - DNA, 15 bp, Homo sapiens
ataagggctggacgc

SEQ ID NO: 140208 - DNA, 15 bp, Homo sapiens
taagggctggacgca

SEQ ID NO: 140209 - DNA, 15 bp, Homo sapiens
aagggctggacgcag

SEQ ID NO: 140210 - DNA, 15 bp, Homo sapiens
agggctggacgcagt

SEQ ID NO: 140211 - DNA, 15 bp, Homo sapiens
gggctggacgcagtg

SEQ ID NO: 140212 - DNA, 15 bp, Homo sapiens
ggctggacgcagtgg

SEQ ID NO: 140213 - DNA, 15 bp, Homo sapiens
gctggacgcagtggc

SEQ ID NO: 140214 - DNA, 15 bp, Homo sapiens
ctggacgcagtggca

SEQ ID NO: 140215 - DNA, 15 bp, Homo sapiens
tggacgcagtggcac

SEQ ID NO: 140216 - DNA, 15 bp, Homo sapiens
ggacgcagtggcact

SEQ ID NO: 140217 - DNA, 15 bp, Homo sapiens
gacgcagtggcactg

SEQ ID NO: 140218 - DNA, 15 bp, Homo sapiens
acgcagtggcactga

SEQ ID NO: 140219 - DNA, 15 bp, Homo sapiens
cgcagtggcactgag

SEQ ID NO: 140220 - DNA, 15 bp, Homo sapiens
gcagtggcactgagt

SEQ ID NO: 140221 - DNA, 15 bp, Homo sapiens
cagtggcactgagtt

SEQ ID NO: 140222 - DNA, 15 bp, Homo sapiens
agtggcactgagttg

SEQ ID NO: 140223 - DNA, 15 bp, Homo sapiens
gtggcactgagttga

SEQ ID NO: 140224 - DNA, 15 bp, Homo sapiens
tggcactgagttgag

SEQ ID NO: 140225 - DNA, 15 bp, Homo sapiens
ggcactgagttgaga

SEQ ID NO: 140226 - DNA, 15 bp, Homo sapiens
gcactgagttgagaa

SEQ ID NO: 140227 - DNA, 15 bp, Homo sapiens
cactgagttgagaac

SEQ ID NO: 140228 - DNA, 15 bp, Homo sapiens
actgagttgagaact

SEQ ID NO: 140229 - DNA, 15 bp, Homo sapiens
ctgagttgagaactg

SEQ ID NO: 140230 - DNA, 15 bp, Homo sapiens
tgagttgagaactgt

SEQ ID NO: 140231 - DNA, 15 bp, Homo sapiens
gagttgagaactgtt

SEQ ID NO: 140232 - DNA, 15 bp, Homo sapiens
agttgagaactgttg

SEQ ID NO: 140233 - DNA, 15 bp, Homo sapiens
gttgagaactgttgc

SEQ ID NO: 140234 - DNA, 15 bp, Homo sapiens
ttgagaactgttgct

SEQ ID NO: 140235 - DNA, 15 bp, Homo sapiens
tgagaactgttgctt

SEQ ID NO: 140236 - DNA, 15 bp, Homo sapiens
gagaactgttgcttg

SEQ ID NO: 140237 - DNA, 15 bp, Homo sapiens
agaactgttgcttgc

SEQ ID NO: 140238 - DNA, 15 bp, Homo sapiens
gaactgttgcttgct

SEQ ID NO: 140239 - DNA, 15 bp, Homo sapiens
aactgttgcttgctt

SEQ ID NO: 140240 - DNA, 15 bp, Homo sapiens
actgttgcttgcttt

SEQ ID NO: 140241 - DNA, 15 bp, Homo sapiens
ctgttgcttgctttg

SEQ ID NO: 140242 - DNA, 15 bp, Homo sapiens
tgttgcttgctttgc

SEQ ID NO: 140243 - DNA, 15 bp, Homo sapiens
gttgcttgctttgca

SEQ ID NO: 140244 - DNA, 15 bp, Homo sapiens
ttgcttgctttgcat

SEQ ID NO: 140245 - DNA, 15 bp, Homo sapiens
tgcttgctttgcatt

SEQ ID NO: 140246 - DNA, 15 bp, Homo sapiens
gcttgctttgcatta

SEQ ID NO: 140247 - DNA, 15 bp, Homo sapiens
cttgctttgcattaa

SEQ ID NO: 140248 - DNA, 15 bp, Homo sapiens
ttgctttgcattaaa

SEQ ID NO: 140249 - DNA, 15 bp, Homo sapiens
tgctttgcattaaat

SEQ ID NO: 140250 - DNA, 15 bp, Homo sapiens
gctttgcattaaata

SEQ ID NO: 140251 - DNA, 15 bp, Homo sapiens
ctttgcattaaatag

SEQ ID NO: 140252 - DNA, 15 bp, Homo sapiens
tttgcattaaatagg

SEQ ID NO: 140253 - DNA, 15 bp, Homo sapiens
ttgcattaaatagga

SEQ ID NO: 140254 - DNA, 15 bp, Homo sapiens
tgcattaaataggag

SEQ ID NO: 140255 - DNA, 15 bp, Homo sapiens
gcattaaataggaga

SEQ ID NO: 140256 - DNA, 15 bp, Homo sapiens
cattaaataggagat

SEQ ID NO: 140257 - DNA, 15 bp, Homo sapiens
attaaataggagatc

SEQ ID NO: 140258 - DNA, 15 bp, Homo sapiens
ttaaataggagatca

SEQ ID NO: 140259 - DNA, 15 bp, Homo sapiens
taaataggagatcag

SEQ ID NO: 140260 - DNA, 15 bp, Homo sapiens
aaataggagatcagt

SEQ ID NO: 140261 - DNA, 15 bp, Homo sapiens
aataggagatcagtc

SEQ ID NO: 140262 - DNA, 15 bp, Homo sapiens
ataggagatcagtcc

SEQ ID NO: 140263 - DNA, 15 bp, Homo sapiens
taggagatcagtccc

SEQ ID NO: 140264 - DNA, 15 bp, Homo sapiens
aggagatcagtccct

SEQ ID NO: 140265 - DNA, 15 bp, Homo sapiens
ggagatcagtccctg

SEQ ID NO: 140266 - DNA, 15 bp, Homo sapiens
gagatcagtccctgc

SEQ ID NO: 140267 - DNA, 15 bp, Homo sapiens
agatcagtccctgca

SEQ ID NO: 140268 - DNA, 15 bp, Homo sapiens
gatcagtccctgcag

SEQ ID NO: 140269 - DNA, 15 bp, Homo sapiens
atcagtccctgcagc

SEQ ID NO: 140270 - DNA, 15 bp, Homo sapiens
tcagtccctgcagct

SEQ ID NO: 140271 - DNA, 15 bp, Homo sapiens
gtccctgcagcttgt

SEQ ID NO: 140272 - DNA, 15 bp, Homo sapiens
tccctgcagcttgtg

SEQ ID NO: 140273 - DNA, 15 bp, Homo sapiens
ccctgcagcttgtgg

SEQ ID NO: 140274 - DNA, 15 bp, Homo sapiens
cctgcagcttgtggg

SEQ ID NO: 140275 - DNA, 15 bp, Homo sapiens
gcttgtgggaataag

SEQ ID NO: 140276 - DNA, 15 bp, Homo sapiens
cttgtgggaataagg

SEQ ID NO: 140277 - DNA, 15 bp, Homo sapiens
ttgtgggaataaggc

SEQ ID NO: 140278 - DNA, 15 bp, Homo sapiens
tgtgggaataaggct

SEQ ID NO: 140279 - DNA, 15 bp, Homo sapiens
gtgggaataaggctt

SEQ ID NO: 140280 - DNA, 15 bp, Homo sapiens
tgggaataaggcttt

SEQ ID NO: 140281 - DNA, 15 bp, Homo sapiens
gggaataaggcttta

SEQ ID NO: 140282 - DNA, 15 bp, Homo sapiens
ggaataaggctttaa

SEQ ID NO: 140283 - DNA, 15 bp, Homo sapiens
gaataaggctttaaa

SEQ ID NO: 140284 - DNA, 15 bp, Homo sapiens
aataaggctttaaat

SEQ ID NO: 140285 - DNA, 15 bp, Homo sapiens
ataaggctttaaatc

SEQ ID NO: 140286 - DNA, 15 bp, Homo sapiens
taaggctttaaatct

SEQ ID NO: 140287 - DNA, 15 bp, Homo sapiens
aaggctttaaatctc

SEQ ID NO: 140288 - DNA, 15 bp, Homo sapiens
aggctttaaatctct

SEQ ID NO: 140289 - DNA, 15 bp, Homo sapiens
ggctttaaatctctc

SEQ ID NO: 140290 - DNA, 15 bp, Homo sapiens
ttttagctctgtgag

SEQ ID NO: 140291 - DNA, 15 bp, Homo sapiens
tttagctctgtgaga

SEQ ID NO: 140292 - DNA, 15 bp, Homo sapiens
ttagctctgtgagat

SEQ ID NO: 140293 - DNA, 15 bp, Homo sapiens
tagctctgtgagatg

SEQ ID NO: 140294 - DNA, 15 bp, Homo sapiens
agctctgtgagatgg

SEQ ID NO: 140295 - DNA, 15 bp, Homo sapiens
gctctgtgagatggc

SEQ ID NO: 140296 - DNA, 15 bp, Homo sapiens
ctctgtgagatggca

SEQ ID NO: 140297 - DNA, 15 bp, Homo sapiens
tctgtgagatggcac

SEQ ID NO: 140298 - DNA, 15 bp, Homo sapiens
ctgtgagatggcact

SEQ ID NO: 140299 - DNA, 15 bp, Homo sapiens
tgtgagatggcactg

SEQ ID NO: 140300 - DNA, 15 bp, Homo sapiens
gtgagatggcactgg

SEQ ID NO: 140301 - DNA, 15 bp, Homo sapiens
tgagatggcactggg

SEQ ID NO: 140302 - DNA, 15 bp, Homo sapiens
gagatggcactgggg

SEQ ID NO: 140303 - DNA, 15 bp, Homo sapiens
agatggcactgggga

SEQ ID NO: 140304 - DNA, 15 bp, Homo sapiens
gatggcactggggaa

SEQ ID NO: 140305 - DNA, 15 bp, Homo sapiens
atggcactggggaaa

SEQ ID NO: 140306 - DNA, 15 bp, Homo sapiens
tggcactggggaaac

SEQ ID NO: 140307 - DNA, 15 bp, Homo sapiens
ggcactggggaaaca

SEQ ID NO: 140308 - DNA, 15 bp, Homo sapiens
gcactggggaaacag

SEQ ID NO: 140309 - DNA, 15 bp, Homo sapiens
cactggggaaacaga

SEQ ID NO: 140310 - DNA, 15 bp, Homo sapiens
actggggaaacagaa

SEQ ID NO: 140311 - DNA, 15 bp, Homo sapiens
ctggggaaacagaaa

SEQ ID NO: 140312 - DNA, 15 bp, Homo sapiens
tggggaaacagaaat

SEQ ID NO: 140313 - DNA, 15 bp, Homo sapiens
ggggaaacagaaatg

SEQ ID NO: 140314 - DNA, 15 bp, Homo sapiens
gggaaacagaaatga

SEQ ID NO: 140315 - DNA, 15 bp, Homo sapiens
ggaaacagaaatgaa

SEQ ID NO: 140316 - DNA, 15 bp, Homo sapiens
gaaacagaaatgaac

SEQ ID NO: 140317 - DNA, 15 bp, Homo sapiens
aaacagaaatgaacg

SEQ ID NO: 140318 - DNA, 15 bp, Homo sapiens
aacagaaatgaacgg

SEQ ID NO: 140319 - DNA, 15 bp, Homo sapiens
acagaaatgaacgga

SEQ ID NO: 140320 - DNA, 15 bp, Homo sapiens
cagaaatgaacggac

SEQ ID NO: 140321 - DNA, 15 bp, Homo sapiens
agaaatgaacggact

SEQ ID NO: 140322 - DNA, 15 bp, Homo sapiens
gaaatgaacggacta

SEQ ID NO: 140323 - DNA, 15 bp, Homo sapiens
aaatgaacggactag

SEQ ID NO: 140324 - DNA, 15 bp, Homo sapiens
tgaacggactagtgt

SEQ ID NO: 140325 - DNA, 15 bp, Homo sapiens
gaacggactagtgtc

SEQ ID NO: 140326 - DNA, 15 bp, Homo sapiens
aacggactagtgtca

SEQ ID NO: 140327 - DNA, 15 bp, Homo sapiens
acggactagtgtcac

SEQ ID NO: 140328 - DNA, 15 bp, Homo sapiens
cggactagtgtcaca

SEQ ID NO: 140329 - DNA, 15 bp, Homo sapiens
ggactagtgtcacaa

SEQ ID NO: 140330 - DNA, 15 bp, Homo sapiens
gactagtgtcacaaa

SEQ ID NO: 140331 - DNA, 15 bp, Homo sapiens
actagtgtcacaaag

SEQ ID NO: 140332 - DNA, 15 bp, Homo sapiens
ctagtgtcacaaagc

SEQ ID NO: 140333 - DNA, 15 bp, Homo sapiens
tagtgtcacaaagct

SEQ ID NO: 140334 - DNA, 15 bp, Homo sapiens
agtgtcacaaagctc

SEQ ID NO: 140335 - DNA, 15 bp, Homo sapiens
gtgtcacaaagctca

SEQ ID NO: 140336 - DNA, 15 bp, Homo sapiens
tgtcacaaagctcag

SEQ ID NO: 140337 - DNA, 15 bp, Homo sapiens
gtcacaaagctcagg

SEQ ID NO: 140338 - DNA, 15 bp, Homo sapiens
tcacaaagctcaggt

SEQ ID NO: 140339 - DNA, 15 bp, Homo sapiens
aaagctcaggtggga

SEQ ID NO: 140340 - DNA, 15 bp, Homo sapiens
aagctcaggtgggat

SEQ ID NO: 140341 - DNA, 15 bp, Homo sapiens
agctcaggtgggatg

SEQ ID NO: 140342 - DNA, 15 bp, Homo sapiens
gctcaggtgggatgg

SEQ ID NO: 140343 - DNA, 15 bp, Homo sapiens
ctcaggtgggatgga

SEQ ID NO: 140344 - DNA, 15 bp, Homo sapiens
tcaggtgggatggac

SEQ ID NO: 140345 - DNA, 15 bp, Homo sapiens
caggtgggatggacg

SEQ ID NO: 140346 - DNA, 15 bp, Homo sapiens
aggtgggatggacga

SEQ ID NO: 140347 - DNA, 15 bp, Homo sapiens
ggtgggatggacgag

SEQ ID NO: 140348 - DNA, 15 bp, Homo sapiens
gtgggatggacgaga

SEQ ID NO: 140349 - DNA, 15 bp, Homo sapiens
tgggatggacgagat

SEQ ID NO: 140350 - DNA, 15 bp, Homo sapiens
gggatggacgagatc

SEQ ID NO: 140351 - DNA, 15 bp, Homo sapiens
ggatggacgagatca

SEQ ID NO: 140352 - DNA, 15 bp, Homo sapiens
gatggacgagatcac

SEQ ID NO: 140353 - DNA, 15 bp, Homo sapiens
atggacgagatcact

SEQ ID NO: 140354 - DNA, 15 bp, Homo sapiens
tggacgagatcactt

SEQ ID NO: 140355 - DNA, 15 bp, Homo sapiens
ggacgagatcacttc

SEQ ID NO: 140356 - DNA, 15 bp, Homo sapiens
gacgagatcacttca

SEQ ID NO: 140357 - DNA, 15 bp, Homo sapiens
acgagatcacttcaa

SEQ ID NO: 140358 - DNA, 15 bp, Homo sapiens
cgagatcacttcaaa

SEQ ID NO: 140359 - DNA, 15 bp, Homo sapiens
gagatcacttcaaag

SEQ ID NO: 140360 - DNA, 15 bp, Homo sapiens
agatcacttcaaagg

SEQ ID NO: 140361 - DNA, 15 bp, Homo sapiens
gatcacttcaaaggt

SEQ ID NO: 140362 - DNA, 15 bp, Homo sapiens
atcacttcaaaggtc

SEQ ID NO: 140363 - DNA, 15 bp, Homo sapiens
tcacttcaaaggtct

SEQ ID NO: 140364 - DNA, 15 bp, Homo sapiens
cacttcaaaggtctg

SEQ ID NO: 140365 - DNA, 15 bp, Homo sapiens
acttcaaaggtctgt

SEQ ID NO: 140366 - DNA, 15 bp, Homo sapiens
cttcaaaggtctgta

SEQ ID NO: 140367 - DNA, 15 bp, Homo sapiens
ttcaaaggtctgtaa

SEQ ID NO: 140368 - DNA, 15 bp, Homo sapiens
tcaaaggtctgtaat

SEQ ID NO: 140369 - DNA, 15 bp, Homo sapiens
caaaggtctgtaatc

SEQ ID NO: 140370 - DNA, 15 bp, Homo sapiens
aaaggtctgtaatcc

SEQ ID NO: 140371 - DNA, 15 bp, Homo sapiens
aaggtctgtaatccc

SEQ ID NO: 140372 - DNA, 15 bp, Homo sapiens
aggtctgtaatccca

SEQ ID NO: 140373 - DNA, 15 bp, Homo sapiens
ggtctgtaatcccac

SEQ ID NO: 140374 - DNA, 15 bp, Homo sapiens
gtctgtaatcccacg

SEQ ID NO: 140375 - DNA, 15 bp, Homo sapiens
tctgtaatcccacgt

SEQ ID NO: 140376 - DNA, 15 bp, Homo sapiens
ctgtaatcccacgtc

SEQ ID NO: 140377 - DNA, 15 bp, Homo sapiens
tgtaatcccacgtct

SEQ ID NO: 140378 - DNA, 15 bp, Homo sapiens
gtaatcccacgtcta

SEQ ID NO: 140379 - DNA, 15 bp, Homo sapiens
taatcccacgtctat

SEQ ID NO: 140380 - DNA, 15 bp, Homo sapiens
aatcccacgtctata

SEQ ID NO: 140381 - DNA, 15 bp, Homo sapiens
atcccacgtctataa

SEQ ID NO: 140382 - DNA, 15 bp, Homo sapiens
tcccacgtctataat

SEQ ID NO: 140383 - DNA, 15 bp, Homo sapiens
cccacgtctataatc

SEQ ID NO: 140384 - DNA, 15 bp, Homo sapiens
ccacgtctataatcc

SEQ ID NO: 140385 - DNA, 15 bp, Homo sapiens
cacgtctataatccc

SEQ ID NO: 140386 - DNA, 15 bp, Homo sapiens
acgtctataatccca

SEQ ID NO: 140387 - DNA, 15 bp, Homo sapiens
cgtctataatcccag

SEQ ID NO: 140388 - DNA, 15 bp, Homo sapiens
gtctataatcccagc

SEQ ID NO: 140389 - DNA, 15 bp, Homo sapiens
tctataatcccagca

SEQ ID NO: 140390 - DNA, 15 bp, Homo sapiens
ctataatcccagcac

SEQ ID NO: 140391 - DNA, 15 bp, Homo sapiens
tataatcccagcact

SEQ ID NO: 140392 - DNA, 15 bp, Homo sapiens
ataatcccagcactt

SEQ ID NO: 140393 - DNA, 15 bp, Homo sapiens
gggaggccaaggcgg

SEQ ID NO: 140394 - DNA, 15 bp, Homo sapiens
ggaggccaaggcggg

SEQ ID NO: 140395 - DNA, 15 bp, Homo sapiens
gaggccaaggcggga

SEQ ID NO: 140396 - DNA, 15 bp, Homo sapiens
aggccaaggcgggaa

SEQ ID NO: 140397 - DNA, 15 bp, Homo sapiens
ggccaaggcgggaaa

SEQ ID NO: 140398 - DNA, 15 bp, Homo sapiens
gccaaggcgggaaaa

SEQ ID NO: 140399 - DNA, 15 bp, Homo sapiens
ccaaggcgggaaaat

SEQ ID NO: 140400 - DNA, 15 bp, Homo sapiens
caaggcgggaaaatc

SEQ ID NO: 140401 - DNA, 15 bp, Homo sapiens
aaggcgggaaaatca

SEQ ID NO: 140402 - DNA, 15 bp, Homo sapiens
aggcgggaaaatcac

SEQ ID NO: 140403 - DNA, 15 bp, Homo sapiens
ggcgggaaaatcact

SEQ ID NO: 140404 - DNA, 15 bp, Homo sapiens
gcgggaaaatcactt

SEQ ID NO: 140405 - DNA, 15 bp, Homo sapiens
cgggaaaatcacttg

SEQ ID NO: 140406 - DNA, 15 bp, Homo sapiens
gggaaaatcacttga

SEQ ID NO: 140407 - DNA, 15 bp, Homo sapiens
ggaaaatcacttgag

SEQ ID NO: 140408 - DNA, 15 bp, Homo sapiens
gaaaatcacttgagg

SEQ ID NO: 140409 - DNA, 15 bp, Homo sapiens
aaaatcacttgaggt

SEQ ID NO: 140410 - DNA, 15 bp, Homo sapiens
aaatcacttgaggtc

SEQ ID NO: 140411 - DNA, 15 bp, Homo sapiens
ggagttcgagaccat

SEQ ID NO: 140412 - DNA, 15 bp, Homo sapiens
gagttcgagaccatc

SEQ ID NO: 140413 - DNA, 15 bp, Homo sapiens
agttcgagaccatcc

SEQ ID NO: 140414 - DNA, 15 bp, Homo sapiens
gttcgagaccatcct

SEQ ID NO: 140415 - DNA, 15 bp, Homo sapiens
ttcgagaccatcctg

SEQ ID NO: 140416 - DNA, 15 bp, Homo sapiens
ctggccaacatggca

SEQ ID NO: 140417 - DNA, 15 bp, Homo sapiens
tggccaacatggcaa

SEQ ID NO: 140418 - DNA, 15 bp, Homo sapiens
ggccaacatggcaaa

SEQ ID NO: 140419 - DNA, 15 bp, Homo sapiens
gccaacatggcaaag

SEQ ID NO: 140420 - DNA, 15 bp, Homo sapiens
ccaacatggcaaagc

SEQ ID NO: 140421 - DNA, 15 bp, Homo sapiens
caacatggcaaagcc

SEQ ID NO: 140422 - DNA, 15 bp, Homo sapiens
aacatggcaaagcct

SEQ ID NO: 140423 - DNA, 15 bp, Homo sapiens
acatggcaaagcctg

SEQ ID NO: 140424 - DNA, 15 bp, Homo sapiens
catggcaaagcctgt

SEQ ID NO: 140425 - DNA, 15 bp, Homo sapiens
atggcaaagcctgtc

SEQ ID NO: 140426 - DNA, 15 bp, Homo sapiens
tggcaaagcctgtct

SEQ ID NO: 140427 - DNA, 15 bp, Homo sapiens
ggcaaagcctgtctc

SEQ ID NO: 140428 - DNA, 15 bp, Homo sapiens
gcaaagcctgtctct

SEQ ID NO: 140429 - DNA, 15 bp, Homo sapiens
caaagcctgtctcta

SEQ ID NO: 140430 - DNA, 15 bp, Homo sapiens
aaagcctgtctctac

SEQ ID NO: 140431 - DNA, 15 bp, Homo sapiens
aagcctgtctctact

SEQ ID NO: 140432 - DNA, 15 bp, Homo sapiens
agcctgtctctacta

SEQ ID NO: 140433 - DNA, 15 bp, Homo sapiens
gcctgtctctactaa

SEQ ID NO: 140434 - DNA, 15 bp, Homo sapiens
cctgtctctactaaa

SEQ ID NO: 140435 - DNA, 15 bp, Homo sapiens
ctgtctctactaaaa

SEQ ID NO: 140436 - DNA, 15 bp, Homo sapiens
tgtctctactaaaaa

SEQ ID NO: 140437 - DNA, 15 bp, Homo sapiens
tctactaaaaatatg

SEQ ID NO: 140438 - DNA, 15 bp, Homo sapiens
ctactaaaaatatga

SEQ ID NO: 140439 - DNA, 15 bp, Homo sapiens
tactaaaaatatgaa

SEQ ID NO: 140440 - DNA, 15 bp, Homo sapiens
actaaaaatatgaaa

SEQ ID NO: 140441 - DNA, 15 bp, Homo sapiens
ctaaaaatatgaaaa

SEQ ID NO: 140442 - DNA, 15 bp, Homo sapiens
taaaaatatgaaaat

SEQ ID NO: 140443 - DNA, 15 bp, Homo sapiens
aaaaatatgaaaatt

SEQ ID NO: 140444 - DNA, 15 bp, Homo sapiens
aaaatatgaaaatta

SEQ ID NO: 140445 - DNA, 15 bp, Homo sapiens
aaatatgaaaattag

SEQ ID NO: 140446 - DNA, 15 bp, Homo sapiens
aatatgaaaattagc

SEQ ID NO: 140447 - DNA, 15 bp, Homo sapiens
atatgaaaattagct

SEQ ID NO: 140448 - DNA, 15 bp, Homo sapiens
tatgaaaattagctc

SEQ ID NO: 140449 - DNA, 15 bp, Homo sapiens
atgaaaattagctca

SEQ ID NO: 140450 - DNA, 15 bp, Homo sapiens
tgaaaattagctcag

SEQ ID NO: 140451 - DNA, 15 bp, Homo sapiens
gaaaattagctcagc

SEQ ID NO: 140452 - DNA, 15 bp, Homo sapiens
aaaattagctcagcg

SEQ ID NO: 140453 - DNA, 15 bp, Homo sapiens
aaattagctcagcgt

SEQ ID NO: 140454 - DNA, 15 bp, Homo sapiens
aattagctcagcgtg

SEQ ID NO: 140455 - DNA, 15 bp, Homo sapiens
attagctcagcgtgg

SEQ ID NO: 140456 - DNA, 15 bp, Homo sapiens
ttagctcagcgtggt

SEQ ID NO: 140457 - DNA, 15 bp, Homo sapiens
tagctcagcgtggtg

SEQ ID NO: 140458 - DNA, 15 bp, Homo sapiens
agctcagcgtggtgg

SEQ ID NO: 140459 - DNA, 15 bp, Homo sapiens
gctcagcgtggtggc

SEQ ID NO: 140460 - DNA, 15 bp, Homo sapiens
ctcagcgtggtggca

SEQ ID NO: 140461 - DNA, 15 bp, Homo sapiens
tcagcgtggtggcat

SEQ ID NO: 140462 - DNA, 15 bp, Homo sapiens
cagcgtggtggcatg

SEQ ID NO: 140463 - DNA, 15 bp, Homo sapiens
agcgtggtggcatgc

SEQ ID NO: 140464 - DNA, 15 bp, Homo sapiens
gcgtggtggcatgct

SEQ ID NO: 140465 - DNA, 15 bp, Homo sapiens
cgtggtggcatgctc

SEQ ID NO: 140466 - DNA, 15 bp, Homo sapiens
gtggtggcatgctcc

SEQ ID NO: 140467 - DNA, 15 bp, Homo sapiens
tggtggcatgctcct

SEQ ID NO: 140468 - DNA, 15 bp, Homo sapiens
ggtggcatgctcctg

SEQ ID NO: 140469 - DNA, 15 bp, Homo sapiens
gtggcatgctcctgt

SEQ ID NO: 140470 - DNA, 15 bp, Homo sapiens
tggcatgctcctgta

SEQ ID NO: 140471 - DNA, 15 bp, Homo sapiens
ggcatgctcctgtag

SEQ ID NO: 140472 - DNA, 15 bp, Homo sapiens
gcatgctcctgtagt

SEQ ID NO: 140473 - DNA, 15 bp, Homo sapiens
catgctcctgtagtc

SEQ ID NO: 140474 - DNA, 15 bp, Homo sapiens
atgctcctgtagtcc

SEQ ID NO: 140475 - DNA, 15 bp, Homo sapiens
tgctcctgtagtccc

SEQ ID NO: 140476 - DNA, 15 bp, Homo sapiens
gctcctgtagtccca

SEQ ID NO: 140477 - DNA, 15 bp, Homo sapiens
ctcctgtagtcccag

SEQ ID NO: 140478 - DNA, 15 bp, Homo sapiens
tcctgtagtcccagc

SEQ ID NO: 140479 - DNA, 15 bp, Homo sapiens
gtcccagctactcgt

SEQ ID NO: 140480 - DNA, 15 bp, Homo sapiens
tcccagctactcgtg

SEQ ID NO: 140481 - DNA, 15 bp, Homo sapiens
cccagctactcgtga

SEQ ID NO: 140482 - DNA, 15 bp, Homo sapiens
ccagctactcgtgag

SEQ ID NO: 140483 - DNA, 15 bp, Homo sapiens
cagctactcgtgagg

SEQ ID NO: 140484 - DNA, 15 bp, Homo sapiens
agctactcgtgaggc

SEQ ID NO: 140485 - DNA, 15 bp, Homo sapiens
gctactcgtgaggct

SEQ ID NO: 140486 - DNA, 15 bp, Homo sapiens
ctactcgtgaggctg

SEQ ID NO: 140487 - DNA, 15 bp, Homo sapiens
tactcgtgaggctga

SEQ ID NO: 140488 - DNA, 15 bp, Homo sapiens
actcgtgaggctgag

SEQ ID NO: 140489 - DNA, 15 bp, Homo sapiens
ctcgtgaggctgaga

SEQ ID NO: 140490 - DNA, 15 bp, Homo sapiens
tcgtgaggctgagac

SEQ ID NO: 140491 - DNA, 15 bp, Homo sapiens
cgtgaggctgagaca

SEQ ID NO: 140492 - DNA, 15 bp, Homo sapiens
gtgaggctgagacag

SEQ ID NO: 140493 - DNA, 15 bp, Homo sapiens
tgaggctgagacagg

SEQ ID NO: 140494 - DNA, 15 bp, Homo sapiens
tgagacaggagaatc

SEQ ID NO: 140495 - DNA, 15 bp, Homo sapiens
gagacaggagaatcg

SEQ ID NO: 140496 - DNA, 15 bp, Homo sapiens
agacaggagaatcgt

SEQ ID NO: 140497 - DNA, 15 bp, Homo sapiens
gacaggagaatcgtt

SEQ ID NO: 140498 - DNA, 15 bp, Homo sapiens
acaggagaatcgttt

SEQ ID NO: 140499 - DNA, 15 bp, Homo sapiens
caggagaatcgtttg

SEQ ID NO: 140500 - DNA, 15 bp, Homo sapiens
aggagaatcgtttga

SEQ ID NO: 140501 - DNA, 15 bp, Homo sapiens
ggagaatcgtttgaa

SEQ ID NO: 140502 - DNA, 15 bp, Homo sapiens
gagaatcgtttgaac

SEQ ID NO: 140503 - DNA, 15 bp, Homo sapiens
agaatcgtttgaacc

SEQ ID NO: 140504 - DNA, 15 bp, Homo sapiens
gaatcgtttgaacct

SEQ ID NO: 140505 - DNA, 15 bp, Homo sapiens
aatcgtttgaacctg

SEQ ID NO: 140506 - DNA, 15 bp, Homo sapiens
atcgtttgaacctgg

SEQ ID NO: 140507 - DNA, 15 bp, Homo sapiens
tcgtttgaacctggg

SEQ ID NO: 140508 - DNA, 15 bp, Homo sapiens
cgtttgaacctggga

SEQ ID NO: 140509 - DNA, 15 bp, Homo sapiens
gtttgaacctgggag

SEQ ID NO: 140510 - DNA, 15 bp, Homo sapiens
tttgaacctgggagg

SEQ ID NO: 140511 - DNA, 15 bp, Homo sapiens
ttgcagtgagccaat

SEQ ID NO: 140512 - DNA, 15 bp, Homo sapiens
tgcagtgagccaata

SEQ ID NO: 140513 - DNA, 15 bp, Homo sapiens
gcagtgagccaatat

SEQ ID NO: 140514 - DNA, 15 bp, Homo sapiens
cagtgagccaatatc

SEQ ID NO: 140515 - DNA, 15 bp, Homo sapiens
agtgagccaatatca

SEQ ID NO: 140516 - DNA, 15 bp, Homo sapiens
gtgagccaatatcac

SEQ ID NO: 140517 - DNA, 15 bp, Homo sapiens
tgagccaatatcacg

SEQ ID NO: 140518 - DNA, 15 bp, Homo sapiens
gagccaatatcacgc

SEQ ID NO: 140519 - DNA, 15 bp, Homo sapiens
agccaatatcacgcc

SEQ ID NO: 140520 - DNA, 15 bp, Homo sapiens
gccaatatcacgcca

SEQ ID NO: 140521 - DNA, 15 bp, Homo sapiens
ccaatatcacgccat

SEQ ID NO: 140522 - DNA, 15 bp, Homo sapiens
caatatcacgccatt

SEQ ID NO: 140523 - DNA, 15 bp, Homo sapiens
aatatcacgccattg

SEQ ID NO: 140524 - DNA, 15 bp, Homo sapiens
atatcacgccattgc

SEQ ID NO: 140525 - DNA, 15 bp, Homo sapiens
tatcacgccattgca

SEQ ID NO: 140526 - DNA, 15 bp, Homo sapiens
atcacgccattgcac

SEQ ID NO: 140527 - DNA, 15 bp, Homo sapiens
tcacgccattgcact

SEQ ID NO: 140528 - DNA, 15 bp, Homo sapiens
cacgccattgcactc

SEQ ID NO: 140529 - DNA, 15 bp, Homo sapiens
acgccattgcactcc

SEQ ID NO: 140530 - DNA, 15 bp, Homo sapiens
gcactccagcctggc

SEQ ID NO: 140531 - DNA, 15 bp, Homo sapiens
cactccagcctggct

SEQ ID NO: 140532 - DNA, 15 bp, Homo sapiens
actccagcctggctg

SEQ ID NO: 140533 - DNA, 15 bp, Homo sapiens
ctccagcctggctga

SEQ ID NO: 140534 - DNA, 15 bp, Homo sapiens
tccagcctggctgac

SEQ ID NO: 140535 - DNA, 15 bp, Homo sapiens
ccagcctggctgaca

SEQ ID NO: 140536 - DNA, 15 bp, Homo sapiens
cagcctggctgacag

SEQ ID NO: 140537 - DNA, 15 bp, Homo sapiens
agcctggctgacaga

SEQ ID NO: 140538 - DNA, 15 bp, Homo sapiens
gcctggctgacagag

SEQ ID NO: 140539 - DNA, 15 bp, Homo sapiens
cctggctgacagagt

SEQ ID NO: 140540 - DNA, 15 bp, Homo sapiens
ctggctgacagagtg

SEQ ID NO: 140541 - DNA, 15 bp, Homo sapiens
tggctgacagagtga

SEQ ID NO: 140542 - DNA, 15 bp, Homo sapiens
ggctgacagagtgag

SEQ ID NO: 140543 - DNA, 15 bp, Homo sapiens
gctgacagagtgaga

SEQ ID NO: 140544 - DNA, 15 bp, Homo sapiens
ctgacagagtgagac

SEQ ID NO: 140545 - DNA, 15 bp, Homo sapiens
tgacagagtgagact

SEQ ID NO: 140546 - DNA, 15 bp, Homo sapiens
aaaaaaaaaaagaat

SEQ ID NO: 140547 - DNA, 15 bp, Homo sapiens
aaaaaaaaaagaatt

SEQ ID NO: 140548 - DNA, 15 bp, Homo sapiens
aaaaaaaaagaattt

SEQ ID NO: 140549 - DNA, 15 bp, Homo sapiens
aaaaaaaagaatttt

SEQ ID NO: 140550 - DNA, 15 bp, Homo sapiens
aaaaaaagaatttta

SEQ ID NO: 140551 - DNA, 15 bp, Homo sapiens
aaaaaagaattttat

SEQ ID NO: 140552 - DNA, 15 bp, Homo sapiens
aaaaagaattttata

SEQ ID NO: 140553 - DNA, 15 bp, Homo sapiens
aaaagaattttataa

SEQ ID NO: 140554 - DNA, 15 bp, Homo sapiens
aaagaattttataaa

SEQ ID NO: 140555 - DNA, 15 bp, Homo sapiens
gaattttataaaatc

SEQ ID NO: 140556 - DNA, 15 bp, Homo sapiens
aattttataaaatca

SEQ ID NO: 140557 - DNA, 15 bp, Homo sapiens
attttataaaatcag

SEQ ID NO: 140558 - DNA, 15 bp, Homo sapiens
ttttataaaatcagg

SEQ ID NO: 140559 - DNA, 15 bp, Homo sapiens
tttataaaatcagga

SEQ ID NO: 140560 - DNA, 15 bp, Homo sapiens
ttataaaatcaggaa

SEQ ID NO: 140561 - DNA, 15 bp, Homo sapiens
tataaaatcaggaaa

SEQ ID NO: 140562 - DNA, 15 bp, Homo sapiens
ataaaatcaggaaat

SEQ ID NO: 140563 - DNA, 15 bp, Homo sapiens
taaaatcaggaaata

SEQ ID NO: 140564 - DNA, 15 bp, Homo sapiens
aaaatcaggaaataa

SEQ ID NO: 140565 - DNA, 15 bp, Homo sapiens
aaatcaggaaataat

SEQ ID NO: 140566 - DNA, 15 bp, Homo sapiens
aatcaggaaataata

SEQ ID NO: 140567 - DNA, 15 bp, Homo sapiens
atcaggaaataatat

SEQ ID NO: 140568 - DNA, 15 bp, Homo sapiens
tcaggaaataatatt

SEQ ID NO: 140569 - DNA, 15 bp, Homo sapiens
caggaaataatatta

SEQ ID NO: 140570 - DNA, 15 bp, Homo sapiens
aggaaataatattag

SEQ ID NO: 140571 - DNA, 15 bp, Homo sapiens
ggaaataatattagt

SEQ ID NO: 140572 - DNA, 15 bp, Homo sapiens
gaaataatattagtg

SEQ ID NO: 140573 - DNA, 15 bp, Homo sapiens
aaataatattagtgt

SEQ ID NO: 140574 - DNA, 15 bp, Homo sapiens
aataatattagtgtt

SEQ ID NO: 140575 - DNA, 15 bp, Homo sapiens
ataatattagtgttt

SEQ ID NO: 140576 - DNA, 15 bp, Homo sapiens
taatattagtgttta

SEQ ID NO: 140577 - DNA, 15 bp, Homo sapiens
aatattagtgtttat

SEQ ID NO: 140578 - DNA, 15 bp, Homo sapiens
atattagtgtttatg

SEQ ID NO: 140579 - DNA, 15 bp, Homo sapiens
tattagtgtttatgt

SEQ ID NO: 140580 - DNA, 15 bp, Homo sapiens
attagtgtttatgtt

SEQ ID NO: 140581 - DNA, 15 bp, Homo sapiens
ttagtgtttatgttg

SEQ ID NO: 140582 - DNA, 15 bp, Homo sapiens
tagtgtttatgttga

SEQ ID NO: 140583 - DNA, 15 bp, Homo sapiens
agtgtttatgttgaa

SEQ ID NO: 140584 - DNA, 15 bp, Homo sapiens
gtgtttatgttgaat

SEQ ID NO: 140585 - DNA, 15 bp, Homo sapiens
tgtttatgttgaatt

SEQ ID NO: 140586 - DNA, 15 bp, Homo sapiens
gtttatgttgaattt

SEQ ID NO: 140587 - DNA, 15 bp, Homo sapiens
tttatgttgaatttt

SEQ ID NO: 140588 - DNA, 15 bp, Homo sapiens
ttatgttgaatttta

SEQ ID NO: 140589 - DNA, 15 bp, Homo sapiens
tatgttgaattttaa

SEQ ID NO: 140590 - DNA, 15 bp, Homo sapiens
atgttgaattttaac

SEQ ID NO: 140591 - DNA, 15 bp, Homo sapiens
tgttgaattttaact

SEQ ID NO: 140592 - DNA, 15 bp, Homo sapiens
gttgaattttaactt

SEQ ID NO: 140593 - DNA, 15 bp, Homo sapiens
ttgaattttaacttt

SEQ ID NO: 140594 - DNA, 15 bp, Homo sapiens
tgaattttaacttta

SEQ ID NO: 140595 - DNA, 15 bp, Homo sapiens
gaattttaactttag

SEQ ID NO: 140596 - DNA, 15 bp, Homo sapiens
aattttaactttaga

SEQ ID NO: 140597 - DNA, 15 bp, Homo sapiens
attttaactttagaa

SEQ ID NO: 140598 - DNA, 15 bp, Homo sapiens
ttttaactttagaat

SEQ ID NO: 140599 - DNA, 15 bp, Homo sapiens
tttaactttagaatc

SEQ ID NO: 140600 - DNA, 15 bp, Homo sapiens
ttaactttagaatca

SEQ ID NO: 140601 - DNA, 15 bp, Homo sapiens
taactttagaatcat

SEQ ID NO: 140602 - DNA, 15 bp, Homo sapiens
aactttagaatcata

SEQ ID NO: 140603 - DNA, 15 bp, Homo sapiens
actttagaatcatag

SEQ ID NO: 140604 - DNA, 15 bp, Homo sapiens
ctttagaatcataga

SEQ ID NO: 140605 - DNA, 15 bp, Homo sapiens
tttagaatcatagaa

SEQ ID NO: 140606 - DNA, 15 bp, Homo sapiens
ttagaatcatagaaa

SEQ ID NO: 140607 - DNA, 15 bp, Homo sapiens
tagaatcatagaaaa

SEQ ID NO: 140608 - DNA, 15 bp, Homo sapiens
agaatcatagaaaac

SEQ ID NO: 140609 - DNA, 15 bp, Homo sapiens
gaatcatagaaaact

SEQ ID NO: 140610 - DNA, 15 bp, Homo sapiens
aatcatagaaaactt

SEQ ID NO: 140611 - DNA, 15 bp, Homo sapiens
atcatagaaaacttc

SEQ ID NO: 140612 - DNA, 15 bp, Homo sapiens
tcatagaaaacttcc

SEQ ID NO: 140613 - DNA, 15 bp, Homo sapiens
catagaaaacttcct

SEQ ID NO: 140614 - DNA, 15 bp, Homo sapiens
atagaaaacttcctc

SEQ ID NO: 140615 - DNA, 15 bp, Homo sapiens
tagaaaacttcctct

SEQ ID NO: 140616 - DNA, 15 bp, Homo sapiens
agaaaacttcctctg

SEQ ID NO: 140617 - DNA, 15 bp, Homo sapiens
gaaaacttcctctgg

SEQ ID NO: 140618 - DNA, 15 bp, Homo sapiens
aaaacttcctctggc

SEQ ID NO: 140619 - DNA, 15 bp, Homo sapiens
aaacttcctctggca

SEQ ID NO: 140620 - DNA, 15 bp, Homo sapiens
aacttcctctggcat

SEQ ID NO: 140621 - DNA, 15 bp, Homo sapiens
acttcctctggcatc

SEQ ID NO: 140622 - DNA, 15 bp, Homo sapiens
cttcctctggcatca

SEQ ID NO: 140623 - DNA, 15 bp, Homo sapiens
ttcctctggcatcat

SEQ ID NO: 140624 - DNA, 15 bp, Homo sapiens
tcctctggcatcatt

SEQ ID NO: 140625 - DNA, 15 bp, Homo sapiens
cctctggcatcatta

SEQ ID NO: 140626 - DNA, 15 bp, Homo sapiens
ctctggcatcattat

SEQ ID NO: 140627 - DNA, 15 bp, Homo sapiens
tctggcatcattatt

SEQ ID NO: 140628 - DNA, 15 bp, Homo sapiens
ctggcatcattatta

SEQ ID NO: 140629 - DNA, 15 bp, Homo sapiens
tggcatcattattag

SEQ ID NO: 140630 - DNA, 15 bp, Homo sapiens
ggcatcattattaga

SEQ ID NO: 140631 - DNA, 15 bp, Homo sapiens
gcatcattattagac

SEQ ID NO: 140632 - DNA, 15 bp, Homo sapiens
catcattattagaca

SEQ ID NO: 140633 - DNA, 15 bp, Homo sapiens
atcattattagacag

SEQ ID NO: 140634 - DNA, 15 bp, Homo sapiens
tcattattagacagc

SEQ ID NO: 140635 - DNA, 15 bp, Homo sapiens
cattattagacagct

SEQ ID NO: 140636 - DNA, 15 bp, Homo sapiens
attattagacagctc

SEQ ID NO: 140637 - DNA, 15 bp, Homo sapiens
ttattagacagctct

SEQ ID NO: 140638 - DNA, 15 bp, Homo sapiens
tattagacagctctt

SEQ ID NO: 140639 - DNA, 15 bp, Homo sapiens
attagacagctcttg

SEQ ID NO: 140640 - DNA, 15 bp, Homo sapiens
ttagacagctcttgt

SEQ ID NO: 140641 - DNA, 15 bp, Homo sapiens
tagacagctcttgtg

SEQ ID NO: 140642 - DNA, 15 bp, Homo sapiens
agacagctcttgtgc

SEQ ID NO: 140643 - DNA, 15 bp, Homo sapiens
gacagctcttgtgca

SEQ ID NO: 140644 - DNA, 15 bp, Homo sapiens
acagctcttgtgcag

SEQ ID NO: 140645 - DNA, 15 bp, Homo sapiens
cagctcttgtgcagt

SEQ ID NO: 140646 - DNA, 15 bp, Homo sapiens
agctcttgtgcagtg

SEQ ID NO: 140647 - DNA, 15 bp, Homo sapiens
gctcttgtgcagtgg

SEQ ID NO: 140648 - DNA, 15 bp, Homo sapiens
ctcttgtgcagtggg

SEQ ID NO: 140649 - DNA, 15 bp, Homo sapiens
tcttgtgcagtgggt

SEQ ID NO: 140650 - DNA, 15 bp, Homo sapiens
cttgtgcagtgggta

SEQ ID NO: 140651 - DNA, 15 bp, Homo sapiens
ttgtgcagtgggtag

SEQ ID NO: 140652 - DNA, 15 bp, Homo sapiens
tgtgcagtgggtagc

SEQ ID NO: 140653 - DNA, 15 bp, Homo sapiens
gtgcagtgggtagca

SEQ ID NO: 140654 - DNA, 15 bp, Homo sapiens
tgcagtgggtagcac

SEQ ID NO: 140655 - DNA, 15 bp, Homo sapiens
gcagtgggtagcacc

SEQ ID NO: 140656 - DNA, 15 bp, Homo sapiens
cagtgggtagcacca

SEQ ID NO: 140657 - DNA, 15 bp, Homo sapiens
agtgggtagcaccag

SEQ ID NO: 140658 - DNA, 15 bp, Homo sapiens
gtgggtagcaccaga

SEQ ID NO: 140659 - DNA, 15 bp, Homo sapiens
tgggtagcaccagac

SEQ ID NO: 140660 - DNA, 15 bp, Homo sapiens
gggtagcaccagacc

SEQ ID NO: 140661 - DNA, 15 bp, Homo sapiens
ggtagcaccagaccc

SEQ ID NO: 140662 - DNA, 15 bp, Homo sapiens
gtagcaccagaccca

SEQ ID NO: 140663 - DNA, 15 bp, Homo sapiens
tagcaccagacccag

SEQ ID NO: 140664 - DNA, 15 bp, Homo sapiens
agcaccagacccagc

SEQ ID NO: 140665 - DNA, 15 bp, Homo sapiens
gcaccagacccagct

SEQ ID NO: 140666 - DNA, 15 bp, Homo sapiens
caccagacccagctt

SEQ ID NO: 140667 - DNA, 15 bp, Homo sapiens
accagacccagcttg

SEQ ID NO: 140668 - DNA, 15 bp, Homo sapiens
ccagacccagcttgc

SEQ ID NO: 140669 - DNA, 15 bp, Homo sapiens
cagacccagcttgca

SEQ ID NO: 140670 - DNA, 15 bp, Homo sapiens
agacccagcttgcat

SEQ ID NO: 140671 - DNA, 15 bp, Homo sapiens
gacccagcttgcatg

SEQ ID NO: 140672 - DNA, 15 bp, Homo sapiens
acccagcttgcatgg

SEQ ID NO: 140673 - DNA, 15 bp, Homo sapiens
cccagcttgcatggt

SEQ ID NO: 140674 - DNA, 15 bp, Homo sapiens
ccagcttgcatggtt

SEQ ID NO: 140675 - DNA, 15 bp, Homo sapiens
cagcttgcatggtta

SEQ ID NO: 140676 - DNA, 15 bp, Homo sapiens
agcttgcatggttat

SEQ ID NO: 140677 - DNA, 15 bp, Homo sapiens
gcttgcatggttatt

SEQ ID NO: 140678 - DNA, 15 bp, Homo sapiens
cttgcatggttattg

SEQ ID NO: 140679 - DNA, 15 bp, Homo sapiens
ttgcatggttattga

SEQ ID NO: 140680 - DNA, 15 bp, Homo sapiens
tgcatggttattgat

SEQ ID NO: 140681 - DNA, 15 bp, Homo sapiens
gcatggttattgatt

SEQ ID NO: 140682 - DNA, 15 bp, Homo sapiens
catggttattgattt

SEQ ID NO: 140683 - DNA, 15 bp, Homo sapiens
atggttattgatttt

SEQ ID NO: 140684 - DNA, 15 bp, Homo sapiens
tggttattgattttt

SEQ ID NO: 140685 - DNA, 15 bp, Homo sapiens
ggttattgatttttc

SEQ ID NO: 140686 - DNA, 15 bp, Homo sapiens
gttattgatttttca

SEQ ID NO: 140687 - DNA, 15 bp, Homo sapiens
ttattgatttttcag

SEQ ID NO: 140688 - DNA, 15 bp, Homo sapiens
tattgatttttcaga

SEQ ID NO: 140689 - DNA, 15 bp, Homo sapiens
attgatttttcagag

SEQ ID NO: 140690 - DNA, 15 bp, Homo sapiens
ttgatttttcagaga

SEQ ID NO: 140691 - DNA, 15 bp, Homo sapiens
tgatttttcagagac

SEQ ID NO: 140692 - DNA, 15 bp, Homo sapiens
gatttttcagagaca

SEQ ID NO: 140693 - DNA, 15 bp, Homo sapiens
atttttcagagacac

SEQ ID NO: 140694 - DNA, 15 bp, Homo sapiens
tttttcagagacact

SEQ ID NO: 140695 - DNA, 15 bp, Homo sapiens
ttttcagagacactt

SEQ ID NO: 140696 - DNA, 15 bp, Homo sapiens
tttcagagacacttt

SEQ ID NO: 140697 - DNA, 15 bp, Homo sapiens
ttcagagacactttt

SEQ ID NO: 140698 - DNA, 15 bp, Homo sapiens
tcagagacacttttt

SEQ ID NO: 140699 - DNA, 15 bp, Homo sapiens
cagagacactttttg

SEQ ID NO: 140700 - DNA, 15 bp, Homo sapiens
agagacactttttga

SEQ ID NO: 140701 - DNA, 15 bp, Homo sapiens
gagacactttttgag

SEQ ID NO: 140702 - DNA, 15 bp, Homo sapiens
agacactttttgagc

SEQ ID NO: 140703 - DNA, 15 bp, Homo sapiens
gacactttttgagct

SEQ ID NO: 140704 - DNA, 15 bp, Homo sapiens
acactttttgagctt

SEQ ID NO: 140705 - DNA, 15 bp, Homo sapiens
cactttttgagctta

SEQ ID NO: 140706 - DNA, 15 bp, Homo sapiens
actttttgagcttat

SEQ ID NO: 140707 - DNA, 15 bp, Homo sapiens
ctttttgagcttatt

SEQ ID NO: 140708 - DNA, 15 bp, Homo sapiens
tttttgagcttattc

SEQ ID NO: 140709 - DNA, 15 bp, Homo sapiens
ttttgagcttattct

SEQ ID NO: 140710 - DNA, 15 bp, Homo sapiens
tttgagcttattctc

SEQ ID NO: 140711 - DNA, 15 bp, Homo sapiens
ttgagcttattctct

SEQ ID NO: 140712 - DNA, 15 bp, Homo sapiens
tgagcttattctctg

SEQ ID NO: 140713 - DNA, 15 bp, Homo sapiens
gagcttattctctgg

SEQ ID NO: 140714 - DNA, 15 bp, Homo sapiens
agcttattctctggc

SEQ ID NO: 140715 - DNA, 15 bp, Homo sapiens
gcttattctctggca

SEQ ID NO: 140716 - DNA, 15 bp, Homo sapiens
cttattctctggcag

SEQ ID NO: 140717 - DNA, 15 bp, Homo sapiens
ttattctctggcaga

SEQ ID NO: 140718 - DNA, 15 bp, Homo sapiens
tattctctggcagaa

SEQ ID NO: 140719 - DNA, 15 bp, Homo sapiens
attctctggcagaaa

SEQ ID NO: 140720 - DNA, 15 bp, Homo sapiens
ttctctggcagaaag

SEQ ID NO: 140721 - DNA, 15 bp, Homo sapiens
tctctggcagaaagg

SEQ ID NO: 140722 - DNA, 15 bp, Homo sapiens
ctctggcagaaaggg

SEQ ID NO: 140723 - DNA, 15 bp, Homo sapiens
tctggcagaaagggg

SEQ ID NO: 140724 - DNA, 15 bp, Homo sapiens
ctggcagaaagggga

SEQ ID NO: 140725 - DNA, 15 bp, Homo sapiens
tggcagaaaggggaa

SEQ ID NO: 140726 - DNA, 15 bp, Homo sapiens
ggcagaaaggggaac

SEQ ID NO: 140727 - DNA, 15 bp, Homo sapiens
gcagaaaggggaact

SEQ ID NO: 140728 - DNA, 15 bp, Homo sapiens
cagaaaggggaactg

SEQ ID NO: 140729 - DNA, 15 bp, Homo sapiens
agaaaggggaactgc

SEQ ID NO: 140730 - DNA, 15 bp, Homo sapiens
gaaaggggaactgct

SEQ ID NO: 140731 - DNA, 15 bp, Homo sapiens
aaaggggaactgctt

SEQ ID NO: 140732 - DNA, 15 bp, Homo sapiens
aaggggaactgcttc

SEQ ID NO: 140733 - DNA, 15 bp, Homo sapiens
aggggaactgcttcc

SEQ ID NO: 140734 - DNA, 15 bp, Homo sapiens
ggggaactgcttcct

SEQ ID NO: 140735 - DNA, 15 bp, Homo sapiens
gggaactgcttcctc

SEQ ID NO: 140736 - DNA, 15 bp, Homo sapiens
ggaactgcttcctcc

SEQ ID NO: 140737 - DNA, 15 bp, Homo sapiens
gaactgcttcctccc

SEQ ID NO: 140738 - DNA, 15 bp, Homo sapiens
aactgcttcctcccc

SEQ ID NO: 140739 - DNA, 15 bp, Homo sapiens
actgcttcctcccct

SEQ ID NO: 140740 - DNA, 15 bp, Homo sapiens
ctgcttcctccccta

SEQ ID NO: 140741 - DNA, 15 bp, Homo sapiens
tgcttcctcccctat

SEQ ID NO: 140742 - DNA, 15 bp, Homo sapiens
gcttcctcccctatc

SEQ ID NO: 140743 - DNA, 15 bp, Homo sapiens
cttcctcccctatct

SEQ ID NO: 140744 - DNA, 15 bp, Homo sapiens
ttcctcccctatctc

SEQ ID NO: 140745 - DNA, 15 bp, Homo sapiens
tcctcccctatctcg

SEQ ID NO: 140746 - DNA, 15 bp, Homo sapiens
cctcccctatctcgt

SEQ ID NO: 140747 - DNA, 15 bp, Homo sapiens
ctcccctatctcgtg

SEQ ID NO: 140748 - DNA, 15 bp, Homo sapiens
tcccctatctcgtgt

SEQ ID NO: 140749 - DNA, 15 bp, Homo sapiens
cccctatctcgtgtc

SEQ ID NO: 140750 - DNA, 15 bp, Homo sapiens
ccctatctcgtgtct

SEQ ID NO: 140751 - DNA, 15 bp, Homo sapiens
cctatctcgtgtctg

SEQ ID NO: 140752 - DNA, 15 bp, Homo sapiens
ctatctcgtgtctgc

SEQ ID NO: 140753 - DNA, 15 bp, Homo sapiens
tatctcgtgtctgca

SEQ ID NO: 140754 - DNA, 15 bp, Homo sapiens
atctcgtgtctgcat

SEQ ID NO: 140755 - DNA, 15 bp, Homo sapiens
tctcgtgtctgcata

SEQ ID NO: 140756 - DNA, 15 bp, Homo sapiens
ctcgtgtctgcatac

SEQ ID NO: 140757 - DNA, 15 bp, Homo sapiens
tcgtgtctgcatact

SEQ ID NO: 140758 - DNA, 15 bp, Homo sapiens
cgtgtctgcatacta

SEQ ID NO: 140759 - DNA, 15 bp, Homo sapiens
gtgtctgcatactag

SEQ ID NO: 140760 - DNA, 15 bp, Homo sapiens
tgtctgcatactagc

SEQ ID NO: 140761 - DNA, 15 bp, Homo sapiens
gtctgcatactagct

SEQ ID NO: 140762 - DNA, 15 bp, Homo sapiens
tctgcatactagctt

SEQ ID NO: 140763 - DNA, 15 bp, Homo sapiens
ctgcatactagcttg

SEQ ID NO: 140764 - DNA, 15 bp, Homo sapiens
tgcatactagcttgt

SEQ ID NO: 140765 - DNA, 15 bp, Homo sapiens
gcatactagcttgtc

SEQ ID NO: 140766 - DNA, 15 bp, Homo sapiens
catactagcttgtct

SEQ ID NO: 140767 - DNA, 15 bp, Homo sapiens
atactagcttgtctt

SEQ ID NO: 140768 - DNA, 15 bp, Homo sapiens
tactagcttgtcttt

SEQ ID NO: 140769 - DNA, 15 bp, Homo sapiens
actagcttgtcttta

SEQ ID NO: 140770 - DNA, 15 bp, Homo sapiens
ctagcttgtctttac

SEQ ID NO: 140771 - DNA, 15 bp, Homo sapiens
tagcttgtctttaca

SEQ ID NO: 140772 - DNA, 15 bp, Homo sapiens
agcttgtctttacaa

SEQ ID NO: 140773 - DNA, 15 bp, Homo sapiens
gcttgtctttacaag

SEQ ID NO: 140774 - DNA, 15 bp, Homo sapiens
cttgtctttacaaga

SEQ ID NO: 140775 - DNA, 15 bp, Homo sapiens
ttgtctttacaagaa

SEQ ID NO: 140776 - DNA, 15 bp, Homo sapiens
tgtctttacaagaag

SEQ ID NO: 140777 - DNA, 15 bp, Homo sapiens
gtctttacaagaagc

SEQ ID NO: 140778 - DNA, 15 bp, Homo sapiens
tctttacaagaagca

SEQ ID NO: 140779 - DNA, 15 bp, Homo sapiens
ctttacaagaagcag

SEQ ID NO: 140780 - DNA, 15 bp, Homo sapiens
tttacaagaagcaga

SEQ ID NO: 140781 - DNA, 15 bp, Homo sapiens
ttacaagaagcagaa

SEQ ID NO: 140782 - DNA, 15 bp, Homo sapiens
tacaagaagcagaag

SEQ ID NO: 140783 - DNA, 15 bp, Homo sapiens
acaagaagcagaagt

SEQ ID NO: 140784 - DNA, 15 bp, Homo sapiens
caagaagcagaagta

SEQ ID NO: 140785 - DNA, 15 bp, Homo sapiens
aagaagcagaagtag

SEQ ID NO: 140786 - DNA, 15 bp, Homo sapiens
agaagcagaagtagt

SEQ ID NO: 140787 - DNA, 15 bp, Homo sapiens
gaagcagaagtagtg

SEQ ID NO: 140788 - DNA, 15 bp, Homo sapiens
aagcagaagtagtgg

SEQ ID NO: 140789 - DNA, 15 bp, Homo sapiens
agcagaagtagtgga

SEQ ID NO: 140790 - DNA, 15 bp, Homo sapiens
gcagaagtagtggaa

SEQ ID NO: 140791 - DNA, 15 bp, Homo sapiens
cagaagtagtggaaa

SEQ ID NO: 140792 - DNA, 15 bp, Homo sapiens
agaagtagtggaaat

SEQ ID NO: 140793 - DNA, 15 bp, Homo sapiens
gaagtagtggaaatg

SEQ ID NO: 140794 - DNA, 15 bp, Homo sapiens
aagtagtggaaatgt

SEQ ID NO: 140795 - DNA, 15 bp, Homo sapiens
agtagtggaaatgtt

SEQ ID NO: 140796 - DNA, 15 bp, Homo sapiens
gtagtggaaatgttt

SEQ ID NO: 140797 - DNA, 15 bp, Homo sapiens
tagtggaaatgttta

SEQ ID NO: 140798 - DNA, 15 bp, Homo sapiens
agtggaaatgtttat

SEQ ID NO: 140799 - DNA, 15 bp, Homo sapiens
gtggaaatgtttatt

SEQ ID NO: 140800 - DNA, 15 bp, Homo sapiens
tggaaatgtttattc

SEQ ID NO: 140801 - DNA, 15 bp, Homo sapiens
ggaaatgtttattct

SEQ ID NO: 140802 - DNA, 15 bp, Homo sapiens
gaaatgtttattctt

SEQ ID NO: 140803 - DNA, 15 bp, Homo sapiens
aaatgtttattcttg

SEQ ID NO: 140804 - DNA, 15 bp, Homo sapiens
aatgtttattcttga

SEQ ID NO: 140805 - DNA, 15 bp, Homo sapiens
atgtttattcttgaa

SEQ ID NO: 140806 - DNA, 15 bp, Homo sapiens
tgtttattcttgaaa

SEQ ID NO: 140807 - DNA, 15 bp, Homo sapiens
gtttattcttgaaaa

SEQ ID NO: 140808 - DNA, 15 bp, Homo sapiens
tttattcttgaaaat

SEQ ID NO: 140809 - DNA, 15 bp, Homo sapiens
ttattcttgaaaata

SEQ ID NO: 140810 - DNA, 15 bp, Homo sapiens
tattcttgaaaataa

SEQ ID NO: 140811 - DNA, 15 bp, Homo sapiens
attcttgaaaataag

SEQ ID NO: 140812 - DNA, 15 bp, Homo sapiens
ttcttgaaaataagc

SEQ ID NO: 140813 - DNA, 15 bp, Homo sapiens
tcttgaaaataagct

SEQ ID NO: 140814 - DNA, 15 bp, Homo sapiens
cttgaaaataagctt

SEQ ID NO: 140815 - DNA, 15 bp, Homo sapiens
ttgaaaataagcttt

SEQ ID NO: 140816 - DNA, 15 bp, Homo sapiens
tgaaaataagctttt

SEQ ID NO: 140817 - DNA, 15 bp, Homo sapiens
gaaaataagcttttt

SEQ ID NO: 140818 - DNA, 15 bp, Homo sapiens
aaaataagctttttg

SEQ ID NO: 140819 - DNA, 15 bp, Homo sapiens
aaataagctttttgc

SEQ ID NO: 140820 - DNA, 15 bp, Homo sapiens
aataagctttttgct

SEQ ID NO: 140821 - DNA, 15 bp, Homo sapiens
ataagctttttgctt

SEQ ID NO: 140822 - DNA, 15 bp, Homo sapiens
taagctttttgcttc

SEQ ID NO: 140823 - DNA, 15 bp, Homo sapiens
aagctttttgcttca

SEQ ID NO: 140824 - DNA, 15 bp, Homo sapiens
agctttttgcttcac

SEQ ID NO: 140825 - DNA, 15 bp, Homo sapiens
gctttttgcttcaca

SEQ ID NO: 140826 - DNA, 15 bp, Homo sapiens
ctttttgcttcacat

SEQ ID NO: 140827 - DNA, 15 bp, Homo sapiens
tttttgcttcacatg

SEQ ID NO: 140828 - DNA, 15 bp, Homo sapiens
ttttgcttcacatga

SEQ ID NO: 140829 - DNA, 15 bp, Homo sapiens
tttgcttcacatgat

SEQ ID NO: 140830 - DNA, 15 bp, Homo sapiens
ttgcttcacatgatc

SEQ ID NO: 140831 - DNA, 15 bp, Homo sapiens
tgcttcacatgatct

SEQ ID NO: 140832 - DNA, 15 bp, Homo sapiens
gcttcacatgatcta

SEQ ID NO: 140833 - DNA, 15 bp, Homo sapiens
cttcacatgatctag

SEQ ID NO: 140834 - DNA, 15 bp, Homo sapiens
ttcacatgatctaga

SEQ ID NO: 140835 - DNA, 15 bp, Homo sapiens
tcacatgatctagaa

SEQ ID NO: 140836 - DNA, 15 bp, Homo sapiens
cacatgatctagaat

SEQ ID NO: 140837 - DNA, 15 bp, Homo sapiens
acatgatctagaatt

SEQ ID NO: 140838 - DNA, 15 bp, Homo sapiens
catgatctagaattt

SEQ ID NO: 140839 - DNA, 15 bp, Homo sapiens
atgatctagaatttt

SEQ ID NO: 140840 - DNA, 15 bp, Homo sapiens
tgatctagaattttt

SEQ ID NO: 140841 - DNA, 15 bp, Homo sapiens
gatctagaattttta

SEQ ID NO: 140842 - DNA, 15 bp, Homo sapiens
atctagaatttttaa

SEQ ID NO: 140843 - DNA, 15 bp, Homo sapiens
tctagaatttttaaa

SEQ ID NO: 140844 - DNA, 15 bp, Homo sapiens
ctagaatttttaaaa

SEQ ID NO: 140845 - DNA, 15 bp, Homo sapiens
tagaatttttaaaat

SEQ ID NO: 140846 - DNA, 15 bp, Homo sapiens
agaatttttaaaatt

SEQ ID NO: 140847 - DNA, 15 bp, Homo sapiens
gaatttttaaaatta

SEQ ID NO: 140848 - DNA, 15 bp, Homo sapiens
aatttttaaaattag

SEQ ID NO: 140849 - DNA, 15 bp, Homo sapiens
atttttaaaattaga

SEQ ID NO: 140850 - DNA, 15 bp, Homo sapiens
tttttaaaattagaa

SEQ ID NO: 140851 - DNA, 15 bp, Homo sapiens
ttttaaaattagaaa

SEQ ID NO: 140852 - DNA, 15 bp, Homo sapiens
tttaaaattagaaaa

SEQ ID NO: 140853 - DNA, 15 bp, Homo sapiens
ttaaaattagaaaaa

SEQ ID NO: 140854 - DNA, 15 bp, Homo sapiens
aaaattagaaaaatg

SEQ ID NO: 140855 - DNA, 15 bp, Homo sapiens
aaattagaaaaatgt

SEQ ID NO: 140856 - DNA, 15 bp, Homo sapiens
aattagaaaaatgtg

SEQ ID NO: 140857 - DNA, 15 bp, Homo sapiens
attagaaaaatgtgc

SEQ ID NO: 140858 - DNA, 15 bp, Homo sapiens
ttagaaaaatgtgct

SEQ ID NO: 140859 - DNA, 15 bp, Homo sapiens
tagaaaaatgtgctt

SEQ ID NO: 140860 - DNA, 15 bp, Homo sapiens
agaaaaatgtgctta

SEQ ID NO: 140861 - DNA, 15 bp, Homo sapiens
gaaaaatgtgcttac

SEQ ID NO: 140862 - DNA, 15 bp, Homo sapiens
aaaaatgtgcttact

SEQ ID NO: 140863 - DNA, 15 bp, Homo sapiens
aaaatgtgcttactg

SEQ ID NO: 140864 - DNA, 15 bp, Homo sapiens
aaatgtgcttactgc

SEQ ID NO: 140865 - DNA, 15 bp, Homo sapiens
aatgtgcttactgcg

SEQ ID NO: 140866 - DNA, 15 bp, Homo sapiens
atgtgcttactgcgt

SEQ ID NO: 140867 - DNA, 15 bp, Homo sapiens
tgtgcttactgcgtg

SEQ ID NO: 140868 - DNA, 15 bp, Homo sapiens
gtgcttactgcgtgc

SEQ ID NO: 140869 - DNA, 15 bp, Homo sapiens
tgcttactgcgtgcc

SEQ ID NO: 140870 - DNA, 15 bp, Homo sapiens
gcttactgcgtgccc

SEQ ID NO: 140871 - DNA, 15 bp, Homo sapiens
cttactgcgtgccct

SEQ ID NO: 140872 - DNA, 15 bp, Homo sapiens
ttactgcgtgccctt

SEQ ID NO: 140873 - DNA, 15 bp, Homo sapiens
tactgcgtgcccttc

SEQ ID NO: 140874 - DNA, 15 bp, Homo sapiens
actgcgtgcccttct

SEQ ID NO: 140875 - DNA, 15 bp, Homo sapiens
ctgcgtgcccttctg

SEQ ID NO: 140876 - DNA, 15 bp, Homo sapiens
tgcgtgcccttctga

SEQ ID NO: 140877 - DNA, 15 bp, Homo sapiens
gcgtgcccttctgaa

SEQ ID NO: 140878 - DNA, 15 bp, Homo sapiens
cgtgcccttctgaaa

SEQ ID NO: 140879 - DNA, 15 bp, Homo sapiens
gtgcccttctgaaac

SEQ ID NO: 140880 - DNA, 15 bp, Homo sapiens
tgcccttctgaaact

SEQ ID NO: 140881 - DNA, 15 bp, Homo sapiens
gcccttctgaaacta

SEQ ID NO: 140882 - DNA, 15 bp, Homo sapiens
cccttctgaaactag

SEQ ID NO: 140883 - DNA, 15 bp, Homo sapiens
ccttctgaaactagg

SEQ ID NO: 140884 - DNA, 15 bp, Homo sapiens
cttctgaaactagga

SEQ ID NO: 140885 - DNA, 15 bp, Homo sapiens
ttctgaaactaggaa

SEQ ID NO: 140886 - DNA, 15 bp, Homo sapiens
tctgaaactaggaaa

SEQ ID NO: 140887 - DNA, 15 bp, Homo sapiens
ctgaaactaggaaaa

SEQ ID NO: 140888 - DNA, 15 bp, Homo sapiens
tgaaactaggaaaat

SEQ ID NO: 140889 - DNA, 15 bp, Homo sapiens
gaaactaggaaaata

SEQ ID NO: 140890 - DNA, 15 bp, Homo sapiens
aaactaggaaaatat

SEQ ID NO: 140891 - DNA, 15 bp, Homo sapiens
aactaggaaaatatg

SEQ ID NO: 140892 - DNA, 15 bp, Homo sapiens
actaggaaaatatgc

SEQ ID NO: 140893 - DNA, 15 bp, Homo sapiens
ctaggaaaatatgcc

SEQ ID NO: 140894 - DNA, 15 bp, Homo sapiens
taggaaaatatgcct

SEQ ID NO: 140895 - DNA, 15 bp, Homo sapiens
aggaaaatatgcctt

SEQ ID NO: 140896 - DNA, 15 bp, Homo sapiens
ggaaaatatgccttg

SEQ ID NO: 140897 - DNA, 15 bp, Homo sapiens
gaaaatatgccttgt

SEQ ID NO: 140898 - DNA, 15 bp, Homo sapiens
aaaatatgccttgtg

SEQ ID NO: 140899 - DNA, 15 bp, Homo sapiens
aaatatgccttgtgt

SEQ ID NO: 140900 - DNA, 15 bp, Homo sapiens
aatatgccttgtgtt

SEQ ID NO: 140901 - DNA, 15 bp, Homo sapiens
atatgccttgtgttt

SEQ ID NO: 140902 - DNA, 15 bp, Homo sapiens
tatgccttgtgttta

SEQ ID NO: 140903 - DNA, 15 bp, Homo sapiens
atgccttgtgtttac

SEQ ID NO: 140904 - DNA, 15 bp, Homo sapiens
tgccttgtgtttacc

SEQ ID NO: 140905 - DNA, 15 bp, Homo sapiens
gccttgtgtttacca

SEQ ID NO: 140906 - DNA, 15 bp, Homo sapiens
ccttgtgtttaccaa

SEQ ID NO: 140907 - DNA, 15 bp, Homo sapiens
cttgtgtttaccaat

SEQ ID NO: 140908 - DNA, 15 bp, Homo sapiens
ttgtgtttaccaatt

SEQ ID NO: 140909 - DNA, 15 bp, Homo sapiens
tgtgtttaccaattg

SEQ ID NO: 140910 - DNA, 15 bp, Homo sapiens
gtgtttaccaattgt

SEQ ID NO: 140911 - DNA, 15 bp, Homo sapiens
tgtttaccaattgtg

SEQ ID NO: 140912 - DNA, 15 bp, Homo sapiens
gtttaccaattgtgt

SEQ ID NO: 140913 - DNA, 15 bp, Homo sapiens
tttaccaattgtgtg

SEQ ID NO: 140914 - DNA, 15 bp, Homo sapiens
ttaccaattgtgtgg

SEQ ID NO: 140915 - DNA, 15 bp, Homo sapiens
taccaattgtgtggt

SEQ ID NO: 140916 - DNA, 15 bp, Homo sapiens
accaattgtgtggtt

SEQ ID NO: 140917 - DNA, 15 bp, Homo sapiens
ccaattgtgtggtta

SEQ ID NO: 140918 - DNA, 15 bp, Homo sapiens
caattgtgtggttag

SEQ ID NO: 140919 - DNA, 15 bp, Homo sapiens
aattgtgtggttagg

SEQ ID NO: 140920 - DNA, 15 bp, Homo sapiens
attgtgtggttagga

SEQ ID NO: 140921 - DNA, 15 bp, Homo sapiens
ttgtgtggttaggag

SEQ ID NO: 140922 - DNA, 15 bp, Homo sapiens
tgtgtggttaggaga

SEQ ID NO: 140923 - DNA, 15 bp, Homo sapiens
gtgtggttaggagat

SEQ ID NO: 140924 - DNA, 15 bp, Homo sapiens
tgtggttaggagatg

SEQ ID NO: 140925 - DNA, 15 bp, Homo sapiens
gtggttaggagatgg

SEQ ID NO: 140926 - DNA, 15 bp, Homo sapiens
tggttaggagatggg

SEQ ID NO: 140927 - DNA, 15 bp, Homo sapiens
ggttaggagatgggc

SEQ ID NO: 140928 - DNA, 15 bp, Homo sapiens
gttaggagatgggcc

SEQ ID NO: 140929 - DNA, 15 bp, Homo sapiens
ttaggagatgggcca

SEQ ID NO: 140930 - DNA, 15 bp, Homo sapiens
taggagatgggccaa

SEQ ID NO: 140931 - DNA, 15 bp, Homo sapiens
aggagatgggccaaa

SEQ ID NO: 140932 - DNA, 15 bp, Homo sapiens
ggagatgggccaaag

SEQ ID NO: 140933 - DNA, 15 bp, Homo sapiens
gagatgggccaaagg

SEQ ID NO: 140934 - DNA, 15 bp, Homo sapiens
agatgggccaaaggc

SEQ ID NO: 140935 - DNA, 15 bp, Homo sapiens
gatgggccaaaggca

SEQ ID NO: 140936 - DNA, 15 bp, Homo sapiens
atgggccaaaggcat

SEQ ID NO: 140937 - DNA, 15 bp, Homo sapiens
tgggccaaaggcatc

SEQ ID NO: 140938 - DNA, 15 bp, Homo sapiens
gggccaaaggcatca

SEQ ID NO: 140939 - DNA, 15 bp, Homo sapiens
ggccaaaggcatcag

SEQ ID NO: 140940 - DNA, 15 bp, Homo sapiens
gccaaaggcatcagg

SEQ ID NO: 140941 - DNA, 15 bp, Homo sapiens
ccaaaggcatcaggc

SEQ ID NO: 140942 - DNA, 15 bp, Homo sapiens
caaaggcatcaggct

SEQ ID NO: 140943 - DNA, 15 bp, Homo sapiens
aaaggcatcaggctt

SEQ ID NO: 140944 - DNA, 15 bp, Homo sapiens
aaggcatcaggcttt

SEQ ID NO: 140945 - DNA, 15 bp, Homo sapiens
aggcatcaggctttt

SEQ ID NO: 140946 - DNA, 15 bp, Homo sapiens
ggcatcaggcttttg

SEQ ID NO: 140947 - DNA, 15 bp, Homo sapiens
gcatcaggcttttga

SEQ ID NO: 140948 - DNA, 15 bp, Homo sapiens
catcaggcttttgaa

SEQ ID NO: 140949 - DNA, 15 bp, Homo sapiens
atcaggcttttgaaa

SEQ ID NO: 140950 - DNA, 15 bp, Homo sapiens
tcaggcttttgaaag

SEQ ID NO: 140951 - DNA, 15 bp, Homo sapiens
caggcttttgaaagt

SEQ ID NO: 140952 - DNA, 15 bp, Homo sapiens
aggcttttgaaagta

SEQ ID NO: 140953 - DNA, 15 bp, Homo sapiens
ggcttttgaaagtag

SEQ ID NO: 140954 - DNA, 15 bp, Homo sapiens
gcttttgaaagtagt

SEQ ID NO: 140955 - DNA, 15 bp, Homo sapiens
cttttgaaagtagtt

SEQ ID NO: 140956 - DNA, 15 bp, Homo sapiens
ttttgaaagtagttg

SEQ ID NO: 140957 - DNA, 15 bp, Homo sapiens
tttgaaagtagttgc

SEQ ID NO: 140958 - DNA, 15 bp, Homo sapiens
ttgaaagtagttgca

SEQ ID NO: 140959 - DNA, 15 bp, Homo sapiens
tgaaagtagttgcat

SEQ ID NO: 140960 - DNA, 15 bp, Homo sapiens
gaaagtagttgcatt

SEQ ID NO: 140961 - DNA, 15 bp, Homo sapiens
aaagtagttgcattt

SEQ ID NO: 140962 - DNA, 15 bp, Homo sapiens
aagtagttgcattta

SEQ ID NO: 140963 - DNA, 15 bp, Homo sapiens
agtagttgcatttag

SEQ ID NO: 140964 - DNA, 15 bp, Homo sapiens
gtagttgcatttagc

SEQ ID NO: 140965 - DNA, 15 bp, Homo sapiens
tagttgcatttagca

SEQ ID NO: 140966 - DNA, 15 bp, Homo sapiens
agttgcatttagcat

SEQ ID NO: 140967 - DNA, 15 bp, Homo sapiens
gttgcatttagcata

SEQ ID NO: 140968 - DNA, 15 bp, Homo sapiens
ttgcatttagcataa

SEQ ID NO: 140969 - DNA, 15 bp, Homo sapiens
tgcatttagcataat

SEQ ID NO: 140970 - DNA, 15 bp, Homo sapiens
gcatttagcataatt

SEQ ID NO: 140971 - DNA, 15 bp, Homo sapiens
catttagcataattt

SEQ ID NO: 140972 - DNA, 15 bp, Homo sapiens
atttagcataatttc

SEQ ID NO: 140973 - DNA, 15 bp, Homo sapiens
tttagcataatttcc

SEQ ID NO: 140974 - DNA, 15 bp, Homo sapiens
ttagcataatttcca

SEQ ID NO: 140975 - DNA, 15 bp, Homo sapiens
tagcataatttccat

SEQ ID NO: 140976 - DNA, 15 bp, Homo sapiens
agcataatttccatt

SEQ ID NO: 140977 - DNA, 15 bp, Homo sapiens
gcataatttccattg

SEQ ID NO: 140978 - DNA, 15 bp, Homo sapiens
cataatttccattgc

SEQ ID NO: 140979 - DNA, 15 bp, Homo sapiens
ataatttccattgcc

SEQ ID NO: 140980 - DNA, 15 bp, Homo sapiens
taatttccattgccc

SEQ ID NO: 140981 - DNA, 15 bp, Homo sapiens
aatttccattgcccc

SEQ ID NO: 140982 - DNA, 15 bp, Homo sapiens
atttccattgccccc

SEQ ID NO: 140983 - DNA, 15 bp, Homo sapiens
tttccattgccccct

SEQ ID NO: 140984 - DNA, 15 bp, Homo sapiens
ttccattgccccctg

SEQ ID NO: 140985 - DNA, 15 bp, Homo sapiens
tccattgccccctgc

SEQ ID NO: 140986 - DNA, 15 bp, Homo sapiens
ccattgccccctgcc

SEQ ID NO: 140987 - DNA, 15 bp, Homo sapiens
cattgccccctgcca

SEQ ID NO: 140988 - DNA, 15 bp, Homo sapiens
attgccccctgccaa

SEQ ID NO: 140989 - DNA, 15 bp, Homo sapiens
ttgccccctgccaat

SEQ ID NO: 140990 - DNA, 15 bp, Homo sapiens
tgccccctgccaatt

SEQ ID NO: 140991 - DNA, 15 bp, Homo sapiens
gccccctgccaattt

SEQ ID NO: 140992 - DNA, 15 bp, Homo sapiens
ccccctgccaatttc

SEQ ID NO: 140993 - DNA, 15 bp, Homo sapiens
cccctgccaatttca

SEQ ID NO: 140994 - DNA, 15 bp, Homo sapiens
ccctgccaatttcat

SEQ ID NO: 140995 - DNA, 15 bp, Homo sapiens
cctgccaatttcata

SEQ ID NO: 140996 - DNA, 15 bp, Homo sapiens
ctgccaatttcatat

SEQ ID NO: 140997 - DNA, 15 bp, Homo sapiens
tgccaatttcatatc

SEQ ID NO: 140998 - DNA, 15 bp, Homo sapiens
gccaatttcatatct

SEQ ID NO: 140999 - DNA, 15 bp, Homo sapiens
ccaatttcatatctg

SEQ ID NO: 141000 - DNA, 15 bp, Homo sapiens
caatttcatatctgt

SEQ ID NO: 141001 - DNA, 15 bp, Homo sapiens
aatttcatatctgtc

SEQ ID NO: 141002 - DNA, 15 bp, Homo sapiens
atttcatatctgtca

SEQ ID NO: 141003 - DNA, 15 bp, Homo sapiens
tttcatatctgtcac

SEQ ID NO: 141004 - DNA, 15 bp, Homo sapiens
ttcatatctgtcaca

SEQ ID NO: 141005 - DNA, 15 bp, Homo sapiens
tcatatctgtcacat

SEQ ID NO: 141006 - DNA, 15 bp, Homo sapiens
catatctgtcacatc

SEQ ID NO: 141007 - DNA, 15 bp, Homo sapiens
atatctgtcacatct

SEQ ID NO: 141008 - DNA, 15 bp, Homo sapiens
tatctgtcacatcta

SEQ ID NO: 141009 - DNA, 15 bp, Homo sapiens
atctgtcacatctaa

SEQ ID NO: 141010 - DNA, 15 bp, Homo sapiens
tctgtcacatctaat

SEQ ID NO: 141011 - DNA, 15 bp, Homo sapiens
ctgtcacatctaatc

SEQ ID NO: 141012 - DNA, 15 bp, Homo sapiens
tgtcacatctaatca

SEQ ID NO: 141013 - DNA, 15 bp, Homo sapiens
gtcacatctaatcag

SEQ ID NO: 141014 - DNA, 15 bp, Homo sapiens
tcacatctaatcagt

SEQ ID NO: 141015 - DNA, 15 bp, Homo sapiens
cacatctaatcagtt

SEQ ID NO: 141016 - DNA, 15 bp, Homo sapiens
acatctaatcagttt

SEQ ID NO: 141017 - DNA, 15 bp, Homo sapiens
catctaatcagttta

SEQ ID NO: 141018 - DNA, 15 bp, Homo sapiens
atctaatcagtttaa

SEQ ID NO: 141019 - DNA, 15 bp, Homo sapiens
tctaatcagtttaaa

SEQ ID NO: 141020 - DNA, 15 bp, Homo sapiens
ctaatcagtttaaaa

SEQ ID NO: 141021 - DNA, 15 bp, Homo sapiens
taatcagtttaaaat

SEQ ID NO: 141022 - DNA, 15 bp, Homo sapiens
aatcagtttaaaata

SEQ ID NO: 141023 - DNA, 15 bp, Homo sapiens
atcagtttaaaataa

SEQ ID NO: 141024 - DNA, 15 bp, Homo sapiens
tcagtttaaaataag

SEQ ID NO: 141025 - DNA, 15 bp, Homo sapiens
cagtttaaaataagg

SEQ ID NO: 141026 - DNA, 15 bp, Homo sapiens
agtttaaaataaggg

SEQ ID NO: 141027 - DNA, 15 bp, Homo sapiens
gtttaaaataagggg

SEQ ID NO: 141028 - DNA, 15 bp, Homo sapiens
tttaaaataaggggc

SEQ ID NO: 141029 - DNA, 15 bp, Homo sapiens
ttaaaataaggggca

SEQ ID NO: 141030 - DNA, 15 bp, Homo sapiens
taaaataaggggcat

SEQ ID NO: 141031 - DNA, 15 bp, Homo sapiens
aaaataaggggcatc

SEQ ID NO: 141032 - DNA, 15 bp, Homo sapiens
aaataaggggcatcc

SEQ ID NO: 141033 - DNA, 15 bp, Homo sapiens
aataaggggcatcct

SEQ ID NO: 141034 - DNA, 15 bp, Homo sapiens
ataaggggcatccta

SEQ ID NO: 141035 - DNA, 15 bp, Homo sapiens
taaggggcatcctaa

SEQ ID NO: 141036 - DNA, 15 bp, Homo sapiens
aaggggcatcctaag

SEQ ID NO: 141037 - DNA, 15 bp, Homo sapiens
aggggcatcctaagc

SEQ ID NO: 141038 - DNA, 15 bp, Homo sapiens
ggggcatcctaagca

SEQ ID NO: 141039 - DNA, 15 bp, Homo sapiens
gggcatcctaagcat

SEQ ID NO: 141040 - DNA, 15 bp, Homo sapiens
ggcatcctaagcatg

SEQ ID NO: 141041 - DNA, 15 bp, Homo sapiens
gcatcctaagcatgg

SEQ ID NO: 141042 - DNA, 15 bp, Homo sapiens
catcctaagcatgga

SEQ ID NO: 141043 - DNA, 15 bp, Homo sapiens
atcctaagcatggag

SEQ ID NO: 141044 - DNA, 15 bp, Homo sapiens
tcctaagcatggaga

SEQ ID NO: 141045 - DNA, 15 bp, Homo sapiens
cctaagcatggagat

SEQ ID NO: 141046 - DNA, 15 bp, Homo sapiens
ctaagcatggagatg

SEQ ID NO: 141047 - DNA, 15 bp, Homo sapiens
taagcatggagatgg

SEQ ID NO: 141048 - DNA, 15 bp, Homo sapiens
aagcatggagatggt

SEQ ID NO: 141049 - DNA, 15 bp, Homo sapiens
agcatggagatggtc

SEQ ID NO: 141050 - DNA, 15 bp, Homo sapiens
gcatggagatggtcc

SEQ ID NO: 141051 - DNA, 15 bp, Homo sapiens
catggagatggtcct

SEQ ID NO: 141052 - DNA, 15 bp, Homo sapiens
atggagatggtcctt

SEQ ID NO: 141053 - DNA, 15 bp, Homo sapiens
tggagatggtccttg

SEQ ID NO: 141054 - DNA, 15 bp, Homo sapiens
ggagatggtccttgg

SEQ ID NO: 141055 - DNA, 15 bp, Homo sapiens
gagatggtccttgga

SEQ ID NO: 141056 - DNA, 15 bp, Homo sapiens
agatggtccttggat

SEQ ID NO: 141057 - DNA, 15 bp, Homo sapiens
gatggtccttggatg

SEQ ID NO: 141058 - DNA, 15 bp, Homo sapiens
atggtccttggatgg

SEQ ID NO: 141059 - DNA, 15 bp, Homo sapiens
tggtccttggatggt

SEQ ID NO: 141060 - DNA, 15 bp, Homo sapiens
ggtccttggatggtc

SEQ ID NO: 141061 - DNA, 15 bp, Homo sapiens
gtccttggatggtcc

SEQ ID NO: 141062 - DNA, 15 bp, Homo sapiens
tccttggatggtcct

SEQ ID NO: 141063 - DNA, 15 bp, Homo sapiens
ccttggatggtcctt

SEQ ID NO: 141064 - DNA, 15 bp, Homo sapiens
cttggatggtccttg

SEQ ID NO: 141065 - DNA, 15 bp, Homo sapiens
ttggatggtccttgg

SEQ ID NO: 141066 - DNA, 15 bp, Homo sapiens
tggatggtccttgga

SEQ ID NO: 141067 - DNA, 15 bp, Homo sapiens
ggatggtccttggag

SEQ ID NO: 141068 - DNA, 15 bp, Homo sapiens
gatggtccttggagt

SEQ ID NO: 141069 - DNA, 15 bp, Homo sapiens
atggtccttggagtt

SEQ ID NO: 141070 - DNA, 15 bp, Homo sapiens
tggtccttggagttt

SEQ ID NO: 141071 - DNA, 15 bp, Homo sapiens
ggtccttggagtttc

SEQ ID NO: 141072 - DNA, 15 bp, Homo sapiens
gtccttggagtttct

SEQ ID NO: 141073 - DNA, 15 bp, Homo sapiens
tccttggagtttctg

SEQ ID NO: 141074 - DNA, 15 bp, Homo sapiens
ccttggagtttctgt

SEQ ID NO: 141075 - DNA, 15 bp, Homo sapiens
cttggagtttctgta

SEQ ID NO: 141076 - DNA, 15 bp, Homo sapiens
ttggagtttctgtat

SEQ ID NO: 141077 - DNA, 15 bp, Homo sapiens
tggagtttctgtatt

SEQ ID NO: 141078 - DNA, 15 bp, Homo sapiens
ggagtttctgtattt

SEQ ID NO: 141079 - DNA, 15 bp, Homo sapiens
gagtttctgtatttt

SEQ ID NO: 141080 - DNA, 15 bp, Homo sapiens
agtttctgtattttc

SEQ ID NO: 141081 - DNA, 15 bp, Homo sapiens
gtttctgtattttca

SEQ ID NO: 141082 - DNA, 15 bp, Homo sapiens
tttctgtattttcag

SEQ ID NO: 141083 - DNA, 15 bp, Homo sapiens
ttctgtattttcagt

SEQ ID NO: 141084 - DNA, 15 bp, Homo sapiens
tctgtattttcagta

SEQ ID NO: 141085 - DNA, 15 bp, Homo sapiens
ctgtattttcagtat

SEQ ID NO: 141086 - DNA, 15 bp, Homo sapiens
tgtattttcagtatt

SEQ ID NO: 141087 - DNA, 15 bp, Homo sapiens
gtattttcagtattc

SEQ ID NO: 141088 - DNA, 15 bp, Homo sapiens
tattttcagtattct

SEQ ID NO: 141089 - DNA, 15 bp, Homo sapiens
attttcagtattctt

SEQ ID NO: 141090 - DNA, 15 bp, Homo sapiens
ttttcagtattcttt

SEQ ID NO: 141091 - DNA, 15 bp, Homo sapiens
tttcagtattctttt

SEQ ID NO: 141092 - DNA, 15 bp, Homo sapiens
ttcagtattcttttt

SEQ ID NO: 141093 - DNA, 15 bp, Homo sapiens
tcagtattctttttt

SEQ ID NO: 141094 - DNA, 15 bp, Homo sapiens
cagtattcttttttt

SEQ ID NO: 141095 - DNA, 15 bp, Homo sapiens
agtattctttttttt

SEQ ID NO: 141096 - DNA, 15 bp, Homo sapiens
gtattcttttttttg

SEQ ID NO: 141097 - DNA, 15 bp, Homo sapiens
tattcttttttttga

SEQ ID NO: 141098 - DNA, 15 bp, Homo sapiens
attcttttttttgag

SEQ ID NO: 141099 - DNA, 15 bp, Homo sapiens
ttcttttttttgagc

SEQ ID NO: 141100 - DNA, 15 bp, Homo sapiens
tcttttttttgagca

SEQ ID NO: 141101 - DNA, 15 bp, Homo sapiens
cttttttttgagcat

SEQ ID NO: 141102 - DNA, 15 bp, Homo sapiens
ttttttttgagcata

SEQ ID NO: 141103 - DNA, 15 bp, Homo sapiens
tttttttgagcatac

SEQ ID NO: 141104 - DNA, 15 bp, Homo sapiens
ttttttgagcataca

SEQ ID NO: 141105 - DNA, 15 bp, Homo sapiens
tttttgagcatacaa

SEQ ID NO: 141106 - DNA, 15 bp, Homo sapiens
ttttgagcatacaag

SEQ ID NO: 141107 - DNA, 15 bp, Homo sapiens
tttgagcatacaaga

SEQ ID NO: 141108 - DNA, 15 bp, Homo sapiens
ttgagcatacaagac

SEQ ID NO: 141109 - DNA, 15 bp, Homo sapiens
tgagcatacaagaca

SEQ ID NO: 141110 - DNA, 15 bp, Homo sapiens
gagcatacaagacat

SEQ ID NO: 141111 - DNA, 15 bp, Homo sapiens
agcatacaagacatt

SEQ ID NO: 141112 - DNA, 15 bp, Homo sapiens
gcatacaagacattt

SEQ ID NO: 141113 - DNA, 15 bp, Homo sapiens
catacaagacattta

SEQ ID NO: 141114 - DNA, 15 bp, Homo sapiens
atacaagacatttat

SEQ ID NO: 141115 - DNA, 15 bp, Homo sapiens
tacaagacatttatt

SEQ ID NO: 141116 - DNA, 15 bp, Homo sapiens
acaagacatttattg

SEQ ID NO: 141117 - DNA, 15 bp, Homo sapiens
caagacatttattga

SEQ ID NO: 141118 - DNA, 15 bp, Homo sapiens
aagacatttattgaa

SEQ ID NO: 141119 - DNA, 15 bp, Homo sapiens
agacatttattgaaa

SEQ ID NO: 141120 - DNA, 15 bp, Homo sapiens
gacatttattgaaaa

SEQ ID NO: 141121 - DNA, 15 bp, Homo sapiens
acatttattgaaaaa

SEQ ID NO: 141122 - DNA, 15 bp, Homo sapiens
catttattgaaaaat

SEQ ID NO: 141123 - DNA, 15 bp, Homo sapiens
atttattgaaaaatt

SEQ ID NO: 141124 - DNA, 15 bp, Homo sapiens
tttattgaaaaattc

SEQ ID NO: 141125 - DNA, 15 bp, Homo sapiens
ttattgaaaaattct

SEQ ID NO: 141126 - DNA, 15 bp, Homo sapiens
tattgaaaaattctt

SEQ ID NO: 141127 - DNA, 15 bp, Homo sapiens
attgaaaaattcttg

SEQ ID NO: 141128 - DNA, 15 bp, Homo sapiens
ttgaaaaattcttgg

SEQ ID NO: 141129 - DNA, 15 bp, Homo sapiens
tgaaaaattcttggg

SEQ ID NO: 141130 - DNA, 15 bp, Homo sapiens
gaaaaattcttggga

SEQ ID NO: 141131 - DNA, 15 bp, Homo sapiens
aaaaattcttgggat

SEQ ID NO: 141132 - DNA, 15 bp, Homo sapiens
aaaattcttgggatc

SEQ ID NO: 141133 - DNA, 15 bp, Homo sapiens
aaattcttgggatca

SEQ ID NO: 141134 - DNA, 15 bp, Homo sapiens
aattcttgggatcaa

SEQ ID NO: 141135 - DNA, 15 bp, Homo sapiens
attcttgggatcaat

SEQ ID NO: 141136 - DNA, 15 bp, Homo sapiens
ttcttgggatcaata

SEQ ID NO: 141137 - DNA, 15 bp, Homo sapiens
tcttgggatcaatac

SEQ ID NO: 141138 - DNA, 15 bp, Homo sapiens
cttgggatcaatact

SEQ ID NO: 141139 - DNA, 15 bp, Homo sapiens
ttgggatcaatactt

SEQ ID NO: 141140 - DNA, 15 bp, Homo sapiens
tgggatcaatacttg

SEQ ID NO: 141141 - DNA, 15 bp, Homo sapiens
gggatcaatacttgt

SEQ ID NO: 141142 - DNA, 15 bp, Homo sapiens
ggatcaatacttgtg

SEQ ID NO: 141143 - DNA, 15 bp, Homo sapiens
gatcaatacttgtgt

SEQ ID NO: 141144 - DNA, 15 bp, Homo sapiens
atcaatacttgtgta

SEQ ID NO: 141145 - DNA, 15 bp, Homo sapiens
tcaatacttgtgtaa

SEQ ID NO: 141146 - DNA, 15 bp, Homo sapiens
caatacttgtgtaag

SEQ ID NO: 141147 - DNA, 15 bp, Homo sapiens
aatacttgtgtaagg

SEQ ID NO: 141148 - DNA, 15 bp, Homo sapiens
atacttgtgtaagga

SEQ ID NO: 141149 - DNA, 15 bp, Homo sapiens
tacttgtgtaaggaa

SEQ ID NO: 141150 - DNA, 15 bp, Homo sapiens
acttgtgtaaggaaa

SEQ ID NO: 141151 - DNA, 15 bp, Homo sapiens
cttgtgtaaggaaag

SEQ ID NO: 141152 - DNA, 15 bp, Homo sapiens
ttgtgtaaggaaagg

SEQ ID NO: 141153 - DNA, 15 bp, Homo sapiens
tgtgtaaggaaagga

SEQ ID NO: 141154 - DNA, 15 bp, Homo sapiens
gtgtaaggaaaggaa

SEQ ID NO: 141155 - DNA, 15 bp, Homo sapiens
tgtaaggaaaggaaa

SEQ ID NO: 141156 - DNA, 15 bp, Homo sapiens
gtaaggaaaggaaag

SEQ ID NO: 141157 - DNA, 15 bp, Homo sapiens
taaggaaaggaaagg

SEQ ID NO: 141158 - DNA, 15 bp, Homo sapiens
aaggaaaggaaaggg

SEQ ID NO: 141159 - DNA, 15 bp, Homo sapiens
aggaaaggaaaggga

SEQ ID NO: 141160 - DNA, 15 bp, Homo sapiens
ggaaaggaaagggaa

SEQ ID NO: 141161 - DNA, 15 bp, Homo sapiens
gaaaggaaagggaac

SEQ ID NO: 141162 - DNA, 15 bp, Homo sapiens
aaaggaaagggaaca

SEQ ID NO: 141163 - DNA, 15 bp, Homo sapiens
aaggaaagggaacaa

SEQ ID NO: 141164 - DNA, 15 bp, Homo sapiens
aggaaagggaacaaa

SEQ ID NO: 141165 - DNA, 15 bp, Homo sapiens
ggaaagggaacaaag

SEQ ID NO: 141166 - DNA, 15 bp, Homo sapiens
gaaagggaacaaagc

SEQ ID NO: 141167 - DNA, 15 bp, Homo sapiens
aaagggaacaaagca

SEQ ID NO: 141168 - DNA, 15 bp, Homo sapiens
aagggaacaaagcat

SEQ ID NO: 141169 - DNA, 15 bp, Homo sapiens
agggaacaaagcatg

SEQ ID NO: 141170 - DNA, 15 bp, Homo sapiens
gggaacaaagcatga

SEQ ID NO: 141171 - DNA, 15 bp, Homo sapiens
ggaacaaagcatgat

SEQ ID NO: 141172 - DNA, 15 bp, Homo sapiens
gaacaaagcatgatt

SEQ ID NO: 141173 - DNA, 15 bp, Homo sapiens
aacaaagcatgattg

SEQ ID NO: 141174 - DNA, 15 bp, Homo sapiens
acaaagcatgattgg

SEQ ID NO: 141175 - DNA, 15 bp, Homo sapiens
caaagcatgattggg

SEQ ID NO: 141176 - DNA, 15 bp, Homo sapiens
aaagcatgattgggc

SEQ ID NO: 141177 - DNA, 15 bp, Homo sapiens
aagcatgattgggca

SEQ ID NO: 141178 - DNA, 15 bp, Homo sapiens
agcatgattgggcag

SEQ ID NO: 141179 - DNA, 15 bp, Homo sapiens
gcatgattgggcaga

SEQ ID NO: 141180 - DNA, 15 bp, Homo sapiens
catgattgggcagag

SEQ ID NO: 141181 - DNA, 15 bp, Homo sapiens
atgattgggcagagg

SEQ ID NO: 141182 - DNA, 15 bp, Homo sapiens
tgattgggcagaggc

SEQ ID NO: 141183 - DNA, 15 bp, Homo sapiens
gattgggcagaggca

SEQ ID NO: 141184 - DNA, 15 bp, Homo sapiens
attgggcagaggcag

SEQ ID NO: 141185 - DNA, 15 bp, Homo sapiens
ttgggcagaggcaga

SEQ ID NO: 141186 - DNA, 15 bp, Homo sapiens
tgggcagaggcagaa

SEQ ID NO: 141187 - DNA, 15 bp, Homo sapiens
gggcagaggcagaag

SEQ ID NO: 141188 - DNA, 15 bp, Homo sapiens
ggcagaggcagaaga

SEQ ID NO: 141189 - DNA, 15 bp, Homo sapiens
gcagaggcagaagat

SEQ ID NO: 141190 - DNA, 15 bp, Homo sapiens
cagaggcagaagatg

SEQ ID NO: 141191 - DNA, 15 bp, Homo sapiens
agaggcagaagatga

SEQ ID NO: 141192 - DNA, 15 bp, Homo sapiens
gaggcagaagatgac

SEQ ID NO: 141193 - DNA, 15 bp, Homo sapiens
aggcagaagatgaca

SEQ ID NO: 141194 - DNA, 15 bp, Homo sapiens
ggcagaagatgacat

SEQ ID NO: 141195 - DNA, 15 bp, Homo sapiens
gcagaagatgacatc

SEQ ID NO: 141196 - DNA, 15 bp, Homo sapiens
cagaagatgacatca

SEQ ID NO: 141197 - DNA, 15 bp, Homo sapiens
agaagatgacatcaa

SEQ ID NO: 141198 - DNA, 15 bp, Homo sapiens
gaagatgacatcaac

SEQ ID NO: 141199 - DNA, 15 bp, Homo sapiens
aagatgacatcaaca

SEQ ID NO: 141200 - DNA, 15 bp, Homo sapiens
agatgacatcaacaa

SEQ ID NO: 141201 - DNA, 15 bp, Homo sapiens
gatgacatcaacaaa

SEQ ID NO: 141202 - DNA, 15 bp, Homo sapiens
atgacatcaacaaag

SEQ ID NO: 141203 - DNA, 15 bp, Homo sapiens
tgacatcaacaaagg

SEQ ID NO: 141204 - DNA, 15 bp, Homo sapiens
gacatcaacaaaggc

SEQ ID NO: 141205 - DNA, 15 bp, Homo sapiens
acatcaacaaaggcc

SEQ ID NO: 141206 - DNA, 15 bp, Homo sapiens
catcaacaaaggccc

SEQ ID NO: 141207 - DNA, 15 bp, Homo sapiens
atcaacaaaggccct

SEQ ID NO: 141208 - DNA, 15 bp, Homo sapiens
tcaacaaaggccctc

SEQ ID NO: 141209 - DNA, 15 bp, Homo sapiens
caacaaaggccctcc

SEQ ID NO: 141210 - DNA, 15 bp, Homo sapiens
aacaaaggccctccg

SEQ ID NO: 141211 - DNA, 15 bp, Homo sapiens
acaaaggccctccgt

SEQ ID NO: 141212 - DNA, 15 bp, Homo sapiens
caaaggccctccgtt

SEQ ID NO: 141213 - DNA, 15 bp, Homo sapiens
aaaggccctccgttg

SEQ ID NO: 141214 - DNA, 15 bp, Homo sapiens
aaggccctccgttgt

SEQ ID NO: 141215 - DNA, 15 bp, Homo sapiens
aggccctccgttgtc

SEQ ID NO: 141216 - DNA, 15 bp, Homo sapiens
ggccctccgttgtca

SEQ ID NO: 141217 - DNA, 15 bp, Homo sapiens
gccctccgttgtcag

SEQ ID NO: 141218 - DNA, 15 bp, Homo sapiens
ccctccgttgtcagt

SEQ ID NO: 141219 - DNA, 15 bp, Homo sapiens
cctccgttgtcagta

SEQ ID NO: 141220 - DNA, 15 bp, Homo sapiens
ctccgttgtcagtat

SEQ ID NO: 141221 - DNA, 15 bp, Homo sapiens
tccgttgtcagtatt

SEQ ID NO: 141222 - DNA, 15 bp, Homo sapiens
ccgttgtcagtattc

SEQ ID NO: 141223 - DNA, 15 bp, Homo sapiens
cgttgtcagtattct

SEQ ID NO: 141224 - DNA, 15 bp, Homo sapiens
gttgtcagtattctt

SEQ ID NO: 141225 - DNA, 15 bp, Homo sapiens
ttgtcagtattcttt

SEQ ID NO: 141226 - DNA, 15 bp, Homo sapiens
tgtcagtattctttt

SEQ ID NO: 141227 - DNA, 15 bp, Homo sapiens
gtcagtattcttttt

SEQ ID NO: 141228 - DNA, 15 bp, Homo sapiens
gtattcttttttttt

SEQ ID NO: 141229 - DNA, 15 bp, Homo sapiens
tattctttttttttt

SEQ ID NO: 141230 - DNA, 15 bp, Homo sapiens
tttttttttgagttg

SEQ ID NO: 141231 - DNA, 15 bp, Homo sapiens
ttttttttgagttgg

SEQ ID NO: 141232 - DNA, 15 bp, Homo sapiens
tttttttgagttgga

SEQ ID NO: 141233 - DNA, 15 bp, Homo sapiens
ttttttgagttggag

SEQ ID NO: 141234 - DNA, 15 bp, Homo sapiens
tttttgagttggagt

SEQ ID NO: 141235 - DNA, 15 bp, Homo sapiens
ttttgagttggagtc

SEQ ID NO: 141236 - DNA, 15 bp, Homo sapiens
tttgagttggagtct

SEQ ID NO: 141237 - DNA, 15 bp, Homo sapiens
ttgagttggagtctc

SEQ ID NO: 141238 - DNA, 15 bp, Homo sapiens
tgagttggagtctcg

SEQ ID NO: 141239 - DNA, 15 bp, Homo sapiens
gagttggagtctcgc

SEQ ID NO: 141240 - DNA, 15 bp, Homo sapiens
agttggagtctcgct

SEQ ID NO: 141241 - DNA, 15 bp, Homo sapiens
gttggagtctcgctc

SEQ ID NO: 141242 - DNA, 15 bp, Homo sapiens
ttggagtctcgctct

SEQ ID NO: 141243 - DNA, 15 bp, Homo sapiens
tggagtctcgctctg

SEQ ID NO: 141244 - DNA, 15 bp, Homo sapiens
tgatctcagctcact

SEQ ID NO: 141245 - DNA, 15 bp, Homo sapiens
gatctcagctcacta

SEQ ID NO: 141246 - DNA, 15 bp, Homo sapiens
atctcagctcactac

SEQ ID NO: 141247 - DNA, 15 bp, Homo sapiens
tctcagctcactaca

SEQ ID NO: 141248 - DNA, 15 bp, Homo sapiens
ctcagctcactacaa

SEQ ID NO: 141249 - DNA, 15 bp, Homo sapiens
tcagctcactacaac

SEQ ID NO: 141250 - DNA, 15 bp, Homo sapiens
cagctcactacaacc

SEQ ID NO: 141251 - DNA, 15 bp, Homo sapiens
agctcactacaacct

SEQ ID NO: 141252 - DNA, 15 bp, Homo sapiens
tcactacaacctctg

SEQ ID NO: 141253 - DNA, 15 bp, Homo sapiens
cactacaacctctgc

SEQ ID NO: 141254 - DNA, 15 bp, Homo sapiens
actacaacctctgcc

SEQ ID NO: 141255 - DNA, 15 bp, Homo sapiens
ctacaacctctgcct

SEQ ID NO: 141256 - DNA, 15 bp, Homo sapiens
tacaacctctgcctc

SEQ ID NO: 141257 - DNA, 15 bp, Homo sapiens
acaacctctgcctcc

SEQ ID NO: 141258 - DNA, 15 bp, Homo sapiens
ctcccaggttcaagt

SEQ ID NO: 141259 - DNA, 15 bp, Homo sapiens
tcccaggttcaagtg

SEQ ID NO: 141260 - DNA, 15 bp, Homo sapiens
tcaagtgattctctg

SEQ ID NO: 141261 - DNA, 15 bp, Homo sapiens
caagtgattctctgc

SEQ ID NO: 141262 - DNA, 15 bp, Homo sapiens
aagtgattctctgct

SEQ ID NO: 141263 - DNA, 15 bp, Homo sapiens
agtgattctctgctt

SEQ ID NO: 141264 - DNA, 15 bp, Homo sapiens
gtgattctctgcttc

SEQ ID NO: 141265 - DNA, 15 bp, Homo sapiens
tgattctctgcttca

SEQ ID NO: 141266 - DNA, 15 bp, Homo sapiens
gattctctgcttcag

SEQ ID NO: 141267 - DNA, 15 bp, Homo sapiens
attctctgcttcagc

SEQ ID NO: 141268 - DNA, 15 bp, Homo sapiens
ttctctgcttcagcc

SEQ ID NO: 141269 - DNA, 15 bp, Homo sapiens
tctctgcttcagcct

SEQ ID NO: 141270 - DNA, 15 bp, Homo sapiens
ctctgcttcagcctc

SEQ ID NO: 141271 - DNA, 15 bp, Homo sapiens
tctgcttcagcctcc

SEQ ID NO: 141272 - DNA, 15 bp, Homo sapiens
ctgcttcagcctcct

SEQ ID NO: 141273 - DNA, 15 bp, Homo sapiens
tgcttcagcctcctg

SEQ ID NO: 141274 - DNA, 15 bp, Homo sapiens
gcttcagcctcctga

SEQ ID NO: 141275 - DNA, 15 bp, Homo sapiens
cttcagcctcctgag

SEQ ID NO: 141276 - DNA, 15 bp, Homo sapiens
ttcagcctcctgagt

SEQ ID NO: 141277 - DNA, 15 bp, Homo sapiens
ttacaggcatgcacc

SEQ ID NO: 141278 - DNA, 15 bp, Homo sapiens
gcatgcaccaccaca

SEQ ID NO: 141279 - DNA, 15 bp, Homo sapiens
catgcaccaccacac

SEQ ID NO: 141280 - DNA, 15 bp, Homo sapiens
atgcaccaccacacc

SEQ ID NO: 141281 - DNA, 15 bp, Homo sapiens
tgcaccaccacacct

SEQ ID NO: 141282 - DNA, 15 bp, Homo sapiens
gcaccaccacacctg

SEQ ID NO: 141283 - DNA, 15 bp, Homo sapiens
acacctggctaattg

SEQ ID NO: 141284 - DNA, 15 bp, Homo sapiens
cacctggctaattgt

SEQ ID NO: 141285 - DNA, 15 bp, Homo sapiens
acctggctaattgtt

SEQ ID NO: 141286 - DNA, 15 bp, Homo sapiens
cctggctaattgttg

SEQ ID NO: 141287 - DNA, 15 bp, Homo sapiens
ctggctaattgttgt

SEQ ID NO: 141288 - DNA, 15 bp, Homo sapiens
tggctaattgttgta

SEQ ID NO: 141289 - DNA, 15 bp, Homo sapiens
ggctaattgttgtat

SEQ ID NO: 141290 - DNA, 15 bp, Homo sapiens
gctaattgttgtatt

SEQ ID NO: 141291 - DNA, 15 bp, Homo sapiens
ctaattgttgtattt

SEQ ID NO: 141292 - DNA, 15 bp, Homo sapiens
taattgttgtatttt

SEQ ID NO: 141293 - DNA, 15 bp, Homo sapiens
aattgttgtattttt

SEQ ID NO: 141294 - DNA, 15 bp, Homo sapiens
attgttgtattttta

SEQ ID NO: 141295 - DNA, 15 bp, Homo sapiens
ttgttgtatttttag

SEQ ID NO: 141296 - DNA, 15 bp, Homo sapiens
tgttgtatttttagt

SEQ ID NO: 141297 - DNA, 15 bp, Homo sapiens
gttgtatttttagta

SEQ ID NO: 141298 - DNA, 15 bp, Homo sapiens
ttcaccatgttggtt

SEQ ID NO: 141299 - DNA, 15 bp, Homo sapiens
tcaccatgttggttg

SEQ ID NO: 141300 - DNA, 15 bp, Homo sapiens
caccatgttggttgg

SEQ ID NO: 141301 - DNA, 15 bp, Homo sapiens
accatgttggttggc

SEQ ID NO: 141302 - DNA, 15 bp, Homo sapiens
ccatgttggttggcc

SEQ ID NO: 141303 - DNA, 15 bp, Homo sapiens
catgttggttggcca

SEQ ID NO: 141304 - DNA, 15 bp, Homo sapiens
atgttggttggccag

SEQ ID NO: 141305 - DNA, 15 bp, Homo sapiens
tgttggttggccaga

SEQ ID NO: 141306 - DNA, 15 bp, Homo sapiens
gttggttggccagac

SEQ ID NO: 141307 - DNA, 15 bp, Homo sapiens
ttggttggccagact

SEQ ID NO: 141308 - DNA, 15 bp, Homo sapiens
tggttggccagactg

SEQ ID NO: 141309 - DNA, 15 bp, Homo sapiens
ggttggccagactgg

SEQ ID NO: 141310 - DNA, 15 bp, Homo sapiens
gttggccagactggt

SEQ ID NO: 141311 - DNA, 15 bp, Homo sapiens
ttggccagactggtc

SEQ ID NO: 141312 - DNA, 15 bp, Homo sapiens
tggccagactggtct

SEQ ID NO: 141313 - DNA, 15 bp, Homo sapiens
ggccagactggtctt

SEQ ID NO: 141314 - DNA, 15 bp, Homo sapiens
gccagactggtcttg

SEQ ID NO: 141315 - DNA, 15 bp, Homo sapiens
ccagactggtcttga

SEQ ID NO: 141316 - DNA, 15 bp, Homo sapiens
cctcaggtgatccgt

SEQ ID NO: 141317 - DNA, 15 bp, Homo sapiens
ctcaggtgatccgtc

SEQ ID NO: 141318 - DNA, 15 bp, Homo sapiens
tcaggtgatccgtct

SEQ ID NO: 141319 - DNA, 15 bp, Homo sapiens
caggtgatccgtctg

SEQ ID NO: 141320 - DNA, 15 bp, Homo sapiens
aggtgatccgtctgc

SEQ ID NO: 141321 - DNA, 15 bp, Homo sapiens
ggtgatccgtctgcc

SEQ ID NO: 141322 - DNA, 15 bp, Homo sapiens
gtgatccgtctgcct

SEQ ID NO: 141323 - DNA, 15 bp, Homo sapiens
tgatccgtctgcctt

SEQ ID NO: 141324 - DNA, 15 bp, Homo sapiens
gatccgtctgccttg

SEQ ID NO: 141325 - DNA, 15 bp, Homo sapiens
atccgtctgccttgg

SEQ ID NO: 141326 - DNA, 15 bp, Homo sapiens
tccgtctgccttggc

SEQ ID NO: 141327 - DNA, 15 bp, Homo sapiens
ccgtctgccttggcc

SEQ ID NO: 141328 - DNA, 15 bp, Homo sapiens
cgtctgccttggcct

SEQ ID NO: 141329 - DNA, 15 bp, Homo sapiens
gtctgccttggcctc

SEQ ID NO: 141330 - DNA, 15 bp, Homo sapiens
tctgccttggcctcc

SEQ ID NO: 141331 - DNA, 15 bp, Homo sapiens
ggcctcccaaagtgt

SEQ ID NO: 141332 - DNA, 15 bp, Homo sapiens
ctcccaaagtgttgg

SEQ ID NO: 141333 - DNA, 15 bp, Homo sapiens
tcccaaagtgttgga

SEQ ID NO: 141334 - DNA, 15 bp, Homo sapiens
cccaaagtgttggaa

SEQ ID NO: 141335 - DNA, 15 bp, Homo sapiens
ccaaagtgttggaat

SEQ ID NO: 141336 - DNA, 15 bp, Homo sapiens
caaagtgttggaatt

SEQ ID NO: 141337 - DNA, 15 bp, Homo sapiens
aaagtgttggaatta

SEQ ID NO: 141338 - DNA, 15 bp, Homo sapiens
aagtgttggaattac

SEQ ID NO: 141339 - DNA, 15 bp, Homo sapiens
agtgttggaattaca

SEQ ID NO: 141340 - DNA, 15 bp, Homo sapiens
gtgttggaattacag

SEQ ID NO: 141341 - DNA, 15 bp, Homo sapiens
tgttggaattacaga

SEQ ID NO: 141342 - DNA, 15 bp, Homo sapiens
gttggaattacagac

SEQ ID NO: 141343 - DNA, 15 bp, Homo sapiens
ttggaattacagaca

SEQ ID NO: 141344 - DNA, 15 bp, Homo sapiens
tggaattacagacat

SEQ ID NO: 141345 - DNA, 15 bp, Homo sapiens
ggaattacagacatg

SEQ ID NO: 141346 - DNA, 15 bp, Homo sapiens
gaattacagacatga

SEQ ID NO: 141347 - DNA, 15 bp, Homo sapiens
aattacagacatgac

SEQ ID NO: 141348 - DNA, 15 bp, Homo sapiens
attacagacatgacc

SEQ ID NO: 141349 - DNA, 15 bp, Homo sapiens
ttacagacatgaccc

SEQ ID NO: 141350 - DNA, 15 bp, Homo sapiens
tacagacatgaccca

SEQ ID NO: 141351 - DNA, 15 bp, Homo sapiens
acagacatgacccac

SEQ ID NO: 141352 - DNA, 15 bp, Homo sapiens
cagacatgacccact

SEQ ID NO: 141353 - DNA, 15 bp, Homo sapiens
agacatgacccactg

SEQ ID NO: 141354 - DNA, 15 bp, Homo sapiens
gacatgacccactgc

SEQ ID NO: 141355 - DNA, 15 bp, Homo sapiens
acatgacccactgca

SEQ ID NO: 141356 - DNA, 15 bp, Homo sapiens
catgacccactgcac

SEQ ID NO: 141357 - DNA, 15 bp, Homo sapiens
atgacccactgcacc

SEQ ID NO: 141358 - DNA, 15 bp, Homo sapiens
tgacccactgcaccc

SEQ ID NO: 141359 - DNA, 15 bp, Homo sapiens
gacccactgcacccg

SEQ ID NO: 141360 - DNA, 15 bp, Homo sapiens
acccactgcacccgg

SEQ ID NO: 141361 - DNA, 15 bp, Homo sapiens
cccactgcacccggc

SEQ ID NO: 141362 - DNA, 15 bp, Homo sapiens
cactgcacccggcct

SEQ ID NO: 141363 - DNA, 15 bp, Homo sapiens
actgcacccggcctg

SEQ ID NO: 141364 - DNA, 15 bp, Homo sapiens
ctgcacccggcctgt

SEQ ID NO: 141365 - DNA, 15 bp, Homo sapiens
tgcacccggcctgtt

SEQ ID NO: 141366 - DNA, 15 bp, Homo sapiens
gcacccggcctgttg

SEQ ID NO: 141367 - DNA, 15 bp, Homo sapiens
cacccggcctgttgt

SEQ ID NO: 141368 - DNA, 15 bp, Homo sapiens
acccggcctgttgtc

SEQ ID NO: 141369 - DNA, 15 bp, Homo sapiens
cccggcctgttgtca

SEQ ID NO: 141370 - DNA, 15 bp, Homo sapiens
ccggcctgttgtcag

SEQ ID NO: 141371 - DNA, 15 bp, Homo sapiens
cggcctgttgtcagt

SEQ ID NO: 141372 - DNA, 15 bp, Homo sapiens
ggcctgttgtcagta

SEQ ID NO: 141373 - DNA, 15 bp, Homo sapiens
gcctgttgtcagtat

SEQ ID NO: 141374 - DNA, 15 bp, Homo sapiens
cctgttgtcagtatt

SEQ ID NO: 141375 - DNA, 15 bp, Homo sapiens
ctgttgtcagtattc

SEQ ID NO: 141376 - DNA, 15 bp, Homo sapiens
tgttgtcagtattct

SEQ ID NO: 141377 - DNA, 15 bp, Homo sapiens
ttgtcagtattctta

SEQ ID NO: 141378 - DNA, 15 bp, Homo sapiens
tgtcagtattcttaa

SEQ ID NO: 141379 - DNA, 15 bp, Homo sapiens
gtcagtattcttaaa

SEQ ID NO: 141380 - DNA, 15 bp, Homo sapiens
tcagtattcttaaac

SEQ ID NO: 141381 - DNA, 15 bp, Homo sapiens
cagtattcttaaaca

SEQ ID NO: 141382 - DNA, 15 bp, Homo sapiens
agtattcttaaacat

SEQ ID NO: 141383 - DNA, 15 bp, Homo sapiens
gtattcttaaacata

SEQ ID NO: 141384 - DNA, 15 bp, Homo sapiens
tattcttaaacatag

SEQ ID NO: 141385 - DNA, 15 bp, Homo sapiens
attcttaaacataga

SEQ ID NO: 141386 - DNA, 15 bp, Homo sapiens
ttcttaaacatagac

SEQ ID NO: 141387 - DNA, 15 bp, Homo sapiens
tcttaaacatagaca

SEQ ID NO: 141388 - DNA, 15 bp, Homo sapiens
cttaaacatagacac

SEQ ID NO: 141389 - DNA, 15 bp, Homo sapiens
ttaaacatagacact

SEQ ID NO: 141390 - DNA, 15 bp, Homo sapiens
taaacatagacacta

SEQ ID NO: 141391 - DNA, 15 bp, Homo sapiens
aaacatagacactaa

SEQ ID NO: 141392 - DNA, 15 bp, Homo sapiens
aacatagacactaac

SEQ ID NO: 141393 - DNA, 15 bp, Homo sapiens
acatagacactaact

SEQ ID NO: 141394 - DNA, 15 bp, Homo sapiens
catagacactaactg

SEQ ID NO: 141395 - DNA, 15 bp, Homo sapiens
atagacactaactgt

SEQ ID NO: 141396 - DNA, 15 bp, Homo sapiens
tagacactaactgta

SEQ ID NO: 141397 - DNA, 15 bp, Homo sapiens
agacactaactgtag

SEQ ID NO: 141398 - DNA, 15 bp, Homo sapiens
gacactaactgtagg

SEQ ID NO: 141399 - DNA, 15 bp, Homo sapiens
acactaactgtaggc

SEQ ID NO: 141400 - DNA, 15 bp, Homo sapiens
cactaactgtaggct

SEQ ID NO: 141401 - DNA, 15 bp, Homo sapiens
actaactgtaggctg

SEQ ID NO: 141402 - DNA, 15 bp, Homo sapiens
ctaactgtaggctga

SEQ ID NO: 141403 - DNA, 15 bp, Homo sapiens
taactgtaggctgac

SEQ ID NO: 141404 - DNA, 15 bp, Homo sapiens
aactgtaggctgaca

SEQ ID NO: 141405 - DNA, 15 bp, Homo sapiens
actgtaggctgacag

SEQ ID NO: 141406 - DNA, 15 bp, Homo sapiens
ctgtaggctgacagc

SEQ ID NO: 141407 - DNA, 15 bp, Homo sapiens
tgtaggctgacagcc

SEQ ID NO: 141408 - DNA, 15 bp, Homo sapiens
gtaggctgacagcct

SEQ ID NO: 141409 - DNA, 15 bp, Homo sapiens
taggctgacagccta

SEQ ID NO: 141410 - DNA, 15 bp, Homo sapiens
aggctgacagcctag

SEQ ID NO: 141411 - DNA, 15 bp, Homo sapiens
ggctgacagcctagc

SEQ ID NO: 141412 - DNA, 15 bp, Homo sapiens
gctgacagcctagca

SEQ ID NO: 141413 - DNA, 15 bp, Homo sapiens
ctgacagcctagcag

SEQ ID NO: 141414 - DNA, 15 bp, Homo sapiens
tgacagcctagcagc

SEQ ID NO: 141415 - DNA, 15 bp, Homo sapiens
gacagcctagcagca

SEQ ID NO: 141416 - DNA, 15 bp, Homo sapiens
acagcctagcagcaa

SEQ ID NO: 141417 - DNA, 15 bp, Homo sapiens
cagcctagcagcaag

SEQ ID NO: 141418 - DNA, 15 bp, Homo sapiens
agcctagcagcaagg

SEQ ID NO: 141419 - DNA, 15 bp, Homo sapiens
gcctagcagcaagga

SEQ ID NO: 141420 - DNA, 15 bp, Homo sapiens
cctagcagcaaggac

SEQ ID NO: 141421 - DNA, 15 bp, Homo sapiens
ctagcagcaaggacc

SEQ ID NO: 141422 - DNA, 15 bp, Homo sapiens
tagcagcaaggacca

SEQ ID NO: 141423 - DNA, 15 bp, Homo sapiens
agcagcaaggaccag

SEQ ID NO: 141424 - DNA, 15 bp, Homo sapiens
gcagcaaggaccagt

SEQ ID NO: 141425 - DNA, 15 bp, Homo sapiens
cagcaaggaccagtt

SEQ ID NO: 141426 - DNA, 15 bp, Homo sapiens
agcaaggaccagtta

SEQ ID NO: 141427 - DNA, 15 bp, Homo sapiens
gcaaggaccagttaa

SEQ ID NO: 141428 - DNA, 15 bp, Homo sapiens
caaggaccagttaaa

SEQ ID NO: 141429 - DNA, 15 bp, Homo sapiens
aaggaccagttaaag

SEQ ID NO: 141430 - DNA, 15 bp, Homo sapiens
aggaccagttaaaga

SEQ ID NO: 141431 - DNA, 15 bp, Homo sapiens
ggaccagttaaagaa

SEQ ID NO: 141432 - DNA, 15 bp, Homo sapiens
gaccagttaaagaaa

SEQ ID NO: 141433 - DNA, 15 bp, Homo sapiens
accagttaaagaaat

SEQ ID NO: 141434 - DNA, 15 bp, Homo sapiens
ccagttaaagaaatg

SEQ ID NO: 141435 - DNA, 15 bp, Homo sapiens
cagttaaagaaatga

SEQ ID NO: 141436 - DNA, 15 bp, Homo sapiens
agttaaagaaatgag

SEQ ID NO: 141437 - DNA, 15 bp, Homo sapiens
gttaaagaaatgagt

SEQ ID NO: 141438 - DNA, 15 bp, Homo sapiens
ttaaagaaatgagta

SEQ ID NO: 141439 - DNA, 15 bp, Homo sapiens
taaagaaatgagtag

SEQ ID NO: 141440 - DNA, 15 bp, Homo sapiens
aaagaaatgagtaga

SEQ ID NO: 141441 - DNA, 15 bp, Homo sapiens
aagaaatgagtagaa

SEQ ID NO: 141442 - DNA, 15 bp, Homo sapiens
agaaatgagtagaac

SEQ ID NO: 141443 - DNA, 15 bp, Homo sapiens
gaaatgagtagaact

SEQ ID NO: 141444 - DNA, 15 bp, Homo sapiens
aaatgagtagaactg

SEQ ID NO: 141445 - DNA, 15 bp, Homo sapiens
aatgagtagaactga

SEQ ID NO: 141446 - DNA, 15 bp, Homo sapiens
atgagtagaactgaa

SEQ ID NO: 141447 - DNA, 15 bp, Homo sapiens
tgagtagaactgaag

SEQ ID NO: 141448 - DNA, 15 bp, Homo sapiens
gagtagaactgaagt

SEQ ID NO: 141449 - DNA, 15 bp, Homo sapiens
agtagaactgaagtg

SEQ ID NO: 141450 - DNA, 15 bp, Homo sapiens
gtagaactgaagtgt

SEQ ID NO: 141451 - DNA, 15 bp, Homo sapiens
tagaactgaagtgtg

SEQ ID NO: 141452 - DNA, 15 bp, Homo sapiens
agaactgaagtgtgc

SEQ ID NO: 141453 - DNA, 15 bp, Homo sapiens
gaactgaagtgtgct

SEQ ID NO: 141454 - DNA, 15 bp, Homo sapiens
aactgaagtgtgctt

SEQ ID NO: 141455 - DNA, 15 bp, Homo sapiens
actgaagtgtgcttg

SEQ ID NO: 141456 - DNA, 15 bp, Homo sapiens
ctgaagtgtgcttga

SEQ ID NO: 141457 - DNA, 15 bp, Homo sapiens
tgaagtgtgcttgag

SEQ ID NO: 141458 - DNA, 15 bp, Homo sapiens
gaagtgtgcttgagt

SEQ ID NO: 141459 - DNA, 15 bp, Homo sapiens
aagtgtgcttgagta

SEQ ID NO: 141460 - DNA, 15 bp, Homo sapiens
agtgtgcttgagtat

SEQ ID NO: 141461 - DNA, 15 bp, Homo sapiens
gtgtgcttgagtatc

SEQ ID NO: 141462 - DNA, 15 bp, Homo sapiens
tgtgcttgagtatct

SEQ ID NO: 141463 - DNA, 15 bp, Homo sapiens
gtgcttgagtatctc

SEQ ID NO: 141464 - DNA, 15 bp, Homo sapiens
tgcttgagtatctct

SEQ ID NO: 141465 - DNA, 15 bp, Homo sapiens
gcttgagtatctctg

SEQ ID NO: 141466 - DNA, 15 bp, Homo sapiens
cttgagtatctctgg

SEQ ID NO: 141467 - DNA, 15 bp, Homo sapiens
ttgagtatctctggc

SEQ ID NO: 141468 - DNA, 15 bp, Homo sapiens
tccaggctgaaggct

SEQ ID NO: 141469 - DNA, 15 bp, Homo sapiens
ccaggctgaaggctg

SEQ ID NO: 141470 - DNA, 15 bp, Homo sapiens
caggctgaaggctga

SEQ ID NO: 141471 - DNA, 15 bp, Homo sapiens
aggctgaaggctgag

SEQ ID NO: 141472 - DNA, 15 bp, Homo sapiens
ggctgaaggctgagt

SEQ ID NO: 141473 - DNA, 15 bp, Homo sapiens
gctgaaggctgagtc

SEQ ID NO: 141474 - DNA, 15 bp, Homo sapiens
ctgaaggctgagtct

SEQ ID NO: 141475 - DNA, 15 bp, Homo sapiens
tgaaggctgagtctg

SEQ ID NO: 141476 - DNA, 15 bp, Homo sapiens
gaaggctgagtctgg

SEQ ID NO: 141477 - DNA, 15 bp, Homo sapiens
aaggctgagtctggg

SEQ ID NO: 141478 - DNA, 15 bp, Homo sapiens
aggctgagtctggga

SEQ ID NO: 141479 - DNA, 15 bp, Homo sapiens
ggctgagtctgggaa

SEQ ID NO: 141480 - DNA, 15 bp, Homo sapiens
gctgagtctgggaat

SEQ ID NO: 141481 - DNA, 15 bp, Homo sapiens
ctgagtctgggaatt

SEQ ID NO: 141482 - DNA, 15 bp, Homo sapiens
tgagtctgggaattt

SEQ ID NO: 141483 - DNA, 15 bp, Homo sapiens
gagtctgggaatttg

SEQ ID NO: 141484 - DNA, 15 bp, Homo sapiens
agtctgggaatttga

SEQ ID NO: 141485 - DNA, 15 bp, Homo sapiens
gtctgggaatttgag

SEQ ID NO: 141486 - DNA, 15 bp, Homo sapiens
tctgggaatttgagg

SEQ ID NO: 141487 - DNA, 15 bp, Homo sapiens
ctgggaatttgagga

SEQ ID NO: 141488 - DNA, 15 bp, Homo sapiens
tgggaatttgaggaa

SEQ ID NO: 141489 - DNA, 15 bp, Homo sapiens
gggaatttgaggaat

SEQ ID NO: 141490 - DNA, 15 bp, Homo sapiens
ggaatttgaggaatt

SEQ ID NO: 141491 - DNA, 15 bp, Homo sapiens
gaatttgaggaattc

SEQ ID NO: 141492 - DNA, 15 bp, Homo sapiens
aatttgaggaattct

SEQ ID NO: 141493 - DNA, 15 bp, Homo sapiens
atttgaggaattctt

SEQ ID NO: 141494 - DNA, 15 bp, Homo sapiens
tttgaggaattcttt

SEQ ID NO: 141495 - DNA, 15 bp, Homo sapiens
ttgaggaattctttg

SEQ ID NO: 141496 - DNA, 15 bp, Homo sapiens
tgaggaattctttgt

SEQ ID NO: 141497 - DNA, 15 bp, Homo sapiens
gaggaattctttgta

SEQ ID NO: 141498 - DNA, 15 bp, Homo sapiens
aggaattctttgtag

SEQ ID NO: 141499 - DNA, 15 bp, Homo sapiens
ggaattctttgtagg

SEQ ID NO: 141500 - DNA, 15 bp, Homo sapiens
gaattctttgtaggt

SEQ ID NO: 141501 - DNA, 15 bp, Homo sapiens
aattctttgtaggtc

SEQ ID NO: 141502 - DNA, 15 bp, Homo sapiens
attctttgtaggtcc

SEQ ID NO: 141503 - DNA, 15 bp, Homo sapiens
ttctttgtaggtcct

SEQ ID NO: 141504 - DNA, 15 bp, Homo sapiens
tctttgtaggtcctg

SEQ ID NO: 141505 - DNA, 15 bp, Homo sapiens
ctttgtaggtcctgg

SEQ ID NO: 141506 - DNA, 15 bp, Homo sapiens
tttgtaggtcctggg

SEQ ID NO: 141507 - DNA, 15 bp, Homo sapiens
ttgtaggtcctgggt

SEQ ID NO: 141508 - DNA, 15 bp, Homo sapiens
tgtaggtcctgggtc

SEQ ID NO: 141509 - DNA, 15 bp, Homo sapiens
gtaggtcctgggtct

SEQ ID NO: 141510 - DNA, 15 bp, Homo sapiens
taggtcctgggtcta

SEQ ID NO: 141511 - DNA, 15 bp, Homo sapiens
aggtcctgggtctac

SEQ ID NO: 141512 - DNA, 15 bp, Homo sapiens
ggtcctgggtctaca

SEQ ID NO: 141513 - DNA, 15 bp, Homo sapiens
gtcctgggtctacag

SEQ ID NO: 141514 - DNA, 15 bp, Homo sapiens
tcctgggtctacaga

SEQ ID NO: 141515 - DNA, 15 bp, Homo sapiens
cctgggtctacagag

SEQ ID NO: 141516 - DNA, 15 bp, Homo sapiens
ctgggtctacagagt

SEQ ID NO: 141517 - DNA, 15 bp, Homo sapiens
tgggtctacagagtg

SEQ ID NO: 141518 - DNA, 15 bp, Homo sapiens
gggtctacagagtga

SEQ ID NO: 141519 - DNA, 15 bp, Homo sapiens
ggtctacagagtgag

SEQ ID NO: 141520 - DNA, 15 bp, Homo sapiens
gtctacagagtgaga

SEQ ID NO: 141521 - DNA, 15 bp, Homo sapiens
tctacagagtgagag

SEQ ID NO: 141522 - DNA, 15 bp, Homo sapiens
ctacagagtgagagc

SEQ ID NO: 141523 - DNA, 15 bp, Homo sapiens
tacagagtgagagct

SEQ ID NO: 141524 - DNA, 15 bp, Homo sapiens
acagagtgagagctg

SEQ ID NO: 141525 - DNA, 15 bp, Homo sapiens
cagagtgagagctgt

SEQ ID NO: 141526 - DNA, 15 bp, Homo sapiens
agagtgagagctgtc

SEQ ID NO: 141527 - DNA, 15 bp, Homo sapiens
gagtgagagctgtcc

SEQ ID NO: 141528 - DNA, 15 bp, Homo sapiens
agtgagagctgtcct

SEQ ID NO: 141529 - DNA, 15 bp, Homo sapiens
gtgagagctgtcctc

SEQ ID NO: 141530 - DNA, 15 bp, Homo sapiens
tgagagctgtcctcg

SEQ ID NO: 141531 - DNA, 15 bp, Homo sapiens
gagagctgtcctcgt

SEQ ID NO: 141532 - DNA, 15 bp, Homo sapiens
agagctgtcctcgtt

SEQ ID NO: 141533 - DNA, 15 bp, Homo sapiens
gagctgtcctcgttc

SEQ ID NO: 141534 - DNA, 15 bp, Homo sapiens
agctgtcctcgttcc

SEQ ID NO: 141535 - DNA, 15 bp, Homo sapiens
gctgtcctcgttcca

SEQ ID NO: 141536 - DNA, 15 bp, Homo sapiens
ctgtcctcgttccag

SEQ ID NO: 141537 - DNA, 15 bp, Homo sapiens
tgtcctcgttccagt

SEQ ID NO: 141538 - DNA, 15 bp, Homo sapiens
gtcctcgttccagtt

SEQ ID NO: 141539 - DNA, 15 bp, Homo sapiens
tcctcgttccagttt

SEQ ID NO: 141540 - DNA, 15 bp, Homo sapiens
cctcgttccagtttc

SEQ ID NO: 141541 - DNA, 15 bp, Homo sapiens
ctcgttccagtttca

SEQ ID NO: 141542 - DNA, 15 bp, Homo sapiens
tcgttccagtttcac

SEQ ID NO: 141543 - DNA, 15 bp, Homo sapiens
cgttccagtttcact

SEQ ID NO: 141544 - DNA, 15 bp, Homo sapiens
gttccagtttcactg

SEQ ID NO: 141545 - DNA, 15 bp, Homo sapiens
ttccagtttcactga

SEQ ID NO: 141546 - DNA, 15 bp, Homo sapiens
tccagtttcactgat

SEQ ID NO: 141547 - DNA, 15 bp, Homo sapiens
ccagtttcactgatg

SEQ ID NO: 141548 - DNA, 15 bp, Homo sapiens
cagtttcactgatga

SEQ ID NO: 141549 - DNA, 15 bp, Homo sapiens
agtttcactgatgac

SEQ ID NO: 141550 - DNA, 15 bp, Homo sapiens
gtttcactgatgacc

SEQ ID NO: 141551 - DNA, 15 bp, Homo sapiens
tttcactgatgacct

SEQ ID NO: 141552 - DNA, 15 bp, Homo sapiens
ttcactgatgacctc

SEQ ID NO: 141553 - DNA, 15 bp, Homo sapiens
tcactgatgacctct

SEQ ID NO: 141554 - DNA, 15 bp, Homo sapiens
cactgatgacctctc

SEQ ID NO: 141555 - DNA, 15 bp, Homo sapiens
actgatgacctctcg

SEQ ID NO: 141556 - DNA, 15 bp, Homo sapiens
ctgatgacctctcga

SEQ ID NO: 141557 - DNA, 15 bp, Homo sapiens
tgatgacctctcgac

SEQ ID NO: 141558 - DNA, 15 bp, Homo sapiens
gatgacctctcgacc

SEQ ID NO: 141559 - DNA, 15 bp, Homo sapiens
atgacctctcgacca

SEQ ID NO: 141560 - DNA, 15 bp, Homo sapiens
tgacctctcgaccag

SEQ ID NO: 141561 - DNA, 15 bp, Homo sapiens
gacctctcgaccagc

SEQ ID NO: 141562 - DNA, 15 bp, Homo sapiens
acctctcgaccagct

SEQ ID NO: 141563 - DNA, 15 bp, Homo sapiens
cctctcgaccagctc

SEQ ID NO: 141564 - DNA, 15 bp, Homo sapiens
ctctcgaccagctcc

SEQ ID NO: 141565 - DNA, 15 bp, Homo sapiens
tctcgaccagctccc

SEQ ID NO: 141566 - DNA, 15 bp, Homo sapiens
ctcgaccagctccct

SEQ ID NO: 141567 - DNA, 15 bp, Homo sapiens
tcgaccagctccctc

SEQ ID NO: 141568 - DNA, 15 bp, Homo sapiens
cgaccagctccctca

SEQ ID NO: 141569 - DNA, 15 bp, Homo sapiens
gaccagctccctcac

SEQ ID NO: 141570 - DNA, 15 bp, Homo sapiens
accagctccctcaca

SEQ ID NO: 141571 - DNA, 15 bp, Homo sapiens
ccagctccctcacag

SEQ ID NO: 141572 - DNA, 15 bp, Homo sapiens
cagctccctcacagc

SEQ ID NO: 141573 - DNA, 15 bp, Homo sapiens
agctccctcacagca

SEQ ID NO: 141574 - DNA, 15 bp, Homo sapiens
gctccctcacagcag

SEQ ID NO: 141575 - DNA, 15 bp, Homo sapiens
ctccctcacagcagt

SEQ ID NO: 141576 - DNA, 15 bp, Homo sapiens
tccctcacagcagtc

SEQ ID NO: 141577 - DNA, 15 bp, Homo sapiens
ccctcacagcagtct

SEQ ID NO: 141578 - DNA, 15 bp, Homo sapiens
cctcacagcagtctt

SEQ ID NO: 141579 - DNA, 15 bp, Homo sapiens
ctcacagcagtcttt

SEQ ID NO: 141580 - DNA, 15 bp, Homo sapiens
tcacagcagtctttg

SEQ ID NO: 141581 - DNA, 15 bp, Homo sapiens
cacagcagtctttgc

SEQ ID NO: 141582 - DNA, 15 bp, Homo sapiens
acagcagtctttgcc

SEQ ID NO: 141583 - DNA, 15 bp, Homo sapiens
cagcagtctttgcca

SEQ ID NO: 141584 - DNA, 15 bp, Homo sapiens
agcagtctttgccaa

SEQ ID NO: 141585 - DNA, 15 bp, Homo sapiens
gcagtctttgccaac

SEQ ID NO: 141586 - DNA, 15 bp, Homo sapiens
cagtctttgccaaca

SEQ ID NO: 141587 - DNA, 15 bp, Homo sapiens
agtctttgccaacac

SEQ ID NO: 141588 - DNA, 15 bp, Homo sapiens
gtctttgccaacaca

SEQ ID NO: 141589 - DNA, 15 bp, Homo sapiens
tctttgccaacacag

SEQ ID NO: 141590 - DNA, 15 bp, Homo sapiens
ctttgccaacacaga

SEQ ID NO: 141591 - DNA, 15 bp, Homo sapiens
tttgccaacacagac

SEQ ID NO: 141592 - DNA, 15 bp, Homo sapiens
ttgccaacacagaca

SEQ ID NO: 141593 - DNA, 15 bp, Homo sapiens
tgccaacacagacac

SEQ ID NO: 141594 - DNA, 15 bp, Homo sapiens
gccaacacagacact

SEQ ID NO: 141595 - DNA, 15 bp, Homo sapiens
ccaacacagacactg

SEQ ID NO: 141596 - DNA, 15 bp, Homo sapiens
caacacagacactgt

SEQ ID NO: 141597 - DNA, 15 bp, Homo sapiens
aacacagacactgtg

SEQ ID NO: 141598 - DNA, 15 bp, Homo sapiens
acacagacactgtgg

SEQ ID NO: 141599 - DNA, 15 bp, Homo sapiens
cacagacactgtggg

SEQ ID NO: 141600 - DNA, 15 bp, Homo sapiens
acagacactgtgggc

SEQ ID NO: 141601 - DNA, 15 bp, Homo sapiens
cagacactgtgggct

SEQ ID NO: 141602 - DNA, 15 bp, Homo sapiens
agacactgtgggctg

SEQ ID NO: 141603 - DNA, 15 bp, Homo sapiens
gacactgtgggctgt

SEQ ID NO: 141604 - DNA, 15 bp, Homo sapiens
acactgtgggctgta

SEQ ID NO: 141605 - DNA, 15 bp, Homo sapiens
cactgtgggctgtag

SEQ ID NO: 141606 - DNA, 15 bp, Homo sapiens
actgtgggctgtagt

SEQ ID NO: 141607 - DNA, 15 bp, Homo sapiens
ctgtgggctgtagtg

SEQ ID NO: 141608 - DNA, 15 bp, Homo sapiens
tgtgggctgtagtgg

SEQ ID NO: 141609 - DNA, 15 bp, Homo sapiens
gtgggctgtagtggg

SEQ ID NO: 141610 - DNA, 15 bp, Homo sapiens
tgggctgtagtggga

SEQ ID NO: 141611 - DNA, 15 bp, Homo sapiens
gggctgtagtgggag

SEQ ID NO: 141612 - DNA, 15 bp, Homo sapiens
ggctgtagtgggagg

SEQ ID NO: 141613 - DNA, 15 bp, Homo sapiens
gctgtagtgggagga

SEQ ID NO: 141614 - DNA, 15 bp, Homo sapiens
ctgtagtgggaggaa

SEQ ID NO: 141615 - DNA, 15 bp, Homo sapiens
tgtagtgggaggaat

SEQ ID NO: 141616 - DNA, 15 bp, Homo sapiens
gtagtgggaggaatg

SEQ ID NO: 141617 - DNA, 15 bp, Homo sapiens
tagtgggaggaatgt

SEQ ID NO: 141618 - DNA, 15 bp, Homo sapiens
agtgggaggaatgtg

SEQ ID NO: 141619 - DNA, 15 bp, Homo sapiens
gtgggaggaatgtgg

SEQ ID NO: 141620 - DNA, 15 bp, Homo sapiens
tgggaggaatgtggg

SEQ ID NO: 141621 - DNA, 15 bp, Homo sapiens
gggaggaatgtgggg

SEQ ID NO: 141622 - DNA, 15 bp, Homo sapiens
ggaggaatgtggggt

SEQ ID NO: 141623 - DNA, 15 bp, Homo sapiens
gaggaatgtggggtt

SEQ ID NO: 141624 - DNA, 15 bp, Homo sapiens
aggaatgtggggttg

SEQ ID NO: 141625 - DNA, 15 bp, Homo sapiens
ggaatgtggggttga

SEQ ID NO: 141626 - DNA, 15 bp, Homo sapiens
gaatgtggggttgaa

SEQ ID NO: 141627 - DNA, 15 bp, Homo sapiens
aatgtggggttgaat

SEQ ID NO: 141628 - DNA, 15 bp, Homo sapiens
atgtggggttgaatg

SEQ ID NO: 141629 - DNA, 15 bp, Homo sapiens
tgtggggttgaatga

SEQ ID NO: 141630 - DNA, 15 bp, Homo sapiens
gtggggttgaatgag

SEQ ID NO: 141631 - DNA, 15 bp, Homo sapiens
tggggttgaatgagc

SEQ ID NO: 141632 - DNA, 15 bp, Homo sapiens
ggggttgaatgagct

SEQ ID NO: 141633 - DNA, 15 bp, Homo sapiens
gggttgaatgagcta

SEQ ID NO: 141634 - DNA, 15 bp, Homo sapiens
ggttgaatgagctag

SEQ ID NO: 141635 - DNA, 15 bp, Homo sapiens
gttgaatgagctagg

SEQ ID NO: 141636 - DNA, 15 bp, Homo sapiens
ttgaatgagctaggt

SEQ ID NO: 141637 - DNA, 15 bp, Homo sapiens
tgaatgagctaggtt

SEQ ID NO: 141638 - DNA, 15 bp, Homo sapiens
gaatgagctaggttt

SEQ ID NO: 141639 - DNA, 15 bp, Homo sapiens
aatgagctaggtttg

SEQ ID NO: 141640 - DNA, 15 bp, Homo sapiens
atgagctaggtttgg

SEQ ID NO: 141641 - DNA, 15 bp, Homo sapiens
tgagctaggtttggg

SEQ ID NO: 141642 - DNA, 15 bp, Homo sapiens
gagctaggtttgggc

SEQ ID NO: 141643 - DNA, 15 bp, Homo sapiens
agctaggtttgggct

SEQ ID NO: 141644 - DNA, 15 bp, Homo sapiens
gctaggtttgggctc

SEQ ID NO: 141645 - DNA, 15 bp, Homo sapiens
ctaggtttgggctct

SEQ ID NO: 141646 - DNA, 15 bp, Homo sapiens
taggtttgggctctg

SEQ ID NO: 141647 - DNA, 15 bp, Homo sapiens
aggtttgggctctgt

SEQ ID NO: 141648 - DNA, 15 bp, Homo sapiens
ggtttgggctctgtc

SEQ ID NO: 141649 - DNA, 15 bp, Homo sapiens
gtttgggctctgtcc

SEQ ID NO: 141650 - DNA, 15 bp, Homo sapiens
tttgggctctgtcct

SEQ ID NO: 141651 - DNA, 15 bp, Homo sapiens
ttgggctctgtcctt

SEQ ID NO: 141652 - DNA, 15 bp, Homo sapiens
tgggctctgtccttg

SEQ ID NO: 141653 - DNA, 15 bp, Homo sapiens
gggctctgtccttga

SEQ ID NO: 141654 - DNA, 15 bp, Homo sapiens
ggctctgtccttgac

SEQ ID NO: 141655 - DNA, 15 bp, Homo sapiens
gctctgtccttgact

SEQ ID NO: 141656 - DNA, 15 bp, Homo sapiens
ctctgtccttgactc

SEQ ID NO: 141657 - DNA, 15 bp, Homo sapiens
tctgtccttgactca

SEQ ID NO: 141658 - DNA, 15 bp, Homo sapiens
ctgtccttgactcac

SEQ ID NO: 141659 - DNA, 15 bp, Homo sapiens
tgtccttgactcacc

SEQ ID NO: 141660 - DNA, 15 bp, Homo sapiens
gtccttgactcacca

SEQ ID NO: 141661 - DNA, 15 bp, Homo sapiens
tccttgactcaccat

SEQ ID NO: 141662 - DNA, 15 bp, Homo sapiens
ccttgactcaccatt

SEQ ID NO: 141663 - DNA, 15 bp, Homo sapiens
cttgactcaccattg

SEQ ID NO: 141664 - DNA, 15 bp, Homo sapiens
ttgactcaccattgc

SEQ ID NO: 141665 - DNA, 15 bp, Homo sapiens
tgactcaccattgcc

SEQ ID NO: 141666 - DNA, 15 bp, Homo sapiens
gactcaccattgcct

SEQ ID NO: 141667 - DNA, 15 bp, Homo sapiens
actcaccattgcctc

SEQ ID NO: 141668 - DNA, 15 bp, Homo sapiens
ctcaccattgcctca

SEQ ID NO: 141669 - DNA, 15 bp, Homo sapiens
tcaccattgcctcag

SEQ ID NO: 141670 - DNA, 15 bp, Homo sapiens
caccattgcctcagt

SEQ ID NO: 141671 - DNA, 15 bp, Homo sapiens
accattgcctcagtg

SEQ ID NO: 141672 - DNA, 15 bp, Homo sapiens
ccattgcctcagtga

SEQ ID NO: 141673 - DNA, 15 bp, Homo sapiens
cattgcctcagtgat

SEQ ID NO: 141674 - DNA, 15 bp, Homo sapiens
attgcctcagtgatg

SEQ ID NO: 141675 - DNA, 15 bp, Homo sapiens
ttgcctcagtgatgt

SEQ ID NO: 141676 - DNA, 15 bp, Homo sapiens
tgcctcagtgatgtg

SEQ ID NO: 141677 - DNA, 15 bp, Homo sapiens
gcctcagtgatgtga

SEQ ID NO: 141678 - DNA, 15 bp, Homo sapiens
cctcagtgatgtgaa

SEQ ID NO: 141679 - DNA, 15 bp, Homo sapiens
ctcagtgatgtgaaa

SEQ ID NO: 141680 - DNA, 15 bp, Homo sapiens
tcagtgatgtgaaaa

SEQ ID NO: 141681 - DNA, 15 bp, Homo sapiens
cagtgatgtgaaaat

SEQ ID NO: 141682 - DNA, 15 bp, Homo sapiens
agtgatgtgaaaatg

SEQ ID NO: 141683 - DNA, 15 bp, Homo sapiens
gtgatgtgaaaatgg

SEQ ID NO: 141684 - DNA, 15 bp, Homo sapiens
tgatgtgaaaatggt

SEQ ID NO: 141685 - DNA, 15 bp, Homo sapiens
gatgtgaaaatggtg

SEQ ID NO: 141686 - DNA, 15 bp, Homo sapiens
atgtgaaaatggtgt

SEQ ID NO: 141687 - DNA, 15 bp, Homo sapiens
tgtgaaaatggtgtc

SEQ ID NO: 141688 - DNA, 15 bp, Homo sapiens
gtgaaaatggtgtct

SEQ ID NO: 141689 - DNA, 15 bp, Homo sapiens
tgaaaatggtgtctg

SEQ ID NO: 141690 - DNA, 15 bp, Homo sapiens
gaaaatggtgtctga

SEQ ID NO: 141691 - DNA, 15 bp, Homo sapiens
aaaatggtgtctgat

SEQ ID NO: 141692 - DNA, 15 bp, Homo sapiens
aaatggtgtctgatc

SEQ ID NO: 141693 - DNA, 15 bp, Homo sapiens
aatggtgtctgatcc

SEQ ID NO: 141694 - DNA, 15 bp, Homo sapiens
atggtgtctgatcct

SEQ ID NO: 141695 - DNA, 15 bp, Homo sapiens
tggtgtctgatcctt

SEQ ID NO: 141696 - DNA, 15 bp, Homo sapiens
ggtgtctgatcctta

SEQ ID NO: 141697 - DNA, 15 bp, Homo sapiens
gtgtctgatccttaa

SEQ ID NO: 141698 - DNA, 15 bp, Homo sapiens
tgtctgatccttaag

SEQ ID NO: 141699 - DNA, 15 bp, Homo sapiens
gtctgatccttaagg

SEQ ID NO: 141700 - DNA, 15 bp, Homo sapiens
tctgatccttaaggt

SEQ ID NO: 141701 - DNA, 15 bp, Homo sapiens
ctgatccttaaggtt

SEQ ID NO: 141702 - DNA, 15 bp, Homo sapiens
tgatccttaaggttg

SEQ ID NO: 141703 - DNA, 15 bp, Homo sapiens
gatccttaaggttgg

SEQ ID NO: 141704 - DNA, 15 bp, Homo sapiens
atccttaaggttgga

SEQ ID NO: 141705 - DNA, 15 bp, Homo sapiens
tccttaaggttggaa

SEQ ID NO: 141706 - DNA, 15 bp, Homo sapiens
ccttaaggttggaag

SEQ ID NO: 141707 - DNA, 15 bp, Homo sapiens
cttaaggttggaagt

SEQ ID NO: 141708 - DNA, 15 bp, Homo sapiens
ttaaggttggaagtc

SEQ ID NO: 141709 - DNA, 15 bp, Homo sapiens
taaggttggaagtcc

SEQ ID NO: 141710 - DNA, 15 bp, Homo sapiens
aaggttggaagtcca

SEQ ID NO: 141711 - DNA, 15 bp, Homo sapiens
aggttggaagtccag

SEQ ID NO: 141712 - DNA, 15 bp, Homo sapiens
ggttggaagtccagg

SEQ ID NO: 141713 - DNA, 15 bp, Homo sapiens
gttggaagtccaggc

SEQ ID NO: 141714 - DNA, 15 bp, Homo sapiens
ttggaagtccaggca

SEQ ID NO: 141715 - DNA, 15 bp, Homo sapiens
tggaagtccaggcat

SEQ ID NO: 141716 - DNA, 15 bp, Homo sapiens
ggaagtccaggcatg

SEQ ID NO: 141717 - DNA, 15 bp, Homo sapiens
gaagtccaggcatgc

SEQ ID NO: 141718 - DNA, 15 bp, Homo sapiens
aagtccaggcatgca

SEQ ID NO: 141719 - DNA, 15 bp, Homo sapiens
agtccaggcatgcag

SEQ ID NO: 141720 - DNA, 15 bp, Homo sapiens
gtccaggcatgcaga

SEQ ID NO: 141721 - DNA, 15 bp, Homo sapiens
tccaggcatgcagat

SEQ ID NO: 141722 - DNA, 15 bp, Homo sapiens
ccaggcatgcagatt

SEQ ID NO: 141723 - DNA, 15 bp, Homo sapiens
caggcatgcagattt

SEQ ID NO: 141724 - DNA, 15 bp, Homo sapiens
aggcatgcagattta

SEQ ID NO: 141725 - DNA, 15 bp, Homo sapiens
ggcatgcagatttat

SEQ ID NO: 141726 - DNA, 15 bp, Homo sapiens
gcatgcagatttatc

SEQ ID NO: 141727 - DNA, 15 bp, Homo sapiens
catgcagatttatct

SEQ ID NO: 141728 - DNA, 15 bp, Homo sapiens
atgcagatttatctc

SEQ ID NO: 141729 - DNA, 15 bp, Homo sapiens
tgcagatttatctcc

SEQ ID NO: 141730 - DNA, 15 bp, Homo sapiens
gcagatttatctcca

SEQ ID NO: 141731 - DNA, 15 bp, Homo sapiens
cagatttatctccat

SEQ ID NO: 141732 - DNA, 15 bp, Homo sapiens
agatttatctccatc

SEQ ID NO: 141733 - DNA, 15 bp, Homo sapiens
gatttatctccatct

SEQ ID NO: 141734 - DNA, 15 bp, Homo sapiens
atttatctccatctc

SEQ ID NO: 141735 - DNA, 15 bp, Homo sapiens
tttatctccatctca

SEQ ID NO: 141736 - DNA, 15 bp, Homo sapiens
ttatctccatctcaa

SEQ ID NO: 141737 - DNA, 15 bp, Homo sapiens
tatctccatctcaat

SEQ ID NO: 141738 - DNA, 15 bp, Homo sapiens
atctccatctcaata

SEQ ID NO: 141739 - DNA, 15 bp, Homo sapiens
tctccatctcaataa

SEQ ID NO: 141740 - DNA, 15 bp, Homo sapiens
ctccatctcaataac

SEQ ID NO: 141741 - DNA, 15 bp, Homo sapiens
tccatctcaataacg

SEQ ID NO: 141742 - DNA, 15 bp, Homo sapiens
ccatctcaataacgt

SEQ ID NO: 141743 - DNA, 15 bp, Homo sapiens
catctcaataacgtg

SEQ ID NO: 141744 - DNA, 15 bp, Homo sapiens
atctcaataacgtgg

SEQ ID NO: 141745 - DNA, 15 bp, Homo sapiens
tctcaataacgtggg

SEQ ID NO: 141746 - DNA, 15 bp, Homo sapiens
ctcaataacgtgggg

SEQ ID NO: 141747 - DNA, 15 bp, Homo sapiens
tcaataacgtgggga

SEQ ID NO: 141748 - DNA, 15 bp, Homo sapiens
caataacgtggggaa

SEQ ID NO: 141749 - DNA, 15 bp, Homo sapiens
aataacgtggggaaa

SEQ ID NO: 141750 - DNA, 15 bp, Homo sapiens
ataacgtggggaaaa

SEQ ID NO: 141751 - DNA, 15 bp, Homo sapiens
taacgtggggaaaaa

SEQ ID NO: 141752 - DNA, 15 bp, Homo sapiens
aacgtggggaaaaaa

SEQ ID NO: 141753 - DNA, 15 bp, Homo sapiens
acgtggggaaaaaaa

SEQ ID NO: 141754 - DNA, 15 bp, Homo sapiens
cgtggggaaaaaaaa

SEQ ID NO: 141755 - DNA, 15 bp, Homo sapiens
gtggggaaaaaaaag

SEQ ID NO: 141756 - DNA, 15 bp, Homo sapiens
tggggaaaaaaaaga

SEQ ID NO: 141757 - DNA, 15 bp, Homo sapiens
ggggaaaaaaaagaa

SEQ ID NO: 141758 - DNA, 15 bp, Homo sapiens
gggaaaaaaaagaag

SEQ ID NO: 141759 - DNA, 15 bp, Homo sapiens
ggaaaaaaaagaagt

SEQ ID NO: 141760 - DNA, 15 bp, Homo sapiens
gaaaaaaaagaagtg

SEQ ID NO: 141761 - DNA, 15 bp, Homo sapiens
aaaaaaaagaagtgg

SEQ ID NO: 141762 - DNA, 15 bp, Homo sapiens
aaaaaaagaagtggt

SEQ ID NO: 141763 - DNA, 15 bp, Homo sapiens
aaaaaagaagtggtt

SEQ ID NO: 141764 - DNA, 15 bp, Homo sapiens
aaaaagaagtggttt

SEQ ID NO: 141765 - DNA, 15 bp, Homo sapiens
aaaagaagtggtttt

SEQ ID NO: 141766 - DNA, 15 bp, Homo sapiens
aaagaagtggttttt

SEQ ID NO: 141767 - DNA, 15 bp, Homo sapiens
aagaagtggtttttg

SEQ ID NO: 141768 - DNA, 15 bp, Homo sapiens
agaagtggtttttgt

SEQ ID NO: 141769 - DNA, 15 bp, Homo sapiens
gaagtggtttttgtg

SEQ ID NO: 141770 - DNA, 15 bp, Homo sapiens
aagtggtttttgtgg

SEQ ID NO: 141771 - DNA, 15 bp, Homo sapiens
agtggtttttgtgga

SEQ ID NO: 141772 - DNA, 15 bp, Homo sapiens
gtggtttttgtggaa

SEQ ID NO: 141773 - DNA, 15 bp, Homo sapiens
tggtttttgtggaac

SEQ ID NO: 141774 - DNA, 15 bp, Homo sapiens
ggtttttgtggaacc

SEQ ID NO: 141775 - DNA, 15 bp, Homo sapiens
gtttttgtggaacca

SEQ ID NO: 141776 - DNA, 15 bp, Homo sapiens
tttttgtggaaccag

SEQ ID NO: 141777 - DNA, 15 bp, Homo sapiens
ttttgtggaaccagt

SEQ ID NO: 141778 - DNA, 15 bp, Homo sapiens
tttgtggaaccagtg

SEQ ID NO: 141779 - DNA, 15 bp, Homo sapiens
ttgtggaaccagtgg

SEQ ID NO: 141780 - DNA, 15 bp, Homo sapiens
tgtggaaccagtggt

SEQ ID NO: 141781 - DNA, 15 bp, Homo sapiens
gtggaaccagtggtt

SEQ ID NO: 141782 - DNA, 15 bp, Homo sapiens
tggaaccagtggttc

SEQ ID NO: 141783 - DNA, 15 bp, Homo sapiens
ggaaccagtggttcc

SEQ ID NO: 141784 - DNA, 15 bp, Homo sapiens
gaaccagtggttcca

SEQ ID NO: 141785 - DNA, 15 bp, Homo sapiens
aaccagtggttccac

SEQ ID NO: 141786 - DNA, 15 bp, Homo sapiens
accagtggttccact

SEQ ID NO: 141787 - DNA, 15 bp, Homo sapiens
ccagtggttccactg

SEQ ID NO: 141788 - DNA, 15 bp, Homo sapiens
cagtggttccactgt

SEQ ID NO: 141789 - DNA, 15 bp, Homo sapiens
agtggttccactgtc

SEQ ID NO: 141790 - DNA, 15 bp, Homo sapiens
gtggttccactgtcc

SEQ ID NO: 141791 - DNA, 15 bp, Homo sapiens
tggttccactgtcca

SEQ ID NO: 141792 - DNA, 15 bp, Homo sapiens
ggttccactgtccac

SEQ ID NO: 141793 - DNA, 15 bp, Homo sapiens
gttccactgtccacg

SEQ ID NO: 141794 - DNA, 15 bp, Homo sapiens
ttccactgtccacgt

SEQ ID NO: 141795 - DNA, 15 bp, Homo sapiens
tccactgtccacgtg

SEQ ID NO: 141796 - DNA, 15 bp, Homo sapiens
ccactgtccacgtgt

SEQ ID NO: 141797 - DNA, 15 bp, Homo sapiens
cactgtccacgtgtc

SEQ ID NO: 141798 - DNA, 15 bp, Homo sapiens
actgtccacgtgtct

SEQ ID NO: 141799 - DNA, 15 bp, Homo sapiens
ctgtccacgtgtctt

SEQ ID NO: 141800 - DNA, 15 bp, Homo sapiens
tgtccacgtgtcttc

SEQ ID NO: 141801 - DNA, 15 bp, Homo sapiens
gtccacgtgtcttcc

SEQ ID NO: 141802 - DNA, 15 bp, Homo sapiens
tccacgtgtcttcca

SEQ ID NO: 141803 - DNA, 15 bp, Homo sapiens
ccacgtgtcttccag

SEQ ID NO: 141804 - DNA, 15 bp, Homo sapiens
cacgtgtcttccagt

SEQ ID NO: 141805 - DNA, 15 bp, Homo sapiens
acgtgtcttccagtg

SEQ ID NO: 141806 - DNA, 15 bp, Homo sapiens
cgtgtcttccagtgt

SEQ ID NO: 141807 - DNA, 15 bp, Homo sapiens
gtgtcttccagtgtg

SEQ ID NO: 141808 - DNA, 15 bp, Homo sapiens
tgtcttccagtgtgc

SEQ ID NO: 141809 - DNA, 15 bp, Homo sapiens
gtcttccagtgtgcc

SEQ ID NO: 141810 - DNA, 15 bp, Homo sapiens
tcttccagtgtgcct

SEQ ID NO: 141811 - DNA, 15 bp, Homo sapiens
cttccagtgtgccta

SEQ ID NO: 141812 - DNA, 15 bp, Homo sapiens
ttccagtgtgcctag

SEQ ID NO: 141813 - DNA, 15 bp, Homo sapiens
tccagtgtgcctagc

SEQ ID NO: 141814 - DNA, 15 bp, Homo sapiens
ccagtgtgcctagca

SEQ ID NO: 141815 - DNA, 15 bp, Homo sapiens
cagtgtgcctagcac

SEQ ID NO: 141816 - DNA, 15 bp, Homo sapiens
agtgtgcctagcaca

SEQ ID NO: 141817 - DNA, 15 bp, Homo sapiens
gtgtgcctagcacat

SEQ ID NO: 141818 - DNA, 15 bp, Homo sapiens
tgtgcctagcacatt

SEQ ID NO: 141819 - DNA, 15 bp, Homo sapiens
gtgcctagcacattc

SEQ ID NO: 141820 - DNA, 15 bp, Homo sapiens
tgcctagcacattcc

SEQ ID NO: 141821 - DNA, 15 bp, Homo sapiens
gcctagcacattccc

SEQ ID NO: 141822 - DNA, 15 bp, Homo sapiens
cctagcacattccca

SEQ ID NO: 141823 - DNA, 15 bp, Homo sapiens
ctagcacattcccac

SEQ ID NO: 141824 - DNA, 15 bp, Homo sapiens
tagcacattcccacc

SEQ ID NO: 141825 - DNA, 15 bp, Homo sapiens
agcacattcccacca

SEQ ID NO: 141826 - DNA, 15 bp, Homo sapiens
gcacattcccaccaa

SEQ ID NO: 141827 - DNA, 15 bp, Homo sapiens
cacattcccaccaag

SEQ ID NO: 141828 - DNA, 15 bp, Homo sapiens
acattcccaccaagt

SEQ ID NO: 141829 - DNA, 15 bp, Homo sapiens
cattcccaccaagtg

SEQ ID NO: 141830 - DNA, 15 bp, Homo sapiens
attcccaccaagtgg

SEQ ID NO: 141831 - DNA, 15 bp, Homo sapiens
ttcccaccaagtgga

SEQ ID NO: 141832 - DNA, 15 bp, Homo sapiens
tcccaccaagtggat

SEQ ID NO: 141833 - DNA, 15 bp, Homo sapiens
cccaccaagtggatc

SEQ ID NO: 141834 - DNA, 15 bp, Homo sapiens
ccaccaagtggatct

SEQ ID NO: 141835 - DNA, 15 bp, Homo sapiens
caccaagtggatctt

SEQ ID NO: 141836 - DNA, 15 bp, Homo sapiens
accaagtggatcttg

SEQ ID NO: 141837 - DNA, 15 bp, Homo sapiens
ccaagtggatcttgg

SEQ ID NO: 141838 - DNA, 15 bp, Homo sapiens
caagtggatcttggt

SEQ ID NO: 141839 - DNA, 15 bp, Homo sapiens
aagtggatcttggtt

SEQ ID NO: 141840 - DNA, 15 bp, Homo sapiens
agtggatcttggttc

SEQ ID NO: 141841 - DNA, 15 bp, Homo sapiens
gtggatcttggttca

SEQ ID NO: 141842 - DNA, 15 bp, Homo sapiens
tggatcttggttcat

SEQ ID NO: 141843 - DNA, 15 bp, Homo sapiens
ggatcttggttcatg

SEQ ID NO: 141844 - DNA, 15 bp, Homo sapiens
gatcttggttcatga

SEQ ID NO: 141845 - DNA, 15 bp, Homo sapiens
atcttggttcatgag

SEQ ID NO: 141846 - DNA, 15 bp, Homo sapiens
tcttggttcatgagg

SEQ ID NO: 141847 - DNA, 15 bp, Homo sapiens
cttggttcatgaggg

SEQ ID NO: 141848 - DNA, 15 bp, Homo sapiens
ttggttcatgaggga

SEQ ID NO: 141849 - DNA, 15 bp, Homo sapiens
tggttcatgagggaa

SEQ ID NO: 141850 - DNA, 15 bp, Homo sapiens
ggttcatgagggaaa

SEQ ID NO: 141851 - DNA, 15 bp, Homo sapiens
gttcatgagggaaag

SEQ ID NO: 141852 - DNA, 15 bp, Homo sapiens
ttcatgagggaaaga

SEQ ID NO: 141853 - DNA, 15 bp, Homo sapiens
tcatgagggaaagaa

SEQ ID NO: 141854 - DNA, 15 bp, Homo sapiens
catgagggaaagaag

SEQ ID NO: 141855 - DNA, 15 bp, Homo sapiens
atgagggaaagaagg

SEQ ID NO: 141856 - DNA, 15 bp, Homo sapiens
tgagggaaagaaggg

SEQ ID NO: 141857 - DNA, 15 bp, Homo sapiens
gagggaaagaaggga

SEQ ID NO: 141858 - DNA, 15 bp, Homo sapiens
agggaaagaagggaa

SEQ ID NO: 141859 - DNA, 15 bp, Homo sapiens
gggaaagaagggaaa

SEQ ID NO: 141860 - DNA, 15 bp, Homo sapiens
ggaaagaagggaaag

SEQ ID NO: 141861 - DNA, 15 bp, Homo sapiens
gaaagaagggaaagt

SEQ ID NO: 141862 - DNA, 15 bp, Homo sapiens
aaagaagggaaagtg

SEQ ID NO: 141863 - DNA, 15 bp, Homo sapiens
aagaagggaaagtga

SEQ ID NO: 141864 - DNA, 15 bp, Homo sapiens
agaagggaaagtgag

SEQ ID NO: 141865 - DNA, 15 bp, Homo sapiens
gaagggaaagtgagg

SEQ ID NO: 141866 - DNA, 15 bp, Homo sapiens
aagggaaagtgaggg

SEQ ID NO: 141867 - DNA, 15 bp, Homo sapiens
agggaaagtgagggt

SEQ ID NO: 141868 - DNA, 15 bp, Homo sapiens
gggaaagtgagggtg

SEQ ID NO: 141869 - DNA, 15 bp, Homo sapiens
ggaaagtgagggtgc

SEQ ID NO: 141870 - DNA, 15 bp, Homo sapiens
gaaagtgagggtgcc

SEQ ID NO: 141871 - DNA, 15 bp, Homo sapiens
aaagtgagggtgccc

SEQ ID NO: 141872 - DNA, 15 bp, Homo sapiens
aagtgagggtgcccc

SEQ ID NO: 141873 - DNA, 15 bp, Homo sapiens
agtgagggtgccccg

SEQ ID NO: 141874 - DNA, 15 bp, Homo sapiens
gtgagggtgccccga

SEQ ID NO: 141875 - DNA, 15 bp, Homo sapiens
tgagggtgccccgag

SEQ ID NO: 141876 - DNA, 15 bp, Homo sapiens
gagggtgccccgagg

SEQ ID NO: 141877 - DNA, 15 bp, Homo sapiens
agggtgccccgaggc

SEQ ID NO: 141878 - DNA, 15 bp, Homo sapiens
gggtgccccgaggct

SEQ ID NO: 141879 - DNA, 15 bp, Homo sapiens
ggtgccccgaggctc

SEQ ID NO: 141880 - DNA, 15 bp, Homo sapiens
gtgccccgaggctcc

SEQ ID NO: 141881 - DNA, 15 bp, Homo sapiens
tgccccgaggctccc

SEQ ID NO: 141882 - DNA, 15 bp, Homo sapiens
gccccgaggctccca

SEQ ID NO: 141883 - DNA, 15 bp, Homo sapiens
ccccgaggctcccag

SEQ ID NO: 141884 - DNA, 15 bp, Homo sapiens
cccgaggctcccaga

SEQ ID NO: 141885 - DNA, 15 bp, Homo sapiens
ccgaggctcccagaa

SEQ ID NO: 141886 - DNA, 15 bp, Homo sapiens
cgaggctcccagaag

SEQ ID NO: 141887 - DNA, 15 bp, Homo sapiens
gaggctcccagaaga

SEQ ID NO: 141888 - DNA, 15 bp, Homo sapiens
aggctcccagaagac

SEQ ID NO: 141889 - DNA, 15 bp, Homo sapiens
ggctcccagaagaca

SEQ ID NO: 141890 - DNA, 15 bp, Homo sapiens
gctcccagaagacaa

SEQ ID NO: 141891 - DNA, 15 bp, Homo sapiens
ctcccagaagacaag

SEQ ID NO: 141892 - DNA, 15 bp, Homo sapiens
tcccagaagacaagt

SEQ ID NO: 141893 - DNA, 15 bp, Homo sapiens
cccagaagacaagta

SEQ ID NO: 141894 - DNA, 15 bp, Homo sapiens
ccagaagacaagtaa

SEQ ID NO: 141895 - DNA, 15 bp, Homo sapiens
cagaagacaagtaat

SEQ ID NO: 141896 - DNA, 15 bp, Homo sapiens
agaagacaagtaatg

SEQ ID NO: 141897 - DNA, 15 bp, Homo sapiens
gaagacaagtaatgt

SEQ ID NO: 141898 - DNA, 15 bp, Homo sapiens
aagacaagtaatgtc

SEQ ID NO: 141899 - DNA, 15 bp, Homo sapiens
agacaagtaatgtca

SEQ ID NO: 141900 - DNA, 15 bp, Homo sapiens
gacaagtaatgtcac

SEQ ID NO: 141901 - DNA, 15 bp, Homo sapiens
acaagtaatgtcaca

SEQ ID NO: 141902 - DNA, 15 bp, Homo sapiens
caagtaatgtcacag

SEQ ID NO: 141903 - DNA, 15 bp, Homo sapiens
aagtaatgtcacagc

SEQ ID NO: 141904 - DNA, 15 bp, Homo sapiens
agtaatgtcacagct

SEQ ID NO: 141905 - DNA, 15 bp, Homo sapiens
gtaatgtcacagctg

SEQ ID NO: 141906 - DNA, 15 bp, Homo sapiens
taatgtcacagctga

SEQ ID NO: 141907 - DNA, 15 bp, Homo sapiens
aatgtcacagctgag

SEQ ID NO: 141908 - DNA, 15 bp, Homo sapiens
atgtcacagctgagc

SEQ ID NO: 141909 - DNA, 15 bp, Homo sapiens
tgtcacagctgagct

SEQ ID NO: 141910 - DNA, 15 bp, Homo sapiens
gtcacagctgagctg

SEQ ID NO: 141911 - DNA, 15 bp, Homo sapiens
tcacagctgagctgt

SEQ ID NO: 141912 - DNA, 15 bp, Homo sapiens
cacagctgagctgtg

SEQ ID NO: 141913 - DNA, 15 bp, Homo sapiens
acagctgagctgtgt

SEQ ID NO: 141914 - DNA, 15 bp, Homo sapiens
cagctgagctgtgta

SEQ ID NO: 141915 - DNA, 15 bp, Homo sapiens
agctgagctgtgtac

SEQ ID NO: 141916 - DNA, 15 bp, Homo sapiens
gctgagctgtgtaca

SEQ ID NO: 141917 - DNA, 15 bp, Homo sapiens
ctgagctgtgtacag

SEQ ID NO: 141918 - DNA, 15 bp, Homo sapiens
tgagctgtgtacaga

SEQ ID NO: 141919 - DNA, 15 bp, Homo sapiens
gagctgtgtacagat

SEQ ID NO: 141920 - DNA, 15 bp, Homo sapiens
agctgtgtacagatc

SEQ ID NO: 141921 - DNA, 15 bp, Homo sapiens
gctgtgtacagatcg

SEQ ID NO: 141922 - DNA, 15 bp, Homo sapiens
ctgtgtacagatcga

SEQ ID NO: 141923 - DNA, 15 bp, Homo sapiens
tgtgtacagatcgaa

SEQ ID NO: 141924 - DNA, 15 bp, Homo sapiens
gtgtacagatcgaag

SEQ ID NO: 141925 - DNA, 15 bp, Homo sapiens
tgtacagatcgaaga

SEQ ID NO: 141926 - DNA, 15 bp, Homo sapiens
gtacagatcgaagaa

SEQ ID NO: 141927 - DNA, 15 bp, Homo sapiens
tacagatcgaagaag

SEQ ID NO: 141928 - DNA, 15 bp, Homo sapiens
acagatcgaagaagc

SEQ ID NO: 141929 - DNA, 15 bp, Homo sapiens
cagatcgaagaagca

SEQ ID NO: 141930 - DNA, 15 bp, Homo sapiens
agatcgaagaagcag

SEQ ID NO: 141931 - DNA, 15 bp, Homo sapiens
gatcgaagaagcaga

SEQ ID NO: 141932 - DNA, 15 bp, Homo sapiens
atcgaagaagcagat

SEQ ID NO: 141933 - DNA, 15 bp, Homo sapiens
tcgaagaagcagatg

SEQ ID NO: 141934 - DNA, 15 bp, Homo sapiens
cgaagaagcagatgg

SEQ ID NO: 141935 - DNA, 15 bp, Homo sapiens
gaagaagcagatgga

SEQ ID NO: 141936 - DNA, 15 bp, Homo sapiens
aagaagcagatggat

SEQ ID NO: 141937 - DNA, 15 bp, Homo sapiens
agaagcagatggata

SEQ ID NO: 141938 - DNA, 15 bp, Homo sapiens
gaagcagatggataa

SEQ ID NO: 141939 - DNA, 15 bp, Homo sapiens
aagcagatggataag

SEQ ID NO: 141940 - DNA, 15 bp, Homo sapiens
agcagatggataagg

SEQ ID NO: 141941 - DNA, 15 bp, Homo sapiens
gcagatggataagga

SEQ ID NO: 141942 - DNA, 15 bp, Homo sapiens
cagatggataaggag

SEQ ID NO: 141943 - DNA, 15 bp, Homo sapiens
agatggataaggagt

SEQ ID NO: 141944 - DNA, 15 bp, Homo sapiens
gatggataaggagtg

SEQ ID NO: 141945 - DNA, 15 bp, Homo sapiens
atggataaggagtga

SEQ ID NO: 141946 - DNA, 15 bp, Homo sapiens
tggataaggagtgaa

SEQ ID NO: 141947 - DNA, 15 bp, Homo sapiens
ggataaggagtgaac

SEQ ID NO: 141948 - DNA, 15 bp, Homo sapiens
gataaggagtgaaca

SEQ ID NO: 141949 - DNA, 15 bp, Homo sapiens
ataaggagtgaacaa

SEQ ID NO: 141950 - DNA, 15 bp, Homo sapiens
taaggagtgaacaaa

SEQ ID NO: 141951 - DNA, 15 bp, Homo sapiens
aaggagtgaacaaag

SEQ ID NO: 141952 - DNA, 15 bp, Homo sapiens
aggagtgaacaaagt

SEQ ID NO: 141953 - DNA, 15 bp, Homo sapiens
ggagtgaacaaagtc

SEQ ID NO: 141954 - DNA, 15 bp, Homo sapiens
gagtgaacaaagtca

SEQ ID NO: 141955 - DNA, 15 bp, Homo sapiens
agtgaacaaagtcat

SEQ ID NO: 141956 - DNA, 15 bp, Homo sapiens
gtgaacaaagtcatc

SEQ ID NO: 141957 - DNA, 15 bp, Homo sapiens
tgaacaaagtcatcc

SEQ ID NO: 141958 - DNA, 15 bp, Homo sapiens
gaacaaagtcatcct

SEQ ID NO: 141959 - DNA, 15 bp, Homo sapiens
aacaaagtcatcctt

SEQ ID NO: 141960 - DNA, 15 bp, Homo sapiens
acaaagtcatccttg

SEQ ID NO: 141961 - DNA, 15 bp, Homo sapiens
caaagtcatccttgt

SEQ ID NO: 141962 - DNA, 15 bp, Homo sapiens
aaagtcatccttgtc

SEQ ID NO: 141963 - DNA, 15 bp, Homo sapiens
aagtcatccttgtct

SEQ ID NO: 141964 - DNA, 15 bp, Homo sapiens
agtcatccttgtctt

SEQ ID NO: 141965 - DNA, 15 bp, Homo sapiens
gtcatccttgtcttg

SEQ ID NO: 141966 - DNA, 15 bp, Homo sapiens
tcatccttgtcttga

SEQ ID NO: 141967 - DNA, 15 bp, Homo sapiens
catccttgtcttgag

SEQ ID NO: 141968 - DNA, 15 bp, Homo sapiens
atccttgtcttgagg

SEQ ID NO: 141969 - DNA, 15 bp, Homo sapiens
tccttgtcttgaggg

SEQ ID NO: 141970 - DNA, 15 bp, Homo sapiens
ccttgtcttgagggg

SEQ ID NO: 141971 - DNA, 15 bp, Homo sapiens
cttgtcttgaggggt

SEQ ID NO: 141972 - DNA, 15 bp, Homo sapiens
ttgtcttgaggggtc

SEQ ID NO: 141973 - DNA, 15 bp, Homo sapiens
tgtcttgaggggtct

SEQ ID NO: 141974 - DNA, 15 bp, Homo sapiens
gtcttgaggggtctt

SEQ ID NO: 141975 - DNA, 15 bp, Homo sapiens
tcttgaggggtcttt

SEQ ID NO: 141976 - DNA, 15 bp, Homo sapiens
cttgaggggtcttta

SEQ ID NO: 141977 - DNA, 15 bp, Homo sapiens
ttgaggggtctttat

SEQ ID NO: 141978 - DNA, 15 bp, Homo sapiens
tgaggggtctttatt

SEQ ID NO: 141979 - DNA, 15 bp, Homo sapiens
gaggggtctttattt

SEQ ID NO: 141980 - DNA, 15 bp, Homo sapiens
aggggtctttattta

SEQ ID NO: 141981 - DNA, 15 bp, Homo sapiens
ggggtctttatttag

SEQ ID NO: 141982 - DNA, 15 bp, Homo sapiens
gggtctttatttagc

SEQ ID NO: 141983 - DNA, 15 bp, Homo sapiens
ggtctttatttagct

SEQ ID NO: 141984 - DNA, 15 bp, Homo sapiens
gtctttatttagctt

SEQ ID NO: 141985 - DNA, 15 bp, Homo sapiens
tctttatttagcttc

SEQ ID NO: 141986 - DNA, 15 bp, Homo sapiens
ctttatttagcttct

SEQ ID NO: 141987 - DNA, 15 bp, Homo sapiens
tttatttagcttctt

SEQ ID NO: 141988 - DNA, 15 bp, Homo sapiens
ttatttagcttcttc

SEQ ID NO: 141989 - DNA, 15 bp, Homo sapiens
tatttagcttcttct

SEQ ID NO: 141990 - DNA, 15 bp, Homo sapiens
atttagcttcttctt

SEQ ID NO: 141991 - DNA, 15 bp, Homo sapiens
tttagcttcttcttg

SEQ ID NO: 141992 - DNA, 15 bp, Homo sapiens
ttagcttcttcttga

SEQ ID NO: 141993 - DNA, 15 bp, Homo sapiens
tagcttcttcttgac

SEQ ID NO: 141994 - DNA, 15 bp, Homo sapiens
agcttcttcttgact

SEQ ID NO: 141995 - DNA, 15 bp, Homo sapiens
gcttcttcttgactc

SEQ ID NO: 141996 - DNA, 15 bp, Homo sapiens
cttcttcttgactct

SEQ ID NO: 141997 - DNA, 15 bp, Homo sapiens
ttcttcttgactctt

SEQ ID NO: 141998 - DNA, 15 bp, Homo sapiens
tcttcttgactctta

SEQ ID NO: 141999 - DNA, 15 bp, Homo sapiens
cttcttgactcttag

SEQ ID NO: 142000 - DNA, 15 bp, Homo sapiens
ttcttgactcttaga

SEQ ID NO: 142001 - DNA, 15 bp, Homo sapiens
tcttgactcttagac

SEQ ID NO: 142002 - DNA, 15 bp, Homo sapiens
cttgactcttagaca

SEQ ID NO: 142003 - DNA, 15 bp, Homo sapiens
ttgactcttagacaa

SEQ ID NO: 142004 - DNA, 15 bp, Homo sapiens
tgactcttagacaag

SEQ ID NO: 142005 - DNA, 15 bp, Homo sapiens
gactcttagacaagg

SEQ ID NO: 142006 - DNA, 15 bp, Homo sapiens
actcttagacaagga

SEQ ID NO: 142007 - DNA, 15 bp, Homo sapiens
ctcttagacaaggac

SEQ ID NO: 142008 - DNA, 15 bp, Homo sapiens
tcttagacaaggacc

SEQ ID NO: 142009 - DNA, 15 bp, Homo sapiens
cttagacaaggaccc

SEQ ID NO: 142010 - DNA, 15 bp, Homo sapiens
ttagacaaggaccca

SEQ ID NO: 142011 - DNA, 15 bp, Homo sapiens
tagacaaggacccag

SEQ ID NO: 142012 - DNA, 15 bp, Homo sapiens
agacaaggacccaga

SEQ ID NO: 142013 - DNA, 15 bp, Homo sapiens
gacaaggacccagaa

SEQ ID NO: 142014 - DNA, 15 bp, Homo sapiens
acaaggacccagaat

SEQ ID NO: 142015 - DNA, 15 bp, Homo sapiens
caaggacccagaata

SEQ ID NO: 142016 - DNA, 15 bp, Homo sapiens
aaggacccagaatac

SEQ ID NO: 142017 - DNA, 15 bp, Homo sapiens
aggacccagaataca

SEQ ID NO: 142018 - DNA, 15 bp, Homo sapiens
ggacccagaatacag

SEQ ID NO: 142019 - DNA, 15 bp, Homo sapiens
gacccagaatacaga

SEQ ID NO: 142020 - DNA, 15 bp, Homo sapiens
acccagaatacagat

SEQ ID NO: 142021 - DNA, 15 bp, Homo sapiens
cccagaatacagatg

SEQ ID NO: 142022 - DNA, 15 bp, Homo sapiens
ccagaatacagatgg

SEQ ID NO: 142023 - DNA, 15 bp, Homo sapiens
cagaatacagatggg

SEQ ID NO: 142024 - DNA, 15 bp, Homo sapiens
agaatacagatgggg

SEQ ID NO: 142025 - DNA, 15 bp, Homo sapiens
gaatacagatggggc

SEQ ID NO: 142026 - DNA, 15 bp, Homo sapiens
aatacagatggggct

SEQ ID NO: 142027 - DNA, 15 bp, Homo sapiens
atacagatggggctt

SEQ ID NO: 142028 - DNA, 15 bp, Homo sapiens
tacagatggggcttg

SEQ ID NO: 142029 - DNA, 15 bp, Homo sapiens
acagatggggcttgt

SEQ ID NO: 142030 - DNA, 15 bp, Homo sapiens
cagatggggcttgtt

SEQ ID NO: 142031 - DNA, 15 bp, Homo sapiens
agatggggcttgttg

SEQ ID NO: 142032 - DNA, 15 bp, Homo sapiens
gatggggcttgttgt

SEQ ID NO: 142033 - DNA, 15 bp, Homo sapiens
atggggcttgttgtt

SEQ ID NO: 142034 - DNA, 15 bp, Homo sapiens
tggggcttgttgtta

SEQ ID NO: 142035 - DNA, 15 bp, Homo sapiens
ggggcttgttgttac

SEQ ID NO: 142036 - DNA, 15 bp, Homo sapiens
gggcttgttgttacc

SEQ ID NO: 142037 - DNA, 15 bp, Homo sapiens
ggcttgttgttacct

SEQ ID NO: 142038 - DNA, 15 bp, Homo sapiens
gcttgttgttacctt

SEQ ID NO: 142039 - DNA, 15 bp, Homo sapiens
cttgttgttaccttc

SEQ ID NO: 142040 - DNA, 15 bp, Homo sapiens
ttgttgttaccttca

SEQ ID NO: 142041 - DNA, 15 bp, Homo sapiens
tgttgttaccttcag

SEQ ID NO: 142042 - DNA, 15 bp, Homo sapiens
gttgttaccttcagc

SEQ ID NO: 142043 - DNA, 15 bp, Homo sapiens
ttgttaccttcagcc

SEQ ID NO: 142044 - DNA, 15 bp, Homo sapiens
tgttaccttcagcct

SEQ ID NO: 142045 - DNA, 15 bp, Homo sapiens
gttaccttcagcctc

SEQ ID NO: 142046 - DNA, 15 bp, Homo sapiens
ttaccttcagcctca

SEQ ID NO: 142047 - DNA, 15 bp, Homo sapiens
taccttcagcctcat

SEQ ID NO: 142048 - DNA, 15 bp, Homo sapiens
accttcagcctcatg

SEQ ID NO: 142049 - DNA, 15 bp, Homo sapiens
ccttcagcctcatgg

SEQ ID NO: 142050 - DNA, 15 bp, Homo sapiens
cttcagcctcatggc

SEQ ID NO: 142051 - DNA, 15 bp, Homo sapiens
ttcagcctcatggct

SEQ ID NO: 142052 - DNA, 15 bp, Homo sapiens
tcagcctcatggctt

SEQ ID NO: 142053 - DNA, 15 bp, Homo sapiens
cagcctcatggcttt

SEQ ID NO: 142054 - DNA, 15 bp, Homo sapiens
agcctcatggctttt

SEQ ID NO: 142055 - DNA, 15 bp, Homo sapiens
gcctcatggcttttt

SEQ ID NO: 142056 - DNA, 15 bp, Homo sapiens
cctcatggcttttta

SEQ ID NO: 142057 - DNA, 15 bp, Homo sapiens
ctcatggctttttag

SEQ ID NO: 142058 - DNA, 15 bp, Homo sapiens
tcatggctttttagg

SEQ ID NO: 142059 - DNA, 15 bp, Homo sapiens
catggctttttaggg

SEQ ID NO: 142060 - DNA, 15 bp, Homo sapiens
atggctttttagggc

SEQ ID NO: 142061 - DNA, 15 bp, Homo sapiens
tggctttttagggct

SEQ ID NO: 142062 - DNA, 15 bp, Homo sapiens
ggctttttagggcta

SEQ ID NO: 142063 - DNA, 15 bp, Homo sapiens
gctttttagggctag

SEQ ID NO: 142064 - DNA, 15 bp, Homo sapiens
ctttttagggctaga

SEQ ID NO: 142065 - DNA, 15 bp, Homo sapiens
tttttagggctagat

SEQ ID NO: 142066 - DNA, 15 bp, Homo sapiens
ttttagggctagata

SEQ ID NO: 142067 - DNA, 15 bp, Homo sapiens
tttagggctagatac

SEQ ID NO: 142068 - DNA, 15 bp, Homo sapiens
ttagggctagatact

SEQ ID NO: 142069 - DNA, 15 bp, Homo sapiens
tagggctagatactt

SEQ ID NO: 142070 - DNA, 15 bp, Homo sapiens
agggctagatacttc

SEQ ID NO: 142071 - DNA, 15 bp, Homo sapiens
gggctagatacttca

SEQ ID NO: 142072 - DNA, 15 bp, Homo sapiens
ggctagatacttcag

SEQ ID NO: 142073 - DNA, 15 bp, Homo sapiens
gctagatacttcagc

SEQ ID NO: 142074 - DNA, 15 bp, Homo sapiens
ctagatacttcagct

SEQ ID NO: 142075 - DNA, 15 bp, Homo sapiens
tagatacttcagctt

SEQ ID NO: 142076 - DNA, 15 bp, Homo sapiens
agatacttcagcttg

SEQ ID NO: 142077 - DNA, 15 bp, Homo sapiens
gatacttcagcttgt

SEQ ID NO: 142078 - DNA, 15 bp, Homo sapiens
atacttcagcttgtt

SEQ ID NO: 142079 - DNA, 15 bp, Homo sapiens
tacttcagcttgtta

SEQ ID NO: 142080 - DNA, 15 bp, Homo sapiens
acttcagcttgttac

SEQ ID NO: 142081 - DNA, 15 bp, Homo sapiens
cttcagcttgttaca

SEQ ID NO: 142082 - DNA, 15 bp, Homo sapiens
ttcagcttgttacat

SEQ ID NO: 142083 - DNA, 15 bp, Homo sapiens
tcagcttgttacatg

SEQ ID NO: 142084 - DNA, 15 bp, Homo sapiens
cagcttgttacatgc

SEQ ID NO: 142085 - DNA, 15 bp, Homo sapiens
agcttgttacatgca

SEQ ID NO: 142086 - DNA, 15 bp, Homo sapiens
gcttgttacatgcag

SEQ ID NO: 142087 - DNA, 15 bp, Homo sapiens
cttgttacatgcagt

SEQ ID NO: 142088 - DNA, 15 bp, Homo sapiens
ttgttacatgcagtc

SEQ ID NO: 142089 - DNA, 15 bp, Homo sapiens
tgttacatgcagtcc

SEQ ID NO: 142090 - DNA, 15 bp, Homo sapiens
gttacatgcagtcct

SEQ ID NO: 142091 - DNA, 15 bp, Homo sapiens
ttacatgcagtcctt

SEQ ID NO: 142092 - DNA, 15 bp, Homo sapiens
tacatgcagtcctta

SEQ ID NO: 142093 - DNA, 15 bp, Homo sapiens
acatgcagtccttaa

SEQ ID NO: 142094 - DNA, 15 bp, Homo sapiens
catgcagtccttaaa

SEQ ID NO: 142095 - DNA, 15 bp, Homo sapiens
atgcagtccttaaag

SEQ ID NO: 142096 - DNA, 15 bp, Homo sapiens
tgcagtccttaaagc

SEQ ID NO: 142097 - DNA, 15 bp, Homo sapiens
gcagtccttaaagcg

SEQ ID NO: 142098 - DNA, 15 bp, Homo sapiens
cagtccttaaagcgt

SEQ ID NO: 142099 - DNA, 15 bp, Homo sapiens
agtccttaaagcgtc

SEQ ID NO: 142100 - DNA, 15 bp, Homo sapiens
gtccttaaagcgtct

SEQ ID NO: 142101 - DNA, 15 bp, Homo sapiens
tccttaaagcgtctg

SEQ ID NO: 142102 - DNA, 15 bp, Homo sapiens
ccttaaagcgtctgt

SEQ ID NO: 142103 - DNA, 15 bp, Homo sapiens
cttaaagcgtctgtg

SEQ ID NO: 142104 - DNA, 15 bp, Homo sapiens
ttaaagcgtctgtgt

SEQ ID NO: 142105 - DNA, 15 bp, Homo sapiens
taaagcgtctgtgtg

SEQ ID NO: 142106 - DNA, 15 bp, Homo sapiens
aaagcgtctgtgtgg

SEQ ID NO: 142107 - DNA, 15 bp, Homo sapiens
aagcgtctgtgtggg

SEQ ID NO: 142108 - DNA, 15 bp, Homo sapiens
agcgtctgtgtgggt

SEQ ID NO: 142109 - DNA, 15 bp, Homo sapiens
gcgtctgtgtgggtt

SEQ ID NO: 142110 - DNA, 15 bp, Homo sapiens
cgtctgtgtgggttt

SEQ ID NO: 142111 - DNA, 15 bp, Homo sapiens
gtctgtgtgggtttt

SEQ ID NO: 142112 - DNA, 15 bp, Homo sapiens
tctgtgtgggttttt

SEQ ID NO: 142113 - DNA, 15 bp, Homo sapiens
ctgtgtgggtttttg

SEQ ID NO: 142114 - DNA, 15 bp, Homo sapiens
tgtgtgggtttttgc

SEQ ID NO: 142115 - DNA, 15 bp, Homo sapiens
gtgtgggtttttgca

SEQ ID NO: 142116 - DNA, 15 bp, Homo sapiens
tgtgggtttttgcag

SEQ ID NO: 142117 - DNA, 15 bp, Homo sapiens
gtgggtttttgcagg

SEQ ID NO: 142118 - DNA, 15 bp, Homo sapiens
tgggtttttgcagga

SEQ ID NO: 142119 - DNA, 15 bp, Homo sapiens
gggtttttgcaggag

SEQ ID NO: 142120 - DNA, 15 bp, Homo sapiens
ggtttttgcaggaga

SEQ ID NO: 142121 - DNA, 15 bp, Homo sapiens
gtttttgcaggagag

SEQ ID NO: 142122 - DNA, 15 bp, Homo sapiens
tttttgcaggagaga

SEQ ID NO: 142123 - DNA, 15 bp, Homo sapiens
ttttgcaggagagaa

SEQ ID NO: 142124 - DNA, 15 bp, Homo sapiens
tttgcaggagagaac

SEQ ID NO: 142125 - DNA, 15 bp, Homo sapiens
ttgcaggagagaaca

SEQ ID NO: 142126 - DNA, 15 bp, Homo sapiens
tgcaggagagaacac

SEQ ID NO: 142127 - DNA, 15 bp, Homo sapiens
gcaggagagaacact

SEQ ID NO: 142128 - DNA, 15 bp, Homo sapiens
caggagagaacactt

SEQ ID NO: 142129 - DNA, 15 bp, Homo sapiens
aggagagaacacttg

SEQ ID NO: 142130 - DNA, 15 bp, Homo sapiens
ggagagaacacttgc

SEQ ID NO: 142131 - DNA, 15 bp, Homo sapiens
gagagaacacttgct

SEQ ID NO: 142132 - DNA, 15 bp, Homo sapiens
agagaacacttgctc

SEQ ID NO: 142133 - DNA, 15 bp, Homo sapiens
gagaacacttgctcg

SEQ ID NO: 142134 - DNA, 15 bp, Homo sapiens
agaacacttgctcgt

SEQ ID NO: 142135 - DNA, 15 bp, Homo sapiens
gaacacttgctcgtg

SEQ ID NO: 142136 - DNA, 15 bp, Homo sapiens
aacacttgctcgtgt

SEQ ID NO: 142137 - DNA, 15 bp, Homo sapiens
acacttgctcgtgtt

SEQ ID NO: 142138 - DNA, 15 bp, Homo sapiens
cacttgctcgtgttc

SEQ ID NO: 142139 - DNA, 15 bp, Homo sapiens
acttgctcgtgttct

SEQ ID NO: 142140 - DNA, 15 bp, Homo sapiens
cttgctcgtgttctc

SEQ ID NO: 142141 - DNA, 15 bp, Homo sapiens
ttgctcgtgttctcc

SEQ ID NO: 142142 - DNA, 15 bp, Homo sapiens
tgctcgtgttctcct

SEQ ID NO: 142143 - DNA, 15 bp, Homo sapiens
gctcgtgttctcctg

SEQ ID NO: 142144 - DNA, 15 bp, Homo sapiens
ctcgtgttctcctgt

SEQ ID NO: 142145 - DNA, 15 bp, Homo sapiens
tcgtgttctcctgtc

SEQ ID NO: 142146 - DNA, 15 bp, Homo sapiens
cgtgttctcctgtct

SEQ ID NO: 142147 - DNA, 15 bp, Homo sapiens
gtgttctcctgtctg

SEQ ID NO: 142148 - DNA, 15 bp, Homo sapiens
tgttctcctgtctgg

SEQ ID NO: 142149 - DNA, 15 bp, Homo sapiens
gttctcctgtctgga

SEQ ID NO: 142150 - DNA, 15 bp, Homo sapiens
ttctcctgtctggaa

SEQ ID NO: 142151 - DNA, 15 bp, Homo sapiens
tctcctgtctggaac

SEQ ID NO: 142152 - DNA, 15 bp, Homo sapiens
ctcctgtctggaacc

SEQ ID NO: 142153 - DNA, 15 bp, Homo sapiens
tcctgtctggaaccc

SEQ ID NO: 142154 - DNA, 15 bp, Homo sapiens
cctgtctggaacccg

SEQ ID NO: 142155 - DNA, 15 bp, Homo sapiens
ctgtctggaacccgg

SEQ ID NO: 142156 - DNA, 15 bp, Homo sapiens
tgtctggaacccgga

SEQ ID NO: 142157 - DNA, 15 bp, Homo sapiens
gtctggaacccggac

SEQ ID NO: 142158 - DNA, 15 bp, Homo sapiens
tctggaacccggaca

SEQ ID NO: 142159 - DNA, 15 bp, Homo sapiens
ctggaacccggacat

SEQ ID NO: 142160 - DNA, 15 bp, Homo sapiens
tggaacccggacatt

SEQ ID NO: 142161 - DNA, 15 bp, Homo sapiens
ggaacccggacattg

SEQ ID NO: 142162 - DNA, 15 bp, Homo sapiens
gaacccggacattgt

SEQ ID NO: 142163 - DNA, 15 bp, Homo sapiens
aacccggacattgtt

SEQ ID NO: 142164 - DNA, 15 bp, Homo sapiens
acccggacattgttg

SEQ ID NO: 142165 - DNA, 15 bp, Homo sapiens
cccggacattgttgg

SEQ ID NO: 142166 - DNA, 15 bp, Homo sapiens
ccggacattgttgga

SEQ ID NO: 142167 - DNA, 15 bp, Homo sapiens
cggacattgttggaa

SEQ ID NO: 142168 - DNA, 15 bp, Homo sapiens
ggacattgttggaaa

SEQ ID NO: 142169 - DNA, 15 bp, Homo sapiens
gacattgttggaaag

SEQ ID NO: 142170 - DNA, 15 bp, Homo sapiens
acattgttggaaagt

SEQ ID NO: 142171 - DNA, 15 bp, Homo sapiens
cattgttggaaagta

SEQ ID NO: 142172 - DNA, 15 bp, Homo sapiens
attgttggaaagtat

SEQ ID NO: 142173 - DNA, 15 bp, Homo sapiens
ttgttggaaagtatc

SEQ ID NO: 142174 - DNA, 15 bp, Homo sapiens
tgttggaaagtatca

SEQ ID NO: 142175 - DNA, 15 bp, Homo sapiens
gttggaaagtatcag

SEQ ID NO: 142176 - DNA, 15 bp, Homo sapiens
ttggaaagtatcaga

SEQ ID NO: 142177 - DNA, 15 bp, Homo sapiens
tggaaagtatcagat

SEQ ID NO: 142178 - DNA, 15 bp, Homo sapiens
ggaaagtatcagatt

SEQ ID NO: 142179 - DNA, 15 bp, Homo sapiens
gaaagtatcagattt

SEQ ID NO: 142180 - DNA, 15 bp, Homo sapiens
aaagtatcagatttt

SEQ ID NO: 142181 - DNA, 15 bp, Homo sapiens
aagtatcagattttg

SEQ ID NO: 142182 - DNA, 15 bp, Homo sapiens
agtatcagattttgt

SEQ ID NO: 142183 - DNA, 15 bp, Homo sapiens
gtatcagattttgtt

SEQ ID NO: 142184 - DNA, 15 bp, Homo sapiens
tatcagattttgttt

SEQ ID NO: 142185 - DNA, 15 bp, Homo sapiens
atcagattttgtttg

SEQ ID NO: 142186 - DNA, 15 bp, Homo sapiens
tcagattttgtttgg

SEQ ID NO: 142187 - DNA, 15 bp, Homo sapiens
cagattttgtttggc

SEQ ID NO: 142188 - DNA, 15 bp, Homo sapiens
agattttgtttggct

SEQ ID NO: 142189 - DNA, 15 bp, Homo sapiens
gattttgtttggctt

SEQ ID NO: 142190 - DNA, 15 bp, Homo sapiens
attttgtttggcttt

SEQ ID NO: 142191 - DNA, 15 bp, Homo sapiens
ttttgtttggctttg

SEQ ID NO: 142192 - DNA, 15 bp, Homo sapiens
tttgtttggctttgt

SEQ ID NO: 142193 - DNA, 15 bp, Homo sapiens
ttgtttggctttgtg

SEQ ID NO: 142194 - DNA, 15 bp, Homo sapiens
tgtttggctttgtgt

SEQ ID NO: 142195 - DNA, 15 bp, Homo sapiens
gtttggctttgtgtg

SEQ ID NO: 142196 - DNA, 15 bp, Homo sapiens
tttggctttgtgtga

SEQ ID NO: 142197 - DNA, 15 bp, Homo sapiens
ttggctttgtgtgat

SEQ ID NO: 142198 - DNA, 15 bp, Homo sapiens
tggctttgtgtgatt

SEQ ID NO: 142199 - DNA, 15 bp, Homo sapiens
ggctttgtgtgattt

SEQ ID NO: 142200 - DNA, 15 bp, Homo sapiens
gctttgtgtgatttg

SEQ ID NO: 142201 - DNA, 15 bp, Homo sapiens
ctttgtgtgatttga

SEQ ID NO: 142202 - DNA, 15 bp, Homo sapiens
tttgtgtgatttgac

SEQ ID NO: 142203 - DNA, 15 bp, Homo sapiens
ttgtgtgatttgact

SEQ ID NO: 142204 - DNA, 15 bp, Homo sapiens
tgtgtgatttgactg

SEQ ID NO: 142205 - DNA, 15 bp, Homo sapiens
gtgtgatttgactgc

SEQ ID NO: 142206 - DNA, 15 bp, Homo sapiens
tgtgatttgactgcc

SEQ ID NO: 142207 - DNA, 15 bp, Homo sapiens
gtgatttgactgccc

SEQ ID NO: 142208 - DNA, 15 bp, Homo sapiens
tgatttgactgccca

SEQ ID NO: 142209 - DNA, 15 bp, Homo sapiens
gatttgactgcccac

SEQ ID NO: 142210 - DNA, 15 bp, Homo sapiens
atttgactgcccacc

SEQ ID NO: 142211 - DNA, 15 bp, Homo sapiens
tttgactgcccacct

SEQ ID NO: 142212 - DNA, 15 bp, Homo sapiens
ttgactgcccacctg

SEQ ID NO: 142213 - DNA, 15 bp, Homo sapiens
tgactgcccacctgt

SEQ ID NO: 142214 - DNA, 15 bp, Homo sapiens
gactgcccacctgtt

SEQ ID NO: 142215 - DNA, 15 bp, Homo sapiens
actgcccacctgttt

SEQ ID NO: 142216 - DNA, 15 bp, Homo sapiens
ctgcccacctgttta

SEQ ID NO: 142217 - DNA, 15 bp, Homo sapiens
tgcccacctgtttac

SEQ ID NO: 142218 - DNA, 15 bp, Homo sapiens
gcccacctgtttact

SEQ ID NO: 142219 - DNA, 15 bp, Homo sapiens
cccacctgtttactt

SEQ ID NO: 142220 - DNA, 15 bp, Homo sapiens
ccacctgtttacttg

SEQ ID NO: 142221 - DNA, 15 bp, Homo sapiens
cacctgtttacttgc

SEQ ID NO: 142222 - DNA, 15 bp, Homo sapiens
acctgtttacttgct

SEQ ID NO: 142223 - DNA, 15 bp, Homo sapiens
cctgtttacttgctt

SEQ ID NO: 142224 - DNA, 15 bp, Homo sapiens
ctgtttacttgcttt

SEQ ID NO: 142225 - DNA, 15 bp, Homo sapiens
tgtttacttgctttc

SEQ ID NO: 142226 - DNA, 15 bp, Homo sapiens
gtttacttgctttct

SEQ ID NO: 142227 - DNA, 15 bp, Homo sapiens
tttacttgctttctc

SEQ ID NO: 142228 - DNA, 15 bp, Homo sapiens
ttacttgctttctcc

SEQ ID NO: 142229 - DNA, 15 bp, Homo sapiens
tacttgctttctccc

SEQ ID NO: 142230 - DNA, 15 bp, Homo sapiens
acttgctttctccca

SEQ ID NO: 142231 - DNA, 15 bp, Homo sapiens
cttgctttctcccag

SEQ ID NO: 142232 - DNA, 15 bp, Homo sapiens
ttgctttctcccagc

SEQ ID NO: 142233 - DNA, 15 bp, Homo sapiens
tgctttctcccagca

SEQ ID NO: 142234 - DNA, 15 bp, Homo sapiens
gctttctcccagcaa

SEQ ID NO: 142235 - DNA, 15 bp, Homo sapiens
ctttctcccagcaag

SEQ ID NO: 142236 - DNA, 15 bp, Homo sapiens
tttctcccagcaagc

SEQ ID NO: 142237 - DNA, 15 bp, Homo sapiens
ttctcccagcaagca

SEQ ID NO: 142238 - DNA, 15 bp, Homo sapiens
tctcccagcaagcag

SEQ ID NO: 142239 - DNA, 15 bp, Homo sapiens
ctcccagcaagcagc

SEQ ID NO: 142240 - DNA, 15 bp, Homo sapiens
tcccagcaagcagcc

SEQ ID NO: 142241 - DNA, 15 bp, Homo sapiens
cccagcaagcagccg

SEQ ID NO: 142242 - DNA, 15 bp, Homo sapiens
ccagcaagcagccgc

SEQ ID NO: 142243 - DNA, 15 bp, Homo sapiens
cagcaagcagccgca

SEQ ID NO: 142244 - DNA, 15 bp, Homo sapiens
agcaagcagccgcaa

SEQ ID NO: 142245 - DNA, 15 bp, Homo sapiens
gcaagcagccgcaat

SEQ ID NO: 142246 - DNA, 15 bp, Homo sapiens
caagcagccgcaatc

SEQ ID NO: 142247 - DNA, 15 bp, Homo sapiens
aagcagccgcaatcc

SEQ ID NO: 142248 - DNA, 15 bp, Homo sapiens
agcagccgcaatccc

SEQ ID NO: 142249 - DNA, 15 bp, Homo sapiens
gcagccgcaatcccc

SEQ ID NO: 142250 - DNA, 15 bp, Homo sapiens
cagccgcaatcccca

SEQ ID NO: 142251 - DNA, 15 bp, Homo sapiens
agccgcaatccccat

SEQ ID NO: 142252 - DNA, 15 bp, Homo sapiens
gccgcaatccccatg

SEQ ID NO: 142253 - DNA, 15 bp, Homo sapiens
ccgcaatccccatgg

SEQ ID NO: 142254 - DNA, 15 bp, Homo sapiens
cgcaatccccatggg

SEQ ID NO: 142255 - DNA, 15 bp, Homo sapiens
gcaatccccatgggt

SEQ ID NO: 142256 - DNA, 15 bp, Homo sapiens
caatccccatgggtt

SEQ ID NO: 142257 - DNA, 15 bp, Homo sapiens
aatccccatgggttg

SEQ ID NO: 142258 - DNA, 15 bp, Homo sapiens
atccccatgggttgg

SEQ ID NO: 142259 - DNA, 15 bp, Homo sapiens
tccccatgggttggt

SEQ ID NO: 142260 - DNA, 15 bp, Homo sapiens
ccccatgggttggta

SEQ ID NO: 142261 - DNA, 15 bp, Homo sapiens
cccatgggttggtaa

SEQ ID NO: 142262 - DNA, 15 bp, Homo sapiens
ccatgggttggtaat

SEQ ID NO: 142263 - DNA, 15 bp, Homo sapiens
catgggttggtaatg

SEQ ID NO: 142264 - DNA, 15 bp, Homo sapiens
atgggttggtaatgg

SEQ ID NO: 142265 - DNA, 15 bp, Homo sapiens
tgggttggtaatggg

SEQ ID NO: 142266 - DNA, 15 bp, Homo sapiens
gggttggtaatgggt

SEQ ID NO: 142267 - DNA, 15 bp, Homo sapiens
ggttggtaatgggtg

SEQ ID NO: 142268 - DNA, 15 bp, Homo sapiens
gttggtaatgggtgg

SEQ ID NO: 142269 - DNA, 15 bp, Homo sapiens
ttggtaatgggtgga

SEQ ID NO: 142270 - DNA, 15 bp, Homo sapiens
tggtaatgggtggaa

SEQ ID NO: 142271 - DNA, 15 bp, Homo sapiens
ggtaatgggtggaat

SEQ ID NO: 142272 - DNA, 15 bp, Homo sapiens
gtaatgggtggaatg

SEQ ID NO: 142273 - DNA, 15 bp, Homo sapiens
taatgggtggaatga

SEQ ID NO: 142274 - DNA, 15 bp, Homo sapiens
aatgggtggaatgac

SEQ ID NO: 142275 - DNA, 15 bp, Homo sapiens
atgggtggaatgaca

SEQ ID NO: 142276 - DNA, 15 bp, Homo sapiens
tgggtggaatgacac

SEQ ID NO: 142277 - DNA, 15 bp, Homo sapiens
gggtggaatgacaca

SEQ ID NO: 142278 - DNA, 15 bp, Homo sapiens
ggtggaatgacacac

SEQ ID NO: 142279 - DNA, 15 bp, Homo sapiens
gtggaatgacacact

SEQ ID NO: 142280 - DNA, 15 bp, Homo sapiens
tggaatgacacactg

SEQ ID NO: 142281 - DNA, 15 bp, Homo sapiens
ggaatgacacactgt

SEQ ID NO: 142282 - DNA, 15 bp, Homo sapiens
gaatgacacactgtg

SEQ ID NO: 142283 - DNA, 15 bp, Homo sapiens
aatgacacactgtgt

SEQ ID NO: 142284 - DNA, 15 bp, Homo sapiens
atgacacactgtgta

SEQ ID NO: 142285 - DNA, 15 bp, Homo sapiens
tgacacactgtgtag

SEQ ID NO: 142286 - DNA, 15 bp, Homo sapiens
gacacactgtgtaga

SEQ ID NO: 142287 - DNA, 15 bp, Homo sapiens
acacactgtgtagat

SEQ ID NO: 142288 - DNA, 15 bp, Homo sapiens
cacactgtgtagatt

SEQ ID NO: 142289 - DNA, 15 bp, Homo sapiens
acactgtgtagattt

SEQ ID NO: 142290 - DNA, 15 bp, Homo sapiens
cactgtgtagattta

SEQ ID NO: 142291 - DNA, 15 bp, Homo sapiens
actgtgtagatttac

SEQ ID NO: 142292 - DNA, 15 bp, Homo sapiens
ctgtgtagatttact

SEQ ID NO: 142293 - DNA, 15 bp, Homo sapiens
tgtgtagatttactc

SEQ ID NO: 142294 - DNA, 15 bp, Homo sapiens
gtgtagatttactct

SEQ ID NO: 142295 - DNA, 15 bp, Homo sapiens
tgtagatttactctt

SEQ ID NO: 142296 - DNA, 15 bp, Homo sapiens
gtagatttactcttc

SEQ ID NO: 142297 - DNA, 15 bp, Homo sapiens
tagatttactcttca

SEQ ID NO: 142298 - DNA, 15 bp, Homo sapiens
agatttactcttcag

SEQ ID NO: 142299 - DNA, 15 bp, Homo sapiens
gatttactcttcaga

SEQ ID NO: 142300 - DNA, 15 bp, Homo sapiens
atttactcttcagac

SEQ ID NO: 142301 - DNA, 15 bp, Homo sapiens
tttactcttcagact

SEQ ID NO: 142302 - DNA, 15 bp, Homo sapiens
ttactcttcagactc

SEQ ID NO: 142303 - DNA, 15 bp, Homo sapiens
tactcttcagactct

SEQ ID NO: 142304 - DNA, 15 bp, Homo sapiens
actcttcagactcta

SEQ ID NO: 142305 - DNA, 15 bp, Homo sapiens
ctcttcagactctat

SEQ ID NO: 142306 - DNA, 15 bp, Homo sapiens
tcttcagactctatg

SEQ ID NO: 142307 - DNA, 15 bp, Homo sapiens
cttcagactctatgt

SEQ ID NO: 142308 - DNA, 15 bp, Homo sapiens
ttcagactctatgtt

SEQ ID NO: 142309 - DNA, 15 bp, Homo sapiens
tcagactctatgttc

SEQ ID NO: 142310 - DNA, 15 bp, Homo sapiens
cagactctatgttca

SEQ ID NO: 142311 - DNA, 15 bp, Homo sapiens
agactctatgttcac

SEQ ID NO: 142312 - DNA, 15 bp, Homo sapiens
gactctatgttcacc

SEQ ID NO: 142313 - DNA, 15 bp, Homo sapiens
actctatgttcacct

SEQ ID NO: 142314 - DNA, 15 bp, Homo sapiens
ctctatgttcacctc

SEQ ID NO: 142315 - DNA, 15 bp, Homo sapiens
tctatgttcacctca

SEQ ID NO: 142316 - DNA, 15 bp, Homo sapiens
ctatgttcacctcat

SEQ ID NO: 142317 - DNA, 15 bp, Homo sapiens
tatgttcacctcatt

SEQ ID NO: 142318 - DNA, 15 bp, Homo sapiens
atgttcacctcattc

SEQ ID NO: 142319 - DNA, 15 bp, Homo sapiens
tgttcacctcattct

SEQ ID NO: 142320 - DNA, 15 bp, Homo sapiens
gttcacctcattctt

SEQ ID NO: 142321 - DNA, 15 bp, Homo sapiens
ttcacctcattctta

SEQ ID NO: 142322 - DNA, 15 bp, Homo sapiens
tcacctcattcttat

SEQ ID NO: 142323 - DNA, 15 bp, Homo sapiens
cacctcattcttatg

SEQ ID NO: 142324 - DNA, 15 bp, Homo sapiens
acctcattcttatgg

SEQ ID NO: 142325 - DNA, 15 bp, Homo sapiens
cctcattcttatggg

SEQ ID NO: 142326 - DNA, 15 bp, Homo sapiens
ctcattcttatggga

SEQ ID NO: 142327 - DNA, 15 bp, Homo sapiens
tcattcttatgggaa

SEQ ID NO: 142328 - DNA, 15 bp, Homo sapiens
cattcttatgggaaa

SEQ ID NO: 142329 - DNA, 15 bp, Homo sapiens
attcttatgggaaaa

SEQ ID NO: 142330 - DNA, 15 bp, Homo sapiens
ttcttatgggaaaag

SEQ ID NO: 142331 - DNA, 15 bp, Homo sapiens
tcttatgggaaaaga

SEQ ID NO: 142332 - DNA, 15 bp, Homo sapiens
cttatgggaaaagaa

SEQ ID NO: 142333 - DNA, 15 bp, Homo sapiens
ttatgggaaaagaag

SEQ ID NO: 142334 - DNA, 15 bp, Homo sapiens
tatgggaaaagaaga

SEQ ID NO: 142335 - DNA, 15 bp, Homo sapiens
atgggaaaagaagag

SEQ ID NO: 142336 - DNA, 15 bp, Homo sapiens
tgggaaaagaagagc

SEQ ID NO: 142337 - DNA, 15 bp, Homo sapiens
gggaaaagaagagca

SEQ ID NO: 142338 - DNA, 15 bp, Homo sapiens
ggaaaagaagagcac

SEQ ID NO: 142339 - DNA, 15 bp, Homo sapiens
gaaaagaagagcact

SEQ ID NO: 142340 - DNA, 15 bp, Homo sapiens
aaaagaagagcacta

SEQ ID NO: 142341 - DNA, 15 bp, Homo sapiens
aaagaagagcactag

SEQ ID NO: 142342 - DNA, 15 bp, Homo sapiens
aagaagagcactagc

SEQ ID NO: 142343 - DNA, 15 bp, Homo sapiens
agaagagcactagct

SEQ ID NO: 142344 - DNA, 15 bp, Homo sapiens
gaagagcactagctg

SEQ ID NO: 142345 - DNA, 15 bp, Homo sapiens
aagagcactagctgg

SEQ ID NO: 142346 - DNA, 15 bp, Homo sapiens
agagcactagctggt

SEQ ID NO: 142347 - DNA, 15 bp, Homo sapiens
gagcactagctggta

SEQ ID NO: 142348 - DNA, 15 bp, Homo sapiens
agcactagctggtag

SEQ ID NO: 142349 - DNA, 15 bp, Homo sapiens
gcactagctggtaga

SEQ ID NO: 142350 - DNA, 15 bp, Homo sapiens
cactagctggtagat

SEQ ID NO: 142351 - DNA, 15 bp, Homo sapiens
actagctggtagata

SEQ ID NO: 142352 - DNA, 15 bp, Homo sapiens
ctagctggtagatat

SEQ ID NO: 142353 - DNA, 15 bp, Homo sapiens
tagctggtagatata

SEQ ID NO: 142354 - DNA, 15 bp, Homo sapiens
agctggtagatatag

SEQ ID NO: 142355 - DNA, 15 bp, Homo sapiens
gctggtagatatagc

SEQ ID NO: 142356 - DNA, 15 bp, Homo sapiens
ctggtagatatagca

SEQ ID NO: 142357 - DNA, 15 bp, Homo sapiens
tggtagatatagcag

SEQ ID NO: 142358 - DNA, 15 bp, Homo sapiens
ggtagatatagcagt

SEQ ID NO: 142359 - DNA, 15 bp, Homo sapiens
gtagatatagcagtg

SEQ ID NO: 142360 - DNA, 15 bp, Homo sapiens
tagatatagcagtgt

SEQ ID NO: 142361 - DNA, 15 bp, Homo sapiens
agatatagcagtgtg

SEQ ID NO: 142362 - DNA, 15 bp, Homo sapiens
gatatagcagtgtgt

SEQ ID NO: 142363 - DNA, 15 bp, Homo sapiens
atatagcagtgtgtt

SEQ ID NO: 142364 - DNA, 15 bp, Homo sapiens
tatagcagtgtgtta

SEQ ID NO: 142365 - DNA, 15 bp, Homo sapiens
atagcagtgtgttaa

SEQ ID NO: 142366 - DNA, 15 bp, Homo sapiens
tagcagtgtgttaat

SEQ ID NO: 142367 - DNA, 15 bp, Homo sapiens
agcagtgtgttaata

SEQ ID NO: 142368 - DNA, 15 bp, Homo sapiens
gcagtgtgttaatat

SEQ ID NO: 142369 - DNA, 15 bp, Homo sapiens
cagtgtgttaatatg

SEQ ID NO: 142370 - DNA, 15 bp, Homo sapiens
agtgtgttaatatga

SEQ ID NO: 142371 - DNA, 15 bp, Homo sapiens
gtgtgttaatatgac

SEQ ID NO: 142372 - DNA, 15 bp, Homo sapiens
tgtgttaatatgact

SEQ ID NO: 142373 - DNA, 15 bp, Homo sapiens
gtgttaatatgactg

SEQ ID NO: 142374 - DNA, 15 bp, Homo sapiens
tgttaatatgactgc

SEQ ID NO: 142375 - DNA, 15 bp, Homo sapiens
gttaatatgactgct

SEQ ID NO: 142376 - DNA, 15 bp, Homo sapiens
ttaatatgactgctc

SEQ ID NO: 142377 - DNA, 15 bp, Homo sapiens
taatatgactgctca

SEQ ID NO: 142378 - DNA, 15 bp, Homo sapiens
aatatgactgctcaa

SEQ ID NO: 142379 - DNA, 15 bp, Homo sapiens
atatgactgctcaac

SEQ ID NO: 142380 - DNA, 15 bp, Homo sapiens
tatgactgctcaact

SEQ ID NO: 142381 - DNA, 15 bp, Homo sapiens
atgactgctcaactc

SEQ ID NO: 142382 - DNA, 15 bp, Homo sapiens
tgactgctcaactcc

SEQ ID NO: 142383 - DNA, 15 bp, Homo sapiens
gactgctcaactcca

SEQ ID NO: 142384 - DNA, 15 bp, Homo sapiens
actgctcaactccat

SEQ ID NO: 142385 - DNA, 15 bp, Homo sapiens
ctgctcaactccatt

SEQ ID NO: 142386 - DNA, 15 bp, Homo sapiens
tgctcaactccattt

SEQ ID NO: 142387 - DNA, 15 bp, Homo sapiens
gctcaactccattta

SEQ ID NO: 142388 - DNA, 15 bp, Homo sapiens
ctcaactccatttac

SEQ ID NO: 142389 - DNA, 15 bp, Homo sapiens
tcaactccatttaca

SEQ ID NO: 142390 - DNA, 15 bp, Homo sapiens
caactccatttacac

SEQ ID NO: 142391 - DNA, 15 bp, Homo sapiens
aactccatttacaca

SEQ ID NO: 142392 - DNA, 15 bp, Homo sapiens
actccatttacacag

SEQ ID NO: 142393 - DNA, 15 bp, Homo sapiens
ctccatttacacaga

SEQ ID NO: 142394 - DNA, 15 bp, Homo sapiens
tccatttacacagac

SEQ ID NO: 142395 - DNA, 15 bp, Homo sapiens
ccatttacacagaca

SEQ ID NO: 142396 - DNA, 15 bp, Homo sapiens
catttacacagacat

SEQ ID NO: 142397 - DNA, 15 bp, Homo sapiens
atttacacagacatt

SEQ ID NO: 142398 - DNA, 15 bp, Homo sapiens
tttacacagacattt

SEQ ID NO: 142399 - DNA, 15 bp, Homo sapiens
ttacacagacatttt

SEQ ID NO: 142400 - DNA, 15 bp, Homo sapiens
tacacagacattttc

SEQ ID NO: 142401 - DNA, 15 bp, Homo sapiens
acacagacattttca

SEQ ID NO: 142402 - DNA, 15 bp, Homo sapiens
cacagacattttcac

SEQ ID NO: 142403 - DNA, 15 bp, Homo sapiens
acagacattttcacc

SEQ ID NO: 142404 - DNA, 15 bp, Homo sapiens
cagacattttcacct

SEQ ID NO: 142405 - DNA, 15 bp, Homo sapiens
agacattttcacctt

SEQ ID NO: 142406 - DNA, 15 bp, Homo sapiens
gacattttcacctta

SEQ ID NO: 142407 - DNA, 15 bp, Homo sapiens
acattttcaccttag

SEQ ID NO: 142408 - DNA, 15 bp, Homo sapiens
cattttcaccttagt

SEQ ID NO: 142409 - DNA, 15 bp, Homo sapiens
attttcaccttagtt

SEQ ID NO: 142410 - DNA, 15 bp, Homo sapiens
ttttcaccttagtta

SEQ ID NO: 142411 - DNA, 15 bp, Homo sapiens
tttcaccttagttat

SEQ ID NO: 142412 - DNA, 15 bp, Homo sapiens
ttcaccttagttata

SEQ ID NO: 142413 - DNA, 15 bp, Homo sapiens
tcaccttagttatac

SEQ ID NO: 142414 - DNA, 15 bp, Homo sapiens
caccttagttatact

SEQ ID NO: 142415 - DNA, 15 bp, Homo sapiens
accttagttatacta

SEQ ID NO: 142416 - DNA, 15 bp, Homo sapiens
ccttagttatactat

SEQ ID NO: 142417 - DNA, 15 bp, Homo sapiens
cttagttatactatt

SEQ ID NO: 142418 - DNA, 15 bp, Homo sapiens
ttagttatactattt

SEQ ID NO: 142419 - DNA, 15 bp, Homo sapiens
tagttatactatttc

SEQ ID NO: 142420 - DNA, 15 bp, Homo sapiens
agttatactatttct

SEQ ID NO: 142421 - DNA, 15 bp, Homo sapiens
gttatactatttctt

SEQ ID NO: 142422 - DNA, 15 bp, Homo sapiens
ttatactatttcttc

SEQ ID NO: 142423 - DNA, 15 bp, Homo sapiens
tatactatttcttca

SEQ ID NO: 142424 - DNA, 15 bp, Homo sapiens
atactatttcttcat

SEQ ID NO: 142425 - DNA, 15 bp, Homo sapiens
tactatttcttcatt

SEQ ID NO: 142426 - DNA, 15 bp, Homo sapiens
actatttcttcatta

SEQ ID NO: 142427 - DNA, 15 bp, Homo sapiens
ctatttcttcattaa

SEQ ID NO: 142428 - DNA, 15 bp, Homo sapiens
tatttcttcattaaa

SEQ ID NO: 142429 - DNA, 15 bp, Homo sapiens
atttcttcattaaat

SEQ ID NO: 142430 - DNA, 15 bp, Homo sapiens
tttcttcattaaata

SEQ ID NO: 142431 - DNA, 15 bp, Homo sapiens
ttcttcattaaatat

SEQ ID NO: 142432 - DNA, 15 bp, Homo sapiens
tcttcattaaatatt

SEQ ID NO: 142433 - DNA, 15 bp, Homo sapiens
cttcattaaatattg

SEQ ID NO: 142434 - DNA, 15 bp, Homo sapiens
ttcattaaatattgt

SEQ ID NO: 142435 - DNA, 15 bp, Homo sapiens
tcattaaatattgtt

SEQ ID NO: 142436 - DNA, 15 bp, Homo sapiens
cattaaatattgttg

SEQ ID NO: 142437 - DNA, 15 bp, Homo sapiens
attaaatattgttgc

SEQ ID NO: 142438 - DNA, 15 bp, Homo sapiens
ttaaatattgttgcc

SEQ ID NO: 142439 - DNA, 15 bp, Homo sapiens
taaatattgttgcca

SEQ ID NO: 142440 - DNA, 15 bp, Homo sapiens
aaatattgttgccag

SEQ ID NO: 142441 - DNA, 15 bp, Homo sapiens
aatattgttgccaga

SEQ ID NO: 142442 - DNA, 15 bp, Homo sapiens
atattgttgccagat

SEQ ID NO: 142443 - DNA, 15 bp, Homo sapiens
tattgttgccagatc

SEQ ID NO: 142444 - DNA, 15 bp, Homo sapiens
attgttgccagatct

SEQ ID NO: 142445 - DNA, 15 bp, Homo sapiens
ttgttgccagatcta

SEQ ID NO: 142446 - DNA, 15 bp, Homo sapiens
tgttgccagatctaa

SEQ ID NO: 142447 - DNA, 15 bp, Homo sapiens
gttgccagatctaag

SEQ ID NO: 142448 - DNA, 15 bp, Homo sapiens
ttgccagatctaaga

SEQ ID NO: 142449 - DNA, 15 bp, Homo sapiens
tgccagatctaagat

SEQ ID NO: 142450 - DNA, 15 bp, Homo sapiens
gccagatctaagata

SEQ ID NO: 142451 - DNA, 15 bp, Homo sapiens
ccagatctaagatac

SEQ ID NO: 142452 - DNA, 15 bp, Homo sapiens
cagatctaagataca

SEQ ID NO: 142453 - DNA, 15 bp, Homo sapiens
agatctaagatacag

SEQ ID NO: 142454 - DNA, 15 bp, Homo sapiens
gatctaagatacagg

SEQ ID NO: 142455 - DNA, 15 bp, Homo sapiens
atctaagatacaggt

SEQ ID NO: 142456 - DNA, 15 bp, Homo sapiens
tctaagatacaggtt

SEQ ID NO: 142457 - DNA, 15 bp, Homo sapiens
ctaagatacaggttt

SEQ ID NO: 142458 - DNA, 15 bp, Homo sapiens
taagatacaggttta

SEQ ID NO: 142459 - DNA, 15 bp, Homo sapiens
aagatacaggtttaa

SEQ ID NO: 142460 - DNA, 15 bp, Homo sapiens
agatacaggtttaat

SEQ ID NO: 142461 - DNA, 15 bp, Homo sapiens
gatacaggtttaatt

SEQ ID NO: 142462 - DNA, 15 bp, Homo sapiens
atacaggtttaattt

SEQ ID NO: 142463 - DNA, 15 bp, Homo sapiens
tacaggtttaatttt

SEQ ID NO: 142464 - DNA, 15 bp, Homo sapiens
acaggtttaattttt

SEQ ID NO: 142465 - DNA, 15 bp, Homo sapiens
caggtttaatttttt

SEQ ID NO: 142466 - DNA, 15 bp, Homo sapiens
aggtttaattttttc

SEQ ID NO: 142467 - DNA, 15 bp, Homo sapiens
ggtttaattttttcc

SEQ ID NO: 142468 - DNA, 15 bp, Homo sapiens
gtttaattttttcct

SEQ ID NO: 142469 - DNA, 15 bp, Homo sapiens
tttaattttttcctc

SEQ ID NO: 142470 - DNA, 15 bp, Homo sapiens
ttaattttttcctct

SEQ ID NO: 142471 - DNA, 15 bp, Homo sapiens
taattttttcctctg

SEQ ID NO: 142472 - DNA, 15 bp, Homo sapiens
aattttttcctctga

SEQ ID NO: 142473 - DNA, 15 bp, Homo sapiens
attttttcctctgaa

SEQ ID NO: 142474 - DNA, 15 bp, Homo sapiens
ttttttcctctgaat

SEQ ID NO: 142475 - DNA, 15 bp, Homo sapiens
tttttcctctgaatt

SEQ ID NO: 142476 - DNA, 15 bp, Homo sapiens
ttttcctctgaatta

SEQ ID NO: 142477 - DNA, 15 bp, Homo sapiens
tttcctctgaattat

SEQ ID NO: 142478 - DNA, 15 bp, Homo sapiens
ttcctctgaattatg

SEQ ID NO: 142479 - DNA, 15 bp, Homo sapiens
tcctctgaattatgt

SEQ ID NO: 142480 - DNA, 15 bp, Homo sapiens
cctctgaattatgtg

SEQ ID NO: 142481 - DNA, 15 bp, Homo sapiens
ctctgaattatgtgg

SEQ ID NO: 142482 - DNA, 15 bp, Homo sapiens
tctgaattatgtggt

SEQ ID NO: 142483 - DNA, 15 bp, Homo sapiens
ctgaattatgtggta

SEQ ID NO: 142484 - DNA, 15 bp, Homo sapiens
tgaattatgtggtag

SEQ ID NO: 142485 - DNA, 15 bp, Homo sapiens
gaattatgtggtagt

SEQ ID NO: 142486 - DNA, 15 bp, Homo sapiens
aattatgtggtagta

SEQ ID NO: 142487 - DNA, 15 bp, Homo sapiens
attatgtggtagtag

SEQ ID NO: 142488 - DNA, 15 bp, Homo sapiens
ttatgtggtagtaga

SEQ ID NO: 142489 - DNA, 15 bp, Homo sapiens
tatgtggtagtagat

SEQ ID NO: 142490 - DNA, 15 bp, Homo sapiens
atgtggtagtagatg

SEQ ID NO: 142491 - DNA, 15 bp, Homo sapiens
tgtggtagtagatgt

SEQ ID NO: 142492 - DNA, 15 bp, Homo sapiens
gtggtagtagatgta

SEQ ID NO: 142493 - DNA, 15 bp, Homo sapiens
tggtagtagatgtat

SEQ ID NO: 142494 - DNA, 15 bp, Homo sapiens
ggtagtagatgtatt

SEQ ID NO: 142495 - DNA, 15 bp, Homo sapiens
gtagtagatgtattt

SEQ ID NO: 142496 - DNA, 15 bp, Homo sapiens
tagtagatgtattta

SEQ ID NO: 142497 - DNA, 15 bp, Homo sapiens
agtagatgtatttaa

SEQ ID NO: 142498 - DNA, 15 bp, Homo sapiens
gtagatgtatttaac

SEQ ID NO: 142499 - DNA, 15 bp, Homo sapiens
tagatgtatttaact

SEQ ID NO: 142500 - DNA, 15 bp, Homo sapiens
agatgtatttaacta

SEQ ID NO: 142501 - DNA, 15 bp, Homo sapiens
gatgtatttaactat

SEQ ID NO: 142502 - DNA, 15 bp, Homo sapiens
atgtatttaactatg

SEQ ID NO: 142503 - DNA, 15 bp, Homo sapiens
tgtatttaactatgt

SEQ ID NO: 142504 - DNA, 15 bp, Homo sapiens
gtatttaactatgtt

SEQ ID NO: 142505 - DNA, 15 bp, Homo sapiens
tatttaactatgttt

SEQ ID NO: 142506 - DNA, 15 bp, Homo sapiens
atttaactatgttta

SEQ ID NO: 142507 - DNA, 15 bp, Homo sapiens
tttaactatgtttag

SEQ ID NO: 142508 - DNA, 15 bp, Homo sapiens
ttaactatgtttaga

SEQ ID NO: 142509 - DNA, 15 bp, Homo sapiens
taactatgtttagaa

SEQ ID NO: 142510 - DNA, 15 bp, Homo sapiens
aactatgtttagaaa

SEQ ID NO: 142511 - DNA, 15 bp, Homo sapiens
actatgtttagaaac

SEQ ID NO: 142512 - DNA, 15 bp, Homo sapiens
ctatgtttagaaaca

SEQ ID NO: 142513 - DNA, 15 bp, Homo sapiens
tatgtttagaaacag

SEQ ID NO: 142514 - DNA, 15 bp, Homo sapiens
atgtttagaaacagc

SEQ ID NO: 142515 - DNA, 15 bp, Homo sapiens
tgtttagaaacagca

SEQ ID NO: 142516 - DNA, 15 bp, Homo sapiens
gtttagaaacagcaa

SEQ ID NO: 142517 - DNA, 15 bp, Homo sapiens
tttagaaacagcaaa

SEQ ID NO: 142518 - DNA, 15 bp, Homo sapiens
ttagaaacagcaaaa

SEQ ID NO: 142519 - DNA, 15 bp, Homo sapiens
tagaaacagcaaaaa

SEQ ID NO: 142520 - DNA, 15 bp, Homo sapiens
agaaacagcaaaaaa

SEQ ID NO: 142521 - DNA, 15 bp, Homo sapiens
gaaacagcaaaaaat

SEQ ID NO: 142522 - DNA, 15 bp, Homo sapiens
aaacagcaaaaaatg

SEQ ID NO: 142523 - DNA, 15 bp, Homo sapiens
aacagcaaaaaatga

SEQ ID NO: 142524 - DNA, 15 bp, Homo sapiens
acagcaaaaaatgaa

SEQ ID NO: 142525 - DNA, 15 bp, Homo sapiens
cagcaaaaaatgaag

SEQ ID NO: 142526 - DNA, 15 bp, Homo sapiens
agcaaaaaatgaagc

SEQ ID NO: 142527 - DNA, 15 bp, Homo sapiens
gcaaaaaatgaagcg

SEQ ID NO: 142528 - DNA, 15 bp, Homo sapiens
caaaaaatgaagcgt

SEQ ID NO: 142529 - DNA, 15 bp, Homo sapiens
aaaaaatgaagcgtt

SEQ ID NO: 142530 - DNA, 15 bp, Homo sapiens
aaaaatgaagcgttt

SEQ ID NO: 142531 - DNA, 15 bp, Homo sapiens
aaaatgaagcgtttg

SEQ ID NO: 142532 - DNA, 15 bp, Homo sapiens
aaatgaagcgtttga

SEQ ID NO: 142533 - DNA, 15 bp, Homo sapiens
aatgaagcgtttgaa

SEQ ID NO: 142534 - DNA, 15 bp, Homo sapiens
atgaagcgtttgaat

SEQ ID NO: 142535 - DNA, 15 bp, Homo sapiens
tgaagcgtttgaatg

SEQ ID NO: 142536 - DNA, 15 bp, Homo sapiens
gaagcgtttgaatgc

SEQ ID NO: 142537 - DNA, 15 bp, Homo sapiens
aagcgtttgaatgcg

SEQ ID NO: 142538 - DNA, 15 bp, Homo sapiens
agcgtttgaatgcgt

SEQ ID NO: 142539 - DNA, 15 bp, Homo sapiens
gcgtttgaatgcgtt

SEQ ID NO: 142540 - DNA, 15 bp, Homo sapiens
cgtttgaatgcgtta

SEQ ID NO: 142541 - DNA, 15 bp, Homo sapiens
gtttgaatgcgttaa

SEQ ID NO: 142542 - DNA, 15 bp, Homo sapiens
tttgaatgcgttaaa

SEQ ID NO: 142543 - DNA, 15 bp, Homo sapiens
ttgaatgcgttaaac

SEQ ID NO: 142544 - DNA, 15 bp, Homo sapiens
tgaatgcgttaaaca

SEQ ID NO: 142545 - DNA, 15 bp, Homo sapiens
gaatgcgttaaacac

SEQ ID NO: 142546 - DNA, 15 bp, Homo sapiens
aatgcgttaaacaca

SEQ ID NO: 142547 - DNA, 15 bp, Homo sapiens
atgcgttaaacacat

SEQ ID NO: 142548 - DNA, 15 bp, Homo sapiens
tgcgttaaacacatc

SEQ ID NO: 142549 - DNA, 15 bp, Homo sapiens
gcgttaaacacatct

SEQ ID NO: 142550 - DNA, 15 bp, Homo sapiens
cgttaaacacatcta

SEQ ID NO: 142551 - DNA, 15 bp, Homo sapiens
gttaaacacatctaa

SEQ ID NO: 142552 - DNA, 15 bp, Homo sapiens
ttaaacacatctaat

SEQ ID NO: 142553 - DNA, 15 bp, Homo sapiens
taaacacatctaatt

SEQ ID NO: 142554 - DNA, 15 bp, Homo sapiens
aaacacatctaattt

SEQ ID NO: 142555 - DNA, 15 bp, Homo sapiens
aacacatctaatttg

SEQ ID NO: 142556 - DNA, 15 bp, Homo sapiens
acacatctaatttga

SEQ ID NO: 142557 - DNA, 15 bp, Homo sapiens
cacatctaatttgaa

SEQ ID NO: 142558 - DNA, 15 bp, Homo sapiens
acatctaatttgaaa

SEQ ID NO: 142559 - DNA, 15 bp, Homo sapiens
catctaatttgaaag

SEQ ID NO: 142560 - DNA, 15 bp, Homo sapiens
atctaatttgaaagt

SEQ ID NO: 142561 - DNA, 15 bp, Homo sapiens
tctaatttgaaagtt

SEQ ID NO: 142562 - DNA, 15 bp, Homo sapiens
ctaatttgaaagtta

SEQ ID NO: 142563 - DNA, 15 bp, Homo sapiens
taatttgaaagttaa

SEQ ID NO: 142564 - DNA, 15 bp, Homo sapiens
aatttgaaagttaat

SEQ ID NO: 142565 - DNA, 15 bp, Homo sapiens
atttgaaagttaata

SEQ ID NO: 142566 - DNA, 15 bp, Homo sapiens
tttgaaagttaatat

SEQ ID NO: 142567 - DNA, 15 bp, Homo sapiens
ttgaaagttaatatt

SEQ ID NO: 142568 - DNA, 15 bp, Homo sapiens
tgaaagttaatattt

SEQ ID NO: 142569 - DNA, 15 bp, Homo sapiens
gaaagttaatattta

SEQ ID NO: 142570 - DNA, 15 bp, Homo sapiens
aaagttaatatttag

SEQ ID NO: 142571 - DNA, 15 bp, Homo sapiens
aagttaatatttagg

SEQ ID NO: 142572 - DNA, 15 bp, Homo sapiens
agttaatatttaggt

SEQ ID NO: 142573 - DNA, 15 bp, Homo sapiens
gttaatatttaggtt

SEQ ID NO: 142574 - DNA, 15 bp, Homo sapiens
ttaatatttaggttg

SEQ ID NO: 142575 - DNA, 15 bp, Homo sapiens
taatatttaggttgt

SEQ ID NO: 142576 - DNA, 15 bp, Homo sapiens
aatatttaggttgtt

SEQ ID NO: 142577 - DNA, 15 bp, Homo sapiens
atatttaggttgttg

SEQ ID NO: 142578 - DNA, 15 bp, Homo sapiens
tatttaggttgttga

SEQ ID NO: 142579 - DNA, 15 bp, Homo sapiens
atttaggttgttgat

SEQ ID NO: 142580 - DNA, 15 bp, Homo sapiens
tttaggttgttgatt

SEQ ID NO: 142581 - DNA, 15 bp, Homo sapiens
ttaggttgttgattt

SEQ ID NO: 142582 - DNA, 15 bp, Homo sapiens
taggttgttgattta

SEQ ID NO: 142583 - DNA, 15 bp, Homo sapiens
aggttgttgatttat

SEQ ID NO: 142584 - DNA, 15 bp, Homo sapiens
ggttgttgatttatt

SEQ ID NO: 142585 - DNA, 15 bp, Homo sapiens
gttgttgatttattt

SEQ ID NO: 142586 - DNA, 15 bp, Homo sapiens
ttgttgatttatttt

SEQ ID NO: 142587 - DNA, 15 bp, Homo sapiens
tgttgatttattttt

SEQ ID NO: 142588 - DNA, 15 bp, Homo sapiens
gttgatttatttttt

SEQ ID NO: 142589 - DNA, 15 bp, Homo sapiens
ttgatttatttttta

SEQ ID NO: 142590 - DNA, 15 bp, Homo sapiens
tgatttattttttaa

SEQ ID NO: 142591 - DNA, 15 bp, Homo sapiens
gatttattttttaaa

SEQ ID NO: 142592 - DNA, 15 bp, Homo sapiens
atttattttttaaaa

SEQ ID NO: 142593 - DNA, 15 bp, Homo sapiens
tttattttttaaaag

SEQ ID NO: 142594 - DNA, 15 bp, Homo sapiens
ttattttttaaaaga

SEQ ID NO: 142595 - DNA, 15 bp, Homo sapiens
tattttttaaaagat

SEQ ID NO: 142596 - DNA, 15 bp, Homo sapiens
attttttaaaagatt

SEQ ID NO: 142597 - DNA, 15 bp, Homo sapiens
ttttttaaaagatta

SEQ ID NO: 142598 - DNA, 15 bp, Homo sapiens
tttttaaaagattag

SEQ ID NO: 142599 - DNA, 15 bp, Homo sapiens
ttttaaaagattaga

SEQ ID NO: 142600 - DNA, 15 bp, Homo sapiens
tttaaaagattagaa

SEQ ID NO: 142601 - DNA, 15 bp, Homo sapiens
ttaaaagattagaat

SEQ ID NO: 142602 - DNA, 15 bp, Homo sapiens
taaaagattagaata

SEQ ID NO: 142603 - DNA, 15 bp, Homo sapiens
aaaagattagaatat

SEQ ID NO: 142604 - DNA, 15 bp, Homo sapiens
aaagattagaatatt

SEQ ID NO: 142605 - DNA, 15 bp, Homo sapiens
aagattagaatattc

SEQ ID NO: 142606 - DNA, 15 bp, Homo sapiens
agattagaatattcc

SEQ ID NO: 142607 - DNA, 15 bp, Homo sapiens
gattagaatattcct

SEQ ID NO: 142608 - DNA, 15 bp, Homo sapiens
attagaatattcctt

SEQ ID NO: 142609 - DNA, 15 bp, Homo sapiens
ttagaatattcctta

SEQ ID NO: 142610 - DNA, 15 bp, Homo sapiens
tagaatattccttag

SEQ ID NO: 142611 - DNA, 15 bp, Homo sapiens
agaatattccttaga

SEQ ID NO: 142612 - DNA, 15 bp, Homo sapiens
gaatattccttagaa

SEQ ID NO: 142613 - DNA, 15 bp, Homo sapiens
aatattccttagaaa

SEQ ID NO: 142614 - DNA, 15 bp, Homo sapiens
atattccttagaaat

SEQ ID NO: 142615 - DNA, 15 bp, Homo sapiens
tattccttagaaatg

SEQ ID NO: 142616 - DNA, 15 bp, Homo sapiens
attccttagaaatgt

SEQ ID NO: 142617 - DNA, 15 bp, Homo sapiens
ttccttagaaatgta

SEQ ID NO: 142618 - DNA, 15 bp, Homo sapiens
tccttagaaatgtag

SEQ ID NO: 142619 - DNA, 15 bp, Homo sapiens
ccttagaaatgtagt

SEQ ID NO: 142620 - DNA, 15 bp, Homo sapiens
cttagaaatgtagtc

SEQ ID NO: 142621 - DNA, 15 bp, Homo sapiens
ttagaaatgtagtct

SEQ ID NO: 142622 - DNA, 15 bp, Homo sapiens
tagaaatgtagtctt

SEQ ID NO: 142623 - DNA, 15 bp, Homo sapiens
agaaatgtagtctta

SEQ ID NO: 142624 - DNA, 15 bp, Homo sapiens
gaaatgtagtcttat

SEQ ID NO: 142625 - DNA, 15 bp, Homo sapiens
aaatgtagtcttata

SEQ ID NO: 142626 - DNA, 15 bp, Homo sapiens
aatgtagtcttataa

SEQ ID NO: 142627 - DNA, 15 bp, Homo sapiens
atgtagtcttataat

SEQ ID NO: 142628 - DNA, 15 bp, Homo sapiens
tgtagtcttataatt

SEQ ID NO: 142629 - DNA, 15 bp, Homo sapiens
gtagtcttataattt

SEQ ID NO: 142630 - DNA, 15 bp, Homo sapiens
tagtcttataatttc

SEQ ID NO: 142631 - DNA, 15 bp, Homo sapiens
agtcttataatttcg

SEQ ID NO: 142632 - DNA, 15 bp, Homo sapiens
gtcttataatttcgt

SEQ ID NO: 142633 - DNA, 15 bp, Homo sapiens
tcttataatttcgta

SEQ ID NO: 142634 - DNA, 15 bp, Homo sapiens
cttataatttcgtat

SEQ ID NO: 142635 - DNA, 15 bp, Homo sapiens
ttataatttcgtatt

SEQ ID NO: 142636 - DNA, 15 bp, Homo sapiens
tataatttcgtattt

SEQ ID NO: 142637 - DNA, 15 bp, Homo sapiens
ataatttcgtatttc

SEQ ID NO: 142638 - DNA, 15 bp, Homo sapiens
taatttcgtatttca

SEQ ID NO: 142639 - DNA, 15 bp, Homo sapiens
aatttcgtatttcaa

SEQ ID NO: 142640 - DNA, 15 bp, Homo sapiens
atttcgtatttcaat

SEQ ID NO: 142641 - DNA, 15 bp, Homo sapiens
tttcgtatttcaata

SEQ ID NO: 142642 - DNA, 15 bp, Homo sapiens
ttcgtatttcaataa

SEQ ID NO: 142643 - DNA, 15 bp, Homo sapiens
tcgtatttcaataaa

SEQ ID NO: 142644 - DNA, 15 bp, Homo sapiens
cgtatttcaataaaa

SEQ ID NO: 142645 - DNA, 15 bp, Homo sapiens
gtatttcaataaaaa

SEQ ID NO: 142646 - DNA, 15 bp, Homo sapiens
tatttcaataaaaaa

SEQ ID NO: 142647 - DNA, 15 bp, Homo sapiens
atttcaataaaaaat

SEQ ID NO: 142648 - DNA, 15 bp, Homo sapiens
tttcaataaaaaata

SEQ ID NO: 142649 - DNA, 15 bp, Homo sapiens
ttcaataaaaaatat

SEQ ID NO: 142650 - DNA, 15 bp, Homo sapiens
tcaataaaaaatatt

SEQ ID NO: 142651 - DNA, 15 bp, Homo sapiens
caataaaaaatatta

SEQ ID NO: 142652 - DNA, 15 bp, Homo sapiens
aataaaaaatattaa

SEQ ID NO: 142653 - DNA, 15 bp, Homo sapiens
ataaaaaatattaaa

SEQ ID NO: 142654 - DNA, 15 bp, Homo sapiens
taaaaaatattaaaa

SEQ ID NO: 142655 - DNA, 15 bp, Homo sapiens
aaaaaatattaaaat

SEQ ID NO: 142656 - DNA, 15 bp, Homo sapiens
aaaaatattaaaatg

SEQ ID NO: 142657 - DNA, 15 bp, Homo sapiens
aaaatattaaaatgt

SEQ ID NO: 142658 - DNA, 15 bp, Homo sapiens
aaatattaaaatgtt

SEQ ID NO: 142659 - DNA, 15 bp, Homo sapiens
aatattaaaatgttt

SEQ ID NO: 142660 - DNA, 15 bp, Homo sapiens
atattaaaatgtttc

SEQ ID NO: 142661 - DNA, 15 bp, Homo sapiens
tattaaaatgtttcc

SEQ ID NO: 142662 - DNA, 15 bp, Homo sapiens
attaaaatgtttccc

SEQ ID NO: 142663 - DNA, 15 bp, Homo sapiens
ttaaaatgtttccca

SEQ ID NO: 142664 - DNA, 15 bp, Homo sapiens
taaaatgtttcccag

SEQ ID NO: 142665 - DNA, 15 bp, Homo sapiens
aaaatgtttcccaga

SEQ ID NO: 142666 - DNA, 15 bp, Homo sapiens
aaatgtttcccagag

SEQ ID NO: 142667 - DNA, 15 bp, Homo sapiens
aatgtttcccagagg

SEQ ID NO: 142668 - DNA, 15 bp, Homo sapiens
atgtttcccagagga

SEQ ID NO: 142669 - DNA, 15 bp, Homo sapiens
tgtttcccagaggaa

SEQ ID NO: 142670 - DNA, 15 bp, Homo sapiens
gtttcccagaggaaa

SEQ ID NO: 142671 - DNA, 15 bp, Homo sapiens
tttcccagaggaaat

SEQ ID NO: 142672 - DNA, 15 bp, Homo sapiens
ttcccagaggaaatc

SEQ ID NO: 142673 - DNA, 15 bp, Homo sapiens
tcccagaggaaatct

SEQ ID NO: 142674 - DNA, 15 bp, Homo sapiens
cccagaggaaatctt

SEQ ID NO: 142675 - DNA, 15 bp, Homo sapiens
ccagaggaaatcttt

SEQ ID NO: 142676 - DNA, 15 bp, Homo sapiens
cagaggaaatcttta

SEQ ID NO: 142677 - DNA, 15 bp, Homo sapiens
agaggaaatctttac

SEQ ID NO: 142678 - DNA, 15 bp, Homo sapiens
gaggaaatctttact

SEQ ID NO: 142679 - DNA, 15 bp, Homo sapiens
aggaaatctttactg

SEQ ID NO: 142680 - DNA, 15 bp, Homo sapiens
ggaaatctttactgt

SEQ ID NO: 142681 - DNA, 15 bp, Homo sapiens
gaaatctttactgtc

SEQ ID NO: 142682 - DNA, 15 bp, Homo sapiens
aaatctttactgtca

SEQ ID NO: 142683 - DNA, 15 bp, Homo sapiens
aatctttactgtcat

SEQ ID NO: 142684 - DNA, 15 bp, Homo sapiens
atctttactgtcata

SEQ ID NO: 142685 - DNA, 15 bp, Homo sapiens
tctttactgtcatag

SEQ ID NO: 142686 - DNA, 15 bp, Homo sapiens
ctttactgtcataga

SEQ ID NO: 142687 - DNA, 15 bp, Homo sapiens
tttactgtcatagaa

SEQ ID NO: 142688 - DNA, 15 bp, Homo sapiens
ttactgtcatagaaa

SEQ ID NO: 142689 - DNA, 15 bp, Homo sapiens
tactgtcatagaaat

SEQ ID NO: 142690 - DNA, 15 bp, Homo sapiens
actgtcatagaaatc

SEQ ID NO: 142691 - DNA, 15 bp, Homo sapiens
ctgtcatagaaatca

SEQ ID NO: 142692 - DNA, 15 bp, Homo sapiens
tgtcatagaaatcac

SEQ ID NO: 142693 - DNA, 15 bp, Homo sapiens
gtcatagaaatcacc

SEQ ID NO: 142694 - DNA, 15 bp, Homo sapiens
tcatagaaatcacca

SEQ ID NO: 142695 - DNA, 15 bp, Homo sapiens
catagaaatcaccag

SEQ ID NO: 142696 - DNA, 15 bp, Homo sapiens
atagaaatcaccaga

SEQ ID NO: 142697 - DNA, 15 bp, Homo sapiens
tagaaatcaccagaa

SEQ ID NO: 142698 - DNA, 15 bp, Homo sapiens
agaaatcaccagaaa

SEQ ID NO: 142699 - DNA, 15 bp, Homo sapiens
gaaatcaccagaaag

SEQ ID NO: 142700 - DNA, 15 bp, Homo sapiens
aaatcaccagaaaga

SEQ ID NO: 142701 - DNA, 15 bp, Homo sapiens
aatcaccagaaagag

SEQ ID NO: 142702 - DNA, 15 bp, Homo sapiens
atcaccagaaagaga

SEQ ID NO: 142703 - DNA, 15 bp, Homo sapiens
tcaccagaaagagat

SEQ ID NO: 142704 - DNA, 15 bp, Homo sapiens
caccagaaagagata

SEQ ID NO: 142705 - DNA, 15 bp, Homo sapiens
accagaaagagatag

SEQ ID NO: 142706 - DNA, 15 bp, Homo sapiens
ccagaaagagatagc

SEQ ID NO: 142707 - DNA, 15 bp, Homo sapiens
cagaaagagatagca

SEQ ID NO: 142708 - DNA, 15 bp, Homo sapiens
agaaagagatagcaa

SEQ ID NO: 142709 - DNA, 15 bp, Homo sapiens
gaaagagatagcaat

SEQ ID NO: 142710 - DNA, 15 bp, Homo sapiens
aaagagatagcaatt

SEQ ID NO: 142711 - DNA, 15 bp, Homo sapiens
aagagatagcaatta

SEQ ID NO: 142712 - DNA, 15 bp, Homo sapiens
agagatagcaattac

SEQ ID NO: 142713 - DNA, 15 bp, Homo sapiens
gagatagcaattact

SEQ ID NO: 142714 - DNA, 15 bp, Homo sapiens
agatagcaattactc

SEQ ID NO: 142715 - DNA, 15 bp, Homo sapiens
gatagcaattactcc

SEQ ID NO: 142716 - DNA, 15 bp, Homo sapiens
atagcaattactcct

SEQ ID NO: 142717 - DNA, 15 bp, Homo sapiens
tagcaattactcctg

SEQ ID NO: 142718 - DNA, 15 bp, Homo sapiens
agcaattactcctgg

SEQ ID NO: 142719 - DNA, 15 bp, Homo sapiens
gcaattactcctggg

SEQ ID NO: 142720 - DNA, 15 bp, Homo sapiens
caattactcctgggt

SEQ ID NO: 142721 - DNA, 15 bp, Homo sapiens
aattactcctgggtg

SEQ ID NO: 142722 - DNA, 15 bp, Homo sapiens
attactcctgggtgg

SEQ ID NO: 142723 - DNA, 15 bp, Homo sapiens
ttactcctgggtggt

SEQ ID NO: 142724 - DNA, 15 bp, Homo sapiens
tactcctgggtggtg

SEQ ID NO: 142725 - DNA, 15 bp, Homo sapiens
actcctgggtggtga

SEQ ID NO: 142726 - DNA, 15 bp, Homo sapiens
ctcctgggtggtgat

SEQ ID NO: 142727 - DNA, 15 bp, Homo sapiens
tcctgggtggtgata

SEQ ID NO: 142728 - DNA, 15 bp, Homo sapiens
cctgggtggtgatag

SEQ ID NO: 142729 - DNA, 15 bp, Homo sapiens
ctgggtggtgatagt

SEQ ID NO: 142730 - DNA, 15 bp, Homo sapiens
tgggtggtgatagtc

SEQ ID NO: 142731 - DNA, 15 bp, Homo sapiens
gggtggtgatagtct

SEQ ID NO: 142732 - DNA, 15 bp, Homo sapiens
ggtggtgatagtctt

SEQ ID NO: 142733 - DNA, 15 bp, Homo sapiens
gtggtgatagtcttt

SEQ ID NO: 142734 - DNA, 15 bp, Homo sapiens
tggtgatagtctttg

SEQ ID NO: 142735 - DNA, 15 bp, Homo sapiens
ggtgatagtctttga

SEQ ID NO: 142736 - DNA, 15 bp, Homo sapiens
gtgatagtctttgat

SEQ ID NO: 142737 - DNA, 15 bp, Homo sapiens
tgatagtctttgatt

SEQ ID NO: 142738 - DNA, 15 bp, Homo sapiens
gatagtctttgattt

SEQ ID NO: 142739 - DNA, 15 bp, Homo sapiens
atagtctttgatttg

SEQ ID NO: 142740 - DNA, 15 bp, Homo sapiens
tagtctttgatttgt

SEQ ID NO: 142741 - DNA, 15 bp, Homo sapiens
agtctttgatttgtg

SEQ ID NO: 142742 - DNA, 15 bp, Homo sapiens
gtctttgatttgtgg

SEQ ID NO: 142743 - DNA, 15 bp, Homo sapiens
tctttgatttgtggt

SEQ ID NO: 142744 - DNA, 15 bp, Homo sapiens
ctttgatttgtggtt

SEQ ID NO: 142745 - DNA, 15 bp, Homo sapiens
tttgatttgtggttt

SEQ ID NO: 142746 - DNA, 15 bp, Homo sapiens
ttgatttgtggttta

SEQ ID NO: 142747 - DNA, 15 bp, Homo sapiens
tgatttgtggtttac

SEQ ID NO: 142748 - DNA, 15 bp, Homo sapiens
gatttgtggtttact

SEQ ID NO: 142749 - DNA, 15 bp, Homo sapiens
atttgtggtttactt

SEQ ID NO: 142750 - DNA, 15 bp, Homo sapiens
tttgtggtttacttg

SEQ ID NO: 142751 - DNA, 15 bp, Homo sapiens
ttgtggtttacttgt

SEQ ID NO: 142752 - DNA, 15 bp, Homo sapiens
tgtggtttacttgtt

SEQ ID NO: 142753 - DNA, 15 bp, Homo sapiens
gtggtttacttgttt

SEQ ID NO: 142754 - DNA, 15 bp, Homo sapiens
tggtttacttgtttt

SEQ ID NO: 142755 - DNA, 15 bp, Homo sapiens
ggtttacttgttttc

SEQ ID NO: 142756 - DNA, 15 bp, Homo sapiens
gtttacttgttttca

SEQ ID NO: 142757 - DNA, 15 bp, Homo sapiens
tttacttgttttcag

SEQ ID NO: 142758 - DNA, 15 bp, Homo sapiens
ttacttgttttcagt

SEQ ID NO: 142759 - DNA, 15 bp, Homo sapiens
tacttgttttcagtt

SEQ ID NO: 142760 - DNA, 15 bp, Homo sapiens
acttgttttcagttt

SEQ ID NO: 142761 - DNA, 15 bp, Homo sapiens
cttgttttcagtttg

SEQ ID NO: 142762 - DNA, 15 bp, Homo sapiens
ttgttttcagtttga

SEQ ID NO: 142763 - DNA, 15 bp, Homo sapiens
tgttttcagtttgaa

SEQ ID NO: 142764 - DNA, 15 bp, Homo sapiens
gttttcagtttgaac

SEQ ID NO: 142765 - DNA, 15 bp, Homo sapiens
ttttcagtttgaact

SEQ ID NO: 142766 - DNA, 15 bp, Homo sapiens
tttcagtttgaacta

SEQ ID NO: 142767 - DNA, 15 bp, Homo sapiens
ttcagtttgaactaa

SEQ ID NO: 142768 - DNA, 15 bp, Homo sapiens
tcagtttgaactaaa

SEQ ID NO: 142769 - DNA, 15 bp, Homo sapiens
cagtttgaactaaaa

SEQ ID NO: 142770 - DNA, 15 bp, Homo sapiens
agtttgaactaaaac

SEQ ID NO: 142771 - DNA, 15 bp, Homo sapiens
gtttgaactaaaaca

SEQ ID NO: 142772 - DNA, 15 bp, Homo sapiens
tttgaactaaaacat

SEQ ID NO: 142773 - DNA, 15 bp, Homo sapiens
ttgaactaaaacata

SEQ ID NO: 142774 - DNA, 15 bp, Homo sapiens
tgaactaaaacatac

SEQ ID NO: 142775 - DNA, 15 bp, Homo sapiens
gaactaaaacatact

SEQ ID NO: 142776 - DNA, 15 bp, Homo sapiens
aactaaaacatacta

SEQ ID NO: 142777 - DNA, 15 bp, Homo sapiens
actaaaacatactaa

SEQ ID NO: 142778 - DNA, 15 bp, Homo sapiens
ctaaaacatactaat

SEQ ID NO: 142779 - DNA, 15 bp, Homo sapiens
taaaacatactaatc

SEQ ID NO: 142780 - DNA, 15 bp, Homo sapiens
aaaacatactaatcc

SEQ ID NO: 142781 - DNA, 15 bp, Homo sapiens
aaacatactaatccc

SEQ ID NO: 142782 - DNA, 15 bp, Homo sapiens
aacatactaatccca

SEQ ID NO: 142783 - DNA, 15 bp, Homo sapiens
acatactaatcccag

SEQ ID NO: 142784 - DNA, 15 bp, Homo sapiens
catactaatcccagc

SEQ ID NO: 142785 - DNA, 15 bp, Homo sapiens
atactaatcccagcc

SEQ ID NO: 142786 - DNA, 15 bp, Homo sapiens
tactaatcccagcct

SEQ ID NO: 142787 - DNA, 15 bp, Homo sapiens
actaatcccagcctg

SEQ ID NO: 142788 - DNA, 15 bp, Homo sapiens
ctaatcccagcctga

SEQ ID NO: 142789 - DNA, 15 bp, Homo sapiens
taatcccagcctgag

SEQ ID NO: 142790 - DNA, 15 bp, Homo sapiens
aatcccagcctgagt

SEQ ID NO: 142791 - DNA, 15 bp, Homo sapiens
atcccagcctgagtt

SEQ ID NO: 142792 - DNA, 15 bp, Homo sapiens
tcccagcctgagttg

SEQ ID NO: 142793 - DNA, 15 bp, Homo sapiens
cccagcctgagttgg

SEQ ID NO: 142794 - DNA, 15 bp, Homo sapiens
ccagcctgagttgga

SEQ ID NO: 142795 - DNA, 15 bp, Homo sapiens
cagcctgagttggat

SEQ ID NO: 142796 - DNA, 15 bp, Homo sapiens
agcctgagttggatt

SEQ ID NO: 142797 - DNA, 15 bp, Homo sapiens
gcctgagttggattt

SEQ ID NO: 142798 - DNA, 15 bp, Homo sapiens
cctgagttggatttt

SEQ ID NO: 142799 - DNA, 15 bp, Homo sapiens
ctgagttggattttg

SEQ ID NO: 142800 - DNA, 15 bp, Homo sapiens
tgagttggattttgc

SEQ ID NO: 142801 - DNA, 15 bp, Homo sapiens
gagttggattttgca

SEQ ID NO: 142802 - DNA, 15 bp, Homo sapiens
agttggattttgcat

SEQ ID NO: 142803 - DNA, 15 bp, Homo sapiens
gttggattttgcata

SEQ ID NO: 142804 - DNA, 15 bp, Homo sapiens
ttggattttgcatat

SEQ ID NO: 142805 - DNA, 15 bp, Homo sapiens
tggattttgcatatg

SEQ ID NO: 142806 - DNA, 15 bp, Homo sapiens
ggattttgcatatgg

SEQ ID NO: 142807 - DNA, 15 bp, Homo sapiens
gattttgcatatggt

SEQ ID NO: 142808 - DNA, 15 bp, Homo sapiens
attttgcatatggtc

SEQ ID NO: 142809 - DNA, 15 bp, Homo sapiens
ttttgcatatggtca

SEQ ID NO: 142810 - DNA, 15 bp, Homo sapiens
tttgcatatggtcaa

SEQ ID NO: 142811 - DNA, 15 bp, Homo sapiens
ttgcatatggtcaaa

SEQ ID NO: 142812 - DNA, 15 bp, Homo sapiens
tgcatatggtcaaag

SEQ ID NO: 142813 - DNA, 15 bp, Homo sapiens
gcatatggtcaaagt

SEQ ID NO: 142814 - DNA, 15 bp, Homo sapiens
catatggtcaaagtg

SEQ ID NO: 142815 - DNA, 15 bp, Homo sapiens
atatggtcaaagtga

SEQ ID NO: 142816 - DNA, 15 bp, Homo sapiens
tatggtcaaagtgaa

SEQ ID NO: 142817 - DNA, 15 bp, Homo sapiens
atggtcaaagtgaag

SEQ ID NO: 142818 - DNA, 15 bp, Homo sapiens
tggtcaaagtgaagt

SEQ ID NO: 142819 - DNA, 15 bp, Homo sapiens
ggtcaaagtgaagta

SEQ ID NO: 142820 - DNA, 15 bp, Homo sapiens
gtcaaagtgaagtag

SEQ ID NO: 142821 - DNA, 15 bp, Homo sapiens
tcaaagtgaagtaga

SEQ ID NO: 142822 - DNA, 15 bp, Homo sapiens
caaagtgaagtagag

SEQ ID NO: 142823 - DNA, 15 bp, Homo sapiens
aaagtgaagtagaga

SEQ ID NO: 142824 - DNA, 15 bp, Homo sapiens
aagtgaagtagagat

SEQ ID NO: 142825 - DNA, 15 bp, Homo sapiens
agtgaagtagagatt

SEQ ID NO: 142826 - DNA, 15 bp, Homo sapiens
gtgaagtagagattt

SEQ ID NO: 142827 - DNA, 15 bp, Homo sapiens
tgaagtagagatttt

SEQ ID NO: 142828 - DNA, 15 bp, Homo sapiens
gaagtagagattttt

SEQ ID NO: 142829 - DNA, 15 bp, Homo sapiens
aagtagagatttttg

SEQ ID NO: 142830 - DNA, 15 bp, Homo sapiens
agtagagatttttgt

SEQ ID NO: 142831 - DNA, 15 bp, Homo sapiens
gtagagatttttgtc

SEQ ID NO: 142832 - DNA, 15 bp, Homo sapiens
tagagatttttgtct

SEQ ID NO: 142833 - DNA, 15 bp, Homo sapiens
agagatttttgtcta

SEQ ID NO: 142834 - DNA, 15 bp, Homo sapiens
gagatttttgtctac

SEQ ID NO: 142835 - DNA, 15 bp, Homo sapiens
agatttttgtctact

SEQ ID NO: 142836 - DNA, 15 bp, Homo sapiens
gatttttgtctactt

SEQ ID NO: 142837 - DNA, 15 bp, Homo sapiens
atttttgtctacttt

SEQ ID NO: 142838 - DNA, 15 bp, Homo sapiens
tttttgtctacttta

SEQ ID NO: 142839 - DNA, 15 bp, Homo sapiens
ttttgtctactttat

SEQ ID NO: 142840 - DNA, 15 bp, Homo sapiens
tttgtctactttatg

SEQ ID NO: 142841 - DNA, 15 bp, Homo sapiens
ttgtctactttatga

SEQ ID NO: 142842 - DNA, 15 bp, Homo sapiens
tgtctactttatgaa

SEQ ID NO: 142843 - DNA, 15 bp, Homo sapiens
gtctactttatgaag

SEQ ID NO: 142844 - DNA, 15 bp, Homo sapiens
tctactttatgaaga

SEQ ID NO: 142845 - DNA, 15 bp, Homo sapiens
ctactttatgaagat

SEQ ID NO: 142846 - DNA, 15 bp, Homo sapiens
tactttatgaagata

SEQ ID NO: 142847 - DNA, 15 bp, Homo sapiens
actttatgaagatat

SEQ ID NO: 142848 - DNA, 15 bp, Homo sapiens
ctttatgaagatatt

SEQ ID NO: 142849 - DNA, 15 bp, Homo sapiens
tttatgaagatattt

SEQ ID NO: 142850 - DNA, 15 bp, Homo sapiens
ttatgaagatattta

SEQ ID NO: 142851 - DNA, 15 bp, Homo sapiens
tatgaagatatttaa

SEQ ID NO: 142852 - DNA, 15 bp, Homo sapiens
atgaagatatttaaa

SEQ ID NO: 142853 - DNA, 15 bp, Homo sapiens
tgaagatatttaaag

SEQ ID NO: 142854 - DNA, 15 bp, Homo sapiens
gaagatatttaaagg

SEQ ID NO: 142855 - DNA, 15 bp, Homo sapiens
aagatatttaaagga

SEQ ID NO: 142856 - DNA, 15 bp, Homo sapiens
agatatttaaaggac

SEQ ID NO: 142857 - DNA, 15 bp, Homo sapiens
gatatttaaaggaca

SEQ ID NO: 142858 - DNA, 15 bp, Homo sapiens
atatttaaaggacat

SEQ ID NO: 142859 - DNA, 15 bp, Homo sapiens
tatttaaaggacatt

SEQ ID NO: 142860 - DNA, 15 bp, Homo sapiens
atttaaaggacattt

SEQ ID NO: 142861 - DNA, 15 bp, Homo sapiens
tttaaaggacatttg

SEQ ID NO: 142862 - DNA, 15 bp, Homo sapiens
ttaaaggacatttga

SEQ ID NO: 142863 - DNA, 15 bp, Homo sapiens
taaaggacatttgaa

SEQ ID NO: 142864 - DNA, 15 bp, Homo sapiens
aaaggacatttgaaa

SEQ ID NO: 142865 - DNA, 15 bp, Homo sapiens
aaggacatttgaaat

SEQ ID NO: 142866 - DNA, 15 bp, Homo sapiens
aggacatttgaaatg

SEQ ID NO: 142867 - DNA, 15 bp, Homo sapiens
ggacatttgaaatgt

SEQ ID NO: 142868 - DNA, 15 bp, Homo sapiens
gacatttgaaatgtt

SEQ ID NO: 142869 - DNA, 15 bp, Homo sapiens
acatttgaaatgttt

SEQ ID NO: 142870 - DNA, 15 bp, Homo sapiens
catttgaaatgtttc

SEQ ID NO: 142871 - DNA, 15 bp, Homo sapiens
atttgaaatgtttca

SEQ ID NO: 142872 - DNA, 15 bp, Homo sapiens
tttgaaatgtttcaa

SEQ ID NO: 142873 - DNA, 15 bp, Homo sapiens
ttgaaatgtttcaat

SEQ ID NO: 142874 - DNA, 15 bp, Homo sapiens
tgaaatgtttcaatg

SEQ ID NO: 142875 - DNA, 15 bp, Homo sapiens
gaaatgtttcaatga

SEQ ID NO: 142876 - DNA, 15 bp, Homo sapiens
aaatgtttcaatgaa

SEQ ID NO: 142877 - DNA, 15 bp, Homo sapiens
aatgtttcaatgaac

SEQ ID NO: 142878 - DNA, 15 bp, Homo sapiens
atgtttcaatgaaca

SEQ ID NO: 142879 - DNA, 15 bp, Homo sapiens
tgtttcaatgaacac

SEQ ID NO: 142880 - DNA, 15 bp, Homo sapiens
gtttcaatgaacaca

SEQ ID NO: 142881 - DNA, 15 bp, Homo sapiens
tttcaatgaacacat

SEQ ID NO: 142882 - DNA, 15 bp, Homo sapiens
ttcaatgaacacatt

SEQ ID NO: 142883 - DNA, 15 bp, Homo sapiens
tcaatgaacacattg

SEQ ID NO: 142884 - DNA, 15 bp, Homo sapiens
caatgaacacattgt

SEQ ID NO: 142885 - DNA, 15 bp, Homo sapiens
aatgaacacattgta

SEQ ID NO: 142886 - DNA, 15 bp, Homo sapiens
atgaacacattgtaa

SEQ ID NO: 142887 - DNA, 15 bp, Homo sapiens
tgaacacattgtaac

SEQ ID NO: 142888 - DNA, 15 bp, Homo sapiens
gaacacattgtaaca

SEQ ID NO: 142889 - DNA, 15 bp, Homo sapiens
aacacattgtaacat

SEQ ID NO: 142890 - DNA, 15 bp, Homo sapiens
acacattgtaacatg

SEQ ID NO: 142891 - DNA, 15 bp, Homo sapiens
cacattgtaacatgc

SEQ ID NO: 142892 - DNA, 15 bp, Homo sapiens
acattgtaacatgca

SEQ ID NO: 142893 - DNA, 15 bp, Homo sapiens
cattgtaacatgcat

SEQ ID NO: 142894 - DNA, 15 bp, Homo sapiens
attgtaacatgcatt

SEQ ID NO: 142895 - DNA, 15 bp, Homo sapiens
ttgtaacatgcattc

SEQ ID NO: 142896 - DNA, 15 bp, Homo sapiens
tgtaacatgcattcc

SEQ ID NO: 142897 - DNA, 15 bp, Homo sapiens
gtaacatgcattccc

SEQ ID NO: 142898 - DNA, 15 bp, Homo sapiens
taacatgcattccca

SEQ ID NO: 142899 - DNA, 15 bp, Homo sapiens
aacatgcattcccag

SEQ ID NO: 142900 - DNA, 15 bp, Homo sapiens
acatgcattcccagg

SEQ ID NO: 142901 - DNA, 15 bp, Homo sapiens
catgcattcccagga

SEQ ID NO: 142902 - DNA, 15 bp, Homo sapiens
atgcattcccaggag

SEQ ID NO: 142903 - DNA, 15 bp, Homo sapiens
tgcattcccaggagg

SEQ ID NO: 142904 - DNA, 15 bp, Homo sapiens
gcattcccaggagga

SEQ ID NO: 142905 - DNA, 15 bp, Homo sapiens
cattcccaggaggaa

SEQ ID NO: 142906 - DNA, 15 bp, Homo sapiens
attcccaggaggaaa

SEQ ID NO: 142907 - DNA, 15 bp, Homo sapiens
ttcccaggaggaaaa

SEQ ID NO: 142908 - DNA, 15 bp, Homo sapiens
tcccaggaggaaaac

SEQ ID NO: 142909 - DNA, 15 bp, Homo sapiens
cccaggaggaaaaca

SEQ ID NO: 142910 - DNA, 15 bp, Homo sapiens
ccaggaggaaaacaa

SEQ ID NO: 142911 - DNA, 15 bp, Homo sapiens
caggaggaaaacaaa

SEQ ID NO: 142912 - DNA, 15 bp, Homo sapiens
aggaggaaaacaaaa

SEQ ID NO: 142913 - DNA, 15 bp, Homo sapiens
ggaggaaaacaaaat

SEQ ID NO: 142914 - DNA, 15 bp, Homo sapiens
gaggaaaacaaaatt

SEQ ID NO: 142915 - DNA, 15 bp, Homo sapiens
aggaaaacaaaattg

SEQ ID NO: 142916 - DNA, 15 bp, Homo sapiens
ggaaaacaaaattgt

SEQ ID NO: 142917 - DNA, 15 bp, Homo sapiens
gaaaacaaaattgtg

SEQ ID NO: 142918 - DNA, 15 bp, Homo sapiens
aaaacaaaattgtgt

SEQ ID NO: 142919 - DNA, 15 bp, Homo sapiens
aaacaaaattgtgta

SEQ ID NO: 142920 - DNA, 15 bp, Homo sapiens
aacaaaattgtgtat

SEQ ID NO: 142921 - DNA, 15 bp, Homo sapiens
acaaaattgtgtatt

SEQ ID NO: 142922 - DNA, 15 bp, Homo sapiens
caaaattgtgtattg

SEQ ID NO: 142923 - DNA, 15 bp, Homo sapiens
aaaattgtgtattgt

SEQ ID NO: 142924 - DNA, 15 bp, Homo sapiens
aaattgtgtattgtg

SEQ ID NO: 142925 - DNA, 15 bp, Homo sapiens
aattgtgtattgtgt

SEQ ID NO: 142926 - DNA, 15 bp, Homo sapiens
attgtgtattgtgtt

SEQ ID NO: 142927 - DNA, 15 bp, Homo sapiens
ttgtgtattgtgttg

SEQ ID NO: 142928 - DNA, 15 bp, Homo sapiens
tgtgtattgtgttga

SEQ ID NO: 142929 - DNA, 15 bp, Homo sapiens
gtgtattgtgttgaa

SEQ ID NO: 142930 - DNA, 15 bp, Homo sapiens
tgtattgtgttgaaa

SEQ ID NO: 142931 - DNA, 15 bp, Homo sapiens
gtattgtgttgaaaa

SEQ ID NO: 142932 - DNA, 15 bp, Homo sapiens
tattgtgttgaaaat

SEQ ID NO: 142933 - DNA, 15 bp, Homo sapiens
attgtgttgaaaata

SEQ ID NO: 142934 - DNA, 15 bp, Homo sapiens
ttgtgttgaaaatac

SEQ ID NO: 142935 - DNA, 15 bp, Homo sapiens
tgtgttgaaaatact

SEQ ID NO: 142936 - DNA, 15 bp, Homo sapiens
gtgttgaaaatacta

SEQ ID NO: 142937 - DNA, 15 bp, Homo sapiens
tgttgaaaatactat

SEQ ID NO: 142938 - DNA, 15 bp, Homo sapiens
gttgaaaatactatt

SEQ ID NO: 142939 - DNA, 15 bp, Homo sapiens
ttgaaaatactattc

SEQ ID NO: 142940 - DNA, 15 bp, Homo sapiens
tgaaaatactattcc

SEQ ID NO: 142941 - DNA, 15 bp, Homo sapiens
gaaaatactattcca

SEQ ID NO: 142942 - DNA, 15 bp, Homo sapiens
aaaatactattccaa

SEQ ID NO: 142943 - DNA, 15 bp, Homo sapiens
aaatactattccaat

SEQ ID NO: 142944 - DNA, 15 bp, Homo sapiens
aatactattccaata

SEQ ID NO: 142945 - DNA, 15 bp, Homo sapiens
atactattccaatat

SEQ ID NO: 142946 - DNA, 15 bp, Homo sapiens
tactattccaatata

SEQ ID NO: 142947 - DNA, 15 bp, Homo sapiens
actattccaatatat

SEQ ID NO: 142948 - DNA, 15 bp, Homo sapiens
ctattccaatatatg

SEQ ID NO: 142949 - DNA, 15 bp, Homo sapiens
tattccaatatatgt

SEQ ID NO: 142950 - DNA, 15 bp, Homo sapiens
attccaatatatgta

SEQ ID NO: 142951 - DNA, 15 bp, Homo sapiens
ttccaatatatgtat

SEQ ID NO: 142952 - DNA, 15 bp, Homo sapiens
tccaatatatgtata

SEQ ID NO: 142953 - DNA, 15 bp, Homo sapiens
ccaatatatgtatac

SEQ ID NO: 142954 - DNA, 15 bp, Homo sapiens
caatatatgtatacc

SEQ ID NO: 142955 - DNA, 15 bp, Homo sapiens
aatatatgtataccc

SEQ ID NO: 142956 - DNA, 15 bp, Homo sapiens
atatatgtataccca

SEQ ID NO: 142957 - DNA, 15 bp, Homo sapiens
tatatgtatacccac

SEQ ID NO: 142958 - DNA, 15 bp, Homo sapiens
atatgtatacccacg

SEQ ID NO: 142959 - DNA, 15 bp, Homo sapiens
tatgtatacccacgt

SEQ ID NO: 142960 - DNA, 15 bp, Homo sapiens
atgtatacccacgtc

SEQ ID NO: 142961 - DNA, 15 bp, Homo sapiens
tgtatacccacgtct

SEQ ID NO: 142962 - DNA, 15 bp, Homo sapiens
gtatacccacgtctc

SEQ ID NO: 142963 - DNA, 15 bp, Homo sapiens
tatacccacgtctca

SEQ ID NO: 142964 - DNA, 15 bp, Homo sapiens
atacccacgtctcat

SEQ ID NO: 142965 - DNA, 15 bp, Homo sapiens
tacccacgtctcatt

SEQ ID NO: 142966 - DNA, 15 bp, Homo sapiens
acccacgtctcattt

SEQ ID NO: 142967 - DNA, 15 bp, Homo sapiens
cccacgtctcatttt

SEQ ID NO: 142968 - DNA, 15 bp, Homo sapiens
ccacgtctcattttg

SEQ ID NO: 142969 - DNA, 15 bp, Homo sapiens
cacgtctcattttgt

SEQ ID NO: 142970 - DNA, 15 bp, Homo sapiens
acgtctcattttgtc

SEQ ID NO: 142971 - DNA, 15 bp, Homo sapiens
cgtctcattttgtca

SEQ ID NO: 142972 - DNA, 15 bp, Homo sapiens
gtctcattttgtcat

SEQ ID NO: 142973 - DNA, 15 bp, Homo sapiens
tctcattttgtcata

SEQ ID NO: 142974 - DNA, 15 bp, Homo sapiens
ctcattttgtcatag

SEQ ID NO: 142975 - DNA, 15 bp, Homo sapiens
tcattttgtcataga

SEQ ID NO: 142976 - DNA, 15 bp, Homo sapiens
cattttgtcatagaa

SEQ ID NO: 142977 - DNA, 15 bp, Homo sapiens
attttgtcatagaat

SEQ ID NO: 142978 - DNA, 15 bp, Homo sapiens
ttttgtcatagaatt

SEQ ID NO: 142979 - DNA, 15 bp, Homo sapiens
tttgtcatagaattc

SEQ ID NO: 142980 - DNA, 15 bp, Homo sapiens
ttgtcatagaattcc

SEQ ID NO: 142981 - DNA, 15 bp, Homo sapiens
tgtcatagaattcct

SEQ ID NO: 142982 - DNA, 15 bp, Homo sapiens
gtcatagaattcctg

SEQ ID NO: 142983 - DNA, 15 bp, Homo sapiens
tcatagaattcctga

SEQ ID NO: 142984 - DNA, 15 bp, Homo sapiens
catagaattcctgaa

SEQ ID NO: 142985 - DNA, 15 bp, Homo sapiens
atagaattcctgaaa

SEQ ID NO: 142986 - DNA, 15 bp, Homo sapiens
tagaattcctgaaaa

SEQ ID NO: 142987 - DNA, 15 bp, Homo sapiens
agaattcctgaaaaa

SEQ ID NO: 142988 - DNA, 15 bp, Homo sapiens
gaattcctgaaaaat

SEQ ID NO: 142989 - DNA, 15 bp, Homo sapiens
aattcctgaaaaatt

SEQ ID NO: 142990 - DNA, 15 bp, Homo sapiens
attcctgaaaaattt

SEQ ID NO: 142991 - DNA, 15 bp, Homo sapiens
ttcctgaaaaattta

SEQ ID NO: 142992 - DNA, 15 bp, Homo sapiens
tcctgaaaaatttag

SEQ ID NO: 142993 - DNA, 15 bp, Homo sapiens
cctgaaaaatttaga

SEQ ID NO: 142994 - DNA, 15 bp, Homo sapiens
ctgaaaaatttagat

SEQ ID NO: 142995 - DNA, 15 bp, Homo sapiens
tgaaaaatttagatg

SEQ ID NO: 142996 - DNA, 15 bp, Homo sapiens
gaaaaatttagatgt

SEQ ID NO: 142997 - DNA, 15 bp, Homo sapiens
aaaaatttagatgta

SEQ ID NO: 142998 - DNA, 15 bp, Homo sapiens
aaaatttagatgtag

SEQ ID NO: 142999 - DNA, 15 bp, Homo sapiens
aaatttagatgtaga

SEQ ID NO: 143000 - DNA, 15 bp, Homo sapiens
aatttagatgtagat

SEQ ID NO: 143001 - DNA, 15 bp, Homo sapiens
atttagatgtagatg

SEQ ID NO: 143002 - DNA, 15 bp, Homo sapiens
tttagatgtagatga

SEQ ID NO: 143003 - DNA, 15 bp, Homo sapiens
ttagatgtagatgag

SEQ ID NO: 143004 - DNA, 15 bp, Homo sapiens
tagatgtagatgaga

SEQ ID NO: 143005 - DNA, 15 bp, Homo sapiens
agatgtagatgagat

SEQ ID NO: 143006 - DNA, 15 bp, Homo sapiens
gatgtagatgagatt

SEQ ID NO: 143007 - DNA, 15 bp, Homo sapiens
atgtagatgagattt

SEQ ID NO: 143008 - DNA, 15 bp, Homo sapiens
tgtagatgagatttt

SEQ ID NO: 143009 - DNA, 15 bp, Homo sapiens
gtagatgagattttt

SEQ ID NO: 143010 - DNA, 15 bp, Homo sapiens
tagatgagattttta

SEQ ID NO: 143011 - DNA, 15 bp, Homo sapiens
agatgagatttttat

SEQ ID NO: 143012 - DNA, 15 bp, Homo sapiens
gatgagatttttata

SEQ ID NO: 143013 - DNA, 15 bp, Homo sapiens
atgagatttttataa

SEQ ID NO: 143014 - DNA, 15 bp, Homo sapiens
tgagatttttataag

SEQ ID NO: 143015 - DNA, 15 bp, Homo sapiens
gagatttttataagt

SEQ ID NO: 143016 - DNA, 15 bp, Homo sapiens
agatttttataagtt

SEQ ID NO: 143017 - DNA, 15 bp, Homo sapiens
gatttttataagttg

SEQ ID NO: 143018 - DNA, 15 bp, Homo sapiens
atttttataagttga

SEQ ID NO: 143019 - DNA, 15 bp, Homo sapiens
tttttataagttgaa

SEQ ID NO: 143020 - DNA, 15 bp, Homo sapiens
ttttataagttgaaa

SEQ ID NO: 143021 - DNA, 15 bp, Homo sapiens
tttataagttgaaaa

SEQ ID NO: 143022 - DNA, 15 bp, Homo sapiens
ttataagttgaaaat

SEQ ID NO: 143023 - DNA, 15 bp, Homo sapiens
tataagttgaaaata

SEQ ID NO: 143024 - DNA, 15 bp, Homo sapiens
ataagttgaaaatat

SEQ ID NO: 143025 - DNA, 15 bp, Homo sapiens
taagttgaaaatatt

SEQ ID NO: 143026 - DNA, 15 bp, Homo sapiens
aagttgaaaatattt

SEQ ID NO: 143027 - DNA, 15 bp, Homo sapiens
agttgaaaatatttt

SEQ ID NO: 143028 - DNA, 15 bp, Homo sapiens
gttgaaaatattttc

SEQ ID NO: 143029 - DNA, 15 bp, Homo sapiens
ttgaaaatattttca

SEQ ID NO: 143030 - DNA, 15 bp, Homo sapiens
tgaaaatattttcag

SEQ ID NO: 143031 - DNA, 15 bp, Homo sapiens
gaaaatattttcagt

SEQ ID NO: 143032 - DNA, 15 bp, Homo sapiens
aaaatattttcagtt

SEQ ID NO: 143033 - DNA, 15 bp, Homo sapiens
aaatattttcagttg

SEQ ID NO: 143034 - DNA, 15 bp, Homo sapiens
aatattttcagttgc

SEQ ID NO: 143035 - DNA, 15 bp, Homo sapiens
atattttcagttgca

SEQ ID NO: 143036 - DNA, 15 bp, Homo sapiens
tattttcagttgcat

SEQ ID NO: 143037 - DNA, 15 bp, Homo sapiens
attttcagttgcatt

SEQ ID NO: 143038 - DNA, 15 bp, Homo sapiens
ttttcagttgcattt

SEQ ID NO: 143039 - DNA, 15 bp, Homo sapiens
tttcagttgcatttt

SEQ ID NO: 143040 - DNA, 15 bp, Homo sapiens
ttcagttgcatttta

SEQ ID NO: 143041 - DNA, 15 bp, Homo sapiens
tcagttgcattttaa

SEQ ID NO: 143042 - DNA, 15 bp, Homo sapiens
cagttgcattttaat

SEQ ID NO: 143043 - DNA, 15 bp, Homo sapiens
agttgcattttaatt

SEQ ID NO: 143044 - DNA, 15 bp, Homo sapiens
gttgcattttaattg

SEQ ID NO: 143045 - DNA, 15 bp, Homo sapiens
ttgcattttaattgc

SEQ ID NO: 143046 - DNA, 15 bp, Homo sapiens
tgcattttaattgca

SEQ ID NO: 143047 - DNA, 15 bp, Homo sapiens
gcattttaattgcac

SEQ ID NO: 143048 - DNA, 15 bp, Homo sapiens
cattttaattgcaca

SEQ ID NO: 143049 - DNA, 15 bp, Homo sapiens
attttaattgcacag

SEQ ID NO: 143050 - DNA, 15 bp, Homo sapiens
ttttaattgcacaga

SEQ ID NO: 143051 - DNA, 15 bp, Homo sapiens
tttaattgcacagat

SEQ ID NO: 143052 - DNA, 15 bp, Homo sapiens
ttaattgcacagatg

SEQ ID NO: 143053 - DNA, 15 bp, Homo sapiens
taattgcacagatgt

SEQ ID NO: 143054 - DNA, 15 bp, Homo sapiens
aattgcacagatgtg

SEQ ID NO: 143055 - DNA, 15 bp, Homo sapiens
attgcacagatgtgt

SEQ ID NO: 143056 - DNA, 15 bp, Homo sapiens
ttgcacagatgtgtt

SEQ ID NO: 143057 - DNA, 15 bp, Homo sapiens
tgcacagatgtgttt

SEQ ID NO: 143058 - DNA, 15 bp, Homo sapiens
gcacagatgtgtttt

SEQ ID NO: 143059 - DNA, 15 bp, Homo sapiens
cacagatgtgttttc

SEQ ID NO: 143060 - DNA, 15 bp, Homo sapiens
acagatgtgttttct

SEQ ID NO: 143061 - DNA, 15 bp, Homo sapiens
cagatgtgttttcta

SEQ ID NO: 143062 - DNA, 15 bp, Homo sapiens
agatgtgttttctac

SEQ ID NO: 143063 - DNA, 15 bp, Homo sapiens
gatgtgttttctact

SEQ ID NO: 143064 - DNA, 15 bp, Homo sapiens
atgtgttttctactt

SEQ ID NO: 143065 - DNA, 15 bp, Homo sapiens
tgtgttttctacttc

SEQ ID NO: 143066 - DNA, 15 bp, Homo sapiens
gtgttttctacttct

SEQ ID NO: 143067 - DNA, 15 bp, Homo sapiens
tgttttctacttcta

SEQ ID NO: 143068 - DNA, 15 bp, Homo sapiens
gttttctacttctat

SEQ ID NO: 143069 - DNA, 15 bp, Homo sapiens
ttttctacttctatt

SEQ ID NO: 143070 - DNA, 15 bp, Homo sapiens
tttctacttctattt

SEQ ID NO: 143071 - DNA, 15 bp, Homo sapiens
ttctacttctatttg

SEQ ID NO: 143072 - DNA, 15 bp, Homo sapiens
tctacttctatttgg

SEQ ID NO: 143073 - DNA, 15 bp, Homo sapiens
ctacttctatttggc

SEQ ID NO: 143074 - DNA, 15 bp, Homo sapiens
tacttctatttggct

SEQ ID NO: 143075 - DNA, 15 bp, Homo sapiens
acttctatttggctg

SEQ ID NO: 143076 - DNA, 15 bp, Homo sapiens
cttctatttggctgt

SEQ ID NO: 143077 - DNA, 15 bp, Homo sapiens
ttctatttggctgtg

SEQ ID NO: 143078 - DNA, 15 bp, Homo sapiens
tctatttggctgtga

SEQ ID NO: 143079 - DNA, 15 bp, Homo sapiens
ctatttggctgtgac

SEQ ID NO: 143080 - DNA, 15 bp, Homo sapiens
tatttggctgtgact

SEQ ID NO: 143081 - DNA, 15 bp, Homo sapiens
atttggctgtgactc

SEQ ID NO: 143082 - DNA, 15 bp, Homo sapiens
tttggctgtgactcc

SEQ ID NO: 143083 - DNA, 15 bp, Homo sapiens
ttggctgtgactcct

SEQ ID NO: 143084 - DNA, 15 bp, Homo sapiens
tggctgtgactccta

SEQ ID NO: 143085 - DNA, 15 bp, Homo sapiens
ggctgtgactcctaa

SEQ ID NO: 143086 - DNA, 15 bp, Homo sapiens
gctgtgactcctaat

SEQ ID NO: 143087 - DNA, 15 bp, Homo sapiens
ctgtgactcctaatg

SEQ ID NO: 143088 - DNA, 15 bp, Homo sapiens
tgtgactcctaatgc

SEQ ID NO: 143089 - DNA, 15 bp, Homo sapiens
gtgactcctaatgca

SEQ ID NO: 143090 - DNA, 15 bp, Homo sapiens
tgactcctaatgcat

SEQ ID NO: 143091 - DNA, 15 bp, Homo sapiens
gactcctaatgcatt

SEQ ID NO: 143092 - DNA, 15 bp, Homo sapiens
actcctaatgcattg

SEQ ID NO: 143093 - DNA, 15 bp, Homo sapiens
ctcctaatgcattgt

SEQ ID NO: 143094 - DNA, 15 bp, Homo sapiens
tcctaatgcattgta

SEQ ID NO: 143095 - DNA, 15 bp, Homo sapiens
cctaatgcattgtaa

SEQ ID NO: 143096 - DNA, 15 bp, Homo sapiens
ctaatgcattgtaat

SEQ ID NO: 143097 - DNA, 15 bp, Homo sapiens
taatgcattgtaata

SEQ ID NO: 143098 - DNA, 15 bp, Homo sapiens
aatgcattgtaatat

SEQ ID NO: 143099 - DNA, 15 bp, Homo sapiens
atgcattgtaatatt

SEQ ID NO: 143100 - DNA, 15 bp, Homo sapiens
tgcattgtaatatta

SEQ ID NO: 143101 - DNA, 15 bp, Homo sapiens
gcattgtaatattat

SEQ ID NO: 143102 - DNA, 15 bp, Homo sapiens
cattgtaatattatc

SEQ ID NO: 143103 - DNA, 15 bp, Homo sapiens
attgtaatattatct

SEQ ID NO: 143104 - DNA, 15 bp, Homo sapiens
ttgtaatattatctt

SEQ ID NO: 143105 - DNA, 15 bp, Homo sapiens
tgtaatattatcttc

SEQ ID NO: 143106 - DNA, 15 bp, Homo sapiens
gtaatattatcttcc

SEQ ID NO: 143107 - DNA, 15 bp, Homo sapiens
taatattatcttcca

SEQ ID NO: 143108 - DNA, 15 bp, Homo sapiens
aatattatcttccag

SEQ ID NO: 143109 - DNA, 15 bp, Homo sapiens
atattatcttccagt

SEQ ID NO: 143110 - DNA, 15 bp, Homo sapiens
tattatcttccagtg

SEQ ID NO: 143111 - DNA, 15 bp, Homo sapiens
attatcttccagtgt

SEQ ID NO: 143112 - DNA, 15 bp, Homo sapiens
ttatcttccagtgtt

SEQ ID NO: 143113 - DNA, 15 bp, Homo sapiens
tatcttccagtgttc

SEQ ID NO: 143114 - DNA, 15 bp, Homo sapiens
atcttccagtgttca

SEQ ID NO: 143115 - DNA, 15 bp, Homo sapiens
tcttccagtgttcat

SEQ ID NO: 143116 - DNA, 15 bp, Homo sapiens
cttccagtgttcatt

SEQ ID NO: 143117 - DNA, 15 bp, Homo sapiens
ttccagtgttcattt

SEQ ID NO: 143118 - DNA, 15 bp, Homo sapiens
tccagtgttcatttc

SEQ ID NO: 143119 - DNA, 15 bp, Homo sapiens
ccagtgttcatttcg

SEQ ID NO: 143120 - DNA, 15 bp, Homo sapiens
cagtgttcatttcgt

SEQ ID NO: 143121 - DNA, 15 bp, Homo sapiens
agtgttcatttcgtg

SEQ ID NO: 143122 - DNA, 15 bp, Homo sapiens
gtgttcatttcgtgt

SEQ ID NO: 143123 - DNA, 15 bp, Homo sapiens
tgttcatttcgtgta

SEQ ID NO: 143124 - DNA, 15 bp, Homo sapiens
gttcatttcgtgtag

SEQ ID NO: 143125 - DNA, 15 bp, Homo sapiens
ttcatttcgtgtagt

SEQ ID NO: 143126 - DNA, 15 bp, Homo sapiens
tcatttcgtgtagtg

SEQ ID NO: 143127 - DNA, 15 bp, Homo sapiens
catttcgtgtagtga

SEQ ID NO: 143128 - DNA, 15 bp, Homo sapiens
atttcgtgtagtgat

SEQ ID NO: 143129 - DNA, 15 bp, Homo sapiens
tttcgtgtagtgata

SEQ ID NO: 143130 - DNA, 15 bp, Homo sapiens
ttcgtgtagtgataa

SEQ ID NO: 143131 - DNA, 15 bp, Homo sapiens
tcgtgtagtgataat

SEQ ID NO: 143132 - DNA, 15 bp, Homo sapiens
cgtgtagtgataatg

SEQ ID NO: 143133 - DNA, 15 bp, Homo sapiens
gtgtagtgataatgg

SEQ ID NO: 143134 - DNA, 15 bp, Homo sapiens
tgtagtgataatgga

SEQ ID NO: 143135 - DNA, 15 bp, Homo sapiens
gtagtgataatggat

SEQ ID NO: 143136 - DNA, 15 bp, Homo sapiens
tagtgataatggatt

SEQ ID NO: 143137 - DNA, 15 bp, Homo sapiens
agtgataatggatta

SEQ ID NO: 143138 - DNA, 15 bp, Homo sapiens
gtgataatggattaa

SEQ ID NO: 143139 - DNA, 15 bp, Homo sapiens
tgataatggattaac

SEQ ID NO: 143140 - DNA, 15 bp, Homo sapiens
gataatggattaaca

SEQ ID NO: 143141 - DNA, 15 bp, Homo sapiens
ataatggattaacaa

SEQ ID NO: 143142 - DNA, 15 bp, Homo sapiens
taatggattaacaaa

SEQ ID NO: 143143 - DNA, 15 bp, Homo sapiens
aatggattaacaaat

SEQ ID NO: 143144 - DNA, 15 bp, Homo sapiens
atggattaacaaatg

SEQ ID NO: 143145 - DNA, 15 bp, Homo sapiens
tggattaacaaatgc

SEQ ID NO: 143146 - DNA, 15 bp, Homo sapiens
ggattaacaaatgca

SEQ ID NO: 143147 - DNA, 15 bp, Homo sapiens
gattaacaaatgcat

SEQ ID NO: 143148 - DNA, 15 bp, Homo sapiens
attaacaaatgcatt

SEQ ID NO: 143149 - DNA, 15 bp, Homo sapiens
ttaacaaatgcattc

SEQ ID NO: 143150 - DNA, 15 bp, Homo sapiens
taacaaatgcattca

SEQ ID NO: 143151 - DNA, 15 bp, Homo sapiens
aacaaatgcattcat

SEQ ID NO: 143152 - DNA, 15 bp, Homo sapiens
acaaatgcattcatt

SEQ ID NO: 143153 - DNA, 15 bp, Homo sapiens
caaatgcattcattc

SEQ ID NO: 143154 - DNA, 15 bp, Homo sapiens
aaatgcattcattca

SEQ ID NO: 143155 - DNA, 15 bp, Homo sapiens
aatgcattcattcat

SEQ ID NO: 143156 - DNA, 15 bp, Homo sapiens
atgcattcattcatt

SEQ ID NO: 143157 - DNA, 15 bp, Homo sapiens
tgcattcattcattt

SEQ ID NO: 143158 - DNA, 15 bp, Homo sapiens
gcattcattcattta

SEQ ID NO: 143159 - DNA, 15 bp, Homo sapiens
cattcattcatttag

SEQ ID NO: 143160 - DNA, 15 bp, Homo sapiens
attcattcatttagt

SEQ ID NO: 143161 - DNA, 15 bp, Homo sapiens
ttcattcatttagta

SEQ ID NO: 143162 - DNA, 15 bp, Homo sapiens
tcattcatttagtaa

SEQ ID NO: 143163 - DNA, 15 bp, Homo sapiens
cattcatttagtaaa

SEQ ID NO: 143164 - DNA, 15 bp, Homo sapiens
attcatttagtaaac

SEQ ID NO: 143165 - DNA, 15 bp, Homo sapiens
ttcatttagtaaaca

SEQ ID NO: 143166 - DNA, 15 bp, Homo sapiens
tcatttagtaaacat

SEQ ID NO: 143167 - DNA, 15 bp, Homo sapiens
catttagtaaacatt

SEQ ID NO: 143168 - DNA, 15 bp, Homo sapiens
atttagtaaacattt

SEQ ID NO: 143169 - DNA, 15 bp, Homo sapiens
tttagtaaacattta

SEQ ID NO: 143170 - DNA, 15 bp, Homo sapiens
ttagtaaacatttac

SEQ ID NO: 143171 - DNA, 15 bp, Homo sapiens
tagtaaacatttact

SEQ ID NO: 143172 - DNA, 15 bp, Homo sapiens
agtaaacatttactg

SEQ ID NO: 143173 - DNA, 15 bp, Homo sapiens
gtaaacatttactga

SEQ ID NO: 143174 - DNA, 15 bp, Homo sapiens
taaacatttactgag

SEQ ID NO: 143175 - DNA, 15 bp, Homo sapiens
aaacatttactgagc

SEQ ID NO: 143176 - DNA, 15 bp, Homo sapiens
aacatttactgagcc

SEQ ID NO: 143177 - DNA, 15 bp, Homo sapiens
acatttactgagccc

SEQ ID NO: 143178 - DNA, 15 bp, Homo sapiens
catttactgagccct

SEQ ID NO: 143179 - DNA, 15 bp, Homo sapiens
atttactgagcccta

SEQ ID NO: 143180 - DNA, 15 bp, Homo sapiens
tttactgagccctaa

SEQ ID NO: 143181 - DNA, 15 bp, Homo sapiens
ttactgagccctaat

SEQ ID NO: 143182 - DNA, 15 bp, Homo sapiens
tactgagccctaatc

SEQ ID NO: 143183 - DNA, 15 bp, Homo sapiens
actgagccctaatca

SEQ ID NO: 143184 - DNA, 15 bp, Homo sapiens
ctgagccctaatcag

SEQ ID NO: 143185 - DNA, 15 bp, Homo sapiens
tgagccctaatcagt

SEQ ID NO: 143186 - DNA, 15 bp, Homo sapiens
gagccctaatcagtg

SEQ ID NO: 143187 - DNA, 15 bp, Homo sapiens
agccctaatcagtgc

SEQ ID NO: 143188 - DNA, 15 bp, Homo sapiens
gccctaatcagtgcc

SEQ ID NO: 143189 - DNA, 15 bp, Homo sapiens
ccctaatcagtgcca

SEQ ID NO: 143190 - DNA, 15 bp, Homo sapiens
cctaatcagtgccat

SEQ ID NO: 143191 - DNA, 15 bp, Homo sapiens
ctaatcagtgccatg

SEQ ID NO: 143192 - DNA, 15 bp, Homo sapiens
taatcagtgccatgc

SEQ ID NO: 143193 - DNA, 15 bp, Homo sapiens
aatcagtgccatgct

SEQ ID NO: 143194 - DNA, 15 bp, Homo sapiens
atcagtgccatgctc

SEQ ID NO: 143195 - DNA, 15 bp, Homo sapiens
tcagtgccatgctct

SEQ ID NO: 143196 - DNA, 15 bp, Homo sapiens
cagtgccatgctctg

SEQ ID NO: 143197 - DNA, 15 bp, Homo sapiens
agtgccatgctctgg

SEQ ID NO: 143198 - DNA, 15 bp, Homo sapiens
gtgccatgctctggc

SEQ ID NO: 143199 - DNA, 15 bp, Homo sapiens
tgccatgctctggcc

SEQ ID NO: 143200 - DNA, 15 bp, Homo sapiens
gccatgctctggccc

SEQ ID NO: 143201 - DNA, 15 bp, Homo sapiens
ccatgctctggccca

SEQ ID NO: 143202 - DNA, 15 bp, Homo sapiens
catgctctggcccag

SEQ ID NO: 143203 - DNA, 15 bp, Homo sapiens
atgctctggcccagg

SEQ ID NO: 143204 - DNA, 15 bp, Homo sapiens
tgctctggcccaggg

SEQ ID NO: 143205 - DNA, 15 bp, Homo sapiens
gctctggcccaggga

SEQ ID NO: 143206 - DNA, 15 bp, Homo sapiens
ctctggcccagggag

SEQ ID NO: 143207 - DNA, 15 bp, Homo sapiens
tctggcccagggagg

SEQ ID NO: 143208 - DNA, 15 bp, Homo sapiens
ctggcccagggaggt

SEQ ID NO: 143209 - DNA, 15 bp, Homo sapiens
tggcccagggaggta

SEQ ID NO: 143210 - DNA, 15 bp, Homo sapiens
ggcccagggaggtag

SEQ ID NO: 143211 - DNA, 15 bp, Homo sapiens
gcccagggaggtagt

SEQ ID NO: 143212 - DNA, 15 bp, Homo sapiens
cccagggaggtagtc

SEQ ID NO: 143213 - DNA, 15 bp, Homo sapiens
ccagggaggtagtca

SEQ ID NO: 143214 - DNA, 15 bp, Homo sapiens
cagggaggtagtcat

SEQ ID NO: 143215 - DNA, 15 bp, Homo sapiens
agggaggtagtcatg

SEQ ID NO: 143216 - DNA, 15 bp, Homo sapiens
gggaggtagtcatgt

SEQ ID NO: 143217 - DNA, 15 bp, Homo sapiens
ggaggtagtcatgtg

SEQ ID NO: 143218 - DNA, 15 bp, Homo sapiens
gaggtagtcatgtgc

SEQ ID NO: 143219 - DNA, 15 bp, Homo sapiens
aggtagtcatgtgca

SEQ ID NO: 143220 - DNA, 15 bp, Homo sapiens
ggtagtcatgtgcaa

SEQ ID NO: 143221 - DNA, 15 bp, Homo sapiens
gtagtcatgtgcaag

SEQ ID NO: 143222 - DNA, 15 bp, Homo sapiens
tagtcatgtgcaagg

SEQ ID NO: 143223 - DNA, 15 bp, Homo sapiens
agtcatgtgcaaggt

SEQ ID NO: 143224 - DNA, 15 bp, Homo sapiens
gtcatgtgcaaggtc

SEQ ID NO: 143225 - DNA, 15 bp, Homo sapiens
tcatgtgcaaggtcc

SEQ ID NO: 143226 - DNA, 15 bp, Homo sapiens
catgtgcaaggtcca

SEQ ID NO: 143227 - DNA, 15 bp, Homo sapiens
atgtgcaaggtccag

SEQ ID NO: 143228 - DNA, 15 bp, Homo sapiens
tgtgcaaggtccagc

SEQ ID NO: 143229 - DNA, 15 bp, Homo sapiens
gtgcaaggtccagcc

SEQ ID NO: 143230 - DNA, 15 bp, Homo sapiens
tgcaaggtccagccc

SEQ ID NO: 143231 - DNA, 15 bp, Homo sapiens
gcaaggtccagccct

SEQ ID NO: 143232 - DNA, 15 bp, Homo sapiens
caaggtccagccctc

SEQ ID NO: 143233 - DNA, 15 bp, Homo sapiens
aaggtccagccctct

SEQ ID NO: 143234 - DNA, 15 bp, Homo sapiens
aggtccagccctctc

SEQ ID NO: 143235 - DNA, 15 bp, Homo sapiens
ggtccagccctctct

SEQ ID NO: 143236 - DNA, 15 bp, Homo sapiens
gtccagccctctctg

SEQ ID NO: 143237 - DNA, 15 bp, Homo sapiens
tccagccctctctgt

SEQ ID NO: 143238 - DNA, 15 bp, Homo sapiens
ccagccctctctgtt

SEQ ID NO: 143239 - DNA, 15 bp, Homo sapiens
cagccctctctgttt

SEQ ID NO: 143240 - DNA, 15 bp, Homo sapiens
agccctctctgtttc

SEQ ID NO: 143241 - DNA, 15 bp, Homo sapiens
gccctctctgtttca

SEQ ID NO: 143242 - DNA, 15 bp, Homo sapiens
ccctctctgtttcat

SEQ ID NO: 143243 - DNA, 15 bp, Homo sapiens
cctctctgtttcatt

SEQ ID NO: 143244 - DNA, 15 bp, Homo sapiens
ctctctgtttcattc

SEQ ID NO: 143245 - DNA, 15 bp, Homo sapiens
tctctgtttcattcc

SEQ ID NO: 143246 - DNA, 15 bp, Homo sapiens
ctctgtttcattcct

SEQ ID NO: 143247 - DNA, 15 bp, Homo sapiens
tctgtttcattcctg

SEQ ID NO: 143248 - DNA, 15 bp, Homo sapiens
ctgtttcattcctgg

SEQ ID NO: 143249 - DNA, 15 bp, Homo sapiens
tgtttcattcctggt

SEQ ID NO: 143250 - DNA, 15 bp, Homo sapiens
gtttcattcctggtt

SEQ ID NO: 143251 - DNA, 15 bp, Homo sapiens
tttcattcctggttg

SEQ ID NO: 143252 - DNA, 15 bp, Homo sapiens
ttcattcctggttgg

SEQ ID NO: 143253 - DNA, 15 bp, Homo sapiens
tcattcctggttggg

SEQ ID NO: 143254 - DNA, 15 bp, Homo sapiens
cattcctggttgggg

SEQ ID NO: 143255 - DNA, 15 bp, Homo sapiens
attcctggttgggga

SEQ ID NO: 143256 - DNA, 15 bp, Homo sapiens
ttcctggttggggaa

SEQ ID NO: 143257 - DNA, 15 bp, Homo sapiens
tcctggttggggaat

SEQ ID NO: 143258 - DNA, 15 bp, Homo sapiens
cctggttggggaatg

SEQ ID NO: 143259 - DNA, 15 bp, Homo sapiens
ctggttggggaatgg

SEQ ID NO: 143260 - DNA, 15 bp, Homo sapiens
tggttggggaatggg

SEQ ID NO: 143261 - DNA, 15 bp, Homo sapiens
ggttggggaatgggt

SEQ ID NO: 143262 - DNA, 15 bp, Homo sapiens
gttggggaatgggtg

SEQ ID NO: 143263 - DNA, 15 bp, Homo sapiens
ttggggaatgggtgg

SEQ ID NO: 143264 - DNA, 15 bp, Homo sapiens
tggggaatgggtggg

SEQ ID NO: 143265 - DNA, 15 bp, Homo sapiens
ggggaatgggtggga

SEQ ID NO: 143266 - DNA, 15 bp, Homo sapiens
gggaatgggtgggac

SEQ ID NO: 143267 - DNA, 15 bp, Homo sapiens
ggaatgggtgggaca

SEQ ID NO: 143268 - DNA, 15 bp, Homo sapiens
gaatgggtgggacag

SEQ ID NO: 143269 - DNA, 15 bp, Homo sapiens
aatgggtgggacaga

SEQ ID NO: 143270 - DNA, 15 bp, Homo sapiens
atgggtgggacagac

SEQ ID NO: 143271 - DNA, 15 bp, Homo sapiens
tgggtgggacagacc

SEQ ID NO: 143272 - DNA, 15 bp, Homo sapiens
gggtgggacagacca

SEQ ID NO: 143273 - DNA, 15 bp, Homo sapiens
ggtgggacagaccag

SEQ ID NO: 143274 - DNA, 15 bp, Homo sapiens
gtgggacagaccagg

SEQ ID NO: 143275 - DNA, 15 bp, Homo sapiens
tgggacagaccagga

SEQ ID NO: 143276 - DNA, 15 bp, Homo sapiens
gggacagaccaggaa

SEQ ID NO: 143277 - DNA, 15 bp, Homo sapiens
ggacagaccaggaaa

SEQ ID NO: 143278 - DNA, 15 bp, Homo sapiens
gacagaccaggaaag

SEQ ID NO: 143279 - DNA, 15 bp, Homo sapiens
acagaccaggaaagg

SEQ ID NO: 143280 - DNA, 15 bp, Homo sapiens
cagaccaggaaagga

SEQ ID NO: 143281 - DNA, 15 bp, Homo sapiens
agaccaggaaaggag

SEQ ID NO: 143282 - DNA, 15 bp, Homo sapiens
gaccaggaaaggagc

SEQ ID NO: 143283 - DNA, 15 bp, Homo sapiens
accaggaaaggagca

SEQ ID NO: 143284 - DNA, 15 bp, Homo sapiens
ccaggaaaggagcag

SEQ ID NO: 143285 - DNA, 15 bp, Homo sapiens
caggaaaggagcagc

SEQ ID NO: 143286 - DNA, 15 bp, Homo sapiens
aggaaaggagcagct

SEQ ID NO: 143287 - DNA, 15 bp, Homo sapiens
ggaaaggagcagctg

SEQ ID NO: 143288 - DNA, 15 bp, Homo sapiens
gaaaggagcagctgc

SEQ ID NO: 143289 - DNA, 15 bp, Homo sapiens
aaaggagcagctgcc

SEQ ID NO: 143290 - DNA, 15 bp, Homo sapiens
aaggagcagctgccg

SEQ ID NO: 143291 - DNA, 15 bp, Homo sapiens
aggagcagctgccgt

SEQ ID NO: 143292 - DNA, 15 bp, Homo sapiens
ggagcagctgccgta

SEQ ID NO: 143293 - DNA, 15 bp, Homo sapiens
gagcagctgccgtat

SEQ ID NO: 143294 - DNA, 15 bp, Homo sapiens
agcagctgccgtata

SEQ ID NO: 143295 - DNA, 15 bp, Homo sapiens
gcagctgccgtatag

SEQ ID NO: 143296 - DNA, 15 bp, Homo sapiens
cagctgccgtataga

SEQ ID NO: 143297 - DNA, 15 bp, Homo sapiens
agctgccgtatagag

SEQ ID NO: 143298 - DNA, 15 bp, Homo sapiens
gctgccgtatagagc

SEQ ID NO: 143299 - DNA, 15 bp, Homo sapiens
ctgccgtatagagca

SEQ ID NO: 143300 - DNA, 15 bp, Homo sapiens
tgccgtatagagcag

SEQ ID NO: 143301 - DNA, 15 bp, Homo sapiens
gccgtatagagcagg

SEQ ID NO: 143302 - DNA, 15 bp, Homo sapiens
ccgtatagagcagga

SEQ ID NO: 143303 - DNA, 15 bp, Homo sapiens
cgtatagagcaggag

SEQ ID NO: 143304 - DNA, 15 bp, Homo sapiens
gtatagagcaggaga

SEQ ID NO: 143305 - DNA, 15 bp, Homo sapiens
tatagagcaggagac

SEQ ID NO: 143306 - DNA, 15 bp, Homo sapiens
atagagcaggagacg

SEQ ID NO: 143307 - DNA, 15 bp, Homo sapiens
tagagcaggagacgc

SEQ ID NO: 143308 - DNA, 15 bp, Homo sapiens
agagcaggagacgct

SEQ ID NO: 143309 - DNA, 15 bp, Homo sapiens
gagcaggagacgctc

SEQ ID NO: 143310 - DNA, 15 bp, Homo sapiens
agcaggagacgctct

SEQ ID NO: 143311 - DNA, 15 bp, Homo sapiens
gcaggagacgctctg

SEQ ID NO: 143312 - DNA, 15 bp, Homo sapiens
caggagacgctctgc

SEQ ID NO: 143313 - DNA, 15 bp, Homo sapiens
aggagacgctctgct

SEQ ID NO: 143314 - DNA, 15 bp, Homo sapiens
ggagacgctctgctg

SEQ ID NO: 143315 - DNA, 15 bp, Homo sapiens
gagacgctctgctgg

SEQ ID NO: 143316 - DNA, 15 bp, Homo sapiens
agacgctctgctggg

SEQ ID NO: 143317 - DNA, 15 bp, Homo sapiens
gacgctctgctgggt

SEQ ID NO: 143318 - DNA, 15 bp, Homo sapiens
acgctctgctgggtg

SEQ ID NO: 143319 - DNA, 15 bp, Homo sapiens
cgctctgctgggtgt

SEQ ID NO: 143320 - DNA, 15 bp, Homo sapiens
gctctgctgggtgtg

SEQ ID NO: 143321 - DNA, 15 bp, Homo sapiens
ctctgctgggtgtga

SEQ ID NO: 143322 - DNA, 15 bp, Homo sapiens
tctgctgggtgtgat

SEQ ID NO: 143323 - DNA, 15 bp, Homo sapiens
ctgctgggtgtgata

SEQ ID NO: 143324 - DNA, 15 bp, Homo sapiens
tgctgggtgtgatac

SEQ ID NO: 143325 - DNA, 15 bp, Homo sapiens
gctgggtgtgataca

SEQ ID NO: 143326 - DNA, 15 bp, Homo sapiens
ctgggtgtgatacag

SEQ ID NO: 143327 - DNA, 15 bp, Homo sapiens
tgggtgtgatacagt

SEQ ID NO: 143328 - DNA, 15 bp, Homo sapiens
gggtgtgatacagtc

SEQ ID NO: 143329 - DNA, 15 bp, Homo sapiens
ggtgtgatacagtcc

SEQ ID NO: 143330 - DNA, 15 bp, Homo sapiens
gtgtgatacagtccc

SEQ ID NO: 143331 - DNA, 15 bp, Homo sapiens
tgtgatacagtccct

SEQ ID NO: 143332 - DNA, 15 bp, Homo sapiens
gtgatacagtccctg

SEQ ID NO: 143333 - DNA, 15 bp, Homo sapiens
tgatacagtccctga

SEQ ID NO: 143334 - DNA, 15 bp, Homo sapiens
gatacagtccctgat

SEQ ID NO: 143335 - DNA, 15 bp, Homo sapiens
atacagtccctgatg

SEQ ID NO: 143336 - DNA, 15 bp, Homo sapiens
tacagtccctgatgg

SEQ ID NO: 143337 - DNA, 15 bp, Homo sapiens
acagtccctgatggg

SEQ ID NO: 143338 - DNA, 15 bp, Homo sapiens
cagtccctgatgggg

SEQ ID NO: 143339 - DNA, 15 bp, Homo sapiens
agtccctgatggggc

SEQ ID NO: 143340 - DNA, 15 bp, Homo sapiens
gtccctgatggggcc

SEQ ID NO: 143341 - DNA, 15 bp, Homo sapiens
tccctgatggggcct

SEQ ID NO: 143342 - DNA, 15 bp, Homo sapiens
ccctgatggggcctc

SEQ ID NO: 143343 - DNA, 15 bp, Homo sapiens
cctgatggggcctcc

SEQ ID NO: 143344 - DNA, 15 bp, Homo sapiens
ctgatggggcctcct

SEQ ID NO: 143345 - DNA, 15 bp, Homo sapiens
tgatggggcctccta

SEQ ID NO: 143346 - DNA, 15 bp, Homo sapiens
gatggggcctcctac

SEQ ID NO: 143347 - DNA, 15 bp, Homo sapiens
atggggcctcctact

SEQ ID NO: 143348 - DNA, 15 bp, Homo sapiens
tggggcctcctactg

SEQ ID NO: 143349 - DNA, 15 bp, Homo sapiens
ggggcctcctactgc

SEQ ID NO: 143350 - DNA, 15 bp, Homo sapiens
gggcctcctactgca

SEQ ID NO: 143351 - DNA, 15 bp, Homo sapiens
ggcctcctactgcag

SEQ ID NO: 143352 - DNA, 15 bp, Homo sapiens
gcctcctactgcagt

SEQ ID NO: 143353 - DNA, 15 bp, Homo sapiens
cctcctactgcagtc

SEQ ID NO: 143354 - DNA, 15 bp, Homo sapiens
ctcctactgcagtct

SEQ ID NO: 143355 - DNA, 15 bp, Homo sapiens
tcctactgcagtctt

SEQ ID NO: 143356 - DNA, 15 bp, Homo sapiens
cctactgcagtcttt

SEQ ID NO: 143357 - DNA, 15 bp, Homo sapiens
ctactgcagtctttc

SEQ ID NO: 143358 - DNA, 15 bp, Homo sapiens
tactgcagtctttcc

SEQ ID NO: 143359 - DNA, 15 bp, Homo sapiens
actgcagtctttcca

SEQ ID NO: 143360 - DNA, 15 bp, Homo sapiens
ctgcagtctttccag

SEQ ID NO: 143361 - DNA, 15 bp, Homo sapiens
tgcagtctttccagt

SEQ ID NO: 143362 - DNA, 15 bp, Homo sapiens
gcagtctttccagtc

SEQ ID NO: 143363 - DNA, 15 bp, Homo sapiens
cagtctttccagtca

SEQ ID NO: 143364 - DNA, 15 bp, Homo sapiens
agtctttccagtcag

SEQ ID NO: 143365 - DNA, 15 bp, Homo sapiens
gtctttccagtcagg

SEQ ID NO: 143366 - DNA, 15 bp, Homo sapiens
tctttccagtcagga

SEQ ID NO: 143367 - DNA, 15 bp, Homo sapiens
ctttccagtcaggaa

SEQ ID NO: 143368 - DNA, 15 bp, Homo sapiens
tttccagtcaggaag

SEQ ID NO: 143369 - DNA, 15 bp, Homo sapiens
ttccagtcaggaagg

SEQ ID NO: 143370 - DNA, 15 bp, Homo sapiens
tccagtcaggaagga

SEQ ID NO: 143371 - DNA, 15 bp, Homo sapiens
ccagtcaggaaggaa

SEQ ID NO: 143372 - DNA, 15 bp, Homo sapiens
cagtcaggaaggaaa

SEQ ID NO: 143373 - DNA, 15 bp, Homo sapiens
agtcaggaaggaaac

SEQ ID NO: 143374 - DNA, 15 bp, Homo sapiens
gtcaggaaggaaaca

SEQ ID NO: 143375 - DNA, 15 bp, Homo sapiens
tcaggaaggaaacat

SEQ ID NO: 143376 - DNA, 15 bp, Homo sapiens
caggaaggaaacatc

SEQ ID NO: 143377 - DNA, 15 bp, Homo sapiens
aggaaggaaacatcc

SEQ ID NO: 143378 - DNA, 15 bp, Homo sapiens
ggaaggaaacatcct

SEQ ID NO: 143379 - DNA, 15 bp, Homo sapiens
gaaggaaacatcctc

SEQ ID NO: 143380 - DNA, 15 bp, Homo sapiens
aaggaaacatcctct

SEQ ID NO: 143381 - DNA, 15 bp, Homo sapiens
aggaaacatcctcta

SEQ ID NO: 143382 - DNA, 15 bp, Homo sapiens
ggaaacatcctctaa

SEQ ID NO: 143383 - DNA, 15 bp, Homo sapiens
gaaacatcctctaag

SEQ ID NO: 143384 - DNA, 15 bp, Homo sapiens
aaacatcctctaagt

SEQ ID NO: 143385 - DNA, 15 bp, Homo sapiens
aacatcctctaagtg

SEQ ID NO: 143386 - DNA, 15 bp, Homo sapiens
acatcctctaagtgg

SEQ ID NO: 143387 - DNA, 15 bp, Homo sapiens
catcctctaagtggg

SEQ ID NO: 143388 - DNA, 15 bp, Homo sapiens
atcctctaagtgggg

SEQ ID NO: 143389 - DNA, 15 bp, Homo sapiens
tcctctaagtgggga

SEQ ID NO: 143390 - DNA, 15 bp, Homo sapiens
cctctaagtggggac

SEQ ID NO: 143391 - DNA, 15 bp, Homo sapiens
ctctaagtggggacc

SEQ ID NO: 143392 - DNA, 15 bp, Homo sapiens
tctaagtggggacct

SEQ ID NO: 143393 - DNA, 15 bp, Homo sapiens
ctaagtggggaccta

SEQ ID NO: 143394 - DNA, 15 bp, Homo sapiens
taagtggggacctaa

SEQ ID NO: 143395 - DNA, 15 bp, Homo sapiens
aagtggggacctaaa

SEQ ID NO: 143396 - DNA, 15 bp, Homo sapiens
agtggggacctaaag

SEQ ID NO: 143397 - DNA, 15 bp, Homo sapiens
gtggggacctaaaga

SEQ ID NO: 143398 - DNA, 15 bp, Homo sapiens
tggggacctaaagaa

SEQ ID NO: 143399 - DNA, 15 bp, Homo sapiens
ggggacctaaagaat

SEQ ID NO: 143400 - DNA, 15 bp, Homo sapiens
gggacctaaagaatg

SEQ ID NO: 143401 - DNA, 15 bp, Homo sapiens
ggacctaaagaatgg

SEQ ID NO: 143402 - DNA, 15 bp, Homo sapiens
gacctaaagaatgga

SEQ ID NO: 143403 - DNA, 15 bp, Homo sapiens
acctaaagaatggat

SEQ ID NO: 143404 - DNA, 15 bp, Homo sapiens
cctaaagaatggatg

SEQ ID NO: 143405 - DNA, 15 bp, Homo sapiens
ctaaagaatggatgt

SEQ ID NO: 143406 - DNA, 15 bp, Homo sapiens
taaagaatggatgtc

SEQ ID NO: 143407 - DNA, 15 bp, Homo sapiens
aaagaatggatgtca

SEQ ID NO: 143408 - DNA, 15 bp, Homo sapiens
aagaatggatgtcag

SEQ ID NO: 143409 - DNA, 15 bp, Homo sapiens
agaatggatgtcagc

SEQ ID NO: 143410 - DNA, 15 bp, Homo sapiens
gaatggatgtcagcc

SEQ ID NO: 143411 - DNA, 15 bp, Homo sapiens
aatggatgtcagcca

SEQ ID NO: 143412 - DNA, 15 bp, Homo sapiens
atggatgtcagccag

SEQ ID NO: 143413 - DNA, 15 bp, Homo sapiens
tggatgtcagccagg

SEQ ID NO: 143414 - DNA, 15 bp, Homo sapiens
ggatgtcagccaggt

SEQ ID NO: 143415 - DNA, 15 bp, Homo sapiens
gatgtcagccaggta

SEQ ID NO: 143416 - DNA, 15 bp, Homo sapiens
atgtcagccaggtaa

SEQ ID NO: 143417 - DNA, 15 bp, Homo sapiens
tgtcagccaggtaaa

SEQ ID NO: 143418 - DNA, 15 bp, Homo sapiens
gtcagccaggtaaag

SEQ ID NO: 143419 - DNA, 15 bp, Homo sapiens
tcagccaggtaaaga

SEQ ID NO: 143420 - DNA, 15 bp, Homo sapiens
cagccaggtaaagaa

SEQ ID NO: 143421 - DNA, 15 bp, Homo sapiens
agccaggtaaagaac

SEQ ID NO: 143422 - DNA, 15 bp, Homo sapiens
gccaggtaaagaaca

SEQ ID NO: 143423 - DNA, 15 bp, Homo sapiens
ccaggtaaagaacag

SEQ ID NO: 143424 - DNA, 15 bp, Homo sapiens
caggtaaagaacagg

SEQ ID NO: 143425 - DNA, 15 bp, Homo sapiens
aggtaaagaacaggg

SEQ ID NO: 143426 - DNA, 15 bp, Homo sapiens
ggtaaagaacaggga

SEQ ID NO: 143427 - DNA, 15 bp, Homo sapiens
gtaaagaacagggag

SEQ ID NO: 143428 - DNA, 15 bp, Homo sapiens
taaagaacagggagt

SEQ ID NO: 143429 - DNA, 15 bp, Homo sapiens
aaagaacagggagta

SEQ ID NO: 143430 - DNA, 15 bp, Homo sapiens
aagaacagggagtag

SEQ ID NO: 143431 - DNA, 15 bp, Homo sapiens
agaacagggagtaga

SEQ ID NO: 143432 - DNA, 15 bp, Homo sapiens
gaacagggagtagaa

SEQ ID NO: 143433 - DNA, 15 bp, Homo sapiens
aacagggagtagaat

SEQ ID NO: 143434 - DNA, 15 bp, Homo sapiens
acagggagtagaatg

SEQ ID NO: 143435 - DNA, 15 bp, Homo sapiens
cagggagtagaatgt

SEQ ID NO: 143436 - DNA, 15 bp, Homo sapiens
agggagtagaatgtt

SEQ ID NO: 143437 - DNA, 15 bp, Homo sapiens
gggagtagaatgttc

SEQ ID NO: 143438 - DNA, 15 bp, Homo sapiens
ggagtagaatgttcc

SEQ ID NO: 143439 - DNA, 15 bp, Homo sapiens
gagtagaatgttcca

SEQ ID NO: 143440 - DNA, 15 bp, Homo sapiens
agtagaatgttccag

SEQ ID NO: 143441 - DNA, 15 bp, Homo sapiens
gtagaatgttccagg

SEQ ID NO: 143442 - DNA, 15 bp, Homo sapiens
tagaatgttccaggt

SEQ ID NO: 143443 - DNA, 15 bp, Homo sapiens
agaatgttccaggta

SEQ ID NO: 143444 - DNA, 15 bp, Homo sapiens
gaatgttccaggtag

SEQ ID NO: 143445 - DNA, 15 bp, Homo sapiens
aatgttccaggtaga

SEQ ID NO: 143446 - DNA, 15 bp, Homo sapiens
atgttccaggtagag

SEQ ID NO: 143447 - DNA, 15 bp, Homo sapiens
tgttccaggtagagg

SEQ ID NO: 143448 - DNA, 15 bp, Homo sapiens
gttccaggtagagga

SEQ ID NO: 143449 - DNA, 15 bp, Homo sapiens
ttccaggtagaggac

SEQ ID NO: 143450 - DNA, 15 bp, Homo sapiens
tccaggtagaggaca

SEQ ID NO: 143451 - DNA, 15 bp, Homo sapiens
ccaggtagaggacat

SEQ ID NO: 143452 - DNA, 15 bp, Homo sapiens
caggtagaggacata

SEQ ID NO: 143453 - DNA, 15 bp, Homo sapiens
aggtagaggacatag

SEQ ID NO: 143454 - DNA, 15 bp, Homo sapiens
ggtagaggacatagt

SEQ ID NO: 143455 - DNA, 15 bp, Homo sapiens
gtagaggacatagta

SEQ ID NO: 143456 - DNA, 15 bp, Homo sapiens
tagaggacatagtat

SEQ ID NO: 143457 - DNA, 15 bp, Homo sapiens
agaggacatagtata

SEQ ID NO: 143458 - DNA, 15 bp, Homo sapiens
gaggacatagtatat

SEQ ID NO: 143459 - DNA, 15 bp, Homo sapiens
aggacatagtatatg

SEQ ID NO: 143460 - DNA, 15 bp, Homo sapiens
ggacatagtatatgc

SEQ ID NO: 143461 - DNA, 15 bp, Homo sapiens
gacatagtatatgca

SEQ ID NO: 143462 - DNA, 15 bp, Homo sapiens
acatagtatatgcat

SEQ ID NO: 143463 - DNA, 15 bp, Homo sapiens
catagtatatgcatt

SEQ ID NO: 143464 - DNA, 15 bp, Homo sapiens
atagtatatgcattg

SEQ ID NO: 143465 - DNA, 15 bp, Homo sapiens
tagtatatgcattgg

SEQ ID NO: 143466 - DNA, 15 bp, Homo sapiens
agtatatgcattggt

SEQ ID NO: 143467 - DNA, 15 bp, Homo sapiens
gtatatgcattggtc

SEQ ID NO: 143468 - DNA, 15 bp, Homo sapiens
tatatgcattggtcc

SEQ ID NO: 143469 - DNA, 15 bp, Homo sapiens
atatgcattggtcca

SEQ ID NO: 143470 - DNA, 15 bp, Homo sapiens
tatgcattggtccag

SEQ ID NO: 143471 - DNA, 15 bp, Homo sapiens
atgcattggtccaga

SEQ ID NO: 143472 - DNA, 15 bp, Homo sapiens
tgcattggtccagag

SEQ ID NO: 143473 - DNA, 15 bp, Homo sapiens
gcattggtccagaga

SEQ ID NO: 143474 - DNA, 15 bp, Homo sapiens
cattggtccagagag

SEQ ID NO: 143475 - DNA, 15 bp, Homo sapiens
attggtccagagagg

SEQ ID NO: 143476 - DNA, 15 bp, Homo sapiens
ttggtccagagagga

SEQ ID NO: 143477 - DNA, 15 bp, Homo sapiens
tggtccagagaggag

SEQ ID NO: 143478 - DNA, 15 bp, Homo sapiens
ggtccagagaggaga

SEQ ID NO: 143479 - DNA, 15 bp, Homo sapiens
gtccagagaggagag

SEQ ID NO: 143480 - DNA, 15 bp, Homo sapiens
tccagagaggagagg

SEQ ID NO: 143481 - DNA, 15 bp, Homo sapiens
ccagagaggagaggg

SEQ ID NO: 143482 - DNA, 15 bp, Homo sapiens
cagagaggagaggga

SEQ ID NO: 143483 - DNA, 15 bp, Homo sapiens
agagaggagagggaa

SEQ ID NO: 143484 - DNA, 15 bp, Homo sapiens
gagaggagagggaag

SEQ ID NO: 143485 - DNA, 15 bp, Homo sapiens
agaggagagggaaga

SEQ ID NO: 143486 - DNA, 15 bp, Homo sapiens
ggagagggaagagaa

SEQ ID NO: 143487 - DNA, 15 bp, Homo sapiens
gagagggaagagaag

SEQ ID NO: 143488 - DNA, 15 bp, Homo sapiens
agagggaagagaagg

SEQ ID NO: 143489 - DNA, 15 bp, Homo sapiens
gagggaagagaaggt

SEQ ID NO: 143490 - DNA, 15 bp, Homo sapiens
agggaagagaaggtg

SEQ ID NO: 143491 - DNA, 15 bp, Homo sapiens
gggaagagaaggtgg

SEQ ID NO: 143492 - DNA, 15 bp, Homo sapiens
ggaagagaaggtggc

SEQ ID NO: 143493 - DNA, 15 bp, Homo sapiens
gaagagaaggtggca

SEQ ID NO: 143494 - DNA, 15 bp, Homo sapiens
aagagaaggtggcat

SEQ ID NO: 143495 - DNA, 15 bp, Homo sapiens
agagaaggtggcatt

SEQ ID NO: 143496 - DNA, 15 bp, Homo sapiens
gagaaggtggcattt

SEQ ID NO: 143497 - DNA, 15 bp, Homo sapiens
agaaggtggcattta

SEQ ID NO: 143498 - DNA, 15 bp, Homo sapiens
gaaggtggcatttag

SEQ ID NO: 143499 - DNA, 15 bp, Homo sapiens
aaggtggcatttagg

SEQ ID NO: 143500 - DNA, 15 bp, Homo sapiens
aggtggcatttaggg

SEQ ID NO: 143501 - DNA, 15 bp, Homo sapiens
ggtggcatttagggg

SEQ ID NO: 143502 - DNA, 15 bp, Homo sapiens
gtggcatttagggga

SEQ ID NO: 143503 - DNA, 15 bp, Homo sapiens
tggcatttaggggaa

SEQ ID NO: 143504 - DNA, 15 bp, Homo sapiens
ggcatttaggggaac

SEQ ID NO: 143505 - DNA, 15 bp, Homo sapiens
gcatttaggggaact

SEQ ID NO: 143506 - DNA, 15 bp, Homo sapiens
catttaggggaactg

SEQ ID NO: 143507 - DNA, 15 bp, Homo sapiens
atttaggggaactgt

SEQ ID NO: 143508 - DNA, 15 bp, Homo sapiens
tttaggggaactgta

SEQ ID NO: 143509 - DNA, 15 bp, Homo sapiens
ttaggggaactgtac

SEQ ID NO: 143510 - DNA, 15 bp, Homo sapiens
taggggaactgtacc

SEQ ID NO: 143511 - DNA, 15 bp, Homo sapiens
aggggaactgtacct

SEQ ID NO: 143512 - DNA, 15 bp, Homo sapiens
ggggaactgtacctg

SEQ ID NO: 143513 - DNA, 15 bp, Homo sapiens
gggaactgtacctga

SEQ ID NO: 143514 - DNA, 15 bp, Homo sapiens
ggaactgtacctgat

SEQ ID NO: 143515 - DNA, 15 bp, Homo sapiens
gaactgtacctgatt

SEQ ID NO: 143516 - DNA, 15 bp, Homo sapiens
aactgtacctgattg

SEQ ID NO: 143517 - DNA, 15 bp, Homo sapiens
actgtacctgattga

SEQ ID NO: 143518 - DNA, 15 bp, Homo sapiens
ctgtacctgattgag

SEQ ID NO: 143519 - DNA, 15 bp, Homo sapiens
tgtacctgattgaga

SEQ ID NO: 143520 - DNA, 15 bp, Homo sapiens
gtacctgattgagat

SEQ ID NO: 143521 - DNA, 15 bp, Homo sapiens
tacctgattgagata

SEQ ID NO: 143522 - DNA, 15 bp, Homo sapiens
acctgattgagatag

SEQ ID NO: 143523 - DNA, 15 bp, Homo sapiens
cctgattgagatagt

SEQ ID NO: 143524 - DNA, 15 bp, Homo sapiens
ctgattgagatagtt

SEQ ID NO: 143525 - DNA, 15 bp, Homo sapiens
tgattgagatagttc

SEQ ID NO: 143526 - DNA, 15 bp, Homo sapiens
gattgagatagttca

SEQ ID NO: 143527 - DNA, 15 bp, Homo sapiens
attgagatagttcag

SEQ ID NO: 143528 - DNA, 15 bp, Homo sapiens
ttgagatagttcagc

SEQ ID NO: 143529 - DNA, 15 bp, Homo sapiens
tgagatagttcagca

SEQ ID NO: 143530 - DNA, 15 bp, Homo sapiens
gagatagttcagcat

SEQ ID NO: 143531 - DNA, 15 bp, Homo sapiens
agatagttcagcatg

SEQ ID NO: 143532 - DNA, 15 bp, Homo sapiens
gatagttcagcatgg

SEQ ID NO: 143533 - DNA, 15 bp, Homo sapiens
atagttcagcatgga

SEQ ID NO: 143534 - DNA, 15 bp, Homo sapiens
tagttcagcatggag

SEQ ID NO: 143535 - DNA, 15 bp, Homo sapiens
agttcagcatggagc

SEQ ID NO: 143536 - DNA, 15 bp, Homo sapiens
gttcagcatggagca

SEQ ID NO: 143537 - DNA, 15 bp, Homo sapiens
ttcagcatggagcag

SEQ ID NO: 143538 - DNA, 15 bp, Homo sapiens
tcagcatggagcaga

SEQ ID NO: 143539 - DNA, 15 bp, Homo sapiens
cagcatggagcagat

SEQ ID NO: 143540 - DNA, 15 bp, Homo sapiens
agcatggagcagata

SEQ ID NO: 143541 - DNA, 15 bp, Homo sapiens
gcatggagcagatat

SEQ ID NO: 143542 - DNA, 15 bp, Homo sapiens
catggagcagatata

SEQ ID NO: 143543 - DNA, 15 bp, Homo sapiens
atggagcagatatag

SEQ ID NO: 143544 - DNA, 15 bp, Homo sapiens
tggagcagatatagc

SEQ ID NO: 143545 - DNA, 15 bp, Homo sapiens
ggagcagatatagct

SEQ ID NO: 143546 - DNA, 15 bp, Homo sapiens
gagcagatatagctg

SEQ ID NO: 143547 - DNA, 15 bp, Homo sapiens
agcagatatagctgt

SEQ ID NO: 143548 - DNA, 15 bp, Homo sapiens
gcagatatagctgtg

SEQ ID NO: 143549 - DNA, 15 bp, Homo sapiens
cagatatagctgtgg

SEQ ID NO: 143550 - DNA, 15 bp, Homo sapiens
agatatagctgtggg

SEQ ID NO: 143551 - DNA, 15 bp, Homo sapiens
gatatagctgtgggg

SEQ ID NO: 143552 - DNA, 15 bp, Homo sapiens
atatagctgtgggga

SEQ ID NO: 143553 - DNA, 15 bp, Homo sapiens
tatagctgtggggag

SEQ ID NO: 143554 - DNA, 15 bp, Homo sapiens
atagctgtggggagt

SEQ ID NO: 143555 - DNA, 15 bp, Homo sapiens
tagctgtggggagtt

SEQ ID NO: 143556 - DNA, 15 bp, Homo sapiens
agctgtggggagttt

SEQ ID NO: 143557 - DNA, 15 bp, Homo sapiens
gctgtggggagtttg

SEQ ID NO: 143558 - DNA, 15 bp, Homo sapiens
ctgtggggagtttga

SEQ ID NO: 143559 - DNA, 15 bp, Homo sapiens
tgtggggagtttgat

SEQ ID NO: 143560 - DNA, 15 bp, Homo sapiens
gtggggagtttgatg

SEQ ID NO: 143561 - DNA, 15 bp, Homo sapiens
tggggagtttgatgg

SEQ ID NO: 143562 - DNA, 15 bp, Homo sapiens
ggggagtttgatggg

SEQ ID NO: 143563 - DNA, 15 bp, Homo sapiens
gggagtttgatggga

SEQ ID NO: 143564 - DNA, 15 bp, Homo sapiens
ggagtttgatgggag

SEQ ID NO: 143565 - DNA, 15 bp, Homo sapiens
gagtttgatgggaga

SEQ ID NO: 143566 - DNA, 15 bp, Homo sapiens
agtttgatgggagaa

SEQ ID NO: 143567 - DNA, 15 bp, Homo sapiens
gtttgatgggagaag

SEQ ID NO: 143568 - DNA, 15 bp, Homo sapiens
tttgatgggagaagg

SEQ ID NO: 143569 - DNA, 15 bp, Homo sapiens
ttgatgggagaagga

SEQ ID NO: 143570 - DNA, 15 bp, Homo sapiens
tgatgggagaaggaa

SEQ ID NO: 143571 - DNA, 15 bp, Homo sapiens
gatgggagaaggaac

SEQ ID NO: 143572 - DNA, 15 bp, Homo sapiens
atgggagaaggaacg

SEQ ID NO: 143573 - DNA, 15 bp, Homo sapiens
tgggagaaggaacga

SEQ ID NO: 143574 - DNA, 15 bp, Homo sapiens
gggagaaggaacgat

SEQ ID NO: 143575 - DNA, 15 bp, Homo sapiens
ggagaaggaacgatg

SEQ ID NO: 143576 - DNA, 15 bp, Homo sapiens
gagaaggaacgatga

SEQ ID NO: 143577 - DNA, 15 bp, Homo sapiens
agaaggaacgatgag

SEQ ID NO: 143578 - DNA, 15 bp, Homo sapiens
gaaggaacgatgaga

SEQ ID NO: 143579 - DNA, 15 bp, Homo sapiens
aaggaacgatgagac

SEQ ID NO: 143580 - DNA, 15 bp, Homo sapiens
aggaacgatgagacg

SEQ ID NO: 143581 - DNA, 15 bp, Homo sapiens
ggaacgatgagacgt

SEQ ID NO: 143582 - DNA, 15 bp, Homo sapiens
gaacgatgagacgtg

SEQ ID NO: 143583 - DNA, 15 bp, Homo sapiens
aacgatgagacgtga

SEQ ID NO: 143584 - DNA, 15 bp, Homo sapiens
acgatgagacgtgat

SEQ ID NO: 143585 - DNA, 15 bp, Homo sapiens
cgatgagacgtgatg

SEQ ID NO: 143586 - DNA, 15 bp, Homo sapiens
gatgagacgtgatgc

SEQ ID NO: 143587 - DNA, 15 bp, Homo sapiens
atgagacgtgatgcc

SEQ ID NO: 143588 - DNA, 15 bp, Homo sapiens
tgagacgtgatgcct

SEQ ID NO: 143589 - DNA, 15 bp, Homo sapiens
gagacgtgatgcctg

SEQ ID NO: 143590 - DNA, 15 bp, Homo sapiens
agacgtgatgcctgc

SEQ ID NO: 143591 - DNA, 15 bp, Homo sapiens
gacgtgatgcctgca

SEQ ID NO: 143592 - DNA, 15 bp, Homo sapiens
acgtgatgcctgcag

SEQ ID NO: 143593 - DNA, 15 bp, Homo sapiens
cgtgatgcctgcaga

SEQ ID NO: 143594 - DNA, 15 bp, Homo sapiens
gtgatgcctgcagag

SEQ ID NO: 143595 - DNA, 15 bp, Homo sapiens
tgatgcctgcagagg

SEQ ID NO: 143596 - DNA, 15 bp, Homo sapiens
gatgcctgcagaggt

SEQ ID NO: 143597 - DNA, 15 bp, Homo sapiens
atgcctgcagaggtg

SEQ ID NO: 143598 - DNA, 15 bp, Homo sapiens
tgcctgcagaggtgg

SEQ ID NO: 143599 - DNA, 15 bp, Homo sapiens
gcctgcagaggtggg

SEQ ID NO: 143600 - DNA, 15 bp, Homo sapiens
cctgcagaggtgggc

SEQ ID NO: 143601 - DNA, 15 bp, Homo sapiens
ctgcagaggtgggca

SEQ ID NO: 143602 - DNA, 15 bp, Homo sapiens
tgcagaggtgggcaa

SEQ ID NO: 143603 - DNA, 15 bp, Homo sapiens
gcagaggtgggcaaa

SEQ ID NO: 143604 - DNA, 15 bp, Homo sapiens
cagaggtgggcaaag

SEQ ID NO: 143605 - DNA, 15 bp, Homo sapiens
agaggtgggcaaagg

SEQ ID NO: 143606 - DNA, 15 bp, Homo sapiens
gaggtgggcaaaggt

SEQ ID NO: 143607 - DNA, 15 bp, Homo sapiens
aggtgggcaaaggtc

SEQ ID NO: 143608 - DNA, 15 bp, Homo sapiens
ggtgggcaaaggtcg

SEQ ID NO: 143609 - DNA, 15 bp, Homo sapiens
gtgggcaaaggtcgg

SEQ ID NO: 143610 - DNA, 15 bp, Homo sapiens
tgggcaaaggtcggc

SEQ ID NO: 143611 - DNA, 15 bp, Homo sapiens
gggcaaaggtcggct

SEQ ID NO: 143612 - DNA, 15 bp, Homo sapiens
ggcaaaggtcggctg

SEQ ID NO: 143613 - DNA, 15 bp, Homo sapiens
gcaaaggtcggctga

SEQ ID NO: 143614 - DNA, 15 bp, Homo sapiens
caaaggtcggctgag

SEQ ID NO: 143615 - DNA, 15 bp, Homo sapiens
aaaggtcggctgagg

SEQ ID NO: 143616 - DNA, 15 bp, Homo sapiens
aaggtcggctgaggc

SEQ ID NO: 143617 - DNA, 15 bp, Homo sapiens
aggtcggctgaggca

SEQ ID NO: 143618 - DNA, 15 bp, Homo sapiens
ggtcggctgaggcag

SEQ ID NO: 143619 - DNA, 15 bp, Homo sapiens
gtcggctgaggcagg

SEQ ID NO: 143620 - DNA, 15 bp, Homo sapiens
tcggctgaggcaggt

SEQ ID NO: 143621 - DNA, 15 bp, Homo sapiens
cggctgaggcaggtc

SEQ ID NO: 143622 - DNA, 15 bp, Homo sapiens
ggctgaggcaggtct

SEQ ID NO: 143623 - DNA, 15 bp, Homo sapiens
gctgaggcaggtctt

SEQ ID NO: 143624 - DNA, 15 bp, Homo sapiens
ctgaggcaggtcttt

SEQ ID NO: 143625 - DNA, 15 bp, Homo sapiens
tgaggcaggtctttc

SEQ ID NO: 143626 - DNA, 15 bp, Homo sapiens
gaggcaggtctttct

SEQ ID NO: 143627 - DNA, 15 bp, Homo sapiens
aggcaggtctttctt

SEQ ID NO: 143628 - DNA, 15 bp, Homo sapiens
ggcaggtctttcttc

SEQ ID NO: 143629 - DNA, 15 bp, Homo sapiens
gcaggtctttcttca

SEQ ID NO: 143630 - DNA, 15 bp, Homo sapiens
caggtctttcttcac

SEQ ID NO: 143631 - DNA, 15 bp, Homo sapiens
aggtctttcttcacg

SEQ ID NO: 143632 - DNA, 15 bp, Homo sapiens
ggtctttcttcacga

SEQ ID NO: 143633 - DNA, 15 bp, Homo sapiens
gtctttcttcacgag

SEQ ID NO: 143634 - DNA, 15 bp, Homo sapiens
tctttcttcacgagc

SEQ ID NO: 143635 - DNA, 15 bp, Homo sapiens
ctttcttcacgagcc

SEQ ID NO: 143636 - DNA, 15 bp, Homo sapiens
tttcttcacgagcca

SEQ ID NO: 143637 - DNA, 15 bp, Homo sapiens
ttcttcacgagccat

SEQ ID NO: 143638 - DNA, 15 bp, Homo sapiens
tcttcacgagccatg

SEQ ID NO: 143639 - DNA, 15 bp, Homo sapiens
cttcacgagccatgt

SEQ ID NO: 143640 - DNA, 15 bp, Homo sapiens
ttcacgagccatgtg

SEQ ID NO: 143641 - DNA, 15 bp, Homo sapiens
tcacgagccatgtga

SEQ ID NO: 143642 - DNA, 15 bp, Homo sapiens
cacgagccatgtgag

SEQ ID NO: 143643 - DNA, 15 bp, Homo sapiens
acgagccatgtgagg

SEQ ID NO: 143644 - DNA, 15 bp, Homo sapiens
cgagccatgtgagga

SEQ ID NO: 143645 - DNA, 15 bp, Homo sapiens
gagccatgtgaggat

SEQ ID NO: 143646 - DNA, 15 bp, Homo sapiens
agccatgtgaggata

SEQ ID NO: 143647 - DNA, 15 bp, Homo sapiens
gccatgtgaggatat

SEQ ID NO: 143648 - DNA, 15 bp, Homo sapiens
ccatgtgaggatata

SEQ ID NO: 143649 - DNA, 15 bp, Homo sapiens
catgtgaggatatag

SEQ ID NO: 143650 - DNA, 15 bp, Homo sapiens
atgtgaggatatagg

SEQ ID NO: 143651 - DNA, 15 bp, Homo sapiens
tgtgaggatataggg

SEQ ID NO: 143652 - DNA, 15 bp, Homo sapiens
gtgaggatatagggc

SEQ ID NO: 143653 - DNA, 15 bp, Homo sapiens
tgaggatatagggcc

SEQ ID NO: 143654 - DNA, 15 bp, Homo sapiens
gaggatatagggcct

SEQ ID NO: 143655 - DNA, 15 bp, Homo sapiens
aggatatagggcctt

SEQ ID NO: 143656 - DNA, 15 bp, Homo sapiens
ggatatagggcctta

SEQ ID NO: 143657 - DNA, 15 bp, Homo sapiens
gatatagggccttat

SEQ ID NO: 143658 - DNA, 15 bp, Homo sapiens
atatagggccttatc

SEQ ID NO: 143659 - DNA, 15 bp, Homo sapiens
tatagggccttatcc

SEQ ID NO: 143660 - DNA, 15 bp, Homo sapiens
atagggccttatcct

SEQ ID NO: 143661 - DNA, 15 bp, Homo sapiens
tagggccttatcctc

SEQ ID NO: 143662 - DNA, 15 bp, Homo sapiens
agggccttatcctca

SEQ ID NO: 143663 - DNA, 15 bp, Homo sapiens
gggccttatcctcag

SEQ ID NO: 143664 - DNA, 15 bp, Homo sapiens
ggccttatcctcaga

SEQ ID NO: 143665 - DNA, 15 bp, Homo sapiens
gccttatcctcagag

SEQ ID NO: 143666 - DNA, 15 bp, Homo sapiens
ccttatcctcagagt

SEQ ID NO: 143667 - DNA, 15 bp, Homo sapiens
cttatcctcagagta

SEQ ID NO: 143668 - DNA, 15 bp, Homo sapiens
ttatcctcagagtaa

SEQ ID NO: 143669 - DNA, 15 bp, Homo sapiens
tatcctcagagtaaa

SEQ ID NO: 143670 - DNA, 15 bp, Homo sapiens
atcctcagagtaaag

SEQ ID NO: 143671 - DNA, 15 bp, Homo sapiens
tcctcagagtaaagg

SEQ ID NO: 143672 - DNA, 15 bp, Homo sapiens
cctcagagtaaaggg

SEQ ID NO: 143673 - DNA, 15 bp, Homo sapiens
ctcagagtaaaggga

SEQ ID NO: 143674 - DNA, 15 bp, Homo sapiens
tcagagtaaagggag

SEQ ID NO: 143675 - DNA, 15 bp, Homo sapiens
cagagtaaagggagc

SEQ ID NO: 143676 - DNA, 15 bp, Homo sapiens
agagtaaagggagcc

SEQ ID NO: 143677 - DNA, 15 bp, Homo sapiens
gagtaaagggagcca

SEQ ID NO: 143678 - DNA, 15 bp, Homo sapiens
agtaaagggagccat

SEQ ID NO: 143679 - DNA, 15 bp, Homo sapiens
gtaaagggagccatt

SEQ ID NO: 143680 - DNA, 15 bp, Homo sapiens
taaagggagccatta

SEQ ID NO: 143681 - DNA, 15 bp, Homo sapiens
aaagggagccattaa

SEQ ID NO: 143682 - DNA, 15 bp, Homo sapiens
aagggagccattaaa

SEQ ID NO: 143683 - DNA, 15 bp, Homo sapiens
agggagccattaaag

SEQ ID NO: 143684 - DNA, 15 bp, Homo sapiens
gggagccattaaagg

SEQ ID NO: 143685 - DNA, 15 bp, Homo sapiens
ggagccattaaaggc

SEQ ID NO: 143686 - DNA, 15 bp, Homo sapiens
gagccattaaaggct

SEQ ID NO: 143687 - DNA, 15 bp, Homo sapiens
agccattaaaggctc

SEQ ID NO: 143688 - DNA, 15 bp, Homo sapiens
gccattaaaggctcc

SEQ ID NO: 143689 - DNA, 15 bp, Homo sapiens
ccattaaaggctcca

SEQ ID NO: 143690 - DNA, 15 bp, Homo sapiens
cattaaaggctccac

SEQ ID NO: 143691 - DNA, 15 bp, Homo sapiens
attaaaggctccaca

SEQ ID NO: 143692 - DNA, 15 bp, Homo sapiens
ttaaaggctccacag

SEQ ID NO: 143693 - DNA, 15 bp, Homo sapiens
taaaggctccacagg

SEQ ID NO: 143694 - DNA, 15 bp, Homo sapiens
aaaggctccacaggc

SEQ ID NO: 143695 - DNA, 15 bp, Homo sapiens
aaggctccacaggct

SEQ ID NO: 143696 - DNA, 15 bp, Homo sapiens
aggctccacaggctg

SEQ ID NO: 143697 - DNA, 15 bp, Homo sapiens
ggctccacaggctga

SEQ ID NO: 143698 - DNA, 15 bp, Homo sapiens
gctccacaggctgag

SEQ ID NO: 143699 - DNA, 15 bp, Homo sapiens
ctccacaggctgagt

SEQ ID NO: 143700 - DNA, 15 bp, Homo sapiens
tccacaggctgagtg

SEQ ID NO: 143701 - DNA, 15 bp, Homo sapiens
ccacaggctgagtga

SEQ ID NO: 143702 - DNA, 15 bp, Homo sapiens
cacaggctgagtgac

SEQ ID NO: 143703 - DNA, 15 bp, Homo sapiens
acaggctgagtgact

SEQ ID NO: 143704 - DNA, 15 bp, Homo sapiens
caggctgagtgactt

SEQ ID NO: 143705 - DNA, 15 bp, Homo sapiens
aggctgagtgacttg

SEQ ID NO: 143706 - DNA, 15 bp, Homo sapiens
ggctgagtgacttga

SEQ ID NO: 143707 - DNA, 15 bp, Homo sapiens
gctgagtgacttgat

SEQ ID NO: 143708 - DNA, 15 bp, Homo sapiens
ctgagtgacttgatg

SEQ ID NO: 143709 - DNA, 15 bp, Homo sapiens
tgagtgacttgatga

SEQ ID NO: 143710 - DNA, 15 bp, Homo sapiens
gagtgacttgatgag

SEQ ID NO: 143711 - DNA, 15 bp, Homo sapiens
agtgacttgatgagg

SEQ ID NO: 143712 - DNA, 15 bp, Homo sapiens
gtgacttgatgaggt

SEQ ID NO: 143713 - DNA, 15 bp, Homo sapiens
tgacttgatgaggtg

SEQ ID NO: 143714 - DNA, 15 bp, Homo sapiens
gacttgatgaggtga

SEQ ID NO: 143715 - DNA, 15 bp, Homo sapiens
acttgatgaggtgaa

SEQ ID NO: 143716 - DNA, 15 bp, Homo sapiens
cttgatgaggtgaat

SEQ ID NO: 143717 - DNA, 15 bp, Homo sapiens
ttgatgaggtgaata

SEQ ID NO: 143718 - DNA, 15 bp, Homo sapiens
tgatgaggtgaatac

SEQ ID NO: 143719 - DNA, 15 bp, Homo sapiens
gatgaggtgaatacg

SEQ ID NO: 143720 - DNA, 15 bp, Homo sapiens
atgaggtgaatacga

SEQ ID NO: 143721 - DNA, 15 bp, Homo sapiens
tgaggtgaatacgaa

SEQ ID NO: 143722 - DNA, 15 bp, Homo sapiens
gaggtgaatacgaaa

SEQ ID NO: 143723 - DNA, 15 bp, Homo sapiens
aggtgaatacgaaac

SEQ ID NO: 143724 - DNA, 15 bp, Homo sapiens
ggtgaatacgaaaca

SEQ ID NO: 143725 - DNA, 15 bp, Homo sapiens
gtgaatacgaaacag

SEQ ID NO: 143726 - DNA, 15 bp, Homo sapiens
tgaatacgaaacaga

SEQ ID NO: 143727 - DNA, 15 bp, Homo sapiens
gaatacgaaacagag

SEQ ID NO: 143728 - DNA, 15 bp, Homo sapiens
aatacgaaacagagc

SEQ ID NO: 143729 - DNA, 15 bp, Homo sapiens
atacgaaacagagca

SEQ ID NO: 143730 - DNA, 15 bp, Homo sapiens
tacgaaacagagcat

SEQ ID NO: 143731 - DNA, 15 bp, Homo sapiens
acgaaacagagcatt

SEQ ID NO: 143732 - DNA, 15 bp, Homo sapiens
cgaaacagagcattt

SEQ ID NO: 143733 - DNA, 15 bp, Homo sapiens
gaaacagagcatttc

SEQ ID NO: 143734 - DNA, 15 bp, Homo sapiens
aaacagagcatttct

SEQ ID NO: 143735 - DNA, 15 bp, Homo sapiens
aacagagcatttctg

SEQ ID NO: 143736 - DNA, 15 bp, Homo sapiens
acagagcatttctgt

SEQ ID NO: 143737 - DNA, 15 bp, Homo sapiens
cagagcatttctgtg

SEQ ID NO: 143738 - DNA, 15 bp, Homo sapiens
agagcatttctgtga

SEQ ID NO: 143739 - DNA, 15 bp, Homo sapiens
gagcatttctgtgaa

SEQ ID NO: 143740 - DNA, 15 bp, Homo sapiens
agcatttctgtgaat

SEQ ID NO: 143741 - DNA, 15 bp, Homo sapiens
gcatttctgtgaatg

SEQ ID NO: 143742 - DNA, 15 bp, Homo sapiens
catttctgtgaatgt

SEQ ID NO: 143743 - DNA, 15 bp, Homo sapiens
atttctgtgaatgtg

SEQ ID NO: 143744 - DNA, 15 bp, Homo sapiens
tttctgtgaatgtga

SEQ ID NO: 143745 - DNA, 15 bp, Homo sapiens
ttctgtgaatgtgaa

SEQ ID NO: 143746 - DNA, 15 bp, Homo sapiens
tctgtgaatgtgaat

SEQ ID NO: 143747 - DNA, 15 bp, Homo sapiens
ctgtgaatgtgaatg

SEQ ID NO: 143748 - DNA, 15 bp, Homo sapiens
tgtgaatgtgaatgg

SEQ ID NO: 143749 - DNA, 15 bp, Homo sapiens
gtgaatgtgaatggc

SEQ ID NO: 143750 - DNA, 15 bp, Homo sapiens
tgaatgtgaatggcc

SEQ ID NO: 143751 - DNA, 15 bp, Homo sapiens
gaatgtgaatggcct

SEQ ID NO: 143752 - DNA, 15 bp, Homo sapiens
aatgtgaatggcctt

SEQ ID NO: 143753 - DNA, 15 bp, Homo sapiens
atgtgaatggccttt

SEQ ID NO: 143754 - DNA, 15 bp, Homo sapiens
tgtgaatggcctttg

SEQ ID NO: 143755 - DNA, 15 bp, Homo sapiens
gtgaatggcctttgg

SEQ ID NO: 143756 - DNA, 15 bp, Homo sapiens
tgaatggcctttgga

SEQ ID NO: 143757 - DNA, 15 bp, Homo sapiens
gaatggcctttggag

SEQ ID NO: 143758 - DNA, 15 bp, Homo sapiens
aatggcctttggagc

SEQ ID NO: 143759 - DNA, 15 bp, Homo sapiens
atggcctttggagca

SEQ ID NO: 143760 - DNA, 15 bp, Homo sapiens
tggcctttggagcag

SEQ ID NO: 143761 - DNA, 15 bp, Homo sapiens
ggcctttggagcaga

SEQ ID NO: 143762 - DNA, 15 bp, Homo sapiens
gcctttggagcagaa

SEQ ID NO: 143763 - DNA, 15 bp, Homo sapiens
cctttggagcagaac

SEQ ID NO: 143764 - DNA, 15 bp, Homo sapiens
ctttggagcagaact

SEQ ID NO: 143765 - DNA, 15 bp, Homo sapiens
tttggagcagaacta

SEQ ID NO: 143766 - DNA, 15 bp, Homo sapiens
ttggagcagaactaa

SEQ ID NO: 143767 - DNA, 15 bp, Homo sapiens
tggagcagaactaag

SEQ ID NO: 143768 - DNA, 15 bp, Homo sapiens
ggagcagaactaagt

SEQ ID NO: 143769 - DNA, 15 bp, Homo sapiens
gagcagaactaagtt

SEQ ID NO: 143770 - DNA, 15 bp, Homo sapiens
agcagaactaagttc

SEQ ID NO: 143771 - DNA, 15 bp, Homo sapiens
gcagaactaagttca

SEQ ID NO: 143772 - DNA, 15 bp, Homo sapiens
cagaactaagttcat

SEQ ID NO: 143773 - DNA, 15 bp, Homo sapiens
agaactaagttcatg

SEQ ID NO: 143774 - DNA, 15 bp, Homo sapiens
gaactaagttcatga

SEQ ID NO: 143775 - DNA, 15 bp, Homo sapiens
aactaagttcatgag

SEQ ID NO: 143776 - DNA, 15 bp, Homo sapiens
actaagttcatgagg

SEQ ID NO: 143777 - DNA, 15 bp, Homo sapiens
ctaagttcatgagga

SEQ ID NO: 143778 - DNA, 15 bp, Homo sapiens
taagttcatgaggat

SEQ ID NO: 143779 - DNA, 15 bp, Homo sapiens
aagttcatgaggatg

SEQ ID NO: 143780 - DNA, 15 bp, Homo sapiens
agttcatgaggatgg

SEQ ID NO: 143781 - DNA, 15 bp, Homo sapiens
gttcatgaggatgga

SEQ ID NO: 143782 - DNA, 15 bp, Homo sapiens
ttcatgaggatggaa

SEQ ID NO: 143783 - DNA, 15 bp, Homo sapiens
tcatgaggatggaaa

SEQ ID NO: 143784 - DNA, 15 bp, Homo sapiens
catgaggatggaaag

SEQ ID NO: 143785 - DNA, 15 bp, Homo sapiens
atgaggatggaaaga

SEQ ID NO: 143786 - DNA, 15 bp, Homo sapiens
tgaggatggaaagaa

SEQ ID NO: 143787 - DNA, 15 bp, Homo sapiens
gaggatggaaagaat

SEQ ID NO: 143788 - DNA, 15 bp, Homo sapiens
aggatggaaagaata

SEQ ID NO: 143789 - DNA, 15 bp, Homo sapiens
ggatggaaagaatat

SEQ ID NO: 143790 - DNA, 15 bp, Homo sapiens
gatggaaagaatata

SEQ ID NO: 143791 - DNA, 15 bp, Homo sapiens
atggaaagaatataa

SEQ ID NO: 143792 - DNA, 15 bp, Homo sapiens
tggaaagaatataat

SEQ ID NO: 143793 - DNA, 15 bp, Homo sapiens
ggaaagaatataatg

SEQ ID NO: 143794 - DNA, 15 bp, Homo sapiens
gaaagaatataatga

SEQ ID NO: 143795 - DNA, 15 bp, Homo sapiens
aaagaatataatgaa

SEQ ID NO: 143796 - DNA, 15 bp, Homo sapiens
aagaatataatgaag

SEQ ID NO: 143797 - DNA, 15 bp, Homo sapiens
agaatataatgaagc

SEQ ID NO: 143798 - DNA, 15 bp, Homo sapiens
gaatataatgaagcc

SEQ ID NO: 143799 - DNA, 15 bp, Homo sapiens
aatataatgaagcca

SEQ ID NO: 143800 - DNA, 15 bp, Homo sapiens
atataatgaagccat

SEQ ID NO: 143801 - DNA, 15 bp, Homo sapiens
tataatgaagccatc

SEQ ID NO: 143802 - DNA, 15 bp, Homo sapiens
ataatgaagccatct

SEQ ID NO: 143803 - DNA, 15 bp, Homo sapiens
taatgaagccatctc

SEQ ID NO: 143804 - DNA, 15 bp, Homo sapiens
aatgaagccatctct

SEQ ID NO: 143805 - DNA, 15 bp, Homo sapiens
atgaagccatctctt

SEQ ID NO: 143806 - DNA, 15 bp, Homo sapiens
tgaagccatctctta

SEQ ID NO: 143807 - DNA, 15 bp, Homo sapiens
gaagccatctcttag

SEQ ID NO: 143808 - DNA, 15 bp, Homo sapiens
aagccatctcttaga

SEQ ID NO: 143809 - DNA, 15 bp, Homo sapiens
agccatctcttagac

SEQ ID NO: 143810 - DNA, 15 bp, Homo sapiens
gccatctcttagacc

SEQ ID NO: 143811 - DNA, 15 bp, Homo sapiens
ccatctcttagaccc

SEQ ID NO: 143812 - DNA, 15 bp, Homo sapiens
catctcttagaccca

SEQ ID NO: 143813 - DNA, 15 bp, Homo sapiens
atctcttagacccag

SEQ ID NO: 143814 - DNA, 15 bp, Homo sapiens
tctcttagacccaga

SEQ ID NO: 143815 - DNA, 15 bp, Homo sapiens
ctcttagacccagaa

SEQ ID NO: 143816 - DNA, 15 bp, Homo sapiens
tcttagacccagaaa

SEQ ID NO: 143817 - DNA, 15 bp, Homo sapiens
cttagacccagaaag

SEQ ID NO: 143818 - DNA, 15 bp, Homo sapiens
ttagacccagaaaga

SEQ ID NO: 143819 - DNA, 15 bp, Homo sapiens
tagacccagaaagaa

SEQ ID NO: 143820 - DNA, 15 bp, Homo sapiens
agacccagaaagaat

SEQ ID NO: 143821 - DNA, 15 bp, Homo sapiens
gacccagaaagaatg

SEQ ID NO: 143822 - DNA, 15 bp, Homo sapiens
acccagaaagaatgg

SEQ ID NO: 143823 - DNA, 15 bp, Homo sapiens
cccagaaagaatggg

SEQ ID NO: 143824 - DNA, 15 bp, Homo sapiens
ccagaaagaatgggg

SEQ ID NO: 143825 - DNA, 15 bp, Homo sapiens
cagaaagaatggggc

SEQ ID NO: 143826 - DNA, 15 bp, Homo sapiens
agaaagaatggggca

SEQ ID NO: 143827 - DNA, 15 bp, Homo sapiens
gaaagaatggggcac

SEQ ID NO: 143828 - DNA, 15 bp, Homo sapiens
aaagaatggggcaca

SEQ ID NO: 143829 - DNA, 15 bp, Homo sapiens
aagaatggggcacaa

SEQ ID NO: 143830 - DNA, 15 bp, Homo sapiens
agaatggggcacaac

SEQ ID NO: 143831 - DNA, 15 bp, Homo sapiens
gaatggggcacaaca

SEQ ID NO: 143832 - DNA, 15 bp, Homo sapiens
aatggggcacaacag

SEQ ID NO: 143833 - DNA, 15 bp, Homo sapiens
atggggcacaacagc

SEQ ID NO: 143834 - DNA, 15 bp, Homo sapiens
tggggcacaacagcc

SEQ ID NO: 143835 - DNA, 15 bp, Homo sapiens
ggggcacaacagcct

SEQ ID NO: 143836 - DNA, 15 bp, Homo sapiens
gggcacaacagcctt

SEQ ID NO: 143837 - DNA, 15 bp, Homo sapiens
ggcacaacagccttt

SEQ ID NO: 143838 - DNA, 15 bp, Homo sapiens
gcacaacagccttta

SEQ ID NO: 143839 - DNA, 15 bp, Homo sapiens
cacaacagcctttat

SEQ ID NO: 143840 - DNA, 15 bp, Homo sapiens
acaacagcctttatc

SEQ ID NO: 143841 - DNA, 15 bp, Homo sapiens
caacagcctttatct

SEQ ID NO: 143842 - DNA, 15 bp, Homo sapiens
aacagcctttatctt

SEQ ID NO: 143843 - DNA, 15 bp, Homo sapiens
acagcctttatcttt

SEQ ID NO: 143844 - DNA, 15 bp, Homo sapiens
cagcctttatctttc

SEQ ID NO: 143845 - DNA, 15 bp, Homo sapiens
agcctttatctttct

SEQ ID NO: 143846 - DNA, 15 bp, Homo sapiens
gcctttatctttctg

SEQ ID NO: 143847 - DNA, 15 bp, Homo sapiens
cctttatctttctgg

SEQ ID NO: 143848 - DNA, 15 bp, Homo sapiens
ctttatctttctggg

SEQ ID NO: 143849 - DNA, 15 bp, Homo sapiens
tttatctttctgggg

SEQ ID NO: 143850 - DNA, 15 bp, Homo sapiens
ttatctttctggggc

SEQ ID NO: 143851 - DNA, 15 bp, Homo sapiens
tatctttctggggcc

SEQ ID NO: 143852 - DNA, 15 bp, Homo sapiens
atctttctggggcca

SEQ ID NO: 143853 - DNA, 15 bp, Homo sapiens
tctttctggggccaa

SEQ ID NO: 143854 - DNA, 15 bp, Homo sapiens
ctttctggggccaat

SEQ ID NO: 143855 - DNA, 15 bp, Homo sapiens
tttctggggccaatg

SEQ ID NO: 143856 - DNA, 15 bp, Homo sapiens
ttctggggccaatgt

SEQ ID NO: 143857 - DNA, 15 bp, Homo sapiens
tctggggccaatgtc

SEQ ID NO: 143858 - DNA, 15 bp, Homo sapiens
ctggggccaatgtca

SEQ ID NO: 143859 - DNA, 15 bp, Homo sapiens
tggggccaatgtcac

SEQ ID NO: 143860 - DNA, 15 bp, Homo sapiens
ggggccaatgtcaca

SEQ ID NO: 143861 - DNA, 15 bp, Homo sapiens
gggccaatgtcacag

SEQ ID NO: 143862 - DNA, 15 bp, Homo sapiens
ggccaatgtcacaga

SEQ ID NO: 143863 - DNA, 15 bp, Homo sapiens
gccaatgtcacagaa

SEQ ID NO: 143864 - DNA, 15 bp, Homo sapiens
ccaatgtcacagaat

SEQ ID NO: 143865 - DNA, 15 bp, Homo sapiens
caatgtcacagaatg

SEQ ID NO: 143866 - DNA, 15 bp, Homo sapiens
aatgtcacagaatgc

SEQ ID NO: 143867 - DNA, 15 bp, Homo sapiens
atgtcacagaatgcc

SEQ ID NO: 143868 - DNA, 15 bp, Homo sapiens
tgtcacagaatgcca

SEQ ID NO: 143869 - DNA, 15 bp, Homo sapiens
gtcacagaatgccat

SEQ ID NO: 143870 - DNA, 15 bp, Homo sapiens
tcacagaatgccatg

SEQ ID NO: 143871 - DNA, 15 bp, Homo sapiens
cacagaatgccatgc

SEQ ID NO: 143872 - DNA, 15 bp, Homo sapiens
acagaatgccatgct

SEQ ID NO: 143873 - DNA, 15 bp, Homo sapiens
cagaatgccatgctt

SEQ ID NO: 143874 - DNA, 15 bp, Homo sapiens
agaatgccatgcttt

SEQ ID NO: 143875 - DNA, 15 bp, Homo sapiens
gaatgccatgctttt

SEQ ID NO: 143876 - DNA, 15 bp, Homo sapiens
aatgccatgctttta

SEQ ID NO: 143877 - DNA, 15 bp, Homo sapiens
atgccatgcttttag

SEQ ID NO: 143878 - DNA, 15 bp, Homo sapiens
tgccatgcttttagg

SEQ ID NO: 143879 - DNA, 15 bp, Homo sapiens
gccatgcttttagga

SEQ ID NO: 143880 - DNA, 15 bp, Homo sapiens
ccatgcttttaggaa

SEQ ID NO: 143881 - DNA, 15 bp, Homo sapiens
catgcttttaggaaa

SEQ ID NO: 143882 - DNA, 15 bp, Homo sapiens
atgcttttaggaaac

SEQ ID NO: 143883 - DNA, 15 bp, Homo sapiens
tgcttttaggaaaca

SEQ ID NO: 143884 - DNA, 15 bp, Homo sapiens
gcttttaggaaacat

SEQ ID NO: 143885 - DNA, 15 bp, Homo sapiens
cttttaggaaacatg

SEQ ID NO: 143886 - DNA, 15 bp, Homo sapiens
ttttaggaaacatgg

SEQ ID NO: 143887 - DNA, 15 bp, Homo sapiens
tttaggaaacatggt

SEQ ID NO: 143888 - DNA, 15 bp, Homo sapiens
ttaggaaacatggta

SEQ ID NO: 143889 - DNA, 15 bp, Homo sapiens
taggaaacatggtat

SEQ ID NO: 143890 - DNA, 15 bp, Homo sapiens
aggaaacatggtatg

SEQ ID NO: 143891 - DNA, 15 bp, Homo sapiens
ggaaacatggtatgt

SEQ ID NO: 143892 - DNA, 15 bp, Homo sapiens
gaaacatggtatgtt

SEQ ID NO: 143893 - DNA, 15 bp, Homo sapiens
aaacatggtatgttg

SEQ ID NO: 143894 - DNA, 15 bp, Homo sapiens
aacatggtatgttgt

SEQ ID NO: 143895 - DNA, 15 bp, Homo sapiens
acatggtatgttgtg

SEQ ID NO: 143896 - DNA, 15 bp, Homo sapiens
catggtatgttgtga

SEQ ID NO: 143897 - DNA, 15 bp, Homo sapiens
atggtatgttgtgat

SEQ ID NO: 143898 - DNA, 15 bp, Homo sapiens
tggtatgttgtgatt

SEQ ID NO: 143899 - DNA, 15 bp, Homo sapiens
ggtatgttgtgatta

SEQ ID NO: 143900 - DNA, 15 bp, Homo sapiens
gtatgttgtgattaa

SEQ ID NO: 143901 - DNA, 15 bp, Homo sapiens
tatgttgtgattaac

SEQ ID NO: 143902 - DNA, 15 bp, Homo sapiens
atgttgtgattaaca

SEQ ID NO: 143903 - DNA, 15 bp, Homo sapiens
tgttgtgattaacac

SEQ ID NO: 143904 - DNA, 15 bp, Homo sapiens
gttgtgattaacaca

SEQ ID NO: 143905 - DNA, 15 bp, Homo sapiens
ttgtgattaacacat

SEQ ID NO: 143906 - DNA, 15 bp, Homo sapiens
tgtgattaacacatt

SEQ ID NO: 143907 - DNA, 15 bp, Homo sapiens
gtgattaacacattt

SEQ ID NO: 143908 - DNA, 15 bp, Homo sapiens
tgattaacacatttt

SEQ ID NO: 143909 - DNA, 15 bp, Homo sapiens
gattaacacattttg

SEQ ID NO: 143910 - DNA, 15 bp, Homo sapiens
attaacacattttgc

SEQ ID NO: 143911 - DNA, 15 bp, Homo sapiens
ttaacacattttgca

SEQ ID NO: 143912 - DNA, 15 bp, Homo sapiens
taacacattttgcag

SEQ ID NO: 143913 - DNA, 15 bp, Homo sapiens
aacacattttgcaga

SEQ ID NO: 143914 - DNA, 15 bp, Homo sapiens
acacattttgcagaa

SEQ ID NO: 143915 - DNA, 15 bp, Homo sapiens
cacattttgcagaag

SEQ ID NO: 143916 - DNA, 15 bp, Homo sapiens
acattttgcagaagt

SEQ ID NO: 143917 - DNA, 15 bp, Homo sapiens
cattttgcagaagtg

SEQ ID NO: 143918 - DNA, 15 bp, Homo sapiens
attttgcagaagtgg

SEQ ID NO: 143919 - DNA, 15 bp, Homo sapiens
ttttgcagaagtggg

SEQ ID NO: 143920 - DNA, 15 bp, Homo sapiens
tttgcagaagtgggt

SEQ ID NO: 143921 - DNA, 15 bp, Homo sapiens
ttgcagaagtgggtg

SEQ ID NO: 143922 - DNA, 15 bp, Homo sapiens
tgcagaagtgggtgg

SEQ ID NO: 143923 - DNA, 15 bp, Homo sapiens
gcagaagtgggtggg

SEQ ID NO: 143924 - DNA, 15 bp, Homo sapiens
cagaagtgggtggga

SEQ ID NO: 143925 - DNA, 15 bp, Homo sapiens
agaagtgggtgggag

SEQ ID NO: 143926 - DNA, 15 bp, Homo sapiens
gaagtgggtgggagc

SEQ ID NO: 143927 - DNA, 15 bp, Homo sapiens
aagtgggtgggagct

SEQ ID NO: 143928 - DNA, 15 bp, Homo sapiens
agtgggtgggagctt

SEQ ID NO: 143929 - DNA, 15 bp, Homo sapiens
gtgggtgggagcttt

SEQ ID NO: 143930 - DNA, 15 bp, Homo sapiens
tgggtgggagctttt

SEQ ID NO: 143931 - DNA, 15 bp, Homo sapiens
gggtgggagcttttg

SEQ ID NO: 143932 - DNA, 15 bp, Homo sapiens
ggtgggagcttttga

SEQ ID NO: 143933 - DNA, 15 bp, Homo sapiens
gtgggagcttttgaa

SEQ ID NO: 143934 - DNA, 15 bp, Homo sapiens
tgggagcttttgaat

SEQ ID NO: 143935 - DNA, 15 bp, Homo sapiens
gggagcttttgaata

SEQ ID NO: 143936 - DNA, 15 bp, Homo sapiens
ggagcttttgaataa

SEQ ID NO: 143937 - DNA, 15 bp, Homo sapiens
gagcttttgaataat

SEQ ID NO: 143938 - DNA, 15 bp, Homo sapiens
agcttttgaataata

SEQ ID NO: 143939 - DNA, 15 bp, Homo sapiens
gcttttgaataataa

SEQ ID NO: 143940 - DNA, 15 bp, Homo sapiens
cttttgaataataac

SEQ ID NO: 143941 - DNA, 15 bp, Homo sapiens
ttttgaataataaca

SEQ ID NO: 143942 - DNA, 15 bp, Homo sapiens
tttgaataataacag

SEQ ID NO: 143943 - DNA, 15 bp, Homo sapiens
ttgaataataacagt

SEQ ID NO: 143944 - DNA, 15 bp, Homo sapiens
tgaataataacagta

SEQ ID NO: 143945 - DNA, 15 bp, Homo sapiens
gaataataacagtaa

SEQ ID NO: 143946 - DNA, 15 bp, Homo sapiens
aataataacagtaag

SEQ ID NO: 143947 - DNA, 15 bp, Homo sapiens
ataataacagtaagc

SEQ ID NO: 143948 - DNA, 15 bp, Homo sapiens
taataacagtaagca

SEQ ID NO: 143949 - DNA, 15 bp, Homo sapiens
aataacagtaagcat

SEQ ID NO: 143950 - DNA, 15 bp, Homo sapiens
ataacagtaagcatt

SEQ ID NO: 143951 - DNA, 15 bp, Homo sapiens
taacagtaagcattt

SEQ ID NO: 143952 - DNA, 15 bp, Homo sapiens
aacagtaagcatttg

SEQ ID NO: 143953 - DNA, 15 bp, Homo sapiens
acagtaagcatttgt

SEQ ID NO: 143954 - DNA, 15 bp, Homo sapiens
cagtaagcatttgtg

SEQ ID NO: 143955 - DNA, 15 bp, Homo sapiens
agtaagcatttgtgc

SEQ ID NO: 143956 - DNA, 15 bp, Homo sapiens
gtaagcatttgtgca

SEQ ID NO: 143957 - DNA, 15 bp, Homo sapiens
taagcatttgtgcat

SEQ ID NO: 143958 - DNA, 15 bp, Homo sapiens
aagcatttgtgcatt

SEQ ID NO: 143959 - DNA, 15 bp, Homo sapiens
agcatttgtgcattc

SEQ ID NO: 143960 - DNA, 15 bp, Homo sapiens
gcatttgtgcattct

SEQ ID NO: 143961 - DNA, 15 bp, Homo sapiens
catttgtgcattctt

SEQ ID NO: 143962 - DNA, 15 bp, Homo sapiens
atttgtgcattcttc

SEQ ID NO: 143963 - DNA, 15 bp, Homo sapiens
tttgtgcattcttcc

SEQ ID NO: 143964 - DNA, 15 bp, Homo sapiens
ttgtgcattcttcct

SEQ ID NO: 143965 - DNA, 15 bp, Homo sapiens
tgtgcattcttcctg

SEQ ID NO: 143966 - DNA, 15 bp, Homo sapiens
gtgcattcttcctgt

SEQ ID NO: 143967 - DNA, 15 bp, Homo sapiens
tgcattcttcctgta

SEQ ID NO: 143968 - DNA, 15 bp, Homo sapiens
gcattcttcctgtaa

SEQ ID NO: 143969 - DNA, 15 bp, Homo sapiens
cattcttcctgtaat

SEQ ID NO: 143970 - DNA, 15 bp, Homo sapiens
attcttcctgtaatg

SEQ ID NO: 143971 - DNA, 15 bp, Homo sapiens
ttcttcctgtaatga

SEQ ID NO: 143972 - DNA, 15 bp, Homo sapiens
tcttcctgtaatgac

SEQ ID NO: 143973 - DNA, 15 bp, Homo sapiens
cttcctgtaatgaca

SEQ ID NO: 143974 - DNA, 15 bp, Homo sapiens
ttcctgtaatgacat

SEQ ID NO: 143975 - DNA, 15 bp, Homo sapiens
tcctgtaatgacatt

SEQ ID NO: 143976 - DNA, 15 bp, Homo sapiens
cctgtaatgacatta

SEQ ID NO: 143977 - DNA, 15 bp, Homo sapiens
ctgtaatgacattac

SEQ ID NO: 143978 - DNA, 15 bp, Homo sapiens
tgtaatgacattaca

SEQ ID NO: 143979 - DNA, 15 bp, Homo sapiens
gtaatgacattacag

SEQ ID NO: 143980 - DNA, 15 bp, Homo sapiens
taatgacattacagt

SEQ ID NO: 143981 - DNA, 15 bp, Homo sapiens
aatgacattacagtt

SEQ ID NO: 143982 - DNA, 15 bp, Homo sapiens
atgacattacagtta

SEQ ID NO: 143983 - DNA, 15 bp, Homo sapiens
tgacattacagttat

SEQ ID NO: 143984 - DNA, 15 bp, Homo sapiens
gacattacagttatg

SEQ ID NO: 143985 - DNA, 15 bp, Homo sapiens
acattacagttatga

SEQ ID NO: 143986 - DNA, 15 bp, Homo sapiens
cattacagttatgat

SEQ ID NO: 143987 - DNA, 15 bp, Homo sapiens
attacagttatgatc

SEQ ID NO: 143988 - DNA, 15 bp, Homo sapiens
ttacagttatgatct

SEQ ID NO: 143989 - DNA, 15 bp, Homo sapiens
tacagttatgatctg

SEQ ID NO: 143990 - DNA, 15 bp, Homo sapiens
acagttatgatctga

SEQ ID NO: 143991 - DNA, 15 bp, Homo sapiens
cagttatgatctgaa

SEQ ID NO: 143992 - DNA, 15 bp, Homo sapiens
agttatgatctgaaa

SEQ ID NO: 143993 - DNA, 15 bp, Homo sapiens
gttatgatctgaaaa

SEQ ID NO: 143994 - DNA, 15 bp, Homo sapiens
ttatgatctgaaaat

SEQ ID NO: 143995 - DNA, 15 bp, Homo sapiens
tatgatctgaaaata

SEQ ID NO: 143996 - DNA, 15 bp, Homo sapiens
atgatctgaaaatat

SEQ ID NO: 143997 - DNA, 15 bp, Homo sapiens
tgatctgaaaatatt

SEQ ID NO: 143998 - DNA, 15 bp, Homo sapiens
gatctgaaaatattg

SEQ ID NO: 143999 - DNA, 15 bp, Homo sapiens
atctgaaaatattga

SEQ ID NO: 144000 - DNA, 15 bp, Homo sapiens
tctgaaaatattgag

SEQ ID NO: 144001 - DNA, 15 bp, Homo sapiens
ctgaaaatattgagt

SEQ ID NO: 144002 - DNA, 15 bp, Homo sapiens
tgaaaatattgagtc

SEQ ID NO: 144003 - DNA, 15 bp, Homo sapiens
gaaaatattgagtca

SEQ ID NO: 144004 - DNA, 15 bp, Homo sapiens
aaaatattgagtcat

SEQ ID NO: 144005 - DNA, 15 bp, Homo sapiens
aaatattgagtcata

SEQ ID NO: 144006 - DNA, 15 bp, Homo sapiens
aatattgagtcatac

SEQ ID NO: 144007 - DNA, 15 bp, Homo sapiens
atattgagtcataca

SEQ ID NO: 144008 - DNA, 15 bp, Homo sapiens
tattgagtcatacat

SEQ ID NO: 144009 - DNA, 15 bp, Homo sapiens
attgagtcatacatg

SEQ ID NO: 144010 - DNA, 15 bp, Homo sapiens
ttgagtcatacatga

SEQ ID NO: 144011 - DNA, 15 bp, Homo sapiens
tgagtcatacatgaa

SEQ ID NO: 144012 - DNA, 15 bp, Homo sapiens
gagtcatacatgaat

SEQ ID NO: 144013 - DNA, 15 bp, Homo sapiens
agtcatacatgaatt

SEQ ID NO: 144014 - DNA, 15 bp, Homo sapiens
gtcatacatgaattc

SEQ ID NO: 144015 - DNA, 15 bp, Homo sapiens
tcatacatgaattcc

SEQ ID NO: 144016 - DNA, 15 bp, Homo sapiens
catacatgaattcct

SEQ ID NO: 144017 - DNA, 15 bp, Homo sapiens
atacatgaattcctg

SEQ ID NO: 144018 - DNA, 15 bp, Homo sapiens
tacatgaattcctgt

SEQ ID NO: 144019 - DNA, 15 bp, Homo sapiens
acatgaattcctgtt

SEQ ID NO: 144020 - DNA, 15 bp, Homo sapiens
catgaattcctgtta

SEQ ID NO: 144021 - DNA, 15 bp, Homo sapiens
atgaattcctgttat

SEQ ID NO: 144022 - DNA, 15 bp, Homo sapiens
tgaattcctgttatc

SEQ ID NO: 144023 - DNA, 15 bp, Homo sapiens
gaattcctgttatct

SEQ ID NO: 144024 - DNA, 15 bp, Homo sapiens
aattcctgttatctt

SEQ ID NO: 144025 - DNA, 15 bp, Homo sapiens
attcctgttatctta

SEQ ID NO: 144026 - DNA, 15 bp, Homo sapiens
ttcctgttatcttaa

SEQ ID NO: 144027 - DNA, 15 bp, Homo sapiens
tcctgttatcttaac

SEQ ID NO: 144028 - DNA, 15 bp, Homo sapiens
cctgttatcttaact

SEQ ID NO: 144029 - DNA, 15 bp, Homo sapiens
ctgttatcttaactc

SEQ ID NO: 144030 - DNA, 15 bp, Homo sapiens
tgttatcttaactca

SEQ ID NO: 144031 - DNA, 15 bp, Homo sapiens
gttatcttaactcag

SEQ ID NO: 144032 - DNA, 15 bp, Homo sapiens
ttatcttaactcaga

SEQ ID NO: 144033 - DNA, 15 bp, Homo sapiens
tatcttaactcagaa

SEQ ID NO: 144034 - DNA, 15 bp, Homo sapiens
atcttaactcagaaa

SEQ ID NO: 144035 - DNA, 15 bp, Homo sapiens
tcttaactcagaaaa

SEQ ID NO: 144036 - DNA, 15 bp, Homo sapiens
cttaactcagaaaat

SEQ ID NO: 144037 - DNA, 15 bp, Homo sapiens
ttaactcagaaaata

SEQ ID NO: 144038 - DNA, 15 bp, Homo sapiens
taactcagaaaatat

SEQ ID NO: 144039 - DNA, 15 bp, Homo sapiens
aactcagaaaatata

SEQ ID NO: 144040 - DNA, 15 bp, Homo sapiens
actcagaaaatatag

SEQ ID NO: 144041 - DNA, 15 bp, Homo sapiens
ctcagaaaatatagt

SEQ ID NO: 144042 - DNA, 15 bp, Homo sapiens
tcagaaaatatagtc

SEQ ID NO: 144043 - DNA, 15 bp, Homo sapiens
cagaaaatatagtcc

SEQ ID NO: 144044 - DNA, 15 bp, Homo sapiens
agaaaatatagtccc

SEQ ID NO: 144045 - DNA, 15 bp, Homo sapiens
gaaaatatagtccct

SEQ ID NO: 144046 - DNA, 15 bp, Homo sapiens
aaaatatagtccctc

SEQ ID NO: 144047 - DNA, 15 bp, Homo sapiens
aaatatagtccctca

SEQ ID NO: 144048 - DNA, 15 bp, Homo sapiens
aatatagtccctcac

SEQ ID NO: 144049 - DNA, 15 bp, Homo sapiens
atatagtccctcact

SEQ ID NO: 144050 - DNA, 15 bp, Homo sapiens
tatagtccctcacta

SEQ ID NO: 144051 - DNA, 15 bp, Homo sapiens
atagtccctcactaa

SEQ ID NO: 144052 - DNA, 15 bp, Homo sapiens
tagtccctcactaaa

SEQ ID NO: 144053 - DNA, 15 bp, Homo sapiens
agtccctcactaaag

SEQ ID NO: 144054 - DNA, 15 bp, Homo sapiens
gtccctcactaaagg

SEQ ID NO: 144055 - DNA, 15 bp, Homo sapiens
tccctcactaaaggt

SEQ ID NO: 144056 - DNA, 15 bp, Homo sapiens
ccctcactaaaggtt

SEQ ID NO: 144057 - DNA, 15 bp, Homo sapiens
cctcactaaaggttt

SEQ ID NO: 144058 - DNA, 15 bp, Homo sapiens
ctcactaaaggtttt

SEQ ID NO: 144059 - DNA, 15 bp, Homo sapiens
tcactaaaggtttta

SEQ ID NO: 144060 - DNA, 15 bp, Homo sapiens
cactaaaggttttat

SEQ ID NO: 144061 - DNA, 15 bp, Homo sapiens
actaaaggttttatt

SEQ ID NO: 144062 - DNA, 15 bp, Homo sapiens
ctaaaggttttattt

SEQ ID NO: 144063 - DNA, 15 bp, Homo sapiens
taaaggttttatttt

SEQ ID NO: 144064 - DNA, 15 bp, Homo sapiens
aaaggttttattttc

SEQ ID NO: 144065 - DNA, 15 bp, Homo sapiens
aaggttttattttcc

SEQ ID NO: 144066 - DNA, 15 bp, Homo sapiens
aggttttattttcct

SEQ ID NO: 144067 - DNA, 15 bp, Homo sapiens
ggttttattttcctt

SEQ ID NO: 144068 - DNA, 15 bp, Homo sapiens
gttttattttccttc

SEQ ID NO: 144069 - DNA, 15 bp, Homo sapiens
ttttattttccttct

SEQ ID NO: 144070 - DNA, 15 bp, Homo sapiens
tttattttccttctt

SEQ ID NO: 144071 - DNA, 15 bp, Homo sapiens
ttattttccttcttt

SEQ ID NO: 144072 - DNA, 15 bp, Homo sapiens
tattttccttctttt

SEQ ID NO: 144073 - DNA, 15 bp, Homo sapiens
attttccttcttttt

SEQ ID NO: 144074 - DNA, 15 bp, Homo sapiens
ttttccttctttttc

SEQ ID NO: 144075 - DNA, 15 bp, Homo sapiens
tttccttctttttcc

SEQ ID NO: 144076 - DNA, 15 bp, Homo sapiens
ttccttctttttccc

SEQ ID NO: 144077 - DNA, 15 bp, Homo sapiens
tccttctttttccca

SEQ ID NO: 144078 - DNA, 15 bp, Homo sapiens
ccttctttttcccat

SEQ ID NO: 144079 - DNA, 15 bp, Homo sapiens
cttctttttcccatt

SEQ ID NO: 144080 - DNA, 15 bp, Homo sapiens
ttctttttcccattt

SEQ ID NO: 144081 - DNA, 15 bp, Homo sapiens
tctttttcccatttc

SEQ ID NO: 144082 - DNA, 15 bp, Homo sapiens
ctttttcccatttcc

SEQ ID NO: 144083 - DNA, 15 bp, Homo sapiens
tttttcccatttcct

SEQ ID NO: 144084 - DNA, 15 bp, Homo sapiens
ttttcccatttcctt

SEQ ID NO: 144085 - DNA, 15 bp, Homo sapiens
tttcccatttccttt

SEQ ID NO: 144086 - DNA, 15 bp, Homo sapiens
ttcccatttccttta

SEQ ID NO: 144087 - DNA, 15 bp, Homo sapiens
tcccatttcctttac

SEQ ID NO: 144088 - DNA, 15 bp, Homo sapiens
cccatttcctttact

SEQ ID NO: 144089 - DNA, 15 bp, Homo sapiens
ccatttcctttactt

SEQ ID NO: 144090 - DNA, 15 bp, Homo sapiens
catttcctttacttc

SEQ ID NO: 144091 - DNA, 15 bp, Homo sapiens
atttcctttacttcg

SEQ ID NO: 144092 - DNA, 15 bp, Homo sapiens
tttcctttacttcgt

SEQ ID NO: 144093 - DNA, 15 bp, Homo sapiens
ttcctttacttcgta

SEQ ID NO: 144094 - DNA, 15 bp, Homo sapiens
tcctttacttcgtat

SEQ ID NO: 144095 - DNA, 15 bp, Homo sapiens
cctttacttcgtata

SEQ ID NO: 144096 - DNA, 15 bp, Homo sapiens
ctttacttcgtataa

SEQ ID NO: 144097 - DNA, 15 bp, Homo sapiens
tttacttcgtataag

SEQ ID NO: 144098 - DNA, 15 bp, Homo sapiens
ttacttcgtataaga

SEQ ID NO: 144099 - DNA, 15 bp, Homo sapiens
tacttcgtataagaa

SEQ ID NO: 144100 - DNA, 15 bp, Homo sapiens
acttcgtataagaaa

SEQ ID NO: 144101 - DNA, 15 bp, Homo sapiens
cttcgtataagaaag

SEQ ID NO: 144102 - DNA, 15 bp, Homo sapiens
ttcgtataagaaagt

SEQ ID NO: 144103 - DNA, 15 bp, Homo sapiens
tcgtataagaaagtc

SEQ ID NO: 144104 - DNA, 15 bp, Homo sapiens
cgtataagaaagtca

SEQ ID NO: 144105 - DNA, 15 bp, Homo sapiens
gtataagaaagtcac

SEQ ID NO: 144106 - DNA, 15 bp, Homo sapiens
tataagaaagtcact

SEQ ID NO: 144107 - DNA, 15 bp, Homo sapiens
ataagaaagtcactt

SEQ ID NO: 144108 - DNA, 15 bp, Homo sapiens
taagaaagtcacttg

SEQ ID NO: 144109 - DNA, 15 bp, Homo sapiens
aagaaagtcacttgt

SEQ ID NO: 144110 - DNA, 15 bp, Homo sapiens
agaaagtcacttgtc

SEQ ID NO: 144111 - DNA, 15 bp, Homo sapiens
gaaagtcacttgtct

SEQ ID NO: 144112 - DNA, 15 bp, Homo sapiens
aaagtcacttgtctc

SEQ ID NO: 144113 - DNA, 15 bp, Homo sapiens
aagtcacttgtctcc

SEQ ID NO: 144114 - DNA, 15 bp, Homo sapiens
agtcacttgtctcct

SEQ ID NO: 144115 - DNA, 15 bp, Homo sapiens
gtcacttgtctcctg

SEQ ID NO: 144116 - DNA, 15 bp, Homo sapiens
tcacttgtctcctgg

SEQ ID NO: 144117 - DNA, 15 bp, Homo sapiens
cacttgtctcctggg

SEQ ID NO: 144118 - DNA, 15 bp, Homo sapiens
acttgtctcctgggt

SEQ ID NO: 144119 - DNA, 15 bp, Homo sapiens
cttgtctcctgggtg

SEQ ID NO: 144120 - DNA, 15 bp, Homo sapiens
ttgtctcctgggtgc

SEQ ID NO: 144121 - DNA, 15 bp, Homo sapiens
tgtctcctgggtgca

SEQ ID NO: 144122 - DNA, 15 bp, Homo sapiens
gtctcctgggtgcaa

SEQ ID NO: 144123 - DNA, 15 bp, Homo sapiens
tctcctgggtgcaat

SEQ ID NO: 144124 - DNA, 15 bp, Homo sapiens
ctcctgggtgcaatg

SEQ ID NO: 144125 - DNA, 15 bp, Homo sapiens
tcctgggtgcaatgg

SEQ ID NO: 144126 - DNA, 15 bp, Homo sapiens
cctgggtgcaatgga

SEQ ID NO: 144127 - DNA, 15 bp, Homo sapiens
ctgggtgcaatggag

SEQ ID NO: 144128 - DNA, 15 bp, Homo sapiens
tgggtgcaatggaga

SEQ ID NO: 144129 - DNA, 15 bp, Homo sapiens
gggtgcaatggagac

SEQ ID NO: 144130 - DNA, 15 bp, Homo sapiens
ggtgcaatggagacc

SEQ ID NO: 144131 - DNA, 15 bp, Homo sapiens
gtgcaatggagacct

SEQ ID NO: 144132 - DNA, 15 bp, Homo sapiens
tgcaatggagaccta

SEQ ID NO: 144133 - DNA, 15 bp, Homo sapiens
gcaatggagacctat

SEQ ID NO: 144134 - DNA, 15 bp, Homo sapiens
caatggagacctatg

SEQ ID NO: 144135 - DNA, 15 bp, Homo sapiens
aatggagacctatgt

SEQ ID NO: 144136 - DNA, 15 bp, Homo sapiens
atggagacctatgtg

SEQ ID NO: 144137 - DNA, 15 bp, Homo sapiens
tggagacctatgtga

SEQ ID NO: 144138 - DNA, 15 bp, Homo sapiens
ggagacctatgtgag

SEQ ID NO: 144139 - DNA, 15 bp, Homo sapiens
gagacctatgtgagt

SEQ ID NO: 144140 - DNA, 15 bp, Homo sapiens
agacctatgtgagtt

SEQ ID NO: 144141 - DNA, 15 bp, Homo sapiens
gacctatgtgagttc

SEQ ID NO: 144142 - DNA, 15 bp, Homo sapiens
acctatgtgagttca

SEQ ID NO: 144143 - DNA, 15 bp, Homo sapiens
cctatgtgagttcat

SEQ ID NO: 144144 - DNA, 15 bp, Homo sapiens
ctatgtgagttcata

SEQ ID NO: 144145 - DNA, 15 bp, Homo sapiens
tatgtgagttcatag

SEQ ID NO: 144146 - DNA, 15 bp, Homo sapiens
atgtgagttcatagc

SEQ ID NO: 144147 - DNA, 15 bp, Homo sapiens
tgtgagttcatagcc

SEQ ID NO: 144148 - DNA, 15 bp, Homo sapiens
gtgagttcatagcca

SEQ ID NO: 144149 - DNA, 15 bp, Homo sapiens
tgagttcatagccaa

SEQ ID NO: 144150 - DNA, 15 bp, Homo sapiens
gagttcatagccaag

SEQ ID NO: 144151 - DNA, 15 bp, Homo sapiens
agttcatagccaaga

SEQ ID NO: 144152 - DNA, 15 bp, Homo sapiens
gttcatagccaagag

SEQ ID NO: 144153 - DNA, 15 bp, Homo sapiens
ttcatagccaagaga

SEQ ID NO: 144154 - DNA, 15 bp, Homo sapiens
tcatagccaagagaa

SEQ ID NO: 144155 - DNA, 15 bp, Homo sapiens
catagccaagagaat

SEQ ID NO: 144156 - DNA, 15 bp, Homo sapiens
atagccaagagaatg

SEQ ID NO: 144157 - DNA, 15 bp, Homo sapiens
tagccaagagaatgt

SEQ ID NO: 144158 - DNA, 15 bp, Homo sapiens
agccaagagaatgtt

SEQ ID NO: 144159 - DNA, 15 bp, Homo sapiens
gccaagagaatgttt

SEQ ID NO: 144160 - DNA, 15 bp, Homo sapiens
ccaagagaatgtttt

SEQ ID NO: 144161 - DNA, 15 bp, Homo sapiens
caagagaatgttttt

SEQ ID NO: 144162 - DNA, 15 bp, Homo sapiens
aagagaatgtttttg

SEQ ID NO: 144163 - DNA, 15 bp, Homo sapiens
agagaatgtttttgg

SEQ ID NO: 144164 - DNA, 15 bp, Homo sapiens
gagaatgtttttggt

SEQ ID NO: 144165 - DNA, 15 bp, Homo sapiens
agaatgtttttggtt

SEQ ID NO: 144166 - DNA, 15 bp, Homo sapiens
gaatgtttttggtta

SEQ ID NO: 144167 - DNA, 15 bp, Homo sapiens
aatgtttttggttag

SEQ ID NO: 144168 - DNA, 15 bp, Homo sapiens
atgtttttggttaga

SEQ ID NO: 144169 - DNA, 15 bp, Homo sapiens
tgtttttggttagaa

SEQ ID NO: 144170 - DNA, 15 bp, Homo sapiens
gtttttggttagaaa

SEQ ID NO: 144171 - DNA, 15 bp, Homo sapiens
tttttggttagaaaa

SEQ ID NO: 144172 - DNA, 15 bp, Homo sapiens
ttttggttagaaaaa

SEQ ID NO: 144173 - DNA, 15 bp, Homo sapiens
tttggttagaaaaat

SEQ ID NO: 144174 - DNA, 15 bp, Homo sapiens
ttggttagaaaaata

SEQ ID NO: 144175 - DNA, 15 bp, Homo sapiens
tggttagaaaaataa

SEQ ID NO: 144176 - DNA, 15 bp, Homo sapiens
ggttagaaaaataat

SEQ ID NO: 144177 - DNA, 15 bp, Homo sapiens
gttagaaaaataata

SEQ ID NO: 144178 - DNA, 15 bp, Homo sapiens
ttagaaaaataatag

SEQ ID NO: 144179 - DNA, 15 bp, Homo sapiens
tagaaaaataatagt

SEQ ID NO: 144180 - DNA, 15 bp, Homo sapiens
agaaaaataatagta

SEQ ID NO: 144181 - DNA, 15 bp, Homo sapiens
gaaaaataatagtag

SEQ ID NO: 144182 - DNA, 15 bp, Homo sapiens
aaaaataatagtagg

SEQ ID NO: 144183 - DNA, 15 bp, Homo sapiens
aaaataatagtagga

SEQ ID NO: 144184 - DNA, 15 bp, Homo sapiens
aaataatagtaggaa

SEQ ID NO: 144185 - DNA, 15 bp, Homo sapiens
aataatagtaggaat

SEQ ID NO: 144186 - DNA, 15 bp, Homo sapiens
ataatagtaggaatt

SEQ ID NO: 144187 - DNA, 15 bp, Homo sapiens
taatagtaggaattc

SEQ ID NO: 144188 - DNA, 15 bp, Homo sapiens
aatagtaggaattcc

SEQ ID NO: 144189 - DNA, 15 bp, Homo sapiens
atagtaggaattcca

SEQ ID NO: 144190 - DNA, 15 bp, Homo sapiens
tagtaggaattccaa

SEQ ID NO: 144191 - DNA, 15 bp, Homo sapiens
agtaggaattccaag

SEQ ID NO: 144192 - DNA, 15 bp, Homo sapiens
gtaggaattccaagc

SEQ ID NO: 144193 - DNA, 15 bp, Homo sapiens
taggaattccaagct

SEQ ID NO: 144194 - DNA, 15 bp, Homo sapiens
aggaattccaagctg

SEQ ID NO: 144195 - DNA, 15 bp, Homo sapiens
ggaattccaagctgt

SEQ ID NO: 144196 - DNA, 15 bp, Homo sapiens
gaattccaagctgtg

SEQ ID NO: 144197 - DNA, 15 bp, Homo sapiens
aattccaagctgtga

SEQ ID NO: 144198 - DNA, 15 bp, Homo sapiens
attccaagctgtgaa

SEQ ID NO: 144199 - DNA, 15 bp, Homo sapiens
ttccaagctgtgaat

SEQ ID NO: 144200 - DNA, 15 bp, Homo sapiens
tccaagctgtgaatt

SEQ ID NO: 144201 - DNA, 15 bp, Homo sapiens
ccaagctgtgaattt

SEQ ID NO: 144202 - DNA, 15 bp, Homo sapiens
caagctgtgaatttt

SEQ ID NO: 144203 - DNA, 15 bp, Homo sapiens
aagctgtgaattttt

SEQ ID NO: 144204 - DNA, 15 bp, Homo sapiens
agctgtgaatttttt

SEQ ID NO: 144205 - DNA, 15 bp, Homo sapiens
gctgtgaatttttta

SEQ ID NO: 144206 - DNA, 15 bp, Homo sapiens
ctgtgaattttttac

SEQ ID NO: 144207 - DNA, 15 bp, Homo sapiens
tgtgaattttttact

SEQ ID NO: 144208 - DNA, 15 bp, Homo sapiens
gtgaattttttactg

SEQ ID NO: 144209 - DNA, 15 bp, Homo sapiens
tgaattttttactga

SEQ ID NO: 144210 - DNA, 15 bp, Homo sapiens
gaattttttactgaa

SEQ ID NO: 144211 - DNA, 15 bp, Homo sapiens
aattttttactgaag

SEQ ID NO: 144212 - DNA, 15 bp, Homo sapiens
attttttactgaagc

SEQ ID NO: 144213 - DNA, 15 bp, Homo sapiens
ttttttactgaagct

SEQ ID NO: 144214 - DNA, 15 bp, Homo sapiens
tttttactgaagctc

SEQ ID NO: 144215 - DNA, 15 bp, Homo sapiens
ttttactgaagctct

SEQ ID NO: 144216 - DNA, 15 bp, Homo sapiens
tttactgaagctctt

SEQ ID NO: 144217 - DNA, 15 bp, Homo sapiens
ttactgaagctcttt

SEQ ID NO: 144218 - DNA, 15 bp, Homo sapiens
tactgaagctctttg

SEQ ID NO: 144219 - DNA, 15 bp, Homo sapiens
actgaagctctttgg

SEQ ID NO: 144220 - DNA, 15 bp, Homo sapiens
ctgaagctctttgga

SEQ ID NO: 144221 - DNA, 15 bp, Homo sapiens
tgaagctctttggaa

SEQ ID NO: 144222 - DNA, 15 bp, Homo sapiens
gaagctctttggaaa

SEQ ID NO: 144223 - DNA, 15 bp, Homo sapiens
aagctctttggaaat

SEQ ID NO: 144224 - DNA, 15 bp, Homo sapiens
agctctttggaaata

SEQ ID NO: 144225 - DNA, 15 bp, Homo sapiens
gctctttggaaatag

SEQ ID NO: 144226 - DNA, 15 bp, Homo sapiens
ctctttggaaatagg

SEQ ID NO: 144227 - DNA, 15 bp, Homo sapiens
tctttggaaatagga

SEQ ID NO: 144228 - DNA, 15 bp, Homo sapiens
ctttggaaataggat

SEQ ID NO: 144229 - DNA, 15 bp, Homo sapiens
tttggaaataggatt

SEQ ID NO: 144230 - DNA, 15 bp, Homo sapiens
ttggaaataggattt

SEQ ID NO: 144231 - DNA, 15 bp, Homo sapiens
tggaaataggatttg

SEQ ID NO: 144232 - DNA, 15 bp, Homo sapiens
ggaaataggatttgg

SEQ ID NO: 144233 - DNA, 15 bp, Homo sapiens
gaaataggatttggc

SEQ ID NO: 144234 - DNA, 15 bp, Homo sapiens
aaataggatttggca

SEQ ID NO: 144235 - DNA, 15 bp, Homo sapiens
aataggatttggcaa

SEQ ID NO: 144236 - DNA, 15 bp, Homo sapiens
ataggatttggcaag

SEQ ID NO: 144237 - DNA, 15 bp, Homo sapiens
taggatttggcaagt

SEQ ID NO: 144238 - DNA, 15 bp, Homo sapiens
aggatttggcaagtt

SEQ ID NO: 144239 - DNA, 15 bp, Homo sapiens
ggatttggcaagttt

SEQ ID NO: 144240 - DNA, 15 bp, Homo sapiens
gatttggcaagtttt

SEQ ID NO: 144241 - DNA, 15 bp, Homo sapiens
atttggcaagttttg

SEQ ID NO: 144242 - DNA, 15 bp, Homo sapiens
tttggcaagttttgt

SEQ ID NO: 144243 - DNA, 15 bp, Homo sapiens
ttggcaagttttgtc

SEQ ID NO: 144244 - DNA, 15 bp, Homo sapiens
tggcaagttttgtct

SEQ ID NO: 144245 - DNA, 15 bp, Homo sapiens
ggcaagttttgtctg

SEQ ID NO: 144246 - DNA, 15 bp, Homo sapiens
gcaagttttgtctgc

SEQ ID NO: 144247 - DNA, 15 bp, Homo sapiens
caagttttgtctgcc

SEQ ID NO: 144248 - DNA, 15 bp, Homo sapiens
aagttttgtctgcct

SEQ ID NO: 144249 - DNA, 15 bp, Homo sapiens
agttttgtctgcctt

SEQ ID NO: 144250 - DNA, 15 bp, Homo sapiens
gttttgtctgccttc

SEQ ID NO: 144251 - DNA, 15 bp, Homo sapiens
ttttgtctgccttcg

SEQ ID NO: 144252 - DNA, 15 bp, Homo sapiens
tttgtctgccttcgt

SEQ ID NO: 144253 - DNA, 15 bp, Homo sapiens
ttgtctgccttcgtc

SEQ ID NO: 144254 - DNA, 15 bp, Homo sapiens
tgtctgccttcgtca

SEQ ID NO: 144255 - DNA, 15 bp, Homo sapiens
gtctgccttcgtcaa

SEQ ID NO: 144256 - DNA, 15 bp, Homo sapiens
tctgccttcgtcaag

SEQ ID NO: 144257 - DNA, 15 bp, Homo sapiens
ctgccttcgtcaagt

SEQ ID NO: 144258 - DNA, 15 bp, Homo sapiens
tgccttcgtcaagta

SEQ ID NO: 144259 - DNA, 15 bp, Homo sapiens
gccttcgtcaagtaa

SEQ ID NO: 144260 - DNA, 15 bp, Homo sapiens
ccttcgtcaagtaag

SEQ ID NO: 144261 - DNA, 15 bp, Homo sapiens
cttcgtcaagtaagc

SEQ ID NO: 144262 - DNA, 15 bp, Homo sapiens
ttcgtcaagtaagca

SEQ ID NO: 144263 - DNA, 15 bp, Homo sapiens
tcgtcaagtaagcat

SEQ ID NO: 144264 - DNA, 15 bp, Homo sapiens
cgtcaagtaagcatg

SEQ ID NO: 144265 - DNA, 15 bp, Homo sapiens
gtcaagtaagcatga

SEQ ID NO: 144266 - DNA, 15 bp, Homo sapiens
tcaagtaagcatgag

SEQ ID NO: 144267 - DNA, 15 bp, Homo sapiens
caagtaagcatgagc

SEQ ID NO: 144268 - DNA, 15 bp, Homo sapiens
aagtaagcatgagca

SEQ ID NO: 144269 - DNA, 15 bp, Homo sapiens
agtaagcatgagcag

SEQ ID NO: 144270 - DNA, 15 bp, Homo sapiens
gtaagcatgagcagg

SEQ ID NO: 144271 - DNA, 15 bp, Homo sapiens
taagcatgagcagga

SEQ ID NO: 144272 - DNA, 15 bp, Homo sapiens
aagcatgagcaggag

SEQ ID NO: 144273 - DNA, 15 bp, Homo sapiens
agcatgagcaggaga

SEQ ID NO: 144274 - DNA, 15 bp, Homo sapiens
gcatgagcaggagag

SEQ ID NO: 144275 - DNA, 15 bp, Homo sapiens
catgagcaggagagc

SEQ ID NO: 144276 - DNA, 15 bp, Homo sapiens
atgagcaggagagca

SEQ ID NO: 144277 - DNA, 15 bp, Homo sapiens
tgagcaggagagcac

SEQ ID NO: 144278 - DNA, 15 bp, Homo sapiens
gagcaggagagcaca

SEQ ID NO: 144279 - DNA, 15 bp, Homo sapiens
agcaggagagcacag

SEQ ID NO: 144280 - DNA, 15 bp, Homo sapiens
gcaggagagcacagt

SEQ ID NO: 144281 - DNA, 15 bp, Homo sapiens
caggagagcacagtt

SEQ ID NO: 144282 - DNA, 15 bp, Homo sapiens
aggagagcacagtta

SEQ ID NO: 144283 - DNA, 15 bp, Homo sapiens
ggagagcacagttaa

SEQ ID NO: 144284 - DNA, 15 bp, Homo sapiens
gagagcacagttaat

SEQ ID NO: 144285 - DNA, 15 bp, Homo sapiens
agagcacagttaata

SEQ ID NO: 144286 - DNA, 15 bp, Homo sapiens
gagcacagttaatag

SEQ ID NO: 144287 - DNA, 15 bp, Homo sapiens
agcacagttaatagc

SEQ ID NO: 144288 - DNA, 15 bp, Homo sapiens
gcacagttaatagca

SEQ ID NO: 144289 - DNA, 15 bp, Homo sapiens
cacagttaatagcag

SEQ ID NO: 144290 - DNA, 15 bp, Homo sapiens
acagttaatagcagg

SEQ ID NO: 144291 - DNA, 15 bp, Homo sapiens
cagttaatagcaggt

SEQ ID NO: 144292 - DNA, 15 bp, Homo sapiens
agttaatagcaggtg

SEQ ID NO: 144293 - DNA, 15 bp, Homo sapiens
gttaatagcaggtgc

SEQ ID NO: 144294 - DNA, 15 bp, Homo sapiens
ttaatagcaggtgca

SEQ ID NO: 144295 - DNA, 15 bp, Homo sapiens
taatagcaggtgcag

SEQ ID NO: 144296 - DNA, 15 bp, Homo sapiens
aatagcaggtgcaga

SEQ ID NO: 144297 - DNA, 15 bp, Homo sapiens
atagcaggtgcagac

SEQ ID NO: 144298 - DNA, 15 bp, Homo sapiens
tagcaggtgcagaca

SEQ ID NO: 144299 - DNA, 15 bp, Homo sapiens
agcaggtgcagacac

SEQ ID NO: 144300 - DNA, 15 bp, Homo sapiens
gcaggtgcagacaca

SEQ ID NO: 144301 - DNA, 15 bp, Homo sapiens
caggtgcagacacat

SEQ ID NO: 144302 - DNA, 15 bp, Homo sapiens
aggtgcagacacatg

SEQ ID NO: 144303 - DNA, 15 bp, Homo sapiens
ggtgcagacacatga

SEQ ID NO: 144304 - DNA, 15 bp, Homo sapiens
gtgcagacacatgat

SEQ ID NO: 144305 - DNA, 15 bp, Homo sapiens
tgcagacacatgatt

SEQ ID NO: 144306 - DNA, 15 bp, Homo sapiens
gcagacacatgattc

SEQ ID NO: 144307 - DNA, 15 bp, Homo sapiens
cagacacatgattct

SEQ ID NO: 144308 - DNA, 15 bp, Homo sapiens
agacacatgattctc

SEQ ID NO: 144309 - DNA, 15 bp, Homo sapiens
gacacatgattctca

SEQ ID NO: 144310 - DNA, 15 bp, Homo sapiens
acacatgattctcag

SEQ ID NO: 144311 - DNA, 15 bp, Homo sapiens
cacatgattctcaga

SEQ ID NO: 144312 - DNA, 15 bp, Homo sapiens
acatgattctcagac

SEQ ID NO: 144313 - DNA, 15 bp, Homo sapiens
catgattctcagacc

SEQ ID NO: 144314 - DNA, 15 bp, Homo sapiens
atgattctcagaccg

SEQ ID NO: 144315 - DNA, 15 bp, Homo sapiens
tgattctcagaccgt

SEQ ID NO: 144316 - DNA, 15 bp, Homo sapiens
gattctcagaccgta

SEQ ID NO: 144317 - DNA, 15 bp, Homo sapiens
attctcagaccgtat

SEQ ID NO: 144318 - DNA, 15 bp, Homo sapiens
ttctcagaccgtatt

SEQ ID NO: 144319 - DNA, 15 bp, Homo sapiens
tctcagaccgtattt

SEQ ID NO: 144320 - DNA, 15 bp, Homo sapiens
ctcagaccgtatttt

SEQ ID NO: 144321 - DNA, 15 bp, Homo sapiens
tcagaccgtattttg

SEQ ID NO: 144322 - DNA, 15 bp, Homo sapiens
cagaccgtattttgt

SEQ ID NO: 144323 - DNA, 15 bp, Homo sapiens
agaccgtattttgtg

SEQ ID NO: 144324 - DNA, 15 bp, Homo sapiens
gaccgtattttgtgt

SEQ ID NO: 144325 - DNA, 15 bp, Homo sapiens
accgtattttgtgtt

SEQ ID NO: 144326 - DNA, 15 bp, Homo sapiens
ccgtattttgtgttc

SEQ ID NO: 144327 - DNA, 15 bp, Homo sapiens
cgtattttgtgttct

SEQ ID NO: 144328 - DNA, 15 bp, Homo sapiens
gtattttgtgttcta

SEQ ID NO: 144329 - DNA, 15 bp, Homo sapiens
tattttgtgttctag

SEQ ID NO: 144330 - DNA, 15 bp, Homo sapiens
attttgtgttctagt

SEQ ID NO: 144331 - DNA, 15 bp, Homo sapiens
ttttgtgttctagtt

SEQ ID NO: 144332 - DNA, 15 bp, Homo sapiens
tttgtgttctagttt

SEQ ID NO: 144333 - DNA, 15 bp, Homo sapiens
ttgtgttctagtttc

SEQ ID NO: 144334 - DNA, 15 bp, Homo sapiens
tgtgttctagtttca

SEQ ID NO: 144335 - DNA, 15 bp, Homo sapiens
gtgttctagtttcaa

SEQ ID NO: 144336 - DNA, 15 bp, Homo sapiens
tgttctagtttcaag

SEQ ID NO: 144337 - DNA, 15 bp, Homo sapiens
gttctagtttcaagg

SEQ ID NO: 144338 - DNA, 15 bp, Homo sapiens
ttctagtttcaaggc

SEQ ID NO: 144339 - DNA, 15 bp, Homo sapiens
tctagtttcaaggca

SEQ ID NO: 144340 - DNA, 15 bp, Homo sapiens
ctagtttcaaggcat

SEQ ID NO: 144341 - DNA, 15 bp, Homo sapiens
tagtttcaaggcatg

SEQ ID NO: 144342 - DNA, 15 bp, Homo sapiens
agtttcaaggcatga

SEQ ID NO: 144343 - DNA, 15 bp, Homo sapiens
gtttcaaggcatgaa

SEQ ID NO: 144344 - DNA, 15 bp, Homo sapiens
tttcaaggcatgaat

SEQ ID NO: 144345 - DNA, 15 bp, Homo sapiens
ttcaaggcatgaatt

SEQ ID NO: 144346 - DNA, 15 bp, Homo sapiens
tcaaggcatgaattc

SEQ ID NO: 144347 - DNA, 15 bp, Homo sapiens
caaggcatgaattct

SEQ ID NO: 144348 - DNA, 15 bp, Homo sapiens
aaggcatgaattctt

SEQ ID NO: 144349 - DNA, 15 bp, Homo sapiens
aggcatgaattcttt

SEQ ID NO: 144350 - DNA, 15 bp, Homo sapiens
ggcatgaattctttc

SEQ ID NO: 144351 - DNA, 15 bp, Homo sapiens
gcatgaattctttcc

SEQ ID NO: 144352 - DNA, 15 bp, Homo sapiens
catgaattctttcct

SEQ ID NO: 144353 - DNA, 15 bp, Homo sapiens
atgaattctttcctg

SEQ ID NO: 144354 - DNA, 15 bp, Homo sapiens
tgaattctttcctgg

SEQ ID NO: 144355 - DNA, 15 bp, Homo sapiens
gaattctttcctggg

SEQ ID NO: 144356 - DNA, 15 bp, Homo sapiens
aattctttcctgggg

SEQ ID NO: 144357 - DNA, 15 bp, Homo sapiens
attctttcctggggt

SEQ ID NO: 144358 - DNA, 15 bp, Homo sapiens
ttctttcctggggtt

SEQ ID NO: 144359 - DNA, 15 bp, Homo sapiens
tctttcctggggtta

SEQ ID NO: 144360 - DNA, 15 bp, Homo sapiens
ctttcctggggttaa

SEQ ID NO: 144361 - DNA, 15 bp, Homo sapiens
tttcctggggttaat

SEQ ID NO: 144362 - DNA, 15 bp, Homo sapiens
ttcctggggttaatt

SEQ ID NO: 144363 - DNA, 15 bp, Homo sapiens
tcctggggttaattt

SEQ ID NO: 144364 - DNA, 15 bp, Homo sapiens
cctggggttaatttt

SEQ ID NO: 144365 - DNA, 15 bp, Homo sapiens
ctggggttaatttta

SEQ ID NO: 144366 - DNA, 15 bp, Homo sapiens
tggggttaattttat

SEQ ID NO: 144367 - DNA, 15 bp, Homo sapiens
ggggttaattttatt

SEQ ID NO: 144368 - DNA, 15 bp, Homo sapiens
gggttaattttattc

SEQ ID NO: 144369 - DNA, 15 bp, Homo sapiens
ggttaattttattca

SEQ ID NO: 144370 - DNA, 15 bp, Homo sapiens
gttaattttattcaa

SEQ ID NO: 144371 - DNA, 15 bp, Homo sapiens
ttaattttattcaag

SEQ ID NO: 144372 - DNA, 15 bp, Homo sapiens
taattttattcaagg

SEQ ID NO: 144373 - DNA, 15 bp, Homo sapiens
aattttattcaagga

SEQ ID NO: 144374 - DNA, 15 bp, Homo sapiens
attttattcaaggaa

SEQ ID NO: 144375 - DNA, 15 bp, Homo sapiens
ttttattcaaggaag

SEQ ID NO: 144376 - DNA, 15 bp, Homo sapiens
tttattcaaggaagt

SEQ ID NO: 144377 - DNA, 15 bp, Homo sapiens
ttattcaaggaagtt

SEQ ID NO: 144378 - DNA, 15 bp, Homo sapiens
tattcaaggaagtta

SEQ ID NO: 144379 - DNA, 15 bp, Homo sapiens
attcaaggaagttat

SEQ ID NO: 144380 - DNA, 15 bp, Homo sapiens
ttcaaggaagttatc

SEQ ID NO: 144381 - DNA, 15 bp, Homo sapiens
tcaaggaagttatct

SEQ ID NO: 144382 - DNA, 15 bp, Homo sapiens
caaggaagttatctg

SEQ ID NO: 144383 - DNA, 15 bp, Homo sapiens
aaggaagttatctgt

SEQ ID NO: 144384 - DNA, 15 bp, Homo sapiens
aggaagttatctgtc

SEQ ID NO: 144385 - DNA, 15 bp, Homo sapiens
ggaagttatctgtct

SEQ ID NO: 144386 - DNA, 15 bp, Homo sapiens
gaagttatctgtctg

SEQ ID NO: 144387 - DNA, 15 bp, Homo sapiens
aagttatctgtctgt

SEQ ID NO: 144388 - DNA, 15 bp, Homo sapiens
agttatctgtctgtt

SEQ ID NO: 144389 - DNA, 15 bp, Homo sapiens
gttatctgtctgtta

SEQ ID NO: 144390 - DNA, 15 bp, Homo sapiens
ttatctgtctgttag

SEQ ID NO: 144391 - DNA, 15 bp, Homo sapiens
tatctgtctgttaga

SEQ ID NO: 144392 - DNA, 15 bp, Homo sapiens
atctgtctgttagat

SEQ ID NO: 144393 - DNA, 15 bp, Homo sapiens
tctgtctgttagatc

SEQ ID NO: 144394 - DNA, 15 bp, Homo sapiens
ctgtctgttagatct

SEQ ID NO: 144395 - DNA, 15 bp, Homo sapiens
tgtctgttagatctg

SEQ ID NO: 144396 - DNA, 15 bp, Homo sapiens
gtctgttagatctga

SEQ ID NO: 144397 - DNA, 15 bp, Homo sapiens
tctgttagatctgat

SEQ ID NO: 144398 - DNA, 15 bp, Homo sapiens
ctgttagatctgata

SEQ ID NO: 144399 - DNA, 15 bp, Homo sapiens
tgttagatctgatat

SEQ ID NO: 144400 - DNA, 15 bp, Homo sapiens
gttagatctgatatg

SEQ ID NO: 144401 - DNA, 15 bp, Homo sapiens
ttagatctgatatgt

SEQ ID NO: 144402 - DNA, 15 bp, Homo sapiens
tagatctgatatgtg

SEQ ID NO: 144403 - DNA, 15 bp, Homo sapiens
agatctgatatgtgc

SEQ ID NO: 144404 - DNA, 15 bp, Homo sapiens
gatctgatatgtgct

SEQ ID NO: 144405 - DNA, 15 bp, Homo sapiens
atctgatatgtgctc

SEQ ID NO: 144406 - DNA, 15 bp, Homo sapiens
tctgatatgtgctca

SEQ ID NO: 144407 - DNA, 15 bp, Homo sapiens
ctgatatgtgctcag

SEQ ID NO: 144408 - DNA, 15 bp, Homo sapiens
tgatatgtgctcagg

SEQ ID NO: 144409 - DNA, 15 bp, Homo sapiens
gatatgtgctcaggc

SEQ ID NO: 144410 - DNA, 15 bp, Homo sapiens
atatgtgctcaggcc

SEQ ID NO: 144411 - DNA, 15 bp, Homo sapiens
tatgtgctcaggcca

SEQ ID NO: 144412 - DNA, 15 bp, Homo sapiens
atgtgctcaggccaa

SEQ ID NO: 144413 - DNA, 15 bp, Homo sapiens
tgtgctcaggccaac

SEQ ID NO: 144414 - DNA, 15 bp, Homo sapiens
gtgctcaggccaaca

SEQ ID NO: 144415 - DNA, 15 bp, Homo sapiens
tgctcaggccaacat

SEQ ID NO: 144416 - DNA, 15 bp, Homo sapiens
gctcaggccaacata

SEQ ID NO: 144417 - DNA, 15 bp, Homo sapiens
ctcaggccaacatag

SEQ ID NO: 144418 - DNA, 15 bp, Homo sapiens
tcaggccaacataga

SEQ ID NO: 144419 - DNA, 15 bp, Homo sapiens
caggccaacatagat

SEQ ID NO: 144420 - DNA, 15 bp, Homo sapiens
aggccaacatagatt

SEQ ID NO: 144421 - DNA, 15 bp, Homo sapiens
ggccaacatagattc

SEQ ID NO: 144422 - DNA, 15 bp, Homo sapiens
gccaacatagattct

SEQ ID NO: 144423 - DNA, 15 bp, Homo sapiens
ccaacatagattctt

SEQ ID NO: 144424 - DNA, 15 bp, Homo sapiens
caacatagattcttt

SEQ ID NO: 144425 - DNA, 15 bp, Homo sapiens
aacatagattcttta

SEQ ID NO: 144426 - DNA, 15 bp, Homo sapiens
acatagattctttac

SEQ ID NO: 144427 - DNA, 15 bp, Homo sapiens
catagattctttacc

SEQ ID NO: 144428 - DNA, 15 bp, Homo sapiens
atagattctttaccc

SEQ ID NO: 144429 - DNA, 15 bp, Homo sapiens
tagattctttaccct

SEQ ID NO: 144430 - DNA, 15 bp, Homo sapiens
agattctttaccctt

SEQ ID NO: 144431 - DNA, 15 bp, Homo sapiens
gattctttacccttc

SEQ ID NO: 144432 - DNA, 15 bp, Homo sapiens
attctttacccttcc

SEQ ID NO: 144433 - DNA, 15 bp, Homo sapiens
ttctttacccttcct

SEQ ID NO: 144434 - DNA, 15 bp, Homo sapiens
tctttacccttcctt

SEQ ID NO: 144435 - DNA, 15 bp, Homo sapiens
ctttacccttccttt

SEQ ID NO: 144436 - DNA, 15 bp, Homo sapiens
tttacccttcctttc

SEQ ID NO: 144437 - DNA, 15 bp, Homo sapiens
ttacccttcctttct

SEQ ID NO: 144438 - DNA, 15 bp, Homo sapiens
tacccttcctttctt

SEQ ID NO: 144439 - DNA, 15 bp, Homo sapiens
acccttcctttcttc

SEQ ID NO: 144440 - DNA, 15 bp, Homo sapiens
cccttcctttcttcc

SEQ ID NO: 144441 - DNA, 15 bp, Homo sapiens
ccttcctttcttcct

SEQ ID NO: 144442 - DNA, 15 bp, Homo sapiens
cttcctttcttcctg

SEQ ID NO: 144443 - DNA, 15 bp, Homo sapiens
ttcctttcttcctgc

SEQ ID NO: 144444 - DNA, 15 bp, Homo sapiens
cctttcttcctgctc

SEQ ID NO: 144445 - DNA, 15 bp, Homo sapiens
ctttcttcctgctca

SEQ ID NO: 144446 - DNA, 15 bp, Homo sapiens
tttcttcctgctcac

SEQ ID NO: 144447 - DNA, 15 bp, Homo sapiens
ttcttcctgctcacc

SEQ ID NO: 144448 - DNA, 15 bp, Homo sapiens
tcttcctgctcacct

SEQ ID NO: 144449 - DNA, 15 bp, Homo sapiens
cttcctgctcacctg

SEQ ID NO: 144450 - DNA, 15 bp, Homo sapiens
ttcctgctcacctgt

SEQ ID NO: 144451 - DNA, 15 bp, Homo sapiens
tcctgctcacctgtc

SEQ ID NO: 144452 - DNA, 15 bp, Homo sapiens
cctgctcacctgtcc

SEQ ID NO: 144453 - DNA, 15 bp, Homo sapiens
ctgctcacctgtcct

SEQ ID NO: 144454 - DNA, 15 bp, Homo sapiens
tgctcacctgtcctt

SEQ ID NO: 144455 - DNA, 15 bp, Homo sapiens
gctcacctgtccttc

SEQ ID NO: 144456 - DNA, 15 bp, Homo sapiens
ctcacctgtccttcc

SEQ ID NO: 144457 - DNA, 15 bp, Homo sapiens
tcacctgtccttcct

SEQ ID NO: 144458 - DNA, 15 bp, Homo sapiens
cacctgtccttcctc

SEQ ID NO: 144459 - DNA, 15 bp, Homo sapiens
acctgtccttcctct

SEQ ID NO: 144460 - DNA, 15 bp, Homo sapiens
cctgtccttcctctt

SEQ ID NO: 144461 - DNA, 15 bp, Homo sapiens
ctgtccttcctcttt

SEQ ID NO: 144462 - DNA, 15 bp, Homo sapiens
tgtccttcctctttt

SEQ ID NO: 144463 - DNA, 15 bp, Homo sapiens
gtccttcctctttta

SEQ ID NO: 144464 - DNA, 15 bp, Homo sapiens
tccttcctcttttat

SEQ ID NO: 144465 - DNA, 15 bp, Homo sapiens
ccttcctcttttatc

SEQ ID NO: 144466 - DNA, 15 bp, Homo sapiens
cttcctcttttatct

SEQ ID NO: 144467 - DNA, 15 bp, Homo sapiens
ttcctcttttatctt

SEQ ID NO: 144468 - DNA, 15 bp, Homo sapiens
tcctcttttatcttt

SEQ ID NO: 144469 - DNA, 15 bp, Homo sapiens
cctcttttatctttt

SEQ ID NO: 144470 - DNA, 15 bp, Homo sapiens
ctcttttatcttttc

SEQ ID NO: 144471 - DNA, 15 bp, Homo sapiens
tcttttatcttttca

SEQ ID NO: 144472 - DNA, 15 bp, Homo sapiens
cttttatcttttcat

SEQ ID NO: 144473 - DNA, 15 bp, Homo sapiens
ttttatcttttcatt

SEQ ID NO: 144474 - DNA, 15 bp, Homo sapiens
tttatcttttcattg

SEQ ID NO: 144475 - DNA, 15 bp, Homo sapiens
ttatcttttcattga

SEQ ID NO: 144476 - DNA, 15 bp, Homo sapiens
tatcttttcattgaa

SEQ ID NO: 144477 - DNA, 15 bp, Homo sapiens
atcttttcattgaat

SEQ ID NO: 144478 - DNA, 15 bp, Homo sapiens
tcttttcattgaatt

SEQ ID NO: 144479 - DNA, 15 bp, Homo sapiens
cttttcattgaatta

SEQ ID NO: 144480 - DNA, 15 bp, Homo sapiens
ttttcattgaattaa

SEQ ID NO: 144481 - DNA, 15 bp, Homo sapiens
tttcattgaattaaa

SEQ ID NO: 144482 - DNA, 15 bp, Homo sapiens
ttcattgaattaaaa

SEQ ID NO: 144483 - DNA, 15 bp, Homo sapiens
tcattgaattaaaaa

SEQ ID NO: 144484 - DNA, 15 bp, Homo sapiens
cattgaattaaaaag

SEQ ID NO: 144485 - DNA, 15 bp, Homo sapiens
attgaattaaaaaga

SEQ ID NO: 144486 - DNA, 15 bp, Homo sapiens
ttgaattaaaaagaa

SEQ ID NO: 144487 - DNA, 15 bp, Homo sapiens
tgaattaaaaagaaa

SEQ ID NO: 144488 - DNA, 15 bp, Homo sapiens
gaattaaaaagaaaa

SEQ ID NO: 144489 - DNA, 15 bp, Homo sapiens
aattaaaaagaaaat

SEQ ID NO: 144490 - DNA, 15 bp, Homo sapiens
attaaaaagaaaatt

SEQ ID NO: 144491 - DNA, 15 bp, Homo sapiens
ttaaaaagaaaatta

SEQ ID NO: 144492 - DNA, 15 bp, Homo sapiens
taaaaagaaaattat

SEQ ID NO: 144493 - DNA, 15 bp, Homo sapiens
aaaaagaaaattatg

SEQ ID NO: 144494 - DNA, 15 bp, Homo sapiens
aaaagaaaattatga

SEQ ID NO: 144495 - DNA, 15 bp, Homo sapiens
aaagaaaattatgaa

SEQ ID NO: 144496 - DNA, 15 bp, Homo sapiens
aagaaaattatgaaa

SEQ ID NO: 144497 - DNA, 15 bp, Homo sapiens
agaaaattatgaaat

SEQ ID NO: 144498 - DNA, 15 bp, Homo sapiens
gaaaattatgaaata

SEQ ID NO: 144499 - DNA, 15 bp, Homo sapiens
aaaattatgaaatag

SEQ ID NO: 144500 - DNA, 15 bp, Homo sapiens
aaattatgaaatagt

SEQ ID NO: 144501 - DNA, 15 bp, Homo sapiens
aattatgaaatagtt

SEQ ID NO: 144502 - DNA, 15 bp, Homo sapiens
attatgaaatagttt

SEQ ID NO: 144503 - DNA, 15 bp, Homo sapiens
ttatgaaatagtttc

SEQ ID NO: 144504 - DNA, 15 bp, Homo sapiens
tatgaaatagtttca

SEQ ID NO: 144505 - DNA, 15 bp, Homo sapiens
atgaaatagtttcaa

SEQ ID NO: 144506 - DNA, 15 bp, Homo sapiens
tgaaatagtttcaac

SEQ ID NO: 144507 - DNA, 15 bp, Homo sapiens
gaaatagtttcaaca

SEQ ID NO: 144508 - DNA, 15 bp, Homo sapiens
aaatagtttcaacat

SEQ ID NO: 144509 - DNA, 15 bp, Homo sapiens
aatagtttcaacatg

SEQ ID NO: 144510 - DNA, 15 bp, Homo sapiens
atagtttcaacatga

SEQ ID NO: 144511 - DNA, 15 bp, Homo sapiens
tagtttcaacatgaa

SEQ ID NO: 144512 - DNA, 15 bp, Homo sapiens
agtttcaacatgaaa

SEQ ID NO: 144513 - DNA, 15 bp, Homo sapiens
gtttcaacatgaaaa

SEQ ID NO: 144514 - DNA, 15 bp, Homo sapiens
tttcaacatgaaaaa

SEQ ID NO: 144515 - DNA, 15 bp, Homo sapiens
ttcaacatgaaaaaa

SEQ ID NO: 144516 - DNA, 15 bp, Homo sapiens
tcaacatgaaaaaag

SEQ ID NO: 144517 - DNA, 15 bp, Homo sapiens
caacatgaaaaaagg

SEQ ID NO: 144518 - DNA, 15 bp, Homo sapiens
aacatgaaaaaaggt

SEQ ID NO: 144519 - DNA, 15 bp, Homo sapiens
acatgaaaaaaggta

SEQ ID NO: 144520 - DNA, 15 bp, Homo sapiens
catgaaaaaaggtac

SEQ ID NO: 144521 - DNA, 15 bp, Homo sapiens
atgaaaaaaggtaca

SEQ ID NO: 144522 - DNA, 15 bp, Homo sapiens
tgaaaaaaggtacag

SEQ ID NO: 144523 - DNA, 15 bp, Homo sapiens
gaaaaaaggtacaga

SEQ ID NO: 144524 - DNA, 15 bp, Homo sapiens
aaaaaaggtacagag

SEQ ID NO: 144525 - DNA, 15 bp, Homo sapiens
aaaaaggtacagaga

SEQ ID NO: 144526 - DNA, 15 bp, Homo sapiens
aaaaggtacagagaa

SEQ ID NO: 144527 - DNA, 15 bp, Homo sapiens
aaaggtacagagaat

SEQ ID NO: 144528 - DNA, 15 bp, Homo sapiens
aaggtacagagaata

SEQ ID NO: 144529 - DNA, 15 bp, Homo sapiens
aggtacagagaataa

SEQ ID NO: 144530 - DNA, 15 bp, Homo sapiens
ggtacagagaataac

SEQ ID NO: 144531 - DNA, 15 bp, Homo sapiens
gtacagagaataaca

SEQ ID NO: 144532 - DNA, 15 bp, Homo sapiens
tacagagaataacat

SEQ ID NO: 144533 - DNA, 15 bp, Homo sapiens
acagagaataacata

SEQ ID NO: 144534 - DNA, 15 bp, Homo sapiens
cagagaataacataa

SEQ ID NO: 144535 - DNA, 15 bp, Homo sapiens
agagaataacataaa

SEQ ID NO: 144536 - DNA, 15 bp, Homo sapiens
gagaataacataaag

SEQ ID NO: 144537 - DNA, 15 bp, Homo sapiens
agaataacataaaga

SEQ ID NO: 144538 - DNA, 15 bp, Homo sapiens
gaataacataaagaa

SEQ ID NO: 144539 - DNA, 15 bp, Homo sapiens
aataacataaagaac

SEQ ID NO: 144540 - DNA, 15 bp, Homo sapiens
ataacataaagaaca

SEQ ID NO: 144541 - DNA, 15 bp, Homo sapiens
taacataaagaacac

SEQ ID NO: 144542 - DNA, 15 bp, Homo sapiens
aacataaagaacact

SEQ ID NO: 144543 - DNA, 15 bp, Homo sapiens
acataaagaacactc

SEQ ID NO: 144544 - DNA, 15 bp, Homo sapiens
cataaagaacactcc

SEQ ID NO: 144545 - DNA, 15 bp, Homo sapiens
ataaagaacactcct

SEQ ID NO: 144546 - DNA, 15 bp, Homo sapiens
taaagaacactcctg

SEQ ID NO: 144547 - DNA, 15 bp, Homo sapiens
aaagaacactcctgg

SEQ ID NO: 144548 - DNA, 15 bp, Homo sapiens
aagaacactcctggc

SEQ ID NO: 144549 - DNA, 15 bp, Homo sapiens
agaacactcctggct

SEQ ID NO: 144550 - DNA, 15 bp, Homo sapiens
gaacactcctggctg

SEQ ID NO: 144551 - DNA, 15 bp, Homo sapiens
aacactcctggctgg

SEQ ID NO: 144552 - DNA, 15 bp, Homo sapiens
acactcctggctggg

SEQ ID NO: 144553 - DNA, 15 bp, Homo sapiens
cactcctggctgggt

SEQ ID NO: 144554 - DNA, 15 bp, Homo sapiens
actcctggctgggtg

SEQ ID NO: 144555 - DNA, 15 bp, Homo sapiens
ctcctggctgggtgt

SEQ ID NO: 144556 - DNA, 15 bp, Homo sapiens
tcctggctgggtgtg

SEQ ID NO: 144557 - DNA, 15 bp, Homo sapiens
cctggctgggtgtgg

SEQ ID NO: 144558 - DNA, 15 bp, Homo sapiens
ctggctgggtgtggt

SEQ ID NO: 144559 - DNA, 15 bp, Homo sapiens
tggctgggtgtggtg

SEQ ID NO: 144560 - DNA, 15 bp, Homo sapiens
ggctgggtgtggtgg

SEQ ID NO: 144561 - DNA, 15 bp, Homo sapiens
gctgggtgtggtggc

SEQ ID NO: 144562 - DNA, 15 bp, Homo sapiens
ctgggtgtggtggct

SEQ ID NO: 144563 - DNA, 15 bp, Homo sapiens
tgggtgtggtggctc

SEQ ID NO: 144564 - DNA, 15 bp, Homo sapiens
gggtgtggtggctca

SEQ ID NO: 144565 - DNA, 15 bp, Homo sapiens
gtggctcacgcctgc

SEQ ID NO: 144566 - DNA, 15 bp, Homo sapiens
tggctcacgcctgca

SEQ ID NO: 144567 - DNA, 15 bp, Homo sapiens
ggctcacgcctgcaa

SEQ ID NO: 144568 - DNA, 15 bp, Homo sapiens
gctcacgcctgcaat

SEQ ID NO: 144569 - DNA, 15 bp, Homo sapiens
ctcacgcctgcaatc

SEQ ID NO: 144570 - DNA, 15 bp, Homo sapiens
tcacgcctgcaatcc

SEQ ID NO: 144571 - DNA, 15 bp, Homo sapiens
cacgcctgcaatccc

SEQ ID NO: 144572 - DNA, 15 bp, Homo sapiens
acgcctgcaatccca

SEQ ID NO: 144573 - DNA, 15 bp, Homo sapiens
cgcctgcaatcccag

SEQ ID NO: 144574 - DNA, 15 bp, Homo sapiens
cagcactttgggagt

SEQ ID NO: 144575 - DNA, 15 bp, Homo sapiens
agcactttgggagtc

SEQ ID NO: 144576 - DNA, 15 bp, Homo sapiens
gcactttgggagtct

SEQ ID NO: 144577 - DNA, 15 bp, Homo sapiens
cactttgggagtctg

SEQ ID NO: 144578 - DNA, 15 bp, Homo sapiens
actttgggagtctga

SEQ ID NO: 144579 - DNA, 15 bp, Homo sapiens
ctttgggagtctgag

SEQ ID NO: 144580 - DNA, 15 bp, Homo sapiens
tttgggagtctgagg

SEQ ID NO: 144581 - DNA, 15 bp, Homo sapiens
ttgggagtctgaggc

SEQ ID NO: 144582 - DNA, 15 bp, Homo sapiens
tgggagtctgaggca

SEQ ID NO: 144583 - DNA, 15 bp, Homo sapiens
gggagtctgaggcag

SEQ ID NO: 144584 - DNA, 15 bp, Homo sapiens
ggagtctgaggcagc

SEQ ID NO: 144585 - DNA, 15 bp, Homo sapiens
gagtctgaggcagcc

SEQ ID NO: 144586 - DNA, 15 bp, Homo sapiens
agtctgaggcagcca

SEQ ID NO: 144587 - DNA, 15 bp, Homo sapiens
gtctgaggcagccag

SEQ ID NO: 144588 - DNA, 15 bp, Homo sapiens
tctgaggcagccaga

SEQ ID NO: 144589 - DNA, 15 bp, Homo sapiens
ctgaggcagccagat

SEQ ID NO: 144590 - DNA, 15 bp, Homo sapiens
tgaggcagccagatc

SEQ ID NO: 144591 - DNA, 15 bp, Homo sapiens
gaggcagccagatca

SEQ ID NO: 144592 - DNA, 15 bp, Homo sapiens
aggcagccagatcac

SEQ ID NO: 144593 - DNA, 15 bp, Homo sapiens
ggcagccagatcact

SEQ ID NO: 144594 - DNA, 15 bp, Homo sapiens
gcagccagatcactg

SEQ ID NO: 144595 - DNA, 15 bp, Homo sapiens
cagccagatcactgg

SEQ ID NO: 144596 - DNA, 15 bp, Homo sapiens
agccagatcactgga

SEQ ID NO: 144597 - DNA, 15 bp, Homo sapiens
gccagatcactggag

SEQ ID NO: 144598 - DNA, 15 bp, Homo sapiens
ccagatcactggagg

SEQ ID NO: 144599 - DNA, 15 bp, Homo sapiens
cagatcactggaggt

SEQ ID NO: 144600 - DNA, 15 bp, Homo sapiens
agatcactggaggtc

SEQ ID NO: 144601 - DNA, 15 bp, Homo sapiens
gatcactggaggtca

SEQ ID NO: 144602 - DNA, 15 bp, Homo sapiens
atcactggaggtcag

SEQ ID NO: 144603 - DNA, 15 bp, Homo sapiens
tcactggaggtcagg

SEQ ID NO: 144604 - DNA, 15 bp, Homo sapiens
cactggaggtcagga

SEQ ID NO: 144605 - DNA, 15 bp, Homo sapiens
actggaggtcaggag

SEQ ID NO: 144606 - DNA, 15 bp, Homo sapiens
ctggaggtcaggagt

SEQ ID NO: 144607 - DNA, 15 bp, Homo sapiens
tggaggtcaggagtt

SEQ ID NO: 144608 - DNA, 15 bp, Homo sapiens
ggaggtcaggagttg

SEQ ID NO: 144609 - DNA, 15 bp, Homo sapiens
gaggtcaggagttgg

SEQ ID NO: 144610 - DNA, 15 bp, Homo sapiens
aggtcaggagttgga

SEQ ID NO: 144611 - DNA, 15 bp, Homo sapiens
ggtcaggagttggag

SEQ ID NO: 144612 - DNA, 15 bp, Homo sapiens
gtcaggagttggaga

SEQ ID NO: 144613 - DNA, 15 bp, Homo sapiens
tcaggagttggagac

SEQ ID NO: 144614 - DNA, 15 bp, Homo sapiens
caggagttggagacc

SEQ ID NO: 144615 - DNA, 15 bp, Homo sapiens
aggagttggagacca

SEQ ID NO: 144616 - DNA, 15 bp, Homo sapiens
ggagttggagaccag

SEQ ID NO: 144617 - DNA, 15 bp, Homo sapiens
gagttggagaccagc

SEQ ID NO: 144618 - DNA, 15 bp, Homo sapiens
agttggagaccagct

SEQ ID NO: 144619 - DNA, 15 bp, Homo sapiens
gttggagaccagctt

SEQ ID NO: 144620 - DNA, 15 bp, Homo sapiens
ttggagaccagcttg

SEQ ID NO: 144621 - DNA, 15 bp, Homo sapiens
tggagaccagcttgg

SEQ ID NO: 144622 - DNA, 15 bp, Homo sapiens
ggagaccagcttggc

SEQ ID NO: 144623 - DNA, 15 bp, Homo sapiens
gagaccagcttggcc

SEQ ID NO: 144624 - DNA, 15 bp, Homo sapiens
agaccagcttggcca

SEQ ID NO: 144625 - DNA, 15 bp, Homo sapiens
gaccagcttggccaa

SEQ ID NO: 144626 - DNA, 15 bp, Homo sapiens
accagcttggccaac

SEQ ID NO: 144627 - DNA, 15 bp, Homo sapiens
ccagcttggccaaca

SEQ ID NO: 144628 - DNA, 15 bp, Homo sapiens
cagcttggccaacat

SEQ ID NO: 144629 - DNA, 15 bp, Homo sapiens
agcttggccaacatg

SEQ ID NO: 144630 - DNA, 15 bp, Homo sapiens
gcttggccaacatgg

SEQ ID NO: 144631 - DNA, 15 bp, Homo sapiens
cttggccaacatggt

SEQ ID NO: 144632 - DNA, 15 bp, Homo sapiens
ttggccaacatggtg

SEQ ID NO: 144633 - DNA, 15 bp, Homo sapiens
caacatggtgaaaca

SEQ ID NO: 144634 - DNA, 15 bp, Homo sapiens
aacatggtgaaacac

SEQ ID NO: 144635 - DNA, 15 bp, Homo sapiens
acatggtgaaacact

SEQ ID NO: 144636 - DNA, 15 bp, Homo sapiens
catggtgaaacactg

SEQ ID NO: 144637 - DNA, 15 bp, Homo sapiens
atggtgaaacactgc

SEQ ID NO: 144638 - DNA, 15 bp, Homo sapiens
tggtgaaacactgcc

SEQ ID NO: 144639 - DNA, 15 bp, Homo sapiens
ggtgaaacactgcct

SEQ ID NO: 144640 - DNA, 15 bp, Homo sapiens
gtgaaacactgcctc

SEQ ID NO: 144641 - DNA, 15 bp, Homo sapiens
tgaaacactgcctct

SEQ ID NO: 144642 - DNA, 15 bp, Homo sapiens
gaaacactgcctcta

SEQ ID NO: 144643 - DNA, 15 bp, Homo sapiens
aaacactgcctctac

SEQ ID NO: 144644 - DNA, 15 bp, Homo sapiens
aacactgcctctact

SEQ ID NO: 144645 - DNA, 15 bp, Homo sapiens
acactgcctctactg

SEQ ID NO: 144646 - DNA, 15 bp, Homo sapiens
cactgcctctactga

SEQ ID NO: 144647 - DNA, 15 bp, Homo sapiens
actgcctctactgaa

SEQ ID NO: 144648 - DNA, 15 bp, Homo sapiens
ctgcctctactgaaa

SEQ ID NO: 144649 - DNA, 15 bp, Homo sapiens
tgcctctactgaaaa

SEQ ID NO: 144650 - DNA, 15 bp, Homo sapiens
gcctctactgaaaat

SEQ ID NO: 144651 - DNA, 15 bp, Homo sapiens
cctctactgaaaata

SEQ ID NO: 144652 - DNA, 15 bp, Homo sapiens
tactgaaaatacaag

SEQ ID NO: 144653 - DNA, 15 bp, Homo sapiens
actgaaaatacaaga

SEQ ID NO: 144654 - DNA, 15 bp, Homo sapiens
ctgaaaatacaagaa

SEQ ID NO: 144655 - DNA, 15 bp, Homo sapiens
tgaaaatacaagaat

SEQ ID NO: 144656 - DNA, 15 bp, Homo sapiens
gaaaatacaagaatt

SEQ ID NO: 144657 - DNA, 15 bp, Homo sapiens
aaaatacaagaatta

SEQ ID NO: 144658 - DNA, 15 bp, Homo sapiens
aaatacaagaattag

SEQ ID NO: 144659 - DNA, 15 bp, Homo sapiens
aatacaagaattagc

SEQ ID NO: 144660 - DNA, 15 bp, Homo sapiens
atacaagaattagcc

SEQ ID NO: 144661 - DNA, 15 bp, Homo sapiens
tacaagaattagcca

SEQ ID NO: 144662 - DNA, 15 bp, Homo sapiens
acaagaattagccag

SEQ ID NO: 144663 - DNA, 15 bp, Homo sapiens
caagaattagccagg

SEQ ID NO: 144664 - DNA, 15 bp, Homo sapiens
aagaattagccaggc

SEQ ID NO: 144665 - DNA, 15 bp, Homo sapiens
agaattagccaggca

SEQ ID NO: 144666 - DNA, 15 bp, Homo sapiens
gaattagccaggcat

SEQ ID NO: 144667 - DNA, 15 bp, Homo sapiens
aattagccaggcatg

SEQ ID NO: 144668 - DNA, 15 bp, Homo sapiens
attagccaggcatgg

SEQ ID NO: 144669 - DNA, 15 bp, Homo sapiens
ttagccaggcatggt

SEQ ID NO: 144670 - DNA, 15 bp, Homo sapiens
gcatggtggcgtgca

SEQ ID NO: 144671 - DNA, 15 bp, Homo sapiens
catggtggcgtgcac

SEQ ID NO: 144672 - DNA, 15 bp, Homo sapiens
atggtggcgtgcact

SEQ ID NO: 144673 - DNA, 15 bp, Homo sapiens
tggtggcgtgcactt

SEQ ID NO: 144674 - DNA, 15 bp, Homo sapiens
ggtggcgtgcacttg

SEQ ID NO: 144675 - DNA, 15 bp, Homo sapiens
gtggcgtgcacttgt

SEQ ID NO: 144676 - DNA, 15 bp, Homo sapiens
tggcgtgcacttgta

SEQ ID NO: 144677 - DNA, 15 bp, Homo sapiens
ggcgtgcacttgtaa

SEQ ID NO: 144678 - DNA, 15 bp, Homo sapiens
gcgtgcacttgtaat

SEQ ID NO: 144679 - DNA, 15 bp, Homo sapiens
cgtgcacttgtaatc

SEQ ID NO: 144680 - DNA, 15 bp, Homo sapiens
gtgcacttgtaatcc

SEQ ID NO: 144681 - DNA, 15 bp, Homo sapiens
tgcacttgtaatccc

SEQ ID NO: 144682 - DNA, 15 bp, Homo sapiens
gcacttgtaatccca

SEQ ID NO: 144683 - DNA, 15 bp, Homo sapiens
cacttgtaatcccag

SEQ ID NO: 144684 - DNA, 15 bp, Homo sapiens
acttgtaatcccagc

SEQ ID NO: 144685 - DNA, 15 bp, Homo sapiens
gtaatcccagctacg

SEQ ID NO: 144686 - DNA, 15 bp, Homo sapiens
taatcccagctacgt

SEQ ID NO: 144687 - DNA, 15 bp, Homo sapiens
aatcccagctacgtg

SEQ ID NO: 144688 - DNA, 15 bp, Homo sapiens
atcccagctacgtga

SEQ ID NO: 144689 - DNA, 15 bp, Homo sapiens
tcccagctacgtgag

SEQ ID NO: 144690 - DNA, 15 bp, Homo sapiens
cccagctacgtgaga

SEQ ID NO: 144691 - DNA, 15 bp, Homo sapiens
ccagctacgtgagag

SEQ ID NO: 144692 - DNA, 15 bp, Homo sapiens
cagctacgtgagaga

SEQ ID NO: 144693 - DNA, 15 bp, Homo sapiens
agctacgtgagagac

SEQ ID NO: 144694 - DNA, 15 bp, Homo sapiens
gctacgtgagagact

SEQ ID NO: 144695 - DNA, 15 bp, Homo sapiens
ctacgtgagagactg

SEQ ID NO: 144696 - DNA, 15 bp, Homo sapiens
tacgtgagagactga

SEQ ID NO: 144697 - DNA, 15 bp, Homo sapiens
acgtgagagactgag

SEQ ID NO: 144698 - DNA, 15 bp, Homo sapiens
cgtgagagactgagg

SEQ ID NO: 144699 - DNA, 15 bp, Homo sapiens
gtgagagactgaggc

SEQ ID NO: 144700 - DNA, 15 bp, Homo sapiens
tgagagactgaggca

SEQ ID NO: 144701 - DNA, 15 bp, Homo sapiens
gagagactgaggcag

SEQ ID NO: 144702 - DNA, 15 bp, Homo sapiens
agagactgaggcagg

SEQ ID NO: 144703 - DNA, 15 bp, Homo sapiens
gagactgaggcagga

SEQ ID NO: 144704 - DNA, 15 bp, Homo sapiens
agactgaggcaggag

SEQ ID NO: 144705 - DNA, 15 bp, Homo sapiens
gactgaggcaggaga

SEQ ID NO: 144706 - DNA, 15 bp, Homo sapiens
actgaggcaggagaa

SEQ ID NO: 144707 - DNA, 15 bp, Homo sapiens
ttgaacccaggaggg

SEQ ID NO: 144708 - DNA, 15 bp, Homo sapiens
tgaacccaggagggg

SEQ ID NO: 144709 - DNA, 15 bp, Homo sapiens
gaacccaggaggggg

SEQ ID NO: 144710 - DNA, 15 bp, Homo sapiens
aacccaggaggggga

SEQ ID NO: 144711 - DNA, 15 bp, Homo sapiens
acccaggagggggag

SEQ ID NO: 144712 - DNA, 15 bp, Homo sapiens
cccaggagggggagg

SEQ ID NO: 144713 - DNA, 15 bp, Homo sapiens
ccaggagggggaggt

SEQ ID NO: 144714 - DNA, 15 bp, Homo sapiens
acaccactgcactct

SEQ ID NO: 144715 - DNA, 15 bp, Homo sapiens
caccactgcactcta

SEQ ID NO: 144716 - DNA, 15 bp, Homo sapiens
accactgcactctag

SEQ ID NO: 144717 - DNA, 15 bp, Homo sapiens
ccactgcactctagc

SEQ ID NO: 144718 - DNA, 15 bp, Homo sapiens
cactgcactctagcc

SEQ ID NO: 144719 - DNA, 15 bp, Homo sapiens
actgcactctagcct

SEQ ID NO: 144720 - DNA, 15 bp, Homo sapiens
ctgcactctagcctg

SEQ ID NO: 144721 - DNA, 15 bp, Homo sapiens
tgcactctagcctgg

SEQ ID NO: 144722 - DNA, 15 bp, Homo sapiens
gcactctagcctggg

SEQ ID NO: 144723 - DNA, 15 bp, Homo sapiens
cactctagcctgggt

SEQ ID NO: 144724 - DNA, 15 bp, Homo sapiens
actctagcctgggtg

SEQ ID NO: 144725 - DNA, 15 bp, Homo sapiens
ctctagcctgggtga

SEQ ID NO: 144726 - DNA, 15 bp, Homo sapiens
tctagcctgggtgac

SEQ ID NO: 144727 - DNA, 15 bp, Homo sapiens
ctagcctgggtgaca

SEQ ID NO: 144728 - DNA, 15 bp, Homo sapiens
tagcctgggtgacag

SEQ ID NO: 144729 - DNA, 15 bp, Homo sapiens
tgagactccgtcttc

SEQ ID NO: 144730 - DNA, 15 bp, Homo sapiens
gagactccgtcttca

SEQ ID NO: 144731 - DNA, 15 bp, Homo sapiens
agactccgtcttcaa

SEQ ID NO: 144732 - DNA, 15 bp, Homo sapiens
gactccgtcttcaaa

SEQ ID NO: 144733 - DNA, 15 bp, Homo sapiens
actccgtcttcaaac

SEQ ID NO: 144734 - DNA, 15 bp, Homo sapiens
ctccgtcttcaaaca

SEQ ID NO: 144735 - DNA, 15 bp, Homo sapiens
tccgtcttcaaacaa

SEQ ID NO: 144736 - DNA, 15 bp, Homo sapiens
ccgtcttcaaacaaa

SEQ ID NO: 144737 - DNA, 15 bp, Homo sapiens
cgtcttcaaacaaac

SEQ ID NO: 144738 - DNA, 15 bp, Homo sapiens
gtcttcaaacaaaca

SEQ ID NO: 144739 - DNA, 15 bp, Homo sapiens
tcttcaaacaaacaa

SEQ ID NO: 144740 - DNA, 15 bp, Homo sapiens
cttcaaacaaacaaa

SEQ ID NO: 144741 - DNA, 15 bp, Homo sapiens
ttcaaacaaacaaac

SEQ ID NO: 144742 - DNA, 15 bp, Homo sapiens
tcaaacaaacaaaca

SEQ ID NO: 144743 - DNA, 15 bp, Homo sapiens
aacaaacaaaaagaa

SEQ ID NO: 144744 - DNA, 15 bp, Homo sapiens
acaaacaaaaagaac

SEQ ID NO: 144745 - DNA, 15 bp, Homo sapiens
caaacaaaaagaaca

SEQ ID NO: 144746 - DNA, 15 bp, Homo sapiens
aaacaaaaagaacac

SEQ ID NO: 144747 - DNA, 15 bp, Homo sapiens
aacaaaaagaacact

SEQ ID NO: 144748 - DNA, 15 bp, Homo sapiens
acaaaaagaacactc

SEQ ID NO: 144749 - DNA, 15 bp, Homo sapiens
caaaaagaacactcc

SEQ ID NO: 144750 - DNA, 15 bp, Homo sapiens
aaaaagaacactcct

SEQ ID NO: 144751 - DNA, 15 bp, Homo sapiens
aaaagaacactcctg

SEQ ID NO: 144752 - DNA, 15 bp, Homo sapiens
aaagaacactcctgt

SEQ ID NO: 144753 - DNA, 15 bp, Homo sapiens
aagaacactcctgta

SEQ ID NO: 144754 - DNA, 15 bp, Homo sapiens
agaacactcctgtac

SEQ ID NO: 144755 - DNA, 15 bp, Homo sapiens
gaacactcctgtacc

SEQ ID NO: 144756 - DNA, 15 bp, Homo sapiens
aacactcctgtacca

SEQ ID NO: 144757 - DNA, 15 bp, Homo sapiens
acactcctgtaccat

SEQ ID NO: 144758 - DNA, 15 bp, Homo sapiens
cactcctgtaccatc

SEQ ID NO: 144759 - DNA, 15 bp, Homo sapiens
actcctgtaccatca

SEQ ID NO: 144760 - DNA, 15 bp, Homo sapiens
ctcctgtaccatcat

SEQ ID NO: 144761 - DNA, 15 bp, Homo sapiens
tcctgtaccatcatc

SEQ ID NO: 144762 - DNA, 15 bp, Homo sapiens
cctgtaccatcatcc

SEQ ID NO: 144763 - DNA, 15 bp, Homo sapiens
ctgtaccatcatcca

SEQ ID NO: 144764 - DNA, 15 bp, Homo sapiens
tgtaccatcatccat

SEQ ID NO: 144765 - DNA, 15 bp, Homo sapiens
gtaccatcatccatc

SEQ ID NO: 144766 - DNA, 15 bp, Homo sapiens
taccatcatccatca

SEQ ID NO: 144767 - DNA, 15 bp, Homo sapiens
accatcatccatcat

SEQ ID NO: 144768 - DNA, 15 bp, Homo sapiens
ccatcatccatcatt

SEQ ID NO: 144769 - DNA, 15 bp, Homo sapiens
catcatccatcattt

SEQ ID NO: 144770 - DNA, 15 bp, Homo sapiens
atcatccatcatttt

SEQ ID NO: 144771 - DNA, 15 bp, Homo sapiens
tcatccatcattttg

SEQ ID NO: 144772 - DNA, 15 bp, Homo sapiens
catccatcattttgc

SEQ ID NO: 144773 - DNA, 15 bp, Homo sapiens
atccatcattttgcc

SEQ ID NO: 144774 - DNA, 15 bp, Homo sapiens
tccatcattttgccg

SEQ ID NO: 144775 - DNA, 15 bp, Homo sapiens
ccatcattttgccgt

SEQ ID NO: 144776 - DNA, 15 bp, Homo sapiens
catcattttgccgtg

SEQ ID NO: 144777 - DNA, 15 bp, Homo sapiens
atcattttgccgtgc

SEQ ID NO: 144778 - DNA, 15 bp, Homo sapiens
tcattttgccgtgct

SEQ ID NO: 144779 - DNA, 15 bp, Homo sapiens
cattttgccgtgctg

SEQ ID NO: 144780 - DNA, 15 bp, Homo sapiens
attttgccgtgctga

SEQ ID NO: 144781 - DNA, 15 bp, Homo sapiens
ttttgccgtgctgac

SEQ ID NO: 144782 - DNA, 15 bp, Homo sapiens
tttgccgtgctgact

SEQ ID NO: 144783 - DNA, 15 bp, Homo sapiens
ttgccgtgctgactc

SEQ ID NO: 144784 - DNA, 15 bp, Homo sapiens
tgccgtgctgactcc

SEQ ID NO: 144785 - DNA, 15 bp, Homo sapiens
gccgtgctgactcca

SEQ ID NO: 144786 - DNA, 15 bp, Homo sapiens
ccgtgctgactccag

SEQ ID NO: 144787 - DNA, 15 bp, Homo sapiens
cgtgctgactccagg

SEQ ID NO: 144788 - DNA, 15 bp, Homo sapiens
gtgctgactccaggt

SEQ ID NO: 144789 - DNA, 15 bp, Homo sapiens
tgctgactccaggtt

SEQ ID NO: 144790 - DNA, 15 bp, Homo sapiens
gctgactccaggttc

SEQ ID NO: 144791 - DNA, 15 bp, Homo sapiens
ctgactccaggttct

SEQ ID NO: 144792 - DNA, 15 bp, Homo sapiens
tgactccaggttcta

SEQ ID NO: 144793 - DNA, 15 bp, Homo sapiens
gactccaggttctat

SEQ ID NO: 144794 - DNA, 15 bp, Homo sapiens
actccaggttctatt

SEQ ID NO: 144795 - DNA, 15 bp, Homo sapiens
ctccaggttctattt

SEQ ID NO: 144796 - DNA, 15 bp, Homo sapiens
tccaggttctattta

SEQ ID NO: 144797 - DNA, 15 bp, Homo sapiens
ccaggttctatttaa

SEQ ID NO: 144798 - DNA, 15 bp, Homo sapiens
caggttctatttaag

SEQ ID NO: 144799 - DNA, 15 bp, Homo sapiens
aggttctatttaaga

SEQ ID NO: 144800 - DNA, 15 bp, Homo sapiens
ggttctatttaagaa

SEQ ID NO: 144801 - DNA, 15 bp, Homo sapiens
gttctatttaagaaa

SEQ ID NO: 144802 - DNA, 15 bp, Homo sapiens
ttctatttaagaaat

SEQ ID NO: 144803 - DNA, 15 bp, Homo sapiens
tctatttaagaaata

SEQ ID NO: 144804 - DNA, 15 bp, Homo sapiens
ctatttaagaaataa

SEQ ID NO: 144805 - DNA, 15 bp, Homo sapiens
tatttaagaaataaa

SEQ ID NO: 144806 - DNA, 15 bp, Homo sapiens
atttaagaaataaaa

SEQ ID NO: 144807 - DNA, 15 bp, Homo sapiens
tttaagaaataaaac

SEQ ID NO: 144808 - DNA, 15 bp, Homo sapiens
ttaagaaataaaaca

SEQ ID NO: 144809 - DNA, 15 bp, Homo sapiens
taagaaataaaacat

SEQ ID NO: 144810 - DNA, 15 bp, Homo sapiens
aagaaataaaacatt

SEQ ID NO: 144811 - DNA, 15 bp, Homo sapiens
agaaataaaacatta

SEQ ID NO: 144812 - DNA, 15 bp, Homo sapiens
gaaataaaacattac

SEQ ID NO: 144813 - DNA, 15 bp, Homo sapiens
aaataaaacattaca

SEQ ID NO: 144814 - DNA, 15 bp, Homo sapiens
aataaaacattacag

SEQ ID NO: 144815 - DNA, 15 bp, Homo sapiens
ataaaacattacagg

SEQ ID NO: 144816 - DNA, 15 bp, Homo sapiens
taaaacattacaggt

SEQ ID NO: 144817 - DNA, 15 bp, Homo sapiens
aaaacattacaggta

SEQ ID NO: 144818 - DNA, 15 bp, Homo sapiens
aaacattacaggtac

SEQ ID NO: 144819 - DNA, 15 bp, Homo sapiens
aacattacaggtaca

SEQ ID NO: 144820 - DNA, 15 bp, Homo sapiens
acattacaggtacag

SEQ ID NO: 144821 - DNA, 15 bp, Homo sapiens
cattacaggtacagc

SEQ ID NO: 144822 - DNA, 15 bp, Homo sapiens
attacaggtacagct

SEQ ID NO: 144823 - DNA, 15 bp, Homo sapiens
ttacaggtacagctg

SEQ ID NO: 144824 - DNA, 15 bp, Homo sapiens
tacaggtacagctga

SEQ ID NO: 144825 - DNA, 15 bp, Homo sapiens
acaggtacagctgat

SEQ ID NO: 144826 - DNA, 15 bp, Homo sapiens
caggtacagctgatg

SEQ ID NO: 144827 - DNA, 15 bp, Homo sapiens
aggtacagctgatgc

SEQ ID NO: 144828 - DNA, 15 bp, Homo sapiens
ggtacagctgatgcc

SEQ ID NO: 144829 - DNA, 15 bp, Homo sapiens
gtacagctgatgcca

SEQ ID NO: 144830 - DNA, 15 bp, Homo sapiens
tacagctgatgccac

SEQ ID NO: 144831 - DNA, 15 bp, Homo sapiens
acagctgatgccacc

SEQ ID NO: 144832 - DNA, 15 bp, Homo sapiens
cagctgatgccacct

SEQ ID NO: 144833 - DNA, 15 bp, Homo sapiens
agctgatgccacctc

SEQ ID NO: 144834 - DNA, 15 bp, Homo sapiens
gctgatgccacctct

SEQ ID NO: 144835 - DNA, 15 bp, Homo sapiens
ctgatgccacctctg

SEQ ID NO: 144836 - DNA, 15 bp, Homo sapiens
tgatgccacctctgt

SEQ ID NO: 144837 - DNA, 15 bp, Homo sapiens
gatgccacctctgtt

SEQ ID NO: 144838 - DNA, 15 bp, Homo sapiens
atgccacctctgttt

SEQ ID NO: 144839 - DNA, 15 bp, Homo sapiens
tgccacctctgtttc

SEQ ID NO: 144840 - DNA, 15 bp, Homo sapiens
gccacctctgtttcc

SEQ ID NO: 144841 - DNA, 15 bp, Homo sapiens
ccacctctgtttccc

SEQ ID NO: 144842 - DNA, 15 bp, Homo sapiens
cacctctgtttccct

SEQ ID NO: 144843 - DNA, 15 bp, Homo sapiens
acctctgtttcccta

SEQ ID NO: 144844 - DNA, 15 bp, Homo sapiens
cctctgtttccctag

SEQ ID NO: 144845 - DNA, 15 bp, Homo sapiens
ctctgtttccctagc

SEQ ID NO: 144846 - DNA, 15 bp, Homo sapiens
tctgtttccctagct

SEQ ID NO: 144847 - DNA, 15 bp, Homo sapiens
ctgtttccctagctc

SEQ ID NO: 144848 - DNA, 15 bp, Homo sapiens
tgtttccctagctca

SEQ ID NO: 144849 - DNA, 15 bp, Homo sapiens
gtttccctagctcat

SEQ ID NO: 144850 - DNA, 15 bp, Homo sapiens
tttccctagctcatt

SEQ ID NO: 144851 - DNA, 15 bp, Homo sapiens
ttccctagctcattc

SEQ ID NO: 144852 - DNA, 15 bp, Homo sapiens
tccctagctcattct

SEQ ID NO: 144853 - DNA, 15 bp, Homo sapiens
ccctagctcattctt

SEQ ID NO: 144854 - DNA, 15 bp, Homo sapiens
cctagctcattcttc

SEQ ID NO: 144855 - DNA, 15 bp, Homo sapiens
ctagctcattcttca

SEQ ID NO: 144856 - DNA, 15 bp, Homo sapiens
tagctcattcttcag

SEQ ID NO: 144857 - DNA, 15 bp, Homo sapiens
agctcattcttcaga

SEQ ID NO: 144858 - DNA, 15 bp, Homo sapiens
gctcattcttcagag

SEQ ID NO: 144859 - DNA, 15 bp, Homo sapiens
ctcattcttcagaga

SEQ ID NO: 144860 - DNA, 15 bp, Homo sapiens
tcattcttcagagat

SEQ ID NO: 144861 - DNA, 15 bp, Homo sapiens
cattcttcagagata

SEQ ID NO: 144862 - DNA, 15 bp, Homo sapiens
attcttcagagataa

SEQ ID NO: 144863 - DNA, 15 bp, Homo sapiens
ttcttcagagataac

SEQ ID NO: 144864 - DNA, 15 bp, Homo sapiens
tcttcagagataact

SEQ ID NO: 144865 - DNA, 15 bp, Homo sapiens
cttcagagataactc

SEQ ID NO: 144866 - DNA, 15 bp, Homo sapiens
ttcagagataactct

SEQ ID NO: 144867 - DNA, 15 bp, Homo sapiens
tcagagataactctt

SEQ ID NO: 144868 - DNA, 15 bp, Homo sapiens
cagagataactcttg

SEQ ID NO: 144869 - DNA, 15 bp, Homo sapiens
agagataactcttgt

SEQ ID NO: 144870 - DNA, 15 bp, Homo sapiens
gagataactcttgtc

SEQ ID NO: 144871 - DNA, 15 bp, Homo sapiens
agataactcttgtct

SEQ ID NO: 144872 - DNA, 15 bp, Homo sapiens
gataactcttgtctt

SEQ ID NO: 144873 - DNA, 15 bp, Homo sapiens
ataactcttgtcttg

SEQ ID NO: 144874 - DNA, 15 bp, Homo sapiens
taactcttgtcttgc

SEQ ID NO: 144875 - DNA, 15 bp, Homo sapiens
aactcttgtcttgca

SEQ ID NO: 144876 - DNA, 15 bp, Homo sapiens
actcttgtcttgcag

SEQ ID NO: 144877 - DNA, 15 bp, Homo sapiens
ctcttgtcttgcagt

SEQ ID NO: 144878 - DNA, 15 bp, Homo sapiens
tcttgtcttgcagtt

SEQ ID NO: 144879 - DNA, 15 bp, Homo sapiens
cttgtcttgcagttg

SEQ ID NO: 144880 - DNA, 15 bp, Homo sapiens
ttgtcttgcagttgg

SEQ ID NO: 144881 - DNA, 15 bp, Homo sapiens
tgtcttgcagttgga

SEQ ID NO: 144882 - DNA, 15 bp, Homo sapiens
gtcttgcagttggat

SEQ ID NO: 144883 - DNA, 15 bp, Homo sapiens
tcttgcagttggatg

SEQ ID NO: 144884 - DNA, 15 bp, Homo sapiens
cttgcagttggatgt

SEQ ID NO: 144885 - DNA, 15 bp, Homo sapiens
ttgcagttggatgtt

SEQ ID NO: 144886 - DNA, 15 bp, Homo sapiens
tgcagttggatgttt

SEQ ID NO: 144887 - DNA, 15 bp, Homo sapiens
gcagttggatgtttt

SEQ ID NO: 144888 - DNA, 15 bp, Homo sapiens
cagttggatgtttta

SEQ ID NO: 144889 - DNA, 15 bp, Homo sapiens
agttggatgttttaa

SEQ ID NO: 144890 - DNA, 15 bp, Homo sapiens
gttggatgttttaat

SEQ ID NO: 144891 - DNA, 15 bp, Homo sapiens
ttggatgttttaatc

SEQ ID NO: 144892 - DNA, 15 bp, Homo sapiens
tggatgttttaatcc

SEQ ID NO: 144893 - DNA, 15 bp, Homo sapiens
ggatgttttaatcct

SEQ ID NO: 144894 - DNA, 15 bp, Homo sapiens
gatgttttaatcctc

SEQ ID NO: 144895 - DNA, 15 bp, Homo sapiens
atgttttaatcctct

SEQ ID NO: 144896 - DNA, 15 bp, Homo sapiens
tgttttaatcctcta

SEQ ID NO: 144897 - DNA, 15 bp, Homo sapiens
gttttaatcctctat

SEQ ID NO: 144898 - DNA, 15 bp, Homo sapiens
ttttaatcctctata

SEQ ID NO: 144899 - DNA, 15 bp, Homo sapiens
tttaatcctctatat

SEQ ID NO: 144900 - DNA, 15 bp, Homo sapiens
ttaatcctctatatc

SEQ ID NO: 144901 - DNA, 15 bp, Homo sapiens
taatcctctatatca

SEQ ID NO: 144902 - DNA, 15 bp, Homo sapiens
aatcctctatatcat

SEQ ID NO: 144903 - DNA, 15 bp, Homo sapiens
atcctctatatcatg

SEQ ID NO: 144904 - DNA, 15 bp, Homo sapiens
tcctctatatcatgt

SEQ ID NO: 144905 - DNA, 15 bp, Homo sapiens
cctctatatcatgta

SEQ ID NO: 144906 - DNA, 15 bp, Homo sapiens
ctctatatcatgtat

SEQ ID NO: 144907 - DNA, 15 bp, Homo sapiens
tctatatcatgtata

SEQ ID NO: 144908 - DNA, 15 bp, Homo sapiens
ctatatcatgtatac

SEQ ID NO: 144909 - DNA, 15 bp, Homo sapiens
tatatcatgtatact

SEQ ID NO: 144910 - DNA, 15 bp, Homo sapiens
atatcatgtatactt

SEQ ID NO: 144911 - DNA, 15 bp, Homo sapiens
tatcatgtatactta

SEQ ID NO: 144912 - DNA, 15 bp, Homo sapiens
atcatgtatacttac

SEQ ID NO: 144913 - DNA, 15 bp, Homo sapiens
tcatgtatacttaca

SEQ ID NO: 144914 - DNA, 15 bp, Homo sapiens
catgtatacttacat

SEQ ID NO: 144915 - DNA, 15 bp, Homo sapiens
atgtatacttacatt

SEQ ID NO: 144916 - DNA, 15 bp, Homo sapiens
tgtatacttacattc

SEQ ID NO: 144917 - DNA, 15 bp, Homo sapiens
gtatacttacattct

SEQ ID NO: 144918 - DNA, 15 bp, Homo sapiens
tatacttacattcta

SEQ ID NO: 144919 - DNA, 15 bp, Homo sapiens
atacttacattctat

SEQ ID NO: 144920 - DNA, 15 bp, Homo sapiens
tacttacattctatg

SEQ ID NO: 144921 - DNA, 15 bp, Homo sapiens
acttacattctatgt

SEQ ID NO: 144922 - DNA, 15 bp, Homo sapiens
cttacattctatgta

SEQ ID NO: 144923 - DNA, 15 bp, Homo sapiens
ttacattctatgtat

SEQ ID NO: 144924 - DNA, 15 bp, Homo sapiens
tacattctatgtata

SEQ ID NO: 144925 - DNA, 15 bp, Homo sapiens
acattctatgtataa

SEQ ID NO: 144926 - DNA, 15 bp, Homo sapiens
cattctatgtataac

SEQ ID NO: 144927 - DNA, 15 bp, Homo sapiens
attctatgtataaca

SEQ ID NO: 144928 - DNA, 15 bp, Homo sapiens
ttctatgtataacaa

SEQ ID NO: 144929 - DNA, 15 bp, Homo sapiens
tctatgtataacaat

SEQ ID NO: 144930 - DNA, 15 bp, Homo sapiens
ctatgtataacaata

SEQ ID NO: 144931 - DNA, 15 bp, Homo sapiens
tatgtataacaatat

SEQ ID NO: 144932 - DNA, 15 bp, Homo sapiens
atgtataacaatatt

SEQ ID NO: 144933 - DNA, 15 bp, Homo sapiens
tgtataacaatattt

SEQ ID NO: 144934 - DNA, 15 bp, Homo sapiens
gtataacaatatttg

SEQ ID NO: 144935 - DNA, 15 bp, Homo sapiens
tataacaatatttgg

SEQ ID NO: 144936 - DNA, 15 bp, Homo sapiens
ataacaatatttggt

SEQ ID NO: 144937 - DNA, 15 bp, Homo sapiens
taacaatatttggta

SEQ ID NO: 144938 - DNA, 15 bp, Homo sapiens
aacaatatttggtac

SEQ ID NO: 144939 - DNA, 15 bp, Homo sapiens
acaatatttggtact

SEQ ID NO: 144940 - DNA, 15 bp, Homo sapiens
caatatttggtactg

SEQ ID NO: 144941 - DNA, 15 bp, Homo sapiens
aatatttggtactgg

SEQ ID NO: 144942 - DNA, 15 bp, Homo sapiens
atatttggtactggc

SEQ ID NO: 144943 - DNA, 15 bp, Homo sapiens
tatttggtactggcc

SEQ ID NO: 144944 - DNA, 15 bp, Homo sapiens
atttggtactggcct

SEQ ID NO: 144945 - DNA, 15 bp, Homo sapiens
tttggtactggccta

SEQ ID NO: 144946 - DNA, 15 bp, Homo sapiens
ttggtactggcctaa

SEQ ID NO: 144947 - DNA, 15 bp, Homo sapiens
tggtactggcctaaa

SEQ ID NO: 144948 - DNA, 15 bp, Homo sapiens
ggtactggcctaaat

SEQ ID NO: 144949 - DNA, 15 bp, Homo sapiens
gtactggcctaaatg

SEQ ID NO: 144950 - DNA, 15 bp, Homo sapiens
tactggcctaaatgt

SEQ ID NO: 144951 - DNA, 15 bp, Homo sapiens
actggcctaaatgtg

SEQ ID NO: 144952 - DNA, 15 bp, Homo sapiens
ctggcctaaatgtgt

SEQ ID NO: 144953 - DNA, 15 bp, Homo sapiens
tggcctaaatgtgtt

SEQ ID NO: 144954 - DNA, 15 bp, Homo sapiens
ggcctaaatgtgttc

SEQ ID NO: 144955 - DNA, 15 bp, Homo sapiens
gcctaaatgtgttca

SEQ ID NO: 144956 - DNA, 15 bp, Homo sapiens
cctaaatgtgttcac

SEQ ID NO: 144957 - DNA, 15 bp, Homo sapiens
ctaaatgtgttcaca

SEQ ID NO: 144958 - DNA, 15 bp, Homo sapiens
taaatgtgttcacat

SEQ ID NO: 144959 - DNA, 15 bp, Homo sapiens
aaatgtgttcacatt

SEQ ID NO: 144960 - DNA, 15 bp, Homo sapiens
aatgtgttcacattg

SEQ ID NO: 144961 - DNA, 15 bp, Homo sapiens
atgtgttcacattgt

SEQ ID NO: 144962 - DNA, 15 bp, Homo sapiens
tgtgttcacattgta

SEQ ID NO: 144963 - DNA, 15 bp, Homo sapiens
gtgttcacattgtat

SEQ ID NO: 144964 - DNA, 15 bp, Homo sapiens
tgttcacattgtata

SEQ ID NO: 144965 - DNA, 15 bp, Homo sapiens
gttcacattgtataa

SEQ ID NO: 144966 - DNA, 15 bp, Homo sapiens
ttcacattgtataag

SEQ ID NO: 144967 - DNA, 15 bp, Homo sapiens
tcacattgtataagt

SEQ ID NO: 144968 - DNA, 15 bp, Homo sapiens
cacattgtataagtg

SEQ ID NO: 144969 - DNA, 15 bp, Homo sapiens
acattgtataagtgt

SEQ ID NO: 144970 - DNA, 15 bp, Homo sapiens
cattgtataagtgtg

SEQ ID NO: 144971 - DNA, 15 bp, Homo sapiens
attgtataagtgtgc

SEQ ID NO: 144972 - DNA, 15 bp, Homo sapiens
ttgtataagtgtgca

SEQ ID NO: 144973 - DNA, 15 bp, Homo sapiens
tgtataagtgtgcat

SEQ ID NO: 144974 - DNA, 15 bp, Homo sapiens
gtataagtgtgcata

SEQ ID NO: 144975 - DNA, 15 bp, Homo sapiens
tataagtgtgcatat

SEQ ID NO: 144976 - DNA, 15 bp, Homo sapiens
ataagtgtgcatatt

SEQ ID NO: 144977 - DNA, 15 bp, Homo sapiens
taagtgtgcatattg

SEQ ID NO: 144978 - DNA, 15 bp, Homo sapiens
aagtgtgcatattgg

SEQ ID NO: 144979 - DNA, 15 bp, Homo sapiens
agtgtgcatattggc

SEQ ID NO: 144980 - DNA, 15 bp, Homo sapiens
gtgtgcatattggcc

SEQ ID NO: 144981 - DNA, 15 bp, Homo sapiens
tgtgcatattggcct

SEQ ID NO: 144982 - DNA, 15 bp, Homo sapiens
gtgcatattggcctg

SEQ ID NO: 144983 - DNA, 15 bp, Homo sapiens
tgcatattggcctgc

SEQ ID NO: 144984 - DNA, 15 bp, Homo sapiens
gcatattggcctgcc

SEQ ID NO: 144985 - DNA, 15 bp, Homo sapiens
catattggcctgcca

SEQ ID NO: 144986 - DNA, 15 bp, Homo sapiens
atattggcctgccac

SEQ ID NO: 144987 - DNA, 15 bp, Homo sapiens
tattggcctgccact

SEQ ID NO: 144988 - DNA, 15 bp, Homo sapiens
attggcctgccactt

SEQ ID NO: 144989 - DNA, 15 bp, Homo sapiens
ttggcctgccacttc

SEQ ID NO: 144990 - DNA, 15 bp, Homo sapiens
tggcctgccacttca

SEQ ID NO: 144991 - DNA, 15 bp, Homo sapiens
ggcctgccacttcat

SEQ ID NO: 144992 - DNA, 15 bp, Homo sapiens
gcctgccacttcatt

SEQ ID NO: 144993 - DNA, 15 bp, Homo sapiens
cctgccacttcattt

SEQ ID NO: 144994 - DNA, 15 bp, Homo sapiens
ctgccacttcatttg

SEQ ID NO: 144995 - DNA, 15 bp, Homo sapiens
tgccacttcatttgg

SEQ ID NO: 144996 - DNA, 15 bp, Homo sapiens
gccacttcatttgga

SEQ ID NO: 144997 - DNA, 15 bp, Homo sapiens
ccacttcatttggaa

SEQ ID NO: 144998 - DNA, 15 bp, Homo sapiens
cacttcatttggaat

SEQ ID NO: 144999 - DNA, 15 bp, Homo sapiens
acttcatttggaatt

SEQ ID NO: 145000 - DNA, 15 bp, Homo sapiens
cttcatttggaatta

SEQ ID NO: 145001 - DNA, 15 bp, Homo sapiens
ttcatttggaattat

SEQ ID NO: 145002 - DNA, 15 bp, Homo sapiens
tcatttggaattatg

SEQ ID NO: 145003 - DNA, 15 bp, Homo sapiens
catttggaattatgt

SEQ ID NO: 145004 - DNA, 15 bp, Homo sapiens
atttggaattatgtt

SEQ ID NO: 145005 - DNA, 15 bp, Homo sapiens
tttggaattatgttc

SEQ ID NO: 145006 - DNA, 15 bp, Homo sapiens
ttggaattatgttct

SEQ ID NO: 145007 - DNA, 15 bp, Homo sapiens
tggaattatgttctt

SEQ ID NO: 145008 - DNA, 15 bp, Homo sapiens
ggaattatgttcttg

SEQ ID NO: 145009 - DNA, 15 bp, Homo sapiens
gaattatgttcttga

SEQ ID NO: 145010 - DNA, 15 bp, Homo sapiens
aattatgttcttgag

SEQ ID NO: 145011 - DNA, 15 bp, Homo sapiens
attatgttcttgaga

SEQ ID NO: 145012 - DNA, 15 bp, Homo sapiens
ttatgttcttgagat

SEQ ID NO: 145013 - DNA, 15 bp, Homo sapiens
tatgttcttgagatt

SEQ ID NO: 145014 - DNA, 15 bp, Homo sapiens
atgttcttgagattt

SEQ ID NO: 145015 - DNA, 15 bp, Homo sapiens
tgttcttgagattta

SEQ ID NO: 145016 - DNA, 15 bp, Homo sapiens
gttcttgagatttat

SEQ ID NO: 145017 - DNA, 15 bp, Homo sapiens
ttcttgagatttatc

SEQ ID NO: 145018 - DNA, 15 bp, Homo sapiens
tcttgagatttatca

SEQ ID NO: 145019 - DNA, 15 bp, Homo sapiens
cttgagatttatcaa

SEQ ID NO: 145020 - DNA, 15 bp, Homo sapiens
ttgagatttatcaat

SEQ ID NO: 145021 - DNA, 15 bp, Homo sapiens
tgagatttatcaatg

SEQ ID NO: 145022 - DNA, 15 bp, Homo sapiens
gagatttatcaatgt

SEQ ID NO: 145023 - DNA, 15 bp, Homo sapiens
agatttatcaatgtt

SEQ ID NO: 145024 - DNA, 15 bp, Homo sapiens
gatttatcaatgttg

SEQ ID NO: 145025 - DNA, 15 bp, Homo sapiens
atttatcaatgttga

SEQ ID NO: 145026 - DNA, 15 bp, Homo sapiens
tttatcaatgttgat

SEQ ID NO: 145027 - DNA, 15 bp, Homo sapiens
ttatcaatgttgata

SEQ ID NO: 145028 - DNA, 15 bp, Homo sapiens
tatcaatgttgatac

SEQ ID NO: 145029 - DNA, 15 bp, Homo sapiens
atcaatgttgataca

SEQ ID NO: 145030 - DNA, 15 bp, Homo sapiens
tcaatgttgatacat

SEQ ID NO: 145031 - DNA, 15 bp, Homo sapiens
caatgttgatacatg

SEQ ID NO: 145032 - DNA, 15 bp, Homo sapiens
aatgttgatacatgt

SEQ ID NO: 145033 - DNA, 15 bp, Homo sapiens
atgttgatacatgtg

SEQ ID NO: 145034 - DNA, 15 bp, Homo sapiens
tgttgatacatgtgg

SEQ ID NO: 145035 - DNA, 15 bp, Homo sapiens
gttgatacatgtgga

SEQ ID NO: 145036 - DNA, 15 bp, Homo sapiens
ttgatacatgtggaa

SEQ ID NO: 145037 - DNA, 15 bp, Homo sapiens
tgatacatgtggaat

SEQ ID NO: 145038 - DNA, 15 bp, Homo sapiens
gatacatgtggaatc

SEQ ID NO: 145039 - DNA, 15 bp, Homo sapiens
atacatgtggaatct

SEQ ID NO: 145040 - DNA, 15 bp, Homo sapiens
tacatgtggaatctg

SEQ ID NO: 145041 - DNA, 15 bp, Homo sapiens
acatgtggaatctgg

SEQ ID NO: 145042 - DNA, 15 bp, Homo sapiens
catgtggaatctggt

SEQ ID NO: 145043 - DNA, 15 bp, Homo sapiens
atgtggaatctggtt

SEQ ID NO: 145044 - DNA, 15 bp, Homo sapiens
tgtggaatctggtta

SEQ ID NO: 145045 - DNA, 15 bp, Homo sapiens
gtggaatctggttaa

SEQ ID NO: 145046 - DNA, 15 bp, Homo sapiens
tggaatctggttaat

SEQ ID NO: 145047 - DNA, 15 bp, Homo sapiens
ggaatctggttaatt

SEQ ID NO: 145048 - DNA, 15 bp, Homo sapiens
gaatctggttaattt

SEQ ID NO: 145049 - DNA, 15 bp, Homo sapiens
aatctggttaatttt

SEQ ID NO: 145050 - DNA, 15 bp, Homo sapiens
atctggttaattttt

SEQ ID NO: 145051 - DNA, 15 bp, Homo sapiens
tctggttaatttttg

SEQ ID NO: 145052 - DNA, 15 bp, Homo sapiens
ctggttaatttttgc

SEQ ID NO: 145053 - DNA, 15 bp, Homo sapiens
tggttaatttttgcc

SEQ ID NO: 145054 - DNA, 15 bp, Homo sapiens
ggttaatttttgcca

SEQ ID NO: 145055 - DNA, 15 bp, Homo sapiens
gttaatttttgccat

SEQ ID NO: 145056 - DNA, 15 bp, Homo sapiens
ttaatttttgccata

SEQ ID NO: 145057 - DNA, 15 bp, Homo sapiens
taatttttgccatag

SEQ ID NO: 145058 - DNA, 15 bp, Homo sapiens
aatttttgccatagt

SEQ ID NO: 145059 - DNA, 15 bp, Homo sapiens
atttttgccatagta

SEQ ID NO: 145060 - DNA, 15 bp, Homo sapiens
tttttgccatagtat

SEQ ID NO: 145061 - DNA, 15 bp, Homo sapiens
ttttgccatagtatt

SEQ ID NO: 145062 - DNA, 15 bp, Homo sapiens
tttgccatagtattc

SEQ ID NO: 145063 - DNA, 15 bp, Homo sapiens
ttgccatagtattct

SEQ ID NO: 145064 - DNA, 15 bp, Homo sapiens
tgccatagtattcta

SEQ ID NO: 145065 - DNA, 15 bp, Homo sapiens
gccatagtattctat

SEQ ID NO: 145066 - DNA, 15 bp, Homo sapiens
ccatagtattctatt

SEQ ID NO: 145067 - DNA, 15 bp, Homo sapiens
catagtattctattt

SEQ ID NO: 145068 - DNA, 15 bp, Homo sapiens
atagtattctatttt

SEQ ID NO: 145069 - DNA, 15 bp, Homo sapiens
tagtattctattttt

SEQ ID NO: 145070 - DNA, 15 bp, Homo sapiens
agtattctattttta

SEQ ID NO: 145071 - DNA, 15 bp, Homo sapiens
gtattctatttttat

SEQ ID NO: 145072 - DNA, 15 bp, Homo sapiens
tattctatttttata

SEQ ID NO: 145073 - DNA, 15 bp, Homo sapiens
attctatttttatac

SEQ ID NO: 145074 - DNA, 15 bp, Homo sapiens
ttctatttttatact

SEQ ID NO: 145075 - DNA, 15 bp, Homo sapiens
tctatttttatacta

SEQ ID NO: 145076 - DNA, 15 bp, Homo sapiens
ctatttttatactaa

SEQ ID NO: 145077 - DNA, 15 bp, Homo sapiens
tatttttatactaaa

SEQ ID NO: 145078 - DNA, 15 bp, Homo sapiens
atttttatactaaac

SEQ ID NO: 145079 - DNA, 15 bp, Homo sapiens
tttttatactaaact

SEQ ID NO: 145080 - DNA, 15 bp, Homo sapiens
ttttatactaaactt

SEQ ID NO: 145081 - DNA, 15 bp, Homo sapiens
tttatactaaacttt

SEQ ID NO: 145082 - DNA, 15 bp, Homo sapiens
ttatactaaactttt

SEQ ID NO: 145083 - DNA, 15 bp, Homo sapiens
tatactaaactttta

SEQ ID NO: 145084 - DNA, 15 bp, Homo sapiens
atactaaacttttaa

SEQ ID NO: 145085 - DNA, 15 bp, Homo sapiens
tactaaacttttaaa

SEQ ID NO: 145086 - DNA, 15 bp, Homo sapiens
actaaacttttaaaa

SEQ ID NO: 145087 - DNA, 15 bp, Homo sapiens
ctaaacttttaaaaa

SEQ ID NO: 145088 - DNA, 15 bp, Homo sapiens
taaacttttaaaaat

SEQ ID NO: 145089 - DNA, 15 bp, Homo sapiens
aaacttttaaaaatc

SEQ ID NO: 145090 - DNA, 15 bp, Homo sapiens
aacttttaaaaatcc

SEQ ID NO: 145091 - DNA, 15 bp, Homo sapiens
acttttaaaaatcca

SEQ ID NO: 145092 - DNA, 15 bp, Homo sapiens
cttttaaaaatccat

SEQ ID NO: 145093 - DNA, 15 bp, Homo sapiens
ttttaaaaatccatg

SEQ ID NO: 145094 - DNA, 15 bp, Homo sapiens
tttaaaaatccatgc

SEQ ID NO: 145095 - DNA, 15 bp, Homo sapiens
ttaaaaatccatgct

SEQ ID NO: 145096 - DNA, 15 bp, Homo sapiens
taaaaatccatgctt

SEQ ID NO: 145097 - DNA, 15 bp, Homo sapiens
aaaaatccatgcttc

SEQ ID NO: 145098 - DNA, 15 bp, Homo sapiens
aaaatccatgcttct

SEQ ID NO: 145099 - DNA, 15 bp, Homo sapiens
aaatccatgcttcta

SEQ ID NO: 145100 - DNA, 15 bp, Homo sapiens
aatccatgcttctag

SEQ ID NO: 145101 - DNA, 15 bp, Homo sapiens
atccatgcttctagt

SEQ ID NO: 145102 - DNA, 15 bp, Homo sapiens
tccatgcttctagtc

SEQ ID NO: 145103 - DNA, 15 bp, Homo sapiens
ccatgcttctagtct

SEQ ID NO: 145104 - DNA, 15 bp, Homo sapiens
catgcttctagtctt

SEQ ID NO: 145105 - DNA, 15 bp, Homo sapiens
atgcttctagtcttt

SEQ ID NO: 145106 - DNA, 15 bp, Homo sapiens
tgcttctagtctttg

SEQ ID NO: 145107 - DNA, 15 bp, Homo sapiens
gcttctagtctttgg

SEQ ID NO: 145108 - DNA, 15 bp, Homo sapiens
cttctagtctttggc

SEQ ID NO: 145109 - DNA, 15 bp, Homo sapiens
ttctagtctttggct

SEQ ID NO: 145110 - DNA, 15 bp, Homo sapiens
tctagtctttggctt

SEQ ID NO: 145111 - DNA, 15 bp, Homo sapiens
ctagtctttggctta

SEQ ID NO: 145112 - DNA, 15 bp, Homo sapiens
tagtctttggcttat

SEQ ID NO: 145113 - DNA, 15 bp, Homo sapiens
agtctttggcttatt

SEQ ID NO: 145114 - DNA, 15 bp, Homo sapiens
gtctttggcttattt

SEQ ID NO: 145115 - DNA, 15 bp, Homo sapiens
tctttggcttatttt

SEQ ID NO: 145116 - DNA, 15 bp, Homo sapiens
ctttggcttattttt

SEQ ID NO: 145117 - DNA, 15 bp, Homo sapiens
tttggcttatttttt

SEQ ID NO: 145118 - DNA, 15 bp, Homo sapiens
ttggcttattttttc

SEQ ID NO: 145119 - DNA, 15 bp, Homo sapiens
tggcttattttttca

SEQ ID NO: 145120 - DNA, 15 bp, Homo sapiens
ggcttattttttcag

SEQ ID NO: 145121 - DNA, 15 bp, Homo sapiens
gcttattttttcagg

SEQ ID NO: 145122 - DNA, 15 bp, Homo sapiens
cttattttttcaggt

SEQ ID NO: 145123 - DNA, 15 bp, Homo sapiens
ttattttttcaggtt

SEQ ID NO: 145124 - DNA, 15 bp, Homo sapiens
tattttttcaggtta

SEQ ID NO: 145125 - DNA, 15 bp, Homo sapiens
attttttcaggttat

SEQ ID NO: 145126 - DNA, 15 bp, Homo sapiens
ttttttcaggttatg

SEQ ID NO: 145127 - DNA, 15 bp, Homo sapiens
tttttcaggttatgg

SEQ ID NO: 145128 - DNA, 15 bp, Homo sapiens
ttttcaggttatggt

SEQ ID NO: 145129 - DNA, 15 bp, Homo sapiens
tttcaggttatggta

SEQ ID NO: 145130 - DNA, 15 bp, Homo sapiens
ttcaggttatggtat

SEQ ID NO: 145131 - DNA, 15 bp, Homo sapiens
tcaggttatggtatg

SEQ ID NO: 145132 - DNA, 15 bp, Homo sapiens
caggttatggtatgt

SEQ ID NO: 145133 - DNA, 15 bp, Homo sapiens
aggttatggtatgtt

SEQ ID NO: 145134 - DNA, 15 bp, Homo sapiens
ggttatggtatgttt

SEQ ID NO: 145135 - DNA, 15 bp, Homo sapiens
gttatggtatgtttt

SEQ ID NO: 145136 - DNA, 15 bp, Homo sapiens
ttatggtatgttttg

SEQ ID NO: 145137 - DNA, 15 bp, Homo sapiens
tatggtatgttttgg

SEQ ID NO: 145138 - DNA, 15 bp, Homo sapiens
atggtatgttttgga

SEQ ID NO: 145139 - DNA, 15 bp, Homo sapiens
tggtatgttttggat

SEQ ID NO: 145140 - DNA, 15 bp, Homo sapiens
ggtatgttttggatg

SEQ ID NO: 145141 - DNA, 15 bp, Homo sapiens
gtatgttttggatgc

SEQ ID NO: 145142 - DNA, 15 bp, Homo sapiens
tatgttttggatgca

SEQ ID NO: 145143 - DNA, 15 bp, Homo sapiens
atgttttggatgcac

SEQ ID NO: 145144 - DNA, 15 bp, Homo sapiens
tgttttggatgcaca

SEQ ID NO: 145145 - DNA, 15 bp, Homo sapiens
gttttggatgcacag

SEQ ID NO: 145146 - DNA, 15 bp, Homo sapiens
ttttggatgcacaga

SEQ ID NO: 145147 - DNA, 15 bp, Homo sapiens
tttggatgcacagaa

SEQ ID NO: 145148 - DNA, 15 bp, Homo sapiens
ttggatgcacagaaa

SEQ ID NO: 145149 - DNA, 15 bp, Homo sapiens
tggatgcacagaaaa

SEQ ID NO: 145150 - DNA, 15 bp, Homo sapiens
ggatgcacagaaaag

SEQ ID NO: 145151 - DNA, 15 bp, Homo sapiens
gatgcacagaaaagt

SEQ ID NO: 145152 - DNA, 15 bp, Homo sapiens
atgcacagaaaagta

SEQ ID NO: 145153 - DNA, 15 bp, Homo sapiens
tgcacagaaaagtaa

SEQ ID NO: 145154 - DNA, 15 bp, Homo sapiens
gcacagaaaagtaaa

SEQ ID NO: 145155 - DNA, 15 bp, Homo sapiens
cacagaaaagtaaaa

SEQ ID NO: 145156 - DNA, 15 bp, Homo sapiens
acagaaaagtaaaat

SEQ ID NO: 145157 - DNA, 15 bp, Homo sapiens
cagaaaagtaaaatt

SEQ ID NO: 145158 - DNA, 15 bp, Homo sapiens
agaaaagtaaaatta

SEQ ID NO: 145159 - DNA, 15 bp, Homo sapiens
gaaaagtaaaattaa

SEQ ID NO: 145160 - DNA, 15 bp, Homo sapiens
aaaagtaaaattaag

SEQ ID NO: 145161 - DNA, 15 bp, Homo sapiens
aaagtaaaattaagt

SEQ ID NO: 145162 - DNA, 15 bp, Homo sapiens
aagtaaaattaagtc

SEQ ID NO: 145163 - DNA, 15 bp, Homo sapiens
agtaaaattaagtca

SEQ ID NO: 145164 - DNA, 15 bp, Homo sapiens
gtaaaattaagtcat

SEQ ID NO: 145165 - DNA, 15 bp, Homo sapiens
taaaattaagtcatg

SEQ ID NO: 145166 - DNA, 15 bp, Homo sapiens
aaaattaagtcatga

SEQ ID NO: 145167 - DNA, 15 bp, Homo sapiens
aaattaagtcatgag

SEQ ID NO: 145168 - DNA, 15 bp, Homo sapiens
aattaagtcatgagc

SEQ ID NO: 145169 - DNA, 15 bp, Homo sapiens
attaagtcatgagca

SEQ ID NO: 145170 - DNA, 15 bp, Homo sapiens
ttaagtcatgagcaa

SEQ ID NO: 145171 - DNA, 15 bp, Homo sapiens
taagtcatgagcaaa

SEQ ID NO: 145172 - DNA, 15 bp, Homo sapiens
aagtcatgagcaaaa

SEQ ID NO: 145173 - DNA, 15 bp, Homo sapiens
agtcatgagcaaaat

SEQ ID NO: 145174 - DNA, 15 bp, Homo sapiens
gtcatgagcaaaata

SEQ ID NO: 145175 - DNA, 15 bp, Homo sapiens
tcatgagcaaaatat

SEQ ID NO: 145176 - DNA, 15 bp, Homo sapiens
catgagcaaaatatc

SEQ ID NO: 145177 - DNA, 15 bp, Homo sapiens
atgagcaaaatatct

SEQ ID NO: 145178 - DNA, 15 bp, Homo sapiens
tgagcaaaatatctg

SEQ ID NO: 145179 - DNA, 15 bp, Homo sapiens
gagcaaaatatctgg

SEQ ID NO: 145180 - DNA, 15 bp, Homo sapiens
agcaaaatatctgga

SEQ ID NO: 145181 - DNA, 15 bp, Homo sapiens
gcaaaatatctggat

SEQ ID NO: 145182 - DNA, 15 bp, Homo sapiens
caaaatatctggata

SEQ ID NO: 145183 - DNA, 15 bp, Homo sapiens
aaaatatctggataa

SEQ ID NO: 145184 - DNA, 15 bp, Homo sapiens
aaatatctggataat

SEQ ID NO: 145185 - DNA, 15 bp, Homo sapiens
aatatctggataatc

SEQ ID NO: 145186 - DNA, 15 bp, Homo sapiens
atatctggataatcc

SEQ ID NO: 145187 - DNA, 15 bp, Homo sapiens
tatctggataatcca

SEQ ID NO: 145188 - DNA, 15 bp, Homo sapiens
atctggataatccaa

SEQ ID NO: 145189 - DNA, 15 bp, Homo sapiens
tctggataatccaag

SEQ ID NO: 145190 - DNA, 15 bp, Homo sapiens
ctggataatccaagc

SEQ ID NO: 145191 - DNA, 15 bp, Homo sapiens
tggataatccaagct

SEQ ID NO: 145192 - DNA, 15 bp, Homo sapiens
ggataatccaagctt

SEQ ID NO: 145193 - DNA, 15 bp, Homo sapiens
gataatccaagcttt

SEQ ID NO: 145194 - DNA, 15 bp, Homo sapiens
ataatccaagcttta

SEQ ID NO: 145195 - DNA, 15 bp, Homo sapiens
taatccaagctttaa

SEQ ID NO: 145196 - DNA, 15 bp, Homo sapiens
aatccaagctttaaa

SEQ ID NO: 145197 - DNA, 15 bp, Homo sapiens
atccaagctttaaac

SEQ ID NO: 145198 - DNA, 15 bp, Homo sapiens
tccaagctttaaact

SEQ ID NO: 145199 - DNA, 15 bp, Homo sapiens
ccaagctttaaactt

SEQ ID NO: 145200 - DNA, 15 bp, Homo sapiens
caagctttaaacttg

SEQ ID NO: 145201 - DNA, 15 bp, Homo sapiens
aagctttaaacttga

SEQ ID NO: 145202 - DNA, 15 bp, Homo sapiens
agctttaaacttgat

SEQ ID NO: 145203 - DNA, 15 bp, Homo sapiens
gctttaaacttgatg

SEQ ID NO: 145204 - DNA, 15 bp, Homo sapiens
ctttaaacttgatgt

SEQ ID NO: 145205 - DNA, 15 bp, Homo sapiens
tttaaacttgatgta

SEQ ID NO: 145206 - DNA, 15 bp, Homo sapiens
ttaaacttgatgtag

SEQ ID NO: 145207 - DNA, 15 bp, Homo sapiens
taaacttgatgtaga

SEQ ID NO: 145208 - DNA, 15 bp, Homo sapiens
aaacttgatgtagaa

SEQ ID NO: 145209 - DNA, 15 bp, Homo sapiens
aacttgatgtagaat

SEQ ID NO: 145210 - DNA, 15 bp, Homo sapiens
acttgatgtagaatt

SEQ ID NO: 145211 - DNA, 15 bp, Homo sapiens
cttgatgtagaattt

SEQ ID NO: 145212 - DNA, 15 bp, Homo sapiens
ttgatgtagaatttg

SEQ ID NO: 145213 - DNA, 15 bp, Homo sapiens
tgatgtagaatttga

SEQ ID NO: 145214 - DNA, 15 bp, Homo sapiens
gatgtagaatttgaa

SEQ ID NO: 145215 - DNA, 15 bp, Homo sapiens
atgtagaatttgaat

SEQ ID NO: 145216 - DNA, 15 bp, Homo sapiens
tgtagaatttgaatc

SEQ ID NO: 145217 - DNA, 15 bp, Homo sapiens
gtagaatttgaatca

SEQ ID NO: 145218 - DNA, 15 bp, Homo sapiens
tagaatttgaatcat

SEQ ID NO: 145219 - DNA, 15 bp, Homo sapiens
agaatttgaatcatg

SEQ ID NO: 145220 - DNA, 15 bp, Homo sapiens
gaatttgaatcatgt

SEQ ID NO: 145221 - DNA, 15 bp, Homo sapiens
aatttgaatcatgtg

SEQ ID NO: 145222 - DNA, 15 bp, Homo sapiens
atttgaatcatgtgt

SEQ ID NO: 145223 - DNA, 15 bp, Homo sapiens
tttgaatcatgtgtg

SEQ ID NO: 145224 - DNA, 15 bp, Homo sapiens
ttgaatcatgtgtgt

SEQ ID NO: 145225 - DNA, 15 bp, Homo sapiens
tgaatcatgtgtgtt

SEQ ID NO: 145226 - DNA, 15 bp, Homo sapiens
gaatcatgtgtgttt

SEQ ID NO: 145227 - DNA, 15 bp, Homo sapiens
aatcatgtgtgtttt

SEQ ID NO: 145228 - DNA, 15 bp, Homo sapiens
atcatgtgtgttttg

SEQ ID NO: 145229 - DNA, 15 bp, Homo sapiens
tcatgtgtgttttgt

SEQ ID NO: 145230 - DNA, 15 bp, Homo sapiens
catgtgtgttttgtt

SEQ ID NO: 145231 - DNA, 15 bp, Homo sapiens
atgtgtgttttgtta

SEQ ID NO: 145232 - DNA, 15 bp, Homo sapiens
tgtgtgttttgttaa

SEQ ID NO: 145233 - DNA, 15 bp, Homo sapiens
gtgtgttttgttaac

SEQ ID NO: 145234 - DNA, 15 bp, Homo sapiens
tgtgttttgttaacc

SEQ ID NO: 145235 - DNA, 15 bp, Homo sapiens
gtgttttgttaaccc

SEQ ID NO: 145236 - DNA, 15 bp, Homo sapiens
tgttttgttaaccct

SEQ ID NO: 145237 - DNA, 15 bp, Homo sapiens
gttttgttaaccctg

SEQ ID NO: 145238 - DNA, 15 bp, Homo sapiens
ttttgttaaccctgt

SEQ ID NO: 145239 - DNA, 15 bp, Homo sapiens
tttgttaaccctgtg

SEQ ID NO: 145240 - DNA, 15 bp, Homo sapiens
ttgttaaccctgtga

SEQ ID NO: 145241 - DNA, 15 bp, Homo sapiens
tgttaaccctgtgat

SEQ ID NO: 145242 - DNA, 15 bp, Homo sapiens
gttaaccctgtgatg

SEQ ID NO: 145243 - DNA, 15 bp, Homo sapiens
ttaaccctgtgatgt

SEQ ID NO: 145244 - DNA, 15 bp, Homo sapiens
taaccctgtgatgtc

SEQ ID NO: 145245 - DNA, 15 bp, Homo sapiens
aaccctgtgatgtca

SEQ ID NO: 145246 - DNA, 15 bp, Homo sapiens
accctgtgatgtcaa

SEQ ID NO: 145247 - DNA, 15 bp, Homo sapiens
ccctgtgatgtcaat

SEQ ID NO: 145248 - DNA, 15 bp, Homo sapiens
cctgtgatgtcaatc

SEQ ID NO: 145249 - DNA, 15 bp, Homo sapiens
ctgtgatgtcaatcc

SEQ ID NO: 145250 - DNA, 15 bp, Homo sapiens
tgtgatgtcaatcca

SEQ ID NO: 145251 - DNA, 15 bp, Homo sapiens
gtgatgtcaatccat

SEQ ID NO: 145252 - DNA, 15 bp, Homo sapiens
tgatgtcaatccatg

SEQ ID NO: 145253 - DNA, 15 bp, Homo sapiens
gatgtcaatccatgc

SEQ ID NO: 145254 - DNA, 15 bp, Homo sapiens
atgtcaatccatgcc

SEQ ID NO: 145255 - DNA, 15 bp, Homo sapiens
tgtcaatccatgcct

SEQ ID NO: 145256 - DNA, 15 bp, Homo sapiens
gtcaatccatgcctg

SEQ ID NO: 145257 - DNA, 15 bp, Homo sapiens
tcaatccatgcctga

SEQ ID NO: 145258 - DNA, 15 bp, Homo sapiens
caatccatgcctgat

SEQ ID NO: 145259 - DNA, 15 bp, Homo sapiens
aatccatgcctgatt

SEQ ID NO: 145260 - DNA, 15 bp, Homo sapiens
atccatgcctgattg

SEQ ID NO: 145261 - DNA, 15 bp, Homo sapiens
tccatgcctgattgt

SEQ ID NO: 145262 - DNA, 15 bp, Homo sapiens
ccatgcctgattgtg

SEQ ID NO: 145263 - DNA, 15 bp, Homo sapiens
catgcctgattgtgt

SEQ ID NO: 145264 - DNA, 15 bp, Homo sapiens
atgcctgattgtgta

SEQ ID NO: 145265 - DNA, 15 bp, Homo sapiens
tgcctgattgtgtaa

SEQ ID NO: 145266 - DNA, 15 bp, Homo sapiens
gcctgattgtgtaac

SEQ ID NO: 145267 - DNA, 15 bp, Homo sapiens
cctgattgtgtaact

SEQ ID NO: 145268 - DNA, 15 bp, Homo sapiens
ctgattgtgtaactc

SEQ ID NO: 145269 - DNA, 15 bp, Homo sapiens
tgattgtgtaactcc

SEQ ID NO: 145270 - DNA, 15 bp, Homo sapiens
gattgtgtaactcca

SEQ ID NO: 145271 - DNA, 15 bp, Homo sapiens
attgtgtaactccaa

SEQ ID NO: 145272 - DNA, 15 bp, Homo sapiens
ttgtgtaactccaac

SEQ ID NO: 145273 - DNA, 15 bp, Homo sapiens
tgtgtaactccaacc

SEQ ID NO: 145274 - DNA, 15 bp, Homo sapiens
gtgtaactccaacca

SEQ ID NO: 145275 - DNA, 15 bp, Homo sapiens
tgtaactccaaccaa

SEQ ID NO: 145276 - DNA, 15 bp, Homo sapiens
gtaactccaaccaat

SEQ ID NO: 145277 - DNA, 15 bp, Homo sapiens
taactccaaccaata

SEQ ID NO: 145278 - DNA, 15 bp, Homo sapiens
aactccaaccaatat

SEQ ID NO: 145279 - DNA, 15 bp, Homo sapiens
actccaaccaatatt

SEQ ID NO: 145280 - DNA, 15 bp, Homo sapiens
ctccaaccaatattc

SEQ ID NO: 145281 - DNA, 15 bp, Homo sapiens
tccaaccaatattcc

SEQ ID NO: 145282 - DNA, 15 bp, Homo sapiens
ccaaccaatattcct

SEQ ID NO: 145283 - DNA, 15 bp, Homo sapiens
caaccaatattcctt

SEQ ID NO: 145284 - DNA, 15 bp, Homo sapiens
aaccaatattccttt

SEQ ID NO: 145285 - DNA, 15 bp, Homo sapiens
accaatattcctttg

SEQ ID NO: 145286 - DNA, 15 bp, Homo sapiens
ccaatattcctttga

SEQ ID NO: 145287 - DNA, 15 bp, Homo sapiens
caatattcctttgaa

SEQ ID NO: 145288 - DNA, 15 bp, Homo sapiens
aatattcctttgaaa

SEQ ID NO: 145289 - DNA, 15 bp, Homo sapiens
atattcctttgaaaa

SEQ ID NO: 145290 - DNA, 15 bp, Homo sapiens
tattcctttgaaaat

SEQ ID NO: 145291 - DNA, 15 bp, Homo sapiens
attcctttgaaaatg

SEQ ID NO: 145292 - DNA, 15 bp, Homo sapiens
ttcctttgaaaatgg

SEQ ID NO: 145293 - DNA, 15 bp, Homo sapiens
tcctttgaaaatgga

SEQ ID NO: 145294 - DNA, 15 bp, Homo sapiens
cctttgaaaatggaa

SEQ ID NO: 145295 - DNA, 15 bp, Homo sapiens
ctttgaaaatggaaa

SEQ ID NO: 145296 - DNA, 15 bp, Homo sapiens
tttgaaaatggaaat

SEQ ID NO: 145297 - DNA, 15 bp, Homo sapiens
ttgaaaatggaaatt

SEQ ID NO: 145298 - DNA, 15 bp, Homo sapiens
tgaaaatggaaattt

SEQ ID NO: 145299 - DNA, 15 bp, Homo sapiens
gaaaatggaaatttg

SEQ ID NO: 145300 - DNA, 15 bp, Homo sapiens
aaaatggaaatttgt

SEQ ID NO: 145301 - DNA, 15 bp, Homo sapiens
aaatggaaatttgtt

SEQ ID NO: 145302 - DNA, 15 bp, Homo sapiens
aatggaaatttgttt

SEQ ID NO: 145303 - DNA, 15 bp, Homo sapiens
atggaaatttgttta

SEQ ID NO: 145304 - DNA, 15 bp, Homo sapiens
tggaaatttgtttat

SEQ ID NO: 145305 - DNA, 15 bp, Homo sapiens
ggaaatttgtttata

SEQ ID NO: 145306 - DNA, 15 bp, Homo sapiens
gaaatttgtttatat

SEQ ID NO: 145307 - DNA, 15 bp, Homo sapiens
aaatttgtttatatt

SEQ ID NO: 145308 - DNA, 15 bp, Homo sapiens
aatttgtttatattg

SEQ ID NO: 145309 - DNA, 15 bp, Homo sapiens
atttgtttatattga

SEQ ID NO: 145310 - DNA, 15 bp, Homo sapiens
tttgtttatattgac

SEQ ID NO: 145311 - DNA, 15 bp, Homo sapiens
ttgtttatattgact

SEQ ID NO: 145312 - DNA, 15 bp, Homo sapiens
tgtttatattgacta

SEQ ID NO: 145313 - DNA, 15 bp, Homo sapiens
gtttatattgactac

SEQ ID NO: 145314 - DNA, 15 bp, Homo sapiens
tttatattgactaca

SEQ ID NO: 145315 - DNA, 15 bp, Homo sapiens
ttatattgactacag

SEQ ID NO: 145316 - DNA, 15 bp, Homo sapiens
tatattgactacaga

SEQ ID NO: 145317 - DNA, 15 bp, Homo sapiens
atattgactacagat

SEQ ID NO: 145318 - DNA, 15 bp, Homo sapiens
tattgactacagatt

SEQ ID NO: 145319 - DNA, 15 bp, Homo sapiens
attgactacagattg

SEQ ID NO: 145320 - DNA, 15 bp, Homo sapiens
ttgactacagattgc

SEQ ID NO: 145321 - DNA, 15 bp, Homo sapiens
tgactacagattgcc

SEQ ID NO: 145322 - DNA, 15 bp, Homo sapiens
gactacagattgcca

SEQ ID NO: 145323 - DNA, 15 bp, Homo sapiens
actacagattgccaa

SEQ ID NO: 145324 - DNA, 15 bp, Homo sapiens
ctacagattgccaat

SEQ ID NO: 145325 - DNA, 15 bp, Homo sapiens
tacagattgccaata

SEQ ID NO: 145326 - DNA, 15 bp, Homo sapiens
acagattgccaatat

SEQ ID NO: 145327 - DNA, 15 bp, Homo sapiens
cagattgccaatatt

SEQ ID NO: 145328 - DNA, 15 bp, Homo sapiens
agattgccaatatta

SEQ ID NO: 145329 - DNA, 15 bp, Homo sapiens
gattgccaatattat

SEQ ID NO: 145330 - DNA, 15 bp, Homo sapiens
attgccaatattatt

SEQ ID NO: 145331 - DNA, 15 bp, Homo sapiens
ttgccaatattatta

SEQ ID NO: 145332 - DNA, 15 bp, Homo sapiens
tgccaatattattag

SEQ ID NO: 145333 - DNA, 15 bp, Homo sapiens
gccaatattattagt

SEQ ID NO: 145334 - DNA, 15 bp, Homo sapiens
ccaatattattagta

SEQ ID NO: 145335 - DNA, 15 bp, Homo sapiens
caatattattagtaa

SEQ ID NO: 145336 - DNA, 15 bp, Homo sapiens
aatattattagtaaa

SEQ ID NO: 145337 - DNA, 15 bp, Homo sapiens
atattattagtaaat

SEQ ID NO: 145338 - DNA, 15 bp, Homo sapiens
tattattagtaaatg

SEQ ID NO: 145339 - DNA, 15 bp, Homo sapiens
attattagtaaatgc

SEQ ID NO: 145340 - DNA, 15 bp, Homo sapiens
ttattagtaaatgct

SEQ ID NO: 145341 - DNA, 15 bp, Homo sapiens
tattagtaaatgctg

SEQ ID NO: 145342 - DNA, 15 bp, Homo sapiens
attagtaaatgctga

SEQ ID NO: 145343 - DNA, 15 bp, Homo sapiens
ttagtaaatgctgag

SEQ ID NO: 145344 - DNA, 15 bp, Homo sapiens
tagtaaatgctgagc

SEQ ID NO: 145345 - DNA, 15 bp, Homo sapiens
agtaaatgctgagca

SEQ ID NO: 145346 - DNA, 15 bp, Homo sapiens
gtaaatgctgagcac

SEQ ID NO: 145347 - DNA, 15 bp, Homo sapiens
taaatgctgagcact

SEQ ID NO: 145348 - DNA, 15 bp, Homo sapiens
aaatgctgagcactt

SEQ ID NO: 145349 - DNA, 15 bp, Homo sapiens
aatgctgagcactta

SEQ ID NO: 145350 - DNA, 15 bp, Homo sapiens
atgctgagcacttaa

SEQ ID NO: 145351 - DNA, 15 bp, Homo sapiens
tgctgagcacttaat

SEQ ID NO: 145352 - DNA, 15 bp, Homo sapiens
gctgagcacttaatc

SEQ ID NO: 145353 - DNA, 15 bp, Homo sapiens
ctgagcacttaatct

SEQ ID NO: 145354 - DNA, 15 bp, Homo sapiens
tgagcacttaatctc

SEQ ID NO: 145355 - DNA, 15 bp, Homo sapiens
gagcacttaatctcg

SEQ ID NO: 145356 - DNA, 15 bp, Homo sapiens
agcacttaatctcga

SEQ ID NO: 145357 - DNA, 15 bp, Homo sapiens
gcacttaatctcgaa

SEQ ID NO: 145358 - DNA, 15 bp, Homo sapiens
cacttaatctcgaat

SEQ ID NO: 145359 - DNA, 15 bp, Homo sapiens
acttaatctcgaata

SEQ ID NO: 145360 - DNA, 15 bp, Homo sapiens
cttaatctcgaataa

SEQ ID NO: 145361 - DNA, 15 bp, Homo sapiens
ttaatctcgaataaa

SEQ ID NO: 145362 - DNA, 15 bp, Homo sapiens
taatctcgaataaag

SEQ ID NO: 145363 - DNA, 15 bp, Homo sapiens
aatctcgaataaaga

SEQ ID NO: 145364 - DNA, 15 bp, Homo sapiens
atctcgaataaagaa

SEQ ID NO: 145365 - DNA, 15 bp, Homo sapiens
tctcgaataaagaac

SEQ ID NO: 145366 - DNA, 15 bp, Homo sapiens
ctcgaataaagaact

SEQ ID NO: 145367 - DNA, 15 bp, Homo sapiens
tcgaataaagaacta

SEQ ID NO: 145368 - DNA, 15 bp, Homo sapiens
cgaataaagaactag

SEQ ID NO: 145369 - DNA, 15 bp, Homo sapiens
gaataaagaactagt

SEQ ID NO: 145370 - DNA, 15 bp, Homo sapiens
aataaagaactagtt

SEQ ID NO: 145371 - DNA, 15 bp, Homo sapiens
ataaagaactagttt

SEQ ID NO: 145372 - DNA, 15 bp, Homo sapiens
taaagaactagttta

SEQ ID NO: 145373 - DNA, 15 bp, Homo sapiens
aaagaactagtttaa

SEQ ID NO: 145374 - DNA, 15 bp, Homo sapiens
aagaactagtttaaa

SEQ ID NO: 145375 - DNA, 15 bp, Homo sapiens
agaactagtttaaaa

SEQ ID NO: 145376 - DNA, 15 bp, Homo sapiens
gaactagtttaaaaa

SEQ ID NO: 145377 - DNA, 15 bp, Homo sapiens
aactagtttaaaaat

SEQ ID NO: 145378 - DNA, 15 bp, Homo sapiens
actagtttaaaaatg

SEQ ID NO: 145379 - DNA, 15 bp, Homo sapiens
ctagtttaaaaatga

SEQ ID NO: 145380 - DNA, 15 bp, Homo sapiens
tagtttaaaaatgat

SEQ ID NO: 145381 - DNA, 15 bp, Homo sapiens
agtttaaaaatgatt

SEQ ID NO: 145382 - DNA, 15 bp, Homo sapiens
gtttaaaaatgattc

SEQ ID NO: 145383 - DNA, 15 bp, Homo sapiens
tttaaaaatgattct

SEQ ID NO: 145384 - DNA, 15 bp, Homo sapiens
ttaaaaatgattcta

SEQ ID NO: 145385 - DNA, 15 bp, Homo sapiens
taaaaatgattctaa

SEQ ID NO: 145386 - DNA, 15 bp, Homo sapiens
aaaaatgattctaac

SEQ ID NO: 145387 - DNA, 15 bp, Homo sapiens
aaaatgattctaaca

SEQ ID NO: 145388 - DNA, 15 bp, Homo sapiens
aaatgattctaacaa

SEQ ID NO: 145389 - DNA, 15 bp, Homo sapiens
aatgattctaacaat

SEQ ID NO: 145390 - DNA, 15 bp, Homo sapiens
atgattctaacaatg

SEQ ID NO: 145391 - DNA, 15 bp, Homo sapiens
tgattctaacaatgg

SEQ ID NO: 145392 - DNA, 15 bp, Homo sapiens
gattctaacaatggc

SEQ ID NO: 145393 - DNA, 15 bp, Homo sapiens
attctaacaatggca

SEQ ID NO: 145394 - DNA, 15 bp, Homo sapiens
ttctaacaatggcat

SEQ ID NO: 145395 - DNA, 15 bp, Homo sapiens
tctaacaatggcatt

SEQ ID NO: 145396 - DNA, 15 bp, Homo sapiens
ctaacaatggcattg

SEQ ID NO: 145397 - DNA, 15 bp, Homo sapiens
taacaatggcattga

SEQ ID NO: 145398 - DNA, 15 bp, Homo sapiens
aacaatggcattgac

SEQ ID NO: 145399 - DNA, 15 bp, Homo sapiens
acaatggcattgact

SEQ ID NO: 145400 - DNA, 15 bp, Homo sapiens
caatggcattgactg

SEQ ID NO: 145401 - DNA, 15 bp, Homo sapiens
aatggcattgactgt

SEQ ID NO: 145402 - DNA, 15 bp, Homo sapiens
atggcattgactgtt

SEQ ID NO: 145403 - DNA, 15 bp, Homo sapiens
tggcattgactgttc

SEQ ID NO: 145404 - DNA, 15 bp, Homo sapiens
ggcattgactgttct

SEQ ID NO: 145405 - DNA, 15 bp, Homo sapiens
gcattgactgttcta

SEQ ID NO: 145406 - DNA, 15 bp, Homo sapiens
cattgactgttctac

SEQ ID NO: 145407 - DNA, 15 bp, Homo sapiens
attgactgttctacc

SEQ ID NO: 145408 - DNA, 15 bp, Homo sapiens
ttgactgttctacct

SEQ ID NO: 145409 - DNA, 15 bp, Homo sapiens
tgactgttctacctt

SEQ ID NO: 145410 - DNA, 15 bp, Homo sapiens
gactgttctacctta

SEQ ID NO: 145411 - DNA, 15 bp, Homo sapiens
actgttctaccttat

SEQ ID NO: 145412 - DNA, 15 bp, Homo sapiens
ctgttctaccttatt

SEQ ID NO: 145413 - DNA, 15 bp, Homo sapiens
tgttctaccttatta

SEQ ID NO: 145414 - DNA, 15 bp, Homo sapiens
gttctaccttattac

SEQ ID NO: 145415 - DNA, 15 bp, Homo sapiens
ttctaccttattact

SEQ ID NO: 145416 - DNA, 15 bp, Homo sapiens
tctaccttattactc

SEQ ID NO: 145417 - DNA, 15 bp, Homo sapiens
ctaccttattactca

SEQ ID NO: 145418 - DNA, 15 bp, Homo sapiens
taccttattactcat

SEQ ID NO: 145419 - DNA, 15 bp, Homo sapiens
accttattactcatg

SEQ ID NO: 145420 - DNA, 15 bp, Homo sapiens
ccttattactcatgg

SEQ ID NO: 145421 - DNA, 15 bp, Homo sapiens
cttattactcatggg

SEQ ID NO: 145422 - DNA, 15 bp, Homo sapiens
ttattactcatgggt

SEQ ID NO: 145423 - DNA, 15 bp, Homo sapiens
tattactcatgggtg

SEQ ID NO: 145424 - DNA, 15 bp, Homo sapiens
attactcatgggtgg

SEQ ID NO: 145425 - DNA, 15 bp, Homo sapiens
ttactcatgggtggg

SEQ ID NO: 145426 - DNA, 15 bp, Homo sapiens
tactcatgggtgggt

SEQ ID NO: 145427 - DNA, 15 bp, Homo sapiens
actcatgggtgggtt

SEQ ID NO: 145428 - DNA, 15 bp, Homo sapiens
ctcatgggtgggttc

SEQ ID NO: 145429 - DNA, 15 bp, Homo sapiens
tcatgggtgggttca

SEQ ID NO: 145430 - DNA, 15 bp, Homo sapiens
catgggtgggttcag

SEQ ID NO: 145431 - DNA, 15 bp, Homo sapiens
atgggtgggttcagc

SEQ ID NO: 145432 - DNA, 15 bp, Homo sapiens
tgggtgggttcagcc

SEQ ID NO: 145433 - DNA, 15 bp, Homo sapiens
gggtgggttcagcca

SEQ ID NO: 145434 - DNA, 15 bp, Homo sapiens
taagaagttgaaaac

SEQ ID NO: 145435 - DNA, 15 bp, Homo sapiens
aagaagttgaaaacc

SEQ ID NO: 145436 - DNA, 15 bp, Homo sapiens
agaagttgaaaaccc

SEQ ID NO: 145437 - DNA, 15 bp, Homo sapiens
gaagttgaaaaccct

SEQ ID NO: 145438 - DNA, 15 bp, Homo sapiens
aagttgaaaaccctg

SEQ ID NO: 145439 - DNA, 15 bp, Homo sapiens
agttgaaaaccctgt

SEQ ID NO: 145440 - DNA, 15 bp, Homo sapiens
gttgaaaaccctgtt

SEQ ID NO: 145441 - DNA, 15 bp, Homo sapiens
ttgaaaaccctgttt

SEQ ID NO: 145442 - DNA, 15 bp, Homo sapiens
tgaaaaccctgtttg

SEQ ID NO: 145443 - DNA, 15 bp, Homo sapiens
gaaaaccctgtttgc

SEQ ID NO: 145444 - DNA, 15 bp, Homo sapiens
aaaaccctgtttgca

SEQ ID NO: 145445 - DNA, 15 bp, Homo sapiens
aaaccctgtttgcag

SEQ ID NO: 145446 - DNA, 15 bp, Homo sapiens
aaccctgtttgcaga

SEQ ID NO: 145447 - DNA, 15 bp, Homo sapiens
accctgtttgcagac

SEQ ID NO: 145448 - DNA, 15 bp, Homo sapiens
ccctgtttgcagaca

SEQ ID NO: 145449 - DNA, 15 bp, Homo sapiens
cctgtttgcagacaa

SEQ ID NO: 145450 - DNA, 15 bp, Homo sapiens
ctgtttgcagacaaa

SEQ ID NO: 145451 - DNA, 15 bp, Homo sapiens
tgtttgcagacaaaa

SEQ ID NO: 145452 - DNA, 15 bp, Homo sapiens
gtttgcagacaaaag

SEQ ID NO: 145453 - DNA, 15 bp, Homo sapiens
tttgcagacaaaagc

SEQ ID NO: 145454 - DNA, 15 bp, Homo sapiens
ttgcagacaaaagcc

SEQ ID NO: 145455 - DNA, 15 bp, Homo sapiens
tgcagacaaaagccc

SEQ ID NO: 145456 - DNA, 15 bp, Homo sapiens
gcagacaaaagccct

SEQ ID NO: 145457 - DNA, 15 bp, Homo sapiens
cagacaaaagccctc

SEQ ID NO: 145458 - DNA, 15 bp, Homo sapiens
agacaaaagccctcc

SEQ ID NO: 145459 - DNA, 15 bp, Homo sapiens
gacaaaagccctcca

SEQ ID NO: 145460 - DNA, 15 bp, Homo sapiens
acaaaagccctccag

SEQ ID NO: 145461 - DNA, 15 bp, Homo sapiens
caaaagccctccagt

SEQ ID NO: 145462 - DNA, 15 bp, Homo sapiens
aaaagccctccagtt

SEQ ID NO: 145463 - DNA, 15 bp, Homo sapiens
aaagccctccagttt

SEQ ID NO: 145464 - DNA, 15 bp, Homo sapiens
aagccctccagtttt

SEQ ID NO: 145465 - DNA, 15 bp, Homo sapiens
agccctccagttttg

SEQ ID NO: 145466 - DNA, 15 bp, Homo sapiens
gccctccagttttgg

SEQ ID NO: 145467 - DNA, 15 bp, Homo sapiens
ccctccagttttggc

SEQ ID NO: 145468 - DNA, 15 bp, Homo sapiens
cctccagttttggca

SEQ ID NO: 145469 - DNA, 15 bp, Homo sapiens
ctccagttttggcag

SEQ ID NO: 145470 - DNA, 15 bp, Homo sapiens
tccagttttggcagt

SEQ ID NO: 145471 - DNA, 15 bp, Homo sapiens
ccagttttggcagta

SEQ ID NO: 145472 - DNA, 15 bp, Homo sapiens
cagttttggcagtaa

SEQ ID NO: 145473 - DNA, 15 bp, Homo sapiens
agttttggcagtaaa

SEQ ID NO: 145474 - DNA, 15 bp, Homo sapiens
gttttggcagtaaac

SEQ ID NO: 145475 - DNA, 15 bp, Homo sapiens
ttttggcagtaaact

SEQ ID NO: 145476 - DNA, 15 bp, Homo sapiens
tttggcagtaaactt

SEQ ID NO: 145477 - DNA, 15 bp, Homo sapiens
ttggcagtaaacttt

SEQ ID NO: 145478 - DNA, 15 bp, Homo sapiens
tggcagtaaactttc

SEQ ID NO: 145479 - DNA, 15 bp, Homo sapiens
ggcagtaaactttca

SEQ ID NO: 145480 - DNA, 15 bp, Homo sapiens
gcagtaaactttcat

SEQ ID NO: 145481 - DNA, 15 bp, Homo sapiens
cagtaaactttcatg

SEQ ID NO: 145482 - DNA, 15 bp, Homo sapiens
agtaaactttcatgc

SEQ ID NO: 145483 - DNA, 15 bp, Homo sapiens
gtaaactttcatgca

SEQ ID NO: 145484 - DNA, 15 bp, Homo sapiens
taaactttcatgcaa

SEQ ID NO: 145485 - DNA, 15 bp, Homo sapiens
aaactttcatgcaag

SEQ ID NO: 145486 - DNA, 15 bp, Homo sapiens
aactttcatgcaagg

SEQ ID NO: 145487 - DNA, 15 bp, Homo sapiens
actttcatgcaaggg

SEQ ID NO: 145488 - DNA, 15 bp, Homo sapiens
ctttcatgcaaggga

SEQ ID NO: 145489 - DNA, 15 bp, Homo sapiens
tttcatgcaagggaa

SEQ ID NO: 145490 - DNA, 15 bp, Homo sapiens
ttcatgcaagggaag

SEQ ID NO: 145491 - DNA, 15 bp, Homo sapiens
tcatgcaagggaaga

SEQ ID NO: 145492 - DNA, 15 bp, Homo sapiens
catgcaagggaagaa

SEQ ID NO: 145493 - DNA, 15 bp, Homo sapiens
atgcaagggaagaaa

SEQ ID NO: 145494 - DNA, 15 bp, Homo sapiens
tgcaagggaagaaaa

SEQ ID NO: 145495 - DNA, 15 bp, Homo sapiens
gcaagggaagaaaaa

SEQ ID NO: 145496 - DNA, 15 bp, Homo sapiens
caagggaagaaaaag

SEQ ID NO: 145497 - DNA, 15 bp, Homo sapiens
aagggaagaaaaagg

SEQ ID NO: 145498 - DNA, 15 bp, Homo sapiens
agggaagaaaaaggc

SEQ ID NO: 145499 - DNA, 15 bp, Homo sapiens
gggaagaaaaaggca

SEQ ID NO: 145500 - DNA, 15 bp, Homo sapiens
ggaagaaaaaggcag

SEQ ID NO: 145501 - DNA, 15 bp, Homo sapiens
gaagaaaaaggcagg

SEQ ID NO: 145502 - DNA, 15 bp, Homo sapiens
aagaaaaaggcaggg

SEQ ID NO: 145503 - DNA, 15 bp, Homo sapiens
agaaaaaggcagggg

SEQ ID NO: 145504 - DNA, 15 bp, Homo sapiens
gaaaaaggcagggga

SEQ ID NO: 145505 - DNA, 15 bp, Homo sapiens
aaaaaggcaggggat

SEQ ID NO: 145506 - DNA, 15 bp, Homo sapiens
aaaaggcaggggatg

SEQ ID NO: 145507 - DNA, 15 bp, Homo sapiens
aaaggcaggggatga

SEQ ID NO: 145508 - DNA, 15 bp, Homo sapiens
aaggcaggggatgac

SEQ ID NO: 145509 - DNA, 15 bp, Homo sapiens
aggcaggggatgaca

SEQ ID NO: 145510 - DNA, 15 bp, Homo sapiens
ggcaggggatgacat

SEQ ID NO: 145511 - DNA, 15 bp, Homo sapiens
gcaggggatgacatt

SEQ ID NO: 145512 - DNA, 15 bp, Homo sapiens
caggggatgacattg

SEQ ID NO: 145513 - DNA, 15 bp, Homo sapiens
aggggatgacattgt

SEQ ID NO: 145514 - DNA, 15 bp, Homo sapiens
ggggatgacattgtt

SEQ ID NO: 145515 - DNA, 15 bp, Homo sapiens
gggatgacattgttg

SEQ ID NO: 145516 - DNA, 15 bp, Homo sapiens
ggatgacattgttga

SEQ ID NO: 145517 - DNA, 15 bp, Homo sapiens
gatgacattgttgac

SEQ ID NO: 145518 - DNA, 15 bp, Homo sapiens
atgacattgttgaca

SEQ ID NO: 145519 - DNA, 15 bp, Homo sapiens
tgacattgttgacaa

SEQ ID NO: 145520 - DNA, 15 bp, Homo sapiens
gacattgttgacaat

SEQ ID NO: 145521 - DNA, 15 bp, Homo sapiens
acattgttgacaatt

SEQ ID NO: 145522 - DNA, 15 bp, Homo sapiens
cattgttgacaattg

SEQ ID NO: 145523 - DNA, 15 bp, Homo sapiens
attgttgacaattgt

SEQ ID NO: 145524 - DNA, 15 bp, Homo sapiens
ttgttgacaattgtg

SEQ ID NO: 145525 - DNA, 15 bp, Homo sapiens
tgttgacaattgtga

SEQ ID NO: 145526 - DNA, 15 bp, Homo sapiens
gttgacaattgtgag

SEQ ID NO: 145527 - DNA, 15 bp, Homo sapiens
ttgacaattgtgagg

SEQ ID NO: 145528 - DNA, 15 bp, Homo sapiens
tgacaattgtgagga

SEQ ID NO: 145529 - DNA, 15 bp, Homo sapiens
gacaattgtgaggaa

SEQ ID NO: 145530 - DNA, 15 bp, Homo sapiens
acaattgtgaggaat

SEQ ID NO: 145531 - DNA, 15 bp, Homo sapiens
caattgtgaggaatt

SEQ ID NO: 145532 - DNA, 15 bp, Homo sapiens
aattgtgaggaatta

SEQ ID NO: 145533 - DNA, 15 bp, Homo sapiens
attgtgaggaattac

SEQ ID NO: 145534 - DNA, 15 bp, Homo sapiens
ttgtgaggaattacc

SEQ ID NO: 145535 - DNA, 15 bp, Homo sapiens
tgtgaggaattacca

SEQ ID NO: 145536 - DNA, 15 bp, Homo sapiens
gtgaggaattaccat

SEQ ID NO: 145537 - DNA, 15 bp, Homo sapiens
tgaggaattaccatg

SEQ ID NO: 145538 - DNA, 15 bp, Homo sapiens
gaggaattaccatgt

SEQ ID NO: 145539 - DNA, 15 bp, Homo sapiens
aggaattaccatgtg

SEQ ID NO: 145540 - DNA, 15 bp, Homo sapiens
ggaattaccatgtgc

SEQ ID NO: 145541 - DNA, 15 bp, Homo sapiens
gaattaccatgtgcc

SEQ ID NO: 145542 - DNA, 15 bp, Homo sapiens
aattaccatgtgcca

SEQ ID NO: 145543 - DNA, 15 bp, Homo sapiens
attaccatgtgccag

SEQ ID NO: 145544 - DNA, 15 bp, Homo sapiens
ttaccatgtgccagg

SEQ ID NO: 145545 - DNA, 15 bp, Homo sapiens
taccatgtgccaggc

SEQ ID NO: 145546 - DNA, 15 bp, Homo sapiens
accatgtgccaggca

SEQ ID NO: 145547 - DNA, 15 bp, Homo sapiens
ccatgtgccaggcac

SEQ ID NO: 145548 - DNA, 15 bp, Homo sapiens
catgtgccaggcact

SEQ ID NO: 145549 - DNA, 15 bp, Homo sapiens
atgtgccaggcactg

SEQ ID NO: 145550 - DNA, 15 bp, Homo sapiens
tgtgccaggcactgt

SEQ ID NO: 145551 - DNA, 15 bp, Homo sapiens
gtgccaggcactgtg

SEQ ID NO: 145552 - DNA, 15 bp, Homo sapiens
tgccaggcactgtgc

SEQ ID NO: 145553 - DNA, 15 bp, Homo sapiens
gccaggcactgtgcg

SEQ ID NO: 145554 - DNA, 15 bp, Homo sapiens
ccaggcactgtgcga

SEQ ID NO: 145555 - DNA, 15 bp, Homo sapiens
caggcactgtgcgag

SEQ ID NO: 145556 - DNA, 15 bp, Homo sapiens
aggcactgtgcgagg

SEQ ID NO: 145557 - DNA, 15 bp, Homo sapiens
ggcactgtgcgaggg

SEQ ID NO: 145558 - DNA, 15 bp, Homo sapiens
gcactgtgcgagggg

SEQ ID NO: 145559 - DNA, 15 bp, Homo sapiens
cactgtgcgaggggc

SEQ ID NO: 145560 - DNA, 15 bp, Homo sapiens
actgtgcgaggggct

SEQ ID NO: 145561 - DNA, 15 bp, Homo sapiens
ctgtgcgaggggctt

SEQ ID NO: 145562 - DNA, 15 bp, Homo sapiens
tgtgcgaggggcttt

SEQ ID NO: 145563 - DNA, 15 bp, Homo sapiens
gtgcgaggggctttg

SEQ ID NO: 145564 - DNA, 15 bp, Homo sapiens
tgcgaggggctttgt

SEQ ID NO: 145565 - DNA, 15 bp, Homo sapiens
gcgaggggctttgta

SEQ ID NO: 145566 - DNA, 15 bp, Homo sapiens
cgaggggctttgtac

SEQ ID NO: 145567 - DNA, 15 bp, Homo sapiens
gaggggctttgtaca

SEQ ID NO: 145568 - DNA, 15 bp, Homo sapiens
aggggctttgtacat

SEQ ID NO: 145569 - DNA, 15 bp, Homo sapiens
ggggctttgtacata

SEQ ID NO: 145570 - DNA, 15 bp, Homo sapiens
gggctttgtacatat

SEQ ID NO: 145571 - DNA, 15 bp, Homo sapiens
ggctttgtacatatc

SEQ ID NO: 145572 - DNA, 15 bp, Homo sapiens
gctttgtacatatcc

SEQ ID NO: 145573 - DNA, 15 bp, Homo sapiens
ctttgtacatatcct

SEQ ID NO: 145574 - DNA, 15 bp, Homo sapiens
tttgtacatatcctc

SEQ ID NO: 145575 - DNA, 15 bp, Homo sapiens
ttgtacatatcctct

SEQ ID NO: 145576 - DNA, 15 bp, Homo sapiens
tgtacatatcctcta

SEQ ID NO: 145577 - DNA, 15 bp, Homo sapiens
gtacatatcctctag

SEQ ID NO: 145578 - DNA, 15 bp, Homo sapiens
tacatatcctctagt

SEQ ID NO: 145579 - DNA, 15 bp, Homo sapiens
acatatcctctagtt

SEQ ID NO: 145580 - DNA, 15 bp, Homo sapiens
catatcctctagttt

SEQ ID NO: 145581 - DNA, 15 bp, Homo sapiens
atatcctctagtttt

SEQ ID NO: 145582 - DNA, 15 bp, Homo sapiens
tatcctctagtttta

SEQ ID NO: 145583 - DNA, 15 bp, Homo sapiens
atcctctagttttag

SEQ ID NO: 145584 - DNA, 15 bp, Homo sapiens
tcctctagttttagt

SEQ ID NO: 145585 - DNA, 15 bp, Homo sapiens
cctctagttttagtg

SEQ ID NO: 145586 - DNA, 15 bp, Homo sapiens
ctctagttttagtgc

SEQ ID NO: 145587 - DNA, 15 bp, Homo sapiens
tctagttttagtgct

SEQ ID NO: 145588 - DNA, 15 bp, Homo sapiens
ctagttttagtgctt

SEQ ID NO: 145589 - DNA, 15 bp, Homo sapiens
tagttttagtgctta

SEQ ID NO: 145590 - DNA, 15 bp, Homo sapiens
agttttagtgcttat

SEQ ID NO: 145591 - DNA, 15 bp, Homo sapiens
gttttagtgcttata

SEQ ID NO: 145592 - DNA, 15 bp, Homo sapiens
ttttagtgcttataa

SEQ ID NO: 145593 - DNA, 15 bp, Homo sapiens
tttagtgcttataaa

SEQ ID NO: 145594 - DNA, 15 bp, Homo sapiens
ttagtgcttataaaa

SEQ ID NO: 145595 - DNA, 15 bp, Homo sapiens
tagtgcttataaaaa

SEQ ID NO: 145596 - DNA, 15 bp, Homo sapiens
agtgcttataaaaac

SEQ ID NO: 145597 - DNA, 15 bp, Homo sapiens
gtgcttataaaaact

SEQ ID NO: 145598 - DNA, 15 bp, Homo sapiens
tgcttataaaaactc

SEQ ID NO: 145599 - DNA, 15 bp, Homo sapiens
gcttataaaaactct

SEQ ID NO: 145600 - DNA, 15 bp, Homo sapiens
cttataaaaactctg

SEQ ID NO: 145601 - DNA, 15 bp, Homo sapiens
ttataaaaactctgt

SEQ ID NO: 145602 - DNA, 15 bp, Homo sapiens
tataaaaactctgtg

SEQ ID NO: 145603 - DNA, 15 bp, Homo sapiens
ataaaaactctgtga

SEQ ID NO: 145604 - DNA, 15 bp, Homo sapiens
taaaaactctgtgat

SEQ ID NO: 145605 - DNA, 15 bp, Homo sapiens
aaaaactctgtgata

SEQ ID NO: 145606 - DNA, 15 bp, Homo sapiens
aaaactctgtgatat

SEQ ID NO: 145607 - DNA, 15 bp, Homo sapiens
aaactctgtgatatg

SEQ ID NO: 145608 - DNA, 15 bp, Homo sapiens
aactctgtgatatgt

SEQ ID NO: 145609 - DNA, 15 bp, Homo sapiens
actctgtgatatgtg

SEQ ID NO: 145610 - DNA, 15 bp, Homo sapiens
ctctgtgatatgtgc

SEQ ID NO: 145611 - DNA, 15 bp, Homo sapiens
tctgtgatatgtgca

SEQ ID NO: 145612 - DNA, 15 bp, Homo sapiens
ctgtgatatgtgcac

SEQ ID NO: 145613 - DNA, 15 bp, Homo sapiens
tgtgatatgtgcaca

SEQ ID NO: 145614 - DNA, 15 bp, Homo sapiens
gtgatatgtgcacag

SEQ ID NO: 145615 - DNA, 15 bp, Homo sapiens
tgatatgtgcacagc

SEQ ID NO: 145616 - DNA, 15 bp, Homo sapiens
gatatgtgcacagca

SEQ ID NO: 145617 - DNA, 15 bp, Homo sapiens
atatgtgcacagcat

SEQ ID NO: 145618 - DNA, 15 bp, Homo sapiens
tatgtgcacagcatt

SEQ ID NO: 145619 - DNA, 15 bp, Homo sapiens
atgtgcacagcattt

SEQ ID NO: 145620 - DNA, 15 bp, Homo sapiens
tgtgcacagcatttt

SEQ ID NO: 145621 - DNA, 15 bp, Homo sapiens
gtgcacagcatttta

SEQ ID NO: 145622 - DNA, 15 bp, Homo sapiens
tgcacagcattttaa

SEQ ID NO: 145623 - DNA, 15 bp, Homo sapiens
gcacagcattttaaa

SEQ ID NO: 145624 - DNA, 15 bp, Homo sapiens
cacagcattttaaac

SEQ ID NO: 145625 - DNA, 15 bp, Homo sapiens
acagcattttaaact

SEQ ID NO: 145626 - DNA, 15 bp, Homo sapiens
cagcattttaaactt

SEQ ID NO: 145627 - DNA, 15 bp, Homo sapiens
agcattttaaacttt

SEQ ID NO: 145628 - DNA, 15 bp, Homo sapiens
gcattttaaactttg

SEQ ID NO: 145629 - DNA, 15 bp, Homo sapiens
cattttaaactttgc

SEQ ID NO: 145630 - DNA, 15 bp, Homo sapiens
attttaaactttgct

SEQ ID NO: 145631 - DNA, 15 bp, Homo sapiens
ttttaaactttgctg

SEQ ID NO: 145632 - DNA, 15 bp, Homo sapiens
tttaaactttgctgc

SEQ ID NO: 145633 - DNA, 15 bp, Homo sapiens
ttaaactttgctgca

SEQ ID NO: 145634 - DNA, 15 bp, Homo sapiens
taaactttgctgcat

SEQ ID NO: 145635 - DNA, 15 bp, Homo sapiens
aaactttgctgcata

SEQ ID NO: 145636 - DNA, 15 bp, Homo sapiens
aactttgctgcatag

SEQ ID NO: 145637 - DNA, 15 bp, Homo sapiens
actttgctgcatagt

SEQ ID NO: 145638 - DNA, 15 bp, Homo sapiens
ctttgctgcatagtc

SEQ ID NO: 145639 - DNA, 15 bp, Homo sapiens
tttgctgcatagtcg

SEQ ID NO: 145640 - DNA, 15 bp, Homo sapiens
ttgctgcatagtcga

SEQ ID NO: 145641 - DNA, 15 bp, Homo sapiens
tgctgcatagtcgag

SEQ ID NO: 145642 - DNA, 15 bp, Homo sapiens
gctgcatagtcgaga

SEQ ID NO: 145643 - DNA, 15 bp, Homo sapiens
ctgcatagtcgagaa

SEQ ID NO: 145644 - DNA, 15 bp, Homo sapiens
tgcatagtcgagaaa

SEQ ID NO: 145645 - DNA, 15 bp, Homo sapiens
gcatagtcgagaaaa

SEQ ID NO: 145646 - DNA, 15 bp, Homo sapiens
catagtcgagaaaat

SEQ ID NO: 145647 - DNA, 15 bp, Homo sapiens
atagtcgagaaaatg

SEQ ID NO: 145648 - DNA, 15 bp, Homo sapiens
tagtcgagaaaatgg

SEQ ID NO: 145649 - DNA, 15 bp, Homo sapiens
agtcgagaaaatgga

SEQ ID NO: 145650 - DNA, 15 bp, Homo sapiens
gtcgagaaaatggaa

SEQ ID NO: 145651 - DNA, 15 bp, Homo sapiens
tcgagaaaatggaag

SEQ ID NO: 145652 - DNA, 15 bp, Homo sapiens
cgagaaaatggaagg

SEQ ID NO: 145653 - DNA, 15 bp, Homo sapiens
gagaaaatggaagga

SEQ ID NO: 145654 - DNA, 15 bp, Homo sapiens
agaaaatggaaggat

SEQ ID NO: 145655 - DNA, 15 bp, Homo sapiens
gaaaatggaaggatg

SEQ ID NO: 145656 - DNA, 15 bp, Homo sapiens
aaaatggaaggatgg

SEQ ID NO: 145657 - DNA, 15 bp, Homo sapiens
aaatggaaggatggg

SEQ ID NO: 145658 - DNA, 15 bp, Homo sapiens
aatggaaggatgggg

SEQ ID NO: 145659 - DNA, 15 bp, Homo sapiens
atggaaggatgggga

SEQ ID NO: 145660 - DNA, 15 bp, Homo sapiens
tggaaggatggggaa

SEQ ID NO: 145661 - DNA, 15 bp, Homo sapiens
ggaaggatggggaat

SEQ ID NO: 145662 - DNA, 15 bp, Homo sapiens
gaaggatggggaatt

SEQ ID NO: 145663 - DNA, 15 bp, Homo sapiens
aaggatggggaattt

SEQ ID NO: 145664 - DNA, 15 bp, Homo sapiens
aggatggggaatttg

SEQ ID NO: 145665 - DNA, 15 bp, Homo sapiens
ggatggggaatttga

SEQ ID NO: 145666 - DNA, 15 bp, Homo sapiens
gatggggaatttgag

SEQ ID NO: 145667 - DNA, 15 bp, Homo sapiens
atggggaatttgagt

SEQ ID NO: 145668 - DNA, 15 bp, Homo sapiens
tggggaatttgagtc

SEQ ID NO: 145669 - DNA, 15 bp, Homo sapiens
ggggaatttgagtca

SEQ ID NO: 145670 - DNA, 15 bp, Homo sapiens
gggaatttgagtcat

SEQ ID NO: 145671 - DNA, 15 bp, Homo sapiens
ggaatttgagtcatt

SEQ ID NO: 145672 - DNA, 15 bp, Homo sapiens
gaatttgagtcattt

SEQ ID NO: 145673 - DNA, 15 bp, Homo sapiens
aatttgagtcatttg

SEQ ID NO: 145674 - DNA, 15 bp, Homo sapiens
atttgagtcatttgc

SEQ ID NO: 145675 - DNA, 15 bp, Homo sapiens
tttgagtcatttgcc

SEQ ID NO: 145676 - DNA, 15 bp, Homo sapiens
ttgagtcatttgccc

SEQ ID NO: 145677 - DNA, 15 bp, Homo sapiens
tgagtcatttgccca

SEQ ID NO: 145678 - DNA, 15 bp, Homo sapiens
gagtcatttgcccag

SEQ ID NO: 145679 - DNA, 15 bp, Homo sapiens
agtcatttgcccagg

SEQ ID NO: 145680 - DNA, 15 bp, Homo sapiens
gtcatttgcccaggg

SEQ ID NO: 145681 - DNA, 15 bp, Homo sapiens
tcatttgcccagggt

SEQ ID NO: 145682 - DNA, 15 bp, Homo sapiens
catttgcccagggtt

SEQ ID NO: 145683 - DNA, 15 bp, Homo sapiens
atttgcccagggttc

SEQ ID NO: 145684 - DNA, 15 bp, Homo sapiens
tttgcccagggttct

SEQ ID NO: 145685 - DNA, 15 bp, Homo sapiens
ttgcccagggttcta

SEQ ID NO: 145686 - DNA, 15 bp, Homo sapiens
tgcccagggttctat

SEQ ID NO: 145687 - DNA, 15 bp, Homo sapiens
gcccagggttctata

SEQ ID NO: 145688 - DNA, 15 bp, Homo sapiens
cccagggttctatag

SEQ ID NO: 145689 - DNA, 15 bp, Homo sapiens
ccagggttctatagc

SEQ ID NO: 145690 - DNA, 15 bp, Homo sapiens
cagggttctatagct

SEQ ID NO: 145691 - DNA, 15 bp, Homo sapiens
agggttctatagcta

SEQ ID NO: 145692 - DNA, 15 bp, Homo sapiens
gggttctatagctac

SEQ ID NO: 145693 - DNA, 15 bp, Homo sapiens
ggttctatagctacc

SEQ ID NO: 145694 - DNA, 15 bp, Homo sapiens
gttctatagctaccc

SEQ ID NO: 145695 - DNA, 15 bp, Homo sapiens
ttctatagctacccc

SEQ ID NO: 145696 - DNA, 15 bp, Homo sapiens
tctatagctacccca

SEQ ID NO: 145697 - DNA, 15 bp, Homo sapiens
ctatagctaccccag

SEQ ID NO: 145698 - DNA, 15 bp, Homo sapiens
tatagctaccccagg

SEQ ID NO: 145699 - DNA, 15 bp, Homo sapiens
atagctaccccaggt

SEQ ID NO: 145700 - DNA, 15 bp, Homo sapiens
tagctaccccaggtt

SEQ ID NO: 145701 - DNA, 15 bp, Homo sapiens
agctaccccaggttc

SEQ ID NO: 145702 - DNA, 15 bp, Homo sapiens
gctaccccaggttcc

SEQ ID NO: 145703 - DNA, 15 bp, Homo sapiens
ctaccccaggttccc

SEQ ID NO: 145704 - DNA, 15 bp, Homo sapiens
taccccaggttccca

SEQ ID NO: 145705 - DNA, 15 bp, Homo sapiens
accccaggttcccat

SEQ ID NO: 145706 - DNA, 15 bp, Homo sapiens
ccccaggttcccatg

SEQ ID NO: 145707 - DNA, 15 bp, Homo sapiens
cccaggttcccatga

SEQ ID NO: 145708 - DNA, 15 bp, Homo sapiens
ccaggttcccatgac

SEQ ID NO: 145709 - DNA, 15 bp, Homo sapiens
caggttcccatgact

SEQ ID NO: 145710 - DNA, 15 bp, Homo sapiens
aggttcccatgactg

SEQ ID NO: 145711 - DNA, 15 bp, Homo sapiens
ggttcccatgactgg

SEQ ID NO: 145712 - DNA, 15 bp, Homo sapiens
gttcccatgactgga

SEQ ID NO: 145713 - DNA, 15 bp, Homo sapiens
ttcccatgactggag

SEQ ID NO: 145714 - DNA, 15 bp, Homo sapiens
tcccatgactggaga

SEQ ID NO: 145715 - DNA, 15 bp, Homo sapiens
cccatgactggagaa

SEQ ID NO: 145716 - DNA, 15 bp, Homo sapiens
ccatgactggagaat

SEQ ID NO: 145717 - DNA, 15 bp, Homo sapiens
catgactggagaatt

SEQ ID NO: 145718 - DNA, 15 bp, Homo sapiens
atgactggagaattg

SEQ ID NO: 145719 - DNA, 15 bp, Homo sapiens
tgactggagaattgg

SEQ ID NO: 145720 - DNA, 15 bp, Homo sapiens
gactggagaattggg

SEQ ID NO: 145721 - DNA, 15 bp, Homo sapiens
actggagaattgggg

SEQ ID NO: 145722 - DNA, 15 bp, Homo sapiens
ctggagaattggggc

SEQ ID NO: 145723 - DNA, 15 bp, Homo sapiens
tggagaattggggca

SEQ ID NO: 145724 - DNA, 15 bp, Homo sapiens
ggagaattggggcac

SEQ ID NO: 145725 - DNA, 15 bp, Homo sapiens
gagaattggggcaca

SEQ ID NO: 145726 - DNA, 15 bp, Homo sapiens
agaattggggcacag

SEQ ID NO: 145727 - DNA, 15 bp, Homo sapiens
gaattggggcacagg

SEQ ID NO: 145728 - DNA, 15 bp, Homo sapiens
aattggggcacaggg

SEQ ID NO: 145729 - DNA, 15 bp, Homo sapiens
attggggcacagggt

SEQ ID NO: 145730 - DNA, 15 bp, Homo sapiens
ttggggcacagggtg

SEQ ID NO: 145731 - DNA, 15 bp, Homo sapiens
tggggcacagggtgg

SEQ ID NO: 145732 - DNA, 15 bp, Homo sapiens
ggggcacagggtggc

SEQ ID NO: 145733 - DNA, 15 bp, Homo sapiens
gggcacagggtggcg

SEQ ID NO: 145734 - DNA, 15 bp, Homo sapiens
ggcacagggtggcgg

SEQ ID NO: 145735 - DNA, 15 bp, Homo sapiens
gcacagggtggcggg

SEQ ID NO: 145736 - DNA, 15 bp, Homo sapiens
cacagggtggcgggg

SEQ ID NO: 145737 - DNA, 15 bp, Homo sapiens
acagggtggcggggg

SEQ ID NO: 145738 - DNA, 15 bp, Homo sapiens
cagggtggcggggga

SEQ ID NO: 145739 - DNA, 15 bp, Homo sapiens
gtggcgggggagagt

SEQ ID NO: 145740 - DNA, 15 bp, Homo sapiens
tggcgggggagagtg

SEQ ID NO: 145741 - DNA, 15 bp, Homo sapiens
ggcgggggagagtga

SEQ ID NO: 145742 - DNA, 15 bp, Homo sapiens
gcgggggagagtgag

SEQ ID NO: 145743 - DNA, 15 bp, Homo sapiens
cgggggagagtgagt

SEQ ID NO: 145744 - DNA, 15 bp, Homo sapiens
gggggagagtgagtg

SEQ ID NO: 145745 - DNA, 15 bp, Homo sapiens
ggggagagtgagtga

SEQ ID NO: 145746 - DNA, 15 bp, Homo sapiens
gggagagtgagtgac

SEQ ID NO: 145747 - DNA, 15 bp, Homo sapiens
ggagagtgagtgaca

SEQ ID NO: 145748 - DNA, 15 bp, Homo sapiens
gagagtgagtgacaa

SEQ ID NO: 145749 - DNA, 15 bp, Homo sapiens
agagtgagtgacaag

SEQ ID NO: 145750 - DNA, 15 bp, Homo sapiens
gagtgagtgacaaga

SEQ ID NO: 145751 - DNA, 15 bp, Homo sapiens
agtgagtgacaagaa

SEQ ID NO: 145752 - DNA, 15 bp, Homo sapiens
gtgagtgacaagaat

SEQ ID NO: 145753 - DNA, 15 bp, Homo sapiens
tgagtgacaagaatc

SEQ ID NO: 145754 - DNA, 15 bp, Homo sapiens
gagtgacaagaatcc

SEQ ID NO: 145755 - DNA, 15 bp, Homo sapiens
agtgacaagaatcct

SEQ ID NO: 145756 - DNA, 15 bp, Homo sapiens
gtgacaagaatccta

SEQ ID NO: 145757 - DNA, 15 bp, Homo sapiens
tgacaagaatcctaa

SEQ ID NO: 145758 - DNA, 15 bp, Homo sapiens
gacaagaatcctaac

SEQ ID NO: 145759 - DNA, 15 bp, Homo sapiens
acaagaatcctaaca

SEQ ID NO: 145760 - DNA, 15 bp, Homo sapiens
caagaatcctaacaa

SEQ ID NO: 145761 - DNA, 15 bp, Homo sapiens
aagaatcctaacaat

SEQ ID NO: 145762 - DNA, 15 bp, Homo sapiens
agaatcctaacaatc

SEQ ID NO: 145763 - DNA, 15 bp, Homo sapiens
gaatcctaacaatct

SEQ ID NO: 145764 - DNA, 15 bp, Homo sapiens
aatcctaacaatctt

SEQ ID NO: 145765 - DNA, 15 bp, Homo sapiens
atcctaacaatctta

SEQ ID NO: 145766 - DNA, 15 bp, Homo sapiens
tcctaacaatcttat

SEQ ID NO: 145767 - DNA, 15 bp, Homo sapiens
cctaacaatcttatt

SEQ ID NO: 145768 - DNA, 15 bp, Homo sapiens
ctaacaatcttattt

SEQ ID NO: 145769 - DNA, 15 bp, Homo sapiens
taacaatcttatttc

SEQ ID NO: 145770 - DNA, 15 bp, Homo sapiens
aacaatcttatttcc

SEQ ID NO: 145771 - DNA, 15 bp, Homo sapiens
acaatcttatttcca

SEQ ID NO: 145772 - DNA, 15 bp, Homo sapiens
caatcttatttccat

SEQ ID NO: 145773 - DNA, 15 bp, Homo sapiens
aatcttatttccatt

SEQ ID NO: 145774 - DNA, 15 bp, Homo sapiens
atcttatttccattg

SEQ ID NO: 145775 - DNA, 15 bp, Homo sapiens
tcttatttccattga

SEQ ID NO: 145776 - DNA, 15 bp, Homo sapiens
cttatttccattgag

SEQ ID NO: 145777 - DNA, 15 bp, Homo sapiens
ttatttccattgagt

SEQ ID NO: 145778 - DNA, 15 bp, Homo sapiens
tatttccattgagtc

SEQ ID NO: 145779 - DNA, 15 bp, Homo sapiens
atttccattgagtcc

SEQ ID NO: 145780 - DNA, 15 bp, Homo sapiens
tttccattgagtcct

SEQ ID NO: 145781 - DNA, 15 bp, Homo sapiens
ttccattgagtcctt

SEQ ID NO: 145782 - DNA, 15 bp, Homo sapiens
tccattgagtcctta

SEQ ID NO: 145783 - DNA, 15 bp, Homo sapiens
ccattgagtccttat

SEQ ID NO: 145784 - DNA, 15 bp, Homo sapiens
cattgagtccttata

SEQ ID NO: 145785 - DNA, 15 bp, Homo sapiens
attgagtccttataa

SEQ ID NO: 145786 - DNA, 15 bp, Homo sapiens
ttgagtccttataaa

SEQ ID NO: 145787 - DNA, 15 bp, Homo sapiens
tgagtccttataaaa

SEQ ID NO: 145788 - DNA, 15 bp, Homo sapiens
gagtccttataaaag

SEQ ID NO: 145789 - DNA, 15 bp, Homo sapiens
agtccttataaaaga

SEQ ID NO: 145790 - DNA, 15 bp, Homo sapiens
gtccttataaaagaa

SEQ ID NO: 145791 - DNA, 15 bp, Homo sapiens
tccttataaaagaag

SEQ ID NO: 145792 - DNA, 15 bp, Homo sapiens
ccttataaaagaagt

SEQ ID NO: 145793 - DNA, 15 bp, Homo sapiens
cttataaaagaagtg

SEQ ID NO: 145794 - DNA, 15 bp, Homo sapiens
ttataaaagaagtgg

SEQ ID NO: 145795 - DNA, 15 bp, Homo sapiens
tataaaagaagtgga

SEQ ID NO: 145796 - DNA, 15 bp, Homo sapiens
ataaaagaagtggat

SEQ ID NO: 145797 - DNA, 15 bp, Homo sapiens
taaaagaagtggatt

SEQ ID NO: 145798 - DNA, 15 bp, Homo sapiens
aaaagaagtggatta

SEQ ID NO: 145799 - DNA, 15 bp, Homo sapiens
aaagaagtggattaa

SEQ ID NO: 145800 - DNA, 15 bp, Homo sapiens
aagaagtggattaac

SEQ ID NO: 145801 - DNA, 15 bp, Homo sapiens
agaagtggattaact

SEQ ID NO: 145802 - DNA, 15 bp, Homo sapiens
gaagtggattaacta

SEQ ID NO: 145803 - DNA, 15 bp, Homo sapiens
aagtggattaactac

SEQ ID NO: 145804 - DNA, 15 bp, Homo sapiens
agtggattaactacc

SEQ ID NO: 145805 - DNA, 15 bp, Homo sapiens
gtggattaactacca

SEQ ID NO: 145806 - DNA, 15 bp, Homo sapiens
tggattaactaccac

SEQ ID NO: 145807 - DNA, 15 bp, Homo sapiens
ggattaactaccacg

SEQ ID NO: 145808 - DNA, 15 bp, Homo sapiens
gattaactaccacgt

SEQ ID NO: 145809 - DNA, 15 bp, Homo sapiens
attaactaccacgtt

SEQ ID NO: 145810 - DNA, 15 bp, Homo sapiens
ttaactaccacgttt

SEQ ID NO: 145811 - DNA, 15 bp, Homo sapiens
taactaccacgtttt

SEQ ID NO: 145812 - DNA, 15 bp, Homo sapiens
aactaccacgttttt

SEQ ID NO: 145813 - DNA, 15 bp, Homo sapiens
actaccacgttttta

SEQ ID NO: 145814 - DNA, 15 bp, Homo sapiens
ctaccacgtttttaa

SEQ ID NO: 145815 - DNA, 15 bp, Homo sapiens
taccacgtttttaag

SEQ ID NO: 145816 - DNA, 15 bp, Homo sapiens
accacgtttttaagt

SEQ ID NO: 145817 - DNA, 15 bp, Homo sapiens
ccacgtttttaagtt

SEQ ID NO: 145818 - DNA, 15 bp, Homo sapiens
cacgtttttaagttt

SEQ ID NO: 145819 - DNA, 15 bp, Homo sapiens
acgtttttaagtttt

SEQ ID NO: 145820 - DNA, 15 bp, Homo sapiens
cgtttttaagttttt

SEQ ID NO: 145821 - DNA, 15 bp, Homo sapiens
gtttttaagtttttc

SEQ ID NO: 145822 - DNA, 15 bp, Homo sapiens
tttttaagtttttct

SEQ ID NO: 145823 - DNA, 15 bp, Homo sapiens
ttttaagtttttctt

SEQ ID NO: 145824 - DNA, 15 bp, Homo sapiens
tttaagtttttctta

SEQ ID NO: 145825 - DNA, 15 bp, Homo sapiens
ttaagtttttcttaa

SEQ ID NO: 145826 - DNA, 15 bp, Homo sapiens
taagtttttcttaaa

SEQ ID NO: 145827 - DNA, 15 bp, Homo sapiens
aagtttttcttaaat

SEQ ID NO: 145828 - DNA, 15 bp, Homo sapiens
agtttttcttaaatt

SEQ ID NO: 145829 - DNA, 15 bp, Homo sapiens
gtttttcttaaattt

SEQ ID NO: 145830 - DNA, 15 bp, Homo sapiens
tttttcttaaattta

SEQ ID NO: 145831 - DNA, 15 bp, Homo sapiens
ttttcttaaatttag

SEQ ID NO: 145832 - DNA, 15 bp, Homo sapiens
tttcttaaatttagg

SEQ ID NO: 145833 - DNA, 15 bp, Homo sapiens
ttcttaaatttaggt

SEQ ID NO: 145834 - DNA, 15 bp, Homo sapiens
tcttaaatttaggtt

SEQ ID NO: 145835 - DNA, 15 bp, Homo sapiens
cttaaatttaggtta

SEQ ID NO: 145836 - DNA, 15 bp, Homo sapiens
ttaaatttaggttat

SEQ ID NO: 145837 - DNA, 15 bp, Homo sapiens
taaatttaggttatg

SEQ ID NO: 145838 - DNA, 15 bp, Homo sapiens
aaatttaggttatgt

SEQ ID NO: 145839 - DNA, 15 bp, Homo sapiens
aatttaggttatgtg

SEQ ID NO: 145840 - DNA, 15 bp, Homo sapiens
atttaggttatgtgg

SEQ ID NO: 145841 - DNA, 15 bp, Homo sapiens
tttaggttatgtgga

SEQ ID NO: 145842 - DNA, 15 bp, Homo sapiens
ttaggttatgtggat

SEQ ID NO: 145843 - DNA, 15 bp, Homo sapiens
taggttatgtggatc

SEQ ID NO: 145844 - DNA, 15 bp, Homo sapiens
aggttatgtggatct

SEQ ID NO: 145845 - DNA, 15 bp, Homo sapiens
ggttatgtggatctg

SEQ ID NO: 145846 - DNA, 15 bp, Homo sapiens
gttatgtggatctgg

SEQ ID NO: 145847 - DNA, 15 bp, Homo sapiens
ttatgtggatctggc

SEQ ID NO: 145848 - DNA, 15 bp, Homo sapiens
tatgtggatctggcg

SEQ ID NO: 145849 - DNA, 15 bp, Homo sapiens
atgtggatctggcgt

SEQ ID NO: 145850 - DNA, 15 bp, Homo sapiens
tgtggatctggcgtt

SEQ ID NO: 145851 - DNA, 15 bp, Homo sapiens
gtggatctggcgttt

SEQ ID NO: 145852 - DNA, 15 bp, Homo sapiens
tggatctggcgtttc

SEQ ID NO: 145853 - DNA, 15 bp, Homo sapiens
ggatctggcgtttct

SEQ ID NO: 145854 - DNA, 15 bp, Homo sapiens
gatctggcgtttctt

SEQ ID NO: 145855 - DNA, 15 bp, Homo sapiens
atctggcgtttcttg

SEQ ID NO: 145856 - DNA, 15 bp, Homo sapiens
tctggcgtttcttgt

SEQ ID NO: 145857 - DNA, 15 bp, Homo sapiens
ctggcgtttcttgtt

SEQ ID NO: 145858 - DNA, 15 bp, Homo sapiens
tggcgtttcttgttt

SEQ ID NO: 145859 - DNA, 15 bp, Homo sapiens
ggcgtttcttgtttt

SEQ ID NO: 145860 - DNA, 15 bp, Homo sapiens
gcgtttcttgttttg

SEQ ID NO: 145861 - DNA, 15 bp, Homo sapiens
cgtttcttgttttgt

SEQ ID NO: 145862 - DNA, 15 bp, Homo sapiens
gtttcttgttttgtc

SEQ ID NO: 145863 - DNA, 15 bp, Homo sapiens
tttcttgttttgtcc

SEQ ID NO: 145864 - DNA, 15 bp, Homo sapiens
ttcttgttttgtcct

SEQ ID NO: 145865 - DNA, 15 bp, Homo sapiens
tcttgttttgtcctg

SEQ ID NO: 145866 - DNA, 15 bp, Homo sapiens
cttgttttgtcctgg

SEQ ID NO: 145867 - DNA, 15 bp, Homo sapiens
ttgttttgtcctggg

SEQ ID NO: 145868 - DNA, 15 bp, Homo sapiens
tgttttgtcctgggt

SEQ ID NO: 145869 - DNA, 15 bp, Homo sapiens
gttttgtcctgggtt

SEQ ID NO: 145870 - DNA, 15 bp, Homo sapiens
ttttgtcctgggttt

SEQ ID NO: 145871 - DNA, 15 bp, Homo sapiens
tttgtcctgggtttg

SEQ ID NO: 145872 - DNA, 15 bp, Homo sapiens
ttgtcctgggtttgt

SEQ ID NO: 145873 - DNA, 15 bp, Homo sapiens
tgtcctgggtttgtt

SEQ ID NO: 145874 - DNA, 15 bp, Homo sapiens
gtcctgggtttgttt

SEQ ID NO: 145875 - DNA, 15 bp, Homo sapiens
tcctgggtttgtttt

SEQ ID NO: 145876 - DNA, 15 bp, Homo sapiens
cctgggtttgttttg

SEQ ID NO: 145877 - DNA, 15 bp, Homo sapiens
ctgggtttgttttgt

SEQ ID NO: 145878 - DNA, 15 bp, Homo sapiens
tgggtttgttttgtt

SEQ ID NO: 145879 - DNA, 15 bp, Homo sapiens
gggtttgttttgttt

SEQ ID NO: 145880 - DNA, 15 bp, Homo sapiens
ggtttgttttgtttt

SEQ ID NO: 145881 - DNA, 15 bp, Homo sapiens
gtttgttttgttttt

SEQ ID NO: 145882 - DNA, 15 bp, Homo sapiens
tttgttttgtttttg

SEQ ID NO: 145883 - DNA, 15 bp, Homo sapiens
ttgttttgtttttgc

SEQ ID NO: 145884 - DNA, 15 bp, Homo sapiens
tgttttgtttttgct

SEQ ID NO: 145885 - DNA, 15 bp, Homo sapiens
gttttgtttttgcta

SEQ ID NO: 145886 - DNA, 15 bp, Homo sapiens
ttttgtttttgctat

SEQ ID NO: 145887 - DNA, 15 bp, Homo sapiens
tttgtttttgctatg

SEQ ID NO: 145888 - DNA, 15 bp, Homo sapiens
ttgtttttgctatgc

SEQ ID NO: 145889 - DNA, 15 bp, Homo sapiens
tgtttttgctatgct

SEQ ID NO: 145890 - DNA, 15 bp, Homo sapiens
gtttttgctatgctg

SEQ ID NO: 145891 - DNA, 15 bp, Homo sapiens
tttttgctatgctgt

SEQ ID NO: 145892 - DNA, 15 bp, Homo sapiens
ttttgctatgctgtc

SEQ ID NO: 145893 - DNA, 15 bp, Homo sapiens
tttgctatgctgtct

SEQ ID NO: 145894 - DNA, 15 bp, Homo sapiens
ttgctatgctgtctt

SEQ ID NO: 145895 - DNA, 15 bp, Homo sapiens
tgctatgctgtcttg

SEQ ID NO: 145896 - DNA, 15 bp, Homo sapiens
gctatgctgtcttga

SEQ ID NO: 145897 - DNA, 15 bp, Homo sapiens
ctatgctgtcttgaa

SEQ ID NO: 145898 - DNA, 15 bp, Homo sapiens
tatgctgtcttgaac

SEQ ID NO: 145899 - DNA, 15 bp, Homo sapiens
atgctgtcttgaaca

SEQ ID NO: 145900 - DNA, 15 bp, Homo sapiens
tgctgtcttgaacat

SEQ ID NO: 145901 - DNA, 15 bp, Homo sapiens
gctgtcttgaacatc

SEQ ID NO: 145902 - DNA, 15 bp, Homo sapiens
ctgtcttgaacatct

SEQ ID NO: 145903 - DNA, 15 bp, Homo sapiens
tgtcttgaacatctg

SEQ ID NO: 145904 - DNA, 15 bp, Homo sapiens
gtcttgaacatctgt

SEQ ID NO: 145905 - DNA, 15 bp, Homo sapiens
tcttgaacatctgtc

SEQ ID NO: 145906 - DNA, 15 bp, Homo sapiens
cttgaacatctgtca

SEQ ID NO: 145907 - DNA, 15 bp, Homo sapiens
ttgaacatctgtcat

SEQ ID NO: 145908 - DNA, 15 bp, Homo sapiens
tgaacatctgtcatc

SEQ ID NO: 145909 - DNA, 15 bp, Homo sapiens
gaacatctgtcatct

SEQ ID NO: 145910 - DNA, 15 bp, Homo sapiens
aacatctgtcatctt

SEQ ID NO: 145911 - DNA, 15 bp, Homo sapiens
acatctgtcatcttg

SEQ ID NO: 145912 - DNA, 15 bp, Homo sapiens
catctgtcatcttgt

SEQ ID NO: 145913 - DNA, 15 bp, Homo sapiens
atctgtcatcttgta

SEQ ID NO: 145914 - DNA, 15 bp, Homo sapiens
tctgtcatcttgtag

SEQ ID NO: 145915 - DNA, 15 bp, Homo sapiens
ctgtcatcttgtagg

SEQ ID NO: 145916 - DNA, 15 bp, Homo sapiens
tgtcatcttgtaggc

SEQ ID NO: 145917 - DNA, 15 bp, Homo sapiens
gtcatcttgtaggcc

SEQ ID NO: 145918 - DNA, 15 bp, Homo sapiens
tcatcttgtaggcct

SEQ ID NO: 145919 - DNA, 15 bp, Homo sapiens
catcttgtaggccta

SEQ ID NO: 145920 - DNA, 15 bp, Homo sapiens
atcttgtaggcctaa

SEQ ID NO: 145921 - DNA, 15 bp, Homo sapiens
tcttgtaggcctaac

SEQ ID NO: 145922 - DNA, 15 bp, Homo sapiens
cttgtaggcctaacg

SEQ ID NO: 145923 - DNA, 15 bp, Homo sapiens
ttgtaggcctaacgg

SEQ ID NO: 145924 - DNA, 15 bp, Homo sapiens
tgtaggcctaacggt

SEQ ID NO: 145925 - DNA, 15 bp, Homo sapiens
gtaggcctaacggta

SEQ ID NO: 145926 - DNA, 15 bp, Homo sapiens
taggcctaacggtaa

SEQ ID NO: 145927 - DNA, 15 bp, Homo sapiens
aggcctaacggtaaa

SEQ ID NO: 145928 - DNA, 15 bp, Homo sapiens
ggcctaacggtaaac

SEQ ID NO: 145929 - DNA, 15 bp, Homo sapiens
gcctaacggtaaaca

SEQ ID NO: 145930 - DNA, 15 bp, Homo sapiens
cctaacggtaaacac

SEQ ID NO: 145931 - DNA, 15 bp, Homo sapiens
ctaacggtaaacaca

SEQ ID NO: 145932 - DNA, 15 bp, Homo sapiens
taacggtaaacacaa

SEQ ID NO: 145933 - DNA, 15 bp, Homo sapiens
aacggtaaacacaaa

SEQ ID NO: 145934 - DNA, 15 bp, Homo sapiens
acggtaaacacaaaa

SEQ ID NO: 145935 - DNA, 15 bp, Homo sapiens
cggtaaacacaaaaa

SEQ ID NO: 145936 - DNA, 15 bp, Homo sapiens
ggtaaacacaaaaac

SEQ ID NO: 145937 - DNA, 15 bp, Homo sapiens
gtaaacacaaaaaca

SEQ ID NO: 145938 - DNA, 15 bp, Homo sapiens
taaacacaaaaacac

SEQ ID NO: 145939 - DNA, 15 bp, Homo sapiens
aaacacaaaaacact

SEQ ID NO: 145940 - DNA, 15 bp, Homo sapiens
aacacaaaaacactt

SEQ ID NO: 145941 - DNA, 15 bp, Homo sapiens
acacaaaaacacttt

SEQ ID NO: 145942 - DNA, 15 bp, Homo sapiens
cacaaaaacacttta

SEQ ID NO: 145943 - DNA, 15 bp, Homo sapiens
acaaaaacactttac

SEQ ID NO: 145944 - DNA, 15 bp, Homo sapiens
caaaaacactttacc

SEQ ID NO: 145945 - DNA, 15 bp, Homo sapiens
aaaaacactttacct

SEQ ID NO: 145946 - DNA, 15 bp, Homo sapiens
aaaacactttacctc

SEQ ID NO: 145947 - DNA, 15 bp, Homo sapiens
aaacactttacctcc

SEQ ID NO: 145948 - DNA, 15 bp, Homo sapiens
aacactttacctcct

SEQ ID NO: 145949 - DNA, 15 bp, Homo sapiens
acactttacctccta

SEQ ID NO: 145950 - DNA, 15 bp, Homo sapiens
cactttacctcctat

SEQ ID NO: 145951 - DNA, 15 bp, Homo sapiens
actttacctcctata

SEQ ID NO: 145952 - DNA, 15 bp, Homo sapiens
ctttacctcctatag

SEQ ID NO: 145953 - DNA, 15 bp, Homo sapiens
tttacctcctatagc

SEQ ID NO: 145954 - DNA, 15 bp, Homo sapiens
ttacctcctatagct

SEQ ID NO: 145955 - DNA, 15 bp, Homo sapiens
tacctcctatagctt

SEQ ID NO: 145956 - DNA, 15 bp, Homo sapiens
acctcctatagcttt

SEQ ID NO: 145957 - DNA, 15 bp, Homo sapiens
cctcctatagctttc

SEQ ID NO: 145958 - DNA, 15 bp, Homo sapiens
ctcctatagctttca

SEQ ID NO: 145959 - DNA, 15 bp, Homo sapiens
tcctatagctttcaa

SEQ ID NO: 145960 - DNA, 15 bp, Homo sapiens
cctatagctttcaat

SEQ ID NO: 145961 - DNA, 15 bp, Homo sapiens
ctatagctttcaatt

SEQ ID NO: 145962 - DNA, 15 bp, Homo sapiens
tatagctttcaatta

SEQ ID NO: 145963 - DNA, 15 bp, Homo sapiens
atagctttcaattaa

SEQ ID NO: 145964 - DNA, 15 bp, Homo sapiens
tagctttcaattaag

SEQ ID NO: 145965 - DNA, 15 bp, Homo sapiens
agctttcaattaaga

SEQ ID NO: 145966 - DNA, 15 bp, Homo sapiens
gctttcaattaagat

SEQ ID NO: 145967 - DNA, 15 bp, Homo sapiens
ctttcaattaagatc

SEQ ID NO: 145968 - DNA, 15 bp, Homo sapiens
tttcaattaagatct

SEQ ID NO: 145969 - DNA, 15 bp, Homo sapiens
ttcaattaagatctc

SEQ ID NO: 145970 - DNA, 15 bp, Homo sapiens
tcaattaagatctct

SEQ ID NO: 145971 - DNA, 15 bp, Homo sapiens
caattaagatctctc

SEQ ID NO: 145972 - DNA, 15 bp, Homo sapiens
aattaagatctctca

SEQ ID NO: 145973 - DNA, 15 bp, Homo sapiens
attaagatctctcag

SEQ ID NO: 145974 - DNA, 15 bp, Homo sapiens
ttaagatctctcagt

SEQ ID NO: 145975 - DNA, 15 bp, Homo sapiens
taagatctctcagtt

SEQ ID NO: 145976 - DNA, 15 bp, Homo sapiens
aagatctctcagttt

SEQ ID NO: 145977 - DNA, 15 bp, Homo sapiens
agatctctcagtttg

SEQ ID NO: 145978 - DNA, 15 bp, Homo sapiens
gatctctcagtttgt

SEQ ID NO: 145979 - DNA, 15 bp, Homo sapiens
atctctcagtttgtg

SEQ ID NO: 145980 - DNA, 15 bp, Homo sapiens
tctctcagtttgtgt

SEQ ID NO: 145981 - DNA, 15 bp, Homo sapiens
ctctcagtttgtgtt

SEQ ID NO: 145982 - DNA, 15 bp, Homo sapiens
tctcagtttgtgttt

SEQ ID NO: 145983 - DNA, 15 bp, Homo sapiens
ctcagtttgtgtttg

SEQ ID NO: 145984 - DNA, 15 bp, Homo sapiens
tcagtttgtgtttgt

SEQ ID NO: 145985 - DNA, 15 bp, Homo sapiens
cagtttgtgtttgta

SEQ ID NO: 145986 - DNA, 15 bp, Homo sapiens
agtttgtgtttgtaa

SEQ ID NO: 145987 - DNA, 15 bp, Homo sapiens
gtttgtgtttgtaat

SEQ ID NO: 145988 - DNA, 15 bp, Homo sapiens
tttgtgtttgtaata

SEQ ID NO: 145989 - DNA, 15 bp, Homo sapiens
ttgtgtttgtaatag

SEQ ID NO: 145990 - DNA, 15 bp, Homo sapiens
tgtgtttgtaatagt

SEQ ID NO: 145991 - DNA, 15 bp, Homo sapiens
gtgtttgtaatagtt

SEQ ID NO: 145992 - DNA, 15 bp, Homo sapiens
tgtttgtaatagttt

SEQ ID NO: 145993 - DNA, 15 bp, Homo sapiens
gtttgtaatagtttt

SEQ ID NO: 145994 - DNA, 15 bp, Homo sapiens
tttgtaatagttttc

SEQ ID NO: 145995 - DNA, 15 bp, Homo sapiens
ttgtaatagttttcc

SEQ ID NO: 145996 - DNA, 15 bp, Homo sapiens
tgtaatagttttcca

SEQ ID NO: 145997 - DNA, 15 bp, Homo sapiens
gtaatagttttccag

SEQ ID NO: 145998 - DNA, 15 bp, Homo sapiens
taatagttttccagg

SEQ ID NO: 145999 - DNA, 15 bp, Homo sapiens
aatagttttccaggc

SEQ ID NO: 146000 - DNA, 15 bp, Homo sapiens
atagttttccaggca

SEQ ID NO: 146001 - DNA, 15 bp, Homo sapiens
tagttttccaggcaa

SEQ ID NO: 146002 - DNA, 15 bp, Homo sapiens
agttttccaggcaag

SEQ ID NO: 146003 - DNA, 15 bp, Homo sapiens
gttttccaggcaagt

SEQ ID NO: 146004 - DNA, 15 bp, Homo sapiens
ttttccaggcaagtt

SEQ ID NO: 146005 - DNA, 15 bp, Homo sapiens
tttccaggcaagttc

SEQ ID NO: 146006 - DNA, 15 bp, Homo sapiens
ttccaggcaagttct

SEQ ID NO: 146007 - DNA, 15 bp, Homo sapiens
tccaggcaagttctc

SEQ ID NO: 146008 - DNA, 15 bp, Homo sapiens
ccaggcaagttctcc

SEQ ID NO: 146009 - DNA, 15 bp, Homo sapiens
caggcaagttctccc

SEQ ID NO: 146010 - DNA, 15 bp, Homo sapiens
aggcaagttctccct

SEQ ID NO: 146011 - DNA, 15 bp, Homo sapiens
ggcaagttctcccta

SEQ ID NO: 146012 - DNA, 15 bp, Homo sapiens
gcaagttctccctag

SEQ ID NO: 146013 - DNA, 15 bp, Homo sapiens
caagttctccctagg

SEQ ID NO: 146014 - DNA, 15 bp, Homo sapiens
aagttctccctaggt

SEQ ID NO: 146015 - DNA, 15 bp, Homo sapiens
agttctccctaggtt

SEQ ID NO: 146016 - DNA, 15 bp, Homo sapiens
gttctccctaggttc

SEQ ID NO: 146017 - DNA, 15 bp, Homo sapiens
ttctccctaggttcg

SEQ ID NO: 146018 - DNA, 15 bp, Homo sapiens
tctccctaggttcgg

SEQ ID NO: 146019 - DNA, 15 bp, Homo sapiens
ctccctaggttcggc

SEQ ID NO: 146020 - DNA, 15 bp, Homo sapiens
tccctaggttcggct

SEQ ID NO: 146021 - DNA, 15 bp, Homo sapiens
ccctaggttcggctt

SEQ ID NO: 146022 - DNA, 15 bp, Homo sapiens
cctaggttcggcttc

SEQ ID NO: 146023 - DNA, 15 bp, Homo sapiens
ctaggttcggcttct

SEQ ID NO: 146024 - DNA, 15 bp, Homo sapiens
taggttcggcttcta

SEQ ID NO: 146025 - DNA, 15 bp, Homo sapiens
aggttcggcttctag

SEQ ID NO: 146026 - DNA, 15 bp, Homo sapiens
ggttcggcttctagt

SEQ ID NO: 146027 - DNA, 15 bp, Homo sapiens
gttcggcttctagtg

SEQ ID NO: 146028 - DNA, 15 bp, Homo sapiens
ttcggcttctagtgt

SEQ ID NO: 146029 - DNA, 15 bp, Homo sapiens
tcggcttctagtgtg

SEQ ID NO: 146030 - DNA, 15 bp, Homo sapiens
cggcttctagtgtgt

SEQ ID NO: 146031 - DNA, 15 bp, Homo sapiens
ggcttctagtgtgtt

SEQ ID NO: 146032 - DNA, 15 bp, Homo sapiens
gcttctagtgtgtta

SEQ ID NO: 146033 - DNA, 15 bp, Homo sapiens
cttctagtgtgttaa

SEQ ID NO: 146034 - DNA, 15 bp, Homo sapiens
ttctagtgtgttaac

SEQ ID NO: 146035 - DNA, 15 bp, Homo sapiens
tctagtgtgttaacc

SEQ ID NO: 146036 - DNA, 15 bp, Homo sapiens
ctagtgtgttaacct

SEQ ID NO: 146037 - DNA, 15 bp, Homo sapiens
tagtgtgttaacctt

SEQ ID NO: 146038 - DNA, 15 bp, Homo sapiens
agtgtgttaaccttt

SEQ ID NO: 146039 - DNA, 15 bp, Homo sapiens
gtgtgttaaccttta

SEQ ID NO: 146040 - DNA, 15 bp, Homo sapiens
tgtgttaacctttag

SEQ ID NO: 146041 - DNA, 15 bp, Homo sapiens
gtgttaacctttagt

SEQ ID NO: 146042 - DNA, 15 bp, Homo sapiens
tgttaacctttagtt

SEQ ID NO: 146043 - DNA, 15 bp, Homo sapiens
gttaacctttagtta

SEQ ID NO: 146044 - DNA, 15 bp, Homo sapiens
ttaacctttagttat

SEQ ID NO: 146045 - DNA, 15 bp, Homo sapiens
taacctttagttata

SEQ ID NO: 146046 - DNA, 15 bp, Homo sapiens
aacctttagttataa

SEQ ID NO: 146047 - DNA, 15 bp, Homo sapiens
acctttagttataaa

SEQ ID NO: 146048 - DNA, 15 bp, Homo sapiens
cctttagttataaag

SEQ ID NO: 146049 - DNA, 15 bp, Homo sapiens
ctttagttataaagt

SEQ ID NO: 146050 - DNA, 15 bp, Homo sapiens
tttagttataaagtg

SEQ ID NO: 146051 - DNA, 15 bp, Homo sapiens
ttagttataaagtga

SEQ ID NO: 146052 - DNA, 15 bp, Homo sapiens
tagttataaagtgaa

SEQ ID NO: 146053 - DNA, 15 bp, Homo sapiens
agttataaagtgaac

SEQ ID NO: 146054 - DNA, 15 bp, Homo sapiens
gttataaagtgaacc

SEQ ID NO: 146055 - DNA, 15 bp, Homo sapiens
ttataaagtgaaccc

SEQ ID NO: 146056 - DNA, 15 bp, Homo sapiens
tataaagtgaaccca

SEQ ID NO: 146057 - DNA, 15 bp, Homo sapiens
ataaagtgaacccaa

SEQ ID NO: 146058 - DNA, 15 bp, Homo sapiens
taaagtgaacccaaa

SEQ ID NO: 146059 - DNA, 15 bp, Homo sapiens
aaagtgaacccaaag

SEQ ID NO: 146060 - DNA, 15 bp, Homo sapiens
aagtgaacccaaaga

SEQ ID NO: 146061 - DNA, 15 bp, Homo sapiens
agtgaacccaaagag

SEQ ID NO: 146062 - DNA, 15 bp, Homo sapiens
gtgaacccaaagaga

SEQ ID NO: 146063 - DNA, 15 bp, Homo sapiens
tgaacccaaagagag

SEQ ID NO: 146064 - DNA, 15 bp, Homo sapiens
gaacccaaagagaga

SEQ ID NO: 146065 - DNA, 15 bp, Homo sapiens
aacccaaagagagaa

SEQ ID NO: 146066 - DNA, 15 bp, Homo sapiens
acccaaagagagaaa

SEQ ID NO: 146067 - DNA, 15 bp, Homo sapiens
cccaaagagagaaag

SEQ ID NO: 146068 - DNA, 15 bp, Homo sapiens
ccaaagagagaaagt

SEQ ID NO: 146069 - DNA, 15 bp, Homo sapiens
caaagagagaaagta

SEQ ID NO: 146070 - DNA, 15 bp, Homo sapiens
aaagagagaaagtag

SEQ ID NO: 146071 - DNA, 15 bp, Homo sapiens
aagagagaaagtaga

SEQ ID NO: 146072 - DNA, 15 bp, Homo sapiens
agagagaaagtagaa

SEQ ID NO: 146073 - DNA, 15 bp, Homo sapiens
gagagaaagtagaaa

SEQ ID NO: 146074 - DNA, 15 bp, Homo sapiens
agagaaagtagaaac

SEQ ID NO: 146075 - DNA, 15 bp, Homo sapiens
gagaaagtagaaaca

SEQ ID NO: 146076 - DNA, 15 bp, Homo sapiens
agaaagtagaaacaa

SEQ ID NO: 146077 - DNA, 15 bp, Homo sapiens
gaaagtagaaacaaa

SEQ ID NO: 146078 - DNA, 15 bp, Homo sapiens
aaagtagaaacaaaa

SEQ ID NO: 146079 - DNA, 15 bp, Homo sapiens
aagtagaaacaaaac

SEQ ID NO: 146080 - DNA, 15 bp, Homo sapiens
agtagaaacaaaaca

SEQ ID NO: 146081 - DNA, 15 bp, Homo sapiens
gtagaaacaaaacac

SEQ ID NO: 146082 - DNA, 15 bp, Homo sapiens
tagaaacaaaacacc

SEQ ID NO: 146083 - DNA, 15 bp, Homo sapiens
agaaacaaaacacct

SEQ ID NO: 146084 - DNA, 15 bp, Homo sapiens
gaaacaaaacacctc

SEQ ID NO: 146085 - DNA, 15 bp, Homo sapiens
aaacaaaacacctca

SEQ ID NO: 146086 - DNA, 15 bp, Homo sapiens
aacaaaacacctcac

SEQ ID NO: 146087 - DNA, 15 bp, Homo sapiens
acaaaacacctcacc

SEQ ID NO: 146088 - DNA, 15 bp, Homo sapiens
caaaacacctcacct

SEQ ID NO: 146089 - DNA, 15 bp, Homo sapiens
aaaacacctcacctg

SEQ ID NO: 146090 - DNA, 15 bp, Homo sapiens
aaacacctcacctgt

SEQ ID NO: 146091 - DNA, 15 bp, Homo sapiens
aacacctcacctgtt

SEQ ID NO: 146092 - DNA, 15 bp, Homo sapiens
acacctcacctgttt

SEQ ID NO: 146093 - DNA, 15 bp, Homo sapiens
cacctcacctgtttt

SEQ ID NO: 146094 - DNA, 15 bp, Homo sapiens
acctcacctgttttt

SEQ ID NO: 146095 - DNA, 15 bp, Homo sapiens
cctcacctgtttttg

SEQ ID NO: 146096 - DNA, 15 bp, Homo sapiens
ctcacctgtttttgc

SEQ ID NO: 146097 - DNA, 15 bp, Homo sapiens
tcacctgtttttgct

SEQ ID NO: 146098 - DNA, 15 bp, Homo sapiens
cacctgtttttgctc

SEQ ID NO: 146099 - DNA, 15 bp, Homo sapiens
acctgtttttgctca

SEQ ID NO: 146100 - DNA, 15 bp, Homo sapiens
cctgtttttgctcat

SEQ ID NO: 146101 - DNA, 15 bp, Homo sapiens
ctgtttttgctcatg

SEQ ID NO: 146102 - DNA, 15 bp, Homo sapiens
tgtttttgctcatga

SEQ ID NO: 146103 - DNA, 15 bp, Homo sapiens
gtttttgctcatgaa

SEQ ID NO: 146104 - DNA, 15 bp, Homo sapiens
tttttgctcatgaat

SEQ ID NO: 146105 - DNA, 15 bp, Homo sapiens
ttttgctcatgaatt

SEQ ID NO: 146106 - DNA, 15 bp, Homo sapiens
tttgctcatgaatta

SEQ ID NO: 146107 - DNA, 15 bp, Homo sapiens
ttgctcatgaattac

SEQ ID NO: 146108 - DNA, 15 bp, Homo sapiens
tgctcatgaattact

SEQ ID NO: 146109 - DNA, 15 bp, Homo sapiens
gctcatgaattactc

SEQ ID NO: 146110 - DNA, 15 bp, Homo sapiens
ctcatgaattactct

SEQ ID NO: 146111 - DNA, 15 bp, Homo sapiens
tcatgaattactctc

SEQ ID NO: 146112 - DNA, 15 bp, Homo sapiens
catgaattactctct

SEQ ID NO: 146113 - DNA, 15 bp, Homo sapiens
atgaattactctcta

SEQ ID NO: 146114 - DNA, 15 bp, Homo sapiens
tgaattactctctat

SEQ ID NO: 146115 - DNA, 15 bp, Homo sapiens
gaattactctctatg

SEQ ID NO: 146116 - DNA, 15 bp, Homo sapiens
aattactctctatgg

SEQ ID NO: 146117 - DNA, 15 bp, Homo sapiens
attactctctatgga

SEQ ID NO: 146118 - DNA, 15 bp, Homo sapiens
ttactctctatggaa

SEQ ID NO: 146119 - DNA, 15 bp, Homo sapiens
tactctctatggaag

SEQ ID NO: 146120 - DNA, 15 bp, Homo sapiens
actctctatggaagg

SEQ ID NO: 146121 - DNA, 15 bp, Homo sapiens
ctctctatggaagga

SEQ ID NO: 146122 - DNA, 15 bp, Homo sapiens
tctctatggaaggaa

SEQ ID NO: 146123 - DNA, 15 bp, Homo sapiens
ctctatggaaggaac

SEQ ID NO: 146124 - DNA, 15 bp, Homo sapiens
tctatggaaggaaca

SEQ ID NO: 146125 - DNA, 15 bp, Homo sapiens
ctatggaaggaacaa

SEQ ID NO: 146126 - DNA, 15 bp, Homo sapiens
tatggaaggaacaat

SEQ ID NO: 146127 - DNA, 15 bp, Homo sapiens
atggaaggaacaatc

SEQ ID NO: 146128 - DNA, 15 bp, Homo sapiens
tggaaggaacaatca

SEQ ID NO: 146129 - DNA, 15 bp, Homo sapiens
ggaaggaacaatcat

SEQ ID NO: 146130 - DNA, 15 bp, Homo sapiens
gaaggaacaatcatg

SEQ ID NO: 146131 - DNA, 15 bp, Homo sapiens
aaggaacaatcatga

SEQ ID NO: 146132 - DNA, 15 bp, Homo sapiens
aggaacaatcatgaa

SEQ ID NO: 146133 - DNA, 15 bp, Homo sapiens
ggaacaatcatgaac

SEQ ID NO: 146134 - DNA, 15 bp, Homo sapiens
gaacaatcatgaaca

SEQ ID NO: 146135 - DNA, 15 bp, Homo sapiens
aacaatcatgaacac

SEQ ID NO: 146136 - DNA, 15 bp, Homo sapiens
acaatcatgaacacc

SEQ ID NO: 146137 - DNA, 15 bp, Homo sapiens
caatcatgaacacct

SEQ ID NO: 146138 - DNA, 15 bp, Homo sapiens
aatcatgaacacctc

SEQ ID NO: 146139 - DNA, 15 bp, Homo sapiens
atcatgaacacctct

SEQ ID NO: 146140 - DNA, 15 bp, Homo sapiens
tcatgaacacctctg

SEQ ID NO: 146141 - DNA, 15 bp, Homo sapiens
catgaacacctctgc

SEQ ID NO: 146142 - DNA, 15 bp, Homo sapiens
atgaacacctctgcg

SEQ ID NO: 146143 - DNA, 15 bp, Homo sapiens
tgaacacctctgcgt

SEQ ID NO: 146144 - DNA, 15 bp, Homo sapiens
gaacacctctgcgta

SEQ ID NO: 146145 - DNA, 15 bp, Homo sapiens
aacacctctgcgtat

SEQ ID NO: 146146 - DNA, 15 bp, Homo sapiens
acacctctgcgtatc

SEQ ID NO: 146147 - DNA, 15 bp, Homo sapiens
cacctctgcgtatca

SEQ ID NO: 146148 - DNA, 15 bp, Homo sapiens
acctctgcgtatcac

SEQ ID NO: 146149 - DNA, 15 bp, Homo sapiens
cctctgcgtatcaca

SEQ ID NO: 146150 - DNA, 15 bp, Homo sapiens
ctctgcgtatcacag

SEQ ID NO: 146151 - DNA, 15 bp, Homo sapiens
tctgcgtatcacaga

SEQ ID NO: 146152 - DNA, 15 bp, Homo sapiens
ctgcgtatcacagag

SEQ ID NO: 146153 - DNA, 15 bp, Homo sapiens
tgcgtatcacagagg

SEQ ID NO: 146154 - DNA, 15 bp, Homo sapiens
gcgtatcacagaggc

SEQ ID NO: 146155 - DNA, 15 bp, Homo sapiens
cgtatcacagaggcc

SEQ ID NO: 146156 - DNA, 15 bp, Homo sapiens
gtatcacagaggcct

SEQ ID NO: 146157 - DNA, 15 bp, Homo sapiens
tatcacagaggccta

SEQ ID NO: 146158 - DNA, 15 bp, Homo sapiens
atcacagaggcctat

SEQ ID NO: 146159 - DNA, 15 bp, Homo sapiens
tcacagaggcctatc

SEQ ID NO: 146160 - DNA, 15 bp, Homo sapiens
cacagaggcctatct

SEQ ID NO: 146161 - DNA, 15 bp, Homo sapiens
acagaggcctatctg

SEQ ID NO: 146162 - DNA, 15 bp, Homo sapiens
cagaggcctatctga

SEQ ID NO: 146163 - DNA, 15 bp, Homo sapiens
agaggcctatctgag

SEQ ID NO: 146164 - DNA, 15 bp, Homo sapiens
gaggcctatctgagt

SEQ ID NO: 146165 - DNA, 15 bp, Homo sapiens
aggcctatctgagtc

SEQ ID NO: 146166 - DNA, 15 bp, Homo sapiens
ggcctatctgagtct

SEQ ID NO: 146167 - DNA, 15 bp, Homo sapiens
gcctatctgagtctg

SEQ ID NO: 146168 - DNA, 15 bp, Homo sapiens
cctatctgagtctga

SEQ ID NO: 146169 - DNA, 15 bp, Homo sapiens
ctatctgagtctgac

SEQ ID NO: 146170 - DNA, 15 bp, Homo sapiens
tatctgagtctgacg

SEQ ID NO: 146171 - DNA, 15 bp, Homo sapiens
atctgagtctgacgt

SEQ ID NO: 146172 - DNA, 15 bp, Homo sapiens
tctgagtctgacgtt

SEQ ID NO: 146173 - DNA, 15 bp, Homo sapiens
ctgagtctgacgttt

SEQ ID NO: 146174 - DNA, 15 bp, Homo sapiens
tgagtctgacgttta

SEQ ID NO: 146175 - DNA, 15 bp, Homo sapiens
gagtctgacgtttaa

SEQ ID NO: 146176 - DNA, 15 bp, Homo sapiens
agtctgacgtttaag

SEQ ID NO: 146177 - DNA, 15 bp, Homo sapiens
gtctgacgtttaagg

SEQ ID NO: 146178 - DNA, 15 bp, Homo sapiens
tctgacgtttaaggg

SEQ ID NO: 146179 - DNA, 15 bp, Homo sapiens
ctgacgtttaaggga

SEQ ID NO: 146180 - DNA, 15 bp, Homo sapiens
tgacgtttaagggag

SEQ ID NO: 146181 - DNA, 15 bp, Homo sapiens
gacgtttaagggaga

SEQ ID NO: 146182 - DNA, 15 bp, Homo sapiens
acgtttaagggagac

SEQ ID NO: 146183 - DNA, 15 bp, Homo sapiens
cgtttaagggagacc

SEQ ID NO: 146184 - DNA, 15 bp, Homo sapiens
gtttaagggagaccg

SEQ ID NO: 146185 - DNA, 15 bp, Homo sapiens
tttaagggagaccgc

SEQ ID NO: 146186 - DNA, 15 bp, Homo sapiens
ttaagggagaccgcg

SEQ ID NO: 146187 - DNA, 15 bp, Homo sapiens
taagggagaccgcgt

SEQ ID NO: 146188 - DNA, 15 bp, Homo sapiens
aagggagaccgcgta

SEQ ID NO: 146189 - DNA, 15 bp, Homo sapiens
agggagaccgcgtag

SEQ ID NO: 146190 - DNA, 15 bp, Homo sapiens
gggagaccgcgtagg

SEQ ID NO: 146191 - DNA, 15 bp, Homo sapiens
ggagaccgcgtaggt

SEQ ID NO: 146192 - DNA, 15 bp, Homo sapiens
gagaccgcgtaggtc

SEQ ID NO: 146193 - DNA, 15 bp, Homo sapiens
agaccgcgtaggtcc

SEQ ID NO: 146194 - DNA, 15 bp, Homo sapiens
gaccgcgtaggtccc

SEQ ID NO: 146195 - DNA, 15 bp, Homo sapiens
accgcgtaggtccct

SEQ ID NO: 146196 - DNA, 15 bp, Homo sapiens
ccgcgtaggtccctt

SEQ ID NO: 146197 - DNA, 15 bp, Homo sapiens
cgcgtaggtcccttt

SEQ ID NO: 146198 - DNA, 15 bp, Homo sapiens
gcgtaggtccctttg

SEQ ID NO: 146199 - DNA, 15 bp, Homo sapiens
cgtaggtccctttga

SEQ ID NO: 146200 - DNA, 15 bp, Homo sapiens
gtaggtccctttgag

SEQ ID NO: 146201 - DNA, 15 bp, Homo sapiens
taggtccctttgagg

SEQ ID NO: 146202 - DNA, 15 bp, Homo sapiens
aggtccctttgagga

SEQ ID NO: 146203 - DNA, 15 bp, Homo sapiens
ggtccctttgaggac

SEQ ID NO: 146204 - DNA, 15 bp, Homo sapiens
gtccctttgaggact

SEQ ID NO: 146205 - DNA, 15 bp, Homo sapiens
tccctttgaggactg

SEQ ID NO: 146206 - DNA, 15 bp, Homo sapiens
ccctttgaggactgt

SEQ ID NO: 146207 - DNA, 15 bp, Homo sapiens
cctttgaggactgtg

SEQ ID NO: 146208 - DNA, 15 bp, Homo sapiens
ctttgaggactgtga

SEQ ID NO: 146209 - DNA, 15 bp, Homo sapiens
tttgaggactgtgaa

SEQ ID NO: 146210 - DNA, 15 bp, Homo sapiens
ttgaggactgtgaat

SEQ ID NO: 146211 - DNA, 15 bp, Homo sapiens
tgaggactgtgaatg

SEQ ID NO: 146212 - DNA, 15 bp, Homo sapiens
gaggactgtgaatgt

SEQ ID NO: 146213 - DNA, 15 bp, Homo sapiens
aggactgtgaatgtg

SEQ ID NO: 146214 - DNA, 15 bp, Homo sapiens
ggactgtgaatgtgg

SEQ ID NO: 146215 - DNA, 15 bp, Homo sapiens
gactgtgaatgtggg

SEQ ID NO: 146216 - DNA, 15 bp, Homo sapiens
actgtgaatgtggga

SEQ ID NO: 146217 - DNA, 15 bp, Homo sapiens
ctgtgaatgtgggag

SEQ ID NO: 146218 - DNA, 15 bp, Homo sapiens
tgtgaatgtgggagt

SEQ ID NO: 146219 - DNA, 15 bp, Homo sapiens
gtgaatgtgggagtc

SEQ ID NO: 146220 - DNA, 15 bp, Homo sapiens
tgaatgtgggagtcc

SEQ ID NO: 146221 - DNA, 15 bp, Homo sapiens
gaatgtgggagtcct

SEQ ID NO: 146222 - DNA, 15 bp, Homo sapiens
aatgtgggagtcctg

SEQ ID NO: 146223 - DNA, 15 bp, Homo sapiens
atgtgggagtcctgg

SEQ ID NO: 146224 - DNA, 15 bp, Homo sapiens
tgtgggagtcctggg

SEQ ID NO: 146225 - DNA, 15 bp, Homo sapiens
gtgggagtcctggga

SEQ ID NO: 146226 - DNA, 15 bp, Homo sapiens
tgggagtcctgggac

SEQ ID NO: 146227 - DNA, 15 bp, Homo sapiens
gggagtcctgggact

SEQ ID NO: 146228 - DNA, 15 bp, Homo sapiens
ggagtcctgggactc

SEQ ID NO: 146229 - DNA, 15 bp, Homo sapiens
gagtcctgggactct

SEQ ID NO: 146230 - DNA, 15 bp, Homo sapiens
agtcctgggactctg

SEQ ID NO: 146231 - DNA, 15 bp, Homo sapiens
gtcctgggactctgg

SEQ ID NO: 146232 - DNA, 15 bp, Homo sapiens
tcctgggactctggt

SEQ ID NO: 146233 - DNA, 15 bp, Homo sapiens
cctgggactctggtg

SEQ ID NO: 146234 - DNA, 15 bp, Homo sapiens
ctgggactctggtga

SEQ ID NO: 146235 - DNA, 15 bp, Homo sapiens
tgggactctggtgaa

SEQ ID NO: 146236 - DNA, 15 bp, Homo sapiens
gggactctggtgaag

SEQ ID NO: 146237 - DNA, 15 bp, Homo sapiens
ggactctggtgaaga

SEQ ID NO: 146238 - DNA, 15 bp, Homo sapiens
gactctggtgaagaa

SEQ ID NO: 146239 - DNA, 15 bp, Homo sapiens
actctggtgaagaac

SEQ ID NO: 146240 - DNA, 15 bp, Homo sapiens
ctctggtgaagaacc

SEQ ID NO: 146241 - DNA, 15 bp, Homo sapiens
tctggtgaagaaccc

SEQ ID NO: 146242 - DNA, 15 bp, Homo sapiens
ctggtgaagaacccg

SEQ ID NO: 146243 - DNA, 15 bp, Homo sapiens
tggtgaagaacccgt

SEQ ID NO: 146244 - DNA, 15 bp, Homo sapiens
ggtgaagaacccgtt

SEQ ID NO: 146245 - DNA, 15 bp, Homo sapiens
gtgaagaacccgttc

SEQ ID NO: 146246 - DNA, 15 bp, Homo sapiens
tgaagaacccgttcc

SEQ ID NO: 146247 - DNA, 15 bp, Homo sapiens
gaagaacccgttcca

SEQ ID NO: 146248 - DNA, 15 bp, Homo sapiens
aagaacccgttccag

SEQ ID NO: 146249 - DNA, 15 bp, Homo sapiens
agaacccgttccaga

SEQ ID NO: 146250 - DNA, 15 bp, Homo sapiens
gaacccgttccagaa

SEQ ID NO: 146251 - DNA, 15 bp, Homo sapiens
aacccgttccagaag

SEQ ID NO: 146252 - DNA, 15 bp, Homo sapiens
acccgttccagaaga

SEQ ID NO: 146253 - DNA, 15 bp, Homo sapiens
cccgttccagaagag

SEQ ID NO: 146254 - DNA, 15 bp, Homo sapiens
ccgttccagaagaga

SEQ ID NO: 146255 - DNA, 15 bp, Homo sapiens
cgttccagaagagat

SEQ ID NO: 146256 - DNA, 15 bp, Homo sapiens
gttccagaagagatg

SEQ ID NO: 146257 - DNA, 15 bp, Homo sapiens
ttccagaagagatga

SEQ ID NO: 146258 - DNA, 15 bp, Homo sapiens
tccagaagagatgaa

SEQ ID NO: 146259 - DNA, 15 bp, Homo sapiens
ccagaagagatgaat

SEQ ID NO: 146260 - DNA, 15 bp, Homo sapiens
cagaagagatgaatg

SEQ ID NO: 146261 - DNA, 15 bp, Homo sapiens
agaagagatgaatga

SEQ ID NO: 146262 - DNA, 15 bp, Homo sapiens
gaagagatgaatgag

SEQ ID NO: 146263 - DNA, 15 bp, Homo sapiens
aagagatgaatgagc

SEQ ID NO: 146264 - DNA, 15 bp, Homo sapiens
agagatgaatgagct

SEQ ID NO: 146265 - DNA, 15 bp, Homo sapiens
gagatgaatgagctg

SEQ ID NO: 146266 - DNA, 15 bp, Homo sapiens
agatgaatgagctgg

SEQ ID NO: 146267 - DNA, 15 bp, Homo sapiens
gatgaatgagctgga

SEQ ID NO: 146268 - DNA, 15 bp, Homo sapiens
atgaatgagctggac

SEQ ID NO: 146269 - DNA, 15 bp, Homo sapiens
tgaatgagctggaca

SEQ ID NO: 146270 - DNA, 15 bp, Homo sapiens
gaatgagctggacaa

SEQ ID NO: 146271 - DNA, 15 bp, Homo sapiens
aatgagctggacaag

SEQ ID NO: 146272 - DNA, 15 bp, Homo sapiens
atgagctggacaagt

SEQ ID NO: 146273 - DNA, 15 bp, Homo sapiens
tgagctggacaagtt

SEQ ID NO: 146274 - DNA, 15 bp, Homo sapiens
gagctggacaagttc

SEQ ID NO: 146275 - DNA, 15 bp, Homo sapiens
agctggacaagttct

SEQ ID NO: 146276 - DNA, 15 bp, Homo sapiens
gctggacaagttctt

SEQ ID NO: 146277 - DNA, 15 bp, Homo sapiens
ctggacaagttcttt

SEQ ID NO: 146278 - DNA, 15 bp, Homo sapiens
tggacaagttctttc

SEQ ID NO: 146279 - DNA, 15 bp, Homo sapiens
ggacaagttctttca

SEQ ID NO: 146280 - DNA, 15 bp, Homo sapiens
gacaagttctttcat

SEQ ID NO: 146281 - DNA, 15 bp, Homo sapiens
acaagttctttcata

SEQ ID NO: 146282 - DNA, 15 bp, Homo sapiens
caagttctttcatag

SEQ ID NO: 146283 - DNA, 15 bp, Homo sapiens
aagttctttcataga

SEQ ID NO: 146284 - DNA, 15 bp, Homo sapiens
agttctttcatagaa

SEQ ID NO: 146285 - DNA, 15 bp, Homo sapiens
gttctttcatagaac

SEQ ID NO: 146286 - DNA, 15 bp, Homo sapiens
ttctttcatagaacc

SEQ ID NO: 146287 - DNA, 15 bp, Homo sapiens
tctttcatagaacct

SEQ ID NO: 146288 - DNA, 15 bp, Homo sapiens
ctttcatagaacctt

SEQ ID NO: 146289 - DNA, 15 bp, Homo sapiens
tttcatagaaccttt

SEQ ID NO: 146290 - DNA, 15 bp, Homo sapiens
ttcatagaaccttta

SEQ ID NO: 146291 - DNA, 15 bp, Homo sapiens
tcatagaacctttag

SEQ ID NO: 146292 - DNA, 15 bp, Homo sapiens
catagaacctttagg

SEQ ID NO: 146293 - DNA, 15 bp, Homo sapiens
atagaacctttaggc

SEQ ID NO: 146294 - DNA, 15 bp, Homo sapiens
tagaacctttaggca

SEQ ID NO: 146295 - DNA, 15 bp, Homo sapiens
agaacctttaggcag

SEQ ID NO: 146296 - DNA, 15 bp, Homo sapiens
gaacctttaggcagg

SEQ ID NO: 146297 - DNA, 15 bp, Homo sapiens
aacctttaggcaggt

SEQ ID NO: 146298 - DNA, 15 bp, Homo sapiens
acctttaggcaggtt

SEQ ID NO: 146299 - DNA, 15 bp, Homo sapiens
cctttaggcaggttt

SEQ ID NO: 146300 - DNA, 15 bp, Homo sapiens
ctttaggcaggtttt

SEQ ID NO: 146301 - DNA, 15 bp, Homo sapiens
tttaggcaggttttc

SEQ ID NO: 146302 - DNA, 15 bp, Homo sapiens
ttaggcaggttttct

SEQ ID NO: 146303 - DNA, 15 bp, Homo sapiens
taggcaggttttctt

SEQ ID NO: 146304 - DNA, 15 bp, Homo sapiens
aggcaggttttctta

SEQ ID NO: 146305 - DNA, 15 bp, Homo sapiens
ggcaggttttcttag

SEQ ID NO: 146306 - DNA, 15 bp, Homo sapiens
gcaggttttcttaga

SEQ ID NO: 146307 - DNA, 15 bp, Homo sapiens
caggttttcttagaa

SEQ ID NO: 146308 - DNA, 15 bp, Homo sapiens
aggttttcttagaaa

SEQ ID NO: 146309 - DNA, 15 bp, Homo sapiens
ggttttcttagaaat

SEQ ID NO: 146310 - DNA, 15 bp, Homo sapiens
gttttcttagaaatg

SEQ ID NO: 146311 - DNA, 15 bp, Homo sapiens
ttttcttagaaatgc

SEQ ID NO: 146312 - DNA, 15 bp, Homo sapiens
tttcttagaaatgca

SEQ ID NO: 146313 - DNA, 15 bp, Homo sapiens
ttcttagaaatgcac

SEQ ID NO: 146314 - DNA, 15 bp, Homo sapiens
tcttagaaatgcaca

SEQ ID NO: 146315 - DNA, 15 bp, Homo sapiens
cttagaaatgcacat

SEQ ID NO: 146316 - DNA, 15 bp, Homo sapiens
ttagaaatgcacatt

SEQ ID NO: 146317 - DNA, 15 bp, Homo sapiens
tagaaatgcacattg

SEQ ID NO: 146318 - DNA, 15 bp, Homo sapiens
agaaatgcacattga

SEQ ID NO: 146319 - DNA, 15 bp, Homo sapiens
gaaatgcacattgag

SEQ ID NO: 146320 - DNA, 15 bp, Homo sapiens
aaatgcacattgagg

SEQ ID NO: 146321 - DNA, 15 bp, Homo sapiens
aatgcacattgagga

SEQ ID NO: 146322 - DNA, 15 bp, Homo sapiens
atgcacattgaggat

SEQ ID NO: 146323 - DNA, 15 bp, Homo sapiens
tgcacattgaggatt

SEQ ID NO: 146324 - DNA, 15 bp, Homo sapiens
gcacattgaggatta

SEQ ID NO: 146325 - DNA, 15 bp, Homo sapiens
cacattgaggattat

SEQ ID NO: 146326 - DNA, 15 bp, Homo sapiens
acattgaggattatg

SEQ ID NO: 146327 - DNA, 15 bp, Homo sapiens
cattgaggattatgc

SEQ ID NO: 146328 - DNA, 15 bp, Homo sapiens
attgaggattatgct

SEQ ID NO: 146329 - DNA, 15 bp, Homo sapiens
ttgaggattatgctt

SEQ ID NO: 146330 - DNA, 15 bp, Homo sapiens
tgaggattatgcttg

SEQ ID NO: 146331 - DNA, 15 bp, Homo sapiens
gaggattatgcttgg

SEQ ID NO: 146332 - DNA, 15 bp, Homo sapiens
aggattatgcttgga

SEQ ID NO: 146333 - DNA, 15 bp, Homo sapiens
ggattatgcttggat

SEQ ID NO: 146334 - DNA, 15 bp, Homo sapiens
gattatgcttggata

SEQ ID NO: 146335 - DNA, 15 bp, Homo sapiens
attatgcttggatat

SEQ ID NO: 146336 - DNA, 15 bp, Homo sapiens
ttatgcttggatatt

SEQ ID NO: 146337 - DNA, 15 bp, Homo sapiens
tatgcttggatattg

SEQ ID NO: 146338 - DNA, 15 bp, Homo sapiens
atgcttggatattgt

SEQ ID NO: 146339 - DNA, 15 bp, Homo sapiens
tgcttggatattgtg

SEQ ID NO: 146340 - DNA, 15 bp, Homo sapiens
gcttggatattgtga

SEQ ID NO: 146341 - DNA, 15 bp, Homo sapiens
cttggatattgtgat

SEQ ID NO: 146342 - DNA, 15 bp, Homo sapiens
ttggatattgtgatg

SEQ ID NO: 146343 - DNA, 15 bp, Homo sapiens
tggatattgtgatga

SEQ ID NO: 146344 - DNA, 15 bp, Homo sapiens
ggatattgtgatgat

SEQ ID NO: 146345 - DNA, 15 bp, Homo sapiens
gatattgtgatgatc

SEQ ID NO: 146346 - DNA, 15 bp, Homo sapiens
atattgtgatgatca

SEQ ID NO: 146347 - DNA, 15 bp, Homo sapiens
tattgtgatgatcag

SEQ ID NO: 146348 - DNA, 15 bp, Homo sapiens
attgtgatgatcaga

SEQ ID NO: 146349 - DNA, 15 bp, Homo sapiens
ttgtgatgatcagaa

SEQ ID NO: 146350 - DNA, 15 bp, Homo sapiens
tgtgatgatcagaat

SEQ ID NO: 146351 - DNA, 15 bp, Homo sapiens
gtgatgatcagaatg

SEQ ID NO: 146352 - DNA, 15 bp, Homo sapiens
tgatgatcagaatga

SEQ ID NO: 146353 - DNA, 15 bp, Homo sapiens
gatgatcagaatgat

SEQ ID NO: 146354 - DNA, 15 bp, Homo sapiens
atgatcagaatgata

SEQ ID NO: 146355 - DNA, 15 bp, Homo sapiens
tgatcagaatgatac

SEQ ID NO: 146356 - DNA, 15 bp, Homo sapiens
gatcagaatgatact

SEQ ID NO: 146357 - DNA, 15 bp, Homo sapiens
atcagaatgatactc

SEQ ID NO: 146358 - DNA, 15 bp, Homo sapiens
tcagaatgatactca

SEQ ID NO: 146359 - DNA, 15 bp, Homo sapiens
cagaatgatactcaa

SEQ ID NO: 146360 - DNA, 15 bp, Homo sapiens
agaatgatactcaat

SEQ ID NO: 146361 - DNA, 15 bp, Homo sapiens
gaatgatactcaatc

SEQ ID NO: 146362 - DNA, 15 bp, Homo sapiens
aatgatactcaatcc

SEQ ID NO: 146363 - DNA, 15 bp, Homo sapiens
atgatactcaatccc

SEQ ID NO: 146364 - DNA, 15 bp, Homo sapiens
tgatactcaatccct

SEQ ID NO: 146365 - DNA, 15 bp, Homo sapiens
gatactcaatccctt

SEQ ID NO: 146366 - DNA, 15 bp, Homo sapiens
atactcaatcccttc

SEQ ID NO: 146367 - DNA, 15 bp, Homo sapiens
tactcaatcccttct

SEQ ID NO: 146368 - DNA, 15 bp, Homo sapiens
actcaatcccttctg

SEQ ID NO: 146369 - DNA, 15 bp, Homo sapiens
ctcaatcccttctgc

SEQ ID NO: 146370 - DNA, 15 bp, Homo sapiens
tcaatcccttctgca

SEQ ID NO: 146371 - DNA, 15 bp, Homo sapiens
caatcccttctgcat

SEQ ID NO: 146372 - DNA, 15 bp, Homo sapiens
aatcccttctgcatt

SEQ ID NO: 146373 - DNA, 15 bp, Homo sapiens
atcccttctgcattt

SEQ ID NO: 146374 - DNA, 15 bp, Homo sapiens
tcccttctgcatttg

SEQ ID NO: 146375 - DNA, 15 bp, Homo sapiens
cccttctgcatttgg

SEQ ID NO: 146376 - DNA, 15 bp, Homo sapiens
ccttctgcatttgga

SEQ ID NO: 146377 - DNA, 15 bp, Homo sapiens
cttctgcatttggaa

SEQ ID NO: 146378 - DNA, 15 bp, Homo sapiens
ttctgcatttggaat

SEQ ID NO: 146379 - DNA, 15 bp, Homo sapiens
tctgcatttggaatt

SEQ ID NO: 146380 - DNA, 15 bp, Homo sapiens
ctgcatttggaattc

SEQ ID NO: 146381 - DNA, 15 bp, Homo sapiens
tgcatttggaattct

SEQ ID NO: 146382 - DNA, 15 bp, Homo sapiens
gcatttggaattctc

SEQ ID NO: 146383 - DNA, 15 bp, Homo sapiens
catttggaattctct

SEQ ID NO: 146384 - DNA, 15 bp, Homo sapiens
atttggaattctctt

SEQ ID NO: 146385 - DNA, 15 bp, Homo sapiens
tttggaattctcttt

SEQ ID NO: 146386 - DNA, 15 bp, Homo sapiens
ttggaattctctttg

SEQ ID NO: 146387 - DNA, 15 bp, Homo sapiens
tggaattctctttga

SEQ ID NO: 146388 - DNA, 15 bp, Homo sapiens
ggaattctctttgaa

SEQ ID NO: 146389 - DNA, 15 bp, Homo sapiens
gaattctctttgaaa

SEQ ID NO: 146390 - DNA, 15 bp, Homo sapiens
aattctctttgaaag

SEQ ID NO: 146391 - DNA, 15 bp, Homo sapiens
attctctttgaaaga

SEQ ID NO: 146392 - DNA, 15 bp, Homo sapiens
ttctctttgaaagaa

SEQ ID NO: 146393 - DNA, 15 bp, Homo sapiens
tctctttgaaagaaa

SEQ ID NO: 146394 - DNA, 15 bp, Homo sapiens
ctctttgaaagaaaa

SEQ ID NO: 146395 - DNA, 15 bp, Homo sapiens
tctttgaaagaaaac

SEQ ID NO: 146396 - DNA, 15 bp, Homo sapiens
ctttgaaagaaaaca

SEQ ID NO: 146397 - DNA, 15 bp, Homo sapiens
tttgaaagaaaacat

SEQ ID NO: 146398 - DNA, 15 bp, Homo sapiens
ttgaaagaaaacatc

SEQ ID NO: 146399 - DNA, 15 bp, Homo sapiens
tgaaagaaaacatcc

SEQ ID NO: 146400 - DNA, 15 bp, Homo sapiens
gaaagaaaacatccc

SEQ ID NO: 146401 - DNA, 15 bp, Homo sapiens
aaagaaaacatccca

SEQ ID NO: 146402 - DNA, 15 bp, Homo sapiens
aagaaaacatcccag

SEQ ID NO: 146403 - DNA, 15 bp, Homo sapiens
agaaaacatcccagg

SEQ ID NO: 146404 - DNA, 15 bp, Homo sapiens
gaaaacatcccaggc

SEQ ID NO: 146405 - DNA, 15 bp, Homo sapiens
aaaacatcccaggca

SEQ ID NO: 146406 - DNA, 15 bp, Homo sapiens
aaacatcccaggcag

SEQ ID NO: 146407 - DNA, 15 bp, Homo sapiens
aacatcccaggcagc

SEQ ID NO: 146408 - DNA, 15 bp, Homo sapiens
acatcccaggcagct

SEQ ID NO: 146409 - DNA, 15 bp, Homo sapiens
catcccaggcagcta

SEQ ID NO: 146410 - DNA, 15 bp, Homo sapiens
atcccaggcagctat

SEQ ID NO: 146411 - DNA, 15 bp, Homo sapiens
tcccaggcagctatt

SEQ ID NO: 146412 - DNA, 15 bp, Homo sapiens
cccaggcagctattt

SEQ ID NO: 146413 - DNA, 15 bp, Homo sapiens
ccaggcagctatttc

SEQ ID NO: 146414 - DNA, 15 bp, Homo sapiens
caggcagctatttct

SEQ ID NO: 146415 - DNA, 15 bp, Homo sapiens
aggcagctatttctc

SEQ ID NO: 146416 - DNA, 15 bp, Homo sapiens
ggcagctatttctca

SEQ ID NO: 146417 - DNA, 15 bp, Homo sapiens
gcagctatttctcag

SEQ ID NO: 146418 - DNA, 15 bp, Homo sapiens
cagctatttctcaga

SEQ ID NO: 146419 - DNA, 15 bp, Homo sapiens
agctatttctcagag

SEQ ID NO: 146420 - DNA, 15 bp, Homo sapiens
gctatttctcagaga

SEQ ID NO: 146421 - DNA, 15 bp, Homo sapiens
ctatttctcagagat

SEQ ID NO: 146422 - DNA, 15 bp, Homo sapiens
tatttctcagagata

SEQ ID NO: 146423 - DNA, 15 bp, Homo sapiens
atttctcagagatag

SEQ ID NO: 146424 - DNA, 15 bp, Homo sapiens
tttctcagagatagt

SEQ ID NO: 146425 - DNA, 15 bp, Homo sapiens
ttctcagagatagtg

SEQ ID NO: 146426 - DNA, 15 bp, Homo sapiens
tctcagagatagtga

SEQ ID NO: 146427 - DNA, 15 bp, Homo sapiens
ctcagagatagtgag

SEQ ID NO: 146428 - DNA, 15 bp, Homo sapiens
tcagagatagtgagt

SEQ ID NO: 146429 - DNA, 15 bp, Homo sapiens
cagagatagtgagtc

SEQ ID NO: 146430 - DNA, 15 bp, Homo sapiens
agagatagtgagtcc

SEQ ID NO: 146431 - DNA, 15 bp, Homo sapiens
gagatagtgagtccc

SEQ ID NO: 146432 - DNA, 15 bp, Homo sapiens
agatagtgagtccca

SEQ ID NO: 146433 - DNA, 15 bp, Homo sapiens
gatagtgagtcccag

SEQ ID NO: 146434 - DNA, 15 bp, Homo sapiens
atagtgagtcccagc

SEQ ID NO: 146435 - DNA, 15 bp, Homo sapiens
tagtgagtcccagcc

SEQ ID NO: 146436 - DNA, 15 bp, Homo sapiens
agtgagtcccagcca

SEQ ID NO: 146437 - DNA, 15 bp, Homo sapiens
gtgagtcccagccac

SEQ ID NO: 146438 - DNA, 15 bp, Homo sapiens
tgagtcccagccact

SEQ ID NO: 146439 - DNA, 15 bp, Homo sapiens
gagtcccagccactt

SEQ ID NO: 146440 - DNA, 15 bp, Homo sapiens
agtcccagccacttc

SEQ ID NO: 146441 - DNA, 15 bp, Homo sapiens
gtcccagccacttct

SEQ ID NO: 146442 - DNA, 15 bp, Homo sapiens
tcccagccacttcta

SEQ ID NO: 146443 - DNA, 15 bp, Homo sapiens
cccagccacttctag

SEQ ID NO: 146444 - DNA, 15 bp, Homo sapiens
ccagccacttctaga

SEQ ID NO: 146445 - DNA, 15 bp, Homo sapiens
cagccacttctagac

SEQ ID NO: 146446 - DNA, 15 bp, Homo sapiens
agccacttctagaca

SEQ ID NO: 146447 - DNA, 15 bp, Homo sapiens
gccacttctagacat

SEQ ID NO: 146448 - DNA, 15 bp, Homo sapiens
ccacttctagacatt

SEQ ID NO: 146449 - DNA, 15 bp, Homo sapiens
cacttctagacattt

SEQ ID NO: 146450 - DNA, 15 bp, Homo sapiens
acttctagacatttt

SEQ ID NO: 146451 - DNA, 15 bp, Homo sapiens
cttctagacattttc

SEQ ID NO: 146452 - DNA, 15 bp, Homo sapiens
ttctagacattttct

SEQ ID NO: 146453 - DNA, 15 bp, Homo sapiens
tctagacattttctt

SEQ ID NO: 146454 - DNA, 15 bp, Homo sapiens
ctagacattttcttg

SEQ ID NO: 146455 - DNA, 15 bp, Homo sapiens
tagacattttcttgt

SEQ ID NO: 146456 - DNA, 15 bp, Homo sapiens
agacattttcttgtg

SEQ ID NO: 146457 - DNA, 15 bp, Homo sapiens
gacattttcttgtgt

SEQ ID NO: 146458 - DNA, 15 bp, Homo sapiens
acattttcttgtgta

SEQ ID NO: 146459 - DNA, 15 bp, Homo sapiens
cattttcttgtgtag

SEQ ID NO: 146460 - DNA, 15 bp, Homo sapiens
attttcttgtgtagt

SEQ ID NO: 146461 - DNA, 15 bp, Homo sapiens
ttttcttgtgtagtc

SEQ ID NO: 146462 - DNA, 15 bp, Homo sapiens
tttcttgtgtagtct

SEQ ID NO: 146463 - DNA, 15 bp, Homo sapiens
ttcttgtgtagtcta

SEQ ID NO: 146464 - DNA, 15 bp, Homo sapiens
tcttgtgtagtctac

SEQ ID NO: 146465 - DNA, 15 bp, Homo sapiens
cttgtgtagtctaca

SEQ ID NO: 146466 - DNA, 15 bp, Homo sapiens
ttgtgtagtctacat

SEQ ID NO: 146467 - DNA, 15 bp, Homo sapiens
tgtgtagtctacatt

SEQ ID NO: 146468 - DNA, 15 bp, Homo sapiens
gtgtagtctacatta

SEQ ID NO: 146469 - DNA, 15 bp, Homo sapiens
tgtagtctacattat

SEQ ID NO: 146470 - DNA, 15 bp, Homo sapiens
gtagtctacattata

SEQ ID NO: 146471 - DNA, 15 bp, Homo sapiens
tagtctacattataa

SEQ ID NO: 146472 - DNA, 15 bp, Homo sapiens
agtctacattataat

SEQ ID NO: 146473 - DNA, 15 bp, Homo sapiens
gtctacattataatt

SEQ ID NO: 146474 - DNA, 15 bp, Homo sapiens
tctacattataattt

SEQ ID NO: 146475 - DNA, 15 bp, Homo sapiens
ctacattataatttc

SEQ ID NO: 146476 - DNA, 15 bp, Homo sapiens
tacattataatttca

SEQ ID NO: 146477 - DNA, 15 bp, Homo sapiens
acattataatttcac

SEQ ID NO: 146478 - DNA, 15 bp, Homo sapiens
cattataatttcaca

SEQ ID NO: 146479 - DNA, 15 bp, Homo sapiens
attataatttcacag

SEQ ID NO: 146480 - DNA, 15 bp, Homo sapiens
ttataatttcacagc

SEQ ID NO: 146481 - DNA, 15 bp, Homo sapiens
tataatttcacagca

SEQ ID NO: 146482 - DNA, 15 bp, Homo sapiens
ataatttcacagcag

SEQ ID NO: 146483 - DNA, 15 bp, Homo sapiens
taatttcacagcagt

SEQ ID NO: 146484 - DNA, 15 bp, Homo sapiens
aatttcacagcagtc

SEQ ID NO: 146485 - DNA, 15 bp, Homo sapiens
atttcacagcagtct

SEQ ID NO: 146486 - DNA, 15 bp, Homo sapiens
tttcacagcagtctc

SEQ ID NO: 146487 - DNA, 15 bp, Homo sapiens
ttcacagcagtctct

SEQ ID NO: 146488 - DNA, 15 bp, Homo sapiens
tcacagcagtctctg

SEQ ID NO: 146489 - DNA, 15 bp, Homo sapiens
cacagcagtctctga

SEQ ID NO: 146490 - DNA, 15 bp, Homo sapiens
acagcagtctctgat

SEQ ID NO: 146491 - DNA, 15 bp, Homo sapiens
cagcagtctctgata

SEQ ID NO: 146492 - DNA, 15 bp, Homo sapiens
agcagtctctgatat

SEQ ID NO: 146493 - DNA, 15 bp, Homo sapiens
gcagtctctgatatg

SEQ ID NO: 146494 - DNA, 15 bp, Homo sapiens
cagtctctgatatga

SEQ ID NO: 146495 - DNA, 15 bp, Homo sapiens
agtctctgatatgac

SEQ ID NO: 146496 - DNA, 15 bp, Homo sapiens
gtctctgatatgaca

SEQ ID NO: 146497 - DNA, 15 bp, Homo sapiens
tctctgatatgacaa

SEQ ID NO: 146498 - DNA, 15 bp, Homo sapiens
ctctgatatgacaaa

SEQ ID NO: 146499 - DNA, 15 bp, Homo sapiens
tctgatatgacaaat

SEQ ID NO: 146500 - DNA, 15 bp, Homo sapiens
ctgatatgacaaatg

SEQ ID NO: 146501 - DNA, 15 bp, Homo sapiens
tgatatgacaaatgt

SEQ ID NO: 146502 - DNA, 15 bp, Homo sapiens
gatatgacaaatgtc

SEQ ID NO: 146503 - DNA, 15 bp, Homo sapiens
atatgacaaatgtca

SEQ ID NO: 146504 - DNA, 15 bp, Homo sapiens
tatgacaaatgtcaa

SEQ ID NO: 146505 - DNA, 15 bp, Homo sapiens
atgacaaatgtcaaa

SEQ ID NO: 146506 - DNA, 15 bp, Homo sapiens
tgacaaatgtcaaaa

SEQ ID NO: 146507 - DNA, 15 bp, Homo sapiens
gacaaatgtcaaaat

SEQ ID NO: 146508 - DNA, 15 bp, Homo sapiens
acaaatgtcaaaata

SEQ ID NO: 146509 - DNA, 15 bp, Homo sapiens
caaatgtcaaaatag

SEQ ID NO: 146510 - DNA, 15 bp, Homo sapiens
aaatgtcaaaatagc

SEQ ID NO: 146511 - DNA, 15 bp, Homo sapiens
aatgtcaaaatagcc

SEQ ID NO: 146512 - DNA, 15 bp, Homo sapiens
atgtcaaaatagccc

SEQ ID NO: 146513 - DNA, 15 bp, Homo sapiens
tgtcaaaatagccca

SEQ ID NO: 146514 - DNA, 15 bp, Homo sapiens
gtcaaaatagcccaa

SEQ ID NO: 146515 - DNA, 15 bp, Homo sapiens
tcaaaatagcccaac

SEQ ID NO: 146516 - DNA, 15 bp, Homo sapiens
caaaatagcccaacc

SEQ ID NO: 146517 - DNA, 15 bp, Homo sapiens
aaaatagcccaacct

SEQ ID NO: 146518 - DNA, 15 bp, Homo sapiens
aaatagcccaacctt

SEQ ID NO: 146519 - DNA, 15 bp, Homo sapiens
aatagcccaaccttc

SEQ ID NO: 146520 - DNA, 15 bp, Homo sapiens
atagcccaaccttct

SEQ ID NO: 146521 - DNA, 15 bp, Homo sapiens
tagcccaaccttctc

SEQ ID NO: 146522 - DNA, 15 bp, Homo sapiens
agcccaaccttctct

SEQ ID NO: 146523 - DNA, 15 bp, Homo sapiens
gcccaaccttctcta

SEQ ID NO: 146524 - DNA, 15 bp, Homo sapiens
cccaaccttctctaa

SEQ ID NO: 146525 - DNA, 15 bp, Homo sapiens
ccaaccttctctaaa

SEQ ID NO: 146526 - DNA, 15 bp, Homo sapiens
caaccttctctaaac

SEQ ID NO: 146527 - DNA, 15 bp, Homo sapiens
aaccttctctaaact

SEQ ID NO: 146528 - DNA, 15 bp, Homo sapiens
accttctctaaactt

SEQ ID NO: 146529 - DNA, 15 bp, Homo sapiens
ccttctctaaacttc

SEQ ID NO: 146530 - DNA, 15 bp, Homo sapiens
cttctctaaacttca

SEQ ID NO: 146531 - DNA, 15 bp, Homo sapiens
ttctctaaacttcag

SEQ ID NO: 146532 - DNA, 15 bp, Homo sapiens
tctctaaacttcaga

SEQ ID NO: 146533 - DNA, 15 bp, Homo sapiens
ctctaaacttcagag

SEQ ID NO: 146534 - DNA, 15 bp, Homo sapiens
tctaaacttcagaga

SEQ ID NO: 146535 - DNA, 15 bp, Homo sapiens
ctaaacttcagagat

SEQ ID NO: 146536 - DNA, 15 bp, Homo sapiens
taaacttcagagatg

SEQ ID NO: 146537 - DNA, 15 bp, Homo sapiens
aaacttcagagatgt

SEQ ID NO: 146538 - DNA, 15 bp, Homo sapiens
aacttcagagatgtc

SEQ ID NO: 146539 - DNA, 15 bp, Homo sapiens
acttcagagatgtct

SEQ ID NO: 146540 - DNA, 15 bp, Homo sapiens
cttcagagatgtctg

SEQ ID NO: 146541 - DNA, 15 bp, Homo sapiens
ttcagagatgtctga

SEQ ID NO: 146542 - DNA, 15 bp, Homo sapiens
tcagagatgtctgat

SEQ ID NO: 146543 - DNA, 15 bp, Homo sapiens
cagagatgtctgata

SEQ ID NO: 146544 - DNA, 15 bp, Homo sapiens
agagatgtctgatat

SEQ ID NO: 146545 - DNA, 15 bp, Homo sapiens
gagatgtctgatatg

SEQ ID NO: 146546 - DNA, 15 bp, Homo sapiens
agatgtctgatatga

SEQ ID NO: 146547 - DNA, 15 bp, Homo sapiens
gatgtctgatatgat

SEQ ID NO: 146548 - DNA, 15 bp, Homo sapiens
atgtctgatatgata

SEQ ID NO: 146549 - DNA, 15 bp, Homo sapiens
tgtctgatatgatat

SEQ ID NO: 146550 - DNA, 15 bp, Homo sapiens
gtctgatatgatatt

SEQ ID NO: 146551 - DNA, 15 bp, Homo sapiens
tctgatatgatattg

SEQ ID NO: 146552 - DNA, 15 bp, Homo sapiens
ctgatatgatattga

SEQ ID NO: 146553 - DNA, 15 bp, Homo sapiens
tgatatgatattgaa

SEQ ID NO: 146554 - DNA, 15 bp, Homo sapiens
gatatgatattgaat

SEQ ID NO: 146555 - DNA, 15 bp, Homo sapiens
atatgatattgaata

SEQ ID NO: 146556 - DNA, 15 bp, Homo sapiens
tatgatattgaataa

SEQ ID NO: 146557 - DNA, 15 bp, Homo sapiens
atgatattgaataaa

SEQ ID NO: 146558 - DNA, 15 bp, Homo sapiens
tgatattgaataaaa

SEQ ID NO: 146559 - DNA, 15 bp, Homo sapiens
gatattgaataaaac

SEQ ID NO: 146560 - DNA, 15 bp, Homo sapiens
atattgaataaaaca

SEQ ID NO: 146561 - DNA, 15 bp, Homo sapiens
tattgaataaaacaa

SEQ ID NO: 146562 - DNA, 15 bp, Homo sapiens
attgaataaaacaat

SEQ ID NO: 146563 - DNA, 15 bp, Homo sapiens
ttgaataaaacaatg

SEQ ID NO: 146564 - DNA, 15 bp, Homo sapiens
tgaataaaacaatgc

SEQ ID NO: 146565 - DNA, 15 bp, Homo sapiens
gaataaaacaatgct

SEQ ID NO: 146566 - DNA, 15 bp, Homo sapiens
aataaaacaatgctc

SEQ ID NO: 146567 - DNA, 15 bp, Homo sapiens
ataaaacaatgctca

SEQ ID NO: 146568 - DNA, 15 bp, Homo sapiens
taaaacaatgctcat

SEQ ID NO: 146569 - DNA, 15 bp, Homo sapiens
aaaacaatgctcata

SEQ ID NO: 146570 - DNA, 15 bp, Homo sapiens
aaacaatgctcatag

SEQ ID NO: 146571 - DNA, 15 bp, Homo sapiens
aacaatgctcataga

SEQ ID NO: 146572 - DNA, 15 bp, Homo sapiens
acaatgctcatagaa

SEQ ID NO: 146573 - DNA, 15 bp, Homo sapiens
caatgctcatagaaa

SEQ ID NO: 146574 - DNA, 15 bp, Homo sapiens
aatgctcatagaaac

SEQ ID NO: 146575 - DNA, 15 bp, Homo sapiens
atgctcatagaaaca

SEQ ID NO: 146576 - DNA, 15 bp, Homo sapiens
tgctcatagaaacat

SEQ ID NO: 146577 - DNA, 15 bp, Homo sapiens
gctcatagaaacatc

SEQ ID NO: 146578 - DNA, 15 bp, Homo sapiens
ctcatagaaacatca

SEQ ID NO: 146579 - DNA, 15 bp, Homo sapiens
tcatagaaacatcaa

SEQ ID NO: 146580 - DNA, 15 bp, Homo sapiens
catagaaacatcaag

SEQ ID NO: 146581 - DNA, 15 bp, Homo sapiens
atagaaacatcaaga

SEQ ID NO: 146582 - DNA, 15 bp, Homo sapiens
tagaaacatcaagaa

SEQ ID NO: 146583 - DNA, 15 bp, Homo sapiens
agaaacatcaagaaa

SEQ ID NO: 146584 - DNA, 15 bp, Homo sapiens
gaaacatcaagaaag

SEQ ID NO: 146585 - DNA, 15 bp, Homo sapiens
aaacatcaagaaagg

SEQ ID NO: 146586 - DNA, 15 bp, Homo sapiens
aacatcaagaaaggt

SEQ ID NO: 146587 - DNA, 15 bp, Homo sapiens
acatcaagaaaggtg

SEQ ID NO: 146588 - DNA, 15 bp, Homo sapiens
catcaagaaaggtgg

SEQ ID NO: 146589 - DNA, 15 bp, Homo sapiens
atcaagaaaggtgga

SEQ ID NO: 146590 - DNA, 15 bp, Homo sapiens
tcaagaaaggtggat

SEQ ID NO: 146591 - DNA, 15 bp, Homo sapiens
caagaaaggtggatt

SEQ ID NO: 146592 - DNA, 15 bp, Homo sapiens
aagaaaggtggattt

SEQ ID NO: 146593 - DNA, 15 bp, Homo sapiens
agaaaggtggatttt

SEQ ID NO: 146594 - DNA, 15 bp, Homo sapiens
gaaaggtggattttc

SEQ ID NO: 146595 - DNA, 15 bp, Homo sapiens
aaaggtggattttcc

SEQ ID NO: 146596 - DNA, 15 bp, Homo sapiens
aaggtggattttccc

SEQ ID NO: 146597 - DNA, 15 bp, Homo sapiens
aggtggattttccct

SEQ ID NO: 146598 - DNA, 15 bp, Homo sapiens
ggtggattttccctg

SEQ ID NO: 146599 - DNA, 15 bp, Homo sapiens
gtggattttccctgg

SEQ ID NO: 146600 - DNA, 15 bp, Homo sapiens
tggattttccctgga

SEQ ID NO: 146601 - DNA, 15 bp, Homo sapiens
ggattttccctggat

SEQ ID NO: 146602 - DNA, 15 bp, Homo sapiens
gattttccctggata

SEQ ID NO: 146603 - DNA, 15 bp, Homo sapiens
attttccctggatac

SEQ ID NO: 146604 - DNA, 15 bp, Homo sapiens
ttttccctggatact

SEQ ID NO: 146605 - DNA, 15 bp, Homo sapiens
tttccctggatactt

SEQ ID NO: 146606 - DNA, 15 bp, Homo sapiens
ttccctggatacttt

SEQ ID NO: 146607 - DNA, 15 bp, Homo sapiens
tccctggatactttt

SEQ ID NO: 146608 - DNA, 15 bp, Homo sapiens
ccctggatacttttt

SEQ ID NO: 146609 - DNA, 15 bp, Homo sapiens
cctggatactttttt

SEQ ID NO: 146610 - DNA, 15 bp, Homo sapiens
ctggatacttttttc

SEQ ID NO: 146611 - DNA, 15 bp, Homo sapiens
tggatacttttttcc

SEQ ID NO: 146612 - DNA, 15 bp, Homo sapiens
ggatacttttttcct

SEQ ID NO: 146613 - DNA, 15 bp, Homo sapiens
gatacttttttcctg

SEQ ID NO: 146614 - DNA, 15 bp, Homo sapiens
atacttttttcctgc

SEQ ID NO: 146615 - DNA, 15 bp, Homo sapiens
tacttttttcctgct

SEQ ID NO: 146616 - DNA, 15 bp, Homo sapiens
acttttttcctgctt

SEQ ID NO: 146617 - DNA, 15 bp, Homo sapiens
cttttttcctgcttg

SEQ ID NO: 146618 - DNA, 15 bp, Homo sapiens
ttttttcctgcttga

SEQ ID NO: 146619 - DNA, 15 bp, Homo sapiens
tttttcctgcttgac

SEQ ID NO: 146620 - DNA, 15 bp, Homo sapiens
ttttcctgcttgaca

SEQ ID NO: 146621 - DNA, 15 bp, Homo sapiens
tttcctgcttgacaa

SEQ ID NO: 146622 - DNA, 15 bp, Homo sapiens
ttcctgcttgacaaa

SEQ ID NO: 146623 - DNA, 15 bp, Homo sapiens
tcctgcttgacaaat

SEQ ID NO: 146624 - DNA, 15 bp, Homo sapiens
cctgcttgacaaata

SEQ ID NO: 146625 - DNA, 15 bp, Homo sapiens
ctgcttgacaaataa

SEQ ID NO: 146626 - DNA, 15 bp, Homo sapiens
tgcttgacaaataac

SEQ ID NO: 146627 - DNA, 15 bp, Homo sapiens
gcttgacaaataaca

SEQ ID NO: 146628 - DNA, 15 bp, Homo sapiens
cttgacaaataacag

SEQ ID NO: 146629 - DNA, 15 bp, Homo sapiens
ttgacaaataacagt

SEQ ID NO: 146630 - DNA, 15 bp, Homo sapiens
tgacaaataacagtg

SEQ ID NO: 146631 - DNA, 15 bp, Homo sapiens
gacaaataacagtga

SEQ ID NO: 146632 - DNA, 15 bp, Homo sapiens
acaaataacagtgaa

SEQ ID NO: 146633 - DNA, 15 bp, Homo sapiens
caaataacagtgaag

SEQ ID NO: 146634 - DNA, 15 bp, Homo sapiens
aaataacagtgaaga

SEQ ID NO: 146635 - DNA, 15 bp, Homo sapiens
aataacagtgaagaa

SEQ ID NO: 146636 - DNA, 15 bp, Homo sapiens
ataacagtgaagaaa

SEQ ID NO: 146637 - DNA, 15 bp, Homo sapiens
taacagtgaagaaac

SEQ ID NO: 146638 - DNA, 15 bp, Homo sapiens
aacagtgaagaaact

SEQ ID NO: 146639 - DNA, 15 bp, Homo sapiens
acagtgaagaaactg

SEQ ID NO: 146640 - DNA, 15 bp, Homo sapiens
cagtgaagaaactga

SEQ ID NO: 146641 - DNA, 15 bp, Homo sapiens
agtgaagaaactgat

SEQ ID NO: 146642 - DNA, 15 bp, Homo sapiens
gtgaagaaactgatc

SEQ ID NO: 146643 - DNA, 15 bp, Homo sapiens
tgaagaaactgatct

SEQ ID NO: 146644 - DNA, 15 bp, Homo sapiens
gaagaaactgatctc

SEQ ID NO: 146645 - DNA, 15 bp, Homo sapiens
aagaaactgatctca

SEQ ID NO: 146646 - DNA, 15 bp, Homo sapiens
agaaactgatctcac

SEQ ID NO: 146647 - DNA, 15 bp, Homo sapiens
gaaactgatctcacg

SEQ ID NO: 146648 - DNA, 15 bp, Homo sapiens
aaactgatctcacgt

SEQ ID NO: 146649 - DNA, 15 bp, Homo sapiens
aactgatctcacgtc

SEQ ID NO: 146650 - DNA, 15 bp, Homo sapiens
actgatctcacgtct

SEQ ID NO: 146651 - DNA, 15 bp, Homo sapiens
ctgatctcacgtctt

SEQ ID NO: 146652 - DNA, 15 bp, Homo sapiens
tgatctcacgtcttt

SEQ ID NO: 146653 - DNA, 15 bp, Homo sapiens
gatctcacgtctttt

SEQ ID NO: 146654 - DNA, 15 bp, Homo sapiens
atctcacgtcttttt

SEQ ID NO: 146655 - DNA, 15 bp, Homo sapiens
tctcacgtctttttc

SEQ ID NO: 146656 - DNA, 15 bp, Homo sapiens
ctcacgtctttttct

SEQ ID NO: 146657 - DNA, 15 bp, Homo sapiens
tcacgtctttttctc

SEQ ID NO: 146658 - DNA, 15 bp, Homo sapiens
cacgtctttttctct

SEQ ID NO: 146659 - DNA, 15 bp, Homo sapiens
acgtctttttctctt

SEQ ID NO: 146660 - DNA, 15 bp, Homo sapiens
cgtctttttctcttt

SEQ ID NO: 146661 - DNA, 15 bp, Homo sapiens
gtctttttctctttg

SEQ ID NO: 146662 - DNA, 15 bp, Homo sapiens
tctttttctctttgg

SEQ ID NO: 146663 - DNA, 15 bp, Homo sapiens
ctttttctctttgga

SEQ ID NO: 146664 - DNA, 15 bp, Homo sapiens
tttttctctttggaa

SEQ ID NO: 146665 - DNA, 15 bp, Homo sapiens
ttttctctttggaag

SEQ ID NO: 146666 - DNA, 15 bp, Homo sapiens
tttctctttggaagc

SEQ ID NO: 146667 - DNA, 15 bp, Homo sapiens
ttctctttggaagcc

SEQ ID NO: 146668 - DNA, 15 bp, Homo sapiens
tctctttggaagcct

SEQ ID NO: 146669 - DNA, 15 bp, Homo sapiens
ctctttggaagcctg

SEQ ID NO: 146670 - DNA, 15 bp, Homo sapiens
tctttggaagcctga

SEQ ID NO: 146671 - DNA, 15 bp, Homo sapiens
ctttggaagcctgaa

SEQ ID NO: 146672 - DNA, 15 bp, Homo sapiens
tttggaagcctgaac

SEQ ID NO: 146673 - DNA, 15 bp, Homo sapiens
ttggaagcctgaaca

SEQ ID NO: 146674 - DNA, 15 bp, Homo sapiens
tggaagcctgaacac

SEQ ID NO: 146675 - DNA, 15 bp, Homo sapiens
ggaagcctgaacact

SEQ ID NO: 146676 - DNA, 15 bp, Homo sapiens
gaagcctgaacactc

SEQ ID NO: 146677 - DNA, 15 bp, Homo sapiens
aagcctgaacactca

SEQ ID NO: 146678 - DNA, 15 bp, Homo sapiens
agcctgaacactcag

SEQ ID NO: 146679 - DNA, 15 bp, Homo sapiens
gcctgaacactcaga

SEQ ID NO: 146680 - DNA, 15 bp, Homo sapiens
cctgaacactcagaa

SEQ ID NO: 146681 - DNA, 15 bp, Homo sapiens
ctgaacactcagaac

SEQ ID NO: 146682 - DNA, 15 bp, Homo sapiens
tgaacactcagaacc

SEQ ID NO: 146683 - DNA, 15 bp, Homo sapiens
gaacactcagaaccc

SEQ ID NO: 146684 - DNA, 15 bp, Homo sapiens
aacactcagaaccca

SEQ ID NO: 146685 - DNA, 15 bp, Homo sapiens
acactcagaacccaa

SEQ ID NO: 146686 - DNA, 15 bp, Homo sapiens
cactcagaacccaac

SEQ ID NO: 146687 - DNA, 15 bp, Homo sapiens
actcagaacccaact

SEQ ID NO: 146688 - DNA, 15 bp, Homo sapiens
ctcagaacccaactt

SEQ ID NO: 146689 - DNA, 15 bp, Homo sapiens
tcagaacccaacttg

SEQ ID NO: 146690 - DNA, 15 bp, Homo sapiens
cagaacccaacttga

SEQ ID NO: 146691 - DNA, 15 bp, Homo sapiens
agaacccaacttgag

SEQ ID NO: 146692 - DNA, 15 bp, Homo sapiens
gaacccaacttgagg

SEQ ID NO: 146693 - DNA, 15 bp, Homo sapiens
aacccaacttgaggc

SEQ ID NO: 146694 - DNA, 15 bp, Homo sapiens
acccaacttgaggct

SEQ ID NO: 146695 - DNA, 15 bp, Homo sapiens
cccaacttgaggctc

SEQ ID NO: 146696 - DNA, 15 bp, Homo sapiens
ccaacttgaggctcc

SEQ ID NO: 146697 - DNA, 15 bp, Homo sapiens
caacttgaggctcct

SEQ ID NO: 146698 - DNA, 15 bp, Homo sapiens
aacttgaggctcctc

SEQ ID NO: 146699 - DNA, 15 bp, Homo sapiens
acttgaggctcctca

SEQ ID NO: 146700 - DNA, 15 bp, Homo sapiens
cttgaggctcctcag

SEQ ID NO: 146701 - DNA, 15 bp, Homo sapiens
ttgaggctcctcagc

SEQ ID NO: 146702 - DNA, 15 bp, Homo sapiens
tgaggctcctcagct

SEQ ID NO: 146703 - DNA, 15 bp, Homo sapiens
gaggctcctcagcta

SEQ ID NO: 146704 - DNA, 15 bp, Homo sapiens
aggctcctcagctat

SEQ ID NO: 146705 - DNA, 15 bp, Homo sapiens
ggctcctcagctata

SEQ ID NO: 146706 - DNA, 15 bp, Homo sapiens
gctcctcagctatag

SEQ ID NO: 146707 - DNA, 15 bp, Homo sapiens
ctcctcagctatagc

SEQ ID NO: 146708 - DNA, 15 bp, Homo sapiens
tcctcagctatagca

SEQ ID NO: 146709 - DNA, 15 bp, Homo sapiens
cctcagctatagcaa

SEQ ID NO: 146710 - DNA, 15 bp, Homo sapiens
ctcagctatagcaat

SEQ ID NO: 146711 - DNA, 15 bp, Homo sapiens
tcagctatagcaatt

SEQ ID NO: 146712 - DNA, 15 bp, Homo sapiens
cagctatagcaattc

SEQ ID NO: 146713 - DNA, 15 bp, Homo sapiens
agctatagcaattct

SEQ ID NO: 146714 - DNA, 15 bp, Homo sapiens
gctatagcaattctg

SEQ ID NO: 146715 - DNA, 15 bp, Homo sapiens
ctatagcaattctga

SEQ ID NO: 146716 - DNA, 15 bp, Homo sapiens
tatagcaattctgac

SEQ ID NO: 146717 - DNA, 15 bp, Homo sapiens
atagcaattctgact

SEQ ID NO: 146718 - DNA, 15 bp, Homo sapiens
tagcaattctgactt

SEQ ID NO: 146719 - DNA, 15 bp, Homo sapiens
agcaattctgacttc

SEQ ID NO: 146720 - DNA, 15 bp, Homo sapiens
gcaattctgacttca

SEQ ID NO: 146721 - DNA, 15 bp, Homo sapiens
caattctgacttcac

SEQ ID NO: 146722 - DNA, 15 bp, Homo sapiens
aattctgacttcaca

SEQ ID NO: 146723 - DNA, 15 bp, Homo sapiens
attctgacttcacag

SEQ ID NO: 146724 - DNA, 15 bp, Homo sapiens
ttctgacttcacagt

SEQ ID NO: 146725 - DNA, 15 bp, Homo sapiens
tctgacttcacagtc

SEQ ID NO: 146726 - DNA, 15 bp, Homo sapiens
ctgacttcacagtct

SEQ ID NO: 146727 - DNA, 15 bp, Homo sapiens
tgacttcacagtctg

SEQ ID NO: 146728 - DNA, 15 bp, Homo sapiens
gacttcacagtctgt

SEQ ID NO: 146729 - DNA, 15 bp, Homo sapiens
acttcacagtctgta

SEQ ID NO: 146730 - DNA, 15 bp, Homo sapiens
cttcacagtctgtaa

SEQ ID NO: 146731 - DNA, 15 bp, Homo sapiens
ttcacagtctgtaaa

SEQ ID NO: 146732 - DNA, 15 bp, Homo sapiens
tcacagtctgtaaat

SEQ ID NO: 146733 - DNA, 15 bp, Homo sapiens
cacagtctgtaaatt

SEQ ID NO: 146734 - DNA, 15 bp, Homo sapiens
acagtctgtaaatta

SEQ ID NO: 146735 - DNA, 15 bp, Homo sapiens
cagtctgtaaattat

SEQ ID NO: 146736 - DNA, 15 bp, Homo sapiens
agtctgtaaattatt

SEQ ID NO: 146737 - DNA, 15 bp, Homo sapiens
gtctgtaaattattg

SEQ ID NO: 146738 - DNA, 15 bp, Homo sapiens
tctgtaaattattgt

SEQ ID NO: 146739 - DNA, 15 bp, Homo sapiens
ctgtaaattattgtt

SEQ ID NO: 146740 - DNA, 15 bp, Homo sapiens
tgtaaattattgttc

SEQ ID NO: 146741 - DNA, 15 bp, Homo sapiens
gtaaattattgttct

SEQ ID NO: 146742 - DNA, 15 bp, Homo sapiens
taaattattgttctt

SEQ ID NO: 146743 - DNA, 15 bp, Homo sapiens
aaattattgttcttt

SEQ ID NO: 146744 - DNA, 15 bp, Homo sapiens
aattattgttctttt

SEQ ID NO: 146745 - DNA, 15 bp, Homo sapiens
attattgttcttttt

SEQ ID NO: 146746 - DNA, 15 bp, Homo sapiens
ttattgttctttttt

SEQ ID NO: 146747 - DNA, 15 bp, Homo sapiens
tattgttcttttttt

SEQ ID NO: 146748 - DNA, 15 bp, Homo sapiens
attgttctttttttt

SEQ ID NO: 146749 - DNA, 15 bp, Homo sapiens
ttgttcttttttttc

SEQ ID NO: 146750 - DNA, 15 bp, Homo sapiens
tgttcttttttttct

SEQ ID NO: 146751 - DNA, 15 bp, Homo sapiens
gttcttttttttctt

SEQ ID NO: 146752 - DNA, 15 bp, Homo sapiens
tcttttttttcttta

SEQ ID NO: 146753 - DNA, 15 bp, Homo sapiens
cttttttttctttag

SEQ ID NO: 146754 - DNA, 15 bp, Homo sapiens
ttttttttctttagc

SEQ ID NO: 146755 - DNA, 15 bp, Homo sapiens
tttttttctttagct

SEQ ID NO: 146756 - DNA, 15 bp, Homo sapiens
ttttttctttagctt

SEQ ID NO: 146757 - DNA, 15 bp, Homo sapiens
tttttctttagctta

SEQ ID NO: 146758 - DNA, 15 bp, Homo sapiens
ttttctttagcttat

SEQ ID NO: 146759 - DNA, 15 bp, Homo sapiens
tttctttagcttatg

SEQ ID NO: 146760 - DNA, 15 bp, Homo sapiens
ttctttagcttatgc

SEQ ID NO: 146761 - DNA, 15 bp, Homo sapiens
tctttagcttatgct

SEQ ID NO: 146762 - DNA, 15 bp, Homo sapiens
ctttagcttatgctt

SEQ ID NO: 146763 - DNA, 15 bp, Homo sapiens
tttagcttatgcttt

SEQ ID NO: 146764 - DNA, 15 bp, Homo sapiens
ttagcttatgctttc

SEQ ID NO: 146765 - DNA, 15 bp, Homo sapiens
tagcttatgctttct

SEQ ID NO: 146766 - DNA, 15 bp, Homo sapiens
agcttatgctttctg

SEQ ID NO: 146767 - DNA, 15 bp, Homo sapiens
gcttatgctttctgc

SEQ ID NO: 146768 - DNA, 15 bp, Homo sapiens
cttatgctttctgcc

SEQ ID NO: 146769 - DNA, 15 bp, Homo sapiens
ttatgctttctgccc

SEQ ID NO: 146770 - DNA, 15 bp, Homo sapiens
tatgctttctgccct

SEQ ID NO: 146771 - DNA, 15 bp, Homo sapiens
atgctttctgcccta

SEQ ID NO: 146772 - DNA, 15 bp, Homo sapiens
tgctttctgccctaa

SEQ ID NO: 146773 - DNA, 15 bp, Homo sapiens
gctttctgccctaat

SEQ ID NO: 146774 - DNA, 15 bp, Homo sapiens
ctttctgccctaatt

SEQ ID NO: 146775 - DNA, 15 bp, Homo sapiens
tttctgccctaattt

SEQ ID NO: 146776 - DNA, 15 bp, Homo sapiens
ttctgccctaattta

SEQ ID NO: 146777 - DNA, 15 bp, Homo sapiens
tctgccctaatttat

SEQ ID NO: 146778 - DNA, 15 bp, Homo sapiens
ctgccctaatttatc

SEQ ID NO: 146779 - DNA, 15 bp, Homo sapiens
tgccctaatttatct

SEQ ID NO: 146780 - DNA, 15 bp, Homo sapiens
gccctaatttatctt

SEQ ID NO: 146781 - DNA, 15 bp, Homo sapiens
ccctaatttatcttt

SEQ ID NO: 146782 - DNA, 15 bp, Homo sapiens
cctaatttatctttt

SEQ ID NO: 146783 - DNA, 15 bp, Homo sapiens
ctaatttatcttttc

SEQ ID NO: 146784 - DNA, 15 bp, Homo sapiens
taatttatcttttcc

SEQ ID NO: 146785 - DNA, 15 bp, Homo sapiens
aatttatcttttccc

SEQ ID NO: 146786 - DNA, 15 bp, Homo sapiens
atttatcttttccct

SEQ ID NO: 146787 - DNA, 15 bp, Homo sapiens
tttatcttttccctg

SEQ ID NO: 146788 - DNA, 15 bp, Homo sapiens
ttatcttttccctgt

SEQ ID NO: 146789 - DNA, 15 bp, Homo sapiens
tatcttttccctgtt

SEQ ID NO: 146790 - DNA, 15 bp, Homo sapiens
atcttttccctgttc

SEQ ID NO: 146791 - DNA, 15 bp, Homo sapiens
tcttttccctgttct

SEQ ID NO: 146792 - DNA, 15 bp, Homo sapiens
cttttccctgttcta

SEQ ID NO: 146793 - DNA, 15 bp, Homo sapiens
ttttccctgttctaa

SEQ ID NO: 146794 - DNA, 15 bp, Homo sapiens
tttccctgttctaat

SEQ ID NO: 146795 - DNA, 15 bp, Homo sapiens
ttccctgttctaatg

SEQ ID NO: 146796 - DNA, 15 bp, Homo sapiens
tccctgttctaatga

SEQ ID NO: 146797 - DNA, 15 bp, Homo sapiens
ccctgttctaatgaa

SEQ ID NO: 146798 - DNA, 15 bp, Homo sapiens
cctgttctaatgaat

SEQ ID NO: 146799 - DNA, 15 bp, Homo sapiens
ctgttctaatgaatt

SEQ ID NO: 146800 - DNA, 15 bp, Homo sapiens
tgttctaatgaatta

SEQ ID NO: 146801 - DNA, 15 bp, Homo sapiens
gttctaatgaattat

SEQ ID NO: 146802 - DNA, 15 bp, Homo sapiens
ttctaatgaattatt

SEQ ID NO: 146803 - DNA, 15 bp, Homo sapiens
tctaatgaattattg

SEQ ID NO: 146804 - DNA, 15 bp, Homo sapiens
ctaatgaattattgt

SEQ ID NO: 146805 - DNA, 15 bp, Homo sapiens
taatgaattattgtc

SEQ ID NO: 146806 - DNA, 15 bp, Homo sapiens
aatgaattattgtcc

SEQ ID NO: 146807 - DNA, 15 bp, Homo sapiens
atgaattattgtcct

SEQ ID NO: 146808 - DNA, 15 bp, Homo sapiens
tgaattattgtccta

SEQ ID NO: 146809 - DNA, 15 bp, Homo sapiens
gaattattgtcctat

SEQ ID NO: 146810 - DNA, 15 bp, Homo sapiens
aattattgtcctata

SEQ ID NO: 146811 - DNA, 15 bp, Homo sapiens
attattgtcctatat

SEQ ID NO: 146812 - DNA, 15 bp, Homo sapiens
ttattgtcctatatc

SEQ ID NO: 146813 - DNA, 15 bp, Homo sapiens
tattgtcctatatct

SEQ ID NO: 146814 - DNA, 15 bp, Homo sapiens
attgtcctatatctg

SEQ ID NO: 146815 - DNA, 15 bp, Homo sapiens
ttgtcctatatctgc

SEQ ID NO: 146816 - DNA, 15 bp, Homo sapiens
tgtcctatatctgct

SEQ ID NO: 146817 - DNA, 15 bp, Homo sapiens
gtcctatatctgctg

SEQ ID NO: 146818 - DNA, 15 bp, Homo sapiens
tcctatatctgctgt

SEQ ID NO: 146819 - DNA, 15 bp, Homo sapiens
cctatatctgctgtg

SEQ ID NO: 146820 - DNA, 15 bp, Homo sapiens
ctatatctgctgtgc

SEQ ID NO: 146821 - DNA, 15 bp, Homo sapiens
tatatctgctgtgca

SEQ ID NO: 146822 - DNA, 15 bp, Homo sapiens
atatctgctgtgcag

SEQ ID NO: 146823 - DNA, 15 bp, Homo sapiens
tatctgctgtgcagt

SEQ ID NO: 146824 - DNA, 15 bp, Homo sapiens
atctgctgtgcagtt

SEQ ID NO: 146825 - DNA, 15 bp, Homo sapiens
tctgctgtgcagtta

SEQ ID NO: 146826 - DNA, 15 bp, Homo sapiens
ctgctgtgcagttag

SEQ ID NO: 146827 - DNA, 15 bp, Homo sapiens
tgctgtgcagttagg

SEQ ID NO: 146828 - DNA, 15 bp, Homo sapiens
gctgtgcagttaggt

SEQ ID NO: 146829 - DNA, 15 bp, Homo sapiens
ctgtgcagttaggtg

SEQ ID NO: 146830 - DNA, 15 bp, Homo sapiens
tgtgcagttaggtga

SEQ ID NO: 146831 - DNA, 15 bp, Homo sapiens
gtgcagttaggtgac

SEQ ID NO: 146832 - DNA, 15 bp, Homo sapiens
tgcagttaggtgaca

SEQ ID NO: 146833 - DNA, 15 bp, Homo sapiens
gcagttaggtgacat

SEQ ID NO: 146834 - DNA, 15 bp, Homo sapiens
cagttaggtgacata

SEQ ID NO: 146835 - DNA, 15 bp, Homo sapiens
agttaggtgacatat

SEQ ID NO: 146836 - DNA, 15 bp, Homo sapiens
gttaggtgacatata

SEQ ID NO: 146837 - DNA, 15 bp, Homo sapiens
ttaggtgacatataa

SEQ ID NO: 146838 - DNA, 15 bp, Homo sapiens
taggtgacatataac

SEQ ID NO: 146839 - DNA, 15 bp, Homo sapiens
aggtgacatataaca

SEQ ID NO: 146840 - DNA, 15 bp, Homo sapiens
ggtgacatataacag

SEQ ID NO: 146841 - DNA, 15 bp, Homo sapiens
gtgacatataacagc

SEQ ID NO: 146842 - DNA, 15 bp, Homo sapiens
tgacatataacagca

SEQ ID NO: 146843 - DNA, 15 bp, Homo sapiens
gacatataacagcaa

SEQ ID NO: 146844 - DNA, 15 bp, Homo sapiens
acatataacagcaat

SEQ ID NO: 146845 - DNA, 15 bp, Homo sapiens
catataacagcaatt

SEQ ID NO: 146846 - DNA, 15 bp, Homo sapiens
atataacagcaatta

SEQ ID NO: 146847 - DNA, 15 bp, Homo sapiens
tataacagcaattaa

SEQ ID NO: 146848 - DNA, 15 bp, Homo sapiens
ataacagcaattaaa

SEQ ID NO: 146849 - DNA, 15 bp, Homo sapiens
taacagcaattaaat

SEQ ID NO: 146850 - DNA, 15 bp, Homo sapiens
aacagcaattaaata

SEQ ID NO: 146851 - DNA, 15 bp, Homo sapiens
acagcaattaaatat

SEQ ID NO: 146852 - DNA, 15 bp, Homo sapiens
cagcaattaaatata

SEQ ID NO: 146853 - DNA, 15 bp, Homo sapiens
agcaattaaatatat

SEQ ID NO: 146854 - DNA, 15 bp, Homo sapiens
gcaattaaatatatg

SEQ ID NO: 146855 - DNA, 15 bp, Homo sapiens
caattaaatatatga

SEQ ID NO: 146856 - DNA, 15 bp, Homo sapiens
aattaaatatatgaa

SEQ ID NO: 146857 - DNA, 15 bp, Homo sapiens
attaaatatatgaat

SEQ ID NO: 146858 - DNA, 15 bp, Homo sapiens
ttaaatatatgaatt

SEQ ID NO: 146859 - DNA, 15 bp, Homo sapiens
taaatatatgaattg

SEQ ID NO: 146860 - DNA, 15 bp, Homo sapiens
aaatatatgaattgg

SEQ ID NO: 146861 - DNA, 15 bp, Homo sapiens
aatatatgaattggt

SEQ ID NO: 146862 - DNA, 15 bp, Homo sapiens
atatatgaattggta

SEQ ID NO: 146863 - DNA, 15 bp, Homo sapiens
tatatgaattggtac

SEQ ID NO: 146864 - DNA, 15 bp, Homo sapiens
atatgaattggtaca

SEQ ID NO: 146865 - DNA, 15 bp, Homo sapiens
tatgaattggtacat

SEQ ID NO: 146866 - DNA, 15 bp, Homo sapiens
atgaattggtacata

SEQ ID NO: 146867 - DNA, 15 bp, Homo sapiens
tgaattggtacatat

SEQ ID NO: 146868 - DNA, 15 bp, Homo sapiens
gaattggtacatata

SEQ ID NO: 146869 - DNA, 15 bp, Homo sapiens
aattggtacatataa

SEQ ID NO: 146870 - DNA, 15 bp, Homo sapiens
attggtacatataaa

SEQ ID NO: 146871 - DNA, 15 bp, Homo sapiens
ttggtacatataaag

SEQ ID NO: 146872 - DNA, 15 bp, Homo sapiens
tggtacatataaaga

SEQ ID NO: 146873 - DNA, 15 bp, Homo sapiens
ggtacatataaagat

SEQ ID NO: 146874 - DNA, 15 bp, Homo sapiens
gtacatataaagatt

SEQ ID NO: 146875 - DNA, 15 bp, Homo sapiens
tacatataaagattt

SEQ ID NO: 146876 - DNA, 15 bp, Homo sapiens
acatataaagatttg

SEQ ID NO: 146877 - DNA, 15 bp, Homo sapiens
catataaagatttga

SEQ ID NO: 146878 - DNA, 15 bp, Homo sapiens
atataaagatttgac

SEQ ID NO: 146879 - DNA, 15 bp, Homo sapiens
tataaagatttgact

SEQ ID NO: 146880 - DNA, 15 bp, Homo sapiens
ataaagatttgacta

SEQ ID NO: 146881 - DNA, 15 bp, Homo sapiens
taaagatttgactaa

SEQ ID NO: 146882 - DNA, 15 bp, Homo sapiens
aaagatttgactaaa

SEQ ID NO: 146883 - DNA, 15 bp, Homo sapiens
aagatttgactaaaa

SEQ ID NO: 146884 - DNA, 15 bp, Homo sapiens
agatttgactaaaac

SEQ ID NO: 146885 - DNA, 15 bp, Homo sapiens
gatttgactaaaact

SEQ ID NO: 146886 - DNA, 15 bp, Homo sapiens
atttgactaaaactc

SEQ ID NO: 146887 - DNA, 15 bp, Homo sapiens
tttgactaaaactcg

SEQ ID NO: 146888 - DNA, 15 bp, Homo sapiens
ttgactaaaactcga

SEQ ID NO: 146889 - DNA, 15 bp, Homo sapiens
tgactaaaactcgat

SEQ ID NO: 146890 - DNA, 15 bp, Homo sapiens
gactaaaactcgatg

SEQ ID NO: 146891 - DNA, 15 bp, Homo sapiens
actaaaactcgatgt

SEQ ID NO: 146892 - DNA, 15 bp, Homo sapiens
ctaaaactcgatgta

SEQ ID NO: 146893 - DNA, 15 bp, Homo sapiens
taaaactcgatgtaa

SEQ ID NO: 146894 - DNA, 15 bp, Homo sapiens
aaaactcgatgtaaa

SEQ ID NO: 146895 - DNA, 15 bp, Homo sapiens
aaactcgatgtaaaa

SEQ ID NO: 146896 - DNA, 15 bp, Homo sapiens
aactcgatgtaaaaa

SEQ ID NO: 146897 - DNA, 15 bp, Homo sapiens
actcgatgtaaaaat

SEQ ID NO: 146898 - DNA, 15 bp, Homo sapiens
ctcgatgtaaaaata

SEQ ID NO: 146899 - DNA, 15 bp, Homo sapiens
tcgatgtaaaaataa

SEQ ID NO: 146900 - DNA, 15 bp, Homo sapiens
cgatgtaaaaataag

SEQ ID NO: 146901 - DNA, 15 bp, Homo sapiens
gatgtaaaaataagt

SEQ ID NO: 146902 - DNA, 15 bp, Homo sapiens
atgtaaaaataagtg

SEQ ID NO: 146903 - DNA, 15 bp, Homo sapiens
tgtaaaaataagtgt

SEQ ID NO: 146904 - DNA, 15 bp, Homo sapiens
gtaaaaataagtgtt

SEQ ID NO: 146905 - DNA, 15 bp, Homo sapiens
taaaaataagtgttc

SEQ ID NO: 146906 - DNA, 15 bp, Homo sapiens
aaaaataagtgttct

SEQ ID NO: 146907 - DNA, 15 bp, Homo sapiens
aaaataagtgttcta

SEQ ID NO: 146908 - DNA, 15 bp, Homo sapiens
aaataagtgttctac

SEQ ID NO: 146909 - DNA, 15 bp, Homo sapiens
aataagtgttctaca

SEQ ID NO: 146910 - DNA, 15 bp, Homo sapiens
ataagtgttctacat

SEQ ID NO: 146911 - DNA, 15 bp, Homo sapiens
taagtgttctacatt

SEQ ID NO: 146912 - DNA, 15 bp, Homo sapiens
aagtgttctacattc

SEQ ID NO: 146913 - DNA, 15 bp, Homo sapiens
agtgttctacattca

SEQ ID NO: 146914 - DNA, 15 bp, Homo sapiens
gtgttctacattcaa

SEQ ID NO: 146915 - DNA, 15 bp, Homo sapiens
tgttctacattcaat

SEQ ID NO: 146916 - DNA, 15 bp, Homo sapiens
gttctacattcaatt

SEQ ID NO: 146917 - DNA, 15 bp, Homo sapiens
ttctacattcaattt

SEQ ID NO: 146918 - DNA, 15 bp, Homo sapiens
tctacattcaatttc

SEQ ID NO: 146919 - DNA, 15 bp, Homo sapiens
ctacattcaatttcc

SEQ ID NO: 146920 - DNA, 15 bp, Homo sapiens
tacattcaatttcca

SEQ ID NO: 146921 - DNA, 15 bp, Homo sapiens
acattcaatttccag

SEQ ID NO: 146922 - DNA, 15 bp, Homo sapiens
cattcaatttccagt

SEQ ID NO: 146923 - DNA, 15 bp, Homo sapiens
attcaatttccagtg

SEQ ID NO: 146924 - DNA, 15 bp, Homo sapiens
ttcaatttccagtgt

SEQ ID NO: 146925 - DNA, 15 bp, Homo sapiens
tcaatttccagtgtt

SEQ ID NO: 146926 - DNA, 15 bp, Homo sapiens
caatttccagtgtta

SEQ ID NO: 146927 - DNA, 15 bp, Homo sapiens
aatttccagtgttag

SEQ ID NO: 146928 - DNA, 15 bp, Homo sapiens
atttccagtgttaga

SEQ ID NO: 146929 - DNA, 15 bp, Homo sapiens
tttccagtgttagaa

SEQ ID NO: 146930 - DNA, 15 bp, Homo sapiens
ttccagtgttagaaa

SEQ ID NO: 146931 - DNA, 15 bp, Homo sapiens
tccagtgttagaaac

SEQ ID NO: 146932 - DNA, 15 bp, Homo sapiens
ccagtgttagaaaca

SEQ ID NO: 146933 - DNA, 15 bp, Homo sapiens
cagtgttagaaacag

SEQ ID NO: 146934 - DNA, 15 bp, Homo sapiens
agtgttagaaacagt

SEQ ID NO: 146935 - DNA, 15 bp, Homo sapiens
gtgttagaaacagtg

SEQ ID NO: 146936 - DNA, 15 bp, Homo sapiens
tgttagaaacagtgc

SEQ ID NO: 146937 - DNA, 15 bp, Homo sapiens
gttagaaacagtgct

SEQ ID NO: 146938 - DNA, 15 bp, Homo sapiens
ttagaaacagtgctg

SEQ ID NO: 146939 - DNA, 15 bp, Homo sapiens
tagaaacagtgctga

SEQ ID NO: 146940 - DNA, 15 bp, Homo sapiens
agaaacagtgctgac

SEQ ID NO: 146941 - DNA, 15 bp, Homo sapiens
gaaacagtgctgact

SEQ ID NO: 146942 - DNA, 15 bp, Homo sapiens
aaacagtgctgactt

SEQ ID NO: 146943 - DNA, 15 bp, Homo sapiens
aacagtgctgacttg

SEQ ID NO: 146944 - DNA, 15 bp, Homo sapiens
acagtgctgacttga

SEQ ID NO: 146945 - DNA, 15 bp, Homo sapiens
cagtgctgacttgaa

SEQ ID NO: 146946 - DNA, 15 bp, Homo sapiens
agtgctgacttgaac

SEQ ID NO: 146947 - DNA, 15 bp, Homo sapiens
gtgctgacttgaaca

SEQ ID NO: 146948 - DNA, 15 bp, Homo sapiens
tgctgacttgaacag

SEQ ID NO: 146949 - DNA, 15 bp, Homo sapiens
gctgacttgaacaga

SEQ ID NO: 146950 - DNA, 15 bp, Homo sapiens
ctgacttgaacagag

SEQ ID NO: 146951 - DNA, 15 bp, Homo sapiens
tgacttgaacagagt

SEQ ID NO: 146952 - DNA, 15 bp, Homo sapiens
gacttgaacagagtg

SEQ ID NO: 146953 - DNA, 15 bp, Homo sapiens
acttgaacagagtga

SEQ ID NO: 146954 - DNA, 15 bp, Homo sapiens
cttgaacagagtgac

SEQ ID NO: 146955 - DNA, 15 bp, Homo sapiens
ttgaacagagtgaca

SEQ ID NO: 146956 - DNA, 15 bp, Homo sapiens
tgaacagagtgacag

SEQ ID NO: 146957 - DNA, 15 bp, Homo sapiens
gaacagagtgacaga

SEQ ID NO: 146958 - DNA, 15 bp, Homo sapiens
aacagagtgacagaa

SEQ ID NO: 146959 - DNA, 15 bp, Homo sapiens
acagagtgacagaat

SEQ ID NO: 146960 - DNA, 15 bp, Homo sapiens
cagagtgacagaatt

SEQ ID NO: 146961 - DNA, 15 bp, Homo sapiens
agagtgacagaattc

SEQ ID NO: 146962 - DNA, 15 bp, Homo sapiens
gagtgacagaattcc

SEQ ID NO: 146963 - DNA, 15 bp, Homo sapiens
agtgacagaattcca

SEQ ID NO: 146964 - DNA, 15 bp, Homo sapiens
gtgacagaattccat

SEQ ID NO: 146965 - DNA, 15 bp, Homo sapiens
tgacagaattccatc

SEQ ID NO: 146966 - DNA, 15 bp, Homo sapiens
gacagaattccatct

SEQ ID NO: 146967 - DNA, 15 bp, Homo sapiens
acagaattccatctt

SEQ ID NO: 146968 - DNA, 15 bp, Homo sapiens
cagaattccatcttt

SEQ ID NO: 146969 - DNA, 15 bp, Homo sapiens
agaattccatctttc

SEQ ID NO: 146970 - DNA, 15 bp, Homo sapiens
gaattccatctttcc

SEQ ID NO: 146971 - DNA, 15 bp, Homo sapiens
aattccatctttccc

SEQ ID NO: 146972 - DNA, 15 bp, Homo sapiens
attccatctttccct

SEQ ID NO: 146973 - DNA, 15 bp, Homo sapiens
ttccatctttcccta

SEQ ID NO: 146974 - DNA, 15 bp, Homo sapiens
tccatctttccctat

SEQ ID NO: 146975 - DNA, 15 bp, Homo sapiens
ccatctttccctatt

SEQ ID NO: 146976 - DNA, 15 bp, Homo sapiens
catctttccctattt

SEQ ID NO: 146977 - DNA, 15 bp, Homo sapiens
atctttccctatttt

SEQ ID NO: 146978 - DNA, 15 bp, Homo sapiens
tctttccctattttt

SEQ ID NO: 146979 - DNA, 15 bp, Homo sapiens
ctttccctatttttg

SEQ ID NO: 146980 - DNA, 15 bp, Homo sapiens
tttccctatttttga

SEQ ID NO: 146981 - DNA, 15 bp, Homo sapiens
ttccctatttttgac

SEQ ID NO: 146982 - DNA, 15 bp, Homo sapiens
tccctatttttgaca

SEQ ID NO: 146983 - DNA, 15 bp, Homo sapiens
ccctatttttgacag

SEQ ID NO: 146984 - DNA, 15 bp, Homo sapiens
cctatttttgacagc

SEQ ID NO: 146985 - DNA, 15 bp, Homo sapiens
ctatttttgacagct

SEQ ID NO: 146986 - DNA, 15 bp, Homo sapiens
tatttttgacagctt

SEQ ID NO: 146987 - DNA, 15 bp, Homo sapiens
atttttgacagcttt

SEQ ID NO: 146988 - DNA, 15 bp, Homo sapiens
tttttgacagcttta

SEQ ID NO: 146989 - DNA, 15 bp, Homo sapiens
ttttgacagctttaa

SEQ ID NO: 146990 - DNA, 15 bp, Homo sapiens
tttgacagctttaaa

SEQ ID NO: 146991 - DNA, 15 bp, Homo sapiens
ttgacagctttaaac

SEQ ID NO: 146992 - DNA, 15 bp, Homo sapiens
tgacagctttaaact

SEQ ID NO: 146993 - DNA, 15 bp, Homo sapiens
gacagctttaaactt

SEQ ID NO: 146994 - DNA, 15 bp, Homo sapiens
acagctttaaacttt

SEQ ID NO: 146995 - DNA, 15 bp, Homo sapiens
cagctttaaacttta

SEQ ID NO: 146996 - DNA, 15 bp, Homo sapiens
agctttaaactttat

SEQ ID NO: 146997 - DNA, 15 bp, Homo sapiens
gctttaaactttata

SEQ ID NO: 146998 - DNA, 15 bp, Homo sapiens
ctttaaactttatat

SEQ ID NO: 146999 - DNA, 15 bp, Homo sapiens
tttaaactttatatt

SEQ ID NO: 147000 - DNA, 15 bp, Homo sapiens
ttaaactttatattt

SEQ ID NO: 147001 - DNA, 15 bp, Homo sapiens
taaactttatatttt

SEQ ID NO: 147002 - DNA, 15 bp, Homo sapiens
aaactttatattttc

SEQ ID NO: 147003 - DNA, 15 bp, Homo sapiens
aactttatattttct

SEQ ID NO: 147004 - DNA, 15 bp, Homo sapiens
actttatattttctt

SEQ ID NO: 147005 - DNA, 15 bp, Homo sapiens
ctttatattttcttc

SEQ ID NO: 147006 - DNA, 15 bp, Homo sapiens
tttatattttcttcc

SEQ ID NO: 147007 - DNA, 15 bp, Homo sapiens
ttatattttcttcct

SEQ ID NO: 147008 - DNA, 15 bp, Homo sapiens
tatattttcttcctt

SEQ ID NO: 147009 - DNA, 15 bp, Homo sapiens
atattttcttccttt

SEQ ID NO: 147010 - DNA, 15 bp, Homo sapiens
tattttcttcctttc

SEQ ID NO: 147011 - DNA, 15 bp, Homo sapiens
attttcttcctttct

SEQ ID NO: 147012 - DNA, 15 bp, Homo sapiens
ttttcttcctttctt

SEQ ID NO: 147013 - DNA, 15 bp, Homo sapiens
tttcttcctttcttg

SEQ ID NO: 147014 - DNA, 15 bp, Homo sapiens
ttcttcctttcttgt

SEQ ID NO: 147015 - DNA, 15 bp, Homo sapiens
tcttcctttcttgtg

SEQ ID NO: 147016 - DNA, 15 bp, Homo sapiens
cttcctttcttgtga

SEQ ID NO: 147017 - DNA, 15 bp, Homo sapiens
ttcctttcttgtgag

SEQ ID NO: 147018 - DNA, 15 bp, Homo sapiens
tcctttcttgtgagc

SEQ ID NO: 147019 - DNA, 15 bp, Homo sapiens
cctttcttgtgagcc

SEQ ID NO: 147020 - DNA, 15 bp, Homo sapiens
ctttcttgtgagccg

SEQ ID NO: 147021 - DNA, 15 bp, Homo sapiens
tttcttgtgagccgt

SEQ ID NO: 147022 - DNA, 15 bp, Homo sapiens
ttcttgtgagccgtc

SEQ ID NO: 147023 - DNA, 15 bp, Homo sapiens
tcttgtgagccgtca

SEQ ID NO: 147024 - DNA, 15 bp, Homo sapiens
cttgtgagccgtcat

SEQ ID NO: 147025 - DNA, 15 bp, Homo sapiens
ttgtgagccgtcatt

SEQ ID NO: 147026 - DNA, 15 bp, Homo sapiens
tgtgagccgtcatta

SEQ ID NO: 147027 - DNA, 15 bp, Homo sapiens
gtgagccgtcattaa

SEQ ID NO: 147028 - DNA, 15 bp, Homo sapiens
tgagccgtcattaac

SEQ ID NO: 147029 - DNA, 15 bp, Homo sapiens
gagccgtcattaact

SEQ ID NO: 147030 - DNA, 15 bp, Homo sapiens
agccgtcattaactt

SEQ ID NO: 147031 - DNA, 15 bp, Homo sapiens
gccgtcattaacttg

SEQ ID NO: 147032 - DNA, 15 bp, Homo sapiens
ccgtcattaacttgt

SEQ ID NO: 147033 - DNA, 15 bp, Homo sapiens
cgtcattaacttgtt

SEQ ID NO: 147034 - DNA, 15 bp, Homo sapiens
gtcattaacttgttt

SEQ ID NO: 147035 - DNA, 15 bp, Homo sapiens
tcattaacttgtttc

SEQ ID NO: 147036 - DNA, 15 bp, Homo sapiens
cattaacttgtttct

SEQ ID NO: 147037 - DNA, 15 bp, Homo sapiens
attaacttgtttctc

SEQ ID NO: 147038 - DNA, 15 bp, Homo sapiens
ttaacttgtttctca

SEQ ID NO: 147039 - DNA, 15 bp, Homo sapiens
taacttgtttctcaa

SEQ ID NO: 147040 - DNA, 15 bp, Homo sapiens
aacttgtttctcaaa

SEQ ID NO: 147041 - DNA, 15 bp, Homo sapiens
acttgtttctcaaag

SEQ ID NO: 147042 - DNA, 15 bp, Homo sapiens
cttgtttctcaaagc

SEQ ID NO: 147043 - DNA, 15 bp, Homo sapiens
ttgtttctcaaagcc

SEQ ID NO: 147044 - DNA, 15 bp, Homo sapiens
tgtttctcaaagcca

SEQ ID NO: 147045 - DNA, 15 bp, Homo sapiens
gtttctcaaagccat

SEQ ID NO: 147046 - DNA, 15 bp, Homo sapiens
tttctcaaagccatt

SEQ ID NO: 147047 - DNA, 15 bp, Homo sapiens
ttctcaaagccattc

SEQ ID NO: 147048 - DNA, 15 bp, Homo sapiens
tctcaaagccattcc

SEQ ID NO: 147049 - DNA, 15 bp, Homo sapiens
ctcaaagccattccc

SEQ ID NO: 147050 - DNA, 15 bp, Homo sapiens
tcaaagccattcccg

SEQ ID NO: 147051 - DNA, 15 bp, Homo sapiens
caaagccattcccgt

SEQ ID NO: 147052 - DNA, 15 bp, Homo sapiens
aaagccattcccgta

SEQ ID NO: 147053 - DNA, 15 bp, Homo sapiens
aagccattcccgtat

SEQ ID NO: 147054 - DNA, 15 bp, Homo sapiens
agccattcccgtatt

SEQ ID NO: 147055 - DNA, 15 bp, Homo sapiens
gccattcccgtatta

SEQ ID NO: 147056 - DNA, 15 bp, Homo sapiens
ccattcccgtattac

SEQ ID NO: 147057 - DNA, 15 bp, Homo sapiens
cattcccgtattacc

SEQ ID NO: 147058 - DNA, 15 bp, Homo sapiens
attcccgtattaccc

SEQ ID NO: 147059 - DNA, 15 bp, Homo sapiens
ttcccgtattaccca

SEQ ID NO: 147060 - DNA, 15 bp, Homo sapiens
tcccgtattacccat

SEQ ID NO: 147061 - DNA, 15 bp, Homo sapiens
cccgtattacccatc

SEQ ID NO: 147062 - DNA, 15 bp, Homo sapiens
ccgtattacccatct

SEQ ID NO: 147063 - DNA, 15 bp, Homo sapiens
cgtattacccatctt

SEQ ID NO: 147064 - DNA, 15 bp, Homo sapiens
gtattacccatcttg

SEQ ID NO: 147065 - DNA, 15 bp, Homo sapiens
tattacccatcttgc

SEQ ID NO: 147066 - DNA, 15 bp, Homo sapiens
attacccatcttgca

SEQ ID NO: 147067 - DNA, 15 bp, Homo sapiens
ttacccatcttgcag

SEQ ID NO: 147068 - DNA, 15 bp, Homo sapiens
tacccatcttgcaga

SEQ ID NO: 147069 - DNA, 15 bp, Homo sapiens
acccatcttgcagac

SEQ ID NO: 147070 - DNA, 15 bp, Homo sapiens
cccatcttgcagacg

SEQ ID NO: 147071 - DNA, 15 bp, Homo sapiens
ccatcttgcagacgc

SEQ ID NO: 147072 - DNA, 15 bp, Homo sapiens
catcttgcagacgca

SEQ ID NO: 147073 - DNA, 15 bp, Homo sapiens
atcttgcagacgcag

SEQ ID NO: 147074 - DNA, 15 bp, Homo sapiens
tcttgcagacgcaga

SEQ ID NO: 147075 - DNA, 15 bp, Homo sapiens
cttgcagacgcagac

SEQ ID NO: 147076 - DNA, 15 bp, Homo sapiens
ttgcagacgcagaca

SEQ ID NO: 147077 - DNA, 15 bp, Homo sapiens
tgcagacgcagacag

SEQ ID NO: 147078 - DNA, 15 bp, Homo sapiens
gcagacgcagacaga

SEQ ID NO: 147079 - DNA, 15 bp, Homo sapiens
cagacgcagacagat

SEQ ID NO: 147080 - DNA, 15 bp, Homo sapiens
agacgcagacagatt

SEQ ID NO: 147081 - DNA, 15 bp, Homo sapiens
gacgcagacagattt

SEQ ID NO: 147082 - DNA, 15 bp, Homo sapiens
acgcagacagatttg

SEQ ID NO: 147083 - DNA, 15 bp, Homo sapiens
cgcagacagatttgg

SEQ ID NO: 147084 - DNA, 15 bp, Homo sapiens
gcagacagatttggg

SEQ ID NO: 147085 - DNA, 15 bp, Homo sapiens
cagacagatttggga

SEQ ID NO: 147086 - DNA, 15 bp, Homo sapiens
agacagatttgggaa

SEQ ID NO: 147087 - DNA, 15 bp, Homo sapiens
gacagatttgggaat

SEQ ID NO: 147088 - DNA, 15 bp, Homo sapiens
acagatttgggaatt

SEQ ID NO: 147089 - DNA, 15 bp, Homo sapiens
cagatttgggaattt

SEQ ID NO: 147090 - DNA, 15 bp, Homo sapiens
agatttgggaatttg

SEQ ID NO: 147091 - DNA, 15 bp, Homo sapiens
gatttgggaatttgc

SEQ ID NO: 147092 - DNA, 15 bp, Homo sapiens
atttgggaatttgcg

SEQ ID NO: 147093 - DNA, 15 bp, Homo sapiens
tttgggaatttgcgg

SEQ ID NO: 147094 - DNA, 15 bp, Homo sapiens
ttgggaatttgcggt

SEQ ID NO: 147095 - DNA, 15 bp, Homo sapiens
tgggaatttgcggtc

SEQ ID NO: 147096 - DNA, 15 bp, Homo sapiens
gggaatttgcggtca

SEQ ID NO: 147097 - DNA, 15 bp, Homo sapiens
ggaatttgcggtcag

SEQ ID NO: 147098 - DNA, 15 bp, Homo sapiens
gaatttgcggtcaga

SEQ ID NO: 147099 - DNA, 15 bp, Homo sapiens
aatttgcggtcagag

SEQ ID NO: 147100 - DNA, 15 bp, Homo sapiens
atttgcggtcagagt

SEQ ID NO: 147101 - DNA, 15 bp, Homo sapiens
tttgcggtcagagtt

SEQ ID NO: 147102 - DNA, 15 bp, Homo sapiens
ttgcggtcagagttg

SEQ ID NO: 147103 - DNA, 15 bp, Homo sapiens
tgcggtcagagttgt

SEQ ID NO: 147104 - DNA, 15 bp, Homo sapiens
gcggtcagagttgta

SEQ ID NO: 147105 - DNA, 15 bp, Homo sapiens
cggtcagagttgtat

SEQ ID NO: 147106 - DNA, 15 bp, Homo sapiens
ggtcagagttgtatt

SEQ ID NO: 147107 - DNA, 15 bp, Homo sapiens
gtcagagttgtattg

SEQ ID NO: 147108 - DNA, 15 bp, Homo sapiens
tcagagttgtattgg

SEQ ID NO: 147109 - DNA, 15 bp, Homo sapiens
cagagttgtattgga

SEQ ID NO: 147110 - DNA, 15 bp, Homo sapiens
agagttgtattggac

SEQ ID NO: 147111 - DNA, 15 bp, Homo sapiens
gagttgtattggaca

SEQ ID NO: 147112 - DNA, 15 bp, Homo sapiens
agttgtattggacac

SEQ ID NO: 147113 - DNA, 15 bp, Homo sapiens
gttgtattggacaca

SEQ ID NO: 147114 - DNA, 15 bp, Homo sapiens
ttgtattggacacat

SEQ ID NO: 147115 - DNA, 15 bp, Homo sapiens
tgtattggacacatc

SEQ ID NO: 147116 - DNA, 15 bp, Homo sapiens
gtattggacacatcc

SEQ ID NO: 147117 - DNA, 15 bp, Homo sapiens
tattggacacatccc

SEQ ID NO: 147118 - DNA, 15 bp, Homo sapiens
attggacacatcccc

SEQ ID NO: 147119 - DNA, 15 bp, Homo sapiens
ttggacacatccccc

SEQ ID NO: 147120 - DNA, 15 bp, Homo sapiens
tggacacatcccccc

SEQ ID NO: 147121 - DNA, 15 bp, Homo sapiens
ggacacatcccccca

SEQ ID NO: 147122 - DNA, 15 bp, Homo sapiens
gacacatccccccag

SEQ ID NO: 147123 - DNA, 15 bp, Homo sapiens
acacatccccccagc

SEQ ID NO: 147124 - DNA, 15 bp, Homo sapiens
cacatccccccagcc

SEQ ID NO: 147125 - DNA, 15 bp, Homo sapiens
acatccccccagccc

SEQ ID NO: 147126 - DNA, 15 bp, Homo sapiens
catccccccagccca

SEQ ID NO: 147127 - DNA, 15 bp, Homo sapiens
atccccccagcccac

SEQ ID NO: 147128 - DNA, 15 bp, Homo sapiens
tccccccagcccaca

SEQ ID NO: 147129 - DNA, 15 bp, Homo sapiens
ccccccagcccacat

SEQ ID NO: 147130 - DNA, 15 bp, Homo sapiens
cccccagcccacatg

SEQ ID NO: 147131 - DNA, 15 bp, Homo sapiens
ccccagcccacatga

SEQ ID NO: 147132 - DNA, 15 bp, Homo sapiens
cccagcccacatgag

SEQ ID NO: 147133 - DNA, 15 bp, Homo sapiens
ccagcccacatgaga

SEQ ID NO: 147134 - DNA, 15 bp, Homo sapiens
cagcccacatgagat

SEQ ID NO: 147135 - DNA, 15 bp, Homo sapiens
agcccacatgagatc

SEQ ID NO: 147136 - DNA, 15 bp, Homo sapiens
gcccacatgagatcc

SEQ ID NO: 147137 - DNA, 15 bp, Homo sapiens
cccacatgagatcct

SEQ ID NO: 147138 - DNA, 15 bp, Homo sapiens
ccacatgagatcctt

SEQ ID NO: 147139 - DNA, 15 bp, Homo sapiens
cacatgagatccttt

SEQ ID NO: 147140 - DNA, 15 bp, Homo sapiens
acatgagatcctttt

SEQ ID NO: 147141 - DNA, 15 bp, Homo sapiens
catgagatcctttta

SEQ ID NO: 147142 - DNA, 15 bp, Homo sapiens
atgagatccttttaa

SEQ ID NO: 147143 - DNA, 15 bp, Homo sapiens
tgagatccttttaat

SEQ ID NO: 147144 - DNA, 15 bp, Homo sapiens
gagatccttttaatc

SEQ ID NO: 147145 - DNA, 15 bp, Homo sapiens
agatccttttaatct

SEQ ID NO: 147146 - DNA, 15 bp, Homo sapiens
gatccttttaatcta

SEQ ID NO: 147147 - DNA, 15 bp, Homo sapiens
atccttttaatctat

SEQ ID NO: 147148 - DNA, 15 bp, Homo sapiens
tccttttaatctatt

SEQ ID NO: 147149 - DNA, 15 bp, Homo sapiens
ccttttaatctattg

SEQ ID NO: 147150 - DNA, 15 bp, Homo sapiens
cttttaatctattgc

SEQ ID NO: 147151 - DNA, 15 bp, Homo sapiens
ttttaatctattgca

SEQ ID NO: 147152 - DNA, 15 bp, Homo sapiens
tttaatctattgcat

SEQ ID NO: 147153 - DNA, 15 bp, Homo sapiens
ttaatctattgcata

SEQ ID NO: 147154 - DNA, 15 bp, Homo sapiens
taatctattgcatat

SEQ ID NO: 147155 - DNA, 15 bp, Homo sapiens
aatctattgcatatt

SEQ ID NO: 147156 - DNA, 15 bp, Homo sapiens
atctattgcatatta

SEQ ID NO: 147157 - DNA, 15 bp, Homo sapiens
tctattgcatattaa

SEQ ID NO: 147158 - DNA, 15 bp, Homo sapiens
ctattgcatattaac

SEQ ID NO: 147159 - DNA, 15 bp, Homo sapiens
tattgcatattaact

SEQ ID NO: 147160 - DNA, 15 bp, Homo sapiens
attgcatattaacta

SEQ ID NO: 147161 - DNA, 15 bp, Homo sapiens
ttgcatattaactag

SEQ ID NO: 147162 - DNA, 15 bp, Homo sapiens
tgcatattaactagt

SEQ ID NO: 147163 - DNA, 15 bp, Homo sapiens
gcatattaactagtt

SEQ ID NO: 147164 - DNA, 15 bp, Homo sapiens
catattaactagttt

SEQ ID NO: 147165 - DNA, 15 bp, Homo sapiens
atattaactagtttt

SEQ ID NO: 147166 - DNA, 15 bp, Homo sapiens
tattaactagtttta

SEQ ID NO: 147167 - DNA, 15 bp, Homo sapiens
attaactagttttaa

SEQ ID NO: 147168 - DNA, 15 bp, Homo sapiens
ttaactagttttaag

SEQ ID NO: 147169 - DNA, 15 bp, Homo sapiens
taactagttttaagt

SEQ ID NO: 147170 - DNA, 15 bp, Homo sapiens
aactagttttaagta

SEQ ID NO: 147171 - DNA, 15 bp, Homo sapiens
actagttttaagtac

SEQ ID NO: 147172 - DNA, 15 bp, Homo sapiens
ctagttttaagtaca

SEQ ID NO: 147173 - DNA, 15 bp, Homo sapiens
tagttttaagtacaa

SEQ ID NO: 147174 - DNA, 15 bp, Homo sapiens
agttttaagtacaat

SEQ ID NO: 147175 - DNA, 15 bp, Homo sapiens
gttttaagtacaata

SEQ ID NO: 147176 - DNA, 15 bp, Homo sapiens
ttttaagtacaatat

SEQ ID NO: 147177 - DNA, 15 bp, Homo sapiens
tttaagtacaatatt

SEQ ID NO: 147178 - DNA, 15 bp, Homo sapiens
ttaagtacaatattc

SEQ ID NO: 147179 - DNA, 15 bp, Homo sapiens
taagtacaatattcc

SEQ ID NO: 147180 - DNA, 15 bp, Homo sapiens
aagtacaatattcct

SEQ ID NO: 147181 - DNA, 15 bp, Homo sapiens
agtacaatattccta

SEQ ID NO: 147182 - DNA, 15 bp, Homo sapiens
gtacaatattcctac

SEQ ID NO: 147183 - DNA, 15 bp, Homo sapiens
tacaatattcctact

SEQ ID NO: 147184 - DNA, 15 bp, Homo sapiens
acaatattcctactt

SEQ ID NO: 147185 - DNA, 15 bp, Homo sapiens
caatattcctacttc

SEQ ID NO: 147186 - DNA, 15 bp, Homo sapiens
aatattcctacttca

SEQ ID NO: 147187 - DNA, 15 bp, Homo sapiens
atattcctacttcat

SEQ ID NO: 147188 - DNA, 15 bp, Homo sapiens
tattcctacttcatt

SEQ ID NO: 147189 - DNA, 15 bp, Homo sapiens
attcctacttcattt

SEQ ID NO: 147190 - DNA, 15 bp, Homo sapiens
ttcctacttcattta

SEQ ID NO: 147191 - DNA, 15 bp, Homo sapiens
tcctacttcatttaa

SEQ ID NO: 147192 - DNA, 15 bp, Homo sapiens
cctacttcatttaaa

SEQ ID NO: 147193 - DNA, 15 bp, Homo sapiens
ctacttcatttaaaa

SEQ ID NO: 147194 - DNA, 15 bp, Homo sapiens
tacttcatttaaaac

SEQ ID NO: 147195 - DNA, 15 bp, Homo sapiens
acttcatttaaaacc

SEQ ID NO: 147196 - DNA, 15 bp, Homo sapiens
cttcatttaaaacca

SEQ ID NO: 147197 - DNA, 15 bp, Homo sapiens
ttcatttaaaaccat

SEQ ID NO: 147198 - DNA, 15 bp, Homo sapiens
tcatttaaaaccatt

SEQ ID NO: 147199 - DNA, 15 bp, Homo sapiens
catttaaaaccatta

SEQ ID NO: 147200 - DNA, 15 bp, Homo sapiens
atttaaaaccattaa

SEQ ID NO: 147201 - DNA, 15 bp, Homo sapiens
tttaaaaccattaat

SEQ ID NO: 147202 - DNA, 15 bp, Homo sapiens
ttaaaaccattaatc

SEQ ID NO: 147203 - DNA, 15 bp, Homo sapiens
taaaaccattaatca

SEQ ID NO: 147204 - DNA, 15 bp, Homo sapiens
aaaaccattaatcaa

SEQ ID NO: 147205 - DNA, 15 bp, Homo sapiens
aaaccattaatcaaa

SEQ ID NO: 147206 - DNA, 15 bp, Homo sapiens
aaccattaatcaaag

SEQ ID NO: 147207 - DNA, 15 bp, Homo sapiens
accattaatcaaaga

SEQ ID NO: 147208 - DNA, 15 bp, Homo sapiens
ccattaatcaaagaa

SEQ ID NO: 147209 - DNA, 15 bp, Homo sapiens
cattaatcaaagaat

SEQ ID NO: 147210 - DNA, 15 bp, Homo sapiens
attaatcaaagaatg

SEQ ID NO: 147211 - DNA, 15 bp, Homo sapiens
ttaatcaaagaatga

SEQ ID NO: 147212 - DNA, 15 bp, Homo sapiens
taatcaaagaatgag

SEQ ID NO: 147213 - DNA, 15 bp, Homo sapiens
aatcaaagaatgagt

SEQ ID NO: 147214 - DNA, 15 bp, Homo sapiens
atcaaagaatgagtt

SEQ ID NO: 147215 - DNA, 15 bp, Homo sapiens
tcaaagaatgagttt

SEQ ID NO: 147216 - DNA, 15 bp, Homo sapiens
caaagaatgagtttg

SEQ ID NO: 147217 - DNA, 15 bp, Homo sapiens
aaagaatgagtttga

SEQ ID NO: 147218 - DNA, 15 bp, Homo sapiens
aagaatgagtttgaa

SEQ ID NO: 147219 - DNA, 15 bp, Homo sapiens
agaatgagtttgaaa

SEQ ID NO: 147220 - DNA, 15 bp, Homo sapiens
gaatgagtttgaaaa

SEQ ID NO: 147221 - DNA, 15 bp, Homo sapiens
aatgagtttgaaaat

SEQ ID NO: 147222 - DNA, 15 bp, Homo sapiens
atgagtttgaaaatg

SEQ ID NO: 147223 - DNA, 15 bp, Homo sapiens
tgagtttgaaaatga

SEQ ID NO: 147224 - DNA, 15 bp, Homo sapiens
gagtttgaaaatgaa

SEQ ID NO: 147225 - DNA, 15 bp, Homo sapiens
agtttgaaaatgaac

SEQ ID NO: 147226 - DNA, 15 bp, Homo sapiens
gtttgaaaatgaaca

SEQ ID NO: 147227 - DNA, 15 bp, Homo sapiens
tttgaaaatgaacaa

SEQ ID NO: 147228 - DNA, 15 bp, Homo sapiens
ttgaaaatgaacaaa

SEQ ID NO: 147229 - DNA, 15 bp, Homo sapiens
tgaaaatgaacaaaa

SEQ ID NO: 147230 - DNA, 15 bp, Homo sapiens
gaaaatgaacaaaat

SEQ ID NO: 147231 - DNA, 15 bp, Homo sapiens
aaaatgaacaaaatg

SEQ ID NO: 147232 - DNA, 15 bp, Homo sapiens
aaatgaacaaaatgc

SEQ ID NO: 147233 - DNA, 15 bp, Homo sapiens
aatgaacaaaatgca

SEQ ID NO: 147234 - DNA, 15 bp, Homo sapiens
atgaacaaaatgcaa

SEQ ID NO: 147235 - DNA, 15 bp, Homo sapiens
tgaacaaaatgcaaa

SEQ ID NO: 147236 - DNA, 15 bp, Homo sapiens
gaacaaaatgcaaac

SEQ ID NO: 147237 - DNA, 15 bp, Homo sapiens
aacaaaatgcaaact

SEQ ID NO: 147238 - DNA, 15 bp, Homo sapiens
acaaaatgcaaactt

SEQ ID NO: 147239 - DNA, 15 bp, Homo sapiens
caaaatgcaaactta

SEQ ID NO: 147240 - DNA, 15 bp, Homo sapiens
aaaatgcaaacttac

SEQ ID NO: 147241 - DNA, 15 bp, Homo sapiens
aaatgcaaacttaca

SEQ ID NO: 147242 - DNA, 15 bp, Homo sapiens
aatgcaaacttacag

SEQ ID NO: 147243 - DNA, 15 bp, Homo sapiens
atgcaaacttacagt

SEQ ID NO: 147244 - DNA, 15 bp, Homo sapiens
tgcaaacttacagtt

SEQ ID NO: 147245 - DNA, 15 bp, Homo sapiens
gcaaacttacagtta

SEQ ID NO: 147246 - DNA, 15 bp, Homo sapiens
caaacttacagttag

SEQ ID NO: 147247 - DNA, 15 bp, Homo sapiens
aaacttacagttaga

SEQ ID NO: 147248 - DNA, 15 bp, Homo sapiens
aacttacagttagaa

SEQ ID NO: 147249 - DNA, 15 bp, Homo sapiens
acttacagttagaaa

SEQ ID NO: 147250 - DNA, 15 bp, Homo sapiens
cttacagttagaaat

SEQ ID NO: 147251 - DNA, 15 bp, Homo sapiens
ttacagttagaaata

SEQ ID NO: 147252 - DNA, 15 bp, Homo sapiens
tacagttagaaataa

SEQ ID NO: 147253 - DNA, 15 bp, Homo sapiens
acagttagaaataat

SEQ ID NO: 147254 - DNA, 15 bp, Homo sapiens
cagttagaaataatt

SEQ ID NO: 147255 - DNA, 15 bp, Homo sapiens
agttagaaataattg

SEQ ID NO: 147256 - DNA, 15 bp, Homo sapiens
gttagaaataattgt

SEQ ID NO: 147257 - DNA, 15 bp, Homo sapiens
ttagaaataattgta

SEQ ID NO: 147258 - DNA, 15 bp, Homo sapiens
tagaaataattgtag

SEQ ID NO: 147259 - DNA, 15 bp, Homo sapiens
agaaataattgtagt

SEQ ID NO: 147260 - DNA, 15 bp, Homo sapiens
gaaataattgtagtg

SEQ ID NO: 147261 - DNA, 15 bp, Homo sapiens
aaataattgtagtgt

SEQ ID NO: 147262 - DNA, 15 bp, Homo sapiens
aataattgtagtgtc

SEQ ID NO: 147263 - DNA, 15 bp, Homo sapiens
ataattgtagtgtct

SEQ ID NO: 147264 - DNA, 15 bp, Homo sapiens
taattgtagtgtctt

SEQ ID NO: 147265 - DNA, 15 bp, Homo sapiens
aattgtagtgtcttt

SEQ ID NO: 147266 - DNA, 15 bp, Homo sapiens
attgtagtgtcttta

SEQ ID NO: 147267 - DNA, 15 bp, Homo sapiens
ttgtagtgtctttag

SEQ ID NO: 147268 - DNA, 15 bp, Homo sapiens
tgtagtgtctttagt

SEQ ID NO: 147269 - DNA, 15 bp, Homo sapiens
gtagtgtctttagtt

SEQ ID NO: 147270 - DNA, 15 bp, Homo sapiens
tagtgtctttagttt

SEQ ID NO: 147271 - DNA, 15 bp, Homo sapiens
agtgtctttagtttt

SEQ ID NO: 147272 - DNA, 15 bp, Homo sapiens
gtgtctttagttttg

SEQ ID NO: 147273 - DNA, 15 bp, Homo sapiens
tgtctttagttttgg

SEQ ID NO: 147274 - DNA, 15 bp, Homo sapiens
gtctttagttttggt

SEQ ID NO: 147275 - DNA, 15 bp, Homo sapiens
tctttagttttggtt

SEQ ID NO: 147276 - DNA, 15 bp, Homo sapiens
ctttagttttggtta

SEQ ID NO: 147277 - DNA, 15 bp, Homo sapiens
tttagttttggttag

SEQ ID NO: 147278 - DNA, 15 bp, Homo sapiens
ttagttttggttagg

SEQ ID NO: 147279 - DNA, 15 bp, Homo sapiens
tagttttggttagga

SEQ ID NO: 147280 - DNA, 15 bp, Homo sapiens
agttttggttaggag

SEQ ID NO: 147281 - DNA, 15 bp, Homo sapiens
gttttggttaggagt

SEQ ID NO: 147282 - DNA, 15 bp, Homo sapiens
ttttggttaggagtc

SEQ ID NO: 147283 - DNA, 15 bp, Homo sapiens
tttggttaggagtcg

SEQ ID NO: 147284 - DNA, 15 bp, Homo sapiens
ttggttaggagtcgg

SEQ ID NO: 147285 - DNA, 15 bp, Homo sapiens
tggttaggagtcggt

SEQ ID NO: 147286 - DNA, 15 bp, Homo sapiens
ggttaggagtcggtt

SEQ ID NO: 147287 - DNA, 15 bp, Homo sapiens
gttaggagtcggttt

SEQ ID NO: 147288 - DNA, 15 bp, Homo sapiens
ttaggagtcggtttc

SEQ ID NO: 147289 - DNA, 15 bp, Homo sapiens
taggagtcggtttct

SEQ ID NO: 147290 - DNA, 15 bp, Homo sapiens
aggagtcggtttctt

SEQ ID NO: 147291 - DNA, 15 bp, Homo sapiens
ggagtcggtttcttg

SEQ ID NO: 147292 - DNA, 15 bp, Homo sapiens
gagtcggtttcttgt

SEQ ID NO: 147293 - DNA, 15 bp, Homo sapiens
agtcggtttcttgtt

SEQ ID NO: 147294 - DNA, 15 bp, Homo sapiens
gtcggtttcttgttt

SEQ ID NO: 147295 - DNA, 15 bp, Homo sapiens
tcggtttcttgtttg

SEQ ID NO: 147296 - DNA, 15 bp, Homo sapiens
cggtttcttgtttgt

SEQ ID NO: 147297 - DNA, 15 bp, Homo sapiens
ggtttcttgtttgtt

SEQ ID NO: 147298 - DNA, 15 bp, Homo sapiens
gtttcttgtttgtta

SEQ ID NO: 147299 - DNA, 15 bp, Homo sapiens
tttcttgtttgttaa

SEQ ID NO: 147300 - DNA, 15 bp, Homo sapiens
ttcttgtttgttaaa

SEQ ID NO: 147301 - DNA, 15 bp, Homo sapiens
tcttgtttgttaaac

SEQ ID NO: 147302 - DNA, 15 bp, Homo sapiens
cttgtttgttaaact

SEQ ID NO: 147303 - DNA, 15 bp, Homo sapiens
ttgtttgttaaactc

SEQ ID NO: 147304 - DNA, 15 bp, Homo sapiens
tgtttgttaaactca

SEQ ID NO: 147305 - DNA, 15 bp, Homo sapiens
gtttgttaaactcaa

SEQ ID NO: 147306 - DNA, 15 bp, Homo sapiens
tttgttaaactcaag

SEQ ID NO: 147307 - DNA, 15 bp, Homo sapiens
ttgttaaactcaaga

SEQ ID NO: 147308 - DNA, 15 bp, Homo sapiens
tgttaaactcaagat

SEQ ID NO: 147309 - DNA, 15 bp, Homo sapiens
gttaaactcaagatt

SEQ ID NO: 147310 - DNA, 15 bp, Homo sapiens
ttaaactcaagattg

SEQ ID NO: 147311 - DNA, 15 bp, Homo sapiens
taaactcaagattgt

SEQ ID NO: 147312 - DNA, 15 bp, Homo sapiens
aaactcaagattgtg

SEQ ID NO: 147313 - DNA, 15 bp, Homo sapiens
aactcaagattgtga

SEQ ID NO: 147314 - DNA, 15 bp, Homo sapiens
actcaagattgtgaa

SEQ ID NO: 147315 - DNA, 15 bp, Homo sapiens
ctcaagattgtgaac

SEQ ID NO: 147316 - DNA, 15 bp, Homo sapiens
tcaagattgtgaaca

SEQ ID NO: 147317 - DNA, 15 bp, Homo sapiens
caagattgtgaacag

SEQ ID NO: 147318 - DNA, 15 bp, Homo sapiens
aagattgtgaacagt

SEQ ID NO: 147319 - DNA, 15 bp, Homo sapiens
agattgtgaacagtt

SEQ ID NO: 147320 - DNA, 15 bp, Homo sapiens
gattgtgaacagttt

SEQ ID NO: 147321 - DNA, 15 bp, Homo sapiens
attgtgaacagtttt

SEQ ID NO: 147322 - DNA, 15 bp, Homo sapiens
ttgtgaacagtttta

SEQ ID NO: 147323 - DNA, 15 bp, Homo sapiens
tgtgaacagttttaa

SEQ ID NO: 147324 - DNA, 15 bp, Homo sapiens
gtgaacagttttaat

SEQ ID NO: 147325 - DNA, 15 bp, Homo sapiens
tgaacagttttaatt

SEQ ID NO: 147326 - DNA, 15 bp, Homo sapiens
gaacagttttaattc

SEQ ID NO: 147327 - DNA, 15 bp, Homo sapiens
aacagttttaattca

SEQ ID NO: 147328 - DNA, 15 bp, Homo sapiens
acagttttaattcac

SEQ ID NO: 147329 - DNA, 15 bp, Homo sapiens
cagttttaattcact

SEQ ID NO: 147330 - DNA, 15 bp, Homo sapiens
agttttaattcactt

SEQ ID NO: 147331 - DNA, 15 bp, Homo sapiens
gttttaattcacttg

SEQ ID NO: 147332 - DNA, 15 bp, Homo sapiens
ttttaattcacttgt

SEQ ID NO: 147333 - DNA, 15 bp, Homo sapiens
tttaattcacttgtt

SEQ ID NO: 147334 - DNA, 15 bp, Homo sapiens
ttaattcacttgttt

SEQ ID NO: 147335 - DNA, 15 bp, Homo sapiens
taattcacttgttta

SEQ ID NO: 147336 - DNA, 15 bp, Homo sapiens
aattcacttgtttat

SEQ ID NO: 147337 - DNA, 15 bp, Homo sapiens
attcacttgtttatt

SEQ ID NO: 147338 - DNA, 15 bp, Homo sapiens
ttcacttgtttattt

SEQ ID NO: 147339 - DNA, 15 bp, Homo sapiens
tcacttgtttatttc

SEQ ID NO: 147340 - DNA, 15 bp, Homo sapiens
cacttgtttatttcc

SEQ ID NO: 147341 - DNA, 15 bp, Homo sapiens
acttgtttatttcca

SEQ ID NO: 147342 - DNA, 15 bp, Homo sapiens
cttgtttatttccaa

SEQ ID NO: 147343 - DNA, 15 bp, Homo sapiens
ttgtttatttccaat

SEQ ID NO: 147344 - DNA, 15 bp, Homo sapiens
tgtttatttccaata

SEQ ID NO: 147345 - DNA, 15 bp, Homo sapiens
gtttatttccaatag

SEQ ID NO: 147346 - DNA, 15 bp, Homo sapiens
tttatttccaataga

SEQ ID NO: 147347 - DNA, 15 bp, Homo sapiens
ttatttccaatagag

SEQ ID NO: 147348 - DNA, 15 bp, Homo sapiens
tatttccaatagaga

SEQ ID NO: 147349 - DNA, 15 bp, Homo sapiens
atttccaatagagat

SEQ ID NO: 147350 - DNA, 15 bp, Homo sapiens
tttccaatagagatt

SEQ ID NO: 147351 - DNA, 15 bp, Homo sapiens
ttccaatagagattt

SEQ ID NO: 147352 - DNA, 15 bp, Homo sapiens
tccaatagagatttc

SEQ ID NO: 147353 - DNA, 15 bp, Homo sapiens
ccaatagagatttca

SEQ ID NO: 147354 - DNA, 15 bp, Homo sapiens
caatagagatttcag

SEQ ID NO: 147355 - DNA, 15 bp, Homo sapiens
aatagagatttcagg

SEQ ID NO: 147356 - DNA, 15 bp, Homo sapiens
atagagatttcaggt

SEQ ID NO: 147357 - DNA, 15 bp, Homo sapiens
tagagatttcaggtt

SEQ ID NO: 147358 - DNA, 15 bp, Homo sapiens
agagatttcaggttt

SEQ ID NO: 147359 - DNA, 15 bp, Homo sapiens
gagatttcaggttta

SEQ ID NO: 147360 - DNA, 15 bp, Homo sapiens
agatttcaggtttac

SEQ ID NO: 147361 - DNA, 15 bp, Homo sapiens
gatttcaggtttaca

SEQ ID NO: 147362 - DNA, 15 bp, Homo sapiens
atttcaggtttacat

SEQ ID NO: 147363 - DNA, 15 bp, Homo sapiens
tttcaggtttacatt

SEQ ID NO: 147364 - DNA, 15 bp, Homo sapiens
ttcaggtttacattt

SEQ ID NO: 147365 - DNA, 15 bp, Homo sapiens
tcaggtttacatttg

SEQ ID NO: 147366 - DNA, 15 bp, Homo sapiens
caggtttacatttga

SEQ ID NO: 147367 - DNA, 15 bp, Homo sapiens
aggtttacatttgaa

SEQ ID NO: 147368 - DNA, 15 bp, Homo sapiens
ggtttacatttgaat

SEQ ID NO: 147369 - DNA, 15 bp, Homo sapiens
gtttacatttgaatt

SEQ ID NO: 147370 - DNA, 15 bp, Homo sapiens
tttacatttgaattc

SEQ ID NO: 147371 - DNA, 15 bp, Homo sapiens
ttacatttgaattca

SEQ ID NO: 147372 - DNA, 15 bp, Homo sapiens
tacatttgaattcag

SEQ ID NO: 147373 - DNA, 15 bp, Homo sapiens
acatttgaattcaga

SEQ ID NO: 147374 - DNA, 15 bp, Homo sapiens
catttgaattcagaa

SEQ ID NO: 147375 - DNA, 15 bp, Homo sapiens
atttgaattcagaaa

SEQ ID NO: 147376 - DNA, 15 bp, Homo sapiens
tttgaattcagaaac

SEQ ID NO: 147377 - DNA, 15 bp, Homo sapiens
ttgaattcagaaaca

SEQ ID NO: 147378 - DNA, 15 bp, Homo sapiens
tgaattcagaaacaa

SEQ ID NO: 147379 - DNA, 15 bp, Homo sapiens
gaattcagaaacaaa

SEQ ID NO: 147380 - DNA, 15 bp, Homo sapiens
aattcagaaacaaag

SEQ ID NO: 147381 - DNA, 15 bp, Homo sapiens
attcagaaacaaagt

SEQ ID NO: 147382 - DNA, 15 bp, Homo sapiens
ttcagaaacaaagtt

SEQ ID NO: 147383 - DNA, 15 bp, Homo sapiens
tcagaaacaaagttt

SEQ ID NO: 147384 - DNA, 15 bp, Homo sapiens
cagaaacaaagtttt

SEQ ID NO: 147385 - DNA, 15 bp, Homo sapiens
agaaacaaagttttc

SEQ ID NO: 147386 - DNA, 15 bp, Homo sapiens
gaaacaaagttttct

SEQ ID NO: 147387 - DNA, 15 bp, Homo sapiens
aaacaaagttttctt

SEQ ID NO: 147388 - DNA, 15 bp, Homo sapiens
aacaaagttttcttt

SEQ ID NO: 147389 - DNA, 15 bp, Homo sapiens
acaaagttttctttc

SEQ ID NO: 147390 - DNA, 15 bp, Homo sapiens
caaagttttctttct

SEQ ID NO: 147391 - DNA, 15 bp, Homo sapiens
aaagttttctttctc

SEQ ID NO: 147392 - DNA, 15 bp, Homo sapiens
aagttttctttctca

SEQ ID NO: 147393 - DNA, 15 bp, Homo sapiens
agttttctttctcat

SEQ ID NO: 147394 - DNA, 15 bp, Homo sapiens
gttttctttctcatt

SEQ ID NO: 147395 - DNA, 15 bp, Homo sapiens
ttttctttctcatta

SEQ ID NO: 147396 - DNA, 15 bp, Homo sapiens
tttctttctcattac

SEQ ID NO: 147397 - DNA, 15 bp, Homo sapiens
ttctttctcattaca

SEQ ID NO: 147398 - DNA, 15 bp, Homo sapiens
tctttctcattacag

SEQ ID NO: 147399 - DNA, 15 bp, Homo sapiens
ctttctcattacaga

SEQ ID NO: 147400 - DNA, 15 bp, Homo sapiens
tttctcattacagag

SEQ ID NO: 147401 - DNA, 15 bp, Homo sapiens
ttctcattacagaga

SEQ ID NO: 147402 - DNA, 15 bp, Homo sapiens
tctcattacagagaa

SEQ ID NO: 147403 - DNA, 15 bp, Homo sapiens
ctcattacagagaac

SEQ ID NO: 147404 - DNA, 15 bp, Homo sapiens
tcattacagagaaca

SEQ ID NO: 147405 - DNA, 15 bp, Homo sapiens
cattacagagaacac

SEQ ID NO: 147406 - DNA, 15 bp, Homo sapiens
attacagagaacact

SEQ ID NO: 147407 - DNA, 15 bp, Homo sapiens
ttacagagaacacta

SEQ ID NO: 147408 - DNA, 15 bp, Homo sapiens
tacagagaacactaa

SEQ ID NO: 147409 - DNA, 15 bp, Homo sapiens
acagagaacactaaa

SEQ ID NO: 147410 - DNA, 15 bp, Homo sapiens
cagagaacactaaac

SEQ ID NO: 147411 - DNA, 15 bp, Homo sapiens
agagaacactaaact

SEQ ID NO: 147412 - DNA, 15 bp, Homo sapiens
gagaacactaaactc

SEQ ID NO: 147413 - DNA, 15 bp, Homo sapiens
agaacactaaactct

SEQ ID NO: 147414 - DNA, 15 bp, Homo sapiens
gaacactaaactcta

SEQ ID NO: 147415 - DNA, 15 bp, Homo sapiens
aacactaaactctac

SEQ ID NO: 147416 - DNA, 15 bp, Homo sapiens
acactaaactctaca

SEQ ID NO: 147417 - DNA, 15 bp, Homo sapiens
cactaaactctacat

SEQ ID NO: 147418 - DNA, 15 bp, Homo sapiens
actaaactctacatc

SEQ ID NO: 147419 - DNA, 15 bp, Homo sapiens
ctaaactctacatct

SEQ ID NO: 147420 - DNA, 15 bp, Homo sapiens
taaactctacatctc

SEQ ID NO: 147421 - DNA, 15 bp, Homo sapiens
aaactctacatctcc

SEQ ID NO: 147422 - DNA, 15 bp, Homo sapiens
aactctacatctccc

SEQ ID NO: 147423 - DNA, 15 bp, Homo sapiens
actctacatctccct

SEQ ID NO: 147424 - DNA, 15 bp, Homo sapiens
ctctacatctccctt

SEQ ID NO: 147425 - DNA, 15 bp, Homo sapiens
tctacatctcccttc

SEQ ID NO: 147426 - DNA, 15 bp, Homo sapiens
ctacatctcccttcc

SEQ ID NO: 147427 - DNA, 15 bp, Homo sapiens
tacatctcccttccc

SEQ ID NO: 147428 - DNA, 15 bp, Homo sapiens
acatctcccttcccg

SEQ ID NO: 147429 - DNA, 15 bp, Homo sapiens
catctcccttcccga

SEQ ID NO: 147430 - DNA, 15 bp, Homo sapiens
atctcccttcccgag

SEQ ID NO: 147431 - DNA, 15 bp, Homo sapiens
tctcccttcccgagc

SEQ ID NO: 147432 - DNA, 15 bp, Homo sapiens
ctcccttcccgagca

SEQ ID NO: 147433 - DNA, 15 bp, Homo sapiens
tcccttcccgagcaa

SEQ ID NO: 147434 - DNA, 15 bp, Homo sapiens
cccttcccgagcaag

SEQ ID NO: 147435 - DNA, 15 bp, Homo sapiens
ccttcccgagcaagg

SEQ ID NO: 147436 - DNA, 15 bp, Homo sapiens
cttcccgagcaagga

SEQ ID NO: 147437 - DNA, 15 bp, Homo sapiens
ttcccgagcaaggag

SEQ ID NO: 147438 - DNA, 15 bp, Homo sapiens
tcccgagcaaggagc

SEQ ID NO: 147439 - DNA, 15 bp, Homo sapiens
cccgagcaaggagct

SEQ ID NO: 147440 - DNA, 15 bp, Homo sapiens
ccgagcaaggagctg

SEQ ID NO: 147441 - DNA, 15 bp, Homo sapiens
cgagcaaggagctgg

SEQ ID NO: 147442 - DNA, 15 bp, Homo sapiens
gagcaaggagctggc

SEQ ID NO: 147443 - DNA, 15 bp, Homo sapiens
agcaaggagctggct

SEQ ID NO: 147444 - DNA, 15 bp, Homo sapiens
gcaaggagctggctg

SEQ ID NO: 147445 - DNA, 15 bp, Homo sapiens
caaggagctggctga

SEQ ID NO: 147446 - DNA, 15 bp, Homo sapiens
aaggagctggctgaa

SEQ ID NO: 147447 - DNA, 15 bp, Homo sapiens
aggagctggctgaag

SEQ ID NO: 147448 - DNA, 15 bp, Homo sapiens
ggagctggctgaagc

SEQ ID NO: 147449 - DNA, 15 bp, Homo sapiens
gagctggctgaagcc

SEQ ID NO: 147450 - DNA, 15 bp, Homo sapiens
agctggctgaagcca

SEQ ID NO: 147451 - DNA, 15 bp, Homo sapiens
gctggctgaagccac

SEQ ID NO: 147452 - DNA, 15 bp, Homo sapiens
ctggctgaagccaca

SEQ ID NO: 147453 - DNA, 15 bp, Homo sapiens
tggctgaagccacaa

SEQ ID NO: 147454 - DNA, 15 bp, Homo sapiens
ggctgaagccacaaa

SEQ ID NO: 147455 - DNA, 15 bp, Homo sapiens
gctgaagccacaaaa

SEQ ID NO: 147456 - DNA, 15 bp, Homo sapiens
ctgaagccacaaaaa

SEQ ID NO: 147457 - DNA, 15 bp, Homo sapiens
tgaagccacaaaaac

SEQ ID NO: 147458 - DNA, 15 bp, Homo sapiens
gaagccacaaaaaca

SEQ ID NO: 147459 - DNA, 15 bp, Homo sapiens
aagccacaaaaacat

SEQ ID NO: 147460 - DNA, 15 bp, Homo sapiens
agccacaaaaacatt

SEQ ID NO: 147461 - DNA, 15 bp, Homo sapiens
gccacaaaaacattg

SEQ ID NO: 147462 - DNA, 15 bp, Homo sapiens
ccacaaaaacattgc

SEQ ID NO: 147463 - DNA, 15 bp, Homo sapiens
cacaaaaacattgct

SEQ ID NO: 147464 - DNA, 15 bp, Homo sapiens
acaaaaacattgctg

SEQ ID NO: 147465 - DNA, 15 bp, Homo sapiens
caaaaacattgctgc

SEQ ID NO: 147466 - DNA, 15 bp, Homo sapiens
aaaaacattgctgca

SEQ ID NO: 147467 - DNA, 15 bp, Homo sapiens
aaaacattgctgcat

SEQ ID NO: 147468 - DNA, 15 bp, Homo sapiens
aaacattgctgcata

SEQ ID NO: 147469 - DNA, 15 bp, Homo sapiens
aacattgctgcatag

SEQ ID NO: 147470 - DNA, 15 bp, Homo sapiens
acattgctgcatagt

SEQ ID NO: 147471 - DNA, 15 bp, Homo sapiens
cattgctgcatagtc

SEQ ID NO: 147472 - DNA, 15 bp, Homo sapiens
attgctgcatagtct

SEQ ID NO: 147473 - DNA, 15 bp, Homo sapiens
ttgctgcatagtctt

SEQ ID NO: 147474 - DNA, 15 bp, Homo sapiens
tgctgcatagtcttg

SEQ ID NO: 147475 - DNA, 15 bp, Homo sapiens
gctgcatagtcttgg

SEQ ID NO: 147476 - DNA, 15 bp, Homo sapiens
ctgcatagtcttggg

SEQ ID NO: 147477 - DNA, 15 bp, Homo sapiens
tgcatagtcttggga

SEQ ID NO: 147478 - DNA, 15 bp, Homo sapiens
gcatagtcttgggac

SEQ ID NO: 147479 - DNA, 15 bp, Homo sapiens
catagtcttgggact

SEQ ID NO: 147480 - DNA, 15 bp, Homo sapiens
atagtcttgggactc

SEQ ID NO: 147481 - DNA, 15 bp, Homo sapiens
tagtcttgggactct

SEQ ID NO: 147482 - DNA, 15 bp, Homo sapiens
agtcttgggactctg

SEQ ID NO: 147483 - DNA, 15 bp, Homo sapiens
gtcttgggactctgg

SEQ ID NO: 147484 - DNA, 15 bp, Homo sapiens
tcttgggactctggc

SEQ ID NO: 147485 - DNA, 15 bp, Homo sapiens
cttgggactctggcc

SEQ ID NO: 147486 - DNA, 15 bp, Homo sapiens
ttgggactctggccc

SEQ ID NO: 147487 - DNA, 15 bp, Homo sapiens
tgggactctggccca

SEQ ID NO: 147488 - DNA, 15 bp, Homo sapiens
gggactctggcccag

SEQ ID NO: 147489 - DNA, 15 bp, Homo sapiens
ggactctggcccagg

SEQ ID NO: 147490 - DNA, 15 bp, Homo sapiens
gactctggcccagga

SEQ ID NO: 147491 - DNA, 15 bp, Homo sapiens
actctggcccaggag

SEQ ID NO: 147492 - DNA, 15 bp, Homo sapiens
ctctggcccaggagg

SEQ ID NO: 147493 - DNA, 15 bp, Homo sapiens
tctggcccaggaggt

SEQ ID NO: 147494 - DNA, 15 bp, Homo sapiens
ctggcccaggaggta

SEQ ID NO: 147495 - DNA, 15 bp, Homo sapiens
tggcccaggaggtaa

SEQ ID NO: 147496 - DNA, 15 bp, Homo sapiens
ggcccaggaggtaag

SEQ ID NO: 147497 - DNA, 15 bp, Homo sapiens
gcccaggaggtaagt

SEQ ID NO: 147498 - DNA, 15 bp, Homo sapiens
cccaggaggtaagtt

SEQ ID NO: 147499 - DNA, 15 bp, Homo sapiens
ccaggaggtaagttg

SEQ ID NO: 147500 - DNA, 15 bp, Homo sapiens
caggaggtaagttgt

SEQ ID NO: 147501 - DNA, 15 bp, Homo sapiens
aggaggtaagttgtg

SEQ ID NO: 147502 - DNA, 15 bp, Homo sapiens
ggaggtaagttgtgt

SEQ ID NO: 147503 - DNA, 15 bp, Homo sapiens
gaggtaagttgtgtc

SEQ ID NO: 147504 - DNA, 15 bp, Homo sapiens
aggtaagttgtgtct

SEQ ID NO: 147505 - DNA, 15 bp, Homo sapiens
ggtaagttgtgtctt

SEQ ID NO: 147506 - DNA, 15 bp, Homo sapiens
gtaagttgtgtcttt

SEQ ID NO: 147507 - DNA, 15 bp, Homo sapiens
taagttgtgtctttc

SEQ ID NO: 147508 - DNA, 15 bp, Homo sapiens
aagttgtgtctttcc

SEQ ID NO: 147509 - DNA, 15 bp, Homo sapiens
agttgtgtctttcca

SEQ ID NO: 147510 - DNA, 15 bp, Homo sapiens
gttgtgtctttccag

SEQ ID NO: 147511 - DNA, 15 bp, Homo sapiens
ttgtgtctttccagt

SEQ ID NO: 147512 - DNA, 15 bp, Homo sapiens
tgtgtctttccagta

SEQ ID NO: 147513 - DNA, 15 bp, Homo sapiens
gtgtctttccagtac

SEQ ID NO: 147514 - DNA, 15 bp, Homo sapiens
tgtctttccagtacc

SEQ ID NO: 147515 - DNA, 15 bp, Homo sapiens
gtctttccagtacca

SEQ ID NO: 147516 - DNA, 15 bp, Homo sapiens
tctttccagtaccag

SEQ ID NO: 147517 - DNA, 15 bp, Homo sapiens
ctttccagtaccagg

SEQ ID NO: 147518 - DNA, 15 bp, Homo sapiens
tttccagtaccagga

SEQ ID NO: 147519 - DNA, 15 bp, Homo sapiens
ttccagtaccaggaa

SEQ ID NO: 147520 - DNA, 15 bp, Homo sapiens
tccagtaccaggaag

SEQ ID NO: 147521 - DNA, 15 bp, Homo sapiens
ccagtaccaggaagc

SEQ ID NO: 147522 - DNA, 15 bp, Homo sapiens
cagtaccaggaagcg

SEQ ID NO: 147523 - DNA, 15 bp, Homo sapiens
agtaccaggaagcgg

SEQ ID NO: 147524 - DNA, 15 bp, Homo sapiens
gtaccaggaagcgga

SEQ ID NO: 147525 - DNA, 15 bp, Homo sapiens
taccaggaagcggat

SEQ ID NO: 147526 - DNA, 15 bp, Homo sapiens
accaggaagcggatc

SEQ ID NO: 147527 - DNA, 15 bp, Homo sapiens
ccaggaagcggatca

SEQ ID NO: 147528 - DNA, 15 bp, Homo sapiens
caggaagcggatcat

SEQ ID NO: 147529 - DNA, 15 bp, Homo sapiens
aggaagcggatcatc

SEQ ID NO: 147530 - DNA, 15 bp, Homo sapiens
ggaagcggatcatcc

SEQ ID NO: 147531 - DNA, 15 bp, Homo sapiens
gaagcggatcatcca

SEQ ID NO: 147532 - DNA, 15 bp, Homo sapiens
aagcggatcatccac

SEQ ID NO: 147533 - DNA, 15 bp, Homo sapiens
agcggatcatccact

SEQ ID NO: 147534 - DNA, 15 bp, Homo sapiens
gcggatcatccactg

SEQ ID NO: 147535 - DNA, 15 bp, Homo sapiens
cggatcatccactgt

SEQ ID NO: 147536 - DNA, 15 bp, Homo sapiens
ggatcatccactgta

SEQ ID NO: 147537 - DNA, 15 bp, Homo sapiens
gatcatccactgtat

SEQ ID NO: 147538 - DNA, 15 bp, Homo sapiens
atcatccactgtatc

SEQ ID NO: 147539 - DNA, 15 bp, Homo sapiens
tcatccactgtatca

SEQ ID NO: 147540 - DNA, 15 bp, Homo sapiens
catccactgtatcag

SEQ ID NO: 147541 - DNA, 15 bp, Homo sapiens
atccactgtatcagt

SEQ ID NO: 147542 - DNA, 15 bp, Homo sapiens
tccactgtatcagta

SEQ ID NO: 147543 - DNA, 15 bp, Homo sapiens
ccactgtatcagtat

SEQ ID NO: 147544 - DNA, 15 bp, Homo sapiens
cactgtatcagtatt

SEQ ID NO: 147545 - DNA, 15 bp, Homo sapiens
actgtatcagtattt

SEQ ID NO: 147546 - DNA, 15 bp, Homo sapiens
ctgtatcagtatttt

SEQ ID NO: 147547 - DNA, 15 bp, Homo sapiens
tgtatcagtattttc

SEQ ID NO: 147548 - DNA, 15 bp, Homo sapiens
gtatcagtattttca

SEQ ID NO: 147549 - DNA, 15 bp, Homo sapiens
tatcagtattttcat

SEQ ID NO: 147550 - DNA, 15 bp, Homo sapiens
atcagtattttcatt

SEQ ID NO: 147551 - DNA, 15 bp, Homo sapiens
tcagtattttcattc

SEQ ID NO: 147552 - DNA, 15 bp, Homo sapiens
cagtattttcattcc

SEQ ID NO: 147553 - DNA, 15 bp, Homo sapiens
agtattttcattcct

SEQ ID NO: 147554 - DNA, 15 bp, Homo sapiens
gtattttcattcctg

SEQ ID NO: 147555 - DNA, 15 bp, Homo sapiens
tattttcattcctga

SEQ ID NO: 147556 - DNA, 15 bp, Homo sapiens
attttcattcctgag

SEQ ID NO: 147557 - DNA, 15 bp, Homo sapiens
ttttcattcctgagt

SEQ ID NO: 147558 - DNA, 15 bp, Homo sapiens
tttcattcctgagtc

SEQ ID NO: 147559 - DNA, 15 bp, Homo sapiens
ttcattcctgagtct

SEQ ID NO: 147560 - DNA, 15 bp, Homo sapiens
tcattcctgagtctg

SEQ ID NO: 147561 - DNA, 15 bp, Homo sapiens
cattcctgagtctgg

SEQ ID NO: 147562 - DNA, 15 bp, Homo sapiens
attcctgagtctggc

SEQ ID NO: 147563 - DNA, 15 bp, Homo sapiens
ttcctgagtctggca

SEQ ID NO: 147564 - DNA, 15 bp, Homo sapiens
tcctgagtctggcaa

SEQ ID NO: 147565 - DNA, 15 bp, Homo sapiens
cctgagtctggcaag

SEQ ID NO: 147566 - DNA, 15 bp, Homo sapiens
ctgagtctggcaaga

SEQ ID NO: 147567 - DNA, 15 bp, Homo sapiens
tgagtctggcaagag

SEQ ID NO: 147568 - DNA, 15 bp, Homo sapiens
gagtctggcaagagg

SEQ ID NO: 147569 - DNA, 15 bp, Homo sapiens
agtctggcaagaggt

SEQ ID NO: 147570 - DNA, 15 bp, Homo sapiens
gtctggcaagaggtc

SEQ ID NO: 147571 - DNA, 15 bp, Homo sapiens
tctggcaagaggtcc

SEQ ID NO: 147572 - DNA, 15 bp, Homo sapiens
ctggcaagaggtcct

SEQ ID NO: 147573 - DNA, 15 bp, Homo sapiens
tggcaagaggtcctt

SEQ ID NO: 147574 - DNA, 15 bp, Homo sapiens
ggcaagaggtccttt

SEQ ID NO: 147575 - DNA, 15 bp, Homo sapiens
gcaagaggtcctttt

SEQ ID NO: 147576 - DNA, 15 bp, Homo sapiens
caagaggtccttttg

SEQ ID NO: 147577 - DNA, 15 bp, Homo sapiens
aagaggtccttttga

SEQ ID NO: 147578 - DNA, 15 bp, Homo sapiens
agaggtccttttgag

SEQ ID NO: 147579 - DNA, 15 bp, Homo sapiens
gaggtccttttgagt

SEQ ID NO: 147580 - DNA, 15 bp, Homo sapiens
aggtccttttgagtt

SEQ ID NO: 147581 - DNA, 15 bp, Homo sapiens
ggtccttttgagttg

SEQ ID NO: 147582 - DNA, 15 bp, Homo sapiens
gtccttttgagttga

SEQ ID NO: 147583 - DNA, 15 bp, Homo sapiens
tccttttgagttgaa

SEQ ID NO: 147584 - DNA, 15 bp, Homo sapiens
ccttttgagttgaat

SEQ ID NO: 147585 - DNA, 15 bp, Homo sapiens
cttttgagttgaata

SEQ ID NO: 147586 - DNA, 15 bp, Homo sapiens
ttttgagttgaatat

SEQ ID NO: 147587 - DNA, 15 bp, Homo sapiens
tttgagttgaatatc

SEQ ID NO: 147588 - DNA, 15 bp, Homo sapiens
ttgagttgaatatca

SEQ ID NO: 147589 - DNA, 15 bp, Homo sapiens
tgagttgaatatcac

SEQ ID NO: 147590 - DNA, 15 bp, Homo sapiens
gagttgaatatcaca

SEQ ID NO: 147591 - DNA, 15 bp, Homo sapiens
agttgaatatcacat

SEQ ID NO: 147592 - DNA, 15 bp, Homo sapiens
gttgaatatcacatg

SEQ ID NO: 147593 - DNA, 15 bp, Homo sapiens
ttgaatatcacatgg

SEQ ID NO: 147594 - DNA, 15 bp, Homo sapiens
tgaatatcacatggg

SEQ ID NO: 147595 - DNA, 15 bp, Homo sapiens
gaatatcacatggga

SEQ ID NO: 147596 - DNA, 15 bp, Homo sapiens
aatatcacatgggat

SEQ ID NO: 147597 - DNA, 15 bp, Homo sapiens
atatcacatgggatg

SEQ ID NO: 147598 - DNA, 15 bp, Homo sapiens
tatcacatgggatgt

SEQ ID NO: 147599 - DNA, 15 bp, Homo sapiens
atcacatgggatgta

SEQ ID NO: 147600 - DNA, 15 bp, Homo sapiens
tcacatgggatgtaa

SEQ ID NO: 147601 - DNA, 15 bp, Homo sapiens
cacatgggatgtaat

SEQ ID NO: 147602 - DNA, 15 bp, Homo sapiens
acatgggatgtaata

SEQ ID NO: 147603 - DNA, 15 bp, Homo sapiens
catgggatgtaatat

SEQ ID NO: 147604 - DNA, 15 bp, Homo sapiens
atgggatgtaatatc

SEQ ID NO: 147605 - DNA, 15 bp, Homo sapiens
tgggatgtaatatca

SEQ ID NO: 147606 - DNA, 15 bp, Homo sapiens
gggatgtaatatcaa

SEQ ID NO: 147607 - DNA, 15 bp, Homo sapiens
ggatgtaatatcaat

SEQ ID NO: 147608 - DNA, 15 bp, Homo sapiens
gatgtaatatcaatt

SEQ ID NO: 147609 - DNA, 15 bp, Homo sapiens
atgtaatatcaattt

SEQ ID NO: 147610 - DNA, 15 bp, Homo sapiens
tgtaatatcaatttt

SEQ ID NO: 147611 - DNA, 15 bp, Homo sapiens
gtaatatcaattttc

SEQ ID NO: 147612 - DNA, 15 bp, Homo sapiens
taatatcaattttca

SEQ ID NO: 147613 - DNA, 15 bp, Homo sapiens
aatatcaattttcaa

SEQ ID NO: 147614 - DNA, 15 bp, Homo sapiens
atatcaattttcaaa

SEQ ID NO: 147615 - DNA, 15 bp, Homo sapiens
tatcaattttcaaag

SEQ ID NO: 147616 - DNA, 15 bp, Homo sapiens
atcaattttcaaagt

SEQ ID NO: 147617 - DNA, 15 bp, Homo sapiens
tcaattttcaaagta

SEQ ID NO: 147618 - DNA, 15 bp, Homo sapiens
caattttcaaagtat

SEQ ID NO: 147619 - DNA, 15 bp, Homo sapiens
aattttcaaagtata

SEQ ID NO: 147620 - DNA, 15 bp, Homo sapiens
attttcaaagtataa

SEQ ID NO: 147621 - DNA, 15 bp, Homo sapiens
ttttcaaagtataag

SEQ ID NO: 147622 - DNA, 15 bp, Homo sapiens
tttcaaagtataagt

SEQ ID NO: 147623 - DNA, 15 bp, Homo sapiens
ttcaaagtataagtg

SEQ ID NO: 147624 - DNA, 15 bp, Homo sapiens
tcaaagtataagtga

SEQ ID NO: 147625 - DNA, 15 bp, Homo sapiens
caaagtataagtgat

SEQ ID NO: 147626 - DNA, 15 bp, Homo sapiens
aaagtataagtgatg

SEQ ID NO: 147627 - DNA, 15 bp, Homo sapiens
aagtataagtgatgt

SEQ ID NO: 147628 - DNA, 15 bp, Homo sapiens
agtataagtgatgta

SEQ ID NO: 147629 - DNA, 15 bp, Homo sapiens
gtataagtgatgtaa

SEQ ID NO: 147630 - DNA, 15 bp, Homo sapiens
tataagtgatgtaaa

SEQ ID NO: 147631 - DNA, 15 bp, Homo sapiens
ataagtgatgtaaac

SEQ ID NO: 147632 - DNA, 15 bp, Homo sapiens
taagtgatgtaaaca

SEQ ID NO: 147633 - DNA, 15 bp, Homo sapiens
aagtgatgtaaacaa

SEQ ID NO: 147634 - DNA, 15 bp, Homo sapiens
agtgatgtaaacaat

SEQ ID NO: 147635 - DNA, 15 bp, Homo sapiens
gtgatgtaaacaata

SEQ ID NO: 147636 - DNA, 15 bp, Homo sapiens
tgatgtaaacaataa

SEQ ID NO: 147637 - DNA, 15 bp, Homo sapiens
gatgtaaacaataat

SEQ ID NO: 147638 - DNA, 15 bp, Homo sapiens
atgtaaacaataatg

SEQ ID NO: 147639 - DNA, 15 bp, Homo sapiens
tgtaaacaataatgt

SEQ ID NO: 147640 - DNA, 15 bp, Homo sapiens
gtaaacaataatgtt

SEQ ID NO: 147641 - DNA, 15 bp, Homo sapiens
taaacaataatgttt

SEQ ID NO: 147642 - DNA, 15 bp, Homo sapiens
aaacaataatgtttt

SEQ ID NO: 147643 - DNA, 15 bp, Homo sapiens
aacaataatgttttg

SEQ ID NO: 147644 - DNA, 15 bp, Homo sapiens
acaataatgttttga

SEQ ID NO: 147645 - DNA, 15 bp, Homo sapiens
caataatgttttgat

SEQ ID NO: 147646 - DNA, 15 bp, Homo sapiens
aataatgttttgatt

SEQ ID NO: 147647 - DNA, 15 bp, Homo sapiens
ataatgttttgattt

SEQ ID NO: 147648 - DNA, 15 bp, Homo sapiens
taatgttttgatttc

SEQ ID NO: 147649 - DNA, 15 bp, Homo sapiens
aatgttttgatttcc

SEQ ID NO: 147650 - DNA, 15 bp, Homo sapiens
atgttttgatttcct

SEQ ID NO: 147651 - DNA, 15 bp, Homo sapiens
tgttttgatttcctt

SEQ ID NO: 147652 - DNA, 15 bp, Homo sapiens
gttttgatttcctta

SEQ ID NO: 147653 - DNA, 15 bp, Homo sapiens
ttttgatttccttat

SEQ ID NO: 147654 - DNA, 15 bp, Homo sapiens
tttgatttccttatt

SEQ ID NO: 147655 - DNA, 15 bp, Homo sapiens
ttgatttccttattt

SEQ ID NO: 147656 - DNA, 15 bp, Homo sapiens
tgatttccttatttt

SEQ ID NO: 147657 - DNA, 15 bp, Homo sapiens
gatttccttatttta

SEQ ID NO: 147658 - DNA, 15 bp, Homo sapiens
atttccttattttag

SEQ ID NO: 147659 - DNA, 15 bp, Homo sapiens
tttccttattttaga

SEQ ID NO: 147660 - DNA, 15 bp, Homo sapiens
ttccttattttagaa

SEQ ID NO: 147661 - DNA, 15 bp, Homo sapiens
tccttattttagaaa

SEQ ID NO: 147662 - DNA, 15 bp, Homo sapiens
ccttattttagaaat

SEQ ID NO: 147663 - DNA, 15 bp, Homo sapiens
cttattttagaaatg

SEQ ID NO: 147664 - DNA, 15 bp, Homo sapiens
ttattttagaaatga

SEQ ID NO: 147665 - DNA, 15 bp, Homo sapiens
tattttagaaatgaa

SEQ ID NO: 147666 - DNA, 15 bp, Homo sapiens
attttagaaatgaag

SEQ ID NO: 147667 - DNA, 15 bp, Homo sapiens
ttttagaaatgaaga

SEQ ID NO: 147668 - DNA, 15 bp, Homo sapiens
tttagaaatgaagaa

SEQ ID NO: 147669 - DNA, 15 bp, Homo sapiens
ttagaaatgaagaaa

SEQ ID NO: 147670 - DNA, 15 bp, Homo sapiens
tagaaatgaagaaac

SEQ ID NO: 147671 - DNA, 15 bp, Homo sapiens
agaaatgaagaaacc

SEQ ID NO: 147672 - DNA, 15 bp, Homo sapiens
gaaatgaagaaacct

SEQ ID NO: 147673 - DNA, 15 bp, Homo sapiens
aaatgaagaaaccta

SEQ ID NO: 147674 - DNA, 15 bp, Homo sapiens
aatgaagaaacctaa

SEQ ID NO: 147675 - DNA, 15 bp, Homo sapiens
atgaagaaacctaaa

SEQ ID NO: 147676 - DNA, 15 bp, Homo sapiens
tgaagaaacctaaaa

SEQ ID NO: 147677 - DNA, 15 bp, Homo sapiens
gaagaaacctaaaac

SEQ ID NO: 147678 - DNA, 15 bp, Homo sapiens
aagaaacctaaaact

SEQ ID NO: 147679 - DNA, 15 bp, Homo sapiens
agaaacctaaaactc

SEQ ID NO: 147680 - DNA, 15 bp, Homo sapiens
gaaacctaaaactca

SEQ ID NO: 147681 - DNA, 15 bp, Homo sapiens
aaacctaaaactcat

SEQ ID NO: 147682 - DNA, 15 bp, Homo sapiens
aacctaaaactcata

SEQ ID NO: 147683 - DNA, 15 bp, Homo sapiens
acctaaaactcatag

SEQ ID NO: 147684 - DNA, 15 bp, Homo sapiens
cctaaaactcataga

SEQ ID NO: 147685 - DNA, 15 bp, Homo sapiens
ctaaaactcatagat

SEQ ID NO: 147686 - DNA, 15 bp, Homo sapiens
taaaactcatagatg

SEQ ID NO: 147687 - DNA, 15 bp, Homo sapiens
aaaactcatagatgt

SEQ ID NO: 147688 - DNA, 15 bp, Homo sapiens
aaactcatagatgtc

SEQ ID NO: 147689 - DNA, 15 bp, Homo sapiens
aactcatagatgtct

SEQ ID NO: 147690 - DNA, 15 bp, Homo sapiens
actcatagatgtctc

SEQ ID NO: 147691 - DNA, 15 bp, Homo sapiens
ctcatagatgtctca

SEQ ID NO: 147692 - DNA, 15 bp, Homo sapiens
tcatagatgtctcag

SEQ ID NO: 147693 - DNA, 15 bp, Homo sapiens
catagatgtctcaga

SEQ ID NO: 147694 - DNA, 15 bp, Homo sapiens
atagatgtctcagag

SEQ ID NO: 147695 - DNA, 15 bp, Homo sapiens
tagatgtctcagagc

SEQ ID NO: 147696 - DNA, 15 bp, Homo sapiens
agatgtctcagagct

SEQ ID NO: 147697 - DNA, 15 bp, Homo sapiens
gatgtctcagagcta

SEQ ID NO: 147698 - DNA, 15 bp, Homo sapiens
atgtctcagagctaa

SEQ ID NO: 147699 - DNA, 15 bp, Homo sapiens
tgtctcagagctaat

SEQ ID NO: 147700 - DNA, 15 bp, Homo sapiens
gtctcagagctaatt

SEQ ID NO: 147701 - DNA, 15 bp, Homo sapiens
tctcagagctaattg

SEQ ID NO: 147702 - DNA, 15 bp, Homo sapiens
ctcagagctaattgg

SEQ ID NO: 147703 - DNA, 15 bp, Homo sapiens
tcagagctaattggt

SEQ ID NO: 147704 - DNA, 15 bp, Homo sapiens
cagagctaattggtt

SEQ ID NO: 147705 - DNA, 15 bp, Homo sapiens
agagctaattggtta

SEQ ID NO: 147706 - DNA, 15 bp, Homo sapiens
gagctaattggttag

SEQ ID NO: 147707 - DNA, 15 bp, Homo sapiens
agctaattggttagt

SEQ ID NO: 147708 - DNA, 15 bp, Homo sapiens
gctaattggttagtg

SEQ ID NO: 147709 - DNA, 15 bp, Homo sapiens
ctaattggttagtgg

SEQ ID NO: 147710 - DNA, 15 bp, Homo sapiens
taattggttagtggc

SEQ ID NO: 147711 - DNA, 15 bp, Homo sapiens
aattggttagtggct

SEQ ID NO: 147712 - DNA, 15 bp, Homo sapiens
attggttagtggcta

SEQ ID NO: 147713 - DNA, 15 bp, Homo sapiens
ttggttagtggctaa

SEQ ID NO: 147714 - DNA, 15 bp, Homo sapiens
tggttagtggctaac

SEQ ID NO: 147715 - DNA, 15 bp, Homo sapiens
ggttagtggctaaca

SEQ ID NO: 147716 - DNA, 15 bp, Homo sapiens
gttagtggctaacag

SEQ ID NO: 147717 - DNA, 15 bp, Homo sapiens
ttagtggctaacagc

SEQ ID NO: 147718 - DNA, 15 bp, Homo sapiens
tagtggctaacagct

SEQ ID NO: 147719 - DNA, 15 bp, Homo sapiens
agtggctaacagctg

SEQ ID NO: 147720 - DNA, 15 bp, Homo sapiens
gtggctaacagctgg

SEQ ID NO: 147721 - DNA, 15 bp, Homo sapiens
tggctaacagctgga

SEQ ID NO: 147722 - DNA, 15 bp, Homo sapiens
ggctaacagctggat

SEQ ID NO: 147723 - DNA, 15 bp, Homo sapiens
gctaacagctggata

SEQ ID NO: 147724 - DNA, 15 bp, Homo sapiens
ctaacagctggatat

SEQ ID NO: 147725 - DNA, 15 bp, Homo sapiens
taacagctggatatc

SEQ ID NO: 147726 - DNA, 15 bp, Homo sapiens
aacagctggatatct

SEQ ID NO: 147727 - DNA, 15 bp, Homo sapiens
acagctggatatcta

SEQ ID NO: 147728 - DNA, 15 bp, Homo sapiens
cagctggatatctag

SEQ ID NO: 147729 - DNA, 15 bp, Homo sapiens
agctggatatctagt

SEQ ID NO: 147730 - DNA, 15 bp, Homo sapiens
gctggatatctagtt

SEQ ID NO: 147731 - DNA, 15 bp, Homo sapiens
ctggatatctagttt

SEQ ID NO: 147732 - DNA, 15 bp, Homo sapiens
tggatatctagttta

SEQ ID NO: 147733 - DNA, 15 bp, Homo sapiens
ggatatctagtttag

SEQ ID NO: 147734 - DNA, 15 bp, Homo sapiens
gatatctagtttaga

SEQ ID NO: 147735 - DNA, 15 bp, Homo sapiens
atatctagtttagaa

SEQ ID NO: 147736 - DNA, 15 bp, Homo sapiens
tatctagtttagaac

SEQ ID NO: 147737 - DNA, 15 bp, Homo sapiens
atctagtttagaacc

SEQ ID NO: 147738 - DNA, 15 bp, Homo sapiens
tctagtttagaacct

SEQ ID NO: 147739 - DNA, 15 bp, Homo sapiens
ctagtttagaacctt

SEQ ID NO: 147740 - DNA, 15 bp, Homo sapiens
tagtttagaaccttc

SEQ ID NO: 147741 - DNA, 15 bp, Homo sapiens
agtttagaaccttct

SEQ ID NO: 147742 - DNA, 15 bp, Homo sapiens
gtttagaaccttctc

SEQ ID NO: 147743 - DNA, 15 bp, Homo sapiens
tttagaaccttctcc

SEQ ID NO: 147744 - DNA, 15 bp, Homo sapiens
ttagaaccttctcca

SEQ ID NO: 147745 - DNA, 15 bp, Homo sapiens
tagaaccttctccat

SEQ ID NO: 147746 - DNA, 15 bp, Homo sapiens
agaaccttctccatt

SEQ ID NO: 147747 - DNA, 15 bp, Homo sapiens
gaaccttctccattt

SEQ ID NO: 147748 - DNA, 15 bp, Homo sapiens
aaccttctccatttt

SEQ ID NO: 147749 - DNA, 15 bp, Homo sapiens
accttctccattttt

SEQ ID NO: 147750 - DNA, 15 bp, Homo sapiens
ccttctccatttttt

SEQ ID NO: 147751 - DNA, 15 bp, Homo sapiens
cttctccattttttc

SEQ ID NO: 147752 - DNA, 15 bp, Homo sapiens
ttctccattttttct

SEQ ID NO: 147753 - DNA, 15 bp, Homo sapiens
tctccattttttctt

SEQ ID NO: 147754 - DNA, 15 bp, Homo sapiens
ctccattttttcttt

SEQ ID NO: 147755 - DNA, 15 bp, Homo sapiens
tccattttttctttt

SEQ ID NO: 147756 - DNA, 15 bp, Homo sapiens
ccattttttcttttt

SEQ ID NO: 147757 - DNA, 15 bp, Homo sapiens
cattttttctttttg

SEQ ID NO: 147758 - DNA, 15 bp, Homo sapiens
attttttctttttgc

SEQ ID NO: 147759 - DNA, 15 bp, Homo sapiens
ttttttctttttgcc

SEQ ID NO: 147760 - DNA, 15 bp, Homo sapiens
tttttctttttgccc

SEQ ID NO: 147761 - DNA, 15 bp, Homo sapiens
ttttctttttgcccc

SEQ ID NO: 147762 - DNA, 15 bp, Homo sapiens
tttctttttgcccct

SEQ ID NO: 147763 - DNA, 15 bp, Homo sapiens
ttctttttgccccta

SEQ ID NO: 147764 - DNA, 15 bp, Homo sapiens
tctttttgcccctag

SEQ ID NO: 147765 - DNA, 15 bp, Homo sapiens
ctttttgcccctagg

SEQ ID NO: 147766 - DNA, 15 bp, Homo sapiens
tttttgcccctaggt

SEQ ID NO: 147767 - DNA, 15 bp, Homo sapiens
ttttgcccctaggta

SEQ ID NO: 147768 - DNA, 15 bp, Homo sapiens
tttgcccctaggtaa

SEQ ID NO: 147769 - DNA, 15 bp, Homo sapiens
ttgcccctaggtaat

SEQ ID NO: 147770 - DNA, 15 bp, Homo sapiens
tgcccctaggtaatc

SEQ ID NO: 147771 - DNA, 15 bp, Homo sapiens
gcccctaggtaatca

SEQ ID NO: 147772 - DNA, 15 bp, Homo sapiens
cccctaggtaatcat

SEQ ID NO: 147773 - DNA, 15 bp, Homo sapiens
ccctaggtaatcata

SEQ ID NO: 147774 - DNA, 15 bp, Homo sapiens
cctaggtaatcatac

SEQ ID NO: 147775 - DNA, 15 bp, Homo sapiens
ctaggtaatcataca

SEQ ID NO: 147776 - DNA, 15 bp, Homo sapiens
taggtaatcatacat

SEQ ID NO: 147777 - DNA, 15 bp, Homo sapiens
aggtaatcatacatt

SEQ ID NO: 147778 - DNA, 15 bp, Homo sapiens
ggtaatcatacattt

SEQ ID NO: 147779 - DNA, 15 bp, Homo sapiens
gtaatcatacatttg

SEQ ID NO: 147780 - DNA, 15 bp, Homo sapiens
taatcatacatttgt

SEQ ID NO: 147781 - DNA, 15 bp, Homo sapiens
aatcatacatttgta

SEQ ID NO: 147782 - DNA, 15 bp, Homo sapiens
atcatacatttgtaa

SEQ ID NO: 147783 - DNA, 15 bp, Homo sapiens
tcatacatttgtaaa

SEQ ID NO: 147784 - DNA, 15 bp, Homo sapiens
catacatttgtaaag

SEQ ID NO: 147785 - DNA, 15 bp, Homo sapiens
atacatttgtaaaga

SEQ ID NO: 147786 - DNA, 15 bp, Homo sapiens
tacatttgtaaagag

SEQ ID NO: 147787 - DNA, 15 bp, Homo sapiens
acatttgtaaagagg

SEQ ID NO: 147788 - DNA, 15 bp, Homo sapiens
catttgtaaagagga

SEQ ID NO: 147789 - DNA, 15 bp, Homo sapiens
atttgtaaagaggag

SEQ ID NO: 147790 - DNA, 15 bp, Homo sapiens
tttgtaaagaggaga

SEQ ID NO: 147791 - DNA, 15 bp, Homo sapiens
ttgtaaagaggagaa

SEQ ID NO: 147792 - DNA, 15 bp, Homo sapiens
tgtaaagaggagaat

SEQ ID NO: 147793 - DNA, 15 bp, Homo sapiens
gtaaagaggagaatt

SEQ ID NO: 147794 - DNA, 15 bp, Homo sapiens
taaagaggagaatta

SEQ ID NO: 147795 - DNA, 15 bp, Homo sapiens
aaagaggagaattat

SEQ ID NO: 147796 - DNA, 15 bp, Homo sapiens
aagaggagaattatc

SEQ ID NO: 147797 - DNA, 15 bp, Homo sapiens
agaggagaattatct

SEQ ID NO: 147798 - DNA, 15 bp, Homo sapiens
gaggagaattatctc

SEQ ID NO: 147799 - DNA, 15 bp, Homo sapiens
aggagaattatctct

SEQ ID NO: 147800 - DNA, 15 bp, Homo sapiens
ggagaattatctctg

SEQ ID NO: 147801 - DNA, 15 bp, Homo sapiens
gagaattatctctgc

SEQ ID NO: 147802 - DNA, 15 bp, Homo sapiens
agaattatctctgcc

SEQ ID NO: 147803 - DNA, 15 bp, Homo sapiens
gaattatctctgcca

SEQ ID NO: 147804 - DNA, 15 bp, Homo sapiens
aattatctctgccac

SEQ ID NO: 147805 - DNA, 15 bp, Homo sapiens
attatctctgccact

SEQ ID NO: 147806 - DNA, 15 bp, Homo sapiens
ttatctctgccactg

SEQ ID NO: 147807 - DNA, 15 bp, Homo sapiens
tatctctgccactgc

SEQ ID NO: 147808 - DNA, 15 bp, Homo sapiens
atctctgccactgcc

SEQ ID NO: 147809 - DNA, 15 bp, Homo sapiens
tctctgccactgccc

SEQ ID NO: 147810 - DNA, 15 bp, Homo sapiens
ctctgccactgccca

SEQ ID NO: 147811 - DNA, 15 bp, Homo sapiens
tctgccactgcccat

SEQ ID NO: 147812 - DNA, 15 bp, Homo sapiens
ctgccactgcccatg

SEQ ID NO: 147813 - DNA, 15 bp, Homo sapiens
tgccactgcccatgc

SEQ ID NO: 147814 - DNA, 15 bp, Homo sapiens
gccactgcccatgca

SEQ ID NO: 147815 - DNA, 15 bp, Homo sapiens
ccactgcccatgcac

SEQ ID NO: 147816 - DNA, 15 bp, Homo sapiens
cactgcccatgcact

SEQ ID NO: 147817 - DNA, 15 bp, Homo sapiens
actgcccatgcactg

SEQ ID NO: 147818 - DNA, 15 bp, Homo sapiens
ctgcccatgcactgc

SEQ ID NO: 147819 - DNA, 15 bp, Homo sapiens
tgcccatgcactgct

SEQ ID NO: 147820 - DNA, 15 bp, Homo sapiens
gcccatgcactgctt

SEQ ID NO: 147821 - DNA, 15 bp, Homo sapiens
cccatgcactgcttt

SEQ ID NO: 147822 - DNA, 15 bp, Homo sapiens
ccatgcactgctttt

SEQ ID NO: 147823 - DNA, 15 bp, Homo sapiens
catgcactgcttttg

SEQ ID NO: 147824 - DNA, 15 bp, Homo sapiens
atgcactgcttttgt

SEQ ID NO: 147825 - DNA, 15 bp, Homo sapiens
tgcactgcttttgtc

SEQ ID NO: 147826 - DNA, 15 bp, Homo sapiens
gcactgcttttgtct

SEQ ID NO: 147827 - DNA, 15 bp, Homo sapiens
cactgcttttgtctg

SEQ ID NO: 147828 - DNA, 15 bp, Homo sapiens
actgcttttgtctga

SEQ ID NO: 147829 - DNA, 15 bp, Homo sapiens
ctgcttttgtctgac

SEQ ID NO: 147830 - DNA, 15 bp, Homo sapiens
tgcttttgtctgacc

SEQ ID NO: 147831 - DNA, 15 bp, Homo sapiens
gcttttgtctgacca

SEQ ID NO: 147832 - DNA, 15 bp, Homo sapiens
cttttgtctgaccag

SEQ ID NO: 147833 - DNA, 15 bp, Homo sapiens
ttttgtctgaccagc

SEQ ID NO: 147834 - DNA, 15 bp, Homo sapiens
tttgtctgaccagca

SEQ ID NO: 147835 - DNA, 15 bp, Homo sapiens
ttgtctgaccagcaa

SEQ ID NO: 147836 - DNA, 15 bp, Homo sapiens
tgtctgaccagcaat

SEQ ID NO: 147837 - DNA, 15 bp, Homo sapiens
gtctgaccagcaatt

SEQ ID NO: 147838 - DNA, 15 bp, Homo sapiens
tctgaccagcaattt

SEQ ID NO: 147839 - DNA, 15 bp, Homo sapiens
ctgaccagcaatttc

SEQ ID NO: 147840 - DNA, 15 bp, Homo sapiens
tgaccagcaatttct

SEQ ID NO: 147841 - DNA, 15 bp, Homo sapiens
gaccagcaatttctc

SEQ ID NO: 147842 - DNA, 15 bp, Homo sapiens
accagcaatttctcc

SEQ ID NO: 147843 - DNA, 15 bp, Homo sapiens
ccagcaatttctcca

SEQ ID NO: 147844 - DNA, 15 bp, Homo sapiens
cagcaatttctccat

SEQ ID NO: 147845 - DNA, 15 bp, Homo sapiens
agcaatttctccata

SEQ ID NO: 147846 - DNA, 15 bp, Homo sapiens
gcaatttctccatat

SEQ ID NO: 147847 - DNA, 15 bp, Homo sapiens
caatttctccatatt

SEQ ID NO: 147848 - DNA, 15 bp, Homo sapiens
aatttctccatattg

SEQ ID NO: 147849 - DNA, 15 bp, Homo sapiens
atttctccatattgc

SEQ ID NO: 147850 - DNA, 15 bp, Homo sapiens
tttctccatattgct

SEQ ID NO: 147851 - DNA, 15 bp, Homo sapiens
ttctccatattgctt

SEQ ID NO: 147852 - DNA, 15 bp, Homo sapiens
tctccatattgcttc

SEQ ID NO: 147853 - DNA, 15 bp, Homo sapiens
ctccatattgcttct

SEQ ID NO: 147854 - DNA, 15 bp, Homo sapiens
tccatattgcttctt

SEQ ID NO: 147855 - DNA, 15 bp, Homo sapiens
ccatattgcttcttc

SEQ ID NO: 147856 - DNA, 15 bp, Homo sapiens
catattgcttcttca

SEQ ID NO: 147857 - DNA, 15 bp, Homo sapiens
atattgcttcttcag

SEQ ID NO: 147858 - DNA, 15 bp, Homo sapiens
tattgcttcttcagt

SEQ ID NO: 147859 - DNA, 15 bp, Homo sapiens
attgcttcttcagta

SEQ ID NO: 147860 - DNA, 15 bp, Homo sapiens
ttgcttcttcagtag

SEQ ID NO: 147861 - DNA, 15 bp, Homo sapiens
tgcttcttcagtagc

SEQ ID NO: 147862 - DNA, 15 bp, Homo sapiens
gcttcttcagtagca

SEQ ID NO: 147863 - DNA, 15 bp, Homo sapiens
cttcttcagtagcaa

SEQ ID NO: 147864 - DNA, 15 bp, Homo sapiens
ttcttcagtagcaag

SEQ ID NO: 147865 - DNA, 15 bp, Homo sapiens
tcttcagtagcaagg

SEQ ID NO: 147866 - DNA, 15 bp, Homo sapiens
cttcagtagcaaggc

SEQ ID NO: 147867 - DNA, 15 bp, Homo sapiens
ttcagtagcaaggcc

SEQ ID NO: 147868 - DNA, 15 bp, Homo sapiens
tcagtagcaaggcca

SEQ ID NO: 147869 - DNA, 15 bp, Homo sapiens
cagtagcaaggccaa

SEQ ID NO: 147870 - DNA, 15 bp, Homo sapiens
agtagcaaggccaat

SEQ ID NO: 147871 - DNA, 15 bp, Homo sapiens
gtagcaaggccaatc

SEQ ID NO: 147872 - DNA, 15 bp, Homo sapiens
tagcaaggccaatca

SEQ ID NO: 147873 - DNA, 15 bp, Homo sapiens
agcaaggccaatcat

SEQ ID NO: 147874 - DNA, 15 bp, Homo sapiens
gcaaggccaatcatt

SEQ ID NO: 147875 - DNA, 15 bp, Homo sapiens
caaggccaatcattt

SEQ ID NO: 147876 - DNA, 15 bp, Homo sapiens
aaggccaatcatttt

SEQ ID NO: 147877 - DNA, 15 bp, Homo sapiens
aggccaatcatttta

SEQ ID NO: 147878 - DNA, 15 bp, Homo sapiens
ggccaatcattttac

SEQ ID NO: 147879 - DNA, 15 bp, Homo sapiens
gccaatcattttacc

SEQ ID NO: 147880 - DNA, 15 bp, Homo sapiens
ccaatcattttacca

SEQ ID NO: 147881 - DNA, 15 bp, Homo sapiens
caatcattttaccaa

SEQ ID NO: 147882 - DNA, 15 bp, Homo sapiens
aatcattttaccaac

SEQ ID NO: 147883 - DNA, 15 bp, Homo sapiens
atcattttaccaaca

SEQ ID NO: 147884 - DNA, 15 bp, Homo sapiens
tcattttaccaacac

SEQ ID NO: 147885 - DNA, 15 bp, Homo sapiens
cattttaccaacaca

SEQ ID NO: 147886 - DNA, 15 bp, Homo sapiens
attttaccaacacac

SEQ ID NO: 147887 - DNA, 15 bp, Homo sapiens
ttttaccaacacaca

SEQ ID NO: 147888 - DNA, 15 bp, Homo sapiens
tttaccaacacacat

SEQ ID NO: 147889 - DNA, 15 bp, Homo sapiens
ttaccaacacacatg

SEQ ID NO: 147890 - DNA, 15 bp, Homo sapiens
taccaacacacatgc

SEQ ID NO: 147891 - DNA, 15 bp, Homo sapiens
accaacacacatgct

SEQ ID NO: 147892 - DNA, 15 bp, Homo sapiens
ccaacacacatgctt

SEQ ID NO: 147893 - DNA, 15 bp, Homo sapiens
caacacacatgcttg

SEQ ID NO: 147894 - DNA, 15 bp, Homo sapiens
aacacacatgcttgc

SEQ ID NO: 147895 - DNA, 15 bp, Homo sapiens
acacacatgcttgct

SEQ ID NO: 147896 - DNA, 15 bp, Homo sapiens
cacacatgcttgcta

SEQ ID NO: 147897 - DNA, 15 bp, Homo sapiens
acacatgcttgctaa

SEQ ID NO: 147898 - DNA, 15 bp, Homo sapiens
cacatgcttgctaac

SEQ ID NO: 147899 - DNA, 15 bp, Homo sapiens
acatgcttgctaact

SEQ ID NO: 147900 - DNA, 15 bp, Homo sapiens
catgcttgctaacta

SEQ ID NO: 147901 - DNA, 15 bp, Homo sapiens
atgcttgctaactaa

SEQ ID NO: 147902 - DNA, 15 bp, Homo sapiens
tgcttgctaactaac

SEQ ID NO: 147903 - DNA, 15 bp, Homo sapiens
gcttgctaactaaca

SEQ ID NO: 147904 - DNA, 15 bp, Homo sapiens
cttgctaactaacag

SEQ ID NO: 147905 - DNA, 15 bp, Homo sapiens
ttgctaactaacagg

SEQ ID NO: 147906 - DNA, 15 bp, Homo sapiens
tgctaactaacagga

SEQ ID NO: 147907 - DNA, 15 bp, Homo sapiens
gctaactaacaggaa

SEQ ID NO: 147908 - DNA, 15 bp, Homo sapiens
ctaactaacaggaat

SEQ ID NO: 147909 - DNA, 15 bp, Homo sapiens
taactaacaggaata

SEQ ID NO: 147910 - DNA, 15 bp, Homo sapiens
aactaacaggaataa

SEQ ID NO: 147911 - DNA, 15 bp, Homo sapiens
actaacaggaataac

SEQ ID NO: 147912 - DNA, 15 bp, Homo sapiens
ctaacaggaataacg

SEQ ID NO: 147913 - DNA, 15 bp, Homo sapiens
taacaggaataacgt

SEQ ID NO: 147914 - DNA, 15 bp, Homo sapiens
aacaggaataacgtg

SEQ ID NO: 147915 - DNA, 15 bp, Homo sapiens
acaggaataacgtgg

SEQ ID NO: 147916 - DNA, 15 bp, Homo sapiens
caggaataacgtggt

SEQ ID NO: 147917 - DNA, 15 bp, Homo sapiens
aggaataacgtggta

SEQ ID NO: 147918 - DNA, 15 bp, Homo sapiens
ggaataacgtggtac

SEQ ID NO: 147919 - DNA, 15 bp, Homo sapiens
gaataacgtggtacc

SEQ ID NO: 147920 - DNA, 15 bp, Homo sapiens
aataacgtggtaccc

SEQ ID NO: 147921 - DNA, 15 bp, Homo sapiens
ataacgtggtacccc

SEQ ID NO: 147922 - DNA, 15 bp, Homo sapiens
taacgtggtacccct

SEQ ID NO: 147923 - DNA, 15 bp, Homo sapiens
aacgtggtaccccta

SEQ ID NO: 147924 - DNA, 15 bp, Homo sapiens
acgtggtacccctaa

SEQ ID NO: 147925 - DNA, 15 bp, Homo sapiens
cgtggtacccctaat

SEQ ID NO: 147926 - DNA, 15 bp, Homo sapiens
gtggtacccctaatt

SEQ ID NO: 147927 - DNA, 15 bp, Homo sapiens
tggtacccctaattc

SEQ ID NO: 147928 - DNA, 15 bp, Homo sapiens
ggtacccctaattca

SEQ ID NO: 147929 - DNA, 15 bp, Homo sapiens
gtacccctaattcag

SEQ ID NO: 147930 - DNA, 15 bp, Homo sapiens
tacccctaattcagc

SEQ ID NO: 147931 - DNA, 15 bp, Homo sapiens
acccctaattcagcc

SEQ ID NO: 147932 - DNA, 15 bp, Homo sapiens
cccctaattcagccc

SEQ ID NO: 147933 - DNA, 15 bp, Homo sapiens
ccctaattcagccct

SEQ ID NO: 147934 - DNA, 15 bp, Homo sapiens
cctaattcagccctt

SEQ ID NO: 147935 - DNA, 15 bp, Homo sapiens
ctaattcagcccttt

SEQ ID NO: 147936 - DNA, 15 bp, Homo sapiens
taattcagccctttc

SEQ ID NO: 147937 - DNA, 15 bp, Homo sapiens
aattcagccctttcc

SEQ ID NO: 147938 - DNA, 15 bp, Homo sapiens
attcagccctttccc

SEQ ID NO: 147939 - DNA, 15 bp, Homo sapiens
ttcagccctttccct

SEQ ID NO: 147940 - DNA, 15 bp, Homo sapiens
tcagccctttccctt

SEQ ID NO: 147941 - DNA, 15 bp, Homo sapiens
cagccctttcccttg

SEQ ID NO: 147942 - DNA, 15 bp, Homo sapiens
agccctttcccttga

SEQ ID NO: 147943 - DNA, 15 bp, Homo sapiens
gccctttcccttgaa

SEQ ID NO: 147944 - DNA, 15 bp, Homo sapiens
ccctttcccttgaaa

SEQ ID NO: 147945 - DNA, 15 bp, Homo sapiens
cctttcccttgaaag

SEQ ID NO: 147946 - DNA, 15 bp, Homo sapiens
ctttcccttgaaagc

SEQ ID NO: 147947 - DNA, 15 bp, Homo sapiens
tttcccttgaaagca

SEQ ID NO: 147948 - DNA, 15 bp, Homo sapiens
ttcccttgaaagcat

SEQ ID NO: 147949 - DNA, 15 bp, Homo sapiens
tcccttgaaagcatc

SEQ ID NO: 147950 - DNA, 15 bp, Homo sapiens
cccttgaaagcatct

SEQ ID NO: 147951 - DNA, 15 bp, Homo sapiens
ccttgaaagcatctg

SEQ ID NO: 147952 - DNA, 15 bp, Homo sapiens
cttgaaagcatctgg

SEQ ID NO: 147953 - DNA, 15 bp, Homo sapiens
ttgaaagcatctggc

SEQ ID NO: 147954 - DNA, 15 bp, Homo sapiens
tgaaagcatctggct

SEQ ID NO: 147955 - DNA, 15 bp, Homo sapiens
gaaagcatctggctt

SEQ ID NO: 147956 - DNA, 15 bp, Homo sapiens
aaagcatctggcttc

SEQ ID NO: 147957 - DNA, 15 bp, Homo sapiens
aagcatctggcttct

SEQ ID NO: 147958 - DNA, 15 bp, Homo sapiens
agcatctggcttctg

SEQ ID NO: 147959 - DNA, 15 bp, Homo sapiens
gcatctggcttctga

SEQ ID NO: 147960 - DNA, 15 bp, Homo sapiens
catctggcttctgag

SEQ ID NO: 147961 - DNA, 15 bp, Homo sapiens
atctggcttctgagg

SEQ ID NO: 147962 - DNA, 15 bp, Homo sapiens
tctggcttctgaggt

SEQ ID NO: 147963 - DNA, 15 bp, Homo sapiens
ctggcttctgaggtt

SEQ ID NO: 147964 - DNA, 15 bp, Homo sapiens
tggcttctgaggttc

SEQ ID NO: 147965 - DNA, 15 bp, Homo sapiens
ggcttctgaggttca

SEQ ID NO: 147966 - DNA, 15 bp, Homo sapiens
gcttctgaggttcaa

SEQ ID NO: 147967 - DNA, 15 bp, Homo sapiens
cttctgaggttcaac

SEQ ID NO: 147968 - DNA, 15 bp, Homo sapiens
ttctgaggttcaact

SEQ ID NO: 147969 - DNA, 15 bp, Homo sapiens
tctgaggttcaacta

SEQ ID NO: 147970 - DNA, 15 bp, Homo sapiens
ctgaggttcaactat

SEQ ID NO: 147971 - DNA, 15 bp, Homo sapiens
tgaggttcaactatg

SEQ ID NO: 147972 - DNA, 15 bp, Homo sapiens
gaggttcaactatgg

SEQ ID NO: 147973 - DNA, 15 bp, Homo sapiens
aggttcaactatggg

SEQ ID NO: 147974 - DNA, 15 bp, Homo sapiens
ggttcaactatggga

SEQ ID NO: 147975 - DNA, 15 bp, Homo sapiens
gttcaactatgggaa

SEQ ID NO: 147976 - DNA, 15 bp, Homo sapiens
ttcaactatgggaat

SEQ ID NO: 147977 - DNA, 15 bp, Homo sapiens
tcaactatgggaata

SEQ ID NO: 147978 - DNA, 15 bp, Homo sapiens
caactatgggaatat

SEQ ID NO: 147979 - DNA, 15 bp, Homo sapiens
aactatgggaatatg

SEQ ID NO: 147980 - DNA, 15 bp, Homo sapiens
actatgggaatatgg

SEQ ID NO: 147981 - DNA, 15 bp, Homo sapiens
ctatgggaatatggt

SEQ ID NO: 147982 - DNA, 15 bp, Homo sapiens
tatgggaatatggtc

SEQ ID NO: 147983 - DNA, 15 bp, Homo sapiens
atgggaatatggtct

SEQ ID NO: 147984 - DNA, 15 bp, Homo sapiens
tgggaatatggtctc

SEQ ID NO: 147985 - DNA, 15 bp, Homo sapiens
gggaatatggtctct

SEQ ID NO: 147986 - DNA, 15 bp, Homo sapiens
ggaatatggtctctt

SEQ ID NO: 147987 - DNA, 15 bp, Homo sapiens
gaatatggtctctta

SEQ ID NO: 147988 - DNA, 15 bp, Homo sapiens
aatatggtctcttaa

SEQ ID NO: 147989 - DNA, 15 bp, Homo sapiens
atatggtctcttaat

SEQ ID NO: 147990 - DNA, 15 bp, Homo sapiens
tatggtctcttaatg

SEQ ID NO: 147991 - DNA, 15 bp, Homo sapiens
atggtctcttaatga

SEQ ID NO: 147992 - DNA, 15 bp, Homo sapiens
tggtctcttaatgaa

SEQ ID NO: 147993 - DNA, 15 bp, Homo sapiens
ggtctcttaatgaac

SEQ ID NO: 147994 - DNA, 15 bp, Homo sapiens
gtctcttaatgaaca

SEQ ID NO: 147995 - DNA, 15 bp, Homo sapiens
tctcttaatgaacat

SEQ ID NO: 147996 - DNA, 15 bp, Homo sapiens
ctcttaatgaacatt

SEQ ID NO: 147997 - DNA, 15 bp, Homo sapiens
tcttaatgaacatta

SEQ ID NO: 147998 - DNA, 15 bp, Homo sapiens
cttaatgaacattaa

SEQ ID NO: 147999 - DNA, 15 bp, Homo sapiens
ttaatgaacattaag

SEQ ID NO: 148000 - DNA, 15 bp, Homo sapiens
taatgaacattaagt

SEQ ID NO: 148001 - DNA, 15 bp, Homo sapiens
aatgaacattaagtt

SEQ ID NO: 148002 - DNA, 15 bp, Homo sapiens
atgaacattaagttg

SEQ ID NO: 148003 - DNA, 15 bp, Homo sapiens
tgaacattaagttga

SEQ ID NO: 148004 - DNA, 15 bp, Homo sapiens
gaacattaagttgag

SEQ ID NO: 148005 - DNA, 15 bp, Homo sapiens
aacattaagttgagt

SEQ ID NO: 148006 - DNA, 15 bp, Homo sapiens
acattaagttgagtt

SEQ ID NO: 148007 - DNA, 15 bp, Homo sapiens
cattaagttgagttt

SEQ ID NO: 148008 - DNA, 15 bp, Homo sapiens
attaagttgagtttg

SEQ ID NO: 148009 - DNA, 15 bp, Homo sapiens
ttaagttgagtttgc

SEQ ID NO: 148010 - DNA, 15 bp, Homo sapiens
taagttgagtttgcc

SEQ ID NO: 148011 - DNA, 15 bp, Homo sapiens
aagttgagtttgcct

SEQ ID NO: 148012 - DNA, 15 bp, Homo sapiens
agttgagtttgcctt

SEQ ID NO: 148013 - DNA, 15 bp, Homo sapiens
gttgagtttgccttt

SEQ ID NO: 148014 - DNA, 15 bp, Homo sapiens
ttgagtttgcctttt

SEQ ID NO: 148015 - DNA, 15 bp, Homo sapiens
tgagtttgcctttta

SEQ ID NO: 148016 - DNA, 15 bp, Homo sapiens
gagtttgccttttag

SEQ ID NO: 148017 - DNA, 15 bp, Homo sapiens
agtttgccttttagg

SEQ ID NO: 148018 - DNA, 15 bp, Homo sapiens
gtttgccttttaggt

SEQ ID NO: 148019 - DNA, 15 bp, Homo sapiens
tttgccttttaggtc

SEQ ID NO: 148020 - DNA, 15 bp, Homo sapiens
ttgccttttaggtcc

SEQ ID NO: 148021 - DNA, 15 bp, Homo sapiens
tgccttttaggtcca

SEQ ID NO: 148022 - DNA, 15 bp, Homo sapiens
gccttttaggtccac

SEQ ID NO: 148023 - DNA, 15 bp, Homo sapiens
ccttttaggtccaca

SEQ ID NO: 148024 - DNA, 15 bp, Homo sapiens
cttttaggtccacat

SEQ ID NO: 148025 - DNA, 15 bp, Homo sapiens
ttttaggtccacatg

SEQ ID NO: 148026 - DNA, 15 bp, Homo sapiens
tttaggtccacatgt

SEQ ID NO: 148027 - DNA, 15 bp, Homo sapiens
ttaggtccacatgtt

SEQ ID NO: 148028 - DNA, 15 bp, Homo sapiens
taggtccacatgttg

SEQ ID NO: 148029 - DNA, 15 bp, Homo sapiens
aggtccacatgttga

SEQ ID NO: 148030 - DNA, 15 bp, Homo sapiens
ggtccacatgttgac

SEQ ID NO: 148031 - DNA, 15 bp, Homo sapiens
gtccacatgttgaca

SEQ ID NO: 148032 - DNA, 15 bp, Homo sapiens
tccacatgttgacaa

SEQ ID NO: 148033 - DNA, 15 bp, Homo sapiens
ccacatgttgacaaa

SEQ ID NO: 148034 - DNA, 15 bp, Homo sapiens
cacatgttgacaaat

SEQ ID NO: 148035 - DNA, 15 bp, Homo sapiens
acatgttgacaaatg

SEQ ID NO: 148036 - DNA, 15 bp, Homo sapiens
catgttgacaaatgt

SEQ ID NO: 148037 - DNA, 15 bp, Homo sapiens
atgttgacaaatgta

SEQ ID NO: 148038 - DNA, 15 bp, Homo sapiens
tgttgacaaatgtat

SEQ ID NO: 148039 - DNA, 15 bp, Homo sapiens
gttgacaaatgtatc

SEQ ID NO: 148040 - DNA, 15 bp, Homo sapiens
ttgacaaatgtatca

SEQ ID NO: 148041 - DNA, 15 bp, Homo sapiens
tgacaaatgtatcag

SEQ ID NO: 148042 - DNA, 15 bp, Homo sapiens
gacaaatgtatcaga

SEQ ID NO: 148043 - DNA, 15 bp, Homo sapiens
acaaatgtatcagag

SEQ ID NO: 148044 - DNA, 15 bp, Homo sapiens
caaatgtatcagagt

SEQ ID NO: 148045 - DNA, 15 bp, Homo sapiens
aaatgtatcagagta

SEQ ID NO: 148046 - DNA, 15 bp, Homo sapiens
aatgtatcagagtaa

SEQ ID NO: 148047 - DNA, 15 bp, Homo sapiens
atgtatcagagtaat

SEQ ID NO: 148048 - DNA, 15 bp, Homo sapiens
tgtatcagagtaatc

SEQ ID NO: 148049 - DNA, 15 bp, Homo sapiens
gtatcagagtaatct

SEQ ID NO: 148050 - DNA, 15 bp, Homo sapiens
tatcagagtaatctc

SEQ ID NO: 148051 - DNA, 15 bp, Homo sapiens
atcagagtaatctct

SEQ ID NO: 148052 - DNA, 15 bp, Homo sapiens
tcagagtaatctctg

SEQ ID NO: 148053 - DNA, 15 bp, Homo sapiens
cagagtaatctctgt

SEQ ID NO: 148054 - DNA, 15 bp, Homo sapiens
agagtaatctctgtc

SEQ ID NO: 148055 - DNA, 15 bp, Homo sapiens
gagtaatctctgtcc

SEQ ID NO: 148056 - DNA, 15 bp, Homo sapiens
agtaatctctgtcct

SEQ ID NO: 148057 - DNA, 15 bp, Homo sapiens
gtaatctctgtccta

SEQ ID NO: 148058 - DNA, 15 bp, Homo sapiens
taatctctgtcctag

SEQ ID NO: 148059 - DNA, 15 bp, Homo sapiens
aatctctgtcctagg

SEQ ID NO: 148060 - DNA, 15 bp, Homo sapiens
atctctgtcctagga

SEQ ID NO: 148061 - DNA, 15 bp, Homo sapiens
tctctgtcctaggat

SEQ ID NO: 148062 - DNA, 15 bp, Homo sapiens
ctctgtcctaggatc

SEQ ID NO: 148063 - DNA, 15 bp, Homo sapiens
tctgtcctaggatca

SEQ ID NO: 148064 - DNA, 15 bp, Homo sapiens
ctgtcctaggatcag

SEQ ID NO: 148065 - DNA, 15 bp, Homo sapiens
tgtcctaggatcaga

SEQ ID NO: 148066 - DNA, 15 bp, Homo sapiens
gtcctaggatcagag

SEQ ID NO: 148067 - DNA, 15 bp, Homo sapiens
tcctaggatcagagg

SEQ ID NO: 148068 - DNA, 15 bp, Homo sapiens
cctaggatcagaggg

SEQ ID NO: 148069 - DNA, 15 bp, Homo sapiens
ctaggatcagagggc

SEQ ID NO: 148070 - DNA, 15 bp, Homo sapiens
taggatcagagggcc

SEQ ID NO: 148071 - DNA, 15 bp, Homo sapiens
aggatcagagggcct

SEQ ID NO: 148072 - DNA, 15 bp, Homo sapiens
ggatcagagggcctg

SEQ ID NO: 148073 - DNA, 15 bp, Homo sapiens
gatcagagggcctgt

SEQ ID NO: 148074 - DNA, 15 bp, Homo sapiens
atcagagggcctgta

SEQ ID NO: 148075 - DNA, 15 bp, Homo sapiens
tcagagggcctgtag

SEQ ID NO: 148076 - DNA, 15 bp, Homo sapiens
cagagggcctgtagg

SEQ ID NO: 148077 - DNA, 15 bp, Homo sapiens
agagggcctgtaggc

SEQ ID NO: 148078 - DNA, 15 bp, Homo sapiens
gagggcctgtaggca

SEQ ID NO: 148079 - DNA, 15 bp, Homo sapiens
agggcctgtaggcac

SEQ ID NO: 148080 - DNA, 15 bp, Homo sapiens
gggcctgtaggcact

SEQ ID NO: 148081 - DNA, 15 bp, Homo sapiens
ggcctgtaggcactt

SEQ ID NO: 148082 - DNA, 15 bp, Homo sapiens
gcctgtaggcacttg

SEQ ID NO: 148083 - DNA, 15 bp, Homo sapiens
cctgtaggcacttgc

SEQ ID NO: 148084 - DNA, 15 bp, Homo sapiens
ctgtaggcacttgca

SEQ ID NO: 148085 - DNA, 15 bp, Homo sapiens
tgtaggcacttgcaa

SEQ ID NO: 148086 - DNA, 15 bp, Homo sapiens
gtaggcacttgcaaa

SEQ ID NO: 148087 - DNA, 15 bp, Homo sapiens
taggcacttgcaaaa

SEQ ID NO: 148088 - DNA, 15 bp, Homo sapiens
aggcacttgcaaaag

SEQ ID NO: 148089 - DNA, 15 bp, Homo sapiens
ggcacttgcaaaagc

SEQ ID NO: 148090 - DNA, 15 bp, Homo sapiens
gcacttgcaaaagca

SEQ ID NO: 148091 - DNA, 15 bp, Homo sapiens
cacttgcaaaagcag

SEQ ID NO: 148092 - DNA, 15 bp, Homo sapiens
acttgcaaaagcagt

SEQ ID NO: 148093 - DNA, 15 bp, Homo sapiens
cttgcaaaagcagtt

SEQ ID NO: 148094 - DNA, 15 bp, Homo sapiens
ttgcaaaagcagtta

SEQ ID NO: 148095 - DNA, 15 bp, Homo sapiens
tgcaaaagcagttag

SEQ ID NO: 148096 - DNA, 15 bp, Homo sapiens
gcaaaagcagttagc

SEQ ID NO: 148097 - DNA, 15 bp, Homo sapiens
caaaagcagttagct

SEQ ID NO: 148098 - DNA, 15 bp, Homo sapiens
aaaagcagttagctc

SEQ ID NO: 148099 - DNA, 15 bp, Homo sapiens
aaagcagttagctct

SEQ ID NO: 148100 - DNA, 15 bp, Homo sapiens
aagcagttagctctg

SEQ ID NO: 148101 - DNA, 15 bp, Homo sapiens
agcagttagctctga

SEQ ID NO: 148102 - DNA, 15 bp, Homo sapiens
gcagttagctctgac

SEQ ID NO: 148103 - DNA, 15 bp, Homo sapiens
cagttagctctgact

SEQ ID NO: 148104 - DNA, 15 bp, Homo sapiens
agttagctctgactc

SEQ ID NO: 148105 - DNA, 15 bp, Homo sapiens
gttagctctgactcc

SEQ ID NO: 148106 - DNA, 15 bp, Homo sapiens
ttagctctgactccc

SEQ ID NO: 148107 - DNA, 15 bp, Homo sapiens
tagctctgactccca

SEQ ID NO: 148108 - DNA, 15 bp, Homo sapiens
agctctgactcccag

SEQ ID NO: 148109 - DNA, 15 bp, Homo sapiens
gctctgactcccagc

SEQ ID NO: 148110 - DNA, 15 bp, Homo sapiens
ctctgactcccagcc

SEQ ID NO: 148111 - DNA, 15 bp, Homo sapiens
tctgactcccagcca

SEQ ID NO: 148112 - DNA, 15 bp, Homo sapiens
ctgactcccagccag

SEQ ID NO: 148113 - DNA, 15 bp, Homo sapiens
tgactcccagccagt

SEQ ID NO: 148114 - DNA, 15 bp, Homo sapiens
gactcccagccagtg

SEQ ID NO: 148115 - DNA, 15 bp, Homo sapiens
actcccagccagtgc

SEQ ID NO: 148116 - DNA, 15 bp, Homo sapiens
ctcccagccagtgca

SEQ ID NO: 148117 - DNA, 15 bp, Homo sapiens
tcccagccagtgcac

SEQ ID NO: 148118 - DNA, 15 bp, Homo sapiens
cccagccagtgcaca

SEQ ID NO: 148119 - DNA, 15 bp, Homo sapiens
ccagccagtgcacac

SEQ ID NO: 148120 - DNA, 15 bp, Homo sapiens
cagccagtgcacact

SEQ ID NO: 148121 - DNA, 15 bp, Homo sapiens
agccagtgcacactc

SEQ ID NO: 148122 - DNA, 15 bp, Homo sapiens
gccagtgcacactcc

SEQ ID NO: 148123 - DNA, 15 bp, Homo sapiens
ccagtgcacactcca

SEQ ID NO: 148124 - DNA, 15 bp, Homo sapiens
cagtgcacactccac

SEQ ID NO: 148125 - DNA, 15 bp, Homo sapiens
agtgcacactccacc

SEQ ID NO: 148126 - DNA, 15 bp, Homo sapiens
gtgcacactccacct

SEQ ID NO: 148127 - DNA, 15 bp, Homo sapiens
tgcacactccacctt

SEQ ID NO: 148128 - DNA, 15 bp, Homo sapiens
gcacactccaccttt

SEQ ID NO: 148129 - DNA, 15 bp, Homo sapiens
cacactccacctttc

SEQ ID NO: 148130 - DNA, 15 bp, Homo sapiens
acactccacctttct

SEQ ID NO: 148131 - DNA, 15 bp, Homo sapiens
cactccacctttctg

SEQ ID NO: 148132 - DNA, 15 bp, Homo sapiens
actccacctttctga

SEQ ID NO: 148133 - DNA, 15 bp, Homo sapiens
ctccacctttctgac

SEQ ID NO: 148134 - DNA, 15 bp, Homo sapiens
tccacctttctgact

SEQ ID NO: 148135 - DNA, 15 bp, Homo sapiens
ccacctttctgactc

SEQ ID NO: 148136 - DNA, 15 bp, Homo sapiens
cacctttctgactcc

SEQ ID NO: 148137 - DNA, 15 bp, Homo sapiens
acctttctgactccc

SEQ ID NO: 148138 - DNA, 15 bp, Homo sapiens
cctttctgactccca

SEQ ID NO: 148139 - DNA, 15 bp, Homo sapiens
ctttctgactcccag

SEQ ID NO: 148140 - DNA, 15 bp, Homo sapiens
tttctgactcccagc

SEQ ID NO: 148141 - DNA, 15 bp, Homo sapiens
ttctgactcccagcc

SEQ ID NO: 148142 - DNA, 15 bp, Homo sapiens
tctgactcccagcct

SEQ ID NO: 148143 - DNA, 15 bp, Homo sapiens
ctgactcccagcctt

SEQ ID NO: 148144 - DNA, 15 bp, Homo sapiens
tgactcccagccttg

SEQ ID NO: 148145 - DNA, 15 bp, Homo sapiens
gactcccagccttgt

SEQ ID NO: 148146 - DNA, 15 bp, Homo sapiens
actcccagccttgtc

SEQ ID NO: 148147 - DNA, 15 bp, Homo sapiens
ctcccagccttgtct

SEQ ID NO: 148148 - DNA, 15 bp, Homo sapiens
tcccagccttgtctc

SEQ ID NO: 148149 - DNA, 15 bp, Homo sapiens
cccagccttgtctca

SEQ ID NO: 148150 - DNA, 15 bp, Homo sapiens
ccagccttgtctcaa

SEQ ID NO: 148151 - DNA, 15 bp, Homo sapiens
cagccttgtctcaaa

SEQ ID NO: 148152 - DNA, 15 bp, Homo sapiens
agccttgtctcaaat

SEQ ID NO: 148153 - DNA, 15 bp, Homo sapiens
gccttgtctcaaatt

SEQ ID NO: 148154 - DNA, 15 bp, Homo sapiens
ccttgtctcaaatta

SEQ ID NO: 148155 - DNA, 15 bp, Homo sapiens
cttgtctcaaattag

SEQ ID NO: 148156 - DNA, 15 bp, Homo sapiens
ttgtctcaaattagg

SEQ ID NO: 148157 - DNA, 15 bp, Homo sapiens
tgtctcaaattaggc

SEQ ID NO: 148158 - DNA, 15 bp, Homo sapiens
gtctcaaattaggct

SEQ ID NO: 148159 - DNA, 15 bp, Homo sapiens
tctcaaattaggctt

SEQ ID NO: 148160 - DNA, 15 bp, Homo sapiens
ctcaaattaggcttg

SEQ ID NO: 148161 - DNA, 15 bp, Homo sapiens
tcaaattaggcttgg

SEQ ID NO: 148162 - DNA, 15 bp, Homo sapiens
caaattaggcttgga

SEQ ID NO: 148163 - DNA, 15 bp, Homo sapiens
aaattaggcttggaa

SEQ ID NO: 148164 - DNA, 15 bp, Homo sapiens
aattaggcttggaag

SEQ ID NO: 148165 - DNA, 15 bp, Homo sapiens
attaggcttggaagc

SEQ ID NO: 148166 - DNA, 15 bp, Homo sapiens
ttaggcttggaagcg

SEQ ID NO: 148167 - DNA, 15 bp, Homo sapiens
taggcttggaagcga

SEQ ID NO: 148168 - DNA, 15 bp, Homo sapiens
aggcttggaagcgag

SEQ ID NO: 148169 - DNA, 15 bp, Homo sapiens
ggcttggaagcgagg

SEQ ID NO: 148170 - DNA, 15 bp, Homo sapiens
gcttggaagcgagga

SEQ ID NO: 148171 - DNA, 15 bp, Homo sapiens
cttggaagcgaggaa

SEQ ID NO: 148172 - DNA, 15 bp, Homo sapiens
ttggaagcgaggaac

SEQ ID NO: 148173 - DNA, 15 bp, Homo sapiens
tggaagcgaggaact

SEQ ID NO: 148174 - DNA, 15 bp, Homo sapiens
ggaagcgaggaactg

SEQ ID NO: 148175 - DNA, 15 bp, Homo sapiens
gaagcgaggaactgt

SEQ ID NO: 148176 - DNA, 15 bp, Homo sapiens
aagcgaggaactgtc

SEQ ID NO: 148177 - DNA, 15 bp, Homo sapiens
agcgaggaactgtct

SEQ ID NO: 148178 - DNA, 15 bp, Homo sapiens
gcgaggaactgtctg

SEQ ID NO: 148179 - DNA, 15 bp, Homo sapiens
cgaggaactgtctgg

SEQ ID NO: 148180 - DNA, 15 bp, Homo sapiens
gaggaactgtctggt

SEQ ID NO: 148181 - DNA, 15 bp, Homo sapiens
aggaactgtctggtg

SEQ ID NO: 148182 - DNA, 15 bp, Homo sapiens
ggaactgtctggtgt

SEQ ID NO: 148183 - DNA, 15 bp, Homo sapiens
gaactgtctggtgtc

SEQ ID NO: 148184 - DNA, 15 bp, Homo sapiens
aactgtctggtgtcc

SEQ ID NO: 148185 - DNA, 15 bp, Homo sapiens
actgtctggtgtccc

SEQ ID NO: 148186 - DNA, 15 bp, Homo sapiens
ctgtctggtgtcccc

SEQ ID NO: 148187 - DNA, 15 bp, Homo sapiens
tgtctggtgtccccc

SEQ ID NO: 148188 - DNA, 15 bp, Homo sapiens
gtctggtgtccccca

SEQ ID NO: 148189 - DNA, 15 bp, Homo sapiens
tctggtgtcccccag

SEQ ID NO: 148190 - DNA, 15 bp, Homo sapiens
ctggtgtcccccagc

SEQ ID NO: 148191 - DNA, 15 bp, Homo sapiens
tggtgtcccccagca

SEQ ID NO: 148192 - DNA, 15 bp, Homo sapiens
ggtgtcccccagcat

SEQ ID NO: 148193 - DNA, 15 bp, Homo sapiens
gtgtcccccagcata

SEQ ID NO: 148194 - DNA, 15 bp, Homo sapiens
tgtcccccagcatag

SEQ ID NO: 148195 - DNA, 15 bp, Homo sapiens
gtcccccagcatagg

SEQ ID NO: 148196 - DNA, 15 bp, Homo sapiens
tcccccagcatagga

SEQ ID NO: 148197 - DNA, 15 bp, Homo sapiens
cccccagcataggaa

SEQ ID NO: 148198 - DNA, 15 bp, Homo sapiens
ccccagcataggaag

SEQ ID NO: 148199 - DNA, 15 bp, Homo sapiens
cccagcataggaagc

SEQ ID NO: 148200 - DNA, 15 bp, Homo sapiens
ccagcataggaagct

SEQ ID NO: 148201 - DNA, 15 bp, Homo sapiens
cagcataggaagctg

SEQ ID NO: 148202 - DNA, 15 bp, Homo sapiens
agcataggaagctga

SEQ ID NO: 148203 - DNA, 15 bp, Homo sapiens
gcataggaagctgag

SEQ ID NO: 148204 - DNA, 15 bp, Homo sapiens
cataggaagctgagc

SEQ ID NO: 148205 - DNA, 15 bp, Homo sapiens
ataggaagctgagcc

SEQ ID NO: 148206 - DNA, 15 bp, Homo sapiens
taggaagctgagcca

SEQ ID NO: 148207 - DNA, 15 bp, Homo sapiens
aggaagctgagccag

SEQ ID NO: 148208 - DNA, 15 bp, Homo sapiens
ggaagctgagccagg

SEQ ID NO: 148209 - DNA, 15 bp, Homo sapiens
gaagctgagccaggg

SEQ ID NO: 148210 - DNA, 15 bp, Homo sapiens
aagctgagccagggg

SEQ ID NO: 148211 - DNA, 15 bp, Homo sapiens
agctgagccaggggg

SEQ ID NO: 148212 - DNA, 15 bp, Homo sapiens
gctgagccagggggc

SEQ ID NO: 148213 - DNA, 15 bp, Homo sapiens
ctgagccagggggca

SEQ ID NO: 148214 - DNA, 15 bp, Homo sapiens
tgagccagggggcag

SEQ ID NO: 148215 - DNA, 15 bp, Homo sapiens
gagccagggggcagt

SEQ ID NO: 148216 - DNA, 15 bp, Homo sapiens
agccagggggcagtg

SEQ ID NO: 148217 - DNA, 15 bp, Homo sapiens
gccagggggcagtgc

SEQ ID NO: 148218 - DNA, 15 bp, Homo sapiens
ccagggggcagtgct

SEQ ID NO: 148219 - DNA, 15 bp, Homo sapiens
cagggggcagtgctc

SEQ ID NO: 148220 - DNA, 15 bp, Homo sapiens
agggggcagtgctca

SEQ ID NO: 148221 - DNA, 15 bp, Homo sapiens
gggggcagtgctcac

SEQ ID NO: 148222 - DNA, 15 bp, Homo sapiens
ggggcagtgctcaca

SEQ ID NO: 148223 - DNA, 15 bp, Homo sapiens
gggcagtgctcacaa

SEQ ID NO: 148224 - DNA, 15 bp, Homo sapiens
ggcagtgctcacaaa

SEQ ID NO: 148225 - DNA, 15 bp, Homo sapiens
gcagtgctcacaaac

SEQ ID NO: 148226 - DNA, 15 bp, Homo sapiens
cagtgctcacaaaca

SEQ ID NO: 148227 - DNA, 15 bp, Homo sapiens
agtgctcacaaacaa

SEQ ID NO: 148228 - DNA, 15 bp, Homo sapiens
gtgctcacaaacaat

SEQ ID NO: 148229 - DNA, 15 bp, Homo sapiens
tgctcacaaacaata

SEQ ID NO: 148230 - DNA, 15 bp, Homo sapiens
gctcacaaacaatac

SEQ ID NO: 148231 - DNA, 15 bp, Homo sapiens
ctcacaaacaataca

SEQ ID NO: 148232 - DNA, 15 bp, Homo sapiens
tcacaaacaatacag

SEQ ID NO: 148233 - DNA, 15 bp, Homo sapiens
cacaaacaatacaga

SEQ ID NO: 148234 - DNA, 15 bp, Homo sapiens
acaaacaatacagac

SEQ ID NO: 148235 - DNA, 15 bp, Homo sapiens
caaacaatacagact

SEQ ID NO: 148236 - DNA, 15 bp, Homo sapiens
aaacaatacagactt

SEQ ID NO: 148237 - DNA, 15 bp, Homo sapiens
aacaatacagacttt

SEQ ID NO: 148238 - DNA, 15 bp, Homo sapiens
acaatacagacttta

SEQ ID NO: 148239 - DNA, 15 bp, Homo sapiens
caatacagactttaa

SEQ ID NO: 148240 - DNA, 15 bp, Homo sapiens
aatacagactttaac

SEQ ID NO: 148241 - DNA, 15 bp, Homo sapiens
atacagactttaacg

SEQ ID NO: 148242 - DNA, 15 bp, Homo sapiens
tacagactttaacgt

SEQ ID NO: 148243 - DNA, 15 bp, Homo sapiens
acagactttaacgtg

SEQ ID NO: 148244 - DNA, 15 bp, Homo sapiens
cagactttaacgtgt

SEQ ID NO: 148245 - DNA, 15 bp, Homo sapiens
agactttaacgtgta

SEQ ID NO: 148246 - DNA, 15 bp, Homo sapiens
gactttaacgtgtag

SEQ ID NO: 148247 - DNA, 15 bp, Homo sapiens
actttaacgtgtagg

SEQ ID NO: 148248 - DNA, 15 bp, Homo sapiens
ctttaacgtgtagga

SEQ ID NO: 148249 - DNA, 15 bp, Homo sapiens
tttaacgtgtaggat

SEQ ID NO: 148250 - DNA, 15 bp, Homo sapiens
ttaacgtgtaggata

SEQ ID NO: 148251 - DNA, 15 bp, Homo sapiens
taacgtgtaggatat

SEQ ID NO: 148252 - DNA, 15 bp, Homo sapiens
aacgtgtaggatatt

SEQ ID NO: 148253 - DNA, 15 bp, Homo sapiens
acgtgtaggatattg

SEQ ID NO: 148254 - DNA, 15 bp, Homo sapiens
cgtgtaggatattgg

SEQ ID NO: 148255 - DNA, 15 bp, Homo sapiens
gtgtaggatattgga

SEQ ID NO: 148256 - DNA, 15 bp, Homo sapiens
tgtaggatattggaa

SEQ ID NO: 148257 - DNA, 15 bp, Homo sapiens
gtaggatattggaaa

SEQ ID NO: 148258 - DNA, 15 bp, Homo sapiens
taggatattggaaaa

SEQ ID NO: 148259 - DNA, 15 bp, Homo sapiens
aggatattggaaaat

SEQ ID NO: 148260 - DNA, 15 bp, Homo sapiens
ggatattggaaaata

SEQ ID NO: 148261 - DNA, 15 bp, Homo sapiens
gatattggaaaataa

SEQ ID NO: 148262 - DNA, 15 bp, Homo sapiens
atattggaaaataat

SEQ ID NO: 148263 - DNA, 15 bp, Homo sapiens
tattggaaaataata

SEQ ID NO: 148264 - DNA, 15 bp, Homo sapiens
attggaaaataataa

SEQ ID NO: 148265 - DNA, 15 bp, Homo sapiens
ttggaaaataataat

SEQ ID NO: 148266 - DNA, 15 bp, Homo sapiens
tggaaaataataatt

SEQ ID NO: 148267 - DNA, 15 bp, Homo sapiens
ggaaaataataattt

SEQ ID NO: 148268 - DNA, 15 bp, Homo sapiens
gaaaataataatttg

SEQ ID NO: 148269 - DNA, 15 bp, Homo sapiens
aaaataataatttgt

SEQ ID NO: 148270 - DNA, 15 bp, Homo sapiens
aaataataatttgtg

SEQ ID NO: 148271 - DNA, 15 bp, Homo sapiens
aataataatttgtgg

SEQ ID NO: 148272 - DNA, 15 bp, Homo sapiens
ataataatttgtggg

SEQ ID NO: 148273 - DNA, 15 bp, Homo sapiens
taataatttgtgggg

SEQ ID NO: 148274 - DNA, 15 bp, Homo sapiens
aataatttgtgggga

SEQ ID NO: 148275 - DNA, 15 bp, Homo sapiens
ataatttgtggggaa

SEQ ID NO: 148276 - DNA, 15 bp, Homo sapiens
taatttgtggggaaa

SEQ ID NO: 148277 - DNA, 15 bp, Homo sapiens
aatttgtggggaaat

SEQ ID NO: 148278 - DNA, 15 bp, Homo sapiens
atttgtggggaaatt

SEQ ID NO: 148279 - DNA, 15 bp, Homo sapiens
tttgtggggaaattg

SEQ ID NO: 148280 - DNA, 15 bp, Homo sapiens
ttgtggggaaattgt

SEQ ID NO: 148281 - DNA, 15 bp, Homo sapiens
tgtggggaaattgtc

SEQ ID NO: 148282 - DNA, 15 bp, Homo sapiens
gtggggaaattgtct

SEQ ID NO: 148283 - DNA, 15 bp, Homo sapiens
tggggaaattgtctc

SEQ ID NO: 148284 - DNA, 15 bp, Homo sapiens
ggggaaattgtctca

SEQ ID NO: 148285 - DNA, 15 bp, Homo sapiens
gggaaattgtctcag

SEQ ID NO: 148286 - DNA, 15 bp, Homo sapiens
ggaaattgtctcaga

SEQ ID NO: 148287 - DNA, 15 bp, Homo sapiens
gaaattgtctcagac

SEQ ID NO: 148288 - DNA, 15 bp, Homo sapiens
aaattgtctcagact

SEQ ID NO: 148289 - DNA, 15 bp, Homo sapiens
aattgtctcagactt

SEQ ID NO: 148290 - DNA, 15 bp, Homo sapiens
attgtctcagacttg

SEQ ID NO: 148291 - DNA, 15 bp, Homo sapiens
ttgtctcagacttgg

SEQ ID NO: 148292 - DNA, 15 bp, Homo sapiens
tgtctcagacttggt

SEQ ID NO: 148293 - DNA, 15 bp, Homo sapiens
gtctcagacttggtc

SEQ ID NO: 148294 - DNA, 15 bp, Homo sapiens
tctcagacttggtcc

SEQ ID NO: 148295 - DNA, 15 bp, Homo sapiens
ctcagacttggtcca

SEQ ID NO: 148296 - DNA, 15 bp, Homo sapiens
tcagacttggtccac

SEQ ID NO: 148297 - DNA, 15 bp, Homo sapiens
cagacttggtccacc

SEQ ID NO: 148298 - DNA, 15 bp, Homo sapiens
agacttggtccaccc

SEQ ID NO: 148299 - DNA, 15 bp, Homo sapiens
gacttggtccaccct

SEQ ID NO: 148300 - DNA, 15 bp, Homo sapiens
acttggtccaccctt

SEQ ID NO: 148301 - DNA, 15 bp, Homo sapiens
cttggtccaccctta

SEQ ID NO: 148302 - DNA, 15 bp, Homo sapiens
ttggtccacccttat

SEQ ID NO: 148303 - DNA, 15 bp, Homo sapiens
tggtccacccttatt

SEQ ID NO: 148304 - DNA, 15 bp, Homo sapiens
ggtccacccttattt

SEQ ID NO: 148305 - DNA, 15 bp, Homo sapiens
gtccacccttatttt

SEQ ID NO: 148306 - DNA, 15 bp, Homo sapiens
tccacccttattttt

SEQ ID NO: 148307 - DNA, 15 bp, Homo sapiens
ccacccttattttta

SEQ ID NO: 148308 - DNA, 15 bp, Homo sapiens
cacccttatttttag

SEQ ID NO: 148309 - DNA, 15 bp, Homo sapiens
acccttatttttagc

SEQ ID NO: 148310 - DNA, 15 bp, Homo sapiens
cccttatttttagct

SEQ ID NO: 148311 - DNA, 15 bp, Homo sapiens
ccttatttttagctg

SEQ ID NO: 148312 - DNA, 15 bp, Homo sapiens
cttatttttagctgc

SEQ ID NO: 148313 - DNA, 15 bp, Homo sapiens
ttatttttagctgct

SEQ ID NO: 148314 - DNA, 15 bp, Homo sapiens
tatttttagctgctt

SEQ ID NO: 148315 - DNA, 15 bp, Homo sapiens
atttttagctgcttc

SEQ ID NO: 148316 - DNA, 15 bp, Homo sapiens
tttttagctgcttct

SEQ ID NO: 148317 - DNA, 15 bp, Homo sapiens
ttttagctgcttctc

SEQ ID NO: 148318 - DNA, 15 bp, Homo sapiens
tttagctgcttctct

SEQ ID NO: 148319 - DNA, 15 bp, Homo sapiens
ttagctgcttctcta

SEQ ID NO: 148320 - DNA, 15 bp, Homo sapiens
tagctgcttctctaa

SEQ ID NO: 148321 - DNA, 15 bp, Homo sapiens
agctgcttctctaat

SEQ ID NO: 148322 - DNA, 15 bp, Homo sapiens
gctgcttctctaatc

SEQ ID NO: 148323 - DNA, 15 bp, Homo sapiens
ctgcttctctaatcc

SEQ ID NO: 148324 - DNA, 15 bp, Homo sapiens
tgcttctctaatccg

SEQ ID NO: 148325 - DNA, 15 bp, Homo sapiens
gcttctctaatccgt

SEQ ID NO: 148326 - DNA, 15 bp, Homo sapiens
cttctctaatccgtt

SEQ ID NO: 148327 - DNA, 15 bp, Homo sapiens
ttctctaatccgttt

SEQ ID NO: 148328 - DNA, 15 bp, Homo sapiens
tctctaatccgtttt

SEQ ID NO: 148329 - DNA, 15 bp, Homo sapiens
ctctaatccgttttt

SEQ ID NO: 148330 - DNA, 15 bp, Homo sapiens
tctaatccgtttttc

SEQ ID NO: 148331 - DNA, 15 bp, Homo sapiens
ctaatccgtttttct

SEQ ID NO: 148332 - DNA, 15 bp, Homo sapiens
taatccgtttttctt

SEQ ID NO: 148333 - DNA, 15 bp, Homo sapiens
aatccgtttttcttt

SEQ ID NO: 148334 - DNA, 15 bp, Homo sapiens
atccgtttttctttt

SEQ ID NO: 148335 - DNA, 15 bp, Homo sapiens
tccgtttttcttttt

SEQ ID NO: 148336 - DNA, 15 bp, Homo sapiens
ccgtttttctttttt

SEQ ID NO: 148337 - DNA, 15 bp, Homo sapiens
cgtttttcttttttt

SEQ ID NO: 148338 - DNA, 15 bp, Homo sapiens
gtttttctttttttg

SEQ ID NO: 148339 - DNA, 15 bp, Homo sapiens
tttttctttttttgg

SEQ ID NO: 148340 - DNA, 15 bp, Homo sapiens
ttttctttttttggt

SEQ ID NO: 148341 - DNA, 15 bp, Homo sapiens
tttctttttttggtg

SEQ ID NO: 148342 - DNA, 15 bp, Homo sapiens
ttctttttttggtgc

SEQ ID NO: 148343 - DNA, 15 bp, Homo sapiens
tctttttttggtgct

SEQ ID NO: 148344 - DNA, 15 bp, Homo sapiens
ctttttttggtgctt

SEQ ID NO: 148345 - DNA, 15 bp, Homo sapiens
tttttttggtgcttg

SEQ ID NO: 148346 - DNA, 15 bp, Homo sapiens
ttttttggtgcttgt

SEQ ID NO: 148347 - DNA, 15 bp, Homo sapiens
tttttggtgcttgta

SEQ ID NO: 148348 - DNA, 15 bp, Homo sapiens
ttttggtgcttgtat

SEQ ID NO: 148349 - DNA, 15 bp, Homo sapiens
tttggtgcttgtatc

SEQ ID NO: 148350 - DNA, 15 bp, Homo sapiens
ttggtgcttgtatct

SEQ ID NO: 148351 - DNA, 15 bp, Homo sapiens
tggtgcttgtatcta

SEQ ID NO: 148352 - DNA, 15 bp, Homo sapiens
ggtgcttgtatctaa

SEQ ID NO: 148353 - DNA, 15 bp, Homo sapiens
gtgcttgtatctaac

SEQ ID NO: 148354 - DNA, 15 bp, Homo sapiens
tgcttgtatctaacc

SEQ ID NO: 148355 - DNA, 15 bp, Homo sapiens
gcttgtatctaacct

SEQ ID NO: 148356 - DNA, 15 bp, Homo sapiens
cttgtatctaaccta

SEQ ID NO: 148357 - DNA, 15 bp, Homo sapiens
ttgtatctaacctac

SEQ ID NO: 148358 - DNA, 15 bp, Homo sapiens
tgtatctaacctacc

SEQ ID NO: 148359 - DNA, 15 bp, Homo sapiens
gtatctaacctaccc

SEQ ID NO: 148360 - DNA, 15 bp, Homo sapiens
tatctaacctaccca

SEQ ID NO: 148361 - DNA, 15 bp, Homo sapiens
atctaacctacccat

SEQ ID NO: 148362 - DNA, 15 bp, Homo sapiens
tctaacctacccatt

SEQ ID NO: 148363 - DNA, 15 bp, Homo sapiens
ctaacctacccattt

SEQ ID NO: 148364 - DNA, 15 bp, Homo sapiens
taacctacccatttt

SEQ ID NO: 148365 - DNA, 15 bp, Homo sapiens
aacctacccattttt

SEQ ID NO: 148366 - DNA, 15 bp, Homo sapiens
acctacccatttttt

SEQ ID NO: 148367 - DNA, 15 bp, Homo sapiens
cctacccattttttg

SEQ ID NO: 148368 - DNA, 15 bp, Homo sapiens
ctacccattttttgg

SEQ ID NO: 148369 - DNA, 15 bp, Homo sapiens
tacccattttttggt

SEQ ID NO: 148370 - DNA, 15 bp, Homo sapiens
acccattttttggtg

SEQ ID NO: 148371 - DNA, 15 bp, Homo sapiens
cccattttttggtgc

SEQ ID NO: 148372 - DNA, 15 bp, Homo sapiens
ccattttttggtgct

SEQ ID NO: 148373 - DNA, 15 bp, Homo sapiens
cattttttggtgctt

SEQ ID NO: 148374 - DNA, 15 bp, Homo sapiens
attttttggtgcttg

SEQ ID NO: 148375 - DNA, 15 bp, Homo sapiens
ttttttggtgcttgc

SEQ ID NO: 148376 - DNA, 15 bp, Homo sapiens
tttttggtgcttgca

SEQ ID NO: 148377 - DNA, 15 bp, Homo sapiens
ttttggtgcttgcat

SEQ ID NO: 148378 - DNA, 15 bp, Homo sapiens
tttggtgcttgcatc

SEQ ID NO: 148379 - DNA, 15 bp, Homo sapiens
ttggtgcttgcatca

SEQ ID NO: 148380 - DNA, 15 bp, Homo sapiens
tggtgcttgcatcat

SEQ ID NO: 148381 - DNA, 15 bp, Homo sapiens
ggtgcttgcatcatt

SEQ ID NO: 148382 - DNA, 15 bp, Homo sapiens
gtgcttgcatcattt

SEQ ID NO: 148383 - DNA, 15 bp, Homo sapiens
tgcttgcatcatttt

SEQ ID NO: 148384 - DNA, 15 bp, Homo sapiens
gcttgcatcattttt

SEQ ID NO: 148385 - DNA, 15 bp, Homo sapiens
cttgcatcatttttt

SEQ ID NO: 148386 - DNA, 15 bp, Homo sapiens
ttgcatcattttttc

SEQ ID NO: 148387 - DNA, 15 bp, Homo sapiens
tgcatcattttttca

SEQ ID NO: 148388 - DNA, 15 bp, Homo sapiens
gcatcattttttcaa

SEQ ID NO: 148389 - DNA, 15 bp, Homo sapiens
catcattttttcaaa

SEQ ID NO: 148390 - DNA, 15 bp, Homo sapiens
atcattttttcaaat

SEQ ID NO: 148391 - DNA, 15 bp, Homo sapiens
tcattttttcaaata

SEQ ID NO: 148392 - DNA, 15 bp, Homo sapiens
cattttttcaaatat

SEQ ID NO: 148393 - DNA, 15 bp, Homo sapiens
attttttcaaatatc

SEQ ID NO: 148394 - DNA, 15 bp, Homo sapiens
ttttttcaaatatca

SEQ ID NO: 148395 - DNA, 15 bp, Homo sapiens
tttttcaaatatcaa

SEQ ID NO: 148396 - DNA, 15 bp, Homo sapiens
ttttcaaatatcaaa

SEQ ID NO: 148397 - DNA, 15 bp, Homo sapiens
tttcaaatatcaaaa

SEQ ID NO: 148398 - DNA, 15 bp, Homo sapiens
ttcaaatatcaaaaa

SEQ ID NO: 148399 - DNA, 15 bp, Homo sapiens
tcaaatatcaaaaac

SEQ ID NO: 148400 - DNA, 15 bp, Homo sapiens
caaatatcaaaaacg

SEQ ID NO: 148401 - DNA, 15 bp, Homo sapiens
aaatatcaaaaacga

SEQ ID NO: 148402 - DNA, 15 bp, Homo sapiens
aatatcaaaaacgaa

SEQ ID NO: 148403 - DNA, 15 bp, Homo sapiens
atatcaaaaacgaac

SEQ ID NO: 148404 - DNA, 15 bp, Homo sapiens
tatcaaaaacgaact

SEQ ID NO: 148405 - DNA, 15 bp, Homo sapiens
atcaaaaacgaactt

SEQ ID NO: 148406 - DNA, 15 bp, Homo sapiens
tcaaaaacgaacttt

SEQ ID NO: 148407 - DNA, 15 bp, Homo sapiens
caaaaacgaacttta

SEQ ID NO: 148408 - DNA, 15 bp, Homo sapiens
aaaaacgaactttat

SEQ ID NO: 148409 - DNA, 15 bp, Homo sapiens
aaaacgaactttatg

SEQ ID NO: 148410 - DNA, 15 bp, Homo sapiens
aaacgaactttatgt

SEQ ID NO: 148411 - DNA, 15 bp, Homo sapiens
aacgaactttatgtt

SEQ ID NO: 148412 - DNA, 15 bp, Homo sapiens
acgaactttatgttt

SEQ ID NO: 148413 - DNA, 15 bp, Homo sapiens
cgaactttatgtttt

SEQ ID NO: 148414 - DNA, 15 bp, Homo sapiens
gaactttatgttttc

SEQ ID NO: 148415 - DNA, 15 bp, Homo sapiens
aactttatgttttct

SEQ ID NO: 148416 - DNA, 15 bp, Homo sapiens
actttatgttttcta

SEQ ID NO: 148417 - DNA, 15 bp, Homo sapiens
ctttatgttttctaa

SEQ ID NO: 148418 - DNA, 15 bp, Homo sapiens
tttatgttttctaac

SEQ ID NO: 148419 - DNA, 15 bp, Homo sapiens
ttatgttttctaaca

SEQ ID NO: 148420 - DNA, 15 bp, Homo sapiens
tatgttttctaacaa

SEQ ID NO: 148421 - DNA, 15 bp, Homo sapiens
atgttttctaacaat

SEQ ID NO: 148422 - DNA, 15 bp, Homo sapiens
tgttttctaacaatg

SEQ ID NO: 148423 - DNA, 15 bp, Homo sapiens
gttttctaacaatga

SEQ ID NO: 148424 - DNA, 15 bp, Homo sapiens
ttttctaacaatgaa

SEQ ID NO: 148425 - DNA, 15 bp, Homo sapiens
tttctaacaatgaaa

SEQ ID NO: 148426 - DNA, 15 bp, Homo sapiens
ttctaacaatgaaag

SEQ ID NO: 148427 - DNA, 15 bp, Homo sapiens
tctaacaatgaaagt

SEQ ID NO: 148428 - DNA, 15 bp, Homo sapiens
ctaacaatgaaagta

SEQ ID NO: 148429 - DNA, 15 bp, Homo sapiens
taacaatgaaagtat

SEQ ID NO: 148430 - DNA, 15 bp, Homo sapiens
aacaatgaaagtatt

SEQ ID NO: 148431 - DNA, 15 bp, Homo sapiens
acaatgaaagtattg

SEQ ID NO: 148432 - DNA, 15 bp, Homo sapiens
caatgaaagtattgc

SEQ ID NO: 148433 - DNA, 15 bp, Homo sapiens
aatgaaagtattgca

SEQ ID NO: 148434 - DNA, 15 bp, Homo sapiens
atgaaagtattgcat

SEQ ID NO: 148435 - DNA, 15 bp, Homo sapiens
tgaaagtattgcatg

SEQ ID NO: 148436 - DNA, 15 bp, Homo sapiens
gaaagtattgcatgt

SEQ ID NO: 148437 - DNA, 15 bp, Homo sapiens
aaagtattgcatgtt

SEQ ID NO: 148438 - DNA, 15 bp, Homo sapiens
aagtattgcatgttc

SEQ ID NO: 148439 - DNA, 15 bp, Homo sapiens
agtattgcatgttca

SEQ ID NO: 148440 - DNA, 15 bp, Homo sapiens
gtattgcatgttcat

SEQ ID NO: 148441 - DNA, 15 bp, Homo sapiens
tattgcatgttcatt

SEQ ID NO: 148442 - DNA, 15 bp, Homo sapiens
attgcatgttcattg

SEQ ID NO: 148443 - DNA, 15 bp, Homo sapiens
ttgcatgttcattgt

SEQ ID NO: 148444 - DNA, 15 bp, Homo sapiens
tgcatgttcattgtg

SEQ ID NO: 148445 - DNA, 15 bp, Homo sapiens
gcatgttcattgtgg

SEQ ID NO: 148446 - DNA, 15 bp, Homo sapiens
catgttcattgtgga

SEQ ID NO: 148447 - DNA, 15 bp, Homo sapiens
atgttcattgtggaa

SEQ ID NO: 148448 - DNA, 15 bp, Homo sapiens
tgttcattgtggaaa

SEQ ID NO: 148449 - DNA, 15 bp, Homo sapiens
gttcattgtggaaaa

SEQ ID NO: 148450 - DNA, 15 bp, Homo sapiens
ttcattgtggaaaat

SEQ ID NO: 148451 - DNA, 15 bp, Homo sapiens
tcattgtggaaaatg

SEQ ID NO: 148452 - DNA, 15 bp, Homo sapiens
cattgtggaaaatgc

SEQ ID NO: 148453 - DNA, 15 bp, Homo sapiens
attgtggaaaatgct

SEQ ID NO: 148454 - DNA, 15 bp, Homo sapiens
ttgtggaaaatgctg

SEQ ID NO: 148455 - DNA, 15 bp, Homo sapiens
tgtggaaaatgctga

SEQ ID NO: 148456 - DNA, 15 bp, Homo sapiens
gtggaaaatgctgaa

SEQ ID NO: 148457 - DNA, 15 bp, Homo sapiens
tggaaaatgctgaag

SEQ ID NO: 148458 - DNA, 15 bp, Homo sapiens
ggaaaatgctgaaga

SEQ ID NO: 148459 - DNA, 15 bp, Homo sapiens
gaaaatgctgaagac

SEQ ID NO: 148460 - DNA, 15 bp, Homo sapiens
aaaatgctgaagact

SEQ ID NO: 148461 - DNA, 15 bp, Homo sapiens
aaatgctgaagactt

SEQ ID NO: 148462 - DNA, 15 bp, Homo sapiens
aatgctgaagacttg

SEQ ID NO: 148463 - DNA, 15 bp, Homo sapiens
atgctgaagacttgg

SEQ ID NO: 148464 - DNA, 15 bp, Homo sapiens
tgctgaagacttgga

SEQ ID NO: 148465 - DNA, 15 bp, Homo sapiens
gctgaagacttggaa

SEQ ID NO: 148466 - DNA, 15 bp, Homo sapiens
ctgaagacttggaaa

SEQ ID NO: 148467 - DNA, 15 bp, Homo sapiens
tgaagacttggaaaa

SEQ ID NO: 148468 - DNA, 15 bp, Homo sapiens
gaagacttggaaaat

SEQ ID NO: 148469 - DNA, 15 bp, Homo sapiens
aagacttggaaaata

SEQ ID NO: 148470 - DNA, 15 bp, Homo sapiens
agacttggaaaatac

SEQ ID NO: 148471 - DNA, 15 bp, Homo sapiens
gacttggaaaataca

SEQ ID NO: 148472 - DNA, 15 bp, Homo sapiens
acttggaaaatacaa

SEQ ID NO: 148473 - DNA, 15 bp, Homo sapiens
cttggaaaatacaaa

SEQ ID NO: 148474 - DNA, 15 bp, Homo sapiens
ttggaaaatacaaaa

SEQ ID NO: 148475 - DNA, 15 bp, Homo sapiens
tggaaaatacaaaaa

SEQ ID NO: 148476 - DNA, 15 bp, Homo sapiens
ggaaaatacaaaaat

SEQ ID NO: 148477 - DNA, 15 bp, Homo sapiens
gaaaatacaaaaatg

SEQ ID NO: 148478 - DNA, 15 bp, Homo sapiens
aaaatacaaaaatgc

SEQ ID NO: 148479 - DNA, 15 bp, Homo sapiens
aaatacaaaaatgct

SEQ ID NO: 148480 - DNA, 15 bp, Homo sapiens
aatacaaaaatgctg

SEQ ID NO: 148481 - DNA, 15 bp, Homo sapiens
atacaaaaatgctga

SEQ ID NO: 148482 - DNA, 15 bp, Homo sapiens
tacaaaaatgctgag

SEQ ID NO: 148483 - DNA, 15 bp, Homo sapiens
acaaaaatgctgaga

SEQ ID NO: 148484 - DNA, 15 bp, Homo sapiens
caaaaatgctgagat

SEQ ID NO: 148485 - DNA, 15 bp, Homo sapiens
aaaaatgctgagatc

SEQ ID NO: 148486 - DNA, 15 bp, Homo sapiens
aaaatgctgagatca

SEQ ID NO: 148487 - DNA, 15 bp, Homo sapiens
aaatgctgagatcaa

SEQ ID NO: 148488 - DNA, 15 bp, Homo sapiens
aatgctgagatcaaa

SEQ ID NO: 148489 - DNA, 15 bp, Homo sapiens
atgctgagatcaaac

SEQ ID NO: 148490 - DNA, 15 bp, Homo sapiens
tgctgagatcaaaca

SEQ ID NO: 148491 - DNA, 15 bp, Homo sapiens
gctgagatcaaacac

SEQ ID NO: 148492 - DNA, 15 bp, Homo sapiens
ctgagatcaaacact

SEQ ID NO: 148493 - DNA, 15 bp, Homo sapiens
tgagatcaaacacta

SEQ ID NO: 148494 - DNA, 15 bp, Homo sapiens
gagatcaaacactat

SEQ ID NO: 148495 - DNA, 15 bp, Homo sapiens
agatcaaacactatt

SEQ ID NO: 148496 - DNA, 15 bp, Homo sapiens
gatcaaacactattg

SEQ ID NO: 148497 - DNA, 15 bp, Homo sapiens
atcaaacactattga

SEQ ID NO: 148498 - DNA, 15 bp, Homo sapiens
tcaaacactattgat

SEQ ID NO: 148499 - DNA, 15 bp, Homo sapiens
caaacactattgata

SEQ ID NO: 148500 - DNA, 15 bp, Homo sapiens
aaacactattgatac

SEQ ID NO: 148501 - DNA, 15 bp, Homo sapiens
aacactattgatacg

SEQ ID NO: 148502 - DNA, 15 bp, Homo sapiens
acactattgatacgt

SEQ ID NO: 148503 - DNA, 15 bp, Homo sapiens
cactattgatacgtt

SEQ ID NO: 148504 - DNA, 15 bp, Homo sapiens
actattgatacgtta

SEQ ID NO: 148505 - DNA, 15 bp, Homo sapiens
ctattgatacgttag

SEQ ID NO: 148506 - DNA, 15 bp, Homo sapiens
tattgatacgttagt

SEQ ID NO: 148507 - DNA, 15 bp, Homo sapiens
attgatacgttagtg

SEQ ID NO: 148508 - DNA, 15 bp, Homo sapiens
ttgatacgttagtgt

SEQ ID NO: 148509 - DNA, 15 bp, Homo sapiens
tgatacgttagtgta

SEQ ID NO: 148510 - DNA, 15 bp, Homo sapiens
gatacgttagtgtat

SEQ ID NO: 148511 - DNA, 15 bp, Homo sapiens
atacgttagtgtatt

SEQ ID NO: 148512 - DNA, 15 bp, Homo sapiens
tacgttagtgtattt

SEQ ID NO: 148513 - DNA, 15 bp, Homo sapiens
acgttagtgtatttc

SEQ ID NO: 148514 - DNA, 15 bp, Homo sapiens
cgttagtgtatttct

SEQ ID NO: 148515 - DNA, 15 bp, Homo sapiens
gttagtgtatttctt

SEQ ID NO: 148516 - DNA, 15 bp, Homo sapiens
ttagtgtatttcttc

SEQ ID NO: 148517 - DNA, 15 bp, Homo sapiens
tagtgtatttcttcc

SEQ ID NO: 148518 - DNA, 15 bp, Homo sapiens
agtgtatttcttcct

SEQ ID NO: 148519 - DNA, 15 bp, Homo sapiens
gtgtatttcttcctg

SEQ ID NO: 148520 - DNA, 15 bp, Homo sapiens
tgtatttcttcctgt

SEQ ID NO: 148521 - DNA, 15 bp, Homo sapiens
gtatttcttcctgtc

SEQ ID NO: 148522 - DNA, 15 bp, Homo sapiens
tatttcttcctgtcc

SEQ ID NO: 148523 - DNA, 15 bp, Homo sapiens
atttcttcctgtcct

SEQ ID NO: 148524 - DNA, 15 bp, Homo sapiens
tttcttcctgtcctg

SEQ ID NO: 148525 - DNA, 15 bp, Homo sapiens
ttcttcctgtcctgt

SEQ ID NO: 148526 - DNA, 15 bp, Homo sapiens
tcttcctgtcctgtt

SEQ ID NO: 148527 - DNA, 15 bp, Homo sapiens
cttcctgtcctgttc

SEQ ID NO: 148528 - DNA, 15 bp, Homo sapiens
ttcctgtcctgttct

SEQ ID NO: 148529 - DNA, 15 bp, Homo sapiens
tcctgtcctgttcta

SEQ ID NO: 148530 - DNA, 15 bp, Homo sapiens
cctgtcctgttctac

SEQ ID NO: 148531 - DNA, 15 bp, Homo sapiens
ctgtcctgttctact

SEQ ID NO: 148532 - DNA, 15 bp, Homo sapiens
tgtcctgttctactt

SEQ ID NO: 148533 - DNA, 15 bp, Homo sapiens
gtcctgttctacttt

SEQ ID NO: 148534 - DNA, 15 bp, Homo sapiens
tcctgttctactttc

SEQ ID NO: 148535 - DNA, 15 bp, Homo sapiens
cctgttctactttct

SEQ ID NO: 148536 - DNA, 15 bp, Homo sapiens
ctgttctactttctt

SEQ ID NO: 148537 - DNA, 15 bp, Homo sapiens
tgttctactttcttt

SEQ ID NO: 148538 - DNA, 15 bp, Homo sapiens
gttctactttctttc

SEQ ID NO: 148539 - DNA, 15 bp, Homo sapiens
ttctactttctttct

SEQ ID NO: 148540 - DNA, 15 bp, Homo sapiens
tctactttctttctt

SEQ ID NO: 148541 - DNA, 15 bp, Homo sapiens
ctactttctttcttt

SEQ ID NO: 148542 - DNA, 15 bp, Homo sapiens
tactttctttctttg

SEQ ID NO: 148543 - DNA, 15 bp, Homo sapiens
actttctttctttga

SEQ ID NO: 148544 - DNA, 15 bp, Homo sapiens
ctttctttctttgaa

SEQ ID NO: 148545 - DNA, 15 bp, Homo sapiens
tttctttctttgaat

SEQ ID NO: 148546 - DNA, 15 bp, Homo sapiens
ttctttctttgaatt

SEQ ID NO: 148547 - DNA, 15 bp, Homo sapiens
tctttctttgaattc

SEQ ID NO: 148548 - DNA, 15 bp, Homo sapiens
ctttctttgaattct

SEQ ID NO: 148549 - DNA, 15 bp, Homo sapiens
tttctttgaattctg

SEQ ID NO: 148550 - DNA, 15 bp, Homo sapiens
ttctttgaattctgc

SEQ ID NO: 148551 - DNA, 15 bp, Homo sapiens
tctttgaattctgct

SEQ ID NO: 148552 - DNA, 15 bp, Homo sapiens
ctttgaattctgctc

SEQ ID NO: 148553 - DNA, 15 bp, Homo sapiens
tttgaattctgctca

SEQ ID NO: 148554 - DNA, 15 bp, Homo sapiens
ttgaattctgctcac

SEQ ID NO: 148555 - DNA, 15 bp, Homo sapiens
tgaattctgctcacg

SEQ ID NO: 148556 - DNA, 15 bp, Homo sapiens
gaattctgctcacgt

SEQ ID NO: 148557 - DNA, 15 bp, Homo sapiens
aattctgctcacgtg

SEQ ID NO: 148558 - DNA, 15 bp, Homo sapiens
attctgctcacgtgt

SEQ ID NO: 148559 - DNA, 15 bp, Homo sapiens
ttctgctcacgtgtt

SEQ ID NO: 148560 - DNA, 15 bp, Homo sapiens
tctgctcacgtgttt

SEQ ID NO: 148561 - DNA, 15 bp, Homo sapiens
ctgctcacgtgtttc

SEQ ID NO: 148562 - DNA, 15 bp, Homo sapiens
tgctcacgtgtttct

SEQ ID NO: 148563 - DNA, 15 bp, Homo sapiens
gctcacgtgtttctg

SEQ ID NO: 148564 - DNA, 15 bp, Homo sapiens
ctcacgtgtttctga

SEQ ID NO: 148565 - DNA, 15 bp, Homo sapiens
tcacgtgtttctgac

SEQ ID NO: 148566 - DNA, 15 bp, Homo sapiens
cacgtgtttctgact

SEQ ID NO: 148567 - DNA, 15 bp, Homo sapiens
acgtgtttctgactg

SEQ ID NO: 148568 - DNA, 15 bp, Homo sapiens
cgtgtttctgactga

SEQ ID NO: 148569 - DNA, 15 bp, Homo sapiens
gtgtttctgactgat

SEQ ID NO: 148570 - DNA, 15 bp, Homo sapiens
tgtttctgactgatg

SEQ ID NO: 148571 - DNA, 15 bp, Homo sapiens
gtttctgactgatga

SEQ ID NO: 148572 - DNA, 15 bp, Homo sapiens
tttctgactgatgag

SEQ ID NO: 148573 - DNA, 15 bp, Homo sapiens
ttctgactgatgagg

SEQ ID NO: 148574 - DNA, 15 bp, Homo sapiens
tctgactgatgaggt

SEQ ID NO: 148575 - DNA, 15 bp, Homo sapiens
ctgactgatgaggtc

SEQ ID NO: 148576 - DNA, 15 bp, Homo sapiens
tgactgatgaggtct

SEQ ID NO: 148577 - DNA, 15 bp, Homo sapiens
gactgatgaggtctg

SEQ ID NO: 148578 - DNA, 15 bp, Homo sapiens
actgatgaggtctga

SEQ ID NO: 148579 - DNA, 15 bp, Homo sapiens
ctgatgaggtctgac

SEQ ID NO: 148580 - DNA, 15 bp, Homo sapiens
tgatgaggtctgact

SEQ ID NO: 148581 - DNA, 15 bp, Homo sapiens
gatgaggtctgactt

SEQ ID NO: 148582 - DNA, 15 bp, Homo sapiens
atgaggtctgacttt

SEQ ID NO: 148583 - DNA, 15 bp, Homo sapiens
tgaggtctgactttt

SEQ ID NO: 148584 - DNA, 15 bp, Homo sapiens
gaggtctgacttttg

SEQ ID NO: 148585 - DNA, 15 bp, Homo sapiens
aggtctgacttttgg

SEQ ID NO: 148586 - DNA, 15 bp, Homo sapiens
ggtctgacttttggg

SEQ ID NO: 148587 - DNA, 15 bp, Homo sapiens
gtctgacttttgggt

SEQ ID NO: 148588 - DNA, 15 bp, Homo sapiens
tctgacttttgggtt

SEQ ID NO: 148589 - DNA, 15 bp, Homo sapiens
ctgacttttgggttc

SEQ ID NO: 148590 - DNA, 15 bp, Homo sapiens
tgacttttgggttcc

SEQ ID NO: 148591 - DNA, 15 bp, Homo sapiens
gacttttgggttcct

SEQ ID NO: 148592 - DNA, 15 bp, Homo sapiens
acttttgggttcctt

SEQ ID NO: 148593 - DNA, 15 bp, Homo sapiens
cttttgggttccttt

SEQ ID NO: 148594 - DNA, 15 bp, Homo sapiens
ttttgggttcctttt

SEQ ID NO: 148595 - DNA, 15 bp, Homo sapiens
tttgggttccttttc

SEQ ID NO: 148596 - DNA, 15 bp, Homo sapiens
ttgggttccttttcc

SEQ ID NO: 148597 - DNA, 15 bp, Homo sapiens
tgggttccttttcca

SEQ ID NO: 148598 - DNA, 15 bp, Homo sapiens
gggttccttttccag

SEQ ID NO: 148599 - DNA, 15 bp, Homo sapiens
ggttccttttccaga

SEQ ID NO: 148600 - DNA, 15 bp, Homo sapiens
gttccttttccagag

SEQ ID NO: 148601 - DNA, 15 bp, Homo sapiens
ttccttttccagagg

SEQ ID NO: 148602 - DNA, 15 bp, Homo sapiens
tccttttccagagga

SEQ ID NO: 148603 - DNA, 15 bp, Homo sapiens
ccttttccagaggag

SEQ ID NO: 148604 - DNA, 15 bp, Homo sapiens
cttttccagaggaga

SEQ ID NO: 148605 - DNA, 15 bp, Homo sapiens
ttttccagaggagaa

SEQ ID NO: 148606 - DNA, 15 bp, Homo sapiens
tttccagaggagaag

SEQ ID NO: 148607 - DNA, 15 bp, Homo sapiens
ttccagaggagaagc

SEQ ID NO: 148608 - DNA, 15 bp, Homo sapiens
tccagaggagaagcc

SEQ ID NO: 148609 - DNA, 15 bp, Homo sapiens
ccagaggagaagcct

SEQ ID NO: 148610 - DNA, 15 bp, Homo sapiens
cagaggagaagcctt

SEQ ID NO: 148611 - DNA, 15 bp, Homo sapiens
agaggagaagccttc

SEQ ID NO: 148612 - DNA, 15 bp, Homo sapiens
gaggagaagccttct

SEQ ID NO: 148613 - DNA, 15 bp, Homo sapiens
aggagaagccttctt

SEQ ID NO: 148614 - DNA, 15 bp, Homo sapiens
ggagaagccttcttt

SEQ ID NO: 148615 - DNA, 15 bp, Homo sapiens
gagaagccttctttc

SEQ ID NO: 148616 - DNA, 15 bp, Homo sapiens
agaagccttctttca

SEQ ID NO: 148617 - DNA, 15 bp, Homo sapiens
gaagccttctttcag

SEQ ID NO: 148618 - DNA, 15 bp, Homo sapiens
aagccttctttcagc

SEQ ID NO: 148619 - DNA, 15 bp, Homo sapiens
agccttctttcagct

SEQ ID NO: 148620 - DNA, 15 bp, Homo sapiens
gccttctttcagctt

SEQ ID NO: 148621 - DNA, 15 bp, Homo sapiens
ccttctttcagcttg

SEQ ID NO: 148622 - DNA, 15 bp, Homo sapiens
cttctttcagcttgc

SEQ ID NO: 148623 - DNA, 15 bp, Homo sapiens
ttctttcagcttgcc

SEQ ID NO: 148624 - DNA, 15 bp, Homo sapiens
tctttcagcttgcca

SEQ ID NO: 148625 - DNA, 15 bp, Homo sapiens
ctttcagcttgccat

SEQ ID NO: 148626 - DNA, 15 bp, Homo sapiens
tttcagcttgccatt

SEQ ID NO: 148627 - DNA, 15 bp, Homo sapiens
ttcagcttgccattt

SEQ ID NO: 148628 - DNA, 15 bp, Homo sapiens
tcagcttgccatttg

SEQ ID NO: 148629 - DNA, 15 bp, Homo sapiens
cagcttgccatttgt

SEQ ID NO: 148630 - DNA, 15 bp, Homo sapiens
agcttgccatttgtt

SEQ ID NO: 148631 - DNA, 15 bp, Homo sapiens
gcttgccatttgtta

SEQ ID NO: 148632 - DNA, 15 bp, Homo sapiens
cttgccatttgttac

SEQ ID NO: 148633 - DNA, 15 bp, Homo sapiens
ttgccatttgttacc

SEQ ID NO: 148634 - DNA, 15 bp, Homo sapiens
tgccatttgttaccc

SEQ ID NO: 148635 - DNA, 15 bp, Homo sapiens
gccatttgttaccct

SEQ ID NO: 148636 - DNA, 15 bp, Homo sapiens
ccatttgttaccctg

SEQ ID NO: 148637 - DNA, 15 bp, Homo sapiens
catttgttaccctgg

SEQ ID NO: 148638 - DNA, 15 bp, Homo sapiens
atttgttaccctggt

SEQ ID NO: 148639 - DNA, 15 bp, Homo sapiens
tttgttaccctggtt

SEQ ID NO: 148640 - DNA, 15 bp, Homo sapiens
ttgttaccctggtta

SEQ ID NO: 148641 - DNA, 15 bp, Homo sapiens
tgttaccctggttat

SEQ ID NO: 148642 - DNA, 15 bp, Homo sapiens
gttaccctggttatg

SEQ ID NO: 148643 - DNA, 15 bp, Homo sapiens
ttaccctggttatga

SEQ ID NO: 148644 - DNA, 15 bp, Homo sapiens
taccctggttatgaa

SEQ ID NO: 148645 - DNA, 15 bp, Homo sapiens
accctggttatgaag

SEQ ID NO: 148646 - DNA, 15 bp, Homo sapiens
ccctggttatgaagg

SEQ ID NO: 148647 - DNA, 15 bp, Homo sapiens
cctggttatgaaggc

SEQ ID NO: 148648 - DNA, 15 bp, Homo sapiens
ctggttatgaaggct

SEQ ID NO: 148649 - DNA, 15 bp, Homo sapiens
tggttatgaaggctg

SEQ ID NO: 148650 - DNA, 15 bp, Homo sapiens
ggttatgaaggctgg

SEQ ID NO: 148651 - DNA, 15 bp, Homo sapiens
gttatgaaggctggt

SEQ ID NO: 148652 - DNA, 15 bp, Homo sapiens
ttatgaaggctggta

SEQ ID NO: 148653 - DNA, 15 bp, Homo sapiens
tatgaaggctggtaa

SEQ ID NO: 148654 - DNA, 15 bp, Homo sapiens
atgaaggctggtaac

SEQ ID NO: 148655 - DNA, 15 bp, Homo sapiens
tgaaggctggtaacc

SEQ ID NO: 148656 - DNA, 15 bp, Homo sapiens
gaaggctggtaacct

SEQ ID NO: 148657 - DNA, 15 bp, Homo sapiens
aaggctggtaacctt

SEQ ID NO: 148658 - DNA, 15 bp, Homo sapiens
aggctggtaaccttt

SEQ ID NO: 148659 - DNA, 15 bp, Homo sapiens
ggctggtaacctttt

SEQ ID NO: 148660 - DNA, 15 bp, Homo sapiens
gctggtaaccttttt

SEQ ID NO: 148661 - DNA, 15 bp, Homo sapiens
ctggtaacctttttt

SEQ ID NO: 148662 - DNA, 15 bp, Homo sapiens
tggtaacctttttta

SEQ ID NO: 148663 - DNA, 15 bp, Homo sapiens
ggtaaccttttttac

SEQ ID NO: 148664 - DNA, 15 bp, Homo sapiens
gtaaccttttttact

SEQ ID NO: 148665 - DNA, 15 bp, Homo sapiens
taaccttttttacta

SEQ ID NO: 148666 - DNA, 15 bp, Homo sapiens
aaccttttttactag

SEQ ID NO: 148667 - DNA, 15 bp, Homo sapiens
accttttttactagg

SEQ ID NO: 148668 - DNA, 15 bp, Homo sapiens
ccttttttactaggt

SEQ ID NO: 148669 - DNA, 15 bp, Homo sapiens
cttttttactaggta

SEQ ID NO: 148670 - DNA, 15 bp, Homo sapiens
ttttttactaggtag

SEQ ID NO: 148671 - DNA, 15 bp, Homo sapiens
tttttactaggtaga

SEQ ID NO: 148672 - DNA, 15 bp, Homo sapiens
ttttactaggtagag

SEQ ID NO: 148673 - DNA, 15 bp, Homo sapiens
tttactaggtagaga

SEQ ID NO: 148674 - DNA, 15 bp, Homo sapiens
ttactaggtagagaa

SEQ ID NO: 148675 - DNA, 15 bp, Homo sapiens
tactaggtagagaag

SEQ ID NO: 148676 - DNA, 15 bp, Homo sapiens
actaggtagagaagc

SEQ ID NO: 148677 - DNA, 15 bp, Homo sapiens
ctaggtagagaagct

SEQ ID NO: 148678 - DNA, 15 bp, Homo sapiens
taggtagagaagctg

SEQ ID NO: 148679 - DNA, 15 bp, Homo sapiens
aggtagagaagctgg

SEQ ID NO: 148680 - DNA, 15 bp, Homo sapiens
ggtagagaagctgga

SEQ ID NO: 148681 - DNA, 15 bp, Homo sapiens
gtagagaagctggac

SEQ ID NO: 148682 - DNA, 15 bp, Homo sapiens
tagagaagctggacc

SEQ ID NO: 148683 - DNA, 15 bp, Homo sapiens
agagaagctggacca

SEQ ID NO: 148684 - DNA, 15 bp, Homo sapiens
gagaagctggaccaa

SEQ ID NO: 148685 - DNA, 15 bp, Homo sapiens
agaagctggaccaac

SEQ ID NO: 148686 - DNA, 15 bp, Homo sapiens
gaagctggaccaact

SEQ ID NO: 148687 - DNA, 15 bp, Homo sapiens
aagctggaccaactg

SEQ ID NO: 148688 - DNA, 15 bp, Homo sapiens
agctggaccaactgg

SEQ ID NO: 148689 - DNA, 15 bp, Homo sapiens
gctggaccaactggg

SEQ ID NO: 148690 - DNA, 15 bp, Homo sapiens
ctggaccaactgggg

SEQ ID NO: 148691 - DNA, 15 bp, Homo sapiens
tggaccaactggggt

SEQ ID NO: 148692 - DNA, 15 bp, Homo sapiens
ggaccaactggggtt

SEQ ID NO: 148693 - DNA, 15 bp, Homo sapiens
gaccaactggggttc

SEQ ID NO: 148694 - DNA, 15 bp, Homo sapiens
accaactggggttct

SEQ ID NO: 148695 - DNA, 15 bp, Homo sapiens
ccaactggggttctt

SEQ ID NO: 148696 - DNA, 15 bp, Homo sapiens
caactggggttcttc

SEQ ID NO: 148697 - DNA, 15 bp, Homo sapiens
aactggggttcttcc

SEQ ID NO: 148698 - DNA, 15 bp, Homo sapiens
actggggttcttcca

SEQ ID NO: 148699 - DNA, 15 bp, Homo sapiens
ctggggttcttccag

SEQ ID NO: 148700 - DNA, 15 bp, Homo sapiens
tggggttcttccagg

SEQ ID NO: 148701 - DNA, 15 bp, Homo sapiens
ggggttcttccaggg

SEQ ID NO: 148702 - DNA, 15 bp, Homo sapiens
gggttcttccagggg

SEQ ID NO: 148703 - DNA, 15 bp, Homo sapiens
ggttcttccaggggg

SEQ ID NO: 148704 - DNA, 15 bp, Homo sapiens
gttcttccaggggga

SEQ ID NO: 148705 - DNA, 15 bp, Homo sapiens
ttcttccagggggag

SEQ ID NO: 148706 - DNA, 15 bp, Homo sapiens
tcttccagggggaga

SEQ ID NO: 148707 - DNA, 15 bp, Homo sapiens
cttccagggggagaa

SEQ ID NO: 148708 - DNA, 15 bp, Homo sapiens
ttccagggggagaat

SEQ ID NO: 148709 - DNA, 15 bp, Homo sapiens
tccagggggagaatg

SEQ ID NO: 148710 - DNA, 15 bp, Homo sapiens
ccagggggagaatga

SEQ ID NO: 148711 - DNA, 15 bp, Homo sapiens
cagggggagaatgag

SEQ ID NO: 148712 - DNA, 15 bp, Homo sapiens
agggggagaatgaga

SEQ ID NO: 148713 - DNA, 15 bp, Homo sapiens
gggggagaatgagaa

SEQ ID NO: 148714 - DNA, 15 bp, Homo sapiens
ggggagaatgagaaa

SEQ ID NO: 148715 - DNA, 15 bp, Homo sapiens
gggagaatgagaaag

SEQ ID NO: 148716 - DNA, 15 bp, Homo sapiens
ggagaatgagaaaga

SEQ ID NO: 148717 - DNA, 15 bp, Homo sapiens
gagaatgagaaagag

SEQ ID NO: 148718 - DNA, 15 bp, Homo sapiens
agaatgagaaagaga

SEQ ID NO: 148719 - DNA, 15 bp, Homo sapiens
gaatgagaaagagaa

SEQ ID NO: 148720 - DNA, 15 bp, Homo sapiens
aatgagaaagagaaa

SEQ ID NO: 148721 - DNA, 15 bp, Homo sapiens
atgagaaagagaaac

SEQ ID NO: 148722 - DNA, 15 bp, Homo sapiens
tgagaaagagaaact

SEQ ID NO: 148723 - DNA, 15 bp, Homo sapiens
gagaaagagaaactg

SEQ ID NO: 148724 - DNA, 15 bp, Homo sapiens
agaaagagaaactgt

SEQ ID NO: 148725 - DNA, 15 bp, Homo sapiens
gaaagagaaactgtt

SEQ ID NO: 148726 - DNA, 15 bp, Homo sapiens
aaagagaaactgttt

SEQ ID NO: 148727 - DNA, 15 bp, Homo sapiens
aagagaaactgtttt

SEQ ID NO: 148728 - DNA, 15 bp, Homo sapiens
agagaaactgttttg

SEQ ID NO: 148729 - DNA, 15 bp, Homo sapiens
gagaaactgttttgc

SEQ ID NO: 148730 - DNA, 15 bp, Homo sapiens
agaaactgttttgca

SEQ ID NO: 148731 - DNA, 15 bp, Homo sapiens
gaaactgttttgcaa

SEQ ID NO: 148732 - DNA, 15 bp, Homo sapiens
aaactgttttgcaag

SEQ ID NO: 148733 - DNA, 15 bp, Homo sapiens
aactgttttgcaagt

SEQ ID NO: 148734 - DNA, 15 bp, Homo sapiens
actgttttgcaagtc

SEQ ID NO: 148735 - DNA, 15 bp, Homo sapiens
ctgttttgcaagtcc

SEQ ID NO: 148736 - DNA, 15 bp, Homo sapiens
tgttttgcaagtccg

SEQ ID NO: 148737 - DNA, 15 bp, Homo sapiens
gttttgcaagtccgt

SEQ ID NO: 148738 - DNA, 15 bp, Homo sapiens
ttttgcaagtccgta

SEQ ID NO: 148739 - DNA, 15 bp, Homo sapiens
tttgcaagtccgtag

SEQ ID NO: 148740 - DNA, 15 bp, Homo sapiens
ttgcaagtccgtagc

SEQ ID NO: 148741 - DNA, 15 bp, Homo sapiens
tgcaagtccgtagct

SEQ ID NO: 148742 - DNA, 15 bp, Homo sapiens
gcaagtccgtagcta

SEQ ID NO: 148743 - DNA, 15 bp, Homo sapiens
caagtccgtagctat

SEQ ID NO: 148744 - DNA, 15 bp, Homo sapiens
aagtccgtagctatt

SEQ ID NO: 148745 - DNA, 15 bp, Homo sapiens
agtccgtagctattt

SEQ ID NO: 148746 - DNA, 15 bp, Homo sapiens
gtccgtagctatttc

SEQ ID NO: 148747 - DNA, 15 bp, Homo sapiens
tccgtagctatttct

SEQ ID NO: 148748 - DNA, 15 bp, Homo sapiens
ccgtagctatttctc

SEQ ID NO: 148749 - DNA, 15 bp, Homo sapiens
cgtagctatttctct

SEQ ID NO: 148750 - DNA, 15 bp, Homo sapiens
gtagctatttctcta

SEQ ID NO: 148751 - DNA, 15 bp, Homo sapiens
tagctatttctctag

SEQ ID NO: 148752 - DNA, 15 bp, Homo sapiens
agctatttctctagg

SEQ ID NO: 148753 - DNA, 15 bp, Homo sapiens
gctatttctctaggg

SEQ ID NO: 148754 - DNA, 15 bp, Homo sapiens
ctatttctctagggc

SEQ ID NO: 148755 - DNA, 15 bp, Homo sapiens
tatttctctagggcc

SEQ ID NO: 148756 - DNA, 15 bp, Homo sapiens
atttctctagggccc

SEQ ID NO: 148757 - DNA, 15 bp, Homo sapiens
tttctctagggccct

SEQ ID NO: 148758 - DNA, 15 bp, Homo sapiens
ttctctagggccctg

SEQ ID NO: 148759 - DNA, 15 bp, Homo sapiens
tctctagggccctgt

SEQ ID NO: 148760 - DNA, 15 bp, Homo sapiens
ctctagggccctgtt

SEQ ID NO: 148761 - DNA, 15 bp, Homo sapiens
tctagggccctgtta

SEQ ID NO: 148762 - DNA, 15 bp, Homo sapiens
ctagggccctgttag

SEQ ID NO: 148763 - DNA, 15 bp, Homo sapiens
tagggccctgttagc

SEQ ID NO: 148764 - DNA, 15 bp, Homo sapiens
agggccctgttagct

SEQ ID NO: 148765 - DNA, 15 bp, Homo sapiens
gggccctgttagctg

SEQ ID NO: 148766 - DNA, 15 bp, Homo sapiens
ggccctgttagctga

SEQ ID NO: 148767 - DNA, 15 bp, Homo sapiens
gccctgttagctgac

SEQ ID NO: 148768 - DNA, 15 bp, Homo sapiens
ccctgttagctgaca

SEQ ID NO: 148769 - DNA, 15 bp, Homo sapiens
cctgttagctgacat

SEQ ID NO: 148770 - DNA, 15 bp, Homo sapiens
ctgttagctgacatt

SEQ ID NO: 148771 - DNA, 15 bp, Homo sapiens
tgttagctgacattg

SEQ ID NO: 148772 - DNA, 15 bp, Homo sapiens
gttagctgacattga

SEQ ID NO: 148773 - DNA, 15 bp, Homo sapiens
ttagctgacattgac

SEQ ID NO: 148774 - DNA, 15 bp, Homo sapiens
tagctgacattgaca

SEQ ID NO: 148775 - DNA, 15 bp, Homo sapiens
agctgacattgacat

SEQ ID NO: 148776 - DNA, 15 bp, Homo sapiens
gctgacattgacatg

SEQ ID NO: 148777 - DNA, 15 bp, Homo sapiens
ctgacattgacatgc

SEQ ID NO: 148778 - DNA, 15 bp, Homo sapiens
tgacattgacatgcc

SEQ ID NO: 148779 - DNA, 15 bp, Homo sapiens
gacattgacatgcct

SEQ ID NO: 148780 - DNA, 15 bp, Homo sapiens
acattgacatgcctt

SEQ ID NO: 148781 - DNA, 15 bp, Homo sapiens
cattgacatgccttg

SEQ ID NO: 148782 - DNA, 15 bp, Homo sapiens
attgacatgccttgc

SEQ ID NO: 148783 - DNA, 15 bp, Homo sapiens
ttgacatgccttgca

SEQ ID NO: 148784 - DNA, 15 bp, Homo sapiens
tgacatgccttgcat

SEQ ID NO: 148785 - DNA, 15 bp, Homo sapiens
gacatgccttgcatt

SEQ ID NO: 148786 - DNA, 15 bp, Homo sapiens
acatgccttgcattg

SEQ ID NO: 148787 - DNA, 15 bp, Homo sapiens
catgccttgcattgc

SEQ ID NO: 148788 - DNA, 15 bp, Homo sapiens
atgccttgcattgct

SEQ ID NO: 148789 - DNA, 15 bp, Homo sapiens
tgccttgcattgctc

SEQ ID NO: 148790 - DNA, 15 bp, Homo sapiens
gccttgcattgctct

SEQ ID NO: 148791 - DNA, 15 bp, Homo sapiens
ccttgcattgctctg

SEQ ID NO: 148792 - DNA, 15 bp, Homo sapiens
cttgcattgctctgc

SEQ ID NO: 148793 - DNA, 15 bp, Homo sapiens
ttgcattgctctgca

SEQ ID NO: 148794 - DNA, 15 bp, Homo sapiens
tgcattgctctgcag

SEQ ID NO: 148795 - DNA, 15 bp, Homo sapiens
gcattgctctgcaga

SEQ ID NO: 148796 - DNA, 15 bp, Homo sapiens
cattgctctgcagat

SEQ ID NO: 148797 - DNA, 15 bp, Homo sapiens
attgctctgcagatc

SEQ ID NO: 148798 - DNA, 15 bp, Homo sapiens
ttgctctgcagatcc

SEQ ID NO: 148799 - DNA, 15 bp, Homo sapiens
tgctctgcagatccc

SEQ ID NO: 148800 - DNA, 15 bp, Homo sapiens
gctctgcagatcccc

SEQ ID NO: 148801 - DNA, 15 bp, Homo sapiens
ctctgcagatcccct

SEQ ID NO: 148802 - DNA, 15 bp, Homo sapiens
tctgcagatcccctc

SEQ ID NO: 148803 - DNA, 15 bp, Homo sapiens
ctgcagatcccctcg

SEQ ID NO: 148804 - DNA, 15 bp, Homo sapiens
tgcagatcccctcgc

SEQ ID NO: 148805 - DNA, 15 bp, Homo sapiens
gcagatcccctcgca

SEQ ID NO: 148806 - DNA, 15 bp, Homo sapiens
cagatcccctcgcag

SEQ ID NO: 148807 - DNA, 15 bp, Homo sapiens
agatcccctcgcagc

SEQ ID NO: 148808 - DNA, 15 bp, Homo sapiens
gatcccctcgcagcc

SEQ ID NO: 148809 - DNA, 15 bp, Homo sapiens
atcccctcgcagccc

SEQ ID NO: 148810 - DNA, 15 bp, Homo sapiens
tcccctcgcagccct

SEQ ID NO: 148811 - DNA, 15 bp, Homo sapiens
cccctcgcagccctc

SEQ ID NO: 148812 - DNA, 15 bp, Homo sapiens
ccctcgcagccctct

SEQ ID NO: 148813 - DNA, 15 bp, Homo sapiens
cctcgcagccctctg

SEQ ID NO: 148814 - DNA, 15 bp, Homo sapiens
ctcgcagccctctgt

SEQ ID NO: 148815 - DNA, 15 bp, Homo sapiens
tcgcagccctctgtc

SEQ ID NO: 148816 - DNA, 15 bp, Homo sapiens
cgcagccctctgtcc

SEQ ID NO: 148817 - DNA, 15 bp, Homo sapiens
gcagccctctgtccc

SEQ ID NO: 148818 - DNA, 15 bp, Homo sapiens
cagccctctgtccct

SEQ ID NO: 148819 - DNA, 15 bp, Homo sapiens
agccctctgtccctt

SEQ ID NO: 148820 - DNA, 15 bp, Homo sapiens
gccctctgtcccttg

SEQ ID NO: 148821 - DNA, 15 bp, Homo sapiens
ccctctgtcccttgt

SEQ ID NO: 148822 - DNA, 15 bp, Homo sapiens
cctctgtcccttgtt

SEQ ID NO: 148823 - DNA, 15 bp, Homo sapiens
ctctgtcccttgttc

SEQ ID NO: 148824 - DNA, 15 bp, Homo sapiens
tctgtcccttgttca

SEQ ID NO: 148825 - DNA, 15 bp, Homo sapiens
ctgtcccttgttcat

SEQ ID NO: 148826 - DNA, 15 bp, Homo sapiens
tgtcccttgttcatt

SEQ ID NO: 148827 - DNA, 15 bp, Homo sapiens
gtcccttgttcattt

SEQ ID NO: 148828 - DNA, 15 bp, Homo sapiens
tcccttgttcatttc

SEQ ID NO: 148829 - DNA, 15 bp, Homo sapiens
cccttgttcatttct

SEQ ID NO: 148830 - DNA, 15 bp, Homo sapiens
ccttgttcatttctg

SEQ ID NO: 148831 - DNA, 15 bp, Homo sapiens
cttgttcatttctgg

SEQ ID NO: 148832 - DNA, 15 bp, Homo sapiens
ttgttcatttctggc

SEQ ID NO: 148833 - DNA, 15 bp, Homo sapiens
tgttcatttctggcc

SEQ ID NO: 148834 - DNA, 15 bp, Homo sapiens
gttcatttctggcct

SEQ ID NO: 148835 - DNA, 15 bp, Homo sapiens
ttcatttctggcctt

SEQ ID NO: 148836 - DNA, 15 bp, Homo sapiens
tcatttctggcctta

SEQ ID NO: 148837 - DNA, 15 bp, Homo sapiens
catttctggccttag

SEQ ID NO: 148838 - DNA, 15 bp, Homo sapiens
atttctggccttaga

SEQ ID NO: 148839 - DNA, 15 bp, Homo sapiens
tttctggccttagag

SEQ ID NO: 148840 - DNA, 15 bp, Homo sapiens
ttctggccttagaga

SEQ ID NO: 148841 - DNA, 15 bp, Homo sapiens
tctggccttagagaa

SEQ ID NO: 148842 - DNA, 15 bp, Homo sapiens
ctggccttagagaaa

SEQ ID NO: 148843 - DNA, 15 bp, Homo sapiens
tggccttagagaaag

SEQ ID NO: 148844 - DNA, 15 bp, Homo sapiens
ggccttagagaaagc

SEQ ID NO: 148845 - DNA, 15 bp, Homo sapiens
gccttagagaaagca

SEQ ID NO: 148846 - DNA, 15 bp, Homo sapiens
ccttagagaaagcaa

SEQ ID NO: 148847 - DNA, 15 bp, Homo sapiens
cttagagaaagcaaa

SEQ ID NO: 148848 - DNA, 15 bp, Homo sapiens
ttagagaaagcaaag

SEQ ID NO: 148849 - DNA, 15 bp, Homo sapiens
tagagaaagcaaagc

SEQ ID NO: 148850 - DNA, 15 bp, Homo sapiens
agagaaagcaaagca

SEQ ID NO: 148851 - DNA, 15 bp, Homo sapiens
gagaaagcaaagcag

SEQ ID NO: 148852 - DNA, 15 bp, Homo sapiens
agaaagcaaagcagg

SEQ ID NO: 148853 - DNA, 15 bp, Homo sapiens
gaaagcaaagcaggg

SEQ ID NO: 148854 - DNA, 15 bp, Homo sapiens
aaagcaaagcagggt

SEQ ID NO: 148855 - DNA, 15 bp, Homo sapiens
aagcaaagcagggtc

SEQ ID NO: 148856 - DNA, 15 bp, Homo sapiens
agcaaagcagggtct

SEQ ID NO: 148857 - DNA, 15 bp, Homo sapiens
gcaaagcagggtctg

SEQ ID NO: 148858 - DNA, 15 bp, Homo sapiens
caaagcagggtctgt

SEQ ID NO: 148859 - DNA, 15 bp, Homo sapiens
aaagcagggtctgta

SEQ ID NO: 148860 - DNA, 15 bp, Homo sapiens
aagcagggtctgtaa

SEQ ID NO: 148861 - DNA, 15 bp, Homo sapiens
agcagggtctgtaac

SEQ ID NO: 148862 - DNA, 15 bp, Homo sapiens
gcagggtctgtaaca

SEQ ID NO: 148863 - DNA, 15 bp, Homo sapiens
cagggtctgtaacag

SEQ ID NO: 148864 - DNA, 15 bp, Homo sapiens
agggtctgtaacagg

SEQ ID NO: 148865 - DNA, 15 bp, Homo sapiens
gggtctgtaacaggg

SEQ ID NO: 148866 - DNA, 15 bp, Homo sapiens
ggtctgtaacagggg

SEQ ID NO: 148867 - DNA, 15 bp, Homo sapiens
gtctgtaacagggga

SEQ ID NO: 148868 - DNA, 15 bp, Homo sapiens
tctgtaacaggggag

SEQ ID NO: 148869 - DNA, 15 bp, Homo sapiens
ctgtaacaggggagg

SEQ ID NO: 148870 - DNA, 15 bp, Homo sapiens
tgtaacaggggaggc

SEQ ID NO: 148871 - DNA, 15 bp, Homo sapiens
gtaacaggggaggct

SEQ ID NO: 148872 - DNA, 15 bp, Homo sapiens
taacaggggaggctg

SEQ ID NO: 148873 - DNA, 15 bp, Homo sapiens
aacaggggaggctgc

SEQ ID NO: 148874 - DNA, 15 bp, Homo sapiens
acaggggaggctgcc

SEQ ID NO: 148875 - DNA, 15 bp, Homo sapiens
caggggaggctgcct

SEQ ID NO: 148876 - DNA, 15 bp, Homo sapiens
aggggaggctgcctc

SEQ ID NO: 148877 - DNA, 15 bp, Homo sapiens
ggggaggctgcctct

SEQ ID NO: 148878 - DNA, 15 bp, Homo sapiens
gggaggctgcctcta

SEQ ID NO: 148879 - DNA, 15 bp, Homo sapiens
ggaggctgcctctaa

SEQ ID NO: 148880 - DNA, 15 bp, Homo sapiens
gaggctgcctctaaa

SEQ ID NO: 148881 - DNA, 15 bp, Homo sapiens
aggctgcctctaaac

SEQ ID NO: 148882 - DNA, 15 bp, Homo sapiens
ggctgcctctaaact

SEQ ID NO: 148883 - DNA, 15 bp, Homo sapiens
gctgcctctaaactc

SEQ ID NO: 148884 - DNA, 15 bp, Homo sapiens
ctgcctctaaactca

SEQ ID NO: 148885 - DNA, 15 bp, Homo sapiens
tgcctctaaactcag

SEQ ID NO: 148886 - DNA, 15 bp, Homo sapiens
gcctctaaactcagg

SEQ ID NO: 148887 - DNA, 15 bp, Homo sapiens
cctctaaactcaggg

SEQ ID NO: 148888 - DNA, 15 bp, Homo sapiens
ctctaaactcagggt

SEQ ID NO: 148889 - DNA, 15 bp, Homo sapiens
tctaaactcagggtt

SEQ ID NO: 148890 - DNA, 15 bp, Homo sapiens
ctaaactcagggttt

SEQ ID NO: 148891 - DNA, 15 bp, Homo sapiens
taaactcagggtttg

SEQ ID NO: 148892 - DNA, 15 bp, Homo sapiens
aaactcagggtttgg

SEQ ID NO: 148893 - DNA, 15 bp, Homo sapiens
aactcagggtttggt

SEQ ID NO: 148894 - DNA, 15 bp, Homo sapiens
actcagggtttggtt

SEQ ID NO: 148895 - DNA, 15 bp, Homo sapiens
ctcagggtttggtta

SEQ ID NO: 148896 - DNA, 15 bp, Homo sapiens
tcagggtttggttac

SEQ ID NO: 148897 - DNA, 15 bp, Homo sapiens
cagggtttggttaca

SEQ ID NO: 148898 - DNA, 15 bp, Homo sapiens
agggtttggttacag

SEQ ID NO: 148899 - DNA, 15 bp, Homo sapiens
gggtttggttacagc

SEQ ID NO: 148900 - DNA, 15 bp, Homo sapiens
ggtttggttacagct

SEQ ID NO: 148901 - DNA, 15 bp, Homo sapiens
gtttggttacagctg

SEQ ID NO: 148902 - DNA, 15 bp, Homo sapiens
tttggttacagctgt

SEQ ID NO: 148903 - DNA, 15 bp, Homo sapiens
ttggttacagctgtt

SEQ ID NO: 148904 - DNA, 15 bp, Homo sapiens
tggttacagctgttt

SEQ ID NO: 148905 - DNA, 15 bp, Homo sapiens
ggttacagctgtttt

SEQ ID NO: 148906 - DNA, 15 bp, Homo sapiens
gttacagctgttttc

SEQ ID NO: 148907 - DNA, 15 bp, Homo sapiens
ttacagctgttttca

SEQ ID NO: 148908 - DNA, 15 bp, Homo sapiens
tacagctgttttcac

SEQ ID NO: 148909 - DNA, 15 bp, Homo sapiens
acagctgttttcact

SEQ ID NO: 148910 - DNA, 15 bp, Homo sapiens
cagctgttttcactt

SEQ ID NO: 148911 - DNA, 15 bp, Homo sapiens
agctgttttcactta

SEQ ID NO: 148912 - DNA, 15 bp, Homo sapiens
gctgttttcacttac

SEQ ID NO: 148913 - DNA, 15 bp, Homo sapiens
ctgttttcacttaca

SEQ ID NO: 148914 - DNA, 15 bp, Homo sapiens
tgttttcacttacat

SEQ ID NO: 148915 - DNA, 15 bp, Homo sapiens
gttttcacttacatc

SEQ ID NO: 148916 - DNA, 15 bp, Homo sapiens
ttttcacttacatca

SEQ ID NO: 148917 - DNA, 15 bp, Homo sapiens
tttcacttacatcac

SEQ ID NO: 148918 - DNA, 15 bp, Homo sapiens
ttcacttacatcact

SEQ ID NO: 148919 - DNA, 15 bp, Homo sapiens
tcacttacatcactg

SEQ ID NO: 148920 - DNA, 15 bp, Homo sapiens
cacttacatcactgg

SEQ ID NO: 148921 - DNA, 15 bp, Homo sapiens
acttacatcactggc

SEQ ID NO: 148922 - DNA, 15 bp, Homo sapiens
cttacatcactggcc

SEQ ID NO: 148923 - DNA, 15 bp, Homo sapiens
ttacatcactggccc

SEQ ID NO: 148924 - DNA, 15 bp, Homo sapiens
tacatcactggccct

SEQ ID NO: 148925 - DNA, 15 bp, Homo sapiens
acatcactggccctg

SEQ ID NO: 148926 - DNA, 15 bp, Homo sapiens
catcactggccctgg

SEQ ID NO: 148927 - DNA, 15 bp, Homo sapiens
atcactggccctggt

SEQ ID NO: 148928 - DNA, 15 bp, Homo sapiens
tcactggccctggtt

SEQ ID NO: 148929 - DNA, 15 bp, Homo sapiens
cactggccctggttt

SEQ ID NO: 148930 - DNA, 15 bp, Homo sapiens
actggccctggtttt

SEQ ID NO: 148931 - DNA, 15 bp, Homo sapiens
ctggccctggttttt

SEQ ID NO: 148932 - DNA, 15 bp, Homo sapiens
tggccctggtttttt

SEQ ID NO: 148933 - DNA, 15 bp, Homo sapiens
ggccctggttttttt

SEQ ID NO: 148934 - DNA, 15 bp, Homo sapiens
gccctggtttttttt

SEQ ID NO: 148935 - DNA, 15 bp, Homo sapiens
ccctggttttttttt

SEQ ID NO: 148936 - DNA, 15 bp, Homo sapiens
cctggtttttttttt

SEQ ID NO: 148937 - DNA, 15 bp, Homo sapiens
ctggttttttttttt

SEQ ID NO: 148938 - DNA, 15 bp, Homo sapiens
tggtttttttttttt

SEQ ID NO: 148939 - DNA, 15 bp, Homo sapiens
ggttttttttttttt

SEQ ID NO: 148940 - DNA, 15 bp, Homo sapiens
tttttttttttctgg

SEQ ID NO: 148941 - DNA, 15 bp, Homo sapiens
ttttttttttctggc

SEQ ID NO: 148942 - DNA, 15 bp, Homo sapiens
tttttttttctggca

SEQ ID NO: 148943 - DNA, 15 bp, Homo sapiens
ttttttttctggcat

SEQ ID NO: 148944 - DNA, 15 bp, Homo sapiens
tttttttctggcatt

SEQ ID NO: 148945 - DNA, 15 bp, Homo sapiens
ttttttctggcatta

SEQ ID NO: 148946 - DNA, 15 bp, Homo sapiens
tttttctggcattaa

SEQ ID NO: 148947 - DNA, 15 bp, Homo sapiens
ttttctggcattaaa

SEQ ID NO: 148948 - DNA, 15 bp, Homo sapiens
tttctggcattaaaa

SEQ ID NO: 148949 - DNA, 15 bp, Homo sapiens
ttctggcattaaaaa

SEQ ID NO: 148950 - DNA, 15 bp, Homo sapiens
tctggcattaaaaaa

SEQ ID NO: 148951 - DNA, 15 bp, Homo sapiens
ctggcattaaaaaaa

SEQ ID NO: 148952 - DNA, 15 bp, Homo sapiens
tggcattaaaaaaaa

SEQ ID NO: 148953 - DNA, 15 bp, Homo sapiens
ggcattaaaaaaaaa

SEQ ID NO: 148954 - DNA, 15 bp, Homo sapiens
gcattaaaaaaaaaa

SEQ ID NO: 148955 - DNA, 15 bp, Homo sapiens
cattaaaaaaaaaaa

SEQ ID NO: 148956 - DNA, 15 bp, Homo sapiens
attaaaaaaaaaaat

SEQ ID NO: 148957 - DNA, 15 bp, Homo sapiens
ttaaaaaaaaaaatt

SEQ ID NO: 148958 - DNA, 15 bp, Homo sapiens
taaaaaaaaaaattg

SEQ ID NO: 148959 - DNA, 15 bp, Homo sapiens
aaaaaaaaaaattgg

SEQ ID NO: 148960 - DNA, 15 bp, Homo sapiens
aaaaaaaaaattgga

SEQ ID NO: 148961 - DNA, 15 bp, Homo sapiens
aaaaaaaaattggaa

SEQ ID NO: 148962 - DNA, 15 bp, Homo sapiens
aaaaaaaattggaag

SEQ ID NO: 148963 - DNA, 15 bp, Homo sapiens
aaaaaaattggaagc

SEQ ID NO: 148964 - DNA, 15 bp, Homo sapiens
aaaaaattggaagca

SEQ ID NO: 148965 - DNA, 15 bp, Homo sapiens
aaaaattggaagcag

SEQ ID NO: 148966 - DNA, 15 bp, Homo sapiens
aaaattggaagcagg

SEQ ID NO: 148967 - DNA, 15 bp, Homo sapiens
aaattggaagcaggt

SEQ ID NO: 148968 - DNA, 15 bp, Homo sapiens
aattggaagcaggtg

SEQ ID NO: 148969 - DNA, 15 bp, Homo sapiens
attggaagcaggtga

SEQ ID NO: 148970 - DNA, 15 bp, Homo sapiens
ttggaagcaggtgat

SEQ ID NO: 148971 - DNA, 15 bp, Homo sapiens
tggaagcaggtgatg

SEQ ID NO: 148972 - DNA, 15 bp, Homo sapiens
ggaagcaggtgatgt

SEQ ID NO: 148973 - DNA, 15 bp, Homo sapiens
gaagcaggtgatgtt

SEQ ID NO: 148974 - DNA, 15 bp, Homo sapiens
aagcaggtgatgttc

SEQ ID NO: 148975 - DNA, 15 bp, Homo sapiens
agcaggtgatgttcc

SEQ ID NO: 148976 - DNA, 15 bp, Homo sapiens
gcaggtgatgttccc

SEQ ID NO: 148977 - DNA, 15 bp, Homo sapiens
caggtgatgttccca

SEQ ID NO: 148978 - DNA, 15 bp, Homo sapiens
aggtgatgttcccat

SEQ ID NO: 148979 - DNA, 15 bp, Homo sapiens
ggtgatgttcccatt

SEQ ID NO: 148980 - DNA, 15 bp, Homo sapiens
gtgatgttcccattg

SEQ ID NO: 148981 - DNA, 15 bp, Homo sapiens
tgatgttcccattgc

SEQ ID NO: 148982 - DNA, 15 bp, Homo sapiens
gatgttcccattgct

SEQ ID NO: 148983 - DNA, 15 bp, Homo sapiens
atgttcccattgctg

SEQ ID NO: 148984 - DNA, 15 bp, Homo sapiens
tgttcccattgctga

SEQ ID NO: 148985 - DNA, 15 bp, Homo sapiens
gttcccattgctgat

SEQ ID NO: 148986 - DNA, 15 bp, Homo sapiens
ttcccattgctgatg

SEQ ID NO: 148987 - DNA, 15 bp, Homo sapiens
tcccattgctgatgt

SEQ ID NO: 148988 - DNA, 15 bp, Homo sapiens
cccattgctgatgtg

SEQ ID NO: 148989 - DNA, 15 bp, Homo sapiens
ccattgctgatgtgg

SEQ ID NO: 148990 - DNA, 15 bp, Homo sapiens
cattgctgatgtggt

SEQ ID NO: 148991 - DNA, 15 bp, Homo sapiens
attgctgatgtggtg

SEQ ID NO: 148992 - DNA, 15 bp, Homo sapiens
ttgctgatgtggtgg

SEQ ID NO: 148993 - DNA, 15 bp, Homo sapiens
tgctgatgtggtgga

SEQ ID NO: 148994 - DNA, 15 bp, Homo sapiens
gctgatgtggtggaa

SEQ ID NO: 148995 - DNA, 15 bp, Homo sapiens
ctgatgtggtggaaa

SEQ ID NO: 148996 - DNA, 15 bp, Homo sapiens
tgatgtggtggaaac

SEQ ID NO: 148997 - DNA, 15 bp, Homo sapiens
gatgtggtggaaact

SEQ ID NO: 148998 - DNA, 15 bp, Homo sapiens
atgtggtggaaactc

SEQ ID NO: 148999 - DNA, 15 bp, Homo sapiens
tgtggtggaaactct

SEQ ID NO: 149000 - DNA, 15 bp, Homo sapiens
gtggtggaaactctc

SEQ ID NO: 149001 - DNA, 15 bp, Homo sapiens
tggtggaaactctcc

SEQ ID NO: 149002 - DNA, 15 bp, Homo sapiens
ggtggaaactctcca

SEQ ID NO: 149003 - DNA, 15 bp, Homo sapiens
gtggaaactctccaa

SEQ ID NO: 149004 - DNA, 15 bp, Homo sapiens
tggaaactctccaag

SEQ ID NO: 149005 - DNA, 15 bp, Homo sapiens
ggaaactctccaagt

SEQ ID NO: 149006 - DNA, 15 bp, Homo sapiens
gaaactctccaagtg

SEQ ID NO: 149007 - DNA, 15 bp, Homo sapiens
aaactctccaagtga

SEQ ID NO: 149008 - DNA, 15 bp, Homo sapiens
aactctccaagtgaa

SEQ ID NO: 149009 - DNA, 15 bp, Homo sapiens
actctccaagtgaac

SEQ ID NO: 149010 - DNA, 15 bp, Homo sapiens
ctctccaagtgaaca

SEQ ID NO: 149011 - DNA, 15 bp, Homo sapiens
tctccaagtgaacaa

SEQ ID NO: 149012 - DNA, 15 bp, Homo sapiens
ctccaagtgaacaat

SEQ ID NO: 149013 - DNA, 15 bp, Homo sapiens
tccaagtgaacaata

SEQ ID NO: 149014 - DNA, 15 bp, Homo sapiens
ccaagtgaacaatat

SEQ ID NO: 149015 - DNA, 15 bp, Homo sapiens
caagtgaacaatata

SEQ ID NO: 149016 - DNA, 15 bp, Homo sapiens
aagtgaacaatatac

SEQ ID NO: 149017 - DNA, 15 bp, Homo sapiens
agtgaacaatatacg

SEQ ID NO: 149018 - DNA, 15 bp, Homo sapiens
gtgaacaatatacgt

SEQ ID NO: 149019 - DNA, 15 bp, Homo sapiens
tgaacaatatacgtt

SEQ ID NO: 149020 - DNA, 15 bp, Homo sapiens
gaacaatatacgttt

SEQ ID NO: 149021 - DNA, 15 bp, Homo sapiens
aacaatatacgtttt

SEQ ID NO: 149022 - DNA, 15 bp, Homo sapiens
acaatatacgttttt

SEQ ID NO: 149023 - DNA, 15 bp, Homo sapiens
caatatacgtttttc

SEQ ID NO: 149024 - DNA, 15 bp, Homo sapiens
aatatacgtttttct

SEQ ID NO: 149025 - DNA, 15 bp, Homo sapiens
atatacgtttttctt

SEQ ID NO: 149026 - DNA, 15 bp, Homo sapiens
tatacgtttttcttg

SEQ ID NO: 149027 - DNA, 15 bp, Homo sapiens
atacgtttttcttgg

SEQ ID NO: 149028 - DNA, 15 bp, Homo sapiens
tacgtttttcttggc

SEQ ID NO: 149029 - DNA, 15 bp, Homo sapiens
acgtttttcttggca

SEQ ID NO: 149030 - DNA, 15 bp, Homo sapiens
cgtttttcttggcag

SEQ ID NO: 149031 - DNA, 15 bp, Homo sapiens
gtttttcttggcagc

SEQ ID NO: 149032 - DNA, 15 bp, Homo sapiens
tttttcttggcagct

SEQ ID NO: 149033 - DNA, 15 bp, Homo sapiens
ttttcttggcagctg

SEQ ID NO: 149034 - DNA, 15 bp, Homo sapiens
tttcttggcagctgt

SEQ ID NO: 149035 - DNA, 15 bp, Homo sapiens
ttcttggcagctgtt

SEQ ID NO: 149036 - DNA, 15 bp, Homo sapiens
tcttggcagctgttt

SEQ ID NO: 149037 - DNA, 15 bp, Homo sapiens
cttggcagctgtttc

SEQ ID NO: 149038 - DNA, 15 bp, Homo sapiens
ttggcagctgtttct

SEQ ID NO: 149039 - DNA, 15 bp, Homo sapiens
tggcagctgtttctt

SEQ ID NO: 149040 - DNA, 15 bp, Homo sapiens
ggcagctgtttcttg

SEQ ID NO: 149041 - DNA, 15 bp, Homo sapiens
gcagctgtttcttgt

SEQ ID NO: 149042 - DNA, 15 bp, Homo sapiens
cagctgtttcttgtg

SEQ ID NO: 149043 - DNA, 15 bp, Homo sapiens
agctgtttcttgtgc

SEQ ID NO: 149044 - DNA, 15 bp, Homo sapiens
gctgtttcttgtgcc

SEQ ID NO: 149045 - DNA, 15 bp, Homo sapiens
ctgtttcttgtgccc

SEQ ID NO: 149046 - DNA, 15 bp, Homo sapiens
tgtttcttgtgccct

SEQ ID NO: 149047 - DNA, 15 bp, Homo sapiens
gtttcttgtgccctg

SEQ ID NO: 149048 - DNA, 15 bp, Homo sapiens
tttcttgtgccctgc

SEQ ID NO: 149049 - DNA, 15 bp, Homo sapiens
ttcttgtgccctgct

SEQ ID NO: 149050 - DNA, 15 bp, Homo sapiens
tcttgtgccctgctt

SEQ ID NO: 149051 - DNA, 15 bp, Homo sapiens
cttgtgccctgcttg

SEQ ID NO: 149052 - DNA, 15 bp, Homo sapiens
ttgtgccctgcttgc

SEQ ID NO: 149053 - DNA, 15 bp, Homo sapiens
tgtgccctgcttgct

SEQ ID NO: 149054 - DNA, 15 bp, Homo sapiens
gtgccctgcttgctc

SEQ ID NO: 149055 - DNA, 15 bp, Homo sapiens
tgccctgcttgctcc

SEQ ID NO: 149056 - DNA, 15 bp, Homo sapiens
gccctgcttgctcct

SEQ ID NO: 149057 - DNA, 15 bp, Homo sapiens
ccctgcttgctcctg

SEQ ID NO: 149058 - DNA, 15 bp, Homo sapiens
cctgcttgctcctgg

SEQ ID NO: 149059 - DNA, 15 bp, Homo sapiens
ctgcttgctcctggt

SEQ ID NO: 149060 - DNA, 15 bp, Homo sapiens
tgcttgctcctggtc

SEQ ID NO: 149061 - DNA, 15 bp, Homo sapiens
gcttgctcctggtcc

SEQ ID NO: 149062 - DNA, 15 bp, Homo sapiens
cttgctcctggtcca

SEQ ID NO: 149063 - DNA, 15 bp, Homo sapiens
ttgctcctggtccag

SEQ ID NO: 149064 - DNA, 15 bp, Homo sapiens
tgctcctggtccagg

SEQ ID NO: 149065 - DNA, 15 bp, Homo sapiens
gctcctggtccagga

SEQ ID NO: 149066 - DNA, 15 bp, Homo sapiens
ctcctggtccaggac

SEQ ID NO: 149067 - DNA, 15 bp, Homo sapiens
tcctggtccaggaca

SEQ ID NO: 149068 - DNA, 15 bp, Homo sapiens
cctggtccaggacaa

SEQ ID NO: 149069 - DNA, 15 bp, Homo sapiens
ctggtccaggacaag

SEQ ID NO: 149070 - DNA, 15 bp, Homo sapiens
tggtccaggacaagc

SEQ ID NO: 149071 - DNA, 15 bp, Homo sapiens
ggtccaggacaagca

SEQ ID NO: 149072 - DNA, 15 bp, Homo sapiens
gtccaggacaagcaa

SEQ ID NO: 149073 - DNA, 15 bp, Homo sapiens
tccaggacaagcaag

SEQ ID NO: 149074 - DNA, 15 bp, Homo sapiens
ccaggacaagcaagg

SEQ ID NO: 149075 - DNA, 15 bp, Homo sapiens
caggacaagcaagga

SEQ ID NO: 149076 - DNA, 15 bp, Homo sapiens
aggacaagcaaggac

SEQ ID NO: 149077 - DNA, 15 bp, Homo sapiens
ggacaagcaaggacc

SEQ ID NO: 149078 - DNA, 15 bp, Homo sapiens
gacaagcaaggacca

SEQ ID NO: 149079 - DNA, 15 bp, Homo sapiens
acaagcaaggaccat

SEQ ID NO: 149080 - DNA, 15 bp, Homo sapiens
caagcaaggaccatc

SEQ ID NO: 149081 - DNA, 15 bp, Homo sapiens
aagcaaggaccatct

SEQ ID NO: 149082 - DNA, 15 bp, Homo sapiens
agcaaggaccatctg

SEQ ID NO: 149083 - DNA, 15 bp, Homo sapiens
gcaaggaccatctgc

SEQ ID NO: 149084 - DNA, 15 bp, Homo sapiens
caaggaccatctgcc

SEQ ID NO: 149085 - DNA, 15 bp, Homo sapiens
aaggaccatctgcct

SEQ ID NO: 149086 - DNA, 15 bp, Homo sapiens
aggaccatctgcctc

SEQ ID NO: 149087 - DNA, 15 bp, Homo sapiens
ggaccatctgcctct

SEQ ID NO: 149088 - DNA, 15 bp, Homo sapiens
gaccatctgcctctt

SEQ ID NO: 149089 - DNA, 15 bp, Homo sapiens
accatctgcctcttt

SEQ ID NO: 149090 - DNA, 15 bp, Homo sapiens
ccatctgcctctttc

SEQ ID NO: 149091 - DNA, 15 bp, Homo sapiens
catctgcctctttca

SEQ ID NO: 149092 - DNA, 15 bp, Homo sapiens
atctgcctctttcaa

SEQ ID NO: 149093 - DNA, 15 bp, Homo sapiens
tctgcctctttcaat

SEQ ID NO: 149094 - DNA, 15 bp, Homo sapiens
ctgcctctttcaata

SEQ ID NO: 149095 - DNA, 15 bp, Homo sapiens
tgcctctttcaatag

SEQ ID NO: 149096 - DNA, 15 bp, Homo sapiens
gcctctttcaataga

SEQ ID NO: 149097 - DNA, 15 bp, Homo sapiens
cctctttcaatagaa

SEQ ID NO: 149098 - DNA, 15 bp, Homo sapiens
ctctttcaatagaac

SEQ ID NO: 149099 - DNA, 15 bp, Homo sapiens
tctttcaatagaaca

SEQ ID NO: 149100 - DNA, 15 bp, Homo sapiens
ctttcaatagaacac

SEQ ID NO: 149101 - DNA, 15 bp, Homo sapiens
tttcaatagaacacc

SEQ ID NO: 149102 - DNA, 15 bp, Homo sapiens
ttcaatagaacacct

SEQ ID NO: 149103 - DNA, 15 bp, Homo sapiens
tcaatagaacacctc

SEQ ID NO: 149104 - DNA, 15 bp, Homo sapiens
caatagaacacctcc

SEQ ID NO: 149105 - DNA, 15 bp, Homo sapiens
aatagaacacctcca

SEQ ID NO: 149106 - DNA, 15 bp, Homo sapiens
atagaacacctccag

SEQ ID NO: 149107 - DNA, 15 bp, Homo sapiens
tagaacacctccaga

SEQ ID NO: 149108 - DNA, 15 bp, Homo sapiens
agaacacctccagat

SEQ ID NO: 149109 - DNA, 15 bp, Homo sapiens
gaacacctccagatc

SEQ ID NO: 149110 - DNA, 15 bp, Homo sapiens
aacacctccagatcc

SEQ ID NO: 149111 - DNA, 15 bp, Homo sapiens
acacctccagatccc

SEQ ID NO: 149112 - DNA, 15 bp, Homo sapiens
cacctccagatccct

SEQ ID NO: 149113 - DNA, 15 bp, Homo sapiens
acctccagatccctt

SEQ ID NO: 149114 - DNA, 15 bp, Homo sapiens
cctccagatcccttt

SEQ ID NO: 149115 - DNA, 15 bp, Homo sapiens
ctccagatccctttg

SEQ ID NO: 149116 - DNA, 15 bp, Homo sapiens
tccagatccctttga

SEQ ID NO: 149117 - DNA, 15 bp, Homo sapiens
ccagatccctttgat

SEQ ID NO: 149118 - DNA, 15 bp, Homo sapiens
cagatccctttgatc

SEQ ID NO: 149119 - DNA, 15 bp, Homo sapiens
agatccctttgatca

SEQ ID NO: 149120 - DNA, 15 bp, Homo sapiens
gatccctttgatcaa

SEQ ID NO: 149121 - DNA, 15 bp, Homo sapiens
atccctttgatcaaa

SEQ ID NO: 149122 - DNA, 15 bp, Homo sapiens
tccctttgatcaaaa

SEQ ID NO: 149123 - DNA, 15 bp, Homo sapiens
ccctttgatcaaaag

SEQ ID NO: 149124 - DNA, 15 bp, Homo sapiens
cctttgatcaaaagt

SEQ ID NO: 149125 - DNA, 15 bp, Homo sapiens
ctttgatcaaaagtt

SEQ ID NO: 149126 - DNA, 15 bp, Homo sapiens
tttgatcaaaagtta

SEQ ID NO: 149127 - DNA, 15 bp, Homo sapiens
ttgatcaaaagttac

SEQ ID NO: 149128 - DNA, 15 bp, Homo sapiens
tgatcaaaagttact

SEQ ID NO: 149129 - DNA, 15 bp, Homo sapiens
gatcaaaagttactc

SEQ ID NO: 149130 - DNA, 15 bp, Homo sapiens
atcaaaagttactca

SEQ ID NO: 149131 - DNA, 15 bp, Homo sapiens
tcaaaagttactcat

SEQ ID NO: 149132 - DNA, 15 bp, Homo sapiens
caaaagttactcatt

SEQ ID NO: 149133 - DNA, 15 bp, Homo sapiens
aaaagttactcattg

SEQ ID NO: 149134 - DNA, 15 bp, Homo sapiens
aaagttactcattgt

SEQ ID NO: 149135 - DNA, 15 bp, Homo sapiens
aagttactcattgtc

SEQ ID NO: 149136 - DNA, 15 bp, Homo sapiens
agttactcattgtct

SEQ ID NO: 149137 - DNA, 15 bp, Homo sapiens
gttactcattgtctg

SEQ ID NO: 149138 - DNA, 15 bp, Homo sapiens
ttactcattgtctga

SEQ ID NO: 149139 - DNA, 15 bp, Homo sapiens
tactcattgtctgac

SEQ ID NO: 149140 - DNA, 15 bp, Homo sapiens
actcattgtctgact

SEQ ID NO: 149141 - DNA, 15 bp, Homo sapiens
ctcattgtctgactt

SEQ ID NO: 149142 - DNA, 15 bp, Homo sapiens
tcattgtctgacttg

SEQ ID NO: 149143 - DNA, 15 bp, Homo sapiens
cattgtctgacttgc

SEQ ID NO: 149144 - DNA, 15 bp, Homo sapiens
attgtctgacttgct

SEQ ID NO: 149145 - DNA, 15 bp, Homo sapiens
ttgtctgacttgcta

SEQ ID NO: 149146 - DNA, 15 bp, Homo sapiens
tgtctgacttgctat

SEQ ID NO: 149147 - DNA, 15 bp, Homo sapiens
gtctgacttgctatt

SEQ ID NO: 149148 - DNA, 15 bp, Homo sapiens
tctgacttgctattt

SEQ ID NO: 149149 - DNA, 15 bp, Homo sapiens
ctgacttgctatttc

SEQ ID NO: 149150 - DNA, 15 bp, Homo sapiens
tgacttgctatttct

SEQ ID NO: 149151 - DNA, 15 bp, Homo sapiens
gacttgctatttctg

SEQ ID NO: 149152 - DNA, 15 bp, Homo sapiens
acttgctatttctgt

SEQ ID NO: 149153 - DNA, 15 bp, Homo sapiens
cttgctatttctgtg

SEQ ID NO: 149154 - DNA, 15 bp, Homo sapiens
ttgctatttctgtga

SEQ ID NO: 149155 - DNA, 15 bp, Homo sapiens
tgctatttctgtgag

SEQ ID NO: 149156 - DNA, 15 bp, Homo sapiens
gctatttctgtgaga

SEQ ID NO: 149157 - DNA, 15 bp, Homo sapiens
ctatttctgtgagat

SEQ ID NO: 149158 - DNA, 15 bp, Homo sapiens
tatttctgtgagata

SEQ ID NO: 149159 - DNA, 15 bp, Homo sapiens
atttctgtgagataa

SEQ ID NO: 149160 - DNA, 15 bp, Homo sapiens
tttctgtgagataaa

SEQ ID NO: 149161 - DNA, 15 bp, Homo sapiens
ttctgtgagataaat

SEQ ID NO: 149162 - DNA, 15 bp, Homo sapiens
tctgtgagataaatg

SEQ ID NO: 149163 - DNA, 15 bp, Homo sapiens
ctgtgagataaatgg

SEQ ID NO: 149164 - DNA, 15 bp, Homo sapiens
tgtgagataaatggg

SEQ ID NO: 149165 - DNA, 15 bp, Homo sapiens
gtgagataaatggga

SEQ ID NO: 149166 - DNA, 15 bp, Homo sapiens
tgagataaatgggag

SEQ ID NO: 149167 - DNA, 15 bp, Homo sapiens
gagataaatgggaga

SEQ ID NO: 149168 - DNA, 15 bp, Homo sapiens
agataaatgggagaa

SEQ ID NO: 149169 - DNA, 15 bp, Homo sapiens
gataaatgggagaag

SEQ ID NO: 149170 - DNA, 15 bp, Homo sapiens
ataaatgggagaaga

SEQ ID NO: 149171 - DNA, 15 bp, Homo sapiens
taaatgggagaagat

SEQ ID NO: 149172 - DNA, 15 bp, Homo sapiens
aaatgggagaagatc

SEQ ID NO: 149173 - DNA, 15 bp, Homo sapiens
aatgggagaagatca

SEQ ID NO: 149174 - DNA, 15 bp, Homo sapiens
atgggagaagatcaa

SEQ ID NO: 149175 - DNA, 15 bp, Homo sapiens
tgggagaagatcaat

SEQ ID NO: 149176 - DNA, 15 bp, Homo sapiens
gggagaagatcaata

SEQ ID NO: 149177 - DNA, 15 bp, Homo sapiens
ggagaagatcaataa

SEQ ID NO: 149178 - DNA, 15 bp, Homo sapiens
gagaagatcaataaa

SEQ ID NO: 149179 - DNA, 15 bp, Homo sapiens
agaagatcaataaat

SEQ ID NO: 149180 - DNA, 15 bp, Homo sapiens
gaagatcaataaatg

SEQ ID NO: 149181 - DNA, 15 bp, Homo sapiens
aagatcaataaatgc

SEQ ID NO: 149182 - DNA, 15 bp, Homo sapiens
agatcaataaatgca

SEQ ID NO: 149183 - DNA, 15 bp, Homo sapiens
gatcaataaatgcac

SEQ ID NO: 149184 - DNA, 15 bp, Homo sapiens
atcaataaatgcact

SEQ ID NO: 149185 - DNA, 15 bp, Homo sapiens
tcaataaatgcactt

SEQ ID NO: 149186 - DNA, 15 bp, Homo sapiens
caataaatgcacttg

SEQ ID NO: 149187 - DNA, 15 bp, Homo sapiens
aataaatgcacttgt

SEQ ID NO: 149188 - DNA, 15 bp, Homo sapiens
ataaatgcacttgtt

SEQ ID NO: 149189 - DNA, 15 bp, Homo sapiens
taaatgcacttgttt

SEQ ID NO: 149190 - DNA, 15 bp, Homo sapiens
aaatgcacttgtttg

SEQ ID NO: 149191 - DNA, 15 bp, Homo sapiens
aatgcacttgtttgt

SEQ ID NO: 149192 - DNA, 15 bp, Homo sapiens
atgcacttgtttgtc

SEQ ID NO: 149193 - DNA, 15 bp, Homo sapiens
tgcacttgtttgtcc

SEQ ID NO: 149194 - DNA, 15 bp, Homo sapiens
gcacttgtttgtcca

SEQ ID NO: 149195 - DNA, 15 bp, Homo sapiens
cacttgtttgtccag

SEQ ID NO: 149196 - DNA, 15 bp, Homo sapiens
acttgtttgtccagt

SEQ ID NO: 149197 - DNA, 15 bp, Homo sapiens
cttgtttgtccagtc

SEQ ID NO: 149198 - DNA, 15 bp, Homo sapiens
ttgtttgtccagtca

SEQ ID NO: 149199 - DNA, 15 bp, Homo sapiens
tgtttgtccagtcag

SEQ ID NO: 149200 - DNA, 15 bp, Homo sapiens
gtttgtccagtcagc

SEQ ID NO: 149201 - DNA, 15 bp, Homo sapiens
tttgtccagtcagcg

SEQ ID NO: 149202 - DNA, 15 bp, Homo sapiens
ttgtccagtcagcgt

SEQ ID NO: 149203 - DNA, 15 bp, Homo sapiens
tgtccagtcagcgtg

SEQ ID NO: 149204 - DNA, 15 bp, Homo sapiens
gtccagtcagcgtgt

SEQ ID NO: 149205 - DNA, 15 bp, Homo sapiens
tccagtcagcgtgtg

SEQ ID NO: 149206 - DNA, 15 bp, Homo sapiens
ccagtcagcgtgtgg

SEQ ID NO: 149207 - DNA, 15 bp, Homo sapiens
cagtcagcgtgtgga

SEQ ID NO: 149208 - DNA, 15 bp, Homo sapiens
agtcagcgtgtggaa

SEQ ID NO: 149209 - DNA, 15 bp, Homo sapiens
gtcagcgtgtggaaa

SEQ ID NO: 149210 - DNA, 15 bp, Homo sapiens
tcagcgtgtggaaag

SEQ ID NO: 149211 - DNA, 15 bp, Homo sapiens
cagcgtgtggaaagt

SEQ ID NO: 149212 - DNA, 15 bp, Homo sapiens
agcgtgtggaaagtt

SEQ ID NO: 149213 - DNA, 15 bp, Homo sapiens
gcgtgtggaaagttg

SEQ ID NO: 149214 - DNA, 15 bp, Homo sapiens
cgtgtggaaagttga

SEQ ID NO: 149215 - DNA, 15 bp, Homo sapiens
gtgtggaaagttgat

SEQ ID NO: 149216 - DNA, 15 bp, Homo sapiens
tgtggaaagttgata

SEQ ID NO: 149217 - DNA, 15 bp, Homo sapiens
gtggaaagttgataa

SEQ ID NO: 149218 - DNA, 15 bp, Homo sapiens
tggaaagttgataat

SEQ ID NO: 149219 - DNA, 15 bp, Homo sapiens
ggaaagttgataatt

SEQ ID NO: 149220 - DNA, 15 bp, Homo sapiens
gaaagttgataattt

SEQ ID NO: 149221 - DNA, 15 bp, Homo sapiens
aaagttgataatttt

SEQ ID NO: 149222 - DNA, 15 bp, Homo sapiens
aagttgataattttg

SEQ ID NO: 149223 - DNA, 15 bp, Homo sapiens
agttgataattttga

SEQ ID NO: 149224 - DNA, 15 bp, Homo sapiens
gttgataattttgac

SEQ ID NO: 149225 - DNA, 15 bp, Homo sapiens
ttgataattttgacc

SEQ ID NO: 149226 - DNA, 15 bp, Homo sapiens
tgataattttgacca

SEQ ID NO: 149227 - DNA, 15 bp, Homo sapiens
gataattttgaccaa

SEQ ID NO: 149228 - DNA, 15 bp, Homo sapiens
ataattttgaccaaa

SEQ ID NO: 149229 - DNA, 15 bp, Homo sapiens
taattttgaccaaag

SEQ ID NO: 149230 - DNA, 15 bp, Homo sapiens
aattttgaccaaagc

SEQ ID NO: 149231 - DNA, 15 bp, Homo sapiens
attttgaccaaagca

SEQ ID NO: 149232 - DNA, 15 bp, Homo sapiens
ttttgaccaaagcac

SEQ ID NO: 149233 - DNA, 15 bp, Homo sapiens
tttgaccaaagcaca

SEQ ID NO: 149234 - DNA, 15 bp, Homo sapiens
ttgaccaaagcacaa

SEQ ID NO: 149235 - DNA, 15 bp, Homo sapiens
tgaccaaagcacaac

SEQ ID NO: 149236 - DNA, 15 bp, Homo sapiens
gaccaaagcacaacc

SEQ ID NO: 149237 - DNA, 15 bp, Homo sapiens
accaaagcacaaccc

SEQ ID NO: 149238 - DNA, 15 bp, Homo sapiens
ccaaagcacaaccct

SEQ ID NO: 149239 - DNA, 15 bp, Homo sapiens
caaagcacaaccctt

SEQ ID NO: 149240 - DNA, 15 bp, Homo sapiens
aaagcacaacccttg

SEQ ID NO: 149241 - DNA, 15 bp, Homo sapiens
aagcacaacccttga

SEQ ID NO: 149242 - DNA, 15 bp, Homo sapiens
agcacaacccttgaa

SEQ ID NO: 149243 - DNA, 15 bp, Homo sapiens
gcacaacccttgaaa

SEQ ID NO: 149244 - DNA, 15 bp, Homo sapiens
cacaacccttgaaag

SEQ ID NO: 149245 - DNA, 15 bp, Homo sapiens
acaacccttgaaagg

SEQ ID NO: 149246 - DNA, 15 bp, Homo sapiens
caacccttgaaagga

SEQ ID NO: 149247 - DNA, 15 bp, Homo sapiens
aacccttgaaaggaa

SEQ ID NO: 149248 - DNA, 15 bp, Homo sapiens
acccttgaaaggaaa

SEQ ID NO: 149249 - DNA, 15 bp, Homo sapiens
cccttgaaaggaaaa

SEQ ID NO: 149250 - DNA, 15 bp, Homo sapiens
ccttgaaaggaaaag

SEQ ID NO: 149251 - DNA, 15 bp, Homo sapiens
cttgaaaggaaaaga

SEQ ID NO: 149252 - DNA, 15 bp, Homo sapiens
ttgaaaggaaaagaa

SEQ ID NO: 149253 - DNA, 15 bp, Homo sapiens
tgaaaggaaaagaaa

SEQ ID NO: 149254 - DNA, 15 bp, Homo sapiens
gaaaggaaaagaaaa

SEQ ID NO: 149255 - DNA, 15 bp, Homo sapiens
aaaggaaaagaaaaa

SEQ ID NO: 149256 - DNA, 15 bp, Homo sapiens
aaggaaaagaaaaag

SEQ ID NO: 149257 - DNA, 15 bp, Homo sapiens
aggaaaagaaaaagg

SEQ ID NO: 149258 - DNA, 15 bp, Homo sapiens
ggaaaagaaaaaggg

SEQ ID NO: 149259 - DNA, 15 bp, Homo sapiens
gaaaagaaaaaggga

SEQ ID NO: 149260 - DNA, 15 bp, Homo sapiens
aaaagaaaaagggag

SEQ ID NO: 149261 - DNA, 15 bp, Homo sapiens
aaagaaaaagggagt

SEQ ID NO: 149262 - DNA, 15 bp, Homo sapiens
aagaaaaagggagtg

SEQ ID NO: 149263 - DNA, 15 bp, Homo sapiens
agaaaaagggagtga

SEQ ID NO: 149264 - DNA, 15 bp, Homo sapiens
gaaaaagggagtgaa

SEQ ID NO: 149265 - DNA, 15 bp, Homo sapiens
aaaaagggagtgaat

SEQ ID NO: 149266 - DNA, 15 bp, Homo sapiens
aaaagggagtgaatg

SEQ ID NO: 149267 - DNA, 15 bp, Homo sapiens
aaagggagtgaatgt

SEQ ID NO: 149268 - DNA, 15 bp, Homo sapiens
aagggagtgaatgtc

SEQ ID NO: 149269 - DNA, 15 bp, Homo sapiens
agggagtgaatgtct

SEQ ID NO: 149270 - DNA, 15 bp, Homo sapiens
gggagtgaatgtctt

SEQ ID NO: 149271 - DNA, 15 bp, Homo sapiens
ggagtgaatgtcttc

SEQ ID NO: 149272 - DNA, 15 bp, Homo sapiens
gagtgaatgtcttct

SEQ ID NO: 149273 - DNA, 15 bp, Homo sapiens
agtgaatgtcttctg

SEQ ID NO: 149274 - DNA, 15 bp, Homo sapiens
gtgaatgtcttctga

SEQ ID NO: 149275 - DNA, 15 bp, Homo sapiens
tgaatgtcttctgag

SEQ ID NO: 149276 - DNA, 15 bp, Homo sapiens
gaatgtcttctgaga

SEQ ID NO: 149277 - DNA, 15 bp, Homo sapiens
aatgtcttctgagaa

SEQ ID NO: 149278 - DNA, 15 bp, Homo sapiens
atgtcttctgagaag

SEQ ID NO: 149279 - DNA, 15 bp, Homo sapiens
tgtcttctgagaagc

SEQ ID NO: 149280 - DNA, 15 bp, Homo sapiens
gtcttctgagaagct

SEQ ID NO: 149281 - DNA, 15 bp, Homo sapiens
tcttctgagaagctg

SEQ ID NO: 149282 - DNA, 15 bp, Homo sapiens
cttctgagaagctgc

SEQ ID NO: 149283 - DNA, 15 bp, Homo sapiens
ttctgagaagctgcc

SEQ ID NO: 149284 - DNA, 15 bp, Homo sapiens
tctgagaagctgcct

SEQ ID NO: 149285 - DNA, 15 bp, Homo sapiens
ctgagaagctgccta

SEQ ID NO: 149286 - DNA, 15 bp, Homo sapiens
tgagaagctgcctag

SEQ ID NO: 149287 - DNA, 15 bp, Homo sapiens
gagaagctgcctagg

SEQ ID NO: 149288 - DNA, 15 bp, Homo sapiens
agaagctgcctaggt

SEQ ID NO: 149289 - DNA, 15 bp, Homo sapiens
gaagctgcctaggtt

SEQ ID NO: 149290 - DNA, 15 bp, Homo sapiens
aagctgcctaggttc

SEQ ID NO: 149291 - DNA, 15 bp, Homo sapiens
agctgcctaggttca

SEQ ID NO: 149292 - DNA, 15 bp, Homo sapiens
gctgcctaggttcag

SEQ ID NO: 149293 - DNA, 15 bp, Homo sapiens
ctgcctaggttcaga

SEQ ID NO: 149294 - DNA, 15 bp, Homo sapiens
tgcctaggttcagac

SEQ ID NO: 149295 - DNA, 15 bp, Homo sapiens
gcctaggttcagaca

SEQ ID NO: 149296 - DNA, 15 bp, Homo sapiens
cctaggttcagacag

SEQ ID NO: 149297 - DNA, 15 bp, Homo sapiens
ctaggttcagacagt

SEQ ID NO: 149298 - DNA, 15 bp, Homo sapiens
taggttcagacagtg

SEQ ID NO: 149299 - DNA, 15 bp, Homo sapiens
aggttcagacagtgt

SEQ ID NO: 149300 - DNA, 15 bp, Homo sapiens
ggttcagacagtgtc

SEQ ID NO: 149301 - DNA, 15 bp, Homo sapiens
gttcagacagtgtca

SEQ ID NO: 149302 - DNA, 15 bp, Homo sapiens
ttcagacagtgtcac

SEQ ID NO: 149303 - DNA, 15 bp, Homo sapiens
tcagacagtgtcacc

SEQ ID NO: 149304 - DNA, 15 bp, Homo sapiens
cagacagtgtcaccc

SEQ ID NO: 149305 - DNA, 15 bp, Homo sapiens
agacagtgtcaccca

SEQ ID NO: 149306 - DNA, 15 bp, Homo sapiens
gacagtgtcacccat

SEQ ID NO: 149307 - DNA, 15 bp, Homo sapiens
acagtgtcacccatt

SEQ ID NO: 149308 - DNA, 15 bp, Homo sapiens
cagtgtcacccattt

SEQ ID NO: 149309 - DNA, 15 bp, Homo sapiens
agtgtcacccatttc

SEQ ID NO: 149310 - DNA, 15 bp, Homo sapiens
gtgtcacccatttcc

SEQ ID NO: 149311 - DNA, 15 bp, Homo sapiens
tgtcacccatttccc

SEQ ID NO: 149312 - DNA, 15 bp, Homo sapiens
gtcacccatttccct

SEQ ID NO: 149313 - DNA, 15 bp, Homo sapiens
tcacccatttccctg

SEQ ID NO: 149314 - DNA, 15 bp, Homo sapiens
cacccatttccctgt

SEQ ID NO: 149315 - DNA, 15 bp, Homo sapiens
acccatttccctgta

SEQ ID NO: 149316 - DNA, 15 bp, Homo sapiens
cccatttccctgtat

SEQ ID NO: 149317 - DNA, 15 bp, Homo sapiens
ccatttccctgtatg

SEQ ID NO: 149318 - DNA, 15 bp, Homo sapiens
catttccctgtatgc

SEQ ID NO: 149319 - DNA, 15 bp, Homo sapiens
atttccctgtatgct

SEQ ID NO: 149320 - DNA, 15 bp, Homo sapiens
tttccctgtatgctc

SEQ ID NO: 149321 - DNA, 15 bp, Homo sapiens
ttccctgtatgctcc

SEQ ID NO: 149322 - DNA, 15 bp, Homo sapiens
tccctgtatgctcca

SEQ ID NO: 149323 - DNA, 15 bp, Homo sapiens
ccctgtatgctccac

SEQ ID NO: 149324 - DNA, 15 bp, Homo sapiens
cctgtatgctccaca

SEQ ID NO: 149325 - DNA, 15 bp, Homo sapiens
ctgtatgctccacat

SEQ ID NO: 149326 - DNA, 15 bp, Homo sapiens
tgtatgctccacatg

SEQ ID NO: 149327 - DNA, 15 bp, Homo sapiens
gtatgctccacatga

SEQ ID NO: 149328 - DNA, 15 bp, Homo sapiens
tatgctccacatgac

SEQ ID NO: 149329 - DNA, 15 bp, Homo sapiens
atgctccacatgaca

SEQ ID NO: 149330 - DNA, 15 bp, Homo sapiens
tgctccacatgacaa

SEQ ID NO: 149331 - DNA, 15 bp, Homo sapiens
gctccacatgacaaa

SEQ ID NO: 149332 - DNA, 15 bp, Homo sapiens
ctccacatgacaaac

SEQ ID NO: 149333 - DNA, 15 bp, Homo sapiens
tccacatgacaaacc

SEQ ID NO: 149334 - DNA, 15 bp, Homo sapiens
ccacatgacaaacct

SEQ ID NO: 149335 - DNA, 15 bp, Homo sapiens
cacatgacaaacctg

SEQ ID NO: 149336 - DNA, 15 bp, Homo sapiens
acatgacaaacctga

SEQ ID NO: 149337 - DNA, 15 bp, Homo sapiens
catgacaaacctgag

SEQ ID NO: 149338 - DNA, 15 bp, Homo sapiens
atgacaaacctgagt

SEQ ID NO: 149339 - DNA, 15 bp, Homo sapiens
tgacaaacctgagtg

SEQ ID NO: 149340 - DNA, 15 bp, Homo sapiens
gacaaacctgagtgg

SEQ ID NO: 149341 - DNA, 15 bp, Homo sapiens
acaaacctgagtggg

SEQ ID NO: 149342 - DNA, 15 bp, Homo sapiens
caaacctgagtgggt

SEQ ID NO: 149343 - DNA, 15 bp, Homo sapiens
aaacctgagtgggtc

SEQ ID NO: 149344 - DNA, 15 bp, Homo sapiens
aacctgagtgggtct

SEQ ID NO: 149345 - DNA, 15 bp, Homo sapiens
acctgagtgggtctc

SEQ ID NO: 149346 - DNA, 15 bp, Homo sapiens
cctgagtgggtctca

SEQ ID NO: 149347 - DNA, 15 bp, Homo sapiens
ctgagtgggtctcat

SEQ ID NO: 149348 - DNA, 15 bp, Homo sapiens
tgagtgggtctcatc

SEQ ID NO: 149349 - DNA, 15 bp, Homo sapiens
gagtgggtctcatca

SEQ ID NO: 149350 - DNA, 15 bp, Homo sapiens
agtgggtctcatcat

SEQ ID NO: 149351 - DNA, 15 bp, Homo sapiens
gtgggtctcatcatg

SEQ ID NO: 149352 - DNA, 15 bp, Homo sapiens
tgggtctcatcatgt

SEQ ID NO: 149353 - DNA, 15 bp, Homo sapiens
gggtctcatcatgtc

SEQ ID NO: 149354 - DNA, 15 bp, Homo sapiens
ggtctcatcatgtcc

SEQ ID NO: 149355 - DNA, 15 bp, Homo sapiens
gtctcatcatgtcca

SEQ ID NO: 149356 - DNA, 15 bp, Homo sapiens
tctcatcatgtccat

SEQ ID NO: 149357 - DNA, 15 bp, Homo sapiens
ctcatcatgtccatt

SEQ ID NO: 149358 - DNA, 15 bp, Homo sapiens
tcatcatgtccattt

SEQ ID NO: 149359 - DNA, 15 bp, Homo sapiens
catcatgtccatttt

SEQ ID NO: 149360 - DNA, 15 bp, Homo sapiens
atcatgtccattttg

SEQ ID NO: 149361 - DNA, 15 bp, Homo sapiens
tcatgtccattttgc

SEQ ID NO: 149362 - DNA, 15 bp, Homo sapiens
catgtccattttgca

SEQ ID NO: 149363 - DNA, 15 bp, Homo sapiens
atgtccattttgcag

SEQ ID NO: 149364 - DNA, 15 bp, Homo sapiens
tgtccattttgcaga

SEQ ID NO: 149365 - DNA, 15 bp, Homo sapiens
gtccattttgcagat

SEQ ID NO: 149366 - DNA, 15 bp, Homo sapiens
tccattttgcagatg

SEQ ID NO: 149367 - DNA, 15 bp, Homo sapiens
ccattttgcagatgg

SEQ ID NO: 149368 - DNA, 15 bp, Homo sapiens
cattttgcagatggc

SEQ ID NO: 149369 - DNA, 15 bp, Homo sapiens
attttgcagatggca

SEQ ID NO: 149370 - DNA, 15 bp, Homo sapiens
ttttgcagatggcac

SEQ ID NO: 149371 - DNA, 15 bp, Homo sapiens
tttgcagatggcacc

SEQ ID NO: 149372 - DNA, 15 bp, Homo sapiens
ttgcagatggcacca

SEQ ID NO: 149373 - DNA, 15 bp, Homo sapiens
tgcagatggcaccaa

SEQ ID NO: 149374 - DNA, 15 bp, Homo sapiens
gcagatggcaccaag

SEQ ID NO: 149375 - DNA, 15 bp, Homo sapiens
cagatggcaccaagg

SEQ ID NO: 149376 - DNA, 15 bp, Homo sapiens
agatggcaccaaggc

SEQ ID NO: 149377 - DNA, 15 bp, Homo sapiens
gatggcaccaaggct

SEQ ID NO: 149378 - DNA, 15 bp, Homo sapiens
atggcaccaaggctc

SEQ ID NO: 149379 - DNA, 15 bp, Homo sapiens
tggcaccaaggctca

SEQ ID NO: 149380 - DNA, 15 bp, Homo sapiens
ggcaccaaggctcag

SEQ ID NO: 149381 - DNA, 15 bp, Homo sapiens
gcaccaaggctcaga

SEQ ID NO: 149382 - DNA, 15 bp, Homo sapiens
caccaaggctcagaa

SEQ ID NO: 149383 - DNA, 15 bp, Homo sapiens
accaaggctcagaaa

SEQ ID NO: 149384 - DNA, 15 bp, Homo sapiens
ccaaggctcagaaag

SEQ ID NO: 149385 - DNA, 15 bp, Homo sapiens
caaggctcagaaagg

SEQ ID NO: 149386 - DNA, 15 bp, Homo sapiens
aaggctcagaaaggt

SEQ ID NO: 149387 - DNA, 15 bp, Homo sapiens
aggctcagaaaggtt

SEQ ID NO: 149388 - DNA, 15 bp, Homo sapiens
ggctcagaaaggtta

SEQ ID NO: 149389 - DNA, 15 bp, Homo sapiens
gctcagaaaggttag

SEQ ID NO: 149390 - DNA, 15 bp, Homo sapiens
ctcagaaaggttagg

SEQ ID NO: 149391 - DNA, 15 bp, Homo sapiens
tcagaaaggttaggc

SEQ ID NO: 149392 - DNA, 15 bp, Homo sapiens
cagaaaggttaggca

SEQ ID NO: 149393 - DNA, 15 bp, Homo sapiens
agaaaggttaggcaa

SEQ ID NO: 149394 - DNA, 15 bp, Homo sapiens
gaaaggttaggcaac

SEQ ID NO: 149395 - DNA, 15 bp, Homo sapiens
aaaggttaggcaact

SEQ ID NO: 149396 - DNA, 15 bp, Homo sapiens
aaggttaggcaactt

SEQ ID NO: 149397 - DNA, 15 bp, Homo sapiens
aggttaggcaacttt

SEQ ID NO: 149398 - DNA, 15 bp, Homo sapiens
ggttaggcaactttt

SEQ ID NO: 149399 - DNA, 15 bp, Homo sapiens
gttaggcaacttttc

SEQ ID NO: 149400 - DNA, 15 bp, Homo sapiens
ttaggcaacttttcc

SEQ ID NO: 149401 - DNA, 15 bp, Homo sapiens
taggcaacttttcca

SEQ ID NO: 149402 - DNA, 15 bp, Homo sapiens
aggcaacttttccag

SEQ ID NO: 149403 - DNA, 15 bp, Homo sapiens
ggcaacttttccagt

SEQ ID NO: 149404 - DNA, 15 bp, Homo sapiens
gcaacttttccagtc

SEQ ID NO: 149405 - DNA, 15 bp, Homo sapiens
caacttttccagtca

SEQ ID NO: 149406 - DNA, 15 bp, Homo sapiens
aacttttccagtcac

SEQ ID NO: 149407 - DNA, 15 bp, Homo sapiens
acttttccagtcacc

SEQ ID NO: 149408 - DNA, 15 bp, Homo sapiens
cttttccagtcaccc

SEQ ID NO: 149409 - DNA, 15 bp, Homo sapiens
ttttccagtcaccca

SEQ ID NO: 149410 - DNA, 15 bp, Homo sapiens
tttccagtcacccaa

SEQ ID NO: 149411 - DNA, 15 bp, Homo sapiens
ttccagtcacccaat

SEQ ID NO: 149412 - DNA, 15 bp, Homo sapiens
tccagtcacccaatg

SEQ ID NO: 149413 - DNA, 15 bp, Homo sapiens
ccagtcacccaatga

SEQ ID NO: 149414 - DNA, 15 bp, Homo sapiens
cagtcacccaatgag

SEQ ID NO: 149415 - DNA, 15 bp, Homo sapiens
agtcacccaatgagt

SEQ ID NO: 149416 - DNA, 15 bp, Homo sapiens
gtcacccaatgagtt

SEQ ID NO: 149417 - DNA, 15 bp, Homo sapiens
tcacccaatgagtta

SEQ ID NO: 149418 - DNA, 15 bp, Homo sapiens
cacccaatgagttaa

SEQ ID NO: 149419 - DNA, 15 bp, Homo sapiens
acccaatgagttaat

SEQ ID NO: 149420 - DNA, 15 bp, Homo sapiens
cccaatgagttaatt

SEQ ID NO: 149421 - DNA, 15 bp, Homo sapiens
ccaatgagttaattg

SEQ ID NO: 149422 - DNA, 15 bp, Homo sapiens
caatgagttaattga

SEQ ID NO: 149423 - DNA, 15 bp, Homo sapiens
aatgagttaattgac

SEQ ID NO: 149424 - DNA, 15 bp, Homo sapiens
atgagttaattgaca

SEQ ID NO: 149425 - DNA, 15 bp, Homo sapiens
tgagttaattgacaa

SEQ ID NO: 149426 - DNA, 15 bp, Homo sapiens
gagttaattgacaaa

SEQ ID NO: 149427 - DNA, 15 bp, Homo sapiens
agttaattgacaaaa

SEQ ID NO: 149428 - DNA, 15 bp, Homo sapiens
gttaattgacaaaac

SEQ ID NO: 149429 - DNA, 15 bp, Homo sapiens
ttaattgacaaaact

SEQ ID NO: 149430 - DNA, 15 bp, Homo sapiens
taattgacaaaactg

SEQ ID NO: 149431 - DNA, 15 bp, Homo sapiens
aattgacaaaactgg

SEQ ID NO: 149432 - DNA, 15 bp, Homo sapiens
attgacaaaactggg

SEQ ID NO: 149433 - DNA, 15 bp, Homo sapiens
ttgacaaaactggga

SEQ ID NO: 149434 - DNA, 15 bp, Homo sapiens
tgacaaaactgggat

SEQ ID NO: 149435 - DNA, 15 bp, Homo sapiens
gacaaaactgggatt

SEQ ID NO: 149436 - DNA, 15 bp, Homo sapiens
acaaaactgggattc

SEQ ID NO: 149437 - DNA, 15 bp, Homo sapiens
caaaactgggattca

SEQ ID NO: 149438 - DNA, 15 bp, Homo sapiens
aaaactgggattcaa

SEQ ID NO: 149439 - DNA, 15 bp, Homo sapiens
aaactgggattcaaa

SEQ ID NO: 149440 - DNA, 15 bp, Homo sapiens
aactgggattcaaac

SEQ ID NO: 149441 - DNA, 15 bp, Homo sapiens
actgggattcaaacc

SEQ ID NO: 149442 - DNA, 15 bp, Homo sapiens
ctgggattcaaaccc

SEQ ID NO: 149443 - DNA, 15 bp, Homo sapiens
tgggattcaaaccca

SEQ ID NO: 149444 - DNA, 15 bp, Homo sapiens
gggattcaaacccag

SEQ ID NO: 149445 - DNA, 15 bp, Homo sapiens
ggattcaaacccaga

SEQ ID NO: 149446 - DNA, 15 bp, Homo sapiens
gattcaaacccagaa

SEQ ID NO: 149447 - DNA, 15 bp, Homo sapiens
attcaaacccagaac

SEQ ID NO: 149448 - DNA, 15 bp, Homo sapiens
ttcaaacccagaact

SEQ ID NO: 149449 - DNA, 15 bp, Homo sapiens
tcaaacccagaactg

SEQ ID NO: 149450 - DNA, 15 bp, Homo sapiens
caaacccagaactgt

SEQ ID NO: 149451 - DNA, 15 bp, Homo sapiens
aaacccagaactgtt

SEQ ID NO: 149452 - DNA, 15 bp, Homo sapiens
aacccagaactgttg

SEQ ID NO: 149453 - DNA, 15 bp, Homo sapiens
acccagaactgttgg

SEQ ID NO: 149454 - DNA, 15 bp, Homo sapiens
cccagaactgttgga

SEQ ID NO: 149455 - DNA, 15 bp, Homo sapiens
ccagaactgttggat

SEQ ID NO: 149456 - DNA, 15 bp, Homo sapiens
cagaactgttggatt

SEQ ID NO: 149457 - DNA, 15 bp, Homo sapiens
agaactgttggattc

SEQ ID NO: 149458 - DNA, 15 bp, Homo sapiens
gaactgttggattcc

SEQ ID NO: 149459 - DNA, 15 bp, Homo sapiens
aactgttggattcca

SEQ ID NO: 149460 - DNA, 15 bp, Homo sapiens
actgttggattccaa

SEQ ID NO: 149461 - DNA, 15 bp, Homo sapiens
ctgttggattccaaa

SEQ ID NO: 149462 - DNA, 15 bp, Homo sapiens
tgttggattccaaag

SEQ ID NO: 149463 - DNA, 15 bp, Homo sapiens
gttggattccaaagc

SEQ ID NO: 149464 - DNA, 15 bp, Homo sapiens
ttggattccaaagcc

SEQ ID NO: 149465 - DNA, 15 bp, Homo sapiens
tggattccaaagcct

SEQ ID NO: 149466 - DNA, 15 bp, Homo sapiens
ggattccaaagcctg

SEQ ID NO: 149467 - DNA, 15 bp, Homo sapiens
gattccaaagcctgt

SEQ ID NO: 149468 - DNA, 15 bp, Homo sapiens
attccaaagcctgtg

SEQ ID NO: 149469 - DNA, 15 bp, Homo sapiens
ttccaaagcctgtgt

SEQ ID NO: 149470 - DNA, 15 bp, Homo sapiens
tccaaagcctgtgtt

SEQ ID NO: 149471 - DNA, 15 bp, Homo sapiens
ccaaagcctgtgttg

SEQ ID NO: 149472 - DNA, 15 bp, Homo sapiens
caaagcctgtgttgt

SEQ ID NO: 149473 - DNA, 15 bp, Homo sapiens
aaagcctgtgttgtt

SEQ ID NO: 149474 - DNA, 15 bp, Homo sapiens
aagcctgtgttgttg

SEQ ID NO: 149475 - DNA, 15 bp, Homo sapiens
agcctgtgttgttgc

SEQ ID NO: 149476 - DNA, 15 bp, Homo sapiens
gcctgtgttgttgcc

SEQ ID NO: 149477 - DNA, 15 bp, Homo sapiens
cctgtgttgttgcct

SEQ ID NO: 149478 - DNA, 15 bp, Homo sapiens
ctgtgttgttgcctg

SEQ ID NO: 149479 - DNA, 15 bp, Homo sapiens
tgtgttgttgcctgc

SEQ ID NO: 149480 - DNA, 15 bp, Homo sapiens
gtgttgttgcctgct

SEQ ID NO: 149481 - DNA, 15 bp, Homo sapiens
tgttgttgcctgctt

SEQ ID NO: 149482 - DNA, 15 bp, Homo sapiens
gttgttgcctgcttc

SEQ ID NO: 149483 - DNA, 15 bp, Homo sapiens
ttgttgcctgcttcg

SEQ ID NO: 149484 - DNA, 15 bp, Homo sapiens
tgttgcctgcttcgt

SEQ ID NO: 149485 - DNA, 15 bp, Homo sapiens
gttgcctgcttcgtg

SEQ ID NO: 149486 - DNA, 15 bp, Homo sapiens
ccggtgaaacgaagc

SEQ ID NO: 149487 - DNA, 15 bp, Homo sapiens
cggtgaaacgaagcc

SEQ ID NO: 149488 - DNA, 15 bp, Homo sapiens
ggtgaaacgaagccc

SEQ ID NO: 149489 - DNA, 15 bp, Homo sapiens
gtgaaacgaagccca

SEQ ID NO: 149490 - DNA, 15 bp, Homo sapiens
tgaaacgaagcccag

SEQ ID NO: 149491 - DNA, 15 bp, Homo sapiens
gaaacgaagcccagc

SEQ ID NO: 149492 - DNA, 15 bp, Homo sapiens
aaacgaagcccagcc

SEQ ID NO: 149493 - DNA, 15 bp, Homo sapiens
aacgaagcccagccc

SEQ ID NO: 149494 - DNA, 15 bp, Homo sapiens
acgaagcccagcccc

SEQ ID NO: 149495 - DNA, 15 bp, Homo sapiens
cgaagcccagcccca

SEQ ID NO: 149496 - DNA, 15 bp, Homo sapiens
gaagcccagccccag

SEQ ID NO: 149497 - DNA, 15 bp, Homo sapiens
aagcccagccccagg

SEQ ID NO: 149498 - DNA, 15 bp, Homo sapiens
agcccagccccaggg

SEQ ID NO: 149499 - DNA, 15 bp, Homo sapiens
gcccagccccagggg

SEQ ID NO: 149500 - DNA, 15 bp, Homo sapiens
cccagccccaggggc

SEQ ID NO: 149501 - DNA, 15 bp, Homo sapiens
ccagccccaggggct

SEQ ID NO: 149502 - DNA, 15 bp, Homo sapiens
cagccccaggggctt

SEQ ID NO: 149503 - DNA, 15 bp, Homo sapiens
agccccaggggcttc

SEQ ID NO: 149504 - DNA, 15 bp, Homo sapiens
gccccaggggcttca

SEQ ID NO: 149505 - DNA, 15 bp, Homo sapiens
ccccaggggcttcac

SEQ ID NO: 149506 - DNA, 15 bp, Homo sapiens
cccaggggcttcact

SEQ ID NO: 149507 - DNA, 15 bp, Homo sapiens
ccaggggcttcacta

SEQ ID NO: 149508 - DNA, 15 bp, Homo sapiens
caggggcttcactaa

SEQ ID NO: 149509 - DNA, 15 bp, Homo sapiens
aggggcttcactaac

SEQ ID NO: 149510 - DNA, 15 bp, Homo sapiens
ggggcttcactaact

SEQ ID NO: 149511 - DNA, 15 bp, Homo sapiens
gggcttcactaactc

SEQ ID NO: 149512 - DNA, 15 bp, Homo sapiens
ggcttcactaactcc

SEQ ID NO: 149513 - DNA, 15 bp, Homo sapiens
gcttcactaactcca

SEQ ID NO: 149514 - DNA, 15 bp, Homo sapiens
cttcactaactccag

SEQ ID NO: 149515 - DNA, 15 bp, Homo sapiens
ttcactaactccagg

SEQ ID NO: 149516 - DNA, 15 bp, Homo sapiens
tcactaactccaggc

SEQ ID NO: 149517 - DNA, 15 bp, Homo sapiens
cactaactccaggct

SEQ ID NO: 149518 - DNA, 15 bp, Homo sapiens
actaactccaggctg

SEQ ID NO: 149519 - DNA, 15 bp, Homo sapiens
ctaactccaggctgt

SEQ ID NO: 149520 - DNA, 15 bp, Homo sapiens
taactccaggctgtg

SEQ ID NO: 149521 - DNA, 15 bp, Homo sapiens
aactccaggctgtgc

SEQ ID NO: 149522 - DNA, 15 bp, Homo sapiens
actccaggctgtgct

SEQ ID NO: 149523 - DNA, 15 bp, Homo sapiens
ctccaggctgtgctt

SEQ ID NO: 149524 - DNA, 15 bp, Homo sapiens
tccaggctgtgcttc

SEQ ID NO: 149525 - DNA, 15 bp, Homo sapiens
ccaggctgtgcttct

SEQ ID NO: 149526 - DNA, 15 bp, Homo sapiens
caggctgtgcttctc

SEQ ID NO: 149527 - DNA, 15 bp, Homo sapiens
aggctgtgcttctca

SEQ ID NO: 149528 - DNA, 15 bp, Homo sapiens
ggctgtgcttctcaa

SEQ ID NO: 149529 - DNA, 15 bp, Homo sapiens
gctgtgcttctcaaa

SEQ ID NO: 149530 - DNA, 15 bp, Homo sapiens
ctgtgcttctcaaac

SEQ ID NO: 149531 - DNA, 15 bp, Homo sapiens
tgtgcttctcaaact

SEQ ID NO: 149532 - DNA, 15 bp, Homo sapiens
gtgcttctcaaactt

SEQ ID NO: 149533 - DNA, 15 bp, Homo sapiens
tgcttctcaaacttt

SEQ ID NO: 149534 - DNA, 15 bp, Homo sapiens
gcttctcaaacttta

SEQ ID NO: 149535 - DNA, 15 bp, Homo sapiens
cttctcaaactttag

SEQ ID NO: 149536 - DNA, 15 bp, Homo sapiens
ttctcaaactttagt

SEQ ID NO: 149537 - DNA, 15 bp, Homo sapiens
tctcaaactttagtg

SEQ ID NO: 149538 - DNA, 15 bp, Homo sapiens
ctcaaactttagtga

SEQ ID NO: 149539 - DNA, 15 bp, Homo sapiens
tcaaactttagtgag

SEQ ID NO: 149540 - DNA, 15 bp, Homo sapiens
caaactttagtgagc

SEQ ID NO: 149541 - DNA, 15 bp, Homo sapiens
aaactttagtgagca

SEQ ID NO: 149542 - DNA, 15 bp, Homo sapiens
aactttagtgagcat

SEQ ID NO: 149543 - DNA, 15 bp, Homo sapiens
actttagtgagcata

SEQ ID NO: 149544 - DNA, 15 bp, Homo sapiens
ctttagtgagcatag

SEQ ID NO: 149545 - DNA, 15 bp, Homo sapiens
tttagtgagcatagg

SEQ ID NO: 149546 - DNA, 15 bp, Homo sapiens
ttagtgagcatagga

SEQ ID NO: 149547 - DNA, 15 bp, Homo sapiens
tagtgagcataggaa

SEQ ID NO: 149548 - DNA, 15 bp, Homo sapiens
agtgagcataggaat

SEQ ID NO: 149549 - DNA, 15 bp, Homo sapiens
gtgagcataggaatc

SEQ ID NO: 149550 - DNA, 15 bp, Homo sapiens
tgagcataggaatca

SEQ ID NO: 149551 - DNA, 15 bp, Homo sapiens
gagcataggaatcac

SEQ ID NO: 149552 - DNA, 15 bp, Homo sapiens
agcataggaatcacc

SEQ ID NO: 149553 - DNA, 15 bp, Homo sapiens
gcataggaatcacct

SEQ ID NO: 149554 - DNA, 15 bp, Homo sapiens
cataggaatcacctg

SEQ ID NO: 149555 - DNA, 15 bp, Homo sapiens
ataggaatcacctgg

SEQ ID NO: 149556 - DNA, 15 bp, Homo sapiens
taggaatcacctggg

SEQ ID NO: 149557 - DNA, 15 bp, Homo sapiens
aggaatcacctgggc

SEQ ID NO: 149558 - DNA, 15 bp, Homo sapiens
ggaatcacctgggca

SEQ ID NO: 149559 - DNA, 15 bp, Homo sapiens
gaatcacctgggcat

SEQ ID NO: 149560 - DNA, 15 bp, Homo sapiens
aatcacctgggcatc

SEQ ID NO: 149561 - DNA, 15 bp, Homo sapiens
atcacctgggcatct

SEQ ID NO: 149562 - DNA, 15 bp, Homo sapiens
tcacctgggcatctt

SEQ ID NO: 149563 - DNA, 15 bp, Homo sapiens
cacctgggcatcttg

SEQ ID NO: 149564 - DNA, 15 bp, Homo sapiens
acctgggcatcttgt

SEQ ID NO: 149565 - DNA, 15 bp, Homo sapiens
cctgggcatcttgtg

SEQ ID NO: 149566 - DNA, 15 bp, Homo sapiens
ctgggcatcttgtga

SEQ ID NO: 149567 - DNA, 15 bp, Homo sapiens
tgggcatcttgtgaa

SEQ ID NO: 149568 - DNA, 15 bp, Homo sapiens
gggcatcttgtgaag

SEQ ID NO: 149569 - DNA, 15 bp, Homo sapiens
ggcatcttgtgaagc

SEQ ID NO: 149570 - DNA, 15 bp, Homo sapiens
gcatcttgtgaagct

SEQ ID NO: 149571 - DNA, 15 bp, Homo sapiens
catcttgtgaagctg

SEQ ID NO: 149572 - DNA, 15 bp, Homo sapiens
atcttgtgaagctgt

SEQ ID NO: 149573 - DNA, 15 bp, Homo sapiens
tcttgtgaagctgta

SEQ ID NO: 149574 - DNA, 15 bp, Homo sapiens
cttgtgaagctgtag

SEQ ID NO: 149575 - DNA, 15 bp, Homo sapiens
ttgtgaagctgtaga

SEQ ID NO: 149576 - DNA, 15 bp, Homo sapiens
tgtgaagctgtagat

SEQ ID NO: 149577 - DNA, 15 bp, Homo sapiens
gtgaagctgtagatt

SEQ ID NO: 149578 - DNA, 15 bp, Homo sapiens
tgaagctgtagattt

SEQ ID NO: 149579 - DNA, 15 bp, Homo sapiens
gaagctgtagatttg

SEQ ID NO: 149580 - DNA, 15 bp, Homo sapiens
aagctgtagatttga

SEQ ID NO: 149581 - DNA, 15 bp, Homo sapiens
agctgtagatttgaa

SEQ ID NO: 149582 - DNA, 15 bp, Homo sapiens
gctgtagatttgaat

SEQ ID NO: 149583 - DNA, 15 bp, Homo sapiens
ctgtagatttgaatt

SEQ ID NO: 149584 - DNA, 15 bp, Homo sapiens
tgtagatttgaattc

SEQ ID NO: 149585 - DNA, 15 bp, Homo sapiens
gtagatttgaattct

SEQ ID NO: 149586 - DNA, 15 bp, Homo sapiens
tagatttgaattctg

SEQ ID NO: 149587 - DNA, 15 bp, Homo sapiens
agatttgaattctgc

SEQ ID NO: 149588 - DNA, 15 bp, Homo sapiens
gatttgaattctgca

SEQ ID NO: 149589 - DNA, 15 bp, Homo sapiens
atttgaattctgcag

SEQ ID NO: 149590 - DNA, 15 bp, Homo sapiens
tttgaattctgcagg

SEQ ID NO: 149591 - DNA, 15 bp, Homo sapiens
ttgaattctgcaggt

SEQ ID NO: 149592 - DNA, 15 bp, Homo sapiens
tgaattctgcaggtc

SEQ ID NO: 149593 - DNA, 15 bp, Homo sapiens
gaattctgcaggtcg

SEQ ID NO: 149594 - DNA, 15 bp, Homo sapiens
aattctgcaggtcgg

SEQ ID NO: 149595 - DNA, 15 bp, Homo sapiens
attctgcaggtcggc

SEQ ID NO: 149596 - DNA, 15 bp, Homo sapiens
ttctgcaggtcggca

SEQ ID NO: 149597 - DNA, 15 bp, Homo sapiens
tctgcaggtcggcag

SEQ ID NO: 149598 - DNA, 15 bp, Homo sapiens
ctgcaggtcggcaga

SEQ ID NO: 149599 - DNA, 15 bp, Homo sapiens
tgcaggtcggcagag

SEQ ID NO: 149600 - DNA, 15 bp, Homo sapiens
gcaggtcggcagagg

SEQ ID NO: 149601 - DNA, 15 bp, Homo sapiens
caggtcggcagaggg

SEQ ID NO: 149602 - DNA, 15 bp, Homo sapiens
aggtcggcagagggg

SEQ ID NO: 149603 - DNA, 15 bp, Homo sapiens
ggtcggcagaggggt

SEQ ID NO: 149604 - DNA, 15 bp, Homo sapiens
gtcggcagaggggtc

SEQ ID NO: 149605 - DNA, 15 bp, Homo sapiens
tcggcagaggggtct

SEQ ID NO: 149606 - DNA, 15 bp, Homo sapiens
cggcagaggggtctc

SEQ ID NO: 149607 - DNA, 15 bp, Homo sapiens
ggcagaggggtctca

SEQ ID NO: 149608 - DNA, 15 bp, Homo sapiens
gcagaggggtctcag

SEQ ID NO: 149609 - DNA, 15 bp, Homo sapiens
cagaggggtctcaga

SEQ ID NO: 149610 - DNA, 15 bp, Homo sapiens
agaggggtctcagaa

SEQ ID NO: 149611 - DNA, 15 bp, Homo sapiens
gaggggtctcagaat

SEQ ID NO: 149612 - DNA, 15 bp, Homo sapiens
aggggtctcagaatc

SEQ ID NO: 149613 - DNA, 15 bp, Homo sapiens
ggggtctcagaatcc

SEQ ID NO: 149614 - DNA, 15 bp, Homo sapiens
gggtctcagaatccg

SEQ ID NO: 149615 - DNA, 15 bp, Homo sapiens
ggtctcagaatccgc

SEQ ID NO: 149616 - DNA, 15 bp, Homo sapiens
gtctcagaatccgca

SEQ ID NO: 149617 - DNA, 15 bp, Homo sapiens
tctcagaatccgcat

SEQ ID NO: 149618 - DNA, 15 bp, Homo sapiens
ctcagaatccgcatt

SEQ ID NO: 149619 - DNA, 15 bp, Homo sapiens
tcagaatccgcattt

SEQ ID NO: 149620 - DNA, 15 bp, Homo sapiens
cagaatccgcatttc

SEQ ID NO: 149621 - DNA, 15 bp, Homo sapiens
agaatccgcatttcc

SEQ ID NO: 149622 - DNA, 15 bp, Homo sapiens
gaatccgcatttcca

SEQ ID NO: 149623 - DNA, 15 bp, Homo sapiens
aatccgcatttccaa

SEQ ID NO: 149624 - DNA, 15 bp, Homo sapiens
atccgcatttccaac

SEQ ID NO: 149625 - DNA, 15 bp, Homo sapiens
tccgcatttccaaca

SEQ ID NO: 149626 - DNA, 15 bp, Homo sapiens
ccgcatttccaacaa

SEQ ID NO: 149627 - DNA, 15 bp, Homo sapiens
cgcatttccaacaat

SEQ ID NO: 149628 - DNA, 15 bp, Homo sapiens
gcatttccaacaatg

SEQ ID NO: 149629 - DNA, 15 bp, Homo sapiens
catttccaacaatgt

SEQ ID NO: 149630 - DNA, 15 bp, Homo sapiens
atttccaacaatgtc

SEQ ID NO: 149631 - DNA, 15 bp, Homo sapiens
tttccaacaatgtct

SEQ ID NO: 149632 - DNA, 15 bp, Homo sapiens
ttccaacaatgtctc

SEQ ID NO: 149633 - DNA, 15 bp, Homo sapiens
tccaacaatgtctcc

SEQ ID NO: 149634 - DNA, 15 bp, Homo sapiens
ccaacaatgtctcca

SEQ ID NO: 149635 - DNA, 15 bp, Homo sapiens
caacaatgtctccag

SEQ ID NO: 149636 - DNA, 15 bp, Homo sapiens
aacaatgtctccagt

SEQ ID NO: 149637 - DNA, 15 bp, Homo sapiens
acaatgtctccagta

SEQ ID NO: 149638 - DNA, 15 bp, Homo sapiens
caatgtctccagtaa

SEQ ID NO: 149639 - DNA, 15 bp, Homo sapiens
aatgtctccagtaat

SEQ ID NO: 149640 - DNA, 15 bp, Homo sapiens
atgtctccagtaatg

SEQ ID NO: 149641 - DNA, 15 bp, Homo sapiens
tgtctccagtaatgc

SEQ ID NO: 149642 - DNA, 15 bp, Homo sapiens
gtctccagtaatgct

SEQ ID NO: 149643 - DNA, 15 bp, Homo sapiens
tctccagtaatgctg

SEQ ID NO: 149644 - DNA, 15 bp, Homo sapiens
ctccagtaatgctga

SEQ ID NO: 149645 - DNA, 15 bp, Homo sapiens
tccagtaatgctgat

SEQ ID NO: 149646 - DNA, 15 bp, Homo sapiens
ccagtaatgctgatg

SEQ ID NO: 149647 - DNA, 15 bp, Homo sapiens
cagtaatgctgatgc

SEQ ID NO: 149648 - DNA, 15 bp, Homo sapiens
agtaatgctgatgct

SEQ ID NO: 149649 - DNA, 15 bp, Homo sapiens
gtaatgctgatgctg

SEQ ID NO: 149650 - DNA, 15 bp, Homo sapiens
taatgctgatgctgc

SEQ ID NO: 149651 - DNA, 15 bp, Homo sapiens
aatgctgatgctgct

SEQ ID NO: 149652 - DNA, 15 bp, Homo sapiens
atgctgatgctgctc

SEQ ID NO: 149653 - DNA, 15 bp, Homo sapiens
tgctgatgctgctcg

SEQ ID NO: 149654 - DNA, 15 bp, Homo sapiens
gctgatgctgctcgt

SEQ ID NO: 149655 - DNA, 15 bp, Homo sapiens
ctgatgctgctcgtc

SEQ ID NO: 149656 - DNA, 15 bp, Homo sapiens
tgatgctgctcgtcc

SEQ ID NO: 149657 - DNA, 15 bp, Homo sapiens
gatgctgctcgtccc

SEQ ID NO: 149658 - DNA, 15 bp, Homo sapiens
atgctgctcgtccct

SEQ ID NO: 149659 - DNA, 15 bp, Homo sapiens
tgctgctcgtccctg

SEQ ID NO: 149660 - DNA, 15 bp, Homo sapiens
gctgctcgtccctgg

SEQ ID NO: 149661 - DNA, 15 bp, Homo sapiens
ctgctcgtccctgga

SEQ ID NO: 149662 - DNA, 15 bp, Homo sapiens
tgctcgtccctggac

SEQ ID NO: 149663 - DNA, 15 bp, Homo sapiens
gctcgtccctggacc

SEQ ID NO: 149664 - DNA, 15 bp, Homo sapiens
ctcgtccctggacca

SEQ ID NO: 149665 - DNA, 15 bp, Homo sapiens
tcgtccctggaccac

SEQ ID NO: 149666 - DNA, 15 bp, Homo sapiens
cgtccctggaccaca

SEQ ID NO: 149667 - DNA, 15 bp, Homo sapiens
gtccctggaccacag

SEQ ID NO: 149668 - DNA, 15 bp, Homo sapiens
tccctggaccacaga

SEQ ID NO: 149669 - DNA, 15 bp, Homo sapiens
ccctggaccacagat

SEQ ID NO: 149670 - DNA, 15 bp, Homo sapiens
cctggaccacagatt

SEQ ID NO: 149671 - DNA, 15 bp, Homo sapiens
ctggaccacagattg

SEQ ID NO: 149672 - DNA, 15 bp, Homo sapiens
tggaccacagattgg

SEQ ID NO: 149673 - DNA, 15 bp, Homo sapiens
ggaccacagattggg

SEQ ID NO: 149674 - DNA, 15 bp, Homo sapiens
gaccacagattgggt

SEQ ID NO: 149675 - DNA, 15 bp, Homo sapiens
accacagattgggta

SEQ ID NO: 149676 - DNA, 15 bp, Homo sapiens
ccacagattgggtag

SEQ ID NO: 149677 - DNA, 15 bp, Homo sapiens
cacagattgggtagc

SEQ ID NO: 149678 - DNA, 15 bp, Homo sapiens
acagattgggtagcc

SEQ ID NO: 149679 - DNA, 15 bp, Homo sapiens
cagattgggtagcca

SEQ ID NO: 149680 - DNA, 15 bp, Homo sapiens
agattgggtagccag

SEQ ID NO: 149681 - DNA, 15 bp, Homo sapiens
gattgggtagccagg

SEQ ID NO: 149682 - DNA, 15 bp, Homo sapiens
attgggtagccaggt

SEQ ID NO: 149683 - DNA, 15 bp, Homo sapiens
ttgggtagccaggtt

SEQ ID NO: 149684 - DNA, 15 bp, Homo sapiens
tgggtagccaggttc

SEQ ID NO: 149685 - DNA, 15 bp, Homo sapiens
gggtagccaggttct

SEQ ID NO: 149686 - DNA, 15 bp, Homo sapiens
ggtagccaggttctg

SEQ ID NO: 149687 - DNA, 15 bp, Homo sapiens
gtagccaggttctgg

SEQ ID NO: 149688 - DNA, 15 bp, Homo sapiens
tagccaggttctggc

SEQ ID NO: 149689 - DNA, 15 bp, Homo sapiens
agccaggttctggca

SEQ ID NO: 149690 - DNA, 15 bp, Homo sapiens
gccaggttctggcaa

SEQ ID NO: 149691 - DNA, 15 bp, Homo sapiens
ccaggttctggcaag

SEQ ID NO: 149692 - DNA, 15 bp, Homo sapiens
caggttctggcaagc

SEQ ID NO: 149693 - DNA, 15 bp, Homo sapiens
aggttctggcaagct

SEQ ID NO: 149694 - DNA, 15 bp, Homo sapiens
ggttctggcaagctc

SEQ ID NO: 149695 - DNA, 15 bp, Homo sapiens
gttctggcaagctca

SEQ ID NO: 149696 - DNA, 15 bp, Homo sapiens
ttctggcaagctcat

SEQ ID NO: 149697 - DNA, 15 bp, Homo sapiens
tctggcaagctcatc

SEQ ID NO: 149698 - DNA, 15 bp, Homo sapiens
ctggcaagctcatcc

SEQ ID NO: 149699 - DNA, 15 bp, Homo sapiens
tggcaagctcatccc

SEQ ID NO: 149700 - DNA, 15 bp, Homo sapiens
ggcaagctcatccca

SEQ ID NO: 149701 - DNA, 15 bp, Homo sapiens
gcaagctcatcccaa

SEQ ID NO: 149702 - DNA, 15 bp, Homo sapiens
caagctcatcccaag

SEQ ID NO: 149703 - DNA, 15 bp, Homo sapiens
aagctcatcccaagg

SEQ ID NO: 149704 - DNA, 15 bp, Homo sapiens
agctcatcccaaggc

SEQ ID NO: 149705 - DNA, 15 bp, Homo sapiens
gctcatcccaaggct

SEQ ID NO: 149706 - DNA, 15 bp, Homo sapiens
ctcatcccaaggctt

SEQ ID NO: 149707 - DNA, 15 bp, Homo sapiens
tcatcccaaggcttt

SEQ ID NO: 149708 - DNA, 15 bp, Homo sapiens
catcccaaggctttg

SEQ ID NO: 149709 - DNA, 15 bp, Homo sapiens
atcccaaggctttga

SEQ ID NO: 149710 - DNA, 15 bp, Homo sapiens
tcccaaggctttgag

SEQ ID NO: 149711 - DNA, 15 bp, Homo sapiens
cccaaggctttgaga

SEQ ID NO: 149712 - DNA, 15 bp, Homo sapiens
ccaaggctttgagat

SEQ ID NO: 149713 - DNA, 15 bp, Homo sapiens
caaggctttgagatg

SEQ ID NO: 149714 - DNA, 15 bp, Homo sapiens
aaggctttgagatga

SEQ ID NO: 149715 - DNA, 15 bp, Homo sapiens
aggctttgagatgac

SEQ ID NO: 149716 - DNA, 15 bp, Homo sapiens
ggctttgagatgaca

SEQ ID NO: 149717 - DNA, 15 bp, Homo sapiens
gctttgagatgacat

SEQ ID NO: 149718 - DNA, 15 bp, Homo sapiens
ctttgagatgacatc

SEQ ID NO: 149719 - DNA, 15 bp, Homo sapiens
tttgagatgacatca

SEQ ID NO: 149720 - DNA, 15 bp, Homo sapiens
ttgagatgacatcag

SEQ ID NO: 149721 - DNA, 15 bp, Homo sapiens
tgagatgacatcaga

SEQ ID NO: 149722 - DNA, 15 bp, Homo sapiens
gagatgacatcagac

SEQ ID NO: 149723 - DNA, 15 bp, Homo sapiens
agatgacatcagaca

SEQ ID NO: 149724 - DNA, 15 bp, Homo sapiens
gatgacatcagacaa

SEQ ID NO: 149725 - DNA, 15 bp, Homo sapiens
atgacatcagacaaa

SEQ ID NO: 149726 - DNA, 15 bp, Homo sapiens
tgacatcagacaaaa

SEQ ID NO: 149727 - DNA, 15 bp, Homo sapiens
gacatcagacaaaat

SEQ ID NO: 149728 - DNA, 15 bp, Homo sapiens
acatcagacaaaata

SEQ ID NO: 149729 - DNA, 15 bp, Homo sapiens
catcagacaaaatat

SEQ ID NO: 149730 - DNA, 15 bp, Homo sapiens
atcagacaaaatatg

SEQ ID NO: 149731 - DNA, 15 bp, Homo sapiens
tcagacaaaatatgt

SEQ ID NO: 149732 - DNA, 15 bp, Homo sapiens
cagacaaaatatgtt

SEQ ID NO: 149733 - DNA, 15 bp, Homo sapiens
agacaaaatatgttc

SEQ ID NO: 149734 - DNA, 15 bp, Homo sapiens
gacaaaatatgttct

SEQ ID NO: 149735 - DNA, 15 bp, Homo sapiens
acaaaatatgttctg

SEQ ID NO: 149736 - DNA, 15 bp, Homo sapiens
caaaatatgttctgg

SEQ ID NO: 149737 - DNA, 15 bp, Homo sapiens
aaaatatgttctggg

SEQ ID NO: 149738 - DNA, 15 bp, Homo sapiens
aaatatgttctggga

SEQ ID NO: 149739 - DNA, 15 bp, Homo sapiens
aatatgttctgggac

SEQ ID NO: 149740 - DNA, 15 bp, Homo sapiens
atatgttctgggaca

SEQ ID NO: 149741 - DNA, 15 bp, Homo sapiens
tatgttctgggacat

SEQ ID NO: 149742 - DNA, 15 bp, Homo sapiens
atgttctgggacatg

SEQ ID NO: 149743 - DNA, 15 bp, Homo sapiens
tgttctgggacatgg

SEQ ID NO: 149744 - DNA, 15 bp, Homo sapiens
gttctgggacatggc

SEQ ID NO: 149745 - DNA, 15 bp, Homo sapiens
ttctgggacatggct

SEQ ID NO: 149746 - DNA, 15 bp, Homo sapiens
tctgggacatggctt

SEQ ID NO: 149747 - DNA, 15 bp, Homo sapiens
ctgggacatggcttt

SEQ ID NO: 149748 - DNA, 15 bp, Homo sapiens
tgggacatggctttt

SEQ ID NO: 149749 - DNA, 15 bp, Homo sapiens
gggacatggcttttg

SEQ ID NO: 149750 - DNA, 15 bp, Homo sapiens
ggacatggcttttga

SEQ ID NO: 149751 - DNA, 15 bp, Homo sapiens
gacatggcttttgag

SEQ ID NO: 149752 - DNA, 15 bp, Homo sapiens
acatggcttttgaga

SEQ ID NO: 149753 - DNA, 15 bp, Homo sapiens
catggcttttgagag

SEQ ID NO: 149754 - DNA, 15 bp, Homo sapiens
atggcttttgagagg

SEQ ID NO: 149755 - DNA, 15 bp, Homo sapiens
tggcttttgagaggt

SEQ ID NO: 149756 - DNA, 15 bp, Homo sapiens
ggcttttgagaggtc

SEQ ID NO: 149757 - DNA, 15 bp, Homo sapiens
gcttttgagaggtca

SEQ ID NO: 149758 - DNA, 15 bp, Homo sapiens
cttttgagaggtcaa

SEQ ID NO: 149759 - DNA, 15 bp, Homo sapiens
ttttgagaggtcaag

SEQ ID NO: 149760 - DNA, 15 bp, Homo sapiens
tttgagaggtcaaga

SEQ ID NO: 149761 - DNA, 15 bp, Homo sapiens
ttgagaggtcaagaa

SEQ ID NO: 149762 - DNA, 15 bp, Homo sapiens
tgagaggtcaagaaa

SEQ ID NO: 149763 - DNA, 15 bp, Homo sapiens
gagaggtcaagaaaa

SEQ ID NO: 149764 - DNA, 15 bp, Homo sapiens
agaggtcaagaaaat

SEQ ID NO: 149765 - DNA, 15 bp, Homo sapiens
gaggtcaagaaaata

SEQ ID NO: 149766 - DNA, 15 bp, Homo sapiens
aggtcaagaaaataa

SEQ ID NO: 149767 - DNA, 15 bp, Homo sapiens
ggtcaagaaaataag

SEQ ID NO: 149768 - DNA, 15 bp, Homo sapiens
gtcaagaaaataaga

SEQ ID NO: 149769 - DNA, 15 bp, Homo sapiens
tcaagaaaataagat

SEQ ID NO: 149770 - DNA, 15 bp, Homo sapiens
caagaaaataagatg

SEQ ID NO: 149771 - DNA, 15 bp, Homo sapiens
aagaaaataagatgt

SEQ ID NO: 149772 - DNA, 15 bp, Homo sapiens
agaaaataagatgtt

SEQ ID NO: 149773 - DNA, 15 bp, Homo sapiens
gaaaataagatgttt

SEQ ID NO: 149774 - DNA, 15 bp, Homo sapiens
aaaataagatgtttc

SEQ ID NO: 149775 - DNA, 15 bp, Homo sapiens
aaataagatgtttct

SEQ ID NO: 149776 - DNA, 15 bp, Homo sapiens
aataagatgtttctt

SEQ ID NO: 149777 - DNA, 15 bp, Homo sapiens
ataagatgtttcttt

SEQ ID NO: 149778 - DNA, 15 bp, Homo sapiens
taagatgtttctttc

SEQ ID NO: 149779 - DNA, 15 bp, Homo sapiens
aagatgtttctttct

SEQ ID NO: 149780 - DNA, 15 bp, Homo sapiens
agatgtttctttctc

SEQ ID NO: 149781 - DNA, 15 bp, Homo sapiens
gatgtttctttctct

SEQ ID NO: 149782 - DNA, 15 bp, Homo sapiens
atgtttctttctctt

SEQ ID NO: 149783 - DNA, 15 bp, Homo sapiens
tgtttctttctcttc

SEQ ID NO: 149784 - DNA, 15 bp, Homo sapiens
gtttctttctcttct

SEQ ID NO: 149785 - DNA, 15 bp, Homo sapiens
tttctttctcttctc

SEQ ID NO: 149786 - DNA, 15 bp, Homo sapiens
ttctttctcttctca

SEQ ID NO: 149787 - DNA, 15 bp, Homo sapiens
tctttctcttctcat

SEQ ID NO: 149788 - DNA, 15 bp, Homo sapiens
ctttctcttctcatc

SEQ ID NO: 149789 - DNA, 15 bp, Homo sapiens
tttctcttctcatcc

SEQ ID NO: 149790 - DNA, 15 bp, Homo sapiens
ttctcttctcatccc

SEQ ID NO: 149791 - DNA, 15 bp, Homo sapiens
tctcttctcatcccc

SEQ ID NO: 149792 - DNA, 15 bp, Homo sapiens
ctcttctcatcccca

SEQ ID NO: 149793 - DNA, 15 bp, Homo sapiens
tcttctcatccccaa

SEQ ID NO: 149794 - DNA, 15 bp, Homo sapiens
cttctcatccccaac

SEQ ID NO: 149795 - DNA, 15 bp, Homo sapiens
ttctcatccccaacc

SEQ ID NO: 149796 - DNA, 15 bp, Homo sapiens
tctcatccccaaccc

SEQ ID NO: 149797 - DNA, 15 bp, Homo sapiens
ctcatccccaaccct

SEQ ID NO: 149798 - DNA, 15 bp, Homo sapiens
tcatccccaaccctt

SEQ ID NO: 149799 - DNA, 15 bp, Homo sapiens
catccccaacccttg

SEQ ID NO: 149800 - DNA, 15 bp, Homo sapiens
atccccaacccttgc

SEQ ID NO: 149801 - DNA, 15 bp, Homo sapiens
tccccaacccttgca

SEQ ID NO: 149802 - DNA, 15 bp, Homo sapiens
ccccaacccttgcac

SEQ ID NO: 149803 - DNA, 15 bp, Homo sapiens
cccaacccttgcact

SEQ ID NO: 149804 - DNA, 15 bp, Homo sapiens
ccaacccttgcactg

SEQ ID NO: 149805 - DNA, 15 bp, Homo sapiens
caacccttgcactgc

SEQ ID NO: 149806 - DNA, 15 bp, Homo sapiens
aacccttgcactgcc

SEQ ID NO: 149807 - DNA, 15 bp, Homo sapiens
acccttgcactgccc

SEQ ID NO: 149808 - DNA, 15 bp, Homo sapiens
cccttgcactgccct

SEQ ID NO: 149809 - DNA, 15 bp, Homo sapiens
ccttgcactgccctt

SEQ ID NO: 149810 - DNA, 15 bp, Homo sapiens
cttgcactgcccttt

SEQ ID NO: 149811 - DNA, 15 bp, Homo sapiens
ttgcactgccctttt

SEQ ID NO: 149812 - DNA, 15 bp, Homo sapiens
tgcactgcccttttc

SEQ ID NO: 149813 - DNA, 15 bp, Homo sapiens
gcactgcccttttct

SEQ ID NO: 149814 - DNA, 15 bp, Homo sapiens
cactgcccttttctc

SEQ ID NO: 149815 - DNA, 15 bp, Homo sapiens
actgcccttttctcc

SEQ ID NO: 149816 - DNA, 15 bp, Homo sapiens
ctgcccttttctccc

SEQ ID NO: 149817 - DNA, 15 bp, Homo sapiens
tgcccttttctccct

SEQ ID NO: 149818 - DNA, 15 bp, Homo sapiens
gcccttttctccctt

SEQ ID NO: 149819 - DNA, 15 bp, Homo sapiens
cccttttctcccttc

SEQ ID NO: 149820 - DNA, 15 bp, Homo sapiens
ccttttctcccttcc

SEQ ID NO: 149821 - DNA, 15 bp, Homo sapiens
cttttctcccttccc

SEQ ID NO: 149822 - DNA, 15 bp, Homo sapiens
ttttctcccttcccc

SEQ ID NO: 149823 - DNA, 15 bp, Homo sapiens
tttctcccttcccct

SEQ ID NO: 149824 - DNA, 15 bp, Homo sapiens
ttctcccttccccta

SEQ ID NO: 149825 - DNA, 15 bp, Homo sapiens
tctcccttcccctac

SEQ ID NO: 149826 - DNA, 15 bp, Homo sapiens
ctcccttcccctacc

SEQ ID NO: 149827 - DNA, 15 bp, Homo sapiens
tcccttcccctaccc

SEQ ID NO: 149828 - DNA, 15 bp, Homo sapiens
cccttcccctaccct

SEQ ID NO: 149829 - DNA, 15 bp, Homo sapiens
ccttcccctaccctc

SEQ ID NO: 149830 - DNA, 15 bp, Homo sapiens
cttcccctaccctcc

SEQ ID NO: 149831 - DNA, 15 bp, Homo sapiens
ttcccctaccctcct

SEQ ID NO: 149832 - DNA, 15 bp, Homo sapiens
tcccctaccctcctt

SEQ ID NO: 149833 - DNA, 15 bp, Homo sapiens
cccctaccctccttt

SEQ ID NO: 149834 - DNA, 15 bp, Homo sapiens
ccctaccctcctttc

SEQ ID NO: 149835 - DNA, 15 bp, Homo sapiens
cctaccctcctttct

SEQ ID NO: 149836 - DNA, 15 bp, Homo sapiens
ctaccctcctttctg

SEQ ID NO: 149837 - DNA, 15 bp, Homo sapiens
taccctcctttctgt

SEQ ID NO: 149838 - DNA, 15 bp, Homo sapiens
accctcctttctgtc

SEQ ID NO: 149839 - DNA, 15 bp, Homo sapiens
ccctcctttctgtcc

SEQ ID NO: 149840 - DNA, 15 bp, Homo sapiens
cctcctttctgtccc

SEQ ID NO: 149841 - DNA, 15 bp, Homo sapiens
ctcctttctgtcccc

SEQ ID NO: 149842 - DNA, 15 bp, Homo sapiens
tcctttctgtcccca

SEQ ID NO: 149843 - DNA, 15 bp, Homo sapiens
cctttctgtccccat

SEQ ID NO: 149844 - DNA, 15 bp, Homo sapiens
ctttctgtccccatc

SEQ ID NO: 149845 - DNA, 15 bp, Homo sapiens
tttctgtccccatcc

SEQ ID NO: 149846 - DNA, 15 bp, Homo sapiens
ttctgtccccatccc

SEQ ID NO: 149847 - DNA, 15 bp, Homo sapiens
tctgtccccatccct

SEQ ID NO: 149848 - DNA, 15 bp, Homo sapiens
ctgtccccatccctg

SEQ ID NO: 149849 - DNA, 15 bp, Homo sapiens
tgtccccatccctga

SEQ ID NO: 149850 - DNA, 15 bp, Homo sapiens
gtccccatccctgac

SEQ ID NO: 149851 - DNA, 15 bp, Homo sapiens
tccccatccctgacg

SEQ ID NO: 149852 - DNA, 15 bp, Homo sapiens
ccccatccctgacgc

SEQ ID NO: 149853 - DNA, 15 bp, Homo sapiens
cccatccctgacgcc

SEQ ID NO: 149854 - DNA, 15 bp, Homo sapiens
ccatccctgacgcca

SEQ ID NO: 149855 - DNA, 15 bp, Homo sapiens
catccctgacgccag

SEQ ID NO: 149856 - DNA, 15 bp, Homo sapiens
atccctgacgccagc

SEQ ID NO: 149857 - DNA, 15 bp, Homo sapiens
tccctgacgccagct

SEQ ID NO: 149858 - DNA, 15 bp, Homo sapiens
ccctgacgccagctg

SEQ ID NO: 149859 - DNA, 15 bp, Homo sapiens
cctgacgccagctgt

SEQ ID NO: 149860 - DNA, 15 bp, Homo sapiens
ctgacgccagctgtt

SEQ ID NO: 149861 - DNA, 15 bp, Homo sapiens
tgacgccagctgttc

SEQ ID NO: 149862 - DNA, 15 bp, Homo sapiens
gacgccagctgttca

SEQ ID NO: 149863 - DNA, 15 bp, Homo sapiens
acgccagctgttcag

SEQ ID NO: 149864 - DNA, 15 bp, Homo sapiens
cgccagctgttcagc

SEQ ID NO: 149865 - DNA, 15 bp, Homo sapiens
gccagctgttcagca

SEQ ID NO: 149866 - DNA, 15 bp, Homo sapiens
ccagctgttcagcat

SEQ ID NO: 149867 - DNA, 15 bp, Homo sapiens
cagctgttcagcatg

SEQ ID NO: 149868 - DNA, 15 bp, Homo sapiens
agctgttcagcatga

SEQ ID NO: 149869 - DNA, 15 bp, Homo sapiens
gctgttcagcatgag

SEQ ID NO: 149870 - DNA, 15 bp, Homo sapiens
ctgttcagcatgaga

SEQ ID NO: 149871 - DNA, 15 bp, Homo sapiens
tgttcagcatgagaa

SEQ ID NO: 149872 - DNA, 15 bp, Homo sapiens
gttcagcatgagaag

SEQ ID NO: 149873 - DNA, 15 bp, Homo sapiens
ttcagcatgagaagc

SEQ ID NO: 149874 - DNA, 15 bp, Homo sapiens
tcagcatgagaagct

SEQ ID NO: 149875 - DNA, 15 bp, Homo sapiens
cagcatgagaagctg

SEQ ID NO: 149876 - DNA, 15 bp, Homo sapiens
agcatgagaagctgg

SEQ ID NO: 149877 - DNA, 15 bp, Homo sapiens
gcatgagaagctgga

SEQ ID NO: 149878 - DNA, 15 bp, Homo sapiens
catgagaagctggag

SEQ ID NO: 149879 - DNA, 15 bp, Homo sapiens
atgagaagctggagt

SEQ ID NO: 149880 - DNA, 15 bp, Homo sapiens
tgagaagctggagtg

SEQ ID NO: 149881 - DNA, 15 bp, Homo sapiens
gagaagctggagtga

SEQ ID NO: 149882 - DNA, 15 bp, Homo sapiens
agaagctggagtgac

SEQ ID NO: 149883 - DNA, 15 bp, Homo sapiens
gaagctggagtgaca

SEQ ID NO: 149884 - DNA, 15 bp, Homo sapiens
aagctggagtgacat

SEQ ID NO: 149885 - DNA, 15 bp, Homo sapiens
agctggagtgacatg

SEQ ID NO: 149886 - DNA, 15 bp, Homo sapiens
gctggagtgacatgc

SEQ ID NO: 149887 - DNA, 15 bp, Homo sapiens
ctggagtgacatgcg

SEQ ID NO: 149888 - DNA, 15 bp, Homo sapiens
tggagtgacatgcga

SEQ ID NO: 149889 - DNA, 15 bp, Homo sapiens
ggagtgacatgcgac

SEQ ID NO: 149890 - DNA, 15 bp, Homo sapiens
gagtgacatgcgaca

SEQ ID NO: 149891 - DNA, 15 bp, Homo sapiens
agtgacatgcgacag

SEQ ID NO: 149892 - DNA, 15 bp, Homo sapiens
gtgacatgcgacagg

SEQ ID NO: 149893 - DNA, 15 bp, Homo sapiens
tgacatgcgacagga

SEQ ID NO: 149894 - DNA, 15 bp, Homo sapiens
gacatgcgacaggag

SEQ ID NO: 149895 - DNA, 15 bp, Homo sapiens
acatgcgacaggagg

SEQ ID NO: 149896 - DNA, 15 bp, Homo sapiens
catgcgacaggaggt

SEQ ID NO: 149897 - DNA, 15 bp, Homo sapiens
atgcgacaggaggtg

SEQ ID NO: 149898 - DNA, 15 bp, Homo sapiens
tgcgacaggaggtga

SEQ ID NO: 149899 - DNA, 15 bp, Homo sapiens
gcgacaggaggtgat

SEQ ID NO: 149900 - DNA, 15 bp, Homo sapiens
cgacaggaggtgatg

SEQ ID NO: 149901 - DNA, 15 bp, Homo sapiens
gacaggaggtgatgt

SEQ ID NO: 149902 - DNA, 15 bp, Homo sapiens
acaggaggtgatgtt

SEQ ID NO: 149903 - DNA, 15 bp, Homo sapiens
caggaggtgatgttt

SEQ ID NO: 149904 - DNA, 15 bp, Homo sapiens
aggaggtgatgtttc

SEQ ID NO: 149905 - DNA, 15 bp, Homo sapiens
ggaggtgatgtttct

SEQ ID NO: 149906 - DNA, 15 bp, Homo sapiens
gaggtgatgtttctg

SEQ ID NO: 149907 - DNA, 15 bp, Homo sapiens
aggtgatgtttctga

SEQ ID NO: 149908 - DNA, 15 bp, Homo sapiens
ggtgatgtttctgac

SEQ ID NO: 149909 - DNA, 15 bp, Homo sapiens
gtgatgtttctgacc

SEQ ID NO: 149910 - DNA, 15 bp, Homo sapiens
tgatgtttctgacca

SEQ ID NO: 149911 - DNA, 15 bp, Homo sapiens
gatgtttctgaccaa

SEQ ID NO: 149912 - DNA, 15 bp, Homo sapiens
atgtttctgaccaat

SEQ ID NO: 149913 - DNA, 15 bp, Homo sapiens
tgtttctgaccaatg

SEQ ID NO: 149914 - DNA, 15 bp, Homo sapiens
gtttctgaccaatgt

SEQ ID NO: 149915 - DNA, 15 bp, Homo sapiens
tttctgaccaatgtg

SEQ ID NO: 149916 - DNA, 15 bp, Homo sapiens
ttctgaccaatgtga

SEQ ID NO: 149917 - DNA, 15 bp, Homo sapiens
tctgaccaatgtgaa

SEQ ID NO: 149918 - DNA, 15 bp, Homo sapiens
ctgaccaatgtgaac

SEQ ID NO: 149919 - DNA, 15 bp, Homo sapiens
tgaccaatgtgaaca

SEQ ID NO: 149920 - DNA, 15 bp, Homo sapiens
gaccaatgtgaacag

SEQ ID NO: 149921 - DNA, 15 bp, Homo sapiens
accaatgtgaacagc

SEQ ID NO: 149922 - DNA, 15 bp, Homo sapiens
ccaatgtgaacagct

SEQ ID NO: 149923 - DNA, 15 bp, Homo sapiens
caatgtgaacagctc

SEQ ID NO: 149924 - DNA, 15 bp, Homo sapiens
aatgtgaacagctcc

SEQ ID NO: 149925 - DNA, 15 bp, Homo sapiens
atgtgaacagctcca

SEQ ID NO: 149926 - DNA, 15 bp, Homo sapiens
tgtgaacagctccag

SEQ ID NO: 149927 - DNA, 15 bp, Homo sapiens
tgaacagctccagct

SEQ ID NO: 149928 - DNA, 15 bp, Homo sapiens
gaacagctccagctc

SEQ ID NO: 149929 - DNA, 15 bp, Homo sapiens
aacagctccagctcc

SEQ ID NO: 149930 - DNA, 15 bp, Homo sapiens
acagctccagctcct

SEQ ID NO: 149931 - DNA, 15 bp, Homo sapiens
cagctccagctcctc

SEQ ID NO: 149932 - DNA, 15 bp, Homo sapiens
agctccagctcctcc

SEQ ID NO: 149933 - DNA, 15 bp, Homo sapiens
gctccagctcctcca

SEQ ID NO: 149934 - DNA, 15 bp, Homo sapiens
ctccagctcctccac

SEQ ID NO: 149935 - DNA, 15 bp, Homo sapiens
tccagctcctccacc

SEQ ID NO: 149936 - DNA, 15 bp, Homo sapiens
ccagctcctccaccc

SEQ ID NO: 149937 - DNA, 15 bp, Homo sapiens
cagctcctccaccca

SEQ ID NO: 149938 - DNA, 15 bp, Homo sapiens
agctcctccacccaa

SEQ ID NO: 149939 - DNA, 15 bp, Homo sapiens
gctcctccacccaaa

SEQ ID NO: 149940 - DNA, 15 bp, Homo sapiens
ctcctccacccaaat

SEQ ID NO: 149941 - DNA, 15 bp, Homo sapiens
tcctccacccaaatc

SEQ ID NO: 149942 - DNA, 15 bp, Homo sapiens
cctccacccaaatct

SEQ ID NO: 149943 - DNA, 15 bp, Homo sapiens
ctccacccaaatcta

SEQ ID NO: 149944 - DNA, 15 bp, Homo sapiens
tccacccaaatctac

SEQ ID NO: 149945 - DNA, 15 bp, Homo sapiens
ccacccaaatctacc

SEQ ID NO: 149946 - DNA, 15 bp, Homo sapiens
cacccaaatctacca

SEQ ID NO: 149947 - DNA, 15 bp, Homo sapiens
acccaaatctaccag

SEQ ID NO: 149948 - DNA, 15 bp, Homo sapiens
cccaaatctaccagg

SEQ ID NO: 149949 - DNA, 15 bp, Homo sapiens
ccaaatctaccaggc

SEQ ID NO: 149950 - DNA, 15 bp, Homo sapiens
caaatctaccaggct

SEQ ID NO: 149951 - DNA, 15 bp, Homo sapiens
aaatctaccaggctg

SEQ ID NO: 149952 - DNA, 15 bp, Homo sapiens
aatctaccaggctgt

SEQ ID NO: 149953 - DNA, 15 bp, Homo sapiens
atctaccaggctgtg

SEQ ID NO: 149954 - DNA, 15 bp, Homo sapiens
tctaccaggctgtgt

SEQ ID NO: 149955 - DNA, 15 bp, Homo sapiens
ctaccaggctgtgtc

SEQ ID NO: 149956 - DNA, 15 bp, Homo sapiens
taccaggctgtgtct

SEQ ID NO: 149957 - DNA, 15 bp, Homo sapiens
accaggctgtgtctc

SEQ ID NO: 149958 - DNA, 15 bp, Homo sapiens
ccaggctgtgtctcg

SEQ ID NO: 149959 - DNA, 15 bp, Homo sapiens
caggctgtgtctcgt

SEQ ID NO: 149960 - DNA, 15 bp, Homo sapiens
aggctgtgtctcgta

SEQ ID NO: 149961 - DNA, 15 bp, Homo sapiens
ggctgtgtctcgtat

SEQ ID NO: 149962 - DNA, 15 bp, Homo sapiens
gctgtgtctcgtatt

SEQ ID NO: 149963 - DNA, 15 bp, Homo sapiens
ctgtgtctcgtattg

SEQ ID NO: 149964 - DNA, 15 bp, Homo sapiens
tgtgtctcgtattgt

SEQ ID NO: 149965 - DNA, 15 bp, Homo sapiens
gtgtctcgtattgtc

SEQ ID NO: 149966 - DNA, 15 bp, Homo sapiens
tgtctcgtattgtct

SEQ ID NO: 149967 - DNA, 15 bp, Homo sapiens
gtctcgtattgtctg

SEQ ID NO: 149968 - DNA, 15 bp, Homo sapiens
tctcgtattgtctgc

SEQ ID NO: 149969 - DNA, 15 bp, Homo sapiens
ctcgtattgtctgcg

SEQ ID NO: 149970 - DNA, 15 bp, Homo sapiens
tcgtattgtctgcgg

SEQ ID NO: 149971 - DNA, 15 bp, Homo sapiens
cgtattgtctgcggg

SEQ ID NO: 149972 - DNA, 15 bp, Homo sapiens
gtattgtctgcgggc

SEQ ID NO: 149973 - DNA, 15 bp, Homo sapiens
tattgtctgcgggca

SEQ ID NO: 149974 - DNA, 15 bp, Homo sapiens
attgtctgcgggcat

SEQ ID NO: 149975 - DNA, 15 bp, Homo sapiens
ttgtctgcgggcatc

SEQ ID NO: 149976 - DNA, 15 bp, Homo sapiens
tgtctgcgggcatcc

SEQ ID NO: 149977 - DNA, 15 bp, Homo sapiens
gtctgcgggcatccc

SEQ ID NO: 149978 - DNA, 15 bp, Homo sapiens
tctgcgggcatcccg

SEQ ID NO: 149979 - DNA, 15 bp, Homo sapiens
ctgcgggcatcccga

SEQ ID NO: 149980 - DNA, 15 bp, Homo sapiens
tgcgggcatcccgag

SEQ ID NO: 149981 - DNA, 15 bp, Homo sapiens
gcgggcatcccgagg

SEQ ID NO: 149982 - DNA, 15 bp, Homo sapiens
cgggcatcccgaggg

SEQ ID NO: 149983 - DNA, 15 bp, Homo sapiens
gggcatcccgaggga

SEQ ID NO: 149984 - DNA, 15 bp, Homo sapiens
ggcatcccgagggag

SEQ ID NO: 149985 - DNA, 15 bp, Homo sapiens
gcatcccgagggagg

SEQ ID NO: 149986 - DNA, 15 bp, Homo sapiens
catcccgagggaggg

SEQ ID NO: 149987 - DNA, 15 bp, Homo sapiens
atcccgagggagggg

SEQ ID NO: 149988 - DNA, 15 bp, Homo sapiens
tcccgagggaggggg

SEQ ID NO: 149989 - DNA, 15 bp, Homo sapiens
cccgagggagggggg

SEQ ID NO: 149990 - DNA, 15 bp, Homo sapiens
ccgagggaggggggc

SEQ ID NO: 149991 - DNA, 15 bp, Homo sapiens
cgagggaggggggct

SEQ ID NO: 149992 - DNA, 15 bp, Homo sapiens
gagggaggggggctg

SEQ ID NO: 149993 - DNA, 15 bp, Homo sapiens
agggaggggggctga

SEQ ID NO: 149994 - DNA, 15 bp, Homo sapiens
gggaggggggctgaa

SEQ ID NO: 149995 - DNA, 15 bp, Homo sapiens
ggaggggggctgaag

SEQ ID NO: 149996 - DNA, 15 bp, Homo sapiens
gaggggggctgaaga

SEQ ID NO: 149997 - DNA, 15 bp, Homo sapiens
aggggggctgaagat

SEQ ID NO: 149998 - DNA, 15 bp, Homo sapiens
ggggggctgaagatc

SEQ ID NO: 149999 - DNA, 15 bp, Homo sapiens
gggggctgaagatca

SEQ ID NO: 150000 - DNA, 15 bp, Homo sapiens
ggggctgaagatcaa

SEQ ID NO: 150001 - DNA, 15 bp, Homo sapiens
gggctgaagatcaag

SEQ ID NO: 150002 - DNA, 15 bp, Homo sapiens
ggctgaagatcaagt

SEQ ID NO: 150003 - DNA, 15 bp, Homo sapiens
gctgaagatcaagtc

SEQ ID NO: 150004 - DNA, 15 bp, Homo sapiens
ctgaagatcaagtct

SEQ ID NO: 150005 - DNA, 15 bp, Homo sapiens
tgaagatcaagtctc

SEQ ID NO: 150006 - DNA, 15 bp, Homo sapiens
gaagatcaagtctct

SEQ ID NO: 150007 - DNA, 15 bp, Homo sapiens
aagatcaagtctctc

SEQ ID NO: 150008 - DNA, 15 bp, Homo sapiens
agatcaagtctctca

SEQ ID NO: 150009 - DNA, 15 bp, Homo sapiens
gatcaagtctctcaa

SEQ ID NO: 150010 - DNA, 15 bp, Homo sapiens
atcaagtctctcaac

SEQ ID NO: 150011 - DNA, 15 bp, Homo sapiens
tcaagtctctcaact

SEQ ID NO: 150012 - DNA, 15 bp, Homo sapiens
caagtctctcaactg

SEQ ID NO: 150013 - DNA, 15 bp, Homo sapiens
aagtctctcaactgg

SEQ ID NO: 150014 - DNA, 15 bp, Homo sapiens
agtctctcaactggt

SEQ ID NO: 150015 - DNA, 15 bp, Homo sapiens
gtctctcaactggta

SEQ ID NO: 150016 - DNA, 15 bp, Homo sapiens
tctctcaactggtat

SEQ ID NO: 150017 - DNA, 15 bp, Homo sapiens
ctctcaactggtatg

SEQ ID NO: 150018 - DNA, 15 bp, Homo sapiens
tctcaactggtatga

SEQ ID NO: 150019 - DNA, 15 bp, Homo sapiens
ctcaactggtatgag

SEQ ID NO: 150020 - DNA, 15 bp, Homo sapiens
tcaactggtatgagg

SEQ ID NO: 150021 - DNA, 15 bp, Homo sapiens
caactggtatgagga

SEQ ID NO: 150022 - DNA, 15 bp, Homo sapiens
aactggtatgaggac

SEQ ID NO: 150023 - DNA, 15 bp, Homo sapiens
actggtatgaggaca

SEQ ID NO: 150024 - DNA, 15 bp, Homo sapiens
ctggtatgaggacaa

SEQ ID NO: 150025 - DNA, 15 bp, Homo sapiens
tggtatgaggacaac

SEQ ID NO: 150026 - DNA, 15 bp, Homo sapiens
ggtatgaggacaaca

SEQ ID NO: 150027 - DNA, 15 bp, Homo sapiens
gtatgaggacaacaa

SEQ ID NO: 150028 - DNA, 15 bp, Homo sapiens
tatgaggacaacaac

SEQ ID NO: 150029 - DNA, 15 bp, Homo sapiens
atgaggacaacaact

SEQ ID NO: 150030 - DNA, 15 bp, Homo sapiens
tgaggacaacaacta

SEQ ID NO: 150031 - DNA, 15 bp, Homo sapiens
gaggacaacaactac

SEQ ID NO: 150032 - DNA, 15 bp, Homo sapiens
aggacaacaactaca

SEQ ID NO: 150033 - DNA, 15 bp, Homo sapiens
ggacaacaactacaa

SEQ ID NO: 150034 - DNA, 15 bp, Homo sapiens
gacaacaactacaaa

SEQ ID NO: 150035 - DNA, 15 bp, Homo sapiens
acaacaactacaaag

SEQ ID NO: 150036 - DNA, 15 bp, Homo sapiens
caacaactacaaagc

SEQ ID NO: 150037 - DNA, 15 bp, Homo sapiens
aacaactacaaagcc

SEQ ID NO: 150038 - DNA, 15 bp, Homo sapiens
acaactacaaagccc

SEQ ID NO: 150039 - DNA, 15 bp, Homo sapiens
caactacaaagccct

SEQ ID NO: 150040 - DNA, 15 bp, Homo sapiens
aactacaaagccctc

SEQ ID NO: 150041 - DNA, 15 bp, Homo sapiens
actacaaagccctct

SEQ ID NO: 150042 - DNA, 15 bp, Homo sapiens
ctacaaagccctctt

SEQ ID NO: 150043 - DNA, 15 bp, Homo sapiens
tacaaagccctcttt

SEQ ID NO: 150044 - DNA, 15 bp, Homo sapiens
acaaagccctctttg

SEQ ID NO: 150045 - DNA, 15 bp, Homo sapiens
caaagccctctttgg

SEQ ID NO: 150046 - DNA, 15 bp, Homo sapiens
aaagccctctttgga

SEQ ID NO: 150047 - DNA, 15 bp, Homo sapiens
aagccctctttggag

SEQ ID NO: 150048 - DNA, 15 bp, Homo sapiens
agccctctttggagg

SEQ ID NO: 150049 - DNA, 15 bp, Homo sapiens
gccctctttggaggc

SEQ ID NO: 150050 - DNA, 15 bp, Homo sapiens
ccctctttggaggca

SEQ ID NO: 150051 - DNA, 15 bp, Homo sapiens
cctctttggaggcaa

SEQ ID NO: 150052 - DNA, 15 bp, Homo sapiens
ctctttggaggcaat

SEQ ID NO: 150053 - DNA, 15 bp, Homo sapiens
tctttggaggcaatg

SEQ ID NO: 150054 - DNA, 15 bp, Homo sapiens
ctttggaggcaatgg

SEQ ID NO: 150055 - DNA, 15 bp, Homo sapiens
tttggaggcaatggc

SEQ ID NO: 150056 - DNA, 15 bp, Homo sapiens
ttggaggcaatggca

SEQ ID NO: 150057 - DNA, 15 bp, Homo sapiens
tggaggcaatggcac

SEQ ID NO: 150058 - DNA, 15 bp, Homo sapiens
ggaggcaatggcact

SEQ ID NO: 150059 - DNA, 15 bp, Homo sapiens
gaggcaatggcactg

SEQ ID NO: 150060 - DNA, 15 bp, Homo sapiens
aggcaatggcactga

SEQ ID NO: 150061 - DNA, 15 bp, Homo sapiens
ggcaatggcactgag

SEQ ID NO: 150062 - DNA, 15 bp, Homo sapiens
gcaatggcactgagg

SEQ ID NO: 150063 - DNA, 15 bp, Homo sapiens
caatggcactgagga

SEQ ID NO: 150064 - DNA, 15 bp, Homo sapiens
aatggcactgaggaa

SEQ ID NO: 150065 - DNA, 15 bp, Homo sapiens
atggcactgaggaag

SEQ ID NO: 150066 - DNA, 15 bp, Homo sapiens
tggcactgaggaaga

SEQ ID NO: 150067 - DNA, 15 bp, Homo sapiens
ggcactgaggaagat

SEQ ID NO: 150068 - DNA, 15 bp, Homo sapiens
gcactgaggaagatg

SEQ ID NO: 150069 - DNA, 15 bp, Homo sapiens
cactgaggaagatgc

SEQ ID NO: 150070 - DNA, 15 bp, Homo sapiens
actgaggaagatgct

SEQ ID NO: 150071 - DNA, 15 bp, Homo sapiens
ctgaggaagatgctg

SEQ ID NO: 150072 - DNA, 15 bp, Homo sapiens
tgaggaagatgctga

SEQ ID NO: 150073 - DNA, 15 bp, Homo sapiens
gaggaagatgctgaa

SEQ ID NO: 150074 - DNA, 15 bp, Homo sapiens
aggaagatgctgaaa

SEQ ID NO: 150075 - DNA, 15 bp, Homo sapiens
ggaagatgctgaaac

SEQ ID NO: 150076 - DNA, 15 bp, Homo sapiens
gaagatgctgaaacc

SEQ ID NO: 150077 - DNA, 15 bp, Homo sapiens
aagatgctgaaacct

SEQ ID NO: 150078 - DNA, 15 bp, Homo sapiens
agatgctgaaacctt

SEQ ID NO: 150079 - DNA, 15 bp, Homo sapiens
gatgctgaaaccttc

SEQ ID NO: 150080 - DNA, 15 bp, Homo sapiens
atgctgaaaccttct

SEQ ID NO: 150081 - DNA, 15 bp, Homo sapiens
tgctgaaaccttcta

SEQ ID NO: 150082 - DNA, 15 bp, Homo sapiens
gctgaaaccttctat

SEQ ID NO: 150083 - DNA, 15 bp, Homo sapiens
ctgaaaccttctatg

SEQ ID NO: 150084 - DNA, 15 bp, Homo sapiens
tgaaaccttctatga

SEQ ID NO: 150085 - DNA, 15 bp, Homo sapiens
gaaaccttctatgac

SEQ ID NO: 150086 - DNA, 15 bp, Homo sapiens
aaaccttctatgaca

SEQ ID NO: 150087 - DNA, 15 bp, Homo sapiens
aaccttctatgacaa

SEQ ID NO: 150088 - DNA, 15 bp, Homo sapiens
accttctatgacaac

SEQ ID NO: 150089 - DNA, 15 bp, Homo sapiens
ccttctatgacaact

SEQ ID NO: 150090 - DNA, 15 bp, Homo sapiens
cttctatgacaactc

SEQ ID NO: 150091 - DNA, 15 bp, Homo sapiens
ttctatgacaactct

SEQ ID NO: 150092 - DNA, 15 bp, Homo sapiens
tctatgacaactcta

SEQ ID NO: 150093 - DNA, 15 bp, Homo sapiens
ctatgacaactctac

SEQ ID NO: 150094 - DNA, 15 bp, Homo sapiens
tatgacaactctaca

SEQ ID NO: 150095 - DNA, 15 bp, Homo sapiens
atgacaactctacaa

SEQ ID NO: 150096 - DNA, 15 bp, Homo sapiens
tgacaactctacaag

SEQ ID NO: 150097 - DNA, 15 bp, Homo sapiens
gacaactctacaagt

SEQ ID NO: 150098 - DNA, 15 bp, Homo sapiens
acaactctacaagtg

SEQ ID NO: 150099 - DNA, 15 bp, Homo sapiens
caactctacaagtga

SEQ ID NO: 150100 - DNA, 15 bp, Homo sapiens
aactctacaagtgag

SEQ ID NO: 150101 - DNA, 15 bp, Homo sapiens
actctacaagtgagt

SEQ ID NO: 150102 - DNA, 15 bp, Homo sapiens
ctctacaagtgagtg

SEQ ID NO: 150103 - DNA, 15 bp, Homo sapiens
tctacaagtgagtgt

SEQ ID NO: 150104 - DNA, 15 bp, Homo sapiens
ctacaagtgagtgtc

SEQ ID NO: 150105 - DNA, 15 bp, Homo sapiens
tacaagtgagtgtcc

SEQ ID NO: 150106 - DNA, 15 bp, Homo sapiens
acaagtgagtgtcca

SEQ ID NO: 150107 - DNA, 15 bp, Homo sapiens
caagtgagtgtccat

SEQ ID NO: 150108 - DNA, 15 bp, Homo sapiens
aagtgagtgtccatg

SEQ ID NO: 150109 - DNA, 15 bp, Homo sapiens
agtgagtgtccatgc

SEQ ID NO: 150110 - DNA, 15 bp, Homo sapiens
gtgagtgtccatgca

SEQ ID NO: 150111 - DNA, 15 bp, Homo sapiens
tgagtgtccatgcag

SEQ ID NO: 150112 - DNA, 15 bp, Homo sapiens
gagtgtccatgcaga

SEQ ID NO: 150113 - DNA, 15 bp, Homo sapiens
agtgtccatgcagac

SEQ ID NO: 150114 - DNA, 15 bp, Homo sapiens
gtgtccatgcagacc

SEQ ID NO: 150115 - DNA, 15 bp, Homo sapiens
tgtccatgcagaccc

SEQ ID NO: 150116 - DNA, 15 bp, Homo sapiens
gtccatgcagacccc

SEQ ID NO: 150117 - DNA, 15 bp, Homo sapiens
tccatgcagacccca

SEQ ID NO: 150118 - DNA, 15 bp, Homo sapiens
ccatgcagaccccag

SEQ ID NO: 150119 - DNA, 15 bp, Homo sapiens
catgcagaccccagc

SEQ ID NO: 150120 - DNA, 15 bp, Homo sapiens
atgcagaccccagcc

SEQ ID NO: 150121 - DNA, 15 bp, Homo sapiens
tgcagaccccagccc

SEQ ID NO: 150122 - DNA, 15 bp, Homo sapiens
gcagaccccagccct

SEQ ID NO: 150123 - DNA, 15 bp, Homo sapiens
cagaccccagccctg

SEQ ID NO: 150124 - DNA, 15 bp, Homo sapiens
agaccccagccctgt

SEQ ID NO: 150125 - DNA, 15 bp, Homo sapiens
gaccccagccctgtc

SEQ ID NO: 150126 - DNA, 15 bp, Homo sapiens
accccagccctgtcc

SEQ ID NO: 150127 - DNA, 15 bp, Homo sapiens
ccccagccctgtccc

SEQ ID NO: 150128 - DNA, 15 bp, Homo sapiens
cccagccctgtcccc

SEQ ID NO: 150129 - DNA, 15 bp, Homo sapiens
ccagccctgtcccca

SEQ ID NO: 150130 - DNA, 15 bp, Homo sapiens
cagccctgtccccaa

SEQ ID NO: 150131 - DNA, 15 bp, Homo sapiens
agccctgtccccaac

SEQ ID NO: 150132 - DNA, 15 bp, Homo sapiens
gccctgtccccaacc

SEQ ID NO: 150133 - DNA, 15 bp, Homo sapiens
ccctgtccccaaccc

SEQ ID NO: 150134 - DNA, 15 bp, Homo sapiens
cctgtccccaacccc

SEQ ID NO: 150135 - DNA, 15 bp, Homo sapiens
ctgtccccaacccca

SEQ ID NO: 150136 - DNA, 15 bp, Homo sapiens
tgtccccaaccccat

SEQ ID NO: 150137 - DNA, 15 bp, Homo sapiens
gtccccaaccccatc

SEQ ID NO: 150138 - DNA, 15 bp, Homo sapiens
tccccaaccccatcc

SEQ ID NO: 150139 - DNA, 15 bp, Homo sapiens
ccccaaccccatccc

SEQ ID NO: 150140 - DNA, 15 bp, Homo sapiens
cccaaccccatccct

SEQ ID NO: 150141 - DNA, 15 bp, Homo sapiens
ccaaccccatccctc

SEQ ID NO: 150142 - DNA, 15 bp, Homo sapiens
caaccccatccctcc

SEQ ID NO: 150143 - DNA, 15 bp, Homo sapiens
aaccccatccctccc

SEQ ID NO: 150144 - DNA, 15 bp, Homo sapiens
accccatccctccct

SEQ ID NO: 150145 - DNA, 15 bp, Homo sapiens
ccccatccctccctt

SEQ ID NO: 150146 - DNA, 15 bp, Homo sapiens
cccatccctccctta

SEQ ID NO: 150147 - DNA, 15 bp, Homo sapiens
ccatccctcccttag

SEQ ID NO: 150148 - DNA, 15 bp, Homo sapiens
catccctcccttagt

SEQ ID NO: 150149 - DNA, 15 bp, Homo sapiens
atccctcccttagtt

SEQ ID NO: 150150 - DNA, 15 bp, Homo sapiens
tccctcccttagttc

SEQ ID NO: 150151 - DNA, 15 bp, Homo sapiens
ccctcccttagttct

SEQ ID NO: 150152 - DNA, 15 bp, Homo sapiens
cctcccttagttctg

SEQ ID NO: 150153 - DNA, 15 bp, Homo sapiens
ctcccttagttctgg

SEQ ID NO: 150154 - DNA, 15 bp, Homo sapiens
tcccttagttctggc

SEQ ID NO: 150155 - DNA, 15 bp, Homo sapiens
cccttagttctggcc

SEQ ID NO: 150156 - DNA, 15 bp, Homo sapiens
ccttagttctggcct

SEQ ID NO: 150157 - DNA, 15 bp, Homo sapiens
cttagttctggcctt

SEQ ID NO: 150158 - DNA, 15 bp, Homo sapiens
ttagttctggccttg

SEQ ID NO: 150159 - DNA, 15 bp, Homo sapiens
tagttctggccttgg

SEQ ID NO: 150160 - DNA, 15 bp, Homo sapiens
agttctggccttggc

SEQ ID NO: 150161 - DNA, 15 bp, Homo sapiens
gttctggccttggcc

SEQ ID NO: 150162 - DNA, 15 bp, Homo sapiens
ttctggccttggcct

SEQ ID NO: 150163 - DNA, 15 bp, Homo sapiens
tctggccttggcctg

SEQ ID NO: 150164 - DNA, 15 bp, Homo sapiens
ctggccttggcctgt

SEQ ID NO: 150165 - DNA, 15 bp, Homo sapiens
tggccttggcctgtg

SEQ ID NO: 150166 - DNA, 15 bp, Homo sapiens
ggccttggcctgtgt

SEQ ID NO: 150167 - DNA, 15 bp, Homo sapiens
gccttggcctgtgtc

SEQ ID NO: 150168 - DNA, 15 bp, Homo sapiens
ccttggcctgtgtca

SEQ ID NO: 150169 - DNA, 15 bp, Homo sapiens
cttggcctgtgtcat

SEQ ID NO: 150170 - DNA, 15 bp, Homo sapiens
ttggcctgtgtcatc

SEQ ID NO: 150171 - DNA, 15 bp, Homo sapiens
tggcctgtgtcatct

SEQ ID NO: 150172 - DNA, 15 bp, Homo sapiens
ggcctgtgtcatctc

SEQ ID NO: 150173 - DNA, 15 bp, Homo sapiens
gcctgtgtcatctcc

SEQ ID NO: 150174 - DNA, 15 bp, Homo sapiens
cctgtgtcatctcct

SEQ ID NO: 150175 - DNA, 15 bp, Homo sapiens
ctgtgtcatctcctc

SEQ ID NO: 150176 - DNA, 15 bp, Homo sapiens
tgtgtcatctcctcc

SEQ ID NO: 150177 - DNA, 15 bp, Homo sapiens
gtgtcatctcctccc

SEQ ID NO: 150178 - DNA, 15 bp, Homo sapiens
tgtcatctcctccct

SEQ ID NO: 150179 - DNA, 15 bp, Homo sapiens
gtcatctcctccctc

SEQ ID NO: 150180 - DNA, 15 bp, Homo sapiens
tcatctcctccctct

SEQ ID NO: 150181 - DNA, 15 bp, Homo sapiens
catctcctccctctg

SEQ ID NO: 150182 - DNA, 15 bp, Homo sapiens
atctcctccctctgt

SEQ ID NO: 150183 - DNA, 15 bp, Homo sapiens
tctcctccctctgta

SEQ ID NO: 150184 - DNA, 15 bp, Homo sapiens
ctcctccctctgtag

SEQ ID NO: 150185 - DNA, 15 bp, Homo sapiens
tcctccctctgtagc

SEQ ID NO: 150186 - DNA, 15 bp, Homo sapiens
cctccctctgtagca

SEQ ID NO: 150187 - DNA, 15 bp, Homo sapiens
ctccctctgtagcag

SEQ ID NO: 150188 - DNA, 15 bp, Homo sapiens
tccctctgtagcagc

SEQ ID NO: 150189 - DNA, 15 bp, Homo sapiens
ccctctgtagcagcg

SEQ ID NO: 150190 - DNA, 15 bp, Homo sapiens
cctctgtagcagcgt

SEQ ID NO: 150191 - DNA, 15 bp, Homo sapiens
ctctgtagcagcgtt

SEQ ID NO: 150192 - DNA, 15 bp, Homo sapiens
tctgtagcagcgtta

SEQ ID NO: 150193 - DNA, 15 bp, Homo sapiens
ctgtagcagcgttag

SEQ ID NO: 150194 - DNA, 15 bp, Homo sapiens
tgtagcagcgttaga

SEQ ID NO: 150195 - DNA, 15 bp, Homo sapiens
gtagcagcgttagat

SEQ ID NO: 150196 - DNA, 15 bp, Homo sapiens
tagcagcgttagatg

SEQ ID NO: 150197 - DNA, 15 bp, Homo sapiens
agcagcgttagatgt

SEQ ID NO: 150198 - DNA, 15 bp, Homo sapiens
gcagcgttagatgtc

SEQ ID NO: 150199 - DNA, 15 bp, Homo sapiens
cagcgttagatgtct

SEQ ID NO: 150200 - DNA, 15 bp, Homo sapiens
agcgttagatgtcta

SEQ ID NO: 150201 - DNA, 15 bp, Homo sapiens
gcgttagatgtctac

SEQ ID NO: 150202 - DNA, 15 bp, Homo sapiens
cgttagatgtctaca

SEQ ID NO: 150203 - DNA, 15 bp, Homo sapiens
gttagatgtctacat

SEQ ID NO: 150204 - DNA, 15 bp, Homo sapiens
ttagatgtctacatg

SEQ ID NO: 150205 - DNA, 15 bp, Homo sapiens
tagatgtctacatgc

SEQ ID NO: 150206 - DNA, 15 bp, Homo sapiens
agatgtctacatgcc

SEQ ID NO: 150207 - DNA, 15 bp, Homo sapiens
gatgtctacatgccc

SEQ ID NO: 150208 - DNA, 15 bp, Homo sapiens
atgtctacatgccca

SEQ ID NO: 150209 - DNA, 15 bp, Homo sapiens
tgtctacatgcccat

SEQ ID NO: 150210 - DNA, 15 bp, Homo sapiens
gtctacatgcccatt

SEQ ID NO: 150211 - DNA, 15 bp, Homo sapiens
tctacatgcccattt

SEQ ID NO: 150212 - DNA, 15 bp, Homo sapiens
ctacatgcccatttg

SEQ ID NO: 150213 - DNA, 15 bp, Homo sapiens
tacatgcccatttgc

SEQ ID NO: 150214 - DNA, 15 bp, Homo sapiens
acatgcccatttgcc

SEQ ID NO: 150215 - DNA, 15 bp, Homo sapiens
catgcccatttgccc

SEQ ID NO: 150216 - DNA, 15 bp, Homo sapiens
atgcccatttgccca

SEQ ID NO: 150217 - DNA, 15 bp, Homo sapiens
tgcccatttgcccac

SEQ ID NO: 150218 - DNA, 15 bp, Homo sapiens
gcccatttgcccacc

SEQ ID NO: 150219 - DNA, 15 bp, Homo sapiens
cccatttgcccacca

SEQ ID NO: 150220 - DNA, 15 bp, Homo sapiens
ccatttgcccaccag

SEQ ID NO: 150221 - DNA, 15 bp, Homo sapiens
catttgcccaccaga

SEQ ID NO: 150222 - DNA, 15 bp, Homo sapiens
atttgcccaccagac

SEQ ID NO: 150223 - DNA, 15 bp, Homo sapiens
tttgcccaccagact

SEQ ID NO: 150224 - DNA, 15 bp, Homo sapiens
ttgcccaccagactg

SEQ ID NO: 150225 - DNA, 15 bp, Homo sapiens
tgcccaccagactga

SEQ ID NO: 150226 - DNA, 15 bp, Homo sapiens
gcccaccagactgag

SEQ ID NO: 150227 - DNA, 15 bp, Homo sapiens
cccaccagactgagc

SEQ ID NO: 150228 - DNA, 15 bp, Homo sapiens
ccaccagactgagct

SEQ ID NO: 150229 - DNA, 15 bp, Homo sapiens
caccagactgagctc

SEQ ID NO: 150230 - DNA, 15 bp, Homo sapiens
accagactgagctct

SEQ ID NO: 150231 - DNA, 15 bp, Homo sapiens
ccagactgagctctt

SEQ ID NO: 150232 - DNA, 15 bp, Homo sapiens
cagactgagctcttc

SEQ ID NO: 150233 - DNA, 15 bp, Homo sapiens
agactgagctcttcc

SEQ ID NO: 150234 - DNA, 15 bp, Homo sapiens
gactgagctcttcct

SEQ ID NO: 150235 - DNA, 15 bp, Homo sapiens
actgagctcttccta

SEQ ID NO: 150236 - DNA, 15 bp, Homo sapiens
ctgagctcttcctag

SEQ ID NO: 150237 - DNA, 15 bp, Homo sapiens
tgagctcttcctaga

SEQ ID NO: 150238 - DNA, 15 bp, Homo sapiens
gagctcttcctagag

SEQ ID NO: 150239 - DNA, 15 bp, Homo sapiens
agctcttcctagagg

SEQ ID NO: 150240 - DNA, 15 bp, Homo sapiens
gctcttcctagagga

SEQ ID NO: 150241 - DNA, 15 bp, Homo sapiens
ctcttcctagaggag

SEQ ID NO: 150242 - DNA, 15 bp, Homo sapiens
tcttcctagaggaga

SEQ ID NO: 150243 - DNA, 15 bp, Homo sapiens
cttcctagaggagag

SEQ ID NO: 150244 - DNA, 15 bp, Homo sapiens
ttcctagaggagaga

SEQ ID NO: 150245 - DNA, 15 bp, Homo sapiens
tcctagaggagagag

SEQ ID NO: 150246 - DNA, 15 bp, Homo sapiens
cctagaggagagagg

SEQ ID NO: 150247 - DNA, 15 bp, Homo sapiens
ctagaggagagaggc

SEQ ID NO: 150248 - DNA, 15 bp, Homo sapiens
tagaggagagaggct

SEQ ID NO: 150249 - DNA, 15 bp, Homo sapiens
agaggagagaggctt

SEQ ID NO: 150250 - DNA, 15 bp, Homo sapiens
gaggagagaggcttc

SEQ ID NO: 150251 - DNA, 15 bp, Homo sapiens
aggagagaggcttct

SEQ ID NO: 150252 - DNA, 15 bp, Homo sapiens
ggagagaggcttctc

SEQ ID NO: 150253 - DNA, 15 bp, Homo sapiens
gagagaggcttctct

SEQ ID NO: 150254 - DNA, 15 bp, Homo sapiens
agagaggcttctctt

SEQ ID NO: 150255 - DNA, 15 bp, Homo sapiens
gagaggcttctcttg

SEQ ID NO: 150256 - DNA, 15 bp, Homo sapiens
agaggcttctcttga

SEQ ID NO: 150257 - DNA, 15 bp, Homo sapiens
gaggcttctcttgaa

SEQ ID NO: 150258 - DNA, 15 bp, Homo sapiens
aggcttctcttgaat

SEQ ID NO: 150259 - DNA, 15 bp, Homo sapiens
ggcttctcttgaata

SEQ ID NO: 150260 - DNA, 15 bp, Homo sapiens
gcttctcttgaatag

SEQ ID NO: 150261 - DNA, 15 bp, Homo sapiens
cttctcttgaatagc

SEQ ID NO: 150262 - DNA, 15 bp, Homo sapiens
ttctcttgaatagct

SEQ ID NO: 150263 - DNA, 15 bp, Homo sapiens
tctcttgaatagcta

SEQ ID NO: 150264 - DNA, 15 bp, Homo sapiens
ctcttgaatagctac

SEQ ID NO: 150265 - DNA, 15 bp, Homo sapiens
tcttgaatagctacc

SEQ ID NO: 150266 - DNA, 15 bp, Homo sapiens
cttgaatagctacct

SEQ ID NO: 150267 - DNA, 15 bp, Homo sapiens
ttgaatagctacctg

SEQ ID NO: 150268 - DNA, 15 bp, Homo sapiens
tgaatagctacctgt

SEQ ID NO: 150269 - DNA, 15 bp, Homo sapiens
gaatagctacctgtc

SEQ ID NO: 150270 - DNA, 15 bp, Homo sapiens
aatagctacctgtcc

SEQ ID NO: 150271 - DNA, 15 bp, Homo sapiens
atagctacctgtccc

SEQ ID NO: 150272 - DNA, 15 bp, Homo sapiens
tagctacctgtcccc

SEQ ID NO: 150273 - DNA, 15 bp, Homo sapiens
agctacctgtcccca

SEQ ID NO: 150274 - DNA, 15 bp, Homo sapiens
gctacctgtccccag

SEQ ID NO: 150275 - DNA, 15 bp, Homo sapiens
ctacctgtccccagt

SEQ ID NO: 150276 - DNA, 15 bp, Homo sapiens
tacctgtccccagtt

SEQ ID NO: 150277 - DNA, 15 bp, Homo sapiens
acctgtccccagttc

SEQ ID NO: 150278 - DNA, 15 bp, Homo sapiens
cctgtccccagttct

SEQ ID NO: 150279 - DNA, 15 bp, Homo sapiens
ctgtccccagttctc

SEQ ID NO: 150280 - DNA, 15 bp, Homo sapiens
tgtccccagttctct

SEQ ID NO: 150281 - DNA, 15 bp, Homo sapiens
gtccccagttctctg

SEQ ID NO: 150282 - DNA, 15 bp, Homo sapiens
tccccagttctctga

SEQ ID NO: 150283 - DNA, 15 bp, Homo sapiens
ccccagttctctgaa

SEQ ID NO: 150284 - DNA, 15 bp, Homo sapiens
cccagttctctgaat

SEQ ID NO: 150285 - DNA, 15 bp, Homo sapiens
ccagttctctgaatg

SEQ ID NO: 150286 - DNA, 15 bp, Homo sapiens
cagttctctgaatgc

SEQ ID NO: 150287 - DNA, 15 bp, Homo sapiens
agttctctgaatgca

SEQ ID NO: 150288 - DNA, 15 bp, Homo sapiens
gttctctgaatgcag

SEQ ID NO: 150289 - DNA, 15 bp, Homo sapiens
ttctctgaatgcagc

SEQ ID NO: 150290 - DNA, 15 bp, Homo sapiens
tctctgaatgcagcc

SEQ ID NO: 150291 - DNA, 15 bp, Homo sapiens
ctctgaatgcagcct

SEQ ID NO: 150292 - DNA, 15 bp, Homo sapiens
tctgaatgcagcctg

SEQ ID NO: 150293 - DNA, 15 bp, Homo sapiens
ctgaatgcagcctgg

SEQ ID NO: 150294 - DNA, 15 bp, Homo sapiens
tgaatgcagcctggc

SEQ ID NO: 150295 - DNA, 15 bp, Homo sapiens
gaatgcagcctggca

SEQ ID NO: 150296 - DNA, 15 bp, Homo sapiens
aatgcagcctggcac

SEQ ID NO: 150297 - DNA, 15 bp, Homo sapiens
atgcagcctggcaca

SEQ ID NO: 150298 - DNA, 15 bp, Homo sapiens
tgcagcctggcacat

SEQ ID NO: 150299 - DNA, 15 bp, Homo sapiens
gcagcctggcacatc

SEQ ID NO: 150300 - DNA, 15 bp, Homo sapiens
cagcctggcacatct

SEQ ID NO: 150301 - DNA, 15 bp, Homo sapiens
agcctggcacatctc

SEQ ID NO: 150302 - DNA, 15 bp, Homo sapiens
gcctggcacatctca

SEQ ID NO: 150303 - DNA, 15 bp, Homo sapiens
cctggcacatctcag

SEQ ID NO: 150304 - DNA, 15 bp, Homo sapiens
ctggcacatctcagg

SEQ ID NO: 150305 - DNA, 15 bp, Homo sapiens
tggcacatctcaggt

SEQ ID NO: 150306 - DNA, 15 bp, Homo sapiens
ggcacatctcaggtg

SEQ ID NO: 150307 - DNA, 15 bp, Homo sapiens
gcacatctcaggtgc

SEQ ID NO: 150308 - DNA, 15 bp, Homo sapiens
cacatctcaggtgca

SEQ ID NO: 150309 - DNA, 15 bp, Homo sapiens
acatctcaggtgcac

SEQ ID NO: 150310 - DNA, 15 bp, Homo sapiens
catctcaggtgcaca

SEQ ID NO: 150311 - DNA, 15 bp, Homo sapiens
atctcaggtgcacag

SEQ ID NO: 150312 - DNA, 15 bp, Homo sapiens
tctcaggtgcacagt

SEQ ID NO: 150313 - DNA, 15 bp, Homo sapiens
ctcaggtgcacagta

SEQ ID NO: 150314 - DNA, 15 bp, Homo sapiens
tcaggtgcacagtag

SEQ ID NO: 150315 - DNA, 15 bp, Homo sapiens
caggtgcacagtagt

SEQ ID NO: 150316 - DNA, 15 bp, Homo sapiens
aggtgcacagtagtg

SEQ ID NO: 150317 - DNA, 15 bp, Homo sapiens
ggtgcacagtagtgt

SEQ ID NO: 150318 - DNA, 15 bp, Homo sapiens
gtgcacagtagtgtt

SEQ ID NO: 150319 - DNA, 15 bp, Homo sapiens
tgcacagtagtgttt

SEQ ID NO: 150320 - DNA, 15 bp, Homo sapiens
gcacagtagtgttta

SEQ ID NO: 150321 - DNA, 15 bp, Homo sapiens
cacagtagtgtttat

SEQ ID NO: 150322 - DNA, 15 bp, Homo sapiens
acagtagtgtttatc

SEQ ID NO: 150323 - DNA, 15 bp, Homo sapiens
cagtagtgtttatca

SEQ ID NO: 150324 - DNA, 15 bp, Homo sapiens
agtagtgtttatcaa

SEQ ID NO: 150325 - DNA, 15 bp, Homo sapiens
gtagtgtttatcaat

SEQ ID NO: 150326 - DNA, 15 bp, Homo sapiens
tagtgtttatcaatg

SEQ ID NO: 150327 - DNA, 15 bp, Homo sapiens
agtgtttatcaatgg

SEQ ID NO: 150328 - DNA, 15 bp, Homo sapiens
gtgtttatcaatgga

SEQ ID NO: 150329 - DNA, 15 bp, Homo sapiens
tgtttatcaatggaa

SEQ ID NO: 150330 - DNA, 15 bp, Homo sapiens
gtttatcaatggaat

SEQ ID NO: 150331 - DNA, 15 bp, Homo sapiens
tttatcaatggaatg

SEQ ID NO: 150332 - DNA, 15 bp, Homo sapiens
ttatcaatggaatga

SEQ ID NO: 150333 - DNA, 15 bp, Homo sapiens
tatcaatggaatgaa

SEQ ID NO: 150334 - DNA, 15 bp, Homo sapiens
atcaatggaatgaat

SEQ ID NO: 150335 - DNA, 15 bp, Homo sapiens
tcaatggaatgaatg

SEQ ID NO: 150336 - DNA, 15 bp, Homo sapiens
caatggaatgaatga

SEQ ID NO: 150337 - DNA, 15 bp, Homo sapiens
aatggaatgaatgat

SEQ ID NO: 150338 - DNA, 15 bp, Homo sapiens
atggaatgaatgatt

SEQ ID NO: 150339 - DNA, 15 bp, Homo sapiens
tggaatgaatgattg

SEQ ID NO: 150340 - DNA, 15 bp, Homo sapiens
ggaatgaatgattga

SEQ ID NO: 150341 - DNA, 15 bp, Homo sapiens
gaatgaatgattgac

SEQ ID NO: 150342 - DNA, 15 bp, Homo sapiens
aatgaatgattgaca

SEQ ID NO: 150343 - DNA, 15 bp, Homo sapiens
atgaatgattgacag

SEQ ID NO: 150344 - DNA, 15 bp, Homo sapiens
tgaatgattgacagc

SEQ ID NO: 150345 - DNA, 15 bp, Homo sapiens
gaatgattgacagcc

SEQ ID NO: 150346 - DNA, 15 bp, Homo sapiens
aatgattgacagcca

SEQ ID NO: 150347 - DNA, 15 bp, Homo sapiens
atgattgacagccaa

SEQ ID NO: 150348 - DNA, 15 bp, Homo sapiens
tgattgacagccaac

SEQ ID NO: 150349 - DNA, 15 bp, Homo sapiens
gattgacagccaacc

SEQ ID NO: 150350 - DNA, 15 bp, Homo sapiens
attgacagccaacct

SEQ ID NO: 150351 - DNA, 15 bp, Homo sapiens
ttgacagccaacctt

SEQ ID NO: 150352 - DNA, 15 bp, Homo sapiens
tgacagccaaccttc

SEQ ID NO: 150353 - DNA, 15 bp, Homo sapiens
gacagccaaccttct

SEQ ID NO: 150354 - DNA, 15 bp, Homo sapiens
acagccaaccttctg

SEQ ID NO: 150355 - DNA, 15 bp, Homo sapiens
cagccaaccttctgg

SEQ ID NO: 150356 - DNA, 15 bp, Homo sapiens
agccaaccttctggt

SEQ ID NO: 150357 - DNA, 15 bp, Homo sapiens
gccaaccttctggtt

SEQ ID NO: 150358 - DNA, 15 bp, Homo sapiens
ccaaccttctggttt

SEQ ID NO: 150359 - DNA, 15 bp, Homo sapiens
caaccttctggtttt

SEQ ID NO: 150360 - DNA, 15 bp, Homo sapiens
aaccttctggttttc

SEQ ID NO: 150361 - DNA, 15 bp, Homo sapiens
accttctggttttct

SEQ ID NO: 150362 - DNA, 15 bp, Homo sapiens
ccttctggttttctg

SEQ ID NO: 150363 - DNA, 15 bp, Homo sapiens
cttctggttttctgg

SEQ ID NO: 150364 - DNA, 15 bp, Homo sapiens
ttctggttttctggg

SEQ ID NO: 150365 - DNA, 15 bp, Homo sapiens
tctggttttctgggg

SEQ ID NO: 150366 - DNA, 15 bp, Homo sapiens
ctggttttctggggg

SEQ ID NO: 150367 - DNA, 15 bp, Homo sapiens
tggttttctggggga

SEQ ID NO: 150368 - DNA, 15 bp, Homo sapiens
ggttttctgggggat

SEQ ID NO: 150369 - DNA, 15 bp, Homo sapiens
gttttctgggggatg

SEQ ID NO: 150370 - DNA, 15 bp, Homo sapiens
ttttctgggggatgt

SEQ ID NO: 150371 - DNA, 15 bp, Homo sapiens
tttctgggggatgtg

SEQ ID NO: 150372 - DNA, 15 bp, Homo sapiens
ttctgggggatgtgg

SEQ ID NO: 150373 - DNA, 15 bp, Homo sapiens
tctgggggatgtgga

SEQ ID NO: 150374 - DNA, 15 bp, Homo sapiens
ctgggggatgtggaa

SEQ ID NO: 150375 - DNA, 15 bp, Homo sapiens
tgggggatgtggaag

SEQ ID NO: 150376 - DNA, 15 bp, Homo sapiens
gggggatgtggaagg

SEQ ID NO: 150377 - DNA, 15 bp, Homo sapiens
ggggatgtggaaggg

SEQ ID NO: 150378 - DNA, 15 bp, Homo sapiens
gggatgtggaagggt

SEQ ID NO: 150379 - DNA, 15 bp, Homo sapiens
ggatgtggaagggtg

SEQ ID NO: 150380 - DNA, 15 bp, Homo sapiens
gatgtggaagggtgg

SEQ ID NO: 150381 - DNA, 15 bp, Homo sapiens
atgtggaagggtggc

SEQ ID NO: 150382 - DNA, 15 bp, Homo sapiens
tgtggaagggtggct

SEQ ID NO: 150383 - DNA, 15 bp, Homo sapiens
gtggaagggtggctt

SEQ ID NO: 150384 - DNA, 15 bp, Homo sapiens
tggaagggtggcttc

SEQ ID NO: 150385 - DNA, 15 bp, Homo sapiens
ggaagggtggcttcc

SEQ ID NO: 150386 - DNA, 15 bp, Homo sapiens
gaagggtggcttcca

SEQ ID NO: 150387 - DNA, 15 bp, Homo sapiens
aagggtggcttccag

SEQ ID NO: 150388 - DNA, 15 bp, Homo sapiens
agggtggcttccagg

SEQ ID NO: 150389 - DNA, 15 bp, Homo sapiens
gggtggcttccaggg

SEQ ID NO: 150390 - DNA, 15 bp, Homo sapiens
ggtggcttccagggt

SEQ ID NO: 150391 - DNA, 15 bp, Homo sapiens
gtggcttccagggtg

SEQ ID NO: 150392 - DNA, 15 bp, Homo sapiens
tggcttccagggtga

SEQ ID NO: 150393 - DNA, 15 bp, Homo sapiens
ggcttccagggtgat

SEQ ID NO: 150394 - DNA, 15 bp, Homo sapiens
gcttccagggtgatc

SEQ ID NO: 150395 - DNA, 15 bp, Homo sapiens
cttccagggtgatca

SEQ ID NO: 150396 - DNA, 15 bp, Homo sapiens
ttccagggtgatcaa

SEQ ID NO: 150397 - DNA, 15 bp, Homo sapiens
tccagggtgatcaag

SEQ ID NO: 150398 - DNA, 15 bp, Homo sapiens
ccagggtgatcaaga

SEQ ID NO: 150399 - DNA, 15 bp, Homo sapiens
cagggtgatcaagaa

SEQ ID NO: 150400 - DNA, 15 bp, Homo sapiens
agggtgatcaagaat

SEQ ID NO: 150401 - DNA, 15 bp, Homo sapiens
gggtgatcaagaatg

SEQ ID NO: 150402 - DNA, 15 bp, Homo sapiens
ggtgatcaagaatga

SEQ ID NO: 150403 - DNA, 15 bp, Homo sapiens
gtgatcaagaatgag

SEQ ID NO: 150404 - DNA, 15 bp, Homo sapiens
tgatcaagaatgaga

SEQ ID NO: 150405 - DNA, 15 bp, Homo sapiens
gatcaagaatgagat

SEQ ID NO: 150406 - DNA, 15 bp, Homo sapiens
atcaagaatgagata

SEQ ID NO: 150407 - DNA, 15 bp, Homo sapiens
tcaagaatgagataa

SEQ ID NO: 150408 - DNA, 15 bp, Homo sapiens
caagaatgagataat

SEQ ID NO: 150409 - DNA, 15 bp, Homo sapiens
aagaatgagataatg

SEQ ID NO: 150410 - DNA, 15 bp, Homo sapiens
agaatgagataatgg

SEQ ID NO: 150411 - DNA, 15 bp, Homo sapiens
gaatgagataatggc

SEQ ID NO: 150412 - DNA, 15 bp, Homo sapiens
aatgagataatggca

SEQ ID NO: 150413 - DNA, 15 bp, Homo sapiens
atgagataatggcag

SEQ ID NO: 150414 - DNA, 15 bp, Homo sapiens
tgagataatggcaga

SEQ ID NO: 150415 - DNA, 15 bp, Homo sapiens
gagataatggcagaa

SEQ ID NO: 150416 - DNA, 15 bp, Homo sapiens
agataatggcagaag

SEQ ID NO: 150417 - DNA, 15 bp, Homo sapiens
gataatggcagaagg

SEQ ID NO: 150418 - DNA, 15 bp, Homo sapiens
ataatggcagaagga

SEQ ID NO: 150419 - DNA, 15 bp, Homo sapiens
taatggcagaaggac

SEQ ID NO: 150420 - DNA, 15 bp, Homo sapiens
aatggcagaaggaca

SEQ ID NO: 150421 - DNA, 15 bp, Homo sapiens
atggcagaaggacaa

SEQ ID NO: 150422 - DNA, 15 bp, Homo sapiens
tggcagaaggacaaa

SEQ ID NO: 150423 - DNA, 15 bp, Homo sapiens
ggcagaaggacaaat

SEQ ID NO: 150424 - DNA, 15 bp, Homo sapiens
gcagaaggacaaatc

SEQ ID NO: 150425 - DNA, 15 bp, Homo sapiens
cagaaggacaaatcc

SEQ ID NO: 150426 - DNA, 15 bp, Homo sapiens
agaaggacaaatcct

SEQ ID NO: 150427 - DNA, 15 bp, Homo sapiens
gaaggacaaatcctg

SEQ ID NO: 150428 - DNA, 15 bp, Homo sapiens
aaggacaaatcctgc

SEQ ID NO: 150429 - DNA, 15 bp, Homo sapiens
aggacaaatcctgca

SEQ ID NO: 150430 - DNA, 15 bp, Homo sapiens
ggacaaatcctgcaa

SEQ ID NO: 150431 - DNA, 15 bp, Homo sapiens
gacaaatcctgcaag

SEQ ID NO: 150432 - DNA, 15 bp, Homo sapiens
acaaatcctgcaaga

SEQ ID NO: 150433 - DNA, 15 bp, Homo sapiens
caaatcctgcaagat

SEQ ID NO: 150434 - DNA, 15 bp, Homo sapiens
aaatcctgcaagatc

SEQ ID NO: 150435 - DNA, 15 bp, Homo sapiens
aatcctgcaagatct

SEQ ID NO: 150436 - DNA, 15 bp, Homo sapiens
atcctgcaagatctc

SEQ ID NO: 150437 - DNA, 15 bp, Homo sapiens
tcctgcaagatctca

SEQ ID NO: 150438 - DNA, 15 bp, Homo sapiens
cctgcaagatctcac

SEQ ID NO: 150439 - DNA, 15 bp, Homo sapiens
ctgcaagatctcact

SEQ ID NO: 150440 - DNA, 15 bp, Homo sapiens
tgcaagatctcactt

SEQ ID NO: 150441 - DNA, 15 bp, Homo sapiens
gcaagatctcactta

SEQ ID NO: 150442 - DNA, 15 bp, Homo sapiens
caagatctcacttat

SEQ ID NO: 150443 - DNA, 15 bp, Homo sapiens
aagatctcacttata

SEQ ID NO: 150444 - DNA, 15 bp, Homo sapiens
agatctcacttatat

SEQ ID NO: 150445 - DNA, 15 bp, Homo sapiens
gatctcacttatata

SEQ ID NO: 150446 - DNA, 15 bp, Homo sapiens
atctcacttatatat

SEQ ID NO: 150447 - DNA, 15 bp, Homo sapiens
tctcacttatatatg

SEQ ID NO: 150448 - DNA, 15 bp, Homo sapiens
ctcacttatatatgg

SEQ ID NO: 150449 - DNA, 15 bp, Homo sapiens
tcacttatatatgga

SEQ ID NO: 150450 - DNA, 15 bp, Homo sapiens
cacttatatatggaa

SEQ ID NO: 150451 - DNA, 15 bp, Homo sapiens
acttatatatggaat

SEQ ID NO: 150452 - DNA, 15 bp, Homo sapiens
cttatatatggaata

SEQ ID NO: 150453 - DNA, 15 bp, Homo sapiens
ttatatatggaatat

SEQ ID NO: 150454 - DNA, 15 bp, Homo sapiens
tatatatggaatata

SEQ ID NO: 150455 - DNA, 15 bp, Homo sapiens
atatatggaatatat

SEQ ID NO: 150456 - DNA, 15 bp, Homo sapiens
tatatggaatatatg

SEQ ID NO: 150457 - DNA, 15 bp, Homo sapiens
atatggaatatatgt

SEQ ID NO: 150458 - DNA, 15 bp, Homo sapiens
tatggaatatatgta

SEQ ID NO: 150459 - DNA, 15 bp, Homo sapiens
atggaatatatgtaa

SEQ ID NO: 150460 - DNA, 15 bp, Homo sapiens
tggaatatatgtaag

SEQ ID NO: 150461 - DNA, 15 bp, Homo sapiens
ggaatatatgtaagg

SEQ ID NO: 150462 - DNA, 15 bp, Homo sapiens
gaatatatgtaaggt

SEQ ID NO: 150463 - DNA, 15 bp, Homo sapiens
aatatatgtaaggta

SEQ ID NO: 150464 - DNA, 15 bp, Homo sapiens
atatatgtaaggtag

SEQ ID NO: 150465 - DNA, 15 bp, Homo sapiens
tatatgtaaggtaga

SEQ ID NO: 150466 - DNA, 15 bp, Homo sapiens
atatgtaaggtagaa

SEQ ID NO: 150467 - DNA, 15 bp, Homo sapiens
tatgtaaggtagaaa

SEQ ID NO: 150468 - DNA, 15 bp, Homo sapiens
atgtaaggtagaaag

SEQ ID NO: 150469 - DNA, 15 bp, Homo sapiens
tgtaaggtagaaagt

SEQ ID NO: 150470 - DNA, 15 bp, Homo sapiens
gtaaggtagaaagtg

SEQ ID NO: 150471 - DNA, 15 bp, Homo sapiens
taaggtagaaagtgt

SEQ ID NO: 150472 - DNA, 15 bp, Homo sapiens
aaggtagaaagtgtc

SEQ ID NO: 150473 - DNA, 15 bp, Homo sapiens
aggtagaaagtgtca

SEQ ID NO: 150474 - DNA, 15 bp, Homo sapiens
ggtagaaagtgtcag

SEQ ID NO: 150475 - DNA, 15 bp, Homo sapiens
gtagaaagtgtcagt

SEQ ID NO: 150476 - DNA, 15 bp, Homo sapiens
tagaaagtgtcagtt

SEQ ID NO: 150477 - DNA, 15 bp, Homo sapiens
agaaagtgtcagttt

SEQ ID NO: 150478 - DNA, 15 bp, Homo sapiens
gaaagtgtcagtttc

SEQ ID NO: 150479 - DNA, 15 bp, Homo sapiens
aaagtgtcagtttca

SEQ ID NO: 150480 - DNA, 15 bp, Homo sapiens
aagtgtcagtttcac

SEQ ID NO: 150481 - DNA, 15 bp, Homo sapiens
agtgtcagtttcaca

SEQ ID NO: 150482 - DNA, 15 bp, Homo sapiens
gtgtcagtttcacat

SEQ ID NO: 150483 - DNA, 15 bp, Homo sapiens
tgtcagtttcacatg

SEQ ID NO: 150484 - DNA, 15 bp, Homo sapiens
gtcagtttcacatga

SEQ ID NO: 150485 - DNA, 15 bp, Homo sapiens
tcagtttcacatgat

SEQ ID NO: 150486 - DNA, 15 bp, Homo sapiens
cagtttcacatgatg

SEQ ID NO: 150487 - DNA, 15 bp, Homo sapiens
agtttcacatgatga

SEQ ID NO: 150488 - DNA, 15 bp, Homo sapiens
gtttcacatgatgaa

SEQ ID NO: 150489 - DNA, 15 bp, Homo sapiens
tttcacatgatgaat

SEQ ID NO: 150490 - DNA, 15 bp, Homo sapiens
ttcacatgatgaata

SEQ ID NO: 150491 - DNA, 15 bp, Homo sapiens
tcacatgatgaataa

SEQ ID NO: 150492 - DNA, 15 bp, Homo sapiens
cacatgatgaataag

SEQ ID NO: 150493 - DNA, 15 bp, Homo sapiens
acatgatgaataagt

SEQ ID NO: 150494 - DNA, 15 bp, Homo sapiens
catgatgaataagtt

SEQ ID NO: 150495 - DNA, 15 bp, Homo sapiens
atgatgaataagttc

SEQ ID NO: 150496 - DNA, 15 bp, Homo sapiens
tgatgaataagttcc

SEQ ID NO: 150497 - DNA, 15 bp, Homo sapiens
gatgaataagttcct

SEQ ID NO: 150498 - DNA, 15 bp, Homo sapiens
atgaataagttcctg

SEQ ID NO: 150499 - DNA, 15 bp, Homo sapiens
tgaataagttcctgg

SEQ ID NO: 150500 - DNA, 15 bp, Homo sapiens
gaataagttcctggg

SEQ ID NO: 150501 - DNA, 15 bp, Homo sapiens
aataagttcctggga

SEQ ID NO: 150502 - DNA, 15 bp, Homo sapiens
ataagttcctgggat

SEQ ID NO: 150503 - DNA, 15 bp, Homo sapiens
taagttcctgggatc

SEQ ID NO: 150504 - DNA, 15 bp, Homo sapiens
aagttcctgggatct

SEQ ID NO: 150505 - DNA, 15 bp, Homo sapiens
agttcctgggatctt

SEQ ID NO: 150506 - DNA, 15 bp, Homo sapiens
gttcctgggatcttg

SEQ ID NO: 150507 - DNA, 15 bp, Homo sapiens
ttcctgggatcttga

SEQ ID NO: 150508 - DNA, 15 bp, Homo sapiens
tcctgggatcttgat

SEQ ID NO: 150509 - DNA, 15 bp, Homo sapiens
cctgggatcttgatg

SEQ ID NO: 150510 - DNA, 15 bp, Homo sapiens
ctgggatcttgatgt

SEQ ID NO: 150511 - DNA, 15 bp, Homo sapiens
tgggatcttgatgta

SEQ ID NO: 150512 - DNA, 15 bp, Homo sapiens
gggatcttgatgtac

SEQ ID NO: 150513 - DNA, 15 bp, Homo sapiens
ggatcttgatgtaca

SEQ ID NO: 150514 - DNA, 15 bp, Homo sapiens
gatcttgatgtacat

SEQ ID NO: 150515 - DNA, 15 bp, Homo sapiens
atcttgatgtacatc

SEQ ID NO: 150516 - DNA, 15 bp, Homo sapiens
tcttgatgtacatcg

SEQ ID NO: 150517 - DNA, 15 bp, Homo sapiens
cttgatgtacatcgt

SEQ ID NO: 150518 - DNA, 15 bp, Homo sapiens
ttgatgtacatcgtg

SEQ ID NO: 150519 - DNA, 15 bp, Homo sapiens
tgatgtacatcgtga

SEQ ID NO: 150520 - DNA, 15 bp, Homo sapiens
gatgtacatcgtgat

SEQ ID NO: 150521 - DNA, 15 bp, Homo sapiens
atgtacatcgtgatg

SEQ ID NO: 150522 - DNA, 15 bp, Homo sapiens
tgtacatcgtgatga

SEQ ID NO: 150523 - DNA, 15 bp, Homo sapiens
gtacatcgtgatgac

SEQ ID NO: 150524 - DNA, 15 bp, Homo sapiens
tacatcgtgatgact

SEQ ID NO: 150525 - DNA, 15 bp, Homo sapiens
acatcgtgatgacta

SEQ ID NO: 150526 - DNA, 15 bp, Homo sapiens
catcgtgatgactat

SEQ ID NO: 150527 - DNA, 15 bp, Homo sapiens
atcgtgatgactata

SEQ ID NO: 150528 - DNA, 15 bp, Homo sapiens
tcgtgatgactatag

SEQ ID NO: 150529 - DNA, 15 bp, Homo sapiens
cgtgatgactatagt

SEQ ID NO: 150530 - DNA, 15 bp, Homo sapiens
gtgatgactatagtt

SEQ ID NO: 150531 - DNA, 15 bp, Homo sapiens
tgatgactatagtta

SEQ ID NO: 150532 - DNA, 15 bp, Homo sapiens
gatgactatagttag

SEQ ID NO: 150533 - DNA, 15 bp, Homo sapiens
atgactatagttagt

SEQ ID NO: 150534 - DNA, 15 bp, Homo sapiens
tgactatagttagta

SEQ ID NO: 150535 - DNA, 15 bp, Homo sapiens
gactatagttagtaa

SEQ ID NO: 150536 - DNA, 15 bp, Homo sapiens
actatagttagtaac

SEQ ID NO: 150537 - DNA, 15 bp, Homo sapiens
ctatagttagtaaca

SEQ ID NO: 150538 - DNA, 15 bp, Homo sapiens
tatagttagtaacac

SEQ ID NO: 150539 - DNA, 15 bp, Homo sapiens
atagttagtaacact

SEQ ID NO: 150540 - DNA, 15 bp, Homo sapiens
tagttagtaacactg

SEQ ID NO: 150541 - DNA, 15 bp, Homo sapiens
agttagtaacactgt

SEQ ID NO: 150542 - DNA, 15 bp, Homo sapiens
gttagtaacactgta

SEQ ID NO: 150543 - DNA, 15 bp, Homo sapiens
ttagtaacactgtat

SEQ ID NO: 150544 - DNA, 15 bp, Homo sapiens
tagtaacactgtata

SEQ ID NO: 150545 - DNA, 15 bp, Homo sapiens
agtaacactgtatag

SEQ ID NO: 150546 - DNA, 15 bp, Homo sapiens
gtaacactgtatagt

SEQ ID NO: 150547 - DNA, 15 bp, Homo sapiens
taacactgtatagta

SEQ ID NO: 150548 - DNA, 15 bp, Homo sapiens
aacactgtatagtat

SEQ ID NO: 150549 - DNA, 15 bp, Homo sapiens
acactgtatagtata

SEQ ID NO: 150550 - DNA, 15 bp, Homo sapiens
cactgtatagtatac

SEQ ID NO: 150551 - DNA, 15 bp, Homo sapiens
actgtatagtatact

SEQ ID NO: 150552 - DNA, 15 bp, Homo sapiens
ctgtatagtatactt

SEQ ID NO: 150553 - DNA, 15 bp, Homo sapiens
tgtatagtatacttg

SEQ ID NO: 150554 - DNA, 15 bp, Homo sapiens
gtatagtatacttga

SEQ ID NO: 150555 - DNA, 15 bp, Homo sapiens
tatagtatacttgaa

SEQ ID NO: 150556 - DNA, 15 bp, Homo sapiens
atagtatacttgaaa

SEQ ID NO: 150557 - DNA, 15 bp, Homo sapiens
tagtatacttgaaat

SEQ ID NO: 150558 - DNA, 15 bp, Homo sapiens
agtatacttgaaatt

SEQ ID NO: 150559 - DNA, 15 bp, Homo sapiens
gtatacttgaaattt

SEQ ID NO: 150560 - DNA, 15 bp, Homo sapiens
tatacttgaaatttg

SEQ ID NO: 150561 - DNA, 15 bp, Homo sapiens
atacttgaaatttgc

SEQ ID NO: 150562 - DNA, 15 bp, Homo sapiens
tacttgaaatttgct

SEQ ID NO: 150563 - DNA, 15 bp, Homo sapiens
acttgaaatttgcta

SEQ ID NO: 150564 - DNA, 15 bp, Homo sapiens
cttgaaatttgctaa

SEQ ID NO: 150565 - DNA, 15 bp, Homo sapiens
ttgaaatttgctaag

SEQ ID NO: 150566 - DNA, 15 bp, Homo sapiens
tgaaatttgctaaga

SEQ ID NO: 150567 - DNA, 15 bp, Homo sapiens
gaaatttgctaagag

SEQ ID NO: 150568 - DNA, 15 bp, Homo sapiens
aaatttgctaagaga

SEQ ID NO: 150569 - DNA, 15 bp, Homo sapiens
aatttgctaagagag

SEQ ID NO: 150570 - DNA, 15 bp, Homo sapiens
atttgctaagagagt

SEQ ID NO: 150571 - DNA, 15 bp, Homo sapiens
tttgctaagagagta

SEQ ID NO: 150572 - DNA, 15 bp, Homo sapiens
ttgctaagagagtag

SEQ ID NO: 150573 - DNA, 15 bp, Homo sapiens
tgctaagagagtaga

SEQ ID NO: 150574 - DNA, 15 bp, Homo sapiens
gctaagagagtagat

SEQ ID NO: 150575 - DNA, 15 bp, Homo sapiens
ctaagagagtagatc

SEQ ID NO: 150576 - DNA, 15 bp, Homo sapiens
taagagagtagatcc

SEQ ID NO: 150577 - DNA, 15 bp, Homo sapiens
aagagagtagatccg

SEQ ID NO: 150578 - DNA, 15 bp, Homo sapiens
agagagtagatccga

SEQ ID NO: 150579 - DNA, 15 bp, Homo sapiens
gagagtagatccgaa

SEQ ID NO: 150580 - DNA, 15 bp, Homo sapiens
agagtagatccgaag

SEQ ID NO: 150581 - DNA, 15 bp, Homo sapiens
gagtagatccgaagt

SEQ ID NO: 150582 - DNA, 15 bp, Homo sapiens
agtagatccgaagtg

SEQ ID NO: 150583 - DNA, 15 bp, Homo sapiens
gtagatccgaagtgt

SEQ ID NO: 150584 - DNA, 15 bp, Homo sapiens
tagatccgaagtgtt

SEQ ID NO: 150585 - DNA, 15 bp, Homo sapiens
agatccgaagtgttc

SEQ ID NO: 150586 - DNA, 15 bp, Homo sapiens
gatccgaagtgttca

SEQ ID NO: 150587 - DNA, 15 bp, Homo sapiens
atccgaagtgttcac

SEQ ID NO: 150588 - DNA, 15 bp, Homo sapiens
tccgaagtgttcaca

SEQ ID NO: 150589 - DNA, 15 bp, Homo sapiens
ccgaagtgttcacac

SEQ ID NO: 150590 - DNA, 15 bp, Homo sapiens
cgaagtgttcacact

SEQ ID NO: 150591 - DNA, 15 bp, Homo sapiens
gaagtgttcacacta

SEQ ID NO: 150592 - DNA, 15 bp, Homo sapiens
aagtgttcacactac

SEQ ID NO: 150593 - DNA, 15 bp, Homo sapiens
agtgttcacactaca

SEQ ID NO: 150594 - DNA, 15 bp, Homo sapiens
gtgttcacactacac

SEQ ID NO: 150595 - DNA, 15 bp, Homo sapiens
tgttcacactacaca

SEQ ID NO: 150596 - DNA, 15 bp, Homo sapiens
gttcacactacacaa

SEQ ID NO: 150597 - DNA, 15 bp, Homo sapiens
ttcacactacacaaa

SEQ ID NO: 150598 - DNA, 15 bp, Homo sapiens
tcacactacacaaaa

SEQ ID NO: 150599 - DNA, 15 bp, Homo sapiens
cacactacacaaaaa

SEQ ID NO: 150600 - DNA, 15 bp, Homo sapiens
acactacacaaaaaa

SEQ ID NO: 150601 - DNA, 15 bp, Homo sapiens
cactacacaaaaaag

SEQ ID NO: 150602 - DNA, 15 bp, Homo sapiens
actacacaaaaaagg

SEQ ID NO: 150603 - DNA, 15 bp, Homo sapiens
ctacacaaaaaaggc

SEQ ID NO: 150604 - DNA, 15 bp, Homo sapiens
tacacaaaaaaggca

SEQ ID NO: 150605 - DNA, 15 bp, Homo sapiens
acacaaaaaaggcaa

SEQ ID NO: 150606 - DNA, 15 bp, Homo sapiens
cacaaaaaaggcaac

SEQ ID NO: 150607 - DNA, 15 bp, Homo sapiens
acaaaaaaggcaact

SEQ ID NO: 150608 - DNA, 15 bp, Homo sapiens
caaaaaaggcaacta

SEQ ID NO: 150609 - DNA, 15 bp, Homo sapiens
aaaaaaggcaactat

SEQ ID NO: 150610 - DNA, 15 bp, Homo sapiens
aaaaaggcaactatg

SEQ ID NO: 150611 - DNA, 15 bp, Homo sapiens
aaaaggcaactatga

SEQ ID NO: 150612 - DNA, 15 bp, Homo sapiens
aaaggcaactatgag

SEQ ID NO: 150613 - DNA, 15 bp, Homo sapiens
aaggcaactatgagg

SEQ ID NO: 150614 - DNA, 15 bp, Homo sapiens
aggcaactatgaggt

SEQ ID NO: 150615 - DNA, 15 bp, Homo sapiens
ggcaactatgaggtg

SEQ ID NO: 150616 - DNA, 15 bp, Homo sapiens
gcaactatgaggtga

SEQ ID NO: 150617 - DNA, 15 bp, Homo sapiens
caactatgaggtgat

SEQ ID NO: 150618 - DNA, 15 bp, Homo sapiens
aactatgaggtgatg

SEQ ID NO: 150619 - DNA, 15 bp, Homo sapiens
actatgaggtgatgg

SEQ ID NO: 150620 - DNA, 15 bp, Homo sapiens
ctatgaggtgatgga

SEQ ID NO: 150621 - DNA, 15 bp, Homo sapiens
tatgaggtgatggat

SEQ ID NO: 150622 - DNA, 15 bp, Homo sapiens
atgaggtgatggatt

SEQ ID NO: 150623 - DNA, 15 bp, Homo sapiens
tgaggtgatggattt

SEQ ID NO: 150624 - DNA, 15 bp, Homo sapiens
gaggtgatggattta

SEQ ID NO: 150625 - DNA, 15 bp, Homo sapiens
aggtgatggatttat

SEQ ID NO: 150626 - DNA, 15 bp, Homo sapiens
ggtgatggatttatt

SEQ ID NO: 150627 - DNA, 15 bp, Homo sapiens
gtgatggatttatta

SEQ ID NO: 150628 - DNA, 15 bp, Homo sapiens
tgatggatttattaa

SEQ ID NO: 150629 - DNA, 15 bp, Homo sapiens
gatggatttattaac

SEQ ID NO: 150630 - DNA, 15 bp, Homo sapiens
atggatttattaaca

SEQ ID NO: 150631 - DNA, 15 bp, Homo sapiens
tggatttattaacag

SEQ ID NO: 150632 - DNA, 15 bp, Homo sapiens
ggatttattaacagc

SEQ ID NO: 150633 - DNA, 15 bp, Homo sapiens
gatttattaacagct

SEQ ID NO: 150634 - DNA, 15 bp, Homo sapiens
atttattaacagctt

SEQ ID NO: 150635 - DNA, 15 bp, Homo sapiens
tttattaacagcttg

SEQ ID NO: 150636 - DNA, 15 bp, Homo sapiens
ttattaacagcttga

SEQ ID NO: 150637 - DNA, 15 bp, Homo sapiens
tattaacagcttgat

SEQ ID NO: 150638 - DNA, 15 bp, Homo sapiens
attaacagcttgatt

SEQ ID NO: 150639 - DNA, 15 bp, Homo sapiens
ttaacagcttgattg

SEQ ID NO: 150640 - DNA, 15 bp, Homo sapiens
taacagcttgattgt

SEQ ID NO: 150641 - DNA, 15 bp, Homo sapiens
aacagcttgattgtg

SEQ ID NO: 150642 - DNA, 15 bp, Homo sapiens
acagcttgattgtgg

SEQ ID NO: 150643 - DNA, 15 bp, Homo sapiens
cagcttgattgtggt

SEQ ID NO: 150644 - DNA, 15 bp, Homo sapiens
agcttgattgtggtg

SEQ ID NO: 150645 - DNA, 15 bp, Homo sapiens
gcttgattgtggtga

SEQ ID NO: 150646 - DNA, 15 bp, Homo sapiens
cttgattgtggtgat

SEQ ID NO: 150647 - DNA, 15 bp, Homo sapiens
ttgattgtggtgatc

SEQ ID NO: 150648 - DNA, 15 bp, Homo sapiens
tgattgtggtgatcc

SEQ ID NO: 150649 - DNA, 15 bp, Homo sapiens
gattgtggtgatcct

SEQ ID NO: 150650 - DNA, 15 bp, Homo sapiens
attgtggtgatcctt

SEQ ID NO: 150651 - DNA, 15 bp, Homo sapiens
ttgtggtgatccttt

SEQ ID NO: 150652 - DNA, 15 bp, Homo sapiens
tgtggtgatcctttt

SEQ ID NO: 150653 - DNA, 15 bp, Homo sapiens
gtggtgatcctttta

SEQ ID NO: 150654 - DNA, 15 bp, Homo sapiens
tggtgatccttttac

SEQ ID NO: 150655 - DNA, 15 bp, Homo sapiens
ggtgatccttttaca

SEQ ID NO: 150656 - DNA, 15 bp, Homo sapiens
gtgatccttttacaa

SEQ ID NO: 150657 - DNA, 15 bp, Homo sapiens
tgatccttttacaaa

SEQ ID NO: 150658 - DNA, 15 bp, Homo sapiens
gatccttttacaaag

SEQ ID NO: 150659 - DNA, 15 bp, Homo sapiens
atccttttacaaagt

SEQ ID NO: 150660 - DNA, 15 bp, Homo sapiens
tccttttacaaagta

SEQ ID NO: 150661 - DNA, 15 bp, Homo sapiens
ccttttacaaagtat

SEQ ID NO: 150662 - DNA, 15 bp, Homo sapiens
cttttacaaagtata

SEQ ID NO: 150663 - DNA, 15 bp, Homo sapiens
ttttacaaagtatac

SEQ ID NO: 150664 - DNA, 15 bp, Homo sapiens
tttacaaagtataca

SEQ ID NO: 150665 - DNA, 15 bp, Homo sapiens
ttacaaagtatacat

SEQ ID NO: 150666 - DNA, 15 bp, Homo sapiens
tacaaagtatacata

SEQ ID NO: 150667 - DNA, 15 bp, Homo sapiens
acaaagtatacatat

SEQ ID NO: 150668 - DNA, 15 bp, Homo sapiens
caaagtatacatata

SEQ ID NO: 150669 - DNA, 15 bp, Homo sapiens
aaagtatacatatat

SEQ ID NO: 150670 - DNA, 15 bp, Homo sapiens
aagtatacatatatt

SEQ ID NO: 150671 - DNA, 15 bp, Homo sapiens
agtatacatatatta

SEQ ID NO: 150672 - DNA, 15 bp, Homo sapiens
gtatacatatattaa

SEQ ID NO: 150673 - DNA, 15 bp, Homo sapiens
tatacatatattaaa

SEQ ID NO: 150674 - DNA, 15 bp, Homo sapiens
atacatatattaaaa

SEQ ID NO: 150675 - DNA, 15 bp, Homo sapiens
tacatatattaaaac

SEQ ID NO: 150676 - DNA, 15 bp, Homo sapiens
acatatattaaaaca

SEQ ID NO: 150677 - DNA, 15 bp, Homo sapiens
catatattaaaacat

SEQ ID NO: 150678 - DNA, 15 bp, Homo sapiens
atatattaaaacatc

SEQ ID NO: 150679 - DNA, 15 bp, Homo sapiens
tatattaaaacatca

SEQ ID NO: 150680 - DNA, 15 bp, Homo sapiens
atattaaaacatcac

SEQ ID NO: 150681 - DNA, 15 bp, Homo sapiens
tattaaaacatcaca

SEQ ID NO: 150682 - DNA, 15 bp, Homo sapiens
attaaaacatcacat

SEQ ID NO: 150683 - DNA, 15 bp, Homo sapiens
ttaaaacatcacatt

SEQ ID NO: 150684 - DNA, 15 bp, Homo sapiens
taaaacatcacattg

SEQ ID NO: 150685 - DNA, 15 bp, Homo sapiens
aaaacatcacattgt

SEQ ID NO: 150686 - DNA, 15 bp, Homo sapiens
aaacatcacattgta

SEQ ID NO: 150687 - DNA, 15 bp, Homo sapiens
aacatcacattgtat

SEQ ID NO: 150688 - DNA, 15 bp, Homo sapiens
acatcacattgtata

SEQ ID NO: 150689 - DNA, 15 bp, Homo sapiens
catcacattgtatac

SEQ ID NO: 150690 - DNA, 15 bp, Homo sapiens
atcacattgtatacc

SEQ ID NO: 150691 - DNA, 15 bp, Homo sapiens
tcacattgtatacct

SEQ ID NO: 150692 - DNA, 15 bp, Homo sapiens
cacattgtatacctt

SEQ ID NO: 150693 - DNA, 15 bp, Homo sapiens
acattgtatacctta

SEQ ID NO: 150694 - DNA, 15 bp, Homo sapiens
cattgtataccttaa

SEQ ID NO: 150695 - DNA, 15 bp, Homo sapiens
attgtataccttaaa

SEQ ID NO: 150696 - DNA, 15 bp, Homo sapiens
ttgtataccttaaat

SEQ ID NO: 150697 - DNA, 15 bp, Homo sapiens
tgtataccttaaata

SEQ ID NO: 150698 - DNA, 15 bp, Homo sapiens
gtataccttaaatat

SEQ ID NO: 150699 - DNA, 15 bp, Homo sapiens
tataccttaaatata

SEQ ID NO: 150700 - DNA, 15 bp, Homo sapiens
ataccttaaatatat

SEQ ID NO: 150701 - DNA, 15 bp, Homo sapiens
taccttaaatatata

SEQ ID NO: 150702 - DNA, 15 bp, Homo sapiens
accttaaatatatac

SEQ ID NO: 150703 - DNA, 15 bp, Homo sapiens
ccttaaatatataca

SEQ ID NO: 150704 - DNA, 15 bp, Homo sapiens
cttaaatatatacaa

SEQ ID NO: 150705 - DNA, 15 bp, Homo sapiens
ttaaatatatacaat

SEQ ID NO: 150706 - DNA, 15 bp, Homo sapiens
taaatatatacaatt

SEQ ID NO: 150707 - DNA, 15 bp, Homo sapiens
aaatatatacaattt

SEQ ID NO: 150708 - DNA, 15 bp, Homo sapiens
aatatatacaatttt

SEQ ID NO: 150709 - DNA, 15 bp, Homo sapiens
atatatacaattttt

SEQ ID NO: 150710 - DNA, 15 bp, Homo sapiens
tatatacaattttta

SEQ ID NO: 150711 - DNA, 15 bp, Homo sapiens
atttttatttgtcag

SEQ ID NO: 150712 - DNA, 15 bp, Homo sapiens
tttttatttgtcagt

SEQ ID NO: 150713 - DNA, 15 bp, Homo sapiens
ttttatttgtcagtt

SEQ ID NO: 150714 - DNA, 15 bp, Homo sapiens
tttatttgtcagttg

SEQ ID NO: 150715 - DNA, 15 bp, Homo sapiens
ttatttgtcagttgt

SEQ ID NO: 150716 - DNA, 15 bp, Homo sapiens
tatttgtcagttgta

SEQ ID NO: 150717 - DNA, 15 bp, Homo sapiens
atttgtcagttgtaa

SEQ ID NO: 150718 - DNA, 15 bp, Homo sapiens
tttgtcagttgtaac

SEQ ID NO: 150719 - DNA, 15 bp, Homo sapiens
ttgtcagttgtaact

SEQ ID NO: 150720 - DNA, 15 bp, Homo sapiens
tgtcagttgtaactc

SEQ ID NO: 150721 - DNA, 15 bp, Homo sapiens
gtcagttgtaactca

SEQ ID NO: 150722 - DNA, 15 bp, Homo sapiens
tcagttgtaactcaa

SEQ ID NO: 150723 - DNA, 15 bp, Homo sapiens
cagttgtaactcaaa

SEQ ID NO: 150724 - DNA, 15 bp, Homo sapiens
agttgtaactcaaaa

SEQ ID NO: 150725 - DNA, 15 bp, Homo sapiens
gttgtaactcaaaaa

SEQ ID NO: 150726 - DNA, 15 bp, Homo sapiens
ttgtaactcaaaaaa

SEQ ID NO: 150727 - DNA, 15 bp, Homo sapiens
tgtaactcaaaaaag

SEQ ID NO: 150728 - DNA, 15 bp, Homo sapiens
gtaactcaaaaaagc

SEQ ID NO: 150729 - DNA, 15 bp, Homo sapiens
taactcaaaaaagct

SEQ ID NO: 150730 - DNA, 15 bp, Homo sapiens
aactcaaaaaagcta

SEQ ID NO: 150731 - DNA, 15 bp, Homo sapiens
actcaaaaaagctag

SEQ ID NO: 150732 - DNA, 15 bp, Homo sapiens
ctcaaaaaagctaga

SEQ ID NO: 150733 - DNA, 15 bp, Homo sapiens
tcaaaaaagctagaa

SEQ ID NO: 150734 - DNA, 15 bp, Homo sapiens
caaaaaagctagaaa

SEQ ID NO: 150735 - DNA, 15 bp, Homo sapiens
aaaaaagctagaaaa

SEQ ID NO: 150736 - DNA, 15 bp, Homo sapiens
aaaaagctagaaaag

SEQ ID NO: 150737 - DNA, 15 bp, Homo sapiens
aaaagctagaaaagc

SEQ ID NO: 150738 - DNA, 15 bp, Homo sapiens
aaagctagaaaagca

SEQ ID NO: 150739 - DNA, 15 bp, Homo sapiens
aagctagaaaagcat

SEQ ID NO: 150740 - DNA, 15 bp, Homo sapiens
agctagaaaagcatt

SEQ ID NO: 150741 - DNA, 15 bp, Homo sapiens
gctagaaaagcattt

SEQ ID NO: 150742 - DNA, 15 bp, Homo sapiens
ctagaaaagcatttt

SEQ ID NO: 150743 - DNA, 15 bp, Homo sapiens
tagaaaagcattttt

SEQ ID NO: 150744 - DNA, 15 bp, Homo sapiens
agaaaagcattttta

SEQ ID NO: 150745 - DNA, 15 bp, Homo sapiens
gaaaagcatttttaa

SEQ ID NO: 150746 - DNA, 15 bp, Homo sapiens
aaaagcatttttaaa

SEQ ID NO: 150747 - DNA, 15 bp, Homo sapiens
aaagcatttttaaaa

SEQ ID NO: 150748 - DNA, 15 bp, Homo sapiens
aagcatttttaaaaa

SEQ ID NO: 150749 - DNA, 15 bp, Homo sapiens
agcatttttaaaaag

SEQ ID NO: 150750 - DNA, 15 bp, Homo sapiens
gcatttttaaaaagg

SEQ ID NO: 150751 - DNA, 15 bp, Homo sapiens
catttttaaaaagga

SEQ ID NO: 150752 - DNA, 15 bp, Homo sapiens
atttttaaaaaggat

SEQ ID NO: 150753 - DNA, 15 bp, Homo sapiens
tttttaaaaaggatg

SEQ ID NO: 150754 - DNA, 15 bp, Homo sapiens
ttttaaaaaggatga

SEQ ID NO: 150755 - DNA, 15 bp, Homo sapiens
tttaaaaaggatgat

SEQ ID NO: 150756 - DNA, 15 bp, Homo sapiens
ttaaaaaggatgatg

SEQ ID NO: 150757 - DNA, 15 bp, Homo sapiens
taaaaaggatgatgt

SEQ ID NO: 150758 - DNA, 15 bp, Homo sapiens
aaaaaggatgatgta

SEQ ID NO: 150759 - DNA, 15 bp, Homo sapiens
aaaaggatgatgtac

SEQ ID NO: 150760 - DNA, 15 bp, Homo sapiens
aaaggatgatgtact

SEQ ID NO: 150761 - DNA, 15 bp, Homo sapiens
aaggatgatgtactg

SEQ ID NO: 150762 - DNA, 15 bp, Homo sapiens
aggatgatgtactgg

SEQ ID NO: 150763 - DNA, 15 bp, Homo sapiens
ggatgatgtactggt

SEQ ID NO: 150764 - DNA, 15 bp, Homo sapiens
gatgatgtactggtc

SEQ ID NO: 150765 - DNA, 15 bp, Homo sapiens
atgatgtactggtct

SEQ ID NO: 150766 - DNA, 15 bp, Homo sapiens
tgatgtactggtctt

SEQ ID NO: 150767 - DNA, 15 bp, Homo sapiens
gatgtactggtctta

SEQ ID NO: 150768 - DNA, 15 bp, Homo sapiens
atgtactggtcttaa

SEQ ID NO: 150769 - DNA, 15 bp, Homo sapiens
tgtactggtcttaat

SEQ ID NO: 150770 - DNA, 15 bp, Homo sapiens
gtactggtcttaata

SEQ ID NO: 150771 - DNA, 15 bp, Homo sapiens
tactggtcttaatat

SEQ ID NO: 150772 - DNA, 15 bp, Homo sapiens
actggtcttaatatt

SEQ ID NO: 150773 - DNA, 15 bp, Homo sapiens
ctggtcttaatatta

SEQ ID NO: 150774 - DNA, 15 bp, Homo sapiens
tggtcttaatattac

SEQ ID NO: 150775 - DNA, 15 bp, Homo sapiens
ggtcttaatattacc

SEQ ID NO: 150776 - DNA, 15 bp, Homo sapiens
gtcttaatattacca

SEQ ID NO: 150777 - DNA, 15 bp, Homo sapiens
tcttaatattaccat

SEQ ID NO: 150778 - DNA, 15 bp, Homo sapiens
cttaatattaccatt

SEQ ID NO: 150779 - DNA, 15 bp, Homo sapiens
ttaatattaccattg

SEQ ID NO: 150780 - DNA, 15 bp, Homo sapiens
taatattaccattga

SEQ ID NO: 150781 - DNA, 15 bp, Homo sapiens
aatattaccattgag

SEQ ID NO: 150782 - DNA, 15 bp, Homo sapiens
atattaccattgaga

SEQ ID NO: 150783 - DNA, 15 bp, Homo sapiens
tattaccattgagat

SEQ ID NO: 150784 - DNA, 15 bp, Homo sapiens
attaccattgagata

SEQ ID NO: 150785 - DNA, 15 bp, Homo sapiens
ttaccattgagataa

SEQ ID NO: 150786 - DNA, 15 bp, Homo sapiens
taccattgagataag

SEQ ID NO: 150787 - DNA, 15 bp, Homo sapiens
accattgagataagc

SEQ ID NO: 150788 - DNA, 15 bp, Homo sapiens
ccattgagataagct

SEQ ID NO: 150789 - DNA, 15 bp, Homo sapiens
cattgagataagctt

SEQ ID NO: 150790 - DNA, 15 bp, Homo sapiens
attgagataagcttt

SEQ ID NO: 150791 - DNA, 15 bp, Homo sapiens
ttgagataagcttta

SEQ ID NO: 150792 - DNA, 15 bp, Homo sapiens
tgagataagctttat

SEQ ID NO: 150793 - DNA, 15 bp, Homo sapiens
gagataagctttata

SEQ ID NO: 150794 - DNA, 15 bp, Homo sapiens
agataagctttataa

SEQ ID NO: 150795 - DNA, 15 bp, Homo sapiens
gataagctttataat

SEQ ID NO: 150796 - DNA, 15 bp, Homo sapiens
ataagctttataata

SEQ ID NO: 150797 - DNA, 15 bp, Homo sapiens
taagctttataataa

SEQ ID NO: 150798 - DNA, 15 bp, Homo sapiens
aagctttataataac

SEQ ID NO: 150799 - DNA, 15 bp, Homo sapiens
agctttataataaca

SEQ ID NO: 150800 - DNA, 15 bp, Homo sapiens
gctttataataacat

SEQ ID NO: 150801 - DNA, 15 bp, Homo sapiens
ctttataataacata

SEQ ID NO: 150802 - DNA, 15 bp, Homo sapiens
tttataataacataa

SEQ ID NO: 150803 - DNA, 15 bp, Homo sapiens
ttataataacataaa

SEQ ID NO: 150804 - DNA, 15 bp, Homo sapiens
tataataacataaaa

SEQ ID NO: 150805 - DNA, 15 bp, Homo sapiens
ataataacataaaaa

SEQ ID NO: 150806 - DNA, 15 bp, Homo sapiens
taataacataaaaag

SEQ ID NO: 150807 - DNA, 15 bp, Homo sapiens
aataacataaaaaga

SEQ ID NO: 150808 - DNA, 15 bp, Homo sapiens
ataacataaaaagaa

SEQ ID NO: 150809 - DNA, 15 bp, Homo sapiens
taacataaaaagaaa

SEQ ID NO: 150810 - DNA, 15 bp, Homo sapiens
aacataaaaagaaat

SEQ ID NO: 150811 - DNA, 15 bp, Homo sapiens
acataaaaagaaata

SEQ ID NO: 150812 - DNA, 15 bp, Homo sapiens
cataaaaagaaataa

SEQ ID NO: 150813 - DNA, 15 bp, Homo sapiens
ataaaaagaaataac

SEQ ID NO: 150814 - DNA, 15 bp, Homo sapiens
taaaaagaaataaca

SEQ ID NO: 150815 - DNA, 15 bp, Homo sapiens
aaaaagaaataacag

SEQ ID NO: 150816 - DNA, 15 bp, Homo sapiens
aaaagaaataacagt

SEQ ID NO: 150817 - DNA, 15 bp, Homo sapiens
aaagaaataacagta

SEQ ID NO: 150818 - DNA, 15 bp, Homo sapiens
aagaaataacagtaa

SEQ ID NO: 150819 - DNA, 15 bp, Homo sapiens
agaaataacagtaat

SEQ ID NO: 150820 - DNA, 15 bp, Homo sapiens
gaaataacagtaatg

SEQ ID NO: 150821 - DNA, 15 bp, Homo sapiens
aaataacagtaatga

SEQ ID NO: 150822 - DNA, 15 bp, Homo sapiens
aataacagtaatgat

SEQ ID NO: 150823 - DNA, 15 bp, Homo sapiens
ataacagtaatgata

SEQ ID NO: 150824 - DNA, 15 bp, Homo sapiens
taacagtaatgataa

SEQ ID NO: 150825 - DNA, 15 bp, Homo sapiens
aacagtaatgataat

SEQ ID NO: 150826 - DNA, 15 bp, Homo sapiens
acagtaatgataata

SEQ ID NO: 150827 - DNA, 15 bp, Homo sapiens
cagtaatgataatag

SEQ ID NO: 150828 - DNA, 15 bp, Homo sapiens
agtaatgataatagc

SEQ ID NO: 150829 - DNA, 15 bp, Homo sapiens
gtaatgataatagca

SEQ ID NO: 150830 - DNA, 15 bp, Homo sapiens
taatgataatagcaa

SEQ ID NO: 150831 - DNA, 15 bp, Homo sapiens
aatgataatagcaac

SEQ ID NO: 150832 - DNA, 15 bp, Homo sapiens
atgataatagcaaca

SEQ ID NO: 150833 - DNA, 15 bp, Homo sapiens
tgataatagcaacaa

SEQ ID NO: 150834 - DNA, 15 bp, Homo sapiens
gataatagcaacaac

SEQ ID NO: 150835 - DNA, 15 bp, Homo sapiens
ataatagcaacaaca

SEQ ID NO: 150836 - DNA, 15 bp, Homo sapiens
taatagcaacaacaa

SEQ ID NO: 150837 - DNA, 15 bp, Homo sapiens
aatagcaacaacaac

SEQ ID NO: 150838 - DNA, 15 bp, Homo sapiens
atagcaacaacaaca

SEQ ID NO: 150839 - DNA, 15 bp, Homo sapiens
tagcaacaacaacaa

SEQ ID NO: 150840 - DNA, 15 bp, Homo sapiens
agcaacaacaacaac

SEQ ID NO: 150841 - DNA, 15 bp, Homo sapiens
gcaacaacaacaaca

SEQ ID NO: 150842 - DNA, 15 bp, Homo sapiens
caacaacaacaacaa

SEQ ID NO: 150843 - DNA, 15 bp, Homo sapiens
aacaacaacaacaac

SEQ ID NO: 150844 - DNA, 15 bp, Homo sapiens
acaacaacaacaaca

SEQ ID NO: 150845 - DNA, 15 bp, Homo sapiens
aacaacaacaacaaa

SEQ ID NO: 150846 - DNA, 15 bp, Homo sapiens
acaacaacaacaaag

SEQ ID NO: 150847 - DNA, 15 bp, Homo sapiens
caacaacaacaaaga

SEQ ID NO: 150848 - DNA, 15 bp, Homo sapiens
aacaacaacaaagaa

SEQ ID NO: 150849 - DNA, 15 bp, Homo sapiens
acaacaacaaagaac

SEQ ID NO: 150850 - DNA, 15 bp, Homo sapiens
caacaacaaagaact

SEQ ID NO: 150851 - DNA, 15 bp, Homo sapiens
aacaacaaagaacta

SEQ ID NO: 150852 - DNA, 15 bp, Homo sapiens
acaacaaagaactaa

SEQ ID NO: 150853 - DNA, 15 bp, Homo sapiens
caacaaagaactaac

SEQ ID NO: 150854 - DNA, 15 bp, Homo sapiens
aacaaagaactaaca

SEQ ID NO: 150855 - DNA, 15 bp, Homo sapiens
acaaagaactaacat

SEQ ID NO: 150856 - DNA, 15 bp, Homo sapiens
caaagaactaacatt

SEQ ID NO: 150857 - DNA, 15 bp, Homo sapiens
aaagaactaacattt

SEQ ID NO: 150858 - DNA, 15 bp, Homo sapiens
aagaactaacattta

SEQ ID NO: 150859 - DNA, 15 bp, Homo sapiens
agaactaacatttaa

SEQ ID NO: 150860 - DNA, 15 bp, Homo sapiens
gaactaacatttaag

SEQ ID NO: 150861 - DNA, 15 bp, Homo sapiens
aactaacatttaagt

SEQ ID NO: 150862 - DNA, 15 bp, Homo sapiens
actaacatttaagta

SEQ ID NO: 150863 - DNA, 15 bp, Homo sapiens
ctaacatttaagtag

SEQ ID NO: 150864 - DNA, 15 bp, Homo sapiens
taacatttaagtaga

SEQ ID NO: 150865 - DNA, 15 bp, Homo sapiens
aacatttaagtagaa

SEQ ID NO: 150866 - DNA, 15 bp, Homo sapiens
acatttaagtagaat

SEQ ID NO: 150867 - DNA, 15 bp, Homo sapiens
catttaagtagaatt

SEQ ID NO: 150868 - DNA, 15 bp, Homo sapiens
atttaagtagaattt

SEQ ID NO: 150869 - DNA, 15 bp, Homo sapiens
tttaagtagaatttc

SEQ ID NO: 150870 - DNA, 15 bp, Homo sapiens
ttaagtagaatttct

SEQ ID NO: 150871 - DNA, 15 bp, Homo sapiens
taagtagaatttctt

SEQ ID NO: 150872 - DNA, 15 bp, Homo sapiens
aagtagaatttcttg

SEQ ID NO: 150873 - DNA, 15 bp, Homo sapiens
agtagaatttcttgt

SEQ ID NO: 150874 - DNA, 15 bp, Homo sapiens
gtagaatttcttgtg

SEQ ID NO: 150875 - DNA, 15 bp, Homo sapiens
tagaatttcttgtgc

SEQ ID NO: 150876 - DNA, 15 bp, Homo sapiens
agaatttcttgtgca

SEQ ID NO: 150877 - DNA, 15 bp, Homo sapiens
gaatttcttgtgcac

SEQ ID NO: 150878 - DNA, 15 bp, Homo sapiens
aatttcttgtgcact

SEQ ID NO: 150879 - DNA, 15 bp, Homo sapiens
atttcttgtgcactg

SEQ ID NO: 150880 - DNA, 15 bp, Homo sapiens
tttcttgtgcactgt

SEQ ID NO: 150881 - DNA, 15 bp, Homo sapiens
ttcttgtgcactgtg

SEQ ID NO: 150882 - DNA, 15 bp, Homo sapiens
tcttgtgcactgtgc

SEQ ID NO: 150883 - DNA, 15 bp, Homo sapiens
cttgtgcactgtgca

SEQ ID NO: 150884 - DNA, 15 bp, Homo sapiens
ttgtgcactgtgcat

SEQ ID NO: 150885 - DNA, 15 bp, Homo sapiens
tgtgcactgtgcatt

SEQ ID NO: 150886 - DNA, 15 bp, Homo sapiens
gtgcactgtgcattc

SEQ ID NO: 150887 - DNA, 15 bp, Homo sapiens
tgcactgtgcattct

SEQ ID NO: 150888 - DNA, 15 bp, Homo sapiens
gcactgtgcattctg

SEQ ID NO: 150889 - DNA, 15 bp, Homo sapiens
cactgtgcattctgt

SEQ ID NO: 150890 - DNA, 15 bp, Homo sapiens
actgtgcattctgtt

SEQ ID NO: 150891 - DNA, 15 bp, Homo sapiens
ctgtgcattctgttt

SEQ ID NO: 150892 - DNA, 15 bp, Homo sapiens
tgtgcattctgttta

SEQ ID NO: 150893 - DNA, 15 bp, Homo sapiens
gtgcattctgtttaa

SEQ ID NO: 150894 - DNA, 15 bp, Homo sapiens
tgcattctgtttaag

SEQ ID NO: 150895 - DNA, 15 bp, Homo sapiens
gcattctgtttaagt

SEQ ID NO: 150896 - DNA, 15 bp, Homo sapiens
cattctgtttaagtt

SEQ ID NO: 150897 - DNA, 15 bp, Homo sapiens
attctgtttaagtta

SEQ ID NO: 150898 - DNA, 15 bp, Homo sapiens
ttctgtttaagttat

SEQ ID NO: 150899 - DNA, 15 bp, Homo sapiens
tctgtttaagttatc

SEQ ID NO: 150900 - DNA, 15 bp, Homo sapiens
ctgtttaagttatct

SEQ ID NO: 150901 - DNA, 15 bp, Homo sapiens
tgtttaagttatctc

SEQ ID NO: 150902 - DNA, 15 bp, Homo sapiens
gtttaagttatctca

SEQ ID NO: 150903 - DNA, 15 bp, Homo sapiens
tttaagttatctcat

SEQ ID NO: 150904 - DNA, 15 bp, Homo sapiens
ttaagttatctcatt

SEQ ID NO: 150905 - DNA, 15 bp, Homo sapiens
taagttatctcattt

SEQ ID NO: 150906 - DNA, 15 bp, Homo sapiens
aagttatctcatttt

SEQ ID NO: 150907 - DNA, 15 bp, Homo sapiens
agttatctcatttta

SEQ ID NO: 150908 - DNA, 15 bp, Homo sapiens
gttatctcattttac

SEQ ID NO: 150909 - DNA, 15 bp, Homo sapiens
ttatctcattttacc

SEQ ID NO: 150910 - DNA, 15 bp, Homo sapiens
tatctcattttaccc

SEQ ID NO: 150911 - DNA, 15 bp, Homo sapiens
atctcattttaccct

SEQ ID NO: 150912 - DNA, 15 bp, Homo sapiens
tctcattttaccctc

SEQ ID NO: 150913 - DNA, 15 bp, Homo sapiens
ctcattttaccctca

SEQ ID NO: 150914 - DNA, 15 bp, Homo sapiens
tcattttaccctcat

SEQ ID NO: 150915 - DNA, 15 bp, Homo sapiens
cattttaccctcatg

SEQ ID NO: 150916 - DNA, 15 bp, Homo sapiens
attttaccctcatga

SEQ ID NO: 150917 - DNA, 15 bp, Homo sapiens
ttttaccctcatgat

SEQ ID NO: 150918 - DNA, 15 bp, Homo sapiens
tttaccctcatgata

SEQ ID NO: 150919 - DNA, 15 bp, Homo sapiens
ttaccctcatgataa

SEQ ID NO: 150920 - DNA, 15 bp, Homo sapiens
taccctcatgataac

SEQ ID NO: 150921 - DNA, 15 bp, Homo sapiens
accctcatgataacc

SEQ ID NO: 150922 - DNA, 15 bp, Homo sapiens
ccctcatgataaccc

SEQ ID NO: 150923 - DNA, 15 bp, Homo sapiens
cctcatgataaccct

SEQ ID NO: 150924 - DNA, 15 bp, Homo sapiens
ctcatgataaccctg

SEQ ID NO: 150925 - DNA, 15 bp, Homo sapiens
tcatgataaccctgc

SEQ ID NO: 150926 - DNA, 15 bp, Homo sapiens
catgataaccctgca

SEQ ID NO: 150927 - DNA, 15 bp, Homo sapiens
atgataaccctgcag

SEQ ID NO: 150928 - DNA, 15 bp, Homo sapiens
tgataaccctgcagg

SEQ ID NO: 150929 - DNA, 15 bp, Homo sapiens
gataaccctgcaggg

SEQ ID NO: 150930 - DNA, 15 bp, Homo sapiens
ataaccctgcaggga

SEQ ID NO: 150931 - DNA, 15 bp, Homo sapiens
taaccctgcagggaa

SEQ ID NO: 150932 - DNA, 15 bp, Homo sapiens
aaccctgcagggaag

SEQ ID NO: 150933 - DNA, 15 bp, Homo sapiens
accctgcagggaaga

SEQ ID NO: 150934 - DNA, 15 bp, Homo sapiens
ccctgcagggaagat

SEQ ID NO: 150935 - DNA, 15 bp, Homo sapiens
cctgcagggaagatt

SEQ ID NO: 150936 - DNA, 15 bp, Homo sapiens
ctgcagggaagattc

SEQ ID NO: 150937 - DNA, 15 bp, Homo sapiens
tgcagggaagattct

SEQ ID NO: 150938 - DNA, 15 bp, Homo sapiens
gcagggaagattctt

SEQ ID NO: 150939 - DNA, 15 bp, Homo sapiens
cagggaagattcttt

SEQ ID NO: 150940 - DNA, 15 bp, Homo sapiens
agggaagattcttta

SEQ ID NO: 150941 - DNA, 15 bp, Homo sapiens
gggaagattctttaa

SEQ ID NO: 150942 - DNA, 15 bp, Homo sapiens
ggaagattctttaac

SEQ ID NO: 150943 - DNA, 15 bp, Homo sapiens
gaagattctttaacc

SEQ ID NO: 150944 - DNA, 15 bp, Homo sapiens
aagattctttaaccc

SEQ ID NO: 150945 - DNA, 15 bp, Homo sapiens
agattctttaacccc

SEQ ID NO: 150946 - DNA, 15 bp, Homo sapiens
gattctttaacccca

SEQ ID NO: 150947 - DNA, 15 bp, Homo sapiens
attctttaaccccac

SEQ ID NO: 150948 - DNA, 15 bp, Homo sapiens
ttctttaaccccaca

SEQ ID NO: 150949 - DNA, 15 bp, Homo sapiens
tctttaaccccacat

SEQ ID NO: 150950 - DNA, 15 bp, Homo sapiens
ctttaaccccacatt

SEQ ID NO: 150951 - DNA, 15 bp, Homo sapiens
tttaaccccacattt

SEQ ID NO: 150952 - DNA, 15 bp, Homo sapiens
ttaaccccacatttc

SEQ ID NO: 150953 - DNA, 15 bp, Homo sapiens
taaccccacatttca

SEQ ID NO: 150954 - DNA, 15 bp, Homo sapiens
aaccccacatttcat

SEQ ID NO: 150955 - DNA, 15 bp, Homo sapiens
accccacatttcata

SEQ ID NO: 150956 - DNA, 15 bp, Homo sapiens
ccccacatttcatag

SEQ ID NO: 150957 - DNA, 15 bp, Homo sapiens
cccacatttcatagg

SEQ ID NO: 150958 - DNA, 15 bp, Homo sapiens
ccacatttcataggc

SEQ ID NO: 150959 - DNA, 15 bp, Homo sapiens
cacatttcataggct

SEQ ID NO: 150960 - DNA, 15 bp, Homo sapiens
acatttcataggctc

SEQ ID NO: 150961 - DNA, 15 bp, Homo sapiens
catttcataggctca

SEQ ID NO: 150962 - DNA, 15 bp, Homo sapiens
atttcataggctcag

SEQ ID NO: 150963 - DNA, 15 bp, Homo sapiens
tttcataggctcaga

SEQ ID NO: 150964 - DNA, 15 bp, Homo sapiens
ttcataggctcagag

SEQ ID NO: 150965 - DNA, 15 bp, Homo sapiens
tcataggctcagaga

SEQ ID NO: 150966 - DNA, 15 bp, Homo sapiens
cataggctcagagag

SEQ ID NO: 150967 - DNA, 15 bp, Homo sapiens
ataggctcagagagg

SEQ ID NO: 150968 - DNA, 15 bp, Homo sapiens
taggctcagagaggt

SEQ ID NO: 150969 - DNA, 15 bp, Homo sapiens
aggctcagagaggtt

SEQ ID NO: 150970 - DNA, 15 bp, Homo sapiens
ggctcagagaggtta

SEQ ID NO: 150971 - DNA, 15 bp, Homo sapiens
gctcagagaggttaa

SEQ ID NO: 150972 - DNA, 15 bp, Homo sapiens
cagagaggttaagtg

SEQ ID NO: 150973 - DNA, 15 bp, Homo sapiens
agagaggttaagtgc

SEQ ID NO: 150974 - DNA, 15 bp, Homo sapiens
gagaggttaagtgcc

SEQ ID NO: 150975 - DNA, 15 bp, Homo sapiens
agaggttaagtgcct

SEQ ID NO: 150976 - DNA, 15 bp, Homo sapiens
gaggttaagtgcctt

SEQ ID NO: 150977 - DNA, 15 bp, Homo sapiens
aggttaagtgccttg

SEQ ID NO: 150978 - DNA, 15 bp, Homo sapiens
ggttaagtgccttgg

SEQ ID NO: 150979 - DNA, 15 bp, Homo sapiens
gttaagtgccttggt

SEQ ID NO: 150980 - DNA, 15 bp, Homo sapiens
ttaagtgccttggtt

SEQ ID NO: 150981 - DNA, 15 bp, Homo sapiens
taagtgccttggtta

SEQ ID NO: 150982 - DNA, 15 bp, Homo sapiens
aagtgccttggttag

SEQ ID NO: 150983 - DNA, 15 bp, Homo sapiens
agtgccttggttaga

SEQ ID NO: 150984 - DNA, 15 bp, Homo sapiens
gtgccttggttagag

SEQ ID NO: 150985 - DNA, 15 bp, Homo sapiens
tgccttggttagagc

SEQ ID NO: 150986 - DNA, 15 bp, Homo sapiens
gccttggttagagcc

SEQ ID NO: 150987 - DNA, 15 bp, Homo sapiens
ccttggttagagcca

SEQ ID NO: 150988 - DNA, 15 bp, Homo sapiens
cttggttagagccac

SEQ ID NO: 150989 - DNA, 15 bp, Homo sapiens
ttggttagagccaca

SEQ ID NO: 150990 - DNA, 15 bp, Homo sapiens
tggttagagccacat

SEQ ID NO: 150991 - DNA, 15 bp, Homo sapiens
ggttagagccacatc

SEQ ID NO: 150992 - DNA, 15 bp, Homo sapiens
gttagagccacatca

SEQ ID NO: 150993 - DNA, 15 bp, Homo sapiens
ttagagccacatcag

SEQ ID NO: 150994 - DNA, 15 bp, Homo sapiens
tagagccacatcaga

SEQ ID NO: 150995 - DNA, 15 bp, Homo sapiens
agagccacatcagag

SEQ ID NO: 150996 - DNA, 15 bp, Homo sapiens
gagccacatcagagt

SEQ ID NO: 150997 - DNA, 15 bp, Homo sapiens
agccacatcagagtt

SEQ ID NO: 150998 - DNA, 15 bp, Homo sapiens
gccacatcagagtta

SEQ ID NO: 150999 - DNA, 15 bp, Homo sapiens
ccacatcagagttaa

SEQ ID NO: 151000 - DNA, 15 bp, Homo sapiens
cacatcagagttaat

SEQ ID NO: 151001 - DNA, 15 bp, Homo sapiens
acatcagagttaatc

SEQ ID NO: 151002 - DNA, 15 bp, Homo sapiens
catcagagttaatcc

SEQ ID NO: 151003 - DNA, 15 bp, Homo sapiens
atcagagttaatcca

SEQ ID NO: 151004 - DNA, 15 bp, Homo sapiens
tcagagttaatccac

SEQ ID NO: 151005 - DNA, 15 bp, Homo sapiens
cagagttaatccaca

SEQ ID NO: 151006 - DNA, 15 bp, Homo sapiens
agagttaatccacaa

SEQ ID NO: 151007 - DNA, 15 bp, Homo sapiens
gagttaatccacaag

SEQ ID NO: 151008 - DNA, 15 bp, Homo sapiens
agttaatccacaaga

SEQ ID NO: 151009 - DNA, 15 bp, Homo sapiens
gttaatccacaagag

SEQ ID NO: 151010 - DNA, 15 bp, Homo sapiens
ttaatccacaagagc

SEQ ID NO: 151011 - DNA, 15 bp, Homo sapiens
taatccacaagagcc

SEQ ID NO: 151012 - DNA, 15 bp, Homo sapiens
aatccacaagagcca

SEQ ID NO: 151013 - DNA, 15 bp, Homo sapiens
atccacaagagccag

SEQ ID NO: 151014 - DNA, 15 bp, Homo sapiens
tccacaagagccagg

SEQ ID NO: 151015 - DNA, 15 bp, Homo sapiens
ccacaagagccagga

SEQ ID NO: 151016 - DNA, 15 bp, Homo sapiens
cacaagagccaggat

SEQ ID NO: 151017 - DNA, 15 bp, Homo sapiens
acaagagccaggatt

SEQ ID NO: 151018 - DNA, 15 bp, Homo sapiens
caagagccaggattc

SEQ ID NO: 151019 - DNA, 15 bp, Homo sapiens
aagagccaggattca

SEQ ID NO: 151020 - DNA, 15 bp, Homo sapiens
agagccaggattcaa

SEQ ID NO: 151021 - DNA, 15 bp, Homo sapiens
gagccaggattcaag

SEQ ID NO: 151022 - DNA, 15 bp, Homo sapiens
agccaggattcaagc

SEQ ID NO: 151023 - DNA, 15 bp, Homo sapiens
gccaggattcaagcc

SEQ ID NO: 151024 - DNA, 15 bp, Homo sapiens
ccaggattcaagccc

SEQ ID NO: 151025 - DNA, 15 bp, Homo sapiens
caggattcaagccca

SEQ ID NO: 151026 - DNA, 15 bp, Homo sapiens
aggattcaagcccaa

SEQ ID NO: 151027 - DNA, 15 bp, Homo sapiens
ggattcaagcccaaa

SEQ ID NO: 151028 - DNA, 15 bp, Homo sapiens
gattcaagcccaaat

SEQ ID NO: 151029 - DNA, 15 bp, Homo sapiens
attcaagcccaaatc

SEQ ID NO: 151030 - DNA, 15 bp, Homo sapiens
ttcaagcccaaatct

SEQ ID NO: 151031 - DNA, 15 bp, Homo sapiens
tcaagcccaaatctg

SEQ ID NO: 151032 - DNA, 15 bp, Homo sapiens
caagcccaaatctgc

SEQ ID NO: 151033 - DNA, 15 bp, Homo sapiens
aagcccaaatctgcc

SEQ ID NO: 151034 - DNA, 15 bp, Homo sapiens
agcccaaatctgcct

SEQ ID NO: 151035 - DNA, 15 bp, Homo sapiens
gcccaaatctgcctg

SEQ ID NO: 151036 - DNA, 15 bp, Homo sapiens
cccaaatctgcctgg

SEQ ID NO: 151037 - DNA, 15 bp, Homo sapiens
ccaaatctgcctgga

SEQ ID NO: 151038 - DNA, 15 bp, Homo sapiens
caaatctgcctggat

SEQ ID NO: 151039 - DNA, 15 bp, Homo sapiens
aaatctgcctggatc

SEQ ID NO: 151040 - DNA, 15 bp, Homo sapiens
aatctgcctggatct

SEQ ID NO: 151041 - DNA, 15 bp, Homo sapiens
atctgcctggatctg

SEQ ID NO: 151042 - DNA, 15 bp, Homo sapiens
tctgcctggatctgt

SEQ ID NO: 151043 - DNA, 15 bp, Homo sapiens
ctgcctggatctgtg

SEQ ID NO: 151044 - DNA, 15 bp, Homo sapiens
tgcctggatctgtgc

SEQ ID NO: 151045 - DNA, 15 bp, Homo sapiens
gcctggatctgtgct

SEQ ID NO: 151046 - DNA, 15 bp, Homo sapiens
cctggatctgtgctc

SEQ ID NO: 151047 - DNA, 15 bp, Homo sapiens
ctggatctgtgctct

SEQ ID NO: 151048 - DNA, 15 bp, Homo sapiens
tggatctgtgctctc

SEQ ID NO: 151049 - DNA, 15 bp, Homo sapiens
ggatctgtgctctct

SEQ ID NO: 151050 - DNA, 15 bp, Homo sapiens
gatctgtgctctcta

SEQ ID NO: 151051 - DNA, 15 bp, Homo sapiens
atctgtgctctctaa

SEQ ID NO: 151052 - DNA, 15 bp, Homo sapiens
tctgtgctctctaag

SEQ ID NO: 151053 - DNA, 15 bp, Homo sapiens
ctgtgctctctaaga

SEQ ID NO: 151054 - DNA, 15 bp, Homo sapiens
tgtgctctctaagat

SEQ ID NO: 151055 - DNA, 15 bp, Homo sapiens
gtgctctctaagata

SEQ ID NO: 151056 - DNA, 15 bp, Homo sapiens
tgctctctaagataa

SEQ ID NO: 151057 - DNA, 15 bp, Homo sapiens
gctctctaagataac

SEQ ID NO: 151058 - DNA, 15 bp, Homo sapiens
ctctctaagataact

SEQ ID NO: 151059 - DNA, 15 bp, Homo sapiens
tctctaagataactg

SEQ ID NO: 151060 - DNA, 15 bp, Homo sapiens
ctctaagataactgt

SEQ ID NO: 151061 - DNA, 15 bp, Homo sapiens
tctaagataactgtt

SEQ ID NO: 151062 - DNA, 15 bp, Homo sapiens
ctaagataactgtta

SEQ ID NO: 151063 - DNA, 15 bp, Homo sapiens
taagataactgttag

SEQ ID NO: 151064 - DNA, 15 bp, Homo sapiens
aagataactgttagt

SEQ ID NO: 151065 - DNA, 15 bp, Homo sapiens
agataactgttagtg

SEQ ID NO: 151066 - DNA, 15 bp, Homo sapiens
gataactgttagtgg

SEQ ID NO: 151067 - DNA, 15 bp, Homo sapiens
ataactgttagtggt

SEQ ID NO: 151068 - DNA, 15 bp, Homo sapiens
taactgttagtggtg

SEQ ID NO: 151069 - DNA, 15 bp, Homo sapiens
aactgttagtggtgg

SEQ ID NO: 151070 - DNA, 15 bp, Homo sapiens
actgttagtggtggc

SEQ ID NO: 151071 - DNA, 15 bp, Homo sapiens
ctgttagtggtggcg

SEQ ID NO: 151072 - DNA, 15 bp, Homo sapiens
tgttagtggtggcgt

SEQ ID NO: 151073 - DNA, 15 bp, Homo sapiens
gttagtggtggcgtg

SEQ ID NO: 151074 - DNA, 15 bp, Homo sapiens
ttagtggtggcgtgt

SEQ ID NO: 151075 - DNA, 15 bp, Homo sapiens
tagtggtggcgtgtg

SEQ ID NO: 151076 - DNA, 15 bp, Homo sapiens
agtggtggcgtgtgt

SEQ ID NO: 151077 - DNA, 15 bp, Homo sapiens
gtggtggcgtgtgtg

SEQ ID NO: 151078 - DNA, 15 bp, Homo sapiens
tggtggcgtgtgtgt

SEQ ID NO: 151079 - DNA, 15 bp, Homo sapiens
ggtggcgtgtgtgtt

SEQ ID NO: 151080 - DNA, 15 bp, Homo sapiens
gtggcgtgtgtgttc

SEQ ID NO: 151081 - DNA, 15 bp, Homo sapiens
tggcgtgtgtgttct

SEQ ID NO: 151082 - DNA, 15 bp, Homo sapiens
ggcgtgtgtgttctc

SEQ ID NO: 151083 - DNA, 15 bp, Homo sapiens
gcgtgtgtgttctca

SEQ ID NO: 151084 - DNA, 15 bp, Homo sapiens
cgtgtgtgttctcac

SEQ ID NO: 151085 - DNA, 15 bp, Homo sapiens
gtgtgtgttctcaca

SEQ ID NO: 151086 - DNA, 15 bp, Homo sapiens
tgtgtgttctcacac

SEQ ID NO: 151087 - DNA, 15 bp, Homo sapiens
gtgtgttctcacact

SEQ ID NO: 151088 - DNA, 15 bp, Homo sapiens
tgtgttctcacactc

SEQ ID NO: 151089 - DNA, 15 bp, Homo sapiens
gtgttctcacactca

SEQ ID NO: 151090 - DNA, 15 bp, Homo sapiens
tgttctcacactcag

SEQ ID NO: 151091 - DNA, 15 bp, Homo sapiens
gttctcacactcaga

SEQ ID NO: 151092 - DNA, 15 bp, Homo sapiens
ttctcacactcagac

SEQ ID NO: 151093 - DNA, 15 bp, Homo sapiens
tctcacactcagaca

SEQ ID NO: 151094 - DNA, 15 bp, Homo sapiens
ctcacactcagacat

SEQ ID NO: 151095 - DNA, 15 bp, Homo sapiens
tcacactcagacatt

SEQ ID NO: 151096 - DNA, 15 bp, Homo sapiens
cacactcagacattt

SEQ ID NO: 151097 - DNA, 15 bp, Homo sapiens
acactcagacatttg

SEQ ID NO: 151098 - DNA, 15 bp, Homo sapiens
cactcagacatttga

SEQ ID NO: 151099 - DNA, 15 bp, Homo sapiens
actcagacatttgat

SEQ ID NO: 151100 - DNA, 15 bp, Homo sapiens
ctcagacatttgatc

SEQ ID NO: 151101 - DNA, 15 bp, Homo sapiens
tcagacatttgatct

SEQ ID NO: 151102 - DNA, 15 bp, Homo sapiens
cagacatttgatctg

SEQ ID NO: 151103 - DNA, 15 bp, Homo sapiens
agacatttgatctgc

SEQ ID NO: 151104 - DNA, 15 bp, Homo sapiens
gacatttgatctgcc

SEQ ID NO: 151105 - DNA, 15 bp, Homo sapiens
acatttgatctgccc

SEQ ID NO: 151106 - DNA, 15 bp, Homo sapiens
catttgatctgccct

SEQ ID NO: 151107 - DNA, 15 bp, Homo sapiens
atttgatctgccctt

SEQ ID NO: 151108 - DNA, 15 bp, Homo sapiens
tttgatctgcccttt

SEQ ID NO: 151109 - DNA, 15 bp, Homo sapiens
ttgatctgccctttg

SEQ ID NO: 151110 - DNA, 15 bp, Homo sapiens
tgatctgccctttgt

SEQ ID NO: 151111 - DNA, 15 bp, Homo sapiens
gatctgccctttgtt

SEQ ID NO: 151112 - DNA, 15 bp, Homo sapiens
atctgccctttgttt

SEQ ID NO: 151113 - DNA, 15 bp, Homo sapiens
tctgccctttgtttc

SEQ ID NO: 151114 - DNA, 15 bp, Homo sapiens
ctgccctttgtttcc

SEQ ID NO: 151115 - DNA, 15 bp, Homo sapiens
tgccctttgtttccc

SEQ ID NO: 151116 - DNA, 15 bp, Homo sapiens
gccctttgtttccca

SEQ ID NO: 151117 - DNA, 15 bp, Homo sapiens
ccctttgtttcccat

SEQ ID NO: 151118 - DNA, 15 bp, Homo sapiens
cctttgtttcccatt

SEQ ID NO: 151119 - DNA, 15 bp, Homo sapiens
ctttgtttcccattc

SEQ ID NO: 151120 - DNA, 15 bp, Homo sapiens
tttgtttcccattct

SEQ ID NO: 151121 - DNA, 15 bp, Homo sapiens
ttgtttcccattctt

SEQ ID NO: 151122 - DNA, 15 bp, Homo sapiens
tgtttcccattctta

SEQ ID NO: 151123 - DNA, 15 bp, Homo sapiens
gtttcccattcttag

SEQ ID NO: 151124 - DNA, 15 bp, Homo sapiens
tttcccattcttagc

SEQ ID NO: 151125 - DNA, 15 bp, Homo sapiens
ttcccattcttagct

SEQ ID NO: 151126 - DNA, 15 bp, Homo sapiens
tcccattcttagctg

SEQ ID NO: 151127 - DNA, 15 bp, Homo sapiens
cccattcttagctgc

SEQ ID NO: 151128 - DNA, 15 bp, Homo sapiens
ccattcttagctgca

SEQ ID NO: 151129 - DNA, 15 bp, Homo sapiens
cattcttagctgcaa

SEQ ID NO: 151130 - DNA, 15 bp, Homo sapiens
attcttagctgcaag

SEQ ID NO: 151131 - DNA, 15 bp, Homo sapiens
ttcttagctgcaagg

SEQ ID NO: 151132 - DNA, 15 bp, Homo sapiens
tcttagctgcaaggc

SEQ ID NO: 151133 - DNA, 15 bp, Homo sapiens
cttagctgcaaggca

SEQ ID NO: 151134 - DNA, 15 bp, Homo sapiens
ttagctgcaaggcag

SEQ ID NO: 151135 - DNA, 15 bp, Homo sapiens
tagctgcaaggcagt

SEQ ID NO: 151136 - DNA, 15 bp, Homo sapiens
agctgcaaggcagtg

SEQ ID NO: 151137 - DNA, 15 bp, Homo sapiens
gctgcaaggcagtgt

SEQ ID NO: 151138 - DNA, 15 bp, Homo sapiens
ctgcaaggcagtgtt

SEQ ID NO: 151139 - DNA, 15 bp, Homo sapiens
tgcaaggcagtgtta

SEQ ID NO: 151140 - DNA, 15 bp, Homo sapiens
gcaaggcagtgttaa

SEQ ID NO: 151141 - DNA, 15 bp, Homo sapiens
caaggcagtgttaaa

SEQ ID NO: 151142 - DNA, 15 bp, Homo sapiens
aaggcagtgttaaag

SEQ ID NO: 151143 - DNA, 15 bp, Homo sapiens
aggcagtgttaaaga

SEQ ID NO: 151144 - DNA, 15 bp, Homo sapiens
ggcagtgttaaagaa

SEQ ID NO: 151145 - DNA, 15 bp, Homo sapiens
gcagtgttaaagaac

SEQ ID NO: 151146 - DNA, 15 bp, Homo sapiens
cagtgttaaagaacc

SEQ ID NO: 151147 - DNA, 15 bp, Homo sapiens
agtgttaaagaaccc

SEQ ID NO: 151148 - DNA, 15 bp, Homo sapiens
gtgttaaagaaccct

SEQ ID NO: 151149 - DNA, 15 bp, Homo sapiens
tgttaaagaaccctg

SEQ ID NO: 151150 - DNA, 15 bp, Homo sapiens
gttaaagaaccctgt

SEQ ID NO: 151151 - DNA, 15 bp, Homo sapiens
ttaaagaaccctgtg

SEQ ID NO: 151152 - DNA, 15 bp, Homo sapiens
taaagaaccctgtgt

SEQ ID NO: 151153 - DNA, 15 bp, Homo sapiens
aaagaaccctgtgtc

SEQ ID NO: 151154 - DNA, 15 bp, Homo sapiens
aagaaccctgtgtct

SEQ ID NO: 151155 - DNA, 15 bp, Homo sapiens
agaaccctgtgtctc

SEQ ID NO: 151156 - DNA, 15 bp, Homo sapiens
gaaccctgtgtctcc

SEQ ID NO: 151157 - DNA, 15 bp, Homo sapiens
aaccctgtgtctcca

SEQ ID NO: 151158 - DNA, 15 bp, Homo sapiens
accctgtgtctccat

SEQ ID NO: 151159 - DNA, 15 bp, Homo sapiens
ccctgtgtctccata

SEQ ID NO: 151160 - DNA, 15 bp, Homo sapiens
cctgtgtctccatat

SEQ ID NO: 151161 - DNA, 15 bp, Homo sapiens
ctgtgtctccatatc

SEQ ID NO: 151162 - DNA, 15 bp, Homo sapiens
tgtgtctccatatcc

SEQ ID NO: 151163 - DNA, 15 bp, Homo sapiens
gtgtctccatatcca

SEQ ID NO: 151164 - DNA, 15 bp, Homo sapiens
tgtctccatatccac

SEQ ID NO: 151165 - DNA, 15 bp, Homo sapiens
gtctccatatccact

SEQ ID NO: 151166 - DNA, 15 bp, Homo sapiens
tctccatatccactc

SEQ ID NO: 151167 - DNA, 15 bp, Homo sapiens
ctccatatccactcc

SEQ ID NO: 151168 - DNA, 15 bp, Homo sapiens
tccatatccactccc

SEQ ID NO: 151169 - DNA, 15 bp, Homo sapiens
ccatatccactcccc

SEQ ID NO: 151170 - DNA, 15 bp, Homo sapiens
catatccactcccca

SEQ ID NO: 151171 - DNA, 15 bp, Homo sapiens
atatccactccccac

SEQ ID NO: 151172 - DNA, 15 bp, Homo sapiens
tatccactccccaca

SEQ ID NO: 151173 - DNA, 15 bp, Homo sapiens
atccactccccacac

SEQ ID NO: 151174 - DNA, 15 bp, Homo sapiens
tccactccccacact

SEQ ID NO: 151175 - DNA, 15 bp, Homo sapiens
ccactccccacactt

SEQ ID NO: 151176 - DNA, 15 bp, Homo sapiens
cactccccacactta

SEQ ID NO: 151177 - DNA, 15 bp, Homo sapiens
actccccacacttaa

SEQ ID NO: 151178 - DNA, 15 bp, Homo sapiens
ctccccacacttaag

SEQ ID NO: 151179 - DNA, 15 bp, Homo sapiens
tccccacacttaagc

SEQ ID NO: 151180 - DNA, 15 bp, Homo sapiens
ccccacacttaagca

SEQ ID NO: 151181 - DNA, 15 bp, Homo sapiens
cccacacttaagcac

SEQ ID NO: 151182 - DNA, 15 bp, Homo sapiens
ccacacttaagcact

SEQ ID NO: 151183 - DNA, 15 bp, Homo sapiens
cacacttaagcactt

SEQ ID NO: 151184 - DNA, 15 bp, Homo sapiens
acacttaagcacttt

SEQ ID NO: 151185 - DNA, 15 bp, Homo sapiens
cacttaagcactttt

SEQ ID NO: 151186 - DNA, 15 bp, Homo sapiens
acttaagcacttttg

SEQ ID NO: 151187 - DNA, 15 bp, Homo sapiens
cttaagcacttttgt

SEQ ID NO: 151188 - DNA, 15 bp, Homo sapiens
ttaagcacttttgtg

SEQ ID NO: 151189 - DNA, 15 bp, Homo sapiens
taagcacttttgtgg

SEQ ID NO: 151190 - DNA, 15 bp, Homo sapiens
aagcacttttgtggg

SEQ ID NO: 151191 - DNA, 15 bp, Homo sapiens
agcacttttgtgggc

SEQ ID NO: 151192 - DNA, 15 bp, Homo sapiens
gcacttttgtgggcc

SEQ ID NO: 151193 - DNA, 15 bp, Homo sapiens
cacttttgtgggccc

SEQ ID NO: 151194 - DNA, 15 bp, Homo sapiens
acttttgtgggcccg

SEQ ID NO: 151195 - DNA, 15 bp, Homo sapiens
cttttgtgggcccgt

SEQ ID NO: 151196 - DNA, 15 bp, Homo sapiens
ttttgtgggcccgtg

SEQ ID NO: 151197 - DNA, 15 bp, Homo sapiens
tttgtgggcccgtgt

SEQ ID NO: 151198 - DNA, 15 bp, Homo sapiens
ttgtgggcccgtgtg

SEQ ID NO: 151199 - DNA, 15 bp, Homo sapiens
tgtgggcccgtgtgc

SEQ ID NO: 151200 - DNA, 15 bp, Homo sapiens
gtgggcccgtgtgcc

SEQ ID NO: 151201 - DNA, 15 bp, Homo sapiens
tgggcccgtgtgccg

SEQ ID NO: 151202 - DNA, 15 bp, Homo sapiens
gggcccgtgtgccgt

SEQ ID NO: 151203 - DNA, 15 bp, Homo sapiens
ggcccgtgtgccgta

SEQ ID NO: 151204 - DNA, 15 bp, Homo sapiens
gcccgtgtgccgtat

SEQ ID NO: 151205 - DNA, 15 bp, Homo sapiens
cccgtgtgccgtatg

SEQ ID NO: 151206 - DNA, 15 bp, Homo sapiens
ccgtgtgccgtatgc

SEQ ID NO: 151207 - DNA, 15 bp, Homo sapiens
cgtgtgccgtatgcc

SEQ ID NO: 151208 - DNA, 15 bp, Homo sapiens
gtgtgccgtatgcct

SEQ ID NO: 151209 - DNA, 15 bp, Homo sapiens
tgtgccgtatgcctc

SEQ ID NO: 151210 - DNA, 15 bp, Homo sapiens
gtgccgtatgcctcg

SEQ ID NO: 151211 - DNA, 15 bp, Homo sapiens
tgccgtatgcctcgt

SEQ ID NO: 151212 - DNA, 15 bp, Homo sapiens
gccgtatgcctcgtg

SEQ ID NO: 151213 - DNA, 15 bp, Homo sapiens
ccgtatgcctcgtgg

SEQ ID NO: 151214 - DNA, 15 bp, Homo sapiens
cgtatgcctcgtggc

SEQ ID NO: 151215 - DNA, 15 bp, Homo sapiens
gtatgcctcgtggca

SEQ ID NO: 151216 - DNA, 15 bp, Homo sapiens
tatgcctcgtggcag

SEQ ID NO: 151217 - DNA, 15 bp, Homo sapiens
atgcctcgtggcagc

SEQ ID NO: 151218 - DNA, 15 bp, Homo sapiens
tgcctcgtggcagca

SEQ ID NO: 151219 - DNA, 15 bp, Homo sapiens
gcctcgtggcagcag

SEQ ID NO: 151220 - DNA, 15 bp, Homo sapiens
cctcgtggcagcagg

SEQ ID NO: 151221 - DNA, 15 bp, Homo sapiens
ctcgtggcagcaggg

SEQ ID NO: 151222 - DNA, 15 bp, Homo sapiens
tcgtggcagcaggga

SEQ ID NO: 151223 - DNA, 15 bp, Homo sapiens
cgtggcagcagggat

SEQ ID NO: 151224 - DNA, 15 bp, Homo sapiens
gtggcagcagggatc

SEQ ID NO: 151225 - DNA, 15 bp, Homo sapiens
tggcagcagggatcc

SEQ ID NO: 151226 - DNA, 15 bp, Homo sapiens
ggcagcagggatcca

SEQ ID NO: 151227 - DNA, 15 bp, Homo sapiens
gcagcagggatccaa

SEQ ID NO: 151228 - DNA, 15 bp, Homo sapiens
cagcagggatccaat

SEQ ID NO: 151229 - DNA, 15 bp, Homo sapiens
agcagggatccaatg

SEQ ID NO: 151230 - DNA, 15 bp, Homo sapiens
gcagggatccaatgt

SEQ ID NO: 151231 - DNA, 15 bp, Homo sapiens
cagggatccaatgtc

SEQ ID NO: 151232 - DNA, 15 bp, Homo sapiens
agggatccaatgtca

SEQ ID NO: 151233 - DNA, 15 bp, Homo sapiens
gggatccaatgtcac

SEQ ID NO: 151234 - DNA, 15 bp, Homo sapiens
ggatccaatgtcaca

SEQ ID NO: 151235 - DNA, 15 bp, Homo sapiens
gatccaatgtcacag

SEQ ID NO: 151236 - DNA, 15 bp, Homo sapiens
atccaatgtcacagt

SEQ ID NO: 151237 - DNA, 15 bp, Homo sapiens
tccaatgtcacagtt

SEQ ID NO: 151238 - DNA, 15 bp, Homo sapiens
ccaatgtcacagttt

SEQ ID NO: 151239 - DNA, 15 bp, Homo sapiens
caatgtcacagtttt

SEQ ID NO: 151240 - DNA, 15 bp, Homo sapiens
aatgtcacagtttta

SEQ ID NO: 151241 - DNA, 15 bp, Homo sapiens
atgtcacagttttag

SEQ ID NO: 151242 - DNA, 15 bp, Homo sapiens
tgtcacagttttagg

SEQ ID NO: 151243 - DNA, 15 bp, Homo sapiens
gtcacagttttaggc

SEQ ID NO: 151244 - DNA, 15 bp, Homo sapiens
tcacagttttaggca

SEQ ID NO: 151245 - DNA, 15 bp, Homo sapiens
cacagttttaggcag

SEQ ID NO: 151246 - DNA, 15 bp, Homo sapiens
acagttttaggcagt

SEQ ID NO: 151247 - DNA, 15 bp, Homo sapiens
cagttttaggcagtg

SEQ ID NO: 151248 - DNA, 15 bp, Homo sapiens
agttttaggcagtgg

SEQ ID NO: 151249 - DNA, 15 bp, Homo sapiens
gttttaggcagtggc

SEQ ID NO: 151250 - DNA, 15 bp, Homo sapiens
ttttaggcagtggca

SEQ ID NO: 151251 - DNA, 15 bp, Homo sapiens
tttaggcagtggcat

SEQ ID NO: 151252 - DNA, 15 bp, Homo sapiens
ttaggcagtggcatc

SEQ ID NO: 151253 - DNA, 15 bp, Homo sapiens
taggcagtggcatcc

SEQ ID NO: 151254 - DNA, 15 bp, Homo sapiens
aggcagtggcatcct

SEQ ID NO: 151255 - DNA, 15 bp, Homo sapiens
ggcagtggcatcctt

SEQ ID NO: 151256 - DNA, 15 bp, Homo sapiens
gcagtggcatccttt

SEQ ID NO: 151257 - DNA, 15 bp, Homo sapiens
cagtggcatcctttt

SEQ ID NO: 151258 - DNA, 15 bp, Homo sapiens
agtggcatccttttc

SEQ ID NO: 151259 - DNA, 15 bp, Homo sapiens
gtggcatccttttcc

SEQ ID NO: 151260 - DNA, 15 bp, Homo sapiens
tggcatccttttcct

SEQ ID NO: 151261 - DNA, 15 bp, Homo sapiens
ggcatccttttcctt

SEQ ID NO: 151262 - DNA, 15 bp, Homo sapiens
gcatccttttccttg

SEQ ID NO: 151263 - DNA, 15 bp, Homo sapiens
catccttttccttga

SEQ ID NO: 151264 - DNA, 15 bp, Homo sapiens
atccttttccttgaa

SEQ ID NO: 151265 - DNA, 15 bp, Homo sapiens
tccttttccttgaaa

SEQ ID NO: 151266 - DNA, 15 bp, Homo sapiens
ccttttccttgaaaa

SEQ ID NO: 151267 - DNA, 15 bp, Homo sapiens
cttttccttgaaaac

SEQ ID NO: 151268 - DNA, 15 bp, Homo sapiens
ttttccttgaaaact

SEQ ID NO: 151269 - DNA, 15 bp, Homo sapiens
tttccttgaaaactt

SEQ ID NO: 151270 - DNA, 15 bp, Homo sapiens
ttccttgaaaacttg

SEQ ID NO: 151271 - DNA, 15 bp, Homo sapiens
tccttgaaaacttga

SEQ ID NO: 151272 - DNA, 15 bp, Homo sapiens
ccttgaaaacttgat

SEQ ID NO: 151273 - DNA, 15 bp, Homo sapiens
cttgaaaacttgatg

SEQ ID NO: 151274 - DNA, 15 bp, Homo sapiens
ttgaaaacttgatgc

SEQ ID NO: 151275 - DNA, 15 bp, Homo sapiens
tgaaaacttgatgca

SEQ ID NO: 151276 - DNA, 15 bp, Homo sapiens
gaaaacttgatgcag

SEQ ID NO: 151277 - DNA, 15 bp, Homo sapiens
aaaacttgatgcagg

SEQ ID NO: 151278 - DNA, 15 bp, Homo sapiens
aaacttgatgcaggg

SEQ ID NO: 151279 - DNA, 15 bp, Homo sapiens
aacttgatgcagggg

SEQ ID NO: 151280 - DNA, 15 bp, Homo sapiens
acttgatgcagggga

SEQ ID NO: 151281 - DNA, 15 bp, Homo sapiens
cttgatgcaggggaa

SEQ ID NO: 151282 - DNA, 15 bp, Homo sapiens
ttgatgcaggggaac

SEQ ID NO: 151283 - DNA, 15 bp, Homo sapiens
tgatgcaggggaacc

SEQ ID NO: 151284 - DNA, 15 bp, Homo sapiens
gatgcaggggaacct

SEQ ID NO: 151285 - DNA, 15 bp, Homo sapiens
atgcaggggaacctt

SEQ ID NO: 151286 - DNA, 15 bp, Homo sapiens
tgcaggggaaccttt

SEQ ID NO: 151287 - DNA, 15 bp, Homo sapiens
gcaggggaacctttc

SEQ ID NO: 151288 - DNA, 15 bp, Homo sapiens
caggggaacctttct

SEQ ID NO: 151289 - DNA, 15 bp, Homo sapiens
aggggaacctttctc

SEQ ID NO: 151290 - DNA, 15 bp, Homo sapiens
ggggaacctttctcc

SEQ ID NO: 151291 - DNA, 15 bp, Homo sapiens
gggaacctttctcca

SEQ ID NO: 151292 - DNA, 15 bp, Homo sapiens
ggaacctttctccat

SEQ ID NO: 151293 - DNA, 15 bp, Homo sapiens
gaacctttctccatt

SEQ ID NO: 151294 - DNA, 15 bp, Homo sapiens
aacctttctccattt

SEQ ID NO: 151295 - DNA, 15 bp, Homo sapiens
acctttctccatttc

SEQ ID NO: 151296 - DNA, 15 bp, Homo sapiens
cctttctccatttcc

SEQ ID NO: 151297 - DNA, 15 bp, Homo sapiens
ctttctccatttcca

SEQ ID NO: 151298 - DNA, 15 bp, Homo sapiens
tttctccatttccaa

SEQ ID NO: 151299 - DNA, 15 bp, Homo sapiens
ttctccatttccaac

SEQ ID NO: 151300 - DNA, 15 bp, Homo sapiens
tctccatttccaacc

SEQ ID NO: 151301 - DNA, 15 bp, Homo sapiens
ctccatttccaacca

SEQ ID NO: 151302 - DNA, 15 bp, Homo sapiens
tccatttccaaccac

SEQ ID NO: 151303 - DNA, 15 bp, Homo sapiens
ccatttccaaccaca

SEQ ID NO: 151304 - DNA, 15 bp, Homo sapiens
catttccaaccacag

SEQ ID NO: 151305 - DNA, 15 bp, Homo sapiens
atttccaaccacagg

SEQ ID NO: 151306 - DNA, 15 bp, Homo sapiens
tttccaaccacaggt

SEQ ID NO: 151307 - DNA, 15 bp, Homo sapiens
ttccaaccacaggtg

SEQ ID NO: 151308 - DNA, 15 bp, Homo sapiens
tccaaccacaggtgt

SEQ ID NO: 151309 - DNA, 15 bp, Homo sapiens
ccaaccacaggtgtg

SEQ ID NO: 151310 - DNA, 15 bp, Homo sapiens
caaccacaggtgtgt

SEQ ID NO: 151311 - DNA, 15 bp, Homo sapiens
aaccacaggtgtgtc

SEQ ID NO: 151312 - DNA, 15 bp, Homo sapiens
accacaggtgtgtct

SEQ ID NO: 151313 - DNA, 15 bp, Homo sapiens
ccacaggtgtgtctt

SEQ ID NO: 151314 - DNA, 15 bp, Homo sapiens
cacaggtgtgtcttt

SEQ ID NO: 151315 - DNA, 15 bp, Homo sapiens
acaggtgtgtctttc

SEQ ID NO: 151316 - DNA, 15 bp, Homo sapiens
caggtgtgtctttca

SEQ ID NO: 151317 - DNA, 15 bp, Homo sapiens
aggtgtgtctttcag

SEQ ID NO: 151318 - DNA, 15 bp, Homo sapiens
ggtgtgtctttcaga

SEQ ID NO: 151319 - DNA, 15 bp, Homo sapiens
gtgtgtctttcagac

SEQ ID NO: 151320 - DNA, 15 bp, Homo sapiens
tgtgtctttcagaca

SEQ ID NO: 151321 - DNA, 15 bp, Homo sapiens
gtgtctttcagacac

SEQ ID NO: 151322 - DNA, 15 bp, Homo sapiens
tgtctttcagacact

SEQ ID NO: 151323 - DNA, 15 bp, Homo sapiens
gtctttcagacactg

SEQ ID NO: 151324 - DNA, 15 bp, Homo sapiens
tctttcagacactga

SEQ ID NO: 151325 - DNA, 15 bp, Homo sapiens
ctttcagacactgag

SEQ ID NO: 151326 - DNA, 15 bp, Homo sapiens
tttcagacactgagt

SEQ ID NO: 151327 - DNA, 15 bp, Homo sapiens
ttcagacactgagtg

SEQ ID NO: 151328 - DNA, 15 bp, Homo sapiens
tcagacactgagtga

SEQ ID NO: 151329 - DNA, 15 bp, Homo sapiens
cagacactgagtgag

SEQ ID NO: 151330 - DNA, 15 bp, Homo sapiens
agacactgagtgagg

SEQ ID NO: 151331 - DNA, 15 bp, Homo sapiens
gacactgagtgaggc

SEQ ID NO: 151332 - DNA, 15 bp, Homo sapiens
acactgagtgaggca

SEQ ID NO: 151333 - DNA, 15 bp, Homo sapiens
cactgagtgaggcag

SEQ ID NO: 151334 - DNA, 15 bp, Homo sapiens
actgagtgaggcagg

SEQ ID NO: 151335 - DNA, 15 bp, Homo sapiens
ctgagtgaggcaggt

SEQ ID NO: 151336 - DNA, 15 bp, Homo sapiens
tgagtgaggcaggtt

SEQ ID NO: 151337 - DNA, 15 bp, Homo sapiens
gagtgaggcaggttt

SEQ ID NO: 151338 - DNA, 15 bp, Homo sapiens
agtgaggcaggtttt

SEQ ID NO: 151339 - DNA, 15 bp, Homo sapiens
gtgaggcaggttttg

SEQ ID NO: 151340 - DNA, 15 bp, Homo sapiens
tgaggcaggttttgt

SEQ ID NO: 151341 - DNA, 15 bp, Homo sapiens
gaggcaggttttgta

SEQ ID NO: 151342 - DNA, 15 bp, Homo sapiens
aggcaggttttgtac

SEQ ID NO: 151343 - DNA, 15 bp, Homo sapiens
ggcaggttttgtact

SEQ ID NO: 151344 - DNA, 15 bp, Homo sapiens
gcaggttttgtactt

SEQ ID NO: 151345 - DNA, 15 bp, Homo sapiens
caggttttgtacttt

SEQ ID NO: 151346 - DNA, 15 bp, Homo sapiens
aggttttgtacttta

SEQ ID NO: 151347 - DNA, 15 bp, Homo sapiens
ggttttgtactttat

SEQ ID NO: 151348 - DNA, 15 bp, Homo sapiens
gttttgtactttatt

SEQ ID NO: 151349 - DNA, 15 bp, Homo sapiens
ttttgtactttattg

SEQ ID NO: 151350 - DNA, 15 bp, Homo sapiens
tttgtactttattgt

SEQ ID NO: 151351 - DNA, 15 bp, Homo sapiens
ttgtactttattgta

SEQ ID NO: 151352 - DNA, 15 bp, Homo sapiens
tgtactttattgtaa

SEQ ID NO: 151353 - DNA, 15 bp, Homo sapiens
gtactttattgtaac

SEQ ID NO: 151354 - DNA, 15 bp, Homo sapiens
tactttattgtaaca

SEQ ID NO: 151355 - DNA, 15 bp, Homo sapiens
actttattgtaacac

SEQ ID NO: 151356 - DNA, 15 bp, Homo sapiens
ctttattgtaacaca

SEQ ID NO: 151357 - DNA, 15 bp, Homo sapiens
tttattgtaacacaa

SEQ ID NO: 151358 - DNA, 15 bp, Homo sapiens
ttattgtaacacaag

SEQ ID NO: 151359 - DNA, 15 bp, Homo sapiens
tattgtaacacaaga

SEQ ID NO: 151360 - DNA, 15 bp, Homo sapiens
attgtaacacaagaa

SEQ ID NO: 151361 - DNA, 15 bp, Homo sapiens
ttgtaacacaagaac

SEQ ID NO: 151362 - DNA, 15 bp, Homo sapiens
tgtaacacaagaacc

SEQ ID NO: 151363 - DNA, 15 bp, Homo sapiens
gtaacacaagaacct

SEQ ID NO: 151364 - DNA, 15 bp, Homo sapiens
taacacaagaacctt

SEQ ID NO: 151365 - DNA, 15 bp, Homo sapiens
aacacaagaaccttt

SEQ ID NO: 151366 - DNA, 15 bp, Homo sapiens
acacaagaacctttt

SEQ ID NO: 151367 - DNA, 15 bp, Homo sapiens
cacaagaaccttttc

SEQ ID NO: 151368 - DNA, 15 bp, Homo sapiens
acaagaaccttttct

SEQ ID NO: 151369 - DNA, 15 bp, Homo sapiens
caagaaccttttctt

SEQ ID NO: 151370 - DNA, 15 bp, Homo sapiens
aagaaccttttcttc

SEQ ID NO: 151371 - DNA, 15 bp, Homo sapiens
agaaccttttcttct

SEQ ID NO: 151372 - DNA, 15 bp, Homo sapiens
gaaccttttcttctc

SEQ ID NO: 151373 - DNA, 15 bp, Homo sapiens
aaccttttcttctct

SEQ ID NO: 151374 - DNA, 15 bp, Homo sapiens
accttttcttctctg

SEQ ID NO: 151375 - DNA, 15 bp, Homo sapiens
ccttttcttctctgg

SEQ ID NO: 151376 - DNA, 15 bp, Homo sapiens
cttttcttctctgga

SEQ ID NO: 151377 - DNA, 15 bp, Homo sapiens
ttttcttctctggag

SEQ ID NO: 151378 - DNA, 15 bp, Homo sapiens
tttcttctctggagt

SEQ ID NO: 151379 - DNA, 15 bp, Homo sapiens
ttcttctctggagta

SEQ ID NO: 151380 - DNA, 15 bp, Homo sapiens
tcttctctggagtaa

SEQ ID NO: 151381 - DNA, 15 bp, Homo sapiens
cttctctggagtaaa

SEQ ID NO: 151382 - DNA, 15 bp, Homo sapiens
ttctctggagtaaag

SEQ ID NO: 151383 - DNA, 15 bp, Homo sapiens
tctctggagtaaagc

SEQ ID NO: 151384 - DNA, 15 bp, Homo sapiens
ctctggagtaaagca

SEQ ID NO: 151385 - DNA, 15 bp, Homo sapiens
tctggagtaaagcac

SEQ ID NO: 151386 - DNA, 15 bp, Homo sapiens
ctggagtaaagcact

SEQ ID NO: 151387 - DNA, 15 bp, Homo sapiens
tggagtaaagcactc

SEQ ID NO: 151388 - DNA, 15 bp, Homo sapiens
ggagtaaagcactcc

SEQ ID NO: 151389 - DNA, 15 bp, Homo sapiens
gagtaaagcactcca

SEQ ID NO: 151390 - DNA, 15 bp, Homo sapiens
agtaaagcactccag

SEQ ID NO: 151391 - DNA, 15 bp, Homo sapiens
gtaaagcactccaga

SEQ ID NO: 151392 - DNA, 15 bp, Homo sapiens
taaagcactccagac

SEQ ID NO: 151393 - DNA, 15 bp, Homo sapiens
aaagcactccagaca

SEQ ID NO: 151394 - DNA, 15 bp, Homo sapiens
aagcactccagacat

SEQ ID NO: 151395 - DNA, 15 bp, Homo sapiens
agcactccagacatt

SEQ ID NO: 151396 - DNA, 15 bp, Homo sapiens
gcactccagacattc

SEQ ID NO: 151397 - DNA, 15 bp, Homo sapiens
cactccagacattcg

SEQ ID NO: 151398 - DNA, 15 bp, Homo sapiens
actccagacattcgc

SEQ ID NO: 151399 - DNA, 15 bp, Homo sapiens
ctccagacattcgca

SEQ ID NO: 151400 - DNA, 15 bp, Homo sapiens
tccagacattcgcaa

SEQ ID NO: 151401 - DNA, 15 bp, Homo sapiens
ccagacattcgcaag

SEQ ID NO: 151402 - DNA, 15 bp, Homo sapiens
cagacattcgcaagt

SEQ ID NO: 151403 - DNA, 15 bp, Homo sapiens
agacattcgcaagtt

SEQ ID NO: 151404 - DNA, 15 bp, Homo sapiens
gacattcgcaagttg

SEQ ID NO: 151405 - DNA, 15 bp, Homo sapiens
acattcgcaagttgc

SEQ ID NO: 151406 - DNA, 15 bp, Homo sapiens
cattcgcaagttgct

SEQ ID NO: 151407 - DNA, 15 bp, Homo sapiens
attcgcaagttgctt

SEQ ID NO: 151408 - DNA, 15 bp, Homo sapiens
ttcgcaagttgcttt

SEQ ID NO: 151409 - DNA, 15 bp, Homo sapiens
tcgcaagttgcttta

SEQ ID NO: 151410 - DNA, 15 bp, Homo sapiens
cgcaagttgctttac

SEQ ID NO: 151411 - DNA, 15 bp, Homo sapiens
gcaagttgctttaca

SEQ ID NO: 151412 - DNA, 15 bp, Homo sapiens
caagttgctttacaa

SEQ ID NO: 151413 - DNA, 15 bp, Homo sapiens
aagttgctttacaag

SEQ ID NO: 151414 - DNA, 15 bp, Homo sapiens
agttgctttacaagc

SEQ ID NO: 151415 - DNA, 15 bp, Homo sapiens
gttgctttacaagcc

SEQ ID NO: 151416 - DNA, 15 bp, Homo sapiens
ttgctttacaagcct

SEQ ID NO: 151417 - DNA, 15 bp, Homo sapiens
tgctttacaagcctt

SEQ ID NO: 151418 - DNA, 15 bp, Homo sapiens
gctttacaagcctta

SEQ ID NO: 151419 - DNA, 15 bp, Homo sapiens
ctttacaagccttaa

SEQ ID NO: 151420 - DNA, 15 bp, Homo sapiens
tttacaagccttaaa

SEQ ID NO: 151421 - DNA, 15 bp, Homo sapiens
ttacaagccttaaaa

SEQ ID NO: 151422 - DNA, 15 bp, Homo sapiens
tacaagccttaaaag

SEQ ID NO: 151423 - DNA, 15 bp, Homo sapiens
acaagccttaaaagg

SEQ ID NO: 151424 - DNA, 15 bp, Homo sapiens
caagccttaaaagga

SEQ ID NO: 151425 - DNA, 15 bp, Homo sapiens
aagccttaaaaggat

SEQ ID NO: 151426 - DNA, 15 bp, Homo sapiens
agccttaaaaggatg

SEQ ID NO: 151427 - DNA, 15 bp, Homo sapiens
gccttaaaaggatgg

SEQ ID NO: 151428 - DNA, 15 bp, Homo sapiens
ccttaaaaggatggt

SEQ ID NO: 151429 - DNA, 15 bp, Homo sapiens
cttaaaaggatggta

SEQ ID NO: 151430 - DNA, 15 bp, Homo sapiens
ttaaaaggatggtat

SEQ ID NO: 151431 - DNA, 15 bp, Homo sapiens
taaaaggatggtatt

SEQ ID NO: 151432 - DNA, 15 bp, Homo sapiens
aaaaggatggtattg

SEQ ID NO: 151433 - DNA, 15 bp, Homo sapiens
aaaggatggtattgt

SEQ ID NO: 151434 - DNA, 15 bp, Homo sapiens
aaggatggtattgta

SEQ ID NO: 151435 - DNA, 15 bp, Homo sapiens
aggatggtattgtag

SEQ ID NO: 151436 - DNA, 15 bp, Homo sapiens
ggatggtattgtagg

SEQ ID NO: 151437 - DNA, 15 bp, Homo sapiens
gatggtattgtaggc

SEQ ID NO: 151438 - DNA, 15 bp, Homo sapiens
atggtattgtaggca

SEQ ID NO: 151439 - DNA, 15 bp, Homo sapiens
tggtattgtaggcaa

SEQ ID NO: 151440 - DNA, 15 bp, Homo sapiens
ggtattgtaggcaac

SEQ ID NO: 151441 - DNA, 15 bp, Homo sapiens
gtattgtaggcaact

SEQ ID NO: 151442 - DNA, 15 bp, Homo sapiens
tattgtaggcaactt

SEQ ID NO: 151443 - DNA, 15 bp, Homo sapiens
attgtaggcaacttt

SEQ ID NO: 151444 - DNA, 15 bp, Homo sapiens
ttgtaggcaacttta

SEQ ID NO: 151445 - DNA, 15 bp, Homo sapiens
tgtaggcaactttaa

SEQ ID NO: 151446 - DNA, 15 bp, Homo sapiens
gtaggcaactttaat

SEQ ID NO: 151447 - DNA, 15 bp, Homo sapiens
taggcaactttaatt

SEQ ID NO: 151448 - DNA, 15 bp, Homo sapiens
aggcaactttaatta

SEQ ID NO: 151449 - DNA, 15 bp, Homo sapiens
ggcaactttaattaa

SEQ ID NO: 151450 - DNA, 15 bp, Homo sapiens
gcaactttaattaaa

SEQ ID NO: 151451 - DNA, 15 bp, Homo sapiens
caactttaattaaat

SEQ ID NO: 151452 - DNA, 15 bp, Homo sapiens
aactttaattaaatc

SEQ ID NO: 151453 - DNA, 15 bp, Homo sapiens
actttaattaaatcc

SEQ ID NO: 151454 - DNA, 15 bp, Homo sapiens
ctttaattaaatccc

SEQ ID NO: 151455 - DNA, 15 bp, Homo sapiens
tttaattaaatccca

SEQ ID NO: 151456 - DNA, 15 bp, Homo sapiens
ttaattaaatcccat

SEQ ID NO: 151457 - DNA, 15 bp, Homo sapiens
taattaaatcccatc

SEQ ID NO: 151458 - DNA, 15 bp, Homo sapiens
aattaaatcccatct

SEQ ID NO: 151459 - DNA, 15 bp, Homo sapiens
attaaatcccatctc

SEQ ID NO: 151460 - DNA, 15 bp, Homo sapiens
ttaaatcccatctcc

SEQ ID NO: 151461 - DNA, 15 bp, Homo sapiens
taaatcccatctcct

SEQ ID NO: 151462 - DNA, 15 bp, Homo sapiens
aaatcccatctcctc

SEQ ID NO: 151463 - DNA, 15 bp, Homo sapiens
aatcccatctcctcc

SEQ ID NO: 151464 - DNA, 15 bp, Homo sapiens
atcccatctcctcct

SEQ ID NO: 151465 - DNA, 15 bp, Homo sapiens
tcccatctcctcctc

SEQ ID NO: 151466 - DNA, 15 bp, Homo sapiens
cccatctcctcctct

SEQ ID NO: 151467 - DNA, 15 bp, Homo sapiens
ccatctcctcctctc

SEQ ID NO: 151468 - DNA, 15 bp, Homo sapiens
catctcctcctctcc

SEQ ID NO: 151469 - DNA, 15 bp, Homo sapiens
atctcctcctctccc

SEQ ID NO: 151470 - DNA, 15 bp, Homo sapiens
tctcctcctctcccc

SEQ ID NO: 151471 - DNA, 15 bp, Homo sapiens
ctcctcctctccccc

SEQ ID NO: 151472 - DNA, 15 bp, Homo sapiens
tcctcctctccccca

SEQ ID NO: 151473 - DNA, 15 bp, Homo sapiens
cctcctctcccccag

SEQ ID NO: 151474 - DNA, 15 bp, Homo sapiens
ctcctctcccccagc

SEQ ID NO: 151475 - DNA, 15 bp, Homo sapiens
tcctctcccccagct

SEQ ID NO: 151476 - DNA, 15 bp, Homo sapiens
cctctcccccagctt

SEQ ID NO: 151477 - DNA, 15 bp, Homo sapiens
ctctcccccagcttg

SEQ ID NO: 151478 - DNA, 15 bp, Homo sapiens
tctcccccagcttgc

SEQ ID NO: 151479 - DNA, 15 bp, Homo sapiens
ctcccccagcttgca

SEQ ID NO: 151480 - DNA, 15 bp, Homo sapiens
tcccccagcttgcaa

SEQ ID NO: 151481 - DNA, 15 bp, Homo sapiens
cccccagcttgcaag

SEQ ID NO: 151482 - DNA, 15 bp, Homo sapiens
ccccagcttgcaagt

SEQ ID NO: 151483 - DNA, 15 bp, Homo sapiens
cccagcttgcaagtt

SEQ ID NO: 151484 - DNA, 15 bp, Homo sapiens
ccagcttgcaagttg

SEQ ID NO: 151485 - DNA, 15 bp, Homo sapiens
cagcttgcaagttga

SEQ ID NO: 151486 - DNA, 15 bp, Homo sapiens
agcttgcaagttgac

SEQ ID NO: 151487 - DNA, 15 bp, Homo sapiens
gcttgcaagttgacc

SEQ ID NO: 151488 - DNA, 15 bp, Homo sapiens
cttgcaagttgaccc

SEQ ID NO: 151489 - DNA, 15 bp, Homo sapiens
ttgcaagttgaccca

SEQ ID NO: 151490 - DNA, 15 bp, Homo sapiens
tgcaagttgacccaa

SEQ ID NO: 151491 - DNA, 15 bp, Homo sapiens
gcaagttgacccaag

SEQ ID NO: 151492 - DNA, 15 bp, Homo sapiens
caagttgacccaagg

SEQ ID NO: 151493 - DNA, 15 bp, Homo sapiens
aagttgacccaagga

SEQ ID NO: 151494 - DNA, 15 bp, Homo sapiens
agttgacccaaggaa

SEQ ID NO: 151495 - DNA, 15 bp, Homo sapiens
gttgacccaaggaag

SEQ ID NO: 151496 - DNA, 15 bp, Homo sapiens
ttgacccaaggaagc

SEQ ID NO: 151497 - DNA, 15 bp, Homo sapiens
tgacccaaggaagcc

SEQ ID NO: 151498 - DNA, 15 bp, Homo sapiens
gacccaaggaagcct

SEQ ID NO: 151499 - DNA, 15 bp, Homo sapiens
acccaaggaagcctt

SEQ ID NO: 151500 - DNA, 15 bp, Homo sapiens
cccaaggaagccttc

SEQ ID NO: 151501 - DNA, 15 bp, Homo sapiens
ccaaggaagccttca

SEQ ID NO: 151502 - DNA, 15 bp, Homo sapiens
caaggaagccttcat

SEQ ID NO: 151503 - DNA, 15 bp, Homo sapiens
aaggaagccttcatt

SEQ ID NO: 151504 - DNA, 15 bp, Homo sapiens
aggaagccttcattt

SEQ ID NO: 151505 - DNA, 15 bp, Homo sapiens
ggaagccttcatttc

SEQ ID NO: 151506 - DNA, 15 bp, Homo sapiens
gaagccttcatttcc

SEQ ID NO: 151507 - DNA, 15 bp, Homo sapiens
aagccttcatttcca

SEQ ID NO: 151508 - DNA, 15 bp, Homo sapiens
agccttcatttccat

SEQ ID NO: 151509 - DNA, 15 bp, Homo sapiens
gccttcatttccatg

SEQ ID NO: 151510 - DNA, 15 bp, Homo sapiens
ccttcatttccatga

SEQ ID NO: 151511 - DNA, 15 bp, Homo sapiens
cttcatttccatgac

SEQ ID NO: 151512 - DNA, 15 bp, Homo sapiens
ttcatttccatgaca

SEQ ID NO: 151513 - DNA, 15 bp, Homo sapiens
tcatttccatgacag

SEQ ID NO: 151514 - DNA, 15 bp, Homo sapiens
catttccatgacaga

SEQ ID NO: 151515 - DNA, 15 bp, Homo sapiens
atttccatgacagac

SEQ ID NO: 151516 - DNA, 15 bp, Homo sapiens
tttccatgacagact

SEQ ID NO: 151517 - DNA, 15 bp, Homo sapiens
ttccatgacagactt

SEQ ID NO: 151518 - DNA, 15 bp, Homo sapiens
tccatgacagactta

SEQ ID NO: 151519 - DNA, 15 bp, Homo sapiens
ccatgacagacttaa

SEQ ID NO: 151520 - DNA, 15 bp, Homo sapiens
catgacagacttaat

SEQ ID NO: 151521 - DNA, 15 bp, Homo sapiens
atgacagacttaatt

SEQ ID NO: 151522 - DNA, 15 bp, Homo sapiens
tgacagacttaattg

SEQ ID NO: 151523 - DNA, 15 bp, Homo sapiens
gacagacttaattgt

SEQ ID NO: 151524 - DNA, 15 bp, Homo sapiens
acagacttaattgtg

SEQ ID NO: 151525 - DNA, 15 bp, Homo sapiens
cagacttaattgtga

SEQ ID NO: 151526 - DNA, 15 bp, Homo sapiens
agacttaattgtgag

SEQ ID NO: 151527 - DNA, 15 bp, Homo sapiens
gacttaattgtgagg

SEQ ID NO: 151528 - DNA, 15 bp, Homo sapiens
acttaattgtgaggg

SEQ ID NO: 151529 - DNA, 15 bp, Homo sapiens
cttaattgtgagggc

SEQ ID NO: 151530 - DNA, 15 bp, Homo sapiens
ttaattgtgagggca

SEQ ID NO: 151531 - DNA, 15 bp, Homo sapiens
taattgtgagggcat

SEQ ID NO: 151532 - DNA, 15 bp, Homo sapiens
aattgtgagggcatc

SEQ ID NO: 151533 - DNA, 15 bp, Homo sapiens
attgtgagggcatcc

SEQ ID NO: 151534 - DNA, 15 bp, Homo sapiens
ttgtgagggcatcct

SEQ ID NO: 151535 - DNA, 15 bp, Homo sapiens
tgtgagggcatcctc

SEQ ID NO: 151536 - DNA, 15 bp, Homo sapiens
gtgagggcatcctca

SEQ ID NO: 151537 - DNA, 15 bp, Homo sapiens
tgagggcatcctcat

SEQ ID NO: 151538 - DNA, 15 bp, Homo sapiens
gagggcatcctcatt

SEQ ID NO: 151539 - DNA, 15 bp, Homo sapiens
agggcatcctcatta

SEQ ID NO: 151540 - DNA, 15 bp, Homo sapiens
gggcatcctcattaa

SEQ ID NO: 151541 - DNA, 15 bp, Homo sapiens
ggcatcctcattaaa

SEQ ID NO: 151542 - DNA, 15 bp, Homo sapiens
gcatcctcattaaaa

SEQ ID NO: 151543 - DNA, 15 bp, Homo sapiens
catcctcattaaaaa

SEQ ID NO: 151544 - DNA, 15 bp, Homo sapiens
atcctcattaaaaaa

SEQ ID NO: 151545 - DNA, 15 bp, Homo sapiens
tcctcattaaaaaaa

SEQ ID NO: 151546 - DNA, 15 bp, Homo sapiens
cctcattaaaaaaaa

SEQ ID NO: 151547 - DNA, 15 bp, Homo sapiens
ctcattaaaaaaaaa

SEQ ID NO: 151548 - DNA, 15 bp, Homo sapiens
tcattaaaaaaaaaa

SEQ ID NO: 151549 - DNA, 15 bp, Homo sapiens
aaaaaaaaaattcta

SEQ ID NO: 151550 - DNA, 15 bp, Homo sapiens
aaaaaaaaattctat

SEQ ID NO: 151551 - DNA, 15 bp, Homo sapiens
aaaaaaaattctatt

SEQ ID NO: 151552 - DNA, 15 bp, Homo sapiens
aaaaaaattctatta

SEQ ID NO: 151553 - DNA, 15 bp, Homo sapiens
aaaaaattctattat

SEQ ID NO: 151554 - DNA, 15 bp, Homo sapiens
aaaaattctattatc

SEQ ID NO: 151555 - DNA, 15 bp, Homo sapiens
aaaattctattatct

SEQ ID NO: 151556 - DNA, 15 bp, Homo sapiens
aaattctattatctt

SEQ ID NO: 151557 - DNA, 15 bp, Homo sapiens
aattctattatcttt

SEQ ID NO: 151558 - DNA, 15 bp, Homo sapiens
attctattatctttc

SEQ ID NO: 151559 - DNA, 15 bp, Homo sapiens
ttctattatctttcc

SEQ ID NO: 151560 - DNA, 15 bp, Homo sapiens
tctattatctttcca

SEQ ID NO: 151561 - DNA, 15 bp, Homo sapiens
ctattatctttccag

SEQ ID NO: 151562 - DNA, 15 bp, Homo sapiens
tattatctttccagc

SEQ ID NO: 151563 - DNA, 15 bp, Homo sapiens
attatctttccagca

SEQ ID NO: 151564 - DNA, 15 bp, Homo sapiens
ttatctttccagcat

SEQ ID NO: 151565 - DNA, 15 bp, Homo sapiens
tatctttccagcata

SEQ ID NO: 151566 - DNA, 15 bp, Homo sapiens
atctttccagcatat

SEQ ID NO: 151567 - DNA, 15 bp, Homo sapiens
tctttccagcatata

SEQ ID NO: 151568 - DNA, 15 bp, Homo sapiens
ctttccagcatatag

SEQ ID NO: 151569 - DNA, 15 bp, Homo sapiens
tttccagcatataga

SEQ ID NO: 151570 - DNA, 15 bp, Homo sapiens
ttccagcatatagaa

SEQ ID NO: 151571 - DNA, 15 bp, Homo sapiens
tccagcatatagaag

SEQ ID NO: 151572 - DNA, 15 bp, Homo sapiens
ccagcatatagaaga

SEQ ID NO: 151573 - DNA, 15 bp, Homo sapiens
cagcatatagaagat

SEQ ID NO: 151574 - DNA, 15 bp, Homo sapiens
agcatatagaagata

SEQ ID NO: 151575 - DNA, 15 bp, Homo sapiens
gcatatagaagatac

SEQ ID NO: 151576 - DNA, 15 bp, Homo sapiens
catatagaagatact

SEQ ID NO: 151577 - DNA, 15 bp, Homo sapiens
atatagaagatactt

SEQ ID NO: 151578 - DNA, 15 bp, Homo sapiens
tatagaagatacttg

SEQ ID NO: 151579 - DNA, 15 bp, Homo sapiens
atagaagatacttgg

SEQ ID NO: 151580 - DNA, 15 bp, Homo sapiens
tagaagatacttggt

SEQ ID NO: 151581 - DNA, 15 bp, Homo sapiens
agaagatacttggta

SEQ ID NO: 151582 - DNA, 15 bp, Homo sapiens
gaagatacttggtat

SEQ ID NO: 151583 - DNA, 15 bp, Homo sapiens
aagatacttggtatc

SEQ ID NO: 151584 - DNA, 15 bp, Homo sapiens
agatacttggtatct

SEQ ID NO: 151585 - DNA, 15 bp, Homo sapiens
gatacttggtatcta

SEQ ID NO: 151586 - DNA, 15 bp, Homo sapiens
atacttggtatctaa

SEQ ID NO: 151587 - DNA, 15 bp, Homo sapiens
tacttggtatctaaa

SEQ ID NO: 151588 - DNA, 15 bp, Homo sapiens
acttggtatctaaaa

SEQ ID NO: 151589 - DNA, 15 bp, Homo sapiens
cttggtatctaaaaa

SEQ ID NO: 151590 - DNA, 15 bp, Homo sapiens
ttggtatctaaaaat

SEQ ID NO: 151591 - DNA, 15 bp, Homo sapiens
tggtatctaaaaatc

SEQ ID NO: 151592 - DNA, 15 bp, Homo sapiens
ggtatctaaaaatcc

SEQ ID NO: 151593 - DNA, 15 bp, Homo sapiens
gtatctaaaaatccc

SEQ ID NO: 151594 - DNA, 15 bp, Homo sapiens
tatctaaaaatccct

SEQ ID NO: 151595 - DNA, 15 bp, Homo sapiens
atctaaaaatccctg

SEQ ID NO: 151596 - DNA, 15 bp, Homo sapiens
tctaaaaatccctga

SEQ ID NO: 151597 - DNA, 15 bp, Homo sapiens
ctaaaaatccctgaa

SEQ ID NO: 151598 - DNA, 15 bp, Homo sapiens
taaaaatccctgaaa

SEQ ID NO: 151599 - DNA, 15 bp, Homo sapiens
aaaaatccctgaaaa

SEQ ID NO: 151600 - DNA, 15 bp, Homo sapiens
aaaatccctgaaaaa

SEQ ID NO: 151601 - DNA, 15 bp, Homo sapiens
aaatccctgaaaaac

SEQ ID NO: 151602 - DNA, 15 bp, Homo sapiens
aatccctgaaaaact

SEQ ID NO: 151603 - DNA, 15 bp, Homo sapiens
atccctgaaaaactt

SEQ ID NO: 151604 - DNA, 15 bp, Homo sapiens
tccctgaaaaactta

SEQ ID NO: 151605 - DNA, 15 bp, Homo sapiens
ccctgaaaaacttag

SEQ ID NO: 151606 - DNA, 15 bp, Homo sapiens
cctgaaaaacttaga

SEQ ID NO: 151607 - DNA, 15 bp, Homo sapiens
ctgaaaaacttagaa

SEQ ID NO: 151608 - DNA, 15 bp, Homo sapiens
tgaaaaacttagaat

SEQ ID NO: 151609 - DNA, 15 bp, Homo sapiens
gaaaaacttagaatg

SEQ ID NO: 151610 - DNA, 15 bp, Homo sapiens
aaaaacttagaatga

SEQ ID NO: 151611 - DNA, 15 bp, Homo sapiens
aaaacttagaatgaa

SEQ ID NO: 151612 - DNA, 15 bp, Homo sapiens
aaacttagaatgaat

SEQ ID NO: 151613 - DNA, 15 bp, Homo sapiens
aacttagaatgaatt

SEQ ID NO: 151614 - DNA, 15 bp, Homo sapiens
acttagaatgaattt

SEQ ID NO: 151615 - DNA, 15 bp, Homo sapiens
cttagaatgaatttt

SEQ ID NO: 151616 - DNA, 15 bp, Homo sapiens
ttagaatgaattttt

SEQ ID NO: 151617 - DNA, 15 bp, Homo sapiens
tagaatgaattttta

SEQ ID NO: 151618 - DNA, 15 bp, Homo sapiens
agaatgaatttttaa

SEQ ID NO: 151619 - DNA, 15 bp, Homo sapiens
gaatgaatttttaaa

SEQ ID NO: 151620 - DNA, 15 bp, Homo sapiens
aatgaatttttaaaa

SEQ ID NO: 151621 - DNA, 15 bp, Homo sapiens
atgaatttttaaaaa

SEQ ID NO: 151622 - DNA, 15 bp, Homo sapiens
tgaatttttaaaaat

SEQ ID NO: 151623 - DNA, 15 bp, Homo sapiens
gaatttttaaaaatc

SEQ ID NO: 151624 - DNA, 15 bp, Homo sapiens
aatttttaaaaatca

SEQ ID NO: 151625 - DNA, 15 bp, Homo sapiens
atttttaaaaatcag

SEQ ID NO: 151626 - DNA, 15 bp, Homo sapiens
tttttaaaaatcagg

SEQ ID NO: 151627 - DNA, 15 bp, Homo sapiens
ttttaaaaatcaggg

SEQ ID NO: 151628 - DNA, 15 bp, Homo sapiens
tttaaaaatcaggga

SEQ ID NO: 151629 - DNA, 15 bp, Homo sapiens
ttaaaaatcagggat

SEQ ID NO: 151630 - DNA, 15 bp, Homo sapiens
taaaaatcagggatc

SEQ ID NO: 151631 - DNA, 15 bp, Homo sapiens
aaaaatcagggatcc

SEQ ID NO: 151632 - DNA, 15 bp, Homo sapiens
aaaatcagggatcct

SEQ ID NO: 151633 - DNA, 15 bp, Homo sapiens
aaatcagggatcctg

SEQ ID NO: 151634 - DNA, 15 bp, Homo sapiens
aatcagggatcctgc

SEQ ID NO: 151635 - DNA, 15 bp, Homo sapiens
atcagggatcctgct

SEQ ID NO: 151636 - DNA, 15 bp, Homo sapiens
tcagggatcctgctg

SEQ ID NO: 151637 - DNA, 15 bp, Homo sapiens
cagggatcctgctgg

SEQ ID NO: 151638 - DNA, 15 bp, Homo sapiens
agggatcctgctgga

SEQ ID NO: 151639 - DNA, 15 bp, Homo sapiens
gggatcctgctggat

SEQ ID NO: 151640 - DNA, 15 bp, Homo sapiens
ggatcctgctggata

SEQ ID NO: 151641 - DNA, 15 bp, Homo sapiens
gatcctgctggataa

SEQ ID NO: 151642 - DNA, 15 bp, Homo sapiens
atcctgctggataac

SEQ ID NO: 151643 - DNA, 15 bp, Homo sapiens
tcctgctggataacc

SEQ ID NO: 151644 - DNA, 15 bp, Homo sapiens
cctgctggataacca

SEQ ID NO: 151645 - DNA, 15 bp, Homo sapiens
ctgctggataaccaa

SEQ ID NO: 151646 - DNA, 15 bp, Homo sapiens
tgctggataaccaaa

SEQ ID NO: 151647 - DNA, 15 bp, Homo sapiens
gctggataaccaaac

SEQ ID NO: 151648 - DNA, 15 bp, Homo sapiens
ctggataaccaaacc

SEQ ID NO: 151649 - DNA, 15 bp, Homo sapiens
tggataaccaaaccc

SEQ ID NO: 151650 - DNA, 15 bp, Homo sapiens
ggataaccaaaccca

SEQ ID NO: 151651 - DNA, 15 bp, Homo sapiens
gataaccaaacccat

SEQ ID NO: 151652 - DNA, 15 bp, Homo sapiens
ataaccaaacccatt

SEQ ID NO: 151653 - DNA, 15 bp, Homo sapiens
taaccaaacccattt

SEQ ID NO: 151654 - DNA, 15 bp, Homo sapiens
aaccaaacccatttg

SEQ ID NO: 151655 - DNA, 15 bp, Homo sapiens
accaaacccatttgt

SEQ ID NO: 151656 - DNA, 15 bp, Homo sapiens
ccaaacccatttgtc

SEQ ID NO: 151657 - DNA, 15 bp, Homo sapiens
caaacccatttgtct

SEQ ID NO: 151658 - DNA, 15 bp, Homo sapiens
aaacccatttgtctg

SEQ ID NO: 151659 - DNA, 15 bp, Homo sapiens
aacccatttgtctgt

SEQ ID NO: 151660 - DNA, 15 bp, Homo sapiens
acccatttgtctgtt

SEQ ID NO: 151661 - DNA, 15 bp, Homo sapiens
cccatttgtctgtta

SEQ ID NO: 151662 - DNA, 15 bp, Homo sapiens
ccatttgtctgttac

SEQ ID NO: 151663 - DNA, 15 bp, Homo sapiens
catttgtctgttaca

SEQ ID NO: 151664 - DNA, 15 bp, Homo sapiens
atttgtctgttacaa

SEQ ID NO: 151665 - DNA, 15 bp, Homo sapiens
tttgtctgttacaac

SEQ ID NO: 151666 - DNA, 15 bp, Homo sapiens
ttgtctgttacaact

SEQ ID NO: 151667 - DNA, 15 bp, Homo sapiens
tgtctgttacaactt

SEQ ID NO: 151668 - DNA, 15 bp, Homo sapiens
gtctgttacaacttt

SEQ ID NO: 151669 - DNA, 15 bp, Homo sapiens
tctgttacaactttt

SEQ ID NO: 151670 - DNA, 15 bp, Homo sapiens
ctgttacaacttttg

SEQ ID NO: 151671 - DNA, 15 bp, Homo sapiens
tgttacaacttttgt

SEQ ID NO: 151672 - DNA, 15 bp, Homo sapiens
gttacaacttttgta

SEQ ID NO: 151673 - DNA, 15 bp, Homo sapiens
ttacaacttttgtat

SEQ ID NO: 151674 - DNA, 15 bp, Homo sapiens
tacaacttttgtatt

SEQ ID NO: 151675 - DNA, 15 bp, Homo sapiens
acaacttttgtattt

SEQ ID NO: 151676 - DNA, 15 bp, Homo sapiens
caacttttgtatttg

SEQ ID NO: 151677 - DNA, 15 bp, Homo sapiens
aacttttgtatttgg

SEQ ID NO: 151678 - DNA, 15 bp, Homo sapiens
acttttgtatttggg

SEQ ID NO: 151679 - DNA, 15 bp, Homo sapiens
cttttgtatttgggt

SEQ ID NO: 151680 - DNA, 15 bp, Homo sapiens
ttttgtatttgggtt

SEQ ID NO: 151681 - DNA, 15 bp, Homo sapiens
tttgtatttgggttt

SEQ ID NO: 151682 - DNA, 15 bp, Homo sapiens
ttgtatttgggtttt

SEQ ID NO: 151683 - DNA, 15 bp, Homo sapiens
tgtatttgggttttt

SEQ ID NO: 151684 - DNA, 15 bp, Homo sapiens
gtatttgggtttttg

SEQ ID NO: 151685 - DNA, 15 bp, Homo sapiens
tatttgggtttttgt

SEQ ID NO: 151686 - DNA, 15 bp, Homo sapiens
atttgggtttttgtt

SEQ ID NO: 151687 - DNA, 15 bp, Homo sapiens
tttgggtttttgtta

SEQ ID NO: 151688 - DNA, 15 bp, Homo sapiens
ttgggtttttgttaa

SEQ ID NO: 151689 - DNA, 15 bp, Homo sapiens
tgggtttttgttaag

SEQ ID NO: 151690 - DNA, 15 bp, Homo sapiens
gggtttttgttaagt

SEQ ID NO: 151691 - DNA, 15 bp, Homo sapiens
ggtttttgttaagtg

SEQ ID NO: 151692 - DNA, 15 bp, Homo sapiens
gtttttgttaagtgt

SEQ ID NO: 151693 - DNA, 15 bp, Homo sapiens
tttttgttaagtgta

SEQ ID NO: 151694 - DNA, 15 bp, Homo sapiens
ttttgttaagtgtac

SEQ ID NO: 151695 - DNA, 15 bp, Homo sapiens
tttgttaagtgtaca

SEQ ID NO: 151696 - DNA, 15 bp, Homo sapiens
ttgttaagtgtacat

SEQ ID NO: 151697 - DNA, 15 bp, Homo sapiens
tgttaagtgtacata

SEQ ID NO: 151698 - DNA, 15 bp, Homo sapiens
gttaagtgtacatat

SEQ ID NO: 151699 - DNA, 15 bp, Homo sapiens
ttaagtgtacatata

SEQ ID NO: 151700 - DNA, 15 bp, Homo sapiens
taagtgtacatatac

SEQ ID NO: 151701 - DNA, 15 bp, Homo sapiens
aagtgtacatatact

SEQ ID NO: 151702 - DNA, 15 bp, Homo sapiens
agtgtacatatacta

SEQ ID NO: 151703 - DNA, 15 bp, Homo sapiens
gtgtacatatactag

SEQ ID NO: 151704 - DNA, 15 bp, Homo sapiens
tgtacatatactagt

SEQ ID NO: 151705 - DNA, 15 bp, Homo sapiens
gtacatatactagtt

SEQ ID NO: 151706 - DNA, 15 bp, Homo sapiens
tacatatactagttt

SEQ ID NO: 151707 - DNA, 15 bp, Homo sapiens
acatatactagtttg

SEQ ID NO: 151708 - DNA, 15 bp, Homo sapiens
catatactagtttgt

SEQ ID NO: 151709 - DNA, 15 bp, Homo sapiens
atatactagtttgtg

SEQ ID NO: 151710 - DNA, 15 bp, Homo sapiens
tatactagtttgtgt

SEQ ID NO: 151711 - DNA, 15 bp, Homo sapiens
atactagtttgtgtt

SEQ ID NO: 151712 - DNA, 15 bp, Homo sapiens
tactagtttgtgtta

SEQ ID NO: 151713 - DNA, 15 bp, Homo sapiens
actagtttgtgttaa

SEQ ID NO: 151714 - DNA, 15 bp, Homo sapiens
ctagtttgtgttaat

SEQ ID NO: 151715 - DNA, 15 bp, Homo sapiens
tagtttgtgttaatt

SEQ ID NO: 151716 - DNA, 15 bp, Homo sapiens
agtttgtgttaatta

SEQ ID NO: 151717 - DNA, 15 bp, Homo sapiens
gtttgtgttaattaa

SEQ ID NO: 151718 - DNA, 15 bp, Homo sapiens
tttgtgttaattaaa

SEQ ID NO: 151719 - DNA, 15 bp, Homo sapiens
ttgtgttaattaaag

SEQ ID NO: 151720 - DNA, 15 bp, Homo sapiens
tgtgttaattaaaga

SEQ ID NO: 151721 - DNA, 15 bp, Homo sapiens
gtgttaattaaagag

SEQ ID NO: 151722 - DNA, 15 bp, Homo sapiens
tgttaattaaagaga

SEQ ID NO: 151723 - DNA, 15 bp, Homo sapiens
gttaattaaagagaa

SEQ ID NO: 151724 - DNA, 15 bp, Homo sapiens
ttaattaaagagaat

SEQ ID NO: 151725 - DNA, 15 bp, Homo sapiens
taattaaagagaatt

SEQ ID NO: 151726 - DNA, 15 bp, Homo sapiens
aattaaagagaattt

SEQ ID NO: 151727 - DNA, 15 bp, Homo sapiens
attaaagagaatttt

SEQ ID NO: 151728 - DNA, 15 bp, Homo sapiens
ttaaagagaattttt

SEQ ID NO: 151729 - DNA, 15 bp, Homo sapiens
taaagagaatttttt

SEQ ID NO: 151730 - DNA, 15 bp, Homo sapiens
aaagagaattttttt

SEQ ID NO: 151731 - DNA, 15 bp, Homo sapiens
aagagaatttttttt

SEQ ID NO: 151732 - DNA, 15 bp, Homo sapiens
agagaattttttttt

SEQ ID NO: 151733 - DNA, 15 bp, Homo sapiens
gagaatttttttttt

SEQ ID NO: 151734 - DNA, 15 bp, Homo sapiens
ttttttttttgagag

SEQ ID NO: 151735 - DNA, 15 bp, Homo sapiens
tttttttttgagagg

SEQ ID NO: 151736 - DNA, 15 bp, Homo sapiens
ttttttttgagaggg

SEQ ID NO: 151737 - DNA, 15 bp, Homo sapiens
tttttttgagaggga

SEQ ID NO: 151738 - DNA, 15 bp, Homo sapiens
ttttttgagagggag

SEQ ID NO: 151739 - DNA, 15 bp, Homo sapiens
tttttgagagggagt

SEQ ID NO: 151740 - DNA, 15 bp, Homo sapiens
ttttgagagggagtc

SEQ ID NO: 151741 - DNA, 15 bp, Homo sapiens
tttgagagggagtct

SEQ ID NO: 151742 - DNA, 15 bp, Homo sapiens
ttgagagggagtctc

SEQ ID NO: 151743 - DNA, 15 bp, Homo sapiens
tgagagggagtctcg

SEQ ID NO: 151744 - DNA, 15 bp, Homo sapiens
gagagggagtctcgc

SEQ ID NO: 151745 - DNA, 15 bp, Homo sapiens
agagggagtctcgct

SEQ ID NO: 151746 - DNA, 15 bp, Homo sapiens
gagggagtctcgctc

SEQ ID NO: 151747 - DNA, 15 bp, Homo sapiens
agggagtctcgctcc

SEQ ID NO: 151748 - DNA, 15 bp, Homo sapiens
gggagtctcgctccg

SEQ ID NO: 151749 - DNA, 15 bp, Homo sapiens
ggagtctcgctccgt

SEQ ID NO: 151750 - DNA, 15 bp, Homo sapiens
gagtctcgctccgtt

SEQ ID NO: 151751 - DNA, 15 bp, Homo sapiens
agtctcgctccgttg

SEQ ID NO: 151752 - DNA, 15 bp, Homo sapiens
gtctcgctccgttgc

SEQ ID NO: 151753 - DNA, 15 bp, Homo sapiens
tctcgctccgttgcc

SEQ ID NO: 151754 - DNA, 15 bp, Homo sapiens
ctcgctccgttgccc

SEQ ID NO: 151755 - DNA, 15 bp, Homo sapiens
tcgctccgttgccca

SEQ ID NO: 151756 - DNA, 15 bp, Homo sapiens
cgctccgttgcccag

SEQ ID NO: 151757 - DNA, 15 bp, Homo sapiens
gctccgttgcccagg

SEQ ID NO: 151758 - DNA, 15 bp, Homo sapiens
ctccgttgcccaggc

SEQ ID NO: 151759 - DNA, 15 bp, Homo sapiens
tccgttgcccaggct

SEQ ID NO: 151760 - DNA, 15 bp, Homo sapiens
ccgttgcccaggctg

SEQ ID NO: 151761 - DNA, 15 bp, Homo sapiens
gagtgcagtggcgcc

SEQ ID NO: 151762 - DNA, 15 bp, Homo sapiens
agtgcagtggcgcca

SEQ ID NO: 151763 - DNA, 15 bp, Homo sapiens
gtgcagtggcgccat

SEQ ID NO: 151764 - DNA, 15 bp, Homo sapiens
tgcagtggcgccatc

SEQ ID NO: 151765 - DNA, 15 bp, Homo sapiens
gcagtggcgccatct

SEQ ID NO: 151766 - DNA, 15 bp, Homo sapiens
cagtggcgccatctc

SEQ ID NO: 151767 - DNA, 15 bp, Homo sapiens
agtggcgccatctcg

SEQ ID NO: 151768 - DNA, 15 bp, Homo sapiens
gtggcgccatctcgg

SEQ ID NO: 151769 - DNA, 15 bp, Homo sapiens
tggcgccatctcggc

SEQ ID NO: 151770 - DNA, 15 bp, Homo sapiens
ggcgccatctcggct

SEQ ID NO: 151771 - DNA, 15 bp, Homo sapiens
gcgccatctcggctc

SEQ ID NO: 151772 - DNA, 15 bp, Homo sapiens
cgccatctcggctca

SEQ ID NO: 151773 - DNA, 15 bp, Homo sapiens
tcggctcactgcaag

SEQ ID NO: 151774 - DNA, 15 bp, Homo sapiens
cggctcactgcaagc

SEQ ID NO: 151775 - DNA, 15 bp, Homo sapiens
ggctcactgcaagct

SEQ ID NO: 151776 - DNA, 15 bp, Homo sapiens
gctcactgcaagctc

SEQ ID NO: 151777 - DNA, 15 bp, Homo sapiens
ctcactgcaagctcc

SEQ ID NO: 151778 - DNA, 15 bp, Homo sapiens
tcactgcaagctccg

SEQ ID NO: 151779 - DNA, 15 bp, Homo sapiens
cactgcaagctccgc

SEQ ID NO: 151780 - DNA, 15 bp, Homo sapiens
actgcaagctccgcc

SEQ ID NO: 151781 - DNA, 15 bp, Homo sapiens
ctgcaagctccgcct

SEQ ID NO: 151782 - DNA, 15 bp, Homo sapiens
tgcaagctccgcctc

SEQ ID NO: 151783 - DNA, 15 bp, Homo sapiens
gcaagctccgcctcc

SEQ ID NO: 151784 - DNA, 15 bp, Homo sapiens
caagctccgcctccc

SEQ ID NO: 151785 - DNA, 15 bp, Homo sapiens
aagctccgcctcccg

SEQ ID NO: 151786 - DNA, 15 bp, Homo sapiens
agctccgcctcccgg

SEQ ID NO: 151787 - DNA, 15 bp, Homo sapiens
gctccgcctcccggg

SEQ ID NO: 151788 - DNA, 15 bp, Homo sapiens
gcctcccgggttcac

SEQ ID NO: 151789 - DNA, 15 bp, Homo sapiens
cctcccgggttcacg

SEQ ID NO: 151790 - DNA, 15 bp, Homo sapiens
ctcccgggttcacgc

SEQ ID NO: 151791 - DNA, 15 bp, Homo sapiens
tcccgggttcacgcc

SEQ ID NO: 151792 - DNA, 15 bp, Homo sapiens
cccgggttcacgcca

SEQ ID NO: 151793 - DNA, 15 bp, Homo sapiens
ccgggttcacgccat

SEQ ID NO: 151794 - DNA, 15 bp, Homo sapiens
cgggttcacgccatt

SEQ ID NO: 151795 - DNA, 15 bp, Homo sapiens
gggttcacgccattc

SEQ ID NO: 151796 - DNA, 15 bp, Homo sapiens
ggttcacgccattct

SEQ ID NO: 151797 - DNA, 15 bp, Homo sapiens
gttcacgccattctc

SEQ ID NO: 151798 - DNA, 15 bp, Homo sapiens
ttcacgccattctcc

SEQ ID NO: 151799 - DNA, 15 bp, Homo sapiens
tcacgccattctcct

SEQ ID NO: 151800 - DNA, 15 bp, Homo sapiens
cacgccattctcctg

SEQ ID NO: 151801 - DNA, 15 bp, Homo sapiens
acgccattctcctgc

SEQ ID NO: 151802 - DNA, 15 bp, Homo sapiens
cgccattctcctgcc

SEQ ID NO: 151803 - DNA, 15 bp, Homo sapiens
gccattctcctgcct

SEQ ID NO: 151804 - DNA, 15 bp, Homo sapiens
ccattctcctgcctc

SEQ ID NO: 151805 - DNA, 15 bp, Homo sapiens
cattctcctgcctca

SEQ ID NO: 151806 - DNA, 15 bp, Homo sapiens
tcctgagtagctgga

SEQ ID NO: 151807 - DNA, 15 bp, Homo sapiens
cctgagtagctggaa

SEQ ID NO: 151808 - DNA, 15 bp, Homo sapiens
ctgagtagctggaac

SEQ ID NO: 151809 - DNA, 15 bp, Homo sapiens
tgagtagctggaact

SEQ ID NO: 151810 - DNA, 15 bp, Homo sapiens
gagtagctggaactg

SEQ ID NO: 151811 - DNA, 15 bp, Homo sapiens
agtagctggaactgc

SEQ ID NO: 151812 - DNA, 15 bp, Homo sapiens
gtagctggaactgca

SEQ ID NO: 151813 - DNA, 15 bp, Homo sapiens
tagctggaactgcag

SEQ ID NO: 151814 - DNA, 15 bp, Homo sapiens
agctggaactgcagg

SEQ ID NO: 151815 - DNA, 15 bp, Homo sapiens
gctggaactgcaggt

SEQ ID NO: 151816 - DNA, 15 bp, Homo sapiens
ctggaactgcaggtg

SEQ ID NO: 151817 - DNA, 15 bp, Homo sapiens
tggaactgcaggtgc

SEQ ID NO: 151818 - DNA, 15 bp, Homo sapiens
ggaactgcaggtgcc

SEQ ID NO: 151819 - DNA, 15 bp, Homo sapiens
gaactgcaggtgccc

SEQ ID NO: 151820 - DNA, 15 bp, Homo sapiens
aactgcaggtgcccg

SEQ ID NO: 151821 - DNA, 15 bp, Homo sapiens
actgcaggtgcccgc

SEQ ID NO: 151822 - DNA, 15 bp, Homo sapiens
ctgcaggtgcccgcc

SEQ ID NO: 151823 - DNA, 15 bp, Homo sapiens
tgcaggtgcccgcca

SEQ ID NO: 151824 - DNA, 15 bp, Homo sapiens
gcaggtgcccgccac

SEQ ID NO: 151825 - DNA, 15 bp, Homo sapiens
caggtgcccgccacc

SEQ ID NO: 151826 - DNA, 15 bp, Homo sapiens
aggtgcccgccacca

SEQ ID NO: 151827 - DNA, 15 bp, Homo sapiens
ggtgcccgccaccat

SEQ ID NO: 151828 - DNA, 15 bp, Homo sapiens
gtgcccgccaccatg

SEQ ID NO: 151829 - DNA, 15 bp, Homo sapiens
tgcccgccaccatgc

SEQ ID NO: 151830 - DNA, 15 bp, Homo sapiens
gcccgccaccatgcc

SEQ ID NO: 151831 - DNA, 15 bp, Homo sapiens
cagctaatttttttt

SEQ ID NO: 151832 - DNA, 15 bp, Homo sapiens
agctaattttttttt

SEQ ID NO: 151833 - DNA, 15 bp, Homo sapiens
tttttttgtattttg

SEQ ID NO: 151834 - DNA, 15 bp, Homo sapiens
ttttttgtattttga

SEQ ID NO: 151835 - DNA, 15 bp, Homo sapiens
tttttgtattttgag

SEQ ID NO: 151836 - DNA, 15 bp, Homo sapiens
ttttgtattttgagt

SEQ ID NO: 151837 - DNA, 15 bp, Homo sapiens
tttgtattttgagta

SEQ ID NO: 151838 - DNA, 15 bp, Homo sapiens
ttgtattttgagtag

SEQ ID NO: 151839 - DNA, 15 bp, Homo sapiens
tgtattttgagtaga

SEQ ID NO: 151840 - DNA, 15 bp, Homo sapiens
gtattttgagtagag

SEQ ID NO: 151841 - DNA, 15 bp, Homo sapiens
tattttgagtagaga

SEQ ID NO: 151842 - DNA, 15 bp, Homo sapiens
attttgagtagagac

SEQ ID NO: 151843 - DNA, 15 bp, Homo sapiens
ttttgagtagagacg

SEQ ID NO: 151844 - DNA, 15 bp, Homo sapiens
tttgagtagagacgg

SEQ ID NO: 151845 - DNA, 15 bp, Homo sapiens
ttgagtagagacggg

SEQ ID NO: 151846 - DNA, 15 bp, Homo sapiens
tgagtagagacgggg

SEQ ID NO: 151847 - DNA, 15 bp, Homo sapiens
gagtagagacggggt

SEQ ID NO: 151848 - DNA, 15 bp, Homo sapiens
agacggggtttcact

SEQ ID NO: 151849 - DNA, 15 bp, Homo sapiens
gacggggtttcactg

SEQ ID NO: 151850 - DNA, 15 bp, Homo sapiens
acggggtttcactgt

SEQ ID NO: 151851 - DNA, 15 bp, Homo sapiens
cggggtttcactgtg

SEQ ID NO: 151852 - DNA, 15 bp, Homo sapiens
ggggtttcactgtgt

SEQ ID NO: 151853 - DNA, 15 bp, Homo sapiens
gggtttcactgtgtt

SEQ ID NO: 151854 - DNA, 15 bp, Homo sapiens
ggtttcactgtgtta

SEQ ID NO: 151855 - DNA, 15 bp, Homo sapiens
gtttcactgtgttag

SEQ ID NO: 151856 - DNA, 15 bp, Homo sapiens
tttcactgtgttagc

SEQ ID NO: 151857 - DNA, 15 bp, Homo sapiens
ttcactgtgttagcc

SEQ ID NO: 151858 - DNA, 15 bp, Homo sapiens
tcactgtgttagcca

SEQ ID NO: 151859 - DNA, 15 bp, Homo sapiens
cactgtgttagccag

SEQ ID NO: 151860 - DNA, 15 bp, Homo sapiens
actgtgttagccagg

SEQ ID NO: 151861 - DNA, 15 bp, Homo sapiens
ctgtgttagccagga

SEQ ID NO: 151862 - DNA, 15 bp, Homo sapiens
tgtgttagccaggat

SEQ ID NO: 151863 - DNA, 15 bp, Homo sapiens
tctcgatctcctgac

SEQ ID NO: 151864 - DNA, 15 bp, Homo sapiens
ctcgatctcctgacc

SEQ ID NO: 151865 - DNA, 15 bp, Homo sapiens
tcgatctcctgacct

SEQ ID NO: 151866 - DNA, 15 bp, Homo sapiens
cgatctcctgacctc

SEQ ID NO: 151867 - DNA, 15 bp, Homo sapiens
gatctcctgacctcg

SEQ ID NO: 151868 - DNA, 15 bp, Homo sapiens
atctcctgacctcgt

SEQ ID NO: 151869 - DNA, 15 bp, Homo sapiens
tctcctgacctcgtg

SEQ ID NO: 151870 - DNA, 15 bp, Homo sapiens
ctcctgacctcgtga

SEQ ID NO: 151871 - DNA, 15 bp, Homo sapiens
tcctgacctcgtgat

SEQ ID NO: 151872 - DNA, 15 bp, Homo sapiens
cctgacctcgtgatc

SEQ ID NO: 151873 - DNA, 15 bp, Homo sapiens
ctgacctcgtgatcc

SEQ ID NO: 151874 - DNA, 15 bp, Homo sapiens
tcgtgatccgcctgt

SEQ ID NO: 151875 - DNA, 15 bp, Homo sapiens
cgtgatccgcctgtc

SEQ ID NO: 151876 - DNA, 15 bp, Homo sapiens
gtgatccgcctgtct

SEQ ID NO: 151877 - DNA, 15 bp, Homo sapiens
tgatccgcctgtctc

SEQ ID NO: 151878 - DNA, 15 bp, Homo sapiens
gatccgcctgtctcg

SEQ ID NO: 151879 - DNA, 15 bp, Homo sapiens
atccgcctgtctcgg

SEQ ID NO: 151880 - DNA, 15 bp, Homo sapiens
tccgcctgtctcggc

SEQ ID NO: 151881 - DNA, 15 bp, Homo sapiens
ccgcctgtctcggcc

SEQ ID NO: 151882 - DNA, 15 bp, Homo sapiens
cgcctgtctcggcct

SEQ ID NO: 151883 - DNA, 15 bp, Homo sapiens
gcctgtctcggcctc

SEQ ID NO: 151884 - DNA, 15 bp, Homo sapiens
cctgtctcggcctcc

SEQ ID NO: 151885 - DNA, 15 bp, Homo sapiens
ctgtctcggcctccc

SEQ ID NO: 151886 - DNA, 15 bp, Homo sapiens
tgtctcggcctccca

SEQ ID NO: 151887 - DNA, 15 bp, Homo sapiens
gtctcggcctcccaa

SEQ ID NO: 151888 - DNA, 15 bp, Homo sapiens
tctcggcctcccaaa

SEQ ID NO: 151889 - DNA, 15 bp, Homo sapiens
gattacaggcgtgaa

SEQ ID NO: 151890 - DNA, 15 bp, Homo sapiens
attacaggcgtgaac

SEQ ID NO: 151891 - DNA, 15 bp, Homo sapiens
ttacaggcgtgaacc

SEQ ID NO: 151892 - DNA, 15 bp, Homo sapiens
tacaggcgtgaacca

SEQ ID NO: 151893 - DNA, 15 bp, Homo sapiens
acaggcgtgaaccac

SEQ ID NO: 151894 - DNA, 15 bp, Homo sapiens
caggcgtgaaccact

SEQ ID NO: 151895 - DNA, 15 bp, Homo sapiens
aggcgtgaaccactg

SEQ ID NO: 151896 - DNA, 15 bp, Homo sapiens
ggcgtgaaccactgc

SEQ ID NO: 151897 - DNA, 15 bp, Homo sapiens
gcgtgaaccactgcg

SEQ ID NO: 151898 - DNA, 15 bp, Homo sapiens
cgtgaaccactgcgc

SEQ ID NO: 151899 - DNA, 15 bp, Homo sapiens
gtgaaccactgcgcc

SEQ ID NO: 151900 - DNA, 15 bp, Homo sapiens
tgaaccactgcgccc

SEQ ID NO: 151901 - DNA, 15 bp, Homo sapiens
gaaccactgcgccct

SEQ ID NO: 151902 - DNA, 15 bp, Homo sapiens
aaccactgcgccctg

SEQ ID NO: 151903 - DNA, 15 bp, Homo sapiens
accactgcgccctgt

SEQ ID NO: 151904 - DNA, 15 bp, Homo sapiens
ccactgcgccctgtt

SEQ ID NO: 151905 - DNA, 15 bp, Homo sapiens
cactgcgccctgttg

SEQ ID NO: 151906 - DNA, 15 bp, Homo sapiens
actgcgccctgttga

SEQ ID NO: 151907 - DNA, 15 bp, Homo sapiens
ctgcgccctgttgag

SEQ ID NO: 151908 - DNA, 15 bp, Homo sapiens
tgcgccctgttgaga

SEQ ID NO: 151909 - DNA, 15 bp, Homo sapiens
gcgccctgttgagaa

SEQ ID NO: 151910 - DNA, 15 bp, Homo sapiens
cgccctgttgagaat

SEQ ID NO: 151911 - DNA, 15 bp, Homo sapiens
gccctgttgagaatt

SEQ ID NO: 151912 - DNA, 15 bp, Homo sapiens
ccctgttgagaattt

SEQ ID NO: 151913 - DNA, 15 bp, Homo sapiens
cctgttgagaatttt

SEQ ID NO: 151914 - DNA, 15 bp, Homo sapiens
ctgttgagaattttt

SEQ ID NO: 151915 - DNA, 15 bp, Homo sapiens
tgttgagaatttttt

SEQ ID NO: 151916 - DNA, 15 bp, Homo sapiens
gttgagaattttttt

SEQ ID NO: 151917 - DNA, 15 bp, Homo sapiens
ttgagaatttttttt

SEQ ID NO: 151918 - DNA, 15 bp, Homo sapiens
tgagaattttttttt

SEQ ID NO: 151919 - DNA, 15 bp, Homo sapiens
tttttttttttttgg

SEQ ID NO: 151920 - DNA, 15 bp, Homo sapiens
ttttttttttttggg

SEQ ID NO: 151921 - DNA, 15 bp, Homo sapiens
tttttttttttggga

SEQ ID NO: 151922 - DNA, 15 bp, Homo sapiens
ttttttttttgggag

SEQ ID NO: 151923 - DNA, 15 bp, Homo sapiens
tttttttttgggaga

SEQ ID NO: 151924 - DNA, 15 bp, Homo sapiens
ttttttttgggagac

SEQ ID NO: 151925 - DNA, 15 bp, Homo sapiens
tttttttgggagaca

SEQ ID NO: 151926 - DNA, 15 bp, Homo sapiens
ttttttgggagacag

SEQ ID NO: 151927 - DNA, 15 bp, Homo sapiens
tttttgggagacaga

SEQ ID NO: 151928 - DNA, 15 bp, Homo sapiens
ttttgggagacagag

SEQ ID NO: 151929 - DNA, 15 bp, Homo sapiens
tttgggagacagagt

SEQ ID NO: 151930 - DNA, 15 bp, Homo sapiens
ttgggagacagagtt

SEQ ID NO: 151931 - DNA, 15 bp, Homo sapiens
tgggagacagagttt

SEQ ID NO: 151932 - DNA, 15 bp, Homo sapiens
gggagacagagtttc

SEQ ID NO: 151933 - DNA, 15 bp, Homo sapiens
ggagacagagtttcg

SEQ ID NO: 151934 - DNA, 15 bp, Homo sapiens
gagacagagtttcgc

SEQ ID NO: 151935 - DNA, 15 bp, Homo sapiens
agacagagtttcgct

SEQ ID NO: 151936 - DNA, 15 bp, Homo sapiens
gacagagtttcgctc

SEQ ID NO: 151937 - DNA, 15 bp, Homo sapiens
acagagtttcgctct

SEQ ID NO: 151938 - DNA, 15 bp, Homo sapiens
cagagtttcgctctt

SEQ ID NO: 151939 - DNA, 15 bp, Homo sapiens
agagtttcgctcttg

SEQ ID NO: 151940 - DNA, 15 bp, Homo sapiens
agtttcgctcttgtt

SEQ ID NO: 151941 - DNA, 15 bp, Homo sapiens
cgctcttgttgcccg

SEQ ID NO: 151942 - DNA, 15 bp, Homo sapiens
gctcttgttgcccgg

SEQ ID NO: 151943 - DNA, 15 bp, Homo sapiens
ctcttgttgcccggg

SEQ ID NO: 151944 - DNA, 15 bp, Homo sapiens
tcttgttgcccgggc

SEQ ID NO: 151945 - DNA, 15 bp, Homo sapiens
cttgttgcccgggct

SEQ ID NO: 151946 - DNA, 15 bp, Homo sapiens
ttgttgcccgggcta

SEQ ID NO: 151947 - DNA, 15 bp, Homo sapiens
tgttgcccgggctag

SEQ ID NO: 151948 - DNA, 15 bp, Homo sapiens
gttgcccgggctaga

SEQ ID NO: 151949 - DNA, 15 bp, Homo sapiens
ttgcccgggctagag

SEQ ID NO: 151950 - DNA, 15 bp, Homo sapiens
tgcccgggctagagt

SEQ ID NO: 151951 - DNA, 15 bp, Homo sapiens
gcccgggctagagtg

SEQ ID NO: 151952 - DNA, 15 bp, Homo sapiens
cccgggctagagtgc

SEQ ID NO: 151953 - DNA, 15 bp, Homo sapiens
ccgggctagagtgca

SEQ ID NO: 151954 - DNA, 15 bp, Homo sapiens
cgggctagagtgcag

SEQ ID NO: 151955 - DNA, 15 bp, Homo sapiens
gggctagagtgcagt

SEQ ID NO: 151956 - DNA, 15 bp, Homo sapiens
gctagagtgcagtga

SEQ ID NO: 151957 - DNA, 15 bp, Homo sapiens
ctagagtgcagtgac

SEQ ID NO: 151958 - DNA, 15 bp, Homo sapiens
tagagtgcagtgaca

SEQ ID NO: 151959 - DNA, 15 bp, Homo sapiens
agagtgcagtgacac

SEQ ID NO: 151960 - DNA, 15 bp, Homo sapiens
gagtgcagtgacaca

SEQ ID NO: 151961 - DNA, 15 bp, Homo sapiens
agtgcagtgacacaa

SEQ ID NO: 151962 - DNA, 15 bp, Homo sapiens
gtgcagtgacacaat

SEQ ID NO: 151963 - DNA, 15 bp, Homo sapiens
tgcagtgacacaatc

SEQ ID NO: 151964 - DNA, 15 bp, Homo sapiens
gcagtgacacaatct

SEQ ID NO: 151965 - DNA, 15 bp, Homo sapiens
cagtgacacaatctc

SEQ ID NO: 151966 - DNA, 15 bp, Homo sapiens
agtgacacaatctcg

SEQ ID NO: 151967 - DNA, 15 bp, Homo sapiens
gtgacacaatctcgg

SEQ ID NO: 151968 - DNA, 15 bp, Homo sapiens
tgacacaatctcggc

SEQ ID NO: 151969 - DNA, 15 bp, Homo sapiens
gacacaatctcggct

SEQ ID NO: 151970 - DNA, 15 bp, Homo sapiens
acacaatctcggctc

SEQ ID NO: 151971 - DNA, 15 bp, Homo sapiens
acaatctcggctcac

SEQ ID NO: 151972 - DNA, 15 bp, Homo sapiens
cctgcctcagcctca

SEQ ID NO: 151973 - DNA, 15 bp, Homo sapiens
ctgcctcagcctcat

SEQ ID NO: 151974 - DNA, 15 bp, Homo sapiens
tgcctcagcctcatg

SEQ ID NO: 151975 - DNA, 15 bp, Homo sapiens
gcctcagcctcatgc

SEQ ID NO: 151976 - DNA, 15 bp, Homo sapiens
cctcagcctcatgcg

SEQ ID NO: 151977 - DNA, 15 bp, Homo sapiens
ctcagcctcatgcgt

SEQ ID NO: 151978 - DNA, 15 bp, Homo sapiens
tcagcctcatgcgtc

SEQ ID NO: 151979 - DNA, 15 bp, Homo sapiens
cagcctcatgcgtca

SEQ ID NO: 151980 - DNA, 15 bp, Homo sapiens
agcctcatgcgtcac

SEQ ID NO: 151981 - DNA, 15 bp, Homo sapiens
gcctcatgcgtcacc

SEQ ID NO: 151982 - DNA, 15 bp, Homo sapiens
cctcatgcgtcacca

SEQ ID NO: 151983 - DNA, 15 bp, Homo sapiens
ctcatgcgtcaccac

SEQ ID NO: 151984 - DNA, 15 bp, Homo sapiens
tcatgcgtcaccacg

SEQ ID NO: 151985 - DNA, 15 bp, Homo sapiens
catgcgtcaccacgc

SEQ ID NO: 151986 - DNA, 15 bp, Homo sapiens
atgcgtcaccacgcc

SEQ ID NO: 151987 - DNA, 15 bp, Homo sapiens
tgcgtcaccacgccc

SEQ ID NO: 151988 - DNA, 15 bp, Homo sapiens
gcgtcaccacgccca

SEQ ID NO: 151989 - DNA, 15 bp, Homo sapiens
cgtcaccacgcccag

SEQ ID NO: 151990 - DNA, 15 bp, Homo sapiens
gtcaccacgcccagc

SEQ ID NO: 151991 - DNA, 15 bp, Homo sapiens
tcaccacgcccagct

SEQ ID NO: 151992 - DNA, 15 bp, Homo sapiens
gcccagctaattttg

SEQ ID NO: 151993 - DNA, 15 bp, Homo sapiens
cccagctaattttgt

SEQ ID NO: 151994 - DNA, 15 bp, Homo sapiens
ccagctaattttgta

SEQ ID NO: 151995 - DNA, 15 bp, Homo sapiens
cagctaattttgtat

SEQ ID NO: 151996 - DNA, 15 bp, Homo sapiens
agctaattttgtatt

SEQ ID NO: 151997 - DNA, 15 bp, Homo sapiens
tggtctcgaactccc

SEQ ID NO: 151998 - DNA, 15 bp, Homo sapiens
ggtctcgaactccca

SEQ ID NO: 151999 - DNA, 15 bp, Homo sapiens
gtctcgaactcccaa

SEQ ID NO: 152000 - DNA, 15 bp, Homo sapiens
tctcgaactcccaac

SEQ ID NO: 152001 - DNA, 15 bp, Homo sapiens
ctcgaactcccaacc

SEQ ID NO: 152002 - DNA, 15 bp, Homo sapiens
tcgaactcccaacct

SEQ ID NO: 152003 - DNA, 15 bp, Homo sapiens
cgaactcccaacctc

SEQ ID NO: 152004 - DNA, 15 bp, Homo sapiens
gaactcccaacctca

SEQ ID NO: 152005 - DNA, 15 bp, Homo sapiens
aactcccaacctcag

SEQ ID NO: 152006 - DNA, 15 bp, Homo sapiens
actcccaacctcagg

SEQ ID NO: 152007 - DNA, 15 bp, Homo sapiens
ctcccaacctcaggt

SEQ ID NO: 152008 - DNA, 15 bp, Homo sapiens
tcccaacctcaggtg

SEQ ID NO: 152009 - DNA, 15 bp, Homo sapiens
cccaacctcaggtgg

SEQ ID NO: 152010 - DNA, 15 bp, Homo sapiens
ccaacctcaggtggt

SEQ ID NO: 152011 - DNA, 15 bp, Homo sapiens
caacctcaggtggtt

SEQ ID NO: 152012 - DNA, 15 bp, Homo sapiens
aacctcaggtggttc

SEQ ID NO: 152013 - DNA, 15 bp, Homo sapiens
acctcaggtggttcg

SEQ ID NO: 152014 - DNA, 15 bp, Homo sapiens
cctcaggtggttcgc

SEQ ID NO: 152015 - DNA, 15 bp, Homo sapiens
ctcaggtggttcgcc

SEQ ID NO: 152016 - DNA, 15 bp, Homo sapiens
tcaggtggttcgccc

SEQ ID NO: 152017 - DNA, 15 bp, Homo sapiens
caggtggttcgcccg

SEQ ID NO: 152018 - DNA, 15 bp, Homo sapiens
aggtggttcgcccgc

SEQ ID NO: 152019 - DNA, 15 bp, Homo sapiens
ggtggttcgcccgcc

SEQ ID NO: 152020 - DNA, 15 bp, Homo sapiens
gtggttcgcccgcct

SEQ ID NO: 152021 - DNA, 15 bp, Homo sapiens
tggttcgcccgcctt

SEQ ID NO: 152022 - DNA, 15 bp, Homo sapiens
ggttcgcccgccttg

SEQ ID NO: 152023 - DNA, 15 bp, Homo sapiens
gttcgcccgccttgg

SEQ ID NO: 152024 - DNA, 15 bp, Homo sapiens
ttcgcccgccttggc

SEQ ID NO: 152025 - DNA, 15 bp, Homo sapiens
tcgcccgccttggcc

SEQ ID NO: 152026 - DNA, 15 bp, Homo sapiens
cgcccgccttggcct

SEQ ID NO: 152027 - DNA, 15 bp, Homo sapiens
ctgggattgcaggca

SEQ ID NO: 152028 - DNA, 15 bp, Homo sapiens
tgggattgcaggcat

SEQ ID NO: 152029 - DNA, 15 bp, Homo sapiens
gggattgcaggcatg

SEQ ID NO: 152030 - DNA, 15 bp, Homo sapiens
ggattgcaggcatga

SEQ ID NO: 152031 - DNA, 15 bp, Homo sapiens
gattgcaggcatgag

SEQ ID NO: 152032 - DNA, 15 bp, Homo sapiens
attgcaggcatgagc

SEQ ID NO: 152033 - DNA, 15 bp, Homo sapiens
ttgcaggcatgagcc

SEQ ID NO: 152034 - DNA, 15 bp, Homo sapiens
tgcaggcatgagcca

SEQ ID NO: 152035 - DNA, 15 bp, Homo sapiens
gcaggcatgagccac

SEQ ID NO: 152036 - DNA, 15 bp, Homo sapiens
ccactgcgcccagcc

SEQ ID NO: 152037 - DNA, 15 bp, Homo sapiens
tgcgcccagccccaa

SEQ ID NO: 152038 - DNA, 15 bp, Homo sapiens
gcgcccagccccaaa

SEQ ID NO: 152039 - DNA, 15 bp, Homo sapiens
cgcccagccccaaat

SEQ ID NO: 152040 - DNA, 15 bp, Homo sapiens
gcccagccccaaatt

SEQ ID NO: 152041 - DNA, 15 bp, Homo sapiens
cccagccccaaattt

SEQ ID NO: 152042 - DNA, 15 bp, Homo sapiens
ccagccccaaatttt

SEQ ID NO: 152043 - DNA, 15 bp, Homo sapiens
cagccccaaattttg

SEQ ID NO: 152044 - DNA, 15 bp, Homo sapiens
agccccaaattttgg

SEQ ID NO: 152045 - DNA, 15 bp, Homo sapiens
gccccaaattttggt

SEQ ID NO: 152046 - DNA, 15 bp, Homo sapiens
ccccaaattttggtt

SEQ ID NO: 152047 - DNA, 15 bp, Homo sapiens
cccaaattttggttt

SEQ ID NO: 152048 - DNA, 15 bp, Homo sapiens
ccaaattttggtttt

SEQ ID NO: 152049 - DNA, 15 bp, Homo sapiens
caaattttggttttt

SEQ ID NO: 152050 - DNA, 15 bp, Homo sapiens
aaattttggtttttg

SEQ ID NO: 152051 - DNA, 15 bp, Homo sapiens
aattttggtttttgc

SEQ ID NO: 152052 - DNA, 15 bp, Homo sapiens
attttggtttttgct

SEQ ID NO: 152053 - DNA, 15 bp, Homo sapiens
ttttggtttttgctt

SEQ ID NO: 152054 - DNA, 15 bp, Homo sapiens
tttggtttttgcttg

SEQ ID NO: 152055 - DNA, 15 bp, Homo sapiens
ttggtttttgcttga

SEQ ID NO: 152056 - DNA, 15 bp, Homo sapiens
tggtttttgcttgaa

SEQ ID NO: 152057 - DNA, 15 bp, Homo sapiens
ggtttttgcttgaaa

SEQ ID NO: 152058 - DNA, 15 bp, Homo sapiens
gtttttgcttgaaaa

SEQ ID NO: 152059 - DNA, 15 bp, Homo sapiens
tttttgcttgaaaac

SEQ ID NO: 152060 - DNA, 15 bp, Homo sapiens
ttttgcttgaaaact

SEQ ID NO: 152061 - DNA, 15 bp, Homo sapiens
tttgcttgaaaactg

SEQ ID NO: 152062 - DNA, 15 bp, Homo sapiens
ttgcttgaaaactga

SEQ ID NO: 152063 - DNA, 15 bp, Homo sapiens
tgcttgaaaactgag

SEQ ID NO: 152064 - DNA, 15 bp, Homo sapiens
gcttgaaaactgagg

SEQ ID NO: 152065 - DNA, 15 bp, Homo sapiens
cttgaaaactgaggt

SEQ ID NO: 152066 - DNA, 15 bp, Homo sapiens
ttgaaaactgaggtc

SEQ ID NO: 152067 - DNA, 15 bp, Homo sapiens
tgaaaactgaggtct

SEQ ID NO: 152068 - DNA, 15 bp, Homo sapiens
gaaaactgaggtctg

SEQ ID NO: 152069 - DNA, 15 bp, Homo sapiens
aaaactgaggtctga

SEQ ID NO: 152070 - DNA, 15 bp, Homo sapiens
aaactgaggtctgaa

SEQ ID NO: 152071 - DNA, 15 bp, Homo sapiens
aactgaggtctgaat

SEQ ID NO: 152072 - DNA, 15 bp, Homo sapiens
actgaggtctgaatt

SEQ ID NO: 152073 - DNA, 15 bp, Homo sapiens
ctgaggtctgaattc

SEQ ID NO: 152074 - DNA, 15 bp, Homo sapiens
tgaggtctgaattca

SEQ ID NO: 152075 - DNA, 15 bp, Homo sapiens
gaggtctgaattcag

SEQ ID NO: 152076 - DNA, 15 bp, Homo sapiens
aggtctgaattcagc

SEQ ID NO: 152077 - DNA, 15 bp, Homo sapiens
ggtctgaattcagcc

SEQ ID NO: 152078 - DNA, 15 bp, Homo sapiens
gtctgaattcagcct

SEQ ID NO: 152079 - DNA, 15 bp, Homo sapiens
tctgaattcagcctt

SEQ ID NO: 152080 - DNA, 15 bp, Homo sapiens
ctgaattcagccttc

SEQ ID NO: 152081 - DNA, 15 bp, Homo sapiens
tgaattcagccttct

SEQ ID NO: 152082 - DNA, 15 bp, Homo sapiens
gaattcagccttctg

SEQ ID NO: 152083 - DNA, 15 bp, Homo sapiens
aattcagccttctgg

SEQ ID NO: 152084 - DNA, 15 bp, Homo sapiens
attcagccttctggt

SEQ ID NO: 152085 - DNA, 15 bp, Homo sapiens
ttcagccttctggtt

SEQ ID NO: 152086 - DNA, 15 bp, Homo sapiens
tcagccttctggttg

SEQ ID NO: 152087 - DNA, 15 bp, Homo sapiens
cagccttctggttgc

SEQ ID NO: 152088 - DNA, 15 bp, Homo sapiens
agccttctggttgcc

SEQ ID NO: 152089 - DNA, 15 bp, Homo sapiens
gccttctggttgccc

SEQ ID NO: 152090 - DNA, 15 bp, Homo sapiens
ccttctggttgcccc

SEQ ID NO: 152091 - DNA, 15 bp, Homo sapiens
cttctggttgcccct

SEQ ID NO: 152092 - DNA, 15 bp, Homo sapiens
ttctggttgcccctc

SEQ ID NO: 152093 - DNA, 15 bp, Homo sapiens
tctggttgcccctca

SEQ ID NO: 152094 - DNA, 15 bp, Homo sapiens
ctggttgcccctcaa

SEQ ID NO: 152095 - DNA, 15 bp, Homo sapiens
tggttgcccctcaag

SEQ ID NO: 152096 - DNA, 15 bp, Homo sapiens
ggttgcccctcaaga

SEQ ID NO: 152097 - DNA, 15 bp, Homo sapiens
gttgcccctcaagag

SEQ ID NO: 152098 - DNA, 15 bp, Homo sapiens
ttgcccctcaagagt

SEQ ID NO: 152099 - DNA, 15 bp, Homo sapiens
tgcccctcaagagtc

SEQ ID NO: 152100 - DNA, 15 bp, Homo sapiens
gcccctcaagagtca

SEQ ID NO: 152101 - DNA, 15 bp, Homo sapiens
cccctcaagagtcag

SEQ ID NO: 152102 - DNA, 15 bp, Homo sapiens
ccctcaagagtcagt

SEQ ID NO: 152103 - DNA, 15 bp, Homo sapiens
cctcaagagtcagtt

SEQ ID NO: 152104 - DNA, 15 bp, Homo sapiens
ctcaagagtcagttt

SEQ ID NO: 152105 - DNA, 15 bp, Homo sapiens
tcaagagtcagttta

SEQ ID NO: 152106 - DNA, 15 bp, Homo sapiens
caagagtcagtttaa

SEQ ID NO: 152107 - DNA, 15 bp, Homo sapiens
aagagtcagtttaaa

SEQ ID NO: 152108 - DNA, 15 bp, Homo sapiens
agagtcagtttaaat

SEQ ID NO: 152109 - DNA, 15 bp, Homo sapiens
gagtcagtttaaatg

SEQ ID NO: 152110 - DNA, 15 bp, Homo sapiens
agtcagtttaaatgt

SEQ ID NO: 152111 - DNA, 15 bp, Homo sapiens
gtcagtttaaatgtt

SEQ ID NO: 152112 - DNA, 15 bp, Homo sapiens
tcagtttaaatgttg

SEQ ID NO: 152113 - DNA, 15 bp, Homo sapiens
cagtttaaatgttgg

SEQ ID NO: 152114 - DNA, 15 bp, Homo sapiens
agtttaaatgttggt

SEQ ID NO: 152115 - DNA, 15 bp, Homo sapiens
gtttaaatgttggtc

SEQ ID NO: 152116 - DNA, 15 bp, Homo sapiens
tttaaatgttggtca

SEQ ID NO: 152117 - DNA, 15 bp, Homo sapiens
ttaaatgttggtcat

SEQ ID NO: 152118 - DNA, 15 bp, Homo sapiens
taaatgttggtcatg

SEQ ID NO: 152119 - DNA, 15 bp, Homo sapiens
aaatgttggtcatgt

SEQ ID NO: 152120 - DNA, 15 bp, Homo sapiens
aatgttggtcatgtt

SEQ ID NO: 152121 - DNA, 15 bp, Homo sapiens
atgttggtcatgtta

SEQ ID NO: 152122 - DNA, 15 bp, Homo sapiens
tgttggtcatgttag

SEQ ID NO: 152123 - DNA, 15 bp, Homo sapiens
gttggtcatgttagt

SEQ ID NO: 152124 - DNA, 15 bp, Homo sapiens
ttggtcatgttagtt

SEQ ID NO: 152125 - DNA, 15 bp, Homo sapiens
tggtcatgttagttg

SEQ ID NO: 152126 - DNA, 15 bp, Homo sapiens
ggtcatgttagttgt

SEQ ID NO: 152127 - DNA, 15 bp, Homo sapiens
gtcatgttagttgtc

SEQ ID NO: 152128 - DNA, 15 bp, Homo sapiens
tcatgttagttgtca

SEQ ID NO: 152129 - DNA, 15 bp, Homo sapiens
catgttagttgtcag

SEQ ID NO: 152130 - DNA, 15 bp, Homo sapiens
atgttagttgtcagt

SEQ ID NO: 152131 - DNA, 15 bp, Homo sapiens
tgttagttgtcagtg

SEQ ID NO: 152132 - DNA, 15 bp, Homo sapiens
gttagttgtcagtga

SEQ ID NO: 152133 - DNA, 15 bp, Homo sapiens
ttagttgtcagtgaa

SEQ ID NO: 152134 - DNA, 15 bp, Homo sapiens
tagttgtcagtgaaa

SEQ ID NO: 152135 - DNA, 15 bp, Homo sapiens
agttgtcagtgaaaa

SEQ ID NO: 152136 - DNA, 15 bp, Homo sapiens
gttgtcagtgaaaac

SEQ ID NO: 152137 - DNA, 15 bp, Homo sapiens
ttgtcagtgaaaaca

SEQ ID NO: 152138 - DNA, 15 bp, Homo sapiens
tgtcagtgaaaacaa

SEQ ID NO: 152139 - DNA, 15 bp, Homo sapiens
gtcagtgaaaacaat

SEQ ID NO: 152140 - DNA, 15 bp, Homo sapiens
tcagtgaaaacaatg

SEQ ID NO: 152141 - DNA, 15 bp, Homo sapiens
cagtgaaaacaatgg

SEQ ID NO: 152142 - DNA, 15 bp, Homo sapiens
agtgaaaacaatggt

SEQ ID NO: 152143 - DNA, 15 bp, Homo sapiens
gtgaaaacaatggtg

SEQ ID NO: 152144 - DNA, 15 bp, Homo sapiens
tgaaaacaatggtga

SEQ ID NO: 152145 - DNA, 15 bp, Homo sapiens
gaaaacaatggtgag

SEQ ID NO: 152146 - DNA, 15 bp, Homo sapiens
aaaacaatggtgagg

SEQ ID NO: 152147 - DNA, 15 bp, Homo sapiens
aaacaatggtgaggc

SEQ ID NO: 152148 - DNA, 15 bp, Homo sapiens
aacaatggtgaggct

SEQ ID NO: 152149 - DNA, 15 bp, Homo sapiens
acaatggtgaggctg

SEQ ID NO: 152150 - DNA, 15 bp, Homo sapiens
caatggtgaggctgg

SEQ ID NO: 152151 - DNA, 15 bp, Homo sapiens
aatggtgaggctggc

SEQ ID NO: 152152 - DNA, 15 bp, Homo sapiens
atggtgaggctggca

SEQ ID NO: 152153 - DNA, 15 bp, Homo sapiens
tggtgaggctggcat

SEQ ID NO: 152154 - DNA, 15 bp, Homo sapiens
ggtgaggctggcatg

SEQ ID NO: 152155 - DNA, 15 bp, Homo sapiens
gtgaggctggcatga

SEQ ID NO: 152156 - DNA, 15 bp, Homo sapiens
tgaggctggcatgag

SEQ ID NO: 152157 - DNA, 15 bp, Homo sapiens
gaggctggcatgaga

SEQ ID NO: 152158 - DNA, 15 bp, Homo sapiens
aggctggcatgagag

SEQ ID NO: 152159 - DNA, 15 bp, Homo sapiens
ggctggcatgagagt

SEQ ID NO: 152160 - DNA, 15 bp, Homo sapiens
gctggcatgagagtg

SEQ ID NO: 152161 - DNA, 15 bp, Homo sapiens
ctggcatgagagtgt

SEQ ID NO: 152162 - DNA, 15 bp, Homo sapiens
tggcatgagagtgtg

SEQ ID NO: 152163 - DNA, 15 bp, Homo sapiens
ggcatgagagtgtga

SEQ ID NO: 152164 - DNA, 15 bp, Homo sapiens
gcatgagagtgtgaa

SEQ ID NO: 152165 - DNA, 15 bp, Homo sapiens
catgagagtgtgaat

SEQ ID NO: 152166 - DNA, 15 bp, Homo sapiens
atgagagtgtgaatc

SEQ ID NO: 152167 - DNA, 15 bp, Homo sapiens
tgagagtgtgaatct

SEQ ID NO: 152168 - DNA, 15 bp, Homo sapiens
gagagtgtgaatctg

SEQ ID NO: 152169 - DNA, 15 bp, Homo sapiens
agagtgtgaatctgg

SEQ ID NO: 152170 - DNA, 15 bp, Homo sapiens
gagtgtgaatctgga

SEQ ID NO: 152171 - DNA, 15 bp, Homo sapiens
agtgtgaatctggat

SEQ ID NO: 152172 - DNA, 15 bp, Homo sapiens
gtgtgaatctggatg

SEQ ID NO: 152173 - DNA, 15 bp, Homo sapiens
tgtgaatctggatgg

SEQ ID NO: 152174 - DNA, 15 bp, Homo sapiens
gtgaatctggatggg

SEQ ID NO: 152175 - DNA, 15 bp, Homo sapiens
tgaatctggatggga

SEQ ID NO: 152176 - DNA, 15 bp, Homo sapiens
gaatctggatgggag

SEQ ID NO: 152177 - DNA, 15 bp, Homo sapiens
aatctggatgggagg

SEQ ID NO: 152178 - DNA, 15 bp, Homo sapiens
atctggatgggaggg

SEQ ID NO: 152179 - DNA, 15 bp, Homo sapiens
tctggatgggagggc

SEQ ID NO: 152180 - DNA, 15 bp, Homo sapiens
ctggatgggagggct

SEQ ID NO: 152181 - DNA, 15 bp, Homo sapiens
tggatgggagggctt

SEQ ID NO: 152182 - DNA, 15 bp, Homo sapiens
ggatgggagggcttg

SEQ ID NO: 152183 - DNA, 15 bp, Homo sapiens
gatgggagggcttgt

SEQ ID NO: 152184 - DNA, 15 bp, Homo sapiens
atgggagggcttgtg

SEQ ID NO: 152185 - DNA, 15 bp, Homo sapiens
tgggagggcttgtgc

SEQ ID NO: 152186 - DNA, 15 bp, Homo sapiens
gggagggcttgtgct

SEQ ID NO: 152187 - DNA, 15 bp, Homo sapiens
ggagggcttgtgctt

SEQ ID NO: 152188 - DNA, 15 bp, Homo sapiens
gagggcttgtgcttc

SEQ ID NO: 152189 - DNA, 15 bp, Homo sapiens
agggcttgtgcttca

SEQ ID NO: 152190 - DNA, 15 bp, Homo sapiens
gggcttgtgcttcat

SEQ ID NO: 152191 - DNA, 15 bp, Homo sapiens
ggcttgtgcttcatg

SEQ ID NO: 152192 - DNA, 15 bp, Homo sapiens
gcttgtgcttcatga

SEQ ID NO: 152193 - DNA, 15 bp, Homo sapiens
cttgtgcttcatgaa

SEQ ID NO: 152194 - DNA, 15 bp, Homo sapiens
ttgtgcttcatgaaa

SEQ ID NO: 152195 - DNA, 15 bp, Homo sapiens
tgtgcttcatgaaaa

SEQ ID NO: 152196 - DNA, 15 bp, Homo sapiens
gtgcttcatgaaaac

SEQ ID NO: 152197 - DNA, 15 bp, Homo sapiens
tgcttcatgaaaaca

SEQ ID NO: 152198 - DNA, 15 bp, Homo sapiens
gcttcatgaaaacat

SEQ ID NO: 152199 - DNA, 15 bp, Homo sapiens
cttcatgaaaacatt

SEQ ID NO: 152200 - DNA, 15 bp, Homo sapiens
ttcatgaaaacattt

SEQ ID NO: 152201 - DNA, 15 bp, Homo sapiens
tcatgaaaacatttt

SEQ ID NO: 152202 - DNA, 15 bp, Homo sapiens
catgaaaacattttt

SEQ ID NO: 152203 - DNA, 15 bp, Homo sapiens
atgaaaacatttttc

SEQ ID NO: 152204 - DNA, 15 bp, Homo sapiens
tgaaaacatttttcc

SEQ ID NO: 152205 - DNA, 15 bp, Homo sapiens
gaaaacatttttcca

SEQ ID NO: 152206 - DNA, 15 bp, Homo sapiens
aaaacatttttccag

SEQ ID NO: 152207 - DNA, 15 bp, Homo sapiens
aaacatttttccaga

SEQ ID NO: 152208 - DNA, 15 bp, Homo sapiens
aacatttttccagat

SEQ ID NO: 152209 - DNA, 15 bp, Homo sapiens
acatttttccagatc

SEQ ID NO: 152210 - DNA, 15 bp, Homo sapiens
catttttccagatca

SEQ ID NO: 152211 - DNA, 15 bp, Homo sapiens
atttttccagatcag

SEQ ID NO: 152212 - DNA, 15 bp, Homo sapiens
tttttccagatcagc

SEQ ID NO: 152213 - DNA, 15 bp, Homo sapiens
ttttccagatcagct

SEQ ID NO: 152214 - DNA, 15 bp, Homo sapiens
tttccagatcagctc

SEQ ID NO: 152215 - DNA, 15 bp, Homo sapiens
ttccagatcagctca

SEQ ID NO: 152216 - DNA, 15 bp, Homo sapiens
tccagatcagctcag

SEQ ID NO: 152217 - DNA, 15 bp, Homo sapiens
ccagatcagctcagt

SEQ ID NO: 152218 - DNA, 15 bp, Homo sapiens
cagatcagctcagtc

SEQ ID NO: 152219 - DNA, 15 bp, Homo sapiens
agatcagctcagtcg

SEQ ID NO: 152220 - DNA, 15 bp, Homo sapiens
gatcagctcagtcgt

SEQ ID NO: 152221 - DNA, 15 bp, Homo sapiens
atcagctcagtcgtg

SEQ ID NO: 152222 - DNA, 15 bp, Homo sapiens
tcagctcagtcgtga

SEQ ID NO: 152223 - DNA, 15 bp, Homo sapiens
cagctcagtcgtgag

SEQ ID NO: 152224 - DNA, 15 bp, Homo sapiens
agctcagtcgtgagt

SEQ ID NO: 152225 - DNA, 15 bp, Homo sapiens
gctcagtcgtgagtt

SEQ ID NO: 152226 - DNA, 15 bp, Homo sapiens
ctcagtcgtgagtta

SEQ ID NO: 152227 - DNA, 15 bp, Homo sapiens
tcagtcgtgagttat

SEQ ID NO: 152228 - DNA, 15 bp, Homo sapiens
cagtcgtgagttatc

SEQ ID NO: 152229 - DNA, 15 bp, Homo sapiens
agtcgtgagttatcc

SEQ ID NO: 152230 - DNA, 15 bp, Homo sapiens
gtcgtgagttatccg

SEQ ID NO: 152231 - DNA, 15 bp, Homo sapiens
tcgtgagttatccgt

SEQ ID NO: 152232 - DNA, 15 bp, Homo sapiens
cgtgagttatccgtc

SEQ ID NO: 152233 - DNA, 15 bp, Homo sapiens
gtgagttatccgtca

SEQ ID NO: 152234 - DNA, 15 bp, Homo sapiens
tgagttatccgtcat

SEQ ID NO: 152235 - DNA, 15 bp, Homo sapiens
gagttatccgtcatt

SEQ ID NO: 152236 - DNA, 15 bp, Homo sapiens
agttatccgtcattg

SEQ ID NO: 152237 - DNA, 15 bp, Homo sapiens
gttatccgtcattga

SEQ ID NO: 152238 - DNA, 15 bp, Homo sapiens
ttatccgtcattgac

SEQ ID NO: 152239 - DNA, 15 bp, Homo sapiens
tatccgtcattgacg

SEQ ID NO: 152240 - DNA, 15 bp, Homo sapiens
atccgtcattgacgt

SEQ ID NO: 152241 - DNA, 15 bp, Homo sapiens
tccgtcattgacgtt

SEQ ID NO: 152242 - DNA, 15 bp, Homo sapiens
ccgtcattgacgtta

SEQ ID NO: 152243 - DNA, 15 bp, Homo sapiens
cgtcattgacgttat

SEQ ID NO: 152244 - DNA, 15 bp, Homo sapiens
gtcattgacgttata

SEQ ID NO: 152245 - DNA, 15 bp, Homo sapiens
tcattgacgttataa

SEQ ID NO: 152246 - DNA, 15 bp, Homo sapiens
cattgacgttataat

SEQ ID NO: 152247 - DNA, 15 bp, Homo sapiens
attgacgttataata

SEQ ID NO: 152248 - DNA, 15 bp, Homo sapiens
ttgacgttataataa

SEQ ID NO: 152249 - DNA, 15 bp, Homo sapiens
tgacgttataataag

SEQ ID NO: 152250 - DNA, 15 bp, Homo sapiens
gacgttataataagc

SEQ ID NO: 152251 - DNA, 15 bp, Homo sapiens
acgttataataagct

SEQ ID NO: 152252 - DNA, 15 bp, Homo sapiens
cgttataataagctc

SEQ ID NO: 152253 - DNA, 15 bp, Homo sapiens
gttataataagctct

SEQ ID NO: 152254 - DNA, 15 bp, Homo sapiens
ttataataagctctg

SEQ ID NO: 152255 - DNA, 15 bp, Homo sapiens
tataataagctctga

SEQ ID NO: 152256 - DNA, 15 bp, Homo sapiens
ataataagctctgat

SEQ ID NO: 152257 - DNA, 15 bp, Homo sapiens
taataagctctgatt

SEQ ID NO: 152258 - DNA, 15 bp, Homo sapiens
aataagctctgatta

SEQ ID NO: 152259 - DNA, 15 bp, Homo sapiens
ataagctctgattat

SEQ ID NO: 152260 - DNA, 15 bp, Homo sapiens
taagctctgattatt

SEQ ID NO: 152261 - DNA, 15 bp, Homo sapiens
aagctctgattattt

SEQ ID NO: 152262 - DNA, 15 bp, Homo sapiens
agctctgattattta

SEQ ID NO: 152263 - DNA, 15 bp, Homo sapiens
gctctgattatttat

SEQ ID NO: 152264 - DNA, 15 bp, Homo sapiens
ctctgattatttatc

SEQ ID NO: 152265 - DNA, 15 bp, Homo sapiens
tctgattatttatca

SEQ ID NO: 152266 - DNA, 15 bp, Homo sapiens
ctgattatttatcaa

SEQ ID NO: 152267 - DNA, 15 bp, Homo sapiens
tgattatttatcaag

SEQ ID NO: 152268 - DNA, 15 bp, Homo sapiens
gattatttatcaagc

SEQ ID NO: 152269 - DNA, 15 bp, Homo sapiens
attatttatcaagca

SEQ ID NO: 152270 - DNA, 15 bp, Homo sapiens
ttatttatcaagcat

SEQ ID NO: 152271 - DNA, 15 bp, Homo sapiens
tatttatcaagcatc

SEQ ID NO: 152272 - DNA, 15 bp, Homo sapiens
atttatcaagcatca

SEQ ID NO: 152273 - DNA, 15 bp, Homo sapiens
tttatcaagcatcat

SEQ ID NO: 152274 - DNA, 15 bp, Homo sapiens
ttatcaagcatcatt

SEQ ID NO: 152275 - DNA, 15 bp, Homo sapiens
tatcaagcatcattc

SEQ ID NO: 152276 - DNA, 15 bp, Homo sapiens
atcaagcatcattct

SEQ ID NO: 152277 - DNA, 15 bp, Homo sapiens
tcaagcatcattctt

SEQ ID NO: 152278 - DNA, 15 bp, Homo sapiens
caagcatcattcttt

SEQ ID NO: 152279 - DNA, 15 bp, Homo sapiens
aagcatcattcttta

SEQ ID NO: 152280 - DNA, 15 bp, Homo sapiens
agcatcattctttat

SEQ ID NO: 152281 - DNA, 15 bp, Homo sapiens
gcatcattctttata

SEQ ID NO: 152282 - DNA, 15 bp, Homo sapiens
catcattctttatag

SEQ ID NO: 152283 - DNA, 15 bp, Homo sapiens
atcattctttataga

SEQ ID NO: 152284 - DNA, 15 bp, Homo sapiens
tcattctttatagat

SEQ ID NO: 152285 - DNA, 15 bp, Homo sapiens
cattctttatagata

SEQ ID NO: 152286 - DNA, 15 bp, Homo sapiens
attctttatagatat

SEQ ID NO: 152287 - DNA, 15 bp, Homo sapiens
ttctttatagatatc

SEQ ID NO: 152288 - DNA, 15 bp, Homo sapiens
tctttatagatatct

SEQ ID NO: 152289 - DNA, 15 bp, Homo sapiens
ctttatagatatctc

SEQ ID NO: 152290 - DNA, 15 bp, Homo sapiens
tttatagatatctca

SEQ ID NO: 152291 - DNA, 15 bp, Homo sapiens
ttatagatatctcag

SEQ ID NO: 152292 - DNA, 15 bp, Homo sapiens
tatagatatctcagt

SEQ ID NO: 152293 - DNA, 15 bp, Homo sapiens
atagatatctcagtt

SEQ ID NO: 152294 - DNA, 15 bp, Homo sapiens
tagatatctcagttt

SEQ ID NO: 152295 - DNA, 15 bp, Homo sapiens
agatatctcagttta

SEQ ID NO: 152296 - DNA, 15 bp, Homo sapiens
gatatctcagtttaa

SEQ ID NO: 152297 - DNA, 15 bp, Homo sapiens
atatctcagtttaat

SEQ ID NO: 152298 - DNA, 15 bp, Homo sapiens
tatctcagtttaatc

SEQ ID NO: 152299 - DNA, 15 bp, Homo sapiens
atctcagtttaatct

SEQ ID NO: 152300 - DNA, 15 bp, Homo sapiens
tctcagtttaatctg

SEQ ID NO: 152301 - DNA, 15 bp, Homo sapiens
ctcagtttaatctga

SEQ ID NO: 152302 - DNA, 15 bp, Homo sapiens
tcagtttaatctgag

SEQ ID NO: 152303 - DNA, 15 bp, Homo sapiens
cagtttaatctgaga

SEQ ID NO: 152304 - DNA, 15 bp, Homo sapiens
agtttaatctgagat

SEQ ID NO: 152305 - DNA, 15 bp, Homo sapiens
gtttaatctgagata

SEQ ID NO: 152306 - DNA, 15 bp, Homo sapiens
tttaatctgagataa

SEQ ID NO: 152307 - DNA, 15 bp, Homo sapiens
ttaatctgagataat

SEQ ID NO: 152308 - DNA, 15 bp, Homo sapiens
taatctgagataatc

SEQ ID NO: 152309 - DNA, 15 bp, Homo sapiens
aatctgagataatct

SEQ ID NO: 152310 - DNA, 15 bp, Homo sapiens
atctgagataatctt

SEQ ID NO: 152311 - DNA, 15 bp, Homo sapiens
tctgagataatcttc

SEQ ID NO: 152312 - DNA, 15 bp, Homo sapiens
ctgagataatcttct

SEQ ID NO: 152313 - DNA, 15 bp, Homo sapiens
tgagataatcttctc

SEQ ID NO: 152314 - DNA, 15 bp, Homo sapiens
gagataatcttctcc

SEQ ID NO: 152315 - DNA, 15 bp, Homo sapiens
agataatcttctcca

SEQ ID NO: 152316 - DNA, 15 bp, Homo sapiens
gataatcttctccac

SEQ ID NO: 152317 - DNA, 15 bp, Homo sapiens
ataatcttctccaca

SEQ ID NO: 152318 - DNA, 15 bp, Homo sapiens
taatcttctccacat

SEQ ID NO: 152319 - DNA, 15 bp, Homo sapiens
aatcttctccacatc

SEQ ID NO: 152320 - DNA, 15 bp, Homo sapiens
atcttctccacatct

SEQ ID NO: 152321 - DNA, 15 bp, Homo sapiens
tcttctccacatctc

SEQ ID NO: 152322 - DNA, 15 bp, Homo sapiens
cttctccacatctct

SEQ ID NO: 152323 - DNA, 15 bp, Homo sapiens
ttctccacatctctc

SEQ ID NO: 152324 - DNA, 15 bp, Homo sapiens
tctccacatctctcc

SEQ ID NO: 152325 - DNA, 15 bp, Homo sapiens
ctccacatctctcca

SEQ ID NO: 152326 - DNA, 15 bp, Homo sapiens
tccacatctctccac

SEQ ID NO: 152327 - DNA, 15 bp, Homo sapiens
ccacatctctccaca

SEQ ID NO: 152328 - DNA, 15 bp, Homo sapiens
cacatctctccacat

SEQ ID NO: 152329 - DNA, 15 bp, Homo sapiens
acatctctccacata

SEQ ID NO: 152330 - DNA, 15 bp, Homo sapiens
catctctccacatag

SEQ ID NO: 152331 - DNA, 15 bp, Homo sapiens
atctctccacataga

SEQ ID NO: 152332 - DNA, 15 bp, Homo sapiens
tctctccacatagat

SEQ ID NO: 152333 - DNA, 15 bp, Homo sapiens
ctctccacatagatg

SEQ ID NO: 152334 - DNA, 15 bp, Homo sapiens
tctccacatagatgt

SEQ ID NO: 152335 - DNA, 15 bp, Homo sapiens
ctccacatagatgtt

SEQ ID NO: 152336 - DNA, 15 bp, Homo sapiens
tccacatagatgtta

SEQ ID NO: 152337 - DNA, 15 bp, Homo sapiens
ccacatagatgttat

SEQ ID NO: 152338 - DNA, 15 bp, Homo sapiens
cacatagatgttatg

SEQ ID NO: 152339 - DNA, 15 bp, Homo sapiens
acatagatgttatga

SEQ ID NO: 152340 - DNA, 15 bp, Homo sapiens
catagatgttatgaa

SEQ ID NO: 152341 - DNA, 15 bp, Homo sapiens
atagatgttatgaat

SEQ ID NO: 152342 - DNA, 15 bp, Homo sapiens
tagatgttatgaatt

SEQ ID NO: 152343 - DNA, 15 bp, Homo sapiens
agatgttatgaattt

SEQ ID NO: 152344 - DNA, 15 bp, Homo sapiens
gatgttatgaatttt

SEQ ID NO: 152345 - DNA, 15 bp, Homo sapiens
atgttatgaatttta

SEQ ID NO: 152346 - DNA, 15 bp, Homo sapiens
tgttatgaattttac

SEQ ID NO: 152347 - DNA, 15 bp, Homo sapiens
gttatgaattttact

SEQ ID NO: 152348 - DNA, 15 bp, Homo sapiens
ttatgaattttactt

SEQ ID NO: 152349 - DNA, 15 bp, Homo sapiens
tatgaattttacttt

SEQ ID NO: 152350 - DNA, 15 bp, Homo sapiens
atgaattttactttt

SEQ ID NO: 152351 - DNA, 15 bp, Homo sapiens
tgaattttactttta

SEQ ID NO: 152352 - DNA, 15 bp, Homo sapiens
gaattttacttttac

SEQ ID NO: 152353 - DNA, 15 bp, Homo sapiens
aattttacttttaca

SEQ ID NO: 152354 - DNA, 15 bp, Homo sapiens
attttacttttacag

SEQ ID NO: 152355 - DNA, 15 bp, Homo sapiens
ttttacttttacaga

SEQ ID NO: 152356 - DNA, 15 bp, Homo sapiens
tttacttttacagag

SEQ ID NO: 152357 - DNA, 15 bp, Homo sapiens
ttacttttacagagg

SEQ ID NO: 152358 - DNA, 15 bp, Homo sapiens
tacttttacagagga

SEQ ID NO: 152359 - DNA, 15 bp, Homo sapiens
acttttacagaggag

SEQ ID NO: 152360 - DNA, 15 bp, Homo sapiens
cttttacagaggagc

SEQ ID NO: 152361 - DNA, 15 bp, Homo sapiens
ttttacagaggagcc

SEQ ID NO: 152362 - DNA, 15 bp, Homo sapiens
tttacagaggagcca

SEQ ID NO: 152363 - DNA, 15 bp, Homo sapiens
ttacagaggagccaa

SEQ ID NO: 152364 - DNA, 15 bp, Homo sapiens
tacagaggagccaac

SEQ ID NO: 152365 - DNA, 15 bp, Homo sapiens
acagaggagccaact

SEQ ID NO: 152366 - DNA, 15 bp, Homo sapiens
cagaggagccaactg

SEQ ID NO: 152367 - DNA, 15 bp, Homo sapiens
agaggagccaactga

SEQ ID NO: 152368 - DNA, 15 bp, Homo sapiens
gaggagccaactgag

SEQ ID NO: 152369 - DNA, 15 bp, Homo sapiens
aggagccaactgagg

SEQ ID NO: 152370 - DNA, 15 bp, Homo sapiens
ggagccaactgaggc

SEQ ID NO: 152371 - DNA, 15 bp, Homo sapiens
gagccaactgaggct

SEQ ID NO: 152372 - DNA, 15 bp, Homo sapiens
agccaactgaggctc

SEQ ID NO: 152373 - DNA, 15 bp, Homo sapiens
gccaactgaggctca

SEQ ID NO: 152374 - DNA, 15 bp, Homo sapiens
ccaactgaggctcag

SEQ ID NO: 152375 - DNA, 15 bp, Homo sapiens
caactgaggctcaga

SEQ ID NO: 152376 - DNA, 15 bp, Homo sapiens
aactgaggctcagat

SEQ ID NO: 152377 - DNA, 15 bp, Homo sapiens
actgaggctcagata

SEQ ID NO: 152378 - DNA, 15 bp, Homo sapiens
ctgaggctcagataa

SEQ ID NO: 152379 - DNA, 15 bp, Homo sapiens
tgaggctcagataag

SEQ ID NO: 152380 - DNA, 15 bp, Homo sapiens
gaggctcagataagt

SEQ ID NO: 152381 - DNA, 15 bp, Homo sapiens
aggctcagataagtt

SEQ ID NO: 152382 - DNA, 15 bp, Homo sapiens
ggctcagataagtta

SEQ ID NO: 152383 - DNA, 15 bp, Homo sapiens
gctcagataagttac

SEQ ID NO: 152384 - DNA, 15 bp, Homo sapiens
ctcagataagttact

SEQ ID NO: 152385 - DNA, 15 bp, Homo sapiens
tcagataagttactt

SEQ ID NO: 152386 - DNA, 15 bp, Homo sapiens
cagataagttactta

SEQ ID NO: 152387 - DNA, 15 bp, Homo sapiens
agataagttacttat

SEQ ID NO: 152388 - DNA, 15 bp, Homo sapiens
gataagttacttatt

SEQ ID NO: 152389 - DNA, 15 bp, Homo sapiens
ataagttacttatta

SEQ ID NO: 152390 - DNA, 15 bp, Homo sapiens
taagttacttattat

SEQ ID NO: 152391 - DNA, 15 bp, Homo sapiens
aagttacttattata

SEQ ID NO: 152392 - DNA, 15 bp, Homo sapiens
agttacttattatat

SEQ ID NO: 152393 - DNA, 15 bp, Homo sapiens
gttacttattatatg

SEQ ID NO: 152394 - DNA, 15 bp, Homo sapiens
ttacttattatatga

SEQ ID NO: 152395 - DNA, 15 bp, Homo sapiens
tacttattatatgac

SEQ ID NO: 152396 - DNA, 15 bp, Homo sapiens
acttattatatgact

SEQ ID NO: 152397 - DNA, 15 bp, Homo sapiens
cttattatatgacta

SEQ ID NO: 152398 - DNA, 15 bp, Homo sapiens
ttattatatgactag

SEQ ID NO: 152399 - DNA, 15 bp, Homo sapiens
tattatatgactagt

SEQ ID NO: 152400 - DNA, 15 bp, Homo sapiens
attatatgactagta

SEQ ID NO: 152401 - DNA, 15 bp, Homo sapiens
ttatatgactagtag

SEQ ID NO: 152402 - DNA, 15 bp, Homo sapiens
tatatgactagtagt

SEQ ID NO: 152403 - DNA, 15 bp, Homo sapiens
atatgactagtagtg

SEQ ID NO: 152404 - DNA, 15 bp, Homo sapiens
tatgactagtagtgg

SEQ ID NO: 152405 - DNA, 15 bp, Homo sapiens
atgactagtagtggt

SEQ ID NO: 152406 - DNA, 15 bp, Homo sapiens
tgactagtagtggta

SEQ ID NO: 152407 - DNA, 15 bp, Homo sapiens
gactagtagtggtag

SEQ ID NO: 152408 - DNA, 15 bp, Homo sapiens
actagtagtggtaga

SEQ ID NO: 152409 - DNA, 15 bp, Homo sapiens
ctagtagtggtagag

SEQ ID NO: 152410 - DNA, 15 bp, Homo sapiens
tagtagtggtagagc

SEQ ID NO: 152411 - DNA, 15 bp, Homo sapiens
agtagtggtagagct

SEQ ID NO: 152412 - DNA, 15 bp, Homo sapiens
gtagtggtagagctg

SEQ ID NO: 152413 - DNA, 15 bp, Homo sapiens
tagtggtagagctgg

SEQ ID NO: 152414 - DNA, 15 bp, Homo sapiens
agtggtagagctggg

SEQ ID NO: 152415 - DNA, 15 bp, Homo sapiens
gtggtagagctgggg

SEQ ID NO: 152416 - DNA, 15 bp, Homo sapiens
tggtagagctggggt

SEQ ID NO: 152417 - DNA, 15 bp, Homo sapiens
ggtagagctggggtt

SEQ ID NO: 152418 - DNA, 15 bp, Homo sapiens
gtagagctggggttt

SEQ ID NO: 152419 - DNA, 15 bp, Homo sapiens
tagagctggggtttc

SEQ ID NO: 152420 - DNA, 15 bp, Homo sapiens
agagctggggtttca

SEQ ID NO: 152421 - DNA, 15 bp, Homo sapiens
gagctggggtttcaa

SEQ ID NO: 152422 - DNA, 15 bp, Homo sapiens
agctggggtttcaac

SEQ ID NO: 152423 - DNA, 15 bp, Homo sapiens
gctggggtttcaact

SEQ ID NO: 152424 - DNA, 15 bp, Homo sapiens
ctggggtttcaacta

SEQ ID NO: 152425 - DNA, 15 bp, Homo sapiens
tggggtttcaactaa

SEQ ID NO: 152426 - DNA, 15 bp, Homo sapiens
ggggtttcaactaag

SEQ ID NO: 152427 - DNA, 15 bp, Homo sapiens
gggtttcaactaaga

SEQ ID NO: 152428 - DNA, 15 bp, Homo sapiens
ggtttcaactaagaa

SEQ ID NO: 152429 - DNA, 15 bp, Homo sapiens
gtttcaactaagaac

SEQ ID NO: 152430 - DNA, 15 bp, Homo sapiens
tttcaactaagaact

SEQ ID NO: 152431 - DNA, 15 bp, Homo sapiens
ttcaactaagaactc

SEQ ID NO: 152432 - DNA, 15 bp, Homo sapiens
tcaactaagaactct

SEQ ID NO: 152433 - DNA, 15 bp, Homo sapiens
caactaagaactctc

SEQ ID NO: 152434 - DNA, 15 bp, Homo sapiens
aactaagaactctct

SEQ ID NO: 152435 - DNA, 15 bp, Homo sapiens
actaagaactctctg

SEQ ID NO: 152436 - DNA, 15 bp, Homo sapiens
ctaagaactctctgg

SEQ ID NO: 152437 - DNA, 15 bp, Homo sapiens
taagaactctctggc

SEQ ID NO: 152438 - DNA, 15 bp, Homo sapiens
aagaactctctggct

SEQ ID NO: 152439 - DNA, 15 bp, Homo sapiens
agaactctctggctc

SEQ ID NO: 152440 - DNA, 15 bp, Homo sapiens
gaactctctggctcc

SEQ ID NO: 152441 - DNA, 15 bp, Homo sapiens
aactctctggctcca

SEQ ID NO: 152442 - DNA, 15 bp, Homo sapiens
actctctggctccaa

SEQ ID NO: 152443 - DNA, 15 bp, Homo sapiens
ctctctggctccaaa

SEQ ID NO: 152444 - DNA, 15 bp, Homo sapiens
tctctggctccaaag

SEQ ID NO: 152445 - DNA, 15 bp, Homo sapiens
ctctggctccaaagc

SEQ ID NO: 152446 - DNA, 15 bp, Homo sapiens
tctggctccaaagcc

SEQ ID NO: 152447 - DNA, 15 bp, Homo sapiens
ctggctccaaagccc

SEQ ID NO: 152448 - DNA, 15 bp, Homo sapiens
tggctccaaagccct

SEQ ID NO: 152449 - DNA, 15 bp, Homo sapiens
ggctccaaagccctt

SEQ ID NO: 152450 - DNA, 15 bp, Homo sapiens
gctccaaagcccttg

SEQ ID NO: 152451 - DNA, 15 bp, Homo sapiens
ctccaaagcccttgt

SEQ ID NO: 152452 - DNA, 15 bp, Homo sapiens
tccaaagcccttgta

SEQ ID NO: 152453 - DNA, 15 bp, Homo sapiens
ccaaagcccttgtaa

SEQ ID NO: 152454 - DNA, 15 bp, Homo sapiens
caaagcccttgtaag

SEQ ID NO: 152455 - DNA, 15 bp, Homo sapiens
aaagcccttgtaagt

SEQ ID NO: 152456 - DNA, 15 bp, Homo sapiens
aagcccttgtaagtt

SEQ ID NO: 152457 - DNA, 15 bp, Homo sapiens
agcccttgtaagttt

SEQ ID NO: 152458 - DNA, 15 bp, Homo sapiens
gcccttgtaagtttc

SEQ ID NO: 152459 - DNA, 15 bp, Homo sapiens
cccttgtaagtttct

SEQ ID NO: 152460 - DNA, 15 bp, Homo sapiens
ccttgtaagtttcta

SEQ ID NO: 152461 - DNA, 15 bp, Homo sapiens
cttgtaagtttctat

SEQ ID NO: 152462 - DNA, 15 bp, Homo sapiens
ttgtaagtttctatc

SEQ ID NO: 152463 - DNA, 15 bp, Homo sapiens
tgtaagtttctatca

SEQ ID NO: 152464 - DNA, 15 bp, Homo sapiens
gtaagtttctatcag

SEQ ID NO: 152465 - DNA, 15 bp, Homo sapiens
taagtttctatcagt

SEQ ID NO: 152466 - DNA, 15 bp, Homo sapiens
aagtttctatcagta

SEQ ID NO: 152467 - DNA, 15 bp, Homo sapiens
agtttctatcagtat

SEQ ID NO: 152468 - DNA, 15 bp, Homo sapiens
gtttctatcagtata

SEQ ID NO: 152469 - DNA, 15 bp, Homo sapiens
tttctatcagtatat

SEQ ID NO: 152470 - DNA, 15 bp, Homo sapiens
ttctatcagtatatg

SEQ ID NO: 152471 - DNA, 15 bp, Homo sapiens
tctatcagtatatga

SEQ ID NO: 152472 - DNA, 15 bp, Homo sapiens
ctatcagtatatgac

SEQ ID NO: 152473 - DNA, 15 bp, Homo sapiens
tatcagtatatgacc

SEQ ID NO: 152474 - DNA, 15 bp, Homo sapiens
atcagtatatgacca

SEQ ID NO: 152475 - DNA, 15 bp, Homo sapiens
tcagtatatgaccat

SEQ ID NO: 152476 - DNA, 15 bp, Homo sapiens
cagtatatgaccatg

SEQ ID NO: 152477 - DNA, 15 bp, Homo sapiens
agtatatgaccatgc

SEQ ID NO: 152478 - DNA, 15 bp, Homo sapiens
gtatatgaccatgca

SEQ ID NO: 152479 - DNA, 15 bp, Homo sapiens
tatatgaccatgcat

SEQ ID NO: 152480 - DNA, 15 bp, Homo sapiens
atatgaccatgcata

SEQ ID NO: 152481 - DNA, 15 bp, Homo sapiens
tatgaccatgcatat

SEQ ID NO: 152482 - DNA, 15 bp, Homo sapiens
atgaccatgcatatg

SEQ ID NO: 152483 - DNA, 15 bp, Homo sapiens
tgaccatgcatatga

SEQ ID NO: 152484 - DNA, 15 bp, Homo sapiens
gaccatgcatatgag

SEQ ID NO: 152485 - DNA, 15 bp, Homo sapiens
accatgcatatgagc

SEQ ID NO: 152486 - DNA, 15 bp, Homo sapiens
ccatgcatatgagca

SEQ ID NO: 152487 - DNA, 15 bp, Homo sapiens
catgcatatgagcat

SEQ ID NO: 152488 - DNA, 15 bp, Homo sapiens
atgcatatgagcatt

SEQ ID NO: 152489 - DNA, 15 bp, Homo sapiens
tgcatatgagcattt

SEQ ID NO: 152490 - DNA, 15 bp, Homo sapiens
gcatatgagcatttg

SEQ ID NO: 152491 - DNA, 15 bp, Homo sapiens
catatgagcatttgt

SEQ ID NO: 152492 - DNA, 15 bp, Homo sapiens
atatgagcatttgtc

SEQ ID NO: 152493 - DNA, 15 bp, Homo sapiens
tatgagcatttgtct

SEQ ID NO: 152494 - DNA, 15 bp, Homo sapiens
atgagcatttgtctc

SEQ ID NO: 152495 - DNA, 15 bp, Homo sapiens
tgagcatttgtctct

SEQ ID NO: 152496 - DNA, 15 bp, Homo sapiens
gagcatttgtctctc

SEQ ID NO: 152497 - DNA, 15 bp, Homo sapiens
agcatttgtctctcc

SEQ ID NO: 152498 - DNA, 15 bp, Homo sapiens
gcatttgtctctcct

SEQ ID NO: 152499 - DNA, 15 bp, Homo sapiens
catttgtctctcctc

SEQ ID NO: 152500 - DNA, 15 bp, Homo sapiens
atttgtctctcctct

SEQ ID NO: 152501 - DNA, 15 bp, Homo sapiens
tttgtctctcctctt

SEQ ID NO: 152502 - DNA, 15 bp, Homo sapiens
ttgtctctcctcttc

SEQ ID NO: 152503 - DNA, 15 bp, Homo sapiens
tgtctctcctcttct

SEQ ID NO: 152504 - DNA, 15 bp, Homo sapiens
gtctctcctcttctt

SEQ ID NO: 152505 - DNA, 15 bp, Homo sapiens
tctctcctcttcttc

SEQ ID NO: 152506 - DNA, 15 bp, Homo sapiens
ctctcctcttcttca

SEQ ID NO: 152507 - DNA, 15 bp, Homo sapiens
tctcctcttcttcat

SEQ ID NO: 152508 - DNA, 15 bp, Homo sapiens
ctcctcttcttcata

SEQ ID NO: 152509 - DNA, 15 bp, Homo sapiens
tcctcttcttcatag

SEQ ID NO: 152510 - DNA, 15 bp, Homo sapiens
cctcttcttcatagc

SEQ ID NO: 152511 - DNA, 15 bp, Homo sapiens
ctcttcttcatagct

SEQ ID NO: 152512 - DNA, 15 bp, Homo sapiens
tcttcttcatagctc

SEQ ID NO: 152513 - DNA, 15 bp, Homo sapiens
cttcttcatagctcc

SEQ ID NO: 152514 - DNA, 15 bp, Homo sapiens
ttcttcatagctcct

SEQ ID NO: 152515 - DNA, 15 bp, Homo sapiens
tcttcatagctcctt

SEQ ID NO: 152516 - DNA, 15 bp, Homo sapiens
cttcatagctcctta

SEQ ID NO: 152517 - DNA, 15 bp, Homo sapiens
ttcatagctccttac

SEQ ID NO: 152518 - DNA, 15 bp, Homo sapiens
tcatagctccttact

SEQ ID NO: 152519 - DNA, 15 bp, Homo sapiens
catagctccttactg

SEQ ID NO: 152520 - DNA, 15 bp, Homo sapiens
atagctccttactgc

SEQ ID NO: 152521 - DNA, 15 bp, Homo sapiens
tagctccttactgca

SEQ ID NO: 152522 - DNA, 15 bp, Homo sapiens
agctccttactgcaa

SEQ ID NO: 152523 - DNA, 15 bp, Homo sapiens
gctccttactgcaat

SEQ ID NO: 152524 - DNA, 15 bp, Homo sapiens
ctccttactgcaatg

SEQ ID NO: 152525 - DNA, 15 bp, Homo sapiens
tccttactgcaatga

SEQ ID NO: 152526 - DNA, 15 bp, Homo sapiens
ccttactgcaatgat

SEQ ID NO: 152527 - DNA, 15 bp, Homo sapiens
cttactgcaatgatt

SEQ ID NO: 152528 - DNA, 15 bp, Homo sapiens
ttactgcaatgattt

SEQ ID NO: 152529 - DNA, 15 bp, Homo sapiens
tactgcaatgatttg

SEQ ID NO: 152530 - DNA, 15 bp, Homo sapiens
actgcaatgatttga

SEQ ID NO: 152531 - DNA, 15 bp, Homo sapiens
ctgcaatgatttgat

SEQ ID NO: 152532 - DNA, 15 bp, Homo sapiens
tgcaatgatttgatg

SEQ ID NO: 152533 - DNA, 15 bp, Homo sapiens
gcaatgatttgatga

SEQ ID NO: 152534 - DNA, 15 bp, Homo sapiens
caatgatttgatgaa

SEQ ID NO: 152535 - DNA, 15 bp, Homo sapiens
aatgatttgatgaag

SEQ ID NO: 152536 - DNA, 15 bp, Homo sapiens
atgatttgatgaaga

SEQ ID NO: 152537 - DNA, 15 bp, Homo sapiens
tgatttgatgaagaa

SEQ ID NO: 152538 - DNA, 15 bp, Homo sapiens
gatttgatgaagaat

SEQ ID NO: 152539 - DNA, 15 bp, Homo sapiens
atttgatgaagaatt

SEQ ID NO: 152540 - DNA, 15 bp, Homo sapiens
tttgatgaagaattt

SEQ ID NO: 152541 - DNA, 15 bp, Homo sapiens
ttgatgaagaatttg

SEQ ID NO: 152542 - DNA, 15 bp, Homo sapiens
tgatgaagaatttgg

SEQ ID NO: 152543 - DNA, 15 bp, Homo sapiens
gatgaagaatttgga

SEQ ID NO: 152544 - DNA, 15 bp, Homo sapiens
atgaagaatttggag

SEQ ID NO: 152545 - DNA, 15 bp, Homo sapiens
tgaagaatttggagt

SEQ ID NO: 152546 - DNA, 15 bp, Homo sapiens
gaagaatttggagtc

SEQ ID NO: 152547 - DNA, 15 bp, Homo sapiens
aagaatttggagtct

SEQ ID NO: 152548 - DNA, 15 bp, Homo sapiens
agaatttggagtcta

SEQ ID NO: 152549 - DNA, 15 bp, Homo sapiens
gaatttggagtctag

SEQ ID NO: 152550 - DNA, 15 bp, Homo sapiens
aatttggagtctagt

SEQ ID NO: 152551 - DNA, 15 bp, Homo sapiens
atttggagtctagtc

SEQ ID NO: 152552 - DNA, 15 bp, Homo sapiens
tttggagtctagtcc

SEQ ID NO: 152553 - DNA, 15 bp, Homo sapiens
ttggagtctagtcct

SEQ ID NO: 152554 - DNA, 15 bp, Homo sapiens
tggagtctagtcctc

SEQ ID NO: 152555 - DNA, 15 bp, Homo sapiens
ggagtctagtcctct

SEQ ID NO: 152556 - DNA, 15 bp, Homo sapiens
gagtctagtcctctt

SEQ ID NO: 152557 - DNA, 15 bp, Homo sapiens
agtctagtcctcttt

SEQ ID NO: 152558 - DNA, 15 bp, Homo sapiens
gtctagtcctctttc

SEQ ID NO: 152559 - DNA, 15 bp, Homo sapiens
tctagtcctctttcc

SEQ ID NO: 152560 - DNA, 15 bp, Homo sapiens
ctagtcctctttccc

SEQ ID NO: 152561 - DNA, 15 bp, Homo sapiens
tagtcctctttcccg

SEQ ID NO: 152562 - DNA, 15 bp, Homo sapiens
agtcctctttcccgc

SEQ ID NO: 152563 - DNA, 15 bp, Homo sapiens
gtcctctttcccgca

SEQ ID NO: 152564 - DNA, 15 bp, Homo sapiens
tcctctttcccgcat

SEQ ID NO: 152565 - DNA, 15 bp, Homo sapiens
cctctttcccgcatt

SEQ ID NO: 152566 - DNA, 15 bp, Homo sapiens
ctctttcccgcatta

SEQ ID NO: 152567 - DNA, 15 bp, Homo sapiens
tctttcccgcattat

SEQ ID NO: 152568 - DNA, 15 bp, Homo sapiens
ctttcccgcattatc

SEQ ID NO: 152569 - DNA, 15 bp, Homo sapiens
tttcccgcattatct

SEQ ID NO: 152570 - DNA, 15 bp, Homo sapiens
ttcccgcattatctg

SEQ ID NO: 152571 - DNA, 15 bp, Homo sapiens
tcccgcattatctgg

SEQ ID NO: 152572 - DNA, 15 bp, Homo sapiens
cccgcattatctgga

SEQ ID NO: 152573 - DNA, 15 bp, Homo sapiens
ccgcattatctggaa

SEQ ID NO: 152574 - DNA, 15 bp, Homo sapiens
cgcattatctggaaa

SEQ ID NO: 152575 - DNA, 15 bp, Homo sapiens
gcattatctggaaag

SEQ ID NO: 152576 - DNA, 15 bp, Homo sapiens
cattatctggaaagc

SEQ ID NO: 152577 - DNA, 15 bp, Homo sapiens
attatctggaaagct

SEQ ID NO: 152578 - DNA, 15 bp, Homo sapiens
ttatctggaaagctc

SEQ ID NO: 152579 - DNA, 15 bp, Homo sapiens
tatctggaaagctct

SEQ ID NO: 152580 - DNA, 15 bp, Homo sapiens
atctggaaagctctg

SEQ ID NO: 152581 - DNA, 15 bp, Homo sapiens
tctggaaagctctga

SEQ ID NO: 152582 - DNA, 15 bp, Homo sapiens
ctggaaagctctgaa

SEQ ID NO: 152583 - DNA, 15 bp, Homo sapiens
tggaaagctctgaag

SEQ ID NO: 152584 - DNA, 15 bp, Homo sapiens
ggaaagctctgaagc

SEQ ID NO: 152585 - DNA, 15 bp, Homo sapiens
gaaagctctgaagcc

SEQ ID NO: 152586 - DNA, 15 bp, Homo sapiens
aaagctctgaagccg

SEQ ID NO: 152587 - DNA, 15 bp, Homo sapiens
aagctctgaagccgc

SEQ ID NO: 152588 - DNA, 15 bp, Homo sapiens
agctctgaagccgct

SEQ ID NO: 152589 - DNA, 15 bp, Homo sapiens
gctctgaagccgctg

SEQ ID NO: 152590 - DNA, 15 bp, Homo sapiens
ctctgaagccgctgc

SEQ ID NO: 152591 - DNA, 15 bp, Homo sapiens
tctgaagccgctgct

SEQ ID NO: 152592 - DNA, 15 bp, Homo sapiens
ctgaagccgctgctc

SEQ ID NO: 152593 - DNA, 15 bp, Homo sapiens
tgaagccgctgctcg

SEQ ID NO: 152594 - DNA, 15 bp, Homo sapiens
gaagccgctgctcgt

SEQ ID NO: 152595 - DNA, 15 bp, Homo sapiens
aagccgctgctcgtt

SEQ ID NO: 152596 - DNA, 15 bp, Homo sapiens
agccgctgctcgttg

SEQ ID NO: 152597 - DNA, 15 bp, Homo sapiens
gccgctgctcgttgg

SEQ ID NO: 152598 - DNA, 15 bp, Homo sapiens
ccgctgctcgttggg

SEQ ID NO: 152599 - DNA, 15 bp, Homo sapiens
cgctgctcgttggga

SEQ ID NO: 152600 - DNA, 15 bp, Homo sapiens
gctgctcgttgggaa

SEQ ID NO: 152601 - DNA, 15 bp, Homo sapiens
ctgctcgttgggaag

SEQ ID NO: 152602 - DNA, 15 bp, Homo sapiens
tgctcgttgggaaga

SEQ ID NO: 152603 - DNA, 15 bp, Homo sapiens
gctcgttgggaagat

SEQ ID NO: 152604 - DNA, 15 bp, Homo sapiens
ctcgttgggaagatc

SEQ ID NO: 152605 - DNA, 15 bp, Homo sapiens
tcgttgggaagatcc

SEQ ID NO: 152606 - DNA, 15 bp, Homo sapiens
cgttgggaagatcct

SEQ ID NO: 152607 - DNA, 15 bp, Homo sapiens
gttgggaagatcctg

SEQ ID NO: 152608 - DNA, 15 bp, Homo sapiens
ttgggaagatcctgt

SEQ ID NO: 152609 - DNA, 15 bp, Homo sapiens
tgggaagatcctgta

SEQ ID NO: 152610 - DNA, 15 bp, Homo sapiens
gggaagatcctgtat

SEQ ID NO: 152611 - DNA, 15 bp, Homo sapiens
ggaagatcctgtata

SEQ ID NO: 152612 - DNA, 15 bp, Homo sapiens
gaagatcctgtatac

SEQ ID NO: 152613 - DNA, 15 bp, Homo sapiens
aagatcctgtataca

SEQ ID NO: 152614 - DNA, 15 bp, Homo sapiens
agatcctgtatacac

SEQ ID NO: 152615 - DNA, 15 bp, Homo sapiens
gatcctgtatacacc

SEQ ID NO: 152616 - DNA, 15 bp, Homo sapiens
atcctgtatacacct

SEQ ID NO: 152617 - DNA, 15 bp, Homo sapiens
tcctgtatacacctg

SEQ ID NO: 152618 - DNA, 15 bp, Homo sapiens
cctgtatacacctga

SEQ ID NO: 152619 - DNA, 15 bp, Homo sapiens
ctgtatacacctgac

SEQ ID NO: 152620 - DNA, 15 bp, Homo sapiens
tgtatacacctgaca

SEQ ID NO: 152621 - DNA, 15 bp, Homo sapiens
gtatacacctgacac

SEQ ID NO: 152622 - DNA, 15 bp, Homo sapiens
tatacacctgacact

SEQ ID NO: 152623 - DNA, 15 bp, Homo sapiens
atacacctgacactc

SEQ ID NO: 152624 - DNA, 15 bp, Homo sapiens
tacacctgacactcc

SEQ ID NO: 152625 - DNA, 15 bp, Homo sapiens
acacctgacactcca

SEQ ID NO: 152626 - DNA, 15 bp, Homo sapiens
cacctgacactccag

SEQ ID NO: 152627 - DNA, 15 bp, Homo sapiens
acctgacactccagc

SEQ ID NO: 152628 - DNA, 15 bp, Homo sapiens
cctgacactccagcc

SEQ ID NO: 152629 - DNA, 15 bp, Homo sapiens
ctgacactccagcca

SEQ ID NO: 152630 - DNA, 15 bp, Homo sapiens
tgacactccagccac

SEQ ID NO: 152631 - DNA, 15 bp, Homo sapiens
gacactccagccaca

SEQ ID NO: 152632 - DNA, 15 bp, Homo sapiens
acactccagccacaa

SEQ ID NO: 152633 - DNA, 15 bp, Homo sapiens
cactccagccacaag

SEQ ID NO: 152634 - DNA, 15 bp, Homo sapiens
actccagccacaagg

SEQ ID NO: 152635 - DNA, 15 bp, Homo sapiens
ctccagccacaaggc

SEQ ID NO: 152636 - DNA, 15 bp, Homo sapiens
tccagccacaaggca

SEQ ID NO: 152637 - DNA, 15 bp, Homo sapiens
ccagccacaaggcag

SEQ ID NO: 152638 - DNA, 15 bp, Homo sapiens
cagccacaaggcagg

SEQ ID NO: 152639 - DNA, 15 bp, Homo sapiens
agccacaaggcaggt

SEQ ID NO: 152640 - DNA, 15 bp, Homo sapiens
gccacaaggcaggtc

SEQ ID NO: 152641 - DNA, 15 bp, Homo sapiens
ccacaaggcaggtca

SEQ ID NO: 152642 - DNA, 15 bp, Homo sapiens
cacaaggcaggtcat

SEQ ID NO: 152643 - DNA, 15 bp, Homo sapiens
acaaggcaggtcatg

SEQ ID NO: 152644 - DNA, 15 bp, Homo sapiens
caaggcaggtcatgg

SEQ ID NO: 152645 - DNA, 15 bp, Homo sapiens
aaggcaggtcatggc

SEQ ID NO: 152646 - DNA, 15 bp, Homo sapiens
aggcaggtcatggct

SEQ ID NO: 152647 - DNA, 15 bp, Homo sapiens
ggcaggtcatggctg

SEQ ID NO: 152648 - DNA, 15 bp, Homo sapiens
gcaggtcatggctga

SEQ ID NO: 152649 - DNA, 15 bp, Homo sapiens
caggtcatggctgag

SEQ ID NO: 152650 - DNA, 15 bp, Homo sapiens
aggtcatggctgagg

SEQ ID NO: 152651 - DNA, 15 bp, Homo sapiens
ggtcatggctgaggt

SEQ ID NO: 152652 - DNA, 15 bp, Homo sapiens
gtcatggctgaggta

SEQ ID NO: 152653 - DNA, 15 bp, Homo sapiens
tcatggctgaggtaa

SEQ ID NO: 152654 - DNA, 15 bp, Homo sapiens
catggctgaggtaag

SEQ ID NO: 152655 - DNA, 15 bp, Homo sapiens
atggctgaggtaagc

SEQ ID NO: 152656 - DNA, 15 bp, Homo sapiens
tggctgaggtaagct

SEQ ID NO: 152657 - DNA, 15 bp, Homo sapiens
ggctgaggtaagctg

SEQ ID NO: 152658 - DNA, 15 bp, Homo sapiens
gctgaggtaagctgc

SEQ ID NO: 152659 - DNA, 15 bp, Homo sapiens
ctgaggtaagctgcc

SEQ ID NO: 152660 - DNA, 15 bp, Homo sapiens
tgaggtaagctgccc

SEQ ID NO: 152661 - DNA, 15 bp, Homo sapiens
gaggtaagctgcccc

SEQ ID NO: 152662 - DNA, 15 bp, Homo sapiens
aggtaagctgccccc

SEQ ID NO: 152663 - DNA, 15 bp, Homo sapiens
ggtaagctgccccca

SEQ ID NO: 152664 - DNA, 15 bp, Homo sapiens
gtaagctgcccccag

SEQ ID NO: 152665 - DNA, 15 bp, Homo sapiens
taagctgcccccagc

SEQ ID NO: 152666 - DNA, 15 bp, Homo sapiens
aagctgcccccagcc

SEQ ID NO: 152667 - DNA, 15 bp, Homo sapiens
agctgcccccagccc

SEQ ID NO: 152668 - DNA, 15 bp, Homo sapiens
gctgcccccagccca

SEQ ID NO: 152669 - DNA, 15 bp, Homo sapiens
ctgcccccagcccaa

SEQ ID NO: 152670 - DNA, 15 bp, Homo sapiens
tgcccccagcccaag

SEQ ID NO: 152671 - DNA, 15 bp, Homo sapiens
gcccccagcccaaga

SEQ ID NO: 152672 - DNA, 15 bp, Homo sapiens
cccccagcccaagac

SEQ ID NO: 152673 - DNA, 15 bp, Homo sapiens
ccccagcccaagact

SEQ ID NO: 152674 - DNA, 15 bp, Homo sapiens
cccagcccaagactc

SEQ ID NO: 152675 - DNA, 15 bp, Homo sapiens
ccagcccaagactcc

SEQ ID NO: 152676 - DNA, 15 bp, Homo sapiens
cagcccaagactccc

SEQ ID NO: 152677 - DNA, 15 bp, Homo sapiens
agcccaagactccct

SEQ ID NO: 152678 - DNA, 15 bp, Homo sapiens
gcccaagactccctc

SEQ ID NO: 152679 - DNA, 15 bp, Homo sapiens
cccaagactccctcc

SEQ ID NO: 152680 - DNA, 15 bp, Homo sapiens
ccaagactccctccc

SEQ ID NO: 152681 - DNA, 15 bp, Homo sapiens
caagactccctcccc

SEQ ID NO: 152682 - DNA, 15 bp, Homo sapiens
aagactccctcccca

SEQ ID NO: 152683 - DNA, 15 bp, Homo sapiens
agactccctccccag

SEQ ID NO: 152684 - DNA, 15 bp, Homo sapiens
gactccctccccaga

SEQ ID NO: 152685 - DNA, 15 bp, Homo sapiens
actccctccccagaa

SEQ ID NO: 152686 - DNA, 15 bp, Homo sapiens
ctccctccccagaat

SEQ ID NO: 152687 - DNA, 15 bp, Homo sapiens
tccctccccagaatc

SEQ ID NO: 152688 - DNA, 15 bp, Homo sapiens
ccctccccagaatct

SEQ ID NO: 152689 - DNA, 15 bp, Homo sapiens
cctccccagaatctc

SEQ ID NO: 152690 - DNA, 15 bp, Homo sapiens
ctccccagaatctcc

SEQ ID NO: 152691 - DNA, 15 bp, Homo sapiens
tccccagaatctccc

SEQ ID NO: 152692 - DNA, 15 bp, Homo sapiens
ccccagaatctcccc

SEQ ID NO: 152693 - DNA, 15 bp, Homo sapiens
cccagaatctcccca

SEQ ID NO: 152694 - DNA, 15 bp, Homo sapiens
ccagaatctccccag

SEQ ID NO: 152695 - DNA, 15 bp, Homo sapiens
cagaatctccccaga

SEQ ID NO: 152696 - DNA, 15 bp, Homo sapiens
agaatctccccagaa

SEQ ID NO: 152697 - DNA, 15 bp, Homo sapiens
gaatctccccagaac

SEQ ID NO: 152698 - DNA, 15 bp, Homo sapiens
aatctccccagaact

SEQ ID NO: 152699 - DNA, 15 bp, Homo sapiens
atctccccagaactg

SEQ ID NO: 152700 - DNA, 15 bp, Homo sapiens
tctccccagaactgg

SEQ ID NO: 152701 - DNA, 15 bp, Homo sapiens
ctccccagaactggg

SEQ ID NO: 152702 - DNA, 15 bp, Homo sapiens
tccccagaactgggg

SEQ ID NO: 152703 - DNA, 15 bp, Homo sapiens
ccccagaactggggg

SEQ ID NO: 152704 - DNA, 15 bp, Homo sapiens
cccagaactgggggc

SEQ ID NO: 152705 - DNA, 15 bp, Homo sapiens
ccagaactgggggca

SEQ ID NO: 152706 - DNA, 15 bp, Homo sapiens
cagaactgggggcaa

SEQ ID NO: 152707 - DNA, 15 bp, Homo sapiens
agaactgggggcaaa

SEQ ID NO: 152708 - DNA, 15 bp, Homo sapiens
gaactgggggcaaaa

SEQ ID NO: 152709 - DNA, 15 bp, Homo sapiens
aactgggggcaaaaa

SEQ ID NO: 152710 - DNA, 15 bp, Homo sapiens
actgggggcaaaaaa

SEQ ID NO: 152711 - DNA, 15 bp, Homo sapiens
ctgggggcaaaaaac

SEQ ID NO: 152712 - DNA, 15 bp, Homo sapiens
tgggggcaaaaaact

SEQ ID NO: 152713 - DNA, 15 bp, Homo sapiens
gggggcaaaaaactc

SEQ ID NO: 152714 - DNA, 15 bp, Homo sapiens
ggggcaaaaaactca

SEQ ID NO: 152715 - DNA, 15 bp, Homo sapiens
gggcaaaaaactcaa

SEQ ID NO: 152716 - DNA, 15 bp, Homo sapiens
ggcaaaaaactcaag

SEQ ID NO: 152717 - DNA, 15 bp, Homo sapiens
gcaaaaaactcaagg

SEQ ID NO: 152718 - DNA, 15 bp, Homo sapiens
caaaaaactcaaggt

SEQ ID NO: 152719 - DNA, 15 bp, Homo sapiens
aaaaaactcaaggta

SEQ ID NO: 152720 - DNA, 15 bp, Homo sapiens
aaaaactcaaggtag

SEQ ID NO: 152721 - DNA, 15 bp, Homo sapiens
aaaactcaaggtagc

SEQ ID NO: 152722 - DNA, 15 bp, Homo sapiens
aaactcaaggtagct

SEQ ID NO: 152723 - DNA, 15 bp, Homo sapiens
aactcaaggtagctt

SEQ ID NO: 152724 - DNA, 15 bp, Homo sapiens
actcaaggtagcttc

SEQ ID NO: 152725 - DNA, 15 bp, Homo sapiens
ctcaaggtagcttca

SEQ ID NO: 152726 - DNA, 15 bp, Homo sapiens
tcaaggtagcttcag

SEQ ID NO: 152727 - DNA, 15 bp, Homo sapiens
caaggtagcttcaga

SEQ ID NO: 152728 - DNA, 15 bp, Homo sapiens
aaggtagcttcagag

SEQ ID NO: 152729 - DNA, 15 bp, Homo sapiens
aggtagcttcagagg

SEQ ID NO: 152730 - DNA, 15 bp, Homo sapiens
ggtagcttcagaggt

SEQ ID NO: 152731 - DNA, 15 bp, Homo sapiens
gtagcttcagaggtg

SEQ ID NO: 152732 - DNA, 15 bp, Homo sapiens
tagcttcagaggtgt

SEQ ID NO: 152733 - DNA, 15 bp, Homo sapiens
agcttcagaggtgtg

SEQ ID NO: 152734 - DNA, 15 bp, Homo sapiens
gcttcagaggtgtgc

SEQ ID NO: 152735 - DNA, 15 bp, Homo sapiens
cttcagaggtgtgcg

SEQ ID NO: 152736 - DNA, 15 bp, Homo sapiens
ttcagaggtgtgcgc

SEQ ID NO: 152737 - DNA, 15 bp, Homo sapiens
tcagaggtgtgcgct

SEQ ID NO: 152738 - DNA, 15 bp, Homo sapiens
cagaggtgtgcgcta

SEQ ID NO: 152739 - DNA, 15 bp, Homo sapiens
agaggtgtgcgctaa

SEQ ID NO: 152740 - DNA, 15 bp, Homo sapiens
gaggtgtgcgctaag

SEQ ID NO: 152741 - DNA, 15 bp, Homo sapiens
aggtgtgcgctaagt

SEQ ID NO: 152742 - DNA, 15 bp, Homo sapiens
ggtgtgcgctaagta

SEQ ID NO: 152743 - DNA, 15 bp, Homo sapiens
gtgtgcgctaagtat

SEQ ID NO: 152744 - DNA, 15 bp, Homo sapiens
tgtgcgctaagtata

SEQ ID NO: 152745 - DNA, 15 bp, Homo sapiens
gtgcgctaagtatac

SEQ ID NO: 152746 - DNA, 15 bp, Homo sapiens
tgcgctaagtatact

SEQ ID NO: 152747 - DNA, 15 bp, Homo sapiens
gcgctaagtatactc

SEQ ID NO: 152748 - DNA, 15 bp, Homo sapiens
cgctaagtatactca

SEQ ID NO: 152749 - DNA, 15 bp, Homo sapiens
gctaagtatactcac

SEQ ID NO: 152750 - DNA, 15 bp, Homo sapiens
ctaagtatactcacg

SEQ ID NO: 152751 - DNA, 15 bp, Homo sapiens
taagtatactcacgg

SEQ ID NO: 152752 - DNA, 15 bp, Homo sapiens
aagtatactcacggc

SEQ ID NO: 152753 - DNA, 15 bp, Homo sapiens
agtatactcacggct

SEQ ID NO: 152754 - DNA, 15 bp, Homo sapiens
gtatactcacggctc

SEQ ID NO: 152755 - DNA, 15 bp, Homo sapiens
tatactcacggctct

SEQ ID NO: 152756 - DNA, 15 bp, Homo sapiens
atactcacggctctt

SEQ ID NO: 152757 - DNA, 15 bp, Homo sapiens
tactcacggctcttc

SEQ ID NO: 152758 - DNA, 15 bp, Homo sapiens
actcacggctcttct

SEQ ID NO: 152759 - DNA, 15 bp, Homo sapiens
ctcacggctcttctg

SEQ ID NO: 152760 - DNA, 15 bp, Homo sapiens
tcacggctcttctgg

SEQ ID NO: 152761 - DNA, 15 bp, Homo sapiens
cacggctcttctgga

SEQ ID NO: 152762 - DNA, 15 bp, Homo sapiens
acggctcttctggaa

SEQ ID NO: 152763 - DNA, 15 bp, Homo sapiens
cggctcttctggaat

SEQ ID NO: 152764 - DNA, 15 bp, Homo sapiens
ggctcttctggaatt

SEQ ID NO: 152765 - DNA, 15 bp, Homo sapiens
gctcttctggaattc

SEQ ID NO: 152766 - DNA, 15 bp, Homo sapiens
ctcttctggaattcc

SEQ ID NO: 152767 - DNA, 15 bp, Homo sapiens
tcttctggaattccc

SEQ ID NO: 152768 - DNA, 15 bp, Homo sapiens
cttctggaattccca

SEQ ID NO: 152769 - DNA, 15 bp, Homo sapiens
ttctggaattcccag

SEQ ID NO: 152770 - DNA, 15 bp, Homo sapiens
tctggaattcccaga

SEQ ID NO: 152771 - DNA, 15 bp, Homo sapiens
ctggaattcccagag

SEQ ID NO: 152772 - DNA, 15 bp, Homo sapiens
tggaattcccagagt

SEQ ID NO: 152773 - DNA, 15 bp, Homo sapiens
ggaattcccagagtg

SEQ ID NO: 152774 - DNA, 15 bp, Homo sapiens
gaattcccagagtga

SEQ ID NO: 152775 - DNA, 15 bp, Homo sapiens
aattcccagagtgaa

SEQ ID NO: 152776 - DNA, 15 bp, Homo sapiens
attcccagagtgaaa

SEQ ID NO: 152777 - DNA, 15 bp, Homo sapiens
ttcccagagtgaaaa

SEQ ID NO: 152778 - DNA, 15 bp, Homo sapiens
tcccagagtgaaaac

SEQ ID NO: 152779 - DNA, 15 bp, Homo sapiens
cccagagtgaaaacc

SEQ ID NO: 152780 - DNA, 15 bp, Homo sapiens
ccagagtgaaaacct

SEQ ID NO: 152781 - DNA, 15 bp, Homo sapiens
cagagtgaaaacctc

SEQ ID NO: 152782 - DNA, 15 bp, Homo sapiens
agagtgaaaacctca

SEQ ID NO: 152783 - DNA, 15 bp, Homo sapiens
gagtgaaaacctcaa

SEQ ID NO: 152784 - DNA, 15 bp, Homo sapiens
agtgaaaacctcaag

SEQ ID NO: 152785 - DNA, 15 bp, Homo sapiens
gtgaaaacctcaagt

SEQ ID NO: 152786 - DNA, 15 bp, Homo sapiens
tgaaaacctcaagtc

SEQ ID NO: 152787 - DNA, 15 bp, Homo sapiens
gaaaacctcaagtct

SEQ ID NO: 152788 - DNA, 15 bp, Homo sapiens
aaaacctcaagtctg

SEQ ID NO: 152789 - DNA, 15 bp, Homo sapiens
aaacctcaagtctga

SEQ ID NO: 152790 - DNA, 15 bp, Homo sapiens
aacctcaagtctgat

SEQ ID NO: 152791 - DNA, 15 bp, Homo sapiens
acctcaagtctgatg

SEQ ID NO: 152792 - DNA, 15 bp, Homo sapiens
cctcaagtctgatgc

SEQ ID NO: 152793 - DNA, 15 bp, Homo sapiens
ctcaagtctgatgca

SEQ ID NO: 152794 - DNA, 15 bp, Homo sapiens
tcaagtctgatgcag

SEQ ID NO: 152795 - DNA, 15 bp, Homo sapiens
caagtctgatgcaga

SEQ ID NO: 152796 - DNA, 15 bp, Homo sapiens
aagtctgatgcagac

SEQ ID NO: 152797 - DNA, 15 bp, Homo sapiens
agtctgatgcagacc

SEQ ID NO: 152798 - DNA, 15 bp, Homo sapiens
gtctgatgcagacca

SEQ ID NO: 152799 - DNA, 15 bp, Homo sapiens
tctgatgcagaccag

SEQ ID NO: 152800 - DNA, 15 bp, Homo sapiens
ctgatgcagaccaga

SEQ ID NO: 152801 - DNA, 15 bp, Homo sapiens
tgatgcagaccagag

SEQ ID NO: 152802 - DNA, 15 bp, Homo sapiens
gatgcagaccagagc

SEQ ID NO: 152803 - DNA, 15 bp, Homo sapiens
atgcagaccagagct

SEQ ID NO: 152804 - DNA, 15 bp, Homo sapiens
tgcagaccagagctg

SEQ ID NO: 152805 - DNA, 15 bp, Homo sapiens
gcagaccagagctgg

SEQ ID NO: 152806 - DNA, 15 bp, Homo sapiens
cagaccagagctggg

SEQ ID NO: 152807 - DNA, 15 bp, Homo sapiens
agaccagagctgggc

SEQ ID NO: 152808 - DNA, 15 bp, Homo sapiens
gaccagagctgggcc

SEQ ID NO: 152809 - DNA, 15 bp, Homo sapiens
accagagctgggcca

SEQ ID NO: 152810 - DNA, 15 bp, Homo sapiens
ccagagctgggccag

SEQ ID NO: 152811 - DNA, 15 bp, Homo sapiens
cagagctgggccagc

SEQ ID NO: 152812 - DNA, 15 bp, Homo sapiens
agagctgggccagct

SEQ ID NO: 152813 - DNA, 15 bp, Homo sapiens
gagctgggccagctc

SEQ ID NO: 152814 - DNA, 15 bp, Homo sapiens
agctgggccagctcc

SEQ ID NO: 152815 - DNA, 15 bp, Homo sapiens
gctgggccagctccc

SEQ ID NO: 152816 - DNA, 15 bp, Homo sapiens
ctgggccagctcccc

SEQ ID NO: 152817 - DNA, 15 bp, Homo sapiens
tgggccagctcccca

SEQ ID NO: 152818 - DNA, 15 bp, Homo sapiens
gggccagctccccag

SEQ ID NO: 152819 - DNA, 15 bp, Homo sapiens
ggccagctccccagt

SEQ ID NO: 152820 - DNA, 15 bp, Homo sapiens
gccagctccccagtc

SEQ ID NO: 152821 - DNA, 15 bp, Homo sapiens
ccagctccccagtcg

SEQ ID NO: 152822 - DNA, 15 bp, Homo sapiens
cagctccccagtcgt

SEQ ID NO: 152823 - DNA, 15 bp, Homo sapiens
agctccccagtcgtg

SEQ ID NO: 152824 - DNA, 15 bp, Homo sapiens
gctccccagtcgtgg

SEQ ID NO: 152825 - DNA, 15 bp, Homo sapiens
ctccccagtcgtggg

SEQ ID NO: 152826 - DNA, 15 bp, Homo sapiens
tccccagtcgtgggt

SEQ ID NO: 152827 - DNA, 15 bp, Homo sapiens
ccccagtcgtgggta

SEQ ID NO: 152828 - DNA, 15 bp, Homo sapiens
cccagtcgtgggtat

SEQ ID NO: 152829 - DNA, 15 bp, Homo sapiens
ccagtcgtgggtata

SEQ ID NO: 152830 - DNA, 15 bp, Homo sapiens
cagtcgtgggtatag

SEQ ID NO: 152831 - DNA, 15 bp, Homo sapiens
agtcgtgggtataga

SEQ ID NO: 152832 - DNA, 15 bp, Homo sapiens
gtcgtgggtatagaa

SEQ ID NO: 152833 - DNA, 15 bp, Homo sapiens
tcgtgggtatagaat

SEQ ID NO: 152834 - DNA, 15 bp, Homo sapiens
cgtgggtatagaatc

SEQ ID NO: 152835 - DNA, 15 bp, Homo sapiens
gtgggtatagaatca

SEQ ID NO: 152836 - DNA, 15 bp, Homo sapiens
tgggtatagaatcat

SEQ ID NO: 152837 - DNA, 15 bp, Homo sapiens
gggtatagaatcata

SEQ ID NO: 152838 - DNA, 15 bp, Homo sapiens
ggtatagaatcatag

SEQ ID NO: 152839 - DNA, 15 bp, Homo sapiens
gtatagaatcatagt

SEQ ID NO: 152840 - DNA, 15 bp, Homo sapiens
tatagaatcatagtt

SEQ ID NO: 152841 - DNA, 15 bp, Homo sapiens
atagaatcatagtta

SEQ ID NO: 152842 - DNA, 15 bp, Homo sapiens
tagaatcatagttac

SEQ ID NO: 152843 - DNA, 15 bp, Homo sapiens
agaatcatagttaca

SEQ ID NO: 152844 - DNA, 15 bp, Homo sapiens
gaatcatagttacaa

SEQ ID NO: 152845 - DNA, 15 bp, Homo sapiens
aatcatagttacaag

SEQ ID NO: 152846 - DNA, 15 bp, Homo sapiens
atcatagttacaagc

SEQ ID NO: 152847 - DNA, 15 bp, Homo sapiens
tcatagttacaagca

SEQ ID NO: 152848 - DNA, 15 bp, Homo sapiens
catagttacaagcag

SEQ ID NO: 152849 - DNA, 15 bp, Homo sapiens
atagttacaagcagg

SEQ ID NO: 152850 - DNA, 15 bp, Homo sapiens
tagttacaagcaggc

SEQ ID NO: 152851 - DNA, 15 bp, Homo sapiens
agttacaagcaggca

SEQ ID NO: 152852 - DNA, 15 bp, Homo sapiens
gttacaagcaggcat

SEQ ID NO: 152853 - DNA, 15 bp, Homo sapiens
ttacaagcaggcatt

SEQ ID NO: 152854 - DNA, 15 bp, Homo sapiens
tacaagcaggcattt

SEQ ID NO: 152855 - DNA, 15 bp, Homo sapiens
acaagcaggcatttc

SEQ ID NO: 152856 - DNA, 15 bp, Homo sapiens
caagcaggcatttct

SEQ ID NO: 152857 - DNA, 15 bp, Homo sapiens
aagcaggcatttctt

SEQ ID NO: 152858 - DNA, 15 bp, Homo sapiens
agcaggcatttcttg

SEQ ID NO: 152859 - DNA, 15 bp, Homo sapiens
gcaggcatttcttgg

SEQ ID NO: 152860 - DNA, 15 bp, Homo sapiens
caggcatttcttggg

SEQ ID NO: 152861 - DNA, 15 bp, Homo sapiens
aggcatttcttgggg

SEQ ID NO: 152862 - DNA, 15 bp, Homo sapiens
ggcatttcttgggga

SEQ ID NO: 152863 - DNA, 15 bp, Homo sapiens
gcatttcttggggat

SEQ ID NO: 152864 - DNA, 15 bp, Homo sapiens
catttcttggggatg

SEQ ID NO: 152865 - DNA, 15 bp, Homo sapiens
atttcttggggatgg

SEQ ID NO: 152866 - DNA, 15 bp, Homo sapiens
tttcttggggatggg

SEQ ID NO: 152867 - DNA, 15 bp, Homo sapiens
ttcttggggatgggg

SEQ ID NO: 152868 - DNA, 15 bp, Homo sapiens
tcttggggatgggga

SEQ ID NO: 152869 - DNA, 15 bp, Homo sapiens
cttggggatggggag

SEQ ID NO: 152870 - DNA, 15 bp, Homo sapiens
ttggggatggggagg

SEQ ID NO: 152871 - DNA, 15 bp, Homo sapiens
tggggatggggagga

SEQ ID NO: 152872 - DNA, 15 bp, Homo sapiens
ggggatggggaggac

SEQ ID NO: 152873 - DNA, 15 bp, Homo sapiens
gggatggggaggact

SEQ ID NO: 152874 - DNA, 15 bp, Homo sapiens
ggatggggaggactg

SEQ ID NO: 152875 - DNA, 15 bp, Homo sapiens
gatggggaggactgg

SEQ ID NO: 152876 - DNA, 15 bp, Homo sapiens
atggggaggactggc

SEQ ID NO: 152877 - DNA, 15 bp, Homo sapiens
tggggaggactggca

SEQ ID NO: 152878 - DNA, 15 bp, Homo sapiens
ggggaggactggcac

SEQ ID NO: 152879 - DNA, 15 bp, Homo sapiens
gggaggactggcaca

SEQ ID NO: 152880 - DNA, 15 bp, Homo sapiens
ggaggactggcacag

SEQ ID NO: 152881 - DNA, 15 bp, Homo sapiens
gaggactggcacagg

SEQ ID NO: 152882 - DNA, 15 bp, Homo sapiens
aggactggcacaggg

SEQ ID NO: 152883 - DNA, 15 bp, Homo sapiens
ggactggcacagggc

SEQ ID NO: 152884 - DNA, 15 bp, Homo sapiens
gactggcacagggct

SEQ ID NO: 152885 - DNA, 15 bp, Homo sapiens
actggcacagggctg

SEQ ID NO: 152886 - DNA, 15 bp, Homo sapiens
ctggcacagggctgc

SEQ ID NO: 152887 - DNA, 15 bp, Homo sapiens
tggcacagggctgct

SEQ ID NO: 152888 - DNA, 15 bp, Homo sapiens
ggcacagggctgctg

SEQ ID NO: 152889 - DNA, 15 bp, Homo sapiens
gcacagggctgctgt

SEQ ID NO: 152890 - DNA, 15 bp, Homo sapiens
cacagggctgctgtg

SEQ ID NO: 152891 - DNA, 15 bp, Homo sapiens
acagggctgctgtga

SEQ ID NO: 152892 - DNA, 15 bp, Homo sapiens
cagggctgctgtgat

SEQ ID NO: 152893 - DNA, 15 bp, Homo sapiens
agggctgctgtgatg

SEQ ID NO: 152894 - DNA, 15 bp, Homo sapiens
gggctgctgtgatgg

SEQ ID NO: 152895 - DNA, 15 bp, Homo sapiens
ggctgctgtgatggg

SEQ ID NO: 152896 - DNA, 15 bp, Homo sapiens
gctgctgtgatgggg

SEQ ID NO: 152897 - DNA, 15 bp, Homo sapiens
ctgctgtgatggggt

SEQ ID NO: 152898 - DNA, 15 bp, Homo sapiens
tgctgtgatggggta

SEQ ID NO: 152899 - DNA, 15 bp, Homo sapiens
gctgtgatggggtat

SEQ ID NO: 152900 - DNA, 15 bp, Homo sapiens
ctgtgatggggtatc

SEQ ID NO: 152901 - DNA, 15 bp, Homo sapiens
tgtgatggggtatct

SEQ ID NO: 152902 - DNA, 15 bp, Homo sapiens
gtgatggggtatctt

SEQ ID NO: 152903 - DNA, 15 bp, Homo sapiens
tgatggggtatcttt

SEQ ID NO: 152904 - DNA, 15 bp, Homo sapiens
gatggggtatctttt

SEQ ID NO: 152905 - DNA, 15 bp, Homo sapiens
atggggtatcttttc

SEQ ID NO: 152906 - DNA, 15 bp, Homo sapiens
tggggtatcttttca

SEQ ID NO: 152907 - DNA, 15 bp, Homo sapiens
ggggtatcttttcag

SEQ ID NO: 152908 - DNA, 15 bp, Homo sapiens
gggtatcttttcagg

SEQ ID NO: 152909 - DNA, 15 bp, Homo sapiens
ggtatcttttcaggg

SEQ ID NO: 152910 - DNA, 15 bp, Homo sapiens
gtatcttttcaggga

SEQ ID NO: 152911 - DNA, 15 bp, Homo sapiens
tatcttttcagggag

SEQ ID NO: 152912 - DNA, 15 bp, Homo sapiens
atcttttcagggagg

SEQ ID NO: 152913 - DNA, 15 bp, Homo sapiens
tcttttcagggagga

SEQ ID NO: 152914 - DNA, 15 bp, Homo sapiens
cttttcagggaggag

SEQ ID NO: 152915 - DNA, 15 bp, Homo sapiens
ttttcagggaggagc

SEQ ID NO: 152916 - DNA, 15 bp, Homo sapiens
tttcagggaggagcc

SEQ ID NO: 152917 - DNA, 15 bp, Homo sapiens
ttcagggaggagcca

SEQ ID NO: 152918 - DNA, 15 bp, Homo sapiens
tcagggaggagccaa

SEQ ID NO: 152919 - DNA, 15 bp, Homo sapiens
cagggaggagccaaa

SEQ ID NO: 152920 - DNA, 15 bp, Homo sapiens
agggaggagccaaac

SEQ ID NO: 152921 - DNA, 15 bp, Homo sapiens
gggaggagccaaacg

SEQ ID NO: 152922 - DNA, 15 bp, Homo sapiens
ggaggagccaaacgc

SEQ ID NO: 152923 - DNA, 15 bp, Homo sapiens
gaggagccaaacgct

SEQ ID NO: 152924 - DNA, 15 bp, Homo sapiens
aggagccaaacgctc

SEQ ID NO: 152925 - DNA, 15 bp, Homo sapiens
ggagccaaacgctca

SEQ ID NO: 152926 - DNA, 15 bp, Homo sapiens
gagccaaacgctcat

SEQ ID NO: 152927 - DNA, 15 bp, Homo sapiens
agccaaacgctcatt

SEQ ID NO: 152928 - DNA, 15 bp, Homo sapiens
gccaaacgctcattg

SEQ ID NO: 152929 - DNA, 15 bp, Homo sapiens
ccaaacgctcattgt

SEQ ID NO: 152930 - DNA, 15 bp, Homo sapiens
caaacgctcattgtc

SEQ ID NO: 152931 - DNA, 15 bp, Homo sapiens
aaacgctcattgtct

SEQ ID NO: 152932 - DNA, 15 bp, Homo sapiens
aacgctcattgtctg

SEQ ID NO: 152933 - DNA, 15 bp, Homo sapiens
acgctcattgtctgt

SEQ ID NO: 152934 - DNA, 15 bp, Homo sapiens
cgctcattgtctgtg

SEQ ID NO: 152935 - DNA, 15 bp, Homo sapiens
gctcattgtctgtgc

SEQ ID NO: 152936 - DNA, 15 bp, Homo sapiens
ctcattgtctgtgct

SEQ ID NO: 152937 - DNA, 15 bp, Homo sapiens
tcattgtctgtgctt

SEQ ID NO: 152938 - DNA, 15 bp, Homo sapiens
cattgtctgtgcttc

SEQ ID NO: 152939 - DNA, 15 bp, Homo sapiens
attgtctgtgcttct

SEQ ID NO: 152940 - DNA, 15 bp, Homo sapiens
ttgtctgtgcttctc

SEQ ID NO: 152941 - DNA, 15 bp, Homo sapiens
tgtctgtgcttctcc

SEQ ID NO: 152942 - DNA, 15 bp, Homo sapiens
gtctgtgcttctcct

SEQ ID NO: 152943 - DNA, 15 bp, Homo sapiens
tctgtgcttctcctc

SEQ ID NO: 152944 - DNA, 15 bp, Homo sapiens
ctgtgcttctcctcc

SEQ ID NO: 152945 - DNA, 15 bp, Homo sapiens
tgtgcttctcctcct

SEQ ID NO: 152946 - DNA, 15 bp, Homo sapiens
gtgcttctcctcctt

SEQ ID NO: 152947 - DNA, 15 bp, Homo sapiens
tgcttctcctccttt

SEQ ID NO: 152948 - DNA, 15 bp, Homo sapiens
gcttctcctcctttt

SEQ ID NO: 152949 - DNA, 15 bp, Homo sapiens
cttctcctccttttt

SEQ ID NO: 152950 - DNA, 15 bp, Homo sapiens
ttctcctcctttttc

SEQ ID NO: 152951 - DNA, 15 bp, Homo sapiens
tctcctcctttttct

SEQ ID NO: 152952 - DNA, 15 bp, Homo sapiens
ctcctcctttttctg

SEQ ID NO: 152953 - DNA, 15 bp, Homo sapiens
tcctcctttttctgc

SEQ ID NO: 152954 - DNA, 15 bp, Homo sapiens
cctcctttttctgcg

SEQ ID NO: 152955 - DNA, 15 bp, Homo sapiens
ctcctttttctgcgg

SEQ ID NO: 152956 - DNA, 15 bp, Homo sapiens
tcctttttctgcggt

SEQ ID NO: 152957 - DNA, 15 bp, Homo sapiens
cctttttctgcggtc

SEQ ID NO: 152958 - DNA, 15 bp, Homo sapiens
ctttttctgcggtcc

SEQ ID NO: 152959 - DNA, 15 bp, Homo sapiens
tttttctgcggtccc

SEQ ID NO: 152960 - DNA, 15 bp, Homo sapiens
ttttctgcggtccct

SEQ ID NO: 152961 - DNA, 15 bp, Homo sapiens
tttctgcggtccctg

SEQ ID NO: 152962 - DNA, 15 bp, Homo sapiens
ttctgcggtccctgg

SEQ ID NO: 152963 - DNA, 15 bp, Homo sapiens
tctgcggtccctggc

SEQ ID NO: 152964 - DNA, 15 bp, Homo sapiens
ctgcggtccctggct

SEQ ID NO: 152965 - DNA, 15 bp, Homo sapiens
tgcggtccctggctc

SEQ ID NO: 152966 - DNA, 15 bp, Homo sapiens
gcggtccctggctcc

SEQ ID NO: 152967 - DNA, 15 bp, Homo sapiens
cggtccctggctccc

SEQ ID NO: 152968 - DNA, 15 bp, Homo sapiens
ggtccctggctcccc

SEQ ID NO: 152969 - DNA, 15 bp, Homo sapiens
gtccctggctcccca

SEQ ID NO: 152970 - DNA, 15 bp, Homo sapiens
tccctggctccccac

SEQ ID NO: 152971 - DNA, 15 bp, Homo sapiens
ccctggctccccacc

SEQ ID NO: 152972 - DNA, 15 bp, Homo sapiens
cctggctccccacct

SEQ ID NO: 152973 - DNA, 15 bp, Homo sapiens
ctggctccccacctg

SEQ ID NO: 152974 - DNA, 15 bp, Homo sapiens
tggctccccacctga

SEQ ID NO: 152975 - DNA, 15 bp, Homo sapiens
ggctccccacctgac

SEQ ID NO: 152976 - DNA, 15 bp, Homo sapiens
gctccccacctgact

SEQ ID NO: 152977 - DNA, 15 bp, Homo sapiens
ctccccacctgactc

SEQ ID NO: 152978 - DNA, 15 bp, Homo sapiens
tccccacctgactcc

SEQ ID NO: 152979 - DNA, 15 bp, Homo sapiens
ccccacctgactcca

SEQ ID NO: 152980 - DNA, 15 bp, Homo sapiens
cccacctgactccag

SEQ ID NO: 152981 - DNA, 15 bp, Homo sapiens
ccacctgactccagg

SEQ ID NO: 152982 - DNA, 15 bp, Homo sapiens
cacctgactccaggt

SEQ ID NO: 152983 - DNA, 15 bp, Homo sapiens
acctgactccaggtg

SEQ ID NO: 152984 - DNA, 15 bp, Homo sapiens
cctgactccaggtga

SEQ ID NO: 152985 - DNA, 15 bp, Homo sapiens
ctgactccaggtgaa

SEQ ID NO: 152986 - DNA, 15 bp, Homo sapiens
tgactccaggtgaac

SEQ ID NO: 152987 - DNA, 15 bp, Homo sapiens
gactccaggtgaaca

SEQ ID NO: 152988 - DNA, 15 bp, Homo sapiens
actccaggtgaacaa

SEQ ID NO: 152989 - DNA, 15 bp, Homo sapiens
ctccaggtgaacaag

SEQ ID NO: 152990 - DNA, 15 bp, Homo sapiens
tccaggtgaacaaga

SEQ ID NO: 152991 - DNA, 15 bp, Homo sapiens
ccaggtgaacaagac

SEQ ID NO: 152992 - DNA, 15 bp, Homo sapiens
caggtgaacaagacc

SEQ ID NO: 152993 - DNA, 15 bp, Homo sapiens
aggtgaacaagacct

SEQ ID NO: 152994 - DNA, 15 bp, Homo sapiens
ggtgaacaagacctt

SEQ ID NO: 152995 - DNA, 15 bp, Homo sapiens
gtgaacaagaccttc

SEQ ID NO: 152996 - DNA, 15 bp, Homo sapiens
tgaacaagaccttcc

SEQ ID NO: 152997 - DNA, 15 bp, Homo sapiens
gaacaagaccttcca

SEQ ID NO: 152998 - DNA, 15 bp, Homo sapiens
aacaagaccttccag

SEQ ID NO: 152999 - DNA, 15 bp, Homo sapiens
acaagaccttccagg

SEQ ID NO: 153000 - DNA, 15 bp, Homo sapiens
caagaccttccagga

SEQ ID NO: 153001 - DNA, 15 bp, Homo sapiens
aagaccttccaggaa

SEQ ID NO: 153002 - DNA, 15 bp, Homo sapiens
agaccttccaggaac

SEQ ID NO: 153003 - DNA, 15 bp, Homo sapiens
gaccttccaggaact

SEQ ID NO: 153004 - DNA, 15 bp, Homo sapiens
accttccaggaactg

SEQ ID NO: 153005 - DNA, 15 bp, Homo sapiens
ccttccaggaactgg

SEQ ID NO: 153006 - DNA, 15 bp, Homo sapiens
cttccaggaactggc

SEQ ID NO: 153007 - DNA, 15 bp, Homo sapiens
ttccaggaactggct

SEQ ID NO: 153008 - DNA, 15 bp, Homo sapiens
tccaggaactggctg

SEQ ID NO: 153009 - DNA, 15 bp, Homo sapiens
ccaggaactggctgt

SEQ ID NO: 153010 - DNA, 15 bp, Homo sapiens
caggaactggctgtg

SEQ ID NO: 153011 - DNA, 15 bp, Homo sapiens
aggaactggctgtgt

SEQ ID NO: 153012 - DNA, 15 bp, Homo sapiens
ggaactggctgtgtt

SEQ ID NO: 153013 - DNA, 15 bp, Homo sapiens
gaactggctgtgttc

SEQ ID NO: 153014 - DNA, 15 bp, Homo sapiens
aactggctgtgttcc

SEQ ID NO: 153015 - DNA, 15 bp, Homo sapiens
actggctgtgttcca

SEQ ID NO: 153016 - DNA, 15 bp, Homo sapiens
ctggctgtgttccat

SEQ ID NO: 153017 - DNA, 15 bp, Homo sapiens
tggctgtgttccatg

SEQ ID NO: 153018 - DNA, 15 bp, Homo sapiens
ggctgtgttccatga

SEQ ID NO: 153019 - DNA, 15 bp, Homo sapiens
gctgtgttccatgat

SEQ ID NO: 153020 - DNA, 15 bp, Homo sapiens
ctgtgttccatgatc

SEQ ID NO: 153021 - DNA, 15 bp, Homo sapiens
tgtgttccatgatct

SEQ ID NO: 153022 - DNA, 15 bp, Homo sapiens
gtgttccatgatctg

SEQ ID NO: 153023 - DNA, 15 bp, Homo sapiens
tgttccatgatctgg

SEQ ID NO: 153024 - DNA, 15 bp, Homo sapiens
gttccatgatctgga

SEQ ID NO: 153025 - DNA, 15 bp, Homo sapiens
ttccatgatctggaa

SEQ ID NO: 153026 - DNA, 15 bp, Homo sapiens
tccatgatctggaag

SEQ ID NO: 153027 - DNA, 15 bp, Homo sapiens
ccatgatctggaagg

SEQ ID NO: 153028 - DNA, 15 bp, Homo sapiens
catgatctggaaggc

SEQ ID NO: 153029 - DNA, 15 bp, Homo sapiens
atgatctggaaggca

SEQ ID NO: 153030 - DNA, 15 bp, Homo sapiens
tgatctggaaggcat

SEQ ID NO: 153031 - DNA, 15 bp, Homo sapiens
gatctggaaggcatg

SEQ ID NO: 153032 - DNA, 15 bp, Homo sapiens
atctggaaggcatgt

SEQ ID NO: 153033 - DNA, 15 bp, Homo sapiens
tctggaaggcatgtg

SEQ ID NO: 153034 - DNA, 15 bp, Homo sapiens
ctggaaggcatgtgg

SEQ ID NO: 153035 - DNA, 15 bp, Homo sapiens
tggaaggcatgtggg

SEQ ID NO: 153036 - DNA, 15 bp, Homo sapiens
ggaaggcatgtggga

SEQ ID NO: 153037 - DNA, 15 bp, Homo sapiens
gaaggcatgtgggag

SEQ ID NO: 153038 - DNA, 15 bp, Homo sapiens
aaggcatgtgggagg

SEQ ID NO: 153039 - DNA, 15 bp, Homo sapiens
aggcatgtgggagga

SEQ ID NO: 153040 - DNA, 15 bp, Homo sapiens
ggcatgtgggaggaa

SEQ ID NO: 153041 - DNA, 15 bp, Homo sapiens
gcatgtgggaggaac

SEQ ID NO: 153042 - DNA, 15 bp, Homo sapiens
catgtgggaggaact

SEQ ID NO: 153043 - DNA, 15 bp, Homo sapiens
atgtgggaggaactc

SEQ ID NO: 153044 - DNA, 15 bp, Homo sapiens
tgtgggaggaactca

SEQ ID NO: 153045 - DNA, 15 bp, Homo sapiens
gtgggaggaactcag

SEQ ID NO: 153046 - DNA, 15 bp, Homo sapiens
tgggaggaactcagc

SEQ ID NO: 153047 - DNA, 15 bp, Homo sapiens
gggaggaactcagcc

SEQ ID NO: 153048 - DNA, 15 bp, Homo sapiens
ggaggaactcagccc

SEQ ID NO: 153049 - DNA, 15 bp, Homo sapiens
gaggaactcagcccc

SEQ ID NO: 153050 - DNA, 15 bp, Homo sapiens
aggaactcagcccca

SEQ ID NO: 153051 - DNA, 15 bp, Homo sapiens
ggaactcagccccaa

SEQ ID NO: 153052 - DNA, 15 bp, Homo sapiens
gaactcagccccaag

SEQ ID NO: 153053 - DNA, 15 bp, Homo sapiens
aactcagccccaaga

SEQ ID NO: 153054 - DNA, 15 bp, Homo sapiens
actcagccccaagat

SEQ ID NO: 153055 - DNA, 15 bp, Homo sapiens
ctcagccccaagatc

SEQ ID NO: 153056 - DNA, 15 bp, Homo sapiens
tcagccccaagatct

SEQ ID NO: 153057 - DNA, 15 bp, Homo sapiens
cagccccaagatctg

SEQ ID NO: 153058 - DNA, 15 bp, Homo sapiens
agccccaagatctgg

SEQ ID NO: 153059 - DNA, 15 bp, Homo sapiens
gccccaagatctgga

SEQ ID NO: 153060 - DNA, 15 bp, Homo sapiens
ccccaagatctggac

SEQ ID NO: 153061 - DNA, 15 bp, Homo sapiens
cccaagatctggacc

SEQ ID NO: 153062 - DNA, 15 bp, Homo sapiens
ccaagatctggacct

SEQ ID NO: 153063 - DNA, 15 bp, Homo sapiens
caagatctggacctt

SEQ ID NO: 153064 - DNA, 15 bp, Homo sapiens
aagatctggaccttc

SEQ ID NO: 153065 - DNA, 15 bp, Homo sapiens
agatctggaccttca

SEQ ID NO: 153066 - DNA, 15 bp, Homo sapiens
gatctggaccttcat

SEQ ID NO: 153067 - DNA, 15 bp, Homo sapiens
atctggaccttcatg

SEQ ID NO: 153068 - DNA, 15 bp, Homo sapiens
tctggaccttcatgg

SEQ ID NO: 153069 - DNA, 15 bp, Homo sapiens
ctggaccttcatgga

SEQ ID NO: 153070 - DNA, 15 bp, Homo sapiens
tggaccttcatggag

SEQ ID NO: 153071 - DNA, 15 bp, Homo sapiens
ggaccttcatggaga

SEQ ID NO: 153072 - DNA, 15 bp, Homo sapiens
gaccttcatggagaa

SEQ ID NO: 153073 - DNA, 15 bp, Homo sapiens
accttcatggagaac

SEQ ID NO: 153074 - DNA, 15 bp, Homo sapiens
ccttcatggagaaca

SEQ ID NO: 153075 - DNA, 15 bp, Homo sapiens
cttcatggagaacag

SEQ ID NO: 153076 - DNA, 15 bp, Homo sapiens
ttcatggagaacagc

SEQ ID NO: 153077 - DNA, 15 bp, Homo sapiens
tcatggagaacagcc

SEQ ID NO: 153078 - DNA, 15 bp, Homo sapiens
catggagaacagcca

SEQ ID NO: 153079 - DNA, 15 bp, Homo sapiens
atggagaacagccaa

SEQ ID NO: 153080 - DNA, 15 bp, Homo sapiens
tggagaacagccaag

SEQ ID NO: 153081 - DNA, 15 bp, Homo sapiens
ggagaacagccaaga

SEQ ID NO: 153082 - DNA, 15 bp, Homo sapiens
gagaacagccaagaa

SEQ ID NO: 153083 - DNA, 15 bp, Homo sapiens
agaacagccaagaaa

SEQ ID NO: 153084 - DNA, 15 bp, Homo sapiens
gaacagccaagaaat

SEQ ID NO: 153085 - DNA, 15 bp, Homo sapiens
aacagccaagaaatg

SEQ ID NO: 153086 - DNA, 15 bp, Homo sapiens
acagccaagaaatgg

SEQ ID NO: 153087 - DNA, 15 bp, Homo sapiens
cagccaagaaatgga

SEQ ID NO: 153088 - DNA, 15 bp, Homo sapiens
agccaagaaatggac

SEQ ID NO: 153089 - DNA, 15 bp, Homo sapiens
gccaagaaatggacc

SEQ ID NO: 153090 - DNA, 15 bp, Homo sapiens
ccaagaaatggacct

SEQ ID NO: 153091 - DNA, 15 bp, Homo sapiens
caagaaatggacctt

SEQ ID NO: 153092 - DNA, 15 bp, Homo sapiens
aagaaatggaccttg

SEQ ID NO: 153093 - DNA, 15 bp, Homo sapiens
agaaatggaccttgt

SEQ ID NO: 153094 - DNA, 15 bp, Homo sapiens
gaaatggaccttgtc

SEQ ID NO: 153095 - DNA, 15 bp, Homo sapiens
aaatggaccttgtcc

SEQ ID NO: 153096 - DNA, 15 bp, Homo sapiens
aatggaccttgtccg

SEQ ID NO: 153097 - DNA, 15 bp, Homo sapiens
atggaccttgtccgg

SEQ ID NO: 153098 - DNA, 15 bp, Homo sapiens
tggaccttgtccggg

SEQ ID NO: 153099 - DNA, 15 bp, Homo sapiens
ggaccttgtccgggt

SEQ ID NO: 153100 - DNA, 15 bp, Homo sapiens
gaccttgtccgggtg

SEQ ID NO: 153101 - DNA, 15 bp, Homo sapiens
accttgtccgggtga

SEQ ID NO: 153102 - DNA, 15 bp, Homo sapiens
ccttgtccgggtgag

SEQ ID NO: 153103 - DNA, 15 bp, Homo sapiens
cttgtccgggtgagt

SEQ ID NO: 153104 - DNA, 15 bp, Homo sapiens
ttgtccgggtgagtg

SEQ ID NO: 153105 - DNA, 15 bp, Homo sapiens
tgtccgggtgagtgt

SEQ ID NO: 153106 - DNA, 15 bp, Homo sapiens
gtccgggtgagtgtc

SEQ ID NO: 153107 - DNA, 15 bp, Homo sapiens
tccgggtgagtgtcc

SEQ ID NO: 153108 - DNA, 15 bp, Homo sapiens
ccgggtgagtgtccc

SEQ ID NO: 153109 - DNA, 15 bp, Homo sapiens
cgggtgagtgtccct

SEQ ID NO: 153110 - DNA, 15 bp, Homo sapiens
gggtgagtgtccctc

SEQ ID NO: 153111 - DNA, 15 bp, Homo sapiens
ggtgagtgtccctcc

SEQ ID NO: 153112 - DNA, 15 bp, Homo sapiens
gtgagtgtccctccc

SEQ ID NO: 153113 - DNA, 15 bp, Homo sapiens
tgagtgtccctccca

SEQ ID NO: 153114 - DNA, 15 bp, Homo sapiens
gagtgtccctcccat

SEQ ID NO: 153115 - DNA, 15 bp, Homo sapiens
agtgtccctcccatt

SEQ ID NO: 153116 - DNA, 15 bp, Homo sapiens
gtgtccctcccatta

SEQ ID NO: 153117 - DNA, 15 bp, Homo sapiens
tgtccctcccattat

SEQ ID NO: 153118 - DNA, 15 bp, Homo sapiens
gtccctcccattatt

SEQ ID NO: 153119 - DNA, 15 bp, Homo sapiens
tccctcccattatta

SEQ ID NO: 153120 - DNA, 15 bp, Homo sapiens
ccctcccattattac

SEQ ID NO: 153121 - DNA, 15 bp, Homo sapiens
cctcccattattacc

SEQ ID NO: 153122 - DNA, 15 bp, Homo sapiens
ctcccattattacca

SEQ ID NO: 153123 - DNA, 15 bp, Homo sapiens
tcccattattaccat

SEQ ID NO: 153124 - DNA, 15 bp, Homo sapiens
cccattattaccatg

SEQ ID NO: 153125 - DNA, 15 bp, Homo sapiens
ccattattaccatgt

SEQ ID NO: 153126 - DNA, 15 bp, Homo sapiens
cattattaccatgtg

SEQ ID NO: 153127 - DNA, 15 bp, Homo sapiens
attattaccatgtgc

SEQ ID NO: 153128 - DNA, 15 bp, Homo sapiens
ttattaccatgtgcc

SEQ ID NO: 153129 - DNA, 15 bp, Homo sapiens
tattaccatgtgcct

SEQ ID NO: 153130 - DNA, 15 bp, Homo sapiens
attaccatgtgcctg

SEQ ID NO: 153131 - DNA, 15 bp, Homo sapiens
ttaccatgtgcctgc

SEQ ID NO: 153132 - DNA, 15 bp, Homo sapiens
taccatgtgcctgct

SEQ ID NO: 153133 - DNA, 15 bp, Homo sapiens
accatgtgcctgctt

SEQ ID NO: 153134 - DNA, 15 bp, Homo sapiens
ccatgtgcctgcttg

SEQ ID NO: 153135 - DNA, 15 bp, Homo sapiens
catgtgcctgcttga

SEQ ID NO: 153136 - DNA, 15 bp, Homo sapiens
atgtgcctgcttgat

SEQ ID NO: 153137 - DNA, 15 bp, Homo sapiens
tgtgcctgcttgata

SEQ ID NO: 153138 - DNA, 15 bp, Homo sapiens
gtgcctgcttgatac

SEQ ID NO: 153139 - DNA, 15 bp, Homo sapiens
tgcctgcttgatact

SEQ ID NO: 153140 - DNA, 15 bp, Homo sapiens
gcctgcttgatactg

SEQ ID NO: 153141 - DNA, 15 bp, Homo sapiens
cctgcttgatactgg

SEQ ID NO: 153142 - DNA, 15 bp, Homo sapiens
ctgcttgatactgga

SEQ ID NO: 153143 - DNA, 15 bp, Homo sapiens
tgcttgatactggag

SEQ ID NO: 153144 - DNA, 15 bp, Homo sapiens
gcttgatactggaga

SEQ ID NO: 153145 - DNA, 15 bp, Homo sapiens
cttgatactggagag

SEQ ID NO: 153146 - DNA, 15 bp, Homo sapiens
ttgatactggagagg

SEQ ID NO: 153147 - DNA, 15 bp, Homo sapiens
tgatactggagaggt

SEQ ID NO: 153148 - DNA, 15 bp, Homo sapiens
gatactggagaggtg

SEQ ID NO: 153149 - DNA, 15 bp, Homo sapiens
atactggagaggtga

SEQ ID NO: 153150 - DNA, 15 bp, Homo sapiens
tactggagaggtgag

SEQ ID NO: 153151 - DNA, 15 bp, Homo sapiens
actggagaggtgagt

SEQ ID NO: 153152 - DNA, 15 bp, Homo sapiens
ctggagaggtgagtt

SEQ ID NO: 153153 - DNA, 15 bp, Homo sapiens
tggagaggtgagttt

SEQ ID NO: 153154 - DNA, 15 bp, Homo sapiens
ggagaggtgagtttc

SEQ ID NO: 153155 - DNA, 15 bp, Homo sapiens
gagaggtgagtttct

SEQ ID NO: 153156 - DNA, 15 bp, Homo sapiens
agaggtgagtttctg

SEQ ID NO: 153157 - DNA, 15 bp, Homo sapiens
gaggtgagtttctgg

SEQ ID NO: 153158 - DNA, 15 bp, Homo sapiens
aggtgagtttctggt

SEQ ID NO: 153159 - DNA, 15 bp, Homo sapiens
ggtgagtttctggtc

SEQ ID NO: 153160 - DNA, 15 bp, Homo sapiens
gtgagtttctggtca

SEQ ID NO: 153161 - DNA, 15 bp, Homo sapiens
tgagtttctggtcac

SEQ ID NO: 153162 - DNA, 15 bp, Homo sapiens
gagtttctggtcact

SEQ ID NO: 153163 - DNA, 15 bp, Homo sapiens
agtttctggtcactt

SEQ ID NO: 153164 - DNA, 15 bp, Homo sapiens
gtttctggtcacttt

SEQ ID NO: 153165 - DNA, 15 bp, Homo sapiens
tttctggtcactttc

SEQ ID NO: 153166 - DNA, 15 bp, Homo sapiens
ttctggtcactttcc

SEQ ID NO: 153167 - DNA, 15 bp, Homo sapiens
tctggtcactttccc

SEQ ID NO: 153168 - DNA, 15 bp, Homo sapiens
ctggtcactttccca

SEQ ID NO: 153169 - DNA, 15 bp, Homo sapiens
tggtcactttcccag

SEQ ID NO: 153170 - DNA, 15 bp, Homo sapiens
ggtcactttcccagg

SEQ ID NO: 153171 - DNA, 15 bp, Homo sapiens
gtcactttcccaggt

SEQ ID NO: 153172 - DNA, 15 bp, Homo sapiens
tcactttcccaggtg

SEQ ID NO: 153173 - DNA, 15 bp, Homo sapiens
cactttcccaggtgt

SEQ ID NO: 153174 - DNA, 15 bp, Homo sapiens
actttcccaggtgtg

SEQ ID NO: 153175 - DNA, 15 bp, Homo sapiens
ctttcccaggtgtga

SEQ ID NO: 153176 - DNA, 15 bp, Homo sapiens
tttcccaggtgtgag

SEQ ID NO: 153177 - DNA, 15 bp, Homo sapiens
ttcccaggtgtgagt

SEQ ID NO: 153178 - DNA, 15 bp, Homo sapiens
tcccaggtgtgagtg

SEQ ID NO: 153179 - DNA, 15 bp, Homo sapiens
cccaggtgtgagtga

SEQ ID NO: 153180 - DNA, 15 bp, Homo sapiens
ccaggtgtgagtgag

SEQ ID NO: 153181 - DNA, 15 bp, Homo sapiens
caggtgtgagtgagg

SEQ ID NO: 153182 - DNA, 15 bp, Homo sapiens
aggtgtgagtgaggt

SEQ ID NO: 153183 - DNA, 15 bp, Homo sapiens
ggtgtgagtgaggtg

SEQ ID NO: 153184 - DNA, 15 bp, Homo sapiens
gtgtgagtgaggtga

SEQ ID NO: 153185 - DNA, 15 bp, Homo sapiens
tgtgagtgaggtgag

SEQ ID NO: 153186 - DNA, 15 bp, Homo sapiens
gtgagtgaggtgaga

SEQ ID NO: 153187 - DNA, 15 bp, Homo sapiens
tgagtgaggtgagaa

SEQ ID NO: 153188 - DNA, 15 bp, Homo sapiens
gagtgaggtgagaat

SEQ ID NO: 153189 - DNA, 15 bp, Homo sapiens
agtgaggtgagaatt

SEQ ID NO: 153190 - DNA, 15 bp, Homo sapiens
gtgaggtgagaattc

SEQ ID NO: 153191 - DNA, 15 bp, Homo sapiens
tgaggtgagaattct

SEQ ID NO: 153192 - DNA, 15 bp, Homo sapiens
gaggtgagaattctt

SEQ ID NO: 153193 - DNA, 15 bp, Homo sapiens
aggtgagaattcttt

SEQ ID NO: 153194 - DNA, 15 bp, Homo sapiens
ggtgagaattctttc

SEQ ID NO: 153195 - DNA, 15 bp, Homo sapiens
gtgagaattctttca

SEQ ID NO: 153196 - DNA, 15 bp, Homo sapiens
tgagaattctttcag

SEQ ID NO: 153197 - DNA, 15 bp, Homo sapiens
gagaattctttcagt

SEQ ID NO: 153198 - DNA, 15 bp, Homo sapiens
agaattctttcagtt

SEQ ID NO: 153199 - DNA, 15 bp, Homo sapiens
gaattctttcagttt

SEQ ID NO: 153200 - DNA, 15 bp, Homo sapiens
aattctttcagttta

SEQ ID NO: 153201 - DNA, 15 bp, Homo sapiens
attctttcagtttat

SEQ ID NO: 153202 - DNA, 15 bp, Homo sapiens
ttctttcagtttatc

SEQ ID NO: 153203 - DNA, 15 bp, Homo sapiens
tctttcagtttatct

SEQ ID NO: 153204 - DNA, 15 bp, Homo sapiens
ctttcagtttatcta

SEQ ID NO: 153205 - DNA, 15 bp, Homo sapiens
tttcagtttatctag

SEQ ID NO: 153206 - DNA, 15 bp, Homo sapiens
ttcagtttatctagc

SEQ ID NO: 153207 - DNA, 15 bp, Homo sapiens
tcagtttatctagct

SEQ ID NO: 153208 - DNA, 15 bp, Homo sapiens
cagtttatctagctg

SEQ ID NO: 153209 - DNA, 15 bp, Homo sapiens
agtttatctagctgg

SEQ ID NO: 153210 - DNA, 15 bp, Homo sapiens
gtttatctagctggg

SEQ ID NO: 153211 - DNA, 15 bp, Homo sapiens
tttatctagctgggg

SEQ ID NO: 153212 - DNA, 15 bp, Homo sapiens
ttatctagctggggg

SEQ ID NO: 153213 - DNA, 15 bp, Homo sapiens
tatctagctggggga

SEQ ID NO: 153214 - DNA, 15 bp, Homo sapiens
atctagctgggggaa

SEQ ID NO: 153215 - DNA, 15 bp, Homo sapiens
tctagctgggggaat

SEQ ID NO: 153216 - DNA, 15 bp, Homo sapiens
ctagctgggggaatg

SEQ ID NO: 153217 - DNA, 15 bp, Homo sapiens
tagctgggggaatgt

SEQ ID NO: 153218 - DNA, 15 bp, Homo sapiens
agctgggggaatgta

SEQ ID NO: 153219 - DNA, 15 bp, Homo sapiens
gctgggggaatgtag

SEQ ID NO: 153220 - DNA, 15 bp, Homo sapiens
ctgggggaatgtagt

SEQ ID NO: 153221 - DNA, 15 bp, Homo sapiens
tgggggaatgtagtg

SEQ ID NO: 153222 - DNA, 15 bp, Homo sapiens
gggggaatgtagtga

SEQ ID NO: 153223 - DNA, 15 bp, Homo sapiens
ggggaatgtagtgag

SEQ ID NO: 153224 - DNA, 15 bp, Homo sapiens
gggaatgtagtgagc

SEQ ID NO: 153225 - DNA, 15 bp, Homo sapiens
ggaatgtagtgagca

SEQ ID NO: 153226 - DNA, 15 bp, Homo sapiens
gaatgtagtgagcat

SEQ ID NO: 153227 - DNA, 15 bp, Homo sapiens
aatgtagtgagcata

SEQ ID NO: 153228 - DNA, 15 bp, Homo sapiens
atgtagtgagcatag

SEQ ID NO: 153229 - DNA, 15 bp, Homo sapiens
tgtagtgagcatagc

SEQ ID NO: 153230 - DNA, 15 bp, Homo sapiens
gtagtgagcatagct

SEQ ID NO: 153231 - DNA, 15 bp, Homo sapiens
tagtgagcatagcta

SEQ ID NO: 153232 - DNA, 15 bp, Homo sapiens
agtgagcatagctaa

SEQ ID NO: 153233 - DNA, 15 bp, Homo sapiens
gtgagcatagctaaa

SEQ ID NO: 153234 - DNA, 15 bp, Homo sapiens
tgagcatagctaaag

SEQ ID NO: 153235 - DNA, 15 bp, Homo sapiens
gagcatagctaaagt

SEQ ID NO: 153236 - DNA, 15 bp, Homo sapiens
agcatagctaaagtc

SEQ ID NO: 153237 - DNA, 15 bp, Homo sapiens
gcatagctaaagtca

SEQ ID NO: 153238 - DNA, 15 bp, Homo sapiens
catagctaaagtcac

SEQ ID NO: 153239 - DNA, 15 bp, Homo sapiens
atagctaaagtcaca

SEQ ID NO: 153240 - DNA, 15 bp, Homo sapiens
tagctaaagtcacag

SEQ ID NO: 153241 - DNA, 15 bp, Homo sapiens
agctaaagtcacagg

SEQ ID NO: 153242 - DNA, 15 bp, Homo sapiens
gctaaagtcacaggg

SEQ ID NO: 153243 - DNA, 15 bp, Homo sapiens
ctaaagtcacagggc

SEQ ID NO: 153244 - DNA, 15 bp, Homo sapiens
taaagtcacagggca

SEQ ID NO: 153245 - DNA, 15 bp, Homo sapiens
aaagtcacagggcac

SEQ ID NO: 153246 - DNA, 15 bp, Homo sapiens
aagtcacagggcacc

SEQ ID NO: 153247 - DNA, 15 bp, Homo sapiens
agtcacagggcacca

SEQ ID NO: 153248 - DNA, 15 bp, Homo sapiens
gtcacagggcaccac

SEQ ID NO: 153249 - DNA, 15 bp, Homo sapiens
tcacagggcaccacc

SEQ ID NO: 153250 - DNA, 15 bp, Homo sapiens
cacagggcaccacct

SEQ ID NO: 153251 - DNA, 15 bp, Homo sapiens
acagggcaccacctc

SEQ ID NO: 153252 - DNA, 15 bp, Homo sapiens
cagggcaccacctct

SEQ ID NO: 153253 - DNA, 15 bp, Homo sapiens
agggcaccacctctc

SEQ ID NO: 153254 - DNA, 15 bp, Homo sapiens
gggcaccacctctcc

SEQ ID NO: 153255 - DNA, 15 bp, Homo sapiens
ggcaccacctctcca

SEQ ID NO: 153256 - DNA, 15 bp, Homo sapiens
gcaccacctctccag

SEQ ID NO: 153257 - DNA, 15 bp, Homo sapiens
caccacctctccaga

SEQ ID NO: 153258 - DNA, 15 bp, Homo sapiens
accacctctccagaa

SEQ ID NO: 153259 - DNA, 15 bp, Homo sapiens
ccacctctccagaag

SEQ ID NO: 153260 - DNA, 15 bp, Homo sapiens
cacctctccagaagt

SEQ ID NO: 153261 - DNA, 15 bp, Homo sapiens
acctctccagaagta

SEQ ID NO: 153262 - DNA, 15 bp, Homo sapiens
cctctccagaagtac

SEQ ID NO: 153263 - DNA, 15 bp, Homo sapiens
ctctccagaagtaca

SEQ ID NO: 153264 - DNA, 15 bp, Homo sapiens
tctccagaagtacag

SEQ ID NO: 153265 - DNA, 15 bp, Homo sapiens
ctccagaagtacagg

SEQ ID NO: 153266 - DNA, 15 bp, Homo sapiens
tccagaagtacaggc

SEQ ID NO: 153267 - DNA, 15 bp, Homo sapiens
ccagaagtacaggcc

SEQ ID NO: 153268 - DNA, 15 bp, Homo sapiens
cagaagtacaggcca

SEQ ID NO: 153269 - DNA, 15 bp, Homo sapiens
agaagtacaggccat

SEQ ID NO: 153270 - DNA, 15 bp, Homo sapiens
gaagtacaggccatg

SEQ ID NO: 153271 - DNA, 15 bp, Homo sapiens
aagtacaggccatgg

SEQ ID NO: 153272 - DNA, 15 bp, Homo sapiens
agtacaggccatggt

SEQ ID NO: 153273 - DNA, 15 bp, Homo sapiens
gtacaggccatggtg

SEQ ID NO: 153274 - DNA, 15 bp, Homo sapiens
tacaggccatggtgc

SEQ ID NO: 153275 - DNA, 15 bp, Homo sapiens
acaggccatggtgca

SEQ ID NO: 153276 - DNA, 15 bp, Homo sapiens
caggccatggtgcag

SEQ ID NO: 153277 - DNA, 15 bp, Homo sapiens
aggccatggtgcaga

SEQ ID NO: 153278 - DNA, 15 bp, Homo sapiens
ggccatggtgcagag

SEQ ID NO: 153279 - DNA, 15 bp, Homo sapiens
gccatggtgcagaga

SEQ ID NO: 153280 - DNA, 15 bp, Homo sapiens
ccatggtgcagagat

SEQ ID NO: 153281 - DNA, 15 bp, Homo sapiens
catggtgcagagata

SEQ ID NO: 153282 - DNA, 15 bp, Homo sapiens
atggtgcagagataa

SEQ ID NO: 153283 - DNA, 15 bp, Homo sapiens
tggtgcagagataac

SEQ ID NO: 153284 - DNA, 15 bp, Homo sapiens
ggtgcagagataacg

SEQ ID NO: 153285 - DNA, 15 bp, Homo sapiens
gtgcagagataacgc

SEQ ID NO: 153286 - DNA, 15 bp, Homo sapiens
tgcagagataacgct

SEQ ID NO: 153287 - DNA, 15 bp, Homo sapiens
gcagagataacgctg

SEQ ID NO: 153288 - DNA, 15 bp, Homo sapiens
cagagataacgctgt

SEQ ID NO: 153289 - DNA, 15 bp, Homo sapiens
agagataacgctgtg

SEQ ID NO: 153290 - DNA, 15 bp, Homo sapiens
gagataacgctgtgc

SEQ ID NO: 153291 - DNA, 15 bp, Homo sapiens
agataacgctgtgca

SEQ ID NO: 153292 - DNA, 15 bp, Homo sapiens
gataacgctgtgcat

SEQ ID NO: 153293 - DNA, 15 bp, Homo sapiens
ataacgctgtgcata

SEQ ID NO: 153294 - DNA, 15 bp, Homo sapiens
taacgctgtgcatat

SEQ ID NO: 153295 - DNA, 15 bp, Homo sapiens
aacgctgtgcatatc

SEQ ID NO: 153296 - DNA, 15 bp, Homo sapiens
acgctgtgcatatca

SEQ ID NO: 153297 - DNA, 15 bp, Homo sapiens
cgctgtgcatatcag

SEQ ID NO: 153298 - DNA, 15 bp, Homo sapiens
gctgtgcatatcagc

SEQ ID NO: 153299 - DNA, 15 bp, Homo sapiens
ctgtgcatatcagca

SEQ ID NO: 153300 - DNA, 15 bp, Homo sapiens
tgtgcatatcagcat

SEQ ID NO: 153301 - DNA, 15 bp, Homo sapiens
gtgcatatcagcatc

SEQ ID NO: 153302 - DNA, 15 bp, Homo sapiens
tgcatatcagcatcc

SEQ ID NO: 153303 - DNA, 15 bp, Homo sapiens
gcatatcagcatcca

SEQ ID NO: 153304 - DNA, 15 bp, Homo sapiens
catatcagcatccat

SEQ ID NO: 153305 - DNA, 15 bp, Homo sapiens
atatcagcatccatg

SEQ ID NO: 153306 - DNA, 15 bp, Homo sapiens
tatcagcatccatgc

SEQ ID NO: 153307 - DNA, 15 bp, Homo sapiens
atcagcatccatgcc

SEQ ID NO: 153308 - DNA, 15 bp, Homo sapiens
tcagcatccatgcca

SEQ ID NO: 153309 - DNA, 15 bp, Homo sapiens
cagcatccatgccac

SEQ ID NO: 153310 - DNA, 15 bp, Homo sapiens
agcatccatgccact

SEQ ID NO: 153311 - DNA, 15 bp, Homo sapiens
gcatccatgccactc

SEQ ID NO: 153312 - DNA, 15 bp, Homo sapiens
catccatgccactca

SEQ ID NO: 153313 - DNA, 15 bp, Homo sapiens
atccatgccactcac

SEQ ID NO: 153314 - DNA, 15 bp, Homo sapiens
tccatgccactcacg

SEQ ID NO: 153315 - DNA, 15 bp, Homo sapiens
ccatgccactcacgg

SEQ ID NO: 153316 - DNA, 15 bp, Homo sapiens
catgccactcacggt

SEQ ID NO: 153317 - DNA, 15 bp, Homo sapiens
atgccactcacggtc

SEQ ID NO: 153318 - DNA, 15 bp, Homo sapiens
tgccactcacggtca

SEQ ID NO: 153319 - DNA, 15 bp, Homo sapiens
gccactcacggtcaa

SEQ ID NO: 153320 - DNA, 15 bp, Homo sapiens
ccactcacggtcaaa

SEQ ID NO: 153321 - DNA, 15 bp, Homo sapiens
cactcacggtcaaat

SEQ ID NO: 153322 - DNA, 15 bp, Homo sapiens
actcacggtcaaata

SEQ ID NO: 153323 - DNA, 15 bp, Homo sapiens
ctcacggtcaaatag

SEQ ID NO: 153324 - DNA, 15 bp, Homo sapiens
tcacggtcaaatagc

SEQ ID NO: 153325 - DNA, 15 bp, Homo sapiens
cacggtcaaatagca

SEQ ID NO: 153326 - DNA, 15 bp, Homo sapiens
acggtcaaatagcag

SEQ ID NO: 153327 - DNA, 15 bp, Homo sapiens
cggtcaaatagcagt

SEQ ID NO: 153328 - DNA, 15 bp, Homo sapiens
ggtcaaatagcagtt

SEQ ID NO: 153329 - DNA, 15 bp, Homo sapiens
gtcaaatagcagttt

SEQ ID NO: 153330 - DNA, 15 bp, Homo sapiens
tcaaatagcagtttt

SEQ ID NO: 153331 - DNA, 15 bp, Homo sapiens
caaatagcagttttc

SEQ ID NO: 153332 - DNA, 15 bp, Homo sapiens
aaatagcagttttct

SEQ ID NO: 153333 - DNA, 15 bp, Homo sapiens
aatagcagttttctg

SEQ ID NO: 153334 - DNA, 15 bp, Homo sapiens
atagcagttttctgc

SEQ ID NO: 153335 - DNA, 15 bp, Homo sapiens
tagcagttttctgca

SEQ ID NO: 153336 - DNA, 15 bp, Homo sapiens
agcagttttctgcaa

SEQ ID NO: 153337 - DNA, 15 bp, Homo sapiens
gcagttttctgcaaa

SEQ ID NO: 153338 - DNA, 15 bp, Homo sapiens
cagttttctgcaaaa

SEQ ID NO: 153339 - DNA, 15 bp, Homo sapiens
agttttctgcaaaac

SEQ ID NO: 153340 - DNA, 15 bp, Homo sapiens
gttttctgcaaaact

SEQ ID NO: 153341 - DNA, 15 bp, Homo sapiens
ttttctgcaaaactt

SEQ ID NO: 153342 - DNA, 15 bp, Homo sapiens
tttctgcaaaactta

SEQ ID NO: 153343 - DNA, 15 bp, Homo sapiens
ttctgcaaaacttag

SEQ ID NO: 153344 - DNA, 15 bp, Homo sapiens
tctgcaaaacttagt

SEQ ID NO: 153345 - DNA, 15 bp, Homo sapiens
ctgcaaaacttagtg

SEQ ID NO: 153346 - DNA, 15 bp, Homo sapiens
tgcaaaacttagtga

SEQ ID NO: 153347 - DNA, 15 bp, Homo sapiens
gcaaaacttagtgag

SEQ ID NO: 153348 - DNA, 15 bp, Homo sapiens
caaaacttagtgagg

SEQ ID NO: 153349 - DNA, 15 bp, Homo sapiens
aaaacttagtgaggg

SEQ ID NO: 153350 - DNA, 15 bp, Homo sapiens
aaacttagtgagggc

SEQ ID NO: 153351 - DNA, 15 bp, Homo sapiens
aacttagtgagggct

SEQ ID NO: 153352 - DNA, 15 bp, Homo sapiens
acttagtgagggctg

SEQ ID NO: 153353 - DNA, 15 bp, Homo sapiens
cttagtgagggctgg

SEQ ID NO: 153354 - DNA, 15 bp, Homo sapiens
ttagtgagggctggt

SEQ ID NO: 153355 - DNA, 15 bp, Homo sapiens
tagtgagggctggtg

SEQ ID NO: 153356 - DNA, 15 bp, Homo sapiens
agtgagggctggtgt

SEQ ID NO: 153357 - DNA, 15 bp, Homo sapiens
gtgagggctggtgtt

SEQ ID NO: 153358 - DNA, 15 bp, Homo sapiens
tgagggctggtgttt

SEQ ID NO: 153359 - DNA, 15 bp, Homo sapiens
gagggctggtgtttg

SEQ ID NO: 153360 - DNA, 15 bp, Homo sapiens
agggctggtgtttgg

SEQ ID NO: 153361 - DNA, 15 bp, Homo sapiens
gggctggtgtttgga

SEQ ID NO: 153362 - DNA, 15 bp, Homo sapiens
ggctggtgtttggaa

SEQ ID NO: 153363 - DNA, 15 bp, Homo sapiens
gctggtgtttggaag

SEQ ID NO: 153364 - DNA, 15 bp, Homo sapiens
ctggtgtttggaagt

SEQ ID NO: 153365 - DNA, 15 bp, Homo sapiens
tggtgtttggaagtg

SEQ ID NO: 153366 - DNA, 15 bp, Homo sapiens
ggtgtttggaagtgg

SEQ ID NO: 153367 - DNA, 15 bp, Homo sapiens
gtgtttggaagtgga

SEQ ID NO: 153368 - DNA, 15 bp, Homo sapiens
tgtttggaagtggag

SEQ ID NO: 153369 - DNA, 15 bp, Homo sapiens
gtttggaagtggagt

SEQ ID NO: 153370 - DNA, 15 bp, Homo sapiens
tttggaagtggagtt

SEQ ID NO: 153371 - DNA, 15 bp, Homo sapiens
ttggaagtggagttg

SEQ ID NO: 153372 - DNA, 15 bp, Homo sapiens
tggaagtggagttga

SEQ ID NO: 153373 - DNA, 15 bp, Homo sapiens
ggaagtggagttgag

SEQ ID NO: 153374 - DNA, 15 bp, Homo sapiens
gaagtggagttgagt

SEQ ID NO: 153375 - DNA, 15 bp, Homo sapiens
aagtggagttgagta

SEQ ID NO: 153376 - DNA, 15 bp, Homo sapiens
agtggagttgagtaa

SEQ ID NO: 153377 - DNA, 15 bp, Homo sapiens
gtggagttgagtaat

SEQ ID NO: 153378 - DNA, 15 bp, Homo sapiens
tggagttgagtaatt

SEQ ID NO: 153379 - DNA, 15 bp, Homo sapiens
ggagttgagtaattg

SEQ ID NO: 153380 - DNA, 15 bp, Homo sapiens
gagttgagtaattgc

SEQ ID NO: 153381 - DNA, 15 bp, Homo sapiens
agttgagtaattgca

SEQ ID NO: 153382 - DNA, 15 bp, Homo sapiens
gttgagtaattgcag

SEQ ID NO: 153383 - DNA, 15 bp, Homo sapiens
ttgagtaattgcagt

SEQ ID NO: 153384 - DNA, 15 bp, Homo sapiens
tgagtaattgcagta

SEQ ID NO: 153385 - DNA, 15 bp, Homo sapiens
gagtaattgcagtac

SEQ ID NO: 153386 - DNA, 15 bp, Homo sapiens
agtaattgcagtacc

SEQ ID NO: 153387 - DNA, 15 bp, Homo sapiens
gtaattgcagtaccc

SEQ ID NO: 153388 - DNA, 15 bp, Homo sapiens
taattgcagtaccct

SEQ ID NO: 153389 - DNA, 15 bp, Homo sapiens
aattgcagtacccta

SEQ ID NO: 153390 - DNA, 15 bp, Homo sapiens
attgcagtaccctat

SEQ ID NO: 153391 - DNA, 15 bp, Homo sapiens
ttgcagtaccctatt

SEQ ID NO: 153392 - DNA, 15 bp, Homo sapiens
tgcagtaccctattt

SEQ ID NO: 153393 - DNA, 15 bp, Homo sapiens
gcagtaccctatttt

SEQ ID NO: 153394 - DNA, 15 bp, Homo sapiens
cagtaccctattttc

SEQ ID NO: 153395 - DNA, 15 bp, Homo sapiens
agtaccctattttcc

SEQ ID NO: 153396 - DNA, 15 bp, Homo sapiens
gtaccctattttcct

SEQ ID NO: 153397 - DNA, 15 bp, Homo sapiens
taccctattttcctt

SEQ ID NO: 153398 - DNA, 15 bp, Homo sapiens
accctattttccttt

SEQ ID NO: 153399 - DNA, 15 bp, Homo sapiens
ccctattttcctttt

SEQ ID NO: 153400 - DNA, 15 bp, Homo sapiens
cctattttccttttt

SEQ ID NO: 153401 - DNA, 15 bp, Homo sapiens
ctattttcctttttg

SEQ ID NO: 153402 - DNA, 15 bp, Homo sapiens
tattttcctttttgg

SEQ ID NO: 153403 - DNA, 15 bp, Homo sapiens
attttcctttttggc

SEQ ID NO: 153404 - DNA, 15 bp, Homo sapiens
ttttcctttttggct

SEQ ID NO: 153405 - DNA, 15 bp, Homo sapiens
tttcctttttggctg

SEQ ID NO: 153406 - DNA, 15 bp, Homo sapiens
ttcctttttggctgc

SEQ ID NO: 153407 - DNA, 15 bp, Homo sapiens
tcctttttggctgca

SEQ ID NO: 153408 - DNA, 15 bp, Homo sapiens
cctttttggctgcag

SEQ ID NO: 153409 - DNA, 15 bp, Homo sapiens
ctttttggctgcagc

SEQ ID NO: 153410 - DNA, 15 bp, Homo sapiens
tttttggctgcagcc

SEQ ID NO: 153411 - DNA, 15 bp, Homo sapiens
ttttggctgcagcct

SEQ ID NO: 153412 - DNA, 15 bp, Homo sapiens
tttggctgcagcctc

SEQ ID NO: 153413 - DNA, 15 bp, Homo sapiens
ttggctgcagcctct

SEQ ID NO: 153414 - DNA, 15 bp, Homo sapiens
tggctgcagcctctc

SEQ ID NO: 153415 - DNA, 15 bp, Homo sapiens
ggctgcagcctctca

SEQ ID NO: 153416 - DNA, 15 bp, Homo sapiens
gctgcagcctctcag

SEQ ID NO: 153417 - DNA, 15 bp, Homo sapiens
ctgcagcctctcagc

SEQ ID NO: 153418 - DNA, 15 bp, Homo sapiens
tgcagcctctcagcc

SEQ ID NO: 153419 - DNA, 15 bp, Homo sapiens
gcagcctctcagcca

SEQ ID NO: 153420 - DNA, 15 bp, Homo sapiens
cagcctctcagccag

SEQ ID NO: 153421 - DNA, 15 bp, Homo sapiens
agcctctcagccagc

SEQ ID NO: 153422 - DNA, 15 bp, Homo sapiens
gcctctcagccagcc

SEQ ID NO: 153423 - DNA, 15 bp, Homo sapiens
cctctcagccagcca

SEQ ID NO: 153424 - DNA, 15 bp, Homo sapiens
ctctcagccagccac

SEQ ID NO: 153425 - DNA, 15 bp, Homo sapiens
tctcagccagccaca

SEQ ID NO: 153426 - DNA, 15 bp, Homo sapiens
ctcagccagccacag

SEQ ID NO: 153427 - DNA, 15 bp, Homo sapiens
tcagccagccacagc

SEQ ID NO: 153428 - DNA, 15 bp, Homo sapiens
cagccagccacagca

SEQ ID NO: 153429 - DNA, 15 bp, Homo sapiens
agccagccacagcat

SEQ ID NO: 153430 - DNA, 15 bp, Homo sapiens
gccagccacagcatc

SEQ ID NO: 153431 - DNA, 15 bp, Homo sapiens
ccagccacagcatct

SEQ ID NO: 153432 - DNA, 15 bp, Homo sapiens
cagccacagcatctc

SEQ ID NO: 153433 - DNA, 15 bp, Homo sapiens
agccacagcatctcc

SEQ ID NO: 153434 - DNA, 15 bp, Homo sapiens
gccacagcatctccc

SEQ ID NO: 153435 - DNA, 15 bp, Homo sapiens
ccacagcatctccct

SEQ ID NO: 153436 - DNA, 15 bp, Homo sapiens
cacagcatctccctg

SEQ ID NO: 153437 - DNA, 15 bp, Homo sapiens
acagcatctccctgt

SEQ ID NO: 153438 - DNA, 15 bp, Homo sapiens
cagcatctccctgtg

SEQ ID NO: 153439 - DNA, 15 bp, Homo sapiens
agcatctccctgtgt

SEQ ID NO: 153440 - DNA, 15 bp, Homo sapiens
gcatctccctgtgtc

SEQ ID NO: 153441 - DNA, 15 bp, Homo sapiens
catctccctgtgtct

SEQ ID NO: 153442 - DNA, 15 bp, Homo sapiens
atctccctgtgtctt

SEQ ID NO: 153443 - DNA, 15 bp, Homo sapiens
tctccctgtgtcttg

SEQ ID NO: 153444 - DNA, 15 bp, Homo sapiens
ctccctgtgtcttgg

SEQ ID NO: 153445 - DNA, 15 bp, Homo sapiens
tccctgtgtcttggt

SEQ ID NO: 153446 - DNA, 15 bp, Homo sapiens
ccctgtgtcttggta

SEQ ID NO: 153447 - DNA, 15 bp, Homo sapiens
cctgtgtcttggtag

SEQ ID NO: 153448 - DNA, 15 bp, Homo sapiens
ctgtgtcttggtagg

SEQ ID NO: 153449 - DNA, 15 bp, Homo sapiens
tgtgtcttggtaggt

SEQ ID NO: 153450 - DNA, 15 bp, Homo sapiens
gtgtcttggtaggtt

SEQ ID NO: 153451 - DNA, 15 bp, Homo sapiens
tgtcttggtaggttt

SEQ ID NO: 153452 - DNA, 15 bp, Homo sapiens
gtcttggtaggtttt

SEQ ID NO: 153453 - DNA, 15 bp, Homo sapiens
tcttggtaggttttg

SEQ ID NO: 153454 - DNA, 15 bp, Homo sapiens
cttggtaggttttgg

SEQ ID NO: 153455 - DNA, 15 bp, Homo sapiens
ttggtaggttttgga

SEQ ID NO: 153456 - DNA, 15 bp, Homo sapiens
tggtaggttttggaa

SEQ ID NO: 153457 - DNA, 15 bp, Homo sapiens
ggtaggttttggaaa

SEQ ID NO: 153458 - DNA, 15 bp, Homo sapiens
gtaggttttggaaag

SEQ ID NO: 153459 - DNA, 15 bp, Homo sapiens
taggttttggaaaga

SEQ ID NO: 153460 - DNA, 15 bp, Homo sapiens
aggttttggaaagaa

SEQ ID NO: 153461 - DNA, 15 bp, Homo sapiens
ggttttggaaagaag

SEQ ID NO: 153462 - DNA, 15 bp, Homo sapiens
gttttggaaagaagt

SEQ ID NO: 153463 - DNA, 15 bp, Homo sapiens
ttttggaaagaagtg

SEQ ID NO: 153464 - DNA, 15 bp, Homo sapiens
tttggaaagaagtgt

SEQ ID NO: 153465 - DNA, 15 bp, Homo sapiens
ttggaaagaagtgtg

SEQ ID NO: 153466 - DNA, 15 bp, Homo sapiens
tggaaagaagtgtgg

SEQ ID NO: 153467 - DNA, 15 bp, Homo sapiens
ggaaagaagtgtggg

SEQ ID NO: 153468 - DNA, 15 bp, Homo sapiens
gaaagaagtgtggga

SEQ ID NO: 153469 - DNA, 15 bp, Homo sapiens
aaagaagtgtgggag

SEQ ID NO: 153470 - DNA, 15 bp, Homo sapiens
aagaagtgtgggagc

SEQ ID NO: 153471 - DNA, 15 bp, Homo sapiens
agaagtgtgggagca

SEQ ID NO: 153472 - DNA, 15 bp, Homo sapiens
gaagtgtgggagcaa

SEQ ID NO: 153473 - DNA, 15 bp, Homo sapiens
aagtgtgggagcaaa

SEQ ID NO: 153474 - DNA, 15 bp, Homo sapiens
agtgtgggagcaaaa

SEQ ID NO: 153475 - DNA, 15 bp, Homo sapiens
gtgtgggagcaaaag

SEQ ID NO: 153476 - DNA, 15 bp, Homo sapiens
tgtgggagcaaaagc

SEQ ID NO: 153477 - DNA, 15 bp, Homo sapiens
gtgggagcaaaagca

SEQ ID NO: 153478 - DNA, 15 bp, Homo sapiens
tgggagcaaaagcat

SEQ ID NO: 153479 - DNA, 15 bp, Homo sapiens
gggagcaaaagcatg

SEQ ID NO: 153480 - DNA, 15 bp, Homo sapiens
ggagcaaaagcatga

SEQ ID NO: 153481 - DNA, 15 bp, Homo sapiens
gagcaaaagcatgat

SEQ ID NO: 153482 - DNA, 15 bp, Homo sapiens
agcaaaagcatgatg

SEQ ID NO: 153483 - DNA, 15 bp, Homo sapiens
gcaaaagcatgatgt

SEQ ID NO: 153484 - DNA, 15 bp, Homo sapiens
caaaagcatgatgtt

SEQ ID NO: 153485 - DNA, 15 bp, Homo sapiens
aaaagcatgatgtta

SEQ ID NO: 153486 - DNA, 15 bp, Homo sapiens
aaagcatgatgttac

SEQ ID NO: 153487 - DNA, 15 bp, Homo sapiens
aagcatgatgttaca

SEQ ID NO: 153488 - DNA, 15 bp, Homo sapiens
agcatgatgttacat

SEQ ID NO: 153489 - DNA, 15 bp, Homo sapiens
gcatgatgttacatg

SEQ ID NO: 153490 - DNA, 15 bp, Homo sapiens
catgatgttacatgt

SEQ ID NO: 153491 - DNA, 15 bp, Homo sapiens
atgatgttacatgta

SEQ ID NO: 153492 - DNA, 15 bp, Homo sapiens
tgatgttacatgtag

SEQ ID NO: 153493 - DNA, 15 bp, Homo sapiens
gatgttacatgtaga

SEQ ID NO: 153494 - DNA, 15 bp, Homo sapiens
atgttacatgtagac

SEQ ID NO: 153495 - DNA, 15 bp, Homo sapiens
tgttacatgtagact

SEQ ID NO: 153496 - DNA, 15 bp, Homo sapiens
gttacatgtagactg

SEQ ID NO: 153497 - DNA, 15 bp, Homo sapiens
ttacatgtagactgg

SEQ ID NO: 153498 - DNA, 15 bp, Homo sapiens
tacatgtagactggc

SEQ ID NO: 153499 - DNA, 15 bp, Homo sapiens
acatgtagactggcc

SEQ ID NO: 153500 - DNA, 15 bp, Homo sapiens
catgtagactggcct

SEQ ID NO: 153501 - DNA, 15 bp, Homo sapiens
atgtagactggcctg

SEQ ID NO: 153502 - DNA, 15 bp, Homo sapiens
tgtagactggcctga

SEQ ID NO: 153503 - DNA, 15 bp, Homo sapiens
gtagactggcctgag

SEQ ID NO: 153504 - DNA, 15 bp, Homo sapiens
tagactggcctgaga

SEQ ID NO: 153505 - DNA, 15 bp, Homo sapiens
agactggcctgagat

SEQ ID NO: 153506 - DNA, 15 bp, Homo sapiens
gactggcctgagata

SEQ ID NO: 153507 - DNA, 15 bp, Homo sapiens
actggcctgagatac

SEQ ID NO: 153508 - DNA, 15 bp, Homo sapiens
ctggcctgagatact

SEQ ID NO: 153509 - DNA, 15 bp, Homo sapiens
tggcctgagatactc

SEQ ID NO: 153510 - DNA, 15 bp, Homo sapiens
ggcctgagatactca

SEQ ID NO: 153511 - DNA, 15 bp, Homo sapiens
gcctgagatactcat

SEQ ID NO: 153512 - DNA, 15 bp, Homo sapiens
cctgagatactcatt

SEQ ID NO: 153513 - DNA, 15 bp, Homo sapiens
ctgagatactcattc

SEQ ID NO: 153514 - DNA, 15 bp, Homo sapiens
tgagatactcattct

SEQ ID NO: 153515 - DNA, 15 bp, Homo sapiens
gagatactcattctc

SEQ ID NO: 153516 - DNA, 15 bp, Homo sapiens
agatactcattctca

SEQ ID NO: 153517 - DNA, 15 bp, Homo sapiens
gatactcattctcag

SEQ ID NO: 153518 - DNA, 15 bp, Homo sapiens
atactcattctcagg

SEQ ID NO: 153519 - DNA, 15 bp, Homo sapiens
tactcattctcaggg

SEQ ID NO: 153520 - DNA, 15 bp, Homo sapiens
actcattctcagggc

SEQ ID NO: 153521 - DNA, 15 bp, Homo sapiens
ctcattctcagggca

SEQ ID NO: 153522 - DNA, 15 bp, Homo sapiens
tcattctcagggcac

SEQ ID NO: 153523 - DNA, 15 bp, Homo sapiens
cattctcagggcact

SEQ ID NO: 153524 - DNA, 15 bp, Homo sapiens
attctcagggcactg

SEQ ID NO: 153525 - DNA, 15 bp, Homo sapiens
ttctcagggcactgt

SEQ ID NO: 153526 - DNA, 15 bp, Homo sapiens
tctcagggcactgtg

SEQ ID NO: 153527 - DNA, 15 bp, Homo sapiens
ctcagggcactgtgt

SEQ ID NO: 153528 - DNA, 15 bp, Homo sapiens
tcagggcactgtgtg

SEQ ID NO: 153529 - DNA, 15 bp, Homo sapiens
cagggcactgtgtga

SEQ ID NO: 153530 - DNA, 15 bp, Homo sapiens
agggcactgtgtgaa

SEQ ID NO: 153531 - DNA, 15 bp, Homo sapiens
gggcactgtgtgaat

SEQ ID NO: 153532 - DNA, 15 bp, Homo sapiens
ggcactgtgtgaatg

SEQ ID NO: 153533 - DNA, 15 bp, Homo sapiens
gcactgtgtgaatga

SEQ ID NO: 153534 - DNA, 15 bp, Homo sapiens
cactgtgtgaatgat

SEQ ID NO: 153535 - DNA, 15 bp, Homo sapiens
actgtgtgaatgatg

SEQ ID NO: 153536 - DNA, 15 bp, Homo sapiens
ctgtgtgaatgatga

SEQ ID NO: 153537 - DNA, 15 bp, Homo sapiens
tgtgtgaatgatgag

SEQ ID NO: 153538 - DNA, 15 bp, Homo sapiens
gtgtgaatgatgagc

SEQ ID NO: 153539 - DNA, 15 bp, Homo sapiens
tgtgaatgatgagct

SEQ ID NO: 153540 - DNA, 15 bp, Homo sapiens
gtgaatgatgagctg

SEQ ID NO: 153541 - DNA, 15 bp, Homo sapiens
tgaatgatgagctgc

SEQ ID NO: 153542 - DNA, 15 bp, Homo sapiens
gaatgatgagctgct

SEQ ID NO: 153543 - DNA, 15 bp, Homo sapiens
aatgatgagctgctg

SEQ ID NO: 153544 - DNA, 15 bp, Homo sapiens
atgatgagctgctgt

SEQ ID NO: 153545 - DNA, 15 bp, Homo sapiens
tgatgagctgctgtt

SEQ ID NO: 153546 - DNA, 15 bp, Homo sapiens
gatgagctgctgtta

SEQ ID NO: 153547 - DNA, 15 bp, Homo sapiens
atgagctgctgttac

SEQ ID NO: 153548 - DNA, 15 bp, Homo sapiens
tgagctgctgttact

SEQ ID NO: 153549 - DNA, 15 bp, Homo sapiens
gagctgctgttactg

SEQ ID NO: 153550 - DNA, 15 bp, Homo sapiens
agctgctgttactgt

SEQ ID NO: 153551 - DNA, 15 bp, Homo sapiens
gctgctgttactgtg

SEQ ID NO: 153552 - DNA, 15 bp, Homo sapiens
ctgctgttactgtgt

SEQ ID NO: 153553 - DNA, 15 bp, Homo sapiens
tgctgttactgtgtg

SEQ ID NO: 153554 - DNA, 15 bp, Homo sapiens
gctgttactgtgtgg

SEQ ID NO: 153555 - DNA, 15 bp, Homo sapiens
ctgttactgtgtgga

SEQ ID NO: 153556 - DNA, 15 bp, Homo sapiens
tgttactgtgtggag

SEQ ID NO: 153557 - DNA, 15 bp, Homo sapiens
gttactgtgtggagg

SEQ ID NO: 153558 - DNA, 15 bp, Homo sapiens
ttactgtgtggaggg

SEQ ID NO: 153559 - DNA, 15 bp, Homo sapiens
tactgtgtggagggg

SEQ ID NO: 153560 - DNA, 15 bp, Homo sapiens
actgtgtggagggga

SEQ ID NO: 153561 - DNA, 15 bp, Homo sapiens
ctgtgtggaggggaa

SEQ ID NO: 153562 - DNA, 15 bp, Homo sapiens
tgtgtggaggggaaa

SEQ ID NO: 153563 - DNA, 15 bp, Homo sapiens
gtgtggaggggaaat

SEQ ID NO: 153564 - DNA, 15 bp, Homo sapiens
tgtggaggggaaatg

SEQ ID NO: 153565 - DNA, 15 bp, Homo sapiens
gtggaggggaaatgc

SEQ ID NO: 153566 - DNA, 15 bp, Homo sapiens
tggaggggaaatgca

SEQ ID NO: 153567 - DNA, 15 bp, Homo sapiens
ggaggggaaatgcac

SEQ ID NO: 153568 - DNA, 15 bp, Homo sapiens
gaggggaaatgcact

SEQ ID NO: 153569 - DNA, 15 bp, Homo sapiens
aggggaaatgcactt

SEQ ID NO: 153570 - DNA, 15 bp, Homo sapiens
ggggaaatgcactta

SEQ ID NO: 153571 - DNA, 15 bp, Homo sapiens
gggaaatgcacttag

SEQ ID NO: 153572 - DNA, 15 bp, Homo sapiens
ggaaatgcacttagt

SEQ ID NO: 153573 - DNA, 15 bp, Homo sapiens
gaaatgcacttagtg

SEQ ID NO: 153574 - DNA, 15 bp, Homo sapiens
aaatgcacttagtgc

SEQ ID NO: 153575 - DNA, 15 bp, Homo sapiens
aatgcacttagtgct

SEQ ID NO: 153576 - DNA, 15 bp, Homo sapiens
atgcacttagtgctt

SEQ ID NO: 153577 - DNA, 15 bp, Homo sapiens
tgcacttagtgcttc

SEQ ID NO: 153578 - DNA, 15 bp, Homo sapiens
gcacttagtgcttca

SEQ ID NO: 153579 - DNA, 15 bp, Homo sapiens
cacttagtgcttcag

SEQ ID NO: 153580 - DNA, 15 bp, Homo sapiens
acttagtgcttcaga

SEQ ID NO: 153581 - DNA, 15 bp, Homo sapiens
cttagtgcttcagag

SEQ ID NO: 153582 - DNA, 15 bp, Homo sapiens
ttagtgcttcagagc

SEQ ID NO: 153583 - DNA, 15 bp, Homo sapiens
tagtgcttcagagcc

SEQ ID NO: 153584 - DNA, 15 bp, Homo sapiens
agtgcttcagagcca

SEQ ID NO: 153585 - DNA, 15 bp, Homo sapiens
gtgcttcagagccac

SEQ ID NO: 153586 - DNA, 15 bp, Homo sapiens
tgcttcagagccact

SEQ ID NO: 153587 - DNA, 15 bp, Homo sapiens
gcttcagagccactt

SEQ ID NO: 153588 - DNA, 15 bp, Homo sapiens
cttcagagccacttg

SEQ ID NO: 153589 - DNA, 15 bp, Homo sapiens
ttcagagccacttga

SEQ ID NO: 153590 - DNA, 15 bp, Homo sapiens
tcagagccacttgaa

SEQ ID NO: 153591 - DNA, 15 bp, Homo sapiens
cagagccacttgaaa

SEQ ID NO: 153592 - DNA, 15 bp, Homo sapiens
agagccacttgaaag

SEQ ID NO: 153593 - DNA, 15 bp, Homo sapiens
gagccacttgaaagg

SEQ ID NO: 153594 - DNA, 15 bp, Homo sapiens
agccacttgaaaggg

SEQ ID NO: 153595 - DNA, 15 bp, Homo sapiens
gccacttgaaaggga

SEQ ID NO: 153596 - DNA, 15 bp, Homo sapiens
ccacttgaaagggat

SEQ ID NO: 153597 - DNA, 15 bp, Homo sapiens
cacttgaaagggata

SEQ ID NO: 153598 - DNA, 15 bp, Homo sapiens
acttgaaagggataa

SEQ ID NO: 153599 - DNA, 15 bp, Homo sapiens
cttgaaagggataag

SEQ ID NO: 153600 - DNA, 15 bp, Homo sapiens
ttgaaagggataagt

SEQ ID NO: 153601 - DNA, 15 bp, Homo sapiens
tgaaagggataagtg

SEQ ID NO: 153602 - DNA, 15 bp, Homo sapiens
gaaagggataagtgc

SEQ ID NO: 153603 - DNA, 15 bp, Homo sapiens
aaagggataagtgct

SEQ ID NO: 153604 - DNA, 15 bp, Homo sapiens
aagggataagtgctc

SEQ ID NO: 153605 - DNA, 15 bp, Homo sapiens
agggataagtgctct

SEQ ID NO: 153606 - DNA, 15 bp, Homo sapiens
gggataagtgctcta

SEQ ID NO: 153607 - DNA, 15 bp, Homo sapiens
ggataagtgctctag

SEQ ID NO: 153608 - DNA, 15 bp, Homo sapiens
gataagtgctctaga

SEQ ID NO: 153609 - DNA, 15 bp, Homo sapiens
ataagtgctctagag

SEQ ID NO: 153610 - DNA, 15 bp, Homo sapiens
taagtgctctagaga

SEQ ID NO: 153611 - DNA, 15 bp, Homo sapiens
aagtgctctagagac

SEQ ID NO: 153612 - DNA, 15 bp, Homo sapiens
agtgctctagagaca

SEQ ID NO: 153613 - DNA, 15 bp, Homo sapiens
gtgctctagagacaa

SEQ ID NO: 153614 - DNA, 15 bp, Homo sapiens
tgctctagagacaat

SEQ ID NO: 153615 - DNA, 15 bp, Homo sapiens
gctctagagacaatt

SEQ ID NO: 153616 - DNA, 15 bp, Homo sapiens
ctctagagacaattg

SEQ ID NO: 153617 - DNA, 15 bp, Homo sapiens
tctagagacaattgg

SEQ ID NO: 153618 - DNA, 15 bp, Homo sapiens
ctagagacaattggg

SEQ ID NO: 153619 - DNA, 15 bp, Homo sapiens
tagagacaattgggt

SEQ ID NO: 153620 - DNA, 15 bp, Homo sapiens
agagacaattgggtt

SEQ ID NO: 153621 - DNA, 15 bp, Homo sapiens
gagacaattgggttc

SEQ ID NO: 153622 - DNA, 15 bp, Homo sapiens
agacaattgggttca

SEQ ID NO: 153623 - DNA, 15 bp, Homo sapiens
gacaattgggttcaa

SEQ ID NO: 153624 - DNA, 15 bp, Homo sapiens
acaattgggttcaaa

SEQ ID NO: 153625 - DNA, 15 bp, Homo sapiens
caattgggttcaaat

SEQ ID NO: 153626 - DNA, 15 bp, Homo sapiens
aattgggttcaaatg

SEQ ID NO: 153627 - DNA, 15 bp, Homo sapiens
attgggttcaaatgt

SEQ ID NO: 153628 - DNA, 15 bp, Homo sapiens
ttgggttcaaatgtg

SEQ ID NO: 153629 - DNA, 15 bp, Homo sapiens
tgggttcaaatgtgg

SEQ ID NO: 153630 - DNA, 15 bp, Homo sapiens
gggttcaaatgtgga

SEQ ID NO: 153631 - DNA, 15 bp, Homo sapiens
ggttcaaatgtggag

SEQ ID NO: 153632 - DNA, 15 bp, Homo sapiens
gttcaaatgtggagc

SEQ ID NO: 153633 - DNA, 15 bp, Homo sapiens
ttcaaatgtggagca

SEQ ID NO: 153634 - DNA, 15 bp, Homo sapiens
tcaaatgtggagcag

SEQ ID NO: 153635 - DNA, 15 bp, Homo sapiens
caaatgtggagcagg

SEQ ID NO: 153636 - DNA, 15 bp, Homo sapiens
aaatgtggagcaggc

SEQ ID NO: 153637 - DNA, 15 bp, Homo sapiens
aatgtggagcaggct

SEQ ID NO: 153638 - DNA, 15 bp, Homo sapiens
atgtggagcaggctg

SEQ ID NO: 153639 - DNA, 15 bp, Homo sapiens
tgtggagcaggctga

SEQ ID NO: 153640 - DNA, 15 bp, Homo sapiens
gtggagcaggctgag

SEQ ID NO: 153641 - DNA, 15 bp, Homo sapiens
tggagcaggctgagc

SEQ ID NO: 153642 - DNA, 15 bp, Homo sapiens
ggagcaggctgagca

SEQ ID NO: 153643 - DNA, 15 bp, Homo sapiens
gagcaggctgagcaa

SEQ ID NO: 153644 - DNA, 15 bp, Homo sapiens
agcaggctgagcaag

SEQ ID NO: 153645 - DNA, 15 bp, Homo sapiens
gcaggctgagcaaga

SEQ ID NO: 153646 - DNA, 15 bp, Homo sapiens
caggctgagcaagaa

SEQ ID NO: 153647 - DNA, 15 bp, Homo sapiens
aggctgagcaagaac

SEQ ID NO: 153648 - DNA, 15 bp, Homo sapiens
ggctgagcaagaaca

SEQ ID NO: 153649 - DNA, 15 bp, Homo sapiens
gctgagcaagaacag

SEQ ID NO: 153650 - DNA, 15 bp, Homo sapiens
ctgagcaagaacaga

SEQ ID NO: 153651 - DNA, 15 bp, Homo sapiens
tgagcaagaacagaa

SEQ ID NO: 153652 - DNA, 15 bp, Homo sapiens
gagcaagaacagaat

SEQ ID NO: 153653 - DNA, 15 bp, Homo sapiens
agcaagaacagaatg

SEQ ID NO: 153654 - DNA, 15 bp, Homo sapiens
gcaagaacagaatgt

SEQ ID NO: 153655 - DNA, 15 bp, Homo sapiens
caagaacagaatgtc

SEQ ID NO: 153656 - DNA, 15 bp, Homo sapiens
aagaacagaatgtct

SEQ ID NO: 153657 - DNA, 15 bp, Homo sapiens
agaacagaatgtctc

SEQ ID NO: 153658 - DNA, 15 bp, Homo sapiens
gaacagaatgtctcc

SEQ ID NO: 153659 - DNA, 15 bp, Homo sapiens
aacagaatgtctcct

SEQ ID NO: 153660 - DNA, 15 bp, Homo sapiens
acagaatgtctcctt

SEQ ID NO: 153661 - DNA, 15 bp, Homo sapiens
cagaatgtctccttt

SEQ ID NO: 153662 - DNA, 15 bp, Homo sapiens
agaatgtctcctttg

SEQ ID NO: 153663 - DNA, 15 bp, Homo sapiens
gaatgtctcctttgc

SEQ ID NO: 153664 - DNA, 15 bp, Homo sapiens
aatgtctcctttgcc

SEQ ID NO: 153665 - DNA, 15 bp, Homo sapiens
atgtctcctttgcct

SEQ ID NO: 153666 - DNA, 15 bp, Homo sapiens
tgtctcctttgcctg

SEQ ID NO: 153667 - DNA, 15 bp, Homo sapiens
gtctcctttgcctga

SEQ ID NO: 153668 - DNA, 15 bp, Homo sapiens
tctcctttgcctgag

SEQ ID NO: 153669 - DNA, 15 bp, Homo sapiens
ctcctttgcctgagc

SEQ ID NO: 153670 - DNA, 15 bp, Homo sapiens
tcctttgcctgagcc

SEQ ID NO: 153671 - DNA, 15 bp, Homo sapiens
cctttgcctgagcct

SEQ ID NO: 153672 - DNA, 15 bp, Homo sapiens
ctttgcctgagcctg

SEQ ID NO: 153673 - DNA, 15 bp, Homo sapiens
tttgcctgagcctga

SEQ ID NO: 153674 - DNA, 15 bp, Homo sapiens
ttgcctgagcctgag

SEQ ID NO: 153675 - DNA, 15 bp, Homo sapiens
tgcctgagcctgagt

SEQ ID NO: 153676 - DNA, 15 bp, Homo sapiens
gcctgagcctgagtg

SEQ ID NO: 153677 - DNA, 15 bp, Homo sapiens
cctgagcctgagtgc

SEQ ID NO: 153678 - DNA, 15 bp, Homo sapiens
ctgagcctgagtgct

SEQ ID NO: 153679 - DNA, 15 bp, Homo sapiens
tgagcctgagtgctg

SEQ ID NO: 153680 - DNA, 15 bp, Homo sapiens
gagcctgagtgctgt

SEQ ID NO: 153681 - DNA, 15 bp, Homo sapiens
agcctgagtgctgtt

SEQ ID NO: 153682 - DNA, 15 bp, Homo sapiens
gcctgagtgctgtta

SEQ ID NO: 153683 - DNA, 15 bp, Homo sapiens
cctgagtgctgttaa

SEQ ID NO: 153684 - DNA, 15 bp, Homo sapiens
ctgagtgctgttaat

SEQ ID NO: 153685 - DNA, 15 bp, Homo sapiens
tgagtgctgttaatc

SEQ ID NO: 153686 - DNA, 15 bp, Homo sapiens
gagtgctgttaatca

SEQ ID NO: 153687 - DNA, 15 bp, Homo sapiens
agtgctgttaatcac

SEQ ID NO: 153688 - DNA, 15 bp, Homo sapiens
gtgctgttaatcaca

SEQ ID NO: 153689 - DNA, 15 bp, Homo sapiens
tgctgttaatcacat

SEQ ID NO: 153690 - DNA, 15 bp, Homo sapiens
gctgttaatcacatc

SEQ ID NO: 153691 - DNA, 15 bp, Homo sapiens
ctgttaatcacatct

SEQ ID NO: 153692 - DNA, 15 bp, Homo sapiens
tgttaatcacatctt

SEQ ID NO: 153693 - DNA, 15 bp, Homo sapiens
gttaatcacatcttc

SEQ ID NO: 153694 - DNA, 15 bp, Homo sapiens
ttaatcacatcttcc

SEQ ID NO: 153695 - DNA, 15 bp, Homo sapiens
taatcacatcttcct

SEQ ID NO: 153696 - DNA, 15 bp, Homo sapiens
aatcacatcttcctg

SEQ ID NO: 153697 - DNA, 15 bp, Homo sapiens
atcacatcttcctgc

SEQ ID NO: 153698 - DNA, 15 bp, Homo sapiens
tcacatcttcctgcc

SEQ ID NO: 153699 - DNA, 15 bp, Homo sapiens
cacatcttcctgcct

SEQ ID NO: 153700 - DNA, 15 bp, Homo sapiens
acatcttcctgcctt

SEQ ID NO: 153701 - DNA, 15 bp, Homo sapiens
catcttcctgccttg

SEQ ID NO: 153702 - DNA, 15 bp, Homo sapiens
atcttcctgccttgg

SEQ ID NO: 153703 - DNA, 15 bp, Homo sapiens
tcttcctgccttggg

SEQ ID NO: 153704 - DNA, 15 bp, Homo sapiens
cttcctgccttgggc

SEQ ID NO: 153705 - DNA, 15 bp, Homo sapiens
ttcctgccttgggct

SEQ ID NO: 153706 - DNA, 15 bp, Homo sapiens
tcctgccttgggctg

SEQ ID NO: 153707 - DNA, 15 bp, Homo sapiens
cctgccttgggctga

SEQ ID NO: 153708 - DNA, 15 bp, Homo sapiens
ctgccttgggctgag

SEQ ID NO: 153709 - DNA, 15 bp, Homo sapiens
tgccttgggctgagt

SEQ ID NO: 153710 - DNA, 15 bp, Homo sapiens
gccttgggctgagtt

SEQ ID NO: 153711 - DNA, 15 bp, Homo sapiens
ccttgggctgagtta

SEQ ID NO: 153712 - DNA, 15 bp, Homo sapiens
cttgggctgagttag

SEQ ID NO: 153713 - DNA, 15 bp, Homo sapiens
ttgggctgagttaga

SEQ ID NO: 153714 - DNA, 15 bp, Homo sapiens
tgggctgagttagag

SEQ ID NO: 153715 - DNA, 15 bp, Homo sapiens
gggctgagttagaga

SEQ ID NO: 153716 - DNA, 15 bp, Homo sapiens
ggctgagttagagaa

SEQ ID NO: 153717 - DNA, 15 bp, Homo sapiens
gctgagttagagaat

SEQ ID NO: 153718 - DNA, 15 bp, Homo sapiens
ctgagttagagaatc

SEQ ID NO: 153719 - DNA, 15 bp, Homo sapiens
tgagttagagaatca

SEQ ID NO: 153720 - DNA, 15 bp, Homo sapiens
gagttagagaatcat

SEQ ID NO: 153721 - DNA, 15 bp, Homo sapiens
agttagagaatcatt

SEQ ID NO: 153722 - DNA, 15 bp, Homo sapiens
gttagagaatcatta

SEQ ID NO: 153723 - DNA, 15 bp, Homo sapiens
ttagagaatcattag

SEQ ID NO: 153724 - DNA, 15 bp, Homo sapiens
tagagaatcattaga

SEQ ID NO: 153725 - DNA, 15 bp, Homo sapiens
agagaatcattagac

SEQ ID NO: 153726 - DNA, 15 bp, Homo sapiens
gagaatcattagact

SEQ ID NO: 153727 - DNA, 15 bp, Homo sapiens
agaatcattagacta

SEQ ID NO: 153728 - DNA, 15 bp, Homo sapiens
gaatcattagactat

SEQ ID NO: 153729 - DNA, 15 bp, Homo sapiens
aatcattagactatt

SEQ ID NO: 153730 - DNA, 15 bp, Homo sapiens
atcattagactattt

SEQ ID NO: 153731 - DNA, 15 bp, Homo sapiens
tcattagactatttc

SEQ ID NO: 153732 - DNA, 15 bp, Homo sapiens
cattagactatttcc

SEQ ID NO: 153733 - DNA, 15 bp, Homo sapiens
attagactatttcct

SEQ ID NO: 153734 - DNA, 15 bp, Homo sapiens
ttagactatttcctg

SEQ ID NO: 153735 - DNA, 15 bp, Homo sapiens
tagactatttcctgt

SEQ ID NO: 153736 - DNA, 15 bp, Homo sapiens
agactatttcctgtt

SEQ ID NO: 153737 - DNA, 15 bp, Homo sapiens
gactatttcctgttt

SEQ ID NO: 153738 - DNA, 15 bp, Homo sapiens
actatttcctgtttc

SEQ ID NO: 153739 - DNA, 15 bp, Homo sapiens
ctatttcctgtttcc

SEQ ID NO: 153740 - DNA, 15 bp, Homo sapiens
tatttcctgtttcca

SEQ ID NO: 153741 - DNA, 15 bp, Homo sapiens
atttcctgtttccat

SEQ ID NO: 153742 - DNA, 15 bp, Homo sapiens
tttcctgtttccatg

SEQ ID NO: 153743 - DNA, 15 bp, Homo sapiens
ttcctgtttccatgg

SEQ ID NO: 153744 - DNA, 15 bp, Homo sapiens
tcctgtttccatggt

SEQ ID NO: 153745 - DNA, 15 bp, Homo sapiens
cctgtttccatggtg

SEQ ID NO: 153746 - DNA, 15 bp, Homo sapiens
ctgtttccatggtga

SEQ ID NO: 153747 - DNA, 15 bp, Homo sapiens
tgtttccatggtgag

SEQ ID NO: 153748 - DNA, 15 bp, Homo sapiens
gtttccatggtgagg

SEQ ID NO: 153749 - DNA, 15 bp, Homo sapiens
tttccatggtgaggg

SEQ ID NO: 153750 - DNA, 15 bp, Homo sapiens
ttccatggtgaggga

SEQ ID NO: 153751 - DNA, 15 bp, Homo sapiens
tccatggtgagggag

SEQ ID NO: 153752 - DNA, 15 bp, Homo sapiens
ccatggtgagggagg

SEQ ID NO: 153753 - DNA, 15 bp, Homo sapiens
catggtgagggaggc

SEQ ID NO: 153754 - DNA, 15 bp, Homo sapiens
atggtgagggaggcc

SEQ ID NO: 153755 - DNA, 15 bp, Homo sapiens
tggtgagggaggcct

SEQ ID NO: 153756 - DNA, 15 bp, Homo sapiens
ggtgagggaggcctc

SEQ ID NO: 153757 - DNA, 15 bp, Homo sapiens
gtgagggaggcctct

SEQ ID NO: 153758 - DNA, 15 bp, Homo sapiens
tgagggaggcctctt

SEQ ID NO: 153759 - DNA, 15 bp, Homo sapiens
gagggaggcctcttc

SEQ ID NO: 153760 - DNA, 15 bp, Homo sapiens
agggaggcctcttcc

SEQ ID NO: 153761 - DNA, 15 bp, Homo sapiens
gggaggcctcttcct

SEQ ID NO: 153762 - DNA, 15 bp, Homo sapiens
ggaggcctcttcctt

SEQ ID NO: 153763 - DNA, 15 bp, Homo sapiens
gaggcctcttccttt

SEQ ID NO: 153764 - DNA, 15 bp, Homo sapiens
aggcctcttcctttt

SEQ ID NO: 153765 - DNA, 15 bp, Homo sapiens
ggcctcttccttttg

SEQ ID NO: 153766 - DNA, 15 bp, Homo sapiens
gcctcttccttttgt

SEQ ID NO: 153767 - DNA, 15 bp, Homo sapiens
cctcttccttttgtc

SEQ ID NO: 153768 - DNA, 15 bp, Homo sapiens
ctcttccttttgtct

SEQ ID NO: 153769 - DNA, 15 bp, Homo sapiens
tcttccttttgtctc

SEQ ID NO: 153770 - DNA, 15 bp, Homo sapiens
cttccttttgtctct

SEQ ID NO: 153771 - DNA, 15 bp, Homo sapiens
ttccttttgtctctg

SEQ ID NO: 153772 - DNA, 15 bp, Homo sapiens
tccttttgtctctgc

SEQ ID NO: 153773 - DNA, 15 bp, Homo sapiens
ccttttgtctctgct

SEQ ID NO: 153774 - DNA, 15 bp, Homo sapiens
cttttgtctctgctc

SEQ ID NO: 153775 - DNA, 15 bp, Homo sapiens
ttttgtctctgctcc

SEQ ID NO: 153776 - DNA, 15 bp, Homo sapiens
tttgtctctgctccc

SEQ ID NO: 153777 - DNA, 15 bp, Homo sapiens
ttgtctctgctcccc

SEQ ID NO: 153778 - DNA, 15 bp, Homo sapiens
tgtctctgctcccct

SEQ ID NO: 153779 - DNA, 15 bp, Homo sapiens
gtctctgctcccctt

SEQ ID NO: 153780 - DNA, 15 bp, Homo sapiens
tctctgctcccctta

SEQ ID NO: 153781 - DNA, 15 bp, Homo sapiens
ctctgctccccttaa

SEQ ID NO: 153782 - DNA, 15 bp, Homo sapiens
tctgctccccttaag

SEQ ID NO: 153783 - DNA, 15 bp, Homo sapiens
ctgctccccttaaga

SEQ ID NO: 153784 - DNA, 15 bp, Homo sapiens
tgctccccttaagaa

SEQ ID NO: 153785 - DNA, 15 bp, Homo sapiens
gctccccttaagaag

SEQ ID NO: 153786 - DNA, 15 bp, Homo sapiens
ctccccttaagaagc

SEQ ID NO: 153787 - DNA, 15 bp, Homo sapiens
tccccttaagaagca

SEQ ID NO: 153788 - DNA, 15 bp, Homo sapiens
ccccttaagaagcag

SEQ ID NO: 153789 - DNA, 15 bp, Homo sapiens
cccttaagaagcagg

SEQ ID NO: 153790 - DNA, 15 bp, Homo sapiens
ccttaagaagcaggt

SEQ ID NO: 153791 - DNA, 15 bp, Homo sapiens
cttaagaagcaggtg

SEQ ID NO: 153792 - DNA, 15 bp, Homo sapiens
ttaagaagcaggtga

SEQ ID NO: 153793 - DNA, 15 bp, Homo sapiens
taagaagcaggtgag

SEQ ID NO: 153794 - DNA, 15 bp, Homo sapiens
aagaagcaggtgagg

SEQ ID NO: 153795 - DNA, 15 bp, Homo sapiens
agaagcaggtgagga

SEQ ID NO: 153796 - DNA, 15 bp, Homo sapiens
gaagcaggtgaggat

SEQ ID NO: 153797 - DNA, 15 bp, Homo sapiens
aagcaggtgaggatt

SEQ ID NO: 153798 - DNA, 15 bp, Homo sapiens
agcaggtgaggattt

SEQ ID NO: 153799 - DNA, 15 bp, Homo sapiens
gcaggtgaggatttt

SEQ ID NO: 153800 - DNA, 15 bp, Homo sapiens
caggtgaggattttg

SEQ ID NO: 153801 - DNA, 15 bp, Homo sapiens
aggtgaggattttgc

SEQ ID NO: 153802 - DNA, 15 bp, Homo sapiens
ggtgaggattttgcc

SEQ ID NO: 153803 - DNA, 15 bp, Homo sapiens
gtgaggattttgcca

SEQ ID NO: 153804 - DNA, 15 bp, Homo sapiens
tgaggattttgccag

SEQ ID NO: 153805 - DNA, 15 bp, Homo sapiens
gaggattttgccagg

SEQ ID NO: 153806 - DNA, 15 bp, Homo sapiens
aggattttgccaggt

SEQ ID NO: 153807 - DNA, 15 bp, Homo sapiens
ggattttgccaggtt

SEQ ID NO: 153808 - DNA, 15 bp, Homo sapiens
gattttgccaggttt

SEQ ID NO: 153809 - DNA, 15 bp, Homo sapiens
attttgccaggtttc

SEQ ID NO: 153810 - DNA, 15 bp, Homo sapiens
ttttgccaggtttct

SEQ ID NO: 153811 - DNA, 15 bp, Homo sapiens
tttgccaggtttctt

SEQ ID NO: 153812 - DNA, 15 bp, Homo sapiens
ttgccaggtttcttg

SEQ ID NO: 153813 - DNA, 15 bp, Homo sapiens
tgccaggtttcttgt

SEQ ID NO: 153814 - DNA, 15 bp, Homo sapiens
gccaggtttcttgtt

SEQ ID NO: 153815 - DNA, 15 bp, Homo sapiens
ccaggtttcttgttt

SEQ ID NO: 153816 - DNA, 15 bp, Homo sapiens
caggtttcttgtttt

SEQ ID NO: 153817 - DNA, 15 bp, Homo sapiens
aggtttcttgttttg

SEQ ID NO: 153818 - DNA, 15 bp, Homo sapiens
ggtttcttgttttga

SEQ ID NO: 153819 - DNA, 15 bp, Homo sapiens
gtttcttgttttgaa

SEQ ID NO: 153820 - DNA, 15 bp, Homo sapiens
tttcttgttttgaac

SEQ ID NO: 153821 - DNA, 15 bp, Homo sapiens
ttcttgttttgaacc

SEQ ID NO: 153822 - DNA, 15 bp, Homo sapiens
tcttgttttgaacct

SEQ ID NO: 153823 - DNA, 15 bp, Homo sapiens
cttgttttgaacctt

SEQ ID NO: 153824 - DNA, 15 bp, Homo sapiens
ttgttttgaacctta

SEQ ID NO: 153825 - DNA, 15 bp, Homo sapiens
tgttttgaaccttat

SEQ ID NO: 153826 - DNA, 15 bp, Homo sapiens
gttttgaaccttatt

SEQ ID NO: 153827 - DNA, 15 bp, Homo sapiens
ttttgaaccttattg

SEQ ID NO: 153828 - DNA, 15 bp, Homo sapiens
tttgaaccttattga

SEQ ID NO: 153829 - DNA, 15 bp, Homo sapiens
ttgaaccttattgac

SEQ ID NO: 153830 - DNA, 15 bp, Homo sapiens
tgaaccttattgact

SEQ ID NO: 153831 - DNA, 15 bp, Homo sapiens
gaaccttattgactt

SEQ ID NO: 153832 - DNA, 15 bp, Homo sapiens
aaccttattgacttt

SEQ ID NO: 153833 - DNA, 15 bp, Homo sapiens
accttattgacttta

SEQ ID NO: 153834 - DNA, 15 bp, Homo sapiens
ccttattgactttaa

SEQ ID NO: 153835 - DNA, 15 bp, Homo sapiens
cttattgactttaag

SEQ ID NO: 153836 - DNA, 15 bp, Homo sapiens
ttattgactttaagg

SEQ ID NO: 153837 - DNA, 15 bp, Homo sapiens
tattgactttaaggg

SEQ ID NO: 153838 - DNA, 15 bp, Homo sapiens
attgactttaagggc

SEQ ID NO: 153839 - DNA, 15 bp, Homo sapiens
ttgactttaagggcg

SEQ ID NO: 153840 - DNA, 15 bp, Homo sapiens
tgactttaagggcgg

SEQ ID NO: 153841 - DNA, 15 bp, Homo sapiens
gactttaagggcggc

SEQ ID NO: 153842 - DNA, 15 bp, Homo sapiens
actttaagggcggct

SEQ ID NO: 153843 - DNA, 15 bp, Homo sapiens
ctttaagggcggctg

SEQ ID NO: 153844 - DNA, 15 bp, Homo sapiens
tttaagggcggctgg

SEQ ID NO: 153845 - DNA, 15 bp, Homo sapiens
ttaagggcggctggg

SEQ ID NO: 153846 - DNA, 15 bp, Homo sapiens
taagggcggctgggt

SEQ ID NO: 153847 - DNA, 15 bp, Homo sapiens
aagggcggctgggtt

SEQ ID NO: 153848 - DNA, 15 bp, Homo sapiens
agggcggctgggttt

SEQ ID NO: 153849 - DNA, 15 bp, Homo sapiens
gggcggctgggtttt

SEQ ID NO: 153850 - DNA, 15 bp, Homo sapiens
ggcggctgggtttta

SEQ ID NO: 153851 - DNA, 15 bp, Homo sapiens
gcggctgggttttag

SEQ ID NO: 153852 - DNA, 15 bp, Homo sapiens
cggctgggttttaga

SEQ ID NO: 153853 - DNA, 15 bp, Homo sapiens
ggctgggttttagag

SEQ ID NO: 153854 - DNA, 15 bp, Homo sapiens
gctgggttttagaga

SEQ ID NO: 153855 - DNA, 15 bp, Homo sapiens
ctgggttttagagac

SEQ ID NO: 153856 - DNA, 15 bp, Homo sapiens
tgggttttagagact

SEQ ID NO: 153857 - DNA, 15 bp, Homo sapiens
gggttttagagactg

SEQ ID NO: 153858 - DNA, 15 bp, Homo sapiens
ggttttagagactgt

SEQ ID NO: 153859 - DNA, 15 bp, Homo sapiens
gttttagagactgta

SEQ ID NO: 153860 - DNA, 15 bp, Homo sapiens
ttttagagactgtac

SEQ ID NO: 153861 - DNA, 15 bp, Homo sapiens
tttagagactgtacc

SEQ ID NO: 153862 - DNA, 15 bp, Homo sapiens
ttagagactgtacct

SEQ ID NO: 153863 - DNA, 15 bp, Homo sapiens
tagagactgtaccta

SEQ ID NO: 153864 - DNA, 15 bp, Homo sapiens
agagactgtacctac

SEQ ID NO: 153865 - DNA, 15 bp, Homo sapiens
gagactgtacctacc

SEQ ID NO: 153866 - DNA, 15 bp, Homo sapiens
agactgtacctacct

SEQ ID NO: 153867 - DNA, 15 bp, Homo sapiens
gactgtacctaccta

SEQ ID NO: 153868 - DNA, 15 bp, Homo sapiens
actgtacctacctag

SEQ ID NO: 153869 - DNA, 15 bp, Homo sapiens
ctgtacctacctagg

SEQ ID NO: 153870 - DNA, 15 bp, Homo sapiens
tgtacctacctaggg

SEQ ID NO: 153871 - DNA, 15 bp, Homo sapiens
gtacctacctagggg

SEQ ID NO: 153872 - DNA, 15 bp, Homo sapiens
tacctacctaggggg

SEQ ID NO: 153873 - DNA, 15 bp, Homo sapiens
acctacctaggggga

SEQ ID NO: 153874 - DNA, 15 bp, Homo sapiens
cctacctagggggaa

SEQ ID NO: 153875 - DNA, 15 bp, Homo sapiens
ctacctagggggaac

SEQ ID NO: 153876 - DNA, 15 bp, Homo sapiens
tacctagggggaaca

SEQ ID NO: 153877 - DNA, 15 bp, Homo sapiens
acctagggggaacac

SEQ ID NO: 153878 - DNA, 15 bp, Homo sapiens
cctagggggaacact

SEQ ID NO: 153879 - DNA, 15 bp, Homo sapiens
ctagggggaacactt

SEQ ID NO: 153880 - DNA, 15 bp, Homo sapiens
tagggggaacacttc

SEQ ID NO: 153881 - DNA, 15 bp, Homo sapiens
agggggaacacttcc

SEQ ID NO: 153882 - DNA, 15 bp, Homo sapiens
gggggaacacttccg

SEQ ID NO: 153883 - DNA, 15 bp, Homo sapiens
ggggaacacttccga

SEQ ID NO: 153884 - DNA, 15 bp, Homo sapiens
gggaacacttccgaa

SEQ ID NO: 153885 - DNA, 15 bp, Homo sapiens
ggaacacttccgaag

SEQ ID NO: 153886 - DNA, 15 bp, Homo sapiens
gaacacttccgaagt

SEQ ID NO: 153887 - DNA, 15 bp, Homo sapiens
aacacttccgaagtt

SEQ ID NO: 153888 - DNA, 15 bp, Homo sapiens
acacttccgaagttt

SEQ ID NO: 153889 - DNA, 15 bp, Homo sapiens
cacttccgaagttta

SEQ ID NO: 153890 - DNA, 15 bp, Homo sapiens
acttccgaagtttag

SEQ ID NO: 153891 - DNA, 15 bp, Homo sapiens
cttccgaagtttagg

SEQ ID NO: 153892 - DNA, 15 bp, Homo sapiens
ttccgaagtttagga

SEQ ID NO: 153893 - DNA, 15 bp, Homo sapiens
tccgaagtttaggac

SEQ ID NO: 153894 - DNA, 15 bp, Homo sapiens
ccgaagtttaggact

SEQ ID NO: 153895 - DNA, 15 bp, Homo sapiens
cgaagtttaggacta

SEQ ID NO: 153896 - DNA, 15 bp, Homo sapiens
gaagtttaggactat

SEQ ID NO: 153897 - DNA, 15 bp, Homo sapiens
aagtttaggactatt

SEQ ID NO: 153898 - DNA, 15 bp, Homo sapiens
agtttaggactattc

SEQ ID NO: 153899 - DNA, 15 bp, Homo sapiens
gtttaggactattcc

SEQ ID NO: 153900 - DNA, 15 bp, Homo sapiens
tttaggactattccc

SEQ ID NO: 153901 - DNA, 15 bp, Homo sapiens
ttaggactattccct

SEQ ID NO: 153902 - DNA, 15 bp, Homo sapiens
taggactattccctg

SEQ ID NO: 153903 - DNA, 15 bp, Homo sapiens
aggactattccctga

SEQ ID NO: 153904 - DNA, 15 bp, Homo sapiens
ggactattccctgat

SEQ ID NO: 153905 - DNA, 15 bp, Homo sapiens
gactattccctgatc

SEQ ID NO: 153906 - DNA, 15 bp, Homo sapiens
actattccctgatcc

SEQ ID NO: 153907 - DNA, 15 bp, Homo sapiens
ctattccctgatccg

SEQ ID NO: 153908 - DNA, 15 bp, Homo sapiens
tattccctgatccgc

SEQ ID NO: 153909 - DNA, 15 bp, Homo sapiens
attccctgatccgct

SEQ ID NO: 153910 - DNA, 15 bp, Homo sapiens
ttccctgatccgctg

SEQ ID NO: 153911 - DNA, 15 bp, Homo sapiens
tccctgatccgctgg

SEQ ID NO: 153912 - DNA, 15 bp, Homo sapiens
ccctgatccgctggg

SEQ ID NO: 153913 - DNA, 15 bp, Homo sapiens
cctgatccgctggga

SEQ ID NO: 153914 - DNA, 15 bp, Homo sapiens
ctgatccgctgggag

SEQ ID NO: 153915 - DNA, 15 bp, Homo sapiens
tgatccgctgggagg

SEQ ID NO: 153916 - DNA, 15 bp, Homo sapiens
gatccgctgggaggc

SEQ ID NO: 153917 - DNA, 15 bp, Homo sapiens
atccgctgggaggca

SEQ ID NO: 153918 - DNA, 15 bp, Homo sapiens
tccgctgggaggcag

SEQ ID NO: 153919 - DNA, 15 bp, Homo sapiens
ccgctgggaggcagg

SEQ ID NO: 153920 - DNA, 15 bp, Homo sapiens
cgctgggaggcaggt

SEQ ID NO: 153921 - DNA, 15 bp, Homo sapiens
gctgggaggcaggtt

SEQ ID NO: 153922 - DNA, 15 bp, Homo sapiens
ctgggaggcaggtta

SEQ ID NO: 153923 - DNA, 15 bp, Homo sapiens
tgggaggcaggttac

SEQ ID NO: 153924 - DNA, 15 bp, Homo sapiens
gggaggcaggttact

SEQ ID NO: 153925 - DNA, 15 bp, Homo sapiens
ggaggcaggttactg

SEQ ID NO: 153926 - DNA, 15 bp, Homo sapiens
gaggcaggttactga

SEQ ID NO: 153927 - DNA, 15 bp, Homo sapiens
aggcaggttactgag

SEQ ID NO: 153928 - DNA, 15 bp, Homo sapiens
ggcaggttactgagg

SEQ ID NO: 153929 - DNA, 15 bp, Homo sapiens
gcaggttactgagga

SEQ ID NO: 153930 - DNA, 15 bp, Homo sapiens
caggttactgaggaa

SEQ ID NO: 153931 - DNA, 15 bp, Homo sapiens
aggttactgaggaag

SEQ ID NO: 153932 - DNA, 15 bp, Homo sapiens
ggttactgaggaagt

SEQ ID NO: 153933 - DNA, 15 bp, Homo sapiens
gttactgaggaagtc

SEQ ID NO: 153934 - DNA, 15 bp, Homo sapiens
ttactgaggaagtcc

SEQ ID NO: 153935 - DNA, 15 bp, Homo sapiens
tactgaggaagtccc

SEQ ID NO: 153936 - DNA, 15 bp, Homo sapiens
actgaggaagtccct

SEQ ID NO: 153937 - DNA, 15 bp, Homo sapiens
ctgaggaagtccctt

SEQ ID NO: 153938 - DNA, 15 bp, Homo sapiens
tgaggaagtcccttt

SEQ ID NO: 153939 - DNA, 15 bp, Homo sapiens
gaggaagtcccttta

SEQ ID NO: 153940 - DNA, 15 bp, Homo sapiens
aggaagtccctttaa

SEQ ID NO: 153941 - DNA, 15 bp, Homo sapiens
ggaagtccctttaaa

SEQ ID NO: 153942 - DNA, 15 bp, Homo sapiens
gaagtccctttaaaa

SEQ ID NO: 153943 - DNA, 15 bp, Homo sapiens
aagtccctttaaaaa

SEQ ID NO: 153944 - DNA, 15 bp, Homo sapiens
agtccctttaaaaac

SEQ ID NO: 153945 - DNA, 15 bp, Homo sapiens
gtccctttaaaaaca

SEQ ID NO: 153946 - DNA, 15 bp, Homo sapiens
tccctttaaaaacaa

SEQ ID NO: 153947 - DNA, 15 bp, Homo sapiens
ccctttaaaaacaaa

SEQ ID NO: 153948 - DNA, 15 bp, Homo sapiens
cctttaaaaacaaag

SEQ ID NO: 153949 - DNA, 15 bp, Homo sapiens
ctttaaaaacaaagg

SEQ ID NO: 153950 - DNA, 15 bp, Homo sapiens
tttaaaaacaaagga

SEQ ID NO: 153951 - DNA, 15 bp, Homo sapiens
ttaaaaacaaaggag

SEQ ID NO: 153952 - DNA, 15 bp, Homo sapiens
taaaaacaaaggagt

SEQ ID NO: 153953 - DNA, 15 bp, Homo sapiens
aaaaacaaaggagtt

SEQ ID NO: 153954 - DNA, 15 bp, Homo sapiens
aaaacaaaggagttt

SEQ ID NO: 153955 - DNA, 15 bp, Homo sapiens
aaacaaaggagttta

SEQ ID NO: 153956 - DNA, 15 bp, Homo sapiens
aacaaaggagtttat

SEQ ID NO: 153957 - DNA, 15 bp, Homo sapiens
acaaaggagtttata

SEQ ID NO: 153958 - DNA, 15 bp, Homo sapiens
caaaggagtttatac

SEQ ID NO: 153959 - DNA, 15 bp, Homo sapiens
aaaggagtttatact

SEQ ID NO: 153960 - DNA, 15 bp, Homo sapiens
aaggagtttatactg

SEQ ID NO: 153961 - DNA, 15 bp, Homo sapiens
aggagtttatactga

SEQ ID NO: 153962 - DNA, 15 bp, Homo sapiens
ggagtttatactgag

SEQ ID NO: 153963 - DNA, 15 bp, Homo sapiens
gagtttatactgaga

SEQ ID NO: 153964 - DNA, 15 bp, Homo sapiens
agtttatactgagaa

SEQ ID NO: 153965 - DNA, 15 bp, Homo sapiens
gtttatactgagaaa

SEQ ID NO: 153966 - DNA, 15 bp, Homo sapiens
tttatactgagaaaa

SEQ ID NO: 153967 - DNA, 15 bp, Homo sapiens
ttatactgagaaaag

SEQ ID NO: 153968 - DNA, 15 bp, Homo sapiens
tatactgagaaaagc

SEQ ID NO: 153969 - DNA, 15 bp, Homo sapiens
atactgagaaaagca

SEQ ID NO: 153970 - DNA, 15 bp, Homo sapiens
tactgagaaaagcat

SEQ ID NO: 153971 - DNA, 15 bp, Homo sapiens
actgagaaaagcata

SEQ ID NO: 153972 - DNA, 15 bp, Homo sapiens
ctgagaaaagcataa

SEQ ID NO: 153973 - DNA, 15 bp, Homo sapiens
tgagaaaagcataaa

SEQ ID NO: 153974 - DNA, 15 bp, Homo sapiens
gagaaaagcataaac

SEQ ID NO: 153975 - DNA, 15 bp, Homo sapiens
agaaaagcataaaca

SEQ ID NO: 153976 - DNA, 15 bp, Homo sapiens
gaaaagcataaacag

SEQ ID NO: 153977 - DNA, 15 bp, Homo sapiens
aaaagcataaacagt

SEQ ID NO: 153978 - DNA, 15 bp, Homo sapiens
aaagcataaacagtg

SEQ ID NO: 153979 - DNA, 15 bp, Homo sapiens
aagcataaacagtga

SEQ ID NO: 153980 - DNA, 15 bp, Homo sapiens
agcataaacagtgat

SEQ ID NO: 153981 - DNA, 15 bp, Homo sapiens
gcataaacagtgatt

SEQ ID NO: 153982 - DNA, 15 bp, Homo sapiens
cataaacagtgattt

SEQ ID NO: 153983 - DNA, 15 bp, Homo sapiens
ataaacagtgatttg

SEQ ID NO: 153984 - DNA, 15 bp, Homo sapiens
taaacagtgatttgt

SEQ ID NO: 153985 - DNA, 15 bp, Homo sapiens
aaacagtgatttgta

SEQ ID NO: 153986 - DNA, 15 bp, Homo sapiens
aacagtgatttgtat

SEQ ID NO: 153987 - DNA, 15 bp, Homo sapiens
acagtgatttgtatg

SEQ ID NO: 153988 - DNA, 15 bp, Homo sapiens
cagtgatttgtatgg

SEQ ID NO: 153989 - DNA, 15 bp, Homo sapiens
agtgatttgtatgga

SEQ ID NO: 153990 - DNA, 15 bp, Homo sapiens
gtgatttgtatggat

SEQ ID NO: 153991 - DNA, 15 bp, Homo sapiens
tgatttgtatggatt

SEQ ID NO: 153992 - DNA, 15 bp, Homo sapiens
gatttgtatggattc

SEQ ID NO: 153993 - DNA, 15 bp, Homo sapiens
atttgtatggattca

SEQ ID NO: 153994 - DNA, 15 bp, Homo sapiens
tttgtatggattcac

SEQ ID NO: 153995 - DNA, 15 bp, Homo sapiens
ttgtatggattcaca

SEQ ID NO: 153996 - DNA, 15 bp, Homo sapiens
tgtatggattcacac

SEQ ID NO: 153997 - DNA, 15 bp, Homo sapiens
gtatggattcacact

SEQ ID NO: 153998 - DNA, 15 bp, Homo sapiens
tatggattcacactg

SEQ ID NO: 153999 - DNA, 15 bp, Homo sapiens
atggattcacactga

SEQ ID NO: 154000 - DNA, 15 bp, Homo sapiens
tggattcacactgac

SEQ ID NO: 154001 - DNA, 15 bp, Homo sapiens
ggattcacactgact

SEQ ID NO: 154002 - DNA, 15 bp, Homo sapiens
gattcacactgacta

SEQ ID NO: 154003 - DNA, 15 bp, Homo sapiens
attcacactgactaa

SEQ ID NO: 154004 - DNA, 15 bp, Homo sapiens
ttcacactgactaat

SEQ ID NO: 154005 - DNA, 15 bp, Homo sapiens
tcacactgactaata

SEQ ID NO: 154006 - DNA, 15 bp, Homo sapiens
cacactgactaatat

SEQ ID NO: 154007 - DNA, 15 bp, Homo sapiens
acactgactaatata

SEQ ID NO: 154008 - DNA, 15 bp, Homo sapiens
cactgactaatatag

SEQ ID NO: 154009 - DNA, 15 bp, Homo sapiens
actgactaatatagc

SEQ ID NO: 154010 - DNA, 15 bp, Homo sapiens
ctgactaatatagct

SEQ ID NO: 154011 - DNA, 15 bp, Homo sapiens
tgactaatatagctc

SEQ ID NO: 154012 - DNA, 15 bp, Homo sapiens
gactaatatagctca

SEQ ID NO: 154013 - DNA, 15 bp, Homo sapiens
actaatatagctcat

SEQ ID NO: 154014 - DNA, 15 bp, Homo sapiens
ctaatatagctcatg

SEQ ID NO: 154015 - DNA, 15 bp, Homo sapiens
taatatagctcatgc

SEQ ID NO: 154016 - DNA, 15 bp, Homo sapiens
aatatagctcatgcc

SEQ ID NO: 154017 - DNA, 15 bp, Homo sapiens
atatagctcatgcca

SEQ ID NO: 154018 - DNA, 15 bp, Homo sapiens
tatagctcatgccat

SEQ ID NO: 154019 - DNA, 15 bp, Homo sapiens
atagctcatgccatt

SEQ ID NO: 154020 - DNA, 15 bp, Homo sapiens
tagctcatgccatta

SEQ ID NO: 154021 - DNA, 15 bp, Homo sapiens
agctcatgccattaa

SEQ ID NO: 154022 - DNA, 15 bp, Homo sapiens
gctcatgccattaaa

SEQ ID NO: 154023 - DNA, 15 bp, Homo sapiens
ctcatgccattaaag

SEQ ID NO: 154024 - DNA, 15 bp, Homo sapiens
tcatgccattaaagt

SEQ ID NO: 154025 - DNA, 15 bp, Homo sapiens
catgccattaaagtg

SEQ ID NO: 154026 - DNA, 15 bp, Homo sapiens
atgccattaaagtgg

SEQ ID NO: 154027 - DNA, 15 bp, Homo sapiens
tgccattaaagtggg

SEQ ID NO: 154028 - DNA, 15 bp, Homo sapiens
gccattaaagtgggg

SEQ ID NO: 154029 - DNA, 15 bp, Homo sapiens
ccattaaagtggggt

SEQ ID NO: 154030 - DNA, 15 bp, Homo sapiens
cattaaagtggggtc

SEQ ID NO: 154031 - DNA, 15 bp, Homo sapiens
attaaagtggggtct

SEQ ID NO: 154032 - DNA, 15 bp, Homo sapiens
ttaaagtggggtctc

SEQ ID NO: 154033 - DNA, 15 bp, Homo sapiens
taaagtggggtctct

SEQ ID NO: 154034 - DNA, 15 bp, Homo sapiens
aaagtggggtctctt

SEQ ID NO: 154035 - DNA, 15 bp, Homo sapiens
aagtggggtctcttc

SEQ ID NO: 154036 - DNA, 15 bp, Homo sapiens
agtggggtctcttct

SEQ ID NO: 154037 - DNA, 15 bp, Homo sapiens
gtggggtctcttctc

SEQ ID NO: 154038 - DNA, 15 bp, Homo sapiens
tggggtctcttctct

SEQ ID NO: 154039 - DNA, 15 bp, Homo sapiens
ggggtctcttctcta

SEQ ID NO: 154040 - DNA, 15 bp, Homo sapiens
gggtctcttctctaa

SEQ ID NO: 154041 - DNA, 15 bp, Homo sapiens
ggtctcttctctaaa

SEQ ID NO: 154042 - DNA, 15 bp, Homo sapiens
gtctcttctctaaag

SEQ ID NO: 154043 - DNA, 15 bp, Homo sapiens
tctcttctctaaagg

SEQ ID NO: 154044 - DNA, 15 bp, Homo sapiens
ctcttctctaaagga

SEQ ID NO: 154045 - DNA, 15 bp, Homo sapiens
tcttctctaaaggag

SEQ ID NO: 154046 - DNA, 15 bp, Homo sapiens
cttctctaaaggagg

SEQ ID NO: 154047 - DNA, 15 bp, Homo sapiens
ttctctaaaggaggg

SEQ ID NO: 154048 - DNA, 15 bp, Homo sapiens
tctctaaaggagggt

SEQ ID NO: 154049 - DNA, 15 bp, Homo sapiens
ctctaaaggagggtt

SEQ ID NO: 154050 - DNA, 15 bp, Homo sapiens
tctaaaggagggtta

SEQ ID NO: 154051 - DNA, 15 bp, Homo sapiens
ctaaaggagggttat

SEQ ID NO: 154052 - DNA, 15 bp, Homo sapiens
taaaggagggttata

SEQ ID NO: 154053 - DNA, 15 bp, Homo sapiens
aaaggagggttatat

SEQ ID NO: 154054 - DNA, 15 bp, Homo sapiens
aaggagggttatatg

SEQ ID NO: 154055 - DNA, 15 bp, Homo sapiens
aggagggttatatga

SEQ ID NO: 154056 - DNA, 15 bp, Homo sapiens
ggagggttatatgat

SEQ ID NO: 154057 - DNA, 15 bp, Homo sapiens
gagggttatatgatc

SEQ ID NO: 154058 - DNA, 15 bp, Homo sapiens
agggttatatgatct

SEQ ID NO: 154059 - DNA, 15 bp, Homo sapiens
gggttatatgatcta

SEQ ID NO: 154060 - DNA, 15 bp, Homo sapiens
ggttatatgatctag

SEQ ID NO: 154061 - DNA, 15 bp, Homo sapiens
gttatatgatctagc

SEQ ID NO: 154062 - DNA, 15 bp, Homo sapiens
ttatatgatctagcc

SEQ ID NO: 154063 - DNA, 15 bp, Homo sapiens
tatatgatctagccc

SEQ ID NO: 154064 - DNA, 15 bp, Homo sapiens
atatgatctagcccc

SEQ ID NO: 154065 - DNA, 15 bp, Homo sapiens
tatgatctagccccg

SEQ ID NO: 154066 - DNA, 15 bp, Homo sapiens
atgatctagccccgt

SEQ ID NO: 154067 - DNA, 15 bp, Homo sapiens
tgatctagccccgta

SEQ ID NO: 154068 - DNA, 15 bp, Homo sapiens
gatctagccccgtag

SEQ ID NO: 154069 - DNA, 15 bp, Homo sapiens
atctagccccgtaga

SEQ ID NO: 154070 - DNA, 15 bp, Homo sapiens
tctagccccgtagac

SEQ ID NO: 154071 - DNA, 15 bp, Homo sapiens
ctagccccgtagacc

SEQ ID NO: 154072 - DNA, 15 bp, Homo sapiens
tagccccgtagacct

SEQ ID NO: 154073 - DNA, 15 bp, Homo sapiens
agccccgtagaccta

SEQ ID NO: 154074 - DNA, 15 bp, Homo sapiens
gccccgtagacctaa

SEQ ID NO: 154075 - DNA, 15 bp, Homo sapiens
ccccgtagacctaag

SEQ ID NO: 154076 - DNA, 15 bp, Homo sapiens
cccgtagacctaagt

SEQ ID NO: 154077 - DNA, 15 bp, Homo sapiens
ccgtagacctaagtg

SEQ ID NO: 154078 - DNA, 15 bp, Homo sapiens
cgtagacctaagtgt

SEQ ID NO: 154079 - DNA, 15 bp, Homo sapiens
gtagacctaagtgtg

SEQ ID NO: 154080 - DNA, 15 bp, Homo sapiens
tagacctaagtgtgg

SEQ ID NO: 154081 - DNA, 15 bp, Homo sapiens
agacctaagtgtggt

SEQ ID NO: 154082 - DNA, 15 bp, Homo sapiens
gacctaagtgtggtt

SEQ ID NO: 154083 - DNA, 15 bp, Homo sapiens
acctaagtgtggttt

SEQ ID NO: 154084 - DNA, 15 bp, Homo sapiens
cctaagtgtggtttc

SEQ ID NO: 154085 - DNA, 15 bp, Homo sapiens
ctaagtgtggtttca

SEQ ID NO: 154086 - DNA, 15 bp, Homo sapiens
taagtgtggtttcag

SEQ ID NO: 154087 - DNA, 15 bp, Homo sapiens
aagtgtggtttcaga

SEQ ID NO: 154088 - DNA, 15 bp, Homo sapiens
agtgtggtttcagac

SEQ ID NO: 154089 - DNA, 15 bp, Homo sapiens
gtgtggtttcagacc

SEQ ID NO: 154090 - DNA, 15 bp, Homo sapiens
tgtggtttcagacct

SEQ ID NO: 154091 - DNA, 15 bp, Homo sapiens
gtggtttcagacctg

SEQ ID NO: 154092 - DNA, 15 bp, Homo sapiens
tggtttcagacctgt

SEQ ID NO: 154093 - DNA, 15 bp, Homo sapiens
ggtttcagacctgtt

SEQ ID NO: 154094 - DNA, 15 bp, Homo sapiens
gtttcagacctgttc

SEQ ID NO: 154095 - DNA, 15 bp, Homo sapiens
tttcagacctgttct

SEQ ID NO: 154096 - DNA, 15 bp, Homo sapiens
ttcagacctgttctt

SEQ ID NO: 154097 - DNA, 15 bp, Homo sapiens
tcagacctgttcttc

SEQ ID NO: 154098 - DNA, 15 bp, Homo sapiens
cagacctgttcttcc

SEQ ID NO: 154099 - DNA, 15 bp, Homo sapiens
agacctgttcttcct

SEQ ID NO: 154100 - DNA, 15 bp, Homo sapiens
gacctgttcttcctg

SEQ ID NO: 154101 - DNA, 15 bp, Homo sapiens
acctgttcttcctgg

SEQ ID NO: 154102 - DNA, 15 bp, Homo sapiens
cctgttcttcctggt

SEQ ID NO: 154103 - DNA, 15 bp, Homo sapiens
ctgttcttcctggtc

SEQ ID NO: 154104 - DNA, 15 bp, Homo sapiens
tgttcttcctggtcc

SEQ ID NO: 154105 - DNA, 15 bp, Homo sapiens
gttcttcctggtcct

SEQ ID NO: 154106 - DNA, 15 bp, Homo sapiens
ttcttcctggtcctc

SEQ ID NO: 154107 - DNA, 15 bp, Homo sapiens
tcttcctggtcctct

SEQ ID NO: 154108 - DNA, 15 bp, Homo sapiens
cttcctggtcctctc

SEQ ID NO: 154109 - DNA, 15 bp, Homo sapiens
ttcctggtcctctcc

SEQ ID NO: 154110 - DNA, 15 bp, Homo sapiens
tcctggtcctctcct

SEQ ID NO: 154111 - DNA, 15 bp, Homo sapiens
cctggtcctctcctt

SEQ ID NO: 154112 - DNA, 15 bp, Homo sapiens
ctggtcctctccttg

SEQ ID NO: 154113 - DNA, 15 bp, Homo sapiens
tggtcctctccttgg

SEQ ID NO: 154114 - DNA, 15 bp, Homo sapiens
ggtcctctccttgga

SEQ ID NO: 154115 - DNA, 15 bp, Homo sapiens
gtcctctccttggaa

SEQ ID NO: 154116 - DNA, 15 bp, Homo sapiens
tcctctccttggaat

SEQ ID NO: 154117 - DNA, 15 bp, Homo sapiens
cctctccttggaatc

SEQ ID NO: 154118 - DNA, 15 bp, Homo sapiens
ctctccttggaatcc

SEQ ID NO: 154119 - DNA, 15 bp, Homo sapiens
tctccttggaatcca

SEQ ID NO: 154120 - DNA, 15 bp, Homo sapiens
ctccttggaatccat

SEQ ID NO: 154121 - DNA, 15 bp, Homo sapiens
tccttggaatccata

SEQ ID NO: 154122 - DNA, 15 bp, Homo sapiens
ccttggaatccatat

SEQ ID NO: 154123 - DNA, 15 bp, Homo sapiens
cttggaatccatatt

SEQ ID NO: 154124 - DNA, 15 bp, Homo sapiens
ttggaatccatattt

SEQ ID NO: 154125 - DNA, 15 bp, Homo sapiens
tggaatccatatttc

SEQ ID NO: 154126 - DNA, 15 bp, Homo sapiens
ggaatccatatttct

SEQ ID NO: 154127 - DNA, 15 bp, Homo sapiens
gaatccatatttcta

SEQ ID NO: 154128 - DNA, 15 bp, Homo sapiens
aatccatatttctac

SEQ ID NO: 154129 - DNA, 15 bp, Homo sapiens
atccatatttctact

SEQ ID NO: 154130 - DNA, 15 bp, Homo sapiens
tccatatttctacta

SEQ ID NO: 154131 - DNA, 15 bp, Homo sapiens
ccatatttctactag

SEQ ID NO: 154132 - DNA, 15 bp, Homo sapiens
catatttctactagt

SEQ ID NO: 154133 - DNA, 15 bp, Homo sapiens
atatttctactagtt

SEQ ID NO: 154134 - DNA, 15 bp, Homo sapiens
tatttctactagttg

SEQ ID NO: 154135 - DNA, 15 bp, Homo sapiens
atttctactagttgg

SEQ ID NO: 154136 - DNA, 15 bp, Homo sapiens
tttctactagttgga

SEQ ID NO: 154137 - DNA, 15 bp, Homo sapiens
ttctactagttggac

SEQ ID NO: 154138 - DNA, 15 bp, Homo sapiens
tctactagttggact

SEQ ID NO: 154139 - DNA, 15 bp, Homo sapiens
ctactagttggactt

SEQ ID NO: 154140 - DNA, 15 bp, Homo sapiens
tactagttggacttt

SEQ ID NO: 154141 - DNA, 15 bp, Homo sapiens
actagttggactttt

SEQ ID NO: 154142 - DNA, 15 bp, Homo sapiens
ctagttggacttttt

SEQ ID NO: 154143 - DNA, 15 bp, Homo sapiens
tagttggactttttc

SEQ ID NO: 154144 - DNA, 15 bp, Homo sapiens
agttggactttttct

SEQ ID NO: 154145 - DNA, 15 bp, Homo sapiens
gttggactttttctg

SEQ ID NO: 154146 - DNA, 15 bp, Homo sapiens
ttggactttttctgt

SEQ ID NO: 154147 - DNA, 15 bp, Homo sapiens
tggactttttctgtt

SEQ ID NO: 154148 - DNA, 15 bp, Homo sapiens
ggactttttctgttt

SEQ ID NO: 154149 - DNA, 15 bp, Homo sapiens
gactttttctgtttg

SEQ ID NO: 154150 - DNA, 15 bp, Homo sapiens
actttttctgtttgt

SEQ ID NO: 154151 - DNA, 15 bp, Homo sapiens
ctttttctgtttgtc

SEQ ID NO: 154152 - DNA, 15 bp, Homo sapiens
tttttctgtttgtct

SEQ ID NO: 154153 - DNA, 15 bp, Homo sapiens
ttttctgtttgtctg

SEQ ID NO: 154154 - DNA, 15 bp, Homo sapiens
tttctgtttgtctgg

SEQ ID NO: 154155 - DNA, 15 bp, Homo sapiens
ttctgtttgtctggc

SEQ ID NO: 154156 - DNA, 15 bp, Homo sapiens
tctgtttgtctggct

SEQ ID NO: 154157 - DNA, 15 bp, Homo sapiens
ctgtttgtctggctc

SEQ ID NO: 154158 - DNA, 15 bp, Homo sapiens
tgtttgtctggctct

SEQ ID NO: 154159 - DNA, 15 bp, Homo sapiens
gtttgtctggctctc

SEQ ID NO: 154160 - DNA, 15 bp, Homo sapiens
tttgtctggctctca

SEQ ID NO: 154161 - DNA, 15 bp, Homo sapiens
ttgtctggctctcag

SEQ ID NO: 154162 - DNA, 15 bp, Homo sapiens
tgtctggctctcaga

SEQ ID NO: 154163 - DNA, 15 bp, Homo sapiens
gtctggctctcagag

SEQ ID NO: 154164 - DNA, 15 bp, Homo sapiens
tctggctctcagagg

SEQ ID NO: 154165 - DNA, 15 bp, Homo sapiens
ctggctctcagagga

SEQ ID NO: 154166 - DNA, 15 bp, Homo sapiens
tggctctcagaggat

SEQ ID NO: 154167 - DNA, 15 bp, Homo sapiens
ggctctcagaggatt

SEQ ID NO: 154168 - DNA, 15 bp, Homo sapiens
gctctcagaggatta

SEQ ID NO: 154169 - DNA, 15 bp, Homo sapiens
ctctcagaggattat

SEQ ID NO: 154170 - DNA, 15 bp, Homo sapiens
tctcagaggattata

SEQ ID NO: 154171 - DNA, 15 bp, Homo sapiens
ctcagaggattatag

SEQ ID NO: 154172 - DNA, 15 bp, Homo sapiens
tcagaggattatagg

SEQ ID NO: 154173 - DNA, 15 bp, Homo sapiens
cagaggattatagga

SEQ ID NO: 154174 - DNA, 15 bp, Homo sapiens
agaggattataggag

SEQ ID NO: 154175 - DNA, 15 bp, Homo sapiens
gaggattataggagg

SEQ ID NO: 154176 - DNA, 15 bp, Homo sapiens
aggattataggaggc

SEQ ID NO: 154177 - DNA, 15 bp, Homo sapiens
ggattataggaggcc

SEQ ID NO: 154178 - DNA, 15 bp, Homo sapiens
gattataggaggccc

SEQ ID NO: 154179 - DNA, 15 bp, Homo sapiens
attataggaggccct

SEQ ID NO: 154180 - DNA, 15 bp, Homo sapiens
ttataggaggccctg

SEQ ID NO: 154181 - DNA, 15 bp, Homo sapiens
tataggaggccctgt

SEQ ID NO: 154182 - DNA, 15 bp, Homo sapiens
ataggaggccctgtg

SEQ ID NO: 154183 - DNA, 15 bp, Homo sapiens
taggaggccctgtga

SEQ ID NO: 154184 - DNA, 15 bp, Homo sapiens
aggaggccctgtgaa

SEQ ID NO: 154185 - DNA, 15 bp, Homo sapiens
ggaggccctgtgaag

SEQ ID NO: 154186 - DNA, 15 bp, Homo sapiens
gaggccctgtgaagt

SEQ ID NO: 154187 - DNA, 15 bp, Homo sapiens
aggccctgtgaagtg

SEQ ID NO: 154188 - DNA, 15 bp, Homo sapiens
ggccctgtgaagtga

SEQ ID NO: 154189 - DNA, 15 bp, Homo sapiens
gccctgtgaagtgac

SEQ ID NO: 154190 - DNA, 15 bp, Homo sapiens
ccctgtgaagtgact

SEQ ID NO: 154191 - DNA, 15 bp, Homo sapiens
cctgtgaagtgactc

SEQ ID NO: 154192 - DNA, 15 bp, Homo sapiens
ctgtgaagtgactca

SEQ ID NO: 154193 - DNA, 15 bp, Homo sapiens
tgtgaagtgactcag

SEQ ID NO: 154194 - DNA, 15 bp, Homo sapiens
gtgaagtgactcagt

SEQ ID NO: 154195 - DNA, 15 bp, Homo sapiens
tgaagtgactcagtg

SEQ ID NO: 154196 - DNA, 15 bp, Homo sapiens
gaagtgactcagtga

SEQ ID NO: 154197 - DNA, 15 bp, Homo sapiens
aagtgactcagtgaa

SEQ ID NO: 154198 - DNA, 15 bp, Homo sapiens
agtgactcagtgaat

SEQ ID NO: 154199 - DNA, 15 bp, Homo sapiens
gtgactcagtgaatt

SEQ ID NO: 154200 - DNA, 15 bp, Homo sapiens
tgactcagtgaattt

SEQ ID NO: 154201 - DNA, 15 bp, Homo sapiens
gactcagtgaatttt

SEQ ID NO: 154202 - DNA, 15 bp, Homo sapiens
actcagtgaattttg

SEQ ID NO: 154203 - DNA, 15 bp, Homo sapiens
ctcagtgaattttga

SEQ ID NO: 154204 - DNA, 15 bp, Homo sapiens
tcagtgaattttgat

SEQ ID NO: 154205 - DNA, 15 bp, Homo sapiens
cagtgaattttgatt

SEQ ID NO: 154206 - DNA, 15 bp, Homo sapiens
agtgaattttgattt

SEQ ID NO: 154207 - DNA, 15 bp, Homo sapiens
gtgaattttgatttg

SEQ ID NO: 154208 - DNA, 15 bp, Homo sapiens
tgaattttgatttgt

SEQ ID NO: 154209 - DNA, 15 bp, Homo sapiens
gaattttgatttgtg

SEQ ID NO: 154210 - DNA, 15 bp, Homo sapiens
aattttgatttgtgg

SEQ ID NO: 154211 - DNA, 15 bp, Homo sapiens
attttgatttgtggg

SEQ ID NO: 154212 - DNA, 15 bp, Homo sapiens
ttttgatttgtgggc

SEQ ID NO: 154213 - DNA, 15 bp, Homo sapiens
tttgatttgtgggca

SEQ ID NO: 154214 - DNA, 15 bp, Homo sapiens
ttgatttgtgggcaa

SEQ ID NO: 154215 - DNA, 15 bp, Homo sapiens
tgatttgtgggcaag

SEQ ID NO: 154216 - DNA, 15 bp, Homo sapiens
gatttgtgggcaagt

SEQ ID NO: 154217 - DNA, 15 bp, Homo sapiens
atttgtgggcaagta

SEQ ID NO: 154218 - DNA, 15 bp, Homo sapiens
tttgtgggcaagtag

SEQ ID NO: 154219 - DNA, 15 bp, Homo sapiens
ttgtgggcaagtaga

SEQ ID NO: 154220 - DNA, 15 bp, Homo sapiens
tgtgggcaagtagat

SEQ ID NO: 154221 - DNA, 15 bp, Homo sapiens
gtgggcaagtagatg

SEQ ID NO: 154222 - DNA, 15 bp, Homo sapiens
tgggcaagtagatgg

SEQ ID NO: 154223 - DNA, 15 bp, Homo sapiens
gggcaagtagatggt

SEQ ID NO: 154224 - DNA, 15 bp, Homo sapiens
ggcaagtagatggtt

SEQ ID NO: 154225 - DNA, 15 bp, Homo sapiens
gcaagtagatggttc

SEQ ID NO: 154226 - DNA, 15 bp, Homo sapiens
caagtagatggttcc

SEQ ID NO: 154227 - DNA, 15 bp, Homo sapiens
aagtagatggttccc

SEQ ID NO: 154228 - DNA, 15 bp, Homo sapiens
agtagatggttccct

SEQ ID NO: 154229 - DNA, 15 bp, Homo sapiens
gtagatggttcccta

SEQ ID NO: 154230 - DNA, 15 bp, Homo sapiens
tagatggttccctag

SEQ ID NO: 154231 - DNA, 15 bp, Homo sapiens
agatggttccctagt

SEQ ID NO: 154232 - DNA, 15 bp, Homo sapiens
gatggttccctagtc

SEQ ID NO: 154233 - DNA, 15 bp, Homo sapiens
atggttccctagtct

SEQ ID NO: 154234 - DNA, 15 bp, Homo sapiens
tggttccctagtctg

SEQ ID NO: 154235 - DNA, 15 bp, Homo sapiens
ggttccctagtctga

SEQ ID NO: 154236 - DNA, 15 bp, Homo sapiens
gttccctagtctgaa

SEQ ID NO: 154237 - DNA, 15 bp, Homo sapiens
ttccctagtctgaaa

SEQ ID NO: 154238 - DNA, 15 bp, Homo sapiens
tccctagtctgaaat

SEQ ID NO: 154239 - DNA, 15 bp, Homo sapiens
ccctagtctgaaatt

SEQ ID NO: 154240 - DNA, 15 bp, Homo sapiens
cctagtctgaaattg

SEQ ID NO: 154241 - DNA, 15 bp, Homo sapiens
ctagtctgaaattga

SEQ ID NO: 154242 - DNA, 15 bp, Homo sapiens
tagtctgaaattgac

SEQ ID NO: 154243 - DNA, 15 bp, Homo sapiens
agtctgaaattgact

SEQ ID NO: 154244 - DNA, 15 bp, Homo sapiens
gtctgaaattgactt

SEQ ID NO: 154245 - DNA, 15 bp, Homo sapiens
tctgaaattgacttt

SEQ ID NO: 154246 - DNA, 15 bp, Homo sapiens
ctgaaattgactttg

SEQ ID NO: 154247 - DNA, 15 bp, Homo sapiens
tgaaattgactttgc

SEQ ID NO: 154248 - DNA, 15 bp, Homo sapiens
gaaattgactttgcc

SEQ ID NO: 154249 - DNA, 15 bp, Homo sapiens
aaattgactttgcct

SEQ ID NO: 154250 - DNA, 15 bp, Homo sapiens
aattgactttgcctt

SEQ ID NO: 154251 - DNA, 15 bp, Homo sapiens
attgactttgcctta

SEQ ID NO: 154252 - DNA, 15 bp, Homo sapiens
ttgactttgccttag

SEQ ID NO: 154253 - DNA, 15 bp, Homo sapiens
tgactttgccttagg

SEQ ID NO: 154254 - DNA, 15 bp, Homo sapiens
gactttgccttaggt

SEQ ID NO: 154255 - DNA, 15 bp, Homo sapiens
actttgccttaggtg

SEQ ID NO: 154256 - DNA, 15 bp, Homo sapiens
ctttgccttaggtgc

SEQ ID NO: 154257 - DNA, 15 bp, Homo sapiens
tttgccttaggtgct

SEQ ID NO: 154258 - DNA, 15 bp, Homo sapiens
ttgccttaggtgctt

SEQ ID NO: 154259 - DNA, 15 bp, Homo sapiens
tgccttaggtgcttc

SEQ ID NO: 154260 - DNA, 15 bp, Homo sapiens
gccttaggtgcttca

SEQ ID NO: 154261 - DNA, 15 bp, Homo sapiens
ccttaggtgcttcaa

SEQ ID NO: 154262 - DNA, 15 bp, Homo sapiens
cttaggtgcttcaat

SEQ ID NO: 154263 - DNA, 15 bp, Homo sapiens
ttaggtgcttcaatt

SEQ ID NO: 154264 - DNA, 15 bp, Homo sapiens
taggtgcttcaattc

SEQ ID NO: 154265 - DNA, 15 bp, Homo sapiens
aggtgcttcaattct

SEQ ID NO: 154266 - DNA, 15 bp, Homo sapiens
ggtgcttcaattctt

SEQ ID NO: 154267 - DNA, 15 bp, Homo sapiens
gtgcttcaattcttc

SEQ ID NO: 154268 - DNA, 15 bp, Homo sapiens
tgcttcaattcttca

SEQ ID NO: 154269 - DNA, 15 bp, Homo sapiens
gcttcaattcttcat

SEQ ID NO: 154270 - DNA, 15 bp, Homo sapiens
cttcaattcttcata

SEQ ID NO: 154271 - DNA, 15 bp, Homo sapiens
ttcaattcttcataa

SEQ ID NO: 154272 - DNA, 15 bp, Homo sapiens
tcaattcttcataag

SEQ ID NO: 154273 - DNA, 15 bp, Homo sapiens
caattcttcataagc

SEQ ID NO: 154274 - DNA, 15 bp, Homo sapiens
aattcttcataagct

SEQ ID NO: 154275 - DNA, 15 bp, Homo sapiens
attcttcataagctc

SEQ ID NO: 154276 - DNA, 15 bp, Homo sapiens
ttcttcataagctcc

SEQ ID NO: 154277 - DNA, 15 bp, Homo sapiens
tcttcataagctccc

SEQ ID NO: 154278 - DNA, 15 bp, Homo sapiens
cttcataagctccca

SEQ ID NO: 154279 - DNA, 15 bp, Homo sapiens
ttcataagctcccag

SEQ ID NO: 154280 - DNA, 15 bp, Homo sapiens
tcataagctcccagt

SEQ ID NO: 154281 - DNA, 15 bp, Homo sapiens
cataagctcccagtt

SEQ ID NO: 154282 - DNA, 15 bp, Homo sapiens
ataagctcccagttc

SEQ ID NO: 154283 - DNA, 15 bp, Homo sapiens
taagctcccagttct

SEQ ID NO: 154284 - DNA, 15 bp, Homo sapiens
aagctcccagttctt

SEQ ID NO: 154285 - DNA, 15 bp, Homo sapiens
agctcccagttctta

SEQ ID NO: 154286 - DNA, 15 bp, Homo sapiens
gctcccagttcttaa

SEQ ID NO: 154287 - DNA, 15 bp, Homo sapiens
ctcccagttcttaaa

SEQ ID NO: 154288 - DNA, 15 bp, Homo sapiens
tcccagttcttaaag

SEQ ID NO: 154289 - DNA, 15 bp, Homo sapiens
cccagttcttaaagg

SEQ ID NO: 154290 - DNA, 15 bp, Homo sapiens
ccagttcttaaagga

SEQ ID NO: 154291 - DNA, 15 bp, Homo sapiens
cagttcttaaaggac

SEQ ID NO: 154292 - DNA, 15 bp, Homo sapiens
agttcttaaaggaca

SEQ ID NO: 154293 - DNA, 15 bp, Homo sapiens
gttcttaaaggacaa

SEQ ID NO: 154294 - DNA, 15 bp, Homo sapiens
ttcttaaaggacaag

SEQ ID NO: 154295 - DNA, 15 bp, Homo sapiens
tcttaaaggacaaga

SEQ ID NO: 154296 - DNA, 15 bp, Homo sapiens
cttaaaggacaagat

SEQ ID NO: 154297 - DNA, 15 bp, Homo sapiens
ttaaaggacaagatc

SEQ ID NO: 154298 - DNA, 15 bp, Homo sapiens
taaaggacaagatcc

SEQ ID NO: 154299 - DNA, 15 bp, Homo sapiens
aaaggacaagatcct

SEQ ID NO: 154300 - DNA, 15 bp, Homo sapiens
aaggacaagatcctt

SEQ ID NO: 154301 - DNA, 15 bp, Homo sapiens
aggacaagatccttg

SEQ ID NO: 154302 - DNA, 15 bp, Homo sapiens
ggacaagatccttgt

SEQ ID NO: 154303 - DNA, 15 bp, Homo sapiens
gacaagatccttgta

SEQ ID NO: 154304 - DNA, 15 bp, Homo sapiens
acaagatccttgtaa

SEQ ID NO: 154305 - DNA, 15 bp, Homo sapiens
caagatccttgtaaa

SEQ ID NO: 154306 - DNA, 15 bp, Homo sapiens
aagatccttgtaaac

SEQ ID NO: 154307 - DNA, 15 bp, Homo sapiens
agatccttgtaaaca

SEQ ID NO: 154308 - DNA, 15 bp, Homo sapiens
gatccttgtaaacat

SEQ ID NO: 154309 - DNA, 15 bp, Homo sapiens
atccttgtaaacatg

SEQ ID NO: 154310 - DNA, 15 bp, Homo sapiens
tccttgtaaacatgg

SEQ ID NO: 154311 - DNA, 15 bp, Homo sapiens
ccttgtaaacatggc

SEQ ID NO: 154312 - DNA, 15 bp, Homo sapiens
cttgtaaacatggca

SEQ ID NO: 154313 - DNA, 15 bp, Homo sapiens
ttgtaaacatggcaa

SEQ ID NO: 154314 - DNA, 15 bp, Homo sapiens
tgtaaacatggcaat

SEQ ID NO: 154315 - DNA, 15 bp, Homo sapiens
gtaaacatggcaatg

SEQ ID NO: 154316 - DNA, 15 bp, Homo sapiens
taaacatggcaatgg

SEQ ID NO: 154317 - DNA, 15 bp, Homo sapiens
aaacatggcaatggc

SEQ ID NO: 154318 - DNA, 15 bp, Homo sapiens
aacatggcaatggca

SEQ ID NO: 154319 - DNA, 15 bp, Homo sapiens
acatggcaatggcat

SEQ ID NO: 154320 - DNA, 15 bp, Homo sapiens
catggcaatggcatt

SEQ ID NO: 154321 - DNA, 15 bp, Homo sapiens
atggcaatggcattc

SEQ ID NO: 154322 - DNA, 15 bp, Homo sapiens
tggcaatggcattca

SEQ ID NO: 154323 - DNA, 15 bp, Homo sapiens
ggcaatggcattcat

SEQ ID NO: 154324 - DNA, 15 bp, Homo sapiens
gcaatggcattcatt

SEQ ID NO: 154325 - DNA, 15 bp, Homo sapiens
caatggcattcatta

SEQ ID NO: 154326 - DNA, 15 bp, Homo sapiens
aatggcattcattag

SEQ ID NO: 154327 - DNA, 15 bp, Homo sapiens
atggcattcattagg

SEQ ID NO: 154328 - DNA, 15 bp, Homo sapiens
tggcattcattagga

SEQ ID NO: 154329 - DNA, 15 bp, Homo sapiens
ggcattcattaggaa

SEQ ID NO: 154330 - DNA, 15 bp, Homo sapiens
gcattcattaggaat

SEQ ID NO: 154331 - DNA, 15 bp, Homo sapiens
cattcattaggaatc

SEQ ID NO: 154332 - DNA, 15 bp, Homo sapiens
attcattaggaatct

SEQ ID NO: 154333 - DNA, 15 bp, Homo sapiens
ttcattaggaatcta

SEQ ID NO: 154334 - DNA, 15 bp, Homo sapiens
tcattaggaatctag

SEQ ID NO: 154335 - DNA, 15 bp, Homo sapiens
cattaggaatctagc

SEQ ID NO: 154336 - DNA, 15 bp, Homo sapiens
attaggaatctagct

SEQ ID NO: 154337 - DNA, 15 bp, Homo sapiens
ttaggaatctagctg

SEQ ID NO: 154338 - DNA, 15 bp, Homo sapiens
taggaatctagctgg

SEQ ID NO: 154339 - DNA, 15 bp, Homo sapiens
aggaatctagctggg

SEQ ID NO: 154340 - DNA, 15 bp, Homo sapiens
ggaatctagctggga

SEQ ID NO: 154341 - DNA, 15 bp, Homo sapiens
gaatctagctgggaa

SEQ ID NO: 154342 - DNA, 15 bp, Homo sapiens
aatctagctgggaaa

SEQ ID NO: 154343 - DNA, 15 bp, Homo sapiens
atctagctgggaaaa

SEQ ID NO: 154344 - DNA, 15 bp, Homo sapiens
tctagctgggaaaat

SEQ ID NO: 154345 - DNA, 15 bp, Homo sapiens
ctagctgggaaaatc

SEQ ID NO: 154346 - DNA, 15 bp, Homo sapiens
tagctgggaaaatcc

SEQ ID NO: 154347 - DNA, 15 bp, Homo sapiens
agctgggaaaatcca

SEQ ID NO: 154348 - DNA, 15 bp, Homo sapiens
gctgggaaaatccag

SEQ ID NO: 154349 - DNA, 15 bp, Homo sapiens
ctgggaaaatccagt

SEQ ID NO: 154350 - DNA, 15 bp, Homo sapiens
tgggaaaatccagtg

SEQ ID NO: 154351 - DNA, 15 bp, Homo sapiens
gggaaaatccagtgt

SEQ ID NO: 154352 - DNA, 15 bp, Homo sapiens
ggaaaatccagtgtg

SEQ ID NO: 154353 - DNA, 15 bp, Homo sapiens
gaaaatccagtgtgt

SEQ ID NO: 154354 - DNA, 15 bp, Homo sapiens
aaaatccagtgtgta

SEQ ID NO: 154355 - DNA, 15 bp, Homo sapiens
aaatccagtgtgtat

SEQ ID NO: 154356 - DNA, 15 bp, Homo sapiens
aatccagtgtgtatg

SEQ ID NO: 154357 - DNA, 15 bp, Homo sapiens
atccagtgtgtatgc

SEQ ID NO: 154358 - DNA, 15 bp, Homo sapiens
tccagtgtgtatgct

SEQ ID NO: 154359 - DNA, 15 bp, Homo sapiens
ccagtgtgtatgctt

SEQ ID NO: 154360 - DNA, 15 bp, Homo sapiens
cagtgtgtatgcttg

SEQ ID NO: 154361 - DNA, 15 bp, Homo sapiens
agtgtgtatgcttgg

SEQ ID NO: 154362 - DNA, 15 bp, Homo sapiens
gtgtgtatgcttgga

SEQ ID NO: 154363 - DNA, 15 bp, Homo sapiens
tgtgtatgcttggaa

SEQ ID NO: 154364 - DNA, 15 bp, Homo sapiens
gtgtatgcttggaaa

SEQ ID NO: 154365 - DNA, 15 bp, Homo sapiens
tgtatgcttggaaat

SEQ ID NO: 154366 - DNA, 15 bp, Homo sapiens
gtatgcttggaaatg

SEQ ID NO: 154367 - DNA, 15 bp, Homo sapiens
tatgcttggaaatga

SEQ ID NO: 154368 - DNA, 15 bp, Homo sapiens
atgcttggaaatgag

SEQ ID NO: 154369 - DNA, 15 bp, Homo sapiens
tgcttggaaatgagg

SEQ ID NO: 154370 - DNA, 15 bp, Homo sapiens
gcttggaaatgaggg

SEQ ID NO: 154371 - DNA, 15 bp, Homo sapiens
cttggaaatgaggga

SEQ ID NO: 154372 - DNA, 15 bp, Homo sapiens
ttggaaatgagggat

SEQ ID NO: 154373 - DNA, 15 bp, Homo sapiens
tggaaatgagggatc

SEQ ID NO: 154374 - DNA, 15 bp, Homo sapiens
ggaaatgagggatct

SEQ ID NO: 154375 - DNA, 15 bp, Homo sapiens
gaaatgagggatctg

SEQ ID NO: 154376 - DNA, 15 bp, Homo sapiens
aaatgagggatctgg

SEQ ID NO: 154377 - DNA, 15 bp, Homo sapiens
aatgagggatctggg

SEQ ID NO: 154378 - DNA, 15 bp, Homo sapiens
atgagggatctgggg

SEQ ID NO: 154379 - DNA, 15 bp, Homo sapiens
tgagggatctggggc

SEQ ID NO: 154380 - DNA, 15 bp, Homo sapiens
gagggatctggggct

SEQ ID NO: 154381 - DNA, 15 bp, Homo sapiens
agggatctggggctg

SEQ ID NO: 154382 - DNA, 15 bp, Homo sapiens
gggatctggggctgg

SEQ ID NO: 154383 - DNA, 15 bp, Homo sapiens
ggatctggggctgga

SEQ ID NO: 154384 - DNA, 15 bp, Homo sapiens
gatctggggctggag

SEQ ID NO: 154385 - DNA, 15 bp, Homo sapiens
atctggggctggaga

SEQ ID NO: 154386 - DNA, 15 bp, Homo sapiens
tctggggctggagag

SEQ ID NO: 154387 - DNA, 15 bp, Homo sapiens
ctggggctggagaga

SEQ ID NO: 154388 - DNA, 15 bp, Homo sapiens
tggggctggagagaa

SEQ ID NO: 154389 - DNA, 15 bp, Homo sapiens
ggggctggagagaaa

SEQ ID NO: 154390 - DNA, 15 bp, Homo sapiens
gggctggagagaaag

SEQ ID NO: 154391 - DNA, 15 bp, Homo sapiens
ggctggagagaaagg

SEQ ID NO: 154392 - DNA, 15 bp, Homo sapiens
gctggagagaaaggc

SEQ ID NO: 154393 - DNA, 15 bp, Homo sapiens
ctggagagaaaggca

SEQ ID NO: 154394 - DNA, 15 bp, Homo sapiens
tggagagaaaggcat

SEQ ID NO: 154395 - DNA, 15 bp, Homo sapiens
ggagagaaaggcatg

SEQ ID NO: 154396 - DNA, 15 bp, Homo sapiens
gagagaaaggcatgg

SEQ ID NO: 154397 - DNA, 15 bp, Homo sapiens
agagaaaggcatggg

SEQ ID NO: 154398 - DNA, 15 bp, Homo sapiens
gagaaaggcatgggc

SEQ ID NO: 154399 - DNA, 15 bp, Homo sapiens
agaaaggcatgggca

SEQ ID NO: 154400 - DNA, 15 bp, Homo sapiens
gaaaggcatgggcat

SEQ ID NO: 154401 - DNA, 15 bp, Homo sapiens
aaaggcatgggcatg

SEQ ID NO: 154402 - DNA, 15 bp, Homo sapiens
aaggcatgggcatgc

SEQ ID NO: 154403 - DNA, 15 bp, Homo sapiens
aggcatgggcatgcc

SEQ ID NO: 154404 - DNA, 15 bp, Homo sapiens
ggcatgggcatgcct

SEQ ID NO: 154405 - DNA, 15 bp, Homo sapiens
gcatgggcatgcctt

SEQ ID NO: 154406 - DNA, 15 bp, Homo sapiens
catgggcatgccttg

SEQ ID NO: 154407 - DNA, 15 bp, Homo sapiens
atgggcatgccttgg

SEQ ID NO: 154408 - DNA, 15 bp, Homo sapiens
tgggcatgccttgga

SEQ ID NO: 154409 - DNA, 15 bp, Homo sapiens
gggcatgccttggag

SEQ ID NO: 154410 - DNA, 15 bp, Homo sapiens
ggcatgccttggagg

SEQ ID NO: 154411 - DNA, 15 bp, Homo sapiens
gcatgccttggaggg

SEQ ID NO: 154412 - DNA, 15 bp, Homo sapiens
catgccttggaggga

SEQ ID NO: 154413 - DNA, 15 bp, Homo sapiens
atgccttggagggac

SEQ ID NO: 154414 - DNA, 15 bp, Homo sapiens
tgccttggagggact

SEQ ID NO: 154415 - DNA, 15 bp, Homo sapiens
gccttggagggactt

SEQ ID NO: 154416 - DNA, 15 bp, Homo sapiens
ccttggagggacttg

SEQ ID NO: 154417 - DNA, 15 bp, Homo sapiens
cttggagggacttgt

SEQ ID NO: 154418 - DNA, 15 bp, Homo sapiens
ttggagggacttgtg

SEQ ID NO: 154419 - DNA, 15 bp, Homo sapiens
tggagggacttgtgt

SEQ ID NO: 154420 - DNA, 15 bp, Homo sapiens
ggagggacttgtgtg

SEQ ID NO: 154421 - DNA, 15 bp, Homo sapiens
gagggacttgtgtgt

SEQ ID NO: 154422 - DNA, 15 bp, Homo sapiens
agggacttgtgtgtc

SEQ ID NO: 154423 - DNA, 15 bp, Homo sapiens
gggacttgtgtgtca

SEQ ID NO: 154424 - DNA, 15 bp, Homo sapiens
ggacttgtgtgtcaa

SEQ ID NO: 154425 - DNA, 15 bp, Homo sapiens
gacttgtgtgtcaag

SEQ ID NO: 154426 - DNA, 15 bp, Homo sapiens
acttgtgtgtcaagc

SEQ ID NO: 154427 - DNA, 15 bp, Homo sapiens
cttgtgtgtcaagct

SEQ ID NO: 154428 - DNA, 15 bp, Homo sapiens
ttgtgtgtcaagctg

SEQ ID NO: 154429 - DNA, 15 bp, Homo sapiens
tgtgtgtcaagctga

SEQ ID NO: 154430 - DNA, 15 bp, Homo sapiens
gtgtgtcaagctgag

SEQ ID NO: 154431 - DNA, 15 bp, Homo sapiens
tgtgtcaagctgagg

SEQ ID NO: 154432 - DNA, 15 bp, Homo sapiens
gtgtcaagctgagga

SEQ ID NO: 154433 - DNA, 15 bp, Homo sapiens
tgtcaagctgaggac

SEQ ID NO: 154434 - DNA, 15 bp, Homo sapiens
gtcaagctgaggacc

SEQ ID NO: 154435 - DNA, 15 bp, Homo sapiens
tcaagctgaggacct

SEQ ID NO: 154436 - DNA, 15 bp, Homo sapiens
caagctgaggacctt

SEQ ID NO: 154437 - DNA, 15 bp, Homo sapiens
aagctgaggaccttt

SEQ ID NO: 154438 - DNA, 15 bp, Homo sapiens
agctgaggaccttta

SEQ ID NO: 154439 - DNA, 15 bp, Homo sapiens
gctgaggacctttac

SEQ ID NO: 154440 - DNA, 15 bp, Homo sapiens
ctgaggacctttact

SEQ ID NO: 154441 - DNA, 15 bp, Homo sapiens
tgaggacctttactt

SEQ ID NO: 154442 - DNA, 15 bp, Homo sapiens
gaggacctttacttt

SEQ ID NO: 154443 - DNA, 15 bp, Homo sapiens
aggacctttacttta

SEQ ID NO: 154444 - DNA, 15 bp, Homo sapiens
ggacctttactttaa

SEQ ID NO: 154445 - DNA, 15 bp, Homo sapiens
gacctttactttaag

SEQ ID NO: 154446 - DNA, 15 bp, Homo sapiens
acctttactttaagc

SEQ ID NO: 154447 - DNA, 15 bp, Homo sapiens
cctttactttaagct

SEQ ID NO: 154448 - DNA, 15 bp, Homo sapiens
ctttactttaagctc

SEQ ID NO: 154449 - DNA, 15 bp, Homo sapiens
tttactttaagctct

SEQ ID NO: 154450 - DNA, 15 bp, Homo sapiens
ttactttaagctcta

SEQ ID NO: 154451 - DNA, 15 bp, Homo sapiens
tactttaagctctag

SEQ ID NO: 154452 - DNA, 15 bp, Homo sapiens
actttaagctctagg

SEQ ID NO: 154453 - DNA, 15 bp, Homo sapiens
ctttaagctctaggg

SEQ ID NO: 154454 - DNA, 15 bp, Homo sapiens
tttaagctctagggg

SEQ ID NO: 154455 - DNA, 15 bp, Homo sapiens
ttaagctctagggga

SEQ ID NO: 154456 - DNA, 15 bp, Homo sapiens
taagctctaggggac

SEQ ID NO: 154457 - DNA, 15 bp, Homo sapiens
aagctctaggggacc

SEQ ID NO: 154458 - DNA, 15 bp, Homo sapiens
agctctaggggacca

SEQ ID NO: 154459 - DNA, 15 bp, Homo sapiens
gctctaggggaccag

SEQ ID NO: 154460 - DNA, 15 bp, Homo sapiens
ctctaggggaccagg

SEQ ID NO: 154461 - DNA, 15 bp, Homo sapiens
tctaggggaccaggc

SEQ ID NO: 154462 - DNA, 15 bp, Homo sapiens
ctaggggaccaggca

SEQ ID NO: 154463 - DNA, 15 bp, Homo sapiens
taggggaccaggcaa

SEQ ID NO: 154464 - DNA, 15 bp, Homo sapiens
aggggaccaggcaag

SEQ ID NO: 154465 - DNA, 15 bp, Homo sapiens
ggggaccaggcaagg

SEQ ID NO: 154466 - DNA, 15 bp, Homo sapiens
gggaccaggcaaggg

SEQ ID NO: 154467 - DNA, 15 bp, Homo sapiens
ggaccaggcaagggg

SEQ ID NO: 154468 - DNA, 15 bp, Homo sapiens
gaccaggcaagggga

SEQ ID NO: 154469 - DNA, 15 bp, Homo sapiens
accaggcaaggggag

SEQ ID NO: 154470 - DNA, 15 bp, Homo sapiens
ccaggcaaggggaga

SEQ ID NO: 154471 - DNA, 15 bp, Homo sapiens
caggcaaggggagat

SEQ ID NO: 154472 - DNA, 15 bp, Homo sapiens
aggcaaggggagatg

SEQ ID NO: 154473 - DNA, 15 bp, Homo sapiens
ggcaaggggagatgt

SEQ ID NO: 154474 - DNA, 15 bp, Homo sapiens
gcaaggggagatgta

SEQ ID NO: 154475 - DNA, 15 bp, Homo sapiens
caaggggagatgtag

SEQ ID NO: 154476 - DNA, 15 bp, Homo sapiens
aaggggagatgtaga

SEQ ID NO: 154477 - DNA, 15 bp, Homo sapiens
aggggagatgtagat

SEQ ID NO: 154478 - DNA, 15 bp, Homo sapiens
ggggagatgtagata

SEQ ID NO: 154479 - DNA, 15 bp, Homo sapiens
gggagatgtagatac

SEQ ID NO: 154480 - DNA, 15 bp, Homo sapiens
ggagatgtagatacg

SEQ ID NO: 154481 - DNA, 15 bp, Homo sapiens
gagatgtagatacgt

SEQ ID NO: 154482 - DNA, 15 bp, Homo sapiens
agatgtagatacgtt

SEQ ID NO: 154483 - DNA, 15 bp, Homo sapiens
gatgtagatacgtta

SEQ ID NO: 154484 - DNA, 15 bp, Homo sapiens
atgtagatacgttac

SEQ ID NO: 154485 - DNA, 15 bp, Homo sapiens
tgtagatacgttact

SEQ ID NO: 154486 - DNA, 15 bp, Homo sapiens
gtagatacgttactc

SEQ ID NO: 154487 - DNA, 15 bp, Homo sapiens
tagatacgttactct

SEQ ID NO: 154488 - DNA, 15 bp, Homo sapiens
agatacgttactctg

SEQ ID NO: 154489 - DNA, 15 bp, Homo sapiens
gatacgttactctga

SEQ ID NO: 154490 - DNA, 15 bp, Homo sapiens
atacgttactctgat

SEQ ID NO: 154491 - DNA, 15 bp, Homo sapiens
tacgttactctgatg

SEQ ID NO: 154492 - DNA, 15 bp, Homo sapiens
acgttactctgatgg

SEQ ID NO: 154493 - DNA, 15 bp, Homo sapiens
cgttactctgatggg

SEQ ID NO: 154494 - DNA, 15 bp, Homo sapiens
gttactctgatgggg

SEQ ID NO: 154495 - DNA, 15 bp, Homo sapiens
ttactctgatggggt

SEQ ID NO: 154496 - DNA, 15 bp, Homo sapiens
tactctgatggggtg

SEQ ID NO: 154497 - DNA, 15 bp, Homo sapiens
actctgatggggtgg

SEQ ID NO: 154498 - DNA, 15 bp, Homo sapiens
ctctgatggggtgga

SEQ ID NO: 154499 - DNA, 15 bp, Homo sapiens
tctgatggggtggat

SEQ ID NO: 154500 - DNA, 15 bp, Homo sapiens
ctgatggggtggatg

SEQ ID NO: 154501 - DNA, 15 bp, Homo sapiens
tgatggggtggatga

SEQ ID NO: 154502 - DNA, 15 bp, Homo sapiens
gatggggtggatgaa

SEQ ID NO: 154503 - DNA, 15 bp, Homo sapiens
atggggtggatgaat

SEQ ID NO: 154504 - DNA, 15 bp, Homo sapiens
tggggtggatgaatt

SEQ ID NO: 154505 - DNA, 15 bp, Homo sapiens
ggggtggatgaattg

SEQ ID NO: 154506 - DNA, 15 bp, Homo sapiens
gggtggatgaattga

SEQ ID NO: 154507 - DNA, 15 bp, Homo sapiens
ggtggatgaattgaa

SEQ ID NO: 154508 - DNA, 15 bp, Homo sapiens
gtggatgaattgaag

SEQ ID NO: 154509 - DNA, 15 bp, Homo sapiens
tggatgaattgaaga

SEQ ID NO: 154510 - DNA, 15 bp, Homo sapiens
ggatgaattgaagaa

SEQ ID NO: 154511 - DNA, 15 bp, Homo sapiens
gatgaattgaagaag

SEQ ID NO: 154512 - DNA, 15 bp, Homo sapiens
atgaattgaagaagg

SEQ ID NO: 154513 - DNA, 15 bp, Homo sapiens
tgaattgaagaagga

SEQ ID NO: 154514 - DNA, 15 bp, Homo sapiens
gaattgaagaaggat

SEQ ID NO: 154515 - DNA, 15 bp, Homo sapiens
aattgaagaaggatg

SEQ ID NO: 154516 - DNA, 15 bp, Homo sapiens
attgaagaaggatga

SEQ ID NO: 154517 - DNA, 15 bp, Homo sapiens
ttgaagaaggatgag

SEQ ID NO: 154518 - DNA, 15 bp, Homo sapiens
tgaagaaggatgagg

SEQ ID NO: 154519 - DNA, 15 bp, Homo sapiens
gaagaaggatgaggc

SEQ ID NO: 154520 - DNA, 15 bp, Homo sapiens
aagaaggatgaggca

SEQ ID NO: 154521 - DNA, 15 bp, Homo sapiens
agaaggatgaggcaa

SEQ ID NO: 154522 - DNA, 15 bp, Homo sapiens
gaaggatgaggcaag

SEQ ID NO: 154523 - DNA, 15 bp, Homo sapiens
aaggatgaggcaaga

SEQ ID NO: 154524 - DNA, 15 bp, Homo sapiens
aggatgaggcaagaa

SEQ ID NO: 154525 - DNA, 15 bp, Homo sapiens
ggatgaggcaagaat

SEQ ID NO: 154526 - DNA, 15 bp, Homo sapiens
gatgaggcaagaatg

SEQ ID NO: 154527 - DNA, 15 bp, Homo sapiens
atgaggcaagaatga

SEQ ID NO: 154528 - DNA, 15 bp, Homo sapiens
tgaggcaagaatgaa

SEQ ID NO: 154529 - DNA, 15 bp, Homo sapiens
gaggcaagaatgaag

SEQ ID NO: 154530 - DNA, 15 bp, Homo sapiens
aggcaagaatgaagg

SEQ ID NO: 154531 - DNA, 15 bp, Homo sapiens
ggcaagaatgaaggc

SEQ ID NO: 154532 - DNA, 15 bp, Homo sapiens
gcaagaatgaaggca

SEQ ID NO: 154533 - DNA, 15 bp, Homo sapiens
caagaatgaaggcag

SEQ ID NO: 154534 - DNA, 15 bp, Homo sapiens
aagaatgaaggcaga

SEQ ID NO: 154535 - DNA, 15 bp, Homo sapiens
agaatgaaggcagag

SEQ ID NO: 154536 - DNA, 15 bp, Homo sapiens
gaatgaaggcagaga

SEQ ID NO: 154537 - DNA, 15 bp, Homo sapiens
aatgaaggcagagac

SEQ ID NO: 154538 - DNA, 15 bp, Homo sapiens
atgaaggcagagacc

SEQ ID NO: 154539 - DNA, 15 bp, Homo sapiens
tgaaggcagagacca

SEQ ID NO: 154540 - DNA, 15 bp, Homo sapiens
gaaggcagagaccag

SEQ ID NO: 154541 - DNA, 15 bp, Homo sapiens
aaggcagagaccagg

SEQ ID NO: 154542 - DNA, 15 bp, Homo sapiens
aggcagagaccaggg

SEQ ID NO: 154543 - DNA, 15 bp, Homo sapiens
ggcagagaccaggga

SEQ ID NO: 154544 - DNA, 15 bp, Homo sapiens
gcagagaccagggag

SEQ ID NO: 154545 - DNA, 15 bp, Homo sapiens
cagagaccagggagg

SEQ ID NO: 154546 - DNA, 15 bp, Homo sapiens
agagaccagggagga

SEQ ID NO: 154547 - DNA, 15 bp, Homo sapiens
gagaccagggaggag

SEQ ID NO: 154548 - DNA, 15 bp, Homo sapiens
agaccagggaggagg

SEQ ID NO: 154549 - DNA, 15 bp, Homo sapiens
gaccagggaggaggc

SEQ ID NO: 154550 - DNA, 15 bp, Homo sapiens
accagggaggaggct

SEQ ID NO: 154551 - DNA, 15 bp, Homo sapiens
ccagggaggaggctc

SEQ ID NO: 154552 - DNA, 15 bp, Homo sapiens
cagggaggaggctct

SEQ ID NO: 154553 - DNA, 15 bp, Homo sapiens
agggaggaggctctc

SEQ ID NO: 154554 - DNA, 15 bp, Homo sapiens
gggaggaggctctcc

SEQ ID NO: 154555 - DNA, 15 bp, Homo sapiens
ggaggaggctctcca

SEQ ID NO: 154556 - DNA, 15 bp, Homo sapiens
gaggaggctctccaa

SEQ ID NO: 154557 - DNA, 15 bp, Homo sapiens
aggaggctctccaag

SEQ ID NO: 154558 - DNA, 15 bp, Homo sapiens
ggaggctctccaagt

SEQ ID NO: 154559 - DNA, 15 bp, Homo sapiens
gaggctctccaagtg

SEQ ID NO: 154560 - DNA, 15 bp, Homo sapiens
aggctctccaagtgg

SEQ ID NO: 154561 - DNA, 15 bp, Homo sapiens
ggctctccaagtggc

SEQ ID NO: 154562 - DNA, 15 bp, Homo sapiens
gctctccaagtggcc

SEQ ID NO: 154563 - DNA, 15 bp, Homo sapiens
ctctccaagtggcca

SEQ ID NO: 154564 - DNA, 15 bp, Homo sapiens
tctccaagtggccaa

SEQ ID NO: 154565 - DNA, 15 bp, Homo sapiens
ctccaagtggccaag

SEQ ID NO: 154566 - DNA, 15 bp, Homo sapiens
tccaagtggccaagg

SEQ ID NO: 154567 - DNA, 15 bp, Homo sapiens
ccaagtggccaaggc

SEQ ID NO: 154568 - DNA, 15 bp, Homo sapiens
caagtggccaaggca

SEQ ID NO: 154569 - DNA, 15 bp, Homo sapiens
aagtggccaaggcat

SEQ ID NO: 154570 - DNA, 15 bp, Homo sapiens
agtggccaaggcata

SEQ ID NO: 154571 - DNA, 15 bp, Homo sapiens
gtggccaaggcataa

SEQ ID NO: 154572 - DNA, 15 bp, Homo sapiens
tggccaaggcataaa

SEQ ID NO: 154573 - DNA, 15 bp, Homo sapiens
ggccaaggcataaag

SEQ ID NO: 154574 - DNA, 15 bp, Homo sapiens
gccaaggcataaagc

SEQ ID NO: 154575 - DNA, 15 bp, Homo sapiens
ccaaggcataaagca

SEQ ID NO: 154576 - DNA, 15 bp, Homo sapiens
caaggcataaagcaa

SEQ ID NO: 154577 - DNA, 15 bp, Homo sapiens
aaggcataaagcaag

SEQ ID NO: 154578 - DNA, 15 bp, Homo sapiens
aggcataaagcaaga

SEQ ID NO: 154579 - DNA, 15 bp, Homo sapiens
ggcataaagcaagaa

SEQ ID NO: 154580 - DNA, 15 bp, Homo sapiens
gcataaagcaagaaa

SEQ ID NO: 154581 - DNA, 15 bp, Homo sapiens
cataaagcaagaaat

SEQ ID NO: 154582 - DNA, 15 bp, Homo sapiens
ataaagcaagaaatg

SEQ ID NO: 154583 - DNA, 15 bp, Homo sapiens
taaagcaagaaatga

SEQ ID NO: 154584 - DNA, 15 bp, Homo sapiens
aaagcaagaaatgag

SEQ ID NO: 154585 - DNA, 15 bp, Homo sapiens
aagcaagaaatgagg

SEQ ID NO: 154586 - DNA, 15 bp, Homo sapiens
agcaagaaatgaggc

SEQ ID NO: 154587 - DNA, 15 bp, Homo sapiens
gcaagaaatgaggcc

SEQ ID NO: 154588 - DNA, 15 bp, Homo sapiens
caagaaatgaggcct

SEQ ID NO: 154589 - DNA, 15 bp, Homo sapiens
aagaaatgaggcctg

SEQ ID NO: 154590 - DNA, 15 bp, Homo sapiens
agaaatgaggcctgg

SEQ ID NO: 154591 - DNA, 15 bp, Homo sapiens
gaaatgaggcctggt

SEQ ID NO: 154592 - DNA, 15 bp, Homo sapiens
aaatgaggcctggtg

SEQ ID NO: 154593 - DNA, 15 bp, Homo sapiens
aatgaggcctggtga

SEQ ID NO: 154594 - DNA, 15 bp, Homo sapiens
atgaggcctggtgac

SEQ ID NO: 154595 - DNA, 15 bp, Homo sapiens
tgaggcctggtgact

SEQ ID NO: 154596 - DNA, 15 bp, Homo sapiens
gaggcctggtgactg

SEQ ID NO: 154597 - DNA, 15 bp, Homo sapiens
aggcctggtgactgc

SEQ ID NO: 154598 - DNA, 15 bp, Homo sapiens
ggcctggtgactgct

SEQ ID NO: 154599 - DNA, 15 bp, Homo sapiens
gcctggtgactgctt

SEQ ID NO: 154600 - DNA, 15 bp, Homo sapiens
cctggtgactgctta

SEQ ID NO: 154601 - DNA, 15 bp, Homo sapiens
ctggtgactgcttag

SEQ ID NO: 154602 - DNA, 15 bp, Homo sapiens
tggtgactgcttagt

SEQ ID NO: 154603 - DNA, 15 bp, Homo sapiens
ggtgactgcttagtg

SEQ ID NO: 154604 - DNA, 15 bp, Homo sapiens
gtgactgcttagtgg

SEQ ID NO: 154605 - DNA, 15 bp, Homo sapiens
tgactgcttagtggc

SEQ ID NO: 154606 - DNA, 15 bp, Homo sapiens
gactgcttagtggca

SEQ ID NO: 154607 - DNA, 15 bp, Homo sapiens
actgcttagtggcag

SEQ ID NO: 154608 - DNA, 15 bp, Homo sapiens
ctgcttagtggcaga

SEQ ID NO: 154609 - DNA, 15 bp, Homo sapiens
tgcttagtggcagag

SEQ ID NO: 154610 - DNA, 15 bp, Homo sapiens
gcttagtggcagagc

SEQ ID NO: 154611 - DNA, 15 bp, Homo sapiens
cttagtggcagagca

SEQ ID NO: 154612 - DNA, 15 bp, Homo sapiens
ttagtggcagagcag

SEQ ID NO: 154613 - DNA, 15 bp, Homo sapiens
tagtggcagagcagt

SEQ ID NO: 154614 - DNA, 15 bp, Homo sapiens
agtggcagagcagtg

SEQ ID NO: 154615 - DNA, 15 bp, Homo sapiens
gtggcagagcagtga

SEQ ID NO: 154616 - DNA, 15 bp, Homo sapiens
tggcagagcagtgaa

SEQ ID NO: 154617 - DNA, 15 bp, Homo sapiens
ggcagagcagtgaaa

SEQ ID NO: 154618 - DNA, 15 bp, Homo sapiens
gcagagcagtgaaag

SEQ ID NO: 154619 - DNA, 15 bp, Homo sapiens
cagagcagtgaaaga

SEQ ID NO: 154620 - DNA, 15 bp, Homo sapiens
agagcagtgaaagag

SEQ ID NO: 154621 - DNA, 15 bp, Homo sapiens
gagcagtgaaagaga

SEQ ID NO: 154622 - DNA, 15 bp, Homo sapiens
agcagtgaaagagag

SEQ ID NO: 154623 - DNA, 15 bp, Homo sapiens
gcagtgaaagagagg

SEQ ID NO: 154624 - DNA, 15 bp, Homo sapiens
cagtgaaagagaggg

SEQ ID NO: 154625 - DNA, 15 bp, Homo sapiens
agtgaaagagaggga

SEQ ID NO: 154626 - DNA, 15 bp, Homo sapiens
gtgaaagagagggag

SEQ ID NO: 154627 - DNA, 15 bp, Homo sapiens
tgaaagagagggagg

SEQ ID NO: 154628 - DNA, 15 bp, Homo sapiens
gaaagagagggaggc

SEQ ID NO: 154629 - DNA, 15 bp, Homo sapiens
aaagagagggaggca

SEQ ID NO: 154630 - DNA, 15 bp, Homo sapiens
aagagagggaggcat

SEQ ID NO: 154631 - DNA, 15 bp, Homo sapiens
agagagggaggcatc

SEQ ID NO: 154632 - DNA, 15 bp, Homo sapiens
gagagggaggcatca

SEQ ID NO: 154633 - DNA, 15 bp, Homo sapiens
agagggaggcatcaa

SEQ ID NO: 154634 - DNA, 15 bp, Homo sapiens
gagggaggcatcaaa

SEQ ID NO: 154635 - DNA, 15 bp, Homo sapiens
agggaggcatcaaag

SEQ ID NO: 154636 - DNA, 15 bp, Homo sapiens
gggaggcatcaaagt

SEQ ID NO: 154637 - DNA, 15 bp, Homo sapiens
ggaggcatcaaagtg

SEQ ID NO: 154638 - DNA, 15 bp, Homo sapiens
gaggcatcaaagtga

SEQ ID NO: 154639 - DNA, 15 bp, Homo sapiens
aggcatcaaagtgag

SEQ ID NO: 154640 - DNA, 15 bp, Homo sapiens
ggcatcaaagtgagt

SEQ ID NO: 154641 - DNA, 15 bp, Homo sapiens
gcatcaaagtgagtc

SEQ ID NO: 154642 - DNA, 15 bp, Homo sapiens
catcaaagtgagtct

SEQ ID NO: 154643 - DNA, 15 bp, Homo sapiens
atcaaagtgagtctc

SEQ ID NO: 154644 - DNA, 15 bp, Homo sapiens
tcaaagtgagtctcg

SEQ ID NO: 154645 - DNA, 15 bp, Homo sapiens
caaagtgagtctcga

SEQ ID NO: 154646 - DNA, 15 bp, Homo sapiens
aaagtgagtctcgat

SEQ ID NO: 154647 - DNA, 15 bp, Homo sapiens
aagtgagtctcgatt

SEQ ID NO: 154648 - DNA, 15 bp, Homo sapiens
agtgagtctcgattt

SEQ ID NO: 154649 - DNA, 15 bp, Homo sapiens
gtgagtctcgatttc

SEQ ID NO: 154650 - DNA, 15 bp, Homo sapiens
tgagtctcgatttct

SEQ ID NO: 154651 - DNA, 15 bp, Homo sapiens
gagtctcgatttcta

SEQ ID NO: 154652 - DNA, 15 bp, Homo sapiens
agtctcgatttctag

SEQ ID NO: 154653 - DNA, 15 bp, Homo sapiens
gtctcgatttctagc

SEQ ID NO: 154654 - DNA, 15 bp, Homo sapiens
tctcgatttctagct

SEQ ID NO: 154655 - DNA, 15 bp, Homo sapiens
ctcgatttctagctg

SEQ ID NO: 154656 - DNA, 15 bp, Homo sapiens
tcgatttctagctgg

SEQ ID NO: 154657 - DNA, 15 bp, Homo sapiens
cgatttctagctggg

SEQ ID NO: 154658 - DNA, 15 bp, Homo sapiens
gatttctagctgggt

SEQ ID NO: 154659 - DNA, 15 bp, Homo sapiens
atttctagctgggtg

SEQ ID NO: 154660 - DNA, 15 bp, Homo sapiens
tttctagctgggtgg

SEQ ID NO: 154661 - DNA, 15 bp, Homo sapiens
ttctagctgggtggg

SEQ ID NO: 154662 - DNA, 15 bp, Homo sapiens
tctagctgggtgggt

SEQ ID NO: 154663 - DNA, 15 bp, Homo sapiens
ctagctgggtgggtg

SEQ ID NO: 154664 - DNA, 15 bp, Homo sapiens
tagctgggtgggtgg

SEQ ID NO: 154665 - DNA, 15 bp, Homo sapiens
agctgggtgggtggt

SEQ ID NO: 154666 - DNA, 15 bp, Homo sapiens
gctgggtgggtggta

SEQ ID NO: 154667 - DNA, 15 bp, Homo sapiens
ctgggtgggtggtag

SEQ ID NO: 154668 - DNA, 15 bp, Homo sapiens
tgggtgggtggtagc

SEQ ID NO: 154669 - DNA, 15 bp, Homo sapiens
gggtgggtggtagcg

SEQ ID NO: 154670 - DNA, 15 bp, Homo sapiens
ggtgggtggtagcga

SEQ ID NO: 154671 - DNA, 15 bp, Homo sapiens
gtgggtggtagcgat

SEQ ID NO: 154672 - DNA, 15 bp, Homo sapiens
tgggtggtagcgatg

SEQ ID NO: 154673 - DNA, 15 bp, Homo sapiens
gggtggtagcgatgt

SEQ ID NO: 154674 - DNA, 15 bp, Homo sapiens
ggtggtagcgatgtc

SEQ ID NO: 154675 - DNA, 15 bp, Homo sapiens
gtggtagcgatgtcc

SEQ ID NO: 154676 - DNA, 15 bp, Homo sapiens
tggtagcgatgtcca

SEQ ID NO: 154677 - DNA, 15 bp, Homo sapiens
ggtagcgatgtccag

SEQ ID NO: 154678 - DNA, 15 bp, Homo sapiens
gtagcgatgtccagt

SEQ ID NO: 154679 - DNA, 15 bp, Homo sapiens
tagcgatgtccagta

SEQ ID NO: 154680 - DNA, 15 bp, Homo sapiens
agcgatgtccagtag

SEQ ID NO: 154681 - DNA, 15 bp, Homo sapiens
gcgatgtccagtagg

SEQ ID NO: 154682 - DNA, 15 bp, Homo sapiens
cgatgtccagtaggc

SEQ ID NO: 154683 - DNA, 15 bp, Homo sapiens
gatgtccagtaggcc

SEQ ID NO: 154684 - DNA, 15 bp, Homo sapiens
atgtccagtaggcca

SEQ ID NO: 154685 - DNA, 15 bp, Homo sapiens
tgtccagtaggccag

SEQ ID NO: 154686 - DNA, 15 bp, Homo sapiens
gtccagtaggccagt

SEQ ID NO: 154687 - DNA, 15 bp, Homo sapiens
tccagtaggccagtg

SEQ ID NO: 154688 - DNA, 15 bp, Homo sapiens
ccagtaggccagtgg

SEQ ID NO: 154689 - DNA, 15 bp, Homo sapiens
cagtaggccagtggc

SEQ ID NO: 154690 - DNA, 15 bp, Homo sapiens
agtaggccagtggct

SEQ ID NO: 154691 - DNA, 15 bp, Homo sapiens
gtaggccagtggcta

SEQ ID NO: 154692 - DNA, 15 bp, Homo sapiens
taggccagtggctac

SEQ ID NO: 154693 - DNA, 15 bp, Homo sapiens
aggccagtggctact

SEQ ID NO: 154694 - DNA, 15 bp, Homo sapiens
ggccagtggctactg

SEQ ID NO: 154695 - DNA, 15 bp, Homo sapiens
gccagtggctactga

SEQ ID NO: 154696 - DNA, 15 bp, Homo sapiens
ccagtggctactgag

SEQ ID NO: 154697 - DNA, 15 bp, Homo sapiens
cagtggctactgagg

SEQ ID NO: 154698 - DNA, 15 bp, Homo sapiens
agtggctactgaggt

SEQ ID NO: 154699 - DNA, 15 bp, Homo sapiens
gtggctactgaggtc

SEQ ID NO: 154700 - DNA, 15 bp, Homo sapiens
tggctactgaggtct

SEQ ID NO: 154701 - DNA, 15 bp, Homo sapiens
ggctactgaggtctg

SEQ ID NO: 154702 - DNA, 15 bp, Homo sapiens
gctactgaggtctgc

SEQ ID NO: 154703 - DNA, 15 bp, Homo sapiens
ctactgaggtctgca

SEQ ID NO: 154704 - DNA, 15 bp, Homo sapiens
tactgaggtctgcag

SEQ ID NO: 154705 - DNA, 15 bp, Homo sapiens
actgaggtctgcagt

SEQ ID NO: 154706 - DNA, 15 bp, Homo sapiens
ctgaggtctgcagtg

SEQ ID NO: 154707 - DNA, 15 bp, Homo sapiens
tgaggtctgcagtgg

SEQ ID NO: 154708 - DNA, 15 bp, Homo sapiens
gaggtctgcagtgga

SEQ ID NO: 154709 - DNA, 15 bp, Homo sapiens
aggtctgcagtggag

SEQ ID NO: 154710 - DNA, 15 bp, Homo sapiens
ggtctgcagtggagg

SEQ ID NO: 154711 - DNA, 15 bp, Homo sapiens
gtctgcagtggagga

SEQ ID NO: 154712 - DNA, 15 bp, Homo sapiens
tctgcagtggaggag

SEQ ID NO: 154713 - DNA, 15 bp, Homo sapiens
ctgcagtggaggagg

SEQ ID NO: 154714 - DNA, 15 bp, Homo sapiens
tgcagtggaggaggg

SEQ ID NO: 154715 - DNA, 15 bp, Homo sapiens
gcagtggaggagggt

SEQ ID NO: 154716 - DNA, 15 bp, Homo sapiens
cagtggaggagggtg

SEQ ID NO: 154717 - DNA, 15 bp, Homo sapiens
agtggaggagggtgg

SEQ ID NO: 154718 - DNA, 15 bp, Homo sapiens
gtggaggagggtggt

SEQ ID NO: 154719 - DNA, 15 bp, Homo sapiens
tggaggagggtggtt

SEQ ID NO: 154720 - DNA, 15 bp, Homo sapiens
ggaggagggtggttg

SEQ ID NO: 154721 - DNA, 15 bp, Homo sapiens
gaggagggtggttgg

SEQ ID NO: 154722 - DNA, 15 bp, Homo sapiens
aggagggtggttggg

SEQ ID NO: 154723 - DNA, 15 bp, Homo sapiens
ggagggtggttgggc

SEQ ID NO: 154724 - DNA, 15 bp, Homo sapiens
gagggtggttgggct

SEQ ID NO: 154725 - DNA, 15 bp, Homo sapiens
agggtggttgggctg

SEQ ID NO: 154726 - DNA, 15 bp, Homo sapiens
gggtggttgggctgg

SEQ ID NO: 154727 - DNA, 15 bp, Homo sapiens
ggtggttgggctgga

SEQ ID NO: 154728 - DNA, 15 bp, Homo sapiens
gtggttgggctggag

SEQ ID NO: 154729 - DNA, 15 bp, Homo sapiens
tggttgggctggaga

SEQ ID NO: 154730 - DNA, 15 bp, Homo sapiens
ggttgggctggagac

SEQ ID NO: 154731 - DNA, 15 bp, Homo sapiens
gttgggctggagaca

SEQ ID NO: 154732 - DNA, 15 bp, Homo sapiens
ttgggctggagacag

SEQ ID NO: 154733 - DNA, 15 bp, Homo sapiens
tgggctggagacaga

SEQ ID NO: 154734 - DNA, 15 bp, Homo sapiens
gggctggagacagat

SEQ ID NO: 154735 - DNA, 15 bp, Homo sapiens
ggctggagacagatg

SEQ ID NO: 154736 - DNA, 15 bp, Homo sapiens
gctggagacagatga

SEQ ID NO: 154737 - DNA, 15 bp, Homo sapiens
ctggagacagatgat

SEQ ID NO: 154738 - DNA, 15 bp, Homo sapiens
tggagacagatgatg

SEQ ID NO: 154739 - DNA, 15 bp, Homo sapiens
ggagacagatgatga

SEQ ID NO: 154740 - DNA, 15 bp, Homo sapiens
gagacagatgatgag

SEQ ID NO: 154741 - DNA, 15 bp, Homo sapiens
agacagatgatgagg

SEQ ID NO: 154742 - DNA, 15 bp, Homo sapiens
gacagatgatgaggg

SEQ ID NO: 154743 - DNA, 15 bp, Homo sapiens
acagatgatgaggga

SEQ ID NO: 154744 - DNA, 15 bp, Homo sapiens
cagatgatgagggag

SEQ ID NO: 154745 - DNA, 15 bp, Homo sapiens
agatgatgagggagt

SEQ ID NO: 154746 - DNA, 15 bp, Homo sapiens
gatgatgagggagtc

SEQ ID NO: 154747 - DNA, 15 bp, Homo sapiens
atgatgagggagtca

SEQ ID NO: 154748 - DNA, 15 bp, Homo sapiens
tgatgagggagtcat

SEQ ID NO: 154749 - DNA, 15 bp, Homo sapiens
gatgagggagtcatc

SEQ ID NO: 154750 - DNA, 15 bp, Homo sapiens
atgagggagtcatca

SEQ ID NO: 154751 - DNA, 15 bp, Homo sapiens
tgagggagtcatcag

SEQ ID NO: 154752 - DNA, 15 bp, Homo sapiens
gagggagtcatcagc

SEQ ID NO: 154753 - DNA, 15 bp, Homo sapiens
agggagtcatcagcc

SEQ ID NO: 154754 - DNA, 15 bp, Homo sapiens
gggagtcatcagcct

SEQ ID NO: 154755 - DNA, 15 bp, Homo sapiens
ggagtcatcagcctg

SEQ ID NO: 154756 - DNA, 15 bp, Homo sapiens
gagtcatcagcctgt

SEQ ID NO: 154757 - DNA, 15 bp, Homo sapiens
agtcatcagcctgtg

SEQ ID NO: 154758 - DNA, 15 bp, Homo sapiens
gtcatcagcctgtgg

SEQ ID NO: 154759 - DNA, 15 bp, Homo sapiens
tcatcagcctgtggg

SEQ ID NO: 154760 - DNA, 15 bp, Homo sapiens
catcagcctgtgggt

SEQ ID NO: 154761 - DNA, 15 bp, Homo sapiens
atcagcctgtgggtg

SEQ ID NO: 154762 - DNA, 15 bp, Homo sapiens
tcagcctgtgggtgg

SEQ ID NO: 154763 - DNA, 15 bp, Homo sapiens
cagcctgtgggtgga

SEQ ID NO: 154764 - DNA, 15 bp, Homo sapiens
agcctgtgggtggaa

SEQ ID NO: 154765 - DNA, 15 bp, Homo sapiens
gcctgtgggtggaag

SEQ ID NO: 154766 - DNA, 15 bp, Homo sapiens
cctgtgggtggaaga

SEQ ID NO: 154767 - DNA, 15 bp, Homo sapiens
ctgtgggtggaagaa

SEQ ID NO: 154768 - DNA, 15 bp, Homo sapiens
tgtgggtggaagaaa

SEQ ID NO: 154769 - DNA, 15 bp, Homo sapiens
gtgggtggaagaaaa

SEQ ID NO: 154770 - DNA, 15 bp, Homo sapiens
tgggtggaagaaaag

SEQ ID NO: 154771 - DNA, 15 bp, Homo sapiens
gggtggaagaaaagg

SEQ ID NO: 154772 - DNA, 15 bp, Homo sapiens
ggtggaagaaaaggg

SEQ ID NO: 154773 - DNA, 15 bp, Homo sapiens
gtggaagaaaaggga

SEQ ID NO: 154774 - DNA, 15 bp, Homo sapiens
tggaagaaaagggaa

SEQ ID NO: 154775 - DNA, 15 bp, Homo sapiens
ggaagaaaagggaac

SEQ ID NO: 154776 - DNA, 15 bp, Homo sapiens
gaagaaaagggaacc

SEQ ID NO: 154777 - DNA, 15 bp, Homo sapiens
aagaaaagggaacct

SEQ ID NO: 154778 - DNA, 15 bp, Homo sapiens
agaaaagggaacctc

SEQ ID NO: 154779 - DNA, 15 bp, Homo sapiens
gaaaagggaacctct

SEQ ID NO: 154780 - DNA, 15 bp, Homo sapiens
aaaagggaacctctt

SEQ ID NO: 154781 - DNA, 15 bp, Homo sapiens
aaagggaacctcttc

SEQ ID NO: 154782 - DNA, 15 bp, Homo sapiens
aagggaacctcttcc

SEQ ID NO: 154783 - DNA, 15 bp, Homo sapiens
agggaacctcttcca

SEQ ID NO: 154784 - DNA, 15 bp, Homo sapiens
gggaacctcttccaa

SEQ ID NO: 154785 - DNA, 15 bp, Homo sapiens
ggaacctcttccaac

SEQ ID NO: 154786 - DNA, 15 bp, Homo sapiens
gaacctcttccaact

SEQ ID NO: 154787 - DNA, 15 bp, Homo sapiens
aacctcttccaactg

SEQ ID NO: 154788 - DNA, 15 bp, Homo sapiens
acctcttccaactgt

SEQ ID NO: 154789 - DNA, 15 bp, Homo sapiens
cctcttccaactgtt

SEQ ID NO: 154790 - DNA, 15 bp, Homo sapiens
ctcttccaactgttt

SEQ ID NO: 154791 - DNA, 15 bp, Homo sapiens
tcttccaactgtttt

SEQ ID NO: 154792 - DNA, 15 bp, Homo sapiens
cttccaactgttttc

SEQ ID NO: 154793 - DNA, 15 bp, Homo sapiens
ttccaactgttttct

SEQ ID NO: 154794 - DNA, 15 bp, Homo sapiens
tccaactgttttctt

SEQ ID NO: 154795 - DNA, 15 bp, Homo sapiens
ccaactgttttcttt

SEQ ID NO: 154796 - DNA, 15 bp, Homo sapiens
caactgttttctttg

SEQ ID NO: 154797 - DNA, 15 bp, Homo sapiens
aactgttttctttgc

SEQ ID NO: 154798 - DNA, 15 bp, Homo sapiens
actgttttctttgct

SEQ ID NO: 154799 - DNA, 15 bp, Homo sapiens
ctgttttctttgctt

SEQ ID NO: 154800 - DNA, 15 bp, Homo sapiens
tgttttctttgcttc

SEQ ID NO: 154801 - DNA, 15 bp, Homo sapiens
gttttctttgcttct

SEQ ID NO: 154802 - DNA, 15 bp, Homo sapiens
ttttctttgcttctt

SEQ ID NO: 154803 - DNA, 15 bp, Homo sapiens
tttctttgcttcttc

SEQ ID NO: 154804 - DNA, 15 bp, Homo sapiens
ttctttgcttcttcc

SEQ ID NO: 154805 - DNA, 15 bp, Homo sapiens
tctttgcttcttccc

SEQ ID NO: 154806 - DNA, 15 bp, Homo sapiens
ctttgcttcttccct

SEQ ID NO: 154807 - DNA, 15 bp, Homo sapiens
tttgcttcttccctc

SEQ ID NO: 154808 - DNA, 15 bp, Homo sapiens
ttgcttcttccctct

SEQ ID NO: 154809 - DNA, 15 bp, Homo sapiens
tgcttcttccctctc

SEQ ID NO: 154810 - DNA, 15 bp, Homo sapiens
gcttcttccctctct

SEQ ID NO: 154811 - DNA, 15 bp, Homo sapiens
cttcttccctctctt

SEQ ID NO: 154812 - DNA, 15 bp, Homo sapiens
ttcttccctctcttt

SEQ ID NO: 154813 - DNA, 15 bp, Homo sapiens
tcttccctctctttc

SEQ ID NO: 154814 - DNA, 15 bp, Homo sapiens
cttccctctctttct

SEQ ID NO: 154815 - DNA, 15 bp, Homo sapiens
ttccctctctttctc

SEQ ID NO: 154816 - DNA, 15 bp, Homo sapiens
tccctctctttctct

SEQ ID NO: 154817 - DNA, 15 bp, Homo sapiens
ccctctctttctctt

SEQ ID NO: 154818 - DNA, 15 bp, Homo sapiens
cctctctttctcttt

SEQ ID NO: 154819 - DNA, 15 bp, Homo sapiens
ctctctttctctttt

SEQ ID NO: 154820 - DNA, 15 bp, Homo sapiens
tctctttctcttttt

SEQ ID NO: 154821 - DNA, 15 bp, Homo sapiens
ctctttctctttttt

SEQ ID NO: 154822 - DNA, 15 bp, Homo sapiens
tctttctcttttttt

SEQ ID NO: 154823 - DNA, 15 bp, Homo sapiens
ctttctctttttttt

SEQ ID NO: 154824 - DNA, 15 bp, Homo sapiens
tttctcttttttttt

SEQ ID NO: 154825 - DNA, 15 bp, Homo sapiens
ttctctttttttttt

SEQ ID NO: 154826 - DNA, 15 bp, Homo sapiens
ttttttttttttgga

SEQ ID NO: 154827 - DNA, 15 bp, Homo sapiens
tttttttttttggac

SEQ ID NO: 154828 - DNA, 15 bp, Homo sapiens
ttttttttttggaca

SEQ ID NO: 154829 - DNA, 15 bp, Homo sapiens
tttttttttggacag

SEQ ID NO: 154830 - DNA, 15 bp, Homo sapiens
ttttttttggacaga

SEQ ID NO: 154831 - DNA, 15 bp, Homo sapiens
tttttttggacagag

SEQ ID NO: 154832 - DNA, 15 bp, Homo sapiens
ttttttggacagagt

SEQ ID NO: 154833 - DNA, 15 bp, Homo sapiens
tttttggacagagtc

SEQ ID NO: 154834 - DNA, 15 bp, Homo sapiens
ttttggacagagtct

SEQ ID NO: 154835 - DNA, 15 bp, Homo sapiens
tttggacagagtctt

SEQ ID NO: 154836 - DNA, 15 bp, Homo sapiens
ttggacagagtcttg

SEQ ID NO: 154837 - DNA, 15 bp, Homo sapiens
tggacagagtcttgc

SEQ ID NO: 154838 - DNA, 15 bp, Homo sapiens
ggacagagtcttgct

SEQ ID NO: 154839 - DNA, 15 bp, Homo sapiens
tgtcacccaggctga

SEQ ID NO: 154840 - DNA, 15 bp, Homo sapiens
gtcacccaggctgaa

SEQ ID NO: 154841 - DNA, 15 bp, Homo sapiens
tcacccaggctgaaa

SEQ ID NO: 154842 - DNA, 15 bp, Homo sapiens
cacccaggctgaaat

SEQ ID NO: 154843 - DNA, 15 bp, Homo sapiens
acccaggctgaaatg

SEQ ID NO: 154844 - DNA, 15 bp, Homo sapiens
cccaggctgaaatgc

SEQ ID NO: 154845 - DNA, 15 bp, Homo sapiens
ccaggctgaaatgca

SEQ ID NO: 154846 - DNA, 15 bp, Homo sapiens
caggctgaaatgcag

SEQ ID NO: 154847 - DNA, 15 bp, Homo sapiens
aggctgaaatgcagt

SEQ ID NO: 154848 - DNA, 15 bp, Homo sapiens
ggctgaaatgcagtg

SEQ ID NO: 154849 - DNA, 15 bp, Homo sapiens
gctgaaatgcagtgg

SEQ ID NO: 154850 - DNA, 15 bp, Homo sapiens
ctgaaatgcagtggc

SEQ ID NO: 154851 - DNA, 15 bp, Homo sapiens
tgaaatgcagtggca

SEQ ID NO: 154852 - DNA, 15 bp, Homo sapiens
gaaatgcagtggcat

SEQ ID NO: 154853 - DNA, 15 bp, Homo sapiens
aaatgcagtggcatg

SEQ ID NO: 154854 - DNA, 15 bp, Homo sapiens
aatgcagtggcatga

SEQ ID NO: 154855 - DNA, 15 bp, Homo sapiens
atgcagtggcatgat

SEQ ID NO: 154856 - DNA, 15 bp, Homo sapiens
gcatgatcttggctc

SEQ ID NO: 154857 - DNA, 15 bp, Homo sapiens
catgatcttggctca

SEQ ID NO: 154858 - DNA, 15 bp, Homo sapiens
tgatcttggctcacc

SEQ ID NO: 154859 - DNA, 15 bp, Homo sapiens
gatcttggctcacca

SEQ ID NO: 154860 - DNA, 15 bp, Homo sapiens
atcttggctcaccac

SEQ ID NO: 154861 - DNA, 15 bp, Homo sapiens
tcttggctcaccaca

SEQ ID NO: 154862 - DNA, 15 bp, Homo sapiens
cttggctcaccacag

SEQ ID NO: 154863 - DNA, 15 bp, Homo sapiens
ttggctcaccacagc

SEQ ID NO: 154864 - DNA, 15 bp, Homo sapiens
tggctcaccacagcc

SEQ ID NO: 154865 - DNA, 15 bp, Homo sapiens
ggctcaccacagcct

SEQ ID NO: 154866 - DNA, 15 bp, Homo sapiens
gctcaccacagcctc

SEQ ID NO: 154867 - DNA, 15 bp, Homo sapiens
ctcaccacagcctcc

SEQ ID NO: 154868 - DNA, 15 bp, Homo sapiens
tcaccacagcctccg

SEQ ID NO: 154869 - DNA, 15 bp, Homo sapiens
caccacagcctccgc

SEQ ID NO: 154870 - DNA, 15 bp, Homo sapiens
accacagcctccgcc

SEQ ID NO: 154871 - DNA, 15 bp, Homo sapiens
ccacagcctccgcct

SEQ ID NO: 154872 - DNA, 15 bp, Homo sapiens
cacagcctccgcctc

SEQ ID NO: 154873 - DNA, 15 bp, Homo sapiens
acagcctccgcctcc

SEQ ID NO: 154874 - DNA, 15 bp, Homo sapiens
cagcctccgcctcct

SEQ ID NO: 154875 - DNA, 15 bp, Homo sapiens
agcctccgcctcctg

SEQ ID NO: 154876 - DNA, 15 bp, Homo sapiens
gcctccgcctcctgg

SEQ ID NO: 154877 - DNA, 15 bp, Homo sapiens
cctccgcctcctggg

SEQ ID NO: 154878 - DNA, 15 bp, Homo sapiens
ctccgcctcctgggt

SEQ ID NO: 154879 - DNA, 15 bp, Homo sapiens
tccgcctcctgggtt

SEQ ID NO: 154880 - DNA, 15 bp, Homo sapiens
ccgcctcctgggttc

SEQ ID NO: 154881 - DNA, 15 bp, Homo sapiens
cgcctcctgggttca

SEQ ID NO: 154882 - DNA, 15 bp, Homo sapiens
tcctgggttcaagca

SEQ ID NO: 154883 - DNA, 15 bp, Homo sapiens
cctgggttcaagcaa

SEQ ID NO: 154884 - DNA, 15 bp, Homo sapiens
ctgggttcaagcaat

SEQ ID NO: 154885 - DNA, 15 bp, Homo sapiens
tgggttcaagcaatt

SEQ ID NO: 154886 - DNA, 15 bp, Homo sapiens
aagcaattctcctgt

SEQ ID NO: 154887 - DNA, 15 bp, Homo sapiens
agcaattctcctgtc

SEQ ID NO: 154888 - DNA, 15 bp, Homo sapiens
gcaattctcctgtct

SEQ ID NO: 154889 - DNA, 15 bp, Homo sapiens
caattctcctgtctc

SEQ ID NO: 154890 - DNA, 15 bp, Homo sapiens
aattctcctgtctca

SEQ ID NO: 154891 - DNA, 15 bp, Homo sapiens
cctgtctcagcctcc

SEQ ID NO: 154892 - DNA, 15 bp, Homo sapiens
ctgtctcagcctcca

SEQ ID NO: 154893 - DNA, 15 bp, Homo sapiens
tgtctcagcctccag

SEQ ID NO: 154894 - DNA, 15 bp, Homo sapiens
gtctcagcctccaga

SEQ ID NO: 154895 - DNA, 15 bp, Homo sapiens
tctcagcctccagag

SEQ ID NO: 154896 - DNA, 15 bp, Homo sapiens
cagcctccagagtag

SEQ ID NO: 154897 - DNA, 15 bp, Homo sapiens
agcctccagagtagc

SEQ ID NO: 154898 - DNA, 15 bp, Homo sapiens
gcctccagagtagct

SEQ ID NO: 154899 - DNA, 15 bp, Homo sapiens
cctccagagtagctg

SEQ ID NO: 154900 - DNA, 15 bp, Homo sapiens
ctccagagtagctgg

SEQ ID NO: 154901 - DNA, 15 bp, Homo sapiens
tccagagtagctggg

SEQ ID NO: 154902 - DNA, 15 bp, Homo sapiens
ccagagtagctggga

SEQ ID NO: 154903 - DNA, 15 bp, Homo sapiens
cagagtagctgggat

SEQ ID NO: 154904 - DNA, 15 bp, Homo sapiens
agagtagctgggatt

SEQ ID NO: 154905 - DNA, 15 bp, Homo sapiens
gggattacaggcaca

SEQ ID NO: 154906 - DNA, 15 bp, Homo sapiens
ggattacaggcacat

SEQ ID NO: 154907 - DNA, 15 bp, Homo sapiens
gattacaggcacata

SEQ ID NO: 154908 - DNA, 15 bp, Homo sapiens
attacaggcacatat

SEQ ID NO: 154909 - DNA, 15 bp, Homo sapiens
ttacaggcacatatc

SEQ ID NO: 154910 - DNA, 15 bp, Homo sapiens
tacaggcacatatca

SEQ ID NO: 154911 - DNA, 15 bp, Homo sapiens
acaggcacatatcac

SEQ ID NO: 154912 - DNA, 15 bp, Homo sapiens
caggcacatatcact

SEQ ID NO: 154913 - DNA, 15 bp, Homo sapiens
aggcacatatcactg

SEQ ID NO: 154914 - DNA, 15 bp, Homo sapiens
ggcacatatcactgt

SEQ ID NO: 154915 - DNA, 15 bp, Homo sapiens
gcacatatcactgtg

SEQ ID NO: 154916 - DNA, 15 bp, Homo sapiens
cacatatcactgtgc

SEQ ID NO: 154917 - DNA, 15 bp, Homo sapiens
acatatcactgtgcc

SEQ ID NO: 154918 - DNA, 15 bp, Homo sapiens
catatcactgtgccc

SEQ ID NO: 154919 - DNA, 15 bp, Homo sapiens
atatcactgtgcccg

SEQ ID NO: 154920 - DNA, 15 bp, Homo sapiens
tatcactgtgcccgg

SEQ ID NO: 154921 - DNA, 15 bp, Homo sapiens
atcactgtgcccggc

SEQ ID NO: 154922 - DNA, 15 bp, Homo sapiens
tcactgtgcccggct

SEQ ID NO: 154923 - DNA, 15 bp, Homo sapiens
cactgtgcccggcta

SEQ ID NO: 154924 - DNA, 15 bp, Homo sapiens
actgtgcccggctaa

SEQ ID NO: 154925 - DNA, 15 bp, Homo sapiens
ctgtgcccggctaat

SEQ ID NO: 154926 - DNA, 15 bp, Homo sapiens
tgtgcccggctaatt

SEQ ID NO: 154927 - DNA, 15 bp, Homo sapiens
gtgcccggctaattt

SEQ ID NO: 154928 - DNA, 15 bp, Homo sapiens
tgcccggctaatttt

SEQ ID NO: 154929 - DNA, 15 bp, Homo sapiens
gcccggctaattttt

SEQ ID NO: 154930 - DNA, 15 bp, Homo sapiens
tttgtattttcagtg

SEQ ID NO: 154931 - DNA, 15 bp, Homo sapiens
ttgtattttcagtgg

SEQ ID NO: 154932 - DNA, 15 bp, Homo sapiens
tgtattttcagtgga

SEQ ID NO: 154933 - DNA, 15 bp, Homo sapiens
gtattttcagtggag

SEQ ID NO: 154934 - DNA, 15 bp, Homo sapiens
tattttcagtggaga

SEQ ID NO: 154935 - DNA, 15 bp, Homo sapiens
attttcagtggagat

SEQ ID NO: 154936 - DNA, 15 bp, Homo sapiens
ttttcagtggagatg

SEQ ID NO: 154937 - DNA, 15 bp, Homo sapiens
tttcagtggagatgg

SEQ ID NO: 154938 - DNA, 15 bp, Homo sapiens
ttcagtggagatggg

SEQ ID NO: 154939 - DNA, 15 bp, Homo sapiens
tcagtggagatggga

SEQ ID NO: 154940 - DNA, 15 bp, Homo sapiens
cagtggagatgggat

SEQ ID NO: 154941 - DNA, 15 bp, Homo sapiens
agtggagatgggatt

SEQ ID NO: 154942 - DNA, 15 bp, Homo sapiens
gtggagatgggattt

SEQ ID NO: 154943 - DNA, 15 bp, Homo sapiens
tggagatgggatttc

SEQ ID NO: 154944 - DNA, 15 bp, Homo sapiens
ggagatgggatttca

SEQ ID NO: 154945 - DNA, 15 bp, Homo sapiens
gagatgggatttcac

SEQ ID NO: 154946 - DNA, 15 bp, Homo sapiens
agatgggatttcacc

SEQ ID NO: 154947 - DNA, 15 bp, Homo sapiens
gatgggatttcacca

SEQ ID NO: 154948 - DNA, 15 bp, Homo sapiens
atgggatttcaccat

SEQ ID NO: 154949 - DNA, 15 bp, Homo sapiens
tgggatttcaccatg

SEQ ID NO: 154950 - DNA, 15 bp, Homo sapiens
gggatttcaccatgt

SEQ ID NO: 154951 - DNA, 15 bp, Homo sapiens
ggatttcaccatgtt

SEQ ID NO: 154952 - DNA, 15 bp, Homo sapiens
tcaccatgttggtcg

SEQ ID NO: 154953 - DNA, 15 bp, Homo sapiens
caccatgttggtcgg

SEQ ID NO: 154954 - DNA, 15 bp, Homo sapiens
accatgttggtcggg

SEQ ID NO: 154955 - DNA, 15 bp, Homo sapiens
ccatgttggtcgggc

SEQ ID NO: 154956 - DNA, 15 bp, Homo sapiens
catgttggtcgggct

SEQ ID NO: 154957 - DNA, 15 bp, Homo sapiens
atgttggtcgggctg

SEQ ID NO: 154958 - DNA, 15 bp, Homo sapiens
tgttggtcgggctgg

SEQ ID NO: 154959 - DNA, 15 bp, Homo sapiens
gttggtcgggctgga

SEQ ID NO: 154960 - DNA, 15 bp, Homo sapiens
ttggtcgggctggaa

SEQ ID NO: 154961 - DNA, 15 bp, Homo sapiens
tggtcgggctggaat

SEQ ID NO: 154962 - DNA, 15 bp, Homo sapiens
ggtcgggctggaatg

SEQ ID NO: 154963 - DNA, 15 bp, Homo sapiens
gtcgggctggaatga

SEQ ID NO: 154964 - DNA, 15 bp, Homo sapiens
tcgggctggaatgaa

SEQ ID NO: 154965 - DNA, 15 bp, Homo sapiens
cgggctggaatgaac

SEQ ID NO: 154966 - DNA, 15 bp, Homo sapiens
gggctggaatgaact

SEQ ID NO: 154967 - DNA, 15 bp, Homo sapiens
ggctggaatgaactc

SEQ ID NO: 154968 - DNA, 15 bp, Homo sapiens
gctggaatgaactcc

SEQ ID NO: 154969 - DNA, 15 bp, Homo sapiens
ctggaatgaactcct

SEQ ID NO: 154970 - DNA, 15 bp, Homo sapiens
tggaatgaactcctg

SEQ ID NO: 154971 - DNA, 15 bp, Homo sapiens
ggaatgaactcctga

SEQ ID NO: 154972 - DNA, 15 bp, Homo sapiens
gaatgaactcctgac

SEQ ID NO: 154973 - DNA, 15 bp, Homo sapiens
aatgaactcctgacc

SEQ ID NO: 154974 - DNA, 15 bp, Homo sapiens
atgaactcctgacct

SEQ ID NO: 154975 - DNA, 15 bp, Homo sapiens
tcaagtgatccacct

SEQ ID NO: 154976 - DNA, 15 bp, Homo sapiens
caagtgatccacctg

SEQ ID NO: 154977 - DNA, 15 bp, Homo sapiens
aagtgatccacctgc

SEQ ID NO: 154978 - DNA, 15 bp, Homo sapiens
agtgatccacctgcc

SEQ ID NO: 154979 - DNA, 15 bp, Homo sapiens
gtgatccacctgcct

SEQ ID NO: 154980 - DNA, 15 bp, Homo sapiens
aagtgttgggattac

SEQ ID NO: 154981 - DNA, 15 bp, Homo sapiens
agtgttgggattaca

SEQ ID NO: 154982 - DNA, 15 bp, Homo sapiens
gtgttgggattacag

SEQ ID NO: 154983 - DNA, 15 bp, Homo sapiens
tgttgggattacagg

SEQ ID NO: 154984 - DNA, 15 bp, Homo sapiens
gttgggattacaggc

SEQ ID NO: 154985 - DNA, 15 bp, Homo sapiens
ttgggattacaggca

SEQ ID NO: 154986 - DNA, 15 bp, Homo sapiens
ggcatgagccaccgc

SEQ ID NO: 154987 - DNA, 15 bp, Homo sapiens
gcatgagccaccgcg

SEQ ID NO: 154988 - DNA, 15 bp, Homo sapiens
catgagccaccgcgc

SEQ ID NO: 154989 - DNA, 15 bp, Homo sapiens
atgagccaccgcgcc

SEQ ID NO: 154990 - DNA, 15 bp, Homo sapiens
caccgcgcccggcct

SEQ ID NO: 154991 - DNA, 15 bp, Homo sapiens
accgcgcccggcctt

SEQ ID NO: 154992 - DNA, 15 bp, Homo sapiens
ccgcgcccggccttt

SEQ ID NO: 154993 - DNA, 15 bp, Homo sapiens
cgcgcccggcctttc

SEQ ID NO: 154994 - DNA, 15 bp, Homo sapiens
gcgcccggcctttct

SEQ ID NO: 154995 - DNA, 15 bp, Homo sapiens
cgcccggcctttctt

SEQ ID NO: 154996 - DNA, 15 bp, Homo sapiens
gcccggcctttcttc

SEQ ID NO: 154997 - DNA, 15 bp, Homo sapiens
cccggcctttcttcc

SEQ ID NO: 154998 - DNA, 15 bp, Homo sapiens
ccggcctttcttccc

SEQ ID NO: 154999 - DNA, 15 bp, Homo sapiens
cggcctttcttccct

SEQ ID NO: 155000 - DNA, 15 bp, Homo sapiens
ggcctttcttccctc

SEQ ID NO: 155001 - DNA, 15 bp, Homo sapiens
gcctttcttccctct

SEQ ID NO: 155002 - DNA, 15 bp, Homo sapiens
cctttcttccctctc

SEQ ID NO: 155003 - DNA, 15 bp, Homo sapiens
ctttcttccctctct

SEQ ID NO: 155004 - DNA, 15 bp, Homo sapiens
tttcttccctctctt

SEQ ID NO: 155005 - DNA, 15 bp, Homo sapiens
ttcttccctctctta

SEQ ID NO: 155006 - DNA, 15 bp, Homo sapiens
tcttccctctcttaa

SEQ ID NO: 155007 - DNA, 15 bp, Homo sapiens
cttccctctcttaaa

SEQ ID NO: 155008 - DNA, 15 bp, Homo sapiens
ttccctctcttaaag

SEQ ID NO: 155009 - DNA, 15 bp, Homo sapiens
tccctctcttaaaga

SEQ ID NO: 155010 - DNA, 15 bp, Homo sapiens
ccctctcttaaagag

SEQ ID NO: 155011 - DNA, 15 bp, Homo sapiens
cctctcttaaagagt

SEQ ID NO: 155012 - DNA, 15 bp, Homo sapiens
ctctcttaaagagtg

SEQ ID NO: 155013 - DNA, 15 bp, Homo sapiens
tctcttaaagagtgt

SEQ ID NO: 155014 - DNA, 15 bp, Homo sapiens
ctcttaaagagtgtt

SEQ ID NO: 155015 - DNA, 15 bp, Homo sapiens
tcttaaagagtgttt

SEQ ID NO: 155016 - DNA, 15 bp, Homo sapiens
cttaaagagtgttta

SEQ ID NO: 155017 - DNA, 15 bp, Homo sapiens
ttaaagagtgtttat

SEQ ID NO: 155018 - DNA, 15 bp, Homo sapiens
taaagagtgtttatt

SEQ ID NO: 155019 - DNA, 15 bp, Homo sapiens
aaagagtgtttattt

SEQ ID NO: 155020 - DNA, 15 bp, Homo sapiens
aagagtgtttattta

SEQ ID NO: 155021 - DNA, 15 bp, Homo sapiens
agagtgtttatttaa

SEQ ID NO: 155022 - DNA, 15 bp, Homo sapiens
gagtgtttatttaat

SEQ ID NO: 155023 - DNA, 15 bp, Homo sapiens
agtgtttatttaatt

SEQ ID NO: 155024 - DNA, 15 bp, Homo sapiens
gtgtttatttaattc

SEQ ID NO: 155025 - DNA, 15 bp, Homo sapiens
tgtttatttaattcc

SEQ ID NO: 155026 - DNA, 15 bp, Homo sapiens
gtttatttaattcca

SEQ ID NO: 155027 - DNA, 15 bp, Homo sapiens
tttatttaattccac

SEQ ID NO: 155028 - DNA, 15 bp, Homo sapiens
ttatttaattccaca

SEQ ID NO: 155029 - DNA, 15 bp, Homo sapiens
tatttaattccacaa

SEQ ID NO: 155030 - DNA, 15 bp, Homo sapiens
atttaattccacaaa

SEQ ID NO: 155031 - DNA, 15 bp, Homo sapiens
tttaattccacaaac

SEQ ID NO: 155032 - DNA, 15 bp, Homo sapiens
ttaattccacaaaca

SEQ ID NO: 155033 - DNA, 15 bp, Homo sapiens
taattccacaaacat

SEQ ID NO: 155034 - DNA, 15 bp, Homo sapiens
aattccacaaacatg

SEQ ID NO: 155035 - DNA, 15 bp, Homo sapiens
attccacaaacatga

SEQ ID NO: 155036 - DNA, 15 bp, Homo sapiens
ttccacaaacatgag

SEQ ID NO: 155037 - DNA, 15 bp, Homo sapiens
tccacaaacatgagc

SEQ ID NO: 155038 - DNA, 15 bp, Homo sapiens
ccacaaacatgagct

SEQ ID NO: 155039 - DNA, 15 bp, Homo sapiens
cacaaacatgagctt

SEQ ID NO: 155040 - DNA, 15 bp, Homo sapiens
acaaacatgagcttg

SEQ ID NO: 155041 - DNA, 15 bp, Homo sapiens
caaacatgagcttgt

SEQ ID NO: 155042 - DNA, 15 bp, Homo sapiens
aaacatgagcttgtc

SEQ ID NO: 155043 - DNA, 15 bp, Homo sapiens
aacatgagcttgtca

SEQ ID NO: 155044 - DNA, 15 bp, Homo sapiens
acatgagcttgtcac

SEQ ID NO: 155045 - DNA, 15 bp, Homo sapiens
catgagcttgtcacc

SEQ ID NO: 155046 - DNA, 15 bp, Homo sapiens
atgagcttgtcaccc

SEQ ID NO: 155047 - DNA, 15 bp, Homo sapiens
tgagcttgtcacccc

SEQ ID NO: 155048 - DNA, 15 bp, Homo sapiens
gagcttgtcaccccc

SEQ ID NO: 155049 - DNA, 15 bp, Homo sapiens
agcttgtcaccccct

SEQ ID NO: 155050 - DNA, 15 bp, Homo sapiens
gcttgtcaccccctg

SEQ ID NO: 155051 - DNA, 15 bp, Homo sapiens
cttgtcaccccctgt

SEQ ID NO: 155052 - DNA, 15 bp, Homo sapiens
ttgtcaccccctgta

SEQ ID NO: 155053 - DNA, 15 bp, Homo sapiens
tgtcaccccctgtag

SEQ ID NO: 155054 - DNA, 15 bp, Homo sapiens
gtcaccccctgtagc

SEQ ID NO: 155055 - DNA, 15 bp, Homo sapiens
tcaccccctgtagcc

SEQ ID NO: 155056 - DNA, 15 bp, Homo sapiens
caccccctgtagcct

SEQ ID NO: 155057 - DNA, 15 bp, Homo sapiens
accccctgtagcctg

SEQ ID NO: 155058 - DNA, 15 bp, Homo sapiens
ccccctgtagcctgg

SEQ ID NO: 155059 - DNA, 15 bp, Homo sapiens
cccctgtagcctggc

SEQ ID NO: 155060 - DNA, 15 bp, Homo sapiens
ccctgtagcctggca

SEQ ID NO: 155061 - DNA, 15 bp, Homo sapiens
cctgtagcctggcat

SEQ ID NO: 155062 - DNA, 15 bp, Homo sapiens
ctgtagcctggcatc

SEQ ID NO: 155063 - DNA, 15 bp, Homo sapiens
tgtagcctggcatct

SEQ ID NO: 155064 - DNA, 15 bp, Homo sapiens
gtagcctggcatctc

SEQ ID NO: 155065 - DNA, 15 bp, Homo sapiens
tagcctggcatctcc

SEQ ID NO: 155066 - DNA, 15 bp, Homo sapiens
agcctggcatctcct

SEQ ID NO: 155067 - DNA, 15 bp, Homo sapiens
gcctggcatctccta

SEQ ID NO: 155068 - DNA, 15 bp, Homo sapiens
catagctttgtcatg

SEQ ID NO: 155069 - DNA, 15 bp, Homo sapiens
atagctttgtcatga

SEQ ID NO: 155070 - DNA, 15 bp, Homo sapiens
tagctttgtcatgaa

SEQ ID NO: 155071 - DNA, 15 bp, Homo sapiens
agctttgtcatgaaa

SEQ ID NO: 155072 - DNA, 15 bp, Homo sapiens
gctttgtcatgaaag

SEQ ID NO: 155073 - DNA, 15 bp, Homo sapiens
ctttgtcatgaaagc

SEQ ID NO: 155074 - DNA, 15 bp, Homo sapiens
tttgtcatgaaagcc

SEQ ID NO: 155075 - DNA, 15 bp, Homo sapiens
ttgtcatgaaagccc

SEQ ID NO: 155076 - DNA, 15 bp, Homo sapiens
tgtcatgaaagccct

SEQ ID NO: 155077 - DNA, 15 bp, Homo sapiens
gtcatgaaagccctt

SEQ ID NO: 155078 - DNA, 15 bp, Homo sapiens
tcatgaaagcccttt

SEQ ID NO: 155079 - DNA, 15 bp, Homo sapiens
catgaaagcccttta

SEQ ID NO: 155080 - DNA, 15 bp, Homo sapiens
atgaaagccctttac

SEQ ID NO: 155081 - DNA, 15 bp, Homo sapiens
tgaaagccctttact

SEQ ID NO: 155082 - DNA, 15 bp, Homo sapiens
gaaagccctttactt

SEQ ID NO: 155083 - DNA, 15 bp, Homo sapiens
aaagccctttacttc

SEQ ID NO: 155084 - DNA, 15 bp, Homo sapiens
aagccctttacttct

SEQ ID NO: 155085 - DNA, 15 bp, Homo sapiens
agccctttacttctg

SEQ ID NO: 155086 - DNA, 15 bp, Homo sapiens
gccctttacttctga

SEQ ID NO: 155087 - DNA, 15 bp, Homo sapiens
ccctttacttctgag

SEQ ID NO: 155088 - DNA, 15 bp, Homo sapiens
cctttacttctgaga

SEQ ID NO: 155089 - DNA, 15 bp, Homo sapiens
ctttacttctgagaa

SEQ ID NO: 155090 - DNA, 15 bp, Homo sapiens
tttacttctgagaaa

SEQ ID NO: 155091 - DNA, 15 bp, Homo sapiens
ttacttctgagaaac

SEQ ID NO: 155092 - DNA, 15 bp, Homo sapiens
tacttctgagaaact

SEQ ID NO: 155093 - DNA, 15 bp, Homo sapiens
acttctgagaaactt

SEQ ID NO: 155094 - DNA, 15 bp, Homo sapiens
cttctgagaaacttc

SEQ ID NO: 155095 - DNA, 15 bp, Homo sapiens
ttctgagaaacttct

SEQ ID NO: 155096 - DNA, 15 bp, Homo sapiens
tctgagaaacttcta

SEQ ID NO: 155097 - DNA, 15 bp, Homo sapiens
ctgagaaacttctag

SEQ ID NO: 155098 - DNA, 15 bp, Homo sapiens
tgagaaacttctagc

SEQ ID NO: 155099 - DNA, 15 bp, Homo sapiens
gagaaacttctagct

SEQ ID NO: 155100 - DNA, 15 bp, Homo sapiens
agaaacttctagctt

SEQ ID NO: 155101 - DNA, 15 bp, Homo sapiens
gaaacttctagcttc

SEQ ID NO: 155102 - DNA, 15 bp, Homo sapiens
aaacttctagcttca

SEQ ID NO: 155103 - DNA, 15 bp, Homo sapiens
aacttctagcttcag

SEQ ID NO: 155104 - DNA, 15 bp, Homo sapiens
acttctagcttcaga

SEQ ID NO: 155105 - DNA, 15 bp, Homo sapiens
cttctagcttcagac

SEQ ID NO: 155106 - DNA, 15 bp, Homo sapiens
ttctagcttcagaca

SEQ ID NO: 155107 - DNA, 15 bp, Homo sapiens
tctagcttcagacac

SEQ ID NO: 155108 - DNA, 15 bp, Homo sapiens
ctagcttcagacaca

SEQ ID NO: 155109 - DNA, 15 bp, Homo sapiens
tagcttcagacacat

SEQ ID NO: 155110 - DNA, 15 bp, Homo sapiens
agcttcagacacatg

SEQ ID NO: 155111 - DNA, 15 bp, Homo sapiens
cttcagacacatgcc

SEQ ID NO: 155112 - DNA, 15 bp, Homo sapiens
ttcagacacatgcct

SEQ ID NO: 155113 - DNA, 15 bp, Homo sapiens
tcagacacatgcctt

SEQ ID NO: 155114 - DNA, 15 bp, Homo sapiens
cagacacatgccttc

SEQ ID NO: 155115 - DNA, 15 bp, Homo sapiens
agacacatgccttca

SEQ ID NO: 155116 - DNA, 15 bp, Homo sapiens
gacacatgccttcaa

SEQ ID NO: 155117 - DNA, 15 bp, Homo sapiens
acacatgccttcaag

SEQ ID NO: 155118 - DNA, 15 bp, Homo sapiens
cacatgccttcaaga

SEQ ID NO: 155119 - DNA, 15 bp, Homo sapiens
acatgccttcaagat

SEQ ID NO: 155120 - DNA, 15 bp, Homo sapiens
catgccttcaagata

SEQ ID NO: 155121 - DNA, 15 bp, Homo sapiens
atgccttcaagatag

SEQ ID NO: 155122 - DNA, 15 bp, Homo sapiens
tgccttcaagatagt

SEQ ID NO: 155123 - DNA, 15 bp, Homo sapiens
gccttcaagatagtt

SEQ ID NO: 155124 - DNA, 15 bp, Homo sapiens
ccttcaagatagttg

SEQ ID NO: 155125 - DNA, 15 bp, Homo sapiens
cttcaagatagttgt

SEQ ID NO: 155126 - DNA, 15 bp, Homo sapiens
ttcaagatagttgtt

SEQ ID NO: 155127 - DNA, 15 bp, Homo sapiens
tcaagatagttgttg

SEQ ID NO: 155128 - DNA, 15 bp, Homo sapiens
caagatagttgttga

SEQ ID NO: 155129 - DNA, 15 bp, Homo sapiens
aagatagttgttgaa

SEQ ID NO: 155130 - DNA, 15 bp, Homo sapiens
agatagttgttgaag

SEQ ID NO: 155131 - DNA, 15 bp, Homo sapiens
gatagttgttgaaga

SEQ ID NO: 155132 - DNA, 15 bp, Homo sapiens
atagttgttgaagac

SEQ ID NO: 155133 - DNA, 15 bp, Homo sapiens
tagttgttgaagaca

SEQ ID NO: 155134 - DNA, 15 bp, Homo sapiens
agttgttgaagacac

SEQ ID NO: 155135 - DNA, 15 bp, Homo sapiens
gttgttgaagacacc

SEQ ID NO: 155136 - DNA, 15 bp, Homo sapiens
ttgttgaagacacca

SEQ ID NO: 155137 - DNA, 15 bp, Homo sapiens
tgttgaagacaccag

SEQ ID NO: 155138 - DNA, 15 bp, Homo sapiens
gttgaagacaccaga
